United States Patent Application Publication US 2016/0078168 A1 - sequence listing, part 5

SEQ ID NO: 94070 - RNA, 56 nt, Homo sapiens
cggaagcgggggcaccagcaccccgcaccacagccagagggaagcccacagccggg

SEQ ID NO: 94071 - RNA, 82 nt, Homo sapiens
ccaccaacggacagcagaacgacgggcaacgaccaaacacgaggggagcaggggacccgagccccaaagacagaaaagcccc

SEQ ID NO: 94072 - RNA, 69 nt, Homo sapiens
gaacaagagcacaaacaacaaggccaaagagggcgaaaaaaaggagccaaggaggagggcgagcaccac

SEQ ID NO: 94073 - RNA, 47 nt, Homo sapiens
aagagccacaaagacaacacaggagcacccacgggagaccggggggc

SEQ ID NO: 94074 - RNA, 39 nt, Homo sapiens
cccgagagcggggacagcccccgcccgagacagccccgg

SEQ ID NO: 94075 - RNA, 75 nt, Homo sapiens
aaaaagcccaaacagacaggcacggaggaagcaggaaggaccacccaagggaagaaagaagagccacccaccaag

SEQ ID NO: 94076 - RNA, 58 nt, Homo sapiens
gaaacaaccacagcagagacgcagcagaggccccaggggcgccacagccgaggcagcc

SEQ ID NO: 94077 - RNA, 96 nt, Homo sapiens
cccggcccacaggggggggcaaacccgagagaacgggcagaagccccagaggagcccgaaacccccaggcgggcaggaaggagagccccagcgagg

SEQ ID NO: 94078 - RNA, 79 nt, Homo sapiens
aaacagggagaaacacagccagaagaccagcaccagacagcgaaaaagaggacccaaaaaagagagaaaaggccaaaga

SEQ ID NO: 94079 - RNA, 61 nt, Homo sapiens
ggacggaggaagaagcaaggggacaccagaagaagccaaaacagaagaggcaaagcccagc

SEQ ID NO: 94080 - RNA, 76 nt, Homo sapiens
ccgccgcgggcaaggccaccaccagacgaggaagacccggaaacaggggccacggagccacggccacggccgcaag

SEQ ID NO: 94081 - RNA, 39 nt, Homo sapiens
accccccacgaggcagcacagcagaggggcgggcaaagg

SEQ ID NO: 94082 - RNA, 76 nt, Homo sapiens
acgcgcgggccgcgagcggggcgacccgagccagacaccaggacagccaggagacccgccaaaaacaaaaaacagg

SEQ ID NO: 94083 - RNA, 77 nt, Homo sapiens
gggacagagcggagccggggggagcgggccgaccgcccgcggcgacggaggcagccagcaaaagacgagcacgaaac

SEQ ID NO: 94084 - RNA, 74 nt, Homo sapiens
cgacggaccaagcaccagaaacccgcaaagaagcgagccagcaaagaaacggggggacccacgagagaaccccc

SEQ ID NO: 94085 - RNA, 83 nt, Homo sapiens
cggcggccgagggggcacagaagcgggcggcggcgcgccgccccgggcggccgcgggcgggaagggccgggccggggcacggg

SEQ ID NO: 94086 - RNA, 74 nt, Homo sapiens
cagggcgaggcacggggagggacgaaggggccgaccccaggagacgcgcggcgccggaccgcgcccgggacaag

SEQ ID NO: 94087 - RNA, 73 nt, Homo sapiens
cgcccccaacgcgcgggggacccgcggacacaccgccccgagcccagagcaggggaccccaccggcgccggca

SEQ ID NO: 94088 - RNA, 85 nt, Homo sapiens
gcgcgcaagaggccacggcgggggcaccgagaagccccgaccgacggaaacaaaggccacccgggcaggaccagaaagagaacca

SEQ ID NO: 94089 - RNA, 80 nt, Homo sapiens
aggcccacccggccaccccccagggagccgaagccaagggacggccaccccaggccgaggagagaagaaggcaagcgacg

SEQ ID NO: 94090 - RNA, 97 nt, Homo sapiens
cccgggaaacacaccaggccgcagaagcaccaaggacaggccgcagcaccggcggacagcagggcggcgggccacgcaagggcggagggacaagcgg

SEQ ID NO: 94091 - RNA, 76 nt, Homo sapiens
accggggcggcccaccccccacgcaccgcacaacaagaggccggcggggcgacagcaggagccaaaaccgggcccc

SEQ ID NO: 94092 - RNA, 76 nt, Homo sapiens
aacagcagccaggaagaccgaggccaaaagaaaggaagaaaacccccaaaaagccaaaaggccaagacaagaagaa

SEQ ID NO: 94093 - RNA, 78 nt, Homo sapiens
acgcacagacaaaccaagcgccgacaacacccgaaccaagaccagacagggacgagaaacggaaaacaccaccccagc

SEQ ID NO: 94094 - RNA, 72 nt, Homo sapiens
gcaccagccgggagcaaaagcaccccgcaccaacgagaagagaaagaagacaagccaccagcaagccgccgg

SEQ ID NO: 94095 - RNA, 58 nt, Homo sapiens
cggccccgagacagaagccgagcccagcaagaccacgacacgagagcgccgccagccg

SEQ ID NO: 94096 - RNA, 55 nt, Homo sapiens
aaggcgccaggcgggaaaccggcccagcggcagcagagaaagggggaggcggacc

SEQ ID NO: 94097 - RNA, 77 nt, Homo sapiens
acagagaccgccaggcgccgaagaagcgagacagagggaaagaaccaccaccaacgagacacaaaaagaaaagagag

SEQ ID NO: 94098 - RNA, 77 nt, Homo sapiens
caaggagagaacgcgagggaagagccggcccaacagagaacggcaaacagcgagaaaccacagacacaaccaccgac

SEQ ID NO: 94099 - RNA, 77 nt, Homo sapiens
ccagcccaccccaaccaagacaccaaaagcaccaggaaaaacagcccacggccggccaagcacagcaaaacccagag

SEQ ID NO: 94100 - RNA, 77 nt, Homo sapiens
aggagcgcggaccggcagcgagcccaggcacaagggaggcgacagagacagcagcaggaccagccaaggaagcaaca

SEQ ID NO: 94101 - RNA, 77 nt, Homo sapiens
cgagaccagccgcgaacacccacgccgggaaccccaccaaggaaagccggcacccagagagaacacgaggaagacca

SEQ ID NO: 94102 - RNA, 52 nt, Homo sapiens
agagggcccgggaagagagcgaggagacaagggcgaaaaaacgagaaagaaa

SEQ ID NO: 94103 - RNA, 74 nt, Homo sapiens
gacagccggcacagcgggagagggacggaccagcaggggagccgccaccaaaagcagacggaaaacccacgggg

SEQ ID NO: 94104 - RNA, 84 nt, Homo sapiens
gcgggagcggccggaggagccaggacgcagcccggcggacgccggcacagaacagcccgggggcgcaccaggcacaggcccgag

SEQ ID NO: 94105 - RNA, 62 nt, Homo sapiens
caggacgcggggcaaagggaccacggcaccgccccagcaaggagcagggacaagacaggaag

SEQ ID NO: 94106 - RNA, 56 nt, Homo sapiens
gaagaaagccaacgaaccacaacagggcagcccaaggaccaagggagaagagaccc

SEQ ID NO: 94107 - RNA, 80 nt, Homo sapiens
gcacggacggacccagcacgaggaggcgcgaggagagcgcggccaggaacaacagaagagaaaaagaaaagacccagacc

SEQ ID NO: 94108 - RNA, 80 nt, Homo sapiens
cagagacccagcaacgggcagcgggcgcaggaccccgccccacgcccagccagaggagaccgaagaagacggagaccaaa

SEQ ID NO: 94109 - RNA, 81 nt, Homo sapiens
gagaaaaccccgcccgcagcgacacaccaagcggaggggacgccacgcaacgccgaaggaggggcccccccacagagaaca

SEQ ID NO: 94110 - RNA, 72 nt, Homo sapiens
ggaggaagaccagaggaagcgacagagagaggcaggacagcaggcaaggagacagacaggaacagcaccgga

SEQ ID NO: 94111 - RNA, 63 nt, Homo sapiens
cgcccgggcagggcccaccccgcgcccgacaggcaagaagaaacacacgcgcggccccgacgc

SEQ ID NO: 94112 - RNA, 72 nt, Homo sapiens
cccacaggacccgccaccaaagggggggaggagggacaacacacaacgcaggcgcacagccgccccaacaac

SEQ ID NO: 94113 - RNA, 70 nt, Homo sapiens
gagcccccggaccacacagcgcccaggccagagaaggggaaggaggggcagcgagcaacggaaagcccaa

SEQ ID NO: 94114 - RNA, 73 nt, Homo sapiens
ccgagccgccgccgcgccggagccccacagcagcaagcgcagaaccagacaggcagaaggagcaaagccgaga

SEQ ID NO: 94115 - RNA, 72 nt, Homo sapiens
agccggggggcacagccggaggcagagcagccagaccggccagaaaggcacaaccccgaacagcagaagcac

SEQ ID NO: 94116 - RNA, 51 nt, Homo sapiens
caaccagggcagcgccgacacgagaggaggcgcggcaacggaggacgaggc

SEQ ID NO: 94117 - RNA, 76 nt, Homo sapiens
ccggcgagaggagcgggcgcacgggaggggaacgggccgaacgcaggaagagacccagacgaagagcgcacagaaa

SEQ ID NO: 94118 - RNA, 76 nt, Homo sapiens
aggcccccacgacaaggacaagcccaaccagggaccaggccaaaaccagacgccacgccccacgggccccacgccc

SEQ ID NO: 94119 - RNA, 71 nt, Homo sapiens
ggggacagagcaacaagccaaggaagagccgcgggcagggaaagcagccacagacgccgaaaaccagccac

SEQ ID NO: 94120 - RNA, 62 nt, Homo sapiens
caagccacaaggaaggacgccgccagccaccggcgcgaagccagaccagaccagcaggggca

SEQ ID NO: 94121 - RNA, 88 nt, Homo sapiens
aaagcccgcgcgccgcgcacccgcgccagcaccacgcccgcgccgcgccgccgccaccagcccaagagaaagaccgggaaaaccggag

SEQ ID NO: 94122 - RNA, 72 nt, Homo sapiens
caaaacggaaggccaggagcaagcagcaggcccgagagagaaagggaaagaaggagcggagcagaacaagga

SEQ ID NO: 94123 - RNA, 70 nt, Homo sapiens
ccaagaagaccacagagggacccggacaaccagaggcagccagcagggggaggagaaggaccaagaacca

SEQ ID NO: 94124 - RNA, 75 nt, Homo sapiens
ggcggcgccggcgaggaggcgcccggagcggccgccccagcgccccccaaccgggacaaaggaaccgagccggcc

SEQ ID NO: 94125 - RNA, 53 nt, Homo sapiens
cgaaagaggaaaccagcagagcagagggccccgccagggacgcagagcgcaac

SEQ ID NO: 94126 - RNA, 38 nt, Homo sapiens
gaagggccgaggcccgcaaaaccagcaggacaggcaca

SEQ ID NO: 94127 - RNA, 55 nt, Homo sapiens
gcaacaccgcacaggccagccggcaaaaacccagacaccaagaaggaaggccccc

SEQ ID NO: 94128 - RNA, 82 nt, Homo sapiens
gggcgagccggcgcggggcggcgcgggcggaggcggcggagcgcgagagccgagcggaccagggacaggcccaaggcaagcc

SEQ ID NO: 94129 - RNA, 73 nt, Homo sapiens
cccgacaagaagcacgaacagcaggccaaagaccagagaggacagaaaaaggcgagcacaaagacaaagagag

SEQ ID NO: 94130 - RNA, 76 nt, Homo sapiens
gaccgcgcagaaccagggcggcggccagcgccacgcccccaccaggcggggaagagccaagacccaaacacaacca

SEQ ID NO: 94131 - RNA, 60 nt, Homo sapiens
gaaagaagagaagcacaaagccacagcacggacgggaacacaggaaacaagcaagcccaa

SEQ ID NO: 94132 - RNA, 104 nt, Homo sapiens
gcgcccggagcacagaaacagcccaggcgggagagacacagccacaccagcggccccaggacgggggcaggggccacccccggcagcagcaccgagaaaagcag

SEQ ID NO: 94133 - RNA, 80 nt, Homo sapiens
gcaccgaaggggaagagcaagagcagcagggagcgagagaggaacgaggggcacagaaaccagaaaaacggagcgcgcaa

SEQ ID NO: 94134 - RNA, 61 nt, Homo sapiens
cgcacacagaccacaaggcgagggaaaaagcgggaggaggcgggccagaacacgaccgggg

SEQ ID NO: 94135 - RNA, 80 nt, Homo sapiens
gcaccggcggccgaagcgccccccgagaggaagcacagcgcacgcgacgcaccagaaacggaccgaggacagacaccaac

SEQ ID NO: 94136 - RNA, 77 nt, Homo sapiens
aaaaagccccagaccagagacagaagcagaggacgccagagccggccagccgcagagggaccgcccccggacaaggc

SEQ ID NO: 94137 - RNA, 71 nt, Homo sapiens
ggcaagcaccagagagggacgggcagcacgagaaaggaacgagacagcaagggcagaacgagagcaagaag

SEQ ID NO: 94138 - RNA, 63 nt, Homo sapiens
cgcaagcccagcacaccccgacggccgcgcgcgcgcacacacaaaccgaaacaaggacccccc

SEQ ID NO: 94139 - RNA, 55 nt, Homo sapiens
gagccgcagcacgagccaaaccgaggggacgggacgaggaaccagcacccggaaa

SEQ ID NO: 94140 - RNA, 62 nt, Homo sapiens
acaaaagcgaaagggcacaccacagcgagaaaagcagaaaaaacacggaacaaaaaagagaa

SEQ ID NO: 94141 - RNA, 77 nt, Homo sapiens
ccgccggaacaccgcagagaaaaagggacggcagcgaaggacagaaaacgggccccagacacaagccccaccaagag

SEQ ID NO: 94142 - RNA, 82 nt, Homo sapiens
ccaccgaaaacaaagagccgcaacacgagcccgcccaccgagagcacagaccaggaggaaaaagcagaaaaggaaagagcaa

SEQ ID NO: 94143 - RNA, 74 nt, Homo sapiens
gcagaaacacaggaccccccccaacgagaaagaccagggacacagagagccacggcccaccaacgggacagccc

SEQ ID NO: 94144 - RNA, 67 nt, Homo sapiens
gagaacagaggaccaacaggcaggggcaagacagcagaccacagcccggcaggcccaaaaacccaaa

SEQ ID NO: 94145 - RNA, 84 nt, Homo sapiens
agcaaggacccaccaggccgaagccagccggagcagcggcacagggaggaacgacggaacaagggagaagcggagcaaggaagc

SEQ ID NO: 94146 - RNA, 57 nt, Homo sapiens
cagaaacaccaagagccagcaccaggggagcgaagagccaagaggcccgagcgcagc

SEQ ID NO: 94147 - RNA, 75 nt, Homo sapiens
cgccgcacccacccgaacagcaaccgccgaagaaaaggggaagaaggaccgggaaaaggccccagaagaggacgc

SEQ ID NO: 94148 - RNA, 81 nt, Homo sapiens
gccgcggaggcggccagacggggaagcagggaaaggccggagagaggaagcggcccggggcggccagcgaagagacacaaa

SEQ ID NO: 94149 - RNA, 74 nt, Homo sapiens
gggcaaggaacaggcgagaaacagggcgagaaaacaaaaaagcagaaaagggccagaaaaagaaaaagggaaag

SEQ ID NO: 94150 - RNA, 83 nt, Homo sapiens
ggaaccgggaggcgacgcacacgagcggaggcgaaggaaccgacagaagccaggaccccagagagggccaagcccaagaacaa

SEQ ID NO: 94151 - RNA, 69 nt, Homo sapiens
gaaccaagaccgaggcgaagcaagcacacaacaaacagaacgcaaaggggcaaagaaaaaggagagaaa

SEQ ID NO: 94152 - RNA, 69 nt, Homo sapiens
aggcgacaggagcagagggaaggcgacggggccagcccaaggcaagaaaaaaagaccaggagcggcagc

SEQ ID NO: 94153 - RNA, 78 nt, Homo sapiens
cgccgcggcgcgcgccggagagggagggcaccgcgcgcgagacaccgccacgcagacaacgagacgcgcgcgacacca

SEQ ID NO: 94154 - RNA, 67 nt, Homo sapiens
gcacagagcaaaccggggaaaagagccaaagcagccacacaacagcaagaagaacaagccaggagca

SEQ ID NO: 94155 - RNA, 70 nt, Homo sapiens
ggacaacagcaaacagcaccaaccacgacaaacgggccaaagaagaggccgagcacaggaaaggccgcca

SEQ ID NO: 94156 - RNA, 70 nt, Homo sapiens
cagaaccacgccaccacgcgcagggcacaccagggggggcgaccgaggaaaaaaagaaccaagagaaaag

SEQ ID NO: 94157 - RNA, 75 nt, Homo sapiens
aagaacggcgccacaagcccagcgaaccgccagggagccagaagcaggggcgagccgcgccgccggcgaagaccc

SEQ ID NO: 94158 - RNA, 78 nt, Homo sapiens
ggcgaggcggcccagcggcggcagggaggccaacagacccaacccagaaggcaccaaacggagggggaacaggcggca

SEQ ID NO: 94159 - RNA, 58 nt, Homo sapiens
cacaagccccaaagaagcgaggcgcgggacagcaaaccaggcgagacagcaggagcac

SEQ ID NO: 94160 - RNA, 76 nt, Homo sapiens
gaggaagaaacccggaagaggaagaggaaagcaaaggagcagggaggccccagaggaaaggcaagggcagaaaaga

SEQ ID NO: 94161 - RNA, 82 nt, Homo sapiens
ccgaaggacccccacaacgagcgcccggaggagccagcacgagccgccgccacgccgccccaccgcgcgagcccaggcaaga

SEQ ID NO: 94162 - RNA, 38 nt, Homo sapiens
agcccagaaccagcaggggccgcccaaggacgacgcag

SEQ ID NO: 94163 - RNA, 56 nt, Homo sapiens
gcgaaggcgcgcaccggaagcaccagcgaggaagagagcgaccaaacccccacaac

SEQ ID NO: 94164 - RNA, 37 nt, Homo sapiens
gagggccaaggggccagagaccgggaaaaagacaggg

SEQ ID NO: 94165 - RNA, 80 nt, Homo sapiens
ccaacgcgacggaaaggcacgaaagccagacaaagagggcagcaaaagcgaacaaaagacaaaagagccaggaccccaac

SEQ ID NO: 94166 - RNA, 69 nt, Homo sapiens
gaagacaaagcaaccaggcaacggaacgaaggcaacgaggagggcagaagacagaacgccggcaggaac

SEQ ID NO: 94167 - RNA, 36 nt, Homo sapiens
ccacaacagcaaagacccgcgcccaacggccaccgc

SEQ ID NO: 94168 - RNA, 80 nt, Homo sapiens
cagacgcggcagcgaacgggggcgaacggggcgagccggaggagcacccaaccccgcgaagacgaccccgacgcaggcca

SEQ ID NO: 94169 - RNA, 53 nt, Homo sapiens
acgccaccagcgcggcacggagaaaacgaaggaaggaggacccgaggagagag

SEQ ID NO: 94170 - RNA, 76 nt, Homo sapiens
aaggagagcccaagccggaacagccaacaaagagaggacaccaagcagaagccagcccccaggagcagacaggacc

SEQ ID NO: 94171 - RNA, 42 nt, Homo sapiens
gcacccccacagggcagaaggaggcgggaggagccccaggac

SEQ ID NO: 94172 - RNA, 72 nt, Homo sapiens
gcgcccggcgccggcccgccccggcgggaagagaccgggagccggcaagagccgacggaaacacgcgcgcaa

SEQ ID NO: 94173 - RNA, 59 nt, Homo sapiens
agcaacagcgagaccggggcgaggaccccgagccagccaccccaacccaagccagcgaa

SEQ ID NO: 94174 - RNA, 67 nt, Homo sapiens
agaaggccaaagcaggaaccaggacacagaaagcaagcccggagcacacaaggcgaaagaaaaggca

SEQ ID NO: 94175 - RNA, 78 nt, Homo sapiens
aaggagcagccaggccccagacgcgcacggagcagaaaacaaggaggaggcgagggaagagcccggagcaggaggaga

SEQ ID NO: 94176 - RNA, 74 nt, Homo sapiens
cccgaagcgggaacagacggcccgcccaagcggaggcagggcaacaggccacggcaaccgccccgggccaagcc

SEQ ID NO: 94177 - RNA, 77 nt, Homo sapiens
ggagaggagcgggaggaccccgccaggggcgcgacgagagaccgcgcacacgggcccagaagcagcccagaccccgc

SEQ ID NO: 94178 - RNA, 83 nt, Homo sapiens
cagggagccaccaaccagacagaagacgaccggcggggcacgggaaggcggccacggagaacagaagagaggaaggcgaaaca

SEQ ID NO: 94179 - RNA, 79 nt, Homo sapiens
ggcgccgcgcgcccgcgccacccggggccgccgcgcaggagcccccggagcggcgccagccggaagcccgagggcagcg

SEQ ID NO: 94180 - RNA, 52 nt, Homo sapiens
cagagcggaaccaaaggacaagggaaccgagagacacaggggcacaagacgg

SEQ ID NO: 94181 - RNA, 60 nt, Homo sapiens
aagcggagcccaacgaaaccgaacagggaccaagaaaggcccagggaccaaagcccggac

SEQ ID NO: 94182 - RNA, 50 nt, Homo sapiens
gacaccgcccgaacacacaccgacagagaagaacgagagccaaaggaccg

SEQ ID NO: 94183 - RNA, 76 nt, Homo sapiens
gaccaccccacagaaacggcgcccgaagcggaacaccagcgagccgccgagaagcggagcgaaagagcagagggag

SEQ ID NO: 94184 - RNA, 76 nt, Homo sapiens
ggcgccgcgcacgcgcgccagaccaaaacgaagaagacgagccaaacccaaaaaggaaggggggggagggcgcacc

SEQ ID NO: 94185 - RNA, 68 nt, Homo sapiens
caaggagaaaacaaaggagcaagaaacacagaagcagcccgagccaaaaagcaccacccccaaccggg

SEQ ID NO: 94186 - RNA, 84 nt, Homo sapiens
gacagaagaggaagagacaaggccccgacaagcgaaggaggcgagacccgagcagaggccgagaggcgggcaaagggagaaaac

SEQ ID NO: 94187 - RNA, 74 nt, Homo sapiens
agggccccaagggcagacagcggacagaaggggaggcccacgcggaccggcagcgccaccggaccaccagacaa

SEQ ID NO: 94188 - RNA, 109 nt, Homo sapiens
cccagcagaccagaccagaagcgcccccgggccgaagggcgcagcgcaccccaaccaacccgccacaagaccaaaaaaaaaagagccaacagggagcggcggacgggcc

SEQ ID NO: 94189 - RNA, 75 nt, Homo sapiens
gagagaagaaccaaagaagcaaaacacgagagacgaggacgcgcacaggaaaggacgcggaacaagcaggcagcc

SEQ ID NO: 94190 - RNA, 53 nt, Homo sapiens
aaaagaaaaaccagcgaagcacagcagcaagcgcagaaccagacaggcagaag

SEQ ID NO: 94191 - RNA, 66 nt, Homo sapiens
gaagcaagggaaacacagcaccccaaaacagcaccccgagcccggagaggacccacgcggacccgg

SEQ ID NO: 94192 - RNA, 76 nt, Homo sapiens
aacaaaaacacacccagggaggcaagcagagcgcggccaagaacagaggaagggggaacacacacaacgacggagc

SEQ ID NO: 94193 - RNA, 78 nt, Homo sapiens
ggccgccgcacagacagcgagacacccaccagaagagggagaagcggagacaacaacggcagccgacccccacaaaac

SEQ ID NO: 94194 - RNA, 77 nt, Homo sapiens
cgacaagagaaagaaaaacaagaacgaggaacacgaacaggaacccgcaggcccaagccggcggcacgacagcaaaa

SEQ ID NO: 94195 - RNA, 34 nt, Homo sapiens
ccaggacaaaaacaacccagaaaagaaaaggcca

SEQ ID NO: 94196 - RNA, 71 nt, Homo sapiens
aaaaacaaaggggcaggaaagggaagaaggagaacaaaagaaaagggcgaaagggggaaaagaaaacgcaa

SEQ ID NO: 94197 - RNA, 68 nt, Homo sapiens
cccggaggcggcgcagcagcaccggccacggggagacacacgggaagaaaagaagaacgcccgcaacc

SEQ ID NO: 94198 - RNA, 78 nt, Homo sapiens
aaggcaccgacaggaagaaacgaaccgcgggggcaggcagacaagaccggagcccgcgggaggggacccgggagacgc

SEQ ID NO: 94199 - RNA, 80 nt, Homo sapiens
gccgggcggcgccgccccaccggacccgcagaagccaaggcgcgagaaggcaccggggcaaacggcacacgaagcacgga

SEQ ID NO: 94200 - RNA, 63 nt, Homo sapiens
accagacaacgccccgggaccggagcagaacccccgcagagaaagcaacccaccagaacagaa

SEQ ID NO: 94201 - RNA, 62 nt, Homo sapiens
aggagggggcgagaaggcgggaagccgaaggcagccacaggggagccgccaccaaaagcaga

SEQ ID NO: 94202 - RNA, 56 nt, Homo sapiens
ggaaaacgaagaaggcaaaaccaagaggaaaagagagagaggaccagaaccagacc

SEQ ID NO: 94203 - RNA, 37 nt, Homo sapiens
aaaagaacccccaaaaggaaagacgcgccagcaggca

SEQ ID NO: 94204 - RNA, 72 nt, Homo sapiens
ccaccagccgcaccaaggagacaggacgaagcccaaaccacaagccacaaaaggcagcgacagagcgcgccg

SEQ ID NO: 94205 - RNA, 75 nt, Homo sapiens
ggaggaaaggacaagcaggccacgagaaccgaagagcgaacaaagaagaaagaaacagaaaaggaaccaggggca

SEQ ID NO: 94206 - RNA, 52 nt, Homo sapiens
acgaaacacgaaagggcaggacggaaggaagggcccagaaacccacacgaag

SEQ ID NO: 94207 - RNA, 87 nt, Homo sapiens
aagggcacgggaagaccggaggggacgaagaacggcagaagaggcagaagggaggagagaaagagagacacagagagacagagagcc

SEQ ID NO: 94208 - RNA, 78 nt, Homo sapiens
gcacaggagggagagaggaccccgggacacgaaagccaggaaagggcgccagggaaggaccgcacacaagccgcaccg

SEQ ID NO: 94209 - RNA, 67 nt, Homo sapiens
cgaccaaggccacccacggaaacacgggcaaccgggggacagccagcacaaaaaaacaaaacgagaa

SEQ ID NO: 94210 - RNA, 62 nt, Homo sapiens
gcgacgaaaagcgggcgccaacaagaaccgagcgaaaagaaaccgaaagccagggggaaaca

SEQ ID NO: 94211 - RNA, 80 nt, Homo sapiens
gcccgggccccagccggcgcggggagaaggaggggcaggaaagcagcgggaccaggaaacacagaaagggcgacaagaaa

SEQ ID NO: 94212 - RNA, 80 nt, Homo sapiens
ggaccccacgcggggggggccaagagacagggcacaccaaacccacggcacccgccggcgccccccggcacaacccgcgg

SEQ ID NO: 94213 - RNA, 53 nt, Homo sapiens
cagacccagcccacgaaaagaggcacacccagaagccacaggagaagcaagag

SEQ ID NO: 94214 - RNA, 58 nt, Homo sapiens
ggggaccgcgcgacaggccggggaaggagaacccgcaacacaaaccccaccaacaaag

SEQ ID NO: 94215 - RNA, 36 nt, Homo sapiens
cgcggccccaaggcgggagcgaggaagcaagaaagc

SEQ ID NO: 94216 - RNA, 88 nt, Homo sapiens
acacaggaacccagagggccacagcaggacacgccgcgcgaaagaggggcagaaaggagcgaccggacggcaccgaaagcgaaggaag

SEQ ID NO: 94217 - RNA, 83 nt, Homo sapiens
ccagccagccgcaccagacgacagcaggccggaggcagccagcgccaagagaggagggcgcggggccggggcggagcagcgcg

SEQ ID NO: 94218 - RNA, 84 nt, Homo sapiens
caggagccgacgacccggaccaagaaggggaggcccgcggcagaacaaaaccagccaagcagaggagaaaaagacagcacccca

SEQ ID NO: 94219 - RNA, 72 nt, Homo sapiens
cagagcccggggacggcgaggccccagaccacacgcccccggaaagagccgcccgagagacaaacccccacc

SEQ ID NO: 94220 - RNA, 78 nt, Homo sapiens
aaaggcgacgcacacaacccccgaaagcggaagcagagccccgggccgggaaggggaaacggccacgcaggaaccaca

SEQ ID NO: 94221 - RNA, 87 nt, Homo sapiens
cgggacgcgggcgccaggaccggccgaacgcagagaccacgccacaacgacagcaacccccggacgggggccgacggaacaaggcca

SEQ ID NO: 94222 - RNA, 59 nt, Homo sapiens
agacagacgcgagcgacaagagaaggaggaaagggccagccggaaggaaagaccagcgc

SEQ ID NO: 94223 - RNA, 77 nt, Homo sapiens
ggagaggcggagccacaagcacgcggaagagccagccgccagacccaacccagcaaacacggcggagaggaacaagg

SEQ ID NO: 94224 - RNA, 65 nt, Homo sapiens
gaacaacaaaggagaacggagaagagagagaggacccagagaagaagaagcagaaaaggggaaca

SEQ ID NO: 94225 - RNA, 71 nt, Homo sapiens
aaaggaaagcaagacaccgaggcacaaaggagcacaaagggaccaaggcggagacagcgagacaaggcgga

SEQ ID NO: 94226 - RNA, 66 nt, Homo sapiens
aagcggccgaaacagaaaacaagagaccacagaagagagcgacagggaaagagacgacacaaaagg

SEQ ID NO: 94227 - RNA, 72 nt, Homo sapiens
gcgcccggaggcgcagcgccaagagaaggaaaaccaggagaaaaggaacgagaccccggggaaagaggagaa

SEQ ID NO: 94228 - RNA, 82 nt, Homo sapiens
gcaaggaggccccagcggaccgaacagggcggcgacggcggcgcgaggaccgaccgggcccgcggacgaagaaggcaccccc

SEQ ID NO: 94229 - RNA, 70 nt, Homo sapiens
cgcagggcgcccccgcaggacggaggaaacagcgccaaagcaagggacggggccaaggcaaccgggagac

SEQ ID NO: 94230 - RNA, 83 nt, Homo sapiens
cgcggacgccggcccgcgcgcgcaccccgcggacgccacagcgcgaggcagcacggcaggagacgaggagaggacagcaggac

SEQ ID NO: 94231 - RNA, 88 nt, Homo sapiens
gagcaagaggcggacaccccggacgaaccacaggaagcgcggggcggcggcgaaaggacgcgcgagcaaggaaccccgggccccgcca

SEQ ID NO: 94232 - RNA, 69 nt, Homo sapiens
ccgagaagcggggcaccacgaaggaccgaagaggaagaaacaacacgacccgaacaccaagcaggccac

SEQ ID NO: 94233 - RNA, 77 nt, Homo sapiens
aagggagggggacagaccaaagaggggaacaacggaccggccagagagagacaagaacaaccaaacagaaacaagaa

SEQ ID NO: 94234 - RNA, 75 nt, Homo sapiens
cggcaggagagggcccgacaacgaagaggcaacccaacaacagccaccgggacacccgcaggccggggcagacac

SEQ ID NO: 94235 - RNA, 72 nt, Homo sapiens
agaggcacggacgggcccacccggggggggagggccgaggaaacggcagcgaaacagaccacccccaaacgg

SEQ ID NO: 94236 - RNA, 63 nt, Homo sapiens
gaaaccacagccaaaaaccagcagaacaggccacggcacggcaaggagagaaacggagggccg

SEQ ID NO: 94237 - RNA, 72 nt, Homo sapiens
cgacgggccaagggacagccggcggacaccccaccaggagacgcaggagggaaaagccgaacggggacgagg

SEQ ID NO: 94238 - RNA, 68 nt, Homo sapiens
gcaaaggagcaagaaaccagacccggaaacgcaggggcgacaccacggcaaaagaaagaagacagggc

SEQ ID NO: 94239 - RNA, 83 nt, Homo sapiens
ggagagcgccacgcgccagcaccccgcacgcagcagcgaccagaagcaaggaccaccacgagcgaggggagcgaccaccccca

SEQ ID NO: 94240 - RNA, 78 nt, Homo sapiens
aaagagagacgacacaaagccagcaaccacagagggcgagcagagagagagcaggagacggagggcagaggcagggag

SEQ ID NO: 94241 - RNA, 89 nt, Homo sapiens
gagagcgcgcggcggacgcgcccgggacgcgcggcggcaccgggaggccgggccgagcgcacgcagcaacgcagagagcaaaacccaga

SEQ ID NO: 94242 - RNA, 66 nt, Homo sapiens
gcggcgcggcggcgacggagcaccggcggcggcagggcgagaggcagagacagaccagaagacggc

SEQ ID NO: 94243 - RNA, 76 nt, Homo sapiens
cccacgaccgccagcccgcacaggcagacaaccccggggacaggaaacaaagcaggaggaggaggcccacacgcag

SEQ ID NO: 94244 - RNA, 84 nt, Homo sapiens
agaaacagaaacgagggaaacagaaaaccggcgcagagccaaaaggaaccgaggaaaagcaggggaaacgacgcagcggagaga

SEQ ID NO: 94245 - RNA, 77 nt, Homo sapiens
gccgagccggggaagagccacgccccgcccagaccggaagaacgggaacccccgcagaggagccaccacacccaggc

SEQ ID NO: 94246 - RNA, 79 nt, Homo sapiens
ggcaccggcgagccgggacgcgcggaacaaggaaacccaccgagacgcagagagaccgccccagagaccgacagccaag

SEQ ID NO: 94247 - RNA, 80 nt, Homo sapiens
cagccccggcgccccgggcccacgcgaagccgaggccccgcaacggcaagggggagaggcaccagcaacagaccaaccgc

SEQ ID NO: 94248 - RNA, 77 nt, Homo sapiens
gcgcacgcccggagagaggcagaaccacagagaggcacagccgccggcccccccggcccgagagccccggccgccaa

SEQ ID NO: 94249 - RNA, 80 nt, Homo sapiens
cggagcggcgcgggcgaccagagcagggcgagagccacacccgggccagccggcaccgccggggacacgcgcccgaaaga

SEQ ID NO: 94250 - RNA, 73 nt, Homo sapiens
acaggcaaacagagcaagccgggagcccaccacacaggagcagacaggacgagcagacaggaaacacaggcag

SEQ ID NO: 94251 - RNA, 83 nt, Homo sapiens
cccggcccccgaagcccaccggccccaacgcacagccagggagccaagcgccgcccggccgaaaacaaagagggaaaacggag

SEQ ID NO: 94252 - RNA, 77 nt, Homo sapiens
ccacagaaagaggcggagcaagagaaacacacacagcagccaagacacaggaccggagaaacccgccaccacccagg

SEQ ID NO: 94253 - RNA, 66 nt, Homo sapiens
ccacacacgaagagagggcacagaccaggaggacgcccaaacggaacagcgagacacgggacaaaa

SEQ ID NO: 94254 - RNA, 82 nt, Homo sapiens
ggagaagaagaagcagcggcagacagggcacgacggggggcgcaggaaagaggagacccgcagcaggggccacagccacaca

SEQ ID NO: 94255 - RNA, 80 nt, Homo sapiens
cccaagaaacgggcagccaggcccccacagcccgcagagagcgaccaaacccccacaacaaggacaaagggacccaagga

SEQ ID NO: 94256 - RNA, 58 nt, Homo sapiens
gaccacgagggacagacccgaggcccacaggccccccaggccacccaggaccagcggc

SEQ ID NO: 94257 - RNA, 75 nt, Homo sapiens
gggagccgcaagaggaggcaacgaaaaacgacaccaaccaaccggagaggggggaaaaacaaaaacaaaccagaa

SEQ ID NO: 94258 - RNA, 72 nt, Homo sapiens
agagacacccaacaccgcaggcaaaaaggagaagcaagagcaccccgagggcagcccgcagaccgggaccca

SEQ ID NO: 94259 - RNA, 43 nt, Homo sapiens
agaaccgcggaaacaacgccgcaagagcaggaccaccaccagc

SEQ ID NO: 94260 - RNA, 70 nt, Homo sapiens
gacacccaccccagaggaacagagagagcaaaacgacgaaggagccaagaggaccgggacccaaacaggg

SEQ ID NO: 94261 - RNA, 80 nt, Homo sapiens
cggggccgccggggccgccaggagcccgaccgggagaggacaagaccacgagccagaagacagacacccggaagggcggg

SEQ ID NO: 94262 - RNA, 57 nt, Homo sapiens
gacaaaaggaagagaagacaagaacaagagcaaacggcgaaaccggcacagaagcac

SEQ ID NO: 94263 - RNA, 83 nt, Homo sapiens
ccaagccccgcggggaagaacggcacgcggacgccaacgagcccaggagacaggaagcaaccagagcaaacgccaccagcagc

SEQ ID NO: 94264 - RNA, 75 nt, Homo sapiens
agacccagaaaagggcaccaacacagccccaacagccaaggacgaggagaacacagagccagagaaaaaaaacac

SEQ ID NO: 94265 - RNA, 70 nt, Homo sapiens
acgccgcaccggacccgcgcggcgggacggccggccgggaaggccggcgacgacagggcgccacaagaca

SEQ ID NO: 94266 - RNA, 75 nt, Homo sapiens
cacaccaccgggccagaacagacccaaggaagaagggcacgcaggaagaaacccgagaggagcaggagcaaccga

SEQ ID NO: 94267 - RNA, 78 nt, Homo sapiens
aacaagagcaccccagaagacagagagccgcgccaaggaagaagacggcacgggacccccagcacaggcagcaggccg

SEQ ID NO: 94268 - RNA, 81 nt, Homo sapiens
agcaccaccagcaccagagcaccgccacaggacgggagcacccgggacgccagaaagccagcagggccgacgggccgcaag

SEQ ID NO: 94269 - RNA, 77 nt, Homo sapiens
cgccccaagacaccagggagcagggcgccagccggccagaggaggaaagaaaacaagccacccagacaagaggaaag

SEQ ID NO: 94270 - RNA, 72 nt, Homo sapiens
ggcaacgcgggacaaaacaaggacccagcaaacggagaccaacgaaggcagagggggcgagggaggaaaggg

SEQ ID NO: 94271 - RNA, 51 nt, Homo sapiens
gaagcaacagggacggcaaaggcgcaacggccccaacgccacccacgcgac

SEQ ID NO: 94272 - RNA, 114 nt, Homo sapiens
ccaagaccgggcggaacaccccccaggcccacagccgggagaccgagagcccaggaaccaaccgggagccccccaagagacccaggggaagacccaaaggcagcaaaaacaaga

SEQ ID NO: 94273 - RNA, 77 nt, Homo sapiens
caggggcccgggcaaagggcggccaagggcagcgcccgccagaaagcaccgggaggaaagagagccacacgaagaac

SEQ ID NO: 94274 - RNA, 74 nt, Homo sapiens
caaaggaacacaacaaaagaaagggcagcaaccaagaagaccagggggggcgccacaggagccgcagaagcaaa

SEQ ID NO: 94275 - RNA, 52 nt, Homo sapiens
gacggaagagcacgagaacaaggaagccccccagaaaagaggcgaggcacca

SEQ ID NO: 94276 - RNA, 56 nt, Homo sapiens
ccgcagaaacaaacgcagccaaggcaaaaaaccagggaaaaaaacaacaagaaacc

SEQ ID NO: 94277 - RNA, 77 nt, Homo sapiens
gccacgccgccagaccgcgcgccaagccgcacgcaaccaccgcccggccacaccagggcaaaagcagaccggaaaac

SEQ ID NO: 94278 - RNA, 71 nt, Homo sapiens
accaccaacagacagcggcccccagaagcacggaaaagcccccggccaaagggggcgaggaagagacaggc

SEQ ID NO: 94279 - RNA, 71 nt, Homo sapiens
agaaagaccacaagaccaacccagaagggcagagccggaggagagggcacggaaacaaagacggggagcag

SEQ ID NO: 94280 - RNA, 79 nt, Homo sapiens
acagaacaacagaagaggagagaggaacccgaagaagaaaggacgacagccagagagaaacccgcgccagagagccaag

SEQ ID NO: 94281 - RNA, 87 nt, Homo sapiens
cggaagaacacgacccacagccacaacagaccgcgcagccgggaacggaaggccaggaaaggggcggcgcacagccaaggaacaggc

SEQ ID NO: 94282 - RNA, 77 nt, Homo sapiens
ccgaaggggcgcgcggccccgccgccccagcccgccccccgggccggcccagcaggagaaaccacaacgaaagaggg

SEQ ID NO: 94283 - RNA, 81 nt, Homo sapiens
cgcgcgcggccgagaccggccgcagcgccgccgccgccgccagggaaagacaaggagccgggccgagaaaccgaaccagag

SEQ ID NO: 94284 - RNA, 49 nt, Homo sapiens
cacagcgcgccaagcgaacggagagccagccgggagagcgggccgcacg

SEQ ID NO: 94285 - RNA, 78 nt, Homo sapiens
ggacaccgacgcgccacgcggagcccgggcaagccagcgacgagacaccagaggaacacacagcgagaggaaggacca

SEQ ID NO: 94286 - RNA, 84 nt, Homo sapiens
gacagcagccggccagccggggggcacgcccgcccgggccggaagcaccgaagaacagcccgccacaccgaagccgacacagga

SEQ ID NO: 94287 - RNA, 49 nt, Homo sapiens
ggagaaggaccaagaaccagggccggacaccagccccacaccagccagc

SEQ ID NO: 94288 - RNA, 78 nt, Homo sapiens
cgcccagcacacacccaaagagccaccgcaaagcagacggcagaaaaaggccagcggggaaacagagcacaggagaga

SEQ ID NO: 94289 - RNA, 65 nt, Homo sapiens
gcccgcgcgccgagggcgaggcggacgcgcggcgcgcaggagcgagaaggaaaggaaacgaaaag

SEQ ID NO: 94290 - RNA, 76 nt, Homo sapiens
gcaaagcgcggcgagcagagaaaccagcgcagccaagcacggagagagacaacgaaccaggggaccggcaggccca

SEQ ID NO: 94291 - RNA, 80 nt, Homo sapiens
ccgcgccccccgcccccccaccgacacagcccagccgggagcgagcacaaacgacacacgcaaaccacaaagcccagcaa

SEQ ID NO: 94292 - RNA, 79 nt, Homo sapiens
cccaacggcggcgagcccccaaggcgcagcgggggaacagcagcggcaagggagggccaccacgggccggacgaggaca

SEQ ID NO: 94293 - RNA, 53 nt, Homo sapiens
gcggcggcgaaagacaaggcgaagccgacgagcccgaacagacgcaccagcgg

SEQ ID NO: 94294 - RNA, 82 nt, Homo sapiens
agcggaaagccaccccgagccgacaagaaggacaaagagacaagccgagagaaagcaagcaaagggccgccgcacccaagcg

SEQ ID NO: 94295 - RNA, 76 nt, Homo sapiens
gcccagcccccgagacgggaacaggcgggcaaaacgccgagcccgagaacgaccccagaaggaaggagcgaggcac

SEQ ID NO: 94296 - RNA, 77 nt, Homo sapiens
aaaagcgcgcggcccagggggaaagagagccggaacaagaggagaccaagaaaacgaagaaagaaaagaaaagaaca

SEQ ID NO: 94297 - RNA, 75 nt, Homo sapiens
gcgggacagcagcaaaggggaccgagacaggggacacacacgggcgcggagccgggacgcagcgccggcggccca

SEQ ID NO: 94298 - RNA, 75 nt, Homo sapiens
caaacgcgaagcagccccgcgaggaccacccgccccagaccagcggcgccggagcaccggagcagaagaccgagc

SEQ ID NO: 94299 - RNA, 88 nt, Homo sapiens
cgcggcgaggagggggcgcgcggagcaggagcggggccggaacggagccgaggcgcaggggcgcgggcccggcgaccggcagggagca

SEQ ID NO: 94300 - RNA, 72 nt, Homo sapiens
gaggccccagggaagcgcagaaagcaggcgaacccgcggcgcaaaacggaacgcgaagagacccccaggcca

SEQ ID NO: 94301 - RNA, 76 nt, Homo sapiens
ccagacacagccacagagagagcggggcagagacaaggaaccagaacccaggcccagacagccgccgaagaaaagc

SEQ ID NO: 94302 - RNA, 80 nt, Homo sapiens
gcagaaacacaggaccccccccaacgaggaggagcgagcgacagaaaccaacccaagagcgcccagcggaaaggcaaaga

SEQ ID NO: 94303 - RNA, 70 nt, Homo sapiens
aaacagcacagccaacgcggaggcacagagccaaccaacgaccggagccggagagaagggagccagcgca

SEQ ID NO: 94304 - RNA, 67 nt, Homo sapiens
gaggaggacacggaagcccaaccaaggcagcagcgacaggagcggcggagaaaccaccacaaacacg

SEQ ID NO: 94305 - RNA, 80 nt, Homo sapiens
cacacagcagcagcccgggaacgaagcagacccacaagcagcgacacacccccacccaagccccacaccccagcagacca

SEQ ID NO: 94306 - RNA, 67 nt, Homo sapiens
gacaaaagggccaaagaagggagagagggccgccgacgagccacgaagggaagcagagggcacagga

SEQ ID NO: 94307 - RNA, 82 nt, Homo sapiens
aaagcaccagacgccaccacgggcacccgcgccgggcaccgaggaccagccaagacagaaaacaggggcacagacgacagaa

SEQ ID NO: 94308 - RNA, 76 nt, Homo sapiens
cacccgccacgagggaggaggaggaggagccaggagcggagagcagacacaggacaacaacccacacggcaagaaa

SEQ ID NO: 94309 - RNA, 74 nt, Homo sapiens
caggaaaaccacaccaagggaaggaaggaccagagaaacgaaaggaaacggaacgccaagcgaagaagaacgaa

SEQ ID NO: 94310 - RNA, 67 nt, Homo sapiens
agggagaaccagcaacggcaaacaaaaccacaggcacaaagaggacccccccaagccacacacccgg

SEQ ID NO: 94311 - RNA, 60 nt, Homo sapiens
cccaagaacaggcacagaacgaaaggccccccgaaaaagccgaggaggagaggagaggcc

SEQ ID NO: 94312 - RNA, 71 nt, Homo sapiens
ggaccacccaggaaggagcggacacaagcccgagagcccccagacaggggcacgaggaggcaaaacagagg

SEQ ID NO: 94313 - RNA, 54 nt, Homo sapiens
gcgggcccgggggcccagcgggcgccgcgcacgcgaggagcgccggccaggcgg

SEQ ID NO: 94314 - RNA, 60 nt, Homo sapiens
gcaggccccagaaagaccaccaggagcacacgacaccaccaaaaaagaaagaagaagaag

SEQ ID NO: 94315 - RNA, 86 nt, Homo sapiens
ccccaggagcgggaacagacgccgacaccccaggccacgagccccaggccacggcagcaggcccagcccccagcgaagcagagccg

SEQ ID NO: 94316 - RNA, 81 nt, Homo sapiens
ccggccaacaaggagagcgaagagacaacacacaacagaagacaaggaggggcgagcccgggaggggggcggacccagaaa

SEQ ID NO: 94317 - RNA, 84 nt, Homo sapiens
gcaaagaagaagaaaacaaaggagaacaggaggacgcaggccaaacaaaacgaacaaaaccagaggcaaaccaagaaggcagaa

SEQ ID NO: 94318 - RNA, 71 nt, Homo sapiens
cacggaaaacagacaggagaaaagggacgcaacaggagagagcgacgcaaaaacacagacaaagaggccag

SEQ ID NO: 94319 - RNA, 74 nt, Homo sapiens
aaaggccgcgggggcaacggagaaaacccggaaccgcgacggcggcagaagcaggagacaacgagggaggagaa

SEQ ID NO: 94320 - RNA, 73 nt, Homo sapiens
ccccccgccgggagggccacaggaggcggcgggccccgcccgccgaaggagaacccccggcccagacagcaag

SEQ ID NO: 94321 - RNA, 70 nt, Homo sapiens
gccgcagcggaaagcaggagcacagggaaagcaaaccaccagagacccacagcaccccgcggaagacccc

SEQ ID NO: 94322 - RNA, 80 nt, Homo sapiens
ccccgggcggggagggggaagaggcgggggcggcccggggccggagaagggcagggaggcaagcacgcaaggcgaagcca

SEQ ID NO: 94323 - RNA, 81 nt, Homo sapiens
ccaaacagcgcagagagaaagaacgacgaaacggagccaaaagaagaacccggacccgaccgaagcaagaacgcaaaaggc

SEQ ID NO: 94324 - RNA, 74 nt, Homo sapiens
acagcgcgcccagggagaaagccggagagcgaacagcgaaaggacacagacagaggagcggagcaagacagaaa

SEQ ID NO: 94325 - RNA, 71 nt, Homo sapiens
cggggcgcacaccacggcccgggccggcaagaagccaacggagaaccaaggccaagaccagaaccagcccg

SEQ ID NO: 94326 - RNA, 88 nt, Homo sapiens
agccgcccgggccagcggccgcgcacccccggccggaggcaccagcacgacgacacgcggaggcgccggaagcccccacccaacaaga

SEQ ID NO: 94327 - RNA, 69 nt, Homo sapiens
cgaagcacgacacagaaggggaggggagggaaaggcccaggaaaaaggagacaccagggagccaacaga

SEQ ID NO: 94328 - RNA, 75 nt, Homo sapiens
agaaccagcggaacacaggccggcacggaagcagacaaaggcccagaggcagagcacacaaccaggaaccaaaaa

SEQ ID NO: 94329 - RNA, 79 nt, Homo sapiens
agcacccgggaggacaaccacaaggcagacacagcccggcaacgaggccagaccaagcaaaagagccaacacccaggcc

SEQ ID NO: 94330 - RNA, 78 nt, Homo sapiens
agaaggaccagaaaaccgacaacccccagaaagccaagccgggcaggagacagagagaaagcaacagcaggccagccc

SEQ ID NO: 94331 - RNA, 84 nt, Homo sapiens
gaacagagccaaaccagaagaggagggcccagaagaaaaagaagaagaagcagagagccaggaaaagaaagagaacccagccgc

SEQ ID NO: 94332 - RNA, 77 nt, Homo sapiens
gaggagcggggagggggacacacaaccgcccagccggcgagggacgccgcagggcgggaaaccaacccgcaaggcag

SEQ ID NO: 94333 - RNA, 67 nt, Homo sapiens
ggcaagaacggacgggcgccacaagccacacggagagacagagcagccgccggacaaaagggacccc

SEQ ID NO: 94334 - RNA, 72 nt, Homo sapiens
aaaacccgcccagcaagcaggacacgaccaacaaggggaaaagagacgcaaaccacgaggacagagaagaga

SEQ ID NO: 94335 - RNA, 85 nt, Homo sapiens
gccgccccaagagcgcagacggccagccgaaaccacgcggaaaggcagccacagcagaggaaagagggaaagacaaaggccagca

SEQ ID NO: 94336 - RNA, 67 nt, Homo sapiens
gaggaagccaaaggagaaggccggccacccaccaacaaagaggggacggagcaggcgaggggaccac

SEQ ID NO: 94337 - RNA, 82 nt, Homo sapiens
agcccgcagaggcgcggagcgggcagccgccgccaccccgcggccgcacccccgccccaggagaaagcgccacaagaaccca

SEQ ID NO: 94338 - RNA, 78 nt, Homo sapiens
ccaaggccccggcgggccccgcgaaagaccggcagcccacggggcccgcgaacagcccaaaaaagaagcgaagaacac

SEQ ID NO: 94339 - RNA, 75 nt, Homo sapiens
cccacgggaaggcaggccaggaacagccacgggaccaaagaccagagacaaaggagacacggcgcgccgcagcag

SEQ ID NO: 94340 - RNA, 83 nt, Homo sapiens
gaccgcgcggcagcaaagaggccaagggcagaggcgcgagagaagaagagcacagcccgagaagcgcggacgcccacacaagg

SEQ ID NO: 94341 - RNA, 98 nt, Homo sapiens
gagccggggccggcggggggcgcgcccggcagcccgccacagccacggcaccggcacggaccaccccaacaccgggggagaaccgggcccaccaggga

SEQ ID NO: 94342 - RNA, 77 nt, Homo sapiens
cggcgcgggaggcagacagcccgcacaggaggagccaccaagcccgaaggaggcgagacacagcaggacccaagcag

SEQ ID NO: 94343 - RNA, 81 nt, Homo sapiens
ggggagcagggaagacgccgcgccaccgagccggaccggagacggggccaacagaccgcccggccgacacggcaaccaaag

SEQ ID NO: 94344 - RNA, 80 nt, Homo sapiens
ggcgcccgcgggccacagccaggcggcagccaacggccgcacggcccaggccacgcgagcaagcgccggggcacagcaca

SEQ ID NO: 94345 - RNA, 84 nt, Homo sapiens
aacgccgccccaggaagccaagaccgacaagcgggcacggcggccaagagggagaaccgaagaacaggaggccagcagagggga

SEQ ID NO: 94346 - RNA, 78 nt, Homo sapiens
ggcggcggccgggggcccagcccgggcggcgcggccagagcgcgggcaacccgggcaggcggcgcagcggcaccacca

SEQ ID NO: 94347 - RNA, 46 nt, Homo sapiens
gcacccagccggggacagagaaggcccgccccagcgggccaccgcg

SEQ ID NO: 94348 - RNA, 78 nt, Homo sapiens
agcccccaccacagcggaaaagcagcggcagccccgacccagcacggaacaacaccacaacagacaagcagcccaaac

SEQ ID NO: 94349 - RNA, 75 nt, Homo sapiens
caccacgaggccagcacgggaacgcgaagcgccaaagccagacaagcaggccagggaggcggagccgaggacacc

SEQ ID NO: 94350 - RNA, 70 nt, Homo sapiens
cgcccgggccagcggccgcgcacccccggccggaggcaccagcggaggcacccgagcagagcacagaaga

SEQ ID NO: 94351 - RNA, 86 nt, Homo sapiens
caggcgaacaagacgacaccgccagcaccgaccaccgaggcggagggggagaacacccaggaacaagggacaaaccaaagaccaac

SEQ ID NO: 94352 - RNA, 80 nt, Homo sapiens
gacgacagaacccgacaagaagcacgaacagcaggccaaagaccagaggccagagcgcccccgagacccacgagccacca

SEQ ID NO: 94353 - RNA, 74 nt, Homo sapiens
aaaaaggacccagccaccaaacacgaggaaggaggacccagcccgcgcacacagaaccgggaccgaggcacgaa

SEQ ID NO: 94354 - RNA, 51 nt, Homo sapiens
cgagaccgagagacaaccaccaagaggcaccaagaaaacaagagaacgagc

SEQ ID NO: 94355 - RNA, 74 nt, Homo sapiens
cggccccggagggccaaacccccaccccgcagccgaaggagacccaacaccccggccagacgggccaccaggcc

SEQ ID NO: 94356 - RNA, 86 nt, Homo sapiens
gacagcgccccgagggcccccagagacggacagcgaaggcagagagcagggcgcgagggcgagagcgcggggaggggaggccaggc

SEQ ID NO: 94357 - RNA, 72 nt, Homo sapiens
gcgagccccagccggccgggaggcaccacggccgagcccgagggcgaagcgaggaacaaggcccaaaaaaac

SEQ ID NO: 94358 - RNA, 76 nt, Homo sapiens
acaaaaaagaaagagaaaaacagaggacaggaaaaggagcgaacaggggccacagcggaagaagcaggggagcgag

SEQ ID NO: 94359 - RNA, 77 nt, Homo sapiens
acagaggggggacaaagcagaggggaagcgccagaagggcagagagggaacgagcagcccgacggccaggaggcgaa

SEQ ID NO: 94360 - RNA, 77 nt, Homo sapiens
ccggccgaccgcgcgccacggacaagcccaaccagggaccaggccaaaaccagacgccacgccccacgggccccacg

SEQ ID NO: 94361 - RNA, 84 nt, Homo sapiens
cagcagccaaccaggcccgagacaaaaagacacaagacacccaagaagcccagcagacccaacgcccagcaccaaaagggccaa

SEQ ID NO: 94362 - RNA, 81 nt, Homo sapiens
caacacagagccaaaggacaagacgacagaaaccgccgaaagagagaaggaaagacgcaaccaggaagcccaccaagagaa

SEQ ID NO: 94363 - RNA, 83 nt, Homo sapiens
ccacacagcagcagccacgggggcaccccagggagaagcagaagcccgcacagagcagggaccccaaccgccgggggaggaca

SEQ ID NO: 94364 - RNA, 68 nt, Homo sapiens
cggccgcaccgcgcgagcacgggcggagcgaacggcacggcaagcgcacggacccaaacaccaacacg

SEQ ID NO: 94365 - RNA, 41 nt, Homo sapiens
gcagcgggccgcccggcagcaggagcggaggacaccccgga

SEQ ID NO: 94366 - RNA, 75 nt, Homo sapiens
gcccaccggagagcagagagcggaaaacggcgcagccaacaagggccggaggcgcagaccggggacagcaggcaa

SEQ ID NO: 94367 - RNA, 89 nt, Homo sapiens
gacgcggaggccggggacgcggaggccgaggacgcggaggacgcggccgccagcaggaacagacgccccaccaggccagcggggcgcag

SEQ ID NO: 94368 - RNA, 72 nt, Homo sapiens
aggggaacggcaaagcagggagcagagccagacagccaccacccgccccagaaaagacagccaagcaacaaa

SEQ ID NO: 94369 - RNA, 97 nt, Homo sapiens
agacgcccggccccgcagcgccaggagggccgccaggcgggcggggcgggccggacacacagcagcggacgacgggagcagacggacgggccacggg

SEQ ID NO: 94370 - RNA, 73 nt, Homo sapiens
cagggacccacccccgacagggacacagggagccccagacccacaggggagccgccaccaaaagcagacggaa

SEQ ID NO: 94371 - RNA, 83 nt, Homo sapiens
gcccgccccggcacacgcgcagccccggccccggcccgccggagaaacagggaagcagagaccaaggaacaaggaaagcaaca

SEQ ID NO: 94372 - RNA, 82 nt, Homo sapiens
gggcggccgcggaccggagcagcaggcggcggccccagcgcgggcagccggcgccgccaagagaaggagggggcagagcacg

SEQ ID NO: 94373 - RNA, 76 nt, Homo sapiens
gaggccccccagccagggaacagcgccaaagcgaaacaacgagagaaacacaggcacaggaccccccccagaagcc

SEQ ID NO: 94374 - RNA, 63 nt, Homo sapiens
ggcgggcaagccggacaaggaccggggaccgagagaacgagagcggaggagggccaagaaagc

SEQ ID NO: 94375 - RNA, 78 nt, Homo sapiens
gcggccgcggcggccgcgccccagggcgcggggacgcgccacagaccgggccaaacaacccaggaggaagagacacgc

SEQ ID NO: 94376 - RNA, 82 nt, Homo sapiens
aaggcgcgcaggcgccgcacaagggaggccccgaaggagcaaggaaacgcgaaccaagggccacggggagacaaggcaaaaa

SEQ ID NO: 94377 - RNA, 78 nt, Homo sapiens
caccccacccagaagacggagggaccaaacacgaggccgaaggcaacgccgacacgagggaaaccgccggagaaggac

SEQ ID NO: 94378 - RNA, 45 nt, Homo sapiens
gcggagcgggggcccgagaagccgacgggcgaagaaccaggacgc

SEQ ID NO: 94379 - RNA, 78 nt, Homo sapiens
gcgggccggggccacgccagcgccgagggcgagacggcaggcggggccggggagcccgggccagaccccccagaccca

SEQ ID NO: 94380 - RNA, 96 nt, Homo sapiens
gggagccgggcccagagccgagagagcagaaccgcgcagcagaagagagcaaaggcagacaagaccagccacaaaaagcggacaaagcaagagaga

SEQ ID NO: 94381 - RNA, 71 nt, Homo sapiens
gccaccccgcccagcccccaggaaaggaagccagaaccgaaaacccaccgacaccagccacgccaccaaag

SEQ ID NO: 94382 - RNA, 78 nt, Homo sapiens
gagaaagacgaaaggaagagaagaaagacgcagcgagaagcaaagcacgagaaaaacaaccagggaacacaacagcaa

SEQ ID NO: 94383 - RNA, 70 nt, Homo sapiens
gacgccgaggagcacccgaaaagacagaaaaagcacagaaacgcggaacagagaggaagcaaggcaaagc

SEQ ID NO: 94384 - RNA, 78 nt, Homo sapiens
cccaaacgacccaggggaggggccggggcgccgaggagcagcgggcccccaagaagagagggagacaccagaccgaga

SEQ ID NO: 94385 - RNA, 74 nt, Homo sapiens
gcgaggcggaggcgacgggcgacggcgcgagaggagcgcgcgcagggcaggcggggaagagccgggcggggggg

SEQ ID NO: 94386 - RNA, 72 nt, Homo sapiens
aggaggaccacgccgcaccccacaaggaccacgaggagcaacggcgagccgcgaagccacccccgggacaaa

SEQ ID NO: 94387 - RNA, 79 nt, Homo sapiens
agccaggccgcgacgcggggcacgcacagcagcacgggggcgcggacagaaaggccggcaaagcaccaggcacagcaag

SEQ ID NO: 94388 - RNA, 73 nt, Homo sapiens
gggggagcacgaggagccgaagaaggaagaaccacgaagaaacaccacaaaccggggaccaaaccacagcgcc

SEQ ID NO: 94389 - RNA, 73 nt, Homo sapiens
cgacgcgagccgccggagcgaacgaacagcgaaaaagagagcagcgaggaaggagccagacgccaacccgaag

SEQ ID NO: 94390 - RNA, 99 nt, Homo sapiens
ggaagacgcccacgcaagacacccagaaagcgcagagcaaacaccaaaggaaagcgaagccaacaaagaaaggaccggggcaaaacggccagaaggccc

SEQ ID NO: 94391 - RNA, 56 nt, Homo sapiens
gccccgggaccggcgcccccccgacccaacccggagccggggacggcacacgggcg

SEQ ID NO: 94392 - RNA, 77 nt, Homo sapiens
gccgaggcacagagaaccgaccagaacgcagcaacaaagggacaaccaaagccaagcaacgaaggacaggaccgccc

SEQ ID NO: 94393 - RNA, 71 nt, Homo sapiens
gcaccaggcacgaacccgagaaaacaggcaacgcgaaaggaggcaagaaggaaccccaaagaggcccggag

SEQ ID NO: 94394 - RNA, 81 nt, Homo sapiens
ccgggggcgagggaacccaagaacacaccgcgcaagccccaccggcggcaccccgagaagcaaggccagaccagccgcggg

SEQ ID NO: 94395 - RNA, 54 nt, Homo sapiens
caagacaagggcgaggaggacgaccagagaagaggcgacccgcggcgagagccc

SEQ ID NO: 94396 - RNA, 73 nt, Homo sapiens
gaacgggcggacgggcgcccagccaggggacaaaccgagacaagggcaacacgagacgaaccagaaaccaacg

SEQ ID NO: 94397 - RNA, 77 nt, Homo sapiens
gaggcgaggaggagcgcggcgcacaagcccaccgacgggggacgacaccgacggggagaggcaagccacaaaagaca

SEQ ID NO: 94398 - RNA, 78 nt, Homo sapiens
acgaagaggcacaagcgccaaggggagagagggaacagaaaggagaacaccacaggcccaaggaaaaccagaaagcgg

SEQ ID NO: 94399 - RNA, 57 nt, Homo sapiens
ccacgggaggagaacacacaggcaagaaaaggagaagaaagaagaaaaaaaagagca

SEQ ID NO: 94400 - RNA, 50 nt, Homo sapiens
ggagaaaaaggaaaacgcggaaaaccgacacaacagagcaacgaagacag

SEQ ID NO: 94401 - RNA, 79 nt, Homo sapiens
gccggaacgaacagccgaaaaacccccccggcaacgccaggcacgggccacagagacgagaccccaacaacaaaaccac

SEQ ID NO: 94402 - RNA, 95 nt, Homo sapiens
gccccgacgacagcgggccgggaaaagggcacgaggccggaaccgcccagccccgggcgaagcgaggaacaaggcccaaaaaaacagcacaggag

SEQ ID NO: 94403 - RNA, 73 nt, Homo sapiens
gccgacgaagcgcggcagaccagagaaaaggaacagccgaagccaggggcaagcgaaaccacagaagaaagga

SEQ ID NO: 94404 - RNA, 72 nt, Homo sapiens
gaaccaggaacaacccggaaacgcggacgacagcacagaacccacagacacgcgcaggccgaacacaacgaa

SEQ ID NO: 94405 - RNA, 74 nt, Homo sapiens
ccacgcccagcagcagcgcagccccccaaccgacgccacagggagaaggaaaccggacacaaggcaccgcacga

SEQ ID NO: 94406 - RNA, 72 nt, Homo sapiens
acgcagggcgcccccggacccaaccgcggcacacagaaaacccggacccaccccgcccagaaccccgcggcc

SEQ ID NO: 94407 - RNA, 71 nt, Homo sapiens
aacgggccaccacacgcccaggcgcccaggaaccgaggggcaaaccaccgagaccgccaaaagagaccacc

SEQ ID NO: 94408 - RNA, 71 nt, Homo sapiens
cccacgagagcaccaccagaaggcccgaggaaggagccacaacgaccgagcggacaggagacagccagcgc

SEQ ID NO: 94409 - RNA, 81 nt, Homo sapiens
cgaaaagccaaccgagcaggggcaagaaaacacagggacaacgaaaacagagcccaaaaaacaaagaagaaaagcaaccaa

SEQ ID NO: 94410 - RNA, 80 nt, Homo sapiens
cgacgcacacaacccccgaaagcgcgaagccgacgagcccgaacagacgcaccagcgggaggaagagggacggcccagga

SEQ ID NO: 94411 - RNA, 71 nt, Homo sapiens
aaccaggagcaacgaccacggaccagcccagggagaccagcgaagccgggacaggcccagaggcacaccac

SEQ ID NO: 94412 - RNA, 27 nt, Homo sapiens
ccacaaccccaggggcgcgacgagaga

SEQ ID NO: 94413 - RNA, 72 nt, Homo sapiens
ccacaagcgaccggcaaagcgccagagaacaacaaaggagccgccaagaacagcaagccaccaaccaccacc

SEQ ID NO: 94414 - RNA, 68 nt, Homo sapiens
gaagccgcagacgcacgaacacccaaccgaagaagacagggaaacaagaagagggagaggcaaacaac

SEQ ID NO: 94415 - RNA, 72 nt, Homo sapiens
cccaacaagccgccagggaggaggaaagcaggaaacagcagggaaaacgccccagggacacagaccagcgag

SEQ ID NO: 94416 - RNA, 60 nt, Homo sapiens
ggcgacggacgcggcgcgcgaccgacacgaagggggggccccagcccggccgaacgggcg

SEQ ID NO: 94417 - RNA, 72 nt, Homo sapiens
gggcaagcaaccccgcgcagccacaaaccaggaaggacggcagacaccaaaggcggcaaaaccaagaaccga

SEQ ID NO: 94418 - RNA, 76 nt, Homo sapiens
ggcggacggaggagcaggcgagaagagaagaggccccacagacaaaaccgccggcggaagagagcgcaccacgcac

SEQ ID NO: 94419 - RNA, 74 nt, Homo sapiens
cccgcccagcccaacggggaggaaaacaaagagggaaaacggagaaaagcccccccaggccagcgcaggaacac

SEQ ID NO: 94420 - RNA, 77 nt, Homo sapiens
ggccggggcggcgcgacggcgggcgcagaacagaccggccccccaaacacccgagcccagccccgccccgaccacca

SEQ ID NO: 94421 - RNA, 68 nt, Homo sapiens
accagagaaggaaagcaaagcgaccaagaggacggaaagcacgccgggaacggaaggagagggcaggg

SEQ ID NO: 94422 - RNA, 72 nt, Homo sapiens
ggcgaagagcagcagcgaaagaaacccccgagcgggcacgcacgagacccaaagacaggaccacgcaccagc

SEQ ID NO: 94423 - RNA, 58 nt, Homo sapiens
caaagggcaaggcgggcagaaggagaagacagccgaagaagagcagcgaggagcgcga

SEQ ID NO: 94424 - RNA, 69 nt, Homo sapiens
cgcgcgcgcgcgccgaggcggagcgccgagcggcgcccggcgcaggccaaagggcccccgaaccagcga

SEQ ID NO: 94425 - RNA, 66 nt, Homo sapiens
aaccgccgggcgcccccggacagaccaacggggaccaacaacggagcaagaaaaagccacaaagac

SEQ ID NO: 94426 - RNA, 48 nt, Homo sapiens
gcgccccggacgaagaccagggaagagggggaagcagaccaagaagac

SEQ ID NO: 94427 - RNA, 77 nt, Homo sapiens
ggggccagggaaaggagcagagagagagagcagaaggccccaccgaggcaccaccaaccaaagcggcaacccgacag

SEQ ID NO: 94428 - RNA, 75 nt, Homo sapiens
caaaaccggcgcacagagaagaaggggggggggacaaaggcagccagcacgagcccccccaccaccacagccccc

SEQ ID NO: 94429 - RNA, 79 nt, Homo sapiens
gcgggcgagcggcggggagcggcgaagccgcgggcgagggaccaaggcggagacagcgagacaaggcggacgaccccaa

SEQ ID NO: 94430 - RNA, 81 nt, Homo sapiens
gggccggagcagccgcgggcgcccgaggggccgagcgagacaacgacgaaagacccacagaagcgcgccgggcgcagagga

SEQ ID NO: 94431 - RNA, 77 nt, Homo sapiens
gcacacggccccgaccggcgggccccgggcacaccaacaagccacgaccggggagcaggaaccaaagaggggaaagg

SEQ ID NO: 94432 - RNA, 75 nt, Homo sapiens
acccagcacagaaagccagccggcccgacaagaacggcagcagcaagaggggcagcacgagcagacggccgagga

SEQ ID NO: 94433 - RNA, 65 nt, Homo sapiens
ccgagagcgggaacagaacgcagaccggcagaaagaaaagacagcccagccacggaccagccagg

SEQ ID NO: 94434 - RNA, 33 nt, Homo sapiens
aaaaccgcccggcaaagggaggcaccgccaccc

SEQ ID NO: 94435 - RNA, 79 nt, Homo sapiens
ggcgcagagggaaagcagcgaagcccggcgggacagcgagccacggcagggcaaaggcaaagcagagagcagaggccag

SEQ ID NO: 94436 - RNA, 59 nt, Homo sapiens
gaaggggcagcgcggagacgagaaccgacacagcccccgaggagcagccacaccagccc

SEQ ID NO: 94437 - RNA, 64 nt, Homo sapiens
cgcgggagccgcagggcgcccagcccgcagaaacgaggcggaggaagaagaggaaaagcgggag

SEQ ID NO: 94438 - RNA, 70 nt, Homo sapiens
agaagagcgccagacccacaggcgcaaaaaccagacaccccacaccaccacccagacgaccaaaagggca

SEQ ID NO: 94439 - RNA, 77 nt, Homo sapiens
aagccgcagcccccccgcgcgagcggcggccagccggcaggcgggccaggacaccccaagcgcagaaacaggcacac

SEQ ID NO: 94440 - RNA, 75 nt, Homo sapiens
cagggacgcgggagccacaaaaaacacgacaccaccaggggccaacagcgaaaagcaaggcagcggacacacgcc

SEQ ID NO: 94441 - RNA, 71 nt, Homo sapiens
aagaccacagagggacccggacaaccagaggcagccagcagggggagccacaagaaggagagacgcagagc

SEQ ID NO: 94442 - RNA, 95 nt, Homo sapiens
aaaaggaaccccggagaggcagcaggcccgaagcagccggcaaagagggggagaagagaagaagggaagaagcagagaggaaggggaagaaggag

SEQ ID NO: 94443 - RNA, 70 nt, Homo sapiens
aggcggaccggacggccgagggaaggcggccccgaagacaaacaaaaacacggaagcgcagaaaaaaccg

SEQ ID NO: 94444 - RNA, 81 nt, Homo sapiens
cgcccccggcggccccccgcgcacagaacggaaagggccgagaaagaagagaggaagaagaggaggaggaggaagaggagg

SEQ ID NO: 94445 - RNA, 54 nt, Homo sapiens
ggcggacgggaaaagaaccggaaagacaaggaagggaagaccacaacaagcaag

SEQ ID NO: 94446 - RNA, 71 nt, Homo sapiens
accgagagcggaccgagagcgcgaaacgcacgagaaggcgccaacggccgacaagcccgacgaagaccggc

SEQ ID NO: 94447 - RNA, 80 nt, Homo sapiens
acagaggagagacaggaagcgcaagaaacccaaagaccagcagacagggaggggcggggaagcacgccagcaggcaggag

SEQ ID NO: 94448 - RNA, 80 nt, Homo sapiens
ggacagcaccagcgggccggaggagccagagcgcagaaagcgaacaggggaaagccacagacaccgaaaaagacggagcg

SEQ ID NO: 94449 - RNA, 72 nt, Homo sapiens
gaaaagaaccgacccacaccaagaggccaaacacaggaaacaaaacagggccagcgaagacgagagaaaagc

SEQ ID NO: 94450 - RNA, 67 nt, Homo sapiens
ggaccaagaaccaggcgaggggaaccccgccggagaagaacacgaaaacggggaaccggcggcggga

SEQ ID NO: 94451 - RNA, 50 nt, Homo sapiens
caacaaccccgagaacaggaaacacagacaccaccacgaccaaagaaaag

SEQ ID NO: 94452 - RNA, 74 nt, Homo sapiens
gaaaaggacgacagcaggagcgaagcaacagagaacaaggacggcacaaaccagagcgcgcccaggagaaggga

SEQ ID NO: 94453 - RNA, 65 nt, Homo sapiens
aaagagccagggacgaggagccggcaccgaaagaagggcaggaaaccaagacgcgagagagagac

SEQ ID NO: 94454 - RNA, 83 nt, Homo sapiens
gcgggcggagacaggccaacacgcgggcagcgaacaagcgggagcaaggagggcgaagagcgaggagaggagccgcggcaccc

SEQ ID NO: 94455 - RNA, 57 nt, Homo sapiens
agaaggaacgagccagcagcggacacgcagacgggacacggccggccaggagcggcc

SEQ ID NO: 94456 - RNA, 79 nt, Homo sapiens
accagaaaacacaggacaagcagcaaagggggaacagacgaaagcccagcagcccggcaagcagacagcaaccaaaccg

SEQ ID NO: 94457 - RNA, 72 nt, Homo sapiens
gaaacagaccaagggcagaagcaaagcaagcacaggcacggggccaaaaaggcacgagggaacgggaaagaa

SEQ ID NO: 94458 - RNA, 81 nt, Homo sapiens
ggcagcggggacgcaggaggagcagcagccaagcggacagagaccgccccgccaccccggggggccagccccaaccgcagc

SEQ ID NO: 94459 - RNA, 79 nt, Homo sapiens
ggcgcccagccaaaaagaaggggggaggggaacagcagcggagaacacggcagagacaaaacggaccaccgcgacagaa

SEQ ID NO: 94460 - RNA, 79 nt, Homo sapiens
accccccggaggcacagagggcgggggccggcgaaggccgcggccacgcggaaaaggcgaaggcgcgaaagggccagag

SEQ ID NO: 94461 - RNA, 81 nt, Homo sapiens
aggcaccccaggcgacgagagcaagccaaagaccaaggggggggcacccccacaacgcagcacaagccagcgaggaggcag

SEQ ID NO: 94462 - RNA, 78 nt, Homo sapiens
aggagccgcacaaagcgcaggaagaggagggaccacgagccggacgagacccgccagagacccacacgccacacaaag

SEQ ID NO: 94463 - RNA, 71 nt, Homo sapiens
acggaacggaggaccaagagcagggaggagcaaagaagaacgaggcagcacaacaaaaacaaagaaaacga

SEQ ID NO: 94464 - RNA, 84 nt, Homo sapiens
ccggcgagaggcggcgccgccccaagagcgcagacggccagccgaaaccacgggcagagaacacaccgccggaagaggaaaaga

SEQ ID NO: 94465 - RNA, 47 nt, Homo sapiens
cggacgccacccgggggcacagcaagggcaaggacggggacacaaga

SEQ ID NO: 94466 - RNA, 49 nt, Homo sapiens
gagaaagagaggccccgcaggcccccaggcccggccggcacgagacagg

SEQ ID NO: 94467 - RNA, 73 nt, Homo sapiens
agacaccaggaaacccacgcaagaggaacaagacagagaccccgaggaagacaacggaaggaaggagaaagac

SEQ ID NO: 94468 - RNA, 69 nt, Homo sapiens
aaaacagccggaagggccacagaaagcgaggcgggaaggaccgagggggccagaaacagcagggaccga

SEQ ID NO: 94469 - RNA, 77 nt, Homo sapiens
caccagggccaccagcgccccgggaaaaagccgagagcggcccaggaggaacaaccagcccacccggagagggcacg

SEQ ID NO: 94470 - RNA, 73 nt, Homo sapiens
agcggaccggggcagaccaaacggcaagcggaccagaaccagagacccggagacccgagagaagacagaagaa

SEQ ID NO: 94471 - RNA, 73 nt, Homo sapiens
caaaagcgcagcaagacggccgcgcggcccgcagggagggccccaaggcggcagccccgaccgacggggcaac

SEQ ID NO: 94472 - RNA, 57 nt, Homo sapiens
ccagaacgcgacacagagggccaagggcccagaaggggggcagaaagaagaggagga

SEQ ID NO: 94473 - RNA, 63 nt, Homo sapiens
accaagaaccagcgcacaagaacgaagaagaaacaaagcccaaagaaccccgaccaaaggaaa

SEQ ID NO: 94474 - RNA, 82 nt, Homo sapiens
aagcagcaaggcagcaaccaaaacaccaccacgcgggcgggccagcgcagaggaaggaaagcccaacaaaaacagaaaggaa

SEQ ID NO: 94475 - RNA, 70 nt, Homo sapiens
ggcagaacaccccagcaccccaaacaccgcggcccagcaccagaaaaaggagaagcgggccagggaacgg

SEQ ID NO: 94476 - RNA, 68 nt, Homo sapiens
gcagaggaagaacaagaacaggcccaagcagggaaagggggggcgcaggccccggaagagggacgcag

SEQ ID NO: 94477 - RNA, 58 nt, Homo sapiens
gggcccaggcggcgaagaaggcgggcgaggcagagggcccccgaaccgccgcacagcg

SEQ ID NO: 94478 - RNA, 76 nt, Homo sapiens
aaggccaacagacggcggaaagcggcccgggacgggcgcaggcgccaggacgcggccggcccgcagcccaggccgc

SEQ ID NO: 94479 - RNA, 82 nt, Homo sapiens
gcccacgacaccagccacaagaggacacgggaaaccagagccagacccagggggggaccaggccgaggaggaaccaaccgac

SEQ ID NO: 94480 - RNA, 73 nt, Homo sapiens
cgaccagacagaggcagagacaagggaaacggccagaaaacagaagggaaccaacccagagaaggaacacagc

SEQ ID NO: 94481 - RNA, 87 nt, Homo sapiens
aggaccacacacagcaggacggaaacgacacaggaccagacagcaggggacgggggagccccccagacccgaaaggagacaagagga

SEQ ID NO: 94482 - RNA, 78 nt, Homo sapiens
cgaacacaccggagggggaagggaagcgcgggaagaggaagagacgaggaggaaagcggaaagagaccgacaccaaca

SEQ ID NO: 94483 - RNA, 72 nt, Homo sapiens
acccagcgccgacgccaggggggacacagcagcaaggcacccgccccccccaggcagcagccggaccgggcc

SEQ ID NO: 94484 - RNA, 80 nt, Homo sapiens
ggaacaccaccagagcaccaggcagaccaacagcaaacagacagcacggggcaaacagaaccgagcggaaggaagcaaga

SEQ ID NO: 94485 - RNA, 81 nt, Homo sapiens
ggccgcaccgccagggcgcaggcacagcccgagaaaccgcagcacacacgaaagaagggaggaagccgccccaggagaaca

SEQ ID NO: 94486 - RNA, 71 nt, Homo sapiens
aagccgacaaccccagaaacagagagcccgagggaaaagacaggcaacaggaaagcaagggaaggcgcccc

SEQ ID NO: 94487 - RNA, 78 nt, Homo sapiens
acgacacaagcccacgcgcccgcagcaagacgggacgcacccaggccacagaggaggaaagagaggggaaagaagcag

SEQ ID NO: 94488 - RNA, 56 nt, Homo sapiens
cccggagaaaaggccaagaaggcagacggcgccaccggggccccccgcccgggacg

SEQ ID NO: 94489 - RNA, 59 nt, Homo sapiens
gcccccgggggacccgcggccccaccggcagcggggcacacaagagaggcaaagaccca

SEQ ID NO: 94490 - RNA, 94 nt, Homo sapiens
cccaccacaccaccccccaagacgaccacagccccacccaggaggggaccaccagcaggcaaaccgacaccagcgacacaagcgcgagggaacc

SEQ ID NO: 94491 - RNA, 80 nt, Homo sapiens
aaggcaaagaggaacgcggccacgagacgggggggccagaaggcgccagagagggaaaggcgcccaaccaaaaaagcaac

SEQ ID NO: 94492 - RNA, 88 nt, Homo sapiens
gcgaaggccgggacccggccccggcccacaggggggggcaaacccgagagaacgggccaccagcccccgggccaagagcagcacggag

SEQ ID NO: 94493 - RNA, 78 nt, Homo sapiens
gcagcgaggagccgaggggacagaggcaccgcagcgagaggagcagccaaggaggaaaaaggaggacaaacgcaaggg

SEQ ID NO: 94494 - RNA, 79 nt, Homo sapiens
ccccgcacccgggagcgccacggacaggggcggagagggaaagggcgggggcaagacccagagaagacaaaacaacagg

SEQ ID NO: 94495 - RNA, 77 nt, Homo sapiens
caggggccaggcgaagcacgagcagaccggcccgaccgcccacagacccaaacaaaggaaagggaacacaagaggaa

SEQ ID NO: 94496 - RNA, 79 nt, Homo sapiens
aagaagaggagaagagggacggcccaggggacgccaggggaccgcggaccggacccacgaagaggcgggcccaggagca

SEQ ID NO: 94497 - RNA, 72 nt, Homo sapiens
ggggaacgcacaacggcaaaagagcaaacagaacaaaaacaagaaaagcgacagaggggagacaagaaggca

SEQ ID NO: 94498 - RNA, 48 nt, Homo sapiens
caggacccgccccaccacagcaacccagaacgccaggaggaccagagc

SEQ ID NO: 94499 - RNA, 73 nt, Homo sapiens
gccgcccagccccaaagagcgagacacagggcacacaagcaacagaagaaaaggagggaagagggaacagaag

SEQ ID NO: 94500 - RNA, 58 nt, Homo sapiens
gaccggggaggcccgccccaccacaagcaacaccaccagcagaggaagaggcaaagca

SEQ ID NO: 94501 - RNA, 68 nt, Homo sapiens
aaagcagagcccacccgcaaaacgggaagagcgggacaaacgagaagacaacagaaacccccacacac

SEQ ID NO: 94502 - RNA, 77 nt, Homo sapiens
aacgccccagcagcccaagagaaccaaggaaggagaagcagccggagccaaccgccaaccacagggaccaagcgacc

SEQ ID NO: 94503 - RNA, 82 nt, Homo sapiens
gagacgcccaaggaaccccgccggccaccggcgaccaacccacagaggaccagagagaggacgggcgaagacaccaaagagg

SEQ ID NO: 94504 - RNA, 123 nt, Homo sapiens
agacgggcgccccagcagcgccgggcgaggacacgggccggaccagcgggcgcgcggcgcaggacagcggaagcacgggccagacccgcggacacagagcagcgagggagcgcgcgcacccga

SEQ ID NO: 94505 - RNA, 68 nt, Homo sapiens
gcgcaggcccacccacagaacagaaaagggacagcacaagagaggggacaggcaaaaggcccgaacac

SEQ ID NO: 94506 - RNA, 56 nt, Homo sapiens
ccaagacgacagggaaaacagaaagacaacaagggagggcacagccaagacaacaa

SEQ ID NO: 94507 - RNA, 84 nt, Homo sapiens
cgaggaggcgcgggagggcgagaacgaccccgagacgaacggccgagcgaccaggagaggagcccccgcccgaagaccggggag

SEQ ID NO: 94508 - RNA, 73 nt, Homo sapiens
cgaagagacagagagaaacagagaggagggagaaacagcaaccggcaaggggcggagaacggaaaagcaccag

SEQ ID NO: 94509 - RNA, 42 nt, Homo sapiens
cgaagcgcgcggccgagccggaggcccagggagcaggcaggg

SEQ ID NO: 94510 - RNA, 104 nt, Homo sapiens
cgccggagccgacgccgggaacccgccgcgcgccgcgaccccaagcagccaacgggcgacgacgaccagcgcggccagaacggaggcaccgccgcagaaccagc

SEQ ID NO: 94511 - RNA, 73 nt, Homo sapiens
ccacccgggagagccgcggcgcaagagaaaccgcgaagggagcaaggagcaaagacccacgcacaggagcccc

SEQ ID NO: 94512 - RNA, 65 nt, Homo sapiens
acgaaaaaagggcaagaagccagaagcacacaaaagagggacaacacaagccacagcgcccaggc

SEQ ID NO: 94513 - RNA, 77 nt, Homo sapiens
agacgcgccggagggccagagaagaggaagagagagagggcccaaaccaccagaaccgaagaagagaaaacaaagaa

SEQ ID NO: 94514 - RNA, 90 nt, Homo sapiens
caacggggaccaacacgcagcagccgcgccgccgccgcgggagccgcgcccgaaccccggcccgaacccagcaaggccaagacaggggac

SEQ ID NO: 94515 - RNA, 57 nt, Homo sapiens
gaagcacaaaaagggacagcgaacgcaagaaccacccggcaccaccacccccagccg

SEQ ID NO: 94516 - RNA, 70 nt, Homo sapiens
ccagacaagcgcgccaccggccccgaaagagccgcacgcggggaggggggggagaacaaaacgcggagcc

SEQ ID NO: 94517 - RNA, 75 nt, Homo sapiens
gaggaaaggaaccaagggggccagccgccgcgcccgcccgacccgccaccgccaggccagggaaggaagaagccc

SEQ ID NO: 94518 - RNA, 70 nt, Homo sapiens
gcggcaggcacagccagggcagccacagggacccaagccacaagaggaaaggccgccccggaggaagaaa

SEQ ID NO: 94519 - RNA, 86 nt, Homo sapiens
gggcgcccacccccggggcggcagcgcacgcgcagccacccaccgggggacggcacggcaggcggacgcccggggccccccggacc

SEQ ID NO: 94520 - RNA, 77 nt, Homo sapiens
ccgccgccgccgcccgccccgccgcccgccgccggccggcgcgcgccccacagacagcaaagcaagccaagagggcc

SEQ ID NO: 94521 - RNA, 57 nt, Homo sapiens
gagcggagcagccaaccaaacagaaagcacagagggaagaagcgagggaagcaaaac

SEQ ID NO: 94522 - RNA, 83 nt, Homo sapiens
agaaggaaccggcaaagcgcaggaacgggaacgcaggagcgaccagggcgaaaagccaggagcaaaagacgagcgcgacgcca

SEQ ID NO: 94523 - RNA, 56 nt, Homo sapiens
cccgcaagcccacccgggcagacagcccaggcacagccccggcacaaagcagaccg

SEQ ID NO: 94524 - RNA, 60 nt, Homo sapiens
cgaagggcaccacccccccagggcggggcagggaaaagcgcgcgcccggagcgcaaagga

SEQ ID NO: 94525 - RNA, 81 nt, Homo sapiens
ccccagagcagcccccccgcccagcgcccccaggccgccccggggccacggagccaagccgccaggccaccacagcccggg

SEQ ID NO: 94526 - RNA, 76 nt, Homo sapiens
gcaaccggggaggacagcagccgggcaggcacggagggcagaagccgcaggacagaagcacaacaaaaacgcccgc

SEQ ID NO: 94527 - RNA, 75 nt, Homo sapiens
ggacgcagcccggcggcagcaggcccccacagagagcacacaaacaaagcgaaaccacggaagaaaagggcaaag

SEQ ID NO: 94528 - RNA, 69 nt, Homo sapiens
aacagaagcacagaggaagacagaaaacccgaaagaagaacacgaccagcgcgaccgcagccccaaggc

SEQ ID NO: 94529 - RNA, 100 nt, Homo sapiens
aaggccagagaaagaacaccaaccaaagcgccaaagaaagacaccaggggggaaaaaccacacaggcaaagaacgcgcaaaacaggacgaaaacaaaggg

SEQ ID NO: 94530 - RNA, 69 nt, Homo sapiens
ggagcgcgaggacgccgagagcgagaaacaaagccacccagccaagaagaggaacccgaggagcggccc

SEQ ID NO: 94531 - RNA, 58 nt, Homo sapiens
gagagccagccacacgaggagacggaaccggagaaaagacacacagcaacgaagcagg

SEQ ID NO: 94532 - RNA, 78 nt, Homo sapiens
agacagccagagcaaacaagaacagaaaacaaaggagaacggcaaaagagaaacaacgcagacgaggaggaggcagag

SEQ ID NO: 94533 - RNA, 71 nt, Homo sapiens
acccggccgggaggaagccgcaggaccggaccaggagccaacaggcggaggcgcagccgccgcaccagacc

SEQ ID NO: 94534 - RNA, 39 nt, Homo sapiens
gcgacagcccagacggaggcagcagcgccccgagccccg

SEQ ID NO: 94535 - RNA, 77 nt, Homo sapiens
agccgacaaagagggggcccaagaaggcaccagaggcacggcacaacgagcagacaagagagcaagagggaagaccc

SEQ ID NO: 94536 - RNA, 72 nt, Homo sapiens
ccacaccagacacgggggacagaaagcaagaacgaagggccacccaagcgggcccagaccgcaggacggcga

SEQ ID NO: 94537 - RNA, 35 nt, Homo sapiens
gaacccgaaaggaggcagggacagcagggacagcc

SEQ ID NO: 94538 - RNA, 78 nt, Homo sapiens
cacaaaagcaacacagggaaaagccaaccggcccgaagaacacagggccagcggaccacaagcaaacaaaagccaaca

SEQ ID NO: 94539 - RNA, 35 nt, Homo sapiens
ggggcgcagagcgggcaagaggacgagcaacaaag

SEQ ID NO: 94540 - RNA, 83 nt, Homo sapiens
ggccagacgccgccaagaaggcccggggggcagaggaaggagggcggacccggacgacaccaaagagacccccacgagaaagg

SEQ ID NO: 94541 - RNA, 84 nt, Homo sapiens
gggaccaacccaaaaccccagaacacggcacacaccaacgggagacaggagaagaaaacccgcagaggaaagagcgaaaacggc

SEQ ID NO: 94542 - RNA, 74 nt, Homo sapiens
ggcaccaagcccccagacaaaccgaaggcgacagagacaggcaaaccgacaccagcgacacaagcgcgagggaa

SEQ ID NO: 94543 - RNA, 62 nt, Homo sapiens
cgcgagcaagaacagcaggagacgggcgccagggcaccacacccgggaagcaagagagaaag

SEQ ID NO: 94544 - RNA, 73 nt, Homo sapiens
gagaaccagaaccccgagaggcgacaagaaagacaaacgcagaagcgaacaggaggaagacgcacgccggacc

SEQ ID NO: 94545 - RNA, 73 nt, Homo sapiens
ggcagcaagagcccaggaaccgcaccgggaacagagaggagggccagacaaggggaacacaagaggagagaag

SEQ ID NO: 94546 - RNA, 74 nt, Homo sapiens
ggcaaccccaaaccaaagaaacaaaggacgcagaggcaacagccggcggcacacagaccgacagacaaaacagg

SEQ ID NO: 94547 - RNA, 82 nt, Homo sapiens
cacccacccggcgcggcaacaggcagagccaggacaaaaccaggcagaaccaacacgaacccaagcacaaacaagaaaacga

SEQ ID NO: 94548 - RNA, 82 nt, Homo sapiens
aggcggacggcagcggcggcagacacggaaccagaggcagcagcccaaccccgaggacagcccaggccacgcacccacccgg

SEQ ID NO: 94549 - RNA, 76 nt, Homo sapiens
ccggcgcgccccacgggccaggaggagacaacgggcaacccccagaaagcggcacgccacggaggaaacacagccc

SEQ ID NO: 94550 - RNA, 79 nt, Homo sapiens
aagagagccccaggccagaagagagacccgacgacggaccgcacacggagaaggaagcagacggggcaccagagccagg

SEQ ID NO: 94551 - RNA, 71 nt, Homo sapiens
agagacaagcaagaaagaaaacccccgaccagggggccccaggacccggacagacccaaaagggaaaaagg

SEQ ID NO: 94552 - RNA, 85 nt, Homo sapiens
cggaggacgcggcagcccgggagcggcgagggaaaagcgaggcaaggcaggcgggcaggcagcggaagagaaagaccgaggcaaa

SEQ ID NO: 94553 - RNA, 68 nt, Homo sapiens
aacgcacacaacccggagaagagaaaggaaaacagaggagaggcgacaagagcgaggaagcacacagg

SEQ ID NO: 94554 - RNA, 72 nt, Homo sapiens
caccacaaaggcccccggaccaagcgagcaggagaggaaaacacgcaaaagaagcagaacaacgcagacaga

SEQ ID NO: 94555 - RNA, 76 nt, Homo sapiens
ggcccagcgcccccacggagcagcacccacccgcacagccgagcaaaagaagcgaaccgggagcgacacaccccag

SEQ ID NO: 94556 - RNA, 79 nt, Homo sapiens
cgcccccccggcacccccggccccggagcgccggaggcggccgcaccgggccgaggcccaccgcgcgaccccaaacgcc

SEQ ID NO: 94557 - RNA, 80 nt, Homo sapiens
gggccgagcaaccagaaccggagcaggaggcgcacaacacccagggccaagccgcccgccaaccggcagcgccgacgaca

SEQ ID NO: 94558 - RNA, 76 nt, Homo sapiens
gacccaaaacacgcggaaaacgcgagacagacgaggcccagacccaaagggagacacagcaccagagaaaaaaaac

SEQ ID NO: 94559 - RNA, 79 nt, Homo sapiens
gccgaaccaaagagcccaaaagaaccccacgaaacaggcgccaagggacaaacaaagccaagcaagagagccggaccga

SEQ ID NO: 94560 - RNA, 64 nt, Homo sapiens
ggaagggggaaaggcaccaggacaagcaaagggacgggagaaagaacagacaagccgcaagaac

SEQ ID NO: 94561 - RNA, 81 nt, Homo sapiens
gcagagcgggcaggacaaccaggggaccagagaggacggcaccagccaggaggccccccagccagcgcagggcagaaggcc

SEQ ID NO: 94562 - RNA, 83 nt, Homo sapiens
gcccggaccgcagaagggagaccacagcaagacgccgggaccccggaaaccagaaagggcagaacacacacgccaagcagaaa

SEQ ID NO: 94563 - RNA, 79 nt, Homo sapiens
gcggaaagcaccacggaaacgcacccgggccacgagcgccccagcaccgcgcaccaaggaagacacaagaacaaggagg

SEQ ID NO: 94564 - RNA, 72 nt, Homo sapiens
cagagggggaaagccaaggaaaaacggagagccacaaaaaaggaagcgaaagcacaaccaaggccggccccc

SEQ ID NO: 94565 - RNA, 83 nt, Homo sapiens
gacaacgagcgcaagcgcaagcggagagcacgacaagaagccgcggcagggcacggggcgggagggaccgagacgcggccgaa

SEQ ID NO: 94566 - RNA, 73 nt, Homo sapiens
gggcggaggcgggcggccagggcacgggagcgggaaacgcacaacagagaacagaaaagacccgcagacaacg

SEQ ID NO: 94567 - RNA, 58 nt, Homo sapiens
ccgaacacacgggaaagccggcaggggggggaaaggggagcaagaagaaagagcaggg

SEQ ID NO: 94568 - RNA, 70 nt, Homo sapiens
gcccgggaggccggaaggcgcgcagaggaggggacagaagaccccggccgagcccggaggagaaagacca

SEQ ID NO: 94569 - RNA, 75 nt, Homo sapiens
ggcacggagagcacgagacccggggcgggaacgcagcaggacaaacggacccaagccggggaaccaggaggagag

SEQ ID NO: 94570 - RNA, 76 nt, Homo sapiens
gagagagggaagcgcccggccgccacccgggaggggccagaagaggacgccaagggccccagagggcaaaaaacga

SEQ ID NO: 94571 - RNA, 79 nt, Homo sapiens
gcacccgcccgcaccgccgcgggagcaccggagaggggccgcggaaaccggagggaagggcggaggaaggcacgaccgg

SEQ ID NO: 94572 - RNA, 40 nt, Homo sapiens
cgaccacggcacacgcgacagaagccacagggggcagcgc

SEQ ID NO: 94573 - RNA, 74 nt, Homo sapiens
gaggcccaaaaagaaggcaaagccaggcacggcgggagaccggaaaccgagagaaacgaagacgaagaaacagc

SEQ ID NO: 94574 - RNA, 90 nt, Homo sapiens
gcggcagcggacgaggccaagaggaagaccggcaggggaggagccggcagcagggaagcaggcgcgaggaacagaaggcgaggaggaggc

SEQ ID NO: 94575 - RNA, 75 nt, Homo sapiens
gcgaaaccgagcaggcagagagcagaagaacacagacagcggaagaggggccacagggggggaaggagacgcgcc

SEQ ID NO: 94576 - RNA, 74 nt, Homo sapiens
ggcgggaccccacaagcccaacaccgccacggcgaggaggccaggcaccagacacagcgcagaaacagggggca

SEQ ID NO: 94577 - RNA, 67 nt, Homo sapiens
cggaaggaacaagacacagaccgaagacaacgaccggaagaaggaaaacacaggccccaccaagaga

SEQ ID NO: 94578 - RNA, 80 nt, Homo sapiens
caagaagaaacgccgggcagagccccaaccaccaggaggaaagcccaggagcagaaggaagaacccccaccacgggccac

SEQ ID NO: 94579 - RNA, 40 nt, Homo sapiens
gaagggacggcggccgaccaacgagagaaacgacaccaag

SEQ ID NO: 94580 - RNA, 77 nt, Homo sapiens
ggggaggccggggcacccacaagcgcacgaccaccaagagagaggcaggaagcacagagcgccggcgaaggaagaaa

SEQ ID NO: 94581 - RNA, 69 nt, Homo sapiens
caccacagaaacaaaagcaacaaagaggggcgagaaaaagcggagaaaaaacaagcgaagggcagaaag

SEQ ID NO: 94582 - RNA, 65 nt, Homo sapiens
gaacgaagagcaccgggagcggcgaagaggcaccggaggagcaggagcggcccccaggacaaaga

SEQ ID NO: 94583 - RNA, 77 nt, Homo sapiens
ggcgggaccgggcgcagacggcgagaccccgcacaggcacggccggaaggacaggcaagacccaggacggcggcgca

SEQ ID NO: 94584 - RNA, 76 nt, Homo sapiens
ggagaggagagcacacggcaccgagggagacagggaggccgcacagaggaggagcaccaaaccgagggagggcagc

SEQ ID NO: 94585 - RNA, 80 nt, Homo sapiens
gagcggaggaggggccccaggcgcagcagacaaccaggacaacccgggcaggccaacaagcccaaaggaaaagcgaccaa

SEQ ID NO: 94586 - RNA, 65 nt, Homo sapiens
ccaaggggggaggagggagaagaagcgaaagacgccacccacccggagacaacgcggaaccagca

SEQ ID NO: 94587 - RNA, 55 nt, Homo sapiens
ggaacagaaacagaagcgagcacaacaggggggaccacacgccaaaggcacgggg

SEQ ID NO: 94588 - RNA, 72 nt, Homo sapiens
aagcaagagcgaccggaggcccgagaagaagacaagagacacagcaagacaaggagaagacagaggagccag

SEQ ID NO: 94589 - RNA, 71 nt, Homo sapiens
agcaacgccagagcccagggcccagaggaccccagccgcgcccgggagagcaagaaccccagaacccagcc

SEQ ID NO: 94590 - RNA, 64 nt, Homo sapiens
aggcggcgcggagagggggcgcgagcggggaagccggaagagggcccccaaccagacccgagga

SEQ ID NO: 94591 - RNA, 75 nt, Homo sapiens
ccacaaagacccccagacacacacacccaacccaaaccaaggacagagaacgacacccagaacacagaaacagag

SEQ ID NO: 94592 - RNA, 72 nt, Homo sapiens
gacaagggcagcccaaggacacaaggaaagacacagggggagaggcaccagcaacagaccaaccgcagcaag

SEQ ID NO: 94593 - RNA, 77 nt, Homo sapiens
caaggaggccccagcggaccgaacaggggagccgccaccaaaagcagacggaaaacccacggggaagaccacacccc

SEQ ID NO: 94594 - RNA, 72 nt, Homo sapiens
cccacaggggggggcaaacccgagagaacggagagaacacaagaagaaagacagcacgggccgagccgcgca

SEQ ID NO: 94595 - RNA, 83 nt, Homo sapiens
cgacgcgcgggccgcgagcggggcgacccgaggcgagagccacagaaggaggaggggacagcagcaggagcccagcaaagcca

SEQ ID NO: 94596 - RNA, 76 nt, Homo sapiens
gggagggcaacgagcacaacaggagcacgaggagggcaggcaaccaggaccgggaacggcccccacgcggcggacg

SEQ ID NO: 94597 - RNA, 79 nt, Homo sapiens
cgagcgagagcccccccaagcagcaggaggcgccccggcaaaacaaaaaaagaaccccggcaaggcccagacggcaaac

SEQ ID NO: 94598 - RNA, 89 nt, Homo sapiens
cggagaccgacgcggaaaaaaagacccaggaggagcaacacgggaccgacgggacgggcccacgagcacacggccagcgcaggcagggg

SEQ ID NO: 94599 - RNA, 75 nt, Homo sapiens
aaccgggaaagccaccgaaaagcaacagcgcacaacacagaaagaaaaacagagacgaaaaacggcaaaaccaca

SEQ ID NO: 94600 - RNA, 66 nt, Homo sapiens
agaagcccggggaaacgcaaacacagagccccggggcccgcgcaaaaccaaccggaagggaaaggc

SEQ ID NO: 94601 - RNA, 52 nt, Homo sapiens
ggggaacgggaccaaaccgcaaagccaccaccacaggcccggaggcggagcc

SEQ ID NO: 94602 - RNA, 80 nt, Homo sapiens
agggaacgcccggcccagcccccgccccggagaagcaacagacccacgagacaagaaaggaccaagaccaacggggaaag

SEQ ID NO: 94603 - RNA, 76 nt, Homo sapiens
acgagccagggcgggagcgacgcggggcgggcccgggggcccagcgggcgccgcgcacgcgagaacagacgacaag

SEQ ID NO: 94604 - RNA, 85 nt, Homo sapiens
acacagccccggcagcgcaggacaccggagacgccaaggaggcccgaacggcgcagagcaggagcagacgcgcagggagcaacag

SEQ ID NO: 94605 - RNA, 66 nt, Homo sapiens
cgccgaagacgaaggaaaaggacaagccgacaggccaagagcagcagacaggaaccccagagccca

SEQ ID NO: 94606 - RNA, 112 nt, Homo sapiens
cagcacaccggaggcaacgagagccccacgcgggaaaaaccacccggacaggaccccgccaggaaacaggagaagggcacccaagaagaccgaaggggagcaagcaggccag

SEQ ID NO: 94607 - RNA, 72 nt, Homo sapiens
cacaagaggagcaagcgcagaagcgcgaagagcagcagaaacggaagaaggcacagacaaaagcacacacgg

SEQ ID NO: 94608 - RNA, 54 nt, Homo sapiens
gaaacaaaaagacaagcacgcccccgaaaggccgacagaagcgaaagggaggag

SEQ ID NO: 94609 - RNA, 76 nt, Homo sapiens
cacaacaaagcaagaacaaacaagaggacgcaggaaacaagaagcagaaaggaaggaaacgaaagcaccgcacacc

SEQ ID NO: 94610 - RNA, 92 nt, Homo sapiens
cgggccccaccaacggccacccaagcacagagacaagcagaccggaagaccgacggaagaccacaccccgagggagcccaggacaccacgag

SEQ ID NO: 94611 - RNA, 79 nt, Homo sapiens
ggcacagggacacccgcaaaaccccaacaacgaaaccacagaaacaaccgaaccagagacagcgaaagccgcagcaagg

SEQ ID NO: 94612 - RNA, 75 nt, Homo sapiens
gcgccagccgcaccggcaccaccgccggcgcggacgggcgaaccgaccaagaacaacacccagagggccaggaga

SEQ ID NO: 94613 - RNA, 63 nt, Homo sapiens
caaagagagccccaggagaaggggaaaagccagccagaacacagaacagaacacacggaaccc

SEQ ID NO: 94614 - RNA, 82 nt, Homo sapiens
cgaacccccaagcgaccaaggaggagccgccagaacgcggaagcgagcccccaggaacaacgccagaaagccggaaccggga

SEQ ID NO: 94615 - RNA, 83 nt, Homo sapiens
aagagaagaagaagcaggagaacgaaacggagccagagaaggcagaagccgccaacaccacaacccccgagaccagcgggacc

SEQ ID NO: 94616 - RNA, 75 nt, Homo sapiens
acaccaaaccaccagaacagcaggacggggagcaacacagcaacaaagccaacccaaccgagacaggacagaaga

SEQ ID NO: 94617 - RNA, 67 nt, Homo sapiens
cgcaggcagacaaaagggccaaagaagggagagaggcaagagcaacgaaccaaagcaaaggaggccg

SEQ ID NO: 94618 - RNA, 70 nt, Homo sapiens
aaacgagggcacacaaacagagcagcacacaggacacggacgacaccgagcccaaccgaccaaccacaac

SEQ ID NO: 94619 - RNA, 75 nt, Homo sapiens
gccgcgccgcgcgccgggccgcgcccccaggagaaccaagagggacgccccaaggggacgccggcaagaggaaaa

SEQ ID NO: 94620 - RNA, 81 nt, Homo sapiens
cagacccagcaccagaccaggcggcacccgccccgaggaggggaccagacacagcgacagggggaccgcggcgcgagggac

SEQ ID NO: 94621 - RNA, 77 nt, Homo sapiens
acacacgagacagccaaaaagcagaggcggacaaaggaggaacacacggacccgcaggcccgcaggacagagacggc

SEQ ID NO: 94622 - RNA, 88 nt, Homo sapiens
cgagcaccgcgccggcccagcaccccgagaaccgcaggagccagagaaacagaagagcagacggccggcccgcaaaaggaagcacaaa

SEQ ID NO: 94623 - RNA, 85 nt, Homo sapiens
aaaaaggcaaccacagagagagagagggaggggaaagaaccggaggcgaagcaggccaaagaagaagccaggcgaaagaacagac

SEQ ID NO: 94624 - RNA, 47 nt, Homo sapiens
cggagaaaccagagagaaccgcacgccggaaaggaaaaacaccagaa

SEQ ID NO: 94625 - RNA, 59 nt, Homo sapiens
gcgaacaggagcccgacagaagcggaagcgggcccccaggcaccccagccgcaaccgcc

SEQ ID NO: 94626 - RNA, 67 nt, Homo sapiens
gaagagagacagaaacacagcaacggcaagacggcaaaggaacacgcaaacacacaagaggggacaa

SEQ ID NO: 94627 - RNA, 64 nt, Homo sapiens
cagacagcgaccccaggagagaggacagcccaacagaggggaagccaacagcgggacaaacgga

SEQ ID NO: 94628 - RNA, 61 nt, Homo sapiens
cagaggccggaaaagccccaaacgcgccaacgaaaccccaccacgcggcaggggccgccga

SEQ ID NO: 94629 - RNA, 70 nt, Homo sapiens
caggaacagggaccacggggaccaacagaaaaagcacaagaaaggccgggcaggagaggaccggcgcaca

SEQ ID NO: 94630 - RNA, 33 nt, Homo sapiens
ccccgagagcgagaacaggggcagagcaaggcc

SEQ ID NO: 94631 - RNA, 70 nt, Homo sapiens
cgacgcggcccgccaccggcgcaggggaggcgagagaccaaaggaagaagcagaaggaccgagccaaggg

SEQ ID NO: 94632 - RNA, 69 nt, Homo sapiens
aacaaggagcagaccgaaagcaagacagaagaggaggcgagcagaagcaaaggacaacaacaaacaggg

SEQ ID NO: 94633 - RNA, 62 nt, Homo sapiens
gggagcccagcggcgcgccggcagcagggaacagcaaaccaagccagagaaagcaaaagaaa

SEQ ID NO: 94634 - RNA, 78 nt, Homo sapiens
cgggagccgccgccggccacccggcccccaaaacacaagaggacggagaagcgacgaaagaagccgggacaaggacca

SEQ ID NO: 94635 - RNA, 73 nt, Homo sapiens
accaaaggagcaaggagaagagccggggaggagaggagaaaccaagcagacccaggcagcaaccaccggaggg

SEQ ID NO: 94636 - RNA, 70 nt, Homo sapiens
cgcaccgccaccgcaaggacaaagaagggcaaggccagagaaggcgggagaaagacacgaaccacagaac

SEQ ID NO: 94637 - RNA, 79 nt, Homo sapiens
cgcgagaagcggcggccgcgcccaagccggcaccgagcggcggagacggcgagcacaagcgagaacaagccaaagacag

SEQ ID NO: 94638 - RNA, 43 nt, Homo sapiens
ggagacacggccagacgcccccaagacggcaaccgcccagcca

SEQ ID NO: 94639 - RNA, 80 nt, Homo sapiens
cccacggacggacgccagccccacaacaggcgacgcgccacagagcgggcgggcgggccacgcggcgggacaggaaccca

SEQ ID NO: 94640 - RNA, 55 nt, Homo sapiens
gggcccacgcacagaccccgaagagggacagagcaaggaaagaacaaagccgaaa

SEQ ID NO: 94641 - RNA, 55 nt, Homo sapiens
agaacccgggccagccgccaggcacaacagacagcacccggcgcaccccgagacc

SEQ ID NO: 94642 - RNA, 53 nt, Homo sapiens
caggcacaacagccggaaggacaaacaggaaaagcggagagcacgcgcccagg

SEQ ID NO: 94643 - RNA, 76 nt, Homo sapiens
ccaagcagcagccacccagcggggacgaacaggggggacgcacgcagcacgggcgaggcgcagaaacagccaggac

SEQ ID NO: 94644 - RNA, 74 nt, Homo sapiens
gccaagcaaacgagagaacccaggccccgacggcagcccaccccgagcgcggaaccgcaggggggagggccccg

SEQ ID NO: 94645 - RNA, 65 nt, Homo sapiens
aagcagaagagcgccgaacccccgcaaggaagccaagaccacgaccagagaaaacaagaaggaaa

SEQ ID NO: 94646 - RNA, 75 nt, Homo sapiens
aagccaccgaccacaccgcccggggccgggcagcgagcccacacaggggaaacggccgggaagacaaccagaccc

SEQ ID NO: 94647 - RNA, 76 nt, Homo sapiens
cgacccgcccagcacgaccagccagcagagccgggcccagacccggccggccgcgcgccgggagagagcacaggca

SEQ ID NO: 94648 - RNA, 65 nt, Homo sapiens
aaggaccaagaaccagcaaggaagccccacagccaacagaaagcacaagcaaccccacccaacgg

SEQ ID NO: 94649 - RNA, 79 nt, Homo sapiens
acagcgcccagcgggagccacccacccccgggcaaggacccgccagaccagagaagggccagaaagacaagcaggacgc

SEQ ID NO: 94650 - RNA, 86 nt, Homo sapiens
cccggcccacaggggggggcaaacccgagagaacgggagcaaagagcaggaagcccggaaacaacaggaaaagccagcaagaaaaa

SEQ ID NO: 94651 - RNA, 55 nt, Homo sapiens
ccagcgcacccaggagggaacagcccaggagccagagacaacgaagagaggaaag

SEQ ID NO: 94652 - RNA, 66 nt, Homo sapiens
gagcaggagcccgcggccggccagccgaagaggggcggcacccccgaagacgaccccgacgcaggc

SEQ ID NO: 94653 - RNA, 73 nt, Homo sapiens
aaaggaaagcagagaaggagaagaagggaccaggcccagaggagcacccccaagccaccccaggacagggagc

SEQ ID NO: 94654 - RNA, 71 nt, Homo sapiens
ggcgcaagggggaaggaagcaggcccaggcgggccaggggaagaaggaagaagaacaggaagaaggaaaga

SEQ ID NO: 94655 - RNA, 45 nt, Homo sapiens
gcgaccgccgcggcgaagagggcccccagagccgacggcccccac

SEQ ID NO: 94656 - RNA, 82 nt, Homo sapiens
cacaagcacccacacccaaggccgggccaagaacgggaaggagggagcgggcggcgcgacgcgggccgggcccaaaagcgcg

SEQ ID NO: 94657 - RNA, 71 nt, Homo sapiens
cgacgcccaggcggcggaacagggcgagacgaacaacgcgcgcaggagaccaccaagccacaggcacccag

SEQ ID NO: 94658 - RNA, 85 nt, Homo sapiens
gcggacaccagcaagagaggacccgcggggcacccgcaggggcagacagcacaaccagcggaccgccagcagcagccgaaaacgc

SEQ ID NO: 94659 - RNA, 81 nt, Homo sapiens
cgccccggcccgggcgcgcccaccgacacaacacgccaccaccacacccggaggagacccaagaaaggaaacccgggcgag

SEQ ID NO: 94660 - RNA, 78 nt, Homo sapiens
acaaagagcagggggggcgacccagaggagagcccaaacagacgacgcaaacaacagggaaaagaaggaaaacgggcc

SEQ ID NO: 94661 - RNA, 36 nt, Homo sapiens
agaagcaggaaagggaagcagcaagaaaacacggca

SEQ ID NO: 94662 - RNA, 97 nt, Homo sapiens
cgaacgaggccgggaaaacaaacacacagaaaaacaacgaaggaggagaaagacgagccagccgccgagggcccgcgaggagcccaagagccagaag

SEQ ID NO: 94663 - RNA, 87 nt, Homo sapiens
gccgcgggacccccgggccagggaagggaaaaggccgaggcacagcgggaagaccgcaaagacgacccgagacagggaacagcagcg

SEQ ID NO: 94664 - RNA, 70 nt, Homo sapiens
acaagaggcgaaacagaagaacaagaacccaggaacgcagaaaaagaaaccccgagaaaacgagcacaac

SEQ ID NO: 94665 - RNA, 80 nt, Homo sapiens
aggcagcagcccagacgcggcacagagagggccgggagcgcgcagccagcggagcggcggacaccagaagagaaaagggc

SEQ ID NO: 94666 - RNA, 81 nt, Homo sapiens
agcggaagccgaggcagaggcgacacaagaagagggcggagcggagacgggagaagaaaagacgcccggagcacacaaggc

SEQ ID NO: 94667 - RNA, 36 nt, Homo sapiens
caccaccgaagcacgaacacagaagacaacgagggg

SEQ ID NO: 94668 - RNA, 79 nt, Homo sapiens
gaaggcggcgaccgggcgcgggcaaggcggccgcagccaagccggaacaggagcggcgagcccaaacgcaagggggaag

SEQ ID NO: 94669 - RNA, 62 nt, Homo sapiens
gagggcgaggcggacgcgcggcgcgcaggagcccccaacaagcccaagaggagagaccccag

SEQ ID NO: 94670 - RNA, 69 nt, Homo sapiens
ccagagaaaggagcacgaaggaacaaagccacgaaaaccaaaggaagagacccagacgaagagcgcaca

SEQ ID NO: 94671 - RNA, 63 nt, Homo sapiens
ggggcggaaggggccagcggagacagcaaggccaggccgggcaccggggaaccaagccgccag

SEQ ID NO: 94672 - RNA, 77 nt, Homo sapiens
aagacacggagacagagaagaagagggaacagcgagagcgcccaacggacggcaaggaccacaaaccaagaccacca

SEQ ID NO: 94673 - RNA, 74 nt, Homo sapiens
ggaggagggagaacggccaaggaagcagaggcagcggaggaggaaaggcaggccaacaaccgcacgccgcggac

SEQ ID NO: 94674 - RNA, 79 nt, Homo sapiens
caggccccgcaggccacccaggcccggaggcagcgcagaaaggcggagccaaggccagaccaagggaaaccacccagag

SEQ ID NO: 94675 - RNA, 57 nt, Homo sapiens
cggcccccaaaggcggaacagagccaaagcgccgcggaggccaccaacagagcaggc

SEQ ID NO: 94676 - RNA, 38 nt, Homo sapiens
aacgggcaagagaaacgaacagaacacagacagcaagg

SEQ ID NO: 94677 - RNA, 74 nt, Homo sapiens
agagaaaggagacccgacgcaacgcggagcgcaaggcgagggacgagaacgagggcggacacaggaagaccagg

SEQ ID NO: 94678 - RNA, 69 nt, Homo sapiens
gcagagaagaaacacggcaaaaagaaaaaccagcgaagcacaggcgaacaagaggcgccagcgggcgcg

SEQ ID NO: 94679 - RNA, 51 nt, Homo sapiens
ggccaaccgaaaggcccagggcgacagccacccgccagggacaacacacgg

SEQ ID NO: 94680 - RNA, 70 nt, Homo sapiens
cggaggagccagacccggggaggcgcacacacaccaaaggacgggccaacgcacggcccggcagagccag

SEQ ID NO: 94681 - RNA, 73 nt, Homo sapiens
cgcggggacgcccccagccgcggggacgagccggaaaggcggggcagcaggacaaacaaagccagagaacccc

SEQ ID NO: 94682 - RNA, 69 nt, Homo sapiens
aaaacccaccggacgaacaaaacgaaggggaacggcacagggaggggacagaccaaccggcagccaacc

SEQ ID NO: 94683 - RNA, 77 nt, Homo sapiens
aaaggcaacaaaaccacgcaggcaacgggcagccggcgaccgcaagaggcggaaaccgcccaccaacaggaagcaag

SEQ ID NO: 94684 - RNA, 72 nt, Homo sapiens
gaagacaaagaacagccacaccagggcccacacaacgcaaggaaagaggaaaaggcggacgcaaccgccaaa

SEQ ID NO: 94685 - RNA, 66 nt, Homo sapiens
ggagacccggggacccccgacgccaggcagcgcccccaaacggaagcaaagaggcaagcccaaaga

SEQ ID NO: 94686 - RNA, 71 nt, Homo sapiens
ggacccccagccaaaggcaaagggacaggcacccaccgcaggcaagaacagcagaaacaacacacaaccgg

SEQ ID NO: 94687 - RNA, 69 nt, Homo sapiens
ggaggaagaggccagacaggacaaggcgagccccaacagaccgggaggaacggggggcgggcacagggg

SEQ ID NO: 94688 - RNA, 73 nt, Homo sapiens
gcaggcaggcagggaacacacaagagacggaagcagaaaggggagaaaacagaagacacgacacaagaccgag

SEQ ID NO: 94689 - RNA, 76 nt, Homo sapiens
gcccccgggccaccgccccagcgccaccaaagaccgcgacgccaggaaacgccaagagcgagcggacgaggagccc

SEQ ID NO: 94690 - RNA, 75 nt, Homo sapiens
gggagcgcccggcgcacagcgccagaggcgagaacagagcgagaagacaagcagaagcccggccgcagagaagag

SEQ ID NO: 94691 - RNA, 76 nt, Homo sapiens
gcaaaagccaggcagccccgaggaggcaggcgccaccacagacggaacacccagagaccggcaggcccacagaaca

SEQ ID NO: 94692 - RNA, 72 nt, Homo sapiens
gcaccgacgcacagcgaccaccaacagaccgaagggaacaagagccaacaaggccccaggcaggggggccgc

SEQ ID NO: 94693 - RNA, 82 nt, Homo sapiens
ccgcaaccagacgccagcgggacgaggaccgagaccgcggccgggaccgaggaaaacagggccagacgggaagaaacgagaa

SEQ ID NO: 94694 - RNA, 82 nt, Homo sapiens
gagaggagccagcccccaccccacaggacagcccagagcaagcacacggaggcccgggagccagaccgggagcccgccccag

SEQ ID NO: 94695 - RNA, 78 nt, Homo sapiens
gcacaggcgcaagacacaccggaggcgacggccaggccacagcccggcggcgcggccgcccacgccgaggagcagcca

SEQ ID NO: 94696 - RNA, 70 nt, Homo sapiens
cgaccacacgaaaccgggagaagaagggcacgacggacagaagccacagacggaaaacaaaaggagaaga

SEQ ID NO: 94697 - RNA, 79 nt, Homo sapiens
gcaaccccaccgacggccaggacaaaaccgggaagaaaagaaaggagcaaagcaacagaagacaaggcgcacacacaag

SEQ ID NO: 94698 - RNA, 45 nt, Homo sapiens
cgaggaggaaaggaggacgaggcagggaagacggaagcaccagcc

SEQ ID NO: 94699 - RNA, 82 nt, Homo sapiens
aggaccacagccgagcgagagcaggaagacgggggcggcagggggaccagccagcaacccgcccccggaccaagcaaccccc

SEQ ID NO: 94700 - RNA, 74 nt, Homo sapiens
aagggaccacaaaacggaggagagagcaccaggaagaagaggcggaagaaacaacaagcgcaaggagcgcccaa

SEQ ID NO: 94701 - RNA, 80 nt, Homo sapiens
agccagccaagaccgccgccgccggcccggagaacacacaccgccgcaggcgcccccgggggccaccacagagcccgcag

SEQ ID NO: 94702 - RNA, 79 nt, Homo sapiens
aagacagcaacaacaaccagcagcaacaaggaaacagacagcgcacgaaacacacaaagaaccaccaccgggaggaagc

SEQ ID NO: 94703 - RNA, 74 nt, Homo sapiens
gagcagagccccccccaccagaggacgggaggagcagcaacaggacaaccaccaggaacggaacagggcagaac

SEQ ID NO: 94704 - RNA, 82 nt, Homo sapiens
gccggccggagcagcagcccgaggcaaaagcagaccggaaaacccaccggcaagaccacacccgaggggagcccaggacacc

SEQ ID NO: 94705 - RNA, 93 nt, Homo sapiens
ggagcccgagaaccaccaggggacccaggccaccaccgcccagcaagaacaagcagaaagcacgaacaacgagaacaagacacgagcaaaccc

SEQ ID NO: 94706 - RNA, 77 nt, Homo sapiens
ggccccgccccgcgcgcagcccccgccgagccgccccgagcccgccgccacacccgagcgcaacaggagacgaaccc

SEQ ID NO: 94707 - RNA, 84 nt, Homo sapiens
gcgcagacagcagacacgaccgcaggaacaggaaagaagacaaggcggaagaccagcaagccaccccccaaagcagaaggagga

SEQ ID NO: 94708 - RNA, 81 nt, Homo sapiens
gaggaccgcacgacagcggcccgcggaagacaacccaaacaaacacaaccgaaaccaccggggccaagaggggaccagagc

SEQ ID NO: 94709 - RNA, 61 nt, Homo sapiens
cccacacgcaccagagccagggcgcaggagcagcagcacagagagggccgaggcagacaag

SEQ ID NO: 94710 - RNA, 77 nt, Homo sapiens
aggcgggacgggagacccgcaacgaaaacccccgggcccggagacgcgacagaaacagggagcagggcggcagaccc

SEQ ID NO: 94711 - RNA, 79 nt, Homo sapiens
gcaggaacagacacggggaagcgcaaaaacaagacggggcgccccacagaggggcgacgccacagaaagcccgccccag

SEQ ID NO: 94712 - RNA, 88 nt, Homo sapiens
gagcggccggagccgcggcggccgcggagagcaaaagcgcaaaggcggaagggccacgacacgagaaccccaaccgggggcacagaca

SEQ ID NO: 94713 - RNA, 75 nt, Homo sapiens
aacggcaggggagcagaagaggaagaagcagaacgggcaggaagaccgcaggaaagcaggaaggcaagaaagcca

SEQ ID NO: 94714 - RNA, 67 nt, Homo sapiens
gaagaggagaagacaccaaaaagcaaacggaccagaccgaccaccaaaaaacgacccagaaaaagaa

SEQ ID NO: 94715 - RNA, 84 nt, Homo sapiens
ggcgcacggcaagagccccacagcgggaaagagaacaccaggcacgcccggaagccaacacagcgagaagcaaacaccgcaccg

SEQ ID NO: 94716 - RNA, 81 nt, Homo sapiens
ccgcgccacccggggccgccgcgcaggagcccccggagcgagcgcacagcgaggaggggggcgcgcagcccggggaccccc

SEQ ID NO: 94717 - RNA, 72 nt, Homo sapiens
gcgaacaaaaaagagaagaggaaaggccaggcgcagacacccagcgaccggcacccggaggcaggcaaggcc

SEQ ID NO: 94718 - RNA, 80 nt, Homo sapiens
gccagcgcccagcaaggggagcccaggaggcgagcaaggcacccgagggcgaggccagccgggggcaccgggagcgccgg

SEQ ID NO: 94719 - RNA, 85 nt, Homo sapiens
agggaagcgcagaaagcaggcgaacccgcggcgcaaaacggagaacggcagcagccaccaccaacagccacaagggcaccggcac

SEQ ID NO: 94720 - RNA, 54 nt, Homo sapiens
gaagaaggcacaagaaagcagcgcacgcagaggggcgggcacgcacgacagcgg

SEQ ID NO: 94721 - RNA, 120 nt, Homo sapiens
ccgacgggagaggcggccagaagaaaacgaggggcggaacacccgccaaagcagagaaaaaagaaggaaccagcaaagcgccacgaagcacaagcaagaggaccagccaaaaccacacag

SEQ ID NO: 94722 - RNA, 74 nt, Homo sapiens
gcagagaaccgagaaagcaacggaaacgaagaaggcccagcccaccaggacgcaggcccaagaccgagccaccg

SEQ ID NO: 94723 - RNA, 72 nt, Homo sapiens
gcacccggagggaaacgggcaagaggccccagcccggaaaaggagggggggcaggggggagcccgcgggccc

SEQ ID NO: 94724 - RNA, 94 nt, Homo sapiens
ggccccagcagcccccgaaggcccacaggacaggagagaaagacgagacggcaagcaggaaacggaggacggggaaaaaggaccacaagccacg

SEQ ID NO: 94725 - RNA, 90 nt, Homo sapiens
aagagcgccaggcgccgcgggggacagaggccaagcaagaaaaaaccaccccagcccagaaaacaccaaccagcaccaggaaaaacagcc

SEQ ID NO: 94726 - RNA, 77 nt, Homo sapiens
agcgcagagacccagagagaacaacaccagagccgggagcgccacaaggagccaccacgcccccacaacccaaaagg

SEQ ID NO: 94727 - RNA, 54 nt, Homo sapiens
ggcaacaccagacaccaaggacagcccgcaagcgacaagcccacgagacgaacc

SEQ ID NO: 94728 - RNA, 66 nt, Homo sapiens
cgggagcggcccgcaccgggggagacgcgggcccaggcgccaaaagccggaaaagagcaggagagg

SEQ ID NO: 94729 - RNA, 79 nt, Homo sapiens
ccccaaaaaacagaaggagcaaggaagaaaggcagcccaaggccaaccccacgcaccgcccgccccccgaggagcccaa

SEQ ID NO: 94730 - RNA, 67 nt, Homo sapiens
cgagaaaacaggcaacgcgaaaggaggcaagaagacaacggcaagcggagaagagcaaggccgaacc

SEQ ID NO: 94731 - RNA, 85 nt, Homo sapiens
ggcccaggccgagcccccagggaacaagacagcaaacagcgcccgcggcaggaaggagccaaggcccgaggaccagccccggaca

SEQ ID NO: 94732 - RNA, 89 nt, Homo sapiens
cgcagacggcgcccagcaacacagaagccgacaaggcgcaagcgaaaacagaccgcgagcccagagggcaaaacacagaggccgcaaag

SEQ ID NO: 94733 - RNA, 57 nt, Homo sapiens
cagacgcagggcgcccccgggacccaaccccaaaagaggacccaggcgccaaccgaa

SEQ ID NO: 94734 - RNA, 87 nt, Homo sapiens
gcaaaggggaggacgcagcaaaccaccagaagggaaagggagcagcaccggccacacccacagcacgaccggaacccagcgaccgac

SEQ ID NO: 94735 - RNA, 67 nt, Homo sapiens
gcgagcaaaccaccaaaaaagcggaggcgcgcaggagccaagggcacgcggaccacccacccaaaga

SEQ ID NO: 94736 - RNA, 74 nt, Homo sapiens
aaaggcaccggggacgccaccggagaagggaggaaaaccaacaagacacacaccagagggagcaccgacggcaa

SEQ ID NO: 94737 - RNA, 82 nt, Homo sapiens
ccgggacgcagcaccagggggcacgcccccggcgcgcacaacagagagggccgcagcagcagggacccaaacgaggaacggc

SEQ ID NO: 94738 - RNA, 89 nt, Homo sapiens
cgcggaccggggccccggaacccgagcggagcgaagcgcaggcgcggggcgcggagcgggagagagaagaagaaggaggccgcggccag

SEQ ID NO: 94739 - RNA, 76 nt, Homo sapiens
gaaacgcaagaggagcgaagcaacgaaacagccaaaaagcagaggaggagacaggcgaggcagcaaaagccaaggg

SEQ ID NO: 94740 - RNA, 81 nt, Homo sapiens
gagcccccagcgcagcggccgcgggggaagaagggaagccagcagagccacagcccacaccagccagcaaggagaccggcg

SEQ ID NO: 94741 - RNA, 59 nt, Homo sapiens
gccgcacaggaccggccaccgcccccgcaccgacggccagagcagaaaacaggaaagag

SEQ ID NO: 94742 - RNA, 102 nt, Homo sapiens
cgccacaaccgccagacaaccggagccacgccccacgaccgccagggggacgcggaagagacagcagaacaagagccaggaccggacaggaagggagcccgg

SEQ ID NO: 94743 - RNA, 76 nt, Homo sapiens
agagaggaagaagaacgacccgcccggggcagcagaccccgcgaggcaagacaagaccaggcacacgaccaagaag

SEQ ID NO: 94744 - RNA, 67 nt, Homo sapiens
gaccaaaagaacaggaacgggacaagcagcacacacacagacagagaacgaggaagaagaggaggaa

SEQ ID NO: 94745 - RNA, 78 nt, Homo sapiens
ggagggaagaaaacggcaccagaggaaacacacgaccgagccaggacgcccagggccccgcgaaggggaagggccaag

SEQ ID NO: 94746 - RNA, 76 nt, Homo sapiens
cggcaccgccgaggcgcggaacgacggggcaccccggaacagacaaagggccggcggcacccacgcgggggacggg

SEQ ID NO: 94747 - RNA, 62 nt, Homo sapiens
cagcacggggaaacgaccgccccaaaacgaaaaacagggacagaaccaaaagagcaaaggag

SEQ ID NO: 94748 - RNA, 59 nt, Homo sapiens
ggaaaaaacccaaggcgcaaagggggcagaaccgaggggccggagcagccgcacccggc

SEQ ID NO: 94749 - RNA, 77 nt, Homo sapiens
gcggcggcggcggcaggacgcgccgggacgaggcgcagcacccgggaggccggaaggcacgcccagcaccagggaga

SEQ ID NO: 94750 - RNA, 71 nt, Homo sapiens
agggagcggacaacgccaagcaaaagaccacaaaacagcagcaagagaacccgaaggaagagagaagacaa

SEQ ID NO: 94751 - RNA, 77 nt, Homo sapiens
agaggaaacaaagaacccgcaaccagcagaagaaaggacggagaccgcccaagccccaaggaccgcacgccgggcca

SEQ ID NO: 94752 - RNA, 56 nt, Homo sapiens
agacgggcgccacagacacaaaaggccgagagcgcggcagaagagagacaacaaag

SEQ ID NO: 94753 - RNA, 80 nt, Homo sapiens
cgcgccagccccccacggaaaggcggggaaaacagagaccggggaaccaccccaccaaacaaccccaaggaggaccacac

SEQ ID NO: 94754 - RNA, 67 nt, Homo sapiens
acaaagaacacaaggggaaagagaaaagagcaccagacaagaacgccaccggggacaggagaggaga

SEQ ID NO: 94755 - RNA, 80 nt, Homo sapiens
gcccacacgggcagccggggacccagagcaaccaaaacaggacaagaaacaccaaacaagcaacagccaagaaaaaacgg

SEQ ID NO: 94756 - RNA, 82 nt, Homo sapiens
aaaaaagcaccaggggaagaagaagaaacagaacaagaacgcaccgggcggagaagccgcaaggccaaaggcacagcagcca

SEQ ID NO: 94757 - RNA, 75 nt, Homo sapiens
cccccggccggggggaaggggggagcggcagaaccgcgcgacggcagaagagagaaagccccaggcgagggggcc

SEQ ID NO: 94758 - RNA, 89 nt, Homo sapiens
cggcaggaccagcgggcgggggcccacgaagccccccaagagaacccagggggagccacgccggagcgggcaccggcgcggacccaccg

SEQ ID NO: 94759 - RNA, 75 nt, Homo sapiens
cagagacaaccgcacaaaggaaaagccagccgggcagaccagaagccacaggcccggacgggcgggaggggccag

SEQ ID NO: 94760 - RNA, 39 nt, Homo sapiens
acaccagaacaaaaggcaggggaaaaggacagggcccag

SEQ ID NO: 94761 - RNA, 85 nt, Homo sapiens
aaaccaacagaagggcaaccagccccaagaacccaaagagagagaaaagcaccagcaacaaggggcggggcaacacagaaggaaa

SEQ ID NO: 94762 - RNA, 100 nt, Homo sapiens
ccggcgagcggacgggaagaaccaacgggaggcaagcagacaagacggaggagcgacaaaggagagaggcaccaccagaccaaagagagcgagaaccaaa

SEQ ID NO: 94763 - RNA, 53 nt, Homo sapiens
gcgcagcaccaccaacagggagccagaaggaccagcagggccggcaacacccc

SEQ ID NO: 94764 - RNA, 85 nt, Homo sapiens
ccgggagggaagaaggagcggaccaaagccgcagggggccgacgacgagccccgcgaggagcgcagcggagaggccagaacgccc

SEQ ID NO: 94765 - RNA, 75 nt, Homo sapiens
gaagagccagaagcaaagaggcacgaaaacacaagcgaaaaccaggcagagggcaccacagacaagaaagccccc

SEQ ID NO: 94766 - RNA, 79 nt, Homo sapiens
gcaacaaggcaagacaaagagaagagacggcaagcagaagacagcggacaggcccgaagaacaccgaagcagcacacag

SEQ ID NO: 94767 - RNA, 77 nt, Homo sapiens
gcaacagaagccagaccggcgcgagaacaacgccaaagcggacgccggccaccacgaaggcgacacagaagacgagc

SEQ ID NO: 94768 - RNA, 74 nt, Homo sapiens
ggacgcaagaaacccaggacgagaacagcaacagggccagaagagcaacgacacaacacagaacagccgcaaaa

SEQ ID NO: 94769 - RNA, 82 nt, Homo sapiens
gagaccagaggccgaaccgggcgacaagaggccgggcgccccgcaggacacaagaaacgaggaaagaaccaaggaagacacc

SEQ ID NO: 94770 - RNA, 74 nt, Homo sapiens
ggaagcgcgagcaaggccgccagaggcagaacgaaaccagaacagaaagggacgggacagcaaaaggcgaccag

SEQ ID NO: 94771 - RNA, 52 nt, Homo sapiens
ccgaacgagcggaggccaacaaaagagagacacagccgaaagcggacgcaag

SEQ ID NO: 94772 - RNA, 75 nt, Homo sapiens
gggggccagaggggagcacagagcgagaccaggaaagaagggggcagaagagggaaccccggggccaacagcacc

SEQ ID NO: 94773 - RNA, 81 nt, Homo sapiens
accagcgcgggaggcagaccggacgcaagggaggaggaaacaggaaccaaaaggacacaaagaagaacagagaagaagaag

SEQ ID NO: 94774 - RNA, 75 nt, Homo sapiens
cagcaccgcagcacggagcgccgaaggacccgcaggaaagggaacacgggggggacagcccaccacaagcaggcc

SEQ ID NO: 94775 - RNA, 73 nt, Homo sapiens
gggcggcgagcaccaaccggcgcggacccgggacaccaacagcccgaggcacaggaacggccgagcgaccagg

SEQ ID NO: 94776 - RNA, 64 nt, Homo sapiens
cccggcgccagccacggacgccacagagggaagaccccaaggaagaagacggcacgggaccccc

SEQ ID NO: 94777 - RNA, 88 nt, Homo sapiens
ggaagcccccgcggaccgaaagacacaaggggggcccccggagagacagaaccaacaccagagaagcgccgcgaacgacggaagcacg

SEQ ID NO: 94778 - RNA, 36 nt, Homo sapiens
acaagaagggcaaagccgaaacggcacgcgccgcca

SEQ ID NO: 94779 - RNA, 67 nt, Homo sapiens
gaagaggaacggggaaaaagagagcgaagaacgcaaaagaaacggccccagcggaggaaacacacgg

SEQ ID NO: 94780 - RNA, 83 nt, Homo sapiens
gaggaaggcggaccgcaaaggcgagaaggaagaggcagagagacgaagagagaagcagggcagaaagagcggaaacgagaaga

SEQ ID NO: 94781 - RNA, 60 nt, Homo sapiens
cggagccaggaggggaagcgaggcgggcccgcgggaccaagagaggaaaacccaagacaa

SEQ ID NO: 94782 - RNA, 44 nt, Homo sapiens
gacggccgcgccaagcggaaagagcaaaagaaaaggccaaaacg

SEQ ID NO: 94783 - RNA, 86 nt, Homo sapiens
aggcccagccccagcacagacaaagcggggcaagcgacgccgggcggaaaacaccccaaaagccaaaagggaaaggaaaagaccaa

SEQ ID NO: 94784 - RNA, 91 nt, Homo sapiens
aagccacacgaggagggccaagacgggagagccacgggcccccggcaacgaacgggcacggggccaaaaaggcacgagggaacgggaaaga

SEQ ID NO: 94785 - RNA, 84 nt, Homo sapiens
ccgaggggaggaggagccccaggaaagcgccggacgcaggcggcaggccccgagcccaacaggcggaagaggcgggaacaggcc

SEQ ID NO: 94786 - RNA, 41 nt, Homo sapiens
aggagaccaagcgcacagccaggagccgcccggcaaagcga

SEQ ID NO: 94787 - RNA, 74 nt, Homo sapiens
gccaaggcggaaaagcccaagaaacaaacaagccacacaaccacaaccccaaaagagccacgcgcggaacacaa

SEQ ID NO: 94788 - RNA, 76 nt, Homo sapiens
cgacgggcccccgccgccgaggcacggacagaagacacaagagggccagggaccaggggacgcccaagacggccac

SEQ ID NO: 94789 - RNA, 53 nt, Homo sapiens
gaagggccaggacaccagagacagaaaaacggcccggaggcaaggaaacaaaa

SEQ ID NO: 94790 - RNA, 75 nt, Homo sapiens
ggaagaccacaacaagcaagcagcagcacgcgaaaggcccaggcagcgcagagccaacagacgagcagaagccgc

SEQ ID NO: 94791 - RNA, 91 nt, Homo sapiens
caggcacccgggcccagccgggaacccccacgcggccagcgaaaacgcccaggcgccaggggagaggaggcagaaggagaccgcgggacag

SEQ ID NO: 94792 - RNA, 52 nt, Homo sapiens
ccggcgcccgcacccaccgagaaccagccaccgacccaaaaggaaggggaac

SEQ ID NO: 94793 - RNA, 47 nt, Homo sapiens
cgaaagcacagagcacagaaaccaagcaaccagaacaaagacaggag

SEQ ID NO: 94794 - RNA, 51 nt, Homo sapiens
aacccgcagagaaggggcagaccgcgaagaaaggacagaaaggaaccaagc

SEQ ID NO: 94795 - RNA, 75 nt, Homo sapiens
cccaacagacggccgccagcagaggagcagcgagcgggcccggaaagaggcaaacaccgaaagccgaaaagaaag

SEQ ID NO: 94796 - RNA, 74 nt, Homo sapiens
gcgcgccccccccggcccaccagcccaaggcagcagcaccaggaaggaacgggacagcggagcagaggaccgag

SEQ ID NO: 94797 - RNA, 53 nt, Homo sapiens
gccaacaggagagcagaggagacaaacgaacacaagagacagggaacaccaga

SEQ ID NO: 94798 - RNA, 55 nt, Homo sapiens
gcaaacggagccaggcacaagaaaagaggagacagcaaggaagaagaaaagagag

SEQ ID NO: 94799 - RNA, 79 nt, Homo sapiens
ggaccaccacagccaccccagcagaggccaggaagaccagggaagcaaaaaaagccaacggaccccacaaaagagagag

SEQ ID NO: 94800 - RNA, 107 nt, Homo sapiens
cgaaggccgggacccggccccggcccacaggggggggcaaacccgagagaacggaggaaaggcaagggcagaaaagaggggaaaaggccagccgcacgcaggcaaac

SEQ ID NO: 94801 - RNA, 72 nt, Homo sapiens
cagcagcacagcaagccacagagagggccggcagggcgggcaggggaagaagcgaaggagaccgcacagcag

SEQ ID NO: 94802 - RNA, 66 nt, Homo sapiens
agacccggggacccccgacgccaggcagcgcccccaaacgggcgccggccgagcccgggaaaacga

SEQ ID NO: 94803 - RNA, 55 nt, Homo sapiens
agagaagggagagagaccaaagacgagaggccaccccaacccggacgcccgacaa

SEQ ID NO: 94804 - RNA, 72 nt, Homo sapiens
aaagggacagccccgacaaacaggaaaaccagaggcccagaggcggggaccgagcggaggcgggacgcccgg

SEQ ID NO: 94805 - RNA, 81 nt, Homo sapiens
cgggacaccccggaagcgggaaaggaccagccaaggaagcaacacagcagcgagagaagcagaaaaagcagaagaaaaaaa

SEQ ID NO: 94806 - RNA, 77 nt, Homo sapiens
cccaggagaaggggagcgagaccagccccacaccaagcagaaggcccacaccaaaccaacacccagaaggaaccgac

SEQ ID NO: 94807 - RNA, 81 nt, Homo sapiens
ggcgggcaggcggcggaggacacccgcgaccaggaaaacgcaggaggaccgcacacacaccgcaggggccccggaacagcc

SEQ ID NO: 94808 - RNA, 70 nt, Homo sapiens
gccgcgccggagcggagcgcgggcgccggggagccagacaacggcaagcggagaagagcaaggccgaacc

SEQ ID NO: 94809 - RNA, 77 nt, Homo sapiens
ccgcgcggcgagcggcccgcacaaggccggcagaaggacacggaaacagagccccccacagagcacaagacaggacg

SEQ ID NO: 94810 - RNA, 71 nt, Homo sapiens
cgcccagcagccggccagaaccgaggaagacggggagcagagggaaaagaggacgaggcgcgaaaaggcaa

SEQ ID NO: 94811 - RNA, 74 nt, Homo sapiens
cggaacacaacacacagggcagaaccagaagaaaaacgaggccgggaaggaagcaccaaccaggccacaaaccc

SEQ ID NO: 94812 - RNA, 62 nt, Homo sapiens
ccccaccgcccccggcaggggaaaaccaaggggcaaaccaggcaacccccgaccagaaaacc

SEQ ID NO: 94813 - RNA, 94 nt, Homo sapiens
acggccggaggaaccagagggacaacaggcaggagaaagggagcgcaccccagggaacgggcccaaagaacggaaacccaaaggaacgaaaccg

SEQ ID NO: 94814 - RNA, 69 nt, Homo sapiens
gacgcccgaccgcggccgggaggcccgggggccggggcccgaggagcagcagcagcagcagcagcagca

SEQ ID NO: 94815 - RNA, 39 nt, Homo sapiens
cagcggcgggcggggcaccccagagcgcgacagagggag

SEQ ID NO: 94816 - RNA, 58 nt, Homo sapiens
gacagaaagaaaggccaaagcagcaggacgcaagcgcaaacacaccagcacccccagg

SEQ ID NO: 94817 - RNA, 78 nt, Homo sapiens
aaaaaccaaaccgcagccagccagggaagaaggcagcccaccaggcaaaggccagacaagcaggccaggggacggcgg

SEQ ID NO: 94818 - RNA, 81 nt, Homo sapiens
caacacgacccgagaccccgaaaagcgccgcagacagaagggggagaagcggagacggcccgccacgggccccgcagccgc

SEQ ID NO: 94819 - RNA, 66 nt, Homo sapiens
gaccaagaaccaggcggcaaggaagaggcccggaaagggaaaaaccgaggcagagaaagaaacacg

SEQ ID NO: 94820 - RNA, 44 nt, Homo sapiens
agggcaggcggccggcagagggcaacgcccccagccccccaccc

SEQ ID NO: 94821 - RNA, 79 nt, Homo sapiens
aagagcacaaaacccaaaagggcgagcgaggaaggccaacgggggcgagagcacagacaaaacaacaaccagaaaaaac

SEQ ID NO: 94822 - RNA, 84 nt, Homo sapiens
ccggcgccccacccgcccccgcgggcgccgggccaggacgggacaccagcagccgcaacggcacacacgcccgccaccacccca

SEQ ID NO: 94823 - RNA, 71 nt, Homo sapiens
ccgagagccgcccgggccagcggccgcgcacccccggccggaggcaccagcaggacgggcgccgaccgaag

SEQ ID NO: 94824 - RNA, 79 nt, Homo sapiens
cccggcgaccgcaccccccaggcaaaagcagaccggaaaacccaccggcaagaccacacccgaggggagcccaggacac

SEQ ID NO: 94825 - RNA, 77 nt, Homo sapiens
ggcgcgcaggagccaaggcaaaagcagaccggaaaacccaccggcaagaccacacccgaggggagcccaggacacca

SEQ ID NO: 94826 - RNA, 75 nt, Homo sapiens
cggagaaggaaaagaaccagaagcgagagaaaagcccccaaaagcagcacaggggcgagcaccaaagccaaggaa

SEQ ID NO: 94827 - RNA, 67 nt, Homo sapiens
ccccgcgccaggaggaccgcaggaggacgcagacggaggcgaaaagccaggagcaaaagacgagcgc

SEQ ID NO: 94828 - RNA, 75 nt, Homo sapiens
acagccagggcggaagcccgccccagagcagggcggagaacggaaaagcaccaggaagcagagaggaccgcagaa

SEQ ID NO: 94829 - RNA, 80 nt, Homo sapiens
ccgcggggagcgaagcgcgcggcgggagaacagagacccaccaagaaaccagaacccggacaagggaagggcccgaggag

SEQ ID NO: 94830 - RNA, 63 nt, Homo sapiens
gagccgagaccagccgggcaacaggagaagcgagccccgacccaacggaaccgaacccccaca

SEQ ID NO: 94831 - RNA, 63 nt, Homo sapiens
ggaacggcacaccagcacggcaacgggacacaagagaggaaacccccggaagcccccacagag

SEQ ID NO: 94832 - RNA, 82 nt, Homo sapiens
ggcggcaacaggggcgagaaagggacgaaggagacgcaggagggagagcagccagaggaagaagaggaccaccgcacaaaaa

SEQ ID NO: 94833 - RNA, 77 nt, Homo sapiens
gccgcagacccaccccaggagaacagccgcccaccacagggaagcggcacacgcgaccgcaccgacccgacacaagg

SEQ ID NO: 94834 - RNA, 77 nt, Homo sapiens
agcccaaggaccagcagcaggccaccgggagcaggagagggccagaagacaaagggccagaggccaggcacacacag

SEQ ID NO: 94835 - RNA, 64 nt, Homo sapiens
aggccagggcgggcacccccagaagcgagaaacggccgcgagaaccgggcagagcagcccggcg

SEQ ID NO: 94836 - RNA, 61 nt, Homo sapiens
cgaggaggaggcaacgcggggccagacccgacaagcacgaaccaccagagagggggcgccc

SEQ ID NO: 94837 - RNA, 76 nt, Homo sapiens
cagaaaaggaagaaagggacaaagagaggagcagagagaggccgcagaagggcagaagaacaggccgggcacaaaa

SEQ ID NO: 94838 - RNA, 80 nt, Homo sapiens
gcaaaggaacgcgccggaagaaaaggccggacagacagccagagggaaacgagagccagaagggaaagacagagcgagag

SEQ ID NO: 94839 - RNA, 75 nt, Homo sapiens
agacagagacaaagagaagaaaaaagcaagagagacaacacagggaagcaggagaggagcgcagcagacagcggc

SEQ ID NO: 94840 - RNA, 70 nt, Homo sapiens
ccagcgccgcagcacgcggaccagggaggcaggcgacaacagaggagaaggcgaagaaaacagccaagca

SEQ ID NO: 94841 - RNA, 78 nt, Homo sapiens
acgccagacgaccccacccgcgccgcgacccgccagggccccccacgcgagaacccgggccggggcccgggggcccga

SEQ ID NO: 94842 - RNA, 73 nt, Homo sapiens
acacagcagaggaaggcccgcgacaccgaacagcgagcacacggcagacacaagaggcaaagcagggaacaag

SEQ ID NO: 94843 - RNA, 72 nt, Homo sapiens
ggaggccgccagcagaggcggagcccgcagaccgcagaaggccggagacaccagcagggccgcaagagacac

SEQ ID NO: 94844 - RNA, 74 nt, Homo sapiens
gcaggcaaagaacaaacgagcagaccgcagccaaggacaacaaccgacagcccccccacaaaggcaagacagag

SEQ ID NO: 94845 - RNA, 56 nt, Homo sapiens
gaggagggaaggccccccgacaaagccgcagcgaaaacaagaacccggaggacaga

SEQ ID NO: 94846 - RNA, 72 nt, Homo sapiens
caagggagcgaaaagaacccccaaaaggggacgcacaggggcggcagcgagaaggccgaaagaaacaaaaca

SEQ ID NO: 94847 - RNA, 74 nt, Homo sapiens
cgcagagagccccagcaggaaggccaccgagggaacccgaccggacccagccccagaagaggcacacccagaag

SEQ ID NO: 94848 - RNA, 73 nt, Homo sapiens
aggccaggacgagaaaggacggaccagccgagagcggcccaggaggaacaaccagcccacccggagagggcac

SEQ ID NO: 94849 - RNA, 82 nt, Homo sapiens
cgaagcagccgggagccggagcgggcgcggacgccgaggcaccgaggcaccagaggagagcgagccaaggcagcaaggagac

SEQ ID NO: 94850 - RNA, 73 nt, Homo sapiens
aagcgccgccgcggcgcggaagcaacacaacaggaggcggaggcgaaagcggaacgaggccacaaacgaacag

SEQ ID NO: 94851 - RNA, 86 nt, Homo sapiens
agacggccaccggcgggaggaacaaaagggaaagcaggcaggagggagagcgccgaagaaccaccccccgccccgggcgggggaag

SEQ ID NO: 94852 - RNA, 72 nt, Homo sapiens
ccacggccggcccccccaggccaggccggaccagcggaggagcaacagaacggccgagcgaccaggagagga

SEQ ID NO: 94853 - RNA, 52 nt, Homo sapiens
ccgaaggccggcagaaggcaagggcaagggggccacaaagaggacaccgccc

SEQ ID NO: 94854 - RNA, 77 nt, Homo sapiens
cgagaccgcggcgggcgcgagcgaggcgcccagacaccccccccgcccaggagaaccagccaaaaaagggcagaacc

SEQ ID NO: 94855 - RNA, 70 nt, Homo sapiens
accgcggaaagaggggagcgaggacacaccacgaagcacccaagagccgagcaaaacaacaccaaagcag

SEQ ID NO: 94856 - RNA, 84 nt, Homo sapiens
ggcgaaggagcacccggcaggcggcggcggcggcgcggggacgccccggcgcagagaccaagcgagacggccggccgccacggg

SEQ ID NO: 94857 - RNA, 70 nt, Homo sapiens
gaaccccccaaacaccagaggccggcgacgaaagccccagagagaacgacacggccggaagcaaagaacg

SEQ ID NO: 94858 - RNA, 79 nt, Homo sapiens
agaccgcagaaaaggaagcggggaaaaagagaaagacaaacgacccaggccgaaagacaacaagagccccgcacccgcc

SEQ ID NO: 94859 - RNA, 82 nt, Homo sapiens
ccgcgcagcgcgacgcgcgaccagaccggcccccccgaggacacggggggcccacacaagcccccacccgaagcaaccacac

SEQ ID NO: 94860 - RNA, 72 nt, Homo sapiens
gcgccaacacggacacggaccagccacacaagggaaacaccacggagcacacagaaaagaaaggagcccgca

SEQ ID NO: 94861 - RNA, 73 nt, Homo sapiens
accaggcaaccgcccggcccggccccccagaggaggaaccacaagagccagaaggggaagcaagcaggaccac

SEQ ID NO: 94862 - RNA, 82 nt, Homo sapiens
gccggcaacgcggagggagccagccaggggcagccggccgggccccagaagaggcaccaagccagcaaggaggggacaccag

SEQ ID NO: 94863 - RNA, 81 nt, Homo sapiens
accacgaacccggacccccacccaggccagggccagccgccagacgaacgcccccgcaacgccggggagcggaagaaggac

SEQ ID NO: 94864 - RNA, 75 nt, Homo sapiens
aagacgggccgcagaacacgggcgacaaacccaggaacaggagacccaaaaagcaaaaagaacaagacccgaaga

SEQ ID NO: 94865 - RNA, 50 nt, Homo sapiens
accgcgccccccagcaacgaaccaaaagagcagaaggagcgagagaacag

SEQ ID NO: 94866 - RNA, 73 nt, Homo sapiens
gaaggaccccgaaaggaagagagccggaagagcgcagaagccggaagagagccaagccaggcccagcagccgc

SEQ ID NO: 94867 - RNA, 74 nt, Homo sapiens
gagagaacggcacacgcgagcgggcaacaggcggccaaagcgcagcaaggcagcagccgccgggaaacaaaggc

SEQ ID NO: 94868 - RNA, 57 nt, Homo sapiens
gggaccacagacaaagaggaccgaaaagacgcggccccaaaggaaacacccgaagaa

SEQ ID NO: 94869 - RNA, 80 nt, Homo sapiens
cggccacgccccaaggaccgaacaagaccacgccaaggcaagaggaagacagaacgaccgcgagaccacaaacagagaca

SEQ ID NO: 94870 - RNA, 83 nt, Homo sapiens
ggccggggccacgccagcgccgagggcgagacggcaggacacaaagcgagaagacccagcaaccagcagcaagaccaagagag

SEQ ID NO: 94871 - RNA, 82 nt, Homo sapiens
gaaagacaccaccacccacacccaagggaaaaacaagccaggcggcagacaaacggaaccaaccaaagcaaaacagggaacc

SEQ ID NO: 94872 - RNA, 69 nt, Homo sapiens
ggccgaaccccgacccagggcacgagcaaaaaaaagccccgagcaacaaaccagggaacgacgcagcaa

SEQ ID NO: 94873 - RNA, 80 nt, Homo sapiens
gccgccccgaggaggaggccgccccaacagcaccggggcgcgcagacaggacccaaagcggccgcaggggagcacaaccc

SEQ ID NO: 94874 - RNA, 79 nt, Homo sapiens
cggggagccaccgcccagcccaaaccaggagagcgagggagcgagcgggcagcgcggcgcaaaaaccagacaccccaca

SEQ ID NO: 94875 - RNA, 81 nt, Homo sapiens
ggggaaccgaggagagccagagagaagccgcggagaagcgcaccaaggcacacagccagaccccccgacacccagccccgg

SEQ ID NO: 94876 - RNA, 75 nt, Homo sapiens
cgagacccaggaggaggccacaccccccgggcacaccacaggaaggagggccccggagcagccacaccaccgagg

SEQ ID NO: 94877 - RNA, 39 nt, Homo sapiens
gggacgggaagaagaaaggggggcccgagaaacagccag

SEQ ID NO: 94878 - RNA, 86 nt, Homo sapiens
agggaccgccagccagcaagccgcaccgggaggccggccaccgcagacaggagaaacaggagaagcgaggaaaagaaaaaaccccg

SEQ ID NO: 94879 - RNA, 72 nt, Homo sapiens
agcgggccgggaaaagggcacgaggccggaaccgcccagccccgcccgaagggcacggaagagaaagaccgc

SEQ ID NO: 94880 - RNA, 83 nt, Homo sapiens
gcgggagaaccacgaggagaggaggaacgcagggagcccgggcaagaccagcccggcagcagggcgcagccccgcaccaacag

SEQ ID NO: 94881 - RNA, 81 nt, Homo sapiens
cacacacagggaggagcaacagagaagagcgggaagacggaaccgagcgaggaagacagccaagcagagaaacgaaggagc

SEQ ID NO: 94882 - RNA, 51 nt, Homo sapiens
ccgagccagccgcacggccagacagcgacagcgaacgggcacgacggccag

SEQ ID NO: 94883 - RNA, 80 nt, Homo sapiens
ccaagacaccccgaccagcacacacgcaaggagacaggcaccaaaaccagccaagcagcagacgcaaagaaaaggaagac

SEQ ID NO: 94884 - RNA, 81 nt, Homo sapiens
ccaaccagcgggcacggcaagcccgcccaacccacacccgagccgacagacaaaagagcggaggcaccagaggaaagccaa

SEQ ID NO: 94885 - RNA, 78 nt, Homo sapiens
gccgccaccagccagccccaccaaggcggccaggagcccacccgccgagcagcaggggccagcgccaccggaccgcac

SEQ ID NO: 94886 - RNA, 88 nt, Homo sapiens
caggcaagacagcggcccggcgcccgcagcagacagggaccggcgcgcaggccacgacccccagagcaacagcaagaacgaggccaag

SEQ ID NO: 94887 - RNA, 48 nt, Homo sapiens
ccgaaacacacgggagaggccccccaaagggagcgcgaccgccgcgga

SEQ ID NO: 94888 - RNA, 69 nt, Homo sapiens
gcagccgcaaaaacaaggcggaaacaacgggcaaggagggcccagaggagacaggggaaccaggaggag

SEQ ID NO: 94889 - RNA, 73 nt, Homo sapiens
gaagcaggaaggaggcagaggcacaccgaaaggaagaacacagaagaaaaacaaaaagagagagcgaaaaagg

SEQ ID NO: 94890 - RNA, 73 nt, Homo sapiens
cgggacacccggagcgagcaagggaagaagagaaagccgaaaaagacaaggggaggacagcggaaaaaccgga

SEQ ID NO: 94891 - RNA, 70 nt, Homo sapiens
gcgagggaccccggaagaaagggaaaggagcgcacggccgggaaagaccaaaccccaaagcaggccaaac

SEQ ID NO: 94892 - RNA, 76 nt, Homo sapiens
caaaaaaccaaaggagaagaaaaccacagaagccagaaagaaaagccaaaggaaggggagggacccacccgccccc

SEQ ID NO: 94893 - RNA, 77 nt, Homo sapiens
caagacagggcaaaggacagaccaggaaaggggacggccaggacgcacagagggacgacaccagacgcgacggacca

SEQ ID NO: 94894 - RNA, 70 nt, Homo sapiens
aaggccaaaggccaccgccgcgcgcccgcacagaagaggggacgggccaacgcacggcccggcagagcca

SEQ ID NO: 94895 - RNA, 62 nt, Homo sapiens
gaacggaagcggagcagggaagacggagcggcggcccgaaggcccccccagcgccgccgccc

SEQ ID NO: 94896 - RNA, 69 nt, Homo sapiens
gcgaacaaaaagcagcaaaccggaccaccccgaagaaagcacagggacaccgaaagggagcgcaaacgg

SEQ ID NO: 94897 - RNA, 73 nt, Homo sapiens
ggcacggcccggccccgcccggcgccgaggacccccgggaagaaaagggaaccagcggagcgggacaacgcag

SEQ ID NO: 94898 - RNA, 80 nt, Homo sapiens
gcaaacaagccaacccaggaggaaaaacgagcgcaaacgagaacagcacgcacccaagacgccgagacaaggaagcaagc

SEQ ID NO: 94899 - RNA, 80 nt, Homo sapiens
ggccacagccaacaaaggaaggaggggaccgggacacgaaaacccagaggaacgagaagcccacacaccaacccagcaac

SEQ ID NO: 94900 - RNA, 84 nt, Homo sapiens
agagcggaagccgaggcagaggcgacacaagaagagggcggagcggagacgggagaagaaaagacggagaaggaggagcagaac

SEQ ID NO: 94901 - RNA, 77 nt, Homo sapiens
ggagacacagccagccaagcacgccccgagaggaggacggccaacccccgacacgaggccgccgaagacaccaccag

SEQ ID NO: 94902 - RNA, 71 nt, Homo sapiens
acccgaccccgcacagcagaaaagaagacgccacaaacaaccaacaacggagaccagagccaggaggaaca

SEQ ID NO: 94903 - RNA, 72 nt, Homo sapiens
gcgcgccagacccccggcaaagaagacgagaccaacgcgcgggagcgccaaaagcaccaccaccaaaccaga

SEQ ID NO: 94904 - RNA, 76 nt, Homo sapiens
ccaggacgacgggggagccggaccgcccccagccgacagacacgaagcagaggagccagacccaaagcccagacac

SEQ ID NO: 94905 - RNA, 75 nt, Homo sapiens
agcagggcccgcggcgagcgcccgccggcacgccgccaagaagagagcgggcccagagccgacaagcagaccacg

SEQ ID NO: 94906 - RNA, 68 nt, Homo sapiens
gagacaaaacgaacagccaaaagaagaagaaaccgagagaaagacacaagaccggcggggcaacggcg

SEQ ID NO: 94907 - RNA, 75 nt, Homo sapiens
gagaccagcgaagaaggcccgaggaaaggaacaaaacaaaccccagacgccccccacacgaggccccggccaaag

SEQ ID NO: 94908 - RNA, 55 nt, Homo sapiens
agacaccaccaacggaaaacaacacaggggaaaaagaaaagggcgaagacccgaa

SEQ ID NO: 94909 - RNA, 64 nt, Homo sapiens
ggcggccgcagggcgccggagccccccaggacgggcccagggaacacgggagccccggaccacc

SEQ ID NO: 94910 - RNA, 73 nt, Homo sapiens
ggaaccaagacccagaccaaagaaagcaggaccaaagcacacaggccgaagacaagcaaccaacccgaacgga

SEQ ID NO: 94911 - RNA, 73 nt, Homo sapiens
cccgcgcccgggcccgccccggccgcggccgggcccagcccgccaaggaacccgcggggcagaccacaccagc

SEQ ID NO: 94912 - RNA, 60 nt, Homo sapiens
ggggcgccggcagaggaccaggcaccaccggccccggaagaccaggagagaccaggaggc

SEQ ID NO: 94913 - RNA, 69 nt, Homo sapiens
gaacagacaaagggaccacagacacaaccgcaggccccaggaagagaaccccccgcagaagcgggagcg

SEQ ID NO: 94914 - RNA, 70 nt, Homo sapiens
cagaagcccaccccccgggcgaaacaccacacccaggccgacacaagaaggagaaaagggcaaaggagaa

SEQ ID NO: 94915 - RNA, 59 nt, Homo sapiens
cccaggacccccgcgggcgacgcgagcccaggggggagaggaagaagcggagccgccag

SEQ ID NO: 94916 - RNA, 86 nt, Homo sapiens
cgacgccgggaccggccaagggcccacacaccaagaccaagggagaccaccgggcccacaggagcgaccagggaagcccacgccac

SEQ ID NO: 94917 - RNA, 76 nt, Homo sapiens
acacaaggcagccgccgggagccagaagcacaggcccgggcgaaggggccacgcgaagcacagcacgaggcgccgg

SEQ ID NO: 94918 - RNA, 115 nt, Homo sapiens
caaggaacacgcacaaaaaagggcagaagagaagcaggaaggaggcagaggcacaccgaaagccagggaccgacccagccccccagcagacgccagaaggaaggacgaaaagcgg

SEQ ID NO: 94919 - RNA, 82 nt, Homo sapiens
aaggcacaggaccgcaaggcgcacgcggggcaccggacggcggaaaggaccagcacacggggccgggagacaacgccaaccc

SEQ ID NO: 94920 - RNA, 82 nt, Homo sapiens
gagggaaaggcccaggaaaaaggcagaagccaagaccggcccgaggcggccgccacacacgggacaccaggacgggggaaga

SEQ ID NO: 94921 - RNA, 105 nt, Homo sapiens
cgccgcggccaggcagggaggagaccggcacccagacaggggcgaaggcagaggacgcggacaccgaagcccgaggccacaggacacgccaagggagcggccccc

SEQ ID NO: 94922 - RNA, 81 nt, Homo sapiens
ccgaagcccaaaaagcgaaggggaggcgccgcaagcgcgagagcaagagaggcagagaagagagacgcccaagagaagaca

SEQ ID NO: 94923 - RNA, 72 nt, Homo sapiens
acacaaaagcagcgcaggggggggcaggacagcccaggacacacacgaaacgccgaaggcacagaaacaaaa

SEQ ID NO: 94924 - RNA, 38 nt, Homo sapiens
gggggggcacaaaagcaacacggagcccaaaagaaaca

SEQ ID NO: 94925 - RNA, 73 nt, Homo sapiens
aacgaagcacccaagggcgggagaaccaggaagccgacgagccaacggaggcagccggcggaaacgaagaaaa

SEQ ID NO: 94926 - RNA, 74 nt, Homo sapiens
aggacagcaggacgagagaccgcaaagagggggacccggggacaagaagacaaaacgcaggccaacaaaacgag

SEQ ID NO: 94927 - RNA, 71 nt, Homo sapiens
agacggcagcaccagcccccaggaaagacaaaacgagcacgcaaggacagagcgggagccaccagcgccaa

SEQ ID NO: 94928 - RNA, 61 nt, Homo sapiens
aggaggcgaagcaggagaacgcgaaccccggaggggaggcacagggcccagaggccagaag

SEQ ID NO: 94929 - RNA, 60 nt, Homo sapiens
acacagcagccaaaacgagaagaagaagaaggagaccaggaagaacgagaaggggaagac

SEQ ID NO: 94930 - RNA, 79 nt, Homo sapiens
cgagacagccagccgaccgaggagacacgagcccacccgagaccacgccggacccgccccgccacagaacccgcgaccg

SEQ ID NO: 94931 - RNA, 74 nt, Homo sapiens
cagaccgggccgggcaccaggccacggcacagccaggcgaggcagcgagaaggacaaccccccaaaggagaaaa

SEQ ID NO: 94932 - RNA, 73 nt, Homo sapiens
accgagaaagaaaccacgcgcggaagaagacccggagagagcccagcaaaaagaggagaagcacccccccaga

SEQ ID NO: 94933 - RNA, 80 nt, Homo sapiens
gggggcagcccgggagaaccgcggcggccggagcggcagccgcgaacccccagaaccgaaacgaccaccgagacgcccag

SEQ ID NO: 94934 - RNA, 72 nt, Homo sapiens
cacgcagagacacccaggccggcagaggaaagggacccccgggagcgccccgaaggagagacaaggacccac

SEQ ID NO: 94935 - RNA, 83 nt, Homo sapiens
caagaggagcccgaggcagagcacacggggaaggagggccagacaaggggaacacaagaggagagaaggggaccgcagggaga

SEQ ID NO: 94936 - RNA, 73 nt, Homo sapiens
ccagggagcggagcgccagaaaagacacgcccagaaaccacggaacaagaagggaccggacgcgagagcccca

SEQ ID NO: 94937 - RNA, 77 nt, Homo sapiens
cggagcaccgacccgccgcaaagaagcagaaaccaccagagaccaggcccgaggggggcacgaacaacaagacaagc

SEQ ID NO: 94938 - RNA, 66 nt, Homo sapiens
cggacgggcagggcccagggaaacccagacgacaaggaaggccaagggacccacgaccaaccaaga

SEQ ID NO: 94939 - RNA, 50 nt, Homo sapiens
gggggagaagcacgcgccagcacccaacagaggagcccaggcaaacaaac

SEQ ID NO: 94940 - RNA, 73 nt, Homo sapiens
gggcgagcggcggggagcggcgaagccgcgggcgagggggagagagacgcgggaaccgccagcaaaccacaca

SEQ ID NO: 94941 - RNA, 59 nt, Homo sapiens
ccagagccagcggaccggagcgcaccgagcggagcagagggaggacccgcagacacaac

SEQ ID NO: 94942 - RNA, 70 nt, Homo sapiens
caacgcggccgggccaagcagagaacacagggaaaccgggcgcagacagcaacgacaaaggaagaaccaa

SEQ ID NO: 94943 - RNA, 69 nt, Homo sapiens
aaacacagaccccaaggaaaaaacccaggaccaaaacagagaaaggagaccaagcgaagaacaccgcag

SEQ ID NO: 94944 - RNA, 38 nt, Homo sapiens
gcgggagcggcgccaggggaggcccaaaccagacagac

SEQ ID NO: 94945 - RNA, 74 nt, Homo sapiens
ggagacacaaaacccagacaccgacgggccgcgaggggaagaggaagcaaagccaagggagccgaaaggagggg

SEQ ID NO: 94946 - RNA, 56 nt, Homo sapiens
cggggccgagaccccaacagcacaaagggcggacgggccccgaagcccaaggggag

SEQ ID NO: 94947 - RNA, 83 nt, Homo sapiens
gccaaacaacagcccggcggccgggagaggagggacagcagcgggagaacaccccacggagacaggacgccacgacagaagag

SEQ ID NO: 94948 - RNA, 78 nt, Homo sapiens
gcccacggcagcccagggacccgagcaccgccggccccgggccagcccaggccacccaccccaccagagccggacacc

SEQ ID NO: 94949 - RNA, 57 nt, Homo sapiens
acaagcgggacgccccaggaaggagaacacacggcaaagaaaccccaaagccagcaa

SEQ ID NO: 94950 - RNA, 69 nt, Homo sapiens
cagagggcagccccgccggccgcaggaaaccaaggcagggggaaagaggcggaagccaaaccgaaggga

SEQ ID NO: 94951 - RNA, 75 nt, Homo sapiens
gagcagaagcaccaggacacccaaagacaccacacagggccacccgagagcagaccccgccagacgaaagggcgc

SEQ ID NO: 94952 - RNA, 61 nt, Homo sapiens
ccgggggcaaggccaaaaagaaggagaggagaagagacgcgacccaaaaaaacgagccagg

SEQ ID NO: 94953 - RNA, 85 nt, Homo sapiens
gcgcaccgaggccagggggccggccgcgcgccgaggagcgcgagccacccgaagggccccccaagcccagggaccgcagaggacg

SEQ ID NO: 94954 - RNA, 77 nt, Homo sapiens
gcggcgagcggacggcgcaacggggccccggagggccagagcgggaagcggagaggacgaagacacccccgaccaga

SEQ ID NO: 94955 - RNA, 79 nt, Homo sapiens
aggccggcggggcgacaggcggagaccccgaaccacagcgccgggagcagccaagcagcacaggcgcaagggcagcagc

SEQ ID NO: 94956 - RNA, 114 nt, Homo sapiens
cgcggaggggccccggcagcagcccgacgcaaaccaaggacggggaccgcacacccaagacaagcagaccggaagaccgacggaagaccacaccccgagggagcccaggacacc

SEQ ID NO: 94957 - RNA, 56 nt, Homo sapiens
agcacccccagcagccaccagcaggcggggccggggagcccgggccagacccccca

SEQ ID NO: 94958 - RNA, 76 nt, Homo sapiens
gcgaacaccgaacgagagggacgccccggaccaccaccaacgacgggagaccccgggagcgggagggagcacgcac

SEQ ID NO: 94959 - RNA, 59 nt, Homo sapiens
caacaagagacaacaccgcgcggaccacaaaccgcgccagaaaaagcagcagcagagaa

SEQ ID NO: 94960 - RNA, 80 nt, Homo sapiens
acgccaccacaacccccagacgcaagccaagaccaagaagaacaaccgcagaaaccagaaaccacaggagagggagaggc

SEQ ID NO: 94961 - RNA, 83 nt, Homo sapiens
gcgcgggagccgggcggcgagccgggggagcgccgaaaagcaccggagccgccgcgcaacagaagcgaaggggacagggggag

SEQ ID NO: 94962 - RNA, 83 nt, Homo sapiens
ccacagcagccagccggcccgaggacaccgacaccagcagggcggccagagggacaacagagaaggagcgcgcacgaggcaac

SEQ ID NO: 94963 - RNA, 79 nt, Homo sapiens
ccaaccacaagacgaccaaaggaggaaggcggacaaaccccaaggcgcggaggagagaaaagaagccaaacacacccag

SEQ ID NO: 94964 - RNA, 83 nt, Homo sapiens
gggacacgacggcaaggccacagaccacaacaccaggaggaccagcggacgacccccgggacagagaggccaagagacgaacc

SEQ ID NO: 94965 - RNA, 39 nt, Homo sapiens
agaaaaggaaacagacacccacggcaaaccgacaccagc

SEQ ID NO: 94966 - RNA, 75 nt, Homo sapiens
caagggcgaaggagccggcccaagggcacaccaaagggaaccaagaagggacccaaaaagacggacagcccacgg

SEQ ID NO: 94967 - RNA, 60 nt, Homo sapiens
ccgagaacccggcacaccagggccggaagcccaagcgggggcacaagccgccccaccacg

SEQ ID NO: 94968 - RNA, 77 nt, Homo sapiens
gccgaagcgacaccaggcgggaaggaaaaacagaacagcgcccgcgaaagccaacgggagcaccgacggagaaaaga

SEQ ID NO: 94969 - RNA, 84 nt, Homo sapiens
aagaagcgccaagaagccaaagacaagacgcaggagaaaacgagacccaagaacacccaaccggccacacacggcacaagggaa

SEQ ID NO: 94970 - RNA, 66 nt, Homo sapiens
gaaaaaggaggggaacgagaaaacaggaccaagaagaagaaccagcaaaagagcaacgaccgaaaa

SEQ ID NO: 94971 - RNA, 73 nt, Homo sapiens
gaagaaccaggcgccacgagggggggaaaacagaggagagccgccccccccagccaggagcccccaccaagcg

SEQ ID NO: 94972 - RNA, 87 nt, Homo sapiens
caaaggagagaggaccacccagaggagcaacccgcaacaccgacaaaaaggagcaacggacagaagcggcgggaaaagaggaagggg

SEQ ID NO: 94973 - RNA, 60 nt, Homo sapiens
ggacgcagagcaccgaggccgagccaggaggagaggccacgcccccaagaggcccgaacg

SEQ ID NO: 94974 - RNA, 73 nt, Homo sapiens
caaaaacagggaacaaaaccaacaccaagaggaacccaacggaaggccccacgaaggacggccagcgcggcag

SEQ ID NO: 94975 - RNA, 90 nt, Homo sapiens
aaagcccccacgcccagccaggagcaccgccgaggacccagcacaccgaggggcgcaagaggcagacagacaggcgacgggcagccaaca

SEQ ID NO: 94976 - RNA, 75 nt, Homo sapiens
ccgcaggccgccaccgaggaaaaggaacgacgagccgcaccagaaccccacccgcacccgaaagagaacaaagaa

SEQ ID NO: 94977 - RNA, 44 nt, Homo sapiens
gacgaaccccagaaaacagacgagaggccgcagcgacaaaaggg

SEQ ID NO: 94978 - RNA, 60 nt, Homo sapiens
agagggcagggggcaaacaagccgaccggaaaaaggaagcagaagaaagaaggcaagcca

SEQ ID NO: 94979 - RNA, 76 nt, Homo sapiens
gaacagccacagcccggaacccccggccggggggaaggggggagcggcagaaccaaagacagaacgcgggagagaa

SEQ ID NO: 94980 - RNA, 87 nt, Homo sapiens
gccggcagggcagccgggggacagcgaggaagaggaagaggaccccaaagcaacaccagagacaggaaagaggaagaaaaagaagcg

SEQ ID NO: 94981 - RNA, 76 nt, Homo sapiens
cccagccagccggcaccgccaccccacaggcccccaccaggccgcggcagcgagaccacagagacacggcgggaca

SEQ ID NO: 94982 - RNA, 71 nt, Homo sapiens
ccgcacccccggcggcagcacgaaagaccaaagaagaccggaaaccaacccgagagaaaaagggaaggaag

SEQ ID NO: 94983 - RNA, 73 nt, Homo sapiens
cgaggaggaccaagacagggaccccaggagaagagaagaccagagaaagaacaaccccgcgcacaagacaaag

SEQ ID NO: 94984 - RNA, 70 nt, Homo sapiens
gaggaccccggcacgggagcccacagagaccgaaaagcgcacccaccaagacagcacgacgacaaaccac

SEQ ID NO: 94985 - RNA, 79 nt, Homo sapiens
gcaggggccacggagcccccacccccccgccaggccccagagacaccagcccgcaggaacgcagggaaagaagccggga

SEQ ID NO: 94986 - RNA, 39 nt, Homo sapiens
aacgacccagaaccggcgagagagccacaggccgcacac

SEQ ID NO: 94987 - RNA, 81 nt, Homo sapiens
gcccccagcacggacaggaaaacaaggaaaaggccgcgggaaaaaaggaccaagaaaggcccagggaccaaagcccggaca

SEQ ID NO: 94988 - RNA, 84 nt, Homo sapiens
ccgggagaggcaccaaacggccgggggcccgagaagcccccagcacgccgccccgccaccgagcgcccgacgcgccacacgcag

SEQ ID NO: 94989 - RNA, 70 nt, Homo sapiens
ggagaaggaccaagaaccaggccggggggggcacagagccccggaagacagcccccagcgaccagaccca

SEQ ID NO: 94990 - RNA, 65 nt, Homo sapiens
ccagggaagcgcagaaagcaggcgaacccgcggcgcaaaacgggccaagccgcccgccaaccggc

SEQ ID NO: 94991 - RNA, 79 nt, Homo sapiens
ccgccacaaaaaaaaaaaaggcgaggcggagccaagaacaaccaccgacaccaagcaaccacgagagaaggccaggaga

SEQ ID NO: 94992 - RNA, 70 nt, Homo sapiens
aacagcccaggcgcccgggggcccacagcccggaaggggccagcgacccggggaaggaggcgaaacacgg

SEQ ID NO: 94993 - RNA, 69 nt, Homo sapiens
ccaaccacgacccagcaggagcgagcgcacgaaaacagcagagcgccacagggaccgaaaagcccgccg

SEQ ID NO: 94994 - RNA, 71 nt, Homo sapiens
gggccagagggaaggacagggaacagaaacgcgggaaagacgccacccagggcacagacggaccaagcgca

SEQ ID NO: 94995 - RNA, 72 nt, Homo sapiens
gaaacaaaaacgcacacaacgacccagcaaaccaaggaggggccaagcagagaaacacccagggccgacgac

SEQ ID NO: 94996 - RNA, 65 nt, Homo sapiens
gaaagaacaacgccgaaccaggcagagccgggggccccacccgccaagggccccgccgaaagccc

SEQ ID NO: 94997 - RNA, 82 nt, Homo sapiens
cgaggagcagcaaaagcagacaagggcaccggacccgggaagacccaaagagaagagaagggcgccccacccaaagccccgg

SEQ ID NO: 94998 - RNA, 83 nt, Homo sapiens
gcgagacaagaaggaaaaagagaagaccagaccaaggcagggaggcggccagcaacaggaagagccacggcaaagacaccaaa

SEQ ID NO: 94999 - RNA, 43 nt, Homo sapiens
gagaaggacaacaccacaggcaccgggcccccacccaggagga

SEQ ID NO: 95000 - RNA, 81 nt, Homo sapiens
ggccaagacaggggcagcggccagacccacagcaagcgaccaagagcagggccagcaacggagaccgcagaaagacagagc

SEQ ID NO: 95001 - RNA, 74 nt, Homo sapiens
gaagcaaacaggagcgaagacggacccagagcacccacgggaacagcccagaaacgagggaaaaacgaagccga

SEQ ID NO: 95002 - RNA, 50 nt, Homo sapiens
gggacgcaccacgagccaggaaaggacacggaacagcccagcgaaggaaa

SEQ ID NO: 95003 - RNA, 67 nt, Homo sapiens
cacgggaaggaagaccccccagccaacagagacgaccccacaagagggcccagaggagacaggggaa

SEQ ID NO: 95004 - RNA, 70 nt, Homo sapiens
accggccacagcccaaaaggcggggcaccaggcccagacggcgaacccgagcaagcaaccaccgcccggc

SEQ ID NO: 95005 - RNA, 52 nt, Homo sapiens
gcaggcgccaaaccccaagaggaaacaacaacagggaagaaaacgccagaga

SEQ ID NO: 95006 - RNA, 74 nt, Homo sapiens
aaagggcaaagccacccagaagcccacgccagaaagcaaaaaggacccaacacccagaagagccagaagacaga

SEQ ID NO: 95007 - RNA, 59 nt, Homo sapiens
gcggaggaaggaggccgaccaaggacgagaccaaccccaagccaccaacaacaccaggg

SEQ ID NO: 95008 - RNA, 45 nt, Homo sapiens
cgcagggcgcccccggaggcaacagaagagggagggaggagggcc

SEQ ID NO: 95009 - RNA, 74 nt, Homo sapiens
gcgagccccacgggaccaagacacccgcgagagagccaaggccggggggggaggacaggcaagccacaaggcag

SEQ ID NO: 95010 - RNA, 69 nt, Homo sapiens
gaagacgacgcaccgcaggcagacaaaagggccaaagaagggagagaggagcgaaaaccggggacacga

SEQ ID NO: 95011 - RNA, 83 nt, Homo sapiens
gccaagaaggacaagagcgcagaaaagcaacagagcaccaagcggaaaacgagacgaaggacaagggaccaaaaggcggaccc

SEQ ID NO: 95012 - RNA, 50 nt, Homo sapiens
ccaccgcaccggcccccacccaaggagaggccaagcacccgcagcacgaa

SEQ ID NO: 95013 - RNA, 82 nt, Homo sapiens
cgcgcgggcggcgggagagcgaggcacggcaaggggccggagggccggcccagaacgcagagggcaggcacgagcaaggagg

SEQ ID NO: 95014 - RNA, 68 nt, Homo sapiens
aagcagggccacggagcccacgccccggaccggggaagacaagacgagacaccggcgacaggaagacg

SEQ ID NO: 95015 - RNA, 56 nt, Homo sapiens
gccccgcaggaccgcacccgcggagacggacgcccggccccgggaccaaggacacg

SEQ ID NO: 95016 - RNA, 79 nt, Homo sapiens
gaggagcgcacccgggccccgaggagcggacaaagagccggaggagccaccaacagaagcaggagccaggaaaccaaaa

SEQ ID NO: 95017 - RNA, 80 nt, Homo sapiens
cggccaggaacacacagccagacccaacggagccgagccgcgggccgcggcagacccaccagcaggaggccgaggaccca

SEQ ID NO: 95018 - RNA, 79 nt, Homo sapiens
aagaaacaaaaacgggaaagccggcaagagggagaaggacaccaggcagaggcaagggaagcgaccgcccgcacagaga

SEQ ID NO: 95019 - RNA, 68 nt, Homo sapiens
aagaggcggcgggagaccccaaccgcagagcgcccggacagaggaagacaggccccggagcaggacga

SEQ ID NO: 95020 - RNA, 42 nt, Homo sapiens
cccccacggccacgaaagaggaaaagagcgaccaaggacaac

SEQ ID NO: 95021 - RNA, 72 nt, Homo sapiens
caggaagagggccggacccaaaaacccaaaagcagaaagggccgccaaaacagggagagagacgcaacagaa

SEQ ID NO: 95022 - RNA, 55 nt, Homo sapiens
cgccccgacccgggcgaagagaccaagcgacacccgccgcaagccacgccacgcg

SEQ ID NO: 95023 - RNA, 74 nt, Homo sapiens
ggagaaagagggaggccgaaggacagaccaagacaaggcaccgggacagggcaaagaaaccccaaagccagcaa

SEQ ID NO: 95024 - RNA, 111 nt, Homo sapiens
ggagaccccaccgccggcgcgggaaacgggcgaagcgacgagccgcgaggagaagagaaagggccggaggcaggcccacgagcagggcaagcggaggaggcccaccagagg

SEQ ID NO: 95025 - RNA, 60 nt, Homo sapiens
cacgggccccggcgccaccggagagaggccgcgccgggcagagacagggcgcccgggcaa

SEQ ID NO: 95026 - RNA, 76 nt, Homo sapiens
cgagaagaacccggaagcagggggggaacagaccggagcaggaaaccagaagaaaagggggaagagagaggagaag

SEQ ID NO: 95027 - RNA, 68 nt, Homo sapiens
caagaaacaccaacacaaaaaaaaccaacagccccccagggggaaaaaagaagcgaaaaggccgcgaa

SEQ ID NO: 95028 - RNA, 62 nt, Homo sapiens
gaagaccggcaggccagaaggccgccccagcaaagacgagcaggcgacccaaaagagcgaag

SEQ ID NO: 95029 - RNA, 74 nt, Homo sapiens
caaagagaaagagcaagaggaagaccgcaaagccagccaaccaagaaaaagaaccacacgagaaacacagggca

SEQ ID NO: 95030 - RNA, 70 nt, Homo sapiens
cagagggggcaggggaaagaagaggaaagcgcccccacccgcagaggaggaaacacaaaacagaaaaccg

SEQ ID NO: 95031 - RNA, 57 nt, Homo sapiens
cagccaggaaggagcaggccaagcaaggggcggacacaaggcggggcccaaaaagag

SEQ ID NO: 95032 - RNA, 78 nt, Homo sapiens
ccacgcaccgggggagcgggagcgcggaaagggcggagaacggaaaagcaccaggaagcagagaggaccgcagaaggg

SEQ ID NO: 95033 - RNA, 74 nt, Homo sapiens
gccgcaggccagaacccgcaaagcagcagcacaccccgacaagggaaggaacccacgcggccaccccccgccgg

SEQ ID NO: 95034 - RNA, 61 nt, Homo sapiens
caaagaggcggcacccagccccagccgaaaaaacaccagcagcccagcaaccaaaaagaag

SEQ ID NO: 95035 - RNA, 75 nt, Homo sapiens
cagacacggggaagcgcaaaaacaagacggggcgccccacagaggggcgacggagaccggaaaccgagagaaacg

SEQ ID NO: 95036 - RNA, 76 nt, Homo sapiens
gaacaggccaagggaagcgacgaggccgggggaagaggaggagagaagagaggaagcgagcagcacgggcaagcgg

SEQ ID NO: 95037 - RNA, 76 nt, Homo sapiens
acacggagacaaaagcgagacaagcacccgacagcacaaaggcaagaaagaaaaagccccagccgcccgcccgcaa

SEQ ID NO: 95038 - RNA, 73 nt, Homo sapiens
ccacccaggacacgacagcggggggggacggaggcagagagagaagagcccgagccaggcgccacaccaagaa

SEQ ID NO: 95039 - RNA, 75 nt, Homo sapiens
gccaagcaaacaacgaggccaagcccgaaggaccagagcaaggaggacggaaagaagggagcccggacaggacca

SEQ ID NO: 95040 - RNA, 62 nt, Homo sapiens
ggccgccaagaagcacggcaccaaaaacaagcgcggcggccgggagaacaagagccaccacc

SEQ ID NO: 95041 - RNA, 56 nt, Homo sapiens
gagacgggaacagaccccgcaaaggccccagggaaaggaccgaggcaggaaagagg

SEQ ID NO: 95042 - RNA, 53 nt, Homo sapiens
aagcccacgcaaagaggacgggcccagcgagagagacaaacccgagagcaaaa

SEQ ID NO: 95043 - RNA, 78 nt, Homo sapiens
gcacaccccaggaaccaggaaaggaaaaggaagaagccaagaggagaaagaagcgacacccacacgaaggcccacagg

SEQ ID NO: 95044 - RNA, 63 nt, Homo sapiens
aaaaggagacacagcacaaaccccgaggaccgaggccaaaggagggagggaacgcaaagaccg

SEQ ID NO: 95045 - RNA, 60 nt, Homo sapiens
gagcggcccgcagagccacagacgcaggagggccacaagaaacgacccggcgccgaccgc

SEQ ID NO: 95046 - RNA, 60 nt, Homo sapiens
cgggagcggcagccccgcacccaccaaggcccggaggccccacaacaggggcagacaccc

SEQ ID NO: 95047 - RNA, 89 nt, Homo sapiens
gacaccgcgggccgccagacgggaaggaaaaacaaccaccagcgagcaaaaaggcaaagaccaagaccaccaagaagcgccccagcggc

SEQ ID NO: 95048 - RNA, 69 nt, Homo sapiens
gaggagcacacaagcaacggaaaagaaggagggacgaagggcaacgcggggcgagccacagagacaacg

SEQ ID NO: 95049 - RNA, 69 nt, Homo sapiens
ccgcgccccaccacgcagccagacccaacggacacgcagaccggcgagaacgccgggagggaagaaagc

SEQ ID NO: 95050 - RNA, 75 nt, Homo sapiens
agcgccagcggcacggccggacccgcaggaggcaaggaggccacggggccgaagacaccaaccgggcaccagcca

SEQ ID NO: 95051 - RNA, 75 nt, Homo sapiens
aagaaaccagcaacaaaaagaaagcgcgaaggcaaagcagaggaagaacagagggaccaccacacgaaaccaagg

SEQ ID NO: 95052 - RNA, 78 nt, Homo sapiens
ggggagcaaaaccaacgccggccggagcagcagcccgagaacagccagcaaagacaagagcagaccagcagccgcagc

SEQ ID NO: 95053 - RNA, 70 nt, Homo sapiens
ggggagaggcgaggacaaaaaccgcaggaaagagggaaaggagaaggacccagcccagcggccaggcccc

SEQ ID NO: 95054 - RNA, 77 nt, Homo sapiens
cggccgcacccccgccccagagggcgggcaccaacggacggcaccgcgggccccgcggcgccagcaccgagcgcggc

SEQ ID NO: 95055 - RNA, 90 nt, Homo sapiens
aaagcaccggccccgcacagcaaaccagaggacaccccaaggcaccggcgggcgacgagaacaaccccgagagcgggacgcgcgccacac

SEQ ID NO: 95056 - RNA, 56 nt, Homo sapiens
aagcgagacccgggggcaacgcccagcaggaggcgaaagcaaacgcacaaggaaca

SEQ ID NO: 95057 - RNA, 79 nt, Homo sapiens
aacaaagggggaacacagagagcagcgaaagcaggaaacgcaggaaacagagaaagagagggggcacagaaggggacag

SEQ ID NO: 95058 - RNA, 68 nt, Homo sapiens
aacaaacaagaaaagcgcacgaggcccagaagcacgcacaaaaaaacaccgggggcggggaggagaga

SEQ ID NO: 95059 - RNA, 73 nt, Homo sapiens
ccaggggaaggcaaggcaagacacccaaggcagggcaacaccagggaggaggcacgagaagagaagcccagag

SEQ ID NO: 95060 - RNA, 79 nt, Homo sapiens
caggcgccgccccagcccgcgaacggccaacggaccacaccaaaagccaccaaaggaacacgccaggaaaccagagaca

SEQ ID NO: 95061 - RNA, 75 nt, Homo sapiens
caaaacggaagcacgaaccaaccgaaaacagaaacaaacacaccagggacaagggagaacagagagaagccgacg

SEQ ID NO: 95062 - RNA, 82 nt, Homo sapiens
aacagcagcagcccacgaacagaaaggaagcagaagaaggaaaaaaacgagaaagaaacacaccagagggaacagcaggccc

SEQ ID NO: 95063 - RNA, 72 nt, Homo sapiens
cgaccgcaggccccgcgcagccaggggccgcaaggccaggcgcgcagaggcacccaacggcacagaccccac

SEQ ID NO: 95064 - RNA, 76 nt, Homo sapiens
cgaagccaacaaccgcacggcccaggcccgcagagcccacggggaagccaagcgaaagacagaggcccagccgaaa

SEQ ID NO: 95065 - RNA, 78 nt, Homo sapiens
ggcaaccgaccgagccccacacggcacccaaggacaggagcgcgaaagagacaaggacgaggcccaaggaaacggcgg

SEQ ID NO: 95066 - RNA, 100 nt, Homo sapiens
aacagagagcccacaggaaaacaagccggcagaaaccaccaaacaggaagagagaagggcacagaccaagacaacgaaccccggccaggacaggccccca

SEQ ID NO: 95067 - RNA, 82 nt, Homo sapiens
cgacagcgcaaggaggccgcacccaaggccgcagacaagaaagaagacaagccaccagcaagccgccggccgcccccaccag

SEQ ID NO: 95068 - RNA, 71 nt, Homo sapiens
accagcccaaggaacacgccaacaaacgggacagaaacccaaagaaccaaagccgagagggaaaagacggg

SEQ ID NO: 95069 - RNA, 81 nt, Homo sapiens
cggcaggaggccgagcaacaagaaccagacgaagccacccccaagggcgagacaggcagcagccagggagcgaggcagaca

SEQ ID NO: 95070 - RNA, 88 nt, Homo sapiens
ccccagggcccccaggggggccagccccagagcggagacaacagcaggagcaaggaggaagcaggccaggggaagccaggaagggacc

SEQ ID NO: 95071 - RNA, 69 nt, Homo sapiens
gaggaacggggcaacgcgagcagaacagcccagccccagacacgcaacgaaagagcaagccagacagca

SEQ ID NO: 95072 - RNA, 74 nt, Homo sapiens
ggacagcacccaccccggagggggaccacaagacccacgacaggcggagggcaaccagaagagaaaggaaaaag

SEQ ID NO: 95073 - RNA, 79 nt, Homo sapiens
ggaggaggcgaagcgagaggacaggaaagaggggcccagcagcaagagggaaaccaagaaaggaagaagagagaagaga

SEQ ID NO: 95074 - RNA, 86 nt, Homo sapiens
cccccaccccaaccccggccgcggccccggcagccgaaccaggcaagacgagccagcaacggggcccacaaggagcgaccgggccc

SEQ ID NO: 95075 - RNA, 75 nt, Homo sapiens
ccggccaggagcaaccagaaggccagagaggacggggacgggccccaggacgaggaagacaaggccagccacgga

SEQ ID NO: 95076 - RNA, 56 nt, Homo sapiens
gcagcacaaccacaaggcagggagaccgcacgcgcccaagaagcaacccaggcacc

SEQ ID NO: 95077 - RNA, 78 nt, Homo sapiens
cagaaccggaggaggaccgcggagggaacaccggcgcccgcgccggcagaggaggcgagcacccgccagggagaggaa

SEQ ID NO: 95078 - RNA, 70 nt, Homo sapiens
aaaaacacaagagaacccaagaaaaggaaacaccacaaagaaacagggacaacggaagacaaggcaacag

SEQ ID NO: 95079 - RNA, 80 nt, Homo sapiens
acgcaggaacggcccagcacaagaccgcgacagccgggacaaccagaggcgaagagcccacccgccaaccggagcagaga

SEQ ID NO: 95080 - RNA, 94 nt, Homo sapiens
ccgcaaacagcccgccagacacggcaggccaagaagcaccgagcgccagacgcagaggaacgaaaaggaaaagaagaaccaaaagaaaacaaaa

SEQ ID NO: 95081 - RNA, 76 nt, Homo sapiens
aaaagggaagaaaacaaagagagaaagcagcagcaagccccagagggaccaagaaaggcccagggaccaaagcccg

SEQ ID NO: 95082 - RNA, 71 nt, Homo sapiens
cacagggagcccgaaggacacacggagaggggccgcaaggccaggcgcgcagaggcacccaacggcacaga

SEQ ID NO: 95083 - RNA, 87 nt, Homo sapiens
aggggcggccggagccgcggccacccagcgagaggagaggcgcccccggggacgggaacccagaacggcacacaacagaccagcgga

SEQ ID NO: 95084 - RNA, 74 nt, Homo sapiens
gcacacacaacacagcgaagagcagcaggaaaccgacgaacaacacaggaccagaaacacacccgcagaaacgg

SEQ ID NO: 95085 - RNA, 82 nt, Homo sapiens
ggaaagacaccacacagcgcagcgggaccacgccggagccgaggacacccgcgcacagaaacgggagacgagagagaaaaaa

SEQ ID NO: 95086 - RNA, 73 nt, Homo sapiens
acacccgagaacggcgggaagagaagacacgagcacaaacgccgaaccgcccggaaccgggaggcgacaagaa

SEQ ID NO: 95087 - RNA, 88 nt, Homo sapiens
gagaaggaacccgagcagcccccggcccgggaggaacaccaaagaccgcacagaagcagaagaaccgcccggaggaagagccaaacaa

SEQ ID NO: 95088 - RNA, 76 nt, Homo sapiens
caggacacaggggcccgcacgagccaaaggacacagcaacacccgaaaggaaggacacagacaaaagaccaggaga

SEQ ID NO: 95089 - RNA, 84 nt, Homo sapiens
ggaggcgcggcgccccgcgccgcccgggcgcgcgggcgcgccgcgcgcgcgcgcgcgccgggccagaaccagccgcaaaaggac

SEQ ID NO: 95090 - RNA, 74 nt, Homo sapiens
gaggcccccccggagcggacagacccccaggccccagacaagccaaacggcccgggacagagggaccgcgcgaa

SEQ ID NO: 95091 - RNA, 72 nt, Homo sapiens
gcggggcccccgcagacgggcaggcacccagagagcccagccccgagggaggcagcaccgaccacgacaccc

SEQ ID NO: 95092 - RNA, 66 nt, Homo sapiens
aggccgggaaaggccaacagaacaagagagaccagggggaccacggcacgaacaggacaggcgcca

SEQ ID NO: 95093 - RNA, 89 nt, Homo sapiens
caaaaaaaacaagaaccacggcacgaaagggagcccaagaggacagagaacgaagcacagaaaagcagccgcacagaacccgaacagag

SEQ ID NO: 95094 - RNA, 61 nt, Homo sapiens
cccgccccgggggccggcccgaaaaagcccaagacagcagaagcagacaccccaggaacag

SEQ ID NO: 95095 - RNA, 80 nt, Homo sapiens
caagggaccaggaagggacggaagagaggcccaacggagccagagggcagggaccgccaggaccgaaagaaccgcacaga

SEQ ID NO: 95096 - RNA, 65 nt, Homo sapiens
ggagaaggaccaagaaccagcaggagagagccaaaacgacaggccagggaagaaaacaagaaggc

SEQ ID NO: 95097 - RNA, 86 nt, Homo sapiens
gccacccaccgccgccgcccccaggggacggaaagagagccgcagcgcagaacaagggaaaaaagggcaaaaagggcaaaaaagac

SEQ ID NO: 95098 - RNA, 75 nt, Homo sapiens
ccgccgccgcgagcccaccagcggaggaccggcggagaccgccgcgcgccgaaggacacagaaggaagaagcgcc

SEQ ID NO: 95099 - RNA, 84 nt, Homo sapiens
gcgacgccccagcccgcccaaagaaagaaggagggcggaaaacaccccaaaagccaaaagggaaaggaaaagaccaacaacagc

SEQ ID NO: 95100 - RNA, 75 nt, Homo sapiens
gaaaaccaaaacgcaacagaaacaacagagccgagaaggacagagggccagccccaggcccaggcaaaaagcaaa

SEQ ID NO: 95101 - RNA, 85 nt, Homo sapiens
cgagacaggaggcagcccacagggagaaggcacgcacaggagaacacacaaggaagcgagcgaacacaacgaggagaggaaacaa

SEQ ID NO: 95102 - RNA, 54 nt, Homo sapiens
gcggacgccagccgccaggggaagaccgcccccgcaaccagcgacaaacccgaa

SEQ ID NO: 95103 - RNA, 79 nt, Homo sapiens
aaaggagcgccccaaaaggaaacagccggaagaaacgcggaccgcggagggccggagagcgggacccagagcggaaaca

SEQ ID NO: 95104 - RNA, 81 nt, Homo sapiens
cagcggcgcagcccacgccagacgaccccacccgcgccgcgacccgcccgcggcgccaggccacgcggccccgcaagcgcc

SEQ ID NO: 95105 - RNA, 69 nt, Homo sapiens
gacagcgccaacgagcacagaagcaaacaggggcaggaaaacccaaaacgaaaaacaaagccagggcgg

SEQ ID NO: 95106 - RNA, 61 nt, Homo sapiens
aggggacgggcagagaaacacacggacccggagaaaacccacaagaacccaaaccgagaaa

SEQ ID NO: 95107 - RNA, 72 nt, Homo sapiens
ccccggcggggcaagagcgggggcgggaccccgccgcggcgggaggcaggggaaagcgcgagcgagcacccg

SEQ ID NO: 95108 - RNA, 63 nt, Homo sapiens
agaaaaaaagcgccccgaacaacggcaggaggacagaagcccgaacgggcacacgggcgaggg

SEQ ID NO: 95109 - RNA, 66 nt, Homo sapiens
acgcaacggaaaggcgcaggcagaacaacggcaagcggagaagagcaaggccgaaccgagaggaag

SEQ ID NO: 95110 - RNA, 74 nt, Homo sapiens
cggcaaggacaaccggcaaaaagcaagccgacacagccacaccagcggacagccaccaagaggccagaaggcag

SEQ ID NO: 95111 - RNA, 74 nt, Homo sapiens
aggaagaacgaccagagcgacccgagcagcgcagaccccccaaggagaaagaagccaagcggccggcagcacca

SEQ ID NO: 95112 - RNA, 82 nt, Homo sapiens
cgcacaacgcaggaccggcgccgaaggcccgccaggagagagggccaccaaaaggagaccccccgagcgccacaacaacccc

SEQ ID NO: 95113 - RNA, 83 nt, Homo sapiens
gagagcgcgagagaggagagggcagacggacaagagcgcggaacaggacgccccgagacgaacgcaaccccaagcagaaaagg

SEQ ID NO: 95114 - RNA, 86 nt, Homo sapiens
acagccagcacaccccgcgagcaagccggggccaaagcgaccaaccccccaccgcacgcagggggccccccgcccggggcaagacc

SEQ ID NO: 95115 - RNA, 70 nt, Homo sapiens
ccccgcccgcaaccaccgccgcagagcgaacgcggcgcggaagggccacgagagggcggaagccaccaaa

SEQ ID NO: 95116 - RNA, 79 nt, Homo sapiens
caggcggagagacccgccgccagggccgacccgggacggaggggaaaaggggcccgggcagcaagaagggggaaccccg

SEQ ID NO: 95117 - RNA, 59 nt, Homo sapiens
gaccacccccagacacacagagaagaagagccaaagcccaggacggggaaacagcagag

SEQ ID NO: 95118 - RNA, 69 nt, Homo sapiens
aagaaaggcggaccacaaggaaaagaaaaacagaagcacagaaaacaggagccagacgcagaccaagca

SEQ ID NO: 95119 - RNA, 50 nt, Homo sapiens
cgcgcgcgcgcgcgcgaggagaagaaagggaagcaaagaaagaagaaccg

SEQ ID NO: 95120 - RNA, 72 nt, Homo sapiens
cggacccggacccaaaggccagcaagcgcggcggcgagaagccaaacacacgccggaaagaaagagggcaag

SEQ ID NO: 95121 - RNA, 68 nt, Homo sapiens
ggggcggcccaggcgagcggacgaaagaaagcagggaacggggaaaagcaccgcacaacccccggaaa

SEQ ID NO: 95122 - RNA, 73 nt, Homo sapiens
gccagagagaaacagcgaccaccgaggagacaagcggagcgagcggagcacccagaagcaaacaaggaacggg

SEQ ID NO: 95123 - RNA, 35 nt, Homo sapiens
gacggggaccgcacacccaagccaaagaccacggg

SEQ ID NO: 95124 - RNA, 66 nt, Homo sapiens
cccgcccccacacgccagcgcacaccggggccaccccaaaagagaaaagacacagacggcaaaacc

SEQ ID NO: 95125 - RNA, 44 nt, Homo sapiens
aggagagggcaacaaaacccacaggagaacgagaaggcggagcg

SEQ ID NO: 95126 - RNA, 76 nt, Homo sapiens
gcggagggggcgagaccacaaagcaagagagaagccacgcagagagcggcagcagcagacagagaagccagcggag

SEQ ID NO: 95127 - RNA, 35 nt, Homo sapiens
acaagccgaccggaaaaaggaagggaaggagcaag

SEQ ID NO: 95128 - RNA, 57 nt, Homo sapiens
aaggagaaacacggcaacacagagaaaggcacacaggggggccagggaggaggagaa

SEQ ID NO: 95129 - RNA, 72 nt, Homo sapiens
gccgggcacaggagggaagagcaaggacgcaaaacagaacccccccaggacagcaagaagaccagaagaaga

SEQ ID NO: 95130 - RNA, 42 nt, Homo sapiens
acaaaagcaacaaagaggaacaaggacagggggacacccaca

SEQ ID NO: 95131 - RNA, 56 nt, Homo sapiens
caaggcagccacaaggagggcagccagaggccaccaacaacaccagggacacaaca

SEQ ID NO: 95132 - RNA, 87 nt, Homo sapiens
cacaagaccaccaccagacagaggccagagaccgcagcccaccaaagaaaccgcccgcccggagccccggcacgggaagccgccagc

SEQ ID NO: 95133 - RNA, 67 nt, Homo sapiens
caacaaagcaaggcaaagcagaaaagccccagaggcacacccagaagccacaggagaagcaagaggc

SEQ ID NO: 95134 - RNA, 78 nt, Homo sapiens
gccggacggaacacccggccccaggccgcagagcagaccagcagagcagcagcagcacggcagaagagcgacgggacc

SEQ ID NO: 95135 - RNA, 81 nt, Homo sapiens
cacggcgaaagccgcccccaagagaacacaagggccccacggagcggaccaggaggagcgaggcggcccccaagcgacacc

SEQ ID NO: 95136 - RNA, 71 nt, Homo sapiens
gcagggccgggccgcggcggccgcgccggccggaccagccgcccggagaagacaggggaaaaagggacggg

SEQ ID NO: 95137 - RNA, 76 nt, Homo sapiens
gaggaaagcaggaccagagaaccagaagagaagacaggccccagccaacgaaaaacaaccgacccccaggaggcaa

SEQ ID NO: 95138 - RNA, 72 nt, Homo sapiens
ggggagcccacaggagccagaggccggacggagacagagacagagaggcaaacggaaaaaagaaaacacgcg

SEQ ID NO: 95139 - RNA, 74 nt, Homo sapiens
cgccggggagcagacgcaccccgcggccagagacccaggagggcaggaagggcgggcccgggcgaacaggacca

SEQ ID NO: 95140 - RNA, 78 nt, Homo sapiens
cccggaaccgcgacggcggcagagcggacggccaaggaggaggagcgcagcacccagggaaggcagagacgggcagac

SEQ ID NO: 95141 - RNA, 74 nt, Homo sapiens
gcccagccgccacaccccgccgggcaggaggcgcaaaacaaggaccggacagagcacgcacagaagccaccaaa

SEQ ID NO: 95142 - RNA, 85 nt, Homo sapiens
gaacccaaccagggggaaacacagaacgcaggacgcaggaggagggagacgcacgagacacgggccgcccgcagccgggcgcccg

SEQ ID NO: 95143 - RNA, 40 nt, Homo sapiens
ggcgcccggacaacccggaggcaacgcacgggccacaggc

SEQ ID NO: 95144 - RNA, 82 nt, Homo sapiens
gcggaccagggacgagcagcgaacgaggcaagcagcgccgagcccaggcaagagcccgcgagaagagaacacaggaagagga

SEQ ID NO: 95145 - RNA, 80 nt, Homo sapiens
cgccagcaaacgcacaagacaaacagagcaacgaacagcaggacggcgggggcagcagacacagagaagcaccgagaagc

SEQ ID NO: 95146 - RNA, 77 nt, Homo sapiens
cgaccccggacgcacggaggccacgaagggggcggagccgcgcgcagaggacggaaggcgaccacaccaccccagac

SEQ ID NO: 95147 - RNA, 45 nt, Homo sapiens
gcgcgaagcccaccgaaagagcaagccagggccacagccaggacc

SEQ ID NO: 95148 - RNA, 75 nt, Homo sapiens
ggaggagaccgggaaaccgccgaagacgaaggaaccggcagaagaacagaaggagaaaaacagaaaaagcaccaa

SEQ ID NO: 95149 - RNA, 53 nt, Homo sapiens
gaacccaaaagccgacaaccccagaaacagggacgcaggagcggcaaacgagg

SEQ ID NO: 95150 - RNA, 79 nt, Homo sapiens
acgccagcggccggagcccggagaaggcggaagggaggggcgacgagcgcggaggcccgagaggacggggaggaggagg

SEQ ID NO: 95151 - RNA, 69 nt, Homo sapiens
ccggagcgcgcagcgcgaggggcgcaggagggccggcgcggggggaagggccaccgggacaccccggga

SEQ ID NO: 95152 - RNA, 81 nt, Homo sapiens
ccggcggcaggggaggcaagaagcggcgcgggagcgaccaaaagaacgcggacacgcaagcgcgggaaaagaacacaggga

SEQ ID NO: 95153 - RNA, 55 nt, Homo sapiens
acacaggaacaggcgcggggaagcccaggggcggagacccgccggccagaggcgg

SEQ ID NO: 95154 - RNA, 58 nt, Homo sapiens
gcagcaccagcgcgggccgagccaggacaaaaccaggcagaaccaacacgaacccaag

SEQ ID NO: 95155 - RNA, 70 nt, Homo sapiens
ggggggaaccgccggcgacggagaaaacagagcagaagaagggagcgacaggcccaacaggagcacaaga

SEQ ID NO: 95156 - RNA, 74 nt, Homo sapiens
gcggaagggaggcgcgaagagcgaaagggggacaccggggcagcaggggcaaagaaaaaggagagaaaaagagg

SEQ ID NO: 95157 - RNA, 81 nt, Homo sapiens
ggagcggagcgcgcgcccgccccgccgggaggaccgcgagggggggccgaagaagccagggggaggaaagcagacagaccc

SEQ ID NO: 95158 - RNA, 38 nt, Homo sapiens
ggaaacgcgagggccaccagaggagccgccgcacccag

SEQ ID NO: 95159 - RNA, 60 nt, Homo sapiens
ggacgaccaccagaacagaaacaccaggaagggagaacgggccaaccgccccccagcagc

SEQ ID NO: 95160 - RNA, 77 nt, Homo sapiens
cggcacacgcagcagaagcccggacacgcaggagggaccaagaaccaagagcaagacagaaggaagccaagggagca

SEQ ID NO: 95161 - RNA, 70 nt, Homo sapiens
cagacagaaggaccaaaaccagaagaacgaccaagcgcccaggagcccgacaggccaaaggggacagggg

SEQ ID NO: 95162 - RNA, 80 nt, Homo sapiens
gcgagagggagccgcgccgcgagccgagcgaagcagaacacggccaaagccccagaggacaagccagaagagacaacaag

SEQ ID NO: 95163 - RNA, 71 nt, Homo sapiens
cacccagaaacgagaagccaaagaaccagacaacagagagaaccacaggcacccaaaaggaccggccaagg

SEQ ID NO: 95164 - RNA, 52 nt, Homo sapiens
acgcagcagccgcgaccgcgcagcggggccaaacaaacccacagggaccgac

SEQ ID NO: 95165 - RNA, 82 nt, Homo sapiens
acgaggcccgcgcacgacccagccccagaggacaccagcgggggaaggagccgggagaggccaggccccccggacgcagccg

SEQ ID NO: 95166 - RNA, 77 nt, Homo sapiens
aggcacccccggaccagaacggcacggccacgggcgggcaggcaaggagaaaagagccggaagcaaaccccaggacc

SEQ ID NO: 95167 - RNA, 55 nt, Homo sapiens
aagggacacccacagcacagggaaggaggaaccaaggaaacaccgagccacaggc

SEQ ID NO: 95168 - RNA, 84 nt, Homo sapiens
ccacccagaagggcagacaccaagaaggacgcacgaccgcccaagcaccgcgcacgcacggaacagagacgcaggcaagagcgc

SEQ ID NO: 95169 - RNA, 36 nt, Homo sapiens
ccaaacagagccagaaggcaaaaccaccagccaaag

SEQ ID NO: 95170 - RNA, 95 nt, Homo sapiens
ggcgaccgaggaacgcaaacgcgaaaagggcgcaccaacaccaccagaaaggcggagcacagggcagaccggcaacgcaacccgccgcccccagg

SEQ ID NO: 95171 - RNA, 69 nt, Homo sapiens
agcacccagaaaacccaccagaaagacagaaaaggacggaaaagaagcgcagaaacaaacaacacagga

SEQ ID NO: 95172 - RNA, 78 nt, Homo sapiens
ggaagaggaccggaggccggaggaagccaggaggccgggaaccacgagaagaggcgaacggaagcaacacccgggaaa

SEQ ID NO: 95173 - RNA, 81 nt, Homo sapiens
cccgagcagccagcacggagaagcccccgagcgcccacagcagaaggaggaggccccccggcgccgcccccggccaccccc

SEQ ID NO: 95174 - RNA, 76 nt, Homo sapiens
ggcagcgaacaaggagaaagccacaacagggcggcaacaggggcgagaaaggccggggagcagacacaaagagcca

SEQ ID NO: 95175 - RNA, 82 nt, Homo sapiens
gaaaacacccccagaagagcccggcgcggcgggccaaacgcgaacaccagcaggaaaaaagagcggcagaaggccaaacggc

SEQ ID NO: 95176 - RNA, 80 nt, Homo sapiens
aaaggcggagaagccagggcgacaacaagggaaagagagggacgaaaccccagacacaagaaaaccagcaaacaggggaa

SEQ ID NO: 95177 - RNA, 77 nt, Homo sapiens
cacgaccaacaagaaccgaacgaggacacgaccccgccccacgcccaggagcagagggcgaagacaggacggcccag

SEQ ID NO: 95178 - RNA, 72 nt, Homo sapiens
agaaacaagaggaggagggagagagcaccaaaacacgaagccagggccagagcacccagaaacacaggaaca

SEQ ID NO: 95179 - RNA, 73 nt, Homo sapiens
caaagaagaggcaggagaaaaggggcgaaggagaaagaaacacccaaaacagcgccggggaaacagaagcagg

SEQ ID NO: 95180 - RNA, 77 nt, Homo sapiens
cgcccccccccagccccagacacggaccccgcaggggaaccgacgcaaccgaggccgagggcaggaccgaacacgaa

SEQ ID NO: 95181 - RNA, 80 nt, Homo sapiens
cacgaccagaggggaagccaagcaaacgcagaaggacgcccacgagcaaccaagagacaggccccggaacaagaggagga

SEQ ID NO: 95182 - RNA, 72 nt, Homo sapiens
aaggaccaagaaccaggaaaacgaacggccgaaccgcccagccacggggccagggcaacaaggggcgaggac

SEQ ID NO: 95183 - RNA, 49 nt, Homo sapiens
ccaggagccgcaaagcaaagaggccagggaaggacacaccgcggaaaga

SEQ ID NO: 95184 - RNA, 69 nt, Homo sapiens
gcgcaggacacacagagagacaccgaccacacaaggcgcaggaccaagcacgggaggggagaagagggg

SEQ ID NO: 95185 - RNA, 54 nt, Homo sapiens
gccgccacgcgggccaccgcgcgccgccgcaccacccgaaggcccaaaccccgc

SEQ ID NO: 95186 - RNA, 64 nt, Homo sapiens
cacagaaaggaagaccagcagaagggaggggcggccacggcaaagccaggcaagcgcaaagacg

SEQ ID NO: 95187 - RNA, 61 nt, Homo sapiens
cagaaggagagccagcgaccaaaaacgaggccaagacaaggccgagaccgcgggaagaaga

SEQ ID NO: 95188 - RNA, 60 nt, Homo sapiens
ccagagacagcccaggaggagaagcagaggccacaggcagagcagagcgggcggaggacc

SEQ ID NO: 95189 - RNA, 82 nt, Homo sapiens
cagacaccgagccagcaagcccccaacggagcacagcaagcgggagcaggcagaccaaaggaacagaagccagggccggaaa

SEQ ID NO: 95190 - RNA, 58 nt, Homo sapiens
cccaaagcaagaaaaacaaagaggaggccaagaacgaggacaaaaacaagaacgaaag

SEQ ID NO: 95191 - RNA, 73 nt, Homo sapiens
acgcagaccagcccaggaaggaaagcgaacgcgaaaagaaaagccgagagcagccagaccggcgaagaaagaa

SEQ ID NO: 95192 - RNA, 57 nt, Homo sapiens
ggacgaagaagccaaacagaggacgcagccaggccacgacaagggccgaacaccaac

SEQ ID NO: 95193 - RNA, 83 nt, Homo sapiens
ccagcccaaaagacgacacgccccacaggcgggaggaaaggaggggacagaggaacaggacacccaaccgcgagaccagcaag

SEQ ID NO: 95194 - RNA, 74 nt, Homo sapiens
gcagaggcaaggggccaccaggaggccagggggcgccaggaagaccgcaggaaagcaggaaggcaagaaagcca

SEQ ID NO: 95195 - RNA, 71 nt, Homo sapiens
ggaggaaagaggagagaacccaacacagggaaaggaaccgcggacaggaaaacggaagaccggccggccga

SEQ ID NO: 95196 - RNA, 79 nt, Homo sapiens
cgcgaccagacaggcggcgccaccgaacagacccggaaggacggcgagggaccaagccagcgccccagacccagggggg

SEQ ID NO: 95197 - RNA, 86 nt, Homo sapiens
gaaaacggcgagaggggcgagaacgccacgcgggccggcgaaagcgggggacagccgcgccgcgcgcccgaagagggaccgaccga

SEQ ID NO: 95198 - RNA, 69 nt, Homo sapiens
gcggcagacaaaaaggaaaccaacaaggaggacggcaagacgaggcaaaaagacacagaacaagagcgc

SEQ ID NO: 95199 - RNA, 41 nt, Homo sapiens
gacgacggccgcgccaagcggaaaccggagcaggaagcgca

SEQ ID NO: 95200 - RNA, 76 nt, Homo sapiens
gcggagcaaaaaaagagcccgcaagaagaacagagacagcagccaaacccccagcccgcaccaaccggaaggacag

SEQ ID NO: 95201 - RNA, 38 nt, Homo sapiens
cccagaggaacgacccaggagacacaacaaaagaaggg

SEQ ID NO: 95202 - RNA, 75 nt, Homo sapiens
caggcagaaaacaagccgcggacggcagaagaaaaaccagcacgcaggaacaacagacaagcggaacaccgaaga

SEQ ID NO: 95203 - RNA, 76 nt, Homo sapiens
accgcacaacagccagaacaagaccaaagagaggcacaacacagaaaagggcccaaggaagaaagacaagaaagac

SEQ ID NO: 95204 - RNA, 88 nt, Homo sapiens
cagaggacccaaagcagaccccaaggaggccaaggacaaagaggccaggagacacgccaccgccggcggcccccggccaggccacccc

SEQ ID NO: 95205 - RNA, 76 nt, Homo sapiens
gcaagcacacccaccgaaacaagacagggcccagccgggacaaaagcgccacagccaaccaaggacaacggaaaag

SEQ ID NO: 95206 - RNA, 81 nt, Homo sapiens
cagacgcggcagcaacagcgagacccggggcgaggacccccgagccagacagcagagaaggaacagcaaccaacgaagaaa

SEQ ID NO: 95207 - RNA, 83 nt, Homo sapiens
ggccccagcaccccagcgcgcagggccgccaggggcgccgaaagcaaaccccacgagaacaaagcacggcagaaacggaaaaa

SEQ ID NO: 95208 - RNA, 81 nt, Homo sapiens
ggccgggaggaaaccaggacgcagagggagcagccaaggacccagcaggcgacaggcggaacaaacgaagcgcgacccaac

SEQ ID NO: 95209 - RNA, 76 nt, Homo sapiens
cccgccgggacacaccccaggaaaaagacagcccgcagcacgaccagcaggaacgggcccaccggccccgggccag

SEQ ID NO: 95210 - RNA, 75 nt, Homo sapiens
aaacagccaaacacgcagccacagaggaggccagggaagccagaggcgggccaagggcgggcaccggggcccaca

SEQ ID NO: 95211 - RNA, 78 nt, Homo sapiens
gacagcgccgcggcggagcgacggacggcagaggggaggagacacgaagcgacgcagagccagaagggaggcagggaa

SEQ ID NO: 95212 - RNA, 73 nt, Homo sapiens
aaagccaaacggagaagcaccacccaacccaccagacaccaggaaaaacgaaagagcaacagcaaaaaacagc

SEQ ID NO: 95213 - RNA, 83 nt, Homo sapiens
gcgcaccaacgaaacagacgaagacccgcggaggaggaaaccgcagccaaggaggaacacaaggcggacgaaagaaagaagga

SEQ ID NO: 95214 - RNA, 77 nt, Homo sapiens
ggagacagggagaccaagagacagacaccgccccgagacgaggccaccagggaaggcccacccccagcagagccggg

SEQ ID NO: 95215 - RNA, 86 nt, Homo sapiens
ggagacggggaggacaggccagcgcggccaagacccgccgcaagggaagaagcaagccagaaagaaaccacccaagaggacacaag

SEQ ID NO: 95216 - RNA, 76 nt, Homo sapiens
cccagggaaaggagacaaggaccgaaacagaaacggaacaccaagggagcgacaagcagaggcagagcgggccagg

SEQ ID NO: 95217 - RNA, 71 nt, Homo sapiens
aaccaacaggcgaccccaacagggacggaaagcccgggacgcgagcccacccggacacagcgccgcagcaa

SEQ ID NO: 95218 - RNA, 76 nt, Homo sapiens
agcgcgacacggagacaggggcaggaacgggaagggcacaggaagaaaggaccaaggaaacaggaacccgcaacca

SEQ ID NO: 95219 - RNA, 73 nt, Homo sapiens
aaacaaccacagaaaaggccacgacccaccccgaagagcaacggaaccagcgccgagggggggaggagggaca

SEQ ID NO: 95220 - RNA, 67 nt, Homo sapiens
acaccaggcaaggacgacgacccgaccacggcggggacaccagcccggggccccgcgcaccagcgcg

SEQ ID NO: 95221 - RNA, 70 nt, Homo sapiens
cacgagggacgagggaaggcaagacgagagagacaaagacagacacaaccgacccgccaagcgcacacaa

SEQ ID NO: 95222 - RNA, 69 nt, Homo sapiens
ccccccccagaacgcggcggagcaacaccccgcaccgggaaccgcggaacccgcaggccacgcaccagg

SEQ ID NO: 95223 - RNA, 49 nt, Homo sapiens
cacagcccacagcccgacggagggcggggggaaagccgccacagacagg

SEQ ID NO: 95224 - RNA, 80 nt, Homo sapiens
ggagcgagcagacgacaagccgggagcgggcggccaaccaggcacaggcaaacaacagcagcagaacaacagaaaaaaga

SEQ ID NO: 95225 - RNA, 55 nt, Homo sapiens
gccgacagaaaagaaggggggcgcagagaaagcaaagcgaggcggacccagcgcc

SEQ ID NO: 95226 - RNA, 77 nt, Homo sapiens
ccaggacaaaaacaaagcgcgcagaaagggcgaccaccaaaaaaacggcgcaggagcaaccaggcacggaaggcgag

SEQ ID NO: 95227 - RNA, 82 nt, Homo sapiens
acccggcaccccacagcccagggaaggcaccaaaagggggggcaggaaagacacgaagacgagagaagaagaagggaaaaca

SEQ ID NO: 95228 - RNA, 106 nt, Homo sapiens
accgggcgcagggacagacacccgccgcccgggcacgcgaggaacccagcagccggcggacgaacaccagcaggaaaaaagagcggcagaaggccaaacggccgag

SEQ ID NO: 95229 - RNA, 73 nt, Homo sapiens
ggcggcgcggcagcggagggacggcagccgcgcgggagcagggagcgcaggcaaggaggcgagcaccaaccga

SEQ ID NO: 95230 - RNA, 74 nt, Homo sapiens
ggcgccgccccagcccgcgaacggaaaccacacaacaagaacgcgccagaagacccaccaaaggcaccagaaac

SEQ ID NO: 95231 - RNA, 81 nt, Homo sapiens
ccgacgaggacgaccaacaggcagcagcgggccccgccaccggcacaccgaaggcagagagaccaagcagcggcggagcgc

SEQ ID NO: 95232 - RNA, 74 nt, Homo sapiens
acagcccgggaagaagcagacacaaggacaagagaaaggagcaagaaccaacgaaccagaggagaccgacaagc

SEQ ID NO: 95233 - RNA, 69 nt, Homo sapiens
cacacaccggcacaccgcaaggccaagagaggacgcccaaccacagcccaggacagacccgagaaaccg

SEQ ID NO: 95234 - RNA, 75 nt, Homo sapiens
ccgacgaccggaccgaggaggcagcgcggggcagcgcgagccgggaaggccgcagccaagccggaacaggagcgg

SEQ ID NO: 95235 - RNA, 78 nt, Homo sapiens
gcgcacgggcgaccccccaaggccgaggccgcggccagggcggcgccgcgccccccacggaggcagacaaccaacagg

SEQ ID NO: 95236 - RNA, 78 nt, Homo sapiens
gccggggaaggccgcgggggcagcaagcagcagggacgcgagggccaaaccgagcgccgccccggcaggccagccgac

SEQ ID NO: 95237 - RNA, 54 nt, Homo sapiens
agccggccgaggaccagggacaacagagccagagaggggcccgagagaagagaa

SEQ ID NO: 95238 - RNA, 70 nt, Homo sapiens
gggagaacaagaacgcagggacaaaggaaaaagaggaggaaaacagcagggacgaacaaaagcgagaggc

SEQ ID NO: 95239 - RNA, 78 nt, Homo sapiens
ccagaggagcaggaagaggagagggagccaggcagaagccgcaaaaaagaagagcagcagacgcagaaaaggccaaga

SEQ ID NO: 95240 - RNA, 44 nt, Homo sapiens
ggagggcacggaggaagggaagcgcaaacgccaaggcgccgggg

SEQ ID NO: 95241 - RNA, 80 nt, Homo sapiens
gcccgcggggacccagacgaggccgggacgcagccggccaggccgcgcaggaaccaacgcagagccccagaacaaaagaa

SEQ ID NO: 95242 - RNA, 73 nt, Homo sapiens
ggaagcagcagagcaacaagaaggccaaaaaaacccagcggaaagcaacaaaagcccaaagagaagagaagca

SEQ ID NO: 95243 - RNA, 78 nt, Homo sapiens
ggcaaaggagcgagccggagcgccagcccaccggacacgagacgggccacccgagcaggaaaggagggaaggggagga

SEQ ID NO: 95244 - RNA, 71 nt, Homo sapiens
gggaacggcgccggaggaccagacccaggaggaccaccccgcgcgcccaggagaaccgggagagaggcaag

SEQ ID NO: 95245 - RNA, 70 nt, Homo sapiens
caacacccccgaacgggcgcgggccaagcacgccacccggaaggggacgaagggaacccgccgggcggcc

SEQ ID NO: 95246 - RNA, 65 nt, Homo sapiens
cacccagaaggaaccgaggggcaacccggcaagacccacaggcaaaaaggaggagggagacaggg

SEQ ID NO: 95247 - RNA, 79 nt, Homo sapiens
cagagaacaagaagagaagagccacgcaacaggaccgcagaaggccagacacagaaccaggaaagcaccaccacaaaga

SEQ ID NO: 95248 - RNA, 68 nt, Homo sapiens
caagagaacgacgcaggaggagaacgaaaacaaacggaagagagggcagcaagaaagaacaagaaagc

SEQ ID NO: 95249 - RNA, 76 nt, Homo sapiens
cacgccgaggacacacaaggcaaacgaagaaaacgacccagccagaggacaaaggaccgaggacagggaagaaaca

SEQ ID NO: 95250 - RNA, 82 nt, Homo sapiens
gaagagcaaagagacccaaccacaggagccaaccggaagcaagaagcagagggaaagaaaaggcaaaaaggagcagaagaag

SEQ ID NO: 95251 - RNA, 83 nt, Homo sapiens
gcggagcgacggggaggcgcggccaacggggccacaaggggagagaccacaacacaggaccgccagacaggcccgagaaaggg

SEQ ID NO: 95252 - RNA, 55 nt, Homo sapiens
ccgggcgccgccaccggcgggaacaaagagcagaggccagcagccaccgacagcc

SEQ ID NO: 95253 - RNA, 36 nt, Homo sapiens
ccacacaggccagaacgagggcaaaaggccaaaacg

SEQ ID NO: 95254 - RNA, 74 nt, Homo sapiens
gcagcggacaacaagcagaaaccaccacagggcgggcccaagaccccaaagaacccaagggccggacagcccaa

SEQ ID NO: 95255 - RNA, 74 nt, Homo sapiens
ggcagacggagcggacggaaagcacgccaggaaagagagaagaaaaccgaacaacaaaccagaacaagagagac

SEQ ID NO: 95256 - RNA, 72 nt, Homo sapiens
gggcgcccgggggagcaacccggcgaggggagcccggggcggaggaggaaagacccgccaggcccgggaggg

SEQ ID NO: 95257 - RNA, 77 nt, Homo sapiens
ccggcggaccgcgggacagccgaggaacacccagacgacgagaagcacccacaagccagaccaccgggaggaagacg

SEQ ID NO: 95258 - RNA, 66 nt, Homo sapiens
agcaagcagcagaacgcagggggcccgaaggcacaggaggggagcccaggacaccacgaaaaggaa

SEQ ID NO: 95259 - RNA, 53 nt, Homo sapiens
ggcacagacggacgggaaaacagcgcacgggaggggagagagaaccggcacac

SEQ ID NO: 95260 - RNA, 53 nt, Homo sapiens
ggaaaccacggacaaacaccccaagggacacagagccacaaaagaggaaacaa

SEQ ID NO: 95261 - RNA, 74 nt, Homo sapiens
gggacggcgcgcgggacggccgaggaaggaacggcccccccccagcccgccccaaaagggggagccggagaaca

SEQ ID NO: 95262 - RNA, 82 nt, Homo sapiens
aagcccggagcccggcgcccccgcaagaggacggcgccggcagccgggaggggggcacgaagaccgcacacgacagcgacga

SEQ ID NO: 95263 - RNA, 78 nt, Homo sapiens
caaggcaagaccgaacagaaggaacgacgcggaccagaagccagagcgaggacgccggcaggcggaggcaaggcggac

SEQ ID NO: 95264 - RNA, 72 nt, Homo sapiens
ggaaaacgaggaggaaaaccagcgacgaagggaacagcacgcaaaaggcggagaaagcaaacaacgcccccg

SEQ ID NO: 95265 - RNA, 82 nt, Homo sapiens
ccgcaggggcgcgcgaaggagcggaagaaggcaggccaaaccaccgaccagggggcaccaccgcaccaccccggaaaggcag

SEQ ID NO: 95266 - RNA, 58 nt, Homo sapiens
caggagacaaaagcacaggaggaaagagcacacgggagcgcccccgagagaaccaaac

SEQ ID NO: 95267 - RNA, 53 nt, Homo sapiens
ggaccagagcaaaaggggaggaacagggaaagcagaaggcgggcaggggcacg

SEQ ID NO: 95268 - RNA, 79 nt, Homo sapiens
cgaccccggggagccccggcggcacgggcacgacgggacacccagcaacaccagcaccacgccccaggaagcccccgag

SEQ ID NO: 95269 - RNA, 79 nt, Homo sapiens
ggacggaaccgggagacaccgagaaaccagaggaaggaccccagagaagacagggccaccacaggaagccccagccacg

SEQ ID NO: 95270 - RNA, 84 nt, Homo sapiens
gcagccccgcacgccggcgcgcccgagcccgcggggcagcaccgccggccaaaacagaagaggcaaagcccagccacagcagca

SEQ ID NO: 95271 - RNA, 79 nt, Homo sapiens
ggcacccgggcagcccggcggacgcaggagcgaggcagcgaccgaaagccgccagggccaagagaaaccaccaagagcc

SEQ ID NO: 95272 - RNA, 71 nt, Homo sapiens
ggcccaggggaaaccaagaagaggccagaaaccgcccggagcacgaccgaggcgacccacaggaaagagac

SEQ ID NO: 95273 - RNA, 69 nt, Homo sapiens
ccgaaaaaggagccgacccaacaaagggggccagggccaggccaccaggagagacaaagcgaaagaaac

SEQ ID NO: 95274 - RNA, 84 nt, Homo sapiens
cgcgaacacgcccggaggacgacgagggggagcggaacacgagacacaaggccagaggccaccagcccccgggccaagagcagc

SEQ ID NO: 95275 - RNA, 66 nt, Homo sapiens
ccgaagccccagccaaccagaggagccagacgcggcaacgcgcagacggggcagagaggcggagaa

SEQ ID NO: 95276 - RNA, 61 nt, Homo sapiens
gcgcagaaaagcgggggagcgccagcgacagagcaggggcagccgcaacagcgagggagca

SEQ ID NO: 95277 - RNA, 118 nt, Homo sapiens
gggcgcggcgccaccgccgagggcgggggacgaaagagaaacccggagggcgccgggccacccaggcccaggaccgagcccgacgcccacagacaggcgaacgccggcggccggacga

SEQ ID NO: 95278 - RNA, 77 nt, Homo sapiens
aggcccagccagcgcagcaggagaaccagcaagcaggcggggaccaaacaagacggccgacggcgggccggaagaaa

SEQ ID NO: 95279 - RNA, 76 nt, Homo sapiens
ggaagaggcaccgccggagccgccggaagggcgcccgcagccccccacggcgcagaacaacgcaagaaagaaaaca

SEQ ID NO: 95280 - RNA, 75 nt, Homo sapiens
agcggggacgaggcggacgacgaccggccaacaaggccaggacgcgacagcggaccccgaagacgagggaagaac

SEQ ID NO: 95281 - RNA, 79 nt, Homo sapiens
gaaaagcggccagccaacaacgacacaaaggcacccaaaaggcagaaaggacacggaacagccagacagacacagcaca

SEQ ID NO: 95282 - RNA, 34 nt, Homo sapiens
ggggaggaggaaggaaggcccgagaaacaaggag

SEQ ID NO: 95283 - RNA, 78 nt, Homo sapiens
gcgacgcgacccgcaggggcaggcacggggaggcacaggggcccacggccgggaagggacaagcaggaacaggaaaac

SEQ ID NO: 95284 - RNA, 76 nt, Homo sapiens
cgcggcccggagccgggaccgaacccccacgaggaagaaaggccccggagagggaggcaccgggcacgcgccgaaa

SEQ ID NO: 95285 - RNA, 70 nt, Homo sapiens
caacggaccgacagagcagcaaccggccgcagggccaggcccggggccggacccaagcccacgggacgaa

SEQ ID NO: 95286 - RNA, 75 nt, Homo sapiens
cccacacaaaacggaagaggcccagagcggccacaaaaagggcaaaccacggaaacccaggcaacgggaggaaga

SEQ ID NO: 95287 - RNA, 68 nt, Homo sapiens
agcagacccgacaacacacccggcaggaaccaaacacagccacagcagccacagggacaaacagacac

SEQ ID NO: 95288 - RNA, 75 nt, Homo sapiens
gcccggcacacgaccggaggccgagacccccggagcacccaggaagaaaggaaggggcaccacaagacacaaaga

SEQ ID NO: 95289 - RNA, 56 nt, Homo sapiens
agaggagcgaaacggccaggacaggaaggaaaacgggccacaacacaacccccaca

SEQ ID NO: 95290 - RNA, 75 nt, Homo sapiens
gggaaggaagcaggcccaggcgcgaaagcgagagagaaaaaccgcccaaggaaacgcacagaacgaaaagccaag

SEQ ID NO: 95291 - RNA, 72 nt, Homo sapiens
ccgaggcggcgagagaggcaggcggagccgaccgggccaggacgagggcggcgcggcggcccgcccccagga

SEQ ID NO: 95292 - RNA, 107 nt, Homo sapiens
agggggcggcggccggcgggcaaaggacgccaggaggaagggacaaaagggcagccgggccaggggcccccaggggacaagggccaccaggaacaaggacccgggac

SEQ ID NO: 95293 - RNA, 75 nt, Homo sapiens
gcacaccacgccacggacagcccagagcaagcacacggaggcccgggagccagaccgggagcccgccccagccag

SEQ ID NO: 95294 - RNA, 65 nt, Homo sapiens
gggccagccgccgcgcccgcccgacccgccaccgccaggccagggaccaggaggagaagcaacca

SEQ ID NO: 95295 - RNA, 83 nt, Homo sapiens
cagacaccagaagcgcaagcagaagcaagggacaagggccacacccccaggagcgaagagacgccgaaagcgagaagaaagag

SEQ ID NO: 95296 - RNA, 77 nt, Homo sapiens
ccccagccccgaccacccacccccgcaccccacaagggcgaggagcggccaagcgagcccacacaggaaggcacccc

SEQ ID NO: 95297 - RNA, 80 nt, Homo sapiens
gccacaaaccgaaagaaacggaccagcacacagaccaggccagcaggagaggaaccccagaaggggcagcggggggcccg

SEQ ID NO: 95298 - RNA, 65 nt, Homo sapiens
aaaagccccccggcagaaaaccgccggagcgaagaacacaagagcagacggccagcaagaacacc

SEQ ID NO: 95299 - RNA, 46 nt, Homo sapiens
aggaccgcgacggcagcagagcagagcacagcaagcgggagcaggc

SEQ ID NO: 95300 - RNA, 83 nt, Homo sapiens
cgcagcggacggcaggcccgagggcgaggagcccaaagggcacgcaaaaagaacagaggaacccaaggaagcgccgaagccga

SEQ ID NO: 95301 - RNA, 65 nt, Homo sapiens
ggaagacgcagaggaaacggcagcagaacgggagcagcggaggaagccacaggacgccggggacc

SEQ ID NO: 95302 - RNA, 85 nt, Homo sapiens
cgcgaagcggccaaagccgcccagacggccaccggcgggaggaacaaaagaacaagagaaaccgggagacagaagacccaaagac

SEQ ID NO: 95303 - RNA, 75 nt, Homo sapiens
gcacccgacccacaggccagagagccccggcaggcgaggagggccgggcacagacccccggccagcggcgcagcc

SEQ ID NO: 95304 - RNA, 77 nt, Homo sapiens
gcccgcaaaggccaacggcgcccccggaggcccagggcagcgaacggcagggcacagaggagccaggcgcagggggc

SEQ ID NO: 95305 - RNA, 61 nt, Homo sapiens
gccgacagacacaagcacccggagcacagcccccggggacaaagggcggaagacccggggc

SEQ ID NO: 95306 - RNA, 69 nt, Homo sapiens
gaacgaaggaaaccacagcccacacagcccaagaagacggcagaacacccagcacgcccagaacgacca

SEQ ID NO: 95307 - RNA, 72 nt, Homo sapiens
gccgagagaggacgccaccagcacagagacacgaagacgagagaagaagaagggaaaacaaaggaaccacaa

SEQ ID NO: 95308 - RNA, 58 nt, Homo sapiens
ccggaaccccacagcgccacggagacggaccaggagagcgaaaccacagaaacaaccg

SEQ ID NO: 95309 - RNA, 54 nt, Homo sapiens
acaccaagcccgcagagccccagaggggggccacgggccccgaccgcccacaag

SEQ ID NO: 95310 - RNA, 42 nt, Homo sapiens
agagcagcacagacaccagccaggagggagccaggagcgcgg

SEQ ID NO: 95311 - RNA, 69 nt, Homo sapiens
ccggcaacaccagacaccaaggacagcccgcaaggacaccccccaggcacagccacaccccagcggcca

SEQ ID NO: 95312 - RNA, 70 nt, Homo sapiens
gaccaggaccagaggggaccgagccccccaccggccggaaaaccagccagacagacaagagaaaaacgga

SEQ ID NO: 95313 - RNA, 53 nt, Homo sapiens
aacccccacgcggccagcgaaaacgcccagggaaaggacgccgcacaccccac

SEQ ID NO: 95314 - RNA, 75 nt, Homo sapiens
aaaacccagccccagcacggaggagaggaaggaccgaccgaccaacaaccaccgcaacaggaagccgacaagagg

SEQ ID NO: 95315 - RNA, 79 nt, Homo sapiens
gcaggaccagcgcgaaagagaccggacgcagccgccaccgagacgaggagcccgagcaggaagacagaagagcgaaaag

SEQ ID NO: 95316 - RNA, 49 nt, Homo sapiens
agaagaggaggaaaaaaagaagaacggccacagggcccggaagaccagc

SEQ ID NO: 95317 - RNA, 58 nt, Homo sapiens
gcaaccagagcggaagcccaaacgggaaggaccaagaaaggcccagggaccaaagccc

SEQ ID NO: 95318 - RNA, 40 nt, Homo sapiens
accagaggacacaagagccgccaaggacgacaagaagaag

SEQ ID NO: 95319 - RNA, 93 nt, Homo sapiens
gcccagacgcggcacagagagggccgggagcgcgcagccaggaggcagcacggcaggagacgaggagaggacagcaggacacccggaccccac

SEQ ID NO: 95320 - RNA, 71 nt, Homo sapiens
aagccgacaaccggaggacacagccagggcggacgggaaagcagaacgggagccggccacagcgggccaga

SEQ ID NO: 95321 - RNA, 79 nt, Homo sapiens
ggacaccgcgcaaggccggcagaagaacggcggccaaagcgccagacaagggccgagccccggagagccccccgcaagg

SEQ ID NO: 95322 - RNA, 69 nt, Homo sapiens
gcgcccagccgcgccgagcgccacaaagcgcccacccggacggaggggggaggagcaggcccccaccgc

SEQ ID NO: 95323 - RNA, 73 nt, Homo sapiens
gaagaagcccggagacgaccaagaggagacgccgcacccaggcggaggcagggggaccggcgcgcaacccgcc

SEQ ID NO: 95324 - RNA, 53 nt, Homo sapiens
ggagcacaacaggcagacagacaagaaccgaggggccgccacaggcgcggacg

SEQ ID NO: 95325 - RNA, 83 nt, Homo sapiens
cgaagcgagggcgaagcacgacacagaaggggaggggagggaaaggcccaggaaaaaggaaacaccccccagaggagcgaggc

SEQ ID NO: 95326 - RNA, 81 nt, Homo sapiens
ccagagaagcgagcagccgcagcagaacacccccgacagcagcacacccgaccgaaaagacgcggccccaaaggaaacacc

SEQ ID NO: 95327 - RNA, 80 nt, Homo sapiens
caaccacaccgacaccgcgggggcagaaggcagcagaccccgaaagcgaccaaagcagggcacccccgaaggacaggcac

SEQ ID NO: 95328 - RNA, 74 nt, Homo sapiens
agagagaaagccggcagagagcgagcccgaccacgacaaggacagagaagacccagaaggcaaaacaaaagaag

SEQ ID NO: 95329 - RNA, 71 nt, Homo sapiens
acgacggcaacgggacagcacgaggccaaggaagcacgggaagaacagaaaagagaagcaccacggaaacc

SEQ ID NO: 95330 - RNA, 73 nt, Homo sapiens
gggggcaccaggggcagaggcgccaaggacacacgccaaccccccgccccaagcaagggaacaggccaggggc

SEQ ID NO: 95331 - RNA, 84 nt, Homo sapiens
ggcagccaggcgaggcggccggcgcgcagaaggagacgcacgacacagccgaccgaagggaaggggaaggcaaaaacaagcgga

SEQ ID NO: 95332 - RNA, 104 nt, Homo sapiens
aaagaccaaaaacccagaccagaagcgcaagccagagacgcaaaccagccagcacgggggcccagccagccagcagcgaggggggacggaggcggcacggggcc

SEQ ID NO: 95333 - RNA, 86 nt, Homo sapiens
gcgccgccaccgagccgggcccaccccccaccaaggaaggggaacgcccgcggacggcagggcgcgacaagaagcgcccgcccgac

SEQ ID NO: 95334 - RNA, 72 nt, Homo sapiens
gcgcgcgacagcaagcaagccagcgacaggggccagaacaaccccaaagccacagcagaggaccagagggac

SEQ ID NO: 95335 - RNA, 65 nt, Homo sapiens
cagaggccccagcaaaggaaagggaacccaacaggacaccaggcccacaaagcacaagccgacac

SEQ ID NO: 95336 - RNA, 82 nt, Homo sapiens
gcgggggagcgcgacgcgcaagggcgcggagccgcgggccggcgagcgcgcgccaccagcgcgcgccggggcggggccgccg

SEQ ID NO: 95337 - RNA, 53 nt, Homo sapiens
ggaggagaagccaagacaccgcgaaaggaggggccgaccgaaacccgggcgga

SEQ ID NO: 95338 - RNA, 77 nt, Homo sapiens
ggaacagacagaaggagcaggaaccaaaggcaagaccagagcaaaaagacaaaacagacgccaaagaacaagacggg

SEQ ID NO: 95339 - RNA, 74 nt, Homo sapiens
caggcacagaaggccaaaaaggcaaccacagagagagagagggagggccaacagaaccggagagcgccgaaagc

SEQ ID NO: 95340 - RNA, 77 nt, Homo sapiens
ccggcccgccggaagggcaggcacagggcaagaacccgaaccacaccaggggagaagaagagcagccgagcacccac

SEQ ID NO: 95341 - RNA, 61 nt, Homo sapiens
caagccagccaggagggcaaagcaaccgaaaaggagagccggagcggagcccacagagcca

SEQ ID NO: 95342 - RNA, 79 nt, Homo sapiens
gggccgccgggggcggggaggaagcccaggacacccggcccaagacccggggcgacgcgggacaccggaagacacacac

SEQ ID NO: 95343 - RNA, 75 nt, Homo sapiens
gaagggcaaagaggcagagagaagacgagacacacggaacacaccaaccaggacggacagacaccccaaacaaag

SEQ ID NO: 95344 - RNA, 81 nt, Homo sapiens
cggaggcagcgggggccgcggcgagcggacggggcgagcaggcgcgcgcgagccggggcgcggcagcggaacccccagaca

SEQ ID NO: 95345 - RNA, 75 nt, Homo sapiens
gagagcggagaagcgggaggagaccacccaaacgcggcacgggaggaggggaaggccggaacacgaagcaaggga

SEQ ID NO: 95346 - RNA, 84 nt, Homo sapiens
acgccccacgccggcgccaagcggacacgagacggacccagccaacgggacggcggacgcccacaccggggaagcaaggcgagc

SEQ ID NO: 95347 - RNA, 75 nt, Homo sapiens
ccgcgcccgacgagccgcaggcggaggagacacacagccccagacgggaggaaaaaaggaaggaccgcgacgaac

SEQ ID NO: 95348 - RNA, 76 nt, Homo sapiens
gaagccaagccggcaccaaaacagcgcacccagaagcagcaaaccagccagcacgggggcccagccagccagcagc

SEQ ID NO: 95349 - RNA, 77 nt, Homo sapiens
agcgacggcgaacggaaggccacgcccccccgccgccccccagcccgggcgggggcagagccagcaacgcacccgcc

SEQ ID NO: 95350 - RNA, 66 nt, Homo sapiens
ggaccaagaaccaggcaccagaaacgccacacgggcgggagcccacccacggaaaaaaacacggga

SEQ ID NO: 95351 - RNA, 76 nt, Homo sapiens
gggcagcagcagccggcagcagcagcgggccccagggggaaaggacgcagaaaggagcagccacggaacaaaagca

SEQ ID NO: 95352 - RNA, 81 nt, Homo sapiens
cgggacggaccgagaccggaccgagagcggaccgagagcgcgaaacgcacgagaaggcagcaaggggcaaaggcaacgcac

SEQ ID NO: 95353 - RNA, 63 nt, Homo sapiens
cggcacaaacggaccaccagaaagcaccccacaggggaggccagccaccgcggcagcgcagca

SEQ ID NO: 95354 - RNA, 81 nt, Homo sapiens
aagcccgagaagaccggcggccaacacagccacggacaggaggaggaagccaagaacgggagcgaagccacgcagcggcac

SEQ ID NO: 95355 - RNA, 80 nt, Homo sapiens
cgcacaaggaaaaaccaagaacgacagcgaggaaccccacaccaggcaaaaacgcagccagacagcaagagcggcaagac

SEQ ID NO: 95356 - RNA, 75 nt, Homo sapiens
ccagaggccaagagaagaaaaacggagagaaaaagccaggcagcacacaaccggacaccacagggaagacgaggc

SEQ ID NO: 95357 - RNA, 41 nt, Homo sapiens
cccggaagagcgccccaggagaaacaaaagaaagaagccaa

SEQ ID NO: 95358 - RNA, 62 nt, Homo sapiens
ccggagagcgcaggacacgcaggaggagggagacgcacgagacacgggccgcccgcagccgg

SEQ ID NO: 95359 - RNA, 78 nt, Homo sapiens
ggcacagcggaggcgacacccagagagcccagaggcgccggccgagcccgggaaaacgacagcagcagcagggccgga

SEQ ID NO: 95360 - RNA, 84 nt, Homo sapiens
gcgcccccggcaggcgcggggcggggcgcgcagccaggggaaaagagacgcaaaccacgaggacagagaagagagaagccacca

SEQ ID NO: 95361 - RNA, 77 nt, Homo sapiens
cccaccaccggcccaggaccccacccccaggaagcaggagacaccaaaggaaaagacaacacaccaagaaaccaaag

SEQ ID NO: 95362 - RNA, 83 nt, Homo sapiens
cagcccaaaagacgacacgccccacaggcgggaggaaaggaggggacagagagagagcacaaggagagaacaggggggcccac

SEQ ID NO: 95363 - RNA, 85 nt, Homo sapiens
gcgggccgcaccgccgcgccccgcaccccccgagcagcccggggaccagcacgcagggccggcccagggagaacgcaaaaccacc

SEQ ID NO: 95364 - RNA, 78 nt, Homo sapiens
ccagccagcaccaacaggccgccaaaccggaagaagagaggaaacagacccgagagggccacacagggacgaaaaccc

SEQ ID NO: 95365 - RNA, 63 nt, Homo sapiens
caaaaagcagagaacagcgaaacaacaagggacggaaacagacgacgacacggacaggacggc

SEQ ID NO: 95366 - RNA, 74 nt, Homo sapiens
gccaacaaaaaaaggaccccgaaaaagcaaggaacagaagccaccgcaaaaacgaaggacaagcagcagcaaga

SEQ ID NO: 95367 - RNA, 80 nt, Homo sapiens
gaagagccagaagaagaaagggagagagagggcagcaacgaaaaccacaggaaagcgggcacggccgagaaggcggcgcg

SEQ ID NO: 95368 - RNA, 60 nt, Homo sapiens
gggcacgccgaggacagagacgccaggcggccaggaagaccgcaccacgcgcccacacag

SEQ ID NO: 95369 - RNA, 86 nt, Homo sapiens
aggaccccacaacaccagaacaaaaggcagaaacccgagaggagcaggagcaaccgacaggcgggccggacagcgcgcccagcaca

SEQ ID NO: 95370 - RNA, 77 nt, Homo sapiens
ggccgcgagagggagaagaaaccaaggaaaagcgcacgaggagcaggaaccgaggaggaacgcccgaaaaaagaagg

SEQ ID NO: 95371 - RNA, 74 nt, Homo sapiens
caggagcgcccaaaagcaggcaagaagagaaaggaaggaggggaaaagacaaacaccaaaagaagggccaaaga

SEQ ID NO: 95372 - RNA, 76 nt, Homo sapiens
aacccaccaaaacaagaaaacaggccaggacaaggaaccgaaagaggagcgaagacagagcaaaaggcgaagaaca

SEQ ID NO: 95373 - RNA, 64 nt, Homo sapiens
gcagaagccaaaaaaacaacggaccagagacaagagaaccaaagggggcgacggagaaagcgga

SEQ ID NO: 95374 - RNA, 76 nt, Homo sapiens
acggccaggggcacgacccgggacgcccccgccagccgagcccccgggccgacggaacaagaagacccagaaaagg

SEQ ID NO: 95375 - RNA, 76 nt, Homo sapiens
gacccgccaccacacggcaccgggggacaccggggaaggaggccagacggaccgaggccggacccagggacacaca

SEQ ID NO: 95376 - RNA, 76 nt, Homo sapiens
gcggaggacaaagcagggacccgcgcccgggggcaccaagaacaggcgagagggaagaacaggacgcaggagaagc

SEQ ID NO: 95377 - RNA, 76 nt, Homo sapiens
ccggggacaaagcaagagaaggccgaagggccgacccggcgggagagaaagacaaacccacaagcgaaagaacacg

SEQ ID NO: 95378 - RNA, 74 nt, Homo sapiens
caacggaggcagagaccaagcaggggcgaagagggagaagaccaaagaagagagagcaggaccaccaccgccca

SEQ ID NO: 95379 - RNA, 58 nt, Homo sapiens
gaaaacgacggcgaacaggaccaaggagagccacagcgaaacaacacaaacaaaaaga

SEQ ID NO: 95380 - RNA, 74 nt, Homo sapiens
agccgcagccacaacaccggcaggaaccaccaggacagagaggaaaaggcccaggcgagaaagaaaccggaaga

SEQ ID NO: 95381 - RNA, 79 nt, Homo sapiens
ccgggcaggaagacaaaaacagcgacggcccagagggggggccaaccaccagcagcgcaacgaaaagcaaggcagaaag

SEQ ID NO: 95382 - RNA, 70 nt, Homo sapiens
ggagaaggaccaagaaccaggcaggggggacacagcaggcaggaacgccgcaaaagcaggcgagcaacac

SEQ ID NO: 95383 - RNA, 76 nt, Homo sapiens
gggaagaccagaggaccagaacgccacaacccacgggggaccggacacaagcccccagagggcgagcgaacccaca

SEQ ID NO: 95384 - RNA, 82 nt, Homo sapiens
aaaccgaggaacaggggaccgaaaggcgacccggagaagggccccagggggagcccagcaggacagcggccgaagccagagc

SEQ ID NO: 95385 - RNA, 90 nt, Homo sapiens
cccaggagaagccgcccaaagaacggaaacggaacgccaagcgaagaagaacgaaacggaagcacaaagcagcgcgagaaagcccaggaa

SEQ ID NO: 95386 - RNA, 56 nt, Homo sapiens
gacacaacaagacagacgccaggggggaggcaccacgagggcagggcaggcagaag

SEQ ID NO: 95387 - RNA, 85 nt, Homo sapiens
cacgccccgaggaagaaccgagagagcccgagaaagaaggaagaagacccgcgcgcgaaggccaaagccaggcccagacagccgc

SEQ ID NO: 95388 - RNA, 75 nt, Homo sapiens
gaaccaggcaccagccccgagaggagcagaccacgagcgacagccccagcgcggggcggccccggcaaagaaagg

SEQ ID NO: 95389 - RNA, 75 nt, Homo sapiens
accccccagcccagaaagccggcgggaggggggcaaggagaagaccgacaggaaagagagacaaaaagcaaacaa

SEQ ID NO: 95390 - RNA, 71 nt, Homo sapiens
caaaacaaggaagaaaacaggggaggaacaggagcaccacgagagaggcaggaagacaaacagagagcgca

SEQ ID NO: 95391 - RNA, 51 nt, Homo sapiens
ggcaggccgacacgcaaccaaaggggaccagccacaacccccgcaggaaca

SEQ ID NO: 95392 - RNA, 80 nt, Homo sapiens
gaaaccagaagcagacagcccacagaggaacaaccaaaaaccacccaacaagagaagcaaggcccacaggcccaagaccc

SEQ ID NO: 95393 - RNA, 83 nt, Homo sapiens
ggcaggcgggcacgaggaccagcgggccggagccccgagaaacagagaccaggggccacaacggaaaccaggaaaccgcagaa

SEQ ID NO: 95394 - RNA, 73 nt, Homo sapiens
ccgccggcggggggaggccacaggcgcaagcagggacacgccggaaaaaagcgagcacccgcaagaagagaac

SEQ ID NO: 95395 - RNA, 74 nt, Homo sapiens
acggaagaacacgagagggagagagccgggagcaaagagcgcacagaacaggagcacaggaagacaggagaggc

SEQ ID NO: 95396 - RNA, 83 nt, Homo sapiens
gccacgggccgcgccgggcacagccggaaagcaggaccgcgacggcagcagagcagggcaaaaggaaaaaggaaaccgggcgg

SEQ ID NO: 95397 - RNA, 78 nt, Homo sapiens
agacgccggggaggcagcgcgggacccagcccaggcggcgcggacggggcggcaagggcaacacgggaaaccaacccc

SEQ ID NO: 95398 - RNA, 82 nt, Homo sapiens
acacaggggcagccagcgagccaagccgcggagaaccgaaccaacagccagccaaagccaggcagcacagcacaggaaaaca

SEQ ID NO: 95399 - RNA, 39 nt, Homo sapiens
ccgaccgccacacagccaggggcacgaacgaaggagaga

SEQ ID NO: 95400 - RNA, 37 nt, Homo sapiens
cacagggaaggcacacagcagaaccaaaggcaagaac

SEQ ID NO: 95401 - RNA, 56 nt, Homo sapiens
gacaagcccgcgccgcccccaggagcacaaaaggggacacggcccccgcacggcaa

SEQ ID NO: 95402 - RNA, 80 nt, Homo sapiens
aggacagaaagagggcagcggaaaagcaaagacaagccgggaagagaaagcggcaggcagaggcaccaaggcggcagaaa

SEQ ID NO: 95403 - RNA, 69 nt, Homo sapiens
gacaaccacgaacccccggggagagaggagaaagcaaaaaaagccgacgagggaaaggaagacaggacg

SEQ ID NO: 95404 - RNA, 90 nt, Homo sapiens
agccgacaaggcgcaagcgaaaacagaccgcgagcccagagacagggcgggaccaccaggagcagagcggaggccaccagcccaacacca

SEQ ID NO: 95405 - RNA, 70 nt, Homo sapiens
ggaagaacacagcccgggaaagcacagaaagccaaaagaggagacaaacaagaagcgaccccgcaacagg

SEQ ID NO: 95406 - RNA, 84 nt, Homo sapiens
ccaggccagcaccaccggcagggaggagccggaagaggaaccgaaaggaaaacccagggccgaggcgcagagagccgggcaaca

SEQ ID NO: 95407 - RNA, 72 nt, Homo sapiens
ccgagccaacaccggggaaggggccagggcacggacaacgcagccagccgccgcgccaagaaacgcgcggcc

SEQ ID NO: 95408 - RNA, 89 nt, Homo sapiens
gccccgggccgcgaagcgcagcgccagacccaaggcccccgaggagcgcgggcgccgaggacgagaacccccgcgaaccagaggaaccc

SEQ ID NO: 95409 - RNA, 77 nt, Homo sapiens
caagcacagcaggcagcagagccaagcccagcggaagagaagaagggaggagccagaccaaggcgaggcagaaaaaa

SEQ ID NO: 95410 - RNA, 58 nt, Homo sapiens
aagacccaggaggagcaacacgggaccggaggagacacaaaacagaaaaagacaagca

SEQ ID NO: 95411 - RNA, 82 nt, Homo sapiens
gaccgcgcccgccgggcacacaagaaggcacgcgcaaggaagaagagacgccgcgcggcagacaaggcccggcaggcaaagc

SEQ ID NO: 95412 - RNA, 72 nt, Homo sapiens
ccgagcccccagccaagcggaccggggacagaagaacaaggaaaaaaagcaaagaagaggaagaggaacaag

SEQ ID NO: 95413 - RNA, 71 nt, Homo sapiens
agaggaggagagaaggaaagcagcaacaaaaaggacgcagcagaccgacaccagaaaacaggccgaaacgg

SEQ ID NO: 95414 - RNA, 83 nt, Homo sapiens
acacacaaggggagggcagcagcccagagcccacgcaggagacgggaggagcgacaacggagcacacccaccccgcgcaaggg

SEQ ID NO: 95415 - RNA, 88 nt, Homo sapiens
gaaggccggacgacggcccggacccccagaagaggaccgcggagaccggcacggagagggcgcccggcacgcggcgacggcgccggcg

SEQ ID NO: 95416 - RNA, 73 nt, Homo sapiens
aggcccaacgagagccaccaagcggaccagaacaacgagcaaggagggaagaaaccaagagaaagcacagacc

SEQ ID NO: 95417 - RNA, 79 nt, Homo sapiens
gccggcagggggcacccgcggccggcccggggccccgggaccggcgcccccccgggacgaacagcggggacgccccagc

SEQ ID NO: 95418 - RNA, 70 nt, Homo sapiens
gcaagaccccgaagcagcccacagacggcccaccaaacgccaagggaacagggcagcgccgccagaagac

SEQ ID NO: 95419 - RNA, 61 nt, Homo sapiens
aggcaacaagcccacccgaaaccacaaggccgaggccagcaggcagccaggggccgcccgg

SEQ ID NO: 95420 - RNA, 70 nt, Homo sapiens
cgagacggcagcgcacgggacaaggggcaacaggaaaacaacccagagaacccaaacccccagacaagac

SEQ ID NO: 95421 - RNA, 57 nt, Homo sapiens
ccgagcgaacgcgcaacagggccgcacgcaaggccccccaggccacccaggaccagc

SEQ ID NO: 95422 - RNA, 80 nt, Homo sapiens
aagggccaagcaacggacagcgggaggggcaagcaaccaggaggagacacagaaagccgaaaagcaaggagcagcacaga

SEQ ID NO: 95423 - RNA, 76 nt, Homo sapiens
cacccagcgaggaccaccgcgcggcacgcaagaacgagcgggcagccgcccaaggcaccacaaaaacacacagagc

SEQ ID NO: 95424 - RNA, 70 nt, Homo sapiens
aagggaccggaagcaacgaagaaaaggaagcaacaagagcgcaacaagagcgggagacaaccagggcgag

SEQ ID NO: 95425 - RNA, 115 nt, Homo sapiens
cggcgggggccacggcggcaagggcgcgcccgggccgggcggcgcgcgcccacgcccagccgccacaagacaacaggcggcccgggcggagggacacggaggggccggaagagac

SEQ ID NO: 95426 - RNA, 70 nt, Homo sapiens
aaaaagccaagccaccgagacccggaggaggcgaagcgagaggacagggggaaacccgcccagggcggga

SEQ ID NO: 95427 - RNA, 88 nt, Homo sapiens
cacgcgcaggagccaaaacgggcgagcccagacggagcgaagaagcggaaacaggaaacaccaacagcacagaccaaaaaaagcccaa

SEQ ID NO: 95428 - RNA, 74 nt, Homo sapiens
gacaacgcacaaccaccgcgaaccaaagcagcccgaggaggcacgcaaaacaacagggggcaaacaagaccagg

SEQ ID NO: 95429 - RNA, 82 nt, Homo sapiens
ccgcggccccgccccggggccgcagcgcggagagaagagcaggagaaggccaggaggaccagaaaacagcagaaagaccagc

SEQ ID NO: 95430 - RNA, 78 nt, Homo sapiens
gcagaggccggaccccagcacacagaagccgagacggcacacaaagagaaagggaaagaagaaagccagaacagggcc

SEQ ID NO: 95431 - RNA, 70 nt, Homo sapiens
cgcccgggccagcggccgcgcacccccggccggaggcaccagcggagaagaaaggggaccggggacacac

SEQ ID NO: 95432 - RNA, 83 nt, Homo sapiens
cacagccgcggcagggaaaggcaagaggaggaacgacgagaagagaggaagagagagacgcaacggagaggaagaacaaagag

SEQ ID NO: 95433 - RNA, 75 nt, Homo sapiens
agaacaaagaaggaaaggcaagagcgagaaaagcaaagcacaagagagcgcaaaacaaaccggaccgggcagcgg

SEQ ID NO: 95434 - RNA, 74 nt, Homo sapiens
gagaagcacggcgcccggggaggggaccgcgcccgcccagcgccgcagcacgcggaccagcccaccccgcagga

SEQ ID NO: 95435 - RNA, 77 nt, Homo sapiens
ccccacacggagcccagcagcccagccagcggacccgacggcgagaggaggcagcacggcaggagacgaggagagga

SEQ ID NO: 95436 - RNA, 72 nt, Homo sapiens
aaagcacgggggcaacagagaggagccaggaagagacaagcaacgaggaaaagaaacaaaacacggccaggg

SEQ ID NO: 95437 - RNA, 75 nt, Homo sapiens
acgaagcgaggcaccgcagcaccaggacaccagaaaggaagaagaacagaacccaggaagagcacaagcagacaa

SEQ ID NO: 95438 - RNA, 76 nt, Homo sapiens
gaccagcaccaggggaagcgggacaacgggggcgcagagacaaggaagggaagcggagaaaaggagcaaaaaacaa

SEQ ID NO: 95439 - RNA, 56 nt, Homo sapiens
ggccaagaggcccgaaaagaggagggcgccagcgaacccgccgagccagccagaca

SEQ ID NO: 95440 - RNA, 79 nt, Homo sapiens
acagagcgagcgcagcagcagcccagacagcccaagcacaaaacaacccaaaagaagagccggccaaaggaaaggcggg

SEQ ID NO: 95441 - RNA, 91 nt, Homo sapiens
gccgcgggagccgcacgcggcgaaggaagaggagggcaagaagggcaagaagaacacagaggacagggaaaagacaacaaaagaaggaaca

SEQ ID NO: 95442 - RNA, 87 nt, Homo sapiens
aaggcagggaggcagcggggcaggggcgcaggagcaaggaccaggagcaggacggggacagcaaaccagccggcgggcgccacaacg

SEQ ID NO: 95443 - RNA, 31 nt, Homo sapiens
ccaccagccaccgcaagcccaccacgaccca

SEQ ID NO: 95444 - RNA, 73 nt, Homo sapiens
ggcagcaaaccggccacagcaggcgaccgcccgccacggacgcaagacgccaacaagccacccacgccgggaa

SEQ ID NO: 95445 - RNA, 78 nt, Homo sapiens
cgccgcggagaccccaccgccggcgcgggaaacgggcgaagcgacgagccgcgaggaggaaagggcagcggaggcaga

SEQ ID NO: 95446 - RNA, 78 nt, Homo sapiens
cgacccaaacccacccaagggcaggacgggaagcaggcggcggccaggccggacaagacgcagagagccgacagaccc

SEQ ID NO: 95447 - RNA, 68 nt, Homo sapiens
ggggggaggccacaggcgcaagcaggagacaccagggagccaacagaagggccaggccaaacaaggca

SEQ ID NO: 95448 - RNA, 76 nt, Homo sapiens
agcacccaggaaggggcccagaagcagaaccaagaggagaagacagaggagccagaccaagagacagcacaggcga

SEQ ID NO: 95449 - RNA, 78 nt, Homo sapiens
ggacgccggcggagacgcgggcgagaacccaggagaaacgagagggacagcaaggaagacgccagagagcggcacacc

SEQ ID NO: 95450 - RNA, 76 nt, Homo sapiens
cgagcacaggaaccaggagacgaggaagggcaaaacgcagaagggaagcaaaaggaacagggggcagaaagacgca

SEQ ID NO: 95451 - RNA, 77 nt, Homo sapiens
gcagaacccaacagaagcgaagcaggaagacaagaagggagcgaggcagaagcccccggggagagacagacagaggg

SEQ ID NO: 95452 - RNA, 82 nt, Homo sapiens
gacagcgggccggagcagccgcgggcgcccgaggggccgagcgaggaaacacccaaggaaccaaagcaggccagcagaaaac

SEQ ID NO: 95453 - RNA, 38 nt, Homo sapiens
aggccgggcgggggcaagggaccgcggagcagaggagg

SEQ ID NO: 95454 - RNA, 73 nt, Homo sapiens
caccgcgggggcgcagagcgggcaagaaaccgcaacccaaggccacgccgagggagggagcaggaaaaacacc

SEQ ID NO: 95455 - RNA, 59 nt, Homo sapiens
aggaggaaaaagaagaccagcgacaaaagagaaacccggcaggcgaacgcaagcagacg

SEQ ID NO: 95456 - RNA, 86 nt, Homo sapiens
cggcgcgagaggggcgcggccggagcgggcggcgagacaaaggcgacgacaaggagggaagaagcggagcagccagaagaggcagc

SEQ ID NO: 95457 - RNA, 80 nt, Homo sapiens
cagagggaaaaaggagaaagaacgaagggacaccgggcccacagaggaaggagaccgaggagcccaggaggaggaaccca

SEQ ID NO: 95458 - RNA, 63 nt, Homo sapiens
acgcggaacaagagcacaaacaacaaggcaacaagaaaaacgaaaagcgcaggaggaggacag

SEQ ID NO: 95459 - RNA, 79 nt, Homo sapiens
aggaggacagaagacaggagggcaagaccggccaagcacagggaagagacagggcacaggcaggagaaggaaaaagaag

SEQ ID NO: 95460 - RNA, 81 nt, Homo sapiens
gcgcaggccccccccacagccgcaggacccacggagccgccccccagcagggccaggcaagagcgggagcggggcgccagc

SEQ ID NO: 95461 - RNA, 80 nt, Homo sapiens
accggaccgcaggacgggagaccaagggaagaaggcggaacaccggaggcgggaaaggagcaaaagaaaaggccaaaacg

SEQ ID NO: 95462 - RNA, 67 nt, Homo sapiens
aacggacccacccaagccaaccggaaaaccaaaacaacccggcaggggggggagcgcaaccgcacgc

SEQ ID NO: 95463 - RNA, 42 nt, Homo sapiens
ccacccagacccgcccaaggggcgaggaagcgccccgaaacc

SEQ ID NO: 95464 - RNA, 78 nt, Homo sapiens
gcggacgccacccgggggcacagcaaggcacccgaggaggccgcgaggcacagaagaccgggagacgcaggaaagaaa

SEQ ID NO: 95465 - RNA, 92 nt, Homo sapiens
gagaaccgcccaaggggccggacacgccgccgacaaggacgagcagaaggccacgggaagcgggaggggagaggagaaaggcaccagcacaa

SEQ ID NO: 95466 - RNA, 66 nt, Homo sapiens
ggcaggacggacaggaggcacccaggggagccgccaccaaaagcagacggaaaacccacggggaag

SEQ ID NO: 95467 - RNA, 76 nt, Homo sapiens
agaccccggagacagccccacagccccgagaccggacgcccagacaggcgcccagagagacggggcgccagggcca

SEQ ID NO: 95468 - RNA, 79 nt, Homo sapiens
acacacagaaggccggaagagaaggggaaaagacgcacgcaagagggcggcgacggcggcgcgaggaccgaccgggccc

SEQ ID NO: 95469 - RNA, 72 nt, Homo sapiens
aggacgaaagaagagcccaccagcaaagacagagaagagaccaaagagcaaggaaccccaagcgagccggga

SEQ ID NO: 95470 - RNA, 81 nt, Homo sapiens
cgcggagggcggagagacccgggggcgagcacaaacggggcggggccggggaacacacagccggaagaaaacccgagcgca

SEQ ID NO: 95471 - RNA, 84 nt, Homo sapiens
gacgaggaagagcgaggggacaaaggaagcaaaaccgaccaaaaaccaggcacaaaggacagcccgcaaaacagacccaggaca

SEQ ID NO: 95472 - RNA, 80 nt, Homo sapiens
gcaaaggccaagagaagacgcagccacaccacaagcagcagcggagagagaccccaggaaccgccgcgcccgggaaagga

SEQ ID NO: 95473 - RNA, 80 nt, Homo sapiens
cgcaccgcagcgccggggcacgacacaaaaacagaagcagagacgcggggcaacaaggagaaagggaaccacagcgacca

SEQ ID NO: 95474 - RNA, 79 nt, Homo sapiens
ggaagcggcgccacccgcacgagcccgggcgcgccaggcacagccaagagcggaccggcagcggccagcgcagcggccg

SEQ ID NO: 95475 - RNA, 87 nt, Homo sapiens
ggcggcggaagcggagggggaccaccgggagagcgcggcccagcccggccacgcggacccgaaaccaaccgcgagggagcccaagaa

SEQ ID NO: 95476 - RNA, 60 nt, Homo sapiens
aggaagaggagagaccaaaagcacgagacaaggaacacccgagacacaacaagacccaca

SEQ ID NO: 95477 - RNA, 76 nt, Homo sapiens
cgccacacggaagccaagagaagggcaacagagggacacacggaggcggagacgggaggaaaagaagcccacggcc

SEQ ID NO: 95478 - RNA, 79 nt, Homo sapiens
gccggggcgcaggcgggggacccccaaggccgcgccaccccgggagccaaggcagggaggaggccagaggaagcaccgg

SEQ ID NO: 95479 - RNA, 85 nt, Homo sapiens
cgcaaagccggcaccgcccggcccgccagcgccagcggcacggcccgccgcccaagggcaaccggaagaaacaggagccaggcac

SEQ ID NO: 95480 - RNA, 73 nt, Homo sapiens
gcagcaggaagagggaaagcgcaggaaggaaagggacaaagagcgaagccgaccagcgccaggaaaacacagc

SEQ ID NO: 95481 - RNA, 82 nt, Homo sapiens
ccagcaggaggacagggccggagcagccggcagcaagcagccaacgcagaaacgcagacagccaccgacagcccagacaaag

SEQ ID NO: 95482 - RNA, 71 nt, Homo sapiens
ccggcaccaggccgaaaacgaagcagaggaacaacaaggcccagaagaagaaggacacgcaggcaggaagg

SEQ ID NO: 95483 - RNA, 66 nt, Homo sapiens
cacggaccaagcgggccacagcacccccgagagagaggaaccgcacccaaggacggcggaggccca

SEQ ID NO: 95484 - RNA, 57 nt, Homo sapiens
ccaccagcaggcaagcccacaggccaagcagcacaaggaaaacgagagaaacgaagg

SEQ ID NO: 95485 - RNA, 72 nt, Homo sapiens
gcggcgacggcggagggcccggaccgaaagaaccgcacagagcaggcccaccggcaacacaaagcacgcagc

SEQ ID NO: 95486 - RNA, 75 nt, Homo sapiens
agcagaggcggagcccgcagaccgcagaaggccggagacaccagcaggagcagcaggaaaggcggcgcggaagag

SEQ ID NO: 95487 - RNA, 73 nt, Homo sapiens
gcagaagcggcccggccgcccgccagcggccaagaagcccgcccaggcaacaaaccgggagacaggcacaccc

SEQ ID NO: 95488 - RNA, 72 nt, Homo sapiens
cccaccgccccgcggagccagagcgcggaacccaagaccacagccccagcgccccacaaggaaagacgccaa

SEQ ID NO: 95489 - RNA, 66 nt, Homo sapiens
caggcccccgagccccgaagaaaggaagcggaagagaagaccggcaacaagaaaaaaagccagaaa

SEQ ID NO: 95490 - RNA, 73 nt, Homo sapiens
aaaggaccgccccgggaggcaccgagaggaaaggcgagggaagcgccggggcacccacagaaggagaacaagc

SEQ ID NO: 95491 - RNA, 80 nt, Homo sapiens
acccagccggcagcagccaggcggagaacaacaaacaggagaaagacagcaaagaaaaggagaagaaaggaaaaaaacaa

SEQ ID NO: 95492 - RNA, 75 nt, Homo sapiens
ccgcgggccaaaagggaagggacgcaaaaaggaagccccacaaggaccaggcaaaacggaagagcacaagaccca

SEQ ID NO: 95493 - RNA, 53 nt, Homo sapiens
cgcaccaacgagcaggagagaaaaagccgcaaccaccacccgacagaaaggaa

SEQ ID NO: 95494 - RNA, 82 nt, Homo sapiens
aaaagagaaaagagaaaaggagaaggaaaagggaaggacaaggaaacaaacacaaacgggacgccccagggccaccgccagc

SEQ ID NO: 95495 - RNA, 36 nt, Homo sapiens
gggaaggcaggaagcacagaaggagagaagaagagc

SEQ ID NO: 95496 - RNA, 78 nt, Homo sapiens
ggaaccggcgcgccggcgcgcggcgcggacaggcccaaacggacagacgggcagagggggagacgcccggacgagcag

SEQ ID NO: 95497 - RNA, 80 nt, Homo sapiens
caagccgcacagccgcggcggcagcagcaggagagaagccgggcggaagcccacgcacaggcgccggggcggcagaacgg

SEQ ID NO: 95498 - RNA, 77 nt, Homo sapiens
caagcgccccaaaccagagggcgccggccgagcccgggaaaacgacagcagcagcagggccggaagacgccaccgca

SEQ ID NO: 95499 - RNA, 72 nt, Homo sapiens
ccggggaaaagcgggcgggacagaccccaaaacgcccaaacaggaagcagaaggcacgggggacacacagcg

SEQ ID NO: 95500 - RNA, 59 nt, Homo sapiens
cagccagggccagcaggcaccgagccgagaggagacacgagaagacccccaagaaaaga

SEQ ID NO: 95501 - RNA, 74 nt, Homo sapiens
agaggcagccaggcagaccacaggaccaaccagacgccgacacgcagggccaagagaaaaagaaaaggaagaca

SEQ ID NO: 95502 - RNA, 79 nt, Homo sapiens
agaccaacaaagaacgggaacccacccggaggaacgggccgacaaaggaaaccgcaggaaaggagaaggagaggagagc

SEQ ID NO: 95503 - RNA, 54 nt, Homo sapiens
cggccagggaaccaaacagcagagcagagggacgaaaaggagcagcgaggaagg

SEQ ID NO: 95504 - RNA, 88 nt, Homo sapiens
aaagcagggaaccacaaccagcaggccaggaccaaccacaaggacagaacgacagacgccaaggcaagaaaccacccgaccgacaggg

SEQ ID NO: 95505 - RNA, 84 nt, Homo sapiens
cgccgccaccagcccaagagaaaggagccggcccaggagcagcagggaggcgggaacgcccagggagcccccgcccccaggaga

SEQ ID NO: 95506 - RNA, 60 nt, Homo sapiens
cacccgggaccgcaacgacggcagccccgccgggagaaagaagaaacaaagagggaccca

SEQ ID NO: 95507 - RNA, 56 nt, Homo sapiens
cgccacccccacgaccaccaggacaccacgcccccccaaaaagagccgaaaaagga

SEQ ID NO: 95508 - RNA, 70 nt, Homo sapiens
aaccaaaaacagagcaggcggcacaggggaaaaaggggagcaccacgccgccgaggaccacaagagcaaa

SEQ ID NO: 95509 - RNA, 76 nt, Homo sapiens
gcagcggaagacaaaccacaacaacacagcagaggcgggaagcacggcagcaaaggaacccaaagaacggaaccca

SEQ ID NO: 95510 - RNA, 51 nt, Homo sapiens
cagacgcagggcgcccccggcgccccccggaagccccagagacccaccaca

SEQ ID NO: 95511 - RNA, 74 nt, Homo sapiens
gacgcaggagacagacgacggcacagaccaagacgccagaccaaaagagcacaaaaccaacgggaacagcggac

SEQ ID NO: 95512 - RNA, 68 nt, Homo sapiens
ccagccagccacacggcagaaaaagaccaccaaagccggcacgcaaaggcaacgcagaaaggaaggaa

SEQ ID NO: 95513 - RNA, 79 nt, Homo sapiens
ccgggaggggaaacgccgacacgggagggaaacagcgggccaagaccgaacggcgggcggccaggaagaaaggcagcca

SEQ ID NO: 95514 - RNA, 81 nt, Homo sapiens
ggaagcaagcgcccgaaagccagaggccgagacccccaccaccgcaggcagcccaggaaaacccagaggaaccaaagcccc

SEQ ID NO: 95515 - RNA, 73 nt, Homo sapiens
cgagggaggggaccgccgcgaagcacggaccccaccgaacagggccggcagacgcagacagggcccggcccga

SEQ ID NO: 95516 - RNA, 85 nt, Homo sapiens
aggagcgccagcagagggaaacgccagcaaccggacagcccgcaggacagacaagagagggaagagggggaggggaagaagggag

SEQ ID NO: 95517 - RNA, 91 nt, Homo sapiens
aacccacccaacccaccaagaagagaagaagagggagccggacaagacaaggacaggggcgacagagcgaaagaaacgagccaggccaaga

SEQ ID NO: 95518 - RNA, 38 nt, Homo sapiens
caagggacacggccgaaacaagaggagccaggagcacg

SEQ ID NO: 95519 - RNA, 78 nt, Homo sapiens
ccagagcacacacggccaagagcgggcaccaggaagcgaaggcgaagagcacaacacagaagaaacggcaagcaagga

SEQ ID NO: 95520 - RNA, 73 nt, Homo sapiens
ggcgaggaggccaagaaagaacacaggaaaaccagcggggcaggaaagaaagcgaacaccggggcaacagcaa

SEQ ID NO: 95521 - RNA, 39 nt, Homo sapiens
gcgacaaaagagaaacccggcagacggacaaccaccaga

SEQ ID NO: 95522 - RNA, 80 nt, Homo sapiens
agccagaccagcggccgggggcagaccccagcccacaacccacgcgcaccggggaaaacgaggcgccacaaaaaccagcc

SEQ ID NO: 95523 - RNA, 71 nt, Homo sapiens
ggcccggaagacaagaaagcccaaacaccgacggcagcagccaccgaggagcaacacccccagggagccca

SEQ ID NO: 95524 - RNA, 57 nt, Homo sapiens
ccaggcgaccggcgccagggcgccaagcgccggaaagagacaccaggagacgggaca

SEQ ID NO: 95525 - RNA, 90 nt, Homo sapiens
aagcccgcggacgccaggggccagacccacgggacacggaacccaaggagacgaagcgaagcaggagaaggaggggaaaaaaccggcccc

SEQ ID NO: 95526 - RNA, 78 nt, Homo sapiens
agaaaaggagaaccggagcacaccaaggagacgcgggcgggaggccacgaccgaggagcgaagcgagaggagaagcgg

SEQ ID NO: 95527 - RNA, 74 nt, Homo sapiens
ggaggagcggagcacacgccgcggaggcccacaagccgcgccgaggggcggaaaagcgaacacgcgggacccag

SEQ ID NO: 95528 - RNA, 65 nt, Homo sapiens
cagagacacagaaccacacgcccaagggcagcaagaaagggaagggagcaccccaaacgaggcaa

SEQ ID NO: 95529 - RNA, 70 nt, Homo sapiens
ggcaaggacagagcagaggacgcgcaggggcacccccacggagcccgaagggagggcaagcagaaagcag

SEQ ID NO: 95530 - RNA, 72 nt, Homo sapiens
ccgaaccaggaccggacccggacccaaaggccagcaacaaagcaccagacacagagaaagagcaacccccaa

SEQ ID NO: 95531 - RNA, 92 nt, Homo sapiens
acgagacgccgggcgcggcagaggggaaacccagcaccgaggacagaccagaacacacaagaaccgggagaacgaacaaaccaagccaacac

SEQ ID NO: 95532 - RNA, 90 nt, Homo sapiens
ggaggacagaagaaccgccagggcaccagacagccacgcagacacagccaggaaagccgcagcggggagaagcccacgcgaaaacaacaa

SEQ ID NO: 95533 - RNA, 74 nt, Homo sapiens
caaagcagcgaagaagaggcccaacccccaccccgcccaaggaggcccagcgaacagagaggcacccagacgcc

SEQ ID NO: 95534 - RNA, 77 nt, Homo sapiens
ggcacggagagcaacaaagccgacccaacccaagggccaaagagcacccacgggccagaaaacaagacgaagaggac

SEQ ID NO: 95535 - RNA, 73 nt, Homo sapiens
gcaggacaaacagcacaagagcggacaaggagcaccgcggacgccccagggcacaccgcgcaccagcgagagg

SEQ ID NO: 95536 - RNA, 63 nt, Homo sapiens
cccaggagaagccgcccaaagaacggacacgagcgagggcgaccagggaacgggaagcacgaa

SEQ ID NO: 95537 - RNA, 79 nt, Homo sapiens
agcggggaccacaccacacagcaaaagagccaacacccaggccaggccgcccggaaggaggccgccacgccccgccgcc

SEQ ID NO: 95538 - RNA, 91 nt, Homo sapiens
cggcccggcgcgcccggccccgaagaagcgcggaacgagcaccaggaaccccaccaacaagggaagacacggggaacccagaaacgcgaaa

SEQ ID NO: 95539 - RNA, 69 nt, Homo sapiens
caacaaaacacgccaaacaaagagccaagaacagaaaaaagaggagggggcaacggagacagaaaccag

SEQ ID NO: 95540 - RNA, 71 nt, Homo sapiens
cgcaggagaacagacacacagagagaaagaaaagccgcagagaaaaagaagccaaagccacgagaccgaac

SEQ ID NO: 95541 - RNA, 83 nt, Homo sapiens
ggaaggaaaagcaggggaggagaaacccaggcagcaagaacgcgcaacacagcgaccgacgggaccggcgcaagcagcggagg

SEQ ID NO: 95542 - RNA, 75 nt, Homo sapiens
cacggagagcaacaaagccgacccaacccaagggccaaaggaaacaggaacacgaaagaggaaaaacgcacaaga

SEQ ID NO: 95543 - RNA, 79 nt, Homo sapiens
ggcaagcggagcaagcgaaaaaccacaggaagcccagcaccaacaacaaggagaaaacaggccccccaaggccccaaac

SEQ ID NO: 95544 - RNA, 59 nt, Homo sapiens
agcaggcccgcaagaccgaaagggggggagcggccacacaacccgcggggccccccgac

SEQ ID NO: 95545 - RNA, 56 nt, Homo sapiens
agcgggcgacggcgcccggcaaggacaaggaccggccgagccccaccaaggccgaa

SEQ ID NO: 95546 - RNA, 50 nt, Homo sapiens
gccagcgcggggcaacagcaccacggagagggcagggaacccaggaaagc

SEQ ID NO: 95547 - RNA, 80 nt, Homo sapiens
cgagccgaacggcgcgccgcccaaggagagcaaccccaaacgcacggagaggcggccgagcccaagcagacggcagcagg

SEQ ID NO: 95548 - RNA, 93 nt, Homo sapiens
cgggacggaccgagaccggaccgagagcggaccgagagcgcgaaacgcacgagaagcaaagaggagaagcacacagaccaaacagacagaaaa

SEQ ID NO: 95549 - RNA, 69 nt, Homo sapiens
cccccagccgcagccacaacaccggcaggaaccaccaggacagaaaccgccgaagacacggcggacgag

SEQ ID NO: 95550 - RNA, 74 nt, Homo sapiens
acacgccaagcacaccaaacagagccgcagggacggccgccggcccgcccggggggaccccaccagaggacagc

SEQ ID NO: 95551 - RNA, 80 nt, Homo sapiens
ccggcacagagcccacacggagcgaccacacccacccagggaggaaaaagcagcgaaacagacaaccccccacacaaccg

SEQ ID NO: 95552 - RNA, 57 nt, Homo sapiens
ggaggcgcagcgccaagagaagcacccaggaggggagagaacaaaacaaaggaaggc

SEQ ID NO: 95553 - RNA, 72 nt, Homo sapiens
ggaaggaagggacaagacccacagcaaagccagcgacagaagccaggccgaccagagaagcacagcggccac

SEQ ID NO: 95554 - RNA, 84 nt, Homo sapiens
gaccccgccccggaggagcgcgcacccggcccagcaggagggcggggccgcggcagccacccccacagcacgccacacgggccc

SEQ ID NO: 95555 - RNA, 56 nt, Homo sapiens
acaagaacacaggaaaaaggagacagaaaagcaagcagggagagcacgaggggggg

SEQ ID NO: 95556 - RNA, 69 nt, Homo sapiens
agaaaagaagagacagcgagaacaaaggagagaggaccacccagaggagcaacgaacacgagaaccacg

SEQ ID NO: 95557 - RNA, 60 nt, Homo sapiens
ccgacacaaccagaaagcaggggaaagcgcgagcgagcacccggagcagcagagcaccca

SEQ ID NO: 95558 - RNA, 75 nt, Homo sapiens
gggaagcaggacggccaaggcagggacggaagacaccagcgcagcccgacacacaggcaagaaaagcagcagcaa

SEQ ID NO: 95559 - RNA, 44 nt, Homo sapiens
agaacagagggggcggaggagagaagagaagggcagcagaggaa

SEQ ID NO: 95560 - RNA, 72 nt, Homo sapiens
agcggagaccggagggacagggaggagggcagccaaccaccagcccgggggcagcaggcgacccagaaagag

SEQ ID NO: 95561 - RNA, 67 nt, Homo sapiens
gacagccaaaccgcaacgagaacagaaaacggagccaggccaacaaaggcgaaagagggccagagac

SEQ ID NO: 95562 - RNA, 75 nt, Homo sapiens
acccgggaggcgcaacaccaacacaggccccccggaccagccagagccaaaggcccacgggagacaggcggaagc

SEQ ID NO: 95563 - RNA, 77 nt, Homo sapiens
ggacagaacacgaagccagaaaggggagaagaaccaaacaaggaaaacgaacaaaaacagggggagaaaaggcaaac

SEQ ID NO: 95564 - RNA, 90 nt, Homo sapiens
aagcccccgcccccccgacagacgaccccagccaggccacggggacaacaggcagcagcgcagcgcacagaggagaaaaagcaaagcaag

SEQ ID NO: 95565 - RNA, 70 nt, Homo sapiens
aggccgcaggggcggcacacagcacgggcgggggacgggcagaaaaacaggaggagacacacagccccag

SEQ ID NO: 95566 - RNA, 82 nt, Homo sapiens
ccaacgaccaaacaccggcagagcgaagaaaagggaccggagccagacaagcggacaggggccagacaagcggaccgcagcc

SEQ ID NO: 95567 - RNA, 35 nt, Homo sapiens
cccagcgagccagcggagcgcgcagagaccagacg

SEQ ID NO: 95568 - RNA, 82 nt, Homo sapiens
gcccaggggaaaaagggcagaccagcaacggggggccgagaacacccaacagcgggacagaaagccaagaagaggaaaccag

SEQ ID NO: 95569 - RNA, 48 nt, Homo sapiens
gggcaaggcaacgaagagagaggaaccagagaaggagaaacagcaggg

SEQ ID NO: 95570 - RNA, 32 nt, Homo sapiens
aaagcagagaggcgcggacaagagcaccaaga

SEQ ID NO: 95571 - RNA, 53 nt, Homo sapiens
gccccccaaaagggagcacaggcacagcagcccacgcgggaaagagcacacag

SEQ ID NO: 95572 - RNA, 80 nt, Homo sapiens
ggcgacgccgagagcacacgcacgggccccggcgccaccggagagaggccgcgccgggcagaggagaagcaagaacacag

SEQ ID NO: 95573 - RNA, 74 nt, Homo sapiens
aggggagacccggcgcgaccacgcccggcgccccaccccaggcgcgaggggcacagaggcaggcacaaaaccac

SEQ ID NO: 95574 - RNA, 73 nt, Homo sapiens
gccggcacaccgaggacaggaccgacagcacaacaccgcacggggagccaagccggaacaagcagaaagcacg

SEQ ID NO: 95575 - RNA, 57 nt, Homo sapiens
cgaagacggcgaagagacccggcccacaaggagacgggggggaccacagcggagggg

SEQ ID NO: 95576 - RNA, 84 nt, Homo sapiens
gcccccgagggcgggacacaggcagccgaaccaggcaagacgagccagcaacggggcccacaaggagcgaccgggcccacagac

SEQ ID NO: 95577 - RNA, 76 nt, Homo sapiens
acggggggagggagcaggcccggggagggggaccgcgaggagcgcagccgcaaggaccgaggagacccacagcaag

SEQ ID NO: 95578 - RNA, 73 nt, Homo sapiens
gacacaaacaaggagggcgagagagacagggaggaagcggagccaagaggccacgacagaagaacagcaacag

SEQ ID NO: 95579 - RNA, 73 nt, Homo sapiens
cacaaaggacacagaaaggacaagaaacaccaacgagacacagccgggcaacggcggagaaaccaccacaaac

SEQ ID NO: 95580 - RNA, 63 nt, Homo sapiens
aaaagcagaagacacaagaggcgccggcgggaaaacaacagccgccggcaccgggccggacca

SEQ ID NO: 95581 - RNA, 66 nt, Homo sapiens
ggaagcggacgcgggacggaagcacacgcggcgggaccaagaaaggcccagggaccaaagcccgga

SEQ ID NO: 95582 - RNA, 56 nt, Homo sapiens
gcagccccccgcccggaggccgggaagcgaggaggaaaacccaaacgcagaggacg

SEQ ID NO: 95583 - RNA, 69 nt, Homo sapiens
caaggagcaacacggcggaccacacaagcaaaagagccagcacaaagcgagaaggagggagaagggcgc

SEQ ID NO: 95584 - RNA, 77 nt, Homo sapiens
gaccaacaggaacaaagaggacacagaaggagcgccaggcccaggcggcgaacccagcccaaggaccacccacccag

SEQ ID NO: 95585 - RNA, 73 nt, Homo sapiens
gggcaccgcgcgcggaccgagagaacgggcgcaggaggaggcaagacgggcagacgagcaggaacggggagac

SEQ ID NO: 95586 - RNA, 58 nt, Homo sapiens
ggcggcgccggccccggggagaaacgaaacgacagggagaaaaagcaaagaagacagc

SEQ ID NO: 95587 - RNA, 51 nt, Homo sapiens
ggggaagaaccacaggacacacagcaacgaagcaggggaggagggaagacc

SEQ ID NO: 95588 - RNA, 81 nt, Homo sapiens
cggagcaaggaaaaaaaccccacggaagagacagagagagccaaaccccagcccaggaggcggcccagggaccggaggacg

SEQ ID NO: 95589 - RNA, 77 nt, Homo sapiens
caagagccgggaccccagaagccagaaagagagaaaggacgaagacagaaagggaagaacagcaacggagccccaaa

SEQ ID NO: 95590 - RNA, 81 nt, Homo sapiens
gcaagacgagggccggaggggcccacgaggagccaacacaccagcagggccaggcccaagcccagcagaccaacagcgcag

SEQ ID NO: 95591 - RNA, 71 nt, Homo sapiens
cacagaggggaacagacaggccccagccgcagaaccccagcaaaggaagaccagaagcagagacaccagac

SEQ ID NO: 95592 - RNA, 62 nt, Homo sapiens
acagccagaacaagcggaagaacaacaaacgaaggaaaagcccggaaaagcagccaagcgga

SEQ ID NO: 95593 - RNA, 47 nt, Homo sapiens
cggcagcacagaggagggcagcaacgcaccgagggaagagcgaccag

SEQ ID NO: 95594 - RNA, 86 nt, Homo sapiens
ggcccgaggcggcgagagaggcaggcggagccgaccgggccagagcccgaggagagacaggaaggccgaaggagagaaaaaaaccg

SEQ ID NO: 95595 - RNA, 78 nt, Homo sapiens
gggcgaagggaacgcaaggcccccgaccacacgcccgcgcgaggcgaagcgcgaaagaggcagaagaagggggagagc

SEQ ID NO: 95596 - RNA, 77 nt, Homo sapiens
aaagaccggcagagggggcggaggaagaacaggagaaaaggacgacggaaccaccacgaaaaaaagcacacccaaga

SEQ ID NO: 95597 - RNA, 71 nt, Homo sapiens
cggaaagcaggagcacagggcccaaaaaagggaaccgcacagcgagacaccccacacagagggaccgcaaa

SEQ ID NO: 95598 - RNA, 71 nt, Homo sapiens
aggaaacagggccgcccagaggcagaaggaccgccaacagcagacaacaagaacacaaccaggacgagcgc

SEQ ID NO: 95599 - RNA, 83 nt, Homo sapiens
gagcggcgagcggccgggcagcgagaaggcgaacccgcaacgcgcccgagaggccaacaagcaggaaaaaacgaggagcagga

SEQ ID NO: 95600 - RNA, 79 nt, Homo sapiens
gagaccggaccgagagcggaccgagagcgcgaaacgcacgagaaggacacaccggaacaaagaaaaccaaaacgcaaca

SEQ ID NO: 95601 - RNA, 74 nt, Homo sapiens
cagacaccccagacagccacaaagaaggcccagaaaccggaagaaagcacgaccaagagggaaggaaaaaccaa

SEQ ID NO: 95602 - RNA, 68 nt, Homo sapiens
accagaaccacggagcagaccgaaaaaggaagaagaagaacagcgccagcgccgggaccgccaacgac

SEQ ID NO: 95603 - RNA, 73 nt, Homo sapiens
gccgggcgggacgggggggcggcccggccccgcagacaacggcaagcggagaagagcaaggccgaaccgagag

SEQ ID NO: 95604 - RNA, 83 nt, Homo sapiens
caaagccacggcacgcccaccgcaccgaccaggaccacagcggcaaggcccaagcccagccaagggggcgacgcaaacccgga

SEQ ID NO: 95605 - RNA, 74 nt, Homo sapiens
cagcagaaagcaaaccagcaggcaccaaggaaagcagaagacaagccaaagagccccaggacgagacaaggaca

SEQ ID NO: 95606 - RNA, 77 nt, Homo sapiens
cgacgaccagcgcacacacggccaccggacccaggacgaggggagaaaaccaaacaagagaagaaaaaagacgcagc

SEQ ID NO: 95607 - RNA, 112 nt, Homo sapiens
cagcgcgcggcgcggccccgacccccgcccggcgccggcccgggccgccagggcagaacaggacagagccacgaccaggggacacccccgcccccaacccagaaggaaaagc

SEQ ID NO: 95608 - RNA, 63 nt, Homo sapiens
gacccccaagcagcaggccagacagaaaagggagccaggaccccagagaggagacccagcgcc

SEQ ID NO: 95609 - RNA, 73 nt, Homo sapiens
cacaccagacagccaacaagcaggaacgaacaggcccaaggcgccagggacgaagaggacccgcaacaaaccg

SEQ ID NO: 95610 - RNA, 70 nt, Homo sapiens
cacgccagcaaagacggccagcaaggacgcagcaaccaggaaccccggcagcaagacgcccggagaacca

SEQ ID NO: 95611 - RNA, 78 nt, Homo sapiens
aagaacggcagccgacccccagggaagcagcagggccggaaccaccaggccaccgacaggcccaccagagggccacca

SEQ ID NO: 95612 - RNA, 54 nt, Homo sapiens
gaaccggcacaagcacgcaagagaagccaggcaacagaaaaccagcaggacaaa

SEQ ID NO: 95613 - RNA, 57 nt, Homo sapiens
ggaggcggaccccccgggccaggacaccaacccagacaacaggaagaaaccaaaaag

SEQ ID NO: 95614 - RNA, 64 nt, Homo sapiens
gaagcagcgaagccggggcgcgcagagacgaaccgggagaagggagaggaacacagaaagcaaa

SEQ ID NO: 95615 - RNA, 63 nt, Homo sapiens
aaaggggggcccaggacaagggcccaggaaaggaacgggaaagagagagagaggggccacagg

SEQ ID NO: 95616 - RNA, 81 nt, Homo sapiens
gccccccccccggaaaaggcccacgccgggcgaggcgcgccccagaccccagagcacgccggcaccaccagacgggcggaa

SEQ ID NO: 95617 - RNA, 85 nt, Homo sapiens
caagggaaaaagaagggagcggccgaaggagccaccaggccgggaagcccacgggcacccgccggcgccccccggcacaacccgc

SEQ ID NO: 95618 - RNA, 73 nt, Homo sapiens
caggaacagacacggggaagcgcaaaaacaagacggggcgccccacagaggggcgacgccaagagcccgagcc

SEQ ID NO: 95619 - RNA, 62 nt, Homo sapiens
cgggggcgaggagacaaaaaagcccaagaaccagccaccggcagcaccacccagaagcccca

SEQ ID NO: 95620 - RNA, 69 nt, Homo sapiens
gaaaagcagcaccagcaaaacccagacccagaccagcagcaagaccccacaaagagaacaacgcgaccg

SEQ ID NO: 95621 - RNA, 55 nt, Homo sapiens
gggccacaacaacgggagcaggcagacaccacgccacccaagagagagcaaaaac

SEQ ID NO: 95622 - RNA, 85 nt, Homo sapiens
agaggcgcgcgacaccgccgccacaccgccgccacaccgccgcgcccagcagccgcagcaagaagcccgccgagagacagagggg

SEQ ID NO: 95623 - RNA, 87 nt, Homo sapiens
gccgccccgcgagcacagagcccgccgccgaccgccgcccgccacacccgccgccaggggaggcacaaggcgggacagccaagccac

SEQ ID NO: 95624 - RNA, 73 nt, Homo sapiens
gcccgacagcgcggaacggggcagccgcagaccccaccacgacaggaacgccagacccgggagggagaaacga

SEQ ID NO: 95625 - RNA, 62 nt, Homo sapiens
gcggagccagccgaggggagaagagcccagagaccccgccacagccccacccccgaaaagcg

SEQ ID NO: 95626 - RNA, 58 nt, Homo sapiens
cgcgccgccgccgaggagaaaggagcggagaaaaaaaggcaggaaagagaaagaagcg

SEQ ID NO: 95627 - RNA, 86 nt, Homo sapiens
cgcccagcgccgccgccccggacagcggccccgaagcgggcggccgcaccggggcccagccaccgccccccgagaagagagagccg

SEQ ID NO: 95628 - RNA, 77 nt, Homo sapiens
cgcggccccagcgcccggccccccaccggacacccgcggacaagcagaccggaagaccgacggaagaccacaccccg

SEQ ID NO: 95629 - RNA, 69 nt, Homo sapiens
ggcaaagcgaaaggcaccgcaacaacgcccagcgaggaccaaaccaaagacggaaaagagccgagaggg

SEQ ID NO: 95630 - RNA, 72 nt, Homo sapiens
gaaagaaggacccagagcaaaaagaggaaaagaaggaggccagcgggacacacaaagaaagacgaaggacac

SEQ ID NO: 95631 - RNA, 78 nt, Homo sapiens
gcaggcagcagccccagacggaggggccagccagccagcagcgcaaggaaccaccaggccgcccaccgggccggacgc

SEQ ID NO: 95632 - RNA, 83 nt, Homo sapiens
cggcagcggcagccaagggccaaggcaagagagcagagaaagggggaggcggacccggcaacacgaaccggaaagccaaggaa

SEQ ID NO: 95633 - RNA, 74 nt, Homo sapiens
cccggcgccccggcccgcccccaaagcgaccgacccggacgagaaacgcaagaagcaagaaaggacagcaaagc

SEQ ID NO: 95634 - RNA, 80 nt, Homo sapiens
gagcagaaacacaagacccgggaaaaaacgagaaacagacaagcacgcccacgccgaagcaccacaagcgacaggaagga

SEQ ID NO: 95635 - RNA, 58 nt, Homo sapiens
gagaggagggcccgcccgcggaaaaacgcccaccagaaaagggggagacagccagcac

SEQ ID NO: 95636 - RNA, 87 nt, Homo sapiens
gacgagcgcacgaggaggcgcgcagaaccagaccgggagcacgcacccacgaggagcgcgcccaaagggagcaaggaggaacagcgg

SEQ ID NO: 95637 - RNA, 77 nt, Homo sapiens
cgccacccgcacagagccagagagaagagaacgaacgggaagcgaccgaacaggaaggccccggaaccacagagcgg

SEQ ID NO: 95638 - RNA, 74 nt, Homo sapiens
gaccacgaggacagcggaagaaaagaagaaacaggacagaggcaaaaaagcccaacaacacggaagaaaaaggg

SEQ ID NO: 95639 - RNA, 59 nt, Homo sapiens
gccaggaacgcccgcggaacggcgcagggaaaaagaccgagaagcgcagacccaccagg

SEQ ID NO: 95640 - RNA, 55 nt, Homo sapiens
cccagacacacaccacagagagcggagggcgaaacacagaaaaccgcaacgaaaa

SEQ ID NO: 95641 - RNA, 59 nt, Homo sapiens
acaccacccacacagcccggaacacggcacacgaccagaacacacgggggcggaggagg

SEQ ID NO: 95642 - RNA, 65 nt, Homo sapiens
agaagaacccaaggaaaaacaggacaaaggaagccaagcaggaggcaaaagagccacgggaaggc

SEQ ID NO: 95643 - RNA, 83 nt, Homo sapiens
ggccacccccacagccgcaccaaagcgcagaacgcagggcggcgcccgcgccgggaccccgggaacccccgccggaagccgga

SEQ ID NO: 95644 - RNA, 75 nt, Homo sapiens
cagcagagcaaaacagagcggaacgaacaaggggccagggagggcagcccaaaccgcccagccccagacgcccgc

SEQ ID NO: 95645 - RNA, 79 nt, Homo sapiens
cgggcggagccggacgagcgcgggaaagacccacaggccgccccgacagcaaacaacgccagacagcgagccaccaagc

SEQ ID NO: 95646 - RNA, 63 nt, Homo sapiens
agaccaagagaagaaccagggccagggagcaccaggagaacaacaaggacagagcaagagccc

SEQ ID NO: 95647 - RNA, 88 nt, Homo sapiens
cagcggggaccgagccgggaggccggccgggccagcacccggccgagacggcggcagcagcggcacaggcacgagcccgggcggacag

SEQ ID NO: 95648 - RNA, 84 nt, Homo sapiens
cccggaggcggcgcagcagcaccggccaggacgacggaagggaccaggccgcgcgaaggccccccgcaggccaggaagggagca

SEQ ID NO: 95649 - RNA, 73 nt, Homo sapiens
caaggaaaaacagcaagaacccaaaaggggcccagccagccccaaaaaccagccaagggagcccaagcaggcc

SEQ ID NO: 95650 - RNA, 79 nt, Homo sapiens
agcccggagcaggaaaaacacagagacagacggcggcaggcaaagccccggaacaagacaacaggagaaagaaagaaga

SEQ ID NO: 95651 - RNA, 38 nt, Homo sapiens
gcagcgccccccgcccaggggaaaaggagggagcgccc

SEQ ID NO: 95652 - RNA, 79 nt, Homo sapiens
cggcccccccccagcccgccccaaaagacacgagaggcgagggacgacagagcaagcggcagagggcaagcgggaaaaa

SEQ ID NO: 95653 - RNA, 76 nt, Homo sapiens
gccggagacgcggcccggaccagccacgggagaagggcagcacggcaggcgaaccaaaggagagcagagagaaaaa

SEQ ID NO: 95654 - RNA, 73 nt, Homo sapiens
gccgagccagccgcggccggaggagcccccaggcccgcacagacccaaccgagaacggcacagaacaaagagg

SEQ ID NO: 95655 - RNA, 78 nt, Homo sapiens
ccaagagaggcaggcagcgacagccacacaacggacagggagaccgaaggaccaccggcagcgggaaaaaacgaccaa

SEQ ID NO: 95656 - RNA, 80 nt, Homo sapiens
gagaaaggcccacgcagcccccaagcagcggaggcacccaccacgggccaggcgggccagaggcaagccgcgggagccac

SEQ ID NO: 95657 - RNA, 75 nt, Homo sapiens
agcggcccgccagagaacgcacccaggggcagaacaacggggaacgcacgcggaggaagaaaccggagagcgggg

SEQ ID NO: 95658 - RNA, 76 nt, Homo sapiens
cggcagcgcggaacaggccgagggacaaaggcaagccgccccagccaccaccccaggggccagagcccccccagaa

SEQ ID NO: 95659 - RNA, 105 nt, Homo sapiens
ggaagaggggaccccggccaaaacccaagccacaggcagaccaaaccgcccccacggccacacgagaacgaagaccagcgccgggaccccagcgcccccgagagg

SEQ ID NO: 95660 - RNA, 76 nt, Homo sapiens
aggcggcgcacggaaacagccacagcaggggaaggaacaaagcagagaaaccaaaaggccagacgaacacgagagg

SEQ ID NO: 95661 - RNA, 74 nt, Homo sapiens
agacaccagaagaccgagcagcagaggaacacgagaaccagagaaggacggagaagcgaaagccagaccggcaa

SEQ ID NO: 95662 - RNA, 69 nt, Homo sapiens
cgggagccaggaacacgagaaagacacgcaacagaaggagggccccggagcagccacaccaccgaggcc

SEQ ID NO: 95663 - RNA, 85 nt, Homo sapiens
gccgagccaacccggagcccgccgcggcccccggcacaggcagcggaggagcccgaccgacccgagacaaagcaggaggacacaa

SEQ ID NO: 95664 - RNA, 76 nt, Homo sapiens
ggaaagccagagggcaaaccaccgacacagagaacacacagacagcccgggaccgggccccggcaagaaaccccaa

SEQ ID NO: 95665 - RNA, 81 nt, Homo sapiens
acagaccaggcacccgcaggagaggccccaacaaggaaggaagaccaagaagcagaaacccccccggaaaagcagaccgac

SEQ ID NO: 95666 - RNA, 78 nt, Homo sapiens
gccgcggccgggaaggcgcagccggaccaccccaagcgaaggaagcagcaggcaaaacaacggcaagaacagcaaggc

SEQ ID NO: 95667 - RNA, 90 nt, Homo sapiens
agaaaaaaaaaaaaaaagaggaagaaaagagcggaacaaaaacgcaaaaggaccaagacaagaaaggcgcagcggccgagggaaacagca

SEQ ID NO: 95668 - RNA, 72 nt, Homo sapiens
cacccacggcaagggcccgcggggacagaaaaacaaggggagagccaaaaacacaaccagaccggagaaaag

SEQ ID NO: 95669 - RNA, 95 nt, Homo sapiens
aggccggggccaccggggccagcaggccacacgggagcaacggccgggccgccccccgggcgaggcagagacgccaggggcaaagcgcgggaagc

SEQ ID NO: 95670 - RNA, 82 nt, Homo sapiens
cggagccccagcgcccacgcaccccaccggcgcgcgcggcggcccgcgcacagccgaacacccaacaagaaggcaacgacaa

SEQ ID NO: 95671 - RNA, 75 nt, Homo sapiens
agcaggcaccaaggacagagcaggaccaaaagaagcaaagacacacagcaacgaagcaggggaggagggaagacc

SEQ ID NO: 95672 - RNA, 83 nt, Homo sapiens
acggcgaggaagcagccaagaaaaaaagacgaaagaagaagaagagcaaagggcccgcagaacccacaccaaacacaggacgg

SEQ ID NO: 95673 - RNA, 53 nt, Homo sapiens
gcagcagggccaaccaggaagggcggaaaaggcaaaacagcgcaaccaagaga

SEQ ID NO: 95674 - RNA, 60 nt, Homo sapiens
cggagccaccaaaaacgaagaggaaaccggccaccaccaccacagacagagggaagagcg

SEQ ID NO: 95675 - RNA, 78 nt, Homo sapiens
gcggccccggcggggcaagagcgggggcgggaccccgccgcggcgggagggaacaaaccgaaggcaacggcacaaaac

SEQ ID NO: 95676 - RNA, 72 nt, Homo sapiens
gagacccaaggaaccaaggcggcccggcgggggaaccacagacaaaaaccagaaggcaccgacaggaaagga

SEQ ID NO: 95677 - RNA, 68 nt, Homo sapiens
ggaaccggaggagaagcccagggagcgcaccccaggaaaccaggagggccgaacaggggggaacgaca

SEQ ID NO: 95678 - RNA, 77 nt, Homo sapiens
cccagcggccggacaggggcggaggcggcagaagggcccggcccccaggggggcagcagccggaaggggcgcagcag

SEQ ID NO: 95679 - RNA, 80 nt, Homo sapiens
aaggaacacaaaaaggaagcagggacgaacaaaacagcggaaaagggcacagaccagcacccacccagaggaaagaccca

SEQ ID NO: 95680 - RNA, 84 nt, Homo sapiens
cacaagaaggacccgggcagaagcggagaggcagagcgaaccagaacaagggaccccccaggacacagcgggacgacccaagcg

SEQ ID NO: 95681 - RNA, 79 nt, Homo sapiens
acgaaagcgggagagggaccggaacggcggcgacaaggggcccgaacagagggggcggaaaacaccccaaaagccaaaa

SEQ ID NO: 95682 - RNA, 56 nt, Homo sapiens
ccaacaagcagcaaggaaggccacagccagcaccaccgggccagagagaaggcgcg

SEQ ID NO: 95683 - RNA, 78 nt, Homo sapiens
accaggcccgcaggggagccggagaaccgaaccgacacagacaaagagaggagaccaggcaccggagagagaagcggc

SEQ ID NO: 95684 - RNA, 81 nt, Homo sapiens
ggcccagccccccagcgcggccgcgaggccccggcgccgcccggaacgcagcggaggacagcagcggacggccggaccaag

SEQ ID NO: 95685 - RNA, 73 nt, Homo sapiens
gagacacacaggaagagaggaccagcccccaggcccaggacgcaagagaggagacaggcacaccgagggccca

SEQ ID NO: 95686 - RNA, 78 nt, Homo sapiens
gagcagccgggagacaccgccaccgccagaggggcaccccccaccccgggacaccccagggcaccacagagcggcaga

SEQ ID NO: 95687 - RNA, 77 nt, Homo sapiens
cggccgggcagggagcccacggagcgccccgggagcagcccgcccccggccccaggcacagaacgacacagcgacag

SEQ ID NO: 95688 - RNA, 73 nt, Homo sapiens
cagaagaggagagagagcaagagaggaagaagaacgacccgcccggggcagcagaccgcagaccagggcccca

SEQ ID NO: 95689 - RNA, 71 nt, Homo sapiens
cggaggcgggcaacggaagaggcagccagaggagagcaggaaaccaaggcaccccggagcccggaaagggc

SEQ ID NO: 95690 - RNA, 61 nt, Homo sapiens
gacaggaagggaccccaggaaacagagccaggacaaaaccaggcagaaccaacacgaaccc

SEQ ID NO: 95691 - RNA, 81 nt, Homo sapiens
ccggcccccacgggcggcgcagggggagccacaagggcgcagaagccggcagagcccaagagacaacaagccgaaaagaga

SEQ ID NO: 95692 - RNA, 78 nt, Homo sapiens
gaagcaaggccgcggggggagaccccaccaccggggaccgagcccgccggacccagccagaagcaaaagaagaagaaa

SEQ ID NO: 95693 - RNA, 80 nt, Homo sapiens
ccggggccgggcgacaggagcagggacaaaggccagaagcaggagagcacagacacaaagaccaaagccgagcaaaaaga

SEQ ID NO: 95694 - RNA, 87 nt, Homo sapiens
cccgcgccgcacggggacgagccacgagagaagaaagaaaaagaaaccgccagcccagagacacgaaagggacagagagggggacag

SEQ ID NO: 95695 - RNA, 77 nt, Homo sapiens
cccgcggggcaaccgccacgagacaccaagacagaggaaacagaagagcaacagaacaaaccgaagggaacgagaga

SEQ ID NO: 95696 - RNA, 63 nt, Homo sapiens
cagcgggcgccagcaaaaccgaaacagccagccaggggaagcccccccaagaaggggcccgca

SEQ ID NO: 95697 - RNA, 63 nt, Homo sapiens
cggaggcgacgccggagagaacgaagcccggcgggagcgggaaaagcacagggccaggaagca

SEQ ID NO: 95698 - RNA, 79 nt, Homo sapiens
gcgggagcggcagcccacaggcaaacaggcgggcaacgcggcgcggaagaagacagagaggaggcggcgccgaaacgac

SEQ ID NO: 95699 - RNA, 77 nt, Homo sapiens
aacccaggagagcagaaaggaaccagcgcccacaggagaggaacgaacagagaaagaagaaaccaaaaaggaaaccg

SEQ ID NO: 95700 - RNA, 55 nt, Homo sapiens
ggcaccaaaacaggagacagccggacagaggaccaggcccacggaggaggaaaaa

SEQ ID NO: 95701 - RNA, 73 nt, Homo sapiens
aacagggagggacacacccaagcacggaccaaaaaccaagaaggagcgagggaggagcagcgagacagcaaga

SEQ ID NO: 95702 - RNA, 82 nt, Homo sapiens
gcccggccgcggccagcggagcccgggcggggcaggagccgaacaccccaccagaccacccagcaagcccacaaaaaaggca

SEQ ID NO: 95703 - RNA, 76 nt, Homo sapiens
aagagcgcacgggggaaacaagcgaaaaacaggcaagggggggcaagccgagcggcaacgaaacaggagccaccca

SEQ ID NO: 95704 - RNA, 61 nt, Homo sapiens
ggcagaaaaggacacccccggggaaagcccgcagaggccaagaggccaggagcgcccggag

SEQ ID NO: 95705 - RNA, 81 nt, Homo sapiens
ccggaggcgccagccaaccaaggccaacagcagggacggggaaagacggaacgagcgcagccgccggagcgcgcgcagagc

SEQ ID NO: 95706 - RNA, 98 nt, Homo sapiens
caaagcgaacgaagagcaccgggagcggcgaagaggcaccggaggaggagacaacgaaggcacagcaacagggggggacccaggcccacaggccccaa

SEQ ID NO: 95707 - RNA, 57 nt, Homo sapiens
ggcgacaagaggccgggcgccccgcaggacacaagcggcggagaaaccaccacaaac

SEQ ID NO: 95708 - RNA, 56 nt, Homo sapiens
gcggaccgagagcgcgaaacgcacgagaagggacccagaaagcagagaacgaccac

SEQ ID NO: 95709 - RNA, 69 nt, Homo sapiens
ggaccccaccaaaggcacacgccaggggcacagcggagagagcaggagagagagcggagacaaggccac

SEQ ID NO: 95710 - RNA, 57 nt, Homo sapiens
acaaacaagaaagggaaaaccgaaacagaccaaagggcggacggaagggcgagggga

SEQ ID NO: 95711 - RNA, 65 nt, Homo sapiens
gaaaaacaaggcaaacagacaacagaaaagaagaacacagagccagagaaaaaaaacacagaaag

SEQ ID NO: 95712 - RNA, 73 nt, Homo sapiens
aggggccgggccgaggagaaccccacgacggagagaagccacaaacaggccgcacagggagagagagacgaca

SEQ ID NO: 95713 - RNA, 42 nt, Homo sapiens
aaaccccacggcgcggccgcgggaaggcgccacaagcaaacc

SEQ ID NO: 95714 - RNA, 65 nt, Homo sapiens
cgagaggcacaggagaaagcaaccaaaacacagcccaacaggagcacagaccaacagaaaacaga

SEQ ID NO: 95715 - RNA, 71 nt, Homo sapiens
cagaggaagcggcgcgcagggccagaccccagcgccccccgcccacggacggaccagacgaccccagaccg

SEQ ID NO: 95716 - RNA, 76 nt, Homo sapiens
gcggggcacccgcaggggcagacagcacaaccagcgaacgggaggcggacgccacccaaccaaagcgacacacaca

SEQ ID NO: 95717 - RNA, 61 nt, Homo sapiens
aggggaacagacgcagggcagggccccgcccggcggggaaggcacacggaagcaggcgaac

SEQ ID NO: 95718 - RNA, 77 nt, Homo sapiens
agacggggcccgggaccacaggccccggcccagagcggggaccaagagaagagcagaggaccagcaccgccgagaca

SEQ ID NO: 95719 - RNA, 74 nt, Homo sapiens
gacgcagaagacggggacgcaccacgagaccaagccggaacagcacacacggggccgaggcccgcggcgcgcgg

SEQ ID NO: 95720 - RNA, 80 nt, Homo sapiens
cccagaaggacgccagcggagaacgcggcaaagcgaggacagcccagaaacgcaggaccggccgaaaaaacgacaagaag

SEQ ID NO: 95721 - RNA, 55 nt, Homo sapiens
gcgggccgccgagcggacccggaccggggcacgaaacacgggaaggagggaccgc

SEQ ID NO: 95722 - RNA, 78 nt, Homo sapiens
ggcagcgacaccaggcagacggcagcggcgccaggaggaccacacggccggggcacaggaggcagcacggcaggagac

SEQ ID NO: 95723 - RNA, 77 nt, Homo sapiens
cgaagggagacggaggaggaggacagcaccaccagcccgaagcgcggaacgaaaccgggggaacccggggagaagga

SEQ ID NO: 95724 - RNA, 77 nt, Homo sapiens
agcgcagccccggcgcccaccgcccaccgagccggaagaggaacagcaaccgggcgcgaaaaaaaaccggggaaaaa

SEQ ID NO: 95725 - RNA, 84 nt, Homo sapiens
ggaaggaaccgcccccaccgggaccgaccgcaaacaaggagagccacgagcagccgagggaacaagccagggaggaccaaccag

SEQ ID NO: 95726 - RNA, 103 nt, Homo sapiens
gaaagaacaaagaaaaaagcacagaaaggaagcagaagagagcgacagacaaggacaccaggcagaaagagcccacaagacaaaaaagcagacggaaacaggc

SEQ ID NO: 95727 - RNA, 78 nt, Homo sapiens
gaaaggcgagggaagcgccggcccagagcacaggaggagaggcagaccaagcagcagcacggccaaggggcgcaaaag

SEQ ID NO: 95728 - RNA, 86 nt, Homo sapiens
gaaaggggccgcgagcggagggggcggacgcagcgccccggaaaagaaacgaagccgggcacggacaggacagagaaagcaggcgc

SEQ ID NO: 95729 - RNA, 91 nt, Homo sapiens
agggaccagcaaggcggcagagcaaggggcacgcagaaggaccggccacgaccccaagaagaagcggaagaggagccgcggaaccaagaca

SEQ ID NO: 95730 - RNA, 51 nt, Homo sapiens
aagcggaaagcacgcgcacagagacggagcgcgccccaccgcggccgccgg

SEQ ID NO: 95731 - RNA, 84 nt, Homo sapiens
agaaacgagaacaacggaggcagaggagcgaagacccagagcaacgacacaaggaggcaagaagagaaccgacagcacaaggaa

SEQ ID NO: 95732 - RNA, 52 nt, Homo sapiens
ggggcagggagagaaggcggccacggagaacagaagagaggaaggcgaaaca

SEQ ID NO: 95733 - RNA, 80 nt, Homo sapiens
gggagcagccgaagagcaaagggcggggcacaaagcgaaggcacgaagcggccaccaccaaaggaggaccgcagaccgag

SEQ ID NO: 95734 - RNA, 75 nt, Homo sapiens
gcagaccgcagaaggccggagacaccagcagggcagagcggcgggaaaccaccaacaacacccccaaaccaaaac

SEQ ID NO: 95735 - RNA, 75 nt, Homo sapiens
cggcgcccggcaaggacaaggagagacgagcacggcagccaccgacagaaggaaggcaccggggccgggcagcag

SEQ ID NO: 95736 - RNA, 76 nt, Homo sapiens
ccggacgagaagcgcagcaacggcgggggaccacgagagcgggggaaccgaagagcaaggaaaagaaaagggggaa

SEQ ID NO: 95737 - RNA, 79 nt, Homo sapiens
ccgcgccgcgccgcgccgcaccccgagcgaccggggcgggaagaagcccgccgccaccaccccaccaccagcgcagcag

SEQ ID NO: 95738 - RNA, 75 nt, Homo sapiens
agaaaaaaaccagaaacaacccaaacccccaagaggaggaaaaccaggaaggacaggaccagaagagaaaaacag

SEQ ID NO: 95739 - RNA, 62 nt, Homo sapiens
gcggcgccgcggccgcgcggacggacgccgccgccggcgagggaaccaagaccaggacaaag

SEQ ID NO: 95740 - RNA, 60 nt, Homo sapiens
acaacagggcggcaacaggggcgagaaaggccccgccacagccccacccccgaaaagcgc

SEQ ID NO: 95741 - RNA, 65 nt, Homo sapiens
ggagaagacaggagagagcgccaaggaccggcaaggcacaaagggaagagcgggcggggcgcaca

SEQ ID NO: 95742 - RNA, 84 nt, Homo sapiens
cgggcgcgcggccgaagccagcccgggggcggcaggagagggacgcgcggcggcagcgagcgcagggccaacggccgccaccaa

SEQ ID NO: 95743 - RNA, 69 nt, Homo sapiens
cggaaaccggcagcaagagccagaagcaacaccaacgaacgaacaggcaggaaacaacggcagaccaca

SEQ ID NO: 95744 - RNA, 76 nt, Homo sapiens
gacgaggcgcgggaggagcggagggcgggcaggacaaagcaccacaccagcggccaggcaaagaagcacaagaaca

SEQ ID NO: 95745 - RNA, 66 nt, Homo sapiens
gagagccacgcgcaggaaaccaccccgagcggcgggcaaaaaggccgggggccaggaaacgaacac

SEQ ID NO: 95746 - RNA, 76 nt, Homo sapiens
gcagagaccccagacgccaccacaacccccagacgcaagccaaggccccgggggcgccgagggcacaagggcaacg

SEQ ID NO: 95747 - RNA, 80 nt, Homo sapiens
cacgcgcacgccgggggcgaggagacaaaaaagcccaaggccaggaagaagcaaaggaagacagaaaagacgccacccca

SEQ ID NO: 95748 - RNA, 82 nt, Homo sapiens
aaaaggagcagagaacagaggcccagccaagaacggcagccgacccccagggaagcagggggagaagagggagacccgaacg

SEQ ID NO: 95749 - RNA, 82 nt, Homo sapiens
ccgaagaagaccccccacacggggggagaagggaagcgccaagaagcaacaagcacaggaggagacagcacgcagccaccgc

SEQ ID NO: 95750 - RNA, 57 nt, Homo sapiens
cgagccgacccccgggaggaggcacccaaggccacaccgagaagaccggcccaagaa

SEQ ID NO: 95751 - RNA, 86 nt, Homo sapiens
gggcgagggcacggagaagcgccgggacgccgagaggcgccagcccggagcagggcaggacacagaagaacgcagcccggggagca

SEQ ID NO: 95752 - RNA, 66 nt, Homo sapiens
aagcagcaagggcaacaaagacgagcagcaacccggaccagcacagccgacaggaggccaaagcag

SEQ ID NO: 95753 - RNA, 78 nt, Homo sapiens
ggaggagccccggcggaagccacagcaggagaaggcagagaacccgcagcacgagccaccagcacagaagaagacaga

SEQ ID NO: 95754 - RNA, 55 nt, Homo sapiens
gcgcggaaggcagcgcccagcagcgcaggaaaagcccggaaaagcagccaagcgg

SEQ ID NO: 95755 - RNA, 71 nt, Homo sapiens
aaaccacagcccggcaaaccggagacacgaaacccacgccggcacaagaggcaaaaaaccaagaaagggca

SEQ ID NO: 95756 - RNA, 70 nt, Homo sapiens
gaagaggcaccagccgccgggaggcaccagcgccgcagaggcaaggccaggaacccccacgagcaaacca

SEQ ID NO: 95757 - RNA, 85 nt, Homo sapiens
acaacagcgaggaagaagaggacgacgacgacgaggaagaggaggcgaggaaaccaccccacccaacccccgacacagaagagga

SEQ ID NO: 95758 - RNA, 86 nt, Homo sapiens
ggacgccagcggacacgcgggcgagcacagggaccagaccagggaagacaacggaagcagcaggcacaaacaggcgggaggaagga

SEQ ID NO: 95759 - RNA, 72 nt, Homo sapiens
aagagaagagcaccaccaccgggacccaagaagcgagacagacaacgcaaaacagcgccggccgggggaagc

SEQ ID NO: 95760 - RNA, 77 nt, Homo sapiens
gggagcgggcggcagcggaccgggagaaccaggccgaagggggccggcgcaccaccaccgccggcgagcaccaggag

SEQ ID NO: 95761 - RNA, 79 nt, Homo sapiens
gggagcccacacacaggaccgccccggacaggaggagaaggccgccaagagcacagaccagcgcgcgaccggagcccca

SEQ ID NO: 95762 - RNA, 78 nt, Homo sapiens
cggacggaggacgagcccagaaccacgccacaaaccaccccccgacccgaagaacgggagaaaccaaggcagacagag

SEQ ID NO: 95763 - RNA, 75 nt, Homo sapiens
acgccgggggcgaggagacaaaaaagcccaagagcccaccagggcagcagaaaggggacacccggagcaaaaagg

SEQ ID NO: 95764 - RNA, 81 nt, Homo sapiens
cgaccagcaggaacgagccaggacaaaaccaggcagaaccaacacgaacccaagcacaaacaagaaaacgagcaggcacga

SEQ ID NO: 95765 - RNA, 76 nt, Homo sapiens
agagagcgagaaagccacaccaccaaaacgaaacaaaggaccaaccaaggcaagagacagcacgcacgccgagcca

SEQ ID NO: 95766 - RNA, 68 nt, Homo sapiens
gcgacaggggggccggccgcgcagccggaagaaggaccggggagacaggaacacgggcaagacagcgc

SEQ ID NO: 95767 - RNA, 72 nt, Homo sapiens
gaaacgcagcggcccaagcaaacagggacccagaaagcacaagcgacgaagaggagcacccagggccccgag

SEQ ID NO: 95768 - RNA, 72 nt, Homo sapiens
caacagaagaaaggcaggagcagccggagaaaacacggagaagagagggacagcggaggaacggaggccaga

SEQ ID NO: 95769 - RNA, 69 nt, Homo sapiens
cgaaaccaagaaccagcgcggaaaagaccaagagaggcccaacgaaggggaccaacagggcggaacagc

SEQ ID NO: 95770 - RNA, 72 nt, Homo sapiens
gccacacaagagaagacccaccgaggaggagggaaaggccaccgacagcgcacaaaacaagaaaacccaaaa

SEQ ID NO: 95771 - RNA, 76 nt, Homo sapiens
gacaggaggagaaaacagccaaacccgccaaaccccacgaggcaaacagaggagaccaaagcaccccacccagccg

SEQ ID NO: 95772 - RNA, 74 nt, Homo sapiens
ggaggaggaaggaaagcaggaaacggcggccagaaaccaacaaacagagagagccgcccggggagaggaaccaa

SEQ ID NO: 95773 - RNA, 76 nt, Homo sapiens
aggagaccgacaggcgggcaaggacgaacagggaggaaccagcccggaaggcacaggcaaagaggggaagaaagca

SEQ ID NO: 95774 - RNA, 91 nt, Homo sapiens
ccggcacagccggcggcgaaggcagcgccgacggcagccggcaccgacggcggaccgacccgagccggaagcggggagagggggagagaga

SEQ ID NO: 95775 - RNA, 82 nt, Homo sapiens
gcggcggcgggcgggagccccagaggaagcggggagagggggagagagaccccggaggacagggcgccacaggccgccaggc

SEQ ID NO: 95776 - RNA, 69 nt, Homo sapiens
ggccaggcgaagaccggaccgggggcaccggaccgagggacaaaggccagaagcaggagagcacagaca

SEQ ID NO: 95777 - RNA, 62 nt, Homo sapiens
agggcacgaaggcaggccgccaagaagggaaggagaggaggacaaggacaggacgaacccac

SEQ ID NO: 95778 - RNA, 63 nt, Homo sapiens
aacaccaccccccaccaggcaccagggccaacgagaggcaaggcagagcgaccgaagagagag

SEQ ID NO: 95779 - RNA, 83 nt, Homo sapiens
caacgagagaaaacggggaaagacacccagaacacagcaagccgaagaaggcaaaacccacagaccggaaagcaggagacagg

SEQ ID NO: 95780 - RNA, 69 nt, Homo sapiens
ggagaagacaccaaaaagcaaacggaccagaccgaccaccaaaaaggccgggggggcaaagcgggaaga

SEQ ID NO: 95781 - RNA, 76 nt, Homo sapiens
cgcaacagcaacaaggggaagccccagcagaccccagcccgagaggggagagaaacacgagaaagcggggaaaaag

SEQ ID NO: 95782 - RNA, 60 nt, Homo sapiens
gggacaaagcaggagagacccgccagaggcggggcaccaggcccagacggcgaacccgag

SEQ ID NO: 95783 - RNA, 78 nt, Homo sapiens
caacagccaacccagagggagcaagagcagagcgacggacccacgcacgagcccgcgggaccggacgagccccccagg

SEQ ID NO: 95784 - RNA, 71 nt, Homo sapiens
gggagcccgcggacgcagccaagccagggcgagggcacgccagaccacccacagaagcgacccggcaaggc

SEQ ID NO: 95785 - RNA, 66 nt, Homo sapiens
cggaagaacgacaccgcaccggagccgggagacccccaaaaagaaaaggaagcacggagaaaagga

SEQ ID NO: 95786 - RNA, 82 nt, Homo sapiens
gcagcggcacccgggacaaggcagacgggagcgcaaggcgccccaaggccagacaaaaccgcgcggcaggcagagacggagg

SEQ ID NO: 95787 - RNA, 72 nt, Homo sapiens
gggagaccagccacagaccaccgggagagcgcgggacccgacagcaagacggacggccggcccgggcagacc

SEQ ID NO: 95788 - RNA, 41 nt, Homo sapiens
accagcagcgcagaccgcacaagagaaacagaagcggagag

SEQ ID NO: 95789 - RNA, 51 nt, Homo sapiens
aaggcagcaggaggagccccggacacaagagggcaagaaaggcgcgacggg

SEQ ID NO: 95790 - RNA, 62 nt, Homo sapiens
cgaagagcagggaaacaccacgaagcagccaagggaaagggagcagcaccggccacacccac

SEQ ID NO: 95791 - RNA, 33 nt, Homo sapiens
cgcaaagcaggcgccaagggggagagagacgcg

SEQ ID NO: 95792 - RNA, 66 nt, Homo sapiens
gggagcccgcgcccgccgcgggagagaggacccccccccccccccaaggccgccaaaagcagcgcc

SEQ ID NO: 95793 - RNA, 76 nt, Homo sapiens
agcggcaacggcgaccgcccgccaaggggccgggagcgaccaacacaagggggccgcaagagggcaggcgggagaa

SEQ ID NO: 95794 - RNA, 71 nt, Homo sapiens
agaacaacacgcccaggccggcaccccgggcgcagaagcgggacacaagagaacggaacgggagcggccgc

SEQ ID NO: 95795 - RNA, 72 nt, Homo sapiens
ccaccgccggcgcgggaaacgggcgaagcgacgagccgcgaggaggagcggcgacaagccacacaccaaacc

SEQ ID NO: 95796 - RNA, 90 nt, Homo sapiens
ggaggagcccccgagaggaggcagacccccacaagacgacacccgacggcgaagcgcgaaagaggcagaagaagggggagagccaaagaa

SEQ ID NO: 95797 - RNA, 84 nt, Homo sapiens
cccacaaagcagaagaagaggaaagacagaaccagccaacaaaagcgccggggcaggaaggacggggacccggcccgagcaccg

SEQ ID NO: 95798 - RNA, 112 nt, Homo sapiens
acagcgcgcggcgcggccccgacccccgcccggcgccggcccgggccgccagggcagagcccagaccccacagccagccgagggcgagaagcacagaaacccgcagacaccc

SEQ ID NO: 95799 - RNA, 61 nt, Homo sapiens
cccaagagcgggacacaggagccgggggggcgagcccgccgagagcgccaaggaggagaca

SEQ ID NO: 95800 - RNA, 79 nt, Homo sapiens
cgcacgccacagcgaaggcgcgagggacaagagcagaagaggaaccagcaggcaaagaaagcaaaagaagagcgaccga

SEQ ID NO: 95801 - RNA, 103 nt, Homo sapiens
gagaaacgagagcacgcggagaaagcaaaaccgaagaaagcaggccaggaaccagaagaggccacccacacagaaccaaggagagacaaacaaggggcaaaaa

SEQ ID NO: 95802 - RNA, 56 nt, Homo sapiens
ggagcaccgcggcgcaaaagaacaccagaagcagccgaaacgaaccaagaaccgaa

SEQ ID NO: 95803 - RNA, 54 nt, Homo sapiens
ccggcggccgggacccacagcccaaccaggagacagaccacgccagcacgaaag

SEQ ID NO: 95804 - RNA, 71 nt, Homo sapiens
acggggcgcaggagcacagcagcccgaggcagggggacagcgccgcgcgcggaagcggcggggacgaggaa

SEQ ID NO: 95805 - RNA, 78 nt, Homo sapiens
ccgccgagagccggcgcagcagcaagcccacggaggacccccgcccgaaccgagggaacagccccggagcaagaagcc

SEQ ID NO: 95806 - RNA, 69 nt, Homo sapiens
gcaccccgaagaggcgaggagcaacccaaaaagaaagcgccgagagaggaagagaccaaagagaaaagg

SEQ ID NO: 95807 - RNA, 68 nt, Homo sapiens
caaggacagaggaccaaagcggaccagagacagcccggacgggcacgacagagagacccgaccacccg

SEQ ID NO: 95808 - RNA, 45 nt, Homo sapiens
ccggccgccccgcgagaaggaaggaggagacgcgaaggaaagacc

SEQ ID NO: 95809 - RNA, 71 nt, Homo sapiens
ggcccacaaccaagccacaaaagacacgccacaaccggaaagagaaaggagaccacaagaccccgcgccac

SEQ ID NO: 95810 - RNA, 80 nt, Homo sapiens
ccagccgcccgcggccgggagcggagccccggggccagcaacagaagaaagcaagcaccggggaaagcggcccgaaacaa

SEQ ID NO: 95811 - RNA, 82 nt, Homo sapiens
agccaagccaccgagacccggaggaggcgaagcgagaggacaggggcaaagagaaccaggagaccccaccaccacagaaaaa

SEQ ID NO: 95812 - RNA, 75 nt, Homo sapiens
gggaagggccgaaccggccagagggcaagcaaagaccaagagaagagcaaagaaagcagcggcggcgaaagaaga

SEQ ID NO: 95813 - RNA, 82 nt, Homo sapiens
ccaccccagacagagagggcaaggaggcagggccccccaccagccgaaaggcccagcgcaggagaggacgggacgcacgcac

SEQ ID NO: 95814 - RNA, 71 nt, Homo sapiens
cgaaaccgagcaggcagagagcagaagaacacagacagcggaagagaacccgggccgagaccaaccgacag

SEQ ID NO: 95815 - RNA, 68 nt, Homo sapiens
ggaagacccggaaacaggggccacggagccacggccacggccgcaagagacacgaacagcgaccccga

SEQ ID NO: 95816 - RNA, 71 nt, Homo sapiens
ggaaaaggacacgaaacgacccgaccgccagccccagccacaaaggggaaggcccacgggacgggagaccc

SEQ ID NO: 95817 - RNA, 77 nt, Homo sapiens
gaccaccaggaacagaggggcacaaaggaagacccgcaaaaaaggcagcgaagaagacggcaagcacaggccagggc

SEQ ID NO: 95818 - RNA, 87 nt, Homo sapiens
gggagcacgcaccaggggcgcaccgggaggcccggccgccgccgcgaggcgcgcgagcagcccgggaacacagagcaccaagacagc

SEQ ID NO: 95819 - RNA, 85 nt, Homo sapiens
gcgggggggccaccgggcagcgggggagcggcgcagcggcggcagcggagagcgagagaggggagcaggacaaaaaggccgggaa

SEQ ID NO: 95820 - RNA, 57 nt, Homo sapiens
aaaaacaccaccacaacaaaagcccagcaacgggagcagaaggaaaaaaaagcagaa

SEQ ID NO: 95821 - RNA, 118 nt, Homo sapiens
cgggccgcaaggacaagcgaagaagggcgagcgggcaggacacggaggaccggagcggccgccgagaccagccagcagcaaagcagacccagccacgggcccggacgcacacaaccca

SEQ ID NO: 95822 - RNA, 58 nt, Homo sapiens
gcgaaggagaacggagaggaagaacgagccgcacagggcggagaacggaaaagcacca

SEQ ID NO: 95823 - RNA, 48 nt, Homo sapiens
cggaaggaagccagaagaagggggagagcccaacaagcgagaaacgaa

SEQ ID NO: 95824 - RNA, 74 nt, Homo sapiens
agcccgaggaagagcagaagacgaaaggcccagaacacagcaggcaccgcaagaacagggcaggccacaacgcc

SEQ ID NO: 95825 - RNA, 76 nt, Homo sapiens
gagagccgccgccaacgcgcagggcagcggcccccgcccgcagggagcgcccgcaaagaacagccggaaaaaacgg

SEQ ID NO: 95826 - RNA, 80 nt, Homo sapiens
cgacccgacaagcacacagccacggagaggcaagaccaccgggggcggggagcagggaagagcaccacgcaagcagagaa

SEQ ID NO: 95827 - RNA, 66 nt, Homo sapiens
aaaaacaggcccggcgagccccgcagggaccaagaaaggcccagggaccaaagcccggacaaggcc

SEQ ID NO: 95828 - RNA, 74 nt, Homo sapiens
ggaccgcaggacgggagaccaagggaggacggcggaacacggaggcgggaaaggcaacgaaaggcgggaggggg

SEQ ID NO: 95829 - RNA, 109 nt, Homo sapiens
cacaggaggaggggagaaaccccacccacacaggaccaaagggagacacacacggggaggggcaacagaaaaggggaccgcaacagaagcaggaaacggagaagaaaca

SEQ ID NO: 95830 - RNA, 77 nt, Homo sapiens
gccccgacagaccaccccgccaacgcggcaccgcagaacgccacaaccagcgaagcgcgccgaacgggagcccggcg

SEQ ID NO: 95831 - RNA, 35 nt, Homo sapiens
agggcggcggaccggcacaaaaagggcaagaaaga

SEQ ID NO: 95832 - RNA, 68 nt, Homo sapiens
ccacgcaccaaaaacaggcagaacaaccgcacccccaggacagaagcagagcggaccaacagcgcacc

SEQ ID NO: 95833 - RNA, 59 nt, Homo sapiens
ggacagagcccgggcgcgcagacccaacagaggaagccgcaagaaacgggacgacagga

SEQ ID NO: 95834 - RNA, 76 nt, Homo sapiens
cccacccaggcaaggacccgcccagcccccgagcagcgggaacagggccgcaccacacccgccagccagcaggcaa

SEQ ID NO: 95835 - RNA, 98 nt, Homo sapiens
ggggaaccggccccacccgggaggggggagcggcgggaggccaccgccaggaaggaagaaggaaaagcggaagcgcagacaagaaaagagagaagcca

SEQ ID NO: 95836 - RNA, 74 nt, Homo sapiens
accaacccacccggcgccgcggcccaaaaggcaggccaccggacgcagagcgcaccagcaacgaagccaacagc

SEQ ID NO: 95837 - RNA, 73 nt, Homo sapiens
aaaaaaccgagaacccgaccccgcggagacagcgagacccgccaggagcaaaggaggcgaaaacagggccaca

SEQ ID NO: 95838 - RNA, 77 nt, Homo sapiens
caaaagcccagcagcgcccgcagacccaggacgcccaggaacacaggccaagaaggacggaacggagaaaccggcag

SEQ ID NO: 95839 - RNA, 87 nt, Homo sapiens
cgcgggacggggcgccgcccggggcgaggcagggccagcagcaggcgggagagaggaggcagagagccccgcgacgagagagacaga

SEQ ID NO: 95840 - RNA, 80 nt, Homo sapiens
ggcccaacggcgggccccggcgaggcagcgcggccgcagcagcccgccccgagccccggccccaaagacccaaaacagag

SEQ ID NO: 95841 - RNA, 94 nt, Homo sapiens
gcggggcggagcaacagcggcggggcggcagcaccacgcgcgagagcagaaaacaggccgacaagaagcccggcacggcggacccagagagaaa

SEQ ID NO: 95842 - RNA, 59 nt, Homo sapiens
acccaccaacaacaccacaaaaccacagccaaggaacgaagcagagcccaacaggggag

SEQ ID NO: 95843 - RNA, 76 nt, Homo sapiens
gaggaggccaaagaagaaagagcggccgaacgaagggcaacacacccaagcaggccccggcaagcacggcaccgac

SEQ ID NO: 95844 - RNA, 80 nt, Homo sapiens
cgccgagccgccaccgcaggcgaggacggcggaccccgcggcgggaggagccgccccgagacccaaaggagccccgcggg

SEQ ID NO: 95845 - RNA, 61 nt, Homo sapiens
gaacaaagaaaaccaaaacgcaacagaaacaacagggaagagacagcaggaaaacggagaa

SEQ ID NO: 95846 - RNA, 62 nt, Homo sapiens
cgggagccagaagcacaggcccgggcgaaggggccacgcgagcagcgaggcgccaagaaaac

SEQ ID NO: 95847 - RNA, 70 nt, Homo sapiens
aacagggagcgacgacagaacagccgcacagacgacacgaacagcacgaaagccaggacccgaaaagcca

SEQ ID NO: 95848 - RNA, 74 nt, Homo sapiens
gccggcgcacgcgggggggggccgaccggagcgggccaggccgggaggagggaagcggacacacaggacgagaa

SEQ ID NO: 95849 - RNA, 60 nt, Homo sapiens
gaagacgcaccgcggaaacgacaccagaccaggcaacacggacaggcgcaaaaaccagac

SEQ ID NO: 95850 - RNA, 70 nt, Homo sapiens
gccccaggaggggacaaaaccccgaaaaaggcgacggcacagaaaagaacacacgaaagagaggggacaa

SEQ ID NO: 95851 - RNA, 105 nt, Homo sapiens
gaaaacgacccaaaacagccaccaacgacgacccagaaagagcaaccggagcagcagccaaagcgaggccaggaacgacacaaggggaagcgaaaccggagaagg

SEQ ID NO: 95852 - RNA, 84 nt, Homo sapiens
ggaccgagaccggaccgagagcggaccgagagcgcgaaacgcacgagaaggggaaaaagaaaagggcgaagacccgaagcagcg

SEQ ID NO: 95853 - RNA, 67 nt, Homo sapiens
aaggaccgacgcccggagagggccgaggcagacaagggaaaggccgcgcaggggaccaccccagacg

SEQ ID NO: 95854 - RNA, 80 nt, Homo sapiens
cagccagcagcaagcagcacacaagccagccggacagcaacaggaaacgagaagaacgaaagagaaacccaaaaaaagga

SEQ ID NO: 95855 - RNA, 111 nt, Homo sapiens
cccagagacgcgagcccgccgccgccgccaccacccacccggacacagaaggccgggacagcagaaaacagccagcagaaaaagccaaaaagcaagcggacaaaagaagaa

SEQ ID NO: 95856 - RNA, 66 nt, Homo sapiens
agaccaggaaggagccggggcggaacaggcacaaggacgaacgagaccagagggagagggcaacaa

SEQ ID NO: 95857 - RNA, 58 nt, Homo sapiens
cggcgagcagccaggccaggagagaagaagaaccccaccgagggccaaacagcagagg

SEQ ID NO: 95858 - RNA, 77 nt, Homo sapiens
ggaaaacccacggggaagaccacaccccgagaccgagaaagaccggaaaccaacaaacaagaggagcgcaccgaaag

SEQ ID NO: 95859 - RNA, 75 nt, Homo sapiens
caaccgaccgggcacgaggagaaggggggagaaaaggccaagggcaggagacacgagacgcaggaagcagcgaaa

SEQ ID NO: 95860 - RNA, 74 nt, Homo sapiens
cggagagcggaccaacgaggaacaggggaagacgggagcgccccagccaggggggaagaagagcgacaagaaga

SEQ ID NO: 95861 - RNA, 74 nt, Homo sapiens
gagccgacagaagagccccacgcaagccccggggcagagacacaggacacccacccgccggggacagacgcgga

SEQ ID NO: 95862 - RNA, 57 nt, Homo sapiens
caacaagaggccggcggggcgacagcccgagacacgagccccaaggggaagcacccg

SEQ ID NO: 95863 - RNA, 70 nt, Homo sapiens
ggacaaaagagaagaaccaaaacggccccgccgccccaggcaaaccaaaggaagaagaaaggcaacagga

SEQ ID NO: 95864 - RNA, 42 nt, Homo sapiens
ggacccaccgcacacacaaggagcacaggcggaggcagcgga

SEQ ID NO: 95865 - RNA, 75 nt, Homo sapiens
gagggacgagaccgaccgcagacaacacacaagggccaaggaaagaagaccgccaaagagaaaaaacgcgcagag

SEQ ID NO: 95866 - RNA, 77 nt, Homo sapiens
ccaagagagccaggagcgcacacacgacaggagaaaggaggacccacacaggagcaaggaaacgaccaacaccaacc

SEQ ID NO: 95867 - RNA, 71 nt, Homo sapiens
agagcgaccagcagacaccagccaaaagaagcaagggaaagaccaggagccagaaaccaaccaaagaggga

SEQ ID NO: 95868 - RNA, 73 nt, Homo sapiens
agcgaagaagacggcagcagggaccgggcggagcccggaagaagaaacagacgcacgccgaaaaaaaacgaac

SEQ ID NO: 95869 - RNA, 84 nt, Homo sapiens
cgggaaggagcgggcggcgagccaacgggggcagacggccccgggacccggcggcacacagaaccaagcgggaaccgacaaggg

SEQ ID NO: 95870 - RNA, 62 nt, Homo sapiens
gaacacgcaccgggacaggcccagcaaggggaagaggacccacacgccaagcggacgagcca

SEQ ID NO: 95871 - RNA, 88 nt, Homo sapiens
gaccagaccgagccagagggagcgaacgcaggagaccgaaggagcagacgaggcacgagcgccagcgcgagacagacggggcgcagaa

SEQ ID NO: 95872 - RNA, 79 nt, Homo sapiens
gaaggaaaagcgagcgagcccaggccgcgcgccaaaacgaggcaaggcagaacgcaaggagggacaggacggaaggagc

SEQ ID NO: 95873 - RNA, 58 nt, Homo sapiens
ccccgcgccaggaggaccgcaggaggacgcagacggagaaaaacaaaggggagagcaa

SEQ ID NO: 95874 - RNA, 65 nt, Homo sapiens
gccgagaaggaccagaacaggccgccaaaggaggcacacgggcacaagacaagaacacaagggga

SEQ ID NO: 95875 - RNA, 78 nt, Homo sapiens
cgcggcggagacgcacaggcccggccggggggggcacagagccccggaagacagcccccagcgaccagacccagggcc

SEQ ID NO: 95876 - RNA, 66 nt, Homo sapiens
caaggaacaaaccgaagaacagcgggaaagaaggcaaaacacgggaaacagaaccgaagccggacc

SEQ ID NO: 95877 - RNA, 80 nt, Homo sapiens
cacgaaaaggaacagacgagccggggaacaagaaggggcccaggccggggacgaacccaggaagaaacagcgagaagaac

SEQ ID NO: 95878 - RNA, 65 nt, Homo sapiens
cggcgccggccgagaaggcagaggcggaaagccgcagcggggagaagcccacgcgaaaacaacaa

SEQ ID NO: 95879 - RNA, 79 nt, Homo sapiens
ccgaaccgagccggggcgccgggagcagggaccgcggaccggccacagcagagagagaaaccaaccaggagaaaagaaa

SEQ ID NO: 95880 - RNA, 75 nt, Homo sapiens
cggcgggggacgagcaggggggacccgcgaaggccacagcgcaccagggcgccggcggcccaccgggggccggaa

SEQ ID NO: 95881 - RNA, 62 nt, Homo sapiens
aagggacacgcaaagaaaggacaggaggaaaacaaggccggggcggaccgccgacgcacgga

SEQ ID NO: 95882 - RNA, 84 nt, Homo sapiens
cggagacgaggagcagaggccggggggaccgacaccagagaggcaaaaccgcccaccaccgagcgcccccaccggccacgacaa

SEQ ID NO: 95883 - RNA, 52 nt, Homo sapiens
aagagggccccgcccagagaggcagcacaccgcgcccacaggacgaaaccgg

SEQ ID NO: 95884 - RNA, 80 nt, Homo sapiens
cccgcccggacagagcccgggcgcgcaggcagcaagacaagaaacgccccgaaaagaggcagccgccagaaccacccccc

SEQ ID NO: 95885 - RNA, 73 nt, Homo sapiens
cagaaggaggaagaagaagcacagaaaaccgcagaacggaaacaaaacagcccaccgcgcagcaaagaagagc

SEQ ID NO: 95886 - RNA, 88 nt, Homo sapiens
cgccgggcccacgcgcggcgcgcgcccgaaaaagcccaagacagcagaagcagacaccccaggaacagcaaagaaaagcaaagaagac

SEQ ID NO: 95887 - RNA, 54 nt, Homo sapiens
caagcccccaacaagcaaaggaacggcagcaggagaaacgagaagaaacagacg

SEQ ID NO: 95888 - RNA, 75 nt, Homo sapiens
cgaagaagcggaacgaaccagacagccgcaaacaaaagacggagacccaagcacaacaaaagcaaaaagaccaag

SEQ ID NO: 95889 - RNA, 73 nt, Homo sapiens
agaccccaccgccggcgcgggaaacgggcgaagcgacgagccgcgaggaggaaagaccacagcaagaccacgc

SEQ ID NO: 95890 - RNA, 70 nt, Homo sapiens
ccgcgcccggccggacccgggcccgaggaaggaagcagccaccccgccaggccccccgcccgccgccccc

SEQ ID NO: 95891 - RNA, 78 nt, Homo sapiens
caggagggaagggccagaacgagaaagagggaacaggcacgccccacccgccagccgagcccccgacgcagcacaaag

SEQ ID NO: 95892 - RNA, 83 nt, Homo sapiens
ccacgagccaaacaaccagcccaaccacacgcaacaaccagcagcacagagcgaagaggaggcaaagaagaagagacgggaga

SEQ ID NO: 95893 - RNA, 101 nt, Homo sapiens
aaccaccaacacaagaagaggcagaacccgagagacgcagcagcacaagcgaagagacaagcagaccggaagaccgacggaagaccacaccccgagggagc

SEQ ID NO: 95894 - RNA, 72 nt, Homo sapiens
agaaagagcccgaggaagggcggaccaaccacggcaaaccaacaaggggccacaccaggagggaaaaagcac

SEQ ID NO: 95895 - RNA, 65 nt, Homo sapiens
aggcgcacaaaaagaccagaaaagggaccaaccggccacccaggaaaggccgcgaccgagagagg

SEQ ID NO: 95896 - RNA, 82 nt, Homo sapiens
agcccagggaagcagccgaccagccgcggagccgggggcaggaggggcggaagagcaaaaagccggacaaggaaaagccgac

SEQ ID NO: 95897 - RNA, 74 nt, Homo sapiens
gccacggccgaacccggcacaagcagcgggaaggcacgcaaagaggaccaggaaacccgggacagcgaacggcc

SEQ ID NO: 95898 - RNA, 100 nt, Homo sapiens
gggaccagacgaaagcaaccagcaagagcgagaagcacgagaaaaaccccaaacgcagagaaggaggcgcaacagggcaaggcaaacagaaggaccacac

SEQ ID NO: 95899 - RNA, 63 nt, Homo sapiens
ccgaccggcgaggcggcgcggcagcggagggacggcagccgcgcggaagcccggggcggcgac

SEQ ID NO: 95900 - RNA, 74 nt, Homo sapiens
cccagccgaccgagcccaggagcgccacgcgcggaaggcagcgcccagcagcgcagcagccgcgacgcagaaga

SEQ ID NO: 95901 - RNA, 80 nt, Homo sapiens
accccggaagcgagcgcggacgccacccgggggcacagcaagggagccccaagggggggcaggcagcagagaggccccca

SEQ ID NO: 95902 - RNA, 56 nt, Homo sapiens
gggaaacagaagagagaaaagaaaaaacgcagacagcccaggcacgagaacagggc

SEQ ID NO: 95903 - RNA, 56 nt, Homo sapiens
gccagcaagccggccaaacaacaagcagggggggccgcccgcccaaggcaggaaga

SEQ ID NO: 95904 - RNA, 43 nt, Homo sapiens
acccaaggccgcagacaagagagccagcgcccccgggaacaac

SEQ ID NO: 95905 - RNA, 59 nt, Homo sapiens
caggccgccaaaagaaaagaggacagacacggacccagcaccagagccgccggcccagg

SEQ ID NO: 95906 - RNA, 57 nt, Homo sapiens
agggcaaggacaccccgccaggcaaaagccgggccccaggcagcagccagcagcggg

SEQ ID NO: 95907 - RNA, 59 nt, Homo sapiens
cggaggagaggacgaggggacccaagcaggcaggagaagggcaccggggaggaccgcgc

SEQ ID NO: 95908 - RNA, 77 nt, Homo sapiens
caagcgaaaaaccgaccaggagaagagaaacccacccgggagcggaagggcggagaacggaaaagcaccaggaagca

SEQ ID NO: 95909 - RNA, 81 nt, Homo sapiens
gaggggcagccacccccggcggccacacacccggagcaccgcacacagcggcaagccaccggaccagccccacccagaccc

SEQ ID NO: 95910 - RNA, 65 nt, Homo sapiens
gccgcccccgccagcgccggcccccgcccgcgcgacggcgcccagggcacaagcccacccacagc

SEQ ID NO: 95911 - RNA, 82 nt, Homo sapiens
gacagaacaccagcacggcgaaggaaccccaagagcaaggcccgaaaggcaacaccccggcggagcccagaaggcgcgagaa

SEQ ID NO: 95912 - RNA, 77 nt, Homo sapiens
ccaggacgaccgcgccgcccagcacgccagagccagcgggccggcaccggcacgaggagcgcacacccgcccagcca

SEQ ID NO: 95913 - RNA, 73 nt, Homo sapiens
cagccgagagacaagacggaaaccagaaccgggcaaggaaaggagccaagaaaagaaccaaaccgcacaaccg

SEQ ID NO: 95914 - RNA, 77 nt, Homo sapiens
cggagcagacccggcggaagaagccaggcgcgcaccccaccacccggacacaccccagaggcgacacccggcggggc

SEQ ID NO: 95915 - RNA, 64 nt, Homo sapiens
ccaccgccacaaacgcaggccacaaaggaccccgagacagacaagcacacagaggaccagagcc

SEQ ID NO: 95916 - RNA, 83 nt, Homo sapiens
gcggcggccgccaccaggcacccggaagagcgcggccgaaggagcacagcaagcgggagcaggcagaccaaaggaacagaagc

SEQ ID NO: 95917 - RNA, 73 nt, Homo sapiens
cacagaaaggacacaaagcccgagaagaccgcacaaccgaggcggccaaagaacacaggaaggaggcgccgac

SEQ ID NO: 95918 - RNA, 67 nt, Homo sapiens
accagccccgcgaaccgaggcgaggccaggaccccacaccaagcacgcccggagagcgccgcgacgg

SEQ ID NO: 95919 - RNA, 36 nt, Homo sapiens
cacagcgaggagacagaggaacagaggagaaagaag

SEQ ID NO: 95920 - RNA, 70 nt, Homo sapiens
ccacccgcggccccccgcggccgcagcgccccgggagagcgaaagcaggcaaacacaagccgggcaagca

SEQ ID NO: 95921 - RNA, 69 nt, Homo sapiens
gcccaaggagaagcaaggaaagccagggcaacacacaaggcgaacaagggacccccagaaacggccaag

SEQ ID NO: 95922 - RNA, 94 nt, Homo sapiens
aaagccccagaccagagacagaagcagaggacgccaggaggcacaccagaggcagaaccacaacccacccaaggagaaggagacaaaccaagag

SEQ ID NO: 95923 - RNA, 72 nt, Homo sapiens
cacgcaacaggggcaaacgcccagcgcagaaaggccagacagggaccgaacgacacaacacaccaaaaagag

SEQ ID NO: 95924 - RNA, 81 nt, Homo sapiens
gcggaggccagcggggccggaagcggcggcgcagaaggaaaaccgcaccgaagcagccaaggccaagaagagcaagcggcg

SEQ ID NO: 95925 - RNA, 38 nt, Homo sapiens
ccggccaggaccggaaccaaaggcagacccagaagagc

SEQ ID NO: 95926 - RNA, 77 nt, Homo sapiens
caccaaaacaagacacgaccgggcgggggccccgcgccgagggacgccaccgcacacggccccgagccccggcccca

SEQ ID NO: 95927 - RNA, 55 nt, Homo sapiens
cggaagccagagaccaacgagaccgcacagccgcaagcccgcccccgagcaacca

SEQ ID NO: 95928 - RNA, 81 nt, Homo sapiens
caaaaccacccgcggagaacaaccgaacggaaagcggcagcgcagcaagcagcggaccaggagaggagaaagaaacagcgc

SEQ ID NO: 95929 - RNA, 68 nt, Homo sapiens
accacacacagcaggacggaaacgacacaggaccagacagcaggggacggaaacccaccggcggagac

SEQ ID NO: 95930 - RNA, 95 nt, Homo sapiens
ggcggccagaagaaaacgaggggcggaacacccgccaaagcagagaaaagggaccaaaacaaaacgagagcaagaggaaagaaaaagaacagacg

SEQ ID NO: 95931 - RNA, 44 nt, Homo sapiens
cggggggaccggcgggcgggcagcagcccagacgcggcacagag

SEQ ID NO: 95932 - RNA, 69 nt, Homo sapiens
cacggcgggcgaaacaggggcacaagaaggccaaccccaaaagagagaacacaggcaagacgaaaaccg

SEQ ID NO: 95933 - RNA, 68 nt, Homo sapiens
gagccaaagcacaagaagaagacgaggcaaaagacaccgagacaggaaggagaagagagaaggaacca

SEQ ID NO: 95934 - RNA, 74 nt, Homo sapiens
gagcgagaaaaagccccagcaagcacacaaagaaaagggcgagaaagcagaaccaaagagaacgaaccgggcag

SEQ ID NO: 95935 - RNA, 77 nt, Homo sapiens
agaagaaagcgggcacggcgcaggaagacacaaggacacggcacaaacgaggaacgccaagcggagcgacagggcac

SEQ ID NO: 95936 - RNA, 78 nt, Homo sapiens
acccagagcacgcccccagggagaagaaaaagcgagaacgcagccaagaaggacaagaaggggagaagaaaagaaacg

SEQ ID NO: 95937 - RNA, 75 nt, Homo sapiens
acgggaaggaagggacaagacccacagcaaagccagcgacagaagccaggaagaccgcaggaaagcaggaaggca

SEQ ID NO: 95938 - RNA, 60 nt, Homo sapiens
gaagcgcaggaaccgccgaccaggcgcgacacgccgaccgccgcgccagcacacccccgg

SEQ ID NO: 95939 - RNA, 58 nt, Homo sapiens
agaggagccagagccccacgggaaggagagcagccagcagaacagccagcaaagacaa

SEQ ID NO: 95940 - RNA, 76 nt, Homo sapiens
acccaccggccaccggcggagcgaggggagagaccccgagaagcaggcaaggagaagccgaaaaaggggcggcagc

SEQ ID NO: 95941 - RNA, 61 nt, Homo sapiens
cccaagaggcgagccagcagaagaaaaggaaaccacacagcggccgaccccggagaccacc

SEQ ID NO: 95942 - RNA, 79 nt, Homo sapiens
gggccacagcagccggcggcggcagaggggacaggcccaaggcaagccacccccccggaagagaggagcccggagagca

SEQ ID NO: 95943 - RNA, 76 nt, Homo sapiens
ggacgacagccagggaggaagggagaagcgagccacacaggcggaagacacaccgaagaaccgagaagccaagaag

SEQ ID NO: 95944 - RNA, 44 nt, Homo sapiens
caccccacccccagcccaacaacagcgcgccccagaccaccggc

SEQ ID NO: 95945 - RNA, 71 nt, Homo sapiens
gggaagggacgcaacgggacccaccccaaaccacccccaagcccccagaagggcaaggaaagcaggacccc

SEQ ID NO: 95946 - RNA, 68 nt, Homo sapiens
gggaaagggaagcaagagccagacccaaagccagaagcaccgacagaccaggcccaagcgaaaaagcg

SEQ ID NO: 95947 - RNA, 77 nt, Homo sapiens
cagaccgagagggggccagcccagacggggcccacggcacagcagcagcggcgaaccgacaaagacacccgaaaagc

SEQ ID NO: 95948 - RNA, 80 nt, Homo sapiens
cggagccccgcgcgcacccagccgccccagcggcgcggcgccgcccacgaaaaacaaggacgcggggccacacccacacg

SEQ ID NO: 95949 - RNA, 69 nt, Homo sapiens
gaccagcagagggccgacggaaaaagaagagcacaagaccagcagacgaccacagcaaccccaaacccc

SEQ ID NO: 95950 - RNA, 91 nt, Homo sapiens
gacggagcggccggggccggggcgccgccgggcggccgggcgcggcgagcccaggaggcccaaggaacagcacagcagcgacacacggacc

SEQ ID NO: 95951 - RNA, 73 nt, Homo sapiens
gcccgcaggacgggcccagcgcgcccgcacaccagggaggcacgccacccagggccagacacgcagggccacc

SEQ ID NO: 95952 - RNA, 80 nt, Homo sapiens
gcccgagagggagcccgcggacgcagccaaggggccaaggcgacagcaaaacggagaaagaggagagggcaggggccgcc

SEQ ID NO: 95953 - RNA, 70 nt, Homo sapiens
gaccgagcccaggagcgccacgcgcggaaggcagcgcccagcagcgcaggacaaaaccacaaggcaagaa

SEQ ID NO: 95954 - RNA, 76 nt, Homo sapiens
cggcgaccgaggggagagggaacgcagcgaaagcggaacggagagcccagagacaagcaaagaggcaggacagaac

SEQ ID NO: 95955 - RNA, 68 nt, Homo sapiens
acaaccgcgcgggacccaaacggaaggaacggaggcgcggaacacagacgcgccaggcaggagaccca

SEQ ID NO: 95956 - RNA, 72 nt, Homo sapiens
cgcgccggagcagcccgccacgccggggccaggcaccggcacggaccaccccaacaccgggggagaaccggg

SEQ ID NO: 95957 - RNA, 73 nt, Homo sapiens
acaacaaaaacaacgcaggacagcaaaggaccggcaccacgggggccggagcgccgaaaccaagggagccgcc

SEQ ID NO: 95958 - RNA, 97 nt, Homo sapiens
ggcgcccacggcccccagaacccagagacgggcaggagccgggaaagcagcaaagggggggggcggccaggccgcaggccaggggaacccaccagac

SEQ ID NO: 95959 - RNA, 81 nt, Homo sapiens
aagcaccagcacagaagggaagaacgccaaaggagaccaagaaaacgaaggaaggaggacccgaggagagagaagacggaa

SEQ ID NO: 95960 - RNA, 77 nt, Homo sapiens
cagcccaggcggcgcggacggggcgggcgggcccgcgcagcgccccagccaaggcacacaagcgggccccgcgcgcc

SEQ ID NO: 95961 - RNA, 70 nt, Homo sapiens
gaagggagagcagcacccagggccgcaaaaacacagggagaggaaccagaaagagacaagaagggaccgg

SEQ ID NO: 95962 - RNA, 78 nt, Homo sapiens
caccgcggagcaaaaaaagagcccgcaagaagaacagagacagcagccaaacccccaggcgggcgggcggacccccgc

SEQ ID NO: 95963 - RNA, 44 nt, Homo sapiens
ggcaagcacagcgaccaaggacccaaaaggcgggcgaaaacgcc

SEQ ID NO: 95964 - RNA, 82 nt, Homo sapiens
gacaaggacagaacaccagcacggcgaaggcagagcagccgagaagaagccaaaaaacacggaggagcaggagaacagcaga

SEQ ID NO: 95965 - RNA, 62 nt, Homo sapiens
gcccgaaacagcagacgacggggaagcacacaaccgcaggcgggacaagaaaagaaaaagca

SEQ ID NO: 95966 - RNA, 76 nt, Homo sapiens
gcacaaccggcagccagaaaagacagggacggcagaaacagaacaggaagaaacaaacagacaggacaccaaaaag

SEQ ID NO: 95967 - RNA, 68 nt, Homo sapiens
cagcccccacacacaaaagcggcagacccgaacaggccagacgggcagaccgggcacaaacacacagc

SEQ ID NO: 95968 - RNA, 59 nt, Homo sapiens
aaggaaaagagacgcagacagacagcgcgggagccaggaaacgcagaccccccacgaga

SEQ ID NO: 95969 - RNA, 73 nt, Homo sapiens
cgcaccaagaaccaacccgccagcaccggaccggacacagaccagaagggccccggagaagagcaccgggggc

SEQ ID NO: 95970 - RNA, 47 nt, Homo sapiens
aggggaccgcaagagaggagaggagggaaccacggagaccagaccgc

SEQ ID NO: 95971 - RNA, 79 nt, Homo sapiens
ggaaaagaaagcagaggggaaacagagcaaaggagacaggaagccagaaggaaacggagcacccaccaacgagagagcc

SEQ ID NO: 95972 - RNA, 83 nt, Homo sapiens
cccaccaaggagacgcaggcacccaggggccgccccaggacacgccggacccccccgccaacaagaacaagcagacaagcagc

SEQ ID NO: 95973 - RNA, 76 nt, Homo sapiens
aagcccgggagcagaagggaggcccaagacccacaacaaaaggaaacaggcaaaggagcgacagacagcgagggaa

SEQ ID NO: 95974 - RNA, 85 nt, Homo sapiens
ggcgagaaagcacgggggaaacgaccacaggccaccacccaccaccacggaacaggacacccaaccgcgagaccagcaaggacgg

SEQ ID NO: 95975 - RNA, 84 nt, Homo sapiens
ccagaggaaccacacaggaaaccgggaaaccaacaccgaccaaggcagcagagcgggagcgacagggagaagaagcgaaggagg

SEQ ID NO: 95976 - RNA, 84 nt, Homo sapiens
acagaggaaagcaagaaagaagcggaagggaggcgcgcgaccagagagcaaagccgaggaaggcggcgcagaagaaggcacagg

SEQ ID NO: 95977 - RNA, 83 nt, Homo sapiens
gggcaaccggacgagcggggcaaccgaccggcgcggagggggcccaagaaaggagacaaagacgcggcccagaccgacagacc

SEQ ID NO: 95978 - RNA, 67 nt, Homo sapiens
gaggaccccaagaaccagaacagcagagcagaaaccgggggcccacaacaggccgagaggagacaaa

SEQ ID NO: 95979 - RNA, 73 nt, Homo sapiens
caggagagcggcaacaccgggagaaacagaagggacaaacccagaaaggaggaacccaagagggacagaaaaa

SEQ ID NO: 95980 - RNA, 70 nt, Homo sapiens
gcaccaagaagcgagaagcgcccagaaggggcaccgaggccagagagaaggccacagacacggccgccac

SEQ ID NO: 95981 - RNA, 71 nt, Homo sapiens
gaagagcaagaagacaggaaacccccggagaaaggaacaggaaaagggaggcaaagacaaccagaaacccg

SEQ ID NO: 95982 - RNA, 73 nt, Homo sapiens
caaagcggaccagagacagcgccccagaggagcccggaacacgaacgaggagagaaaagcagaaagccggaac

SEQ ID NO: 95983 - RNA, 72 nt, Homo sapiens
acaagagacccaacagaaaagaagaagaagagggaaccccagcgccaaagcacagccaaaaaacaacaaagg

SEQ ID NO: 95984 - RNA, 81 nt, Homo sapiens
agggcggcgaggacacacgggagccacgcacgagcccccaaaggaccaggaaacaggccgacagcggaaaagaacgaccga

SEQ ID NO: 95985 - RNA, 41 nt, Homo sapiens
acagaggacaggaggaaaaccagaagccaccgcaggaaggg

SEQ ID NO: 95986 - RNA, 41 nt, Homo sapiens
gccaaagaccccacggacccgcagagcccgagccaaagcca

SEQ ID NO: 95987 - RNA, 82 nt, Homo sapiens
agcagcgccgcccggggcagaccaggcagggcgcaagaggcagacagacaggcgacgggcagccaacaagaaacgacaccca

SEQ ID NO: 95988 - RNA, 84 nt, Homo sapiens
gccgagcccgcggccggagagcggaggagaggcaaccgcgcccggacacggcccccgcacggcaagccgggaccgggccagaga

SEQ ID NO: 95989 - RNA, 63 nt, Homo sapiens
cggccagaggaaagaacccgagggaccaagaaaggcccagggaccaaagcccggacaaggccc

SEQ ID NO: 95990 - RNA, 73 nt, Homo sapiens
ggggagggcccgggcgaagaagcaaacaggggcaggaaaacccaaaacgaaaaacaaagccagggcgggaagg

SEQ ID NO: 95991 - RNA, 79 nt, Homo sapiens
cgggagaccggcagcggcggcccgggagcgacggaggaacgggagaaacagcagggcgaagagaaaaggaagagaaaga

SEQ ID NO: 95992 - RNA, 74 nt, Homo sapiens
cggccggcccagcgcccccacggagcagcacccacccgcacagccgagcagggggagacaccagggccggggag

SEQ ID NO: 95993 - RNA, 80 nt, Homo sapiens
gcccgggccaccgcccggaaggcggagaagaagacgacgcgaagacgaggagaagaccccgagccaaacgggggcccgaa

SEQ ID NO: 95994 - RNA, 80 nt, Homo sapiens
ggacggacgcgcacaagacaagacagcacccaagaaaacccaggccgcgaaggagaagaccggacaccaaccgacggccg

SEQ ID NO: 95995 - RNA, 87 nt, Homo sapiens
cgagccagcgcccggagcaagcggagccccccaagagccggaaagcggcgcgaccacaagcgagcaggaagcagcagcgcaggccca

SEQ ID NO: 95996 - RNA, 53 nt, Homo sapiens
ccaagggccgacacaacaccgagacaacgcgaacaagaggcgccagcgggcgc

SEQ ID NO: 95997 - RNA, 77 nt, Homo sapiens
gaaacacacacacagacccgggaagccaaaccagccacagacaaagggagagaagggcaagcgggcacgacgggggg

SEQ ID NO: 95998 - RNA, 78 nt, Homo sapiens
cgccgcagcggggcagccgccgcccccccagaccgccaggacagcggccgaagccagagccggggcggcgccaggccc

SEQ ID NO: 95999 - RNA, 77 nt, Homo sapiens
gcggggcccaaggcgccacaagaaaacaagcgaccagaagaacgcacaaaaagagcgcagggaaaggccaggggaag

SEQ ID NO: 96000 - RNA, 91 nt, Homo sapiens
acggggcgccgacagaggaagaggacagcgggaagcgaaagaacgcagaggcccacagcaaggggaacggcacagggaggggacagaccaa

SEQ ID NO: 96001 - RNA, 81 nt, Homo sapiens
caaggggggcaagggcggccggcccccgacagccaggcccgcgagaaggggggccccagcccggccgaacgggcgcacgac

SEQ ID NO: 96002 - RNA, 59 nt, Homo sapiens
acccaaagagcagacacgagcggagcgaaggagacccccggcacacgggacccccgaga

SEQ ID NO: 96003 - RNA, 56 nt, Homo sapiens
gaagagaagccgaagacggagaaaaaggaacagggaggggagcggaagccgcagaa

SEQ ID NO: 96004 - RNA, 69 nt, Homo sapiens
cacaacccgaaggcgaacacagaggaaaccgcaccgcccggagcccaaaggggcaggacaagacagaag

SEQ ID NO: 96005 - RNA, 83 nt, Homo sapiens
gagggagaggacacggcccacccggaaaccagcaggagccaccggaacgacggagcagaggagaggaggaggccgagagacgg

SEQ ID NO: 96006 - RNA, 55 nt, Homo sapiens
gagaccagaaaccggaagcgagcagccacagagggacagcaccaagccaccccag

SEQ ID NO: 96007 - RNA, 75 nt, Homo sapiens
cgaacaggagcccgacagaaggcagggccgccaagaccggagacaggaacacggccccggggaccgccggagggc

SEQ ID NO: 96008 - RNA, 87 nt, Homo sapiens
ccgcaagcgagcgagcgcagagcccggggacggcgaggccccagaccacacggggcgaaagacggaaaggcccagaggacgaccgcc

SEQ ID NO: 96009 - RNA, 73 nt, Homo sapiens
ccacgcgccacccagcgccgggccccgacgagagccaggacaacgagccagcccgcaccacacgcggggagac

SEQ ID NO: 96010 - RNA, 87 nt, Homo sapiens
ccgaggcaagaagggacgaacggggcggggacaggcacgggggacggcagcgcgcaggggcggagaacggaaaagcaccaggaagca

SEQ ID NO: 96011 - RNA, 67 nt, Homo sapiens
gcaaaaaacgcaacaccagcacagagggcccgggacgagcggcccagcgacgagcgaagaggcacaa

SEQ ID NO: 96012 - RNA, 85 nt, Homo sapiens
cagacaccaccaccagagaaccggcaacaacaacacagaagggaacaagcggacagaaaaagagaacaagccccggccagaaaga

SEQ ID NO: 96013 - RNA, 60 nt, Homo sapiens
ccaggcgccgcacgcggggcagcccgaggcgcaccagggggagggaagcagccaagcggg

SEQ ID NO: 96014 - RNA, 77 nt, Homo sapiens
gaaaacaaagacaaaaggagacgagaagaagacaagagcccagggcgggacaaagagacagcagaaggaggagcccc

SEQ ID NO: 96015 - RNA, 80 nt, Homo sapiens
ccgagccccaacccacgcgccccaaggccacccaccccaccagagccggacaccagagccggacaccagggaggagcgag

SEQ ID NO: 96016 - RNA, 84 nt, Homo sapiens
gaaaagaagagaacaaagaagaggcgggcggagggcacaccagaggggaccaagagaagcaaagggagaaacaacgcaaaaaca

SEQ ID NO: 96017 - RNA, 84 nt, Homo sapiens
cgccgccgccaccagcccaaaacgaaccagacgccgggcccccagcaggcagccccacggaggggaaaggccaaggaaagaagg

SEQ ID NO: 96018 - RNA, 71 nt, Homo sapiens
cagagcacccaccacaggaggcagccgccgcaaagggacgacgaagggacagccagaagggaagacagaag

SEQ ID NO: 96019 - RNA, 68 nt, Homo sapiens
cacgggcccaacaggcaccccacaaacagggcagaaagcgcccaagaagaaccgaagagacagcccgc

SEQ ID NO: 96020 - RNA, 75 nt, Homo sapiens
ggaacacggccgcgggcggaggacaggccaaaggccggaagaggcgcacaccccggccagggcggaacacaagga

SEQ ID NO: 96021 - RNA, 82 nt, Homo sapiens
gcagaagggagaccacagcaagacgccgggaccccggaaaccagaaaggcagcaaagcaccgccgagggccaggggaagcga

SEQ ID NO: 96022 - RNA, 73 nt, Homo sapiens
ccaccggaaggaaaagcgcaaccaaaaaaacaccaggacagaacaggaagcagaaaaaacaccagcagcccag

SEQ ID NO: 96023 - RNA, 64 nt, Homo sapiens
ggagaccagagccaacggagacggacacagaagacagacacagaaagaaagaggaagagccagc

SEQ ID NO: 96024 - RNA, 74 nt, Homo sapiens
agcaccacacgacccgcgcccaagccagacagcgagccgaggaacggcgggcaacacaacaaggcgcggacacc

SEQ ID NO: 96025 - RNA, 75 nt, Homo sapiens
gccagcgacaaccagccgacccaccaccggcccaggaccccacccccaggaagaagcaaagcaggggacgaagga

SEQ ID NO: 96026 - RNA, 77 nt, Homo sapiens
accccaaaacaggcacagacggcgacggccacaccccgccgggccccacgaccaaacagccaggccccaggccagca

SEQ ID NO: 96027 - RNA, 89 nt, Homo sapiens
ccacaaaggaccaagaacggagcaagcccaggcacagccgacgccgcggggagacaagggcgggcccccggcagggacaaaggcgagac

SEQ ID NO: 96028 - RNA, 79 nt, Homo sapiens
ggcgccggccgagccaggcccggcaaccagccgcggaaagacggcgcacacgcacccggagacgagaacacacaagaaa

SEQ ID NO: 96029 - RNA, 62 nt, Homo sapiens
gagaaggcaagagccgacccacgacagcaacggcgcaaaggaacaggagacagcggagaaag

SEQ ID NO: 96030 - RNA, 72 nt, Homo sapiens
cagccccgcgaggcccagagaccgagcagccgcaaggcaacagagaaacgacagaaagggcgggagaacaac

SEQ ID NO: 96031 - RNA, 60 nt, Homo sapiens
gagcagaagcagccggcggcaaaccgccaaaagcccgaggaccagacgggcgcaggaggg

SEQ ID NO: 96032 - RNA, 122 nt, Homo sapiens
cgaagaggaagacccccgccaaaaggaaagcacagcagaaacacaaagcagcccaaccaaaggaggccccagggggcagaggggaccagcgaccaaggacggggccaagcacggagaccagc

SEQ ID NO: 96033 - RNA, 79 nt, Homo sapiens
cgcaaagcccgccagcccgcaccagacgaggcaaaacagcaggaccgagacgcaacaggaccaaaacagaccaggaccg

SEQ ID NO: 96034 - RNA, 57 nt, Homo sapiens
gccggagcacccccaccagccggcagcgccgccagccggacaccgagcccaagcccc

SEQ ID NO: 96035 - RNA, 77 nt, Homo sapiens
aaaccacaaagcaagggacccgagccccacaacccgcggcaccacagagccgaccacaagcccagcgggggacgaca

SEQ ID NO: 96036 - RNA, 79 nt, Homo sapiens
gcgcgccaagccgcacgcaaccaccgcccggccacaccaggggcggagaacggaaaagcaccaggaagcagagaggacc

SEQ ID NO: 96037 - RNA, 75 nt, Homo sapiens
ccagaaccaacccacaccagaaaggacacacaggcgaacccaggcacccagagacggagcggaaaccaaggaaga

SEQ ID NO: 96038 - RNA, 74 nt, Homo sapiens
aagggcggacggcgccggcgccacaacaggcagcagaggagaacggcgccagcggaccccggacagcgagagcc

SEQ ID NO: 96039 - RNA, 72 nt, Homo sapiens
gggcaaaccaaaaacgcggcaccagagaaagagagcgccacaaagcgaagccaggcacaaagacgccagagc

SEQ ID NO: 96040 - RNA, 82 nt, Homo sapiens
cagaacggacaagcagaagaagaagggaccccaaaagagccaagcccagagaagacccaaaggcaagggaacagccaagggg

SEQ ID NO: 96041 - RNA, 78 nt, Homo sapiens
gcgcccacagaaaggccggcggcagcccgcgagagagccccaagacggaacagccccaagccggaaacccaggaacgg

SEQ ID NO: 96042 - RNA, 66 nt, Homo sapiens
gagcggccggggcgccgcgcgccagcccaggaaaggcgccgaagagaggacacgagcccagccagg

SEQ ID NO: 96043 - RNA, 69 nt, Homo sapiens
gcgagacaaaggaacgacggaaaaggcagaggggcgggcaaaggagaggcacaggaagcagaggcaaga

SEQ ID NO: 96044 - RNA, 72 nt, Homo sapiens
aaaacaggccggaaagcacaggaaaaaccaaaggaaccaggacaggggaacccaccagccggacccagggaa

SEQ ID NO: 96045 - RNA, 81 nt, Homo sapiens
gcagaccacacccgcccgagcaggcacagagacggcgacaaagggcagcggaacgcgccgacgccgcaaccagcaccccga

SEQ ID NO: 96046 - RNA, 73 nt, Homo sapiens
cgccgccgcgcacaaccgcacggcagccgagagacggaaaagaacaaacaacacaagcgagagagaaggaggc

SEQ ID NO: 96047 - RNA, 86 nt, Homo sapiens
ccgggcgccgggcgccgggcgccgcggccgccaggagcggcccgcgccgcagccccagagaccggccagccacagagcagagaaag

SEQ ID NO: 96048 - RNA, 104 nt, Homo sapiens
ccaagaggagccccggggaacccgcagcacaccagggggcaggcccggaagaagagacacgaagagcacggagcggaagaggagacgacaaagaccaagaaaag

SEQ ID NO: 96049 - RNA, 76 nt, Homo sapiens
caggaacacggccgcgggcggaggacaggaacccaaccgaagaagaacagacccagacaaacacagcagcgacggg

SEQ ID NO: 96050 - RNA, 81 nt, Homo sapiens
ggccgccggcgagccgccaagaggcggcgcagccaccccgcgggaacgcccagcgcgagacgcaccgggaacaggaagaaa

SEQ ID NO: 96051 - RNA, 73 nt, Homo sapiens
cgggaagagaaggagcaaggcaaaaggaagcaagagcaacagcagacagacggacaggcaaagaggcccccaa

SEQ ID NO: 96052 - RNA, 62 nt, Homo sapiens
ggggacgaaagaggggcacgcggagaagccgcagaagaagccgaagacacaaacagacgcca

SEQ ID NO: 96053 - RNA, 69 nt, Homo sapiens
gcgaaaagaacccccaaaagggcggagaaaaacacagcaagggcgaggcgccagagacagagaaaagaa

SEQ ID NO: 96054 - RNA, 39 nt, Homo sapiens
cagggacgaacggaaccaaccccgccacagccccacccc

SEQ ID NO: 96055 - RNA, 88 nt, Homo sapiens
accgcccgggacggccacagacccacagaggcaccccagacacaaacccagcggggccgccccacccgaggcccaccccaacgagcca

SEQ ID NO: 96056 - RNA, 73 nt, Homo sapiens
gccagagcaacaccaacaaaaaacaggcccagccccgacccagcaggcgaagaagcagcagcccaagagcaga

SEQ ID NO: 96057 - RNA, 82 nt, Homo sapiens
caggcaggcccacagcgccacagaaccgcccaaaaaggcaaagaaaccacgagccaccgagaggccgaagaagaaaggcaca

SEQ ID NO: 96058 - RNA, 74 nt, Homo sapiens
cacacgccagccgcagcaggacaaaccgaagagaacgaaaggacaagagagggagaaaccaaaaaagaagagag

SEQ ID NO: 96059 - RNA, 66 nt, Homo sapiens
aaggccagggccagaggggcacgggcgccgccccgacaagggaccgggcgggccccgcaggaaacc

SEQ ID NO: 96060 - RNA, 61 nt, Homo sapiens
cagagggaggggaaagagcaccgaagaagccgaggacggcaggcagcggaagagaaagacc

SEQ ID NO: 96061 - RNA, 77 nt, Homo sapiens
aaaggcaccagcagacccagagaagagaacccgaaaacagggccaaagcaggaaccccagaagaaagcccaaaaacg

SEQ ID NO: 96062 - RNA, 72 nt, Homo sapiens
gccgcagcccccgcaagccaaaaagaaccaggggaccaccccgagcaaggaccaaggcacgaaggacagaca

SEQ ID NO: 96063 - RNA, 70 nt, Homo sapiens
aggaaggaaaaccgacgaaggccccacagacaaaaccgccggcggaagagagcgcaccacgcacgaaggg

SEQ ID NO: 96064 - RNA, 57 nt, Homo sapiens
accggcccaccccggccccccgacccgccccccgcgaaccaagccaacggaaaggca

SEQ ID NO: 96065 - RNA, 71 nt, Homo sapiens
aacccaaaagccgacaaccccagaaacagcaagacggaaaaccgccacaaaaagagacaagggaccggaga

SEQ ID NO: 96066 - RNA, 74 nt, Homo sapiens
gcgccggagcagcggacccaggcaggccgcaccgaggggaaacacgaaagaaggcaaaaacacacgggagggag

SEQ ID NO: 96067 - RNA, 77 nt, Homo sapiens
gccacaaccgccagacaaccggagccacgccccacgaccgccagacccccagccgcaggccaacgagcaagcggacg

SEQ ID NO: 96068 - RNA, 84 nt, Homo sapiens
cccgcccgagcgcggggccgaggcggcagccggcgccaagcccgcagagcggaccaacagcgcacccaacagaaaacacacgcc

SEQ ID NO: 96069 - RNA, 74 nt, Homo sapiens
gcgagcagagacacagcaaagaaagccccacacaagcccacccagaggccccacaggcgcagagcccaaagcaa

SEQ ID NO: 96070 - RNA, 84 nt, Homo sapiens
gaaggggcccgaagcccccgcaggaaccacaacccaaccagaaagggcaaagacaccagcagagagaggagaaggcagcacaga

SEQ ID NO: 96071 - RNA, 80 nt, Homo sapiens
gcggggcgcgggccggccccgcggggagcgcccccggcgcgagccccaggaaagggcacaccaaagggaaccaagaaggg

SEQ ID NO: 96072 - RNA, 83 nt, Homo sapiens
gcagaaggccggagacaccagcagccacgaggacaagcagaaaccaagcggaccgagacacagccgcccggcccccgcccccg

SEQ ID NO: 96073 - RNA, 75 nt, Homo sapiens
acgaacaaagacggcaacgcgcacagcgcagagaaggcagacacaaggaacagccagccaggagaaaaacgaacc

SEQ ID NO: 96074 - RNA, 72 nt, Homo sapiens
agccaggggaccgccaccagcggccagcacccgggggaggaacgccagcaaaggggaccggacaacacacac

SEQ ID NO: 96075 - RNA, 76 nt, Homo sapiens
gaagagggaaggcacgaggaagagacaacaccagagggccccagaccagaggacaagacaaagggagcaagacaag

SEQ ID NO: 96076 - RNA, 84 nt, Homo sapiens
ccggcaggcccgcgcaccagcgagggcggcacgccacaggacggcacccaccgcaaggccacaccaccaacgcccagccagaaa

SEQ ID NO: 96077 - RNA, 74 nt, Homo sapiens
ccgaccagggcaacaccaaaaacaaaacgaaccaggacggcaacaccgagacaaccaagcaagggccagcagaa

SEQ ID NO: 96078 - RNA, 74 nt, Homo sapiens
gaagcagcaagcggcgaagacgcaagaggaaccagcgagcggacacagcagccggaccagggaagagcggcggc

SEQ ID NO: 96079 - RNA, 62 nt, Homo sapiens
gcgcagaaccggcgcaggaccgggcaggagcgaagagaagccggccccaaacaggaacacga

SEQ ID NO: 96080 - RNA, 71 nt, Homo sapiens
cgccagcaggggcgccccggacgagagcccggcgggggcgcaggacaggcgagacaagaggaacacccaaa

SEQ ID NO: 96081 - RNA, 70 nt, Homo sapiens
cgccaaacaggaagagcaccacggacagcagaccacagcccggcaggcccaaaaacccaaagggacagaa

SEQ ID NO: 96082 - RNA, 88 nt, Homo sapiens
ggccagcggcgcggcgggccaaggccgcgccgggcgggacgggggggcggcccggccccgcaggacggggaggacgcacgacgcgcgg

SEQ ID NO: 96083 - RNA, 86 nt, Homo sapiens
gcggagcaggccaaaggaagaaggccgaccgagcagcggcccagggggcccacgggacagaggccggaacaagagacggagacaaa

SEQ ID NO: 96084 - RNA, 75 nt, Homo sapiens
aacgaagaagaccacagaaagccggaggcgcagaccggggacagcaggcaagcgccggggaaccagaggaggggc

SEQ ID NO: 96085 - RNA, 90 nt, Homo sapiens
cccgaacccgggaaaagaggaacaaggcggaggaacgagacgcgaaccagaacggggagagggaagaaacaagcccgaaacgccacagcc

SEQ ID NO: 96086 - RNA, 73 nt, Homo sapiens
cggagccaccccacagaacacggagcacagaaaaaccccccaccagaaaaccacagccaagaaagcgacagcc

SEQ ID NO: 96087 - RNA, 102 nt, Homo sapiens
gaacaggaggaagaaaagaaaaagaaaaaagacgacaagaaaaagaaggaagcgccaaaagaagggcgcccgcgccggcagaggaggcgagcacccgccagg

SEQ ID NO: 96088 - RNA, 80 nt, Homo sapiens
ggagcggcggggccgcaccgagaaggagcaggggaaagaggcgagaaggcaaagccaaaggagaaagaagaaggaagaca

SEQ ID NO: 96089 - RNA, 83 nt, Homo sapiens
acggcgcacgaccgcgcggcagcaaagaggccaagggcagaggcgcgagagaagaagagcacaggacgcaaggaccaaaaaac

SEQ ID NO: 96090 - RNA, 69 nt, Homo sapiens
ggccgaacggagcagacaaagacgcccacgaccaggcgcgcaggcacagagcgagcaggcaacaacaca

SEQ ID NO: 96091 - RNA, 80 nt, Homo sapiens
cagagcaagaaaagcccgggagcagaagggaggcccaagacccacaacaaaagaaagggcaaagacaccagcagagagag

SEQ ID NO: 96092 - RNA, 81 nt, Homo sapiens
ccggccgccggcccccagccgcgcccccgccgcccccgggcgcccggagccccagggcgcccgcgccggcagaggaggcga

SEQ ID NO: 96093 - RNA, 75 nt, Homo sapiens
cggagagcacccaacaaccggggaggggacagacagaaggccggcaagagaagaaaagaggagaggaaaaaaacc

SEQ ID NO: 96094 - RNA, 83 nt, Homo sapiens
gccgacggaccggcacgccagacccccacgcgcaggcgccccacggcgaaccgggaaaaggcgcccacggaccccccaacgcc

SEQ ID NO: 96095 - RNA, 73 nt, Homo sapiens
aggagaaagacacagcaggccaagcaaagagaagcgaaggaacgggaaaacagcaggaagagcgggaggaaga

SEQ ID NO: 96096 - RNA, 38 nt, Homo sapiens
cagaagaacggcgccacaaggcaccgccgaccgaaacc

SEQ ID NO: 96097 - RNA, 74 nt, Homo sapiens
agaagccacagaacaggggaggcagccaggaagcacgagcaggccacaacaccgaaaaaagccgcacagcaaag

SEQ ID NO: 96098 - RNA, 73 nt, Homo sapiens
cagaggcaaagcacgcgcaagcacagaaggaagggacccacgcccgagcacaggcccaccagaagagccgaca

SEQ ID NO: 96099 - RNA, 50 nt, Homo sapiens
ccgcaccccgggccaggaaacaagccccaccaaagccaccaagccaagac

SEQ ID NO: 96100 - RNA, 67 nt, Homo sapiens
aggcagaaaaaaggccacagaaggagaaccgagcaggagcaaggaggaaaacgcacaggacaaagca

SEQ ID NO: 96101 - RNA, 75 nt, Homo sapiens
ccaccaacccagagcagccaggccagagagccagaacggagagagggaacagaggcacagaaaagaagggagacg

SEQ ID NO: 96102 - RNA, 77 nt, Homo sapiens
ccgccccgcgcgcggccggcggcccaggcgcacaccgcgccgggccgcccgcggcagagcagcagagcgccgcccac

SEQ ID NO: 96103 - RNA, 66 nt, Homo sapiens
cacgacaggcaaggaccgcacgagagagcaccagaacacgaaggggaaacagcgcaccaaaccgcc

SEQ ID NO: 96104 - RNA, 78 nt, Homo sapiens
cccgaggagcgggaacaggcaaaagagcggaaaaggcacaggagcggggagaggaaaaggaacagaaagggcccaaag

SEQ ID NO: 96105 - RNA, 67 nt, Homo sapiens
gacaaaacccacgaaggaaagaaggggagccagagagcggccgggcgggaagcacacaacaaggaca

SEQ ID NO: 96106 - RNA, 77 nt, Homo sapiens
aggaacagaaaacggcagcggacacaggaggaaacaagaagaaaaagggcagccacaaccaaaaccaaccaacaaca

SEQ ID NO: 96107 - RNA, 36 nt, Homo sapiens
cagacacaaacagaaagcggcaacggggaagaagac

SEQ ID NO: 96108 - RNA, 63 nt, Homo sapiens
aggagcgagcagacgacaagccgggagcgggcggccaaccaggccgaaaaggaaaaccaagaa

SEQ ID NO: 96109 - RNA, 74 nt, Homo sapiens
gcaaaaccgaaccagaagacgagagccaacgcaaccaggcgcaggacacacagagagagagacagggcaccgga

SEQ ID NO: 96110 - RNA, 50 nt, Homo sapiens
ggagaggaaccggcccagagcacagaaggaacgggacccgaacaacgaaa

SEQ ID NO: 96111 - RNA, 84 nt, Homo sapiens
gcccagaggccaagcggcaaaggacaggaagggagcccaaaacagcagaggggaggacgccagccagaagcgggacccaccaga

SEQ ID NO: 96112 - RNA, 86 nt, Homo sapiens
cgggaggcaacgaggcaccagggagcagagcagaggggaagagagaggggcgccccaggaaagaagacacggcgcaacagaaaaag

SEQ ID NO: 96113 - RNA, 82 nt, Homo sapiens
agcaagcccgggggccgggacgagcgggacggagcgggccaccggggccacgacagcgagcgaccccggccgagaccacccc

SEQ ID NO: 96114 - RNA, 74 nt, Homo sapiens
cgcagcaacggaacaaggccccaccgaaagccgggcccagcaagcggaggagacgcagcccggacccaccgccc

SEQ ID NO: 96115 - RNA, 79 nt, Homo sapiens
aaaacagacagaacagaacccaaaagccgacaaccccagaaacagaaaggacgagaccgaagagaaggaaggacagcga

SEQ ID NO: 96116 - RNA, 74 nt, Homo sapiens
acggacaccacaaacccacgagcccaccccacggagggaaaccgaggaaggcagggaccggaaagaacaaaggc

SEQ ID NO: 96117 - RNA, 77 nt, Homo sapiens
cccccacgaagcgaacccaaagcaccagagggggaaccaacacccaaacccgcaaaagacgagaggaccgacaccag

SEQ ID NO: 96118 - RNA, 92 nt, Homo sapiens
ggcaggaccggaccgcaacaggcccagggccccggccaggcccagccccgcgggagacccggccagcaccacggacggcgcccaggaagccc

SEQ ID NO: 96119 - RNA, 72 nt, Homo sapiens
ccaccacccaaaagccaccagcaggacaacaaagaggagagcaacaagcggcagcagggaacaagccagcaa

SEQ ID NO: 96120 - RNA, 88 nt, Homo sapiens
ccggccggccgcccccaggaccccagggagagcgggcagccccaggggacagggacgggagaaagaacagacaagccgcaagaaccgg

SEQ ID NO: 96121 - RNA, 80 nt, Homo sapiens
agacagaaggcagccgaggggcgcaaagcccaacggaggccacccgggcaggagaacgcgccgccggccggggcgcaggg

SEQ ID NO: 96122 - RNA, 77 nt, Homo sapiens
gaaggagcacaacaggcagacagacaagccgcgaagaggaaacaaaagcgcaggagagaccaggccggagaccagga

SEQ ID NO: 96123 - RNA, 91 nt, Homo sapiens
cgggagccccggcgggccgcgccgggacggcccaccagccaccccaccgcgcagggaggaaccgggaagggaacagggaaccaagcagaga

SEQ ID NO: 96124 - RNA, 75 nt, Homo sapiens
cgcagaccgagacccggacagggcaggaaacagcggacggcgcgccaccggccacgcaacccccgccgacccgac

SEQ ID NO: 96125 - RNA, 60 nt, Homo sapiens
gggccaggaagaggcaggagagcagccagcccaggaccaaacgacacagcagaagacaag

SEQ ID NO: 96126 - RNA, 82 nt, Homo sapiens
ccacaagcgcacgaccaccaagcgacccggcccggcagagcagaagggaagagggaggagccagagaggccgaaggaggacg

SEQ ID NO: 96127 - RNA, 75 nt, Homo sapiens
gaaccacaaagacccgacaccggcgaagccacacagccagagagcaaagccgccaggcgcgcggggccgcggggc

SEQ ID NO: 96128 - RNA, 81 nt, Homo sapiens
aaacgaaaaagaaccaaagaaaagaaagagaaaaagcagaaagagagaagagagacagaagagcagcaaggcaaggaggac

SEQ ID NO: 96129 - RNA, 56 nt, Homo sapiens
gagaccaccgcaccggcccccacccaaggagaggccaagaggaaggccggggaacc

SEQ ID NO: 96130 - RNA, 70 nt, Homo sapiens
gcgccaaggacccagccggagacggcgcaccccaggccggcccagcagcagcgcagcgcagacaaccccc

SEQ ID NO: 96131 - RNA, 75 nt, Homo sapiens
gcggcggcgacccaagccccgcaccgacggggccgaggcaaacaagggccacgcgcccagggagcccgacagggc

SEQ ID NO: 96132 - RNA, 89 nt, Homo sapiens
gcgcgccgcagcgcccaggccggaccgggccgggcgcccgcagcgccgcccaagagagagaagagaggcgcgagggcagggaagaggcg

SEQ ID NO: 96133 - RNA, 69 nt, Homo sapiens
cccccaggccacaagacaccgccggaaccgacaagaaccggccgaaccagaccggagcaggggcagcga

SEQ ID NO: 96134 - RNA, 70 nt, Homo sapiens
cagaaaaaaccgagcaacgaagagaaagaaaagcccaacaagaccggcaaggcaggcggaacgcagggcg

SEQ ID NO: 96135 - RNA, 57 nt, Homo sapiens
gaacacaggacagaacgacggccaggccaggcacgcagaagggagcaccgggagaag

SEQ ID NO: 96136 - RNA, 71 nt, Homo sapiens
caccacccacccaccacgaagcgaggggaccagaagaaggagaacccacgacgaaagcaacaaccaaacag

SEQ ID NO: 96137 - RNA, 92 nt, Homo sapiens
aggagcggcggccaggccagacccgaaggccaggagacccgaccccaaggaggaggagcgcgaagaagaccacagcccaggagcggagacca

SEQ ID NO: 96138 - RNA, 78 nt, Homo sapiens
gacaacggaaccgaagaaaaaaacggagccagccgccagagcacagcaaggaggaaacagcaagggaacaacaacagg

SEQ ID NO: 96139 - RNA, 60 nt, Homo sapiens
aaacaggggcgacaacacacccaaaagacaggaggagcgcggcaagacaaccacgaaaac

SEQ ID NO: 96140 - RNA, 90 nt, Homo sapiens
ggcccaacgcagaccgaggcgaagcgcgcagcgccggccgcagaaagccgcaacaccgagaaaaaaaccacggccaccaaaggaacaaag

SEQ ID NO: 96141 - RNA, 67 nt, Homo sapiens
cagaaccgccagagaagagggaagccaccgcaaaaggggacgcaacggccacagccaagggacacca

SEQ ID NO: 96142 - RNA, 85 nt, Homo sapiens
acccagacgaagacagcccggacaccgacagcacagacagaacccgcaccaaaaagagaggaacagcacggaagaaccgaagaaa

SEQ ID NO: 96143 - RNA, 57 nt, Homo sapiens
gcccagcccgggccaccagcagaaaggcaagaacagcagcgggaaagacaacaggaa

SEQ ID NO: 96144 - RNA, 68 nt, Homo sapiens
gaaggccccagggacggccgcgaccaagaagaagccacggacgcgcgggcgaagcagcaaaacacaca

SEQ ID NO: 96145 - RNA, 69 nt, Homo sapiens
cgacagcaacggcgcaaaggagaaaaggacgacggaaccaccacgaaaaaaagcacacccaagacacag

SEQ ID NO: 96146 - RNA, 65 nt, Homo sapiens
gagcggcagcggcaggcccacacaaaccaaccacagaggaaaaagagggacgcggacagagacgg

SEQ ID NO: 96147 - RNA, 82 nt, Homo sapiens
gcggggccgggaccggcgccacagcagggacgaggagcgccgccgccccgagcccgaggagcaagaggggggggcccccccg

SEQ ID NO: 96148 - RNA, 63 nt, Homo sapiens
gaggaagacgagccgggaggaacggcccggaaacaggaggacgcccaacccgcgcgccacacg

SEQ ID NO: 96149 - RNA, 77 nt, Homo sapiens
cgcaggcgcaaggccaggcgacccgacgggccaccggagaagacagaggagccagaccaagagacagcacaggcgag

SEQ ID NO: 96150 - RNA, 71 nt, Homo sapiens
cggcaaccaagaaaggcgaaggaaaaccccagcgaaacaccaagaggcaacccgaagcagaagggcaaccc

SEQ ID NO: 96151 - RNA, 75 nt, Homo sapiens
gcagaaggcccgaacaggcacgaaaaaacccagcgaagaccacagaaaccaaaacggagaccagaaggccaaaac

SEQ ID NO: 96152 - RNA, 77 nt, Homo sapiens
cccacaccaccgcacgcgcgcccgccgcccgaggagccccgcgcgccaggacagccgcccaccgccccacagaaaaa

SEQ ID NO: 96153 - RNA, 80 nt, Homo sapiens
acggcgggaacccacccagcggaggccaagcgagccccacggagaagccaggggcccacaaaaccaaccacggcccagag

SEQ ID NO: 96154 - RNA, 77 nt, Homo sapiens
agagaccccgcggcgggcgcacaccacgccgagcccgcggcgagggagggagaaacaagacccaggaccaccaccac

SEQ ID NO: 96155 - RNA, 53 nt, Homo sapiens
ggagcaggcgaagaccgggccccgccaggccgccgacaagccgccgccggggg

SEQ ID NO: 96156 - RNA, 73 nt, Homo sapiens
caaagaccagggaacaaaaccggaccagcacgagggagaacgaccaggagcggccgaggaccgcgcggagcca

SEQ ID NO: 96157 - RNA, 77 nt, Homo sapiens
gggaaccgggccaggagaccgccacgaggagggagaaccgaagccgcccgcaggcccgcaaaaaccgcaaaaagccc

SEQ ID NO: 96158 - RNA, 75 nt, Homo sapiens
acaccaaagagccggcaaaggggaccccacaccacaaaccgaggaaagaagggacagcagaaaacgcagagggag

SEQ ID NO: 96159 - RNA, 78 nt, Homo sapiens
ccggcccccgggacggcccaaggccagcccgcaggacagaaagaaggaaaaaacgcaagaaggaagaaagagagaaag

SEQ ID NO: 96160 - RNA, 71 nt, Homo sapiens
ggaccagacccacagaagcccacacgggcacaggggccccgccagcaagggagcaggaggagaagaaaccc

SEQ ID NO: 96161 - RNA, 72 nt, Homo sapiens
aaaggaagccaaaggagagggagaggaggggaggccagcaaccagggaacagacaacggcaagcggagaaga

SEQ ID NO: 96162 - RNA, 68 nt, Homo sapiens
aagaaagaacgcagagcggagggggaccaccccaggaagaagacaacagcaacagagagaaagagaag

SEQ ID NO: 96163 - RNA, 103 nt, Homo sapiens
ggggaacgcaaaaccgcaggaagcgaaaacgaaagaaacgagaagcgcaaagccacaaaacaaacggagagaggagggagaaacaaaggccaaagacgcagga

SEQ ID NO: 96164 - RNA, 77 nt, Homo sapiens
caccaccccaaacaaggaagagaaaccagagagcaagacaaagaaacagaagcgcgagaacagaaccccgaggagcc

SEQ ID NO: 96165 - RNA, 76 nt, Homo sapiens
ccccacgcaaaagaaaacagagccagaccagcgaaaagccaacccagggagagaagaaggaggaaaggcggggagc

SEQ ID NO: 96166 - RNA, 50 nt, Homo sapiens
gccgcaccaggagcgaagagcgccgacaagcagaaaagagacacacaaag

SEQ ID NO: 96167 - RNA, 77 nt, Homo sapiens
cagacagccaccagcgccacccgccgacaaaaaaaaggggggccacgggccccgaccgcccacaagcgcacgggggc

SEQ ID NO: 96168 - RNA, 78 nt, Homo sapiens
ggccggggcgcagcggaggcagggaggcaccgccccaacccccccccgcccggagaaccccgcggaacgagcagcggg

SEQ ID NO: 96169 - RNA, 82 nt, Homo sapiens
agcccacaaggcggagccccaggcggcgggagcggcgggaggagcacaggacagaggcacgagcaggccagagggaaaggag

SEQ ID NO: 96170 - RNA, 78 nt, Homo sapiens
cacacaccccgagggaggaagcaaacaccagagagcaccagcagacggaacaacgagagaaaacggggaaagacaccc

SEQ ID NO: 96171 - RNA, 73 nt, Homo sapiens
ggccggacccaaaaacccaaaaggcagagggggcgagggaggaaagggggcaaaacgacgaagaagacaagag

SEQ ID NO: 96172 - RNA, 70 nt, Homo sapiens
gacgccaaccagccccggcaagaccgaaggcgccggccaaaagagccaagcgaaagacagaggcccagcc

SEQ ID NO: 96173 - RNA, 75 nt, Homo sapiens
gcaaccgaaagcgggcccgggagacccaggcgggacagagggagccaggcagaggacccggccgccgaacgacag

SEQ ID NO: 96174 - RNA, 69 nt, Homo sapiens
acgaaccccagaaaacagacggacagcggcaaaggaagaagagaccaaagaaccagcaaagggagacgc

SEQ ID NO: 96175 - RNA, 58 nt, Homo sapiens
caaagcccaaaaggcaaggcacaagagaaggggccaggagcaggccacccccgggccg

SEQ ID NO: 96176 - RNA, 77 nt, Homo sapiens
gaggccgccccaggcgcccgacgcggaccccagaccaaggcgacgcccagggaggacgaggcaagcccccaccgaaa

SEQ ID NO: 96177 - RNA, 77 nt, Homo sapiens
accaggcgaagcggccgagcaggcgagcgaacgacgaaagccaacaggcagaccagagacagcgccacgcacccggg

SEQ ID NO: 96178 - RNA, 71 nt, Homo sapiens
ccgcccacgcccgagcaaaaaagaaaaggccccaacagagccccagcaaggccaggcaagacccgcccgcc

SEQ ID NO: 96179 - RNA, 69 nt, Homo sapiens
ccggaccagaaaccaggagccacggacaagaccaaaagagcggaaagggccaaaggcagaggccacgcc

SEQ ID NO: 96180 - RNA, 82 nt, Homo sapiens
gggagagaccgccaggagaagggccggcgccgagcgcccaccaagcccacacccagacccaccaccaagaacacgacgcaga

SEQ ID NO: 96181 - RNA, 85 nt, Homo sapiens
gccagagaggcggaagaggaggccgagggaacagaacgaggagcccacgccaaggagagaccaccaaagcgggcagcagaggcac

SEQ ID NO: 96182 - RNA, 73 nt, Homo sapiens
ggaaggaaccagccaaaaagcaagaaccagaggaccggcaacaacccgaggacgaaccaccccgcgccagcag

SEQ ID NO: 96183 - RNA, 62 nt, Homo sapiens
ggacgggagggaaaaccaggccacgcaggcgcgggggacgacggcgggggcacacggggagg

SEQ ID NO: 96184 - RNA, 47 nt, Homo sapiens
gccccacccagcacgagaaaaaacaacggggcggcacacaaggagcg

SEQ ID NO: 96185 - RNA, 78 nt, Homo sapiens
gaacccagggcagaaaggaggcacggagcgcggacgcccaggagcgggcgccggcggagcgccgcccccagggccccg

SEQ ID NO: 96186 - RNA, 78 nt, Homo sapiens
aggcgaagcacgagcagaccggcccgaccgcccacagacccaaacaaagacacagaaaagcccacgaggaaaaacggc

SEQ ID NO: 96187 - RNA, 70 nt, Homo sapiens
cagacagagacccccgcaagaggaagacccagcgaaggaaaggagcgagagaccaacgggcaagcaaccg

SEQ ID NO: 96188 - RNA, 80 nt, Homo sapiens
gggcccgcaagcgcgccgacaggagaggggcgggagccgagagaagccaacccggggagacaaccaaaccaacaacagga

SEQ ID NO: 96189 - RNA, 76 nt, Homo sapiens
cgaagcacaaaagagagacgcccagccgaaagacagagaagcaacaacccacggccccagagccccagcagcaaac

SEQ ID NO: 96190 - RNA, 54 nt, Homo sapiens
gaaaacaggcaacgcgaaaggaggcaagaaggccgcgaagaggaaacaaaagcg

SEQ ID NO: 96191 - RNA, 72 nt, Homo sapiens
ggagaagaaaacaaagccaacacagaagagaacccgaacacagcaggagcaagcgggggcaggagccaaaga

SEQ ID NO: 96192 - RNA, 75 nt, Homo sapiens
cgacacacgcacaagggccagggcccgaagacaccccgccaaaaggacagaggaccacggagacagcagagagcc

SEQ ID NO: 96193 - RNA, 66 nt, Homo sapiens
ggaccggccaagaccagccgagcccaccggcaaagagaaccagaggacaccacggggacgagagcc

SEQ ID NO: 96194 - RNA, 52 nt, Homo sapiens
aacccgccaaaacacagcgaggagacagagggggcacacaaagcggacagac

SEQ ID NO: 96195 - RNA, 87 nt, Homo sapiens
gaacaggggccacaggggccccgaagaaccccacaagccacaggaggaggcagcaggcagaaaggagaaacaaaagagacccaagcc

SEQ ID NO: 96196 - RNA, 75 nt, Homo sapiens
agcggaagccagaacgagcccagcccaccgcagcgggacaccagcacaagcccccagaaacccacaaagccccga

SEQ ID NO: 96197 - RNA, 61 nt, Homo sapiens
cgcacgaggaagccagccggaggccccagggggggagccagaacgagaaacagaagagacc

SEQ ID NO: 96198 - RNA, 73 nt, Homo sapiens
ccggggcacgcgaaggaaagagaccaaccgccacaagcaccaccccagggcgggaaaagaaacagcggaaggg

SEQ ID NO: 96199 - RNA, 60 nt, Homo sapiens
agacaccggccggaaagggggggcacgggcccagaagccgcagggccgaggcagccaggc

SEQ ID NO: 96200 - RNA, 84 nt, Homo sapiens
aagaggaccagaggaagccaggcaaaaaggggcagacgcggcagaccgagccacaccccagcgccaggggccagcagacccagc

SEQ ID NO: 96201 - RNA, 94 nt, Homo sapiens
gaagcccagcgcgcccggcgccgccccaccccggaacccgcggggcggaccggagaagccccgagcaccccacaggagaaggagcaagaagaga

SEQ ID NO: 96202 - RNA, 57 nt, Homo sapiens
caccgagccggacaagaaacccggcaaggagagggaaagcccagaagagcccacgag

SEQ ID NO: 96203 - RNA, 75 nt, Homo sapiens
acggggagcgaacgggacagcccacacccggcgcggaggacagagccgcgcacccagccggggcagggcaagcca

SEQ ID NO: 96204 - RNA, 73 nt, Homo sapiens
gaccaggaaccaccagagcaccagaagagagagggaaagcgggggaggccgcaaaacacgggaagcaggacac

SEQ ID NO: 96205 - RNA, 76 nt, Homo sapiens
ccccagcaacacggcgcgaggcaaggccagcgaagaaaagcgcgaagaaccagagcagaaacaagaacacaacaaa

SEQ ID NO: 96206 - RNA, 70 nt, Homo sapiens
agagaaagaaccacaccaagagacccaagaggacgaaacaggacagccaggaaggcaggaacagaccaac

SEQ ID NO: 96207 - RNA, 61 nt, Homo sapiens
cacaccgaccgagcaaaacagagaccaagcacgaaaaagaaggccgaggacggacaagcag

SEQ ID NO: 96208 - RNA, 53 nt, Homo sapiens
cgcagcgccccccgcccagggaagcggccgcggccggcagagccagaggacac

SEQ ID NO: 96209 - RNA, 76 nt, Homo sapiens
cacaaagccccccggagacgcaaccaagcaacgcccaagccgaacgagggcgcccagcacaacgccccccggcccc

SEQ ID NO: 96210 - RNA, 72 nt, Homo sapiens
gaaagcccagagggaagcgcaagaagcaggccagaaacagacaggagagccgaccacaggaccaggaaaaga

SEQ ID NO: 96211 - RNA, 82 nt, Homo sapiens
gagcaccagccaagccccggaggccgcggaggcgaagaggccggcgcccgcagcccgagcagcaggagaagggaaccagcaa

SEQ ID NO: 96212 - RNA, 77 nt, Homo sapiens
gagccagcgagacgggggcacgccagcggaagaagagagaagaccccccaggaccgggcaccaaggaggacaagcca

SEQ ID NO: 96213 - RNA, 67 nt, Homo sapiens
gcgcccccgggagcgggcgcccagaggaacaagcagaaagcacgaacaacgagaacaagacacgagc

SEQ ID NO: 96214 - RNA, 79 nt, Homo sapiens
caagaggcggacgagaaggacagggaaggcgcacggaagaccaggagagagagggacgcagacacgacaagcaccaaaa

SEQ ID NO: 96215 - RNA, 64 nt, Homo sapiens
ccggaagggcgaccgcgaccaagacaggagccccacaccaagacaccacaaccagcccaaaaaa

SEQ ID NO: 96216 - RNA, 75 nt, Homo sapiens
gacggacagaggaagcagaacgcgcgagacggggacagacaccagaggcaaaccaagggaagagagccagccgca

SEQ ID NO: 96217 - RNA, 71 nt, Homo sapiens
agggccaaagaagggagagagacacccgaaagcgagggaacgcgccacaggaaaacagcaccgcagcccga

SEQ ID NO: 96218 - RNA, 77 nt, Homo sapiens
cgccccaaacggaccaccacgagcacacgcagaagggggaaagagaccgggacagaacaggcagacaaaccaaccaa

SEQ ID NO: 96219 - RNA, 77 nt, Homo sapiens
gaaaaagaagacgccagcaccagcagagaccacaagaaccaggagagacccagagccagcgcaggggaagccgcaag

SEQ ID NO: 96220 - RNA, 60 nt, Homo sapiens
cgggaggaggaaaacacagcagcagcagcaaacagcaagaagagaaaggaaggaggggaa

SEQ ID NO: 96221 - RNA, 81 nt, Homo sapiens
aggcaagcaagcacaaaaagacgcaaggcgcgcaaggccacaccacgccccgagccacacaagacccaaggaacaaagagc

SEQ ID NO: 96222 - RNA, 77 nt, Homo sapiens
gggaggggggcaaggagaagaccgggacagcggagcaaaacagggaggagaggagcggaaagagagagaaggacgcg

SEQ ID NO: 96223 - RNA, 92 nt, Homo sapiens
cggccgccccccgggccaagaaggcggaggacaaggccaagagggccaagggcaaaggccgagcaacccacagagagagaggaaacgaaggg

SEQ ID NO: 96224 - RNA, 68 nt, Homo sapiens
gcccgaccgcccgggagacggagcgaaggccggaggacaaggaacaaagggcagaagcagagaacaga

SEQ ID NO: 96225 - RNA, 75 nt, Homo sapiens
cgggagggaggaccggccagcccccccaaaaaggaaagacaccggcggccagaggagcagccaagaagcccccca

SEQ ID NO: 96226 - RNA, 88 nt, Homo sapiens
cgggaagaggcggcagacagcgggggagaagagccaaggagaccaaacccagcagcaccgcagcagcagaagaacaaggagagaccga

SEQ ID NO: 96227 - RNA, 75 nt, Homo sapiens
ccagcagacaaagacaggaagaaaaagagaaccaagcacccaccaagggccgggagggcccgaacccaaagcaca

SEQ ID NO: 96228 - RNA, 78 nt, Homo sapiens
aaggagccaagaaagagaagaacaaggaagccccccagaaaagaggcgaggcaccacacaacaaaggaacggaacgca

SEQ ID NO: 96229 - RNA, 68 nt, Homo sapiens
gaagcggaaccaaccgggaaagcccggggcagggccaagcaacaggcgcacgcggaggagggcgacga

SEQ ID NO: 96230 - RNA, 67 nt, Homo sapiens
acagcagcccaaggggagccaggccacgcggggcaccccggaaccggcacgaggaaaacagaaaagc

SEQ ID NO: 96231 - RNA, 81 nt, Homo sapiens
gcagcccccgacccagccccagagaaggacaagaacacggcaccaacaaacaacagcacccaccaacagagggaggaggaa

SEQ ID NO: 96232 - RNA, 76 nt, Homo sapiens
aaggaaagcacagcagaaacacaaagcagcccaaccaaagggaaaacccaagcagacacaacaaaccagaaacgca

SEQ ID NO: 96233 - RNA, 67 nt, Homo sapiens
cgccgcacgaggaccaccaggcacggcacggggcagagcaggccaaaggccggaagaggcgcacacc

SEQ ID NO: 96234 - RNA, 66 nt, Homo sapiens
caggaaggagccaagcacagcaggcagcagagccaagcccagcccgccgacacagccaccaagaag

SEQ ID NO: 96235 - RNA, 81 nt, Homo sapiens
ggcagagaagggggagaacgaccacgacaccacgcggagcaccggggggccgaaaccgcccccaaagccagagcccaagcc

SEQ ID NO: 96236 - RNA, 81 nt, Homo sapiens
aaagcaagaagaaaggaagaaaagagagaaggagagaaccaacacccacacggagaacgaagagaaaggacacccacccag

SEQ ID NO: 96237 - RNA, 87 nt, Homo sapiens
aggccacacagaaggacggcccgacggaaggggggcagaagaaaaagcaggacaacagggcaaggagcgggaggacagaaagccaag

SEQ ID NO: 96238 - RNA, 50 nt, Homo sapiens
gccaggaccaggcacccgggaagggcggcgggcagggaaaaaaaaccggc

SEQ ID NO: 96239 - RNA, 40 nt, Homo sapiens
agacaccgccaaaaagcagagaaccggaagcagcccagca

SEQ ID NO: 96240 - RNA, 79 nt, Homo sapiens
gaggaagacgagccgggaggaacggcccggaaacaggaggacagagacggggcaccagagccaggaggccaacccgacc

SEQ ID NO: 96241 - RNA, 82 nt, Homo sapiens
caagacaccggacaccgagggcccccaaaagggccgacgccaccgccgagcccagaccggaacagacggggggccaacaaag

SEQ ID NO: 96242 - RNA, 87 nt, Homo sapiens
ggcggccgaagacacgcgacccggagacagcccaaaacccggaagagcgccccaggagaaacaagaccagaacagagaagaaagcag

SEQ ID NO: 96243 - RNA, 67 nt, Homo sapiens
agacacacaacccgacccgacgagacccaaacagcgaggcgagacccgaagagaaccaccgagagga

SEQ ID NO: 96244 - RNA, 84 nt, Homo sapiens
ccggagcaggagaggacgggacgccaagagacagagaaggacaaggccggcccagggagaacgcaaaaccaccacccccacaaa

SEQ ID NO: 96245 - RNA, 78 nt, Homo sapiens
cgaccgacgggggcggcgagacgggccagggcgggccaggggcgcccaggggcaggaagggagcaggaaagcccaaac

SEQ ID NO: 96246 - RNA, 60 nt, Homo sapiens
cgcggcacacaaccagagcgaggccggaggcagcagcagcgagccccaccgccggccgga

SEQ ID NO: 96247 - RNA, 77 nt, Homo sapiens
ggagaccagacccacgacccaccgaagaaggacacccagcaacccagcccgccagccgaccccacacgcgaacgcgg

SEQ ID NO: 96248 - RNA, 82 nt, Homo sapiens
cagggcaagccccgcccggccaacaacagcggaggaacccgggggacacgcgccggaaggggcccgaagcccccgcaggaac

SEQ ID NO: 96249 - RNA, 68 nt, Homo sapiens
ccaacacacagagaaacagcaggcaggcaaagccaagcagccccaagcaggagccgcaggaaacgaag

SEQ ID NO: 96250 - RNA, 77 nt, Homo sapiens
ggggcacggacgcacgccacccgcgaccagggccggcccagggagaacgcaaaaccaccacccccacaaaaaacgca

SEQ ID NO: 96251 - RNA, 81 nt, Homo sapiens
cggaccggccgagaggaagacgagccgggaggaacggcccggaaacaggaggaccaggacagcggccgaagccagagccgg

SEQ ID NO: 96252 - RNA, 79 nt, Homo sapiens
agaaagaccacaaaccagagaaagcccagcagcaggaacaagacaacagagccccagggaaaggaccgaggcaggaaag

SEQ ID NO: 96253 - RNA, 65 nt, Homo sapiens
cagagaggagggcaaccagaccaaggcgccaagagaagagacgggaacgacaaaggaaaaagcac

SEQ ID NO: 96254 - RNA, 71 nt, Homo sapiens
gcgcccgcaccaggacacagacagcaaagcaagccaagagggcccagccaagaagcacggcaagagcagaa

SEQ ID NO: 96255 - RNA, 81 nt, Homo sapiens
gggccggccagaggcaacggacacgccaagcccagacacgacccccaaaacaaggacccgagccccaaagacagaaaagcc

SEQ ID NO: 96256 - RNA, 73 nt, Homo sapiens
ggaggggaggcgcccccggagccgccccggaggagaagccgaccccgaaccaggaccccaccccaggccccaa

SEQ ID NO: 96257 - RNA, 83 nt, Homo sapiens
agaggaaggagggggacaccggggagggcgggaggggggcggggcggcccgcgacgagccggcgaaggaggcacagaaacacg

SEQ ID NO: 96258 - RNA, 73 nt, Homo sapiens
caagcaacggaccgaccgggcgaggggaggaggcggcggcaggacacgggacccccagaagagcaaagcagcc

SEQ ID NO: 96259 - RNA, 69 nt, Homo sapiens
ggagggcacagggacgcccggaaagagcagccagcaagggaagcgagccacgaagagaagagcccaagg

SEQ ID NO: 96260 - RNA, 71 nt, Homo sapiens
aacggaagagaaccagcacaggaagcgcacaaacgggggccacaggacggaaaagcgaaaaaagagaacgg

SEQ ID NO: 96261 - RNA, 82 nt, Homo sapiens
cggccgccccccccccacggcacccccaccagaagggcacacgggccacagaggaccagcaaggagaagaaaggagcagcac

SEQ ID NO: 96262 - RNA, 88 nt, Homo sapiens
cggcagcaccgacgaacccccaagcgaccaaggaggagccgccagaacgcggaagcgaggagaagcaggaaaaaccaaagaaagcggc

SEQ ID NO: 96263 - RNA, 66 nt, Homo sapiens
gacgccggccaaacacgcccgggggaggcgagggagccccaagagcacagccaaaccaccagagcg

SEQ ID NO: 96264 - RNA, 70 nt, Homo sapiens
gggaccacggcagcccgaaaggagagacacggaacacaaggaagcaaaagcccagaagaggagaacccgc

SEQ ID NO: 96265 - RNA, 38 nt, Homo sapiens
cccagcacagccagagaacacccagagaccaagaagag

SEQ ID NO: 96266 - RNA, 78 nt, Homo sapiens
aagcgggccgcagccggccgcagcgagagcgaggaggagaaggagaagaagcaccagccgacgcgaacggaacacccg

SEQ ID NO: 96267 - RNA, 95 nt, Homo sapiens
gaccaggcgagaggagcgaagggggccagaggcaacgggccccgcaggccagcaacccccgaagccaaagagagcgaccacacggagcgacagcc

SEQ ID NO: 96268 - RNA, 61 nt, Homo sapiens
gcggaaggcagcgcccagcagcgcaggccccgacaagcccaccaggcccccgcgagaggcg

SEQ ID NO: 96269 - RNA, 70 nt, Homo sapiens
agcggacgccggccgccgcaggaggggaacggcgagggaacccaggaaggagggcgacaaacaccagccg

SEQ ID NO: 96270 - RNA, 72 nt, Homo sapiens
cagcagcggccaaagaggagcaacaaggccccaaggccggacccacaggaccgcgaacaaggaggccacaaa

SEQ ID NO: 96271 - RNA, 79 nt, Homo sapiens
gaacacaaaacgcggcccgcgcaaacagggacgacacaaaggccagacaaagggaagggacaggagaaagcagaaagcc

SEQ ID NO: 96272 - RNA, 79 nt, Homo sapiens
agcagcagacccaaaggacaaccccgcaacagaaacccccccgaagggcggaccacccgaccggcccaagccgccagcc

SEQ ID NO: 96273 - RNA, 73 nt, Homo sapiens
aacgggcagggcggaaggcccggagcagggagcaaaccgcaaggaaaaaaccgccagggccccacccagccag

SEQ ID NO: 96274 - RNA, 77 nt, Homo sapiens
ggagcaacacagcccccaggaaaaagcggggaaggggggcaaaaaaaagaagcaagcgaagcaccgagcacccaccc

SEQ ID NO: 96275 - RNA, 69 nt, Homo sapiens
aagagcagaggaagaggaaagcgaacggagccagaaggcccggagaccgaaggccccgccgacggacgg

SEQ ID NO: 96276 - RNA, 73 nt, Homo sapiens
agggaaggaccagacggggacgcacacggaagaaacgcaacccagggccagcagacccagcggggcggagcag

SEQ ID NO: 96277 - RNA, 69 nt, Homo sapiens
gaagaggagaagacaccaaaaagcaaacggaccagaccgaccaccaaaagacaccccccaggcacagcc

SEQ ID NO: 96278 - RNA, 75 nt, Homo sapiens
cgccggaggcacaaccgcacgacggcgccaaccggccacagagaccaagcgaccaagcaagcagcgccgacaggc

SEQ ID NO: 96279 - RNA, 81 nt, Homo sapiens
gccaccaccacgggagaccgcccacccacggcacgcacggacaaggcacccagcgggcggagaacggaaaagcaccaggaa

SEQ ID NO: 96280 - RNA, 69 nt, Homo sapiens
gacaaagcggcaaaggagaagaacgccacagcacagccaaaagagagggacggccgccaaggaccgcaa

SEQ ID NO: 96281 - RNA, 54 nt, Homo sapiens
gacacgcaaaccacacaagacaagcacgcgccagcagaaaacacccccaaaaca

SEQ ID NO: 96282 - RNA, 77 nt, Homo sapiens
aaacgcgagccggagaggagccgcaggagaaggaaccagcggggagaaggcccagcgagggcggcgccccgcccggc

SEQ ID NO: 96283 - RNA, 66 nt, Homo sapiens
gacgagacagggccccaggacaagaggccaggacaaaacgccggaaagcgaagcgcagggggaaaa

SEQ ID NO: 96284 - RNA, 60 nt, Homo sapiens
ggacccaagacgagaggaagggagacggcagagacacccggcccgaacaccacgcaagac

SEQ ID NO: 96285 - RNA, 84 nt, Homo sapiens
gggcccacgccagccgggccaggagggggacacgccagcggcgcagccgacggaagaccgggagacaaaacaacagcaggaaga

SEQ ID NO: 96286 - RNA, 80 nt, Homo sapiens
ggagcggggccccacacccccccgggggggacaagcagaccggaagaccgacggaagaccacaccccgagggagcccagg

SEQ ID NO: 96287 - RNA, 69 nt, Homo sapiens
aagaagaagaggcccccagcggaacacccaccaggcggcaccaggacgccgaaaagcgaccggacgcag

SEQ ID NO: 96288 - RNA, 62 nt, Homo sapiens
gggagccaagacacacaagcaggaaaaaacccagaaacaacaaaaaaccccgggccgagaga

SEQ ID NO: 96289 - RNA, 57 nt, Homo sapiens
aaaaggcagacgaacagagccggaagcaacacgcagggaccccacaccacaaaccga

SEQ ID NO: 96290 - RNA, 62 nt, Homo sapiens
acggcacagcgcacaagaaacccaagcgcgagacaccgaaaacgagaaacgaaagagacacg

SEQ ID NO: 96291 - RNA, 62 nt, Homo sapiens
gcaaccacagaaacaagggacagccaggaagggcccgcacggggcaaccggcccaacacaca

SEQ ID NO: 96292 - RNA, 72 nt, Homo sapiens
aagccacagccgcacggacccccaggacgaaaaggcccaggccggcggaaaacccaccgccaaaagagccca

SEQ ID NO: 96293 - RNA, 72 nt, Homo sapiens
gaccagccgcggagccgggggcagaaagcgccaggaccccacaggggacaacacaaaggaccagaaggaaac

SEQ ID NO: 96294 - RNA, 85 nt, Homo sapiens
gcgggcagccgccgccaccccgcggccgcacccccgccccagggcaccagccggggaaaggagcgcagcgcccgggcggaggagc

SEQ ID NO: 96295 - RNA, 49 nt, Homo sapiens
gccaccacgccccacccggaccaccaccaggacgcccacccaggaggag

SEQ ID NO: 96296 - RNA, 72 nt, Homo sapiens
acagaacgcaagcaaaagcgaggaaaaggagcagccaggcggcaagggaacgagacaagaaccccagaagca

SEQ ID NO: 96297 - RNA, 79 nt, Homo sapiens
gcagaccccagcccacaacccacgcgcaccggagcgagcagagagaaggagccccagcgccccggaggaaggcggaggc

SEQ ID NO: 96298 - RNA, 69 nt, Homo sapiens
gcgaaggagaagagaagaggcaaaaaccaggccgaacaaacgcaagaaaccggccccagaacaacaaga

SEQ ID NO: 96299 - RNA, 84 nt, Homo sapiens
aggggcggaagaaaaacaaacacacgcaaaggagaaaggaaccgacagggaggaacgaggcaacaccggcaaaagcccacacgc

SEQ ID NO: 96300 - RNA, 71 nt, Homo sapiens
ggacaccaggaaaaacacagagagccgacggcagcggcaaggcgcacggaacggaacgacccagaaagcac

SEQ ID NO: 96301 - RNA, 80 nt, Homo sapiens
cgccgccgcgccccggccccccggccgcacagggaaagcgaacgcgaaaagaaaagccgagagcagccagaccggcgaag

SEQ ID NO: 96302 - RNA, 54 nt, Homo sapiens
ccgacgagcccccggaaccacacccagaccccgagagaaacggcgagaaaacca

SEQ ID NO: 96303 - RNA, 66 nt, Homo sapiens
gcggcggagcaggacgcggaacacccagaggccagcacaacaaaacgagccacagggaagagcagc

SEQ ID NO: 96304 - RNA, 68 nt, Homo sapiens
acgggcagcacaccgcaggcgcaaagcaagaaagccacgaagaccagaacgcggcacagccagggacc

SEQ ID NO: 96305 - RNA, 66 nt, Homo sapiens
agccggaagcggcaggccacaaagccacagacgagccagagaggcaccaacacaagagaccacccc

SEQ ID NO: 96306 - RNA, 76 nt, Homo sapiens
ggcagaccaggacacgaggcaacaagacgccagaaccaccgggaggcgaaaagagacagggcaaacggcccagcaa

SEQ ID NO: 96307 - RNA, 70 nt, Homo sapiens
ggagcccgggacgcgcgacgcccgcgccccgcggagcggaggcagacacacacggggggagagggagggg

SEQ ID NO: 96308 - RNA, 58 nt, Homo sapiens
ccgaacccaaaaacaacgcaaaggacccgagccccaaagacagaaaagccccgagacg

SEQ ID NO: 96309 - RNA, 57 nt, Homo sapiens
ccgcagagaccgaagaccaaaaagcgccccgagcgccgacagcacagaagaaccagc

SEQ ID NO: 96310 - RNA, 83 nt, Homo sapiens
acccccggaaccgcaaacccaacagaacccaacgccccaccagccaggacgcagggcgccggaggcccagggcgggcaggcag

SEQ ID NO: 96311 - RNA, 55 nt, Homo sapiens
gggcggccaaccgcacagacgaccaggcgcgaccagccacagaagccagccaaca

SEQ ID NO: 96312 - RNA, 57 nt, Homo sapiens
acagaggcaccaaggaccccaagacagagaacccagccgggcaccagagggagggga

SEQ ID NO: 96313 - RNA, 84 nt, Homo sapiens
cgcggccccagccacaccaagcaggaggaacccggaagaaaaaaaaaacaagagggcgaaaacgaagggcccagcaacagcaaa

SEQ ID NO: 96314 - RNA, 64 nt, Homo sapiens
ggagagcaccggaaaaccacaaagaagggaccagcgcaaacggagaacagagcgacaaaggaaa

SEQ ID NO: 96315 - RNA, 64 nt, Homo sapiens
cacaggggaaaagccaccagggaacgggcacagacccccgagcccccagccggacccccccgca

SEQ ID NO: 96316 - RNA, 90 nt, Homo sapiens
cgggcgggggcgggcgggcaaacccgcgaggagaagaggacggcccgagcaagaacacacgaggagagccacagagcacgggaggccacc

SEQ ID NO: 96317 - RNA, 58 nt, Homo sapiens
cagaaaccggaaacgccccaaagcggcccaggacgcacagagcaggaccgacgagaga

SEQ ID NO: 96318 - RNA, 80 nt, Homo sapiens
ggcccgcgccggcgagcaccacgggggcccccccagggaaaaggacggaggccaagcaacagaggagaaaagcaaaacga

SEQ ID NO: 96319 - RNA, 71 nt, Homo sapiens
aaggcccgcgcaccgccagggaagaaacggacaagcagaccggaagaccgacggaagaccacaccccgagg

SEQ ID NO: 96320 - RNA, 80 nt, Homo sapiens
gaggggcccggagcccagcgccgcgcagaagggccagagaggggaagaggaaaccggaacccaaagagaagaaacgcaag

SEQ ID NO: 96321 - RNA, 81 nt, Homo sapiens
caaagggacgccaccgaagagcccgcagacaaagaggagcaccggcccaggcggaggcaaggcggacccggcggcgcaacc

SEQ ID NO: 96322 - RNA, 70 nt, Homo sapiens
ggacacagaagaggacaggacaccccccaggcacagccacaccccagcggccaaggacgaacggggaaaa

SEQ ID NO: 96323 - RNA, 64 nt, Homo sapiens
acgacgaagcggaaggcagaagcccaaaagcaaagcagaaacccagaaagaacacacccaacac

SEQ ID NO: 96324 - RNA, 74 nt, Homo sapiens
gcagaggcggaggaaccgagcgggccgaccaccgacaggaagaacgaagcgcgcagaaaacacagaaggcaaaa

SEQ ID NO: 96325 - RNA, 73 nt, Homo sapiens
gacaaggagcgcaaggccgccccaagaccgcgggggaaacagcagcaggcgagacaccgggaggggaaaagaa

SEQ ID NO: 96326 - RNA, 66 nt, Homo sapiens
gaacacagccagcgggagcagaagaaggaccgggccacagaagggcgagcggaaaagccagggcgg

SEQ ID NO: 96327 - RNA, 72 nt, Homo sapiens
ggcagccacggagcccacagaacccggaggcggccacgaaccaagcaccgcgggggaaagccccgagaagag

SEQ ID NO: 96328 - RNA, 79 nt, Homo sapiens
ccaccaacggccacccaagcacagagaaaacggaaaaacgggagcccaagaaaccacacccgacggggacgcaccagag

SEQ ID NO: 96329 - RNA, 71 nt, Homo sapiens
cccaacccagagcccccggcagacaaggccgacgcgcacgaacacgggggcaaagacagggagagaggagc

SEQ ID NO: 96330 - RNA, 79 nt, Homo sapiens
gaaccccggaggggaggcacagcaccaaccagcggacacacggaaaagggacgggaaaagccgagaaagagaagaagcc

SEQ ID NO: 96331 - RNA, 83 nt, Homo sapiens
cccggacgggaggaccgcggacgacggccgcagaggcgcgggagagcagccggacccagaccagggagcccaggaggaggaag

SEQ ID NO: 96332 - RNA, 78 nt, Homo sapiens
ggcggcggaccccgccgaccagcaaaccaagagcacggacaccgcgccaagccagaaaccacaaacccacggcaaggg

SEQ ID NO: 96333 - RNA, 76 nt, Homo sapiens
gacagccccacaaaggagaaacaagccacgccagcggcgaccgcacgaggaagaagagaaccgaagccagaccaca

SEQ ID NO: 96334 - RNA, 78 nt, Homo sapiens
cagccacgaagcgacagaccagagaacccacgagagggaacagaaagaggaaagaacaaaggaaaagggcaaaaagga

SEQ ID NO: 96335 - RNA, 73 nt, Homo sapiens
ggaaaaggaaaccccagccgggacgggcgaagacaaagcaaggagacagacaagggagggccaagaacccgga

SEQ ID NO: 96336 - RNA, 59 nt, Homo sapiens
acgcggcgagcccaaaaagcccgcaggggcgagggagagaaggagacccgcagcgaggg

SEQ ID NO: 96337 - RNA, 82 nt, Homo sapiens
cgagacggccagaaccaccagggcgaccggacgagccaagcgcagaccgcaggccaaggacaaaccggcgaccacacacggg

SEQ ID NO: 96338 - RNA, 51 nt, Homo sapiens
aggagcgcaggggcaggcgagaagaaggacagggagagcagaaagacgagc

SEQ ID NO: 96339 - RNA, 73 nt, Homo sapiens
cgggggcagaaggaccacgccgaggcccacgcaccccgggaaacagagcaaagcagcgacaacaaagacagag

SEQ ID NO: 96340 - RNA, 72 nt, Homo sapiens
gacccccgaacccccagcccaaacccggaaacccagcggcccagccggggagcgaggcggccagggccccag

SEQ ID NO: 96341 - RNA, 83 nt, Homo sapiens
caggagaccggcgcaaggcccgagggcgcccggaggaccgcgccacgagcacccaggaagggcggcggcgcaccgcgggacca

SEQ ID NO: 96342 - RNA, 77 nt, Homo sapiens
gaccagggcggccaccgagaggaaaacaagcgggaaggggaaccccccccccagaggacagagcacccgacgcgaca

SEQ ID NO: 96343 - RNA, 74 nt, Homo sapiens
gaggagaagcggcgccggcaagaagagcgaacgagagccacgggagaagagaacaagaccacgcacgcaaaccc

SEQ ID NO: 96344 - RNA, 87 nt, Homo sapiens
gagcgcggaacagcaggcccgagcccaccgcgccgggccccggacgccgcgcggaaaagaggcaaaggcagcagcacaacgggggcg

SEQ ID NO: 96345 - RNA, 74 nt, Homo sapiens
caaagaagagaacacagacgggggacagcagcagaaaaagcaaaggggaaaaccaaaccagacgaaacagaaac

SEQ ID NO: 96346 - RNA, 35 nt, Homo sapiens
gcacagagccaacccgacagaagacccgaggaccg

SEQ ID NO: 96347 - RNA, 57 nt, Homo sapiens
gaggcgccaagaggaacgaccgaaggcgcgcacagcagccgcgcccggcgcgcagac

SEQ ID NO: 96348 - RNA, 84 nt, Homo sapiens
gacggccaggcccgggagccagaccacgcgccaacgcaggggggcggcaccagcaaaaaaagcacagcagccggaggcagcggc

SEQ ID NO: 96349 - RNA, 100 nt, Homo sapiens
ggcaaaggcaagagaacagcagcgccgcccgccgacagccaggcccgggagaaaaaacccggacaaccagcggggcacaacaagggcacaacagagccac

SEQ ID NO: 96350 - RNA, 58 nt, Homo sapiens
aaagccccaagcgacaggggagggacccaggacccccaaggccagcagggcgaaggac

SEQ ID NO: 96351 - RNA, 77 nt, Homo sapiens
ccgcgggcgccagaaggaagaggcggacggaggagcaggcgagaagagaaggaaggaagggaacacggacgacgaga

SEQ ID NO: 96352 - RNA, 49 nt, Homo sapiens
caccaacccccgcccgccgggagggcaccaccagaggccacggccgccc

SEQ ID NO: 96353 - RNA, 74 nt, Homo sapiens
cccgcgcggcgcggggaccgcggcccggccgccaggcacagagaaggcaaacgggagggcgaggacaccaagag

SEQ ID NO: 96354 - RNA, 37 nt, Homo sapiens
gcaagacgcccaagagaagaggcaacaaggcaccagg

SEQ ID NO: 96355 - RNA, 77 nt, Homo sapiens
aaccagacgccagcgggacgaggaccgagaccgcggccgggaccgagggcagagcccgcccagaacgaggacgcacc

SEQ ID NO: 96356 - RNA, 84 nt, Homo sapiens
ggacacggacggcgcgccgcgaccccagccggcgccgagggcggaaccgagcgggaaaagggacagaacaccggacacgaaaaa

SEQ ID NO: 96357 - RNA, 80 nt, Homo sapiens
gccaacggggccaagagaagcggggagacagagaagcagggccgcccccaaagccaaccaaggagaggagaggaagagca

SEQ ID NO: 96358 - RNA, 80 nt, Homo sapiens
cacagagaaaccaaaagaaccccaaaaagacagcagcgagggcagaaagggcccagccggcagagggaccggagaacgcc

SEQ ID NO: 96359 - RNA, 72 nt, Homo sapiens
cgcgcccaagccggacggggacgagcggcagaccagcccgggaaccgaacacaagggaaaacacacaagaag

SEQ ID NO: 96360 - RNA, 76 nt, Homo sapiens
ccaacacaaagcagggaggcagcgccgacaacaccgacacagaccaacaagagaccggaaacgagagaaacgaaga

SEQ ID NO: 96361 - RNA, 88 nt, Homo sapiens
cagagccggcaaccgcaaaggacaggaaaacaggaggcagaggaacaaaaaaagacaccacgagaaacagacacaccagaacgggaaa

SEQ ID NO: 96362 - RNA, 78 nt, Homo sapiens
accagagcggacgaaccgagaaacagaaggacaggcggggcgaagaacagagaaagccaggaaggcgaagggagggga

SEQ ID NO: 96363 - RNA, 81 nt, Homo sapiens
ggagcagaaaccagccacaagggaaaggcgcgaccgagacaccaccagagaagcccccaccggccggagagggacaccagg

SEQ ID NO: 96364 - RNA, 73 nt, Homo sapiens
cccccagcgggcacgcgcggcagccagccgcccgcagaaaagggcgaaagggggaaaagaaaacgcaaagcaa

SEQ ID NO: 96365 - RNA, 77 nt, Homo sapiens
caggaacagaaaaccaaacaccacaggccagaaggggagcgaacgacaacgaagagaggaaagaagcggaaaggagg

SEQ ID NO: 96366 - RNA, 72 nt, Homo sapiens
gccggcgcgggaaacgggcgaagcgacgagccgcgaggagggaaacacaaagaagacaccagaagggccagc

SEQ ID NO: 96367 - RNA, 63 nt, Homo sapiens
ccagcgccaccgccgaccgaagccgcaaaacacccccgcaaacggaagcaccaaacagaaacc

SEQ ID NO: 96368 - RNA, 55 nt, Homo sapiens
ccgcagccacggaccgcccaaccgcgacgccgaggcgggcaacacaacaaggcgc

SEQ ID NO: 96369 - RNA, 75 nt, Homo sapiens
ggcacacgagaggccccaggacaaaggacggggggaccacgaagaaggcggcagaaagggaagagccaaaacgcc

SEQ ID NO: 96370 - RNA, 89 nt, Homo sapiens
gggcccagaggcccagggaggcaggggcagaaacagagaaggaacagggagacgcgccccgggccagaccggccagacagaggcacagg

SEQ ID NO: 96371 - RNA, 79 nt, Homo sapiens
gccgcccgagccggcgccaaggcgaccccgcacacacacccaccagccacggcagcccagcggggacccagccgccccg

SEQ ID NO: 96372 - RNA, 76 nt, Homo sapiens
ccgccagacccagaggaagaggcaaccagaaagaacaaagacacccaggaacagcggaggaggacagaagcaccca

SEQ ID NO: 96373 - RNA, 71 nt, Homo sapiens
gaaaacgagcaaccgcagggggagaacgaaggaccccccgagacgccacggacaagcgccccaaagccggg

SEQ ID NO: 96374 - RNA, 63 nt, Homo sapiens
cccccgcgacacaaggggcacaaggcggaggggagcgaccgcgagaccacaagaggggaagcg

SEQ ID NO: 96375 - RNA, 72 nt, Homo sapiens
agccggaccgcgaaacagcggggccggggagcccgggccagaccccccagacccagcccaccccggagcagc

SEQ ID NO: 96376 - RNA, 107 nt, Homo sapiens
aggccgcagggcccgcgccgcccgcgggcccggcggcggcgcccgcagccagcaaggaaaacaagaagagcgaaggaaccagaccaaagagacgcaaaggaaaaaac

SEQ ID NO: 96377 - RNA, 69 nt, Homo sapiens
cgaaagaagaaaaccagcggcgcccccgccacgaaaaggcagccaggccaccaaaccccgccacacagc

SEQ ID NO: 96378 - RNA, 50 nt, Homo sapiens
acacacgagagcccccagaagacagcaaaaggggcaacagaaaaggggac

SEQ ID NO: 96379 - RNA, 84 nt, Homo sapiens
ggaagaggcgagcaggggccaccacgagcagcggcagagcagcccgaagcagcagcagcagcaccagggcagcagcacaacagg

SEQ ID NO: 96380 - RNA, 74 nt, Homo sapiens
gcagggaagaccgagcccgaccacccagggcacagaagacaaccaagacccggggagcaaggcaaacacgggca

SEQ ID NO: 96381 - RNA, 58 nt, Homo sapiens
cgaacacaagcaacagggggagcgacaggggaccagaccagaaggggggcagaaagaa

SEQ ID NO: 96382 - RNA, 75 nt, Homo sapiens
aaccaccagcagcccccagagcggaacacaggcccacaccacagggaaggcagcgccccaccccaccgcgaggcc

SEQ ID NO: 96383 - RNA, 39 nt, Homo sapiens
gcaaaaaagaggaaaaaggggggcgccggcggcgcgaga

SEQ ID NO: 96384 - RNA, 76 nt, Homo sapiens
gggaggaggcacagggccccgggaccaaggaaggggaaccacaaagaagagaaggcgggccaagaccgacaacgcc

SEQ ID NO: 96385 - RNA, 75 nt, Homo sapiens
cgcgagggcaggaagaaggcgagcggaggcgaaaaccggcaccgcggaggggcgcacccaacgcgcaccgagaag

SEQ ID NO: 96386 - RNA, 81 nt, Homo sapiens
ccgaagagccaaccacaggagggaaaccacgcaggcaaacgagaaaaagccgagaaggccagacgggcccagacccgggac

SEQ ID NO: 96387 - RNA, 42 nt, Homo sapiens
gcgggagcggcggaagcccagcgcccaagcgacgcccaggag

SEQ ID NO: 96388 - RNA, 81 nt, Homo sapiens
ccggcccgagccccgcccagcacccgccggacggccgagaccgaacagacccacccccacagaggccgaggagacccgccc

SEQ ID NO: 96389 - RNA, 72 nt, Homo sapiens
aaaagagcagcgcagaaaaaagcagggaggagcacaaacgcccaccacacagcagaaacggcagggcacgca

SEQ ID NO: 96390 - RNA, 77 nt, Homo sapiens
ccaccagcccagccacacagacggggacagaagcggacccaggcagaacacaggaaaacaagggcgacaaccacagc

SEQ ID NO: 96391 - RNA, 72 nt, Homo sapiens
ccaacaggaagaaagggagcgagggcacacgagaaacaggcaggagagaggcagcgagagacacgcagcagc

SEQ ID NO: 96392 - RNA, 80 nt, Homo sapiens
acacggcggaggcaccgacaaaccagcgaaggagcacccacccaggaacccgccaccagaagaccccgcgcccaggggag

SEQ ID NO: 96393 - RNA, 51 nt, Homo sapiens
gaggcggaagggaggaacaggccaggaaccggagcgaagaaggaagaagca

SEQ ID NO: 96394 - RNA, 74 nt, Homo sapiens
cagccaagcgccgccggaaaaagcagcacgcgagcaagccagcaagacaaaggaaaaggcggccgcagaggaca

SEQ ID NO: 96395 - RNA, 83 nt, Homo sapiens
caagaagccccaagggcgaaaaaaaagggaagaggagacaccccgggggccccgagcaaaccaggaacgaagcgcgcggcagg

SEQ ID NO: 96396 - RNA, 47 nt, Homo sapiens
ccgagccgaacccaagggggagaaggaaaccccaccacgcggcaggg

SEQ ID NO: 96397 - RNA, 83 nt, Homo sapiens
cgccccggggcgcggagccgcgcgcgcgggcgccccccgggacagcccgaagccgagcagaaagacgcgccagcaggcaacaa

SEQ ID NO: 96398 - RNA, 64 nt, Homo sapiens
accggaaccacacacaccacaggaagccagccaaagagcacagggacagaaaaacagcgcagac

SEQ ID NO: 96399 - RNA, 67 nt, Homo sapiens
gggcgaccgggcaccagcaggacccgaggccaggagccaggggcccagaagaacaaaggcaagcagg

SEQ ID NO: 96400 - RNA, 40 nt, Homo sapiens
acacacaaggagggcagaagaaggcggaggcacggcagac

SEQ ID NO: 96401 - RNA, 80 nt, Homo sapiens
aaagagccgagggcaggggaacccaggcaggaacgcagacaaaaggacagcgacagacagcaaacacagccagaacagag

SEQ ID NO: 96402 - RNA, 81 nt, Homo sapiens
gagaccggaccgagagcggaccgagagcgcgaaacgcacgagaaggcagcccaaggcgccccccggcaccgcccgcccccc

SEQ ID NO: 96403 - RNA, 71 nt, Homo sapiens
gaaaaccaacccggacacagggacccacaggaccgcgaacaaggaggccacaaaacacccggacccaccag

SEQ ID NO: 96404 - RNA, 70 nt, Homo sapiens
gcacgcaaccacgggcccccgcgcgcagccaagaggcgaggaggaggagagaacaaccgcgcacggaaga

SEQ ID NO: 96405 - RNA, 86 nt, Homo sapiens
gagagggagagcaagaccacagcgcgcggcccccacaccacacagagagcgagagagacccaaaagacacgcaagacagaaagaca

SEQ ID NO: 96406 - RNA, 91 nt, Homo sapiens
caacagcgaggggacgagaaaggcagaagaccgaagaagcagccgaacacggagcagaaacgagcgcgaacgggacccaacagaggacgag

SEQ ID NO: 96407 - RNA, 72 nt, Homo sapiens
ggagggagagcccacgacagaacgaaaagaaaggaccccagggcggagaacggaaaagcaccaggaagcaga

SEQ ID NO: 96408 - RNA, 80 nt, Homo sapiens
ggagggcagcgcgaagcgagccccaagaaaaccagaggcgacagagacagcagaagagaacccagaggaccagaacggca

SEQ ID NO: 96409 - RNA, 69 nt, Homo sapiens
gagcaggccgcggccacccggcagagacccaagcgaacagcacaaggggggggccagaaaaagaacaaa

SEQ ID NO: 96410 - RNA, 73 nt, Homo sapiens
aacacgcccaaaacgacaacagagcgccaaaaagaggaccccagcacagcacagagcagggagagaagggaaa

SEQ ID NO: 96411 - RNA, 71 nt, Homo sapiens
aggaaccaaccccaacggaagggaccagcaaagagagggccaagaacccggaggagggcagccggacacgc

SEQ ID NO: 96412 - RNA, 70 nt, Homo sapiens
gcacaccaaacggcagaggccaacagacccacacccagaaaaaacccggagaaacagagaaagaagagaa

SEQ ID NO: 96413 - RNA, 78 nt, Homo sapiens
cggagaagcaggggggccaggaggggagaggaggcaggcccgcggagaccaggcccaggaaggaacgaggaagggcca

SEQ ID NO: 96414 - RNA, 74 nt, Homo sapiens
gcgccacacgaaaccagagccgaaaaggccggccaagcaaaaggacaagcaggagacgccagggggaggaagca

SEQ ID NO: 96415 - RNA, 58 nt, Homo sapiens
ggggcacaagcccgagaaggaggaaaagcccgccaggagcacggccgggagcaagcac

SEQ ID NO: 96416 - RNA, 81 nt, Homo sapiens
gagggaagccgagagaaggcgggaagggccccaccaccaaggcacaacccgacaccagacgagacggacggcaagaacgcc

SEQ ID NO: 96417 - RNA, 91 nt, Homo sapiens
gggcagccaaggacaagagggaagaaaaacacacaaccccggcacagaagcgcaagacgggaacacgagacccccccagaagacggcaggc

SEQ ID NO: 96418 - RNA, 71 nt, Homo sapiens
cggagaaaaaagagcgcgaggacacgcgaaagggcaccacaggaggcagggaggacagcacgcgcaagagg

SEQ ID NO: 96419 - RNA, 115 nt, Homo sapiens
gccagagccggagcgcgaaggccgggacccggccccggcccacaggggggggcaaacccgagagaacggcaccgccggccaggaggagagcgcaccaccaaaaaggcaaacacac

SEQ ID NO: 96420 - RNA, 72 nt, Homo sapiens
aaaaaaaaacgcgaacaccgacggagccagccccgaaccagaagcggcaaacagcacagccagcagaccagg

SEQ ID NO: 96421 - RNA, 101 nt, Homo sapiens
caaggcggggcgggaagcggggcggcgccggacgccggccccgcgggagcaccaaaacaggcggaaaccgggccacgcggcagcacaaccaagggaaacga

SEQ ID NO: 96422 - RNA, 89 nt, Homo sapiens
cggaaccagggccgacccgggccggaccgaccccaggcggcggccaggcagagcagcccaccagggaggggagggggggaggcgcaccc

SEQ ID NO: 96423 - RNA, 80 nt, Homo sapiens
aaagacaaggagaccaggaagggaaagccccagacagagagagcaaaacgacgaaggagccaagaggaccgggacccaaa

SEQ ID NO: 96424 - RNA, 66 nt, Homo sapiens
cagggagaccaagagacagacaccgccccgagacgagaacggaggcaacccccaaagggaaggaac

SEQ ID NO: 96425 - RNA, 54 nt, Homo sapiens
gcgggcaggcagagcaccaggaaccggccgaaccagaccggagcaggggcagcg

SEQ ID NO: 96426 - RNA, 86 nt, Homo sapiens
ggcccccaacagcgccgccacgaggcggccccagcgcgggcgacaggccgacacccccagagagccgggccaagcaggcgccgcac

SEQ ID NO: 96427 - RNA, 86 nt, Homo sapiens
ggagaccagaccacgcagccacgcgggcgagcggcggggagcggcgaagccgcgggcgagcagaaagcgaagcagaagccgagaac

SEQ ID NO: 96428 - RNA, 77 nt, Homo sapiens
ggagccaccacgccggcccaccaaacagaaacgagggccccgggcgcgggagccagccgaagaaaggaaaagagagg

SEQ ID NO: 96429 - RNA, 73 nt, Homo sapiens
ggaacgaaaagcaaaaggaaacaaccgcaagaaacacagaccgcaggcgggacaagaaaagaaaaagcaacag

SEQ ID NO: 96430 - RNA, 58 nt, Homo sapiens
cagcggggaaaaacaagaggggagaagcagaccgcaccaggcgggaccccgaaaaagc

SEQ ID NO: 96431 - RNA, 60 nt, Homo sapiens
ggacacgagacgccaccaccgcaagcgcggagggcgaggagagccggaccgcccccaaac

SEQ ID NO: 96432 - RNA, 55 nt, Homo sapiens
ccaccccggcaaagcgcccagcagccacaaggacagcaaaaggagaaccagggag

SEQ ID NO: 96433 - RNA, 63 nt, Homo sapiens
gggaggagaagagaaacccaagagcccagaaggccgcagccaccggccccgagaggcaccgcc

SEQ ID NO: 96434 - RNA, 70 nt, Homo sapiens
cagacgcgccgccgggcaaaacccggaaaaaagcaccccaacaaccaggacagggaagaagccaaaacag

SEQ ID NO: 96435 - RNA, 87 nt, Homo sapiens
gaggacgaggcccccaagccgaggccggcgcggaagaggccggcggcgggacggccccacgggacccgccccgaccacagcagcgac

SEQ ID NO: 96436 - RNA, 78 nt, Homo sapiens
agaggaccagaccacgaggggagagacaacgagagaaagcacaagagaccgggcagccggcacccgcacaacccaggg

SEQ ID NO: 96437 - RNA, 67 nt, Homo sapiens
cacgagaacaggaacagaagaaacggaaaggcagggggccagcacgaaagcagccaggagaagagca

SEQ ID NO: 96438 - RNA, 85 nt, Homo sapiens
cacgacgccgggaccggccaagggcccacacaccaagaccaagacgcaaacagcagacggaagaccccacggcaaaaccacaccc

SEQ ID NO: 96439 - RNA, 77 nt, Homo sapiens
aggggagggaccgcagccacggaagagaaggacaggaggaggaaggcgagcgagagagaccgggagaagcagagagg

SEQ ID NO: 96440 - RNA, 84 nt, Homo sapiens
gagaccacaagagcccaccaggagcaccacacgcaagaaaggaagagagcgcgcccaaagggagcaaggaggaacagcgggaac

SEQ ID NO: 96441 - RNA, 81 nt, Homo sapiens
agcagcgcaggccgaggagacggcggcccgaggagggagaggacacggcccacccgggggcggccacgggggaaggcgaac

SEQ ID NO: 96442 - RNA, 75 nt, Homo sapiens
cggggggaggaggggcaggcccggcggaggacaacacagggagccagaagagaaccggagccccgacccagcgag

SEQ ID NO: 96443 - RNA, 77 nt, Homo sapiens
gcgggacccgcaccggaaggccacgccaagacggcgcggcgcgcacgagggacgccccagggagggaaggagacgga

SEQ ID NO: 96444 - RNA, 64 nt, Homo sapiens
caagagcgacaggaggagacaggcgagagaggaggacacgaccgggaccaggaggagaagcaac

SEQ ID NO: 96445 - RNA, 80 nt, Homo sapiens
gcccccaagccgcggccaggaccggcggaccggccgcccggcccagccaacaccgacggcggccgcgcgccgggccccga

SEQ ID NO: 96446 - RNA, 75 nt, Homo sapiens
ccacggcgccccgcaagacagacgcgaagcaaagcgccacccagaagacgacagcccagcaaccccccgagggaa

SEQ ID NO: 96447 - RNA, 73 nt, Homo sapiens
acaacgaccagcaccagcaaaccaaaccagggaacggagcagcaagaagaaccaagcccagaggagagcagcg

SEQ ID NO: 96448 - RNA, 81 nt, Homo sapiens
aagcggaagcggccggcaggggaaggacgagagccccccccagcgccgaaggcccgacccagcagcccggcccggcaccgc

SEQ ID NO: 96449 - RNA, 58 nt, Homo sapiens
ccaggaccacaacaagggccggaccacccagagccacacgaaagccaaagggacccag

SEQ ID NO: 96450 - RNA, 99 nt, Homo sapiens
ggaccgcagaagggagaccacagcaagacgccgggaccccggaaaccagaaagcaaacaacacccaacagcccaaagcaaaggagcaacagcccaggag

SEQ ID NO: 96451 - RNA, 66 nt, Homo sapiens
cacgaggcgcagccgacccgcaacgcggacacagccgcggaaggcgagggaacaccaaaacccgac

SEQ ID NO: 96452 - RNA, 66 nt, Homo sapiens
acaacagcggaggacacaggcaccagacgggacagaaaaccagagggaggaaggccaggaacgcag

SEQ ID NO: 96453 - RNA, 74 nt, Homo sapiens
cgcagaagcgcggcagggagcgcgggggcccgcgcagcagcgaccacgaggagccgagcccccagacacgcccc

SEQ ID NO: 96454 - RNA, 78 nt, Homo sapiens
ccgccgcagccaagcgccccggcgacagcccagacgggaggccacaccggcccgcagaggaggaaggcccgcacacac

SEQ ID NO: 96455 - RNA, 86 nt, Homo sapiens
cgccggcccgcgcgcgcaccccgcggacgccacagcgcaacaaccccggccgcgcagccgacgcgaggcccccccagcgcagccac

SEQ ID NO: 96456 - RNA, 65 nt, Homo sapiens
gcggaggggcacgagcgccacaaccccaggacagaagcaggcacacgacgcacgccgaggagaag

SEQ ID NO: 96457 - RNA, 83 nt, Homo sapiens
caggcccaccaggaagaccaggaccacaagagccccacacaaggagagcaagcagggagggcccacgaaggacagagaagaaa

SEQ ID NO: 96458 - RNA, 74 nt, Homo sapiens
aggcaacaacacgcggcccgagacggcgcggcgcgcacgagggacgccccagggagggaaggagacggagacga

SEQ ID NO: 96459 - RNA, 70 nt, Homo sapiens
gaaaggaacacgaaaacggaaaacccgaaaaggagaaccaagaagaggaggcacacgagaagaggcaaag

SEQ ID NO: 96460 - RNA, 73 nt, Homo sapiens
gcaggcgagcccgacggacaacagacaggacaaaaacgcggaggggaccagagaccaaaaaaaaaacgcgaac

SEQ ID NO: 96461 - RNA, 86 nt, Homo sapiens
cggcagagccgaacgcgagggcggcgcccggggacggagcgcgcgcaaaggacagcccagagcaagcacacggaggcccgggagcc

SEQ ID NO: 96462 - RNA, 66 nt, Homo sapiens
cggaaagagcccaggacaacacaggcaaaggcgaccaggcaccggccagggccggccacagcgggg

SEQ ID NO: 96463 - RNA, 78 nt, Homo sapiens
cagaggaaaaaagaaagagaaaaggaaagcagaagacaagcagggggacaccccagacggaccgcgagggggaagaag

SEQ ID NO: 96464 - RNA, 77 nt, Homo sapiens
gagaccacagacacagaaacaaagcgagaaaaagacaagcagagaagcagaagccgaaggcaaggcgagcccagaac

SEQ ID NO: 96465 - RNA, 76 nt, Homo sapiens
acagccacgcagacacagccagggcggagaacggaaaagcaccaggaagcagagaggaccgcagaagggaaggaga

SEQ ID NO: 96466 - RNA, 79 nt, Homo sapiens
gggagacccaggcgggacagagggagccaggcagagggcccggggacacgagcggccccagcgcccgcacaaggcacac

SEQ ID NO: 96467 - RNA, 74 nt, Homo sapiens
cagggagaaacagagaaaaccggaaacaaccaaaggcccgaggggccaggagaagcgaagcgagcgggcaacac

SEQ ID NO: 96468 - RNA, 68 nt, Homo sapiens
gaaggacccacccaggagagaccgaacaccaagccagacacgggaaccacacaagacagaagaacggc

SEQ ID NO: 96469 - RNA, 69 nt, Homo sapiens
caaaaggagaccccccggggggaaagcacgccggcacagagacacgcaggggccacgggcacagaggaa

SEQ ID NO: 96470 - RNA, 58 nt, Homo sapiens
acccccagcgcaccccgccgaaggagcgaccacagacgaccccgccccccgaggcgca

SEQ ID NO: 96471 - RNA, 56 nt, Homo sapiens
caagagggggaaggggagcgccgggagccaccaaaaacacgaggggaacaacagag

SEQ ID NO: 96472 - RNA, 79 nt, Homo sapiens
ccgccgcgcaccgacccgacgcgccggcccacgcgcggccaagaaggaagaaaccaaacgaaacacaacgaccaacggg

SEQ ID NO: 96473 - RNA, 71 nt, Homo sapiens
gcaagacagcggaagaagacccagggaaacccccaggcgaccggcccgaggaccgccgcacgaccaaacgc

SEQ ID NO: 96474 - RNA, 76 nt, Homo sapiens
cagaaaaagagagcaggaaggcacaaaggaggaggaggaggacgacgacgaggggaacgggaccggcacccccgcc

SEQ ID NO: 96475 - RNA, 67 nt, Homo sapiens
acaacgacgggccccagcagacccgcagaccaacgaaaaccacggcgccacgaagagggaaaaggac

SEQ ID NO: 96476 - RNA, 81 nt, Homo sapiens
acaggcgcgcaaacggaggaaagggcacagaggggcccagaaaacaagccagcaggcgaagacaagacccaaaaggagacc

SEQ ID NO: 96477 - RNA, 86 nt, Homo sapiens
cagaccgccgacgacgcaagcagcgggaggagcaacgggcgggcccaaagggcccgaagccccccaccagaggaagcaaggagccg

SEQ ID NO: 96478 - RNA, 78 nt, Homo sapiens
acccgaaaccgaggcgcgggagccgcaccaccaacgcggccgacaacagccggcgccgccacgcagaccgaaaagggc

SEQ ID NO: 96479 - RNA, 48 nt, Homo sapiens
gcaggcacacagagcaggaggccaggccggagagaagaacggcacaca

SEQ ID NO: 96480 - RNA, 82 nt, Homo sapiens
gacaacagcccccaaacagagccgagaaacgggagagacgcggggaggaggaggaggaagggagcggcagcaggaaggagac

SEQ ID NO: 96481 - RNA, 76 nt, Homo sapiens
gcggaggcagggaagggagagcgggccgggaccaggacggggcgaaccgagcaccagagcggggaggagacaaagg

SEQ ID NO: 96482 - RNA, 79 nt, Homo sapiens
cgcccccagggaccgaccgaacgcagcaggaggcgcagcagcacaagcaggcagacgcacacaggcccgaacaagcgac

SEQ ID NO: 96483 - RNA, 36 nt, Homo sapiens
aaaggagccacggcagacacacgaacacagagacac

SEQ ID NO: 96484 - RNA, 84 nt, Homo sapiens
gaggaagaggaggaagaagagagaccgaccccccaagaaaccccgccaggaggccacggacgaggcgaggaccagacccgaacc

SEQ ID NO: 96485 - RNA, 62 nt, Homo sapiens
cacgcagaaggaccggccacgacgcacccccagacgccgacccagaaagccagggacaccaa

SEQ ID NO: 96486 - RNA, 57 nt, Homo sapiens
gcgggggaggcgagcgcgccgcccggagccgcgcacacggagggagccggaaacaaa

SEQ ID NO: 96487 - RNA, 57 nt, Homo sapiens
gcgagggggggcgcgccggaaaccggagcgcgcagcagaaacaacgaagcaagccca

SEQ ID NO: 96488 - RNA, 82 nt, Homo sapiens
agggagagaagggagggagacaaggaggcgccaaacaagggaaccgacccagagaggaaagaaacaaggcagaaagagacga

SEQ ID NO: 96489 - RNA, 40 nt, Homo sapiens
cggcagggcagacacaacaagggaaagggagcagcaccgg

SEQ ID NO: 96490 - RNA, 67 nt, Homo sapiens
gcgccacacaaagagccgcgggggcgggacacaaggacaccaggacagcagaccacagcccggcagg

SEQ ID NO: 96491 - RNA, 65 nt, Homo sapiens
gcaagccaggacaacgaaagacccaggcagaggcagagcagacacggccgagacgccacaagccc

SEQ ID NO: 96492 - RNA, 77 nt, Homo sapiens
ccagccgaacgggaagccgacaaacagaaaggacacaaccggggaaagacagaccgaggaaagcagagagcgcccac

SEQ ID NO: 96493 - RNA, 71 nt, Homo sapiens
aagagggagccaacgcgcagaagcccagggaccgacccaagcaagaagaaggccccagcaccgcccaaggc

SEQ ID NO: 96494 - RNA, 58 nt, Homo sapiens
gcgcccggcagcccgccacagccacggggcgagaggcaagacaaaagaaaaccccaga

SEQ ID NO: 96495 - RNA, 51 nt, Homo sapiens
cggaacagccccaccccgcaccaacagcaggagagccagacaccaggacca

SEQ ID NO: 96496 - RNA, 80 nt, Homo sapiens
gcagcgccggaggccacgcaagcacaagacccagagcagccgggaagacccacaagaagcggaggaagggggccacgcca

SEQ ID NO: 96497 - RNA, 77 nt, Homo sapiens
caagaggggggaacggggagcgggagccaaaaagcccgaccaccggaacaaaacaggaggagaaacagaagaaagga

SEQ ID NO: 96498 - RNA, 63 nt, Homo sapiens
aaccgccgcaagaacgaccggggcccccgggggacggaccaaccaggcaaaagcagaccggaa

SEQ ID NO: 96499 - RNA, 78 nt, Homo sapiens
gaaggggagcccagggaagcccgggaccgaaaaaacgagacaggaagccaaaaacagggcagaaagaagacacagccc

SEQ ID NO: 96500 - RNA, 80 nt, Homo sapiens
gaaaaccaccgcgacgaaacgaagcacagagggaaggagaaggagacacagaaggagcagcaggagacagccagccgacc

SEQ ID NO: 96501 - RNA, 72 nt, Homo sapiens
acacagagcaggaacgcagccggggacaccaaacagggggcacaccacgagaggacgcacagcccgaaacag

SEQ ID NO: 96502 - RNA, 61 nt, Homo sapiens
agaccccgcagcagaagaggggaggaagaacggcaaaacggaggagcagagcgaaacggaa

SEQ ID NO: 96503 - RNA, 53 nt, Homo sapiens
ccggaaccacgcaccagacaacacaggacaaggccgacgcgcacgaacacggg

SEQ ID NO: 96504 - RNA, 67 nt, Homo sapiens
gacggcggggagagaaaacccagcgccaaaggaggggagaagagggagacccgaacgaagacgcagc

SEQ ID NO: 96505 - RNA, 73 nt, Homo sapiens
gagaaggagagagcgacaacaaaaaaggagcaagaggggggggcccccccgaagaaaggaaccggggagcggc

SEQ ID NO: 96506 - RNA, 42 nt, Homo sapiens
ggggggaggacccgaccaggagaaggcaaccaaaggcaggac

SEQ ID NO: 96507 - RNA, 81 nt, Homo sapiens
ggagcgagaccgggcggccacagccgcagggagaacccgaggcgggaagggacggggagcaccagccaaggccccggccca

SEQ ID NO: 96508 - RNA, 72 nt, Homo sapiens
gaagaaccgcagccgagcggggccggccacagggagcacgccggaaagcacagcaagggaaagaacaggaag

SEQ ID NO: 96509 - RNA, 81 nt, Homo sapiens
cacgccaggacggaggacaggaagggaacgggaaagcgcaacaggacccaaacaggaaacaagacaaaggaaggcaaaaag

SEQ ID NO: 96510 - RNA, 80 nt, Homo sapiens
ggaggacgcgaggggcggaggcgggagaggcgagccgcgagagggccggcaggcccgggaaggaccgagccacccccacc

SEQ ID NO: 96511 - RNA, 85 nt, Homo sapiens
ggaaacagcaagcgaagccgaaaaagcgcccgagacgggcccgccgaaagggcacgagcagccgggggaagcagcggcagaacca

SEQ ID NO: 96512 - RNA, 78 nt, Homo sapiens
cgccacgccgccagaccgcgcgccaagccgcacgcaaccaccgcccggccacaccaggaccggccccacacgcaaccc

SEQ ID NO: 96513 - RNA, 77 nt, Homo sapiens
gccgagccccgacggccacccggcggcgcaggcacgcagggccaacgggacccggcgccggaaaggaaccaggagcg

SEQ ID NO: 96514 - RNA, 80 nt, Homo sapiens
accgaccagggcagcaggcacgagcaaaggaacacaacgggccaagaccgacggcagggcaaaccagacgagagagaaga

SEQ ID NO: 96515 - RNA, 73 nt, Homo sapiens
acgcccccggcaggggaggcccgcccggccccacggcagaacagaggcacacccagaagccacaggagaagca

SEQ ID NO: 96516 - RNA, 54 nt, Homo sapiens
cccccccgcgccgccggcacgcgagacccccaacccaaacccccaaggacaaca

SEQ ID NO: 96517 - RNA, 78 nt, Homo sapiens
gacgaagagccccagccccggccgggccgaccggcagcagggccagcaacagaagaaagcaagcaccggggaaagcgg

SEQ ID NO: 96518 - RNA, 78 nt, Homo sapiens
ccggaacccgcgcgcgcccacgacgccgaggacccaaagacaggaccacgcaccagcagagaaggaaagcaaaccgaa

SEQ ID NO: 96519 - RNA, 70 nt, Homo sapiens
ggagaagacaggagagagcgccaaggaccggcaagggcaccccagcgccaccgccaggacagagggagca

SEQ ID NO: 96520 - RNA, 79 nt, Homo sapiens
cagcaccagcaagcggcaggcgcgacgggacaccgaacccgacgcaccacgccgcagacgcggggcagcgcacccagcg

SEQ ID NO: 96521 - RNA, 89 nt, Homo sapiens
ggagccggcggcgcggggcgaggacggcggcggaccggggcagccccgcgcccggccagggcggagaacggaaaagcaccaggaagcag

SEQ ID NO: 96522 - RNA, 73 nt, Homo sapiens
cagacggcgccccaagaccaaaaaccagacgagagacagaagacgaaagggcaagaaagagagcacggacaag

SEQ ID NO: 96523 - RNA, 66 nt, Homo sapiens
gaacaggacccaacgccaacgagagcagcaaaaggaccccgagcaggaggagcaaccagaacgaga

SEQ ID NO: 96524 - RNA, 72 nt, Homo sapiens
caacccaaacagcgaggccaaaaagagaggaggaagaagacaaaggaaaagagcccagccaagcccgcccgg

SEQ ID NO: 96525 - RNA, 72 nt, Homo sapiens
aaagccccaccgcgccccagcggccacggagggagaacgccagaacaggacagaggggaacagcagaagccg

SEQ ID NO: 96526 - RNA, 76 nt, Homo sapiens
aaggcgggcaggagaaagggcggaaccacaaggcaccacgccgcccagaacagcacaagaaccgccgcgcccaggc

SEQ ID NO: 96527 - RNA, 60 nt, Homo sapiens
cgccggcgcgggaaacgggcgaagcgacgagccgcgaggaggaggagagaaagaacccac

SEQ ID NO: 96528 - RNA, 75 nt, Homo sapiens
ccgcaagcgggacacaggcaaggaaccgaaggaacaagccaaaagggaggagcagcagagcgaacagcaagcaac

SEQ ID NO: 96529 - RNA, 83 nt, Homo sapiens
gaggcgccggagcccggaacccgccggagccagccagccgcccgagcaccagcagggggggccccagcccggccgaacgggcg

SEQ ID NO: 96530 - RNA, 53 nt, Homo sapiens
gaaaaggaaccccgacaccggaagacagaccgcgaggccacacccaagaccga

SEQ ID NO: 96531 - RNA, 77 nt, Homo sapiens
ccagcgcccgggcccgaggaggcagccaagccaggccgccacgcggcgcacgacgacggagagaggaagaagacggg

SEQ ID NO: 96532 - RNA, 79 nt, Homo sapiens
aaggagagcacggacgccaagacacgacaagacgaccgggaaagccagggaggccgcgaaggcaggcggaggaccccag

SEQ ID NO: 96533 - RNA, 78 nt, Homo sapiens
caaaggagcgagccggagcgccagcccaccggacacgagacgggaaacaccaaggaagaagagacgaccgagaccagg

SEQ ID NO: 96534 - RNA, 76 nt, Homo sapiens
acacaaccagcgccgccgccaccgccaaggaaggagggccccggagcagccacaccaccgaggccccacccagcac

SEQ ID NO: 96535 - RNA, 50 nt, Homo sapiens
gcccgcacaagccagaggccaacccaggaaggaaagaggcagaaggccag

SEQ ID NO: 96536 - RNA, 75 nt, Homo sapiens
gcggagaaaaccaaggcgcggaaaggaagaggggggccggaggccaagcagagggcagcgcagcagaagcacgcc

SEQ ID NO: 96537 - RNA, 74 nt, Homo sapiens
aacagaaagcacagacacaaggacgaacaccgaaaggaaggagaaaagacagcaaaacaaaagaaggaacggga

SEQ ID NO: 96538 - RNA, 68 nt, Homo sapiens
agaggcgcacgaacagaggcacgggaaaaaacgcagcaaacaccaggagaaagagagagcgaagcacc

SEQ ID NO: 96539 - RNA, 81 nt, Homo sapiens
cccccccccccggagccccgaggggccggagcccggcgggccggaccgacggcggcccccccggcacaaaacacacacagc

SEQ ID NO: 96540 - RNA, 78 nt, Homo sapiens
acacgcggcggaacgggggaaagagaagcacggcccgacacccaagaaaaacgcaagggaaaagagaaaaagaaagcg

SEQ ID NO: 96541 - RNA, 74 nt, Homo sapiens
ggaagcccgggaccgaaaaaacgggcggagaacggaaaagcaccaggaagcagagaggaccgcagaagggaagg

SEQ ID NO: 96542 - RNA, 75 nt, Homo sapiens
ggcacgggaagaccaccgagcaccagaacaggagcccacccagcaggcaagaacgccccggcaaggacggaggca

SEQ ID NO: 96543 - RNA, 74 nt, Homo sapiens
agagaagcaaggcccaagacccaggcggaagacccagagacgcagaaaggaaagaagcccgggacagagagagg

SEQ ID NO: 96544 - RNA, 63 nt, Homo sapiens
ccgagagagccagccaccggagcagacgaaggcaacagcccccaggggagcaaccagggagca

SEQ ID NO: 96545 - RNA, 63 nt, Homo sapiens
caccacgcaccgggacaagacaccccgcaccagaaacagcgcccaagagcaagagacgccaag

SEQ ID NO: 96546 - RNA, 78 nt, Homo sapiens
ccggcagccggcccgcagcgcgccccgggagaggcaccacaacggaggagaaagccaggaagcaccgccgcgagcagg

SEQ ID NO: 96547 - RNA, 59 nt, Homo sapiens
gcggccaacccaagggccccagcccgggcccccaacgagggcgcccaggaggcaggaag

SEQ ID NO: 96548 - RNA, 88 nt, Homo sapiens
cgcggggccgggcccgacccgagccgcggggacccggggccaagaggaagccaggcaaggaggaaaaccaggaacccggaccagcgga

SEQ ID NO: 96549 - RNA, 47 nt, Homo sapiens
gcgagcccggagaagaggaagcaacccccagccacaacgcgaaccgg

SEQ ID NO: 96550 - RNA, 88 nt, Homo sapiens
cggaggccggaggaagccaggaggccgggaaccgaacacgaggacccaaagaacaaacccggagagaagaaaaccccagcagggcgcc

SEQ ID NO: 96551 - RNA, 77 nt, Homo sapiens
gccgccgcccgcagaaacaggcggggccccgggccgcaccccccaccgcaacccgccgggaagcagccgccaaaaac

SEQ ID NO: 96552 - RNA, 71 nt, Homo sapiens
gacccaaaaggcgcaggggaggccggccccagggcaagccagcgacgagacaccagaggaacacacagcga

SEQ ID NO: 96553 - RNA, 54 nt, Homo sapiens
gcggacacggagaggaaggcggagaaccccgccaaccagaggcaagcacaaacc

SEQ ID NO: 96554 - RNA, 55 nt, Homo sapiens
gaagagccccccccccaacaccgcgacacgcaggaagcccggggcggcgacggag

SEQ ID NO: 96555 - RNA, 55 nt, Homo sapiens
gccgagcacacgccgccgccgccgcacgggaaaagcacagggccaggaagcagag

SEQ ID NO: 96556 - RNA, 51 nt, Homo sapiens
gcacgaaagcaaaagcagacaaggacgccaaggggacacaggcccccaaac

SEQ ID NO: 96557 - RNA, 59 nt, Homo sapiens
agacacagccggcgaggacccggagaccaaaaccaaaccagccagggcacccccgagag

SEQ ID NO: 96558 - RNA, 53 nt, Homo sapiens
gggcgcccccaaagaagggagacgagcaaagaacgggacacggagacggacaa

SEQ ID NO: 96559 - RNA, 46 nt, Homo sapiens
ccgccgaagccacacgggagccgagacgaccaaaccgaaaccgcca

SEQ ID NO: 96560 - RNA, 82 nt, Homo sapiens
ggggagcagggcgagagggcaccgcggacggggccgcccaggaccagacaacagacgaacgagcacagcacaacgccagaaa

SEQ ID NO: 96561 - RNA, 78 nt, Homo sapiens
ccggcgggcccgaggcggcgagagaggcaggcggagccgaccgggccaggaccgacaagacggaaaccgggaggggga

SEQ ID NO: 96562 - RNA, 78 nt, Homo sapiens
cagggaccaaccaaagacgccaaggagaaggcagaccggcccaagaagagaaaggagcggacaacaaagaagggcccg

SEQ ID NO: 96563 - RNA, 70 nt, Homo sapiens
ggcgccgcgcccacggccagacccagggagaagagaagaccagagaaagaacaaccccgcgcacaagaca

SEQ ID NO: 96564 - RNA, 74 nt, Homo sapiens
cggacggggcggggggaacggcccgagcaagagaagcagccggagcccaccgggccagagggcaaagagaaagc

SEQ ID NO: 96565 - RNA, 53 nt, Homo sapiens
cgaaaaaaggacagagccaaaccaaggcaaaagcagaccggaaaacccaccgg

SEQ ID NO: 96566 - RNA, 88 nt, Homo sapiens
ccgcgcggcgccagcccccgccacggccgccggagagcagcaggcaccgccagggaggagagcggggcacgcgcccaacgcgcaagaa

SEQ ID NO: 96567 - RNA, 68 nt, Homo sapiens
cccccccaaaagcaggagcggaggggggggaagacaacccggagaacacccaggggacgcccagacca

SEQ ID NO: 96568 - RNA, 59 nt, Homo sapiens
acagcgcgcggccagccccagagcagccggcaccaccccagaggcaccacgaagacccc

SEQ ID NO: 96569 - RNA, 78 nt, Homo sapiens
ggacgacgaggaggagacgaccggccggaaaaccgcaagaccacagcagccagggccccccacgcgagaacccgggcc

SEQ ID NO: 96570 - RNA, 63 nt, Homo sapiens
gggccccgacagacgccgggcagccagacagacacagcacagcagccacgaagagcaaagcaa

SEQ ID NO: 96571 - RNA, 84 nt, Homo sapiens
ccgcgaacggggccagcgccgcgcccggggccggcgcccgggccaccggccgcaggaaaccccccaggcaagaggcgcaggacc

SEQ ID NO: 96572 - RNA, 60 nt, Homo sapiens
cccggggaagccaccgcacagcgaccagggcagagccgaggccggacagagacgagagca

SEQ ID NO: 96573 - RNA, 79 nt, Homo sapiens
acaccgccgccacaccgccgccacaccgccgcgcccagcagccgggcgagcaacggcccaaccaacccccggaccgcaa

SEQ ID NO: 96574 - RNA, 66 nt, Homo sapiens
caccaaaacagcgcggcagaagagcacagaagcaccagagacggaggcaacaacgggcaaaggcag

SEQ ID NO: 96575 - RNA, 76 nt, Homo sapiens
aagaaggccgccagacacgaggcaacacccgccgagcacaggcgaccggccacagccagaagacagaacccaggag

SEQ ID NO: 96576 - RNA, 31 nt, Homo sapiens
ggcagcaaagaagagaacggagacacagcgg

SEQ ID NO: 96577 - RNA, 73 nt, Homo sapiens
gaccgagcgcggacccgccggccccgccccgcgccagcacccccgcaaggccaccggggggccacaaccaccg

SEQ ID NO: 96578 - RNA, 87 nt, Homo sapiens
caggcggaggcgcgcgggagccggggcaccacagagagcggagcagacagacagcgaacacggaagccacgaaaagcaaaagcacag

SEQ ID NO: 96579 - RNA, 56 nt, Homo sapiens
caggcacagccaccggccagccgggcgggacccgccgaagacagaaccgaggaaaa

SEQ ID NO: 96580 - RNA, 78 nt, Homo sapiens
gcaggaaaagaaggggaccgcaaagaaaaggacggggcagaacaagaaagcaacaaccacagagaacaagacaagcga

SEQ ID NO: 96581 - RNA, 95 nt, Homo sapiens
cagaaccacaggaaagcagcgaggaacacagccccaagcaggagggagggagaagacaccgccccgacaacgaggaagggagagaaaagaggacg

SEQ ID NO: 96582 - RNA, 74 nt, Homo sapiens
aaaagcacacgcgacacacaaagacgagggaaacaaccagaggaagaccaaacaaggccaggaagagccagaga

SEQ ID NO: 96583 - RNA, 73 nt, Homo sapiens
gcccgacgcacgcaccacccgccacccaccagccgcaacgcgagggcggagcccgggaagcaggcgcaaaaac

SEQ ID NO: 96584 - RNA, 78 nt, Homo sapiens
gggaaaggagcagagagagagagcagaaggaaaacgcaaaaccagaagcgcgccgacacggcccgggcagccaggagg

SEQ ID NO: 96585 - RNA, 80 nt, Homo sapiens
cccgagcgaagccaagccgggcggcaggccccacaccggaggaccaccagagacaggacaggaccagcaagccgacaccc

SEQ ID NO: 96586 - RNA, 77 nt, Homo sapiens
ccgcagccccccgcccggaggccgggaagccagaacacaaacaaaggagccgggagacagacagggcggcgaccggc

SEQ ID NO: 96587 - RNA, 72 nt, Homo sapiens
gaccccgaggcgagacggaaaggcagaaccagagaccacagaagaaggaagggccacccaggacaggggcac

SEQ ID NO: 96588 - RNA, 79 nt, Homo sapiens
gaccgagaccgcggccgggaccgagggaccgggaccggcgggccgggggcgaaggagaagccccggggacgaagacgcc

SEQ ID NO: 96589 - RNA, 60 nt, Homo sapiens
agaacagcaaaagagcacaagaggcccaagccccgaagccgaagccacgccccacaggaa

SEQ ID NO: 96590 - RNA, 64 nt, Homo sapiens
gcggcgaaacgaggccaggagaagccccggagagaggaggaagaagccagacgacagcaggagc

SEQ ID NO: 96591 - RNA, 75 nt, Homo sapiens
agaccggagaccgcgcagaagacacgcccggaagaccagccaacagagcacgcgccaagggcacacgcagaggga

SEQ ID NO: 96592 - RNA, 81 nt, Homo sapiens
cggaaccagaagcagagccaacagaccgaacaaagcccgagaaccggaacagaaacggagaagcggagggaagaggaagga

SEQ ID NO: 96593 - RNA, 65 nt, Homo sapiens
aaccgaaagccagcagcggggcgaccagacgaggggagacggacgggggagagaggccaaacgga

SEQ ID NO: 96594 - RNA, 74 nt, Homo sapiens
ccccgcgccccaccagccgggacacgacgaaaggaagacaccaaaccaacggccaagaaaggacaccggaaaaa

SEQ ID NO: 96595 - RNA, 61 nt, Homo sapiens
gagaagccgaaagaacaggacccaggggccaggaaggaggagcagggcccagcagcgaagg

SEQ ID NO: 96596 - RNA, 71 nt, Homo sapiens
gcggccgagacaaaggcaccaggccaccacagaaacaaaagcaacaaagaggcaacaaaaagaaggaagac

SEQ ID NO: 96597 - RNA, 62 nt, Homo sapiens
acaaaccgaagaacagcgggaaagaaggcaaaacacggaacagagcgggagagccccccacg

SEQ ID NO: 96598 - RNA, 37 nt, Homo sapiens
ggcggcccagaaagaagaaaccccaagagggaacgcc

SEQ ID NO: 96599 - RNA, 67 nt, Homo sapiens
cgcggccaagacccgccgcaagcacccagccaaacccaggcccgagaagaagaggaaaacccaccac

SEQ ID NO: 96600 - RNA, 77 nt, Homo sapiens
aacaacgaacagaagcacaaccagagccggccccgcacacaaccccgggccgccccccaccagaagagccagacaga

SEQ ID NO: 96601 - RNA, 58 nt, Homo sapiens
aggaccgaaacagaaacggaacaccaaggacacggaggcagaggaagcagaccagaga

SEQ ID NO: 96602 - RNA, 57 nt, Homo sapiens
ccgagacggaggagagcacggaaaccccaccccgagcagaagaaacaggacagaggc

SEQ ID NO: 96603 - RNA, 82 nt, Homo sapiens
acacgcaggccgggggcagccggcagccgcagagcggggaggaggcggggcccgcggaggagccggcggccgcagcgaggca

SEQ ID NO: 96604 - RNA, 74 nt, Homo sapiens
gccgaccccccggcgccgcgccggcggcggggcgggaagaagcccgccgccaccaccccaccaccagcgcagca

SEQ ID NO: 96605 - RNA, 61 nt, Homo sapiens
ggccagcaacagagcgggccggggacgagaagccggccccaaacaggaacacgaagagccc

SEQ ID NO: 96606 - RNA, 61 nt, Homo sapiens
cgggaaacagggccccaacaaagagccgaagaccggaaacccagcaggacgaaaacggaag

SEQ ID NO: 96607 - RNA, 76 nt, Homo sapiens
gcggcgcggcgccggcggagggaagaagacggcgaagcaccaacgccaagaggaggagagaaagaaagccagcgca

SEQ ID NO: 96608 - RNA, 74 nt, Homo sapiens
gcgcgggcggaggcaaaccccacagagccacacacagacaggaaaaagggagaaagacagcaaagaaaaggaga

SEQ ID NO: 96609 - RNA, 74 nt, Homo sapiens
cagcacacaaaccccgacagaaacgccaagaggccaacccaacagaagcgccacacacccaaaagaagagaaga

SEQ ID NO: 96610 - RNA, 90 nt, Homo sapiens
gcgcccccacagagaagcagagcagcacaagccagaaccgaccgcgcacaggggaaggaaagaagccagcacacagacaggaaagaaaac

SEQ ID NO: 96611 - RNA, 67 nt, Homo sapiens
acgagagaaacagagagaaaagccagcagaggaaccggccacaaacgaacagcgaaacggagaacgg

SEQ ID NO: 96612 - RNA, 79 nt, Homo sapiens
cggcaaacacccagacggccaggaagacagaaaggacgccagaaagagggcaacggccgacgaacaccgcccaacgcag

SEQ ID NO: 96613 - RNA, 85 nt, Homo sapiens
cacgaccggcggggcgcgccaaggacacggcacaccgaccgacgcgggcgacgcacgaggcacacaggaaggaggggagcaggga

SEQ ID NO: 96614 - RNA, 80 nt, Homo sapiens
aggccgcaagggcggggagaaagggaagcaggggacgcagcccgaagaagcagaagcgagggcagagagcgacggaagga

SEQ ID NO: 96615 - RNA, 74 nt, Homo sapiens
aaaaggaggaaaacgaccagcaggaaacgaagggagcccagaagcgggaacaaagcaccaaacgcgacgggagg

SEQ ID NO: 96616 - RNA, 74 nt, Homo sapiens
gggacgcgcgagccggccggggggaaggccagacgcagaggaacgaaaaggaaaagaagaaccaaaagaaaaca

SEQ ID NO: 96617 - RNA, 71 nt, Homo sapiens
caccaacaggaacagggcagacgagcggaggacacccaacccggcagaaaagagacacacaaaggaagcaa

SEQ ID NO: 96618 - RNA, 74 nt, Homo sapiens
caaggcccgagccgggaggaggaagagccaagcgaagcaagcagacgaaagaacaaagcagagcagagcagaac

SEQ ID NO: 96619 - RNA, 66 nt, Homo sapiens
agagcgagcgagggggggcgcgccggaaaccggagcgcgcagcagacacaagcgggacggaagagg

SEQ ID NO: 96620 - RNA, 79 nt, Homo sapiens
cacccaccgagcgccgggcagcggcacgacgccacgggacaaggccacgccaagcggggcccacagacgcaacccgcag

SEQ ID NO: 96621 - RNA, 79 nt, Homo sapiens
cagccgccccgggcacacaccccgacccgcccccccagagcccaaaaggcagagcgaggagagaagaaggagggaaagc

SEQ ID NO: 96622 - RNA, 86 nt, Homo sapiens
gccgcgcggcgggaagcggcggcggcggcccagcgccaagaggcaaaagcagaccggaaaacccaccggcaagaccacacccgagg

SEQ ID NO: 96623 - RNA, 71 nt, Homo sapiens
agacagcacgagaacagcagaaacagcgcccacagaagaaggcaccgggaagaagagaaggaagaagaaga

SEQ ID NO: 96624 - RNA, 75 nt, Homo sapiens
acggaacacgagggaaacagcccggaccggcagacccagcaaaagcgccacagaacgacaaaacggaaggcagag

SEQ ID NO: 96625 - RNA, 76 nt, Homo sapiens
agcacggggaaacgaccgccccaaaacggcggacagagccaaccgagggggagacgcaaaagcgcccagcaacaaa

SEQ ID NO: 96626 - RNA, 67 nt, Homo sapiens
ggcgaaggacaggggccagacagcgaaagaaccggaagaccgcccccgacaaagaagacgccccaaa

SEQ ID NO: 96627 - RNA, 82 nt, Homo sapiens
cccgcacagacgacaggggcccgccgggcgagggaacggcgcaagcggagcggaggccccgccggccccaccaaggggagaa

SEQ ID NO: 96628 - RNA, 89 nt, Homo sapiens
cggcacacgcgcagccccggccccggcccgccggagaaacagggacgaacagcggggacgccccagcagaccgcccaggagaggaaagc

SEQ ID NO: 96629 - RNA, 72 nt, Homo sapiens
agacaggccaccacaggaggagcagcaagccagaggacggacgagcaaaggacagaccagacgaaccagcaa

SEQ ID NO: 96630 - RNA, 83 nt, Homo sapiens
acccccagaaccggaagagagcgggaaccagaaaaaacagcaaggggaggcggagcaacaggacagaggacgcagaaaacaac

SEQ ID NO: 96631 - RNA, 60 nt, Homo sapiens
ggcgaagcgacgagccgcgaggagccgcaccggagagcccgccggcgccgagggggcggg

SEQ ID NO: 96632 - RNA, 40 nt, Homo sapiens
ccggggagaagccaaaacagcaacgccgagaacgacagca

SEQ ID NO: 96633 - RNA, 76 nt, Homo sapiens
cccaggagagacagccgacccagaaacaagcgacgacaggagacccacaaggggacacagacacaggccccacggg

SEQ ID NO: 96634 - RNA, 96 nt, Homo sapiens
gcagagccaagggcagccagggcagagcgcagccggccccgacaacaccaaccagggaagaagaggagaacgaacggagaccaagaggagaggaga

SEQ ID NO: 96635 - RNA, 59 nt, Homo sapiens
ggcgaaggcggccgggccgggcccgcccagagggaacccaccagaaaacgacacacaaa

SEQ ID NO: 96636 - RNA, 72 nt, Homo sapiens
ccggggcgcagcggcagagcaccagaagaaaggagagagccgaaagagaaaagcgcgcgcaaaagaggagga

SEQ ID NO: 96637 - RNA, 78 nt, Homo sapiens
caggccgagcccgagccgcagcacgagccaaaccgaggggagcccagcacgccccacccgggaaacccaaaagagaaa

SEQ ID NO: 96638 - RNA, 79 nt, Homo sapiens
cgcgcgcccgaggggcggacccccgccgcgacccgggagaacagggccgaagaagggagacagacaagagaaagagggc

SEQ ID NO: 96639 - RNA, 68 nt, Homo sapiens
ggacgaagcccccagaaagacaccgagaggacggcagaaccagcggaccaggagcgccccccacggaa

SEQ ID NO: 96640 - RNA, 42 nt, Homo sapiens
agggggaaaagccgccagggaccagaagcggcagcaacaacc

SEQ ID NO: 96641 - RNA, 82 nt, Homo sapiens
cgagggcacgggaaaaacacagaaaagcccacgaggaaaaacggccaacaaaaacacagcgcagacggacagaaacagacac

SEQ ID NO: 96642 - RNA, 64 nt, Homo sapiens
ccgaagcacacgcgcccacagcgggcgaaccccaccagcacggcagcccgacaaaggcagcagc

SEQ ID NO: 96643 - RNA, 72 nt, Homo sapiens
gagagacggcggaaaagcggacagccaagcaccacaggggacaccaagaacgaagcacccagaccagcaaaa

SEQ ID NO: 96644 - RNA, 74 nt, Homo sapiens
agaagccccacccaacgcggagcgagagaggagccacccgaaggcgaacgggggcacggaacccgacgagcagg

SEQ ID NO: 96645 - RNA, 89 nt, Homo sapiens
ccagacgcgcaacgaaagaacaaaaccacgcagcaacagagggagacgcgcacggaccggaaccagaacaagacgaaagacaacgagcg

SEQ ID NO: 96646 - RNA, 82 nt, Homo sapiens
gcaacaagcgaccaggacgaaaagaacaaaaccagccaagcagaggagaaaaagacagcaccccagagccagaaccagagga

SEQ ID NO: 96647 - RNA, 119 nt, Homo sapiens
gccaccaccacgccagccgcaccagccgcccaagccgcacagccgcggcggcagcagcaggagaggggacgcggacgcaacagggaaaggagaccccaacaagccgcggggcaaaagcc

SEQ ID NO: 96648 - RNA, 58 nt, Homo sapiens
ccacagcggccaccgccggcgggcaacaggagagcaagcccacccgcgagaagcggaa

SEQ ID NO: 96649 - RNA, 80 nt, Homo sapiens
ccaccaggccccaggggccggcccccccggggcaacccagacggcaacaaaggcgagggcggagaacggaaaagcaccag

SEQ ID NO: 96650 - RNA, 80 nt, Homo sapiens
caggggccaggggcaagggccggcccggcccgacgacaccaggcagggcgccggagccgagagcgccgcgcggcgcgccc

SEQ ID NO: 96651 - RNA, 79 nt, Homo sapiens
acagcggaagaaacgcacacgaagaacaagaaaaagcacaagagcaccaacgaggagcagccaacaggaagaagagcca

SEQ ID NO: 96652 - RNA, 60 nt, Homo sapiens
cgccgcaaacagcccgccagacacggcaggccaagaagcaccgagcccaaagaccacggg

SEQ ID NO: 96653 - RNA, 77 nt, Homo sapiens
gacgaggaggcggagcggacaaaggacaacccccaagaaagggagcccagaacgaaacaacccagcagagacccaca

SEQ ID NO: 96654 - RNA, 70 nt, Homo sapiens
gccgaccgagcaccaggcgcggcaccgacgaagccgcaacccgagagacccaaaagggacaagggagcag

SEQ ID NO: 96655 - RNA, 53 nt, Homo sapiens
ggcgcagaccgacggcaggaacagagcaggggaacagaggaccggaaggaaca

SEQ ID NO: 96656 - RNA, 54 nt, Homo sapiens
ccagccccgggcccccagagggggcaagcgcgagaagagcggcgcccacaaccc

SEQ ID NO: 96657 - RNA, 76 nt, Homo sapiens
gaagacggcaggcggaagccaagcaaagggaccggagcccccccgaaaagcaaaggcccacccaggcacagggaga

SEQ ID NO: 96658 - RNA, 80 nt, Homo sapiens
aaggaccaagaaccagaaccaaaacccgggcagaagaggagaggaggaagcagcagaagagaagaagaagcaggagaacg

SEQ ID NO: 96659 - RNA, 72 nt, Homo sapiens
ccagcacccaggcaggggacgcacaggcgcagcaggggagaaacgggagggaccccacaaccagagcacaga

SEQ ID NO: 96660 - RNA, 84 nt, Homo sapiens
gagcccgcgggcacgacccgggcggaccccggaggccgagcggcaccgcccccagcccccgggggccccggggcccccagaaac

SEQ ID NO: 96661 - RNA, 75 nt, Homo sapiens
gagagacagccacggacaagaagaggaaaggggaagaaccacagaaaagcagcaaggaccagaaggacccaagga

SEQ ID NO: 96662 - RNA, 91 nt, Homo sapiens
gcgaccaggccgggcaccccgagcgcaaggacagcgcgaggccgcgcagcccagcgcagccagacaccagccacacaggcggaccggcccc

SEQ ID NO: 96663 - RNA, 75 nt, Homo sapiens
cgggagaaaggcggagaagaggggacccaagggagagagggaacggcgaaagggcagcccggaaggagcaccacc

SEQ ID NO: 96664 - RNA, 56 nt, Homo sapiens
ggggaggcggcccaggagagcaacccccagccacaacgcgaaccgggcggacgaag

SEQ ID NO: 96665 - RNA, 66 nt, Homo sapiens
aaacccgaccccccaagcagaacaggagagagcagccgggcggcccagccaaacaggccccgagag

SEQ ID NO: 96666 - RNA, 80 nt, Homo sapiens
ccggaccagccgaaaagccccgcccgcccggaagaggccagcccaagcggccaggcgagggaccagcgaggagccgcacc

SEQ ID NO: 96667 - RNA, 77 nt, Homo sapiens
gagccccccggcgggagccccgcgacgcgcccggcccggagcccccagcgcagcggccgcgccccagacagccaccc

SEQ ID NO: 96668 - RNA, 82 nt, Homo sapiens
gcaagaagagccagggccgggaggacaccagagaagagacgccaacagaccggggagaagggaccgcgggagcagggaagga

SEQ ID NO: 96669 - RNA, 57 nt, Homo sapiens
gccccaaaaggaaacaggacaccgaaaagcaaagggagaggacacacgaggcaaagc

SEQ ID NO: 96670 - RNA, 82 nt, Homo sapiens
agggccgggaaacaaaaggcgaaccggggaggaccgagccagagacaacaacggcccacgcccggccgcgcacgaagggaag

SEQ ID NO: 96671 - RNA, 81 nt, Homo sapiens
ggacgcgccagcaagccggccaaacaacaagcagaaacggcgaggaaagagaggagccccggaaagaaaaggacagacccg

SEQ ID NO: 96672 - RNA, 92 nt, Homo sapiens
ccgcgcgggccgggaggggacggccgccggagccgcgaggccaagcaagagaagccgagccaggccgcggagagccgcccgcgcccaccgcc

SEQ ID NO: 96673 - RNA, 81 nt, Homo sapiens
ccccccaacccagaacggacaacggaggggaggagcggcgcaggcagaacagagaagagaagaggagaggagaagacgccg

SEQ ID NO: 96674 - RNA, 72 nt, Homo sapiens
gccggaacacacacgacggcaacgggacagcacgaggcagcagacgacaggacggcagagccccaagaaagc

SEQ ID NO: 96675 - RNA, 81 nt, Homo sapiens
cgccccccggcgacagccagggacagaccccacccagcccccgcagcccgcgcaccaccaccagacacaaggggaagaagc

SEQ ID NO: 96676 - RNA, 81 nt, Homo sapiens
cggcccggcggccagccccacagcggcgcagacccaggggagcccaccagccagcaacaggcccggaagacagccaagcgg

SEQ ID NO: 96677 - RNA, 69 nt, Homo sapiens
cccgaccgacggagagaccagacccacaccggggcagggccccacgagacacagccccccagcacaccc

SEQ ID NO: 96678 - RNA, 74 nt, Homo sapiens
ggccagcaaccccagccaagcaagaaacgaggccgaagagcgaagacacggccccacgacccccaaagagagaa

SEQ ID NO: 96679 - RNA, 65 nt, Homo sapiens
aggggaaaaacgagcaacacaccaaaagcggaaccgagaaaaccccagcggccgggcaaaggagg

SEQ ID NO: 96680 - RNA, 75 nt, Homo sapiens
gcccgcagccgcagcccacgggcaaaagaacccccaccagagcccaacacccccgcagcgcggggagggaggcca

SEQ ID NO: 96681 - RNA, 86 nt, Homo sapiens
acccccacccgccgaggggcccagggaggacgcgaacgaagcgcgcggcaggcgcgcgccgccccaggccgcaagacccagcgccc

SEQ ID NO: 96682 - RNA, 91 nt, Homo sapiens
gcagaggagcgcgggcccagcgggccggaaggaggaggagcgcaggcgcccggccaggcacaccccggcacgaagcagccccgaaaccccg

SEQ ID NO: 96683 - RNA, 77 nt, Homo sapiens
aagggaaagcccagaacagggagcggaggcacgcgccaggagaaggcaaggacgcaccaagggccacaagggggccg

SEQ ID NO: 96684 - RNA, 82 nt, Homo sapiens
cggcggcggcgcccccgggcccggcccggccgcggcccccgccgcggcacgaccccacagacaagcggaaccagaaccaaaa

SEQ ID NO: 96685 - RNA, 48 nt, Homo sapiens
acccacaaaaacgaagcacaacacacaagggaagacagaccagacaac

SEQ ID NO: 96686 - RNA, 78 nt, Homo sapiens
aggcgcccgggccccgcaccaccccgcgcccccgcgccgccccgaagcccagccgaccgccgaagagggccacggggc

SEQ ID NO: 96687 - RNA, 54 nt, Homo sapiens
cggccagcaagacccgagcccagaggcccacaagcggcacccaccaagacaaac

SEQ ID NO: 96688 - RNA, 82 nt, Homo sapiens
gacgcgcgcgccggagcggggccgaggccgaaggcccgcggcgccccggcgcagccgcaaccagggcgccacacagaaagaa

SEQ ID NO: 96689 - RNA, 81 nt, Homo sapiens
agaggaggagcgcagcccggcccgggccaagcaggagacaaggagacaaaacacaggcagacggaccggcagaagggaagc

SEQ ID NO: 96690 - RNA, 70 nt, Homo sapiens
gaaagaagccacccgaccacgacaaggaggcacagaccccaaaacagaacagccggaggcaacagaagag

SEQ ID NO: 96691 - RNA, 82 nt, Homo sapiens
gaggaaacaacgggcacaaaaacaaccagggcacaaccagggcagcaggggcaccgccagaacccgaccgccaggaagaaaa

SEQ ID NO: 96692 - RNA, 69 nt, Homo sapiens
cggggccggcccaggggacgccgacagagccaccggaggggaagaacgcagaaaccccgcaaaaaaaac

SEQ ID NO: 96693 - RNA, 69 nt, Homo sapiens
gggccgagagccgcccgggccagcggccgcgcacccccggccggaggcaccagccaaaagacccccgca

SEQ ID NO: 96694 - RNA, 58 nt, Homo sapiens
gggggcgaccggcagggcacgccgcgagggagggccagacaaggggaacacaagagga

SEQ ID NO: 96695 - RNA, 80 nt, Homo sapiens
cacaccgaccagccgcacgccgaccggcgccgggagaccggagcaacaagaaggaggaaagaagagacaccggaaagcca

SEQ ID NO: 96696 - RNA, 57 nt, Homo sapiens
ggaccccagccccagaacggcaaacagaagacgggcaaaagagcggaagaaccaacg

SEQ ID NO: 96697 - RNA, 79 nt, Homo sapiens
aaacccaaagaccccgccggagacgagagcggacccacaaaccgggagaccaagaacggcacacggacggagagagaac

SEQ ID NO: 96698 - RNA, 82 nt, Homo sapiens
aagacccccgagaagacaaaaaaacaggaacgcacaggccggcgccagcgccagcgaggaaccgaacccagccaaaaggccc

SEQ ID NO: 96699 - RNA, 66 nt, Homo sapiens
agggggaccaggggaagaggaaaaaccgcaaaggcgggacgggacgagacccacagcagacagagg

SEQ ID NO: 96700 - RNA, 87 nt, Homo sapiens
accagggaaggggcggaggagggccaccaaaggagcacggccagccccaccacaccggaagaggagggggccccgggaaggggcccc

SEQ ID NO: 96701 - RNA, 82 nt, Homo sapiens
gccaaagggaaccgaccacagccagaccaaggaccaggaagaaacaggcccgccagcaccgacagcaacgaaaagcccacgg

SEQ ID NO: 96702 - RNA, 75 nt, Homo sapiens
cacccgcccgagagaaggaggccgcagcggggcccagcacgagaggcaccaggagaacaagagaccccccggagg

SEQ ID NO: 96703 - RNA, 70 nt, Homo sapiens
gcacgccggacgcccgacaaaaccaaagagaaaaggaacagccgaagccaggggcaagcgaaaccacaga

SEQ ID NO: 96704 - RNA, 40 nt, Homo sapiens
agcacacagacacggaagacagcgagcacccggcccaggc

SEQ ID NO: 96705 - RNA, 78 nt, Homo sapiens
gccggagggaaaggaaagcggacaacccgggacacccggcacagagaggcaggagaccgcggcaaaaagaacagacca

SEQ ID NO: 96706 - RNA, 61 nt, Homo sapiens
gagagcccaccggcaaacgggccgcaacaaacacaggcagggcggagggagaagaggccag

SEQ ID NO: 96707 - RNA, 76 nt, Homo sapiens
acgcccgggccaccaagcaagaaaccagccaccggacaaagaggccggaaaacccgcacagaaaggacaggaacca

SEQ ID NO: 96708 - RNA, 75 nt, Homo sapiens
aggagcgaccaggacggaccgggggagccaaacaacaggaggaaggcgaacaaggaccgcgacaccaacagcgac

SEQ ID NO: 96709 - RNA, 70 nt, Homo sapiens
gcccaagacaagaccaaaaggacccgggccccacacaacaagggccggaagaagaagaacccccgaggag

SEQ ID NO: 96710 - RNA, 57 nt, Homo sapiens
ggcaagacagcgagggacgaaggagaccgcgcagaaagcgaaacgacgaagggccca

SEQ ID NO: 96711 - RNA, 69 nt, Homo sapiens
cgaggccccaagccagagcgcggccaccgcccgaagcgagaaaggaccagaagagaggaagcaaacaaa

SEQ ID NO: 96712 - RNA, 65 nt, Homo sapiens
ccaagcacgcaacaaggaaacccaaaaagcccagagagccaccaaagaacaacaagagccgcaga

SEQ ID NO: 96713 - RNA, 75 nt, Homo sapiens
aacccggcaccccacagcccagggaaggcaccaaaagggggggcaggaaaggcgcaaaaggccacgccggaggga

SEQ ID NO: 96714 - RNA, 59 nt, Homo sapiens
aaacaagcaaacggcaccccaccaggcgggggagcgggaggagccagagcacaccgcac

SEQ ID NO: 96715 - RNA, 56 nt, Homo sapiens
gaaagcaggcccccccaaaggaccagcccgagagccgaggaaggcaccaggagagg

SEQ ID NO: 96716 - RNA, 69 nt, Homo sapiens
caggcccacggccaccaggccgacacaccacgagccagcaaagcggagaccaacaagaaagagaaagga

SEQ ID NO: 96717 - RNA, 76 nt, Homo sapiens
gacccagcaggggacccagccggaacgggacggggcgaaagacaaagaagcaacacagaaacggaaaaggaaccac

SEQ ID NO: 96718 - RNA, 72 nt, Homo sapiens
aaacggaagagccaaaggcacggcaaacagagaagaaagaggcaacagaagcaagaaccagcaaaggagaag

SEQ ID NO: 96719 - RNA, 55 nt, Homo sapiens
gaaacaaccgaaaagccacaaagggaaccaggaaaagccagccagcaggcaacag

SEQ ID NO: 96720 - RNA, 77 nt, Homo sapiens
cgagcacccgccccaacgaggcgaagaaagcccaaaacacaagagcagaagagaagacagcccacaaggccccccga

SEQ ID NO: 96721 - RNA, 40 nt, Homo sapiens
ccaggcagaccccgggcagcagggacgaaaaggcccaggc

SEQ ID NO: 96722 - RNA, 77 nt, Homo sapiens
gaagagcgcagcaggcgggccaaccgacgcaagggcaggaacgcacagaaggcccaaggggaccggcaaaaacggga

SEQ ID NO: 96723 - RNA, 74 nt, Homo sapiens
ggcggccccgggccgaggcgcggcgcggcgggcgcgggacgcaaaagaacaaacaaaacccgagagcaacacac

SEQ ID NO: 96724 - RNA, 75 nt, Homo sapiens
aacggacagcgggaggggcaagcaaccagggaggggggccaagggggagagccaaaacgagaaacgaagccacgg

SEQ ID NO: 96725 - RNA, 64 nt, Homo sapiens
gaccaccagaccacaggcggggcgcgggacaaccaacacaaccaaagagaagaaaacgcaaaga

SEQ ID NO: 96726 - RNA, 76 nt, Homo sapiens
aggacaacacaggggaaggagccacccagaggcacagaggacagaggccacgaagccagagcgcaaccagacgaga

SEQ ID NO: 96727 - RNA, 65 nt, Homo sapiens
ccggcccgcgggggagccccgggagccgcacgaagacgaccccgacgcaggccaggagccgcgga

SEQ ID NO: 96728 - RNA, 37 nt, Homo sapiens
aagcaacagacccagaaagaaacagccaagacgagaa

SEQ ID NO: 96729 - RNA, 75 nt, Homo sapiens
cagcgagcggaccccgaccccgaggcgagacggaaaggaggcggcgcccacgcacagccgacccgaccacgcgcg

SEQ ID NO: 96730 - RNA, 64 nt, Homo sapiens
cccgccccggaacagaaggcgcggccgaaaaagaccagaacacacaagaaccgggagaacgaac

SEQ ID NO: 96731 - RNA, 73 nt, Homo sapiens
cggcaaccaaacggcgccaaggcacaggaagagggcggcacgcggccagagagcacaacgggaggaagggaag

SEQ ID NO: 96732 - RNA, 69 nt, Homo sapiens
gaagagggaaaagcccggacaaggaacgagggaaaccccaaaacggggaagcgaaaagaacgccaggac

SEQ ID NO: 96733 - RNA, 78 nt, Homo sapiens
ggcaaaaggagcccggagagaaccacccccgaacaacaaacccacaccagagacccccaaccccacaaagggggccag

SEQ ID NO: 96734 - RNA, 66 nt, Homo sapiens
gcggaggggggggcggcggaggcggcggcaccgagggggggccgcccgcccaaggcaggaagaggg

SEQ ID NO: 96735 - RNA, 80 nt, Homo sapiens
ggaccccaaccagccccgcaacccggaccagcagaaaccagaggagggaacaggcacgccccacccgccagccgagcccc

SEQ ID NO: 96736 - RNA, 83 nt, Homo sapiens
aaggcggcgccccggccgaggggcggcggccccagggcccacgagacgcgaacaaacgccgcgccgccagaagaacagaccgg

SEQ ID NO: 96737 - RNA, 81 nt, Homo sapiens
cgaacacggagcaaggaaaagagcccggaaagaagcaacagagaggggagaacccacagggcccgaagccagcagagagcg

SEQ ID NO: 96738 - RNA, 75 nt, Homo sapiens
gccggcacaccgaccacgaagcaaagcgagaggagaaggagcgagcgagcggccagcaacagccaccccgcccca

SEQ ID NO: 96739 - RNA, 77 nt, Homo sapiens
gaccagagcacagacacaaaggaggaggcaaaccagcggacggagcgcgccccaccgcggccgccggggacacagag

SEQ ID NO: 96740 - RNA, 53 nt, Homo sapiens
agagaaagaagcacaggagagaccagcagcaaagggcaaacgaagaaaacgac

SEQ ID NO: 96741 - RNA, 80 nt, Homo sapiens
cggggaagacgcggccgcggcgccgggccgcagcggcccggacccgagaggacccgaaccacaaagacacacagaggaca

SEQ ID NO: 96742 - RNA, 69 nt, Homo sapiens
acacaacacacaggggcacgagggccacagaagaagagacgcagaacgggagggccacagcaagagagc

SEQ ID NO: 96743 - RNA, 78 nt, Homo sapiens
cgaggaaaagcccagcggcccgccaggcccggacagggcgggccgagcggggaggcccgagagacccaggggggcggc

SEQ ID NO: 96744 - RNA, 67 nt, Homo sapiens
agggcaaggacacggggaaaagacagacagaagagagaagaagcaaaccgggaccggaagcaccaag

SEQ ID NO: 96745 - RNA, 72 nt, Homo sapiens
gaacgccaagcccggccccaggaccccaagcaggcagaaaaagccaccggagcgaagcgaaggaagcgagga

SEQ ID NO: 96746 - RNA, 82 nt, Homo sapiens
ccgcgcccggccggacccgggcccgaggacaccccgggccaagaggacaacaagaagcgccggccacgccacaccagccgca

SEQ ID NO: 96747 - RNA, 71 nt, Homo sapiens
ggagaaggcgcaacgcggcgcgacaggagagacaacggaggcaagaaagacggagaagcgagaagagacca

SEQ ID NO: 96748 - RNA, 81 nt, Homo sapiens
ccaccccccgcccagcccgcaccaagaccgaaggcagcacaggaccggaaaaaacaccgaacacccaacaagaaggcaacg

SEQ ID NO: 96749 - RNA, 69 nt, Homo sapiens
agccgcagcggaaagcaggagcacaggcagccaaacagggcacagccccaaaggagaccacgaccacaa

SEQ ID NO: 96750 - RNA, 78 nt, Homo sapiens
ggcggaggcagaggggaggcgcgaaagggccgcaaaggcgaggcccccccgacccccgagcaaaaaagcagaacaaca

SEQ ID NO: 96751 - RNA, 81 nt, Homo sapiens
agaggcaggaaacgcgccggacaaacggcgggccaaagcacacaggcgaagggagggccgccccaaccgacgcaccagccg

SEQ ID NO: 96752 - RNA, 68 nt, Homo sapiens
ggcgggccagccgggaggggagagccccgcaccccccccagaaacagagaggcgcacgcggccaaggg

SEQ ID NO: 96753 - RNA, 83 nt, Homo sapiens
ggacagcgaggaaagccaggcccgcggaggagacgagcgccacggcgagaaggcgaggaggccagagggcgaaacagacacaa

SEQ ID NO: 96754 - RNA, 70 nt, Homo sapiens
gcaccccagaacaccagccccagcaccaccggggaagaaccagcgccaggacgagagaaacaggaaacca

SEQ ID NO: 96755 - RNA, 59 nt, Homo sapiens
accagaccaacgaggaggaggaaggcgggcggggcgggcgcagcgcccccacacccccc

SEQ ID NO: 96756 - RNA, 54 nt, Homo sapiens
cagcccgggcgggggcagagccaggaagcgaggaggaaagagagcccaccaagg

SEQ ID NO: 96757 - RNA, 71 nt, Homo sapiens
cggccgcaaagacaagaggacaggcgcgggagcaggagaagcacgaggggcagagacggggccacaggccc

SEQ ID NO: 96758 - RNA, 80 nt, Homo sapiens
ggaggcaccacacacaaaaaggcggcaggaccacaccccaagccaagcgggcaccaaccacccgccacacaaagacaaca

SEQ ID NO: 96759 - RNA, 73 nt, Homo sapiens
gccccagccgaggccgacagcccaggaccgagcacggggccaggagggcgcgacagagagaggcgggagaaac

SEQ ID NO: 96760 - RNA, 62 nt, Homo sapiens
cgaaggcgccggccaaaagaggggaggacgcgagcggaagagaagcaaaaagacaaggagga

SEQ ID NO: 96761 - RNA, 99 nt, Homo sapiens
ggagcacgagcgaagaaagcccgagaagacgggcgcagaagaaagaccaggaaagcaccccacgaacaaccacaggaagagacacacaagaaacaaaac

SEQ ID NO: 96762 - RNA, 78 nt, Homo sapiens
cccccacccgcgggccgcggcgcccggggaaagccgggccccgagggcggaccgaggccagaaggggagagggaagcg

SEQ ID NO: 96763 - RNA, 78 nt, Homo sapiens
caccgccccccgccaaggcgacccccaccgagacgaagcgggcggcgaagcgccgaaaagcgaaaagaaacaagccgc

SEQ ID NO: 96764 - RNA, 77 nt, Homo sapiens
accccagcggcccaagaaacaaaaaaaggaaacacacaaacgcaggaccaaagggaggggaaacaagaaccagacag

SEQ ID NO: 96765 - RNA, 79 nt, Homo sapiens
gcgacacacgagcacaggaggcggagagaagaggaagcacagcccacgacgacagcagcaccaccggggggcgcagaac

SEQ ID NO: 96766 - RNA, 38 nt, Homo sapiens
cccacgagaggacagcccaggggcaacagacaagcacc

SEQ ID NO: 96767 - RNA, 75 nt, Homo sapiens
cgcacaacgggaaccccaccaagggaaggaagacccacaagagaccacgcagagacagcacccaaccggcagcag

SEQ ID NO: 96768 - RNA, 82 nt, Homo sapiens
cccgacaagcccaccggaccccagccggagcagcccacaccggagaggcggggacccaggacacggaccgcgggacagcccg

SEQ ID NO: 96769 - RNA, 76 nt, Homo sapiens
gcggcccgggcggcggcgcggggaccgcgcgacaggccggggaagccgcaggagagaacgggagaccaccgggcca

SEQ ID NO: 96770 - RNA, 64 nt, Homo sapiens
gcccgcccaacaaacagaggacaggacaccgccaggggacagaaccacgagggacggcaacgag

SEQ ID NO: 96771 - RNA, 67 nt, Homo sapiens
aaaagaagaccgggaaccaaccaaccgaagcagggaggcccccaggggagacgcgcccaaagcagcg

SEQ ID NO: 96772 - RNA, 106 nt, Homo sapiens
acggcggggccgggccggagacgcgcccgcgcgcaggggaagcgggcaggaaaagcccggaaaagcagccaagcggaagacagagccgcaaagagacacgcagaac

SEQ ID NO: 96773 - RNA, 79 nt, Homo sapiens
gcgcagccagaacggaggaggagccgcagccaaaagggaagaggacaccagcccgggagaagaggcaacacccgagcgg

SEQ ID NO: 96774 - RNA, 93 nt, Homo sapiens
agccgccagggacgggggccaccggacagccggaaccaaaaagaagccccagagccggggccaggagccccaagcgccccagcagcaaacaca

SEQ ID NO: 96775 - RNA, 86 nt, Homo sapiens
acaaacggaaaaggccaacgcccaagggccgagacggacgaaaaacaggaaaaaacaagcggaaaaacccagaaaacaaaaaagaa

SEQ ID NO: 96776 - RNA, 68 nt, Homo sapiens
ccgagcaacagggaagcagaggagaaccgggagccacagaaaagggcaacccaacaacagccaccggg

SEQ ID NO: 96777 - RNA, 75 nt, Homo sapiens
caccacacagaaaccacgaggagcagaacaccaccccaccgccaccgggaagaaccagcgagagccccccacccc

SEQ ID NO: 96778 - RNA, 75 nt, Homo sapiens
aaaccggcggaggacggaaccaggggagagcgacccaaacaaagggcgaggaagggcggagggaggaaggaggga

SEQ ID NO: 96779 - RNA, 50 nt, Homo sapiens
cccggcaagccccgccagagagcccgaaacggagagggcagcgaacacag

SEQ ID NO: 96780 - RNA, 73 nt, Homo sapiens
cggaccaccggcggacagccccccacgcgaggccccacgcgaggcaccccaaggaggacaagcccaaagcccc

SEQ ID NO: 96781 - RNA, 68 nt, Homo sapiens
ggcggcagcggcggcgcggaggcggcgagggcgagccggaggagccagcaccccagaggcgaccgccg

SEQ ID NO: 96782 - RNA, 79 nt, Homo sapiens
gcacgggcacagacgaaagaaggccaaagaagcagaacgacaaaagccaagggcaaacggcacggaaagaagaaggcaa

SEQ ID NO: 96783 - RNA, 57 nt, Homo sapiens
cgacaaggggcggaggaagggaggagacccgaccccagaaggcggacgaagcccgcc

SEQ ID NO: 96784 - RNA, 40 nt, Homo sapiens
aggacgcggggaccggggccacgcacccgagggacccgag

SEQ ID NO: 96785 - RNA, 111 nt, Homo sapiens
acggagagggggcaccagcgaccacccaaggggcgcagcagggccagagagcccgaccaagcccaaagggacaccagcaccgagccgggaccccggaccaccggcaagcga

SEQ ID NO: 96786 - RNA, 56 nt, Homo sapiens
acagccaaaacagcacaacagcggcaaaggcaaaccaaacgcaagaccagggcgga

SEQ ID NO: 96787 - RNA, 80 nt, Homo sapiens
aggagaacgacaacacgggcacaaacaccaaccaaacaggagagcgcagagcccgggcccccagcgggaagggcggcggg

SEQ ID NO: 96788 - RNA, 31 nt, Homo sapiens
aagaccagcaacaaagcagagagaccagaac

SEQ ID NO: 96789 - RNA, 60 nt, Homo sapiens
aaccacagaagagccaaaaccaaaaccaccccaaacagggcgcccgaagggcagacagga

SEQ ID NO: 96790 - RNA, 78 nt, Homo sapiens
ggacaagacaggaagcccaagcagcaaccaaaagagccaaggacccaaaaaccaggagacagaggccagcgcccaggc

SEQ ID NO: 96791 - RNA, 70 nt, Homo sapiens
acgccaggggccgggcccacacagcggagggcccccgaagacagcgcagcccgaaccacaccaggaggcc

SEQ ID NO: 96792 - RNA, 74 nt, Homo sapiens
ccggcaagcacccgggacccacccacagggacccagccaggagcacggggccaaccccggccgggcggaagaca

SEQ ID NO: 96793 - RNA, 59 nt, Homo sapiens
gcccaccacacaaaggccaggccaccggaaggggggcaaaaagccgacggacacaaacc

SEQ ID NO: 96794 - RNA, 76 nt, Homo sapiens
ggagaccccgagggcgcggcgcgggccgagaaggaagagaggaggacagccagaagaaagccacaggccgagagca

SEQ ID NO: 96795 - RNA, 39 nt, Homo sapiens
cacaggaaccggcccggccacaggccggcacccgggaag

SEQ ID NO: 96796 - RNA, 78 nt, Homo sapiens
ggagcgcccagaggcgagcccggggaggaagaggcaaggaagagaaaaggaaccccagccacggaagccggggaggag

SEQ ID NO: 96797 - RNA, 73 nt, Homo sapiens
gagcaacaccccaccccaaggaaaacgagcgccgaggcgggaaagaaggggcaagcaccacagaaaagagcca

SEQ ID NO: 96798 - RNA, 85 nt, Homo sapiens
acccggaaaaagaacgggcccggaagagcggagacaccgggaagcccacgggaccccaggcgggcaggagaacgacggcacagga

SEQ ID NO: 96799 - RNA, 53 nt, Homo sapiens
accggcgcacccaaacaacggaaaaaggacgaaggcgaaaggccaccggacag

SEQ ID NO: 96800 - RNA, 78 nt, Homo sapiens
gcgggccgagaaagcaaacagaaaggccaaaacccccaaggggcgacagcaagaaggagccagcacagaggcaaaaga

SEQ ID NO: 96801 - RNA, 78 nt, Homo sapiens
cgcgcgcaggcagaagaaggagccagcagagcgccaggacaagcaccccaacagagcccggagacacagagagggggg

SEQ ID NO: 96802 - RNA, 76 nt, Homo sapiens
gggacagcgcgagcccaaaccaagcgcgacaagaaaggaaggaggcagaaagggagccccaagagagagggccaag

SEQ ID NO: 96803 - RNA, 82 nt, Homo sapiens
gcccaccccccgaacccagccgcaccggaacagaccagggcggcgaggaggaggaggacagaaaggaggagcaggcagcacc

SEQ ID NO: 96804 - RNA, 75 nt, Homo sapiens
gaaaggagaaggaacaaaagaacaagcaggccgaaggaaacacaacaggcacgccccaccggaggaagcaaaaaa

SEQ ID NO: 96805 - RNA, 58 nt, Homo sapiens
cccgccggaacaccgcagagaaaaagggacggcagcgagccagggacacccagcacgc

SEQ ID NO: 96806 - RNA, 80 nt, Homo sapiens
ccaagagacagggcacaccaaacccacggagccgggcgcgagcagcgcgagaagacccccaggacgccaaggagcgccgg

SEQ ID NO: 96807 - RNA, 120 nt, Homo sapiens
ccaccccaccgagaccaagaaggaccagaaaaccgacaacccccagaaagccaagccggaccggaacaggggcgggcggaagcacccagccggagaaaacccaaccaaagaggcacgagg

SEQ ID NO: 96808 - RNA, 82 nt, Homo sapiens
caagagcagcgggaggcaaacaccggacgaacaaaggccacgggaacaacgccagaaagccaagaagacgcggagggaggcg

SEQ ID NO: 96809 - RNA, 77 nt, Homo sapiens
gcaagaggaaaaaaagccagccaacgacaacaccagacacagagagagagagcccgggaaccccgacaacaggaaaa

SEQ ID NO: 96810 - RNA, 69 nt, Homo sapiens
acaccgccgggaggggacgaaaacaaaaggccaagaagccaacgcgcccagaagccccggcgaggcagg

SEQ ID NO: 96811 - RNA, 39 nt, Homo sapiens
agggcggccaaggcagaacagggcaccgagggcggccga

SEQ ID NO: 96812 - RNA, 76 nt, Homo sapiens
cccgggccgccccccccacgggcagccgggagacgaaaccagacagagggcaagacagagaccggcgcaagagcac

SEQ ID NO: 96813 - RNA, 73 nt, Homo sapiens
agccagaccaagaacaaccgcggacacggagaggaaggccgggaagaaggagcgcagaaggaacggagaagcg

SEQ ID NO: 96814 - RNA, 57 nt, Homo sapiens
agaagcccagagcccagacgcagaaaaccgagaacagggggggcaaaaccaagcacg

SEQ ID NO: 96815 - RNA, 81 nt, Homo sapiens
ccacgggcggccggagcccggaggccgcacccgccccggcggggcccaggcggagcaggagcaaaggagcaagaaaccaga

SEQ ID NO: 96816 - RNA, 77 nt, Homo sapiens
cggggcggccggccaaagccagggcaaggggacccagaagcagcccaaccaaacaccaagaggaggccaggaaagcc

SEQ ID NO: 96817 - RNA, 73 nt, Homo sapiens
gagaaaaaaaaaccaacacaagagaaacacaggcgggaaaggaaccggaacccaaaggggaaacgcaaaaaga

SEQ ID NO: 96818 - RNA, 59 nt, Homo sapiens
agcccccagagcgggaccacagaaaaacgaggccgggaaggaagcaccaaccaggccac

SEQ ID NO: 96819 - RNA, 72 nt, Homo sapiens
aaaccagccaccagcagacagggggggggacccaaagcagggcgacgaagaggcacgcaagccggccaccac

SEQ ID NO: 96820 - RNA, 83 nt, Homo sapiens
gggaaacgccagcaggaagaggacacacagagaggccaaagccagagacagagcacaaagagcccagagggaaacacccacca

SEQ ID NO: 96821 - RNA, 86 nt, Homo sapiens
agaccaaggcaacaaggacaacaagagacgggacaagacagggcaaaggacagaccagccggcacagccacaccgagaagaccggc

SEQ ID NO: 96822 - RNA, 68 nt, Homo sapiens
ggggacagcagcagcagacggacagcagaccacagcccggcaggcccaaaaacccaaagggacagaag

SEQ ID NO: 96823 - RNA, 73 nt, Homo sapiens
ggaccagagaaacgaaaggccacgaggcccagggaacccggaccacagaaccaagaaagaggagaacaagcgg

SEQ ID NO: 96824 - RNA, 80 nt, Homo sapiens
ggcccgaaaaaagacagagaaacagggacacagaaggaagcagagaaacagaaaacagccaaaaggacagggacagcaaa

SEQ ID NO: 96825 - RNA, 73 nt, Homo sapiens
gaacagggcgcaccacagaagagccaaagacggcaaggcggagagaccgggccaaagcccggcccacaaaggg

SEQ ID NO: 96826 - RNA, 87 nt, Homo sapiens
acacgagcacgggcaaggcgggcaggagcggcggagacgaggccaccaggaaagccgcagccccgcgcgccaacggaggaggcacac

SEQ ID NO: 96827 - RNA, 87 nt, Homo sapiens
accgccgcagcccgcggagccgggccgggcgccggagccgcgccccaccccgccagcccagagccacgacgcacggggaacagggcg

SEQ ID NO: 96828 - RNA, 73 nt, Homo sapiens
gggagcacggaggaacggaagagcagaggaaccggacgcagaggggacaccaccccaaaaaaaaaaaggaaaa

SEQ ID NO: 96829 - RNA, 48 nt, Homo sapiens
cgggccagagcccccacgcaaaggacccaagaagaccagccgaagccc

SEQ ID NO: 96830 - RNA, 77 nt, Homo sapiens
agccaacgagcagcgcccgaggggcggaagccagagaccaacgagaccgcacagcaccagcggccgagcccgggagg

SEQ ID NO: 96831 - RNA, 35 nt, Homo sapiens
gaagacgagacgggacacccagagcaacaaacccc

SEQ ID NO: 96832 - RNA, 77 nt, Homo sapiens
ccgcacgcgaaggcccggaccgcgcccgggggaaaaagaaaagggcgaagacccgaagcagcgcaggaacagaagag

SEQ ID NO: 96833 - RNA, 59 nt, Homo sapiens
ccggcccgcgggagcacccgcccgcggggaacgcgggagcagcggaagacaccaaggcc

SEQ ID NO: 96834 - RNA, 73 nt, Homo sapiens
acccaagcgaagggcccaggccacacacagaaccgacccaaggaacccaaagggcgcagcaacggcacacaga

SEQ ID NO: 96835 - RNA, 73 nt, Homo sapiens
ccccaagcaggaaggccaccaggagcccggccacccgcgggggagcgccgccgccagggcccaggggcaacga

SEQ ID NO: 96836 - RNA, 65 nt, Homo sapiens
caccccccggacccagccccggaccacagagaagcccacccggaaacaaacgccaggggaccccc

SEQ ID NO: 96837 - RNA, 74 nt, Homo sapiens
aaagaagcacgggacacagaagagcagcccgccgacaaggacccagcaggacgaccagccaaagagcccaacgc

SEQ ID NO: 96838 - RNA, 82 nt, Homo sapiens
cagagagcgacccggggggagcgcggggcgacgcggcgcagggacccgggacagcggagaggagacggaagcggaagcacac

SEQ ID NO: 96839 - RNA, 80 nt, Homo sapiens
cggcagcaggcgccggacgcgagcgaggcggagaagggacacggcaggcgccagaaaccagaagggccggagaagccacg

SEQ ID NO: 96840 - RNA, 77 nt, Homo sapiens
gggagcaagagcgaaaaagcccagagcccggaaacaagggaaaagggagcgggagccaaagcgccaggagcagagag

SEQ ID NO: 96841 - RNA, 73 nt, Homo sapiens
cagacacggggaagcgcaaaaacaagacggggcgccccacagaggggcgacggagccacaacgaccgagcgga

SEQ ID NO: 96842 - RNA, 79 nt, Homo sapiens
caacaccgcgaggagggggaagcccacggcggacgcaagaggggggccgggagcgacccaagagcaggagggagcacga

SEQ ID NO: 96843 - RNA, 102 nt, Homo sapiens
gcgggaggaggcgcgcgaccgacggcaaggcacacaagaccacacgaaccgcaccaccagcggacgacccgcgggacaggagcagagcgaggcagggcccca

SEQ ID NO: 96844 - RNA, 77 nt, Homo sapiens
gcagggggcgcgccgccgcccgccccagaccgcggcgaaaggcccagggcaggcacccaaaaggccaaggcgagagg

SEQ ID NO: 96845 - RNA, 59 nt, Homo sapiens
ccccacccgggaggggggagcggcgggaggccaccgccagggcagcggagcagaaaagg

SEQ ID NO: 96846 - RNA, 55 nt, Homo sapiens
caacacccccagcggccgccggccccccacgagcccgggcgcgccaggcacagcc

SEQ ID NO: 96847 - RNA, 81 nt, Homo sapiens
accccggcacccggagagcccaaagagcgagcccagccccgcggaaccaaggccccccaagagggagaaagaacaacagag

SEQ ID NO: 96848 - RNA, 73 nt, Homo sapiens
gacgcggaagaggagagggagcgagaaccagacagcaggggcaaacagagaggaagccgaacagcgaagcaaa

SEQ ID NO: 96849 - RNA, 71 nt, Homo sapiens
ccaaggagaagcgcccaagcggacggaaaagaaggaggccagcgggacacacaaagaaagacgaaggacac

SEQ ID NO: 96850 - RNA, 80 nt, Homo sapiens
gacgcagggcagggccccgcccggcggggaagccaccaggagagaacgccgcgccgcgcgacaacggcccggcaggcaag

SEQ ID NO: 96851 - RNA, 78 nt, Homo sapiens
gccaaacccccaaggaaggaagcaaccacgacggcagagacaggagaggagagccacgcccacagacccgggcgagcc

SEQ ID NO: 96852 - RNA, 61 nt, Homo sapiens
gcaccgccgccaggaaggaagaaccagcaaaagagagcgcagagaaaaggaagaccagaaa

SEQ ID NO: 96853 - RNA, 78 nt, Homo sapiens
agaaggaccaaggaagaggcaaagaacaggaaggaagagcaacgcaaggaaaaagaaaagacaaagagagcaggagcc

SEQ ID NO: 96854 - RNA, 72 nt, Homo sapiens
gagcaggggacccaaggccgggcaggggccacaggaccacgggaggacgcgaccggaaaggagagagagaca

SEQ ID NO: 96855 - RNA, 83 nt, Homo sapiens
ccaagcaggaagaaggccaggaggggagcggaagagcccagaggaagcgaccaggcccggcagaaggcagaggagcaggaagg

SEQ ID NO: 96856 - RNA, 76 nt, Homo sapiens
acaacacagcggaacggcaaagcagcacacaaagagggcacccagaccgcaggaagcagaagaaagaaggcaagcc

SEQ ID NO: 96857 - RNA, 68 nt, Homo sapiens
aaggccaggccaggagcggcagagcccgcccagaacgaggacgcacccgacaccagagccagggaacc

SEQ ID NO: 96858 - RNA, 83 nt, Homo sapiens
gcgcgacggcgacgcgggaggccagccgccaggaagaaccagagaagaccagagaaaaaggaaggagaaggacgaagaggccc

SEQ ID NO: 96859 - RNA, 76 nt, Homo sapiens
gaacacccggcccaggagcgacgccagaaacagccaccagaagggcccgggagagggcccaccccacagaagaacg

SEQ ID NO: 96860 - RNA, 82 nt, Homo sapiens
ggacacggcggagagccgacgacaccgcagccccccgggaggcccgacgcgacgggcccccagaaaagcgcagccggccgga

SEQ ID NO: 96861 - RNA, 37 nt, Homo sapiens
cacggaagacgcacacggagcccacggcaacagcccc

SEQ ID NO: 96862 - RNA, 89 nt, Homo sapiens
cgcgcagggccgcagcgggagcggacggcgagcgcgagcggcgcgagaaagccagacggccgcggcggcagcggccgggagaaggagcg

SEQ ID NO: 96863 - RNA, 69 nt, Homo sapiens
cagaacagggccgggcggcccaagggaaaagcagcggccgcaaggagccgcaggccaggacgccacccg

SEQ ID NO: 96864 - RNA, 84 nt, Homo sapiens
agagacgggacaagacagggcaaaggacagaccagggcggaaaacaccccaaaagccaaaagggaaaggaaaagaccaacaaca

SEQ ID NO: 96865 - RNA, 87 nt, Homo sapiens
gaaggagcagcagagagccgggccagagccaggggccgggagggcgccaggacaacacaaccggagagaaacaagccaaaacaaacg

SEQ ID NO: 96866 - RNA, 59 nt, Homo sapiens
agcccgccgcggacggccccgccccgaccaagcacaggagggcagaccaaaagcacaaa

SEQ ID NO: 96867 - RNA, 59 nt, Homo sapiens
caggaaaacgaagaaggcaaaaccaagaggaaaagaggaaaaagggagcaccagaagga

SEQ ID NO: 96868 - RNA, 30 nt, Homo sapiens
gcccagcggaacgcgacgcgaaggacgaag

SEQ ID NO: 96869 - RNA, 80 nt, Homo sapiens
cgacaagagcgccgcgccagcccacccccccaacccccacggacccaaagacaggaccacgcaccagcagagaaggaaag

SEQ ID NO: 96870 - RNA, 76 nt, Homo sapiens
caagccgacaagcacccagcagccggaacagggccagcaccgcaagcgagagcagcaaaaaggagggagcagggac

SEQ ID NO: 96871 - RNA, 62 nt, Homo sapiens
gaaaaccaagaacaaacaaccccccaaagccggccacagaaaggcgagcccacaccaaccgg

SEQ ID NO: 96872 - RNA, 60 nt, Homo sapiens
ggcccagacggaccagcccaaggaacaccaccaaaaacagaacagaaaggagagcaaaaa

SEQ ID NO: 96873 - RNA, 80 nt, Homo sapiens
cggacacgcagggagcgaccaagaaccaaacacagccacagcagccacagggacaaacagacacaaaacgagcaaaagga

SEQ ID NO: 96874 - RNA, 74 nt, Homo sapiens
cacccacccgaaggacaagcgcgggacccgcagaggccaaagagcacagggacagaaaaacagcgcagacgagc

SEQ ID NO: 96875 - RNA, 83 nt, Homo sapiens
caaaaaggcggacaggcgagaaccaggagccgagaaacgaaggaggcccaaccacaaaaggagccgacggaacccagacggag

SEQ ID NO: 96876 - RNA, 71 nt, Homo sapiens
gaagccgcgcaccaaacgcacagcccgcaagaagaagcaccaagcaccagagacacggacccggagaaaac

SEQ ID NO: 96877 - RNA, 106 nt, Homo sapiens
ggagagcggcgaagaagcgggacccgggaggaagcagagagagcgggagacgagacaacaggcaggaagaagaccagcgacaagaccagacaggaccagaaacggg

SEQ ID NO: 96878 - RNA, 71 nt, Homo sapiens
gccccaggaggcaccgggcaggggaccacagcagacgagcaagaagacaaacaagggaaggccgcacaggc

SEQ ID NO: 96879 - RNA, 70 nt, Homo sapiens
gcggaaccacaaggcaccacgccgcccagaacagcacaagaccggggaccacgggaaagcccccgcagcc

SEQ ID NO: 96880 - RNA, 67 nt, Homo sapiens
gcaccgccgcccccccagacaagaggacaccgcggaggaagcgcgccgcgacaccagccggccccgc

SEQ ID NO: 96881 - RNA, 37 nt, Homo sapiens
gaggaccaccagagcagcacggaggagaacaagcgga

SEQ ID NO: 96882 - RNA, 66 nt, Homo sapiens
ggaccgggaaagaggagacaaaccccagacgcgccggagggccaggaaacacccaaggaaccaaag

SEQ ID NO: 96883 - RNA, 59 nt, Homo sapiens
ccagccgaaggagaaggggggcacaaggaaagccaaaaagccagggggacaggagaagc

SEQ ID NO: 96884 - RNA, 75 nt, Homo sapiens
ccggggcggcgacacccgggagccgccggcaccgccggaaccggcgcagggcggagaacggaaaagcaccaggaa

SEQ ID NO: 96885 - RNA, 70 nt, Homo sapiens
acccgggccgaggagccacagaggagggcccgggaagggggcgaggaagagacaggcgggggagaagaag

SEQ ID NO: 96886 - RNA, 62 nt, Homo sapiens
aagcggaagggagcccaagaggaccagggcggagaacggaaaagcaccaggaagcagagagg

SEQ ID NO: 96887 - RNA, 79 nt, Homo sapiens
ggagaagcagaaaacccggccagggacaggaaagaaggaaagggaacacggagcaaagaaacaaaaagaggccaacacg

SEQ ID NO: 96888 - RNA, 34 nt, Homo sapiens
aggggggggggagacggccgaaacagaggcacca

SEQ ID NO: 96889 - RNA, 66 nt, Homo sapiens
cacgcggaaaacggaggacccggaagagacagggcacaggaaaaaagagcggaaaaaaaaggaggc

SEQ ID NO: 96890 - RNA, 73 nt, Homo sapiens
ggaaggcacagggagccaagacacgaggaggggacggcccgccacaggcacagacgaggagggaagcgaagcg

SEQ ID NO: 96891 - RNA, 60 nt, Homo sapiens
ccggcccaggaggagggcccgggggaagacacaggaagcgccgaggaaggaaaccagccc

SEQ ID NO: 96892 - RNA, 66 nt, Homo sapiens
gcgcagccgcgcagccccacgcaacgggcccgcgcgcaggccggacacccaacagcacgcagacaa

SEQ ID NO: 96893 - RNA, 74 nt, Homo sapiens
aggccagaaaccgcccggagcacgaccgaggcgacagaagcgaaggggacagggggagaaccgccagggaaacc

SEQ ID NO: 96894 - RNA, 59 nt, Homo sapiens
gcgcaggagaaacgaggccgcccgacagccccagcaacgcgcgccaccaggagggcacg

SEQ ID NO: 96895 - RNA, 80 nt, Homo sapiens
gggggaccggacgcaggaagacgcagccggccgcgcccccacccgccccccaaagcgaagccaaagcgaaggcaaaggcc

SEQ ID NO: 96896 - RNA, 83 nt, Homo sapiens
aagacgcgcggagaaagagaccaccgagccccagggaacccgagaaggccaacaaaagagcgaggaaccaagaagaggagaca

SEQ ID NO: 96897 - RNA, 73 nt, Homo sapiens
aacgagaacagaaaacggagccaggccaacaaacgaccagggcacaaaaacccggaagagcggcgagacccca

SEQ ID NO: 96898 - RNA, 62 nt, Homo sapiens
ccagcaacaacacagaagggagccagcacaccggcaaggccagccaaccccagcaccccagg

SEQ ID NO: 96899 - RNA, 80 nt, Homo sapiens
gccgaccaccggaacggacagcccccccagccaaacaacccaaggcagcggagccccccagcccccgcagacggcgaggg

SEQ ID NO: 96900 - RNA, 76 nt, Homo sapiens
ggggccagaaacgggccccgcgccaggaggcccaccccgccgggaaggccaaccgcgacgggccccaaacggaacc

SEQ ID NO: 96901 - RNA, 73 nt, Homo sapiens
aagggagccaacaaaaagcaccggacggcaagcacaacagaggggagagccgaccccgcgaggcacccgacgg

SEQ ID NO: 96902 - RNA, 78 nt, Homo sapiens
gccaccacacaaccaggcaccggcacgggcgcaacaaccagggggggccgaagaagccagggggaggaaagcagacag

SEQ ID NO: 96903 - RNA, 81 nt, Homo sapiens
agagaaagccccaggcgagggggccaccacaaccggcagaaccagagacagggcagagccgaggccggacagagacgagag

SEQ ID NO: 96904 - RNA, 77 nt, Homo sapiens
aagcaggggcggaagccacacaggccagaacgaggggaggaaaaagcagcgaaacagacaaccccccacacaaccgg

SEQ ID NO: 96905 - RNA, 63 nt, Homo sapiens
aacaccaaaaaaggacaccagaacgggacggaaacaacaaccccgagagaaccgccgcgcccg

SEQ ID NO: 96906 - RNA, 56 nt, Homo sapiens
aaggagggagccgcacacaccaggaggacaggagagacaacggaggcaagaaagac

SEQ ID NO: 96907 - RNA, 76 nt, Homo sapiens
cgcagcggcaaggagagacgcgcgaggggcgccgaagcgaggggccgcaggagcccgacccaggggcagagacgcc

SEQ ID NO: 96908 - RNA, 73 nt, Homo sapiens
caaaggcagagagcccagcagcccacacagccaggagagcccagaagagaaggaagcgcacacaaggagaaac

SEQ ID NO: 96909 - RNA, 71 nt, Homo sapiens
gcgcgaagacagcagaggagcacccgaagaagacaagacaggggaaagacagcccagcagaagcgaaagag

SEQ ID NO: 96910 - RNA, 75 nt, Homo sapiens
gcccaagaggcggcgaccccagggagcgccaaggggcagccgaccgaagaagcggggccaaggagcggagaagga

SEQ ID NO: 96911 - RNA, 73 nt, Homo sapiens
cccccgaacggggaaccagcccacagcacgcaggccaagcaagcccgggaggagaacccccgaaacaacagcg

SEQ ID NO: 96912 - RNA, 66 nt, Homo sapiens
aacacaacaggagacacccaacagagagaaagagagcggaaccgcaggggaagccccagaagccga

SEQ ID NO: 96913 - RNA, 72 nt, Homo sapiens
cggcccccgagggcgcggagagcccagggccagaagcccacccagagagagaagaacaaggcggccaaacca

SEQ ID NO: 96914 - RNA, 82 nt, Homo sapiens
gccgggaacccacagggaagagaccccaaaggagcggaggacacagcacaggaaacaagaagaaaaaaaagaaaaacaggaa

SEQ ID NO: 96915 - RNA, 81 nt, Homo sapiens
gcagcccggcggacgccggcacagaacgcagacacggcccgggcaaacagcagaacgcaagaggggaaccacccaccgagc

SEQ ID NO: 96916 - RNA, 79 nt, Homo sapiens
cgcggacccggccgggagaagcagcagcgcaaggcgcgggcacagggagggcggaccacccaggaggagggaggggagc

SEQ ID NO: 96917 - RNA, 60 nt, Homo sapiens
cacaaggcccgcgggagcacacaacgggaaggggaggcagcaagggcacgggcggaccac

SEQ ID NO: 96918 - RNA, 109 nt, Homo sapiens
ccgaagggggcgagacgacacagaaaagacaacagccacccccccacacggacgggagaacgacacaggaacagaagggagggacagcaccaggcacggcccccagaac

SEQ ID NO: 96919 - RNA, 62 nt, Homo sapiens
cagccacacaaaacccacacagggcgaccaggaacagccaagcggcagagaggcgagacacg

SEQ ID NO: 96920 - RNA, 73 nt, Homo sapiens
acagccaccgagcagccgagcgcgaggaccagcccggcacagcagccggaggccaaagcaggcaagggacaca

SEQ ID NO: 96921 - RNA, 70 nt, Homo sapiens
aaaaggggccccacggaggccacagccacaacaacccaggacccgggccccgagcagccacgcgagaaaa

SEQ ID NO: 96922 - RNA, 70 nt, Homo sapiens
caacccgaagccacagcccaacccccggcacccaggaggaaggaccgagcgcaggaaccaggccagcgcc

SEQ ID NO: 96923 - RNA, 76 nt, Homo sapiens
aggaccggaggccggaggaagccaggaggccgggaaccccgaacaaccgcagcagcgaaaccagggagaggaagcc

SEQ ID NO: 96924 - RNA, 72 nt, Homo sapiens
ggggaccgagggcggcacagcacagacaccgcgccgaagggggaaaggcaacagaagaaggagaaagaagag

SEQ ID NO: 96925 - RNA, 59 nt, Homo sapiens
ggccagacccgagccaagccaccgccgcccgacccccaaagggcaccgggcgagccccg

SEQ ID NO: 96926 - RNA, 78 nt, Homo sapiens
agccagacccagggacaggacagggcccgacagacccaggccgccagcgcagcggcaggccgaaaaggaaaaggagcc

SEQ ID NO: 96927 - RNA, 87 nt, Homo sapiens
ggcgcccagcacgaccccgggcagcccaacgagaaccggagggcaccggagacaaaaggagccacggagaaagaaaaaagaaagaag

SEQ ID NO: 96928 - RNA, 75 nt, Homo sapiens
gcccaggagggcagccccggagaagcgcagccagcacaggaggcgcagaaaccagagacaggccgccaggcccgg

SEQ ID NO: 96929 - RNA, 78 nt, Homo sapiens
cggccggcccccgacagccaggcccgcgagaaggacgcggacgcgcagcggaggggagccggcggccacacacccgag

SEQ ID NO: 96930 - RNA, 57 nt, Homo sapiens
ccacggcagacacacaacccgacccgacgaggaccaggagacccggacggcgccacg

SEQ ID NO: 96931 - RNA, 55 nt, Homo sapiens
gcaaggcgagggacgagaacgaggggagcccagcagcgacagcggcggggagacg

SEQ ID NO: 96932 - RNA, 67 nt, Homo sapiens
agggaccgggacggaccccgggagcccagacgggcaccaccacgaggcgaggggccaaccaaggagg

SEQ ID NO: 96933 - RNA, 69 nt, Homo sapiens
cggaccgggagacacggccagacgcccccaaccaggggagcaacccaccaacaaacagcggggaagcgg

SEQ ID NO: 96934 - RNA, 65 nt, Homo sapiens
acccagggaacagggaccagaacgcaacgaaacaaggaagagaaacagggaacagagacaacaaa

SEQ ID NO: 96935 - RNA, 54 nt, Homo sapiens
gcagacccaggaaacaagagaggcggccccgggcgcgggagccagccgaagaaa

SEQ ID NO: 96936 - RNA, 77 nt, Homo sapiens
gcagaaaaacgagccacccgcgaaaagagccacggggccaagaagcacgagccagggagccgccgggaccggcccgg

SEQ ID NO: 96937 - RNA, 80 nt, Homo sapiens
cagcacgccggccaagagacccaacccccgagcgcacggagcaaaccagccgacccgcccaacaccgcaagggaaggggc

SEQ ID NO: 96938 - RNA, 70 nt, Homo sapiens
cggagagcccgccaccaaccccgacaggagggaacacaccagcgggcacagcacagcagggaggcgagaa

SEQ ID NO: 96939 - RNA, 60 nt, Homo sapiens
ggagcacagaagagcgaggaggggaggccacccgaagaaaggcgcagcggaaccacggcc

SEQ ID NO: 96940 - RNA, 76 nt, Homo sapiens
cggaaaggaagaaaccaaaaagcagaaggaagggaggcaagcaaggaagcgcagaaaggaagagaagaagaagcag

SEQ ID NO: 96941 - RNA, 74 nt, Homo sapiens
gcccgcaacccccagcagcacggggaaggaccggacccggcccgggagcaaagaggagcccccgggacagagga

SEQ ID NO: 96942 - RNA, 85 nt, Homo sapiens
aagaggaggggccgccggcgggaccgcagcacggggaaacgaccgccccaaaacgcaacaaggagaccgcgaaggcgacacccgg

SEQ ID NO: 96943 - RNA, 83 nt, Homo sapiens
gcgaggagaccggcaccacggcagcggcccaacgccaagaacaacggcaggaaccacagagaacagcccggacacgcgcaccc

SEQ ID NO: 96944 - RNA, 74 nt, Homo sapiens
accggggggcccagacgcacccgcacggcggcacggagggccccacccccggcagaagcggccacacagcacca

SEQ ID NO: 96945 - RNA, 81 nt, Homo sapiens
ggagaggccgcagccagaagccaaccgcccgagcaaaagagccaacacccaggccaggccgcccggaaggaggccgccacg

SEQ ID NO: 96946 - RNA, 77 nt, Homo sapiens
ccggaaccaacaaaagagaaccaagaggaggaggagaaagaaggaagaggcagaaggagaagaaaagaagaccaaaa

SEQ ID NO: 96947 - RNA, 81 nt, Homo sapiens
ccagggcaacgccaagcccgaacagagccacacgaccccgcggccaagcccggggagcccaggcaggcggcgcggagggga

SEQ ID NO: 96948 - RNA, 51 nt, Homo sapiens
gccacccaggaccgaagagaccaagcgaccaagcaagcagcgccgacaggc

SEQ ID NO: 96949 - RNA, 92 nt, Homo sapiens
cagcacggggcagacaccgcccgaacacacaccgacaagcgcgcagcaaaacaaaggaaaagcaggacgccacccgccaccgggaagacaaa

SEQ ID NO: 96950 - RNA, 74 nt, Homo sapiens
acagcaccacggagagggcacaggaagacaccagagcgcagcacgaacaccggcaccgacgggcagccggagca

SEQ ID NO: 96951 - RNA, 81 nt, Homo sapiens
cgaagagaacaagacgggaagaccagaaggaaggggccacaaaaaagaaacgaggaaaaacgaaaaggggaggcgcacagg

SEQ ID NO: 96952 - RNA, 83 nt, Homo sapiens
gcgccaacaccaccaggaccaccaagaccgcaagcgcaggaccgagcccaccgcacgggcagcagaacgagggcgggcccgcc

SEQ ID NO: 96953 - RNA, 82 nt, Homo sapiens
cggaaacggaaccgggaggcgacgcacacgagcggaggcgaagagagggccgaggcagacaagggaaaggccgcgcagggga

SEQ ID NO: 96954 - RNA, 75 nt, Homo sapiens
gaagaggaagcaaagccaagggaagcaggcgaacaagaaaaccaagaacacagagaacgggaagagagccgaaag

SEQ ID NO: 96955 - RNA, 75 nt, Homo sapiens
gagacacggcaggaacccgcgaagcgggaagaaaggcgaaaagcgaagacagccccgcggaaggacaaaagcaca

SEQ ID NO: 96956 - RNA, 73 nt, Homo sapiens
cgaggaagagaacacgagcgaaggggaacgaagggagagcccgcggggcacacgccccgcccaccaacacggg

SEQ ID NO: 96957 - RNA, 56 nt, Homo sapiens
ggggcccaagcaaggccggaagaagagcgcagaggacaggagcgaaggaaaaaaca

SEQ ID NO: 96958 - RNA, 55 nt, Homo sapiens
caccagaaaccagagagcagagcaaagagccgaccaacaggcagcgggaggccag

SEQ ID NO: 96959 - RNA, 86 nt, Homo sapiens
acccagcgagcgggcggcacgcacgcaggccaagacaaggggcgcagagcggggggacaggcgcaagaccggagaagcaggagcgg

SEQ ID NO: 96960 - RNA, 76 nt, Homo sapiens
cgagacgcaggcacaagccagaccaagcgcagggcacgcgcggagccaacggagggaaggcccgcaggcgaggaga

SEQ ID NO: 96961 - RNA, 83 nt, Homo sapiens
gaagagcaagaggaggacaggagagaagaagaagaaaccggagaaggaacagaccccggaggagggaggcaccgccccaaccc

SEQ ID NO: 96962 - RNA, 71 nt, Homo sapiens
ggcccagcaccaggaccggaaaggaggaacccggaagaaaaaaaaaacaagagggcgaaaacgaagggccc

SEQ ID NO: 96963 - RNA, 73 nt, Homo sapiens
ccggagaccagaagaaccacaaagccaagacgcaagcgcggagagaggggcaggaaaaaagggaagcaaacag

SEQ ID NO: 96964 - RNA, 71 nt, Homo sapiens
ggcggcgggcaccgcagcgccggaagaggcgcaccagccggcagcaagacaagaaacgccccgaaaagagg

SEQ ID NO: 96965 - RNA, 77 nt, Homo sapiens
agaggccggaggacaccaacaggccgcggccgcgggagaaaacgagggggaaggacaggagcacgccaggacaggcc

SEQ ID NO: 96966 - RNA, 76 nt, Homo sapiens
cgccccaggcgcacaaccaaaccagaccgcagcagggcggccgcgcccagaagcagcacaccaggaccaggccgaa

SEQ ID NO: 96967 - RNA, 41 nt, Homo sapiens
acagcaaaaggacccgaaggagaggaccgaaaacacggagc

SEQ ID NO: 96968 - RNA, 76 nt, Homo sapiens
caggcccaggacgccagagacagaacaacaccaaggagcccccacaacccagaccccgaccccaggaccgcagaca

SEQ ID NO: 96969 - RNA, 80 nt, Homo sapiens
gcgcggccgcggcgggcagcagaggcgcccgggcaggaggagggcggccgcgagggcagccgagaaccagggggaaggcc

SEQ ID NO: 96970 - RNA, 70 nt, Homo sapiens
ccaggaacgggaaagccaagggaagaaagacaacgcaagaaccaagagacagcaggggaacggacaagaa

SEQ ID NO: 96971 - RNA, 79 nt, Homo sapiens
gaccaggaaaaaagaccgagagaaagagacccaagagagaggagcaagaggggggggcccccccgaagaaaggaaccgg

SEQ ID NO: 96972 - RNA, 58 nt, Homo sapiens
agacgccaacgagcggcgcggacggcgcgcggacaccagggacacaggacaaggagcc

SEQ ID NO: 96973 - RNA, 84 nt, Homo sapiens
caacaaagccagcaacgacagaccacagccgcgcgcgcagggggcgcgcccgcaagcagggcacacagggaccaagaagccccg

SEQ ID NO: 96974 - RNA, 76 nt, Homo sapiens
aaagggagcaaagagagacacacgggggaacaccggacaaccgaagaagcgcggcgacgacagaaccccacgggca

SEQ ID NO: 96975 - RNA, 97 nt, Homo sapiens
acccgaccagcacggcgaccgaggcagccccccaaagcccggccccacaggaaacgagggaaagagcacggaccgcggaagcaagaagcagccaggg

SEQ ID NO: 96976 - RNA, 84 nt, Homo sapiens
ccgagaccagacgcggagccaggccgaggggcggacgcggccgccacaagggcgcagaagccggcagagcccaagagacaacaa

SEQ ID NO: 96977 - RNA, 37 nt, Homo sapiens
caggacccgaagacgagcaggagccaagccagcagaa

SEQ ID NO: 96978 - RNA, 77 nt, Homo sapiens
cgagacccgcccgacacaccggcacgaaaaacccgcagggcagccagcagccggcccgggggcagccaccccaccca

SEQ ID NO: 96979 - RNA, 70 nt, Homo sapiens
cccagcccccaccgagaacagcaccccgcaggaagcccgggggaagacacagaaccgaccgccaagcaga

SEQ ID NO: 96980 - RNA, 74 nt, Homo sapiens
ccgacccaagcaacgcgcccagccccgaagggcgggaacaggcgccggaccaccgacgcacaggccccgaggag

SEQ ID NO: 96981 - RNA, 40 nt, Homo sapiens
cgcggagaggggggcagaagaaaagagaggaacagcacgg

SEQ ID NO: 96982 - RNA, 57 nt, Homo sapiens
gagcgggaaaagggaacccacaggcaggcaaacaaggacaccagaggaccagaaccc

SEQ ID NO: 96983 - RNA, 86 nt, Homo sapiens
agacgaaccagcggaagccagaacgcacgaccagcgagggcaggagcacgaacagcaaggaaggcccgccgaaggagaagggcagg

SEQ ID NO: 96984 - RNA, 69 nt, Homo sapiens
aacaggacagcgggcgaagaaggaacgaagcaagagcacaggggaaaaacgagggcgcaagcagcccca

SEQ ID NO: 96985 - RNA, 76 nt, Homo sapiens
cgcccggaggcccacagcagggggcagggcgcacaaagagcagggaaaccggccagagaaaacacgcacacccacg

SEQ ID NO: 96986 - RNA, 87 nt, Homo sapiens
ccgcccggagcgccggcggcagaccgacacgccggggcgcccgcgcgcggggaccccacggggcacgcagcacgggggcaggggccg

SEQ ID NO: 96987 - RNA, 77 nt, Homo sapiens
gaggccggagacgaggggacccaagcggagacagcaccgacagaaggggcccacgagcagcgagcgcccccggcccc

SEQ ID NO: 96988 - RNA, 78 nt, Homo sapiens
acccaccccccggcgccagcacagacagcccaaagcagaagaggcagaagggaggagagaaagagagacacagagaga

SEQ ID NO: 96989 - RNA, 78 nt, Homo sapiens
gggaaaagagccaaagcagccacacaacagcgacaagagaaaaggaaaaagaacaaaaagcgaaaagggaaaaaggcg

SEQ ID NO: 96990 - RNA, 83 nt, Homo sapiens
ccagaacggaggaggagccgcagccaaaaggggggcaccagccgaagccaggcaagcaagaaccaacaagaagaccccaagcc

SEQ ID NO: 96991 - RNA, 68 nt, Homo sapiens
gacggccaaaacaaaaggaacagacaaaaggacgaaacccacggcgacagggccaggacacacggacg

SEQ ID NO: 96992 - RNA, 77 nt, Homo sapiens
cagcgccggccgcggcgacagcggagggcggaggacgcaggccgggggacggcacccacggagcgagagagacccgc

SEQ ID NO: 96993 - RNA, 76 nt, Homo sapiens
accccgaagaggacggaggggaagcgggaggcgagcgggaagaagaagaacagcgccagcgccgggaccgccaacg

SEQ ID NO: 96994 - RNA, 82 nt, Homo sapiens
cgcaacgcggggcgccaggaggggcgggcgaaccggcagcgcgagagaacccgaagccccagaggagggcaccgccgagggc

SEQ ID NO: 96995 - RNA, 73 nt, Homo sapiens
ccaaaagaaaaaagggacccacccagggacagacaacgaagagaagagccgcacgggaaacacagcaaagcca

SEQ ID NO: 96996 - RNA, 67 nt, Homo sapiens
gccacgagagcaaccgacacagaagcacggagcccaagggacagagcagaagggcgaaagaccgggc

SEQ ID NO: 96997 - RNA, 71 nt, Homo sapiens
accgggcaggacggcaggggaacggcgagggaacccaggaaggagggcgacaaacaccagccggcacacac

SEQ ID NO: 96998 - RNA, 78 nt, Homo sapiens
gcgcccgacgcccgcaggcccgcgggcgcaccggcgacgaacggcacagccaacaagagaacggagcggacaccagac

SEQ ID NO: 96999 - RNA, 79 nt, Homo sapiens
gcagacgggagcgcaaggcgccccaaggccagacaaaacaagccccgccagagcgccacagagacccgcgcccagcgcc

SEQ ID NO: 97000 - RNA, 38 nt, Homo sapiens
acccaagcaaaaccagagcaggggggaagagcggcagg

SEQ ID NO: 97001 - RNA, 74 nt, Homo sapiens
cgccaccaaagaccgcgacgccaggggcggcgccccgcccggccgagggggagcagacagcccgcgacgcacgc

SEQ ID NO: 97002 - RNA, 58 nt, Homo sapiens
gagaagccgaccgaacgcgccagcgcggggcaacagaccggaaaaggagaaagaaaca

SEQ ID NO: 97003 - RNA, 72 nt, Homo sapiens
gaaggaccaagaaccagcagagagagacacagccgaaagcggacgcaagagcaagaccagccgcggagacga

SEQ ID NO: 97004 - RNA, 74 nt, Homo sapiens
cagccaggcccacaaagaaaaaggcagagcagcaccagccccggagggagcgaagagcaaagagcaccagagag

SEQ ID NO: 97005 - RNA, 41 nt, Homo sapiens
ccaggagcccggacgcgggaggccccgggccggggcacagc

SEQ ID NO: 97006 - RNA, 38 nt, Homo sapiens
ccgagcagcgggagacaggcgaaggcagggcggacggc

SEQ ID NO: 97007 - RNA, 99 nt, Homo sapiens
agagcgcgacggcagggcgaggcacggggagggacgaaggggccgaccccaggagacgaccccagcaaagcgaccggaagggggccaacccccaacaag

SEQ ID NO: 97008 - RNA, 74 nt, Homo sapiens
gaaggaccaagaaccagaagccagcgagaagaccgagaggccgcgacccaacaccgcaacgcgccgcagggacc

SEQ ID NO: 97009 - RNA, 59 nt, Homo sapiens
ggcaagggggcaggagcgggagcgcagcgaccacaccgaagaaacccgcgccagagagc

SEQ ID NO: 97010 - RNA, 59 nt, Homo sapiens
gggaacaggggcaccaccacgcccagaaggggggcagaaagaagaggaggacaacaagc

SEQ ID NO: 97011 - RNA, 92 nt, Homo sapiens
gggcacacccaggcagagaagcgagcagaggaaccagaagggccagggacccgagacggccaagcagcacccaggaccacaacagagaggca

SEQ ID NO: 97012 - RNA, 79 nt, Homo sapiens
ggacggaagaggaggagaccaagcgcacagccaggacaaagaggacagaacacaacgaagccacaggccaaccgcccac

SEQ ID NO: 97013 - RNA, 70 nt, Homo sapiens
gcgagcagaggcggggaggcaccagcggcccgggagacacacagcaggggaggaaaaccgccgccggggc

SEQ ID NO: 97014 - RNA, 93 nt, Homo sapiens
cgagcggccccgggacgggcagcagcgcgacccgagccggcgcccgggccggccaggacgacccgcaccacaccccaccggccggagcacgcc

SEQ ID NO: 97015 - RNA, 55 nt, Homo sapiens
gaggcgcgcaggagccaaggaaacaaacagaagcgcacgagaacccaggccgcaa

SEQ ID NO: 97016 - RNA, 77 nt, Homo sapiens
agaacgacgagaccccagggggcacggcaaccgcagaaccggagcgggaaaaaggccagaacgaagaaacaaagaaa

SEQ ID NO: 97017 - RNA, 67 nt, Homo sapiens
ggaggcgaggcaaacggggggcgcggagggaccagcgagcgggaaagagcagccaaagccaaagaag

SEQ ID NO: 97018 - RNA, 81 nt, Homo sapiens
agggggccagcaacccagacgcccacaggacaagagaacggaagccagagaaaaggaagagagagcaagagaggccacgcc

SEQ ID NO: 97019 - RNA, 71 nt, Homo sapiens
ccacagagggacccggacaaccagaggcagccagcagggggaggaccgccgacggaggagacggaaggggg

SEQ ID NO: 97020 - RNA, 58 nt, Homo sapiens
ccagacccccagaagcagcagacggcacacgcagcagaagcccggaacagggaaggcc

SEQ ID NO: 97021 - RNA, 81 nt, Homo sapiens
cacacaaaaccaggcgaacgaagaagcgggccacccacaaaacgaagggagggaaggaaggaagagccaaaggacagggag

SEQ ID NO: 97022 - RNA, 66 nt, Homo sapiens
caagcgaaaaacccccaaccacggaggacaagagaaaaaaagggcgggcgaacaaaaagagcagag

SEQ ID NO: 97023 - RNA, 71 nt, Homo sapiens
accaagaaggaccagaaaaccgacaacccccagaaagccaagccggagcccaacgccggcgacgccagccc

SEQ ID NO: 97024 - RNA, 81 nt, Homo sapiens
cgacagaaagagagcgggggcagcgacagagccaaaacagagcggaaccgaggagagagacaggacagcggagccccgcgc

SEQ ID NO: 97025 - RNA, 99 nt, Homo sapiens
ggcgggggagagccgaaggagcagcccaggaccgagaccggagcagccggggcggagcggagccagcgggccggcaccggcacgaggagcgcacacccg

SEQ ID NO: 97026 - RNA, 80 nt, Homo sapiens
gcgcagcccccgcgcgggcagccaccccgcccccgccccccccgccgcaccaggagacacgagcccacccgagaccacgc

SEQ ID NO: 97027 - RNA, 73 nt, Homo sapiens
ccagaaggcgagaccagagacgagaagcacagcagaaacacacaaaccaagggagacaaagcaaccaaaaaac

SEQ ID NO: 97028 - RNA, 59 nt, Homo sapiens
gggcggcggccgaggagagcaccgggaaagcccgaaaccacgagcggggagaaacagca

SEQ ID NO: 97029 - RNA, 84 nt, Homo sapiens
gaagaaggagcccccggaggcgccggcggggcgccgcggaccaacagcccagcgcgcggaccggagcggagaaccagcgccgga

SEQ ID NO: 97030 - RNA, 73 nt, Homo sapiens
aggagcggaccggcccggaagcacgggggaacaaacacacgaaaacgcgcaaccaggcagggagagggacaag

SEQ ID NO: 97031 - RNA, 60 nt, Homo sapiens
agggaggagcaggaaagagaagggaagcaagaacgcgggaggagacaccagaaaaccagg

SEQ ID NO: 97032 - RNA, 44 nt, Homo sapiens
agggggagccccgcgcgcggcgcgagaagagacgccaacagacc

SEQ ID NO: 97033 - RNA, 67 nt, Homo sapiens
aacaacacggccagagcggggagaagagaagcagagaaccccagacacagagcgaaagcaggaagga

SEQ ID NO: 97034 - RNA, 69 nt, Homo sapiens
ggagccagaaaagcacaaccagaacagaggcgggcgagcggacgaaacagacggccacagagggggacc

SEQ ID NO: 97035 - RNA, 83 nt, Homo sapiens
cggccaccaagaaccgcagccgagcccaggaaggcgccccccgggcggggcgcggggcagggccacggccggcacgagaagaa

SEQ ID NO: 97036 - RNA, 85 nt, Homo sapiens
gcaagagcagaggccccagaccgccaagaggcacagggcaagggcgcagcacgcagacccgcaagccccaagcagaggacgcgcc

SEQ ID NO: 97037 - RNA, 67 nt, Homo sapiens
agcagggaacgcacgacaccaaacaccgcgggaaacagcaccaacaagacgcaaaaccagcaggccg

SEQ ID NO: 97038 - RNA, 76 nt, Homo sapiens
aaacacaggagggggaaggagagaacagcacacagaggcgcaaggggaagagaaaagacagaagcaccaaacaggg

SEQ ID NO: 97039 - RNA, 83 nt, Homo sapiens
cgggcggaacgaacacccgggcagggggcaggaggaggacggcagcaaccgcagcagcagcccagcagccgcgacgcagaaga

SEQ ID NO: 97040 - RNA, 85 nt, Homo sapiens
ccagcgcgcacggccccggacgaaggaccgcagcacggagcgcagaaccggccgcgcccggccacgaggcccagggaacccggac

SEQ ID NO: 97041 - RNA, 69 nt, Homo sapiens
aggaaaaaagagaaaaggggacgaccgaagagaacgcccccccaaagagcccagaaaccaggcgccagg

SEQ ID NO: 97042 - RNA, 71 nt, Homo sapiens
gaaccagacacagaaggaacacacagcaacgaaagagcaccccaggaacaacggaggcaaaaagggagcgg

SEQ ID NO: 97043 - RNA, 112 nt, Homo sapiens
ccaggaaaaccggccacaaaaccagagcggagacacccaggaggcagaagccaaaccaaaggcagacccagaagagcacaaaacagagaaaagggaagggcccggagagggc

SEQ ID NO: 97044 - RNA, 39 nt, Homo sapiens
gcgcgaaagccagggaagaccaccccagggaccaggaaa

SEQ ID NO: 97045 - RNA, 72 nt, Homo sapiens
ggaagggaaagcagaggaaggcagaagaaaaagaaaaccagagcgccaagagccacccaggaaggccgcagg

SEQ ID NO: 97046 - RNA, 62 nt, Homo sapiens
ggaacagcgagacacgggacaaaaaccaaagggacaagagaaaaaaagggcgggcgaacaaa

SEQ ID NO: 97047 - RNA, 72 nt, Homo sapiens
aaaaggaccgccggcccgcaacacccccccaccaggcgcgccagacccccggggaaggagcggcgcgcgcaa

SEQ ID NO: 97048 - RNA, 70 nt, Homo sapiens
gccgcccgaccccaagaccagagccgggaccccagccaggaaaaccaacagagacaacaaagagaagaaa

SEQ ID NO: 97049 - RNA, 81 nt, Homo sapiens
ccgccgcgcgcgaccaaaggcccgaagaggagcgagcccaggcgccaccacgagccacccaggacccggaccggagccgcg

SEQ ID NO: 97050 - RNA, 80 nt, Homo sapiens
cgcagaaggaagacagaagaggaagagacaaggccccgacaagcgaaggaggcccacacaggaccagaacagggaggcca

SEQ ID NO: 97051 - RNA, 66 nt, Homo sapiens
caaaacgcaccacaggcacaggacagggacaagcgcacagcggagaaagcagcgcggccaggaggc

SEQ ID NO: 97052 - RNA, 77 nt, Homo sapiens
aagacgccccaaaggaagagagggaggaggggaaccacaccaacaggcggacaggaggagcagaggacacgaaaaga

SEQ ID NO: 97053 - RNA, 66 nt, Homo sapiens
cagccaccccaccgcgcagggaggaggcgcagcccccaagacgggcccccccacggcaaggaggcg

SEQ ID NO: 97054 - RNA, 79 nt, Homo sapiens
aaagagcgaggagcgggggggcaccaagagcagccccggcccggacaccacgccgcggacgcaagaaagagcggcgcca

SEQ ID NO: 97055 - RNA, 78 nt, Homo sapiens
aaggagcggagacggcgagcgcggcgcgccgagaaagcagcaggcgagaggcagaacccggaaagaaggaagggacca

SEQ ID NO: 97056 - RNA, 81 nt, Homo sapiens
aaagggacaagaagggcaaagccgaaggaagcacaagaagagagcccagacagccacaacaagcccacacaggcagcacgg

SEQ ID NO: 97057 - RNA, 68 nt, Homo sapiens
gcaccaacgacccaaaccacaggcggagacgaaaacgcacaggaaccgaccaagggggaaggaacccc

SEQ ID NO: 97058 - RNA, 74 nt, Homo sapiens
gcagagagccccagcaggaaggccaccgagggaacccgaccggacccagccccagaaggcggcgagaagaggag

SEQ ID NO: 97059 - RNA, 89 nt, Homo sapiens
aaggggcgcgccgcgggaccaggaccccgaccggagaaggcgaagcccagcgccgggcgcacaacagggggcagacccaaaggaaacgc

SEQ ID NO: 97060 - RNA, 112 nt, Homo sapiens
gccagagagaaacagcgaccaccgaggagacaagcggagcgagcggcacaggcggggaaccgcagccagaaggaagagggcaagaaggacaccggcagcacggcagcgagag

SEQ ID NO: 97061 - RNA, 59 nt, Homo sapiens
gcgaagggacgccgggaggcaagaggcagcgagaagaaaaagaagagagagacacggac

SEQ ID NO: 97062 - RNA, 67 nt, Homo sapiens
cgggaccgggaaaaacacccccaccacagggacccaagcccaaaggcaggcccggcaccgaggccga

SEQ ID NO: 97063 - RNA, 76 nt, Homo sapiens
cgacgggaggagcgccggaacgccgaggcccaggaaacgggcccccgcccaacaggcacaaccagagacaggccag

SEQ ID NO: 97064 - RNA, 79 nt, Homo sapiens
cgagcagaccgcaacgagcacccgcgccccaccccgaccgcggccagacacggagaagcggcgagcagaagaagcagcg

SEQ ID NO: 97065 - RNA, 85 nt, Homo sapiens
gccggccggccaagggggacgggagcggggccggcggccaccggaaccgcaacgggacggcaaaacagaacagaaaggcggagaa

SEQ ID NO: 97066 - RNA, 78 nt, Homo sapiens
gaaggcagggcggcaacaagaggagaaaaggaacccaaacagagccacccccacccaagagggagccgaaaaaacagg

SEQ ID NO: 97067 - RNA, 74 nt, Homo sapiens
accgcacggcggagcccgcacgcggcgggcagacacacgcgcgcaacggggacggaggagacgaccacaaaggc

SEQ ID NO: 97068 - RNA, 55 nt, Homo sapiens
ggccacagcacgcagccccaggcagacaacgaagagaggaaagaagcggaaagga

SEQ ID NO: 97069 - RNA, 63 nt, Homo sapiens
gagccggaagggggccaggcaggaaaggcccaaagacagggcggacggacagcaggaccgcaa

SEQ ID NO: 97070 - RNA, 70 nt, Homo sapiens
gaacccacaagagccccagaaaagagcagaggccggcgcacgcgcagacccagcaaggagaaaagaaggc

SEQ ID NO: 97071 - RNA, 93 nt, Homo sapiens
gaaacaaaagagcacaaaggaaaacgaggaaagcccaggagacacggcaacacgccagcacgcaggcaggaggaagcgggcaaaggagaccca

SEQ ID NO: 97072 - RNA, 81 nt, Homo sapiens
cgcaaacacccccagacaaaggccggaggaggcggaggccagccgagacaccacgacgccacacgacagagaccgcaagaa

SEQ ID NO: 97073 - RNA, 39 nt, Homo sapiens
caggaaagcccgagcagaaagaggaaaaccaagagggaa

SEQ ID NO: 97074 - RNA, 78 nt, Homo sapiens
cggacgggagaccggcagcggcggcccgggagcgacggaggaacgggagaaacagcagcccaccgggacaccgaccca

SEQ ID NO: 97075 - RNA, 80 nt, Homo sapiens
ccgccacaacagcaggcagaggggcaggggcgcggggaagaggccgaacagacccaaggagaggggaagcccagcgaggg

SEQ ID NO: 97076 - RNA, 75 nt, Homo sapiens
agaacaggaaaaagggaacggcgacggacggggaaggggcaggagcggcggacggcgagacgcaacgcaccacca

SEQ ID NO: 97077 - RNA, 84 nt, Homo sapiens
acaacacacggacacaggacagcggcaggccgcggaccaacccccagaccggcagcacaccacggaagcaacacacggaaccag

SEQ ID NO: 97078 - RNA, 75 nt, Homo sapiens
gggaagagaagaagaagacccgggaaaagagacacaaaccaggaaagcgccacagcaccggaggaaacccagccc

SEQ ID NO: 97079 - RNA, 76 nt, Homo sapiens
ccggcaccagagccacgcaaccccgccgagggaccagccgccccccccccaaccaggaaagacgcgagacgccgca

SEQ ID NO: 97080 - RNA, 79 nt, Homo sapiens
gagaagcagaacccagcgaaggacgagaaggacggagaagcgaaagccagaccggcaagagcggaagaaagcaccaaag

SEQ ID NO: 97081 - RNA, 80 nt, Homo sapiens
gcagagcggaggcaaccagccaaaacaacggaaaacagcgacaggaccgaaggagaagaaggagaaggggaggagaaggc

SEQ ID NO: 97082 - RNA, 81 nt, Homo sapiens
gcaacggcacggccccggcacgacacaggggcagaaccgaggggccggagcagccgcacccggcccaaggccacggggaca

SEQ ID NO: 97083 - RNA, 90 nt, Homo sapiens
cagcacccgccaccgcgccggccgcccgcacgccgccgggaaggaggagacgcgaaggaaagacccgcaggagcggaggaggcagaagac

SEQ ID NO: 97084 - RNA, 61 nt, Homo sapiens
gggcggaggagccccaagaacagagcagcgcaccccccacgggcagcagggggagaagcag

SEQ ID NO: 97085 - RNA, 85 nt, Homo sapiens
gaagggaacgccagaccgaaagacacacggggaggacaggcagcaaggagcgcccacggcagagccacaacggaagcagagcggc

SEQ ID NO: 97086 - RNA, 74 nt, Homo sapiens
aaaacaaaaaggccagaaagaggagcagagacgccggacaggggccaaggggaaacgcaggaagaagccaaaaa

SEQ ID NO: 97087 - RNA, 71 nt, Homo sapiens
agaaaacccaccagaaagacagaaaaggacggaaaagaaggcaaccagacacacaaccaccagaaggagag

SEQ ID NO: 97088 - RNA, 84 nt, Homo sapiens
ccgggaagcccggcagaacccaggcgagggacagcccggacagcaacccaaggagacggcgcgggggcggagagggaaagagag

SEQ ID NO: 97089 - RNA, 101 nt, Homo sapiens
cggagacacccaggagccagagcaaaaaggacacacgcaaaccacaagcagggacaggcacccaaaagcaagcgcgggaagcgacacccagaccccacggg

SEQ ID NO: 97090 - RNA, 81 nt, Homo sapiens
aggccggcgcagccccaagacagagcgcacccggcaggcgcaacagagcgccggcggcggcccccccacgcgacccgggcc

SEQ ID NO: 97091 - RNA, 82 nt, Homo sapiens
ggacccggcacccggacagcgcacgccgcccgcccgggcgccgcgccacagccgcgcggacagaccaaaaacagagcgccaa

SEQ ID NO: 97092 - RNA, 76 nt, Homo sapiens
accgcccagaacacagagacagcagaaagcagagagcccagaagaaaccaaagccacaccacccaaccagcaaggg

SEQ ID NO: 97093 - RNA, 81 nt, Homo sapiens
cggccggaggcaccagcgacgaccgaaaacccagccagacaaaagagaagcagaggagcgaagaaagagagaggaacagag

SEQ ID NO: 97094 - RNA, 73 nt, Homo sapiens
accaccaccacaccggagcacacacacgaggccagaggagaagaggaaaaggcagacacaccgaggcccgcaa

SEQ ID NO: 97095 - RNA, 78 nt, Homo sapiens
ccgcaccagcgcccaccgccggacgcacacaggaaggagggccggccagggaagggaacgcccaacgcaaaaagggca

SEQ ID NO: 97096 - RNA, 70 nt, Homo sapiens
gacgccgaaccgccgggccccaacgcaggcccgaggccggcccccagaaccaccacgaacggggcccgcg

SEQ ID NO: 97097 - RNA, 62 nt, Homo sapiens
gcgacgccggcgccgagggacaccgcagagaggcagagacaacggcaagcggagaagagcaa

SEQ ID NO: 97098 - RNA, 93 nt, Homo sapiens
ccgacccccagccccgcgaggcccagagaccgagcagccgcaaggcaacaggcacgcagcacgggggcaggggccgacccagaacgccagcgc

SEQ ID NO: 97099 - RNA, 73 nt, Homo sapiens
gaagcgagagaaaagcccccaaaagcagcacagggaacccaggcgggcccgcggggaaggacgaggcagagca

SEQ ID NO: 97100 - RNA, 58 nt, Homo sapiens
gcagaaggagggcagcccacaggcgggaggccgaaggcaccaaccaaaaccggcgccg

SEQ ID NO: 97101 - RNA, 72 nt, Homo sapiens
gagccagccccgacagcgggaaccgccacaccaacaagacaagaaccaaacagaacccacgaagggagacca

SEQ ID NO: 97102 - RNA, 90 nt, Homo sapiens
ggcggcccgcccgcacccccagccagccgcgaccagcgccagcgcagccgccagcgccggggacccagacaggagcgcgggaagaagccg

SEQ ID NO: 97103 - RNA, 74 nt, Homo sapiens
aaaccggagcgagcccgccaccccgaggaggagaagccgcgggagcggaagacaggcccggagcccgacggacc

SEQ ID NO: 97104 - RNA, 73 nt, Homo sapiens
agaggcacgccggcaagcccgaggcgcgacgcgccaccgcaggaccgggcaccgagccgggaggggcgaagcc

SEQ ID NO: 97105 - RNA, 84 nt, Homo sapiens
gggaccccgcgcggcgggcgccccacaaggcagcccacagcaagcacgccgacacaaagggaccgccaggcaccccccaaacca

SEQ ID NO: 97106 - RNA, 59 nt, Homo sapiens
aaccgcaaaacccaaagcaaaaaccagggagcacagcaagcgggagcaggcagaccaaa

SEQ ID NO: 97107 - RNA, 87 nt, Homo sapiens
ggaagaggaggaggaggaagaggaggaagaacggcaaaacggaggagcagagcgaaacggaagagaaaaccgaaaaagcagaagcac

SEQ ID NO: 97108 - RNA, 78 nt, Homo sapiens
aaaggagacccaaagccaaggagaagccccagcggcagaagccagagacggggagcaggccggggagggagaccaaga

SEQ ID NO: 97109 - RNA, 79 nt, Homo sapiens
aggcggccgagacaaccggccaagagaaaccaccaagagccaggaaggcaaaggccgagagagagccccagcaccagca

SEQ ID NO: 97110 - RNA, 52 nt, Homo sapiens
caaccggccacgaggagggacgggacccaaaacgacacacaaaccaaaagcc

SEQ ID NO: 97111 - RNA, 95 nt, Homo sapiens
ggaggaggagcggacgcggccccccgcgggagcccccagcagggaaccacggaaggagggggcgacacacaagcaggggggaccgacgagcaggc

SEQ ID NO: 97112 - RNA, 107 nt, Homo sapiens
agaccccgcacaagcgaaaggcaggcacaaagaaccaagaaaaccgaagaccagcacccggaagcaaggcggccagcaaagaggagagaacacagccagaggggaaa

SEQ ID NO: 97113 - RNA, 61 nt, Homo sapiens
gaaccgaagggaaacagagagccagaaggaagacaagcgggacaggaccaacagggcggcg

SEQ ID NO: 97114 - RNA, 76 nt, Homo sapiens
ggcccgacggcgccgcgcaggggagccaacaccgcccccacccccgcaggcacccccacccccggaccgccggggc

SEQ ID NO: 97115 - RNA, 105 nt, Homo sapiens
ggaaggagagcccgacaggcagaggggagagagacacgagacgaaaaagcaggaggacacgcgaccgaacaggaggagccaacccacgagaacgccaaaggcagc

SEQ ID NO: 97116 - RNA, 37 nt, Homo sapiens
cgacgaagcacaaccggagcgggcagggcacacaacc

SEQ ID NO: 97117 - RNA, 75 nt, Homo sapiens
aaacaggaacaccaaggaagcaaaagccccagaacgggaaaggagccaagcaggaacgagcgagacaaaaacaca

SEQ ID NO: 97118 - RNA, 86 nt, Homo sapiens
gagcgagcagacgacaagccgggagcgggcggccaaccaggacacaaccagagggaagcacgcccgggcacagcggaagagacgac

SEQ ID NO: 97119 - RNA, 82 nt, Homo sapiens
gcccacagagaaaaagccgcacagccaacgcggggagaagagcacccggaggagaagaggcgcggaacaagcgggagagcaa

SEQ ID NO: 97120 - RNA, 79 nt, Homo sapiens
gagcgggcgccagaagaagcgaaccaccaggagacaaagccacaaaaacaccagaaaaaccaagcagaaaaggagcggc

SEQ ID NO: 97121 - RNA, 82 nt, Homo sapiens
ggggagcggcccccgacagggaacaagagccaacaaggccccaggcaggggggccgcggacagaaaggcaggggcaccccgc

SEQ ID NO: 97122 - RNA, 56 nt, Homo sapiens
aaacacccaccacagcagagggaagcccagaggcacggggcagaacaccaacagag

SEQ ID NO: 97123 - RNA, 55 nt, Homo sapiens
accaaaacagggagaaacacagccagaaggcacaaaaggcggcagaagaggaggg

SEQ ID NO: 97124 - RNA, 80 nt, Homo sapiens
cgggaagacaccgcaaggaaaaccagccaaaacagaggagaccggggacaagaacccaagaaacaggaaaaaacccaaaa

SEQ ID NO: 97125 - RNA, 105 nt, Homo sapiens
ccggcagaaggaggcagagaccacccaagcccgaaacggaagaggagcaagccagcaggccagagagaagaacagcagaaaggaccacgagagcgaaggacccag

SEQ ID NO: 97126 - RNA, 85 nt, Homo sapiens
cagccgccgccgccccagccgcccgcggccgggagcggagccccgggggccggccgcgcacccagacccgagccgccgccgccgg

SEQ ID NO: 97127 - RNA, 52 nt, Homo sapiens
accagaagaaagcgacaggccagacgacaacaaagcccggaggcgcccgaag

SEQ ID NO: 97128 - RNA, 75 nt, Homo sapiens
cgggacagacagccgcacgaaccggaccaggaggacgaaacggcgaggaaagagaggagccccggaaagaaaagg

SEQ ID NO: 97129 - RNA, 63 nt, Homo sapiens
cgacggcgccaaacacagggccaagacaaggggcgcagagcggggggacaggcgcaagaccgg

SEQ ID NO: 97130 - RNA, 76 nt, Homo sapiens
accgagaaggagcacagagaccagacccggcagagcaagagcacgaccggcaccgcggagcaaaggaaaaagccag

SEQ ID NO: 97131 - RNA, 78 nt, Homo sapiens
ccaggagcacggacgccagaacggcgacgaggcggagacacggggagaggccggggagagaggaagccggaggccaga

SEQ ID NO: 97132 - RNA, 71 nt, Homo sapiens
cagcccaaccagagacccacagcagacccccaagggcgaaacagggggggaggagggacaacacacaacgc

SEQ ID NO: 97133 - RNA, 82 nt, Homo sapiens
cgccgccaccacccacccggacacagcgcgagcaaggaaccccgggccccgccacccacgcgaccagcccacgccggcgagc

SEQ ID NO: 97134 - RNA, 65 nt, Homo sapiens
cgggcacggagggggccggccgccgagcccgagggcacgaaccgggaaagagagagaaagcccgc

SEQ ID NO: 97135 - RNA, 70 nt, Homo sapiens
aggacaaagagcaagccggcagagaggagaaaagcagaacagacagacagaagagccgaaaaaacacaac

SEQ ID NO: 97136 - RNA, 82 nt, Homo sapiens
cgcagagccggaggggcgcgggacacacccccaggaggcccggcagagcagaggaagagcggcggaagcagccagggcagcc

SEQ ID NO: 97137 - RNA, 65 nt, Homo sapiens
cccagaagccgggcgccgcgcgccacgagcgcaaaagccaggaaccaggacggagaagaccagag

SEQ ID NO: 97138 - RNA, 66 nt, Homo sapiens
cagaaaaccacacccgaagaggagaacaagcggagaaaacgaagaccagaacaagagagaacgaaa

SEQ ID NO: 97139 - RNA, 74 nt, Homo sapiens
gccccaccgccgacgcccccagccaccaggggcacgaaaacacagaaaggacacgcccgagcggaacaaagcag

SEQ ID NO: 97140 - RNA, 77 nt, Homo sapiens
gaggcgccgccggggcagagagggggcaaagagcgcggggcagagaacagaacccccacagcagcacgcaggcgccc

SEQ ID NO: 97141 - RNA, 83 nt, Homo sapiens
gggagggggcccgagccccgcaacaccgcggcccacgggacccccaggagggacccgcaggaaccagccgggcacccaagccg

SEQ ID NO: 97142 - RNA, 104 nt, Homo sapiens
ccggccggggccgcagcggccacccgcccagcggcgggccaagagagccggagaagacagaggagccagaccaagagacagcacaggcgagcgagcagagacac

SEQ ID NO: 97143 - RNA, 81 nt, Homo sapiens
agccagcggggaggccgcgccgcgcgcgccggaccaggcccccacagacaaggggcaagcaggcacaggcagcagagaagg

SEQ ID NO: 97144 - RNA, 79 nt, Homo sapiens
cgacacacagggacccacggccagagcccggagcaggaaaaacacagagacagacggcggcaggaccgcggcaagcggg

SEQ ID NO: 97145 - RNA, 59 nt, Homo sapiens
cgcggggcgccgaccggcaggggcgcccccccaccagccgacgaaggaccgcgcggaac

SEQ ID NO: 97146 - RNA, 85 nt, Homo sapiens
cacaagggaggcgacagagacagcagcaggccccaggggcgccacagccgaggcagcccggggggccccccgagcggcagacaac

SEQ ID NO: 97147 - RNA, 69 nt, Homo sapiens
cacccagaggaacccagcagacagaaggggcgaaacaccacacccaggccgacacaagaaggagaaaag

SEQ ID NO: 97148 - RNA, 61 nt, Homo sapiens
gagaaccccaaagccggacgccgcccagagcgagggacgaggccacagcagaaaaaaccgg

SEQ ID NO: 97149 - RNA, 63 nt, Homo sapiens
cgacgccaggggaacacgggcaagaggaggaggacaacacgagcagaacgagaacagacccgc

SEQ ID NO: 97150 - RNA, 41 nt, Homo sapiens
gcgaagcaccacgaaaggagggaaaaccggaccaccccaga

SEQ ID NO: 97151 - RNA, 84 nt, Homo sapiens
gcggacgagcggagaaggccacaccacgcagaacgcaacaccaaggcacaccaccccaggaaaaccgccgccggggccagcaag

SEQ ID NO: 97152 - RNA, 84 nt, Homo sapiens
accccccaggacgggcggaggcggggggaccggcgggcgggcccagcgagagccagccggaggacccagcagcaggccacccag

SEQ ID NO: 97153 - RNA, 59 nt, Homo sapiens
gcgaggaacgccgggcgcgggcccacgcggcgcagggcgaccagacgaggggagacgga

SEQ ID NO: 97154 - RNA, 81 nt, Homo sapiens
cgggcgaggcggagaagacgccagcggagaacgcacaccggggcacaacccgggaggagcaggccggacaagacgcagaga

SEQ ID NO: 97155 - RNA, 69 nt, Homo sapiens
ccgaccccacccggaaacagcggcgccggggaggcagaaggggccgggagcggcccggcccggcacggg

SEQ ID NO: 97156 - RNA, 77 nt, Homo sapiens
cacagggggagaacaagggacaggaaacagaagagggacaacgagggcaaggaacacagacaacagagaaaacggaa

SEQ ID NO: 97157 - RNA, 74 nt, Homo sapiens
cgcagagccaagacggagaaacaagcaacggcagagacaccagagcaaccagaccaggcgggaagccaagacag

SEQ ID NO: 97158 - RNA, 86 nt, Homo sapiens
accagacagccacagggaaagcgaggggggccgggccccaacaacacacaggccagccagcagcagaagccggaagacaccaccac

SEQ ID NO: 97159 - RNA, 57 nt, Homo sapiens
aaaaaggaaaacgcggaaaaccgacacaacagcgccacgcagagccccgccaggaag

SEQ ID NO: 97160 - RNA, 104 nt, Homo sapiens
ggaaccggcgcgcccgaaggcggggcacgccaacgcaccaccacggaccagagaacacccgcgagggcccaggccgaaacaaccagagagcacgggaaaggaag

SEQ ID NO: 97161 - RNA, 76 nt, Homo sapiens
gaagagaaaacccagggagacagcaccccagcgacgcggccagcccagggccgaaaagaaaacaggagaaccaccc

SEQ ID NO: 97162 - RNA, 75 nt, Homo sapiens
gggcagaaaaccagccccaggaggggacaaaaccccgaaaaaggcgaacagccggacagcccccggaaccccaaa

SEQ ID NO: 97163 - RNA, 62 nt, Homo sapiens
cgccaccgaagacgggccccaacacccagagacgaaagcccggcaaggagagccaggacggg

SEQ ID NO: 97164 - RNA, 76 nt, Homo sapiens
cgccgcgacggggcaccgccacagcgcgcgcgccccccagggaaagcaacggcgcaagcggcggcggcgggcagag

SEQ ID NO: 97165 - RNA, 77 nt, Homo sapiens
cgccaagcgggagcagaggggagagcggccgccgccgcgccgcccaccacaggcagaaagacacaaaggcccagaag

SEQ ID NO: 97166 - RNA, 47 nt, Homo sapiens
gaaggaccaagaaccagggaaagaaaggcaaagcgagcaagagggag

SEQ ID NO: 97167 - RNA, 59 nt, Homo sapiens
accccccgcagccggggacgcagacgaaggcccgggaggagcggggacacgaggacccc

SEQ ID NO: 97168 - RNA, 78 nt, Homo sapiens
cgggacccagcccaggcggcgcggacggggcgggacccgagccccaaagacagaaaagccccgagacggaagagaaga

SEQ ID NO: 97169 - RNA, 78 nt, Homo sapiens
ggggccgacagacaggcacagaggcgcaaaaccgcgagacaacaggcaacgcaaacaggagaggggccagcaaacggc

SEQ ID NO: 97170 - RNA, 56 nt, Homo sapiens
aacagaacggacccggcaagcaagcgcacagcagcaggggggccaaaggcagagac

SEQ ID NO: 97171 - RNA, 82 nt, Homo sapiens
cggggagaagggaagcgcagacgggacacagcggggcaggagcgcccgcaccacaccccacggcagcgcaagccacaggaac

SEQ ID NO: 97172 - RNA, 38 nt, Homo sapiens
acgagaccacccggcaaaacggcagaaaaaaccagcag

SEQ ID NO: 97173 - RNA, 74 nt, Homo sapiens
aagaaagaccagcacgaaagaaaaaggcacaaagcgccaggaaagcccagaggagaggaaaacgaagaaaaggg

SEQ ID NO: 97174 - RNA, 78 nt, Homo sapiens
ccaggaagcaacggaagcgcagcaacagcaagccccgggcagcaccgagacaaccaagcaagggccagcagaaaccga

SEQ ID NO: 97175 - RNA, 75 nt, Homo sapiens
cacaagagcacgggaaggaagggacaagacccacagcaaagccagcgacagaagccagaccccaacacgggccaa

SEQ ID NO: 97176 - RNA, 70 nt, Homo sapiens
gaggggagaccggccgccccgcccccaccgccgcagacccccaagcagcaggcgacgcacccgccgcagg

SEQ ID NO: 97177 - RNA, 62 nt, Homo sapiens
agaaaaagcacacaccacgcaacggccaggcaaccagagggacgggaacccccccgcaggga

SEQ ID NO: 97178 - RNA, 81 nt, Homo sapiens
ccgagaagcggggcaccacgaaggaccgaagagggcgagccagcccccacccagaggagaacgaaaccacgacaaccagcg

SEQ ID NO: 97179 - RNA, 79 nt, Homo sapiens
cggcccagccggccaggagaacacgcaacaaccgagagaagaacaaacaccacaccagcacagaaaagcaaagcgaaag

SEQ ID NO: 97180 - RNA, 77 nt, Homo sapiens
ggccgcgcggcacccggccgcgggcggccgccgcgccgcccaggcccggaccagccgaacacccaacaagaaggcaa

SEQ ID NO: 97181 - RNA, 76 nt, Homo sapiens
agacgcgcaggccagccccggcaggccaagcagaaccacaggagggggaagaagagaaagccgaaaaagacaaggg

SEQ ID NO: 97182 - RNA, 81 nt, Homo sapiens
ccggcaccggggcgaggagccacgccgcgacaagggcagaaaggacgagaacccccgcgaaccagaggaacccagcgagcg

SEQ ID NO: 97183 - RNA, 62 nt, Homo sapiens
gagccgaccagccggcagcccccggcccgggcacgggacaggcggcacagggagaacacagg

SEQ ID NO: 97184 - RNA, 74 nt, Homo sapiens
gaaagacgcaggcgaccagcacccagaagggagacacagaagcgccaaggacgagaaccacagcgagggcaccg

SEQ ID NO: 97185 - RNA, 53 nt, Homo sapiens
gcagggcgcccccggacccgagcggggaccgagaaagacccccgaggaaccac

SEQ ID NO: 97186 - RNA, 77 nt, Homo sapiens
cgggggggcggcccggccccgcaggcgcaaggaagaagagacgccgcgcggcagacaaggcccggcaggcaaagcgg

SEQ ID NO: 97187 - RNA, 83 nt, Homo sapiens
acaccacaccacgggcccacaggagcaaaacaggagcccacccagaggcagggggcgacccgaacccaaaggaggaaacagcg

SEQ ID NO: 97188 - RNA, 82 nt, Homo sapiens
ggccccgcggccacagcagccccggccggcggcggggcccgggcgagcagcccgccccggacggagcgaagaaaccgcaaag

SEQ ID NO: 97189 - RNA, 77 nt, Homo sapiens
aagcacacaggaagcagaggggaaccacaaaaccaagaaacaaaaagcagcaagaagcaaagaaggaagaaagccag

SEQ ID NO: 97190 - RNA, 67 nt, Homo sapiens
ggaaggaaggcaaagacgagagcggaaaaagcccagccccgggagggaacgaagcccgccggccacc

SEQ ID NO: 97191 - RNA, 76 nt, Homo sapiens
ccgaccgggggggaaccccagagccgcacaaggcaagccgggaccggcggacacgcgccagcgccgacgacacgag

SEQ ID NO: 97192 - RNA, 81 nt, Homo sapiens
ccgcccgccacggcgcaagaaccgcacgacaaggacaagcccgcccacaaagggagagacacagaccaagaacaagccagc

SEQ ID NO: 97193 - RNA, 77 nt, Homo sapiens
aaaaccaaaaacacaaaggcagaagagccgagggaaaccgaggacgacacaggaacgccacaagaaacaacagcaag

SEQ ID NO: 97194 - RNA, 108 nt, Homo sapiens
ccggggccgcaaggccggagaaggccgccgggcccgggcaggggcggggcaacgcggaaggagacgcaccccgaagagggaccccccgagaagcggaccccggaaaag

SEQ ID NO: 97195 - RNA, 69 nt, Homo sapiens
gaaacacagaacgcaggacccagcccgccaaggaggcaaacaggcccgacccgggcgcggccaagcacg

SEQ ID NO: 97196 - RNA, 70 nt, Homo sapiens
agcgaaagccaggacaaagaaagaagcagacacggaaaacgggaagagccaagaagacgcggcaaacgca

SEQ ID NO: 97197 - RNA, 77 nt, Homo sapiens
acagaagccgccaagcaaaagagccaaagcagcagccccgacagccacggaacagccacgccacccccaacccaccc

SEQ ID NO: 97198 - RNA, 103 nt, Homo sapiens
gcagaaggccggggccggccagaagcgggcggcgcgggggagaggcgacagacacagcaccggccccggcagcgggacgcaggacggcagccgggcccaggcc

SEQ ID NO: 97199 - RNA, 81 nt, Homo sapiens
gagaccgcggccgggaccgagggggcaggaagaagcaaaggcagaacggaaaacgaacacacggcagagagccccccaggc

SEQ ID NO: 97200 - RNA, 79 nt, Homo sapiens
cggcacgcacagcacgaagaaccgggaacagacccgagacccgagcaagacggagaggccgcccacggagcgcagagcc

SEQ ID NO: 97201 - RNA, 66 nt, Homo sapiens
ggcgcccggcgccggccgagaaggcagaggcgggaagacaggaagaaggacggcaaaaaccggccc

SEQ ID NO: 97202 - RNA, 87 nt, Homo sapiens
gagcacggacagaccaggggaagggccaggccagggggagcgggccggagagaagagaggggcgcgaggagaaggaaacaggcccgg

SEQ ID NO: 97203 - RNA, 85 nt, Homo sapiens
gcaagacggcaggcgagagccgacccaggccgccggccccacagggagggagccaggagcgcgggagcgaaggccagccacacgc

SEQ ID NO: 97204 - RNA, 63 nt, Homo sapiens
caagcgcgccgcgcccagcgcaaccacggcacgaacgagaggagggaacaccgaggaccaagg

SEQ ID NO: 97205 - RNA, 46 nt, Homo sapiens
agggcaagaagccagaagggggcagaagcagcgaggggccccgccg

SEQ ID NO: 97206 - RNA, 75 nt, Homo sapiens
aaaggcgaaccggggaggcaagacagccgccacccaacgcaagggaggcagaaaggccccgcacgccaagccgga

SEQ ID NO: 97207 - RNA, 49 nt, Homo sapiens
ccccaggcggaacgcccgccccgcagagaggacgaaaaggcccaggccg

SEQ ID NO: 97208 - RNA, 79 nt, Homo sapiens
cacgaacagcggagcaaggcgacgaaccggagagaggagaacgaacaccggaccgccaggaacaggacacccaaccgcg

SEQ ID NO: 97209 - RNA, 69 nt, Homo sapiens
cagagccgcgggcgccggagccgaggcgagcgccgcgcgcaccacggcgaagcgcccaggggagaaccc

SEQ ID NO: 97210 - RNA, 80 nt, Homo sapiens
cacagcacgagaccccccgcgagagcgcaaacacccccagacaaagagccaggacaaaaccaggcagaaccaacacgaac

SEQ ID NO: 97211 - RNA, 76 nt, Homo sapiens
acagccagccccccgagggagggacaagcgcaagccccggggcagagacacaggacacccacccgccggggacaga

SEQ ID NO: 97212 - RNA, 75 nt, Homo sapiens
gcaaaccccccaacaagcaccgaaaacaggaaaaaagggagcacacgaggggcggaaaacccgaacaagagaccc

SEQ ID NO: 97213 - RNA, 76 nt, Homo sapiens
cggacaggcgccgcgccgccgcacgggaccgccgagccacaccggggaaaacgacaacgccaccacgagaggacac

SEQ ID NO: 97214 - RNA, 81 nt, Homo sapiens
gcggggggggcccgagccagggacccagcgacgacggcccacaggcgcggcgcgggcgggacaaggacagagcccgggagg

SEQ ID NO: 97215 - RNA, 70 nt, Homo sapiens
cccccgagggcgggacaagcgcacacaagagagggccgggcgggaagaaaggaaagaggagaaagaacac

SEQ ID NO: 97216 - RNA, 79 nt, Homo sapiens
aggagagacccggaaggccaaaggcgcgcaaggaggaagggagcgcacccgaacacccacaaagggacaggacaagccc

SEQ ID NO: 97217 - RNA, 36 nt, Homo sapiens
gcgcgcagacccggccggcagcaggacaggaagcag

SEQ ID NO: 97218 - RNA, 77 nt, Homo sapiens
aaacaccgcccacgcccgagcaaaaaagaaaaggccccaacagagccccagcaagaggaagccacaaagaaggggac

SEQ ID NO: 97219 - RNA, 80 nt, Homo sapiens
ggcacacaccagcaggcgcagaacgagggacaacggaggaaaagagaggaggagacgagagcaagacaagcgaaggacag

SEQ ID NO: 97220 - RNA, 69 nt, Homo sapiens
accaaaacaggcaaacgaggcaagcaaaacagacaaacaagcgagaacaccgaagcggaaaagcgaaga

SEQ ID NO: 97221 - RNA, 85 nt, Homo sapiens
agagaacaagacgaagaacagaaggcgacaaggccaagaccgccagcaaaggaagacgagggagcaagaagagaggcggaggcga

SEQ ID NO: 97222 - RNA, 38 nt, Homo sapiens
agaagcagagccaccggggggcaacacccccacaaaga

SEQ ID NO: 97223 - RNA, 84 nt, Homo sapiens
aaaaacgagaggcaaacaaagggaccaccaaaagagacaagagcagcggggagaaagaacgagaaaccaacaaagcaggaaaag

SEQ ID NO: 97224 - RNA, 69 nt, Homo sapiens
aagaaaccggaaaacagggcgggacaagggcgcaccggggcgcagcgagggaggacaacggggcgggga

SEQ ID NO: 97225 - RNA, 78 nt, Homo sapiens
agccagggaagcccaacgacagcaccagcggaaagggaacccgacaagaccaagacacccaagaaccgcaaagaagcc

SEQ ID NO: 97226 - RNA, 69 nt, Homo sapiens
cgggccacaagcgagcccgggcgggagagcagccacaagccagggacaacacacgggagagcacaaacc

SEQ ID NO: 97227 - RNA, 79 nt, Homo sapiens
gaggccccccagccacggaaacgaaaccgaggggaaaagcaggaaaaagaaggaagccaacgaacggaacgaagaagac

SEQ ID NO: 97228 - RNA, 85 nt, Homo sapiens
gagcaaggacacaccaaccacgcaccaaaaggaaccgagacagaaagaggaccaggcacccccagcaggacagcacacccaacca

SEQ ID NO: 97229 - RNA, 72 nt, Homo sapiens
gcagggccgggccgccgcgcaccgcagcgccggggcacgacacaaaaacagggcccacacacacgcagggcg

SEQ ID NO: 97230 - RNA, 83 nt, Homo sapiens
caccagagggccaggccagaagagccgaccacaaggggaggacaaccgcccgggaccagagaaggagggggcagagcacggca

SEQ ID NO: 97231 - RNA, 72 nt, Homo sapiens
aacggcagaggagcgggcgagcccagaagggcacaccccccaaccacaaaaagcccacacgaggcggcgaga

SEQ ID NO: 97232 - RNA, 74 nt, Homo sapiens
gccgacaaggaaagagaacagggccagaggacgccaaggcccccaagcgcgagcaagaggaaaccaaagaaggg

SEQ ID NO: 97233 - RNA, 76 nt, Homo sapiens
agaccaacgggaagcccacagacaggccaccagagcacacgcacaccgcccgcagccccaggagccccggaccgcc

SEQ ID NO: 97234 - RNA, 82 nt, Homo sapiens
gaaccggacaagcgcacaccagagaagagcacaccgcacgagggaagcccgggaccgggagcccgggaccgggagccggggg

SEQ ID NO: 97235 - RNA, 60 nt, Homo sapiens
gacccacgcggaggaggacgaggacacggccgcgggcacagccacagcccaccggcagcg

SEQ ID NO: 97236 - RNA, 33 nt, Homo sapiens
gcgaggcccacaagaaggcggaccggacaaagg

SEQ ID NO: 97237 - RNA, 82 nt, Homo sapiens
caccagacaggacccgacgcagagagcggaaaaagaagagacgaagggaacgcacgggaaagcgcgcaaaagacgcacacgg

SEQ ID NO: 97238 - RNA, 81 nt, Homo sapiens
ccggaccacaggccgagaccgaaccgccagcccaagacccgcacgacagccccacgaggaaccgaagagccccggaacaac

SEQ ID NO: 97239 - RNA, 76 nt, Homo sapiens
acgcacgccacacccgaaccggaagcacagggcgcaagagaagccgacggaaaacacaccagcacaagacaggaac

SEQ ID NO: 97240 - RNA, 73 nt, Homo sapiens
ccagcgcgcgccccgcccccccccagagcaaggaggccggaagaaaacggggagcccgaggcaacgcccaggc

SEQ ID NO: 97241 - RNA, 101 nt, Homo sapiens
gagagacgaaggggcagaggccaagagcccaacaccacccgagagccccaaggaggagagaccagcagcaaacccacgcggcgcaccgcacaccagcgcgg

SEQ ID NO: 97242 - RNA, 60 nt, Homo sapiens
gcagagccgccgaggagaaaacacccaggacagagcaagcccccaacaccagcaaccccg

SEQ ID NO: 97243 - RNA, 59 nt, Homo sapiens
acccgccggcccaccaccccagagagaggacagaccccaggaccaagacccgcaaccag

SEQ ID NO: 97244 - RNA, 77 nt, Homo sapiens
caggccgccaccccccaaaggcaaaaacggcgcacgaccccagagccgcccaacagggaaggagacccacccccacc

SEQ ID NO: 97245 - RNA, 78 nt, Homo sapiens
gaccgagagcggaccgagagcgcgaaacgcacgagaagcaggccaagcagaaaaacccgaaaaaagaaaaaggaaccg

SEQ ID NO: 97246 - RNA, 80 nt, Homo sapiens
ccgccccgccgcccgccgccggccggcgcgcgccccacagaaccaggaacagacgaggggacacaaaaaacacgcgaaac

SEQ ID NO: 97247 - RNA, 74 nt, Homo sapiens
aaccagacaggaccgcaggaggcgcggggcccaccccaagccaggaaaagccggcaccccaaagccgaagagca

SEQ ID NO: 97248 - RNA, 57 nt, Homo sapiens
aacaccaaaaacaaaacgaaccaggacggcaaagacgccccacaaccgcccgggcgc

SEQ ID NO: 97249 - RNA, 80 nt, Homo sapiens
agggagggaaaggagaagcgagcagggaggagagagcgaggccacccagaaggccagccccagcggcccccagccccgga

SEQ ID NO: 97250 - RNA, 78 nt, Homo sapiens
gccccgcccccccgccggcccccccacggaaggggacccagagagggaccagggccaaagaagagccggggggcaggc

SEQ ID NO: 97251 - RNA, 87 nt, Homo sapiens
gggaaggagaagcccaacaaagccccacagcagccagaaggaaagggggagcgggccggagagaagagaggggcgcgaggagaagga

SEQ ID NO: 97252 - RNA, 85 nt, Homo sapiens
cggagcggccgggggcggccacgggagagccgggccggcggacgcggcgccacgcagcagggaacgaagcccaaaaggcagagac

SEQ ID NO: 97253 - RNA, 71 nt, Homo sapiens
cagacaaaaacagggacaagcgagcccagaccggaaaccagagcagggaacaggaaaaagggcaagaagca

SEQ ID NO: 97254 - RNA, 66 nt, Homo sapiens
aaaaaacaagaaccagcacccagcagacacaggggacgaagagccagcgaggcgcacaacggggaa

SEQ ID NO: 97255 - RNA, 78 nt, Homo sapiens
caagcccggccggcccggcccgccgcgcccggaggagccgcccgggacaacaggagaagcggaaggagaccacccacc

SEQ ID NO: 97256 - RNA, 72 nt, Homo sapiens
agaaaggccaaaacccccaaggcccgagccgccaggggggagaacaccccccccccagcagccgaagaaaaa

SEQ ID NO: 97257 - RNA, 86 nt, Homo sapiens
ggccaagacaagcaaaaagcccacagaagccaacggacaagcacaaagaaacagccggaaaagcacgagcacaagacgaaaacgac

SEQ ID NO: 97258 - RNA, 86 nt, Homo sapiens
aagaaaggcccgaggccagcgggcccgcggaggcccgcgaggaacgacgccgaggaaggcgaccccgcacacacacccaccagcca

SEQ ID NO: 97259 - RNA, 56 nt, Homo sapiens
gggccaaagaagggagagcaaagaaaaagccagccgaggacgggaaccagaccccg

SEQ ID NO: 97260 - RNA, 66 nt, Homo sapiens
ggcgaggaggaaggaccgcgagaaaacacaaaccgaaaggaaagcagcgcgcagacaggacaacca

SEQ ID NO: 97261 - RNA, 73 nt, Homo sapiens
cgcgagccgaagcgccgcaggcgcgcccggaccgacgcgcaccccggacaccccggccacccgaagggccccc

SEQ ID NO: 97262 - RNA, 63 nt, Homo sapiens
cagaaggcaccaaacggacagcaaacaggcgggcaacgcggcgcggaagaagacagagaggag

SEQ ID NO: 97263 - RNA, 78 nt, Homo sapiens
cgaaaggccagaagaagagcgggggcgggcgagacaggacaagggaggaccccggaacacaacaccgagaagcagcca

SEQ ID NO: 97264 - RNA, 66 nt, Homo sapiens
agggcagcccaaggacacaaggaaagacacaggggcgcgggaaaaaaaccgaagaagaagaagaaa

SEQ ID NO: 97265 - RNA, 60 nt, Homo sapiens
caggggggggcacggaggggagacaacaggaggaggccagagccaacgggcgaagcggca

SEQ ID NO: 97266 - RNA, 73 nt, Homo sapiens
gggccgagagccgcccgggccagcggccgcgcacccccggccggaggcaccagcgaagggccgggccggggca

SEQ ID NO: 97267 - RNA, 81 nt, Homo sapiens
gaaggaacagaaaagaaaagaaaacgaaacaaccgaaaagccacaaagggaaccaggaaaagggggcggacaacacagccc

SEQ ID NO: 97268 - RNA, 81 nt, Homo sapiens
cgagcgcgggcggaagacgaggccacagacaccgaaggaaggacagggcccagaagacccgaggcaccaacacagcccccc

SEQ ID NO: 97269 - RNA, 78 nt, Homo sapiens
cacaagcggacagaacagacgggacccccagccaaaggcaaagaaacgaaggaggcccaaccacaaaaggagccgacg

SEQ ID NO: 97270 - RNA, 42 nt, Homo sapiens
gacaacgagcaaggaaaccggaaacaaaggaggagaggccca

SEQ ID NO: 97271 - RNA, 53 nt, Homo sapiens
gcgcggggagagagccaagcaaccaagccaggaaagcaacggcgcaagcggcg

SEQ ID NO: 97272 - RNA, 83 nt, Homo sapiens
acagcggcagcgacaagcaggcagcgggcgccagcaaaaccgaaacaggccaaacggagggaggagaagacagagcgaacaga

SEQ ID NO: 97273 - RNA, 83 nt, Homo sapiens
ccgaggcccaaggcagaggcgaggcggaagggcaccccacccgggaaagacccggacggaacccaggagcgccccgaggggaa

SEQ ID NO: 97274 - RNA, 57 nt, Homo sapiens
gcaccaaccaacccggaaccgcagacccgggcccgcggccggaccccagaagcgagc

SEQ ID NO: 97275 - RNA, 77 nt, Homo sapiens
aacgcaagacgggccgagaagcagcgcgagacgcgagggccacaagacaagaccggacaaccagcacaccagaggcc

SEQ ID NO: 97276 - RNA, 61 nt, Homo sapiens
ggcccgcggggaggggcagcagcagggcagaaaagaacagacccagaagaagcgaaagggg

SEQ ID NO: 97277 - RNA, 83 nt, Homo sapiens
gaggcccaggcgagggaaggagcacccaggagcgaagacacgagaggcgagggacgacagagcaagcggcagagggcaagcgg

SEQ ID NO: 97278 - RNA, 60 nt, Homo sapiens
ccaagcgcggacgaacaggcgggaagaaggacaggacagcagagaagagaacagaccgag

SEQ ID NO: 97279 - RNA, 72 nt, Homo sapiens
aagaaccagggcaagaaagacccagggcggcgaagggaagagggaaacccaccgagaggaaacaaacgcgag

SEQ ID NO: 97280 - RNA, 73 nt, Homo sapiens
aagcccccgggcacaggaaagaagacaaacagaccccagaaagaagaagaggaaagcccgacaaggaaggaag

SEQ ID NO: 97281 - RNA, 78 nt, Homo sapiens
gcccagaagaccagacaacgcccaaaacacggcaccacccacacaaggacgcaaaagccccaaggcgagaagcagggg

SEQ ID NO: 97282 - RNA, 67 nt, Homo sapiens
gcaaggagggcagaggcagaaggcgccccacccagcacgagaaaaaaaacaagccaacgccaacgcg

SEQ ID NO: 97283 - RNA, 71 nt, Homo sapiens
ccacgcaaacgcgagcccccagaaggaacgaaagacaacaaggccagaccgcggaggcaaggcggaccagc

SEQ ID NO: 97284 - RNA, 80 nt, Homo sapiens
cgccccacggaacaccccgcgccgccaacccgcccccagcgacagccgggcgagcccgcccggccgaagcgaggcacagc

SEQ ID NO: 97285 - RNA, 76 nt, Homo sapiens
cgacggcccagcaggcggggaagagaaaggggaacaacgagagcgccccaagggagccagcgcagccacacaagca

SEQ ID NO: 97286 - RNA, 63 nt, Homo sapiens
accacaaaaacgccacggcacggacccccaaggcaccgcgcaggccagcagcagaacccgggc

SEQ ID NO: 97287 - RNA, 99 nt, Homo sapiens
aaaagcgggaagaacaaaggaaggggagcccgggacccccgggggcgcaggcacacagagaaaaaaagggaacaaaacacagcaagcagacaaaagggg

SEQ ID NO: 97288 - RNA, 78 nt, Homo sapiens
gaggcaccggagacccgagcaccccaacgggcagacggggacggcaaaaaggggcccacaacaaccgcagggcgagcc

SEQ ID NO: 97289 - RNA, 36 nt, Homo sapiens
ggaggaggggagcggggaagccaagagaaaccacca

SEQ ID NO: 97290 - RNA, 86 nt, Homo sapiens
agagcaaggagaagaggccggaagggaaggaacagggaagcaccacgaccagaccccccaaaccccaagacagaggacccacgggg

SEQ ID NO: 97291 - RNA, 100 nt, Homo sapiens
agaagaagaaaacgagacccaaaagggagaaagaagagaagacaggaagaaagagcacgaggcgagcggggagacccgagagaccaagggggaggaccac

SEQ ID NO: 97292 - RNA, 69 nt, Homo sapiens
aagaaaaccgaccagggcaacaccaaaaacaaaacgaaccaggacggcaaaccaggccagagagcacgc

SEQ ID NO: 97293 - RNA, 52 nt, Homo sapiens
ccggcccgagacgggagccccggccccggaaagccaaggacacgcaggacga

SEQ ID NO: 97294 - RNA, 58 nt, Homo sapiens
aaagacgaaagaaccggagaaacaggcccaggccgaggaggaaaagacagagcagacc

SEQ ID NO: 97295 - RNA, 50 nt, Homo sapiens
ccaaagaagaggagcacgaaacaaagagaagggcacagggggacgaaacg

SEQ ID NO: 97296 - RNA, 71 nt, Homo sapiens
cgaacaaacagcaagaaagaccacaagaccagagaacggagaaacgaggccggagaaagggcagagaagac

SEQ ID NO: 97297 - RNA, 65 nt, Homo sapiens
cccgaccgcccacagacccaaacaaaggacaccaggggggaaaaaccacacaggcaaagaacgcg

SEQ ID NO: 97298 - RNA, 76 nt, Homo sapiens
ggaggcacaacccgggccgaggagccacagaggagggcccgggaagggaacgcccccaagcccaaggaaacacgga

SEQ ID NO: 97299 - RNA, 72 nt, Homo sapiens
aagcagaaagaggcggaagcccaggcgaaaccagagaaagaaaacgggaacaggaagagcccgggccaaccc

SEQ ID NO: 97300 - RNA, 105 nt, Homo sapiens
ggacccacggagcaagagaaagacccggggaaaaaggagggagaacagaggccggcccaggaacaggacgcagggaggacgggaccacccaggaggagggcagca

SEQ ID NO: 97301 - RNA, 74 nt, Homo sapiens
aacaggcaaggagcgcccagcaagcccgccgacacagccaccaagaaggcacaagcagaacgggaaaaggggcg

SEQ ID NO: 97302 - RNA, 64 nt, Homo sapiens
gcgacggcgaccaagcccgccccggccccaacaggcccgcgcccagagccccgcagggggacaa

SEQ ID NO: 97303 - RNA, 76 nt, Homo sapiens
aagccgggaaagggacaagaagggcaaagccgaagcacagggaggggacccagaaaggcaaaccagccacaaacgc

SEQ ID NO: 97304 - RNA, 78 nt, Homo sapiens
gccgcaagcccacagcagcagggacgcagccagcgaggccaccagcgccccgcgaaaggagcgcccgagacacgagcc

SEQ ID NO: 97305 - RNA, 63 nt, Homo sapiens
ccaggccgggcccagaggagaaagcgggacgcaacacgcgggaaaaacgggagcaaagccggc

SEQ ID NO: 97306 - RNA, 65 nt, Homo sapiens
acggaggcggagacgggagcaggcacaacaccgggaaaagccgcccccagacagcgcccgaaagc

SEQ ID NO: 97307 - RNA, 62 nt, Homo sapiens
gagcgaagaagaaacagacacaccacacagggggggaggcagagcgggcacgaggacacgag

SEQ ID NO: 97308 - RNA, 76 nt, Homo sapiens
gaaggaagggcagaacacggacaagacagcagcaacagagaacaagcagccagggcggcaagaggcagcaagacac

SEQ ID NO: 97309 - RNA, 105 nt, Homo sapiens
aaaccagcccagggcaagagggaacaacagacaaaggaagagcggaaaaaacccaagaggccgggaagaaggagggacacagcagcgcggagagcggcccgggac

SEQ ID NO: 97310 - RNA, 61 nt, Homo sapiens
ccgagcaggaggcgccacaggggcacgagggcgagacgaacaccaccggagcgcccgcggg

SEQ ID NO: 97311 - RNA, 72 nt, Homo sapiens
cgagcgaacccccgggccaaaacccagaagaagcacaaaacagagcccacagaggaacacaaaaaacaggcg

SEQ ID NO: 97312 - RNA, 92 nt, Homo sapiens
ggggccgggccccgcagcggaaccggacccagcccgagccgccccacacccacaggccggaagaggacgaaccagaagaagcgggagcagga

SEQ ID NO: 97313 - RNA, 86 nt, Homo sapiens
gccgccgccgcgcgcgggagcccagggagcgccgcgcgaccaggaggcggcggcgccgccggcgcgagcgacgcgcccacggagga

SEQ ID NO: 97314 - RNA, 87 nt, Homo sapiens
accggcggccggacggcgggaagcccaggcccaccgcacacaggaggcaccgcgcagggcaaccgggcggaggcagggcacaaccag

SEQ ID NO: 97315 - RNA, 80 nt, Homo sapiens
agaagaacgaagaagcggaggccagacagggaaagcaccgaaaaaacgaagaacgaaacggagaaggaacgagccagcag

SEQ ID NO: 97316 - RNA, 87 nt, Homo sapiens
gccgaccgggcgcaccgaccaggccccaaagccccaaggcgacaagaccggaccggcaccgccggccgccacaaccggagaaggcca

SEQ ID NO: 97317 - RNA, 72 nt, Homo sapiens
gcgacagaaaagagaagagccgaacgaaagaagaagcacggcagacacaccgaccagaggaaggcgaacccg

SEQ ID NO: 97318 - RNA, 72 nt, Homo sapiens
cccccacaccccagcgcccacagagccacaacgagcaggaccgggggcccacgcaagggagaaaccgaaacg

SEQ ID NO: 97319 - RNA, 82 nt, Homo sapiens
accaaaaccaagacccagccaagcagaggccacacgaacgggaaacaacacgaggaggacggcacaaaaagcaccagcgggg

SEQ ID NO: 97320 - RNA, 65 nt, Homo sapiens
aaaccacaacagaaggacggaaagggcaaaaagcccggccccgggcccgcacggcccaccaccga

SEQ ID NO: 97321 - RNA, 74 nt, Homo sapiens
gaggcccaccgcaggcgacggggacaacaaagcacacgcccgaaaaaagagaacaagcagccagggcggcaaga

SEQ ID NO: 97322 - RNA, 58 nt, Homo sapiens
cgaggccgcccccaccgagcccaaggaccacagggaagacggagaagacaaaaagacg

SEQ ID NO: 97323 - RNA, 70 nt, Homo sapiens
ggacagagcgaagcgaccaagcagaaggaccgacagcacgaggaggagagaagaaaagcggcccgagaca

SEQ ID NO: 97324 - RNA, 74 nt, Homo sapiens
ccagcagacaaaaagcaggaacaacacacagggcgaaaaagaggaaagggagaacaggggacccaccgaccgga

SEQ ID NO: 97325 - RNA, 53 nt, Homo sapiens
gagaaagagccaggaaacggaaagagacacaggaacgaagcaggaagggaacg

SEQ ID NO: 97326 - RNA, 38 nt, Homo sapiens
gccagcagaacccgaaagaaagggcccccaaaggcgaa

SEQ ID NO: 97327 - RNA, 78 nt, Homo sapiens
gaagaccagaaacacaaggcaaagcagcaaccagggagcccagaaagggagaccacacccagggccaccaaaccagag

SEQ ID NO: 97328 - RNA, 84 nt, Homo sapiens
ggaaagcgcccgagggaggggggagagaaaagggacacagacgccaggcagccggggcagaggaagagaagcccggccgcgcgc

SEQ ID NO: 97329 - RNA, 82 nt, Homo sapiens
cgaggggaagggcaggaggaggaggaggggcccggcggcggggaggacagccaaccagcccagcgaaaggacacgagcaaga

SEQ ID NO: 97330 - RNA, 74 nt, Homo sapiens
gcaagcgcggaagaggaccggaggccggaggaagccaggaggccgggaaccaagaaggaagccagggcccccag

SEQ ID NO: 97331 - RNA, 77 nt, Homo sapiens
cacgaagagccgaagacaaggaggacagccgggaaccaccacccccggccagaggccacccagcccgacaccaaccc

SEQ ID NO: 97332 - RNA, 77 nt, Homo sapiens
aacccccccacgcgcacgccgggggcgaggagacaaaaaagcccaagaccgggagacggaaaaagacaaaacccccc

SEQ ID NO: 97333 - RNA, 63 nt, Homo sapiens
agagagcccaacgccgggccaagaccccgagacagccgcccgaccgcggcccagagccagcaa

SEQ ID NO: 97334 - RNA, 83 nt, Homo sapiens
ccacaaagaggaaaggacgccaggacacacggcacaagagcccaaggcagcagcaccaggaaggaacgggacagcggagcaga

SEQ ID NO: 97335 - RNA, 83 nt, Homo sapiens
gaaagcccagccagccaaggacgcgacaaaggaccagccagaaaagaacccagaggaccagaacggcagcggccgcggacgcc

SEQ ID NO: 97336 - RNA, 60 nt, Homo sapiens
cccagagggagcccagaagccaggaagggaaagacggagacaacagagagagaggcccac

SEQ ID NO: 97337 - RNA, 77 nt, Homo sapiens
cgccaagaggagccagaggcaggggaaaccaaaaccagagaagccggaacccaaggccccaccagaaaagacaacac

SEQ ID NO: 97338 - RNA, 90 nt, Homo sapiens
ggagagccccagggccagagccgaagcggccccagagaggcaaaaggaaagaagaccaaaaacaggcggagaaacgaaccagcaagcaaa

SEQ ID NO: 97339 - RNA, 79 nt, Homo sapiens
gaccccgcggccggccgggcagggccccgagaggcaggcaggggacccggacgcacggggaaaaagcgccagaaggcgg

SEQ ID NO: 97340 - RNA, 69 nt, Homo sapiens
ggaagcgaacagcccaaagccaaaagagagcgggaacagaaaacaacaaccgaacaaaaaaccaaagga

SEQ ID NO: 97341 - RNA, 94 nt, Homo sapiens
gccccaagccggaagaaccgcagccgagcggggccggccacagggggaaagcaggggagaaaagaaaagaaagacgggaaagaagcgcaaagca

SEQ ID NO: 97342 - RNA, 37 nt, Homo sapiens
gaggcgggcggccaagaccgagccggacccgacgggg

SEQ ID NO: 97343 - RNA, 76 nt, Homo sapiens
cagcagcccagcaggcgcggcccgccaggccacgccaggagaaacgcggaccggcgaggacggggacgcgaggaca

SEQ ID NO: 97344 - RNA, 71 nt, Homo sapiens
gaaaggcaacaaaaccacgcagaccaaagagcagaggaccagggagcaaaaaacacccgccagagagaggc

SEQ ID NO: 97345 - RNA, 75 nt, Homo sapiens
ccggggcgcgggcagccacgcccgcccgccgacacagccaccaagaaggcacaagcagaacgggaaaaggggcgg

SEQ ID NO: 97346 - RNA, 73 nt, Homo sapiens
cgggcacgagaaaaaagggcagggcagggcgaggaaaggagacggcaccaaccaaagggaggcaggaagaaag

SEQ ID NO: 97347 - RNA, 74 nt, Homo sapiens
gagaaaagacagaccgccgacagacagcagccggggcagcccagcggccgcggaaagccaaggacacgcaggac

SEQ ID NO: 97348 - RNA, 110 nt, Homo sapiens
ggggagccggcaggacggaaggggaagaggcccacccggagaaccccacggagaaccagagcggagggcaggccccgggcaccaggcggcggaacaggaaccggcagggc

SEQ ID NO: 97349 - RNA, 70 nt, Homo sapiens
acccaacaggaaaaagcacaaacgagcgcgcgaacacaaaggcgcgagggaccaacaaagacagagagcc

SEQ ID NO: 97350 - RNA, 128 nt, Homo sapiens
ggagggcacagaacaacagaagaggagagaggaacccgaagaagaaaggacgacagccagagagggaaacggaggagcagagaacccgggcaccaggacacccccacacacagagcccagaagaccag

SEQ ID NO: 97351 - RNA, 38 nt, Homo sapiens
cgacgcgcaaacaagcaaagcggagaggagaaaaagaa

SEQ ID NO: 97352 - RNA, 58 nt, Homo sapiens
agaaaaaagcaggcacagagcgcaaacaagccgacggaggggcaaaagaagcagcgac

SEQ ID NO: 97353 - RNA, 81 nt, Homo sapiens
aggcaccggccgagccacggagcaaggggccagaggccgccaaccgagcacaaaacggcaaaaccggaagccaacggaaag

SEQ ID NO: 97354 - RNA, 64 nt, Homo sapiens
gcagacaaagacagcgcccaaaggaccacaaagcaagagcaacaaacggaaaaggagacacacc

SEQ ID NO: 97355 - RNA, 79 nt, Homo sapiens
gcccaaggaaaccggacagaggcccaaggaagacagggaaggggcaaggacaaggccaacaggaaaaaggaaacaccgg

SEQ ID NO: 97356 - RNA, 81 nt, Homo sapiens
aagcacaaaagcgcgaaggaagcagcacgaccagcgcaaggcagggacccaggaccaaaccacccaggacacggagcagcg

SEQ ID NO: 97357 - RNA, 77 nt, Homo sapiens
aaggcgcgccagggcacagggagcagccgaagagcaaaggccgagaaggagggccagaaggaaggaaaaaggaagac

SEQ ID NO: 97358 - RNA, 45 nt, Homo sapiens
ccaccccaacgggccaaagcacacagcaagaaggaggccacagca

SEQ ID NO: 97359 - RNA, 65 nt, Homo sapiens
acagcgacgagagagaccggagaggggagaggccccgagccccggccccaaagacccaaaacaga

SEQ ID NO: 97360 - RNA, 133 nt, Homo sapiens
caacgagagcgcggcgaagaggggcggaagcggggaagacgcagaagggaagggccacgggcacgggggaccagggccgaggcggcgacagacacagcacggcgacggaggggggccgacaccacggggcagg

SEQ ID NO: 97361 - RNA, 88 nt, Homo sapiens
ggagcaagaggaggagacgcgcgagagccggagccgggggggcgagcccgccgagagcgccaaggaggagacaacgggggaagaagaa

SEQ ID NO: 97362 - RNA, 64 nt, Homo sapiens
cgaaacaaccccgaccggccgcagcggcaaaggcggggccagggggagggcgcccgcgcgagaa

SEQ ID NO: 97363 - RNA, 82 nt, Homo sapiens
acgagagccaggccaagaacggaagcaccggcggccaccgggaagcacagcgaggccggaggcccggagaaggaacaagagc

SEQ ID NO: 97364 - RNA, 70 nt, Homo sapiens
aaggcaccaagaagagaaccgggaagagagcaggcaggaggcagacgaaggagagaacgcgggagaacca

SEQ ID NO: 97365 - RNA, 77 nt, Homo sapiens
cggcggggcacaggcccaaggcccaaaggacagcaaggggggagacggagagaaagcgaggagggaggaaccagaaa

SEQ ID NO: 97366 - RNA, 62 nt, Homo sapiens
caaaccaagaagaagcaagcaggccggccaaaggacaaaaggagacgcgggcgggaggccac

SEQ ID NO: 97367 - RNA, 76 nt, Homo sapiens
gagcgacggaaaccaagaagaccggaggaaaagggagcgggcgagccggaaaccacacagcacgaggaccgcgggc

SEQ ID NO: 97368 - RNA, 76 nt, Homo sapiens
caacgcgagcagaacagcccagccgcacccggacacgaccaaaacccccaaagccaccagaaagccgcgagcccac

SEQ ID NO: 97369 - RNA, 95 nt, Homo sapiens
cgcggagccgcgcagccccggagcacgagccggaagaagaggaaagcaaagaagccaagaagcgaagaaccaagaacggaagaagccgggaccca

SEQ ID NO: 97370 - RNA, 54 nt, Homo sapiens
aaccagagccgaaaaggccggccaagcaagcagcacgcggcccccgaaccccgc

SEQ ID NO: 97371 - RNA, 73 nt, Homo sapiens
acaaacccaccgacaacaggagaacaggagacccagggacagagcagccaaaacgacgcagcgcagaacagca

SEQ ID NO: 97372 - RNA, 73 nt, Homo sapiens
agaaaacagggagcagagaggcacccagcggccacacccgccacccacaggaccagagagcccaagaagagcc

SEQ ID NO: 97373 - RNA, 79 nt, Homo sapiens
gaaaccgcccgcacagagcaggaggccgcagccccaggcgagacaggcaaagagccgccacccccgaacgacccggccc

SEQ ID NO: 97374 - RNA, 42 nt, Homo sapiens
gaaggagggcgggcccacgaggcagagggccaggaccgccgc

SEQ ID NO: 97375 - RNA, 50 nt, Homo sapiens
ggaaaggcccaggaaaaagggccccccaccgcagaacgccaggcaagccc

SEQ ID NO: 97376 - RNA, 67 nt, Homo sapiens
gacgaaaaaccaaagccagccgaccgccaaggggaagccggccccgagcgaggcaccggacccgaca

SEQ ID NO: 97377 - RNA, 107 nt, Homo sapiens
gaggggcgaaccacggaaaggaggaagaagacaccggggacagacagggggagacaacaacaagccgaagaggcgaggagccagcacaggggaacacagcaacggag

SEQ ID NO: 97378 - RNA, 76 nt, Homo sapiens
ggaaagccagccggcgagagcagggcggagaacggaaaagcaccaggaagcagagaggaccgcagaagggaaggag

SEQ ID NO: 97379 - RNA, 80 nt, Homo sapiens
caaccggcgccaccagcaaccagagggccagagggaaggacaggaacgcaaggcggggaaaaaaaggcagcacacagacg

SEQ ID NO: 97380 - RNA, 61 nt, Homo sapiens
agaaaaacccgaaagcaagcccaaacgagaggaagacagcaggcagcggcggccgcgccca

SEQ ID NO: 97381 - RNA, 87 nt, Homo sapiens
ccaaacaccccagcccacagagagcaaaacacaagagagcagggaggagaggcgaggggacggcggggagcgcaggacagacgcccc

SEQ ID NO: 97382 - RNA, 58 nt, Homo sapiens
gcagcggcagacccggcagagaacgcagacaggagggcacccagcaccaggcacgcaa

SEQ ID NO: 97383 - RNA, 85 nt, Homo sapiens
cgcggcccccgcgcgccggcgcgcgggcgggccccaggcggggaaggaaaacagcaacacagagcgaacaaaaaaccaggccgga

SEQ ID NO: 97384 - RNA, 74 nt, Homo sapiens
acgaaagagcacacagaaacagggaccaccgacgacaaggggagggcaggggcgcagcagcacgaccccagcca

SEQ ID NO: 97385 - RNA, 73 nt, Homo sapiens
ggggcaggggggagcccaccacccacccgagcggagaagcgaggacacacaggagaagaagagacaggaagaa

SEQ ID NO: 97386 - RNA, 70 nt, Homo sapiens
gcaaagacagccccagcaccaaaggcaaggaggacggccagacaaggggacgagccaaaaccgggacaga

SEQ ID NO: 97387 - RNA, 76 nt, Homo sapiens
agggcaggcacggacgcagccaccggcacaaaagcagaacaaacgaaaccagaacgacaaaaccacaaagcaaaag

SEQ ID NO: 97388 - RNA, 76 nt, Homo sapiens
gagcaacaccgcgagccgcgcggcgcggggccccgcggcggagggacacaggacaaggagccaccggagaggaagc

SEQ ID NO: 97389 - RNA, 70 nt, Homo sapiens
agacggccggcaagaacagcgacaaggagagaagcgcggagccccaagcaaagcaaacgccagaaggaca

SEQ ID NO: 97390 - RNA, 88 nt, Homo sapiens
gacagcaggaggacggccacgggaggcccagaagggcggacagggggaaggggcccggccaggaccggggaagggggccgagagcagc

SEQ ID NO: 97391 - RNA, 71 nt, Homo sapiens
aaaacacaagcacacagggccggagaggaaacagaccgaaagacgcccaggcgggcaggggcacggccagg

SEQ ID NO: 97392 - RNA, 86 nt, Homo sapiens
aacagaccaaggcaccggagcgcgaggagggacagcaacaggaaagggacccagccgggaaaccgagagccacaccccaggcacgg

SEQ ID NO: 97393 - RNA, 82 nt, Homo sapiens
cgcgacagaaggaagagaccgcaccacgccgggaacggaagccgacacacagagacacagccaggccagggcccgggcagcc

SEQ ID NO: 97394 - RNA, 60 nt, Homo sapiens
caagcagcgcaaaggaacaccaggcagacaaacaggcgaggaaaaggcagagccgaaaag

SEQ ID NO: 97395 - RNA, 74 nt, Homo sapiens
gaggggaaggaggaccacgaggacacacacaggaacacccagcccagacaggacaagcaaggcacaaccgccca

SEQ ID NO: 97396 - RNA, 64 nt, Homo sapiens
gaccccgagaaaaagaagaacggccagcagaaggaccaaagccgggcaaagaagcgagagaaca

SEQ ID NO: 97397 - RNA, 40 nt, Homo sapiens
cccgagaaggaacccgaaagaagggccgcgcggaagggga

SEQ ID NO: 97398 - RNA, 69 nt, Homo sapiens
gccaagagaccagacggggggacagcaccacaaacccaacaaggacagagcgggagccaccagcgccaa

SEQ ID NO: 97399 - RNA, 74 nt, Homo sapiens
ccgagggcaaggcgccagaccaagggagaacagaagggcaacagccaaaacaccgcacaggcaagaggacgccc

SEQ ID NO: 97400 - RNA, 59 nt, Homo sapiens
cggcaggaagaaaacgagccaggaacaaagagcaaggcgccaagcccacgggcgcacca

SEQ ID NO: 97401 - RNA, 78 nt, Homo sapiens
aagaacaggaccccgacgcacaccacgccgccacaggccaagcgagaacaacagcgagaaaaggaaagacgggacccg

SEQ ID NO: 97402 - RNA, 75 nt, Homo sapiens
cacagaacgcggcaaacacaaagcaaggcgcagcgacaaaagcgacagagaagagagggacggcgcaaaccaggg

SEQ ID NO: 97403 - RNA, 56 nt, Homo sapiens
gagggagcaaggacaccaccagggagccaggagaggggcagcaggggcaaaaacag

SEQ ID NO: 97404 - RNA, 75 nt, Homo sapiens
aaggggcaccagcgacagaaggggcacaggccacccgagaggagcgcaaggaagaaacaggaacccaaggaaccc

SEQ ID NO: 97405 - RNA, 76 nt, Homo sapiens
gccggaacaccccaggaggaggcagggcagaaaggaccaagccagacgagggaggaggaacaaaacccaggggcgg

SEQ ID NO: 97406 - RNA, 38 nt, Homo sapiens
ggccacgcgcagagcccgaggaacagggagggcccccg

SEQ ID NO: 97407 - RNA, 93 nt, Homo sapiens
gaacagacagaaggagaaaggaggaaaaacagccaggggcaaacacgaaaagagacaagagagaaaacgggaaaaaaaaaacaggaaccacac

SEQ ID NO: 97408 - RNA, 55 nt, Homo sapiens
gcagaagcgggacacgcgggccggcgcggcccagcaagccgaaagcagaagccac

SEQ ID NO: 97409 - RNA, 69 nt, Homo sapiens
accaacacgagcagaaggccgggcagaaaccgggaaacaacaggagcccaggcccagaaggggaagacc

SEQ ID NO: 97410 - RNA, 69 nt, Homo sapiens
aaaagacagcccgcagcacgaccagcaggaacgaacgcagggaggccccaggaccagaaaccagagagc

SEQ ID NO: 97411 - RNA, 77 nt, Homo sapiens
ggagggaaacgcggagccaggccgagaggaaccagaaagagacaagaagggaccggcgcgggggacccaccaccccc

SEQ ID NO: 97412 - RNA, 90 nt, Homo sapiens
aggccaaagcagccaagggaagcagaaagcaaaccagccagcacgggggcccagccagccagcagcgaggggggacggaggcggcacggg

SEQ ID NO: 97413 - RNA, 116 nt, Homo sapiens
ggacgcaggagcgccaccgcggcgaggcgcggagagggcggcccagggggccacgcgaaccaaaaacgcagaaaacagcacgagagaaaaccaggccgaggagaaccaggagaaga

SEQ ID NO: 97414 - RNA, 79 nt, Homo sapiens
acacgacagacggggacgaaacccaaagcgggaaacaaagagggcgaagacaggacggcccaggcagacacggaggagg

SEQ ID NO: 97415 - RNA, 81 nt, Homo sapiens
ccggacaaccagaggcagccagcagggggagggggcaaccaacaacgaggaccagagccaggggcaccagagcggaccccc

SEQ ID NO: 97416 - RNA, 79 nt, Homo sapiens
aacgacccgggggccaggggcaaagaaaaaggagagaaaaagaggcaaaacaacaagaagaaaagagaaaaaagagagc

SEQ ID NO: 97417 - RNA, 78 nt, Homo sapiens
cggggggaggacccgaccagcggccgggagcagaagcgggaggagcacagaaacacggcccaccccagaccacaccaa

SEQ ID NO: 97418 - RNA, 81 nt, Homo sapiens
caggaccgggggcggagccagagcgcagagaggccgcaacaaccccgaagagaggaacaaacaggcaaggagcgccacgga

SEQ ID NO: 97419 - RNA, 74 nt, Homo sapiens
ggaacagccaaccaagaaaggggcacggcaaaagaccaagagcacagcagaaggcccagaaaagcaccaggagc

SEQ ID NO: 97420 - RNA, 74 nt, Homo sapiens
gaagcgagaaaaacacagagagagagagaggccaggggcaagcaccacccgagcaagagagcccagaggaagaa

SEQ ID NO: 97421 - RNA, 41 nt, Homo sapiens
ccagcaggcgcggcccgccaggcagcacaacaagacgcagc

SEQ ID NO: 97422 - RNA, 69 nt, Homo sapiens
cccgcggcggacaggaggaggaggaagaaagagcaagggcggggaacacaagagacacagcaccaacac

SEQ ID NO: 97423 - RNA, 82 nt, Homo sapiens
agaaaagaagagcaaccgggcagaaaggcaaaagggagaagaagcacggaaaaaccaacaaagagaaaaaacaaacagaagc

SEQ ID NO: 97424 - RNA, 60 nt, Homo sapiens
ccggacacaacggcgagaagaaaagccacccccgcacaacaccggcgggcggcaaagaag

SEQ ID NO: 97425 - RNA, 70 nt, Homo sapiens
acaacaccaccacagccaagggcagagagggggcccaggacaaaccggcgaccacacacggggacgacgg

SEQ ID NO: 97426 - RNA, 79 nt, Homo sapiens
accgagcgaccgggcccagagggcaaaggagcgccccacgggcacccaccccaagaccccggccaggagggccgccccc

SEQ ID NO: 97427 - RNA, 74 nt, Homo sapiens
accgcccgggagacggagcgaaggccggaggagcacccacgggagaccggggggcaagaaaaggaagaagaagc

SEQ ID NO: 97428 - RNA, 62 nt, Homo sapiens
ccaacacaccacaccgaaagcaggggcaaaggaaaggggcaggcacccccaacaagaaggaa

SEQ ID NO: 97429 - RNA, 73 nt, Homo sapiens
ggacagagggaggaggcagggaccagcggaacgaggccgcgaaaggggagaccgaaggaccaccggcagcggg

SEQ ID NO: 97430 - RNA, 84 nt, Homo sapiens
ccacgccaaacagaagccagaacgcggacccccgcagaaagggacgcggcacagaacgaagaagaaagcagaagcaagagaaaa

SEQ ID NO: 97431 - RNA, 77 nt, Homo sapiens
gagggccgagggagggccgagccagccgcggccggaggagcccccaggcccgcaggacgcccgcggccacaaacccg

SEQ ID NO: 97432 - RNA, 75 nt, Homo sapiens
gggcgcggcacgcgggcccgagcgcagccgcgcagggagaagaggcacccagcgccggggaggcagaaggggccg

SEQ ID NO: 97433 - RNA, 79 nt, Homo sapiens
cccaacacacccaccagacagacgaagggcaacaaagaaagaacacaaacgacacagacccaagaaaccgagagacaca

SEQ ID NO: 97434 - RNA, 76 nt, Homo sapiens
ggagaaaaggccaagaaggcaggcaaagaacaaggagacacacggcagccaggccgaagggccaaccacaggcccc

SEQ ID NO: 97435 - RNA, 81 nt, Homo sapiens
ccgcagagccgcacaccccgcacccacaaaagcgaaaagccagacaggaacaccagacagaagaacgccgggccaccagag

SEQ ID NO: 97436 - RNA, 88 nt, Homo sapiens
acaggacagccagagaccgaacagagagaacaagagacgcagccgcacagagagacggaaagaacaggccaagaaaagccaaagaaag

SEQ ID NO: 97437 - RNA, 78 nt, Homo sapiens
gcacacaagaccgggaaggggaacggggccccaggaccccacaacaccagaacaaaaggcagcacgcagcaacgcaga

SEQ ID NO: 97438 - RNA, 81 nt, Homo sapiens
gacagcaacaaaaccgccaagcagcaccgcgcacccgcccagggccgaagggcaagagggcacagaagacggcgccccaca

SEQ ID NO: 97439 - RNA, 72 nt, Homo sapiens
gaaggccggggcgcccggcgccggccgagaaggcagaggcgacccccgccagcaacggccaccagccccccc

SEQ ID NO: 97440 - RNA, 66 nt, Homo sapiens
cacggacagaaagcaagaggaaaacaagaacagaagagccagacagcaggagacaggggagggccc

SEQ ID NO: 97441 - RNA, 73 nt, Homo sapiens
gcgggaagccacccgggaggaggagggggagccaaggaccaagagaacgaaccagacacacaaaggaaccagc

SEQ ID NO: 97442 - RNA, 122 nt, Homo sapiens
cgaggaccccaccgccaggaccccccaggagagcgccccagggcaagccccgcccggccaacaaggaccccaggggaagaaaaggagggggagcgcgggaggggacccccggcgagaaacgg

SEQ ID NO: 97443 - RNA, 76 nt, Homo sapiens
ggccgaagacaccccccccccggaccagaggggccagacccacgagaagcgccgaacaaggcaacggaaaaggaag

SEQ ID NO: 97444 - RNA, 128 nt, Homo sapiens
aaagcagcacacaagagacgggcgcagcgcccggcccgaggcccaggacagccaggcaccagcaccaagaacggcccgccacgggccccgcagccgcgcccgagcgcccgagcagggacagcgaccac

SEQ ID NO: 97445 - RNA, 78 nt, Homo sapiens
acccacgccaagcacagccagccccaggggaaccaccccaagggcagacgaacacaaaccgagacgagcaggaagaga

SEQ ID NO: 97446 - RNA, 69 nt, Homo sapiens
ccggaccccaagaccaagcgcgccacgcgcggcgcgccgaacaaaaccagccaagcagaggagaaaaag

SEQ ID NO: 97447 - RNA, 76 nt, Homo sapiens
acgcgagaacagaaacagcgaaccagcaggcaccgaaggacagaagaggacccagccaacgacaagaagaggaagc

SEQ ID NO: 97448 - RNA, 94 nt, Homo sapiens
cacaaaaaaggaaccccggagaggcagcaggcccgaagcagccggcaagaagcccagcagcgagaagaagcccaaggagaggcagagacccacg

SEQ ID NO: 97449 - RNA, 77 nt, Homo sapiens
ccaagggacaggcaaggccagcgggggcgggccggccagggggagaaaaaaggagccagaagaacaggaagacgcca

SEQ ID NO: 97450 - RNA, 67 nt, Homo sapiens
agcgcacgggcaaggcgcccaaaacaagcgaagaaggaacgaaaggcaaaacacagcgaagcagccg

SEQ ID NO: 97451 - RNA, 78 nt, Homo sapiens
gcggcacggcgccgaccagcaccaggggaagcgggacaacgggggccacaggagaaagccgagcaggccagcccggcg

SEQ ID NO: 97452 - RNA, 77 nt, Homo sapiens
acgacgaccacggcggaggaaggaccccgccaaagcggagaggagaaaaagaaacccaaaggggcacaagaggagac

SEQ ID NO: 97453 - RNA, 81 nt, Homo sapiens
ccaagacaggaagacggcacaaagaggggagaagcaaccacagacacaacaagcgaaacaagcacagcgcaacagacaaag

SEQ ID NO: 97454 - RNA, 75 nt, Homo sapiens
ccccggcgccgccgcacgcggacacgcggaggaagaaaacagcgaaagcagaaaagaggggaaagagacgagaga

SEQ ID NO: 97455 - RNA, 78 nt, Homo sapiens
agcccccagaaaggaggacaacgggacccagaagagcggcagcggagagccgcccgaccaaccggcacggaaccccag

SEQ ID NO: 97456 - RNA, 86 nt, Homo sapiens
acgcagccaggaaaccacgagaccagccagcaggagcaagaaacacaagcccgaagccagaagcgccccgcgagcgggcgcacaga

SEQ ID NO: 97457 - RNA, 75 nt, Homo sapiens
cgaaaggaggaggcacagagcagcccaagagaacgaaagcaaaaagcgccgaccagccgcaaaaaacaaaaagaa

SEQ ID NO: 97458 - RNA, 77 nt, Homo sapiens
aggggacgagccaccacaggcaggcccccgagcacgaggagcaagcgcacccagccgcggacagagaaccacaccgc

SEQ ID NO: 97459 - RNA, 73 nt, Homo sapiens
ccaaaaagcaaacggaccagaccgaccaccaaaagacagggcagaccgccagcagcacagcaagccacagaga

SEQ ID NO: 97460 - RNA, 74 nt, Homo sapiens
acgcagggaagcccaggggcagaggagcacaggcccaggcgacggaacccgacccaagcaaccaccgcccagcc

SEQ ID NO: 97461 - RNA, 75 nt, Homo sapiens
ccaaccacaaaaccccggcccgccggagcgggaggacagccgccagagcgccaagacaagcaaacccaggaacac

SEQ ID NO: 97462 - RNA, 72 nt, Homo sapiens
accgccacgcgcccgggagacgcccgcgccgccgggggcagcacgccgaaggagagaccagacaacaggcca

SEQ ID NO: 97463 - RNA, 55 nt, Homo sapiens
cagcaccacacgcccccaagacaacgaaggccacaaggaagcccaaagagcgccg

SEQ ID NO: 97464 - RNA, 54 nt, Homo sapiens
gggcggacgggcgcccagccaggagcggcccccacagcccaggaagacagaaac

SEQ ID NO: 97465 - RNA, 64 nt, Homo sapiens
gcggagagcaccccccaacagacagccgaagcagcagcaacagggcaacgggacggcgcccgga

SEQ ID NO: 97466 - RNA, 78 nt, Homo sapiens
aggaggcaggagcccgaggaggagccaaggggcagcagcggaagcggaggaggggcccagggccacccccggccagca

SEQ ID NO: 97467 - RNA, 77 nt, Homo sapiens
cgcgaagaacccaaacaggggaccagggagaggacgcagacggaaccgaccgagcagggcacaagagagccacagcc

SEQ ID NO: 97468 - RNA, 75 nt, Homo sapiens
gcacacagaccacagcagcggccaaacaacggcggaaagcagggccagagaccacagagaagcaggcgaccaggc

SEQ ID NO: 97469 - RNA, 70 nt, Homo sapiens
cagaggcgagagcggcagcagcaccagcccaagagaagggagacagggaacgcgcgggcacgggggcagc

SEQ ID NO: 97470 - RNA, 73 nt, Homo sapiens
ggccgagcaggcgagcgaacgacggacggggggcccgggcgaaaccggaccgggcccggaggagcgaacaagg

SEQ ID NO: 97471 - RNA, 79 nt, Homo sapiens
aggcggaccacaaaccccccaaagcacagaccaacgcacaaaagaaccacaccaccagggcccccaccaccggagccag

SEQ ID NO: 97472 - RNA, 73 nt, Homo sapiens
gcagcccagggagcgggagacagggaccccgacggagagacaaagaagacggagggggggccagccaccgcgc

SEQ ID NO: 97473 - RNA, 75 nt, Homo sapiens
cagaccgcggggccgcgccccaggggggggggggcaggaaacggaaagagaagacgaaaaaacaagcagagcaag

SEQ ID NO: 97474 - RNA, 69 nt, Homo sapiens
gccaagaggaagaaggagccccaaagacagggaggaccacgccggagcaaggacggggggccggagaac

SEQ ID NO: 97475 - RNA, 79 nt, Homo sapiens
gcggacgcgccgcggggcgcgggccggccccgcggggagcgcccccggcgcgagccccaggaaagaggggggagccccc

SEQ ID NO: 97476 - RNA, 70 nt, Homo sapiens
caggccaaccgggagaggagcggaggcacccaccgacagaaagagaaccggccaacagaccagaacacac

SEQ ID NO: 97477 - RNA, 59 nt, Homo sapiens
cggaagcgagggcacgggcggcagcccgagaccgcagcaggcacagcgccgaggcccag

SEQ ID NO: 97478 - RNA, 69 nt, Homo sapiens
caaggaagcgacagccaggaccaggcacccgggaaggaagggccccacaccaaaccgccacgcaacaga

SEQ ID NO: 97479 - RNA, 68 nt, Homo sapiens
ggagaaggaccaagaaccagaacacggccccagggccacccagcagacagaggaggcggccaagagaa

SEQ ID NO: 97480 - RNA, 126 nt, Homo sapiens
gaggaggagccgcgcaccagcaggggggcaacagccagccagccagcgccccgcacccacgaccagggaagcacgggcagagggggcacaggagccgacgcagagagaaggaggaaacaggagggg

SEQ ID NO: 97481 - RNA, 72 nt, Homo sapiens
gcacaagaaaacccacgaagggaacacgcaaaacaaacggagagaggagggagaaacaaaggccaaagacgc

SEQ ID NO: 97482 - RNA, 42 nt, Homo sapiens
caggccccaaccaaggaaacgccccaccccacggaggacagg

SEQ ID NO: 97483 - RNA, 78 nt, Homo sapiens
cggaggggcaagaacaccgaggggccgggaacggcgccggaggaccagacccaggagggacaaagaggccaggagaca

SEQ ID NO: 97484 - RNA, 77 nt, Homo sapiens
agaaacaggcagagaggaaacccagaaaccacagacacacgaagagaagagcccggaaaaggagaagaaaaaagaca

SEQ ID NO: 97485 - RNA, 37 nt, Homo sapiens
acacacaccacaggccggaaggagggccccggagcag

SEQ ID NO: 97486 - RNA, 72 nt, Homo sapiens
aaggcgaccgcacgaggagcaaaccaggcgaagacaggcaccgggaagggaaccggcagcgaacgaggaagg

SEQ ID NO: 97487 - RNA, 72 nt, Homo sapiens
gccgggcacacaaagaacagaagaacggacaccgcccaccaaccagagagccaaggagacaggcacaaaaga

SEQ ID NO: 97488 - RNA, 62 nt, Homo sapiens
agaaggaccaagaaccagggacgcgagagcccacgaagagcgacggagcgaacccggacgaa

SEQ ID NO: 97489 - RNA, 79 nt, Homo sapiens
aaggcaaaggcagacaacccgcaggagagcgccggcgcggaaggcgggcccccgcgcaaggcccgccgcgcgcgcccaa

SEQ ID NO: 97490 - RNA, 68 nt, Homo sapiens
agagccagaccacggcacaagcggagcccggggaaagcaacccaccaacaggacaagcggcagaaaaa

SEQ ID NO: 97491 - RNA, 64 nt, Homo sapiens
cgaggcaacgccccagggggacccgaagcccgcgagaaggaggcgcaaaaaagaccagaacaag

SEQ ID NO: 97492 - RNA, 73 nt, Homo sapiens
ggcgggaccggccggcggccggcacaggaaggcagcaacaaccacccagggagaaaaacaagaggacagacac

SEQ ID NO: 97493 - RNA, 68 nt, Homo sapiens
ccacgagaaggcggaccgaggacgaaggagacagagcagccgccggacaaaagggaccccaccgaccc

SEQ ID NO: 97494 - RNA, 67 nt, Homo sapiens
gcggagggaccccaggaaaaaacacccaaaggaaaagccaggggaaacagcagaggcacacaggaca

SEQ ID NO: 97495 - RNA, 75 nt, Homo sapiens
gcagccaccggagacaaaagcacaggccaccagccaggagcccaagggaggggaagccgccggccggggccccag

SEQ ID NO: 97496 - RNA, 76 nt, Homo sapiens
cccccaccccccccgaggaaaaggaaccgggcaggcacacacgcagggcccgcgaggcagccacgcgaagggagga

SEQ ID NO: 97497 - RNA, 83 nt, Homo sapiens
gccgagaggccaccagccacgcggcagaggaccagcgacggcgcacgagaccacacgaggcacaggaccccggcaccccgccc

SEQ ID NO: 97498 - RNA, 74 nt, Homo sapiens
agcagccacgggagagaagaacgcgcaggagccacacgcacagacgccgggaccggaaagcagcaagcccgaga

SEQ ID NO: 97499 - RNA, 71 nt, Homo sapiens
acaagcacgccgcccagacaaccggcacaaacggacaaacgagaaaccagaaaagcaagagaaaaggaaga

SEQ ID NO: 97500 - RNA, 68 nt, Homo sapiens
gagcagccagcgaaagccacgaacggagagcagaccacgcgccaaacgcaagacccaaggagaacgac

SEQ ID NO: 97501 - RNA, 78 nt, Homo sapiens
gaaacaaaacccaaagagccgcgaagcagccacggaccccagcacgaaaagacgggagaaaaaggggccagggacaga

SEQ ID NO: 97502 - RNA, 59 nt, Homo sapiens
caagaaagaccacaagaccaccgggagaagaggcacaaggacaggcacagagaacagaa

SEQ ID NO: 97503 - RNA, 96 nt, Homo sapiens
gcaggcgaagccccggagaaccacccggaggagacggggcagacaacggagcccgggaaagccccacgaagagagaagcgcggaccaaagcagaaa

SEQ ID NO: 97504 - RNA, 37 nt, Homo sapiens
caaccaccaagaggaggcaacccagagacacacacca

SEQ ID NO: 97505 - RNA, 55 nt, Homo sapiens
caaaacaccccgggaagaacgagaaggacccaaggccagccagccccaggcacca

SEQ ID NO: 97506 - RNA, 69 nt, Homo sapiens
gcggcggggaccaggcccgaacaccgccaccgggggcagcacgccgaaggagagaccagacaacaggcc

SEQ ID NO: 97507 - RNA, 110 nt, Homo sapiens
gggagcgaagcgagggcgaagcacgacacagaaggggaggggagggaaaggcccaggaaaaaggagaagagaggcagcaaagggaccccacagcagcaggggggacacag

SEQ ID NO: 97508 - RNA, 88 nt, Homo sapiens
ggaagcccaaaggaccgaagcgaggagccccagcgaaggaaagcggaacgacgacaccgagcagaagccggcacagaaagggaccaaa

SEQ ID NO: 97509 - RNA, 79 nt, Homo sapiens
ggggagagcgacgaggacgagacgcagaccacagcgacgaggacgacgccgggaccagaagccaggagaggcgccggga

SEQ ID NO: 97510 - RNA, 73 nt, Homo sapiens
ggccacaggaagccacagcaggccaccagccagaagacccaacagaggccggcggggcgacacccaagacaga

SEQ ID NO: 97511 - RNA, 76 nt, Homo sapiens
gagacacgaaggaggggggagacagggacaagccccggaacacaaccggacaggaagaaaggaaggggcaccacaa

SEQ ID NO: 97512 - RNA, 67 nt, Homo sapiens
agacgcagcgccacggccacggcccccacgcaacaacaacgaacgcacagacgagccggaaagcagg

SEQ ID NO: 97513 - RNA, 76 nt, Homo sapiens
gaagcgagaccaacgcaacccaagggccaggacaggacaggaccggacagcccccagccagaggacagaccccacc

SEQ ID NO: 97514 - RNA, 72 nt, Homo sapiens
cgcccagagcgcagcacgggcgcagagcagaccacgggggaaagacggaggacggacaaaaagaccacgcca

SEQ ID NO: 97515 - RNA, 87 nt, Homo sapiens
gccgccgccgccgcagagcgcagccggggccgaggaaaacccgcagcccaaagggcagaagaagaagaagacgcaagacggcagggg

SEQ ID NO: 97516 - RNA, 81 nt, Homo sapiens
acggaccgagaccggaccgagagcggaccgagagcgcgaaacgcacgagaagaagcaaaggaggcgggccggaaagaaaaa

SEQ ID NO: 97517 - RNA, 78 nt, Homo sapiens
aaggaccaagaaccaggggcaacccaccagcaggcggaaaagggacccggaagagagacccaagccaagaggcccgga

SEQ ID NO: 97518 - RNA, 80 nt, Homo sapiens
ccgaccggcgccaccgcccagcacggagagcccacgcaggagacgggaggagcgacaacggagcacacccaccccgcgca

SEQ ID NO: 97519 - RNA, 85 nt, Homo sapiens
aacgcaacggggggcagagcgacaaccaagcaggcccagagaagccgggacaccaagagaagcaaaagcgagcaccgcacagagc

SEQ ID NO: 97520 - RNA, 56 nt, Homo sapiens
caaaggaacaagccacaaggagaaggaggagcaaaaaggacagagcacagagccag

SEQ ID NO: 97521 - RNA, 73 nt, Homo sapiens
caacaagcacagaaaggggggagacaaccaacaagaagggcgacccaaaaaaaacagagagcccacggaagga

SEQ ID NO: 97522 - RNA, 67 nt, Homo sapiens
gaaaaacaaacacaaccgaaggagggcgacggaaccaacggaggccaggaagggcccagagcacgcg

SEQ ID NO: 97523 - RNA, 85 nt, Homo sapiens
ccgagcgggacccccgccgccccgggggccggacggaaaagacgagggaagaagaccgacaacaaccaggggaagggaaaaaaga

SEQ ID NO: 97524 - RNA, 75 nt, Homo sapiens
aaccgaaacagaagcgcaagagaagcacagccaaaggagccgaacccaaaaagagcagcaccgcgagcgagaaca

SEQ ID NO: 97525 - RNA, 74 nt, Homo sapiens
ccggggcggggggggggcagaccaagagaccagaaccaggcacccgcagaaagcggaagagaccacggcagagc

SEQ ID NO: 97526 - RNA, 83 nt, Homo sapiens
agggggcgcccagcgccaacaccaaggaaggccaaccgaaccgggcggcgccagaaaacgaagaggagaagacaccaaaaagc

SEQ ID NO: 97527 - RNA, 78 nt, Homo sapiens
cgaaacagagaggggaaggagcccagcgacgacagagaaaccgaggcgcgaaacaggaaggccacagcagaagagaag

SEQ ID NO: 97528 - RNA, 79 nt, Homo sapiens
gggacacaagcgcccgccaccacgcccggcaagcaaacggaaaaaagaaagggaccaagggggaaaaaagacaaaaagc

SEQ ID NO: 97529 - RNA, 74 nt, Homo sapiens
gggcaccacgaaaaaaccgagacaccagcagaaggaaaacccacaagagcccaggacccaaccgagcaagccag

SEQ ID NO: 97530 - RNA, 73 nt, Homo sapiens
gcaaccagcgggaccagaggagaccggagccaccaaaaacgaagaggaaaccgaagagaacgcaccaccagaa

SEQ ID NO: 97531 - RNA, 75 nt, Homo sapiens
cagagagccccagcaggaaggccaccgagggaacccgaccggacccagccccagaagggcgagcccgcccggccg

SEQ ID NO: 97532 - RNA, 72 nt, Homo sapiens
agaagacgacccaccagacagccagcacagagcccgagcgaagagaggaaggacaggacaagccaaggcgcc

SEQ ID NO: 97533 - RNA, 81 nt, Homo sapiens
accaccagagaacgggccgaggaaggagggccccggagcagccacaccaccgaggccccacccagcacgagcacagcccca

SEQ ID NO: 97534 - RNA, 64 nt, Homo sapiens
gcgagcgccagccacagcagggccgaaacggccagggacgccgccagccaccggcgcgaagcca

SEQ ID NO: 97535 - RNA, 78 nt, Homo sapiens
gacaagggcggggcaaccaaggaaaagacaagacacgggaaaagaaaacccacagaaaacccaaagaaaccgaggacg

SEQ ID NO: 97536 - RNA, 79 nt, Homo sapiens
caaaaaaaaagggaagaagaaaagcaccaaaaacgaagaggacaccccggggcaaggagagagacaccacacaaaaagg

SEQ ID NO: 97537 - RNA, 62 nt, Homo sapiens
cgagccgggaacaaaggagacgcggccccaacggaaaaagggacgaaacaacaacaggccca

SEQ ID NO: 97538 - RNA, 83 nt, Homo sapiens
cgagaaacggacaaccaacggccaagaacaagaacaaaggccgcgacggaggaaggaagaaggaaaagcggaagcgcagacaa

SEQ ID NO: 97539 - RNA, 78 nt, Homo sapiens
cagccagcaggcacagaaaaaaggacaagaagaaaagaggagcccgcggcacagagaacagccgggacaccacagcaa

SEQ ID NO: 97540 - RNA, 63 nt, Homo sapiens
aagccgcaaccagagccgccgccacgggaaaagcacagggccaggaagcagagggacagccag

SEQ ID NO: 97541 - RNA, 76 nt, Homo sapiens
cgccgcacgcccagcggccgccggcgaagaagggcggacgggcaaggaccaacagccgagcacggaaaaccaagaa

SEQ ID NO: 97542 - RNA, 63 nt, Homo sapiens
ccaggacggcaggggaccgcacaacggcaccgaaagcgaaggaagcccgcccccaaagccgaa

SEQ ID NO: 97543 - RNA, 70 nt, Homo sapiens
aacacacgggaacccaagaaacaaacccagacgggcagaagagagagaaagggaaagcacgaagggagcc

SEQ ID NO: 97544 - RNA, 76 nt, Homo sapiens
ggacaccagagcgaaagaagccagcaaccagaagcagacaacagagcaaagaggcccaggaccggaccccgacgga

SEQ ID NO: 97545 - RNA, 76 nt, Homo sapiens
cgagcccccgcggacccacccccgaacccccaaggaccacccacgaagccaaggcaggaaacgcgccacaaaaggg

SEQ ID NO: 97546 - RNA, 79 nt, Homo sapiens
gagggcccagaaagccggaaaccacgggcaaaacagaagcagacgagaacggcagccaaggaagacgacccaagaccca

SEQ ID NO: 97547 - RNA, 60 nt, Homo sapiens
cggcgggccgaccaaggaccccaagggaggaggacagcaccaccacccagaaaacggaga

SEQ ID NO: 97548 - RNA, 77 nt, Homo sapiens
gagcgagcgagggggggcgcgccggaaaccggagcgcgcagcagccaaaacggacaagccaaggcacgagccaaaga

SEQ ID NO: 97549 - RNA, 54 nt, Homo sapiens
cgccccccgcaacaacccacaaggaccagacagcaggaaaagacaagaaaaggc

SEQ ID NO: 97550 - RNA, 91 nt, Homo sapiens
gcggggccggcgaccaggaaccgggcgagcagcggcgggggcccgagggaacgcagacccagcagcccagcgccgagcgcagggacagagg

SEQ ID NO: 97551 - RNA, 70 nt, Homo sapiens
ggaacgagaacacggaagccccccgagaagcggagcccacaggcggggagcgcccccaggagcagcggag

SEQ ID NO: 97552 - RNA, 79 nt, Homo sapiens
ccacagccacgccgccgcgccgcggagcggcgccgacaaccccgaaccagaagcggcaaacagcacagccagcagacca

SEQ ID NO: 97553 - RNA, 80 nt, Homo sapiens
gaaacgcagcacgcaccaaagacaccccgcccggaagcccagcacacaagagcagaggccaacgcacagaagccaaacgc

SEQ ID NO: 97554 - RNA, 57 nt, Homo sapiens
ggaacaaaccgaagaacagcgggaaagaaggcaaaacacgggcaaagaccagcaagg

SEQ ID NO: 97555 - RNA, 35 nt, Homo sapiens
gcagacagcacagcacagccggaggcgcagaccgg

SEQ ID NO: 97556 - RNA, 73 nt, Homo sapiens
accgggggcaaggccaaaaagaagagaccggcccggggaacaaacgcccggggccgaagacaaagaaccagcc

SEQ ID NO: 97557 - RNA, 73 nt, Homo sapiens
gaagacgaaagcggccgggggagggacaaaagaaacagcagggcacgacggcaagcccagaagacaacaccag

SEQ ID NO: 97558 - RNA, 83 nt, Homo sapiens
cagggacaggagacccacagaggaaaacaaccccggggccacaaagcgagggacagagcgaagaaccccccaagaagacgaaa

SEQ ID NO: 97559 - RNA, 89 nt, Homo sapiens
cgcgccccaccccggacagccagggcgcggccgcccgaagaggagagagcgcgggcccaggaaggcagagagaggaaacggggggggcc

SEQ ID NO: 97560 - RNA, 34 nt, Homo sapiens
acagcagagaccaaaccaggaggaggaggaacga

SEQ ID NO: 97561 - RNA, 77 nt, Homo sapiens
ccggcagcccgggccgagccccgcccgccgccagccaggacagcccaaggcggaaaagcgaaggaagccacaagcac

SEQ ID NO: 97562 - RNA, 85 nt, Homo sapiens
aacaaggaccgaaaggcggcgcaaggagcccaagagccaggaacaccgaggcgggcaagaacagaccaagaagagacaccagcca

SEQ ID NO: 97563 - RNA, 76 nt, Homo sapiens
caaggacacggggaaaagacagacaggcaccacagggagcagcagcggaggacgggaagggggcgcggcgcccgca

SEQ ID NO: 97564 - RNA, 81 nt, Homo sapiens
aaaggcacagcgcaaggaacacgggggagcagaaacgggagaaaggaaagaagaaggcaacaagcaaggaagacgaccaga

SEQ ID NO: 97565 - RNA, 76 nt, Homo sapiens
cacaacccaacgcagaggagcagagcaaaggcagacaagaccagccacaaaaagcggacaaagcaagagagaaggg

SEQ ID NO: 97566 - RNA, 73 nt, Homo sapiens
gaaggaccaagaaccagagccccccaagagaacccagggggagccacgccggagcgggcaccggcgcggaccc

SEQ ID NO: 97567 - RNA, 88 nt, Homo sapiens
gggagcacgccggcccagcccaaacgggcagcgaagggggccagcagacccagcggggcggagcagggaggaacagccccgcaagcac

SEQ ID NO: 97568 - RNA, 78 nt, Homo sapiens
aaaaccagccagacacaaacaacgcaaaacaaaaggggccaaggacgcacacaccagagaaggcagaccaagggcgag

SEQ ID NO: 97569 - RNA, 72 nt, Homo sapiens
cccccagacgcgacaaagacgccagacacaaaggggagaggggccgaagacgcagcagaagccagaccggag

SEQ ID NO: 97570 - RNA, 74 nt, Homo sapiens
caggaaaggccccacccccacaccggaacaggagacagcggagaaagagcccgggaagcacgaagccgagacca

SEQ ID NO: 97571 - RNA, 52 nt, Homo sapiens
aagaaaaaaggaagaacaacaagagcccaaagaagccaaaagcgaggccgac

SEQ ID NO: 97572 - RNA, 64 nt, Homo sapiens
ccaggagagcggcggggccgcggccgggccggcacccaagggccaaccgggggagagagagaga

SEQ ID NO: 97573 - RNA, 65 nt, Homo sapiens
caaccaagcagcagaggagcacgaggacggggagcaagaagaaacacaaagccggggaagcaaag

SEQ ID NO: 97574 - RNA, 71 nt, Homo sapiens
cggggaggaagggcggcggaccggcaggaggcagaggaccggcacaccgcaacccgcccggacaagcaacc

SEQ ID NO: 97575 - RNA, 59 nt, Homo sapiens
aacccgaagaagaaaggacgacagccagagagagcaccacaagggaccccagcccgggg

SEQ ID NO: 97576 - RNA, 58 nt, Homo sapiens
agacccacacagaagcggcggagggagaacgagaaaagccgacgcaagagggaaagcg

SEQ ID NO: 97577 - RNA, 84 nt, Homo sapiens
cgaagaagacagcaagcccacgagcggccccccgagacggaggagagggccgcgcgggccagacgacacggcccgggagcggag

SEQ ID NO: 97578 - RNA, 75 nt, Homo sapiens
gcacgccgggcagcgagaagaggcacagaacggccggggggcgagcgaccgaaagacagaaacagagaaaccaac

SEQ ID NO: 97579 - RNA, 38 nt, Homo sapiens
ccggccaaaccgcccaccagagccacggcaccgacgga

SEQ ID NO: 97580 - RNA, 57 nt, Homo sapiens
gccaagggccacgggggaccgcaggcagggacgcagccagcgaggccaccagcgccc

SEQ ID NO: 97581 - RNA, 78 nt, Homo sapiens
gacagcaacaaagcaaccggaaagggcggcccccaaagacaaaccaagggagacacagcagcgagaagaagggggagg

SEQ ID NO: 97582 - RNA, 63 nt, Homo sapiens
gccggcgggaccgcagcacggggaaacgaccgccccaaaacggacacggggggcacacaaccc

SEQ ID NO: 97583 - RNA, 77 nt, Homo sapiens
ggcccggacacagcaaaccgggccacagggacagacagccagagggaaacgagagccagaagggaaagacagagcga

SEQ ID NO: 97584 - RNA, 81 nt, Homo sapiens
ccaacaggaccgccgggggaccggaacggccagcgggacggcaccgccgagaacgggaccacccccgagcccccgagggga

SEQ ID NO: 97585 - RNA, 73 nt, Homo sapiens
cagcgaaaaccgaaggagaaaaggagaaaagcccgaaaaacgaggaaacagagaacaaaccaccagcgagaac

SEQ ID NO: 97586 - RNA, 69 nt, Homo sapiens
gggaggggaaaaggaggagggaggcaaggcagcaccccgacgacaagacaccccgagacaagacagcca

SEQ ID NO: 97587 - RNA, 81 nt, Homo sapiens
gcagcccaccagcaggcgggacccgcaccggaaggccacgccaaggacacgcccaccaagaaagaaccggaaaggggaccg

SEQ ID NO: 97588 - RNA, 80 nt, Homo sapiens
cagaacccaaggagggcaaaggacagagccaacgcgaagcggccggaaaggggggcagaaagaagaggaggacaacaagc

SEQ ID NO: 97589 - RNA, 110 nt, Homo sapiens
caggcaggacagagcgcccgcacagccgcccagagccgcccggcccggagggacccaccagagggccagagacgcgcacgaaacgacgaagaggcccgaggacagaggag

SEQ ID NO: 97590 - RNA, 75 nt, Homo sapiens
ggcgacagaggaacgggggagagaagaggcggccacccacgagccgacggcaaacgccagggagccaccaagggc

SEQ ID NO: 97591 - RNA, 76 nt, Homo sapiens
agaacagagagaccagaaacagcaagcaccccagcccaaagggggcgcgacagagacgggaggcggcagaagacaa

SEQ ID NO: 97592 - RNA, 76 nt, Homo sapiens
cagcccagagagacggaaacaggaacaccaaggaagcaaaagccccagaacacgggaagcccgaagccagagaggg

SEQ ID NO: 97593 - RNA, 42 nt, Homo sapiens
gcccagacgccaacaaggcacagccagagaacaacacacaca

SEQ ID NO: 97594 - RNA, 75 nt, Homo sapiens
gcgagaaaacaaggcagcaagaggccgagccacgaacaggggacacggcgaacaggaagacccgacagaggaaac

SEQ ID NO: 97595 - RNA, 84 nt, Homo sapiens
gaagaaccgaaggacacacagcccacggagaagaacgcgcggcggcagcgacagacccgcaaggacccggcggaagggaccacg

SEQ ID NO: 97596 - RNA, 56 nt, Homo sapiens
gaaaaggaggaccaacaagcacaaagacagagaagagagaagacccaaggacccag

SEQ ID NO: 97597 - RNA, 68 nt, Homo sapiens
gagaggggccgaaccggaagggcggaggccccggcggcaggcaccccccgagcccagcccacacaccg

SEQ ID NO: 97598 - RNA, 52 nt, Homo sapiens
agaggaaaagaggaagagggcgggaaggcaggggaagaccacaacaagcaag

SEQ ID NO: 97599 - RNA, 73 nt, Homo sapiens
gcgggcacaccccagcgggcacgaccggccgcacgaggcccggaggcggagccgcacgagccccgaaagaccc

SEQ ID NO: 97600 - RNA, 57 nt, Homo sapiens
gaacagaacccaaaagccgacaaccccagaaacaggggaagaacaaaggaagagacg

SEQ ID NO: 97601 - RNA, 81 nt, Homo sapiens
ccgaagacccccacaaggggagcggggcagggaaaaccacaggggggggggccgcagcaagaagcagcaagccaaacggag

SEQ ID NO: 97602 - RNA, 92 nt, Homo sapiens
ggagggccacaggaggcggcgggccccgcccgccgaagggaaagaccacagcaagaccacgcccccagccgggggaccaggccgaacgaccc

SEQ ID NO: 97603 - RNA, 74 nt, Homo sapiens
agagggcagacggacaagagcgcggaacaggacgccccgagccccagcaggaggacccgccggaccagccacga

SEQ ID NO: 97604 - RNA, 69 nt, Homo sapiens
gcaggggaacccaggcaggaacgcaggaagaccgggagcacagaagaaaagaacaaggccagaaaaaaa

SEQ ID NO: 97605 - RNA, 69 nt, Homo sapiens
gaacccaccgcgccggggccaggccgaggaaggcgggggaggagacagcgggaagccagcggacccaga

SEQ ID NO: 97606 - RNA, 79 nt, Homo sapiens
cccccagagcgggaccacagaggcggcacccagcagcagaggcgggagcggccaccacagcagagcacgcggcgcacgg

SEQ ID NO: 97607 - RNA, 58 nt, Homo sapiens
gagcaagcgacagcgaggagcaaaaagacacagcagaggacagggagcccaaggcaga

SEQ ID NO: 97608 - RNA, 74 nt, Homo sapiens
caagaggcgaggcggacgaaacccgaccggacccaaaacacgcgcccaagacacagccccagcagcccccagac

SEQ ID NO: 97609 - RNA, 61 nt, Homo sapiens
agggagcagccgaagagcaaaggcagacaaaggaccccaggaacccgaaaaaaaagccacc

SEQ ID NO: 97610 - RNA, 69 nt, Homo sapiens
aagaaggaccagagaaaaggcacagaacagaaccaaagaggggaaagggagagaggagcacagaaccga

SEQ ID NO: 97611 - RNA, 73 nt, Homo sapiens
gccgacaggaggcggccagggggaaacgagcaacaccggaagacgagacagaggggaaaaaccaacgagaaga

SEQ ID NO: 97612 - RNA, 69 nt, Homo sapiens
ccagacggagacgcgcacagaaggcaaaccgacaccagcgacacaagcgcgagggaaccacagaggaca

SEQ ID NO: 97613 - RNA, 78 nt, Homo sapiens
cccaccaaaaagggcacacacggagagaacaaacgggacaccacgcccgggaggcaacggggggaaaagaaacacaga

SEQ ID NO: 97614 - RNA, 48 nt, Homo sapiens
gccagcgaaaacgcccagggcggagccgagcgaggccccagaaggaca

SEQ ID NO: 97615 - RNA, 75 nt, Homo sapiens
aagacccaaaagcgcggggcaagacaggcacagccagggcgaaagaagaccccgccaccggcccccacgcaccac

SEQ ID NO: 97616 - RNA, 76 nt, Homo sapiens
cggcggcggccagcccgacacagaagacgaccccgacgcaggccaggagccgcggacagaagccgagcacggccga

SEQ ID NO: 97617 - RNA, 76 nt, Homo sapiens
ccagagaccaccccacagaaacggcgcccgaagcgagccagccacagaaggagagagagaaacggaaccagacagc

SEQ ID NO: 97618 - RNA, 59 nt, Homo sapiens
gaaggcgcgcaccggaagcaccagcgaggaaggagcagagaagccaaagacagcaaagg

SEQ ID NO: 97619 - RNA, 58 nt, Homo sapiens
caccagagggaaagcggggcgaaacccgcaaagaagcgagccagcaaagaaacggggg

SEQ ID NO: 97620 - RNA, 68 nt, Homo sapiens
gcccgagcgcgcccgagggcgagaaaggaccacagaacgggcagcaaacaaagcagcacccacaaacg

SEQ ID NO: 97621 - RNA, 78 nt, Homo sapiens
acccggaggggcggcaggagcgaccggaggacaggcgccgcgacggcgcgagcgggaggcagcgagaagaaaaagaag

SEQ ID NO: 97622 - RNA, 78 nt, Homo sapiens
ccgcccgcagaaggaacaagagaccaggcccagccggccacaccaagacgccaggacggagaagaagacaaacggcag

SEQ ID NO: 97623 - RNA, 69 nt, Homo sapiens
aaaccaggcagcagagggagacagaggcacaaaaggagaaagcagaagaaacaggagaaagcaaaaaag

SEQ ID NO: 97624 - RNA, 88 nt, Homo sapiens
ccgggccccccgccgccgccggcccggacaggccgccaacagacagggcggaggcagaaggagagcaggggccaggagggccgaagcc

SEQ ID NO: 97625 - RNA, 65 nt, Homo sapiens
cgcaggcagacaaaagggccaaagaagggagagagccggcagcacagaggccggcagcggaaaca

SEQ ID NO: 97626 - RNA, 43 nt, Homo sapiens
cggccgggagccgcgcgaggcgggcagagacggaccagagaag

SEQ ID NO: 97627 - RNA, 75 nt, Homo sapiens
gagaccgcggaggccgacaggacgggcgccgccccgcgcggcaggggaaaagccaccgaccacacgccacaaacc

SEQ ID NO: 97628 - RNA, 72 nt, Homo sapiens
cgcagcacaacacgccagaacgagggcaaacagaagacgggcaaaagagcggaagaaccaacgacagaagac

SEQ ID NO: 97629 - RNA, 55 nt, Homo sapiens
ccagcaacccgacggacccgaagacgacccacaggaccgcgaacaaggaggccac

SEQ ID NO: 97630 - RNA, 75 nt, Homo sapiens
ccagcggccgcgcacccccggccggaggcaccagcacgaagccgccgcaccaggcggaggcagggcagacacagc

SEQ ID NO: 97631 - RNA, 50 nt, Homo sapiens
acgaccccacccccgaggcccgaccgagggaggaaccgaaaggaaaccga

SEQ ID NO: 97632 - RNA, 72 nt, Homo sapiens
agcgcgaagacagcaaacacgaaaacaccacaggagaagccaaccagagagcccagacggcgagggaacacg

SEQ ID NO: 97633 - RNA, 74 nt, Homo sapiens
ggaacccgagcgcagacaggacaggcagggcccaaaggagcacagagagaccaaaacaaccacgaaaaaaagaa

SEQ ID NO: 97634 - RNA, 87 nt, Homo sapiens
accaagacaggaaccgcccgcgcaggcccgggaagcaagccacggggcagaggcccaggggcaaggaaccaagggcggccggccaac

SEQ ID NO: 97635 - RNA, 62 nt, Homo sapiens
aaggagaaggaagaacaaaacagaggacaaggaggcagccaaaagaagcaagggaaagacca

SEQ ID NO: 97636 - RNA, 74 nt, Homo sapiens
caccggcccggcccccaaaggcgggaaaggcggagccaccggccggcgaagggaaggggaagcaggccaaccca

SEQ ID NO: 97637 - RNA, 104 nt, Homo sapiens
agaaccaacaaacagggagaagaaggaagccaacccacagcggaagagggagaggggggaagcgaagccgagacggccgaccccgccacgagcgcgaagaagca

SEQ ID NO: 97638 - RNA, 80 nt, Homo sapiens
caaagaaggcaaggagagaagagaagaacagcacaggacagggggggaagaaaagaccgagaggaaccaaacaacgcagg

SEQ ID NO: 97639 - RNA, 82 nt, Homo sapiens
caaaagcccagccgcgcgaaagcggcaaaggggaaaaaaaagggagaaacagaccaaggggggggaccaaggcaacgaacac

SEQ ID NO: 97640 - RNA, 83 nt, Homo sapiens
ggcaaaagcacaaggaccgcggacagagacaacaccgagagagaaagagagcaggcagcccccagaccacaaccgagagcaag

SEQ ID NO: 97641 - RNA, 40 nt, Homo sapiens
ggggggcggcccggccccgcagaaccaagaccggcagcgg

SEQ ID NO: 97642 - RNA, 77 nt, Homo sapiens
aggggacacaggccagcaccacaccgagagagcgcgacagcaggaaggcgccacccccgcagccaccagggggccgc

SEQ ID NO: 97643 - RNA, 55 nt, Homo sapiens
ggcacccgaaccggccgccggcagagccccgagaggggcgcgcagaaacgggaag

SEQ ID NO: 97644 - RNA, 79 nt, Homo sapiens
gagaccgcaacgagaacaaagggccgggagcgagaagccacgggcagaggcagggaggcaggggaacagcagacccaga

SEQ ID NO: 97645 - RNA, 77 nt, Homo sapiens
ggcaccccggcccaccaggacaagacacaccagaccgggagaacaccaagaaggaacagaaaaaaccggagacaaac

SEQ ID NO: 97646 - RNA, 74 nt, Homo sapiens
aaaggggaaagcaagaaaaagagccaaacggagaagggcccacaaaccaacaacgaaaaaaggggacaacaccc

SEQ ID NO: 97647 - RNA, 63 nt, Homo sapiens
ggagcgccaggcagacagcaggcaggagaggaaagcaggagggaccaaggaacagaagacgcc

SEQ ID NO: 97648 - RNA, 75 nt, Homo sapiens
aggaccaacaggcgccacaacgaccagacagcaacccaacaaccagggcaggaaccacagagaacagcccggaca

SEQ ID NO: 97649 - RNA, 69 nt, Homo sapiens
gaaggaaggaaagaaccgggcaacaacacggcaccacacaagcgaagaagccgagaaaccagccacgca

SEQ ID NO: 97650 - RNA, 80 nt, Homo sapiens
cagaagagaggaagaaaggacagggagagaagccaagaaagacaggcaaaagcagaccggaaaacccaccggcaagacca

SEQ ID NO: 97651 - RNA, 81 nt, Homo sapiens
gagggggcggcggcgacagccaggcccggaagcgagggcggccgcgccggcccaggggaccgagacccgacgagagagacg

SEQ ID NO: 97652 - RNA, 70 nt, Homo sapiens
gcgaagggacaaagccagggcggagaacggaaaagcaccaggaagcagagaggaccgcagaagggaagga

SEQ ID NO: 97653 - RNA, 66 nt, Homo sapiens
cgggaccgcggccaacggggaacgaggacgcggacgcgaaggcaggacgccaggaaagcaggcaga

SEQ ID NO: 97654 - RNA, 88 nt, Homo sapiens
agaaccgcccggggaacacccaggggagaacagacaaaccccacaagcacgcaacggaaaacaaaaggagaagacaaaagagagaaaa

SEQ ID NO: 97655 - RNA, 54 nt, Homo sapiens
caagaacagcccaaccccgggcaaacgccaaggaccgggggcccgcgcacagac

SEQ ID NO: 97656 - RNA, 73 nt, Homo sapiens
gggggccaaaaacagaggagaaaaggcggacagcagcgcaggcaaaaaacagaggggacagcagaaagacaaa

SEQ ID NO: 97657 - RNA, 78 nt, Homo sapiens
aacagaacagcagacgacaagagaaagacagcaaagaaaaggagaagaaaggaaaaaaacaaccccgggcaccccgcc

SEQ ID NO: 97658 - RNA, 60 nt, Homo sapiens
cagcaagggaccgagccaagaggagacgacggcagaacagggcggagggggcagggcaga

SEQ ID NO: 97659 - RNA, 80 nt, Homo sapiens
gagcccgggcgcgcgcaaagagccgagcacgcgggcgcacagcgcgacgggcggacggaggaggaccacaaaacaaacca

SEQ ID NO: 97660 - RNA, 67 nt, Homo sapiens
gacgggaggagcggagaaaggaaaggacccccaggaccagaggacgcaccagaagacagggcaacca

SEQ ID NO: 97661 - RNA, 92 nt, Homo sapiens
aagcacaaagggagcaaacccgcccccacaacgcacaagagggccagggaccaggggacgcccaagacggccacccgcgaaggggcccccgc

SEQ ID NO: 97662 - RNA, 53 nt, Homo sapiens
ccccggcggggcaagcacggaacaggcggccaaaaggcaacaggcgacaggag

SEQ ID NO: 97663 - RNA, 66 nt, Homo sapiens
cggaaagagggagaagaaaacaaagccgacgagaacacaccaacaaaagagaaaacagcaaggaca

SEQ ID NO: 97664 - RNA, 82 nt, Homo sapiens
gaacccgggaggcggagggcgacgcaaacagcagacggaagaccccacggcaaaaccacacccgaggcgagcccaggacacc

SEQ ID NO: 97665 - RNA, 78 nt, Homo sapiens
gacaccacgccgcggacgcaaggaggaccccccccagaaaaccaagcgaaaccccaaagggaagagacgcgaaagcac

SEQ ID NO: 97666 - RNA, 83 nt, Homo sapiens
cggcccccaagcaccgagaggcagcaaagacagaagggacacgacacagggacgggccaagaacccaggaggagggaaagccg

SEQ ID NO: 97667 - RNA, 73 nt, Homo sapiens
aaagcgcaggagcgcaacccagcaacacaagcacagccacaagacaagcaacagaagcccaggacaggggaca

SEQ ID NO: 97668 - RNA, 85 nt, Homo sapiens
ccgcgcgcagcccccgccgagccgccccgagcccgccgccacacccgagaaaggcagacccggcaccacagggaaaacggggcaa

SEQ ID NO: 97669 - RNA, 80 nt, Homo sapiens
cagccacgagaagaagcgcaagcaagggagcagcacacgccccagcgcgacccgggcccaggggcgggagcccacaccac

SEQ ID NO: 97670 - RNA, 76 nt, Homo sapiens
ccgcagaggagcaaaagagcaccgagggaggagcagacaaaaagaccacagaacaccaccaccccagggggcagaa

SEQ ID NO: 97671 - RNA, 70 nt, Homo sapiens
cagcgggaacccaggcaccccaaaaaaccaacaccccgcaacacccccgggaggggcgaagcgaggaaca

SEQ ID NO: 97672 - RNA, 43 nt, Homo sapiens
gcccccaacaaccagagagcaggacacccccacacgagcccca

SEQ ID NO: 97673 - RNA, 76 nt, Homo sapiens
aaggaaagaagaacaacagacgagaagagaagggagcaccaggagacgccagaagagcaggaacgagagggggagc

SEQ ID NO: 97674 - RNA, 51 nt, Homo sapiens
ccacgcacccaggaccgcgcccacaggacagcgggagaacagagacccacc

SEQ ID NO: 97675 - RNA, 78 nt, Homo sapiens
aagaaaccagaccagagagaggaggagaagaagagacaccaggacaaccccccaagcggaagaacaacaaagagggaa

SEQ ID NO: 97676 - RNA, 71 nt, Homo sapiens
aaacccaacgagaagagaacaacaccaggaaccagaacgggacacgccgcagggcgaggcccacggcccaa

SEQ ID NO: 97677 - RNA, 100 nt, Homo sapiens
cacggcgacacgaagcagagaaggacggccaagaaaccaggacccccaggcgggaggggacggcaaagggcgcggagggaacggaggggggaggaaggcc

SEQ ID NO: 97678 - RNA, 68 nt, Homo sapiens
agcagacaagagaaacaggccgaaaagaaacccagagaagacacagagggaacggccaggggaagggg

SEQ ID NO: 97679 - RNA, 70 nt, Homo sapiens
caggagacaacgagggaggagaacaaggggacagcaaccgacaagcaagggacacaaaagcaaccgagag

SEQ ID NO: 97680 - RNA, 86 nt, Homo sapiens
aaggagagaaaggggagccgggagagccagccggaggcagagggacaggaaccaccaagaagaagaagaagaagaagaaagcaaaa

SEQ ID NO: 97681 - RNA, 42 nt, Homo sapiens
gcgagccagcgaccccaccaccaaaggccccacccagaggac

SEQ ID NO: 97682 - RNA, 71 nt, Homo sapiens
cacgaagacacaagccgagggaagaggcagcacacaaccggacaccacagggaagacgaggccccaagggc

SEQ ID NO: 97683 - RNA, 87 nt, Homo sapiens
ggcgcgggcggaggcggcggagcgcgagagccgagcggaccaggagaaagacagcaaagaaaaggagaagaaaggaaaaaaacaacc

SEQ ID NO: 97684 - RNA, 78 nt, Homo sapiens
ccggcggcagcagcccagagcgcaaagagaaagaccacagcaagaccacgcccccagccgggggaccaggccgaacga

SEQ ID NO: 97685 - RNA, 78 nt, Homo sapiens
agccacacgagaccaagaccacacagaggcgcccagacaggggcaaggccgaggggaacagcacacagagaggaggcg

SEQ ID NO: 97686 - RNA, 77 nt, Homo sapiens
ggacacccacgccaacagcgcccccaccaggccagaccaccacggaaacaaggacgggcgggcagcccgccggccac

SEQ ID NO: 97687 - RNA, 54 nt, Homo sapiens
agaggcacggaccacggcccccaagcaccggcacggaccaccccaacaccgggg

SEQ ID NO: 97688 - RNA, 83 nt, Homo sapiens
agcgaagccacagaccccagaaacgggcaagcgcgcaaacccagaacccagcagagccccccgacagaccgcgaggagagacc

SEQ ID NO: 97689 - RNA, 80 nt, Homo sapiens
ccaggaccgcgcgagcacgagcacccgcacgacgggccagacaggcacgcaggggcaggggcagccagggggggcgagga

SEQ ID NO: 97690 - RNA, 70 nt, Homo sapiens
gaaaaagcagagcggagcgggacgcccggccaagccacaaccaacaggcgcacggaggggcagagaaaaa

SEQ ID NO: 97691 - RNA, 75 nt, Homo sapiens
caggaaacgggcaccggaaccgggaccaaagaagagaacagcaggaaaagaaagcagaaaggagcgagaggagca

SEQ ID NO: 97692 - RNA, 34 nt, Homo sapiens
agagagggcacagaccaggagcagaaacaggggg

SEQ ID NO: 97693 - RNA, 87 nt, Homo sapiens
gaagcggcaccgaggccggggccaacgagccaacgccaggcgccgcccacaggggacgacaccggagaaggcagcgacgacagcgac

SEQ ID NO: 97694 - RNA, 75 nt, Homo sapiens
gacaccaaggcaaggcgaagacggcgagcagacagccagcagaagaggaacagaacccggaaaacagaggcccaa

SEQ ID NO: 97695 - RNA, 64 nt, Homo sapiens
gagggaggaggacaacaagacgcgccgacgcgaggccaaagcgggaaaaagccaaagcaggccg

SEQ ID NO: 97696 - RNA, 64 nt, Homo sapiens
cccggggaccgaaccccggcgaacagcaaggcacaagcgcggcagaccagggaaggggaaagac

SEQ ID NO: 97697 - RNA, 70 nt, Homo sapiens
gcagccccggccacggaggggcgaccgccgaccacccggaagggggaaggaagggaagcggagccgcgaa

SEQ ID NO: 97698 - RNA, 39 nt, Homo sapiens
acaaaagggaaaaccggcccccggccaaaaggcgaaagg

SEQ ID NO: 97699 - RNA, 72 nt, Homo sapiens
caagcacggagcggaacaagcaagagcgagaaaggagccagagacccagcaagcccgaaacgaccgaaagag

SEQ ID NO: 97700 - RNA, 91 nt, Homo sapiens
aagaagcagcccacgaaaggcagccgcggacgccgcgccagcgacaaacaaggcggaaaacaccccaaaagccaaaagggaaaggaaaaga

SEQ ID NO: 97701 - RNA, 75 nt, Homo sapiens
gagagaggaaacacagcagaaacaaagaagcagcgcgaaaggagcagcaaggccccggacaaacagacacaacaa

SEQ ID NO: 97702 - RNA, 81 nt, Homo sapiens
caccaccaccagcgacccgagagaaaccacaaaggaccacaaggaaaggaaccagggaagacacagacccagcacaccaaa

SEQ ID NO: 97703 - RNA, 75 nt, Homo sapiens
cccgaggagaaccagcggagagggcccgaacagagcaacaaagacgccaaagaccagggccaacgagagaaggca

SEQ ID NO: 97704 - RNA, 75 nt, Homo sapiens
gggagagaacccacaaccacacccaagccgcccgagacggacacgcccaccaagaaagaaccggaaaggggaccg

SEQ ID NO: 97705 - RNA, 86 nt, Homo sapiens
agccgagccccagccaggacgagaggagcggagcccgcagaaccccacagcaagaggacgggcaaaggcaaaccaaacgcaagacc

SEQ ID NO: 97706 - RNA, 51 nt, Homo sapiens
ccccgaccccacaccaaaggcacgaagaggaagacaccaccggacaccgac

SEQ ID NO: 97707 - RNA, 74 nt, Homo sapiens
cggggacaccaacaggacccgcggcgcgagggcggcccgcagaagagcacagaaggagaaggccagcaaagcgg

SEQ ID NO: 97708 - RNA, 73 nt, Homo sapiens
accacaggccagaaggggagcgaacggagaaaacaacacggccaaggaaaaaaggaagcaaaacagagcggcg

SEQ ID NO: 97709 - RNA, 77 nt, Homo sapiens
gggacaaccggcgaaaggcccccaggagaaccggggcaagagacggcagacaaacacagccgagagaaggcaggcga

SEQ ID NO: 97710 - RNA, 86 nt, Homo sapiens
cggggaggcgcccgggagcgcggccggggaggagccccagccccgcgacgaggaggaagcggagcggagcgcgaggcaggaccggc

SEQ ID NO: 97711 - RNA, 73 nt, Homo sapiens
ccagacagccagaaacggcggcgggccggacccggcaggcaagcacagcccacaaagagcagagggcacggac

SEQ ID NO: 97712 - RNA, 72 nt, Homo sapiens
caaccgaccggccaacgacgccccaaggcgccaaggaggggacccccagggacagcagaccacagcccggca

SEQ ID NO: 97713 - RNA, 37 nt, Homo sapiens
cgggaccccggaggggagccacgaagcccccacccac

SEQ ID NO: 97714 - RNA, 79 nt, Homo sapiens
acgcggcacgggcacaaagccacggaggagagcagcacacagacggcaaaagcagaccggaaaacccaccggcaagacc

SEQ ID NO: 97715 - RNA, 60 nt, Homo sapiens
ggaaccgaagggagcaaaagggacagcacagcagagccccgagcggagaaaggggaagcc

SEQ ID NO: 97716 - RNA, 73 nt, Homo sapiens
gagagaagggagaccgagccaggccaggagagaagaaccgcagaccagggcggggcagccgggggggggaagg

SEQ ID NO: 97717 - RNA, 78 nt, Homo sapiens
acgagaggacgggaccaggcgaagcggccgagcaggcgagcgaacgacgccaaacggaacaaaaccgaaccaacacca

SEQ ID NO: 97718 - RNA, 84 nt, Homo sapiens
agcgcccggcggcggcggcgcgcggccgggcggcgaggaagaggaaggaaggagcgcagcgggacgcgagagcccacgaagagc

SEQ ID NO: 97719 - RNA, 77 nt, Homo sapiens
aacacccagcgacaccagcagaacagccggcccagcccaccccaggcccccccagcccagcaccaccagcagaaaac

SEQ ID NO: 97720 - RNA, 77 nt, Homo sapiens
gaaggaggccagaggcagggcgcgggcagcggagggcaggcagaacaagaagggcaaccaggggggaaggagggagc

SEQ ID NO: 97721 - RNA, 63 nt, Homo sapiens
caggaccgcgacggcagcagagcaggcggagaacggaaaagcaccaggaagcagagaggaccg

SEQ ID NO: 97722 - RNA, 59 nt, Homo sapiens
aagaccaaggcaagaagagaaaagaccgccggagaaaaggcagcaggagaaacgagaag

SEQ ID NO: 97723 - RNA, 75 nt, Homo sapiens
ggccgcccggcgcagcggggaccggcggcggcgcccaggcacccggcccgggcacaacgcagacacaacgccagg

SEQ ID NO: 97724 - RNA, 77 nt, Homo sapiens
ccgagccccgggccgggaagcgcggagagacggcgcccgccccccgccgccgcccaaggcccagagaggcggaccca

SEQ ID NO: 97725 - RNA, 67 nt, Homo sapiens
caccggaggcaggaccagcgcagcgcgcgggcgcggacggcaggggcgccggggaacccgcgggaag

SEQ ID NO: 97726 - RNA, 59 nt, Homo sapiens
cacacaagcgcaccagccaaccgagacagagagcacaggggcccccaggggaggcgaaa

SEQ ID NO: 97727 - RNA, 64 nt, Homo sapiens
cgggcagaggaccggaggccgggaagccaacgaccacacgcacggcgagcacgggcgggcacgc

SEQ ID NO: 97728 - RNA, 78 nt, Homo sapiens
gccccagccgcccgcccgcaacaggacaaaaaacaaccaccaggaaaaaaccagagggcaccgaaggcaacaagaaga

SEQ ID NO: 97729 - RNA, 91 nt, Homo sapiens
ccgggaagcacacaagggccgaagcagggcacaaaaccaaggccaagcaagggaacaggaggcccggacccccagcacaagcgcaggccag

SEQ ID NO: 97730 - RNA, 70 nt, Homo sapiens
gaaacggaaccaagaacaagcacgcagggcacacggcacggacagggcgggacgcagaaccagggcgcga

SEQ ID NO: 97731 - RNA, 82 nt, Homo sapiens
gcggacaggagaaagacggacggcagccaccaccaacaggcgagcacacagagaggggaagggcagcagcagcagagaacca

SEQ ID NO: 97732 - RNA, 73 nt, Homo sapiens
ccggcccggacccggagggacgagggggacacccggacggaaagacccaggggcacgaaaagcaaaagaaaac

SEQ ID NO: 97733 - RNA, 74 nt, Homo sapiens
ggcaccaccacgaccgggacaggaacgccacagggaacggggggcagcggccccaacagccccagagggaccac

SEQ ID NO: 97734 - RNA, 70 nt, Homo sapiens
gcgacccgcgcaaacaaacaggcacagaacagaaaggcggggacacccgccccaagaccgggaagccccg

SEQ ID NO: 97735 - RNA, 50 nt, Homo sapiens
agccggcgaggagggcgaggaccaggcagacgaccaaggagcaggcgggg

SEQ ID NO: 97736 - RNA, 76 nt, Homo sapiens
acgaaggccaccccccgcagccaccacaaggaaccaaagcagagacagcagggaccccggccaggccgagcggcgc

SEQ ID NO: 97737 - RNA, 77 nt, Homo sapiens
caccgaagacacaccccacaggaccccagagcgacagcccgggacaccaagaaagaacggaggccaggggggggcgc

SEQ ID NO: 97738 - RNA, 89 nt, Homo sapiens
gccggagcaacgaaaagagcccggaaggaagagacaggaggcagcagacggacaccagaacagcagagaacacaacacaggacaagcaa

SEQ ID NO: 97739 - RNA, 84 nt, Homo sapiens
gcgggcagagcgcggcggcgcgggcacaggagggcagaccaaaagcacaaaaagaacggcccgaagaccccaagccagacagac

SEQ ID NO: 97740 - RNA, 75 nt, Homo sapiens
gcgcgccgggagaccgcggaggccgacaggacgggcgccgccccgcgcggcagggcccgacaggcccccagagcc

SEQ ID NO: 97741 - RNA, 77 nt, Homo sapiens
gcaacggagaccgggggggcaagcaaccagccgaagaagaggggagagaacgcaagccagaccaagagagacacacc

SEQ ID NO: 97742 - RNA, 63 nt, Homo sapiens
acgaaaacacaagcgaaaaccagggaagcagagcagaggaaggacaagcaagaacaagggaag

SEQ ID NO: 97743 - RNA, 78 nt, Homo sapiens
aaaagagaggaagccccgccgcaggggagggagacgcggagcggggccaggaaggcccggacggagcaggcggaccac

SEQ ID NO: 97744 - RNA, 83 nt, Homo sapiens
aggccgggaggacgcggcgggcgagcgagaggccgagggcaggccggagcgcgagaggcgcccgcacggccccccacccgacc

SEQ ID NO: 97745 - RNA, 73 nt, Homo sapiens
aaaaaagcacaaagagggacaccaggggacaggagccaccagaagcgagccaaagccgcaaagccgccggaag

SEQ ID NO: 97746 - RNA, 85 nt, Homo sapiens
aaagagagagagcagaaaagaagaaacgggcaacaaaacccaaggcgccgaaggggcgaaaccaaaccagcaacgaaccccaggg

SEQ ID NO: 97747 - RNA, 42 nt, Homo sapiens
aggccaacgaaaggcacccgcaggcccgggcccccacaaccg

SEQ ID NO: 97748 - RNA, 104 nt, Homo sapiens
gccagaccacagaaaaacccagaacagccccagggccacggagcgaaaacgccacaacagagggggccagggcggggaagacaaacagaacaacgggcaacccg

SEQ ID NO: 97749 - RNA, 83 nt, Homo sapiens
gacgcgagcccgccgccgccgccaccacccacccggacacagcagcccccgcgacgagcccccaacgagccaccaacaggaac

SEQ ID NO: 97750 - RNA, 75 nt, Homo sapiens
ccagccccaccagaccccggccgccgaccgcggccccgccggccgccggccgcgcgggggaggcgagggcgccgg

SEQ ID NO: 97751 - RNA, 73 nt, Homo sapiens
aagaccagaaccaggacccaaggcagcagaccgcgcgccagacgccaaggacgcccacagagcacgccccgcg

SEQ ID NO: 97752 - RNA, 68 nt, Homo sapiens
cgaggaggaaaggaggacgagggggaccggagagaaaaaagagagcgcaagggacaaaagccaaggac

SEQ ID NO: 97753 - RNA, 69 nt, Homo sapiens
ggccccgacaggcggcgcacggaaacagccacagcagacaggacgacccggacaaccacccacaagcgg

SEQ ID NO: 97754 - RNA, 71 nt, Homo sapiens
caccgcgggggcgcagagcgggcaagaacacggaacaggggcgagagaacggccagggcggagcacgaagg

SEQ ID NO: 97755 - RNA, 81 nt, Homo sapiens
cgggacgcggggagcgcccggcgagcaggcaccccaccggcgcgaggacagaggcaagggcacacgggccacagaggacca

SEQ ID NO: 97756 - RNA, 65 nt, Homo sapiens
cgccgccccgaagcccagagacaaagcaggaggacacaagaagggaggaaaggcggacccaggaa

SEQ ID NO: 97757 - RNA, 79 nt, Homo sapiens
aaggaccaagaaccagccggggagacagacaggaggaaagacagaccgaagaagaagaggagcaaagcaagacggaacc

SEQ ID NO: 97758 - RNA, 76 nt, Homo sapiens
agcgggagaagacggcgcccgcaagccccgcgccgcacggcacaccccgcgccgcagccaagccggaacaggagcg

SEQ ID NO: 97759 - RNA, 53 nt, Homo sapiens
aaccgggggaagaccccagagcacggacgcccgggagcgacggggaagacgga

SEQ ID NO: 97760 - RNA, 65 nt, Homo sapiens
acacaccagaaacagcgcaccacccgcagggggcccccaaagggaagccaaacacaaaggaagaa

SEQ ID NO: 97761 - RNA, 72 nt, Homo sapiens
ggaacgcaggacccaaagcgaaaggcacaaggaagaagcggaaggggcagggggaaagcagaagggaaccca

SEQ ID NO: 97762 - RNA, 70 nt, Homo sapiens
gcccacgggacgggagacccgacggagcagacagaaagacgaggacgcgcacaggaaaggacgcggaaca

SEQ ID NO: 97763 - RNA, 77 nt, Homo sapiens
cggcgcagacggccaaaggacgggacaaagggcggagaacggaaaagcaccaggaagcagagaggaccgcagaaggg

SEQ ID NO: 97764 - RNA, 81 nt, Homo sapiens
cgggagcagaacggcgcagcagagcgcggcgcagaagggcggagaacggaaaagcaccaggaagcagagaggaccgcagaa

SEQ ID NO: 97765 - RNA, 71 nt, Homo sapiens
aagaaaggaaaacaaggaagaagagaacaccagggggggagggccgggaccggagcaggacgacagagcgg

SEQ ID NO: 97766 - RNA, 75 nt, Homo sapiens
aaagaaccaccccaaacaggagaagggcccggaggggccgccccacgccggcgagccaggacagcccaaccagca

SEQ ID NO: 97767 - RNA, 74 nt, Homo sapiens
gcaaagcggcagcaccgcaagaaggcaccggaggggccgcaaggaaccaacgccaagaggcccagaagaaccaa

SEQ ID NO: 97768 - RNA, 64 nt, Homo sapiens
gagaaacacaaaagacaaaacaaccaagcagggaaagcagacgacggcagacacacaggaaaaa

SEQ ID NO: 97769 - RNA, 71 nt, Homo sapiens
gagacaaaaagccccccccggagcgcccggcaaacaaaccgccaacaaaacagaggagaccagaccagaag

SEQ ID NO: 97770 - RNA, 80 nt, Homo sapiens
gagaacagaccaagagcaccagaacggaagaaaacgccagagaagcagagcagcccggagcgaggggagaccggggaagc

SEQ ID NO: 97771 - RNA, 108 nt, Homo sapiens
gaacaaaggagaagccgccagcgcagccagcaccaagccggggcacacagaggcagacacccagcaccacggcagacaacaaccaacacgaacaaggccgcaagaacg

SEQ ID NO: 97772 - RNA, 70 nt, Homo sapiens
cgcccgggagccccacgagcccggcccaacggaggagcaacccccgggagggggaaccaccagacgaaaa

SEQ ID NO: 97773 - RNA, 86 nt, Homo sapiens
aggagaaggcgcgcgcgaaccccggccccacagccccgcgcacaggccccggaagcccacaggggcaacacagcccaacgccaaac

SEQ ID NO: 97774 - RNA, 56 nt, Homo sapiens
gggaccacaaaggagacacgaggaagggaacaagcgcgagaaggaacaaaccagga

SEQ ID NO: 97775 - RNA, 80 nt, Homo sapiens
ggccccccagccagcagaacgaggagcagcacaaggcacggaagcagagacggccccaccagagcgaaccgcgagcaccc

SEQ ID NO: 97776 - RNA, 83 nt, Homo sapiens
ggccggaagagcgaccaagacaccaacaccaggaagagaggaagcgggggccgagaccacacagccccacaagaggagggacg

SEQ ID NO: 97777 - RNA, 86 nt, Homo sapiens
ccacaagaagcagcggacgcgcccccaagaaagggccagaacccgggagcacagaacgggaagagagcgagccccagagccccgga

SEQ ID NO: 97778 - RNA, 76 nt, Homo sapiens
ggacaaaccaggggaagcaagagcgaaaacgccacaacagagggggccagggcggggaagacaaacagaacaacgg

SEQ ID NO: 97779 - RNA, 81 nt, Homo sapiens
gcggccccggaagcccccacgggccaccgacccgcaggggccacagggggggaaggagacgcgcccccggcagcccggaag

SEQ ID NO: 97780 - RNA, 73 nt, Homo sapiens
gaagaacggccaggaaggggagcaaaaggagagagagagaggccagggagagagaagaggagacaaaccagaa

SEQ ID NO: 97781 - RNA, 77 nt, Homo sapiens
gggacggacccggagccgggccagcaacagagcgggccggggacgggcaccagaccccccccgcaggccaccaggcc

SEQ ID NO: 97782 - RNA, 62 nt, Homo sapiens
gaacaggaaaaagggaaggaagggaacacggacgacgagacacgaccaacacaggcgaccaa

SEQ ID NO: 97783 - RNA, 73 nt, Homo sapiens
ccgcggcgcccgagcggcgggccgcagaggacggaacaccgaagaaaagagaaaagccaagacccaaaccacc

SEQ ID NO: 97784 - RNA, 82 nt, Homo sapiens
cccacccggccaccccccagggagccgaagccaagggacggccaccccaggggccaaggggaaacgcaggaagaagccaaaa

SEQ ID NO: 97785 - RNA, 79 nt, Homo sapiens
ggagccgccccccagccgccggccccccgccggcgccggggcgcgccgccccagccagaccccgcgaggaagagaaaac

SEQ ID NO: 97786 - RNA, 77 nt, Homo sapiens
ggagcgagcccgaggacaggagaggaagggaaacccagacgacaaggaaggccaagggacccacgaccaaccaagaa

SEQ ID NO: 97787 - RNA, 80 nt, Homo sapiens
cggcccgcagcacggggcagccccgccggccaggccacacccggagggccgagcgaggaagacaaaccggccgccgccca

SEQ ID NO: 97788 - RNA, 78 nt, Homo sapiens
gaaccaccagcacaccagccccgaggcagagaggcgccacaaccaggcaaggagcaagagaggacaaaggacacaagg

SEQ ID NO: 97789 - RNA, 73 nt, Homo sapiens
gggcagaagagaccgaagcagcgcggagcacggaagaaggcagacagggaccgaacccaggcagaccaccgcg

SEQ ID NO: 97790 - RNA, 81 nt, Homo sapiens
gcagccgggcaaggaggggaggcgagaacacgaggaggggccgggagaggaaggccccaagcagccagcagaaaagcaacc

SEQ ID NO: 97791 - RNA, 68 nt, Homo sapiens
ccacgcccggcaggagagaccaagaggacggccccaacggcaccagcaacaagaccaggagcgcggcc

SEQ ID NO: 97792 - RNA, 53 nt, Homo sapiens
aaagcagagaagggcacaggagagagagagagagaggaagcgaagaaaaagcg

SEQ ID NO: 97793 - RNA, 72 nt, Homo sapiens
cgagcacagaagcgccacacgcggcacacagagaaaaaaagggaacaaaacacagcaagcagacaaaagggg

SEQ ID NO: 97794 - RNA, 85 nt, Homo sapiens
ccgaaagagggcaagagaagaacagaagaaacaaaaggccaccgaagaggcaaggcagccccggcagaaccagagggacaggccc

SEQ ID NO: 97795 - RNA, 87 nt, Homo sapiens
ggcggcaacgaaaagagcccgcgaggccgacaagagccacccggagcaggcagcaggaaggagggccacacaccaaagagacggcag

SEQ ID NO: 97796 - RNA, 76 nt, Homo sapiens
caacgggcgccacgcaaggggggaccacacgccaaaggcacggggcaagccacaggggagaaagaagagagaacca

SEQ ID NO: 97797 - RNA, 71 nt, Homo sapiens
cacgcggaaacacggcacgccacagccgcaccgagacgagacaggcgcagcagcgcccacccggccgggca

SEQ ID NO: 97798 - RNA, 35 nt, Homo sapiens
caagcacggaccaaagccgcgggagaggcaacaag

SEQ ID NO: 97799 - RNA, 70 nt, Homo sapiens
agagggaccaagaagaacccccagaacggaccacagccaaaggcccgcgaaccagaacgcggcacaaaca

SEQ ID NO: 97800 - RNA, 79 nt, Homo sapiens
ccccgagcgacggaccgggaacaccgagggaggagggacacacgacaggcccgagagggaacccacaccaaaacaccca

SEQ ID NO: 97801 - RNA, 82 nt, Homo sapiens
ggcgcggggcgggacagacggccggcgggagacgccggaagaaggaggccgaccaggccgacaaagcagacgcccgcaaacg

SEQ ID NO: 97802 - RNA, 90 nt, Homo sapiens
ggccaggacggcgggaccggccgcgggcccagcgagggcgagccgggcgggggaggggcgaggggggccgcggcagcgcgccccagagga

SEQ ID NO: 97803 - RNA, 53 nt, Homo sapiens
ggagcacaggaagcagcagaagagcacaaaaccagcgccaagcccgaaaaggc

SEQ ID NO: 97804 - RNA, 75 nt, Homo sapiens
gaagaggcggcgggcaagggaagagaaaccgagcacaacaggagggggcgaaggaacagagagaaacgcgagaag

SEQ ID NO: 97805 - RNA, 85 nt, Homo sapiens
aggccagaaggcagaagaacagacggcccaggaggccagaaggaaaacgagagagggccaccaaaaggagaccccccgagcgcca

SEQ ID NO: 97806 - RNA, 72 nt, Homo sapiens
gagcaaaacacaagagagcagggaggagggaagcccagaggcacggggcagaacaccaacagagggccgacc

SEQ ID NO: 97807 - RNA, 76 nt, Homo sapiens
cacagggcagcgagaggagccaggagccgccagaggagccacaggaggacgaggacgcagaagccagggaggaggc

SEQ ID NO: 97808 - RNA, 75 nt, Homo sapiens
accccacagccacaccagccaaaggaggggagaagcaaacgacgcagacccagaccagacacaacagcaaaacca

SEQ ID NO: 97809 - RNA, 54 nt, Homo sapiens
caaaaagaggcaccagaagggggagaagagggagacccgaacgaagacgcagcc

SEQ ID NO: 97810 - RNA, 89 nt, Homo sapiens
gcgggcgccccaacacccagcacaccgcgcccaggcaggacccagaggccagagcccaaggcaaggaggacccggagagcgagaaccca

SEQ ID NO: 97811 - RNA, 80 nt, Homo sapiens
gcgcgcggagcccggcccgacggcagccggcaggcaggggggaagaggagagcgccgaacaacgaagaagggcgaaggga

SEQ ID NO: 97812 - RNA, 81 nt, Homo sapiens
gccaccagcacggaccaggaggcgagcaacagccaaacagaaacggaaaaagaagagaaaaaagaaaagagccacaagaag

SEQ ID NO: 97813 - RNA, 60 nt, Homo sapiens
accaaagaaaacaccccaagaagaacccgcaccagagaaagcccaacaaaagggcccagc

SEQ ID NO: 97814 - RNA, 85 nt, Homo sapiens
cacggggagcagaccggaggaggcgggggcgccggcagaggaccaggcaccaccggccccggaaggccccgggaccaaggacacg

SEQ ID NO: 97815 - RNA, 52 nt, Homo sapiens
acacgaacccccaagcggggcccacccaaacgacccagggcgccaacgggga

SEQ ID NO: 97816 - RNA, 78 nt, Homo sapiens
cagccgcccacaacccaaaaacaaaagggagaacccagccagcaacagaacagggccggaagaaacacaccggaaacc

SEQ ID NO: 97817 - RNA, 76 nt, Homo sapiens
aagggggaagagagagaaacaaaagcgccagagccaagaacgcggaaggaggagcccacggcagccagcggaagag

SEQ ID NO: 97818 - RNA, 68 nt, Homo sapiens
gccccccggaaccagcagcgcagccgggggccaggcgaggcggaacacaggggccaaccagagggaag

SEQ ID NO: 97819 - RNA, 69 nt, Homo sapiens
cccaagagggaaccacccccaacaaccagggcaaacgaaaagccaaccagcaagaaaaaaggaacaaga

SEQ ID NO: 97820 - RNA, 79 nt, Homo sapiens
ggacaacccggcagcacgggaaggggacagaagggccgcccgggcgacgaacaccgccccggaacagcagagcccgccg

SEQ ID NO: 97821 - RNA, 60 nt, Homo sapiens
ggaagaggaggaggaagaagaagggaggaccccaagaaggaagagcggagaaagaggcca

SEQ ID NO: 97822 - RNA, 69 nt, Homo sapiens
aaggaccaagaaccagcaagaagaaggacgccaccgacaagaaccacgggggacccggcggcgggacca

SEQ ID NO: 97823 - RNA, 83 nt, Homo sapiens
gcgggacggagcggccggggccggggcgccgccgggcggccgggcgcggcgagcccaggaaaaaaaggaacggaaccgaacag

SEQ ID NO: 97824 - RNA, 82 nt, Homo sapiens
ggcaagccccagaacgcggggagggggcgaacgcaggggagaggagaagagagcggcggaagggagagacggggcaccggag

SEQ ID NO: 97825 - RNA, 58 nt, Homo sapiens
acccaaccgccagccacaccccaaaagcagcaaacaggacaaaggagagcagcccagc

SEQ ID NO: 97826 - RNA, 86 nt, Homo sapiens
gccgcgcggaccgggagaggaggaaaaggagaaacggcggcagaccgccacgcaggaggccagccggccgaccgcacagacgacca

SEQ ID NO: 97827 - RNA, 77 nt, Homo sapiens
aagggagaagcaagaggacacgaagacacagacacaaaggagagaggcaccaccagaccaaagagagcgagaaccaa

SEQ ID NO: 97828 - RNA, 75 nt, Homo sapiens
aagaggcggggaggacacgacgcgcaaagggggcccacaaaccgacgacagcccccaacagcaagagcaaaagcc

SEQ ID NO: 97829 - RNA, 89 nt, Homo sapiens
gcggcgaaggaagaggagggcaagaagggcaagaagggaaggaagaaggccagcgaagggaaacaaaacacccagaaggaaaccaggcg

SEQ ID NO: 97830 - RNA, 73 nt, Homo sapiens
aggccaggcaaccccggagcaagcacccgcgcagagaaccagcccgaaaagcaaaggcccacccaggcacagg

SEQ ID NO: 97831 - RNA, 38 nt, Homo sapiens
cgccccgaccgccgaacaagagggggcgagacagcgcg

SEQ ID NO: 97832 - RNA, 87 nt, Homo sapiens
gcggcagcccgggagcggcgagggaaaagcgaggcaaggcaggcggggcagccgagaaggcaacccacagaagggaagacacccaga

SEQ ID NO: 97833 - RNA, 82 nt, Homo sapiens
aggagaacaggaaacggagcagaagccaggggaagcgacggggaccggcagggaggagaaggcggcgcggacaaggcccgag

SEQ ID NO: 97834 - RNA, 54 nt, Homo sapiens
cacaaaagaggagaaaaccgggcgcagcccacccagcagcgaagagcaaaggac

SEQ ID NO: 97835 - RNA, 82 nt, Homo sapiens
cgcggcggcagcagcaggagaggaacgcacaccagcaccagcccaccaaaccagcacgaccccggagcagaagaaggagcgc

SEQ ID NO: 97836 - RNA, 80 nt, Homo sapiens
ccgaagcggacagggaaggaggagccggaaaaggaacagaggaggaggcggcaaggagacggcccgccgggacagggagg

SEQ ID NO: 97837 - RNA, 84 nt, Homo sapiens
cggagggggcaagggaccagcaaggcggcagagcaaggggcacgcagaaggaccggccacgagcccacgcaggagacgggagga

SEQ ID NO: 97838 - RNA, 53 nt, Homo sapiens
cagcacagcgaccggaaccaggagaggggggccccccacgccaacgaccgccc

SEQ ID NO: 97839 - RNA, 67 nt, Homo sapiens
cagaggagaaggcgaagaaaacagccaagcaccagaaggagagaaggggggcgagaccggagcggcc

SEQ ID NO: 97840 - RNA, 77 nt, Homo sapiens
cccccaagagcgggaccacaggaacagggacccccagggacggaaagacaccgcccgagcgggcgggagaagcgagc

SEQ ID NO: 97841 - RNA, 85 nt, Homo sapiens
ggcgcagaacggccaggggagagccacacccccaccccggggcccgacaagaaccacgcgggagcagagccaggggcgcagaagg

SEQ ID NO: 97842 - RNA, 103 nt, Homo sapiens
cgggcaaggagcaccgcaccaagaaggagcacgcagcacgcccgaaaaagacccgagcaaaggagaaaaaaaaaggggacgcaaaacccccacccccagaaga

SEQ ID NO: 97843 - RNA, 84 nt, Homo sapiens
cggggagcgaacgggacagcccacacccggcgcggagggagagaggaaaggggaacaagcggaagaccaggcagagaagaggca

SEQ ID NO: 97844 - RNA, 80 nt, Homo sapiens
aaagggcagcaacgcccacggaccgagaaaagcaggacacccaccgggccggcggccgagcaggcggcccagcgcacacc

SEQ ID NO: 97845 - RNA, 59 nt, Homo sapiens
agcaaccaagaacccacaaaaagcaccgggaggaaagagagccacacgaagaacacggc

SEQ ID NO: 97846 - RNA, 72 nt, Homo sapiens
aagaaaaagacaaacggaacgcagacagcaacgaaccaaaaaccaaacaacaaccagacagggcgccggccc

SEQ ID NO: 97847 - RNA, 73 nt, Homo sapiens
ggccacccagagggcccggccaaggcccgggcgcacgaccgcggcccggcagcacccgaggaggagcgaaacc

SEQ ID NO: 97848 - RNA, 103 nt, Homo sapiens
accgggagcagcagagagaacaccggacagcacggcgaggacgggaaggaacaaagacaaccccacgaggacaaaggaccgaaccgggggacgagagaacgag

SEQ ID NO: 97849 - RNA, 69 nt, Homo sapiens
gaggccgaccagcacccgaggagcccagagcagggaaccagggagaaacaccccagacaacccaagaaa

SEQ ID NO: 97850 - RNA, 77 nt, Homo sapiens
accgacaaccaagggccccgcggaccaaggaagaacccgaagcaccgaggggggcgggccgagcacccgcaggcccc

SEQ ID NO: 97851 - RNA, 82 nt, Homo sapiens
gagaccacagccgacggagcggaggagggcacccacgggggccggaggagacagagcacggaccagccgcaaagagccagag

SEQ ID NO: 97852 - RNA, 81 nt, Homo sapiens
gcaccgaaccccggcccgcaagccaacccagcaccacaagcaggagcaacacaagcggaaagaaggaaccgccccgggcag

SEQ ID NO: 97853 - RNA, 82 nt, Homo sapiens
gaccggaccacggcgcagacgcgggcgagcgcggccggacgccagcggacacgcgggcgaggaaacacaagagagaaaaaga

SEQ ID NO: 97854 - RNA, 61 nt, Homo sapiens
gcgccggcgcgcggcgcggacaggcccaaacgagagaagaagaaggaggccgcggccagaa

SEQ ID NO: 97855 - RNA, 72 nt, Homo sapiens
agaaaagggaggagacaggacccaacgacaaaaggaaagcagaccacgcagaagcaacagcagaaggagaca

SEQ ID NO: 97856 - RNA, 75 nt, Homo sapiens
aaccaacgcccccccagcacacagaggagagcgacgagaagacccaagaaggagaagccccgcagccggagcagg

SEQ ID NO: 97857 - RNA, 74 nt, Homo sapiens
gcgaagaagaagcacaaaaccacacaggcaagcaggagggcaccccaaaagaaagaaaaagcggggaaaacaaa

SEQ ID NO: 97858 - RNA, 74 nt, Homo sapiens
ggcgccaaagcgagagagggaagcgcccggccggaggcaggggaaaggcgggacaagggcgcaccggggcgcag

SEQ ID NO: 97859 - RNA, 74 nt, Homo sapiens
ggcggggccgggccggagacgcgcccgcgcgcaggggaagcgggcaggacgggagaagcgccacccaccagaac

SEQ ID NO: 97860 - RNA, 78 nt, Homo sapiens
ccggcccccccagaacacgggaacagagcagggagagaagcacaaggcgaccaccagcagaccggacaccgccccggg

SEQ ID NO: 97861 - RNA, 54 nt, Homo sapiens
gcccggccgcaccgcgcgacgggccgccacggacgcagacggagcaaagagaca

SEQ ID NO: 97862 - RNA, 75 nt, Homo sapiens
gccgaggcaccgaggcaccagaggaggacaggagagacaacggaggcaagaaagacggagaagcgagaagagacc

SEQ ID NO: 97863 - RNA, 74 nt, Homo sapiens
gagccgcgggaagcggccggaaggcggcgagaagcacacggccacagaaggaaggcagagcccacaaacccaag

SEQ ID NO: 97864 - RNA, 62 nt, Homo sapiens
acaagaagggcaaagccgaaccggagcgggcagggcacacaaccgggcagcggacacggagc

SEQ ID NO: 97865 - RNA, 50 nt, Homo sapiens
gccggccggcggcaaaggcaccagaagaaagaagagaccaagcgcacagg

SEQ ID NO: 97866 - RNA, 61 nt, Homo sapiens
aaaggcgcggcgcaacccgcgcccgccggagagagaaagcgggggcgcggaagagggagcg

SEQ ID NO: 97867 - RNA, 72 nt, Homo sapiens
gaacgccggcgcccgacagccaaaggcaggcagcagaaaggcagcaaaccccagacgccggcagccagcaga

SEQ ID NO: 97868 - RNA, 76 nt, Homo sapiens
agagaccgcacaacagacgagaaacagaagcgcaaaaaggagaggaaagcacacagcaagagacaggcgaagaaac

SEQ ID NO: 97869 - RNA, 70 nt, Homo sapiens
aacccacgccaaagaggaagcccaccacaaaaacgaaggcggcgggcagagaggaaggacccccagcgcc

SEQ ID NO: 97870 - RNA, 77 nt, Homo sapiens
gggacccccgacgccaggcagcgcccccaaacggaaaacgcaaaaccagaagcgcgccgacacggcccgggcagcca

SEQ ID NO: 97871 - RNA, 68 nt, Homo sapiens
cgccccagccgccaacggaagagagaggagaagaccagagaccaccacaaaaagacaacaaagcgcgc

SEQ ID NO: 97872 - RNA, 81 nt, Homo sapiens
gaccgcgcaagaggcgaccccagcacggcaaagcccggagacaagcaacgacaccgaacaccgcacagaaagcagaccaac

SEQ ID NO: 97873 - RNA, 92 nt, Homo sapiens
agcccaccgcagggaaaacaaccgagccaaccaagccgagaagagaccacggaaaggacaggggggaggcaaagaaccagaagacacaacag

SEQ ID NO: 97874 - RNA, 76 nt, Homo sapiens
acacaacccgaccaccggagaaccggggcgcaccgccaagagcgggacagaaagaaaccaggcaccaaagggagca

SEQ ID NO: 97875 - RNA, 81 nt, Homo sapiens
gggaccggccgaaaggcgaggaaccggagaacgcgccgccggccggggcgcagggacacggggggccaagggaccacacga

SEQ ID NO: 97876 - RNA, 74 nt, Homo sapiens
gcgcgggacccagcccaggcggcgcggacggggcggggggacggcgcgaagaagagaagacaggaacggcaaag

SEQ ID NO: 97877 - RNA, 70 nt, Homo sapiens
cggacgagcgggaccagccagggcacggagcgcaaagaggaagccgaaaacggaaaaagcaaacagggag

SEQ ID NO: 97878 - RNA, 74 nt, Homo sapiens
accaggccaggcggcggcccggcccagccacggaggggcggcgcgcgcccagaggcggaagaggcagcccccgg

SEQ ID NO: 97879 - RNA, 85 nt, Homo sapiens
gcgacaccaagcagaagccagcgggccggaggcgcaacccccaggcccgaaaaagcccaagacagcagaagcagacaccccagga

SEQ ID NO: 97880 - RNA, 75 nt, Homo sapiens
gaaaagacagagaggggaaaccccgaaaggggggcagggagagaaggcgaaaagaagggagccagcaaacaaacg

SEQ ID NO: 97881 - RNA, 74 nt, Homo sapiens
ccccgcgccgccgaccccccggcgccgcgccggcggcgaaaggggagcaagaagaaagagcagggaggagggag

SEQ ID NO: 97882 - RNA, 54 nt, Homo sapiens
ccacagccaccacagacgcgaccaaacagcccagacagacggggcgggagcgcg

SEQ ID NO: 97883 - RNA, 86 nt, Homo sapiens
caaaagcccaccagcaaagcagaacagcccagcaggaagggaaccaagccccaacaacagagacagcgcggagacccacacaaggg

SEQ ID NO: 97884 - RNA, 77 nt, Homo sapiens
gaaaaagcaaacgaccagacggcagggaggcacaaaggggaacacagggaaccacccgccccgaccaggagaggaca

SEQ ID NO: 97885 - RNA, 73 nt, Homo sapiens
agggacccagaggaggcgccacagccgcccacaaaggacccaacagggagagaagaagacacgagaaccggaa

SEQ ID NO: 97886 - RNA, 73 nt, Homo sapiens
gaaggaaaccagggccgggaagcaccagcgggcacacacccacgcggggcgcgcagagcgggcccgggcgcac

SEQ ID NO: 97887 - RNA, 81 nt, Homo sapiens
gaacaaaaaaaaagagggaaagacacggggaagagacaagagcagagagaacacgaagcacgagaggaaaccggcacagaa

SEQ ID NO: 97888 - RNA, 32 nt, Homo sapiens
ccggacccagccccggcacaaaaagaccgggg

SEQ ID NO: 97889 - RNA, 65 nt, Homo sapiens
cgcgccgcgccaccgccaaacggaagacagaccgcgaggccacacccaagaccgagcccaagccc

SEQ ID NO: 97890 - RNA, 81 nt, Homo sapiens
cgacgcagaagcccgccgcccccaaagcggaaccggacaccgagggcaacggcagcggacagaaggcacgggggcccgcac

SEQ ID NO: 97891 - RNA, 89 nt, Homo sapiens
cagccagaagacccaacagagggacccacgcagccacccagcccagcaccacgcgcagccaggaggcccgggaccgggggcgaccgcgc

SEQ ID NO: 97892 - RNA, 85 nt, Homo sapiens
ggagccggcgggcggggaacccaggccccgccgaggcggccaggccgggcgggggaggcgagacacgggaggcacacacaacgcc

SEQ ID NO: 97893 - RNA, 75 nt, Homo sapiens
gcaggcaggaccaaggcagcaaaagcccggaccaggcaccacccagagcgagggcagggaaaccacgaggcagcc

SEQ ID NO: 97894 - RNA, 50 nt, Homo sapiens
cagcggacgccccagcacccccagcgggcaggaaaaacaagaaggggggc

SEQ ID NO: 97895 - RNA, 74 nt, Homo sapiens
aagaacacaccagggcagacacgaaaaaaggggagagacaaccagagcggaaagggagaaaagcccccagaaag

SEQ ID NO: 97896 - RNA, 54 nt, Homo sapiens
gagccaaaacggcgagcaagagagaaacgaacggacgaagcgagccacgggccg

SEQ ID NO: 97897 - RNA, 81 nt, Homo sapiens
caaggccaagaccgccagcaaaggaagacgagggacaaacggggacagcgccgaccggaacagggaccacggaagcccagg

SEQ ID NO: 97898 - RNA, 72 nt, Homo sapiens
aaagggcagaaagcggaccgacacccggaaacgcgcggcgcaggaagagcagagaggcagagacagggcgag

SEQ ID NO: 97899 - RNA, 75 nt, Homo sapiens
cgcccaaagacaccagaccaagccggaaacgaaacagcgcagccaggaacaggacgaagaccagcgccagggaaa

SEQ ID NO: 97900 - RNA, 87 nt, Homo sapiens
gcgcccggggggcgagcccgccgcacccgggccgcgccggcacgacaagacgcagaggaagggggcggcgggaggcccagccgggac

SEQ ID NO: 97901 - RNA, 72 nt, Homo sapiens
aaggacaaggacaagaacgcaaaaacaggaagaccgcaggaaagcaggaaggcaagaaagccaaggacgaaa

SEQ ID NO: 97902 - RNA, 60 nt, Homo sapiens
ggaacaaaccgaagaacagcgggaaagaaggcaaaacacggccaacaggaccagaccaca

SEQ ID NO: 97903 - RNA, 79 nt, Homo sapiens
gcggcggcgcgcggacccaggcgcggaggcgaggccagcagcaacggggcggcacacaaggagcgaagggcagggagaa

SEQ ID NO: 97904 - RNA, 80 nt, Homo sapiens
cgacgacgccagacccggacaaagaaagagcggcgaaggacagggcgaaccccgcgccccgcagcggagagcgcggccga

SEQ ID NO: 97905 - RNA, 65 nt, Homo sapiens
agcaaacgcgaaccgcgcaggacgccaaaccaagccgcagggggaagggggagccacggaccagg

SEQ ID NO: 97906 - RNA, 83 nt, Homo sapiens
accaccccgacacaacaccaccacaaacaagcagaggaagcagcaaacaaaggcaggaagaaacacaacaacaaaaagagcag

SEQ ID NO: 97907 - RNA, 56 nt, Homo sapiens
gcagcgaaaaacgaacggaaagagccgcagacgcacagcaaccaccggacccgaag

SEQ ID NO: 97908 - RNA, 52 nt, Homo sapiens
cacgggccagcccaagacagaacaagcgcgaccgcgggagcacaggggaggc

SEQ ID NO: 97909 - RNA, 40 nt, Homo sapiens
cgcgcacacaccgggagaggcagagagggcaacaaccagg

SEQ ID NO: 97910 - RNA, 68 nt, Homo sapiens
ggagcgaagggggcccaccggcaaccacaagccaggaagaaggaaacgaaaagagacagcagggcaaa

SEQ ID NO: 97911 - RNA, 88 nt, Homo sapiens
acgcgacggagacgaaccgcaggaacacgggaccgacaggacagcggagccccgcgcccggcacgaggaggaggagcacagagaccag

SEQ ID NO: 97912 - RNA, 58 nt, Homo sapiens
aaaggggaaccccggagaaaaggccaagaaggcagaaggcaggaagcaggcccgagcc

SEQ ID NO: 97913 - RNA, 54 nt, Homo sapiens
gccaaagagagcaaccccacacggcccgagaccgccacgggaaaacgaaaggcg

SEQ ID NO: 97914 - RNA, 74 nt, Homo sapiens
caccagccaccagggaagccacagggaaagcaagagagccagaggaaggacaaagcgcagcaccggcccaggcg

SEQ ID NO: 97915 - RNA, 102 nt, Homo sapiens
gacgccacccacggaccagcagcgccgagggaaacccggagaccaaaccggaccggacgccacacaggggggggcagcaaagcggcgcccccagagcccccc

SEQ ID NO: 97916 - RNA, 78 nt, Homo sapiens
ggaaggaaaggcgcaacaacacaaaaaaagcagcaagggcacagggggacgaaacgaacgacagaaacccaagcagag

SEQ ID NO: 97917 - RNA, 82 nt, Homo sapiens
caaggagcacggacggacccagcacgaggaggcgcgaggagagcacggaggaggaccaggccaaggggaacaaggaccaaac

SEQ ID NO: 97918 - RNA, 75 nt, Homo sapiens
ccgagaggaaaggcgagggaagcgccggacgggacaaggaggacaaccccgacgaagcaggggagcggagcagag

SEQ ID NO: 97919 - RNA, 82 nt, Homo sapiens
aagcggacacccgcccgccggcaaaacgccagcgagaccagccacaggcccaggagggaacaacagcaacaacacgcaagca

SEQ ID NO: 97920 - RNA, 77 nt, Homo sapiens
gcgggggaggcggcagcggagagggcgggcagcagcggcgcacaaaagcaggaaaggcagccgacaggggaaagacc

SEQ ID NO: 97921 - RNA, 72 nt, Homo sapiens
agaaacaccaacacaaaaaaaaccaacagccccccagagagagcaggcagcccccagaccacaaccgagagc

SEQ ID NO: 97922 - RNA, 90 nt, Homo sapiens
cgggcggagacggggcgcccccccgccaaggcccggcgagggagcgggaaacgcacaacagagaacagaaaagacccgcagacaacgggc

SEQ ID NO: 97923 - RNA, 72 nt, Homo sapiens
aaagacagcacaaagaagccgagacaaacggcaccaagagggggagaggcaccagcaacagaccaaccgcag

SEQ ID NO: 97924 - RNA, 66 nt, Homo sapiens
cggccacgccccccgcaacaacccacaaggcaaaaacagcaaaagaaaagaaaaaacaagaaggag

SEQ ID NO: 97925 - RNA, 68 nt, Homo sapiens
agacagaagagagccggccggcaaagggaggaggaagaaacaagcaagaaaaacagccgcagaaagca

SEQ ID NO: 97926 - RNA, 77 nt, Homo sapiens
acgcgacgcgccccgcccccccgccggcccccccacggaaggggccggggggggcacagagccccggaagacagccc

SEQ ID NO: 97927 - RNA, 79 nt, Homo sapiens
aaaaagcaaacacgaggccacggggaaacacagcagaacacagggccccagagaccaggacggacgcagccagcagagc

SEQ ID NO: 97928 - RNA, 67 nt, Homo sapiens
gcaaggcagccagcgcagcccagacaggagagacaacggaggcaagaaagacggagaagcgagaaga

SEQ ID NO: 97929 - RNA, 73 nt, Homo sapiens
ccaaggggacgagcaaaggaagcgcgaacagcagcgcaggagcgacaggacccaaacccgggccgcccggagc

SEQ ID NO: 97930 - RNA, 81 nt, Homo sapiens
aagaacaacacagccagccccccgagggagggacaaggcccagaacagccggaaacacaaaacccccagccggggaggccg

SEQ ID NO: 97931 - RNA, 76 nt, Homo sapiens
gaaaggaccccagaggcaccgaaacagcggaccggagacgaaaccacaaaacgcccaccagcacagcggcagaaac

SEQ ID NO: 97932 - RNA, 68 nt, Homo sapiens
ggacggggacgagaaaccggaggagcaggaaagaaaccccagaaagccgggacggccgcacaagcgca

SEQ ID NO: 97933 - RNA, 50 nt, Homo sapiens
caagaaggacgggcaacgaagcaagagccccacacaccaagaacccgaaa

SEQ ID NO: 97934 - RNA, 96 nt, Homo sapiens
cagagggcccgccccagcccgggccgccacccgcagcggaaggggcccagaagacaccgcgaggggccgccaccgagcccacgaacccgaagcccc

SEQ ID NO: 97935 - RNA, 73 nt, Homo sapiens
ccagagagcgccccggcgggcggcgacggcggcaaacaagaaagaccagccaaggaagcaacacagcagcgag

SEQ ID NO: 97936 - RNA, 69 nt, Homo sapiens
accacaacggcgaaccggaacgcgcgccgcacagacgcggagacaaacagggaggaggacacaccaagc

SEQ ID NO: 97937 - RNA, 51 nt, Homo sapiens
aaggacaacagcccgacaaccaggaaagcacggcacagcgaggcccggagg

SEQ ID NO: 97938 - RNA, 72 nt, Homo sapiens
ccagcccaaaaaaacacagcgggccgggaggggaaggagcagacagaacaacggcccagccccacaggacaa

SEQ ID NO: 97939 - RNA, 75 nt, Homo sapiens
caagcggcaaagcaccgaacggacagcagggaagaacggaaaccagagaaagaaacgcccccacacaaaagcgag

SEQ ID NO: 97940 - RNA, 61 nt, Homo sapiens
accaccggggaaacagcagcaccaaaacgaggacaggcagcccagagcacaacccggaagc

SEQ ID NO: 97941 - RNA, 59 nt, Homo sapiens
aagccaccagcacaggaaaacccccgcccgcccaggaggcccgcccggagggggaacgg

SEQ ID NO: 97942 - RNA, 70 nt, Homo sapiens
cgcaacaggggagaagacgcgcgccccgcaagcaggaagaaaagagcggggcaaggcagccagcagccaa

SEQ ID NO: 97943 - RNA, 91 nt, Homo sapiens
accgagcgggcggcgggcgcgcgcaccagggggagaaacccgggaccaggccacacagagaacagagggagcgggcggcgagggagccgag

SEQ ID NO: 97944 - RNA, 72 nt, Homo sapiens
cacaacagaagggaacccccacaaagaacagaagcaaggaagcgggcaaaacggaggagccgggaacgggcg

SEQ ID NO: 97945 - RNA, 55 nt, Homo sapiens
aacgacgaacagaacgaacagaaagagaagcgacccgccccgccacgagaacaca

SEQ ID NO: 97946 - RNA, 79 nt, Homo sapiens
cgccccaccacgaggccagcacgggaacgcgaagcgccaaagccagacaagacacacagcaacgaagcaggggaggagg

SEQ ID NO: 97947 - RNA, 80 nt, Homo sapiens
agagagcgagcgagggggggcgcgccggaaaccggagcgcgcagcaggcgaagccgacgagcccgaacagacgcaccagc

SEQ ID NO: 97948 - RNA, 65 nt, Homo sapiens
caagaccaggagggaaggcagagaccgccgacgaaaagagggaaaagccaacagagggggaagaa

SEQ ID NO: 97949 - RNA, 62 nt, Homo sapiens
gcgagacccagagggacagggcgcagcgacaacccagacgagcagaacccaggcccgagcga

SEQ ID NO: 97950 - RNA, 35 nt, Homo sapiens
ggcccccgccgagcacggggaggccccagaccggg

SEQ ID NO: 97951 - RNA, 69 nt, Homo sapiens
cggacgcccagaaagggcgacaggccaccaacacacggagccccgcgacaagagaagcaccagaagacg

SEQ ID NO: 97952 - RNA, 78 nt, Homo sapiens
cagggaacaggcggagcggaaggcccaagaaaagcccaaagaacgccaaagagacggcaaagcagaaccaaaaaaggg

SEQ ID NO: 97953 - RNA, 59 nt, Homo sapiens
gcgccacggcgggccgcgggaggacaccacccacagggcccgaagcggaagacaccgca

SEQ ID NO: 97954 - RNA, 75 nt, Homo sapiens
gagagccagagaaaggacgagcagcaagcagggagcaaggcgcaaaagaccaaccccggaagggaaggcacaaca

SEQ ID NO: 97955 - RNA, 58 nt, Homo sapiens
ccggggaccacaacaggcagaggcaccacagacgggcaccgcagggcccccgggcgga

SEQ ID NO: 97956 - RNA, 89 nt, Homo sapiens
ggcgccacgcaccggacgacgcccggcgccagcacacgcagggagcagcagccccgagaaggaagaggaggaagcgagggcccgcgagg

SEQ ID NO: 97957 - RNA, 59 nt, Homo sapiens
ggcacaccgcaaggacccaaaggggaggacgaaggagacgcaggagggagagcagccag

SEQ ID NO: 97958 - RNA, 77 nt, Homo sapiens
cagccgacaaaacagggcccacccgaagcggccagccgcaggaaccggaaaccccccaggcaagaggcgcaggaccg

SEQ ID NO: 97959 - RNA, 78 nt, Homo sapiens
gccggagcgcgccgacccgaggagaaccagcggagagggaggcaagggaacggaggacgagccacgcgcaccgggcac

SEQ ID NO: 97960 - RNA, 77 nt, Homo sapiens
aagaccgcacaccgccaaccccgcaccggcaccagagcaaaacagcgcgaacgaagaacagacacgagaacaaagag

SEQ ID NO: 97961 - RNA, 78 nt, Homo sapiens
gaaaccgggccagcccgcacagcggaggccagcgggcgcgcagaggcaagagacacggggcggcaaccgggagagggg

SEQ ID NO: 97962 - RNA, 70 nt, Homo sapiens
gagccgcgggcaaagccagaggccccccaacgacagggcagcccgcagaggaccgcacgaacgcaagaac

SEQ ID NO: 97963 - RNA, 71 nt, Homo sapiens
cccccgcgaggcagagcccaggaacaggcagacaccgccagaagcaccaggacagccacaagggcccacca

SEQ ID NO: 97964 - RNA, 63 nt, Homo sapiens
aaggcggaagcaacaaaaacgggggcaacgaagacaacaaaagagcccaagaccggaccaaca

SEQ ID NO: 97965 - RNA, 76 nt, Homo sapiens
cggccggaccccggggaggggccgagacgcccggggggggacgaaacacacggcccaccaagccgagaacaccagg

SEQ ID NO: 97966 - RNA, 68 nt, Homo sapiens
aaaaagcacacagacccgagcgcggccgaacgcagagcccaggcagcaggccccagggacagcggagg

SEQ ID NO: 97967 - RNA, 76 nt, Homo sapiens
gggggcccagccccgagggagccggggcgccgggcccgggccgggcaggagcagggcaacgagcacagacagaaag

SEQ ID NO: 97968 - RNA, 83 nt, Homo sapiens
ggacggaccccgggagcccagacacgggaccccgaacaaccagcgagcgagacccgcagagcgcggacgccccaagccaagga

SEQ ID NO: 97969 - RNA, 85 nt, Homo sapiens
cacgaaccccgagcgaccccccccccccgggcgccgggacaaccggggcggccaccgccaggaggcgcgaaggggagcaagggag

SEQ ID NO: 97970 - RNA, 75 nt, Homo sapiens
cgacgggacacggcccaaggaccgaggcaccgcagccccccccccgggccgggcccaccgcggcccagccgggcc

SEQ ID NO: 97971 - RNA, 79 nt, Homo sapiens
cggaccagccagcggacccgaccaggagggagcggaaaacggggcccgggccggcaaaccaaacagcccagcagcccag

SEQ ID NO: 97972 - RNA, 80 nt, Homo sapiens
agagcggcggcccggccccggcgcagcccggaaagccggcaagacgagaaagcagagcaggaggaagaccgccggcaaaa

SEQ ID NO: 97973 - RNA, 76 nt, Homo sapiens
ccccaagagcgggagcaggggaaaagccgcggaaacccacaggaagccgaaaaagcagggcagcacggaggggcaa

SEQ ID NO: 97974 - RNA, 76 nt, Homo sapiens
caaagaagcacccccgggaccaggggcccgacagcgcaacagaccaagacacccaggagaaagacagcggggaaaa

SEQ ID NO: 97975 - RNA, 82 nt, Homo sapiens
gcacacaccagagaccagaagaaagcggggaagccagcgaacgcagggcaaggcccgggaggagcggggacacgaggacccc

SEQ ID NO: 97976 - RNA, 86 nt, Homo sapiens
cagcacacgacacccccgggaccgcggagagaagcagcggacagcagagccacgacgagacaagccccaggagcaccaccaacccg

SEQ ID NO: 97977 - RNA, 85 nt, Homo sapiens
agaggaaccccagagcaggagacccacgagcagcccccacgggcggagggggcagggcagaaggaccaggggcgacgaggcccag

SEQ ID NO: 97978 - RNA, 72 nt, Homo sapiens
ccgaaaccgaaccaagacagcacgccaaagaagaagacaagaggccccagaaaagaaaccagcaaggagcgg

SEQ ID NO: 97979 - RNA, 70 nt, Homo sapiens
aacggcagcagaaccaccacccaacccaccagacaccaggaaaaacgaaagagcaacagcaaaaaacagc

SEQ ID NO: 97980 - RNA, 59 nt, Homo sapiens
gagaaagggagccgagcgagaccacgcaccacgggcgggcccccgaaaggccgaggccg

SEQ ID NO: 97981 - RNA, 61 nt, Homo sapiens
aggacgcagaaggaagccgaaaagcacgcaggaagaaaaaacggaccgacggagaaaaagg

SEQ ID NO: 97982 - RNA, 81 nt, Homo sapiens
gagaccacgggacgcgacgcgccccgcccccccgccggcccccccacgggcccgacccaggcaagcgagcaggcgagcagg

SEQ ID NO: 97983 - RNA, 81 nt, Homo sapiens
ggaggcgaggcgaaggaaacgagcccaggaacaagacagccgcacaacaagcacagaagaaaggcagaaagaaaaaggaca

SEQ ID NO: 97984 - RNA, 71 nt, Homo sapiens
gaagacgacagcccgccgcaggccacacagcaggggaaggacgagccaaacccagcccaaggacacaagca

SEQ ID NO: 97985 - RNA, 77 nt, Homo sapiens
gagccgccaaagccagacggcccaggggacacccagcaggccagggaagaggcagcccaggggacacaggagccccc

SEQ ID NO: 97986 - RNA, 76 nt, Homo sapiens
agcaccgccccggcagaagcggcagcaaagacaaacaagaccaccagcccacaccaccagaccaaaccagcgccac

SEQ ID NO: 97987 - RNA, 57 nt, Homo sapiens
ggggcggggcgaagaagcagcacaaggcgagccagggagagaaagaacaaagacccg

SEQ ID NO: 97988 - RNA, 54 nt, Homo sapiens
aagaaaaaccgggggaccaacagcaggcagaagacgcccccgggccaaacggca

SEQ ID NO: 97989 - RNA, 69 nt, Homo sapiens
aagcaggcccccagccgcagccacaacaccggcaggaaccaccaggacagagaagaagagagggcgaag

SEQ ID NO: 97990 - RNA, 72 nt, Homo sapiens
cccggggcagaccccggaggcgcacgcccccagccccccccgcccaccaggacccaacccccccaagacccc

SEQ ID NO: 97991 - RNA, 78 nt, Homo sapiens
agaacagaagaagaaagcagggggacgcaaaggccaaggggcggcaaaaaggcgggaaaaccgccacaaagcccccaa

SEQ ID NO: 97992 - RNA, 83 nt, Homo sapiens
acgagggccacggccgagcagacacaacacaggggaagaccgggaggcaacgaggcaccagcccggcagccgccaggacccca

SEQ ID NO: 97993 - RNA, 79 nt, Homo sapiens
aagaagaagcacacacacagaaaggaaagggagggcagaggcggaggagggaaaccaagagaccacaaaaaaaccccac

SEQ ID NO: 97994 - RNA, 71 nt, Homo sapiens
gcagcagaaccgccaaagcaaaccagaccgacacacgccaggaaaggacggaaacagaacccacgcaccca

SEQ ID NO: 97995 - RNA, 78 nt, Homo sapiens
gcagccagacgggaagaagggagagggaggccaacagacccaacccagaaggcaccaaacggagggggaacaggcggc

SEQ ID NO: 97996 - RNA, 61 nt, Homo sapiens
aggggagagagcccaggggaggggagcgggcggagcgcagcagccaagaagagggaaagaa

SEQ ID NO: 97997 - RNA, 81 nt, Homo sapiens
agaagagacacagaggagccacacccccaggaaggagggccccggagcagccacaccaccgaggccccacccagcacgagc

SEQ ID NO: 97998 - RNA, 81 nt, Homo sapiens
cccccgcagcacccagccggccacgggaccagaagcagcagccccagaagccccgaagccggggcaccccaccacccgcgg

SEQ ID NO: 97999 - RNA, 63 nt, Homo sapiens
aaggcgggcagccaaggcaggcgagaagaccaccgggccacagggaacacagcaggggagagc

SEQ ID NO: 98000 - RNA, 78 nt, Homo sapiens
gacaagcggccagccagcaggggcgaggagcccacacacgcaccgagaagaacaaagaggccagggcagagaaaggag

SEQ ID NO: 98001 - RNA, 76 nt, Homo sapiens
gccagggcagccaggcagagcgcacccgcgccccagccaaaggaggcagccggggccgagagccccaggaaccagg

SEQ ID NO: 98002 - RNA, 75 nt, Homo sapiens
gacgccaagcagccgggacaagaacaaggaaacacgcagaaggaaaagcgcagagaccacacaacaggaaaaaac

SEQ ID NO: 98003 - RNA, 84 nt, Homo sapiens
gcagccacacagaaaggagagagaagaagagaagaaggaaagcaacacgaaacaagaacccagcgcagggcacagggccacgcc

SEQ ID NO: 98004 - RNA, 61 nt, Homo sapiens
ccgaccccccacgacgcgcggaaaagagcgcccgcgagcaggacaacaaaacaagcgcaga

SEQ ID NO: 98005 - RNA, 81 nt, Homo sapiens
cacggccaagagcgggcaccaggaagcgaaggcgggcccggccaggccccaccgccacaagcaggggaacaccgccaaccc

SEQ ID NO: 98006 - RNA, 64 nt, Homo sapiens
aacagggagggaagaagacccaaacagcgaggcgagacccgaagagaaccaccgagaggaacaa

SEQ ID NO: 98007 - RNA, 51 nt, Homo sapiens
cgcaccagacgagaagacaggcagcggcggccgcgcccaccggcagggaag

SEQ ID NO: 98008 - RNA, 70 nt, Homo sapiens
gacacagggaagaagagcaaagaaaacagcgaagaaaaccaccgagagaagagggaccaccccagaacgc

SEQ ID NO: 98009 - RNA, 71 nt, Homo sapiens
gagcacaacacggggacgggccagcaagacacaggcagccggcacccgcacaacccagggggccgaaccca

SEQ ID NO: 98010 - RNA, 82 nt, Homo sapiens
ggggcaaccggagccccccaggaggaaacggaacaccgggcagagagaacagagagacaaacagagacgaaaggaccagacg

SEQ ID NO: 98011 - RNA, 71 nt, Homo sapiens
gcaggaaacaagaaacaccaacacaaaaaaaaccaacagccccccagacagaccaccccaggggaccgcca

SEQ ID NO: 98012 - RNA, 74 nt, Homo sapiens
cccccccaggaggcgaggagagggggcgcaggaaggaacaaccgagccaaagacaacgcaggagggcgaagaga

SEQ ID NO: 98013 - RNA, 37 nt, Homo sapiens
gaagaggcaagaaggacaagggcccgacacacaacaa

SEQ ID NO: 98014 - RNA, 81 nt, Homo sapiens
gaaacaccggaggagcggggaggacagagcgggagccaccagcgccaaagggaagccaggagcccgggggcacggggagaa

SEQ ID NO: 98015 - RNA, 76 nt, Homo sapiens
gcccggccccccagaggaggaaccacaagagccagaagggaaagggagcagcaccggccacacccacagcacgacc

SEQ ID NO: 98016 - RNA, 67 nt, Homo sapiens
gcccagccgaaggagaagggggccgccgccagaccgcggagggaacaaccgcacacgaggagacgcc

SEQ ID NO: 98017 - RNA, 60 nt, Homo sapiens
acgggcgagcgcggcgcggggcggcgggccggccgaagagccaacacccgaagcgaaggg

SEQ ID NO: 98018 - RNA, 69 nt, Homo sapiens
gaaagaggcgggagagggaggagcccagaccgggcgacccgcccagaaacaacggcagaaagagagccc

SEQ ID NO: 98019 - RNA, 58 nt, Homo sapiens
aaaaaggaaaggagacaagcagagacgaaccaggcaaaggcaagcggcagccacaccc

SEQ ID NO: 98020 - RNA, 38 nt, Homo sapiens
caggaggagaaggccgccaaaccaggagagaccaggag

SEQ ID NO: 98021 - RNA, 77 nt, Homo sapiens
gcgagccgggcccgagacagaggggcaggagcagagagcgagccaaggcgccgcagggaggagaagaagagaaccac

SEQ ID NO: 98022 - RNA, 56 nt, Homo sapiens
aagcacagacaaagacagagacagccagacaagaccccaacgaagggccagaaaag

SEQ ID NO: 98023 - RNA, 95 nt, Homo sapiens
cacacgacagcaacaagacacggagcaaggaggaaaacacacgagacaccgaggcccggcacgagccgccagcccgccagagcgcccgaggagaa

SEQ ID NO: 98024 - RNA, 85 nt, Homo sapiens
cggcggaaaaccgaagggaaggccagcagcgcgcggagaagaacggggagccagagcggggcccggcgcacccaccaccgccgcc

SEQ ID NO: 98025 - RNA, 79 nt, Homo sapiens
gagccgcacgccacagcgaaggcgcgagggacaagagcagaaccgacagaaaacgcgaaaaaagaacaagacaacaaga

SEQ ID NO: 98026 - RNA, 84 nt, Homo sapiens
gcggccggcggcccaggcgcacaccgcgagacaccaggcgccgagaaggccagcagagaaacaggcaggagaggcccacaggcg

SEQ ID NO: 98027 - RNA, 109 nt, Homo sapiens
caagagaaaagggccgaccaaacaaggacagaagaaaaaaaggaacagcagccaaaacaaccaggcacagcaggacgcggccggcccggcgacaccagccccggcccgg

SEQ ID NO: 98028 - RNA, 82 nt, Homo sapiens
gaaccaccccgcggagagcgcaagccgggcagcagcccagcggcagcagaaagagcaggcaaagcccaacacccccccacgg

SEQ ID NO: 98029 - RNA, 71 nt, Homo sapiens
ccagaggccagcccacagcagaaggagaaaccagaggcaagcgacgggaaggaccaccaaacccagccagc

SEQ ID NO: 98030 - RNA, 73 nt, Homo sapiens
gcaacaggcggcccaaagaccaaccaagaagaaccaacagagaaagaggacgggggccagacaacagcaggag

SEQ ID NO: 98031 - RNA, 83 nt, Homo sapiens
ggacacagcgcccgcagccaagacaacggaacgacggacgggccggaacacacacagccccgggcccagcgccaacacggaca

SEQ ID NO: 98032 - RNA, 78 nt, Homo sapiens
gcgccccaaacgggaccagacgagcgggggaacaccggacgggagcgggccgaaccacggaccaagacccagcccaac

SEQ ID NO: 98033 - RNA, 67 nt, Homo sapiens
caaccagcagacagacaaacgaaggagcaggacaagggcgaaacagaaagcaggcaggggagggagg

SEQ ID NO: 98034 - RNA, 71 nt, Homo sapiens
agcccagcagggggaggagagggcagagaggcaacgaaccggccacggaacgcgcacgggaaccgaagaga

SEQ ID NO: 98035 - RNA, 43 nt, Homo sapiens
gaccaaccacggcaaaccaacaagggggagcacagaggaccgg

SEQ ID NO: 98036 - RNA, 76 nt, Homo sapiens
accgacagcggacgccccagcacccccagcgggcagcggagcgggcacggacacaagaacgagagccaaaggccag

SEQ ID NO: 98037 - RNA, 80 nt, Homo sapiens
gagccggggccccgccggcccagccgggccgagccagggcccccagaggagagaaggagggaccgccgggccaccagaaa

SEQ ID NO: 98038 - RNA, 67 nt, Homo sapiens
ggaccgagaaagcgacaggcgagaaggacagcacaagagcaaggcccacgcggaccggcagcgccac

SEQ ID NO: 98039 - RNA, 79 nt, Homo sapiens
aggcgggaggcgcgacacggaggcgcccggaacaggaggagaagagagaaaagaaagggggccagagcagcaagaacag

SEQ ID NO: 98040 - RNA, 85 nt, Homo sapiens
aagaaggaggaccaccaaaccacaaaagagcgccgaaaagcgaaaagaaacaagccgcggcaacagcgaccccaagccagacaca

SEQ ID NO: 98041 - RNA, 68 nt, Homo sapiens
agaagaccagaacgagccaaggacaaaccggcgaccacacacggggacgacggggaagccggacagca

SEQ ID NO: 98042 - RNA, 74 nt, Homo sapiens
gagcgagagcgaggccgagcaacaccgcgagccgcgcggcgcggggccccgcggcggagacagcgaacccaccc

SEQ ID NO: 98043 - RNA, 84 nt, Homo sapiens
caggaggcgagcccgcggaaccgcagccagagccggggccggacgagaaagccgaaggagacgacggaggagaccggcagaggg

SEQ ID NO: 98044 - RNA, 90 nt, Homo sapiens
ccgcaccagccgcccaagccgcacagccgcggcggcagcagcaggagagggaaagaaaaggcccgaaccaagcagacgccgaagccaccg

SEQ ID NO: 98045 - RNA, 71 nt, Homo sapiens
agaaggggcgagaccccacacccagccgacgaaggcagaagaagggagaggagccaaaagaacacgaagaa

SEQ ID NO: 98046 - RNA, 86 nt, Homo sapiens
aacaagaccggcccaacagagaaaggaaagccaaaaaggagaaccccaggaagaagcacgcagggcgaggaggaagaaacaggaaa

SEQ ID NO: 98047 - RNA, 75 nt, Homo sapiens
ccagaccgcagaacccaaaggcggcacagaacagaggcagggcagaaaagaacagacccagaagaagcgaaaggg

SEQ ID NO: 98048 - RNA, 35 nt, Homo sapiens
caagacgggcccaccgagcagggggcagaagcagc

SEQ ID NO: 98049 - RNA, 80 nt, Homo sapiens
agcccggcgccccccccagccccagcggcaacaacaccgagagaacaggaaaagagaaacggagaacggcaccaacgagc

SEQ ID NO: 98050 - RNA, 46 nt, Homo sapiens
gggggaggagccgaacgagccccagccaggaaacagcaggcgagcg

SEQ ID NO: 98051 - RNA, 74 nt, Homo sapiens
ggaagcggcgcgggggaggaacaacaacggcaacaggcccgccagcaagaggaaaagcagagacacccggcacc

SEQ ID NO: 98052 - RNA, 76 nt, Homo sapiens
gagcggccgggggaggcaggggcgcggcagacccggccagggcggcacccagcgcgcccaccgaagccagcgagaa

SEQ ID NO: 98053 - RNA, 84 nt, Homo sapiens
cagccagggcgccagaagaaaacggcgagaggggcgagaacgccacgcgggccggcgaaagcgcacccgggcccgaccacgggc

SEQ ID NO: 98054 - RNA, 38 nt, Homo sapiens
accaggcccggcccagcggaccgccgcacggggggcaa

SEQ ID NO: 98055 - RNA, 92 nt, Homo sapiens
ggccaagagcagaccgggcgaagggagaggacagcagggaggcgggacgcggcaagaggacggaaaccgagagaacaaccaccggagcgcag

SEQ ID NO: 98056 - RNA, 80 nt, Homo sapiens
aacgcgcaccgaccgcaccggaccaggagggcgaagcacgccagggcgcacacacaaaggggagccaggaagaagacaaa

SEQ ID NO: 98057 - RNA, 71 nt, Homo sapiens
ggaagccccggcaacagaaaacccgccaaggggaacaaaggcgaggaagaaggacgaacacaaaggggcag

SEQ ID NO: 98058 - RNA, 59 nt, Homo sapiens
cccgcggcgcgcagcccagcagcccagggccgaaaagaaaacaggagaaccacccgcca

SEQ ID NO: 98059 - RNA, 65 nt, Homo sapiens
ggggcgaggagcccacgaccaccaggggaaggaacaaagcagagaaaccaaaaggccagacgaac

SEQ ID NO: 98060 - RNA, 73 nt, Homo sapiens
cagggaaggccaaggacaaaggccaggagaccacgacagacaggaccgaaaagggaagagaagggcccgaccc

SEQ ID NO: 98061 - RNA, 56 nt, Homo sapiens
ccgggaccagcgcgccgcccaaggacgcacggaagcaccgggagaagcggcccccg

SEQ ID NO: 98062 - RNA, 77 nt, Homo sapiens
agacaggggacagagcaacagaggaaaacaaaaagcagcaaaaaagggaggaaacaagaaaggaaaaggcagacaac

SEQ ID NO: 98063 - RNA, 77 nt, Homo sapiens
agaccgcagaggaagaaagcggaaagagcgacaaacaaagaaagacggacaagcgcacacaacagaagagaagcaaa

SEQ ID NO: 98064 - RNA, 67 nt, Homo sapiens
gagcgggaaaaacagcaagagggagagaggccccacaacaccccgggggcacgcgaaaaaagcccag

SEQ ID NO: 98065 - RNA, 39 nt, Homo sapiens
accagcaccccaaccccgaagccaggagaccaaggaccg

SEQ ID NO: 98066 - RNA, 78 nt, Homo sapiens
ggaggggaggcaccggcagcggacccgcccagaaccaagcccgcacgacgcgggccggacacccaggccgcaagaccc

SEQ ID NO: 98067 - RNA, 53 nt, Homo sapiens
ccaacccccacacaacaacaggccaccgggagcaggagagggccagaagacaa

SEQ ID NO: 98068 - RNA, 76 nt, Homo sapiens
agagggcaggaaccaccgcccaaaggagagggccaagccggaagaagccagccaggagaagaaacagaggacggca

SEQ ID NO: 98069 - RNA, 81 nt, Homo sapiens
cgccgccggcggccaagcagccaaccagccaaccgggccccccagcagacgcgccaccaggagagaacgccgcgccgcgcg

SEQ ID NO: 98070 - RNA, 59 nt, Homo sapiens
caagaccgcggcgcccccacgagagggcaaacgcgcgcaggacagggcagaccgccagc

SEQ ID NO: 98071 - RNA, 53 nt, Homo sapiens
caacaccaacgaacgaacagccaaggagaccgggagagagacgaaggacgcgc

SEQ ID NO: 98072 - RNA, 58 nt, Homo sapiens
aagcaaccgggcgcaggccacagccaacacacgcgcaggaagcgggaggaccggacga

SEQ ID NO: 98073 - RNA, 71 nt, Homo sapiens
ggcaaaagaaacagggaagacaaaggcacagagagaacagaccaacgagaaggaagacgcaaagaagcagc

SEQ ID NO: 98074 - RNA, 84 nt, Homo sapiens
agcagaggcggagcccgcagaccgcagaaggccggagacaccagcaggacaacggccaccccgggaagccacgcgccggcgggc

SEQ ID NO: 98075 - RNA, 80 nt, Homo sapiens
caccaacggggcccaacaccaacgagaccacaccagccccacgcggcacaagagacggaaaaggaagggaaggagccgac

SEQ ID NO: 98076 - RNA, 79 nt, Homo sapiens
gcaccgagaacggacgcaagcggggaggggaagccacagcagaacgggaccccgcgcagaaggccgaagcaagagccac

SEQ ID NO: 98077 - RNA, 76 nt, Homo sapiens
gaacaggcacgaaaaaacccagcgaagaccacagaaaccaaaaaaagcgcccaagaagaaccgaagagacagcccg

SEQ ID NO: 98078 - RNA, 68 nt, Homo sapiens
cgacggaaacccagcacggcggcccggaccaggacaccgggacaaggaggaagacgcacgccggaccg

SEQ ID NO: 98079 - RNA, 77 nt, Homo sapiens
gcgaccgcgcagaagaaggagggaccggcagaaacaccagaaaagacaagaaagcggcagcccagaaccggaagcga

SEQ ID NO: 98080 - RNA, 63 nt, Homo sapiens
gaagaccaaagggaagagaaacgcaaccggaacgcgaacacgcgaccccggcaggaggacgcc

SEQ ID NO: 98081 - RNA, 77 nt, Homo sapiens
gcaagccagacacgcgagaaaagaagcgggcaaacagaccacgggagaaaaacaagaaacagcagccaaccaggccc

SEQ ID NO: 98082 - RNA, 98 nt, Homo sapiens
gagaagagcccgaggccgcgcgccaccaccaggcaaagaccggacgaaaaagccaagcagagcaggacccacacgacacaagggagaccaggaaacga

SEQ ID NO: 98083 - RNA, 54 nt, Homo sapiens
cgcgcgcccggcggcgcgggccaagcaggaccggcagacagagagggccgagag

SEQ ID NO: 98084 - RNA, 71 nt, Homo sapiens
cgccccggcgcagcgcgaccgcgggcccgcccgggcggaacgacccgagaccgcaagagaaaaggcaaaca

SEQ ID NO: 98085 - RNA, 72 nt, Homo sapiens
acaaggggggaaggacaaagcacagaagagggaacgacagagcaccgccaggaaacgaggagacagccagga

SEQ ID NO: 98086 - RNA, 71 nt, Homo sapiens
agagcgagaagcacgagaaaaacccgaggaaaggaggccaacagaaagaacccagcaccgcaagcccacag

SEQ ID NO: 98087 - RNA, 59 nt, Homo sapiens
agaagccagagaccaccaagagccaccaggagccgagaacaacggaacaacaagccccg

SEQ ID NO: 98088 - RNA, 54 nt, Homo sapiens
gaccggggcacggcagggagcagggaacgagaagacccgagaaaaaacgcaccc

SEQ ID NO: 98089 - RNA, 77 nt, Homo sapiens
cgcgccggaaaccggagcgcgcagcagacaacaggcacaaagagagaaggaacacccacagggcagacagagaaaga

SEQ ID NO: 98090 - RNA, 70 nt, Homo sapiens
gccaggccgggccgcgggagccgaggcgccgaaggaccgacgcccgggacccgcgccgggacccgggcga

SEQ ID NO: 98091 - RNA, 75 nt, Homo sapiens
agaaggaccaagaaccaggcaccggagacgcgggcagaaaaaggaaaggaaggcggcgggggagcacgaggagcc

SEQ ID NO: 98092 - RNA, 117 nt, Homo sapiens
ggcgcgagacgcggccgaagcgggggcgcgcggcggaggaccaggcgcggcgcggcgcggcgagggcagaggccaagaccggcccaagaaggagaaaagaagcgaggcggagcaagg

SEQ ID NO: 98093 - RNA, 54 nt, Homo sapiens
cccacgcccggcaggagaggcaaaagcagaccggaaaacccaccggcaagacca

SEQ ID NO: 98094 - RNA, 72 nt, Homo sapiens
accccacaccaaaacaacgcccagaaaaaaggccacagcagcgaagaaaaacgaacggaaggacgaaccagc

SEQ ID NO: 98095 - RNA, 65 nt, Homo sapiens
aggcccccgcagcgcccaccaccacaggcagcccacccgacacagccccagaccccacaaagccc

SEQ ID NO: 98096 - RNA, 78 nt, Homo sapiens
cggcccgcagcccccgccggccgcccaacaccgaacaccggggaccacaggcagcagcacaaaccagcaccaggaacg

SEQ ID NO: 98097 - RNA, 70 nt, Homo sapiens
agagaggaggagcaagacagagagaggaaggaagggaacacggacgacgagacacgaccaacacaggcga

SEQ ID NO: 98098 - RNA, 80 nt, Homo sapiens
gggccccggcagcagcccgacgcaaaccaaggacggggaccgcacacccaagaggccacagccaaggagcccaggaacca

SEQ ID NO: 98099 - RNA, 56 nt, Homo sapiens
gccacagacagcggggccacagagaccacgcccaccccgggcccaacgaccccacg

SEQ ID NO: 98100 - RNA, 63 nt, Homo sapiens
aagaacacgaggaacccagcacaggcaacaagacacgaaacagaaaaagggagcggcaaagag

SEQ ID NO: 98101 - RNA, 85 nt, Homo sapiens
gggaggcgggaggagcggcagccgcgaggaggcgcgggagggcgagaacgaccccgagacgggcccacgagacgcgaacaaacgc

SEQ ID NO: 98102 - RNA, 72 nt, Homo sapiens
gagcccagcacggcagaaacagccaagccacaggccacacaaccgaaaccaccacccgacaaaccaaaagga

SEQ ID NO: 98103 - RNA, 78 nt, Homo sapiens
cgcaccaagccgcccacacgccaaccggccagaggacgagggcagaagggaccggacacgcgccagccggcccgggaa

SEQ ID NO: 98104 - RNA, 74 nt, Homo sapiens
agaaagaagccgcccaggaacagacccgagcaaaggagagcaaaaaccgggcccaagggcgggggcaaggagcg

SEQ ID NO: 98105 - RNA, 58 nt, Homo sapiens
ccaggaaaagaacaagaagcaccccaggcaaagaagcgcacaagccaaagcgagaggc

SEQ ID NO: 98106 - RNA, 79 nt, Homo sapiens
cagagagccaggagaacgccaggagcaagacaagccgccgggagggaggccccccaagaagacaaggcccgggacccgg

SEQ ID NO: 98107 - RNA, 90 nt, Homo sapiens
cgcgggcaagggcaaccgcggggaagcggggcggcaccggacaccaagacggagcaacaacaggagagcggccagaagcaccagcaggag

SEQ ID NO: 98108 - RNA, 76 nt, Homo sapiens
cgcagggggagaacgaaggcccacccccccacgagcacaaaaaaccccacaccagccagaccaacaccacaggaca

SEQ ID NO: 98109 - RNA, 70 nt, Homo sapiens
cagcccgaaacaaaaaggcgaacagaggaacaaccagaaaaggaggaacagacaaccgaagagaaggacc

SEQ ID NO: 98110 - RNA, 73 nt, Homo sapiens
gacccacgacggaaaaagagcgcgcgcccaggggaggcagggcacgaccggccaggcaaccccgccccgagca

SEQ ID NO: 98111 - RNA, 66 nt, Homo sapiens
gacgcagggcgcccccggccgcccagacacccccaagcaccaacacacgggaacccaagaaacaaa

SEQ ID NO: 98112 - RNA, 69 nt, Homo sapiens
agccaccacaccagacccaaggaacacagcaagccggagaaaggaggacccgggaagacagagacgggc

SEQ ID NO: 98113 - RNA, 62 nt, Homo sapiens
gccggagaacgacaccaagggaagaacgaagaagaaaacaaaccgagaagaaagacggacac

SEQ ID NO: 98114 - RNA, 79 nt, Homo sapiens
gacagaagaagaggaggaggaggaggaagaggaggaagaaaaacgaggacaagacgaggaaaggcccgagacgccagca

SEQ ID NO: 98115 - RNA, 72 nt, Homo sapiens
ggccccaaccggacgcgcaccggagaaaaccagcagagaaggcaggcaaagaacagagaaaggaccaggaga

SEQ ID NO: 98116 - RNA, 70 nt, Homo sapiens
aacggaagcacaagaccgcccggggaacagggcagcaagcgacagcaaagcagcccgaggaggcacgcaa

SEQ ID NO: 98117 - RNA, 74 nt, Homo sapiens
cccaggcggcgcaggcggccaacgagaggaacggccacgcgccaggaaacgcgaagacgacgagcgcaccaaga

SEQ ID NO: 98118 - RNA, 78 nt, Homo sapiens
gcacaagaaaagagcaagaggaaaggggggagagacaagcaagcagaaaccgaccggagggaaagaaaaggaagaacc

SEQ ID NO: 98119 - RNA, 85 nt, Homo sapiens
acagcccccggagaacaagacgcccaccccacaagggcccggccccaccaaaccggggaccgccacagcagccgggcccgccggg

SEQ ID NO: 98120 - RNA, 64 nt, Homo sapiens
cagaccccaccaggcaggggggaaccacaaagaacggagacacagagagagaaaaaggaaagaa

SEQ ID NO: 98121 - RNA, 80 nt, Homo sapiens
caccgcgccccaggccccagaagcccacaccaaggagaaggggccccaagcagcacgcaaacgcaccacagccagaccag

SEQ ID NO: 98122 - RNA, 52 nt, Homo sapiens
aacccaagaggaacaccaacccacagacaaacccacaagcgaaagaacacga

SEQ ID NO: 98123 - RNA, 68 nt, Homo sapiens
ggccccgccgccccagggcaaacagcgcacagcaagggcagaggaaaaggacaccgaagaaagacaac

SEQ ID NO: 98124 - RNA, 56 nt, Homo sapiens
ggaagggcgcgagcggggacaaagcggcagagacaggcaacagacggcaacgaaag

SEQ ID NO: 98125 - RNA, 58 nt, Homo sapiens
gcgggccgggcgcggcaccccggacacggcaagggaacgcggccaagccagagcgagg

SEQ ID NO: 98126 - RNA, 55 nt, Homo sapiens
ggaccaccccgaagaaagcacaggcaggcgaagaagaaggaaaccaaaaccaagg

SEQ ID NO: 98127 - RNA, 109 nt, Homo sapiens
acgacaggcagcgcgggagcaccggaagagccacggagcaggaggccaaccagaacggcggccaaagcgccagacaagggccgagccccggagagccccccgcaagggg

SEQ ID NO: 98128 - RNA, 78 nt, Homo sapiens
gaaaaggaagcgacacagcaagacggagacagcagaagaccccagacccgcagagaccgcgcgcaaacgaaggaccgc

SEQ ID NO: 98129 - RNA, 34 nt, Homo sapiens
ggaccaagaaccagagcaaaggggaccggacaac

SEQ ID NO: 98130 - RNA, 74 nt, Homo sapiens
cgcagacagcggccaagaagacacaaaggacggaggcacgaaaaaggaggcggcaacagggaacgccgcgcaga

SEQ ID NO: 98131 - RNA, 75 nt, Homo sapiens
cacgacagaaacacagccgcagacacagcgagacagcccggcccaccacagaggaaaaccagggaaagcaagaga

SEQ ID NO: 98132 - RNA, 79 nt, Homo sapiens
gcgagcaaccaagcgcagccaagaagcgaaaggccaggccaccacggggggacgaaggagaagcacagagggcacggcc

SEQ ID NO: 98133 - RNA, 84 nt, Homo sapiens
ccacgggccgagacacgcagcggcggccagggaccaaggcagaaacggggacacaagcgaaaggcaacggcgcacagaacaaag

SEQ ID NO: 98134 - RNA, 78 nt, Homo sapiens
acccgaggggcccgccccccgagcgacggaccgggaacaccgaggaacagaggagcggaaacgcaggaggagagagac

SEQ ID NO: 98135 - RNA, 80 nt, Homo sapiens
cagcccaccacgccacaaacgccgcaccaggcgagcagcgcccccgaacggccgagcgaccaggagaggagcccccgccc

SEQ ID NO: 98136 - RNA, 61 nt, Homo sapiens
ccagaccaaaagaaaaaagggacccacccagcgggacgagccggagggaaggaggagaagc

SEQ ID NO: 98137 - RNA, 65 nt, Homo sapiens
agggcaaggcgccagaccaagggaacccaaaaaggccacacccggcggggacggcaacccgcgag

SEQ ID NO: 98138 - RNA, 55 nt, Homo sapiens
cgcagggcgcccccgggcgcacgccagcagaagagagacaagaaaggggagcaaa

SEQ ID NO: 98139 - RNA, 71 nt, Homo sapiens
aggaaaaaaaggaccaccccaacaggaaacaaggggaagccggccgccaagaggacggagaagcagacaga

SEQ ID NO: 98140 - RNA, 75 nt, Homo sapiens
cgagcgcccccgcggagccacaaggcacgcgagaaggggagggggagaaagaagaggaagaagccacaggcaagg

SEQ ID NO: 98141 - RNA, 75 nt, Homo sapiens
cacgcaaccggggggcccagcgcccgggcagggaagcagaggcacccacgcccacaagacaaaagaagcaccgga

SEQ ID NO: 98142 - RNA, 50 nt, Homo sapiens
gaaaggcccggaaagccggaccccacagaacccaagaagccgcgagaagg

SEQ ID NO: 98143 - RNA, 77 nt, Homo sapiens
aaggaaacagcaagcgaagccgaaaaagcgcccgagacgggcccgccgaaagacccgggccccgagcagccacgcga

SEQ ID NO: 98144 - RNA, 72 nt, Homo sapiens
caagcagcagcacgcgaaaggaaacaccgaccaacgccaaagaaacggaacccaggcaacaaaggagcacaa

SEQ ID NO: 98145 - RNA, 86 nt, Homo sapiens
gaccagccgcaaaccaagacgaaacggaggagcccaggaggaagaagaagcagccaaagaagagaaagaagaacgagagaagcgca

SEQ ID NO: 98146 - RNA, 61 nt, Homo sapiens
ccacgccgcgggcggacaccagcagccgggggcaaagagcagacccagaaagaaaaagaaa

SEQ ID NO: 98147 - RNA, 77 nt, Homo sapiens
cacggaccccacacaccagggagacacaaaggacagggacaagcgcacagcggagaaagcagcgcggccaggaggcg

SEQ ID NO: 98148 - RNA, 81 nt, Homo sapiens
gcggagcaaggaaaccggagaggcggagccacaagcacgcggaagagccaccacacaacaggaagacacaaagagaacccg

SEQ ID NO: 98149 - RNA, 82 nt, Homo sapiens
cagccaccccccgacccggagaaaaggacccaagggggcaaaggcggaaacagcagaggacaccaggagaggcggcagcagg

SEQ ID NO: 98150 - RNA, 71 nt, Homo sapiens
ccgcagacaccggcgacaccccggcaggcgcccagacgagcccaccacggaccacccgcagccagcgagcc

SEQ ID NO: 98151 - RNA, 78 nt, Homo sapiens
ggccccgggcacgcaacccccccccgaacagacgagaaagaggagcccgaaggccccagccgcggaggaggcgagaag

SEQ ID NO: 98152 - RNA, 77 nt, Homo sapiens
ggagcacccaccacggagggaaagaccaggcagccagccagcaggcaacaggcccagaccaggcccaaagagcccac

SEQ ID NO: 98153 - RNA, 39 nt, Homo sapiens
ccccgaagcgccggagccccgcccggaggcagcccagga

SEQ ID NO: 98154 - RNA, 78 nt, Homo sapiens
gggcccgcaggcgagaaacggaccaccaccgaaggaacggacaacaagacgcacccccagacgccgacccagaaagcc

SEQ ID NO: 98155 - RNA, 84 nt, Homo sapiens
cgaaacgcagcgcgcccccaggaggcgagcccgcggaaccgcagccagcaggcggacaccgaccgcaggaaggaggaggaggag

SEQ ID NO: 98156 - RNA, 78 nt, Homo sapiens
gccggcgcgggacccagcgccgggaggccaccgccagacacccaacgggaaacgagcacgcgcacccaagccgagccg

SEQ ID NO: 98157 - RNA, 67 nt, Homo sapiens
ggggggcgccagagaccagggggcacagagcacaggaaggagcccggcagcgccgggaaacaccggc

SEQ ID NO: 98158 - RNA, 57 nt, Homo sapiens
acggcaacacaagcaccaagggaaacagaccagaggaggaaacacgaaaaggccaag

SEQ ID NO: 98159 - RNA, 98 nt, Homo sapiens
agaagcaaacaggaaagcacagacagaaaccaaacccaaggaggacaggaaaagccagagagcggcagagaagaagggaggcccaaagagcaaacaaa

SEQ ID NO: 98160 - RNA, 81 nt, Homo sapiens
ccacgcagccccaggggcccggcccggggcgcggaaggcgccgcgcccggggagacagaaacgaggcgcccccagcagcag

SEQ ID NO: 98161 - RNA, 70 nt, Homo sapiens
cgcgcgggaacaacgcgagcggcgcgcgggacgaagggcgcccgcgccggcagaggaggcgagcacccgc

SEQ ID NO: 98162 - RNA, 67 nt, Homo sapiens
agaggaacgaagaagcagccccccaaggaccacgccaagcgagaacgaacaaaacgggaagaagaaa

SEQ ID NO: 98163 - RNA, 63 nt, Homo sapiens
cccggggccggaaccagacgagagacagaggcgaccgcgcggcagggacaaagaaacaagcga

SEQ ID NO: 98164 - RNA, 52 nt, Homo sapiens
aagacaaagagccaagaaacccgcgggaaaacggcacaaggcgacgagggag

SEQ ID NO: 98165 - RNA, 53 nt, Homo sapiens
aaaacaaccgagggcagaaggcgcagccgagccaaagaaaaagccggccaggg

SEQ ID NO: 98166 - RNA, 78 nt, Homo sapiens
acggcggagcagggagcccaaagaccccggagacagaacacaggcagcaccccaacgcagccccgcccgccgccccca

SEQ ID NO: 98167 - RNA, 86 nt, Homo sapiens
ccgaggcggccgggagccgggcgcggccggggaccggagaaacgcggagggggggacacacgcaggggccacagagggagccgagc

SEQ ID NO: 98168 - RNA, 77 nt, Homo sapiens
aaagcagagcgggcaggacaaccaggggaccagagaggacggcaccagccaggagggaaagaacgccggacaacagc

SEQ ID NO: 98169 - RNA, 79 nt, Homo sapiens
ccccgggccggaggccacgcccccccccaccgagcggcccgccccaacccgcgcgccaggaaaagaacgacacggccgg

SEQ ID NO: 98170 - RNA, 130 nt, Homo sapiens
cacaagggcccaccgacagccgaaggcccaccacgcaagcaccacgcacacagaagcaggcaggaaaagaagcaaacacccggccaggcaccacaaacggggaagagagaaaacgcaagaaacaggccgg

SEQ ID NO: 98171 - RNA, 61 nt, Homo sapiens
ccggggcccccagcaagaacgggaacaaaaccgacacagcgagacagcccggcccaccaca

SEQ ID NO: 98172 - RNA, 61 nt, Homo sapiens
agggcgcccccgacccacaggaccgcgaacaaggaggccacaaaacacccggacccaccag

SEQ ID NO: 98173 - RNA, 38 nt, Homo sapiens
ccgaacccagcaccgggagacagagcgccagcccaggc

SEQ ID NO: 98174 - RNA, 81 nt, Homo sapiens
gggccaggaggacacgcgcagggcccacgacgagacaaggacaaccaaagccaagcaacgaaggacaggaccgcccccagg

SEQ ID NO: 98175 - RNA, 73 nt, Homo sapiens
ggcacgagaagaacccacaggagaagagaaaagggaaggcacggaggaagcccgagaccacgaggcagagaag

SEQ ID NO: 98176 - RNA, 71 nt, Homo sapiens
acccggccccgagacagaagccggaaaacacagcggagcacgacagcaagagagcaagaacacgcgggccc

SEQ ID NO: 98177 - RNA, 76 nt, Homo sapiens
gaccacgccagaccggccaaacgcacaggggaacggcacagggaggggacagaccaaccggcagccaaccgcacaa

SEQ ID NO: 98178 - RNA, 79 nt, Homo sapiens
ccagaaggggcagacacgagaaggaggacggaggacggacaagacaagcagcagcggcgaaaaaggagaagggagaagc

SEQ ID NO: 98179 - RNA, 68 nt, Homo sapiens
agagaggggcaggcagacaaacgaggcgcagaacagcgggaaaaggcagcaagaaacaagccgcccag

SEQ ID NO: 98180 - RNA, 78 nt, Homo sapiens
gcacgacaaccagcagccgagaggaaaaggaccagagaagagcaagcccacaaaggcggcagagggggaaccaccgaa

SEQ ID NO: 98181 - RNA, 82 nt, Homo sapiens
aacggcaaaggcagaccaacaagaggacccaggagaaacgccccaaaaaacgaaggaggcccaaccacaaaaggagccgacg

SEQ ID NO: 98182 - RNA, 83 nt, Homo sapiens
gcaccgccagacggccagaaagccgccagagcggggcacggagcgggaaagggcagcaagacacgaagccgagaaagagcagc

SEQ ID NO: 98183 - RNA, 79 nt, Homo sapiens
agacagaagaagcggaggccggcaaagccaaggcaaggaaacggagcaccgaagcaccggggcagggaaccaggccaaa

SEQ ID NO: 98184 - RNA, 76 nt, Homo sapiens
acgggagggaaccagcaacaagccgggggcaagaccagagaccacagaccccagaaccagggcacccggacagcgc

SEQ ID NO: 98185 - RNA, 67 nt, Homo sapiens
cagacggaaagcaaggcaaccgcaaacgaaaagccacagcaagcgcaaaaagcacggagcaaaacca

SEQ ID NO: 98186 - RNA, 70 nt, Homo sapiens
agagcccaaacaccaccaccaaggcaggccgaggccccagcagcggagggggagcccagacagacagcag

SEQ ID NO: 98187 - RNA, 72 nt, Homo sapiens
gcggcggcccgcgcgggggcccggccagccggcgccccggccagccaagccaccagggggaaccgccacacc

SEQ ID NO: 98188 - RNA, 82 nt, Homo sapiens
ccgcagcggcgccgcggacaagcacgagggcgcgccgagacgcccgagaaaacgacagaagcacgacaacaacgggcagcaa

SEQ ID NO: 98189 - RNA, 72 nt, Homo sapiens
agggaccagccagaagaaacaaccgacaaccccagccaaaaacacgaaaggaaaaaggagacagaaaaggca

SEQ ID NO: 98190 - RNA, 82 nt, Homo sapiens
gcggcaccggcggcggcgcgcagcggcaggcggagagacccgccgccagggagaagcggagaaccagacccggagcagacca

SEQ ID NO: 98191 - RNA, 64 nt, Homo sapiens
cagagagccgcggggaaaggaggcacccccgacagacaaaccccagcaaaaaaaagaaaccagc

SEQ ID NO: 98192 - RNA, 75 nt, Homo sapiens
cgacgaacgcgccccccgccggaacgagaagcacccaacgaaggaccagcgggaccgaggggaccacccagacca

SEQ ID NO: 98193 - RNA, 58 nt, Homo sapiens
caaaaacccaaaccccccaccagcgccaagagagcgccgcacccacaccaaaggaagc

SEQ ID NO: 98194 - RNA, 80 nt, Homo sapiens
ggcccgcacaccaccccacccccccaacagaaggcaggacccgaggagagagacgggaagcagccacagggcaggaccgg

SEQ ID NO: 98195 - RNA, 80 nt, Homo sapiens
gaagcagccgccggcgcgcgagccacacaacccgcgccggccgcgggaaggagagaagacgggagaccgaagaagaagac

SEQ ID NO: 98196 - RNA, 86 nt, Homo sapiens
gagaggcaccgggacggaccgagaccggaccgagagcggaccgagagcgcgaaacgcacgagaaggaacccagcagaagccagccg

SEQ ID NO: 98197 - RNA, 83 nt, Homo sapiens
cagccggaggcacgcccacgcgagaacaagcggacagaggggacggcaagcagggggaacacccgcccagccgccggacccag

SEQ ID NO: 98198 - RNA, 87 nt, Homo sapiens
cgaggagcagaggccagcagcccccaaaagggcaggcccaggccagcaaggagcagcacacgagcggcgaagcccagacacgcagac

SEQ ID NO: 98199 - RNA, 68 nt, Homo sapiens
cacccaaaagacagagccaccagcagggccgggggcaagacggagagaacggcccaggaagcccacgg

SEQ ID NO: 98200 - RNA, 51 nt, Homo sapiens
cggcacaaaagcaaggagagaaaaacggagaggcgcgaacagggcccaccc

SEQ ID NO: 98201 - RNA, 66 nt, Homo sapiens
agaaaagcaacaggacagccgcagcagacacacggagaagccacgaaaaacaaagaggggcaagag

SEQ ID NO: 98202 - RNA, 87 nt, Homo sapiens
gcggaggccccagggaagcgcagaaagcaggcgaacccgcggcgcaaaacggccgaacgaggcggggggcccgagaccacaccacac

SEQ ID NO: 98203 - RNA, 66 nt, Homo sapiens
ccccgagccagagaaaaagaccagaggaccagcacagcaggaggaggaggaggaagaggaagagga

SEQ ID NO: 98204 - RNA, 79 nt, Homo sapiens
acacagaggacagccccagaaggagccaccaggggaaccccccggacgagcgaggaagaggaggccgcagaagaaacaa

SEQ ID NO: 98205 - RNA, 79 nt, Homo sapiens
gaaaaaccagacggaagcgacgacggcaggaagaaaacgagccaggaacaaagagcaagagcaacccagccgaagcgcc

SEQ ID NO: 98206 - RNA, 74 nt, Homo sapiens
gcgcccggagcggccgccccagcgaccacgccgcgaggcaaacgcaagggaaaaaagggcaggggaaagagaga

SEQ ID NO: 98207 - RNA, 68 nt, Homo sapiens
ggagcaaccgcgggaggaaggaaaagcaggggaggagaaacccaggcagaagagaggaccaaggaaga

SEQ ID NO: 98208 - RNA, 82 nt, Homo sapiens
gaccaaaaaagaggaaagaaaagaagagacgcgggcccagggggaacaggcacgagcgaaccggagggaagaacaagagaca

SEQ ID NO: 98209 - RNA, 68 nt, Homo sapiens
gaccccaggagacgccagcaaggggcgaaagccgcgcgacccaacaagcagcacaacacagacaggag

SEQ ID NO: 98210 - RNA, 76 nt, Homo sapiens
caagaaaagagcagggaagagaagccgaaagaacaacgacgaaacccagcgggcgccggacacagaagggggcggg

SEQ ID NO: 98211 - RNA, 81 nt, Homo sapiens
ggcaccacgaaggaccgaagaggaaacaaacagaagcgcacgagaacccaggccgcaaggaacgaaacccaacagagcgcc

SEQ ID NO: 98212 - RNA, 118 nt, Homo sapiens
gcggcaaccgccccggccaggaacacagacgggggcgagcggacccgcagccccaaagcagcgggccccaggccggggcgagcgggcccgggagcgggaagagcacccgcgaagaggc

SEQ ID NO: 98213 - RNA, 76 nt, Homo sapiens
cgggccgcccgaaggcacaagcgacacacgccgaaaaagagacaccgcacggcacagaaacagacgcagaccgcgc

SEQ ID NO: 98214 - RNA, 87 nt, Homo sapiens
ccgcagcggcgcagcccacgccagacgaccccacccgcgccgcgacccgcccaccgggggacggcacggcaggcggacgcccggggc

SEQ ID NO: 98215 - RNA, 76 nt, Homo sapiens
agaggcagagccgccccagcagcaggggcgccaggagcacccacgggaacagcccagaaacgagggaaaaacgaag

SEQ ID NO: 98216 - RNA, 55 nt, Homo sapiens
caacgaaaggcagaaggggccaacaagaacaggaaccgaaggaagaagagaacag

SEQ ID NO: 98217 - RNA, 81 nt, Homo sapiens
agaaacgaggaggaagaggggccaaccggaccgcccccaacaaccagagggagccacaccaaagccggacccccccagccg

SEQ ID NO: 98218 - RNA, 58 nt, Homo sapiens
acagcccaagaggccgaccgagacgggcggagaggagaagacaaaacagaggagacca

SEQ ID NO: 98219 - RNA, 75 nt, Homo sapiens
ccaaggagaagcgcccaagcggacgggccagggaaccggacaagcagaccaaggcccgccaagacacgaacagca

SEQ ID NO: 98220 - RNA, 78 nt, Homo sapiens
cccgcacccggggacaagcgcgggaacggcgcggaagagccaggacaaaaccaggcagaaccaacacgaacccaagca

SEQ ID NO: 98221 - RNA, 81 nt, Homo sapiens
agaaggcagcaaaccaagcaaccaggaccggaaggaaaccaccaacagccggcccagagagcgccgcccccgacaccgacg

SEQ ID NO: 98222 - RNA, 37 nt, Homo sapiens
cccaaaggcgggagcagagcgcgcgggggacaagcaa

SEQ ID NO: 98223 - RNA, 80 nt, Homo sapiens
cggcccgccccaccaaggagacaacggccacacacggggagaagacccggggcaggcgcaggaggcacccaaggggagga

SEQ ID NO: 98224 - RNA, 79 nt, Homo sapiens
cagccccaccaggcccagggccggcccccccaggacaacccagaggcaacaaaggcgagcggagcggcggacaccagaa

SEQ ID NO: 98225 - RNA, 82 nt, Homo sapiens
gaggggaagaggcgccgggacaggggcgcagagagacagcaacgcgaaaaacacaagaaccagacaaagacgcaggaaaggg

SEQ ID NO: 98226 - RNA, 40 nt, Homo sapiens
ggacaggagccccacaccgaaagcaagaccaacaggcgaa

SEQ ID NO: 98227 - RNA, 100 nt, Homo sapiens
cccggccggcccgcgcgagcagggcggcggccgaacccagcgaccgccagggacgagcagacaggaaacacaggcagcgagacaacgggcccggagccac

SEQ ID NO: 98228 - RNA, 63 nt, Homo sapiens
gggccaaagaagggagagaggacgagggcacagaaaaacaaaaagaaaagagagagaaaagag

SEQ ID NO: 98229 - RNA, 60 nt, Homo sapiens
ccaggacaacccaaagaccacagcagcgcacccacaccagaaagcggcgggcacagggga

SEQ ID NO: 98230 - RNA, 86 nt, Homo sapiens
cggcccaccaaggaaagggcgacagcaacagccgccggcggaagcaacagaaccggaagaccggaaggcgcgagaaagaacgggaa

SEQ ID NO: 98231 - RNA, 41 nt, Homo sapiens
ggaccaaagaacccgcgaagcagcacacaaagcgcccaaga

SEQ ID NO: 98232 - RNA, 81 nt, Homo sapiens
gaaccgcgaccgcgcaaagccagcggaccacgaggcgacaccacgcacgggagcaaggagggccacgagcaggggagaaag

SEQ ID NO: 98233 - RNA, 80 nt, Homo sapiens
gcggagggcgcaagggggccagaaccgacgggcaagggcggcggcaggagaagcggaaggccccagaagcgcaggaccgc

SEQ ID NO: 98234 - RNA, 78 nt, Homo sapiens
caccaaagccgcagacagacaaacggaagaggggacccaagggagagagggaacggcgaaagggcagcccggaaggag

SEQ ID NO: 98235 - RNA, 69 nt, Homo sapiens
gcaccacaggggcccaaaccaagaagcagagaggggccagcacacagaaacaaccacccgggcacacgc

SEQ ID NO: 98236 - RNA, 74 nt, Homo sapiens
cccgagaacagcccccaccccagcgcaaaaacagaggcaacaacacgcggcccgagagacggggcgccagggcc

SEQ ID NO: 98237 - RNA, 66 nt, Homo sapiens
ggcaagaacaaaaggagccacagcaaaaagccacgccacaagcacaaggcaaagaagggcccccga

SEQ ID NO: 98238 - RNA, 76 nt, Homo sapiens
agccaaacaaccaaaacgaagacaccaaaagcacacacggggcagggcagggaggggggaagacagggcccagcac

SEQ ID NO: 98239 - RNA, 74 nt, Homo sapiens
cagcacaacgaaccgcccagaggagcacagaaacaccagccagacaaagaagaggcgaggcgacaacgaagaaa

SEQ ID NO: 98240 - RNA, 73 nt, Homo sapiens
agcccggacaccgggagagacaaaggggcaagaccagggcagcaccacacggcaggcgaccacaaagcgaaga

SEQ ID NO: 98241 - RNA, 58 nt, Homo sapiens
ggaccaggaaaaaacacaggccaaagcaacacggcacagaaaaagcggaagaagcagg

SEQ ID NO: 98242 - RNA, 60 nt, Homo sapiens
gagccgggcagcccggagcgggccagaggcagcgagaagaaaaagaagagagagacacgg

SEQ ID NO: 98243 - RNA, 82 nt, Homo sapiens
agcccggccggagcgggcggagacgccgggcagccgaacggagggcgacggagggagggacgcacaccgagacgaacacaga

SEQ ID NO: 98244 - RNA, 47 nt, Homo sapiens
gaaaccagaggaaggaccccagagaagacaggacagcggagacagcc

SEQ ID NO: 98245 - RNA, 70 nt, Homo sapiens
cagacgcagggcgcccccgcggaacgggcacaaagaaggcgcaggcaagacgcagagaggagaacagccc

SEQ ID NO: 98246 - RNA, 77 nt, Homo sapiens
aggaagacaagagcggcccgaggacccccccccggaaacggaccgcaacaaacggcacccgcaaaacaagcgcgcca

SEQ ID NO: 98247 - RNA, 77 nt, Homo sapiens
aagcaggcggcaaccacccgcacggaggacaggagaaggcggggaaaaaaccagagaccacagaaggacgggagaac

SEQ ID NO: 98248 - RNA, 77 nt, Homo sapiens
acggaccccagcgccgggcagcgacgaccaggggacaccggcaggaggccagcagcggaacacagacgcacaaacgg

SEQ ID NO: 98249 - RNA, 35 nt, Homo sapiens
gacacgcaccaagccagggcggagaacggaaaagc

SEQ ID NO: 98250 - RNA, 73 nt, Homo sapiens
aaggacccaccgacccgcgagcgcccaggacccgccaccaaaccgcccgagggaccaggaccggggaccgccc

SEQ ID NO: 98251 - RNA, 74 nt, Homo sapiens
aaaaaacaaagaagccagggcacggcaaacagggacagaggaaaaccagcaggaaaaagacacaccagagccag

SEQ ID NO: 98252 - RNA, 82 nt, Homo sapiens
ggggaggcgcaccaggcgcggagaaaacaacaagagaaggacagcggccaacaagaaggaaaacggaagcgaagaaagaagg

SEQ ID NO: 98253 - RNA, 71 nt, Homo sapiens
cggccggacagcgccacggcgggccgcgggaggacaccacccacagaggagaaggcgcgcagcagaagacc

SEQ ID NO: 98254 - RNA, 95 nt, Homo sapiens
gcggcgggcgggggggaaggacgggcgggccggcgccggagacgagccgaacgggcacggagccggagagcgaaggagcgggaaaaccccgagag

SEQ ID NO: 98255 - RNA, 72 nt, Homo sapiens
agaccagagagaacaaggaggacagcagagagaaccccagagggcgcggaagccccagcaaacaagaccacc

SEQ ID NO: 98256 - RNA, 80 nt, Homo sapiens
acagacgcaccaaaggcgagcgagaaaccccccaagcgagcaggcaagaggagcagcagcggcggggccaagcgggagag

SEQ ID NO: 98257 - RNA, 54 nt, Homo sapiens
gaaaaggggaaggagacccaaggaaagggcaagacaacagacagcagaggcagg

SEQ ID NO: 98258 - RNA, 57 nt, Homo sapiens
gcgaaggcggaaagaggaagaccaaagggcacacaagacggagaaagaagaacaaac

SEQ ID NO: 98259 - RNA, 67 nt, Homo sapiens
cacgcgcggcccgcacagcggcgcgcgccacgccgcgccacccgccaggcacgggcgagcaccaaag

SEQ ID NO: 98260 - RNA, 76 nt, Homo sapiens
cgcggcgccccccccgcgggaagaacgggcccgccggcccgggcgccaacccccaacccacgcgggcagccagaac

SEQ ID NO: 98261 - RNA, 79 nt, Homo sapiens
cacagcaccgggcgaaaaggaggaaaagaagccagaccgaggccagggggaaccgaccagaggaagcggaagcagcaga

SEQ ID NO: 98262 - RNA, 94 nt, Homo sapiens
cccccaccccgacgaccggaccgaggaggcagcgcggggcagcgcgagccgggaagaccccaagaagaagcggaagaggagccgcggaaccaag

SEQ ID NO: 98263 - RNA, 71 nt, Homo sapiens
gagaaagaacacaggagcgcaggcgaccaagaaaaagcggaaaaccacgccacgagccccagcaggcacag

SEQ ID NO: 98264 - RNA, 84 nt, Homo sapiens
gaaccaacagggacccagcaggaacggaaacgaaccccacaacaagcccaaaccaaaagcagaagccgaagacaaaccaaaagc

SEQ ID NO: 98265 - RNA, 78 nt, Homo sapiens
acacacccaggaaaagaccaggacggacaagcacagccggaaggccggggcagcagaagaggacaagcagacagcacc

SEQ ID NO: 98266 - RNA, 75 nt, Homo sapiens
gaccagacgcggcagcaacagcgagacccggggcgaggacccccgagccagggaccccaaaaggaacgagcaccg

SEQ ID NO: 98267 - RNA, 68 nt, Homo sapiens
gggagaacacagaaaccggccccagaagagagaagaagcaaaccgggaccggaagcaccaaggagaaa

SEQ ID NO: 98268 - RNA, 68 nt, Homo sapiens
gcgcccgggcgagaggccggcaccagagcgcaacagaaccgcggacgcccccacccaccccagcagaa

SEQ ID NO: 98269 - RNA, 76 nt, Homo sapiens
aacagccccgacccaccacacacggcaggccaggggaagagccgcggaacggcccagcccccacccggaagccaag

SEQ ID NO: 98270 - RNA, 74 nt, Homo sapiens
aaacaacgccaagagggaaggggacccgccgggaggacgcgacgccaaacgcgaaagggagaaagaagaacgcc

SEQ ID NO: 98271 - RNA, 80 nt, Homo sapiens
cggacgaaagaggacacgggaagaacaaagacagaccgggggggccgaagaagccagggggaggaaagcagacagaccca

SEQ ID NO: 98272 - RNA, 75 nt, Homo sapiens
gcacgcaaccaagagggaaggagacagggaagcaaagcgcaacagaaacagagagagaaaacgaaaaacgggcag

SEQ ID NO: 98273 - RNA, 72 nt, Homo sapiens
cccccccgccccgagcaaaaaacacagggacgagccaccagagaacaaaggagccggcagacagcaacacag

SEQ ID NO: 98274 - RNA, 45 nt, Homo sapiens
acagggcaaaggacagaccagcaggcaaggccagcaaggaggggg

SEQ ID NO: 98275 - RNA, 100 nt, Homo sapiens
cccggccccgccgcgccccccccaccccggccgcgcccaagcgcaggggccccgggccagggaaacgacagggagaaaaagcaaagaagacagcaaagag

SEQ ID NO: 98276 - RNA, 82 nt, Homo sapiens
caggggaggcgaccagagagcggcggaaaggaaagcccgacagaagcaccgagacccaagaaagcgaagcgagcaaaggcga

SEQ ID NO: 98277 - RNA, 82 nt, Homo sapiens
cgaaaagcagcaacgagaagaagccaccaaggagcaggaaaacggaaggaaacgaaagggaaacaggaaaaggaaggaagaa

SEQ ID NO: 98278 - RNA, 59 nt, Homo sapiens
ggccccgggcaaagcggacaccgggcccaccacacacccccgagcggagggagaccgga

SEQ ID NO: 98279 - RNA, 118 nt, Homo sapiens
aacgaccgggcaccgaaggcccagggggaggacgggcggggcaccggcagggcagacacaacaaggcggaagggccaccagcggcacccaggaaaccaccgccaggaccccgagacaa

SEQ ID NO: 98280 - RNA, 80 nt, Homo sapiens
agggacagccgaaccaagacgggagagaggaaagggagagcaggacacgagacgcgggccggagagagaagccaagagcc

SEQ ID NO: 98281 - RNA, 75 nt, Homo sapiens
acaagaagcacgaacagcaggccaaagaccagagcacacagcaaccggcaggggacaacaccgcaaagggggacc

SEQ ID NO: 98282 - RNA, 84 nt, Homo sapiens
cggcaagaaaaagccagccagaagaggcgcgcgcgcggcacaccgagccagcagaggccaaggcagcagcgaagaagaaaggga

SEQ ID NO: 98283 - RNA, 83 nt, Homo sapiens
gcgacccggagacagcccaaaacccggaagagcgccccaggagaaacaagccccacacaagaccacccaaggcagcgcaaaag

SEQ ID NO: 98284 - RNA, 80 nt, Homo sapiens
gcagacgcagccgagacaccagcccgaaacaccaccaagggcgcccaccgccggagacgccccgccggacgcccgcaccg

SEQ ID NO: 98285 - RNA, 58 nt, Homo sapiens
gggagacccggccccaaacgcggccacgcgcgcgcagggcgccaggagaacgaacaga

SEQ ID NO: 98286 - RNA, 80 nt, Homo sapiens
ggagggccagcaggccgcgaggggagcccaccacgagcagaaccagcaccgagaggaaagagagccgaggcggcccaccc

SEQ ID NO: 98287 - RNA, 72 nt, Homo sapiens
aaccgcagcccaggagcccggaagacccgcaccggagcaaagccgaagcgcaacaaggggagccccacgaca

SEQ ID NO: 98288 - RNA, 51 nt, Homo sapiens
gacaagagcgggaacaggccaagggaagaaccaacagagaccccgggggac

SEQ ID NO: 98289 - RNA, 84 nt, Homo sapiens
ccaagaacagacccggaacccggacaaacccggcaagcagccaaacgcaggaccccgccaaacgcagcaaccaccgaaacgggc

SEQ ID NO: 98290 - RNA, 81 nt, Homo sapiens
ccacaaagaggcccgaggcacaggacggcaacagggcgcccagacgagcccaccacggaccacccgcagccagcgagccgc

SEQ ID NO: 98291 - RNA, 86 nt, Homo sapiens
gccgagcaaccagaaccggagcaggaggcgcacaacacccagcagggagcgcccaagcagacacggggcccgcccacacaacgagc

SEQ ID NO: 98292 - RNA, 82 nt, Homo sapiens
ccaggcggcgccggaggaacggggaggagagcaagagaaagcagaaggaaccaaggagaaggcccaggccaagggggacccc

SEQ ID NO: 98293 - RNA, 64 nt, Homo sapiens
cgggaccgcggccaacggggaacgaggacgcggacgcgaaggcagagccggaaaaagaagaaaa

SEQ ID NO: 98294 - RNA, 77 nt, Homo sapiens
ggaggagccccggaggcagagcggcgccagaacccaggagaaacgagagggacagcaaggaagacgccagagagcgg

SEQ ID NO: 98295 - RNA, 78 nt, Homo sapiens
agacggggcggaagaccaagacacgagagaggacaagaagggcagagaagccagaacggagaaacaacgaagaccaac

SEQ ID NO: 98296 - RNA, 64 nt, Homo sapiens
ggaggcgaaagcggaacgagaacagaaccaacccagcacaacggccgccacggccccacggccc

SEQ ID NO: 98297 - RNA, 76 nt, Homo sapiens
cccagacaggaacaaaggcagcggaggcacggacaccacacacacacagcgacagccgccaggaagcaacgcagcg

SEQ ID NO: 98298 - RNA, 70 nt, Homo sapiens
gcgccgccagaagacacaaggagcccgggaccccgcgagacgcaggggaaaaaccgaggggacaaaacaa

SEQ ID NO: 98299 - RNA, 74 nt, Homo sapiens
ccgcaagcacacccccggccaggcccagggcaggccgggggacaaagaagagcaaaagaagagcccaaaccagg

SEQ ID NO: 98300 - RNA, 56 nt, Homo sapiens
ccaggggaacaaggcaagggggggcacaaaagcaacacggccaagccgacgccagc

SEQ ID NO: 98301 - RNA, 70 nt, Homo sapiens
ccaacacacgcagcggggggacacacgcgaccggcgaggcccaccaagccagacaccaggcgcaggagcg

SEQ ID NO: 98302 - RNA, 65 nt, Homo sapiens
ggaacagacaccgacccacgccagaccagcgagacgacgggaccgaaggaccccgccagagacaa

SEQ ID NO: 98303 - RNA, 56 nt, Homo sapiens
cacacaaccaaacaggagaaaaagagcaacaaggagacgcgccgcccggcccaagc

SEQ ID NO: 98304 - RNA, 74 nt, Homo sapiens
ggccgccggaggagccgccgccccggcggagcccagccgcgcccacagaggagcggagcgaagacgcacaaagg

SEQ ID NO: 98305 - RNA, 93 nt, Homo sapiens
ggggaagggcggcgccggcagcggacagccggacagcgcccagggccggagcccgagcccggaggcaaagcacccccaaacacccaggggggc

SEQ ID NO: 98306 - RNA, 76 nt, Homo sapiens
gaggaccaggcaccaccggccccggaagggcaaaaaacaggcagccagacgaaacacaggagacgagcgaacaaga

SEQ ID NO: 98307 - RNA, 75 nt, Homo sapiens
ccccaagagcgggaacagacccagccaccagagggggggagcgcagcgccggcccaccagcgcacaccagcgccg

SEQ ID NO: 98308 - RNA, 69 nt, Homo sapiens
agggcccgcggccaccggcaagacccacccgccacggcaccagccacgcaaacaaccacagggaacaaa

SEQ ID NO: 98309 - RNA, 67 nt, Homo sapiens
cgccggccgagaaggcagaggcgaccgaccgccgacggaaacaaacagagcccccgagcagcagccc

SEQ ID NO: 98310 - RNA, 58 nt, Homo sapiens
ggggacaaaaccccgaaaaaggcggcaccagccggggaaaggagcgcagcgcccgggc

SEQ ID NO: 98311 - RNA, 75 nt, Homo sapiens
aaagaggccggagagaagagacagagacaggggccaaacccacaggaaccccaaacccaccagaaaagccccagc

SEQ ID NO: 98312 - RNA, 74 nt, Homo sapiens
gcgggccagcggagccgggacggaggacgaaccaagaaacaaaagggaagaccggaacggagacgcacaacaag

SEQ ID NO: 98313 - RNA, 80 nt, Homo sapiens
cagacgcggggacgcggccgcccccccccccccccgacgcgccagaaagacacacaggagagcggcgcagaaaaacaaaa

SEQ ID NO: 98314 - RNA, 78 nt, Homo sapiens
gaaacagccaagagcgggaacagaaccggagcccagagcggaaggaagaacaaggagcggacgagagaaaaaggccag

SEQ ID NO: 98315 - RNA, 75 nt, Homo sapiens
gcagcgccccaccccccacccaaaaggagccagagaggccagcagggcgccggcccagagcaaaaggaagacaac

SEQ ID NO: 98316 - RNA, 75 nt, Homo sapiens
aaccgacagccacgcaaccaccagcccacccggcaaggaacgcaaagaaaccaagaggcacagaagagagaagac

SEQ ID NO: 98317 - RNA, 84 nt, Homo sapiens
agcgagcgagggggggcgcgccggaaaccggagcgcgcagcagggggcagacccaaaggaaacgcacgaaagaaacaggagagc

SEQ ID NO: 98318 - RNA, 52 nt, Homo sapiens
gcggagcgcagaccgaggaaaaggagagagggcgccagcacgagcccccccc

SEQ ID NO: 98319 - RNA, 81 nt, Homo sapiens
gaacaggcgcagagagacaagagacacgacggaacagcacaacgagaaagagcaggggacagagcacaggaaagggacccc

SEQ ID NO: 98320 - RNA, 85 nt, Homo sapiens
gagcccgggcccgacagaagagccaccccccagcaaggcggggccaggaggccaagggaggacaccaggcccagcacgagagagc

SEQ ID NO: 98321 - RNA, 88 nt, Homo sapiens
gcagccccgcagcccagcagccccgcagcggcgccgaggacaggcagccgaggcgcccccgcgcgaggagaacggaagaggacaagag

SEQ ID NO: 98322 - RNA, 70 nt, Homo sapiens
cagcgaggagcaggcggagcacccaccacggagggaaagaccaggcaggagcgaacagacaacacacccc

SEQ ID NO: 98323 - RNA, 66 nt, Homo sapiens
gccgccaaaaaccggacagccaagcaacagcccagcaagggggacgcccgagacaggacacaacgc

SEQ ID NO: 98324 - RNA, 84 nt, Homo sapiens
gacccagacggggcgaagaggggaaaggcgcagaggaccggaaggggaagggaacaagaagcagggaaggaacgaaagcggaga

SEQ ID NO: 98325 - RNA, 70 nt, Homo sapiens
cgcagaaagcccagggaaccgacagaacggcgaagggcgcagccaagagccggggccacacaccgccggc

SEQ ID NO: 98326 - RNA, 78 nt, Homo sapiens
gaaccgggaggcgacgcacacgagcggaggcgaagaaaaaggcacaaacccagcacagagaagacggcgacaagcaaa

SEQ ID NO: 98327 - RNA, 73 nt, Homo sapiens
cgcccgggccagcggccgcgcacccccggccggaggcaccagcgaaagggcagaaacacagaaaaagaaaagc

SEQ ID NO: 98328 - RNA, 61 nt, Homo sapiens
ggccggggaggaggaggaagaggaagaggaggagacccacgaccaaggcaggcagaaagac

SEQ ID NO: 98329 - RNA, 71 nt, Homo sapiens
ggaacccggccagcacggaggagagggagcccacgagcccaggcggcgaacccggagccaaggacgcgcca

SEQ ID NO: 98330 - RNA, 54 nt, Homo sapiens
gaaaaagagaggagggagaacacagaaacccgccccggaccaccgccacaccag

SEQ ID NO: 98331 - RNA, 100 nt, Homo sapiens
gagaggggagcacagcacgacccagacagaccaggcccggaggacacgcagggaccaggaggaagaagagagccgagggaagacagaggagcgggggagg

SEQ ID NO: 98332 - RNA, 86 nt, Homo sapiens
gaccgcaacgagaacaaagggccgggagcgagggggcagacccaaaggaaacgcacgaaagaaacaggagagcgcagcgaagcccg

SEQ ID NO: 98333 - RNA, 74 nt, Homo sapiens
gacaccaaacaccgccgccgccagccagcagacccgaaggcagacacaacgccgaggaaaacaaagacaacagg

SEQ ID NO: 98334 - RNA, 74 nt, Homo sapiens
aaagagaagaagacccaaaaaaaagaggagcagcaggcacagcacgggcagagccagagggaagcgagaacgca

SEQ ID NO: 98335 - RNA, 63 nt, Homo sapiens
ccagggggaaccagggagggccccccggagaaggaggcacagcgagaagggaaggaagcccag

SEQ ID NO: 98336 - RNA, 40 nt, Homo sapiens
aaagcgaaagcaaccaagcgggacagcaacccagaaagag

SEQ ID NO: 98337 - RNA, 90 nt, Homo sapiens
acaggcgaccaccccaaaagcaccggccccgcacagcaaaccagaccccccaaagacacacggacccaccaccccaccgaccagaggcca

SEQ ID NO: 98338 - RNA, 74 nt, Homo sapiens
gcggcaaaccggcccacagcccggccaccccccggcccgaagccccacgccaggccccaggggcgccacagccg

SEQ ID NO: 98339 - RNA, 80 nt, Homo sapiens
cgcccaaaggcaaaacagagcagcaaagccaggcaagaagccaggaaagaacggcgggcaaccaagaagagagcacccag

SEQ ID NO: 98340 - RNA, 77 nt, Homo sapiens
acggcaagaacaggagggaacgacacccgaaggagcaacccagcgccgggaaggcaacggcaagacgaaacagaccc

SEQ ID NO: 98341 - RNA, 74 nt, Homo sapiens
gaacccgcacagaagaccacgggagaaacaaagaccacaccaggccaaaacagaagaggcaaagcccagccaca

SEQ ID NO: 98342 - RNA, 66 nt, Homo sapiens
agaacaccagggggggagagcagggaggcaaaagaaggcggagaggagagagcgaccaccaaggac

SEQ ID NO: 98343 - RNA, 62 nt, Homo sapiens
cggagagcagaacaagcggcccgcaggaagcacgacaggaaaagcaacggcgcaagaggcgg

SEQ ID NO: 98344 - RNA, 58 nt, Homo sapiens
cgaaggcgcagccgcgaagccgagaaaaccagaaggcaccgacaggaaaggaaaagga

SEQ ID NO: 98345 - RNA, 71 nt, Homo sapiens
caccgaggccaggcgcacagggggacacccaagacgccagggccgagaccagcacaggcggaaaggacgac

SEQ ID NO: 98346 - RNA, 80 nt, Homo sapiens
acaggacagcacaggcacagaaggccaaaaaggcaaccacagagagagagagggagggcaccaggagacaaagccacaaa

SEQ ID NO: 98347 - RNA, 75 nt, Homo sapiens
ccgagacggaggagagggccggcaaaaacaaccaggcagagagacaagcaggagcgaagcaggacaacaagcggg

SEQ ID NO: 98348 - RNA, 78 nt, Homo sapiens
gcaggagacgggccggagaaggacagcagagaaaagcggacaccaaaacccgacggccaaaacagaagaggcaaagcc

SEQ ID NO: 98349 - RNA, 71 nt, Homo sapiens
cccaagcaggggaccacaggaagcgacccggaaccgggaaaccaggcaagaagcaacgaagagaacagcca

SEQ ID NO: 98350 - RNA, 59 nt, Homo sapiens
aaaccgaaaccgcccacggccgccagggagaaaagacgaggaagcccaaaaaccgcaag

SEQ ID NO: 98351 - RNA, 62 nt, Homo sapiens
ggaaacaccaaagagggaagaggaaagcacaaagacacccaaccccagaggaaacacgaagg

SEQ ID NO: 98352 - RNA, 78 nt, Homo sapiens
aggaagggagcacagaagaaagagagagacagacccggacgagagaggagacagacccagagaacgccagaggagaca

SEQ ID NO: 98353 - RNA, 68 nt, Homo sapiens
agggccccagcccggggcgcagcagcgaagacacggggacccggcaaaccgaagagcaacgaggcacg

SEQ ID NO: 98354 - RNA, 75 nt, Homo sapiens
ggacgacccaaagaaagagcggaagcaggccaagccaaccgccgaaaaaaggacaaagcgaggcgaccgagaaag

SEQ ID NO: 98355 - RNA, 55 nt, Homo sapiens
acaaaagagaaagcaggccacgaaaacacaaggaaacgacggacacccacagggc

SEQ ID NO: 98356 - RNA, 73 nt, Homo sapiens
cgaacgaaaaccacccgcggacaggggaacgggccccgggagcacgggacgccggcagcccccccagcccccc

SEQ ID NO: 98357 - RNA, 74 nt, Homo sapiens
aggaggcaagagaaacaggcacacacccagaagcagcccggcagaaaagacagcacaaaaggccgcccccccgc

SEQ ID NO: 98358 - RNA, 74 nt, Homo sapiens
gacaccaagagggaagcacagggagagagaaggcccaaaagccaggggccgacggacaagaggaagaccaggcc

SEQ ID NO: 98359 - RNA, 74 nt, Homo sapiens
cagacgcagggcgcccccgggccagaagcccccaggaggagaacgagcaacggaagccagaagaagcaccccca

SEQ ID NO: 98360 - RNA, 81 nt, Homo sapiens
cgggacggaccgagaccggaccgagagcggaccgagagcgcgaaacgcacgagaagacggcagccggcccgggcgccccca

SEQ ID NO: 98361 - RNA, 67 nt, Homo sapiens
ggcagcgcacgacagcaaaaggagggaggaaggccccgccgggaagcccgggaacaacggagcccgc

SEQ ID NO: 98362 - RNA, 50 nt, Homo sapiens
gcccaggaagacaccccggccccaggggggaccaagccaggacagccccc

SEQ ID NO: 98363 - RNA, 66 nt, Homo sapiens
ccggccacaggaacaagaaccagggagaagccgcccgaacaccaggaagcccggggcggcgacgga

SEQ ID NO: 98364 - RNA, 78 nt, Homo sapiens
gcgcgccgcggggccggggccgggaaagcaacagccagggagaggacagccgcggacccggcagcggagagcgacagg

SEQ ID NO: 98365 - RNA, 70 nt, Homo sapiens
gcccgaagcccccgcaggaaccacaacccaaccagcacaggaaagagaggagaggagcgccggggcgcac

SEQ ID NO: 98366 - RNA, 81 nt, Homo sapiens
accggagacggacgcacccgcccaggcccaggccacggccgccgcagggaccaagaaaggcccagggaccaaagcccggac

SEQ ID NO: 98367 - RNA, 80 nt, Homo sapiens
gacccgcccagcccccaagagcgggaacagggccacgaccgccccagggccaccgccagcgagccgcgggggaagaagaa

SEQ ID NO: 98368 - RNA, 44 nt, Homo sapiens
aagagacaaacagagaagaccagaagcagcgggagccggaacca

SEQ ID NO: 98369 - RNA, 72 nt, Homo sapiens
cagcaaaacccccaccggacgggccggaagcccccggccgcccaccgccaggaggaggaagaccaccggacc

SEQ ID NO: 98370 - RNA, 78 nt, Homo sapiens
caccagccaggacgcacacggcgaacggaacccaccggggaccgccaccggagacgagagggccccaaagggaccagg

SEQ ID NO: 98371 - RNA, 76 nt, Homo sapiens
ccagaagaagaggggccaggggcgagcaaaaggagacagggaaagagaaggcacagggcagagcaacagagacaca

SEQ ID NO: 98372 - RNA, 76 nt, Homo sapiens
caagcccgagaagaccggcggccaacacagccacggacagggagagcaggaggagaccaaacaccagacggaggcc

SEQ ID NO: 98373 - RNA, 95 nt, Homo sapiens
cagccgagaacgccgcgcgcgcacccaacagcgaccgagcgagagacgagcaggagagccgacgcaacccggaggacacccgggaaaacgaccga

SEQ ID NO: 98374 - RNA, 86 nt, Homo sapiens
aaagaaaccaaaaacagcaagcgcagagccaaacagccaggcaggcaaaccagacccaacacgccggaggggcccaggacacaaca

SEQ ID NO: 98375 - RNA, 81 nt, Homo sapiens
cagcccacccaaaaagacccagcggagcaggaagcgggaaaccacaaaggaaggccagccgcgacaggacaagggaccggg

SEQ ID NO: 98376 - RNA, 67 nt, Homo sapiens
cagggagaaagggccccaagaacacgcgaaggcgggcggagcagaaggccgggaggcgcacgcgcaa

SEQ ID NO: 98377 - RNA, 75 nt, Homo sapiens
gcgcccgagccccccacagcccgcaccacaggaacccaagagccacggaacaagaccagaacagagaagaaagca

SEQ ID NO: 98378 - RNA, 78 nt, Homo sapiens
cgaacaaccccagaagagggacagagccaggagggggcgaccgagaagaacaagagccaaaagcccgagcccagagag

SEQ ID NO: 98379 - RNA, 49 nt, Homo sapiens
gagacagcgcccacacaaagccgaggccgccagcgccaagaaaaaaaca

SEQ ID NO: 98380 - RNA, 76 nt, Homo sapiens
acacaaacagagcagcacacaggccaccccgaaaccagaaaggagaagaaaaggcacagaaagaaggagcggcagc

SEQ ID NO: 98381 - RNA, 75 nt, Homo sapiens
gcaagggaagacaaaagggggccccaggacccggacagacccaaaagggaaaaaggaaaaccagaagccagccgc

SEQ ID NO: 98382 - RNA, 53 nt, Homo sapiens
gaggggacggccgccccgcgggcacacgagcggccacgagcaaccaagaggag

SEQ ID NO: 98383 - RNA, 72 nt, Homo sapiens
aaaacaacgaccccaaagagcaaacccagagaaaccaaccgacacgcagcggccgaggcaggggaagagagc

SEQ ID NO: 98384 - RNA, 70 nt, Homo sapiens
ccgaccaacgcagcccacccgcgggcagcggagaaccaacaacacgcagcgagaggaagaggccaggagc

SEQ ID NO: 98385 - RNA, 75 nt, Homo sapiens
cccccgagcacgcgaccaacagcagagaaaagagaggaaacacgaagaagagagaggaccagaaccagaccggaa

SEQ ID NO: 98386 - RNA, 78 nt, Homo sapiens
gggggggcgacggacagggccccaaagaaagcccggcaaaaggcaaccaaggaaaaaccagcaccaggcggaagaaga

SEQ ID NO: 98387 - RNA, 73 nt, Homo sapiens
aaaaggaaccggacacaggccaggagggggaagagaggccacacacggccccccgagagcggaagagaccccc

SEQ ID NO: 98388 - RNA, 74 nt, Homo sapiens
gcaccccacgggaacccacgaccaaagcggaaggccaaacacggcccgcggcaaagcgcgcccaccgccgacaa

SEQ ID NO: 98389 - RNA, 83 nt, Homo sapiens
agacgcagagccccagggcggacagcagcccggggcaaccggagccccccaggagggagacacacagaagacgaaagacgaaa

SEQ ID NO: 98390 - RNA, 71 nt, Homo sapiens
ggagaagccccgccaccagcagcgagccacaccgacaaggaggaacccgaaggcccgaagacaacccgccg

SEQ ID NO: 98391 - RNA, 72 nt, Homo sapiens
ccgggcagagaaccgacgccaccgggaggggaccggagccgccagcgcggccagcagcccaagggcgcacga

SEQ ID NO: 98392 - RNA, 77 nt, Homo sapiens
ggacccaggcgcaaaccggaacaagaaggcaaggagcccaaaccagacagacacggcgagaggagagaacgacaaga

SEQ ID NO: 98393 - RNA, 73 nt, Homo sapiens
accgccgcaccaggccaccgccacgggccgagacacgcagcggcggccagggaccagcagaacaagaagggca

SEQ ID NO: 98394 - RNA, 62 nt, Homo sapiens
cgacaggacccccagcaggaggacccgaaaaccccgagaggcaaccaaaaaaacggaggagg

SEQ ID NO: 98395 - RNA, 63 nt, Homo sapiens
ccggccccccggcggagaagaagcgcggccgcaccggccaaggggggaaccacaaagaacgga

SEQ ID NO: 98396 - RNA, 56 nt, Homo sapiens
cgggagcagacagcaacaaccaggacaggagcgccaaggccagcgccacacacgag

SEQ ID NO: 98397 - RNA, 78 nt, Homo sapiens
aaacagcacacaggccgcgaccaagcggcgggagggcaagcagccagccgcacgaggaggacagaaaggaggagaaga

SEQ ID NO: 98398 - RNA, 75 nt, Homo sapiens
cccccagcagcaaccagcgccggcaaccccgagcccgcccacgcaggcagcgaggaaggacacagacaaaagacc

SEQ ID NO: 98399 - RNA, 69 nt, Homo sapiens
gccagagaggaaacaggaaacgaccggagaccagagcaagcaaaagcgcacagccagaagaaaccggga

SEQ ID NO: 98400 - RNA, 70 nt, Homo sapiens
ggaaccccggagaaaaggccaagaaggcagccccagacagccaccccacgcccaccacccagcaacgcca

SEQ ID NO: 98401 - RNA, 75 nt, Homo sapiens
aaacgccccacgaccaggggacccaacaagccccaggacagaaggaaagcccgcacaaagggcgcgcgaggaaag

SEQ ID NO: 98402 - RNA, 80 nt, Homo sapiens
cacagacaaccaaccagcgcccaggcaagcagcgcgcaggagcccaggaaggaaacgaaagggaaacaggaaaaggaagg

SEQ ID NO: 98403 - RNA, 117 nt, Homo sapiens
ccgagacaccgccccggcacagcacgggcggcccagcgcgcccgcccagcagacgcgagggaagggcgagcacgggccagcccggccacagcagcacgagcggccgccagggcgccg

SEQ ID NO: 98404 - RNA, 75 nt, Homo sapiens
aaccaggagaccaggaagcaagcacaaagggcccccagaagagacgccaaaagaagaacccggacccgaccgaag

SEQ ID NO: 98405 - RNA, 80 nt, Homo sapiens
gcggcagcaagaacagagagagaggggacagacgagagaacgagggcaaaggaaacaggagaaaggcaggaagcgcgcca

SEQ ID NO: 98406 - RNA, 85 nt, Homo sapiens
aagaccaagcagaaaacacagagagcggagcaagcaaagacgaccggaaagagccaagcggggaacacccaggcaggccgaagcc

SEQ ID NO: 98407 - RNA, 79 nt, Homo sapiens
cccgccagcagccgccggagccagccaacgagcgggggaggggggcgaaaccgagcgcggggcagagaaacaccccggg

SEQ ID NO: 98408 - RNA, 79 nt, Homo sapiens
gcaagaaaccgggagacccccccagcacaccaccagcaagggacaaaggcagccggagacaagcccagcgccagcccgc

SEQ ID NO: 98409 - RNA, 65 nt, Homo sapiens
ccgcaggacaccccggaaaaaccaacgcagaggagcagccgcaacagcgcaccgacacaagccca

SEQ ID NO: 98410 - RNA, 63 nt, Homo sapiens
gccaggagcggcgcagaacaggcaggagaagggcaccggggaggaccgcgcgacgcgccggag

SEQ ID NO: 98411 - RNA, 86 nt, Homo sapiens
accaacccccacacgcccggggaaccaggacggggaggaaagcagggaggccacccacggcacccccgcagcgcgaggacgcccgg

SEQ ID NO: 98412 - RNA, 70 nt, Homo sapiens
gagaggaaccagaaagccaagagcccaggcccggacgaacacaacagcaacaacaaccgcacgggggcag

SEQ ID NO: 98413 - RNA, 73 nt, Homo sapiens
ggagcccgggagggcggccgcaggagcccgagcccgaagggagggcgcgacgcgaccccacggccccagcagg

SEQ ID NO: 98414 - RNA, 62 nt, Homo sapiens
gcagaaaaaggcgagagcaccgggcgcacccaggaacggacgaccacggaccagagagaagc

SEQ ID NO: 98415 - RNA, 101 nt, Homo sapiens
gagcccaagagcacaggggaagaagcacagccacgagccaacacagaggagaggagaaaaccaggggcggaaggaccgagccagagcaaagaacacgaggc

SEQ ID NO: 98416 - RNA, 73 nt, Homo sapiens
gagggccggggcaaccccaccgacggccagagaaaaagcgcgacccagcaacaccccagaccaagggaacgca

SEQ ID NO: 98417 - RNA, 83 nt, Homo sapiens
gacaaaggggcagcggagcaagggagagccagaaaaggaccagaacggagggaagcccgggcgcgccaggcacagccaagagc

SEQ ID NO: 98418 - RNA, 72 nt, Homo sapiens
agcgaccagggcaaccgggaccagcgagcgacaggaagagagaaggccacgcccgaccccaagcaacaacgg

SEQ ID NO: 98419 - RNA, 82 nt, Homo sapiens
agaggcgggcaggagcggcggccaggccagacccgaaggccaggagacccgaccccaagcaggcggacaccgaccgcaggaa

SEQ ID NO: 98420 - RNA, 67 nt, Homo sapiens
ccggccaccacaaagacaagcagcccacgggaagcccagcccagaagcgagaggggagagaagccgg

SEQ ID NO: 98421 - RNA, 73 nt, Homo sapiens
cgcacgagggcagggcggaagagcccaagagacacaggcagaagaagaccgcaaggaagaagagggacaggca

SEQ ID NO: 98422 - RNA, 89 nt, Homo sapiens
aggaggcgcggcccgggcagcagggcggcagcgcccgagagaggacagacaagcagacggggccgccacacgcccaaccagggcaccgc

SEQ ID NO: 98423 - RNA, 61 nt, Homo sapiens
gaagggcggggggcgggccggaggggagacgggaggcaggggaaaaaaccggccacagacc

SEQ ID NO: 98424 - RNA, 79 nt, Homo sapiens
cccccgccggcccgggggcaggcgggcacgaggaccagcgggccggagccccgagaagacaccaaaaaacacagagagc

SEQ ID NO: 98425 - RNA, 79 nt, Homo sapiens
gccgagccagccgcggccggaggagcccccaggccacagggaagcgcagcagacggccagggaacgcggagacaaagag

SEQ ID NO: 98426 - RNA, 77 nt, Homo sapiens
gcgacgaggacgagacgcagaccacagcgacgaggacgacgccggaagcggaaaggaaaagcacaaaccgcacaggg

SEQ ID NO: 98427 - RNA, 72 nt, Homo sapiens
acgcagggcgcccccggaagacagcgagaagccacgcccaggaagaaaggaccccagaccgagaggggggaa

SEQ ID NO: 98428 - RNA, 78 nt, Homo sapiens
gccgccccagaacgcagacagaggagcggacccccgcggcgcgcagcccagcagggaaggcgccagacacagaaaaga

SEQ ID NO: 98429 - RNA, 73 nt, Homo sapiens
gcagagagaaggcagggcaaaccagaaagacgcacgcgcagaaagaaaaacgggggaagcagcgcccagcaag

SEQ ID NO: 98430 - RNA, 48 nt, Homo sapiens
gcggggagaggaacaacggacaaccaccgccagggagaaaacccacac

SEQ ID NO: 98431 - RNA, 66 nt, Homo sapiens
gaaagccggccggcagcgggccaacagcaacagagagagccagaaggacagaaaacgggccccaga

SEQ ID NO: 98432 - RNA, 79 nt, Homo sapiens
cggccgccagaagccgcggcaaagcgcgaggcccgcggccgccgacgcgcgagccacagcgggaacggggagggcgcgg

SEQ ID NO: 98433 - RNA, 71 nt, Homo sapiens
ggcgagaaggcggcgcacaaggcaccgccaaagagggcgacgagcgcgagcggcagaagaaagagaagcaa

SEQ ID NO: 98434 - RNA, 80 nt, Homo sapiens
cgcgaaacgcacgagaagccacagaaagcccgccccagacagggccccggcccgcccggaagcgcagcagcaggcacggg

SEQ ID NO: 98435 - RNA, 57 nt, Homo sapiens
gggaacaacggcgccagaaggcaagacgcagaggggccggaaagcacagaaaagggc

SEQ ID NO: 98436 - RNA, 97 nt, Homo sapiens
gcagggaaggaggccgagccgggaccaggcccgggggcggcggccacgccaaggacggggaaagggagcagcaccggccacacccacagcacgaccg

SEQ ID NO: 98437 - RNA, 79 nt, Homo sapiens
gccgccggcgcgccgccaggaccaggaaggaagacccacaagagaccacgcagagacagcacccaaccggcagcagcag

SEQ ID NO: 98438 - RNA, 59 nt, Homo sapiens
gcggagcccgcagaccgcagaaggccggagacaccagcagcgcccgcaaggccaagccg

SEQ ID NO: 98439 - RNA, 83 nt, Homo sapiens
ggacagcaccagggcggggagcccagccaaccaaacacggaacacggcccggcccgacgagaaggccaaagaccaggccagcc

SEQ ID NO: 98440 - RNA, 62 nt, Homo sapiens
ggaaaggaaagagccaggaaaagcgcgcgcccggagcgcaaaggacggagaacgcgccacaa

SEQ ID NO: 98441 - RNA, 49 nt, Homo sapiens
ccccccccaccgaaccgcgagggacaaagaagaagcagagagaccaaaa

SEQ ID NO: 98442 - RNA, 74 nt, Homo sapiens
aaacccgccgaccacacacaacccaagaagaaccacaaggagaaaagcgagaagccgcagcaagcgggcggcaa

SEQ ID NO: 98443 - RNA, 82 nt, Homo sapiens
gcacgccacccccccggaagggcagccgccccgagggccgggcggagaggcggcgcgggcgcgagggacgcggagggccaac

SEQ ID NO: 98444 - RNA, 76 nt, Homo sapiens
agagagagaaaacagaaacgaaacaggcccgaaaggaaggcaagacggacaaaagacgcgcgcaaacacacacagg

SEQ ID NO: 98445 - RNA, 77 nt, Homo sapiens
ggaggaacaggaacaggagcaggacacgcccaccaagaaagaaccggaaaggggaccgggccaggaaagcagaaaag

SEQ ID NO: 98446 - RNA, 68 nt, Homo sapiens
ggccgaagccccgccagcccagcaaagcagacggccgcacgcgacccgaagccacgcagaggaaggca

SEQ ID NO: 98447 - RNA, 63 nt, Homo sapiens
cccaccaagagggcagagggcaagggccccaccacagccacacaacaacagaccaagaagaac

SEQ ID NO: 98448 - RNA, 73 nt, Homo sapiens
gaacacggcagcacagcgccaaggggcagccaccagggaccaaccaccccggacccaccacagagcaaaaaaa

SEQ ID NO: 98449 - RNA, 84 nt, Homo sapiens
gggaccgagccgggaggccggccgggccagcacccggccgagacggcggcagcagcggcacaggcaccagcaccccggaaccca

SEQ ID NO: 98450 - RNA, 87 nt, Homo sapiens
cagaggaagggccacacccacacagagagaagaagaagcagagagccaggaaaagaaagagaacccagccgccgacaggcagcgccc

SEQ ID NO: 98451 - RNA, 87 nt, Homo sapiens
cgggccgcaggaccaccccgcacaccacccaaggagcccccgcaaggggccggcacgggaaaacacccacaagacaaccgaagaaca

SEQ ID NO: 98452 - RNA, 54 nt, Homo sapiens
cgcccgcgcggcgcggggaccgcggcccggggcgcgcccgggacacagaagcca

SEQ ID NO: 98453 - RNA, 76 nt, Homo sapiens
aaagaaagaagagaaccagccaaaccaaacaggaagcacccaccagccaagagcaacagaacagcaagaggaaggg

SEQ ID NO: 98454 - RNA, 83 nt, Homo sapiens
ggaaaggccagagcggagaccagcacccagaagagagaccgcaacgagaacaaagggccgggagcgagagacaaggccacagg

SEQ ID NO: 98455 - RNA, 80 nt, Homo sapiens
gcagaggagaggagaaaggagacgcagaacgggcagagaccgcaggaagaagcgaagaggcgcgagaacagacccagccc

SEQ ID NO: 98456 - RNA, 65 nt, Homo sapiens
agacgcacaagccgaagaaaaccagaaagacgacgggaaaacaggcacggaagcaacccacggaa

SEQ ID NO: 98457 - RNA, 66 nt, Homo sapiens
gacagccgcacggaggcgaaacacaaaggggaaacaaagccagaccgccgaggggggacgaaccca

SEQ ID NO: 98458 - RNA, 82 nt, Homo sapiens
gagcaagaggcagagcggggcggggagcagacccccaaggcggacccagggaaggagaccccggcaacagggaacaggcagc

SEQ ID NO: 98459 - RNA, 70 nt, Homo sapiens
gaccaggaaagcaaggacaagaaaacgaaggaaaaggaacagggaagaacaaccgaaaccagaggaagaa

SEQ ID NO: 98460 - RNA, 78 nt, Homo sapiens
gcaacaaccagcagaaaagcagccgcgacagagcggccgggaggggggacggaggaagaacgggaggccagcggcagg

SEQ ID NO: 98461 - RNA, 34 nt, Homo sapiens
gaaccgcagggaacaccgaacgaagggcacacga

SEQ ID NO: 98462 - RNA, 78 nt, Homo sapiens
ggacccagaccgcgggagagaaacaccagcagaagagcggcagaggagacccacagacacggcagggccccgcccaca

SEQ ID NO: 98463 - RNA, 73 nt, Homo sapiens
cggcggggacgccagcgagccaggagcaacgcacgaaaacgcacgaggagcacagaaacgcacagacccacgg

SEQ ID NO: 98464 - RNA, 65 nt, Homo sapiens
ccaaacacccccaaagcaccgggaaccaccggaacaaagaaggcggaaacccagaacgcagcacc

SEQ ID NO: 98465 - RNA, 96 nt, Homo sapiens
caccacaagccgcacccaccgccccgcccaacaccacaggccacggcaggaggaacgcgcgggggacaggcgcccaggaggacaacagcaaacagc

SEQ ID NO: 98466 - RNA, 79 nt, Homo sapiens
ccgccgcgccacccgcccggcccccgccggcggcagcacggccaagggacagagcgaagaaccccccaagaagacgaaa

SEQ ID NO: 98467 - RNA, 79 nt, Homo sapiens
aagacaaagaaaaacccgccccccaacaccggacaccgagaggaaccacaagcagggcacgaagaacacaaagcaaaaa

SEQ ID NO: 98468 - RNA, 75 nt, Homo sapiens
cggaggaacagaaggaagacaagcggaaaacagggcagcaacaagagaggacaggcagaaggccgcaagaaaaaa

SEQ ID NO: 98469 - RNA, 77 nt, Homo sapiens
cgacaggaggagacaggcgagagaggaggacacgaccggccgagaaacagacaacccacagaacaaagcggaccaag

SEQ ID NO: 98470 - RNA, 73 nt, Homo sapiens
caccccacacccgcaggaccgcaggcgggcgccgcgcgagccacccagcgaggcccagcaagagaggaaaacc

SEQ ID NO: 98471 - RNA, 42 nt, Homo sapiens
gccaaggcgccaggagaggcggaaaaacccaggaggagaagc

SEQ ID NO: 98472 - RNA, 76 nt, Homo sapiens
cacaaaggaagcagaagaccgcaaagaacggcggcaggcccagaaaccaccacaagacaccccgagaaggagaaac

SEQ ID NO: 98473 - RNA, 83 nt, Homo sapiens
gaaccagaccagaagacggacgagcccaaaaaaagccggcagcgcccgagggagcaaggagaagagcggaacccagaccgcgc

SEQ ID NO: 98474 - RNA, 82 nt, Homo sapiens
cagaaacacaaagcagcccaaccaaagggaaaacaacccgaacaggaaacgggcacaaaaggccccagaaccaaagaacaaa

SEQ ID NO: 98475 - RNA, 61 nt, Homo sapiens
cgagccagagccagggaacggaggagcgagccacggcggaaagaggaagagcccgcaggac

SEQ ID NO: 98476 - RNA, 79 nt, Homo sapiens
cagcaagagcccaaacgccggagcagggagagcaggaccacacacggagggaggcaccaggccagccacgggacccaga

SEQ ID NO: 98477 - RNA, 59 nt, Homo sapiens
ggcacagaaaccggcgaaaagaagaggaagcaaagcggaggccgcccacgcagcccacc

SEQ ID NO: 98478 - RNA, 66 nt, Homo sapiens
gccgagcgagagcaggaagacggcgaccccagagacccaccacgcccggcagcggcagcagagggc

SEQ ID NO: 98479 - RNA, 52 nt, Homo sapiens
cagaaggagcaaggaagaaagggacacacaggaagacgaacacggaacgggc

SEQ ID NO: 98480 - RNA, 73 nt, Homo sapiens
caccgcggaggagccacacgaagaagcgaccggcccgaggaccgccgcacgaccaaacgcagaacccacaccc

SEQ ID NO: 98481 - RNA, 78 nt, Homo sapiens
caaacagcccacgaggcccgccccagaagaggagccagcacagcaccagcagccaaaaggaggggaacaaaggaaaaa

SEQ ID NO: 98482 - RNA, 65 nt, Homo sapiens
caggacgcgcccccgggagcgggcgcccagagagcacacccacagagaaaccgcagaaggaaaag

SEQ ID NO: 98483 - RNA, 61 nt, Homo sapiens
caagcccagccgcaagacacaccaggccgcgaaaaagacccgggagcagaagacagaggga

SEQ ID NO: 98484 - RNA, 74 nt, Homo sapiens
agccaggaccccagaacacagggacaggacaaggaagagcaaggagcaaaccaagacggccaagggggagccgg

SEQ ID NO: 98485 - RNA, 80 nt, Homo sapiens
gcgcgccaaggagaccaggaagcgagcaccagcagaacaaaaccagccaagcagaggagaaaaagacagcaccccagagc

SEQ ID NO: 98486 - RNA, 61 nt, Homo sapiens
aagcgaaggggaaggcgccgaagaggacgaagcaccgccccggagccacagcaaagccacc

SEQ ID NO: 98487 - RNA, 72 nt, Homo sapiens
agaagcgccagacggacacaccaaagggccacgcgaaagcagcaccaagagcaaggcaagaaagccgacgga

SEQ ID NO: 98488 - RNA, 81 nt, Homo sapiens
caagcacggaaccgcccgagacggccggggcccggacgacacacgcgaggacgccagcggcccggcggaaggacagcccgc

SEQ ID NO: 98489 - RNA, 80 nt, Homo sapiens
cagcaccaaaagagaagacgggcgggaggaggcgaggaggccaaggaaaaggaacagagagagcagaaccgaaacgggga

SEQ ID NO: 98490 - RNA, 36 nt, Homo sapiens
gagaagcaagcccggcacaacagccagcaggggcag

SEQ ID NO: 98491 - RNA, 74 nt, Homo sapiens
gacccccgaagagccgcgccgccagggagccagcacgagacaacaagaccccacaccccacggagacaccagac

SEQ ID NO: 98492 - RNA, 59 nt, Homo sapiens
ggcgacgcaaggcgacgggcggaggcagcacggcaggagacgaggagaggacagcagga

SEQ ID NO: 98493 - RNA, 82 nt, Homo sapiens
cgggcccgggagacccaggcgggacagagggagccaggcagagaaagccaacaggcagaccagagacagcgccacgcacccg

SEQ ID NO: 98494 - RNA, 76 nt, Homo sapiens
ggggagagggacgcccaccacgggaaggccgcggaagaccagcgggagcccacgccgcgccaccccaacccggccc

SEQ ID NO: 98495 - RNA, 66 nt, Homo sapiens
cgaagacaaagaagaaggcggacaaaggaaagccaaaacacgacagggcagaaacgaggagccaac

SEQ ID NO: 98496 - RNA, 57 nt, Homo sapiens
caaagaaacgacacagaaagagggcaccggagcagagcgccaccagacagaggagcc

SEQ ID NO: 98497 - RNA, 60 nt, Homo sapiens
gaaaaacacgacaaaggaagcagaggggaaaagcagggaccgcgccgcccaggggagcgc

SEQ ID NO: 98498 - RNA, 75 nt, Homo sapiens
caccggaaagagaaccacgccccaagagcccagaagccgaccagcaagggagcagaggaagcgcggaaaagggcc

SEQ ID NO: 98499 - RNA, 81 nt, Homo sapiens
gaaaaagcacaagagcaccaacgaggcgcagaagaaagacagcaacggagccaaaaaaagaccagcccaaaaaagcgcgga

SEQ ID NO: 98500 - RNA, 62 nt, Homo sapiens
gagaaccgcaggagccagagaaagccaacaggcagaccagagacagcgccacgcacccgggg

SEQ ID NO: 98501 - RNA, 80 nt, Homo sapiens
cgagagacagaggcgaccgcgcggcagcacagcgagagccaacgcaaagggcgccccaccacggggaaaggccaccacac

SEQ ID NO: 98502 - RNA, 76 nt, Homo sapiens
cacggacacaagaggaagcggaaaccagggccacagcacgcagccccaggcagagggggacaggggagcacgacag

SEQ ID NO: 98503 - RNA, 75 nt, Homo sapiens
caaaaaacaaagagcggagcccaaagccacggccgacagaggcacaacagagcgagcagaaggaaaggcagacaa

SEQ ID NO: 98504 - RNA, 104 nt, Homo sapiens
ggagcagcggaggagcagcgcgcccgcgccagcacacgacaccgagccgccgccgaccgaggacagaaaagacccacggaaaagaaacagaaagccacccccgg

SEQ ID NO: 98505 - RNA, 77 nt, Homo sapiens
ggcggaggagggagccagcacaggacggggaggacgcacgacgcgcggcacgggaacgcagccggcacaaccaccac

SEQ ID NO: 98506 - RNA, 56 nt, Homo sapiens
gcgaagcgcacagcaaaaacgcagagagaagcgaacaagaagcgacgggcgcccag

SEQ ID NO: 98507 - RNA, 77 nt, Homo sapiens
ggaagggcaggagaaaaccaagaaggagagaagagcagaacccagaagaaagcgacacggcgcgcagcggcgccaaa

SEQ ID NO: 98508 - RNA, 76 nt, Homo sapiens
ccgccacaaacagagaaggcagcccaggcggccccaccacagccagaacaagccgggagaggaacagcgcgccggg

SEQ ID NO: 98509 - RNA, 66 nt, Homo sapiens
gggaagagccacggccccaccgcaggcaccaccacaagggcaacacaccgaaaaaagggaagcgga

SEQ ID NO: 98510 - RNA, 53 nt, Homo sapiens
gccacgggaaggaccaccaaccaggagcccgaaaacgaccaggaaggaaaggc

SEQ ID NO: 98511 - RNA, 84 nt, Homo sapiens
cgggcagcacagacgccggcgccgccgccgcgagcccccggggcggcggggcccgcagccggccggggcccagcagcccacccg

SEQ ID NO: 98512 - RNA, 76 nt, Homo sapiens
ggagcgggaacacccaaaagcgagcgcaaggaggcaggcggcggccccacccaaagcagaacaagaaccaaacaaa

SEQ ID NO: 98513 - RNA, 75 nt, Homo sapiens
ggccccgagagcaaccgacagagagggaagaacaccaaacgcaaaacccagccacacgagacccgggaaacagag

SEQ ID NO: 98514 - RNA, 72 nt, Homo sapiens
ggagacacccaggaggcagaagccagagagcacaagccaacccgcccgaggccccccagaaggaccgaaccc

SEQ ID NO: 98515 - RNA, 78 nt, Homo sapiens
agaagcacaagacaagggccaaaacaggacagaaagaaggaaaaagcagaaagccagaggaagcagaaacgggggggg

SEQ ID NO: 98516 - RNA, 79 nt, Homo sapiens
cgcaggcccgcgggcgcaccggcgacgacccagagaaaggccacgcgagccaggcagggagccccagagagacaagccc

SEQ ID NO: 98517 - RNA, 72 nt, Homo sapiens
gaaaaacagaggacaggaagggcagaccagggggcgaccccgccaccggaccaagaagccaaccccaggaag

SEQ ID NO: 98518 - RNA, 80 nt, Homo sapiens
cgaggggccggggaccgcacgcccgaagccgggcggaggagagccaagcaaggcacaccggaaaaagacgagaaggaaaa

SEQ ID NO: 98519 - RNA, 48 nt, Homo sapiens
cgggcaaggaaacggcaaaacaggcgagcaacgacagcgccagagagc

SEQ ID NO: 98520 - RNA, 79 nt, Homo sapiens
agcgagcgagggggggcgcgccggaaaccggagcgcgcagcaggccgaacgaggcggggggcccgagaccacaccacac

SEQ ID NO: 98521 - RNA, 76 nt, Homo sapiens
acccgggccacgcaaaaccccacagcaacagccgaaaaaggaaaaacagacaccgaaagccccaaaaaacaaccag

SEQ ID NO: 98522 - RNA, 84 nt, Homo sapiens
ggaagagggagagcaaacggccagcccagaaggaaggagaaagacaaacccaagaaaacaagaagagaaaagccgaagaacacg

SEQ ID NO: 98523 - RNA, 35 nt, Homo sapiens
gcaagcagaaagcgagaaaagaacgagaacaagaa

SEQ ID NO: 98524 - RNA, 78 nt, Homo sapiens
ccccgccggcggcagcacggccaagagcgcgggcaacccgggcaggcggcgcagcggcaccaccaggcaccccccccc

SEQ ID NO: 98525 - RNA, 73 nt, Homo sapiens
gcccaccccagagcgcaaggagaaaggacgacaggccagcccacagggccaccggggcccgggaaggaggcag

SEQ ID NO: 98526 - RNA, 76 nt, Homo sapiens
gaacaaagaaacaagaaaacgcgaaaaaacgagccaagaaagggacagggacaagcgcacagcggagaaagcagcg

SEQ ID NO: 98527 - RNA, 73 nt, Homo sapiens
aggaagggccgcaaggaacgcccgcgcagcgaaagcggcccaaaggcgaaacacagaaggagacaaccacagg

SEQ ID NO: 98528 - RNA, 80 nt, Homo sapiens
cccgaagagcaaaaccagcgggcggccgcgcccccaggacacaaggaggcacgcgcggaccagccgggcccgcagccgca

SEQ ID NO: 98529 - RNA, 67 nt, Homo sapiens
aaccggaaccacacacaccacaggaagccaagcaaggcagacacaagcagaaaacaccgaccggagc

SEQ ID NO: 98530 - RNA, 78 nt, Homo sapiens
gacaaaccccagccaagaacaaagacacagagcacacgcagggcaggccagcccgcgggagcgccacacagagcggaa

SEQ ID NO: 98531 - RNA, 76 nt, Homo sapiens
aagaggaccggccacgaaaaaccagaggaaaaaccacaggaggagacacgagagacgagcacaacacacaaaggcg

SEQ ID NO: 98532 - RNA, 72 nt, Homo sapiens
cgacaaaccgagacagcaagccagccagcccacacaagacacaaaacggcccacccaaaaacagcgggcaaa

SEQ ID NO: 98533 - RNA, 70 nt, Homo sapiens
gggagagggagagggcaacggcagggacggaagcaagaaaacgcacacggccacaacaaaggcacaaaca

SEQ ID NO: 98534 - RNA, 80 nt, Homo sapiens
aaaacccaagcaaaaccagagcaacgggaacaaaggagaaagggcacgaagagagaggagacaacaaaaagaaacacaag

SEQ ID NO: 98535 - RNA, 57 nt, Homo sapiens
agagggacccggacaaccagaggcagccagcagggggaggacccagccacgcgcagg

SEQ ID NO: 98536 - RNA, 76 nt, Homo sapiens
gaagcaggaagagcccagcagacagagcggaaccagcaccgagacaaccgagaaccggagagagcacccaccacgg

SEQ ID NO: 98537 - RNA, 75 nt, Homo sapiens
gaggcgagggggcggacgcgcgcagcccgcccgcccggcgaccagcaagacgagccagagaggcaccaacacaag

SEQ ID NO: 98538 - RNA, 59 nt, Homo sapiens
cacaaggagagcgaagcaaggcccggcgcaaggccaggcgaacaagcccaaacacggaa

SEQ ID NO: 98539 - RNA, 76 nt, Homo sapiens
aggccgaagacaaagcagagggaaaggaccaccacaggaaagaaggggcacgcgggccccgccgcgaaggccggga

SEQ ID NO: 98540 - RNA, 78 nt, Homo sapiens
acaaccggaccgacaaggcaacagcggggaaagcacccaaaggaaccgaggaagccgacaggaccgggggcacggagg

SEQ ID NO: 98541 - RNA, 57 nt, Homo sapiens
aaaccacacagaacagaaaggagcgacaaaaagaaggggcggcaggaagaaggccag

SEQ ID NO: 98542 - RNA, 57 nt, Homo sapiens
accaaagaagccacaaaaagaagaaccgccgccagaggagaggagaaaaccaggggc

SEQ ID NO: 98543 - RNA, 87 nt, Homo sapiens
aacgaagaggccgccgccgggcccaggcccgcgaccgccgccagcgcccgagaccccaagaagaagcggaagaggagccgcggaacc

SEQ ID NO: 98544 - RNA, 80 nt, Homo sapiens
gggggaaggcgaggcggaagaaaaccaacacgacagcaaccaacggcgcggaagacgaaagcgaaaagaaacagaaagag

SEQ ID NO: 98545 - RNA, 126 nt, Homo sapiens
caaaagagggggccaccaacagcgccggcggcgcaccccaccgccaacccacggcgaggcagacagaggaagagcggggcagcgccagggagcgaagccggagccccccgcggcccaagggcacca

SEQ ID NO: 98546 - RNA, 77 nt, Homo sapiens
cgagaaaacagggagcagagaggcacccagcggccacacccgccacccacaggaccagggggaaacggccaaaggga

SEQ ID NO: 98547 - RNA, 72 nt, Homo sapiens
acacccggccagagcccacccccgagcggaacaaacgagaacacacaagaaaaacccggggaaggcaagacg

SEQ ID NO: 98548 - RNA, 56 nt, Homo sapiens
ccaccaaagccgcagacagacaaacggaagagggcagcaggaggggggaagcagga

SEQ ID NO: 98549 - RNA, 59 nt, Homo sapiens
agacgaggcggcgggggacaagcggcgccccagagcggacgagcaccggggggaagaag

SEQ ID NO: 98550 - RNA, 109 nt, Homo sapiens
gacagcaaacggggcacaaggacgagcgacaagaagacgaagaagggaagaagcgccgcccaccaagcccgcagcgccccccccggaaagcggaccggaaagcaacgag

SEQ ID NO: 98551 - RNA, 74 nt, Homo sapiens
ccgacagccgcagaacgcgggaagccaagacaagggcggcagccagggcccgcggcaccacaccgggcgaagga

SEQ ID NO: 98552 - RNA, 73 nt, Homo sapiens
caaaccgcaagcaccgaaccgcacagcaagcccaggccaacagagcagcaaggcgaaccggcgcggagcggcc

SEQ ID NO: 98553 - RNA, 107 nt, Homo sapiens
gcagaacacagccgcagagcccgcagagagcaaggcacccacgaagagaagacccaccagaaggcaacaagcagcccacgcacaggaacacaacaggcgcccagaca

SEQ ID NO: 98554 - RNA, 61 nt, Homo sapiens
cccgcgagcggaaccggcggcgccggacccaggcaagagcggagaaaaaaaggcaggaaag

SEQ ID NO: 98555 - RNA, 72 nt, Homo sapiens
agaaaagaaggcccaaaccagccagagcggaggagaaggacgggagcgagcacacacaggagggacagaggg

SEQ ID NO: 98556 - RNA, 80 nt, Homo sapiens
aacacaaggagccacaaggacgggaagcaccaaagcgcgccaagaccagaaggagccaccgaagaaaagaacagccgcaa

SEQ ID NO: 98557 - RNA, 63 nt, Homo sapiens
gaggacccaccgcccccggcccgaccagggcggccaccgagagcgaaccggacggcccaccac

SEQ ID NO: 98558 - RNA, 79 nt, Homo sapiens
ggacagacagagaggagagaagggaaaagcgagacacagcagaacaccggaggggcggaccagaacaaccccccccaag

SEQ ID NO: 98559 - RNA, 84 nt, Homo sapiens
gcagcggagcagccggaggacgcggagcccaagaaacgggcagccaggcccccacagcccgcagagacagggaacagcaaagag

SEQ ID NO: 98560 - RNA, 71 nt, Homo sapiens
cagcccgaaaggagagacacggaacacaaggaagcaaaagcccagaacaccgagacaaccaagcaagggcc

SEQ ID NO: 98561 - RNA, 71 nt, Homo sapiens
aagaaagagaaaaggaaaaagaaagagaagaacgagggaaagagaggcagacgagaccggagaaggaaaga

SEQ ID NO: 98562 - RNA, 76 nt, Homo sapiens
ggaaaccggcccagcggccaccaagggcccaccaacaggacccagggaaaggggaggcaagcccgaagccccaaaa

SEQ ID NO: 98563 - RNA, 83 nt, Homo sapiens
caggcggggcggggccggaggccgcgcgcgcaggagacagaaccagcgcagaaaggaagccacacacaagcaacggcgaccga

SEQ ID NO: 98564 - RNA, 104 nt, Homo sapiens
gacaagagcaagagggcagaagaacaagaaggagaccgagaagggaaacagagggagaacaaaacagaagaaaggagaaacgaaacaaaaccaacccaaagcag

SEQ ID NO: 98565 - RNA, 75 nt, Homo sapiens
aacaaccaccacaccaccacccccaggcacaccgcgaccccgcgcaaggacgaaaaaccgggagaagaccgacga

SEQ ID NO: 98566 - RNA, 77 nt, Homo sapiens
cggagaccccgaaggcgcaaacgacaccacccgaccgggcacgcggaccacccacccaaagagcaccgacacccaca

SEQ ID NO: 98567 - RNA, 81 nt, Homo sapiens
cagcgcagcgcacaacccccaggacgaacacccgcccgcgacccagcacggaagcccccaaagcagaaacacaagaggaca

SEQ ID NO: 98568 - RNA, 83 nt, Homo sapiens
agccaccccagccagggaaccaagaagcccaggacaggggacagcacagcacaaagagaaaacacaaaaggccagagaaggag

SEQ ID NO: 98569 - RNA, 84 nt, Homo sapiens
gcggccggagcccggagaaggcggaagggaggggcgacgagcgcggcaggcccccacgggaacgacgccgcgagagccagggag

SEQ ID NO: 98570 - RNA, 63 nt, Homo sapiens
agcggaaccgcccggcagcaggccagacgcagacaggagccaggagcaggggcgcggcagagg

SEQ ID NO: 98571 - RNA, 77 nt, Homo sapiens
cacggaaacagaagagggcacgagcaaacaagcccacaaacagaggcagggaccagcaacaaggcagagcgaaccca

SEQ ID NO: 98572 - RNA, 77 nt, Homo sapiens
ggggcccgaggagaggagaggaacaaggacaggaaggaggggcacaacagcaggacgcccagaacagcgcaccggac

SEQ ID NO: 98573 - RNA, 82 nt, Homo sapiens
aagcgcagccgcaccggccaagggaacagacacgagacacccacggcccgcagaggaccggggccccccaaggggaaccgcc

SEQ ID NO: 98574 - RNA, 76 nt, Homo sapiens
cccaaagccaggcggacgcgcgggagggccgccgcaacccagcagagagcagaaggacaggagaaacaggggccaa

SEQ ID NO: 98575 - RNA, 70 nt, Homo sapiens
cggagcagcaacgcaagacaccggcacgcaacaggccaggaggaccagaaaacagcagaaagaccagcaa

SEQ ID NO: 98576 - RNA, 75 nt, Homo sapiens
cccacccgagcagccagagcggaccggggcagaccaaacggcaaggccagcagggcaggacgacggccaccggcc

SEQ ID NO: 98577 - RNA, 78 nt, Homo sapiens
aggcacacccagcccgagcaaccagacagcaaagccgacaggcagccggggaggagccgaaggaaggaacaggcagcc

SEQ ID NO: 98578 - RNA, 77 nt, Homo sapiens
aaagcaaagaaacaacgacccagaaccgaccgggcagagacgaggacgcgcacaggaaaggacgcggaacaagcagg

SEQ ID NO: 98579 - RNA, 81 nt, Homo sapiens
cccggaagcgcgagcaaggccgccagaggcagcgccggaagaaccggggacagcagcgcacccgcagcgggagggcgccaa

SEQ ID NO: 98580 - RNA, 86 nt, Homo sapiens
aaagccaccggaaaaacaggagcgggggccccccccgggcacggggccagacaacgggacgggcgccgacgccccggggcagcggc

SEQ ID NO: 98581 - RNA, 81 nt, Homo sapiens
gaaagggggaaccagaccgaagggcgaccaccacaacgccgcggacgaccgcacgggcagaaaaaggcacaaacccagcac

SEQ ID NO: 98582 - RNA, 71 nt, Homo sapiens
agccaaggaaacaacgacgggcagcaaaggaacacagacagagcagaaaggagcagagcgaggcagggccc

SEQ ID NO: 98583 - RNA, 79 nt, Homo sapiens
acccgacgccagaccagaaaggccagacaagaggaagaccagccgcaaaccaaggggcaaagaaaaaggagagaaaaag

SEQ ID NO: 98584 - RNA, 48 nt, Homo sapiens
agagcggcgaagggcggaggccaaggccccgggacagcgcccccccac

SEQ ID NO: 98585 - RNA, 76 nt, Homo sapiens
accacggcccggagaccgaccacgccgcacgccaccagaagacaaggggcggaacaccaaccaggaccacccagca

SEQ ID NO: 98586 - RNA, 81 nt, Homo sapiens
cgggacccccaggagggacccgcaggagcccaagcgaccagcccccgaggggaagcagaggagaggagccagggacaagca

SEQ ID NO: 98587 - RNA, 86 nt, Homo sapiens
agcgggccagcaaaccccaaaccgacaggcaccaggaggaaaaccgaggaggaagccaagaacgggagcgaagccacgcagcggca

SEQ ID NO: 98588 - RNA, 68 nt, Homo sapiens
agcccaaggcagcagccacgacacccaagccgcacagacacgacacgccaaaagaacacaacgaaaag

SEQ ID NO: 98589 - RNA, 72 nt, Homo sapiens
caagacgcaggaggcggaaaggggacgcgcagaacaaaaaaggaaacaaaaaagggccaagacagcaacaag

SEQ ID NO: 98590 - RNA, 72 nt, Homo sapiens
gacgcagggcgcccccgaaggagcggcaaacagcccgacgccccagagggccaaagcgggaccacaaacaag

SEQ ID NO: 98591 - RNA, 97 nt, Homo sapiens
cgcccacaacaccaaccacaccggagcaggacaagcgaacagcagagagcagaagggggagaaccggacgacggacaaacgaggggaagccacgaac

SEQ ID NO: 98592 - RNA, 37 nt, Homo sapiens
aggccgcacggacggggggggccccccgagggcaggg

SEQ ID NO: 98593 - RNA, 71 nt, Homo sapiens
gggcggacgcgcagggcaagggggccaaagccccacacgagccaggacccgaaaagccagcaagcgagacc

SEQ ID NO: 98594 - RNA, 64 nt, Homo sapiens
cacaaaccacaaccaaagcaggacccagaccacaacagaaacagaaacaacgccaaaagaaaaa

SEQ ID NO: 98595 - RNA, 78 nt, Homo sapiens
cccgagagcgggagcgggcgggccagggaacgcccagcgacccccacgccagaacgacagaaagcaagagcagcccag

SEQ ID NO: 98596 - RNA, 74 nt, Homo sapiens
cgggccaggcgcgggccagggaccaggacgggcaggcacacagagaaaaaaagggaacaaaacacagcaagcag

SEQ ID NO: 98597 - RNA, 73 nt, Homo sapiens
ccccggcgccgcgccggcggcggcacgcagaagccagcggacgcccgcaacggggaccggccagagaccgccg

SEQ ID NO: 98598 - RNA, 65 nt, Homo sapiens
aagcccccgccacgcccgcgaacgacacccaaaaggagccagccaaacaggacgaagcgggaaag

SEQ ID NO: 98599 - RNA, 76 nt, Homo sapiens
cgagaggggccaacaaagcaaggcccccgcagggaaacggagaaagaaggcgagaaaggacaagccaggacccaag

SEQ ID NO: 98600 - RNA, 115 nt, Homo sapiens
cggggacgcggggccggcgaccccacgccgaccagagcgccgaagccaggcaccggcggggccaagacgaccggaggcggccaggcgggccccacccgagccggagacacagcgg

SEQ ID NO: 98601 - RNA, 57 nt, Homo sapiens
cgacagacgccagcaaaaaggggggacagccccagagacggcaaccaaagaccggaa

SEQ ID NO: 98602 - RNA, 79 nt, Homo sapiens
caggagcgagccagggcccgacagaaccaggggcgaaaacaagaggggccaaaggccaaggcggaggcccgggaagaaa

SEQ ID NO: 98603 - RNA, 82 nt, Homo sapiens
cgacgcgccaaaacccgcccggaaaggggacaccggcacaaacagcagacaaaaggaaaaaggcgagggaacgaagaagcag

SEQ ID NO: 98604 - RNA, 80 nt, Homo sapiens
gacaagcggcagcggaaccgggccagacgccgcaccagaaggccggccagggcagaagcgggaagcaagcgcccaaaggg

SEQ ID NO: 98605 - RNA, 79 nt, Homo sapiens
gaagccaccgacaggcccgagggcccgagagcaccgcgccagacagccaaaccagaaaggggacagcggcgggcaggga

SEQ ID NO: 98606 - RNA, 81 nt, Homo sapiens
caggggaaggccggaaaggggacaggagagagggcaagagacgacaagcagagagaacaccagggcaggaaccgagaagaa

SEQ ID NO: 98607 - RNA, 71 nt, Homo sapiens
ccaggcgcccgcccgaagacgcccggccgcgccgcgccgcgacggccgacgagagagacggggcgccaggg

SEQ ID NO: 98608 - RNA, 56 nt, Homo sapiens
gccgcacaggcaaaacccaaccaccgggaccgaaggaggcacgcgcggaccagccg

SEQ ID NO: 98609 - RNA, 52 nt, Homo sapiens
gagcacgggcggagcgaacgcaacgaaggcgaaccaaccacggagaccggcg

SEQ ID NO: 98610 - RNA, 57 nt, Homo sapiens
aaccgcccaaccgcacggcacccgcgacacaccaaagaaaaaacacaccaagcagaa

SEQ ID NO: 98611 - RNA, 71 nt, Homo sapiens
caccaacagcagcggcagccaagacagaaaaagcacagaaacgcggaacagagaggaagcaaggcaaagcg

SEQ ID NO: 98612 - RNA, 70 nt, Homo sapiens
gagcggcacaccccaggcgagcaccacacccccaaggcaagggcgcaaagccaacaacgagcgagcggga

SEQ ID NO: 98613 - RNA, 59 nt, Homo sapiens
gcaccgcgccacccgccggcccgcgggcaccccaaagggcggagaacggaaaagcacca

SEQ ID NO: 98614 - RNA, 75 nt, Homo sapiens
acggccacacgggagagaagacaacgcgccgcaaaagggaacaagagccccgccccagaggcccccgccgccacc

SEQ ID NO: 98615 - RNA, 72 nt, Homo sapiens
aaaaacccgccgcacaaggcagcacacacgagacaagacaagcagaaaaccaaaccgagacagaaccaggaa

SEQ ID NO: 98616 - RNA, 49 nt, Homo sapiens
accggaagcaacagacacaaggcagaagacacagaaaaagaaccgaaga

SEQ ID NO: 98617 - RNA, 84 nt, Homo sapiens
aggcgcgcaggaggagagcaagcgagcccgcccgggaccgggagcccgggaccgggagccggggggccaccccgaccggaggag

SEQ ID NO: 98618 - RNA, 76 nt, Homo sapiens
caggaccggcccacgccaagggccaaccagaagacggagcaggcaaaggagaaaagccaagaagaccgaacagaga

SEQ ID NO: 98619 - RNA, 73 nt, Homo sapiens
ggagcgccacgcgcggaaggcagcgcccagcagcgcaggaagaagacggcacgggacccccagcacaggcagc

SEQ ID NO: 98620 - RNA, 81 nt, Homo sapiens
cggagagcgggccaccacgggacccaccgcccggcgccccagccgccccgggcggagaacggaaaagcaccaggaagcaga

SEQ ID NO: 98621 - RNA, 88 nt, Homo sapiens
cccccccggaggcggcgggcggaggcggcggggagaggagccccagcccccagcagccgacaggaggcccgcaagagcaggcaggcag

SEQ ID NO: 98622 - RNA, 75 nt, Homo sapiens
gggggaccccgcccagggcccagaggacccaacaccagaagacacacaggggaaggcaacacaagaacgacaaag

SEQ ID NO: 98623 - RNA, 50 nt, Homo sapiens
cagagacaagcccccccaaggcagagggcaccacagacaagaaagccccc

SEQ ID NO: 98624 - RNA, 78 nt, Homo sapiens
gagaagcgcagaccggggcaggcacccaggagaggacagcagccggcaaggggcagagcagcaaagaccaaaaggcaa

SEQ ID NO: 98625 - RNA, 80 nt, Homo sapiens
ggcagggaggagacggagcgcagcggcacgcacgcgaagacagcggcagggcggagaacggaaaagcaccaggaagcaga

SEQ ID NO: 98626 - RNA, 74 nt, Homo sapiens
ggagacggcagaaccaccaagagcaacgcagaaaaaggggcccccccaccagacaaggagacaaccaccggcag

SEQ ID NO: 98627 - RNA, 82 nt, Homo sapiens
aaagaaacaaaaacgggaaagccggcaagagggagaaggacaccaggcagaggcaagagaccacaagcggcagcccgagcca

SEQ ID NO: 98628 - RNA, 68 nt, Homo sapiens
gagccgccgggggccggcaaggaaacccaaccccaggacgccgccagccaccggcgcgaagccagacc

SEQ ID NO: 98629 - RNA, 64 nt, Homo sapiens
aggaccggccagggacaggcacgcagcggaagaccgaaccccgagacaaacgaaggaagaggcg

SEQ ID NO: 98630 - RNA, 79 nt, Homo sapiens
agcgacgcggacaagcggacgaaagggaagcgggcgagaggcaccgcacgcaccggcagaacgggccgaccagggagaa

SEQ ID NO: 98631 - RNA, 77 nt, Homo sapiens
gagagcggaggagagcgacaggacaaagccacaaggcacccaaaagcaagcgcgggaagcgacacccagaccccacg

SEQ ID NO: 98632 - RNA, 71 nt, Homo sapiens
acggacagacccacaacaccaggcgccaggcgcgcagagaaggggcaagccaaggaaagaaacagaaacag

SEQ ID NO: 98633 - RNA, 84 nt, Homo sapiens
acaagccgcggcagccgcggaccaccgccgccaggagcccagccaaaggcacgcaccaaacgcgccgccagggcaccccaggcg

SEQ ID NO: 98634 - RNA, 64 nt, Homo sapiens
ggaacggaacagaagcaaggaacgcaaggcggggaaaaaaaggcagcacacagacgcagcaacg

SEQ ID NO: 98635 - RNA, 80 nt, Homo sapiens
gaagaaaaggaccaaaaacacaacaaaagaaaccaacaccgcagcaagaacagaagaccggggaccagaagggagaagaa

SEQ ID NO: 98636 - RNA, 72 nt, Homo sapiens
ggggggagggccaagaccgaacagggcaggaagcccgacaaagcagagaacccacccgggaacgccagaggc

SEQ ID NO: 98637 - RNA, 70 nt, Homo sapiens
acgggccgcggagccagcaccagccgacgagaagggaacagacaaggaacccacccacgcaccaccacga

SEQ ID NO: 98638 - RNA, 54 nt, Homo sapiens
cggagaggcaccggaccgaacgaggaaccccagagaggacagaagccaaccagg

SEQ ID NO: 98639 - RNA, 79 nt, Homo sapiens
gccacccaggaaggaagaagaaagaagaaaccgcacagcagccggaaacaccggcgcacccgggaggggcgaaaccaaa

SEQ ID NO: 98640 - RNA, 74 nt, Homo sapiens
ggagcgaaggagcgcagcaccagggacgagggcggaaaggggacgagggcagacaaacccggccggagcaggca

SEQ ID NO: 98641 - RNA, 62 nt, Homo sapiens
gcgcggacccgcccggagagaggcaaaagcagaccggaaaacccaccggcaagaccacaccc

SEQ ID NO: 98642 - RNA, 82 nt, Homo sapiens
ccaagacgcgcgcaggcggcgcgagcgcgggagcggcaccggagccacagaagggaaaggaggacaaaaggaaaaaaaaaaa

SEQ ID NO: 98643 - RNA, 80 nt, Homo sapiens
gcagaaaccccggacaaggcacgccagacgaccgacagaacaagcgcaaaaaaagaagagcagaaacgccaacaaaaaga

SEQ ID NO: 98644 - RNA, 63 nt, Homo sapiens
agagagagaaagagagagaacaacgacggaacaacaagacagggcgcagggcaaccgcaggga

SEQ ID NO: 98645 - RNA, 42 nt, Homo sapiens
cccgagcccggaggggggagaaaaggccgaaaaggaaaagga

SEQ ID NO: 98646 - RNA, 70 nt, Homo sapiens
gagccaccagcacggaccaggaggcgagcaacaggcggaaaccccacaagcggccaccaccaaccggaag

SEQ ID NO: 98647 - RNA, 89 nt, Homo sapiens
aggacagccacaagccagccgagacgcagccaagggacacaccaccgacgaagggagcgggaccaaaccaccgccaaacagaaggagca

SEQ ID NO: 98648 - RNA, 79 nt, Homo sapiens
aaccaagggggagagcccagcgcgggaagagcagaaagggaagacagaaggaagcaaagacagagcaaaaggagcggag

SEQ ID NO: 98649 - RNA, 73 nt, Homo sapiens
ggacaaaacaagacaggcgacgacgccaccgaccgacagagcaggagacacaggggcaaaggcaaaccaaacg

SEQ ID NO: 98650 - RNA, 86 nt, Homo sapiens
gagggggcagcgagaccggaccaggagaggcccgcgggaccgaggccgggccccgggccacgaagacggcaaggaggaaaggaaga

SEQ ID NO: 98651 - RNA, 54 nt, Homo sapiens
ggaagcccaagggcacaaagcagaaacccccgggagacagaacaggccgcgagc

SEQ ID NO: 98652 - RNA, 79 nt, Homo sapiens
caccaggcgcagcccgccgccgagacccggccagcggcggagaaaccaccacaaacacgaggccagcaacgaccaacaa

SEQ ID NO: 98653 - RNA, 69 nt, Homo sapiens
cgaaaccccaggacccagacacaccaaagaagccaaagccccagacaaccacaggcagccaagggagcc

SEQ ID NO: 98654 - RNA, 81 nt, Homo sapiens
cagagaagggaggacggggcccacagcaggccgaccccgggacacacccagcccgggacccagacaccgggaggggagacc

SEQ ID NO: 98655 - RNA, 41 nt, Homo sapiens
ggccgggaggccgccgccaggacaccaggggggaaaaacca

SEQ ID NO: 98656 - RNA, 76 nt, Homo sapiens
gcgcccccgcgcccaaaagcggcgcccagagggaggggaaggacggcggaaagacgcccggcaagagagccgcaca

SEQ ID NO: 98657 - RNA, 60 nt, Homo sapiens
ccgccgcgcccacagccagcagcgggaccgacgaggcggcgcccagcggccacacgcccc

SEQ ID NO: 98658 - RNA, 41 nt, Homo sapiens
caccaaaagggggggcaggaaaggggccaccacagagcccg

SEQ ID NO: 98659 - RNA, 79 nt, Homo sapiens
accagccgccggaacagcccagaagaacaggcggcgggcagagcgaggcagaaagaggagaagagccggaaaaagcggg

SEQ ID NO: 98660 - RNA, 52 nt, Homo sapiens
gccgccccaacaccagggaagagacacacccaggaggagagaaagaacccac

SEQ ID NO: 98661 - RNA, 71 nt, Homo sapiens
gagccacggaagccgacagacaaccagcacagccccgcggcgcccgagccccaccagcggccccgacacac

SEQ ID NO: 98662 - RNA, 77 nt, Homo sapiens
gagaaccagaaacaacgcggcaggaccaagcaacaagacgaagaggagcagaaccagaagggacacacaggacggca

SEQ ID NO: 98663 - RNA, 81 nt, Homo sapiens
ggcgccgaggcggcacagccgcccagccacccccaggacgcccgcaacccgacacggggaacaccaggaaaaggagacccc

SEQ ID NO: 98664 - RNA, 78 nt, Homo sapiens
cggcccgcaggagagcaggcgggagcgaggccagcggaagagcgagaaggcgaaggagaaaccagaggcaagcgacgg

SEQ ID NO: 98665 - RNA, 70 nt, Homo sapiens
aaaacaccccaaccgggcgcgcgcggacagcaagcaccaagcgaagaggaggcaaagaagaagagacggg

SEQ ID NO: 98666 - RNA, 38 nt, Homo sapiens
cgaaccacaccacacccaaagagagacgggggcaccag

SEQ ID NO: 98667 - RNA, 80 nt, Homo sapiens
ccacgcagaagcgcggcagggagcgcgggggcccgcgcagcagcgaccacgcgcaccccccggaggcggccgagcccacg

SEQ ID NO: 98668 - RNA, 39 nt, Homo sapiens
acaggacaggagagaaagacggggggaaggaggagacga

SEQ ID NO: 98669 - RNA, 79 nt, Homo sapiens
gcgcggcgcgcggaagacgaggagcgcgcggcgccggggggcgcgccgcgaccgcccgccggcacccagaaccggagag

SEQ ID NO: 98670 - RNA, 75 nt, Homo sapiens
cgaggcccgaggacgcggaggagacgagagagagccgccgacggaagagaagaagaccgaggaaagcccgcagag

SEQ ID NO: 98671 - RNA, 57 nt, Homo sapiens
gacagaccaccgaggcagaagaaacggcggccaggaggacacgcgaacaacccaccc

SEQ ID NO: 98672 - RNA, 76 nt, Homo sapiens
aggggagccgaaggccccaaagcgggaaagcgcaaaggcgccacaggagccgcagaagcaaaggcaccgccaaacc

SEQ ID NO: 98673 - RNA, 84 nt, Homo sapiens
caggggaggccaccaacacgcacaaagaaacgcgaacaagaggagaacgccaagccaaccgaaaaagccgacaaaaaaaagcaa

SEQ ID NO: 98674 - RNA, 82 nt, Homo sapiens
gcgcagacgccccccccggccagccccgggcgcgggcgcacccacaggagaacaagggaaccacacccaggccaagccagag

SEQ ID NO: 98675 - RNA, 72 nt, Homo sapiens
gagccgaagcacagaccaccaacacagagaacaggagcacccaaaggaccagaggaaggcggggaggcggaa

SEQ ID NO: 98676 - RNA, 77 nt, Homo sapiens
ccaagggcccgccgggcagcggccgggaacccaagagggccaaggggaggccggcaagacgggccgaggagcaccgg

SEQ ID NO: 98677 - RNA, 72 nt, Homo sapiens
acacaaggcaagaagaaggaaaaaacacaaaccccacagacgccgggagcagagcaagagaaaagaacaaga

SEQ ID NO: 98678 - RNA, 75 nt, Homo sapiens
ccccgcccacgcaaacccaaagaccccgccggagacgagagaacagagagaagggcgggagaaaccaaggaaaga

SEQ ID NO: 98679 - RNA, 54 nt, Homo sapiens
aaggaaaccccaacacagagccaagcgccaaccgcagaaagccgcaacaccgag

SEQ ID NO: 98680 - RNA, 77 nt, Homo sapiens
cggcgagagcccccacggagccaggacaaaaccaggcagaaccaacacgaacccaagcacaaacaagaaaacgagca

SEQ ID NO: 98681 - RNA, 62 nt, Homo sapiens
ccgcccaagagagcaagaccgggcccacgagaacccagacccaagaaccagaaccagccaag

SEQ ID NO: 98682 - RNA, 73 nt, Homo sapiens
gaggcgaaaagaaggccaaacagcaagggaccgaaaacaaggacacgaggcacaagcacaaaacgagcggcga

SEQ ID NO: 98683 - RNA, 72 nt, Homo sapiens
cgagcgcgccaggccgacagccgcggccgggcccgaggacaaaagaagacccggcacacgaaggcaggaaag

SEQ ID NO: 98684 - RNA, 68 nt, Homo sapiens
acaccccgggcccgcggcggcgggcacccggaggcgcccgagcgacccaaagagaagacgaaacggac

SEQ ID NO: 98685 - RNA, 79 nt, Homo sapiens
cgagacacgaccaagaggcccgagggcagcaccgggaagcagccgccaccgacaagaaaaccagcgggcaagcagaaaa

SEQ ID NO: 98686 - RNA, 67 nt, Homo sapiens
cagccgggaaagccgcaaaggaggacaccaggaaagcaaacccgaacaagaaaggaaccggagacgg

SEQ ID NO: 98687 - RNA, 82 nt, Homo sapiens
gagaccacaaaagcaccaggaccagacagccaccaggaccaaccccagcgcggaacgagacgaacagaaggcggagccaggc

SEQ ID NO: 98688 - RNA, 76 nt, Homo sapiens
ccgcgagggcgggagcgcgcccgccgagcgcaacagcggcgggcggggcaccccagcaaaaccagaaaccgacacg

SEQ ID NO: 98689 - RNA, 83 nt, Homo sapiens
cgcaccgggagcggcaagaacgcccaggcccagagccagcacgagacaccgcgcgagcggggagccgagaaccgcaagggccc

SEQ ID NO: 98690 - RNA, 59 nt, Homo sapiens
cggaagcggggcgcacaccaccggacaaccgacaaaaccagcaaaagccagcgcagcgg

SEQ ID NO: 98691 - RNA, 80 nt, Homo sapiens
ccaccacggccacagccgccgcagacccagcagccaagagggaagcagacgagagcaagaggggaaagaaaaagagccca

SEQ ID NO: 98692 - RNA, 71 nt, Homo sapiens
aagcgagccgcgaggccgacacacaccagagccaaacggggacgcaagagaaagaagcaacggggaaacca

SEQ ID NO: 98693 - RNA, 68 nt, Homo sapiens
gggagaaccacaccagacaacaacacccccccacagccgacaggcaagacggcagggacacaacaacc

SEQ ID NO: 98694 - RNA, 78 nt, Homo sapiens
gaccacagggccccagacagaacgaggaacaaaaacccccaccgggaaaaaggggaagcggagagccaaaaggccagg

SEQ ID NO: 98695 - RNA, 78 nt, Homo sapiens
gccgcggcggagacgcacaggcccggaagagagaagggcacagaccaagacaacgaaccccggccaggacaggccccc

SEQ ID NO: 98696 - RNA, 81 nt, Homo sapiens
agagcgcgccggcgagaagcggccgagccagcagcaggagacagacccagcacggaccccccccccagccgggcgaggccc

SEQ ID NO: 98697 - RNA, 81 nt, Homo sapiens
aagaccaagacacccaaggccgcagacaggaagagagcccccgccgagaaaagacgaagaagcgcaccagacacacaagca

SEQ ID NO: 98698 - RNA, 67 nt, Homo sapiens
cagccgccgcccgcgcccgcggccggggagcagaccccgagacccgcaccacacagaagggaacaag

SEQ ID NO: 98699 - RNA, 53 nt, Homo sapiens
cgagaaaaccaaaaggggcgcggccggagcagacagcgaagaccccgggaacg

SEQ ID NO: 98700 - RNA, 76 nt, Homo sapiens
gaaggacgggaacacgcaaaaccaagcacggaaccaaacggcagccaccaagaaaacaccagaaagaaacgaacaa

SEQ ID NO: 98701 - RNA, 37 nt, Homo sapiens
gagcgaggacgccggcagggcgcggaggcaaccgcgc

SEQ ID NO: 98702 - RNA, 66 nt, Homo sapiens
gaaaaccgaacagaaaggagcgccaggcagccacgcggagacaagcgagaagcaagagcgccggag

SEQ ID NO: 98703 - RNA, 85 nt, Homo sapiens
ggaagggcgcgcgcccggacgccacgcacccgcgcgagaaggcgcccaagaacaaaccaccgggagaaccaccaaaagaaacggc

SEQ ID NO: 98704 - RNA, 124 nt, Homo sapiens
cgaaggagccgacgagaaaaacaaggagcggacacgagccgagggaggggaaaggcgcaggacagcaagaaagcaccagccaagcagaagggagccagcggacgagggcgccaggccagggcag

SEQ ID NO: 98705 - RNA, 66 nt, Homo sapiens
caaaggccagggaaacacagaggcacagagcacaggaaggagcccggcagcgccgggaaacaccgg

SEQ ID NO: 98706 - RNA, 76 nt, Homo sapiens
aacgagaagcgcagaaccaacgaggggccgaaccccaggaacaagggaagacaaaggcgcggcaagcggggaagca

SEQ ID NO: 98707 - RNA, 72 nt, Homo sapiens
ggagcggagcgagaagagccggccagggagcaacccccagccacaacgcgaaccgggcggacgaaggaggcg

SEQ ID NO: 98708 - RNA, 59 nt, Homo sapiens
ggccagaacaccacagcccacaaaggaacccgcgcccagaagggaaggccacggacggg

SEQ ID NO: 98709 - RNA, 73 nt, Homo sapiens
ccacagacagacgagccccagaagagaagaagcagcagcaacagccagagacggaggcccaaacagaggaacg

SEQ ID NO: 98710 - RNA, 43 nt, Homo sapiens
cacggccagccccgcggcggcacagaagcgaaggaagccagga

SEQ ID NO: 98711 - RNA, 87 nt, Homo sapiens
cgcggccacggaacaaccgaacgcaccgaggagaagaccaggaggcgggccaagggcggcgcccagcggccacacgccccaagcgcc

SEQ ID NO: 98712 - RNA, 72 nt, Homo sapiens
caagggaacaaggagaacaacgggacaagaagaggaaccacagggagccgcagagacagggccgagaggccg

SEQ ID NO: 98713 - RNA, 74 nt, Homo sapiens
acgaaggcaagaggaagaagggaccgggcaggacccgaggcgccagcagcagcaagaccgggggaccaggcgaa

SEQ ID NO: 98714 - RNA, 72 nt, Homo sapiens
gcgaagcaaaagcgaaaaaccccaagagccaccaaagaacaacaagagccgcagaaggcagcagggaacgga

SEQ ID NO: 98715 - RNA, 66 nt, Homo sapiens
agcgaaggcggagcagagcccagaggcaccaaaagcgaaggaagcccgccaccaaagccgaagcca

SEQ ID NO: 98716 - RNA, 82 nt, Homo sapiens
ccgggggccgggaaaccgcaaccgagggaaccgaggcagcggaggggggggaggggagggccggaaagagggcgggcccgca

SEQ ID NO: 98717 - RNA, 37 nt, Homo sapiens
cagccccgagagcggaacagacaaaaaccggcccaga

SEQ ID NO: 98718 - RNA, 69 nt, Homo sapiens
ggaaagcgaaggccccgaaaaggaaaaggggaagaaagcgaacaagcccccagcgccagacacggcacc

SEQ ID NO: 98719 - RNA, 80 nt, Homo sapiens
ggcaagccgagggggcccaggagaaagaaggcaaggagacagcccagaaagacaagcagacacgaaacaaaagaagaaaa

SEQ ID NO: 98720 - RNA, 59 nt, Homo sapiens
aaaggaaggcaggcacgaagaccaccacaaaaacgaggaacgggggaaaccccagaagg

SEQ ID NO: 98721 - RNA, 85 nt, Homo sapiens
gaggagggggacaggagacagaggcgaaagccgagaaaggaggagggaagccggaaacccccccccccccccccccacagacccc

SEQ ID NO: 98722 - RNA, 84 nt, Homo sapiens
cgcacgcgggcgcacccgccccggcgccgccggcccgcgggaccgacagccgggcagagaccagacaaagggagcaccagccag

SEQ ID NO: 98723 - RNA, 72 nt, Homo sapiens
cagggggagcacggaggcgaaacaggaaaaaggaagaccaggcacaaacgcacagcccacacagcagcgcca

SEQ ID NO: 98724 - RNA, 68 nt, Homo sapiens
gcagaaccagggcggcggccagcgccacgcggcagcggcaaggagcgaagcagggaaccggggaaaaa

SEQ ID NO: 98725 - RNA, 70 nt, Homo sapiens
caacacggcggaccacacaagcaaaagaaggaccacagggcacggggaaacggcacccagaagaacaacg

SEQ ID NO: 98726 - RNA, 84 nt, Homo sapiens
cggacgaccccagcggcagcccccgacccaaggcgagcccggacgccagaggggaggaacaggacgcccacaggaccccggaga

SEQ ID NO: 98727 - RNA, 82 nt, Homo sapiens
aacaaagggaaggcgcaggagcggagggcgaagaccgcgaagccccccaggaccggagacaaagagagaagacccgacgaac

SEQ ID NO: 98728 - RNA, 86 nt, Homo sapiens
cccaaagccagagcccaagccaaaaaggccccgcaaagccccaggggcagagcccgagaaaccgacgagccgagagacggcaaaag

SEQ ID NO: 98729 - RNA, 82 nt, Homo sapiens
aggcgccaccacagaccagagcccgcacggaaagccacgccacaaccggacaggcagcaaggccgaggaacgccacacgccc

SEQ ID NO: 98730 - RNA, 53 nt, Homo sapiens
cggcccaccgaccgcaccggccacccacgaacaaggagaccgccaaagacgac

SEQ ID NO: 98731 - RNA, 58 nt, Homo sapiens
ccccagccagcccacccagcccagacccaggaccacgccgcgaggcaaacgcaaggga

SEQ ID NO: 98732 - RNA, 38 nt, Homo sapiens
ggggcgcagagcgggcaaggagcagcgcaacgagacac

SEQ ID NO: 98733 - RNA, 77 nt, Homo sapiens
agggggcaggagccagccacgcccaccaagaaaacacagggagcgcaacagagacagacccaccacaggagccagca

SEQ ID NO: 98734 - RNA, 57 nt, Homo sapiens
acggcgcccacccaacgcgaagacggaacccgggacgacgggacgcaggaccccccc

SEQ ID NO: 98735 - RNA, 71 nt, Homo sapiens
gaagggcggcggaccgggagacaccccgcacacacacccaagagacggggcgacggggagaggcaggcgag

SEQ ID NO: 98736 - RNA, 73 nt, Homo sapiens
acgacaccaacccgccccgggccaagcaaccccacccagccgcgcaagacggacaacacgaagaagcagcgaa

SEQ ID NO: 98737 - RNA, 75 nt, Homo sapiens
agaggagcaaacgcgcaggggcagccccagcaccacagccggggaacagccacccagccagagggccagccgcgc

SEQ ID NO: 98738 - RNA, 63 nt, Homo sapiens
gacaccgcacgcgcacggacggcacagcccgccgaacccgaaaggagggggacgaccaccagc

SEQ ID NO: 98739 - RNA, 77 nt, Homo sapiens
ccccagcagacaggcacagagccaacccgacaggagcgcaacaacccaaacaccccgccagagccgccccgcgagaa

SEQ ID NO: 98740 - RNA, 62 nt, Homo sapiens
gaggacaccgagcccagaagacaagacagggagcaacaaacccaagaccgaaggggagaaga

SEQ ID NO: 98741 - RNA, 69 nt, Homo sapiens
gaaggaccaagaaccagagaccccgcggaagacaccagaaggggcagcgcccccacacccagagagcag

SEQ ID NO: 98742 - RNA, 74 nt, Homo sapiens
gaggcagggggagaccggaaggccccggggaagaggagaagcaaccagaaggacaagacgccagagaaaaagaa

SEQ ID NO: 98743 - RNA, 74 nt, Homo sapiens
ggcgcggcaagcggggaagcacaggaccaaacaagacagaacgagaggcccaggcagcgcagagccaacagacg

SEQ ID NO: 98744 - RNA, 84 nt, Homo sapiens
ccacagaaccgcccaaaaaggcaaagaaaccacgagccccgacaagggaccgggcgggccccgcaggaaacccccaccggccca

SEQ ID NO: 98745 - RNA, 60 nt, Homo sapiens
agacggggaacagagcaaagagccgagagaaacggaaaccaggaacaacacaagacccga

SEQ ID NO: 98746 - RNA, 69 nt, Homo sapiens
agccggcccccaacaccagagggaacaccacaaccaggacaggagagacaacggaggcaagaaagacgg

SEQ ID NO: 98747 - RNA, 80 nt, Homo sapiens
agcagccagagcgcagaggcggcggggcgagagggcggcgaaggaggcagaggcacagcgcaggagcccacgaaagggcc

SEQ ID NO: 98748 - RNA, 72 nt, Homo sapiens
cgcagcgcagacgcggacgggagggaaaaccagccaaaacaggagagaacgagacccagggcaacagaaagc

SEQ ID NO: 98749 - RNA, 78 nt, Homo sapiens
caggaacacagacgggggcgagcggacccgcagccccaaagcaggaaaagaccgccagagccggggcacccaagcagc

SEQ ID NO: 98750 - RNA, 84 nt, Homo sapiens
ggaagcaagcaaagccacaggaagcagaaaaggcccgaggccacacgggaacgaagaaagagcgcacggcgcgcgggaagcagg

SEQ ID NO: 98751 - RNA, 70 nt, Homo sapiens
acaagagaaacaccaaacaaggaagagacccagacgaagagcgcacagaaagagggaaaacaaagaacca

SEQ ID NO: 98752 - RNA, 79 nt, Homo sapiens
aggaaacagcaaaaacaggagaccgggcgcgacacaagacagacaaaccaggaacccgagcccacagcccgggcccccc

SEQ ID NO: 98753 - RNA, 73 nt, Homo sapiens
caaccgcgacagagaggaccaccccgaaacccccggcggcgccggggcccgccgcaggccccgcgaaggcgcc

SEQ ID NO: 98754 - RNA, 74 nt, Homo sapiens
aaccagacaaacaccaggaaacaacaaggagaccgggaaaccacagaccaacgggagccgcaaggacaacagcc

SEQ ID NO: 98755 - RNA, 71 nt, Homo sapiens
agaggcggacggcgggaccacaagacaacgcggagcggcgaagagcaaccagcgcgggggcgcggagggcc

SEQ ID NO: 98756 - RNA, 81 nt, Homo sapiens
caacccagggagcggcgcagaccgagacccggacagggcaggaaacaggaggaggaaaggcaagccgaccgaggggaggca

SEQ ID NO: 98757 - RNA, 53 nt, Homo sapiens
cggaagcacacaacaggaaaacaaaagaggagaaagagccgagacaacccaac

SEQ ID NO: 98758 - RNA, 62 nt, Homo sapiens
aaagaggagaaggggaagaacaccagggggggagagcagagcagacaaccgaacagaagggg

SEQ ID NO: 98759 - RNA, 59 nt, Homo sapiens
gggggagcaacgcacagcaagccaagcggagcagccagggcccgcacgaagcgcgcgga

SEQ ID NO: 98760 - RNA, 58 nt, Homo sapiens
cgcgaaggaacaaggccacaggcacggaaaaacgcagaacacaggagacgggacgcgc

SEQ ID NO: 98761 - RNA, 71 nt, Homo sapiens
agcgcaggggcccgcgccggaaaggaaaaacaccagaacggaaacagaaggacacaccagagggagcggac

SEQ ID NO: 98762 - RNA, 70 nt, Homo sapiens
cgagcgccccggggaacaggaacagaacaccgcccagccaagggggagggcagcgccaaacagcgcaaag

SEQ ID NO: 98763 - RNA, 97 nt, Homo sapiens
gaccgccccccagaaggcaccaccacagccgcccaccggaaggccaccccgcaggccggacgggcgcccggaaaagacgacagaagccacgaaccga

SEQ ID NO: 98764 - RNA, 74 nt, Homo sapiens
aagagcccagaaaacacaggcccaaaaagagagaggaagccaccacgcaaccagaccccgaacacaaaccagca

SEQ ID NO: 98765 - RNA, 76 nt, Homo sapiens
caaccaagggccccgcggaccaaggaagaacccgaagcaccgggacaccggggcggcgcgggaagcagaagggacg

SEQ ID NO: 98766 - RNA, 81 nt, Homo sapiens
ccgggcccaagcgccccggggggcagcccgaaccagccacaaagcaaaggcaaagccaaagcaagagccaccgacagaaaa

SEQ ID NO: 98767 - RNA, 82 nt, Homo sapiens
gaaccggcaccgcacaccggaccaggaaacggaggcggcagccgaggaagaagaaggcagcagaaaagagaagagcacggga

SEQ ID NO: 98768 - RNA, 73 nt, Homo sapiens
gcacaggaggcggagcaagcggggagaaaccgggacacaaaagcaaccgagagggaaacaaccacgcgaaaag

SEQ ID NO: 98769 - RNA, 75 nt, Homo sapiens
ggaagaggaccaaagcgaacacagcacaaggaaaacgagagaaacgaaggcgagagaaacagcaaggcccgagcc

SEQ ID NO: 98770 - RNA, 54 nt, Homo sapiens
acagcgcgcagaagcccaaggcgaacggagagacacagaaggcaacccagaggg

SEQ ID NO: 98771 - RNA, 69 nt, Homo sapiens
ggagcaccaaaagaaaacgcaccgaaagggagaaaggaagggacagaggccgcagccaagccggaacag

SEQ ID NO: 98772 - RNA, 82 nt, Homo sapiens
cgccacgcccccaagcgggaccggcccgccgcgacgaagggacggcggccgaccagacacaggcggagaccgggagacgggc

SEQ ID NO: 98773 - RNA, 96 nt, Homo sapiens
agcggcaaaacaaccccagccccccaaagccggaacagagggcaccaccacacaacaaagcggaaaggccacccagggccccaagcaaacaagcaa

SEQ ID NO: 98774 - RNA, 72 nt, Homo sapiens
gccagcaccaccaccggcaggcgcaccaaggccgcgccggaagaagagagggcgaaggaggccacacagaag

SEQ ID NO: 98775 - RNA, 37 nt, Homo sapiens
gcgaaacgcacgagaagacaaaagaacaaggccgaag

SEQ ID NO: 98776 - RNA, 81 nt, Homo sapiens
aagaaaggcccgaggccagcgggcccgcggaggcccgcgaggaacgacgccgaggaagagggaaaagaggacgaggcgcga

SEQ ID NO: 98777 - RNA, 72 nt, Homo sapiens
gagccgccacgcgccaggggagcacaccagccaggggggcaaaccgagggacacccagcgagcacaagcaca

SEQ ID NO: 98778 - RNA, 78 nt, Homo sapiens
aacggcccggggccgacccggcccgaggggaagcagccagcgccggggaggcagaaggggccgggagcggcccggccc

SEQ ID NO: 98779 - RNA, 89 nt, Homo sapiens
aaagaaagaaaacgagcgcgagagggggaaaagcgagcgacgagcgagcgcgcgcgcgaaaacccgggcagagcccaaaaggcagagcg

SEQ ID NO: 98780 - RNA, 83 nt, Homo sapiens
aagaaaaccgcaacccaaaggagagcggacaggaacagcaaagaccaacacccaaccggacacagacgaggcccaacagcaac

SEQ ID NO: 98781 - RNA, 73 nt, Homo sapiens
aggccagcacgggaacgcgaagcgccaaagccagacaacagcaccagaagacagcggacccggagcaggagac

SEQ ID NO: 98782 - RNA, 85 nt, Homo sapiens
ggcagcccgggagaaccgcggcggccggagcggcgaggaaaaccaccacacaggggaaacacccagacaacacacacaacaggaa

SEQ ID NO: 98783 - RNA, 81 nt, Homo sapiens
ccgggcaaagcccacggccgccgagcaggcaacgcccgcgcggcggcggccgcagggggcggagagggcaagagaagcgga

SEQ ID NO: 98784 - RNA, 59 nt, Homo sapiens
aaacgacagaacggcaagaaggaagaccagaacaaggggggaaggagacgcacacccac

SEQ ID NO: 98785 - RNA, 71 nt, Homo sapiens
aggccaggagcgcgcaaggcccgagccggcaaacgagagcaaaagggaccgaggcaagaagggacgaacgg

SEQ ID NO: 98786 - RNA, 52 nt, Homo sapiens
accccccggcgccgcgccggcggcgggggcagcacgccgaaggagagaccag

SEQ ID NO: 98787 - RNA, 62 nt, Homo sapiens
cccaccagggacacgggccaccaagggaaggagcagaagggagaggagaacacaagaggacg

SEQ ID NO: 98788 - RNA, 79 nt, Homo sapiens
acgaaccaccccgcgccagcagcacagcacgacaagggaggcgaggacggacaaaaggaaacggacgggaggccagcca

SEQ ID NO: 98789 - RNA, 57 nt, Homo sapiens
gggacaccgcccaggccaggccgaagacgccacgcccaggaacacagaccaccagga

SEQ ID NO: 98790 - RNA, 83 nt, Homo sapiens
gcaggagccgaggagaggggaggaggagaggacaaggccgcgcaaacccagaccgaagaagacaccaaccggaagagagcgga

SEQ ID NO: 98791 - RNA, 61 nt, Homo sapiens
agagccacagccccacaaccgcacggcaaaggagaagagaagggggaccagcagcgaagac

SEQ ID NO: 98792 - RNA, 76 nt, Homo sapiens
cgccgcggagacaggggacagcccccaagcgaaggaagggaggcccagggagaaaaggaggccggacagagaaggc

SEQ ID NO: 98793 - RNA, 57 nt, Homo sapiens
agcccaaggccgcaacaagaagacggcccagcagagcacccaaccagcgggaacaca

SEQ ID NO: 98794 - RNA, 70 nt, Homo sapiens
caaaagagagcaagacgacggaaccaacacacaaagccgcagaaagcagcagcccagcacgacagagacc

SEQ ID NO: 98795 - RNA, 74 nt, Homo sapiens
ggcccggcggcgcgcgcgcgacgcgcgcgcccggcccggggagagagagagagagaggaagcgaagaaaaagcg

SEQ ID NO: 98796 - RNA, 75 nt, Homo sapiens
cgcgggccgcaggccgcgagcagcggacgccggccgccgcaggagacaaaacagaggagaccagaccagaagccc

SEQ ID NO: 98797 - RNA, 75 nt, Homo sapiens
aggagccaccagagggagaagaaacagaacgccccacgaggcggcgccgcgaaagggaggaggaaacaggaacca

SEQ ID NO: 98798 - RNA, 74 nt, Homo sapiens
acaggccaggaaccgggaaaagcaaggagagccaacagacggcaaaacacagaccagcaacgcaccaaaagaag

SEQ ID NO: 98799 - RNA, 78 nt, Homo sapiens
caagaggcgaccccagcacggcaaagcccggagacaagcggccagcccgcaacccccggcgaccacgggcccggcaac

SEQ ID NO: 98800 - RNA, 75 nt, Homo sapiens
caaagaggacagcccagaagagaggacgaaggcaaggaggggcaggagcacacccccacaggaccccccacagaa

SEQ ID NO: 98801 - RNA, 64 nt, Homo sapiens
gaccagcgaacaaccaggcccgagacagacgggaggggacacggacgcggaacgcacagcaccc

SEQ ID NO: 98802 - RNA, 58 nt, Homo sapiens
gaagacgaacaagaaccaagaccaggaaacccgaacccagccggcccaacagagaacg

SEQ ID NO: 98803 - RNA, 71 nt, Homo sapiens
gcgccccgggcccacgcgaagccgaggccccgcaacggcaagcaacgagcagggcccccagacccgaacaa

SEQ ID NO: 98804 - RNA, 71 nt, Homo sapiens
gcaaccaaacccggcccaaggaccccgccagccccaaacgcgggaacaggcgggggagcgggaggagccag

SEQ ID NO: 98805 - RNA, 75 nt, Homo sapiens
aggaagcggaaaacagaaccacagacacccccgccaaacccaagcgaaaccacggcaggccacccggcacggcca

SEQ ID NO: 98806 - RNA, 76 nt, Homo sapiens
aagcggaggcccaggaaagcccccccgcgcaggccccggggcgcgacgcggaacacagcacccacaaaagcgaaaa

SEQ ID NO: 98807 - RNA, 81 nt, Homo sapiens
cccgccgccaccaggacccgggcagcaggcagcggcagcaccgggagcagcagaggaagccggaaacgaaacagcgcagcc

SEQ ID NO: 98808 - RNA, 79 nt, Homo sapiens
cccggggccgcacccggccgcccggcgccccggggacgccgccccccggccgaaaagacgaggcgaggaggcgagacac

SEQ ID NO: 98809 - RNA, 67 nt, Homo sapiens
gcagaagaagagaggagggagaacacagaaaccggccccagaaccgcacggccaagcccacacagag

SEQ ID NO: 98810 - RNA, 90 nt, Homo sapiens
ccgggccaccgcgggaaccgagcccgaggagagccggggagccaggaaggggacggaaaggacaccccagacccacaacaggaaaagagc

SEQ ID NO: 98811 - RNA, 75 nt, Homo sapiens
cagcgccgccccaggcccgggccgcgccaggagccgccccccccagcagcaagcgcagaaccagacaggcagaag

SEQ ID NO: 98812 - RNA, 37 nt, Homo sapiens
gcaaaccagaaagacggggaaagagggaccagcgcag

SEQ ID NO: 98813 - RNA, 81 nt, Homo sapiens
gccgccagggcccggaccggacgcgggaggccagacgaaaggaggccggcagaagacgccacccaacggggggcagggggc

SEQ ID NO: 98814 - RNA, 75 nt, Homo sapiens
caacccacccaagaaggcagcggcaagagcgggcaggcgggaaagagccgaaacagaaggaaacaacagagaggc

SEQ ID NO: 98815 - RNA, 70 nt, Homo sapiens
gccaagcccggccccaggaccccaagcaggccgaggccgccggagccccagacaccccccacacaccacc

SEQ ID NO: 98816 - RNA, 75 nt, Homo sapiens
gacagggcgccccacaagcgggaagcaacagccacggggccaagcgggagcagaggcaagccgcgggagcccgcc

SEQ ID NO: 98817 - RNA, 71 nt, Homo sapiens
gaaggggaaacccaaacaacacccgcaccgggcgccccgcaggacagaaaagacccacggaaaagaaacag

SEQ ID NO: 98818 - RNA, 77 nt, Homo sapiens
accgccaggagaacgggcaaccaggaacaacaaggaggagagaggacaccccacaaaaccagccagaccagaaaggg

SEQ ID NO: 98819 - RNA, 41 nt, Homo sapiens
gccgggcgccacccgaggacaagggcggagaacggaaaagc

SEQ ID NO: 98820 - RNA, 77 nt, Homo sapiens
gcacaagaaagcgaaaggaggccccgaaggagcaaggaaacgcgaaccaagggccacggggagacaaggcaaaaaag

SEQ ID NO: 98821 - RNA, 70 nt, Homo sapiens
cacagccagccagcacaccaccaggagcagaacggaaaagacggagggaacggaagacaagggcaagaga

SEQ ID NO: 98822 - RNA, 36 nt, Homo sapiens
gccgccggggccgcccagaggaaccagaagacacaa

SEQ ID NO: 98823 - RNA, 136 nt, Homo sapiens
cagagacgcccaacagcccagcccggggcagggaaaggagaaacaccagacacggaagccacgccgaggggacgcgggggaccggagcgcgggcgggcgcggccccccgggaccaggccgggccgacaccgcgccc

SEQ ID NO: 98824 - RNA, 77 nt, Homo sapiens
ggggcaggaagaacccacgggcagcacacacgaaagagaagccccggagcgagcaggcgacccaaaagagcgaagga

SEQ ID NO: 98825 - RNA, 57 nt, Homo sapiens
cagggccagccaagcagcagggcacggaggggagaagggggagaaagccaccacaca

SEQ ID NO: 98826 - RNA, 82 nt, Homo sapiens
agagccggaagaggaggaagaagcagaagccgaaaccgccaaagccaagcacccagggcagacaccacaagaaggagagcag

SEQ ID NO: 98827 - RNA, 66 nt, Homo sapiens
ccgcgggagagcggggaagggggaaaggcaccaggacaagcaaagaggccgaaaggcgccagccaa

SEQ ID NO: 98828 - RNA, 74 nt, Homo sapiens
agccacgggcccagccaccaccagaaggggaaggcgcacggccaaggaaggccaggaaaagggggaaccgcaca

SEQ ID NO: 98829 - RNA, 80 nt, Homo sapiens
aacaacgcacacgggaggagccaacagcaggaaggcagggaagaagaggagaacgaacggagaccaagaggagaggagag

SEQ ID NO: 98830 - RNA, 59 nt, Homo sapiens
ggagagagagaagccaccagggagcccgggaagaggaaagcaccgcgccaggccggcag

SEQ ID NO: 98831 - RNA, 77 nt, Homo sapiens
cccagcgcgacgggcgcgaggcgacacccgaagccccgaccgccacagcagagagagaccaggaagcgggaccagcc

SEQ ID NO: 98832 - RNA, 70 nt, Homo sapiens
agcaccggacccgccaccaccaaaaaaccaccccccagaccccagaacggaccaacaccccaggccagga

SEQ ID NO: 98833 - RNA, 60 nt, Homo sapiens
acagggcgcccggaagaggacgaagaagcagcgcagggacaagacaagacggagagaggg

SEQ ID NO: 98834 - RNA, 73 nt, Homo sapiens
cacaaagagacacacacacgagacagccaaaaagcagaggcggacaaaggaggaacacagcagcgggagagag

SEQ ID NO: 98835 - RNA, 56 nt, Homo sapiens
cccaaccaggggacccccaacccaccggcacgacagaaaaacggggcacacagcaa

SEQ ID NO: 98836 - RNA, 71 nt, Homo sapiens
ccgcggcgacccagcgagacccacaaagaaccaaggcccgacggagggagaccccgaaaacaagacagagc

SEQ ID NO: 98837 - RNA, 79 nt, Homo sapiens
aggccgaaagaaacacaagacgaacgggagaacagcagcagcccacgaacagaaagggaggaaggggagaagaaaaagc

SEQ ID NO: 98838 - RNA, 87 nt, Homo sapiens
cagacaggagagggacagaagaagaaaagccaaagaaccaaagcaaagaaacaccaggagagccccgccgggccaaggaacaaccgc

SEQ ID NO: 98839 - RNA, 89 nt, Homo sapiens
ccgaccgcgaggacgaccccgcaggcccgcgagccccagcccgggagaccgccgaaggcgggaagggaagcggccaaggcacggaggcc

SEQ ID NO: 98840 - RNA, 48 nt, Homo sapiens
cgcaccccgagagcggagaagcccgcccagcggaagaacgccgcagag

SEQ ID NO: 98841 - RNA, 74 nt, Homo sapiens
agaggggaacacgcaccaaaaggcgacacagggggagaagaacccacgaaccgggaaggaagccggcgacccca

SEQ ID NO: 98842 - RNA, 41 nt, Homo sapiens
gccagagagggaaggaaagcacagaggcgcggggccgagag

SEQ ID NO: 98843 - RNA, 72 nt, Homo sapiens
gcgccgaagcgacaccaggcgggaaggaaaaacagaacagcgcccgcgaaaggaccagaacagagaagaaag

SEQ ID NO: 98844 - RNA, 59 nt, Homo sapiens
agaaacaggagacgaagagaacagaagggcaccacaagccgaacagccagccagcaaaa

SEQ ID NO: 98845 - RNA, 60 nt, Homo sapiens
accacggggaccagcgccaggagacagacacacagcacacggcgcaaccgaacgcacacg

SEQ ID NO: 98846 - RNA, 55 nt, Homo sapiens
caaacagggcgcggagaaaacccagcgcacaggaagggcggcacaagaagcagaa

SEQ ID NO: 98847 - RNA, 54 nt, Homo sapiens
ccaaggaagccacggcagacacacaacccgacccgacgagggcaagccgggaga

SEQ ID NO: 98848 - RNA, 56 nt, Homo sapiens
cacggcggcggcccgcaccccgccccccgaccacccagcgggggaaggaacagcgg

SEQ ID NO: 98849 - RNA, 62 nt, Homo sapiens
ccagacgcaaacagcaaagcccaggcgccacccagacccaccggacccacaaagaggggcag

SEQ ID NO: 98850 - RNA, 82 nt, Homo sapiens
cagaagaggagagagagcaagagaggaagaagaacgacccgcccggggcagcagggaggaggacagcaccaccacccagaaa

SEQ ID NO: 98851 - RNA, 71 nt, Homo sapiens
gcaaaagagaaaacgaggcccccaggacgcacccacaaaagaaagacaaggcgaccgaaccaaggagcagg

SEQ ID NO: 98852 - RNA, 63 nt, Homo sapiens
acaaggcacacagagacagacaaagcagccgcaaggacgcccacagaaaacacagagacacac

SEQ ID NO: 98853 - RNA, 55 nt, Homo sapiens
agagaaacacacgccgaggccaaagaaaggggcgagcacccgcaaggaaccagcc

SEQ ID NO: 98854 - RNA, 35 nt, Homo sapiens
gaggcccacagcgaaaagagccccacagccgaaac

SEQ ID NO: 98855 - RNA, 80 nt, Homo sapiens
acacggcagagcaggccaagccagaaaggagccacacgggaagaaaagcagcagcaagagaacggacagcaacaggaaac

SEQ ID NO: 98856 - RNA, 69 nt, Homo sapiens
cggggaaccaaacaaggacaccccaaggacggaaggacgggacacaggaacgccacaagaaacaacagc

SEQ ID NO: 98857 - RNA, 58 nt, Homo sapiens
agaagaaaacccagcaagggcggggaacagaccagggaaggggaggagaagagccggg

SEQ ID NO: 98858 - RNA, 72 nt, Homo sapiens
cgaaggagggcaagacagcgagggacgaaggagaccgcgcagagcgaaaaggcgaagagacagcaggaacaa

SEQ ID NO: 98859 - RNA, 56 nt, Homo sapiens
aaaaaggacaccagcaagcgcaagaggaggccaggccacacaagccccagccaaaa

SEQ ID NO: 98860 - RNA, 78 nt, Homo sapiens
cgcgacgggggagccgcggaaccaaaggcagacccagaagagcacaaaacagagaaaagggaagggcccggagagggc

SEQ ID NO: 98861 - RNA, 61 nt, Homo sapiens
gcgacccggagacagcccaaaacccggaagagcgccccaggagaaacaaccggacacaaga

SEQ ID NO: 98862 - RNA, 69 nt, Homo sapiens
gaaccaagcccacgacaagacgggaaaagaggacgagggagagaccggaaaccgagagaaacgaagacg

SEQ ID NO: 98863 - RNA, 47 nt, Homo sapiens
ggcccccaacgacaaaagaacaaagggcaaaggacacaccgcacaaa

SEQ ID NO: 98864 - RNA, 76 nt, Homo sapiens
gaggcggcggcggagacgggggagccgccaggccccggggacagccggcacagcgggagagggacggaccagcagg

SEQ ID NO: 98865 - RNA, 54 nt, Homo sapiens
gaaaagaaagaacaagcgcaaagaacaggcacgcagcacgggggcaggggccga

SEQ ID NO: 98866 - RNA, 76 nt, Homo sapiens
gaaaagccacgaagaaaaggggaaggaggcgaacaggaaggaaaggagaggaaaccacccagaaggaagggccacg

SEQ ID NO: 98867 - RNA, 70 nt, Homo sapiens
aagagacggagcaagagaacgcaagagacgaaaacaccgggaaaggcccaaaccggcgaaaacccccggg

SEQ ID NO: 98868 - RNA, 74 nt, Homo sapiens
gagcgcacgacccacgcggaacggcaaacaagcagcaaggaccagcacgggagaacaaacggagaagaaaagcg

SEQ ID NO: 98869 - RNA, 77 nt, Homo sapiens
cagaggcgggccgccgagcggacccggaccgggggcacccaggcagggaaagccaagggcgaggcggccccgggcgc

SEQ ID NO: 98870 - RNA, 64 nt, Homo sapiens
ggagggccacaggaggcggcgggccccgcccgccgaaggcgaagaaacaggggagaaaccccgc

SEQ ID NO: 98871 - RNA, 83 nt, Homo sapiens
acggcaggcagccggcaaaagagaccaccacaggaagcaggcacagaccccacaggccccggacacgggccacaccccgcccc

SEQ ID NO: 98872 - RNA, 74 nt, Homo sapiens
gccagccgcgagggaacggaggggagggacccgccagacccgaggcaggcaggaaagagagacgggggcaccag

SEQ ID NO: 98873 - RNA, 69 nt, Homo sapiens
gcggaacaaggggagacacagcgcgagaggcagagaaggaggagcccccaccgagccgagcccacgggc

SEQ ID NO: 98874 - RNA, 63 nt, Homo sapiens
gaacgggacagcccacacccggcgcggagggccacggcgagccccgaggacggggccgaccga

SEQ ID NO: 98875 - RNA, 64 nt, Homo sapiens
ggagacagcaaacggggcacaaggacgagcgacaagaagacgaagaagccacgcaaacggagcg

SEQ ID NO: 98876 - RNA, 87 nt, Homo sapiens
ggggaagaagaagaaacgggccgcgaaccgcagacagcggccaagaagacacaaaggacggaggcacgccaccaggagagaacgccg

SEQ ID NO: 98877 - RNA, 73 nt, Homo sapiens
caaaaagcccgcgaacacgcagcaaaaaaccaccaaccaggaaccacagacccaaccggaagccagccacgga

SEQ ID NO: 98878 - RNA, 75 nt, Homo sapiens
gggggaagaagagaggacggaaggaccaacggggggacacaaaaccgaaagacacaaaaaggggagccgggaacc

SEQ ID NO: 98879 - RNA, 40 nt, Homo sapiens
cccgaaggcgggaacaggacgcgggcgcagcgagcgggga

SEQ ID NO: 98880 - RNA, 56 nt, Homo sapiens
ccgggaaaggagccggccggcggcaaaggcaaggggacaggcgaggaagccgaagc

SEQ ID NO: 98881 - RNA, 74 nt, Homo sapiens
caaccaaaggccagggcacaaaaaagaggcggagaagaacccaaccaaaaccaggcggcaaccccggggcgaca

SEQ ID NO: 98882 - RNA, 80 nt, Homo sapiens
cggggggcagccgccacacgggggcaccacccccagccgcaggaagcagaacacagagagccagcagagacggcaccgga

SEQ ID NO: 98883 - RNA, 70 nt, Homo sapiens
cggaaaaacccaacagccaaggacagaggaccaaagcggaccagagacagggacgcccggagcggcccac

SEQ ID NO: 98884 - RNA, 78 nt, Homo sapiens
agcgggaggacgggccaccgcggcgcgaacccgcgcccagaagggaaggccacggacggggaaacgcaaggcaacccc

SEQ ID NO: 98885 - RNA, 78 nt, Homo sapiens
gaaggggccccagagccaaggaggaaggggccggaaaccagcccaaaagaccccgaaagagaaggaggggagaaagca

SEQ ID NO: 98886 - RNA, 81 nt, Homo sapiens
cccagggaccgaccgaacgcagcaggaggcgcagcagcacaagcagcgcgcccacccgggcagaaaacgcagaagcccaca

SEQ ID NO: 98887 - RNA, 35 nt, Homo sapiens
ccggcgacgccggagcggcagcagcgaacgccgac

SEQ ID NO: 98888 - RNA, 84 nt, Homo sapiens
cagagggccaggccagaagagccgaccacaaggggaggacaaccgcccgggaccaggcgaccaggacaagggaaggaaagccaa

SEQ ID NO: 98889 - RNA, 47 nt, Homo sapiens
gcgagcggggcgcgcggccggacgcacgagagcgaccgcacagggaa

SEQ ID NO: 98890 - RNA, 44 nt, Homo sapiens
caccggccaccggcggagcgagggacagcggaggaacggaggcc

SEQ ID NO: 98891 - RNA, 92 nt, Homo sapiens
ggaacccagcagccggcggacgaccaggggcgcaagggacccacgaaggagaagcgggggccaggccgaaaggcccggaagcagaaggggcc

SEQ ID NO: 98892 - RNA, 74 nt, Homo sapiens
gaacccgcgccgcgagggcccccccagacgccggcccaagagccgcagggaggaggggccaaccaccagcagaa

SEQ ID NO: 98893 - RNA, 71 nt, Homo sapiens
cgaaagcaggggaggaccgccgcagcgagccagcccaagacgaaggacgaggggcgggaccagggcacaca

SEQ ID NO: 98894 - RNA, 62 nt, Homo sapiens
caggggcaggaggcaccagccggacacaaggcacgaggacgaagaggaaaggggccacgagg

SEQ ID NO: 98895 - RNA, 78 nt, Homo sapiens
ggggccaccccgcgggcagacgaggccacagcccaggcacaggaaagcaacacaagcgagggagaagccaagagcaca

SEQ ID NO: 98896 - RNA, 79 nt, Homo sapiens
caacagcccgacaaccagccacaggccggcacccgggaagagacaagaagaaagaagaaagaggaagaccaggaccaga

SEQ ID NO: 98897 - RNA, 66 nt, Homo sapiens
caggaagggggcagcgcgggcgcgcggccggccggagccagcagcagagggagaaccgaagaacag

SEQ ID NO: 98898 - RNA, 72 nt, Homo sapiens
gagcagcgaaaaacccgaccccccaagcaggcgagacaggcgacaggcgcaaaggggaacaggacccgacca

SEQ ID NO: 98899 - RNA, 67 nt, Homo sapiens
ggcgaagcgacgagccgcgaggaggggggccagagcacagcacgagaacaaaaagcgccccagaaag

SEQ ID NO: 98900 - RNA, 89 nt, Homo sapiens
gcgcgggcccgaggccggaggaacccggacccggcgagcggaggagggggcgaagcacaagcaggagaccagaacaagagcaccaacag

SEQ ID NO: 98901 - RNA, 80 nt, Homo sapiens
ccgagcccggcgcggccggcagccggggcggaagaggcggcggccccgcgggcgccagcaggacccaaagacaggaccac

SEQ ID NO: 98902 - RNA, 78 nt, Homo sapiens
cgcggcggcggagcagcgcggggcggccggaggaggacggccggcacgcgcccaaaggaagaaggaggccgaccaggc

SEQ ID NO: 98903 - RNA, 70 nt, Homo sapiens
gagaggggacgacagagccagcgagcgaaccagaccaaaaacgcaacaacagacgaacaaaccaggggag

SEQ ID NO: 98904 - RNA, 81 nt, Homo sapiens
cacgcgaagcaccagaccaaccggaggacacccggaagagaagccgaaagcaggggaaaggaagaaacaagagggcacagc

SEQ ID NO: 98905 - RNA, 75 nt, Homo sapiens
caagaggagaacggacggaccggacggaaagacagggagagggcaccagcaccggcgaaaggaacaacagcgaag

SEQ ID NO: 98906 - RNA, 72 nt, Homo sapiens
gaagcagcgagccggcggagccgcggcgggacgcgcgagccggccggggggaagacgcggcgcgcaacgcaa

SEQ ID NO: 98907 - RNA, 74 nt, Homo sapiens
cggacacagaagaggacaggggccaagcaaacgaaggaaaaacgacgcacagaagagggaggaacccagacaaa

SEQ ID NO: 98908 - RNA, 117 nt, Homo sapiens
ggaagcgagcaccgcgaccgggagacgccaggaacagcggcgcagagcggccccgcacaggagcccggaccgaacagcaacccccagcggagggacaggaccggccggcgagggacc

SEQ ID NO: 98909 - RNA, 77 nt, Homo sapiens
cggaggacgggcaacaggagccccacgccacggaggaaccaaccagaggcggggccaaagcacagaacaaacccagg

SEQ ID NO: 98910 - RNA, 71 nt, Homo sapiens
acgcggggacaagcacaacacgcaaaacccgggaaacagcagaagaaagaagcgacaaaacagccccagca

SEQ ID NO: 98911 - RNA, 58 nt, Homo sapiens
caaggcaagccagagaacacccgccgcgcaaaaggccaaaacagaagaggcaaagccc

SEQ ID NO: 98912 - RNA, 63 nt, Homo sapiens
cccacaaggcacaaagcacaggaaagagaggagaggagcgccggggcgcacgcagaagaagaa

SEQ ID NO: 98913 - RNA, 73 nt, Homo sapiens
ccagaaggaacgacaaacaggaccgccaaacccaaaccggccggaagggcggagaggccacgggcgcccggca

SEQ ID NO: 98914 - RNA, 76 nt, Homo sapiens
cgccgggacccccaggacgacggaccggacacaccggggagcaaacccggaagacagaacaggcacacccgacaga

SEQ ID NO: 98915 - RNA, 92 nt, Homo sapiens
ggagaaaaagaagaagcaacgacaaaccaggggggaaaaacccagagaagaaaagaaagcacagccaacggggccccacagacaccgagccg

SEQ ID NO: 98916 - RNA, 93 nt, Homo sapiens
ggagaacaggagccgccccagaaagagacaacacaggaacaagcaccacagagaaacggcgaggaaagagaggagccccggaaagaaaaggac

SEQ ID NO: 98917 - RNA, 55 nt, Homo sapiens
cagacggagagaccaagaaaaggaaccccgacaccggcacggaagaacacgggaa

SEQ ID NO: 98918 - RNA, 101 nt, Homo sapiens
gggcgaacggggcgagccggaggagcacccaaccccgcgacaagcagaccggaagaccgacggaagaccacaccccgagggagcccaggacaccacgagaa

SEQ ID NO: 98919 - RNA, 71 nt, Homo sapiens
aaggcccaccaagcgagcagagagaagcggggccgggcaggacgccacgacccagaccgcggacggggagc

SEQ ID NO: 98920 - RNA, 77 nt, Homo sapiens
ggccgcccgcccagcgccgcccccggagggcccacgcagcgccggacaacaacggggcggcacacaaggagcgaagg

SEQ ID NO: 98921 - RNA, 79 nt, Homo sapiens
ggaacgaagaagcaggagcaggagaggaaggacgcagccacaacacgcggagcaagaacggcccagcggaagccgcccc

SEQ ID NO: 98922 - RNA, 83 nt, Homo sapiens
ggccccggcagcagcccgacgcaaaccaaggacggggaccgcacacccaagcagcgagccagaggaagaggcggggcagaggc

SEQ ID NO: 98923 - RNA, 69 nt, Homo sapiens
gcggggcagaggcggcggccgcagcggcgcagcgaagcaggaacagccagacagacacagcacagcagc

SEQ ID NO: 98924 - RNA, 77 nt, Homo sapiens
aaacccggagaccaaaccggaaagccagcgacgaaggaggggacgaacaagaacagaaagggaacacagcagagggg

SEQ ID NO: 98925 - RNA, 88 nt, Homo sapiens
gccggaagcgccaggacaaggggacccgggacgacgagacgacaccacaaagcccgaagaggaaggagaaggaaagagcagaaaggag

SEQ ID NO: 98926 - RNA, 73 nt, Homo sapiens
ccaggagcccgagagagaaggcgccacgcagagccccgccaggaagacacgccggggaacgaagcagaagacg

SEQ ID NO: 98927 - RNA, 80 nt, Homo sapiens
ggacacagcaaaccgggccacagaaccagagagaaccaggaccaaagaaaaaggggacccaggggcccagaaccacccga

SEQ ID NO: 98928 - RNA, 62 nt, Homo sapiens
aagaagaacagacagacaggcccagagacaacgcaaggaccaaccgccagcccaggaagcac

SEQ ID NO: 98929 - RNA, 78 nt, Homo sapiens
gagggaccgcagagagaggcgcagaaggaccgggagcacagccgccgaaaaccccggcccgacgagaagaggcggcca

SEQ ID NO: 98930 - RNA, 65 nt, Homo sapiens
agacccaggagaagccgcccaaagaacggcacgacggggcaggaagccgggcggagccaggaccg

SEQ ID NO: 98931 - RNA, 72 nt, Homo sapiens
agcaaggcgaagaaccagaccggaccagggggacaggagccagagaaaaaacgacgggcaacaccggcagca

SEQ ID NO: 98932 - RNA, 55 nt, Homo sapiens
aacgccaccgagccccgaccccacaaggaagggaagaccagggaagacacgggag

SEQ ID NO: 98933 - RNA, 83 nt, Homo sapiens
agaacacaccagggcagacacgaaaaaagaggaggagggccagcgcaacccaccggacaagaagaagacgcaccaccgaacaa

SEQ ID NO: 98934 - RNA, 84 nt, Homo sapiens
gggagccgcaccaccaacgcggccgacaacagccggcgccgccacggcgaacaagaaaaacgaccgacagaccagcaacaagca

SEQ ID NO: 98935 - RNA, 67 nt, Homo sapiens
ccgagagccagagagaaccagaggcaagccagcacaccggggaaacacaaagaagacaccagaaggg

SEQ ID NO: 98936 - RNA, 79 nt, Homo sapiens
gcccacgagcaaccaagaagccacacaaccacaaccccaaaagagccacgcgcggaacacaacccaacgcagaggagca

SEQ ID NO: 98937 - RNA, 73 nt, Homo sapiens
aaccggaacggggcacgaaaccaggaacggcccacaggagggccaaaaccaggcgagaaccaggagaagcggg

SEQ ID NO: 98938 - RNA, 37 nt, Homo sapiens
ggggaccaccccgggaagacagaggcggccccagggg

SEQ ID NO: 98939 - RNA, 51 nt, Homo sapiens
gggaccccggagcccagaagacagagggcgaggagaaccggggcaagagac

SEQ ID NO: 98940 - RNA, 68 nt, Homo sapiens
cgagcgagggggggcgcgccggaaaccggagcgcgcagcagggcaaagacgacacccggcgaaaaaaa

SEQ ID NO: 98941 - RNA, 96 nt, Homo sapiens
ccacgaacccaccgcgacccggccacgccgccccaaggaaggacgcccagagaccggcagcgcaaacacccggggaggaagcccacacacccccag

SEQ ID NO: 98942 - RNA, 73 nt, Homo sapiens
acggcggggagacacaggagaacccgcaacacaaaccccaccaacaaagacaagaaggcagcaaagaaaggaa

SEQ ID NO: 98943 - RNA, 78 nt, Homo sapiens
aggcgacggcccgcagccggaccccaccggacggcggggccacgggcgccgggaggcacggcagacacaccgaccaga

SEQ ID NO: 98944 - RNA, 79 nt, Homo sapiens
ccgcggagggagaggcgcagagcgagggcaggagaccaaaagaaggggagcccagaagcgagaggaaaaggcaaacgac

SEQ ID NO: 98945 - RNA, 68 nt, Homo sapiens
gcacgccgaaaaccgcccacgcagcagggacaagggaggcgaggacggacaaaaggaaacggacggga

SEQ ID NO: 98946 - RNA, 81 nt, Homo sapiens
aagacccaagaagccagcaagaagacagaaaccagggcgaaggacgaggaccgaaaaagggcagaggacgaccagagcggg

SEQ ID NO: 98947 - RNA, 74 nt, Homo sapiens
agacaagccaaacggcaaggaacacagaggaagagcaaggagcaaaccaagacggccaagggggagccggccgg

SEQ ID NO: 98948 - RNA, 87 nt, Homo sapiens
ggagacgcacaggcccgagagcagcaccagcagaagagggcccgaccacggcaacccagaggcgaagcaggacacccgcaaagaaag

SEQ ID NO: 98949 - RNA, 65 nt, Homo sapiens
acgcgggcagcagcaggccgggaagacgcaaacacaaggaaggaaccaaccgaggcagaaacgga

SEQ ID NO: 98950 - RNA, 57 nt, Homo sapiens
cccaggggagaggagagaaggccgcaggacccccagcccaggacccccacaggcgga

SEQ ID NO: 98951 - RNA, 62 nt, Homo sapiens
aggaggggaggaggcgccggaccggggggagagcgaccaaacccccacaacaaggacaaagg

SEQ ID NO: 98952 - RNA, 64 nt, Homo sapiens
acagaagcaggcccggaccccgcgcgcaaaagaacagcgagaaccagccaaaacacacgaacag

SEQ ID NO: 98953 - RNA, 69 nt, Homo sapiens
ccgcaaaaaaggcacgcccacaccccgacggcacaccaagaacgcggcaagagaggagaacaaacccca

SEQ ID NO: 98954 - RNA, 88 nt, Homo sapiens
ggacgccgcggccccaacgcgccccgggacgcacacggcaccaaacacgcagaaaacagacacacagcggagacaagcagggccggca

SEQ ID NO: 98955 - RNA, 68 nt, Homo sapiens
gcaacaccagacaccaaggacagcccgcaaggacagcgcagcacaaggcaaagagaaagggaagaacg

SEQ ID NO: 98956 - RNA, 71 nt, Homo sapiens
gcacagggaaaaagaaacgaggagccacccaccaggcggaggcagcagcgcaaccgggacagcaacccacc

SEQ ID NO: 98957 - RNA, 71 nt, Homo sapiens
aaagcccagcggcccgccaggcccggcgcgagaggccgggaaacgcaagcaagacggaccgaagagacagg

SEQ ID NO: 98958 - RNA, 47 nt, Homo sapiens
gaagcacccccgcacccagaggaaacagggggcggcagggggaccag

SEQ ID NO: 98959 - RNA, 36 nt, Homo sapiens
caagcaggagcgaaggaccaggagaccaaagaccag

SEQ ID NO: 98960 - RNA, 72 nt, Homo sapiens
ccccagccgcgcccgggagagcaagagggcggacggcagacaggcagcaaccggccccgcccaccagcccca

SEQ ID NO: 98961 - RNA, 106 nt, Homo sapiens
agcaccggacacgaggagaaacagcagaaacgcaccaggccaaagaaagagaagaaaaaacccagaaacaacaaaaaaccccgggccgagagacggaaagaagcgg

SEQ ID NO: 98962 - RNA, 76 nt, Homo sapiens
gacaaaccggagaaggagccaagaaagagaagggcccgccccaccgggggccaccccagggaggagaagagggacc

SEQ ID NO: 98963 - RNA, 40 nt, Homo sapiens
gggccccggagacccggagggccccaggcaggccgaagag

SEQ ID NO: 98964 - RNA, 76 nt, Homo sapiens
ccagcgcgcagcccggaccagccaagccccaacggcccccgcgccgggcgcagcgggcgccggccgagcccgggaa

SEQ ID NO: 98965 - RNA, 62 nt, Homo sapiens
gagaagggcgccgcgcccacggccagacccaggaacgaaccggagaagaaacagaaaaaaaa

SEQ ID NO: 98966 - RNA, 55 nt, Homo sapiens
cgccacgcgcggaaggcagcgcccagcagcgcagcgacaagcccacgagacgaac

SEQ ID NO: 98967 - RNA, 71 nt, Homo sapiens
gggaccgaggccgaggagcgaaggacagaagccgggcaaggagaacaacacaaaccgaggggaagagagga

SEQ ID NO: 98968 - RNA, 48 nt, Homo sapiens
gcggagaacaagaacacgaggaagaagccagacgacagcaggagccag

SEQ ID NO: 98969 - RNA, 85 nt, Homo sapiens
gccggggccccaacagagccacgcaccgcggcacggggcaaccgggcggccacgcccgcgcaggccggcgcggaagaggccggcg

SEQ ID NO: 98970 - RNA, 75 nt, Homo sapiens
gacccggggacccccgacgccaggcagcgcccccaaacggcccgagagagaaagggaaagaaggagcggagcaga

SEQ ID NO: 98971 - RNA, 79 nt, Homo sapiens
cagcaccacccggcgggcccacacaaggaggggaaagcgaaaccaagagaacccgaacgcacccgggaaaaacacaccg

SEQ ID NO: 98972 - RNA, 67 nt, Homo sapiens
aggagcgaacgagacagaacaggaaaaaggcggagaagagagcggaaagagcaacaggacaagaacc

SEQ ID NO: 98973 - RNA, 77 nt, Homo sapiens
caccgaaagaaagcggggacagaagagccaaaaggaaaaaaagaggcacgaagcgaaggagagaaccaggagaccga

SEQ ID NO: 98974 - RNA, 51 nt, Homo sapiens
gagcggcaaagaggggccggaccacaaggcaagagcagccggaaacacaga

SEQ ID NO: 98975 - RNA, 79 nt, Homo sapiens
acgccccggccacaccaaaccccaccgggaaagccacagaccggaaaccgacacccaaaacggaagccaagcacagcaa

SEQ ID NO: 98976 - RNA, 78 nt, Homo sapiens
aaccagccagccacaacccagcggagagcgcaacaagcgaccaggacgaaaaggagaccggaaaccgagagaaacgaa

SEQ ID NO: 98977 - RNA, 83 nt, Homo sapiens
aggagggggccggccgggacgcggcccggagccgggaccgaaaacccagggaccagcggagcccagccgcaacacccccccac

SEQ ID NO: 98978 - RNA, 122 nt, Homo sapiens
caccgcaagcccgcccccgggacaagcaacccgcccagcccccgagaggagaaacaggagaaagggagaggaggggcgaagaagcgagggcagccggagagaacaggaccagcaggggaccc

SEQ ID NO: 98979 - RNA, 82 nt, Homo sapiens
gaggccgagccgacaggcgggcagagggagcaggcccgagcgcggagcgccgacaagggggacgagcacgacccagcaagga

SEQ ID NO: 98980 - RNA, 71 nt, Homo sapiens
cagacgcagggcgcccccggaccacagggacaagcagaggcgagccagggcgagaaaccacaaggagagag

SEQ ID NO: 98981 - RNA, 51 nt, Homo sapiens
ggagagccacccaagagacaagcagggcaacaaggacccagacaaggcggg

SEQ ID NO: 98982 - RNA, 87 nt, Homo sapiens
cccagcagagacagcaccaggggcagcagggggccagccaggacacacagacccagcggaaccgaccgaggccaaaagaaaggaaga

SEQ ID NO: 98983 - RNA, 77 nt, Homo sapiens
gaaggaggcagaggcacaccgaaagggaccaagcgccagaacgaccaacgaccacaacgacgggagagccaagccca

SEQ ID NO: 98984 - RNA, 71 nt, Homo sapiens
ccgcccagagcagcagaacagcacaggggggacacaggacaacgagagaagccgaagcgggggacccgcca

SEQ ID NO: 98985 - RNA, 82 nt, Homo sapiens
cccagaacccgaccaacaccagaacccagcgcccccagggcaagagagccggcaggcccaccgcgagaacgggggcccaggc

SEQ ID NO: 98986 - RNA, 80 nt, Homo sapiens
aacaagggagaggggccgggcggagcccacgagaaacaaagacaaccgcaccaggcaagagccgcagagaaagcgcgcga

SEQ ID NO: 98987 - RNA, 78 nt, Homo sapiens
ggcgcggaggcggcagaagggaccgcggacccagcccgcagccagagcccaaaaggcagagcgaggagagaagaagga

SEQ ID NO: 98988 - RNA, 81 nt, Homo sapiens
gccgcagcgcgaggccgggccgggggagaccgcaacaccaggaagcaaggcggcagcgccaaccggccggagagcaccggc

SEQ ID NO: 98989 - RNA, 81 nt, Homo sapiens
gggacaagagaacagccgcgcggcgagcggcccgcacaaggccggcagccagaagcggggggcacgcagcgaagccacaga

SEQ ID NO: 98990 - RNA, 85 nt, Homo sapiens
caaagggaaaggaggcagcgcaaggagggcggcgggacgcaccgaggccagaccgccgagagagaagaagaaggaggccgcggcc

SEQ ID NO: 98991 - RNA, 76 nt, Homo sapiens
gggcccgccagccccagcggcgccgagaaagcacagcaggaacgagcaaggcagacaaaagagagacggaaacagc

SEQ ID NO: 98992 - RNA, 82 nt, Homo sapiens
agcaaccgacccggacgacagaaacaacggcgcaaggaagaagagacgccgcgcggcagacaaggcccggcaggcaaagcgg

SEQ ID NO: 98993 - RNA, 73 nt, Homo sapiens
cagcccaccgagacgagcgcagcagaacgacgcaacgggaaggcaaagaagaagcgcccacagaaggaagcgc

SEQ ID NO: 98994 - RNA, 75 nt, Homo sapiens
gagaccaggaggaagggcccaaaggcacagcgcaaggaacacggggaagcaccaaagcagacagccccacgggaa

SEQ ID NO: 98995 - RNA, 51 nt, Homo sapiens
aagcaccgcagagaaaaggaccaggcgaaacaaagaaaaccgcacgacgag

SEQ ID NO: 98996 - RNA, 66 nt, Homo sapiens
cagcccccgcggggcggccaggacgaggaaaaacaagaagagcaaagaggccacaagccccacagg

SEQ ID NO: 98997 - RNA, 77 nt, Homo sapiens
cccgcgcccgggccgcgggagcggagcccccgggaccagccggcggaagaggaccaagaagggggcagcgcgggaac

SEQ ID NO: 98998 - RNA, 82 nt, Homo sapiens
cgcaagaaggccgggcgaggaggcccaaagcaccgagcgcccaggacagacgagccagcgcagcagccgacacgggagccga

SEQ ID NO: 98999 - RNA, 73 nt, Homo sapiens
gcacagaagcacgaaaaagcgggaaggccggaaaggaccagaccgcccaggaaacggaagggaaggagcaaga

SEQ ID NO: 99000 - RNA, 73 nt, Homo sapiens
gagaacaaacgccccggggcggacagaggggaagcaagaggccaggccgacgaggccggccacaccgcccggc

SEQ ID NO: 99001 - RNA, 68 nt, Homo sapiens
agggcagggacagcgcaggcagcaggagggccaaaaccaggcgagaaccaggagaagcggggggaaga

SEQ ID NO: 99002 - RNA, 72 nt, Homo sapiens
accggagggaaaggcggccggccccgccgaagcaccggaccgagaacgaagggacaggcaggagggaagaaa

SEQ ID NO: 99003 - RNA, 72 nt, Homo sapiens
aaacggcggccaccgggaaggaccaagacagaggccaagaaaacccccgcacggaaggagcaagagacaggg

SEQ ID NO: 99004 - RNA, 74 nt, Homo sapiens
aaccagagacaccagcaggacaggaaaaaaagagaaaaggccagaggaaccaagaaccaacacagacagagacc

SEQ ID NO: 99005 - RNA, 83 nt, Homo sapiens
gacggcccggacccccagaagaggaccgcggaaacgagaccccgaggggacccgcaccagccacaaaggccgcccccggacac

SEQ ID NO: 99006 - RNA, 73 nt, Homo sapiens
gcacgaacgagcgaccgccccagaaaaacgccacaaccaaacgcgcaaagcgccaaacgaaaaggaaaggacc

SEQ ID NO: 99007 - RNA, 78 nt, Homo sapiens
accgagccacaacagccaaggaaaaaaagcagagaggagcggggagcaagcaggagggggagccaaaccaacgagagg

SEQ ID NO: 99008 - RNA, 78 nt, Homo sapiens
agggcggccaccgagaggcaggaaccaccacacacgacaccgcaggaggacacaacagaccgcgcagaggaccagcgc

SEQ ID NO: 99009 - RNA, 75 nt, Homo sapiens
aggaaagacccagaggccaggaacgggagccacacgacggagagcagggcggaaagcagcccaggagggaaagcc

SEQ ID NO: 99010 - RNA, 78 nt, Homo sapiens
accaaacgccagagaaaagaggaaggacgcagaaacgggcaccgcagccagacgcagagaccagcccccccgagagag

SEQ ID NO: 99011 - RNA, 76 nt, Homo sapiens
gggagaagagcggagcagggcggagagggcgaccggagccacaacgaccgagcggacaggagacagccagcgcacg

SEQ ID NO: 99012 - RNA, 54 nt, Homo sapiens
gggaagcagacccgggaagcgcggaaaaagggacaaagggagcggcgacagaca

SEQ ID NO: 99013 - RNA, 69 nt, Homo sapiens
caccagggacaagcaaaaacaaaaagcacagcaagcacccgaacaaagggagaaaccgaaacgaaccca

SEQ ID NO: 99014 - RNA, 80 nt, Homo sapiens
aggcaccgggccccgcccaggccccggacaaaggaccggccgagacgggaaggagccggacacaggacacaccaaaggcc

SEQ ID NO: 99015 - RNA, 111 nt, Homo sapiens
gggggccaagggcgggcgcgccgcaggcggcagcaggacaacgagccacggaggcggagagagaccaccggggcggccccccacccccaccgaagacgaagcagaaaacca

SEQ ID NO: 99016 - RNA, 65 nt, Homo sapiens
ggggcagagcgagggcaaacagccagccagagaccggagaagcagaaggcagaagagaaggagag

SEQ ID NO: 99017 - RNA, 79 nt, Homo sapiens
ggcccggagagacgaaccgaagcgggcgggcccccccacccagagacacgagaggcgagggacgacagagcaagcggca

SEQ ID NO: 99018 - RNA, 75 nt, Homo sapiens
gccaagaaacgcaagcacgccccgagccacgacacaacacggagcaggaggcagcagggagacgccacgaagggg

SEQ ID NO: 99019 - RNA, 55 nt, Homo sapiens
aagaagaagccgcggaccccacggcacgcggcagaacgccaaaaggaagcccaag

SEQ ID NO: 99020 - RNA, 79 nt, Homo sapiens
ggaaacgacagccagacaacgagacacccgcacggacccgggcgcaggggcacggccaacacccaaacgcagaaacaga

SEQ ID NO: 99021 - RNA, 56 nt, Homo sapiens
gaacaagaaccaaagaaaacaaaaggggacagggcgggggcggagggcaagacgac

SEQ ID NO: 99022 - RNA, 75 nt, Homo sapiens
accaaggcggcaagcgcagacccagggccacaaaggagaacacgagagacacaagaaggccaacggcaagagacg

SEQ ID NO: 99023 - RNA, 79 nt, Homo sapiens
ccgccaccgcgaacaggagcccgacagaagacgcaaagccccgagcccaaaacagcccacgcagcccgccggcccggca

SEQ ID NO: 99024 - RNA, 103 nt, Homo sapiens
ccccggaccacacagcgcccaggccagagaaggggaaggaggggcagcggggccaccgagacaaacacgggaaaaaagaaaaacaaagaaaaaaagagaaagg

SEQ ID NO: 99025 - RNA, 82 nt, Homo sapiens
aacagccaacccagagagcgaaggagaacgggaggcgggaacacaagagggaaggggcccggccaggaccggggaagggggc

SEQ ID NO: 99026 - RNA, 74 nt, Homo sapiens
cgcgaaacgcacgagaagaaacgcacgagaccgaacccaaggagaggaagagcgaaacgaagaaaccaaaaacc

SEQ ID NO: 99027 - RNA, 89 nt, Homo sapiens
caaggcaaggccggaggagaggcagcggccaggaagagaggcagaaaccacgcccagggaagacacccccggacccccacagaccaaag

SEQ ID NO: 99028 - RNA, 67 nt, Homo sapiens
ccgccgaggcacagagaaccgaccagaacgcagcaacaaagacggaaagcagaagacgggcccagcc

SEQ ID NO: 99029 - RNA, 76 nt, Homo sapiens
aggcacacgagccacgcggcagcgagagcccgggaagcagaaccaagccagagggacagaggcgagaagaaagacc

SEQ ID NO: 99030 - RNA, 74 nt, Homo sapiens
agagaagggaaaaccaaacaggcccccagaagagcggagagacgaaagagaccggcgcgagaaccgggagccac

SEQ ID NO: 99031 - RNA, 80 nt, Homo sapiens
aggcggcgccgaggagcgggacaacccaggagcagacagagaagcgcgcagcagcacaccgacagagaacccaggccaac

SEQ ID NO: 99032 - RNA, 41 nt, Homo sapiens
gggaggaaaacaaccgagggcagagacgggcagcacgagaa

SEQ ID NO: 99033 - RNA, 62 nt, Homo sapiens
gagcgaacgagacagaacaggaaaaagggacaaaccagaacaaggagccagcgaaggaacag

SEQ ID NO: 99034 - RNA, 85 nt, Homo sapiens
gcgccccggagcaggccaagcggggccaggacgcgggaggaccgacacacaacaacaggaggcaaacccacagccgaaaagaggg

SEQ ID NO: 99035 - RNA, 77 nt, Homo sapiens
gccgccagccgccccgagagaggaaaacgagacagcccacccaccgccccgcagagaagacggccaaggagagaaga

SEQ ID NO: 99036 - RNA, 73 nt, Homo sapiens
aaagccccacccgccgcagcaagcagaggcccggggagccaagcagcccggaggagacgacggcccgggaccc

SEQ ID NO: 99037 - RNA, 70 nt, Homo sapiens
acgacaaccaccaagcgcggacgaacaggcgggaaggccaaggggggcgcaaagccccagcagaaccggg

SEQ ID NO: 99038 - RNA, 86 nt, Homo sapiens
gcgaaagccccaggggccaggacccacagaaaaccggcgcagagccaaaaggaaccgaggaaaagcaggggaaacgacgcagcgga

SEQ ID NO: 99039 - RNA, 76 nt, Homo sapiens
acagaaggggagccccacagaaggggagcccgggcggccacaaaagaagacccaaagcaccaacaaaaagcaacga

SEQ ID NO: 99040 - RNA, 80 nt, Homo sapiens
caaagggcccgcccaagagcgacagccccagaagcaagagaggaaaacagaagcgggcccgccagggagaaaagacgagg

SEQ ID NO: 99041 - RNA, 85 nt, Homo sapiens
ccgccccggcggggcccagaacaccgaaaacccccagcacagaaaggggacccgacggaaagaagaaggggagaacccagggcgg

SEQ ID NO: 99042 - RNA, 70 nt, Homo sapiens
ccgaagagaacagggccggggcacgacgacccaacagcaaggcgggacccagagagccagcgacagggag

SEQ ID NO: 99043 - RNA, 99 nt, Homo sapiens
cacgccgggaccaaaccggagccaggcaacccaccagggggcaggaacaaaggaccggacccgacgcacagggccgcagcgagaccgaccccggacaca

SEQ ID NO: 99044 - RNA, 70 nt, Homo sapiens
cggccgagacaaaggcaccaggccaccacagaaacaaaagcaacaaagagggaaccaacagaggcaaaac

SEQ ID NO: 99045 - RNA, 73 nt, Homo sapiens
ggggcccccgacagccaccgcccacggacagagccggcggggagccagcccagcaagcaaccacgagagcaca

SEQ ID NO: 99046 - RNA, 48 nt, Homo sapiens
cagcgcgccgcgccaggaccggaggcagcacgccaggaaccgcaaagg

SEQ ID NO: 99047 - RNA, 50 nt, Homo sapiens
acaggaccagaccacagccagccaggacagaaggcaggagaagaaccagc

SEQ ID NO: 99048 - RNA, 76 nt, Homo sapiens
gaacaaagcaggaaacaaaaacaagccaggaaggaaaggacggaagcaccaaaaccagacagacacagcacagcag

SEQ ID NO: 99049 - RNA, 67 nt, Homo sapiens
ggcagcaaaccgaccacagaggcagccagcaggacacagcaacgcacccgcccccaaagagagaagc

SEQ ID NO: 99050 - RNA, 67 nt, Homo sapiens
cccccggccaccacgcccggccgaaggcgggggaggagacccacccaaacagaagaccgcaggaaag

SEQ ID NO: 99051 - RNA, 59 nt, Homo sapiens
cggcgccacgggccagacagggggccggcacacaagaaggggcccggaccacggcacgg

SEQ ID NO: 99052 - RNA, 74 nt, Homo sapiens
gggccgggcgagacaccagcaacacagccaacagaggcagggccaggaggagggcagccaggcacgggggcagg

SEQ ID NO: 99053 - RNA, 71 nt, Homo sapiens
agaccacagcaagacgccaggacccacggaagccagaaagggcggacgcagcccccaacccgaccggcaac

SEQ ID NO: 99054 - RNA, 74 nt, Homo sapiens
gccgggacgccgggaccgcgaccaagggaacggaagccccagcccgcgcgagccaggcgcccacaggagaacag

SEQ ID NO: 99055 - RNA, 98 nt, Homo sapiens
gcaccaaacgcggcaacgcccccgggacagcacgccccggaccccaaggaccaccacacgaaaccaaggaaaaaccgggaacagcagaggccagagga

SEQ ID NO: 99056 - RNA, 85 nt, Homo sapiens
ggcacagagagggccgggagcgcgcagccagccggaaccaaaaagaagccccagagccggggccaggagccccaagcgccccagc

SEQ ID NO: 99057 - RNA, 74 nt, Homo sapiens
gccggaaaccagggccacccaaagcaccaagaaagaggcccaaccaaagacagcaggaaccgaaagacgacgca

SEQ ID NO: 99058 - RNA, 57 nt, Homo sapiens
ggaacgcccgccccgcagagagggacagacagcaggaaagcagcgaacacgccgagc

SEQ ID NO: 99059 - RNA, 75 nt, Homo sapiens
accaccaccaaaacgagaaggcccgccccggggaagggacaacagcagagaaaggcgggacgacagcggaaaaga

SEQ ID NO: 99060 - RNA, 77 nt, Homo sapiens
aaagcggcacgaacagagccgggagcaagaagaacacccagaggccagcgcagaagacgagaagccaggaggagaag

SEQ ID NO: 99061 - RNA, 83 nt, Homo sapiens
gcccgggccaccgccaccaggcacaggagacgaggaccacggccaggggaggggcagcagcgccaggacccaccgcaagcaca

SEQ ID NO: 99062 - RNA, 73 nt, Homo sapiens
cacaagcgagggaagcagaaagagaaggaaggcagccggcccagaaagggggccaccccagcgcaccccgcaa

SEQ ID NO: 99063 - RNA, 49 nt, Homo sapiens
acgggggagccgcgggcggcaggacacaagcaggggaggaagaagacga

SEQ ID NO: 99064 - RNA, 39 nt, Homo sapiens
acgggggcggccggcccccaggaaaaccaagcaccgacg

SEQ ID NO: 99065 - RNA, 70 nt, Homo sapiens
gacggacaccccccgggacgggacggaaccacacacgaaagggcagcagcaggaacaggaacagccagga

SEQ ID NO: 99066 - RNA, 70 nt, Homo sapiens
aaccccacgcgcgggaggagacgggcccccccagacgaggcggcaacacaacaccccaggagcaagccag

SEQ ID NO: 99067 - RNA, 82 nt, Homo sapiens
aaacaagccaacccaggaggaaaaacgagagggggcaccccagacaggagaacgggacagggcagacgggaggagagaaaga

SEQ ID NO: 99068 - RNA, 75 nt, Homo sapiens
ccaccgggcgcaccccacccgggccgcccgaagaacgcaggaacaaaaacgaaaaaagacggaagagaggcagcg

SEQ ID NO: 99069 - RNA, 78 nt, Homo sapiens
gggggagggcggagcggcgcggccccagcccccgggggggcccgagaaccaagaaggagcgagggaggagcagcgaga

SEQ ID NO: 99070 - RNA, 81 nt, Homo sapiens
ccggccgccccggggccccgcccggacgcggagagcccagccaccacccgagaagcggccccccgggcccagagcagacgg

SEQ ID NO: 99071 - RNA, 78 nt, Homo sapiens
aaggcaacagaaagagcaacagcagggcaacagccaccaaaggacaggagaaaagaaagcaaccagccgagacaagca

SEQ ID NO: 99072 - RNA, 90 nt, Homo sapiens
aaacagccacgccgggcaggaaaccggagcgaagaaaaagcggcacaggagacccggggaacccaaccaggacggcagggggccaaacgg

SEQ ID NO: 99073 - RNA, 80 nt, Homo sapiens
ccgaagagccagaacaagccaaaacaggagacagagagcggaaacacgcaaaacccaaggaagcaggcagcggggcggag

SEQ ID NO: 99074 - RNA, 65 nt, Homo sapiens
ccgccaagcgcacacaaaagaggagaaaaccgggcgcagccaacggcaacgaaaagagacacgac

SEQ ID NO: 99075 - RNA, 75 nt, Homo sapiens
ggcggagcaccgccccggcagaagcggcagcaaaacaaaagagaacgaacgcagaccgggaaaaccaacaaacca

SEQ ID NO: 99076 - RNA, 76 nt, Homo sapiens
gaaggccccaaccacggggaaacaccaaacccaccccgaggggggcccagcggaagaacgccgcagagagcagaga

SEQ ID NO: 99077 - RNA, 55 nt, Homo sapiens
caaggcaagacccaaggcgacgaccgacaggggggaaaggcgccggcgaaagcaa

SEQ ID NO: 99078 - RNA, 77 nt, Homo sapiens
ggcggagggacacgggcagcacgccaggggagcagccggcagcgagaacccacaggagggccagaggacaaagcacg

SEQ ID NO: 99079 - RNA, 78 nt, Homo sapiens
cgcccaggagagaaaggagacccgacgcaacgcggagcgcaaggcgagggacgagaacgaggggcacgagggagaggc

SEQ ID NO: 99080 - RNA, 48 nt, Homo sapiens
agagcaagcgggggaccgaacaaggcaaaagggagcccgaaaacggga

SEQ ID NO: 99081 - RNA, 63 nt, Homo sapiens
gccaaccgaccgggcacgaggagaagggcggcgacggcggcgcgaggaccgaccgggcccgcg

SEQ ID NO: 99082 - RNA, 60 nt, Homo sapiens
ggcccgcgcgccgagggcgaggcggacgcgcggcgcgcaggggcaacgaggaacaggcca

SEQ ID NO: 99083 - RNA, 43 nt, Homo sapiens
aaaacaccagaaccaaccggggcgggaaccgacgaggacccca

SEQ ID NO: 99084 - RNA, 85 nt, Homo sapiens
cgcaaacgacacccagggacaaagagacggacagaacgccggacagaaagaccccagcaggccccaaggagcggcaagaggaccg

SEQ ID NO: 99085 - RNA, 73 nt, Homo sapiens
caggcaagcacacaagggacgcgaccaccaaggaaagaccacagcaagaccacgcccccagccgggggaccag

SEQ ID NO: 99086 - RNA, 56 nt, Homo sapiens
gccaaccgcccaggaaggacaaagcgggcaacaaccagccacggagcccgcacgcc

SEQ ID NO: 99087 - RNA, 69 nt, Homo sapiens
ccgccgcggagcccgcagcccgccggcgcgccccacgggccaggagggggaaaaccagaaccgaaaacc

SEQ ID NO: 99088 - RNA, 65 nt, Homo sapiens
ccgcacgccgagcccgcggacgccaagcgcgcccggagacaagagacggaacagagaagcaaccc

SEQ ID NO: 99089 - RNA, 61 nt, Homo sapiens
cggcgccgggacgcaccgcaccgagggcgagcccaggaagaagaagcgcacaaggagcaca

SEQ ID NO: 99090 - RNA, 79 nt, Homo sapiens
aggcgggccccgcggggggccccgggcggcggcaaaggagacagaccggagggagcgcggaaaccgcggccggcacaaa

SEQ ID NO: 99091 - RNA, 75 nt, Homo sapiens
ggcagcaagaccggaaagaagaaggggaggacagagacaccagacaccaacgaaaggaaaaaagcaaagaagagc

SEQ ID NO: 99092 - RNA, 58 nt, Homo sapiens
cacacgggagggaggaagcagggccccgaagggcacacaaagcgggaaagggaaagcc

SEQ ID NO: 99093 - RNA, 65 nt, Homo sapiens
gccgcgacgagccagaccgccaaaccagagaaagaaacacccgaacagcgagcgggaaaacggca

SEQ ID NO: 99094 - RNA, 58 nt, Homo sapiens
gcgagccaagcgacgggcagcgacggacagggcagaccgccagcagcacagcaagcca

SEQ ID NO: 99095 - RNA, 52 nt, Homo sapiens
agaccggaagaccaagcaggagaaccgaccgaaggagagaagcaagcacgcc

SEQ ID NO: 99096 - RNA, 59 nt, Homo sapiens
gcccgagcaggccaacccaggccaggcagccacagccgagcagcgggccacggacacag

SEQ ID NO: 99097 - RNA, 65 nt, Homo sapiens
acaaccaccagaagaacgacagagaggagggagaacaagcaacggcggcacgccgggaaccccag

SEQ ID NO: 99098 - RNA, 64 nt, Homo sapiens
cgccgccccgcgcagggccggcgacaggcacgagaggaagccgaacccggaggaagaaaaggaa

SEQ ID NO: 99099 - RNA, 82 nt, Homo sapiens
cacaaaaaggagacccaaagccaaggagaagccccagcggcagaagccagaggcccagaccagacacggggacgcagagaaa

SEQ ID NO: 99100 - RNA, 78 nt, Homo sapiens
cgggggggggggggaggaacaggcgcaagccgcgaggaggagcagcggagcagaaacgcggaaaccccgcgaaacgga

SEQ ID NO: 99101 - RNA, 73 nt, Homo sapiens
aaaaagagcagaggagacaaaccggagaaggagccaagaaagagaagaggcggacaccgaggccgcacagcgg

SEQ ID NO: 99102 - RNA, 75 nt, Homo sapiens
gccgggccccaacaacccggaaggacagggcgaaccccgcgccccgcagcggagagcgcggccgaggcagaagga

SEQ ID NO: 99103 - RNA, 70 nt, Homo sapiens
gaagacacacagaaccagagccgaacacacgggaaagccggcagggggggggaaaagcagcagcaacggg

SEQ ID NO: 99104 - RNA, 71 nt, Homo sapiens
agcggcgcgcgcgcgcgcgcagcaccaggagaggagggaacgcggagcggaccaggaagaacggccaaacg

SEQ ID NO: 99105 - RNA, 83 nt, Homo sapiens
ggccggcagcggcgagacgccaacgaacgaggggggaccagcaaaagagccaacacccaggccaggccgcccggaaggaggcc

SEQ ID NO: 99106 - RNA, 69 nt, Homo sapiens
accggcaggaaccaccaggacagaacaccaaagaggggaaccccggaaccagaggcacccaccaccccc

SEQ ID NO: 99107 - RNA, 66 nt, Homo sapiens
cagcaaaggaggaccaggcagcacaaccgccagaaggaagacaagaaaggacggagaggcgaacga

SEQ ID NO: 99108 - RNA, 73 nt, Homo sapiens
cggccgcagagcacgcggagcgacccgccacgcggaccacgacagggacccacagccgcccccacccaacccg

SEQ ID NO: 99109 - RNA, 74 nt, Homo sapiens
gcaggcacacacgaggaccccagcgcggcgcgcggaagcaccagaagccacgggacggagccccgggacggcga

SEQ ID NO: 99110 - RNA, 82 nt, Homo sapiens
gcgccacacagaccaggaggaccaccaaaggagccagcgcggagcaggcgcagagcagcggagcagcaagaaggacaacgag

SEQ ID NO: 99111 - RNA, 63 nt, Homo sapiens
ccaagggcagcaagaaagggaaggacaacaaagcacacggagagagagaagaaccgagcacag

SEQ ID NO: 99112 - RNA, 74 nt, Homo sapiens
gaagagaagagccccgcgacaccaccgcccccggcccaggcaccagacccggaggagcagcaccccggcaggca

SEQ ID NO: 99113 - RNA, 73 nt, Homo sapiens
gccagcagacgaccgggaccaacccgcaggaggcgacaaacacggacaaaacagaggagaccagaccagaagc

SEQ ID NO: 99114 - RNA, 77 nt, Homo sapiens
gagcacgcggagccgcccaggcagccccgacaagggaccgggcgggccccgcaggaaacccccaccggcccacacag

SEQ ID NO: 99115 - RNA, 78 nt, Homo sapiens
ggagcccggccccgcaccaggaggaggacgacagcacggccagggcgaccgggcaaggaacgggagacgcaggaaacc

SEQ ID NO: 99116 - RNA, 47 nt, Homo sapiens
gaccacacacgggaaacacaaaacgacccagaaggaccccacccccc

SEQ ID NO: 99117 - RNA, 76 nt, Homo sapiens
gccgcgccgagcccgccgcgcgggcccgcccgacgcggaagccgcagccaccaccaaggggccgaccaacaacagc

SEQ ID NO: 99118 - RNA, 69 nt, Homo sapiens
gccgccgcacgcggacacgcggacaaggacagggcagcccagagggggagagagacggacccacccaca

SEQ ID NO: 99119 - RNA, 79 nt, Homo sapiens
aagaggaggaagaggaaagaaaaggagcaggaagcccagcacaggaacacagcgaagaaccgaaaaaagagccaagcca

SEQ ID NO: 99120 - RNA, 74 nt, Homo sapiens
ggaacaacccgcgcccaggccagcgccccaggccaagagggacccacccggcggacccccagcaacccagaagc

SEQ ID NO: 99121 - RNA, 78 nt, Homo sapiens
ggcccaacggccccagcagagcccgcgaccagggcggccagccacaagggcgcagaagccggcagagcccaagagaca

SEQ ID NO: 99122 - RNA, 74 nt, Homo sapiens
gcgcaaagccggcaccgcccggcccgccagcgccagcggcacggcccgccgcccaagcacccgaaagagcgaaa

SEQ ID NO: 99123 - RNA, 76 nt, Homo sapiens
caacacgagcagagacacgggagcaaaaccagaacagaagacgcacacgccagagcgcccaaccaggcagagcaca

SEQ ID NO: 99124 - RNA, 96 nt, Homo sapiens
ggcggcgcgaagcgcggggcgggcccgggcgcggcgggcgcgcccgccagcgcccggagaacgaacaggccaagacaaccgggaaagcagcccaag

SEQ ID NO: 99125 - RNA, 80 nt, Homo sapiens
ccgccgcgcacccaccgcgacccgggacccgcccgcccgcgggagcgcccaggagacaaaagcacagacacaacccagag

SEQ ID NO: 99126 - RNA, 76 nt, Homo sapiens
cgaacccgcagccgcaggccgcgccgggaccaggcacgcagaagccagcggacgcccgcaacggggaccggccaga

SEQ ID NO: 99127 - RNA, 74 nt, Homo sapiens
aaaccaggcccccccaggaacagagagagaagccgcgggagcggaagacaggcccggagcccgacggaccggag

SEQ ID NO: 99128 - RNA, 74 nt, Homo sapiens
cccaaacgccaacagaaacgcaccaccaaggcaccaaaggagaagggcgggacaacgacagcgccacccacaga

SEQ ID NO: 99129 - RNA, 59 nt, Homo sapiens
gcacacccggaccggcgcccaggcgagccgagacgcacaaaaggcggcagaagaggagg

SEQ ID NO: 99130 - RNA, 74 nt, Homo sapiens
ccaaaccaaggcccaggaaaagagcacagaggaagaaaggggaaacaaacaaagaaaggacacaggaacaaaga

SEQ ID NO: 99131 - RNA, 73 nt, Homo sapiens
cagacaaaaacagggacaagcgagcccagaccggaaaccagagcagggcggcacgaggcaagacgggccccca

SEQ ID NO: 99132 - RNA, 75 nt, Homo sapiens
gccccagagagcgggaacagacggcaaaggcccagcgggaagaagaggggcacaacgaaaacaaccgaacccgaa

SEQ ID NO: 99133 - RNA, 96 nt, Homo sapiens
gacccacccgggggggcagcgcacggaggagcggcgggccagacagcgcggccgcagacgaggccaccaagcaaagagaccgcacagaacgaacaa

SEQ ID NO: 99134 - RNA, 87 nt, Homo sapiens
cagccggaccccaccggacggcggggccacgggcgccgggagacaagaagaccagagaaggacccaacaggccacagccacagcccc

SEQ ID NO: 99135 - RNA, 58 nt, Homo sapiens
cagccggcgaacaaaacgacgcagaacaagaccacagaggaaacaggaaaccggaaag

SEQ ID NO: 99136 - RNA, 80 nt, Homo sapiens
gaggaaacgcggaaacagagaagaagagaagaaagcacaaaccggccagacaagaggaaaagggagaaccaacaaagagg

SEQ ID NO: 99137 - RNA, 76 nt, Homo sapiens
ggaaaagcccagcggcccgccaggcccggaggcagcacggcaggagacgaggagaggacagcaggacacccggacc

SEQ ID NO: 99138 - RNA, 67 nt, Homo sapiens
cccccgagagagggaggagcccgcccggcggggagccgaggacgcagggcaacaacaaaggaccccc

SEQ ID NO: 99139 - RNA, 73 nt, Homo sapiens
ggagagggcgggggccacagggagggccaaaagcaagacccccgcgggaggagccaccgccgggaagaaaggg

SEQ ID NO: 99140 - RNA, 72 nt, Homo sapiens
cccggaacccaagaaccggggagcgacagaagacaaacagcaaggggcaaaggcggaggcaagggcggccgg

SEQ ID NO: 99141 - RNA, 41 nt, Homo sapiens
cgggacgcgccgcggagaagaaggccgaagaagcaggaaag

SEQ ID NO: 99142 - RNA, 75 nt, Homo sapiens
cagaaggcgacaagcccagaggaccagcggagcggggcacaagaagacccacgcggggaaagcaacccaaaaaga

SEQ ID NO: 99143 - RNA, 78 nt, Homo sapiens
aaggcccggaccccccggacgacggggcgggaccggcgccaccgcagccgggagaagaggcacaaggacaggcacaga

SEQ ID NO: 99144 - RNA, 77 nt, Homo sapiens
ggacagaccgcggcaaccccgggaccgacgggaccaacaagaaaaggagagagagaccacacaaagaagaaacaagc

SEQ ID NO: 99145 - RNA, 64 nt, Homo sapiens
cgcaagggcagaagggaagaacaggagggaaccccggaacgaagaaaagaaaggccaagaccag

SEQ ID NO: 99146 - RNA, 72 nt, Homo sapiens
ggcaagaagcagagcgcagaggggccaaaaaaggaaagaaaaaacaggaaacaaccgaagcagagcgaagca

SEQ ID NO: 99147 - RNA, 91 nt, Homo sapiens
ggcgacaagagaggagccgagaaccgggcaaagacgacgcggagagggccccaaggacgccccccaaggacacggaagcacgggcccaggg

SEQ ID NO: 99148 - RNA, 76 nt, Homo sapiens
ccaggcaggccagagccgaaccaaagagcagcaggagacagaaacgccaagggaccacggaacagcgcaagaaaac

SEQ ID NO: 99149 - RNA, 56 nt, Homo sapiens
accggcgcaaggagagccacagaccggcccacaaaaagccgccaggagaaagaaag

SEQ ID NO: 99150 - RNA, 61 nt, Homo sapiens
cccaagaaagggagagaaaagcggaggacagaacgaccgcccggccagcccaccccccgac

SEQ ID NO: 99151 - RNA, 82 nt, Homo sapiens
caggagagcgacaaaccaaggaggccaagagaaaccaccaagagccaggaaggcaaaggccgagagagagccccagcaccag

SEQ ID NO: 99152 - RNA, 59 nt, Homo sapiens
ggcaacccacccaccacacaacaaagggaagcgagaaccaggaacgaagaacaaagggg

SEQ ID NO: 99153 - RNA, 59 nt, Homo sapiens
gaacgcaggcccgaagggccgggaggggcaacaagggcaccggcacggaccaccccaac

SEQ ID NO: 99154 - RNA, 60 nt, Homo sapiens
aaagagagcgaagcgggagagacccagacaagggagaaggcaccacccgggaaccacccg

SEQ ID NO: 99155 - RNA, 83 nt, Homo sapiens
cagagaccagcgagcaggcaggccgaagaaggagcacgcccccgcccccggagcgcccagggcgccgcccaaggcaggagcgg

SEQ ID NO: 99156 - RNA, 75 nt, Homo sapiens
cacacccccagggaccacaccccaccccagcccacaggacaagagcgcccaagcggacagccccacccgacacca

SEQ ID NO: 99157 - RNA, 80 nt, Homo sapiens
accgggggcgggggcgccagcccaccaagaagggccgagcacagcaagcaaccgcggcgagccgcacagggcaacacacg

SEQ ID NO: 99158 - RNA, 71 nt, Homo sapiens
cccagcagagcaaagccaggaacaccaccaccaggcaagggggaacaggcaaagggcagcaccgaccaccg

SEQ ID NO: 99159 - RNA, 73 nt, Homo sapiens
caagcaaaagacccacaggaccgaaaaccggaaaaccaagcaacgagacacacggaaaacgcacagagaacca

SEQ ID NO: 99160 - RNA, 75 nt, Homo sapiens
ggcccagagagaccccggagaggcaacaggcccgaaacgaaccaggaacgaagaggagacaagaagaagaccacc

SEQ ID NO: 99161 - RNA, 71 nt, Homo sapiens
aaaaggcgcaaccgaaagaagcgaaaccacaacacccaaaagcaaggaagaccacggacgaccgacggcac

SEQ ID NO: 99162 - RNA, 73 nt, Homo sapiens
agcgcggcggagaagccagaggaaaacgcaaaaccagaagcgcgccgacacggcccgggcagccaggaggcgg

SEQ ID NO: 99163 - RNA, 78 nt, Homo sapiens
accaaccaaaagacaccggacacgcagggcggacaggaggaaggcaaggaaggaggcacaggcgggcacagcacacgg

SEQ ID NO: 99164 - RNA, 74 nt, Homo sapiens
cacaacaacagaaacagcaccgcacccaccgccaacgcggggaaggcgccgcaggcaccaagaagaccaacaag

SEQ ID NO: 99165 - RNA, 69 nt, Homo sapiens
cggccaaacggccagacgccgacgcgaccagcagagacggggaagcacacaaaagaccgaccgagccgg

SEQ ID NO: 99166 - RNA, 54 nt, Homo sapiens
gcagcaggacaacgagccacggaggcggagagaggggccagaagagaccaagag

SEQ ID NO: 99167 - RNA, 66 nt, Homo sapiens
ggaaaaccgacacaacagagaaagccgcacaccccaccagagaaagggaaccaacggcgccacaaa

SEQ ID NO: 99168 - RNA, 68 nt, Homo sapiens
ggcaaaacaacagacacgcgacgaaacaggggaaggggaggagacagcccggccagggaggagaccac

SEQ ID NO: 99169 - RNA, 86 nt, Homo sapiens
ggaaggagcgagagcgcagacccgcagaagcccgggcgcgccaggcacagccaagagcggaccggcagcggccagcgcagcggccg

SEQ ID NO: 99170 - RNA, 68 nt, Homo sapiens
cccaccccagaaggaaggaaaccgagaggaaccggggcaggaaggccagaaagacaaagaccaaaaga

SEQ ID NO: 99171 - RNA, 57 nt, Homo sapiens
agcgagggcaccggggagcgaggcagagcacagacagagccaggccaggagaagggg

SEQ ID NO: 99172 - RNA, 67 nt, Homo sapiens
cccggcccgcccgcggccccgcgccggcccgaccaggccccgcagacccaacggccgcaaaggaacg

SEQ ID NO: 99173 - RNA, 76 nt, Homo sapiens
cccgacgcaacgcggagcgcaaggcgagggacgagaacgagggcaggaggaggaagcccccccacacacaaaaggg

SEQ ID NO: 99174 - RNA, 70 nt, Homo sapiens
agggcagaaaacccaccgagacggccacagacaacggagacaagacacgcaaaaacgagaaacaaggaag

SEQ ID NO: 99175 - RNA, 78 nt, Homo sapiens
cggccaaaccaagaaggcagacacaagagacagcagacaagccgccggaggaaggaaggacaagaggagcagcccgcg

SEQ ID NO: 99176 - RNA, 78 nt, Homo sapiens
ggcagggcagccacggcgccccgagcgccaacagggaagagacaacagcccagacccggaccgaggaacccaaaccca

SEQ ID NO: 99177 - RNA, 62 nt, Homo sapiens
cgccgggcgccccgggcgggcgagcacaggcacacacacaggagagaaggcgaggaagccca

SEQ ID NO: 99178 - RNA, 90 nt, Homo sapiens
ggcaccagaacaaacaaagggcgcaacacgagagaaacaggcggccaccaagcgcgaagcagaaagacaagaagcgaaggaaacgcgcag

SEQ ID NO: 99179 - RNA, 35 nt, Homo sapiens
accacggcggcgcacgcgaaacacggaaggagaag

SEQ ID NO: 99180 - RNA, 70 nt, Homo sapiens
caaggagccaaaaacaccaggacgcaagccagcaaggaaggacccaacaggcgcccagaacaacgccaag

SEQ ID NO: 99181 - RNA, 79 nt, Homo sapiens
gggaagcgcagacgggacacagcggggcaggagcgcccgcaccacaccccacggaaacacaaagaagacaccagaaggg

SEQ ID NO: 99182 - RNA, 90 nt, Homo sapiens
ccacccccagcaccaccccagccccgcgcccggcggggaaccaccaggccgaggacgagagcgccaagcggcaagcgccggacgagcacc

SEQ ID NO: 99183 - RNA, 76 nt, Homo sapiens
ggccagaggccacccacacaccaaggcagcacggaggacagaaacgggaagcgagaaagaacagaaacccaggagc

SEQ ID NO: 99184 - RNA, 41 nt, Homo sapiens
cgagcaccaacgcacccaccaggcgagcacacagagagggg

SEQ ID NO: 99185 - RNA, 77 nt, Homo sapiens
aacgagcaaagagcggacccagcaggccccacgccaagacaaaggggcccggaggccgaaccgagggaagcgcgaga

SEQ ID NO: 99186 - RNA, 78 nt, Homo sapiens
gcgagccggagagcgggccaccacgggacccaccgcccggcgccccagccgccccggcgggacaagggcgcaccgggg

SEQ ID NO: 99187 - RNA, 56 nt, Homo sapiens
gggaagagagagacgaaaccaaaaggagcaagaagggccaagggcagggagaaggg

SEQ ID NO: 99188 - RNA, 60 nt, Homo sapiens
ccgaccgcaacagaacggacccggagaggcaaaaaccaagggaaagaggagaggggcccc

SEQ ID NO: 99189 - RNA, 61 nt, Homo sapiens
gagaggaaccagagaccagagcggcgccggcagagagagccgagcaacagcgccagaacga

SEQ ID NO: 99190 - RNA, 76 nt, Homo sapiens
ggcgccggaaccagcgcagaaagacccgccccgcccgcagccgaggcccacgcagggcgaaccgaggcgggaggag

SEQ ID NO: 99191 - RNA, 39 nt, Homo sapiens
gggaccaaggccccaccccaccgcacaaacacgcagagg

SEQ ID NO: 99192 - RNA, 77 nt, Homo sapiens
gggagggaccgccgcccggcaaacacggaaccaccgggagaagcagaccgcaccaggcgggaccccgaaaaagccca

SEQ ID NO: 99193 - RNA, 85 nt, Homo sapiens
cacagcgcggcgcgagcccacgaagaggacgaccggagaacgcgaggcagagcgggagcgcgcagccaggaacacaagccagaaa

SEQ ID NO: 99194 - RNA, 71 nt, Homo sapiens
ccacaaagacccccgccacacagagcaacacaccaacccggcacgggggaggggagccagacaacaaaaag

SEQ ID NO: 99195 - RNA, 88 nt, Homo sapiens
gcgcggcgagcgagggggcggcggcgacagccaggcccggaagcgagggcggccgcgccggcccaggaaggagcgccccacccccgaa

SEQ ID NO: 99196 - RNA, 50 nt, Homo sapiens
gcaacccaaacgaggacaccccgggaaagagagggacgaaaccccagaca

SEQ ID NO: 99197 - RNA, 71 nt, Homo sapiens
acaacaggaaaaacccagccagggggacggaagcggcagcgggcagccggcccagcacagggagcagaacc

SEQ ID NO: 99198 - RNA, 61 nt, Homo sapiens
caacccagaccgcccacccagaagcccgggggagagcggccaccacaggccacaaggccag

SEQ ID NO: 99199 - RNA, 83 nt, Homo sapiens
gacgcgcaagggcgcggagccgcgggccggcgagcgcgcgccaccaggagcagcaccgaggccccccccaccccccgcccgcg

SEQ ID NO: 99200 - RNA, 81 nt, Homo sapiens
gccccaccgggacgggaacagccaagcagaagcccaccagaggcgaggggaggaggaagcgagcgaaaagaggcgggaaac

SEQ ID NO: 99201 - RNA, 81 nt, Homo sapiens
ccccccagagagccagaaagaaaagacccgaggaccgggaacgaaggggccccgaggaagcagaagccgagggacggggcg

SEQ ID NO: 99202 - RNA, 74 nt, Homo sapiens
ccggaccgccgccgggagcggaaacagcggcagccagagcacgggggagccggaccccaagaccaaaccggcag

SEQ ID NO: 99203 - RNA, 76 nt, Homo sapiens
cagcccagcggcagcagaaagagcagacaaacgagcgcaacccccgaaacggaacgagcgaaagacgagcgaggag

SEQ ID NO: 99204 - RNA, 80 nt, Homo sapiens
ggaccgccgacaccggagagaggggaaaaccaagacgagaagaggaaaaaacgcacagcaaacacaaagaacagagccca

SEQ ID NO: 99205 - RNA, 61 nt, Homo sapiens
ccagacccaacgagaggccaaaaaccggaccagaccagcccagccagaggacaaaacccag

SEQ ID NO: 99206 - RNA, 73 nt, Homo sapiens
ggagccgccggagcgagaaggaagagagaaggccacgcccgaccccaagcaacaacggggcagggacaggcgc

SEQ ID NO: 99207 - RNA, 81 nt, Homo sapiens
ggcgacaggggaacagacagaaggagcaggaaccaaagggaccaaaccacccaggacacggagcagcgggagcccagacgc

SEQ ID NO: 99208 - RNA, 88 nt, Homo sapiens
cggaggcggggcgcgggcgggaccggagagcagcgcaggaggaagaccgcaggaaggagcggaggcgcaggagaagcacaagaagcga

SEQ ID NO: 99209 - RNA, 80 nt, Homo sapiens
gcggcgagcagagggggcgcagccagcggaacacagcagggcagccgaaggagcagaacgggaagggcacaggaagaaag

SEQ ID NO: 99210 - RNA, 76 nt, Homo sapiens
aaccagaaggaacagcaccgacacgaaaacccggacccgcaccgcagcgaagaagacaagggaagccaagaagagg

SEQ ID NO: 99211 - RNA, 90 nt, Homo sapiens
cgccgcccccggcccgagcagcggcgcggcggcagagcgaaggagcggagccaccagccacgaaccgacggggaccccaagaggaaggaa

SEQ ID NO: 99212 - RNA, 80 nt, Homo sapiens
ccgccccacccccccgcccgggggcccccccccccccaccacagcacccccgcaggaagaagagagccaggcgaacgccg

SEQ ID NO: 99213 - RNA, 108 nt, Homo sapiens
gccaaagcccaaaccccaggccaagcaaccaccagcagcccccagagcggaacacaggcagccaaacgggccggcaggacaggagacagagcacaccggaaacaagaa

SEQ ID NO: 99214 - RNA, 78 nt, Homo sapiens
ccgcaagcggagccccacaacaccgcaggcgccaccaagaagcgacgggcgcccagcggccggggaggagcaggcggc

SEQ ID NO: 99215 - RNA, 82 nt, Homo sapiens
gagaagccgggcacggcggccgagcgcggcagagcggcgagggggcgcggcccggcccggccgaaaagaacaggaacagacg

SEQ ID NO: 99216 - RNA, 84 nt, Homo sapiens
gacaggccaaaccaccaagaggagaagacgcaaagaccaaccgaagcgcgggaagcagagcagcagcgcggaagcaagcagaac

SEQ ID NO: 99217 - RNA, 86 nt, Homo sapiens
ccggagccccggagggaagcgcccggggccggccgccgcgggaccgaggaaaagccgcaccagaccagagacaaggccccgaggga

SEQ ID NO: 99218 - RNA, 68 nt, Homo sapiens
aaccaaagaacaacgcaaagacagaagacagggagaaacaaggggggacggagaagggcacacacagg

SEQ ID NO: 99219 - RNA, 74 nt, Homo sapiens
ggaggggcccggggggaggaaaacagggcgaggacgggagaacagggcaggaaaagggccaccgcaccaggcgg

SEQ ID NO: 99220 - RNA, 108 nt, Homo sapiens
agaccaagaggaagagcaaggagaggcccagcaaacaaaggcaggaagagaaaaggcggacccagaacgccggaggacccggccaaaccacaggcacaaccacgcaca

SEQ ID NO: 99221 - RNA, 74 nt, Homo sapiens
caagacaccgcgggcggcacaggggagcacgcaacagaaaagaagacggcccaaagaccggagggccacggggc

SEQ ID NO: 99222 - RNA, 76 nt, Homo sapiens
cgcgcaggaacgcgcacgggaaccgaagagagccgggcacgccacaaggcgggcgacagagagaagcggccagggc

SEQ ID NO: 99223 - RNA, 58 nt, Homo sapiens
caccccacgaaggcggcaccaaggcgggcccaccggaggcaggggaggaagcgagcca

SEQ ID NO: 99224 - RNA, 39 nt, Homo sapiens
ccggcagccgccgccgggaagacagcgaacgggcacgac

SEQ ID NO: 99225 - RNA, 83 nt, Homo sapiens
gcgccgccccagcccgcgaacggcacgggcccagcagagggccaagggaagcaccaggccgcagaggacccgagcaggagggc

SEQ ID NO: 99226 - RNA, 64 nt, Homo sapiens
gaaagagcgggaaagacccaagcgggcaggaaggcgacaaaagaagcgaagccaggaacaagag

SEQ ID NO: 99227 - RNA, 38 nt, Homo sapiens
ggaccgggaagccgcaaccgaaggacgccaccacccac

SEQ ID NO: 99228 - RNA, 84 nt, Homo sapiens
ccacgccgccaccgcaggccgcccgcagccgcccagccggccgcagaagagcccggaacgccagagcggaaaggaagagaacgc

SEQ ID NO: 99229 - RNA, 79 nt, Homo sapiens
cacaaagaaagaagacccggccagccaccggaggggcagaggggaggagacacgaagcgacgcagagccagaagggagg

SEQ ID NO: 99230 - RNA, 68 nt, Homo sapiens
aagagcaggaacaggagagcaaacaaaggaccccagaaaggggaccccaaccaagagccccgggagag

SEQ ID NO: 99231 - RNA, 73 nt, Homo sapiens
cggaaccaaacccaagacacggagcagccgcaacagcgcaccgacacaagcccagaagccccaccccaaagaa

SEQ ID NO: 99232 - RNA, 75 nt, Homo sapiens
cgccccgacgaggacgaccaacaggcagcagcgggccccgccaccggcacaccgaaggcaacaagagccaccacg

SEQ ID NO: 99233 - RNA, 74 nt, Homo sapiens
cacccaacagacaacaacaagagacgggacacacacagggcagcggacgacgagaacgaggaggaaaacccaaa

SEQ ID NO: 99234 - RNA, 41 nt, Homo sapiens
aaacaacgcaggacagcaaaggcacagcaagcaacccggcc

SEQ ID NO: 99235 - RNA, 72 nt, Homo sapiens
aggaaccgacagaaccacaggagaaccccgcccaggaggcaaaaaggccaagagcagcacccaaaggccagg

SEQ ID NO: 99236 - RNA, 81 nt, Homo sapiens
gcgcggaacagcaggcccgagcccaccgcgccgggccccggacgccgcgcggaaaagaggaagagaaacaccaaggaacca

SEQ ID NO: 99237 - RNA, 90 nt, Homo sapiens
aacagggcagcgcgaccggccagcgccgcgacgggaggagcgccggaacgccgaggcccagagacccaaaggcaagggaacagccaaggg

SEQ ID NO: 99238 - RNA, 61 nt, Homo sapiens
aaaaagcggaaaaaaacaacggggaccaggcacagacaccacgaacagggaggaaagccag

SEQ ID NO: 99239 - RNA, 104 nt, Homo sapiens
agaaacgggccaacagccagaggacaagaaaggaggacagggcaggcaggccaggagacaagcccaagcacagccgagaagaccgaagaacaagcaaagcacag

SEQ ID NO: 99240 - RNA, 79 nt, Homo sapiens
accggggcccggggaaggcccgcgcccgccccagagcgagccaaggcagcaaggagacgacagccggagagcgggcccg

SEQ ID NO: 99241 - RNA, 37 nt, Homo sapiens
aagaccaagaccagggcgagcacacagagaggggaag

SEQ ID NO: 99242 - RNA, 78 nt, Homo sapiens
acaggccaggagggacaggaccggaggcgccagccaaccgcaaaaccaccggaggaacgaccaaaggagaaaacagcc

SEQ ID NO: 99243 - RNA, 80 nt, Homo sapiens
ccaaagaagcagaaagagcagaaaggagggggcgagaaggcgggaagccgaaggcagccacagacgagcaagaagacaaa

SEQ ID NO: 99244 - RNA, 73 nt, Homo sapiens
gcagaagcgcccaggaaaacccaggaaaaggggccacagacaagaagacacagaaagaggggagccacaggga

SEQ ID NO: 99245 - RNA, 80 nt, Homo sapiens
cagcgcgcagcccggaccagccaagccccaacggcccccgcgccgggcgcagcgccagggcccgcgaaccagaagaccca

SEQ ID NO: 99246 - RNA, 70 nt, Homo sapiens
gccgagagccgcccgggccagcggccgcgcacccccggccggaggcaccagcgcggagcccggcacgggc

SEQ ID NO: 99247 - RNA, 83 nt, Homo sapiens
ccgcccccagacggccagccgagcggccggacacagccaggagcaagaaggagaggaacgaccagaagccgccaggagagaac

SEQ ID NO: 99248 - RNA, 80 nt, Homo sapiens
ggggcgccaaaacgcccccaacccagcgcaaaggaagaggaagacaaagagagaagcggggaagaaagcaaaagcagagc

SEQ ID NO: 99249 - RNA, 85 nt, Homo sapiens
gccacggagagccgccggagagcccaggagcaggggagacagggccaagccgcccgccaaccggcagcgccgacgacaaaccagg

SEQ ID NO: 99250 - RNA, 75 nt, Homo sapiens
ccccgcccgacgcccggcgcacggggcgcacaccacggcccggcacggaggagaaaggccaggcgagaagacgag

SEQ ID NO: 99251 - RNA, 44 nt, Homo sapiens
ccgcgcagcagcgaccacggaaaagggaggaagcaccgaggaga

SEQ ID NO: 99252 - RNA, 79 nt, Homo sapiens
gagagaggagcagcacacgcaaggaggaagaagaccaaaaagcacgagaaccgaagaagacccaggaccacaacccaga

SEQ ID NO: 99253 - RNA, 63 nt, Homo sapiens
gcaggacgggggacagggagcccgaagagaaggccaagagaggccaacagaggaacaaggccc

SEQ ID NO: 99254 - RNA, 66 nt, Homo sapiens
aaaagacaagaggaagaagcgcggacccagaccaccagacaccagccccagaagcgcagccccggc

SEQ ID NO: 99255 - RNA, 52 nt, Homo sapiens
gaaaaggaccgagaacccgcagagcccagaggcccggaaggcgcaaaagggg

SEQ ID NO: 99256 - RNA, 71 nt, Homo sapiens
caacccagcgagagaaagaggccgcccagccccacacgggagcacaccagcaagaagacacccaccgaagc

SEQ ID NO: 99257 - RNA, 83 nt, Homo sapiens
gacagcacagaagaggccagagaacagccccggaggagacccacacgaccagcgccggaggacaccacaccgagcagagagca

SEQ ID NO: 99258 - RNA, 74 nt, Homo sapiens
ccggaacaaacgggggaggcacacggaccaacgggaaaacggacaaccccccaagcggaagaacaacaaagagg

SEQ ID NO: 99259 - RNA, 75 nt, Homo sapiens
gagacgacaaagcgggaccagagcaaggagaggaacggccaaaacggcagggacacacagcgcacagaagcccag

SEQ ID NO: 99260 - RNA, 66 nt, Homo sapiens
cgcaggcagacaaaagggccaaagaagggagagaggaaaacgcaaaaccagaagcgcgccgacacg

SEQ ID NO: 99261 - RNA, 79 nt, Homo sapiens
aacaccaacagacacgcgggagcagcggaagacaccaaggccagggagggccaccgcacggaagagaccggaccggggg

SEQ ID NO: 99262 - RNA, 67 nt, Homo sapiens
cgcaccgcaggcagacaaaagggccaaagaagggagagaggaagaaagaccagcagcacaccaggaa

SEQ ID NO: 99263 - RNA, 77 nt, Homo sapiens
cggagaaaaacagcgagacagacaagggaggcgaggacggacaaaaggaaacggacgggaggccagccagcagaagg

SEQ ID NO: 99264 - RNA, 80 nt, Homo sapiens
caggcgcaacaaggagaagagccaggaaacaggaggaagaacccaagccaaagcccaggacacgaaagaaagagccggag

SEQ ID NO: 99265 - RNA, 79 nt, Homo sapiens
aagacagaacagggccacagcagccaggcagcgggaccagaggagacgacaacgagggagccgcggaagaaggccggcc

SEQ ID NO: 99266 - RNA, 73 nt, Homo sapiens
gccgaccgagacgggcggagaggagaagaggagacaaccacaagacagaacccaggagggggacagacaccca

SEQ ID NO: 99267 - RNA, 67 nt, Homo sapiens
cacccagaggagcaacgggccgcaaggccaggcgcgcagaggcacccaacggcacagaccccacaca

SEQ ID NO: 99268 - RNA, 67 nt, Homo sapiens
ccgcggcccggcagggggaacgggaggggggccccaaccacggagccaggggaaccgcccaccacca

SEQ ID NO: 99269 - RNA, 85 nt, Homo sapiens
gccgcccgccccggcacacgcgcagccccggccccggcccgccggagaaacaggccaagaccggcccagacaggagggcggcagg

SEQ ID NO: 99270 - RNA, 62 nt, Homo sapiens
caagagccaccggaacaaggacaagaaaaccccaggacacagagcggggagcccgaagcaaa

SEQ ID NO: 99271 - RNA, 82 nt, Homo sapiens
gcgaccagacaggcggcgccaccgaacagacccggaaggacggcgaggccacgaggcggccccagcgcgggcgacaggccga

SEQ ID NO: 99272 - RNA, 62 nt, Homo sapiens
aacaacagggaaacgccaccaagagcacaacagaaagaccacccgggcccccaacagaaaga

SEQ ID NO: 99273 - RNA, 74 nt, Homo sapiens
ggaagcggaaaacaggaccagggagagaaagggagaaccaaaggggaggaacagacaagaaaaagggaagggag

SEQ ID NO: 99274 - RNA, 56 nt, Homo sapiens
aaagcagcacgcgaggaggaaaggcaccccaccaggagcagaaagagagacaccac

SEQ ID NO: 99275 - RNA, 68 nt, Homo sapiens
agcgccacacggccgcaccgcgcgagcacgggcggagcgaacggcccgcccgcggcccaggcagagga

SEQ ID NO: 99276 - RNA, 67 nt, Homo sapiens
gccccacacaaacccaccaacaaggagacccgggaggaccaagccgaggacaagaacccaagaaaca

SEQ ID NO: 99277 - RNA, 78 nt, Homo sapiens
ggcgacgcccgggcgcgcagaacaggcgcgcggcgacacccacccgggaagcggacacaggaaaacgagaagaggcag

SEQ ID NO: 99278 - RNA, 70 nt, Homo sapiens
cgaccggacgcccacgaccccagcaggggaagggacgaggaggggagccacgcccaaggaagaagaagca

SEQ ID NO: 99279 - RNA, 85 nt, Homo sapiens
cgccgcccagcgcgccgccgccgccgccgccgccgccgcgcacgccagggagccggacgacggcgagccccaacagaccgggagg

SEQ ID NO: 99280 - RNA, 61 nt, Homo sapiens
gaggccagggaggaagagcgaagagcgaccaggaggagcagagcccagcgccaaccggcag

SEQ ID NO: 99281 - RNA, 76 nt, Homo sapiens
gcaaccagcagaagcccaccagagagcgcggcgggagcgaggccgccgcgcaagaagggaccaaaacaaaacgaga

SEQ ID NO: 99282 - RNA, 78 nt, Homo sapiens
ggaacaggcacaccccacacaagcacgccaaggaagcgccccgcgacagcccccaggaagcgagaccgccccagcagg

SEQ ID NO: 99283 - RNA, 54 nt, Homo sapiens
ccccacgcggccagcgaaaacgcccaggcacggagaggaggaggagagagagac

SEQ ID NO: 99284 - RNA, 62 nt, Homo sapiens
acgcagccgcggcccggagccccggggcggcggacggccgcgggcagagcagacacaggaca

SEQ ID NO: 99285 - RNA, 106 nt, Homo sapiens
gaagcgagggcgaagcacgacacagaaggggaggggagggaaaggcccaggaaaaaggaaccccccccaaccgggaccaaacacaaccaaagccaacagcagaagg

SEQ ID NO: 99286 - RNA, 79 nt, Homo sapiens
agcaaaacaagacgagaaggaacagaaccaacaaagcaaggcaaagcagaaaagccccagagaaggacacgaggcggaa

SEQ ID NO: 99287 - RNA, 78 nt, Homo sapiens
gaaggcccggacacagcaaaccgggccacagccccgcgcagaaagccaaaggaaaccaaccacagcacgcaggcccgg

SEQ ID NO: 99288 - RNA, 77 nt, Homo sapiens
aacaaagaaaaccaaaacgcaacagaaacaacagagagggagagaccagaggcgcccccacgcgcggaaaggaaaac

SEQ ID NO: 99289 - RNA, 84 nt, Homo sapiens
gaggccgaggcaggcggacaccgagagacccggagcgcagagcacggggagcaggcacgcaggccaccccaggagcgcgggcgg

SEQ ID NO: 99290 - RNA, 76 nt, Homo sapiens
cccgcccgcaacccgccgcccaccaggcccgaggagcgacgagaaggaaccaccacccagaagggccagagaacga

SEQ ID NO: 99291 - RNA, 71 nt, Homo sapiens
ccccaaggccgacggagcagcacccgaacagccaagaacaggaaaacgcaacacaagggaaagagcacgac

SEQ ID NO: 99292 - RNA, 68 nt, Homo sapiens
aacgaaacaaagcacgcgggaaaccggccccagacacgccccggaaacgaaggcacaacagaacggaa

SEQ ID NO: 99293 - RNA, 33 nt, Homo sapiens
cgagcacaaaacgccggcggaggcaaggcaaac

SEQ ID NO: 99294 - RNA, 62 nt, Homo sapiens
caaaagggaccccaccgaccccgaccgcaaccggaccaccagacggcgccccaagaccaaaa

SEQ ID NO: 99295 - RNA, 83 nt, Homo sapiens
acgaggaggaagaggggccaaccggaccgcccccaacaaccaaagagccagaagcagcaggaccggcggaggagcgagagcag

SEQ ID NO: 99296 - RNA, 50 nt, Homo sapiens
ccgcagggacgaggccccaagggacacacaggaagacgaacacggaacgg

SEQ ID NO: 99297 - RNA, 74 nt, Homo sapiens
gaggacgagcaacagcgcaagccacaccagcggacagccaccaagaggccagaaggcagaacagcgacacgaac

SEQ ID NO: 99298 - RNA, 76 nt, Homo sapiens
ggagaggccgccaggcgacgggccaagggacagccggcggacaccccaccaggagacgcagggaaagcggagacac

SEQ ID NO: 99299 - RNA, 59 nt, Homo sapiens
gagagggaagggaaacaacgacggaggccacagcagaagggggaacaaacaaaagccca

SEQ ID NO: 99300 - RNA, 50 nt, Homo sapiens
cagccgaacccggggcgggggcccggccacccgcagaggcacacccagaa

SEQ ID NO: 99301 - RNA, 78 nt, Homo sapiens
acacgcggcaagcaagaaaacaggaagggagccccaaagggaggggagggagcgaagccccgggaagacgaagaagac

SEQ ID NO: 99302 - RNA, 74 nt, Homo sapiens
ggcagccagggcagagcgcagccggccccgacaacaccaaccaggccccagggcccgggcagggagcacaaagc

SEQ ID NO: 99303 - RNA, 82 nt, Homo sapiens
aaggcccaagaagcgaagaagagaaaaagaccggaccgcgaagcaaaagaagaggaggaggccaggcaggcaaaaggagcag

SEQ ID NO: 99304 - RNA, 69 nt, Homo sapiens
aaagcccaggaaccaaccgagacaaaaggcccaagaccaccgacggaccagaaccgaaagcgaacagca

SEQ ID NO: 99305 - RNA, 72 nt, Homo sapiens
acaggggacgcacaagcccggaacaacaccagggagagcacagaaggacagcaggaggacagaaggcggaga

SEQ ID NO: 99306 - RNA, 82 nt, Homo sapiens
caaaaaaccccaacaacagccccaggagccaaagcgccaggagcagagaggcgggccccaaagccgcagcagaccgcaggac

SEQ ID NO: 99307 - RNA, 78 nt, Homo sapiens
ggccggggcgggcagaaacgggacggcaggcccacacgggcgcccccgccgcccgaagcgggaccagcgacgacgcag

SEQ ID NO: 99308 - RNA, 78 nt, Homo sapiens
ccacccaaacgcggcacgggaggccgacgcccgccgcggccggggaacaggccacagccaggagcgcacacaggagcc

SEQ ID NO: 99309 - RNA, 76 nt, Homo sapiens
agccggccagccggggggcacgcccgcccgggccgggagagaagaagggcaggaccacggcacgaagagacccaga

SEQ ID NO: 99310 - RNA, 78 nt, Homo sapiens
gaggaggagacgggcaggacggcccggcagaagcagccgcgaggaagaaaagagaggagagacaaaagcgacagagag

SEQ ID NO: 99311 - RNA, 79 nt, Homo sapiens
gagaaaacacaagggccaagacccgcgcacagagaaaagcagcaggaagcagaccccgaggcggggagaaaagaacaac

SEQ ID NO: 99312 - RNA, 80 nt, Homo sapiens
gaaggccaaaacgaggaggggaggcaaaagcagaccggaaaacccaccggcaagaccacacccgaggggagcccaggaca

SEQ ID NO: 99313 - RNA, 58 nt, Homo sapiens
gcggcgaccagggacgcccccaggcccgcccaggcccaagagccccagccccacccca

SEQ ID NO: 99314 - RNA, 78 nt, Homo sapiens
accggcagaaggaaaacccaagaccagcaccagacagcgaaaaagaggacccaaaaaagagagaaaaggccaaagaga

SEQ ID NO: 99315 - RNA, 76 nt, Homo sapiens
ggaagaaggaggaaggaccgaaaacgggcaaggcggcaagagcgagcacaccagacaacggcaagcggagaagagc

SEQ ID NO: 99316 - RNA, 84 nt, Homo sapiens
gaagagcggagagcgccgaggacgacgagcgcagcgcggggccgcgagcggacgaaggcacgagaagagaagcccagagcaaaa

SEQ ID NO: 99317 - RNA, 82 nt, Homo sapiens
ccggaggccggaggaacgggcccgcaagcgcgccgacaggcaagaacggaagcacgggcggaggaaagcacaagcagagccc

SEQ ID NO: 99318 - RNA, 56 nt, Homo sapiens
caacacagaacgaagagaagaagcgagccaggcaaacgcagaaccaaccagcggag

SEQ ID NO: 99319 - RNA, 83 nt, Homo sapiens
ggcggcgccgggggccggggagcgccaggcccacggagacagaaccagcccccgggccgggggcccccagcaggacgaccagg

SEQ ID NO: 99320 - RNA, 84 nt, Homo sapiens
ccggaccggacagcaccaggaagcccggcaggaacgcaaggagggacaggacggaaggagcggaggaagacacaagagcgagcg

SEQ ID NO: 99321 - RNA, 50 nt, Homo sapiens
ggaagcaggaaaaacaaagaagacccagagcagcaaggcgaaccggcgcg

SEQ ID NO: 99322 - RNA, 75 nt, Homo sapiens
ccgaaccgccacccccaagagcgacccacgcagaggcgaagacggggagccacgaggacagagggccgcccagca

SEQ ID NO: 99323 - RNA, 77 nt, Homo sapiens
gcaggaaccacaagacacaccagcaccgagaaagggccagccaaagaagaaaaccagagcacagagcggacagacac

SEQ ID NO: 99324 - RNA, 45 nt, Homo sapiens
ccgggagcccaggaagcgcagacacaggcaagagccaagacggca

SEQ ID NO: 99325 - RNA, 80 nt, Homo sapiens
ccgagagccgcccgggccagcggccgcgcacccccggccggaggcaccagcaccccaagaagaagcggaagaggagccgc

SEQ ID NO: 99326 - RNA, 68 nt, Homo sapiens
aaaaaagcaaagaaagaagcaccgaagaagaaggagccccccgagagcaaaccagaaaaccagaagcc

SEQ ID NO: 99327 - RNA, 67 nt, Homo sapiens
cgaaggaacccaaacccacaaccccacgcagagggggacgaccaccacacgcagaaggacggcacga

SEQ ID NO: 99328 - RNA, 37 nt, Homo sapiens
ccgaaagcgggaacagggcgcgagagagaaggggagg

SEQ ID NO: 99329 - RNA, 81 nt, Homo sapiens
cgagagcccacaggcccccacagaacaccagcaggaaaaaagagcggcagaaggccaaacggccgagcaggcgagcgaaga

SEQ ID NO: 99330 - RNA, 73 nt, Homo sapiens
gaagccaggagccaccaacaccaaaaagcggagaagcggaggagaccaaggaggccaccaccacagaaggagc

SEQ ID NO: 99331 - RNA, 71 nt, Homo sapiens
accccggggcgaacagcaagaagaggacgggcaccgcagacccgagacgagcgagaccacgggaacagaga

SEQ ID NO: 99332 - RNA, 58 nt, Homo sapiens
gacaaccaggcaagcggaagaaccgaacacacaaaggggacaccaagaacgaagcacc

SEQ ID NO: 99333 - RNA, 84 nt, Homo sapiens
aggaggagcagcagaggcgggaggccaagcggaaagaagagcaggaggcagccgaggagagcagagcgcaggggcgagaacaag

SEQ ID NO: 99334 - RNA, 57 nt, Homo sapiens
cagcggggacgcgaggacccgggcgggccccacccggagcgcaccccggaagccaac

SEQ ID NO: 99335 - RNA, 74 nt, Homo sapiens
ccgcgagcccgaggccaggcgccggccggcgcgaagacgcgggggccgccccccgggaagccggagcgagaaca

SEQ ID NO: 99336 - RNA, 34 nt, Homo sapiens
gagccgccgacggaagagacacagacggaaggga

SEQ ID NO: 99337 - RNA, 56 nt, Homo sapiens
aaggaccaagaaccagagaaagacgaccgccaaccagggagaacacagagaaaaac

SEQ ID NO: 99338 - RNA, 67 nt, Homo sapiens
caacccaaaagccacggacacacggcaggaaacacgaagagagcgccagcagacggcaccaaacggc

SEQ ID NO: 99339 - RNA, 76 nt, Homo sapiens
cgcaaaccaccccaaaccaccagcgaagaaggcaacagagagcaggaaagaagaacagcgggagaggcaggccaag

SEQ ID NO: 99340 - RNA, 58 nt, Homo sapiens
cccggcagcgcaaacgggcgcgacccaaccagcagaaacccacagacaaagggaagaa

SEQ ID NO: 99341 - RNA, 105 nt, Homo sapiens
agcccgcgccccacgcacgccggcgcccaaagagaccagcgccaccgacccgaaagacagaaccagcacagcaaaaaaggcagcgcaccgaccccaacgaacaca

SEQ ID NO: 99342 - RNA, 79 nt, Homo sapiens
aaccccccgggcgcccggagaccgcggggaaagaaggacaaaagaagaccggaaaagcagaaagagaggcagcagcagc

SEQ ID NO: 99343 - RNA, 54 nt, Homo sapiens
gccacccgcccacgccacaaagaaccccgaacaggcccaagggccggcagagag

SEQ ID NO: 99344 - RNA, 81 nt, Homo sapiens
ggacaccggcggggcgcgggccgcacccgcgcgggaagcccgcagccgagcacagagcccagccgaccgaaagccaggcca

SEQ ID NO: 99345 - RNA, 68 nt, Homo sapiens
aagagggagaacaaaacagaacaacggcagaaaaggcccaacacgcacaccggaaacacacggaagca

SEQ ID NO: 99346 - RNA, 74 nt, Homo sapiens
ccgagggcagcggcaaacgcagcagaagcccacggcgggaggcgccccgcgccagcacgaggcaaacacagggc

SEQ ID NO: 99347 - RNA, 80 nt, Homo sapiens
gcagaccgacccgaacaaggccaacaccagcaggccaaaacagaagaggcaaagcccagccacagcagcagcccagcagc

SEQ ID NO: 99348 - RNA, 87 nt, Homo sapiens
gcggcggcgcccaggcacccggcccgggcacaaagagaaggcgagcgcaggcccagcggccgccccagcacgaagcgcaggcgcagg

SEQ ID NO: 99349 - RNA, 65 nt, Homo sapiens
caccaacgagcggggaggggggcgaaaccgagcgcggggcagagaaacaccccgggaccccaccc

SEQ ID NO: 99350 - RNA, 79 nt, Homo sapiens
cggccgggccgcccggcggcaggcaggaaagcccacgccaggaggcaggcgccaccgggcgcacaacaaaggcgccccc

SEQ ID NO: 99351 - RNA, 81 nt, Homo sapiens
cccagaccagcccgcaagcaccccaccacagggcaccacaggaggcagggaggacagcacgcgcaagagggacggggcggc

SEQ ID NO: 99352 - RNA, 85 nt, Homo sapiens
aagccaagcgacagcagaaaagcgagcccaagagacacaggcagaagaagaccgcaaggaagaagagggacaggcagagcaggcc

SEQ ID NO: 99353 - RNA, 117 nt, Homo sapiens
accagcagaccaccggagccacccaggaaagaggagagacccgcagcaaaccgaggaagaggaaagggccaaccccggaagagaaggggaaagcagccaggccaagacgagaggaac

SEQ ID NO: 99354 - RNA, 76 nt, Homo sapiens
cccaacaggaccagaacagagaagaaagcagggaagaccaaaagcgaaacggagcgccagccaggaaagcgagcgg

SEQ ID NO: 99355 - RNA, 80 nt, Homo sapiens
ccacagcaccccagcacccaggcaaaagggaaagcaaggggaagggcccaagaagacaccccaccagaaaccgaacgaca

SEQ ID NO: 99356 - RNA, 83 nt, Homo sapiens
cgaagccaaaaacgaagaagaggggaaagcccacccagaccccccaggccgggccagggagcgcggccacacccgaacggacc

SEQ ID NO: 99357 - RNA, 93 nt, Homo sapiens
aaaagcaacaaagagggacgaacgacaccgggccccccccggcgaggacccacgcgcagcccaagaagacaccgacgaggagcagccaccgcg

SEQ ID NO: 99358 - RNA, 65 nt, Homo sapiens
aagaggccggagagaagagacagagacaggggccaaacccacagaacaaccgccagggaacagca

SEQ ID NO: 99359 - RNA, 59 nt, Homo sapiens
agaacgggaggcgcagaaagagcgggacgggcggaggagcgcagaaggagcgcggacga

SEQ ID NO: 99360 - RNA, 77 nt, Homo sapiens
gccccgcggcccacacccccaggcccccaggacgaccagggccggggccaggacgcacaaggaccggcacggcagaa

SEQ ID NO: 99361 - RNA, 75 nt, Homo sapiens
cagaagaaaagcgagaaccagcagcagcaccaaaaccccaaggagaacaagcggagaaaacgaagaccagaacaa

SEQ ID NO: 99362 - RNA, 69 nt, Homo sapiens
caagcgggagaacacagaccagaaaaaacaaacacacaaacagaggacccaggggaacaaacaagaggg

SEQ ID NO: 99363 - RNA, 74 nt, Homo sapiens
gggagaagcagcccaccacaaagcgcccgcgaggcgcaacaaaaagggacagacaggaggccaacagaaggaca

SEQ ID NO: 99364 - RNA, 82 nt, Homo sapiens
gcagaccagcaggaggacaaagccaggccagcgcgacggggaagaccaggcacagcaggacgcggccggcccggcgacacca

SEQ ID NO: 99365 - RNA, 79 nt, Homo sapiens
ggcgcccccaagggggggaacagagcaagaggcaacgcagaagaagaccgaccgaaacgcgcacaggagaccgggcacc

SEQ ID NO: 99366 - RNA, 75 nt, Homo sapiens
cggaggagaaaagcaaaaaaagccggcaccaggagacaaagccacaaaaacaccagaaaaaccaagcagaaaagg

SEQ ID NO: 99367 - RNA, 53 nt, Homo sapiens
ccacacccgccacggaccccgaaggagacaggagcgcgaaaggggaacccaca

SEQ ID NO: 99368 - RNA, 81 nt, Homo sapiens
agagacaggaggcagcagacggacaccaggaaccccacccagaagaaagaaaagcggcgcaccgggcaccggccaggcgcc

SEQ ID NO: 99369 - RNA, 68 nt, Homo sapiens
gagcaacgacacaaggagagggagaacaaaacagaagaaaggagaaacgaaacaaaaccaacccaaag

SEQ ID NO: 99370 - RNA, 78 nt, Homo sapiens
ggggcaagagcgggggcgggaccccgccgcggcgggaggccaccaggagagaacgccgcgccgcgcgacaacggcccg

SEQ ID NO: 99371 - RNA, 77 nt, Homo sapiens
agaaagagaaggagaagaaagagcgaaaacggaagccgcgcacaaaagaggagaaaccccaaaaccagcacagaagg

SEQ ID NO: 99372 - RNA, 77 nt, Homo sapiens
aaaacaaaacaaacaggagccggacagacccagacggaacaagaaccacgaaggagggcggcggaggagccaagagc

SEQ ID NO: 99373 - RNA, 63 nt, Homo sapiens
gccagacacggcaaaacaggacggcgaacacgaccagagagcacaaagacaggggcggaaagc

SEQ ID NO: 99374 - RNA, 80 nt, Homo sapiens
ggggaaacaaacgaggacagaagaggagaacaggaaacagcaacaaaagagggcaccagaagaaaaacacagggaccccc

SEQ ID NO: 99375 - RNA, 67 nt, Homo sapiens
cagcacagcacccacaaagcaacggacaggaagggaaacgaaaaaggccaggcgacagaaaaagaaa

SEQ ID NO: 99376 - RNA, 75 nt, Homo sapiens
gcgcccccgcagcccgcacccacccacgacaggacggacccggcgccgcgcgggaggccagccacgccgcagcca

SEQ ID NO: 99377 - RNA, 55 nt, Homo sapiens
agccaacggaccaccacgaaaccaaggagcggacaaaccggcgaccacacacggg

SEQ ID NO: 99378 - RNA, 76 nt, Homo sapiens
gagaacacagaaaccggccccagggaccgacacaagaagcagccagaacagacgggaaaagaaacccaccacaaaa

SEQ ID NO: 99379 - RNA, 73 nt, Homo sapiens
ccagccacaaaggaacacagaagaaccccaagcccagcacgacagagacccggaaagcgagcagcaaagaccc

SEQ ID NO: 99380 - RNA, 82 nt, Homo sapiens
ggacacaagggacgcagaagcgggcccccgccccagcaggacaaacgcacccggcgaaggagaaacgaagacagaccgagaa

SEQ ID NO: 99381 - RNA, 81 nt, Homo sapiens
ggggcccggagagggggaagggcccaaagccagaaggaggagcacggcgaaccgcaaacagaagagggagccagaagaaca

SEQ ID NO: 99382 - RNA, 79 nt, Homo sapiens
gaccaggggcgagcagcgaacgaggaagcagcgaacgagaaccaaggcggacgcggcgagaaggcccccgcgggcgcac

SEQ ID NO: 99383 - RNA, 76 nt, Homo sapiens
gaggcgagagcggcagcagcaccagcccaagagaagcccagaaaacaacccggccaagggcgaggggccgaccagc

SEQ ID NO: 99384 - RNA, 77 nt, Homo sapiens
cgcccccaccggacgaggccccccaaccaggcaagccggcaagaagccaacggagaaccaaggccaagaccagaacc

SEQ ID NO: 99385 - RNA, 80 nt, Homo sapiens
cccccagccagggaaccccagaaacagacaaggaggacccgcccggagacagaggaggaaaggcagcagaagccgcagcc

SEQ ID NO: 99386 - RNA, 72 nt, Homo sapiens
gcacgggagaaaacccggaaagggaccgagcagagaaccaacggagaacagcccaccgagaaacacaaagca

SEQ ID NO: 99387 - RNA, 80 nt, Homo sapiens
gcggcacaggcaggcggaggggacggcaggcgaggcggaacaggccgggcaccaaggcgcaggaggaaggcagagaaaaa

SEQ ID NO: 99388 - RNA, 75 nt, Homo sapiens
gggacggccaggaacggggcgggccaagcagagaaaagaccacagcgccaaagagaagagaaggagccaagacac

SEQ ID NO: 99389 - RNA, 72 nt, Homo sapiens
gcagccacgcagaagcgcggcagggagcgcgggggcccgcgcagcagcgaccacggcagaaagaaacgagcc

SEQ ID NO: 99390 - RNA, 75 nt, Homo sapiens
agggacaaggacggcaccaaccagcaaaacgccggaagaaccggacaccccaacccccggagcaagaccaggacc

SEQ ID NO: 99391 - RNA, 53 nt, Homo sapiens
aaaccacacaacagccaggccagaagagcggagccagaggagcggcaagagac

SEQ ID NO: 99392 - RNA, 77 nt, Homo sapiens
ccaagcccgaggcccagaggaggagacaggccgaacggcgaagcccgcgcggaaaggacccccggaccaccaaacgg

SEQ ID NO: 99393 - RNA, 57 nt, Homo sapiens
gcggggcagcgcgagccgggaagcgcccaccccacgggaggccgggacgggacaacg

SEQ ID NO: 99394 - RNA, 40 nt, Homo sapiens
agggggcggcgccaggacaggagcgaagcaacgggagagc

SEQ ID NO: 99395 - RNA, 65 nt, Homo sapiens
acccaagccagagcccagggccagcagcagagagacagggaagaagggcaccaggagggccgaaa

SEQ ID NO: 99396 - RNA, 86 nt, Homo sapiens
cgagacccggacagggcaggaaacagagcggagagcagaaccaagccccggccaacgagggcagagacaagcgagcgccaagcggc

SEQ ID NO: 99397 - RNA, 85 nt, Homo sapiens
gggccccaaacgagagggcggaggacaagccgcggagcagggggaggggcacagcacggacgacggaaccacccggcaccccaac

SEQ ID NO: 99398 - RNA, 90 nt, Homo sapiens
ggccgaagagaaccgccgcccagacccgacaccaaagcacagcaaacgacaaggcaggagggggaaaaacgcgaagaggcacacacccgc

SEQ ID NO: 99399 - RNA, 56 nt, Homo sapiens
ccacgggagaagggcagcacggcaggacaagccacacaagaaggagaaaaaaaaga

SEQ ID NO: 99400 - RNA, 77 nt, Homo sapiens
cgcaccagccgcaacaaaagcagagcaagcagcaggaggagacgccaaagaccagacacaaaagcacaagggaaaaa

SEQ ID NO: 99401 - RNA, 84 nt, Homo sapiens
ggagacccaaggaggggagaagagaagaagacaaggacaagaagacgcagaacggagagcccagcagcccggcaagcagacagc

SEQ ID NO: 99402 - RNA, 65 nt, Homo sapiens
agagcaaggaggccccagcggaccgaacagacaacggcaagcggagaagagcaaggccgaaccga

SEQ ID NO: 99403 - RNA, 75 nt, Homo sapiens
cccaaccacaccaggcaagggcaaaccagccaccagacccagggcccagcgccggccaccgaccgcaccccagcc

SEQ ID NO: 99404 - RNA, 50 nt, Homo sapiens
gcagggcgcccccgaacgaaaccagaacagaaagggacgggacagcaaaa

SEQ ID NO: 99405 - RNA, 76 nt, Homo sapiens
gcgacaaggcagcacacaacccgaaggcgaacacagaggaaaccgcaccgcccggagcagcaagagccgcgagggg

SEQ ID NO: 99406 - RNA, 70 nt, Homo sapiens
agggaagacagcgagcaagacccagacggaggagcaaagaccagcaaggcaccaacagaaaaacaacgcc

SEQ ID NO: 99407 - RNA, 83 nt, Homo sapiens
cggcaaggccacagaccacaacaccaggaggaccagcggacgacccccgggacagccgagaaggaaaaagacggggcaaaggg

SEQ ID NO: 99408 - RNA, 90 nt, Homo sapiens
gaccggagacgaggggggagaaccagccgacggagcaggcagcagcccaggaaccagcagcacaaacacgggggcaacaggaacagccaa

SEQ ID NO: 99409 - RNA, 52 nt, Homo sapiens
cagcgacagaagccagcacaccaccacaacagggggcagcggcaagcagggg

SEQ ID NO: 99410 - RNA, 80 nt, Homo sapiens
cggcagcaaagagggaacagcccaccgggggacggcacggcaggcggacgcccggggccccccggaccacgaggagcacc

SEQ ID NO: 99411 - RNA, 83 nt, Homo sapiens
cgaggagaggagcgcaacagcagcaccagggaaaccgaggaaggcagggaccggaaagaacaaaggcccaccggaagagcggc

SEQ ID NO: 99412 - RNA, 43 nt, Homo sapiens
aaagaaagcgggacagcaacaggacacagaacagagaagaagc

SEQ ID NO: 99413 - RNA, 59 nt, Homo sapiens
cgccacaggggaaagaagcagagaccccaaggcgagcccggaacagcagcaaaacggga

SEQ ID NO: 99414 - RNA, 65 nt, Homo sapiens
cagagccccaggacaaacaaggagacggggccagggagaaaggaaggccaggagcaaacagaagg

SEQ ID NO: 99415 - RNA, 81 nt, Homo sapiens
caagagaggcaaaggaagaacaacagaggaccccaggccaggcaccaggaggacaaacgcaacaccagacacgaggggaac

SEQ ID NO: 99416 - RNA, 67 nt, Homo sapiens
aggcgggccgaagcaacaagggggagacagccaagaaagacaccaggagggcaaaaaggccaagccc

SEQ ID NO: 99417 - RNA, 79 nt, Homo sapiens
caggaaacaagaaacaccaacacaaaaaaaaccaacagccccccagaccccaccccggacagaagcaggccaaccacgc

SEQ ID NO: 99418 - RNA, 80 nt, Homo sapiens
cgaccagcgcggacagccagagacgcagggcccgcgcgcggaggccggcccggagggagaacaccgacggagggaggcgc

SEQ ID NO: 99419 - RNA, 38 nt, Homo sapiens
agcagagggagagccaggaacggaaggaaaaggacagg

SEQ ID NO: 99420 - RNA, 63 nt, Homo sapiens
cgggggagagggaccagggaagggggcagagacgaaccggccgcgacacccggagaagaggag

SEQ ID NO: 99421 - RNA, 79 nt, Homo sapiens
cggacgggaggggcaagccagccaccgggaccccaggcggcaggccgaggcgggcggacgaaccgcagcagacagggag

SEQ ID NO: 99422 - RNA, 83 nt, Homo sapiens
ccggaggaggaagcgccacggccgcacccgcgcggcaccagccaaaacggacaagccaaggcacgagccaaagaaacaaacac

SEQ ID NO: 99423 - RNA, 64 nt, Homo sapiens
gaaaacggaacacggcccccccgggggcgagaagaaacggacggcccccgcgccccgccgcgcg

SEQ ID NO: 99424 - RNA, 80 nt, Homo sapiens
caggggccaggcgaagcacgagcagaccggcccgaccgcccacagacccaaacaaagaggaaccccccaagagcccaaca

SEQ ID NO: 99425 - RNA, 129 nt, Homo sapiens
ccaacggcggcggcagccgcggcccgcgagagggaaaaggacgccgcggccccaggcgcgcggagagcaggccagaggcacggacgaccccggagagagcgggcgagcagaaacccggaaggcagaaag

SEQ ID NO: 99426 - RNA, 111 nt, Homo sapiens
gcggccgccgacacgccgcccggcgccagggagaggaaacagcagggacggaaagaggcacccccgcccccgagagccgggaggaggagcgaccgagggcccggggggcgg

SEQ ID NO: 99427 - RNA, 82 nt, Homo sapiens
cagagcgcacggcgacgccccaggggaaaacccccgggaccagggccaggggagagcaagaaacagggaaaccagcccgggg

SEQ ID NO: 99428 - RNA, 81 nt, Homo sapiens
ccaaaaccaggccccaaggccggaagaagggagagcagaagccgcgaaaaaggggggccgagaacgcagaacgcccccaga

SEQ ID NO: 99429 - RNA, 88 nt, Homo sapiens
gcccggcggcgaggaaagcaggaggaggggcggcggcgggaagaagcgccacagcagccaaacggggacgcccagagagccgaagaag

SEQ ID NO: 99430 - RNA, 81 nt, Homo sapiens
agaagcgaggggggagggggaagcgggaaacccacaggaggcaaccacacagagggagagaaggcgcgcaggagagcgcag

SEQ ID NO: 99431 - RNA, 79 nt, Homo sapiens
gaaacaggaggaagaacccaagccaaagcccaggaccaacacccagaaaaaagaaaaaaacagaagcggacccagaggc

SEQ ID NO: 99432 - RNA, 88 nt, Homo sapiens
cacgacccggagcacccgaccccgagcccaacgcagccaggcaagaagacccggagcacacaggaaaagaaagcgggaagaccgcccc

SEQ ID NO: 99433 - RNA, 74 nt, Homo sapiens
aagaagcagagccgggaaaagagccggaaaccgagaaaagcccaagacccagcgcccgcggggagcccagacac

SEQ ID NO: 99434 - RNA, 125 nt, Homo sapiens
aaacaaagcaacagcacaagaacaacaggcccagcaaagcaccacggcaaaaccgagaagccaggaagagggacaaggcaggaaggccgcccgggccgccccagcgggccaccggcgccgcagga

SEQ ID NO: 99435 - RNA, 84 nt, Homo sapiens
ggaggcaggcgcggcagacggcgacagggcggcggcgccaggcagggcgcagagaaaccaggcggggaacaagccagcagccca

SEQ ID NO: 99436 - RNA, 41 nt, Homo sapiens
gacagagaagaagaccccgagggccagaacgaagcacaaca

SEQ ID NO: 99437 - RNA, 82 nt, Homo sapiens
cccccaaggagagggaagaagccaggcagaagcagacccggccggccagcgcaccaggcaagaaaccagacggagacgggag

SEQ ID NO: 99438 - RNA, 81 nt, Homo sapiens
ccggcgaggagccgcagacccagaggccaaacacacaggaacgccagaccccagccgagggaggcaacagcaaagggacag

SEQ ID NO: 99439 - RNA, 82 nt, Homo sapiens
gcccgccgccgcccgagacgggcccaggaggcccgggcgggcgcaaggcacgacgaggggcagccaaccggaggcccacggc

SEQ ID NO: 99440 - RNA, 83 nt, Homo sapiens
aggagggacaggaccggaggcgccagccaaccggagaagcagacacggccaacacgcgccagcagggggccccaggacccagc

SEQ ID NO: 99441 - RNA, 64 nt, Homo sapiens
ggcagcgcacggaggagcggcgggccagacagagagggcagagcgaacccccccacgcagaggg

SEQ ID NO: 99442 - RNA, 77 nt, Homo sapiens
acagaaccgaccccccgggaaacaagagacgacgggaaggacagggcagaccgccagcagcacagcaagccacagag

SEQ ID NO: 99443 - RNA, 59 nt, Homo sapiens
caggacgcgccgcgccccaagggcggagaacggaaaagcaccaggaagcagagaggacc

SEQ ID NO: 99444 - RNA, 81 nt, Homo sapiens
gcgaaaacagaccgcgagcccagagagcccgcggccccaaaaagcggcgcaagacggagggcgggagaaggagcggccacg

SEQ ID NO: 99445 - RNA, 34 nt, Homo sapiens
ccaacagacaccaggaaggcagaagacagccaca

SEQ ID NO: 99446 - RNA, 71 nt, Homo sapiens
caaaccacgaaggccaagagaggccaccgagcagcgaaaagagcagggaaagacggccgagcaaagcaaca

SEQ ID NO: 99447 - RNA, 75 nt, Homo sapiens
aaagcacaagccaaaagggggacaggacggcacacaacaaccgccgacggagacaagccagggaccagaacacgg

SEQ ID NO: 99448 - RNA, 53 nt, Homo sapiens
aacccggaaacggggccggcaggccgggacgcggagcggaagcgacagcccgg

SEQ ID NO: 99449 - RNA, 68 nt, Homo sapiens
accaggccaggaaaaaccccaggcgggggaggaggaggggacgaggcagaaacgcacgaagccggaag

SEQ ID NO: 99450 - RNA, 75 nt, Homo sapiens
acaccgcccgcagggaggagagaagacaggagaggccaaagagaagccaccgaaacgagggagagggaggccgca

SEQ ID NO: 99451 - RNA, 73 nt, Homo sapiens
ggacagaagcagaggagcgccccgcgcaagagacagacacagaccgagggcaaacgaggcccagggccagaac

SEQ ID NO: 99452 - RNA, 76 nt, Homo sapiens
cgcgaacgcgagcacgcgcggaaacccaaagggcaccaggcgcaccggacccacaaggacaaaaacggcaaaagac

SEQ ID NO: 99453 - RNA, 63 nt, Homo sapiens
aaggccaagcaaggggcacgcaaaaaaaccaagggaaaagagacaagaccgagacacaaaaaa

SEQ ID NO: 99454 - RNA, 83 nt, Homo sapiens
gggccgcgcggagccggagggcgggaggaacagacacgcggagcgcccagagccgagagacacaagagccaagcaacagaaca

SEQ ID NO: 99455 - RNA, 77 nt, Homo sapiens
caccggcggcggcgcccccagccggagccccagacaacccggacggccggccaaaccacagagacaggcagcgagaa

SEQ ID NO: 99456 - RNA, 66 nt, Homo sapiens
cagcaccagaagcccaggcaggaaccaccaccacagacccagacagccggggaggccggccaccga

SEQ ID NO: 99457 - RNA, 61 nt, Homo sapiens
gaagaccgggcgccagggccgccgccccgcccggagcacaacagggagaagacagcaagac

SEQ ID NO: 99458 - RNA, 64 nt, Homo sapiens
cggaccagcccggagggaacagcagcccagagggaccacagaaaggagaaggaccaagaaccag

SEQ ID NO: 99459 - RNA, 70 nt, Homo sapiens
cccaagagggacacacagcagaggagagcaagcaagccgaagaggccccaggaccggcgaggcccccccc

SEQ ID NO: 99460 - RNA, 80 nt, Homo sapiens
cccgggaaaggaagcgcacaggaagccggaaacgcgcggaaaaggaacagaagaggaaccgaaacccaagaaaaaccacc

SEQ ID NO: 99461 - RNA, 77 nt, Homo sapiens
caccgggggagcgggagcgcggaaagcccacaagagagggaaggagaaaggcagacgagggacagccacggccacga

SEQ ID NO: 99462 - RNA, 71 nt, Homo sapiens
aagcccccaaagagagaaccggagagcacccaacaggaccaagaaaggcccagggaccaaagcccggacaa

SEQ ID NO: 99463 - RNA, 78 nt, Homo sapiens
caccacaaagcgcccgcgaggcgcaacaaaaaggaggggccaggccacgcggggccggccggccagggcccaccgcgc

SEQ ID NO: 99464 - RNA, 69 nt, Homo sapiens
cccgcgccgccgaccccccggcgccgcgccggcggcggcggggccacgcaggggccggcggggcgcgaa

SEQ ID NO: 99465 - RNA, 55 nt, Homo sapiens
agccacagcacaacacgaagaacaagcagccagagacgaggacgcgcacaggaaa

SEQ ID NO: 99466 - RNA, 39 nt, Homo sapiens
ggaagccggagcagggaagagaaacgggagacgagagag

SEQ ID NO: 99467 - RNA, 89 nt, Homo sapiens
ccggaggcggcgggacagagcgccgcgaccccagcgggcccggggaggcaccgacgaggaggaggagcaacgggggaagccccgaggaa

SEQ ID NO: 99468 - RNA, 84 nt, Homo sapiens
gcccgcgacacacgaagcgggaggcaaaggcacaagcgccccagaggacacacgccaaggcagcgcccggaccacaggccaagc

SEQ ID NO: 99469 - RNA, 69 nt, Homo sapiens
ccagaaagcaggggaccacagcgccaccccaagcaccggcacagcaaaagaagggaaagaggaaaaccc

SEQ ID NO: 99470 - RNA, 79 nt, Homo sapiens
ggaacgacgcggcgcgcgcggacgaagagccccccccccaacaccgcgacacgcagagagcacaggagcacgggagcag

SEQ ID NO: 99471 - RNA, 74 nt, Homo sapiens
agaacccaaagacgggccccgaggggggccaccggcccaagcggaggcagggcacaaccgcccacgcaaccgcc

SEQ ID NO: 99472 - RNA, 72 nt, Homo sapiens
aagaaaggccagaggcccaagcccaaaggaggagcgaagccaagaaaagaggaacaacgccagagcaagcca

SEQ ID NO: 99473 - RNA, 64 nt, Homo sapiens
cagcaagcacagagagaccaccacaaaggcggcgacggcggcgcgaggaccgaccgggcccgcg

SEQ ID NO: 99474 - RNA, 80 nt, Homo sapiens
cgccgggcccggaaagcgccgcccagcagccgcaggcaagaaaaccgcccacgaaggacaggaagccgaccaagccaagc

SEQ ID NO: 99475 - RNA, 71 nt, Homo sapiens
gaacaggagcaacccaggacaccaccagcgcccaccccagacagcacagagggccaagccagaacagggga

SEQ ID NO: 99476 - RNA, 71 nt, Homo sapiens
ggagagggccggaccgagcggccggggagaaagaagagagaccagaaacgagaggagaagaaaccagccag

SEQ ID NO: 99477 - RNA, 59 nt, Homo sapiens
ccagcgacaagaaggaccagagaaaaggcacagaacaagcaagcggccgaccacagggg

SEQ ID NO: 99478 - RNA, 82 nt, Homo sapiens
gcgggagagcgaaccccgggacacgcaggaacggcccagcacaagaccgcgacagagagcaagcgagacacgcccgacggcc

SEQ ID NO: 99479 - RNA, 96 nt, Homo sapiens
ccaccacgccccggcgagcagggagcggagaccagcaccaccagcaggcacagggcgaaaccaagaggagggaagcaggcagacgcgaggccggcc

SEQ ID NO: 99480 - RNA, 70 nt, Homo sapiens
aaagcaaacaaaaaaaggccaaggagagagaagaagaccagacggacagcgaggacagacagcgcaggac

SEQ ID NO: 99481 - RNA, 81 nt, Homo sapiens
gccgccacagcggccgagcccccgaggcaggaccgccaagacgcacccccccccccggcggagccccgaaggagcgcaggc

SEQ ID NO: 99482 - RNA, 69 nt, Homo sapiens
ggagcgggggagcggcgaaggagccgggagaagacaggcggccaaacagcaccagagaggagcgagagg

SEQ ID NO: 99483 - RNA, 80 nt, Homo sapiens
acccagaagagcggaccagggcgcgccagcaccgccaccagagcgcccgcgcgggaccccaggaagaaggccagaagaaa

SEQ ID NO: 99484 - RNA, 53 nt, Homo sapiens
gcgagggggggaccaccgccggccaggggcggaaacgcgccccggcaaggcca

SEQ ID NO: 99485 - RNA, 85 nt, Homo sapiens
gagcgccccgcaggagcacaacaccacacgcagacccagaccgccaagcgcagagacagccggacgccagccccgagcccgccag

SEQ ID NO: 99486 - RNA, 77 nt, Homo sapiens
aagagcaaaagggggggcagaagccaggaccccaccaacggacagagaaggagggaagccacgccccaaggacacgg

SEQ ID NO: 99487 - RNA, 61 nt, Homo sapiens
agcccccacgaagaggcccaagggggcccacgagaagagcaggcgacgggggagagggaga

SEQ ID NO: 99488 - RNA, 77 nt, Homo sapiens
gagagcgccaaggaccggcaaggcgcggaaaaggaacagaagaggaaccgaaacccaagaaaaaccacccagcaaag

SEQ ID NO: 99489 - RNA, 59 nt, Homo sapiens
ccacggagcagcacaagccacagccaccggggaccgcaaggccgcggggcccaacaagg

SEQ ID NO: 99490 - RNA, 57 nt, Homo sapiens
gaaaggagacggcacccgagagcagaggcgagcggggaaagaagccaaaaagaggcc

SEQ ID NO: 99491 - RNA, 76 nt, Homo sapiens
acggaaacgggcagccgcgaggcggccgagaaacccgagccaacacccgaagcgaagggcggacagacccagagca

SEQ ID NO: 99492 - RNA, 54 nt, Homo sapiens
ggacgggcagggcccaggaaaagcagcagcaacgggaacgaagagagaaagcaa

SEQ ID NO: 99493 - RNA, 64 nt, Homo sapiens
cagacaggaacagcacccccagcgggaccaaacaagcaacaggcaggggaaaggaagggagcag

SEQ ID NO: 99494 - RNA, 57 nt, Homo sapiens
accaaacaagcaggaaaagacagcaccaggcccgaagcagaaaacagagggaaagaa

SEQ ID NO: 99495 - RNA, 68 nt, Homo sapiens
ggaggcgaaggaggcaagcaggaccgaaaaggaagcgggccccccgagcagagccgccagaacggaag

SEQ ID NO: 99496 - RNA, 81 nt, Homo sapiens
cggagggcgcagcaggcggacggccccagaggaagaagccaagccgcgccaagacggcaccaaaaagcaaaagcagccccc

SEQ ID NO: 99497 - RNA, 38 nt, Homo sapiens
caagcgcacgaccaccaaggaagaaagcagggagccag

SEQ ID NO: 99498 - RNA, 71 nt, Homo sapiens
gcccggagacgcccagaaagaacagagaggcacgagacggaaccccccggccaggcagaacagcgaacaac

SEQ ID NO: 99499 - RNA, 73 nt, Homo sapiens
gacggaggaaacccgacagcaaaggacaccaggggggaaaaaccacacaggcaaagaacgcgcaaaacaggac

SEQ ID NO: 99500 - RNA, 75 nt, Homo sapiens
gaccaggagaggcccgcgggaccgaggccgggccccggaagaaggagccccccgagagcaaaccagaaaaccaga

SEQ ID NO: 99501 - RNA, 37 nt, Homo sapiens
cccggcgcaccagcggggcccgccacgagacgcggca

SEQ ID NO: 99502 - RNA, 40 nt, Homo sapiens
ggacaccggaagcgggaaagcgcggccaggaacaacagaa

SEQ ID NO: 99503 - RNA, 72 nt, Homo sapiens
ggcagggcggcaaccgagacacaaagggaaagcgacgaagggagggaaggaaggaagagccaaaggacaggg

SEQ ID NO: 99504 - RNA, 81 nt, Homo sapiens
cgagaccggaccgagagcggaccgagagcgcgaaacgcacgagaagaagggacccgacacaggacaagagacgggaaccag

SEQ ID NO: 99505 - RNA, 77 nt, Homo sapiens
aaagaaaaggagcaggaagcccagggcggagaacggaaaagcaccaggaagcagagaggaccgcagaagggaaggag

SEQ ID NO: 99506 - RNA, 76 nt, Homo sapiens
ccacccggaccacccaagcccgaccccgaacccaccggaggcaagcacggagccgcgcggagaacaccaacgcccg

SEQ ID NO: 99507 - RNA, 36 nt, Homo sapiens
gcacagacaggcaaagaagcgaagagggaacacccc

SEQ ID NO: 99508 - RNA, 75 nt, Homo sapiens
gggcggcgccccgcgccgccgcgcccacggccccgccagcaaggcggcgcgcccaggagcacgccgaaaggggac

SEQ ID NO: 99509 - RNA, 90 nt, Homo sapiens
gagaacaggcggaccccgagaacaacgcgcgcgagggaaaacccgaaggaaccggccgaaccagaccggagcaggggcagcgaaccaggg

SEQ ID NO: 99510 - RNA, 73 nt, Homo sapiens
aaaggaggggaacgagaaaacaggaccaagaagaagaaccagcaaaaagacaccccagcagaaagggaaccag

SEQ ID NO: 99511 - RNA, 81 nt, Homo sapiens
gccaagcaacagcccagcaagggagaccccccggcgaagggccgccccggcccgcggcccagccacccccccccccacggg

SEQ ID NO: 99512 - RNA, 80 nt, Homo sapiens
gcggccgggcggaccaggaagccggaagccaaaagggacacagaaacagacgaaaccgaacgaaaggagaaacggaaaag

SEQ ID NO: 99513 - RNA, 79 nt, Homo sapiens
ccgacaggcggcagcggggcggcgcgcggcgcggcggcggcccgccccgcggcccagcagcacggcagaagagcgacgg

SEQ ID NO: 99514 - RNA, 79 nt, Homo sapiens
ccggaagaccaagcaggagaaccgaccgagagcgggacgggcagaagaaaacccaccaaggggcaacaagcacccacaa

SEQ ID NO: 99515 - RNA, 57 nt, Homo sapiens
aaaccgcgaagcaggggccgcgggaagggggagacgaaccggcaaggaacagacgaa

SEQ ID NO: 99516 - RNA, 77 nt, Homo sapiens
gcagaagacggagagcgggccccaccccaccgcccacaccggcaacccaaggaaaggagaaagaggaaagcacggcc

SEQ ID NO: 99517 - RNA, 79 nt, Homo sapiens
acggccacggcaacgagcggggcaaccacgcgagacgccaccagaggcaaaacagaaaggcggaggaaaaacggagcca

SEQ ID NO: 99518 - RNA, 76 nt, Homo sapiens
gcacacacgaggaccccagcgcggcgcgcggaagcaccagaagccacgggacggaggggggcccacgcggaggacg

SEQ ID NO: 99519 - RNA, 64 nt, Homo sapiens
acaggaacacaggcagcaccaagcgggaggacccccaaagagcaacaacacaaggccgacgcgc

SEQ ID NO: 99520 - RNA, 74 nt, Homo sapiens
ggacaggagagaaagacggaccgggggcccgcgcacagaccaaacgggcccgaggaagcaggcgcgagaaaggc

SEQ ID NO: 99521 - RNA, 70 nt, Homo sapiens
agggaagggaaagcagaggaaggcagaagaaaaagggaaggggcacgaagaccaaccggccaaagaagag

SEQ ID NO: 99522 - RNA, 77 nt, Homo sapiens
cacgaacagcggagcaaggcgacgaaccggagagaggagaacgaacaccggaccgccaggaacaggaaaagggaggc

SEQ ID NO: 99523 - RNA, 78 nt, Homo sapiens
ggacgcacgggcccggaaaggaggaaagaggagccgaacaaccaaaaaccaagggagcaaggaacgccgaagcaggaa

SEQ ID NO: 99524 - RNA, 83 nt, Homo sapiens
ggaaggggacgaaaagaaaccacagggaccaagaaaggcccagggaccaaagcccggacaaggcccgagcaccaggaccgcag

SEQ ID NO: 99525 - RNA, 81 nt, Homo sapiens
agccggaagggcggggggcgggccggaggggagacgggaggcaggggacacagccaggaggagaggagcggaggcagacag

SEQ ID NO: 99526 - RNA, 60 nt, Homo sapiens
ggcagcgcaggacaacggcaggacggaaggcagagcgcgacagagggagagcacccgcca

SEQ ID NO: 99527 - RNA, 80 nt, Homo sapiens
aggagaaggaaagcgaaggggaaggcgccgaagaggacgaagagacccgcgccagacaaaaggcgccggaagaacgcccc

SEQ ID NO: 99528 - RNA, 72 nt, Homo sapiens
aagaggagagcggggggacccaaaaagggcagaaaggacaggaaggaacacaagaccaaagaaaaaaacggg

SEQ ID NO: 99529 - RNA, 72 nt, Homo sapiens
cccacacgccgccacccccaccggagaaagagagcacaagcccaggaacggggagaaacgccagacgccccg

SEQ ID NO: 99530 - RNA, 69 nt, Homo sapiens
aaaaagaaagaaggaagaaccgggaggagcaaaagccagaaggcagagaggaagcgccaccccaagcac

SEQ ID NO: 99531 - RNA, 83 nt, Homo sapiens
accagggccagacaccaaggagcgcagcagcgcgcagggcagccccagcgagcacccgaggaaggaccgcaggacaacggcca

SEQ ID NO: 99532 - RNA, 78 nt, Homo sapiens
gcgcgcgagggcgaccggacgcaggcccacaagagaaagaccacagcaagaccacgcccccagccgggggaccaggcc

SEQ ID NO: 99533 - RNA, 79 nt, Homo sapiens
cgaaaaaggacaaaagcaggaccaaaacaggcacaaaagggaacaaaaagcaccgaagaggaggccacacgggggcggg

SEQ ID NO: 99534 - RNA, 78 nt, Homo sapiens
ggaggaaggacccggggaggccggccacgccccgcacggggggccacgggccccgaccgcccacaagcgcacgggggc

SEQ ID NO: 99535 - RNA, 81 nt, Homo sapiens
agaacggaagaggacaagagacgacacgcaagcaggcaaccgaaacagggcagccagggaagagagacaaccagaagacag

SEQ ID NO: 99536 - RNA, 56 nt, Homo sapiens
aaagcaagaagaagaacgcaccaaaccaggagaggcaaaaaccaagggaaagagga

SEQ ID NO: 99537 - RNA, 84 nt, Homo sapiens
gcacgcgccagcccccaacaccgagccccaggcaaaagcagaccggaaaacccaccggcaagaccacacccgaggggagcccag

SEQ ID NO: 99538 - RNA, 76 nt, Homo sapiens
gcgaacccgcggcgcaaaacgacaacacacacgcacaagcgaaaccaagagagagagagaaacaggaacaaacgac

SEQ ID NO: 99539 - RNA, 83 nt, Homo sapiens
ccggccaggcacaccgccccacagcccgcccaacaccaaaaggaccaagaaaggcccagggaccaaagcccggacaaggcccg

SEQ ID NO: 99540 - RNA, 79 nt, Homo sapiens
cgagaggcggccaacaagacaggcacacaggcagaaaacgaggaggggcccaggagaacacccccaggacccccaacgg

SEQ ID NO: 99541 - RNA, 73 nt, Homo sapiens
aaggaccaagaaccaggccaagcaggggacagcacgagggcagcacacaacacccccccaggaggagacgacc

SEQ ID NO: 99542 - RNA, 70 nt, Homo sapiens
aacacccaacaaccgcaccggcacggaccaccccaacaccgggggagaaccgggcccaccagggacacgg

SEQ ID NO: 99543 - RNA, 89 nt, Homo sapiens
cacccgcgccagcaccacgcccgcgccgcgccgccgccaccagcccaagagaaagccgaacgacccgcaccaacagccaagcagccgac

SEQ ID NO: 99544 - RNA, 82 nt, Homo sapiens
aacacaccaggaaccacagacagaaggccgaggagagagcacccagaaagaagagaccaccgcccacaaaccaccccagaag

SEQ ID NO: 99545 - RNA, 57 nt, Homo sapiens
gaaccacaccacacccaaagcaacccaaggagacggcgcgggggcggagagggaaag

SEQ ID NO: 99546 - RNA, 50 nt, Homo sapiens
acgcgcggaaggcagcgcccagcagcgcagggaaagaccaggagaaggcg

SEQ ID NO: 99547 - RNA, 75 nt, Homo sapiens
ccgacaccacacccagacccaaaggcaacaacagcagaggaccacagaacgggcagcaaacaaagcagcacccac

SEQ ID NO: 99548 - RNA, 81 nt, Homo sapiens
ccccggaaccaggccggacccgggccgcaggcagcccgcggcagcaggacacagggccgacacaagaagaggcccgagacc

SEQ ID NO: 99549 - RNA, 82 nt, Homo sapiens
ggaggggacggcaggcgaggcggaacaggccgggcaccaaggcgcaggcgagagccacagaaggaggaggggacagcagcag

SEQ ID NO: 99550 - RNA, 80 nt, Homo sapiens
gccggaaggcgcggccggaggacaccccacggcaggaggcagcacggcaggagacgaggagaggacagcaggacacccgg

SEQ ID NO: 99551 - RNA, 76 nt, Homo sapiens
gccacaagaaggagggaacaaacagggaccaccaccaccggcaaggaaggaaacgaaaacaccacgacgaagacgg

SEQ ID NO: 99552 - RNA, 81 nt, Homo sapiens
agagaggaggagggagcagcagccagccggacccgagcggggaccgagaaagacccccgaggaaccacgcagaggacagac

SEQ ID NO: 99553 - RNA, 71 nt, Homo sapiens
cccgcccagcacggacagccgagccgcgagggaaggagcacaaaggcacccacagccaccagccggagaga

SEQ ID NO: 99554 - RNA, 72 nt, Homo sapiens
gaagagcacagcgggaggaaagggagagacaagagaggagacccaacagacggagagcacaagccaacccgc

SEQ ID NO: 99555 - RNA, 71 nt, Homo sapiens
acccgggcaaagaagagcaaaggcggggccggggagccccgggccagacccagacccagcccacccagagc

SEQ ID NO: 99556 - RNA, 76 nt, Homo sapiens
ggccccacaccgaagacaacacccgcgaggaaaagggcagcgcaagaccccgcacggaagcagcaagcacaggcag

SEQ ID NO: 99557 - RNA, 78 nt, Homo sapiens
gcgacccagcccccgcccgcagccggacgacacgaccgccgcccgcgggcaagagcaacacaagcaacgccaagggca

SEQ ID NO: 99558 - RNA, 55 nt, Homo sapiens
aggacggcaaggagggagccgccagaaggccccaccaccgggacaggcgaccgcg

SEQ ID NO: 99559 - RNA, 79 nt, Homo sapiens
cacaggaaggcacacagcagcaagagcccaaacgcgaggaggaagccaagaacgggagcgaagccacgcagcggcacca

SEQ ID NO: 99560 - RNA, 68 nt, Homo sapiens
cagaccaggacggaagcacaaacaggacccgccccgaggagaggaagacaccccccccaccgaaagaa

SEQ ID NO: 99561 - RNA, 50 nt, Homo sapiens
ccacacaaccgggaccaagggagaaacaaaaccagacgagagacagaaga

SEQ ID NO: 99562 - RNA, 79 nt, Homo sapiens
agggacacagacaaaaaaaagagaaccgacaagccaagaggagaacagccgcacgggcggcgcccggcgcgggacaagc

SEQ ID NO: 99563 - RNA, 41 nt, Homo sapiens
gcaccagacgcagcaggagacagcgcagggacccaacagcc

SEQ ID NO: 99564 - RNA, 88 nt, Homo sapiens
cggcggcggcgagcggggcgcggaggcggagaggcacggaggagccgcggggcgccgccacggccgcccggagagcccggcggacacg

SEQ ID NO: 99565 - RNA, 44 nt, Homo sapiens
ccggggcagaccaaacggcaaggacgccgccagccaccggcgcg

SEQ ID NO: 99566 - RNA, 54 nt, Homo sapiens
aaagaccaacagagagaccagccagccaggggaagcccccccaagaaggggccc

SEQ ID NO: 99567 - RNA, 75 nt, Homo sapiens
caagccagaagagaaggaaccgggggaaagaagggcggaaaaggcaaaacagcgcaaccaagagagaggaagaga

SEQ ID NO: 99568 - RNA, 79 nt, Homo sapiens
cccgccaaccgcaaccagacgccagcgggacgaggaccgagaccgcggccgggaccgaggcgccccccccggacagaag

SEQ ID NO: 99569 - RNA, 73 nt, Homo sapiens
cagaaccgcagcagggacgcgggcacgggaccggcgaggacgacgcgccggcccgggagaggaggggaaagga

SEQ ID NO: 99570 - RNA, 69 nt, Homo sapiens
cagggccgccgacagcagagacagagacgggccgagacccaaggccaagggaaagggggagcggagcag

SEQ ID NO: 99571 - RNA, 77 nt, Homo sapiens
ggaaaacgacacacgggggggaccagaaaaccccagcaacaaggcgagaaacacaccaacaacagcaaagggccaag

SEQ ID NO: 99572 - RNA, 63 nt, Homo sapiens
acaggaacagagcgagggaggagagagggagagccaaagaaggggaccgggaccgcgccaccc

SEQ ID NO: 99573 - RNA, 81 nt, Homo sapiens
aacacagcgagccgggccagcaccccgcggccagcacgccgcacaccaagccgcccaggcacccgccgggaggggcgccgc

SEQ ID NO: 99574 - RNA, 91 nt, Homo sapiens
gaccccgcggaacgcccaccgcggagagcagcacgaccccagcacaggacagagcaagagccccaagggcccaacagcgccaagaaagagg

SEQ ID NO: 99575 - RNA, 75 nt, Homo sapiens
ccacgcaaggaggggcggaggagcccccacacaccagcaaaccagcggcgcgacgagggcggacggagggaagcc

SEQ ID NO: 99576 - RNA, 71 nt, Homo sapiens
gggagccggcgcggcaccccaaaggagaccccggacccaggagagaaaaagcgagaaccacgccgacaacg

SEQ ID NO: 99577 - RNA, 64 nt, Homo sapiens
gaccaagaaccaggagcgacgcgccacgccggccgggaaggggaccgaccgacaaccccccccc

SEQ ID NO: 99578 - RNA, 81 nt, Homo sapiens
aaaggaaccaggccccagaaggaagggccgggccggggcacgggcccacggccccccaccgggccaccccgggggcggccg

SEQ ID NO: 99579 - RNA, 72 nt, Homo sapiens
ccaggggaaaacccccgggaccagcgcacacaagagagggccgggcgggaagaaaggaaagaggagaaagaa

SEQ ID NO: 99580 - RNA, 78 nt, Homo sapiens
agaccaaaacaacccgaaagagccccacaaaagcacaggccccacaacagcgcgcaggaaagcagagaaaccgccgcc

SEQ ID NO: 99581 - RNA, 76 nt, Homo sapiens
ccgaggccaccccagaccgcagaaccagggcccccaaaggaagcaccagacacacgaaaacggcacgcagcggagg

SEQ ID NO: 99582 - RNA, 81 nt, Homo sapiens
agccgcagcccgagcccagaaggcggcgaccgggcgcgggcaaggcgcggcagggcaagaaccagaggggagccaaggaag

SEQ ID NO: 99583 - RNA, 74 nt, Homo sapiens
agacccgaaaaggagaaaaggccggacccaagccagaagcccgcaaagcccccagaccgcagaaacagacaacg

SEQ ID NO: 99584 - RNA, 84 nt, Homo sapiens
agcgcaggacaggcgcaggggccaaacacagaacagcaaagaggaggccagcgcggccagcagaaggccggacacggcagcggc

SEQ ID NO: 99585 - RNA, 53 nt, Homo sapiens
cccaacaacccccaaggacgccccggagacagacccagcacggaccccccccc

SEQ ID NO: 99586 - RNA, 82 nt, Homo sapiens
gacagcagagacagagaggagccaacccccaggagcccagaaagcgggaccaccgcaaagccacacccccacaaccgcagcc

SEQ ID NO: 99587 - RNA, 76 nt, Homo sapiens
gcccgagcgcgcaagcccgacggcaccccgccccaccgccgaccaagaagggcccgacccgaaaagcgcagccaac

SEQ ID NO: 99588 - RNA, 71 nt, Homo sapiens
ccgaacccccaggccacagagacaacgaagaaaggagcacaaaagaacaaacacacgagccaaaagcacaa

SEQ ID NO: 99589 - RNA, 70 nt, Homo sapiens
cccgcgccgccgaccccccggcgccgcgccggcggcgacaaaacagaggagaccagaccagaagccccga

SEQ ID NO: 99590 - RNA, 75 nt, Homo sapiens
accaccccagccccgcgcccggcggggccggggagcccgggccagaccccccagacccagcccaccccggagcag

SEQ ID NO: 99591 - RNA, 100 nt, Homo sapiens
gaggaagcagccagcgccgcaacaagcggcagcaagggaccaagaaaggcccagggaccaaagcccggacaaggcccgagcaccaggaccgcagaaggcc

SEQ ID NO: 99592 - RNA, 73 nt, Homo sapiens
caccagacgaccgcggaacaaacagaagacagcacgaacaccagggggacaagcggagaggcgagagagaaac

SEQ ID NO: 99593 - RNA, 85 nt, Homo sapiens
gagcagagaccaggcccgcgcaccaagagaagcacaaagccaaggagaaaagacgaagagcaagaaaaagaaagcgagccagcga

SEQ ID NO: 99594 - RNA, 81 nt, Homo sapiens
gagacgcgcccggcccggacgcgcccgcgcccccgcggcggagggggacacaccaaagagaccggagcccaccagccaaca

SEQ ID NO: 99595 - RNA, 58 nt, Homo sapiens
cgcgggacgggcaaaggaaaggcggagagaccaggccaggggcgccaaagacagagga

SEQ ID NO: 99596 - RNA, 56 nt, Homo sapiens
gaggcaggacccccggaggcggaccgcggccccggccgcggccccagggaagcagg

SEQ ID NO: 99597 - RNA, 111 nt, Homo sapiens
gaaaaccgaagggaaggccagcagcgcgcggagaagaacggggagccagcacccccccaggcagcagcagcagcaccggagacaagccccagcccaggggcccggcggaga

SEQ ID NO: 99598 - RNA, 53 nt, Homo sapiens
gccgagcccccgggccgacggaacaagaaggaaccccaaacccaccagaaaag

SEQ ID NO: 99599 - RNA, 84 nt, Homo sapiens
accccgaggcggcccggaggcggcggagggcaccccgggcgggcggcggcgcccggccagcggggaagcgcaggagcggcgggg

SEQ ID NO: 99600 - RNA, 77 nt, Homo sapiens
caagagcggaccagcccccacgccccccaccagaacaagaaccacaggggggaaacggagcagggacacacgcaaga

SEQ ID NO: 99601 - RNA, 77 nt, Homo sapiens
gacaccaacaaaaccaacacaaaagacacacgaaacagaaacagggccagcgccccagcccgcccaaaggggaaacc

SEQ ID NO: 99602 - RNA, 73 nt, Homo sapiens
ggacacacccccaggaggcccggcagagcagggacagcaaacgggcaacggaacacagcggaacacaaacaac

SEQ ID NO: 99603 - RNA, 77 nt, Homo sapiens
agaaccagcaaccccccacgagaacacaagccaggagcccggaagacagccgcagggcagacaccacacacagaccg

SEQ ID NO: 99604 - RNA, 69 nt, Homo sapiens
cacgaaaaccaaacagacaggaaaaaagcagcaagcccagggccaggagccgacacaagagcggacagc

SEQ ID NO: 99605 - RNA, 80 nt, Homo sapiens
gaagagccagaacagagcagaaacaaagaagagagcaggaagaaggaagaaaaggaccgcaggagagagaaggcccaaaa

SEQ ID NO: 99606 - RNA, 75 nt, Homo sapiens
gacacacggcagagcaggccaagccagaaaggagccacacgaccccgccagcgcagggggcaccaccgcaccacc

SEQ ID NO: 99607 - RNA, 111 nt, Homo sapiens
gagccggcccacagcagcgacgcagccagccaaggccaggggagaccggggcccagcagagaggaagagaaacaccaaggaaccacacaagaaaagaaagcaaaaggacca

SEQ ID NO: 99608 - RNA, 93 nt, Homo sapiens
ggaacgaaaaaccggaaacggaaaacggagaaccagcacgggaggggagagagaaccggcacaccggagcaacccagaacacagcggaggaaa

SEQ ID NO: 99609 - RNA, 115 nt, Homo sapiens
gaagaagcaagccggacccacgacggcaggaaaggaggccaggacggagagggagaagcaaggcggaggcaagacacacaaagcagagagggaaggaaagagcccgacggacaga

SEQ ID NO: 99610 - RNA, 84 nt, Homo sapiens
gaacagagaagaacgaaacagaagaacggcaggaccaggccccccccaccgccagcagcagaaagcagcagaggccgaccgcag

SEQ ID NO: 99611 - RNA, 84 nt, Homo sapiens
gaggaggaaaggaggacgaggaaaaagaggaagcggagaccagggaaggaacgagccaggaagagggacggaaccaccagaagc

SEQ ID NO: 99612 - RNA, 74 nt, Homo sapiens
cccacgggaacaagaggggacagaaagcaccaggagacaaagccacaaaaacaccagaaaaaccaagcagaaaa

SEQ ID NO: 99613 - RNA, 84 nt, Homo sapiens
agcccagcccacagccggccccaggaccgcacaccaccccggcaggaggcgggcgggcgagacccgaaaggccacccaagcacg

SEQ ID NO: 99614 - RNA, 84 nt, Homo sapiens
cagcgcagcaggagacccaaagaggccgagcggcgcagaggacaacgagcccgaggcagcagagcgggggcgcgcggacaggac

SEQ ID NO: 99615 - RNA, 77 nt, Homo sapiens
aaaacccggaagagcgccccaggagaaacaaaccagcaaaggaggagccacgccagaagcgggggagaagaaacggc

SEQ ID NO: 99616 - RNA, 79 nt, Homo sapiens
agcccagggcaggacaccgacaggaacagggaccacgggggcccagccgggcaacccagagagccaagaccacaggcgg

SEQ ID NO: 99617 - RNA, 81 nt, Homo sapiens
cagggcagggaaaagcgccgggcggaccagcaggaaagcacacaaccacaacggaagacagcaaaaaggacggcccaaacc

SEQ ID NO: 99618 - RNA, 61 nt, Homo sapiens
ggccccccgccccccgaaggcgcgccccaaacaggacaaggcacgaggcgcggcgaccacc

SEQ ID NO: 99619 - RNA, 74 nt, Homo sapiens
ccggaacaaaccaaccaacccacacagcgcccagcgggcacgagaaaaaagggcagaccgacccgcgagacacg

SEQ ID NO: 99620 - RNA, 81 nt, Homo sapiens
cgggacgacacaaccccgagagaggccaccgcggcccacgagccgggggaccccgccagcagcgaagcaggggggaggagc

SEQ ID NO: 99621 - RNA, 84 nt, Homo sapiens
gcgccgccggccggggcgcagggacacggggggccaagggaccacacgaggaagaccgcaggaaagcaggaaggcaagaaagcc

SEQ ID NO: 99622 - RNA, 77 nt, Homo sapiens
acacccagaggccagcacaacagaggaagacaacgggaagccacagggaccacccccaagacggcccgcgcagcccc

SEQ ID NO: 99623 - RNA, 74 nt, Homo sapiens
gcacagagaggagccgaggccaggaggagaccagccgaacaacaagaagacggaaggccagcagcaacgagaaa

SEQ ID NO: 99624 - RNA, 80 nt, Homo sapiens
aagaagaacaaacgacgcagagaagaccccccaccgcacacaacggcgaggacaccacccgcgcgggggccgacgcgccg

SEQ ID NO: 99625 - RNA, 49 nt, Homo sapiens
aaacagcgccaaacggcccagaggaagcagggggagaagagggagaccc

SEQ ID NO: 99626 - RNA, 67 nt, Homo sapiens
accgagaagcgagcacaaaaagaaagaagagaaccagaccgcacagcagacccgggagcggcaccac

SEQ ID NO: 99627 - RNA, 72 nt, Homo sapiens
ggacaccggaaccgggaaaggacacaagacccacagggaaggggaacagcggaacagggcagaagcgccagg

SEQ ID NO: 99628 - RNA, 76 nt, Homo sapiens
ccgagaccggaccgagagcggaccgagagcgcgaaacgcacgagaaggagaaaagccaaggacagccgggggacaa

SEQ ID NO: 99629 - RNA, 76 nt, Homo sapiens
acggcaccaaacacgagaccccagaggcagaggaagcacccgcgagaaagaagggcacagcgaaacagcccggcca

SEQ ID NO: 99630 - RNA, 88 nt, Homo sapiens
cggaagcacacaacaggaaaacaaaagaggagaaagcccaacgagacaaaaggcacaacaaaccgggagcgggggccacaagggaacc

SEQ ID NO: 99631 - RNA, 67 nt, Homo sapiens
ggaacacagcgacagcgagagaccaagagcggcaaggcagggcaaaagggaacagcagcacaaccgc

SEQ ID NO: 99632 - RNA, 73 nt, Homo sapiens
aaagcccaaaggaacaagccacaaggagaagacacaggagggccaggccaaacggccgaaacggagcaagcag

SEQ ID NO: 99633 - RNA, 72 nt, Homo sapiens
ccacaggcagagggaaacgggagcaccccagagagaccggaccaaacaaccaggaagcgccaaagggcagcg

SEQ ID NO: 99634 - RNA, 86 nt, Homo sapiens
gcgcccgcgccccccgcccggccccccgccggccccgccagcagcacgggaggccgcccggcacccgccggcgccccccggcacaa

SEQ ID NO: 99635 - RNA, 70 nt, Homo sapiens
acgcagggcgcccccggggagcgggaggggccaaccgcgcgagcggcaccagccaccaggacccacagga

SEQ ID NO: 99636 - RNA, 67 nt, Homo sapiens
cgagaaggagaagcaagggaggaaacacaaccgacaaagcccggaagaggaaaacgcacagcgaagg

SEQ ID NO: 99637 - RNA, 93 nt, Homo sapiens
cagcagccaaccacccacgacaccagcaacgcccaggagcaagacaggggagacagcacgaaggaaaccagacggacaccggggcaaaggagg

SEQ ID NO: 99638 - RNA, 75 nt, Homo sapiens
gaagaagagaggaaggaggaggcgccagcccgagaaaccaggccgcaccgcgaggaacccgagcccaccggcagc

SEQ ID NO: 99639 - RNA, 79 nt, Homo sapiens
ccgccgccgccaaccaggcccgcaaccaggcaaggaggcgaagagcaggacaggcaaaaggcaacagccccccaggcca

SEQ ID NO: 99640 - RNA, 79 nt, Homo sapiens
gggacaaaggagaaacagagacaccccagaaacaccccgcgcaggcgacgagaaagcccggcccagggcagaaccgcca

SEQ ID NO: 99641 - RNA, 78 nt, Homo sapiens
caaagcggcgcggcaccccagaacaaccaggcaaaaagggaagggggaaggaggaaagacaaacccaccgccccacca

SEQ ID NO: 99642 - RNA, 79 nt, Homo sapiens
gccgccacggcccggggaaagcggcacgcgccccagagggggagaggagagccgcaggcagcccacagcccccacggcg

SEQ ID NO: 99643 - RNA, 82 nt, Homo sapiens
gcggcaagagcgcaaaacggacccccacaaaaggggcacccgaggaggaagagggcagggcccacggaaagaagggaaaccc

SEQ ID NO: 99644 - RNA, 73 nt, Homo sapiens
cgccggccgcccgcacgccgccgacgcggccggagcccccccagacacacgagggggacaccgccagcccagc

SEQ ID NO: 99645 - RNA, 85 nt, Homo sapiens
ggccgcccagagagcgggggggggaccgccggcacgcgacccccccgggcccaaagcagaaacagaaacgcagccagaccacgca

SEQ ID NO: 99646 - RNA, 78 nt, Homo sapiens
aggcgagagaaccggacaaaccaggagagacccaaggacaaaacgaaggaggcccaaccacaaaaggagccgacggaa

SEQ ID NO: 99647 - RNA, 71 nt, Homo sapiens
gacaaaagggccaaagaagggagagaggaagagagaaggccacgcccgaccccaagcaacaacggggcagg

SEQ ID NO: 99648 - RNA, 86 nt, Homo sapiens
aaaagacccggaaagaagagacacagaggagccacacccccagcggagaagagagcggaaagagcaacaggacaagaacccaaaca

SEQ ID NO: 99649 - RNA, 75 nt, Homo sapiens
ccgacccccgccgcggccgcgccgaggaacacgaggacccaaagaacaaacccggagagaagaaaaccccagcag

SEQ ID NO: 99650 - RNA, 68 nt, Homo sapiens
gcacagagacgcaaacaaagacccggacccgaaagaagacccagaagaagaagggcaagaagacacag

SEQ ID NO: 99651 - RNA, 80 nt, Homo sapiens
gcagacgcagccgagacaccagcccgaaacaccaccaagcaggaccccaaacgggcgaggagaccagagggcccagccca

SEQ ID NO: 99652 - RNA, 66 nt, Homo sapiens
ccaaaggcagcaaaaacaagagccccaaagcagccaaaagagggccgcgaacacgggccccccaac

SEQ ID NO: 99653 - RNA, 85 nt, Homo sapiens
gcagcccgggccaccccaggagggaaggcccaagcacacagggaagacggcagagcagcgaagccaggaggagggggacaaagga

SEQ ID NO: 99654 - RNA, 79 nt, Homo sapiens
aacgcaggaccccgccaaacgcagacaggagaaagagcgcccaagacacccagccagaaagggcagagcgaagaaggac

SEQ ID NO: 99655 - RNA, 69 nt, Homo sapiens
aaaccagaccacaacaagaagacaccgggaagggcacgacaggaaaagacgacgaagaggcaagcaccc

SEQ ID NO: 99656 - RNA, 76 nt, Homo sapiens
ccaagccccaagggagcagcacacccgacgcgcagaacccagcagaaacccagagaaaccgaggaggaacaaccga

SEQ ID NO: 99657 - RNA, 79 nt, Homo sapiens
ggaaagagacggagaaaagaagaacacgcccaaaacgaaaaacacccgccggacgacccacaaagaccccaaaccaagc

SEQ ID NO: 99658 - RNA, 81 nt, Homo sapiens
cagggcgcccccaaacaacgcccgaacaccccgcaggaaaccaagaaagggaagaagaggagaacgaacggagaccaagag

SEQ ID NO: 99659 - RNA, 51 nt, Homo sapiens
gaacagacgagcgaagagacccagaacaggggcacaccccacggccaagga

SEQ ID NO: 99660 - RNA, 81 nt, Homo sapiens
gccagccccgggagcagcccagccacacggcccgggccccggcacggcccgggcgcgccgcacaaggaaagccccggccag

SEQ ID NO: 99661 - RNA, 76 nt, Homo sapiens
gcagaagccgcaacaggaaagcagcccgaaaaagacgcgagaagccacacgcagcgcggagagcgaggggccaaaa

SEQ ID NO: 99662 - RNA, 74 nt, Homo sapiens
cgcagcagagcgagaccgccaacaggacaccgaagccaaccgaccgaaacaaggaccccccgggagaagaaaag

SEQ ID NO: 99663 - RNA, 73 nt, Homo sapiens
agagaagcaaagaagcagggcacacaagcaacagaagaaaaggagggaagagggaacagaagggcacacccga

SEQ ID NO: 99664 - RNA, 64 nt, Homo sapiens
gagcccgcaagcggaaaaccacaagcaggccaaagagagaggcggggccccgagcagacagcag

SEQ ID NO: 99665 - RNA, 75 nt, Homo sapiens
gcagcccggggacgagcagaagcaacgcgcaagcagaaggcagagaagaccagggaaacaagcaaaggcgcagca

SEQ ID NO: 99666 - RNA, 69 nt, Homo sapiens
cgccccgaacgggggcccccccgccggacaggcacaccgggccaaacacaaaaccaacccgaggaagaa

SEQ ID NO: 99667 - RNA, 73 nt, Homo sapiens
ccagaaaccccccacgaacgccaaaaaaccagccacccggcaggaacaaaggaggcgaggaggcaagcagaga

SEQ ID NO: 99668 - RNA, 76 nt, Homo sapiens
cgcagagcaccgggcagaccaggcaaagcgacccgcgaacgagcaggaaacaggccagccacgcagcagcagaagc

SEQ ID NO: 99669 - RNA, 61 nt, Homo sapiens
ggcgggcccgaggagagcgcggagccgcgcccccgggacaacaggcccaacccaagccagg

SEQ ID NO: 99670 - RNA, 74 nt, Homo sapiens
ccaccagcacacgacagcacagccagaacggagaagagcccggaaaaagggaagaaggaaaccagagggcccaa

SEQ ID NO: 99671 - RNA, 56 nt, Homo sapiens
ggcccaggaggggccgcagcaagcaacaacaagaacgaggagaagcaggacgagga

SEQ ID NO: 99672 - RNA, 60 nt, Homo sapiens
cgacacaaaaagcaagcgggccaccacagaaaagcacggcggcaaagaccacacagcgca

SEQ ID NO: 99673 - RNA, 74 nt, Homo sapiens
aacaaaagaacacaacaaaggcacgcaaagaacgcccacaaggcccagaagaagagaaaaaagggaagaaacaa

SEQ ID NO: 99674 - RNA, 80 nt, Homo sapiens
caggccaaccgggagaggagcggaggcacccaccgacagaaagagaaccggccaacagccaagacgcaggcagagacgac

SEQ ID NO: 99675 - RNA, 81 nt, Homo sapiens
cagccaaaaaccacagcgcacacagaggcagacgccagcagacacacagccgggcacagcgccccaccccagggccgccag

SEQ ID NO: 99676 - RNA, 71 nt, Homo sapiens
cccaccccccaggcaggaaagagcggacgggagaaagacacagcccacacccagaccaaaaagagccaagc

SEQ ID NO: 99677 - RNA, 116 nt, Homo sapiens
cgaggcgaaggaagaggcggacggcgggaccacaagacaacgcggagcggcgaagagcaaccaggaaaacaggcaaaagcacggagaagggaaaagaaagagcggcgaaaagagaa

SEQ ID NO: 99678 - RNA, 76 nt, Homo sapiens
gaagccggaccggggcccagcaaagccaaaggaaggaccaggcacacagagaaaaaaagggaacaaaacacagcaa

SEQ ID NO: 99679 - RNA, 70 nt, Homo sapiens
cagcgccagcaggggggaagccagaacacgccaaggcaaggacaaaccggcgaccacacacggggacgac

SEQ ID NO: 99680 - RNA, 70 nt, Homo sapiens
ggagaggccacgggcaacgcggaggaaggaggaaaagaaggaggccagcgggacacacaaagaaagacga

SEQ ID NO: 99681 - RNA, 83 nt, Homo sapiens
aaacagcagagggagagccaggacacgaccagccggagaggacggcacccgggggaggccgccggccagggacccagcccgac

SEQ ID NO: 99682 - RNA, 78 nt, Homo sapiens
accccgcccggcccccagaggcgggaaacaggggagccaccaacccaaccagggacaaaacagcacaacacaccgaaa

SEQ ID NO: 99683 - RNA, 74 nt, Homo sapiens
cgcgcccaaccgcccccccccagaacgcggggaggcagacagaaaaagaaacgcaaggaacagagcagggacga

SEQ ID NO: 99684 - RNA, 65 nt, Homo sapiens
caagggccaagacccgcgcacaggcaccagaaggagaaaagccgaaacgggaagaagaagcccaa

SEQ ID NO: 99685 - RNA, 73 nt, Homo sapiens
acccccaacaaccagggcaaagaaaaccaggaagaaaggcaacggaaagcacagggcgaaaaccagggcaaac

SEQ ID NO: 99686 - RNA, 78 nt, Homo sapiens
cccaggagcacgccgcacaggccgcgaacggggcaaaggccacacaaggaaaagccaaacaaaagaaaaaaagggaac

SEQ ID NO: 99687 - RNA, 82 nt, Homo sapiens
gcgagcagaggaagccccacaggaagggccgaggaagcggggacacggaacccaaggagacgaagcgaagcaggagaaggag

SEQ ID NO: 99688 - RNA, 76 nt, Homo sapiens
agggaggaccgcgcacaaagaggggagcccaaaagcacgaagcgccagaggacaccgcggcccgaggacgccaccg

SEQ ID NO: 99689 - RNA, 80 nt, Homo sapiens
cgagcgcggcggcgcggcgcggagcggcgcggagcgcgggaagggcgagcacgggccagcccggccacagcagcacgagc

SEQ ID NO: 99690 - RNA, 39 nt, Homo sapiens
gagaagaaaagcggcaagcgaaggcaaccaagcaacacc

SEQ ID NO: 99691 - RNA, 70 nt, Homo sapiens
gaaaggaaagcagcccgaaaagaaggaggacgcacccagacccagccaacgagcacagcccacagcaagg

SEQ ID NO: 99692 - RNA, 44 nt, Homo sapiens
gacacgcaggagccgggacagccagcccaggcaccagagcaccg

SEQ ID NO: 99693 - RNA, 78 nt, Homo sapiens
aaccgagccgcaacccaaacacgcgaaaaggagaggagcggacccaccagaagcagcgaaaccgggaaagcagaaaga

SEQ ID NO: 99694 - RNA, 75 nt, Homo sapiens
ggaaggcgacgcacggccaaaggccaacaagaacgagccccccccacgagacaacggccagaccgcccgaaccag

SEQ ID NO: 99695 - RNA, 77 nt, Homo sapiens
aagaaaggcaaagcagccagcacagaagccgagaaacacgaaagcggaggccggagcaggacagggaaggagcagcc

SEQ ID NO: 99696 - RNA, 93 nt, Homo sapiens
gcaccaaacaaaaggaaaccacaccaaccaagaagagccagaacgaagggcacacgaacgaaaggaaacacaggcccaagcacagaggaaacg

SEQ ID NO: 99697 - RNA, 83 nt, Homo sapiens
gcaaaggcggaggcggaaggggaaagccggagccggccaaggcggccccaggggggaccaacaagggagaaccaacagaacaa

SEQ ID NO: 99698 - RNA, 86 nt, Homo sapiens
cccaccgaaggacgccgcagaagaggcacacagggaccaagaagccccggggacacgcgagaaaagacgccgaagggaagaccagc

SEQ ID NO: 99699 - RNA, 60 nt, Homo sapiens
ccgcgacacccgaagcgagaaagggggacacaacccagagcagaccagaagaaagacaga

SEQ ID NO: 99700 - RNA, 69 nt, Homo sapiens
ccagagcccaggaccgggcgcgccacaccccacccagaccaaagggagcggagggagacagcgaacgcc

SEQ ID NO: 99701 - RNA, 35 nt, Homo sapiens
gccccagagagcgggacacagagcccgagcaagaa

SEQ ID NO: 99702 - RNA, 64 nt, Homo sapiens
ggcggagaagaagaagagcagcagaacaccagggcgccagcagacagaggaagcggaggaggag

SEQ ID NO: 99703 - RNA, 70 nt, Homo sapiens
ccgccgcccagaggacgcccaacaccacccacccaccacggaacaagcgggaaacggagccaccaacaag

SEQ ID NO: 99704 - RNA, 79 nt, Homo sapiens
caccaagaggacgggggagcaacggaaaagcaggggagggcagaacgacgaaagacggacaggacgagggagagggcga

SEQ ID NO: 99705 - RNA, 66 nt, Homo sapiens
aaacaggaacagagcgagggaggagagagggagagccaaagaaggcacaagcagaggaaccaggga

SEQ ID NO: 99706 - RNA, 80 nt, Homo sapiens
gaagaaagacccaggcaaagacacaccagaacacagcaccccagcagagaccagagaagccccccaccagccccaacagc

SEQ ID NO: 99707 - RNA, 54 nt, Homo sapiens
agaccggacagaagaccgaggggggggccgccccgggggcccagacaacgaccg

SEQ ID NO: 99708 - RNA, 53 nt, Homo sapiens
aaaaggaccagacaaacaaaaggggacccaaaaacggcagaaaaaggaaaccc

SEQ ID NO: 99709 - RNA, 59 nt, Homo sapiens
acacgcagagccggcgcaggaaggagaccccgaaccaaacgacagcagaaccaggccca

SEQ ID NO: 99710 - RNA, 66 nt, Homo sapiens
accgcccaaacccacagaaggggacggacccacgcagccacccagcccagcaccacgcgcagccag

SEQ ID NO: 99711 - RNA, 70 nt, Homo sapiens
cagagaggggaaggagcccagcgacgccgggacccccgagacaaccacaaaacccaagaaacagagacag

SEQ ID NO: 99712 - RNA, 71 nt, Homo sapiens
caaagggaacgggggagagaagccacaaagcaagcaggcccgccagggcagaaaacagcgaccaggccagc

SEQ ID NO: 99713 - RNA, 68 nt, Homo sapiens
gcacaccaggcggcaggggcaaccagacgggccaaggaacagaaagacaacggacaaggcaggaagaa

SEQ ID NO: 99714 - RNA, 66 nt, Homo sapiens
cgggggcggcgaacgcggagagcacgccagaaggcccgggcacggccagaaacgggaggcgaccgg

SEQ ID NO: 99715 - RNA, 71 nt, Homo sapiens
acacacacaccacagaaagaaaagaagacaccaaaaagagccggcaggagggaagagccgcaggaggagaa

SEQ ID NO: 99716 - RNA, 62 nt, Homo sapiens
cggcccggcggcagcggcgcggagaaggcgagcgaagggcccaggaggccagcgcgagaagg

SEQ ID NO: 99717 - RNA, 65 nt, Homo sapiens
cgcgaaggagcaccgacacggaccgaaagggcggcgcagccgaaggaaagcacgaaggaacgacc

SEQ ID NO: 99718 - RNA, 31 nt, Homo sapiens
gacgagcacgcacagaggagcaccgacccag

SEQ ID NO: 99719 - RNA, 74 nt, Homo sapiens
acagccaccgagcagccgagcgcgaggagaggagcaaccggaagggacaaaagaacaaaaaaggagaccgccag

SEQ ID NO: 99720 - RNA, 85 nt, Homo sapiens
ccaggccacccgaagggccgaggaggccacgcagcgggacgacccgggacagcccacggggcagaccagcgaccaccggcacagc

SEQ ID NO: 99721 - RNA, 85 nt, Homo sapiens
agagggccgagagccgcggggagaaggccacacccaggcagcaagggcaccgcgagcaaggggcggccccggcgaggcaggagga

SEQ ID NO: 99722 - RNA, 78 nt, Homo sapiens
gaaacagccacgccagaaggcacaaagggaaaggacacaacaagcccccgcccccaacacgccaccgagcaccggcca

SEQ ID NO: 99723 - RNA, 81 nt, Homo sapiens
gcgagcacagagcccgccgccgaccgccgcccgccacacccgccgccaggccgggaaacgaacaagggcggagggaggacc

SEQ ID NO: 99724 - RNA, 53 nt, Homo sapiens
ggaagggacaaaacagaggcaacaagggacaagcaaggggccaaggagccaag

SEQ ID NO: 99725 - RNA, 75 nt, Homo sapiens
cccggcccccgccccagcccgccggcggcggcgggccccgggggcgccgagggcacaagggcaacgacagaaggg

SEQ ID NO: 99726 - RNA, 68 nt, Homo sapiens
ggggagacgggagacaaaccacggcacgcgagaccacagaggaggcggagcacgcagagaagaaacac

SEQ ID NO: 99727 - RNA, 80 nt, Homo sapiens
cgagcggccggaaacgagggagccccggggagcggccaaccacgaccgacggacaccacccgggcggcccccgaaggaga

SEQ ID NO: 99728 - RNA, 83 nt, Homo sapiens
gcgcagcagagcgcggcgcagaagagaccacggccggccacaaagcgcccggaaggaagcggcgccgaacgcgggccaggcag

SEQ ID NO: 99729 - RNA, 70 nt, Homo sapiens
agaaacgagcagaacgaaaccaagcaagggacaaaaaggaagaagaaagcagacccccggaccagcagac

SEQ ID NO: 99730 - RNA, 79 nt, Homo sapiens
gacggcgagacagagaccagccccaggccccagcgcgagagacacaggaacggaaccccccgcggccagccggagcccg

SEQ ID NO: 99731 - RNA, 50 nt, Homo sapiens
cgcaggggaggcgccgagaacaacggagggaagaccggcccccgaaccag

SEQ ID NO: 99732 - RNA, 78 nt, Homo sapiens
ccgcgagagagggaccagcgaacaaccaagaaagaagcccaggcacaaggcaaagcgaaaaagaccgcagggaaggcc

SEQ ID NO: 99733 - RNA, 76 nt, Homo sapiens
ccagaggcgcccggggcaacgggccgacagcacagggccaaaacaccagaccagacccaaccagcggaccggagaa

SEQ ID NO: 99734 - RNA, 43 nt, Homo sapiens
gcccgcgaccgccgccagcgcccgagcccccgggcgcgccgga

SEQ ID NO: 99735 - RNA, 86 nt, Homo sapiens
ccacggggacaacccccgacggcccacgccagggagggggagagaggaagggaaggaagacaagaaccagcagagagaccaaagac

SEQ ID NO: 99736 - RNA, 76 nt, Homo sapiens
gccggaaaccggagcgcgcagcaggcaccggcccgaccagccacgacacccacgaaaggacaggcagggacggggg

SEQ ID NO: 99737 - RNA, 56 nt, Homo sapiens
gcaaccacagagagagagagggagggggcgcgaccagccacagaagccagccaaca

SEQ ID NO: 99738 - RNA, 55 nt, Homo sapiens
gcgggagcgcagcgaccacaccgaagggcagcgccgccagaagaccagggcccgg

SEQ ID NO: 99739 - RNA, 79 nt, Homo sapiens
cgcccgcaccggcccggccccacgcgcggccggacggaccccgccaggccgcgcaggggcaaagagaaccaggagaccc

SEQ ID NO: 99740 - RNA, 82 nt, Homo sapiens
gaacgggaaacacacacacaaaaaacccacacaggacgcggacaagggcggcagagaagaggcgaaagaagagggaaaagac

SEQ ID NO: 99741 - RNA, 71 nt, Homo sapiens
agggagggcaagaaaaaggaggaacagagggggaaaagaaggcaacagcagaaacgaacagaagaaaaaga

SEQ ID NO: 99742 - RNA, 79 nt, Homo sapiens
cggcggagcgcaggcccggccgacggccacacggcggccgcagggcgccggagccccccagggaaggaagaagccccaa

SEQ ID NO: 99743 - RNA, 73 nt, Homo sapiens
cagcggaagagaggaaggagacagagagagcaaagaaaccagacaagccgagaccaccaggagcagagcggag

SEQ ID NO: 99744 - RNA, 75 nt, Homo sapiens
agagacgcagaggggcggcggggggcagaaccaaaggcaagaaggaaaaaacacgacacaccagagaagaggagc

SEQ ID NO: 99745 - RNA, 78 nt, Homo sapiens
caccagcgcccaaacgcgaggggaacgcagacaagcagaccggaagaccgacggaagaccacaccccgagggagccca

SEQ ID NO: 99746 - RNA, 80 nt, Homo sapiens
cggaaccaaaagcagggaaaccgcgccagaccaaaacgaagaagacgagccaaacccaaaaaggaaggggggggagggcg

SEQ ID NO: 99747 - RNA, 78 nt, Homo sapiens
acaccaacaaggcacacacaaggggaagcgagagaaaaacaagcgccacacggcagaccagagggaaacagcaggaac

SEQ ID NO: 99748 - RNA, 79 nt, Homo sapiens
caagacccggagacgaccaaacagcaaagagggaccgaccggccaggaaaagacagacggggaaaaaaaacgaagacac

SEQ ID NO: 99749 - RNA, 62 nt, Homo sapiens
cagcggaaacagaagaaggagccgagaagaagaagcaagcagaagaggaacagaagaagcag

SEQ ID NO: 99750 - RNA, 78 nt, Homo sapiens
gacaccacgcagacaggggaaggcggaaagccgggcgaggaccgaccccacaaaggggacggacacaacgagaccaac

SEQ ID NO: 99751 - RNA, 102 nt, Homo sapiens
gcgagggcgccgcacccacaccgcgcgcgcaggcgcccagcgcgaagggaccaggaacgggaggagaaagcacaggaggcacaacaaggcaagccacgaggc

SEQ ID NO: 99752 - RNA, 70 nt, Homo sapiens
ccagaaacgagccaaaaagacaagcgaaaaagggcagaccaagcacaccagaccagaaagagccaggaca

SEQ ID NO: 99753 - RNA, 75 nt, Homo sapiens
gccagggcggagaacagaccgaggaagccgccgacagacccagcagaaggacggcaccaggacaagcgagggaga

SEQ ID NO: 99754 - RNA, 69 nt, Homo sapiens
agagccagcaaaccccgaagagccgccccagggaacgcgcaacacaaagacaggcgaagaaacagagac

SEQ ID NO: 99755 - RNA, 71 nt, Homo sapiens
gcaagccccgccagaggccagaccaccacggaaacaaggacgggcgggcagcccgccggccacacgcccgc

SEQ ID NO: 99756 - RNA, 64 nt, Homo sapiens
ggccacgccgggggcggagcggagcacacggaggccggagaagggcgcggaggcgcggggcgcc

SEQ ID NO: 99757 - RNA, 78 nt, Homo sapiens
ccacaccccgacccccgaacccccagcccaaacccggaaacccagcggcccagccgggggagccagaaaaacacagcg

SEQ ID NO: 99758 - RNA, 63 nt, Homo sapiens
cggagcaagcaaagacgaccggaaagagccaagcggggacaacaggagaagcggaaggagacc

SEQ ID NO: 99759 - RNA, 74 nt, Homo sapiens
gacgaggacgaccaacaggcagcagcgggccccgccaccggcacaccgaagggagaaaccggggcggggggcgg

SEQ ID NO: 99760 - RNA, 83 nt, Homo sapiens
gcgaggaacccaccgccgcccccaccgccagcccggccgcgagcgcggccgcaggagggcggaaaacaccccaaaagccaaaa

SEQ ID NO: 99761 - RNA, 85 nt, Homo sapiens
cagacccaagccaacccaccccacaaagaccaaaccaggaagaggcagaaggacgcaaggccgaagggcaagagggcacagaaga

SEQ ID NO: 99762 - RNA, 79 nt, Homo sapiens
ggaagcgcagggagaaggaagaggggaaaaggcacaaggaccaggaaaaagcgaagggaagacgcgacaaaagaaagca

SEQ ID NO: 99763 - RNA, 77 nt, Homo sapiens
ccgccaaggagacgccccacgaggcccaaaccgccaagggcccagggcgggggcgggcacagcacgcacccgccccg

SEQ ID NO: 99764 - RNA, 80 nt, Homo sapiens
acaagacgagagccggacgacgaacagagcagagcacgcccagaaggccggaaaggagcacacccagcaaagaagcgaag

SEQ ID NO: 99765 - RNA, 76 nt, Homo sapiens
ggaggagcgaccccaaagaccagacccagggaagcgggcacggaagaggaccaccacgcccgggcaacaacggagg

SEQ ID NO: 99766 - RNA, 95 nt, Homo sapiens
aacaccggcaggaaccaccaggacagacacagaggacccgaaaccggagagcaccgcgaaaaggcggccgagggcagcgaacacagagaaaccca

SEQ ID NO: 99767 - RNA, 69 nt, Homo sapiens
ggaaggccaagaaaacaggaacgagccacagcaggagcacaaggcaagcccacccgacccagacacacc

SEQ ID NO: 99768 - RNA, 78 nt, Homo sapiens
gaacagcagcacacaccacacccaggccggggcgccagagcgccaagcagcaaaggagagggacacaaggacgagcaa

SEQ ID NO: 99769 - RNA, 79 nt, Homo sapiens
aacaaccgcggggcaagagccacaccagacgaaaaaccagaagagaaaaaacaaaggggagaggcaccccgcgggacga

SEQ ID NO: 99770 - RNA, 55 nt, Homo sapiens
gaaagaaaagacgcccagagaagagacacaagccgcgagcgccacgagaagaagg

SEQ ID NO: 99771 - RNA, 36 nt, Homo sapiens
aaaagcagccaccagcaggcaagcggagaccggcaa

SEQ ID NO: 99772 - RNA, 84 nt, Homo sapiens
gaccggcggccacaaggccgcccagccgcacgcgacgacagccggaaccaaaaagaagccccagagccggggccaggagcccca

SEQ ID NO: 99773 - RNA, 61 nt, Homo sapiens
cccaagagaggcccagagaccggaaaggcgggcaaccgcaggaacgcgagcaagccaaggg

SEQ ID NO: 99774 - RNA, 74 nt, Homo sapiens
cggacaaaacccacaagcccacgagaggcacagaaacccagacaggaccagcggcacgggcgcggcgccccgac

SEQ ID NO: 99775 - RNA, 59 nt, Homo sapiens
cgcgcgaggaaaggccgaggggccggagccacaggacagagggcaggaaccccacaaac

SEQ ID NO: 99776 - RNA, 82 nt, Homo sapiens
gaggaccggcggagggcggcagcaggaggaggggccaacaagacggggagccgagagcggaaagaccacagcaagaccacgc

SEQ ID NO: 99777 - RNA, 65 nt, Homo sapiens
gggggagaagaaagagccaaacaacgccacaggcaggcgacacgagacccacgccaccccaccaa

SEQ ID NO: 99778 - RNA, 73 nt, Homo sapiens
caagcgcggaggaccacggacacccaggcaacgcccccggaaggacaacccccaggcaccacccccaggaccg

SEQ ID NO: 99779 - RNA, 113 nt, Homo sapiens
gggaacccacgagggcagccggcgggaggaacgccacgcagcgccggaaacgccacgcgcggggaggcccagcccgccgcagggccaccccgcggcccaccgccgccgccccg

SEQ ID NO: 99780 - RNA, 74 nt, Homo sapiens
aacaccgacacggggcggggaagcggccgggagacaaggaaaacacacagaaaacaacaggggagcggaccacc

SEQ ID NO: 99781 - RNA, 72 nt, Homo sapiens
cccaacaggcgggcaggagaacggccgggcgccagcaacggggcggcacacaaggagcgaagggcagggaga

SEQ ID NO: 99782 - RNA, 66 nt, Homo sapiens
cccggcccaaggccaacgagaggaagaaagaccaccggacaggaacagggcaggcgcaaaaacagc

SEQ ID NO: 99783 - RNA, 76 nt, Homo sapiens
cggccagccccgaaacgaaacacaggacacgagcaggagaccgaggacgcaaacagcaaagaggcccaaaaacaac

SEQ ID NO: 99784 - RNA, 75 nt, Homo sapiens
acaccagcagccggccacgccaccaagacccgacccagagcaaacacgaaggagagaaagagaaggagcacaaag

SEQ ID NO: 99785 - RNA, 88 nt, Homo sapiens
ggaagagcccacggacacacaggaacgggggccacgcacggagaacgggcgacgcacgaggcacacaggaaggaggggagcagggacg

SEQ ID NO: 99786 - RNA, 88 nt, Homo sapiens
ggcgggcgaggcggcccagcggcggcagaaacgaaggaggcccaaccacaaaaggagccgacggaacccagacggagaacaaaaggaa

SEQ ID NO: 99787 - RNA, 77 nt, Homo sapiens
gggaaaggccgcgggggcaacggagaaaacccggaaccgcgacggcggcaggggaggggaggaagcgcccgggacga

SEQ ID NO: 99788 - RNA, 72 nt, Homo sapiens
aggaaaagaagaagaagaccacaaaaaagagacccacagccagcaacaccgacccacgggaagcaaaggaag

SEQ ID NO: 99789 - RNA, 72 nt, Homo sapiens
aagggaggggcaaagacagaggagcgccagcacggagaggggcccgaaaacccgcagaaacggagaaacgaa

SEQ ID NO: 99790 - RNA, 77 nt, Homo sapiens
gggaagaccaagagcacagaagaagccacacacagaagacccaaagagaacacaggagaggcaagaggggaaagggc

SEQ ID NO: 99791 - RNA, 76 nt, Homo sapiens
gggcgaagcacgcacaccgggcagggccgagaggacgccagcggcgcgcaggccaaacgccagggcgaaggaacca

SEQ ID NO: 99792 - RNA, 74 nt, Homo sapiens
gcccgggccagcggccgcgcacccccggccggaggcaccagcgccaccagcgggcccccacggagggcagcaag

SEQ ID NO: 99793 - RNA, 68 nt, Homo sapiens
caaacagaggagcccaaaaagggacaaggcccaggaggccaccagcacggccacgggcggcacggagg

SEQ ID NO: 99794 - RNA, 80 nt, Homo sapiens
ggggcccagcccggggccggcgcagggcggaaggacaacagcccgacaaccagaggcaagaaacaaaaccccaggccagg

SEQ ID NO: 99795 - RNA, 73 nt, Homo sapiens
aggaccggacccggacccaaaggccagcaaagcagagaaagggggaggcggacccggcaacacgaaccggaaa

SEQ ID NO: 99796 - RNA, 56 nt, Homo sapiens
ggagagacagcacagcacccacaaagcaacgccggaaacacagaccgccgccaccg

SEQ ID NO: 99797 - RNA, 70 nt, Homo sapiens
caaggaagcaggcgcacagagagaagaacgccaagacacacccgaaaggccagcgccggagcggggggga

SEQ ID NO: 99798 - RNA, 77 nt, Homo sapiens
gcgccagacaaccaggcaagcggaagaaccgaacacacaaaggaacacagcacccacccacacccacacccgcgacg

SEQ ID NO: 99799 - RNA, 78 nt, Homo sapiens
cccccgcgcggaggacaccaggaacagcagagaacaaaggaccgcaaacgaagacggcagcacagcaggcacaggcgg

SEQ ID NO: 99800 - RNA, 85 nt, Homo sapiens
agggaaaagcagccagaggccgcgagcaaaaccaccaaccgggaccagggcgccaaaacagggagaaggggcggagaagaggacc

SEQ ID NO: 99801 - RNA, 72 nt, Homo sapiens
ccagcaccaaaacgggaacaggaccccagaagacaaacaggacagcgaagaaaagcagcgaggaagagccca

SEQ ID NO: 99802 - RNA, 66 nt, Homo sapiens
ggaaggccggggcgcccggcgccggccgagaaggcagaggcgagaagaaaaacccaagccggaaca

SEQ ID NO: 99803 - RNA, 76 nt, Homo sapiens
gggaagcggggcaccagaagagagaaacagcgggaaagaaaaacgagaggacacagagcaccaacaccggccccaa

SEQ ID NO: 99804 - RNA, 76 nt, Homo sapiens
ccgcccaccacgaggcggggccaggccagcagcagaacggaccgaaaagcccgccgggaccgagagaccagcccga

SEQ ID NO: 99805 - RNA, 72 nt, Homo sapiens
gccaggaaggaacaagccaagaggacccgaagccacagccccaagagaaagagcgcgcacgaaagcacacga

SEQ ID NO: 99806 - RNA, 57 nt, Homo sapiens
caaagagccaagaaacccgcacaaggcacaaagcaggaggcaggaggccaggaagag

SEQ ID NO: 99807 - RNA, 86 nt, Homo sapiens
cagaggcccagggaggcaggggcagaaacagagaaggaacagggggagcgggccggagagaagagaggggcgcgaggagaaggaaa

SEQ ID NO: 99808 - RNA, 38 nt, Homo sapiens
cagcacccccagcgggcagaagcagcgacacaggagag

SEQ ID NO: 99809 - RNA, 78 nt, Homo sapiens
ccgggacccgcgccgcgcccccggcccgcgggcggcccacggcgagcaacggagcaaggaaagagcagaagccaaaca

SEQ ID NO: 99810 - RNA, 62 nt, Homo sapiens
agggcagagcacccgacgcacacagggagaaacccagaagcaagaaggggaaggccaccgag

SEQ ID NO: 99811 - RNA, 75 nt, Homo sapiens
cgagagagcgaaaggcgacgcaccagaaacggaccgaggacagacaccaacgggcccgccccaggagcccgccca

SEQ ID NO: 99812 - RNA, 88 nt, Homo sapiens
cggcgagcgccgaggggacaggccgagcgcggggcgccggaggcaggcaagcacgaggagcggcaggacgagcaggcacaccccgggc

SEQ ID NO: 99813 - RNA, 99 nt, Homo sapiens
ccggaggggcaagccggcgaagccacggcgggacaggaagccacacaaggccaagacaggggacagccggccgaacggcagccccgggacccaaacaga

SEQ ID NO: 99814 - RNA, 85 nt, Homo sapiens
gggcacagccacagcgccgagaggaggccccgagccccggccccaaagacccaaaacagagacaccccccagcccccgcgccccg

SEQ ID NO: 99815 - RNA, 45 nt, Homo sapiens
aagagacgaagagacagcggagaagagcagcgacaagagcagcac

SEQ ID NO: 99816 - RNA, 56 nt, Homo sapiens
aacgccaagaggggagcgcccccagcgcagacaaaaggacagcgacagacagcaaa

SEQ ID NO: 99817 - RNA, 68 nt, Homo sapiens
gccgccaacgcgcccccgaggacccaccggagcgccgcgcggggcaggccgggcgggcagaggacggg

SEQ ID NO: 99818 - RNA, 35 nt, Homo sapiens
acccgggaggcggaggggcggcccgacggccccgg

SEQ ID NO: 99819 - RNA, 76 nt, Homo sapiens
ggcacccgcacgagcaacagacgagcgcgccaggccgacagccgcggccgggcccgagggaaagcaaaaccagcaa

SEQ ID NO: 99820 - RNA, 82 nt, Homo sapiens
aagccaaaacagcagcccggaggagcagccagcagggcaagccgggggagcaccggggaccacggaagcgaccgaggcccgc

SEQ ID NO: 99821 - RNA, 77 nt, Homo sapiens
ccacgcgcgcacggcagccagcgcaagaggcgggcagcacgcgcggagaaccccgccaaccagaggcaagcacaaac

SEQ ID NO: 99822 - RNA, 61 nt, Homo sapiens
gacagcccgccgggacgccggccgacgggacaccaaggcgggagacacaacaacggcaagc

SEQ ID NO: 99823 - RNA, 73 nt, Homo sapiens
acccggggcccaaggggaagaaccgcacgggaaacgccagacagcggcaagccagccccaaaagccgggagga

SEQ ID NO: 99824 - RNA, 72 nt, Homo sapiens
agagaaccgaccagaacgcagcaacaaagccaggcggcacccagggccggcccaagggacgccgaacagccc

SEQ ID NO: 99825 - RNA, 86 nt, Homo sapiens
acaagacgcggccagcagcaccgagccgacgcccgagcagggaagcccacagaagcacagcgccaggggggcaagccggggcacag

SEQ ID NO: 99826 - RNA, 67 nt, Homo sapiens
ggagagagcggaggacagccgagaggaggagaaagaaggggcaagaggaagaagcagaagcagagag

SEQ ID NO: 99827 - RNA, 98 nt, Homo sapiens
gcagccccgagcgccgcggacgcgcacgagggacggggaaaggacccaaagacaggaccacgcaccagcagagaaggaaagcaaaccgaagcaggcgg

SEQ ID NO: 99828 - RNA, 75 nt, Homo sapiens
cacaaggaaagaacaggaacgaggcgaagaaggcgcagcgacgaggcgaagaggagaggaaggcaccaaagacag

SEQ ID NO: 99829 - RNA, 76 nt, Homo sapiens
cgccgcagggcgcccggccgccaggccagcgggggcacccgaggaggaagagggcagggcccacggaaagaaggga

SEQ ID NO: 99830 - RNA, 70 nt, Homo sapiens
gaagacgcagaggaaacggcagcagaacagccgccaaaacacaaaaccagaaagaaggagaaagaaaaaa

SEQ ID NO: 99831 - RNA, 73 nt, Homo sapiens
agacaacccccagacacgaggggcaaggcacgaaagcacaggcagcgcggagggccgcggaaaacagcgaagc

SEQ ID NO: 99832 - RNA, 86 nt, Homo sapiens
ccggcacacgcccagggcacaccacgaccgcaaggacacgaggagcaccgcaggcaaaagcagaccggaaaacccaccggcaagac

SEQ ID NO: 99833 - RNA, 73 nt, Homo sapiens
gacaagacaccagaaagacaggacagaaagcgggacacaagcaggagcacagaccccgaaaagggagacacag

SEQ ID NO: 99834 - RNA, 76 nt, Homo sapiens
agaaaggacggaggcgacaggcagaccacccagacgaccagagccccaaacaggggcgagaaagaagaagaaaacg

SEQ ID NO: 99835 - RNA, 83 nt, Homo sapiens
gcggcacggcccggggccgggagcgcccgaggaacacgccgcagccacaaaaacccggggcgcgccgcaggaaagcaaggggg

SEQ ID NO: 99836 - RNA, 85 nt, Homo sapiens
ggagagacgccagaagcaaccaaaggcacgcccgacagcgaaaaagcacggggaggaaaagcggacacgaggacaagacacccca

SEQ ID NO: 99837 - RNA, 54 nt, Homo sapiens
gcagggaaaacaggaaggaaccagccaaaaagcaagcaccacaaacacagcccg

SEQ ID NO: 99838 - RNA, 67 nt, Homo sapiens
cacaacacaacacgccccgaaggcacaagaccggcagggaggaagccaagaaaaagaaacaagaaaa

SEQ ID NO: 99839 - RNA, 101 nt, Homo sapiens
gaaccaacgcacgcaacaggagagaaacgaaagggaagcagaaccaacagacagggcagggccgggagcacgcacccggcgcaggagcagagccccggcca

SEQ ID NO: 99840 - RNA, 88 nt, Homo sapiens
gacggggcccagcagacagccgaggggagcgcggggcccggcagaaagaccccaagaagaagcggaagaggagccgcggaaccaagac

SEQ ID NO: 99841 - RNA, 67 nt, Homo sapiens
gaacggcagcaaggccaggcaggacaggaaggggcgaccacgaccgaagagccagagacaagcccca

SEQ ID NO: 99842 - RNA, 80 nt, Homo sapiens
ccaggaacagggacagcacccaccccggagggggaccacaagacccacgacagacaaggcgcccgcgaagagcccgcggc

SEQ ID NO: 99843 - RNA, 70 nt, Homo sapiens
cgacggggaaaggaaagcagcccgaaaagaagaggacacccccacacgagccccaaccccccagaccaaa

SEQ ID NO: 99844 - RNA, 61 nt, Homo sapiens
gcacgcacgcgggcagggaacaggcggagcggaaggccccgggaccaaggacacgcagacc

SEQ ID NO: 99845 - RNA, 93 nt, Homo sapiens
gacagcgcggcccgcgaggagccgccgcgcgcccgcgcccccgcgcgacgccagcccgagcgggaagaagccgcagcaagccgcagcggcgcg

SEQ ID NO: 99846 - RNA, 76 nt, Homo sapiens
acccgcccagcgaaagaagggaggagcgagaacacagaaaccggccccggaaacaacgaacgagcaaggaagggcc

SEQ ID NO: 99847 - RNA, 124 nt, Homo sapiens
cggccggaggaccacaggcccagacgagcggaggaggcacagggcgcggaccgcacgagcgcgaacaacccgaagagagacggagccgggcacggcaagaccaaccgggcccccccggcagggg

SEQ ID NO: 99848 - RNA, 72 nt, Homo sapiens
acccagaacaaagcagccagaaaacgaaggaccgaggaaggaaaacggagccaagacagaacgaagagacca

SEQ ID NO: 99849 - RNA, 77 nt, Homo sapiens
acggcaggggggaggggggaagaccgggggacgaccaacggcccccacgggcgggagcagcggaagacaccaaggcc

SEQ ID NO: 99850 - RNA, 76 nt, Homo sapiens
acccaacagaggagaaaaagcgcaggggagcggagcaagaaaccaagacaaacaaaagacgcccccgagaggaacg

SEQ ID NO: 99851 - RNA, 35 nt, Homo sapiens
accaaaagaagcacaccagccaacacagacaagac

SEQ ID NO: 99852 - RNA, 74 nt, Homo sapiens
aagccaagcacgggcgcggggggggagcccacacacgccccgcgcacaacaggcgaaccgcgccagccccaggg

SEQ ID NO: 99853 - RNA, 70 nt, Homo sapiens
accgcagaagaaaaggacgaaccccagaaaacaggacaacaaaaacacggacccaacccacaaccggcga

SEQ ID NO: 99854 - RNA, 81 nt, Homo sapiens
cacaaaagagcagaggaggaacaccaggcacaagaaaagagaggaacagcacggaagaaccgaagaaagcaagaacaaccg

SEQ ID NO: 99855 - RNA, 63 nt, Homo sapiens
acgccagacgaccccacccgcgccgcgacccggcccagcgcgagaagcggaggccaaggccgg

SEQ ID NO: 99856 - RNA, 61 nt, Homo sapiens
cgagcagacccaccgacgcccccagggcggcgacggcggcgcgaggaccgaccgggcccgc

SEQ ID NO: 99857 - RNA, 70 nt, Homo sapiens
ccaaaaggcccgaagacaaggcggcccggcagcaaggcgagaagaaagaggccagacaggaggagaagcc

SEQ ID NO: 99858 - RNA, 61 nt, Homo sapiens
gagccccggaaggccggcccacacggcgaccgcaccccccaagacaaaggggcccggaggc

SEQ ID NO: 99859 - RNA, 50 nt, Homo sapiens
aaagggccaaagaagggagagagagcacaaagcaaggaggagaggcagca

SEQ ID NO: 99860 - RNA, 83 nt, Homo sapiens
aagcgaaagcgccgagccgccccgaccggaaagaccgcgagaaaaggccagggcccacgcaagacagcaaagcaagccaagag

SEQ ID NO: 99861 - RNA, 94 nt, Homo sapiens
cgagagagcgaaaagcccagcgagggccaggcagcagcggcgcagggagggcaacaacaagcagagacgcgacaaagaggggggggagaccgga

SEQ ID NO: 99862 - RNA, 79 nt, Homo sapiens
aagacgagcaacaggagagggaacgggaggaccagggggcgaaaacgaggaagaacgcagaagaaagaagagagagagc

SEQ ID NO: 99863 - RNA, 77 nt, Homo sapiens
cacgaggccccgacaggcggcgcacggaaacagccacagcagaccagaaggaaaacacaccaggcacagaaaggccc

SEQ ID NO: 99864 - RNA, 51 nt, Homo sapiens
aacccccacgcggccagcgaaaacgcccagggagcaggcgaagcgagccag

SEQ ID NO: 99865 - RNA, 80 nt, Homo sapiens
ccgggagacagagcgggcagagccaagggccaacccccaggcgggcaacacaacaaggcgcggacacccagacaagcgcg

SEQ ID NO: 99866 - RNA, 78 nt, Homo sapiens
gcgccccaggagcggccgcgcaccgccaaagacaagaacagaggggccgagaagccaacaacggggcgacaaagaaag

SEQ ID NO: 99867 - RNA, 82 nt, Homo sapiens
ggaaggacggggcaggaagaaaaagaaaccaccccacccaacccccgacacagaagaggagaaaacggaacaacaggagggc

SEQ ID NO: 99868 - RNA, 68 nt, Homo sapiens
agaacaggcccgggccaaaacagcaacccaaacacagaaggagaaacggggaaaaggacagaagaaaa

SEQ ID NO: 99869 - RNA, 82 nt, Homo sapiens
cacaagaaaccagggcggccccagcccagacggaaccagaaaagaccaaacgacaaagaggcggagaaaaaggcagaaggaa

SEQ ID NO: 99870 - RNA, 78 nt, Homo sapiens
gcacagggacacacccccggggacgaagaggacccagcccagccgcccagcacgagcggggaggcaccgccccaaccc

SEQ ID NO: 99871 - RNA, 70 nt, Homo sapiens
ccagcaggcagggagagaggggcggaaaggaccagcggaacaaacaccacccgagcaggccagggacaac

SEQ ID NO: 99872 - RNA, 39 nt, Homo sapiens
cggaggagccagcccaggccacaccagaggaaaaaacag

SEQ ID NO: 99873 - RNA, 76 nt, Homo sapiens
gagcagggacaaaggagaaacagagacaccccagaaacagacagggcaaggcccacaacgaggccccagacccggc

SEQ ID NO: 99874 - RNA, 34 nt, Homo sapiens
caccacccacgagacgaggagaaaacgaagagca

SEQ ID NO: 99875 - RNA, 76 nt, Homo sapiens
aaccaaccgggaccccaagccaaagaacccacacaaggacaaggggagcagcgcggaggaagacaggacgcgcggg

SEQ ID NO: 99876 - RNA, 81 nt, Homo sapiens
aggggaccggcaagcacaagacacacaaggacgaccaggccaagcaagaagcgccacgcagagccccgccaggaagacacg

SEQ ID NO: 99877 - RNA, 77 nt, Homo sapiens
ccacgcaccgcacaacaagaggccggcggggcgacagccacggagagaaccagaccaggaggcgggcgagcaggagc

SEQ ID NO: 99878 - RNA, 65 nt, Homo sapiens
ggggacgcacggagagggcagcggcggaggaaagagcagagcagaccgcgaagcccacccaccag

SEQ ID NO: 99879 - RNA, 74 nt, Homo sapiens
gggaacgcagggaaagaaacaccaggacacaccaagacgcgcaacgagcagacaggaaacaccaacaacaaaaa

SEQ ID NO: 99880 - RNA, 67 nt, Homo sapiens
gggcggggaggggacgaaccaggcagcccaaagcacggaagaacacgggaaagcagcaaaaagaaaa

SEQ ID NO: 99881 - RNA, 82 nt, Homo sapiens
aaaaaccaaagaacacaagaaaccgcgaggaggggggaccccgcccagggcccagaggacccaacaccagaagacacacagg

SEQ ID NO: 99882 - RNA, 81 nt, Homo sapiens
ggaaacaaagggaggcggaaccagagccggaagcagccaaagcacggagacaagaacgcgggaaaagcgggagaagggccc

SEQ ID NO: 99883 - RNA, 37 nt, Homo sapiens
gaccaggggagcggacgcaggcggaggcggggcggac

SEQ ID NO: 99884 - RNA, 59 nt, Homo sapiens
cagggagcacaaccgaaggaccacggggaacacagaacagaagacgaaaaccagcccag

SEQ ID NO: 99885 - RNA, 43 nt, Homo sapiens
gccggggaccccagagacccacagaacggggaagagaagagag

SEQ ID NO: 99886 - RNA, 74 nt, Homo sapiens
gagcggaggccgaggcacccgcgcagcccaccagccggacacccgaagcagaagcgcggccaaaagaggggaag

SEQ ID NO: 99887 - RNA, 86 nt, Homo sapiens
cggacgggcacgggcgaccggcccgcgaggagccgaggaaacccagacccaagaccaaccgaggaggaggaggagggagacgcgcc

SEQ ID NO: 99888 - RNA, 55 nt, Homo sapiens
gacccaggagacgcaggccaaggagaaagcagggcccccaagccggcaggggaac

SEQ ID NO: 99889 - RNA, 63 nt, Homo sapiens
gggaaaaggcagccaggcggggaggcccgcacccccagagacgcaggcagaggaagggcacaa

SEQ ID NO: 99890 - RNA, 80 nt, Homo sapiens
gcgcaagagcccccaggaagagaaggcgggacacacagcagggaccacccccagcacccccgaggagcgccgccccaggc

SEQ ID NO: 99891 - RNA, 46 nt, Homo sapiens
ggaacaccggcagccggaggaaagcaccggggaagaaaacagccgc

SEQ ID NO: 99892 - RNA, 76 nt, Homo sapiens
gccagagagcaggaccggcccaacagcccaaagcggagcccggagcccagagccgaggagaaggcgaggacgcggg

SEQ ID NO: 99893 - RNA, 112 nt, Homo sapiens
agcggggaaacggcaaagcgcagcccgcagacagaggggcgacgaccgcacaacagaagaacagcgacacccagcagaagcagcaggaaacgaaccgacaaaacaccagaga

SEQ ID NO: 99894 - RNA, 58 nt, Homo sapiens
gagaaggagacccaagaggagcagcaaccggcgcagggggcagggccagaaggaccca

SEQ ID NO: 99895 - RNA, 74 nt, Homo sapiens
gaaaagacgagcgaaggggagaggccacgggcaacgcggaggaaggagaaagaagaggcccagcacaagcggaa

SEQ ID NO: 99896 - RNA, 71 nt, Homo sapiens
aaggagaagagcgaagcccagccaagacccgggagccaaacacagaacgaggaaccccagagaggacagaa

SEQ ID NO: 99897 - RNA, 93 nt, Homo sapiens
gggacccagagaggcgagggaaagaaagacagcaaaggccacgaaagcaacccaccacaagacaaagaccaccaggacacgaaagcaagacca

SEQ ID NO: 99898 - RNA, 67 nt, Homo sapiens
aagaaaaaaaagaagagagcccaagaacaaagcgccccaaaagcagcgggagagaggagagcagaga

SEQ ID NO: 99899 - RNA, 62 nt, Homo sapiens
cggggcgaggcggccgcggggcccgagcgcaggagaacacaaagaacccaaacgaaaggaaa

SEQ ID NO: 99900 - RNA, 71 nt, Homo sapiens
cccaaaggacccggagagcgagaaccagccaaaacacacgaacagggaacaagaaacaccgaagaagagca

SEQ ID NO: 99901 - RNA, 73 nt, Homo sapiens
caacagaacccgaaacccacaggcccagccccgacagggagacggaaggagagaaagcggaagaagggccgcg

SEQ ID NO: 99902 - RNA, 68 nt, Homo sapiens
gcccgccggcacgccgccagccccgggggccacgagcggacaccacgccacccaagagagagcaaaaa

SEQ ID NO: 99903 - RNA, 69 nt, Homo sapiens
cggagaagcgcgcgcgccgcgggaaacaaccaacccaggagcaaccgggagggagagagaagaaaggag

SEQ ID NO: 99904 - RNA, 70 nt, Homo sapiens
cagagaaagaacagagacaaaggaccaaagaggaccgggaaagagaaaagcagggaaaccaagcagcgga

SEQ ID NO: 99905 - RNA, 80 nt, Homo sapiens
aaacacaggcaccggagaccgcacacgaccaggcgcgcggccgcaagaaaaggacagacgcaacacaggaaacaagagca

SEQ ID NO: 99906 - RNA, 78 nt, Homo sapiens
accaggccaccagcgaaaggcacagccaccgaaagaggagaagcaccgaagaagccaaccagccggagccagccaaga

SEQ ID NO: 99907 - RNA, 87 nt, Homo sapiens
gcaaagcagcagaacggacagggcaaggaagagaggcgcaacaccaacagcagaagaggaccagcacaagcaacggcagccacaccc

SEQ ID NO: 99908 - RNA, 34 nt, Homo sapiens
cccgcgcaggccgcaccacgaaccacagacaaga

SEQ ID NO: 99909 - RNA, 85 nt, Homo sapiens
gggaaaaggcggacgggaaggcgggagacgagaagccgaaaagcgcagcgagcggagccgccggagggaaagaaaacaagccacc

SEQ ID NO: 99910 - RNA, 70 nt, Homo sapiens
gaagaaaaggaagcaacaagagcgcaacaagagcacgggcaagcaggagacaaacccaccaaacgagcag

SEQ ID NO: 99911 - RNA, 62 nt, Homo sapiens
gcaccccaccacgacacgggaggacgaacagcccaaggaggaagcggagcccacgaggggag

SEQ ID NO: 99912 - RNA, 66 nt, Homo sapiens
gacccagccccagaagagacagaagagcagcacaggggaagagacagaaggcaggacagacaagac

SEQ ID NO: 99913 - RNA, 82 nt, Homo sapiens
gcggggcgcgccaaggacacggcacaccgaccgacgaagcggccagagcagcagggacccacgagccgccgcccgggcggag

SEQ ID NO: 99914 - RNA, 137 nt, Homo sapiens
cgaggagcaggcgcggccgcggcgccaagcggccccagcggccgcgaccgagcaggcgagaccacgccgccaagcgagccaccaaagaaggaggcgccaccacggggccgcagggaagagagcagagagggaaggac

SEQ ID NO: 99915 - RNA, 76 nt, Homo sapiens
aagacccaggaccccggaagccagaaaggaacaagcacaaggaagagcccacagaaaagacccccacacgagaagg

SEQ ID NO: 99916 - RNA, 78 nt, Homo sapiens
ggagaggagagacgggaggagggaaggagaaaaggggacgaacgcagcagaaaagggaagagaagaacagggagcacc

SEQ ID NO: 99917 - RNA, 77 nt, Homo sapiens
ccgaggagcccaagggacagccgccccgggcacacaccccgacccgcccccccagggcacacaggccccgagaacca

SEQ ID NO: 99918 - RNA, 82 nt, Homo sapiens
cgcacgacgagacggcagcgcacgggacaaggcgaccaggccgcgggaagcgcggacgccccaccaacggcgcggacccgac

SEQ ID NO: 99919 - RNA, 65 nt, Homo sapiens
ggacccaccggacaccacaacagcaggccgaaacagacaggaagcggcggcagaacgcacaacca

SEQ ID NO: 99920 - RNA, 81 nt, Homo sapiens
aagccgcacagccgcggcggcagcagcaggagagggccccagcgcaaagcccaaggccacaccaggacccagcacgccccg

SEQ ID NO: 99921 - RNA, 80 nt, Homo sapiens
gggagaggcgcagagcgagggcaggagagcaagcaaagcagaccgagaaaaacacaccccaagcagaccacccaaaccaa

SEQ ID NO: 99922 - RNA, 71 nt, Homo sapiens
cgggaaacccacccgccccaaagcgagggacgacgagaacggcaggagcccagcggacggaggccgcccac

SEQ ID NO: 99923 - RNA, 55 nt, Homo sapiens
gaaacaacagacagcgggcaccgacaggaacgaagagggaccgcgagaagagggc

SEQ ID NO: 99924 - RNA, 105 nt, Homo sapiens
gcacccaggaggcccagaaaggagggcacaggaagaacacagcgagggcaaggcagcggaggcaagagggcaagcgggagggcgggcgcaggcggagaaggcccc

SEQ ID NO: 99925 - RNA, 74 nt, Homo sapiens
ggacccgcccagcagaagaagagaggagggagaacacagaaaccggccccagggaaaaaagacgacaagaagga

SEQ ID NO: 99926 - RNA, 99 nt, Homo sapiens
gcgccacacagccccacaacacaccgcaccggcccggcaagggcccgaaggagcaaagcgcggccaagccagggggagccgggccgagaccccccaccg

SEQ ID NO: 99927 - RNA, 75 nt, Homo sapiens
ggagggcagcccagggacccgaaggcagcccaaaaaaggagaaccccaaggcaaaacaagagaggaacgcagcac

SEQ ID NO: 99928 - RNA, 82 nt, Homo sapiens
caagcgaacaggacggaaagaacaggagcgaccaggacacccccgcccgccacggagacggaagggggcccgccacaagacg

SEQ ID NO: 99929 - RNA, 76 nt, Homo sapiens
gggagcgggacacgaacggaccgccagagcggaacgaccccagagcgagcccgcagcagcccagaaacaaagacag

SEQ ID NO: 99930 - RNA, 72 nt, Homo sapiens
ggagagccagccccgaggaacccagccacaggagcacagcgggacagaaccccccggaaaagcacaagaagg

SEQ ID NO: 99931 - RNA, 73 nt, Homo sapiens
agggaccggcccccagcaagccccaggggacaagaagggaaggaacacagcagagcgggaacagaagaagcag

SEQ ID NO: 99932 - RNA, 74 nt, Homo sapiens
acaacacagaacgaagagaagaagcgagaaacgaaggaggcccaaccacaaaaggagccgacggaacccagacg

SEQ ID NO: 99933 - RNA, 116 nt, Homo sapiens
aaagagggcacccacccacgaagggaggaaaagggcagggacagcgcaggcagcagcaccgccggccaggaggagagcgcaccaccaaaaaggcaaacacaccagccccagaggac

SEQ ID NO: 99934 - RNA, 76 nt, Homo sapiens
cacaagccaccacacccaaacaagaaggaggagaagcgaagcaacaaacagagccgcgcagacaaggcaggaaccg

SEQ ID NO: 99935 - RNA, 67 nt, Homo sapiens
ccagcacacaaccacgcacggccgcgcacggaaacagggaagagccccagggaggcccacacaacca

SEQ ID NO: 99936 - RNA, 78 nt, Homo sapiens
cgcggccgccgcggagaggacccggcagacggcaaaaggcggagacaaaacagaggagaccagaccagaagccccgaa

SEQ ID NO: 99937 - RNA, 62 nt, Homo sapiens
cacagagaggggagaaccaaaccggacgaacgcagaccagaacacacaagaaccgggagaac

SEQ ID NO: 99938 - RNA, 81 nt, Homo sapiens
gaaacccaagcagcgccgccagaaggaagcaacagacgggaccgaaagacaccgagggaagggccgacggccgcgcgggaa

SEQ ID NO: 99939 - RNA, 72 nt, Homo sapiens
aaggggaaggggccgacaaaagcgcagcaagacggccgcgcggcccgcagggggggaaccacaaagaacgga

SEQ ID NO: 99940 - RNA, 71 nt, Homo sapiens
cggacggaggagcaggcgagaagagaagggggacaggagccaggccaagagaaagaaacacagaagcgagc

SEQ ID NO: 99941 - RNA, 77 nt, Homo sapiens
caagaggcgggcaggagcggcggccaggccagacccgaaggccaggagacccgaccccaagcgcaccccccggaggc

SEQ ID NO: 99942 - RNA, 73 nt, Homo sapiens
acacagacccacaccacgacaaccagccggggcacaggacacgagcaggagaccgaggacgcaaacagcaaag

SEQ ID NO: 99943 - RNA, 82 nt, Homo sapiens
gcgcgccaaggacacggcacaccgaccgacggcggaagggccaccagcggcacccaggaaaccaccgccaggaccccgagac

SEQ ID NO: 99944 - RNA, 85 nt, Homo sapiens
gacacgagaaagaggccaaaaaaaaacgaacagacgagcgaagagacccagaacaggggaacaccacaaacagcggcaagggcca

SEQ ID NO: 99945 - RNA, 72 nt, Homo sapiens
gagccagcccagggccagggagcaggagccagggccgagcacgggaagaacagagacagacccgggggcccc

SEQ ID NO: 99946 - RNA, 70 nt, Homo sapiens
gagcgcacgccgaaaacaggccgcaagagaggaaagcgagacgaggacaaccacgacggaagcacaaaga

SEQ ID NO: 99947 - RNA, 78 nt, Homo sapiens
cacagagaccgcgcaggcagccacaaagagcgccccggagacgcggcacagccagggagaggggggaagagggaccgc

SEQ ID NO: 99948 - RNA, 40 nt, Homo sapiens
ggacagggaccaccgggggcaggaagggcgcgcaggaaca

SEQ ID NO: 99949 - RNA, 66 nt, Homo sapiens
agaaaggaaaacgggcgagcggcggccacaaaccagaggaggacgccaacagaaaaacagccgacc

SEQ ID NO: 99950 - RNA, 88 nt, Homo sapiens
gcggcgcccggagggcagcgagagcccaaaaggcagagcgaggagagaagaaggagggaaagccaaacaacggacaaagaccagggaa

SEQ ID NO: 99951 - RNA, 91 nt, Homo sapiens
ggaaccggagaccccgaaaacggaagcgcagggagaaggaagaggggaaaagaaaaggacccaagggggcaaaggcggaaacagcagagga

SEQ ID NO: 99952 - RNA, 68 nt, Homo sapiens
agagaagacgacgcaccgcaggcagacaaaagggccaaagaagggagagagaaaaaggcacaaaccca

SEQ ID NO: 99953 - RNA, 79 nt, Homo sapiens
gaaaccaaagcacaaaccaggaggagaaaggcaggccagccacccccaggagccagggagccagacagagaccgcagag

SEQ ID NO: 99954 - RNA, 74 nt, Homo sapiens
accgaaggcgccggccaaaagaggcgggaggggcgaaggggaagacgggccgagcagccggggagaccaacccg

SEQ ID NO: 99955 - RNA, 65 nt, Homo sapiens
gagagaagccaagaaagacaggaacccaagacagaccaggagaggagcagccggaaagcaacgag

SEQ ID NO: 99956 - RNA, 86 nt, Homo sapiens
cgcgccgcgcggggccccgggagcggcccagcgaccccgcccgggccccccaggcagaaccagagaccacagaagaaggaagggcc

SEQ ID NO: 99957 - RNA, 85 nt, Homo sapiens
aggccggaccgcgcaaaagcaccagcgcaagcggcccacaagacagaccagagacaaagcaagagaagaagcagagacgggcccg

SEQ ID NO: 99958 - RNA, 80 nt, Homo sapiens
ccagcccccgaggagcgggacacagagcgagccacccccggcgcccgcgggcccgccaggaagaagcggggagggagaca

SEQ ID NO: 99959 - RNA, 70 nt, Homo sapiens
acagaccagagaaaggccaggaagcggagcaggacggagcagaccaccgcccagcaaaaagcggcggaaa

SEQ ID NO: 99960 - RNA, 64 nt, Homo sapiens
cgcagcagcagccggcgcacgcgaggagacccggagccgccgcagccaaccagggaccgcagcc

SEQ ID NO: 99961 - RNA, 82 nt, Homo sapiens
acggcgggcagacggcacaggagggcgcgaacaaggcaaacagacggcaggagggccgaaccggggcagcgcgcaaggagga

SEQ ID NO: 99962 - RNA, 74 nt, Homo sapiens
cccccgagagcggaacacaggagggccgagagacacgccgcgagaagcacgcacagggccgcgggaagaccagc

SEQ ID NO: 99963 - RNA, 78 nt, Homo sapiens
acagccacaggaaacacacaaaggagcgacccacaccacaaacaacacccaacagcccaaagcaaaggagcaacagcc

SEQ ID NO: 99964 - RNA, 75 nt, Homo sapiens
gggaaccagcggacgcggaggcccaaccgaagaaaacaagcagccaacagggaagaggcgcacccaggagaaaga

SEQ ID NO: 99965 - RNA, 37 nt, Homo sapiens
ggagcgagccgggccagaaaaagaaccagagcgaaaa

SEQ ID NO: 99966 - RNA, 76 nt, Homo sapiens
agaacacacagcaaagaaccgacacagaaaaccggcaaaaaagcagaaagcacagcagacagaaccacacacggca

SEQ ID NO: 99967 - RNA, 63 nt, Homo sapiens
cccacacgcgaccgcagcccccccgagaaagcagcccaaacggacggaaggccaaaccacggg

SEQ ID NO: 99968 - RNA, 67 nt, Homo sapiens
gccaggagaaggacaaagaggcaaagagaggggccggaaaacagagaacagaaggaggggccccccc

SEQ ID NO: 99969 - RNA, 57 nt, Homo sapiens
aacaaagcaccggcaggaggagcaaagcccacagaacagagaggcacccagacgccc

SEQ ID NO: 99970 - RNA, 72 nt, Homo sapiens
gcaccggcacaccgcggggccgaaaacaacgacaacgagcacaggcccagaaaaagagaccaggagcgcgca

SEQ ID NO: 99971 - RNA, 38 nt, Homo sapiens
agggcgagcgagaaccaggccggaagccagaaaacaac

SEQ ID NO: 99972 - RNA, 50 nt, Homo sapiens
cggccgaggcggcaaagaaacgcggggacgagagccccggcacaaacgga

SEQ ID NO: 99973 - RNA, 75 nt, Homo sapiens
gcccgcagaccgcagaaggccggagacaccagcagacgcgaagcccagccgagcagaggccccgagaccccgaga

SEQ ID NO: 99974 - RNA, 35 nt, Homo sapiens
cggcgggaggccaccgccagcagaaggccggagcc

SEQ ID NO: 99975 - RNA, 74 nt, Homo sapiens
cccacggcaggcagcaccccaacaacaccgcgagacgaggaacaggaggcccggacccccagcacaagcgcagg

SEQ ID NO: 99976 - RNA, 54 nt, Homo sapiens
cggaccaggcgcggcgacaggggccacagagcacacagagggggaaccaacgag

SEQ ID NO: 99977 - RNA, 84 nt, Homo sapiens
ccccacgcaggggcccggaacgcccgaccgcacacggccacccgaggcagcccgaagcagcccaggaacaaggccccaacaggc

SEQ ID NO: 99978 - RNA, 73 nt, Homo sapiens
ggcgcgccgccgccggggaggcggcccaggagaggacagcagaccacagcccggcaggcccaaaaacccaaag

SEQ ID NO: 99979 - RNA, 58 nt, Homo sapiens
gagagaccccgcggcgggcgcacaccacgccgccaaaaggcagcaaaggcgagcaaaa

SEQ ID NO: 99980 - RNA, 76 nt, Homo sapiens
gccaacagcaggaaggcagaacggggcgcgaggacgcggacccgcacggggagcgaaccgcaccggaccggggccc

SEQ ID NO: 99981 - RNA, 72 nt, Homo sapiens
gacggacaagacagaaacagaccacaaacgaacagaggcccaaaccaggcccgcaacaggcgcggcagacag

SEQ ID NO: 99982 - RNA, 83 nt, Homo sapiens
ggccacccgccgcccagccacgccgcgcccgcgccccaggcccggagaaagccgggcgaccccccagcgccccagacagcagc

SEQ ID NO: 99983 - RNA, 72 nt, Homo sapiens
ggcaacagggagggacacacccaagcacggaccaaagaccggaacggaaagagggccacggaagaagcagac

SEQ ID NO: 99984 - RNA, 76 nt, Homo sapiens
gcaggaaagagaagggaagcaagaacgcgggaggagacagagaaaagaaagccagaaggaaggaagcaacgaacca

SEQ ID NO: 99985 - RNA, 71 nt, Homo sapiens
aggaagcacagagcgaccagacacggcccacggccagacggacgggggggcagggacgcacaagggaagca

SEQ ID NO: 99986 - RNA, 86 nt, Homo sapiens
aggacggggacagcgacgacgcggaggcagagaagggaacgcccggcccagccccgggaaagaggcccccggggacaagggcaggg

SEQ ID NO: 99987 - RNA, 71 nt, Homo sapiens
cggaccagccccgaaacacgggggagggcagagagaagacacgaagaaaccgcaaggcacaaagcggcaaa

SEQ ID NO: 99988 - RNA, 78 nt, Homo sapiens
ggagccgaggacgcagggcaacaacaaagaccagccgacagcgaccaaggccagagcgaaaggccacggccagccgcc

SEQ ID NO: 99989 - RNA, 65 nt, Homo sapiens
gggagaacaacacccgggcagcgcaagacagcggagagaacccccggcagaaaaggcaaaggaaa

SEQ ID NO: 99990 - RNA, 77 nt, Homo sapiens
cgacgcgcaacgcgcaccaacccagggcgaggaaccaaagccccggcgcgcaacagaagaggagcggagcaggccaa

SEQ ID NO: 99991 - RNA, 80 nt, Homo sapiens
ggaccacaagacaacgcggagcggcgaagagcaaccaggcagacaagagggcccaaggacggaagcgcgggagaagaaaa

SEQ ID NO: 99992 - RNA, 56 nt, Homo sapiens
gcgggaccggcgccaccgcagggacgccgacaaccagccaaaggaaacggaggaac

SEQ ID NO: 99993 - RNA, 66 nt, Homo sapiens
gagaccaccggccaacaggcccagaaaaggcaaagcagaccaggacacggacaacaccaagaaacc

SEQ ID NO: 99994 - RNA, 41 nt, Homo sapiens
gccccgcgaaccgaggcgaggcagggacacaacgccacgac

SEQ ID NO: 99995 - RNA, 79 nt, Homo sapiens
ggcccgggcgagcccggagaagaggaagagggagcgccgagcaacccacggccggaccccagagcccacccaggagcgg

SEQ ID NO: 99996 - RNA, 73 nt, Homo sapiens
acaggacaaggccacacccccccagaccccccgccagcgagacgcggaagaccgcggagaaccgaaccaacag

SEQ ID NO: 99997 - RNA, 39 nt, Homo sapiens
gccagggacgggggccaccggacaggacacggaaaaagg

SEQ ID NO: 99998 - RNA, 65 nt, Homo sapiens
aggaccccgcgcacgcagcaacgcggagcaggacgcacacgaagcgagccgagggcgacacaccg

SEQ ID NO: 99999 - RNA, 68 nt, Homo sapiens
agaaacgccaggccacaaaagaaagaaaccgcgaggcagggaaagaagggaggacagccaggcagagc

SEQ ID NO: 100000 - RNA, 77 nt, Homo sapiens
gggcccgaacagaggggccgcgaagaggaaacaaaagcgcaggagagaccaggccggagaccaggaggcgccaccag

SEQ ID NO: 100001 - RNA, 59 nt, Homo sapiens
ccgagaggaagcaagaagccagcagaggagacccagaccagaccgaccaaccggaacga

SEQ ID NO: 100002 - RNA, 59 nt, Homo sapiens
aacagcgaggaagcccacaaaagcaggcaacacaagggacacggaaaaaggagaccgcc

SEQ ID NO: 100003 - RNA, 67 nt, Homo sapiens
aggagcaacaagaaagaagaaggaccacgaccccgaagacagcagagaaggggagacggggaaaggg

SEQ ID NO: 100004 - RNA, 79 nt, Homo sapiens
gaggagcagaaaccagccacgggccggaggcaaaaaacccaagagaaaggacaagaaacaaagagccaacaccagcgca

SEQ ID NO: 100005 - RNA, 72 nt, Homo sapiens
agaagcaaacaggagcgaagacggacccagaagaagaccgaggaaagcccgcagagccccagggcacccaca

SEQ ID NO: 100006 - RNA, 77 nt, Homo sapiens
aaccgcggccccgaggcaaacaaagcagacccaggccacagacaagagagccccaggccaaccacggacgcaggacc

SEQ ID NO: 100007 - RNA, 80 nt, Homo sapiens
agcggaggaggcacagggcgcggaccgcacgagcgcggaaaaggagcgaacaggggccacagcggaagaagcaggggagc

SEQ ID NO: 100008 - RNA, 67 nt, Homo sapiens
aaggcagcacagagcacacgaggagcaaaagaagagcagagcacaggaagacccaggaagaagcaca

SEQ ID NO: 100009 - RNA, 82 nt, Homo sapiens
aggagggcccagaagaaaaaggggagcgacagaaaagcagcacaacccccggagaaccgaagggacacagcagcggcccccc

SEQ ID NO: 100010 - RNA, 49 nt, Homo sapiens
ccacagcagccagaaggaaaggaagagggaccgcaagcaaaagacaaga

SEQ ID NO: 100011 - RNA, 87 nt, Homo sapiens
gagcaggagaaaagccggaaagaaaacgcagaaagaagcaacgcaaaaagccaaggaaaagaaaaaggagaagagaaagaacagcaa

SEQ ID NO: 100012 - RNA, 84 nt, Homo sapiens
gcccccaccggccgaccgcgcgccacgggaaggaggagacgcgaaggaaagacccgcaggagcggaggaggcagaagaccggag

SEQ ID NO: 100013 - RNA, 77 nt, Homo sapiens
agccgggcagcagcccagcggcagcagaaagagcacaagccacacccagaaccagcagcccgcagaagaaaggcaaa

SEQ ID NO: 100014 - RNA, 83 nt, Homo sapiens
gaacgacgacgaggaaaaagagaaacgaaggaggcccaaccacaaaaggagccgacggaacccagacggagaacaaaaggaag

SEQ ID NO: 100015 - RNA, 60 nt, Homo sapiens
ggaccccggagcccagaagacagagggcgaggggacccaagaacagggaggaaagcagag

SEQ ID NO: 100016 - RNA, 79 nt, Homo sapiens
gaaaagaagcaaacaagaaaaaggcaggaacaaccacaaggaccaacaggaagacaacgaagagcagagacccaaaaac

SEQ ID NO: 100017 - RNA, 104 nt, Homo sapiens
gcagagggaaaaaagagaggagcgaacgagacagaacaggaaaaaggggccaagaacagggcacagccaaaagacaacagaggcgcggcaggcaggaggccacc

SEQ ID NO: 100018 - RNA, 87 nt, Homo sapiens
gccccgggagggcagccacccccgcggacagcgccgacgccggggcacggccacgcacggacaggagcgaaggaaaaaacagaagac

SEQ ID NO: 100019 - RNA, 73 nt, Homo sapiens
aacagccagaagaaaggcgaggcgaagagcaacccgaagcaagcccgcaccgaaccgcggaagaaccaaccga

SEQ ID NO: 100020 - RNA, 73 nt, Homo sapiens
cacccggccaccccccagggagccgaagccaagggacggccaccccagaccgacgacccggaggggacccggc

SEQ ID NO: 100021 - RNA, 41 nt, Homo sapiens
acaccaaccaagaagagccagggacaagaacccaagaaaca

SEQ ID NO: 100022 - RNA, 79 nt, Homo sapiens
gagcaccgcccccccgggaaacaaagggagcaacagcgagcaacaggcaacgaaaacagacaaaacaacggaaaagcag

SEQ ID NO: 100023 - RNA, 61 nt, Homo sapiens
cccgggaccgggcgggaacccgcggggagcgggacacgaacgggggaacgcccgcggacgg

SEQ ID NO: 100024 - RNA, 34 nt, Homo sapiens
aaagaagcaaaacacgagaggaggaagacccaaa

SEQ ID NO: 100025 - RNA, 81 nt, Homo sapiens
aagaaacgggaaacagggaacaggaaggacagggaagcagacacaggcagccaacagggaagaggcgcacccaggagaaag

SEQ ID NO: 100026 - RNA, 80 nt, Homo sapiens
agcgaaggagcagccaccaggaaacaccacaccgacaaaggcaaggaccagaagcaccagaaacaggaagaaaaaaaggc

SEQ ID NO: 100027 - RNA, 80 nt, Homo sapiens
acacccaaaccagaagccgacacaagcaccaagaaggcggagaggaaagagagggaccaccgaaaaaccccaaacccaca

SEQ ID NO: 100028 - RNA, 80 nt, Homo sapiens
cgggaggccgaaggcaggacaccgaggggaaaggagcgacaggaggccgcgggagaacaggcgcgcaggcggaagaccca

SEQ ID NO: 100029 - RNA, 80 nt, Homo sapiens
ccagcacaccccgcgagcaagggcagcgcaagccacaggaacgagccacgagaagccccaacaaaacaagacccacagag

SEQ ID NO: 100030 - RNA, 64 nt, Homo sapiens
agaagaagaggaaccaaagagcccccacaagcccaaagggccggagcgagggagagcaggaaca

SEQ ID NO: 100031 - RNA, 76 nt, Homo sapiens
acaccccacaggaaggcacacagcagcaagagcccaaacgcaggcaggggccagagaggccgaggggagaagcacc

SEQ ID NO: 100032 - RNA, 67 nt, Homo sapiens
gaaaacgcccgccacggcagggggaacggaagcaaccagaccccgcaagggaccaaagaaagcccgc

SEQ ID NO: 100033 - RNA, 82 nt, Homo sapiens
agccacggcgacgccaaggcccacagagcagcaacgggcagggcgccagccaacgggggcagcgcagcacagccaaccggcc

SEQ ID NO: 100034 - RNA, 82 nt, Homo sapiens
agaaaacacaggcagacggacaaaaaagaacaggagaagcgaacacgcagggagaccccaaggcaaaaccaccacacgacaa

SEQ ID NO: 100035 - RNA, 80 nt, Homo sapiens
gaggacagacacacggggcaaagaaaaaggagagaaaaagaggcaaaacaacaagaagaaaagagaaaaaagagagcgaa

SEQ ID NO: 100036 - RNA, 84 nt, Homo sapiens
cggcggcgccaggcagggcgcaggaagaaaacaccggagcccaagacaccaaaacagacgcaggcaagaggcagaaggacaaag

SEQ ID NO: 100037 - RNA, 74 nt, Homo sapiens
ccgaccacacaccagaaccggaggaggaccgcggagggaacacccccgaccccacgcacccggagccaccgaga

SEQ ID NO: 100038 - RNA, 80 nt, Homo sapiens
gcggcggagcccgacccacccaaggagggcgagacagcccgcccgaggcccacggagcgaccggggaaggaagcccccgc

SEQ ID NO: 100039 - RNA, 84 nt, Homo sapiens
ggccgcggagcaggagcgcgcgccaggagggcgagccggacgaagaccgggggaaagggaagaaccggacgggacgggccagcg

SEQ ID NO: 100040 - RNA, 88 nt, Homo sapiens
accgccaacacgggagcggaagaacagccgaagaagggcccccggaagaaccgaaggacacacagcagggagagcaacaagccccggc

SEQ ID NO: 100041 - RNA, 78 nt, Homo sapiens
gggcagcccagcccaggcacgggcacaagcggggggcagcccccgccggcaccaggccagaagagacaaggccagaag

SEQ ID NO: 100042 - RNA, 73 nt, Homo sapiens
cacagaacagcaacaaaaaaaagcaggccaaaggaaaaacagaccgaaagggacgccaacagcccagagagaa

SEQ ID NO: 100043 - RNA, 56 nt, Homo sapiens
gccaagccagcagcaagggccgggccaggcacagggggaagcagaccaagaagaca

SEQ ID NO: 100044 - RNA, 67 nt, Homo sapiens
gcagcgcggacccggagcgacaagcgccccgacggagcgccaggacgaaagccggacccacagccgc

SEQ ID NO: 100045 - RNA, 72 nt, Homo sapiens
gagaggaaagacgagggagccaccaaggaggaaccccagacaaagcaccaaaaacagagagaacagaaacga

SEQ ID NO: 100046 - RNA, 87 nt, Homo sapiens
aagaccaacaaacacaaggagccacaaggacgggaagcaccaaagcgcgccaagagaccgccgggagagccgcccaccccccacccg

SEQ ID NO: 100047 - RNA, 76 nt, Homo sapiens
agcgcgccacccggccacgcgggggagggccggccgcaggccggcaggggacgagccgggggcggggcacagcgcc

SEQ ID NO: 100048 - RNA, 85 nt, Homo sapiens
cggaggaggaggggagaggccggaggacaccaacagcggcccccacggaacccccagaacgcagcagcgagagcaaggccacagg

SEQ ID NO: 100049 - RNA, 74 nt, Homo sapiens
cggagcacacggacagaagcgccgcgcgcccagagggcccgaggccacaggccccgcaccggggggaaaaccac

SEQ ID NO: 100050 - RNA, 37 nt, Homo sapiens
aagacccagaaaaaaacaggggaggacagagagaacc

SEQ ID NO: 100051 - RNA, 69 nt, Homo sapiens
cagcccccacgcagcccagaaggcgcaccccaaagcacaaaccggcggcagaggagcgcggcgaggccg

SEQ ID NO: 100052 - RNA, 55 nt, Homo sapiens
caaggccagccacggaaggagacacccgaacacaaaaggggccgcaaggccaggc

SEQ ID NO: 100053 - RNA, 69 nt, Homo sapiens
gaaagacacacggggaggacagaggggcagcaggggccagagcccagcaagcccggagcaagccaacag

SEQ ID NO: 100054 - RNA, 70 nt, Homo sapiens
aaaccgccccaggaggaacacccccccaccgcccccggcgcccgcaccccgggccccgcggcgaaccccc

SEQ ID NO: 100055 - RNA, 60 nt, Homo sapiens
cggggccccgccgagaaaccgcagagcacaggcccagaccacacgaccacaaagacagca

SEQ ID NO: 100056 - RNA, 33 nt, Homo sapiens
cagccccaggacaggcgcgcacgcagcgggcag

SEQ ID NO: 100057 - RNA, 79 nt, Homo sapiens
ccacgagaccacaaccacccccagaacgcaccccaaaaagaagacaaacagggcaaccagccaagaggaagggcccgga

SEQ ID NO: 100058 - RNA, 75 nt, Homo sapiens
caggcaccagcaaccccccggcggaacacccgcccagacgacaagcggagcacccagcagaagggggagcagcgc

SEQ ID NO: 100059 - RNA, 40 nt, Homo sapiens
caggagaggagggaacgcggagcggaagcgcacgcccagg

SEQ ID NO: 100060 - RNA, 79 nt, Homo sapiens
gaggaacagaacgcaagcaaaagcgaggaaaaggagcagccaggcccaagggccaaggccagagagaggccggcgagcg

SEQ ID NO: 100061 - RNA, 69 nt, Homo sapiens
ccaaccaggcccgagacaaaaaggggagaagcagaccgcaccaggcgggaccccgaaaaagcccaaaca

SEQ ID NO: 100062 - RNA, 82 nt, Homo sapiens
ccaggcggcgcggacggggcggccggccgacccccagggcacaacggggacccagggcgcccccagcaaagcagggccgccc

SEQ ID NO: 100063 - RNA, 68 nt, Homo sapiens
gccgccgggagccagaagcacaggcccgggcgaaggggccacgcgaccagccacagaccagccggggg

SEQ ID NO: 100064 - RNA, 45 nt, Homo sapiens
acagccaaagccgggcggacgcgggacgcggcgcacggcgcggag

SEQ ID NO: 100065 - RNA, 68 nt, Homo sapiens
ggggggcagggccccacggccagacaggaaacgccgccccgggcaaaggagggcccaaaaaaggcccg

SEQ ID NO: 100066 - RNA, 71 nt, Homo sapiens
aacccgccaaaacacagcgaggagacagagggaaagaaaggcaaagcgagcaagagggagaccaaccaggc

SEQ ID NO: 100067 - RNA, 73 nt, Homo sapiens
cggacacgaggagaaacagcagaaacgcaccaggccaaagaaagagaagcagaaccagagaccacagaagaag

SEQ ID NO: 100068 - RNA, 78 nt, Homo sapiens
aaccgacacaccgagacgcgccaggaaaggaacaagcagaaagcacgaacaacgagaacaagacacgagcaaacccca

SEQ ID NO: 100069 - RNA, 52 nt, Homo sapiens
aagggggaggaagagaagacaacgcacaacagcaccagggcgagggaacggc

SEQ ID NO: 100070 - RNA, 40 nt, Homo sapiens
cacccacacaggccccagcgaacagcgaaaggacacagac

SEQ ID NO: 100071 - RNA, 81 nt, Homo sapiens
cggcggcgaagcgggagagccgacgagcgcgcacaacgcaggaccggcgccgaaggcccgccagagggcaccggaaaaaga

SEQ ID NO: 100072 - RNA, 73 nt, Homo sapiens
caagacgggaaaagcgcacacacgagaaaaagcagccaaggaaaaccagaaagaaggagaaacagcaacccaa

SEQ ID NO: 100073 - RNA, 68 nt, Homo sapiens
ccaggagcccgagagagaagggaaagagacacgccggggaaaccacgaaggagcggcggcgccaggac

SEQ ID NO: 100074 - RNA, 71 nt, Homo sapiens
aaagacagagaagcggaaagagaaaacccagaacccaagcgagcaggggaacaaaggggcagccaagcaac

SEQ ID NO: 100075 - RNA, 72 nt, Homo sapiens
caagagccgccagagcgcggccgccaaggagagcgaaaggggaccagacggggaagccaaaacccaggacac

SEQ ID NO: 100076 - RNA, 70 nt, Homo sapiens
ccaccacagacccagacagaggagaagacagcaccaaacacaagaaaagcgaaacaggaaaacgccaagc

SEQ ID NO: 100077 - RNA, 80 nt, Homo sapiens
caaggggcgggcccagccggccccagagacgcccccccacccgagaaggaaggcccgaagccacagagcggaaggagaag

SEQ ID NO: 100078 - RNA, 84 nt, Homo sapiens
cgcccgccgcccgcgccgcgccgccggccgggcagagagcgcagacaggacaccaaacaccgccgccgcacgagccagggagcc

SEQ ID NO: 100079 - RNA, 77 nt, Homo sapiens
ggggagggaaaggcccaggaaaaagggccggcccagggagaacgcaaaaccaccacccccacaaaaaacgcagggag

SEQ ID NO: 100080 - RNA, 78 nt, Homo sapiens
accgacaagaaccggagaagcagacagagggcacgccccaccggaggaagcaaaaaaagcaggaaaggagaagggaga

SEQ ID NO: 100081 - RNA, 77 nt, Homo sapiens
cgggaccaggacaacagccccaggacacagaagcgcaccgcacagggaccaccaggccgcacccagaggaagagggc

SEQ ID NO: 100082 - RNA, 64 nt, Homo sapiens
ccagcaagcgcaagaggagcggcagccaggaggcaggagcagcgggcgacaggcgggcccgggc

SEQ ID NO: 100083 - RNA, 91 nt, Homo sapiens
cacggccaaccaccgcgacgacgagcacgaacggccgaacacagcagacccacccccaaacacaggagccaggaccagggcccaagaagga

SEQ ID NO: 100084 - RNA, 93 nt, Homo sapiens
caccggccccagccgagccccagccaggacgagaggagcggagcccgcagaaccccacagcaagaggacggaggccccgggggccgcggcccg

SEQ ID NO: 100085 - RNA, 74 nt, Homo sapiens
gaggcgggggcccacacaccaccccgcggacacagacaggcaggagaagaaggagcggcagaaggggcgaaaac

SEQ ID NO: 100086 - RNA, 70 nt, Homo sapiens
agagggacaaaaagaacggagggcgccggccgggcggaggcaagggcgaccggccacgcaaccgcccggg

SEQ ID NO: 100087 - RNA, 78 nt, Homo sapiens
agggcaggacaccgacaggaacagggaccacgggggaagaacccgggaaacaggacccagaggaagggccaggacccc

SEQ ID NO: 100088 - RNA, 61 nt, Homo sapiens
aaagaggacaggggaccagaagaccagaacgagccaagacgaaagcgcgcgcgcagggagc

SEQ ID NO: 100089 - RNA, 33 nt, Homo sapiens
gaaaaccaagcgagggaggagcccaaaagcaaa

SEQ ID NO: 100090 - RNA, 54 nt, Homo sapiens
cgggagaccccaaccgcagagcgcccgaaaacgacagaagcacgacaacaacgg

SEQ ID NO: 100091 - RNA, 78 nt, Homo sapiens
gcgcagcggcggcagcggagagcgagagaggggagcaggaccacaggaagcaagagaagaggagaaaccgccggaacc

SEQ ID NO: 100092 - RNA, 71 nt, Homo sapiens
cgccagccagcgcgcaggaggcagcaaggggccgcaaggccaggcgcgcagaggcacccaacggcacagac

SEQ ID NO: 100093 - RNA, 81 nt, Homo sapiens
cggcggcgaacagcgcgacacaggaggcaaaagcagaccggaaaacccaccggcaagaccacacccgaggggagcccagga

SEQ ID NO: 100094 - RNA, 81 nt, Homo sapiens
aaagggaaaagcaccgagaaggcaccggccaaagggggcgaccgggacaggacgacgacagcgcccgaagccaccagcccc

SEQ ID NO: 100095 - RNA, 59 nt, Homo sapiens
cagaccgccccggcggaagaggaggcggcgaccccgagccagccgccagcagagacaca

SEQ ID NO: 100096 - RNA, 81 nt, Homo sapiens
agaagcagaacgcaggaggagaacgacaggaagggcggaaaaggcaaaacagcgcaaccaagagagaggaagagagagcaa

SEQ ID NO: 100097 - RNA, 83 nt, Homo sapiens
aggacgccgagcgggacccccgccgccccgggggccggacggccccaggccaggccagacgggcgccagggcggaaccaagca

SEQ ID NO: 100098 - RNA, 66 nt, Homo sapiens
gggccgcccgacggcggccaccgcagcaacgggccacagaacaaaccagcccgcaaaacccgcagc

SEQ ID NO: 100099 - RNA, 66 nt, Homo sapiens
aacgggggagagccaggaagccgacagacgaacaggaaagaaaggcacccccagcaacacgcaacg

SEQ ID NO: 100100 - RNA, 44 nt, Homo sapiens
ggcgcggcccgcgcgcagccggccgcccagccaacaggcaaggc

SEQ ID NO: 100101 - RNA, 69 nt, Homo sapiens
cccgaccagcccaacgaagacggcaccaagaaaccggaaccaaaagaagcaacagagaggaaaaagccg

SEQ ID NO: 100102 - RNA, 78 nt, Homo sapiens
caccacccagggacaggacaagcagaccggaagaccgacggaagaccacaccccgagggagcccaggacaccacgaga

SEQ ID NO: 100103 - RNA, 72 nt, Homo sapiens
cgccaggccacaaaagaaagaaaccgcgaggcagggaaagaaggaaagccacgcaggggccaagaagcccag

SEQ ID NO: 100104 - RNA, 79 nt, Homo sapiens
ccccacaccccgcccagcccaagcccaaggcgaacggaccaaccgagccccagaaagacgaagcgggccacgagcgagc

SEQ ID NO: 100105 - RNA, 75 nt, Homo sapiens
aggcgagaggaagacgacgaggaagagcccgccgaaggaaagggagacgaaggcaccgaaaggcaagggaccaga

SEQ ID NO: 100106 - RNA, 40 nt, Homo sapiens
ggacggaccccaacacgagacacgcaccagggaacaaagc

SEQ ID NO: 100107 - RNA, 84 nt, Homo sapiens
cgggcacaggaagcaccgaagagagagagaagcaaaaggagaacgaaagcggaccagcaggagaaggaccaaaaggaacgagac

SEQ ID NO: 100108 - RNA, 88 nt, Homo sapiens
ccgaggccaagaggcgggcgcaggggcaggaccgcccccgcaggaagaggagcccccccgccacccccaccgcaccccacacggccac

SEQ ID NO: 100109 - RNA, 74 nt, Homo sapiens
cggagagagagccgggacggcagggaggcgagcgcaagccccggggcagagacacaggacacccacccgccggg

SEQ ID NO: 100110 - RNA, 76 nt, Homo sapiens
ccggggcgaacacggacaccaacgagcgaagcaggacgcacgacgaggcgggggaaggagagcgaacggcagacga

SEQ ID NO: 100111 - RNA, 83 nt, Homo sapiens
acagaggagggccccgccgagcccagcccccagaaaggaggacaacgggacccagaagagggcaaaaaacaggcagccagacg

SEQ ID NO: 100112 - RNA, 79 nt, Homo sapiens
caccagaccccgggacccgcaagaccgcgacgagagccggagcacaacgcagggacaaagcccccaccccagagggcag

SEQ ID NO: 100113 - RNA, 73 nt, Homo sapiens
gacggcccggggacaaagcgagcggcacacgggacaaccaagagcaacagaccacgcacccagcagcgaagag

SEQ ID NO: 100114 - RNA, 51 nt, Homo sapiens
cccaacccgcgcaccaaagagggacccaggccaccgaaagacacagggagg

SEQ ID NO: 100115 - RNA, 80 nt, Homo sapiens
caaccgaacccagacgcagaacggaccaagaaaggcccagggaccaaagcccggacaaggcccgagcaccaggaccgcag

SEQ ID NO: 100116 - RNA, 81 nt, Homo sapiens
gcgagacacggccgaaggggcgcgcggccccgccgccccagcccgccccccgggccgaacccaggccgagcagagacaccg

SEQ ID NO: 100117 - RNA, 82 nt, Homo sapiens
cgcaccgaacacaaggaggaaccccgagccggagaccagcaagacacacgccgcccccgccgccgaaaaggaaaagagccgc

SEQ ID NO: 100118 - RNA, 68 nt, Homo sapiens
cccccaaaggcggaacagggcaccgggaaaccaccaagcaggggcgcggagccccagccaggacccaa

SEQ ID NO: 100119 - RNA, 79 nt, Homo sapiens
cggccccggcccacaggggggggcaaacccgagagaacggggccaccgcgaccgcggggacggacgccaacggcgggca

SEQ ID NO: 100120 - RNA, 77 nt, Homo sapiens
gggagggggacacacaaccgcccagccggcgagggacgccgcagagagcgcccccacccccaggcccgagggacagg

SEQ ID NO: 100121 - RNA, 38 nt, Homo sapiens
gccggagacagggcaacaccacacccccaaggcaaggg

SEQ ID NO: 100122 - RNA, 74 nt, Homo sapiens
gcacgggaggccccggcacccacaccaccacgccagagacagagccgcagggccaggggggaacccggcccaag

SEQ ID NO: 100123 - RNA, 102 nt, Homo sapiens
ccaggcaaagcgaagaagaagaggaagagccaaagagcaacaacgagcgacaccaaagcagacaggggagccagaacaacacacagaagaaggccagaaggc

SEQ ID NO: 100124 - RNA, 73 nt, Homo sapiens
cccacacccaccaacaacaccacaaaaccacagccaaggcgcaaaaaccagacaccccacaccaccacccaga

SEQ ID NO: 100125 - RNA, 74 nt, Homo sapiens
acacaaagggaagaaaaccggggggccccaccgcagcaaagagaggggagaagagcgagacgagaaagaagagg

SEQ ID NO: 100126 - RNA, 75 nt, Homo sapiens
cgaaaagcagcaacgagaagaagccaccaaggagcaggaaaacggagccagggaggacaaagaaccgggaagagg

SEQ ID NO: 100127 - RNA, 81 nt, Homo sapiens
ccggcccggacgcaggccggagagacgcacagcaagagcaggacaccggaagcgggaaaggccagaggagcagccaagaag

SEQ ID NO: 100128 - RNA, 81 nt, Homo sapiens
cagcccggcggccgcggggcacagggagcccggcgcgcgcgcggccccccccccggcgcccccaggacgcgagagcggaaa

SEQ ID NO: 100129 - RNA, 73 nt, Homo sapiens
cgaggcgccccagagcccagggcaggacaccgacaggaacagggaccacggggaggacccaagaagaccagcc

SEQ ID NO: 100130 - RNA, 71 nt, Homo sapiens
acaaacccgggacgggccgagaggccgaaaaggaaaaggagccagggcggaccccgcgggacagaacgcac

SEQ ID NO: 100131 - RNA, 56 nt, Homo sapiens
cggccaccgagccagggaacgagccagcgagacccagacaaggacagcggggcaag

SEQ ID NO: 100132 - RNA, 72 nt, Homo sapiens
cccccccccagccaccaagagaagaggaaaccacaggcaagcagcccagaggaaccccgggcacaccaaccg

SEQ ID NO: 100133 - RNA, 86 nt, Homo sapiens
gacgaccgcacaacagaaaaaaagcggggaaaacaaaaaaaagaaggagggaagagggggccaggaccaggccccaccccacagaa

SEQ ID NO: 100134 - RNA, 82 nt, Homo sapiens
aggacaccgaccggaccggcccggggcgaaaggagcaaaaggaagagcaggccccgggccccggcccccggagcccgcggac

SEQ ID NO: 100135 - RNA, 59 nt, Homo sapiens
gacgcccgcaggcccgcgggcgcaccggcgacgggacgaacagcggggacgccccagca

SEQ ID NO: 100136 - RNA, 77 nt, Homo sapiens
ggccacggccaaacgccaacggccagcaggaaggccaccagcgaggcggagggaggacccgcggaggccccagcagc

SEQ ID NO: 100137 - RNA, 79 nt, Homo sapiens
cgcgacgcaggcgcacggagacccgccggcagagcggcagcccacaagcaggaagaccagccccaggagggaaacagag

SEQ ID NO: 100138 - RNA, 68 nt, Homo sapiens
cacgggacccgcgggccccggcccagcaaccgacaacgcggcccggcggggccggggagcccgggcca

SEQ ID NO: 100139 - RNA, 86 nt, Homo sapiens
ccggacgcaggccccgccaccccccaccggggacagggaccagaagcagcagccccagaagccccgaagccggggcaccccaccac

SEQ ID NO: 100140 - RNA, 69 nt, Homo sapiens
cggcggaggcacccccccccggcggcgggcgggccggccgccggggcgggggcccccggagggccacaa

SEQ ID NO: 100141 - RNA, 74 nt, Homo sapiens
aaacaaagaacaaaggacacaaaaacccggagaacaagcaaaacaaagcaggccaccaaagaaagcagcagcca

SEQ ID NO: 100142 - RNA, 68 nt, Homo sapiens
acaacaggcccaacacgcagacggcaggggcggagacacagaccggaccggcgcagcggggcacagag

SEQ ID NO: 100143 - RNA, 80 nt, Homo sapiens
ccggagggaccagaaagccccacaaggcggccgggagaggagggacagcagcgggagaacaccccacggagacaggacgc

SEQ ID NO: 100144 - RNA, 68 nt, Homo sapiens
caaggaaaggcgcaccaaggaacacgacaacagaaggcacaaaaacaacgagaaggcgaacggaacag

SEQ ID NO: 100145 - RNA, 79 nt, Homo sapiens
ccggggaccgggaagcggcgacccgaaccccaaacggggcgacggcacgagagaagaggcgacaagggccagagcaaca

SEQ ID NO: 100146 - RNA, 85 nt, Homo sapiens
ccaccgcccagcgggagaggagcccaccaggacgaccgcgccgcccagcacgccagggcccaccagccgagcagacagaagacag

SEQ ID NO: 100147 - RNA, 80 nt, Homo sapiens
cagagagacacaagacaaaacacgcgaccaaccggagagacaccgacacaaaggccgcagacaggaaaaagaggaggaca

SEQ ID NO: 100148 - RNA, 73 nt, Homo sapiens
cgccaggaaaaccaccaaaacaaccagcgccccaggccagagaacccaaaagcaaacccaagaccgaaagaaa

SEQ ID NO: 100149 - RNA, 41 nt, Homo sapiens
gacaagggccgccagcacaaggggaagggcccccgccccag

SEQ ID NO: 100150 - RNA, 68 nt, Homo sapiens
gcacagggagaaggaacacagcgacagccagacaccggaagccaagcagagccgccgcgcccaggcgg

SEQ ID NO: 100151 - RNA, 48 nt, Homo sapiens
acagccgcacccgcgccccagcaggcccagcgaaggcccgggcggcag

SEQ ID NO: 100152 - RNA, 81 nt, Homo sapiens
cggggcggcggccgcgcgggcggaggggggccagagggccccccaggccgccccgcccggaaggcgagagcagaaaacgcg

SEQ ID NO: 100153 - RNA, 76 nt, Homo sapiens
ccccccgcaccggcagggagaggcggacacagacaaggggccaccgcaggccgcgcgcgcgggacgcgacccagcc

SEQ ID NO: 100154 - RNA, 74 nt, Homo sapiens
gacgagagagagaggcggagaccagagaaacagcgcaaacaccagacccaagcgaaaggcaagcccccagagag

SEQ ID NO: 100155 - RNA, 75 nt, Homo sapiens
cagggacccccagaaggaacggagacaaaaacggcccggagaggagggcgcgcgggggcacagcccaggcgcagc

SEQ ID NO: 100156 - RNA, 78 nt, Homo sapiens
gcggcggaccgcccgcgcggggcacgaggaacagggaagggcgcgagcggggacaaagccccgccaccgaagaccaga

SEQ ID NO: 100157 - RNA, 73 nt, Homo sapiens
ccgcggacacgcagggagcgaccaagggaaacacacagaagaccgcagaccaagggagcagggcgggggcacc

SEQ ID NO: 100158 - RNA, 79 nt, Homo sapiens
caagaggcggccagcaggaggcgagaaggaaccagccgggcacccaagccgcagcccaaaagcagaagaagacgcagcg

SEQ ID NO: 100159 - RNA, 50 nt, Homo sapiens
aagggggaggaagagaagacaacgcacaacagagaccgagaaaaaggcac

SEQ ID NO: 100160 - RNA, 74 nt, Homo sapiens
agcacagaacgaggcgaaggggacggccgggcaggagcaggcagaaacccaacacaagggaggagcgggagcac

SEQ ID NO: 100161 - RNA, 55 nt, Homo sapiens
ccgggcaaccaccagaaacaagggacacggccgaaagaccgacaagacggaaacc

SEQ ID NO: 100162 - RNA, 73 nt, Homo sapiens
acagacgggcagggggcggcgcagaacacaagagcgcaccgcccgccagccgcgacaggaagggaaggggcgg

SEQ ID NO: 100163 - RNA, 68 nt, Homo sapiens
gagcgccacgcgcggaaggcagcgcccagcagcgcaggcaaaaacacaccccagccaggaaggcccga

SEQ ID NO: 100164 - RNA, 70 nt, Homo sapiens
aaagaaccccaccggacccggaagcaggggagcccggggagcaagaagggaccacaggaccacaccagaa

SEQ ID NO: 100165 - RNA, 71 nt, Homo sapiens
aacgagagagccgaggagccagagcaaggggaacgccacggacggggaggaagcagaagaaagacaacaac

SEQ ID NO: 100166 - RNA, 78 nt, Homo sapiens
accagcacagaagggaggggggcggcgccccagccggaggcagcagggcaagcaaacaccagagcgcaagagcaggca

SEQ ID NO: 100167 - RNA, 80 nt, Homo sapiens
ccgccccgagcacgagcggacgcaggagacgagagcaccgacaccgccggggggcccacccccgagcaaaaggacgcgac

SEQ ID NO: 100168 - RNA, 70 nt, Homo sapiens
aagaaagcaaacggcgcgaggaccagacgaagaagcacggccacagggaagcccgggggggcacaacggg

SEQ ID NO: 100169 - RNA, 91 nt, Homo sapiens
ggaaaggccagagcggagaccagcacccagaagagagaccgcaacgagaacaaagggccgggagcgagagagacaagagagacaccccaac

SEQ ID NO: 100170 - RNA, 70 nt, Homo sapiens
aaagccgcacccacggcacgaaagggcggacgcagcccccaacccgaccggcaacccccccaccggagaa

SEQ ID NO: 100171 - RNA, 57 nt, Homo sapiens
cccacgacccaaggacacaacccggccgcagagcccaggacggggaggacgcacgac

SEQ ID NO: 100172 - RNA, 60 nt, Homo sapiens
ccaggagacgccaaggaaagagggacccccggcccagacaacagagaagcaaaggccaga

SEQ ID NO: 100173 - RNA, 32 nt, Homo sapiens
cacaaggagaaaggcaggacagcagaccacag

SEQ ID NO: 100174 - RNA, 86 nt, Homo sapiens
cacgcggggcccgcagcaggcgcagcaggaaggacggccgcgcgccaggaacggggcgcgaaagacacggacaacgcaaacccggc

SEQ ID NO: 100175 - RNA, 78 nt, Homo sapiens
cgcacaacggccgaagcgccgagccagagccagggaacggaggagcgagccacggcggggaggacccgcagaccgaga

SEQ ID NO: 100176 - RNA, 62 nt, Homo sapiens
ccaggacgaagaaaacggacacccccggcagacaggaccacgaaggaacagagacagacccg

SEQ ID NO: 100177 - RNA, 71 nt, Homo sapiens
aacagagccaaaccagaagaggagggcccagaagaaaaaggaaagcccaagaggaacagagcgccgaccca

SEQ ID NO: 100178 - RNA, 75 nt, Homo sapiens
acagggccaacagggccggccggccggcccccaaacgcgcccgcccccaggacggagcgcgccagcgccgcagcg

SEQ ID NO: 100179 - RNA, 51 nt, Homo sapiens
cagggcaggaaaggagaacggaaaggcagcggacccacagaaagcccgccc

SEQ ID NO: 100180 - RNA, 76 nt, Homo sapiens
aaacaggccggggcacagcacagcgccggcgcaagcgcgcacaggcggaacccggcggccagagagcagaaaaagg

SEQ ID NO: 100181 - RNA, 75 nt, Homo sapiens
gacaacagacaacacaaaaccagccaaaggggggcagggggacggcccccacggaccagcagacccccgagcaac

SEQ ID NO: 100182 - RNA, 53 nt, Homo sapiens
aaacggcgagaagacaccggcaggaaccaagcggcacgcaggcaacacgagcc

SEQ ID NO: 100183 - RNA, 76 nt, Homo sapiens
cacaccagacacgggggacagaaagcaagcggacccaaaggagacaacaagaaggaggcaacaagggacccccagg

SEQ ID NO: 100184 - RNA, 91 nt, Homo sapiens
ggcccgcgcgggggggagagccacgacgccgggaccgggaccgccgccgccgccgccaccagggcaccccccagcggcccgaggcggaggc

SEQ ID NO: 100185 - RNA, 38 nt, Homo sapiens
gagagcccagcagaacggagcaaagaggggcgccacgg

SEQ ID NO: 100186 - RNA, 59 nt, Homo sapiens
agcaccggcccgaaacgccgaaaaacccaagcgagagaagaagagaagagagcccacac

SEQ ID NO: 100187 - RNA, 77 nt, Homo sapiens
gggcgggcggcggccccggcagagccgacaaaaggacaaggggcgaagcccgggggagaggagggagagagacccga

SEQ ID NO: 100188 - RNA, 79 nt, Homo sapiens
ggccggaagggcgacgcgcgcgggcgggcgcgagcggcccggcgcccggcgagagaggaacgaggggcacagaaaccag

SEQ ID NO: 100189 - RNA, 94 nt, Homo sapiens
accgacccgaacgaggagacgggcccccaaaaagcggcaaaagcaagagaacaggaggagaacacaaaacccagacagccggaaagcacaccac

SEQ ID NO: 100190 - RNA, 72 nt, Homo sapiens
accacagacaaaccacgccagcccggaaagacggacagaagaagaccaccggccagggcaggacagcagccc

SEQ ID NO: 100191 - RNA, 81 nt, Homo sapiens
gaggagagagcgagacccagagggacagggcgcagcgacaacccagacgagaacgcccaaaacccgccggaccgaagaagg

SEQ ID NO: 100192 - RNA, 72 nt, Homo sapiens
acaccggcaggaaccaccaggacagacagcgccaagggagcagacgaaagcggccaagagaagcagaggaca

SEQ ID NO: 100193 - RNA, 79 nt, Homo sapiens
gagaccggaccgagagcggaccgagagcgcgaaacgcacgagaagggcagacagagcgaccgcccaacaccggaacgac

SEQ ID NO: 100194 - RNA, 68 nt, Homo sapiens
gaagcgagggcacgggcggcagcccgagaccgcagcaggacgcaaaccagaaggagaaaaaggaacgg

SEQ ID NO: 100195 - RNA, 69 nt, Homo sapiens
cgcgagggacccggccgggcccacgcaccgggagcggcaagaacggacaaggccgcagcacagccacca

SEQ ID NO: 100196 - RNA, 73 nt, Homo sapiens
agaccaagaagcccccgggaggagcagaacgagggcgaaggggccgggacaaggcacgaggcgcggcgaccac

SEQ ID NO: 100197 - RNA, 70 nt, Homo sapiens
gcggccggagaagaagcggccgggcccaggcgggaacacacacaacccagagccgggcccgagagcccag

SEQ ID NO: 100198 - RNA, 58 nt, Homo sapiens
aagcccgggcgcggaagaagccaagagaggaagaaaccaacccagccaccccaagcaa

SEQ ID NO: 100199 - RNA, 73 nt, Homo sapiens
caacggagaccgcagaaagacagagcacgaaaggcaacgcgaggacccagaaggaaaccgacccagcgggccg

SEQ ID NO: 100200 - RNA, 85 nt, Homo sapiens
ggacaagcagcacacggcccccagaacaaccgcggggcacacaaaggacagcccagagcaagcacacggaggcccgggagccaga

SEQ ID NO: 100201 - RNA, 60 nt, Homo sapiens
aagcaagacccaggacaccccgaagccgagaaagggcgggaaggaagagccaaccgcgca

SEQ ID NO: 100202 - RNA, 78 nt, Homo sapiens
gaaaagaacccccaaaagggaggcgaggagcccgagcaggcgcagaggaccggaaagccgagcgcacgagccacgccg

SEQ ID NO: 100203 - RNA, 71 nt, Homo sapiens
ggcgggcagccgaggccgggaaccagcgagggcgaagaggagaggaaggcaccaaagacagaacaaagaag

SEQ ID NO: 100204 - RNA, 79 nt, Homo sapiens
gacaggccagcaggccccgggggacccgccgaggcggaggccgagccgcaggaacacaccgcaaaacgcaaaacaagaa

SEQ ID NO: 100205 - RNA, 98 nt, Homo sapiens
caccggacgaagacagcaaggagacccgccaaagccgccgggcaaggcggaacccagggaacgagggcccagccacggggaggcacgcaaaccccaaa

SEQ ID NO: 100206 - RNA, 59 nt, Homo sapiens
cgaagacacaaggggagggaacaagaagagaaacgagagacaagagagacaccccaacc

SEQ ID NO: 100207 - RNA, 75 nt, Homo sapiens
gacaaccgcaggacccagcagcgcagcagccaaggagacaccccaggggcgagccacaagggcaggagaaaccag

SEQ ID NO: 100208 - RNA, 68 nt, Homo sapiens
ggaaggccggcaagcccaggggagagcccagacaccaccgggccgcccaccccagcggagaaaccaag

SEQ ID NO: 100209 - RNA, 69 nt, Homo sapiens
cccacagcgacaccccagaaagaggaagacaaaaaggaccaagagccgaggcaagagaaaaacgcagaa

SEQ ID NO: 100210 - RNA, 83 nt, Homo sapiens
ccgcccccaccgccagcccggccgcgagcgcggccgcaggagaacaccccaccagaccacccagcaagcccacaaaaaaggca

SEQ ID NO: 100211 - RNA, 69 nt, Homo sapiens
ggcggcggaggggcaggaggcgcggacacgcaaaccacacaagcgcggcaccccagccgggcccgccca

SEQ ID NO: 100212 - RNA, 81 nt, Homo sapiens
acagcaaggggggccacgaggaacaaagacagcccaccaggaagagcgaaaagggggccgaggccaggcagcagacgacgg

SEQ ID NO: 100213 - RNA, 51 nt, Homo sapiens
ggcgcacaaagggcacaacccggaccggaaaccacagaacccaagccagac

SEQ ID NO: 100214 - RNA, 85 nt, Homo sapiens
ggagccgggccccccccaggaacggcccggggccgacccggcccgaggggaagcagccagaaaagacaagcggagaaaggaccga

SEQ ID NO: 100215 - RNA, 93 nt, Homo sapiens
ccggcccccgacagccaggcccgcgagaaggccaaccgccccccagcagcaggcacgggcgaaccccgagccccgccccacgcccgccggggc

SEQ ID NO: 100216 - RNA, 74 nt, Homo sapiens
ggaagagaaggggaaaagacgcacgcaagaggggaggggcgaccccggggcccggccagcacgaccgaggaggg

SEQ ID NO: 100217 - RNA, 76 nt, Homo sapiens
gcacgaacagagccgggagcaagaagaacacccagagcacaccccggagaacgaccgcaacacacagagcggagag

SEQ ID NO: 100218 - RNA, 51 nt, Homo sapiens
agagaaagcaaacgagcagggcaagacggaaaggacggaaccgaagccgga

SEQ ID NO: 100219 - RNA, 77 nt, Homo sapiens
acaccggaacaaagaaaaccaaaacgcaacagaaacaacagaccgaggccaaaagaaaggaagaaaacccccaaaaa

SEQ ID NO: 100220 - RNA, 104 nt, Homo sapiens
cggcagggcggagaggagcggccggagcagcgagggcccggcgaggagaaccaacggcccgaaagagaccccgcgagcaaaggaggaggaccacaccaaaagag

SEQ ID NO: 100221 - RNA, 75 nt, Homo sapiens
ggaaagaggaggggaccggaacaaggaaacgcaccaaagacccaaaaggaaccaggacaacacgaagagggaagg

SEQ ID NO: 100222 - RNA, 75 nt, Homo sapiens
agcggagcgagaccgggagcgcagggcggcgccgagcaggacaccgagagggccccgggcgcgggagccagccga

SEQ ID NO: 100223 - RNA, 76 nt, Homo sapiens
caggagacagcaaacgcaaggcgaagaagacaggcagggacaaacaggagaacacaccgcgcgaccgccgaccgga

SEQ ID NO: 100224 - RNA, 79 nt, Homo sapiens
gaagagccaccaacggagccacgcagacagcgcgcgggcaggagaccggggaggggaaccggcagggagggcaggaaga

SEQ ID NO: 100225 - RNA, 60 nt, Homo sapiens
aggaaggggaaaaccgggacaaagggacccggcaccaacagaaagaaggaggaacgaaag

SEQ ID NO: 100226 - RNA, 78 nt, Homo sapiens
aagggcaagacccaggaggacccgaccaacaaggaccagaaaggaggggccgcaaggccaggcgcgcagaggcaccca

SEQ ID NO: 100227 - RNA, 76 nt, Homo sapiens
gcgcagcggcggcagcggagagcgagagaggggagcagggaccaggaggagaagcaaccagagaggaagcgagacc

SEQ ID NO: 100228 - RNA, 79 nt, Homo sapiens
gcccgcagcaagaggcggacgagaaggacagggaagacaggaaggcaagaacaaaggcaccaaaggagccaaggagaca

SEQ ID NO: 100229 - RNA, 70 nt, Homo sapiens
caacagcccaaaagcagggagccacgggccgcaaccgcccacggagaagaagacacacccgaacgaagcc

SEQ ID NO: 100230 - RNA, 79 nt, Homo sapiens
cgggcgaagcgacgagccgcgaggaggaaggaagagggaaggaaaaagaagacgccaaaaaggcgcagacacaaacccg

SEQ ID NO: 100231 - RNA, 84 nt, Homo sapiens
gccccaccagcccgaaacaccgaggcagccgagccgcaggcaagaggaaccggaaaagcaagagggcccgagggaccgccaaca

SEQ ID NO: 100232 - RNA, 89 nt, Homo sapiens
aggcacagggcgcggaccgcacgagcgcgggaggcggaaccaacccccggccagggaggggccgggggacgagggccccacaggcgcaa

SEQ ID NO: 100233 - RNA, 66 nt, Homo sapiens
acccagcggaaagcaacaaaagacgaagaaacggaaaaagaaccagggggagacaaagccacaacc

SEQ ID NO: 100234 - RNA, 82 nt, Homo sapiens
caccaggcacccggaagagcgcggccgaaggaggggcagcagcaggacagggaacccgggagacagcaacagacggaggaac

SEQ ID NO: 100235 - RNA, 60 nt, Homo sapiens
ggccgccccgaccgccgaacaagggccaaaagggcggggaacggaccaccagccccaacg

SEQ ID NO: 100236 - RNA, 73 nt, Homo sapiens
cagcacgacaaaaaggaagagaaacacggagagggagcaaaaagcaagaaaaaagagggcgcagaacgagaac

SEQ ID NO: 100237 - RNA, 75 nt, Homo sapiens
cgcgggccacccaagaggagccccggggaacccgcagcacaccagggggcaggcccgagcacgcgggagaggaag

SEQ ID NO: 100238 - RNA, 88 nt, Homo sapiens
gccgacgcaccgcgggccccaggaaggaaacggcccccagaagccgccgaacgccgcacccccggggccgaggagcccccacacagcc

SEQ ID NO: 100239 - RNA, 88 nt, Homo sapiens
cgggagggcagcaccacgggcggcagcagccgcgaacgcggccgggaggcagagcgaggcaccggcgccacaaggcaacacgcccacc

SEQ ID NO: 100240 - RNA, 78 nt, Homo sapiens
gaaaaaaaagaccgcgcccgggaaaagaacccgccaaaacacagcgaggagacagaggccacaagaccaggccagaca

SEQ ID NO: 100241 - RNA, 50 nt, Homo sapiens
ccgagcagcagccaacggaacagggcaaacagaagacgggcaaaagagcg

SEQ ID NO: 100242 - RNA, 74 nt, Homo sapiens
ccccaccgccggcgcgggaaacgggcgaagcgacgagccgcgaggaggggacaagccccgaaagaccccacaac

SEQ ID NO: 100243 - RNA, 39 nt, Homo sapiens
acacaagcacccaaagaccagcagaggcccaggccagca

SEQ ID NO: 100244 - RNA, 42 nt, Homo sapiens
gggagggccaccaagggacaaacccccgggggaaacgaggca

SEQ ID NO: 100245 - RNA, 84 nt, Homo sapiens
gagggaggaggaaccccgcaagggcagaagggaagaacaggaggccaggcaaagcaacgagcggcagagcgggagaacaggccc

SEQ ID NO: 100246 - RNA, 88 nt, Homo sapiens
cgagaacgacgaggacgcggcgcggcgcgcgaggcccgaggggggaccaccggaaaccgggccaggagcaccggggggggagaccggc

SEQ ID NO: 100247 - RNA, 75 nt, Homo sapiens
gagcagcaaggaaaaccaggaccagaggccagcccacagcagaaggccaggcgaaccagccgaaaaaggagaaac

SEQ ID NO: 100248 - RNA, 51 nt, Homo sapiens
gagggggaacgagcaacacaaagaagggacaggacaccccccgggccaaac

SEQ ID NO: 100249 - RNA, 69 nt, Homo sapiens
gaccccacacgccaccgaaaaggaagaggagaagcaagggacagaccacaacacaacaaccaaacggga

SEQ ID NO: 100250 - RNA, 76 nt, Homo sapiens
cagagaggggaaggagcccagcgacgaagaagagccgggcaagggcacccaaaaaccgaagacggggacgggaggg

SEQ ID NO: 100251 - RNA, 66 nt, Homo sapiens
gagagagagaacagcacaggagagagcggaacacgccccgacacagaccacagagaagcaggcgac

SEQ ID NO: 100252 - RNA, 78 nt, Homo sapiens
gggacccagacgccccaggacaccaccagccggaggaccaagggccaggccacgccaccaccgggcggccaccagccg

SEQ ID NO: 100253 - RNA, 78 nt, Homo sapiens
caagacaggaccgcagaacagccaagagcgggcccgggccaaccgaggaaacccaagagggagaaaacaaaagggagc

SEQ ID NO: 100254 - RNA, 74 nt, Homo sapiens
ccggcccgggccacaagacccaaggcgcgcggggccgcgcagaggaggagagaaagaaagccagcgcaacgaga

SEQ ID NO: 100255 - RNA, 83 nt, Homo sapiens
cggggcaggggcggaggcggaggcagaggggaggcgcgaaagccggcggaagaggaccaagaagggggcagcgcgggaaccag

SEQ ID NO: 100256 - RNA, 38 nt, Homo sapiens
cgccagcggggacaggcagcggaaaggagaagaaggaa

SEQ ID NO: 100257 - RNA, 73 nt, Homo sapiens
gagcgaggcgggggcgcggaaaacagaggcgcagcccagaaggaacaggcacaaacaccgcccacggaaagaa

SEQ ID NO: 100258 - RNA, 81 nt, Homo sapiens
ggcggccgccgcgcacccaccgcgacccgggacccgcccgcccgcgggagagaggacgacgaacacccaggcaggccagag

SEQ ID NO: 100259 - RNA, 81 nt, Homo sapiens
gggccagacagcgacagcagacccggcagagaacacaacaagcaccagccacaggacgagaagcggccaggaagaaaacca

SEQ ID NO: 100260 - RNA, 81 nt, Homo sapiens
ggcccagcccccaacgcgggggaggaggaggaagaggaagaggcgaaggcggcggaggaggagggggaagaccacaagggc

SEQ ID NO: 100261 - RNA, 77 nt, Homo sapiens
ccacccccgggacgcgcccacggcgccccggcgcgaacgggacaggggggcccaaaccaggagggaaccaggggcca

SEQ ID NO: 100262 - RNA, 53 nt, Homo sapiens
ccagacagcgaacagaggcagaacaagccacaagcgaaaagcagaaaagacac

SEQ ID NO: 100263 - RNA, 77 nt, Homo sapiens
agaccccacaggcaggcccagaggccccgcgcccaggaagccaggagaccacccggcaagagaaggcacaaagagca

SEQ ID NO: 100264 - RNA, 70 nt, Homo sapiens
gacccggggacccccgacgccaggcagcgcccccaaacgcccgagaaccagcagcccaaaggagagcgga

SEQ ID NO: 100265 - RNA, 80 nt, Homo sapiens
gaaggcgcaacgcggcgccaggacagcggccgaagccagagccggggcggcgccaggccccacacgggcgcggcgcggca

SEQ ID NO: 100266 - RNA, 52 nt, Homo sapiens
acagccgcgacagggaaagacagcaggcaaaaggacaagagaccacaaaagg

SEQ ID NO: 100267 - RNA, 71 nt, Homo sapiens
gggcccagcggaaaaaagagcccagggccgccggggccaacagcagaccgaaaagggcggaaaaggaccaa

SEQ ID NO: 100268 - RNA, 123 nt, Homo sapiens
cgcggcgcagggccgcgggcggcccggcggccggaaaaaggcgacgggcagaggaaggcggggaccaacaaggcaccaggcgcagaagggccaaccaggacgagagaagcccgggacaaaaac

SEQ ID NO: 100269 - RNA, 73 nt, Homo sapiens
gagaaagcaaagaaacaacgacccagaaccgaccgggcaggccacagcaaacacaggggcaggaaccggcagg

SEQ ID NO: 100270 - RNA, 94 nt, Homo sapiens
accaggagccggaccaacgagcggccgaacagcagcaggagggagagaagcaaggagagccaaaaaaaaagaaaaaaaaaagcaaacacaaagc

SEQ ID NO: 100271 - RNA, 71 nt, Homo sapiens
ccgcggccccaaggggaccccaacagagcgccaaaaagaggaccccagcacagcacagagcagggagagaa

SEQ ID NO: 100272 - RNA, 85 nt, Homo sapiens
gccgcagcggagcccacgagaggcagcgccaggcggagcagaccaccgggcgagcagacaccgcaggaaagggcaaaggacgcgg

SEQ ID NO: 100273 - RNA, 65 nt, Homo sapiens
agcaggaggcagggggcagcaaaggagaaggaaaaacaacaccaacgagcggaggaggggcacac

SEQ ID NO: 100274 - RNA, 78 nt, Homo sapiens
aaaagcaaaccgagccaggggcggcaggaccgaaaggaaaaagaacagaggccaacccgacaagaggaccaaggccac

SEQ ID NO: 100275 - RNA, 73 nt, Homo sapiens
ccacacggcagaaaaagagaaggccgaaagaaggaaaacaccagcagggacagaaaaggaaaagagggaaaag

SEQ ID NO: 100276 - RNA, 62 nt, Homo sapiens
cccagcgaacagacaagacagccggccaccaaaagagaagaggcagaacacgggggaccaaa

SEQ ID NO: 100277 - RNA, 82 nt, Homo sapiens
agccaagaggaggacagcgcacacagcaagcacgagccaaagcggacgccggccaccacgaaggcgacacagaagacgagcg

SEQ ID NO: 100278 - RNA, 67 nt, Homo sapiens
gaaggcgcaagagaggcgcggagcgcaggacagggccacaccaacaagacaagaaccaaacagaacc

SEQ ID NO: 100279 - RNA, 37 nt, Homo sapiens
ggggaaaggacgccggagaacgacgaccacagcggac

SEQ ID NO: 100280 - RNA, 72 nt, Homo sapiens
aaacccaccggcccagccacgagcccccagcggaacaggagggccgcccaacgccgcaccgaacaagaggag

SEQ ID NO: 100281 - RNA, 65 nt, Homo sapiens
cgcacgcaacccccagggccaggccgagcacgggcacgcaggcagcggggggccgcaccagccca

SEQ ID NO: 100282 - RNA, 58 nt, Homo sapiens
ggagaagaaccccccgaaaggaccccccagcgagccaaagccgcaaagccgccggaag

SEQ ID NO: 100283 - RNA, 121 nt, Homo sapiens
cgcacagggcccggagccaaggaagccccggcccagagaggcaggagccacgacccggggaccgggaacaggaagcagccgcgccccgacacaaggccagccacgccggcccaggcccccc

SEQ ID NO: 100284 - RNA, 86 nt, Homo sapiens
gacaagaagacgccaacgagcggcgcggacggcgcgcggacaccagggggaggaggagccgccaagcgcagaacccagaccagggg

SEQ ID NO: 100285 - RNA, 54 nt, Homo sapiens
gagccaaggccgggacaccagcaaacgaaaccggcagcagccggaggggaaggg

SEQ ID NO: 100286 - RNA, 69 nt, Homo sapiens
gccggacgggagcaagcgacccggccggacccaccgaccaggccccaccgaggcaccaccaaccaaagc

SEQ ID NO: 100287 - RNA, 56 nt, Homo sapiens
aaagcagcagacgaccagggaaaacaagaccggagaagaacaagccgacccaaagc

SEQ ID NO: 100288 - RNA, 78 nt, Homo sapiens
agcggccaggacgacgaggagcagggccgacgcgcaggcagacggcagaaaacagacgaagcaacagcgaacaaaaaa

SEQ ID NO: 100289 - RNA, 75 nt, Homo sapiens
cagacgacgccgccaccacgcgcgggcgcggagcaggagaccggaaagaagggagaccgcggggaaaagagaaag

SEQ ID NO: 100290 - RNA, 81 nt, Homo sapiens
gaggcggacgcgcggcgcgcagcccgaagcggaggacccggcccagccgggcaggccgacccccaccagccgagacacaag

SEQ ID NO: 100291 - RNA, 75 nt, Homo sapiens
aaacacaacacagacaccaaaaaaaagccaccaccgaaacgccaaaaagaaaagaggaggcgagcgggaacaagc

SEQ ID NO: 100292 - RNA, 103 nt, Homo sapiens
ccgcgcagcccccgcgcgggcagccaccccgcccccgccccccccgccgcaccaggcaaaagcagaccggaaaacccaccggcaagaccacacccgaggggag

SEQ ID NO: 100293 - RNA, 74 nt, Homo sapiens
ccgaagccggaaacgaggcaccagggaagagccagcaaggagaagacagaggagccagaccaagagacagcaca

SEQ ID NO: 100294 - RNA, 65 nt, Homo sapiens
aacagaggcaggagaagcacgcggggaacggggaaagacgccggcccaagagccgcagggaggag

SEQ ID NO: 100295 - RNA, 72 nt, Homo sapiens
gaaggagggaaagccaaacaacggacaaagaccagggaagggaaagaaaacaagccacccagacaagaggaa

SEQ ID NO: 100296 - RNA, 65 nt, Homo sapiens
caacggaggcgaacaaaagaacaccagagggggacaagaacagcaaaggaccaccagccagaaac

SEQ ID NO: 100297 - RNA, 74 nt, Homo sapiens
agaaggcgggaagccgaaggcagccacaggacacaaacggaggaagccggaaaccgggcaccggccagcccccc

SEQ ID NO: 100298 - RNA, 75 nt, Homo sapiens
aggaaaacaggaacagagcgagggaggagagagggagagccaaagaaggaccgagaccaccagcagacagcagca

SEQ ID NO: 100299 - RNA, 84 nt, Homo sapiens
cagacgcacagggcaggagagagagaagcccagaaacagcggagaagcaaacgagaagcacaaaaaacgacagcagcccaaaga

SEQ ID NO: 100300 - RNA, 71 nt, Homo sapiens
caggccaaggcaggggccagaagacaaagcaaccaccacgccacccgacccacgcgggaaacggccagcaa

SEQ ID NO: 100301 - RNA, 78 nt, Homo sapiens
gaggccaccagcccagccccgaaggcccgcggagacgagaccaaccgccacaggaccaggcaccaaggaacaccgacc

SEQ ID NO: 100302 - RNA, 63 nt, Homo sapiens
ggaagaccagcaaggaggaagagagcggcccaagaggcgcgacacgccgaccgccgcgccagc

SEQ ID NO: 100303 - RNA, 76 nt, Homo sapiens
cgacgcacagggaccagggacacaacgcaacagggccaacggccgccaccaaaaagaagaagggaaagcgcgaagc

SEQ ID NO: 100304 - RNA, 78 nt, Homo sapiens
caaccccagccgaccgagcccaggagcgccacgcgcggaaggcagcgcccagcagcgcagagccacacaaccacaacc

SEQ ID NO: 100305 - RNA, 73 nt, Homo sapiens
aggagcaggacacggcaggggggcgacagcagaaaacacagagaaaacacggagaaacagcaacaggagaaaa

SEQ ID NO: 100306 - RNA, 75 nt, Homo sapiens
gcgcgcgccacgggcggacgcggcacgcaggcaggcggcccgcagaggaggccagaggagccacgcacccaggcg

SEQ ID NO: 100307 - RNA, 69 nt, Homo sapiens
gacacgccagggacacccaaagcgcacagccgccagggcgcggcccaagaaggaccagacagaacaagg

SEQ ID NO: 100308 - RNA, 76 nt, Homo sapiens
gaggggagagagcggagccgaaaccaagccggacccgaagaccaggcggaggacacggccggcggcaggaccaacc

SEQ ID NO: 100309 - RNA, 46 nt, Homo sapiens
gcacggcgggcgaaacaggggccaggcacaaagagggcgggacacc

SEQ ID NO: 100310 - RNA, 69 nt, Homo sapiens
aagaaaccaaaagagagacccaaggaccagccgcaggaaacaaaggcgcgccagcaagcccagagaccc

SEQ ID NO: 100311 - RNA, 71 nt, Homo sapiens
gagggaccccaaagaccagacagcagaaagaaggaaagcccccaagaaagcaggagcggaacaggaaaagg

SEQ ID NO: 100312 - RNA, 56 nt, Homo sapiens
ccccggccagcagcgcccccagccagaaaggaggagcaaggaagcccaggaacgag

SEQ ID NO: 100313 - RNA, 72 nt, Homo sapiens
acccacgggagagcgggacagacagaagaccccagaggaccgcaggcaggacgacgggggacagaagaggaa

SEQ ID NO: 100314 - RNA, 61 nt, Homo sapiens
caacaaaggaccgcccccagagagagagaaccaacagaggcaaaagcagagacaacaacag

SEQ ID NO: 100315 - RNA, 68 nt, Homo sapiens
cgcgcgggcgggcagccccgggccaggccgcggccggggcaggagcgcagacaacagcagcgagagag

SEQ ID NO: 100316 - RNA, 37 nt, Homo sapiens
gcggagcccgacccacccaagggcacagaaaagaaac

SEQ ID NO: 100317 - RNA, 79 nt, Homo sapiens
gaaaaacacagagggcacacggcacagaccagggaagcgggagaggccacccgcccacgagcggaagaaccagcagaag

SEQ ID NO: 100318 - RNA, 72 nt, Homo sapiens
aggaccgcgcgccacgcaacgggccggcaagaacggaagcacgggcggaggaaagcacaagcagagcccccg

SEQ ID NO: 100319 - RNA, 57 nt, Homo sapiens
gcgcgagggccggggcgggcgccgcgggacccccgggccaggaacggccgagcgacc

SEQ ID NO: 100320 - RNA, 74 nt, Homo sapiens
ggaaaaacagcaagaacccaaaagggaccaaagggacacagaagacaaagcaggacgagaccggcggggcagga

SEQ ID NO: 100321 - RNA, 81 nt, Homo sapiens
ccaccaacaaggagacccgggaggaccaagccgagcgggagagccagggaacgagcccacgggagccggccccgaaccccg

SEQ ID NO: 100322 - RNA, 65 nt, Homo sapiens
aaaccacacagcccaccggcccagcgacgagcgcccaaagagcaccccaccagccagaagaaaac

SEQ ID NO: 100323 - RNA, 95 nt, Homo sapiens
caaacggaagcggacgcgggaggacggcacaccgcggcggcagagggccgggaagcgagcccgcccccgcccccccagccaccaggaggcgccac

SEQ ID NO: 100324 - RNA, 76 nt, Homo sapiens
aaacgcagcggaacggggacgcagacaccagaggggaaagagggaccagcgcagcagaagcagggagacggcgccc

SEQ ID NO: 100325 - RNA, 85 nt, Homo sapiens
agcgaagaagagacaggcgagcgacccccggccgaagccggagaaaagacccggccgaggggccacggacagagcgaaggggaga

SEQ ID NO: 100326 - RNA, 81 nt, Homo sapiens
ggaacagcgccgaggcgacccgcccaggcggaaaccccacaagcggccaccaccaaccggaagaacaaaaccagaaagacg

SEQ ID NO: 100327 - RNA, 48 nt, Homo sapiens
cagccacaaaagcaaaccgaaagcggcgccaagagccaaagcagaccc

SEQ ID NO: 100328 - RNA, 71 nt, Homo sapiens
gagcaagggaagccagaagaggaggaaaaggccacgggaggaagacccaaaaggaagacccgcggaaggca

SEQ ID NO: 100329 - RNA, 73 nt, Homo sapiens
aaggacacacgcaaggccaggagaaggaagccaacaccggagccagaaagccgaacccacggccagaggaaca

SEQ ID NO: 100330 - RNA, 71 nt, Homo sapiens
ggagggagaacagcaaaggaggaccaggcagcacaaccgccagaaggaagacaagagagacaccagaaaag

SEQ ID NO: 100331 - RNA, 81 nt, Homo sapiens
acaaagccgaagaccccggagccccagccagggaaccacggagcacgagaaaacggcgggggcccaacgaaccgaagagaa

SEQ ID NO: 100332 - RNA, 67 nt, Homo sapiens
ggaacaggcagcaggaagcacggcgggcgaaacaggcccccggcgaaaaggaagaaggaaacacagg

SEQ ID NO: 100333 - RNA, 58 nt, Homo sapiens
gccacgggccgagacacgcagcggcggccagggaccaacccgcggaaacaacaaccag

SEQ ID NO: 100334 - RNA, 84 nt, Homo sapiens
gaaaaaggaagaggagaaggaaagcccgaacccgcaggaccaaagacagagacaagcggggaagaacggcggagcacaccgacc

SEQ ID NO: 100335 - RNA, 77 nt, Homo sapiens
gagccgggggccaggacggcaagacgcaacaccccaacagaagaagcggaggaagccacgagaaccaggaaggggga

SEQ ID NO: 100336 - RNA, 76 nt, Homo sapiens
gcccccgcaccagccaagaggagggagccccaagccggcggccaagacggagccgaggcccggccaggccccaccg

SEQ ID NO: 100337 - RNA, 58 nt, Homo sapiens
ggcgccaccgggggaagggccggcgcaccgacggccaacgggggaaacccagacgaca

SEQ ID NO: 100338 - RNA, 70 nt, Homo sapiens
agaacacaacacgagagccagaagcagaggaggagggcgaacgacacagaagagccaaaacccagcagca

SEQ ID NO: 100339 - RNA, 77 nt, Homo sapiens
agccaagccccaacggcccccgcgccgggcgcagcggggcaacgaggaacaggccaagaaacaacacagccaaggcc

SEQ ID NO: 100340 - RNA, 71 nt, Homo sapiens
gccagagagaaaagacacgaagcaagggagccgaaagggacccagaggacgggaaacaacggagcccgaac

SEQ ID NO: 100341 - RNA, 52 nt, Homo sapiens
cggaagcacacaacaggaaaacaaaagaggagaaaggacaaggcgggaagaa

SEQ ID NO: 100342 - RNA, 72 nt, Homo sapiens
caccgccaggcaacacgggaggcggagcgcagccagaccgcacccacccagaacccagccggggcagggagc

SEQ ID NO: 100343 - RNA, 36 nt, Homo sapiens
ccagaagacagagggcgagggcacagaacagagcag

SEQ ID NO: 100344 - RNA, 74 nt, Homo sapiens
gcgccggccgccccaccggcggaacccagcaagaccagaggacaagacaaagggagcaagacaagccaaagagg

SEQ ID NO: 100345 - RNA, 83 nt, Homo sapiens
cgcgacccaccaagaacgggaggggacgggcggcccagcgggcgagacggaggaggagcaaaaggagggaggacagagaaccc

SEQ ID NO: 100346 - RNA, 69 nt, Homo sapiens
cacaggcgaggccaggcaaaggaaccacccaggaaacagcgcaagcacacagcaaccagacgcagcagg

SEQ ID NO: 100347 - RNA, 71 nt, Homo sapiens
ggggcaaccgcgaagcaacaacggggcgggagaccgcacaggccgcacaacaacccacaagaccagcacac

SEQ ID NO: 100348 - RNA, 63 nt, Homo sapiens
aaaccagaccacaaccacgggcccgaaacacgcaagagcgccacccaccccacaggaagcaaa

SEQ ID NO: 100349 - RNA, 55 nt, Homo sapiens
caccccgcgaaaggaggaggcacagaccggaaaggaagagaaaggaaggagaaag

SEQ ID NO: 100350 - RNA, 69 nt, Homo sapiens
aaccacagagacccacagggcaacgccaaggaaaaggaacagagagagcagaaccgaaacggggaaaga

SEQ ID NO: 100351 - RNA, 73 nt, Homo sapiens
acacaacagcaaaaagacaggcagaagaccgaaaacgggccgcgcaaaagagaagacacgcgaccagaggaaa

SEQ ID NO: 100352 - RNA, 76 nt, Homo sapiens
gggaaaccgaagggaagggaacagagaaaccacacaacaagaacgcgccagaagacccaccaaaggcaccagaaac

SEQ ID NO: 100353 - RNA, 75 nt, Homo sapiens
cggaagagaggaagaggggccaaaaggagaaaggacaccggaaaaaaagggggaagggcaaaaagcaaggaccga

SEQ ID NO: 100354 - RNA, 78 nt, Homo sapiens
acggagcaaaaaccagagacagccagagcaaacaagaacagaaaacaaaggagaacggcaaaaggaacaagggaaaaa

SEQ ID NO: 100355 - RNA, 77 nt, Homo sapiens
gcaccaagagcgccaaacaggagccaggagcaggggcgcggcagaggcgcggacgagcagcgcagggcggggcgcgc

SEQ ID NO: 100356 - RNA, 84 nt, Homo sapiens
gcaggagggacaagaccggaccagccagaggacgcgggccgaggagagcggaggaggggcgcaccacgacaaagaagagaaaac

SEQ ID NO: 100357 - RNA, 35 nt, Homo sapiens
ccagcgcccacccaagcgcccccacgccggcgccc

SEQ ID NO: 100358 - RNA, 69 nt, Homo sapiens
agaagccaaccgcaaggcagaaaacacggaggaacacgagggagcaccgcagggcaggccccacgccca

SEQ ID NO: 100359 - RNA, 73 nt, Homo sapiens
caagacgggccgagaagcagcgcgagggcgagaaaaagcggagaaaaaacaagcgaagggcagaaagcagcgg

SEQ ID NO: 100360 - RNA, 69 nt, Homo sapiens
cgggcccacccggaaggaaggcccagcgccaaacgacaaagcccggcgcagagcaggcaagcggcgaca

SEQ ID NO: 100361 - RNA, 72 nt, Homo sapiens
caaaaacaaaacgaaccaggacggcaaacggaacagccccaagccggaaacccaggaacggaaacagaacgg

SEQ ID NO: 100362 - RNA, 85 nt, Homo sapiens
gcccagccagaaggcgccagaccgcagacaccacaggaaccaccccccagaagccgagagcggcccaggaggaacaaccagccca

SEQ ID NO: 100363 - RNA, 80 nt, Homo sapiens
agcggcaccaccgcgaggccagaccccaaagacagacggaaaccaccccacccaacccccgacacagaagaggagaaaac

SEQ ID NO: 100364 - RNA, 53 nt, Homo sapiens
gagagagagccacacaaagaacccccacaaaacagaaaggaagcggaagagaa

SEQ ID NO: 100365 - RNA, 81 nt, Homo sapiens
cgaacagggaggagagacggcggcggaaaaccccaaaaggacaaagaggcccccagaagagaaggacaacaaggaaaacca

SEQ ID NO: 100366 - RNA, 70 nt, Homo sapiens
aaggggcgggacccggaggaacgcagaaggaacggaacacagcccaggaggcaagagcgagaagagcgca

SEQ ID NO: 100367 - RNA, 74 nt, Homo sapiens
gagaagcaccggaaccaaaagggagcgaagagcgggcagaccgccaggccagcgaaacagccccaacagccacc

SEQ ID NO: 100368 - RNA, 63 nt, Homo sapiens
agaagacgacgcaccgcaggcagacaaaagggccaaagaagggagagagaaagggcaaggggg

SEQ ID NO: 100369 - RNA, 66 nt, Homo sapiens
cccgcagacagcagcggggaaaaacaagagcggaagaagagcaccaaaaagaacagaaaagaaacc

SEQ ID NO: 100370 - RNA, 110 nt, Homo sapiens
accgccgcgaggaccagggaagggcaacgccaaagcaagcggccggcacacccacggcgggaggaggagaaagcaaggacccagagccacacgaacgccccgaccacagg

SEQ ID NO: 100371 - RNA, 70 nt, Homo sapiens
gaaaggagggggcgagaaggcgggaagccgaaggcagccacaggaggaaaagcccgccagcacgcacaaa

SEQ ID NO: 100372 - RNA, 36 nt, Homo sapiens
ccggccggggcccgccgagaaagggggacaccaaag

SEQ ID NO: 100373 - RNA, 72 nt, Homo sapiens
caagccaggaaggaagacagcgacgcagaccaaaagcagagaggcgcgacagaagccccagaaagaagggga

SEQ ID NO: 100374 - RNA, 67 nt, Homo sapiens
accgcccccggcccgaccagggcggccaccgagagcgacaaagacagacggaaaagaagagaaccga

SEQ ID NO: 100375 - RNA, 81 nt, Homo sapiens
cgcccagcgccgcccccggagggcccacgcagcgccggacaaaccgccagagcggaacgaccccagagcgagcccgcagca

SEQ ID NO: 100376 - RNA, 79 nt, Homo sapiens
agagaccacagaaggacgggagaacaccccacagggaagaggcccacggcagacacagcaggccaacccagaaccaccg

SEQ ID NO: 100377 - RNA, 101 nt, Homo sapiens
ccgcgcagaggcgggcgacgcggagggcgaagccgggagggggcgcggcgggaggccacgcgcagccccggaagagccacccagacccaccccgggcggaa

SEQ ID NO: 100378 - RNA, 80 nt, Homo sapiens
caggaaccccggaagccagaaagggcggaaaccaggcgaacgaacaccagcccaccggagcgacagccaagggaagacag

SEQ ID NO: 100379 - RNA, 72 nt, Homo sapiens
gccaagaccgggcgcaaaggacaggagccagcaccgccgaccgccagcgccagaagccagagagggcggaca

SEQ ID NO: 100380 - RNA, 75 nt, Homo sapiens
gagcacagaagagcgaggagggaggaaggcgaccaagccacggacaacgaaacaaaaaggaaaaggcagcaaacc

SEQ ID NO: 100381 - RNA, 71 nt, Homo sapiens
ccaccgacccgacacacacacggcacgccgaacacgcagccggcacccgcacaacccagggggccgaaccc

SEQ ID NO: 100382 - RNA, 40 nt, Homo sapiens
ccagcgcccaagcgcacagggcccaccgcacagaaccaca

SEQ ID NO: 100383 - RNA, 92 nt, Homo sapiens
gaaacggccaggccacaaaggcagcacacaccagagcgaagcgagcccgagccccgacggaaacagcgcgaaaacacgacgccaggcaggag

SEQ ID NO: 100384 - RNA, 81 nt, Homo sapiens
gggagcccccaggcagaacgaccccgaacggcccccaaggggcgggcgcggggcccgacaagagaggcggagccaccccca

SEQ ID NO: 100385 - RNA, 80 nt, Homo sapiens
cccacgccaacacgccgggccaacacgcaaccggaagcagcggcccccaggccacaagccgggcggaggcaaggcgcaac

SEQ ID NO: 100386 - RNA, 65 nt, Homo sapiens
cgagaacggcgcaacagggacaaagaaggaagaaaccaaacgaaacacaacgaccaacgggaagc

SEQ ID NO: 100387 - RNA, 66 nt, Homo sapiens
gcgggaaggagccggaggcggcgaggagcgccgccgaggagagcaggcgacaccccaagagggccg

SEQ ID NO: 100388 - RNA, 72 nt, Homo sapiens
gccgcgacgcaggccccacgaggggagggcgagccgccagcccaaggaaaggcccaggcacagcagacgcac

SEQ ID NO: 100389 - RNA, 98 nt, Homo sapiens
agagaccgagaaccggcccaggcgccccaaaaacacagccgaccccgggaacggggcgaccgccaggaggaagggggccagccaccgagacccggcgg

SEQ ID NO: 100390 - RNA, 83 nt, Homo sapiens
gggccggcgcaagacagcgaggaggaggccgagaccagccaggggagacccaggggggaggcgcacaacccaccacagacaag

SEQ ID NO: 100391 - RNA, 55 nt, Homo sapiens
acaccgaaggacgacccagaagacggaagggcgaaacacaggaacacaacaagcc

SEQ ID NO: 100392 - RNA, 50 nt, Homo sapiens
aaagcacgggaggagagaaccaagccgccacagggagaaaagagcagagg

SEQ ID NO: 100393 - RNA, 79 nt, Homo sapiens
acaacccgacccgacgagcacaaacagcagacaaaaggaaaaaggcgagggaacgaagaagcagcgacggcccaaacag

SEQ ID NO: 100394 - RNA, 55 nt, Homo sapiens
agacaagaccgacaccagacccaaaggacaagcaggagacgccagggggaggaag

SEQ ID NO: 100395 - RNA, 72 nt, Homo sapiens
aagaacaggagacaccgcaaaacacaagaagaaagaaaacaggcaaagaaacggaccagacaggagagagga

SEQ ID NO: 100396 - RNA, 64 nt, Homo sapiens
aaccacggaagccccacagaggaagcccaaggacaccacgccccccgccgagacgaggggaacg

SEQ ID NO: 100397 - RNA, 72 nt, Homo sapiens
agagggccacccgccccaaggcccccacagagagcacacaaacaaagcgaaaccacggaagaaaagggcaaa

SEQ ID NO: 100398 - RNA, 73 nt, Homo sapiens
cccggcccgggccacaagacccaaggcgcgcggggccgcgcaggcaaaagcagaccggaaaacccaccggcaa

SEQ ID NO: 100399 - RNA, 73 nt, Homo sapiens
cagcaagcaccaagaaacaccaaccaaagccgaggcgaggcacagaccaggcggaaagcccggggggacgcgc

SEQ ID NO: 100400 - RNA, 69 nt, Homo sapiens
cagcgcagagaagcgggcaaagcggcggaaaagaaacaccaaacagaagaccggccaaaccaagaaaaa

SEQ ID NO: 100401 - RNA, 78 nt, Homo sapiens
cgggcagccacccggcggcggggccgcagcccaaggaaggagccaaaaaccgaacacccggaaggggacaagggacgg

SEQ ID NO: 100402 - RNA, 73 nt, Homo sapiens
cccggaacgcgcgcacccaccgggcccgcgggccgccccaccccacaggggcaacacccccacaaagagcaag

SEQ ID NO: 100403 - RNA, 69 nt, Homo sapiens
gggcgcgggcaaggacagagcagaggacgcgcaggggcacccccacggagcccggggggaagggaacgc

SEQ ID NO: 100404 - RNA, 78 nt, Homo sapiens
aaaaccggacaagaggccaaccaaccggaggccaagaacccaaagcaaggcgagacaaggggccaaccagccagggcc

SEQ ID NO: 100405 - RNA, 85 nt, Homo sapiens
gaaaaaggacaaaagccaagaggaggacagcgcacacagcaagcacgaggggcacagaacgaagaggagcaggaaacagagaaga

SEQ ID NO: 100406 - RNA, 42 nt, Homo sapiens
cgcagcagcagccgccaagacgggagacccgaccaccggaag

SEQ ID NO: 100407 - RNA, 38 nt, Homo sapiens
agaccaggccaacccccgagaggccagaaccgcccaaa

SEQ ID NO: 100408 - RNA, 74 nt, Homo sapiens
ccagagcacccaaggaccacccccacaggccccaggaaccacagggaacccagaaccgcggaccacagcaaacc

SEQ ID NO: 100409 - RNA, 42 nt, Homo sapiens
agcggcccgaaaggcacccgggccgagaggagggagacccag

SEQ ID NO: 100410 - RNA, 78 nt, Homo sapiens
gaaaccagcccagccggcagcacaccgaccaccgcaagagccacagacaaggaaacgagaagaacgaaagagaaaccc

SEQ ID NO: 100411 - RNA, 74 nt, Homo sapiens
ggaccggggcaggaaaggaaccaggagagagcagccagaggggaaacccagacgacaaggaaggccaagggacc

SEQ ID NO: 100412 - RNA, 76 nt, Homo sapiens
cccgccccgggcgcccaccaacaaggaggcaaccccgcccggaccaagagcaccccaagacggcacccgggcccga

SEQ ID NO: 100413 - RNA, 74 nt, Homo sapiens
gcacgggcgggggacgggcagaaaaacagaaacagggaaagaggggaaaaggaaaaggagccagaaggagagaa

SEQ ID NO: 100414 - RNA, 90 nt, Homo sapiens
ggacgagggacggcgcagacggaggcggcggagccgggagcgcagaccaggaccgcgagcaggaagggagaaaggaggaaaaaagcagca

SEQ ID NO: 100415 - RNA, 48 nt, Homo sapiens
caccgccgagggcacaccgcgaaagagggaagggacgcaaaaaggaag

SEQ ID NO: 100416 - RNA, 106 nt, Homo sapiens
ggccgccagcagaggcggagcccgcagaccgcagaaggccggagacaccagcaggggcccgcacggcgccggcccgcaaggcaaagaggcaaagcaccccgcaaga

SEQ ID NO: 100417 - RNA, 78 nt, Homo sapiens
cgagacaggcccggagaacgggagcagagggaccgagcccggaccagccaaaaacggagacgaagaagacacgaacag

SEQ ID NO: 100418 - RNA, 72 nt, Homo sapiens
agaaacaagggggaaaaccaaggaggccagcggacggacagaacacagacagcaggcaaagcccccgacagg

SEQ ID NO: 100419 - RNA, 68 nt, Homo sapiens
agagcagccagggcaggggaggaacccaagccagaccgcccgagaaagacaggaagaccgaggcaccc

SEQ ID NO: 100420 - RNA, 69 nt, Homo sapiens
gcagcaccagaaaaaggaaagcccaagcaaagacgaaaacacagggcccagccaaaagagaaggcgaga

SEQ ID NO: 100421 - RNA, 79 nt, Homo sapiens
cagcaaggcgggcgaacggggcagcccgggaccaggaaaggaagccgggggaccaacaacaaagcacacggacacagga

SEQ ID NO: 100422 - RNA, 64 nt, Homo sapiens
cagaaagacggaccgaacgcagaccgaaaacgggagacagacccagcacggaccccccccccag

SEQ ID NO: 100423 - RNA, 78 nt, Homo sapiens
cggacacgaccaccaggccaacaacacagcagaaccgccagagaagagggagcagaggaagcgcggaaaagggccaga

SEQ ID NO: 100424 - RNA, 76 nt, Homo sapiens
gcaaccggcgacagccccaaggcaacaagcccacccgaaaccacaaggccgaccgccccgcgacgcggagcccccg

SEQ ID NO: 100425 - RNA, 50 nt, Homo sapiens
acgcccgaaacaaggcagcggaaaaccccacccccagccccgaggcagcc

SEQ ID NO: 100426 - RNA, 76 nt, Homo sapiens
ggaaaaaggagcagcccgggcaccacagaaaagccccgccgggccaaggaacaaccgccccacagagcccagcgcg

SEQ ID NO: 100427 - RNA, 78 nt, Homo sapiens
cacccgaaagcacaccggggccaagccaaagccccacggacagggagaaccgccaagcgagagaaggcggacgcggcc

SEQ ID NO: 100428 - RNA, 80 nt, Homo sapiens
gagacggaggagcccgcgggacacaggaccacgcggagagggagcagcccgaagacggacgcgaaaaggggcgacagaca

SEQ ID NO: 100429 - RNA, 66 nt, Homo sapiens
accgaaaccaaagaaggagccaaaaaaaagagacacaaaagcaccagcagaaccgccccagggacc

SEQ ID NO: 100430 - RNA, 69 nt, Homo sapiens
gacagcacaacaccgcacggggagccaagccgcaacggggcggcacacaaggagcgaagggcagggaga

SEQ ID NO: 100431 - RNA, 83 nt, Homo sapiens
gaacgggcacccgcagcgcagaaggaaccggcaaagcgcaggaacgggaacgcaggagcgaccaggcagaagcccccggggag

SEQ ID NO: 100432 - RNA, 74 nt, Homo sapiens
gggacaagggcgaacagcacagagcccccggaaggagagcgcgggcgggcgcgccccagcaaggacaaggaagg

SEQ ID NO: 100433 - RNA, 83 nt, Homo sapiens
gcgcccgcggccgggcggcgcggccgcccgggccgggccccaccggacggccgggcccgccagggcacgcgcccgccacggga

SEQ ID NO: 100434 - RNA, 90 nt, Homo sapiens
ccgaaccagcgcgggggcgaggaacgagcccacggaaacagggaagcagccagccaagcacgggacaccacagcgccgggcaaggagacg

SEQ ID NO: 100435 - RNA, 37 nt, Homo sapiens
acagcaaaacaagacaacaagacaagggcagaaagaa

SEQ ID NO: 100436 - RNA, 84 nt, Homo sapiens
gaagaagcgcagccgcaccggccaaggccggaaacgaaacagcgcagccaggaacaggacgaagaccagcgccagggaaagaag

SEQ ID NO: 100437 - RNA, 73 nt, Homo sapiens
gcgaccacaaggaacgaggggccccaagagcacagaccagcagccgccaaaggccaagaacccaaagcaaggc

SEQ ID NO: 100438 - RNA, 77 nt, Homo sapiens
acaacaggaggaacagcccaccaccaaaaaccaggacggcacagaaaagaacacacgaaagagaggggacaacaaac

SEQ ID NO: 100439 - RNA, 83 nt, Homo sapiens
gcgcgcgcgcacgggcggcgcggcgaggacagcagcggacggccggaccaagaggcgccgccccccagcaaacgagaaaaacc

SEQ ID NO: 100440 - RNA, 79 nt, Homo sapiens
agcagacacccgccccacggacagcagcggaaaccccccaggcaagaggcgcaggaccgggaagaccaacaaacgcacc

SEQ ID NO: 100441 - RNA, 46 nt, Homo sapiens
gcaggcgccgaagaagggaggcagccggcgaggggggagcccagca

SEQ ID NO: 100442 - RNA, 73 nt, Homo sapiens
gaaccagcaacaagccggaaggccccaagggaggccaacgcccaccaagcccgggagcccagggccgagccaa

SEQ ID NO: 100443 - RNA, 77 nt, Homo sapiens
ggaagcggcaaagccagaaagaggaggccagagcgggaagaaggagagacgaccacgcaacagaaaaagagcgcacc

SEQ ID NO: 100444 - RNA, 47 nt, Homo sapiens
ggcgcgcgagcggagggaggcgggcgcagccagagaaacagcaaaaa

SEQ ID NO: 100445 - RNA, 58 nt, Homo sapiens
gcgcagcagagagcgggcgggggggccggcagaaaaccaaccacaaggcaaagcagaa

SEQ ID NO: 100446 - RNA, 72 nt, Homo sapiens
aagcaacccaccagccacgggcacccacccgcagccgaaggagaaagggcgcaagagagcgggccacgggac

SEQ ID NO: 100447 - RNA, 58 nt, Homo sapiens
agccccaaccgcgccaacaccaccggaccaagcagaaaaaaggccaggagacaaccag

SEQ ID NO: 100448 - RNA, 80 nt, Homo sapiens
ccgaggcccgcccaggcggcgaccgcgggccaaagccacggaacaagcccaaacaaggcaaagcagagagcagaggccag

SEQ ID NO: 100449 - RNA, 59 nt, Homo sapiens
cgcaccaggccaaagaaagagaagaagcaggggcccccaacacacgcaggaaacagcag

SEQ ID NO: 100450 - RNA, 71 nt, Homo sapiens
acagaagaggaagagagggagggagcagacaaggaaaagagacggagaacaagaacccagagcagaaaaac

SEQ ID NO: 100451 - RNA, 48 nt, Homo sapiens
gcgaggcagggccagcagcaggcgggagagggggggacacacgcaggg

SEQ ID NO: 100452 - RNA, 74 nt, Homo sapiens
gcagggggagggaagagcagaggcggcggcacaccccccccgaggcagaaggcggcagggagcacgcaccagga

SEQ ID NO: 100453 - RNA, 82 nt, Homo sapiens
accacaagaagaaaccaagaacaaacaggccacgcacaagcaaagagagcggcaaaaacagggaagacggcagaacacaaac

SEQ ID NO: 100454 - RNA, 77 nt, Homo sapiens
gagccggcggcgaccgcccgaaacaggcaggccggagcgggcgcaggcccgagaccaccaacaccagagagccgcac

SEQ ID NO: 100455 - RNA, 75 nt, Homo sapiens
gggcaaggagaaacgaagaccgccaccggcggacgaccccagggacagggcggcgaagaagagggaggcaccaca

SEQ ID NO: 100456 - RNA, 81 nt, Homo sapiens
ccggaggagcagggcagagcacgcgcgcagcgaagcccagggaggccaccagcgacaggaagaagacggccaccagaaaaa

SEQ ID NO: 100457 - RNA, 83 nt, Homo sapiens
gaagggaagggacgcaacgggacccaccccagacagcaaggcgaggagaaggccccacagccagcacccaggacccacagcgg

SEQ ID NO: 100458 - RNA, 69 nt, Homo sapiens
cccagaacaccaagaaaggacaagagacggaaacccaaagagagggaaggagaacagagggaaaaagac

SEQ ID NO: 100459 - RNA, 72 nt, Homo sapiens
agcgaccgccaagagacacacagggcaccagaccggcgcgaccagaagaagaacaaacagcagaaagaaacc

SEQ ID NO: 100460 - RNA, 75 nt, Homo sapiens
cacggacacccacagcggggcggcggcggcggcggcgcggcccaaaaggaaaacgcaaaaccagaagcgcgccga

SEQ ID NO: 100461 - RNA, 62 nt, Homo sapiens
cgaggaagaaccaaacaagaagacccagagagagcaggaggagcggaggaggggaggggccg

SEQ ID NO: 100462 - RNA, 64 nt, Homo sapiens
gggaaagcggaccgagccggagcggacgacgagacagggaaggcccgcgaagaagcacggggcg

SEQ ID NO: 100463 - RNA, 74 nt, Homo sapiens
gcccaaccggccagagcccacggcagcgccggagacaaccagggagacaagcacacgaccgcgagagggcgaag

SEQ ID NO: 100464 - RNA, 78 nt, Homo sapiens
gccgccagagcgcggccgccaaggggcagaagcgggagccggcaccgagggaggagggccacagaccgcagagcggcc

SEQ ID NO: 100465 - RNA, 61 nt, Homo sapiens
agccccggcggccgaacgcccgcggcgcgggacccacgcaggaaacacgacaccggaagcc

SEQ ID NO: 100466 - RNA, 63 nt, Homo sapiens
ggcggggcggcccgaggagcgggccgccgcagacaaaggccacacaaaacaccaaagaccaag

SEQ ID NO: 100467 - RNA, 77 nt, Homo sapiens
aaaaccaggagacacaaacagaaaaggaagaaagggacaaagagaggagcagggggcagcacgccgaaggagagacc

SEQ ID NO: 100468 - RNA, 69 nt, Homo sapiens
cggaaccaggagagacagcagagcacaaaaaggacaacgagagcggaagacagccgccggcccaggcgg

SEQ ID NO: 100469 - RNA, 70 nt, Homo sapiens
acacgggaacccaagaaacaaacccagacgggcagaagagagagaaagaggagcggaggagccccaggaa

SEQ ID NO: 100470 - RNA, 69 nt, Homo sapiens
gagcaaaccaaaggagaggaaggagaccacagggagccgaaaacaggcaccaagccacaaaacaggcca

SEQ ID NO: 100471 - RNA, 76 nt, Homo sapiens
ccgccccgccgcccagaggacgcccaacaccacccacccaccacgggggagaagggaagcgccaagaagcaacaag

SEQ ID NO: 100472 - RNA, 76 nt, Homo sapiens
gaaacccaccgggaaaaggcacgaaggcgcccagaaacagagggcaggaaaggagaaaggccaggccggggagcag

SEQ ID NO: 100473 - RNA, 77 nt, Homo sapiens
cggaagccggcggagcgagacgagaacccggccgcgcaagggacgaaggcccaccaccacgagcgcggccaccaacc

SEQ ID NO: 100474 - RNA, 76 nt, Homo sapiens
gcccgcggggcggggaccgccgcccggggcagaaaaagaagaggagggagggcagaaaaacaagccgagaagcccg

SEQ ID NO: 100475 - RNA, 71 nt, Homo sapiens
cgcacggacagcgacccgccccacccgcagcagaacaagaaggagccaaagaagcaaagccaaggacaggg

SEQ ID NO: 100476 - RNA, 80 nt, Homo sapiens
gaggagggaaacagagaacaaaaacagggccgagagaacagcagaagacacaaccaaagcccaccagaggacagacagaa

SEQ ID NO: 100477 - RNA, 85 nt, Homo sapiens
aagaaagcacaaaccggccaggagaaggaagcgccggccaaacgagcacagcaaacgcgaaagagcggaggcgcgccagagaagg

SEQ ID NO: 100478 - RNA, 83 nt, Homo sapiens
gaaggaaagaccgaggcgacacgaggaacgagcaggccaagaagacaccaggaaggaagaggacccagagaggccccaggaca

SEQ ID NO: 100479 - RNA, 74 nt, Homo sapiens
ggggcaccaaagccagcacagaccccgggcccacaggccaggaagaacgcaaaaggcgaaaggagaaagaagag

SEQ ID NO: 100480 - RNA, 73 nt, Homo sapiens
ccgagcggccaggccgcagggaggccacacaaccggcgccgggaaccgccgagccaccaggcaggcccagaaa

SEQ ID NO: 100481 - RNA, 73 nt, Homo sapiens
gcgggcaacagcgggcagcggaaacaaccagcggaaagaagaagcaccaaagcaaagaagagaaaacgaccaa

SEQ ID NO: 100482 - RNA, 43 nt, Homo sapiens
cgcgcagccaccggagaaggcgcggaagaagaaagacggccaa

SEQ ID NO: 100483 - RNA, 51 nt, Homo sapiens
gcaaacggaccagaccgaccaccaaaagcgcagaacagccgggcacacaga

SEQ ID NO: 100484 - RNA, 72 nt, Homo sapiens
agagcacgggaaaaggacccgaaaccgaaggcagaggaaaggggaaaagccccgacaagggaccgggcgggc

SEQ ID NO: 100485 - RNA, 60 nt, Homo sapiens
gcccgcagaccgaccggcaggcgcaaagccacaagccaggcgaacccccccaaaaaaaac

SEQ ID NO: 100486 - RNA, 57 nt, Homo sapiens
ccccagcggaccgaacaggaacgaaagcggcacggagaagaaggaaaagaacggccc

SEQ ID NO: 100487 - RNA, 68 nt, Homo sapiens
aagaaagaggccacggaccgagcgcgacagagggagagcacccgccacaggccacaaaggaggcaggc

SEQ ID NO: 100488 - RNA, 80 nt, Homo sapiens
gccaaggcccgaacagaaccgcccgcggaagccgaagcggcgggccagggagaacagagggagccgcccccgaagccaac

SEQ ID NO: 100489 - RNA, 68 nt, Homo sapiens
gaaggaccaagaaccagaagacccagagcagcacaggcagcccgcagaaaacggaaggccagggccca

SEQ ID NO: 100490 - RNA, 80 nt, Homo sapiens
gcagcgcgccggccccaacacggaccgaaccaaaggcagacccagaagagcacaaaacagagaaaagggaagggcccgga

SEQ ID NO: 100491 - RNA, 78 nt, Homo sapiens
agcggacacccgagcaccgaaggccacagcgaaaagacccaagcccgccgacaagaacaaggggaagacgggcagcag

SEQ ID NO: 100492 - RNA, 40 nt, Homo sapiens
gcagagacgagcgccaagggagagaaaggagacaggcgcc

SEQ ID NO: 100493 - RNA, 71 nt, Homo sapiens
gaggccccccagccacggaacaggaaccagaagacacaaaaagacaaggaaaggaaagaaagaacaccagg

SEQ ID NO: 100494 - RNA, 72 nt, Homo sapiens
ccccgaaggcccacaggacaggagagaaagacggaacaggaaaaaggcacaacagagcagggaaaagccacc

SEQ ID NO: 100495 - RNA, 63 nt, Homo sapiens
aaaacccaaggggggagacgagccgcagaaagccagcaacaggagcagcgcaggaaagaccca

SEQ ID NO: 100496 - RNA, 86 nt, Homo sapiens
cacaggagcccagccgccagagggggccaagaagaaagcacagaacagcccgggcccccacagcccagcccaaagccccaccccaa

SEQ ID NO: 100497 - RNA, 79 nt, Homo sapiens
gcagccggggacgcagacgaagggacgcacaccgagacgaacacagaacagcacgaccagaggggaagccaagcaaacg

SEQ ID NO: 100498 - RNA, 78 nt, Homo sapiens
accccaacaaaccacacagaagaggagcggggagggaaggaacaccaaaggacaacagaggaaagcgggaaccaacca

SEQ ID NO: 100499 - RNA, 70 nt, Homo sapiens
cacacacccccaggcaacgaggagacggaagacaacccagacaacgaagagaggaaagaagcggaaagga

SEQ ID NO: 100500 - RNA, 85 nt, Homo sapiens
ggagagagggagagccaaagaaggcgccaggggagaggaggcagaaggagaccgcgggacagaaccgcgggcaaaaggggggaaa

SEQ ID NO: 100501 - RNA, 82 nt, Homo sapiens
agaaccagaggaagaaaaggaagggaagaagagagcgaaccagggcaaaaccgaaaaccacgggaaggcaaagaagaagcgc

SEQ ID NO: 100502 - RNA, 75 nt, Homo sapiens
ggggccaaagaagcaaggaaacgcagaaccaaggaaagacaagagaacgggggaccaaagcgaccgcacaccaaa

SEQ ID NO: 100503 - RNA, 81 nt, Homo sapiens
cagagagaaagccagaaaggagcagcaggcaaaagggaaagcaaggggaagggcccaagaagacaccccaccagaaaccga

SEQ ID NO: 100504 - RNA, 116 nt, Homo sapiens
ccgcgccgcgccccgccccgcccccggcgggcggcggaggccgcgagaaccgacgagcccacaccagaccagaaagaggggacgaagccccaaggcacccccagcggagaacacag

SEQ ID NO: 100505 - RNA, 72 nt, Homo sapiens
gcaagagggaacccaggggccgaagcccacccagggaggagcgagacgacgggaccgaaggaccccgccaga

SEQ ID NO: 100506 - RNA, 80 nt, Homo sapiens
acaacaggaccgggccgcggccagaccaacagagagacgggaagccaaaacagaaacggaaagaaaaagacagcacgaag

SEQ ID NO: 100507 - RNA, 75 nt, Homo sapiens
acagcaagcgcacaggccgggcacagggagccccaaaaacagccaaggaggacacgcgaccgaacaggaggagcc

SEQ ID NO: 100508 - RNA, 74 nt, Homo sapiens
gacgggccaagagcagaccgggcgaagggagaggacagcagggaggcgggacgcggaaccgacgacagaagcca

SEQ ID NO: 100509 - RNA, 101 nt, Homo sapiens
ccaccgaccgagcgggaggccacagcagccagccggcccgaggacaccgacaccagcagaacccaggagaaacgagagggacagcaaggaagacgccagag

SEQ ID NO: 100510 - RNA, 74 nt, Homo sapiens
acaaaacagaagaaagcagaaaaacaaaaggagcagcagaagccgaccaggaagcaaaagggacagcaaacaaa

SEQ ID NO: 100511 - RNA, 79 nt, Homo sapiens
gggccgcacccggccgcccggcgccccggggacgccgccccccggccgccaccgcaagagaaaagcgggcccgagaacc

SEQ ID NO: 100512 - RNA, 65 nt, Homo sapiens
cgggccggaagacggcagcggccccggagacacaccggagagaagaagagcccccaagcaccacg

SEQ ID NO: 100513 - RNA, 81 nt, Homo sapiens
aaacgaggcaccagggaagagccagcaaggcggcccccccgggcggccaagacaccccgcgccgggccgaaacccacaacc

SEQ ID NO: 100514 - RNA, 79 nt, Homo sapiens
acgagaaaagaagcaaggaagcgaagcagccgaagcacaaaagagagacgcccagaacgaaaacaaacggaagagaggg

SEQ ID NO: 100515 - RNA, 66 nt, Homo sapiens
agcggcgcggaaacgcaagacgggccgagaagcagcgcgaggacaccagaaaggaagaagaacaga

SEQ ID NO: 100516 - RNA, 82 nt, Homo sapiens
gaaagacagcccgaacggagaaagagacagaagccgggaaccgaaagagcgagccccagggccggagccagcaagccgagaa

SEQ ID NO: 100517 - RNA, 72 nt, Homo sapiens
aaaaaaaagaaaaggaaggagagaagagagcccacgaccacggaacccaccgggcagcagagaggcggggga

SEQ ID NO: 100518 - RNA, 69 nt, Homo sapiens
cgaaggcgcaaacgacaccacccgaccggaagaagccaagaaggaagggcagcacgagaggaccaacca

SEQ ID NO: 100519 - RNA, 71 nt, Homo sapiens
cgccacaccaagcggcgcgcgcaggaggccaaggacggcgcggaccaaagcgggcccccgccaaggcggag

SEQ ID NO: 100520 - RNA, 80 nt, Homo sapiens
cggccggaggggggccgggccgcgaggaaacgcgaggaaccgggaagaaggggccgggagaggaaggccccaagcagcca

SEQ ID NO: 100521 - RNA, 72 nt, Homo sapiens
ccgaaagcggcgcaacgaggccggggaaccaggggggaaccaccagaggaagagagcaaagcagaaacggac

SEQ ID NO: 100522 - RNA, 75 nt, Homo sapiens
ccccgcaggaccgcacccgcggagacggacgcccggacacagcgagaagaacaacacagcgcaggggggagccgg

SEQ ID NO: 100523 - RNA, 91 nt, Homo sapiens
gaggcgcggagcgggcagccgccgccaccccgcggccgcacccccgccccagggcccacgagacgcgaacaaacgccgcgccgccagaaga

SEQ ID NO: 100524 - RNA, 81 nt, Homo sapiens
ggccccaacaccagccgccgccccgcagccccccgcagcacccagccggccacgcccccccacccacggaagaggaaggaa

SEQ ID NO: 100525 - RNA, 81 nt, Homo sapiens
aaagaaaccgggaccacagaaccggaaaccggacaagcagaagaacagaggagcgagcaaggcaggagagaagcgcaggcg

SEQ ID NO: 100526 - RNA, 106 nt, Homo sapiens
gacggaaacacagcggacggccggcgcgaaagccagcgacgaccagcggagggcagaaggcgcaaaggcaaagaccagcagggcgcccccgccccggccaacagga

SEQ ID NO: 100527 - RNA, 76 nt, Homo sapiens
gccgcgacagacccggggcagcccccccggaaccgggcacaggcccaggcccaagccgaggcaggcacccagaagc

SEQ ID NO: 100528 - RNA, 50 nt, Homo sapiens
gcgacacacgacgggagaagacagaggagccagaccaagagacagcacag

SEQ ID NO: 100529 - RNA, 60 nt, Homo sapiens
cgccccgcccggggacgaagagcgcagcccccggcggcccccaaaacacaagaggacgga

SEQ ID NO: 100530 - RNA, 88 nt, Homo sapiens
gacgcggccgaagcgggggcgcgcggcggaggaccaggcgcggcgcggcgcggcgagggccgaggaaacagagcaccacggaagggga

SEQ ID NO: 100531 - RNA, 73 nt, Homo sapiens
aagcagccaacagcaaagccaggaaagggcaggaaaggagggcgaaacacaagcaccacccccggaagcacca

SEQ ID NO: 100532 - RNA, 69 nt, Homo sapiens
aagccgacagacaaccagaccacggggaacacagaacagaagacgaaaaccagcccagacgccccagaa

SEQ ID NO: 100533 - RNA, 65 nt, Homo sapiens
ccccccccccccccaaggacccgaacacggaagaaagacacgcaggaggccgcggccgagcagcg

SEQ ID NO: 100534 - RNA, 65 nt, Homo sapiens
acaaagaaaaagacccaagcgaagcccaaaagaaagaggcaaaagaaaggcaaccgacagagcgc

SEQ ID NO: 100535 - RNA, 70 nt, Homo sapiens
gcccgccagccgcgcccgacaccgaaaacgagaaacgaaagagacacgggggcacaaccgagcccgggga

SEQ ID NO: 100536 - RNA, 72 nt, Homo sapiens
gaagccgcagcggaaagcaggagcacaggacccaggaagccacccgcagaggggcaaggagaaagggcaaac

SEQ ID NO: 100537 - RNA, 75 nt, Homo sapiens
gaaaccaagaccgaacgaaagacacaggagcacacaggcacggagagaagaaccagcccaaaccaaaggcggaca

SEQ ID NO: 100538 - RNA, 40 nt, Homo sapiens
agcccccgagagccgggaaaggcgcagggccacaccgaac

SEQ ID NO: 100539 - RNA, 79 nt, Homo sapiens
acgcccgggccagcccaggaccccaggggaacaagaggccacgcagagccacgccgagagagcggagacaaggccacag

SEQ ID NO: 100540 - RNA, 79 nt, Homo sapiens
cccccgcgagccgcggccacgcgagagggacacgcaggacgagcggccgaagcagcgcgcgaaacagaggaccgcgggg

SEQ ID NO: 100541 - RNA, 68 nt, Homo sapiens
aaaaacggagaaaacccgcgacgccaaccacgacgaagcggaaggcagaaggaacagcagcagaggac

SEQ ID NO: 100542 - RNA, 75 nt, Homo sapiens
ggcgccgccggggagaagcccccggggcccaggacgccaaaaggggaagaacccaagacacacacagcggagcaa

SEQ ID NO: 100543 - RNA, 71 nt, Homo sapiens
acggggaccccggagcccagaagacagagggcgaggaccgaaaagacgcggccccaaaggaaacacccgaa

SEQ ID NO: 100544 - RNA, 76 nt, Homo sapiens
ccgagggagggccgagccagccgcggccggaggagcccccaggccgagacagggaaacgaaaaccaccgggcacca

SEQ ID NO: 100545 - RNA, 71 nt, Homo sapiens
cgcggaaccgcgacaccaagagggaagcacagcggaccaaggggaaacaaccgaaagcgcagcgaaacagc

SEQ ID NO: 100546 - RNA, 89 nt, Homo sapiens
cacgccagccgcaccagccgcccaagccgcacagccgcggcggcagcagcaggagaggcgccgaccccgacagaacgggccccgcaccc

SEQ ID NO: 100547 - RNA, 80 nt, Homo sapiens
gaagacggccaggccggccggccggacaagcccaggagccgaccagagagcagggcgaaccgaccaagaacaacacccag

SEQ ID NO: 100548 - RNA, 66 nt, Homo sapiens
aacagcagaaacaaagaggagaccaggaccaacggccagccacgcagacaaccccgcgcgcacgga

SEQ ID NO: 100549 - RNA, 70 nt, Homo sapiens
agggaagacagccgggacccgcaagaaaccacagagacaaagcgccagccaagagaggggaagccgagag

SEQ ID NO: 100550 - RNA, 62 nt, Homo sapiens
cccaccaaacagaaacgagggccccaaggagccccaaaggcccagcgacacccgaaacacag

SEQ ID NO: 100551 - RNA, 76 nt, Homo sapiens
ggggaggggagcccgcgcccgccgcgggagagaggacccccccccccccccaagaccgagacaggggcccggcacc

SEQ ID NO: 100552 - RNA, 78 nt, Homo sapiens
cccggccgccgcccgccggggcgagacccccaggggggcgccccaggaggagagcacagccaaggcaccaaggaggag

SEQ ID NO: 100553 - RNA, 76 nt, Homo sapiens
ggaagagagggagcagagggaaagggaaggagaaggagggacgcaggcgcaggccagagggcaccaggcgcgaagg

SEQ ID NO: 100554 - RNA, 111 nt, Homo sapiens
acggcggcgcccgggacggcggcggaccgcgcgagcagggcgcgccccgcagcagggaagaaaacgccagagaagcagagcagcccggagcgaggggagaccggggaagcg

SEQ ID NO: 100555 - RNA, 72 nt, Homo sapiens
cccaccgcagccgcagaaccaggagcggaagaagccacccgacccccacgcgagacaagaagaaacggcaga

SEQ ID NO: 100556 - RNA, 81 nt, Homo sapiens
aaaaaagagcccgcaagaagaacagagacagcagccaaacccccaggcgaagacaaaaacaggaagcaaagaagaaaagga

SEQ ID NO: 100557 - RNA, 55 nt, Homo sapiens
gcagggagccacaccaagccaacaggagggagggagaaagaggacaggagaacaa

SEQ ID NO: 100558 - RNA, 72 nt, Homo sapiens
agagcaaacgcaaaggaaagagcgggaaaaggaaaaggcaagcagagaaagggagggaagacagcaggcagc

SEQ ID NO: 100559 - RNA, 86 nt, Homo sapiens
gccaagagccggccaacagcacgacaacaagggagggcacagccaagacaacaaccaagcaccaggaaaaccgagaagacgaaggg

SEQ ID NO: 100560 - RNA, 73 nt, Homo sapiens
ccggggccaacgagccaacgccaggcgccgcccacagggcacaccaaagggaaccaagaagggacccaaaaag

SEQ ID NO: 100561 - RNA, 73 nt, Homo sapiens
cccggaccacacagcgcccaggccagagaaggggaaggaggggcagcgacccggaaaccccagagaaaaagcg

SEQ ID NO: 100562 - RNA, 75 nt, Homo sapiens
caagacccaggggggacaagacaggggccggcaggaggcccacccgacgcggagcgaccggcacgggcggccgac

SEQ ID NO: 100563 - RNA, 63 nt, Homo sapiens
ccaaaagagcgcaccaacccccacaaggaggaagcaccggagcaaaacgggaagagccagaag

SEQ ID NO: 100564 - RNA, 83 nt, Homo sapiens
aagacacgcgaagcacacagaccccaaacggcgaacaggaacacaggacaagacacacgcaagccacggagggcagcccaggc

SEQ ID NO: 100565 - RNA, 70 nt, Homo sapiens
gcagacggcaacagaaaaaaagggagaaagaggccaggggaagcagcgaaaaaaaagagcgaggggacaa

SEQ ID NO: 100566 - RNA, 82 nt, Homo sapiens
ccggaccagcagaaaccagaggaccagaacaaaaaccagaaaaaaggaacaacaagaaaaagggaaagaacacagaagcaga

SEQ ID NO: 100567 - RNA, 61 nt, Homo sapiens
ggggcggcacccggcaaaggaagggaccgccagcagcagccgaaaacgcacaagaccaaca

SEQ ID NO: 100568 - RNA, 70 nt, Homo sapiens
ccccggagggcaccggccccagaggaaagcccgaaggagccaaagcccgaccaagaaccacccaaaagga

SEQ ID NO: 100569 - RNA, 80 nt, Homo sapiens
cccgccgccgggccggggccccgcagcgacaacaggaggccggaagacccaaagcgagggcgagcagcaaccgaaggccc

SEQ ID NO: 100570 - RNA, 80 nt, Homo sapiens
aaaggcccaccagaggaccacacaggcagcccaacacaccggcacccgggagaaagcccgaaagcagcaggccaggaccc

SEQ ID NO: 100571 - RNA, 81 nt, Homo sapiens
aggacagcgcacacagcaagcacgaggcggaccggaagcgagcaggagcagagcggaagacccaccagaaagagcaaacaa

SEQ ID NO: 100572 - RNA, 79 nt, Homo sapiens
cggaagggaaagggagaaacaggggccgacggagcaagagcgaggaacagcggaacacggagcggccccgccggcccca

SEQ ID NO: 100573 - RNA, 71 nt, Homo sapiens
cacgccgcgcgccacaccaggcccgccacgaaccgacggggaccccaagaggaaggaaccggagacgcagc

SEQ ID NO: 100574 - RNA, 92 nt, Homo sapiens
cagcccagcaagaaagcccaaagggcaaggggaccgaaggagaagaaggagaaggggaggagaaggcaagccggaaagagcgaaagaaagaa

SEQ ID NO: 100575 - RNA, 81 nt, Homo sapiens
agagagcacaacaccacacaaaaaaggccagagaaacagcaaagcaaaccgaagaccacgggccggggagaaacgaaacca

SEQ ID NO: 100576 - RNA, 83 nt, Homo sapiens
cgcccccagcacccacccgggggcagggggcccgggacaggcacgcgagaaggggagggggagaaagaagaggaagaagccac

SEQ ID NO: 100577 - RNA, 73 nt, Homo sapiens
ggccccagaccggagcagagaccacgagacaccaaaggggaccacaggcagcagcacaaaccagcaccaggaa

SEQ ID NO: 100578 - RNA, 73 nt, Homo sapiens
cgcgcgcccagaagaggccagagcggaagccaaaggcaacgacgagggccgcgaaaccaacgacaacagcccg

SEQ ID NO: 100579 - RNA, 84 nt, Homo sapiens
cgaggagagcggaggaggggacgggagagaagcgccggccggaaagaagacggggaggagcaggacgagcccaagggggggccc

SEQ ID NO: 100580 - RNA, 71 nt, Homo sapiens
gaccacacagacggcgacaaaagggagggcggacacaacacacggggaggcaagcaggggggcaaaggaaa

SEQ ID NO: 100581 - RNA, 72 nt, Homo sapiens
ccgcccgccaggccgggccgcgggagccgaggcgccgaaggaccgacgcccgggcgaaggcaagggaccggc

SEQ ID NO: 100582 - RNA, 70 nt, Homo sapiens
accgccaggaaggccggcacagaggccgccaagaacgagcaggacaaaaacaccgaaccagaagcgagga

SEQ ID NO: 100583 - RNA, 76 nt, Homo sapiens
cgcggggcgcggagcgccggagccgcgcgcgacgccacccagagcagccgaacgccaaagaaaccagcaggcggca

SEQ ID NO: 100584 - RNA, 73 nt, Homo sapiens
gccaagcgcacacaaaagaggagaaaaccgggcgcagccggaaccaagaccaggacaaagaagacccggagag

SEQ ID NO: 100585 - RNA, 68 nt, Homo sapiens
gaccgaaaggaaagagccggagaccccgcagcagaagagggacacggccgaagggacaaaggagcagg

SEQ ID NO: 100586 - RNA, 75 nt, Homo sapiens
ggccccggcgcaggcgcccgacgcccgggcagagggagccggaagagcgagcccgaggcagagcaccggcacccg

SEQ ID NO: 100587 - RNA, 93 nt, Homo sapiens
ccgcgcgaggcccacggggcgcaaacgcacgcgacggcccagcggggacgacgagcccacggcacaacggaccgacagagcagcaaccggccg

SEQ ID NO: 100588 - RNA, 85 nt, Homo sapiens
cggacggagccccggcaggcacagccggccgcgacaccccgggcacaggagcgagggcaacccgccgagggcgcggcacggaggc

SEQ ID NO: 100589 - RNA, 91 nt, Homo sapiens
cggacacgacgcaccagccgggccaggccgcgggcacagccccgaaggagcgcagagcagaacggggaagagaagagaggccgacaaggac

SEQ ID NO: 100590 - RNA, 75 nt, Homo sapiens
gccccgaccgcggcggagcccgacccacccaagcgacacacagacagccccacccggccgcagcagagacagacc

SEQ ID NO: 100591 - RNA, 51 nt, Homo sapiens
cgaaagcagacccaacaccggcggggacgagagccccggcacaaacggacc

SEQ ID NO: 100592 - RNA, 72 nt, Homo sapiens
aagcaccccgccagcagagaagcaacccccagccacaacgcgaaccgggcggacgaaggaggcggcaacagg

SEQ ID NO: 100593 - RNA, 74 nt, Homo sapiens
agcggaaaacaacaaagacaacacagagcagaggagaccccacacaccaacccaggcagggaccaacagaaggg

SEQ ID NO: 100594 - RNA, 77 nt, Homo sapiens
gcggaggggcggacgccacgccaaaggaagggccgacgaaggagaagcgggaagcacaggaggccacgggggaccgg

SEQ ID NO: 100595 - RNA, 83 nt, Homo sapiens
aaggaccaagaaccagcaaaccagccagcacgggggcccagccagccagcagcgaggggggacggaggcggcacggggccaga

SEQ ID NO: 100596 - RNA, 69 nt, Homo sapiens
aaaacagccagaccccggagacgccccacccgaagccagcgaacggaccgccacccagcgcaaacccag

SEQ ID NO: 100597 - RNA, 78 nt, Homo sapiens
gcagcgggccccgccaccggcacaccgaaggggcggagaacggaaaagcaccaggaagcagagaggaccgcagaaggg

SEQ ID NO: 100598 - RNA, 67 nt, Homo sapiens
ccgggcagagcagcagaggagaacagccagcaaagacaagagcagaccagcagccgcagcgcgacag

SEQ ID NO: 100599 - RNA, 75 nt, Homo sapiens
gacgaagcgcccgccaccaagggccaaccgccccccagcagcaggcacgggcgaaccccgagccccgccccacgc

SEQ ID NO: 100600 - RNA, 81 nt, Homo sapiens
cggccgaggcgggcgcaagagaaggcaccaagaggaaaagcacacgccggacggaaacccacagccaagggggaaccagga

SEQ ID NO: 100601 - RNA, 90 nt, Homo sapiens
gcacgggggcccagaagggggaccaggagagcaagaaggccgacaccaaggcccagacagaaggaacacgacagaaaaaggcggcagagg

SEQ ID NO: 100602 - RNA, 80 nt, Homo sapiens
cgccgcgccgccccgccagaagaggagacgacggacggcgggcaccggccgacggacgaagaagcagaagccaacaaaca

SEQ ID NO: 100603 - RNA, 81 nt, Homo sapiens
cccaggccggggagggcgcgccgaaagcggaaggccgaggacaaccaggggaaagcacgggacgagagaagggaaaaacaa

SEQ ID NO: 100604 - RNA, 60 nt, Homo sapiens
ggcggaacccgcagagagggccgggagcacaagcgagcaagagagaagaagcaaaccggg

SEQ ID NO: 100605 - RNA, 78 nt, Homo sapiens
ggcgcagggaaagaggcgaacaagagcaccaggggaggacgaagccagcggggcccaggagaccccagaggcggggag

SEQ ID NO: 100606 - RNA, 74 nt, Homo sapiens
agaagcaacgagagcgccagacagcggacggcagcagaaagccgccggaaagacaaccagccacggaaggaaga

SEQ ID NO: 100607 - RNA, 76 nt, Homo sapiens
caagggagaggacagacagaacaccgaagaagcaggcacaccccccacaccagaaaaaaccaacaacggagggaga

SEQ ID NO: 100608 - RNA, 51 nt, Homo sapiens
cgcagggcgcccccgccacgcaggagaagaaaaaggaccggcaaaacgaaa

SEQ ID NO: 100609 - RNA, 57 nt, Homo sapiens
aacagggcagcacagagaccgcgaaagcggaccaaggaaccagaccgcacggaaacc

SEQ ID NO: 100610 - RNA, 80 nt, Homo sapiens
agccaggagccgcagaaggcacggggggagaaggacggcagaaaacgagacgccggcggcgaaaaaaggggacaagaccg

SEQ ID NO: 100611 - RNA, 45 nt, Homo sapiens
caaccggcgacggaaccaagaaggaagaggcccagcagaagggac

SEQ ID NO: 100612 - RNA, 70 nt, Homo sapiens
gcagggcgcggaggggccggcccccggagcgacagaaacaagggcaacaccaacagcggcagagaagaaa

SEQ ID NO: 100613 - RNA, 77 nt, Homo sapiens
cccggcggaaaggaaaggccaaggaaagggacggaaaacgacacacacaggcacagaggccgcgacagccaccaaag

SEQ ID NO: 100614 - RNA, 75 nt, Homo sapiens
ggcagcggcgcccgagcggcagaccgaccaccccccaggagaagccggcacaggacagaggcacccagggccagc

SEQ ID NO: 100615 - RNA, 73 nt, Homo sapiens
gggcggcacaccacgggggcgcagaccgccaggagaagacagaggagccagaccaagagacagcacaggcgag

SEQ ID NO: 100616 - RNA, 80 nt, Homo sapiens
aagaggcgcaagggaagcagaggcacgggaggagaacaagcagcaagagaaaggcaagcagggcgagagagcacaccacc

SEQ ID NO: 100617 - RNA, 36 nt, Homo sapiens
caacgcggaggaaggagcagcgagcaaggcaagaag

SEQ ID NO: 100618 - RNA, 85 nt, Homo sapiens
cggccagcaggaggcgagaagaaaaacacgcgcgccgagccagaggagaccccagacccccccgcagccagagggcggagccgcc

SEQ ID NO: 100619 - RNA, 87 nt, Homo sapiens
acggacggccaacaagacgcacccgccaccgggaccgacgggcacgggggagaggcaacccagaggaagagcaaagaaaagagaaga

SEQ ID NO: 100620 - RNA, 78 nt, Homo sapiens
cggggcgcagaccgcggagaagggagacacaaggacagcagcgacggggcccgcaccccaggagaaggggcgccacgc

SEQ ID NO: 100621 - RNA, 61 nt, Homo sapiens
gacagccccgaccgaggacgagggaccgccgccgaagagcacccacgggagaccggggggc

SEQ ID NO: 100622 - RNA, 81 nt, Homo sapiens
gacagaaggagcaggaaccaaaggaaaaaggcacaaacccagcacagagaagacggcgacaagcaaaagacgacgcagaaa

SEQ ID NO: 100623 - RNA, 78 nt, Homo sapiens
accacgagcacacgcagaagggggaaagagaccgggacagaacagcaaagaagaaacaccccgccgccagggacaagc

SEQ ID NO: 100624 - RNA, 75 nt, Homo sapiens
acgcagccgcgagcccggaggcggcgggaggaggcggcggccggagcccagaccgagaaccgggggaacgcgggc

SEQ ID NO: 100625 - RNA, 78 nt, Homo sapiens
agccagggaaccacggagcacgagaaaacggcggggcaagaacggaagcacgggcggaggaaagcacaagcagagccc

SEQ ID NO: 100626 - RNA, 78 nt, Homo sapiens
ggaccgcggcgcaggacgccgacacgggccgcgccaggcgcgagaccgcacagcaaggaaagcacccagagaaggacc

SEQ ID NO: 100627 - RNA, 56 nt, Homo sapiens
acgccacacaccaaacgaacagacacaccaacagcagcagcggagcgaggccggcc

SEQ ID NO: 100628 - RNA, 78 nt, Homo sapiens
agaaagagcaagacagaggaagaacgggaaaaaggaagccagaggagaacgcaagcacaggaccagaaacgaaaggca

SEQ ID NO: 100629 - RNA, 82 nt, Homo sapiens
cggcagccacggagagggcccggagaacagagccaccaaggccccagcgaaccagcgcagcccaacgggcccccaagacccc

SEQ ID NO: 100630 - RNA, 39 nt, Homo sapiens
caagagccgaaccagcacggccagaagcaggggcaaaag

SEQ ID NO: 100631 - RNA, 75 nt, Homo sapiens
ccgaccacacccccacaccgccaccaggacaagaagcaccaaacccaccagcgcgaagagccagggcagaaaccc

SEQ ID NO: 100632 - RNA, 60 nt, Homo sapiens
cccccccccccccaagacaacggcaagcggagaagagcaaggccgaaccgagaggaaggg

SEQ ID NO: 100633 - RNA, 85 nt, Homo sapiens
cggggccggccgccgcgggaccgaggaaaagccgcaccagcgcagacccaggggagcccaccagccagcaacaggcccggaagac

SEQ ID NO: 100634 - RNA, 114 nt, Homo sapiens
cgaacaggccggagagagagaaacaggagacaggagagagagaagaagagacgcaggagggagaaacagagagaggcagagaggccaaagaaagacgagaagaaagagaaaaag

SEQ ID NO: 100635 - RNA, 51 nt, Homo sapiens
gcgacacacaccgaagccagaaaaacggaaccgggagaaaacaagcgagag

SEQ ID NO: 100636 - RNA, 82 nt, Homo sapiens
gcgaagcggccgagcaggcgagcgaacgacgggaccagccaacgcaggcggagcacacggcggaagccaaggcgcgcccaac

SEQ ID NO: 100637 - RNA, 70 nt, Homo sapiens
gccaggcgggaaaccggcccagcggcgccacgacggaaccaagaacagcacgaaacaaacacgaggaagc

SEQ ID NO: 100638 - RNA, 85 nt, Homo sapiens
cccaggaccccaagcgggaccaccaccagaacaaacgacgccgcggccggaagagggcgccggggcggacccggaacggcagcgc

SEQ ID NO: 100639 - RNA, 79 nt, Homo sapiens
cgcccgcgccgcacgagcagcgcggcgggacaccagaagcaggcaacgagcaccagagaggaccaccccaacaacacag

SEQ ID NO: 100640 - RNA, 75 nt, Homo sapiens
gaagagcaggaagccgcggaccacaagccacaaacgcgcacagcagaggggaaagaagagccagcaggaaaggaa

SEQ ID NO: 100641 - RNA, 84 nt, Homo sapiens
ccggcgcgaggacgggagggagagagggccccggggcgagaagggggacccaggccaaggaagcacgggaagaacagaaaagag

SEQ ID NO: 100642 - RNA, 73 nt, Homo sapiens
aaagaaaccaggcgaaaggacgacacgaggggcccagcacgacagagacccggaaagcgagcagcaaagaccc

SEQ ID NO: 100643 - RNA, 78 nt, Homo sapiens
aggccacgcagcagaaaagacaaaacagcagggaagaagcggaaaaagcccaagaaaaacgcaagcggacaggagagc

SEQ ID NO: 100644 - RNA, 51 nt, Homo sapiens
agacggagcgaaggccggaggacaagaacagccagcaaagacaagagcaga

SEQ ID NO: 100645 - RNA, 70 nt, Homo sapiens
gcagccggaccccgcaccacacacccccagcgagacagcccaggaaacgagacccagaagcggggaggga

SEQ ID NO: 100646 - RNA, 77 nt, Homo sapiens
ccgccgacgaggaacggcggagcagggagcccaaagaccccggagacaggaggaaggcagagaaaaaaggagggcca

SEQ ID NO: 100647 - RNA, 80 nt, Homo sapiens
agcgccgaaaagcaccggagccgccgcgcagaaggcgggaaggcgagggccagaaccaacaccgggccacgcagcacaga

SEQ ID NO: 100648 - RNA, 78 nt, Homo sapiens
gcggaaaaacccaacagccaaggacagaggaccaaagcggaccagagacaggacccgagccccaaagacagaaaagcc

SEQ ID NO: 100649 - RNA, 75 nt, Homo sapiens
agcgggcggagacgccgggcagccgaacggagggcgacggagggagaccgcaaaggcgcagaaaaccaccggaag

SEQ ID NO: 100650 - RNA, 81 nt, Homo sapiens
gaggggcccgggcccagagcggaagacaagacggcgacagacacagcaccggccccggcagcgggacgcaggacggcagcc

SEQ ID NO: 100651 - RNA, 101 nt, Homo sapiens
cgagcacaggaagaccaacaacaggccacccaaccgaaaacggaccagaacccagcaccggcacggaccaccccaacaccgggggagaaccgggcccacca

SEQ ID NO: 100652 - RNA, 62 nt, Homo sapiens
ccgggggacggcgcggaagaagcgcgcggagcgcgggagccggagcgggcagggcacacaac

SEQ ID NO: 100653 - RNA, 74 nt, Homo sapiens
aagccacgaaggacggagaagaaacgagagagacaccaccaggcacccggacacgaccaaaacccccaaagcca

SEQ ID NO: 100654 - RNA, 79 nt, Homo sapiens
caaggaacaaaccgaagaacagcgggaaagaaggcaaaacacggcccgaagcggaggacccggcccagccgggcaggcc

SEQ ID NO: 100655 - RNA, 83 nt, Homo sapiens
ggggcgcccgccgggacgccgaccgccgggacgaggacaaaaggcgcagccccaagcaccggggcggggaccccgaagacgag

SEQ ID NO: 100656 - RNA, 76 nt, Homo sapiens
cggcggcccggagggggcggcggggcgagacgcggaaaaagggcaacagagagggagggagcaccaagaggacagc

SEQ ID NO: 100657 - RNA, 72 nt, Homo sapiens
cacccccagaggggccggacgggccaaggaacgcaagacggcccccccccgaaaggaagagacccgccacag

SEQ ID NO: 100658 - RNA, 79 nt, Homo sapiens
agccgaaaagcgcacaagaagaacaaccaacccagaacaccaagaggacggcgggacccggaggcggagaaggccaagg

SEQ ID NO: 100659 - RNA, 75 nt, Homo sapiens
gaaccacagggcaggaggaacaaaggcggaaacgaaggggaggacacagaaggaagaagggaaacgggcaaaggg

SEQ ID NO: 100660 - RNA, 69 nt, Homo sapiens
ggaaacacagggcaagggcaggccggagagcgacccgacaaggcccacgcccaccaccaccacggggga

SEQ ID NO: 100661 - RNA, 84 nt, Homo sapiens
acagaagagcgaagcgaggacacacccaggaaaagaccaggacggacaagcacagccggaaggcaaccaagaaaaagcacgcca

SEQ ID NO: 100662 - RNA, 78 nt, Homo sapiens
gaagaagcggaaaaaagaaaaccagaagcggagcgggggcccgagaagccgacggagccgcacggcgagccacgcgcc

SEQ ID NO: 100663 - RNA, 78 nt, Homo sapiens
cgcaccgccagggaagaaacggggggagagcagagcacacgcgcgagggacagccaacgcacagccgaacaaagaaac

SEQ ID NO: 100664 - RNA, 74 nt, Homo sapiens
agcagaaacgcaccaggccaaagaaagagaaagcagagccaaaagacaaaacgggaccacaaggagggacccgc

SEQ ID NO: 100665 - RNA, 88 nt, Homo sapiens
ggaggcgggaggagcggcagccgcgaggaggcgcgggagggcgagaacgaccccgagacggacgggcccagggaacacgggagccccg

SEQ ID NO: 100666 - RNA, 78 nt, Homo sapiens
cacacggaacggaccccagggaaagagggggagaagggaagcgccaagaagcaacaagcacaggaggagacagcacgc

SEQ ID NO: 100667 - RNA, 70 nt, Homo sapiens
ggaacagccacgaccacggaaacgggacccaaagccgccagaggaaggcccagaaaagggcggaagagaa

SEQ ID NO: 100668 - RNA, 77 nt, Homo sapiens
gaggacgaggcaccccaggcgaccggcccgcagcaagaggcggacgagaaggacagggaagaggccacaggggagac

SEQ ID NO: 100669 - RNA, 110 nt, Homo sapiens
cgccgcaccaggccaccgccacgggccgagacacgcagcggcggccagggaccaaggcagcagcagagcgaacaggacgaaaggagaagagggagacccaaagaacaagc

SEQ ID NO: 100670 - RNA, 54 nt, Homo sapiens
gggaaagcggcacgcgccccagagagaggaaaagaagccgggcggaacgacgcc

SEQ ID NO: 100671 - RNA, 84 nt, Homo sapiens
cgaccgcagcaccaggagcagcgaggcaccaccgcacgccggcgaggccagcgaagccgggcggaagcccacgcacaggcgccg

SEQ ID NO: 100672 - RNA, 72 nt, Homo sapiens
agaaagacagcaaacaccgaggggaccgagacggaaccagacaggcaggcaggccggcaggcggcaccagga

SEQ ID NO: 100673 - RNA, 88 nt, Homo sapiens
aagccaccacaaaagcgaaagggcacaccacagagggacaccaggccaaaccaccccaagccgagcacggggagcgcacacgccgaag

SEQ ID NO: 100674 - RNA, 72 nt, Homo sapiens
aagaaaaccaaaacgcaacagaaacaacaggaggccaagaacacagaaacggaaacgaaaaagagaaaagga

SEQ ID NO: 100675 - RNA, 88 nt, Homo sapiens
gccaagcggggagcgcccgcgacagaggagggaggaaaacaaccgagggcagacggcggagaaaccaccacaaacacgaggccagcaa

SEQ ID NO: 100676 - RNA, 83 nt, Homo sapiens
agaaagggggacggcgggaaagacgccagcaacggcagaagaagccacccgcgcgcaggagaaggaagcacacacacccgcac

SEQ ID NO: 100677 - RNA, 74 nt, Homo sapiens
agcagaagccaccaagaggcaacagacagaggaccaggagcaccgcccagaacccgacaaccgagggacggcag

SEQ ID NO: 100678 - RNA, 84 nt, Homo sapiens
gccgccacagcccggccagggcgcgcgccccgcgggggccgagccccgcgccccgcaggcccgggaaagaccacagcaagacca

SEQ ID NO: 100679 - RNA, 72 nt, Homo sapiens
gcgggcgcgggggccggggcgcgcgcagagcccgggggagggagccacccccgaagccaagggaaacagcaa

SEQ ID NO: 100680 - RNA, 76 nt, Homo sapiens
ccccaacggcccccgcgccgggcgcagcgggggagaggcaccagcaacagaccaaccgcagcaagcacagagacag

SEQ ID NO: 100681 - RNA, 75 nt, Homo sapiens
gcccggcgcccagcaccagaagacaagacagccacgcgggccacaccgagccaacccgagggagcgaccgagggg

SEQ ID NO: 100682 - RNA, 50 nt, Homo sapiens
cgcgcgcccacgcaggagcaccacaacaggacaaggcacgaggcgcggcg

SEQ ID NO: 100683 - RNA, 77 nt, Homo sapiens
ccgagcggacccggaccggggagccaccaaaaccggcaaaggccgcgaggaaccacgaagagacaaaaggagcagac

SEQ ID NO: 100684 - RNA, 77 nt, Homo sapiens
caacacaagacaagccagcagccgccagacaagaggaacacacaacggagccagaagagcaaaaaaacagaaaagca

SEQ ID NO: 100685 - RNA, 74 nt, Homo sapiens
cagaacaggccgccaaaggaggcacacgccccgacaggggccccaccagccaacaccccccccagaaggaagag

SEQ ID NO: 100686 - RNA, 82 nt, Homo sapiens
gccacaggcgggaaggaacaccaaggaccgcaccggaaacggaggacacagaaccagccggaggaagaagagaagaagcgca

SEQ ID NO: 100687 - RNA, 80 nt, Homo sapiens
acagaagaagcgcaggcacgacggccagggggccaacggccagaggcggagacagacggccccaggaaggccccgcagcg

SEQ ID NO: 100688 - RNA, 63 nt, Homo sapiens
gcggccgccacaacagcacagccggcgacggcgcgacaccgaagggccggagacaacaacgca

SEQ ID NO: 100689 - RNA, 77 nt, Homo sapiens
ccacccagggccggaaaagccaacgccggcgaagccacgccggaaccggaaacacaccagaggcgcagcagcgccac

SEQ ID NO: 100690 - RNA, 82 nt, Homo sapiens
ggggagcggcgcggcgcgcggaccccgccgagccagcgccggccgcgcgccgcgcccgcgccacaggggccccacagacaga

SEQ ID NO: 100691 - RNA, 67 nt, Homo sapiens
cgggaaagacgcacgggaaggccgacaggcagacaaggggcacacaaggaaacggagcacccaccaa

SEQ ID NO: 100692 - RNA, 81 nt, Homo sapiens
caccaaaaagaaagcaggcgcgaaagcacgagaggaacagaaaggaccccaacaacaggagagagcaagcgagcagggaga

SEQ ID NO: 100693 - RNA, 65 nt, Homo sapiens
agaagccgaccaggagacgcagagaaaggggagagaggcagaacagaacaaacggagaaacaccg

SEQ ID NO: 100694 - RNA, 58 nt, Homo sapiens
gcagagcagcccccagccagccgcgagaaagccgggggcggcagaccagggcccagcc

SEQ ID NO: 100695 - RNA, 69 nt, Homo sapiens
cacaccgaggaaagaagcaacaggaacaggccccacgaacaacacaaaacgcacggggccaaaaaggca

SEQ ID NO: 100696 - RNA, 73 nt, Homo sapiens
gccggccccgcggggagcgcccccggcgcgagccccaggaaaggggaagaacacggaaaccggacagggacag

SEQ ID NO: 100697 - RNA, 64 nt, Homo sapiens
gacagcgagaacaaaggagagaggaccacccagaggagcaacaagcaggggcaaaagaaaaggg

SEQ ID NO: 100698 - RNA, 68 nt, Homo sapiens
gcccacgccagacacgacgcggcaggaacccggcccagagcgccagcaaagcacggacagagaaggag

SEQ ID NO: 100699 - RNA, 76 nt, Homo sapiens
acagcgagaccggggcgaggaccccgagccaggcaagaaaaggagaagaaagaagaaaaaaaagagcaaaacaccg

SEQ ID NO: 100700 - RNA, 87 nt, Homo sapiens
cgccaccgaaaaggaagccagaaccagagaacagcagaggcccaggaaacagccaccaccccggcccccagagcccacagggaggcg

SEQ ID NO: 100701 - RNA, 85 nt, Homo sapiens
agagcagcagcggaggcgcgcagcagcaagcaaacagcccagaaccagcggcggaagaagagcaagccagccccaccgacccaac

SEQ ID NO: 100702 - RNA, 76 nt, Homo sapiens
gagggggggaccacgaaaggagcaagagcaagacaccggacaccgagggcccccaaaaggggacagcccacaaggg

SEQ ID NO: 100703 - RNA, 77 nt, Homo sapiens
cccgagccaaaacaccagggcagagccagaaaagcaagagcgagagaccagcccgggacagccacccccgaggagaa

SEQ ID NO: 100704 - RNA, 57 nt, Homo sapiens
cgcccagacgcggggagccgccggagcgagaaggcaccccgcaacccgcagagagga

SEQ ID NO: 100705 - RNA, 76 nt, Homo sapiens
cccggagcccgaccaggacccgagaacaagacacagcgcccgagcggcgccgacacgggaagagacgcggcgccgg

SEQ ID NO: 100706 - RNA, 40 nt, Homo sapiens
gccagagccaagaacgggcgggaaagaagcaagaagaggg

SEQ ID NO: 100707 - RNA, 59 nt, Homo sapiens
gacccacacgcgaaagacagaacagagaaggggaagacgaccgcgccacaaggaccgag

SEQ ID NO: 100708 - RNA, 83 nt, Homo sapiens
gcagacgcagccgagacaccagcccgaaacaccaccaagggggggccccagcccggccgaacgggcgcacgacacaaacacaa

SEQ ID NO: 100709 - RNA, 80 nt, Homo sapiens
aaaacaaccgggaccccagccagaacgcagggaaacagccacagaggacacaggaacgccacaagaaacaacagcaaggc

SEQ ID NO: 100710 - RNA, 89 nt, Homo sapiens
cgaacccgggaggcagagggcaggccacgagcagggaaggggggagacgagaaaacagaagcagcggagcacggaaaaacagaggaaag

SEQ ID NO: 100711 - RNA, 78 nt, Homo sapiens
gccggcgcgcgcggccaaccgcgcgcgcccgggcccgaaaacgcgcccgcccccagcggagacccacagcggggccgg

SEQ ID NO: 100712 - RNA, 65 nt, Homo sapiens
gaaggaccaagaaccaggaaaaccaacagagacaacaaagagaagaaacaggccgcgccgcaagg

SEQ ID NO: 100713 - RNA, 63 nt, Homo sapiens
cacccgacgcgaacgccacgagcccccaggggacggcgaacgcaggaacaggagacagcggag

SEQ ID NO: 100714 - RNA, 68 nt, Homo sapiens
agacaaacagaaagcacagaacggaggaaacgacccaaaggaccaaccccgagccacaaaaccagaag

SEQ ID NO: 100715 - RNA, 56 nt, Homo sapiens
ccaagacgagaaaaagggacaggccaaaaaaccgcaaccagagagagaggagagag

SEQ ID NO: 100716 - RNA, 57 nt, Homo sapiens
cacagcgggggagaggggccgggggcaacccagcccaggcccaggcccaaggccaag

SEQ ID NO: 100717 - RNA, 58 nt, Homo sapiens
ccagccccagcggcgccgagaaagaacgcaggaacaaaaacgaaaaaagacggaagag

SEQ ID NO: 100718 - RNA, 77 nt, Homo sapiens
gagagagaaagggaacgggccacgggccaggagggggccacaccgaacccagccgggaggccaaggccagggagcga

SEQ ID NO: 100719 - RNA, 76 nt, Homo sapiens
caccaaagcgcgccaagaccgcagaaagcaacaaagcgagagcacaagaaaacagccccgagcaccagaccacgcc

SEQ ID NO: 100720 - RNA, 76 nt, Homo sapiens
gaacgccaagcccggcaggacgacaggagggacaaaaagaacaacacagcaaacgggaagcagcgagcaagcaagg

SEQ ID NO: 100721 - RNA, 81 nt, Homo sapiens
agagaaaaccaccagggcagaaaagagacagccaggaagcagagccaaaggacgaaaacaagagaagcagggagagcacca

SEQ ID NO: 100722 - RNA, 56 nt, Homo sapiens
cacaggcacaggaccccccccagaagccgaagagggaaaacgaaagccggaaacgc

SEQ ID NO: 100723 - RNA, 69 nt, Homo sapiens
aggaggccggggccgcgcgagggcgcccagcgggacacacaggaagacgaacacggaacgggcgagaag

SEQ ID NO: 100724 - RNA, 78 nt, Homo sapiens
cacgacgcggggcacggccgaccgcgccgagcagggaagagacagcgagcagagaccaggagaagagaagagaacagg

SEQ ID NO: 100725 - RNA, 65 nt, Homo sapiens
gcccccagccaccaggcgggcgcggacggcaggggcgccggggaacccgcgggaagaagcaacaa

SEQ ID NO: 100726 - RNA, 84 nt, Homo sapiens
gccagagcccaggacgccacccggaggacagggcacaacaaccgcgggcgaagcagccaggcagaagaccgagccgccaggaaa

SEQ ID NO: 100727 - RNA, 92 nt, Homo sapiens
cggaccgcccgcgcggggcacgaggaacagggaagggcgcgagcggggacaaagcggacaagagaaaaaaagggcgggcgaacaaaaagagc

SEQ ID NO: 100728 - RNA, 64 nt, Homo sapiens
agggcagcccaaggacacaaggaaagacacagcggacaggcgaagaggagacaaaagggaaacc

SEQ ID NO: 100729 - RNA, 78 nt, Homo sapiens
ccgggcgaaaaccagaagacaagagccgcagaaacccagacgagaccaaagcccgggcacgcaaggcggggaagacag

SEQ ID NO: 100730 - RNA, 82 nt, Homo sapiens
ggagaaacagccgaccaacaggccacgaaacgcccacggagaacgccgcagcgccgcaggcgccaaaaggaaacacggaaga

SEQ ID NO: 100731 - RNA, 71 nt, Homo sapiens
ggacggaaggaccagagcccagcagccaaaccacagaacaggcgaccaggcaggcccacaacccaccagaa

SEQ ID NO: 100732 - RNA, 61 nt, Homo sapiens
agccggcccgcccggagggaaaggccgcaaggagaacgcaggaaggagccacaagaccaag

SEQ ID NO: 100733 - RNA, 75 nt, Homo sapiens
gcaaccaccagcagcccccagagcggaacacaggagagacgagcacggcagccaccgacagaaggaaggcaccgg

SEQ ID NO: 100734 - RNA, 66 nt, Homo sapiens
gggccccaacacccagagacgaaagaaggagcgacagaaaagcagaaaggcagaacaccaccacac

SEQ ID NO: 100735 - RNA, 41 nt, Homo sapiens
cagccccaacggcaagcaacgggaaacacaaagaagacacc

SEQ ID NO: 100736 - RNA, 86 nt, Homo sapiens
caggagcccgaggccggcgccggcgccggcgccgcggccccggcgcggacccgccaccggaggaggcgaggggccgcagcagaccg

SEQ ID NO: 100737 - RNA, 69 nt, Homo sapiens
caaaagcacccagaggggcgggcacgacaaggagagagacccccggaagaagacccagcccgcaggcag

SEQ ID NO: 100738 - RNA, 69 nt, Homo sapiens
aaggaaccgggggaaagaggccaagaagaagcaaccggagagaggaaaacagcccaaacaagaaagaaa

SEQ ID NO: 100739 - RNA, 82 nt, Homo sapiens
aggaaaggcaaagaacaagagaagacccagaggaagccaaaaggcccccagaagccgccgaacgccgcacccccggggccga

SEQ ID NO: 100740 - RNA, 75 nt, Homo sapiens
gggcaccagcccgcgcggggcgcgggcgcggccggaccgcagccgcaagggaggaccacaggccacccagaaggg

SEQ ID NO: 100741 - RNA, 70 nt, Homo sapiens
aacggggccgccagaacacagcaacggggcggcacacaaggagcgaagggcagggagaacgccaggcaca

SEQ ID NO: 100742 - RNA, 73 nt, Homo sapiens
aagcaagcccagaaggaggcggaagggccgaaagcgaggaaaccgcagggcgaacacagcccgaacgggccag

SEQ ID NO: 100743 - RNA, 84 nt, Homo sapiens
cgggaacgggacggggaagcaggggaccgggagaagcacccacaaaacagcaccccggaggagccgggcgagcggagaggcacg

SEQ ID NO: 100744 - RNA, 72 nt, Homo sapiens
cccccacaagaagacaccgcggccggcgacccccccgccacacaggaaaaggcgaaagaaggaaccaaacgg

SEQ ID NO: 100745 - RNA, 90 nt, Homo sapiens
cgggagcgcggaacagcaggcccgagcccaccgcgccgggccccggacgccgcgcggaaaaggagaggagggacagaagaggaaacagcg

SEQ ID NO: 100746 - RNA, 84 nt, Homo sapiens
ccggagagccaagccacgaccggcggggcgcgccaaggacacggcacaccgaccgacggcccccacagggcaggaagccgccgc

SEQ ID NO: 100747 - RNA, 54 nt, Homo sapiens
gaggacccaccgccagccacccacgccagcagagggcgacccagcaacgcggcc

SEQ ID NO: 100748 - RNA, 65 nt, Homo sapiens
cgcgaagagaagaagcaacagacaaaagggccacagcgcaagaacacgagacacgacggcgagac

SEQ ID NO: 100749 - RNA, 68 nt, Homo sapiens
agagaaagacccggacgggcaaaaggaggaccggccaaaccaccaagaaagaacccagcagaagccag

SEQ ID NO: 100750 - RNA, 69 nt, Homo sapiens
gaagacacgaggacgcagcccaagcccccccccagcacccccagcggaacggggaaacagcagggaaac

SEQ ID NO: 100751 - RNA, 79 nt, Homo sapiens
cgacaggcagacggaccggaggagcgaaggcggcggcagagaacgccgggccagcgaggagcacccgaagaagacaaga

SEQ ID NO: 100752 - RNA, 90 nt, Homo sapiens
agggcagcagcagcagacagcagacagacagccaggcgcccagaggggccccggagccaggaaccccagggccgcacaggacgcggggcg

SEQ ID NO: 100753 - RNA, 66 nt, Homo sapiens
gggacaccacagcagcaccccagccaagaaaacaacaaagggcagacaacaacgagaaggcaagca

SEQ ID NO: 100754 - RNA, 76 nt, Homo sapiens
aaacagacacacagcggagacaagcagggccggcaggaggcggggaagcgccggaaacacagcagggagagcaaga

SEQ ID NO: 100755 - RNA, 48 nt, Homo sapiens
agagggagaggccaggaaccaagcacaggacgacagcaggcagggaag

SEQ ID NO: 100756 - RNA, 74 nt, Homo sapiens
ggacggagcgccggccgcaccaccgccccggccggcccaccggaaaaggagaggggacaagaagacagagaacc

SEQ ID NO: 100757 - RNA, 76 nt, Homo sapiens
cagacagacaaacagggcaggcgggacaccagacagggaggcgccagcccgaagcaaaccagccagcacgggggcc

SEQ ID NO: 100758 - RNA, 65 nt, Homo sapiens
agaaaggaagagcaaccccagaaggcaacgcgccgcaaaacagaacgcggaaaccaacaggaaac

SEQ ID NO: 100759 - RNA, 74 nt, Homo sapiens
agcgccaaaagacaggaccaagagacacaagcagcgaggaccaggaacaacagagacaagaacaagcaggaaaa

SEQ ID NO: 100760 - RNA, 64 nt, Homo sapiens
aaaaaggaagccccggcaccagacgaccacagcggaccgccccccacgaagaaaaggacaccaa

SEQ ID NO: 100761 - RNA, 74 nt, Homo sapiens
cgaaaagaagaaccgcaacagcaaagacacccgaacgaagaggaaaggaaggcagaacacaaccacggaacaca

SEQ ID NO: 100762 - RNA, 81 nt, Homo sapiens
ggcccgaggaggcagccaagccgagccgccacccggcgaaccccgaggcaggcaggcaccccaggcccgcagcccccagcc

SEQ ID NO: 100763 - RNA, 78 nt, Homo sapiens
agcgagcgcagcaaagcgcccagccgccgcccgcgcccgcggccggggaccagacaaagggagcaccagccagaccgg

SEQ ID NO: 100764 - RNA, 79 nt, Homo sapiens
cccgacagcagagacagagaggagccaacccccagcagcccgcacagcggacgcaaagaaaaagacggcaaaagaaaag

SEQ ID NO: 100765 - RNA, 88 nt, Homo sapiens
gcaggaggcggaaaaggagagagagccacacaaagaacccccacaaaacagagcccaaaaggcagagcgaggagagaagaaggaggga

SEQ ID NO: 100766 - RNA, 76 nt, Homo sapiens
ccccgcagcgccagcagcgcaggcacagcaccaccagacagcacccaagaaaacccaggccgcgaaggagaagacc

SEQ ID NO: 100767 - RNA, 77 nt, Homo sapiens
aaaagagaagaggaacacgaccgcaagggaagcaagcacaaccaagaaggggaagaaaagaagcaaaccggacacaa

SEQ ID NO: 100768 - RNA, 71 nt, Homo sapiens
cgagggcaggggaacccaggcaggaacgcaggaaccagcggcccagaaacgggagacacccaaggagggac

SEQ ID NO: 100769 - RNA, 72 nt, Homo sapiens
aggagcacaacaggcagacagacaaagcgcaccccacaggggagccaggggagccagaagggaacggaacac

SEQ ID NO: 100770 - RNA, 69 nt, Homo sapiens
caggggggggcacagcgccccagggagagacgagccaagaaagggagggggaaacagccaaggccgagg

SEQ ID NO: 100771 - RNA, 69 nt, Homo sapiens
ccaccccccggcgccagcacagacagcccaaaggaagcagccagccaccaagggaggagagaaggacca

SEQ ID NO: 100772 - RNA, 84 nt, Homo sapiens
ccggcgccgccaaacagcccagccgcgccagcgcccggcgccgcgcgccacccccgacagagaccgggaggcagcaacccagag

SEQ ID NO: 100773 - RNA, 78 nt, Homo sapiens
agaggaacagaaaaagaggaacccgcgacccgggcacccagagcagggaggacgcacgcgacacccaggcggaggcaa

SEQ ID NO: 100774 - RNA, 78 nt, Homo sapiens
cggcaagcggggaagcacaggaccaaacaagacagaacgagagaaaaagcggggaaggggggcaaaaaaaagaagcaa

SEQ ID NO: 100775 - RNA, 76 nt, Homo sapiens
cccaccgaaaggagagaagcaggggaccccacaccacaaaccgaggaaagaagggacagcagaaaacgcagaggga

SEQ ID NO: 100776 - RNA, 37 nt, Homo sapiens
ccagacccaacccgcaggaaaaggccaggaggggcgc

SEQ ID NO: 100777 - RNA, 71 nt, Homo sapiens
ggcgagcacccgggcgccgggagcagacgccaggaagccggacgcgcagggaaaacgagaggacccagcca

SEQ ID NO: 100778 - RNA, 81 nt, Homo sapiens
aggcgcggccaagcgcaaagcgggagagacggaccagaccagggccgagcacagggcccggggacacgagcggccccagcg

SEQ ID NO: 100779 - RNA, 82 nt, Homo sapiens
accggcgcccagaaagagaagacagccaggaaggcaaggaggggcaggagcacacccccacaggaccccccacagaaggccc

SEQ ID NO: 100780 - RNA, 76 nt, Homo sapiens
gccagccagcaaacgcacacgacagcaacaagacacggagcaaggaggaaaacacacgagaccaagcgaccaagca

SEQ ID NO: 100781 - RNA, 79 nt, Homo sapiens
gaagacagaacagccaagcggccgcaaggaagacaccccagcgaaaagaggaggagacgagacacccagcacgggaggc

SEQ ID NO: 100782 - RNA, 75 nt, Homo sapiens
gagagcccaagaaaggaaaaagcagacggacacaaagacagcgggagagaggaaggaggccgaagggcggccgcg

SEQ ID NO: 100783 - RNA, 77 nt, Homo sapiens
gagggccagaaggagaccgacggacccgcgcggggcgccacggccggcagggcacagacccacaagaggagaacggg

SEQ ID NO: 100784 - RNA, 66 nt, Homo sapiens
ccccgagagcgggacgcaggcgcagccacaggccgcacggaaaaccaggagcccaagacgccgcac

SEQ ID NO: 100785 - RNA, 68 nt, Homo sapiens
aaagggaacaccagcggggagggcgggagacgcggcggcggcacgagcggcgccggggaggggacagc

SEQ ID NO: 100786 - RNA, 68 nt, Homo sapiens
ggccaacaggaagaaaaaaaaaggacacagacccgacaacgaaggaagacacaggagggagcaggaaa

SEQ ID NO: 100787 - RNA, 58 nt, Homo sapiens
gcacccagagcacccgcccacgcggagaggggggcagaaggaagcgggacgaccagga

SEQ ID NO: 100788 - RNA, 91 nt, Homo sapiens
ccccaccgcccgggcccgaggaggcagccaagccgggccgcccgcggcccagccagccggaccacggaggcaggaggacaggaagaacgaa

SEQ ID NO: 100789 - RNA, 48 nt, Homo sapiens
ggcaggacacccgccggcgccgagagccaccagaaggacccgggaacg

SEQ ID NO: 100790 - RNA, 77 nt, Homo sapiens
gcaagagcaagagcaccaaaaacaccgaacagaaggccgaggagacacacagccccagacgggaggaaaaaaggaag

SEQ ID NO: 100791 - RNA, 76 nt, Homo sapiens
ccagccgggcgcgcgcgaccggggccgcggcccacgcgcccaccccaccggcggccaaggcgcggacggcccggcc

SEQ ID NO: 100792 - RNA, 75 nt, Homo sapiens
gcaagcggacgaagggcagggcagggggaaaccgcgccccggaaaggagggccccccacggaggcccgcggaccg

SEQ ID NO: 100793 - RNA, 89 nt, Homo sapiens
gggagcccgccgcgagagcgcagggacaagggagcagccgcacagcacccagaacagagacgaccccgcgcccagcaacgaacgggaag

SEQ ID NO: 100794 - RNA, 72 nt, Homo sapiens
acagcagcagcaacagccgaaggcgaccccgccagaacacccaggcgacagggaagagaaagccaaacccac

SEQ ID NO: 100795 - RNA, 86 nt, Homo sapiens
agcgccggagggaagcgagccccaggagcgccagaggacaggagcggggaaggccagggaccgaaacccgccacacggaaccgaag

SEQ ID NO: 100796 - RNA, 74 nt, Homo sapiens
ggcagacacacaacccgacccgacgagccagcaacagaagaaagcaagcaccggggaaagcggcccgaaacaag

SEQ ID NO: 100797 - RNA, 58 nt, Homo sapiens
ccggcccagcacaccagccaagcggaagacacaccgaagaaccgagaagccaagaagc

SEQ ID NO: 100798 - RNA, 71 nt, Homo sapiens
gaccacagagggacccggacaaccagaggcagccagcagggggagcgccacagccgacagggaggcccccg

SEQ ID NO: 100799 - RNA, 78 nt, Homo sapiens
gcaagccgcggggagacccagggagcagagacaaccaagcccaggccaagcaccgaccgcagacgcccccagccaaac

SEQ ID NO: 100800 - RNA, 69 nt, Homo sapiens
gcgggaagcaacacgaaggaggccacgcagcaaaccacaggagaggaggcagaagagacaacacagaaa

SEQ ID NO: 100801 - RNA, 109 nt, Homo sapiens
accgcccccaaaaaggccaccagggacaccagagcgacgcacacaacaccaagggagccggaacaggggaggccacaagcgaggccggaggccggccacacgccccagc

SEQ ID NO: 100802 - RNA, 56 nt, Homo sapiens
agacgcagggcgcccccggccacggcaagccccaaggacggggcccacgaggccag

SEQ ID NO: 100803 - RNA, 72 nt, Homo sapiens
agcaagaccgccagccagagaacgcgagaccggggcgaaacaaggcccaagcgggggcgagaggaaaaaaga

SEQ ID NO: 100804 - RNA, 78 nt, Homo sapiens
gaaaaccaccgagaacaagcagcgggaagaaaaggaaaagcacgaaacacaaagcaaaacggagaaggacgaagaagg

SEQ ID NO: 100805 - RNA, 84 nt, Homo sapiens
aaacaagcaaaccaaagccccaaggagggaaaagaaagaagagaggagaaccagccaggagccgagaacaagccagccagagga

SEQ ID NO: 100806 - RNA, 72 nt, Homo sapiens
cacaaaaaaccacaccccccaccgaggaagagcgggagaaagggcacggaaagcaggggaagacaaccggac

SEQ ID NO: 100807 - RNA, 54 nt, Homo sapiens
ggagaagaaggccgacacggagggggccagggccccagggagagccccgagggg

SEQ ID NO: 100808 - RNA, 78 nt, Homo sapiens
acggagcagccgaggacgggaccccagggcagcgaagcagaaacagccacaaaggcagacaagagaaagccccccccc

SEQ ID NO: 100809 - RNA, 85 nt, Homo sapiens
cgaacggggccaagggacaaggcaccgcccaggaacgggcgcaccacgccaccccgccacgagagcaggaaacggaacgcccggg

SEQ ID NO: 100810 - RNA, 81 nt, Homo sapiens
caaccgcccggcaacgccaaccgcccgcgcgcgcaggcgggcgcaggcccggcgcagcgcgggcacgcagcacgggggcag

SEQ ID NO: 100811 - RNA, 57 nt, Homo sapiens
agcccccacccgcggccggcgccgcccggaccgccagacaggacacaaaggaaaagg

SEQ ID NO: 100812 - RNA, 68 nt, Homo sapiens
agagaagaacacagagagagaagccaggagccaccaacaccaaaaaggcgaccaacgacgaagagcag

SEQ ID NO: 100813 - RNA, 86 nt, Homo sapiens
cccggcaagccgccaccgggagaagcggccgggccaagggaccaagaaaggcccagggaccaaagcccggacaaggcccgagcacc

SEQ ID NO: 100814 - RNA, 76 nt, Homo sapiens
gaggggacaaaacaaccaacgaagacaccgagcgaaagagaaagaggacaggcagacagaccacaccacggagagc

SEQ ID NO: 100815 - RNA, 82 nt, Homo sapiens
cgcccaccgggcaggagaaggcagagcggggcacccacccaagggagagccacccgcacgaggcccgcgcccacgccgcgcc

SEQ ID NO: 100816 - RNA, 70 nt, Homo sapiens
cccggggagggagacagcccaccgccaggcacaaccaacgcggccgaggaagaaacaagcgcaaggacaa

SEQ ID NO: 100817 - RNA, 85 nt, Homo sapiens
caccccaggggacacgacacacccgagcgcgacgcagaacgggcccacgagaaggaccacagggacgcagcaggagcggggccag

SEQ ID NO: 100818 - RNA, 63 nt, Homo sapiens
ccagcgagccgccgacccgccgagcaaaagcccggacccaccaaggaccccgccgaaggaaaa

SEQ ID NO: 100819 - RNA, 69 nt, Homo sapiens
aagccgacagcgaacaaacaagagagagaaaagaccgaggcacacggagcggaacgagaaagcgagcga

SEQ ID NO: 100820 - RNA, 69 nt, Homo sapiens
cgcagggcgcccccggaggcgccaggaacccaagcaagcaccagcccaaaagaaaacgaagaaacgaga

SEQ ID NO: 100821 - RNA, 79 nt, Homo sapiens
ggcacggaccgaacgaagcacagacgccaaagagcagggaccaaaagaagaggggcccgaagcggcacagagagcgacc

SEQ ID NO: 100822 - RNA, 59 nt, Homo sapiens
gaagacgcacgggccaggaccaagacggcaggcgcccacgaggcccccgaggaacacca

SEQ ID NO: 100823 - RNA, 70 nt, Homo sapiens
acaacaaaacaccacagaacgaccaaggaggagagaccagcagcaaacccacgcggcgcaccgcacacca

SEQ ID NO: 100824 - RNA, 86 nt, Homo sapiens
ggccgcggacacaggaggaagaggaagaagcccaagccaaggcgaaaaaaagcggcgcggaaaaacgaaggaggccaaggaagaag

SEQ ID NO: 100825 - RNA, 76 nt, Homo sapiens
gccggagaacacagagggcgcaagaagaagaagcagcgaagccggggcgcacggagaaccacggggaccaagaagc

SEQ ID NO: 100826 - RNA, 60 nt, Homo sapiens
aggaaggaggcagaggcacaccgaaagaggcagacgccagcagacacacagccgggcaca

SEQ ID NO: 100827 - RNA, 120 nt, Homo sapiens
ggagaacgcagcgggcgcagcgcgccaaaaccgggacggacaagacccgggaaggaggcgacagagaacgccagaacaggacagaggggaacagcagaagccggggggcggagcgcacag

SEQ ID NO: 100828 - RNA, 76 nt, Homo sapiens
caaagccaggccggggccagggcaagggaaaccagaaccgggcaaggaaaggagccaagaaaagaaccaaaccgca

SEQ ID NO: 100829 - RNA, 51 nt, Homo sapiens
aaaccacgacccacagaaagcggaaggaacacggaagccccaggaccccag

SEQ ID NO: 100830 - RNA, 76 nt, Homo sapiens
gagccacaccaagccaacagcgaaggaagagccaggaaagcaaaagggcacccgcccccaaccaaagccacagcga

SEQ ID NO: 100831 - RNA, 70 nt, Homo sapiens
caagggacccagcgagccaaggccgcgggaaaggcaaaaccccaagaggggacgaaggaggagggcgccg

SEQ ID NO: 100832 - RNA, 71 nt, Homo sapiens
gcaagggacccggccagcgacgcaccgagaaaggaaggaaaaccgacgaacagcaaggccggaggaaaaac

SEQ ID NO: 100833 - RNA, 83 nt, Homo sapiens
aggccggaaagacaagaccgcgacagacgacaaggcaaacaaagcagcgacgagaggaagcaaagccgccccgaggccccggc

SEQ ID NO: 100834 - RNA, 84 nt, Homo sapiens
gaaagaggaagacaccaggcgcggaggagacaagccgagaccaccaggagcagagcggaggcaaccagccaaaacaacggaaaa

SEQ ID NO: 100835 - RNA, 69 nt, Homo sapiens
cacaagagaagaagaggcagcaccaccgaacaccaacgaaaaacgacagcaggccggaaaaaagaaaca

SEQ ID NO: 100836 - RNA, 58 nt, Homo sapiens
gcaacacagggaaaagccaaccggcccgaagaacacagggcagcccgcacagcggacg

SEQ ID NO: 100837 - RNA, 72 nt, Homo sapiens
caacaggcaaaaagaaggaaaaaccaacccggaccagagaaggaagaaaccaaacgaaacacaacgaccaac

SEQ ID NO: 100838 - RNA, 75 nt, Homo sapiens
gccgaccgagacgggcggagaggagaaggcgaaggggcgccgaaccgagcccgaagggaagggccggcgggccaa

SEQ ID NO: 100839 - RNA, 110 nt, Homo sapiens
ccaggcccggagaagccgcggcggcagcacgacagcgccggcaacacgcggcacaagacgcccagcgagagccagccggaggacccagcagcaggccacccaggccgaag

SEQ ID NO: 100840 - RNA, 100 nt, Homo sapiens
acggccaccgcccagcgggagaggagcccaccaggacgaccgcgccgcccagcacgccaggacacagccagggcaaacaaaaaaagccacacccacacgg

SEQ ID NO: 100841 - RNA, 62 nt, Homo sapiens
caccacgccaggagaagaggaagagggacaaggcccagccagcagagccacgccagagcacc

SEQ ID NO: 100842 - RNA, 70 nt, Homo sapiens
cagccaagaacaaagaaacggacaacaaaggggaaagacccaagagacagaggagaacgccaagagaaag

SEQ ID NO: 100843 - RNA, 78 nt, Homo sapiens
cacaggcccgggagcggcgcggacaagcagaccggaagaccgacggaagaccacaccccgagggagcccaggacacca

SEQ ID NO: 100844 - RNA, 89 nt, Homo sapiens
aagaccagccgacaaggagggaagcggccccagcaccccagcgcgcagggccgccaggggcgccggggcccgggagagggcccacccca

SEQ ID NO: 100845 - RNA, 61 nt, Homo sapiens
ccccgagccaggaagccaccagagccaggcagccaccggaagggaagaaagcggaggcggc

SEQ ID NO: 100846 - RNA, 68 nt, Homo sapiens
gaagaacaaccagaagaaggcgaaaccgagggaggaagcggcaaccggcacgcaccagagcagcccac

SEQ ID NO: 100847 - RNA, 76 nt, Homo sapiens
ggccgggccagggcgcccgcgcgccaacacaccgaggggaacacaagaggccccaacgcagagaggagcgccggcc

SEQ ID NO: 100848 - RNA, 75 nt, Homo sapiens
aacaccacccagaaccagcaaccccccacgagaaccaaacaacacccaacagcccaaagcaaaggagcaacagcc

SEQ ID NO: 100849 - RNA, 86 nt, Homo sapiens
cacacgcccgacgaggagagcacgacggaccaagacgagcccagcgcaaccccaagcgcccaaaggggcgaccacgaccgaagagc

SEQ ID NO: 100850 - RNA, 55 nt, Homo sapiens
cggaacgggggccgaacgcgagaacaacacaacagggcgacaacccggaaaccac

SEQ ID NO: 100851 - RNA, 76 nt, Homo sapiens
agcgcacccgggccccgaggagcggacaaaggaggcagcacggcaggagacgaggagaggacagcaggacacccgg

SEQ ID NO: 100852 - RNA, 62 nt, Homo sapiens
gggaccaccagagggaaagcggggcggagaaagaagaaacaaagagggacccagccaccaaa

SEQ ID NO: 100853 - RNA, 69 nt, Homo sapiens
caaccgggcgcaggccacagaagacagcccaacaaggcgggacgacaacaccacagacacccccaaacc

SEQ ID NO: 100854 - RNA, 69 nt, Homo sapiens
ggagggggaagaccgcgcccgcggagagcccaaacaccaccaccaaggcacagagaaaacccaccacaa

SEQ ID NO: 100855 - RNA, 71 nt, Homo sapiens
cgaggccggagaggaaagagacccgcagagccacagggcagggaaaggccacagggagaaagaacaagagg

SEQ ID NO: 100856 - RNA, 57 nt, Homo sapiens
cggacaaggacaacaggagagaagccgggaggcccgacaccagccagacaccaggac

SEQ ID NO: 100857 - RNA, 77 nt, Homo sapiens
ccaggcgccgggcgcggcgcagcgccgaggcgggcgaggcgccgcggaccagaggcgccggaggaggaagaaacaag

SEQ ID NO: 100858 - RNA, 77 nt, Homo sapiens
cacccgaggcggacgagaagagaacacaccggggaagggcaccggggcggcggaggacgcagagggaagccacgcga

SEQ ID NO: 100859 - RNA, 77 nt, Homo sapiens
acacaaacccgggacgggccgagagacggaaacggagcagcgagcagggaagagcaaccaggcagagggaacgccac

SEQ ID NO: 100860 - RNA, 77 nt, Homo sapiens
gccaagcagagacccccaggacaacagacaacacccaagagaacggagaccaaccgggcgaagaaagaagaaaagcg

SEQ ID NO: 100861 - RNA, 83 nt, Homo sapiens
gagcacccgaggcaccggcagggcacaaggaaaacggaacccagagagcaagcaaagcagcccacgacacaaaaaagaaaaca

SEQ ID NO: 100862 - RNA, 78 nt, Homo sapiens
ggccccacgggccgagaccaggcaacaggaagaagaacccacaggggccaacagaggaaggaacaaaggaacgcacaa

SEQ ID NO: 100863 - RNA, 89 nt, Homo sapiens
ccgcgagcacagagcccgccgccgaccgccgcccgccacacccgccgccaggagggggaagacagagaagaccacacaaccgaaggggc

SEQ ID NO: 100864 - RNA, 112 nt, Homo sapiens
aggacccgacggaccagacagaaacgccccgacggagagcggccccccaggccgggagaccgagccgccaacgagcaggacagccacagcaagaacaagcagcgagaggaag

SEQ ID NO: 100865 - RNA, 84 nt, Homo sapiens
cggaccgagagcggaccgagagcgcgaaacgcacgagaagcccgagggcaacacccgagaccggcaagagcccagaggaggaaa

SEQ ID NO: 100866 - RNA, 70 nt, Homo sapiens
cggaccagccgccccggcgccgaggagcgagaacccgagcagcgccagagcaacacaccgcgccccagca

SEQ ID NO: 100867 - RNA, 71 nt, Homo sapiens
ggaacgcgaaagcaggaccaaacgagccgaagaaacaccaaggcacacgacaagaaacagacagggggcag

SEQ ID NO: 100868 - RNA, 85 nt, Homo sapiens
caaaaggaacggcggaaaaagcaacagccgaacaaaccagcaacacaacagcaacggcaccagcagaaacagcagcgcacaaaca

SEQ ID NO: 100869 - RNA, 63 nt, Homo sapiens
gggcggagagaagaccagccccagcaagaagaaaccgacggccggaagacccccagccaaaac

SEQ ID NO: 100870 - RNA, 58 nt, Homo sapiens
aaaaccagcagaccacagacccacagcgaaagcaacaggagccaggaggaggaaagga

SEQ ID NO: 100871 - RNA, 70 nt, Homo sapiens
gggcccccggcgggggcaagcgcgcggcgcggccggcgacagcagaggagcacagaacccacggaggaag

SEQ ID NO: 100872 - RNA, 85 nt, Homo sapiens
acggaccgagaccggaccgagagcggaccgagagcgcgaaacgcacgagaaggcggaccggaagcgagcaggagcagagcggaag

SEQ ID NO: 100873 - RNA, 52 nt, Homo sapiens
accaacgaggccgacgcaaacagaagagccgccaggagcaaggcagcgaccc

SEQ ID NO: 100874 - RNA, 78 nt, Homo sapiens
agacacccccggacagagccgacccagcgcgcacccaaaaaaggcagaacaagaagggcaaccaggggggaaggaggg

SEQ ID NO: 100875 - RNA, 97 nt, Homo sapiens
gaaacggccaaccgaacccagggaggaagaaccacgacaaagagaaagggcgcaaaaagaaagaaaacaaaagccagccaaaaacagaccgaaaaac

SEQ ID NO: 100876 - RNA, 74 nt, Homo sapiens
ccaaaccacaaaccaaaggccaagaaaccgagccaccagcagagagaacaacgaaggagcccaccgagcgccgg

SEQ ID NO: 100877 - RNA, 82 nt, Homo sapiens
agcacaagaagaagacgagcgcagacccaggggagcccaccagccagcaacaggcccggaagacagccaagcggcagagaca

SEQ ID NO: 100878 - RNA, 73 nt, Homo sapiens
agagaacacaagaacagagggacgaccagaaacacaggggcccggagcccaaaaagagcgcagggagaagcca

SEQ ID NO: 100879 - RNA, 77 nt, Homo sapiens
gccccagcagcccccgaaggcccacaggacaggagagaaagacgaaccgcacggccaagcccacacagaggaaaccg

SEQ ID NO: 100880 - RNA, 78 nt, Homo sapiens
cagaagcaggcccccagccgcagccacaacaccggcaggaaccaccaggacagagacacaggaacgccacaagaaaca

SEQ ID NO: 100881 - RNA, 65 nt, Homo sapiens
gggaaacacaaagccggcacgcgcgcgagaggccgcgacagccaccaaagcagcgcggacaagaa

SEQ ID NO: 100882 - RNA, 75 nt, Homo sapiens
gggagggccacaggaggcggcgggccccgcccgccgaagggcaagcggcagccacacccggagaaggagccgccc

SEQ ID NO: 100883 - RNA, 71 nt, Homo sapiens
aacgaaaacccgcccaacaggggagacgcagaaaacagacacacagcggagacaagcagggccggcaggag

SEQ ID NO: 100884 - RNA, 74 nt, Homo sapiens
gccgggaggaagccggggccagcggcgccgacgcacaggagagagcgaaggcaacacaccgaaaaaagggaagc

SEQ ID NO: 100885 - RNA, 79 nt, Homo sapiens
gcgaagagacccgacagaggccagcacgaagcccgaacaaccgcgacagaagccagaagcggccaacgggaaaaggaga

SEQ ID NO: 100886 - RNA, 65 nt, Homo sapiens
gacgcagccgagacaccagcccgaaacaccaccaagaggggagaccccaggccggcagcaccggg

SEQ ID NO: 100887 - RNA, 80 nt, Homo sapiens
cgccacccgcgccccccgccgccgccgccgcgcgccaaagcgcgccgccccgggcaaaaggccagcaagacagaaccgcc

SEQ ID NO: 100888 - RNA, 68 nt, Homo sapiens
aaaggaagggaagcaggaagcaccacacacaggagaccggaaacgagagaaacgaagacgaagaaaca

SEQ ID NO: 100889 - RNA, 76 nt, Homo sapiens
aaaaacaccaaaggaaagcagcgaacaccccagcggagaggccaacgggcgccggacacagaagggggcgggaagg

SEQ ID NO: 100890 - RNA, 84 nt, Homo sapiens
ggcggcaggcggcagccaaccgcgacgcccgcacccccccgcgggggcccccagaggcaccaaggaggccccggccgaaggacc

SEQ ID NO: 100891 - RNA, 72 nt, Homo sapiens
aacggccgggggcccgagaagcccccagggcacaagaaagaaaagcgaggccacaaccaccgccccagaagg

SEQ ID NO: 100892 - RNA, 71 nt, Homo sapiens
agacagcccgcagcacgaccagcaggaacggaacacgaggacccaaagaacaaacccggagagaagaaaac

SEQ ID NO: 100893 - RNA, 60 nt, Homo sapiens
cggcagccacccaccgccgccgcccccaggaccaggaaagagagccgacggccaaagagg

SEQ ID NO: 100894 - RNA, 65 nt, Homo sapiens
gcaggaaaacgggagaacacgacaccggcgaggaacggcagggccgaggagcccaagagaagaaa

SEQ ID NO: 100895 - RNA, 70 nt, Homo sapiens
agggcagaagcccaagggcaacgacaagaggagggaaaaaacggcgcaagcaagcgccaggcaaacacac

SEQ ID NO: 100896 - RNA, 78 nt, Homo sapiens
aggcagcaaaaacaagagccccaaagcagccaaaagccaggacccgaaaagccagcaagcgagaccaacaccaacacg

SEQ ID NO: 100897 - RNA, 60 nt, Homo sapiens
cagcacaacacaacacgccccgaagaagccaaaaccagacggagccacaacagggcacgg

SEQ ID NO: 100898 - RNA, 79 nt, Homo sapiens
cgcaagaaggccccgggccggggggccaggcgggaggggcgaacggggaagacaggccgaggagcggggagaccaacca

SEQ ID NO: 100899 - RNA, 77 nt, Homo sapiens
cagcccggccaggccgccagagagcagcacaagcacccagcagcccagcccagacccaagacacgagggggagcagc

SEQ ID NO: 100900 - RNA, 102 nt, Homo sapiens
gaaacacacaccagaagagcaaccgagcgacgcagaaaaacaaagggcgaaagacacgagaagagaaaccgaagacacaggagaaacaaacgcagggcggag

SEQ ID NO: 100901 - RNA, 85 nt, Homo sapiens
cggggaagacggaagagacgccacacagagcgcacgcacagcacaacgcgcgcgacacggggacgagcccgccgccgccagcccc

SEQ ID NO: 100902 - RNA, 84 nt, Homo sapiens
cgcccgagggcggcacccaccgccgcgccaggacggcagccagacgagcagggccgcagcaggccgcagcgccaaagaccacag

SEQ ID NO: 100903 - RNA, 61 nt, Homo sapiens
ccgccggcaggcgcagccgggcccggccccagccgacggagcaaaggagcagcaaaagggg

SEQ ID NO: 100904 - RNA, 81 nt, Homo sapiens
caggaccgaccagcgcgcgcgcgaggagccgccccaccacacagcaacggacaaagaggcccacgcggaccggcagcgcca

SEQ ID NO: 100905 - RNA, 85 nt, Homo sapiens
gggccagggggcgcggggccgggcgcgcggcggaaccagcggagccgcccgccagaagaaagaaaaagcagagcgaccggaaggg

SEQ ID NO: 100906 - RNA, 66 nt, Homo sapiens
gccaggagcccgcccaacagccgacacggagagacaagcgaaaggagggaggcacgccacccaggg

SEQ ID NO: 100907 - RNA, 63 nt, Homo sapiens
ggagcgggaaacgggagggaaccagcaacaagccggacccggagggacggggggccggcaccg

SEQ ID NO: 100908 - RNA, 63 nt, Homo sapiens
cacggccgggacaccagggcagcgaagagagagaaacgaaaaagaggaaggagcgagggagca

SEQ ID NO: 100909 - RNA, 74 nt, Homo sapiens
ggagagcgaagagacaacacacaacagaagacaaggggcaagacgccaagagaaaaggcgagagcacaaagcac

SEQ ID NO: 100910 - RNA, 72 nt, Homo sapiens
ccacgccaaagaggaagcccaccacaaaaacgaaggcggcggggaggacaacagcacaccgaaccaaaggaa

SEQ ID NO: 100911 - RNA, 74 nt, Homo sapiens
aggcccagcgaccacccgcgggcccagcacaaagcaaacccaagcccagacagagaccaggcccaggaaggaac

SEQ ID NO: 100912 - RNA, 76 nt, Homo sapiens
acagccacagaggacggagcgccgccgccgggaccccgcccagcaggacaggaagaggcagcagcgggaaaccaga

SEQ ID NO: 100913 - RNA, 74 nt, Homo sapiens
caccggcgggaggaacaaaagcgcgccgcgcgccgggagaggcccggggcccgccggcgcccggagcccgcgcg

SEQ ID NO: 100914 - RNA, 61 nt, Homo sapiens
agagaagcaccggggaaaggaggcacaggcagggcacgcgcacccgaaaacccggaacggg

SEQ ID NO: 100915 - RNA, 41 nt, Homo sapiens
gcgcaggaaggccaccgacaggaagaggccgggaagaagga

SEQ ID NO: 100916 - RNA, 76 nt, Homo sapiens
aaaccaacgcccccccagcacacagaggagagcgacgagaaggaacagggcgccacaaaaaagacaggccaacaag

SEQ ID NO: 100917 - RNA, 76 nt, Homo sapiens
acaagaccaaaggaacgggcacaaccacggggcagagcgagagaaagaacagggcagcaaacggaaagaagcacgc

SEQ ID NO: 100918 - RNA, 74 nt, Homo sapiens
accaaaagacaaccgagagcagaggccccacacccccagaaggacccccaggacccaaagacaggaccacgcac

SEQ ID NO: 100919 - RNA, 48 nt, Homo sapiens
ggaaaagacagccagcaaccacgcaggcagcacgcggcccccgaaccc

SEQ ID NO: 100920 - RNA, 46 nt, Homo sapiens
accaggagcccgagagagaagggaaaccacggcgcgagccccggaa

SEQ ID NO: 100921 - RNA, 62 nt, Homo sapiens
cgagcagcaagcagggagcaaggggccacccaagggggcagccagagccggacagaggacaa

SEQ ID NO: 100922 - RNA, 102 nt, Homo sapiens
ggccagccaggagcccggaccgcaaaccacagaaaagcgaaaaacgcgcaccggaaaaaaggaccaacgcgccccgcacccagaggcaggcccccacacccc

SEQ ID NO: 100923 - RNA, 53 nt, Homo sapiens
gacagcgccccagcagccaccaaggcagggaaagacaaggagccgggccgaga

SEQ ID NO: 100924 - RNA, 43 nt, Homo sapiens
ccggacgcgagcggagcagcgcgccacgaccggggcgggacgg

SEQ ID NO: 100925 - RNA, 66 nt, Homo sapiens
gggaaggcggcagcacgcggccaacagaagagaccgccgacaaaggacagaccagcagggaaagac

SEQ ID NO: 100926 - RNA, 64 nt, Homo sapiens
agaagcggagaggagcccaacagcagagggcacccagagaggaaagccaaagaagccggaaaaa

SEQ ID NO: 100927 - RNA, 70 nt, Homo sapiens
ggacaacagcccgacaaccaggaagaacacgaccaaaaagacaggacagagaggcgacggccacgaggac

SEQ ID NO: 100928 - RNA, 85 nt, Homo sapiens
cggggcgccgacccgggcggccccggcccgcgcccgcccccggccgggcggacggccaaaacagaagaggcaaagcccagccaca

SEQ ID NO: 100929 - RNA, 78 nt, Homo sapiens
aagcagcgccgcagcgaaaaccccggaaacgcaaagagcggaagaaaggaaccaaagagccaaaaagggagacagaaa

SEQ ID NO: 100930 - RNA, 80 nt, Homo sapiens
cgagagccgggggagcggggccccacacccccccgggggggacaacaggcacaaagagagaaggaacacccacagggcag

SEQ ID NO: 100931 - RNA, 89 nt, Homo sapiens
aggagaagccgcccaaagaacgggagcaccgcggacgccccagggcacaccgcgcaccagcgagaggaggagaaccggccaaccgcagc

SEQ ID NO: 100932 - RNA, 79 nt, Homo sapiens
gaaacccaaaagagcaaaccacagcagaacaagccagacaaaccggccaaaacagaagaggcaaagcccagccacagca

SEQ ID NO: 100933 - RNA, 77 nt, Homo sapiens
caggaagggaagccacccacaagacaacacgagagcccggagccgagcccgggaaggcggaacaacaagaaggagaa

SEQ ID NO: 100934 - RNA, 76 nt, Homo sapiens
acaagaggaccccgcgcaaccggcacaacaggcagaggaaagaccacagcaagaccacgcccccagccgggggacc

SEQ ID NO: 100935 - RNA, 60 nt, Homo sapiens
ggagcaaaggaaaacaggcagaccgggcaagagaaaccccaaacacggcacaaagaacag

SEQ ID NO: 100936 - RNA, 80 nt, Homo sapiens
gcggacaagaccaacaaacacaaggagccacaaggacgggaagcaccaaagcgcgccaagaggccccaccccacccgccc

SEQ ID NO: 100937 - RNA, 75 nt, Homo sapiens
cccggggcaacgggccgacagcacaggggccgccacaggcgcccgcaaaggccccgccagagagaaccgacccca

SEQ ID NO: 100938 - RNA, 65 nt, Homo sapiens
gaaaggagcaagagcaagacaccggacaccgagggcccccaaaagaggagaaacgaggccagaag

SEQ ID NO: 100939 - RNA, 80 nt, Homo sapiens
cggccccagcaccccagcgcgcagggccgccaggggcgccgaaccaaaggcagacccagaagagcacaaaacagagaaaa

SEQ ID NO: 100940 - RNA, 77 nt, Homo sapiens
ggaaggcgaagcacaaacagaagagcgaaagcgaagcaggaagaggacaacagcaacggcagacacacaaagaacga

SEQ ID NO: 100941 - RNA, 74 nt, Homo sapiens
gggagaccccaagcaggcccgggaagaagaagaaagaaaccacggaagccaacacacccaaggccaacaaccgg

SEQ ID NO: 100942 - RNA, 83 nt, Homo sapiens
cgaggaccggacacggaggacgagggcccacagccgaggaggagcggacccgccgggcaggaggagggaagccgggcgaggcc

SEQ ID NO: 100943 - RNA, 34 nt, Homo sapiens
agaccgaccaccaaaaggacgaggaggggagcca

SEQ ID NO: 100944 - RNA, 70 nt, Homo sapiens
gaagacgccagcaccaccacacacaaacgaggaccagaacagggggccaaaccccacggcaccgggaggg

SEQ ID NO: 100945 - RNA, 69 nt, Homo sapiens
gaacaagacaacagagggaagggggccagacaaccagggaagcacagacacgcgcaccgggaagaacga

SEQ ID NO: 100946 - RNA, 84 nt, Homo sapiens
cacaggacgggcgcccgggggcccccagcacccccagccccacccaccgccaggagcccccccagccagccagccggaccacgg

SEQ ID NO: 100947 - RNA, 77 nt, Homo sapiens
gccggcccagcaccccgagaaccgcaggagccagagacggcccgccacgggccccgcagccgcgcccgagcgcccga

SEQ ID NO: 100948 - RNA, 75 nt, Homo sapiens
cgacagcggaggcgccggcggcccacccggaagaaggcaacccaaggagaaccaaggaacaccagaaaacaggaa

SEQ ID NO: 100949 - RNA, 34 nt, Homo sapiens
acccacaggccagagaggggcagacacaccggaa

SEQ ID NO: 100950 - RNA, 81 nt, Homo sapiens
cagagacaagcgagcgccgcacaaaaagcagagagaagagagaagaacacgaagaaaaaaaaaaaggaaagaaaggaaaag

SEQ ID NO: 100951 - RNA, 35 nt, Homo sapiens
ccggcccgcaagcaacagggcacccaaacaacaaa

SEQ ID NO: 100952 - RNA, 83 nt, Homo sapiens
agccagacagggacggaggacgagcaaaagagcaccgaaccggagaccgaggagaacccagaccggaccagaggcgcgcagcc

SEQ ID NO: 100953 - RNA, 72 nt, Homo sapiens
agcaccgcagaggacccaaagcagcagaaacggggggggagggggacccggaagaggagaaacagaagacga

SEQ ID NO: 100954 - RNA, 77 nt, Homo sapiens
gaaggaagcacacaaggagaaaaacacccaccgaaaaacagagggacagaagagcagaagacagagaaggaaaagaa

SEQ ID NO: 100955 - RNA, 75 nt, Homo sapiens
accaagggagcaaggagaggagccggccagaggaggaaccaaaccagagcacccaaacccaggaaacacgcagag

SEQ ID NO: 100956 - RNA, 101 nt, Homo sapiens
cagccaagcggccaaacccacccggcccccggcgccgccagcgaggcacaggaaacagcccgaacgcacagaagaaaccagcgcccagcgccgggagacaa

SEQ ID NO: 100957 - RNA, 64 nt, Homo sapiens
caagaagacacaaaggacggaggcacggccaaaacagaagaggcaaagcccagccacagcagca

SEQ ID NO: 100958 - RNA, 74 nt, Homo sapiens
gcaaaacccgagaaagggcaaccggaaggaagaaaccgaagacagggggcaacacagaagggaccgagggaggc

SEQ ID NO: 100959 - RNA, 80 nt, Homo sapiens
agagaacccagaagccacaagaagaacgaagaagcggaggccagacagggaaagaacgccggacaacagcggcgaagaag

SEQ ID NO: 100960 - RNA, 83 nt, Homo sapiens
ccgaaagaagcggaaagcagaagcgcgcagcaacggcggcccccggcaggccccagccaacgacccggaggaaagcgcacgcc

SEQ ID NO: 100961 - RNA, 60 nt, Homo sapiens
gccgccgcgccccccccgcccgcgcgaccgcagggcgcccggcaaggcgggccccaaacg

SEQ ID NO: 100962 - RNA, 76 nt, Homo sapiens
gccaggcaaagggacagcacagagcaggggggccggcacagcggccaaggaaagaaagggaggcggggaaaccaac

SEQ ID NO: 100963 - RNA, 75 nt, Homo sapiens
cagcacccggcaagaagaacacagggggaagccaagcagaacaaagaaagggcgcaaaaagaaagaaaacaaaag

SEQ ID NO: 100964 - RNA, 75 nt, Homo sapiens
cgccgcggccggccacgcgagcgcgcgggggacaagcaaaaacggccagacacaagacaaacccccagccccccg

SEQ ID NO: 100965 - RNA, 63 nt, Homo sapiens
caggcgcaagacacaccggaggcgacggccaggccacagggcggagaacggaaaagcaccagg

SEQ ID NO: 100966 - RNA, 73 nt, Homo sapiens
gggaacaacagacagggccacgaaaagagggcggcgaaggcgcgccacggagccacccaagcggccgccaccc

SEQ ID NO: 100967 - RNA, 76 nt, Homo sapiens
aggccagcccacgggggcccagagaggggcccccaccacagagccaggaacagcagagaacaaaggaccgcaaacg

SEQ ID NO: 100968 - RNA, 33 nt, Homo sapiens
cggccgcgaccggccgccagacggaaggcacga

SEQ ID NO: 100969 - RNA, 59 nt, Homo sapiens
cgaccggaccaacagcggagggccgagggaggaaggaagaagaagcagacggaaggcac

SEQ ID NO: 100970 - RNA, 80 nt, Homo sapiens
caagaagccagagcagccgcccaaccgcgggaccaaccacccgagcggcgcggacgaaggccacaccaacaagacaagaa

SEQ ID NO: 100971 - RNA, 74 nt, Homo sapiens
agcagggaagacgccgcgccaccgagccggaccggagacggggccaacagagccacaaacagggaggaccaaag

SEQ ID NO: 100972 - RNA, 69 nt, Homo sapiens
agacccagcaaaacgggcacagagcaaggcagggacaaaaaccagcaaaccaacaggagcccgcagacg

SEQ ID NO: 100973 - RNA, 75 nt, Homo sapiens
gggcccacccgcgggccgcagcacccgcgggcaggggaaccggcgagcgcagcaccgaggagcaacacccccagg

SEQ ID NO: 100974 - RNA, 58 nt, Homo sapiens
cgcagggcgcccccgcccgggagaggcggggcccagggaagaagagccggcggacgaa

SEQ ID NO: 100975 - RNA, 69 nt, Homo sapiens
aaacggaccgacagggaaaggaggaccggaagaagaggggagaggagagccagcagcccccccaggaca

SEQ ID NO: 100976 - RNA, 48 nt, Homo sapiens
caccagcaaaagccgaacaggaccagaacagaaacccccaagagcaaa

SEQ ID NO: 100977 - RNA, 79 nt, Homo sapiens
cccggacgccacgcacccgcgcgagaaggaacacgaggacccaaagaacaaacccggagagaagaaaaccccagcaggg

SEQ ID NO: 100978 - RNA, 78 nt, Homo sapiens
agcagaagagcgagcgcccggcggaaagaaggcagagggggcgagggaggaaagggggcaaaacgacgaagaagacaa

SEQ ID NO: 100979 - RNA, 81 nt, Homo sapiens
gggaccgggaaccacgggggccgcggccggaccgagcgcccgacccggcgagcccgcaggaccggagccgcagcagcgcgc

SEQ ID NO: 100980 - RNA, 75 nt, Homo sapiens
caagaccgccgccgccggcccggagaacacacaccgccgcaggcgcccccgggcacacaacaaagaagaaaaggg

SEQ ID NO: 100981 - RNA, 46 nt, Homo sapiens
aagcggaaggccgggccaccccaagaacaacagagcgggccgaccc

SEQ ID NO: 100982 - RNA, 69 nt, Homo sapiens
ccaggccgccgccccccaaccccccggcccccccgaggcagaaaaccgagaacagggggggcaaaacca

SEQ ID NO: 100983 - RNA, 74 nt, Homo sapiens
gagaggaaaaggccgaagaaaccaaggaggacagccacagcggaggaagccgggcacaggagaagcccacagaa

SEQ ID NO: 100984 - RNA, 72 nt, Homo sapiens
aaccaggggagagcgcgaaacgcagacaagagacaaggcacaaagcggaccgggggcgagcgcagacgaacc

SEQ ID NO: 100985 - RNA, 57 nt, Homo sapiens
ccgccgacgcccccagccaccaggcgagcagacagagcaccagccggggacccggac

SEQ ID NO: 100986 - RNA, 52 nt, Homo sapiens
gcaacggggccccggagggccagagcgggggaaggaagcaacagacaagccg

SEQ ID NO: 100987 - RNA, 77 nt, Homo sapiens
gaggggagaggaggcaggcccgcgggagagaacagcacacagaggcgcaaggggaagagaaaagacagaagcaccaa

SEQ ID NO: 100988 - RNA, 114 nt, Homo sapiens
cgcccacgggggcggggggacaccgagaccagcccccggccgggcagagagaaaggagggcggcggaggagccaagagcgcagaaagcccaaacacccgggaaaagggagcaag

SEQ ID NO: 100989 - RNA, 76 nt, Homo sapiens
gaacgcggacccccgcaggggaaagaccgaggcggacaggaggagacgcagaaagaccacagcccacagacgccgg

SEQ ID NO: 100990 - RNA, 75 nt, Homo sapiens
gagccgcgcacgcacagacaaggcaccccgcaacccgcagagaggacccggcccgacggcagaagaaaacccaag

SEQ ID NO: 100991 - RNA, 72 nt, Homo sapiens
ccccccaggaagccaaccaggaggcaccacaaggacaaagaaaacccccagcccggccgagagagaggcgac

SEQ ID NO: 100992 - RNA, 80 nt, Homo sapiens
aaaaccagcaacaccccaacagcccggaccgacaggaaagaaggagcccacaaagaaaagaacaccgccagcagccagcc

SEQ ID NO: 100993 - RNA, 58 nt, Homo sapiens
aagaagggccagaaaaaagaggcagaagaagggaaacagcagagaacacagcaccagg

SEQ ID NO: 100994 - RNA, 80 nt, Homo sapiens
caccagacaacgccccgggaccggagcagaacccccgcagagaaaggaacaagggacaaaccaaagaccaaccaagaggc

SEQ ID NO: 100995 - RNA, 65 nt, Homo sapiens
ggagaccacagcaagacaccgggaccccggaagccaaaaaggaaagggagcggccccaccaaacg

SEQ ID NO: 100996 - RNA, 65 nt, Homo sapiens
gcagcagaccgaggccccggggaagccaccccaccccccagaggcacgacacagcagggcggcca

SEQ ID NO: 100997 - RNA, 72 nt, Homo sapiens
cagacgcaccaaagggacagaaccaaaggccacacagaggacgaaggaaagccaagggagaggacagagaca

SEQ ID NO: 100998 - RNA, 62 nt, Homo sapiens
cgcagggcgcccccgacagcagaaagagcaggacaacccacaccaccgaagacaccggccca

SEQ ID NO: 100999 - RNA, 74 nt, Homo sapiens
cggggacgcgaccacaaggagaggcagacgggacaagcggcgagcaggccccccgcagggccagcgcagggggg

SEQ ID NO: 101000 - RNA, 82 nt, Homo sapiens
accaagaagcagagaggggccagcacacaggaaacagcccgaacgcacagaagaaaccagcgcccagcgccgggagacaaag

SEQ ID NO: 101001 - RNA, 72 nt, Homo sapiens
ccaggacggggaggcgaacgccaggacacaccagggcaaacggaaaggacagcggggcaagcaggaccggaa

SEQ ID NO: 101002 - RNA, 71 nt, Homo sapiens
gacaccaagcgggagcagccgagcgcaaccaagcagacccaggaaaagcgcaagcaacacagaggaaaaac

SEQ ID NO: 101003 - RNA, 76 nt, Homo sapiens
gaaggaccaagaaccaggaccacggaagaggagcaggaaggcacgggaacgccccgccccggaaggacagagagaa

SEQ ID NO: 101004 - RNA, 43 nt, Homo sapiens
gcaaaacccaaaaccagggccaaggaaacgaaagagcccagac

SEQ ID NO: 101005 - RNA, 75 nt, Homo sapiens
acgcagaacccgggagaggagaccagaacgaacccccccccccggagccacaaagaagaagacacgaacaaagaa

SEQ ID NO: 101006 - RNA, 77 nt, Homo sapiens
aaagccaaaacgcagccagagagcagacagaaccgcccacagaacaccggcacaggagcaagaagaacccacaggga

SEQ ID NO: 101007 - RNA, 68 nt, Homo sapiens
acagaaggcagaggcagaaccacaggaacaacccacgcaagcaagaaacgaacgacaagaacccgaag

SEQ ID NO: 101008 - RNA, 74 nt, Homo sapiens
aagggaggggcgccgacgaccggccaggaaaagccggccacgcagggcaggagacagagagaaagcaacagcag

SEQ ID NO: 101009 - RNA, 68 nt, Homo sapiens
gaaaaacggagaacagggagaccagccaccacaagcccaaaggccgagcccagaggaagccgagcagc

SEQ ID NO: 101010 - RNA, 77 nt, Homo sapiens
cacccagacgggaaagccgagaagccacgggacaagcagaccggaagaccgacggaagaccacaccccgagggagcc

SEQ ID NO: 101011 - RNA, 68 nt, Homo sapiens
gaaaggaggaagaagacaccggggacagacaggccaaggccaccgagccacaagaccacagcaccgac

SEQ ID NO: 101012 - RNA, 75 nt, Homo sapiens
ggggagaaaaggaacagaaaaggaagcgacacagcaagacggagacagcagaagcagccggcccagcccacccca

SEQ ID NO: 101013 - RNA, 69 nt, Homo sapiens
cccgcggggaagaacggcacgcggggaccaggaggagaagcaaccagagaggaagcgagacccaaaagg

SEQ ID NO: 101014 - RNA, 60 nt, Homo sapiens
agagcaccgccaagaccgccccccagcgccagcgggaggaagcacgaaacaacacaaaac

SEQ ID NO: 101015 - RNA, 105 nt, Homo sapiens
gggaagcgggaggaggcgcggggcggcggcgcggggcggcgggagagcccggcggcggagcggggagccgcccgcaaggcggaggcaaggcagaccggccacgca

SEQ ID NO: 101016 - RNA, 68 nt, Homo sapiens
ccgacccaaaaccagacgcaccaggaggccccgggggacaccagccggagccaagaaggccggaccag

SEQ ID NO: 101017 - RNA, 63 nt, Homo sapiens
ccggggccggagggccgagcggggcgggagaccgaccgcacggaaaccccccgagagcggccg

SEQ ID NO: 101018 - RNA, 97 nt, Homo sapiens
cgagcaggaagagaaagccagcagacccccgagggccgagcaacaggagggcgaccacaagcaaacaggacagcaggcaaggagacagacaggaaca

SEQ ID NO: 101019 - RNA, 81 nt, Homo sapiens
gaagaccaggaagagaaagagaaaggacaagcaggaacccccaggccagaagcggacccagaagaggggagcagcaaggag

SEQ ID NO: 101020 - RNA, 84 nt, Homo sapiens
accggagccacggggaagggacccgaaggggaccccagcccccccagccgaaacccgcgacaaccagcccccgacacccggcag

SEQ ID NO: 101021 - RNA, 77 nt, Homo sapiens
agaggaacagaaggcggaggaaacgcaggacaggcaggggccaccacccgcggcccgaagccacggcgggcccggcc

SEQ ID NO: 101022 - RNA, 75 nt, Homo sapiens
cagggcccaaggagaagccacaggaggaagcacagacaagaaaaagcggaagggaacaagggaggaaaacaacgg

SEQ ID NO: 101023 - RNA, 76 nt, Homo sapiens
aagaagaaaggaaacgcagagaagaaacacggcaaaaagaaaaaccagcgaagcacaggccaaggcgcagggagag

SEQ ID NO: 101024 - RNA, 68 nt, Homo sapiens
aaagggaaagagcacaacacaggcacagggaacccagaccaggccaaagcaaacaacagaaggaaaag

SEQ ID NO: 101025 - RNA, 82 nt, Homo sapiens
gcagcgcccgaaagggaccaagaaaggcccagggaccaaagcccggacaaggcccgagcaccaggaccgcagaaggccccag

SEQ ID NO: 101026 - RNA, 74 nt, Homo sapiens
agaagaacagccgagagagcaacaagccagcccgggaccgaggcagagccgggggcgcggagggccggagggcg

SEQ ID NO: 101027 - RNA, 75 nt, Homo sapiens
accgcaaccggaggcaagcaccaagggaccgagggcggcaccacgcccaacaccccacaccaggggaacaaacga

SEQ ID NO: 101028 - RNA, 82 nt, Homo sapiens
cgaggggacgccgcccgccgcccgccgcaggccacccgggaacggaggaggggaacaagggacaaaccaaagaccaaccaag

SEQ ID NO: 101029 - RNA, 76 nt, Homo sapiens
caggccaccacagaaacaaaagcaacaaagagggacacacagccaggcccagcaaaaggggaaggcccagaagaaa

SEQ ID NO: 101030 - RNA, 81 nt, Homo sapiens
ggggcgcaccccagccaggcaacacgacaccggaaaaccaaagacagcacgagcacagaaaggcagcccacagcaagcacg

SEQ ID NO: 101031 - RNA, 72 nt, Homo sapiens
ccaccccccgcccagcccgcaccaagaccgaaggcagcacaggaccggaaaaaacacgagccagcagcaccg

SEQ ID NO: 101032 - RNA, 62 nt, Homo sapiens
gccgcgcagagcgggaccacccgggcacagcaggcacggaggcagcgcacccagacaccggg

SEQ ID NO: 101033 - RNA, 78 nt, Homo sapiens
caccaagaaagaaagagcagcggaaagacgacagcaacccgaagacagggaaaagggaaggcagcccggaggcggggc

SEQ ID NO: 101034 - RNA, 42 nt, Homo sapiens
cgcgcccacccaacccgaggcaaggcagaaaacacaaggaag

SEQ ID NO: 101035 - RNA, 80 nt, Homo sapiens
gacaggacagcgagcgaggacgaggaacggcggcgggaggcagcaccgggccgaggacggcagccaagaaaaggccgcag

SEQ ID NO: 101036 - RNA, 85 nt, Homo sapiens
cagcaccagaagacaaaggcaagaacgccgccagaggaaccccgaggcagcgacaaagaggggggccaagcagaccaagaggagc

SEQ ID NO: 101037 - RNA, 69 nt, Homo sapiens
gccgaccacaaagcacggaaaggccacgacccacaggaccgcgaacaaggaggccacaaaacacccgga

SEQ ID NO: 101038 - RNA, 56 nt, Homo sapiens
ccagccgcagagccccacaccagggcaagggcgcagcacgcagacccgcaagcccc

SEQ ID NO: 101039 - RNA, 75 nt, Homo sapiens
accgcgcagaaccagggcggcggccagcgccacgcgggaggcgagcagcccagaccggaaggagggcagagacag

SEQ ID NO: 101040 - RNA, 60 nt, Homo sapiens
caaaacagcggagacacccgggggagagggcgcaacagagcgcagccacagaaaaaaacc

SEQ ID NO: 101041 - RNA, 68 nt, Homo sapiens
ggagcgccgccagaggagaagaaaacaggggcacagacgacagaagccaagagggcgcaaagaggaaa

SEQ ID NO: 101042 - RNA, 73 nt, Homo sapiens
cgccaagaggccacggaggccagccccaacacccgccaaggccaccgagccacaagaccacagcaccgacccc

SEQ ID NO: 101043 - RNA, 81 nt, Homo sapiens
caagaggggaagaggacgggcaggcggaagcgccagaggagccaccagcgccccagagcacacagcaggccccagcccaaa

SEQ ID NO: 101044 - RNA, 50 nt, Homo sapiens
gaagaaagcgaaggacacaaacccccaggaacagccaccgggaggagaac

SEQ ID NO: 101045 - RNA, 83 nt, Homo sapiens
agccagaagaacaccgaggccgagagacgaggacgcgcacaggaaaggacgcggaacaagcaggcagccaggcagcagaaggc

SEQ ID NO: 101046 - RNA, 78 nt, Homo sapiens
aaaggaaagggggcacgaccgagacagcaagaagaacccaggcgcgcagagaaggggcaagccaaggaaagaaacaga

SEQ ID NO: 101047 - RNA, 73 nt, Homo sapiens
cggcgagaagggaagggaaagcagaggaaggcagaagaaaaagcgagcgggcggacaccagaacgaggaaagg

SEQ ID NO: 101048 - RNA, 84 nt, Homo sapiens
cccgccagccgcccaaacggacaacgggaagcggcagcccgggcgcgccaggcacagccaagagcggaccggcagcggccagcg

SEQ ID NO: 101049 - RNA, 76 nt, Homo sapiens
cgacgacagaacccgacaagaagcacgaacagcaggccaaagaccagaggggaagggaaccgcgaaaacccggcag

SEQ ID NO: 101050 - RNA, 69 nt, Homo sapiens
gacccgacgaagggaggggaagggccgcgagggcccggaacaggggcacgcacgaggcggaaccacagg

SEQ ID NO: 101051 - RNA, 58 nt, Homo sapiens
gcggcggacccgcgcacgacccagggcgaaggcgccaccggcgagaagacgcggggac

SEQ ID NO: 101052 - RNA, 75 nt, Homo sapiens
cccagccaaaggcaaaggacacacagcaacgaagcaggggaggagggaagaccggacagcgagccaagagagaag

SEQ ID NO: 101053 - RNA, 79 nt, Homo sapiens
gggcaagcggcgacggaccccaagacagcccacggagcagcgggacacgacagaagacaagcgaagcaggcggagaacc

SEQ ID NO: 101054 - RNA, 77 nt, Homo sapiens
gacaagacgccccagaggcaaaaacccgacaaggcaccagcacgggacggagaacggcacaacagagagcacgcagc

SEQ ID NO: 101055 - RNA, 79 nt, Homo sapiens
cagcccgaccccgggccaggacacgcaacgagaacggagcaggaggcgacggagggagaacggaggaaaagcaggggcc

SEQ ID NO: 101056 - RNA, 79 nt, Homo sapiens
ggaacaccgcccaaacgacccgaaaacaaaacgccaccaggccggaacgccacagcaagggaacagcacagggaggaaa

SEQ ID NO: 101057 - RNA, 78 nt, Homo sapiens
caaaggggaagaaagccggggggaagaaaccaggaacaacggcagcagcagccccccaaggccaggaaaggcgaacac

SEQ ID NO: 101058 - RNA, 85 nt, Homo sapiens
cgaaggcagcaacacagagaagggggaaggaggccagaacacacaccccaaaggcgaagcaaaccaacaccccccgggaacaaga

SEQ ID NO: 101059 - RNA, 72 nt, Homo sapiens
aaacggaaggccaaaagacacagggaaccaccaggagacacgaaacgaacgcaagcacgcaagaggaaaacc

SEQ ID NO: 101060 - RNA, 66 nt, Homo sapiens
ggagacaacccccgaaggagggacaggagagacaacggaggcaagaaagacggagaagcgagaaga

SEQ ID NO: 101061 - RNA, 83 nt, Homo sapiens
aggaggagccgaggcgagccaacagcacaccgagacaggggcccggcaccgcgcccgagcccacccacagacagaaggggagg

SEQ ID NO: 101062 - RNA, 74 nt, Homo sapiens
gaacccgaccaacaccagaacccagcgcccccagggcgggccggccccagcgagccagcgcaaggacacccccc

SEQ ID NO: 101063 - RNA, 73 nt, Homo sapiens
acaacaaaggaacaaaaaaaaaagcaaaaacaccgaaagacaacaagagggaagggcgccggaaaaccgcaca

SEQ ID NO: 101064 - RNA, 81 nt, Homo sapiens
cgagaggaggcgggcagaggagccagaagggggaagcccaagaaacgaaggaggcccaaccacaaaaggagccgacggaac

SEQ ID NO: 101065 - RNA, 53 nt, Homo sapiens
ggacacaagagcggaaaaggagagaaccacagaaccccccagcagccaaaagg

SEQ ID NO: 101066 - RNA, 41 nt, Homo sapiens
ggaggcagagcggcgccagagcagccaggaggagggggagc

SEQ ID NO: 101067 - RNA, 68 nt, Homo sapiens
cgcggcgggcacgcgcgaccgcggccgcggcacgaagaccaaggggcaaggaggagaaggggcgccac

SEQ ID NO: 101068 - RNA, 87 nt, Homo sapiens
gaagaagagccacgccccaggaacccaggacgacccaggcacaaagaccaagcccaggcacagcacaccacgaaagaaagagaccag

SEQ ID NO: 101069 - RNA, 47 nt, Homo sapiens
gcaccacacacacagcagaggaaagaccacagcaagaccacgccccc

SEQ ID NO: 101070 - RNA, 80 nt, Homo sapiens
cggacgcgggaggaggcggcggcggcggccaaggaagaaagcccgagggcaaccgagaaaaccccaagggagcaggggag

SEQ ID NO: 101071 - RNA, 71 nt, Homo sapiens
acccaggcggccagagagaacaccaggccggaaccaggggccgagaaaaggggccagcgagccggacgccg

SEQ ID NO: 101072 - RNA, 80 nt, Homo sapiens
acggcgagccagccaacagcagaagagaaagccagaccacggacggaagacaaaagagggcagacagaacaagaaaggga

SEQ ID NO: 101073 - RNA, 77 nt, Homo sapiens
gcccgggcgcgcagcacggacccgccggcgccgcgccggggacggcagggaggggccgcgagggcccggaacagggg

SEQ ID NO: 101074 - RNA, 79 nt, Homo sapiens
cgagccggagcgcggagcccggccccgcaccaggaggaggacgacagcacgcagagccccgagaggggcgcgcagaaac

SEQ ID NO: 101075 - RNA, 62 nt, Homo sapiens
ccggagcaagacacccgcaagccgcccgcaggggacaacccaaagagcccaccacaaaccaa

SEQ ID NO: 101076 - RNA, 81 nt, Homo sapiens
accgggcagacagcagcagcggccccgcacaccaagccaccaggaggagggggggggagcccacccgagggcggggagcgg

SEQ ID NO: 101077 - RNA, 75 nt, Homo sapiens
cggagcgacggggaggcgcggccaacggggccacaagggagcacaaaagaacaaaagggaaaaaaggacggcagc

SEQ ID NO: 101078 - RNA, 70 nt, Homo sapiens
cggcggaccacacaagcaaaagagacaagaggaaaagggcaacgagaaggcacggaaccacaggcgcaaa

SEQ ID NO: 101079 - RNA, 72 nt, Homo sapiens
gaccggggcccagcaaagccaaaggaaggaccagggccagaagcccccaggaggagaacgagcaacggaagc

SEQ ID NO: 101080 - RNA, 78 nt, Homo sapiens
ggacacgcccaccaagaaagagccggaaagaggaccgggcgggaaagcagagaagcccagcggccggagcgggacgga

SEQ ID NO: 101081 - RNA, 74 nt, Homo sapiens
gcccagcgcaaggggcgcccgaccaggagcccagcccaacgagggcgccggaccaaaaccaggcacaggcgcac

SEQ ID NO: 101082 - RNA, 79 nt, Homo sapiens
gagggaggcaagagcggcccaccaaggaaaggggacagcaacagccggcgggcggaaggcaagaagagcggcaccacaa

SEQ ID NO: 101083 - RNA, 81 nt, Homo sapiens
gggacacgccccccccccagacggagcgcaggaggaagagcaagcaggcccgagggacaaagaaggcagaccagcggagaa

SEQ ID NO: 101084 - RNA, 69 nt, Homo sapiens
agcggggggaggagggggacccaaagacaggaccacgcaccagcagagaaggaaagcaaaccgaagcag

SEQ ID NO: 101085 - RNA, 73 nt, Homo sapiens
acggccaggaaacggaaaagcaagagacgaggacgcgcacaggaaaggacgcggaacaagcaggcagccaggc

SEQ ID NO: 101086 - RNA, 72 nt, Homo sapiens
ccaaggggggccagaggggagcacagagcgagaccaggaaagaagggggcagaagagggaagaagagaacga

SEQ ID NO: 101087 - RNA, 64 nt, Homo sapiens
cgaggacggccggaaaaacgaacagacgcacaccacggcaacgacagaggaagaaccaagacgc

SEQ ID NO: 101088 - RNA, 34 nt, Homo sapiens
ggggagccacagccggcaggacagaacccaccag

SEQ ID NO: 101089 - RNA, 81 nt, Homo sapiens
ggaaccgggagcaaaggcccgagcaagagggacggagaaagcaaacacacggcaagaggaaccaagccaaaccccaagaga

SEQ ID NO: 101090 - RNA, 38 nt, Homo sapiens
gggaaccagcaacaagccagacaaagcaaggacaggag

SEQ ID NO: 101091 - RNA, 83 nt, Homo sapiens
aacggcaacccaccccaagcagggcaccgcgccggcgcagcgccggcccccaagaggagacgggaggggggcgccgggacccc

SEQ ID NO: 101092 - RNA, 78 nt, Homo sapiens
aggaacgaggacagacccaggcacccagccagggggagccaagagccgcagaagcggagaggcacaccccccggagga

SEQ ID NO: 101093 - RNA, 78 nt, Homo sapiens
cgggccgcgcgcgcgcgcccggaaaccgggcccaccccaggaccccaccacccacagagaagccgcacacgccaaaag

SEQ ID NO: 101094 - RNA, 79 nt, Homo sapiens
ccaggagcgacgccagaaacagccaccagaaagagcaaccaaagcagagacgggacacaccgaggagaagaacggaaga

SEQ ID NO: 101095 - RNA, 84 nt, Homo sapiens
ggacaggaagccgccggcccgccgcgccccaccgcaaccggaggcaagcaccaaggaggaccgcaggaagaaggcaagaagcca

SEQ ID NO: 101096 - RNA, 74 nt, Homo sapiens
ccccccaaacgacgcagccacggagagagaccggccagagcaagacaaaaagaccaacaaggaacgagaagaca

SEQ ID NO: 101097 - RNA, 66 nt, Homo sapiens
ggcccccgcccccgagcagccgagacccgagcggcacgggaaaccaagcagccgacggccccccgc

SEQ ID NO: 101098 - RNA, 64 nt, Homo sapiens
cggcggccccagaacaaaggacagagggacgaacgagaaaaggggagcggcacgggaaaccagg

SEQ ID NO: 101099 - RNA, 78 nt, Homo sapiens
aaaaaacaagggaccccaaggcagccgagaggcagcaaagagccaggacccagaggccccaaccgggggaaaggacaa

SEQ ID NO: 101100 - RNA, 71 nt, Homo sapiens
gaggggggggaccagggagagagcgaggggagggacaagaaggagccaaggagaccgggagagagacgaag

SEQ ID NO: 101101 - RNA, 63 nt, Homo sapiens
gaaggcaaaaccaagaggaaaagagccaaaagcaaacgaccaaagacaggaagaaaccaaaag

SEQ ID NO: 101102 - RNA, 63 nt, Homo sapiens
cagaggccgcgcagcagcaaaggagagcggaaccggaaaaggccggaggaggcggaggccagc

SEQ ID NO: 101103 - RNA, 72 nt, Homo sapiens
gaacgaggccgcgaaagggcccaccagcccggccgggcgaggacaagcagccagcgccgcacggcaccagca

SEQ ID NO: 101104 - RNA, 89 nt, Homo sapiens
acaagaagcagccgacaggcggaggcccccgggcaagaggcgcaaacaagccaacccaggaggaaaaacggagggccgaggcaggcagg

SEQ ID NO: 101105 - RNA, 83 nt, Homo sapiens
aggaaggaaaaccgacgaaaagccgacaagagacaacccccaaaagcaccgagaccgggcagagcccagggggagaagccagg

SEQ ID NO: 101106 - RNA, 59 nt, Homo sapiens
gaggaacagggaagggcgcgagcggggacaaagccgacggaaaaccggcagcaggagag

SEQ ID NO: 101107 - RNA, 77 nt, Homo sapiens
aacccggaaacaagaagacgccaaggcagacaaggacaaccaccccgggcaaggggagcagacaacaaaacgagcaa

SEQ ID NO: 101108 - RNA, 85 nt, Homo sapiens
ggcaagcggcgacggaccccaagagaaagacgaccgccaaccagggagaacacagagaaaaaccgcaagaaaccaggcgggaaac

SEQ ID NO: 101109 - RNA, 79 nt, Homo sapiens
cccggcccggggccccccgagcccccgagcggggcaaagagagccagacacacgagcagcgcagcggagaaacagagaa

SEQ ID NO: 101110 - RNA, 73 nt, Homo sapiens
gccccggccgggccggccagcgccggaaaccaacaaaaacgggagaaggccacacggcacagacagaacggcc

SEQ ID NO: 101111 - RNA, 68 nt, Homo sapiens
cccagaaggcgcgaaggcagaccgcccagcggcggcagcacaagccagcgaggaggcaggcacgccgg

SEQ ID NO: 101112 - RNA, 74 nt, Homo sapiens
aacgacagagaaggaacacacaacacccgcccccgcaaaacgcaggacagccacggagaaccacggggaccaag

SEQ ID NO: 101113 - RNA, 81 nt, Homo sapiens
gcggcagcgaggagacccggcgccgccaggccgacgaaaagcccaagggacagagagccgaaagccgggcaaggggaaaga

SEQ ID NO: 101114 - RNA, 89 nt, Homo sapiens
ggcagccgagcccgcccgcgcgccggaggaggaagccaagaacgggagcgaagccacgcagcggcaccaacgaccgggcccggaagcaa

SEQ ID NO: 101115 - RNA, 70 nt, Homo sapiens
aggggagccaacaacagggaagaagcaacagggagcaccgccaccaaaaggaaaacccaaccccaagaaa

SEQ ID NO: 101116 - RNA, 79 nt, Homo sapiens
cgacgagagcgcgggagcagacccggagcgcgcggcggagaacaacggaagcgacccaggaggcccaccagcagggacg

SEQ ID NO: 101117 - RNA, 73 nt, Homo sapiens
gcccccccagccgaaacgggaggccgaagacagcaccacaccagcggcgaaagacgaggacacagacccggac

SEQ ID NO: 101118 - RNA, 71 nt, Homo sapiens
gggggcggcggggccccccgccagcgggcgagcaccgcgggagaaggcacagggcagagcaccagcagaac

SEQ ID NO: 101119 - RNA, 72 nt, Homo sapiens
gagcaagaagcgacacaaggagaaaaggcagagcaaacgggagcaaggcagagagaggagaagagaccacaa

SEQ ID NO: 101120 - RNA, 73 nt, Homo sapiens
cgcccaaggcaggaagaggggccgcaaagaagacgacacaagcgggacggaagaggcccggcgaccggacaga

SEQ ID NO: 101121 - RNA, 75 nt, Homo sapiens
agacacaggaccggagacggaaagccgaaggccgcagacgacccgagggagcgaacggacacccagccacacccc

SEQ ID NO: 101122 - RNA, 71 nt, Homo sapiens
acccggccagcgacgcaccgagaaaggaaggaaaaccgacgagcccccgacagcgcccgggagccgccccc

SEQ ID NO: 101123 - RNA, 82 nt, Homo sapiens
gcagcagccaaaggacagaccaggaagagcagaagggacgagcgcgagaagacggaacaagaaaggaccaggagccccgggc

SEQ ID NO: 101124 - RNA, 47 nt, Homo sapiens
acagacggcccgggcccccccaaccacgagggacaaaccggcgacca

SEQ ID NO: 101125 - RNA, 70 nt, Homo sapiens
aaagggccaaagaagggagagagaagcgcagaaggaagcgagcaacagagaagcagaaccaggccacagg

SEQ ID NO: 101126 - RNA, 74 nt, Homo sapiens
ggaaaagaaaaaaaagacccgaccaagccagaggacagaagaagaaaaccccagcggcgccaccagagagccac

SEQ ID NO: 101127 - RNA, 45 nt, Homo sapiens
cccggaggcccccagcccagagcccgccgagcccaggaaggcgcc

SEQ ID NO: 101128 - RNA, 75 nt, Homo sapiens
gagcccggccgccagaccacagcacagccgggaaggggagccaccagcccccgcagggcagaaaagaacagaccc

SEQ ID NO: 101129 - RNA, 64 nt, Homo sapiens
ggcaagcagggcccgccacaggaagggccacagacaaccagaagaagaccaggggaaccggaaa

SEQ ID NO: 101130 - RNA, 78 nt, Homo sapiens
ggagaggacagcccacggacaagcccggacccccagggaccgagaccgcgggcccacaggagcgacaagagcgccagc

SEQ ID NO: 101131 - RNA, 90 nt, Homo sapiens
cgcaggaggaggaggaggcggagaccgaggagcagcagcgaccaccaacagccaagccacccaggaaggaaaaggcgcccgagagccgcg

SEQ ID NO: 101132 - RNA, 69 nt, Homo sapiens
gcacacagcaggggggccagcaagggcaaggagagccaagcggaccaagaaggcaagagaggaagcaga

SEQ ID NO: 101133 - RNA, 57 nt, Homo sapiens
ggacacagcaaaccgggccacagcgagcggcacagggccaggcggcgcaaccccggg

SEQ ID NO: 101134 - RNA, 51 nt, Homo sapiens
gcgagaagagagacgagagagaagaggagagagaagaggacacccgcgcgg

SEQ ID NO: 101135 - RNA, 61 nt, Homo sapiens
ggaacacagcacaaaagggaggggccagagaggggaggacaaaagacacaaacggaagcca

SEQ ID NO: 101136 - RNA, 73 nt, Homo sapiens
ccgcacggccccagagaaaaacggcagagacagcgccagaaccacggcaaacaggaaccgaaagacgacgcac

SEQ ID NO: 101137 - RNA, 72 nt, Homo sapiens
aagcagcaaaccggaccaccccgaagaaagcacaggggccagcacaggcccccccagaaccagggaaaaaga

SEQ ID NO: 101138 - RNA, 42 nt, Homo sapiens
aacaggcagcaccaccacacccggagccaggccagccggccc

SEQ ID NO: 101139 - RNA, 52 nt, Homo sapiens
gccaccgaagccaacgccaaaagcacagccaccggggacaggagaggagagc

SEQ ID NO: 101140 - RNA, 67 nt, Homo sapiens
gcaaaggaacagaaggacacaacagggaagcggaggcaagagggaagcaagacacagaaaaaccaag

SEQ ID NO: 101141 - RNA, 73 nt, Homo sapiens
gccaacccgccgcgcaccgacccgacgcgccggcccacgcgcggccaaggcagcgcacccagacaccggggcc

SEQ ID NO: 101142 - RNA, 77 nt, Homo sapiens
gaaggccaagaggcggcgggagaccccaaccgcagagcgcccggcagaacaagcagaacagacgacaaacggaagga

SEQ ID NO: 101143 - RNA, 62 nt, Homo sapiens
ggacgggggggcggcccggccccgcaggacaaaaaggccaagagccagcacaggaagaggaa

SEQ ID NO: 101144 - RNA, 87 nt, Homo sapiens
gccagacggcgaacagcccagcgggagaaggccccaggcaaggcacgcacgaccgagaaagccagggagcggaaaacaccgcaggac

SEQ ID NO: 101145 - RNA, 70 nt, Homo sapiens
gccaggaaaacggggaccaccacgcccagggaggagcgggagcacccgagcggaagacccggacaaccgg

SEQ ID NO: 101146 - RNA, 71 nt, Homo sapiens
aaggacgacagccagagaggacagaaagcgggacacaagcaggagcacagaccccgaaaagggagacacag

SEQ ID NO: 101147 - RNA, 61 nt, Homo sapiens
gcgcgaggaggaaaggaggacgagggaagcgagaaccaggaacgaagaacaaaggggaaag

SEQ ID NO: 101148 - RNA, 53 nt, Homo sapiens
aggacgaggacacagcgagaggacagagacgaggcgggcccaagggcaccacc

SEQ ID NO: 101149 - RNA, 45 nt, Homo sapiens
cccccgagacgcggcaaggaacagagaagacagcgaggaagaaac

SEQ ID NO: 101150 - RNA, 83 nt, Homo sapiens
cgaagccacggacggccaacaagacgcacccgccaccgggaccgacgggcacgggggagagcccaagacacagccccagcagc

SEQ ID NO: 101151 - RNA, 54 nt, Homo sapiens
cagcgaaggcgggcagggacaaggcacggaaagccccggcaaacaggaagcccc

SEQ ID NO: 101152 - RNA, 75 nt, Homo sapiens
ggacccgggagcgacgccgacagcgaagcgagcgaaagaggcggcacagagccgaaaacagccaacaaacacgga

SEQ ID NO: 101153 - RNA, 84 nt, Homo sapiens
caaaacagaccgaaaggcacaagaagaggcagccagcgacgccccgaccccacacacccagaacggccgccaacagacccggac

SEQ ID NO: 101154 - RNA, 82 nt, Homo sapiens
caggcgcgccggccgcgaacccggacccaagaaggacaagaaaccacagagccgagaacagaaagggagccagacagaccag

SEQ ID NO: 101155 - RNA, 73 nt, Homo sapiens
agcgacaacaccacggcacaggcaagcaacaccacacaccaaaaaagagcggcacaccacacacaggcagcgc

SEQ ID NO: 101156 - RNA, 84 nt, Homo sapiens
gcccgcgcgcgcggcggagcgcgccgcgccgccggggccgcgcaaggggaggagagaggccgcccaggaaggaagaaggaaaag

SEQ ID NO: 101157 - RNA, 68 nt, Homo sapiens
cccccagcagcagaccggaagagggggccgccacaagccaacgaggggaaggaccaaaaaacagagag

SEQ ID NO: 101158 - RNA, 84 nt, Homo sapiens
agcgacagcggcgagcagaacacggcgagcggaaggaccacgggaggcagaccccgacgacacaggaacccaaagcgagcagag

SEQ ID NO: 101159 - RNA, 79 nt, Homo sapiens
ggcggcgcgcggcccccgcgcagaaacgaaggaggcccaaccacaaaaggagccgacggaacccagacggagaacaaaa

SEQ ID NO: 101160 - RNA, 80 nt, Homo sapiens
ggcagcacaaggccaggccaagcaccgcgccgggacccagaaggcacggaccaaggacacccacccaagcccgcggaggg

SEQ ID NO: 101161 - RNA, 38 nt, Homo sapiens
cagggccgccccaggacaaaagaaagccgggcgacccc

SEQ ID NO: 101162 - RNA, 115 nt, Homo sapiens
cgaaaacagggaggacagaggaaaagccccagcgcgcgcccggacagacaagaagccccacgagaagaagaagaagaggcggcccggcgcggaccaagccaaggccaggccagcg

SEQ ID NO: 101163 - RNA, 92 nt, Homo sapiens
agaaggacagacaagaggaacaacaagcaggcaggcgacggacagggaagggaccacagaccagcacgccggcgccacgaaccgagcgacag

SEQ ID NO: 101164 - RNA, 70 nt, Homo sapiens
gaagacggaaaaaacaggaaagggggcgaaagaggggcaggcgaacaaaaagccaaagcaaaacagaggc

SEQ ID NO: 101165 - RNA, 64 nt, Homo sapiens
aaaaacgacacggaaagcagccgccaggccaagaacaacccaggacaggaaaagccagagagcg

SEQ ID NO: 101166 - RNA, 77 nt, Homo sapiens
ccagaggagcaacgcgagagaccgcaagagaaaacccggaggaccggagacaagaccagcagccgagaccacaacca

SEQ ID NO: 101167 - RNA, 76 nt, Homo sapiens
gaacaagagcgcagccagcaacgagagcgcagaggcaggcgggccgggggcagcgagcccgggcaagagaccgcgc

SEQ ID NO: 101168 - RNA, 65 nt, Homo sapiens
agagagagcaaaaacaccagacaagagaaaaaagcagagagaacacaagccaagccgagacacag

SEQ ID NO: 101169 - RNA, 66 nt, Homo sapiens
gacagggagacagccagcacaaacggacagaagaaaggggcaagcagaagaggaacagaagaagca

SEQ ID NO: 101170 - RNA, 75 nt, Homo sapiens
gaacaaccgcggacacggagaggaagggggcaagacgccaagagaaaaggcgagagcacaaagcaccaagagccg

SEQ ID NO: 101171 - RNA, 74 nt, Homo sapiens
ccgacacgcagcagcggccagaaacacaggcgggaaaggaaccggaacccaaaggggaaacgcaaaaagacgag

SEQ ID NO: 101172 - RNA, 56 nt, Homo sapiens
gccggaacaagcagagacacgcgcgaaagcagaacaacaagggagaccaacaaaac

SEQ ID NO: 101173 - RNA, 71 nt, Homo sapiens
cccccagcaccaggacagggccaaccggagcccaacccgggaagcagagccccgggccgggaaggggaaac

SEQ ID NO: 101174 - RNA, 64 nt, Homo sapiens
gcgccgccaaggacgaaagaagacagagaagcaaagaagcaggcaccagccggcaaacaccagg

SEQ ID NO: 101175 - RNA, 84 nt, Homo sapiens
gggccaaggcccggcggcgggcagagcccaccagacgggcaccacgcgggacagcggaggagcaaggcggaaagaaggcggcac

SEQ ID NO: 101176 - RNA, 80 nt, Homo sapiens
aagcaagaaaccccgcagacgaagagcaaaagccaacacgcaccgcaggcacaggagcagcaggaccgcagcaacaagga

SEQ ID NO: 101177 - RNA, 67 nt, Homo sapiens
gggaacagagagaaaccaagccagaaccccagggcaaccagcaaccggcagaaaagacaacggagga

SEQ ID NO: 101178 - RNA, 80 nt, Homo sapiens
aggccgagggcaggagaggacccgccaaaccagaggagggaaaacgccgaagaaggaccgagggcaccgcgcccgcagac

SEQ ID NO: 101179 - RNA, 55 nt, Homo sapiens
agcgcccacggccgcgaccggccgggcagagaggcgaagagggagcgaagagaca

SEQ ID NO: 101180 - RNA, 75 nt, Homo sapiens
cggagcaggacaagcgaacagcaggacgaagaagcgaagaaaaacaggacaggagaaaccacagaacagagacac

SEQ ID NO: 101181 - RNA, 89 nt, Homo sapiens
gagccgagccgagcgggggcgcagagcgcgggaggcggcggcggcgcggagcccaggagccaggaggcgacaagacaggacccgaagaa

SEQ ID NO: 101182 - RNA, 67 nt, Homo sapiens
accaagaacaaccgcggacacggagaggaagggcacacagagaaaaaaagggaacaaaacacagcaa

SEQ ID NO: 101183 - RNA, 73 nt, Homo sapiens
cccaccgacgagggcagaaaggaaggggaccgcaagagaggagaggagggaacgccgcacaagcacacgaccc

SEQ ID NO: 101184 - RNA, 56 nt, Homo sapiens
ggaaagaccgcgagaaaaggccagggcccacgcaaggagcaagaaacgcagacaca

SEQ ID NO: 101185 - RNA, 76 nt, Homo sapiens
ccccccgagaagcccagaggcgcccggggcaacgggccgacagcacagcacagacgccggagaccgggcaccacca

SEQ ID NO: 101186 - RNA, 44 nt, Homo sapiens
gggccgggcccgcgcccagccgcagaaagcaacaaagcgagagc

SEQ ID NO: 101187 - RNA, 71 nt, Homo sapiens
gggaaggggagccaccagcccccggcacccggaagcaaggcggccagcaaagaggagagaacacagccaga

SEQ ID NO: 101188 - RNA, 101 nt, Homo sapiens
cagacccacaaccagacgcaccgaacgaggcgaaggggaaacacccgacggggcccccaaagggaagccaaacacaaaggaagaagcccggagacgaccaa

SEQ ID NO: 101189 - RNA, 77 nt, Homo sapiens
ccaaaggccaaggggggccggccagccggcaaaagaggacggagaggccgcccacggagcgcagagccaaccccaag

SEQ ID NO: 101190 - RNA, 72 nt, Homo sapiens
gcggagggcgcccggcgaggagcgccaggcgaggggccggcacagcagcaagaccggaacccagaagccccc

SEQ ID NO: 101191 - RNA, 76 nt, Homo sapiens
cggggcaccagggaaaacacacccgagacccagacagaggggcccggacaacacgaagacgggagaaggaagacgg

SEQ ID NO: 101192 - RNA, 79 nt, Homo sapiens
ccgccccagcgccccgccccccccgccgcccccggcgggcccggcggcccacaccaggcgcggggaggcccagcccgcc

SEQ ID NO: 101193 - RNA, 64 nt, Homo sapiens
cgcagaccgagacccggacagggcaggaaacaggcgaccaagcaaaaggggggcgcggcccagc

SEQ ID NO: 101194 - RNA, 69 nt, Homo sapiens
cgaagaggccaccaccggagcccccaaaaaaggcagcaacaaggcagcagcaggaaagcagcggcaccg

SEQ ID NO: 101195 - RNA, 75 nt, Homo sapiens
ccagcccggccccgcgccgcaccagccgccagaggcagaagacgcaagagagccgcgaagggcccaaagggcggg

SEQ ID NO: 101196 - RNA, 67 nt, Homo sapiens
gggacccggccagcgacgcaccgagaaaggaaggaaaaccgacgagaaggaccacgagaccgcgaaa

SEQ ID NO: 101197 - RNA, 73 nt, Homo sapiens
ccccacagggagcagagaccccgcccagcgaaaccaccgcggaaggccgcgggaaaggcaaaaccccaagagg

SEQ ID NO: 101198 - RNA, 72 nt, Homo sapiens
gagcgaggagcagaaaccagccacgggccggaggcaaaaaaaagagagaagaagcaaaccgggaccggaagc

SEQ ID NO: 101199 - RNA, 57 nt, Homo sapiens
ccagccaaggacccacgggggcacagaccgacgcaggagagccaaccacacaacgca

SEQ ID NO: 101200 - RNA, 78 nt, Homo sapiens
caagaaggggagccacagagaagaaggagcagcaaaacccgaacggggagacgcgcagggggcccccgcccgaccgac

SEQ ID NO: 101201 - RNA, 74 nt, Homo sapiens
agaggcgcgccacaggccaagaagcaccggggaggacagaccgaagaacccaaaggcggcggcaaaacggacga

SEQ ID NO: 101202 - RNA, 83 nt, Homo sapiens
gcggcagcggggaggccgcccggcgcagcggggaccggcggcggcgcccaggcacccggcccggacggcccgccacgggcccc

SEQ ID NO: 101203 - RNA, 67 nt, Homo sapiens
aaggacaaagacaaccagggcacgcggaagcgcagggggagagagacgcgggaaccgccagcaaacc

SEQ ID NO: 101204 - RNA, 82 nt, Homo sapiens
cagacgacaagcacacacaggcgcgaaacggaaaaaggcccgaaaagaaagcgaacacacaaaacaagaaaaggcacgcaaa

SEQ ID NO: 101205 - RNA, 75 nt, Homo sapiens
gcggcacccggcagagcgcaggcccggggagccaagcagcccggaggagacgacggcccgggacccgaaggcacc

SEQ ID NO: 101206 - RNA, 57 nt, Homo sapiens
caacccaacccgccacacaagggaacaggagacagcggagaaagagcccgggaagca

SEQ ID NO: 101207 - RNA, 78 nt, Homo sapiens
acgcgggcccagggaaggaaccaaggcacacgcccccagcaagggcaagaaggaacagacaaaaacggccggaaggaa

SEQ ID NO: 101208 - RNA, 79 nt, Homo sapiens
ccgggcgcgcgaggccagagagggggagcagaccggaaggccccaagaggaccaaaggcaccccccagagaacccacac

SEQ ID NO: 101209 - RNA, 84 nt, Homo sapiens
agaggcaccgggacggaccgagaccggaccgagagcggaccgagagcgcgaaacgcacgagaaggacacagaagaacgcagccc

SEQ ID NO: 101210 - RNA, 84 nt, Homo sapiens
cggcgcccagcaacacagaagccgacaaggcgcaagcgaaaacagaccgcgagcccagagacaacggcaagcggagaagagcaa

SEQ ID NO: 101211 - RNA, 70 nt, Homo sapiens
ggaaacacaagcagaaacagacaggaccacgcaacgcagaaagcggacgagcggcaaagcccgcagcgcc

SEQ ID NO: 101212 - RNA, 77 nt, Homo sapiens
aagaacaaacagccccccagaaaggacacgcagaacaggggacaggacagaagcaacgaaagaaggcaaagaagcag

SEQ ID NO: 101213 - RNA, 80 nt, Homo sapiens
gccgcggcggcgcccggcggccccggcgccggcaaggggacccaggcgcccgcacgcgaggaaaacggaagaccggccgg

SEQ ID NO: 101214 - RNA, 73 nt, Homo sapiens
cacaccggaacgccagggagcagcagccaggaaggacgccagccgacccgccagcgacagccagccacccacc

SEQ ID NO: 101215 - RNA, 101 nt, Homo sapiens
ccaggcgcacggaaacggagcagcaaggaaaaggaaaccgcccgcccccaggagaaaagaaagccagaaggaaggaagcaacgaaccaagaaaaaacggaa

SEQ ID NO: 101216 - RNA, 71 nt, Homo sapiens
caaggcgcagaaggggaccaagagagggaggccaggacagaagcccaaaaagcaagacgccgccccgcaac

SEQ ID NO: 101217 - RNA, 69 nt, Homo sapiens
acacagcaacggaccaacacccacagcagggccacaaagccgggaacggaggacccagaaccaagggcg

SEQ ID NO: 101218 - RNA, 65 nt, Homo sapiens
ggcccggccccccgcgcgccccagacaagaccaaccacagccgaaccacggggaggcaacaagaa

SEQ ID NO: 101219 - RNA, 59 nt, Homo sapiens
caccacacgcagaacgggcggacgggcgcccagccagggcacagaacagagcagagccg

SEQ ID NO: 101220 - RNA, 82 nt, Homo sapiens
ggagaaccccgaggcggcccggaggcggcggagggcaccccgggcgggcggcggcgcgggacgaagggaacccgccgggcgg

SEQ ID NO: 101221 - RNA, 92 nt, Homo sapiens
gccaaggaggaggcagagggcagacgaggaacccaagacagaccaggagaggagcagccggaaagcaacgagacgaacaaccccccgagccg

SEQ ID NO: 101222 - RNA, 76 nt, Homo sapiens
acggcagcgagaggaaggaacacaacggacaggccaggggaaaagccacggcaggacaaggggcagaccacaagga

SEQ ID NO: 101223 - RNA, 53 nt, Homo sapiens
cggcaagaccaggcgccgaagaaagaaagaacaaccgcaagagacaaacagaa

SEQ ID NO: 101224 - RNA, 76 nt, Homo sapiens
ggggaacaggaccgaagacaacaacaggaagaaccgagcgccagaacacgggcgacccacaacacccaacagagaa

SEQ ID NO: 101225 - RNA, 54 nt, Homo sapiens
ccccaagacccggaaaacgaagaaggcagagggaaaagcacagggccaggaagc

SEQ ID NO: 101226 - RNA, 51 nt, Homo sapiens
gggcacaaaaaccgacgagccaggaaaggccagcgccggagcgggggggag

SEQ ID NO: 101227 - RNA, 60 nt, Homo sapiens
gcccaggagaaaccggacgcgacgggggccaaacacaaaccccaacgcacccacggcaag

SEQ ID NO: 101228 - RNA, 80 nt, Homo sapiens
gagcgggggcagccgcagaggcgcggaaaacagaagaagcaacagacacgcagcaagaggaggaaggaacacaaagaaag

SEQ ID NO: 101229 - RNA, 81 nt, Homo sapiens
gaaccggagccgagagccgggcgccggcgcccccccgcgcgccggcggcccaggacagccccagccggagggaaaaggcaa

SEQ ID NO: 101230 - RNA, 79 nt, Homo sapiens
ggcgccacgggcacacccaggcgggccacagcgccaacagcaacgcggaccacgaaagccaggccagaagaaggaaggc

SEQ ID NO: 101231 - RNA, 57 nt, Homo sapiens
agaggccagaagagagcgggcaccaccccaagcaggagccaagccgccaggccacca

SEQ ID NO: 101232 - RNA, 83 nt, Homo sapiens
gggacggaaacgccaccagcaggaggaagagagacgaagagaccgcagaagcgaaaaggagggaaagaaaggaggggaggaga

SEQ ID NO: 101233 - RNA, 78 nt, Homo sapiens
acccagagcgcacggcgacgccccaggggaaaacccccgggaccagagcggaaccagcaaagaagaaaccaagaggaa

SEQ ID NO: 101234 - RNA, 65 nt, Homo sapiens
gcccgggcaagcaaacccgcccagcccgagagccgagagcgggacaaaggaacacacaggcgacg

SEQ ID NO: 101235 - RNA, 67 nt, Homo sapiens
acaggaacggaggcggaggggacccagagagggcgagacccccaagaggaagggagcggacccaaag

SEQ ID NO: 101236 - RNA, 78 nt, Homo sapiens
aaaagcacccagaggggcgggcacgacaagggcggcccggaggaggccaacacgagcggagggaagaccggacggacc

SEQ ID NO: 101237 - RNA, 78 nt, Homo sapiens
gaagaggcaaccaggcccaaagaaggccaaacgaagacggacagagcggaccccggcggacgagcaagccccaggccc

SEQ ID NO: 101238 - RNA, 121 nt, Homo sapiens
gaccaaaccaccagccaaaaagaacaaagaaagagaagaacagagccgcccaggggaccagccaaccagccggaagaacaccggaagaacaggcaggcgggaggacaaggacaccggccag

SEQ ID NO: 101239 - RNA, 82 nt, Homo sapiens
gggagcgccgacacccacgccggagcggaggggggcagagaagccacgcaacccgggcgggccgaggagaacgggacccgca

SEQ ID NO: 101240 - RNA, 70 nt, Homo sapiens
agcaggccaagcccgccggagcgacacccccaggcccacacgccggcaccccaagggaccgcaagaacaa

SEQ ID NO: 101241 - RNA, 52 nt, Homo sapiens
ccaaacgaagaagaaccggcagacagccggaacacagaagagaacccgaaca

SEQ ID NO: 101242 - RNA, 52 nt, Homo sapiens
gaaacaagaggaggagggggaccaagcgccagaacgaccaacgaccacaacg

SEQ ID NO: 101243 - RNA, 76 nt, Homo sapiens
ggaaaaaagaaaaacacagcaacaccgcaccgggaaaacgcagaggaacgagggggagccacgaggagaaggccac

SEQ ID NO: 101244 - RNA, 55 nt, Homo sapiens
aagacccaggacaccccgaagccgagaaaggacccagaccacaagacaggaggac

SEQ ID NO: 101245 - RNA, 83 nt, Homo sapiens
ccaggaaagaaggaaccccgaccgcagcccccgggcacgaccccggacacgggcaggcagggaagcacggacaagccacaacg

SEQ ID NO: 101246 - RNA, 70 nt, Homo sapiens
aaagcccagacaagccgcccaacagacaaaagccaggaagggccgcagaagacgagccgcagacgggcca

SEQ ID NO: 101247 - RNA, 68 nt, Homo sapiens
cacgcgcggaaggcagcgcccagcagcgcagacaagagcaagaaaggaacaacaaccgagacagaagg

SEQ ID NO: 101248 - RNA, 78 nt, Homo sapiens
cacgccgggacccagcgcagcagagcggggccagaaaaaaaagccgaccagagagagaagaggacggggaccacagga

SEQ ID NO: 101249 - RNA, 77 nt, Homo sapiens
cgagaggccgcgcccagcggccagacagcgggcgcggggcgggcacggcgggccgggcccagcaacgggagcagaag

SEQ ID NO: 101250 - RNA, 78 nt, Homo sapiens
gaacaggaaacaggagagaaagcgaacaggacagccgggcggaagggcggaagcacggagcgcccccagccaccagca

SEQ ID NO: 101251 - RNA, 79 nt, Homo sapiens
acaaaacagcagacccaagagcagcggaaaagaccagcacaggcgacaccgaaagaaccgagggaaggagagcccacaa

SEQ ID NO: 101252 - RNA, 102 nt, Homo sapiens
gacccggcgagcggagccggggcggagagcggcgaccacgcggaccgggccggggggggcacagagccccggaagacagcccccagcgaccagacccagggc

SEQ ID NO: 101253 - RNA, 72 nt, Homo sapiens
caaccaacagacaaaaagagacagacagcgcacccaggacgcgccagggggacacagaacggagcgccggcc

SEQ ID NO: 101254 - RNA, 48 nt, Homo sapiens
cacacggaagaaacgcaacccagagaaaccagaggcaagcgacgggaa

SEQ ID NO: 101255 - RNA, 61 nt, Homo sapiens
ccgggcccgccccggaggcacgccccaaaccaccaaaaccacacgagccaacaacggagaa

SEQ ID NO: 101256 - RNA, 63 nt, Homo sapiens
ggcccgccggaagggcaggcacagggcaaggaagccaagaggggcaacaagacaccaggagca

SEQ ID NO: 101257 - RNA, 84 nt, Homo sapiens
gcgccaaggacccgggacagggaccagcgggaaggcagacagcgagggcgacgaccaacacacgcgcaggaagcgggaggaccg

SEQ ID NO: 101258 - RNA, 69 nt, Homo sapiens
cagcacccccgccagcagccgccggagccagccaacgagcgagccaggccccggggccccagcggcacc

SEQ ID NO: 101259 - RNA, 78 nt, Homo sapiens
ccgccagcaccgcccccgcgcccgggccccaaggcccccgcgaggcagggcgaggcgcccacccagagaaaagcagaa

SEQ ID NO: 101260 - RNA, 78 nt, Homo sapiens
gggagccaggagggccgccacccccgcccaccacaaggaaggaacccaacgacagacaccagcaggagagagccaaaa

SEQ ID NO: 101261 - RNA, 63 nt, Homo sapiens
caacaaacagaacgcaaagagccaccggaagagccgggagcacggaggggaaaggaaagccgg

SEQ ID NO: 101262 - RNA, 73 nt, Homo sapiens
cgcagggcgcacagggcaccccagggcacaaaaggacagaccgaacaaaagaaccaggcggaaaggacaggag

SEQ ID NO: 101263 - RNA, 79 nt, Homo sapiens
cacaggcaaaaaagcaacaaaacaggagagagccggcccaacagagaacggcaaacagcgagaaaccacagacacaacc

SEQ ID NO: 101264 - RNA, 89 nt, Homo sapiens
ccggcggccgcggaagcggggcgcacaccaccggacaaccgacaaaaacagaagcgaaggggacagggggagaaccgccagggaaaccc

SEQ ID NO: 101265 - RNA, 79 nt, Homo sapiens
agggcccagaagccccgaagccaccacgacaccgccccggaaccaagaccaggacaaagaagacccggagagacaagcc

SEQ ID NO: 101266 - RNA, 103 nt, Homo sapiens
aagaaggcccgggaaagcacaaagcaagagacagcgaggacagaaggaagggaggaccacaggccacccagaagggccccaccccaaggggagggccaagggg

SEQ ID NO: 101267 - RNA, 72 nt, Homo sapiens
aagaaagaaaaagaggaagaggcaccagaagacaaacagaccccagaaagaagaagaggaaagcccgacaag

SEQ ID NO: 101268 - RNA, 69 nt, Homo sapiens
accacggccagaaagaccccaaaagaaaaagggagcggcaaagaggcagacccagagcccacgaagcca

SEQ ID NO: 101269 - RNA, 53 nt, Homo sapiens
aaacggaccagaccgaccaccaaaagaaacccacaacagcggcgaaagaaggg

SEQ ID NO: 101270 - RNA, 76 nt, Homo sapiens
aggggccgggaggcagaggggcaggggcagaaggcggcagggagcacgcaccaggagcccacggcccacccacagc

SEQ ID NO: 101271 - RNA, 80 nt, Homo sapiens
gcgacagaggagggaggaaaacaaccgagggcagaaggacagcagcggacggccggaccaagaggcgccgccccccagca

SEQ ID NO: 101272 - RNA, 51 nt, Homo sapiens
cggcacacccacggcgggaggacggaggggggaggagcaggcccccaccgc

SEQ ID NO: 101273 - RNA, 75 nt, Homo sapiens
gccgcagcagccaaccaaagaaaacgaacgccagccccccagaccaggcccgaaggaagaggaggaggcaccacg

SEQ ID NO: 101274 - RNA, 63 nt, Homo sapiens
caaaccaagagggagaagacggaagaaagcagccaagcagaccgggagacccagcaccaggag

SEQ ID NO: 101275 - RNA, 74 nt, Homo sapiens
acaacggaagaaagcaaagccagggagggagacggagagggccaaggcagcgcagagaggccacggaagcacag

SEQ ID NO: 101276 - RNA, 62 nt, Homo sapiens
gaaaccaccccagagcccccgcggcccacagagcacagacccacgggaccgaaacgcaggag

SEQ ID NO: 101277 - RNA, 74 nt, Homo sapiens
cccgagagcgggagcagaccaccgaccgagcccagaagcccgaaaagccggaggggaccaacaccgcaggaagg

SEQ ID NO: 101278 - RNA, 76 nt, Homo sapiens
aggacccagcacacaccacacaccacggccacaccaccacccaggccacacaggaggaccccccccagaaaaccaa

SEQ ID NO: 101279 - RNA, 37 nt, Homo sapiens
gagacacagagacccacaaaccggaggacacccccag

SEQ ID NO: 101280 - RNA, 76 nt, Homo sapiens
acgagagagaaagacacaggaggaacccgaaaaaggacacaccccaaccaaagagcacagggaggagcgcagaacc

SEQ ID NO: 101281 - RNA, 101 nt, Homo sapiens
aaaagcaaacgaccagacggcagggaggcacaaaggggaacacagaaaaggagcgccccacagcaaggcgggcaggagggcgcacgcccacagacgggggg

SEQ ID NO: 101282 - RNA, 68 nt, Homo sapiens
cgagagggggacaggagggcgaagcaaccaggaaacgagggaaagagcacggaccgcggaagcaagaa

SEQ ID NO: 101283 - RNA, 56 nt, Homo sapiens
ccaaccacagaggagcagcaggcacagcagcagccagcccgacagagggcccaccc

SEQ ID NO: 101284 - RNA, 77 nt, Homo sapiens
cgggagcagaagggaggcccaagacccacaacaaaagaccaagggaacggaagccccagcccgcgcgagccaggcgc

SEQ ID NO: 101285 - RNA, 80 nt, Homo sapiens
agcagggccgacacaagcccgcagggcaggaagcccgaggaacccagaagaggaggaagaggaggaggaggaggaagagg

SEQ ID NO: 101286 - RNA, 78 nt, Homo sapiens
caccggaccgaggccaagcgcaagacacgggaaccagaagccaaagaaggagagcacaggcgaaaggcccgagcgagg

SEQ ID NO: 101287 - RNA, 68 nt, Homo sapiens
cacaaccgacaaggcgccccaacagacaacacacggggacgagaagaaggagggccacgagaccggag

SEQ ID NO: 101288 - RNA, 66 nt, Homo sapiens
aggagcgcaacagcagcaccagggcacggaaagcaggggaagacaaccggacccagaaccagacac

SEQ ID NO: 101289 - RNA, 75 nt, Homo sapiens
cacaacacacccccgaccgcgggacgaagggaacccgccgggcggcccggcacccagccccccggcacccagcca

SEQ ID NO: 101290 - RNA, 73 nt, Homo sapiens
gggccagcggcgccccgccaccgccagccgaagccccagcgacgcagaggacccagccaaggcccccaccgca

SEQ ID NO: 101291 - RNA, 82 nt, Homo sapiens
agggacaacaggcaggagaaagggagcgcaccccaggacgacagagaagaggaaaacgcccccgcaagcgagaaagaacacc

SEQ ID NO: 101292 - RNA, 107 nt, Homo sapiens
agagaacacagagaaccgcagcaccagagcgacaacccacccaggacaagcagagacgaagcgaagggagcacaccaggccagaggaaggacacgaccaccgcgcag

SEQ ID NO: 101293 - RNA, 76 nt, Homo sapiens
gcagcagcgcggcccggccacccagccgcccggaaggccaagaaaacaggaacgagaaagagacaccaggagacgg

SEQ ID NO: 101294 - RNA, 70 nt, Homo sapiens
cggccacgcgggaccaccggcaccaccaaagcgacgccggaccgcgaagagacgagaggggcacggaagg

SEQ ID NO: 101295 - RNA, 51 nt, Homo sapiens
aaccagcaggcaccaaggaaagcagaagacaacgaagaagcacgagggaac

SEQ ID NO: 101296 - RNA, 75 nt, Homo sapiens
ccagaacacgccaaggcaaggccggagagacacagggccgccagaagcgacagccccgacgagagggcaccagga

SEQ ID NO: 101297 - RNA, 83 nt, Homo sapiens
caccaaaggacaaaggcaagaagaaccgaagcgaggcgcaaggcagcacaacagcaacaggagacacagccaaccagcggaaa

SEQ ID NO: 101298 - RNA, 58 nt, Homo sapiens
gaccacaaccacgaccacaaaccggcggagccacaggagaggaaccgcacccaaggac

SEQ ID NO: 101299 - RNA, 101 nt, Homo sapiens
gccaccacaacgggcagcggcagcggaccccagagccagagcacacgggaagagcccggagcaggaggagaaaggaaacagaggagagaacacggaagaaa

SEQ ID NO: 101300 - RNA, 92 nt, Homo sapiens
acccccacccaggccagggccagccgccagacgaacgcgagaccacagagacacggcgggacagcacgggccaggggagggcgccggccgca

SEQ ID NO: 101301 - RNA, 74 nt, Homo sapiens
cgggccgcgaggcacccaccgcaagccccggggcagagacacaggacacccacccgccggggacagacgcggac

SEQ ID NO: 101302 - RNA, 85 nt, Homo sapiens
gcaggcggcgcaggcaggggcggccggagccgcggccacccagcgagaggagaggcgcccccggggacgagccccaaaacccaga

SEQ ID NO: 101303 - RNA, 70 nt, Homo sapiens
ggacgagcaaaggaagcgcgaacagcagcgcaggagaccaaggaccggacagaggaagaaacccggaagg

SEQ ID NO: 101304 - RNA, 54 nt, Homo sapiens
cggggccaaaacagacccacaacaggacacacagcaacgaagcaggggaggagg

SEQ ID NO: 101305 - RNA, 76 nt, Homo sapiens
agccgcccgcccagaaacgccacaggggacgcaccaccggggacagggaaagacaaggagccgggccgagaaaccg

SEQ ID NO: 101306 - RNA, 63 nt, Homo sapiens
ggcacagaggaaggggagggccagcccgcgaaccggccggagaagcaacccaggcacccccaa

SEQ ID NO: 101307 - RNA, 64 nt, Homo sapiens
cggagccacggccacggccgcaagccgcagcgccagcgaggggcccggagaccagccaaccgga

SEQ ID NO: 101308 - RNA, 78 nt, Homo sapiens
cggcacgagcccaccaacaccgccgggcaacgggcggagagccggacgaaggaagagacccgaagcgaaaccccgacc

SEQ ID NO: 101309 - RNA, 63 nt, Homo sapiens
cgacccggagacagcccaaaacccggaagagcgccccaggagaaacaaagcagccgcaaccga

SEQ ID NO: 101310 - RNA, 83 nt, Homo sapiens
agaaagcaggcgaacccgcggcgcaaaacgaggcggcgcagaggcggcacacaacaccgcagaacccacgcccgcgagacccc

SEQ ID NO: 101311 - RNA, 76 nt, Homo sapiens
gaaagaaacaaaaacgggaaagccggcaagagggagaaggacaccaggcagaggcaaggacgcgaggcacaggcaa

SEQ ID NO: 101312 - RNA, 73 nt, Homo sapiens
gcagggccgccggcccgcagccgccaccacccaggaccagaagggggccccccgacggagaaaaagccggccg

SEQ ID NO: 101313 - RNA, 53 nt, Homo sapiens
gaaccggacagaagcgcaaaaaacgcgccccgagccccggccccaaagaccca

SEQ ID NO: 101314 - RNA, 31 nt, Homo sapiens
cagcagcggcagccaagcgacagccaaaggg

SEQ ID NO: 101315 - RNA, 66 nt, Homo sapiens
gcaagaggcgcgcagagggcgcagacaacggcaagcggagaagagcaaggccgaaccgagaggaag

SEQ ID NO: 101316 - RNA, 86 nt, Homo sapiens
gcgaggaggaggcggagcggggcccgacggggaaaggaaaccaaaccaggaaagaaggacaaggagcgaggagaaagagggacacc

SEQ ID NO: 101317 - RNA, 85 nt, Homo sapiens
caggcagacgcgcagagaccacgaaggaaggccaccccgagaaaaaggggcaagaagaaagcaacacaagacaaacagcccgaaa

SEQ ID NO: 101318 - RNA, 78 nt, Homo sapiens
aacgcgcgaagaagaaagaggagaaggggaagaacaccaggggggagccagcaaagaagaacccaccaagccgccacc

SEQ ID NO: 101319 - RNA, 88 nt, Homo sapiens
gggaagcccgcagaacgccggcagcgcgcccgcgcccgggagcaggaggagcgcggcgcccgcagagagaaggagggggcagagcacg

SEQ ID NO: 101320 - RNA, 67 nt, Homo sapiens
cggcacgcgacccccccgggcccaaaggaccaggccggcacgacaagacccaggcacagcacacaag

SEQ ID NO: 101321 - RNA, 55 nt, Homo sapiens
gcgcaagcgagaggaaacgggccccaaggcgaccggaggcgacccgcggcgagag

SEQ ID NO: 101322 - RNA, 75 nt, Homo sapiens
aacgaccaaccacagacaccacgcagagacacccaggccggcggcaaaaggaaaagaagggaagccccagaccaa

SEQ ID NO: 101323 - RNA, 87 nt, Homo sapiens
agccccaaaccagcagccaaccgccacaaccaccaagagaaacaaggggaaaacacaaagcaaagaggaagaccaggaacgggacag

SEQ ID NO: 101324 - RNA, 51 nt, Homo sapiens
gcccgggccacccccccgcgccgccggcacgcgccggacgggaagcaaagg

SEQ ID NO: 101325 - RNA, 35 nt, Homo sapiens
acaaacgagcacgcaaggagagcaccaagaggcag

SEQ ID NO: 101326 - RNA, 61 nt, Homo sapiens
cccggacagagcccgggcgcgcagcagacggcccaaccagagaaaggaaaacccagcgaag

SEQ ID NO: 101327 - RNA, 75 nt, Homo sapiens
ggaaagaaaaggaaaacagagacgcgaagacccaggagcccgccagaacaagccaaagcgggcacagcagcacac

SEQ ID NO: 101328 - RNA, 55 nt, Homo sapiens
ccggccacacgcagcgccacaaacaagaggaccagggagggggcccccaaaggga

SEQ ID NO: 101329 - RNA, 73 nt, Homo sapiens
ggcccaggcgcacgaagccggcgcaccccacaccgacaccacggaggaggcggccggagggccggaccgccca

SEQ ID NO: 101330 - RNA, 74 nt, Homo sapiens
gccaccaaagaccgcgacgccagccaggcgaggcagcgagaaggacaaccccccaaaggagaaaaaagaaaagc

SEQ ID NO: 101331 - RNA, 90 nt, Homo sapiens
aggcccagcgggagcgcggaacagcaggcccgagcccaccgcgccgggccccggacgccgcgcggaaaagcggacgacagcagacgaccc

SEQ ID NO: 101332 - RNA, 76 nt, Homo sapiens
cggggccagcagaggaccagaggggagaaaaaacaaggagaaggaggggcgcccaggaagagaggaagcacagaag

SEQ ID NO: 101333 - RNA, 63 nt, Homo sapiens
agagagagagagggaggggaaagcgcagaccaggccggaaaaaccccgaaggacgaccaaaac

SEQ ID NO: 101334 - RNA, 87 nt, Homo sapiens
ggcaccaaggggggcaaacaggccaggaaaagggacccggcagcaaccccaacaaacgccagaggcagccccccccgggagacaccc

SEQ ID NO: 101335 - RNA, 85 nt, Homo sapiens
gaagggaagaaaagcaggcaagacacgccacagggaaccaaagcacaaaagccccagaaaaagcaggaagaggaggaggaaaggg

SEQ ID NO: 101336 - RNA, 82 nt, Homo sapiens
caaggagcacaggggcccgaaggccgcaggcagcccggggaggagcggagaggacgcacaggaggagcgccccgaggccggg

SEQ ID NO: 101337 - RNA, 77 nt, Homo sapiens
cagcggccgcagggccgacaagcggaccaagccagacccaaggcaacccccacaaaagccaggcgccggacccggga

SEQ ID NO: 101338 - RNA, 96 nt, Homo sapiens
ggaggccggacccagcgagcgggcggcacgcacgcagaccacaggagcagcaacccagccccggaaccacgccaggggaagaaacgagaaggcacg

SEQ ID NO: 101339 - RNA, 78 nt, Homo sapiens
cacaccggccccacgcacgacgagagggacagcacgggccagagcaaggcaccgcggcaccgccaccacagagcgcca

SEQ ID NO: 101340 - RNA, 64 nt, Homo sapiens
ccagagaagccggaacaaagggaccccaagccgaggaacagcgcgccaagaagcacaacaaaaa

SEQ ID NO: 101341 - RNA, 77 nt, Homo sapiens
cggcaggagaggcggcaggccgggaagaacagggaaccgagaacagccaaggaccccaagcgaacaagagcaaaaga

SEQ ID NO: 101342 - RNA, 70 nt, Homo sapiens
aacccagacccggcagaacggaggggaacagaccccgcggacggcgagggaaggacggggaaggaagcca

SEQ ID NO: 101343 - RNA, 78 nt, Homo sapiens
ggacacccgcggaaccggaggaggggagcggggaagcggaggcacccaccacgggccaggcgggccagaggcaagccg

SEQ ID NO: 101344 - RNA, 101 nt, Homo sapiens
agaagaacccgcccgcgccccgccgcggggcgcgcggcgccggcggcgcgcgacccccgcgcagagaaaccaggcggggaacaagccagcagcccaaggag

SEQ ID NO: 101345 - RNA, 72 nt, Homo sapiens
ggggccgcgcccccccagggaccagcaccggcaggcacgcgcggaggagagggccagcggcgacgcaagaaa

SEQ ID NO: 101346 - RNA, 75 nt, Homo sapiens
aaaagggcagaagagaagcaggaaggaggcagaggcacaccgaaagggccgcgccacggccgcaaagacgggccc

SEQ ID NO: 101347 - RNA, 107 nt, Homo sapiens
agaaggcgagcggccagacaaaggaaacaaccgcggcaaggaaccacaggcaaccccaaagccagggcccccgagccaggaagccaccagagccaggcagccaccgg

SEQ ID NO: 101348 - RNA, 76 nt, Homo sapiens
gagcaaggacaccaccagggagccaggagaggaacccaagccagaccgcccgagaaagacaggaagaccgaggcac

SEQ ID NO: 101349 - RNA, 69 nt, Homo sapiens
gggggcgccccgaagacagccacgcgggaccgggaacagaaacacagaaccccacccgagggccgcaag

SEQ ID NO: 101350 - RNA, 68 nt, Homo sapiens
ggcccaggccaaaagaccccaggcgggggaggaggaggggacgaggcagaaacgcacgaagccggaag

SEQ ID NO: 101351 - RNA, 83 nt, Homo sapiens
gccccgcagaggccaggaggacgaggagagacagaagaagcggaggccggcaaagccaagcagacaccagacagcaaccagcc

SEQ ID NO: 101352 - RNA, 67 nt, Homo sapiens
aaccaaaccggcaaaaaaagacaacaagagccaaaacacggggacaccagagggaaaagcaaccagc

SEQ ID NO: 101353 - RNA, 82 nt, Homo sapiens
gcccacggccgcgaccggccgagagcagcaccagcagaagagggcccgaccacggcaacccagaggcgaagcaggacacccg

SEQ ID NO: 101354 - RNA, 73 nt, Homo sapiens
agagggaaagacagccaccaaggagaggagcccaagaggcacgcaccccacaaaaaaaaacaaaaggcagcca

SEQ ID NO: 101355 - RNA, 72 nt, Homo sapiens
agggacgacggggagggaaagggaagacacgaaaaaagagaaagggccaacggcgccccggcagacggcccc

SEQ ID NO: 101356 - RNA, 107 nt, Homo sapiens
aaaaaaggagcaagaaagcaaaggaacaacacaccaccaccaagaaggagggcgcccacaggccccgcaagacccacgcaagagacgccacacggagggcaccccca

SEQ ID NO: 101357 - RNA, 80 nt, Homo sapiens
aacgacccgcgcggccccgagggccccaagaacagcagagaacacaacacaggacaagcaagcccagagcgccggacgaa

SEQ ID NO: 101358 - RNA, 81 nt, Homo sapiens
cgcccccgccccccccgccgcaccagacacacggcagggaaccccaccccggaaggcggggacacagacgagaacacgaag

SEQ ID NO: 101359 - RNA, 78 nt, Homo sapiens
caaggagcagagacaaaaccaagccaaacacaagcagaaggagcgaagaagagggggcggggcagaacccaaagcggc

SEQ ID NO: 101360 - RNA, 75 nt, Homo sapiens
gagggagcaaacaaggacaaccgaaaacgaacccaaaggagagcccgaggggcgccacccccagcaagagggaac

SEQ ID NO: 101361 - RNA, 57 nt, Homo sapiens
ccacccgacacccggcagaccagcccccgggccacgggcaccagggcccacagggca

SEQ ID NO: 101362 - RNA, 83 nt, Homo sapiens
acacaccccaccccacaggacgccccagagaaagcccgccgcaccagcaagcgcggggccgggagaaggggcaaggcgagaca

SEQ ID NO: 101363 - RNA, 80 nt, Homo sapiens
aggaccccccaaggcaagggggccaaggccagggcaggccaccgccagggccccgggcgcccggccgcggcccgagccag

SEQ ID NO: 101364 - RNA, 37 nt, Homo sapiens
agccaaggaacaagggcaaagccaacggaagagcggc

SEQ ID NO: 101365 - RNA, 68 nt, Homo sapiens
cacacacaccaccggcggagacaagaccagccagcggccccgagaaacccaagaacagaccgccagga

SEQ ID NO: 101366 - RNA, 51 nt, Homo sapiens
agcggcgccacagcaccgcgcaggggaacgcccaaaacccgccggaccgaa

SEQ ID NO: 101367 - RNA, 64 nt, Homo sapiens
gcgagccgaaaagcgagcgcgaggaaaaggcggcgggaggagacgcggcaggcaagaacgcacc

SEQ ID NO: 101368 - RNA, 83 nt, Homo sapiens
gcccccccacaggggagagcagcgagcccgaagcaaaagccccacacaagcggcaccggaaaaccaacggcccggaggaccac

SEQ ID NO: 101369 - RNA, 78 nt, Homo sapiens
ggcgggcccgcgagaagcaagcggaacccgagaggcaagcggacgccaacaaggcgcagagaacggaccgaggaccag

SEQ ID NO: 101370 - RNA, 60 nt, Homo sapiens
gccgaggacccagcaaggccccccccgagcccacacaaagcgaggggaagcggcaacacc

SEQ ID NO: 101371 - RNA, 79 nt, Homo sapiens
cgcccgggggcgcagggaaggagggcgccgagcaacaaccgccgagcgggaggccaggggggggcgccggaagcccccg

SEQ ID NO: 101372 - RNA, 69 nt, Homo sapiens
ccccgccccaggacccccccccccccgcagcggggcagaaaacaaaagcagcaaaagccaacgcacagg

SEQ ID NO: 101373 - RNA, 79 nt, Homo sapiens
agacggcgcccagcaacacagaagccgacaaggcgcaagcgaaaacagaccgcgagcccagagcgagacgacgggaccg

SEQ ID NO: 101374 - RNA, 70 nt, Homo sapiens
gcaggggacacaccacacagacaacccaccaagacagcgcaaagacgaaggggaaccccaggcacaggcg

SEQ ID NO: 101375 - RNA, 34 nt, Homo sapiens
aacgcccgccccgcagagagagcacaaaaccagc

SEQ ID NO: 101376 - RNA, 89 nt, Homo sapiens
agggcacccgggcgcggccaggggcccggggcgcacccacgacgcgcacaccaccggcagaccggcgccacagcaccacccgacggcag

SEQ ID NO: 101377 - RNA, 71 nt, Homo sapiens
cccacgggaacaagaggggacagaaaggacacaccggaacaaagaaaaccaaaacgcaacagaaacaacag

SEQ ID NO: 101378 - RNA, 72 nt, Homo sapiens
ccgcaggccgccccgaccgccgaacaaggcaaaaacgaaccaagggaaggcccgacgaaacacggagaaagg

SEQ ID NO: 101379 - RNA, 77 nt, Homo sapiens
ccacgacaaaagcggggcacgacaaaagaaccagaaaaagagaaggaggcgcgagaggcaacgaggaggggaaaaga

SEQ ID NO: 101380 - RNA, 80 nt, Homo sapiens
aacgccaccaaccaaccggcaaacgaacacgcgcagcgcagaggcccggcagccccaaggaacgcggccccgacagaaac

SEQ ID NO: 101381 - RNA, 75 nt, Homo sapiens
ggagccccgcccgcccccccgcccaccacgaggcggggccaggccagcagcagaacgggggcccacgcggaggac

SEQ ID NO: 101382 - RNA, 64 nt, Homo sapiens
ccccccacaggacacaggaagaaggaggcccgaccaacccagagaagagcagcaccaaagaaac

SEQ ID NO: 101383 - RNA, 77 nt, Homo sapiens
cggccagcagggacgaagggggggcgcgcccgcacggggcaacacgagggccacgacgccccgggcgcaccagacgc

SEQ ID NO: 101384 - RNA, 83 nt, Homo sapiens
gcccagcccccgagggcgggaacagaaaccgagcagaggcaggacagccaacaacaaaaacccacccggcaccaaaacgaaga

SEQ ID NO: 101385 - RNA, 74 nt, Homo sapiens
gcggacgccagagaaacccacagagaggagcggaaaacccagaaccggcccacagcacagggaacaccagaggc

SEQ ID NO: 101386 - RNA, 58 nt, Homo sapiens
cggcacacccacgaccggccaagacgcaacaccgcagggcccagacacgcacgcccgc

SEQ ID NO: 101387 - RNA, 67 nt, Homo sapiens
gaccccaggaccagacacggccggacagcaggcccgcccagcccagcccccagagagcagaccccag

SEQ ID NO: 101388 - RNA, 80 nt, Homo sapiens
cgacgcgcggcgacccagcgcagcgccaccgccgggggcggggcggagaacggaaaagcaccaggaagcagagaggaccg

SEQ ID NO: 101389 - RNA, 61 nt, Homo sapiens
ggaagcaacagacacaagggggagcagcccgggaggacaggcgacaagaaggccaaggccc

SEQ ID NO: 101390 - RNA, 84 nt, Homo sapiens
cgcaacagcaaggcggaaggagaagaggccgccgcgccaacgcgagcggcgacggcggaaagaagcaagggaagaggcccccgg

SEQ ID NO: 101391 - RNA, 79 nt, Homo sapiens
gcgccagcaccacgcccgcgccgcgccgccgccaccagcccaagagaaaggcacgcagaagccagcggacgcccgcaac

SEQ ID NO: 101392 - RNA, 81 nt, Homo sapiens
cagaagaggcgccaggacgaaggcccacgggcaaggcgcacaggccgcaagcgggagagaacgcagacccgcccaaacgaa

SEQ ID NO: 101393 - RNA, 65 nt, Homo sapiens
gcggaacagccccaccccgcaccaacagcagacccaacccggagccggggacggcacacgggcgg

SEQ ID NO: 101394 - RNA, 77 nt, Homo sapiens
ggggagcgggggagagccagcaagcacgccggaccaaggcaacccagccgcagagggcacaccaacaagggaaagga

SEQ ID NO: 101395 - RNA, 61 nt, Homo sapiens
aaggaaaacaagaggccccagagggaaaagaagcccaaagaaaggcacgagaacagggcgg

SEQ ID NO: 101396 - RNA, 80 nt, Homo sapiens
gccacagagacggccaaggaccaggagccgaaggaaaacagaagaccagagggcggaaaggcaaaacagaccgagacaac

SEQ ID NO: 101397 - RNA, 66 nt, Homo sapiens
ggcggacagccagacgcgaggagacgacaggcaaggaacgcaaagaaaccaagaggcacagaagag

SEQ ID NO: 101398 - RNA, 82 nt, Homo sapiens
gcagcccgccccccgccgcgcagagaacacaaaccacacccccccgagcaaggagcggcgaagccacaaaaacagcgcaagc

SEQ ID NO: 101399 - RNA, 82 nt, Homo sapiens
cagaagccgggagaaagcgaagaaccgcaagcccacgaaagaaagccacgaggggccgaaggggacagaaggagacggaacg

SEQ ID NO: 101400 - RNA, 83 nt, Homo sapiens
accgaagaagaggcccggaccaacagagagaaagccagaaaggagcagcagcccggaccgacaggaaagaaggagcccacaaa

SEQ ID NO: 101401 - RNA, 63 nt, Homo sapiens
ggagaagaggcggcccacagggagcaccgaagacgagcagcagcacgcagcagccccagagca

SEQ ID NO: 101402 - RNA, 73 nt, Homo sapiens
acagaagggaaaaacacaaagggaacaaccaaaaagcaagacacaggaaacccaggaacaccggggaaccaga

SEQ ID NO: 101403 - RNA, 80 nt, Homo sapiens
aacgacaagcacacaccaccgcagaagccgcaaggcgaaaagggaaagaaaagaggcgcccggaggccaaaacgcacaaa

SEQ ID NO: 101404 - RNA, 79 nt, Homo sapiens
cgggacgccggagaggcaggcgcggcccgcggggcgccaggcacgcgaggcccccagaagggagggcaagcagaaagca

SEQ ID NO: 101405 - RNA, 89 nt, Homo sapiens
cggccgggagaagcagggaaggaggccgagccgggaccaggcccgggggcggcggccacgccaaggacggagcccagcaagaccacgac

SEQ ID NO: 101406 - RNA, 55 nt, Homo sapiens
aacgcagagcgacaccgaacgagggaaagcccgaaaaggaccagcgaagcaagca

SEQ ID NO: 101407 - RNA, 73 nt, Homo sapiens
cagaaagccgccagagcggggcacggagcggggaagcacaaaggggcaccaagagagcggaacccaacaggga

SEQ ID NO: 101408 - RNA, 76 nt, Homo sapiens
gcgggaggagaggagcaagaccccgaaaccagaagggggaaaggaggcagcacggcaggagacgaggagaggacag

SEQ ID NO: 101409 - RNA, 72 nt, Homo sapiens
gcgcgcgcaggccggggagcgccaggccaagccgacgccagcgggcgccacccaacaggcgcaccgcccacg

SEQ ID NO: 101410 - RNA, 76 nt, Homo sapiens
ccgaccccgcagacgcacgaggggcgcacgcacggaagaaaccagaaacaggaggcgcagggcggggccccacaac

SEQ ID NO: 101411 - RNA, 81 nt, Homo sapiens
ccccccgccccccccagcgggccgcggcccgcaccccgggaggggcgccccgacgccaagggcccagcaccagagggccgg

SEQ ID NO: 101412 - RNA, 72 nt, Homo sapiens
gaccagcaaacccccaagcgccaaagaaaaagcgaacaagcgaaacagagccagggggccggaagaggcaga

SEQ ID NO: 101413 - RNA, 85 nt, Homo sapiens
cgagaaaacgggcaggggaggcccgagaaggagagggggcaccgcaccacccagcgaggacacggcggcccgggaagaagagcgg

SEQ ID NO: 101414 - RNA, 72 nt, Homo sapiens
gaagaggcaccggaggagggcgagacaccaaccaggacagaaacaacagccaccaggcccgagccaaagaag

SEQ ID NO: 101415 - RNA, 80 nt, Homo sapiens
aggaaagaacagcggagccggagggccaaaggacaggcagaagcccccggggagagacagacagagggacacagagagga

SEQ ID NO: 101416 - RNA, 60 nt, Homo sapiens
agacgcaccagcagccaccaggagcccgagagagaaggagacgaggacgcgcacaggaaa

SEQ ID NO: 101417 - RNA, 38 nt, Homo sapiens
cccagccggagacggggaggcggaaccaacccccggcc

SEQ ID NO: 101418 - RNA, 87 nt, Homo sapiens
gggggaaggacggccacgcccacggccggcgccgaaaagaagggacgaggggcagcaggagcgccggagcggcagcacggaccagac

SEQ ID NO: 101419 - RNA, 75 nt, Homo sapiens
cagagcccgcgacaaaaaagccaagacgcaggcagagacgacaacccggcccaagcgggggagcgccggcaggag

SEQ ID NO: 101420 - RNA, 74 nt, Homo sapiens
cccccccgcacccggggcccgaaaccacaggacaggaacacaagacacaaacaaaccacagggagggaccaacc

SEQ ID NO: 101421 - RNA, 102 nt, Homo sapiens
gaagcccacaacccagggggaacaaaagcacccagaggggcgggcacgacaaggggagcgaacaaggagcggggaggagaaagagggaaccccccacaacag

SEQ ID NO: 101422 - RNA, 42 nt, Homo sapiens
cacagaggacagccagacacacagaggcaagccgacaggaac

SEQ ID NO: 101423 - RNA, 66 nt, Homo sapiens
gggggcggcgcgcagagcggagcagccggccagaacggaagaccaaccagaagacacacaaagcag

SEQ ID NO: 101424 - RNA, 69 nt, Homo sapiens
cgagggggggcgcgccggaaaccggagcgcgcagcagcaacgcccagaaagcagcaacaagggacgacc

SEQ ID NO: 101425 - RNA, 73 nt, Homo sapiens
gaaaggagggagagcacagcgcggcagaacggagggaagggcaacaacccaccgggggaaacaccagacgaag

SEQ ID NO: 101426 - RNA, 80 nt, Homo sapiens
caggcagccgcgccgaaggacgccgccgggagcgcggaggaaacagaagacagccgaaccaagggcgacaaccagagaca

SEQ ID NO: 101427 - RNA, 74 nt, Homo sapiens
ccgccgcccagaggacgcccaacaccacccacccaccacgagcacacaaggacccaaagacaaggcaaaagagc

SEQ ID NO: 101428 - RNA, 80 nt, Homo sapiens
agaccgcgcccccgcagcgcaggccgcccagcagcagcaagccccagcccagcagcccggaccgacaggaaagaaggagc

SEQ ID NO: 101429 - RNA, 67 nt, Homo sapiens
cgaaccaccagcagccaaagagccaccaaagaacaacaagagccgcagaaggcagcagggaacggac

SEQ ID NO: 101430 - RNA, 75 nt, Homo sapiens
cggacacgcacaaagaagcagaaaacagaggaccacggagaagaaacagcacaaaacacggaaagacaggcgaaa

SEQ ID NO: 101431 - RNA, 66 nt, Homo sapiens
ggacagaacgggccgcaacagagcgccaaaaagaggaccccagcacagcacagagcagggagagaa

SEQ ID NO: 101432 - RNA, 77 nt, Homo sapiens
cacggcggagccggcccaggcacacacagagacaccgaaaccgggagagggccagacaacaaccccccccgcgaaac

SEQ ID NO: 101433 - RNA, 75 nt, Homo sapiens
acacggggcagccaggccgagccaacaaaagagaccagcccaaaaccaggcccaaggaacgagagaggaagcaaa

SEQ ID NO: 101434 - RNA, 86 nt, Homo sapiens
cggcggcgcggaggagcgaggcagcgacaggacgggaacggggcggcgccagcgcgcgccccccagagaagggcaccccgggagca

SEQ ID NO: 101435 - RNA, 82 nt, Homo sapiens
gggacccggaggaccagaaacgaggaggaagaggggccaaccggaccgcccccaacaaccaggccccaccaccaaacgcaaa

SEQ ID NO: 101436 - RNA, 85 nt, Homo sapiens
cgggcccgggcggaggaaaaccccacggagcacaggcggaggcagcggaggccccgccgcgccgcagccgcccggggaagccaca

SEQ ID NO: 101437 - RNA, 69 nt, Homo sapiens
gccgggggccagaaggaagacagggagcaagaaagcggaaaaacagaaggagggccaacaagaccggag

SEQ ID NO: 101438 - RNA, 76 nt, Homo sapiens
gacccgagcaaaggaacgccacaagcagaaggaggcaccagaggaaagccaacgcacacaccggcgacaggaagga

SEQ ID NO: 101439 - RNA, 99 nt, Homo sapiens
gcacagaggaggccaagccggggggaggagaaacggcacaagccccccaagcagaagaccagccgccgcacaccacacgagaggaacaacgccagagcg

SEQ ID NO: 101440 - RNA, 40 nt, Homo sapiens
gcggaggagggggccgcaagacaaaccagaagagccagga

SEQ ID NO: 101441 - RNA, 61 nt, Homo sapiens
ggagcccaaagaccccggagacaggaccgcgagacagcccagggcgggacccggagacccg

SEQ ID NO: 101442 - RNA, 73 nt, Homo sapiens
agaaggaccaagaaccaggcgaggaccgcgggaagcacaaaggccagcgaacaacggggaaaagaggaagaaa

SEQ ID NO: 101443 - RNA, 82 nt, Homo sapiens
agcgaacaaaaagggccaacacagcggaagaggagcggaaaaacaagcaaaagaaaaacagggaaagaggagaaagaaagga

SEQ ID NO: 101444 - RNA, 66 nt, Homo sapiens
caggaggccccgcaggaccgcacccgcggagacggacgcccgggcgccggccgagcccgggaaaac

SEQ ID NO: 101445 - RNA, 58 nt, Homo sapiens
ggcgcgagggcgggggcagcggcaggagcagaacagaaggcgcacaaaggaaagagaa

SEQ ID NO: 101446 - RNA, 71 nt, Homo sapiens
acaaagaagaaaacacaaaaacgggaaaggggaaccaaccgggaacaagggccagccagaaggcaggagga

SEQ ID NO: 101447 - RNA, 84 nt, Homo sapiens
cgcagccgagcggccggggcccgggcggcgggcggagacggggcgcccccccgccaaggcccggcgagcacccgaaagagcgaa

SEQ ID NO: 101448 - RNA, 86 nt, Homo sapiens
acccagcaacgggcagcgggcgcaggaccccgccccacgcccagggaggagggagcgggccaccagaggcgccaacagcccaagca

SEQ ID NO: 101449 - RNA, 85 nt, Homo sapiens
ccgcaggagccccgggcggcggacggcgcccgggcgacggggccccagggaaaggaccgaggcaggaaagaggccagacgcaggg

SEQ ID NO: 101450 - RNA, 67 nt, Homo sapiens
aaagaggggaaggccgagcgaggaagagaaaaagagacgcaccacaggcccaggcggcgaacccccc

SEQ ID NO: 101451 - RNA, 67 nt, Homo sapiens
gcaagacggccgcgcggcccgcaggaccaagacacccgcccggcaaccccaaccagaggcagccggg

SEQ ID NO: 101452 - RNA, 75 nt, Homo sapiens
gggagcccaagacaacgaccccacagaaacaagccaccaggagaagcaaaagaggcgggaggcggcgcgggagga

SEQ ID NO: 101453 - RNA, 72 nt, Homo sapiens
gggagaccgcggggaaacccaccccccgagaccaggaaccagcagagaaacggcaaaccaggcgagacagca

SEQ ID NO: 101454 - RNA, 97 nt, Homo sapiens
gaccggaacacagacggacaagagaacaacaaacggcacggcacgaagcaaagggcacaagcccccgaagacaagaggccggggagaccgacaaccc

SEQ ID NO: 101455 - RNA, 63 nt, Homo sapiens
cgcagcagacagggaccggcgcgcaggccacgacccccagagcaaccaaaacaaacggagaga

SEQ ID NO: 101456 - RNA, 67 nt, Homo sapiens
ggagacccggggacccccgacgccaggcagcgcccccaaacgggagaagacgcacagcaccccaaag

SEQ ID NO: 101457 - RNA, 64 nt, Homo sapiens
ggagacagggagaccaagagacagacaccgccccgagacgagcgcagaacggcggaggaaagcc

SEQ ID NO: 101458 - RNA, 77 nt, Homo sapiens
ggaaaggagccagaaaggaaggcagcgaaggagagcagcagcagccaggcaaaggccaccgcgcggcgccacccagg

SEQ ID NO: 101459 - RNA, 56 nt, Homo sapiens
cacggaccgcccacaaggaagggccaggggcaaggaaaccgaacacaccagcaaca

SEQ ID NO: 101460 - RNA, 73 nt, Homo sapiens
gaagagggaacacaacaaggaagggacaacacgaccacccaaaacagagagcgaccaaacccccacaacaagg

SEQ ID NO: 101461 - RNA, 56 nt, Homo sapiens
cggcagacacacaacccgacccgacgagacgccaggaaagcaggcagagcaacccc

SEQ ID NO: 101462 - RNA, 74 nt, Homo sapiens
gacgacggcgcgaggaggacgagcggcgagggacggaaaaaaagagcgagaagaagagaggcggccgcccagga

SEQ ID NO: 101463 - RNA, 83 nt, Homo sapiens
cccgcagaggcccccacaccagccacgaagacagccggagggcccagccccggaaggcaggaaggggacggagacacgacgag

SEQ ID NO: 101464 - RNA, 84 nt, Homo sapiens
ccagcgccgcggggagggggcccgggcgccccgcagccccccaacaccgcccgccaggacgacggcagcgcaagccacaggaac

SEQ ID NO: 101465 - RNA, 111 nt, Homo sapiens
gaagagaagcacgaaagcgggagagggaccggaacggcggcgacaaggggcccgaacagagggaggccaacaccacgacgagggcaagccagccaagcaggccagaagagc

SEQ ID NO: 101466 - RNA, 78 nt, Homo sapiens
cggaagagcagagagaaggcagggcaaaccagaaagacgacaaacgacccaggccgaaagacaacaagagccccgcac

SEQ ID NO: 101467 - RNA, 79 nt, Homo sapiens
gcgcaaaggccccggcaagaagaacagaaaggccccggagcagcgcgacccccaggaaacacgaggcagacggcggcca

SEQ ID NO: 101468 - RNA, 69 nt, Homo sapiens
aaggaccaagaaccagaggacgcgggagaaggagaagaagaaaaagaacaccaaacacaacaagacaca

SEQ ID NO: 101469 - RNA, 79 nt, Homo sapiens
ggacccagcccgcggaggccgcggagcgccagccaagaaccaaggccaccgagccacaagaccacagcaccgacccccg

SEQ ID NO: 101470 - RNA, 84 nt, Homo sapiens
gagagggagagacgccgaacgacgccccgcacaccggagcgcccagcgcgaggagacaagcaaagggacagcaaaggcgcagca

SEQ ID NO: 101471 - RNA, 71 nt, Homo sapiens
ccgagagccgcccgggccagcggccgcgcacccccggccggaggcaccagcggcccggccaggccccaccg

SEQ ID NO: 101472 - RNA, 83 nt, Homo sapiens
gagaacgcgagaaccagcggagaaaagaaaaagcaacgaacagaaggaccacaacgaaacaccacaggaaccgccaagagcaa

SEQ ID NO: 101473 - RNA, 71 nt, Homo sapiens
aggcgcgcaccggaagcaccagcgaggaagcgccccgggggcagcggcccccaccgaggccggccacgccc

SEQ ID NO: 101474 - RNA, 96 nt, Homo sapiens
ccggagcagccgccgccgcagcgcgaacaggacgccgcaacgcccaaccaggagaaagagccgcagacgcacagcaaccaccggacccgaaggcca

SEQ ID NO: 101475 - RNA, 77 nt, Homo sapiens
cgcgagagacacaggaacggcagagccagagcccaagcccccgcagggagcccaccgcgaccaggaccaccgccacc

SEQ ID NO: 101476 - RNA, 70 nt, Homo sapiens
aaaggagggacgaagacaccgacggggcggagaacggaaaagcaccaggaagcagagaggaccgcagaag

SEQ ID NO: 101477 - RNA, 75 nt, Homo sapiens
ccgggccgcgcgggcccgcagccgcgcacaggagggggccgcaggagagagaccccagagcccccagcggccccc

SEQ ID NO: 101478 - RNA, 53 nt, Homo sapiens
gaccagaagagcgaaaggagaagaagaggacgaaggggggagggcacaagaac

SEQ ID NO: 101479 - RNA, 80 nt, Homo sapiens
ccaagagagcagggcccgcggagccgcgccgaggggaaggaaggagggccccggagcagccacaccaccgaggccccacc

SEQ ID NO: 101480 - RNA, 68 nt, Homo sapiens
agccagggccagcacgcgcggccccccacacaaaacacacacagcaaaaaagacgcagacgcaacccg

SEQ ID NO: 101481 - RNA, 74 nt, Homo sapiens
gagccacaggagaaaacggcgcaagggcaaaggcacgaacaaaggcgacccagacaacaaaacaagcacggggg

SEQ ID NO: 101482 - RNA, 74 nt, Homo sapiens
ccagggcacccgccagccgacgaaggggagccacaggagagcgcccagacagaaggcgcgggagaaaagccacc

SEQ ID NO: 101483 - RNA, 62 nt, Homo sapiens
aaacggccaaggcaccggaagccggaacaacagccaggacccaaccgcccagggacaacaac

SEQ ID NO: 101484 - RNA, 73 nt, Homo sapiens
acgcaaaaggaggagagaagaaggaagagacgggccccccacaagaaaacgacacccccgagaagcaaaaaaa

SEQ ID NO: 101485 - RNA, 42 nt, Homo sapiens
cagacgcgcaaaacccagaccccaggacagccagacgcgacg

SEQ ID NO: 101486 - RNA, 76 nt, Homo sapiens
ggaccacgcggaggacgggcaacaggagccccacgccacggccgccaggagcaaggcagcgacccagggcacagcg

SEQ ID NO: 101487 - RNA, 77 nt, Homo sapiens
gccggacagagcagaagaaccccggacggacgagggaacaaaacgggacaaacgcagccggaccaaaccaaagacgg

SEQ ID NO: 101488 - RNA, 84 nt, Homo sapiens
gaagccaccgcggccacggagaagggcgagaagaagaaggagaaacgaaggaggcccaaccacaaaaggagccgacggaaccca

SEQ ID NO: 101489 - RNA, 74 nt, Homo sapiens
cccggcggccccacgcagccacccaaaaacaggcacagaggacagaggccacgaagccagagcgcaaccagacg

SEQ ID NO: 101490 - RNA, 84 nt, Homo sapiens
gcggacgggacagggcgggggacacgcaggagagccccgcgaccacggcacacgcgacagggaaggagaccccggcaacaggga

SEQ ID NO: 101491 - RNA, 64 nt, Homo sapiens
ccgcaccagcaggcccgggcaccgagacaggcggggaccaagagaagagcagaggaccagcacc

SEQ ID NO: 101492 - RNA, 74 nt, Homo sapiens
aacgcacagaagaaacaacagagagccaccagaacgagagcacaggagggagcaggaaaaaggcggagaggaag

SEQ ID NO: 101493 - RNA, 75 nt, Homo sapiens
gacggccccagggcaccagccagaaagcgaaccagcaacgggccagaaccaggaagggcgaccagaacgcaacaa

SEQ ID NO: 101494 - RNA, 84 nt, Homo sapiens
cgaccacacacgccaccgggacccaagaccgagaaccccgcggaggcaacaggacacaagcggcagggccggccgggcgcaggc

SEQ ID NO: 101495 - RNA, 71 nt, Homo sapiens
caccccagagagaaagaccaccaggcgagacgcacaaaaaagagacacaggcgccaccaccagagcaaacc

SEQ ID NO: 101496 - RNA, 75 nt, Homo sapiens
cagaagccaaggaggggcacagaggcaggagacgacaccaagaggaaaaaccaggcaaggaagcacaagcgacaa

SEQ ID NO: 101497 - RNA, 43 nt, Homo sapiens
ggcaaacccgagagaacggaaagaacacccaggaagccgaaaa

SEQ ID NO: 101498 - RNA, 74 nt, Homo sapiens
cagaacaaggcacaaacagcagaggggcgcagagcaagccgacgagaagcaagaacagggcgagcaccaaagcc

SEQ ID NO: 101499 - RNA, 106 nt, Homo sapiens
caaagaaccgaggcaggggcaacacacggaaccaggacgcagacccacagaagggaggccagccacggagaccgcagggaaaacagccagcagaacgaacaaagcc

SEQ ID NO: 101500 - RNA, 68 nt, Homo sapiens
gcagcagcgcggacccggagcgacaagcgccccgacggagcgccaggacgaaaccgaaaagaagcaga

SEQ ID NO: 101501 - RNA, 75 nt, Homo sapiens
ggggcgaggaccgacggagaaagagacaaccaaccgggcaagcgcccaccggacccaggacccgcgagcccacgc

SEQ ID NO: 101502 - RNA, 71 nt, Homo sapiens
gggcgggccggccccggcggccagcccgcggcaccccgcggacagggcggaccaccaccagaagagaggaa

SEQ ID NO: 101503 - RNA, 81 nt, Homo sapiens
gacaggcgaacaaagaaaagagacgcaggcgaaaccaaagacgaaaagaagggaggcaaaaggagacgggcgcacccagag

SEQ ID NO: 101504 - RNA, 73 nt, Homo sapiens
gcaacgccacgccaggcccaggacgccagagacagaacaacaaacgagcaagcagaaccgcaaaggcagaaga

SEQ ID NO: 101505 - RNA, 78 nt, Homo sapiens
accgcggggcgccgcagccagcaacacaggcacagaacagcgggaagaaccgagacaggcggcagggaaccagacagc

SEQ ID NO: 101506 - RNA, 70 nt, Homo sapiens
ggaaaaggaaaccgcccgcccccagcgaacaaaaggcacccagcccagcccagggaagcgacccggaggg

SEQ ID NO: 101507 - RNA, 76 nt, Homo sapiens
ggaagaggagcgcaagcgccggggaggccccagagaaggagaagagagagacgcgccgggagagaaacacaagccg

SEQ ID NO: 101508 - RNA, 60 nt, Homo sapiens
cgccgagcgcaacagcggcgggcggggcaccccagacgggagagaagcgccggccggaaa

SEQ ID NO: 101509 - RNA, 76 nt, Homo sapiens
accagcaacaagccggggaggggcgaccccggggcccggccagcacgaccgaggaggggcggacagcggaggagaa

SEQ ID NO: 101510 - RNA, 75 nt, Homo sapiens
cagagaccacaggagcgagagcaaacaggccaagacaacgacaagagaacaaaggaggggaccccggcaaaaaaa

SEQ ID NO: 101511 - RNA, 78 nt, Homo sapiens
aagaacaggaagccccacagacaagaaagaagccaacagggacacgagccccagggacgccgcaccaccaaagaaggg

SEQ ID NO: 101512 - RNA, 74 nt, Homo sapiens
cgcgagacggaccgggggagacggggcacccgaggaggaagagggcagggcccacggaaagaagggaaacccgg

SEQ ID NO: 101513 - RNA, 90 nt, Homo sapiens
ggcgggacgcgagcggcgagccggagcgcggagcccggccccgcaccaggaggaggacgacagcacggggggaagaaaacagacagaaac

SEQ ID NO: 101514 - RNA, 72 nt, Homo sapiens
ggcacgcagcggagagcccgccaccaaccccgacaggagggagaccgcgagagggggcccaccacacgcccg

SEQ ID NO: 101515 - RNA, 81 nt, Homo sapiens
aggcccggacccgcggccggcccggcgcggcccagcgccccagcaaggaagccccacagccaacagaaagcacaagcaacc

SEQ ID NO: 101516 - RNA, 79 nt, Homo sapiens
caccaacccacgggcccgcggccaccaccagggcccacgcgcgcgccaagcccagggccccggcggaggcaagggcaac

SEQ ID NO: 101517 - RNA, 76 nt, Homo sapiens
ggagcacgggcagaaaggagccggagccccagagcccaagacaaaagccgaaagcacacagaaaaccacaggcagc

SEQ ID NO: 101518 - RNA, 85 nt, Homo sapiens
agcgggcgagacggaggagggaagaaggagaaagggccaaccccgaagaagcaaacagaaacgaaggagacagagaagaacgaca

SEQ ID NO: 101519 - RNA, 77 nt, Homo sapiens
gccacaacggccgcagggccgaggagacaggagaagggacacggaggaccggagcagcagagacagcaagagcggag

SEQ ID NO: 101520 - RNA, 39 nt, Homo sapiens
ccggacccaaggcccaaagaaccaggccgggagaccacc

SEQ ID NO: 101521 - RNA, 77 nt, Homo sapiens
ccccaacacagaccacaaaaccgacagaagaaaaggcccaccgggcagacaaccccagccggcagggcagacgcgaa

SEQ ID NO: 101522 - RNA, 77 nt, Homo sapiens
cgagaccggaccgagagcggaccgagagcgcgaaacgcacgagaagggggagcggccgggcagggccggcaacagcc

SEQ ID NO: 101523 - RNA, 74 nt, Homo sapiens
aacagaaccgccaggagcggcagacggcaggccagcgccaacggggcggcacacaaggagcgaagggcagggag

SEQ ID NO: 101524 - RNA, 55 nt, Homo sapiens
gaacgaacccccccccccggaggagagcaaaagacaacacccagaaacagaaagg

SEQ ID NO: 101525 - RNA, 62 nt, Homo sapiens
cggggcggccgcccccccgcgggaggggggccgggagccgcagggcagcgacacccagaccc

SEQ ID NO: 101526 - RNA, 80 nt, Homo sapiens
cagaaacacacagaccaaagcggcaaaagcagaccggaaaacccaccggcaagaccacacccgaggggagcccaggacac

SEQ ID NO: 101527 - RNA, 74 nt, Homo sapiens
gccccagcgcgagagacacaggaacgcccgaagagccaaccacaggagggaaaccacgcaggcaaacgagaaaa

SEQ ID NO: 101528 - RNA, 81 nt, Homo sapiens
gcacggagccggacaacaaaacggaacgcaagcacaggaccagaaacgaaaggcagcagaagaggaaagccagaaagacga

SEQ ID NO: 101529 - RNA, 112 nt, Homo sapiens
gccagacaggcgagggaccaaggggcgagagacaaacggaagagcggagggagacagagcaaaccccggccacacgagacacaggccaccagaagaggaaaagcaccggaga

SEQ ID NO: 101530 - RNA, 72 nt, Homo sapiens
gcaaaggcacaagcagcccaagcaggcccaaggagaaaggccaagacggcaaacgggaacagggaagcaggc

SEQ ID NO: 101531 - RNA, 77 nt, Homo sapiens
gccggcgcgcggaggggcccgccaccagagcacacagagggcgaagacaggacggcccaggcagacacggaggagga

SEQ ID NO: 101532 - RNA, 79 nt, Homo sapiens
caccaaccaagaagagccagccgccaggagcaaggcagcgacccagggcacagcggggcacagcccccagacgggaaga

SEQ ID NO: 101533 - RNA, 75 nt, Homo sapiens
caaaaccacggaagaaaacccagaagaaaaaagaaaagccagcaccaaaaaacccgcagaggaaagagcgaaaac

SEQ ID NO: 101534 - RNA, 65 nt, Homo sapiens
gaggagagaaccagaagagaggagcagagagacggaggggggaggagcaggcccccaccgcgacc

SEQ ID NO: 101535 - RNA, 63 nt, Homo sapiens
gaacagagaaaaaaccaacaccccggcagccgggaaggcccacaggccacccgccagacgcag

SEQ ID NO: 101536 - RNA, 63 nt, Homo sapiens
cccaaaggcgggaaaagagacagcggccgccggcagcccacccccgagcgcagaccggcgccg

SEQ ID NO: 101537 - RNA, 57 nt, Homo sapiens
gcgcgcgaggggcgacggggagaaggaaacccaaccggcaggcagcaggggaaccgc

SEQ ID NO: 101538 - RNA, 71 nt, Homo sapiens
aaacacacaggacgggaggcaacaacccccaagcagcaagaagggaaacgaaaagacagagacagacaagg

SEQ ID NO: 101539 - RNA, 70 nt, Homo sapiens
cagcggaagaaccccccgggagccagaccggcaccgaagaccagagacaacacagacgaccaggaaagca

SEQ ID NO: 101540 - RNA, 119 nt, Homo sapiens
ccccgccacccaggagaccgcccgaccaccaccacagagacccacaagcgggaagagggcgaggacagggccgggagggaccccaggcaccccaacacaccacaacacgggacgaccac

SEQ ID NO: 101541 - RNA, 76 nt, Homo sapiens
cggccccgagcgaaaagaacagaggggaccaaaacccagcccgggacagccaagcaccagccccaacgggaagcac

SEQ ID NO: 101542 - RNA, 86 nt, Homo sapiens
ccagccgaccgggcagcggcgaggggacggagccggacaggagccgccgccgccaacaggcacacggaacaagagcgaaacaccag

SEQ ID NO: 101543 - RNA, 39 nt, Homo sapiens
gaggagagaaggaggccgcccccgaaagaggcagacagc

SEQ ID NO: 101544 - RNA, 76 nt, Homo sapiens
caaggaggccccagcggaccgaacaggacagcggaagcacgggccagacccgcggacacagagcagcgagggagcg

SEQ ID NO: 101545 - RNA, 87 nt, Homo sapiens
cgcacccccagccagccgcgaccagcgccagcgcagccgccagcgccggagaccgaaggagcagacgaggcacgagcgccagcgcga

SEQ ID NO: 101546 - RNA, 76 nt, Homo sapiens
cggcgggaagaggaggcggaacccgcgggagacaggaagggaaggggcggagacgggcggaacgcaggaggccaga

SEQ ID NO: 101547 - RNA, 51 nt, Homo sapiens
ccacacgcagaacgggcggacgggcgcccagccaggaccaaaaacggaggc

SEQ ID NO: 101548 - RNA, 71 nt, Homo sapiens
gggagcagaaagaaaagcgcgagacaaggaacgagcggagagaccaagcgaccaagcaagcagcgccgaca

SEQ ID NO: 101549 - RNA, 76 nt, Homo sapiens
agggccgaacggacagggcacacagccaaacgaagcagggagacggaaaagcagaggccgggccccgaccgccccg

SEQ ID NO: 101550 - RNA, 88 nt, Homo sapiens
cgccgagcccgacccgggcgccccgccggcaccccgcgcggacaccaggcagcgcacccagacaccggggcccaaggaggggacacgc

SEQ ID NO: 101551 - RNA, 72 nt, Homo sapiens
gacgcagcaccacaagacagacagaagaacaagggacaaaccaaagaccaaccaagaggccagagagcaaca

SEQ ID NO: 101552 - RNA, 79 nt, Homo sapiens
cggacggaaaacggcacgaaggagaaaccacaagccgccgggaaccaaaggaagaaggcggcgcacggagaggcccgcg

SEQ ID NO: 101553 - RNA, 73 nt, Homo sapiens
gaagaagcgagggagccggcagcagagcaaaacagagcggaacgaacaagggccgcagcagccacgaaagcag

SEQ ID NO: 101554 - RNA, 81 nt, Homo sapiens
gcaagggccaggggagcccagcggcgcgccggcagcagagccggggccggacgagaaagccgaaggagacgacggaggaga

SEQ ID NO: 101555 - RNA, 71 nt, Homo sapiens
acagagaacgaagcgaccaaagcgcacggcagcgagaggaggagagaaagaacccacgcaggacgacagaa

SEQ ID NO: 101556 - RNA, 75 nt, Homo sapiens
gccgaccacaaaagaaaagccaaagcacagggcgccagagcaccagacccaggaagaaaacaccggagcccaaga

SEQ ID NO: 101557 - RNA, 53 nt, Homo sapiens
gacacaggccgggcacccagccaaaggaaaggggaacgaaaaaccggaaacgg

SEQ ID NO: 101558 - RNA, 72 nt, Homo sapiens
ccagcgaggggccaggagagacccagagaacaagaggcacaggccagacgaaccccagaggcaacgagaaag

SEQ ID NO: 101559 - RNA, 64 nt, Homo sapiens
aaagcaagcgcggaagccccgaaaccccaggacccagacacaggacgccagaggggaagccgca

SEQ ID NO: 101560 - RNA, 81 nt, Homo sapiens
caaaacccggaagagcgccccaggagaaacaagcccggaggccggggacgcccagaagggagacaagccaagggagcagag

SEQ ID NO: 101561 - RNA, 70 nt, Homo sapiens
cccgccaggaggccacggacgaggcgggcacacgggcgaggggggggccaaccagcgacggaggggagcc

SEQ ID NO: 101562 - RNA, 83 nt, Homo sapiens
accaggaccagaggccgccacaaccgccagacaaccggagccacgccccacgaccgccagagaccagccggaaggggcacccc

SEQ ID NO: 101563 - RNA, 36 nt, Homo sapiens
gcagagcaggcagcacaggcgaggaaacgagacccc

SEQ ID NO: 101564 - RNA, 66 nt, Homo sapiens
ccccggcccacaggggggggcaaacccgagagaacggcaagagccccgacagcagccaagaccccc

SEQ ID NO: 101565 - RNA, 70 nt, Homo sapiens
ccgcaaaccggccgaacaggcccggaaggaaggacccgcgcgaaggaagaccgaagcaaacagcgagggc

SEQ ID NO: 101566 - RNA, 39 nt, Homo sapiens
cccccgagagcgagaacaggcgaggaaacgagaccccgc

SEQ ID NO: 101567 - RNA, 79 nt, Homo sapiens
acagagagcagcacagaaccaggccccgaggaacagagaaaagaaaccagcagacagaagcagcgcccagaaacagagg

SEQ ID NO: 101568 - RNA, 70 nt, Homo sapiens
cgaaaggagacaaagaccgggcgacgaggcacagcgcgcaagaagggaggcaagacgggaaacccccaag

SEQ ID NO: 101569 - RNA, 72 nt, Homo sapiens
acagccccgcggccacagcgcaaggcaacaccaccgagaacggggaaaaagacggccgacacaagccggggg

SEQ ID NO: 101570 - RNA, 59 nt, Homo sapiens
gggaggacccccgcccggagagcagagcaacacggaggaacagggcgagacgaacaacg

SEQ ID NO: 101571 - RNA, 64 nt, Homo sapiens
ggagaaagccacaacagggcggcaacaggggcgagaaagggaagagagaagggcacagaccaag

SEQ ID NO: 101572 - RNA, 92 nt, Homo sapiens
gaggcggaagaccgcgcgcagggccgcagcgggagcggacggcgagcgcgagcggcgcgagaaacaaaagagccaacacccaggccaggccg

SEQ ID NO: 101573 - RNA, 66 nt, Homo sapiens
aaccaccagaagaacgacagagaggagggagaacaagcaacggcgggggagaagcagaccgcacca

SEQ ID NO: 101574 - RNA, 71 nt, Homo sapiens
cgggcgagcgacccaggaaggagagaggccccccacccggcgccccgggccagcgggacaccagcaagcag

SEQ ID NO: 101575 - RNA, 76 nt, Homo sapiens
ccaagaggcggccaaggggacgagcaaaggaagcgcgaacagcagcgcagggaagccccaccacaagcagagaaag

SEQ ID NO: 101576 - RNA, 68 nt, Homo sapiens
gcggccgcacccccgccccaggcggcgcccagcggccacacgccccaagcgccacgcccgggcgccca

SEQ ID NO: 101577 - RNA, 74 nt, Homo sapiens
agccccgacacgacagagcaggcaccaagcgaaagacaaacagaaggaagaagggagaagaaaccacaaccgcc

SEQ ID NO: 101578 - RNA, 80 nt, Homo sapiens
caggcacagccgacgccgcgggcgcagccgcccggccccgcgccgggaacgccacaccagcggcccggggccgcacggcg

SEQ ID NO: 101579 - RNA, 67 nt, Homo sapiens
cggggccccagccccagccgagggggcccgaacacggcggacaccgagagccgaaaaccagccccgc

SEQ ID NO: 101580 - RNA, 58 nt, Homo sapiens
gaagaaagcaagacccaggacaccccgaagccgagaaagaaggcgaccgagaacacag

SEQ ID NO: 101581 - RNA, 67 nt, Homo sapiens
ccccaaaaaccacacccggcgaaacgacaagagggaaaaggcggcaaaggaggagggagccggcagg

SEQ ID NO: 101582 - RNA, 70 nt, Homo sapiens
ccgggaagaacacagcccgggaaagcacagaaagccaaaagaaggacgaggacaaacacacaaaacaagg

SEQ ID NO: 101583 - RNA, 75 nt, Homo sapiens
cccgcacagagaaaaagaagaagagacgagaagagaaagaagggggggccccagcccggccgaacgggcgcacga

SEQ ID NO: 101584 - RNA, 78 nt, Homo sapiens
acaggcacccgccaccacgcccagagccgccggccccaagcggaggcaggggcaaccagccacgcaacaccaccaccc

SEQ ID NO: 101585 - RNA, 85 nt, Homo sapiens
gaagcgggcagccgagaagggccgaggcccgcaaaaccacaacacagcagcccccaggagagcaggaaaagccggagaagccaac

SEQ ID NO: 101586 - RNA, 62 nt, Homo sapiens
agaggccaaaagaagaagagacacagcaggggccagacaaccagacccgggaggcaagagac

SEQ ID NO: 101587 - RNA, 60 nt, Homo sapiens
agcagccgagccgagaacggcgccaagacaaaccagaggcgggcgcggacggcaggggcg

SEQ ID NO: 101588 - RNA, 79 nt, Homo sapiens
gaaaagaccggcgggcccagaggcaagacccaggcaacaagggccaggaaggcagcccgccaagaacagcaagccacca

SEQ ID NO: 101589 - RNA, 64 nt, Homo sapiens
cagaaccagaccgggagcacgcacgccacgaagggaaagggagcagcaccggccacacccacag

SEQ ID NO: 101590 - RNA, 77 nt, Homo sapiens
aggccgggaaccagcgagggaaacccaccagagaaggcgcggccacccaggacccgggggaggcagcgaagaaaaca

SEQ ID NO: 101591 - RNA, 83 nt, Homo sapiens
cgccgcaggagacgagaggacgggaccaggcgaagcggccgagcaggcgagcgaacgacggcgacagggggaccgcggcgcga

SEQ ID NO: 101592 - RNA, 80 nt, Homo sapiens
gcgcacccgggccccgaggagcggacaaagagcccaagagacacaggcagaagaagaccgcaaggaagaagagggacagg

SEQ ID NO: 101593 - RNA, 73 nt, Homo sapiens
ccccccacaaagcgccaaaaacaaaggggcaggaaagggaagaaggagaacaaaagccgaggaggcaacagcc

SEQ ID NO: 101594 - RNA, 104 nt, Homo sapiens
ggcgcaccaggcgcggagaaaacaacaagagaaggacagcggccaacaagaagggaaacacaaagaagacaccagaagggccagcaccacgacaacacggcgac

SEQ ID NO: 101595 - RNA, 84 nt, Homo sapiens
aagagaccagggaagcagcaccacggggagacaagcaacacccgcaaaccacccgacccgaagccgaaggaggcgggcaggcac

SEQ ID NO: 101596 - RNA, 85 nt, Homo sapiens
gcaacagccacggaagaaagcaggggggagggccaccagccaggaggaccaggagagcgagccgcacgagaagcagccaagcgcc

SEQ ID NO: 101597 - RNA, 75 nt, Homo sapiens
gaccaggggagcgggcagccgagggccagcacaagagagcaggcgggccagggcgccgaggcgcgcaggccaggg

SEQ ID NO: 101598 - RNA, 74 nt, Homo sapiens
agagaccaagcaccaagaaaacgccaaggaacggaaaaaccagaagagaaaaaacaaaggggagaggcaccccg

SEQ ID NO: 101599 - RNA, 75 nt, Homo sapiens
acgcagcacgcccacccgaccaccaccggaccagaaccgagaagcagcccgggaggagaaaccaacagaccccac

SEQ ID NO: 101600 - RNA, 75 nt, Homo sapiens
agggaccgaagaggggacccaagggagagacaaaacccgcgccaacagagcccgcagacggcagaaacaaaagac

SEQ ID NO: 101601 - RNA, 81 nt, Homo sapiens
ggacagcacgcgaccaagaaaaagaaccagagaacggaagccagaaagcggcaagcaccaccaagcgagaacgcggacaag

SEQ ID NO: 101602 - RNA, 73 nt, Homo sapiens
cgacccgccccacccgcagcagaacaagggccaaaccgagcgccgccccggcaggccagccgacacacaacac

SEQ ID NO: 101603 - RNA, 82 nt, Homo sapiens
gcaggccccaagacgggccgcgcccgggacggagagaaaggcaccggaacagccaggaggaacggaacgcccaccccaggac

SEQ ID NO: 101604 - RNA, 72 nt, Homo sapiens
aagaaaggcgcagaagaaaaggaccagcaagcaagcccgcgcggccgcgcggaccagggcagggagaagagg

SEQ ID NO: 101605 - RNA, 77 nt, Homo sapiens
cgggacccggccaacgacacagacagaccgaggggacggccagcccgcgggagcgccacacagagcggaagaaccga

SEQ ID NO: 101606 - RNA, 78 nt, Homo sapiens
gacgcagggaggagcgggacaccccggaagcgggaaagagcacggaacccgggcacgaagcagaggacgaagccaaga

SEQ ID NO: 101607 - RNA, 77 nt, Homo sapiens
cacgcagcaacgacaaaacggaagaacgcagaagacagcaacagaaggggcccgaaggacacaccaccaccaagcag

SEQ ID NO: 101608 - RNA, 71 nt, Homo sapiens
cgccgcaacgccaacccagagaccaccccacagaaacggcgcccgaagcgcagccaaaggcagggaagaaa

SEQ ID NO: 101609 - RNA, 78 nt, Homo sapiens
ccgggcccaacggaccgaaaacgcacaaccaagcggagagacaaaagcaaaagcaaacagacccccccagccaaagga

SEQ ID NO: 101610 - RNA, 84 nt, Homo sapiens
cgaggacagggagggcgcgcagcggcgcggaagaggagagccaaaggaggcacgacagcagaggaagagaagcagcgaagccga

SEQ ID NO: 101611 - RNA, 78 nt, Homo sapiens
caccgggacggaccgagaccggaccgagagcggaccgagagcgcgaaacgcacgagaagagccaccaaaaccggcaaa

SEQ ID NO: 101612 - RNA, 72 nt, Homo sapiens
aaacaaacacccagaaacaagagcagcaggcgagaggcagaacccggaaagaaggaagggaccaccacaagg

SEQ ID NO: 101613 - RNA, 79 nt, Homo sapiens
cgagagagaggccggagcccaccaagcgggaaaaccccaaacacagagaaggaggcgcaacagggcaaggcaaagagaa

SEQ ID NO: 101614 - RNA, 78 nt, Homo sapiens
acagcgcggagagacagagacgaaggggcaacaaaggccacaagagcgagaggcgccagagagaagaagaaggaggcc

SEQ ID NO: 101615 - RNA, 71 nt, Homo sapiens
gaaaggaggccaggacggagagggagaagaagcaaggcccaggccgggagaacaccaccacaagggccgaa

SEQ ID NO: 101616 - RNA, 93 nt, Homo sapiens
gcgagaggagccgggacacgccagcgcgggcccagggaggcacccgagcagagcacagaagaagcggcgggagaccaggagcaccgggagcag

SEQ ID NO: 101617 - RNA, 73 nt, Homo sapiens
ccccaaagaaacaggaaaaaggagaacgggagcgagagacgaagcacagagaacagcgagcggagacaagaaa

SEQ ID NO: 101618 - RNA, 57 nt, Homo sapiens
agaaggccccggacagggcgccaccagcaaaaccagagaaacaggcagagaaagaca

SEQ ID NO: 101619 - RNA, 70 nt, Homo sapiens
cagcaccccgcaccacagccagggaccagacaggcaaaacaccagagaaaaaccaagccgggcacaacac

SEQ ID NO: 101620 - RNA, 37 nt, Homo sapiens
gggaagcaagaaccgacgagcaagaagacaaacaagg

SEQ ID NO: 101621 - RNA, 82 nt, Homo sapiens
cggaccgagagcgcgaaacgcacgagaaggcaaaagggaaagcaaggggaagggcccaagaagacaccccaccagaaaccga

SEQ ID NO: 101622 - RNA, 72 nt, Homo sapiens
ccggcaagagcacaggaagcaagcggagggcggcggccccaccccgggcgggacaggaggaagccggcagac

SEQ ID NO: 101623 - RNA, 74 nt, Homo sapiens
aaaaaccaaaggaaccagggccagccaccccaaaagaccggaccgacagacaaaggggcaccagagggacacgg

SEQ ID NO: 101624 - RNA, 99 nt, Homo sapiens
accgagagaggagcagcacacgcaaggaggaagaagaccaaaaagcacgagaagcgcaaccaaggaaagccaggaagcaggacagcaggcaccggggaa

SEQ ID NO: 101625 - RNA, 83 nt, Homo sapiens
agcgagacccggggcgaggacccccgagccaggaacagaagggcccggccagggagaaccccccggagcccaggaggggcacc

SEQ ID NO: 101626 - RNA, 80 nt, Homo sapiens
cccaaacagggaccaaccaaagacgccaaggagaaggcagaccgggcagaggccggccaagacggagacaaggagggcga

SEQ ID NO: 101627 - RNA, 71 nt, Homo sapiens
accacacgcccccaagacaacgaagggaaacaggagaaccgacagaaaccccaagcgggcagcagaggaga

SEQ ID NO: 101628 - RNA, 47 nt, Homo sapiens
gaccgagaccgcggccgggaccgaggggggcccgaaggcaccgcaga

SEQ ID NO: 101629 - RNA, 69 nt, Homo sapiens
gccaccaggagcccgagagagaaggggccccacgaaggacggccagcgcggcagggaggagagacagaa

SEQ ID NO: 101630 - RNA, 86 nt, Homo sapiens
cgagcgcgagggcgccgccgccgcccgccggacccccggaccccccgaccgacgccgccccgcagcgggcgaaccgaaggaggagc

SEQ ID NO: 101631 - RNA, 83 nt, Homo sapiens
gaggggagacccacaggagccccggaccaccgagcacccagggggccagggacacacccgccaaaggcccacaaagaggaggg

SEQ ID NO: 101632 - RNA, 75 nt, Homo sapiens
aagcagaggaacacaagagaccagaaccaccaagaggaaccccgaacaggcccagacggcccaagaaacaacccc

SEQ ID NO: 101633 - RNA, 81 nt, Homo sapiens
aacagggacccgagccagcaggggaagaagagcaccgaaggaccaaacacggaacagggcacgcggaacaggagaggagga

SEQ ID NO: 101634 - RNA, 82 nt, Homo sapiens
aggcaagagcaaagcccaggagccagcaagaaggaccagccacaccaaggcaagcccaggccccggacacgagagaaacgcc

SEQ ID NO: 101635 - RNA, 129 nt, Homo sapiens
acagggagcagcgagcacgcgcccgcaacccgaaccacggacaggacccgcccagcccaacggggagggcggaaaacaccccaaaagccaaaagggaaaggaaaagaccaacaacagcgcaggacacga

SEQ ID NO: 101636 - RNA, 53 nt, Homo sapiens
gcgggaggccaccgccagggaccaccacacgaaaccaaggaaaaaccgggaac

SEQ ID NO: 101637 - RNA, 77 nt, Homo sapiens
cgccagagaggcccgcccaccagcgcccgcccccgccccgcacaaagccgggccagaagaaaccagaaccacagaca

SEQ ID NO: 101638 - RNA, 82 nt, Homo sapiens
ggacaaaagaggggaaacgagagcccaaaaaagaagcaggcaagcgggacaagaagagaaggcgcacagcacacacaaaagg

SEQ ID NO: 101639 - RNA, 79 nt, Homo sapiens
ggcacagaaccgcagcagggacgcgggcacgggaccggcgaggacgggcgaaaagccaggagcaaaagacgagcgcgac

SEQ ID NO: 101640 - RNA, 79 nt, Homo sapiens
gacaagaagccagagcagccgcccaaccgcgggaccaaccacccgagcggcgcggacgaagggggaaagagcccgggag

SEQ ID NO: 101641 - RNA, 103 nt, Homo sapiens
agaggaacccgaggaaagagaaaaacagccaggacccaacggaaggccgcagaggacaagcacaccagaaaaaaccgagcagaagggaagaaaagcgagacgc

SEQ ID NO: 101642 - RNA, 109 nt, Homo sapiens
ccaaccccaccccaccagggaagcaccacagccaccacaccaagacaccaggggagaccgaacggaaaacagccccaaagcagcagaccgaagaaagaagacccgcaac

SEQ ID NO: 101643 - RNA, 87 nt, Homo sapiens
ccgcgccgacggagcgaagagcggccccgaaggaggggaagggacggggggcggccacggcagccacagaaagaagacacccgccac

SEQ ID NO: 101644 - RNA, 85 nt, Homo sapiens
cagcccccgagagcaggaacaggagaccggaaagaagggagaccgcggggaaaagagaaaggccaaccaaagaccaggagaacca

SEQ ID NO: 101645 - RNA, 44 nt, Homo sapiens
gcccagccagcgagccacaaagagcgagcgccccccggaccgag

SEQ ID NO: 101646 - RNA, 46 nt, Homo sapiens
aggggcgcaagaggaaacagaaggaaaacagggcggcacccaggcg

SEQ ID NO: 101647 - RNA, 70 nt, Homo sapiens
gcagaggcgcaccgccccagacaacaagagccaagaccgggcgcaaaggacaggaggcggcggggaaaga

SEQ ID NO: 101648 - RNA, 51 nt, Homo sapiens
cgggcgggcgggcggacgggcagaaagaggcagcagcacgcgaaaagccgg

SEQ ID NO: 101649 - RNA, 83 nt, Homo sapiens
gcccagaagaagggaaggcgcgaggaggaaaggaggacgagaccaaaaagagccaagcgagaagagagaaccacaaagggcag

SEQ ID NO: 101650 - RNA, 78 nt, Homo sapiens
cggcacggcccggccccgcccggcgccgaggacccccggggcagcggacccaggcccaaggaggacggcagaagcagc

SEQ ID NO: 101651 - RNA, 82 nt, Homo sapiens
agaagaaggagagaaagcagcagagcaaaaacccaaaccccccaccagcgccaagagaaagaaaaggacagacagaaccccc

SEQ ID NO: 101652 - RNA, 61 nt, Homo sapiens
acacagaaacaacaggcaaacaaggaggaaacacgggagcgagcacaaacgacacacgcaa

SEQ ID NO: 101653 - RNA, 81 nt, Homo sapiens
cgaccaggcacaccgcgaaccgccgggcacaacccaacagacaaggaccagggacaaagacgggaagagaaaacacacgag

SEQ ID NO: 101654 - RNA, 123 nt, Homo sapiens
cgcagagccgggagaaccggaggaggaggccacacagaaggacggcccgacggaagacgccacccccaccgaggagccaaggcgacgcacgggccggaaagacggccggacaccggccagccc

SEQ ID NO: 101655 - RNA, 74 nt, Homo sapiens
ccccccggcgccgcgccggcggcgggaaagcaggcaggagggagagcgccgaagaaccaccccccgccccgggc

SEQ ID NO: 101656 - RNA, 56 nt, Homo sapiens
aggaccgggccggaacgagacgcacgggaaacccagacgacaaggaaggccaaggg

SEQ ID NO: 101657 - RNA, 77 nt, Homo sapiens
gaaaggggcggccccccgcagggcagaaaggcaaagcaggcgaccaggggaacggggcgccagccgccgcccgcagg

SEQ ID NO: 101658 - RNA, 60 nt, Homo sapiens
ccagggaagcagccgaccagccgcggagccgggggcaggcaaaggaacaaaagcggaaga

SEQ ID NO: 101659 - RNA, 37 nt, Homo sapiens
gacggacacggaggggacaccacaggaacgaagaaaa

SEQ ID NO: 101660 - RNA, 110 nt, Homo sapiens
gccccgcacgggacccgcgggccccggcccagcaaccgacaacgcggcccggcccagcaggcgcagcagcaagagggaaaaaggcaacgggaccgcggcaaaggccaacc

SEQ ID NO: 101661 - RNA, 85 nt, Homo sapiens
aaaccacacacgagccggcaacaacgacaaccacacacacaccaaggagacaaaacggcagaccaccaaagacaaccacggacca

SEQ ID NO: 101662 - RNA, 42 nt, Homo sapiens
caagggaaaagcagcggccgcaagagagggagagaccagagg

SEQ ID NO: 101663 - RNA, 83 nt, Homo sapiens
cgacggccacccgggccccaccagcgaaaacccgcagcccaaagggcagaagaagaagaagacgcaagacggcagggggccca

SEQ ID NO: 101664 - RNA, 62 nt, Homo sapiens
ccgaccgggaccaaccaacagggaaggaaacgaaaaggccaaggaacgaacgacaaagccac

SEQ ID NO: 101665 - RNA, 90 nt, Homo sapiens
gccaggccagccgaagaaggcgagcaggggcgggagagccccgcagaagacgccgacgagcaggaacgaacaaacaccccagagagccca

SEQ ID NO: 101666 - RNA, 49 nt, Homo sapiens
gacgacacaacccgggcgcgagccagcgggccggcaccggcacgaggag

SEQ ID NO: 101667 - RNA, 80 nt, Homo sapiens
accacaggcacccagcagccagcaaaccagccagcacgggggcccagccagccagcagcgaggggggacggaggcggcac

SEQ ID NO: 101668 - RNA, 75 nt, Homo sapiens
caccaccacagccaagggcagagagggggcccaggagaagaagaaagggccacccggcagaagacagaccgcagc

SEQ ID NO: 101669 - RNA, 51 nt, Homo sapiens
aggccaccgggccaacgaaaaacaccagaagcagccgaaacgaaccaagaa

SEQ ID NO: 101670 - RNA, 69 nt, Homo sapiens
ggaaagcagaagacaagccccgggggcgccgagggcacaagggcaacgacagaagggcgaagccaacgc

SEQ ID NO: 101671 - RNA, 73 nt, Homo sapiens
aagaagcaacacgagaaccaccccgacacaacaccaccagggcccaccgcacaggaccagagcgcgaagcaaa

SEQ ID NO: 101672 - RNA, 72 nt, Homo sapiens
gaggcgcgcgaggaaaaggagagaagaacagccagaccccacaaccccaaagggcggggaagaaaacccacc

SEQ ID NO: 101673 - RNA, 68 nt, Homo sapiens
agccgcccacgaccccgagccacagcagcaacagcagccagagagccaccaacagagccaggagccag

SEQ ID NO: 101674 - RNA, 81 nt, Homo sapiens
aggcccaaggcagaggcgaggcggaagggcaccccacccgcaccacaccccaccggccggagcacgccaagcagcccccac

SEQ ID NO: 101675 - RNA, 67 nt, Homo sapiens
agaaggaaagacagagccggcaggggaacccaacagcccgccaacgaagaacgaaccaggcaaaccc

SEQ ID NO: 101676 - RNA, 89 nt, Homo sapiens
acccagggcccgggacgccgagcccgacccgggcgccccgccggcaccccgcgcggacaccagcaccacaccccaccggccggagcacg

SEQ ID NO: 101677 - RNA, 78 nt, Homo sapiens
gcagaaggccggagacaccagcagggaaccggaggaaaacaccgggacggacccgaaagaaaagaaagacggagacag

SEQ ID NO: 101678 - RNA, 70 nt, Homo sapiens
cacccagagcgcacaggaacagggccgccccaagggccgaccaagcagaacccgagaagagccgagaaac

SEQ ID NO: 101679 - RNA, 73 nt, Homo sapiens
ggggacagacagcacccaccgggggccaaaaccccgccaagaccaaacagccgcgaaccaaagaagagagcaa

SEQ ID NO: 101680 - RNA, 65 nt, Homo sapiens
cggccacgcgggaccaccggcaccaccaaagaggcacccaggcaggcgacacgagacccacgcca

SEQ ID NO: 101681 - RNA, 83 nt, Homo sapiens
cgacaagccgcggcagccgcggaccaccgccgccaggaccccgaggcccgccgcccgcgggcccacgaggccggggaggccgc

SEQ ID NO: 101682 - RNA, 81 nt, Homo sapiens
caggcccagccaacacccgagcggaggacaccccggagaggacgggaggacggcagcacagggaaccacagaacaggaaca

SEQ ID NO: 101683 - RNA, 64 nt, Homo sapiens
ggagagaggggcgacccacagccgaggcccaaggccccggagcagagaaggcccaaggacaaaa

SEQ ID NO: 101684 - RNA, 108 nt, Homo sapiens
ccgagccggcggagcgcgcgagggcgacccggaaaggccggaagcggccgggcggacaggagagaaagaagagaaagcaaccacaaacacagaaaggacagaaagcac

SEQ ID NO: 101685 - RNA, 77 nt, Homo sapiens
ccggcccaaccgcccgcgaccccccgcgccgcgccgccgccgcagcgccaaaaaagaaagcggggacgcacgaaaga

SEQ ID NO: 101686 - RNA, 104 nt, Homo sapiens
cccaccgccggcgcgggaaacgggcgaagcgacgagccgcgaggaggcaaaagcagaccggaaaacccaccggcaagaccacacccgaggggagcccaggacac

SEQ ID NO: 101687 - RNA, 84 nt, Homo sapiens
agaaacaggcgaagccaaagcagcacgcgaggaggaaaggcaccccaccaggagcaggaggagaagaaaccccaagaccagagg

SEQ ID NO: 101688 - RNA, 76 nt, Homo sapiens
acaacacaacacgccccgaaggggcaccccaccacagagggcggggcagagggggacacaacgcagggaggagcgc

SEQ ID NO: 101689 - RNA, 77 nt, Homo sapiens
aagccaagagcccgccggaacaacgaagcacaaagccgaaacagaacgaccacagagacgaaccaggaggcaagccc

SEQ ID NO: 101690 - RNA, 69 nt, Homo sapiens
aaaggaggaagaagacaccggggacagacaggggcggagcaggccaccaaagaacggcacagcaaaaaa

SEQ ID NO: 101691 - RNA, 82 nt, Homo sapiens
ggggcggcccgcagcccgccgggagccgaccgaggcgcccgcggggcggggaccgccgcccgggaacgaaggggaccagagc

SEQ ID NO: 101692 - RNA, 66 nt, Homo sapiens
accggcccgcaccaagagaagagccgggcacagcccggccggggcaaggcagcgaagaagaagcgc

SEQ ID NO: 101693 - RNA, 44 nt, Homo sapiens
cacccggcggagcagagccagcagcagccagaaagacccagaga

SEQ ID NO: 101694 - RNA, 79 nt, Homo sapiens
acgcacggcccggggggagacagccacgggaagcagaaaggacccaggagcgaaacagaaacaaaaagaagcggggaac

SEQ ID NO: 101695 - RNA, 80 nt, Homo sapiens
cccgcgcgaccacgggcccggcgccggcccccgccgcccggcacacagagaaaaaaagggaacaaaacacagcaagcaga

SEQ ID NO: 101696 - RNA, 80 nt, Homo sapiens
cagaggaggcccggcccaccgcaccgggacccaagccagcaacaagcccaaggacccagaacccaaaaagaccccggcac

SEQ ID NO: 101697 - RNA, 60 nt, Homo sapiens
gacggccccgccacccacacggagaaccacggggaccaagaagcgagcagcccaaacgga

SEQ ID NO: 101698 - RNA, 77 nt, Homo sapiens
ggcacgcagcgaagccacagaccccagaaacgggcaagcgcgcaaacccagaaagccagccgccgcgccaagaaacg

SEQ ID NO: 101699 - RNA, 83 nt, Homo sapiens
acaccgcccagcgaggccgccaagaagggggccgagcgcccccagcaccgaacccggggggaccgcagccccccccccaaaac

SEQ ID NO: 101700 - RNA, 90 nt, Homo sapiens
cacaacaagagacaacaccgcgcggaccacaaaccgcgccagaaaagggacgcgcaccccgccgccgcgccaagaagaaggcccacccac

SEQ ID NO: 101701 - RNA, 72 nt, Homo sapiens
ccgcgggcgaaaagcagcccccccccccaccggaaaggcaccggcccgaccagccacgacacccacgaaagg

SEQ ID NO: 101702 - RNA, 53 nt, Homo sapiens
gcagggccccgcccggcggggaaggcaccgcgcgccgcgcccccccaccagcc

SEQ ID NO: 101703 - RNA, 119 nt, Homo sapiens
ccgcggggacgaggggacacaagacggcgaggagaagacacaaggggcccgcgagcaccgaggagcccccgcacccaagcggaggcagggcgcagcccgccacgcaacccacccccggg

SEQ ID NO: 101704 - RNA, 83 nt, Homo sapiens
agacacggccgaaggggcgcgcggccccgccgccccagcccgccccccgggccggcccagaggacccaagccagggacccacc

SEQ ID NO: 101705 - RNA, 74 nt, Homo sapiens
aggggagagcgaggccgagcccgcgcaggacaggaacacaagacacaaacaaaccacagggagggaccaaccag

SEQ ID NO: 101706 - RNA, 51 nt, Homo sapiens
acccaagcaccggcccagagcccaccacaaaccaaacgagcaagaaggagc

SEQ ID NO: 101707 - RNA, 79 nt, Homo sapiens
caccacgcaacggcccaggacacaaggagcgccgagcagcacacccaggaaggcgaacaacacagaaggaggcccggca

SEQ ID NO: 101708 - RNA, 73 nt, Homo sapiens
gccacccccgccgggcccccagcaaacggccgcacaacagaccccgcaggagccgcgagaaccgagccggagc

SEQ ID NO: 101709 - RNA, 77 nt, Homo sapiens
agagagccagcaccacgagcgccagaaagggacgcccagaacaagaagcagaagccaagaagggcgagacgcgcgca

SEQ ID NO: 101710 - RNA, 81 nt, Homo sapiens
agcccagagggagcacaaccagggaccggcacgaaaccaacaccgcccaaggaccgagaggagcccccgcgcccaggcgga

SEQ ID NO: 101711 - RNA, 75 nt, Homo sapiens
aacccccacaggcgcacaggaaacagaacccaggagaaggagaaaaagagccccaggccgcgagagccccaacga

SEQ ID NO: 101712 - RNA, 66 nt, Homo sapiens
gggacgcggcggcgccggccccggggagaaacggaacggacgggagacacaggaagagcgggccaa

SEQ ID NO: 101713 - RNA, 86 nt, Homo sapiens
cggaggcagaggggaggcgcgaaaggcgaccccgcacacacacccaccagccacggcagcccagcggggacccagccgccccgccc

SEQ ID NO: 101714 - RNA, 78 nt, Homo sapiens
caaaagccacaaagggagagagaagacgggcccgacgagaaaggacccaggccacagcagaagggggaacaaacaaaa

SEQ ID NO: 101715 - RNA, 72 nt, Homo sapiens
ggccgccagccaccacgcaccccccccgcaagccacacccagaaccgcccagagaagaccacgcagggcccc

SEQ ID NO: 101716 - RNA, 59 nt, Homo sapiens
ccccgccccccaggcgacgagacccagggcagaagcggcaccagacacagacggccacc

SEQ ID NO: 101717 - RNA, 35 nt, Homo sapiens
cggacccagccccagaagagcagaaaacgggcccc

SEQ ID NO: 101718 - RNA, 72 nt, Homo sapiens
acagacaagaagggaagcaggcggccaaggagaagaaagcgagaccccacggcgggcggacacgcggaaacg

SEQ ID NO: 101719 - RNA, 75 nt, Homo sapiens
ccagacaacaagagccaagaccgggcgcaaaggacagagcgaggccgaagacccagaggaccccagcaccacaga

SEQ ID NO: 101720 - RNA, 75 nt, Homo sapiens
cagacccaagaaaaccgggaccacagagggaccagcgggaggaaagacaaacgagcgcaacccccgaaacggaac

SEQ ID NO: 101721 - RNA, 81 nt, Homo sapiens
ccaaagccgcccagacggccaccggcgggaggaacaaaaggaaaaaagaggcaagggacagcaaagcgggagagaagcagc

SEQ ID NO: 101722 - RNA, 67 nt, Homo sapiens
caagaggcggacaaaacgccaggcggaccagaaggccagcaaagaccacagcccaggcagaagaaac

SEQ ID NO: 101723 - RNA, 35 nt, Homo sapiens
gccaccagagagcgggcgaggcaggacaaaaagag

SEQ ID NO: 101724 - RNA, 72 nt, Homo sapiens
gaggacgccccaccgccgacgcccccagccaccagaggagccggcccagacaacccaacccgccaaggagcc

SEQ ID NO: 101725 - RNA, 87 nt, Homo sapiens
gcggccagagaaccagaggagagagaaaggacgaagcgccaagaggagccagaggcaggaaaagcccagaaacagagaagggaaggg

SEQ ID NO: 101726 - RNA, 82 nt, Homo sapiens
ggggcgcgcccgaagcaggaagaccggagggagcgcagcacagcggggggaggaggggggcggagggaaaaaagaacgaagg

SEQ ID NO: 101727 - RNA, 82 nt, Homo sapiens
gaggccggaggggccagccccgcccgcagaagcagggccaggagcgcagggcaagcagggagccggacaagcggcccagggg

SEQ ID NO: 101728 - RNA, 90 nt, Homo sapiens
cagagcggggccaggcgaaggacacgaggaaggggaaggggcaaagcagggggagaggacacagaggagacacccaccgcggggaagaaa

SEQ ID NO: 101729 - RNA, 71 nt, Homo sapiens
gaagggcgagaagaagcagaaacacagaccacacaaggccccccagagaagcccgagaccaggacaggaaa

SEQ ID NO: 101730 - RNA, 73 nt, Homo sapiens
aaagacacagcgaaaccggaaaccagccccccaaaaggggagaggcagagcaggagggagagccaccacggac

SEQ ID NO: 101731 - RNA, 71 nt, Homo sapiens
gaggggaggacccgggacaccgcacagccgggaaagaaaacaagccgacagaagaaagcagacagagagag

SEQ ID NO: 101732 - RNA, 74 nt, Homo sapiens
ggcagaacccagaggcgggaggggccgggaggcagaggggcaggggaagcggcgcgggcccccccacccccaag

SEQ ID NO: 101733 - RNA, 96 nt, Homo sapiens
cccgccaaaagcaagggaaaggaagagacacacccagggcaaaaggccaccagcccaccagccacacacacaggaggaagggaagaaagacacccc

SEQ ID NO: 101734 - RNA, 76 nt, Homo sapiens
cggcgccaggccggggaacaaaagaagacaccagaagaagccacagagcacccgcggccaaacccccccacccaca

SEQ ID NO: 101735 - RNA, 58 nt, Homo sapiens
caaggcagcgccgaagggcgagcggccagcagcacgaggaaggaaaaccgcaacggac

SEQ ID NO: 101736 - RNA, 53 nt, Homo sapiens
aaccacccacgcaggcagacgcggagaacaacccgagaaaagccaagaaacag

SEQ ID NO: 101737 - RNA, 38 nt, Homo sapiens
cagcaaaccgggccacagggcggagaacggaaaagcac

SEQ ID NO: 101738 - RNA, 74 nt, Homo sapiens
acaaaagagccaagcacaggcagaacgcagaagcacaaccgccacgagggccaaagccaaacgaggaaccccag

SEQ ID NO: 101739 - RNA, 68 nt, Homo sapiens
gagagagagcaagcgcagcgccacaaacaggacccaaggacccaagaagaaagaaaaaccaagaggcg

SEQ ID NO: 101740 - RNA, 80 nt, Homo sapiens
cggagagaagagacagagacaggggccaaacccacagcgagaggcccggccagagaccgccgggggagcaaggcgaccgg

SEQ ID NO: 101741 - RNA, 50 nt, Homo sapiens
ccgccgccgaggggcgggaacgaaacgacaaaacagaggagaccagacca

SEQ ID NO: 101742 - RNA, 73 nt, Homo sapiens
aaccacagccgcagcaggaccaaggaagaagagaccacagaacggaagaggacacacgaagaagaggcaaaaa

SEQ ID NO: 101743 - RNA, 68 nt, Homo sapiens
ggcgcccccgaaagcccaggaacacaaacagccaggaggcccagcagcggggagagccagccccgaca

SEQ ID NO: 101744 - RNA, 78 nt, Homo sapiens
aaccaaagacgggaacaagggagggggacagaccaaagaggaacacgacaagccccgagaggacaacccgagaaccca

SEQ ID NO: 101745 - RNA, 73 nt, Homo sapiens
caagcaggaccacccaccagccaccagggccccgggcgcgggagccagccgaagaaaggaaaagagaggcgcc

SEQ ID NO: 101746 - RNA, 77 nt, Homo sapiens
gcccaccccacagccaggcagcagggagaagaggagagagcagccaggccccggccgagcccgcccggccagcgacc

SEQ ID NO: 101747 - RNA, 67 nt, Homo sapiens
aagcacagcagcaaagcagggacaagaaggcgaaagccaaacccagagagcaaacaggacagcggag

SEQ ID NO: 101748 - RNA, 74 nt, Homo sapiens
cccccccccacccaccaaaccggagggggaaaaaacccaaggcgcaaagaacagggaagcggaaccaaaaaaag

SEQ ID NO: 101749 - RNA, 73 nt, Homo sapiens
gaccccacggaacaaccaggaacacgccaacgccccagacccgcaggaggaacaagcagcagaaaaaagagga

SEQ ID NO: 101750 - RNA, 71 nt, Homo sapiens
cgagcaggacaaggagacggcagagccaaggccgggacaccagggacgggagaaagaacagacaagccgca

SEQ ID NO: 101751 - RNA, 90 nt, Homo sapiens
agcaaggcggaaggagaagaggccgccgcgccaacgcgagcggcgacggcgaggcacaggcaccagccagacccccaaaccacgaccgcg

SEQ ID NO: 101752 - RNA, 55 nt, Homo sapiens
acagacaggagaacaggccaaaccaagaagcaaccacccccgccaaaagcagcag

SEQ ID NO: 101753 - RNA, 78 nt, Homo sapiens
aacaagcaccagaggcccgagcagccagcacggaggccggaccaaaagaagaaaagaagggcgccggaggcgcaaaaa

SEQ ID NO: 101754 - RNA, 75 nt, Homo sapiens
accccccggcgccgcgccggcggcgcacgagccagggagccgccgggaccggcccgggagacgacaacccaaacc

SEQ ID NO: 101755 - RNA, 122 nt, Homo sapiens
accacgccagccgcaccagccgcccaagccgcacagccgcggcggcagcagcaggagaggcgcacgggacggcagcgcggaagaccgcaaaagaaggagaacgcccaggcagaggcggacgg

SEQ ID NO: 101756 - RNA, 75 nt, Homo sapiens
ccgagaagcggggcaccacgaaggaccgaagagggaagaggaagaacgcgagaaaaaaacgagcgacagagaagg

SEQ ID NO: 101757 - RNA, 78 nt, Homo sapiens
ggccagaagaacgcgccacacagccgcaagaggaggcaagacaggaacacgcccggggaaggacccaggaagccaccc

SEQ ID NO: 101758 - RNA, 78 nt, Homo sapiens
ccagaagaaggaccggaagcacacaacaggaaaacaaaagaggagaaagagagcccgagcccagcacaggcccgacaa

SEQ ID NO: 101759 - RNA, 73 nt, Homo sapiens
gcccagcaaagagaagaagacgaggagcgccaggaaagaggcagagacgaagcagaagcgaggcagacaagcc

SEQ ID NO: 101760 - RNA, 52 nt, Homo sapiens
agggaggaaaacggcgcagcggaaacgcccgagaaaggaggagaaacaagca

SEQ ID NO: 101761 - RNA, 57 nt, Homo sapiens
cgggccacacggccgagccccccccgaaaccgaggggagggcagggcccagccagga

SEQ ID NO: 101762 - RNA, 82 nt, Homo sapiens
caaaccacagaacaaggacacgcgaaaaaaaagcccaggaagggaaagcaaggagaaaaccaccaaaaaaagaagaagaaaa

SEQ ID NO: 101763 - RNA, 66 nt, Homo sapiens
gaagcgcagccagaaacaacaggaggccggagaagacggcgaacacaaacgggcgagaacagccac

SEQ ID NO: 101764 - RNA, 55 nt, Homo sapiens
gcgggcaggaggacccaaacgaaggaccacgaggagcaacggcgagccgcgaagc

SEQ ID NO: 101765 - RNA, 66 nt, Homo sapiens
aaaaaggaaagagaagaagcacccgagaaaaagagagacaacgagggaggcccccggaggcaaccc

SEQ ID NO: 101766 - RNA, 75 nt, Homo sapiens
ccggccaggcgagaaaggcaggagggcaggagaaaggagaaaaagaggcagggagaagaaacggcagagacaaag

SEQ ID NO: 101767 - RNA, 82 nt, Homo sapiens
ggccgggggcggccacgggagagccgggccggcggacgcggcgccacgcagcagggagacccgaccaccggaagccacggcc

SEQ ID NO: 101768 - RNA, 84 nt, Homo sapiens
cagcgacagcgcgccagggagcaagagagacaaaaaaccagaggaagagaagacgcaagaaggggagaaagacagcaaagaaaa

SEQ ID NO: 101769 - RNA, 74 nt, Homo sapiens
ggcgcggcaaggacgagccggggcgcgaaggacagaagccagccaggcgcaagagagcacaagaagaggaacaa

SEQ ID NO: 101770 - RNA, 69 nt, Homo sapiens
caggaaaagagaaacaggccccaacgaggagaaagagagaaccaagaaggaacagaggagcgcgcaccc

SEQ ID NO: 101771 - RNA, 73 nt, Homo sapiens
gacgcaaggccacgggaagaccagcccaccgcacccagggaaaaaacagcagccacacgaagccgggggccca

SEQ ID NO: 101772 - RNA, 84 nt, Homo sapiens
cccccgccagcagccgccggagccagccaacgagcgaaaaaaccagaggaggagaagagccgcagggcccagcgggggcgaggg

SEQ ID NO: 101773 - RNA, 51 nt, Homo sapiens
ccgacaaggaagccaaggggacaaggcacgaggcgcggcgaccaccacagc

SEQ ID NO: 101774 - RNA, 80 nt, Homo sapiens
cggcacgcggcacaccacaagcagagaagggcgaagacaagagcagaccggaagaccggagcgccggcagaacacgcccc

SEQ ID NO: 101775 - RNA, 74 nt, Homo sapiens
ccacgcaagaccacacaccagccggacggcggggccgggcccccggccgcaagcagggaagggagcccaaaaca

SEQ ID NO: 101776 - RNA, 73 nt, Homo sapiens
acgaacagcggaggagaagacaagacaacaggaccaggaaccagggaagagccaggcccagggaaaggagccc

SEQ ID NO: 101777 - RNA, 73 nt, Homo sapiens
gcaggcgccggaagaagggcaccaggacaggaacgagaggacgaggaaaccggagaagccgcgaggcagaaaa

SEQ ID NO: 101778 - RNA, 79 nt, Homo sapiens
agcggcccgggcacggcaacgggaggcccaagcgcacaacacgggaggcgccgccgccgcggacggcaagcggcccccg

SEQ ID NO: 101779 - RNA, 80 nt, Homo sapiens
caaaccgggcccagcagaagaggaacccgaaaaccccaggaggcgagaagccccaccaaacacccaaaaaaaggaaggaa

SEQ ID NO: 101780 - RNA, 70 nt, Homo sapiens
gccacaaggaaccaagacagcgccgcagacgaaaaaggagcagaagcacgaagaacagaacaagcccaaa

SEQ ID NO: 101781 - RNA, 79 nt, Homo sapiens
gacacgcccaacacaccccaggggcacagacagacgcccacccccacgcacgcagaccgcagacgccccgcggaacgac

SEQ ID NO: 101782 - RNA, 70 nt, Homo sapiens
gacgcccagaaagaacagagaggcacgagacggaaccccccggccaggaccggcagacagagagggccga

SEQ ID NO: 101783 - RNA, 79 nt, Homo sapiens
ggaaagcacaagcggagcccaacgaaaccgaacagggagaacccagaagaaaggcggggacaggcaaccagggagcagg

SEQ ID NO: 101784 - RNA, 87 nt, Homo sapiens
gccgcggggcggcgcgggacggcgggcgccggcgccgaaaagaaagggggcccgagcagcaagaagaacagccccaagacgcaggag

SEQ ID NO: 101785 - RNA, 79 nt, Homo sapiens
cagcagaaccgccagagaagagagagcgcccgcgacacgcgacgcccgcgcgcccagccaggcccgccagcgccgccgc

SEQ ID NO: 101786 - RNA, 123 nt, Homo sapiens
cgcgagaaacaccacgcaacggcccaggacacaaggagcgccgagcagcacacccaggaaacgggagcaggcccccaacagcccagcgcccggcccgacccggaaccgcacaggccacggcac

SEQ ID NO: 101787 - RNA, 71 nt, Homo sapiens
gcccggcgccggccgagaaggcagaggcgggcacccccgaagaagggcacccgaggagcagaacaccagag

SEQ ID NO: 101788 - RNA, 82 nt, Homo sapiens
ccagaagccacaagaagaacgaagaagcggaggccagacagaggggaccacaaacaggcccaccggagcagcagcccgaccc

SEQ ID NO: 101789 - RNA, 80 nt, Homo sapiens
cgaccccggccgcggggccaggaagcggaggagccccggaggcagagcggcgccaggcaaggaaacgaaacaggaagagg

SEQ ID NO: 101790 - RNA, 64 nt, Homo sapiens
acaacaaaaagaggccgacagaagagagaagaagcaaaccgggaccggaagcaccaaggagaaa

SEQ ID NO: 101791 - RNA, 72 nt, Homo sapiens
agcacggaacccaaaggcagcggagccacccggaggagaaggaggcaccagccccacagaagcagaaaaacc

SEQ ID NO: 101792 - RNA, 77 nt, Homo sapiens
ggacccagccaacgacgacggaacagcagcgaaagacccggcaagacaacaggcacaaagagagaaggaacacccac

SEQ ID NO: 101793 - RNA, 73 nt, Homo sapiens
cagagacacgccaagcagccagcccaggagagcagaaaaaggcagccgagcagaacgaagagggaagaacagc

SEQ ID NO: 101794 - RNA, 71 nt, Homo sapiens
gagacaagagagaggagaaaagcgagaagccgcagcaagcgggcggcaaagagagaagagagcagacagaa

SEQ ID NO: 101795 - RNA, 73 nt, Homo sapiens
aaaacgcccaaaccagagaaacaacgaacgagcaaggaagggccaaggcagaccccacaccggagaacgcaac

SEQ ID NO: 101796 - RNA, 77 nt, Homo sapiens
agcaacagaagagaggccagccgggaggacacacaagcgggagggcgacagaccagagaaagagaagggccaaacaa

SEQ ID NO: 101797 - RNA, 55 nt, Homo sapiens
aaaacacaagaacacgaaaccgaaacacgcagaaagagagaccagagaggacaac

SEQ ID NO: 101798 - RNA, 77 nt, Homo sapiens
cggcaaaagagcccccagagagaaagcccgagcgggcaggcgagggacagcgagcacaacaacgcacacggaacagg

SEQ ID NO: 101799 - RNA, 81 nt, Homo sapiens
gcgggaggaccaaaccagagggacagagccgggcccgccgaggcccggagggagagaagacaacaggcacaaagagagaag

SEQ ID NO: 101800 - RNA, 80 nt, Homo sapiens
aaggccaacacggaacacgagcgagacccggcgggggaacccagggaagaggagaccgacaacgaagaccccaggacacg

SEQ ID NO: 101801 - RNA, 75 nt, Homo sapiens
ggcaccgggacggaccgagaccggaccgagagcggaccgagagcgcgaaacgcacgagaagggaacgggccacag

SEQ ID NO: 101802 - RNA, 67 nt, Homo sapiens
aaaaggggacacggcgggcaggaggaggagcggaagaggaccgccaagaaaaaacaaaaaagacaac

SEQ ID NO: 101803 - RNA, 81 nt, Homo sapiens
cacggccccccaaggaaaacagggcgaaaaacgggggagcgaagacggggaaaccgggcgcccccggaacccggagcacgg

SEQ ID NO: 101804 - RNA, 64 nt, Homo sapiens
gacccagcgaggcagcgcccgaaccaggcgaacaagaggcgccagcgggcgcgccggaagaaca

SEQ ID NO: 101805 - RNA, 83 nt, Homo sapiens
aagacggaagagaggagcgaccagacggcaggaggccgagcaacaagaaccagacgaggaagggacgcaaaaaggaagcccca

SEQ ID NO: 101806 - RNA, 64 nt, Homo sapiens
gcccaggaaaaagaggaaagggacgccggggccgggccaggagcagagaggccaagcggaacag

SEQ ID NO: 101807 - RNA, 80 nt, Homo sapiens
gcgagcccccccccaggccagaggggcaaggaacacagacaccaagagggaagggcagcaggaccgaagagggaacacga

SEQ ID NO: 101808 - RNA, 76 nt, Homo sapiens
gccccccaggcccacaaccagcccagcagcagcaagcaggcgaacacgcagcaaagaaaaaaagcccaggaaagaa

SEQ ID NO: 101809 - RNA, 77 nt, Homo sapiens
ccgaagaagcacgaaagccccacccgccgcagcaagcagaggagaaggcaaccaaaggcaggacacaaaaacaaccg

SEQ ID NO: 101810 - RNA, 79 nt, Homo sapiens
agaagagaagaggaccacaagaacacgagccagccaaacgagaggcccacgaacagaacaacccgcaaacacgacagca

SEQ ID NO: 101811 - RNA, 67 nt, Homo sapiens
acaaggacaagaaaaggcccgccgagaaaaacagaaaaggagagaacggccgagcgaccaggagagg

SEQ ID NO: 101812 - RNA, 68 nt, Homo sapiens
accggcagagcagcagagcccgaggggagacccagcccgggcacagaaccaagaaaagggcacgacga

SEQ ID NO: 101813 - RNA, 79 nt, Homo sapiens
agagcgcaccaaccggccgcccgccccccggagggccaggcgcagagagggacacgagagcccgcagagcgcagcgcca

SEQ ID NO: 101814 - RNA, 72 nt, Homo sapiens
cagaaaccaggcgccaggaacagcgggacccagggaaaagcacagggccaggaagcagagggacagccaggc

SEQ ID NO: 101815 - RNA, 64 nt, Homo sapiens
cggaaccgggaggcgacgcacacgagcggaggcgaaggccgagacgcaccagagccggaccggg

SEQ ID NO: 101816 - RNA, 69 nt, Homo sapiens
gagggcacccgggggaccccgcacacgaagagacgccgggcaccccaacacagcggcagaggacacgcc

SEQ ID NO: 101817 - RNA, 51 nt, Homo sapiens
gaagaggccagaaaccgcccggagcacgaccgaggcggagggcaggagaaa

SEQ ID NO: 101818 - RNA, 85 nt, Homo sapiens
aaaggagcagagaaggggagccacagccagaacgccagaaccaggcacagaggggaagaacgcacccacaccgaaccaagagaga

SEQ ID NO: 101819 - RNA, 52 nt, Homo sapiens
acgcagggcgcccccggggacaccaaaaggagcacgcaaccccaccaccgga

SEQ ID NO: 101820 - RNA, 74 nt, Homo sapiens
ggacaaagccgcccacccccagcggcacagagccgagacaacccaacggagaggcgggaaacggagagacaacg

SEQ ID NO: 101821 - RNA, 75 nt, Homo sapiens
cgcccggaggggagaccgaacggcgcccagccgcgggagcccccggccggcgcccacccagagaaaagcagaaaa

SEQ ID NO: 101822 - RNA, 86 nt, Homo sapiens
ccagccagggagcgcgaaccgcccgcggaaccacagcccagcacggccacgaggcggccccagcgcgggcgacaggccgacacccc

SEQ ID NO: 101823 - RNA, 74 nt, Homo sapiens
acggacccggcgacaacacccggccccgagacagaagccggccgggaggcccagaaaagaacggccacgagcag

SEQ ID NO: 101824 - RNA, 55 nt, Homo sapiens
gcgaacaggccaaagccagacacagcggcgaagcgcggaccgcgaagcccagagc

SEQ ID NO: 101825 - RNA, 80 nt, Homo sapiens
cgggcgaagcgacgagccgcgaggagggcaggacaagacaaaaaaccaagacgggagaacagcagaaggccaccacaaaa

SEQ ID NO: 101826 - RNA, 74 nt, Homo sapiens
ccagggcgccggggcgagaggcccacgcggaccggcagcgccaccggaccaccagacaaggacacggcccaagc

SEQ ID NO: 101827 - RNA, 72 nt, Homo sapiens
gaagagcacagcagcccacaagcagggaggcggcggcagggacccgggcaggcagcacgaagggagaaggag

SEQ ID NO: 101828 - RNA, 73 nt, Homo sapiens
ccaagccggcggccaagacggagccgagaagcgaaccacacccagaaagccagaaagaaagagcaacaaacgc

SEQ ID NO: 101829 - RNA, 70 nt, Homo sapiens
cacccccccccaccccgacccacgcccggccccgacacgagccgagggggccaccgcgcccgcaaaacgc

SEQ ID NO: 101830 - RNA, 65 nt, Homo sapiens
agcccggagcaaagacgcgccagcggggggaggcgaacagcagacccagccgaagacgacccagc

SEQ ID NO: 101831 - RNA, 74 nt, Homo sapiens
gcaaaggacgacacccgaaggcagaagccagggccacaggccgccccccccacacaccagcccgcgcagaccac

SEQ ID NO: 101832 - RNA, 75 nt, Homo sapiens
ggacccaagaggaggggcagaaagggagcgcgacgacaggagcaggggagagaagacagaagaggggagaggcag

SEQ ID NO: 101833 - RNA, 73 nt, Homo sapiens
caggaaagggcaaaagcggcaaagggaaaaaggcggcaaaccgacaccagcgacacaagcgcgagggaaccac

SEQ ID NO: 101834 - RNA, 71 nt, Homo sapiens
cgccaaacagcaaccagagggcaacgagcaaccaaaaccacggaagaaaacccagaagaaaaaagaaaagc

SEQ ID NO: 101835 - RNA, 73 nt, Homo sapiens
cgcgaccgccgacccgcggcggggggagccggccacccaccggacgagaacccccgcgaaccagaggaaccca

SEQ ID NO: 101836 - RNA, 76 nt, Homo sapiens
gacaggagagggaagagagaggcacacccaaagacgggaaagaccccagcaggccccaaggagcggcaagaggacc

SEQ ID NO: 101837 - RNA, 60 nt, Homo sapiens
gcgcccgccccccagcaccgggcggacgagaggaaagcaagacagagaggacaagcaaga

SEQ ID NO: 101838 - RNA, 78 nt, Homo sapiens
cagagggcgagccagggggagaagagccagcccaggacacggacaaaacccgcgcagcgcgccacccaaaacccgcca

SEQ ID NO: 101839 - RNA, 63 nt, Homo sapiens
cacaaaaaagcggaaaaacgagacaaagaaacagccggaaaagcacgagcacaagacgaaaac

SEQ ID NO: 101840 - RNA, 72 nt, Homo sapiens
cacaagaccgggagggagcggggaggagacaaaggagacgaaaaaaaggccaacacccggaaagccggcgga

SEQ ID NO: 101841 - RNA, 58 nt, Homo sapiens
ccggcacagccgcggagcggacccagcaagacgggggcccgggaggggaagaccccgc

SEQ ID NO: 101842 - RNA, 85 nt, Homo sapiens
aggagcagcgaaccgagaaagacgccgccagccccaaggcagccacaaaagggcacgcccaggaggaacagcgaaagaagaggag

SEQ ID NO: 101843 - RNA, 76 nt, Homo sapiens
agaccacgagccgaggacaaccaacaaaggccaacggcacagaagccaggaagagggcggcaacacagcccgccga

SEQ ID NO: 101844 - RNA, 73 nt, Homo sapiens
caccggggcccggcgcaagggggcaaggaccaaggcccccccacccggcaggcccgcgcgggagcgacacgac

SEQ ID NO: 101845 - RNA, 76 nt, Homo sapiens
cagccgcagccacaacaccggcaggaaccaccaggacagagacccgggggagaagagacagaaggcaccggagaaa

SEQ ID NO: 101846 - RNA, 70 nt, Homo sapiens
gcagcaaagagacaagccaaagccgaccagggaacaacgggagaaacagcaacaacagagaggaagacgc

SEQ ID NO: 101847 - RNA, 85 nt, Homo sapiens
gaaccagaccggcgacccgcgacgccgagcacccaggcgacgcccaccaagccgagagcggcccaggaggaacaaccagcccacc

SEQ ID NO: 101848 - RNA, 70 nt, Homo sapiens
ccggaacaagcaaagggaccaaccccggcacaacacacgccgagacgggacaacagaacccaagcacccc

SEQ ID NO: 101849 - RNA, 86 nt, Homo sapiens
gaacaaacagaaggaagccagcagccaagccggggcagcagcccaccccaaagcagagccccagcccccagcagccgacaggaggc

SEQ ID NO: 101850 - RNA, 85 nt, Homo sapiens
gccggagagagaaagcgggggagacaagggaagaaggccaacaaccccaaccacgcaacgcacaagaccagaccacaggcggggc

SEQ ID NO: 101851 - RNA, 78 nt, Homo sapiens
ccgccgccccaagagagcgaggcaaacgacccaggagcccggcacgaaaaccagcaagcgaaagcaaaaagcgggggg

SEQ ID NO: 101852 - RNA, 86 nt, Homo sapiens
ccaggagagccaaccgagccggcgacacgccacgggccgagccagaagggaaaaaggagggggaagacagagaagaccacacaacc

SEQ ID NO: 101853 - RNA, 52 nt, Homo sapiens
agaggcagacaagacacccgcaggaagcagggaagacaccgagggaagagag

SEQ ID NO: 101854 - RNA, 84 nt, Homo sapiens
ccgggaccgggcgggaacccgcggggagcgggacacgaacgggggacggaaagagagccgcagcgcagaacaagggaaaaaagg

SEQ ID NO: 101855 - RNA, 79 nt, Homo sapiens
gaagcggagagacaaaaaaaggcgcgcagaagacagagaggggaagaggaagaggaagaggaaacaagaaagggacgcg

SEQ ID NO: 101856 - RNA, 42 nt, Homo sapiens
cccgggagcggaggaaccgcggccaggcagagcagcccacca

SEQ ID NO: 101857 - RNA, 79 nt, Homo sapiens
acgagcgaggcggagggagaaggccaaacacacaggaacgccagaccccagccgagggaggcaacagcaaagggacagc

SEQ ID NO: 101858 - RNA, 68 nt, Homo sapiens
cgccagagacagagaagacaacggagcaccagagaaggaagagaagaacaagcagacagaaaagagac

SEQ ID NO: 101859 - RNA, 81 nt, Homo sapiens
aaaaaagagaaaccggggaaccacggacaacccagaggacaacgaaggcggggcgagagccggcagcagccagcagcagca

SEQ ID NO: 101860 - RNA, 77 nt, Homo sapiens
gggaaggagcggccagagaacagcacccaaaggccagaagggagacagagaaccacgcacagaaaggagaaaaacaa

SEQ ID NO: 101861 - RNA, 79 nt, Homo sapiens
aggacgaggggcaaggagggggggcccagggggacgacaaagagaggccacaaggacaccagcaacgaagaggcgccac

SEQ ID NO: 101862 - RNA, 74 nt, Homo sapiens
ccggggaagccagcagaaccagggaaaaaagcccggcgagcgacggaagcccacagaacagggggcagaagaaa

SEQ ID NO: 101863 - RNA, 78 nt, Homo sapiens
ccccaaaggcgggagcaggacgagaacccccgcgaaccagaggaacccagcgagcgagagcggaccagaggacggaag

SEQ ID NO: 101864 - RNA, 84 nt, Homo sapiens
ggagaagacaagagcccgcgggcacgacccgcgggcgacgcacgaggcacacaggaaggaggggagcagggacgcgcggcggcg

SEQ ID NO: 101865 - RNA, 81 nt, Homo sapiens
ccacgccgccaagcgggagcagaggggagagcggccgccgccgcgccgcccaccacaggggaccagcgcgaggcccgaggc

SEQ ID NO: 101866 - RNA, 51 nt, Homo sapiens
gacgaaagcagaggcagaggagccgaagaccaggcaaaggaacagagcaca

SEQ ID NO: 101867 - RNA, 73 nt, Homo sapiens
caagacgaccacacggaaaagccagagccggaggcccacgaaaccaaaaggaagaaggaagcgaagagaaaca

SEQ ID NO: 101868 - RNA, 71 nt, Homo sapiens
gagacaagaaagagaaggagaagaaagagcgaaaagacagcagaccacagcccggcaggcccaaaaaccca

SEQ ID NO: 101869 - RNA, 62 nt, Homo sapiens
cgaaggccgggagaccgcggaggaaggggccccgaacaccgggcgacccagcaacgcggccg

SEQ ID NO: 101870 - RNA, 72 nt, Homo sapiens
aagaaccaggaaaaacggagccgagaccaaggaagccgaaccagcgagcccgcaaccaccaggcagcgccac

SEQ ID NO: 101871 - RNA, 70 nt, Homo sapiens
ggggcagcagaagaggacaagcagacagcaccaacggcgacacggagaggagaggaagaaagagcaggaa

SEQ ID NO: 101872 - RNA, 86 nt, Homo sapiens
ggccgcccccagggagcccagccaacagccaacccagagggagcaagagcagagcgacggggccacggggaccaggcggggcaaga

SEQ ID NO: 101873 - RNA, 83 nt, Homo sapiens
gggaggggaaacgaagcgcacgaaacaccaagggcagcagaccgcgcgccagacgccaaggacgcccacagagcacgccccgc

SEQ ID NO: 101874 - RNA, 80 nt, Homo sapiens
gcgcgccagcgcgagaagggcgacacacgaggcgcaccagagaccggacccgccaggccaaagccacccccaaaggcaga

SEQ ID NO: 101875 - RNA, 82 nt, Homo sapiens
cggcacccgaaggccagaggaaagagagaaaacgaaggaaggaggacccgaggagagagaagacggaaaggaaacacggaag

SEQ ID NO: 101876 - RNA, 83 nt, Homo sapiens
cgcgaagcggccaaagccgcccagacggccaccggcgggaggaacaaaagaggggagcaagggcggaaaaaggcaaggcccgg

SEQ ID NO: 101877 - RNA, 78 nt, Homo sapiens
gccccagacccccggccgcccacgccgcggcgcgacccaaggcgccggaaggacgggagcacgcgggacggggccgcg

SEQ ID NO: 101878 - RNA, 56 nt, Homo sapiens
cgaaggagacagcccagaagaacgaggagacagcgccgcgcaagagcaggagggac

SEQ ID NO: 101879 - RNA, 79 nt, Homo sapiens
aaagaccaaccccgaccacagcccgggaccaaagggaggggaaacaagaaccagacaggcacaggcgaggggcggaaag

SEQ ID NO: 101880 - RNA, 43 nt, Homo sapiens
cggcagccagggggagggggagccacgcgccgacaaggcacac

SEQ ID NO: 101881 - RNA, 64 nt, Homo sapiens
cgagaagggagacgacgcgcgggccgcgagcggggcgacccgaggaagagagaaggccacgccc

SEQ ID NO: 101882 - RNA, 71 nt, Homo sapiens
caaggaagccacggcagacacacaacccgacccgacgagcgaccaggcaccggccagggccggccacagcg

SEQ ID NO: 101883 - RNA, 78 nt, Homo sapiens
aacgcgccgggccccgcgcgcggcccggggcccgaaccgcggacaacgcgacagagccgaggcgccacacggggaaca

SEQ ID NO: 101884 - RNA, 73 nt, Homo sapiens
cccccgggaaccacccgcgcccccaggggacacaccggaagacgcaacacaggccgcgagggggcaccgaaga

SEQ ID NO: 101885 - RNA, 56 nt, Homo sapiens
ccggccacgcacccccgaagccggacccgacaaacggacagcaggaccagaacaag

SEQ ID NO: 101886 - RNA, 75 nt, Homo sapiens
gccagaaccaggggcccggggcgagagggcccagaggagacaggggaaccaggaggaggacagccagacaggacc

SEQ ID NO: 101887 - RNA, 71 nt, Homo sapiens
ccagagccgaaccaaagagcagcaggagacagaaaaaggaggcggcaacagggaacgccgcgcagagccca

SEQ ID NO: 101888 - RNA, 77 nt, Homo sapiens
ccgcgacggggcaaaaagcgccacgcagagccccgccaggaagacacgccggggaacgaagcagaagacggaggggg

SEQ ID NO: 101889 - RNA, 82 nt, Homo sapiens
accgaccaccgaggcggagggggagaacacccaggaaaagagaaccgccagcaagagcgcgcacgcaaacgggagagccgga

SEQ ID NO: 101890 - RNA, 40 nt, Homo sapiens
cggcgggcgcggcggccgcgagacgcagaaaacagacaca

SEQ ID NO: 101891 - RNA, 73 nt, Homo sapiens
gagaggagaacgaacaccggaccgccagccgacccacccagagggacacgcgacaagcagagaggccgacacc

SEQ ID NO: 101892 - RNA, 87 nt, Homo sapiens
cggcggaggcgccaggacgacgaggaggagacgaccggccggaaaaccgcaagaccacagcagcggggacgacgagcccacggcaca

SEQ ID NO: 101893 - RNA, 68 nt, Homo sapiens
cagagcgggagcaaggcaggacagcagagggaacagccaaggccacagacaacgcacaaaaggcgagg

SEQ ID NO: 101894 - RNA, 80 nt, Homo sapiens
cccagacacacacacccaacccaaaccaaggcccaaaaccgagaacgagggccccgccagccccccacacagagcaacca

SEQ ID NO: 101895 - RNA, 76 nt, Homo sapiens
gaaacaagccaaaccgaaaggaaggcaagccaccgaaaaagacaaaagaaccaaagacggaaaccaaagcagccac

SEQ ID NO: 101896 - RNA, 91 nt, Homo sapiens
gagggcaggacagcgccagaagcagaggcgcaaagaagcgaagcgggggaccagaacagaaacgcccgaaagaagaaaaacccaagaaaga

SEQ ID NO: 101897 - RNA, 69 nt, Homo sapiens
cggagacagggagaccaagagacagacaccgccccgagacgagagcgccgcaaggcacagccagcccgc

SEQ ID NO: 101898 - RNA, 74 nt, Homo sapiens
cgcgagcagcaaccacagcccagacccagcagccgagcgaggaacaaggaccacaacacagagaacaagaaacg

SEQ ID NO: 101899 - RNA, 78 nt, Homo sapiens
gaagaaaggaggagaaacagaagacagagcggcaaaaaaccaggaaccagacagacagcggcccgcaaggccagaaaa

SEQ ID NO: 101900 - RNA, 69 nt, Homo sapiens
gcccggcgagccccgcagaacgggcgaaaaacgaagaaggaagacgcgaccgaacaaacagccaaaacg

SEQ ID NO: 101901 - RNA, 51 nt, Homo sapiens
cgcaggagaagcgaaaagaaacccaagaagcgcgcaaaccagcaggagaac

SEQ ID NO: 101902 - RNA, 90 nt, Homo sapiens
ccgagggcagcggcaaacgcagggcgcccgcgccggcagaggaggcgagcacccgccagggagaggaacccccgcgcacccagcgcagaa

SEQ ID NO: 101903 - RNA, 83 nt, Homo sapiens
agaggaggggcccggagagggggaagggcccaaagccagaagggaacccagaccaggccaaagcaaacaacagaaggaaaaga

SEQ ID NO: 101904 - RNA, 74 nt, Homo sapiens
gcaccaaccccggcagagagcaggagacagacccagcacggaccccccccccagccgggcgaggccccgaaacg

SEQ ID NO: 101905 - RNA, 82 nt, Homo sapiens
cacagagggggaaagccaaggaaaaacggagagccacaaaaaaggaagcgaaagcagaccgaccaaacagggagcagcggac

SEQ ID NO: 101906 - RNA, 67 nt, Homo sapiens
gagggcccagggcggggcccgaggaacaacggggaagcgagagaccgaaacggagccgacggacaag

SEQ ID NO: 101907 - RNA, 65 nt, Homo sapiens
gcccgcggcaccgggggacagggggggaccgaaccaacggcgacgaaagcgcaggcaggccccag

SEQ ID NO: 101908 - RNA, 77 nt, Homo sapiens
cgggaccccagggcaccagcaacaccccaggccggggagggcgcgccgaaagcgggaccgaggaagaccagagagcg

SEQ ID NO: 101909 - RNA, 84 nt, Homo sapiens
gcccagcccggcgcaacggcaccagaggacaacgcgaacccaggcacccagagacggagcggaaaccaaggaagaaaagccacc

SEQ ID NO: 101910 - RNA, 77 nt, Homo sapiens
ccggggccccgacccgccaaagacccagaaggggagcgcggaccgagggaggcaagcaggggggcaaaggaaagaag

SEQ ID NO: 101911 - RNA, 80 nt, Homo sapiens
aagaacaaaaaagaagggagcaaggcgggaaaaaaccacggggaacacaccggccaaaagaccgagaacgcccaccagaa

SEQ ID NO: 101912 - RNA, 60 nt, Homo sapiens
agacaggaacgggacacacaaaccccaaccagggacaaggggagagcccggaaaaccaaa

SEQ ID NO: 101913 - RNA, 75 nt, Homo sapiens
ggcgaggcacgaccccacccccgaggcccgaccggccgcaccaccgaaaaagccagacagaaccaaggccgggag

SEQ ID NO: 101914 - RNA, 90 nt, Homo sapiens
gcgagaggaggccccgggagggcagccacccccgcggacagcgccgacgccggggcacggccacgcacgggcagcgggggcagagacggg

SEQ ID NO: 101915 - RNA, 81 nt, Homo sapiens
cggaggcgcgcagcgcccgaagccacccaggcccaggaccgagcccgacgcccacagacaggcgaacgccggcggccggac

SEQ ID NO: 101916 - RNA, 38 nt, Homo sapiens
gccccccagccagcagaacgcgcagggcccagcggaag

SEQ ID NO: 101917 - RNA, 75 nt, Homo sapiens
ccagcagaacaagaaggagaaaccaagaagacaccgacacgaaaacagggggggacacggcacgagcgcagagga

SEQ ID NO: 101918 - RNA, 83 nt, Homo sapiens
ccccgacacgcccccgggcgccacgcagagccgccgcagcccaggaccgcacgccaggggccgggcccaagaagcacgaagcg

SEQ ID NO: 101919 - RNA, 80 nt, Homo sapiens
cgagcacagagcccgccgccgaccgccgcccgccacacccgccgccagcggggacgacgagcccacggcacaacggaccg

SEQ ID NO: 101920 - RNA, 72 nt, Homo sapiens
aaaaccagagaaacaagaggaggaggggagagccaaaaggccaggcacagcaacgacacagcaggcaccgga

SEQ ID NO: 101921 - RNA, 77 nt, Homo sapiens
cagccccaaaagaagggaacagaagagagggagcaagcaacagccacagggggccagggaacgggcgagcaagaaca

SEQ ID NO: 101922 - RNA, 74 nt, Homo sapiens
ggcgacaaggccaagaccgccagcaaaggaagacgagggagaacggaaacgccaggaagaaacccaagggaacg

SEQ ID NO: 101923 - RNA, 77 nt, Homo sapiens
acgaagggggacacaggcgagaaacgccacacggccggccagggccaggcaagggcaccccggaacagaaaagccag

SEQ ID NO: 101924 - RNA, 72 nt, Homo sapiens
agcgggggaaccggcgcgccggcgcgcggcgcggacaggcccaaacgacacccggaagcaggcgaacgaagg

SEQ ID NO: 101925 - RNA, 76 nt, Homo sapiens
cccgcgcgcgcgcaccggggcgcccgggcgaccaaccaaacccgcaaaaccacaccaccagccggaggggacagaa

SEQ ID NO: 101926 - RNA, 69 nt, Homo sapiens
aaaccaacgcaaaaacggggggagaaaaggccaagggcaggagacacgagacgcaggaagcagcgaaag

SEQ ID NO: 101927 - RNA, 98 nt, Homo sapiens
agcaaaaagcagacccccagcccccaaagaggcagagacccacgagcagagcaaaagcaccgaacagacagccagagaggaccggggaaaacgagaaa

SEQ ID NO: 101928 - RNA, 79 nt, Homo sapiens
agccaaaaagacaagcgaaaaagggcagaccaaggaaaccggacggggaagaaaaaccgaggccagacgaacggaaaag

SEQ ID NO: 101929 - RNA, 37 nt, Homo sapiens
ccaagcaggagaaccgaccgcacagggaacaccagag

SEQ ID NO: 101930 - RNA, 76 nt, Homo sapiens
gcgaacccggaaggcgggaccagccaccaccaagacgcaggaagacccagagacgcagaaaggaaagaagcccggg

SEQ ID NO: 101931 - RNA, 59 nt, Homo sapiens
aggaagcccagaaagaaaaagcgcaaggcaaaacacagagcgcaccccggaagccaacc

SEQ ID NO: 101932 - RNA, 63 nt, Homo sapiens
aaccaccaccacagacccagacaggacagggacaagcgcacagcggagaaagcagcgcggcca

SEQ ID NO: 101933 - RNA, 57 nt, Homo sapiens
gcacggcacccggggggcagcgaaagacccagcacccgccggggcacacgagagacg

SEQ ID NO: 101934 - RNA, 80 nt, Homo sapiens
cggcaggcagcggcggacaacccacaccaggccagccgggaaccgaacccaaaacgagacggaagcccccaaagcagaaa

SEQ ID NO: 101935 - RNA, 51 nt, Homo sapiens
aacacaggacacgcggcagagagggggaaacccgcccagggcgggagaccg

SEQ ID NO: 101936 - RNA, 85 nt, Homo sapiens
gaaaaaagagagagaaaaaggacaaaagccaagaggaggacagcgcacacagcaagcacgaggccagaaacgcgaaagcgcggcc

SEQ ID NO: 101937 - RNA, 75 nt, Homo sapiens
aggcagaggaggaaaacgagagggcaacggcaacaaacagaagaagaagcaaccaagacagcccaagcacaaaac

SEQ ID NO: 101938 - RNA, 78 nt, Homo sapiens
agggaaggcgcgaggaggaaaggaggacgagccaagcccgggcgcggacaggaacccaaagacaacaaagcgcaaagg

SEQ ID NO: 101939 - RNA, 82 nt, Homo sapiens
ggagaaggagcaaagagggggccaagacgggcagggcccgggcaccaggagcaacaagggggaccgcggggccaaaaagggg

SEQ ID NO: 101940 - RNA, 72 nt, Homo sapiens
caaaacccgcccggagcacaaaacgggcaagagacaagggcagagccaagcgccgcccgggcccaagcaccc

SEQ ID NO: 101941 - RNA, 83 nt, Homo sapiens
gcggcggcggcggcggcgcgcgggggcgacgcgcgggaacaacgcgagcggcgcgcgggacgaagacagccagcaggggcaga

SEQ ID NO: 101942 - RNA, 78 nt, Homo sapiens
gagcagccggaggacgcggagcccaagaaacgggcagccaggcccccacagcccgcagaacgcggcagaacggaggca

SEQ ID NO: 101943 - RNA, 67 nt, Homo sapiens
aaaagaaacaagaaggagaacaaaagcaaagccccagacggacgagagacagcaaagccccacccag

SEQ ID NO: 101944 - RNA, 72 nt, Homo sapiens
gcgccagagaagaagaaggggcgagggacaggccgagcggagcccaaccagacggaggacaggcgcggccaa

SEQ ID NO: 101945 - RNA, 70 nt, Homo sapiens
acacgacagagaggaaggacacggaaagaacaagcgcacgacaagccaagaacggagaaagaggacacgg

SEQ ID NO: 101946 - RNA, 80 nt, Homo sapiens
agcaggaaaagacacaagcaaaaagcacagaaacgcaagcgcgcacagagcacaccccgggagcccacccccaacagcag

SEQ ID NO: 101947 - RNA, 54 nt, Homo sapiens
agggcaccaaaccggagagccggaggagccaccaacagaagcaggagccaggaa

SEQ ID NO: 101948 - RNA, 73 nt, Homo sapiens
gcaagacacgaaacaccgagagagaaggcacaagggacaagcaacgagagcccggagccccggggagaagggg

SEQ ID NO: 101949 - RNA, 89 nt, Homo sapiens
gcccagccaccgccccccccacgaaaaacaaccaccagcgagcaaaaaggcaaagaccaagaccaccaagaagcgccccagcggcaaca

SEQ ID NO: 101950 - RNA, 76 nt, Homo sapiens
aaaacaggcagcgggagccgagagaaggcacggcggcgcagaaaagaccgaagaacggcaaagagaaaagaagcag

SEQ ID NO: 101951 - RNA, 76 nt, Homo sapiens
cgggggccacaaagccccccggagacgcaaccaaggcaagaaacaacagcgaccagagccgaagagaacgcgaaga

SEQ ID NO: 101952 - RNA, 79 nt, Homo sapiens
ccgagggacgggagcgaggagggcggggaacacagaggaaggacggcgggggcagggaaagcccgagaagagggaacac

SEQ ID NO: 101953 - RNA, 71 nt, Homo sapiens
cgcacaggaagcaaaggacgaacacaaacacaggccggagggcacagaccggccgccacacggggaacgag

SEQ ID NO: 101954 - RNA, 81 nt, Homo sapiens
gggaagaggagaaggcacccgcggaaccgacggccagggccggacgcggcggaggcgagcgagaggaccacagccggaagg

SEQ ID NO: 101955 - RNA, 72 nt, Homo sapiens
cacgggcgaggaggcgccgcgcagcacaggcagaacaggagggaaaacgacggaacgagaagaggaagagcc

SEQ ID NO: 101956 - RNA, 56 nt, Homo sapiens
cccaggacagaagcagaagcaaagcgcagacacaagagggaaggagacccagacag

SEQ ID NO: 101957 - RNA, 41 nt, Homo sapiens
gacgagagccccgccaaccacacagaggcccgaaagcagaa

SEQ ID NO: 101958 - RNA, 69 nt, Homo sapiens
gagcgcagaagccggaagagagccaagccaggcccagcagccgccaccggcccagcggaagaacgccgc

SEQ ID NO: 101959 - RNA, 80 nt, Homo sapiens
gacgggaccgggaaccacgggggccgcggccggaccgagcgcccgacccggcgaggcagagaaagcaagagacgcaaccg

SEQ ID NO: 101960 - RNA, 68 nt, Homo sapiens
agggaccaagacccaagaacaaggagcacccacgggagaccggggggcaagaaaaggaagaagaagca

SEQ ID NO: 101961 - RNA, 78 nt, Homo sapiens
acaccacggaggaccgacaggagagaacacaacaggaacagagacagacccgggggcccccaaggagagggaagaagc

SEQ ID NO: 101962 - RNA, 72 nt, Homo sapiens
agccgacagacgccaccaaaagcaccagaaacaaccagcccacagcagaacagcggagaagcaacaagcgga

SEQ ID NO: 101963 - RNA, 79 nt, Homo sapiens
ccagaacagaaacaccaggaagggagaacggccgagaccccacaagccagcaggcagacccaccacgggccaagggcag

SEQ ID NO: 101964 - RNA, 84 nt, Homo sapiens
gggaacccggcaccgccccaggaaacccccaggcgcagagcgcccaaagcaagacagaggcaaagccagccaacagcccccccc

SEQ ID NO: 101965 - RNA, 72 nt, Homo sapiens
ccccccaacagaggaacgaggaaacagaaagaaaccgccagagcggaacgaccccagagcgagcccgcagca

SEQ ID NO: 101966 - RNA, 65 nt, Homo sapiens
gagagcccaaacaccaccaccaagacacagagagagagagcccgggaaccccgacaacaggaaaa

SEQ ID NO: 101967 - RNA, 43 nt, Homo sapiens
gagcgggaggaagagacggagcgcccagaacagggcgccggcc

SEQ ID NO: 101968 - RNA, 82 nt, Homo sapiens
acccaaggaaagcacaaaagggaaagagacggagaaaagaagaacacgcccaaaacgacgggccaccgcgcccgacgaacca

SEQ ID NO: 101969 - RNA, 55 nt, Homo sapiens
ccgcaccagaagaagaaggccagaaaaaggccaaaacaccagaccagacccaacc

SEQ ID NO: 101970 - RNA, 60 nt, Homo sapiens
aagaaccggaagacagaggcggaggaagggaccacagaccagcacgccggcgccacgaac

SEQ ID NO: 101971 - RNA, 78 nt, Homo sapiens
acgagcaccggaagccagagaagggaagacagccgccaccaggcgcccccccagcaaccacccacagacccgagacag

SEQ ID NO: 101972 - RNA, 84 nt, Homo sapiens
acggcccggggccgggagcgcccgaggaacacgccgcagagacgagagccgaggcgccggaaacaacagccaacaaaaccaagc

SEQ ID NO: 101973 - RNA, 53 nt, Homo sapiens
accaggagcaacgagagaggcccccgccgagcacggccaggcaccggcaacaa

SEQ ID NO: 101974 - RNA, 70 nt, Homo sapiens
cagaggaggaaacaaccaacagaagaaaaacccggcaaacagagaggaagacgaggaagcagaagaacac

SEQ ID NO: 101975 - RNA, 73 nt, Homo sapiens
ggccgagaaacagagagaaaagagacggagcaagagaacgcaagagacgaaacagagaagcgagaaagagaag

SEQ ID NO: 101976 - RNA, 63 nt, Homo sapiens
gcagcgacaccaagacaccagaaacaagggcgcccgcggagaaggaaacaaagaggagcggcc

SEQ ID NO: 101977 - RNA, 74 nt, Homo sapiens
accccagccaccccagccagggaaccaagggggagaagagggagacccgaacgaagacgcagcccagacaggaa

SEQ ID NO: 101978 - RNA, 42 nt, Homo sapiens
ggcaaggacccccgagccaggaacagccaaaacagaaagaaa

SEQ ID NO: 101979 - RNA, 78 nt, Homo sapiens
aggaccagcaaaaaaagaacccaacacgcccggaccgacaggaaagaaggagcccacaaagaaaagaacaccgccagc

SEQ ID NO: 101980 - RNA, 63 nt, Homo sapiens
gccaaaccagaagaggagggcccagaagaaaaagggaagcgagaaccaggaacgaagaacaaa

SEQ ID NO: 101981 - RNA, 73 nt, Homo sapiens
aacagcgggaaagaaggcaaaacacggcgagacgacgggaccgaaggaccccgccagagacaaccgagcgcca

SEQ ID NO: 101982 - RNA, 75 nt, Homo sapiens
gagaccagccgagcggcggcccggggcagcccggcgggcgggggacgaccaccagccaggccggggacaaacagg

SEQ ID NO: 101983 - RNA, 84 nt, Homo sapiens
cagcgccccaggaagacaagaggagaaggggacaagagaaaagcacgaagcgggacaagcccagcagaggaaaagaagaaaggg

SEQ ID NO: 101984 - RNA, 76 nt, Homo sapiens
agacgcaagcggggcagaaaaacaaggcgaccggaacgcacaccaccgagggaacagagagcagacagacacacaa

SEQ ID NO: 101985 - RNA, 68 nt, Homo sapiens
agagacaagaggggagacagaacagcacgcggccggagcccccccagacacacgagggggacaccgcc

SEQ ID NO: 101986 - RNA, 75 nt, Homo sapiens
ccacagagccgaggcagccgaggggcacaccagaacaacacaaggggggggagaggacggcccagggccggcggc

SEQ ID NO: 101987 - RNA, 84 nt, Homo sapiens
caggagggaccaccggaacaagagcggaggcagccgcgcccaggaggcgccccaacgaagcgcgcggcaggcgcgcgccgcccc

SEQ ID NO: 101988 - RNA, 78 nt, Homo sapiens
gcggcaaacaggcggggaccggcgaggagcgaagaacaaacacccgagcgcgaggaccaccgagagcgcgccaaagaa

SEQ ID NO: 101989 - RNA, 53 nt, Homo sapiens
caaagacaaccagcgacccaccccggcacccccccggagacacccgacacgac

SEQ ID NO: 101990 - RNA, 88 nt, Homo sapiens
ccagggaagcgcagaaagcaggcgaacccgcggcgcaaaacgcccggagaagcaaggcccacgcggacgaagcccagccccccccgcc

SEQ ID NO: 101991 - RNA, 78 nt, Homo sapiens
cggagacggggagcgcgaggaccgcgggggcagccacaaaggacaagaagcgagaaaaagcaaccaggacaggcccgg

SEQ ID NO: 101992 - RNA, 54 nt, Homo sapiens
ggagccacagacagaacccccaggacacagcaggggccagacaaccagacccgg

SEQ ID NO: 101993 - RNA, 74 nt, Homo sapiens
gaagagcccgaacaaacaaacacccagaaacaagagccaaagaccacgggggccaaacaccaggagaagggcga

SEQ ID NO: 101994 - RNA, 62 nt, Homo sapiens
gagggagaacaagcaacggcgggcaccaagagagaagcacaagccgggacgggccccaacaa

SEQ ID NO: 101995 - RNA, 65 nt, Homo sapiens
ccacagaaccaaagcagaaaggagaagcaaaaagccacgagggacacaaggccagcagggcccag

SEQ ID NO: 101996 - RNA, 78 nt, Homo sapiens
gacccagacacggaaaacggagcgcagacacgaacgaggagccagggggccgggagaggaaggccccaagcagccagc

SEQ ID NO: 101997 - RNA, 73 nt, Homo sapiens
gaagaccggaggggacgaagaacgggagggcgaaccgccccacgagaccaaacgccaacgaaccacgcccgac

SEQ ID NO: 101998 - RNA, 73 nt, Homo sapiens
ggcacaaaaaaccgcaacgaacaacaacacacgcagccccaagaagcagcagggcgcacccccgagagagcca

SEQ ID NO: 101999 - RNA, 38 nt, Homo sapiens
gcagcagcaccagcccaagagaaggacaaaagagagga

SEQ ID NO: 102000 - RNA, 98 nt, Homo sapiens
gaaacgaaggagacgaggcccagaagaacaaaggggacgggcagagaaacccaaccgaggcaaaagaaacaaacacgcacaccaaaagccgcagaagg

SEQ ID NO: 102001 - RNA, 84 nt, Homo sapiens
cgagaaggagggaggggaaacacaaagccggcacgcgcgcgaggggaacagaggcgaaggcaagggcgcgagaagcacagcaag

SEQ ID NO: 102002 - RNA, 74 nt, Homo sapiens
gcggcagacggcgacagggcggcggcgccaggcagggcgcaggaaaggcccgagccaaaagacccagagaaagg

SEQ ID NO: 102003 - RNA, 69 nt, Homo sapiens
aaaaggaagagagaccgacacccaagacaagacagcgcaaggcagggggaccggcagacagcgaaccgc

SEQ ID NO: 102004 - RNA, 100 nt, Homo sapiens
gaaggcaaagagcggagcgaaaagaaaacggacgcagcggagccggcgagccagaagcgccggcagagggaaggaccccggacacgaggcaagcagaacc

SEQ ID NO: 102005 - RNA, 71 nt, Homo sapiens
aacaccaaaaacaaaacgaaccaggacggcaagaagccggagccagaggacggggcgaggccagcaccggc

SEQ ID NO: 102006 - RNA, 81 nt, Homo sapiens
cccgaggcaaaaagcgcccaagaccggagagagggagacgcagcaaaggaaaacaggcggcaagggcccccgggcggcgga

SEQ ID NO: 102007 - RNA, 78 nt, Homo sapiens
caggccgggggacgccggagaacggcccaaccgccggacgcagcgaaggccaagggaaaggaggcagcccgagagcag

SEQ ID NO: 102008 - RNA, 86 nt, Homo sapiens
gggcggcggggagcgggagcgcgcagcagggacggcccggagcggacaaaacacagacagacaaccaggaggcagcacaccggcgc

SEQ ID NO: 102009 - RNA, 75 nt, Homo sapiens
cagcccagaaagccgggacaaaggcccagcccccggacacgggcggccggaaggcgaggccccgccagcccgccg

SEQ ID NO: 102010 - RNA, 77 nt, Homo sapiens
gcccggcacaccaccaggggaggaggaaaacacacagacgaaggcaaaagaggagcccaggaagaccagcaaagaga

SEQ ID NO: 102011 - RNA, 70 nt, Homo sapiens
acacgaggagaaacagcagaaacgcaccaggccaaagaaagagaagaagagagaagggcacagaccaaga

SEQ ID NO: 102012 - RNA, 82 nt, Homo sapiens
ccggaggaccacaggcccagacgagcggaggaggcacagggcgcggaccgcacgagcgcggggccggccgcgcgaagacgcg

SEQ ID NO: 102013 - RNA, 71 nt, Homo sapiens
ggggccaggaaaggaagaggagagaaggcgaaggccagcaccacgaagaaagcccaggagccacgaaagca

SEQ ID NO: 102014 - RNA, 78 nt, Homo sapiens
cccgagaaaccgcagcacacacgccggagcgcgaagacgcagggaaagcggcacacgaaaggggcacggcaggacgag

SEQ ID NO: 102015 - RNA, 76 nt, Homo sapiens
acgaaagcccaggccaaaaagagacaagccagcgccagggagcacaaccacaagcccaggagagcccaggacggag

SEQ ID NO: 102016 - RNA, 87 nt, Homo sapiens
aaccccgggcggccgcaccgccaggacaaagagagacaccagagccagcagcccgccagaagaggcgagccacacacgagcccgagg

SEQ ID NO: 102017 - RNA, 76 nt, Homo sapiens
ccccgcccggcccgggaaacgaacaaacgcacggagcacagccagggcgaaagaagaccccgccaccggcccccac

SEQ ID NO: 102018 - RNA, 52 nt, Homo sapiens
agcccccgccaggcccaccaaggcagacccgcagaccaacgaaaaccacggc

SEQ ID NO: 102019 - RNA, 65 nt, Homo sapiens
acaagaagccagggacacaggaaaacggaagaccggccggccgaacaaaagaccggaacaaccag

SEQ ID NO: 102020 - RNA, 75 nt, Homo sapiens
agccagcaccgccgaccaccgaaacccaccgcccacgggggggccacgccgcccagaagagaggagccacgcacc

SEQ ID NO: 102021 - RNA, 92 nt, Homo sapiens
gccacccccgcggacagcgccgacgccggggcacggccacgcacgccggaaccaaaaagaagccccagagccggggccaggagccccaagcg

SEQ ID NO: 102022 - RNA, 75 nt, Homo sapiens
gcccagaggcacagaggacagacagggcggagaacggaaaagcaccaggaagcagagaggaccgcagaagggaag

SEQ ID NO: 102023 - RNA, 83 nt, Homo sapiens
gcgccggcccagcagcgcagccgcagccgggcggcagggccccgagccggcccgggcgaggaggcccagaccccggccccaca

SEQ ID NO: 102024 - RNA, 60 nt, Homo sapiens
ccacacccccccgggggggagaacacaaggaacgaaaggaagggaagaagcagaaccaag

SEQ ID NO: 102025 - RNA, 105 nt, Homo sapiens
cggggcagcgccaggagccgggggagggaaggaccggaccggagaacaccgcgcgggaagaagacgcagcggaaagaccccacagacaaccacagacaggccagg

SEQ ID NO: 102026 - RNA, 74 nt, Homo sapiens
gacggcccgaacggccagacccggagacgacccgacgaagcccacgccgggacccagcgcagaccccagacacg

SEQ ID NO: 102027 - RNA, 62 nt, Homo sapiens
caacagaagcccagccgacggcccacaagggcaagacaaacccagaaaggaggaacccaaga

SEQ ID NO: 102028 - RNA, 70 nt, Homo sapiens
ggacgagacggggggcagggagaaacaacagaaggagcaaagcaggccggaaaggaaaaacaccagaacg

SEQ ID NO: 102029 - RNA, 86 nt, Homo sapiens
ggcgcccgcgcccgccccaacccagccacagaggcggcagaagcacacaagaagacaccgcagcggcagccacgccacggacagac

SEQ ID NO: 102030 - RNA, 87 nt, Homo sapiens
aagaagcacccagcaagcgagggaccgggacgccacagccaggggcaaagaaaaaggagagaaaaagaggcaaaacaacaagaagaa

SEQ ID NO: 102031 - RNA, 93 nt, Homo sapiens
cacaggagcagggagacgacaacggcaagaaagcagcccaggggaaagcaccaagaagcagcggaagaagaagaagagagaaccggaacggag

SEQ ID NO: 102032 - RNA, 75 nt, Homo sapiens
cagcccacggcaaccaagaagaagaaaggcaaaccagacggggacccgaagacagcgagaagccacgcccaggaa

SEQ ID NO: 102033 - RNA, 68 nt, Homo sapiens
aaagcaaaggaagcggagaaccacaaacggcacacagggaccaagaagccccggggacacgcgagaaa

SEQ ID NO: 102034 - RNA, 89 nt, Homo sapiens
ccgccccgcgagcacagagcccgccgccgaccgccgcccgccacacccgccgccaggcgaccccgcacacacacccaccagccacggca

SEQ ID NO: 102035 - RNA, 72 nt, Homo sapiens
caacccccaaagacaggaggaggaaggaacggccaggagaacaaccagcaccgggacccaaacagcccgaaa

SEQ ID NO: 102036 - RNA, 78 nt, Homo sapiens
gaccgcggcccccggacagcagaaaccaagcagacaacgcagagggcgacgccaacaagggcccaagaagaccagaaa

SEQ ID NO: 102037 - RNA, 38 nt, Homo sapiens
accgcagcaacaacgggaaaaagggacaagaggagaca

SEQ ID NO: 102038 - RNA, 79 nt, Homo sapiens
gcgaaaccgagcaggcagagagcagaagaacacagacagcggaagaggagcagacacgcccaagggaaggaacagcaga

SEQ ID NO: 102039 - RNA, 41 nt, Homo sapiens
aacagaaagcgcagaccaagacacccaagaccgaagaagga

SEQ ID NO: 102040 - RNA, 51 nt, Homo sapiens
cagcgcgccaagcgaacggagagccagccgggagggaacaaaaaccggaag

SEQ ID NO: 102041 - RNA, 76 nt, Homo sapiens
gggaaggggcggcaccaaggaggacccacgagacagggacaggcggccaaaaggggggccccagcgcccaggcgga

SEQ ID NO: 102042 - RNA, 66 nt, Homo sapiens
gcaaagccccaagaggaccaccagggacggcgggacccggaggcggagaaggccaaggccgcaaac

SEQ ID NO: 102043 - RNA, 76 nt, Homo sapiens
cccacggccggaaccccccgggcgcccggagaccgcggaaacggccgggaaacagaagggcaaaacgaagcagcag

SEQ ID NO: 102044 - RNA, 68 nt, Homo sapiens
caaccccagaaagaacacagcgaggcagcaagagaaccccgcgcaacaacaccaaacgccggacaacc

SEQ ID NO: 102045 - RNA, 73 nt, Homo sapiens
ccaccacacggcccaaaaccgcagacggcccgccacgggccccgcagccgcgcccgagcgcccgagcagggac

SEQ ID NO: 102046 - RNA, 79 nt, Homo sapiens
ggagggcccaacccacagcgccccaggagggccccaaggcggcagccccgaccgacggggcaacgcgaagaaacaccgg

SEQ ID NO: 102047 - RNA, 66 nt, Homo sapiens
ggcggcggcgcccaggcacccggcccggaggaagcacccgcgagaaagaagggcacagcgaaacag

SEQ ID NO: 102048 - RNA, 80 nt, Homo sapiens
gcgcgcgcgccccgcgccgcagccagccacccgccagcagcaacaggccaacccaagcgccagcacaagaaaaggaacaa

SEQ ID NO: 102049 - RNA, 81 nt, Homo sapiens
gggaaccagcaacgcagggaccgcggcggaacgggcagggaaaccggagcggcagagcaggaaaggagcagaacccgggcc

SEQ ID NO: 102050 - RNA, 70 nt, Homo sapiens
gcaggaccagaaaaagcagagcaacggaagacagcccaagaaaccagccaccggcccccacaagcggaag

SEQ ID NO: 102051 - RNA, 65 nt, Homo sapiens
agccagcagccaaaggcgcggagccaacggaagcggagaagggaaagacaacccagaacggaaaa

SEQ ID NO: 102052 - RNA, 50 nt, Homo sapiens
agagcagggagaacacagcaacggccacgggaacacggcagaaccgacgg

SEQ ID NO: 102053 - RNA, 72 nt, Homo sapiens
ccacaccagacgagagagaccgagggaaagaaggcaacagagcagacagcccaaggaacagcagaagaacag

SEQ ID NO: 102054 - RNA, 56 nt, Homo sapiens
aagagggcgcaagggggaaggaagcaggcccaggcgagagcgcaagcagaacaagg

SEQ ID NO: 102055 - RNA, 76 nt, Homo sapiens
cgcaagcaggcaaccgaaacagaagacaaacagaccccagaaagaagaagaggaaagcccgacaaggaaggaagaa

SEQ ID NO: 102056 - RNA, 65 nt, Homo sapiens
aagcgggacccgcagggcaaaggggggaagaacaagcaaagcaccagacacagagaaagagcaac

SEQ ID NO: 102057 - RNA, 58 nt, Homo sapiens
acgagggcggaccacgccccacccaacaagacgacgaggaccggagccgcccgcgcgc

SEQ ID NO: 102058 - RNA, 55 nt, Homo sapiens
ggccagagaaggggaggaaccgaacgagcggaacaagcagaaagcacgaacaacg

SEQ ID NO: 102059 - RNA, 71 nt, Homo sapiens
ggcaggggcaggaagaacccacgggcagcacacacgaaagagaagccccggaggcagaagaggaacgggga

SEQ ID NO: 102060 - RNA, 83 nt, Homo sapiens
gcgcggacggaggacgagcccagaaccacgccacaaaccaccccccgacccgaagaacggccccgaagaagaggccgaccgga

SEQ ID NO: 102061 - RNA, 82 nt, Homo sapiens
gcggcaaggacgagccggggcgcgaagggagagaagcacaaggcgaccaccagcagaccggacaccgccccgggaaggcccg

SEQ ID NO: 102062 - RNA, 78 nt, Homo sapiens
gcgccaacggcgggagcacgggagaaggagccggaggcggggagaccccgcaccaggacagcgaccgaaacaaggacc

SEQ ID NO: 102063 - RNA, 63 nt, Homo sapiens
cgacgggacacgggcccacagaggacggggagccgaggaggagcaggagccgggacaccgggg

SEQ ID NO: 102064 - RNA, 87 nt, Homo sapiens
cgcgggcgcacgggagcccaacacgcggcacgagggccggcccgcgggcaggcccggcaagacgcgcaggaagaccagcgcgcggga

SEQ ID NO: 102065 - RNA, 71 nt, Homo sapiens
cgcaccaacgggaacgggacacaccacaggaagaacagcgcgagccacaaggcaaggaagcaggcggcacc

SEQ ID NO: 102066 - RNA, 75 nt, Homo sapiens
ccagaaggagaagaccgggggaggcagaagagggaagggggcaggcaacagaagagcgacacgcgcgacggaggc

SEQ ID NO: 102067 - RNA, 84 nt, Homo sapiens
agcgccaccacgaccgaaaagcgcgcccaaagggagcaaggaggaacagcgggaacgccaccggccgggggaacaccggccaag

SEQ ID NO: 102068 - RNA, 78 nt, Homo sapiens
cggaagccagcagcgcacacaacaagcgggcacgggggacccagcccggccccccggggcgggacaggagccggcgcc

SEQ ID NO: 102069 - RNA, 76 nt, Homo sapiens
gccgcacgccacagcgaaggcgcgagggacaagagcagaaacgaaacaagaaggcccaaacaggccaacacaggaa

SEQ ID NO: 102070 - RNA, 75 nt, Homo sapiens
gcaaacacaccaacagggaagaaaacccagaaagcaacacagagaccggagagcacacgagcaaaagaagagccc

SEQ ID NO: 102071 - RNA, 82 nt, Homo sapiens
cccggagccagcggggaggccgcgccgcgcgcgccggggaggagaagagagaggcgacaagccggcgagaaacaacggcacg

SEQ ID NO: 102072 - RNA, 55 nt, Homo sapiens
caaacgaaggagcaggacaagggggaccccacaccacaaaccgaggaaagaaggg

SEQ ID NO: 102073 - RNA, 56 nt, Homo sapiens
aagaaagaaaacgaagaccagccgaagagcaccacggggcccggcgacaggcaaac

SEQ ID NO: 102074 - RNA, 78 nt, Homo sapiens
ggacggagcacagccgaggcccgcgagggcgaggccgggagaggggaagcccggggcggcgacggagcacgacccaag

SEQ ID NO: 102075 - RNA, 80 nt, Homo sapiens
aaagggaggggccagcacgcacggacacccgagcacagagacgaagaggaccaggagcaaacagaagacacagcaggggc

SEQ ID NO: 102076 - RNA, 79 nt, Homo sapiens
aggaggcccggccaggaggccgcacccccggagcggaggcggaggcaggacgcagcaacagcgcgaggcgacggagcgg

SEQ ID NO: 102077 - RNA, 57 nt, Homo sapiens
ccgccagcgccgcaagcagcaagagaaaggagcagcagaacgaaggaagaagggaaa

SEQ ID NO: 102078 - RNA, 80 nt, Homo sapiens
cggcgaggaccaaccggggcccaaagggaccaaaagagacaaacacaaggcgccgcaaaaaaaaacgacaaagaagagga

SEQ ID NO: 102079 - RNA, 41 nt, Homo sapiens
cgccaggcacaaagaaggaaacaggggacgcccacaggggc

SEQ ID NO: 102080 - RNA, 72 nt, Homo sapiens
ccgcccgcccgagaacaccaggagacacaaggggagcaggacaacggccaaaagcggaacgagcagggccgc

SEQ ID NO: 102081 - RNA, 73 nt, Homo sapiens
agccaacacaacgccaacagaaaccgcggagaaggagaggggggaaacaagaccgggacgacccaaagaaaag

SEQ ID NO: 102082 - RNA, 76 nt, Homo sapiens
agggggacaggaggcgcggggcccaggcggggccgggcgggccgggaagggcaaggcagaagcccgaaaaaaaagc

SEQ ID NO: 102083 - RNA, 69 nt, Homo sapiens
agaaacacagggacacgacgccccaaggccccaacagacgcccgagggcagagcggcaacaggccaagg

SEQ ID NO: 102084 - RNA, 59 nt, Homo sapiens
ccggaaaccaacaagggcgccggacccgccccagagggaggcccgcccacggcgggcac

SEQ ID NO: 102085 - RNA, 86 nt, Homo sapiens
caaaggagagaggaccacccagaggagcaacgagaaagacagcaaagaaaaggagaagaaaggaaaaaaacaaccccgggcacccc

SEQ ID NO: 102086 - RNA, 51 nt, Homo sapiens
gcgccacccaggaggcggagcggcaaaaaccgaaagaggagggagggaggg

SEQ ID NO: 102087 - RNA, 87 nt, Homo sapiens
gcgcaacagcggcgggcggggcaccccaggcagaaagaggccagaagaaacaccagggaaggagaccaagaaccaggacggagccag

SEQ ID NO: 102088 - RNA, 76 nt, Homo sapiens
cccggccggaggcaccagcccgaggccgccggagccccagacaccccccacacaccaccgacgcgcaccacgagac

SEQ ID NO: 102089 - RNA, 81 nt, Homo sapiens
cccggagacccgggccggcccccaccagagaccggcacccggacccacacacacaggggagaccacggcggaacacacggc

SEQ ID NO: 102090 - RNA, 70 nt, Homo sapiens
cgcgaaacgcacgagaaggaggagggagacaggggcaaaaaacggcagggaagaggcgagacagaagaga

SEQ ID NO: 102091 - RNA, 70 nt, Homo sapiens
aaccaccagagcgaagggaggacacagagccgggaagacgccgaagggcgggagacccagcagaaagaca

SEQ ID NO: 102092 - RNA, 78 nt, Homo sapiens
ccacccggcaggaacccaagccccacaggagcggaagaagggcgaagaagagccacagccaagcaggccaggcggaca

SEQ ID NO: 102093 - RNA, 82 nt, Homo sapiens
gaggcaggcaagcaaagagcagagcaccggaacgggaccccggcaaagacggacaagcgcaggaagagagaagggcacagac

SEQ ID NO: 102094 - RNA, 39 nt, Homo sapiens
cgaacaaacggagcaagaggaccgaacgccaggaggagg

SEQ ID NO: 102095 - RNA, 64 nt, Homo sapiens
ggcgaaaaaaaggaagacacaagaaacagcccaagcggagcagaggaggaaggaccgagcgcag

SEQ ID NO: 102096 - RNA, 63 nt, Homo sapiens
acagagggccgagaaggacaggacagggacagagcgaagaaccccccaagaagacgaaacccc

SEQ ID NO: 102097 - RNA, 77 nt, Homo sapiens
cccaggcgcgcggagagcaggaacaagaggaagccgagcccgggcccccaagcgcacgccagcacggcccaaggaga

SEQ ID NO: 102098 - RNA, 71 nt, Homo sapiens
cgcccccagggcggcgcggcaaagccacccaggaaggcagacagcccagccaccacccgagaagcggcccc

SEQ ID NO: 102099 - RNA, 85 nt, Homo sapiens
aggaaaacaagccggcagaaaccaccaaacagggagcaagaggcagacagaccgagacgggcaaccaacaagaaacagacacacc

SEQ ID NO: 102100 - RNA, 76 nt, Homo sapiens
gacacacaacccgacccgacgacgaggaccagacaaaaggagaggcgcccccacacaaaaaggaacaaggagacac

SEQ ID NO: 102101 - RNA, 80 nt, Homo sapiens
ccaggcccaggacagcacgagggcgaaccgaccaagaacaacacccagagggccaggagaaggcgaagagagcagcgacc

SEQ ID NO: 102102 - RNA, 68 nt, Homo sapiens
ccccgagccagggaacagcggacgcaaccgcacaggagagggagagacgagggggcacccacaacaag

SEQ ID NO: 102103 - RNA, 53 nt, Homo sapiens
gagagaagcagccggaaagcccagaacagcacgagccccggagagaagaagag

SEQ ID NO: 102104 - RNA, 60 nt, Homo sapiens
gggccgcacccgccgagccggacccaaaaggcgggcgaaaacgccaaaaaccagacggga

SEQ ID NO: 102105 - RNA, 72 nt, Homo sapiens
gaaggagaccaaaccggaaaccgccaaaaccccccacacaccccgccgggcaagcgggacaagaagagaagg

SEQ ID NO: 102106 - RNA, 50 nt, Homo sapiens
gagaacaagcaaccacacgaaagaccacaaggaaagaaaagccacccaga

SEQ ID NO: 102107 - RNA, 83 nt, Homo sapiens
gcgcacggggaccgcaggcgccagaggagagaggagaggagagaagaggacccacaacagaggcgacccgcggcgagagcccc

SEQ ID NO: 102108 - RNA, 94 nt, Homo sapiens
caccaccagccacggggccaccaggacaagcgggcagaacagcgcggcagggaaccgaaccaccaggccaaaaagcgccggcagccccgaggag

SEQ ID NO: 102109 - RNA, 32 nt, Homo sapiens
gacgcaccaacgagggccccggaagaggaacc

SEQ ID NO: 102110 - RNA, 79 nt, Homo sapiens
gacacagcccgggcccgcgcagagggaaaaaggagaaaaggagcccaggacaacaggaagaggagccaaccgagaccag

SEQ ID NO: 102111 - RNA, 80 nt, Homo sapiens
ggaacccagaacggagggcacgagcgggccgagaccaggagcggagcggggaggaggggcgaggggaggcgcaggacccc

SEQ ID NO: 102112 - RNA, 77 nt, Homo sapiens
gggggagcaaagcgaacacaaggaggaggcgaaaaccagaaggcaccgacaggaaaggaaaaggagaaccaggcacc

SEQ ID NO: 102113 - RNA, 82 nt, Homo sapiens
gccggacggccaaggcccaacagcagggggagacgggcgccagcgccggaacgggaccacagacacaaggacaagaaagcca

SEQ ID NO: 102114 - RNA, 89 nt, Homo sapiens
agcacgccccaaacaaggcccacacggcggagaagaaggacaggggagagggccggcccgaggcggggggaggagcaggcgagcgagcg

SEQ ID NO: 102115 - RNA, 53 nt, Homo sapiens
gagaaaggcgcagaaccacagagaaaccccacagcaacagggagagaaaagcc

SEQ ID NO: 102116 - RNA, 70 nt, Homo sapiens
aagcaaaagagccaaagcagcagccccgacagccacggaacaggaagcagcaaaagaccaaaccagccaa

SEQ ID NO: 102117 - RNA, 74 nt, Homo sapiens
gaaggagaccacaggaaggaaggcgaaaaaccgaacccgacagagaaagccaacccagcgaaggaacaagcaaa

SEQ ID NO: 102118 - RNA, 37 nt, Homo sapiens
gagcccggcgccggcgagaccgaaaagacgaggcgag

SEQ ID NO: 102119 - RNA, 76 nt, Homo sapiens
cgagcgcggaggacgagggccagcgacggagagggcagaagaggaggagacacagaggaaaaagacaaaccagccc

SEQ ID NO: 102120 - RNA, 62 nt, Homo sapiens
cggccggcaagaagcgggcgcaagccagcagcaagaggcccccgccgcaccacacagccggg

SEQ ID NO: 102121 - RNA, 39 nt, Homo sapiens
agcgcccccgagcggcaagggcacaggcaggaggccgag

SEQ ID NO: 102122 - RNA, 90 nt, Homo sapiens
gggaaccggccagccagggccgggccgcgaccggccccggagcacaggcagaggccaagaccggcccaagaaggagaaaagaagcgaggc

SEQ ID NO: 102123 - RNA, 81 nt, Homo sapiens
gagagacggaccagaccagggccgagcacagccagaagcggggggcacgcagcgaagccacagaccccagaaacgggcaag

SEQ ID NO: 102124 - RNA, 78 nt, Homo sapiens
ggaaacgagcacgggcgaccaccgaagcaacaaggggaaggggcaaaagagcagagacacagcaccagagaaaaaaaa

SEQ ID NO: 102125 - RNA, 80 nt, Homo sapiens
acggcagaaccaaacccaccgcaagacagggaagcggggcagacccaaaggaaacgcacgaaagaaacaggagagcgcag

SEQ ID NO: 102126 - RNA, 78 nt, Homo sapiens
cgggaagcggaggccggcacgcccgcccgaggcgacggccgcggcgcacagggggcagcacgccgaaggagagaccag

SEQ ID NO: 102127 - RNA, 70 nt, Homo sapiens
acccgccacgcggccgagacaagggccgcccagacggagaagggcacgacaagccacgcagacgaacccg

SEQ ID NO: 102128 - RNA, 71 nt, Homo sapiens
aacagcaagcggcgggacgaccggcgagcgggggaacgcggacaggaagcaagccagaaagccagggacgc

SEQ ID NO: 102129 - RNA, 57 nt, Homo sapiens
cgagaaagcaagaagaaggaggcccaaagagagagacaagagagacaccccaaccga

SEQ ID NO: 102130 - RNA, 57 nt, Homo sapiens
ccaaacagcggcgcacggggcacaacagacgagcacgaagcggaacaaagggaaacg

SEQ ID NO: 102131 - RNA, 79 nt, Homo sapiens
cggcggggcaagcgcgcccccagcagagggcccggaacagagaaggacggagaagcgaaagccagaccggcaagagcgg

SEQ ID NO: 102132 - RNA, 75 nt, Homo sapiens
agcgaagcacccccagcggggaccgcccgggacaacagcgcggggcacagggccacagccgccaaggggcaaccg

SEQ ID NO: 102133 - RNA, 75 nt, Homo sapiens
caagccaaggaaggccgagaagaagcaaagggcaaccagggaaacaggagagccccggcagagccaccaccagcc

SEQ ID NO: 102134 - RNA, 73 nt, Homo sapiens
gaggacgggcccgggcggcccggcgagcacggcaggcggagccggcggaagaggaccaagaagggggcagcgc

SEQ ID NO: 102135 - RNA, 62 nt, Homo sapiens
gggcagcacacacgaaagagaagccccggaggagaacagcccacccaaggagaccagaaacc

SEQ ID NO: 102136 - RNA, 53 nt, Homo sapiens
aaaagcgaaaaaccggagccaacgaaacaaaaagcagcagagcggacaccaag

SEQ ID NO: 102137 - RNA, 47 nt, Homo sapiens
gagagccccacacacagccacacaggccacaagaccccggagagggg

SEQ ID NO: 102138 - RNA, 73 nt, Homo sapiens
accgcaccacccgggaacgagcagggaagcgagaacggggcagagacaagccgacaagaaaaaagggaagacc

SEQ ID NO: 102139 - RNA, 98 nt, Homo sapiens
gggccccaacccgcgcggcaagaagacggcgcggcaaccggggagcccgccagagcagagccgggcaggccacgcagaacaagacagggaagaggccg

SEQ ID NO: 102140 - RNA, 64 nt, Homo sapiens
ccaggaccccggcacaacccgacgacacacacagggcggagcggcaggaagccaaggaccaaag

SEQ ID NO: 102141 - RNA, 60 nt, Homo sapiens
ggccgcccccgaagagacccaaaaaggagagccaagaggaaggaagcccaacaggagaaa

SEQ ID NO: 102142 - RNA, 79 nt, Homo sapiens
ccaccagggcggcgcacgggagcgccaggcaaccgacgccaggaagagccagaccgcacagccgccaaagcgccgagcg

SEQ ID NO: 102143 - RNA, 107 nt, Homo sapiens
agggaaacccagacgcaaaggaacaagcgccaccaaggaagcccggcaaacgagacgcgggaacacaagcggacggaagcggacgacgaggccaccgccggcagcga

SEQ ID NO: 102144 - RNA, 80 nt, Homo sapiens
gcacccccccagggaccagccgacgccgggcacaggcccgggcccccgcggaggacagccaccaaggcgggaagagacaa

SEQ ID NO: 102145 - RNA, 72 nt, Homo sapiens
gcagaaagcagacacccagaggaacagccacagggccagaagccaaaagcgaggccgaccccgacaccaaga

SEQ ID NO: 102146 - RNA, 71 nt, Homo sapiens
aaccagggcggcggccagcgccacgcgccaagggggaacaagcgcggaagccggacgcgcaacagaaacag

SEQ ID NO: 102147 - RNA, 77 nt, Homo sapiens
gagacacgccagggacccagacacacaccacaggacaaggccaacaggaaaaaggaaacaccggaaaccggaaacaa

SEQ ID NO: 102148 - RNA, 58 nt, Homo sapiens
cagaaccagggccgggggccaggcgcgcacagagcacaccccgggagcccacccccaa

SEQ ID NO: 102149 - RNA, 69 nt, Homo sapiens
caagcagcagcgaagccggaaccaacagagggccagcaccccgcgcagccgaagaggcgggagaacaca

SEQ ID NO: 102150 - RNA, 73 nt, Homo sapiens
gcaaagaagaagaccgggacgacgggccggaaagagaagcacacagggggccaggggaaggaccgcccacagc

SEQ ID NO: 102151 - RNA, 57 nt, Homo sapiens
ggccccccgggccgcggcccacgcccgcggagcagccgcacaacaaagagagcaggg

SEQ ID NO: 102152 - RNA, 87 nt, Homo sapiens
ggggggagagaaggagcaggacccccgcccacccggcccgccaacagcacggcccaccagggggggcggaagcgggagcgcaaggcg

SEQ ID NO: 102153 - RNA, 75 nt, Homo sapiens
cagggcggcggccagcgccacgcaaaaaaccgggaagaccgacggagccccagcagaagaccagaggcgggcccc

SEQ ID NO: 102154 - RNA, 72 nt, Homo sapiens
gccgccggcccccaacagcgccgggccacagccgccaaggggcaaccgcccaccaccagaccccgggacccg

SEQ ID NO: 102155 - RNA, 64 nt, Homo sapiens
gcgaaaagcacagaccccggaaacacccaccaccgaaccaggacagcagaccacagcccggcag

SEQ ID NO: 102156 - RNA, 81 nt, Homo sapiens
cagaggcgcagcaaacgccacagaaacggacgacacgagacccaagcgaaggcagccggaggaagaagagcggaccgcgcc

SEQ ID NO: 102157 - RNA, 76 nt, Homo sapiens
ggcggccgaggagaggcagggcgcgagggcgggggcagcggcaggaacgaggcgcgacacaccagcggagcggggg

SEQ ID NO: 102158 - RNA, 70 nt, Homo sapiens
gaaacgagaggagggcggaaagccaagaacaggccacggccccaacggcgcccagaccggagcaggagag

SEQ ID NO: 102159 - RNA, 83 nt, Homo sapiens
cacccacgagcccggcaaaagcgcacaaacgcccaaggaaaggaagaggaagggaaggcagacaaagaacaggcaaacaagcg

SEQ ID NO: 102160 - RNA, 52 nt, Homo sapiens
accagcagacggcagaggagcgcccaacaacagaccccaggggcgcggacga

SEQ ID NO: 102161 - RNA, 68 nt, Homo sapiens
gaaaagggagacagaacagggccaagggcggagcacgagaaagcggcaccggcagacgaaaagagaag

SEQ ID NO: 102162 - RNA, 81 nt, Homo sapiens
cgccagcaaaccacacagcccgggcgcgccaggcacagccaagagcggaccggcagcggccagcgcagcggccggagcaga

SEQ ID NO: 102163 - RNA, 73 nt, Homo sapiens
cccccgaaacaagaaagcagaaccagcagcaaaaggggcaaggggaaaagacaggcaaaaaccccccacgaaa

SEQ ID NO: 102164 - RNA, 71 nt, Homo sapiens
gcgggaaaagaacaaaggcgcaaacccaaaaggagggaagccacagccacgacagacagaaccaagaggga

SEQ ID NO: 102165 - RNA, 84 nt, Homo sapiens
caccagggagaagcaaagacggcaagggcagccgcaaggcagaccaccgaagcagaaaggaggcgggacagacacaaagaaacg

SEQ ID NO: 102166 - RNA, 73 nt, Homo sapiens
gaaggggaagaagacaaaacccaccagccccagaaagagccacaggaaacagaacgcgacaacagggaagaag

SEQ ID NO: 102167 - RNA, 82 nt, Homo sapiens
cccgcgcgcgagccacgcagcccccagacacacggcaaagacagggcaacagcgaccacggaaggcgcagcgaccgcccacc

SEQ ID NO: 102168 - RNA, 76 nt, Homo sapiens
caaagggaagagcaggagccgaggcaaaacggacacagaagacagggacccggacaagccagaagcaggacggcac

SEQ ID NO: 102169 - RNA, 76 nt, Homo sapiens
ccaaggagaagaacggagacggcgccggcggcgccggagcaggggaccaagcacgggcgcccacgaacgccaagcc

SEQ ID NO: 102170 - RNA, 74 nt, Homo sapiens
acacgggagggaaagagagcgaggagacggcgaccgacaacgaagcgccaccaaacgggcgggaagcgcgacga

SEQ ID NO: 102171 - RNA, 80 nt, Homo sapiens
ggcggcggaggaagccggagacagcaggggacaggaacagagacgcaggcaagagcgcggaggagagagccaaaagaagg

SEQ ID NO: 102172 - RNA, 71 nt, Homo sapiens
gcgggcgggccggcgagcgcagcgcgaccgggaggcccagccgccacaagcgaaggaagacacgccgcacg

SEQ ID NO: 102173 - RNA, 83 nt, Homo sapiens
ggggcccgaggcagcacccgggagccgcaaggcgagagcgcaaagggcccgagggccggggacaaccacagcagcggggagag

SEQ ID NO: 102174 - RNA, 69 nt, Homo sapiens
gcgcgaaaacaccggcgaggcggcccagcacccccgaggccacagagcagggcaacaggcaccgacaga

SEQ ID NO: 102175 - RNA, 80 nt, Homo sapiens
gcacaggaagaaggaaaccaggaaaacaaagcagccaacagacaccaggaagagcaaaccaagcagcgcaagacccaaac

SEQ ID NO: 102176 - RNA, 80 nt, Homo sapiens
gaggacaggaccccagaagaacacagcccagcaagaaggcggcaggaccacaccccaagccaagcgggcaccaaccaccc

SEQ ID NO: 102177 - RNA, 75 nt, Homo sapiens
ggaccagagccagacacgaagagcaccaagcggaaaacgagacgaaggacaagggaccaaaaggcggacccgcag

SEQ ID NO: 102178 - RNA, 79 nt, Homo sapiens
gcgggcacagccccgaaggagcgcagagggcgggggcgcaaggcacgggaaccggaaggaaggccggcagccacggacc

SEQ ID NO: 102179 - RNA, 40 nt, Homo sapiens
gaacggagacaagaaaacgcaggccagcgcgcaggcccgg

SEQ ID NO: 102180 - RNA, 81 nt, Homo sapiens
cagcccgccacacgggcacggccgagaggagggagacccaggaccaagaacaaggggcacccgcaagcccaccggaagcga

SEQ ID NO: 102181 - RNA, 77 nt, Homo sapiens
gagccgccccaccacacagcaacggacaaagagggaacaggcacgccccacccgccagccgagcccccgacgcagca

SEQ ID NO: 102182 - RNA, 76 nt, Homo sapiens
gccgcacgcccgcgaaggccaacagagcgcggaggagggaggggcggaaggccgaagcccgagccgagccagccag

SEQ ID NO: 102183 - RNA, 83 nt, Homo sapiens
cacgccaaccagccgaaggaggaagcagcaaagcagcgcgcagcgcagccaagaacaaaacagggagaaacccgaaccagcgc

SEQ ID NO: 102184 - RNA, 77 nt, Homo sapiens
gaccggaaggccagagcccccacagagccgcccaacccccaaagcagacggagcgagcggcgccccggcccggccac

SEQ ID NO: 102185 - RNA, 68 nt, Homo sapiens
aggaagcaggaaggaccacccaagaacccacaacaccaacagcccaccaacgagcgacggccccaacc

SEQ ID NO: 102186 - RNA, 78 nt, Homo sapiens
gcacagcacgcccggcaccccgaccagaacagacacggaacacgggaaggagaggcgggcgggagaacgaggggccag

SEQ ID NO: 102187 - RNA, 44 nt, Homo sapiens
acaaaggaagacgaaccggagaagaggacagggccaaagcggca

SEQ ID NO: 102188 - RNA, 76 nt, Homo sapiens
aaaaagacgcaggcgacaaaagaaaacgacggaccagaggcccacgaaaggccaaccagaagacggagcaggcaaa

SEQ ID NO: 102189 - RNA, 81 nt, Homo sapiens
acacccaagacgacggaccacacgaggggacacaagccggaaaggccccgagagcaaccgcaggacggggagcaacacagc

SEQ ID NO: 102190 - RNA, 77 nt, Homo sapiens
gcggccggcgcggcggggcgcggcagaggcgcccgacccggccagcacgccgcggcgcgagcgacgccgacaaagga

SEQ ID NO: 102191 - RNA, 82 nt, Homo sapiens
gcgggacaccgcaaccccgcagagcgcaccacaaagcgcgcaacgccaacccaggcgagagcccagggcacgggcacgccag

SEQ ID NO: 102192 - RNA, 56 nt, Homo sapiens
acagaagcggaacaccagacgaaacagggggagaccgagcaaaccgcgaccaagac

SEQ ID NO: 102193 - RNA, 84 nt, Homo sapiens
aggagccggcgcggcgcagcccacggcgcaggcccacggagcgcagccgccgaggcaaggagagagacaccacacaaaaaggaa

SEQ ID NO: 102194 - RNA, 75 nt, Homo sapiens
gacggagggcgggcaacacagcgcaaggcaacgcgagggccacgaggcccacagcagcggggccaggcccccccc

SEQ ID NO: 102195 - RNA, 75 nt, Homo sapiens
cccgcagcagcagcccaaaggaaggcggcgcaaccgaccccagaaggacagccaagcgccagaagggaagcaacc

SEQ ID NO: 102196 - RNA, 79 nt, Homo sapiens
ggcggccgcgcggccgggggcgcgggcggcggcgccggcaggaaggggcccgccagcggacagccgccgccaacgacag

SEQ ID NO: 102197 - RNA, 78 nt, Homo sapiens
acaagacggccggggggggaccaaacgagaggcgggcaggaggacccaaacgaaggcacgaggcgaaccggccaccaa

SEQ ID NO: 102198 - RNA, 83 nt, Homo sapiens
gccgagcccgggacggcagcggccggggacccagcaaggacgaaggacaggcgggcgggacccccaggcgccacagaggggcc

SEQ ID NO: 102199 - RNA, 70 nt, Homo sapiens
gaaccagacagcagagagagagcggaacgggagaaagcacgggaggagagcgaccaccgagacaagccgg

SEQ ID NO: 102200 - RNA, 79 nt, Homo sapiens
gccccccagcaccgaagacgcgaggaccaaaggagaaaaggagggaccagaaccgggaagacagcggagcgaaacacaa

SEQ ID NO: 102201 - RNA, 75 nt, Homo sapiens
cgaccgagaaaccaagaggacaaagcgaagagaacagacgacgggagaggcacacagagaaaaaaagggaacaaa

SEQ ID NO: 102202 - RNA, 55 nt, Homo sapiens
agccgccggaagggcgcccgcagccccccacggcgcacgcccccagccccccccg

SEQ ID NO: 102203 - RNA, 80 nt, Homo sapiens
gccaccggcaagacccacccgccacggcaccaggaacccgagaagaagcgaagaggaggcggaagccggaggacagcccg

SEQ ID NO: 102204 - RNA, 78 nt, Homo sapiens
ccaagccgaggagacaaccccgaggggagcagggcagcaccccccacgcgcgagaggcagaaaagcgaacagacgaaa

SEQ ID NO: 102205 - RNA, 57 nt, Homo sapiens
cgcggaccagaagccagagcgaggacgccggcagggcggagaacggaaaagcaccag

SEQ ID NO: 102206 - RNA, 74 nt, Homo sapiens
gggggccagaagcgggcggcccgcgacgaagaagaagccgcagacccggcggacccaaagagcagacaacaccg

SEQ ID NO: 102207 - RNA, 68 nt, Homo sapiens
gccgacacaacaagacagacgccaggggaagaagcgcccaaagccggaggcgcgaccagaacccaccc

SEQ ID NO: 102208 - RNA, 77 nt, Homo sapiens
aggggagcgggggaacggaagaggcggggagcggccccagcgcagaacggaggcccaggggacacccagcaggccag

SEQ ID NO: 102209 - RNA, 57 nt, Homo sapiens
cggcggcggcggcggcggcggcgcagccagggacacgcacagcgcccaacacaacag

SEQ ID NO: 102210 - RNA, 73 nt, Homo sapiens
cgaccagcaccgccgcccaccacccgacccagagcccccgcccgacaaagggcagaacgggacaaggcagaag

SEQ ID NO: 102211 - RNA, 93 nt, Homo sapiens
gagggcggaccacgccccacccaacaagacgacggccgcgcgcggcccgcgcagcgcggcagacagggccagagcggaaggaggagggggacc

SEQ ID NO: 102212 - RNA, 54 nt, Homo sapiens
ggaaaaggccgaagaaaccaaggaggacagaaacaacgaacgagcaaggaaggg

SEQ ID NO: 102213 - RNA, 72 nt, Homo sapiens
ggagaggacgaggaggaacccacacccccaaggcacggggccacaccacgaaggggggcaggggcagccacg

SEQ ID NO: 102214 - RNA, 78 nt, Homo sapiens
gaggaaaacaaaagcgcacaggaagaacaaagggcacaacaacaaccaaaaaacaagcagccaacaaacaaggaagga

SEQ ID NO: 102215 - RNA, 62 nt, Homo sapiens
gacgccagacaccacgaagggcacacaagcgggaagagggcagcagaagacaggccggaacc

SEQ ID NO: 102216 - RNA, 62 nt, Homo sapiens
agacgccagcaaacacgaggaaagaagaaaaaaccaccgggaaccggcgggaccgccagaga

SEQ ID NO: 102217 - RNA, 60 nt, Homo sapiens
gaacggagacaaaaacggcccggagaggagacggaagacggcagcggggggagcagcaaa

SEQ ID NO: 102218 - RNA, 72 nt, Homo sapiens
agcacgagcacgccaccggcgccagcgggcgagaggagaagcgcggcgaggagaccaccaggaagaagccac

SEQ ID NO: 102219 - RNA, 77 nt, Homo sapiens
cacacaaaaaacccacacaggacgcggacaagggcggcagcccccaacagggaacagcggggcacacaggcgggaaa

SEQ ID NO: 102220 - RNA, 85 nt, Homo sapiens
ggcagacgagcagccgagaacccggcacaccagggccggaagcccaagcgggcaagcgcgcggcaggacccagaccggaagggag

SEQ ID NO: 102221 - RNA, 81 nt, Homo sapiens
aaacacccgacagaaccggaagggagaaggaagagaccgggagccggcaagagccgacggaaacacgcgcgcaagagcaga

SEQ ID NO: 102222 - RNA, 77 nt, Homo sapiens
caggaaccaggacaacaagcagacgccaaacaagcaaacggcaccccaccaggggacaaaagacggcccaccacgcc

SEQ ID NO: 102223 - RNA, 79 nt, Homo sapiens
caacacgagcagagacacgggagcaaaaccagaacaggagcacgaaaaaccgaacgagacaacagccaacgacaggcgc

SEQ ID NO: 102224 - RNA, 78 nt, Homo sapiens
gccagaccaggcaagggccaaggcgaccaagggaggccccgggaggccgaggcggcccaaaggcaggcccggcaccga

SEQ ID NO: 102225 - RNA, 82 nt, Homo sapiens
cgaacgaacacccaacaagccgcaacgaaaaccggaaaagggggcaaaggagcagagaacgacaagccacacgaggacagcc

SEQ ID NO: 102226 - RNA, 71 nt, Homo sapiens
acagacggggacgggaaccccgagagaagagagcaacaaagacacaagaggaaaacagaaagaacaaagaa

SEQ ID NO: 102227 - RNA, 74 nt, Homo sapiens
agggacccgagccagggcagagcccagaggaggcggggcaccaggcccagacggcgaacccgagcaagcaacca

SEQ ID NO: 102228 - RNA, 74 nt, Homo sapiens
aacgcagagaagaaacacggcaaaaagaaaaaccagcgaagcacagaggaccacagcccacgaccaggcaacgg

SEQ ID NO: 102229 - RNA, 82 nt, Homo sapiens
aggagaagcaaggcgacgccagaggaggaaaggaagacaagaaagaggcaggcaagcgagaaggaggacagggagagaagac

SEQ ID NO: 102230 - RNA, 79 nt, Homo sapiens
accccacggccgccaggcgccgcgccaggacggcagccagacgagcagggccgcagcaggccgcagcgccaaagaccac

SEQ ID NO: 102231 - RNA, 67 nt, Homo sapiens
cacgggggagccacccggcggaaaacgcacgcaaggcgcaaaagggaagaacaggccgaaaacgaac

SEQ ID NO: 102232 - RNA, 62 nt, Homo sapiens
gcccgccgagcgcaacagcggcgggcggggcaccccagccggaaggccacaggaagaaaaac

SEQ ID NO: 102233 - RNA, 79 nt, Homo sapiens
aaggagccagcagaaagacagggcggggaacacagaggaaggacggcgggggcagggaaagcccgagaagagggaacac

SEQ ID NO: 102234 - RNA, 77 nt, Homo sapiens
cgcggacgcaaaccgagccccgcgccgcagaccaaggcaaggaaacgaccaacccaggacagaaaggaccggacaag

SEQ ID NO: 102235 - RNA, 74 nt, Homo sapiens
aggcacccgccacggcaggcagacaagcggagaaaggcacagcagaagaagaaacagaagaagaagagcagagg

SEQ ID NO: 102236 - RNA, 80 nt, Homo sapiens
gagggggcccgaaggaccggcgcgggaccaagacaaccccggcacgagaaggaaggcagagcccacaaacccaagcagca

SEQ ID NO: 102237 - RNA, 64 nt, Homo sapiens
aaaccaaagggaacgggggagagaagccacaaagcaagcaggaaagagcccgccagaagggacg

SEQ ID NO: 102238 - RNA, 84 nt, Homo sapiens
gcccgggagacaagcagaagcccggacccagaacgcacaacaacgaggcaggccgaaaggccgccggcacccccggcgcaaccg

SEQ ID NO: 102239 - RNA, 57 nt, Homo sapiens
cggcaagagccagaagcccggcggaagacacaagacacccaagaagcccagcagacc

SEQ ID NO: 102240 - RNA, 71 nt, Homo sapiens
ggcccccagaacacaaggagagcaggccacaggaaaccgaagcccccccagccagccaggagccacagaaa

SEQ ID NO: 102241 - RNA, 66 nt, Homo sapiens
gccaaggagacaccccagaacaaggagcgcaagagaacgacaacccacggcgacgggaaggagcca

SEQ ID NO: 102242 - RNA, 69 nt, Homo sapiens
cagacaacaccaacagcgccgaggacaccagaggaagaacccgaaacaagagagacccaaaagggccag

SEQ ID NO: 102243 - RNA, 60 nt, Homo sapiens
gcgggcgaaggcagcccacgagggaccgagcaccgcagaccgccgaggagaagcgccccc

SEQ ID NO: 102244 - RNA, 102 nt, Homo sapiens
cccagaaaagaacagggggggggcgggcaggccggccacagacaagaaggcccaaagcaacgcaaggagcagcaagagaagcaagaggagagaaaaccccag

SEQ ID NO: 102245 - RNA, 85 nt, Homo sapiens
cacgaccaacagccgcagccaggccgggggcgccgcgacgcggggacagcaacggagcgggagagcggggcaaggagagccaagc

SEQ ID NO: 102246 - RNA, 94 nt, Homo sapiens
ccccggcggcacggcgccgaccagcaccaggggaagcgggacaacgggggcgcacgcgggacagagcacccgaagcgcccagccagcacgccac

SEQ ID NO: 102247 - RNA, 90 nt, Homo sapiens
gaaggagcaagaacccagaagaggcagcagcggaaggcagcgggagccgaaaacggaagagcaagcgcgcggacccgcagcggagcgcaa

SEQ ID NO: 102248 - RNA, 83 nt, Homo sapiens
cgccggcccgagaaagcccgccagcagggaaagggagcagcaccggccacacccacagcacgaccggaacccagcgaccgacg

SEQ ID NO: 102249 - RNA, 70 nt, Homo sapiens
gaagggaggagcagcccaacagaaggaacaaagggcagaagcagagaacagaggccgagcaggagaaagc

SEQ ID NO: 102250 - RNA, 60 nt, Homo sapiens
ggcagcagcgcaccccaccgaccagcggacacggggcggagaacggaaaagcaccaggaa

SEQ ID NO: 102251 - RNA, 60 nt, Homo sapiens
caagcccacccagaaaaaggcccgggacccaggaaccaggagagaaacaaaccgggcaag

SEQ ID NO: 102252 - RNA, 82 nt, Homo sapiens
gcgcgcgaaccccggccccacagccccgcgcacaggccccgggcagcgagagcccagagaagggaagaaagcggaaaagaaa

SEQ ID NO: 102253 - RNA, 72 nt, Homo sapiens
aaacaaccgaaagaaggcggaaccacacagcagcagcccgggaacgaagcagagcgaagagccaccagcggc

SEQ ID NO: 102254 - RNA, 59 nt, Homo sapiens
gcaacaccaagcaagggacaaggagccaagaaaccacaggcggcccggcccgcagacgg

SEQ ID NO: 102255 - RNA, 77 nt, Homo sapiens
cgagcaaggaaacaggaaaagcaaccacgccaaccagccgaagcgggcaggcaggagagcccgagcagcaccaaagg

SEQ ID NO: 102256 - RNA, 78 nt, Homo sapiens
caccgcgaaagccccaggggccaggacccacaggaagaccgcaggaaagcaggaaggcaagaaagccaaggacgaaac

SEQ ID NO: 102257 - RNA, 78 nt, Homo sapiens
cacccgccgccaggcgccgggggccgaacggcccggacacccgcaggccccagaagaagggacacgagaaacgaagca

SEQ ID NO: 102258 - RNA, 78 nt, Homo sapiens
cacaaccgcggcgcagaccaggcccgggccaccacccaccaagggagcaccaggagggggcccgcgggaagaaccccc

SEQ ID NO: 102259 - RNA, 75 nt, Homo sapiens
cacgcccagcgagcgccccacacagggagacggacggaacgcggcgcgaccagaaaaccgagaaagccgagaaaa

SEQ ID NO: 102260 - RNA, 70 nt, Homo sapiens
ccgaacggagcagacaaaggaaacagcaaacgacacagaagaacagagccagcccaaggcaaacacacgg

SEQ ID NO: 102261 - RNA, 44 nt, Homo sapiens
aacaaaacacaaagacgaccggaacagaagaagaggccacgcaa

SEQ ID NO: 102262 - RNA, 74 nt, Homo sapiens
gcccgacagggaaggagcggagaacacaggaaccggccagggacggaaagcacccgaggagaaagggaacgaaa

SEQ ID NO: 102263 - RNA, 81 nt, Homo sapiens
agcacgaggcccaggaggagcgaggaaagcgcaaaggaaaacgaagggcccgggacaagagggcggaaacagcagaagagc

SEQ ID NO: 102264 - RNA, 72 nt, Homo sapiens
agcggcgacgacacggccagacggcccgccacgggccccgcagccgcgcccgagcgcccgagcagggacagc

SEQ ID NO: 102265 - RNA, 74 nt, Homo sapiens
caagaacgaaaagccaagaacaagcacaagaagacgacagcgaacacccgaaggagccagcaacagaggagaac

SEQ ID NO: 102266 - RNA, 68 nt, Homo sapiens
cgcgccgcaggcggcagcaggacaacgagccacggaggcggagagagacagcgaagccccgagagaag

SEQ ID NO: 102267 - RNA, 66 nt, Homo sapiens
ggagaaggaccaagaaccagagcagcagcagagaaacgagcagaacaaaaaggggacaagagaccc

SEQ ID NO: 102268 - RNA, 72 nt, Homo sapiens
agcaggagcgagcgcacgaaaacagcagagcgccacagagccaagaaagggagggggaaacagccaaggccg

SEQ ID NO: 102269 - RNA, 74 nt, Homo sapiens
gagcggaagggcagcgccaacagaaaggcggaacagaagcgccggaagaaaagagcgaaaaaaggcggccgaac

SEQ ID NO: 102270 - RNA, 75 nt, Homo sapiens
cccaaaggggaagacagggacggaccacgggaccaagcagacaaaccaagggacgccaaccccagaccaaggcac

SEQ ID NO: 102271 - RNA, 75 nt, Homo sapiens
cgcagagcgccgaggaggcccgcggggcaaccgccacgagacaccaaggaacaaagggcagaagcagagaacaga

SEQ ID NO: 102272 - RNA, 73 nt, Homo sapiens
agaacaagagaagacaccgggacccggacgaacacaggggacgcgaagggcaggaacaggacaagcgaaccgg

SEQ ID NO: 102273 - RNA, 76 nt, Homo sapiens
cggacgaaggcaggaagcacgggggcgagaagggagcgggacagggacaaccgccaacacaccaggagagaaagac

SEQ ID NO: 102274 - RNA, 87 nt, Homo sapiens
ggagggcaaaccggaacccacccgagagcaacaaagcaggcgacacagccacggaaggaggaggaagccaagaacgggagcgaagcc

SEQ ID NO: 102275 - RNA, 66 nt, Homo sapiens
gaggaggaaccagaagaagccagcccagaaagggaaaacgacaccagggaaaaagaagaggaaaag

SEQ ID NO: 102276 - RNA, 90 nt, Homo sapiens
ccggaggagccagagcgcagaaagggcgggaagcacaagacaaaccaagaaccagaaacagaagcagcacgcgacggagaaacacacccc

SEQ ID NO: 102277 - RNA, 73 nt, Homo sapiens
gagaaggggccaggcaggaggcacccaaggggagggccagccgccaggagcagggccgccccgaggagagcga

SEQ ID NO: 102278 - RNA, 77 nt, Homo sapiens
aaaccagcccccgagcaggagcggccccccaccgccacccaagcgcagccgcacaaacacgcagaggcaagaagaga

SEQ ID NO: 102279 - RNA, 78 nt, Homo sapiens
cagcggcagacaccgccgcggcgaggccccccagggaggagcacaccgagaggacaaccagaccgagccccccagcgc

SEQ ID NO: 102280 - RNA, 73 nt, Homo sapiens
aaaccacaggaaacacagcaccgacccaaggcaagacaggagaaccagccaaaaaagggcagaaccgacaacg

SEQ ID NO: 102281 - RNA, 86 nt, Homo sapiens
aaacgggacccggagggaccccagggcaacagcgcaacagcgagcaggcacgggcagggagggcacgccacgcacagcggcagccc

SEQ ID NO: 102282 - RNA, 59 nt, Homo sapiens
gagaaaaaagggaacaccggaagagcaaggcgacaccaaacaaacggacccaggacaaa

SEQ ID NO: 102283 - RNA, 79 nt, Homo sapiens
gcgccccccacagagaaaggccccgaagagcgaaagcgccaccggaggccgagccaccaccagacaagcacagagaccc

SEQ ID NO: 102284 - RNA, 36 nt, Homo sapiens
gaagccagccccgaggagggccggggaccggagagc

SEQ ID NO: 102285 - RNA, 83 nt, Homo sapiens
agcggcagcccacggagcccagcgccacgacaggcggcagccagggggaacacccaggccaggaggaagcgaagaaagagcca

SEQ ID NO: 102286 - RNA, 70 nt, Homo sapiens
caaagaacagggcaggcaaaccaggaagggaacaaccggggccagggccaaccagaagacggagcaggca

SEQ ID NO: 102287 - RNA, 75 nt, Homo sapiens
gccagcaagccggccaaacaacaagcagaggagcgagccgagggaccgccaggccggggaacgccacccagccgg

SEQ ID NO: 102288 - RNA, 83 nt, Homo sapiens
ggcgggggcggccccccgggccgcggcccacgcccgcggagcagccgggcgacgccaggagcacaccgaaaagaaaggaaaac

SEQ ID NO: 102289 - RNA, 81 nt, Homo sapiens
ccagggaagcccgggaccgaaaaaacggaccccggaggaaaagcggaagcggcagcggcgaacgccggaacggaccaacag

SEQ ID NO: 102290 - RNA, 78 nt, Homo sapiens
accgcgagcggcgcagcgagccgcggcccgggcgggcgccggcgcggggacgcacaccacagacaaaggcacgcaaca

SEQ ID NO: 102291 - RNA, 76 nt, Homo sapiens
accgcccgccgcggacccagcgccgcggcgcccgagcggcgggccgcagagggggagccacggaccagggggacgg

SEQ ID NO: 102292 - RNA, 61 nt, Homo sapiens
ccgcgccacccggggccgccgcgcaggagcccccggagcggagacgagagggccccaaagg

SEQ ID NO: 102293 - RNA, 75 nt, Homo sapiens
ccaggaagaaagagaggaaagaagaaaaccaagaaagccccacgagaaacagaagcggagagacagggacaaggg

SEQ ID NO: 102294 - RNA, 77 nt, Homo sapiens
gaccgcaggcagaaagcccacgaccgccccagaggcaccaggggacaaacggagccggagagcgcgcaagcaagagg

SEQ ID NO: 102295 - RNA, 74 nt, Homo sapiens
gaacacaggaaaggaaggcgggagggacaagaagaaaggggaccgagagccgggaaggccgacagggagacgac

SEQ ID NO: 102296 - RNA, 59 nt, Homo sapiens
cgccacgcagaacagccaccaagaaaaggcacacacacccgcaggagagcgccggagaa

SEQ ID NO: 102297 - RNA, 76 nt, Homo sapiens
ccgggacgaagaaaaaccggagggaacgccgcagaaagaagaaggggcaagaacagccacagcagagacaaaaaac

SEQ ID NO: 102298 - RNA, 52 nt, Homo sapiens
acacacgaaagagaagccccggaggcaccgcgcgccgcgcccccccaccagc

SEQ ID NO: 102299 - RNA, 39 nt, Homo sapiens
gcccggggggaagggaaggacaaacacgcagcgaaggag

SEQ ID NO: 102300 - RNA, 75 nt, Homo sapiens
agaggagcacgccccaggaacccagcaagaaccccagaagaggggccacgcaacagggggaggccgacaagagaa

SEQ ID NO: 102301 - RNA, 69 nt, Homo sapiens
gagggagccgagcagcaggcggcaggaggcccacgggacccgagaagggagaggccagagcaaagaaga

SEQ ID NO: 102302 - RNA, 39 nt, Homo sapiens
gccgcggcccggcccgcccagggcggaacagaacgacag

SEQ ID NO: 102303 - RNA, 79 nt, Homo sapiens
ggaccgcaggagggagaacgggaaaggcaggagagcgaaagagagcggaaaaacgaccaaagaagccacagagagcaca

SEQ ID NO: 102304 - RNA, 77 nt, Homo sapiens
aaggaaggaaaggggccggaccaggggaaaacgggaagcgagccagcacaaagcacgagcacaaagcaaggaggaga

SEQ ID NO: 102305 - RNA, 37 nt, Homo sapiens
acaaggcccacaaccgcgcggccaggaacaacagaag

SEQ ID NO: 102306 - RNA, 76 nt, Homo sapiens
ggaagacaggccacccagcggggagcacggcgagcagccaggccaggagaggaccgaaaagacgcggccccaaagg

SEQ ID NO: 102307 - RNA, 90 nt, Homo sapiens
ggaagccgaagccgcacccccgcaggccccccggccagaaagagagcacaagcccaggaacggggagaaacgccagacgccccgaccaag

SEQ ID NO: 102308 - RNA, 76 nt, Homo sapiens
gccaggcggcaagggggcaccggcccgcaccaagagaagacaacagaagccaggcaaggaacgcggagaaacaaaa

SEQ ID NO: 102309 - RNA, 78 nt, Homo sapiens
aggagcccacccagcaggagacgacaccaagaggaaaaaccaggcaaggaagcacaagcgacaagaggagcgggcgcc

SEQ ID NO: 102310 - RNA, 79 nt, Homo sapiens
gccccagcccgccggcggcggcggacggcgaagacaaacacccacagagggccacacaggaccaggcggacaagacggg

SEQ ID NO: 102311 - RNA, 87 nt, Homo sapiens
agcgagcccggacaaggccgcgcagacccagcccccggaaaggaggcaacaaacaccggacgcggccaaccggcgcgcgcagcgacc

SEQ ID NO: 102312 - RNA, 73 nt, Homo sapiens
ggccaaacaacaacagccgccccaaccaggacaccaggggggaaaaaccacacaggcaaagaacgcgcaaaac

SEQ ID NO: 102313 - RNA, 68 nt, Homo sapiens
gcgaagaccccccaaagcagcccggaacccccagccaggaagcccgaagagcccacaaacacggaagg

SEQ ID NO: 102314 - RNA, 71 nt, Homo sapiens
gacgacagccagagaggaaccccacaagaaaccaaaagagagagaggacgcagaccagggcgagggcaggg

SEQ ID NO: 102315 - RNA, 72 nt, Homo sapiens
gccgagcccggccgccagaccacagcacagccgggaaggggagccaccagccccccgcggaaagcaagagag

SEQ ID NO: 102316 - RNA, 85 nt, Homo sapiens
ggcgccggcgcagcggcggggccaggcggggaccgcgccaagaggcgaggccgagacaaaccggaacggggggcaccagggaccc

SEQ ID NO: 102317 - RNA, 78 nt, Homo sapiens
aaggcagcggaggcacggacaccacacacacacagcgggggaaacacaaagggccaacacaagccacacaacccaaac

SEQ ID NO: 102318 - RNA, 115 nt, Homo sapiens
ggccgccagccccccgccgcgcggagcccacgaaggggacagcgcagccggcccagagccgggcccggggaccgagagcggcccagcgggcaacccacaaagggccggagaaagg

SEQ ID NO: 102319 - RNA, 75 nt, Homo sapiens
cgcggcccagcccggccacgcggacccgaaaccaacaaccagccaagggaccgcagggagacggcaccaccaccg

SEQ ID NO: 102320 - RNA, 83 nt, Homo sapiens
gacccagcccggggaaacaaccccgccccggaggcggcgaggagcggcggagaggggagaagagcgagacgagaaagaagagg

SEQ ID NO: 102321 - RNA, 82 nt, Homo sapiens
gggccagggccggcgagcacacgccgaggcccaccagacgaccacgacgaggccggggcacgagcccgggaccccgcgagac

SEQ ID NO: 102322 - RNA, 77 nt, Homo sapiens
gccggggcggggcccaggagacggagaccgccagagcggaacgaccccagagcgagcccgcagcagcccagaaacaa

SEQ ID NO: 102323 - RNA, 87 nt, Homo sapiens
cgcgcccagaagaagggaaggcgcgaggaggaaaggaggacgagggaccacaaaggagcccaaccagagcggcagcgcggaccgagg

SEQ ID NO: 102324 - RNA, 69 nt, Homo sapiens
agggcacccagcccccacccgaagggagcggcaggggaggcgaagaagagcccggacagaaagacgaca

SEQ ID NO: 102325 - RNA, 85 nt, Homo sapiens
gagccggagcggagcacccgcaccggcggcggccggagagcgggacagagacaagcagcaagacaagaagacagagggggagaga

SEQ ID NO: 102326 - RNA, 86 nt, Homo sapiens
cgcgcgcaagcggcggcgggaagcggagcgcccccacccggaggcccgccggccccggggcccccagaaaaccagaagcgaccaca

SEQ ID NO: 102327 - RNA, 60 nt, Homo sapiens
acgaacaaaacaggaaggacaccaaagggggaaagcagcaggggccagaagacaaaaccg

SEQ ID NO: 102328 - RNA, 76 nt, Homo sapiens
aaaaagccaaacgaacacaggagccaggggaggcgaagcgaaacccagaaagccaagggcacaaggcccacaaaga

SEQ ID NO: 102329 - RNA, 111 nt, Homo sapiens
gggagaaaaggaaacagaagaacgggcagcccggcagcccgagccgaccaaagacaccgaaggaggaggaccaccgcacagccaaggaggaagcaggaaagaccacggccc

SEQ ID NO: 102330 - RNA, 75 nt, Homo sapiens
agggggggccggggcgacccgggaagcggggccccgcccgccgcgccacagcaggagcgcggcccccaggagcag

SEQ ID NO: 102331 - RNA, 78 nt, Homo sapiens
ccgagccgacggacgcacaggccgcgccccagggcgccgggcagggacagagagggggcccacgcggcagcagggacc

SEQ ID NO: 102332 - RNA, 74 nt, Homo sapiens
gggcaacccacgagagaacagaggcaagacagaagacaccagaggaggagggccccggacaagaagcgaaacag

SEQ ID NO: 102333 - RNA, 79 nt, Homo sapiens
ggccgaggcacgcagaaaggggccgagcccgaggagacgggcgcaggaacccgccagccccagggcgaagacccccccc

SEQ ID NO: 102334 - RNA, 73 nt, Homo sapiens
gagccggggcagggggacccacagggcaccgaggcgaggcgcccccgccccaggcagaaaccacaaacagccc

SEQ ID NO: 102335 - RNA, 77 nt, Homo sapiens
cgcgccgggcgggaccagcacgcagcaggcaaaagcagaccggaaaacccaccggcaagaccacacccgaggggagc

SEQ ID NO: 102336 - RNA, 84 nt, Homo sapiens
agaccacccggacaccacggaccaaaaagacccgaccaggagagcaagcccacccgcgagaagcggaagagaagaacagccgag

SEQ ID NO: 102337 - RNA, 48 nt, Homo sapiens
ggcacaagaaagcgaaagggcccgccacgggagagcgaaggcacgagc

SEQ ID NO: 102338 - RNA, 77 nt, Homo sapiens
gcacgccgggagccaacagacccgcccaacacgcacaacggccaccaaccgggaagagacaggggacacgccagccc

SEQ ID NO: 102339 - RNA, 73 nt, Homo sapiens
cgaaaagacaggagggaggaacagacaccgagccagcaagcccccaacggacaagcccccacgaggaaaaccc

SEQ ID NO: 102340 - RNA, 90 nt, Homo sapiens
aggccggacggggcggacggcgacgcagcccgcggcagaagcgggagagggaaagcggagaggggaagagcacacaccagagcggcgcgg

SEQ ID NO: 102341 - RNA, 86 nt, Homo sapiens
cacgacagcgcaaggaggccgcacccaaggccgcagacaagagccggaggagccaccaacagaagcaggagccaggaaaccaaaac

SEQ ID NO: 102342 - RNA, 92 nt, Homo sapiens
cacaccacagcagcagcggaagagccggaagaccaggaaggagccggggcggaaggaccaacggggggacacaaaaccgaaagacacaaaaa

SEQ ID NO: 102343 - RNA, 43 nt, Homo sapiens
ggaaaggaagaccaggacgcacaggaagcgagggaggaggggc

SEQ ID NO: 102344 - RNA, 78 nt, Homo sapiens
gcggaggcggaagcaggaccggggcacggcggcggagaaaccaccacaaacacgaggccagcaacgaccaacaagaca

SEQ ID NO: 102345 - RNA, 50 nt, Homo sapiens
aacaacagaggcgaagaagccgccgagggcgggggagagccccacagcga

SEQ ID NO: 102346 - RNA, 75 nt, Homo sapiens
acaggagcgaaggaaaaaacagaagacgcagcccaggggcggagaacggaaaagcaccaggaagcagagaggacc

SEQ ID NO: 102347 - RNA, 53 nt, Homo sapiens
aaggaaagacaccggcggaaggcccagaagagaggacacacgaaaaggcggac

SEQ ID NO: 102348 - RNA, 82 nt, Homo sapiens
ccggccaaagagcggaaaggcaaaaggacagaagccggagggagggagccaaaaagaaaaagaagaaacagaagagaaaaaa

SEQ ID NO: 102349 - RNA, 76 nt, Homo sapiens
caccacgcgccggcacgaggcccagaacgccacccgacaacaggagccccgaagaagagaaaggaaaaagaggcga

SEQ ID NO: 102350 - RNA, 82 nt, Homo sapiens
cccagaagaaaaaacaccagaggaaacccagcaaaacaaaccgaggcacgcaccagcaagcaaagcggccgaacacagcgcc

SEQ ID NO: 102351 - RNA, 78 nt, Homo sapiens
gcaccccggaccgcgcagccaccgcggcccccgcggagagggccgaggcagacaagggaaaggccgcgcaggggacca

SEQ ID NO: 102352 - RNA, 78 nt, Homo sapiens
aggaccaagaaccaggccccagaacagcaaaagaaacagggaggacagcgcacagccggacaagaaaaacagccgggg

SEQ ID NO: 102353 - RNA, 73 nt, Homo sapiens
gaacaacgaacagaagcacaaccagagccggccccgacaaagagagaagcggggaagaaagcaaaagcagagc

SEQ ID NO: 102354 - RNA, 72 nt, Homo sapiens
cagcaagcgaagccgaaaaagcgcccgagacgggcccgccgaaagggaaacccagacgacaaggaaggccaa

SEQ ID NO: 102355 - RNA, 80 nt, Homo sapiens
ccaaggagcagagaagggagaagggccggagagcagagaccaaaacgggacaccaagcagaaacagcgagaaccaaaaag

SEQ ID NO: 102356 - RNA, 88 nt, Homo sapiens
gaacggagcggagcacaaggagccggggagagaaaagagaggaacagcacggaagaaccgaagaaagcaagaacaaccggacaagcca

SEQ ID NO: 102357 - RNA, 51 nt, Homo sapiens
accgcgagcggggagaaggggaaaaaagcagcggaggagaaaaaaaagaag

SEQ ID NO: 102358 - RNA, 75 nt, Homo sapiens
cgggaggaagaacagcaagggccaacggaagccagagaaaggcggcaaggaagaggcccggaaagggaaaaaccg

SEQ ID NO: 102359 - RNA, 57 nt, Homo sapiens
acaagagggcagaagaagaacgcgaacgcggcagaacggaggcaggcagcacgagac

SEQ ID NO: 102360 - RNA, 79 nt, Homo sapiens
acagccagaccgagagcagccgccggggcggagcgggcaccggggcccacagaacaagcagccacgggacagggggcgc

SEQ ID NO: 102361 - RNA, 75 nt, Homo sapiens
ccaagacaccgcgaaaggacaaaggaaaagaaccaacagacggagcacggcgccgaggaaaaagcaaaagagcag

SEQ ID NO: 102362 - RNA, 77 nt, Homo sapiens
gccccggagcgcgaaggagcgcggaggcgcaacagaacagcaacaggaaaaagccacgaggagcaaacacccaaaag

SEQ ID NO: 102363 - RNA, 56 nt, Homo sapiens
gaaagcgacaggcgagaaggacagcacaagagcaggcaccagccggggaaaggagc

SEQ ID NO: 102364 - RNA, 83 nt, Homo sapiens
cggagaccacaggcgacgcgcacgacgacaccgaagaacggccgcggggagaagaaaagcaacacagcgaccagaaaaaacag

SEQ ID NO: 102365 - RNA, 85 nt, Homo sapiens
gacaacaagacgcgccgacgcgaggccaaaggaaggaggcgccagggagcgggaaaggccgagccgacaccccacaggagaagcc

SEQ ID NO: 102366 - RNA, 64 nt, Homo sapiens
cggggaacggcagcaaggccaggcaggacaggaaggagggccagacaaggggaacacaagagga

SEQ ID NO: 102367 - RNA, 72 nt, Homo sapiens
agcaagcccccgacagccagccagacccccaggcagagcggggacgacgagcccacggcacaacggaccgac

SEQ ID NO: 102368 - RNA, 76 nt, Homo sapiens
cgggaaggggcaagcgaggcggaggcgacgggcgacggcgcgagaggagcgcgcgcagggacgaagcgaccaccgg

SEQ ID NO: 102369 - RNA, 51 nt, Homo sapiens
cccccaccacccccgagacccccagcaacccagaagccagacgggagggca

SEQ ID NO: 102370 - RNA, 68 nt, Homo sapiens
ggcgcgacagcgacaccggccgcgcacgcacccgcagcgcagcaccaggcaaagaacggccaaggaag

SEQ ID NO: 102371 - RNA, 93 nt, Homo sapiens
acgccaggaccaaaacagggagaaacacagccagaaggcaaaagggaaagcaaggggaagggcccaagaagacaccccaccagaaaccgaacg

SEQ ID NO: 102372 - RNA, 121 nt, Homo sapiens
ggcaggccacgaccaccgcacacccgacacagcggagcgcccagaggcgagcccggggaggaagagacagcaagaaagcaccagccaagcagaagggagccagcggacgagggcgccaggc

SEQ ID NO: 102373 - RNA, 78 nt, Homo sapiens
aggcgagcacagcggacgccaccggagaaggggaggagccaagcgggcgggcggaaacagagagcaaggagaagcgag

SEQ ID NO: 102374 - RNA, 95 nt, Homo sapiens
ggggcccggcaccaggaccaccgcggcagcacgcggcgagagaacccagccaaccgggacaagaacaggggggacggaacacaaaaagggcaaag

SEQ ID NO: 102375 - RNA, 81 nt, Homo sapiens
agcaccccgaggggcccacacgcgccgaaacgaagccagacaacagaccacagcaggagcacacgcagacacagaaaagca

SEQ ID NO: 102376 - RNA, 68 nt, Homo sapiens
cagagaaacaacagcggaaggcacccagaacacccaagagaaccagggaaaacaaagccaggacaggc

SEQ ID NO: 102377 - RNA, 73 nt, Homo sapiens
aagcagccgaccagccgcggagccgggggcagcagaaacggggggggagggggacccggaagaggagaaacag

SEQ ID NO: 102378 - RNA, 73 nt, Homo sapiens
cgccgccaaggggggaacgccggcacggaacagaaggggaaaggcccccagcccacaagggcccacgccaccc

SEQ ID NO: 102379 - RNA, 78 nt, Homo sapiens
aagaggcccggaccgggagaccacaacccgagccaagcggaggcaaacaagcgagcagccaggaaaaacccagggcag

SEQ ID NO: 102380 - RNA, 79 nt, Homo sapiens
gaaacgacacaaccaggcaaagcacaaaacgaggaaagaaccaaggaagacacccgccgacacaccaaacaaaaaagac

SEQ ID NO: 102381 - RNA, 76 nt, Homo sapiens
agcgccgccgcgccggagccgaggaacggcaggcggccccgagcggaaccagagaagcgagggacgcccaaaagag

SEQ ID NO: 102382 - RNA, 76 nt, Homo sapiens
gcaacagggccgcacgcaagaaagcaaggcaaaccagggggccacacagagcgcagagggaaagacggcagaagca

SEQ ID NO: 102383 - RNA, 76 nt, Homo sapiens
cagacgaaaccgaacgaaaggagaaacggaaaagacccccagacgaacaaggacgaaccgaccaggcaacagaaag

SEQ ID NO: 102384 - RNA, 71 nt, Homo sapiens
aaggaacgcccacccacggggaccagcagccgggccagggccagagcaaagggaagcgagaaccaggaacg

SEQ ID NO: 102385 - RNA, 70 nt, Homo sapiens
gcacccgagaaaggggacgagagggccgaggcagacaagggaaaggccgcgcaggggaccaccccagacg

SEQ ID NO: 102386 - RNA, 59 nt, Homo sapiens
gggaaacagagacaaagcggacacccgcccgccggcgacaccgaaacccagagaccagc

SEQ ID NO: 102387 - RNA, 75 nt, Homo sapiens
gggcggaccggcgcccagaagccccgggagggaaagggagcagcaccggccacacccacagcacgaccggaaccc

SEQ ID NO: 102388 - RNA, 70 nt, Homo sapiens
gcaacccccgggaagccaagccgcaggcagggccggaaacgaacacccggagagagggcaaaaaacagcc

SEQ ID NO: 102389 - RNA, 49 nt, Homo sapiens
ggagcgaagaagagcgagacgacgggaccgaaggaccccgccagagaca

SEQ ID NO: 102390 - RNA, 69 nt, Homo sapiens
agaggaccgcaccagcacgcccacccagagacacccccggaccagaaaccggggcgcagcgaggccggg

SEQ ID NO: 102391 - RNA, 44 nt, Homo sapiens
agacagacaccgccccgagacgagagggaaggggaacaggaccg

SEQ ID NO: 102392 - RNA, 85 nt, Homo sapiens
ccaagcacgccaccggcggcgggcacacagacacgcacggagggcccaacccacagcgccccagggacaggagaagcggaaacca

SEQ ID NO: 102393 - RNA, 111 nt, Homo sapiens
ggcgaggcagcgagcggccgggaggaggcggccagccgggcaggaggagcgcgcgcccaaagccaagccgggaggcccagcccccgcgcggccggaggccggagccccgag

SEQ ID NO: 102394 - RNA, 71 nt, Homo sapiens
ggacaggacaccaggaaaaacacagagagccgacggcacccacaagccggcgaggagccccacccaaaaac

SEQ ID NO: 102395 - RNA, 76 nt, Homo sapiens
ccaccggcgggaggaacaaaaggcgaggcgcagagcacaagaggaagaaacccccaaccagggggacagagaaggc

SEQ ID NO: 102396 - RNA, 85 nt, Homo sapiens
ggcgcgaccaggccgggcaccccgagcgcaaggacagcgcgaggccgcgcagcccagcgcagccagaaagaccacagcaagacca

SEQ ID NO: 102397 - RNA, 69 nt, Homo sapiens
gcaggaagccagccagagcaggaagggcggaaaaggcaaaacagcgcaaccaagagagaggaagagaga

SEQ ID NO: 102398 - RNA, 74 nt, Homo sapiens
gacgaggcgcgggcgcgcacccgagccgcaagcccccaacggcacgcccaccaccggccgacgacgccacggcc

SEQ ID NO: 102399 - RNA, 85 nt, Homo sapiens
cagcacacaacaaggcccccgaagggcggcagcagcggaggcaagaggaggaacgacgagaagagaggaagagagagacgcaacg

SEQ ID NO: 102400 - RNA, 43 nt, Homo sapiens
cgaccccgccagcagccgggaccagggccgaggagggcggaac

SEQ ID NO: 102401 - RNA, 60 nt, Homo sapiens
acgcggccagcgaaaacgcccaggaccccgagacagacaagcacacagaggaccagagcc

SEQ ID NO: 102402 - RNA, 71 nt, Homo sapiens
gggggacgcgcggagcaccaggacccgggaacccagaacagagcgaaaccgcaagaaccagaccagcagaa

SEQ ID NO: 102403 - RNA, 60 nt, Homo sapiens
cgggcagggcggcaaccgagacacaaagggaaagcggaggaaagcggacagaagaagcca

SEQ ID NO: 102404 - RNA, 79 nt, Homo sapiens
cggcagggaggagcgcagggcgagccggagagccggccgagcgaggcggcgcggccagaagggagagaaggcgcgcagg

SEQ ID NO: 102405 - RNA, 78 nt, Homo sapiens
cagcggacaaaaaggccaggcgccagcagaaaccgaacgggaaggagacccgcaggcccacgcggaccggcagcgcca

SEQ ID NO: 102406 - RNA, 79 nt, Homo sapiens
gcggacaagagcagggcgaccacagaccggcagacggcagggccaacaggacaccccagggaagggcccaggaaccagc

SEQ ID NO: 102407 - RNA, 60 nt, Homo sapiens
ggccacggacgaagcccagagcgcagcaaaaaaaccgacaggaccaacgaggcaaagcac

SEQ ID NO: 102408 - RNA, 73 nt, Homo sapiens
acaaaagaacacaccccaggaaacgcaacaagacagggacagaggagcagcaagggagccagccacccaaccg

SEQ ID NO: 102409 - RNA, 87 nt, Homo sapiens
gcagccacaaggggacccacccaccacacccagggaagcgggcagcaggcaccccagccaggccccccggcccaaggaagccggaac

SEQ ID NO: 102410 - RNA, 53 nt, Homo sapiens
gacaaagagcagaggagcgcagaaaccaaaaaagcaggcacaggcaccacccg

SEQ ID NO: 102411 - RNA, 77 nt, Homo sapiens
caaggccggaaggaagggaaaccgggggccccggacaacccgagcaggacgagcagggggaggaacaaagcgaggaa

SEQ ID NO: 102412 - RNA, 88 nt, Homo sapiens
ggccagccagggccgggccgcgaccggccccggagcacaacggaagccggaacgccccaccccaccccgaagcgaccccgcccaagac

SEQ ID NO: 102413 - RNA, 77 nt, Homo sapiens
ccgaacccaccgagccagggagggaaagggagcagcaccggccacacccacagcacgaccggaacccagcgaccgac

SEQ ID NO: 102414 - RNA, 76 nt, Homo sapiens
gcgccggcggcgcgcgacccccgcgcagccacgggccacggaggccacccagcacggggggccacgccaccaccac

SEQ ID NO: 102415 - RNA, 59 nt, Homo sapiens
ccccacaacgccggccgcgaggccaacgggaccaccacccccggagggccggaggagcc

SEQ ID NO: 102416 - RNA, 76 nt, Homo sapiens
gcccagcgcgcccgggccgcgccgccccgccccaggacaagcccccacgaggaaaacccccccaccgaaggagggc

SEQ ID NO: 102417 - RNA, 96 nt, Homo sapiens
gggccacgagaaaccacgacacgccaccccacacggcaggacgggccccggcagcaaggcacggagaaagcgcagaaacagaagaggggaaggaag

SEQ ID NO: 102418 - RNA, 69 nt, Homo sapiens
ggaacagcaaacggaacaagagcgaggaacaacgaggacagaaccgcgacacaccggcagaccaaccaa

SEQ ID NO: 102419 - RNA, 78 nt, Homo sapiens
ccaccaaggacagggcagcaagaaaaagacccaaccagcccacagaggccggacaaggacagccaccaaaggagacgc

SEQ ID NO: 102420 - RNA, 80 nt, Homo sapiens
caaaacaacgaccgcaagccgcccgcccacagcgcaccaccagccagccaagacaaggggaggcacacgaccgaggccag

SEQ ID NO: 102421 - RNA, 42 nt, Homo sapiens
cgccccaggaaggcgcacacaaagggacgggagcagcggaag

SEQ ID NO: 102422 - RNA, 74 nt, Homo sapiens
gggagaaaagcggacgccggggaggccaaaaagacggcggaaaacccgaagcagaagcccgacacaggcacaag

SEQ ID NO: 102423 - RNA, 63 nt, Homo sapiens
gcggagcaggagaaccagggcacaggcacgggggcccaccaccccacgcaggggagggcaggg

SEQ ID NO: 102424 - RNA, 74 nt, Homo sapiens
cgggccccagcgccaaccaaaccgaaagccagaagggccgccccccgggcgaggcagagacgccaggggcaaag

SEQ ID NO: 102425 - RNA, 71 nt, Homo sapiens
aacaacaacacacagaaggcagggagggaggggaaagacccacaccaagaggagggaccacccagagacga

SEQ ID NO: 102426 - RNA, 53 nt, Homo sapiens
aacaagaccaagaaaaaccagagggggggcaccaggggagcacccggcacaag

SEQ ID NO: 102427 - RNA, 91 nt, Homo sapiens
cccagcgccaccaccacgccagccgcaccagccgcccaagccgcacagccgcggcggcagcagcaggagaggcgaaggggagcaagggaga

SEQ ID NO: 102428 - RNA, 83 nt, Homo sapiens
acaaagagccaaaggacgggaagaacccacgcgcgacgaaaaacgaaacagagcaaagcccgggcgggccggagggagagaag

SEQ ID NO: 102429 - RNA, 76 nt, Homo sapiens
aacacggagacagcaccaaacccacagaggcacgagagggaagagaacaaccccaaccaggcaccaaaccagaacc

SEQ ID NO: 102430 - RNA, 74 nt, Homo sapiens
gcaggagcaccggcccaagaaacaggaccagaggaaggcggggaggcggaagaccaggagaaagcacgacccac

SEQ ID NO: 102431 - RNA, 82 nt, Homo sapiens
agccgggccaggaaagaagaaaggggcaaggaggaaccggcaacgcaagcgaagaccaaccacaggccacacaggcacgaac

SEQ ID NO: 102432 - RNA, 72 nt, Homo sapiens
aaggcagggaaaccgggcaacacaggagggcggacaaaacaccggggcccacaggacagccgggcgcacaca

SEQ ID NO: 102433 - RNA, 72 nt, Homo sapiens
aagagacacccaacaccgcaggcaaaaaggaagcacaagccagcagacgacaacaggcgcaggagacacagc

SEQ ID NO: 102434 - RNA, 79 nt, Homo sapiens
cacaaaaaaggaagcgaaacaaagcccagacaagccagggaacgaagggcccaccccaggaggaagcggggacagagaa

SEQ ID NO: 102435 - RNA, 77 nt, Homo sapiens
gaagcccaccagagagcgcggcgggagcgaggccgccgcgcaagaagaaaacaaagagggaaaacggagaaaagccc

SEQ ID NO: 102436 - RNA, 59 nt, Homo sapiens
cgcaggagcaagcgcagcaccaccaacagaagaagacggcacgggacccccagcacagg

SEQ ID NO: 102437 - RNA, 59 nt, Homo sapiens
ggaggagcgcgcccgccgagaaggagcccccgcaggcacgagaagagaagcccagagca

SEQ ID NO: 102438 - RNA, 76 nt, Homo sapiens
ccaagcaaaagaagagaaagaaaaaaacccaccacagaaccaggccagaaaaacggaaccgggagaaaacaagcga

SEQ ID NO: 102439 - RNA, 77 nt, Homo sapiens
caaacgcggccgcccgaccagccccagcgaccgcccgaggcaagccaccgaaaaagacaaaagaaccaaagacggaa

SEQ ID NO: 102440 - RNA, 75 nt, Homo sapiens
acgggcaccaggaacgccaaggaccacccgcccagagcagcagaacagcacagccagagacccagagcagcagcg

SEQ ID NO: 102441 - RNA, 72 nt, Homo sapiens
caaagacggaggaaccggcggagagcagaagaccgaaaggagaagacagaggagccagaccaagagacagca

SEQ ID NO: 102442 - RNA, 76 nt, Homo sapiens
aacgccgaggaacccggcgaggcggcagacccacagcacccggcaccccccaaaggaaccagagaacaggacaaga

SEQ ID NO: 102443 - RNA, 74 nt, Homo sapiens
gggacaaggcagacgggagcgcaaggcgccccaaggccagacaaaacgacccagcaccagccggaaagaaaacc

SEQ ID NO: 102444 - RNA, 82 nt, Homo sapiens
ggacggaagaaaaggaaggggcacaagccccaaggcccagaagaaaaagcgcagcgcacggaaaaggggagaacagacacaa

SEQ ID NO: 102445 - RNA, 72 nt, Homo sapiens
aggccccaggccaggggcaccagagagaccggccaagaagagagcgggcccagagccgacaagcagaccacg

SEQ ID NO: 102446 - RNA, 57 nt, Homo sapiens
cgcaccacagcacaaaaggggcgacccagcaacgcggccggccaggggcaagcgagc

SEQ ID NO: 102447 - RNA, 79 nt, Homo sapiens
ccagccagaaccaagacacacagggagccagcaccgagcccccgggccagcagagcgcagggagaagaaacgaacggaa

SEQ ID NO: 102448 - RNA, 97 nt, Homo sapiens
ggagcaaggagaagagccgggcagggagcaggcagcccaacgcacgccagcaaaacggcaagaccgccgaaagaaaacgagcgagcccagcagcccg

SEQ ID NO: 102449 - RNA, 77 nt, Homo sapiens
agcaggcaagccgcagcggcgggggccggccagaccggagcgagacccaacagagccgagcaagaccaccagcaaaa

SEQ ID NO: 102450 - RNA, 76 nt, Homo sapiens
cggacgcccagcccaggaacgccaaccagcacggacaccccaaccccgacacaccgggaggcacgcagcaggcaaa

SEQ ID NO: 102451 - RNA, 78 nt, Homo sapiens
agggcagcagcacacgggaggacgccagggagcaaaccgagccgagccacgaagaaaaacagagcccgacgaaacaga

SEQ ID NO: 102452 - RNA, 55 nt, Homo sapiens
cacccccaagagccaaacagcaggcccaggaaccgggccaggaaaaggcgccggc

SEQ ID NO: 102453 - RNA, 82 nt, Homo sapiens
ggaggccgcgggaggaggcgccccgcgcagcggcggcggagcagagcgccccaggcagcccaaggccaaccccacgcaccgc

SEQ ID NO: 102454 - RNA, 77 nt, Homo sapiens
gcgggaccagagcggaacaggaggaaaaggcccaggcgagaaagaaaccggaagaaagagacgccaaaggagaccga

SEQ ID NO: 102455 - RNA, 70 nt, Homo sapiens
aagggacacggccgcaaagaggagcaagaaagaaaaagaggaagaggcaccagggccgggcaaaaccccc

SEQ ID NO: 102456 - RNA, 76 nt, Homo sapiens
accaggccaccacagaaacaaaagcaacaaagagggcaccaaccagcggacacacggaaaagggacgggaaaagcc

SEQ ID NO: 102457 - RNA, 77 nt, Homo sapiens
aggcggcgccgcgaaagcgggacaaacaggaagcacaaacacaaagaagggcaacaaacaaaaaaaaaagaaagaaa

SEQ ID NO: 102458 - RNA, 72 nt, Homo sapiens
cgcggccaaggagccgccaaagccagacggcaacaaacgaggccgaaggaaggggagacaacgaggggcgcg

SEQ ID NO: 102459 - RNA, 77 nt, Homo sapiens
agcgcaaggcgagggacgagaacgagcgggccaaccacgagcaaacagggaagacgggccaaacaaggcaaggcacc

SEQ ID NO: 102460 - RNA, 82 nt, Homo sapiens
cgaggccacagaaccagccacagcggggcggagagcaaaagaagcgaaccgggagcgacacaccccagagagagccgacagg

SEQ ID NO: 102461 - RNA, 59 nt, Homo sapiens
cggacacgcaaaccacacaaggaacccaggccggagacgaaaaccacgggaccgggggg

SEQ ID NO: 102462 - RNA, 73 nt, Homo sapiens
caagggcagaaggaaaggcagaaaagagacgcagggacgaaaaaacacgcacgacggagaaaacacgaaaaag

SEQ ID NO: 102463 - RNA, 87 nt, Homo sapiens
gccaggcaggacgacagcagcagcagcgcgccccaggccacagcacagcaaagccacaacacccaggaggcccccggaaggagaagc

SEQ ID NO: 102464 - RNA, 79 nt, Homo sapiens
cgcagacggcgagaccccgcacagagacgagagccgaggcgccggaaacaacagccaacaaaaccaagccgggacccac

SEQ ID NO: 102465 - RNA, 74 nt, Homo sapiens
aagacccaacgaaaggggcgacaccagggccgcagagaacagcaacccgccaggaccacgcagacccaccggga

SEQ ID NO: 102466 - RNA, 74 nt, Homo sapiens
ccgccaacgcgcccccgagaagaagcagaggcgcccacagaaaccgaaacagaaacgacaagagcgaaacccaa

SEQ ID NO: 102467 - RNA, 79 nt, Homo sapiens
aaaaaaagaacacaagggaagacccggggagaagagcaaaacggaccagggaggcaagcaggggggcaaaggaaagaag

SEQ ID NO: 102468 - RNA, 73 nt, Homo sapiens
agagacaccagcaggacaggaaaaaaagagggagcaggaagaagagagccaagcgaacgccgaggaacaggga

SEQ ID NO: 102469 - RNA, 85 nt, Homo sapiens
ccgcacaggcggggggcgaggcgcgcggggcccgccaggcgcgcggagccacacaaaggcaccaggggcggagcgggggaggccc

SEQ ID NO: 102470 - RNA, 82 nt, Homo sapiens
gcacggacccaccacagggccccgccagccccagccccggagaggagcagaaaacagacgacgaggagacccggggaacggg

SEQ ID NO: 102471 - RNA, 69 nt, Homo sapiens
cgacagacagaaaccaagaagagcccccggaccggaacggggcacagcggcagcggagagccgcccgac

SEQ ID NO: 102472 - RNA, 77 nt, Homo sapiens
caaggagcccggccccacaccggcacacagcaaaacgcacgcaaggcgcaaaagggaagaacaggccgaaaacgaac

SEQ ID NO: 102473 - RNA, 86 nt, Homo sapiens
accaacaacagcaacagcaagaagaagagcccagcagcacccgccccccagccaggaccgggaggggcgaccccggggcccggcca

SEQ ID NO: 102474 - RNA, 75 nt, Homo sapiens
gcgaagccggggcggagcacgcgagcagaccagcgccgaagaaggacgacagggccacccaccccacggccccaa

SEQ ID NO: 102475 - RNA, 68 nt, Homo sapiens
agacaccaccggaccaacagaaagcagcccgcgacacaagaggccacaggcagcgcccggcagggagc

SEQ ID NO: 102476 - RNA, 77 nt, Homo sapiens
cagaaaccaagcagacaacgcagagggcgacgccaacaagccgccagggagaaaagacgaggaagcccaaaaaccgc

SEQ ID NO: 102477 - RNA, 60 nt, Homo sapiens
acaggaggcgccgcagagaaggccgcgcacagagcgcaaccgaacgcacacgaaggaaga

SEQ ID NO: 102478 - RNA, 41 nt, Homo sapiens
ccggggcgccagagcagcagggcaaaaggcgagcaaacgga

SEQ ID NO: 102479 - RNA, 75 nt, Homo sapiens
accaaaagacgaggaaagaaccgggcacaacccccagcagagggccacccgccccaaggagccgacaagccgaac

SEQ ID NO: 102480 - RNA, 75 nt, Homo sapiens
caggcagacagggccgaacagacacaaccagagggaagcacgcccgggcacagcggaagagacgacggaacagcc

SEQ ID NO: 102481 - RNA, 76 nt, Homo sapiens
aaaacagggaagaggagagaagaagaacagagagaacaaaagagcaggaaccagcaccagacagaagacgcagaag

SEQ ID NO: 102482 - RNA, 68 nt, Homo sapiens
ccagccccaccacggccaaaacacaaacaagaccgcaggccagaagggagcgcggacggagcaaaggg

SEQ ID NO: 102483 - RNA, 53 nt, Homo sapiens
aaacaggcccggacccccccaccacccccaacgaaagggggagccgccagacc

SEQ ID NO: 102484 - RNA, 79 nt, Homo sapiens
gaaacaggacacagggaggaaggaggaagaaccgggaaacagcaaagagaacgaaagaggcgaaaagagaacgggagca

SEQ ID NO: 102485 - RNA, 92 nt, Homo sapiens
ccagacacggaccgagccgcgaggacacgggcgcaaccgcagcacacagcgaccgggagaacaagacggagaagagcacagggggcgacaag

SEQ ID NO: 102486 - RNA, 74 nt, Homo sapiens
ccagccaccacgcggcgcacaacgcaggaacaccgcacgcgcggaggaggaccaacaggggaaccaaaggacag

SEQ ID NO: 102487 - RNA, 68 nt, Homo sapiens
cgcccgaaaacggagaagcagaaacgaaggccagaagaggagaaaagaaaagaaagaccgaagaaagc

SEQ ID NO: 102488 - RNA, 86 nt, Homo sapiens
acgaagagacggaggaaaccacaggaaggaagcacaggggccaccggagcgcccgagaagaaacagcaaccaaaggcaaaggggga

SEQ ID NO: 102489 - RNA, 77 nt, Homo sapiens
cgcgagcggcagcaggacaccccgggaacggcaacaaagccagaaaccacaacgggagacaccaaacacagacagaa

SEQ ID NO: 102490 - RNA, 70 nt, Homo sapiens
cgggcgcgcaaggagacacacgaaggggacagcgcccaaagcgaaagaccgaaacaaggaccccccggga

SEQ ID NO: 102491 - RNA, 55 nt, Homo sapiens
gacaacgggacccagaagaggcgggaaaaccgccacaaagcccccaagccacaag

SEQ ID NO: 102492 - RNA, 72 nt, Homo sapiens
aaaaccagcacccaaggcagccggaaacgaggagaaaaggacgacggaaccaccacgaaaaaaagcacaccc

SEQ ID NO: 102493 - RNA, 73 nt, Homo sapiens
ccacggaaaccgaggccaggaggaaaagaggcccgcccccacccgcgaggaagagaagacgcgacgcacaagg

SEQ ID NO: 102494 - RNA, 85 nt, Homo sapiens
aaggaaagaccaaagaggcccgccaacaaagccggaagccggaccgggaacccgaaaagcaaaggcccacccaggcacagggaga

SEQ ID NO: 102495 - RNA, 118 nt, Homo sapiens
ccgcgcgcgccgcgccgcccgagcacgccgcgcagcccggccgccggcccccaacagcgccgagggagccggaagcgagccgcagagcagaggagccgaggacagcgagcgccaggcg

SEQ ID NO: 102496 - RNA, 81 nt, Homo sapiens
aggagggccgagccagcccggcgcagaaagaggagcgagggaggagaggagacgccggagcgggacgaccagagaccgaga

SEQ ID NO: 102497 - RNA, 66 nt, Homo sapiens
gaccagggcaggccccagagcaccaagaagcagacaaaccgcgacgaaaacaaggccacaaagggc

SEQ ID NO: 102498 - RNA, 84 nt, Homo sapiens
ggacccggcccgggaccggcggcgcgcggcggccgaggccaggcaaaagcagaccggaaaacccaccggcaagaccacacccga

SEQ ID NO: 102499 - RNA, 72 nt, Homo sapiens
cccaggcccaccggccccagcagaaaacacggaggaacacgagggagcaccgcagggcaggccccacgccca

SEQ ID NO: 102500 - RNA, 71 nt, Homo sapiens
gaaagaaaggccaaagcagcagcggaaaaggaggcgagagcgggcggggggaccaacgaacagggccaaaa

SEQ ID NO: 102501 - RNA, 60 nt, Homo sapiens
acccgccaccacacggcaccgggccgagacgcaccagagccggaccggggacgcgaagca

SEQ ID NO: 102502 - RNA, 87 nt, Homo sapiens
ggacggggacaagaagaggggagaaggcggaagccaggacaaggaaagcgggaaggcgcgacgcgcccagaagaggccgacgggacg

SEQ ID NO: 102503 - RNA, 78 nt, Homo sapiens
cacaggaggaggccaagaagaggaagaagaagaagaacagaaaaggaaaaggcacaaccagacagagcacccggccca

SEQ ID NO: 102504 - RNA, 119 nt, Homo sapiens
gcagccccaagacaggccacaacaagacccgccgcggggcgaacgccccggcgcggccagccggggcagaccggaaacaggcacagaacagaaggaaaggacgaagagcccaggaacac

SEQ ID NO: 102505 - RNA, 72 nt, Homo sapiens
ggcccacagaaaaaagaagcccacaccggaccaaacgcgcgacccccagacacacagacagggcggagcaac

SEQ ID NO: 102506 - RNA, 108 nt, Homo sapiens
ccggcaggccagcccgcgcgaccggccacgggaaaccaaaacacaccgagccaaaggggaagccgcacaccagcaggcaacaagaagagccagcagacaccaagaaga

SEQ ID NO: 102507 - RNA, 78 nt, Homo sapiens
ggccaccgagggcgcggcgggcaggccaacaggaggggagaagcggcgggagacaggccggccgaacgccacaaaaca

SEQ ID NO: 102508 - RNA, 80 nt, Homo sapiens
aagacgagccaccgaggcacagcgcggaacccaaggaaaggacggcggagccgggaaggaaccccaaggaagcagaccag

SEQ ID NO: 102509 - RNA, 80 nt, Homo sapiens
ggcggcacccgggcagcccggcggacgcaggagcgaggcagcgaccgaaagccgccaggggagccccggccccacaagac

SEQ ID NO: 102510 - RNA, 83 nt, Homo sapiens
cgagcggagcggcgcggggcgggcggcggccccggcagcaccagaacccagaagggacacagcccacgcggaggccaccagaa

SEQ ID NO: 102511 - RNA, 77 nt, Homo sapiens
aaaaaccacgaagaagaaaccggcggccaaaaaaaaaaaaggaagcacaccaagggcagcgaagccggccagcgcag

SEQ ID NO: 102512 - RNA, 73 nt, Homo sapiens
cggaccagagagaccccggagcaacggggcggcacacaaggagcgaagggcagggagaacgccaggcacagca

SEQ ID NO: 102513 - RNA, 53 nt, Homo sapiens
gcggaagcccaaacgggaaaacgccaggagccagaaccccgaggaaaggggaa

SEQ ID NO: 102514 - RNA, 72 nt, Homo sapiens
cggcagcccaccggcaccaagcaaacgccaacgaaaaacaaggaggaacagggaaagaacgaaaagcaaaaa

SEQ ID NO: 102515 - RNA, 85 nt, Homo sapiens
cacgcccagaccgccccggggacagccagccccgcggaccagaccaggccgcggcccgcaccaaagaccgcacagaagcagaaga

SEQ ID NO: 102516 - RNA, 88 nt, Homo sapiens
ccaccaccaccacccacacccaccaacaacaccacaaaaccacagccaagcaaccacgacggcagagacaggagaggagagccacgcc

SEQ ID NO: 102517 - RNA, 79 nt, Homo sapiens
gcgcagccaggaacaggacgaagaccagcgccagggaaagaagcgccggccgcccgcaggacaccgagggcccagccgc

SEQ ID NO: 102518 - RNA, 81 nt, Homo sapiens
gcccgcggcgacggcggcggggcggcggacgaccggagagccggaagaagacggcacgggacccccagcacaggcagcagg

SEQ ID NO: 102519 - RNA, 68 nt, Homo sapiens
ggagcggggccggaacggagccgaggcgcaggggcgcggggcagcgggggcagagacggggaacaggg

SEQ ID NO: 102520 - RNA, 80 nt, Homo sapiens
agcagaggaagagcaggggcacagagagaggagagagaccagagcacggggccaccggaacagacgaacaccaaagaagg

SEQ ID NO: 102521 - RNA, 78 nt, Homo sapiens
acagagacgaaaaaccgaggcgagacccaaagggccccagaagccgcccgacagccaggaccccagccccaggagccc

SEQ ID NO: 102522 - RNA, 73 nt, Homo sapiens
caggcgaggaaaggagggcacgagaagagggaaggcaccaggagaaggcaccgggaaacagaaagcaaggaag

SEQ ID NO: 102523 - RNA, 79 nt, Homo sapiens
agcagccgcacgacgcacggcccaggaccgcacaagaacccccgagggcgggaaacggcaagagaccagaggacccaaa

SEQ ID NO: 102524 - RNA, 57 nt, Homo sapiens
caagaccaggaaacccgaaccccaccagcagacggaacaacgagagaaaacggggaa

SEQ ID NO: 102525 - RNA, 76 nt, Homo sapiens
cagcagaagagccaaggaaaaacagcaagaacccaaaagggccgccaggcacagagaaggcaaacgggagggcgag

SEQ ID NO: 102526 - RNA, 65 nt, Homo sapiens
gaggagcccagcggacaaagcggcaaaggagaagaacggccccccaccaggcgcccaccccacca

SEQ ID NO: 102527 - RNA, 52 nt, Homo sapiens
gaacggaaaagagggagcaaccggaggcaacccacacacgaccacgaggacg

SEQ ID NO: 102528 - RNA, 69 nt, Homo sapiens
aaaccaggagaacacaaagagaagacaaccaaacccaccaccggcaggaaagcaccccacgaacaacca

SEQ ID NO: 102529 - RNA, 68 nt, Homo sapiens
agacgaccgcgcgaagaagaccggaaccacaacggccggaacgggcggacccagagccagcggaccac

SEQ ID NO: 102530 - RNA, 60 nt, Homo sapiens
gccagggaaccaagccaaagacagcaccgggccgccgaagaacggaaaaagagaagcaag

SEQ ID NO: 102531 - RNA, 91 nt, Homo sapiens
ccgcgagcggcagcggcggaggagcggagcagaagggcaggagggcgaaggccaggcccagcaggagaagacagacacggccgcgcacaag

SEQ ID NO: 102532 - RNA, 72 nt, Homo sapiens
cagaagaaaagggcagggaccgacacaagaagcagccagaacagacgggaaaagaaacccaccacaaaacac

SEQ ID NO: 102533 - RNA, 55 nt, Homo sapiens
gagacaggaccgcggcgagcaagggacacacaggaagacgaacacggaacgggcg

SEQ ID NO: 102534 - RNA, 53 nt, Homo sapiens
cacggccgcgaccggccgacgggacgacgccacaagaaaagccaggcggcagc

SEQ ID NO: 102535 - RNA, 59 nt, Homo sapiens
cagcccccagagcgggaacagggggaacaagagcccagcagagcgaacggacaaaacac

SEQ ID NO: 102536 - RNA, 79 nt, Homo sapiens
agacagccggaagcaaggcagaagaggccgcgacaccccaagagggccgccaccacgaggagcaacccccaaaagagcc

SEQ ID NO: 102537 - RNA, 77 nt, Homo sapiens
gaagggcaaccaaacgcaagggagagagccgaggggcagaaccagagagcggccaggcggaaggagcgagagcaccc

SEQ ID NO: 102538 - RNA, 77 nt, Homo sapiens
ccgccgacccccgaccggaacaaaccgaaggcaacggcacaaaacagaagcaggccagccccccaacccccgaccca

SEQ ID NO: 102539 - RNA, 79 nt, Homo sapiens
agccggagccacccaaagccagcagcccccgccagccgccgcagcgacccgaccagacaagacggccccgcagcaaggc

SEQ ID NO: 102540 - RNA, 79 nt, Homo sapiens
gagagaaaggagagacaaagccgaggccagccagaccaaggacagccaaggaagccaagaccaggaggggacgggacgg

SEQ ID NO: 102541 - RNA, 79 nt, Homo sapiens
aaagcacccacgagccccggaaaacgccggagagagcggaagcccggggacgcccccaggcgaggaccggcccagccag

SEQ ID NO: 102542 - RNA, 77 nt, Homo sapiens
accaccaggggaggaggaaaacacacagacgaaggcaaaagagaacgacaccgaacaccgcacagaaagcagaccaa

SEQ ID NO: 102543 - RNA, 97 nt, Homo sapiens
caccagccaacagccggacagaacagagcgggaacaggaagccaggcaaaccagaagagaagaaaacaacaaaaaaggggagcccaaaagaagaaaa

SEQ ID NO: 102544 - RNA, 73 nt, Homo sapiens
acagaggaccaaagcggaccagagacaggagcacccacgggaacagcccagaaacgagggaaaaacgaagccg

SEQ ID NO: 102545 - RNA, 60 nt, Homo sapiens
ccccaaggaagccacggcagacacacaacccgacccgacgaagcgacccccaaggaaaac

SEQ ID NO: 102546 - RNA, 81 nt, Homo sapiens
agcgcaccacaaagcgcgcaacgccaacccaggcgagagagaggaagacccaggccccagcacaagacaacaaacacacag

SEQ ID NO: 102547 - RNA, 91 nt, Homo sapiens
gccgccgccgccgccgcgccgagcggaggaggaggaggaggcgaggaggagagacgagcacagaccagcgcgcgaccggagccccacagcg

SEQ ID NO: 102548 - RNA, 108 nt, Homo sapiens
gcgaccggggccggcgccccggacaggacgggagaccccagcacagcggcagaaagccagaccccccggagcacacgaaagcgccaaaccaaaggaaacaaccccagg

SEQ ID NO: 102549 - RNA, 76 nt, Homo sapiens
cggaagagaggaaggagacagagagagcaaagaaaccagaaagccaacaggcagaccagagacagcgccacgcacc

SEQ ID NO: 102550 - RNA, 60 nt, Homo sapiens
caagggaggcgcccaccaaccggccaggaagcagaacagaggggaggcaagcaggggggc

SEQ ID NO: 102551 - RNA, 75 nt, Homo sapiens
cgagaggccgggggccggggcgcggagccagcgggagcgcaagggcggacaggaagaaagcccgggcccgccaac

SEQ ID NO: 102552 - RNA, 97 nt, Homo sapiens
ccgacagacaagagcaaagcacccaccagaaagaggcacagccccaaaagaaaggcagcagggcagaaaagaacagacccagaagaagcgaaagggg

SEQ ID NO: 102553 - RNA, 79 nt, Homo sapiens
cgcaccccaccggcgcgcgcggcggcccgcgcacagacagcacgcacagaaaaaaaaaaagcaggaccaagcaagaagg

SEQ ID NO: 102554 - RNA, 106 nt, Homo sapiens
gagccgcggcagaccgaggggcaccgaccgcacgggccacccaaaacaggccggggggggcacagagccccggaagacagcccccagcgaccagacccagggccag

SEQ ID NO: 102555 - RNA, 79 nt, Homo sapiens
gaagggcccccggaagaaccgaaggacacacagggcggagaacggaaaagcaccaggaagcagagaggaccgcagaagg

SEQ ID NO: 102556 - RNA, 72 nt, Homo sapiens
gagaaggaccaagaaccagcagcagccgcccaaaacacaaaccaaagaagaaacccgaaggaccacagagaa

SEQ ID NO: 102557 - RNA, 81 nt, Homo sapiens
caagcgagaaaagagcaccgaaggagccccagaaaaagaccagggaaaagcccagcgaagaggacccagcaggaacagagg

SEQ ID NO: 102558 - RNA, 68 nt, Homo sapiens
gggggggggggaagccgcagcggaaagcaggagcacagggacaaagaggaggacaagaacccacccgc

SEQ ID NO: 102559 - RNA, 91 nt, Homo sapiens
aagggccccgccccaaaaacagacagcaaaacaaagaccagccagcaacccacagaagcccaggggcccagcagaaacagaccaagaaagg

SEQ ID NO: 102560 - RNA, 89 nt, Homo sapiens
cagaaggagcaaaaggcggacaggcagggacaggggcagacccggggcagcgccaagagcaaccagccggagcgccaaggccgcaaccg

SEQ ID NO: 102561 - RNA, 78 nt, Homo sapiens
caagccagagacgacagcgagagacccggaggcacaggcgaagggagggggagaagcgagcggacaccagcgaacagc

SEQ ID NO: 102562 - RNA, 87 nt, Homo sapiens
caaggacaacaggcagagaaaaaagaggggggagagccaggggcgggacgacccgggacagcccacggggcagaccagcgaccaccg

SEQ ID NO: 102563 - RNA, 68 nt, Homo sapiens
gaaagaacaagcgcaaagaacaggcaccggagagcgaagcaccagaaggacacagaggaaagaacaca

SEQ ID NO: 102564 - RNA, 84 nt, Homo sapiens
cgcaccgcaggcagacaaaagggccaaagaagggagagaggggggcccacgcggaggacgcagaacacggcgggcggcccgcca

SEQ ID NO: 102565 - RNA, 75 nt, Homo sapiens
ggaaaggacccaaacagggggaaaagcccccaaaagacagagcaacccacagggaagcaaagagacagggaccgc

SEQ ID NO: 102566 - RNA, 93 nt, Homo sapiens
ccggcgggcccgaggcggcgagagaggcaggcggagccgaccgggccagaagaaccacccacgaacacagaagaaagaaggaaaacaagccga

SEQ ID NO: 102567 - RNA, 78 nt, Homo sapiens
ggccccgacagaccaccccgccaacgcggcaccgcagaacgccacaaccagcagcaaccgagggacgagacaagccgc

SEQ ID NO: 102568 - RNA, 70 nt, Homo sapiens
gaagggaaacagcagacagcgcaagcggcagcacaaagaggcaggagggaacaccccaggaagaacaacc

SEQ ID NO: 102569 - RNA, 73 nt, Homo sapiens
acacaccgccccggccgccccccagaccgggacagaaggcaaggggagaccagaccccccgccaccacccaca

SEQ ID NO: 102570 - RNA, 76 nt, Homo sapiens
gccacccccggcgggcccgaggcggcgagagaggcaggcggagccgaccgggccagggccgggcaaaacccccgag

SEQ ID NO: 102571 - RNA, 93 nt, Homo sapiens
gcacggccaagaggaaggccaagcgagggccaagacgaagacaccggaaccaaaaagaagccccagagccggggccaggagccccaagcgccc

SEQ ID NO: 102572 - RNA, 61 nt, Homo sapiens
cgggacagcgcggcggggagcgacgaacgacggccgaaggcacaaccaaggcaagaacccg

SEQ ID NO: 102573 - RNA, 79 nt, Homo sapiens
cgccagcgagagcggcggggaggaaagagagacgggcggagaacggaaaagcaccaggaagcagagaggaccgcagaag

SEQ ID NO: 102574 - RNA, 82 nt, Homo sapiens
ggcgccgccgccgccgcccgcggggcgggacccgagcggagagccgcggagccggaagagccccgagcagccgcgagaaggg

SEQ ID NO: 102575 - RNA, 69 nt, Homo sapiens
agagcgaagcagaagacgaggacacgcagccggccgaggaccccccagaagaagagccgccccacacgc

SEQ ID NO: 102576 - RNA, 80 nt, Homo sapiens
agacaagcggcagcagagcccaggcgacgcggagcgggagcaggaagagcgaagaacgaggcgcccgcgccggcagagga

SEQ ID NO: 102577 - RNA, 70 nt, Homo sapiens
ggcacgccccgcaagaaacgggggaagcagagcgcacaaagggaaaggaaccaccacgaacggggcccgc

SEQ ID NO: 102578 - RNA, 71 nt, Homo sapiens
gggagggaaccagcaacaagccgaagaagacgcgcagcaccgcgggagagccacaccccaccgcacggcac

SEQ ID NO: 102579 - RNA, 74 nt, Homo sapiens
ccccggcgccgcgccggcggcggcgcggggaggcccagcccgccgcagggccaccccgcggcccaccgccgccg

SEQ ID NO: 102580 - RNA, 84 nt, Homo sapiens
cccggaggcggcgcagcagcaccggagacagacccaagaaacgcaaacagcgggcggggagagcccgggggcaagaagccaagg

SEQ ID NO: 102581 - RNA, 76 nt, Homo sapiens
aggccccagcacaccagagacagggaccaggccaacccccaccccggacccggcaggccaccaggagcgcgccaac

SEQ ID NO: 102582 - RNA, 71 nt, Homo sapiens
cacacgagaaggagacacgagacaagaaccagagaaacaacccgaagagggggaaaacgcagggaagagag

SEQ ID NO: 102583 - RNA, 71 nt, Homo sapiens
agccgcggcagccgaaccggcgagacaacagaggagccgaaacacacaagaccaggcagacagaacccaca

SEQ ID NO: 102584 - RNA, 50 nt, Homo sapiens
cgcgaggaggaaaggaggacgagacaacggcaagcggagaagagcaaggc

SEQ ID NO: 102585 - RNA, 73 nt, Homo sapiens
gaagcgaagcgccccccaagacaccagaaggcagcagcggagcacgagacgacggagagggacaaacaaccaa

SEQ ID NO: 102586 - RNA, 59 nt, Homo sapiens
ggaaggcccccagacccaaacccaaaccagacagacacggcgagaggagagaacgacaa

SEQ ID NO: 102587 - RNA, 73 nt, Homo sapiens
ggcacggccgcaaaaccaagcaagagcacacagccggaaggcccgccccagcgggccaccgcggcacacgagg

SEQ ID NO: 102588 - RNA, 71 nt, Homo sapiens
agaaaacaaacagcagagagaagagcaaaggaaagcgggccgcacgggggaaagggagacaggagagcaaa

SEQ ID NO: 102589 - RNA, 43 nt, Homo sapiens
gcaagccgcgacaagcaggaaggcccgaacaagacaggaacgc

SEQ ID NO: 102590 - RNA, 76 nt, Homo sapiens
gaaagagaagacgaagagaccgaaggagcagacgagccaccgagcccgggagccggcgaaggaggacggggcaggc

SEQ ID NO: 102591 - RNA, 67 nt, Homo sapiens
ggggacagacagcacccaccggggcacgacagaaaaacacaacagcaacggcagcagaaaaaagggg

SEQ ID NO: 102592 - RNA, 86 nt, Homo sapiens
cgaagcgccaaagccagacaagcccaccagaagagccgacaagccggcagaaggcagacacaaacaaaagggcagccacacgaggg

SEQ ID NO: 102593 - RNA, 60 nt, Homo sapiens
gcacggcggaccgaagggcaagcaaggggaggacgcgagggcccagccagaccagacccg

SEQ ID NO: 102594 - RNA, 87 nt, Homo sapiens
cgaccaccgcagcaccagcgcgggccgagacaccaggcgccgagaaggccagcagagaaacaggcaggagaggcccacaggcgcgga

SEQ ID NO: 102595 - RNA, 68 nt, Homo sapiens
gaagcgggggagaaaaggaccagggaggacggaggaccgcacaggcgcaggcgcaaggggccagggga

SEQ ID NO: 102596 - RNA, 72 nt, Homo sapiens
gcggggggcgggggaggcgagcgcgccgcccggagccgcgcacacggaggaccccccccagaaaaccaagcg

SEQ ID NO: 102597 - RNA, 75 nt, Homo sapiens
gggaaaaaccgcgaagcaggggccgcgggaagggaacgcaaccccaccccccaccccaccaccaccagcagcccc

SEQ ID NO: 102598 - RNA, 71 nt, Homo sapiens
acacacaaggacaggacaccaggaaaaacacagagagccgacggcaccccagccacaacgacgcccaacac

SEQ ID NO: 102599 - RNA, 50 nt, Homo sapiens
aggaagcaaagagcgaggaagacggaaacaccagagagaacgcccaagac

SEQ ID NO: 102600 - RNA, 75 nt, Homo sapiens
aacacaaagaggcagcaaaggggccgcaaggccaggcgcgcagaggcacccaacggcacagaccccacacacaac

SEQ ID NO: 102601 - RNA, 85 nt, Homo sapiens
caaccccagcggcagaaggcccgcccacgaccgggccccagcacggcccaggggaagcagaggaggacgcacccagagaccagcc

SEQ ID NO: 102602 - RNA, 73 nt, Homo sapiens
gacacaccgagcccaagaacaagcgaaagcggaaccaagcagggagccgaggccggaagaagcgggcccaggc

SEQ ID NO: 102603 - RNA, 80 nt, Homo sapiens
aagacagaaagaagagggcagcgacagcaagggacccgagccagggcagagcccagaggaaaacacgaaccccggaagga

SEQ ID NO: 102604 - RNA, 81 nt, Homo sapiens
aacggccaaacaacagggaaccaaggggacaaaccaacagaagggcaaccagcacaacaccgcgcccggaaagcacaccgc

SEQ ID NO: 102605 - RNA, 93 nt, Homo sapiens
gagcgcccggaggccacagagcacagacaaacccgacccaccaacaaagaacagaccaaacgcgaagaaccccccacccggcccggaacggca

SEQ ID NO: 102606 - RNA, 39 nt, Homo sapiens
cccggagaggaagaggcaagggggaaggcaggaccggcc

SEQ ID NO: 102607 - RNA, 78 nt, Homo sapiens
accacagccgggacacagaagaaaagagcaagggggaaagcaacccggcagggcccggcccgccccccacccccggcc

SEQ ID NO: 102608 - RNA, 83 nt, Homo sapiens
agggcaccgacaaccaggaagaaaacaggacaggagaagaacacccccaagagcaaccccacaaacacaaagaaggaaggcca

SEQ ID NO: 102609 - RNA, 73 nt, Homo sapiens
ggacacgggagagaggccgggcgagcagcaggagcaccggcccaagaaacaggggcaaaggagcaagggggag

SEQ ID NO: 102610 - RNA, 69 nt, Homo sapiens
ccaggaagcaaccaaaagacaccagggcaaccaggcagcggccaacggcgaggggagaagcagagaacc

SEQ ID NO: 102611 - RNA, 69 nt, Homo sapiens
gagaagacaagacgccgggaccagagaaagggaagcacccagacgaggcgaagaaacaagaacaaaacc

SEQ ID NO: 102612 - RNA, 64 nt, Homo sapiens
acagagggagacacccagagaagaagggcaacgaacaagggcaagggaaagcacgaagggagcc

SEQ ID NO: 102613 - RNA, 76 nt, Homo sapiens
agagacccaccgcgcgagagagaggaacaggaaaagccccggaacgcggagagcggcaagaacaagcaaagaaagc

SEQ ID NO: 102614 - RNA, 78 nt, Homo sapiens
aaaccagcaaagcggcggacaacagaagacaggcaaagacaggcccacacaccagccagaggaaaaacagaacccaac

SEQ ID NO: 102615 - RNA, 79 nt, Homo sapiens
accggcaccgcggagcaaaaaaagagcccgcaagaagaacagagacagcagccaaacccccagacgacccagcaagcca

SEQ ID NO: 102616 - RNA, 78 nt, Homo sapiens
aggaagcgaaggaggcgggagcggagacccgcgcgccaggcgcgcccgggcgggcaacacaacaaggcgcggacaccc

SEQ ID NO: 102617 - RNA, 70 nt, Homo sapiens
aaagaggaagcccaccacaaaaacgaaggcggcggcacaaccccaagagggaaaacacccagaaccacca

SEQ ID NO: 102618 - RNA, 117 nt, Homo sapiens
gacgccggagaggcaggcgcggcccgcggggcgccaggcacgcgaggcccccagagaacaagagaacgggcaacccagaccacacaccggacaaggaaacaggaaagcccaaaggcg

SEQ ID NO: 102619 - RNA, 56 nt, Homo sapiens
cccaagcgaaaaagcgggaacgcaggacccaaagcggaacgggaagaagcggagga

SEQ ID NO: 102620 - RNA, 70 nt, Homo sapiens
gagaaaaaagaaaaagagaggaaggcacgaaaagacagcagggggagcagcaaagaaaggagcgaagcag

SEQ ID NO: 102621 - RNA, 75 nt, Homo sapiens
agcaccacaacagagccccgaaaaggaacggggcgcgagagagaaggggaggaaaagcagcaaagacgaccccag

SEQ ID NO: 102622 - RNA, 75 nt, Homo sapiens
ggacggacacgggagagaggccgggcgagcagcaggagcaccggcccaagaaacagggaaccccaccaccgacgg

SEQ ID NO: 102623 - RNA, 101 nt, Homo sapiens
gaagccccagcccaagcccggacccagcgccccaaggcccgagcaacaacacaagggagaaggcagcgaggcggcagcaccaagcggaagagcagagggcc

SEQ ID NO: 102624 - RNA, 107 nt, Homo sapiens
gagaagcggcggaggacgagcccgggagcgacccgcgcaaacaaacagcacagaggacccgaaaccggagagcaccgcgaaaaggcggccgagggcagcgaacacag

SEQ ID NO: 102625 - RNA, 77 nt, Homo sapiens
ggcggggcagcaaagcccacaggcaagacaagagcacacagggcacgagaaacaacgaacgagcaaggaagggccaa

SEQ ID NO: 102626 - RNA, 48 nt, Homo sapiens
acgaagagacaaaagagggacacgcaggaaccaacagagaaagaggac

SEQ ID NO: 102627 - RNA, 71 nt, Homo sapiens
acagacgggccccacaaagggacgaacccaccgcagaaagaagaccccgcgaggcaagacaagaccaggca

SEQ ID NO: 102628 - RNA, 74 nt, Homo sapiens
ggaggcaaacgaaaaccggaacagcagcacagcaaagggcaccgcacccaggcggcggccagggcagcaagcca

SEQ ID NO: 102629 - RNA, 69 nt, Homo sapiens
aacgccgcgacagaaacgacagaggacgcggagacacagcaagcagaagaggccaagcccagcaagggg

SEQ ID NO: 102630 - RNA, 121 nt, Homo sapiens
gggaaaagcgagaaaaagacccaagaaaagcaacaggcagaggcagaaacagaaaagcgaggaagacagccaagcagagaaacgaaggagcgacaaggagaccggcccccggcagaacggg

SEQ ID NO: 102631 - RNA, 83 nt, Homo sapiens
ggcggggggcgggaggcgccacccagcccccccgcgaacgcccaagggaccacaaaggagcccaaccagagcggcagcgcgga

SEQ ID NO: 102632 - RNA, 77 nt, Homo sapiens
caaccgccacgacagcccaccaggccaccacgcggcgggccggcgagaaagaacgcagcgcagcggacgcaaagaca

SEQ ID NO: 102633 - RNA, 67 nt, Homo sapiens
acgccgacacgggagggaaacaggccaacggccggaagcaccaaaccacccccagaacgggcagggc

SEQ ID NO: 102634 - RNA, 81 nt, Homo sapiens
ccaaacgaagagccagcccagaaacgcggaagaagcccaagaaccaacaacacccacgcccaggccgaagcaacaggaagg

SEQ ID NO: 102635 - RNA, 78 nt, Homo sapiens
acaccggccagcagggggagcaaagcgaacacaaggaggaggcggaaagagcagccaaagccaaagaagacgaaaaaa

SEQ ID NO: 102636 - RNA, 75 nt, Homo sapiens
gcagccgcagccgccccgaagagggggacacgacccggagcacccgaccccgacagccacccacgcacccgcggc

SEQ ID NO: 102637 - RNA, 57 nt, Homo sapiens
cgagaagaaaaagaagagagagacacggacaaggaagccggcgagcaaggggaagcc

SEQ ID NO: 102638 - RNA, 81 nt, Homo sapiens
gccccaaccgagagaccagcaaggaaccaaagcacacagagcaaggcaaccgaccaagagaagagggggaaaaaggaaggc

SEQ ID NO: 102639 - RNA, 61 nt, Homo sapiens
ggacccaggagccgcgaacgcaagaagaggcagaggacagaaggaacagagaccgccaggg

SEQ ID NO: 102640 - RNA, 60 nt, Homo sapiens
cgacgggacgacaaagaggcggcagggaccagcagacgggaagacggagcaccgcgccca

SEQ ID NO: 102641 - RNA, 70 nt, Homo sapiens
ggagccgagcggggaccccagaaaaacagaaggaaaagagccggcaaagcgaaaaagaccgcagggaagg

SEQ ID NO: 102642 - RNA, 57 nt, Homo sapiens
cacccaaacggaaggacacagagccaacccagaagagccaagcaccaggaagaagag

SEQ ID NO: 102643 - RNA, 76 nt, Homo sapiens
ccagaggagaagcaaggcgacgccagaggaggaaaggaagacaagcgccccaggcaccccccaccgcgccggccag

SEQ ID NO: 102644 - RNA, 70 nt, Homo sapiens
accagggaggcaggcaaggaagagacgaagcccggaacacgcgcgaaaaaccagcaccgcccacgaggac

SEQ ID NO: 102645 - RNA, 45 nt, Homo sapiens
aggaaggaacccgaagaaagcaaaggcaggcaggggcagaaggcg

SEQ ID NO: 102646 - RNA, 66 nt, Homo sapiens
cgagccccgaaaacgaaaaccacgccacagaacggagcaccagcgggggagcagcccccgagaccg

SEQ ID NO: 102647 - RNA, 100 nt, Homo sapiens
gagcacggggcgcaggaccaccaggcagccaggccaggggaagcccggccccaggggcaaggggaaaggagcgggaacgcggccgcggcccgccggcccc

SEQ ID NO: 102648 - RNA, 74 nt, Homo sapiens
cgaggagcaaccgccaaccagaccaacaccggggggcgccagagaccagggggaccagggaaggaaaaccaaaa

SEQ ID NO: 102649 - RNA, 77 nt, Homo sapiens
aaaggcgaccacaggaggagaaaagaaccggacacacacgaccacgggagggaacggaagaagccaggccaagaggg

SEQ ID NO: 102650 - RNA, 80 nt, Homo sapiens
ggggaagggcaggaggaggaggaggggcccggcggcggggagaagaggcgacgagggagccgcagggcacaccaagaaag

SEQ ID NO: 102651 - RNA, 37 nt, Homo sapiens
caaacgagggcacacggcggaacgaaaacaaacggaa

SEQ ID NO: 102652 - RNA, 83 nt, Homo sapiens
cgaggcccccacaagaagcagcggacgcgcccccaagaaagcccccgcccagccgcgagccagacccaggcccgccgccggag

SEQ ID NO: 102653 - RNA, 77 nt, Homo sapiens
caccccgcaggagaacgagcccccaccccggcaagaaaggggacccagagagggaccagggccaaagaagagccggg

SEQ ID NO: 102654 - RNA, 76 nt, Homo sapiens
aacacgcgccggaaagcagccaagacagagacccgacgccgcccgagcaccaagcaggacacaggagaccgggcgg

SEQ ID NO: 102655 - RNA, 72 nt, Homo sapiens
aaagcccaaccagcgcccccaccacgggaggggccaggccacggacgaagcccagagggcagaagacccgag

SEQ ID NO: 102656 - RNA, 75 nt, Homo sapiens
gagagggccgggaggcacggacacacaaaaagcagcagaaagcagagagcccagaagaaaccaaagccacaccac

SEQ ID NO: 102657 - RNA, 80 nt, Homo sapiens
ggacgagccgcaggacacaggcaccaggcagcagggaggaaaccaggcaacaggaaggacacagacaaaccagagcccca

SEQ ID NO: 102658 - RNA, 75 nt, Homo sapiens
ccaggaccaacagaggagcaaaagaagaggggccagacgcaaagcccaaaaacaggggcggggacccaacacacc

SEQ ID NO: 102659 - RNA, 85 nt, Homo sapiens
caaccgggccccaaccaggggccacccggggccccccacaccacgaggacaagcagaaaccaagcggaccgagacacagccgccc

SEQ ID NO: 102660 - RNA, 78 nt, Homo sapiens
aaggaccggagacacaccaaggggagagaaacaggacagggaacaaaggcagagaaacgcaccccagagcaggacaca

SEQ ID NO: 102661 - RNA, 71 nt, Homo sapiens
ggaggacgggccaccgcggcgcgaacgacgaagcgggacgggggcggccccgggaacgccggcagcacggc

SEQ ID NO: 102662 - RNA, 74 nt, Homo sapiens
ggagaaacggagaacacagccagccagcacaccaccaggagcagaacggaaagagaaaccccagaggaacccac

SEQ ID NO: 102663 - RNA, 68 nt, Homo sapiens
ggggacggagccggcaaacagggcccggcagccaacaacagccagacaacgaagagaggaaagaagcg

SEQ ID NO: 102664 - RNA, 78 nt, Homo sapiens
cgacaggaggagacaggcgagagaggaggacacgaccgccaacaggcagaccacagaaacgaagccgggagaacgccc

SEQ ID NO: 102665 - RNA, 80 nt, Homo sapiens
gaagggcggaaaggcacaggaagccaagggagcgcagaaggcagggagaccccaaggcaaaaccaccacacgacaaaaac

SEQ ID NO: 102666 - RNA, 82 nt, Homo sapiens
gagcgccgcgggaagggcggggagcggagccaggccccggggagaacgaagccaacagcagaggcaaagaaaaggcaaaaaa

SEQ ID NO: 102667 - RNA, 75 nt, Homo sapiens
acggaccaaaggccgggcgcagaacccccagaccacacgcggaaaccgcggccggcacaaaaccggcacacaaaa

SEQ ID NO: 102668 - RNA, 73 nt, Homo sapiens
caagagaggacgcccaaccacagcccagacggaccccagcagccaccccgaacagaaacaaccaggggggacc

SEQ ID NO: 102669 - RNA, 76 nt, Homo sapiens
ggaccgcagcgccccgccccagagaaggaacagaacagacaccaccgaaacgcgccaagcagacaggcaaggaaca

SEQ ID NO: 102670 - RNA, 40 nt, Homo sapiens
gggaacaggcggagcggaagcgcggagccagcgcccggca

SEQ ID NO: 102671 - RNA, 58 nt, Homo sapiens
cgacccaaagcgcggaaagggcggagccacggcccagggcagccaagcaggaccaccc

SEQ ID NO: 102672 - RNA, 76 nt, Homo sapiens
gagcacgacaaccgccaggcacacggggaggacgcgagcggaagagaagcaaaaagacaaggaggaaagcgacacc

SEQ ID NO: 102673 - RNA, 71 nt, Homo sapiens
ggggaagaaaccagcaggcaaccaaagacgacggcagaaagacccggacggccggaaggaaagcaaaagac

SEQ ID NO: 102674 - RNA, 56 nt, Homo sapiens
caggagggggacaggaggcgcggggcccaggcgagcagaacaaggagaaagaccaa

SEQ ID NO: 102675 - RNA, 55 nt, Homo sapiens
agacggggcggaagaccaagacacgagagggccagcagcagagagacagggaaga

SEQ ID NO: 102676 - RNA, 70 nt, Homo sapiens
agcaggacgcgccgcgccccaagcggccacacccaagaccggcagacagaacaaaaaaacacaaaaagga

SEQ ID NO: 102677 - RNA, 37 nt, Homo sapiens
gacagacagccccaggaggggcgcagcgcaggaacgg

SEQ ID NO: 102678 - RNA, 72 nt, Homo sapiens
cggaccagaccggggggaaaggcgcaagggagcccacagagaacgccacaggcagcaaagcaccaggcagca

SEQ ID NO: 102679 - RNA, 65 nt, Homo sapiens
gcagagacagacacaagcgggccaacaaaaggccagggagcggagaagggaggcgggacgcacca

SEQ ID NO: 102680 - RNA, 70 nt, Homo sapiens
aacagagcaggagcacaccccggcaccgagcggacggagaggcagcaagaaacggagcggaaacggaaaa

SEQ ID NO: 102681 - RNA, 71 nt, Homo sapiens
gccagcccgccgcaagaccacgaacacaggggaaccagaagaggccaaccagcacgaacgccagcagcacg

SEQ ID NO: 102682 - RNA, 61 nt, Homo sapiens
ggggccagcgcagccgcggcggagacgcacaggcccggcgggacaagaggagagagaggac

SEQ ID NO: 102683 - RNA, 76 nt, Homo sapiens
accccgaaccagcaccccaccacaacaggagaacaagaccacggggaggggccggggacagcggcgcaacccacag

SEQ ID NO: 102684 - RNA, 71 nt, Homo sapiens
cacgcgcggaaggcagcgcccagcagcgcagggccgaaggggccgaacacagggagacaccccgcagagcc

SEQ ID NO: 102685 - RNA, 72 nt, Homo sapiens
aaggcgaggacgggaggcgagagaggcgaagggggacagaggagccaaaggccaaaccaccagcagacagcg

SEQ ID NO: 102686 - RNA, 89 nt, Homo sapiens
cccagccagaccccccccgaccggagcgccaacacccccccgagagcagcagccgcccagcccaagcacccacccagaggaaagaccca

SEQ ID NO: 102687 - RNA, 47 nt, Homo sapiens
cgggggggcccgcaccgccccccccaccagccacggaccgcagcagc

SEQ ID NO: 102688 - RNA, 83 nt, Homo sapiens
ggaggcgcgaggagccggcgcggcgcagcccacggcgcaggcccacggagcgcagccgccgagcacgagagaaacagaggacg

SEQ ID NO: 102689 - RNA, 59 nt, Homo sapiens
ccgggcgggcccagcccagaaccccgccccccgaggcgcagcccgaacccagcagccac

SEQ ID NO: 102690 - RNA, 73 nt, Homo sapiens
gcgagccccgggaaagagcagcgacgggagacagccgggcgcgcaagggcggaaagcaggaaggacaaaacgc

SEQ ID NO: 102691 - RNA, 71 nt, Homo sapiens
cccaggagacacggcaaaaacaacgaacgagcaaggaagggccaaggcagaccccacaccggagaacgcaa

SEQ ID NO: 102692 - RNA, 83 nt, Homo sapiens
cgggggaacgaggaagcgcccaagacagcaccaggcccgaagcagaaaacagagggaaagaaacagccccagagcccagagcc

SEQ ID NO: 102693 - RNA, 79 nt, Homo sapiens
cagcggggcggaggacggcgggcgcaaagggaagccgaggcccgcggccccagacgcaaccagacgaagaaacgaacgg

SEQ ID NO: 102694 - RNA, 91 nt, Homo sapiens
gcgcagcgcgcgggggaggcgcccgcgccgacgcggggcccaggccaggaccaccagccagcgggccacgaagaagggcagcaaaggaacc

SEQ ID NO: 102695 - RNA, 77 nt, Homo sapiens
cggaggggcccacgaggagccaacacaccagcaggaaaccgacgggaggaagacccaggcgcacaggaaacaggaag

SEQ ID NO: 102696 - RNA, 56 nt, Homo sapiens
aacagacagacacaggagcacaaacagcagacaaacgcaagggccacgcagaaagg

SEQ ID NO: 102697 - RNA, 93 nt, Homo sapiens
aaccgcccggccgggagccgccgcgggcaggacgcgcgcgcaggacccaaagacaggaccacgcaccagcagagaaggaaagcaaaccgaagc

SEQ ID NO: 102698 - RNA, 51 nt, Homo sapiens
acaagaagacaacagagcagacaggggcagcaggagcgacgcccccaggaa

SEQ ID NO: 102699 - RNA, 54 nt, Homo sapiens
caaagagcgccccacgagagaacggcacacgcgagcggagaaggaccaagaacc

SEQ ID NO: 102700 - RNA, 129 nt, Homo sapiens
gccacccggcgcgagggggcgcaggaccggccgcaggccaccgacacgagacaaccgggagccggaccgaccagcggagagagaggaggagccgacgggaggaggaccccgcagacgacccccccaagc

SEQ ID NO: 102701 - RNA, 58 nt, Homo sapiens
ggagcgggagacccgccccgccgcaccacggacagagacgagacagaagcagcacagg

SEQ ID NO: 102702 - RNA, 68 nt, Homo sapiens
cgcgacaggcccgaaaaaaacccaggcggcccagggggagaagcagaccgcaccaggcgggaccccga

SEQ ID NO: 102703 - RNA, 42 nt, Homo sapiens
cagcacaacgaggggcaagcgaacgcccaagcaaaaacaggg

SEQ ID NO: 102704 - RNA, 59 nt, Homo sapiens
agggccaggccgggcagccgccgacgagcagcaaaagaacagaagggagaagccacaac

SEQ ID NO: 102705 - RNA, 76 nt, Homo sapiens
aaagccgccacgcccccccaaacggacagaggcggacggcgcccagcgaggggccggcacccgcccgagcagcgcc

SEQ ID NO: 102706 - RNA, 54 nt, Homo sapiens
gaacaaacccacagccagagccagaggaaaacgaaaaacgggcagggacaaggc

SEQ ID NO: 102707 - RNA, 53 nt, Homo sapiens
ccccgcaaacgggacacaggcaaggaaacagacacccaggagccccccagcga

SEQ ID NO: 102708 - RNA, 87 nt, Homo sapiens
gcaagaggcgaccccagcacggcaaagcccggagacaagccaacagaaccggaagaccggaaggcgcgagaaagaacgggaaaggcg

SEQ ID NO: 102709 - RNA, 66 nt, Homo sapiens
gccagaacggcggccccagcacaaaccagggaaagaccgcacagcagacccgggagcggcaccacc

SEQ ID NO: 102710 - RNA, 72 nt, Homo sapiens
gccaagaggaaccccaggccaaacggccgagcgaccaggagaggagcccccgcccgaagaccggggagggcc

SEQ ID NO: 102711 - RNA, 71 nt, Homo sapiens
ccgaggaaccgccaaggccgcaggaaaggagaacagcagaccggagaagggagacgagaaccacaggccag

SEQ ID NO: 102712 - RNA, 79 nt, Homo sapiens
ggagacgcgggcccagccgcggcccacggggaggcgcggcggaaggcccgggaacacccaaaggaaaaagggggagaca

SEQ ID NO: 102713 - RNA, 78 nt, Homo sapiens
acgcaggccccagccaaaacacaacaaagccagcccacagaacacagcacggaaggccaagcggaaaagacgagaagc

SEQ ID NO: 102714 - RNA, 76 nt, Homo sapiens
agaccacccaaacgcggcacgggagcaccccgagcagaaggcagaccggaggaacaaaccgcccccaaagacaaca

SEQ ID NO: 102715 - RNA, 68 nt, Homo sapiens
gggcgggggccggaccaagggcacgcaaaaaaaccaagggaaaagagacaagaccgagacacaaaaaa

SEQ ID NO: 102716 - RNA, 78 nt, Homo sapiens
agacgggaaagacgcacagcaccccaccggaggcccgcggccagcaacccccagcaggcggacaccgaccgcaggaag

SEQ ID NO: 102717 - RNA, 78 nt, Homo sapiens
gacaccccggaagcgggaaagaggaccacccgcacccaggggacgcacggcccaaccccgagcaaggacgcccaccca

SEQ ID NO: 102718 - RNA, 70 nt, Homo sapiens
aaaaacacagaagacaacagcgggaaaacacaccaacaaagcagcagaccagagagggggcccgaagaac

SEQ ID NO: 102719 - RNA, 60 nt, Homo sapiens
gacaggagggaggaacagacaccgagccagcaagcccccaacgacacaagaaggaaagga

SEQ ID NO: 102720 - RNA, 102 nt, Homo sapiens
cggcagccgcgcgccaaggccggacccgggcccagcgagagccagccggaggacccagcagcaggccacccaggccgaaggccagcacagagcgcgcaagca

SEQ ID NO: 102721 - RNA, 69 nt, Homo sapiens
aaacccggggcgcaaacgcgagagaagagaaaacaacacacagaggaagaaaacgcaagcaacaggaac

SEQ ID NO: 102722 - RNA, 67 nt, Homo sapiens
gccccgaggccaagccaccccggcggaaccgcccccaggcgcagagacaaggaagggaagcggagaa

SEQ ID NO: 102723 - RNA, 75 nt, Homo sapiens
ccggacgagaaaccccgccagccccgcaacgggacccaggccggggggggcacagagccccggaagacagccccc

SEQ ID NO: 102724 - RNA, 69 nt, Homo sapiens
caaaagacagaaaaccgaggcaccaagccggccagcaagacccgagcccagcgaagaggagaggaaggc

SEQ ID NO: 102725 - RNA, 82 nt, Homo sapiens
caggggaccgcaagcgagcgagcgcagagcccggggacggcgaggccccagaccacacgagagcccccggaacagcacaacc

SEQ ID NO: 102726 - RNA, 75 nt, Homo sapiens
gggggcgagaaggcgggaagccgaaggcagccacagaaagcgcaacacccaacaccccgagcccagaacgcccgg

SEQ ID NO: 102727 - RNA, 90 nt, Homo sapiens
gcacagcccacagggagaaagagcaggaccgcaccagcaggggcccgaccaggaggcccggaggaccccccccgagccaggagggcccag

SEQ ID NO: 102728 - RNA, 58 nt, Homo sapiens
cgggccagcgacccgcgccagcgcccagggggggaaaccaccgaggagccgccggccc

SEQ ID NO: 102729 - RNA, 37 nt, Homo sapiens
gaggcagaggcacaccgaaaggcacacaaagagaaag

SEQ ID NO: 102730 - RNA, 73 nt, Homo sapiens
cgacaccggcgaggaacggcaggcggacaggaggaacccaggcaagccgaaggcccggacggaagcgaaaaca

SEQ ID NO: 102731 - RNA, 80 nt, Homo sapiens
gccgccgcgggcgccagaaggaagaggcggacggaggagcaggcgagaagagaagccggcgggccgagaagaagcggagc

SEQ ID NO: 102732 - RNA, 77 nt, Homo sapiens
cgggagagccagaacaagggcaccagacacacaagacccacgccgggcaaccacaccgcgcaaggcaggcacccaga

SEQ ID NO: 102733 - RNA, 73 nt, Homo sapiens
gggaaggacgggacagagccgaaagggaacgggaagggcaaaacccaggacccacagcgcaccagaaagccgg

SEQ ID NO: 102734 - RNA, 73 nt, Homo sapiens
ggcgcgagcccagaggaaccaaggaagagaaaccagaggcacccggagaagagggagccaagagcaaagacca

SEQ ID NO: 102735 - RNA, 72 nt, Homo sapiens
gaacgggcacagcagcggaaaaacacagagggcacacggcacagaccagacacacacccacgggaaggaaga

SEQ ID NO: 102736 - RNA, 95 nt, Homo sapiens
ggggaccagcagccgggccagggccagagcaaagggggcaccagccgaagccaggcaagcaagaaccaacaagaagaccccaagccacaacccga

SEQ ID NO: 102737 - RNA, 76 nt, Homo sapiens
agacacaagagcaagcccgcacgggaaggcaccacgaccacagagaagcaggcgaccaggcgcgcgggcaagaaag

SEQ ID NO: 102738 - RNA, 70 nt, Homo sapiens
gagagcagaaaagaaccaggaaaaaaacgcaagacagcagaacaccgaacaggggacccaagccagagaa

SEQ ID NO: 102739 - RNA, 79 nt, Homo sapiens
gaggcaacaccaacaggacagccagagaccgaacagagagaacaagagacgcagccgcacagaggacaggagagacaac

SEQ ID NO: 102740 - RNA, 73 nt, Homo sapiens
ggggccagccgccgcgcccgcccgacccgccaccgccaggccaggcacgacaggcagaaccaccagcacacac

SEQ ID NO: 102741 - RNA, 62 nt, Homo sapiens
aaacggaagggcgcggcggcccggagcacggcgaacgcacagagcaagagcgagggagcggg

SEQ ID NO: 102742 - RNA, 61 nt, Homo sapiens
aagaagaacagagacagcagccaaacccccagaccccaacaagccgaagcacaaggcagcc

SEQ ID NO: 102743 - RNA, 39 nt, Homo sapiens
ccccgacccgcagagaaccagaacggcaccccggccagc

SEQ ID NO: 102744 - RNA, 72 nt, Homo sapiens
acggcaccagacagaagacacggcccagaacacaggaaccaccacggcgggcgacaccgacgacagaaggag

SEQ ID NO: 102745 - RNA, 64 nt, Homo sapiens
cgcgaagaaaaacgcgggggacacccagccacacgcggagaagagaaccagggggaaggccccg

SEQ ID NO: 102746 - RNA, 52 nt, Homo sapiens
ggaacaggcaccaagccggcggggcgggcagaggcagaaaagcagagacaga

SEQ ID NO: 102747 - RNA, 92 nt, Homo sapiens
aggcgggcacaagaaggaacccgcaggagaccagacccacgacccaccgaagaagacagacaacggcccaagggagcaggggacccggcaaa

SEQ ID NO: 102748 - RNA, 74 nt, Homo sapiens
agcagccaacaggagcacagccagcagaccaaagcgcgcgggcacagccccccgcagacagaacaggacgaaac

SEQ ID NO: 102749 - RNA, 74 nt, Homo sapiens
cggaaagaagagaagaccagcaaaaggagaccccccggccagaggaaaaagcgcaccgccagagaaggaacacc

SEQ ID NO: 102750 - RNA, 61 nt, Homo sapiens
cacgaagcgggggagaaaaggaccagggacagcacgcaagacaagaagagggggcacaggc

SEQ ID NO: 102751 - RNA, 78 nt, Homo sapiens
ggagcggggcgcccgcgcagcagcccaggagaggacacagaacagcggagccgaggaccaaaagcgaagggcgagaaa

SEQ ID NO: 102752 - RNA, 86 nt, Homo sapiens
gggcgagcagcggcgggggcccgaggggccccgagccccggccccaaagacccaaaacagagacaccccccagcccccgcgccccg

SEQ ID NO: 102753 - RNA, 73 nt, Homo sapiens
ccaccgaagacacaccccacaggaccccagagcgacagcccgggacaccaagaaagaacacaaggccaaccag

SEQ ID NO: 102754 - RNA, 76 nt, Homo sapiens
gggccccgacgaagcgaggcaccgcagcaccagggacggaaagcccgggacgcgagcccacccggacacagcgccg

SEQ ID NO: 102755 - RNA, 76 nt, Homo sapiens
aaggagacaggacgaagcccaaaccacaagccacaaaagaagccccccagggaaagcccaaccagcagacacgcca

SEQ ID NO: 102756 - RNA, 83 nt, Homo sapiens
cggggccccgcagcgacaacaggaggccggaagacccaaagcgaggcaagaacggaagcacgggcggaggaaagcacaagcag

SEQ ID NO: 102757 - RNA, 78 nt, Homo sapiens
gccgccgcccggccaccggcgggcccgaggagagcgcggagccgcgcccccgggacgagagaagcccacaaaggagga

SEQ ID NO: 102758 - RNA, 65 nt, Homo sapiens
aggccgcaccaaccccccgggccccgggacagccccaacagcccgcccgccacccaacgaagcgg

SEQ ID NO: 102759 - RNA, 56 nt, Homo sapiens
gaaaaaccccagcggccgaacagagggacacagggaaggaagaccccgaggaggag

SEQ ID NO: 102760 - RNA, 67 nt, Homo sapiens
ccaggaagcggagggcgcgcgaggcaaacaacacccaacagcccaaagcaaaggagcaacagcccag

SEQ ID NO: 102761 - RNA, 80 nt, Homo sapiens
ccagggcacagcgcgggagccgcacgggccaagaagaagccggaggaggagaagagccgagggagacgacgagagccaac

SEQ ID NO: 102762 - RNA, 77 nt, Homo sapiens
ggaccagaccaagacacacaaccaaacaggagaaaaaggagggagccacaccaaagccggacccccccagccggacc

SEQ ID NO: 102763 - RNA, 38 nt, Homo sapiens
ccccccgcccccacaagcgcagggggcccccgcccgac

SEQ ID NO: 102764 - RNA, 72 nt, Homo sapiens
gaaacaggccgaaaagaaacccagaggcgacaacccggaaaccacaaaaggaaggaccaaagaaagaccagc

SEQ ID NO: 102765 - RNA, 40 nt, Homo sapiens
cagccgccaaagaccccgccgaaggggggaaaagccaggc

SEQ ID NO: 102766 - RNA, 56 nt, Homo sapiens
ccaaccacgacgaagcggaaggcagaagagcagggcgcagcagcagggcagccggc

SEQ ID NO: 102767 - RNA, 84 nt, Homo sapiens
accggcaccgcggagcaaaaaaagagcccgcaagaagaacagagacagcagccaaacccccaggccccagggaaaggaccgagg

SEQ ID NO: 102768 - RNA, 58 nt, Homo sapiens
gccccaggcacacggagaagccggccacacacggcacaagggaagagaaaagacacag

SEQ ID NO: 102769 - RNA, 66 nt, Homo sapiens
ggcaaaacgaaaggagcccaaagaacagccggacacaagagggcaagaaaggcgcgacgggccgaa

SEQ ID NO: 102770 - RNA, 75 nt, Homo sapiens
gggcgcccaccaccgcaccacgccgcggggcagcggcccgggcggcgacggagcgacggccccaagcagcacgca

SEQ ID NO: 102771 - RNA, 64 nt, Homo sapiens
aggaagggggaagaagcacgcccaccggccaccggcacgagggaaagcaacccccaggaccggg

SEQ ID NO: 102772 - RNA, 96 nt, Homo sapiens
gagaaacacacagacccgagaaacgggaacgagcacagggggaaggggaaaggcaacagaacgaaaacaagcacagacaggaaggcaacccacaag

SEQ ID NO: 102773 - RNA, 81 nt, Homo sapiens
agggaggagcgggacaccccggaagcgggaaaggaacaagccagccagcaccacccaacaccagccagaccggcagcaacc

SEQ ID NO: 102774 - RNA, 75 nt, Homo sapiens
agacaggcggcggaggaaacaacaggagcgacaaccaagaaccggccgagacagggccccgacggaagacacaaa

SEQ ID NO: 102775 - RNA, 73 nt, Homo sapiens
gaggccggcggcagcgacgggccccgaggcgacccagaaagagccacccgaagcagcccgggaaaaaagacaa

SEQ ID NO: 102776 - RNA, 81 nt, Homo sapiens
agagcaggcgacacgcaggagacagggcgggaccaccaggagcagagcggaggccaccagcccaacaccaccgggaagcag

SEQ ID NO: 102777 - RNA, 70 nt, Homo sapiens
ccggcggccccaccccacgcagccccccacgcgcagggcccaaggagggagcgacggcggagggcacaag

SEQ ID NO: 102778 - RNA, 83 nt, Homo sapiens
acccacaaagcagaaagaaggacagggacacaaacaccagagggaaaaagaccacagaaacagcaaggcgccaccggaagaaa

SEQ ID NO: 102779 - RNA, 54 nt, Homo sapiens
agacaccacacacagcccgcagaaaaggccgggacagcagaaaacagccagcag

SEQ ID NO: 102780 - RNA, 82 nt, Homo sapiens
agaccagaaacggaggagcccgccgaagcagagccggcccaacagagaacggcaaacagcgagaaaccacagacacaaccac

SEQ ID NO: 102781 - RNA, 75 nt, Homo sapiens
gaccgagagcggaccgagagcgcgaaacgcacgagaagcacagcaaacgcacgcaaggagcccagggggccggag

SEQ ID NO: 102782 - RNA, 84 nt, Homo sapiens
ggggcggaacacccgccaaagcagagaaaagaaagcgcaggcaggagaaggacagcagagccacaagggacgcaaaaagaaggg

SEQ ID NO: 102783 - RNA, 73 nt, Homo sapiens
caagcacgcgggaaggagagagaaaacagcggagcgggccaccaaagcccgccgggacccaccaagggccccc

SEQ ID NO: 102784 - RNA, 87 nt, Homo sapiens
gcgacaaggagcgcggcccgagaacgaggaggagcggccaaagcagacagcgggacagcgcgagaaggccaaaaaagcgcacacgcc

SEQ ID NO: 102785 - RNA, 67 nt, Homo sapiens
cgaccgcggcgcgccacccggccgcagcaaaggaaacccagacgacaaggaaggccaagggacccac

SEQ ID NO: 102786 - RNA, 99 nt, Homo sapiens
cccagcgcccccccccagcccgccgcgcagccagaggcaccggagcaccggagcgagacagaagagcagcacaggggaagagacagaaggcaggacaga

SEQ ID NO: 102787 - RNA, 75 nt, Homo sapiens
ccagccaccggaaagccaaccagcccaaaggccaacggccgccaccaaaaagaagaagggaaagcgcgaagcgca

SEQ ID NO: 102788 - RNA, 67 nt, Homo sapiens
ccacaaggagaaaggcagacaggcaagagcagccacggaaagaggaccgaccagcccacaaacgggc

SEQ ID NO: 102789 - RNA, 54 nt, Homo sapiens
gggcacccacaagcgcacgaccaccaaggaggggaagcccgacagacgggaacc

SEQ ID NO: 102790 - RNA, 61 nt, Homo sapiens
cgggcccccaaaaagacggccaagcgcacgggccgaagggccaggccgagggcccgcccgg

SEQ ID NO: 102791 - RNA, 75 nt, Homo sapiens
agaacaaaagaaaaccaaagcagaccagaaaaaacagcacaccaggaagcaaggacgggaacaaaggagaaaggg

SEQ ID NO: 102792 - RNA, 59 nt, Homo sapiens
aagacgagagcaagaaagaaggcgagacaggcgccaggggagaggaggcagaaggagac

SEQ ID NO: 102793 - RNA, 71 nt, Homo sapiens
gcggcgcggagcagccgagaccaggccgccaggcacagagaaggcaaacgggagggcgaggacaccaagag

SEQ ID NO: 102794 - RNA, 75 nt, Homo sapiens
ccggcaacagcagcagaaaaaccaaggaaacagagaaagagagggggcacagaaggggacagcggcaccccgacc

SEQ ID NO: 102795 - RNA, 70 nt, Homo sapiens
aaaaaaagaaacccggacaaaagcagcaccagacggagaaggacaaaccggcgaccacacacggggacga

SEQ ID NO: 102796 - RNA, 79 nt, Homo sapiens
gagccagaccaaagccaagagcccaggggccgggcacggaagaccaagcgacacccgccgcaagccacgccacgcggga

SEQ ID NO: 102797 - RNA, 65 nt, Homo sapiens
gacagccgccgacccggcgggggaggagacaaggacgaaagagggccccacgcccaaaccaaacg

SEQ ID NO: 102798 - RNA, 68 nt, Homo sapiens
cgcgcagccacccagccccggaaggcgcccggagccggcgccgcgggccgagagagacggggcaccgg

SEQ ID NO: 102799 - RNA, 82 nt, Homo sapiens
gaccgagaccggaccgagagcggaccgagagcgcgaaacgcacgagaagagaccggggacgacgacgaggcaccaccccagc

SEQ ID NO: 102800 - RNA, 77 nt, Homo sapiens
ggccgacggggggaccaggagacgagaccagggacaacaggagaagcggaaggagaccacccaccaggcgcaggccc

SEQ ID NO: 102801 - RNA, 69 nt, Homo sapiens
acgagcaagccaagaccgaaagaggaggaaaaacgagccaaaccggaaagaggaaagcggggcagcaag

SEQ ID NO: 102802 - RNA, 85 nt, Homo sapiens
cgggggaagcagcacgggacccagcccaggccgcacggacggggggggagaggaaacgagacccagaaaggggaagcacgcaagg

SEQ ID NO: 102803 - RNA, 71 nt, Homo sapiens
gacacacccaggaagcagccagaccaagaacaaccgcggacacggagaggaaggcgacggaaaaccggcag

SEQ ID NO: 102804 - RNA, 71 nt, Homo sapiens
gagagaaagacccaccaagaggacgagaggagaaacaccaccaaaaccaagcgcccgagcagaggaagaac

SEQ ID NO: 102805 - RNA, 68 nt, Homo sapiens
ccccaccgcgccccagcggccacggagggcccggggccgccagagcggagaaagcaggacaagaccgc

SEQ ID NO: 102806 - RNA, 57 nt, Homo sapiens
aggcgaggagcaacccaccagaggagaccgaagaagacggagaccaaacaggacaga

SEQ ID NO: 102807 - RNA, 55 nt, Homo sapiens
cgagggacgaaggagaccgcgcagagcccacaggcggacgagcgaggaacagacc

SEQ ID NO: 102808 - RNA, 56 nt, Homo sapiens
ccacagaggaagagcagccagacacaagacgggaaggagggccgccagaaggagcc

SEQ ID NO: 102809 - RNA, 69 nt, Homo sapiens
caggacgaaaaaagggcaagaagccagaagaaaagagcgagaagaagagaggcggccgcccaggaagcg

SEQ ID NO: 102810 - RNA, 75 nt, Homo sapiens
agagcaacacaacggaaaggagcaagagaagccaagaggaaacccaaagccgggggaaggaggagacgcgaagga

SEQ ID NO: 102811 - RNA, 68 nt, Homo sapiens
gaggcccagcccaaggaacaccaacagacgacaagcagccacgcagcaaggccaaagacccagcgagg

SEQ ID NO: 102812 - RNA, 79 nt, Homo sapiens
caaggagcaaagcagcggcgcagcccgggaacaaagaacggaaacacacagacagaagcgacggagggacaaggccaac

SEQ ID NO: 102813 - RNA, 86 nt, Homo sapiens
cagggcccacgggccagccccgccgccccgcaaccggcagccgccgccgggaagacacgagaggcgagggacgacagagcaagcgg

SEQ ID NO: 102814 - RNA, 90 nt, Homo sapiens
cacagggcacgaggggcaacagggacccccggcaccccgagaggcgcgccgaggccccaacaccgccgcaggccgaccccgggacacacc

SEQ ID NO: 102815 - RNA, 60 nt, Homo sapiens
ggaacgcagccggggacaccaaacaggacggcaaacccggggagacggcgaagggaaaac

SEQ ID NO: 102816 - RNA, 73 nt, Homo sapiens
aaaccgaaagaccccagaggagggagcgaaagcgagagagaaaaaccgcccaaggaaacgcacagaacgaaaa

SEQ ID NO: 102817 - RNA, 68 nt, Homo sapiens
aggccgcccccgggggccgcgaacccgaggcaaccggaggcgaaacacagcggcacaaagcggagcga

SEQ ID NO: 102818 - RNA, 87 nt, Homo sapiens
gaagaaacgaagcagagcagggagcgcgacagcgccccggaaaggaggcagagcagaggcccagccacgcccaggccaggccaggcc

SEQ ID NO: 102819 - RNA, 70 nt, Homo sapiens
cacccgccaaagcagagaaaagacgggagaagcgccacccaccagaacccagggaccgggaacaggagca

SEQ ID NO: 102820 - RNA, 76 nt, Homo sapiens
ggccgcgccccggcccgcgggaagcaggacgcgccgcgccccaaggccccggccccaacaggcccgcgcccagagc

SEQ ID NO: 102821 - RNA, 60 nt, Homo sapiens
ggagacgacccgacgaagcccacgccgggacccagcgcagcaaaccagccggcgggcgcc

SEQ ID NO: 102822 - RNA, 52 nt, Homo sapiens
aagaacgacccgcccggggcagcaggaagaccgcaggaaagcaggaaggcaa

SEQ ID NO: 102823 - RNA, 68 nt, Homo sapiens
gaggcggcgccgcgaaagaggggcgaggaggcgggccaggaaaggagggaaaaccagccaaacaggcg

SEQ ID NO: 102824 - RNA, 79 nt, Homo sapiens
cccagccaaagaaacaagccgggaaagggacaagaagggcaaagccgaagcccagccccgaggacagcagacaaacaag

SEQ ID NO: 102825 - RNA, 57 nt, Homo sapiens
gggcacagcgccccccagcagagcgaggcaacgacacacgaaaacccccccgaggag

SEQ ID NO: 102826 - RNA, 37 nt, Homo sapiens
caggaggccagggggcgccagcgcgaccgaggaacaa

SEQ ID NO: 102827 - RNA, 56 nt, Homo sapiens
acacggaaccagagggggacgggccgaaggagcaccagggaacaggaaacaagcga

SEQ ID NO: 102828 - RNA, 70 nt, Homo sapiens
agagacagaaagaagaaaacagaccaacgaaaggcccagacaacacgccacaccggcacagaacggaaac

SEQ ID NO: 102829 - RNA, 80 nt, Homo sapiens
gggagccggcgccgcgcccaagccggacggggacgagcggcagacaacaggcacaaagagagaaggaacacccacagggc

SEQ ID NO: 102830 - RNA, 70 nt, Homo sapiens
ggagcgcggcccgaggcccgcccagagcggaggcacccaccacgggccaggcgggccagaggcaagccgc

SEQ ID NO: 102831 - RNA, 77 nt, Homo sapiens
cgaaagaagagcccaacagaagcaagaagagagaacccaacagggggagcgggccggagagaagagaggggcgcgag

SEQ ID NO: 102832 - RNA, 83 nt, Homo sapiens
cgcccccacagcaccccgggcggcggagggaaagaacacagggggccagaggcagccgacccgaccagcgcgaggaagcagca

SEQ ID NO: 102833 - RNA, 73 nt, Homo sapiens
aaaaaggccccccgagaaggggccaaagaagaggccgagcacaggaaaggccgccagaagccgcccagccagc

SEQ ID NO: 102834 - RNA, 75 nt, Homo sapiens
gaagaagcgcagacaaggccaacagacggcggaaagcaacgaaaccagaacagaaagggacgggacagcaaaagg

SEQ ID NO: 102835 - RNA, 35 nt, Homo sapiens
cacagccggccagggggggaggcaagcaggggggc

SEQ ID NO: 102836 - RNA, 75 nt, Homo sapiens
cgaaagagggcacccacccacgaagggaggaaaagggcagggacagcgcaggcagcagcaaagggggagcgccag

SEQ ID NO: 102837 - RNA, 63 nt, Homo sapiens
accaagaaccagaacagcgcgagccacaaggcaaggaagcaggcggcaccacccaagagaacc

SEQ ID NO: 102838 - RNA, 79 nt, Homo sapiens
ggaagcggaccaggggaggacaaaacccaccaagaccagagaagcaccggccacaagggacagccaaagaccggagcgg

SEQ ID NO: 102839 - RNA, 62 nt, Homo sapiens
ggaccagaaaagcaaaaggacaggaaaaggacagggaccagcagaagcaccccacagcaagg

SEQ ID NO: 102840 - RNA, 81 nt, Homo sapiens
cccagcacagccagcaccgcacgcccgcaagggaggcccagcaggcgcagcagcaagagggaaaaaggcaacgggaccgcg

SEQ ID NO: 102841 - RNA, 68 nt, Homo sapiens
gcaaagagaagaagggggaaaaagggaccgcgggccaaaagaaaagcagcccggagaagacaaccaca

SEQ ID NO: 102842 - RNA, 70 nt, Homo sapiens
cacccggcccacgccgcagccccggggccgcgggcagcaggaagaccaacggggagccggggaagaggcg

SEQ ID NO: 102843 - RNA, 87 nt, Homo sapiens
caaggagaaggacgccagggcggaggaccccaacggaaggccgcggacccccccccccccaccccacaggagaagagacgaaagaag

SEQ ID NO: 102844 - RNA, 86 nt, Homo sapiens
cggacccaacgggcccagccagcgccccagggaccgagaggcagcagggcccggggacaaggggaagaaggagaaagggccaaccc

SEQ ID NO: 102845 - RNA, 66 nt, Homo sapiens
aaccacaacggaccagcaggcaaagacagcagaaagcagcaaagcacaaacacacgacacgaagcc

SEQ ID NO: 102846 - RNA, 59 nt, Homo sapiens
aaaagaggggcacagaaaaaggacaagcagacgaaaagcaagaagagacaggagaaccg

SEQ ID NO: 102847 - RNA, 74 nt, Homo sapiens
cggaccggcagcgagcccaggcacaagggaggcgacagagacagcagcaggccgaaaagaacaggaacagacga

SEQ ID NO: 102848 - RNA, 84 nt, Homo sapiens
gggcggagggacaaccagacggaaaacccgaggaggagcccggaagcgcgagaagaaaccaacgcggagagcgcggcaggagcg

SEQ ID NO: 102849 - RNA, 69 nt, Homo sapiens
gggagccagccacgcgacacaacagggcagaagccagagcggaaagcccacaggaagcaggagcacaag

SEQ ID NO: 102850 - RNA, 77 nt, Homo sapiens
aggaggcacacgagcaggcaagcggcaccacgacaaccccacaccaacgagaggcaacgcgaggagggcaacgagac

SEQ ID NO: 102851 - RNA, 77 nt, Homo sapiens
accgacagcaccgggaacaaccgagcccccccgcagcagaaggagggggcagagcacggcaggcagaaggggccaac

SEQ ID NO: 102852 - RNA, 48 nt, Homo sapiens
acaacaagaacgccgccgccgcacaaggagggagagcacggcgcacca

SEQ ID NO: 102853 - RNA, 82 nt, Homo sapiens
cggcaagagagccgcacaagcgccggccaaggccaaaacagaagaggcaaagcccagccacagcagcagcccagcagcaaac

SEQ ID NO: 102854 - RNA, 79 nt, Homo sapiens
ggacggaccgagaccggaccgagagcggaccgagagcgcgaaacgcacgagaaggccagcgacgacagagacccaggaa

SEQ ID NO: 102855 - RNA, 77 nt, Homo sapiens
gaggggcaggaaacgaagggcagcggaacgcgccgacgccgcaaccagcaccccgaggagcggaaccagaccgccgg

SEQ ID NO: 102856 - RNA, 47 nt, Homo sapiens
gcaaggaggaagaagaccaaaaagcacgagaagaggagggagacagg

SEQ ID NO: 102857 - RNA, 81 nt, Homo sapiens
agccgacgagggcagcaagaaaggcaagcaccaaggaggccgcaaaaagaacgaggaagccggaagcaaagccaagccagg

SEQ ID NO: 102858 - RNA, 95 nt, Homo sapiens
aaagggcggggaggggacgaaccaggcagcccaaaagagggggagagaagagccgaggacaccgaggccacgaagccaggcgccagacacagcca

SEQ ID NO: 102859 - RNA, 58 nt, Homo sapiens
ggaaaaaaggccaagccacgaggagaaaagagggagaccacacccaaaacgaaacggg

SEQ ID NO: 102860 - RNA, 86 nt, Homo sapiens
ggagagaggagaacgaacaccggaccgccagaggacagaaaaaggcgagcacaaagacaaagagagagcagcaaagggacccacag

SEQ ID NO: 102861 - RNA, 84 nt, Homo sapiens
acacaccgccggcccggggcggcgccgaggggaggaggcggaagccggacacccaacagcacgcagacaaggcaccaacagaac

SEQ ID NO: 102862 - RNA, 78 nt, Homo sapiens
aagagggcgccaccaacagaaaaaaaaaagaccaaaaggagcagaaaacacagacagcagcgcccaaggacaagccaa

SEQ ID NO: 102863 - RNA, 59 nt, Homo sapiens
aagaagcacccagcaagcgagggaccgggacgccacagccagaaaaccagggcacaagg

SEQ ID NO: 102864 - RNA, 80 nt, Homo sapiens
ccgaccggaccgcaggacgggagaccaagggaggacggcggaacacggaggcgggaaaggcaaagggagaaccaacaccg

SEQ ID NO: 102865 - RNA, 68 nt, Homo sapiens
accacacacaccacaggaagccaaggagcggagggagcacacgggcgaagaacccccaaaccaaccag

SEQ ID NO: 102866 - RNA, 82 nt, Homo sapiens
cgcgcgaggaaaggccgaggagccggagccgcaggacgagccgggaggggagacaccgaccccaagcgagagagcagaagac

SEQ ID NO: 102867 - RNA, 81 nt, Homo sapiens
agccgggagccgcggcgcagcagaaaacaaggagagaccgcacgcagggccacagcagcacgaggacagcccgaggcggag

SEQ ID NO: 102868 - RNA, 71 nt, Homo sapiens
gaagaaagaagcgaaggacgacagcagccagaagagcgcgacgacaaacccaaggcaaccaacgcacaacc

SEQ ID NO: 102869 - RNA, 73 nt, Homo sapiens
caggacagaacaagcacccacgaggacagcaaacaagagcaaagaaaacccaggcgaggagacaaaagagcca

SEQ ID NO: 102870 - RNA, 66 nt, Homo sapiens
gcggagggggacacccgggcggggcagagcagcccccagccagccgcgaggccaggcgaaccagcc

SEQ ID NO: 102871 - RNA, 88 nt, Homo sapiens
gcggggcagcggcggaaaccgaaggggagccaggcggcgacagcgggaggagaaagggacgcaccaaagaagacagacacgcagaaaa

SEQ ID NO: 102872 - RNA, 71 nt, Homo sapiens
agagagcagcagcgcccggacgcccagaaagggcgacaggccaccaacacacggggacgggggacaggaaa

SEQ ID NO: 102873 - RNA, 53 nt, Homo sapiens
cgggagggaaccagcaacaagccgaccgagaaaagaggaaacagagagagaca

SEQ ID NO: 102874 - RNA, 76 nt, Homo sapiens
cgccagcggagcgaacccgagagcgggagcgggcgggccagggcgcaaaacgaagagacaggaaggcacccaagag

SEQ ID NO: 102875 - RNA, 85 nt, Homo sapiens
agggacggaacggaggaccaagagcagggaggcgaagggagggccgccccaaccgacgcaccagccggaggaggagggacagggc

SEQ ID NO: 102876 - RNA, 84 nt, Homo sapiens
aaagccacggccgagaccaggaggaaagggaggaggcccaacgccgggcaaggagggggcagggcccagggaccggaaagcagg

SEQ ID NO: 102877 - RNA, 66 nt, Homo sapiens
aaaacagcacaccaggaagcaagggacccacgggagacagaagggaaggacgccagccaaccccga

SEQ ID NO: 102878 - RNA, 82 nt, Homo sapiens
cgacccgacgcgccggcccacgcgcggccaagagcccacgcggaagagggcagcccggcaagcccgggcccgagccggaccc

SEQ ID NO: 102879 - RNA, 57 nt, Homo sapiens
ggaccgcgggccaccgaagaggggacagcccacgggcccggccaggccccaccgcca

SEQ ID NO: 102880 - RNA, 84 nt, Homo sapiens
gccagaggaggaaaggaagacaagcgggagagggaaagcggagaggggaagagcacacaccagagcggcgcggggaaaaacgac

SEQ ID NO: 102881 - RNA, 69 nt, Homo sapiens
aggaacagagcgagggaggagagagggagagccaaagaaggaaagagaagggagggcgacgagagccga

SEQ ID NO: 102882 - RNA, 82 nt, Homo sapiens
ccgggcccgagacagaggggcaggagcagagagcgagccaaggcgaccccaggcacccccccagcgcggggcccacagcgcc

SEQ ID NO: 102883 - RNA, 86 nt, Homo sapiens
acgccaaaacaggaacagacgggaacaaacacaagccccagcaccacgaacagggacaagaacccaagaaacaggaaaaaacccaa

SEQ ID NO: 102884 - RNA, 78 nt, Homo sapiens
cggaaagaggacgaagcagaaagcaaggaaacgagcagaagcccggacgggcacgacagagagacccgaccacccgca

SEQ ID NO: 102885 - RNA, 79 nt, Homo sapiens
ccgccaacggcaccgacccgacgcagcgacgcgagggcccgggggccaggcagggggagggacaagcacggcagggccc

SEQ ID NO: 102886 - RNA, 106 nt, Homo sapiens
caggcgcgcgccgcgcgggagagggccaccgcccgccacccgcgcgccgccgccgaggagaaaggcgggagagagaacggaaaggagccaaggaaaacaaaagggc

SEQ ID NO: 102887 - RNA, 60 nt, Homo sapiens
ggcggggaaaagggaaggaaaagagacgcagcccaggaccacaagccagaaaacacgcgg

SEQ ID NO: 102888 - RNA, 85 nt, Homo sapiens
ccgcccaccgcgcccgccgccaccgcagagcgccaagcccgagggcccgaagagccagcagggacccagccaccccaggaccgcc

SEQ ID NO: 102889 - RNA, 80 nt, Homo sapiens
cgcgcccgcggcaggcgcggaggggccgcgggagcccgaaagcgagggcaggggaggaagaagagaggggaacaaggaga

SEQ ID NO: 102890 - RNA, 72 nt, Homo sapiens
cccgggaaaacacacggccagcaagacaaacagagaacaggacagcaagaacgagggaacgggaaaagaaaa

SEQ ID NO: 102891 - RNA, 73 nt, Homo sapiens
acggaggacgggaaaaccagcagcagagcgggccaacagacgggccacaggacagcggcacgaccaaaaagac

SEQ ID NO: 102892 - RNA, 84 nt, Homo sapiens
gagcagacggagacacggagcagcggccccggccccgccaacgcgccgccggcccgagacacgagccccaaggggaagcacccg

SEQ ID NO: 102893 - RNA, 81 nt, Homo sapiens
agagaaagaaggaagcggcgccgaaaaaaaggggagcgaagaagggagccacccaaaacacgcggaaacgccacaggaaaa

SEQ ID NO: 102894 - RNA, 72 nt, Homo sapiens
caaggacgcaaagaaggcaggagaaggcagaggccccacaggaccccccagaaaagcccaacaaggaccgca

SEQ ID NO: 102895 - RNA, 75 nt, Homo sapiens
cccaacaacccccaaggacgccccggcccacacaccagccagaggaaaaacagaacccaacaaaccaaaaacaac

SEQ ID NO: 102896 - RNA, 96 nt, Homo sapiens
ccgcacggcgcggaggacccacccgacgggcagccccccagggcgggagcaccggaagccccacccagaggcccaagacaggagcaggacaggccg

SEQ ID NO: 102897 - RNA, 70 nt, Homo sapiens
cagagagaaagagagaggaagccagcagccgacgaaggggaagggggccagacaaccagggaagcacaga

SEQ ID NO: 102898 - RNA, 64 nt, Homo sapiens
gagcggaggaggcacagggcgcggaccgcacgagcgcgcaggacaagggaaaaggagaacccca

SEQ ID NO: 102899 - RNA, 77 nt, Homo sapiens
acagccccggccgccgaagaggccgccgccaagggaccaggaggagaagcaaccagagaggaagcgagacccaaaag

SEQ ID NO: 102900 - RNA, 58 nt, Homo sapiens
acaagaaaacccacaacaccccaggagggcgacgaggaggcgaagaggcgcgacccag

SEQ ID NO: 102901 - RNA, 71 nt, Homo sapiens
ggaaagacacagggagcccccgcagggagcacccagagggacagaggaagaccgccggaccaaacagaggg

SEQ ID NO: 102902 - RNA, 78 nt, Homo sapiens
ccgcggggcagcgggccggcgccggcgcgaagcaaagccagggagggaaccgaagccacgggcgggggacgcgacccc

SEQ ID NO: 102903 - RNA, 79 nt, Homo sapiens
gaacagacacggggaagcgcaaaaacaagacggggcgccccacagaggggcgacgggaaaaccagaaaaccgggaagcg

SEQ ID NO: 102904 - RNA, 65 nt, Homo sapiens
agaaaacagacagacccacagagaccggccagccacagagcagagaaagccggaccagcagggag

SEQ ID NO: 102905 - RNA, 67 nt, Homo sapiens
aaggcagccgagaaacacccagaacacaagagccgcccccaacaccaaagagagacgggggcaccag

SEQ ID NO: 102906 - RNA, 67 nt, Homo sapiens
gaccacccccgaacgcccaagaaaaagaaaagggcaccagccgagaaacacgcccaccgcacacacg

SEQ ID NO: 102907 - RNA, 76 nt, Homo sapiens
cgggaggagccacgagcgggcaccagaggggaaggggcccgcaaaaccgccagcaagaggaaaaaaagaagaagca

SEQ ID NO: 102908 - RNA, 68 nt, Homo sapiens
aagaacccgccaaaacacagcgaggagacagagcccagaaacggacaaggaacccaggggacaaagag

SEQ ID NO: 102909 - RNA, 74 nt, Homo sapiens
gggagcgggagcgcggaaagaaaaacaaccaccagcgagcaaaaaggcaaagaccaagaccaccaagaagcgcc

SEQ ID NO: 102910 - RNA, 51 nt, Homo sapiens
cccagaggcagaaaggaaaggggacacaggagaacaccgaaggagaagcca

SEQ ID NO: 102911 - RNA, 74 nt, Homo sapiens
gcagccggcgcccagaccgcaccaccgacaccagaccgagccagaggacggagagagggagccagggaagcccc

SEQ ID NO: 102912 - RNA, 60 nt, Homo sapiens
aaggaaaacccagacgacacaacccgggcgcggagaggagaacaaccccgagacagaaag

SEQ ID NO: 102913 - RNA, 72 nt, Homo sapiens
agccacacgcgcggggaggacccggagcccccagaccccggaggccggcgcccagcaccaggaagcagcccc

SEQ ID NO: 102914 - RNA, 57 nt, Homo sapiens
caggacaccgacaggaacagggaccacggggaacccgaaaccaaacaccgagcacac

SEQ ID NO: 102915 - RNA, 71 nt, Homo sapiens
acaaggccgggcggacgcagggcaccccgaagagaagagcagcagcggccagaagagacaaggccagaagc

SEQ ID NO: 102916 - RNA, 78 nt, Homo sapiens
cgccacgcgcggaaggcagcgcccagcagcgcagaaagagagcacaagcccaggaacggggagaaacgccagacgccc

SEQ ID NO: 102917 - RNA, 73 nt, Homo sapiens
cgagacgaacgacgagagaagcagaaggaggaaggggagaagaaaaagcagcaaaagagaagcaggaggggaa

SEQ ID NO: 102918 - RNA, 74 nt, Homo sapiens
cgggcggccacacgacccacccaagcccacgaggcgggcacgaagaacacaaagcaaaaaggaaaagaagagaa

SEQ ID NO: 102919 - RNA, 91 nt, Homo sapiens
ggagcccgccggggcagccgccggacaccaggaccgcgagccagacagccccggaagccgcgccgccgccgccagagagacggggcgccgg

SEQ ID NO: 102920 - RNA, 86 nt, Homo sapiens
gacgcccgggaagagggggagcggccagcgagagccagggcccaaagaaccgccagggcgcccaccacgacagccggagagccgca

SEQ ID NO: 102921 - RNA, 39 nt, Homo sapiens
agcgagcgcaaggaggcaggcacgggcgaccgcagcagc

SEQ ID NO: 102922 - RNA, 76 nt, Homo sapiens
acgcgagaacaacacaacagcaccaaggagacagacgagccggcgcagaaaagaaggagcgggcgccaaagaacag

SEQ ID NO: 102923 - RNA, 43 nt, Homo sapiens
aagaaagcagaggcagaacaagggaagaggagagggaagaagg

SEQ ID NO: 102924 - RNA, 68 nt, Homo sapiens
acggaccgaggaagccccgcagcagcagcccaaaggaagagagagggaagacgacccagaaagaggga

SEQ ID NO: 102925 - RNA, 77 nt, Homo sapiens
agcaaacaacccgcaaacgaaaaagaacgacagagcaaccaggaaagaagagggaggcaggggaagcacaaaagcgc

SEQ ID NO: 102926 - RNA, 67 nt, Homo sapiens
gggacaggggcggggacaaaagggcagccgcccccaaccggccccgccgcacggccgccggggcgcg

SEQ ID NO: 102927 - RNA, 55 nt, Homo sapiens
cgaggacacgcagccggccgaggaccccccaggaaaagcaacggcgcaagaggcg

SEQ ID NO: 102928 - RNA, 83 nt, Homo sapiens
ggggccagcgcagccggagccgggagacgggagcacacgccaggagggagcgcgggaggcaggacccccaaggccagcgacca

SEQ ID NO: 102929 - RNA, 76 nt, Homo sapiens
gaggaggccacccgggggcgccacggagccgccagggggacagaggcccaggaggacggacaagcggggcagcccg

SEQ ID NO: 102930 - RNA, 75 nt, Homo sapiens
cacccaggggccgggcgacacaaagacgagccacaacccgaggcagcgaggaaaagaagacgcagaggggagaac

SEQ ID NO: 102931 - RNA, 74 nt, Homo sapiens
gggagagcggggaagggggaaaggcaccaggacaagcaaaggagagacagcgcggagaccacccagccggcgaa

SEQ ID NO: 102932 - RNA, 51 nt, Homo sapiens
cgggggcacgccccccacccgccacacaaggagacaccggagaacccaaca

SEQ ID NO: 102933 - RNA, 68 nt, Homo sapiens
ggggcacgcgaaggacagcaagaacaggaacagaagaacaaacgagggaagggacgcgaagaacccca

SEQ ID NO: 102934 - RNA, 70 nt, Homo sapiens
gggacagcccgggaaaaggagacgcagaaggacccacagaagcccaagggaaccacaaacagacaggaaa

SEQ ID NO: 102935 - RNA, 53 nt, Homo sapiens
gccccccagccagggaacccagaaccggcacggaagacccaaccgcccggaaa

SEQ ID NO: 102936 - RNA, 78 nt, Homo sapiens
gggcgaagaggaagcccaccgccaccgaaagggagaaggaaagcgagcgaaagggaaaaacagagaggccaggagcac

SEQ ID NO: 102937 - RNA, 83 nt, Homo sapiens
ggaccgcagaggaagagaaaaagcaaacgaccagacggcagggaggcacaaaggggaacacagcacaccgacagagaacccag

SEQ ID NO: 102938 - RNA, 78 nt, Homo sapiens
cggggaccagaggagaccgccacacaagagaagacccaccgaggaggaggcacagccagagaacaacacacacacaca

SEQ ID NO: 102939 - RNA, 67 nt, Homo sapiens
ccccgcacacacacccaagcaacccccagccacaacgcgaaccgggcggacgaaggaggcggcaaca

SEQ ID NO: 102940 - RNA, 75 nt, Homo sapiens
aaaacgaagaaggcaaaaccaagaggaaaagagacgcaagcaggacggcagaccagcagggggaacagaagaggc

SEQ ID NO: 102941 - RNA, 80 nt, Homo sapiens
gaaaggcagccaaaggcacacggccaggacaccagaaaagaaccagaaaaccacaccaagcaccagaaagccggaaagga

SEQ ID NO: 102942 - RNA, 54 nt, Homo sapiens
gggcagagccgccagccggaaggagggccccggagcagccacaccaccgaggcc

SEQ ID NO: 102943 - RNA, 60 nt, Homo sapiens
ccccacggcccgcacaggaagaggcggagagccaaggggcaaagagagacggggcgccgg

SEQ ID NO: 102944 - RNA, 74 nt, Homo sapiens
ggcgcgggcacgccgaggacagagacgccaggcggccaggggcaccagggaggagcccgcaagcagcaccagac

SEQ ID NO: 102945 - RNA, 58 nt, Homo sapiens
accaccgaaaacgacacggagggcggcagggcacaagaaacccgcccccgaagcaacg

SEQ ID NO: 102946 - RNA, 75 nt, Homo sapiens
gaacaaagaacgaagggaagcgcagaaaggaaaacaaaggagcacaggagagaacacaaagaacccaaacgaaag

SEQ ID NO: 102947 - RNA, 66 nt, Homo sapiens
ggggacgagcaaaggaagcgcgaacagcagcgcagggacaagagaaaaaaagggcgggcgaacaaa

SEQ ID NO: 102948 - RNA, 66 nt, Homo sapiens
gcgcagaaagggcgaccaccaaaaaaacggacagcagaccacagcccggcaggcccaaaaacccaa

SEQ ID NO: 102949 - RNA, 111 nt, Homo sapiens
cccgggcggagggacacggggcagacacaacacgaggggcgccgcgggacgcagaggagagcacgccgggcagccaagagggaggcaccaagggacggagcggggcggccg

SEQ ID NO: 102950 - RNA, 58 nt, Homo sapiens
ccagggaggaagcggagcggacgcagaagggagaaccacaagggcgagccaagaagag

SEQ ID NO: 102951 - RNA, 36 nt, Homo sapiens
agccggaccccggggaagacaccagaaacagaacgg

SEQ ID NO: 102952 - RNA, 72 nt, Homo sapiens
cgagaaaacaggcaacgcgaaaggaggcaagaagaagcccggcgcagcgcacggcagaagaaaggaacccac

SEQ ID NO: 102953 - RNA, 72 nt, Homo sapiens
aggaaaagcagacgcaaagacaaggacaaggcacgaggcgcggcgaccaccacagcagagcccggcgaagga

SEQ ID NO: 102954 - RNA, 37 nt, Homo sapiens
ggcacgccggagagcgaggggccgccgcgcccaggcg

SEQ ID NO: 102955 - RNA, 63 nt, Homo sapiens
gcagccgcgaggaggcgcgggagggcgagaacgaccccgagacggaggaagagcacgagggga

SEQ ID NO: 102956 - RNA, 77 nt, Homo sapiens
ggggaacccaaggccccagaaagggaaaaccgccaaacaaaaaagcaaacggggacagcgccgaccggaacagggac

SEQ ID NO: 102957 - RNA, 42 nt, Homo sapiens
accgcccacgaccaaacacagggcacacgaaaagcagcagcc

SEQ ID NO: 102958 - RNA, 58 nt, Homo sapiens
accagagaacaagcaccaaagcgaaggagggccgcaaggagccagcaccgccgaccgc

SEQ ID NO: 102959 - RNA, 79 nt, Homo sapiens
caagaaaaacaaagccaaggaaaccccaacacagagccaagcgccaagcgccaggggagaggaggcagaaggagaccgc

SEQ ID NO: 102960 - RNA, 84 nt, Homo sapiens
aggaaacaaggacgggagcgagaaccagagagcacagagaaagcgggaaacggccaaacagaacaccaacaaggccaaagacca

SEQ ID NO: 102961 - RNA, 79 nt, Homo sapiens
aagcaacccagaccaaggaagaggcgaacaaggaacagaagggcccggccagggagaaccccccggagcccaggagggg

SEQ ID NO: 102962 - RNA, 83 nt, Homo sapiens
ggagaagcaaggcgacgccagaggaggaaaggaagacaagcccccaaaacacaagaggacggagaagcgacgaaagaagccgg

SEQ ID NO: 102963 - RNA, 76 nt, Homo sapiens
agacaaaacgaaaggccccccaccccacagaaaaaaggagggcaacacccagacagcccagacaacccggccgcgg

SEQ ID NO: 102964 - RNA, 75 nt, Homo sapiens
acccccccacggcgcccggagaaggcgcgcgaccgagagacgaggcacgacccccaggaccccagaaggccgaac

SEQ ID NO: 102965 - RNA, 76 nt, Homo sapiens
gggacggggcagaaacagaagaaggaagccaaaaggcgggcagccacgccggagaccggcaagagaagagagaggc

SEQ ID NO: 102966 - RNA, 80 nt, Homo sapiens
ccgccgggaaaccggcaggagggggacaagccaagacggaggggagagcaggagggggacgacgggccgaagagaaagga

SEQ ID NO: 102967 - RNA, 66 nt, Homo sapiens
ccccgagcggcgggaacaggaaaagacaggcagggaggcagcggcaagcggaccgggaggcaccac

SEQ ID NO: 102968 - RNA, 77 nt, Homo sapiens
caacaagaagcaacaggaagaggcacagagggacgaaagccgaaagaacgagaagcgaacggagcagggcaaaagaa

SEQ ID NO: 102969 - RNA, 72 nt, Homo sapiens
accgacaagcagcccgcaggcaggaaaggggggccagcaagaacgaaccgagccacaacagccaaggaaaaa

SEQ ID NO: 102970 - RNA, 65 nt, Homo sapiens
agaacaaccgaaagaaccagcagggagaagcgcggaagccaccaaaaccaacgaaaggagaaggc

SEQ ID NO: 102971 - RNA, 77 nt, Homo sapiens
cccaaaggcaggaacaggggcggcaaacgcaggcaccgaacggggacaaagaagccccacaaaggcaaccaaaagag

SEQ ID NO: 102972 - RNA, 38 nt, Homo sapiens
gccacacccacgccgacccgggacaaagaaacaagcga

SEQ ID NO: 102973 - RNA, 84 nt, Homo sapiens
ggagagaagaaacgagaccaaagcagcgaggacccccaaggacacacacgacgccagcagccgcccaccccacgccgagggcac

SEQ ID NO: 102974 - RNA, 82 nt, Homo sapiens
agcaaacgaccagacggcagggaggcacaaaggggaacacagggagaagaggaagaccagccagaaacacccacagacccac

SEQ ID NO: 102975 - RNA, 86 nt, Homo sapiens
caaaggggaaagcaaggccaaagacagggagaagcccagaagcgaggcgaagcagcggcgagaaacgagagcacgagaaagaaggc

SEQ ID NO: 102976 - RNA, 85 nt, Homo sapiens
gcagaaggagcggaaggcggagcgaagagccggaccaagcgccagagagagcacaaggagagaacaggggggcccacacgccccc

SEQ ID NO: 102977 - RNA, 79 nt, Homo sapiens
ggacgacaagcgcccacgaggagacgcggaggacagcccgcagcacaacacacaagggaagacagaccagacaacagcg

SEQ ID NO: 102978 - RNA, 73 nt, Homo sapiens
cccgagcagcgggaacagggccgcaccacacccgggcgaaggaggcgcaacaagacaaggcaacgagaagcag

SEQ ID NO: 102979 - RNA, 78 nt, Homo sapiens
ggagagccgaaggagcagcccaggaccgagaccggagcagccggggcggagcggggcggagaacggaaaagcaccagg

SEQ ID NO: 102980 - RNA, 75 nt, Homo sapiens
acaggcaaaaggcagagaccaaagaggaaggagggaaacaccacaccagagggccagggaagaaaacaagggaaa

SEQ ID NO: 102981 - RNA, 74 nt, Homo sapiens
ggccccggcagcagcccgacgcaaaccaaggacggggaccgcacacccaaggccgcgaagaggaaacaaaagcg

SEQ ID NO: 102982 - RNA, 87 nt, Homo sapiens
ccagcggggcggagggagaagcggccaagccccgccgacacagagagccaaagacagcgggagcacgccaggaacgaagggaaggag

SEQ ID NO: 102983 - RNA, 100 nt, Homo sapiens
ccgcggaagcagcgagccggcggagccgcggcgggacgcgcgagccggccggggggaagggaggaggaggagagaggaccaagagcagccgaaaacccac

SEQ ID NO: 102984 - RNA, 74 nt, Homo sapiens
cagagaaggggcaaacggaaaggacaggcacagcaggccaacgcaggggggagaccgagggaacaaacccagac

SEQ ID NO: 102985 - RNA, 81 nt, Homo sapiens
ccgcgcgcgcgccggcccagccgcgcgacgggaggacgaagccggccgcagcagggccggaaagagggcgggcccgcacgg

SEQ ID NO: 102986 - RNA, 114 nt, Homo sapiens
aggccgcaggcaccccgaacggaccgcgcccgccgcccccgaaccacccgcgcgaaacacggagaaccacggggaccaagaagcgagcagcccaaacggacccgggaacaagag

SEQ ID NO: 102987 - RNA, 34 nt, Homo sapiens
cggggggaggaggggaaccccaggaccccagcga

SEQ ID NO: 102988 - RNA, 44 nt, Homo sapiens
acagcccaggcggcagagccgaggacccagaacaggaagcagaa

SEQ ID NO: 102989 - RNA, 72 nt, Homo sapiens
gggaagagaggccaggaagagaaggaaaacgaaaaggaaaggaggccagacacaaaacgggaaccgcaaaac

SEQ ID NO: 102990 - RNA, 83 nt, Homo sapiens
aacagagagagaggggacagacgagagaacgaggagaccggaaagaagggagaccgcggggaaaagagaaaggccaaccaaag

SEQ ID NO: 102991 - RNA, 73 nt, Homo sapiens
gaagcagcaaacacacacacggcggagcacgcccggaaagggcgccggccgagcccgggaaaacgacagcagc

SEQ ID NO: 102992 - RNA, 31 nt, Homo sapiens
cgaggcgggcgacagaggcgagaggcccggg

SEQ ID NO: 102993 - RNA, 70 nt, Homo sapiens
gccaagagaaaagccgaggaaagcagcccgcccgcaaacggaaaaagaacagaggccaacccgacaagag

SEQ ID NO: 102994 - RNA, 74 nt, Homo sapiens
aaaaacaaaaccgcgaaaaagacggaacacgaaaggaccaagaacacagccacaagagcaaagcccacacaagc

SEQ ID NO: 102995 - RNA, 43 nt, Homo sapiens
ggagacacggccagacgcccccaccaaagaaagaacgagcacg

SEQ ID NO: 102996 - RNA, 79 nt, Homo sapiens
gacaggggaacagacagaaggagcaggaaccaaaggcaagcccggagaaaacaggacccggaaggaaacggcgaagacc

SEQ ID NO: 102997 - RNA, 75 nt, Homo sapiens
agcccaccgcagggaaaacaaccgagccaaccaagccgagaagagaccacggaaagaccccagaaagagcaacag

SEQ ID NO: 102998 - RNA, 89 nt, Homo sapiens
gccgggcaacaaccaccagcccaacaaagacccggaaggccaacagcagggacggggaaagacggaacgagcgcagccgccggagcgcg

SEQ ID NO: 102999 - RNA, 69 nt, Homo sapiens
aggcgacacacgcgccagggagaaagacacgcacgccaggccagggcccagcagcagcccacggggcca

SEQ ID NO: 103000 - RNA, 62 nt, Homo sapiens
caggaagagcagagagcgcagaaaaggccggcgcggaagaggccggcggcgggacggcccca

SEQ ID NO: 103001 - RNA, 78 nt, Homo sapiens
ccaggaggcccggcacaccaccaggggaggaggaaaacacacagacgaaggcaaaagagcacagaggacccgaaaccg

SEQ ID NO: 103002 - RNA, 70 nt, Homo sapiens
accagccagaccgggaagaaacgaaggggggaggcccaggccaaaagagggcaagaccaacggagccacc

SEQ ID NO: 103003 - RNA, 72 nt, Homo sapiens
aaccagcccggcagcccggaccagagcgagcccggcaccaggcgcccggcggacacaggacggccaccaggc

SEQ ID NO: 103004 - RNA, 83 nt, Homo sapiens
caacgaccggagaggggaacagacgcagggcagggccccgcccggcggggaagaaaaagcggggaaggggggcaaaaaaaaga

SEQ ID NO: 103005 - RNA, 76 nt, Homo sapiens
cgaaccagccagcaccaagggcacaaacagaacgaggagcccacgccaaggagagaccaccaaagcgggcagcaga

SEQ ID NO: 103006 - RNA, 86 nt, Homo sapiens
aggcgccgacgcgacagacccaagcgggaaacggccaagaagcggaaagagaccagagcagcacccgacaggagagacggagggaa

SEQ ID NO: 103007 - RNA, 88 nt, Homo sapiens
ggaacgaggcccccaccaaaaccaagcacgacagccaccaggcaggaggagcaagcacaacaggccgaagaggccggagaaggacacg

SEQ ID NO: 103008 - RNA, 75 nt, Homo sapiens
accagaacgcagcaacaaagcggagcagggagagcaggaccacacacggagggaggcaccaggccagccacggga

SEQ ID NO: 103009 - RNA, 72 nt, Homo sapiens
gggcaggccaaagagcgcagagggaaacccaccagggaagcccgacgcaccaagagcagcacaacaacacag

SEQ ID NO: 103010 - RNA, 76 nt, Homo sapiens
agcaccggggggcccccacccaagcacgcaccaagacgacaagaccaaaagaagaacccggacccgaccgaagcaa

SEQ ID NO: 103011 - RNA, 82 nt, Homo sapiens
gacaacgagcagccacacccagacgagcgggagaaggcgcgcgcaagcacgcgaggagcccacacggcaggacaagcgcgcc

SEQ ID NO: 103012 - RNA, 86 nt, Homo sapiens
cgcgcccgcgcgcacggcgcagccgcggggcgcaggaggcgggcacagcgccaagggcgacagcaagagggcgcccggaagaggaa

SEQ ID NO: 103013 - RNA, 66 nt, Homo sapiens
aggcaggggcggcaccaggaggggccaccaggccccccccgcgggaaaaggaaaccagaagaggga

SEQ ID NO: 103014 - RNA, 69 nt, Homo sapiens
cggagaccgcgcagaagacacgcccggaagaccagccaacaggcaacgcgcccgagccgcgcgaggagc

SEQ ID NO: 103015 - RNA, 82 nt, Homo sapiens
gcaccgggacgcgcacccccgcgccgcacggggacgagggcccacgagacgcgaacaaacgccgcgccgccagaagaacaga

SEQ ID NO: 103016 - RNA, 83 nt, Homo sapiens
gagagaggccacagaaaacagcaccaacgacaaacaggagggggacacagagcaagaaagaacaggccagacaaacagcgaag

SEQ ID NO: 103017 - RNA, 71 nt, Homo sapiens
cagaagcacaagagccagaacagagccccagaaaaaacgagcacaggaaagaggagccgccgcacccaggc

SEQ ID NO: 103018 - RNA, 73 nt, Homo sapiens
gaaaaaacagaggagagggccacagaaggaagccgccccgcggcccaccagaaaacacgaaggagaagcgcaa

SEQ ID NO: 103019 - RNA, 39 nt, Homo sapiens
cgcgcagggggaagggagacaccagccacaaggagagga

SEQ ID NO: 103020 - RNA, 50 nt, Homo sapiens
gcaagcgaaacccgaacaaagaacaaaggcagggagggaaccgccggggc

SEQ ID NO: 103021 - RNA, 61 nt, Homo sapiens
acaggaaaacacccaccagccacagcccgccaccaacaggccaggaagacggcggccagca

SEQ ID NO: 103022 - RNA, 71 nt, Homo sapiens
gagcaaggaaggagggcagcccaaggggagaagcaaaacacagaggaaaagggaaagaggaacccaagaag

SEQ ID NO: 103023 - RNA, 78 nt, Homo sapiens
ggccaccggcaggcgcacaggcccggccaggcacaagggcaccacaaaggaaccaacagaggcaaaacccgacgcaaa

SEQ ID NO: 103024 - RNA, 65 nt, Homo sapiens
gcccgggaagccggccacaggagaacgccgagacgcggacagggggccagagcaaggaaagcgga

SEQ ID NO: 103025 - RNA, 68 nt, Homo sapiens
ccgggagcagaaggaccgaacccaggagcccgcacgagaagagacgccaacagaccggggagaaggga

SEQ ID NO: 103026 - RNA, 85 nt, Homo sapiens
gggacccagacccggagcccagggaagcagccgaccagccgcggagccgggggcaggccggcaaagcaccaggcacagcaagcgc

SEQ ID NO: 103027 - RNA, 63 nt, Homo sapiens
gaaggaccaagaaccagaaggacgaggccaggcaacggcaaccggaaggcaggaaggaaaccc

SEQ ID NO: 103028 - RNA, 72 nt, Homo sapiens
aacaccaaaaacaaaacgaaccaggacggcaagcggcagacgcagacaaacaaaacaagaagccgaagaaga

SEQ ID NO: 103029 - RNA, 85 nt, Homo sapiens
gcgcgcccgaggggagcaaggacagcccgggcgcgccaggcacagccaagagcggaccggcagcggccagcgcagcggccggagc

SEQ ID NO: 103030 - RNA, 89 nt, Homo sapiens
ccgaaaccccagacacaaccagcgccgccgccaccgccaagggaccaagaaaggcccagggaccaaagcccggacaaggcccgagcacc

SEQ ID NO: 103031 - RNA, 79 nt, Homo sapiens
ggagaaggcgcaacgcggcgcggcaacgacaggggaaccccagggaccagcggacaggacagggggccgggcggaggca

SEQ ID NO: 103032 - RNA, 52 nt, Homo sapiens
gcgcccccgcaccaggcccgcaaccagccgcacacggccacgcgaaggcacg

SEQ ID NO: 103033 - RNA, 69 nt, Homo sapiens
cccggagaccagaagaaccacaaagccaagacgcaagcgcggagagagggccgagcaccacagacagcg

SEQ ID NO: 103034 - RNA, 81 nt, Homo sapiens
agcagaaagcaaaacagagcggaggaaaagaaggcacggaaggggccgggagaggaaggccccaagcagccagcagaaaag

SEQ ID NO: 103035 - RNA, 69 nt, Homo sapiens
ccacgaggccgccgcggagggaggcccgccaaggccaaagagcacagggacagaaaaacagcgcagacg

SEQ ID NO: 103036 - RNA, 70 nt, Homo sapiens
cacgggacccgcgggccccggcccagcaaccgacaacgcggcccgagagaacccaccgcaagagaccaaa

SEQ ID NO: 103037 - RNA, 77 nt, Homo sapiens
cccgacccccaaaccccacagcacaggaaggacacagcgagccaaaaagcaacacagaagcggagcccaggcacccc

SEQ ID NO: 103038 - RNA, 77 nt, Homo sapiens
cgcagggcgggaaaaaaccaagcagcgagcaccaggaggcagcccagaacgcagcagaacacggagcagaagaaggg

SEQ ID NO: 103039 - RNA, 82 nt, Homo sapiens
cacacccagacgagcgggagaaggcgcgcgcaagcacgcgaggaggcccgaagacccaaggaacacacggaccgaaggaccg

SEQ ID NO: 103040 - RNA, 81 nt, Homo sapiens
gcgaaggccgggacccggccccggcccacaggggggggcaaacccgagagaacgggccaaagaggacgggacacgggccaa

SEQ ID NO: 103041 - RNA, 50 nt, Homo sapiens
ggaagaagcaacgcgccaaacaaacgagccaaagcagacccccaagcgag

SEQ ID NO: 103042 - RNA, 68 nt, Homo sapiens
acggcagaaggggaagccagcaacgcggaagaagacagcccaacaaggcgggacgacaacaccacaga

SEQ ID NO: 103043 - RNA, 67 nt, Homo sapiens
gaaaacggacacccccggcagacaggaccacgaagggacaagcaaggggccaaggagccaaggagga

SEQ ID NO: 103044 - RNA, 79 nt, Homo sapiens
gacaaaaaccagaaaaacgggggagagccacggaagccgacagacaaccagacagaagcccgggggagcggaggaagag

SEQ ID NO: 103045 - RNA, 57 nt, Homo sapiens
gcgcgaccggccgccgagcggggccagcgccaccggaccgcacgcgcacggacagcg

SEQ ID NO: 103046 - RNA, 81 nt, Homo sapiens
ccccaacacagccccggcagcgcaggacaccggagacgacaccccgacgacggagcaagcggggccgcaggccccagcggg

SEQ ID NO: 103047 - RNA, 78 nt, Homo sapiens
gcaaagcgagaaccggaaaacgacgccccaacggccaaacaaacccgaccaggcccgggagaagcggccgccagccag

SEQ ID NO: 103048 - RNA, 54 nt, Homo sapiens
cacgagcagcacgggcgagcagcagaagggaacacccgcacagaaagaccaggg

SEQ ID NO: 103049 - RNA, 79 nt, Homo sapiens
aaaacaacaaaaaaagaggcgaccagaaacaacacagaagacaaagcacgcagaaaagacaagacaagcgccgagccca

SEQ ID NO: 103050 - RNA, 75 nt, Homo sapiens
gggccgcgccgccaccgcgaacaggagcccgacagaagggaaggggaagcaggccaacccagaacacaccccagc

SEQ ID NO: 103051 - RNA, 85 nt, Homo sapiens
ccccacgaccacaggcaacgagagccggacacaccacgcaggcaccccagacgcacccaaccggcagaaggggcagaccaacacc

SEQ ID NO: 103052 - RNA, 77 nt, Homo sapiens
aagcaagcggccggagaagaagcggccgggcccaggcgggaacacacacaacccaggccaaaccgggcaaaggaagc

SEQ ID NO: 103053 - RNA, 121 nt, Homo sapiens
aaaccacggaaacaggcacggccacagaagcaacaaaggaccgcccccagagagaacaagggagccaacgaaaaccacaaaaccagcacagcggagagcaagacaacgacagcccgacaga

SEQ ID NO: 103054 - RNA, 81 nt, Homo sapiens
caccggccaccaggcccgaagggccacgaccaaagggcacccagcccagacccacagcccaggggcgacaaccaggggcag

SEQ ID NO: 103055 - RNA, 76 nt, Homo sapiens
ggggggcggaagaggcaggaaacgcgccggacaaacggcgggccaaagcacacagacaaacccacaagcgaaagaa

SEQ ID NO: 103056 - RNA, 70 nt, Homo sapiens
acgagaaacagcggagaggcaacaccagggcagaaagccaagacaggaaagcccggggaacaccggacca

SEQ ID NO: 103057 - RNA, 69 nt, Homo sapiens
cgcgagaggcagcggaaggagacaagcggaggccaggaacaaacacccaggaccgggcaacccagacca

SEQ ID NO: 103058 - RNA, 79 nt, Homo sapiens
gcaaacccagcaccgggcccacaagagaggaaaggcacgccggcaggagcggagaaaaaaaggcaggaaagagaaagaa

SEQ ID NO: 103059 - RNA, 55 nt, Homo sapiens
agcgcaaggccagggaggagcgccggcggcagagcggggagacgagacaaccgcc

SEQ ID NO: 103060 - RNA, 79 nt, Homo sapiens
caccccccaccagacaagaaagaaggacgcccacccgagaaggccgcgcaagggcgcagcacagacggcgcaccagggc

SEQ ID NO: 103061 - RNA, 70 nt, Homo sapiens
ccagaaaaaggaaagacccagaggccaacaaagagagaagcggggaagaaagcaaaagcagagccggagc

SEQ ID NO: 103062 - RNA, 68 nt, Homo sapiens
cagcacaccggcaagcacccacaaaagcgaaaagccagacaggaacaccagacagaagaacgccgggc

SEQ ID NO: 103063 - RNA, 73 nt, Homo sapiens
ggaggaacgcggggaggaggaggacaggcgggggagaaggaaaccacaagccccccgccgcacgccgggagca

SEQ ID NO: 103064 - RNA, 82 nt, Homo sapiens
ggcccgagcccaccgcgccgggccccggacgccgcgcggaaaagaacggcggccaaagcgccagacaagggccgagccccgg

SEQ ID NO: 103065 - RNA, 92 nt, Homo sapiens
gaagaaaaggaagaaccaagaccagaggagcccagagagaaagggcaaccccaacaacaaagaggacaagccaggacgacacagaacaccaa

SEQ ID NO: 103066 - RNA, 74 nt, Homo sapiens
gcacggagcaacaggaaaggaacaggccaagacaaccccagagagggggggcagggggcggaggcaacaagacc

SEQ ID NO: 103067 - RNA, 67 nt, Homo sapiens
gcgggaagccgagcagacagcccgcaaaacccacgaaaagagacagggcacaaggccccaagcggaa

SEQ ID NO: 103068 - RNA, 81 nt, Homo sapiens
ggcggccacggaggcaccagaagaagcaccaggaaagagaagggagggcgacgagagccgaagcagaggccaagaccaacc

SEQ ID NO: 103069 - RNA, 77 nt, Homo sapiens
ggccagccgcccgccgccggggcccccccccccgccgccccaccgccggccgccggcagaaaaacgacgcaggagaa

SEQ ID NO: 103070 - RNA, 72 nt, Homo sapiens
aaaaaaacaaggcacgggcggcacaaggcccacaaagaaaaaaacacacacgaggaaagacggaagcaagca

SEQ ID NO: 103071 - RNA, 84 nt, Homo sapiens
gaaccagccgggcgagagcagagcagcagccgccggggcagcgggcagcagcagcagggagaagaggagagagcagccaggccc

SEQ ID NO: 103072 - RNA, 76 nt, Homo sapiens
ggcagagacagcgccggccccacgggccggggcggagagaagaccagccccaggggaccaaagccaacccagccag

SEQ ID NO: 103073 - RNA, 78 nt, Homo sapiens
caggaaacaagcagagaagaacagaagaggaagcagaggaagcgaagaaaagaagagccaaaggcaacaaaggacggc

SEQ ID NO: 103074 - RNA, 77 nt, Homo sapiens
ggcccggcaccgagcccggcaaagaaaccccaaagccagcaagaccacagcagcacgcaccagccagcgaaccggcc

SEQ ID NO: 103075 - RNA, 89 nt, Homo sapiens
gaagaggaagagaggaggcgcgagagcgggaagaggcggcagacagcggggaacagagacgcaggcaagagcgcggaggagagagccaa

SEQ ID NO: 103076 - RNA, 74 nt, Homo sapiens
gggcacgcccgagagcgcgggcccacagcagcacacgcaagaggggaggagcgggcccagcggggggggcaggg

SEQ ID NO: 103077 - RNA, 76 nt, Homo sapiens
cagacacaagccgggaagggagcaccgagaggcagacaagacacccgcaggcacaaaggagccaaccaccggacgg

SEQ ID NO: 103078 - RNA, 81 nt, Homo sapiens
ggagcccgggagcagggaaccacagccaagaggaacgaggcggaaaagacgagaccaccgacggaagagagagaaacaggc

SEQ ID NO: 103079 - RNA, 73 nt, Homo sapiens
accacccacacaacacagaagaagcgccgcaggcgccaaaaggaaacacggaagaccacaacacacaacccag

SEQ ID NO: 103080 - RNA, 84 nt, Homo sapiens
aaagacaggaagcacggaacagaggagcacacaagcaacggaaaagaaggagggacgaagccaaaccagcagaccacagcacag

SEQ ID NO: 103081 - RNA, 75 nt, Homo sapiens
cagcagacaaagccaggcaccacgggggaccgcacaggggcaggaaagaaggaccaggaagggggggaagcaaaa

SEQ ID NO: 103082 - RNA, 78 nt, Homo sapiens
cagagacgaaggggaaaccgacggaaagcagccaaagggagaccgagcagccaaaaagggagacggagaacagaccga

SEQ ID NO: 103083 - RNA, 63 nt, Homo sapiens
gagggaaggcagcccgccagcgggcccaggggagaagcagaccgcaccaggcgggaccccgaa

SEQ ID NO: 103084 - RNA, 75 nt, Homo sapiens
ccaagaggcggccaaggggacgagcaaaggaagcgcgaacagcagcgcagacagaaccccaccaaacaccagaaa

SEQ ID NO: 103085 - RNA, 84 nt, Homo sapiens
gaggagaagcgcacacgaggcagagaagaacgagcgggcagcggcagcgcgcgcacgcggacaccaggggcgcgcgcacagcag

SEQ ID NO: 103086 - RNA, 76 nt, Homo sapiens
ccgaagacgaagccagaagagcacagcaaagccaagccaacaggccaggaggaccagaaaacagcagaaagaccag

SEQ ID NO: 103087 - RNA, 42 nt, Homo sapiens
aggcagagccgcaccgccacagggggagcagcaaacaggagg

SEQ ID NO: 103088 - RNA, 70 nt, Homo sapiens
cagaaggcagagggaacggaaagaacagggaggaagaacagggagaccaagaaaaaaggagaagagcagc

SEQ ID NO: 103089 - RNA, 86 nt, Homo sapiens
aacaaccggcgggccgaggccgcaggaggagggagggcaacagagcagccagaacccccaagcagccacgacagcccaagggagcg

SEQ ID NO: 103090 - RNA, 76 nt, Homo sapiens
cagacggacaagagcgcggaacaggacgccccgaggagaagaaaggggaccggggacacacccacgaacacaaagg

SEQ ID NO: 103091 - RNA, 78 nt, Homo sapiens
gagggggaggcccaggccacccggagcgcgcgcgcccgcgaagcgagcgccgccgagcagacagagggcagccccgcc

SEQ ID NO: 103092 - RNA, 63 nt, Homo sapiens
aaaaaacgcagggcaaaagcggacacaaagcaaagagcccaaaaggcagagcgaggagagaag

SEQ ID NO: 103093 - RNA, 83 nt, Homo sapiens
gccacgagccagccgaccgggcagcggcgaggggacggagccggacaggagccgccgccgccaacagacggccaaaaccacac

SEQ ID NO: 103094 - RNA, 71 nt, Homo sapiens
caaaacagaggaaaaccagcaaacgacaacaggagggaaaaccccgaccaaaagaagcaggacacaggaga

SEQ ID NO: 103095 - RNA, 84 nt, Homo sapiens
gaagggcagccggacccagagagcaccgagagaggagcccgagacagccccaaggcccggcaggaggagaccacacggcaggcc

SEQ ID NO: 103096 - RNA, 80 nt, Homo sapiens
gcccagccccggagagcgggaacagggcggcggaccggggcgcgcacacgccccagggccggaccgcccagaagggggga

SEQ ID NO: 103097 - RNA, 70 nt, Homo sapiens
cccgcgcgcgccgcgggcacgaccgacaggcaggaggaagagcgcaggcgccggaagaagagagcggcgg

SEQ ID NO: 103098 - RNA, 77 nt, Homo sapiens
caccagaagggaagggggccagaggagacgccgccgaggaaacggagggagcggccggaacccaagccaggcgccaa

SEQ ID NO: 103099 - RNA, 68 nt, Homo sapiens
gcgaggcgcagaaggggacagaacaggagggagcagaccaggggaaggggcaccgaaccagacacaag

SEQ ID NO: 103100 - RNA, 73 nt, Homo sapiens
aacgacagaggggagcagaagagaccccaagaaagaggacgcaccaccagagcaaggcaggaagaaagcagac

SEQ ID NO: 103101 - RNA, 72 nt, Homo sapiens
ccacgagcaccgcgccggcccagcaccccgagaaccgcaggagccagagaccaagccgaggaagcagagcca

SEQ ID NO: 103102 - RNA, 84 nt, Homo sapiens
gcagccgcgcgccgagaagcacccgcgacccagaagcggagagggcgggaggaaggagacaccccagcaaaagaccagcgccac

SEQ ID NO: 103103 - RNA, 57 nt, Homo sapiens
cagggaaagacgcagaccgagacgcaaggaacgaagcccgcagcgaggggggagagc

SEQ ID NO: 103104 - RNA, 69 nt, Homo sapiens
cgaaaaacccgaccccccaagcagcgccccggagaagcaacagacccacgagacaagaaaggaccaaga

SEQ ID NO: 103105 - RNA, 70 nt, Homo sapiens
acagaagacgaccaccagacacccggaggcaacgaaagcaaaccgagagcaggcgaaggccgggacccag

SEQ ID NO: 103106 - RNA, 78 nt, Homo sapiens
ccgggaccggagggaaagaaagagcccggacggaagaggaggagaccaagcgcacagccagcacaggagaacggaagc

SEQ ID NO: 103107 - RNA, 77 nt, Homo sapiens
ccagagcgaggacgccggcagaaggaaggcagagcccacaaacccaagcagcaaagaaagagccaagcaaaaagcac

SEQ ID NO: 103108 - RNA, 83 nt, Homo sapiens
caggggagcgggcgagggcgccaggaacacgacacagaccccggccggaacccagggagaccagccccccccacgcaccagaa

SEQ ID NO: 103109 - RNA, 77 nt, Homo sapiens
gacccgagagaagacaggagagcgagaccgcggacaacagagagagaggcgggaagcggagaaaaccaggacccaag

SEQ ID NO: 103110 - RNA, 65 nt, Homo sapiens
ggaggaaaagaagggagccgggcgcccacaggaccaaagcggcgccaagaggggcaaagacccag

SEQ ID NO: 103111 - RNA, 57 nt, Homo sapiens
ccgcccaaggaggcccagcgacgcccgcagccaaggaggccggcgccgagagcgcag

SEQ ID NO: 103112 - RNA, 85 nt, Homo sapiens
ggaaaccaggcaccggggggcaacacccgagaacggcgggaagagaagacacgagcacaaacggaacagagacagacccgggggc

SEQ ID NO: 103113 - RNA, 68 nt, Homo sapiens
gaaaagaccaagagaaggggcaaaaaaaaaaaaagagacgaaagaagaggaggacggccccacaccgc

SEQ ID NO: 103114 - RNA, 69 nt, Homo sapiens
acagagaaacaacaggccgagcaaggagagaacgcgagggaaggcggggaggcaccgggccccgaaagc

SEQ ID NO: 103115 - RNA, 62 nt, Homo sapiens
agacgcgagacccgcccgacacaccggcacgaaaaacccgcaggagcggaaaacacggaaag

SEQ ID NO: 103116 - RNA, 43 nt, Homo sapiens
gggggcacgcccgcccgggccggcaccacaggagcggagacag

SEQ ID NO: 103117 - RNA, 77 nt, Homo sapiens
aggccccgcgccacacgcgagggcagcaccgcagaggacccaaagcagaacggccgagcgaccaggagaggagcccc

SEQ ID NO: 103118 - RNA, 70 nt, Homo sapiens
gagacccgcgcacgcaccggcccccaccacaccacccacccgggagaaacgacaggaaaaccaaaggacc

SEQ ID NO: 103119 - RNA, 78 nt, Homo sapiens
agccagaccggccagaaaggcacaaccccgaacagcagaagcacgcagccggcaaacaccgggaagcccacgggaccc

SEQ ID NO: 103120 - RNA, 62 nt, Homo sapiens
gccgcgccaccgcaccgccaccggcccgacccagaaggggcccccggcgcagcagaggcgca

SEQ ID NO: 103121 - RNA, 75 nt, Homo sapiens
gggggaacagcagagacgcaacggaaaggcgcaggcagagggaaaagagacgcaaaccacgaggacagagaagag

SEQ ID NO: 103122 - RNA, 70 nt, Homo sapiens
cccaacgcaggcccgaaagaacccgacgacccgaggagccagggcggacaacaagacgccaggaagccgg

SEQ ID NO: 103123 - RNA, 53 nt, Homo sapiens
ccggaggggaccgagcgcaggccccgagccccggccccaaagacccaaaacag

SEQ ID NO: 103124 - RNA, 75 nt, Homo sapiens
caagcccagagaagcagagaaagacgggagcggggcgcgcagacccaaggagagccgaacaggaaccgagaccgg

SEQ ID NO: 103125 - RNA, 87 nt, Homo sapiens
cccacgcggcccacaaccgcccgaaccagagccggaggcgggaggacgggcgccgcagaacaaaaccagccaagcagaggagaaaaa

SEQ ID NO: 103126 - RNA, 60 nt, Homo sapiens
gccagacgcggccgcccgcgagaaacccagagcacccagaaggggaccacggaccaagag

SEQ ID NO: 103127 - RNA, 79 nt, Homo sapiens
acaagcaccaagagcgccaaacagcgcaggaagggggagacagccccgagcccaagcgaccagaccagggaaaacacag

SEQ ID NO: 103128 - RNA, 53 nt, Homo sapiens
gagaaggcaacgaagcacagacaccacaaaggaagcggcgcgggcccccccac

SEQ ID NO: 103129 - RNA, 72 nt, Homo sapiens
ggacccgccaccaccaaaaaaccaccccccagacgagaacacacaagaaaaacccggggaaggcaagacggg

SEQ ID NO: 103130 - RNA, 35 nt, Homo sapiens
gggcacaggagggaagagcaagaccggaacaaaga

SEQ ID NO: 103131 - RNA, 68 nt, Homo sapiens
cgagagccaggccaagaacggaaggaccaagagaaaaacagccaggcgagccgcaaaaaggcccggga

SEQ ID NO: 103132 - RNA, 76 nt, Homo sapiens
agaaacaggagacagacacaaaagcgaaccagagcaacagcgcaaggcagcgggaacagcccgggccgccgcaccc

SEQ ID NO: 103133 - RNA, 69 nt, Homo sapiens
caggccaaaaccgacaagacacaagagacagcaacaaagcaaccggaaagggagacgaggccacagcgc

SEQ ID NO: 103134 - RNA, 81 nt, Homo sapiens
aggaacagcaccgaaaagacaggcgagagacaagccggagaacgcccagaccgaaaaccagaaaacgaaaaaagaggagga

SEQ ID NO: 103135 - RNA, 78 nt, Homo sapiens
ggagacgaccggcaaccgcgacccaaacacccaacgagacgggcaagaggaccccgccgagccaggaacccaacgggc

SEQ ID NO: 103136 - RNA, 77 nt, Homo sapiens
aacgacggagacgcagagggacgaaagaagcgcagcggaggaaggcgagaggagcgggggacaggagaccaacggcg

SEQ ID NO: 103137 - RNA, 62 nt, Homo sapiens
gaagcagaaaccaccagagaccaggcccgaggaaacccgagaaggccccccgaaaacgcgcg

SEQ ID NO: 103138 - RNA, 79 nt, Homo sapiens
ccggaagagacacccaagcaggagagaagcacaaagggccgcagcgagcgggcccgccggacaccaaccaagcccccaa

SEQ ID NO: 103139 - RNA, 75 nt, Homo sapiens
ggaggacacgagccagggaggaaggcgcaggagcccggccaccacacccagcggaaacaacgaagcaagcccaag

SEQ ID NO: 103140 - RNA, 75 nt, Homo sapiens
ggcccgacaccgcgggccgccagacgggaagggccggagcgcgaagacgcagggaaagcggcacacgaaaggggc

SEQ ID NO: 103141 - RNA, 60 nt, Homo sapiens
acgggagaaacaaagaccacaccaggaaaggacagacaaggcgccaagccagaagaaaaa

SEQ ID NO: 103142 - RNA, 59 nt, Homo sapiens
gcaaacaaggaggcaagagcaacaaggccgcagcgcaggacaagcgagcacaaaagaca

SEQ ID NO: 103143 - RNA, 78 nt, Homo sapiens
ggaagcacgaaagggacaggaggacaagggaacacaaaccagacaggagaggcacccccaggaccgcgcccccagaga

SEQ ID NO: 103144 - RNA, 70 nt, Homo sapiens
aaccagaccgaagggcgaccaccacaacgccgcggacgaccgcacgggcagagacaacggcagaaaaagc

SEQ ID NO: 103145 - RNA, 59 nt, Homo sapiens
gcgggaacaaagcagcccaggcagaccccagggagagcagaaagacgagccgccgggga

SEQ ID NO: 103146 - RNA, 61 nt, Homo sapiens
agggcgaagaggaacagggcccagaacaaaggcagcgaaagagagcaggaggagagcggac

SEQ ID NO: 103147 - RNA, 76 nt, Homo sapiens
gccgccacccggcgcgaccgcccggcaccgggagaaccaccgccaccgccaccagaccggagccggggcccgacga

SEQ ID NO: 103148 - RNA, 59 nt, Homo sapiens
agcagaagccgacaagcccgggagacacaggcagaaacaaggagggaaggccaggacag

SEQ ID NO: 103149 - RNA, 89 nt, Homo sapiens
ggccgccccgggggcgccaggcgaccggagcgaacgccacgccggggagcgagaacccgagcagcgccagagcaacacaccgcgcccca

SEQ ID NO: 103150 - RNA, 76 nt, Homo sapiens
gcccccacccagccagccggcaccgccaccccacaggcccccaccaggccgcggcagacagagccgcccacccagg

SEQ ID NO: 103151 - RNA, 56 nt, Homo sapiens
gcggccggaggagcccccaggccagggagcccaggcggcaggagagcaaggggcaa

SEQ ID NO: 103152 - RNA, 74 nt, Homo sapiens
gcgcggcgcggccgagagccgcggcccggcggaaaggacagcaggacacaaggcacgaggacgaagaggaaagg

SEQ ID NO: 103153 - RNA, 80 nt, Homo sapiens
ggacccaaaaggcgcagggcacgacgggcccccgagagaaccgaggaccgcggcacagaccgcaacgccacggggacgcg

SEQ ID NO: 103154 - RNA, 57 nt, Homo sapiens
ggagcagcgcagcaggagcgccacaacacacggagcacgagcagcagggacgcacca

SEQ ID NO: 103155 - RNA, 63 nt, Homo sapiens
cggggaggcagcgcgggacccagcccaggcggcgcggacggggcggggggccaaagggcgagg

SEQ ID NO: 103156 - RNA, 59 nt, Homo sapiens
accaggagcccgagagagaaggaaagaacaagacccgaagagaagccaggcagaggaga

SEQ ID NO: 103157 - RNA, 56 nt, Homo sapiens
gcggacagcggggcccgcggaaaacaggcggaagggccaccagcggcacccaggaa

SEQ ID NO: 103158 - RNA, 69 nt, Homo sapiens
cggaggcaccccccacaccccagaacaggccgcgagcaagccgagcgagacgaagagaccagaagcacg

SEQ ID NO: 103159 - RNA, 75 nt, Homo sapiens
agaaagccagcagacccccgagggccgagcaacaggagggcgaccacaagcaaacagggagaagaggaagaccag

SEQ ID NO: 103160 - RNA, 75 nt, Homo sapiens
cggacagcagcgcaggcaaaaaacaggcggcccagggcagcagcacacaaacaaccacaaacaacagccacagga

SEQ ID NO: 103161 - RNA, 87 nt, Homo sapiens
gcgggaagaagccggcccggggccgcggacgaggaccagcagaggccagcacgagaacccaggagaacacgagacccgcacaaaacc

SEQ ID NO: 103162 - RNA, 83 nt, Homo sapiens
cggccacccgagaagggagacgacgcgcgggccgcgagcggggcgacccgagagggcggagaaggaacagggagagaaacaac

SEQ ID NO: 103163 - RNA, 57 nt, Homo sapiens
caccagaaggcaaggaagaggagaaggcaccgacagcacagcagaaaggccgccccg

SEQ ID NO: 103164 - RNA, 59 nt, Homo sapiens
accagcgagagacaccaaaaaagaaggcagccaaagggggagagccccccaccgaggac

SEQ ID NO: 103165 - RNA, 75 nt, Homo sapiens
aaaggcggcgggcgggcgcgaggggacgcgcacggcgggccggccaggagccggggacagaaaagcaaaaggaag

SEQ ID NO: 103166 - RNA, 75 nt, Homo sapiens
cggcgccgagggacagacgcaggaaaccgccagaagcgcggcgagaaaacagacgcagcaaacccagacaagcaa

SEQ ID NO: 103167 - RNA, 73 nt, Homo sapiens
cccgaggagcgggacacaggaaggcccccagacggcgccagaagacaaagcgaggagacggacagacacaggg

SEQ ID NO: 103168 - RNA, 54 nt, Homo sapiens
ggcaaaggaggaagaggaacagcaagccaaagagcggcgggccacccaagaagc

SEQ ID NO: 103169 - RNA, 63 nt, Homo sapiens
gaaacacaaggaaaacgcagcagaccggagaaaagcccaaggaaaagaccaggcacggacacg

SEQ ID NO: 103170 - RNA, 78 nt, Homo sapiens
agagcgagagacagagacaccacgaagggcaaaagcagcagggacgacgcaagaaagaaagagggcacgcccagcggg

SEQ ID NO: 103171 - RNA, 65 nt, Homo sapiens
caaaggagaaaagcagagacagaaggcgcaacggccagagcagaaagggaccaggaccaacgccg

SEQ ID NO: 103172 - RNA, 75 nt, Homo sapiens
gggccggccggcccgaggaaggcaagacccggaccacggccgagccgggacaagccgccgcgccgaccagggagg

SEQ ID NO: 103173 - RNA, 70 nt, Homo sapiens
accagaggaccaagaagacggggaaaaaaacgacagaagcacgacaacaacgggcagcaagccacaacgg

SEQ ID NO: 103174 - RNA, 86 nt, Homo sapiens
ggccccgggccacgggcgcgaaagaggagcccgaagcggaggacccggcccagccgggcaggccgacccccaccagccgagacaca

SEQ ID NO: 103175 - RNA, 73 nt, Homo sapiens
cacacccggagaagcaggagcccaccggcagccagcaccagagccggagagacggagcacaaaggacccgaga

SEQ ID NO: 103176 - RNA, 83 nt, Homo sapiens
gggaggcgggagaaggcgcaacgcggcgcaacaccagcaggaaaaaagagcggcagaaggccaaacggccgagcaggcgagcg

SEQ ID NO: 103177 - RNA, 82 nt, Homo sapiens
accagaagaacccagggagagggaagaaaagcggagaaggagccaaacccaaagagcgaccggacagaagacagaccgacag

SEQ ID NO: 103178 - RNA, 80 nt, Homo sapiens
cgccccaaaaggaaacaccaccggaaggccgcgggggaaggaggacgcagagagggcacacggggcgaaggagaagacca

SEQ ID NO: 103179 - RNA, 73 nt, Homo sapiens
cagagacacaagagcccgggaaccccagcggcaaagacgcaacaacagcgagcaagagaggaacgcgaagcag

SEQ ID NO: 103180 - RNA, 103 nt, Homo sapiens
gagacaccaagaggggaaagccaaggagagcgaggaacgaccaagcaaaaaccagggagcgggaaacgcacaacagagaacagaaaagacccgcagacaacgg

SEQ ID NO: 103181 - RNA, 83 nt, Homo sapiens
ccgcacagccgcggcggcagcagcaggagaggcagaggggcaggacaagacccgaagggcagaacccacggacacggagacca

SEQ ID NO: 103182 - RNA, 75 nt, Homo sapiens
ggcgcgcgcgcgcccgcgccgaggccgcgggcggcgggcccgggaacaggcaaggcgcaccacgagggcacgcag

SEQ ID NO: 103183 - RNA, 72 nt, Homo sapiens
gggagagccacggaagccgacagacaaccagagggaacaggcacgccccacccgccagccgagcccccgacg

SEQ ID NO: 103184 - RNA, 75 nt, Homo sapiens
ggaaccgcggcgacaagacacgccaagcagggagaagacacggcggacgcgcgagagagagaccaacggcaacaa

SEQ ID NO: 103185 - RNA, 76 nt, Homo sapiens
aagcgcggcgcgcaggacccagacccccccccgagaccggaagagaaagagcaggccagcgcccaaggaggacaaa

SEQ ID NO: 103186 - RNA, 60 nt, Homo sapiens
cgacgcaaccgcgggagaggcgcgccaaagaaaagggggccccggcaacggcagccaggc

SEQ ID NO: 103187 - RNA, 79 nt, Homo sapiens
ccgcacccgcgccccagcagacaagccagcaccagcggccaagccagacgaaaagccggacccaggagaagaggggaga

SEQ ID NO: 103188 - RNA, 74 nt, Homo sapiens
caggcgcggaccccgggccgcgcggcgcgggagggggcagccaggggaccccacaccacaaaccgaggaaagaa

SEQ ID NO: 103189 - RNA, 49 nt, Homo sapiens
gagcagcacacccagccccaagagcaacaggccggaaggggggcgacgc

SEQ ID NO: 103190 - RNA, 67 nt, Homo sapiens
aacccccgaccgggagcccacgggccaacaagcccacggagacgaaaacgccccaaaacacagcccc

SEQ ID NO: 103191 - RNA, 75 nt, Homo sapiens
cccgcggggagcgcccccggcgcgagccccaggaaagggaaacacaaagaagacaccagaagggccagcaccacg

SEQ ID NO: 103192 - RNA, 77 nt, Homo sapiens
gaagcccagaccgcagggcgggaaaaaaccaagcagcgagcaccagccaggaccgcgcagcccaacaacaagcagcc

SEQ ID NO: 103193 - RNA, 106 nt, Homo sapiens
gacccggacaaccagaggcgaggccccaacccgggcgaagcgaaagaggagaggcgaagggaagaagccacccagggagagccagggaacccaagacccgggagca

SEQ ID NO: 103194 - RNA, 82 nt, Homo sapiens
gaacagacacggggaagcgcaaaaacaagacggggcgccccacagaggggcgacgaaacagacacaaggcgacgaagacgag

SEQ ID NO: 103195 - RNA, 97 nt, Homo sapiens
ggaaggcaacacagaccgcacaaggaaaagaagcccaacccagaaacaggcagaacgcagagcggccaagccggcaggagccagcaaggcagcaaag

SEQ ID NO: 103196 - RNA, 77 nt, Homo sapiens
ggaggccaaagaagcagcaaccgaaaggcgagggaaaaagacggaacaaggcccccagagagcccgacgggaaggca

SEQ ID NO: 103197 - RNA, 81 nt, Homo sapiens
caaaccccacaggagaaggagaaagcgcaggcaggagaaggacagcagagccacaagggacgcaaaaagaagggggagaag

SEQ ID NO: 103198 - RNA, 52 nt, Homo sapiens
ggcagacaaaagggccaaagaagggagagaggaggggcaggaggaacacaac

SEQ ID NO: 103199 - RNA, 78 nt, Homo sapiens
ggcagcgccaggaacgagggagcagcgcgaaaagcagggccgacgggccggggggagcggacaccggggggacacgcc

SEQ ID NO: 103200 - RNA, 76 nt, Homo sapiens
ggagcagcgggcgacaggcgggcccgggcgggccccgcgcaggcaaaggggaacggcagcgggcacgagcggagag

SEQ ID NO: 103201 - RNA, 83 nt, Homo sapiens
gcggcggcgcgagccagcggggccggggaggggcgaccccggggcccggccagcacgaccgaggaggggcggacagcggagga

SEQ ID NO: 103202 - RNA, 73 nt, Homo sapiens
aggcgagaaacagaaggagcaggaagggaccacagaccagcacgccggcgccacgaaccgagcgacaggacgg

SEQ ID NO: 103203 - RNA, 71 nt, Homo sapiens
gggagccccggggagggccagagacgccacgcagacagagaagacggaagaggcaaaccaccagagagcga

SEQ ID NO: 103204 - RNA, 84 nt, Homo sapiens
gcaggcgccgaagaagggaggcagcagagcgggagcgacagggagaagaagcgaaggaggggggacaaacaacgcgacgagacc

SEQ ID NO: 103205 - RNA, 53 nt, Homo sapiens
ccacacggacggggggccacccaccggacccagcccgagaaaagcacagcacc

SEQ ID NO: 103206 - RNA, 55 nt, Homo sapiens
aacccgcgagcaggaaccccaggaaacggccagcggggagacaagacgaacagac

SEQ ID NO: 103207 - RNA, 59 nt, Homo sapiens
gcaaggggccaccaggaggccagggggcgccagaggagcaaaaaggaccgagaaaaacc

SEQ ID NO: 103208 - RNA, 73 nt, Homo sapiens
aaaaggagaggacagcagccgagagacacaacgacgcagcgcccaagccgccagaagcccgggagccagcgga

SEQ ID NO: 103209 - RNA, 80 nt, Homo sapiens
aagccaccgccggggaaaaaaaggacaagagagacgaccgacgaaggccccacagcaaccccacccaggggccagacggg

SEQ ID NO: 103210 - RNA, 70 nt, Homo sapiens
gagggagagccaaagaagaggagggaggaagagaccgacgccggccagccccacccagcaaggacagacc

SEQ ID NO: 103211 - RNA, 72 nt, Homo sapiens
ggcacgaccccacccccgaggcccgaccgagcagcaaaaaggagggagcagggacacacgaacaaagacagg

SEQ ID NO: 103212 - RNA, 77 nt, Homo sapiens
ggaggacacgacaccaggcgaaccggccacgcacccccgaagccgcgaccgaagaagagagaggggaaacagaaggc

SEQ ID NO: 103213 - RNA, 84 nt, Homo sapiens
agcgccagaggcccccgagccccccgagaagacccaggccaggaacaaaaaacccccaggaagggccccacaaacgcaagaaaa

SEQ ID NO: 103214 - RNA, 73 nt, Homo sapiens
ggggcgggccgggcggcgggagcggccaggcaaggggggacgggcacacacaaacgcgaccaacgaggacagg

SEQ ID NO: 103215 - RNA, 84 nt, Homo sapiens
acccagcaggcaaacagaccggagaccgcgcagaagacacgcccggaagaccagccaacagcgccacgcagagccccgccagga

SEQ ID NO: 103216 - RNA, 55 nt, Homo sapiens
aaagcccagaaaccaaggagaaaaggacgaggagcaagggccagagaaggaggag

SEQ ID NO: 103217 - RNA, 80 nt, Homo sapiens
aaccggcggcgcagacccggagacagacgaccccgcgagaacaccaaccgccgaggcgccccgccaccaccggacagcag

SEQ ID NO: 103218 - RNA, 72 nt, Homo sapiens
gaggcggaaagcgccagcaaaaaggcggacaggcgagaaccaggagccgagagcccagaggcccggaaggcg

SEQ ID NO: 103219 - RNA, 72 nt, Homo sapiens
aacgcggagcggcgaagagcaaccagagcgggccaacagacgggccacaggacagcggcacgaccaaaaaga

SEQ ID NO: 103220 - RNA, 76 nt, Homo sapiens
gagacacagaagccgacagggagacacggcaggaacccgcgaagcgggaaggacagacacacaccccaggcaaccc

SEQ ID NO: 103221 - RNA, 74 nt, Homo sapiens
cccagcggccacacccgccacccacaggaccaggagggcagccccgggaaggccagcaacagcccccggcacga

SEQ ID NO: 103222 - RNA, 93 nt, Homo sapiens
aaaaggcggcggcggcggcggcggcgcagcacgaacgggaccggaggaagcagcgggaggaggcagagggaaccaaaaaaaacagacaagaag

SEQ ID NO: 103223 - RNA, 80 nt, Homo sapiens
gcgccgaggacagagcgacgggcgcaagccccagaggcggccagcaacagcgccaggccccaccgacaccacagccaccc

SEQ ID NO: 103224 - RNA, 75 nt, Homo sapiens
gaggccagaacaaccacgcagcgggcagagccgaggaacgacaagcacggaggcgggagagcagcagaaagcgga

SEQ ID NO: 103225 - RNA, 80 nt, Homo sapiens
gaagaggcggccggcgaaaggagcgggccggcaagggaggagcgccccacaaaaccaagcgaggccaggccgccggaccg

SEQ ID NO: 103226 - RNA, 123 nt, Homo sapiens
gaaggacggaacggagaaaccggcagggaagggcagaaggagggccacaaagggcaaagagaacagagaacggcgcaaaaggaggcaagaagaagggagaaagcgaaaaccgaagaccagaag

SEQ ID NO: 103227 - RNA, 78 nt, Homo sapiens
gagacgagccgcagaaagccagcaacaggacagccagcaaagggggagagcaaaacggcggaggccgacgagcggggc

SEQ ID NO: 103228 - RNA, 75 nt, Homo sapiens
acggcgccagagccggggacgaaagggaaggacaggcagagcaaacaagagcagcacacagaacccagcccaccc

SEQ ID NO: 103229 - RNA, 68 nt, Homo sapiens
cccacgggacgggagacccgacggagcagacagaagacccggaaccccacaggccgaggcacgaaccc

SEQ ID NO: 103230 - RNA, 69 nt, Homo sapiens
cagggggcaggacgaccagcgggaggccagaggaagggagagagaaggagagaagaggcagaggaggac

SEQ ID NO: 103231 - RNA, 54 nt, Homo sapiens
aagcagcggcggaagcgagcagaacagggaaggagaaacaacaagaaaacggcc

SEQ ID NO: 103232 - RNA, 76 nt, Homo sapiens
ccacggaccagaaaacacaggacaagcagcaaagggggaacagacgaaaggcacagaggccaaagggcggccccca

SEQ ID NO: 103233 - RNA, 74 nt, Homo sapiens
gggccaggcgacaaagagaaggaaagcagaagccaccgggaagacgggcggcagagaagagaagagcacagcgg

SEQ ID NO: 103234 - RNA, 70 nt, Homo sapiens
ccaggggcgcccgaagggccgccgcacgcaggacccacgaggaagcggccgcggcgaaccccagagccag

SEQ ID NO: 103235 - RNA, 76 nt, Homo sapiens
acaccagccagcacccacgccaggcccagcgagccagaagcccccccagcagggaaggggggcagaaagaagagga

SEQ ID NO: 103236 - RNA, 74 nt, Homo sapiens
aaacggggggcgcggagggaccagcgagcgggaggcaagaaaagcgcccaggaagcggaaaaacaaaagagccg

SEQ ID NO: 103237 - RNA, 86 nt, Homo sapiens
ccgccaaccgcaaccagacgccagcgggacgaggaccgagaccgcggccgggaccgagggagacggcgaagaacagaggaacaacg

SEQ ID NO: 103238 - RNA, 74 nt, Homo sapiens
agccccgcgccgccgaccccccggcgccgcgccggcggcggcccgggcgaaccgccgcgccaggccagcggggg

SEQ ID NO: 103239 - RNA, 83 nt, Homo sapiens
cgaggcccgcggagcgccgccgcgcgcacaggccacccacagcccgggagccaggccccgcaaccccaggggcaacaggccaa

SEQ ID NO: 103240 - RNA, 74 nt, Homo sapiens
acgggacaaacagacggagcaaagacagaagaaagggagcccccaagaacagcgagcacaggaaggaaaccgga

SEQ ID NO: 103241 - RNA, 42 nt, Homo sapiens
gcgccggggcacgacacaaaaacaggcacgcgagaaggggag

SEQ ID NO: 103242 - RNA, 79 nt, Homo sapiens
ccggggaggagcggcagccgcaagccgcgaggccacgccccgcccagagacaggggccaggccaggggcaggggaagca

SEQ ID NO: 103243 - RNA, 71 nt, Homo sapiens
gaagaccagcaaaaggagaccccccgggacgggccacgagccgggcccccgagaaaagagaacgcaagagg

SEQ ID NO: 103244 - RNA, 78 nt, Homo sapiens
cagaaggacgccagcggagaacgcggcaaagcgagacagccagcagcccccccaagggggacacagcaggcaccacaa

SEQ ID NO: 103245 - RNA, 74 nt, Homo sapiens
ccagaggaggaagagcaagcgggggaccgaacaaggcaaaaggggcagcggccagcaaaccgcaaacaccaagc

SEQ ID NO: 103246 - RNA, 72 nt, Homo sapiens
ccaaccgccgggcgcccccggacagaccaacggaagaaggagaaagacaaagccccgagaaagaccagcacc

SEQ ID NO: 103247 - RNA, 77 nt, Homo sapiens
caaggagacagagacgagaaggaggacagagcgggagccaccagcgccaaagggaagccaggagcccgggggcacgg

SEQ ID NO: 103248 - RNA, 82 nt, Homo sapiens
gccagaggaggaagagggcacccaggcggcgaagaagagacaacggggcagcaggggcaaaaacagaacgcgcagaggcgag

SEQ ID NO: 103249 - RNA, 69 nt, Homo sapiens
gcagaagcccgaagaaaacagcgggaagagacagccaagacaccaaaaaggcaaggacagaacccaagc

SEQ ID NO: 103250 - RNA, 34 nt, Homo sapiens
agccaggaacagacaaagcagccgcgaacgaaac

SEQ ID NO: 103251 - RNA, 67 nt, Homo sapiens
accaaagccgacggggcaagcacacgaccgcgagagggcgaagaacgccaaaacccaccaaccagag

SEQ ID NO: 103252 - RNA, 34 nt, Homo sapiens
gcacacagcagagagaaagccacacacgaggagg

SEQ ID NO: 103253 - RNA, 69 nt, Homo sapiens
gaggggaagccaccgagcaacaacagccacaggcgagcagcgcgcaaagagagaaggcgggaccaagaa

SEQ ID NO: 103254 - RNA, 72 nt, Homo sapiens
gcaggacaggcagagcccgcgggcaagcaaccagggaaggcaggcccccagcagcaagaccaacgggaggac

SEQ ID NO: 103255 - RNA, 56 nt, Homo sapiens
gcgcgaagccacaagaaaggaccacgaggagcaacggcgagccgcgaagccacccc

SEQ ID NO: 103256 - RNA, 78 nt, Homo sapiens
cccgccagacacggcaggccaagaagcaccgagcaagaaacgccagacaccaaaacagccagagcccggcccaggcca

SEQ ID NO: 103257 - RNA, 83 nt, Homo sapiens
aggaaaaagaagaccagcgacaaaagagaaacccggcagcgggccaagaccgaacggcgggcggccaggaagaaaggcagcca

SEQ ID NO: 103258 - RNA, 79 nt, Homo sapiens
cgccggccaccgcgcacccacgaacgcccaccccccgaacccagccgcaccggaccccggaggaaaagcggaagcggca

SEQ ID NO: 103259 - RNA, 70 nt, Homo sapiens
gccccccagccgccggccccccgccggcgccggggcgcgccgccccagccagaagcaagaaaggacagca

SEQ ID NO: 103260 - RNA, 79 nt, Homo sapiens
gccggccccgccagcagcacgggaggccgcccgccacacccaccgcccgggcaggccacggcggagagggccgggcgcg

SEQ ID NO: 103261 - RNA, 85 nt, Homo sapiens
agcgccgagcaaacaaccagagggaagaaaagcaaacgaaaccgggaaacaggcagaacgaaaacaaacggaagagagggcagca

SEQ ID NO: 103262 - RNA, 72 nt, Homo sapiens
gaacaaaaaacggacaagccaacgagcacagggacaggcacacccgaccaagcagccaaaaaaagaagcgag

SEQ ID NO: 103263 - RNA, 78 nt, Homo sapiens
aagaaggagaaggaccgggaaaagccaagcaagcaacagggcccaccggaccgggccacagaggcagaaaccagcagg

SEQ ID NO: 103264 - RNA, 76 nt, Homo sapiens
cgccggggaccccggcagccacccaccgccgccgcccccagaagccgaacggagcaaaggagaagaacgacaccga

SEQ ID NO: 103265 - RNA, 78 nt, Homo sapiens
ccgaacaagcacacccgcagggcgaaccacagcaaaaaggagggcccgacggaaaaggacaccagggaccgggggaaa

SEQ ID NO: 103266 - RNA, 77 nt, Homo sapiens
ccacccaccagagagagggaagcggacgcgcacggagccggccacaagcggggacaggggaggcccccaggaccaca

SEQ ID NO: 103267 - RNA, 76 nt, Homo sapiens
gagagcaaagaagcgaaaccgagcaggcagagagcagaagaacacagacagcggaagaggggcagccaccacagca

SEQ ID NO: 103268 - RNA, 74 nt, Homo sapiens
ccagaaaaagacgacgcccggaagaggcgaaacggaacaagcgcgagaaggaacaaaccaggagaaaccgaaca

SEQ ID NO: 103269 - RNA, 55 nt, Homo sapiens
ggaagagagccaagccaggcccagcagccgccaccgaggaacggccacaaacgcc

SEQ ID NO: 103270 - RNA, 86 nt, Homo sapiens
caggggaccgcaggacagccggcaccacaccagccagcagcccagacaaggccaaggagcaggacagagaaccacaacaaacgaga

SEQ ID NO: 103271 - RNA, 68 nt, Homo sapiens
gcccacccacagagaggaaggcggcagaggcgaccgcgggggggggcccgaacgaggaccaagccgac

SEQ ID NO: 103272 - RNA, 73 nt, Homo sapiens
gaccccagaccgggaggagacacacaccgaaccggacaaaggagcgccaagcaagacccgacaccagcagagc

SEQ ID NO: 103273 - RNA, 79 nt, Homo sapiens
gcacagaaaaaaaaccaaggagccgggggaggcgcgagcacaccaagccaggcggcgaaccagggccaagccgggcacc

SEQ ID NO: 103274 - RNA, 73 nt, Homo sapiens
aacagacgcgcccagagcgcagcacgggcgcaggggcacacacggccaacaaaaacaggaaaccagcgcgaag

SEQ ID NO: 103275 - RNA, 63 nt, Homo sapiens
acagacaccgccccgagacgagaggcacagaaccaggacaacgcgaaccaagagcacgagcac

SEQ ID NO: 103276 - RNA, 39 nt, Homo sapiens
gacaaacccacccacaaagggagacggggcgccgcaccc

SEQ ID NO: 103277 - RNA, 84 nt, Homo sapiens
gcaggggcagggcgggaaggaagaccggcgcggggcacaggaccggagcggagcccccagaagaccgagcgagagcagccagag

SEQ ID NO: 103278 - RNA, 76 nt, Homo sapiens
ccgggcgagcgacccaggaaggagagaggccaagcacagagacgcaagcagggagcgcaagaaaaagcaaaaccag

SEQ ID NO: 103279 - RNA, 85 nt, Homo sapiens
aaacgcagaaggacgcccacgagcaaccaagagaaaagaaacgagaccagaaggaaagaaaaggaagcaacaacaaagcccagag

SEQ ID NO: 103280 - RNA, 43 nt, Homo sapiens
aagacacaggaccagggagacaacaacaagccgaagaggcgag

SEQ ID NO: 103281 - RNA, 86 nt, Homo sapiens
gccgcggaccagaggcgccggccgaagcagagagcaaaccgacgcccacaaaaccaggcacaaggaccggaggagaccagagcagg

SEQ ID NO: 103282 - RNA, 81 nt, Homo sapiens
gcaagccaccccccgcccgccccccgcccccccagccggagaccagaggcaccgacgggaggcgccggcgaaagcaacgaa

SEQ ID NO: 103283 - RNA, 71 nt, Homo sapiens
aaacccggagaacggcgagaaggaacgaaggagcgggcggcgcgcagagcagaaccacaagggacacgccg

SEQ ID NO: 103284 - RNA, 118 nt, Homo sapiens
cacggaccccagcgaccagcaccgccgcccaccacccgacccagagcccccgcccgggcacgcagaggcggagaaaaccagagagcagcgggcagcacgcagacaggaccacaggagg

SEQ ID NO: 103285 - RNA, 78 nt, Homo sapiens
ccgcccaacaccgaacaccagaaacagcaccaggacacgcccgccggcgccgacaccaggaccagcaaagaagcgcgc

SEQ ID NO: 103286 - RNA, 75 nt, Homo sapiens
aagagcgcccagcggacacagccccggaggaaggaaaaaccacgcgcccggccacgggaggcggacagacgcggg

SEQ ID NO: 103287 - RNA, 72 nt, Homo sapiens
gcacccaccagcaaagaaagggaagcagcgggagaggagggaccaggaccgaggagggcggccacgaggcag

SEQ ID NO: 103288 - RNA, 59 nt, Homo sapiens
ggggccaccaggaggccagggggcgccagcgcagccgaccccaagccgacccccaagca

SEQ ID NO: 103289 - RNA, 76 nt, Homo sapiens
gcggaggggcgccaaccaaacaaccaaagcgcaaacagcaaggagaacagcagcccagaaaaaccgcgagacacaa

SEQ ID NO: 103290 - RNA, 56 nt, Homo sapiens
ccggccgggacccgaggcgagaggcgcggcgaccaggacgacgacaagagaaacga

SEQ ID NO: 103291 - RNA, 82 nt, Homo sapiens
aaaaacagaccaaagaaccggagagccggaaacagaagaaacaaaggaggagaggcccaagaccagcgaaccccccgcccac

SEQ ID NO: 103292 - RNA, 79 nt, Homo sapiens
cggccagcccggagcagcacagccaggccgggaggcccgggggggagccacaccaagggggacgaccaccagccaggcc

SEQ ID NO: 103293 - RNA, 32 nt, Homo sapiens
cggccaggagaaccagggcccccaggcgagcc

SEQ ID NO: 103294 - RNA, 69 nt, Homo sapiens
gaagaaacgaccgccagcaacaaacgcaaaggaaaaggacagagagcacaaaaggccccccccacggaa

SEQ ID NO: 103295 - RNA, 70 nt, Homo sapiens
ggccaggcgaggagagcgaacaaccccagaagagacgagccacgcgccgagaacgcaaaagcgaccacag

SEQ ID NO: 103296 - RNA, 78 nt, Homo sapiens
cgagacgcggcgccccgccggggcacgcgcgggaaagcggcgcgagacaacgccgcaagcgggggaaggaacagcggg

SEQ ID NO: 103297 - RNA, 67 nt, Homo sapiens
ggcacaacaacacggccagagcggggagaaacaagcaaacaacggaaaggagggggaagcaacggcc

SEQ ID NO: 103298 - RNA, 84 nt, Homo sapiens
acgacggaaggagaaacgacaggcaacaagacaagcggcggggccccggccgcggcgagccgcacagggcaacacacgcaccgc

SEQ ID NO: 103299 - RNA, 76 nt, Homo sapiens
cacagagcaggaacgcagccggggacaccaaacagggcggcgacggcggcgcgaggaccgaccgggcccgcggacg

SEQ ID NO: 103300 - RNA, 72 nt, Homo sapiens
gagcacgagcagcagagcggaaggagccagccacaggcggcggaacggaacagaagcaagggcaacaacggc

SEQ ID NO: 103301 - RNA, 76 nt, Homo sapiens
aaaaccggccacaaaaccagagcggagacacccaggaggcagaagccaccacaagaacggaagcagaagcacgcaa

SEQ ID NO: 103302 - RNA, 57 nt, Homo sapiens
caagaaggacgggcggcacagggagaacacagggccccaccgcgccccacagaaaac

SEQ ID NO: 103303 - RNA, 85 nt, Homo sapiens
cccaggggaccccaagaagaccacagagggacccggacaaccagaggcagccagcagggggagggcccgaagacaccccgccaaa

SEQ ID NO: 103304 - RNA, 71 nt, Homo sapiens
gccacccaggccaacagccaacacagacaaacccacaagcgaaagaacacgagaagaagaacaggacgaag

SEQ ID NO: 103305 - RNA, 79 nt, Homo sapiens
ggcaaggaggacacccggacaccggaagcgggaaaggaacacccagagaccaagaagagaagagaagcaaagcaggcga

SEQ ID NO: 103306 - RNA, 80 nt, Homo sapiens
gccggggagcccgagcgacccggggacgaggaagaggagcgaaacgaagaaagaagcggcagaagaaagaccaacagaca

SEQ ID NO: 103307 - RNA, 75 nt, Homo sapiens
accacagcagaccacagcggcacgagcaaaaaaaagccccgagcaacaaaccagggaacgacgcagcaaagaaaa

SEQ ID NO: 103308 - RNA, 80 nt, Homo sapiens
ccaaggcacaggacccaggaagcgcccccggcagcccgggcgccgacgcccaagagaaagacccgaacggaaggccaagg

SEQ ID NO: 103309 - RNA, 77 nt, Homo sapiens
ccggcgcgggaaacgggcgaagcgacgagccgcgaggaggccggcaaagcaccaggcacagcaagcgccgaaagacc

SEQ ID NO: 103310 - RNA, 59 nt, Homo sapiens
aaacacccagggacacggagcggacggcgcccgccccgacccccggccgcccccacaac

SEQ ID NO: 103311 - RNA, 76 nt, Homo sapiens
gaaaaaaagagaaaccggggaaccacggacaacccagaggacaacgaaggcgaacaaccgccagggaacagcaaaa

SEQ ID NO: 103312 - RNA, 55 nt, Homo sapiens
aaacaggaccaggacaaaagaacaccgaaaacaacagccagcgacagcccaccac

SEQ ID NO: 103313 - RNA, 82 nt, Homo sapiens
cggcccaaggacggccccaggaaaccacgggaggaccgggccaggcaaagaaggccgagggacgaggaccggaggagccgcc

SEQ ID NO: 103314 - RNA, 82 nt, Homo sapiens
ggaccgagccgacgccgcggggcagcgggccggcgccggcgcgggaagagaacaacgcagaacaaagacgaaggcacgaagg

SEQ ID NO: 103315 - RNA, 67 nt, Homo sapiens
aggcaggaagacacggcaagcccccgggcccgcagagaagaccagaaaggggacagcgacagaggca

SEQ ID NO: 103316 - RNA, 51 nt, Homo sapiens
ccccggacaccccgggaaaagaaggaggccagcgggacacacaaagaaaga

SEQ ID NO: 103317 - RNA, 46 nt, Homo sapiens
aagaagacaccggggacagacaggagcaaacgagacggaagaaaaa

SEQ ID NO: 103318 - RNA, 68 nt, Homo sapiens
cgagcgcaaaggaaggcgccgggcccgacccgcgagagaagaagacaagagcagacgagggagaagcg

SEQ ID NO: 103319 - RNA, 75 nt, Homo sapiens
ggaggccgaggcgggggacacgagcccgaggagagacaagggaaagcaggcgaaagcgggaagaaacaggggccg

SEQ ID NO: 103320 - RNA, 78 nt, Homo sapiens
gagacacgcagcggcggccagggaccaaaaaggggaaggaacaaaccaaagagcagaccccccggaaaaaaaagagaa

SEQ ID NO: 103321 - RNA, 84 nt, Homo sapiens
ccgcacggacaccggcggccccaccagcagacgcagccgagacaccagcccgaaacaccaccaaggaagcgcgccgaacgggag

SEQ ID NO: 103322 - RNA, 73 nt, Homo sapiens
agaacaccagcggggcagcagcagaccagaagggagaccgagcgagcaggagacagggaaacgaaaaccaccg

SEQ ID NO: 103323 - RNA, 80 nt, Homo sapiens
cccggcaccgcgccgcgccggggcgcccggcacccgcggggcagcggaagaagagaagggagggcagaaggaacaaaacg

SEQ ID NO: 103324 - RNA, 74 nt, Homo sapiens
gccagggagggaaaacccaggcagaaaagcacacgaggccgggcagcggcagacaccagcaaacacagacaagc

SEQ ID NO: 103325 - RNA, 74 nt, Homo sapiens
gaaaacccaaagaagagaggaagaagaccccaagcaaggaagcaggagacaccaaaggaaaagacaacacacca

SEQ ID NO: 103326 - RNA, 58 nt, Homo sapiens
acaccacccccgcgaccggcagcaccaggggccggggggcagacaccgggcgccccgg

SEQ ID NO: 103327 - RNA, 77 nt, Homo sapiens
cccacgcccggaaccagccagcgagaacccaagagagggaacccaagccagaccgcccgagaaagacaggaagaccg

SEQ ID NO: 103328 - RNA, 41 nt, Homo sapiens
gccaccaaaagcaccaggaagaggaggcgcaaaagggcccg

SEQ ID NO: 103329 - RNA, 55 nt, Homo sapiens
ccagggacaaagagcaaacagacagggccgcagacaacaaacccaagaaacccca

SEQ ID NO: 103330 - RNA, 48 nt, Homo sapiens
aaaaagaaccgcagacagggaggaacaaacagaacgcaaaccagggaa

SEQ ID NO: 103331 - RNA, 57 nt, Homo sapiens
ggaagaccggcgcaccggcagcgaccacgaccgccccaagcacccgacaaacgcgcg

SEQ ID NO: 103332 - RNA, 68 nt, Homo sapiens
gagccgagagggccacgcccccggcagcaccccaggaacaagggggagagacaaccagagcggaaagg

SEQ ID NO: 103333 - RNA, 79 nt, Homo sapiens
ggcgcagagcgagggcaggagacaacaggcacaaagagagaaggaacacccacagggcagacagagaaagaacacaaag

SEQ ID NO: 103334 - RNA, 77 nt, Homo sapiens
gagaagaccgcccaagcgcccggaggcccacagcagggggcagcgcagcccaggacgcgaccagcagcgccaccgcg

SEQ ID NO: 103335 - RNA, 79 nt, Homo sapiens
gacagccgacagcagcccccagacgagagaaacgacaccaagaacgagcgcgaaggacaagcgagaggagcagagcgag

SEQ ID NO: 103336 - RNA, 78 nt, Homo sapiens
cgggccgccgccgccgccagaaccccgaaagacaagcccaggagacacgacgcaccgagccggcaggcagagcagcga

SEQ ID NO: 103337 - RNA, 79 nt, Homo sapiens
ggagacgcgggggaggcagcagcgaggacgaccagaggcacccgcgccacggggcaagagcgaaggagaaaggcaacaa

SEQ ID NO: 103338 - RNA, 82 nt, Homo sapiens
ccggcggcggcgcgggcgagcggcgagccgaaaagcgagcgcgaggaaaaggcggcgggaggaagcccggggcggcgacgga

SEQ ID NO: 103339 - RNA, 70 nt, Homo sapiens
gggccagcggccaacccgggccaagcagccccgcaggccccaaaggcgaaaaacagcggcggagaaacca

SEQ ID NO: 103340 - RNA, 82 nt, Homo sapiens
ccccaaaaagcggcggggcagcgaggcgagaaagccgggggaccgaggagagcagcccgaggccaagagacgggggccaggc

SEQ ID NO: 103341 - RNA, 74 nt, Homo sapiens
ggagaggcagaacaaaggagaaaagcagagacagaaggagcaagaaagagcaccagaccagaaagaagaaaaag

SEQ ID NO: 103342 - RNA, 77 nt, Homo sapiens
aagagacgcgaccaggacagagaggcagggaggcaaaccgacaccagcgacacaagcgcgagggaaccacagaggac

SEQ ID NO: 103343 - RNA, 82 nt, Homo sapiens
cagcagccgagcgacggcgccggcgcgcccggccgcccgcgggagagaacgcaaggagggacaggacggaaggagcggagga

SEQ ID NO: 103344 - RNA, 74 nt, Homo sapiens
ggaaacacaagaagcccaggcacaacagaggaagcaagggagaagcccggaagggcacccaaacaaagaagaac

SEQ ID NO: 103345 - RNA, 84 nt, Homo sapiens
caggaccgccaaacccaaaccggacgccccgggccgccaggagcagacgaagcccgcggagcaagccgcgccaggcccagcaga

SEQ ID NO: 103346 - RNA, 70 nt, Homo sapiens
cgaaagaacgcccggagagccaaaggacggacgagcgcgggcaacaacagcagcagaggaaaaaagagac

SEQ ID NO: 103347 - RNA, 70 nt, Homo sapiens
cccggagggccgaagagacacacggaggaaacgagaaaacacaagcccggagcgccaccacaggcaagag

SEQ ID NO: 103348 - RNA, 79 nt, Homo sapiens
cgccgggcaacgagaggaggggcggcgcccgggagagcgaacgagggcggcggcaaaagggagaccacaacagccacca

SEQ ID NO: 103349 - RNA, 82 nt, Homo sapiens
gccacaagaaaagccaggcggcagcaccccgagccaccccaggcgcccagaccaagggaacggaggcgagaacccagggcca

SEQ ID NO: 103350 - RNA, 72 nt, Homo sapiens
agcaaggaggagacaccacagcacagcacaccagacccccaggcaaaccgccccgcagcaccacccggcccg

SEQ ID NO: 103351 - RNA, 84 nt, Homo sapiens
ggaaagcgacaagggaggcgccgccagcggccgggaccgaacaggcggacccccgcaggcagcggcaggaccgaaggacacagc

SEQ ID NO: 103352 - RNA, 76 nt, Homo sapiens
ccgggggcccagagcacgggacgcaaggggccgaaaaacgcagcaccagcgggacaagaaggagaaggaccaagaa

SEQ ID NO: 103353 - RNA, 76 nt, Homo sapiens
ccgcccccaccaagccggagccacccaaagccagcagagccggcgcgaaacggaagagagaggacggaaaagggaa

SEQ ID NO: 103354 - RNA, 81 nt, Homo sapiens
agcgagcggcggaaccccgcggcgggagcgcggcggggccgcagagcagcgagcacagcgaagaaagccagaaaaaaggaa

SEQ ID NO: 103355 - RNA, 69 nt, Homo sapiens
gaaggaagagccaccagcgacaaacaggaaaggacccaggaagcacggaccaaccacgaggaggacagg

SEQ ID NO: 103356 - RNA, 38 nt, Homo sapiens
cacgaccgggagaccgaagcgccacgcagagagcaagg

SEQ ID NO: 103357 - RNA, 79 nt, Homo sapiens
ggaacaaagggaacacgcgaccagcgcccgagccccggccgccgccgcgagcaccgaaaaggaacacgaggacccaaag

SEQ ID NO: 103358 - RNA, 82 nt, Homo sapiens
gggcgccgcacccccgcaccccaacagccaaacgaccaagaaagcgggacgcggaaaacgggacccgcaggggcccccccgg

SEQ ID NO: 103359 - RNA, 89 nt, Homo sapiens
cggacggcggggccgggcccccggccgcaagcaggagggggaagacagagaagaccacacaaccgaaggggccgggcaggacggcccgg

SEQ ID NO: 103360 - RNA, 72 nt, Homo sapiens
gaagggagagcagcacccagggccgcaaaaacacagggagaggcccccggagggacccagaagcccaggcca

SEQ ID NO: 103361 - RNA, 83 nt, Homo sapiens
agccgaggcagaggcgacacaagaagagggcggagcggagacgggagaagaaaagacggcaaggccagagaaggcgggagaaa

SEQ ID NO: 103362 - RNA, 81 nt, Homo sapiens
ccccccgcagcagcagcagcgagaagaagccggcggcccaggcggagagcaggggcgaccggcccgcaaccccgccccggg

SEQ ID NO: 103363 - RNA, 74 nt, Homo sapiens
ccacagcaccgaggccgaagggaccacggcccagccagcacgacaccccagggaaggcagcccggaggcggggc

SEQ ID NO: 103364 - RNA, 83 nt, Homo sapiens
gggggagcgggaagcaccacggggccggaaggcagcaagaaaaccaaccggggccccagcgcacaaaacacagaagcgcagga

SEQ ID NO: 103365 - RNA, 79 nt, Homo sapiens
gccccgcagccagaccaggagccgccaggggcaaaaagggagaagaaaagcaacacagcgaccagaaaaaacagggagc

SEQ ID NO: 103366 - RNA, 70 nt, Homo sapiens
agagagcaccagaccagcacaaacaaagcccgcgagggagccacggggacagggacccacacaccggacc

SEQ ID NO: 103367 - RNA, 75 nt, Homo sapiens
cgggaggagacgggcccccccagaggccccacagacaaaaccgccggcggaagagagcgcaccacgcacgaaggg

SEQ ID NO: 103368 - RNA, 58 nt, Homo sapiens
ggcccggcggaaaaggagaggcagacccaaggggggcccggccagcaggcaggccccg

SEQ ID NO: 103369 - RNA, 84 nt, Homo sapiens
cccagaccaggcgggggcccgaccgaccccggcccgggcaggacggggcggggaccaggagaggcgccaccgcccggaccgggg

SEQ ID NO: 103370 - RNA, 83 nt, Homo sapiens
ggaagggccccaggccagaggccaaggggggccgcgccaagcagggaacagaaaagagagggacagacacaacaacccaaagc

SEQ ID NO: 103371 - RNA, 67 nt, Homo sapiens
agccaggggccccaccaggagccagggaggacgaagaaagacagcccacaccggcaggccaacaacc

SEQ ID NO: 103372 - RNA, 131 nt, Homo sapiens
gcacacgcccgacgaggagagcacgacggaccaagacgagcccagcgcaaccccaagcgcccaaaggagggcccaggaagcgggccggagcggcgaagcagcagagccccgggggccgacggcccggacac

SEQ ID NO: 103373 - RNA, 74 nt, Homo sapiens
cagaggcccgggcggccaaggacacgcacgcaaacgaccccggccgggaggagcaggcggaggcagggcgcagc

SEQ ID NO: 103374 - RNA, 59 nt, Homo sapiens
aggaccacggggaaagccaagaggggggcaggccacagcagcagcccgggagcaggccg

SEQ ID NO: 103375 - RNA, 79 nt, Homo sapiens
cggccgaggaaggaacggcccccccccagcccgccccaaaagacggcgaagacaaacacccacagagggccacacagga

SEQ ID NO: 103376 - RNA, 72 nt, Homo sapiens
ggcggaggggcaaaaaagaaccagaccggcacgaggccagaacgggaggcgaggcagccggggccgagagcc

SEQ ID NO: 103377 - RNA, 80 nt, Homo sapiens
ggacaaggcaacacccgaagaaacaagcacagaaccgaaaaaagcggcagcgcaacccagaagagggccacggaaccaac

SEQ ID NO: 103378 - RNA, 83 nt, Homo sapiens
ggcggccgggaggggcgcggcagcgacaagggaggcgaggacggacaaaaggaaacggacgggaggccagccagcagaaggag

SEQ ID NO: 103379 - RNA, 51 nt, Homo sapiens
gagagcagcgaagcaccacgaaaggagggccgcagcgagcgggcccgccgg

SEQ ID NO: 103380 - RNA, 90 nt, Homo sapiens
cccgacacgggaggggaggacccgggacaccgcacagccgggaaaggggcggccgagcccgggggaggccccggagcgcagccgggccca

SEQ ID NO: 103381 - RNA, 50 nt, Homo sapiens
aacgaaggggggaggcccaggccaaaagaggaaccaaaaggaagaccaac

SEQ ID NO: 103382 - RNA, 64 nt, Homo sapiens
cagaggaagggagggcgaagaggggacacgagacgagccagaacagagaaacaggacaagacac

SEQ ID NO: 103383 - RNA, 100 nt, Homo sapiens
ggcccacaagggccagaagaccacccgacaaaaaaagagcccggagcgaagcaaaacagagagagcagaaggaaaacaacggagcacgcaaagcaagccg

SEQ ID NO: 103384 - RNA, 55 nt, Homo sapiens
ccacacaggaaaacagccgaggaagcagggccaggcacagcgccgaggcccagag

SEQ ID NO: 103385 - RNA, 74 nt, Homo sapiens
ggccaggaagaagaaacccacgaaccaaaagggacggacaaaggaacaggaccagcaacggaacagaccagaag

SEQ ID NO: 103386 - RNA, 75 nt, Homo sapiens
acagcggccagaccgaagcgagaggggagagaagccggacagagagcacagcaaaaaaaaaacaacccagcaaga

SEQ ID NO: 103387 - RNA, 71 nt, Homo sapiens
ccggacaccgggagagacaaaggggcaagaccagggcggaccgaggagggcggacacacccaggaggaggg

SEQ ID NO: 103388 - RNA, 73 nt, Homo sapiens
gaagccgggacccaacggggagaaacgacaggaaaaccaaaggaccgaaaaccccaggaaacaacagaacaag

SEQ ID NO: 103389 - RNA, 65 nt, Homo sapiens
agaaacagagggaggaagacagccagcagaggggaaggccaacgcagacaccagagaagaaccgg

SEQ ID NO: 103390 - RNA, 111 nt, Homo sapiens
ccggggcgcggagggccgagggagggccgagccagccgcggccggaggagcccccaggcccggcggagaaaccaccacaaacacgaggccagcaacgaccaacaagacaga

SEQ ID NO: 103391 - RNA, 69 nt, Homo sapiens
agccgcgacggcccagaccaggcgaggcgcagaaggggacagaacaagaggcagcacaagcaggagccc

SEQ ID NO: 103392 - RNA, 82 nt, Homo sapiens
cggcacccgcacccggggacaagcgcgggaacggcgcggaagaacgaagcgcgcggcaggcgcgcgccgccccaggccgcaa

SEQ ID NO: 103393 - RNA, 66 nt, Homo sapiens
gccaccaagcagcacaaagaccaacaggggggcccccaaagggaagccaaacacaaaggaagaagc

SEQ ID NO: 103394 - RNA, 58 nt, Homo sapiens
cgcagaccagaccgccgaccggcgcccgccgggaggcaccgccccaacccccccccgc

SEQ ID NO: 103395 - RNA, 50 nt, Homo sapiens
gacggggcgagcccccccagaaaggaaggccccaagaaaagcggaagaag

SEQ ID NO: 103396 - RNA, 77 nt, Homo sapiens
gaagaagcagggaaaaagaaaacagccaaagccaaccccaggcacacagagaaaaaaagggaacaaaacacagcaag

SEQ ID NO: 103397 - RNA, 68 nt, Homo sapiens
cccccggggggagagcgaggccgagggcaggcagcacccacagggcacaccaaagcggggaaaaggga

SEQ ID NO: 103398 - RNA, 111 nt, Homo sapiens
ccagaagagcggaccagggcgcgccagcaccgccaccagagcgcccgcgcgggaccccaggccagaaggcacaacagcccgagggccgcaaggccgaaaccaagacacaga

SEQ ID NO: 103399 - RNA, 55 nt, Homo sapiens
ggaaacaaggcaacagaaagagcaacagcagggcaacagagagcggaaccgcagg

SEQ ID NO: 103400 - RNA, 89 nt, Homo sapiens
ggagcccacaccaaggacaccaggagcccccaaggagggaagaggccccagggcccccaccaggccagaggagagcccgagacaggagc

SEQ ID NO: 103401 - RNA, 85 nt, Homo sapiens
caaccacccgagcggcgcggacgaaggaaaaaagcccgaacaagaaaaggcacaagcccgcaaagaaaaggaaaagcaaacgacc

SEQ ID NO: 103402 - RNA, 99 nt, Homo sapiens
caacggcagaagccaccacaaaagcgaaagggcacaccacagaggagaaggcgcgcagcagaagaccagaaaccggaggaggcaaggccggaggcacca

SEQ ID NO: 103403 - RNA, 69 nt, Homo sapiens
acgggaagagccagaagcaaagaggcacgaaaacacaagcgaaaaccaggacagagagagcgagagaca

SEQ ID NO: 103404 - RNA, 74 nt, Homo sapiens
acccagcagaaaaccacaacagcagccacgcagcgaagccaccagccacgcaacagcccacggcggaaccaaca

SEQ ID NO: 103405 - RNA, 80 nt, Homo sapiens
agaggagcaggacaccaacagagcaacgagaaggacacccaaagagagccagaggagcagccaagaagccccccaggggc

SEQ ID NO: 103406 - RNA, 79 nt, Homo sapiens
gaacgcggaacagaaccaaaggcaggacagccagcagggggacccccaaaagacaagggcaaaacggaccagacacaaa

SEQ ID NO: 103407 - RNA, 38 nt, Homo sapiens
aaaaagccgagccgaaggacaagaaccggcgcaagcag

SEQ ID NO: 103408 - RNA, 82 nt, Homo sapiens
cccagccgccacaccccgccgggcaggggaccgcagagcaggacgcagcccacaggcccgcccacgcacagaggacaccacg

SEQ ID NO: 103409 - RNA, 58 nt, Homo sapiens
caccccgcagcccggacagacccccgccccgaggggaacacaagacagcggcccacaa

SEQ ID NO: 103410 - RNA, 68 nt, Homo sapiens
aaaagcccccccggaacaggacaagaaaacacagcgaaccccaagaacccgggcgcaaaggaaacccg

SEQ ID NO: 103411 - RNA, 79 nt, Homo sapiens
caccacgggggcgcagaccgccaggcccaccagcgagcagcccgcgcacaagcaaccagcgacgggggagaagacgcac

SEQ ID NO: 103412 - RNA, 62 nt, Homo sapiens
cagaaggcgcccagagaaggcagaaccagcgagcaggccagcgggacggcaccgccgagaac

SEQ ID NO: 103413 - RNA, 75 nt, Homo sapiens
agcccgggccacccgcgcgggggcgaggcggagcaggcgcaagcaaacgcgagaggaggcagcacgaaaccagca

SEQ ID NO: 103414 - RNA, 77 nt, Homo sapiens
ggagaaggaccaagaaccaggggcaaaggagcagagaacgacaagccacacgaggacagcccgcaacaccaccgaca

SEQ ID NO: 103415 - RNA, 85 nt, Homo sapiens
cgccgccgccgccaccacccacccggacacaggcacgcacgggaccgaccccgggcggcgacaaagaggaagcagcagcaagcgc

SEQ ID NO: 103416 - RNA, 58 nt, Homo sapiens
caggcacgcgccaccaccccagcgccacgcccacaaagcacaaccgaacagcagggaa

SEQ ID NO: 103417 - RNA, 67 nt, Homo sapiens
aagcaccagagccccaacagccccgcggccacagcgcaaggccgcgccaacccgacgacccgccgag

SEQ ID NO: 103418 - RNA, 83 nt, Homo sapiens
aaggagcgccaagagcagagcagaccagaagagccaccagggagcgaaaccaaagcggacagagagcacaacaaccacaccgg

SEQ ID NO: 103419 - RNA, 80 nt, Homo sapiens
cgcagaccggggagggaaagaaaagaggaaagaggcacagagaaacaacgaaccagaaagccaaagagagaacgcgagca

SEQ ID NO: 103420 - RNA, 79 nt, Homo sapiens
accccgcgcgcgcgcccgcgaagggagccccggggccacacgaccggccgggaccaggacacgagggagccagcgccaa

SEQ ID NO: 103421 - RNA, 112 nt, Homo sapiens
ggacgcgcagcaggcggggaggacgaggggcccgggcccagagcggaagacaagacggcgccgaccccgacagaacgggccccgcacccgcggccccggggcagcggaggcc

SEQ ID NO: 103422 - RNA, 67 nt, Homo sapiens
gcaccagaagaaagaagagaccaagcgcacaggagagaaaaccggaagagaaaggccgggaagcagg

SEQ ID NO: 103423 - RNA, 78 nt, Homo sapiens
gagcggcgggaggccaccgccagaaagggcaagcagaaaccgggaagggggcgccggcggacgcacccggacgcaaag

SEQ ID NO: 103424 - RNA, 52 nt, Homo sapiens
cccccgagggccgcgcgcacacgacccaaagagacaaaggacaggcagaaac

SEQ ID NO: 103425 - RNA, 63 nt, Homo sapiens
gcaggcggcggcggcggaacgccaggcagcccgggcccgggaacgccccacagcaccgaccgc

SEQ ID NO: 103426 - RNA, 80 nt, Homo sapiens
ggacaccaagaaagaacgcgggagcagcggaagacaccaaggccagggagggccaccgcacggaagagaccggaccgggg

SEQ ID NO: 103427 - RNA, 75 nt, Homo sapiens
caagcggacaccaacagcgaagaccaggcgggaaaaagaaagcaccgggaggaaagagagccacacgaagaacac

SEQ ID NO: 103428 - RNA, 74 nt, Homo sapiens
gccgggagccgccccgcgccgccgcagagccgcccacagacacaagcgggacggaagaggcccggcgaccggac

SEQ ID NO: 103429 - RNA, 55 nt, Homo sapiens
agcccaaccgcgcaaacaagcagaagggggagaaagcgaagaggaccggaaaaac

SEQ ID NO: 103430 - RNA, 91 nt, Homo sapiens
ccccggccccgggagcccgcgccacgcccgcgccgcgcgccagccaggcacagcaggggacggcaaaacagaacagaaaggcggagaaaaa

SEQ ID NO: 103431 - RNA, 77 nt, Homo sapiens
ggccggcccaggggcagcaggagcccgacgggaccagggaccagcagaaagaagcccggcgaggccggagggccacc

SEQ ID NO: 103432 - RNA, 84 nt, Homo sapiens
gcaggcgaggagcggccggggcgggaggcccgcggagccgaggcgggaggaaaacggacgagaacaagcggaaaacaggggcga

SEQ ID NO: 103433 - RNA, 66 nt, Homo sapiens
gcagccagggcaggggaggacccaacaaaccacacaaggcccgacaccgaaaagggagaagaagaa

SEQ ID NO: 103434 - RNA, 79 nt, Homo sapiens
cggaccagcaacgccagcccacagcaaggggaaggagcgcagaaaagcagagaggcggaaggcggaggcaagggcgacc

SEQ ID NO: 103435 - RNA, 36 nt, Homo sapiens
ggagcgcgggcccacggacaggaaacaggaacacga

SEQ ID NO: 103436 - RNA, 76 nt, Homo sapiens
aggaaacagcagaaaccggaaccacacacaccacaggaagccaggagaagagccaaggagaccaaacccagcagca

SEQ ID NO: 103437 - RNA, 83 nt, Homo sapiens
cgacggcacaggggggggcccaacgaaccgaagagaaaaggccaccaggaaacccaaaagccagaacggccagaagaaccaac

SEQ ID NO: 103438 - RNA, 79 nt, Homo sapiens
acaggccgcggaggaggaggaggggaggcgcccccggagccgccccggaggagaagaacgaaaacaaacggaagagagg

SEQ ID NO: 103439 - RNA, 68 nt, Homo sapiens
acacacagcggaaagacgaggagaaaccagagcgccagcaaggaagcaaggaagaggaaccccccaag

SEQ ID NO: 103440 - RNA, 78 nt, Homo sapiens
ggaaacgcgaaaacagcccaagaaaccagaacagaggacagaagcgcaacgagcaaaggaaagccgagcagcaaaaaa

SEQ ID NO: 103441 - RNA, 80 nt, Homo sapiens
gggacggacacgcccagccccgggcacggaaagaaaggggagcaagaagaaagagcagggaggagggagcgacaggaaga

SEQ ID NO: 103442 - RNA, 86 nt, Homo sapiens
gaaccggggagcgacagaagacaaacagcaaggggcaaagccaagaaaaccaggggaaaggcgacagccccgaagagaagcaaaac

SEQ ID NO: 103443 - RNA, 89 nt, Homo sapiens
ggacacaccggaacaaagaaaaccaaaacgcaacagaaacaacagggacaaagaggaggacaagaacccacccgcgcccaaccggccag

SEQ ID NO: 103444 - RNA, 54 nt, Homo sapiens
cagcaagaggcgcgcagagggcgcagaggagccgccgcacccaggcggaggcag

SEQ ID NO: 103445 - RNA, 75 nt, Homo sapiens
gcaggacggaacgaaggccaggcaccccaaggaaggcagcaacaaccacccagggagaaaaacaagaggacagac

SEQ ID NO: 103446 - RNA, 83 nt, Homo sapiens
gagaacgggacgcggaacgggacccggggacggcacccagaggaccaggcggcgggcggaaaacaccccaaaagccaaaaggg

SEQ ID NO: 103447 - RNA, 69 nt, Homo sapiens
accaacaagacgagggcgcagcacaggacgaagaaaccgaacaagaacgaaccacaccaggcgcaacca

SEQ ID NO: 103448 - RNA, 82 nt, Homo sapiens
aaagcgccgcgaagcgccgccggccccgccgccaagaggagcgagcggacccgcgaggcagaaagagaaggcagaacagagg

SEQ ID NO: 103449 - RNA, 69 nt, Homo sapiens
caaagcagcggcgcagcccgggcgcggggaccacgagccaggacccagcgcccccccggggaagacaga

SEQ ID NO: 103450 - RNA, 71 nt, Homo sapiens
gccgggcaccccgcagaagagaaccacagaaagggcagagaacacacagaagagaaaaaccgaacacagga

SEQ ID NO: 103451 - RNA, 77 nt, Homo sapiens
gccgccacagagggaaacggcacgcaggccgggcaggcggcaaccaaacggcgccaaggcggacagagaagagaagc

SEQ ID NO: 103452 - RNA, 82 nt, Homo sapiens
cgcggaccagaccaggccgcggcccgaaaaggagaacaaccccgccacgcccaagcacccggaagcccgccaccagaacccc

SEQ ID NO: 103453 - RNA, 77 nt, Homo sapiens
ccgggccggaagacgcgccacgacggggacgcccgggggccgcgcacgggccccaggaagaaccccagcaaaggaag

SEQ ID NO: 103454 - RNA, 80 nt, Homo sapiens
cgacgcggcggggacgcaggcagcaggaccacgggcgggcggaggggagcgcaggcaggaaaagcccggaaaagcagcca

SEQ ID NO: 103455 - RNA, 75 nt, Homo sapiens
agaacagacccccgcaaggagccggaagcagccaccagaagcagcccacgaggaacagacaaggggagagaagac

SEQ ID NO: 103456 - RNA, 69 nt, Homo sapiens
caacgcgggcgaaaaaggaaccgaacaagacagaaagcgggacgcgcaaccccaggccagaccccaccc

SEQ ID NO: 103457 - RNA, 78 nt, Homo sapiens
cccagaaagaaccgcccacgggccgcgccagggacccgagccccaaagacagaaaagccccgagacggaagagaagag

SEQ ID NO: 103458 - RNA, 78 nt, Homo sapiens
ccccaccacacaccgcccaaggcaagcggccagggacccaaggaagcagacaggccggggcagcagaagaggacaagc

SEQ ID NO: 103459 - RNA, 72 nt, Homo sapiens
ccgcgccggccgcccgggaggcagcacggcaggagacgaggagaggacagcaggacacccggaccccaccgc

SEQ ID NO: 103460 - RNA, 88 nt, Homo sapiens
cagaggaaagacaccaccacccacacccaagggaaaaagcccgaaaaagcccaagacagcagaagcagacaccccaggaacagcaaag

SEQ ID NO: 103461 - RNA, 120 nt, Homo sapiens
ggcaaggaggggaaggacaacccccgcaggcggcggggcagggcagacaacaccgacgagaaggccggcccacagcccaaaaagaaacaggaccgaaagccagagcgaagccaaagccgg

SEQ ID NO: 103462 - RNA, 82 nt, Homo sapiens
ccgccccgccgcgcccaggagcggaacaacgcggcgagcgggacggagcggaaccgccagaccacaagaaaagcagaagagc

SEQ ID NO: 103463 - RNA, 75 nt, Homo sapiens
ccccccaagcccgaagaggaaggagcgggcccaagaaaaggaacaagcagaaagcacgaacaacgagaacaagac

SEQ ID NO: 103464 - RNA, 71 nt, Homo sapiens
cggcacagacccaggccagccaacagcacacacccaggggcaaaggaacacggacgggcggcccaggagag

SEQ ID NO: 103465 - RNA, 75 nt, Homo sapiens
gcagaaggcagaggcaacagacaggccagaagccgcagagcagcagaacagacagaaacacgaaaaccagacagc

SEQ ID NO: 103466 - RNA, 67 nt, Homo sapiens
gagaaagcaacggaaacgaagaaggcccagcccaccagacgacgaaagaggaacgggacgggcagga

SEQ ID NO: 103467 - RNA, 80 nt, Homo sapiens
agagccagccacaacgaggccagcccaccagcggcccaggaggggcaggccgcagaggagcgccaggacacgcgccgacc

SEQ ID NO: 103468 - RNA, 76 nt, Homo sapiens
caagaacggcccgccaccggagacaacgagaggagagaagacggaacaagaaaggaccaggagccccgggcaacag

SEQ ID NO: 103469 - RNA, 80 nt, Homo sapiens
ccgcagcccaccacagcccccagggacgaacagcggggacgccccagcagaccgcccaggagaggaaagcaggaggaaag

SEQ ID NO: 103470 - RNA, 79 nt, Homo sapiens
cacccggggcaggggccagggccaggacccaaggccagccagccccaggcaccagcggacaggacagggaggacgaagg

SEQ ID NO: 103471 - RNA, 77 nt, Homo sapiens
gagacccacaggcacacggggccgcccccgcacggcacggcagacacaccgaccagaggaaggcgaacccgccacgc

SEQ ID NO: 103472 - RNA, 65 nt, Homo sapiens
ggaacacgcaaacacacaagaggggacaagaccagaaccaggacccaaacaacggcaagcggaga

SEQ ID NO: 103473 - RNA, 72 nt, Homo sapiens
aaccagacagcaaccagggaaaaagagaagaaaccaccccaaaggggggagccgcacgacccgaacgccaga

SEQ ID NO: 103474 - RNA, 76 nt, Homo sapiens
gcgcggggggacccagaacaaagcagccagaaaacgaagcgacgccgcaccacgggcgcggcgagccaccccagac

SEQ ID NO: 103475 - RNA, 80 nt, Homo sapiens
ccggggcgaggacccccgagccagagcacaacagggagaagacagcaagaccccgaaccgagcagacgaggcaacagaca

SEQ ID NO: 103476 - RNA, 81 nt, Homo sapiens
agaggccgcgcgcgcgaagcccacgccgagccgagaggggacggccgccccgcggacaggacgacacaaacacagcgaagc

SEQ ID NO: 103477 - RNA, 49 nt, Homo sapiens
ccaacgcccggccgcggcccaggcggaggcgaccgggaaggagagcccg

SEQ ID NO: 103478 - RNA, 78 nt, Homo sapiens
ccggagcgacccggacaccgacgcgccacgcggagcccggaccaagaacgcccagcccgcgggcaccggcagaaagga

SEQ ID NO: 103479 - RNA, 89 nt, Homo sapiens
ggcccgcgggcgaagcggacgcagccgcgagcccggaggcggcgggaggaggcggcggccgagagcgccgccgcggcccccgggagacg

SEQ ID NO: 103480 - RNA, 83 nt, Homo sapiens
gccgccccccaccgcccgggcccgaggaggcagccaagccgagccgccacccaccaggaggcgcaagccagggccgaaacggg

SEQ ID NO: 103481 - RNA, 80 nt, Homo sapiens
gcgggcggagacgccgggcagccgaacggagggcgacggagggagggaagcggacagcaagacaggccccggaacagcag

SEQ ID NO: 103482 - RNA, 80 nt, Homo sapiens
ccaaccggagcgcaaggcgccaaccccgaacggggggagacgccacggaacgcaggcggcacagcaaacacacaagagcc

SEQ ID NO: 103483 - RNA, 81 nt, Homo sapiens
aagacacgcgacccggagacagcccaaaacccggaagagcgccccaggagaaacaagacggagaggccgcccacggagcgc

SEQ ID NO: 103484 - RNA, 76 nt, Homo sapiens
ccggcggcaaagaggccagcaccgggcgcaacaggagaccagcaagaagaccccccccccaaaggagccaccgcac

SEQ ID NO: 103485 - RNA, 82 nt, Homo sapiens
cggggaagcgcaaaaacaagacggggcgccccacagaggggcgacggagacggggccagggagaaaggaaggccaggagcaa

SEQ ID NO: 103486 - RNA, 39 nt, Homo sapiens
gccaacgcaggagcacccaggcgaccaacgacgaagagc

SEQ ID NO: 103487 - RNA, 73 nt, Homo sapiens
caaaaggagccacagcaaaaagccacgccacaaacagccgccaggaagcaacgcagcgcggaaaggcacaacc

SEQ ID NO: 103488 - RNA, 88 nt, Homo sapiens
aggaaaggcaggagcaagggaaaaccgagcgaaccgaggaccaaaagcggaggcgaggccagaagggaaaaaccaggaacggcccccc

SEQ ID NO: 103489 - RNA, 79 nt, Homo sapiens
cggacccggaggcccccagcccagagcccggaaccgaacaagacagaaagcgggacgcgcaaccccaggccagacccca

SEQ ID NO: 103490 - RNA, 80 nt, Homo sapiens
acccgcagggcgggcgaccgccaccgcggcgcaggcccagacggcagagagcggcgaccaaggagcaaccaaaacaggac

SEQ ID NO: 103491 - RNA, 71 nt, Homo sapiens
ggggcgcccggcgccggccgagaaggcagaggcggagaaaccagcggcgcaccgcccaacaaggaccccac

SEQ ID NO: 103492 - RNA, 87 nt, Homo sapiens
cagacacacacacccaacccaaaccaaggacaccaggggggaaaaaccacacaggcaaagaacgcgcaaaacaggacgaaaacaaag

SEQ ID NO: 103493 - RNA, 77 nt, Homo sapiens
ggaaaaaaccaccaagaccaaaaaaccccaacaacagccccagcaaggccggccgacaacaccgagcaaagaaaaag

SEQ ID NO: 103494 - RNA, 68 nt, Homo sapiens
caccaggcgggcagcaaccggaccaacgggacaaaagggccacccaaaggaaggacaagcaggagacg

SEQ ID NO: 103495 - RNA, 66 nt, Homo sapiens
caccgcgcgccggcgcgagaagagcagcgagaaggcgcgaaaccccaccacgcggcaggggccgcc

SEQ ID NO: 103496 - RNA, 67 nt, Homo sapiens
ccaagccgacccagagcgaaaaccagaaggcgagacagcacaacaacgcacacagggagaggaacaa

SEQ ID NO: 103497 - RNA, 79 nt, Homo sapiens
gaggacaggcggaggccccagggaagcgcagaaagcaggcgaacccgcggcgcaaaacggaacacgagacccgccgcgc

SEQ ID NO: 103498 - RNA, 79 nt, Homo sapiens
gggagagggccaccgcccgccacccgcgcgccgccgccgaggagaaagagccggggccggacgagaaagccgaaggaga

SEQ ID NO: 103499 - RNA, 80 nt, Homo sapiens
gccaggcagaaggccccccgaacagcaggcgccaccagcccggagagcggccaggaagagcgagcccgggcacgacggcg

SEQ ID NO: 103500 - RNA, 86 nt, Homo sapiens
cccacggagaaagcagcgagggagacagccaccacggcaggggaaaggaagggagcagcgaagccagggaggagccgaaacaaaag

SEQ ID NO: 103501 - RNA, 91 nt, Homo sapiens
gagggagaaaagacgcagcaagcacgacgaacaagcgcagacccccgccccaacaagaggccaacggccaagaccgcccggcagcggggga

SEQ ID NO: 103502 - RNA, 75 nt, Homo sapiens
aaaaacagccgcgcgccaaaggagcacgaaaacaaacaggagcaagaaacgagagcacaggcagcggaagacggg

SEQ ID NO: 103503 - RNA, 83 nt, Homo sapiens
agccccaagagcgggaacagaggagaggagacgccggagcgggacgaccagagaccgagagcggcgcgcaccgcggcacgcgg

SEQ ID NO: 103504 - RNA, 75 nt, Homo sapiens
gggaagaaaagagaaaccacccacgggaaggacacaagacacaagagaccccggagagggaagccccagcaccac

SEQ ID NO: 103505 - RNA, 59 nt, Homo sapiens
gcccgcgcggcgcggggaccgcggcccggcgcgagagcgcggagagccagagggccgcc

SEQ ID NO: 103506 - RNA, 72 nt, Homo sapiens
acacgcaaagaacaaaccaaaccacgaaggccaagagagaccgaaacaaggaccccccgggagaagaaaagc

SEQ ID NO: 103507 - RNA, 85 nt, Homo sapiens
gccccgcgggggggggcgcagccgcgcgcccgcacaaagcgacgccggaccgcgaagagacgagaggggcacggaaggggagagg

SEQ ID NO: 103508 - RNA, 82 nt, Homo sapiens
gccaggcggcgcgaagggggagagcccgcgcccgcccgcccggaccagccgccccggcgccgaggcggaggcaaggcgggac

SEQ ID NO: 103509 - RNA, 72 nt, Homo sapiens
agcaaggcaaccgcaaacgaaaaggacaaccagcccaaggaccccccaaagaagaaagaggagaagagaaag

SEQ ID NO: 103510 - RNA, 89 nt, Homo sapiens
gagagcaagccggagagaagagagagcccggccagacccacgcgagagacagaaacgaaggaggcccaaccacaaaaggagccgacgga

SEQ ID NO: 103511 - RNA, 78 nt, Homo sapiens
ggaacggccaaacacgaagcaagagcaagaagagcccagccagaagaaaacgaaacggaggaggggaaaagacaggca

SEQ ID NO: 103512 - RNA, 67 nt, Homo sapiens
agacccggggacccccgacgccaggcagcgcccccaaacggaagaagagcaacgggagcagaaggac

SEQ ID NO: 103513 - RNA, 84 nt, Homo sapiens
aaaccaacacacacagccggaggcaacgcacagaaccagaagaagagcaaaaggagaagccaaaccaagaggagagcgcgacgc

SEQ ID NO: 103514 - RNA, 75 nt, Homo sapiens
agccagggccaaagggcggagcacgaaaggaggaacccggaagaaaaaaaaaacaagagggcgaaaacgaagggc

SEQ ID NO: 103515 - RNA, 62 nt, Homo sapiens
ccccccccgaagcagagagccacgcaaaccgcgaagaaagagaccaacaagcgagcacgaag

SEQ ID NO: 103516 - RNA, 86 nt, Homo sapiens
cgcgcggcagacgggccccccgggagacacagcccgagaccgaggacgagaagaagcgcgaggaaggcaaagggcggaccgcagag

SEQ ID NO: 103517 - RNA, 34 nt, Homo sapiens
agaaagggcgaagagccgcaggacacagaaaaag

SEQ ID NO: 103518 - RNA, 71 nt, Homo sapiens
gaccgggcgcgcggggcaccagaaggggcgagggccaagggaacggggggaagagggggcggcgagcgagc

SEQ ID NO: 103519 - RNA, 79 nt, Homo sapiens
cgcagccgccaccgagacgaggacccaaggaggggcccggagggcgagcgagccgcgcgacggagcacggggagcggag

SEQ ID NO: 103520 - RNA, 86 nt, Homo sapiens
cgacagggacccacagccgcccccacccaacccgcgcaccaaagagggacccagagcccacaggcggggagcgcccccaggagcag

SEQ ID NO: 103521 - RNA, 117 nt, Homo sapiens
agagaaagccgaggagcaggaaagaggagaggccaaagcagaggagccaccagcaggagcgccaggagcaagcgggcaagcggagggagggacacacccggccaccaccccccccca

SEQ ID NO: 103522 - RNA, 72 nt, Homo sapiens
gcacaaaaaacgaacacagagaaggggccggcagggcaaggacagccaggcagaggagggaggcacaacaac

SEQ ID NO: 103523 - RNA, 73 nt, Homo sapiens
gccggcagaacaagggaacaggagaccggacgcgggacacaagaaaaaacccggaacaaggaaccggaaggga

SEQ ID NO: 103524 - RNA, 79 nt, Homo sapiens
agcaagaccccgaaaccagaagggggaaagaagacgaccccgacgcaggccaggagccgcggacagaagccgagcacgg

SEQ ID NO: 103525 - RNA, 74 nt, Homo sapiens
agcggcaaaccaaaagagcaacgaccccggaagggcccagcaggcgggagcggaggcagcggggcaaagcaccc

SEQ ID NO: 103526 - RNA, 64 nt, Homo sapiens
agccagcccccacaacagcggaggcaaagcggaaaggacaggggaaggccaaggcaaggcagac

SEQ ID NO: 103527 - RNA, 70 nt, Homo sapiens
gagggcaaggggagcgaggagcaggacacgagcacgggaaggagcccgggaaagagagggcgcaagaagg

SEQ ID NO: 103528 - RNA, 76 nt, Homo sapiens
cagggcgaacaggagcagggcagagccaaggccagagacggcagaggcaaggcagcagaaaaaggacgaggggcca

SEQ ID NO: 103529 - RNA, 79 nt, Homo sapiens
gcaacgcaacaacaacgcgacaaaggagagaaacagccaaaacagcacaacagcgacagggaacaaaggcagagaaacg

SEQ ID NO: 103530 - RNA, 75 nt, Homo sapiens
cacccaggggaccagaggcgaagcccaagcacacacagaacagaaacccaggggaaagaccacaacccaggccca

SEQ ID NO: 103531 - RNA, 52 nt, Homo sapiens
agagacggcccgcggccggcgcgcaggcccccaaaccggcacgggcgaaggc

SEQ ID NO: 103532 - RNA, 90 nt, Homo sapiens
acacgccacaacaacacaccacccccaccacccgccaccagggaccaccaaaccgacgacaccccaaggaaagggagaaggagcccccga

SEQ ID NO: 103533 - RNA, 70 nt, Homo sapiens
gcccacaacacgcaccgggcagaaagagcggcgccaccccgggagaaggcgaccgagacgcaagcaacgg

SEQ ID NO: 103534 - RNA, 83 nt, Homo sapiens
gaggagcaaggaagaccaaacaacaggcacagcagcagaggaaaaaagagaccgagagaaagcagcagaaaggggggagagaa

SEQ ID NO: 103535 - RNA, 75 nt, Homo sapiens
ggagagcaccgggaaccggggacaaaaggaaaacaaaaggcccaaagagacagccacgagccgccgcacccaggc

SEQ ID NO: 103536 - RNA, 64 nt, Homo sapiens
ccacccgcggcagcgccccagcaggaggagaagaggcagaagcggagcggcgcagcaacagcag

SEQ ID NO: 103537 - RNA, 79 nt, Homo sapiens
caagaaggcagcgccgcccgccagcacggggacagccgcgccgaggaggccggaaagaggccgaaaacagaacagacga

SEQ ID NO: 103538 - RNA, 79 nt, Homo sapiens
ccgcaccaaggagacaggacgaagcccaaaccacaagccacaaaagggacgaacagcggggacgccccagcagaccgcc

SEQ ID NO: 103539 - RNA, 78 nt, Homo sapiens
gagaggacacccagccaccggggcaacggaacacgggaggggagcaggaccaggcagggaagaccacgcccaggcgac

SEQ ID NO: 103540 - RNA, 95 nt, Homo sapiens
ggagaaccgcggggacagcagccggccagccggggggcacgcccgcccgggccgaaagccacacgcccaggagaagagaagcgcaggaagaaaca

SEQ ID NO: 103541 - RNA, 58 nt, Homo sapiens
acgggccgagccccaggccacccggagaaaggccacggccccagcccaccggaccgga

SEQ ID NO: 103542 - RNA, 55 nt, Homo sapiens
ggccagagaaggggaaggaggggcagcgcccgggcaccgaccaagacgacgccca

SEQ ID NO: 103543 - RNA, 82 nt, Homo sapiens
gaagaaggaaggaaggcaaaggaggacagggcaacaaacccagcaaagaggccagagcacccccaccaagccgaggaagccc

SEQ ID NO: 103544 - RNA, 81 nt, Homo sapiens
ccagaagcagcagagaagaaaaacagaaccacacaaacgcagccacagaagaccgggcccagacacggacaaccaacgcca

SEQ ID NO: 103545 - RNA, 79 nt, Homo sapiens
gaagaagccgcggaccccacggcggccaaggaacaagacacagaaggaagaaggagcccaggcggggaagacacaccag

SEQ ID NO: 103546 - RNA, 75 nt, Homo sapiens
gcagggcagaagaaaagggcaaagcagagcagaaaagaagcagaaaacacacccacaaagggacaggaagacgac

SEQ ID NO: 103547 - RNA, 83 nt, Homo sapiens
gccgcggagccggacgcggggggcgggaagagccggggccgggcgacaggagcagacacagcccgacgagcagaaaaaccccc

SEQ ID NO: 103548 - RNA, 58 nt, Homo sapiens
ggcccgacccgcgagaggagcacagcaagcgggagcaggcagaccaaaggaacagaag

SEQ ID NO: 103549 - RNA, 77 nt, Homo sapiens
agaaacagaaacagggacaggaaggagggccccggagcagccacaccaccgaggccccacccagcacgagcacagcc

SEQ ID NO: 103550 - RNA, 82 nt, Homo sapiens
ggggagaacaaagcgaggccagagaaagagaagcggcacccccaggaagcgcgacaccacgacagcgaggcagccagcagca

SEQ ID NO: 103551 - RNA, 86 nt, Homo sapiens
gcagacacaggacgagagggagagcaagaccacagcgcgcggcccccacaccacacagagagcgagaagagaagaccgccaaaggg

SEQ ID NO: 103552 - RNA, 53 nt, Homo sapiens
agaaggacgccagcggagaacgcggcaaagcgaggagaccggaaacgagagaa

SEQ ID NO: 103553 - RNA, 68 nt, Homo sapiens
aagaagaagcacagaaaaccgcagaacggaacaagccgcaagaccgaaaacccggcaccaaggaccag

SEQ ID NO: 103554 - RNA, 83 nt, Homo sapiens
ggaagagcagcagagcaaccagagcacacgagagggccgggacaaggaagggccccagccccaccccagccccaaaggaggcg

SEQ ID NO: 103555 - RNA, 107 nt, Homo sapiens
ccaaaggcacgacgcccgggaagagggggagcggccagcgagagccagggcccaaagaaccgggcggagaacggaaaagcaccaggaagcagagaggaccgcagaag

SEQ ID NO: 103556 - RNA, 85 nt, Homo sapiens
cgccgagcggcggccgaggcggcggggggcgcgcaggccgcgacgagggcgcgaggccggggggggcacagagccccggaagaca

SEQ ID NO: 103557 - RNA, 76 nt, Homo sapiens
gaacgacaaacaggaccgccaaacccaaaccgaaaggaaggaagaaccagcaacgcagagcgaaagcgacagaccg

SEQ ID NO: 103558 - RNA, 75 nt, Homo sapiens
gagagggccagcagcagccaaaggacagaccaggaagagcagaagggacgagcgcggacaagcccccacgaggaa

SEQ ID NO: 103559 - RNA, 56 nt, Homo sapiens
cgggcggggcagagcagcccccagccagccgcgagggacgaaacgcccaccccggg

SEQ ID NO: 103560 - RNA, 74 nt, Homo sapiens
cgcgcgcgccccaccccccgcacggagcgagaccagaggcgcgacacgaaaaggacccagaaaaagacagacca

SEQ ID NO: 103561 - RNA, 82 nt, Homo sapiens
gcggaccggcgccccggcgcgaagaggcggaccggacggccgagagccaaaccccagccaccggaagaagaagagaacaccg

SEQ ID NO: 103562 - RNA, 58 nt, Homo sapiens
ggcggcgcggccgcgccagacagacaggccagcggggaacgcgggcaggaacgccgag

SEQ ID NO: 103563 - RNA, 59 nt, Homo sapiens
caaagaacagcggcagacggaggagaggggccagagagcagacgagaaggggcacaggg

SEQ ID NO: 103564 - RNA, 81 nt, Homo sapiens
cagaccgggaccagaggaacccacccccccaaggagaaggacccaaggagggcggaagccaccaaaaccagggaaacagga

SEQ ID NO: 103565 - RNA, 83 nt, Homo sapiens
cgcgagcgaggcggagaagggacacggcaggcgccagggggcaggcccaaaggaaagccacaaagaacacgagagacaggaag

SEQ ID NO: 103566 - RNA, 79 nt, Homo sapiens
ccgccgggagcagaaccaagggccccggggccggcgaagggcagagacaggcaacagacggcaacgaaaggcacaaaaa

SEQ ID NO: 103567 - RNA, 74 nt, Homo sapiens
ggagaccgaaggaccagggccaaggggcgcaggggccaccgccgccaagaagacgagagaggcagagcaagcgc

SEQ ID NO: 103568 - RNA, 81 nt, Homo sapiens
cgggcgaccggcaagagagaacgaagagaaagggccagaaggaagacccagaaagagagcgaaaccccaggagcgaaaaga

SEQ ID NO: 103569 - RNA, 71 nt, Homo sapiens
caagggggagagcaaaccaccaaaggggcaacgcgacgcaaaacaaaaggggccaaggacgcacacaccag

SEQ ID NO: 103570 - RNA, 76 nt, Homo sapiens
ggaacggaaacaaaccacagagagagacacagccgaaagcggacgcaagagcaagaccagccgcggagacgacgac

SEQ ID NO: 103571 - RNA, 82 nt, Homo sapiens
gggggaggcagccgccgcccggcgccccgccgccggcgcgcgcccgcgccgccgcacgagacccggggaaggaggcgaaaca

SEQ ID NO: 103572 - RNA, 63 nt, Homo sapiens
cgagacgggcggagaggagaagagccccggccaccagccacagcgggagcggcagcaagcgcc

SEQ ID NO: 103573 - RNA, 75 nt, Homo sapiens
cgaccacggggcgcggcgcaaaggccgcaggcgcgccccaccccagagggagaaaccaaccccgggaccaccaga

SEQ ID NO: 103574 - RNA, 54 nt, Homo sapiens
ggagccggacacgaaacggaaggaagggaacacggacgacgagacacgaccaac

SEQ ID NO: 103575 - RNA, 70 nt, Homo sapiens
gccaaaccccaaaacccgcagccggccggcggccgacaagggaggcgaggacggacaaaaggaaacggac

SEQ ID NO: 103576 - RNA, 77 nt, Homo sapiens
ggcgagcgcgacccgggccgcccggaggaggagggggaggaagcacaaaggggcaccaagagagcggaacccaacag

SEQ ID NO: 103577 - RNA, 73 nt, Homo sapiens
ccaccgaagcaaaccaccccgccccgcgcagagcagacagaacagccgcgcggccgcggaagcagggcgcgac

SEQ ID NO: 103578 - RNA, 80 nt, Homo sapiens
ggagaacacaggaaaacaacaccagggcaagaaggcccacagaaaggggcggaaaggaggaaagaccacagaagaaaaga

SEQ ID NO: 103579 - RNA, 74 nt, Homo sapiens
caacagccccaacccagaaagcagaggccagagcggagacagacgggcggagaacggaaaagcaccaggaagca

SEQ ID NO: 103580 - RNA, 74 nt, Homo sapiens
ccacaaaaacagcggaggagaccgggaaaccgccgaagacgaaggccaaacccagacgcaaccacccccagagg

SEQ ID NO: 103581 - RNA, 70 nt, Homo sapiens
ggaccaccaaacggagcgaaacgcgccgcgggaccgggagggccccaaggcggcagccccgaccgacggg

SEQ ID NO: 103582 - RNA, 58 nt, Homo sapiens
cgggagcgcgcagccaggaggagagcaaaagacaacacccagaaacagaaagggaccc

SEQ ID NO: 103583 - RNA, 56 nt, Homo sapiens
gggccaggcgcgggggcagcgcgcggcggcggggcccagagacaggggccaggccc

SEQ ID NO: 103584 - RNA, 75 nt, Homo sapiens
ggaaggagaacaaagggagaagaggaagcccgacaacgaagggggaaagagcccgggagaggcccgcgccacccc

SEQ ID NO: 103585 - RNA, 53 nt, Homo sapiens
cccccccggaacccacaccgccacccgagagacggggcaccgcgagccaggag

SEQ ID NO: 103586 - RNA, 72 nt, Homo sapiens
gagacaggacacagaacagaagcgaagaagggacgaaaggcaggggacgaccaccagccaggccggggacaa

SEQ ID NO: 103587 - RNA, 52 nt, Homo sapiens
ccggggaaagacagcccacagccagacaacggcaagcggagaagagcaaggc

SEQ ID NO: 103588 - RNA, 87 nt, Homo sapiens
cagccgccgaccggacccaagacgagaggaagggagacggcagagacacccggcccgggaggcgccggcgggaccgcgggaaggcgg

SEQ ID NO: 103589 - RNA, 77 nt, Homo sapiens
gaaagccaaagagcgaagagagaaacaggcaaaagcggaacaagaaagcagcaagaacaacaggacagggacccaga

SEQ ID NO: 103590 - RNA, 78 nt, Homo sapiens
ccaaggaaaacacaaaggcacgacggcgaaggggcgccgaaccgagcccgaagggaagggccggcgggccaacacaag

SEQ ID NO: 103591 - RNA, 68 nt, Homo sapiens
cgcagggcgcccccggcgccggggaaggaaccagaacggcaccccccccccggcccggacgcgcccca

SEQ ID NO: 103592 - RNA, 73 nt, Homo sapiens
gagaaacgaaaaaccgaggaaggacagacggccagccagcacaaacgcgccaagcccacgggcgcaccaacgg

SEQ ID NO: 103593 - RNA, 76 nt, Homo sapiens
ccagcaaagccaggacccaccacgccggcagggccaggacccaaagacaggaccacgcaccagcagagaaggaaag

SEQ ID NO: 103594 - RNA, 83 nt, Homo sapiens
gcgcagcccacgccagacgaccccacccgcgccgcgacccggcacccgggaacagaaaggagagggagcacagccaccgccag

SEQ ID NO: 103595 - RNA, 79 nt, Homo sapiens
aaaccggaaaaaaacgggacaaggcaaggcgcaggcgggaggcggaaagccccccaagaggagaagaggggcaccccca

SEQ ID NO: 103596 - RNA, 64 nt, Homo sapiens
cacgcggcgcacaacgcaggaacaccgcacgcgcggaggaggcgccggaggaagcaccaacccc

SEQ ID NO: 103597 - RNA, 68 nt, Homo sapiens
ccacaacggcgcggcaggaaagccacagccccagaaacccgaagagagcccacgggacaaaaaaacca

SEQ ID NO: 103598 - RNA, 79 nt, Homo sapiens
aagaggaggacagcgcacacagcaagcacgagagccggggccaccagcggcagcagccagccgccaggagacgccggga

SEQ ID NO: 103599 - RNA, 73 nt, Homo sapiens
caggggagcacgacacccgccacgagcagaagacagagggaggagggccacggacaaacacgggcccggccca

SEQ ID NO: 103600 - RNA, 76 nt, Homo sapiens
agcggggagcggggacgcacggagagggcagcggccccgccccgccgagcgcagggcggcccgacgccagcgccag

SEQ ID NO: 103601 - RNA, 74 nt, Homo sapiens
aggcacagaccccagcgagcccacagcgcggcaccgaccccggggggcgcggggggcccagaccaagacagggg

SEQ ID NO: 103602 - RNA, 55 nt, Homo sapiens
ggagccagcgcgggacagggagggaagcagagccccgggccgggaaggggaaacg

SEQ ID NO: 103603 - RNA, 109 nt, Homo sapiens
acccccccccggcagggacggcgggcgacgcgaggagagagcgacgaagccaacgccagacagacagaaccacagcacccaagaaaacccacccaaaggaggacacggc

SEQ ID NO: 103604 - RNA, 79 nt, Homo sapiens
cccaggccaagcagccaccagcagcccccagagcgggaccacagggcacccacagaaggagaacaagcagagcaccgga

SEQ ID NO: 103605 - RNA, 75 nt, Homo sapiens
gcgacacaagcggacagaacagacgggacccccagccaaaggcaaagggagagaaccaagacggaaaaaaagaag

SEQ ID NO: 103606 - RNA, 75 nt, Homo sapiens
agccaaacccgcacagagggaaaggagcgcgaagccacccaacagaccagaggacaacacaaggaccgaggccca

SEQ ID NO: 103607 - RNA, 77 nt, Homo sapiens
agcccagagaaaagaaacccgacaccaaccaggaggccgagacaacaacggcaccgcggccgcgaagaggaaacaaa

SEQ ID NO: 103608 - RNA, 76 nt, Homo sapiens
agaaaggaagcccccagcgaacgggacgcaaaaaaacaagaagggaggagaagggaggaaacacaaaacagaaaac

SEQ ID NO: 103609 - RNA, 58 nt, Homo sapiens
cccccaagggcgggaacagaacacgcgagcacgcccccacagagggacccggaaggcg

SEQ ID NO: 103610 - RNA, 72 nt, Homo sapiens
ggaccccgaaaggaagagacaagagcgggaagcagcggaaagagggagaacgcgcgacaaagaagaaagaaa

SEQ ID NO: 103611 - RNA, 72 nt, Homo sapiens
caggacgcgccgagagcaaaaccgccggccggaccagaccggggggaaaggcggaagcagggaagacaccga

SEQ ID NO: 103612 - RNA, 76 nt, Homo sapiens
cccccaagggcgggaacaggcacgagggaagaccggaaggacccccaagagacggccaagcccaggccagacgagg

SEQ ID NO: 103613 - RNA, 80 nt, Homo sapiens
ccacggaaaggcagcaggcggaggccacagaggagccaacaaaagacaagcccccgaaaccaaggagcgcaagaaaagcg

SEQ ID NO: 103614 - RNA, 80 nt, Homo sapiens
agaagccaagaagcaaaaaagggacgcaagaagaaccaccaggagccaagaaggcgggggggggcggaagccagcagccc

SEQ ID NO: 103615 - RNA, 108 nt, Homo sapiens
ccgcgggcaacccggagcaaccccccaggacgggcggaggcggggggaccggcgggcggaagagcagagccccagcaacgagcccaggcaacaaggacagaggcagag

SEQ ID NO: 103616 - RNA, 76 nt, Homo sapiens
agaacagaaacggcaaagggccggggacaccaggcccccagccccgccaccacacagcagcccccagcagccacca

SEQ ID NO: 103617 - RNA, 62 nt, Homo sapiens
gcccgacaacgaagaggggcagcggcaagcaggggagccagccacacagagacagaccaccg

SEQ ID NO: 103618 - RNA, 74 nt, Homo sapiens
acacagggaagcaagccaaccaccagaagcgaagggggaagaaccaaaggcagacccagaagagcacaaaacag

SEQ ID NO: 103619 - RNA, 80 nt, Homo sapiens
ggagcagcagacagggacacggcccccccagcgcaggaagccaacagaggccaagcaccccacccaacccccgagagcgg

SEQ ID NO: 103620 - RNA, 69 nt, Homo sapiens
acgaacagagacaagacaaccaacagaaacacagacagcggcccgggccccaggccaggcccagaacga

SEQ ID NO: 103621 - RNA, 74 nt, Homo sapiens
acacaccggggccaccccgcgggcagacgaggccacagcccaggcacaggaaaggccagggaaccccacccggg

SEQ ID NO: 103622 - RNA, 37 nt, Homo sapiens
ccccaaagggcgggaacagagcgcgcaaaaaccagcg

SEQ ID NO: 103623 - RNA, 73 nt, Homo sapiens
gaaaagacgccccaggagcaaaaggcaaccacggacgaaagcgagcagaagcaccaaaagcccaggccgccca

SEQ ID NO: 103624 - RNA, 77 nt, Homo sapiens
acacagaggaaaccgcaccgcccggaggcccaggcggcggcgcagcagacgggcaccgcggccagcacccaaaggga

SEQ ID NO: 103625 - RNA, 59 nt, Homo sapiens
gggaacaggcacccgccaccacgcccagaggaccacccgcacccaggggacgcacggcc

SEQ ID NO: 103626 - RNA, 78 nt, Homo sapiens
aacaccaacacgagggcggcggaaaaagccgccacacgccaaagacgggcaccccacgaggacggcagacggaggggg

SEQ ID NO: 103627 - RNA, 75 nt, Homo sapiens
agaagaagccagcagccacaccagggccgcggaccaccaccccgcaaaaggccacccgcgcgccgcaccacggcg

SEQ ID NO: 103628 - RNA, 79 nt, Homo sapiens
aaaccccgacacaaagaacgaaccaagggggcagagggcaccacagacaagaaagcccccacggaaggccacgagggcg

SEQ ID NO: 103629 - RNA, 81 nt, Homo sapiens
ggccccgaagacaaaacccgaggcccgggaggagccaacaagcgcacggagccccaaggggggaccgcggggccaaaaagg

SEQ ID NO: 103630 - RNA, 88 nt, Homo sapiens
cgccccaggagcgcgagcccacaacacccccagcggccgccggccccccacgagagacgagagccgaggcgccggaaacaacagccaa

SEQ ID NO: 103631 - RNA, 59 nt, Homo sapiens
cgcagacggccagccgaaaccacgaaccagaggaccggcaacaacccgaggacgaacca

SEQ ID NO: 103632 - RNA, 73 nt, Homo sapiens
agccagaagaaggaccggaagcacacaacaggaaaacaaaagaggagaaagagacgaagaggagcagaaccag

SEQ ID NO: 103633 - RNA, 82 nt, Homo sapiens
gcccacaggggggggcaaacccgagagaacggggggaacacaccgaaacagaggaacagcagggcagaggacacgagccaag

SEQ ID NO: 103634 - RNA, 88 nt, Homo sapiens
aagggggcaacgaggaagccaagagcgcggccggaaagcagagccggggccggacgagaaagccgaaggagacgacggaggagaccgg

SEQ ID NO: 103635 - RNA, 82 nt, Homo sapiens
ccgcacgccacagcgaaggcgcgagggacaagagcagagcccccagaggagcggagcgaaacggaagagcacggcgaaacaa

SEQ ID NO: 103636 - RNA, 75 nt, Homo sapiens
acagcaaacaagggggccccaggaaacgcaggcacgccgccgaaaagacaaaaccgcccaaagagaagagaagca

SEQ ID NO: 103637 - RNA, 77 nt, Homo sapiens
ccagaagcaggcccccagccgcagccacaacaccggcaggaaccaccaggacagagccagcggagacgccaacagag

SEQ ID NO: 103638 - RNA, 78 nt, Homo sapiens
gcgaaggccgggacccggccccggcccacaggggggggcaaacccgagagaacgggcaccacccgcaccgacagcaag

SEQ ID NO: 103639 - RNA, 60 nt, Homo sapiens
gcccccgggccgacgccagaagacaaagagccaagaaacccggccggcacaccagcccaa

SEQ ID NO: 103640 - RNA, 74 nt, Homo sapiens
gacaagccccaaaagcagccgggaaaggagccggccggcggcaaaggacaaagcaggacccaaaggaaacaccc

SEQ ID NO: 103641 - RNA, 58 nt, Homo sapiens
ccgagagacccaagaaacaggaccgcccaggcaacacgacaggcacggaccccaaaac

SEQ ID NO: 103642 - RNA, 75 nt, Homo sapiens
cccaggcgaccacaccagacacagcggaaggccaaagacagacgggcccagcacacagggacaacgccaggggca

SEQ ID NO: 103643 - RNA, 68 nt, Homo sapiens
gagacaaaccggagaaggagccaagaaagagaagccgcccgaaaaggggaagaccggggcgagcgagg

SEQ ID NO: 103644 - RNA, 99 nt, Homo sapiens
ggggcaagccggaaccagacgagcccagggggcacgcggaaacggacgaaaacaccgacagaaaaaaaagccagggaaggaggagaggcgccacgcaag

SEQ ID NO: 103645 - RNA, 33 nt, Homo sapiens
gccggagcaccgaacagacgaagagaggcaaca

SEQ ID NO: 103646 - RNA, 56 nt, Homo sapiens
acgacaaagaggcggcagggaccagcagacgggaagagcccaaaaggcagagcgag

SEQ ID NO: 103647 - RNA, 74 nt, Homo sapiens
gcccgagccccagagaagaccaaaagaggaagcaaagaggaaacacggaagcacagcaagcaggaacgaacagg

SEQ ID NO: 103648 - RNA, 76 nt, Homo sapiens
cccacacaagcgaaggcgcgcaccggaagcaccagcgaggaagggaaccaagaccaggacaaagaagacccggaga

SEQ ID NO: 103649 - RNA, 79 nt, Homo sapiens
aagagcagaagaaggcggccacccgcccaaggggggggagggacccagaccgcagcccccagacaggccaacaagggcc

SEQ ID NO: 103650 - RNA, 73 nt, Homo sapiens
aaacggaaaccgaaaggacagacaagaaaaaagcacgagaggaccgaagcggcgggcgacacggaaggagaaa

SEQ ID NO: 103651 - RNA, 77 nt, Homo sapiens
aggcgaagggaagaaaaccaacaaagcaacgagagcgcggaacaacagagaaggagaaggaaggcagaggaaccgga

SEQ ID NO: 103652 - RNA, 33 nt, Homo sapiens
cgccgccgccgcacaagcccccagaaagaccag

SEQ ID NO: 103653 - RNA, 78 nt, Homo sapiens
ggccggacaacagacccgggggagacgccgccaaggacaggcaccagcgagaacgcgaccagcaagaagaacgagccc

SEQ ID NO: 103654 - RNA, 75 nt, Homo sapiens
ccgcagagagacagaccaagagcccgaggcaccacccaagcggaggaccgcgccaacaggacgaggagaccgacc

SEQ ID NO: 103655 - RNA, 75 nt, Homo sapiens
agcacagccagccagcgaccaccggggggcccagacgcacccgcacggcggcacggagaggggagcccaaaagca

SEQ ID NO: 103656 - RNA, 76 nt, Homo sapiens
ccagcccgaaacaccaccaagggaggccaacagacccaacccagaaggcaccaaacggagggggaacaggcggcaa

SEQ ID NO: 103657 - RNA, 50 nt, Homo sapiens
cccggggcgaaaaacaaagagagggagcacaaaaaaaaaccaacagaaca

SEQ ID NO: 103658 - RNA, 72 nt, Homo sapiens
cggagagccaaagggacgagcagaaggcaagaaagggagaagccagaaaagcagaaagagacagcgggaaaa

SEQ ID NO: 103659 - RNA, 75 nt, Homo sapiens
gaaaagaagagaaaccagcgcggggaagaagggacaggcccagaggcacaccacaggagcacaaagagagagaga

SEQ ID NO: 103660 - RNA, 37 nt, Homo sapiens
gaccgggagccgcaccaacgaacaaccagagggaaag

SEQ ID NO: 103661 - RNA, 100 nt, Homo sapiens
cggaggcccccgggcaagaggcgcaaacaagccaacccaggaggaaaaacgacaaaggcccacgcacaaaggggaacggaaaaccacagccggggaaagc

SEQ ID NO: 103662 - RNA, 67 nt, Homo sapiens
agcgccacgcgcggaaggcagcgcccagcagcgcagggcgaagccgggaaaaagaaccaggccaagg

SEQ ID NO: 103663 - RNA, 86 nt, Homo sapiens
ggggacggggcagcggggacgcggggccgcggcgccggcagcagagaccaccagaagggaccacaagagccaggccacacggagca

SEQ ID NO: 103664 - RNA, 72 nt, Homo sapiens
ccaggcggccccgagcggaacggagaaagcgagggccagcaggaagaccaagaagaaggaaggggggccccc

SEQ ID NO: 103665 - RNA, 74 nt, Homo sapiens
gaccagagaggccgggaggcgcacacgccagcccgcgaagaggcgaaaccccgcccgaaggcggaccgacacga

SEQ ID NO: 103666 - RNA, 77 nt, Homo sapiens
cagagcagaagaaaccaagacggcagagagccacggcgacgccgacacaagaggagaagggaagccaagggggggcg

SEQ ID NO: 103667 - RNA, 72 nt, Homo sapiens
aaagccagagaaaaagcggagaaaaggcacgcaaacaagcgaaaaacagacaagaaaccgcagagcggaaaa

SEQ ID NO: 103668 - RNA, 79 nt, Homo sapiens
agccggaacagagcggcaccggccgagcgggcgaggaacgaccacccgaaccgcaaagcggagcagggccaggagaggg

SEQ ID NO: 103669 - RNA, 75 nt, Homo sapiens
agcagcgaaaacggggagagccggaccccaggaggacgaaaaagagaagacggggagacccagcgcagagggcag

SEQ ID NO: 103670 - RNA, 65 nt, Homo sapiens
caggcaacggggaccccggagcccagaagacagagggcgagcagaggaagggcagcagaacaacg

SEQ ID NO: 103671 - RNA, 83 nt, Homo sapiens
gccggggaagacagggagacgcgcgcagcccgggacaccggggccgccgaggcaaagaacagccagcaaagacaagagcagac

SEQ ID NO: 103672 - RNA, 82 nt, Homo sapiens
cagcaccccaagcagggggagaagaaacaggacgagaagaggccccccaaaggacacaggacagaccgagaacgagagccca

SEQ ID NO: 103673 - RNA, 74 nt, Homo sapiens
ccgaccgcaagcagccagacccagccgggccaccgggcggagaacggaaaagcaccaggaagcagagaggaccg

SEQ ID NO: 103674 - RNA, 68 nt, Homo sapiens
aggcgccccaggaaccaaagggggaccagcgccacacagcaggagcccagggaacccagccagcacag

SEQ ID NO: 103675 - RNA, 75 nt, Homo sapiens
cggccaagaaagcccgaaaaccaagaggcagcacggcaggagacgaggagaggacagcaggacacccggacccca

SEQ ID NO: 103676 - RNA, 72 nt, Homo sapiens
ggggacaaaagggcgccgcgccccgaagaacaccagaagcagccgaaacgaaccaagaaccgaaggaaccaa

SEQ ID NO: 103677 - RNA, 80 nt, Homo sapiens
cgagcgaaggccagcggcaccgacagggacaccaccgaaccccagcccaagccgcgcccggccgacgcccgccgcggccg

SEQ ID NO: 103678 - RNA, 77 nt, Homo sapiens
gccacacccccaacgagcgagacgacgggggacacggaaagcacaaggagaaaaaaggccaggggaaggcgaaggaa

SEQ ID NO: 103679 - RNA, 81 nt, Homo sapiens
gggcgcggcggcccggcggcgcggcggagggaggcggcgacccggcgaggggggcagaaggccagcggcaggccacgcaga

SEQ ID NO: 103680 - RNA, 75 nt, Homo sapiens
gaacccggacggaaaaccaagagaacagcacagggacaagcaaggcacacagaaagaaggaaagaacgacaacaa

SEQ ID NO: 103681 - RNA, 77 nt, Homo sapiens
gcagaacggagaaggacaggcgacaaggacccaccgagaagcgaggcccgcaggagagagagcccggaaaagaacac

SEQ ID NO: 103682 - RNA, 80 nt, Homo sapiens
ggacaagagaagcacaaaacagcagacccaagagcagcggaaaagaccagcacagggcagagggccagacccccaacaaa

SEQ ID NO: 103683 - RNA, 91 nt, Homo sapiens
gggagccgggcaggagccgcgagccagcgcgcgaaggacggcccagacgccagaggaaaccggacaaaacaggagagcgcaggaacaggcg

SEQ ID NO: 103684 - RNA, 80 nt, Homo sapiens
gcgcgcgccgcgccgcccgagcacgccgcgcagcccggccgccggcccccaacagcgccgaacggcggccaaagcgccag

SEQ ID NO: 103685 - RNA, 79 nt, Homo sapiens
ccgagagccgcccgggccagcggccgcgcacccccggccggaggcaccagcggcaccggcagaagcggaggaccagacc

SEQ ID NO: 103686 - RNA, 79 nt, Homo sapiens
ccccaaggggcacaacaggggcggaagccacaagcagcggagaccgggccaaggcaggaagacaacaccagacagacgg

SEQ ID NO: 103687 - RNA, 82 nt, Homo sapiens
gaggaaaccacaggacggaagcacaggggccaccagagcgcccgagaaggcacacacgaaacgggcaaccggggccagggcc

SEQ ID NO: 103688 - RNA, 69 nt, Homo sapiens
caacaacagaccggggaccgcccagcagcccaggccgagacgaaaggcaggcaagaagaaccaccccgc

SEQ ID NO: 103689 - RNA, 72 nt, Homo sapiens
agcagaaagaaaagcgcgagacaaggaacgagcggaggaacagagacagacccgggggcccccaaggagagg

SEQ ID NO: 103690 - RNA, 73 nt, Homo sapiens
gaggacggggcccaggaacggaaaagggcagccgcacgggccggggggggcacagagccccggaagacagccc

SEQ ID NO: 103691 - RNA, 79 nt, Homo sapiens
cggaggggcgcgggacacacccccaggaggcccggcagagcaggccgcagaacagcgccacagccggccacaacaccca

SEQ ID NO: 103692 - RNA, 83 nt, Homo sapiens
ggaacagaagcaaaaacaaaacaaccgggaccccagccagaacgcagggaaacagccacagagggcaggccaaggaggcaaag

SEQ ID NO: 103693 - RNA, 59 nt, Homo sapiens
caccccccacgcagaggcagcagggccaccgcagggagccaagcggacaggcccaaccc

SEQ ID NO: 103694 - RNA, 69 nt, Homo sapiens
gagaaaaggccaagaaggcagaggccggaagagcgggagcgggagccaggcagaaggccaaccaacccc

SEQ ID NO: 103695 - RNA, 86 nt, Homo sapiens
cacgaccaccgcacacccgacacagcggagcgcccagaggcgagcccggggaggaagagaaagaccggggaagaggaggcgaggag

SEQ ID NO: 103696 - RNA, 81 nt, Homo sapiens
gaaagagagcgccagggcagcagggggggaaccgccaaacccccccgaccacccggaaccacaaggccagaggaggaacca

SEQ ID NO: 103697 - RNA, 47 nt, Homo sapiens
ccaacccgcggaggcccaccgcccagacaggggcaaggccgagggga

SEQ ID NO: 103698 - RNA, 41 nt, Homo sapiens
ggacaaggcgggccgcacccgggcacgaccccggccggcgc

SEQ ID NO: 103699 - RNA, 82 nt, Homo sapiens
ggaccggaagcagaggcgacaggcaagagacgagcaccgggacacaaaaccagaagccccggccccgccccccccagccacc

SEQ ID NO: 103700 - RNA, 58 nt, Homo sapiens
ggcggaagacagggcgaaagcaccggggaagaaaacagccgccggaacagcgcgcaca

SEQ ID NO: 103701 - RNA, 62 nt, Homo sapiens
aaaccacgaacgccagggaggggagcccacagaagaaacagacggaggccaggccagaggga

SEQ ID NO: 103702 - RNA, 68 nt, Homo sapiens
acagaagcaaaagccgaagcaggacggagccacaggccagacagaaaaaacgggacggcaaaacagaa

SEQ ID NO: 103703 - RNA, 67 nt, Homo sapiens
aaagccgccaggagccagcgggcgacaggaccaaggacgagcacaaggcaagaccgaagcaggcccg

SEQ ID NO: 103704 - RNA, 44 nt, Homo sapiens
gcccccggggcggaaaagcagggaggggcgacccccgaccgcgg

SEQ ID NO: 103705 - RNA, 83 nt, Homo sapiens
gggccagcccacggaaggccaggaacccgaagacacaccaggcgcacggaagaccaggagagagagggacgcagacacgacaa

SEQ ID NO: 103706 - RNA, 83 nt, Homo sapiens
ccccggcccgcgcccgccccagccccgaccggcggggccaggacgcggcaacacccaagaggagcaagaggggggggcccccc

SEQ ID NO: 103707 - RNA, 74 nt, Homo sapiens
gacaacggagcagaggcgcgaagcgaggaagaggaacgagcaccagcaaggaaacgaagaccgagaccaaacaa

SEQ ID NO: 103708 - RNA, 77 nt, Homo sapiens
cgggccggacccaggccgacccgcgaacccccgggaccccgccgccgcacaacccgaggacccaaagacaggaccac

SEQ ID NO: 103709 - RNA, 82 nt, Homo sapiens
aaaggaccccgccccaagccccaccacccgcagccggggaggcaacggagcgaaaccagcgacaggcaagaagcgaaagaag

SEQ ID NO: 103710 - RNA, 81 nt, Homo sapiens
gagaccacaaagcaagagagaagccacgcagagcgcggaaaaggaacagaagaggaaccgaaacccaagaaaaaccaccca

SEQ ID NO: 103711 - RNA, 57 nt, Homo sapiens
gggagaccgcacgcgcccaagggaccagaccccacaagaaaacacacaaccacaggc

SEQ ID NO: 103712 - RNA, 80 nt, Homo sapiens
cgagaggaagacgagccgggaggaacggcccggaaacaggaggacacgcaaacagcagacggaagaccccacggcaaaac

SEQ ID NO: 103713 - RNA, 50 nt, Homo sapiens
gcaggagggcgaacgagcgcaagccccggggcagagacacaggacaccca

SEQ ID NO: 103714 - RNA, 67 nt, Homo sapiens
ggccccacaaaaagccagcgcccccacaagaggacggcagcaagaagaaggagcggaaaacagaaag

SEQ ID NO: 103715 - RNA, 46 nt, Homo sapiens
ccgagagcgggagcaggagcaaggccgcaagaggacgaaggaccaa

SEQ ID NO: 103716 - RNA, 79 nt, Homo sapiens
cgccacagcgcaaagcgcccgcgcgaccacgggcccggcgccggcccccgccgcccggagagacagagagaggagaaag

SEQ ID NO: 103717 - RNA, 80 nt, Homo sapiens
ccgccggccggcggccggagaaacgaggagccagagaaggcagcaggaagaaacagcgaaccaaaaaccagcagaagcag

SEQ ID NO: 103718 - RNA, 70 nt, Homo sapiens
gcacgcaacccccccccgaacagagcgaggaaaacgccacgacagacacaaccaagcaccggagaaaacc

SEQ ID NO: 103719 - RNA, 75 nt, Homo sapiens
caagcacggccaagagcaaagagccgggggcggagagagccaaaggagagcaggaacgggaaaagcagacccacc

SEQ ID NO: 103720 - RNA, 74 nt, Homo sapiens
gaaaacaaagaggcgaaggaagaaagaaaacgacacaagggaagacgcggaggacagcgaaggggaccaacagg

SEQ ID NO: 103721 - RNA, 68 nt, Homo sapiens
gagcccaagccggaacagccaacaaagagagcaccccagaaggcccgcaaagaacaaccacaacacag

SEQ ID NO: 103722 - RNA, 74 nt, Homo sapiens
aaaaacgcggaggggaaaacaaaacagaccgggaaaaaaccaggcagccaaacgcgccagagaaccaggaaaaa

SEQ ID NO: 103723 - RNA, 76 nt, Homo sapiens
ggcaggcccgacaagccgaccagccaaggacccaaagacaggaccacgcaccagcagagaaggaaagcaaaccgaa

SEQ ID NO: 103724 - RNA, 66 nt, Homo sapiens
ggaggacgcccaacagcccccaccaagcaggggggcacgcggaccaaagaacacgcacagggacgc

SEQ ID NO: 103725 - RNA, 42 nt, Homo sapiens
ccgccgcgccggagccccacagaccacgccaccgggcaagag

SEQ ID NO: 103726 - RNA, 39 nt, Homo sapiens
aagccgaggagaggcaagcggccggagcgagggagagca

SEQ ID NO: 103727 - RNA, 69 nt, Homo sapiens
acccaagaacacacggagacacagacaacgaagaaaggagcacaaaagaacaaacacacgagccaaaag

SEQ ID NO: 103728 - RNA, 37 nt, Homo sapiens
acgaccgacaggggggaaaggcccagaaaaggcaaag

SEQ ID NO: 103729 - RNA, 84 nt, Homo sapiens
aaacaccagccccccggcacggccaaacaaccaggagagacagagccgcgaagacgagaaacacgagccccgaaaccacaagag

SEQ ID NO: 103730 - RNA, 83 nt, Homo sapiens
ccacagcagccccggccggcggcggggcccgggcgagcagcccgccccggacgggacagagcgaagaaccccccaagaagacg

SEQ ID NO: 103731 - RNA, 79 nt, Homo sapiens
ggcagcagcccacccgcacggccaggcggaagaaacggacaccaccagagcaagccccgaagccaccaagacccaggag

SEQ ID NO: 103732 - RNA, 65 nt, Homo sapiens
ggcggacccgggggaaaccgcaaaagccaccgcaccagccaagacagacgggccagacaaccaag

SEQ ID NO: 103733 - RNA, 72 nt, Homo sapiens
cgaaaagggccgggccaagcaggacaacgcacaaccaccgcgaacacccagccaacccccccacaagaacaa

SEQ ID NO: 103734 - RNA, 79 nt, Homo sapiens
caacaaccaaaggccagggcacaaaaaagccagcaacacccaacacaaagcggaagaacacagaaacagccagacaaca

SEQ ID NO: 103735 - RNA, 68 nt, Homo sapiens
ccgcaccggcgccccacccgcccccgcgggcgccgggccaggacgggcacacagagaaaaaaagggaa

SEQ ID NO: 103736 - RNA, 74 nt, Homo sapiens
gcgaaagaacgccagacaaacagcggcggagaaaccaccacaaacacgaggccagcaacgaccaacaagacaga

SEQ ID NO: 103737 - RNA, 70 nt, Homo sapiens
aaagagcgaggacagcagaaagaccacagagacccagagagaaacagcgagcaccaaggggcaccgaaca

SEQ ID NO: 103738 - RNA, 79 nt, Homo sapiens
gcaaagcgcagcccgcagacagaggggcgacgaccgcacaacagaaggggaacacaccgaaacagaggaacagcagggc

SEQ ID NO: 103739 - RNA, 67 nt, Homo sapiens
gggcgcacggcacacaggaagaacggcaaggagcgaaggaacgccccaaacacggaacgcagggcgc

SEQ ID NO: 103740 - RNA, 86 nt, Homo sapiens
aggacccacagaggagggaagcaggaaagcaagaagaacacacccagcagggaccaagaaaggcccagggaccaaagcccggacaa

SEQ ID NO: 103741 - RNA, 68 nt, Homo sapiens
cacagagaaaaagcgccaacggcaaagacgggagacgaaagcaggccaaccgaaagaagaggacaaag

SEQ ID NO: 103742 - RNA, 112 nt, Homo sapiens
gacgggggacccagacgacgcacagggcaaagaaaaagaagaagcacacacacagacgacaaagccaaggacgccacgcggaggagccgaagacgcccaggcgccagagggg

SEQ ID NO: 103743 - RNA, 68 nt, Homo sapiens
accgccccagcggcaccagaacacagccggacacaagagggcaagaaaggcgcgacgggccgaaaagg

SEQ ID NO: 103744 - RNA, 89 nt, Homo sapiens
aggagacccgcgggacccgccgcggcgagcgccaccgcaggggccgccgggcagaagcacgaggacgagggcggcacgccccgcccccg

SEQ ID NO: 103745 - RNA, 79 nt, Homo sapiens
cccgcgacggaaagaggagagcccccaggcccagcagagcgcgcgagacagaagacagcccacgacacaggcccagacc

SEQ ID NO: 103746 - RNA, 111 nt, Homo sapiens
cccaggggccaggcgaagcacgagcagaccggcccgaccgcccacagacccaaacaaagaagaaagcgaccgcacggggaaaccacaagcaaaaacaggggagcgccaggg

SEQ ID NO: 103747 - RNA, 81 nt, Homo sapiens
gcgcccgggcagggaagcagaggcacccacgcccacaaacgcagccagacagccccagcgggcagcggaggagggcacgca

SEQ ID NO: 103748 - RNA, 78 nt, Homo sapiens
caagagcgcggaacaggacgccccgacacagccccgcggcgcccgagccccaccagcggccccgacacaccaggcaga

SEQ ID NO: 103749 - RNA, 74 nt, Homo sapiens
cacgcaagaccaccagcgcgaaagcaaaagggaacaggcacgccccacccgccagccgagcccccgacgcagca

SEQ ID NO: 103750 - RNA, 84 nt, Homo sapiens
gccgacgccaggccgagcaccagccgggacgcggggaccggaacaggagccgaggagggcgcgcggcccggcggacggaccacg

SEQ ID NO: 103751 - RNA, 70 nt, Homo sapiens
gaggagagaaccagaagagaggagcagagaggacggcgaagggaaacccccacacacgcagggaacaccg

SEQ ID NO: 103752 - RNA, 77 nt, Homo sapiens
cagcaagcacaggcagcgcagagccagagaccacaggagcgagagcaaacagaacaagcccgagaagacagcaccac

SEQ ID NO: 103753 - RNA, 66 nt, Homo sapiens
cgagggcggaggcgacacccagacgccaaacgaggcagcaacacaacgcagaaacagagagcgcac

SEQ ID NO: 103754 - RNA, 78 nt, Homo sapiens
ccagggcaaacccacgccaagcacagccagccccaggggaaccaccccaagggaaaggccaaggcagagaagccccag

SEQ ID NO: 103755 - RNA, 85 nt, Homo sapiens
cccgaagcacacagcggaccgcagagccagcccacaacagggccggacacagacccgaaagaccgccgcagaggacggcggaagc

SEQ ID NO: 103756 - RNA, 73 nt, Homo sapiens
ggaagaggaggagacccacggagacccccacaagaacagaagaaaccgccgcccagaccaccaagaacagggg

SEQ ID NO: 103757 - RNA, 52 nt, Homo sapiens
ccgaggcccacaagaacgccagaaagcacaggcaagaacgccccggcaagga

SEQ ID NO: 103758 - RNA, 46 nt, Homo sapiens
gagaggcgggaagagggcgggcgcgacagagaaacagaaccgaagc

SEQ ID NO: 103759 - RNA, 86 nt, Homo sapiens
aaaagagaaggagcccaaagccagcacggcggcaaagaccacacagcgcaaaaacagagagaaacagcaaggaaagaggcaaaaac

SEQ ID NO: 103760 - RNA, 84 nt, Homo sapiens
aaagaaagaaagaacaaggccgcccagagaagcgaaaaggcgaaacgaaggaagaggggcgcggggagcgaccaaaaaggagga

SEQ ID NO: 103761 - RNA, 99 nt, Homo sapiens
cgaggcacccccggaccagaacggcacggccacgggcgggcaggcaagaaccagcaacacacaagaaacccagccaccaagggaaaagagaagcaagga

SEQ ID NO: 103762 - RNA, 73 nt, Homo sapiens
cggaaccggcgccgcgcgcgcggaacagggccgccaggggcccccccaggcgaagcaacaaaccaccacccag

SEQ ID NO: 103763 - RNA, 67 nt, Homo sapiens
gaaccccggcgaacagcaaggcacaagcggagaaaaagaaagcggcgcgccaacagacccgggggaa

SEQ ID NO: 103764 - RNA, 76 nt, Homo sapiens
cacagaaggagaaagacgccagcaccccaggcaaccaaaacaacagcacaccagagaaaccaggcggggaacaagc

SEQ ID NO: 103765 - RNA, 69 nt, Homo sapiens
aaggcaccccaagggacccggacaccaagagcagaacagaaggcgcacaaaggaaagagaagcaaaacc

SEQ ID NO: 103766 - RNA, 83 nt, Homo sapiens
ggcccgagagaaccgcggcagaagccgagcaacaccccggccaccgacccacaaggccacggaagggaacaccgccccccaga

SEQ ID NO: 103767 - RNA, 55 nt, Homo sapiens
gaagacagcaaacacgaaaacaccacaggaagccaaaggcagagaagcgacccgg

SEQ ID NO: 103768 - RNA, 61 nt, Homo sapiens
ggccgcaggaaggcagaagaaagaagaggagaaggagcagccggccaaggcaacaaggacc

SEQ ID NO: 103769 - RNA, 78 nt, Homo sapiens
acgccaagccaaggaaggccgagaagaagcaaagggcaaccagggaaacaggagagagagccaaaccggcgccaagcc

SEQ ID NO: 103770 - RNA, 81 nt, Homo sapiens
ccggagaccagggcaacccagacagacgaggaacagaaaagagaaaccagggagcgcccaagaaaccaagaagaacacacg

SEQ ID NO: 103771 - RNA, 75 nt, Homo sapiens
gggacggcgccgcggcacgccggggcccacccaccgcaggacccgcggcccccaggccaggccagcagaaaacgc

SEQ ID NO: 103772 - RNA, 69 nt, Homo sapiens
gcaccggggggcaacacccgagaacggcgggaagagaagacacgagcacaaacggggaaacgggagcgg

SEQ ID NO: 103773 - RNA, 70 nt, Homo sapiens
aagagcagaggaggaacaccaggcacaagggacccacccccaccccacccagagaccaggcccccacacc

SEQ ID NO: 103774 - RNA, 85 nt, Homo sapiens
ccaggcacgcaggacagaaagaccaacagaaacgaggacaaggaccgccgggcaagacccaagccagaaccagagaacagcagag

SEQ ID NO: 103775 - RNA, 78 nt, Homo sapiens
gaaagaaagacccaacagaaacacggaccgaaagagggccaaagaggcagagacagaccaacacccgagaccacccag

SEQ ID NO: 103776 - RNA, 89 nt, Homo sapiens
cgggcggcgcccgcacagccggcgggcagaaccaaaggcaagaaggaaaaaacacgacacaccagagaagaggagccccccgagccaag

SEQ ID NO: 103777 - RNA, 78 nt, Homo sapiens
gaaaacgccaaggaacggacgcaacaaggcggaaagaccacaagaaacgacggcccggcaagagagaagaagacaacg

SEQ ID NO: 103778 - RNA, 76 nt, Homo sapiens
ccccgcgggcggaaggcggcgcccaccccccccggacccgcggcagccgaccagccccaagaacacgacaagaagc

SEQ ID NO: 103779 - RNA, 76 nt, Homo sapiens
caacgagaagaaccggaagccgacccggagccgagcaaccaggaagaggaggacgcagcagagagggcaggcgcaa

SEQ ID NO: 103780 - RNA, 94 nt, Homo sapiens
cagaagaacaaccaacaccgggaaaacagcgaggggcaaacagaaagggcgggagaggcgacgcggcgacgaacaacgacgcaggaacagcgag

SEQ ID NO: 103781 - RNA, 77 nt, Homo sapiens
gcaagcacagcgaccgggcgcagggggagggcagagcccagccagcacacagcggggagcaggccggccggagaacg

SEQ ID NO: 103782 - RNA, 75 nt, Homo sapiens
ccaaacgggcacgaaaaccaagaagcgggaaggccgccaaagcccaaacagagaaccaaagaacggcgagcagcg

SEQ ID NO: 103783 - RNA, 49 nt, Homo sapiens
cgccgccaccgggaggcccagggaaggacccagcggccaagcccgggcc

SEQ ID NO: 103784 - RNA, 57 nt, Homo sapiens
aaaaccacgacacggcaggaagaaaggaccaagacagcaggaacgaaccaaacccgg

SEQ ID NO: 103785 - RNA, 77 nt, Homo sapiens
acacaagaaacacaaccagacgcagaaaaccaggaagggcgacagggcagcccgcagaggaccgcacgaacgcaaga

SEQ ID NO: 103786 - RNA, 73 nt, Homo sapiens
gcaacgcggcgggcgagacgccaggccaccagccaggagcccaagggaggggaagccgccggccggggcccca

SEQ ID NO: 103787 - RNA, 75 nt, Homo sapiens
cggggcgcgcggcgccggcggcgcgcgacccccgcgcagggccaagggcggagcacgagaaagcggcaccggcag

SEQ ID NO: 103788 - RNA, 77 nt, Homo sapiens
aacagacagccacgcagacggaaacaaggcaacagaaagagcaacagcagggcaacaggagcccagccccaagcagc

SEQ ID NO: 103789 - RNA, 71 nt, Homo sapiens
aaaaccaaagagccggggacaaggcccaccacaaaccaaacgagcaagaaggagcgaggcagagccacagg

SEQ ID NO: 103790 - RNA, 74 nt, Homo sapiens
ggacggagagcccagcaaggagaagacgcagccgcagggcaagggcgcagcacgcagacccgcaagccccaagc

SEQ ID NO: 103791 - RNA, 65 nt, Homo sapiens
gccagaagacaaagcaaccagcagacaggaaggaaaaaaggaaaaagcgcgcagacggaccaaaa

SEQ ID NO: 103792 - RNA, 77 nt, Homo sapiens
accgcaggagccgccgcccgccaacccaccgacacgcaggcaagaccggaccagaaccgcagggacacagagccaca

SEQ ID NO: 103793 - RNA, 90 nt, Homo sapiens
gagaaaaccacagccaacaggaaccacacagaaggcagaggccgaacagacccaaggagaggggaagcccagcgagggggagcacagaac

SEQ ID NO: 103794 - RNA, 62 nt, Homo sapiens
aaaggagcggcccagcaaccccagaacgcaccgcaagcccccccgaagagccccagccaaca

SEQ ID NO: 103795 - RNA, 31 nt, Homo sapiens
agaaccacagaggggaccgacccacgcccgc

SEQ ID NO: 103796 - RNA, 80 nt, Homo sapiens
cgaaaaagacgcgagaagccacacgagaagcggcaaacgagaccaaagagagaaccaggaagaggaaaaaaacccaaggc

SEQ ID NO: 103797 - RNA, 79 nt, Homo sapiens
gaccagcacagcacaagacacagccagaaccacaagacagacccaagagggcggggcaaaacaaaggcagagggagcgg

SEQ ID NO: 103798 - RNA, 88 nt, Homo sapiens
ccgcaacccccgccgcaaaccgcagcccaggagcccggaagacccgcaccggagcaaagggaaggaaagaccgcagaagggaggcacc

SEQ ID NO: 103799 - RNA, 78 nt, Homo sapiens
agaggaacaggcccagaaggccaagaacccccaggagcagaagccccgccaaaacgcccggggacgaagaacgaccaa

SEQ ID NO: 103800 - RNA, 80 nt, Homo sapiens
aaaggaccggggaccccaaagacaaacgacaagcccaaggagcccagggagaaaagagcagaacacaaaaaaacaaagag

SEQ ID NO: 103801 - RNA, 70 nt, Homo sapiens
aacaccaagacaaaaacaaaggccgggccgagaacgaacagccacaaacaaggaaaggaaccgagaaacg

SEQ ID NO: 103802 - RNA, 49 nt, Homo sapiens
gcgaccccaacgagacaaagaaggcagagaggggagcacgcgaggagga

SEQ ID NO: 103803 - RNA, 60 nt, Homo sapiens
caggacgagaacagcaacagaaaccagggggagaccgcaccaggaggaaaacagagacaa

SEQ ID NO: 103804 - RNA, 71 nt, Homo sapiens
cggagaccgaaacccgggggggcgcgcgcgggggcaagcaccgagaagaacaccaaacaagaagccacaag

SEQ ID NO: 103805 - RNA, 75 nt, Homo sapiens
ggaagagaccagaggacagaccgaagcaaagaccacccaagaagaccaaggcccaaaaggacccaagagagaagc

SEQ ID NO: 103806 - RNA, 58 nt, Homo sapiens
cggagcaggaccaaccagacaaggcgaagaaagcccaaaacacaagagcagaagagaa

SEQ ID NO: 103807 - RNA, 73 nt, Homo sapiens
gccaaaagaaacacacacggccgcgacccgaccgggggagcggccgaggacaagcacaagcagcaccaaaagg

SEQ ID NO: 103808 - RNA, 73 nt, Homo sapiens
aaacgccacccaaacgcgaacgccgcccacccggccacgaagagaagaagggggaagcagaccaagaagacag

SEQ ID NO: 103809 - RNA, 38 nt, Homo sapiens
cccggaacaagcaaagggcacgagaggcgaccaagaag

SEQ ID NO: 103810 - RNA, 52 nt, Homo sapiens
ggaacacaggaaccaaagaggccggaagagcgggagcgggagccaggcagaa

SEQ ID NO: 103811 - RNA, 40 nt, Homo sapiens
accgcagaccggcagcccgaaagcagggggaaagaccacc

SEQ ID NO: 103812 - RNA, 72 nt, Homo sapiens
gcacccgggacaaggcggcgaccacacccagacaagcaacaaggagacgcgccgcccggcccaagcgaacca

SEQ ID NO: 103813 - RNA, 70 nt, Homo sapiens
gcagacaagaaacacgagagagacccgggcagaaccgcagagagaagaacagcagagggaaggccgagag

SEQ ID NO: 103814 - RNA, 84 nt, Homo sapiens
gcacaccagagacggcccgcggccggcgcgcagagacagaggacacaaggaaaaaaaacagaggaagggcggaaggcaagccgg

SEQ ID NO: 103815 - RNA, 57 nt, Homo sapiens
aaaggaaaggaaccaaacaggcaaacaaaggagaacggagaaacgaggccggagaaa

SEQ ID NO: 103816 - RNA, 68 nt, Homo sapiens
cgggaggcgcgcgagcagacaaggaccggccaggcacaagcaagcacacggggcacgccaccaaccac

SEQ ID NO: 103817 - RNA, 79 nt, Homo sapiens
agaacgagagaggcagacaaacccacagccagaacgagggcaccagagcacagcggacccccggggaggagcgacggac

SEQ ID NO: 103818 - RNA, 64 nt, Homo sapiens
cgaaggggaaggcgccgaagaggacgaagcaacgaaggcgaaccaaccacggagaccggcgacc

SEQ ID NO: 103819 - RNA, 84 nt, Homo sapiens
aaaaaggagcggaagcagccagaagaagagagccgcgagggcaagaggccagcagcccagcgaagccccgagcgcagcccggga

SEQ ID NO: 103820 - RNA, 75 nt, Homo sapiens
gaccacacaagcaaaagagaaccaggacccaaggacgggccgggaccacccaagaagaggggggcagcggaccgc

SEQ ID NO: 103821 - RNA, 80 nt, Homo sapiens
gaaaaacaaagccaaggaaaccccaacacagagccaagcgccaacaaaagcgcacagccagaagaaaccgggaggaccga

SEQ ID NO: 103822 - RNA, 82 nt, Homo sapiens
ggaacccgacaagaccaagacacccaagccagaaagagacaaccagcaccaagagaagcagaaggagaccaggaaagacaga

SEQ ID NO: 103823 - RNA, 74 nt, Homo sapiens
caacaccaggagcccaaggccacacagccgcgccggagcagccgagccaaaaaagcacaggcccggcaacccac

SEQ ID NO: 103824 - RNA, 77 nt, Homo sapiens
agaagacaagagaaaaagagggacccagaagaaggaggggcaaagaaccacccaagaacagaccaaaggaagaggaa

SEQ ID NO: 103825 - RNA, 84 nt, Homo sapiens
accgggaacaggcggacggccagcccacacaggagcacagaaaaggcgcccccccacagccccacagaccagagccggccaccg

SEQ ID NO: 103826 - RNA, 65 nt, Homo sapiens
ggaaaaggacaagccgacaggccaagagcagcagggagcgccgaggcaagagaaggcgcagaagg

SEQ ID NO: 103827 - RNA, 55 nt, Homo sapiens
ccagccgcgcccgggagagcaaggacaaagcccggaagagccgacaggccacaga

SEQ ID NO: 103828 - RNA, 74 nt, Homo sapiens
gagcccaaaaccggcgcccagagcacggccccaagaccggaaagccccacaaacgcagagccccgcccagcccc

SEQ ID NO: 103829 - RNA, 77 nt, Homo sapiens
acccggagccgggccagcaacagagcgggccggggacgaacacaccgccggggagccagaagaggaggaagcgaccg

SEQ ID NO: 103830 - RNA, 72 nt, Homo sapiens
cacaacagggcaaaggccccgacaggcgggcccaccggaggcaggggaggaagcgagccacaaaaacggaag

SEQ ID NO: 103831 - RNA, 77 nt, Homo sapiens
caaaaggaaggcaagaaggaggagagcaaaaggggcacccaaagacgccccacggcgcagaagggacaacccgccac

SEQ ID NO: 103832 - RNA, 73 nt, Homo sapiens
aaggagccggccggcggcaaaggggaaggaacaaagcagagaaaccaaaaggccagacgaacacgagagggag

SEQ ID NO: 103833 - RNA, 75 nt, Homo sapiens
ccagagacaagacaccgcagggacagaggaaacagagcagaaacgaaaggagaaaaaccaagaaagcaaaggaaa

SEQ ID NO: 103834 - RNA, 74 nt, Homo sapiens
acaacaacagaggcagcaacggcagaagcccccggggagagacagacagagggacacagagaggaagaaaggag

SEQ ID NO: 103835 - RNA, 71 nt, Homo sapiens
aaagccaggaaaaacacacagcacgcaccgggggcccgggagccaacacacgcaacaagaccggccagccc

SEQ ID NO: 103836 - RNA, 81 nt, Homo sapiens
gcgcccgccccccagcaccgggcggacggcagagagacgaagagagaagcagggcagaaagagcggaaacgagaagagcaa

SEQ ID NO: 103837 - RNA, 82 nt, Homo sapiens
gaacacagcgccacacccaagcccaggcccaaacagcaaggcgcgaaaaagaggcaggagcgcagccggcagagaggagccc

SEQ ID NO: 103838 - RNA, 72 nt, Homo sapiens
acggggaaggcgacggaccgcggccggaggagacccagaagcgcaacaacaagagaaaagaccaggcacgga

SEQ ID NO: 103839 - RNA, 68 nt, Homo sapiens
ccgcacaaggcgggaccgggggcgcgggagaaggcggagcggaaagcaggaaaacggcgcaaacggag

SEQ ID NO: 103840 - RNA, 74 nt, Homo sapiens
gagacggcggcggcgagcggcggacaggacgaaggaagaacacgacccaaacgagacaagaaacaccaaaaccg

SEQ ID NO: 103841 - RNA, 70 nt, Homo sapiens
ggcggcacacagcacgggcgggggacgggcagaaaaacaggaaaaagcaaaccgccacgccaaggcagcg

SEQ ID NO: 103842 - RNA, 63 nt, Homo sapiens
agccgaaaacccccaccaacccgccgagccaggggcaagacgaaaagaacaggagcaaaacgg

SEQ ID NO: 103843 - RNA, 58 nt, Homo sapiens
cgcccgaagaagcacgaccacaggacagcccacaaccaaggcagaggggcgggcaaag

SEQ ID NO: 103844 - RNA, 86 nt, Homo sapiens
gcagcagcggcgggcagagcgagccggagaagcaggggggccaggaggggagaggaggcaggcccgcggacagagaggcgcaggca

SEQ ID NO: 103845 - RNA, 75 nt, Homo sapiens
cgaggaaggaagacccggagggcaagaaggaccgaggaagaaggaagccaaggcagccgagagaacccccccacc

SEQ ID NO: 103846 - RNA, 98 nt, Homo sapiens
gccaggacaccgccacaggagggaccagcaccggaggaaccgcaccgcgaacgcaagaggagccacggccacccagaacaccccgggggaaggaagag

SEQ ID NO: 103847 - RNA, 84 nt, Homo sapiens
ccagacacgaagaggagcaggaacagcacgacccagccgccccggccgcaggccagagacggcgagcgcagagaacccagaaag

SEQ ID NO: 103848 - RNA, 73 nt, Homo sapiens
ggaagagacagagagggaagaacccccagggacgggccacgagccgggcccccgagaaaagagaacgcaagag

SEQ ID NO: 103849 - RNA, 49 nt, Homo sapiens
gcccccagcaccaagcagaaggcccagccgcagccccagccccagcccc

SEQ ID NO: 103850 - RNA, 77 nt, Homo sapiens
cggaccgcgggacaagaaaacagcgaggaacaagaccaaggacaaagccgaaccagacccacagccacagaacagcc

SEQ ID NO: 103851 - RNA, 76 nt, Homo sapiens
cacccaaggggggcggaacacggagccgccacaggcaagggcaacaggggcccaggccagaggaaggaggagagcc

SEQ ID NO: 103852 - RNA, 85 nt, Homo sapiens
gggacgccagcgcgggaggcgcccggaccaccaagcaggggagaaagccagagccagacggcagaccaaaggacacggacgagcc

SEQ ID NO: 103853 - RNA, 78 nt, Homo sapiens
cgcgcccggcggggagcgcagcgcgcccgggcgcgccaggcacagccaagagcggaccggcagcggccagcgcagcgg

SEQ ID NO: 103854 - RNA, 74 nt, Homo sapiens
cgcagagcccaccggaaggagaaggaagaggagcggaacccgaaacgggacaaggaaaggaaaaaacgagaccg

SEQ ID NO: 103855 - RNA, 39 nt, Homo sapiens
gaaccaggccaaagacaaacgaggaagccggacggccaa

SEQ ID NO: 103856 - RNA, 64 nt, Homo sapiens
gcaagaggaaaaaaccgaagaaccaaaaacacagggcagcaggccagagaacccaaaagcaaac

SEQ ID NO: 103857 - RNA, 41 nt, Homo sapiens
ccccgagagcgagacacaggcggcacagcaaacacacaaga

SEQ ID NO: 103858 - RNA, 81 nt, Homo sapiens
cgcagaggcccagcacccgacgaaaaacacccggacccaggggaagaggaacaccgggaggacgcgagcggaagagaagca

SEQ ID NO: 103859 - RNA, 98 nt, Homo sapiens
cacggaagcacaaacaaagcaaaagccaaaggaaagcaagacaagccgagaaggggcaccacccagggcagagaaaacagaagagaaaggaccagacc

SEQ ID NO: 103860 - RNA, 68 nt, Homo sapiens
aaggccccaacgcaccggaaccagagacccaagagggagaacacccacgaagcaccgccccacgccga

SEQ ID NO: 103861 - RNA, 72 nt, Homo sapiens
cagacgcagggcgcccccgagcacccagggcagacaccacaagaaggagagcagagacccagggggcagcca

SEQ ID NO: 103862 - RNA, 79 nt, Homo sapiens
cgaccgccaagcagagggaagaggagcgaaaccggccacggaaaacgaagagcgagcccagaggaagcgccagccaacg

SEQ ID NO: 103863 - RNA, 36 nt, Homo sapiens
ggacgccgcagaggcaggagcagggaacgagaagac

SEQ ID NO: 103864 - RNA, 83 nt, Homo sapiens
ggcccggccgccccggagggagacgcgcgccgaggagaacccagcggagcagacgaagaaagagaagcagaacgaagaaggaa

SEQ ID NO: 103865 - RNA, 76 nt, Homo sapiens
cagccagggacaagcgaaggaaacgcgaaaacagcccaagaaaccagaacagaggacagaccgggaaacaagacaa

SEQ ID NO: 103866 - RNA, 78 nt, Homo sapiens
gcgacagacagcacccaagaccagcccggaaccacggcaccagcgaggcagacggggcaccgagccaggaggccgacc

SEQ ID NO: 103867 - RNA, 62 nt, Homo sapiens
aggaccagaccgcccaggaaacggaggccaggccagagggaccaacgaaggcaaacaccaca

SEQ ID NO: 103868 - RNA, 77 nt, Homo sapiens
gcgaaggccgggacccggccccggcccacaggggggggcaaacccgagagaacgggaaggaagggaacacggacgac

SEQ ID NO: 103869 - RNA, 72 nt, Homo sapiens
cgagaagcggcaggcaacgacaagagaggaaagaacccaagggaacagggaggcaaggagccgagaagaccg

SEQ ID NO: 103870 - RNA, 77 nt, Homo sapiens
gacgacggcgagaaacacgaacgacaccgagggaaaagggcacaacaccaggaaacagaaagggaaacacgccgcgc

SEQ ID NO: 103871 - RNA, 69 nt, Homo sapiens
gggggacacccacaggccacaacgcacacgcccccgccaagagccagacagacagaaaggaacacaagc

SEQ ID NO: 103872 - RNA, 73 nt, Homo sapiens
ccagaagcggaaacgaacaaagaggaagcgaaagggggcagacagaagagagacgagcaacccacgcaaaaag

SEQ ID NO: 103873 - RNA, 58 nt, Homo sapiens
aaggcaacggaagaaagcagagagacgaagagagaagcagggcagaaagagcggaaac

SEQ ID NO: 103874 - RNA, 84 nt, Homo sapiens
cgccggggcgcaccgagcccccaggacggcacagccggcccgggccgggagcgggcagaccagaggacaagacaaagggagcaa

SEQ ID NO: 103875 - RNA, 79 nt, Homo sapiens
aaagaaagaaccagacaaagacaaggaacaagaaccacgaagcgcccgagacgccaccacgcgggggagcagagagccc

SEQ ID NO: 103876 - RNA, 62 nt, Homo sapiens
agagaccaccacagaaacagaaggaggccggccgacacaaacagaagaggcgcgggcgcacc

SEQ ID NO: 103877 - RNA, 67 nt, Homo sapiens
ccggccacaggaacaagaaccagggagaagccgcccgaacaccaggacgcccaaacggaacagcgag

SEQ ID NO: 103878 - RNA, 79 nt, Homo sapiens
cccaggccaagcagccaccagcagcccccagagcgggaccacagagccgccaaagggagagacgaaagccaggacacgc

SEQ ID NO: 103879 - RNA, 52 nt, Homo sapiens
gcggaggccaacaaagcaccccgccaggaagaggcggcggcggaggagcccc

SEQ ID NO: 103880 - RNA, 81 nt, Homo sapiens
ccaagaccagaaaccaagaccaaggaagacgaacgcaccccagagccgacccccaccgcaaggaaagaccacagcaagacc

SEQ ID NO: 103881 - RNA, 73 nt, Homo sapiens
ggagggcgccagacggggccggaggcggggaggagcccggccagcccgaggacagagagaggagcgagaggaa

SEQ ID NO: 103882 - RNA, 77 nt, Homo sapiens
cagacaaaagggccaaagaagggagagagcgccccggggaagacggaagagacgccacacagagcgcacgcacagca

SEQ ID NO: 103883 - RNA, 75 nt, Homo sapiens
cggccaacagcagccgggaagccgcgacgccaacaggccaacgaggccagcacggacacacccgggggcgaaccc

SEQ ID NO: 103884 - RNA, 74 nt, Homo sapiens
acccccccccggcggcgggcgggccggccgccggggcggggccagaagcccccaggaggagaacgagcaacgga

SEQ ID NO: 103885 - RNA, 75 nt, Homo sapiens
cgccaacaagacaggcgaccagcccaagaggcaccgcccagcagcagaacagagcaggacacggcggacaggcac

SEQ ID NO: 103886 - RNA, 69 nt, Homo sapiens
acaggcgggggccagaaacgggccccgcgccaggaggcccaccccgccggcggcacaagcgcgggagac

SEQ ID NO: 103887 - RNA, 74 nt, Homo sapiens
ggagcaggacgcggaacacccagaggccagcacaacaccgccgaaagagaagagcgcgaaaagagacacaagag

SEQ ID NO: 103888 - RNA, 71 nt, Homo sapiens
gcacggagcccaagagaaacagcacccaggacacccaaagagcggaaccaaagaaacccagcggagcgccg

SEQ ID NO: 103889 - RNA, 77 nt, Homo sapiens
gaacagacacggggaagcgcaaaaacaagacggggcgccccacagaggggcgacgaggagcggaggagccccaggaa

SEQ ID NO: 103890 - RNA, 84 nt, Homo sapiens
cggaggagaaaggcaggagagaagaggcagcagaagccagggcagcgaaagacagagacccagagcagcaaggcgaaccggcgc

SEQ ID NO: 103891 - RNA, 47 nt, Homo sapiens
gaagggcgacgaaaagcgggcgccaacaagggaagaaagaagagcca

SEQ ID NO: 103892 - RNA, 35 nt, Homo sapiens
aaaacaacgaccaagaggacagcaacacaaggaag

SEQ ID NO: 103893 - RNA, 57 nt, Homo sapiens
aacaaccaccgagcgcacaacaaccaaacagccaagaagcggggcagcaaaggacac

SEQ ID NO: 103894 - RNA, 68 nt, Homo sapiens
ccacacagacagcagaaagacgaaacagaacacgaaagcagggcagcggcaacagacaacgagaaaca

SEQ ID NO: 103895 - RNA, 76 nt, Homo sapiens
aggggagcgaggacacaccacgaaaacacagacagcaggcaaagcccccgacaggggacaggccgcgcaagccggg

SEQ ID NO: 103896 - RNA, 76 nt, Homo sapiens
agcccagcaacacacacaacacacggcaacccagagggcaagcaagaacccccaagaagaaaacagaaacgacagg

SEQ ID NO: 103897 - RNA, 86 nt, Homo sapiens
cgccggagccgcgaggccaaaggcgggaggcggcagaagcagccagaggagggcacaggcggcgcggagcgcgccgagggcagcgc

SEQ ID NO: 103898 - RNA, 60 nt, Homo sapiens
gaccgagagcggaccgagagcgcgaaacgcacgagaaggagagccaccggcccaggcgga

SEQ ID NO: 103899 - RNA, 73 nt, Homo sapiens
gagcaaaacgagccaaacaaaccacgccaggagcggcgaacacgggaaccgacgggagaggaggcggagaagg

SEQ ID NO: 103900 - RNA, 55 nt, Homo sapiens
caggaacacaccagaagaggcgcccgcacggaagagagaaggacgcaagaccagc

SEQ ID NO: 103901 - RNA, 69 nt, Homo sapiens
ccagccacaaaagggaagggccagcgggaggagggccacgggggcaaagagaacacccaggccacgggg

SEQ ID NO: 103902 - RNA, 69 nt, Homo sapiens
gagaaacaagaggaggagggacccacaagaacaggaacccaggaggaacgcaaaaaggaagaaaaacaa

SEQ ID NO: 103903 - RNA, 69 nt, Homo sapiens
gccgaggcagggcagagaagacagccggccagaacacacagaaaagggccaaaggaagaagaagggagc

SEQ ID NO: 103904 - RNA, 69 nt, Homo sapiens
cgccaccgcccacacggccacagcggggaaggcagaccgaccaaacagggagcagcggacaggagacag

SEQ ID NO: 103905 - RNA, 88 nt, Homo sapiens
agaaccgacgaaaaggagcagagcaaaagccacaaaaagcccgccccagcaagaggacggaaaccgagagaacaaccaccggagcgca

SEQ ID NO: 103906 - RNA, 81 nt, Homo sapiens
accagcgggcccccgggggacggcaagcgcgacgccaggcgagaccgccagaggggaaagaaaaagagcccaccaaaagga

SEQ ID NO: 103907 - RNA, 66 nt, Homo sapiens
cggcgcagcgcgcgggcacaagggccgggccggccccagaacagggagaaacacacaacaaaaacg

SEQ ID NO: 103908 - RNA, 67 nt, Homo sapiens
ggcagaagaagaaccgcaaggcaaggaaaggaccccaaagccagaccagggcggagacagaagaccc

SEQ ID NO: 103909 - RNA, 69 nt, Homo sapiens
cccacggacggacgccagccccacaacaagaggaaggggagaagcccaggcgccaagaccccccaacgc

SEQ ID NO: 103910 - RNA, 108 nt, Homo sapiens
gcacggagaggaaacgaggccggagaggaaagagacccgcagagccacagggcaggaacagcaggaaggagaagagccaagaccgcccacaggcagggcggagccgcc

SEQ ID NO: 103911 - RNA, 65 nt, Homo sapiens
gagacggacggaccgccagacggagacagacacagaccaggccaggagaagcacaagaagacaag

SEQ ID NO: 103912 - RNA, 34 nt, Homo sapiens
aaaggaagcgaaaaaggcacaagggacaagcaac

SEQ ID NO: 103913 - RNA, 73 nt, Homo sapiens
ccgcgagccgcgcggcgcggggccccgcggcggaggcacggagcgcggacgcccaggagcgggcgccggcgga

SEQ ID NO: 103914 - RNA, 76 nt, Homo sapiens
gaaaaacggcccgcgcccgccagccaggccaccccgggaacggggaaggaagggccccacaccaaagaaacccaaa

SEQ ID NO: 103915 - RNA, 84 nt, Homo sapiens
caggaccggggggagggagaacccgcgagacccgcaggaacacgaaacagagccaaccgagagggacaccaggggggaaaaacc

SEQ ID NO: 103916 - RNA, 48 nt, Homo sapiens
cgcgccaccgaccggcaccagcaagcaagaaaggaacacagcacccac

SEQ ID NO: 103917 - RNA, 71 nt, Homo sapiens
gaacaagacagaggaaccaagcaccgcaaaccacaaccggagcagcacgaggagcggagaggacacacaag

SEQ ID NO: 103918 - RNA, 72 nt, Homo sapiens
cgcggagacagcgagacccgccaggagcaaaggcgggcaacacaacaaggcgcggacacccagacaagcgcg

SEQ ID NO: 103919 - RNA, 87 nt, Homo sapiens
agcccgcgaggaccgcaccacccgccagcgcccgcccggccggcaccaggacagcgaggcaccagagcgcgcgggaccggacagaac

SEQ ID NO: 103920 - RNA, 74 nt, Homo sapiens
cagagaggcaggaagggccaccacagcacacaccaggcaaccagaagcccacacaacgccaccggccaaacagg

SEQ ID NO: 103921 - RNA, 85 nt, Homo sapiens
cggcggcgggacggcggccccgcgcagcccccggccgcagcgcaggcagcccagcagacaagcagaccggaagaccgacggaaga

SEQ ID NO: 103922 - RNA, 82 nt, Homo sapiens
gccacacgacgcgcaggagacggcccggagccgagaaccaggagcggcagaccgccgccaggaggaggcacgcagcccgaga

SEQ ID NO: 103923 - RNA, 69 nt, Homo sapiens
ccggggaaacaaacacacgcaggcagaaacgggggagaaggaggaacacaaagaggaccagcgacaaac

SEQ ID NO: 103924 - RNA, 87 nt, Homo sapiens
gggagagggggaggcgcggcggccgcagcgccacaaaccagggaaggggaccagcgccccaggacacacagcagcaaagaaaccgaa

SEQ ID NO: 103925 - RNA, 72 nt, Homo sapiens
aacagacaggcaggggacaccagcaagcagagcccagagaagagacagaagaacagcggcagacggaagacc

SEQ ID NO: 103926 - RNA, 81 nt, Homo sapiens
aagggagacacacacggggaaaagaacgccaacaccaaagacacaaaagaggggagcgacggcagcaccggacacaggcag

SEQ ID NO: 103927 - RNA, 64 nt, Homo sapiens
aggcacaccgaaacggaaaggacagggagcacgcgggggcggccacccgcaacaggacgggccc

SEQ ID NO: 103928 - RNA, 53 nt, Homo sapiens
acgagcagggacggcgagacagaaacagacgcggagagcgaggggccaaaagc

SEQ ID NO: 103929 - RNA, 80 nt, Homo sapiens
gcgcaggggcgggaaagacccaggagaagccgcccaaagaacgaacccaccgggggaagcaggcccaacgagagccacca

SEQ ID NO: 103930 - RNA, 85 nt, Homo sapiens
acccgagccggccgaacaccgggcacagccagaggacaacacacacacacaagaaacagggccaggagggggcccagcacaggaa

SEQ ID NO: 103931 - RNA, 80 nt, Homo sapiens
agcggccaggacgacgaggagcagggccgacgcgcagaggcgcgggccagaagagccaaacacaacaaaagacagaagcg

SEQ ID NO: 103932 - RNA, 86 nt, Homo sapiens
gaagacccgccgcgaaccaggcaccagccccgagaggggcccggggccagccgcacacgagacaccaccggcaaagagccaggcca

SEQ ID NO: 103933 - RNA, 75 nt, Homo sapiens
ggcaagagaaggccgcaagaaaaagaaagcaaaccccacgagaacaaagcacggcagaaacggaaaaaaaccaag

SEQ ID NO: 103934 - RNA, 77 nt, Homo sapiens
gacgggcgcgccagcccggggcccgacaagacggccagcgccgcggagaaggaccggggcagccaagcgacgaggcc

SEQ ID NO: 103935 - RNA, 60 nt, Homo sapiens
ggaacccgaagaagaaaggacgacagccagagaggagcagacaagggcccacaccaaagc

SEQ ID NO: 103936 - RNA, 82 nt, Homo sapiens
cccgcgcgccgccgccgaggagaaaggagaagagagcggacccacaccagggaagacaggggagagggggcaccagcgggcc

SEQ ID NO: 103937 - RNA, 76 nt, Homo sapiens
ggggcggcggaccgcggggcgccacggccgcacgacgcgcgggcaccgcgcgaaaggaagaggacagaagcagcac

SEQ ID NO: 103938 - RNA, 80 nt, Homo sapiens
cgcgcccgccggcgccccgcccgggcgcgagagcgcggagagccagagggccgccgaaggaacaccgagccgccgccacc

SEQ ID NO: 103939 - RNA, 78 nt, Homo sapiens
gagcgcggcaagacaccaacacagacggccccccaagaccggagggccagggagggcgaacgaggaaccgaaggcccg

SEQ ID NO: 103940 - RNA, 65 nt, Homo sapiens
ggggaagagccgcgacacgcggaggaagcagcaggacgaagcacgcagagaagccgagacaaaaa

SEQ ID NO: 103941 - RNA, 58 nt, Homo sapiens
cggaagaggacgggcgccgccagacaaaacagaggagaccagaccagaagccccgaaa

SEQ ID NO: 103942 - RNA, 78 nt, Homo sapiens
gcagccccacgccccgcccgaagccgacccgacgcccccaggagcggagaccaggccaaaaggagggaaaacccaccg

SEQ ID NO: 103943 - RNA, 78 nt, Homo sapiens
gcgggcaggagcccgaacccccccgcgccgggagccgggcccgaccagaccgggcagggccggagcgagggagagcag

SEQ ID NO: 103944 - RNA, 69 nt, Homo sapiens
acggacgagcccggagacaggagcccagcacgcagggcaggcacgacgagagagcgaaaagcccagcga

SEQ ID NO: 103945 - RNA, 72 nt, Homo sapiens
gcgaagggagaaagccccggagcccgcagagcacagagaaccacacagggaaagccaaaaacgacacgaaaa

SEQ ID NO: 103946 - RNA, 72 nt, Homo sapiens
agaagaaacccagcgaagggaagcgaaagggggcagacagaagagagacgagcaacccacgcaaaaaggaga

SEQ ID NO: 103947 - RNA, 40 nt, Homo sapiens
aggggccaggaggcgcaaggaagcagccgacacgagcggc

SEQ ID NO: 103948 - RNA, 64 nt, Homo sapiens
gcgacagcgcccggcacaagcccagccagcaaaacccagcagccagaccgccaggcagcgggag

SEQ ID NO: 103949 - RNA, 65 nt, Homo sapiens
aagcacaagccggcccacgggcgcccaggaccccacacaggccccacgggagcgggacgaccagc

SEQ ID NO: 103950 - RNA, 75 nt, Homo sapiens
gcccggcaggccgacaaggaaaagcgagacacagcagaacaccggaggggcggaccagaacaaccccccccaagc

SEQ ID NO: 103951 - RNA, 78 nt, Homo sapiens
aaagaacgcaccggcacagacagaagccaaagaaacaacgaacgagcaaggaagggccaaggcagaccccacaccgga

SEQ ID NO: 103952 - RNA, 69 nt, Homo sapiens
aagcagccaacagcaaagccaggaaaggagcccggggacccgcagaggggacacacgggacagggggaa

SEQ ID NO: 103953 - RNA, 68 nt, Homo sapiens
cagaaagcaccaaggaccaagaaggggggcgcgacagaacacaaggagaacgacggggaacggcaccg

SEQ ID NO: 103954 - RNA, 66 nt, Homo sapiens
gccccgaggccccagaccaacaaccccacgaggagggacgagacaagaggggggccgaaagagcca

SEQ ID NO: 103955 - RNA, 80 nt, Homo sapiens
cagagccaaagaagagggaaaggaacaaccaaacccgaagagggagagacggaagggcccaccccggcaggacaggcgag

SEQ ID NO: 103956 - RNA, 52 nt, Homo sapiens
aagcgggacgcaacacgcgggaaaaacgggccaccaccaaagacccgacaag

SEQ ID NO: 103957 - RNA, 77 nt, Homo sapiens
cgaaaagcagcaccagagcagccaggacccgaaaagccagcaagcgagaccaacaccaacacgagggcggcggaaaa

SEQ ID NO: 103958 - RNA, 74 nt, Homo sapiens
gggacccgcggaaccaccggcgcagcacagcgacggggccgaagagaacaagagcgggcaccccccccggcaga

SEQ ID NO: 103959 - RNA, 64 nt, Homo sapiens
cgacgcgcccggcccggagcccccagcgcagcggccgcggaaccccaaagaggcccggaggaaa

SEQ ID NO: 103960 - RNA, 76 nt, Homo sapiens
caccagagaagcaaacgaacgacagcccggcccgggagcacggaaggccgagaagagacaggcaggccggggcagc

SEQ ID NO: 103961 - RNA, 81 nt, Homo sapiens
ggcacgaaggcaccgggcccagcacagccagcaccgcacgcccgcaagggagcgcggggagacagccagagaagagacgaa

SEQ ID NO: 103962 - RNA, 81 nt, Homo sapiens
aagggagcggaggacacgggggccacaaagccccccggagacgcaaccaaggaggcaggggggccggcccccacccgaccc

SEQ ID NO: 103963 - RNA, 61 nt, Homo sapiens
gaagcccaacaagaaagacaaccagggaagcagaaggcaaggaccccggcaaggagaaaca

SEQ ID NO: 103964 - RNA, 81 nt, Homo sapiens
ggcggcggagcggcgcccaaggggagaagcgcaggcgcgccggccgcgaacccggacccaagaaggaaaccaccacggacc

SEQ ID NO: 103965 - RNA, 76 nt, Homo sapiens
gaggaggcgcaagacgcgaccaaagccgacggggcaaggagaaagccaaagcgaaggacggaaccccacccagagg

SEQ ID NO: 103966 - RNA, 59 nt, Homo sapiens
caggaacaggaaacgacccacaggaacacagggaaaggcagcgcaagaccccgcacgga

SEQ ID NO: 103967 - RNA, 60 nt, Homo sapiens
gaagaaacccgagaggcaaagcgcggcgagcagagaaaccaagagcagcaacagagaaag

SEQ ID NO: 103968 - RNA, 86 nt, Homo sapiens
aacagcagggccaccaggcagagcgggacagccaggaggaagggcagcggcagagcccagagagaaaaggaacagccgaagccagg

SEQ ID NO: 103969 - RNA, 75 nt, Homo sapiens
acgagcgcaggagggacggaccagcggaacaaacaccacccgagcaggccagggacaaccgcaccacgaaggccc

SEQ ID NO: 103970 - RNA, 64 nt, Homo sapiens
gggaccccggagcccagaagacagagggcgaggccagcgaagacgccagaggaagacagaggac

SEQ ID NO: 103971 - RNA, 84 nt, Homo sapiens
acccgaggggggaacaaagagaagacacaccaccacgccaaggaagcgcagaaaggaagagaagaagaagcagaaagggcagga

SEQ ID NO: 103972 - RNA, 44 nt, Homo sapiens
caccggccagcccgggcaaggcagaagccaagaccggcccgagg

SEQ ID NO: 103973 - RNA, 84 nt, Homo sapiens
ggacgagaaggcgccgcacccaagcaggggcaggcagagaccaacaggcccagaaggacagcccagagccaaccagcagcaggc

SEQ ID NO: 103974 - RNA, 81 nt, Homo sapiens
gaccccagagcgacagcccgggacaccaagaaagaacgcaagagcaacgaaccaaagcaaaggaggccgggggaagacgga

SEQ ID NO: 103975 - RNA, 76 nt, Homo sapiens
gcaggcgcagccgggcccggccccagccgacggagcagaaagagagacaccaccacacgggagcaaaggagagagc

SEQ ID NO: 103976 - RNA, 54 nt, Homo sapiens
agcgaacgagacagaacaggaaaaaggggaagaccacaacaagcaagcagcagc

SEQ ID NO: 103977 - RNA, 66 nt, Homo sapiens
ggcggggacgcgcaaacacgccacagccggcccggagaaccagaaaggaaaaccaacacagcggga

SEQ ID NO: 103978 - RNA, 73 nt, Homo sapiens
ccaccaccgaaacgccaaaaagacaccaaaaaggcaaggacagaacccaagcaggccggagaaaagaagagca

SEQ ID NO: 103979 - RNA, 120 nt, Homo sapiens
gcggcagcgcgaggccggagaaacaggcgccgcgggcccgcgcccggccggacccgggcccgaggcgcacgggacggcagcgcggaagaccgcaaaagaaggagaacgcccaggcagagg

SEQ ID NO: 103980 - RNA, 50 nt, Homo sapiens
caacaccccggccaccgacccacaagggggaaacccgcccagggcgggag

SEQ ID NO: 103981 - RNA, 80 nt, Homo sapiens
gaagccgcggcggcagcacgacagcgccggcaacacgcggcacaagacggaccaggccggcacgacaagacccaggcaca

SEQ ID NO: 103982 - RNA, 112 nt, Homo sapiens
gggagagaccagggacaaaagaaacgaaggaacagacaagaaggaacgaaaggggaagaaagggggaagaccgcggccgccgccgacaccacggccggggaagggaaacagg

SEQ ID NO: 103983 - RNA, 52 nt, Homo sapiens
gcccagcgagacgacaccgaggccagccagacgccaggaagccggacgcgca

SEQ ID NO: 103984 - RNA, 66 nt, Homo sapiens
cgaggagcggacgcccaggaccggaacagacgaggaggaaggggacgcagagagaaacgcacaggg

SEQ ID NO: 103985 - RNA, 53 nt, Homo sapiens
ggcccggaccggagggcgcgcgagacggcagagaggcggaggcagggcccaac

SEQ ID NO: 103986 - RNA, 73 nt, Homo sapiens
ccggagcagaaaagagggaccaaaggcagcacagacccgagaagcagggacacccccccccaaccagccaccc

SEQ ID NO: 103987 - RNA, 42 nt, Homo sapiens
accagaggagaagacgagcagaagaccagggggcaggccccc

SEQ ID NO: 103988 - RNA, 66 nt, Homo sapiens
cgaggaaagaggaggaaaacaaaagcgcacaggaagaacaaagggaagaagccaagaggagaaaga

SEQ ID NO: 103989 - RNA, 77 nt, Homo sapiens
ggaggaaggccgggggaaacggggaagaggaggcaggagggaccagaaccggacgaagaaccaccagaaaaaccagc

SEQ ID NO: 103990 - RNA, 75 nt, Homo sapiens
gcgagacagagggccaaggcaacacccgacgaacagccagccgggacggagaccaaagcccgccacaccggaaca

SEQ ID NO: 103991 - RNA, 76 nt, Homo sapiens
agagcaagaccaaagagcccgccaaaggcccaaaagcacgaagccagggcgaacagcagacaaagagacgggagcg

SEQ ID NO: 103992 - RNA, 69 nt, Homo sapiens
agcgggaaagacaacccgaagggggccaggagaagaagaagaccggagccaaagaaggaaggaaaacca

SEQ ID NO: 103993 - RNA, 61 nt, Homo sapiens
cggccagcggcccccggcaggcgcccgagcacgccaaccccaaccccacggacagcgcccc

SEQ ID NO: 103994 - RNA, 72 nt, Homo sapiens
caccacgagggcaggagcagcaccgaccagaaaccagagccccggccagaggacgggacaccaggccacagg

SEQ ID NO: 103995 - RNA, 58 nt, Homo sapiens
ggcaaccgcaagacaaaagaggagcaaaagaacagaagggagaagccacaaccaaggc

SEQ ID NO: 103996 - RNA, 54 nt, Homo sapiens
ggggggacggggaggaacacccaggaccgcaaagcaacgggaccgaagacaacc

SEQ ID NO: 103997 - RNA, 84 nt, Homo sapiens
gggccccaacacccagagacgaaagagcagagaggagcccaggggaagagaggggccgaggggggcacacgaggaaacgagcgg

SEQ ID NO: 103998 - RNA, 79 nt, Homo sapiens
gcgcagcggccgcagcagcagcggcagcacaggcacacagcaaagaggcagaagacagccacacaggcacccacccagg

SEQ ID NO: 103999 - RNA, 75 nt, Homo sapiens
gacaacaccaagggacaacaaggaccacaaggagggaccagccagcaaagacagagagaaagcaccgggaggaaa

SEQ ID NO: 104000 - RNA, 83 nt, Homo sapiens
cgggccgcgaaccgcagacagcggccaagaagacacaaaggacggaggcacggcagcaagaagggacacgaggaacccaggga

SEQ ID NO: 104001 - RNA, 80 nt, Homo sapiens
ggcaccgcgcgaagcggccaaagccgcccagacggccaccggcgggaggaacaaaagaccaggcagaggagaagcgcagc

SEQ ID NO: 104002 - RNA, 48 nt, Homo sapiens
caaacgccggacaaccggccaagcagccagcgaggcaagggaccagac

SEQ ID NO: 104003 - RNA, 59 nt, Homo sapiens
cccagcgcggcagggggacacgcccccgcccagaccgcggccaggagccaagaagacca

SEQ ID NO: 104004 - RNA, 54 nt, Homo sapiens
cgggggaccacgggggcaaaccccacagcggcaggcgacacgagacccacgcca

SEQ ID NO: 104005 - RNA, 59 nt, Homo sapiens
caaagcagaacgaaaagaaggagaagagaccgacgaacaggaggagcccggccaggagc

SEQ ID NO: 104006 - RNA, 84 nt, Homo sapiens
acgcggcggcggcggcagacggagccgggccccagcggcaagggcggagaacggaaaagcaccaggaagcagagaggaccgcag

SEQ ID NO: 104007 - RNA, 74 nt, Homo sapiens
gaacgggacaaagcggccagggagcacagaacaaacgccaacgaaaaacaaggaggaacagggaaagaacgaaa

SEQ ID NO: 104008 - RNA, 96 nt, Homo sapiens
cgcagagcgcacacgcggagcccgggccgggggcacgagaccacgccaagagcagcgaccgggcacccccccgggaagaaaacagagcaacaaaac

SEQ ID NO: 104009 - RNA, 107 nt, Homo sapiens
agagggaccgcaggcaagaaaacaagccagggccccacgacacaacgccaacaagcacaagccaggagaggcagagaccagggcacgcaggagaagacaacacggcc

SEQ ID NO: 104010 - RNA, 60 nt, Homo sapiens
gagaagagaaagagacgcaggcccgagagcacccagccccagcgagcgaccaccagcagg

SEQ ID NO: 104011 - RNA, 55 nt, Homo sapiens
caacccaggcaaccaacagacaacaggcacaaagagagaaggaacacccacaggg

SEQ ID NO: 104012 - RNA, 72 nt, Homo sapiens
caagccaacgaggccccgcagcgacgacggacagcaaggaaccccgaaaaaagcgcaacgaaaagagcggag

SEQ ID NO: 104013 - RNA, 69 nt, Homo sapiens
gagcaaggaagaccaaacaacaggcaacagccaaaggcgccagcccagagacacggggggaacgacgaa

SEQ ID NO: 104014 - RNA, 72 nt, Homo sapiens
caagggagcgcacgacccacgcggaacggaagggccaaagccccaagaacccagccacgcaaagcggggaga

SEQ ID NO: 104015 - RNA, 76 nt, Homo sapiens
cagcaaggaggaccgagagcaagagggagaggccaggaaccaagcacaggacgcggaggggagcaggggaccggag

SEQ ID NO: 104016 - RNA, 80 nt, Homo sapiens
gcccgggccacccccggaccccggagaagcagaggaaaagacacaaaccgacccagcagaccacgggaggggaaaaagag

SEQ ID NO: 104017 - RNA, 70 nt, Homo sapiens
cccaaaggcgggagcaggaggcacgcagaccaccgaaaggccggagaggggaagggcacgagaagaaaag

SEQ ID NO: 104018 - RNA, 72 nt, Homo sapiens
agaacacaagcaagcaaggcacaccacggaaggccccacccccaaccaaccccggggccaacggagcgccac

SEQ ID NO: 104019 - RNA, 70 nt, Homo sapiens
gagacagcacccaaccacccaacacagaagaagggagcagaagaggggaagaaagagacccgcgggcccc

SEQ ID NO: 104020 - RNA, 79 nt, Homo sapiens
gcaaagcgaaaggcaccgcaacaacgcccagcgaggccgagacgcaccagagccggaccggggacgcgaagcaggcccg

SEQ ID NO: 104021 - RNA, 66 nt, Homo sapiens
accccacaggacggaggcaaaacacccaagaggcccacgcggaccggcagcgccaccggaccacca

SEQ ID NO: 104022 - RNA, 36 nt, Homo sapiens
cccggggcacacacgcggggggcagaacaggccaac

SEQ ID NO: 104023 - RNA, 55 nt, Homo sapiens
cccccccaccaccacagccccggaggacagggaggccaagggaggacaccaggcc

SEQ ID NO: 104024 - RNA, 81 nt, Homo sapiens
cgcgggcaacagccccccgccggcggccgccccccacgaccgaaagaggacagcgcccaagcccagaagcgccagcggaca

SEQ ID NO: 104025 - RNA, 88 nt, Homo sapiens
gagcgaagaagccggaagaagagccagggcagcaagaacccagaagaccggacaaggagcgcaggacaccaggggggaaaaaccacac

SEQ ID NO: 104026 - RNA, 77 nt, Homo sapiens
cgccccacagaggggcgacggagagaaaagaaccacgcgggaacagagcgacacccagcgggggcagcggaaaggaa

SEQ ID NO: 104027 - RNA, 76 nt, Homo sapiens
aacaccaacacgcacaagacggacgaaagccagagaaaaagcggagaaaaggcacgacgagccgccgcacccaggc

SEQ ID NO: 104028 - RNA, 77 nt, Homo sapiens
cgcccgccagcgcccggccgccggccagagccggccaggccgcagggcgaaaccgcaccacgagacccacgaggccg

SEQ ID NO: 104029 - RNA, 44 nt, Homo sapiens
gcaaacgagagacaacgacaagccagacgacagcgagggcaggg

SEQ ID NO: 104030 - RNA, 90 nt, Homo sapiens
ggagccaggaagccgggagccgagacccggggcgggccaggcagcccaggacgcggaccagaacacgacacgccagcaacagcggaccgc

SEQ ID NO: 104031 - RNA, 75 nt, Homo sapiens
gccgcaggcaggaagaacaggaccgggccaagggacaagaaaggaccagccaggcgcaggagccaaagaagaacc

SEQ ID NO: 104032 - RNA, 73 nt, Homo sapiens
ccagcggaagaaccccccgggagccagaccggcaccgaagaccgaaccgcgaacgcgcagagaaaggacacaa

SEQ ID NO: 104033 - RNA, 82 nt, Homo sapiens
aacacggaacacgagcgagacccggcgggggaacccaggacagaacaaggcagcccgagacaaaggcagggaggaagggaac

SEQ ID NO: 104034 - RNA, 84 nt, Homo sapiens
ggggcgccacgggggccagaagcagaacagccagcagaagcacaccaacgacaggcccgaaagaaggcgagcacaggagaagag

SEQ ID NO: 104035 - RNA, 58 nt, Homo sapiens
cggccagcacccaccgagaaggccagcagcgcagccgcgagggcaaagaagggccacg

SEQ ID NO: 104036 - RNA, 79 nt, Homo sapiens
aacaggcgccggggcccccgcggcgccgggaggaggccggggccgcgcgagggcgcccagcgacaagggaagcagggac

SEQ ID NO: 104037 - RNA, 77 nt, Homo sapiens
gccaggacacagaaccgaggggggagaaccagcaaacccggcagccggccggcaagagaggcgaaacagcagggaga

SEQ ID NO: 104038 - RNA, 81 nt, Homo sapiens
gcaggacacacgaagccgagaggaaagccaggccagaagaaggaaggccggggaggggacaggaaagacacaccaccccac

SEQ ID NO: 104039 - RNA, 111 nt, Homo sapiens
gcggccccacccaaaccgcgaagagccccaaaccccacaggggagggacccgggaaggaaagcaagagccacccaagaaacaccggcgaggagcgcgggaaagaaaggggc

SEQ ID NO: 104040 - RNA, 77 nt, Homo sapiens
cccacagggagaacagggcagaacgaggggaggaaagcaggaccacgcggcgcgggagagcccgcggggacaaggac

SEQ ID NO: 104041 - RNA, 78 nt, Homo sapiens
gcagcagccggggggaaggccaagaggcggcgggagaccccaaccgcagagcgcccgggaaagggagcagcaccggcc

SEQ ID NO: 104042 - RNA, 79 nt, Homo sapiens
accggccacgaaaaaccagaggaaaaaccacaggaggagacacgaggaggaggcaaaacagacagaacgcagaaagcag

SEQ ID NO: 104043 - RNA, 77 nt, Homo sapiens
ccgcgccgggagccgggcccgaccagaccgggcaggagaggagccaagcccaacgggacgggaaaacggccacagcc

SEQ ID NO: 104044 - RNA, 56 nt, Homo sapiens
ggaggaaaaccgacgaagcaacacgggaggaaacgaaccacacaccagccaccaag

SEQ ID NO: 104045 - RNA, 47 nt, Homo sapiens
ggaacaacaagcaggcaggcgacggacaggcgacagggcccgagcca

SEQ ID NO: 104046 - RNA, 77 nt, Homo sapiens
gcgcacccgcaggaacccgccgagggagggcgcgccgcccgggcggcagaggaagcggaaagcaccagggcaaaaga

SEQ ID NO: 104047 - RNA, 64 nt, Homo sapiens
caaaggcagacgaaccacaaggaggaaaggacagacagccagcaaagggggagagcaaaacggc

SEQ ID NO: 104048 - RNA, 82 nt, Homo sapiens
gaagcgcaaaaacaagacggggcgccccacagaggggcgacgccgccaggccaaacagcgcaggcccgaaggcagacgggac

SEQ ID NO: 104049 - RNA, 49 nt, Homo sapiens
ggaaacgaacggcccgaccagaacagacagcgacgagaaggccacgagg

SEQ ID NO: 104050 - RNA, 94 nt, Homo sapiens
gaccccccggcaggagaggaagccaacgacccagccgaggagcgaacaagaagggccaacaaggaccaaagggacacagaagacaaagcaggac

SEQ ID NO: 104051 - RNA, 82 nt, Homo sapiens
gcccgcggagaggaggcagacgaggcagcaggccaacggaccacaccaaaagccaccaaaggaacacgccaggaaaccagag

SEQ ID NO: 104052 - RNA, 78 nt, Homo sapiens
cagaaccaaggaccagcgcagacgaccaaccccgccaccggcggcggagaggaaaacgaacaagcgagaccaacgcgc

SEQ ID NO: 104053 - RNA, 80 nt, Homo sapiens
ccagagcccacacccgcagagcgaggaccggaagggaccagccccgccaaacaggcagaacgacccggcggagccaagca

SEQ ID NO: 104054 - RNA, 72 nt, Homo sapiens
gcgggggcgggcccgggacgcggcgccacgccggggcagccggacgagcgagcaggagaccgcggagaagaa

SEQ ID NO: 104055 - RNA, 74 nt, Homo sapiens
ggaaagcagaaaaagaaagcagaacagacagagaagggaccagccgcacggagccgggaaaccgaagaaggcag

SEQ ID NO: 104056 - RNA, 81 nt, Homo sapiens
ccaccgacaggacggcaggaacagcaccacccccaaaacgggccaacgggacacggccaacacgggaaggaaaagcgggag

SEQ ID NO: 104057 - RNA, 36 nt, Homo sapiens
ggagcagggaggccacacaggacgccggacagaccc

SEQ ID NO: 104058 - RNA, 77 nt, Homo sapiens
gacccaagcggagggcgacacgagaacaaaagcggagcgacaaaagagaagaccagaaagaaaagaccgaagagaga

SEQ ID NO: 104059 - RNA, 92 nt, Homo sapiens
ggagacgcagcgagagaaggcgcaaggcgacgaaaggagaccgcgccgaggagcaccgcccggaagaacgccagagaaagaaaggagaagac

SEQ ID NO: 104060 - RNA, 76 nt, Homo sapiens
aaagagggaggggcccccaaacggggccggaaaagggcaaaagggcaacaaggaccaaaggagaaaaagcgggaga

SEQ ID NO: 104061 - RNA, 80 nt, Homo sapiens
ggccccggccagaaggaccggcggacacgagcagacccaaagacgccacagaccacacagaaaacgcacggagaggaaag

SEQ ID NO: 104062 - RNA, 74 nt, Homo sapiens
agaggaaacgaccggacacacaacaagccgagagacggaaaagaacaaacaacacaagcgagagagaaggaggc

SEQ ID NO: 104063 - RNA, 48 nt, Homo sapiens
cgcagggcgcccccgaggagcggaggagccccaggaaggcgccaaagg

SEQ ID NO: 104064 - RNA, 80 nt, Homo sapiens
ggcgccggcggcgggacgaagagggacgggcccgcggcgagcgagcccgaggacggcgcggggccacaccaacaagacaa

SEQ ID NO: 104065 - RNA, 70 nt, Homo sapiens
cgcggccggagcccagccgcagcggaacagcacgaggaaagaacaagcccccagggaccgcccggggaac

SEQ ID NO: 104066 - RNA, 50 nt, Homo sapiens
gagagaccgaggagcaacagaaaggcgaaacagaaagcaggcaggggagg

SEQ ID NO: 104067 - RNA, 66 nt, Homo sapiens
caaacccacccagcacaccccgcgaaaggaggaggcacagagcccccgcgggcgcacacaggaagg

SEQ ID NO: 104068 - RNA, 71 nt, Homo sapiens
gaagaaccaaagaagcaaaacacgagcccgcagaaaaaccggcaggcacaacaaaaagggccgcagaccca

SEQ ID NO: 104069 - RNA, 86 nt, Homo sapiens
agcgaggagacggagagaacgaggcggaggagcccacagaagaagggaaaaaagagcgcgccaagaacgcgaacccccgcgcggag

SEQ ID NO: 104070 - RNA, 76 nt, Homo sapiens
ccagcgggggaaccggcgcgccggcgcgcggcgcggacaggcccaaacgaaaccaagggagggaaccgggaacggc

SEQ ID NO: 104071 - RNA, 70 nt, Homo sapiens
cagcagacgcaccaaagggacagaaccaaagagaaaacccaggacaacccgaaaggcaagacgagaaggc

SEQ ID NO: 104072 - RNA, 40 nt, Homo sapiens
accaggaggcgagcaacagggcaacagcgcagcccggaaa

SEQ ID NO: 104073 - RNA, 55 nt, Homo sapiens
acacaagcggcccagcacccaccagcggacggcccggggcgccggcacgggggcc

SEQ ID NO: 104074 - RNA, 77 nt, Homo sapiens
ggaggacgggggaagagacacacccgaggcaggagcccccagggaacagcaacaagcagagacgccaggggcagaag

SEQ ID NO: 104075 - RNA, 83 nt, Homo sapiens
agagcccgagccaacggaggaggccgagaagaacccacagaggggaagagagggaagggagaaaaagccccaccacacaacca

SEQ ID NO: 104076 - RNA, 74 nt, Homo sapiens
gcaccaaggaaagcagaagacaagaaaagaccaggcacggacacggaggcgcggggggaccacgaagggaaggc

SEQ ID NO: 104077 - RNA, 77 nt, Homo sapiens
ggcaggaacagacacggggaagcgcaaaaacaagacggggcgccccacagaggggcgacgcagcaagcgcagaacca

SEQ ID NO: 104078 - RNA, 54 nt, Homo sapiens
gcgacagcccgggacaccaagaaagaacgggggggcgcaagccagcgcccaggg

SEQ ID NO: 104079 - RNA, 73 nt, Homo sapiens
accgagaagaggacccggagagggaaacaaccccacgagaaggccccagcaacccccagccacaacgcgaacc

SEQ ID NO: 104080 - RNA, 66 nt, Homo sapiens
agaaaaggccccaaaacagagggaagaaaacagagaagagggcgaaagagaggaaagcggaaacac

SEQ ID NO: 104081 - RNA, 80 nt, Homo sapiens
gccgacgcaaggccacagggcacgcaagaccagccgaagccgcggggccggacaaaccggcgaccacacacggggacgac

SEQ ID NO: 104082 - RNA, 75 nt, Homo sapiens
cgcgagacagacaaggcgccagaaaggagacaaacagcagcgcagggcaaaaagaggcaaagcaaagaagaggga

SEQ ID NO: 104083 - RNA, 75 nt, Homo sapiens
cagcaaaaacggaaccagcgcggcacaaagaagggagacaaagcaacgcaggcagggcccaaaacagaagccaac

SEQ ID NO: 104084 - RNA, 67 nt, Homo sapiens
cgaagcagggcacaaaaccaaggccaagcaagggcgcaccagggcagcagccggcgcacacaacggc

SEQ ID NO: 104085 - RNA, 84 nt, Homo sapiens
gcacagccagaccaacccaaaggaggaaccacgaaagacggagagagaaaacagagaagaagcagaggggccaacagaaagaga

SEQ ID NO: 104086 - RNA, 39 nt, Homo sapiens
caggcacacacggcagcgcaggagaccagagagcggcca

SEQ ID NO: 104087 - RNA, 66 nt, Homo sapiens
gaaagggaagggcaagggggccgaagcaaccaggagcggaaaagcagaaaccccagccgacagccc

SEQ ID NO: 104088 - RNA, 72 nt, Homo sapiens
caagagcaaccagaaagagagggacaaggaaccggcacaggagcccagaggcggggaagggcacagccacca

SEQ ID NO: 104089 - RNA, 91 nt, Homo sapiens
ccgagaccgcggccgggaccgagggagacacacggacacgggaacggacggaggaaggaggcaggcagcccagcagacgcccgagaacggg

SEQ ID NO: 104090 - RNA, 51 nt, Homo sapiens
cagcccccgagagcggaacaggcgaggcgaagagggagagaacaaggaaga

SEQ ID NO: 104091 - RNA, 67 nt, Homo sapiens
ccagaggcaagacagccggcagaccgccagcacaacagaaaggaacccgagaacagagaaacgcgag

SEQ ID NO: 104092 - RNA, 78 nt, Homo sapiens
caccacacagacagaggcccagacacacggcggcacacgcagaccgcaccaggagacaagggcgcgaccagaagagaa

SEQ ID NO: 104093 - RNA, 75 nt, Homo sapiens
gcgcgccaaagggcgacggcacacagagagaccgacaggacagggagcggccagaaaaccaacgagaaggaggga

SEQ ID NO: 104094 - RNA, 79 nt, Homo sapiens
gaggcccaagacccacaacaaaagacacgcgggcacgggcccggaccagccaggcccggcggcccagcgagccggcgcg

SEQ ID NO: 104095 - RNA, 78 nt, Homo sapiens
caggggacaggcccacgccagacacgacgcggcaggaacccggcccagaggcgaccagacaagccagcgaaaccagcc

SEQ ID NO: 104096 - RNA, 75 nt, Homo sapiens
cgagcaaggaaacaggaaaagcaaccacgccaaccagccgaaggggggcaagccgagcggcaacgaaacaggagc

SEQ ID NO: 104097 - RNA, 41 nt, Homo sapiens
gaaaacccacgaagggaacacgggagagggcgaaacggggc

SEQ ID NO: 104098 - RNA, 79 nt, Homo sapiens
gagaaggcagagcggggcacccacccaaggaacgagaaggggaacggaaggcgcccaccacagagcaagagagggccaa

SEQ ID NO: 104099 - RNA, 80 nt, Homo sapiens
cccacacaacccaggcaaccaacagggagggcagaacgacgaaagacggacaggacgagggagagggcgaccacaggcca

SEQ ID NO: 104100 - RNA, 67 nt, Homo sapiens
agggcacacaaacagagcagcacacagggaaacagcagcggacagcgggcccaacacccccggcaac

SEQ ID NO: 104101 - RNA, 35 nt, Homo sapiens
ggaacagacgagcaagagaggacaagcgacaaggg

SEQ ID NO: 104102 - RNA, 111 nt, Homo sapiens
agagcccagaagcaaaagagacccacagaggagagaacgagccagacagcacagggggacgaaacgaacgacagaaacccaagcagagaaaggggagaaagaagacagaca

SEQ ID NO: 104103 - RNA, 71 nt, Homo sapiens
ggaaccacaccagggcacaaaaagccggaggacagagacggcgcggacggacagaaggaacccccaccccg

SEQ ID NO: 104104 - RNA, 72 nt, Homo sapiens
gaccaagaaccaggaaacaacgggcaaggggaagaaaaagggggaagacaaggcagggaaagagggacaaca

SEQ ID NO: 104105 - RNA, 38 nt, Homo sapiens
cccgagagcgggacgcagagaccaaaacgagaaaagga

SEQ ID NO: 104106 - RNA, 83 nt, Homo sapiens
gaaacgcgaaaagggaccaaaaccggaagcgagaagagagaacgagagcgcaggagaagcacggagacagaacggagcgcggg

SEQ ID NO: 104107 - RNA, 92 nt, Homo sapiens
ccccggaagcaccaggagccacagacgaccggcacacagcagagaggcaagaacaacccaagaaggacagcgcgacagaaggacagcagccg

SEQ ID NO: 104108 - RNA, 86 nt, Homo sapiens
cgcagcggcaacagaacgaaaaacagggcggcagcaaggagcgcccacggcagagccacaacggaagcagagcggcgggagacagg

SEQ ID NO: 104109 - RNA, 81 nt, Homo sapiens
ggcaaaaaaaaagcgcacacacgacggaagaagaaagccagaggagaaagacagagaccgagcagacaggagaagagagag

SEQ ID NO: 104110 - RNA, 83 nt, Homo sapiens
cgcgagcccaaaccaagcgcgacaagaaagaacccaggccaagcagaaggcaggaaccagagagcaaggagcgcaccgcagcc

SEQ ID NO: 104111 - RNA, 74 nt, Homo sapiens
caaacggaccaccacgagcacacgcagaagggggaaagagaccgggacagaacagaagcacagcccagaacgcc

SEQ ID NO: 104112 - RNA, 44 nt, Homo sapiens
cgcagggcgcccccgaaaagaccggcagaaaccaaccaaaaacc

SEQ ID NO: 104113 - RNA, 67 nt, Homo sapiens
aaagacggcaagggcagccccgcagaaagcaacaaagcgagagcacaagaaaacagccccgagcacc

SEQ ID NO: 104114 - RNA, 71 nt, Homo sapiens
gggcggcgaaagaagacagcacagaaaaccaggcaaaaaccaagacgaagggacagacaggaaggcaaggg

SEQ ID NO: 104115 - RNA, 75 nt, Homo sapiens
cagaaccgaaacggaaagaagcaccggagagacagcacagcacccacaaagcaacggaagccgagaccaggggga

SEQ ID NO: 104116 - RNA, 81 nt, Homo sapiens
ggaaagacggaagcccagcgcaaaccaacgggacacaaaggacggcaacgagggagaaggacagaagaaagccaaagagca

SEQ ID NO: 104117 - RNA, 74 nt, Homo sapiens
gaggagaagacaccaaaaagcaaacggaccagaccgaccaccaaaaagcgccggcagcagaacaagccacggag

SEQ ID NO: 104118 - RNA, 89 nt, Homo sapiens
ccgagaaggagaacaccccgagcgaggccaacccaggaggaggagagccggcccaacagagaacggcaaacagcgagaaaccacagaca

SEQ ID NO: 104119 - RNA, 105 nt, Homo sapiens
agccccacgcgccggccggaggggcgaagaggacgagggggccaaggcccccgggggggagaggcaccagcaacagaccaaccgcagcaagcacagagacaggaa

SEQ ID NO: 104120 - RNA, 80 nt, Homo sapiens
aggagcgagcggacccgcgaggaaggccggcccacagcccaaaaagaaacaggaccgaaagccagagcgaagccaaagcc

SEQ ID NO: 104121 - RNA, 65 nt, Homo sapiens
aaaagagaaccaaagggaagcaagaaccgaaccaaaggcaagaaccggagcaggagaaaagccgg

SEQ ID NO: 104122 - RNA, 79 nt, Homo sapiens
cgcgcgggcagggcggaggggcgcgcgggaacaccggagcccgcgggcagggaaagagaagggcgagaccacgacaaag

SEQ ID NO: 104123 - RNA, 63 nt, Homo sapiens
caccggcacaacacacaaagacgaaggagcaagggcaacacccggagagaagagccgcaacca

SEQ ID NO: 104124 - RNA, 74 nt, Homo sapiens
aggggaggcaccggcagcggacccgcccaggacgaaccaagaaacaaaagggaagaccggaacggagacgcaca

SEQ ID NO: 104125 - RNA, 69 nt, Homo sapiens
cggagaggaacgggcgacgggcgcggccaggggagcaaagaaaacaacccgcgcacagaagggagcggc

SEQ ID NO: 104126 - RNA, 75 nt, Homo sapiens
ggcagcacgccccccaggaccggagaacaaggccggcggaaccagcgagcacgggggggaagacacacggacggc

SEQ ID NO: 104127 - RNA, 72 nt, Homo sapiens
gaaaaacaccaaaggaaagcagcgaacaccccagcggagaggccaagaccggcgggagccccccccccaagc

SEQ ID NO: 104128 - RNA, 76 nt, Homo sapiens
ggccaaaaccgaagaggaggacgggcacgagcaaaaaaaagccccgagcaacaaaccagggaacgacgcagcaaag

SEQ ID NO: 104129 - RNA, 79 nt, Homo sapiens
gggggaaccaccggagagaaaacagacgacgaggagacccggggaacggggagaggcggcggcgccacagacgcgggca

SEQ ID NO: 104130 - RNA, 68 nt, Homo sapiens
ggaccaacccaggacccccccacagaaagccagaggggacggcgcgaagaagagaagacaggaacggc

SEQ ID NO: 104131 - RNA, 81 nt, Homo sapiens
gcgggaggaccaaaccagagggacagagccgggcccgccgaggcccggagggagagaaggacagacccgagaaaccggaca

SEQ ID NO: 104132 - RNA, 68 nt, Homo sapiens
cagccgaaagggcccaccgcaaggacggagaaggccaaccaggagcaaagaaaaaggaagaaacaaac

SEQ ID NO: 104133 - RNA, 53 nt, Homo sapiens
cagaggacaaggcagcaaagaagagaggaggagagaaagaaagccagcgcaac

SEQ ID NO: 104134 - RNA, 53 nt, Homo sapiens
ggaaagccgcacccaagccacagaggcagaggacagacacaaaaagacgacgg

SEQ ID NO: 104135 - RNA, 80 nt, Homo sapiens
agaacgggcacagcagcggaaaaacacagagggcacacggcacagaccagaccccgaaaagagcccaacaggaaaagaga

SEQ ID NO: 104136 - RNA, 72 nt, Homo sapiens
aggagagaccagaggaggaagagcaagcgggggaccgaacaaggcaaaagggggaccagagcacgaagagag

SEQ ID NO: 104137 - RNA, 82 nt, Homo sapiens
gcgcagccccaagacagagcgcacccggcaggcgcaacagagcgccggcgcgcaccccccggaggcggccgagcccacgcga

SEQ ID NO: 104138 - RNA, 83 nt, Homo sapiens
acagccagaccgagagcagccgccggggcggagggccagaagcccccaggaggagaacgagcaacggaagccagaagaagcac

SEQ ID NO: 104139 - RNA, 71 nt, Homo sapiens
cgcgccacacaggggaaaccaccccggaagcaagcaaagggaagagcaagggacaacagacaccaaacagc

SEQ ID NO: 104140 - RNA, 76 nt, Homo sapiens
gcacgcgggcgggagcgccgccccgccgaaagcccccggaccagccaccgcgccccacagccaggaccccaggagc

SEQ ID NO: 104141 - RNA, 77 nt, Homo sapiens
aaacaagaccagaagcgcacgacgacgccagaggaggccaagagacccaaaaagcgccagcgcccgggagcgggcgg

SEQ ID NO: 104142 - RNA, 78 nt, Homo sapiens
ccggaccgaggaggcagcgcggggcagcgcgagccgggaagggcagcggggaagaagaaaaggaaccgaggccccccg

SEQ ID NO: 104143 - RNA, 75 nt, Homo sapiens
cgagcgggcagcaacggcaggcacacagacaacccagggacgaaggaagaaaccaaacgaaacacaacgaccaac

SEQ ID NO: 104144 - RNA, 78 nt, Homo sapiens
aggaagggcaaggaccggcaaagccgaagaggacacagacggaagggagggccacccacggcaggcccagccgcaaca

SEQ ID NO: 104145 - RNA, 79 nt, Homo sapiens
gggcgcgcagcaagggccggccacggagcggcccgcaagcgcaccccaccaacaaccgacgagcggcagccgaagagac

SEQ ID NO: 104146 - RNA, 86 nt, Homo sapiens
acaagcccgcgcacaagaacccgggcccgcgcaggacgaagggccgccgggcagaagcacgaggacgagggcggcacgccccgccc

SEQ ID NO: 104147 - RNA, 82 nt, Homo sapiens
cggcgcgggcggggcggaggcgaggagaaggaggagcgggccgggaggccgccgccagaagcaaaccagccccagaaaagaa

SEQ ID NO: 104148 - RNA, 77 nt, Homo sapiens
acagccaaagaggaaaaaaacaccagagacgcagcaaaccacaaaggcaagggccaggaaaagcgcaaagaccacgg

SEQ ID NO: 104149 - RNA, 102 nt, Homo sapiens
aggaggagggcagcgcccggccggagcgcgccaagccgaaaggcacccgaaaggggaaggaaaagaaggaagaacaggcacagcccggacccaggggcgaag

SEQ ID NO: 104150 - RNA, 67 nt, Homo sapiens
gccgaagaaaagagcaccagggcccccaaggaagacagcacgagggaacagaccggaaaacgagaaa

SEQ ID NO: 104151 - RNA, 82 nt, Homo sapiens
agcgccgcccgggaggcagcggcggaggagcggacgggccccgcggggcccgagggcaaggagcaggagacggcccaccgaa

SEQ ID NO: 104152 - RNA, 63 nt, Homo sapiens
caagaggagagcagcgccacgaaaaaacccgacgaaccaaacccacgccgacaccacccagcc

SEQ ID NO: 104153 - RNA, 89 nt, Homo sapiens
cggcggccgggagggaggcggcgccgcggccgcgcggacggacgccgccgccggcgagggagaagaaccaacaacggaaaaccagcggg

SEQ ID NO: 104154 - RNA, 102 nt, Homo sapiens
ggagcggagaggagggccgacccccccgccggggagggcccagcgcaccgacagggaagaaaagcaaagagaaacagaaggccaaacaaaagaaaagcggca

SEQ ID NO: 104155 - RNA, 100 nt, Homo sapiens
agagccaaaagagccaggaagggccgcccaaaaaagagcaggaaacgaagaaacgaaggaggcccaaccacaaaaggagccgacggaacccagacggaga

SEQ ID NO: 104156 - RNA, 72 nt, Homo sapiens
gaaggcagaggcgcaacagcgcgaagcggacaagcacaaaacacaagggccagcaagcaagacagcagaggg

SEQ ID NO: 104157 - RNA, 40 nt, Homo sapiens
ccccgagcagcgggacacaggagggaacgccggcgcaaaa

SEQ ID NO: 104158 - RNA, 58 nt, Homo sapiens
acagaaaaaagaggaacccaccacaaagggcgggaaaccaacccgcaaggcagaacca

SEQ ID NO: 104159 - RNA, 76 nt, Homo sapiens
ccccggagcacgagcaggaaggccaggaagaggagagcagcaagcggcgaaacaggacagcaagaacgcggacgga

SEQ ID NO: 104160 - RNA, 76 nt, Homo sapiens
aagaaaacaaagcaggaagcgagaaaagcggagcaccaggcggccagagcagaggccggagagaggcgcaccaggc

SEQ ID NO: 104161 - RNA, 69 nt, Homo sapiens
gacgggacgaggaggcgaaggaccgccccgccaggccacaaacgaacagcgaaacggagaacggaagaa

SEQ ID NO: 104162 - RNA, 78 nt, Homo sapiens
gcccaccaccacgagcgggagcgaagagggaaccagcgcgcggcagccgcgacggcgacgcaccagaaacggaccgag

SEQ ID NO: 104163 - RNA, 55 nt, Homo sapiens
gagaacaagcaccaaagcgaaggagggccgcaaggaggagggcgccagcgaaccc

SEQ ID NO: 104164 - RNA, 84 nt, Homo sapiens
ccacacggagaggcccggcggcgcgcccaaccggcgacggaaccaagggcggaacagaacgacaggagaacagaccagagcgaa

SEQ ID NO: 104165 - RNA, 47 nt, Homo sapiens
agggcgcaggccaagaggaggagaaggagacggcccaccgaaggaaa

SEQ ID NO: 104166 - RNA, 81 nt, Homo sapiens
aaggaaccggaggcgcagcggagcaagaaaggccaaagcaccaccccaggcaaaagaacaacgccagcagcagagcacaac

SEQ ID NO: 104167 - RNA, 69 nt, Homo sapiens
acaacagcagaagcacagacaccccgaaacgccaaaagaaacagagcggaaacagacacccaccacaag

SEQ ID NO: 104168 - RNA, 90 nt, Homo sapiens
gcgccgggccccgggccccgaggccccgaccgcggcggagcccgacccacccaagcgggcgacgcacgaggcacacaggaaggaggggag

SEQ ID NO: 104169 - RNA, 56 nt, Homo sapiens
aggggggccgacacgacaccaaccggaaggggaccccaccaccccagaccacccag

SEQ ID NO: 104170 - RNA, 83 nt, Homo sapiens
cgccacagcgaaggcgcgagggacaagagcagaagacacgagaccagaagccaagaaacgaggagagccaccaccaaggagac

SEQ ID NO: 104171 - RNA, 75 nt, Homo sapiens
ccagcccaaaagcagcaaagaacaccaagacggcgaccacaggaaggacacaggcagccacacgggcaagcaaaa

SEQ ID NO: 104172 - RNA, 73 nt, Homo sapiens
cagcaaaagccccccgcagcccccaagaagaggacaacagacgggcaacaaagaagccaagcaggaaagcaac

SEQ ID NO: 104173 - RNA, 77 nt, Homo sapiens
ccagaagcacaggccagggcagaggaccaacagggcagagagcaaggggcaggcggccagcagcagcagagcaggca

SEQ ID NO: 104174 - RNA, 70 nt, Homo sapiens
cgacccaggacgaaccggaaaagagccggccacagaaccgcagacccagcaaagagcccgcccgaggacg

SEQ ID NO: 104175 - RNA, 74 nt, Homo sapiens
ggaagcagcgggagaggagaaaacaagccgcggcagaaacagccgagaccggaaagacagaaaaaacaaaggaa

SEQ ID NO: 104176 - RNA, 78 nt, Homo sapiens
cccacgaccccccaagagcggcacagcgcggccaggaacaacagaagagaaaaagaaaagacccagaccccacccagc

SEQ ID NO: 104177 - RNA, 82 nt, Homo sapiens
gccagaagagaccacgcacaggaggcccgaggagcggccacgcaggagaaggagaaaaccgggccaaaagagaagaaaagag

SEQ ID NO: 104178 - RNA, 71 nt, Homo sapiens
accggggacgcacggaccaaaaacccgcaacagcccccgcccaaagggcccagaggagacaggggaaccag

SEQ ID NO: 104179 - RNA, 74 nt, Homo sapiens
ccacccccggcgggcccgaggcggcgagagaggcaggcggagccgaccgggccaggaaccagcaggaacgccca

SEQ ID NO: 104180 - RNA, 62 nt, Homo sapiens
cggcgacggcggggcagcgcaccggcaggcgggaaggaagcagccaccccgccaggcccccc

SEQ ID NO: 104181 - RNA, 75 nt, Homo sapiens
ccgggcggggcggccgggcggcagggaccgcggcgcccgagcacaacaacagcaacggaggcgggaccggaacag

SEQ ID NO: 104182 - RNA, 87 nt, Homo sapiens
gcccggcggcggcggcggccgaacaagaagcccgaagccgaccgggcaaccacaaggagcgaagaaaccgcaaaggggagaaaaacc

SEQ ID NO: 104183 - RNA, 86 nt, Homo sapiens
ggcgggggggccaccgggcagcgggggagcggcgcagcggcggcagcggagagcgagagaggggagcagcagagaaagcaaagaag

SEQ ID NO: 104184 - RNA, 82 nt, Homo sapiens
aaacccggcaggaaacagaagaaggccagcgaggaaggggagccgccaccaaaagcagacggaaaacccacggggaagacca

SEQ ID NO: 104185 - RNA, 93 nt, Homo sapiens
cgagggagagagcgagcgagggggggcgcgccggaaaccggagcgcgcagcaggaacgagcgggaacgggccacccagggagaaaacggcacc

SEQ ID NO: 104186 - RNA, 66 nt, Homo sapiens
gagagcacgacaaagcagagaaggcgggcacaaaccgaagaggacaaggagagaagcagacagaag

SEQ ID NO: 104187 - RNA, 79 nt, Homo sapiens
gagccacaccaggcggagaaagggcagaggcccccacgccaaggacggcgaagagccaagagcagagaaaagaagacca

SEQ ID NO: 104188 - RNA, 85 nt, Homo sapiens
ccaagagccaagagagggaggccccagggaaacaccagcagaccaaaaggaagccacccaaccacacgaagaagcggagaagcgg

SEQ ID NO: 104189 - RNA, 75 nt, Homo sapiens
caccaccgccgcgccccggcgcccccccgagaaggagagaagcaagcacgcccggagaggaaacagacgaaaaag

SEQ ID NO: 104190 - RNA, 79 nt, Homo sapiens
caggaacagggacagcacccaccccggagggggaccacaagacccacgacagggagcaccgaagacgagcagcagcacg

SEQ ID NO: 104191 - RNA, 79 nt, Homo sapiens
ccaggacccaaaaggcgcaggggaggccggccccaggaaagggagaagaggacagaaaaagaccagacgcggaaaaaga

SEQ ID NO: 104192 - RNA, 73 nt, Homo sapiens
accagagcagcagacccaaaggacaaccccgcaacagaaaacacacacccacgggaaggaagaaagcagagcc

SEQ ID NO: 104193 - RNA, 84 nt, Homo sapiens
ccaggggacgacccaagcccaagagaggagaggaagcggcagagggagaacgaagcgcgcggcaggcgcgcgccgccccaggcc

SEQ ID NO: 104194 - RNA, 74 nt, Homo sapiens
cacaggaccgcacgaccaggccaccgcaagacaagcccaagagccacggcaaaccaggcaaggagcacccacgg

SEQ ID NO: 104195 - RNA, 55 nt, Homo sapiens
caagaacgccagaaagcacagcaccaggagccgaagacgaggaaaaaggggcgag

SEQ ID NO: 104196 - RNA, 81 nt, Homo sapiens
gcgggccgggaccccgacagcgcggggcgggcaccaaggccgaagcacccggaaagagccgcagacgcacagcaaccaccg

SEQ ID NO: 104197 - RNA, 78 nt, Homo sapiens
aaccagaagaaaccagccagagagccaagaagaacagacagacaggcccagaagccaagacaagaagcggagaagcga

SEQ ID NO: 104198 - RNA, 77 nt, Homo sapiens
cgcgccgccggccgggcagagagcgcagacaggacaccaaacaccgccgccgggcagaccagaaacgggggcagagc

SEQ ID NO: 104199 - RNA, 75 nt, Homo sapiens
aaccgcacacgaccgaaaagaccccgacggccccgaggaagcacagggaacaaaaccacgacacagccaagaaaa

SEQ ID NO: 104200 - RNA, 76 nt, Homo sapiens
acacaggaaccaagggcaacaggaaggcgcaaggggaaggagggcgaaacaaaggaccagcacgggaaccggccgc

SEQ ID NO: 104201 - RNA, 38 nt, Homo sapiens
agaaaccccaagccaaaggcggcagcaagcaaaaccca

SEQ ID NO: 104202 - RNA, 64 nt, Homo sapiens
cccggccaccaagaaccgcagcccgagcgggaagaagccgcagcaagccgcagcggcgcgcacc

SEQ ID NO: 104203 - RNA, 51 nt, Homo sapiens
aacaggccgaaaagaaacccagacgagacccacacaagacgacgacccagc

SEQ ID NO: 104204 - RNA, 58 nt, Homo sapiens
ccccaggaggggacaaaaccccgaaaaaggcggcagccagcggcaccaaaccaaaccc

SEQ ID NO: 104205 - RNA, 60 nt, Homo sapiens
gcccccgaaggcccacaggacaggagagaaagacggcgcggagcaaccacacagcaggcc

SEQ ID NO: 104206 - RNA, 73 nt, Homo sapiens
gaggagcgggacaacccaggagcagacagagaagcgcgcagcagccccaggggcaggacagggggaaccagaa

SEQ ID NO: 104207 - RNA, 74 nt, Homo sapiens
agagaagcagagaaagagccaccccaggcaaggagagccaagaccgccaggggaaagccaaggggccggaccag

SEQ ID NO: 104208 - RNA, 71 nt, Homo sapiens
acaagcgaggggacccagagaagaaacaacacaggcgacaccccaggaccaacaaacacacaggaccccag

SEQ ID NO: 104209 - RNA, 66 nt, Homo sapiens
cggggacccccgacgccaggcagcgcccccaaacgagggcacaccggaagacacagacggagggaa

SEQ ID NO: 104210 - RNA, 113 nt, Homo sapiens
cgggcggcgcgaagcgcggggcgggcccgggcgcggcgggcgcgcccgccagcgcccggagaacgcgcgggccaggcacgacaccgcaacgacacagcagcgaagcgccggag

SEQ ID NO: 104211 - RNA, 79 nt, Homo sapiens
cgccgcaccgccgaaagcacaccacgagcgacccgggcaagaaaaaggcggcagcacgggggaccggacccaaacgcag

SEQ ID NO: 104212 - RNA, 74 nt, Homo sapiens
accccggggcacgcgcacgccggcgccgcacacgggcgcaggggggaacccaaccgaagaagaacagacccaga

SEQ ID NO: 104213 - RNA, 72 nt, Homo sapiens
ccaagggccacggggagacaaggcaaaaaagcaaaacgaagagcccaaggaacaggcacggcggaccccggg

SEQ ID NO: 104214 - RNA, 72 nt, Homo sapiens
cagccacccgggagagcccggaaaggcccgcggcgaggagcgagcagagggcgaggaaccaaagccccggcg

SEQ ID NO: 104215 - RNA, 66 nt, Homo sapiens
gcgcggggccgcccgcccacccagggccggaaaagccaacgccggcgaaggggccgcaaggccagg

SEQ ID NO: 104216 - RNA, 39 nt, Homo sapiens
cgcacgaaacacgaaaggcagcgggcaggcaggagagcc

SEQ ID NO: 104217 - RNA, 79 nt, Homo sapiens
ccggcccccaggcgaagaagcgcagccgcaccggccaaggcgccgaggccccacaggggcccacggcggggaggcgcgg

SEQ ID NO: 104218 - RNA, 83 nt, Homo sapiens
ggcagaagggaccgcggacccagcccgcagccagcaagcagcaagcggaaaaccacggagcgccccgcacggagcagaagaaa

SEQ ID NO: 104219 - RNA, 38 nt, Homo sapiens
ccgggccaccacccaccaaggcagaaaagcaccgacga

SEQ ID NO: 104220 - RNA, 80 nt, Homo sapiens
ccgccgcgggggccgccgcgccccaggaggccggagacacgagaggcgagggacgacagagcaagcggcagagggcaagc

SEQ ID NO: 104221 - RNA, 87 nt, Homo sapiens
ccgcagcccgggagagcagcagcccggggacgagcagaagcaacgcgcaagcagaagggaccagccaacgcaggcggagcacacggc

SEQ ID NO: 104222 - RNA, 102 nt, Homo sapiens
caagacccagacccggacgacccccagcgagccagcggagcgcgccagaagaacgaccaagcgcccaggagcccgacaggccaaaggggacaggggaaagag

SEQ ID NO: 104223 - RNA, 87 nt, Homo sapiens
aaacgaggcccagcagcagagggcaaccaggacagaagcaaagcaccggaagcaacccaggaagaagaccggaagaaagacggcaga

SEQ ID NO: 104224 - RNA, 70 nt, Homo sapiens
ggcagaccacagcaaacaaggccccagcggcggaggaaagagagccagccagcgcacaaacccaagagac

SEQ ID NO: 104225 - RNA, 85 nt, Homo sapiens
cgaacacagaagaaccagacgccaggagacagggagagacgaggaagcgagaaaggacagggcaaggcaggacagggacacagaa

SEQ ID NO: 104226 - RNA, 80 nt, Homo sapiens
ccgccaggggcgacggggcagagaaggcaaaccgagccaaggaagcagggggaaggagcaggagagagcacacaaccaag

SEQ ID NO: 104227 - RNA, 74 nt, Homo sapiens
ggccaccggcgggaggaacaaaaggagaagacagaggagccagaccaagagacagcacaggcgagcgagcagag

SEQ ID NO: 104228 - RNA, 79 nt, Homo sapiens
ccgcgccccggggccggcccgcagaaggcgaagaaaacccgcgggagagacaagccacgcagaagaggaagggcggagg

SEQ ID NO: 104229 - RNA, 69 nt, Homo sapiens
gaagacgaaaagcagaaacagggacaaaccacacaaccagacgacgcagccagagcagcaagaggccaa

SEQ ID NO: 104230 - RNA, 58 nt, Homo sapiens
gcaggccagcgcacaccagaagagccagcgaaaggacccgccagaacccagagggaaa

SEQ ID NO: 104231 - RNA, 67 nt, Homo sapiens
caaaggagacagaagggacgggaaaaggaaaagaagagaaggccggacccgacggggaaccaaggcc

SEQ ID NO: 104232 - RNA, 89 nt, Homo sapiens
gacaggacgaagccggaggaggcggcagaggacgccccagagcagcgcggccaggggaagaagggaaacaggaagaggaaaacccaaag

SEQ ID NO: 104233 - RNA, 80 nt, Homo sapiens
cgcgcccagaagaagggaaggcgcgaggaggaaaggaggacgagcgccggggaggcagaaggggccgggagcggcccggc

SEQ ID NO: 104234 - RNA, 77 nt, Homo sapiens
cgcccccggcaaagagagggggacaagacccagcaggcgaagaagcagcagcccaagagcagacaggcaggggagga

SEQ ID NO: 104235 - RNA, 74 nt, Homo sapiens
ggcagccaggggggcacgacggagagagggccgacccccagaagaaacagaggccaaggagagcaaaaccgaaa

SEQ ID NO: 104236 - RNA, 39 nt, Homo sapiens
caccacagcccagaaaggccccgggaccaaggacacgca

SEQ ID NO: 104237 - RNA, 69 nt, Homo sapiens
gcggggcggggaggcgggaccagacgaggaacagcaaaaaggaaagaacgaacaacggaagcgagaaac

SEQ ID NO: 104238 - RNA, 59 nt, Homo sapiens
aggcaagccagcaaacacaaggacaccccagagcaagggccagagaaggaggagaagga

SEQ ID NO: 104239 - RNA, 49 nt, Homo sapiens
ggaggcgcgcaggagccaaggacccaaggccagccagccccaggcacca

SEQ ID NO: 104240 - RNA, 77 nt, Homo sapiens
cggcggggccgaggcgcgaggagggaggcggagcgcggccccccgcccccgcccaggcgggacaagggcgcaccggg

SEQ ID NO: 104241 - RNA, 71 nt, Homo sapiens
gaagacacccacacagaacaagagcggacaggaaggcaaggccccagcccaagcgggccgacgagaggaaa

SEQ ID NO: 104242 - RNA, 77 nt, Homo sapiens
ccggaccgccgggcgcgcggggccccgggccgagggaaacccagacgacaaggaaggccaagggacccacgaccaac

SEQ ID NO: 104243 - RNA, 69 nt, Homo sapiens
cgagaggagccaggcgaagggggggccggaggaacgaaccaaccgggaggcccggaagaaaagaaaggg

SEQ ID NO: 104244 - RNA, 79 nt, Homo sapiens
cagaccccaaaacgcccaaacagcagacaaaaagcggaggaggaacgaagagaaaagacgacaggaaaaccaaagagga

SEQ ID NO: 104245 - RNA, 71 nt, Homo sapiens
caccgggaaagagaagagaaaaacaggacaggacccgaacgagaagcccacccagagagagaagaacaagg

SEQ ID NO: 104246 - RNA, 41 nt, Homo sapiens
cccaagacccagcaggcgcgaggagccggcagcgcccgagg

SEQ ID NO: 104247 - RNA, 83 nt, Homo sapiens
gggaccccaacccggaaaacagcgaagggagagaccagcagccgcgaaaccacccgaaagaacaaaaagaaaaggaaaaccag

SEQ ID NO: 104248 - RNA, 55 nt, Homo sapiens
cgaaagccaaacaagagaaggaacgaccaaccccaacccggcccgagaagaacga

SEQ ID NO: 104249 - RNA, 82 nt, Homo sapiens
gcccacacggcgcacgaggggaagggcaggaggaggaggaggggcccggcggcggggaggaaccacgccaacggaagcaggg

SEQ ID NO: 104250 - RNA, 74 nt, Homo sapiens
cggaaggccggggagcgcggcagcgggacccgccggaaggcgagcacaggcagggaagcaaagagcacccgagc

SEQ ID NO: 104251 - RNA, 46 nt, Homo sapiens
gaaggaccaagaaccagcaccgagaaggcagggaacagggcagcaa

SEQ ID NO: 104252 - RNA, 70 nt, Homo sapiens
ggcgcaacaagaggaaccaaggaaaagaaagacccccaggcaaaccgccccgcagcaccacccggcccgg

SEQ ID NO: 104253 - RNA, 81 nt, Homo sapiens
ggggcccgccccgccacaacgcgggaggccccgcaccgcacacgccccccaggcgcagcagcaccacacaaagaagcagcc

SEQ ID NO: 104254 - RNA, 66 nt, Homo sapiens
cgaggaggcagcgcgaccccgcacggaagcccgggcccagcggggcacagccccagcgagccccag

SEQ ID NO: 104255 - RNA, 75 nt, Homo sapiens
aagaagcgccgcgacaagcaaggcagccccaagagaaagcgcgggggagcaaaaacagacaagccagaagcgaac

SEQ ID NO: 104256 - RNA, 90 nt, Homo sapiens
gagccgcacaagcccagggaaagacagagaaacccgcccaccaggcccaggacccgagagccgggcgggacggccacgaccgaggagcaa

SEQ ID NO: 104257 - RNA, 76 nt, Homo sapiens
cccagccgcgccggcccgggcacgcagcccacgcccagaggcaggcagcggaagagaaagaccgaggcaaagaagc

SEQ ID NO: 104258 - RNA, 82 nt, Homo sapiens
gcggagagcgagagaggggagcagccgacaggcaagacggcagggacacaacaaccccagagcaaccaacccgggaaagagg

SEQ ID NO: 104259 - RNA, 69 nt, Homo sapiens
ggaaccgagacagaaagaggaccaggcgggcaacacaacaaggcgcggacacccagacaagcgcgccac

SEQ ID NO: 104260 - RNA, 78 nt, Homo sapiens
cccacaggaagagaaggcggcgacaccgggagagcgaccagggacaaaaggaagccagcccggagggagagaagggaa

SEQ ID NO: 104261 - RNA, 80 nt, Homo sapiens
aaccaccaaaccaacccgcaaaccagggacagagccgagcagcaccaaaaagccaaggaaagcagccagagcagcagagc

SEQ ID NO: 104262 - RNA, 36 nt, Homo sapiens
cggccggaggcaccagcagagggacggaccccgggc

SEQ ID NO: 104263 - RNA, 81 nt, Homo sapiens
acggcccacgcggcccccccggcagccggaaaccacggaccagcccaagaccccaagagaagccccaaccgagaaagccga

SEQ ID NO: 104264 - RNA, 75 nt, Homo sapiens
agaagaagaggaagccgggaagcacacaaaacggacgggggggcagggacgcacaagggaagcaagcacgaacgc

SEQ ID NO: 104265 - RNA, 76 nt, Homo sapiens
ggagaacacagaaacccgccccggagaaagggcgcaaaaagaaagaaaacaaaagccagccaaaaacagaccgaaa

SEQ ID NO: 104266 - RNA, 84 nt, Homo sapiens
gcgcagcgcgccaaaaccgggacggacaagacccgggaaggaggcgacagaaccacgcggggaagcccccccagagaggcacca

SEQ ID NO: 104267 - RNA, 51 nt, Homo sapiens
cccgcagaccgaagagggagagcgaagagggacaacaagcgcgcaccgccg

SEQ ID NO: 104268 - RNA, 123 nt, Homo sapiens
gaacaaagcaccggcgggggcccgccaggcgggccgcggcggcccggacaggggccccagagcaaaagccaaggagaagcaagacccggacccgccgcccgagcggcagcagcgaagcacaag

SEQ ID NO: 104269 - RNA, 83 nt, Homo sapiens
ccagaccagcgcccgcccagggccccgcgggacaccaccacccacggccagacacccaggagcgaagggaccacagaccagca

SEQ ID NO: 104270 - RNA, 73 nt, Homo sapiens
caagaagagaaaagaccgccggagaaaaggcacagaagaagccaaaaacgggccagaaagaaacgaggcacaa

SEQ ID NO: 104271 - RNA, 41 nt, Homo sapiens
cccagcagccccacggagccgaacaagacaccagagcgagc

SEQ ID NO: 104272 - RNA, 62 nt, Homo sapiens
aagcaccgggagagggaggcggccaacgagggagcgcacaggaaacaaccgcaaccagccaa

SEQ ID NO: 104273 - RNA, 94 nt, Homo sapiens
cgcccccgcagacaccgcccccacagaccagcggaccgcggacaggggcaaaaaagggagcaaacaccgcccgaccagaggccgccacggcccc

SEQ ID NO: 104274 - RNA, 77 nt, Homo sapiens
aggaagggaaaaagacagggaaacaggaaaaaaaaggaggcgacaagcaacaacaacaagcggaccagaggacgcac

SEQ ID NO: 104275 - RNA, 69 nt, Homo sapiens
gaccgcagaaaagccccggcggccgaacagcgccccccgccggaacacccccccgccggcggagacgcg

SEQ ID NO: 104276 - RNA, 77 nt, Homo sapiens
gggaacagagagaaccggcacacgccaccgacgggaaccgcccggccccaccaaaggcggagcagggcacgaccggc

SEQ ID NO: 104277 - RNA, 59 nt, Homo sapiens
gacggccagagcaccacacaaccgggaccaagggagaaacgacagaaagaccaccgaag

SEQ ID NO: 104278 - RNA, 71 nt, Homo sapiens
acgggaccggaaaaggacgcgcgaggggccgggagaggaaggccccaagcagccagcagaaaagcaaccag

SEQ ID NO: 104279 - RNA, 80 nt, Homo sapiens
cagagaggggagccggcgaggacaaaaccgaaggagggacgagagcacagcccccaggagaggcaggcgcaaaggaggca

SEQ ID NO: 104280 - RNA, 75 nt, Homo sapiens
cagggcaggcggccaaaccgaagcaacccgcaaggccaggacacagaaccgagggacaaaccggcgaccacacac

SEQ ID NO: 104281 - RNA, 83 nt, Homo sapiens
gaggaacgccgggcgcgggcccacgcggcgcagggccagccacagcaggcccggcgcccggggaaggcagcccgggcggaacc

SEQ ID NO: 104282 - RNA, 72 nt, Homo sapiens
ggacgaggcggcggagaacaagcggcaggagcagaagacagagggaggagggccacggacaaacacgggccc

SEQ ID NO: 104283 - RNA, 66 nt, Homo sapiens
gagaaaacaccaggaccccggcacaacccgacgacacacacagggaaagaccaggagaaggcgggg

SEQ ID NO: 104284 - RNA, 72 nt, Homo sapiens
cgggcgggggcgcgccccgcgcgcagggaccgcccgaccaggaccaggggagcaacccaccaacaaacagcg

SEQ ID NO: 104285 - RNA, 72 nt, Homo sapiens
ccgccagcaccagcgaggacgagcagagcgcgcagcaacaaagggggggaccaggaaagccggaagaacaaa

SEQ ID NO: 104286 - RNA, 78 nt, Homo sapiens
gaaagaggaggaggaagacagcacacaccaacaccgcagagacaaggcccagaaggggaagacccccagcgaacagag

SEQ ID NO: 104287 - RNA, 80 nt, Homo sapiens
gcaacggaaaacaacaagaagaagccggcggggccccgagcagacagcaggaaagaagaagccccggacacccagggcca

SEQ ID NO: 104288 - RNA, 81 nt, Homo sapiens
cgcaaccaccgcccggccacaccagggaacgcaaggcggggaaaaaaaggcagcacacagacgcagcaacgggcacgcaac

SEQ ID NO: 104289 - RNA, 78 nt, Homo sapiens
cgggaagcggcgaccgccaccgggagggggaagagccggaacaccggcagagagagagacacaccagacgagaaagcg

SEQ ID NO: 104290 - RNA, 71 nt, Homo sapiens
aagaagaggcccaacccccaccccgcccaaggaggcccagcgggaaacccagacgacaaggaaggccaagg

SEQ ID NO: 104291 - RNA, 77 nt, Homo sapiens
ggggacccgacgcccgcacgagaaccaggaggaacacggaggacccaaaccgaacaaggcaccaagaagcacagcag

SEQ ID NO: 104292 - RNA, 90 nt, Homo sapiens
ggaccccgcccagggcccagaggacccaacaccagaagacacacaggacacaagacccacagggaaggggaacagcggaacagggcagaa

SEQ ID NO: 104293 - RNA, 81 nt, Homo sapiens
agccggggagcgcaggaaccagacgggggcgagcgagcaccgagcaacacacgcagagagcccgccaccccggcccccccc

SEQ ID NO: 104294 - RNA, 78 nt, Homo sapiens
ggccaccggagagcggccgggcgggacagagggaagggaacccgcagaccagaaacgcccacgaagagcacggagagg

SEQ ID NO: 104295 - RNA, 74 nt, Homo sapiens
cacagagagagagagggaggggacagaggcgggcaagaaagacccgcacagagggagcacaacaaaaaggcggc

SEQ ID NO: 104296 - RNA, 76 nt, Homo sapiens
aagaaccggaagaaacgccgagaagcccaaagcccaagggagaacacacagaaggcaagacacaacgacaaaagcc

SEQ ID NO: 104297 - RNA, 57 nt, Homo sapiens
gacgagccccagaagagaaaggcaacgcgacaggaagggcaccacccccccagcccc

SEQ ID NO: 104298 - RNA, 55 nt, Homo sapiens
ccgggaggcaacgaggcaccaggcggacaggaggaacccaggcaagccgaaggcc

SEQ ID NO: 104299 - RNA, 106 nt, Homo sapiens
gccccgagcagggggggggggaagccgcagcggaaagcaggagcacagggaaccagggccaccagagaagcgacagaccaggaaccagggggaagggagggcggga

SEQ ID NO: 104300 - RNA, 74 nt, Homo sapiens
caacaggaagcaaaacggagaaaaagagaggaacgaagaagcagccccccaagcagaagcaacacggaaagaca

SEQ ID NO: 104301 - RNA, 83 nt, Homo sapiens
ccacccggccgcagcagcagcagggagggagccggaaacaaagaagaggagaaaaagccaaggaaaggcccacagaaaggagg

SEQ ID NO: 104302 - RNA, 76 nt, Homo sapiens
ggaagcgaggcgggcccgcgggaccaagaggaagacggcaccggagcaccccagaccgacagggcccaggcggggg

SEQ ID NO: 104303 - RNA, 75 nt, Homo sapiens
cccggccccgaccccgcggccggacgacccaagcccgcgagcaggagaggggggaaaccacaccacccgccacag

SEQ ID NO: 104304 - RNA, 78 nt, Homo sapiens
caaagaggagagaaggacgacaagcccaccgagggaggaacaggagcaccacgagagaggcaggaagacaaacagaga

SEQ ID NO: 104305 - RNA, 76 nt, Homo sapiens
aaaaagaaagagaaaaggaaagcagaagacaagcagggcgcacagggacgaagaaccaccaaacggaaacacagac

SEQ ID NO: 104306 - RNA, 77 nt, Homo sapiens
gccggcagcccaagagcgggcccgggggccccggaccaggaaaccccacgaacaaagggcagaagcagagaacagag

SEQ ID NO: 104307 - RNA, 75 nt, Homo sapiens
gggaggcggccggccaacaccacaccagcagacaaagggcaagaggaaccagacagcaccaggggccagagcagc

SEQ ID NO: 104308 - RNA, 82 nt, Homo sapiens
cccggcccccaaccgccccagaagcaacccgagacaccacagaggaacccaccccaagggcacaaccaaaggcaacgacccg

SEQ ID NO: 104309 - RNA, 51 nt, Homo sapiens
cggacagacccacaacaccaggcgccagggcagggcaaagacgggcagagg

SEQ ID NO: 104310 - RNA, 85 nt, Homo sapiens
ggcagcgccaacgccgcacgcgcacccgacaacgccgaaagaagaaaacccgagcagagaaaacaacaaagcgcccagcacacag

SEQ ID NO: 104311 - RNA, 97 nt, Homo sapiens
gaaggcccccgccgcgacggcacaagaccccacccaaaagaccaagccaaaggacggaacgcaccagacggaggcgacaaaccaggcgacgccggag

SEQ ID NO: 104312 - RNA, 61 nt, Homo sapiens
accgaccccaaacgcagacacaaaagcaccagcagaaccgccccagggaccccaccacccc

SEQ ID NO: 104313 - RNA, 60 nt, Homo sapiens
gaagccgaagagccaggacaagaacaccggagggacgaccgcaggaacaaagccggacga

SEQ ID NO: 104314 - RNA, 68 nt, Homo sapiens
ggcaaggagcacgggcagcgcaggaaacagaccagagacaaggccccgagggaggagcccgaaggcgc

SEQ ID NO: 104315 - RNA, 66 nt, Homo sapiens
acgccgcggccccaggcgcgcggagagcagcggcccccaggcacgaagcgaagaagaggagagaag

SEQ ID NO: 104316 - RNA, 79 nt, Homo sapiens
ggacggggcggaacccacagacaagcagccaggaaagcgggaagagacaaagggagaagccaggaagaggaggacggag

SEQ ID NO: 104317 - RNA, 79 nt, Homo sapiens
ggaaaacacacccgagacccagacagagcccccaggcccgccgccagagggacaggagccaggccagaaaaggacgggg

SEQ ID NO: 104318 - RNA, 75 nt, Homo sapiens
agcacagcgccgcgccgagcccgccagcgacggcgcccgggagcggccggagggccaccagaggaccaagccaga

SEQ ID NO: 104319 - RNA, 78 nt, Homo sapiens
ggcgcgacgagacccgaccagcgggggcgcggcggccgcgcagccacccaaggccaaccacaaggacagagccaccac

SEQ ID NO: 104320 - RNA, 81 nt, Homo sapiens
ggccccgaagaggaccagggagggaaaagcagacccaagcggagggcgacacgagaacaaaagccaagcaaggcggacaag

SEQ ID NO: 104321 - RNA, 79 nt, Homo sapiens
ggcaaggagagacgcgcgaggggcgccgaagcgagggacgaccccggggacaaacgacggagcagaagagcagagccca

SEQ ID NO: 104322 - RNA, 52 nt, Homo sapiens
agcacgacagccggcgaagaagaagcaggggagaagcagaccgcaccaggcg

SEQ ID NO: 104323 - RNA, 72 nt, Homo sapiens
cgcggaggacgagggccagcgacggagagggcagaagaggaggagaggcggccccaggggggaccaacaagg

SEQ ID NO: 104324 - RNA, 87 nt, Homo sapiens
cagaaaaccagcgggaaaacacaggaagacagagagcaagaccccagcccaaccgaggcggcaaggacagcccggggaggacagaca

SEQ ID NO: 104325 - RNA, 90 nt, Homo sapiens
cgcggcggcgagaggagaagcggcgcggcgccagagaggaggcgcaggaagacgccgacgacggcccaggcgcggcgggacaccaagccg

SEQ ID NO: 104326 - RNA, 71 nt, Homo sapiens
gaaacgaaccagcaagcaaaacgcagcgcaccagggaaggaggcaggccccagcccaccacacagccaaca

SEQ ID NO: 104327 - RNA, 60 nt, Homo sapiens
ggccaggggggcccgcgggccagccaccgggccgagaggagccaccgagacaaggcggcc

SEQ ID NO: 104328 - RNA, 66 nt, Homo sapiens
gggcaggacggccacaaaggcaaggcaagcaggaacagaacccccacagcagcacgcaggcgcccc

SEQ ID NO: 104329 - RNA, 78 nt, Homo sapiens
agaaggcagggcaaaccagaaagacgccaggcaagacaggccaacaccgccaccagagaaccacacaaaggaaagggg

SEQ ID NO: 104330 - RNA, 87 nt, Homo sapiens
agagacaaggcacggagagcaacaaagccgacccaacccaagggccaaaggacccagagagggaccagggccaaagaagagccgggg

SEQ ID NO: 104331 - RNA, 83 nt, Homo sapiens
cggaccgcaaggcacccgaggacagaaaccccagaaccagcgagacagggggaaggccccggggccaggaaccacaacaagga

SEQ ID NO: 104332 - RNA, 73 nt, Homo sapiens
caaagacacgagccccgacaaggaaccaccacacaacaaggcggagggagaacaacccgaagaaccccaccca

SEQ ID NO: 104333 - RNA, 79 nt, Homo sapiens
aaagcagcaaacacgggacaaaaaccagaccaggacaccagaggaccagaacccacgagaaacagacgagccaaccaga

SEQ ID NO: 104334 - RNA, 75 nt, Homo sapiens
ccagaaaagaagaaagccacgaaacacaccccggagccaaacgaccaagcagaaaaggccgaaaggaagggaaaa

SEQ ID NO: 104335 - RNA, 83 nt, Homo sapiens
aggagcaaaacccaaaaggaaggcagaggaagccacggccacggacccggcgagggccaaggacacagacagcagcagggcga

SEQ ID NO: 104336 - RNA, 66 nt, Homo sapiens
gccagagcaggaagcgcgggggacacccacggccaaccaaaaaccgggaacagagaaacaagcagc

SEQ ID NO: 104337 - RNA, 86 nt, Homo sapiens
gagcgaacaccagccgccggcaaaccgggcacccgaaccaccccacagcagaaagagccgcagacgcacagcaaccaccggacccg

SEQ ID NO: 104338 - RNA, 85 nt, Homo sapiens
aagacaaagacccaggaacaaaccgggggcaaggccaaaaagaaggaggagagaagagaaagcgaaagggagaaccccgggacca

SEQ ID NO: 104339 - RNA, 79 nt, Homo sapiens
gcagagacgagagaagggcacagagagcaggcgccaggggagaggaggcagaaggagaccgcgggacagaaccgcgggc

SEQ ID NO: 104340 - RNA, 77 nt, Homo sapiens
cagcccgcgcccgccaggcgacaggggaacagacagaaggagcaggaaccaaaggacagggccagcacagcaagggg

SEQ ID NO: 104341 - RNA, 69 nt, Homo sapiens
agggcagagaaggggacggcagaacaagaagggcaaccaggggggaaggagggagcggagaacgcgaag

SEQ ID NO: 104342 - RNA, 80 nt, Homo sapiens
aagcgcagggcaagccacagagccagagcgcaagcagcaagcggaaaaccacggagcgccccgcacggagcagaagaaaa

SEQ ID NO: 104343 - RNA, 55 nt, Homo sapiens
agcgagcaaggggcgaccaaagcagagcaccaaacaggggggaaggaagacaaac

SEQ ID NO: 104344 - RNA, 63 nt, Homo sapiens
caccgacacggaagccgcggagagcggccagggaagaaggagaaagggccaaccccgaagaag

SEQ ID NO: 104345 - RNA, 73 nt, Homo sapiens
cccaacaggaccaccggaacgcgggaacaggacggaagcaacccaggcacccccaacaggcacccacccccgg

SEQ ID NO: 104346 - RNA, 73 nt, Homo sapiens
acagcagaccaacccagcgcaccccaggcaacccaaacgaggacaccccgcccgggaagcaggcgcaaaaaca

SEQ ID NO: 104347 - RNA, 77 nt, Homo sapiens
cgaacggacaaaacacccaggaagagcaggaccacaggaagcaagaagcggaaaagagcgaaaggaggagaaaccac

SEQ ID NO: 104348 - RNA, 82 nt, Homo sapiens
aaggaggacgagggccgggccgggcgcgggcgagaaagagccgaagagagaaacccccaaagaagagccccccaaagcacaa

SEQ ID NO: 104349 - RNA, 77 nt, Homo sapiens
ggaggacacgacaccaggcgaaccggccacgcacccccgaagccggcacaggaagagggcggcacgcggccagagag

SEQ ID NO: 104350 - RNA, 86 nt, Homo sapiens
cagagcgaccggaagggaaagcgccgagagacgggccgcgccgcccgcaagcagaggggacccaagggagagagggaacggcgaaa

SEQ ID NO: 104351 - RNA, 86 nt, Homo sapiens
gagagcggagccggcgggcggggaacccaggccccgccgaggcggccagggccacgagcacccccggagcaaagcggagagagaaa

SEQ ID NO: 104352 - RNA, 81 nt, Homo sapiens
ggagagcaagggccaggggagcccagcggcgcgccggcagcagggagggccgcggaaagaaaaaccgcaggagagaagaaa

SEQ ID NO: 104353 - RNA, 60 nt, Homo sapiens
aagggcagcgccaacaggcacagccagagaacaacacacacacacaggaaacagggccag

SEQ ID NO: 104354 - RNA, 52 nt, Homo sapiens
ccgaagaccacagacagacaacacagaacccggcaacggaaaaacacgccaa

SEQ ID NO: 104355 - RNA, 77 nt, Homo sapiens
gacacggcaaagggaaccaaaagaggaccaccaagcccaaagaaccccacacgggacaggggcaaaacccaggaccc

SEQ ID NO: 104356 - RNA, 74 nt, Homo sapiens
cgcaggccggccgcgcagacacgagaggcgagggacgacagagcaagcggcagagggcaagcgggaaaaagacc

SEQ ID NO: 104357 - RNA, 72 nt, Homo sapiens
aaaagaaggagccccaaagacagaccaaaaagggcggacccagacagggccaccggcgccagagcaagcccg

SEQ ID NO: 104358 - RNA, 69 nt, Homo sapiens
gaagggccagaaggaacgagaacggacccagagaagaaagaaaaagccagcagagacggggcgacgggg

SEQ ID NO: 104359 - RNA, 93 nt, Homo sapiens
ggagaaaaagcgaaccaggcccggaccagcccgggcgcccgcacggacccccagggaccagagacacaaccgaagagcagggaaagccacaaa

SEQ ID NO: 104360 - RNA, 68 nt, Homo sapiens
ggaaaacgcggaaaaccgacacaacaggggaaccagaagaggccaaccagcacgaacgccagcagcac

SEQ ID NO: 104361 - RNA, 82 nt, Homo sapiens
ggacggaaccgggacccgggcgcccgcgcccgccccaacccagccacaggagaacacgagacccgcacaaaaccccgccccc

SEQ ID NO: 104362 - RNA, 56 nt, Homo sapiens
cgcggcaccgcgccccacgccggccaggagggggccacaccgaacccagccgggag

SEQ ID NO: 104363 - RNA, 84 nt, Homo sapiens
agcagcaaccaaagcaagccaagaggaggaggaggcggaggccaagcggaaagggaacccaggaccgacccaaccacgcacggg

SEQ ID NO: 104364 - RNA, 77 nt, Homo sapiens
cgcccgggcgggacaagcggcaagacacgaggaaacaacaccaagaagaacaccagaaacaagacgaccaaccccga

SEQ ID NO: 104365 - RNA, 80 nt, Homo sapiens
gccgccaccccgcggccgcacccccgccccagagccggaggagccaccaacagaagcaggagccaggaaaccaaaaccca

SEQ ID NO: 104366 - RNA, 90 nt, Homo sapiens
caggaaggaacggaaggacgcgaccagaccaagagccgacaaccacaacagggcagggaggggggccaggcggcaagccgaagacacaca

SEQ ID NO: 104367 - RNA, 63 nt, Homo sapiens
acgagaggcagcgccaggcggagcagaccaccggggcgccaagccggcaagagaaagagaggc

SEQ ID NO: 104368 - RNA, 55 nt, Homo sapiens
caagacggcagacacccagcaggaagaggagagcaacggcagcgcagcgagcacg

SEQ ID NO: 104369 - RNA, 73 nt, Homo sapiens
gccccacggacggacgccagccccacaacaccgacaagcaccgccaaagaagccgccagggaacgcccccggc

SEQ ID NO: 104370 - RNA, 54 nt, Homo sapiens
gaaaccaggggagccgaggcggaggagacagagcaacggggcggcacacaagga

SEQ ID NO: 104371 - RNA, 71 nt, Homo sapiens
gaaagcagcccccacggcagaacacccacccaaccgagcacaccagaaaaaggccgaacggccacagggac

SEQ ID NO: 104372 - RNA, 76 nt, Homo sapiens
agcaaacaagaagaaagaggggcagagagaagagaagaaggacacgagaccacaaaccccacccaagagccccccg

SEQ ID NO: 104373 - RNA, 68 nt, Homo sapiens
gcaaaaacaggagaccgcggccgaccagagaacagaaccgggggaaacacaaccgccccgggaggagc

SEQ ID NO: 104374 - RNA, 55 nt, Homo sapiens
acaaagacagcccaccaggaagagcgaaaaacaccagaccacccgagaaaggcgg

SEQ ID NO: 104375 - RNA, 63 nt, Homo sapiens
gcgggacccggcgaagacgcgaccgcggcgcgagcaccagggccagcccgcaacccccggcga

SEQ ID NO: 104376 - RNA, 86 nt, Homo sapiens
gcggggagccaagcgacaggcgggaagcggcagcgggcccgggaccacccccggggcgcacccacgacgcgcacaccaccggcaga

SEQ ID NO: 104377 - RNA, 69 nt, Homo sapiens
gcagaggggccaacggcggcggggcgaaacgagaggaacgggcacaacggcgcgaggaagcaccacaag

SEQ ID NO: 104378 - RNA, 82 nt, Homo sapiens
cacgaaggcgacggggccagcaggcaggaacagaaccggagcaggccgagagcggaaaagaccaaagcagaaaagaaaggag

SEQ ID NO: 104379 - RNA, 80 nt, Homo sapiens
cgacgacgcaccgaagccgaccagaagaagccagcccggagcgggcacaggccaggaaaacaaagagggaaaacggagaa

SEQ ID NO: 104380 - RNA, 71 nt, Homo sapiens
aaccaaggggcaggcaaacaaaagcgcggggagaagaggcgcccagcaacgccaccaaagaggaacaaagg

SEQ ID NO: 104381 - RNA, 98 nt, Homo sapiens
gcggacaggaaccggacagcacaccagggccgggacacacgacagcccaggggcacgggcacagcccagaagaccagcgagaggcgccaacaagagaa

SEQ ID NO: 104382 - RNA, 75 nt, Homo sapiens
gacgcagaagaaggccacagagagccagccccaaccgaacccagacgcagaacagggcgacagcaagacaaggaa

SEQ ID NO: 104383 - RNA, 76 nt, Homo sapiens
acccaacaccagagaaagggaagaaacaggaacagaaaagaacgagccccacagcaagaagagaaaggaaggaggg

SEQ ID NO: 104384 - RNA, 38 nt, Homo sapiens
cgcagaacaggaccgacacaaagaagcggagcaaaccc

SEQ ID NO: 104385 - RNA, 60 nt, Homo sapiens
accaggaggcgagcaacagagaaaggacagggacaggaaagaaagaaaaagaaaagaaaa

SEQ ID NO: 104386 - RNA, 70 nt, Homo sapiens
cggaaagaaaaggagagcaccacgaacaaagggaaacggaaaggccgggcccaagagcccacaacggcag

SEQ ID NO: 104387 - RNA, 83 nt, Homo sapiens
cgcaacagaacggacccggcgagcacacagagaggggaagggcagcagcagcagagaaccaaacccaaagcgaacacaaagac

SEQ ID NO: 104388 - RNA, 69 nt, Homo sapiens
aacaggacgaaaaaagggcaagaagccagaaggcacccccagcaggacagcacacccaaccagacacac

SEQ ID NO: 104389 - RNA, 81 nt, Homo sapiens
ggaggagcaggcgagaagagaagggaagcgccaaagaagcgacgcgaaagaaagaaagaaaagcggagagccgaggcaggc

SEQ ID NO: 104390 - RNA, 71 nt, Homo sapiens
ccccggcacgacaccgccccaacccacgagaggacagcccaggcgcagcccaacgggcccccaagaccccg

SEQ ID NO: 104391 - RNA, 85 nt, Homo sapiens
cacgacaccggaaaaccaaagacagcacgagcacagaaagcaccaagacgcgcaacgagcagacaggaaacaccaacaacaaaaa

SEQ ID NO: 104392 - RNA, 73 nt, Homo sapiens
ccaagccccgccaccgggacacccagaacgcaagaagaacgcagggggcccagaccagaaggcagcgacaggc

SEQ ID NO: 104393 - RNA, 74 nt, Homo sapiens
agaggagccaaaacggcgagcaagagaggcacaaccaaccaccgccaggagaggccccaggaaaccccaccacc

SEQ ID NO: 104394 - RNA, 77 nt, Homo sapiens
gccaacccaaaaccaaggaaagaaacacccggaaaagcaaagacacgccaaacgccaccgaccacccaacaccacac

SEQ ID NO: 104395 - RNA, 73 nt, Homo sapiens
cccgccccacccggcacccccaccggaggacacaagcagccgagggaacggcagaagagaagagcacggcaag

SEQ ID NO: 104396 - RNA, 83 nt, Homo sapiens
cggcaagcggagaccccgcgagcggcgcgagcggcagcaggacaccccggggagcagaaagagaaaagaagagagaagccaca

SEQ ID NO: 104397 - RNA, 74 nt, Homo sapiens
gcaccaggggaagcgggacaacgggggaccggagagaggaaaccaaaaaacggaaggcacaagaaacacagcag

SEQ ID NO: 104398 - RNA, 77 nt, Homo sapiens
aaagcaagagacagcgaggacagaaggaaggaaacggcaaaaggcgccccacaaagaggaaaaccaaaggaccagga

SEQ ID NO: 104399 - RNA, 77 nt, Homo sapiens
cacccacagcagcccgcgagaggagcaccggcccaggcggaggcaaggcggacccggcggcgcaacccacccccggg

SEQ ID NO: 104400 - RNA, 86 nt, Homo sapiens
cgagagcaaccgacacagaagcacggagcccaagagcacagccccaggcacaacacaagaaaagcggggcaccggcacaaagagag

SEQ ID NO: 104401 - RNA, 73 nt, Homo sapiens
gaaggcagggaaagcaggggcaaagaaaccgaagaaaacccggcaacaggggaccaaaagaacccagccaacc

SEQ ID NO: 104402 - RNA, 70 nt, Homo sapiens
gaagcgagcgcgacaaacccagaccagaacacacaagaaccgggagaacgaacaaaccaagccaacaccc

SEQ ID NO: 104403 - RNA, 59 nt, Homo sapiens
aagcacgagcagaccggcccgaccgcccacagacccaaacaaaggacaaaaaggacccg

SEQ ID NO: 104404 - RNA, 80 nt, Homo sapiens
gcccgccgcccgccccagcaccgacgagaggcggggaaaaaaaggggaccaccggcagagacaaccaaaaaggcagcgcc

SEQ ID NO: 104405 - RNA, 73 nt, Homo sapiens
cgcagccaggcccggagacacacgccagggggggcgccaggagagcaggcccgcagccagcggccaaggcaac

SEQ ID NO: 104406 - RNA, 99 nt, Homo sapiens
gccacggggcgggggcggggcggcaggagccggccggcaaccgagggacccgcgccagaaaccccaccacgcggcaggggccgccgaggaaaaagcaac

SEQ ID NO: 104407 - RNA, 91 nt, Homo sapiens
caggcgcggcgcggcgcggcgagaaagccgggcacagggacggcagagaaaggaccaaccagaagaccaacaggacaggaccggcaggggg

SEQ ID NO: 104408 - RNA, 73 nt, Homo sapiens
cacaaggcaacccaacacgggcgaggacagaagccacaggcagagccacaacgacgaaagacccacagaagcg

SEQ ID NO: 104409 - RNA, 67 nt, Homo sapiens
accgagaaaccgcacaccggagacggcagaaagaccacaagaagcaagagaacggccaagagagcga

SEQ ID NO: 104410 - RNA, 83 nt, Homo sapiens
ggagaaacaccccccgaccccaggcaaaagaaaccggagcacgcccgaagagcgcgcgaacggaacgagggaaaaaacaagga

SEQ ID NO: 104411 - RNA, 78 nt, Homo sapiens
cccggccccggcccacaggggggggcaaacccgagagaacggagaggaacaccgggccaggcggcggagccgaccaag

SEQ ID NO: 104412 - RNA, 73 nt, Homo sapiens
caaagccaaaggaaggaccaggacgccgccggcaaaaaggcaaaaagagcgcgaagagacggagcagaagggg

SEQ ID NO: 104413 - RNA, 42 nt, Homo sapiens
ccccaaaggcgggagcaggacgcgggcgcagcgagcggggag

SEQ ID NO: 104414 - RNA, 79 nt, Homo sapiens
ggagacagaaacggcagaggacgccaccaggaagggcccgcccgagaggacgaagagggacgaaagggcacacagcgac

SEQ ID NO: 104415 - RNA, 58 nt, Homo sapiens
gaggggaggacaccggcaagggacaggaaaagccaagaaagacccaaaagaccccaga

SEQ ID NO: 104416 - RNA, 80 nt, Homo sapiens
gcggcggagacgaaaaacacgaggagccaaaaggagggagaagcacagaacaaggagagcggagccgccggaagggcgac

SEQ ID NO: 104417 - RNA, 77 nt, Homo sapiens
gggcgccgacagaggaagaggacagcgggaagcgaaagaacgcagaggcccacagcaaggaaggagagcccggaccc

SEQ ID NO: 104418 - RNA, 76 nt, Homo sapiens
ggggagacccaggcaccaacacagggcccgccccaccgggggccaccccagggaggagaagagggacccagaaggc

SEQ ID NO: 104419 - RNA, 70 nt, Homo sapiens
caagaagagaacccagggaagccgaagagccagggaccaccacacgaaaccaaggaaaaaccgggaacag

SEQ ID NO: 104420 - RNA, 77 nt, Homo sapiens
cgccgcgccgggccagccacccaaggaccacggacgcgccacacggagagcaaggaggagccaccgcacccaggcgg

SEQ ID NO: 104421 - RNA, 36 nt, Homo sapiens
agaagcccaaacagagcgcagagcaacaccgccgga

SEQ ID NO: 104422 - RNA, 81 nt, Homo sapiens
ggaaagacccaggagaagccgcccaaagaacgggccacccccaaccaggaccaaagacgaccaccaaagccagcccccaga

SEQ ID NO: 104423 - RNA, 86 nt, Homo sapiens
cagaggcacgagacccaggaggaggccacaccccccgggcacaccacaggccagagagcacaagaagaaggacacacccaggggac

SEQ ID NO: 104424 - RNA, 74 nt, Homo sapiens
caggcgcacaaccaaaccagaccgcagcagggcccacggccccacggggcgacgagccacgggcgggcccaccg

SEQ ID NO: 104425 - RNA, 91 nt, Homo sapiens
gggcagccacccgcccagccccgagagcgggacacagccccaggaaaggagaagaaaggccccagcccgacagaacccccaccccgaaccc

SEQ ID NO: 104426 - RNA, 43 nt, Homo sapiens
caccgccgagcgcgcgggggccgcaccgcgaggaacccgagcc

SEQ ID NO: 104427 - RNA, 76 nt, Homo sapiens
cccacaggggggaaagagcgccaggcgcacacagcacaaggccagagccggaagggggcagcccagagaacaccag

SEQ ID NO: 104428 - RNA, 74 nt, Homo sapiens
accacacagacccgccagagagagccaaggagaccgggagagagacgaaggacgcgcaggggcagcagacacgg

SEQ ID NO: 104429 - RNA, 80 nt, Homo sapiens
gaagaacccacgccgacacgacgccgcgggcaggcgcgcgcacccgaccggcgggggcccagggccagcgcggcaccgag

SEQ ID NO: 104430 - RNA, 68 nt, Homo sapiens
cgacggacaacagaaagaggcaacagaagcaagcggaagaaacagcagaggcacacaggacaacgagg

SEQ ID NO: 104431 - RNA, 78 nt, Homo sapiens
gcgcgcccagaagaagggaaggcgcgaggaggaaaggaggacgagggggggccgaagaagccagggggaggaaagcag

SEQ ID NO: 104432 - RNA, 72 nt, Homo sapiens
acaaacccgaaggacaggacaaggccacgcgcccaggcggagacaggggcgacgacgacgcaaccgcaaccc

SEQ ID NO: 104433 - RNA, 72 nt, Homo sapiens
ggacagacgccgacgcccaggcaccaagccacaaaacaggccagaccgggcacagacaccgcggacccagag

SEQ ID NO: 104434 - RNA, 61 nt, Homo sapiens
ggacacaggaagaacaagacacaaagaaccgaggacaaaaagccagaagcacggaaaccag

SEQ ID NO: 104435 - RNA, 43 nt, Homo sapiens
agacacggccagacgcccccaacccgccgggcaggaggaggga

SEQ ID NO: 104436 - RNA, 78 nt, Homo sapiens
cagccaccagcagcccccagagcgggaccacaggaccccagcccggcacaaacaggaaggacagccagcccagcccca

SEQ ID NO: 104437 - RNA, 47 nt, Homo sapiens
gccgcagggagaacccgaggcgggccggggggggcacagagccccgg

SEQ ID NO: 104438 - RNA, 73 nt, Homo sapiens
agcccccccaccacgaaaaccggagaggagagaaacacaggccggagcaaggccaaacaaacaaaaaacacgc

SEQ ID NO: 104439 - RNA, 65 nt, Homo sapiens
caccgaccagaggaaagcaagcaggaggcaaagggaccccaagaaaccaaagggcaagagccgca

SEQ ID NO: 104440 - RNA, 68 nt, Homo sapiens
gagcagcacacccgacgcgcagcccgccaagaccggcccacgggcacgccaaaaccagaaacacagga

SEQ ID NO: 104441 - RNA, 51 nt, Homo sapiens
gggacgcaccacgaggcacggaccagcacccccgcccccaggacccccgca

SEQ ID NO: 104442 - RNA, 64 nt, Homo sapiens
ggccgagcaggcgagcgaacgacgcccgccccccaaagcgaagccaaagcgaaggcaaaggcca

SEQ ID NO: 104443 - RNA, 78 nt, Homo sapiens
accaccaacagcaccagaagcccaggcaggaaccaccaccacagacccagacagggcgagaggagcccaaggacaccg

SEQ ID NO: 104444 - RNA, 72 nt, Homo sapiens
accggggcaggaaaggaaccaggagagagcagccagagggaagaccgcaggaaagcaggaaggcaagaaagc

SEQ ID NO: 104445 - RNA, 79 nt, Homo sapiens
aagaagcaggagaacgaaacggagccagagaaggcagaaggcacgaaaagacagcagggggagcagcaaagaaaggagc

SEQ ID NO: 104446 - RNA, 71 nt, Homo sapiens
ccaaggcggcccggcgggggaaccacagacagggggacacaggacaacgagagaagccgaagcgggggacc

SEQ ID NO: 104447 - RNA, 77 nt, Homo sapiens
aaaaagagaaaccggggaaccacggacaacccagaggacaacgaaggcggagacggaagcggaagcacacgccagac

SEQ ID NO: 104448 - RNA, 76 nt, Homo sapiens
ccgccgcgcaagaaggccgggcgaggaggcccaaagcaccgagcgcccagacacagacagaagacaaggaaagacc

SEQ ID NO: 104449 - RNA, 57 nt, Homo sapiens
ccagaggagaaggcgcccaccgccaacaagcagcaaaaaggaaacacagagcaaagg

SEQ ID NO: 104450 - RNA, 63 nt, Homo sapiens
caaaaccgccgcgcgcgaccaaagaggcggggaaaaaggagaagccagaacaaagagaagaaa

SEQ ID NO: 104451 - RNA, 60 nt, Homo sapiens
ggaaacacgaaggaacaggagcccccaggacaggcacacccgggaaaaccgaacacccag

SEQ ID NO: 104452 - RNA, 69 nt, Homo sapiens
gcagacaaaagggccaaagaagggagagaggggggaaaagacggaagaccaggcacagcagagagccag

SEQ ID NO: 104453 - RNA, 82 nt, Homo sapiens
caagccagaggccaacccaggccggaaggggcgaccggaccgggagaagaaggcgccgaggcaaggggacagcacgggagcg

SEQ ID NO: 104454 - RNA, 58 nt, Homo sapiens
cgcagcagcagagccgcgcagccaggccccaacaaggcgagaacgggaagcgcacaag

SEQ ID NO: 104455 - RNA, 52 nt, Homo sapiens
aggagcccagaccgggcgacccgcccgacgcacaaggaaaaacagagagaaa

SEQ ID NO: 104456 - RNA, 78 nt, Homo sapiens
aggcacgcaaaacggaacacagaagagaacagacaggcagacacccaggaaggacaaaaacgggagcagaccacagcg

SEQ ID NO: 104457 - RNA, 77 nt, Homo sapiens
gacgagagcccacgccagcacccgccggccgcagagcacgcggagcgacccgccacgcggccaggaggccgacccga

SEQ ID NO: 104458 - RNA, 57 nt, Homo sapiens
ccccagagaaagcccgccgcaccagcaagcgcggggcgccaagcccacgggcgcacc

SEQ ID NO: 104459 - RNA, 57 nt, Homo sapiens
cagacaccgcgcggaccagaggaggaaggaccgagcgcaggaaccaggccagcgccc

SEQ ID NO: 104460 - RNA, 81 nt, Homo sapiens
gagccggaaaggggcaaaaaccccggagcccgaccaggacccgagaacaagacacaggcagaagccccagaggagcccgaa

SEQ ID NO: 104461 - RNA, 76 nt, Homo sapiens
agaacgggcaagcggggccgcaagcaggcaagacccaccccacggacccaccgcgcagacaaaggccagggcgccc

SEQ ID NO: 104462 - RNA, 88 nt, Homo sapiens
gcagcagcgcggccgggcaggggcccgcaccacagccccaggacaaagaccagagcggaggacaccccggagaggacgggaggacggc

SEQ ID NO: 104463 - RNA, 69 nt, Homo sapiens
agaacccaccgaaggacgaagggaaagagaacagaaaaaacagggcagcccaccagcagagaacaaaag

SEQ ID NO: 104464 - RNA, 84 nt, Homo sapiens
gaagcccgacccaagcaacagccaccggcagaggccagccgacaaaagccaggccaggaccacagcggaacgggagaggcacgg

SEQ ID NO: 104465 - RNA, 70 nt, Homo sapiens
agaagagacgaaaaagacgggaagaaacccacaaacccagagacagcggaggaaaaaccccaaaaggcgg

SEQ ID NO: 104466 - RNA, 74 nt, Homo sapiens
aacaagccgaccggaaaaagggagacaacgaagggggaacgacccccaggcagccgggcgagcagaaaaccggc

SEQ ID NO: 104467 - RNA, 52 nt, Homo sapiens
agaggaaaaccgaggagacgaaccagaccccaccaacaacgaacgcggcagg

SEQ ID NO: 104468 - RNA, 65 nt, Homo sapiens
ggggagaacagcccaaaaaagcagaagagaggaagaagacagcaacggaaccacaccgcgaaaac

SEQ ID NO: 104469 - RNA, 85 nt, Homo sapiens
ggcggcgaggaaagcaggaggaggggcggcggcgggaagaaaggaaggcccgaagccacagagcggaaggagaaggggagcgcgc

SEQ ID NO: 104470 - RNA, 86 nt, Homo sapiens
ggacccaggagacccgcgggacccgccgcggcgagcgccaccgcaggagagccccgcagggccgccccgcgcgagagcccagcccc

SEQ ID NO: 104471 - RNA, 31 nt, Homo sapiens
gggacgcaccacgaggcgcgagagcgcccgc

SEQ ID NO: 104472 - RNA, 70 nt, Homo sapiens
gaggaacaggccaaggggcccacccaagaggaacggaaggaggcaaacagccagccacccggcagagggg

SEQ ID NO: 104473 - RNA, 44 nt, Homo sapiens
cagagcccacagaagcaggaaggacagaagagcagaagacagag

SEQ ID NO: 104474 - RNA, 72 nt, Homo sapiens
gccagaaaaaagacagaaaaggcgcaaggaacagcagagaacaaaggaccgcaaacgaagacggcagcacag

SEQ ID NO: 104475 - RNA, 93 nt, Homo sapiens
ccgacagaccaccccgccaacgcggcaccgcagaacgccacaaccagcgcaacacagaaacacggaaccagaagcaaaagcgaaggaaacaaa

SEQ ID NO: 104476 - RNA, 77 nt, Homo sapiens
cgaagggaaaacgggccgggcgccagccaggaggaccggcaggaccgacgagcccgggagggaagaccacaagaggg

SEQ ID NO: 104477 - RNA, 78 nt, Homo sapiens
ggcgggaaggcggggcgacccggggggcgcgcccagagccccgcgcagcccagggaaggcgccggcgaaagcaacgaa

SEQ ID NO: 104478 - RNA, 80 nt, Homo sapiens
gaccaggaaggcgccaaacgggcagggccaggaaacaagacgaagccgcgcggagcgggaaagacacggagcaggccgga

SEQ ID NO: 104479 - RNA, 81 nt, Homo sapiens
cgaaggccgggacccggccccggcccacaggggggggcaaacccgagagaacgggacgaaggcgcgacgccaaggcacgag

SEQ ID NO: 104480 - RNA, 79 nt, Homo sapiens
ggcccccaagcccgaaagagagacagagagaggagaaagcggccaaccccagaagagagaacagaagaagagagaaagc

SEQ ID NO: 104481 - RNA, 62 nt, Homo sapiens
aaaccagccggaaaaacaagagccaagagcagcacccaaaggccaggagcgccaaggaacag

SEQ ID NO: 104482 - RNA, 69 nt, Homo sapiens
ccggggcagcaggcgaccagcgccacgagcccaaaagcaaagcagggcagcaaagaacacaaaggcacg

SEQ ID NO: 104483 - RNA, 75 nt, Homo sapiens
agcgagcgagggggggcgcgccggaaaccggagcgcgcagcaggccccccagcggcccggaaaaagcgcgcccaa

SEQ ID NO: 104484 - RNA, 61 nt, Homo sapiens
ccagccgccgccgccgccgcgccgcagcgccaccggagagacagagagaggagaaagcggc

SEQ ID NO: 104485 - RNA, 75 nt, Homo sapiens
ggagagccaaagaaggaccaaccagacgccgacacgcagggccaagagaaaaagaaaaggaagacagaagaagaa

SEQ ID NO: 104486 - RNA, 86 nt, Homo sapiens
aaagcccgcggggcaaccagaagaacggaagaaggaggggccggcgcaggacgcagcgagaccgagggagcggggcggccaggggc

SEQ ID NO: 104487 - RNA, 72 nt, Homo sapiens
ggaaaacacccaaacaggacacccaggacccagcaaggagaaaccccacacacaacgcacaccgccgcacgg

SEQ ID NO: 104488 - RNA, 65 nt, Homo sapiens
cagacgaacggaccccgggaaagagaccaaaaacagcacagaaaagagcgccgcaaggcacagcc

SEQ ID NO: 104489 - RNA, 97 nt, Homo sapiens
cgcccgggcaagcaaacccgcccagcccgagagccgagagcgggacaaaggacacacggacccgaacaaagacaaagacaaaccggaagagcaaaag

SEQ ID NO: 104490 - RNA, 63 nt, Homo sapiens
caaagaccagagaaagcggcagaaggaaacggaacgaaacggcagcagcaagagcaagaaaga

SEQ ID NO: 104491 - RNA, 63 nt, Homo sapiens
caaccagacagaccaggaaagacccccgaagcaccaaagcgggaagccaacaggcgagcgaag

SEQ ID NO: 104492 - RNA, 72 nt, Homo sapiens
ggggagacggacggagaacgggaagccgcccggcagagggaagacccagggagaacccaccacgagaggcaa

SEQ ID NO: 104493 - RNA, 81 nt, Homo sapiens
aaacagaaaacacgggcccgacgacccagggagaagaaaggggaccggggacacacccacgaacacaaagggcccggacgg

SEQ ID NO: 104494 - RNA, 71 nt, Homo sapiens
acccgaagcgggcgcgcgcacggcaggacggagccacgcccccgagagccgccaacacccggccgagggca

SEQ ID NO: 104495 - RNA, 52 nt, Homo sapiens
cgcccacccgccaggggggccgcaaggccaggcgcgcagaggcacccaacgg

SEQ ID NO: 104496 - RNA, 38 nt, Homo sapiens
cggcgggcggggcaccccagaggcccagagcaccacga

SEQ ID NO: 104497 - RNA, 79 nt, Homo sapiens
cacggggcacaagaagaggggcacggagagccagcccaggccaaagacaggcggaccccgccgcacaagccaacaccgg

SEQ ID NO: 104498 - RNA, 76 nt, Homo sapiens
cgcaggagacagggcccgggcacaaaaaccgacgagccagaggaggcagcgacaagacggagacaaaggggagcca

SEQ ID NO: 104499 - RNA, 79 nt, Homo sapiens
cgcgacagaggagggaggaaaacaaccgagggcagagccaccagcccccgggccaagagcagcacggagacagagccac

SEQ ID NO: 104500 - RNA, 76 nt, Homo sapiens
gaaagcaaaaaagggagcaagagaggcagcaagcaacgggaggacaggagagacaacggaggcaagaaagacggag

SEQ ID NO: 104501 - RNA, 38 nt, Homo sapiens
gggggggggccccacgcgaaagagagccagggcagacc

SEQ ID NO: 104502 - RNA, 79 nt, Homo sapiens
cagggcaccaaagaaacaggcaccagaccaaagcagaacaagagccaccgacagagccccagaccgggagcacccagac

SEQ ID NO: 104503 - RNA, 97 nt, Homo sapiens
cagagcaaaccaaaggcggcacagagaccccagaaaaggagaccccccccacagaaagccgaccagaacagcgcccaggccaggaggaaggccaggc

SEQ ID NO: 104504 - RNA, 67 nt, Homo sapiens
aaacagaaccggaagagcaggacaaaaagaggggaagaggaaacaagcccaggcgacggagcgggac

SEQ ID NO: 104505 - RNA, 60 nt, Homo sapiens
ccgcaggccaccgacacgagacaaccgggagccgggaccgcccaggcaacacgacaggca

SEQ ID NO: 104506 - RNA, 77 nt, Homo sapiens
aacccacaggcgcgcacaacaacaaaaccagagaaaacggggccaggcgcacgaagaaaaggaaaagaagacgcaca

SEQ ID NO: 104507 - RNA, 76 nt, Homo sapiens
ccggaagacggcagcggccccggagacacaccgcacacggcggcggcgaagccaagacacgggcccgccgagggcg

SEQ ID NO: 104508 - RNA, 75 nt, Homo sapiens
caaggggacgccgcgcgcccgccgcggacagaccagagggaagcgcgcagacagaacggcggagagaagagaccc

SEQ ID NO: 104509 - RNA, 71 nt, Homo sapiens
cggcgggggccagcccccagcccggagaagccaaaggcaaagggccgcaaaaggaaagacaagcagcagag

SEQ ID NO: 104510 - RNA, 80 nt, Homo sapiens
agagcgccacccaggaggcggagcggcaaaaaccggaaagaacgccggacaacagcggcgaagaaggcaaaccgaaggcc

SEQ ID NO: 104511 - RNA, 85 nt, Homo sapiens
gaggccggagaaacaggcgccgcgggcccgcgcccggccggacccgggcccgaggaagcccggggcggcgacggagcacgaccca

SEQ ID NO: 104512 - RNA, 82 nt, Homo sapiens
ggagaaccaaggaagccacaaacagacagacacagggaaaggaggcgcaccgaggaaggaggaacagaagaaacagggcgag

SEQ ID NO: 104513 - RNA, 73 nt, Homo sapiens
gcccaagcggaaagcacgcgcacagagacccagcgaggcccaagaaaacagaagagggaggcaaaccggcaaa

SEQ ID NO: 104514 - RNA, 72 nt, Homo sapiens
cagagcgaagcgaccaagcagaaggaccaccccgcgaagcgggccagcacacgacagggacggccaaccagg

SEQ ID NO: 104515 - RNA, 74 nt, Homo sapiens
ccacccgggggggcagcgcacggaggagcggcgggccagacaggaaagggagcggccccaccaaacgacacagg

SEQ ID NO: 104516 - RNA, 75 nt, Homo sapiens
gacacagcaggggaaaggaacaggcgcaagaaaaagcaggagccgggaacgacggccccagcagcggcccggacc

SEQ ID NO: 104517 - RNA, 80 nt, Homo sapiens
aggacagaggaagaggggccccaccagacagggaccggcggcaaccggaaggaacggaggagagacagagagaggagaaa

SEQ ID NO: 104518 - RNA, 75 nt, Homo sapiens
gacagccggacgagcgcgaggaggggaccccaccagacaccagggcggacgcagcccccaacccgaccggcaacc

SEQ ID NO: 104519 - RNA, 67 nt, Homo sapiens
cgcggacccggagcgacaagcgccccgacggagcgccaggacggagccggggggggccccaagcgag

SEQ ID NO: 104520 - RNA, 53 nt, Homo sapiens
acggcagcacccggaagaaacccggcggggcaaaggcggaggcagggcacgac

SEQ ID NO: 104521 - RNA, 76 nt, Homo sapiens
cgccgcaacgggggggcccaccgcgcgggcagggcgaggccgcgaagagaccggaagccagacgcacacaaacaaa

SEQ ID NO: 104522 - RNA, 74 nt, Homo sapiens
caacacccacaaggcacccaccaccacgcccgggcgacagcaaggacacaacacgaaagaccccggccagccag

SEQ ID NO: 104523 - RNA, 68 nt, Homo sapiens
acaggagcacgccacgcagggaccccggagggcaccggccccaggaaaccgccagaagcgcggcgaga

SEQ ID NO: 104524 - RNA, 78 nt, Homo sapiens
ccggcaagcaaaacccgcagaacggcgccaaacagcaaccagaggagccggggcgaccgacacaaacggaccgcccga

SEQ ID NO: 104525 - RNA, 86 nt, Homo sapiens
gggaggccgaggcgggcggacacaagggaagagaaaccacgaggagggaagccagcacccgggccagccagaacggcccacgagac

SEQ ID NO: 104526 - RNA, 66 nt, Homo sapiens
aaaccaccggacagaaaagcagagcccaacccaacagcccaccaaaaaacacagcagaccccacac

SEQ ID NO: 104527 - RNA, 56 nt, Homo sapiens
gaacaggagcccacagaaggcagaggcagaaccacagggcccagaggagagccgcc

SEQ ID NO: 104528 - RNA, 79 nt, Homo sapiens
ccggaggaggaagagcgcacaaccaagagggcaaaaacgaaagcaacggagccagacgagaacacacaagaaaaacccg

SEQ ID NO: 104529 - RNA, 42 nt, Homo sapiens
acgacaacaaggcagaaggcagccccaggagcgacagcagga

SEQ ID NO: 104530 - RNA, 72 nt, Homo sapiens
acacaggggaagaaggaggacaacagaacagccagcaaagacaagagcagaccagcagccgcagcgcgacag

SEQ ID NO: 104531 - RNA, 70 nt, Homo sapiens
ccgccgcgcagccggaggggcgaggggcagcgcgagagggaggccagcgaggcggaagacagccaggccg

SEQ ID NO: 104532 - RNA, 81 nt, Homo sapiens
cagaaaggccccaccccgccacagaacccacagccacagggcaggcggccagcgcgcgaaagcacgaaggcggcagccagg

SEQ ID NO: 104533 - RNA, 30 nt, Homo sapiens
aaagccgcaggcagacccccggcggccaag

SEQ ID NO: 104534 - RNA, 70 nt, Homo sapiens
gaagaagaagaccacaaaaaagagacccacagccagcaacaccgggaagggcacaagccacgcacgaccc

SEQ ID NO: 104535 - RNA, 51 nt, Homo sapiens
gggagggggggccccgcgcaaagggggcaaagaaaaaggagagaaaaagag

SEQ ID NO: 104536 - RNA, 85 nt, Homo sapiens
caagcccgggaacaaaaacaaacaggagccgcggggcccgcccagaacagaagaacggccgagcgaccaggagaggagcccccgc

SEQ ID NO: 104537 - RNA, 57 nt, Homo sapiens
aacgcgcacggcgaggggcacaggagccgcgcaggccaggaccacagcggaacggga

SEQ ID NO: 104538 - RNA, 79 nt, Homo sapiens
cgacaggcccaaggggcccccgggcaccccggaccgcgcagccaccgcggcccccgcgggcccggacggagacacacgg

SEQ ID NO: 104539 - RNA, 61 nt, Homo sapiens
gaggcgcagacgggagccgggagccggcagaaagccggacccacagccgccagagagaccg

SEQ ID NO: 104540 - RNA, 59 nt, Homo sapiens
ccgaggaggcaggcgccaccacagacgcgcggagccagcgcccggcaaggagcgagcgg

SEQ ID NO: 104541 - RNA, 82 nt, Homo sapiens
aggcccaagcgcgcaccgcggcgccgacacaaacgccaagggacggaccacgcccgcaccagggccaaaccaagccgaggcc

SEQ ID NO: 104542 - RNA, 70 nt, Homo sapiens
aaaacagacacgcaagagaaacaggcacacaagggaggaggcaaagccaggcgacaaacaggggaagaaa

SEQ ID NO: 104543 - RNA, 76 nt, Homo sapiens
gcccccaggcgagccacgccaccgggcacggagcgaggcagcgccacgcagagccccgccaggaagacacgccggg

SEQ ID NO: 104544 - RNA, 75 nt, Homo sapiens
cgcccgggcagggcccaccccgcgcccgacaggagaaccagccaaaaaagggcagaaccgacaacggggacccgc

SEQ ID NO: 104545 - RNA, 73 nt, Homo sapiens
gaagcacgcgcaggagggaagcacaggggaaggccggaaagggcgaaccacgggaacaaaggcgaggacaagg

SEQ ID NO: 104546 - RNA, 83 nt, Homo sapiens
ggacccgccaagaagcgcccacgcagcagccgagccccagcccccagcagccgacaggaggcccgcaagagcaggcaggcagc

SEQ ID NO: 104547 - RNA, 66 nt, Homo sapiens
ggccccgagcagggggggggggaagccgcagcggaaagcaggagcacagagacgaaaaggggcaaa

SEQ ID NO: 104548 - RNA, 79 nt, Homo sapiens
accccgcagccgagccaccccgcacgggcccggggcccaccgcgcagccgggagccccacgaccaggcagccacgacga

SEQ ID NO: 104549 - RNA, 91 nt, Homo sapiens
acagagggaaccggcagggcaagcggcgacacacgacgggccaggacacgcagcacagcagaggacgagaacagaagggccaagaaaagaa

SEQ ID NO: 104550 - RNA, 75 nt, Homo sapiens
gaccagccaccacaaaaggagagaaaaccagccgaagacagccccgcaccaggcggaagcaggcaggggcaaagg

SEQ ID NO: 104551 - RNA, 59 nt, Homo sapiens
ccccgcccggaggccgggaagccaagacaagcaaacccaggaacacccggccggcccgg

SEQ ID NO: 104552 - RNA, 61 nt, Homo sapiens
gccacacccacagagaacccagacaacaggacgccgccaaggaacgaagcagagcccaaca

SEQ ID NO: 104553 - RNA, 74 nt, Homo sapiens
caaccccacaaggcggaaggccaaccaggagagcacgcagcaggaagagccagggcgccggccaggcggaggca

SEQ ID NO: 104554 - RNA, 63 nt, Homo sapiens
gaggcgcgggagggcgagaacgaccccgagacgggaagaacaagcaagcacacagaaagagac

SEQ ID NO: 104555 - RNA, 37 nt, Homo sapiens
ccaaagaagggagagagcagcgagcaaggcaagaagc

SEQ ID NO: 104556 - RNA, 40 nt, Homo sapiens
acacaggaacgggccccggaacagcaaaagcagcaaggcc

SEQ ID NO: 104557 - RNA, 51 nt, Homo sapiens
acaaacaaacaaggacggggacacacaaagcaaccggggaaaggccacagg

SEQ ID NO: 104558 - RNA, 69 nt, Homo sapiens
cgggcagaccacggagagcaaaacgcacccccaggagggacgggaaaacgcagcacagacagcccaccc

SEQ ID NO: 104559 - RNA, 89 nt, Homo sapiens
ccggggacccacagacacagccggggcgggagccgcccggggcagggccgggagagcgggcccaggggccccgggcgggggcaacagaa

SEQ ID NO: 104560 - RNA, 78 nt, Homo sapiens
ccgaggaagcgccacgaggcacacgaaaacaggcagccagcaacaaagaagagggagacggagcagcaagacagacag

SEQ ID NO: 104561 - RNA, 79 nt, Homo sapiens
gaagcccagcgggccggacggggcggggggaacggcagaaccaccagccggacagggaccacacggcgacgcagggacg

SEQ ID NO: 104562 - RNA, 78 nt, Homo sapiens
ccaccggcggcagagcaccgcgcccagggccggcggacagcaacacgaccaccaagggaagaaagccaaggcggagac

SEQ ID NO: 104563 - RNA, 77 nt, Homo sapiens
gggaaaaggcaaaaacccacaccgcaacccagcgagagaaagcacaagagggccagggaccaggggacgcccaagac

SEQ ID NO: 104564 - RNA, 91 nt, Homo sapiens
cgcggcccgggccgcaccagagcgcccggcccacgacacaggaagaagacagggaagcgagaaccaggaacgaagaacaaaggggaaaggc

SEQ ID NO: 104565 - RNA, 82 nt, Homo sapiens
agccagccggagaagcgcgcgggcgcgcaggccgcggggagcaccgggccgggccacaagagagggaaagaccgaggagacc

SEQ ID NO: 104566 - RNA, 74 nt, Homo sapiens
agaccaccaaacaggcgcagaaaggacccaggagcgaaacagaaacaaaaagaagcggggaacccacaagggga

SEQ ID NO: 104567 - RNA, 83 nt, Homo sapiens
ggccggggcccgggagagggggaggcgcggcggccgcagcgccacaaaccagacgaacaggaggcagaaccaacagaacgacg

SEQ ID NO: 104568 - RNA, 85 nt, Homo sapiens
gggcgagcggcggggagcggcgaagccgcgggcgagacgcccaggaccacaccgcagcgaacgcaggccccagcgaaaaaggggg

SEQ ID NO: 104569 - RNA, 69 nt, Homo sapiens
gcagaagccgcgagaaaccagagcgcacacaaagaacgagggcaggaccgagggagcagcgcggaggga

SEQ ID NO: 104570 - RNA, 86 nt, Homo sapiens
gcacgccgcagggagaagaccagcaagcgggcggcaagacacggggcgacgccacagagaaagggacaacaccccaccacaaggga

SEQ ID NO: 104571 - RNA, 81 nt, Homo sapiens
cccaagacggcggagcgcccacgagcgggcaagcgcgcgcagggccgccgccacaagggccgcgaggggaacgacgcggag

SEQ ID NO: 104572 - RNA, 56 nt, Homo sapiens
gcggccaagggaccaaggggaaacaaacccagacgcagagacggcgagcaaagccc

SEQ ID NO: 104573 - RNA, 80 nt, Homo sapiens
gacacgcggagcaagggaaagaggccggagagaagagacagagacaggggccaaacccacaggggccagcaaagagaggg

SEQ ID NO: 104574 - RNA, 76 nt, Homo sapiens
cccgaccgcagggagcagaggggacagaggcaccaaggaccccaagacaggaggagggagccagccagagcccccc

SEQ ID NO: 104575 - RNA, 76 nt, Homo sapiens
aagaagccccggccccccccccccccgacacggggcagagggcgcggggccagaagggagggcaagcagaaagcag

SEQ ID NO: 104576 - RNA, 54 nt, Homo sapiens
caacgaaggcccacaacggcagcacaggaggaagaaaaccagacgagagacaga

SEQ ID NO: 104577 - RNA, 77 nt, Homo sapiens
cgccagcgacccggggcaccggagggaccaaggcaaaggcccggccggaaggagaaggacaccaggcccaggggaca

SEQ ID NO: 104578 - RNA, 72 nt, Homo sapiens
cccaagagcgggaacaggccccagaaaggagaaccaacccgcaagacacccagcacggccacacaacgaaag

SEQ ID NO: 104579 - RNA, 59 nt, Homo sapiens
ccgggacggggcgcccaccggaggcacaggaccgacaaagaaaacgcacaggaccgaag

SEQ ID NO: 104580 - RNA, 57 nt, Homo sapiens
aaccagaaagccaggagccacgcaggagggggacggaagcacgggaaaccagcaacc

SEQ ID NO: 104581 - RNA, 72 nt, Homo sapiens
caccccaccccccgggaagcccacaacgccggccgcggggcaggaccgagagaaagccgcccgcggagcgcg

SEQ ID NO: 104582 - RNA, 36 nt, Homo sapiens
acgcgaggggacgaggaagacagagaagggaaagga

SEQ ID NO: 104583 - RNA, 78 nt, Homo sapiens
ggcaccccgcggacagggcgggggaggggcgaccccggggcccggccagcacgaccgaggaggggcggacagcggagg

SEQ ID NO: 104584 - RNA, 72 nt, Homo sapiens
gagcacagcaggaaggagcaccccacccgagggcgacagcacccagccagcaggcaacaggcccagaccagg

SEQ ID NO: 104585 - RNA, 78 nt, Homo sapiens
cgaccggaagaagcagcaggagcagcagcgcagccacccaaggagagaagaaccgcaaaaagcccaccacccgaagac

SEQ ID NO: 104586 - RNA, 37 nt, Homo sapiens
gaaaccggagcgcgcagcagcgggagggacaggagaa

SEQ ID NO: 104587 - RNA, 82 nt, Homo sapiens
gcggagcggagcccggagggaagggaaaaggccgaggcacagcgggaagaccgcaaagacgacccgagacagggaacagcag

SEQ ID NO: 104588 - RNA, 83 nt, Homo sapiens
caagcaggacgccccacacacgccgccgggggaacagagaggcccgcggggcacgggcagggaaggagaagggacacgagggg

SEQ ID NO: 104589 - RNA, 81 nt, Homo sapiens
acaccacggccacaccaccacccaggccacacagacagcacagagggccaagccagaacaggggaaagccaaggcgagcag

SEQ ID NO: 104590 - RNA, 72 nt, Homo sapiens
ccaggaccccgaacccagccacgacagccggacaaagcccccagaggaaccggggcacaccaagaaaaacca

SEQ ID NO: 104591 - RNA, 80 nt, Homo sapiens
gaaaacaagcccagaccaaaggaggcaaaagcagaccggaaaacccaccggcaagaccacacccgaggggagcccaggac

SEQ ID NO: 104592 - RNA, 72 nt, Homo sapiens
cacacggacagcggggagggagggggccggagccaaccaccgagaggaccaggcacaagcagaggaaccagg

SEQ ID NO: 104593 - RNA, 58 nt, Homo sapiens
gaaacaccaccaacaaaccgggggccaaagggcgagggcacaaaaaaccacacccccc

SEQ ID NO: 104594 - RNA, 67 nt, Homo sapiens
gacggcggaccgacccgagccgacacaagcgggacggaagaggcccggcgaccggacagaaaccaag

SEQ ID NO: 104595 - RNA, 77 nt, Homo sapiens
gacacaggcagaaacaagagggcaacagcaccgacccggaagcgagacaagccgcggaggagcagcgccccaaaaga

SEQ ID NO: 104596 - RNA, 59 nt, Homo sapiens
gggagcaacagcggagaaggacaaaagggaagaacacgggacgggcgagaagccgggag

SEQ ID NO: 104597 - RNA, 39 nt, Homo sapiens
cccgcgagcgggacacaggcaaggaaccgaaggaacaag

SEQ ID NO: 104598 - RNA, 114 nt, Homo sapiens
gcagggaccgaaacaaaagagcacaaaggaaaacgaggaaagcccaggagacacggcaaaagggacccgacacaggacaagagacgggaaccagggcccacacccgccggggaa

SEQ ID NO: 104599 - RNA, 79 nt, Homo sapiens
cgcgaacaagagcagacaggcgcgccggagcaagggagccaaaagaagcaagggaaagaccaggagccagaaaccaacc

SEQ ID NO: 104600 - RNA, 75 nt, Homo sapiens
gccgacgccccgccgggcgacagcccgcgcgggacgcccagagcgggcccgaagaagacacccagaaggcgaagg

SEQ ID NO: 104601 - RNA, 78 nt, Homo sapiens
gcggccggaggacagcgggagagagaagagccagagggacacgcgggcacggccggagggggaaaaccacaagaaagc

SEQ ID NO: 104602 - RNA, 80 nt, Homo sapiens
agcgccgacaccccagccggcgacacagcgaagagacccaacagaaagagaaagggacacaagcagaagaggacagaggg

SEQ ID NO: 104603 - RNA, 77 nt, Homo sapiens
cgaccaccagagcgaccacaacaggcaaagccagcgcaacagaccgaagccaccaagaagaacagcagcagaagaga

SEQ ID NO: 104604 - RNA, 88 nt, Homo sapiens
ccggcgcgggcgcgggaccgaggcgaaccggggcggagccaaacccgcggcagcagcaccaggggccaaggagaccgcacgccggacg

SEQ ID NO: 104605 - RNA, 76 nt, Homo sapiens
caagcgcagcaccagcggcgaaagcagaaacaacggacacccccgggaacccaccaaaaaggacaccgaaagacgg

SEQ ID NO: 104606 - RNA, 80 nt, Homo sapiens
ggagaaggagcaaagagggggccaagacgggcagggcccgggcaccaggagcaacaaggccaccgacccaggcggaggca

SEQ ID NO: 104607 - RNA, 36 nt, Homo sapiens
cccccggagcgggaacagcaaaaaggagcggaagag

SEQ ID NO: 104608 - RNA, 69 nt, Homo sapiens
ccccccagaacaacacacaccagaaacagcgcaccacccgcagggggcacaccaggacagagcaaacag

SEQ ID NO: 104609 - RNA, 78 nt, Homo sapiens
agaacaccaccgagccccaggcagcacgcaggcagagccggccagcaggagcgccaaaaaagagggggcgaagggaaa

SEQ ID NO: 104610 - RNA, 85 nt, Homo sapiens
gagacggggcgagcgggcgacggcgcccggcaaggacaaggccggcgcggaagaggccggcggcgggacggccccacgggacccg

SEQ ID NO: 104611 - RNA, 67 nt, Homo sapiens
aagaagagaaaagcagcaaaaagaaggaaaagagaaggggcagaaggaaggggaccaagccaaccca

SEQ ID NO: 104612 - RNA, 83 nt, Homo sapiens
ggacagagagcggacgggccaacccaaaaccagggcggcaaaacgagcgggccagagcccagccaaaggcacgcaccaaacgc

SEQ ID NO: 104613 - RNA, 58 nt, Homo sapiens
gccggcccgcagccgccaccacccaggaccagaaggcgagaggccagcgaacgaacac

SEQ ID NO: 104614 - RNA, 57 nt, Homo sapiens
gcccgcgcggcgcggggaccgcggcccggacccaaagacaggaccacgcaccagcag

SEQ ID NO: 104615 - RNA, 37 nt, Homo sapiens
agcaaggcccaagacccaggcgagcagcagcagagaa

SEQ ID NO: 104616 - RNA, 82 nt, Homo sapiens
caacagcagccgcaaaaacaaggcggaaacaacgggcaaggaaggcacgcaaagcaggggcacgcgcgcggcaagcacgaag

SEQ ID NO: 104617 - RNA, 78 nt, Homo sapiens
acgcgcccggcccggggaccacagccgcggcccaggcccaagacacgagaggcgagggacgacagagcaagcggcaga

SEQ ID NO: 104618 - RNA, 86 nt, Homo sapiens
ccaacgcgggacaggaagggccgagcggcgggaaaggaccagagaagaaaggccaaaacgacaggacggcgagggaccagggggag

SEQ ID NO: 104619 - RNA, 42 nt, Homo sapiens
acgacaagggcccgcggaccgaaacgaaggaggcccaaccac

SEQ ID NO: 104620 - RNA, 84 nt, Homo sapiens
agaacccaccaagccccgcaggagccaccagacggagcagagcagacgccgcggcccgacaggagccagacggagaaaagaaag

SEQ ID NO: 104621 - RNA, 82 nt, Homo sapiens
cccgagagcgggacacaaggacgcaaggagccgacaaggcgcggagacacaagcaggcacgggcacacacaccccgcccgac

SEQ ID NO: 104622 - RNA, 69 nt, Homo sapiens
gaaggccgccggacagcgcagagccaagacggagaaacaagcccaggaggcaagagcgagaagagcgca

SEQ ID NO: 104623 - RNA, 70 nt, Homo sapiens
caacaacagaccggggaccgcccagcagcccaggccgagacgaaaggcagggcacaagacccgagaagca

SEQ ID NO: 104624 - RNA, 72 nt, Homo sapiens
ggacacgaggagaaacagcagaaacgcaccaggccaaagaaagagaagcaggaaaaggaagagcaaaaacaa

SEQ ID NO: 104625 - RNA, 77 nt, Homo sapiens
ggagcgcggcacgaggcgggccgggaggaaaaaggaacaagagcaagaaaaaaacaaaacgcagaagcacggagacg

SEQ ID NO: 104626 - RNA, 80 nt, Homo sapiens
ccggcccggggaccacagccgcggcccaggcccaaggcaaacccagcaggaagccacgggcgaaacagaaaagaaaggaa

SEQ ID NO: 104627 - RNA, 83 nt, Homo sapiens
ggccgggcgggcacgcgcacgggccggccgccgccccgccgacaagcagaccggaagaccgacggaagaccacaccccgaggg

SEQ ID NO: 104628 - RNA, 76 nt, Homo sapiens
ccggcgccccgcacgcccgggaagcgcgcaccgccaagcaggaaagaccacaggggaaacaagagacagaacggcc

SEQ ID NO: 104629 - RNA, 74 nt, Homo sapiens
ggcacccacaggcaagggaacacccgagagcagacagcgcacaaaccgccgggggaaaaaaagcaaagacagcc

SEQ ID NO: 104630 - RNA, 71 nt, Homo sapiens
cggccgagaaaagaccaaccgagaagccgaccaaaccaagacgccacgagagcgcaccacaagacaaacgc

SEQ ID NO: 104631 - RNA, 108 nt, Homo sapiens
gaacccgacccaggagccgaaggaggccgcccaggccagccgcacgcgggcagagcccacagacgccaacagacggcccccacgaccggaagcgggccgacacacccc

SEQ ID NO: 104632 - RNA, 76 nt, Homo sapiens
gagcggggacagaccccggaccggcggcggaaagcggaacacggaacgcgaggaggacggggagagcggggcacgc

SEQ ID NO: 104633 - RNA, 65 nt, Homo sapiens
acgcagacagaggagcggacccccgcggcgcgcagcccagcaggccccaggagcagggccccacc

SEQ ID NO: 104634 - RNA, 58 nt, Homo sapiens
cgcggcggagcccgacccacccaaggcggagaagggcagacaagacacgcagcccaaa

SEQ ID NO: 104635 - RNA, 105 nt, Homo sapiens
cggaacagggccacacggcccgcaggcagcaccgaagagccgagcggccaaggccaaggaagcgggagcaggagcacgaggagcgcgaggcgagaagggcgcacc

SEQ ID NO: 104636 - RNA, 85 nt, Homo sapiens
aaaacgggccaggaaggacaacagcagaaccaaaacccgggcagaagaggagaggaggaagcagcagaagagaagaagaagcagg

SEQ ID NO: 104637 - RNA, 73 nt, Homo sapiens
agcaaaaaggagagccaagaggagacggagaaaggaagaaccggagggcagacgggagcgggccgagaaaaac

SEQ ID NO: 104638 - RNA, 75 nt, Homo sapiens
cgaagcagggaccaacagcccaaaggagaaggagaggacgaacacagcggagcaggcacacagggaacgagaacc

SEQ ID NO: 104639 - RNA, 69 nt, Homo sapiens
agccagcgccaaggcggaaaagcccaagaaacaaacagcaagaaacaacagcgaccagagccgaagaga

SEQ ID NO: 104640 - RNA, 76 nt, Homo sapiens
accggagaccgcgcagaagacacgcccggaagaccagccaacagaacagcgagcggagacaagaaagccaagcaaa

SEQ ID NO: 104641 - RNA, 64 nt, Homo sapiens
gccaaagaaagagaacggaacgggcacaaagaaggcgcaggcaagacgcagagaggagaacagc

SEQ ID NO: 104642 - RNA, 80 nt, Homo sapiens
aggagggggaacgggcggagagacagggagaggggcgaaccggccccccacagccacgcagacaaaaaccacccagcaac

SEQ ID NO: 104643 - RNA, 76 nt, Homo sapiens
gagggcgggcggcagcgcgacggggagcggcggagaccgcccgccccgccggggaaagacccccgaagcaccaaag

SEQ ID NO: 104644 - RNA, 73 nt, Homo sapiens
gccaagaagaggaacgaagaccacaaaacgaaaagaaccaaaacaagagaacgccccacaacgggcagccggc

SEQ ID NO: 104645 - RNA, 70 nt, Homo sapiens
aacagacaagccaaacggcaaggaacacagagccgcagaccacaagccgcagacacaccccgggggccgg

SEQ ID NO: 104646 - RNA, 75 nt, Homo sapiens
aggacccgaccccaaccgaacacaacagagaagccccgccggagaacgaggaaaggcggagcagcggaaagaagg

SEQ ID NO: 104647 - RNA, 78 nt, Homo sapiens
ggcgagcggaggaggagcgaagaagcaccaacaacccaagccgaggccaggcggagaagcgaagccggccaaaagaaa

SEQ ID NO: 104648 - RNA, 96 nt, Homo sapiens
accaccggaaacaggcgaacagaacaagaaccaaagaaaacaaaaggggacaggagcacagcaagcgggagcaggcagaccaaaggaacagaagcc

SEQ ID NO: 104649 - RNA, 78 nt, Homo sapiens
cgccaccgcaccgccaccggcccgacccacgcgggccacaggacaccggcccccgccccgaagggcccgcagagcgca

SEQ ID NO: 104650 - RNA, 63 nt, Homo sapiens
cggaccccgacccgccgccggcccggccgcgcccgggaaagggggcggagaacggaaaagcac

SEQ ID NO: 104651 - RNA, 78 nt, Homo sapiens
caggacgaagagaacgcccgggaccgagcacccgccccgggcaccaacagacacagcggaaacgcaaaagcgagaaga

SEQ ID NO: 104652 - RNA, 61 nt, Homo sapiens
accgaccgccgccgcgcaccgccccgacagagaaaggcacaacccagaccagagaagcgac

SEQ ID NO: 104653 - RNA, 81 nt, Homo sapiens
ggagacgagaccgaaccggcaccgcacaccggaccaggaaacggaggcgggaagaagaccgaaaacgagggacagaagaga

SEQ ID NO: 104654 - RNA, 82 nt, Homo sapiens
cggcgcagggccggccgggcacagcagaggccgcgcagcagcaaaggagagcggaaccggaaaaggagagggcggggacaca

SEQ ID NO: 104655 - RNA, 61 nt, Homo sapiens
agaaggaccaagaaccaggggccacccacgccgacgcccggggaggaaccccaccagagac

SEQ ID NO: 104656 - RNA, 87 nt, Homo sapiens
cggggccccggaacccgagcggagcgaagcgcaggcgcggggcgcggagcgggaggaccccggcagccgcagccacccgcgccggcc

SEQ ID NO: 104657 - RNA, 124 nt, Homo sapiens
caccgcaggacgagcgcgccggccgcgagcagaccggccggaagccacgcccggggcggacaccccagacggaaggcacgagggccgacacgccccccaacgcagacacccccggaggaccgcg

SEQ ID NO: 104658 - RNA, 55 nt, Homo sapiens
cgcaacaggaacggaggcgggcggccagagacggggcgacggggagaggcaggcg

SEQ ID NO: 104659 - RNA, 89 nt, Homo sapiens
ggcgggacggcggccccgcgcagcccccggccgcagcgcaggcagcccagcagggcaaaaaacaggcagccagacgaaacacaggagac

SEQ ID NO: 104660 - RNA, 78 nt, Homo sapiens
ggggcgcaggcagcaaagggccgcgacagaaaggagagccagcaaaggagaaagacagcaaagaaaaggagaagaaag

SEQ ID NO: 104661 - RNA, 79 nt, Homo sapiens
agaggcgggcaacgcagcccggccggaacccggcgggcgcccgggaccgcccggaggaggagggcgccagcgaacccgc

SEQ ID NO: 104662 - RNA, 91 nt, Homo sapiens
gggcaagggggccaagagccgaggccaagcaacacccggaccaccggggccggggaaagaacaaccggaggggaagacgaagaaggacccg

SEQ ID NO: 104663 - RNA, 79 nt, Homo sapiens
aaccccccaggacgggcggaggcggggggaccggcgggcggagccgaggaaacccagacccaagaccaaccgaggagga

SEQ ID NO: 104664 - RNA, 54 nt, Homo sapiens
aaccgacaggaaccagacacgcaaacaggggaaaaaaccggccacagacccgaa

SEQ ID NO: 104665 - RNA, 90 nt, Homo sapiens
acagaccccggccaggagcagccaacaggagcacagccagcaggccgcagccaagccggaacaggagcggcgagcccaaacgcaaggggg

SEQ ID NO: 104666 - RNA, 66 nt, Homo sapiens
ggaggaagggcagagaagaaaacggggacggacccaggccaggaaagaaagaaccgccacgggcgc

SEQ ID NO: 104667 - RNA, 82 nt, Homo sapiens
ggaccgaccagcgcgcgcgcgaggagccgccccaccacacagcaacggacaaagggcaccaccccaaaaacagacaagaaaa

SEQ ID NO: 104668 - RNA, 76 nt, Homo sapiens
agccaaccgcaccgcgcagccaaacaaccaaggaaaagaagaaaaggaagcacagccaacaaaaacgagaaagcag

SEQ ID NO: 104669 - RNA, 61 nt, Homo sapiens
aaggcaagcacaaagcaaaaaacgcaacaccagcacagagcgaccccaaacccaagaacac

SEQ ID NO: 104670 - RNA, 59 nt, Homo sapiens
ccggagcccggaagcagcagccaccgaggacggggaccacagaggcacaaaaggagaaa

SEQ ID NO: 104671 - RNA, 97 nt, Homo sapiens
caccacggagacagccaagagccagcagcggaaagccggcaaagaagagcaggaaaagacaggcagggaggcagcggcaagcggaccgggaggcacc

SEQ ID NO: 104672 - RNA, 61 nt, Homo sapiens
caaaaaggaaagacaccggcggacgccccaaggggccccagaaccgcaccggcccagaagc

SEQ ID NO: 104673 - RNA, 79 nt, Homo sapiens
ccgccggccccgccgccaagaggagcgagcggacccgcgagggcacccagaggcgaaaaccggcgccaagcacggggac

SEQ ID NO: 104674 - RNA, 74 nt, Homo sapiens
cccggggaggagagcgccggaacgccgaccgaaaccaccgagcccaagaccaagcacgcacaaggcccaccgca

SEQ ID NO: 104675 - RNA, 77 nt, Homo sapiens
gagagaggcaagacgggacggaccagcccccccacccggcaagccgaaaacggcgagaaggcgcgagacccacggcg

SEQ ID NO: 104676 - RNA, 83 nt, Homo sapiens
cgcccaaggcaggaagaggggccgcaaagaagacgagagggggcccgcccgcccgacacaaagccccaaggaaccaccaagag

SEQ ID NO: 104677 - RNA, 78 nt, Homo sapiens
accagaacaggacggacagaggagcacgccaacccaaccggagcaaaaaccgaaaccgaaaaggccaacggaacaaag

SEQ ID NO: 104678 - RNA, 56 nt, Homo sapiens
cccccggacaaagcgagcacgcaaggcgggcacagcaaacacagaagaccggccgc

SEQ ID NO: 104679 - RNA, 86 nt, Homo sapiens
gcaggcccgcccggaagaagcgaccaaagcgccgaggaccggcaacagggcggcggggaaaaggcggagacagcagccaacgcacg

SEQ ID NO: 104680 - RNA, 82 nt, Homo sapiens
gcgcgggccgcgcgcgcgcgcccggaaaccggacaacaaaacaagcgcagacgacagaaaaccaagaaccgcgacaggagag

SEQ ID NO: 104681 - RNA, 85 nt, Homo sapiens
accaggcggcgggagaagagcgcagaagagacccgggggcagggaacccaccggaaacgcagcccagggcacggggagggcgagg

SEQ ID NO: 104682 - RNA, 90 nt, Homo sapiens
accaacggccaagaacaagaacaaaggccgcgacggaggcagaccacagaagaaaaaagaaaaaaaaaggaaagaagaccgcagaaagaa

SEQ ID NO: 104683 - RNA, 87 nt, Homo sapiens
cggagcgcggcgcccgcggccgggcggcgcggccgcccgggccgggccccaccggacgaacaccagcaggaaaaaagagcggcagaa

SEQ ID NO: 104684 - RNA, 71 nt, Homo sapiens
gcaacccagaagagcgaaggacccagcgaggagggacgaacgcagacacccgagcgacacaggaagaacaa

SEQ ID NO: 104685 - RNA, 79 nt, Homo sapiens
ggaggaacgccacgcagcgccggaaacgccacgggaaggcgcgagccccgcgcgggcagagcgccacagaccgaccagc

SEQ ID NO: 104686 - RNA, 84 nt, Homo sapiens
gcccgagcggagcggggcgcaggcgccgccgccggacgcggcaacggagaaggccggaagaaacgcggaccgcggagggccgga

SEQ ID NO: 104687 - RNA, 71 nt, Homo sapiens
gcagaaccaccaggcagccggcaaacacacccaccaggggcacaacccgcggccaaccccaaaaagaagac

SEQ ID NO: 104688 - RNA, 70 nt, Homo sapiens
ggaagagccaccagcgacaaacaggaaaggaagaagggcaccgaaggagaccccaagaaaaggaaaaaga

SEQ ID NO: 104689 - RNA, 89 nt, Homo sapiens
gggccggagggacaaaaagcaagcaagagcgcgacacccaaggccgacaacaggcacaaagagagaaggaacacccacagggcagacag

SEQ ID NO: 104690 - RNA, 80 nt, Homo sapiens
ccaggacgcgcccccgggagcgggcgcccagaggaggccagagggaagcaaagcagccaacaccagaagaagggacaaaa

SEQ ID NO: 104691 - RNA, 71 nt, Homo sapiens
cgccggcccacgggcggaaaaggaccagagaagagcaagcccacaaaggcggcagagggggaaccaccgaa

SEQ ID NO: 104692 - RNA, 70 nt, Homo sapiens
aaccagaaaaacagaaagcagcgcacaaaacagggaccacgacggggcgaaaggaaaggaagcaagcagg

SEQ ID NO: 104693 - RNA, 71 nt, Homo sapiens
cagaaacacaggaccccccccaacgaggagacgggacgcgccagcccacaagacaccacgaaacagacacc

SEQ ID NO: 104694 - RNA, 64 nt, Homo sapiens
cggcagcaggcgaagccacccgggagcagaccaagccacccaccaacacggggccggcacaacc

SEQ ID NO: 104695 - RNA, 84 nt, Homo sapiens
aggagggacaagaccggaccagccagaggacgcgggccgaggagagcggaggaggggccacaggaaggaggggcaggaacagca

SEQ ID NO: 104696 - RNA, 85 nt, Homo sapiens
cacaagccccaccagaagagggagggaccaaggaggagacaaggacaccgcgcaaggccggcagaaggaagcccggggcggcgac

SEQ ID NO: 104697 - RNA, 65 nt, Homo sapiens
caagccggccagcaagacccgagcccaaaagaaacgcagagggacggaccggcccccaagcccca

SEQ ID NO: 104698 - RNA, 78 nt, Homo sapiens
gcaacacgggcaccggacccgccaggcccacaagacccggccccggccccacacaacggcaccccaccagcagaacac

SEQ ID NO: 104699 - RNA, 66 nt, Homo sapiens
aaggaccaagaaccagaacgagagcccagacagagaaagcagacacgaacaagccgagcgaccacc

SEQ ID NO: 104700 - RNA, 76 nt, Homo sapiens
ccaggaaggaaagaagccaaaacagcacaggaaacacagaagaagagaaaaagcaccgccccagaccgcaaacagg

SEQ ID NO: 104701 - RNA, 81 nt, Homo sapiens
ggagacgagaagccgaaaagcgcagcgagcggagccgccggagccgaaagaccagcccaccagccaacgcagagccggccg

SEQ ID NO: 104702 - RNA, 76 nt, Homo sapiens
gccgaggggcgacgaaacaacagacgggagagaagcgccggccggaaagaagacggggaggagcaggacgagccca

SEQ ID NO: 104703 - RNA, 57 nt, Homo sapiens
ggccgcaagacccagcgcccaaccgcccgggccaaacgaccaagaaagcgggacgcg

SEQ ID NO: 104704 - RNA, 58 nt, Homo sapiens
gcgaaaaggggaaggagacccaaggaaaggacgaacacaaaggggcagcaacaccaga

SEQ ID NO: 104705 - RNA, 104 nt, Homo sapiens
accaagccagaggccccaaccccccaagcggacgggggaagaacggaccaggggacgcccagaaccagcgcaccggcccgccgcaccacgccgcacacgacccg

SEQ ID NO: 104706 - RNA, 75 nt, Homo sapiens
gaggggcgcgagccgcgccgcgccaagaaaaccggcgcagagccaaaaggaaccgaggaaaagcaggggaaacga

SEQ ID NO: 104707 - RNA, 41 nt, Homo sapiens
cagacaaaaacaggagggcaaggagcccggccggagggcac

SEQ ID NO: 104708 - RNA, 60 nt, Homo sapiens
accccaggaccagacacggccggacaggcaaaaaaccgcaaccgagaaacaaaaagaaga

SEQ ID NO: 104709 - RNA, 72 nt, Homo sapiens
gcagagaaacagaacccaagccaggcacccaaaaaaacgccggggggggcacagagccccggaagacagccc

SEQ ID NO: 104710 - RNA, 71 nt, Homo sapiens
ggaaaaggcccaggacacacgaggacggcacagaaaggacaaagagcgaggaggccaccagaaacggccag

SEQ ID NO: 104711 - RNA, 82 nt, Homo sapiens
gacgcccagcccggcgcacggcccagggcagagaacacaccgccggaagaggaaaagaaaaaacaaaaaagaaacgccagac

SEQ ID NO: 104712 - RNA, 80 nt, Homo sapiens
cccaggcccaggccccccaccaccagaggcaagacagccggcagcaggggaaagcgcgagcgagcacccggagcagcaga

SEQ ID NO: 104713 - RNA, 85 nt, Homo sapiens
aaggcggagaacacaggaaaacaacaccagggcaagaagggccaaggcaagaccggcccccaggcccccccggcgggcggcccca

SEQ ID NO: 104714 - RNA, 59 nt, Homo sapiens
agaaggcgccgaagagggcccgacccacagaggaagcccaagaggaacagggcagcagg

SEQ ID NO: 104715 - RNA, 70 nt, Homo sapiens
ggagaagcacagccggagccagcaggggcagcaagagcggccagggaagaggcgcccgcccaggaggaca

SEQ ID NO: 104716 - RNA, 74 nt, Homo sapiens
cacaaggccgcaggggagccgagagccacagaaaaaccaccagacacagcaaaaagaacaggcagcacacaaag

SEQ ID NO: 104717 - RNA, 74 nt, Homo sapiens
caacggcggcgggagcagaacgccccccagcccgagcgcgcccgagggcgagaagaagggaggcaagcaggggg

SEQ ID NO: 104718 - RNA, 90 nt, Homo sapiens
cgcgagcgcccggccgaacccgcgaggaaaagcccagcggcccgccaggcccggccagaagcgggcacagagaccaaaggcagaagaaaa

SEQ ID NO: 104719 - RNA, 30 nt, Homo sapiens
agaacacacgaggacagcaccagaagcgcg

SEQ ID NO: 104720 - RNA, 79 nt, Homo sapiens
gccacaacgccaaagggcgaagcgcacgaagccgacagagagaagccggcaaaggacccccccgacccccgagaccccc

SEQ ID NO: 104721 - RNA, 76 nt, Homo sapiens
gccacacgacggacaacgagccccaggggggaccccacacccaccaggacagggggggcgggaagaagcgaggccc

SEQ ID NO: 104722 - RNA, 60 nt, Homo sapiens
ccccaagagcaggagcaggcaagcaaagacagaagcccgggggcaaaacacgggagaaaa

SEQ ID NO: 104723 - RNA, 73 nt, Homo sapiens
acagccacccgggagagcccggaaaggcccgcggcgaggagcgagcagagaccaagggaacggaagccccagc

SEQ ID NO: 104724 - RNA, 72 nt, Homo sapiens
gaggcgggcgcggagccgccgccgccagcgcgcacgcaaggaggcggcggaacgcccagccgacaagaggaa

SEQ ID NO: 104725 - RNA, 126 nt, Homo sapiens
ccccggaacgccaccagcgaacggagaggagccagagccccacgggaaggagagcagccagcagagcgaacaggagaaaaccgaaggggagagagcagacagacagaaggacccccggaaggagcg

SEQ ID NO: 104726 - RNA, 70 nt, Homo sapiens
ggagaaggaagaggggaaaaggcaaaaccaggggaccagagcgaaagaaccccagacgcgcccaacagac

SEQ ID NO: 104727 - RNA, 78 nt, Homo sapiens
aggaggagcacccacgggacgccccgccagaccgcgaccgcacgccagcccaagccgacaggcagagggcaccacaga

SEQ ID NO: 104728 - RNA, 107 nt, Homo sapiens
cggagcgcgaaggccgggacccggccccggcccacaggggggggcaaacccgagagaacgggcaaaaacaaccaggcagagagacaagcaggagcgaagcaggacaa

SEQ ID NO: 104729 - RNA, 56 nt, Homo sapiens
cggggcgagagggcggcgaaggaggcagaggcacagcgcagcggaagccgcagaag

SEQ ID NO: 104730 - RNA, 60 nt, Homo sapiens
aagagggagaaaaacaggcagggacacggaagaaccaggagagcagcagcgggacaacgc

SEQ ID NO: 104731 - RNA, 67 nt, Homo sapiens
cagcaggcagaagaccccaagcccaaaagcaaagcagggcagcaaagaacacaaaggcacgggagag

SEQ ID NO: 104732 - RNA, 79 nt, Homo sapiens
cgacaaggaaggaaacaccaagcagcggaaccgcaaggaagcgaagggaaaacagacgagcgacgccaacgcaggacag

SEQ ID NO: 104733 - RNA, 76 nt, Homo sapiens
acacgcggaaaaacccaacagccaaggacagaggaccaaagcggaccagagacagggcgcgaaaaggggaacgaag

SEQ ID NO: 104734 - RNA, 76 nt, Homo sapiens
cccacgaagggaggaaaagggcagggacagcgcaggcagcagcaacccacagagagagaggaaacgaagggagcga

SEQ ID NO: 104735 - RNA, 81 nt, Homo sapiens
gcaccaaggcggcaagcgcagacccagacgcgggggccagcaacccaccggccagggggagaaaacacacaacgcgccacg

SEQ ID NO: 104736 - RNA, 71 nt, Homo sapiens
aaagggcacggggccggggaacggaggggagccaacagcccagccagcccaagcccgcccgcacaggaggg

SEQ ID NO: 104737 - RNA, 76 nt, Homo sapiens
gcaacagaaagagcaacagcagggcaacaggagcaggacacgagacacaggccgcacgcacgcgggggaccccaag

SEQ ID NO: 104738 - RNA, 94 nt, Homo sapiens
ggaaccaagggggccagccgccgcgcccgcccgacccgccaccgccaggccaggcggcacgacccagaccgagacagcagaagaccgaggagga

SEQ ID NO: 104739 - RNA, 74 nt, Homo sapiens
agccggaggacggcggcccccgcccacaccccaagcacccaggaaccggcaacagggacagcgagagcagcagc

SEQ ID NO: 104740 - RNA, 36 nt, Homo sapiens
gacgcggcgcccagcaagggcacccgcagaagggga

SEQ ID NO: 104741 - RNA, 75 nt, Homo sapiens
ggggaaagcggcacgcgccccagagagcgcggcccccccccgaggcacccagggcggaagcccgcagcgcgaaac

SEQ ID NO: 104742 - RNA, 77 nt, Homo sapiens
gcgccacggaccgcgggacaagaaaacagcgaggcggcagaagcacacaagaagacaccgcagcggcagccacgcca

SEQ ID NO: 104743 - RNA, 80 nt, Homo sapiens
ggaagaggagggcgaggaaacgcgggcccgggggcggagccggggacggaaccgcccggagcagccaggaggagggggag

SEQ ID NO: 104744 - RNA, 78 nt, Homo sapiens
gacgccaccgccgcagcggcgcagcccacgccagacgaccccacccgcgccgcgacccgcggcccccccgagaggacg

SEQ ID NO: 104745 - RNA, 75 nt, Homo sapiens
aagaagcagcggacgggaagcacagggccaagacgacgacccaaggaccagacgaagagaaagccggccccagac

SEQ ID NO: 104746 - RNA, 57 nt, Homo sapiens
gagggacagcagagaccaccgaagacgcacgccaagacagaccaagggaacggaagc

SEQ ID NO: 104747 - RNA, 84 nt, Homo sapiens
gcgccagagcgagcgccccgcccagggcaacagcgcagcccggaaagagggaaaggaacaagaccgagcaaaggcaaaaggcca

SEQ ID NO: 104748 - RNA, 82 nt, Homo sapiens
agaagacgggagacaagaccacgagacacgggaggggaggcccacacaggaccagaacagggaggccagacaagaacgacga

SEQ ID NO: 104749 - RNA, 84 nt, Homo sapiens
ggccggcgaaggagacagcaggacgcgcgcacaacagggcaaccaccgccgcccgccggggcacgcacaccccccggccccgaa

SEQ ID NO: 104750 - RNA, 82 nt, Homo sapiens
agggaccggggagagcagacgcacacaggagagccaggacagccacaccccaagaggagccggaaagccagggaaaagcaga

SEQ ID NO: 104751 - RNA, 76 nt, Homo sapiens
gggcgacaagaggccgggcgccccgcaggacacaagagaccagacaagaggacacagaaaaaacgaagcccgaaag

SEQ ID NO: 104752 - RNA, 73 nt, Homo sapiens
acgcgaacaaaaagcccagaacgcacaagaaagccaaaagaagcaagggaaagaccaggagccagaaaccaac

SEQ ID NO: 104753 - RNA, 82 nt, Homo sapiens
cgcgcggaggcgggagcgcggaaacggaaccgggaggcgacgcacacgagcggaggcgaagaggcccacgcggaccggcagc

SEQ ID NO: 104754 - RNA, 72 nt, Homo sapiens
ccaggccccgaggcaaaggggcgggaagaagcccgccgccaccaccccaccaccagcgcagcagagaagaaa

SEQ ID NO: 104755 - RNA, 86 nt, Homo sapiens
cagcgccgcccgccgacagccaggcccgggagaagcagcgccccaaccccagaaccgcgcgggacggacaccgcgcaagaggggaa

SEQ ID NO: 104756 - RNA, 82 nt, Homo sapiens
cagaaggagcggcggacacacagacccccaccaagcaggccccccccgagcccacacaaagcgaggggaagcggcaacaccc

SEQ ID NO: 104757 - RNA, 85 nt, Homo sapiens
cacgacaccagaccagcaagcgccggcacaccgcacgccccgggagggcagacagccgccaggacagccccccagcaacagcgca

SEQ ID NO: 104758 - RNA, 65 nt, Homo sapiens
cggcggcccacgcgcagcgacagggagagaaaaagcgagcccacccccacaccaacccccggaag

SEQ ID NO: 104759 - RNA, 57 nt, Homo sapiens
gcccacagggagaacagggcagaacgaggggaggaaagcaggaaggcaaacaggggg

SEQ ID NO: 104760 - RNA, 64 nt, Homo sapiens
acacgcaacccccagcacagcgaggaagagagccagcaggaccggggaaggaagaggcgcgaga

SEQ ID NO: 104761 - RNA, 78 nt, Homo sapiens
gcacccagcggccgggccccacgcacccccccagggaccagccgacgccgggcacaggcgaggaaacgagaccccgcc

SEQ ID NO: 104762 - RNA, 76 nt, Homo sapiens
cgaaagcccccccaggagcccccaaacacccacacaagaagcaggaacgaacaaacaccccagagagcccaggccg

SEQ ID NO: 104763 - RNA, 84 nt, Homo sapiens
agccgaccgcgggacgccacccacgacgaggcgggcaggcggaagcgcgcgggcaaggaaggcgcggaaggggcgacgagaggc

SEQ ID NO: 104764 - RNA, 69 nt, Homo sapiens
ccaccaaggaagagagaagagaagaccagagacgcccacaaaaagaggagagcaaacacacacggagaa

SEQ ID NO: 104765 - RNA, 76 nt, Homo sapiens
ccagcgcgccacgacccgcagacaagaaaggagcagcaccgaggccccccccaccccccgcccgcggcgccacccc

SEQ ID NO: 104766 - RNA, 75 nt, Homo sapiens
gaagcagggcagacaagacccggagggcgagccggcaccagggcccagcaaggcgccaccggaagaaacgggagg

SEQ ID NO: 104767 - RNA, 84 nt, Homo sapiens
cggcccgaggcgggcggggaaggcggaagaggagaggagcggcgccgccgggccacggcaggaagggccgggccggggcacggg

SEQ ID NO: 104768 - RNA, 36 nt, Homo sapiens
gccagacccacggaaaagcaagaggaaacaacagaa

SEQ ID NO: 104769 - RNA, 89 nt, Homo sapiens
ccgacaggcggaggcccccgggcaagaggcgcaaacaagccaacccaggaggaaaaacgggcccgacccaggcaagcgagcaggcgagc

SEQ ID NO: 104770 - RNA, 69 nt, Homo sapiens
gacagacgcagggcgcccccgagagcacgcaaacaaggagcagaaccacgcggacaacagaaagaaaaa

SEQ ID NO: 104771 - RNA, 78 nt, Homo sapiens
agaaacggaacccaacaagcccgaccaagccacagcagaaccacaaccacggggcagcccaagcaccaggcaccgcgg

SEQ ID NO: 104772 - RNA, 80 nt, Homo sapiens
aggggcggaggcgccagggggaaacagaggcccccgaggaccacagggaaaaggagggccgcccccagggaacaaacccc

SEQ ID NO: 104773 - RNA, 81 nt, Homo sapiens
gccccggaagcagcaaaagcaagaagaaacaggcaggaggggaagcagaaagcaaacggccccgaaggaggaggaccggga

SEQ ID NO: 104774 - RNA, 57 nt, Homo sapiens
ccagaagaccgaagcgcgacggaagacaagcagaccggaagaccgacggaagaccac

SEQ ID NO: 104775 - RNA, 77 nt, Homo sapiens
aggacgcccacgagcaaccaagacaaagcagcccgaggaggcacgcaaaacaacagggggcaaacaagaccagggga

SEQ ID NO: 104776 - RNA, 83 nt, Homo sapiens
cggccccccgggcgcacaagcagagggccagaaccaccgccagagccgggggggccgaagaagccagggggaggaaagcagac

SEQ ID NO: 104777 - RNA, 82 nt, Homo sapiens
caccaacgcggccgacaacagccggcgccgccacgcagggaggccgggcacacgccaggccagcgggccagggcacgaggcc

SEQ ID NO: 104778 - RNA, 75 nt, Homo sapiens
gccacaaccccaggaagggaaaaggccgaggcacagcgggaagaccgcaaagacgacccgagacagggaacagca

SEQ ID NO: 104779 - RNA, 80 nt, Homo sapiens
ggcggcaggcgcccgcggaccgagccgacggagccggaggcgggagccgcggcggccgggcgagcaacagcagaaaagag

SEQ ID NO: 104780 - RNA, 72 nt, Homo sapiens
gggggcggcccggccccgcagggccccgacgagaaggcaccccgaagagccagggcgaaagggcgggccagg

SEQ ID NO: 104781 - RNA, 96 nt, Homo sapiens
gaacaggaggcaagaagcagaacaacgcggaacagacaggcaaaagagacacagcagaccccaggagaaaagaggcaaaaaaaaggcgaaaacaac

SEQ ID NO: 104782 - RNA, 73 nt, Homo sapiens
acagaccggggaccgcccagcagcccaggccgagacgaaaggcaggcccgcggcggaagccggcaggacacga

SEQ ID NO: 104783 - RNA, 70 nt, Homo sapiens
cggagcacggaacagccaggggaaaggccacagaagaggagcaaccaccagacggcaggaagcaaaagcc

SEQ ID NO: 104784 - RNA, 67 nt, Homo sapiens
gcacagagccacgaaaagcgcaccgcgccgagccacgcggccacgcaacgcccgcggcggaaccccg

SEQ ID NO: 104785 - RNA, 80 nt, Homo sapiens
cgggaaggggagccaggccgcccggcgggaacaaccaaagaggaggaaaggacgagcacgaggccgcagcgaggcacccc

SEQ ID NO: 104786 - RNA, 82 nt, Homo sapiens
gcggcgcgcgcccagcgccgccccgcgcgcgcccgccacggcgccgagccgcggccgaggaaacgggaacacaggccagcac

SEQ ID NO: 104787 - RNA, 82 nt, Homo sapiens
ccagccccgacgggacgggggagggggcggccgggcggagagaaccagcgaggacgaggggaggcgagcagcccagaccgga

SEQ ID NO: 104788 - RNA, 53 nt, Homo sapiens
ggagacagccggaagcaaggcagaagaggccgggacgcccacaggggcagagc

SEQ ID NO: 104789 - RNA, 82 nt, Homo sapiens
cagcgggccgaagcagcagagagaggaggagcgaagcagcaggggacgagaggcaccagaaacggcggacgaaaggacggga

SEQ ID NO: 104790 - RNA, 75 nt, Homo sapiens
aagcaagcccgagcggaaaagaagcagaggaccacaagaaccccgagacgacgcaccaaacccccacggacagcc

SEQ ID NO: 104791 - RNA, 74 nt, Homo sapiens
cgcgagcacagaggcgaacgggagccaaagggccccgggggggaaacagcagcacagacagacaagaggcagcc

SEQ ID NO: 104792 - RNA, 74 nt, Homo sapiens
aaaagggcacgaggccggaaccgcccagccccgaacacagagccagagaaaaaaaacacagaaaggcccaagaa

SEQ ID NO: 104793 - RNA, 84 nt, Homo sapiens
gaggacagcgcacacagcaagcacgaggcaaaccgacaccagcgacacaagcgcgagggaaccacagaggacaggcgagggggc

SEQ ID NO: 104794 - RNA, 82 nt, Homo sapiens
aggcgcccccacaagagaccggggggccggggggaaaggggcagcagaggcgagagcccacaccgggggcacgggccacagc

SEQ ID NO: 104795 - RNA, 79 nt, Homo sapiens
caagaccccagagccccaggagacggacagcgcccccacacagaaacccacagaacacagcaaaggacacggaggcaag

SEQ ID NO: 104796 - RNA, 50 nt, Homo sapiens
accaccaggaggaaagcccaggcagaacgcagacccgcacaaaagagccc

SEQ ID NO: 104797 - RNA, 65 nt, Homo sapiens
cgcaagacagcggagagaacccccaggccggggaaggccccgccagcgaccagccgcagaaccac

SEQ ID NO: 104798 - RNA, 76 nt, Homo sapiens
cagacgcagggcgcccccgggccaaccgccccccagcagcaggcacgggcgaaccccgagccccgccccacgcccg

SEQ ID NO: 104799 - RNA, 114 nt, Homo sapiens
ccgaaagcaggaggaggcagcggcccggggaagacgacccagaccccaggacaggcccgccgagggccgggaaccgcagagaagagcaggggggccaggagaaggagcagcccc

SEQ ID NO: 104800 - RNA, 80 nt, Homo sapiens
cgccccgcgcgcagggaccgcccgaccaggagccggcgcgaaacggaagagagaggacggaaaagggaaccccagaacaa

SEQ ID NO: 104801 - RNA, 44 nt, Homo sapiens
cccgaagagaacagccaggccggcaggagacgcaaaacacggga

SEQ ID NO: 104802 - RNA, 85 nt, Homo sapiens
ccccagaggccccaggaacaccccccgcgacacgccaggccacccggcagagaggacggagacacggcgcggaggcgcggggcgc

SEQ ID NO: 104803 - RNA, 99 nt, Homo sapiens
ccccccgcgcccccgcccgcccgggacccgcggccccgccgcggcgaacagcgcggagaacacaaggaagaaaagaaagcaagacaggcaaggaagaga

SEQ ID NO: 104804 - RNA, 77 nt, Homo sapiens
aaaaggcgcgcgcgccgccccccacccgccccgggagaggggacaccggaacagcagcaggccgcaggacggcgagg

SEQ ID NO: 104805 - RNA, 56 nt, Homo sapiens
gccagcacgggaacgcgaagcgccaaagccagacaacggaacaagcaacgaagaca

SEQ ID NO: 104806 - RNA, 82 nt, Homo sapiens
caccgccacacgcgcagcaccgggagcccagaaaaagcagagagacgcaagagagaaaagccagaccagaagaacgacaaac

SEQ ID NO: 104807 - RNA, 52 nt, Homo sapiens
acaaaccggagcacgggcgcgccccccccaggaaaggggaagccaaggaccg

SEQ ID NO: 104808 - RNA, 70 nt, Homo sapiens
ccaaacaaagggaaggagaaagaaccaacgggacccaacagacacggccacacagaccgaacacaaacag

SEQ ID NO: 104809 - RNA, 71 nt, Homo sapiens
aagggcgaaaccgcagaaagcaagaacgcgcaagaaggggaaggcgccagacacagaaaagaaagagagca

SEQ ID NO: 104810 - RNA, 41 nt, Homo sapiens
cccccgcgcgggacagcagcggaacgggaagggcacaggaa

SEQ ID NO: 104811 - RNA, 57 nt, Homo sapiens
agggcgggccacgcggcccggcggccccccggcccccgcagccgcccaagaaccaag

SEQ ID NO: 104812 - RNA, 73 nt, Homo sapiens
ggcgcaccggagagacgcagaggggcggcggggggcccaggacaggaaccgaccagcaacgacaaaacacaca

SEQ ID NO: 104813 - RNA, 45 nt, Homo sapiens
aaccggaagaggccgaagaacgccccagggaggagagagcgaggc

SEQ ID NO: 104814 - RNA, 74 nt, Homo sapiens
cggcgagcggcccgcacaaggccggcaggaagagagaaggcgaaggcacaaaacagagaggcacagagagaaaa

SEQ ID NO: 104815 - RNA, 83 nt, Homo sapiens
cgcgcgccggccagcccagcggcgacagagcagcggaaagagccaggcagaaagccggggggagggaccgccccagaggacgg

SEQ ID NO: 104816 - RNA, 83 nt, Homo sapiens
aagagggcggaaggagggccaggccgggcccccggaaagggcacagggagccggcagcggccaagcgcgcccccggaacgcca

SEQ ID NO: 104817 - RNA, 56 nt, Homo sapiens
ccaagccagagcagacaagagagagcgcgcgccgcgcgcccgcacaaacgccgggg

SEQ ID NO: 104818 - RNA, 75 nt, Homo sapiens
ccgagggagagagcgagcgagggggggcgcgccggaaaccggagcgcgcagcagggagcgaggcggccagggccc

SEQ ID NO: 104819 - RNA, 59 nt, Homo sapiens
cagccaacccacccgaaagcagagaagggcacaggagcgagaccacccacccaccccac

SEQ ID NO: 104820 - RNA, 64 nt, Homo sapiens
cacgaggagggcgcgagaagacaaagagaggagcgggaaggccccgcacccggagaccggggga

SEQ ID NO: 104821 - RNA, 52 nt, Homo sapiens
gaaggaccaagaaccaggccgggcccgggaggagcaggggcagaggggagaa

SEQ ID NO: 104822 - RNA, 73 nt, Homo sapiens
caagagaaacaccaaacaagagaaacagcacccaggacacccaaagagcggaaccaaagaaacccagcggagc

SEQ ID NO: 104823 - RNA, 81 nt, Homo sapiens
ccccagcaccggcccaaggccacaccggacacgaggacgcacagaagggcggggaacacagaggaaggacggcgggggcag

SEQ ID NO: 104824 - RNA, 68 nt, Homo sapiens
gaacgccccgaaccccgcacacgaggaagagcgagagccacagaaggaggaggggacagcagcaggag

SEQ ID NO: 104825 - RNA, 66 nt, Homo sapiens
ggagaaggaccaagaaccagaaccagagagcgcgagacccaggaacacagaagaggaagcccccaa

SEQ ID NO: 104826 - RNA, 61 nt, Homo sapiens
ccagagcaacccaaaaagcaaggggggaagggagcagaacagggacggaggaaggggaggg

SEQ ID NO: 104827 - RNA, 64 nt, Homo sapiens
cggccggcccccgacagccaggcccgcgagaaaccgggaaaaccggaggccagcccacccagag

SEQ ID NO: 104828 - RNA, 74 nt, Homo sapiens
agggaaaaagacccgaaccaagcacaggaggccgaagagcggggggagaagcagaggggaacgcgggaggagcc

SEQ ID NO: 104829 - RNA, 91 nt, Homo sapiens
cggcgcagcgcccgccgcggcccgggcccccccgccggaaacagggggacagcaccccccccccccaccccgcgcaccacggcgaccggag

SEQ ID NO: 104830 - RNA, 79 nt, Homo sapiens
aaggaccgcggacagagacaacaccgagagagaacagcacgggaagcacaaaccggggccaggacccagcaggagcgca

SEQ ID NO: 104831 - RNA, 39 nt, Homo sapiens
cgagcccggagaagaggaaggacccgaacacggaagaaa

SEQ ID NO: 104832 - RNA, 74 nt, Homo sapiens
aaaagagggcgccaagcggaacaaccaaggcgccccagaggagcccggaacacgaacgaggagagaaaagcaga

SEQ ID NO: 104833 - RNA, 69 nt, Homo sapiens
aggcacggggcggaggcccggcgggagcccaggagacgaggcccagcagagcaggacgaggacacagcg

SEQ ID NO: 104834 - RNA, 75 nt, Homo sapiens
gcccccgaggcgcagaagggagaggagggcgcccacgggccgcgggcccgccaccagccaaggacccagaagacc

SEQ ID NO: 104835 - RNA, 73 nt, Homo sapiens
ggacaaagggagcagacgacaaccagagccgacccagcgcacagacccaggcgacaggggccccaaccgaccg

SEQ ID NO: 104836 - RNA, 79 nt, Homo sapiens
gccagggaagaccacacaccccacaggaaggcacacagcagcaagagcccaaacgcgggaacccggaggcaagacacga

SEQ ID NO: 104837 - RNA, 79 nt, Homo sapiens
caacaggacgccacaggccgacaggcaagacggcagggacacaacaaccccagagcaaccaacccgggaaagaggacga

SEQ ID NO: 104838 - RNA, 55 nt, Homo sapiens
aaaaaggggggcaggcacagggagagcacaacaggaaccagagaaacaaggagcc

SEQ ID NO: 104839 - RNA, 80 nt, Homo sapiens
aaaggaacaggcggcgcgcgcggcgcgggacgcgcgcgggcacccacggagccccggggcgaccagagacaaggccccga

SEQ ID NO: 104840 - RNA, 74 nt, Homo sapiens
gagccaaacccgcacagagggaaaggagcgcgaagccacccaacaggaaagaccacagcaagaccacgccccca

SEQ ID NO: 104841 - RNA, 77 nt, Homo sapiens
cgccgccggagccgcagcacgggggccacagggcaacggggcccgcaggcccccaccgcccagaggagagcgagcac

SEQ ID NO: 104842 - RNA, 71 nt, Homo sapiens
acaagcccaggggggacacccacaggccacaacgcacacgcccccgccaagggaaagcaacggcgcaagcg

SEQ ID NO: 104843 - RNA, 54 nt, Homo sapiens
gagagggcggcccagggggccacgcgcccaaaggggcaggacaagacagaaggc

SEQ ID NO: 104844 - RNA, 59 nt, Homo sapiens
gagaaaccaaaaacaggcaaaggggcaacagaggcgacccaacccaggaggaagcgcca

SEQ ID NO: 104845 - RNA, 74 nt, Homo sapiens
ggaggagcccaaagaacaagagcgcagacagaaaggcaaagaagacgacccggacgaagaggacgccaaagaag

SEQ ID NO: 104846 - RNA, 73 nt, Homo sapiens
cccccacggcggcggggacacccgaccggaccaggcaacagccgcggacagacgcaagaccaacaggggagag

SEQ ID NO: 104847 - RNA, 42 nt, Homo sapiens
caaagaagagccaacaggaccaagcaaacaccagcccagagg

SEQ ID NO: 104848 - RNA, 76 nt, Homo sapiens
aggccgaagccggcgcccagcccccaagcggcccgcgagcaaacgccgcggccccagaaagaaaagaaggggagaa

SEQ ID NO: 104849 - RNA, 60 nt, Homo sapiens
aaaacaaaagaaggaacgggaccagcggcagagagaaaagcaccacgaaggagaaccaaa

SEQ ID NO: 104850 - RNA, 41 nt, Homo sapiens
caaaccccaccgccacgagcaaggggaacaaagcggcaaaa

SEQ ID NO: 104851 - RNA, 78 nt, Homo sapiens
ccgcaccgccgcggaaagaccccgacaggaggagacgccaagagccccccaagagaaggaacccaacaccccgcaacc

SEQ ID NO: 104852 - RNA, 74 nt, Homo sapiens
caagaccgggccacacgaccccgacggggcaacccacacgggcagagccagaaggagagccaagcgccagagaa

SEQ ID NO: 104853 - RNA, 63 nt, Homo sapiens
ccaagaggaggaggaggcggaggccaagcggaaagaccgagagcccaccgagaccgccagcgc

SEQ ID NO: 104854 - RNA, 74 nt, Homo sapiens
cagagacggcacagaagcagaaggacaagaacgcagaccggcggaggcagggcaacacggacacgcagccccac

SEQ ID NO: 104855 - RNA, 77 nt, Homo sapiens
acacacccgcagacaagaacggagaggccgaaacacaagcaaggaacacaaagaagaaagaaaggaacggaaggaag

SEQ ID NO: 104856 - RNA, 73 nt, Homo sapiens
gaacacccgggaacgaaacagaacagacggagaaagaagaacaaacacaaaacacacaccgagcagaacagag

SEQ ID NO: 104857 - RNA, 72 nt, Homo sapiens
gggagggaaggcgcgggagagaagagggggaaaaaggaaggccgccggacagcgcagagccaagacggagaa

SEQ ID NO: 104858 - RNA, 77 nt, Homo sapiens
ccaagaaagaagcgcccagaagggggcgcggcgcgcacccagacaaggaaaaaccgagccggacgcgccgccacccg

SEQ ID NO: 104859 - RNA, 73 nt, Homo sapiens
ccgggccacccccccaggcaagaacacaacacacacagccgggccgcaaccagcccccagcagagacggagcc

SEQ ID NO: 104860 - RNA, 73 nt, Homo sapiens
accgaaagggaggcgcgaaaaaggccgcagaccaagaagaaaaacacacgaggaacgccgaagacagcgcaag

SEQ ID NO: 104861 - RNA, 61 nt, Homo sapiens
agccagggcgagcaccaagacacggacccggagaaaacccacaagaacccaaaccgagaaa

SEQ ID NO: 104862 - RNA, 78 nt, Homo sapiens
cagcccgagagccacaccaggcggagaaagggcagaggcccccacgacccagaaagacacacagaaaaagcaaaggag

SEQ ID NO: 104863 - RNA, 67 nt, Homo sapiens
gcgacaccggcgcagggagcccagaccgagaaccgggggaacgcgggcgccggaacgaccgggccga

SEQ ID NO: 104864 - RNA, 87 nt, Homo sapiens
gaagcaccaggcggagggcggcagcccagacgggcgggcagggccgggcccgcagggccgggccagcacagaaggaagagaagacaa

SEQ ID NO: 104865 - RNA, 57 nt, Homo sapiens
ccgaaaacgacacggagacagcaagaaagcaccagccaagcagaagggagccagcgg

SEQ ID NO: 104866 - RNA, 73 nt, Homo sapiens
acaaagcgaaagcacaccaagacagcgcgggcccgacgcagcacaccgcacccaaagaccaaccccagggcgc

SEQ ID NO: 104867 - RNA, 68 nt, Homo sapiens
ccgagccagacacagagcaggaacgcagccggggacaccaaacagagacacaaggacgccggcagggg

SEQ ID NO: 104868 - RNA, 60 nt, Homo sapiens
cgaggaacaccaaagcaagaggaaaaacgggaccaagaaaggcccagggaccaaagcccg

SEQ ID NO: 104869 - RNA, 77 nt, Homo sapiens
aggagagcgcacgggagcggcggccaacacaaaagggcggagaacggaaaagcaccaggaagcagagaggaccgcag

SEQ ID NO: 104870 - RNA, 71 nt, Homo sapiens
ggcggagagacaaagagcagaggagcgcagaaaccaaaaaagcagcggggacgaagcgacagggagggcgg

SEQ ID NO: 104871 - RNA, 69 nt, Homo sapiens
gaaaacagcaagagccggaagaaaggaaagaggacacacgcggccaagacccccccaggaagcccccag

SEQ ID NO: 104872 - RNA, 85 nt, Homo sapiens
gcagaaagcaggcgaacccgcggcgcaaaacgaacacccagccacccaccagcgacaaggcagggccagccaacagccagccccc

SEQ ID NO: 104873 - RNA, 68 nt, Homo sapiens
ccaccagagacacacacaggacaccaccagaaagggagacgaagaggagcagaaccagaagggacaca

SEQ ID NO: 104874 - RNA, 70 nt, Homo sapiens
ccggcggcgaaaacgggagccggggaagaagagacgccccccgcggacccggggcaggaaccggggcccc

SEQ ID NO: 104875 - RNA, 39 nt, Homo sapiens
caaaaacaaagaggagagaaggacaagcgcagcacgcag

SEQ ID NO: 104876 - RNA, 78 nt, Homo sapiens
agaaaccccccaccccaacgggccccagcgccaaccaaaccgaaagccagaagaacacaagggaagccgcccggacag

SEQ ID NO: 104877 - RNA, 49 nt, Homo sapiens
aaacaccaggacacaaggggaaccagaagaggccaaccagcacgaacgc

SEQ ID NO: 104878 - RNA, 76 nt, Homo sapiens
cgcccggccggaggcaggggaaagcgcgcccacacaccccgcccaaggacggccggcagcggccgggcccccgccg

SEQ ID NO: 104879 - RNA, 73 nt, Homo sapiens
cgcccacgccccccagcgaggcgcaaacaccgccgggcaggaggcaagcaaccaacaaaagaaaagagaaaac

SEQ ID NO: 104880 - RNA, 70 nt, Homo sapiens
cagcggcaggggccccgaaccagaagccggcgcggggcagagcacggaggcagcagagagaggccagcaa

SEQ ID NO: 104881 - RNA, 73 nt, Homo sapiens
cggccccacgcacgacgagagggacagcacggaggccagagggaagcaaagcagccaacaccagaagaaggga

SEQ ID NO: 104882 - RNA, 77 nt, Homo sapiens
gggagagcccagacacagcagccacgcgacagcccaccaaagccccccagcgggcggccggggccaggagagaaggg

SEQ ID NO: 104883 - RNA, 32 nt, Homo sapiens
ggggcccgaagggcaaaggacaaggcagcaga

SEQ ID NO: 104884 - RNA, 68 nt, Homo sapiens
caaggagccaccagcacggaccaggaggcgagcaacaggagggacggccgagaacaaacacacgaccc

SEQ ID NO: 104885 - RNA, 78 nt, Homo sapiens
aggacaggccaaacggaaagacgaaggggccccagagccaaggaggaaggggccggcggcgcgcgagcgggccgggcg

SEQ ID NO: 104886 - RNA, 53 nt, Homo sapiens
agacagagaagcagacggaaggagggaaaagggaggcccgcccccccccaccc

SEQ ID NO: 104887 - RNA, 70 nt, Homo sapiens
aaggaggagcggggcggacgcagggggccacccagcccccaccgccgccaagagcacaaaggagagaaag

SEQ ID NO: 104888 - RNA, 54 nt, Homo sapiens
cgaagacggaaacgaggaaaccgggaaagccaccgaaaagcaccgagaaggcag

SEQ ID NO: 104889 - RNA, 115 nt, Homo sapiens
gccaagcgcccgcggacggggaggaggagcaggagcggaggaggagccgccgccgccagggcacaccaaagggaaccaagaagggacccaaaaagacggacagcccacgggaaca

SEQ ID NO: 104890 - RNA, 76 nt, Homo sapiens
agacgcacgggacaggagagccgggcaagacggagagacgaaggagcaagggcaacacccggagagaagagccgca

SEQ ID NO: 104891 - RNA, 72 nt, Homo sapiens
gaaacgggacaccgagcccccccggcagcccagacgacagaggacagaaacccaaagaaccaaagccgagag

SEQ ID NO: 104892 - RNA, 72 nt, Homo sapiens
aggcccccacacccggaacgacaccaggaacccaaggggagcgaacgaagaaaggccaagagggagagacaa

SEQ ID NO: 104893 - RNA, 77 nt, Homo sapiens
cggcacgggcgacagcaggcacagggacgagggggcggaagcacgcagcagagagcaaaagaagacgcggagaggag

SEQ ID NO: 104894 - RNA, 74 nt, Homo sapiens
agaggcggcgggcagagcaacgcagcccgggcaagagcaaagagaggcaccgggaagcccaacgcaaccagaag

SEQ ID NO: 104895 - RNA, 50 nt, Homo sapiens
ggccgcggaggggcacgagcgccacaaccccaggggacgaagggaacccg

SEQ ID NO: 104896 - RNA, 62 nt, Homo sapiens
gcacacgcagccaggcccagaggaacaggaaaggcaccacagaaaagcaaggcgaaggagga

SEQ ID NO: 104897 - RNA, 81 nt, Homo sapiens
aacccagcccagcggacacccgcggaaccggaggaggggagcggggaagggcgaccagacgaggggagacggacgggggag

SEQ ID NO: 104898 - RNA, 79 nt, Homo sapiens
gaggaacggcccggaaacaggaggacaagacgaccccgacgcaggccaggagccgcggacagaagccgagcacggccga

SEQ ID NO: 104899 - RNA, 68 nt, Homo sapiens
cgcagggcgcccccgggggcaaggcggcccggcacgcacacgggcagaagagcccgaggcgggaccgg

SEQ ID NO: 104900 - RNA, 40 nt, Homo sapiens
gggccgcgcgagggcgcccagcgcgccgccccaggcggag

SEQ ID NO: 104901 - RNA, 69 nt, Homo sapiens
aaaggaagcaacccagaagagcgaaggacccagcgaggaggagcgaaaggaggcgaggggagaggcaaa

SEQ ID NO: 104902 - RNA, 80 nt, Homo sapiens
ggaaggcgagagcgggcaggacgaggacacaggagaacagcagacaggcagcaaagaaaggaggagaagcccagccgcgc

SEQ ID NO: 104903 - RNA, 62 nt, Homo sapiens
gccagggagcaccaggagaacaacaaggggccgcagcagaaaagcccgcaccccagagcgac

SEQ ID NO: 104904 - RNA, 72 nt, Homo sapiens
gacaacacaacacgcagggaaagacagcgggaaaaccccacaaggaggacacaggcaccaacgcgagaacgg

SEQ ID NO: 104905 - RNA, 81 nt, Homo sapiens
ccccgaaaccacccccaggggagaggaagggaggcgcaggagcgggcagccaggcagccgcccgacgacaaggccacggaa

SEQ ID NO: 104906 - RNA, 77 nt, Homo sapiens
cccccccgcccagcgcgagaggagcaagaggggggggcccccccgaagaaaggaaccggggagcggcgaaaaaaaag

SEQ ID NO: 104907 - RNA, 78 nt, Homo sapiens
ccccccaggaacgcagagacccccgccccgacggcccggcgcggaggaggaccgcggcagccggcagccgcgcgggag

SEQ ID NO: 104908 - RNA, 76 nt, Homo sapiens
cgacacaccaaccgacgggagacgacggcgagaaacacggcaggaaacgcaaccggacagaagaggaggcaaggaa

SEQ ID NO: 104909 - RNA, 77 nt, Homo sapiens
ggcggcagcaggccagcggccggcgggagacgcagcgcgacccagcaggaagaagaagcgcacaaggagcacaacag

SEQ ID NO: 104910 - RNA, 87 nt, Homo sapiens
ggcgccgccgagcagcggcccggcgggcccggggcgcgcagcgcccgccggggcgggaggagagggaccggaagcccgggaacgaag

SEQ ID NO: 104911 - RNA, 55 nt, Homo sapiens
acggggccagaaccaggggcagaccaagacaaggcaaaaccgcccgggagccgcg

SEQ ID NO: 104912 - RNA, 72 nt, Homo sapiens
cacccacgaagggaggaaaagggcagggacagcgcaggcagcaggcacccggaagcaaggcggccagcaaag

SEQ ID NO: 104913 - RNA, 54 nt, Homo sapiens
cgacgggccgcgaggggaagaggaagcaaagccaagacgagacaggaaaacgac

SEQ ID NO: 104914 - RNA, 73 nt, Homo sapiens
ggcaacgcaagggaacggagacaagaaaacgcagggaaagagcaccgaaaccaggcggaaacacggcaggcaa

SEQ ID NO: 104915 - RNA, 78 nt, Homo sapiens
gcagacccgggcgacgccccagggacaggagggaaaccacgccgggacgggggagaaggaaaggcagaccgagagaac

SEQ ID NO: 104916 - RNA, 86 nt, Homo sapiens
gccgaccgggcgcaccgaccaggccccaaagccccaaggcgacaagaccggaccggccaaacgaccaagaaagcgggacgcggaaa

SEQ ID NO: 104917 - RNA, 76 nt, Homo sapiens
aaaacaagcgcccaccagacaagcaaagaagcaccggagcaaagggacaaaggcgacaagagaaaaagaaagaaac

SEQ ID NO: 104918 - RNA, 80 nt, Homo sapiens
agaaggggacggagcgaagagaggagccgaggagaaaacagcaggcacccaagcgggcggcagaaccggagaaagaaaga

SEQ ID NO: 104919 - RNA, 83 nt, Homo sapiens
cccgcaccgcggggcgaggaccgcgcgccacgcaacgggccggggaccccagcccgcggagggcagaggccggcccgcggcca

SEQ ID NO: 104920 - RNA, 71 nt, Homo sapiens
gagccggaagaccaggaaggagccggggcgagccaaaaggagaagcgaacaaaaaaaaccccaaagaaccc

SEQ ID NO: 104921 - RNA, 76 nt, Homo sapiens
ccaagcggagagcccacgacaaccaccaagcgcggacgaacaggcgggaaggaggaccgcgccaacaggacgagga

SEQ ID NO: 104922 - RNA, 76 nt, Homo sapiens
caggagacaaacaaaggaagaaccaggacagaaaaaagcaaaggaaaagaacagaggacagagggcaagaccccaa

SEQ ID NO: 104923 - RNA, 81 nt, Homo sapiens
cccagccccgaagcggcgcgagccacgcgcccacgggccccgagccccggccccaaagacccaaaacagagacacccccca

SEQ ID NO: 104924 - RNA, 71 nt, Homo sapiens
ggccagaagagaccacgcacaggaggcccgaggagcggccacgcggaacaaagagcagaagaccccacagg

SEQ ID NO: 104925 - RNA, 51 nt, Homo sapiens
ccaagaggagagagccacagcgaagaaacagacacgaccagagggacaccc

SEQ ID NO: 104926 - RNA, 79 nt, Homo sapiens
cggcccagaggacccgaccgagagggagcggagaccggggccggcacagaaaaaacggaaagccgcagaagcagcgaac

SEQ ID NO: 104927 - RNA, 64 nt, Homo sapiens
gaaaaacacaagagccaaggaaggcaaaaacccacaggcggcccgacgaccacggagcaagcag

SEQ ID NO: 104928 - RNA, 69 nt, Homo sapiens
cgccacaggaacaaacgaggagacgcgagacgaacggacggccggacaaacgaaacgcgacgcaagaaa

SEQ ID NO: 104929 - RNA, 82 nt, Homo sapiens
acaccagagcaaccggagccacacagagaccggagacaaaaagaggccaagaccaagaggacaggggacagcgcccagaccc

SEQ ID NO: 104930 - RNA, 72 nt, Homo sapiens
ccaaaccagggaaaaagcaaaaccgaacacgaccagcccaggcacccaaaggagccggagggcgcaagcggc

SEQ ID NO: 104931 - RNA, 73 nt, Homo sapiens
caccggacccacaagagaagaaaggggaggcaagcacggaccaggagaacaaaaccccggagaagccaagggc

SEQ ID NO: 104932 - RNA, 74 nt, Homo sapiens
ggcagcagcggggggccagacaccgaaaggcgccgcccgcgccggccaggcccggagcccccgccgcagggccc

SEQ ID NO: 104933 - RNA, 57 nt, Homo sapiens
cgcagggcgcccccgccaccaaaaccccaacaggggcaccgagcacggaggcgcaga

SEQ ID NO: 104934 - RNA, 73 nt, Homo sapiens
accagccaagccccaacggcccccgcgccgggcgcagcgggacgccagaggggaagccgcacgagggagagac

SEQ ID NO: 104935 - RNA, 86 nt, Homo sapiens
gggcgccagaaggggacggagcgaagagaggagccgaggagaaaacagcaggcacccaagcgggcggcagggaccaggcagacgac

SEQ ID NO: 104936 - RNA, 63 nt, Homo sapiens
caggccgacaccgccggccaacacgggcaaggacgcggaaggggaccggagacaagagggccc

SEQ ID NO: 104937 - RNA, 82 nt, Homo sapiens
caggccgaaaccccaaaaggaccgaaccaccagagaaaagagaaagaaaagaagacaaaagcacacgccggggaaagccaac

SEQ ID NO: 104938 - RNA, 60 nt, Homo sapiens
cggagcagaaagcagagacggaggccacagacgaggacaagaaaaagcggggaagggggg

SEQ ID NO: 104939 - RNA, 54 nt, Homo sapiens
cggacgcggagaggggagccgcagagaaaacccccgaaacagagaaaccagcca

SEQ ID NO: 104940 - RNA, 86 nt, Homo sapiens
gcgccgcggcaccagggcgcgcagccgggccggcccgaccccaccggccaacggaccagacacaagcaagcgcagccaaagcgacg

SEQ ID NO: 104941 - RNA, 73 nt, Homo sapiens
gggccggaggccgcgcgcgcaggagacagacgggcccgggacacccagacagagagagcgcacgaagaagggc

SEQ ID NO: 104942 - RNA, 62 nt, Homo sapiens
ggcagggccccgcccggcggggaagaccccaagaagaagcggaagaggagccgcggaaccaa

SEQ ID NO: 104943 - RNA, 79 nt, Homo sapiens
acacgccgcgccaggagcgccgcgcccaaagaacaggagggccacagcaccccggaacccacaaagaccaaacaaacga

SEQ ID NO: 104944 - RNA, 74 nt, Homo sapiens
caccacagagacgaaggcggcaacaccaccagaggagaacaaaggggacaacacagccaaggaggggacagcaa

SEQ ID NO: 104945 - RNA, 89 nt, Homo sapiens
ggcagagcgggccgaacccagagcgagggggggaccaccgccggccaggggcggaaacgaggaggaaaagaaggaagcaagaaacacgg

SEQ ID NO: 104946 - RNA, 49 nt, Homo sapiens
cgggaccggaggcggagcagggagaagcacggaccagcagcccaaaggc

SEQ ID NO: 104947 - RNA, 108 nt, Homo sapiens
ggagagcacaccaggcacccgggcccagccgggaacccccacgcggccagcgaaaacgcccagggccacccccaaccaggaccaaagacgaccaccaaagccagcccc

SEQ ID NO: 104948 - RNA, 79 nt, Homo sapiens
ggaccgcccaccggcggccacgcaccgcgcgaagacggaagacgcgcccgcgccgccagaagcagaggaggagggcgaa

SEQ ID NO: 104949 - RNA, 77 nt, Homo sapiens
agggacggcacgggaccacccgcaaggacccggaaggccggggggccgagggagagaacagcacacagaggcgcaag

SEQ ID NO: 104950 - RNA, 72 nt, Homo sapiens
cggcggcgggcgcggccgacgcggcccgccaccggcgcaggggagacacaagggaaaccggacgcagaaggc

SEQ ID NO: 104951 - RNA, 64 nt, Homo sapiens
ccaaagccagcagcggccgcgggagggcgaccgagccggaggaaacccagcggcggcagaacca

SEQ ID NO: 104952 - RNA, 74 nt, Homo sapiens
gaaccggcacggcccggccccgcccggcgccgaggacccccggacagcagaggcacacaaacggaaccgcacaa

SEQ ID NO: 104953 - RNA, 79 nt, Homo sapiens
gcgagcgaggccagacaggggggcgccacggacgggacggggacgagaaaccggaggagcaggaaagaaaccccagaaa

SEQ ID NO: 104954 - RNA, 95 nt, Homo sapiens
gggcgcgcggcgccggcggcgcgcgacccccgcgcaggccaacggaccacaccaaaagccaccaaaggaacacgccaggaaaccagagacacaca

SEQ ID NO: 104955 - RNA, 50 nt, Homo sapiens
cccagagagagagcccccagaccgagaagaggaggggacaaagccgcgaa

SEQ ID NO: 104956 - RNA, 78 nt, Homo sapiens
caaaccaaaccacgaaggccaagagagaaccgagggcaccggagggaagcgggccaccgcccggcccccaagacggcc

SEQ ID NO: 104957 - RNA, 81 nt, Homo sapiens
gaggaaccggcggagagcagaagaccgaaaggaggagagggacgcaagagcccgacaggcaacacagccgccacaaccacc

SEQ ID NO: 104958 - RNA, 77 nt, Homo sapiens
caggcccgggggcggcggccacgccaaggacgggccagggacgcggacgcagaagacgaccaaaagccgccagcgca

SEQ ID NO: 104959 - RNA, 74 nt, Homo sapiens
accgcaaccagagagcgaaagagagaaacacaaaagagcgaaacagggaaaggaaaaagccgacaggcccagcg

SEQ ID NO: 104960 - RNA, 73 nt, Homo sapiens
acgagcccccggaaccacacccaggcccgagagagaaagggaaagaaggagcggagcagaacaaggaccccca

SEQ ID NO: 104961 - RNA, 72 nt, Homo sapiens
cagaaggaagggccagcaggcagcaaaggacccgaagacaaaaccacccacgaaagcgaaaagacccaaaac

SEQ ID NO: 104962 - RNA, 79 nt, Homo sapiens
cggagaggagagcacacggcaccgagggagggcgagcaacggcccaaccaacccccggaccgcaagaaaaagaaaccac

SEQ ID NO: 104963 - RNA, 71 nt, Homo sapiens
aacagacagaggggcgaagaagggcaggacccgaggcgccagcagcagcaagaccgggggaccaggcgaac

SEQ ID NO: 104964 - RNA, 82 nt, Homo sapiens
agaagcacgaaagcgggagagggaccggaacggcggcgacaaggggcccgaacagaggggaaaggccgaggggcaaagaaaa

SEQ ID NO: 104965 - RNA, 72 nt, Homo sapiens
caccccacccagaacaacacaagccagagacggacacgggaaaaagacacaaagagagcacaaagagccccg

SEQ ID NO: 104966 - RNA, 74 nt, Homo sapiens
aagacgcgccgacgcgaggccaaaggcaggagcaagagccgagagaaacgcaggacccacaagcagaccgagcg

SEQ ID NO: 104967 - RNA, 80 nt, Homo sapiens
ccgggcccggccaggcggcgccggaggaacggagaccaagacacaccaccccagggggggcccaaccaccaggacgaaca

SEQ ID NO: 104968 - RNA, 81 nt, Homo sapiens
cccccgccgcgcccgggcgggcgaagccgacgagcccgaacagacgcaccagcgggaggaagagggacggcccaggagcgc

SEQ ID NO: 104969 - RNA, 85 nt, Homo sapiens
cgccgcgccgcccggcagcccggcagggcggaaaacaccccaaaagccaaaagggaaaggaaaagaccaacaacagcgcaggaca

SEQ ID NO: 104970 - RNA, 82 nt, Homo sapiens
gaaacaaccggcggcaaagacgaagggaagccagggaagcacagcaaccgggagccacaaagaaacccccaagaagagcaca

SEQ ID NO: 104971 - RNA, 80 nt, Homo sapiens
gcgcaggagccaagaccacagcagcacccagcacggagccgagaggccgagaccgaccagcacgaccggaggccacacag

SEQ ID NO: 104972 - RNA, 37 nt, Homo sapiens
aacaccgcacgcgcggaggagccccgcggcccagcca

SEQ ID NO: 104973 - RNA, 82 nt, Homo sapiens
gcgcggcggcgccgcgcgcgcagggccgccggcccgcagccgccaccacccaggaccagaaggcggaggcaaggccgaccgg

SEQ ID NO: 104974 - RNA, 70 nt, Homo sapiens
aaaggcaagagagggcacaaagagacaaaaccaaggaggacacaaccgcgagaaccaccagcaaagacgc

SEQ ID NO: 104975 - RNA, 77 nt, Homo sapiens
gaaccggcccggagcgagaacgcgccaagaggcgcagaccgggagcgagcagcaggccgccgggggagccacgcgca

SEQ ID NO: 104976 - RNA, 56 nt, Homo sapiens
aaggaccgacccaaaagcagagggcacacaggcccgagcacaaacacaagaaacgc

SEQ ID NO: 104977 - RNA, 74 nt, Homo sapiens
ccgcccaaggaggcccagcgagccggaggagccaccaacagaagcaggagccaggaaaccaaaacccacagaga

SEQ ID NO: 104978 - RNA, 84 nt, Homo sapiens
gcgcagcagcgaccacgccgggccgagccagggcccccagaggagagaaggagggaccgccgggccaccagaaagagcgaagac

SEQ ID NO: 104979 - RNA, 80 nt, Homo sapiens
ggagagggccggcggcaacggcacagagagaaccagaagcaagcggaaaacaagcgcaacagggaggacaagagaagaag

SEQ ID NO: 104980 - RNA, 83 nt, Homo sapiens
gcagagcgaccccgggcccagaaggacgcagcagagccgggaacgggcgccgagcgaggcaccaaccccacaccgccccgggc

SEQ ID NO: 104981 - RNA, 73 nt, Homo sapiens
gggagacacggccagacgcccccaggagcgaagaggaaagaaagacccccgggacagaaacaagcccaagagc

SEQ ID NO: 104982 - RNA, 36 nt, Homo sapiens
cggagagcacccaacacaccaagagaagaacaagga

SEQ ID NO: 104983 - RNA, 74 nt, Homo sapiens
ccgggagccaaaaacaccaaaaagaagaaggacagcggccaagaccaccgagccaggacagaacccaccagaca

SEQ ID NO: 104984 - RNA, 80 nt, Homo sapiens
gaaggggcaagagggggaaagcacaggggcgggaggcgggcggcggggcggcacggcggccgccacacaggggagccgcc

SEQ ID NO: 104985 - RNA, 77 nt, Homo sapiens
cccgaaccgagccccagcacaaaaacgggaggcagaaagcggaaggcaggaaggcgagcgagaaggccagagccgcg

SEQ ID NO: 104986 - RNA, 77 nt, Homo sapiens
ccggaaaacccgcgaaaccaagggccagagacacaccccaccagagggggagcccgggccagcgcagcagcaagagg

SEQ ID NO: 104987 - RNA, 40 nt, Homo sapiens
ggagaaggggagaaaggagaccagacggagccgccgcgcc

SEQ ID NO: 104988 - RNA, 87 nt, Homo sapiens
agccaaggggcagcagcggaagcggaggagagccaacacgaggagcaaagaaacagcacaggacggaagaggaacacgcaaacaagg

SEQ ID NO: 104989 - RNA, 79 nt, Homo sapiens
acgaaaaggccgggcgcgcgcgccagcaagcgagggaccaaaagagcgcccgacacagcagggcgaggaccaccagacg

SEQ ID NO: 104990 - RNA, 55 nt, Homo sapiens
gaaggcacgcgcccggacagacaggcagagggcaggcacgagcaaggaggagccc

SEQ ID NO: 104991 - RNA, 38 nt, Homo sapiens
gcacaggggcagagagcaggaagcaaccaaaccagagg

SEQ ID NO: 104992 - RNA, 94 nt, Homo sapiens
cacccaaagcacgggggcaacagagcagccaaaggaaccgaaggaccgaccaacaccacaaggaggacccagccaacaaaaaaccccacaacgc

SEQ ID NO: 104993 - RNA, 56 nt, Homo sapiens
cagggagcaagccagaccggcccggaccgcccccagagccaaacgcgaggacgcag

SEQ ID NO: 104994 - RNA, 79 nt, Homo sapiens
caacccaggaggacaagagaagcagcccaaaaacagccaaaggaaggagaaacggcaaggaaaagacagaaagcagagg

SEQ ID NO: 104995 - RNA, 77 nt, Homo sapiens
cacacacaaggagggcagaagaaggagcagggacggggggaaaagcgcacccgggcccgggcgagaaagaagacacc

SEQ ID NO: 104996 - RNA, 76 nt, Homo sapiens
aagaaacaaagcacaaacagcagcacgaggagaggaagaggcgagaaaaacaaccaggcggagacagggcgcaacc

SEQ ID NO: 104997 - RNA, 78 nt, Homo sapiens
ccggaccgagagcggaccgagagcgcgaaacgcacgagaaggaccagcagccagcagcacgagcggagaccaagagag

SEQ ID NO: 104998 - RNA, 52 nt, Homo sapiens
ccacccccacgaacgaggggagacgaggagcggcagcccacaagcaggaaga

SEQ ID NO: 104999 - RNA, 56 nt, Homo sapiens
ccggccgggccggccagcgccggaaaccaacaaaacagaagacagagacacgacac

SEQ ID NO: 105000 - RNA, 69 nt, Homo sapiens
ggagaagaaagcagagagggaagcaaggagagggggaaggcaggaccggcccgcagccacccagaccca

SEQ ID NO: 105001 - RNA, 75 nt, Homo sapiens
gccgaacggagggcgacggagggaggagacggaagcggaagcacacgccagacgccagcaggccggagcacggcg

SEQ ID NO: 105002 - RNA, 83 nt, Homo sapiens
ggacgccaagacacgacaagacgaccgggaaagccagggaggccgcgaaggggaaagccggcaaaaagacccaaaaaggaggc

SEQ ID NO: 105003 - RNA, 70 nt, Homo sapiens
ccagaccaggaacggccagccggccccacgcaaagcaaaaacgaaaggggaggggccacaggcccggacc

SEQ ID NO: 105004 - RNA, 35 nt, Homo sapiens
gcgccgcgccggcgagcgcacagggggaccaaacc

SEQ ID NO: 105005 - RNA, 83 nt, Homo sapiens
cccaaaaggagacaagagcaggcccagcaaaccagccagcacgggggcccagccagccagcagcgaggggggacggaggcggc

SEQ ID NO: 105006 - RNA, 82 nt, Homo sapiens
ccgggagcacagccgccgaagagccccagcccaaaacacgaaggcacacaaagaagaacgggagccagggggaaagccagaa

SEQ ID NO: 105007 - RNA, 85 nt, Homo sapiens
cgcccagcccccgagggcgggaacaggccaaagggccaaacaacagacccacagaacaacaacagagccaaacccgccagaaccc

SEQ ID NO: 105008 - RNA, 70 nt, Homo sapiens
gccaggagcagagcgacagcggcgagcagaacacggcgagcggcccaaaggggcacaaaacgccccggga

SEQ ID NO: 105009 - RNA, 62 nt, Homo sapiens
aagcaaacggaccagaccgaccaccaaaaaaagcacggaccgccaggacgaaggagaggcaa

SEQ ID NO: 105010 - RNA, 74 nt, Homo sapiens
gcaccccccaaaggggagaaagggagagaagaagcaaacggcgcccacagccacaggacgcccccaacagcaaa

SEQ ID NO: 105011 - RNA, 69 nt, Homo sapiens
gggagccaagaggaacacaaagaagcaacggaaaaccgcaacccggaagggaaccaacacagcccaggc

SEQ ID NO: 105012 - RNA, 80 nt, Homo sapiens
ccaacccaaaaccagggcggcaaaacgagcgggccagcacgcaccccgcgccgccgccccccaccaaggaagcccaagcc

SEQ ID NO: 105013 - RNA, 81 nt, Homo sapiens
ggagcgacagaacgcaaggaaacagagcgggcacgcccaccccccagacgacaagaaggccagagacaggagaagagaaga

SEQ ID NO: 105014 - RNA, 91 nt, Homo sapiens
cgaaaaccccagacaaaagaccgggggaggaaagaagggggcgaggggagcgaaaggccgacagcagggccggaaaagcaaagagagcaga

SEQ ID NO: 105015 - RNA, 71 nt, Homo sapiens
aaaaaaaacaaccgaggggccgacccaagcacaccagaaagaacgcggcagaacggaggcaggcagcacga

SEQ ID NO: 105016 - RNA, 83 nt, Homo sapiens
gcagggcgcccccggccaccacggcccgagagacagagaagcgcgcggcagaagccagccgggccaccgcagcgcggcaggcg

SEQ ID NO: 105017 - RNA, 85 nt, Homo sapiens
cggaccgacaccacgacgacgggccacagcagccggcggcggcagagggagccggaccagaccgccggagcacgccgagaccacc

SEQ ID NO: 105018 - RNA, 78 nt, Homo sapiens
gacaacgggcacagggccggccagggccgggcgcggcgccgggaggcagaaaagggagaacagaagaacagaaaagaa

SEQ ID NO: 105019 - RNA, 87 nt, Homo sapiens
ggcgggcgcagcgggcaggcggaggccagcggggccggaagcggcggcgcaggaacggcaagaacccgaccacaggacagggaccaa

SEQ ID NO: 105020 - RNA, 92 nt, Homo sapiens
gagacccgagcacgccacccccacccgcacaggaccaaggagagcgacgcaggggaggacagggaacggcgaggagccaccgggacggccgg

SEQ ID NO: 105021 - RNA, 46 nt, Homo sapiens
aggaacaggaggaaaccacagagaacccaagaaggcagaagccagc

SEQ ID NO: 105022 - RNA, 56 nt, Homo sapiens
aaggggagaaaagggaaggccccaagccaaggccacaggccaacgacaacgacaag

SEQ ID NO: 105023 - RNA, 66 nt, Homo sapiens
gaggaacaccaggcacaagccaccgccggggacccagcaacagcacggaggaacagggcagagacc

SEQ ID NO: 105024 - RNA, 121 nt, Homo sapiens
gccgccaccgaaccgcgggaggcaacgcccgggccccgacccggagagcggcaaccgcgcaccaaagccagaagaaaagagaacacacacggagagcaccacgaggaagacagcgaggaga

SEQ ID NO: 105025 - RNA, 69 nt, Homo sapiens
aaaacaaagcaaaccagaaggcagagaggggccccagaggagaaacggcgggggcggagggcaagacga

SEQ ID NO: 105026 - RNA, 72 nt, Homo sapiens
cgaaaaagcgggaacgcaggacccaaagcgaaaaaccagaagagaaaaaacaaaggggagaggcaccccgcg

SEQ ID NO: 105027 - RNA, 77 nt, Homo sapiens
gggaaaccagcgcgcgccaaagggcgacggcacacagagagaccgacccggaccgacaggaaagaaggagcccacaa

SEQ ID NO: 105028 - RNA, 84 nt, Homo sapiens
cgaggagggggaccgaagacgaccgacccgcccagcacgaccagccagcagcccgggagaagaagcgagcggccgaacgcccga

SEQ ID NO: 105029 - RNA, 77 nt, Homo sapiens
caagcggcaaacggcagagcaggccgcggcgacccagcgagaagaaggcgaagcgcacacggacggaaggccggggc

SEQ ID NO: 105030 - RNA, 75 nt, Homo sapiens
acccagagaggcgagggaaagaaagacagcaaaggccacgccccccccgcgggggcgcgaagcggagcaaagaaa

SEQ ID NO: 105031 - RNA, 70 nt, Homo sapiens
aggccacaaggaaccaagacagcgccacagacagaaaagcgagaaagaacgcagcgcagcggacgcaaag

SEQ ID NO: 105032 - RNA, 83 nt, Homo sapiens
gaaaacaccggccgcaggaaggcagaagaaagaagaggagaaggagcagccggccaaggaaccaggagccgacaacaacccga

SEQ ID NO: 105033 - RNA, 43 nt, Homo sapiens
cacgccaaggaggggcaggggagccaggaagcgccgccccggc

SEQ ID NO: 105034 - RNA, 54 nt, Homo sapiens
accgagcacagggccagcggcggcaccaggacgccgaaaagcgaccggacgcag

SEQ ID NO: 105035 - RNA, 78 nt, Homo sapiens
gaaagcccagaagaaaggacagaaaggagccacggcacaaaacgccgggagggcacgaaagaaacagaaacacaaagc

SEQ ID NO: 105036 - RNA, 69 nt, Homo sapiens
aggaagcccaacccagagcccccggcaggacaaaccggcgaccacacacggggacgacggggaagccgg

SEQ ID NO: 105037 - RNA, 67 nt, Homo sapiens
accccaggccaagcaaccaccagcagcccccagagcggaacacaggcggacgggccccgaagcccaa

SEQ ID NO: 105038 - RNA, 78 nt, Homo sapiens
aagggaaagcaggaaagaccggaaaagggaacccgagcagaacacagcacaaaccagccaacccaagggacaaggccc

SEQ ID NO: 105039 - RNA, 60 nt, Homo sapiens
cggcaaacgaggaggggccccacaaggaggagagaaaaaccggcagagcgcaagccagcc

SEQ ID NO: 105040 - RNA, 68 nt, Homo sapiens
gcaacggccggagagaaaacgcaaggaaaggaacaggaacagaggcccaagaacaccggagggaaacc

SEQ ID NO: 105041 - RNA, 53 nt, Homo sapiens
gaggccaagaaagccagcaggggcacgagggagaggccgagaagaaacaggga

SEQ ID NO: 105042 - RNA, 72 nt, Homo sapiens
caaaaaaaaaacgcgaacaccgacggagccagggaaagcaggccccggccaccaagaccaagaaagaaggcc

SEQ ID NO: 105043 - RNA, 76 nt, Homo sapiens
cagaaggccggagacaccagcagaacccaggagaaacgagagggacagcaaggaagacgccagagagcggcacacc

SEQ ID NO: 105044 - RNA, 39 nt, Homo sapiens
cgaccacacgccacagcacgaacgacacggcagaagagg

SEQ ID NO: 105045 - RNA, 70 nt, Homo sapiens
caacaccagggaccagagcgcgaccggccaaaagaacggcaaagagccagccagaacggaagaccaacca

SEQ ID NO: 105046 - RNA, 72 nt, Homo sapiens
acgggggcccccccgccggacaggagagaacagaaagaccaagcagaagagaggacaaagcaccgggcaggc

SEQ ID NO: 105047 - RNA, 73 nt, Homo sapiens
agaaagagggacagccgcacggaggcgaaacacaaagggaaaaccagacgagagacagaagacgaaagggcaa

SEQ ID NO: 105048 - RNA, 86 nt, Homo sapiens
accaaggcaacaaggacaacaagagacgggacaagacagggcaaaggacagaccagcccgaagaggaaggagaaggaaagagcaga

SEQ ID NO: 105049 - RNA, 66 nt, Homo sapiens
gaacacggagcaaagacaaagcaagcacgcaagaggaaaacccagcaacgacggaacgaggagaaa

SEQ ID NO: 105050 - RNA, 96 nt, Homo sapiens
agagggaagcaccgccccaacggcccacaccggggggaaaagaaggaccgaggacgggacaagcccgagcaacccgacccgagcaagaagcccgag

SEQ ID NO: 105051 - RNA, 57 nt, Homo sapiens
aagccggaacaacagccaggagaagagagggaaaaacaaagaagaccgggaagcccg

SEQ ID NO: 105052 - RNA, 73 nt, Homo sapiens
gggacagcgcaggcagcagaacgggcagcgagcccgaggcacaccggaccccaacagcacaggagcggagggg

SEQ ID NO: 105053 - RNA, 58 nt, Homo sapiens
gaaaagagaaaccagagagagggaaagggccccaagagccgggcggaaaacgaaagcg

SEQ ID NO: 105054 - RNA, 74 nt, Homo sapiens
agccccagcacagcagccgccgccgaggaagcgggaaggaagaaagaggaaagcgggcagcgcggaaccaaacc

SEQ ID NO: 105055 - RNA, 75 nt, Homo sapiens
acgcgacagagagcgcagagcagacagaagacagcccacgacacaggcccagaccagcccgaagggaaccagcga

SEQ ID NO: 105056 - RNA, 63 nt, Homo sapiens
gacgcacacagaaaggcccgaacggacggacaaccagggccagggacaccacacaggacgggc

SEQ ID NO: 105057 - RNA, 84 nt, Homo sapiens
ccgaaccggaagggcggaggccccggcggcaggacagagcgggagccaccagcgccaaagggaagccaggagcccgggggcacg

SEQ ID NO: 105058 - RNA, 80 nt, Homo sapiens
ggggaaggccgccggcacgagcgcgcaacacggcacagagcagcaacagaaaccaaagaaggggacagcgcaagagaaag

SEQ ID NO: 105059 - RNA, 77 nt, Homo sapiens
acaccaggacaagggggcacgcagccggggaccgcccggccgcgagccggcgcagacggcccggccaacgcaacagg

SEQ ID NO: 105060 - RNA, 77 nt, Homo sapiens
ccgggcggaagacgcaggagcaaagagagccaaacggaacaaaaccgaaccaacaccacacaaacccgacgccacca

SEQ ID NO: 105061 - RNA, 62 nt, Homo sapiens
gggacagcaacagccggcgggcggaaggcagacacggcccgggcaaacagcagaacgcaaga

SEQ ID NO: 105062 - RNA, 79 nt, Homo sapiens
accgacccgagagcccacccccaacgcgacggaaaggcacgaaagccaggaaggaaagacagaaccaaaagccaaagac

SEQ ID NO: 105063 - RNA, 65 nt, Homo sapiens
agagcgccagccccgcacaagaccggcagggaggaagccaagaaaaagaaacaagaaaaaaccgc

SEQ ID NO: 105064 - RNA, 77 nt, Homo sapiens
cggggacagccgcgccgaggaggccggaaagggaggaagaagcgagccggccggaggccggcggagccggaagcgag

SEQ ID NO: 105065 - RNA, 70 nt, Homo sapiens
acacacaaagccgcagaaagcagcagagagagccgagccaagagccagagaaccacagaaccagggccac

SEQ ID NO: 105066 - RNA, 73 nt, Homo sapiens
agaaacaacaaagccgaacgagcacggaaagagggacaacacaccccagacaacccaacaggcccgaagagga

SEQ ID NO: 105067 - RNA, 36 nt, Homo sapiens
acccaaaggaagagccaggcgggccagcgcaccggg

SEQ ID NO: 105068 - RNA, 84 nt, Homo sapiens
gaagacccggccgcccagagagcgggggggggaccgccggcacgcgacccccccgggcccaaaaagaggcggccacccacgagc

SEQ ID NO: 105069 - RNA, 79 nt, Homo sapiens
aaaccgacccacgagccggagagccgcagggaggcggagggcagggccaggaggaacagaggcggaggcagggcggacc

SEQ ID NO: 105070 - RNA, 84 nt, Homo sapiens
ggcgacgggccaagggacagccggcggacaccccaccaggagacgcaggaaacacaggggacaaaacccaaaacaaacaaaaag

SEQ ID NO: 105071 - RNA, 60 nt, Homo sapiens
ggcagcccggaggagggccccccccccccgccggaaagaacccaggaaaccggcgacacc

SEQ ID NO: 105072 - RNA, 78 nt, Homo sapiens
ggggccgaccgccacacagccagaaaccaccccacccaacccccgacacagaagaggagaaaacggaacaacaggagg

SEQ ID NO: 105073 - RNA, 68 nt, Homo sapiens
ccaccgaaaggaacccaggacgagcagaggaaaacgaacacaggcgaggcgccggcaacgggagacag

SEQ ID NO: 105074 - RNA, 74 nt, Homo sapiens
gaggagacaaaccggagaaggagccaagaaagagaagacaagggaggcgaggacggacaaaaggaaacggacgg

SEQ ID NO: 105075 - RNA, 74 nt, Homo sapiens
gggacgggaagcgcgaaaaggcaaaggaacccccacggcagcgggacagcaagggaggcagcagacgggaagaa

SEQ ID NO: 105076 - RNA, 61 nt, Homo sapiens
cgagccccaggcagaaggaggcaggccaaggccggagagccacgggggggcacacagagaa

SEQ ID NO: 105077 - RNA, 75 nt, Homo sapiens
gacaaggggcccgaacagaggggcgacggaacgcgaaaagaccaggagaaggaaggaggcggggcaagcgcagag

SEQ ID NO: 105078 - RNA, 83 nt, Homo sapiens
aagagggggacccaaggacgcgaaagccagagacccagcaggagccaggaagagaagaaaagaagaaacaacagaaaaaaaga

SEQ ID NO: 105079 - RNA, 65 nt, Homo sapiens
ggagacggagagggacccgggaaaagaacaacgaccgcagacgacccagaagagcccggggaagc

SEQ ID NO: 105080 - RNA, 78 nt, Homo sapiens
ccggggcggcgggggacggggccggcggccaaggagggcacgagcggaagaagaggcacaaagcagggacacgagcca

SEQ ID NO: 105081 - RNA, 66 nt, Homo sapiens
gcggaggaccgggaggccccgggcgcggggaaaccccccaggcaagaggcgcaggaccgggaagac

SEQ ID NO: 105082 - RNA, 86 nt, Homo sapiens
ccggcgagcaggagaggaggcccgggccgcggccccgagcgcgcgggagcaggagggaaaaccccgaccaaaagaagcaggacaca

SEQ ID NO: 105083 - RNA, 72 nt, Homo sapiens
ggacaaagacccggaccgcagcaagacagacaaaacaccggggcccacaggacagccgggcgcacacaaccc

SEQ ID NO: 105084 - RNA, 81 nt, Homo sapiens
ccacccagaagaaggaagacccccgcggaaaagagaggaacagcacggaagaaccgaagaaagcaagaacaaccggacaag

SEQ ID NO: 105085 - RNA, 53 nt, Homo sapiens
gaccccgaggcgagacggaaagcgcgccgggggcccggaaagggacgcgcgcc

SEQ ID NO: 105086 - RNA, 65 nt, Homo sapiens
cccagcaaacgggaccccagggacagcaaaaagagcagaccacgggggaaagacggaggacggac

SEQ ID NO: 105087 - RNA, 81 nt, Homo sapiens
gacacgagggcaccgccaccacacccgcaggaacaggccccagccaggacacagggaagaaagaagcgaaagagagaagag

SEQ ID NO: 105088 - RNA, 88 nt, Homo sapiens
ggcagggcccgacacagcgagaaggcccaaagaacaaggagggggccagcagcaagagaagagcgacgcggcagcgagagagagagcc

SEQ ID NO: 105089 - RNA, 79 nt, Homo sapiens
gccgcggccgaaaggcaaggagcccggaagcaagagaccagagcccaaggacccggcaccaacagaaagaaggaggaac

SEQ ID NO: 105090 - RNA, 68 nt, Homo sapiens
caacacagaaacaacgaaaaacccgaaaaggaagaaacacggaaccaaagccgaccccgaaacaggga

SEQ ID NO: 105091 - RNA, 75 nt, Homo sapiens
ccaaaccccaggccaagcaaccaccagcagcccccagagcggaacacagggagcaaccggaacacgaccgacggg

SEQ ID NO: 105092 - RNA, 48 nt, Homo sapiens
gcagaaggggacagaacaggggcccccaaagggaagccaaacacaaag

SEQ ID NO: 105093 - RNA, 67 nt, Homo sapiens
gcggagcacagaagaagcaacacgagaaccaccccgacacaacaccaccagggaggccgcgcccagg

SEQ ID NO: 105094 - RNA, 81 nt, Homo sapiens
gaaacacgcgaaaaaccgcccccagagcgaccagagggggagcaggggaaagcagaaaggaggaggaagggaggacggcga

SEQ ID NO: 105095 - RNA, 98 nt, Homo sapiens
aggggaaggacggaagccaggaccgcgagacaaccaagcagccccagggcgaagacccccccccagggcaaaccaccaggcaagaagaccccgcccac

SEQ ID NO: 105096 - RNA, 59 nt, Homo sapiens
cccaaacgacgcagccacggagagaaagaccagaaacccaccgaagagagagacgagaa

SEQ ID NO: 105097 - RNA, 86 nt, Homo sapiens
ggaggaggaagaagaagggagggaggaacaggggcgacaagagagggacaacgggagacggaaccaccaagccaccagaggcccgg

SEQ ID NO: 105098 - RNA, 80 nt, Homo sapiens
cgggacaccccgaccagaacgggccaccgcgccacgagacccccgggaaaaagcccacgacacagccaaaggggacccac

SEQ ID NO: 105099 - RNA, 77 nt, Homo sapiens
ccaacgcccagagaaaaacagcgaggaaagagggcgcagaagaggaggaccgaagagagaggaaagcaaggagccag

SEQ ID NO: 105100 - RNA, 75 nt, Homo sapiens
gccccgagaggaaacacccccagaagaggacaggaaaagccagagagcggcagagaagaagggaggcccaaagag

SEQ ID NO: 105101 - RNA, 72 nt, Homo sapiens
ggagggagaacaagcaacggcggcgagaaacagggaaaacagaagcggagaggcccagaacagcagaagcag

SEQ ID NO: 105102 - RNA, 72 nt, Homo sapiens
gcgggacagccaggcagacgccaacacaacggagcaccagaaaaggacagaaaaaaaagaaaccaacagaaa

SEQ ID NO: 105103 - RNA, 79 nt, Homo sapiens
gacagcggccaagaagacacaaaggacggaggcacgaggaagccacaaagaaggggacaccccaaaggaagaacagggc

SEQ ID NO: 105104 - RNA, 63 nt, Homo sapiens
agaaccgcaaaaagcccaccacccgaagacgaaggcaaggcggcaaacccccacgaagaggag

SEQ ID NO: 105105 - RNA, 78 nt, Homo sapiens
caacaccggaggagggggcggccacggccaacgccgcgcccgcggagggaaaaggccgcaaaagaaagaccggaaggc

SEQ ID NO: 105106 - RNA, 75 nt, Homo sapiens
cagaggcggaaggacccggaagccacaaagcaaaacggcacgggagagcgaggaaacccccgcagccaaggacag

SEQ ID NO: 105107 - RNA, 57 nt, Homo sapiens
cggacagaaagccaaaaaggagaaagccccgcacagagaccccgggcccccccaagg

SEQ ID NO: 105108 - RNA, 78 nt, Homo sapiens
aggagcccgaccgggagaggacaagaccacgagccaggcaccaagccacaaaacaggccagaccgggcacagacaccg

SEQ ID NO: 105109 - RNA, 71 nt, Homo sapiens
ccagaaagaaaggagcgccccaaaaggaaacaggggcggagacacgcacacaaagaagccggagcagaaca

SEQ ID NO: 105110 - RNA, 34 nt, Homo sapiens
gcgggacaagaaaacagcgaggaaccagagaagg

SEQ ID NO: 105111 - RNA, 87 nt, Homo sapiens
cacacgacggccgcaaggccaacggaaccggcaacgggcgccaagccgcggagccccagacggggaaagggagcagcaccggccaca

SEQ ID NO: 105112 - RNA, 52 nt, Homo sapiens
cgaccaaccccacagaccacacacccgacagggaaggggaagcaggccaacc

SEQ ID NO: 105113 - RNA, 71 nt, Homo sapiens
aggacagcaggcaacagaaaaaacaccagcagcccagcaaccaaaaagaagaccgcacccaaacaagggaa

SEQ ID NO: 105114 - RNA, 57 nt, Homo sapiens
aaaagaaacaccgaaccgccacccaggcccaagaaggaaaggcaagaaggcgcccag

SEQ ID NO: 105115 - RNA, 72 nt, Homo sapiens
cggccagacagcaggccgacggccccgggcgcagccaaaccgagagggcacgagaagaagaacagagacacg

SEQ ID NO: 105116 - RNA, 84 nt, Homo sapiens
cagcaccacgcccgcgccgcgccgccgccaccagcccaagagaaagggaacgaagcccaaaaggcagagacggaccgagacagg

SEQ ID NO: 105117 - RNA, 85 nt, Homo sapiens
ggccacccggaaagccagaagaaaccaacgggcgagaagccggaagcgggcgcgaaaacgaacggggacccagaaagaagcacaa

SEQ ID NO: 105118 - RNA, 85 nt, Homo sapiens
ccgccagaaagcccaacccccaagacgccaccgaggcccgcggggcgagaaaaacaggcgaggccgaccacagcggaagcagggg

SEQ ID NO: 105119 - RNA, 64 nt, Homo sapiens
cagacaacgccccgggaccggagcagaacccccgcagagaaagaaagacaacgaaacggcaaac

SEQ ID NO: 105120 - RNA, 76 nt, Homo sapiens
aggaaaaaggcaaacgcaaagggcccgagccggcaaacgagagcaaaagggaccgaggcaagaagggacgaacggg

SEQ ID NO: 105121 - RNA, 74 nt, Homo sapiens
agaaacgcagacgcacaggcccacccacccgccccgccaggcgcaagaaccgacagaccacgggcggcgaaggc

SEQ ID NO: 105122 - RNA, 71 nt, Homo sapiens
gaggggcgagcccagagggacaagcggcccacacgggacggcgcggccacccgcagccgaaacaaaggcca

SEQ ID NO: 105123 - RNA, 71 nt, Homo sapiens
aacggaccagaccgaccaccaaaagacaccaggggggaaaaaccacacaggcaaagaacgcgcaaaacagg

SEQ ID NO: 105124 - RNA, 41 nt, Homo sapiens
gcagcccaacgcacgccagagagaacccgaagccccagagg

SEQ ID NO: 105125 - RNA, 55 nt, Homo sapiens
aaaccggacgcgacggggcaggccggaaggaccaggcagggagcaggacaggaag

SEQ ID NO: 105126 - RNA, 76 nt, Homo sapiens
cagcaagaaacagcaagacaaaccagaccaccagggacaggcaggggacgggaaggacgccccaccacgacaccag

SEQ ID NO: 105127 - RNA, 74 nt, Homo sapiens
cagcagacaaagacggcaacaacacaaccggacacagagaagaccaaaccaaaccaacaccgcacaaacccagg

SEQ ID NO: 105128 - RNA, 68 nt, Homo sapiens
aagaggggaagccaccgagcaacaacagccacagggaggaaggaacggcccgggcccggaggcagcag

SEQ ID NO: 105129 - RNA, 73 nt, Homo sapiens
ccccgcccggaagaggaggaagacgacgccccgcgagagcccagagcgcacagcccgccgccgccggaaagga

SEQ ID NO: 105130 - RNA, 63 nt, Homo sapiens
cgcaggagagaagcgcggaagaaggccccgggaggccagagaaggggccgcaaggccaggcgc

SEQ ID NO: 105131 - RNA, 68 nt, Homo sapiens
caggaaggcacggaggcacacagaaccacaggaaagcagcgaggaacacagagcccccgcaccaccag

SEQ ID NO: 105132 - RNA, 59 nt, Homo sapiens
aagggcccccgaaggaaagagaggccggggaaagccgggaccgaaggcaggacacccaa

SEQ ID NO: 105133 - RNA, 91 nt, Homo sapiens
cacaccaccacacccgggccagcgagcaggacgagccgggaggggagacaccgaccccaagcgagagagcagaagacaaggagacaagccc

SEQ ID NO: 105134 - RNA, 79 nt, Homo sapiens
ccaaagaacccgcaacaagaacaagcacggcagggaaaacccaagggacacacccagaagggcagaaaagaaaaggcca

SEQ ID NO: 105135 - RNA, 71 nt, Homo sapiens
ccgcccgcggaaccacagcccagcacggaccaagaaaccggaaccaaaagaagcaacagagaggaaaaagc

SEQ ID NO: 105136 - RNA, 88 nt, Homo sapiens
gccaggggagcggcaggaaggccaccacagggccaacaagcagcgaggaaggacccccacacccccccaaggagacccacacaacgag

SEQ ID NO: 105137 - RNA, 75 nt, Homo sapiens
gagaagaagccaggggagagcacggggcagggccaacgggccaacgccggcaggggacggcccacgcgaccggag

SEQ ID NO: 105138 - RNA, 76 nt, Homo sapiens
aacgcaaacaagcggaagacacaaacagcagggagaagagacaacaagacagggccgggaacaacaggagagaaag

SEQ ID NO: 105139 - RNA, 87 nt, Homo sapiens
aaggcgcgccaccccccggaggcgacaggggcacccgggaccgcggcgagaagccccagcgcacacgcgccaagagaaaccaccaag

SEQ ID NO: 105140 - RNA, 92 nt, Homo sapiens
caacaagaaccgaaggcaaagggcaaagccaggagggaagcccacccgagacgcagacaggagcgggagaagggccggcgccaggcgcaggg

SEQ ID NO: 105141 - RNA, 55 nt, Homo sapiens
ggaaacagagaaagaaggcggccaggccaaccgaagggcccagacccacaaccag

SEQ ID NO: 105142 - RNA, 80 nt, Homo sapiens
gacagggacagggcagccgacaggccaacacacagacccccagagcaaacgcggcagcaccagaagagccacacggaggc

SEQ ID NO: 105143 - RNA, 67 nt, Homo sapiens
ggccgccacgagagaaaaaggagacaacggcaagcggagaagagcaaggccgaaccgagaggaaggg

SEQ ID NO: 105144 - RNA, 73 nt, Homo sapiens
aggccgaaaagaaacccagaaacccaagaagaacagcgcaaggccagaaccgaggaaaaaacgacaaccagcg

SEQ ID NO: 105145 - RNA, 75 nt, Homo sapiens
gcggacgcggaggcccaaccgaagaaaacaaggacacagcaggggccagacaaccagacccgggaggcaagagac

SEQ ID NO: 105146 - RNA, 79 nt, Homo sapiens
gcggcccgaggcgcagcagcaggaggaggaccgcagcaaggaagaaaacaccggagcccaagacaccaaaacagacgca

SEQ ID NO: 105147 - RNA, 65 nt, Homo sapiens
aaggagagagagacagagggaaccggcagggcaagcggcgacacacgacggggggagagagacgc

SEQ ID NO: 105148 - RNA, 72 nt, Homo sapiens
ccggcccggccgaccccggaagcgagcgcggacgccacccgggggcacagcaagggcccccagcccggccac

SEQ ID NO: 105149 - RNA, 70 nt, Homo sapiens
gaaggaccaagaaccaggcaagaagcaagcaaccaggcgccgcaccagaagaggacgcgcaggggagcga

SEQ ID NO: 105150 - RNA, 70 nt, Homo sapiens
gccgaagagaggagcggagaacacagcaaccgccagggggcccaaaaaggcagaaggggagaaccgagcc

SEQ ID NO: 105151 - RNA, 76 nt, Homo sapiens
cgagaaggccaaggcccccggagggcgcaacaccggagaggggcgcagaaaggggaaagcgagaaaccaaagagaa

SEQ ID NO: 105152 - RNA, 75 nt, Homo sapiens
cagggacaggaaaaggagccaggaacccaggacaccacaggcgagccccgaaccagccccaagggaggaagaaac

SEQ ID NO: 105153 - RNA, 38 nt, Homo sapiens
agcaacggagcgggagagcgggacaaaaagcgagcccg

SEQ ID NO: 105154 - RNA, 39 nt, Homo sapiens
gaaaaaaaccccgaagaagagacccccaggccaaggaaa

SEQ ID NO: 105155 - RNA, 81 nt, Homo sapiens
ggccgggcgcgacgcgcacggaaagagcaggcggcggcggcggaacgccaggcagggaaagaacccaacgcggagagccac

SEQ ID NO: 105156 - RNA, 60 nt, Homo sapiens
cgagcgagggggggcgcgccggaaaccggagcgcgcagcaggaagaaagcagagaacggg

SEQ ID NO: 105157 - RNA, 83 nt, Homo sapiens
gcagaccgcaggcgcaaggccaggcgacccgacgggccaccggaagacgccgcacgcaaggccccaggaggagcacagggaca

SEQ ID NO: 105158 - RNA, 79 nt, Homo sapiens
ccggacaaccagaggcagccagcagggggaggacaagcccaaccagggaccaggccaaaaccagacgccacgccccacg

SEQ ID NO: 105159 - RNA, 66 nt, Homo sapiens
acaaacccaggaagccacgagcaccagaagcaacggggcaacagaggggcacaaacgggaaaaaaa

SEQ ID NO: 105160 - RNA, 68 nt, Homo sapiens
cgccaacccgccgcgcaccgacccgacgcgccggcccacgcgcggccaagcgggcggcaaagaagggg

SEQ ID NO: 105161 - RNA, 59 nt, Homo sapiens
gaaagaaaacggaagacaaaacacagccacacccgggaaacacacccaagcacggcgcg

SEQ ID NO: 105162 - RNA, 66 nt, Homo sapiens
cagcacggcagcacaagacgccgccccagcggacacaaaccagcacgggaagcccagaagggacag

SEQ ID NO: 105163 - RNA, 55 nt, Homo sapiens
caaagaagccacgaagcaaaaagacccccaaggcccccagacaccaccgaacgcc

SEQ ID NO: 105164 - RNA, 76 nt, Homo sapiens
gcaggggcgccagggcaccagacgggcgggaaagagaggcccggcagggacccgggcaggcagcacgaagggagaa

SEQ ID NO: 105165 - RNA, 82 nt, Homo sapiens
cgacgagaggacccagcccaagaggaaccccacgagcgggggggaagaaccaagaaacacacacccggggaggccgccgagc

SEQ ID NO: 105166 - RNA, 70 nt, Homo sapiens
cgaggcaacgccaaacaagggcgggaagcggggaaaggaaaacaccagcacaccaaagaccggggccacc

SEQ ID NO: 105167 - RNA, 71 nt, Homo sapiens
gagacgcagcacaaaccgcgggaccaggggccccaggggcgccacagccgaggcagcccggggggcccccc

SEQ ID NO: 105168 - RNA, 80 nt, Homo sapiens
aggcgcgccgcacccggacggaccgccacgcgcccgggagacgcccgcgccgccgggagacaaagacacagcagacagga

SEQ ID NO: 105169 - RNA, 76 nt, Homo sapiens
gaccaaaacccagccccagcacggaggagaggggcccaccagggaggaagaggcaggcgcagcagagagagcagag

SEQ ID NO: 105170 - RNA, 56 nt, Homo sapiens
aaaaacaacagacagcccagcgcaggaaagcagggacacaggacaaggagccaccg

SEQ ID NO: 105171 - RNA, 86 nt, Homo sapiens
gcggcgcgggcggcgcgcgaggccagagccagggcagcggccaggacagaagagcagaagacagagaaggaaaagaaaggaacaga

SEQ ID NO: 105172 - RNA, 70 nt, Homo sapiens
gcggccgccgcagcccaggcgcgggggcgacgacagccagacaacacagggacacaacaaacacaaccgc

SEQ ID NO: 105173 - RNA, 82 nt, Homo sapiens
gaagaagaccccgagagcagcgagcagccgagagcagaggaagagaaaggaaagggcggcaggaagacaggaaaagagaaac

SEQ ID NO: 105174 - RNA, 77 nt, Homo sapiens
aaggcgcagccagaaaacgaaggcagagaggaacgccccaggggccccccaccaagacacacggacaaaagagcccg

SEQ ID NO: 105175 - RNA, 64 nt, Homo sapiens
ggcagccgacccccagggaagcagaaaccagggggagaccgcaccaggaggaaaacagagacaa

SEQ ID NO: 105176 - RNA, 84 nt, Homo sapiens
gggaaggccagcagcgcgcggagaagaacggggagccagagccaaaccccagccaccggaagaagaagagaacaccgagacaca

SEQ ID NO: 105177 - RNA, 76 nt, Homo sapiens
ggcggccaccccagcacaaggagcgaggccgcgacaggggacgcagcgagaagaagaaaagaagagagcgaggagc

SEQ ID NO: 105178 - RNA, 65 nt, Homo sapiens
ccccacccccaagaaccaacccccaaaggcgggacaggacgggaccccggccggggcaggccccg

SEQ ID NO: 105179 - RNA, 57 nt, Homo sapiens
cgcccacgacgccgagagaacagacccccaagagcgaccccaccgccagcaacccgc

SEQ ID NO: 105180 - RNA, 83 nt, Homo sapiens
ggagcaagcaaagacgaccggaaagagccaagcggcaagacggacaaaagacgcgcgcaaacacacacaggccacccaccaag

SEQ ID NO: 105181 - RNA, 82 nt, Homo sapiens
cgaccagcgacacgcagcaaacggggacagcgccgaccggaacagggaccacggaagcccaggaccagccccgacaagccca

SEQ ID NO: 105182 - RNA, 79 nt, Homo sapiens
cggaccgagaccggaccgagagcggaccgagagcgcgaaacgcacgagaagggaggaaaaagcagcgaaacagacaacc

SEQ ID NO: 105183 - RNA, 87 nt, Homo sapiens
gacgcgagcagccaggggaccgcagcaagaaggaccagagcccgggcaaggaagagagggccgacgagaggaggaggagaacaggag

SEQ ID NO: 105184 - RNA, 87 nt, Homo sapiens
ccgagggagggcaaaccggaacccacccgagagcaacaaagcaggcgacacagccacggaagaccagaggacaagacaaagggagca

SEQ ID NO: 105185 - RNA, 73 nt, Homo sapiens
accagaagcacaagcacgaaagccacaaaaggggagaggcccaggaggacagaaagggccgaccacccaggcg

SEQ ID NO: 105186 - RNA, 79 nt, Homo sapiens
ggaacagcgaaggggagcccagggaagcccgggaccgaaaaaacggccaggcagcgaacaaagcacaaaagagaccggc

SEQ ID NO: 105187 - RNA, 76 nt, Homo sapiens
ggagacggagggaacacaccaccaggacagcacccaacagacacagcaagaaaacccacaccgccagacaggaaag

SEQ ID NO: 105188 - RNA, 86 nt, Homo sapiens
cggacgcgcgggaggcccgggagcggcagggaaccgaccccagaacccggacgggcggcggggaacgcccgcggacggcagggcgc

SEQ ID NO: 105189 - RNA, 91 nt, Homo sapiens
ccccaccagaccggacccgagacccccaaaggccagaaaggcccccaggaggagcggccggagcccccacccggcacggcgcggggcagga

SEQ ID NO: 105190 - RNA, 77 nt, Homo sapiens
ggggaccacaagacccacgacagccccagaacaacacccccagcaccccaccccccaccccaagcgaacggcacagg

SEQ ID NO: 105191 - RNA, 74 nt, Homo sapiens
ccaacagggccggccggccggcccccaaacgcgcccgcccccagggaaggcccccagacggcgccagaagacaa

SEQ ID NO: 105192 - RNA, 75 nt, Homo sapiens
gggggaagaagggggccaacaccacagccgcagggcagaagccgcagaaggagagaaagcggcgaaagaccagaa

SEQ ID NO: 105193 - RNA, 72 nt, Homo sapiens
ccagacagcgaaagggaaaacccccacacggaggggacgaagacaaaaaccagacgccagacgacaaaaggg

SEQ ID NO: 105194 - RNA, 72 nt, Homo sapiens
cgccgcgggcgccagaaggaagaggcggacggaggagcaggcgagaagagaagagcccaaaaggcagagcga

SEQ ID NO: 105195 - RNA, 76 nt, Homo sapiens
gaagaacgcacgcagcagcccagaggacggagaccggagccccagcgggccaggagccccgcaaggagccagccac

SEQ ID NO: 105196 - RNA, 86 nt, Homo sapiens
gccccacccgcagccgcacccccggcggcagcacgaaagaccagagaccggaaagaagggagaccgcggggaaaagagaaaggcca

SEQ ID NO: 105197 - RNA, 60 nt, Homo sapiens
gaggcaagaccggaaaggccacacgagcagggaaaaccgagggcggaggccagacacaag

SEQ ID NO: 105198 - RNA, 41 nt, Homo sapiens
cgccaagaccaagaaaggccgagagagcgagcagacaagag

SEQ ID NO: 105199 - RNA, 80 nt, Homo sapiens
cacacacggaaagggagagagcggaaaacgccagcggacaaaagggacgcgcggagaccgaacacgcacagacgggacgc

SEQ ID NO: 105200 - RNA, 55 nt, Homo sapiens
caagaagggaggagcgacggacgagccggagagagagacgcccaaggacaagccg

SEQ ID NO: 105201 - RNA, 73 nt, Homo sapiens
caagaaaggcacagagacgaaacagcacccagcaacacgccaaaggcgaaccggcaagcagaacaagaagggc

SEQ ID NO: 105202 - RNA, 56 nt, Homo sapiens
agccgaccccaagaaagagagagacagaagccacagaagaaggacccagcccagcc

SEQ ID NO: 105203 - RNA, 68 nt, Homo sapiens
acccggcgagcaccagcaggggccaggccagggacaagacgcgccgacaggagccccaccaggaaacg

SEQ ID NO: 105204 - RNA, 75 nt, Homo sapiens
ggaaagcggcaaggaaggagaaaggaaacagcaaccaaaggcaaagggggaaacaggacaagaaacaggaaaaga

SEQ ID NO: 105205 - RNA, 62 nt, Homo sapiens
aacccaaagccaggccgaagagaaagccgccagacccgacaccaaaagccgcgaaaaagacc

SEQ ID NO: 105206 - RNA, 79 nt, Homo sapiens
ggacagggccacaaccccaggcaccaggaaccgcggacgccgcgcccagaccccccaggcgccccgccgccgcacagcc

SEQ ID NO: 105207 - RNA, 74 nt, Homo sapiens
aagcagccaacaccccacccaggaacggcccggagacaaaaggggcgcggcgagggaccagcgacagagagaca

SEQ ID NO: 105208 - RNA, 80 nt, Homo sapiens
cggccgagccacggagcaaggggccaggaaacaaccggaagaaagggaaaagggagcggaaagcagaagcgacagacaag

SEQ ID NO: 105209 - RNA, 103 nt, Homo sapiens
caggagagacgaacggggcacggcaaggcccaaaaagaagcgggcacgagcgcgaaacggagggaagaaaacacacccacccgccccgggaaggggcccccgg

SEQ ID NO: 105210 - RNA, 52 nt, Homo sapiens
gaaacaccgaaccgccacccaggcccaagaagacagcagagacagacgaaga

SEQ ID NO: 105211 - RNA, 77 nt, Homo sapiens
ccacaggggccgcaagccagccaggagcacacggcgcacgccaacacaacacaggcgaagaggcccaagcgcagccc

SEQ ID NO: 105212 - RNA, 77 nt, Homo sapiens
agacgacgcaccgcaggcagacaaaagggccaaagaagggagagagcaccgggaaccccaagaggaacagcagggaa

SEQ ID NO: 105213 - RNA, 86 nt, Homo sapiens
gaccgggcaccagcaggacccgaggccaggagccaggggcccagaagggacgaacagcggggacgccccagcagaccgcccaggag

SEQ ID NO: 105214 - RNA, 76 nt, Homo sapiens
gcagggaacaggaagaagccagcagaggaacccggcggagaacggaaaagcaccaggaagcagagaggaccgcaga

SEQ ID NO: 105215 - RNA, 57 nt, Homo sapiens
gagggacccggacaaccagaggcagccagcagggggaggggaggcaggaaaaagaca

SEQ ID NO: 105216 - RNA, 85 nt, Homo sapiens
caggggacacaagcaaggcgggggccccagcaggcaaaggcaagggcccaaaggcgggccgcgggggagagaaggacaagaggag

SEQ ID NO: 105217 - RNA, 114 nt, Homo sapiens
agagacgcccaacagcccagcccggggcagggaaaggagaaacaccagacacggaagccacgccgagcacccagacagggggcaccggggcaccggggacaggacaacggaaga

SEQ ID NO: 105218 - RNA, 68 nt, Homo sapiens
cgaaacaaggcaccgagcacaaaggagaaaaccaggagcagaaaagcgaggcaagggcggcagggggg

SEQ ID NO: 105219 - RNA, 69 nt, Homo sapiens
gggaacaggcggaaacccaaccaagaaggcccaggccaagcccaacaggggacaccggccagggcccgg

SEQ ID NO: 105220 - RNA, 77 nt, Homo sapiens
caccgaagcgaggggcaggaaaggcacagaaagaggcgcgggagaaagaccagaaagaagagaaggcaaagagagaa

SEQ ID NO: 105221 - RNA, 83 nt, Homo sapiens
gacaggacagcgagcgaggacgaggaacggcgccagagacccagagcagcagcgaagagaaggcccagcccccccgccacccc

SEQ ID NO: 105222 - RNA, 85 nt, Homo sapiens
gggcgggacgggggggcggcccggccccgcagggcagcgggggcagagacggggaacagggccacccacacggacgccaacgcgg

SEQ ID NO: 105223 - RNA, 42 nt, Homo sapiens
gaggagacaaaaaagcccaagcgggacgagccggagggaagg

SEQ ID NO: 105224 - RNA, 69 nt, Homo sapiens
ccgcggaacagccccaccccgcaccaacagcaggcgaacaagaggcgccagcgggcgcgccggaagaac

SEQ ID NO: 105225 - RNA, 70 nt, Homo sapiens
caaagcagcgaaagcacccaaggaaccacggcaaagaaaaggaggggcaagccaagcaagaaaagagaca

SEQ ID NO: 105226 - RNA, 68 nt, Homo sapiens
aaggaccaagaaccagagaccagaccgagaggaaacaaaacagagaggagagagagcggaggaaaagg

SEQ ID NO: 105227 - RNA, 72 nt, Homo sapiens
caacagggaccaaccagcaccagaaaagcgcggcaggagacggaccaggagacccaaagcaggcggaggacg

SEQ ID NO: 105228 - RNA, 73 nt, Homo sapiens
cccggggagagaacgcaggaaagagcgggacaagaggagaccaggccgggagacggggcgcccaagaagcaga

SEQ ID NO: 105229 - RNA, 76 nt, Homo sapiens
acgccaacaagggccgccgcgaggggggcgggccgagcacccgcaggccccgcagaggcgcccacagcggacggca

SEQ ID NO: 105230 - RNA, 40 nt, Homo sapiens
cgagagcccggcgggggcgcaggacgcaaacaacacaggg

SEQ ID NO: 105231 - RNA, 76 nt, Homo sapiens
aagacaacgagacgagaagagcaaggaggggcgagaaaggcagaaacgcgcccccagagggaaagggccccaagag

SEQ ID NO: 105232 - RNA, 73 nt, Homo sapiens
ccgacgaggggcccggcgcgccgggcgaggagaccgaaggagcagacgaggcacgagcgccagcgcgagacag

SEQ ID NO: 105233 - RNA, 63 nt, Homo sapiens
acgcagaagcgcggacggagcgggcggaccacggccccccggcgcagcacggagccaaccacc

SEQ ID NO: 105234 - RNA, 42 nt, Homo sapiens
ccaagaccacagcagcacccagaaccaggccgggagaccacc

SEQ ID NO: 105235 - RNA, 58 nt, Homo sapiens
ccgaaggacagagccacccgacacccggcagaccagagggcgggaggcagcagcaggc

SEQ ID NO: 105236 - RNA, 72 nt, Homo sapiens
aaggggacccgaaccaccacacagagcgacgccccggacaaacacaaggcgccgcaaaaaaaaacgacaaag

SEQ ID NO: 105237 - RNA, 67 nt, Homo sapiens
aagaccgacaggaggccccggaagacgggaaaaggggacaagccaccggaggcagcggacccccccc

SEQ ID NO: 105238 - RNA, 78 nt, Homo sapiens
gccagccgaaagaaaccacccccagcagcaaccacaccccaaacaaggaaggccagacccgcagcaacccaagaacga

SEQ ID NO: 105239 - RNA, 61 nt, Homo sapiens
gagaccccgagggcgcggcgcgggccgagaaggaagacaggaagaacacaaagaaccagga

SEQ ID NO: 105240 - RNA, 78 nt, Homo sapiens
cgagggccgaccggagcccaggcggccccagacgggggaaccccaagcgggaagaggaagaggagcaggcccggcaga

SEQ ID NO: 105241 - RNA, 85 nt, Homo sapiens
gcgacggccgccaggcaggaggagcccccagacgaaccacgcccgaagaggccgccagacccacccggacccccagaaaaggaaa

SEQ ID NO: 105242 - RNA, 76 nt, Homo sapiens
gagcggagcgaagcgcaggcgcggggcgcggagcgggagggccgcgggccaagagcaaaagccgaccgcagagacc

SEQ ID NO: 105243 - RNA, 98 nt, Homo sapiens
agagcaaggcaaagagcccggaggggagagaggggcggaggccggccagggaacaacagaggacccaacaggaccccggagggacagacgagaccaca

SEQ ID NO: 105244 - RNA, 75 nt, Homo sapiens
gcaccaccccaccaccccagcggccagacggccagcggcagcaagaacccgaaagccaacgcgggcgcaagagga

SEQ ID NO: 105245 - RNA, 75 nt, Homo sapiens
gcggggagcccgaaccgccggcgcccggccaggcggcccagcccaccagccggacacccgaagcagaagcgcggc

SEQ ID NO: 105246 - RNA, 80 nt, Homo sapiens
caacaaaacgggccacaagagcgcagggagcccaccgggcgggccggccaagaccccacaacaaagccggaagaaagaac

SEQ ID NO: 105247 - RNA, 78 nt, Homo sapiens
ggccggaggcgcccgcgagacgcagggccccaagggcagacagcggacagaagggggcaaagaaggagaaagccgagc

SEQ ID NO: 105248 - RNA, 89 nt, Homo sapiens
gccgccccccagcacaaagagccaccgcggcccccacaccacagcaagacccaccggccgagaaacacgcccaccgcacacacgcgccc

SEQ ID NO: 105249 - RNA, 71 nt, Homo sapiens
aaggaccaagaaccaggacacgcaggggagaaccggaggaagcagagcaaggcaaggccagggacagacag

SEQ ID NO: 105250 - RNA, 79 nt, Homo sapiens
gcgccgccaccgcgaacaggagcccgacagaagaagacgacaagcagggggaaagaggcgcggcaggcagacagccaaa

SEQ ID NO: 105251 - RNA, 72 nt, Homo sapiens
gccgcggcgcccgagcggcgggccgcagaggcaaccagacacacaaccaccagaaggagagaagaacagaag

SEQ ID NO: 105252 - RNA, 45 nt, Homo sapiens
gcgcaggagcgcccgcaggaccagggaaaaccaagacccagaccg

SEQ ID NO: 105253 - RNA, 69 nt, Homo sapiens
aagagcaggaaacgaagcggagcggcggacaccagaagagaaaagggcaagccagacgcacagggccag

SEQ ID NO: 105254 - RNA, 50 nt, Homo sapiens
caagaaaaggagccggaaacggacaaacaggaaggaagaaggaaaagcgg

SEQ ID NO: 105255 - RNA, 76 nt, Homo sapiens
gagcgcgcggacgccaaccagcccgcgagcgcccgaggcgccacaggagccgcagaagcaaaggcaccgccaaacc

SEQ ID NO: 105256 - RNA, 70 nt, Homo sapiens
cagcgggggagacaggcagccccccggggcccacgggacgccagagcacggagacgaaaggagaacccag

SEQ ID NO: 105257 - RNA, 109 nt, Homo sapiens
cacgccgcacaagacgccggagcaaacgacgagaaagcccacagccaaagccgggcggacgcggaggggcgacaccagaggaaaccggggacagccaccgacacagaag

SEQ ID NO: 105258 - RNA, 84 nt, Homo sapiens
gcgagggcgaagcacgacacagaaggggaggggagggaaaggcccaggaaaaaggcccccccaaagacccaaacgaacaaagcc

SEQ ID NO: 105259 - RNA, 34 nt, Homo sapiens
gagaccgaagacagaaagacagcgccaacggccg

SEQ ID NO: 105260 - RNA, 100 nt, Homo sapiens
gagaagggggaaccggggccgcccagccaagcggccaaacccacccggcccccggcgccgccagcgaggcacagcggaaacgacaaacagcccccgagag

SEQ ID NO: 105261 - RNA, 79 nt, Homo sapiens
cggacgaaacgggacaccgagcccccccggcagcccagacgacagagaacgccaacggcaagaaagggaaggccgcaaa

SEQ ID NO: 105262 - RNA, 86 nt, Homo sapiens
gaggcagaaggcccggcagcggagcagaagacaaaagaggagggggagccgcgggccaggacccgagacaacaccaagaagaaacc

SEQ ID NO: 105263 - RNA, 82 nt, Homo sapiens
aggccgcgccggcggcagagaggaacgggcgggggaggagcgcgagcccggcaggaggaggaagccaagaacgggagcgaag

SEQ ID NO: 105264 - RNA, 63 nt, Homo sapiens
gccgagacgcgcagcacaagcgagggcaggcgcacgcccgggggccgggggcccgaaagcgga

SEQ ID NO: 105265 - RNA, 85 nt, Homo sapiens
caagaaacagaccagcagcaaggcaggaagcaggaaaagggggagaaacaaaacagccaggaacggcggagcgagaacagcagga

SEQ ID NO: 105266 - RNA, 56 nt, Homo sapiens
ccggaaggacggcgaggagacacaggacacccacccgccggggacagacgcggaca

SEQ ID NO: 105267 - RNA, 81 nt, Homo sapiens
agccgagcgcagcagcccgccggggcgccgcagcccccggggcccacggccgcccgccaccagccaaggccaccgagccac

SEQ ID NO: 105268 - RNA, 87 nt, Homo sapiens
gaaggacaggcaggcgggccggagccagcccagagagcaaggcagaacgggccaaaggccggcggcaggggcagcgggcgcgcccag

SEQ ID NO: 105269 - RNA, 73 nt, Homo sapiens
cggaggaaaccggcagaccccagacccaaacaacggcagaagcagggggggccaccggggccccgcgcccggg

SEQ ID NO: 105270 - RNA, 48 nt, Homo sapiens
caaacccagaaacaagcggccacagcaggacccaaagacaggaccacg

SEQ ID NO: 105271 - RNA, 81 nt, Homo sapiens
gaaccgacgaaagaaaaccccgagggaaacaagaaaacacaaagaggcagcaaagaagcagcagccagaagaagaaagaaa

SEQ ID NO: 105272 - RNA, 80 nt, Homo sapiens
aaaccagaggaagacagaagcaaaggcgcccagcccggaacgggaggagaaagcacaggaggcacaacaaggcaagccac

SEQ ID NO: 105273 - RNA, 74 nt, Homo sapiens
ccccacgcacacccgagcccgggggcgcacggacaaaacccgcaccgcacccccacccagacaagccccacccc

SEQ ID NO: 105274 - RNA, 66 nt, Homo sapiens
gaggcacacaaagacagccgcacacaaggaacggcagaaaaagaaggcccagagagcacgagccaa

SEQ ID NO: 105275 - RNA, 79 nt, Homo sapiens
gcggccgagcggaggcggagcggcgccgagaacagccaggccccaagcgaggaagcacaacgggagggcaacacagcaa

SEQ ID NO: 105276 - RNA, 69 nt, Homo sapiens
acacagaaaagggccaaaggaagaagaagggagcgacaaaacaggacaaaacgaaaggccaaagaagag

SEQ ID NO: 105277 - RNA, 74 nt, Homo sapiens
aaggcgagaagaaagaggccagacaggaggcagaaccagagaccacagaagaaggaagggccacccaggacagg

SEQ ID NO: 105278 - RNA, 55 nt, Homo sapiens
caagagaaggaaaagggaggggcggccacggcaaagccaggcaagcgcaaagacg

SEQ ID NO: 105279 - RNA, 74 nt, Homo sapiens
ccaagacaggaggccaaacccccgggcaggaaaaaaaagcgaaaccagggcccgggaggaggcggacaagggga

SEQ ID NO: 105280 - RNA, 74 nt, Homo sapiens
cgggaccggcgacccaaaaggacaagccgcaccgcgcgcccagcggcacacagaggggaaaccggacggaggcg

SEQ ID NO: 105281 - RNA, 72 nt, Homo sapiens
gagcagcccgaccgcgggggccgaaggcagcgcaagaggagcacgacgaccaggacacccacgcagccagaa

SEQ ID NO: 105282 - RNA, 66 nt, Homo sapiens
accggaagggcgcaacaacagagcaaacaaaagcagaaacaggcaagagccaggcaagcacaaaag

SEQ ID NO: 105283 - RNA, 76 nt, Homo sapiens
caggaacccggggagaccccgacgggaggccgagggaaacccagacgacaaggaaggccaagggacccacgaccaa

SEQ ID NO: 105284 - RNA, 60 nt, Homo sapiens
acccggccccgagacagaagccgagaagagaggagcaggaggcacgccaccggaaaaccg

SEQ ID NO: 105285 - RNA, 78 nt, Homo sapiens
ccgaagggcacaccggagcccaccaaagacccaaaccccggagcacggaagagggcagcaacggaccggcgcaggcca

SEQ ID NO: 105286 - RNA, 80 nt, Homo sapiens
gcggggacggcgcgcgggacggccgaggaaggaacggcccccccccagcccgccccaaaagggaaaagcaacaaggggca

SEQ ID NO: 105287 - RNA, 78 nt, Homo sapiens
acaacgacaggaccggcggcaaacagaccccccgagcaacaccaacccacagcacacggaagacaaagggcaaagagg

SEQ ID NO: 105288 - RNA, 56 nt, Homo sapiens
aggcagggcagaagaaaaggacacaggaacgccacaagaaacaacagcaaggcgag

SEQ ID NO: 105289 - RNA, 75 nt, Homo sapiens
aaggagacaaggaccgaaacagaaacggaacaccaaggaagaagacggcacgggacccccagcacaggcagcagg

SEQ ID NO: 105290 - RNA, 69 nt, Homo sapiens
caagccggaggagaagcaagaaggcccggacacagcaaaccgggccacaggggggacagaggaacgacc

SEQ ID NO: 105291 - RNA, 81 nt, Homo sapiens
ggagccacggacacggcgggagccggcgaggggaagaccaagacaggccggaacccgaaagggcaagaacagaagaccggg

SEQ ID NO: 105292 - RNA, 110 nt, Homo sapiens
acagcacacgggcaagcggcagcaccaccaacaccgcagccgcagcggacggcaggcccgagggcgaggagaagaagaaagggccacccggcagaagacagaccgcagcg

SEQ ID NO: 105293 - RNA, 69 nt, Homo sapiens
ggcacaccaccaggggaggaggaaaacacacagacgaaggcaaaagaggagagcgcgcgccgcgcgccc

SEQ ID NO: 105294 - RNA, 76 nt, Homo sapiens
aaaaaaacccgacagcagagacagagaggagccaacccccagaaccgcacggccaagcccacacagaggaaaccgg

SEQ ID NO: 105295 - RNA, 49 nt, Homo sapiens
aggagccggggcgggggaaggaacagcgggaccagggaggccaggcagc

SEQ ID NO: 105296 - RNA, 85 nt, Homo sapiens
caacagagagcaaagaagacagcaagaggcaaaaccggacaagaggccaaccaaccggagagcacaagacccagaaaaaaaggag

SEQ ID NO: 105297 - RNA, 61 nt, Homo sapiens
gcggggaccgcggcccgacaaggggggaccggagaaccccgggggcaagcccaccccacgg

SEQ ID NO: 105298 - RNA, 83 nt, Homo sapiens
gacaacggccacacacggggacgacaggcacgcaagcagaagcagacaggccacacgagcccaaggaagagaagagacgccca

SEQ ID NO: 105299 - RNA, 54 nt, Homo sapiens
gagacagaacaggaaaaagggaacccagaggagcagcccaaggaccagagcgcc

SEQ ID NO: 105300 - RNA, 69 nt, Homo sapiens
gacagaccacgacaagagcacaaccccgacaagggagaccccacaccccagaggccggccccgggcagc

SEQ ID NO: 105301 - RNA, 76 nt, Homo sapiens
aaagaaaaccaaaacgcaacagaaacaacaggcgagaaaggcgcacaccaagcggcgcacaggaaccaccaggaca

SEQ ID NO: 105302 - RNA, 68 nt, Homo sapiens
acacaacgcagaaaccccggggcagagacaggcaacagacggcaacgaaaggcacaaaaacgcaacac

SEQ ID NO: 105303 - RNA, 56 nt, Homo sapiens
gccggcaacggagacccaaggccgcggcaccaggcggaagcagggcgcagcggcac

SEQ ID NO: 105304 - RNA, 81 nt, Homo sapiens
acggagccagcggcgaggaggggccccagcagcccccgaaggcccacaggacaggagagaaagacggcgggcgcggacggc

SEQ ID NO: 105305 - RNA, 85 nt, Homo sapiens
gagagccgcaggacggcgcggcagagccccgacgccacagaacggaggcaacacggaaaccgaggagcaccacaaccccagggac

SEQ ID NO: 105306 - RNA, 61 nt, Homo sapiens
aggacaccccgaagccgagaaagggaaagggagcagcaccggccacacccacagcacgacc

SEQ ID NO: 105307 - RNA, 80 nt, Homo sapiens
ccgaggccccccagccagcgaacggcaaagcaagggaaaaccaaaaggacagccagagggaggagaggccaggaaacccg

SEQ ID NO: 105308 - RNA, 75 nt, Homo sapiens
agaggaggggagcacgaagcacaacgccaggagggcaagccagccaagcaaaggcgaccaacgacgaagagcaga

SEQ ID NO: 105309 - RNA, 82 nt, Homo sapiens
agcgcccggaccggccgagaggaagacgagccgggaggaacggcccggaaacaggaggacgaacccgcccacgccagcgaag

SEQ ID NO: 105310 - RNA, 61 nt, Homo sapiens
gggaggccagccacccaaagccccaaggagaagaacggagacggaccagccagcaagaccg

SEQ ID NO: 105311 - RNA, 36 nt, Homo sapiens
gggcagcaagaaagggaagggggaaaccaaaaccag

SEQ ID NO: 105312 - RNA, 60 nt, Homo sapiens
ggccgcggagccgcggaggcaaggccgaggaaaggagaggacgccggcgcacagagaaga

SEQ ID NO: 105313 - RNA, 81 nt, Homo sapiens
cccaacggggcggccgcgacccccggcaacccggagaaggcacagagcggccgcgccagcgagaccacggcacgaacagga

SEQ ID NO: 105314 - RNA, 78 nt, Homo sapiens
gcagcacggagcgcagaaccggccgcgcccgagccacacaaccacaaccccaaaagagccacgcgcggaacacaaccc

SEQ ID NO: 105315 - RNA, 80 nt, Homo sapiens
gcagaagagcgaaccagcaggcaacaggacaacgagggaaacaaaggcagaaggcggcagggagcacgcaccaggagccc

SEQ ID NO: 105316 - RNA, 40 nt, Homo sapiens
ggggacgccacgcaacgccggggaccgagacccgacgaga

SEQ ID NO: 105317 - RNA, 59 nt, Homo sapiens
gcgggaacagccagcaaaggcaggggaggaagccacccgaggaccacggccgagccggg

SEQ ID NO: 105318 - RNA, 79 nt, Homo sapiens
aagccggagcagggcggggcgaggagagaaggggcagaccaacaccacccagcaaaaaccccgacgaacgcgccaggga

SEQ ID NO: 105319 - RNA, 69 nt, Homo sapiens
ccgcggaaggcacagcgcggaacggagcagacaagggaggcgggccaaaggagaaacaagaaggagaca

SEQ ID NO: 105320 - RNA, 66 nt, Homo sapiens
gggaggcgcggccgccccgcgggggacggagcaggacacgagacacaggccgcacgcacgcggggg

SEQ ID NO: 105321 - RNA, 52 nt, Homo sapiens
ggaggcggaagcccgaccagaggagaacagaagcggagaacacaaagccaca

SEQ ID NO: 105322 - RNA, 90 nt, Homo sapiens
cggcccccgggaaggagcgcccggcggagaagaccgaacggccccacagccgggcggggggaaaggaggggaaaggacaaggaaggagcg

SEQ ID NO: 105323 - RNA, 58 nt, Homo sapiens
cggcgggagcggcggaagcccagcgggccggagcgagggagagcaggaacacagagag

SEQ ID NO: 105324 - RNA, 72 nt, Homo sapiens
gaacgcgcagaagcaccgcagcccgcagcccaggccaaccccagaaggcccagaaaaaaagagaaccgccca

SEQ ID NO: 105325 - RNA, 78 nt, Homo sapiens
gaaagacagaccagcaacagaacaggagacgccgcggcccgacaggagccagacggagaaaagaaaggaaagaaagga

SEQ ID NO: 105326 - RNA, 78 nt, Homo sapiens
ccaacgagaccgcacagcgacaccagaaaggaagaagaacagaacccaggaagagcacaagcagacaaaacaaaggga

SEQ ID NO: 105327 - RNA, 79 nt, Homo sapiens
ggggggcagggcccacgacacaaacggaacgccgcgcgaggacgcggacccacagcggggccgggccccgaccacccag

SEQ ID NO: 105328 - RNA, 41 nt, Homo sapiens
agcaaacccggaccccagagcgggggaagcgggccaaaaag

SEQ ID NO: 105329 - RNA, 83 nt, Homo sapiens
cacccgaaaaccccaccaagaccacaacagcaagcccaacggcagcaggaagcgacacagaacggggaggggccacccagagc

SEQ ID NO: 105330 - RNA, 81 nt, Homo sapiens
gaagaggagagaggaacccgaagaagaaaggacgacagccagagagacacccagggggcggcaagaggcggcaggccgacc

SEQ ID NO: 105331 - RNA, 78 nt, Homo sapiens
gcagccgcccacggccaccacggcgcgaggacgccacgacccagagacacagggcacgcccgagacagaccaagcaag

SEQ ID NO: 105332 - RNA, 74 nt, Homo sapiens
gcaccccggcagccccgggcgcccacacgacgaccacggcggaggaaggaccccgccaaagagcccagaggccc

SEQ ID NO: 105333 - RNA, 86 nt, Homo sapiens
aaggcggcgcccgaagaaggcaagagcagaggccccagaccgccaagaggcacagagcgggaacagcccacggcgaccagggccag

SEQ ID NO: 105334 - RNA, 99 nt, Homo sapiens
aaaacacccgcagacaccggccacccagagagcaaaaggcagcgaaacaaaagggagaccgaacaaaagggggcaagaggaggagaacaaagagggaag

SEQ ID NO: 105335 - RNA, 81 nt, Homo sapiens
cagagcaccagagacaaggagagccaggaggagcgggccccaacccaccaaaagcacagcggacaccagaaagacggaacc

SEQ ID NO: 105336 - RNA, 68 nt, Homo sapiens
gagcccaccaacagcaccagacaagcgagaggaggaagaggccccacaggaagggccaccagcagggc

SEQ ID NO: 105337 - RNA, 80 nt, Homo sapiens
ccggccgcgcccagcacccgggccgcgggagcggacgcagcgagcgccgaacggagccgcgggacagagcagaagggcga

SEQ ID NO: 105338 - RNA, 51 nt, Homo sapiens
aacccccccaagcgcggggcaggaggacagagagcagaaggggaccaaaga

SEQ ID NO: 105339 - RNA, 72 nt, Homo sapiens
caaaccccagacggaggagaccgaagaggggcagagggcagcccagcagaagcaacgccagggaggcggaga

SEQ ID NO: 105340 - RNA, 83 nt, Homo sapiens
aaaagcagagggacccagcaagggccagagaaggaggagaaggagacaggcggcaagcagggcgaagggaggaccagagccag

SEQ ID NO: 105341 - RNA, 81 nt, Homo sapiens
ccaacagcccaggggagccgcgcgcggcagggaggcgagcaggcacacagggaacgcgcacgacaccggaagagccagcca

SEQ ID NO: 105342 - RNA, 76 nt, Homo sapiens
agggggagcggagccaggaccgcaggaaggacaagaggaaaagggagaaccaacaaagagggcaccacgaaacaaa

SEQ ID NO: 105343 - RNA, 78 nt, Homo sapiens
cggaccgggccgcgcacgccgcccagcccacccgggaacgccagaggcggcaaaccaggaaacagcagggccagaggc

SEQ ID NO: 105344 - RNA, 81 nt, Homo sapiens
gccccgcccggagccccggcccccacagcgccagcccaccggagaaggcagaggaagaaagaacagacccgggaaagagga

SEQ ID NO: 105345 - RNA, 83 nt, Homo sapiens
gaacggcgcgggcgggaacggagggcgcagcgcccacccgcgccagagaccagaaaagaggaaggggagaagaaaaagcagca

SEQ ID NO: 105346 - RNA, 75 nt, Homo sapiens
aggcgaagaagaaaacgaagaaaagaggaaggcgaaaagcagcaaggagccccgcgccccacccgaccggaacgg

SEQ ID NO: 105347 - RNA, 83 nt, Homo sapiens
cggcgaagacaccagccaccgaggggggggagacggcaaccagggcaaccgcagccgagaccgacccgcccgcccgcggcccc

SEQ ID NO: 105348 - RNA, 109 nt, Homo sapiens
ggcgggaggcgacaggaaacccgccacgacaaccgcaccaacaaagacaggacacaggaggaaaacccagcgaggccccaccagagcgaggaagccaccagcagagcgg

SEQ ID NO: 105349 - RNA, 78 nt, Homo sapiens
cccagccggcgccgagggcggaaccgagcgggaaaaggcgagacggcagcagaaaagaacgagagggagaagacaggg

SEQ ID NO: 105350 - RNA, 82 nt, Homo sapiens
ggaggacccagggagcacggccagaggaccaggcgaccagcaccagcccgaccagacaagcaaagggacagcaaaggcgcag

SEQ ID NO: 105351 - RNA, 80 nt, Homo sapiens
ggcacggagccggacacgaaacgcccagccgaaacaacgacagaaggacacaccagcacacggggcccaagcgggaaggc

SEQ ID NO: 105352 - RNA, 66 nt, Homo sapiens
cggggccacgggcccggagacccgcagcccaaggacacaaagggccgaagcacgaggacaaacggg

SEQ ID NO: 105353 - RNA, 48 nt, Homo sapiens
caaaaggaccgcggcaggccagaacacaaaccaccaggagaaagcggg

SEQ ID NO: 105354 - RNA, 80 nt, Homo sapiens
cgggcgaagcgacgagccgcgaggagaagcaacacagccacagcacaacagcaccaaccgcacccagcaaaggagccgca

SEQ ID NO: 105355 - RNA, 81 nt, Homo sapiens
cgaccccagccagcgcagcgacggggcgcgccggcccaggcgcacacggaagggaaagacacaacccacgccgaaaagcac

SEQ ID NO: 105356 - RNA, 80 nt, Homo sapiens
ggcaaagcagacccaaaaggcgcgcacagacaaacaagggcaggagaagacaccaagacgcccgagccaccagcaagacc

SEQ ID NO: 105357 - RNA, 70 nt, Homo sapiens
caaagaaaagaagcagagagggcgcaccgaccagagacacgacaaggaccgcagaggacaacaaccccgg

SEQ ID NO: 105358 - RNA, 83 nt, Homo sapiens
gaagacccaagcccacgggaggcacggagggggcgaggcagggcggagaagccacccgaccaaaaaacaccgagcgcagaaga

SEQ ID NO: 105359 - RNA, 57 nt, Homo sapiens
cccgaaggcgaacacagaggaaaccgcaccgcccggagaacgggcaccccgggcgga

SEQ ID NO: 105360 - RNA, 59 nt, Homo sapiens
ggagagcaggaccggaacaaacaaggaagaaccagggcccacccacagcaagggcaaaa

SEQ ID NO: 105361 - RNA, 69 nt, Homo sapiens
cggaccaacccagagacccgcagaggagcccaccggacgaacgagagccaacagaagcaacgggacagg

SEQ ID NO: 105362 - RNA, 77 nt, Homo sapiens
agcgggccgacggccaggaagcggcgaaggagaaagcagaccacacagacaaccgacccagcaagggacccccacgc

SEQ ID NO: 105363 - RNA, 84 nt, Homo sapiens
ggaggccgcccggcgcagcggggaccggcggcggcgcccaggcacccggcccgggagacagaacagacagaaaaaacaacaaga

SEQ ID NO: 105364 - RNA, 86 nt, Homo sapiens
acaagggacgcagaagcgggcccccgccccagcaggacaaacgcacccggcgaagaggcacagggccaggcacacaacgagaccac

SEQ ID NO: 105365 - RNA, 53 nt, Homo sapiens
cccgagagagaaggagaacagcgagcccccacggaccggcgggaaagcacgac

SEQ ID NO: 105366 - RNA, 73 nt, Homo sapiens
gagcaccgggagcggcgaagaggcaccggaggagggggggccgcccgcccaaggcaggaagaggggccgcaaa

SEQ ID NO: 105367 - RNA, 48 nt, Homo sapiens
acaaacaaacacccagaaacaagaggacgcgcaaaaggaccccaccca

SEQ ID NO: 105368 - RNA, 64 nt, Homo sapiens
gagcagggcggacgggccgaaggagaccaggggccccaagaggccggcagaccccgcacaagaa

SEQ ID NO: 105369 - RNA, 67 nt, Homo sapiens
gaacgccaagagaaagcggacacaggccccaaaacaggagaggcagaaggcaggcgggcaacagcag

SEQ ID NO: 105370 - RNA, 72 nt, Homo sapiens
acgcaccccagccggaaccagcaccgaaccagcggaagcacagccgaaacacacaagaggagggaagcacca

SEQ ID NO: 105371 - RNA, 71 nt, Homo sapiens
cccggcaagaagaacacagggggaagccaagcagaacaaacgcgcaacacagagggcaggcagcacaggag

SEQ ID NO: 105372 - RNA, 62 nt, Homo sapiens
ccggccgcccaacaccgaacaccgcccgggaggagcggggacacgaggaccccccaaaggcc

SEQ ID NO: 105373 - RNA, 62 nt, Homo sapiens
gcgaggcgcggagagcaacgccgggacagcgcaagccacgaaccgacggggaccccaagagg

SEQ ID NO: 105374 - RNA, 78 nt, Homo sapiens
ccaccaaaaagggcacacacggagagaacaggaaacacaaagaagacaccagaagggccagcaccacgacaacacggc

SEQ ID NO: 105375 - RNA, 52 nt, Homo sapiens
aggcggaggcgaaagcggaacgaggggccgcaaggccaggcgcgcagaggca

SEQ ID NO: 105376 - RNA, 70 nt, Homo sapiens
gagggaaccagcggacgcggaggcccaaccgaagaaaacaagaaagacaaaccacccagagcaaggaccg

SEQ ID NO: 105377 - RNA, 74 nt, Homo sapiens
gcggaccaccgccggggacaccaccagggcaaggccagagaaggcgggagaaagacacgaaccacagaacgcaa

SEQ ID NO: 105378 - RNA, 59 nt, Homo sapiens
caacagccggcaagaccgcaggccccacaccacccccggcccagcaggccaacaccgac

SEQ ID NO: 105379 - RNA, 73 nt, Homo sapiens
accagccaaacacccccagaagacacccccagggcagaaaagcgaccaggcgaggggagcaaacggggagggg

SEQ ID NO: 105380 - RNA, 82 nt, Homo sapiens
cgggaggggacggccgccggagccgcgaggccaaagaggacggggacgggccccaggacgaggaagacaaggccagccacgg

SEQ ID NO: 105381 - RNA, 76 nt, Homo sapiens
gacggccgcggaagaggccggaggagagaagagccaggaaacccgaacggcagccaggaccccagggagccggggg

SEQ ID NO: 105382 - RNA, 86 nt, Homo sapiens
cgcgccgccgccaccgccggggccgcgccggaggaggagacggaggagaccgacggagcacaacaaagagagcagggagagaaggg

SEQ ID NO: 105383 - RNA, 70 nt, Homo sapiens
agcggccgaagagagcgccaaccggaccgggaaacaagacaagcgggcaagagagcaccggggcggaagg

SEQ ID NO: 105384 - RNA, 81 nt, Homo sapiens
aggggagccggcaggacggaaggggaagaggcccacccggagaaccccacggagaaccagagggagccaccagggggaggg

SEQ ID NO: 105385 - RNA, 67 nt, Homo sapiens
agcaggcacagcacgggcagagccaggggaggcagggggacccgccacacaaaccgcccacacaagg

SEQ ID NO: 105386 - RNA, 58 nt, Homo sapiens
aagcaaccccaccagcccgagagcggaccacagggcagccaagcaggaccacccacca

SEQ ID NO: 105387 - RNA, 69 nt, Homo sapiens
cgcagaggcaggaaacagcccgggcaccccgaggacaaccgaggaagaaggagaaagacaaagccccga

SEQ ID NO: 105388 - RNA, 79 nt, Homo sapiens
ggcagcggaagacaaaccacaacaacacagcagagcccaaccggcccggagcccaaggccccaggcagcccacaccaga

SEQ ID NO: 105389 - RNA, 89 nt, Homo sapiens
cgcagaccagcgcccgaaggccgacacgcggcccgaggcaacggccacaggagcagcaaggggacagggagggaggccgaacacggaag

SEQ ID NO: 105390 - RNA, 50 nt, Homo sapiens
gcagaaaaaaacaggcagaaaaagaagaggagggagggcagaaaaacaag

SEQ ID NO: 105391 - RNA, 77 nt, Homo sapiens
acgggagcggcagccccgggacgcggcgcggcagccagccccccaccgaagaagaaaccggccgagcgcccccaaac

SEQ ID NO: 105392 - RNA, 39 nt, Homo sapiens
aaaggagagccgaccaagcgggcaaaggagaagaaggga

SEQ ID NO: 105393 - RNA, 77 nt, Homo sapiens
agagacggaccaacaagagagcacgccggccagccagagacgacaccccaggcccggaacaccagacaagaggcgcc

SEQ ID NO: 105394 - RNA, 76 nt, Homo sapiens
ccaaaccgccaggagaaaaaagcaccaaaaagcccgggcaccgcccagcgcccagaccaccaagacagagaccagc

SEQ ID NO: 105395 - RNA, 82 nt, Homo sapiens
gcagcggcaaggagagacgcgcgaggggcgccgaagcgagggaccccaccaccacacaggcaacggagagcaaaggaggcgc

SEQ ID NO: 105396 - RNA, 83 nt, Homo sapiens
cccaccgaccacagccaggcccgggaggagcagcacgacccacgagaacgccggacgcgccgcggacgaccgcggacacagag

SEQ ID NO: 105397 - RNA, 76 nt, Homo sapiens
ggaggccgagcgcgggaaagcagcggcagaaccagagaccacagaagaaggaagggccacccaggacaggggcacc

SEQ ID NO: 105398 - RNA, 77 nt, Homo sapiens
ggcaggagccagaaagccagaggcgaacacagcaacacccccagggagcgggggcggaaacacggaagagggggagg

SEQ ID NO: 105399 - RNA, 66 nt, Homo sapiens
gggaaaccacgcaggcaaacgagaaaaagccgagaaggccagacggaaaagggccagggacgaagc

SEQ ID NO: 105400 - RNA, 82 nt, Homo sapiens
ggagagacagcacagcacccacaaagcaacgccgccgggccgccggacacccccgcggggccgagcccaacaggacacgacg

SEQ ID NO: 105401 - RNA, 65 nt, Homo sapiens
gagaaaccggacgcgacggggaaagaagacaggaacaaagaaaaaagacgacaagaaaaaggaac

SEQ ID NO: 105402 - RNA, 55 nt, Homo sapiens
ggcggggaggcgaggccggacgcacccggggggcccagagacagagaagacggaa

SEQ ID NO: 105403 - RNA, 87 nt, Homo sapiens
acgagaagaagggggaccacggagagggcaaaagagccggggggcccacgcgcagacaaccagaagggagaccagcgggccgccgcg

SEQ ID NO: 105404 - RNA, 66 nt, Homo sapiens
caggccgcacggacggggggggcccggaaacagacagcacagaaaaacagggaaaacacgacagaa

SEQ ID NO: 105405 - RNA, 55 nt, Homo sapiens
caagccccggaacacaaccggacaggcggcagcaggagcccagcccggcgacagc

SEQ ID NO: 105406 - RNA, 67 nt, Homo sapiens
ccagcaccccacagccggcaggagccccgcgcccgccacgcccaggaggcgaaccgcgagcccagaa

SEQ ID NO: 105407 - RNA, 76 nt, Homo sapiens
ccagggagcaggagccagggccgagcacgggaagacacccccggacaacacgggaacagacggcagccggcggacc

SEQ ID NO: 105408 - RNA, 70 nt, Homo sapiens
gcagcggccggacagcgccacggcgggccgcgggaggacaccacccacaggaaacgcaaaagagccacac

SEQ ID NO: 105409 - RNA, 84 nt, Homo sapiens
gaagcccagggggaggggacagaagcacggccccccagggagccacagacagcaaaaccgcgagcgagcaaacgaacacagaac

SEQ ID NO: 105410 - RNA, 78 nt, Homo sapiens
gggagccgcccccgcggggcgcccggagccggccagcgcaccaaccaggaagaaaggaaggggcaccacaagacacaa

SEQ ID NO: 105411 - RNA, 87 nt, Homo sapiens
gaggaccgcaccagcacgcccacccagaggcacgaagacacacccaggccggaaagagcaaggggagcccagacccccgccgcacgc

SEQ ID NO: 105412 - RNA, 88 nt, Homo sapiens
gcggaggcggcagcggcgggccgaggcgaaggagcggccgggagcccgccgcgcggagcgggcggagaacggaaaagcaccaggaagc

SEQ ID NO: 105413 - RNA, 104 nt, Homo sapiens
cccaacacgccccgaggacgggacggccccccagagaaggcagaagcccagaggcccaccccacgggaggaaggcgaggccaagaccccggaagagaggaccgc

SEQ ID NO: 105414 - RNA, 119 nt, Homo sapiens
cagaaccaccccgcggagagcgcaagccgggcagcagcccagcggcagcagaaagagcagccaagaagcgagagaagaaaaacagaaaaagccaagacagaaacaagaaccaggaaaac

SEQ ID NO: 105415 - RNA, 79 nt, Homo sapiens
cccggggccagggcacaaggagcccagccacacggggccaagccgcccgccaaccggcagcgccgacgacaaaccaggg

SEQ ID NO: 105416 - RNA, 85 nt, Homo sapiens
gggacggccggggcagcgcccggcgcgcggcgcgccgcccggcgagcgggccggaggaaaagaaaggcaacaggagaaaggggag

SEQ ID NO: 105417 - RNA, 77 nt, Homo sapiens
aacagggagaaacacagccagaaggcagggggagccaaggaagcagacacgagcacaagccacccgcgcggcgcccg

SEQ ID NO: 105418 - RNA, 122 nt, Homo sapiens
caggacgaaccagcacagagaggagccgaggccaggaggagaccagccgaacaacaaccagagacgcgcacgaaacgacgaagaggcccgaggacagaggagcaaaggagggacggaaaacc

SEQ ID NO: 105419 - RNA, 81 nt, Homo sapiens
gccccgggcgggcgcagccgccaccggcagcagcagcaccaccggacggcagggaaaaaccaggacaaaaagcaaaggacg

SEQ ID NO: 105420 - RNA, 81 nt, Homo sapiens
gcggcgcgcccaaaaggcagacgacaaggggaagaggacgaaggaggaagcggcaagaacaagacaggaaccagaaaagcc

SEQ ID NO: 105421 - RNA, 67 nt, Homo sapiens
ccggaaaccccgcccacagcacgagggagagaggcagaacagaacaaacggagaaacaccggagagc

SEQ ID NO: 105422 - RNA, 56 nt, Homo sapiens
cggggaacgaaggggcgcacgacggaagcaacaaagccaagaagaaggaacgggac

SEQ ID NO: 105423 - RNA, 74 nt, Homo sapiens
agccggacgagggccgcgccgccaggagcaaggcagcgacccagggcacagcggggcacagcccccagacggga

SEQ ID NO: 105424 - RNA, 79 nt, Homo sapiens
ggaaagaagacaaccagcacaacagaggccagggaaagggaaccggcacccccgaagcaagccaacgccggagcgccac

SEQ ID NO: 105425 - RNA, 74 nt, Homo sapiens
agccacgcaccaccccaccaccccagcggccagacggccagcggcagcaagaacccgacaggaacggccgaaca

SEQ ID NO: 105426 - RNA, 73 nt, Homo sapiens
ggaggagcaagagacagaaggaggcccagaggaaaaagacacgcgagaagacgaggacccgggaaaagagcca

SEQ ID NO: 105427 - RNA, 77 nt, Homo sapiens
cgcggaagcggggcgcacaccaccggacaaccgacaaaaccccgccccgccgagcgcagggcggcccgacgccagcg

SEQ ID NO: 105428 - RNA, 81 nt, Homo sapiens
gccggaggaagaccgggaggaagagggcgcaagggggaaggaagcaggcccaggcgaggcgagggcgaaaaagagaccgaa

SEQ ID NO: 105429 - RNA, 80 nt, Homo sapiens
cccagaaaggggagaaacaacgagcggaaagcaacccggagcggaggacaggagaccgaacagccaaggaagcacgggaa

SEQ ID NO: 105430 - RNA, 69 nt, Homo sapiens
cccgccagccaaaaccccaccggacgccccagaaaagagggggaagcccagcgaggcagaggccagccc

SEQ ID NO: 105431 - RNA, 71 nt, Homo sapiens
cagggaacagccagacgagagccagccacacgaggagacggaaccggagaaaagcaagcagaggaggaggg

SEQ ID NO: 105432 - RNA, 74 nt, Homo sapiens
agggcggagagacccgggggcgagcacaaacggggcggggccggggaacacacagaccccggccgcccccagcg

SEQ ID NO: 105433 - RNA, 71 nt, Homo sapiens
caggaaaggcgccgaagagcggcggagaaaccaccacaaacacgaggccagcaacgaccaacaagacagac

SEQ ID NO: 105434 - RNA, 37 nt, Homo sapiens
ccgagccagggaggccagaaagcacgagagcccgccc

SEQ ID NO: 105435 - RNA, 72 nt, Homo sapiens
cggagaaaaagaagagggccggacacgcgcgggcaggacagcagagagaggaacaaagcaaagcagcggcag

SEQ ID NO: 105436 - RNA, 61 nt, Homo sapiens
ccggggccccgccggcccagccccggaacccagccaccaccaccgggaccccccccgcagc

SEQ ID NO: 105437 - RNA, 80 nt, Homo sapiens
cccgcgcaagggacagcacgagaccaggagagcacaaggaggcccgaaggagagaagaaggagaaggagaagaagagaga

SEQ ID NO: 105438 - RNA, 80 nt, Homo sapiens
cgacgagcgcggaggaagaaagagaggaggaagaaaggagcagagaggcgcccaagccgaggacggaagcaaaaagaaca

SEQ ID NO: 105439 - RNA, 75 nt, Homo sapiens
aaaacggccggagacacgagaagagggagaaaaacaggcagggacacggaagaaccagggaaagggcacaaccag

SEQ ID NO: 105440 - RNA, 74 nt, Homo sapiens
gcagaccgccagcgccgcccacaccgcggcgcacccaaaaggacggcagcgcaagaccccgcacggaagcagca

SEQ ID NO: 105441 - RNA, 74 nt, Homo sapiens
cggaagcgcacaggaagaagagggggacacccaaagaaggaaggcggcgagacccgcaggccaccagcagaaga

SEQ ID NO: 105442 - RNA, 68 nt, Homo sapiens
ccgggaagaggcgcgcacccaggaaggaagaaggaaaagcggaagcgcagacaagaaaagagagaagc

SEQ ID NO: 105443 - RNA, 79 nt, Homo sapiens
gagccaaggaaacaggagcgaagcccagcgggccggacggggcggggggaacgaagcgagagagcgcagggaagagcac

SEQ ID NO: 105444 - RNA, 68 nt, Homo sapiens
accggaccgccgaccacagcgcccccccgacgccgaaccaggaaggacagcgacaaaaggggggagaa

SEQ ID NO: 105445 - RNA, 74 nt, Homo sapiens
cagggagcgacgcacccccaaggccaaccaaggggaagcgacgaggaagccaagcaggccggaaggggaaaggg

SEQ ID NO: 105446 - RNA, 82 nt, Homo sapiens
caacaagaggacccaggagaaacgccccaaagaaggagggccccggagcagccacaccaccgaggccccacccagcacgagc

SEQ ID NO: 105447 - RNA, 65 nt, Homo sapiens
ccacagagaccagagaaaggagaggaagacgaggaagcagaagaacaccaagcccaccaacaagg

SEQ ID NO: 105448 - RNA, 90 nt, Homo sapiens
ggagccggcgagaggggcccccagggcgcggagccagggccccagggaagccagggccaggggacccccgggagaagggggacaaaggca

SEQ ID NO: 105449 - RNA, 72 nt, Homo sapiens
gggacacagggagccccagacccacaggcgagcaccacgccgaaaaacgggagaacgccaaaaaacaaacgc

SEQ ID NO: 105450 - RNA, 55 nt, Homo sapiens
ggccaaagcaagagcacgaacagcagccgagcagaacaaaacaacaaaaacagga

SEQ ID NO: 105451 - RNA, 65 nt, Homo sapiens
agaagagagaaagacccgagaaaagggaggaccgggaaacggaaacaaaaagaaggcgcggaggc

SEQ ID NO: 105452 - RNA, 74 nt, Homo sapiens
cagccccagaccagaaagcagcagcccccagcaggggggccaagcgcgcccggaagggcaggagaaacaaaacc

SEQ ID NO: 105453 - RNA, 78 nt, Homo sapiens
gcgcgcccagaagaagggaaggcgcgaggaggaaaggaggacgagcaaggcaccagcagaacagacacccccaaagac

SEQ ID NO: 105454 - RNA, 59 nt, Homo sapiens
cgaaagggaagcagaaccaacagaaagaaacagccagcagacgggaagaaccggaaaag

SEQ ID NO: 105455 - RNA, 72 nt, Homo sapiens
ccagccgcagccccgacgggacaggccgcggaaccgcccccagagaaggagacaagggcgggcccccggcag

SEQ ID NO: 105456 - RNA, 54 nt, Homo sapiens
ggccccccagcagcccagacaacagggacgcagaggcaggaacacggaaaaacg

SEQ ID NO: 105457 - RNA, 73 nt, Homo sapiens
gggccggcgccagcggccagcgcagcggcggaagaaaacagcaggcggaagacaccgggaacgacgaagagaa

SEQ ID NO: 105458 - RNA, 73 nt, Homo sapiens
ccaaggacgccggcccgggaagagaagccagaacgcaacgaaacggaaaccaagccgccggggagaggcggcc

SEQ ID NO: 105459 - RNA, 79 nt, Homo sapiens
ggcggccagccccagccagcggacgagggcaaggcgcacaccgagggcacggagggaagcagacacgaagagaggaaac

SEQ ID NO: 105460 - RNA, 74 nt, Homo sapiens
aagccgggccggccgcgcgacgggggacagaacggcaccgacgagacggaggggggaccgcggggccaaaaagg

SEQ ID NO: 105461 - RNA, 72 nt, Homo sapiens
ggaaaaaaaaacagaacaagagcaagcccaagaaccggcaacaagcagcgacagccaggagagagagacaac

SEQ ID NO: 105462 - RNA, 75 nt, Homo sapiens
gaccgaccggggagagacggaggcaaaagcagaccggaaaacccaccggcaagaccacacccgaggggagcccag

SEQ ID NO: 105463 - RNA, 78 nt, Homo sapiens
acggccccgcgcacccagggaccgcaccgcggccgggcgccagcgcggcgcaggccaaggccaaacacacaggaacgc

SEQ ID NO: 105464 - RNA, 68 nt, Homo sapiens
gaggccagcacagacagggaaacagaccacacccggaggaggccgggaaaacgcgagcgaggaagaaa

SEQ ID NO: 105465 - RNA, 80 nt, Homo sapiens
accccaggacgcgcccccgggagcgggcgcccagagggggagagcacaaggcgaacaagcccccaggcgagagcaaagcg

SEQ ID NO: 105466 - RNA, 85 nt, Homo sapiens
gagcagcccaggaagcgagagcgaagccgccacccaaaccagcaaaccaggcagacgggagcgggccgagaaaaaccacagagac

SEQ ID NO: 105467 - RNA, 86 nt, Homo sapiens
caaggccaccaagagacaaaagaagagaaagccccaagcgacaggggagggacccagggcggaagggcaagaaagaaggaaagccc

SEQ ID NO: 105468 - RNA, 76 nt, Homo sapiens
ccccgagcccggggaaggagcaggaagaggaccacagggaccccacccggcggaggaacaggggaaaggagccaag

SEQ ID NO: 105469 - RNA, 72 nt, Homo sapiens
agaagaaggaggcgcaaaagcgggaacccacaacgaaggaaggaacagaggcacagcgacgcaaaaggaggg

SEQ ID NO: 105470 - RNA, 55 nt, Homo sapiens
accccggcccggcaggccagcaacagaagaaagcaagcaccggggaaagcggccc

SEQ ID NO: 105471 - RNA, 72 nt, Homo sapiens
cggggggaaaaggagccccaccaaggaggcccacaagcggcacccaccaagacaaaccagcaaggccgaggg

SEQ ID NO: 105472 - RNA, 49 nt, Homo sapiens
gcaccccggggggagaagaacacgccaggcaaggcccgaccccgccggc

SEQ ID NO: 105473 - RNA, 87 nt, Homo sapiens
cgcgggcgccgggccaggacggggaggcggaaccaacccccggccagggaggggccgggggacgagggccccacaggcgcaaggccc

SEQ ID NO: 105474 - RNA, 76 nt, Homo sapiens
acagaaaccaaaaaccgcaccaacgggaacgggacacaccacaggaagacgagagagccaggccagaaggaaagcg

SEQ ID NO: 105475 - RNA, 78 nt, Homo sapiens
cgacagcgcccgcccacaggcgcggggacgcagaagccacgcaccaaagggaagagacgagacagaggcacgcagcag

SEQ ID NO: 105476 - RNA, 75 nt, Homo sapiens
ccacaccggacacgaggacgcacagaaggaaaacaagcgcacgaaagccggacaacgggagccgcacgccacgcc

SEQ ID NO: 105477 - RNA, 71 nt, Homo sapiens
gcggagcacgagccacggcagaaccaaacccaccgcaagacagggaagcacgcaaacagcagacggaagac

SEQ ID NO: 105478 - RNA, 67 nt, Homo sapiens
gaaaccaaaccagcaccgggcaccacaggcaagagacggaaggacagaacggaaaagagaaaacaaa

SEQ ID NO: 105479 - RNA, 61 nt, Homo sapiens
ccgagggacgggagcgaggaggcgggccgagcggaagaaagggacccgcgacggaacaaag

SEQ ID NO: 105480 - RNA, 77 nt, Homo sapiens
gagcagaccgaggccgaagacgaaaaccacagaaaggagaaggagaggagagccacaaaaccacagaaagagaagac

SEQ ID NO: 105481 - RNA, 71 nt, Homo sapiens
caccacccccggaagcaccaggagccacagacgaccggcacacagcagagaggccaagggcacagagcgag

SEQ ID NO: 105482 - RNA, 44 nt, Homo sapiens
agggcgcccccgggaacaaagagcagaagaccccacagggaaaa

SEQ ID NO: 105483 - RNA, 79 nt, Homo sapiens
gccgcagcagagagaggacaacccacggaggaaggagcacgggaagaaaagagaggaacagcacggaagaaccgaagaa

SEQ ID NO: 105484 - RNA, 57 nt, Homo sapiens
aagccgcggccccaagcaccagcccacaaccagcaagaggaaaggcaaggcaaaaaa

SEQ ID NO: 105485 - RNA, 76 nt, Homo sapiens
agagacagggccccacagcaaggaccaaaaggacaagcagggccaaggcagcagggagaccagaccaggacagacc

SEQ ID NO: 105486 - RNA, 82 nt, Homo sapiens
aacgcggagagcacgccagaaggcccgggcacggggaggcacacgaccgaggccagccagaggagggaagaccggcagaagc

SEQ ID NO: 105487 - RNA, 68 nt, Homo sapiens
aggagggcagccaaccaccagcccgggggcagcaggcagcgggagagaggagagcagagagcagaaac

SEQ ID NO: 105488 - RNA, 75 nt, Homo sapiens
gagccaggcgaggccccacggggcgccggcccagagcaaaaggaagacaacccccccgggcagcaaggcacaagg

SEQ ID NO: 105489 - RNA, 58 nt, Homo sapiens
aaaaagcagcaaaccggaccaccccgaagaaagcacagcagcaggcgcaaaaacgaac

SEQ ID NO: 105490 - RNA, 56 nt, Homo sapiens
agcaaagagggcagcaggcccagaaacgcacacaagaaggacaaaagaacgcaagg

SEQ ID NO: 105491 - RNA, 84 nt, Homo sapiens
gcgccgccaaacagcccagccgcgccagcgcccggcgccgcgcgccacccccgacggcgcgagggcggcccgcagaagagcaca

SEQ ID NO: 105492 - RNA, 76 nt, Homo sapiens
ggccacacaacacaacgccaggaacacagcacccacccacacccacacccgcgacgggagggaggagccggccagc

SEQ ID NO: 105493 - RNA, 77 nt, Homo sapiens
ggcaaaccgggcacccgaaccaccccacagcagcaacggggcggcacacaaggagcgaagggcagggagaacgccag

SEQ ID NO: 105494 - RNA, 67 nt, Homo sapiens
gaggcaacaggcggaagcacagcaaaggggcccaagaaccagcgggaaccgggaaagagaaaaggga

SEQ ID NO: 105495 - RNA, 67 nt, Homo sapiens
acgaggagccgcaacggcccacaaccacaggcgaagagaagcagcgagcacaggggccccccagcag

SEQ ID NO: 105496 - RNA, 77 nt, Homo sapiens
gcccgccgcaggccacccgggaacggaggaggggacccagagagggaccagggccaaagaagagccggggggcaggc

SEQ ID NO: 105497 - RNA, 102 nt, Homo sapiens
agagggccaagaccgccgcccagaaaggcccggagaaaccgccaccccccgcagggaaggacccaaggaccagagaaggagaaccgaggcggacagggagac

SEQ ID NO: 105498 - RNA, 76 nt, Homo sapiens
ggaaaccggaaagccaggcacagcaccaaagggagggcaagcagaaagcagaggaaaacgaacaacacccaaagcc

SEQ ID NO: 105499 - RNA, 80 nt, Homo sapiens
agcaggcggcagagacagcccacccgaggaaaaaaaggcgggcaaagagaaccaggagaccccaccaccacagaaaaagg

SEQ ID NO: 105500 - RNA, 74 nt, Homo sapiens
gcccaggcgccccgcagagcagagggacaaacccaggaaggaggacagaaggaccccaagcagcggacaccccc

SEQ ID NO: 105501 - RNA, 79 nt, Homo sapiens
ccgaagagcagccccccgcccgaacgcagggggaaagcaccgaacaagaggagaaaggagccggaacaaacccgggaga

SEQ ID NO: 105502 - RNA, 84 nt, Homo sapiens
ccagcccccaggaggaccagcaagggccgggcccaggagcgccggccccaggagggacaggcaagaaggaagaaggcagaggcg

SEQ ID NO: 105503 - RNA, 81 nt, Homo sapiens
aagaagcagagagcaccgcccgacgcgcgggagaggagcagcgggcgggaggaggaacgagaaagggagagacagcccaga

SEQ ID NO: 105504 - RNA, 80 nt, Homo sapiens
gcgaaaggaagcaagcagcagaagagccaaggaaaaacagcaagaacccaaaaggagcgcgcgagaaaacgcgaaaagcc

SEQ ID NO: 105505 - RNA, 33 nt, Homo sapiens
caccaagcaggccccggaagagcccggggaggg

SEQ ID NO: 105506 - RNA, 69 nt, Homo sapiens
caccccggaagggccgccggcggcgggaggcacaggaagagggcggcacgcggccagagagcacaacgg

SEQ ID NO: 105507 - RNA, 81 nt, Homo sapiens
gagggccaggcagacgcagggggcccggagcagagccagcaaggcgcaggggacagcgcggaccgacagaccgccaacagc

SEQ ID NO: 105508 - RNA, 79 nt, Homo sapiens
gccacgacagcaggaagcggccaaggacacgccaggagcgagaacccgagcagcgccagagcaacacaccgcgccccag

SEQ ID NO: 105509 - RNA, 72 nt, Homo sapiens
gggggggagacacggcaacagagagaacgagggccaaagccaacgaagaaaagaggagcgccagagcgaaaa

SEQ ID NO: 105510 - RNA, 71 nt, Homo sapiens
ggcgaaaaagcccgaaacgggggaagaaggagagacacggaaccagaggcagcagcccaaccccgaggaca

SEQ ID NO: 105511 - RNA, 75 nt, Homo sapiens
ggcaggaggacggcccgccaagaaagagagacgccaaggccccaaaggacaaagcacagacagcagaagcaagag

SEQ ID NO: 105512 - RNA, 83 nt, Homo sapiens
agccagcaccgcacgcccgcaagggaggccagcgcgggccgccagcggcggccaccacagcgccgcagcccagcgaggcccag

SEQ ID NO: 105513 - RNA, 71 nt, Homo sapiens
aaagcacgaaacaaagaaagaaaccaaggcaggcaggagcgcggagacaaagaacaggaggaccgaagaaa

SEQ ID NO: 105514 - RNA, 82 nt, Homo sapiens
accagcaaaggcaccggacaggccaaggcaggggccagaagacaaagcaaccaaaccaagaaggagcgagggaggagcagcg

SEQ ID NO: 105515 - RNA, 69 nt, Homo sapiens
acgccaccagcaggaggaagaggacccacgaccaagcagacaagcccacaaaggaaacgagcgcgcccc

SEQ ID NO: 105516 - RNA, 71 nt, Homo sapiens
cggaggcgcgcaggagccaagggagcccacccagaggcagggggcgacccgaacccaaaggaggaaacagc

SEQ ID NO: 105517 - RNA, 71 nt, Homo sapiens
cacacagagacggcacaagaccccagacccagaacaccaaagcgcaccacgacaaagaagagaaaacgcgg

SEQ ID NO: 105518 - RNA, 60 nt, Homo sapiens
cgcagcacgccgggacccccgaccccacggcggaagagccgcggcccgcggcccaccgga

SEQ ID NO: 105519 - RNA, 85 nt, Homo sapiens
acagcccaagaggggacgagaacaaaggagagccagcaaacagcggcacaacaagcgggcgcagcagacagacagcagccccagc

SEQ ID NO: 105520 - RNA, 62 nt, Homo sapiens
gcaaacggcaccccaccccagcacagggaacaccagaggcgggaccacgggcagcgcccagg

SEQ ID NO: 105521 - RNA, 40 nt, Homo sapiens
gaggagccgggcccccaagagggccgcccacaggagagcc

SEQ ID NO: 105522 - RNA, 70 nt, Homo sapiens
agagcagggggggcgacccagaggagagcccaaacagacgacgcaaacgagacgacgggaccgaaggacc

SEQ ID NO: 105523 - RNA, 69 nt, Homo sapiens
ccggccacgaggagggaacaaagggcaaaggacacaccgcacaaacggccgcgcaccacacaacaccag

SEQ ID NO: 105524 - RNA, 82 nt, Homo sapiens
cccgccccggcagcgacaagaggaggagagaccgccgggcgcaggcacaggaacaagccaccacccagggcaagcccaacag

SEQ ID NO: 105525 - RNA, 81 nt, Homo sapiens
agccagccacacgaggagacggaaccggagaaaacggcaaccggccagcaaggggacagccaccaccgacccagaaccagc

SEQ ID NO: 105526 - RNA, 73 nt, Homo sapiens
agggaaagaggagaggcacccgaaagccaggccagaaaacaggaaaggagaccaggaagcaccccggaccaaa

SEQ ID NO: 105527 - RNA, 71 nt, Homo sapiens
ccacggacaacccagaggacaacgaaggcggaagcaggaaaaaagaacaagaacgcaaggacaacaaggca

SEQ ID NO: 105528 - RNA, 79 nt, Homo sapiens
agaggaacgacaacccgggggagccagcaaagcagcccgaggaggcacgcaaaacaacagggggcaaacaagaccaggg

SEQ ID NO: 105529 - RNA, 62 nt, Homo sapiens
caaagccacgaaaaccaaaggggcggagaaaccacaccaccgcggaaacaggcaccccgcac

SEQ ID NO: 105530 - RNA, 61 nt, Homo sapiens
gggaaaacaaagaaccaagcacacggccgaggcacagagcagaggacaccacaggaaggag

SEQ ID NO: 105531 - RNA, 76 nt, Homo sapiens
agcaggcaagcaggagggaccgaggcgggaagaagggggcccagagaaggacaccccagagcagcaggccacagca

SEQ ID NO: 105532 - RNA, 82 nt, Homo sapiens
gaaaacccagaaagcaacacagagaccggagagcacacgaaaccagaagggccggagaagccacgagcagacagcaacaagg

SEQ ID NO: 105533 - RNA, 36 nt, Homo sapiens
gccagcaccaagcccagagcccggagggacaggaag

SEQ ID NO: 105534 - RNA, 81 nt, Homo sapiens
aaagggacgcaagaaacccaggacgagaacagcaacaggccaccccagcagacaggccaaggcccgggcaagccaacacgg

SEQ ID NO: 105535 - RNA, 58 nt, Homo sapiens
aaccacgacgaagcggaaggcagaagagcgaccaagccagaagaacaaccagaaacaa

SEQ ID NO: 105536 - RNA, 66 nt, Homo sapiens
ggaggcacgacaggcgggagccggagcaaaagaagagcagagcacaggaagacccaggaagaagca

SEQ ID NO: 105537 - RNA, 78 nt, Homo sapiens
ccccgagggcgggacacagggccaaaagagaaacaggcacgacaaccaaagcggacccaggaaacaccaacagcagac

SEQ ID NO: 105538 - RNA, 77 nt, Homo sapiens
ggccgggagcgaccaacacaagggggccgcaaggaaaccccccaggcaagaggcgcaggaccgggaagaccaacaaa

SEQ ID NO: 105539 - RNA, 70 nt, Homo sapiens
cacggccaacagcagaccaacaggcaaagagcaagcacaggagaagcagggggcgacagcacaaaacaca

SEQ ID NO: 105540 - RNA, 85 nt, Homo sapiens
cagaagcaggcggaggagacggcggcccgaggaggcagaaggaccgagccgacgcgggccgcgcggagccacgaggagggagaac

SEQ ID NO: 105541 - RNA, 78 nt, Homo sapiens
cggcgccgggaaacaagcccccggaccgggaaccggcacaaggcacgggcacggcggacaggcagcccaacacaccgg

SEQ ID NO: 105542 - RNA, 68 nt, Homo sapiens
accgaccacaggaacaaagcaaaaaagagcgacacgacacacggccggggaaccgcccaaaagcccgc

SEQ ID NO: 105543 - RNA, 77 nt, Homo sapiens
aaaacagcaaaaccagagccaaccaaaagggagaacagcaacgggaaacaaagcaaagaacagcgccagcaaaacag

SEQ ID NO: 105544 - RNA, 88 nt, Homo sapiens
agaaaacaggcggggaagaagagaaaggccaaggagaaggagcagcagcagcagcaacagcaacagcaggcaccgggagcccaccaga

SEQ ID NO: 105545 - RNA, 78 nt, Homo sapiens
cagccaaagaagacacgcggaagcgagagggaagcgaacgggggccaagacacaagagagagcagcaggacacaaaag

SEQ ID NO: 105546 - RNA, 55 nt, Homo sapiens
accgcagcgccggggcacgacacaaaaacagcagggccggagagaagccggaaag

SEQ ID NO: 105547 - RNA, 72 nt, Homo sapiens
gaagaaggagaacagcaacagacggcggggccccccgggcaggggggaagccagccaggacaaagagcaacc

SEQ ID NO: 105548 - RNA, 83 nt, Homo sapiens
agaggcggggaggcgcccccgggggcccgacgcacacgggggcggacaccacaagaagggcgccagcacaagggaaggcgccg

SEQ ID NO: 105549 - RNA, 68 nt, Homo sapiens
gaggacacgaggcggcgggcggagacaggaccgcggcgagcaagcccagaaggccgagcccggccaca

SEQ ID NO: 105550 - RNA, 82 nt, Homo sapiens
cggcccgagagaaccgcggcagaagccgagcaacaccccggccaccgacccacaaggaggccagagaggagcccacccccaa

SEQ ID NO: 105551 - RNA, 75 nt, Homo sapiens
cagcgaggcgccccagagcccagggcaggacaccgacaggaacagggaccacggggcacaggagcgcccagcagc

SEQ ID NO: 105552 - RNA, 82 nt, Homo sapiens
acgcgggcgagcggcggggagcggcgaagccgcgggcgagaggggaagagaggaagagcggccacggaggagcagagaagcc

SEQ ID NO: 105553 - RNA, 70 nt, Homo sapiens
gaggcacaggaacacacccgaacgcggaaccccagagaggacagaagccaacgcaaccagccagaggacc

SEQ ID NO: 105554 - RNA, 78 nt, Homo sapiens
ccaggacagagcacacagacgacacaccacaggggcgagaaagaacgcagcgcagcggacgcaaagacaagcagccag

SEQ ID NO: 105555 - RNA, 85 nt, Homo sapiens
aaaaccgcaggggcgaaaggggaccagccacaccgagaaggaggaccagagaagaaaggccaaaacgacaggacggcgagggacc

SEQ ID NO: 105556 - RNA, 52 nt, Homo sapiens
aggcaggggcgaggacgccagcagaaagcccgccaggaaacacaccgagaga

SEQ ID NO: 105557 - RNA, 93 nt, Homo sapiens
gccagagccggacagaggacaaggcccagcggcgcccgcgggagcccagccagccgacgagagagaggagccgaggcagcgaccggggaagac

SEQ ID NO: 105558 - RNA, 64 nt, Homo sapiens
ggcgggcccagccggacgcgacccagccgcggcggcaacgccggaaccaaaccgaggaaggaaa

SEQ ID NO: 105559 - RNA, 82 nt, Homo sapiens
agggagaaacgaacgcaaagagaccagcccccaaagccaaaagcacaaagccacagacccaagcagcggaacaggaggcagc

SEQ ID NO: 105560 - RNA, 78 nt, Homo sapiens
gcggcggggcacgcggccaggcggcgacacgccaaccccgggaagaaaacgccagagaagcagagcagcccggagcga

SEQ ID NO: 105561 - RNA, 73 nt, Homo sapiens
cggacggaaaaaccaaaggaaaaagacccaaagcgcacgaggggggcaggaacaggagaaaacgaaggggagg

SEQ ID NO: 105562 - RNA, 83 nt, Homo sapiens
gggggcgggggccggagagaagcggaaagagcgaagaagcaggggagaggccgagcgaagaaccagcggccaaggaggccaga

SEQ ID NO: 105563 - RNA, 79 nt, Homo sapiens
ggcgcagcggaggcggaagcaggaccggggcacggcgcccgggcagccagaagcagaccaggaggacggaaggaggcac

SEQ ID NO: 105564 - RNA, 68 nt, Homo sapiens
ggcagacacacaacccgacccgacgagagccacagcgcccaaggcacaggcccgcccgcgccggcaga

SEQ ID NO: 105565 - RNA, 73 nt, Homo sapiens
cagcgcgagccaggacccggggcgcgacgagagaccgcgcacacgggcccagaagcagcccagaccccgcgag

SEQ ID NO: 105566 - RNA, 85 nt, Homo sapiens
aaccgcaaccagacgccagcgggacgaggaccgagaccgcggccgggaccgaggaccagcccaccgcacccagggaaaaaacagc

SEQ ID NO: 105567 - RNA, 82 nt, Homo sapiens
agccgcagcggaaagcaggagcacaggacaaaagcaggggcacggaagaggacaagaaacaagaagccgcagcgccgcgcaa

SEQ ID NO: 105568 - RNA, 70 nt, Homo sapiens
ggaccccccgccggaccccacagcaacaaggaaacaggacaaaccccgaggccccgggaggagaaggagg

SEQ ID NO: 105569 - RNA, 81 nt, Homo sapiens
acacaaaccaacacaaggcccccagacggggaagagacacgacaggaaggaaaagagagggcaggcacacaacgccggaaa

SEQ ID NO: 105570 - RNA, 58 nt, Homo sapiens
ccacaaagaccccaacagcacagagcaaccagacgaagggaacgcacgggaaagcgcg

SEQ ID NO: 105571 - RNA, 73 nt, Homo sapiens
ccacccaggcaaacgaccaaagacaagaaggacccgacgaaggcaggcacagggaagaaaagcaaaaagcacg

SEQ ID NO: 105572 - RNA, 81 nt, Homo sapiens
ggacccggccccggcccacaggggggggcaaacccgagagaacggggaagacaaaggcgcggcaagcggggaagcacagga

SEQ ID NO: 105573 - RNA, 40 nt, Homo sapiens
cggggaccccccaaagacaagccccagcacaagagaaaac

SEQ ID NO: 105574 - RNA, 86 nt, Homo sapiens
cgcgaaccgcagacagcggccaagaagacacaaaggacggaggcacgacgggcggaccccggcaaaacgcccgagggagcgcgccc

SEQ ID NO: 105575 - RNA, 79 nt, Homo sapiens
ccgggaccccggaagccaaaaagaggagaggagaaaaccaggggcggaaggaccgagccagagcaaagaacacgaggcc

SEQ ID NO: 105576 - RNA, 87 nt, Homo sapiens
aaaacccgggacccaccacccaggccccgacgccccgagccggaaccaaaaagaagccccagagccggggccaggagccccaagcgc

SEQ ID NO: 105577 - RNA, 73 nt, Homo sapiens
gacgcgccggagggccaggcagaggaggaaaacgagagggcaacggcaacaaacagaagaagaagcaaccaag

SEQ ID NO: 105578 - RNA, 76 nt, Homo sapiens
cggccagagggaaccaaccgggaccccaagccaaagaacccacacaaggacaagggaaggaccacgagaccgcgaa

SEQ ID NO: 105579 - RNA, 85 nt, Homo sapiens
cgcgcacgagacccacgccacacggccggccgaggaggagccggaggagacccccgggggccaggaccacagcacggcccacgac

SEQ ID NO: 105580 - RNA, 118 nt, Homo sapiens
ccaagcacaaggacaagcaggaaaacggcgagaggacggagggggcccgacaaagcccccaagagagggccggcccgcgccccagcagacacgggacgccggggaagcccacgcagga

SEQ ID NO: 105581 - RNA, 79 nt, Homo sapiens
gaaaacccgaagagaagaaggaaaaagcggaagaaaacagaagaggcggggagaaagacaacggggcggcacacaagga

SEQ ID NO: 105582 - RNA, 80 nt, Homo sapiens
gccccagcccgggcccccaacgagcgagcacacaagaaaagaacagaacagccaggccccaagaaagagaggggacgagg

SEQ ID NO: 105583 - RNA, 59 nt, Homo sapiens
ggccagcggagacagcaaggaccagggcccgaggagggcggaaccacacgaggaggggc

SEQ ID NO: 105584 - RNA, 79 nt, Homo sapiens
gcagggagcaaggaaaggaaccagggcacgcaggggagaggccacgcagagcgcccagacacggaccaagcgcaggcag

SEQ ID NO: 105585 - RNA, 79 nt, Homo sapiens
accaagacacacaaccaaacaggagaaaaagggaagaaaacgccagagaagcagagcagcccggagcgaggggagaccg

SEQ ID NO: 105586 - RNA, 75 nt, Homo sapiens
agcagaagagcccaaaaccaacgaaccaaaagcaaccgcgaagagcaggagagcacacagaaccgacccagacca

SEQ ID NO: 105587 - RNA, 75 nt, Homo sapiens
aaaaaagggaaaggacgggaagggcgacagcgcaaggagacgaaggcagaagggaaaccccaaagaaccgaaaag

SEQ ID NO: 105588 - RNA, 62 nt, Homo sapiens
caggaggaggacgacagcacgcaacaggggaagaacacaggcgaggacagagggagaaagag

SEQ ID NO: 105589 - RNA, 77 nt, Homo sapiens
ggccccaagccagaagaaacaaccgccaccggggagcgaacacagaaaccggagcaggcaagggccaagcccacagg

SEQ ID NO: 105590 - RNA, 74 nt, Homo sapiens
agaagaggcagaccccgccagaccaacaagcggagacccacccggaaggcaggggcacgagcagcccaggggag

SEQ ID NO: 105591 - RNA, 56 nt, Homo sapiens
aagacagaaagccgggccaaggcaacagcaccaaaaacaacccacagagagagagg

SEQ ID NO: 105592 - RNA, 54 nt, Homo sapiens
cccagccggagaaggagcccacaacaaccacagggagaggagcggaagacccgg

SEQ ID NO: 105593 - RNA, 80 nt, Homo sapiens
ggaggagacggcagcacgaggaggcccgaggccggagccccacggcacgggccccgccccaccgcggggcgcacgccggc

SEQ ID NO: 105594 - RNA, 43 nt, Homo sapiens
ccaaaaagaccaagcccgagccggacgagcgggagaggacacc

SEQ ID NO: 105595 - RNA, 78 nt, Homo sapiens
cagccaagcgccggagcaaggaagacacagacgcggccaaccacccaaagaggagcaaccaaggggaaagccaccacg

SEQ ID NO: 105596 - RNA, 45 nt, Homo sapiens
acacaacccagggggaggagaggaggagagcagccgcggagaggc

SEQ ID NO: 105597 - RNA, 56 nt, Homo sapiens
gcggccgccggacggccgggcgcggagggagaaaagaagcagcccacgaaccccga

SEQ ID NO: 105598 - RNA, 84 nt, Homo sapiens
cccaacaaccccgggaagaaggaggacccaccgaagccaaccagagggagaagagagggacagagaccggaaacaaaagagaca

SEQ ID NO: 105599 - RNA, 73 nt, Homo sapiens
acggcacgaagggcggccgccgccgagcgcagaggcaggcgggccgggggcagcgagcccgggcaagagaccg

SEQ ID NO: 105600 - RNA, 68 nt, Homo sapiens
aaaccagggaaaacagccacggaaagaagaccagccgcaaaagaagaagcacgaaccgaaggaacaaa

SEQ ID NO: 105601 - RNA, 89 nt, Homo sapiens
cgggagaaggagggccaagaggcggaagcggaggagcccaggagacccggggacagcacgcccaggccccggcggaggcagggcggacc

SEQ ID NO: 105602 - RNA, 84 nt, Homo sapiens
ccggaaggggcaagacgggcagcgcaggggcgggaaagacccaggagaagccgcccaaagaacggaacaagagcaaagaccaag

SEQ ID NO: 105603 - RNA, 71 nt, Homo sapiens
gacgggaggcagagcagagggggcggggaggaggacgcggggaaggggcacgcggccaaagggacgcaaga

SEQ ID NO: 105604 - RNA, 75 nt, Homo sapiens
ccgccccgccccgcacgcccacagccgggggcgccgaccggaccacccagccaacaacccaacgagacaggagag

SEQ ID NO: 105605 - RNA, 66 nt, Homo sapiens
caagcacgcaggcccaacgacggcaggggaaaaacgaggccccccaaaggcaaaacccaggaccca

SEQ ID NO: 105606 - RNA, 79 nt, Homo sapiens
ggcgcccggccagccccgcagacaggagccagcgcccgcagaacaacacaacccagcccccgccccgagcgcgcggcga

SEQ ID NO: 105607 - RNA, 92 nt, Homo sapiens
cgaggcgggaaccgacagacccaccgggccagagacaggagcaggcccaggcggccgagccgcgagaacaacggagacggcgcgccaagcca

SEQ ID NO: 105608 - RNA, 60 nt, Homo sapiens
aaaagaacacggcaacgaaaagcgacagccaacgagaaacgacacaaaggccagacagaa

SEQ ID NO: 105609 - RNA, 59 nt, Homo sapiens
cggaggcgacacccagagagcccagagaagcacaaaggcgccgaagaaaggcgaaacaa

SEQ ID NO: 105610 - RNA, 41 nt, Homo sapiens
aaggaggagacgaagaaaggagacaaagaaacagccggaaa

SEQ ID NO: 105611 - RNA, 85 nt, Homo sapiens
gcagacccaagagcagcggaaaagaccagcacagaggcgaaggagagaagcagaagagcaagaaagaaaaccgggaccacagagg

SEQ ID NO: 105612 - RNA, 83 nt, Homo sapiens
cgcccgccgggacgccgaccgccgggacgaggcaggcaggggcagaaggcgacccagcgcagagcaaacagaaccacccagac

SEQ ID NO: 105613 - RNA, 76 nt, Homo sapiens
ggcaggggcggcaccaggaggggccaccaggccccccccgcggacacaggaaagggaagcgcccaacaccacaaaa

SEQ ID NO: 105614 - RNA, 56 nt, Homo sapiens
acggggcagggacaggcgcgaccaggccaagcaaggggcggacacaaggcggggcc

SEQ ID NO: 105615 - RNA, 76 nt, Homo sapiens
gcagacgcagccgagacaccagcccgaaacaccaccaagaaaacgagggaggagcaaaaagaaaaaaaagaacgca

SEQ ID NO: 105616 - RNA, 68 nt, Homo sapiens
acccagagaaaggagcacgaaggaacaaagccacgaaaaccaaaggaaaagaaaagccaaccaagacc

SEQ ID NO: 105617 - RNA, 73 nt, Homo sapiens
ggagcaggaggcgcaagacaccgaccccacacacgccccacgagagcaagagcgggaaagccaggcaaagggg

SEQ ID NO: 105618 - RNA, 74 nt, Homo sapiens
gccacagcggcaaacaggcagacagccccccaagaccggagggccagggagggcgaacgaggaaccgaaggccc

SEQ ID NO: 105619 - RNA, 89 nt, Homo sapiens
ggcggagcggaggggaggccggccaggcagggccggcggcggaaccgccaggccgagccggccggagacggagagagaccacgccacaa

SEQ ID NO: 105620 - RNA, 75 nt, Homo sapiens
accagggacggcagcccacgccgcaacccgccccagagccggggggaaggcgccaaggccagaaaggaggaacag

SEQ ID NO: 105621 - RNA, 57 nt, Homo sapiens
caacgccgcgcccgcggagggaaaagggacgaacagcggggacgccccagcagaccg

SEQ ID NO: 105622 - RNA, 87 nt, Homo sapiens
ccagaggcacacacaggggaccagacaaagggagaggggaccgacacccaacaggccagcaacagaagaaagcaagcaccggggaaa

SEQ ID NO: 105623 - RNA, 69 nt, Homo sapiens
ccacgaagaagagacgccacaaaccccagggaagaggaccaaagcgaacaaggccagaacaaggagaca

SEQ ID NO: 105624 - RNA, 74 nt, Homo sapiens
cacaggagaaggccaagcagcacagggacagaaaaggacgaaggagacgcaggagggagagcagccagaggaag

SEQ ID NO: 105625 - RNA, 80 nt, Homo sapiens
aggcgcggggcaggagcgacagaggagggaaacgcggagccaggccgagaggaagggcggaaaaggcaaaacagcgcaac

SEQ ID NO: 105626 - RNA, 78 nt, Homo sapiens
aaccacaaacaggaagcagaaacaaggagggaacaggagaagagagcggacccacaccagggaagacaggggagaggg

SEQ ID NO: 105627 - RNA, 117 nt, Homo sapiens
agcaggccgcggcgggccgcccggcccggcaccaggagcgccggcgcgcgggacaaggccagagcccacggagggcagccccggaagacaagcggcccggcaggcgcgccccggagg

SEQ ID NO: 105628 - RNA, 73 nt, Homo sapiens
agagagaccaggcggcggaagagagccgggcccgccgggcgaagccgaacagagaccacagaaggaaggaaga

SEQ ID NO: 105629 - RNA, 69 nt, Homo sapiens
caagcacgggcgcggggggggagcccacacacgccccgcgcacaacaggcggacaaaagcggcaagaga

SEQ ID NO: 105630 - RNA, 69 nt, Homo sapiens
caacaccaaaaacaaaacgaaccaggacggcaaaccaccgcccacgaagcccgacgaggcccgagagaa

SEQ ID NO: 105631 - RNA, 73 nt, Homo sapiens
ggcacccaagaaaaaagagacagaagcaagaaaaagacaagaaggccaacagaggccgccagacagcgcagac

SEQ ID NO: 105632 - RNA, 66 nt, Homo sapiens
ggcccggcagccccgacgcagccgggaagcaaggcgccaccggaagaaacgggaggggaggagccg

SEQ ID NO: 105633 - RNA, 55 nt, Homo sapiens
gacccagcagcgcagcagccaaggagacaccccagccagcaacacccaacacaaa

SEQ ID NO: 105634 - RNA, 40 nt, Homo sapiens
cccggggccaaagcaggcagccggcacccgcacaacccag

SEQ ID NO: 105635 - RNA, 53 nt, Homo sapiens
ccaagcagccaagacaagagggaagaaagagccaaacaggcgagaggaagaag

SEQ ID NO: 105636 - RNA, 85 nt, Homo sapiens
ccgagccgcccagccccgccccccggacccacggcgcgcgcccacaccccaggcgaccggaggaccacagcccacgaccaggcaa

SEQ ID NO: 105637 - RNA, 80 nt, Homo sapiens
ccgggcgccacccgaggacaaggcggcagccgccgcggaacaggcggagcagccccagccgccgggcagacgggaagcag

SEQ ID NO: 105638 - RNA, 74 nt, Homo sapiens
gaaggagagggaagcaaagaaacacaccacccaggcaaacgaccaaagacaagaaggaaggagagcccggaccc

SEQ ID NO: 105639 - RNA, 104 nt, Homo sapiens
agcgacgacgggacaagagaacagccgcgcggcgagcggcccgcacaaggccggcagggaccccgacggagagacaaagaagacggagggggggccagccaccg

SEQ ID NO: 105640 - RNA, 72 nt, Homo sapiens
gaaagaaaaggacaaaagaaaaaagggaaggaagaagaccaagaaaaaccagacaccaaaggaagcaggaaa

SEQ ID NO: 105641 - RNA, 75 nt, Homo sapiens
cccgcagcccgacccgaggagcgcgggggcggcccgccccggacccgagcagagaggaacagcgcccccgggccc

SEQ ID NO: 105642 - RNA, 82 nt, Homo sapiens
ccaggggaagacacgaggggcagaaagagaccgcagagacagccaacacggcacccacaggcacaggaccgacaaagaaaac

SEQ ID NO: 105643 - RNA, 70 nt, Homo sapiens
aggcccagaagaaagagaagagcgacaggcaagcggaacaggagcggcgacaagccacacaccaaaccca

SEQ ID NO: 105644 - RNA, 73 nt, Homo sapiens
cacgccccacgcacgcaccaaccgaggcaacggcacagcccacaccgcggacagagcaaacagcaacaaggag

SEQ ID NO: 105645 - RNA, 92 nt, Homo sapiens
cgcgcgccgccgccgccgcccagagacgcgagcccgccgccgccgccaccacccacccggacacagccagggccccccacgcgagaacccgg

SEQ ID NO: 105646 - RNA, 70 nt, Homo sapiens
agagcgagaagcacgagaaacagccaggagccggacgagaaaccaggcaaacagccggagaggagcccaa

SEQ ID NO: 105647 - RNA, 104 nt, Homo sapiens
cccagccaaaggaaggaggcgccccagcccccggagccgcaacaggagccggcaccacagaagacgccaagccacgaacccgcgaccaggcggagagcccagaa

SEQ ID NO: 105648 - RNA, 81 nt, Homo sapiens
ggcggcggaagagggccgggggcgcggccgcgcgccgccggcgaaggaggaggcggccggggacccaccaggccacaccca

SEQ ID NO: 105649 - RNA, 80 nt, Homo sapiens
ccccaggggaccagaggaaccagcccgagcggagaagagagcggacccacaccagggaagacaggggagagggggcacca

SEQ ID NO: 105650 - RNA, 81 nt, Homo sapiens
cagcccgccaggcgggagaagaaccccccgaaaggaccccccagagagggcacagacccaggccagcagaacgggcccaac

SEQ ID NO: 105651 - RNA, 71 nt, Homo sapiens
caaggacggcagggaagcacagaggacccgaaaccggagagcaccgcgaaaaggcggccgagggcagcgaa

SEQ ID NO: 105652 - RNA, 79 nt, Homo sapiens
gggcccaggacacagagccaggcaggcacggcaaccaggacggcacgggaaacacgagaccggcgcagcagagcagaaa

SEQ ID NO: 105653 - RNA, 42 nt, Homo sapiens
agacaaacaaagcaccagcagaaggaacccaggaggcagggc

SEQ ID NO: 105654 - RNA, 76 nt, Homo sapiens
gcagcggccagccccccccacgaaaacgcccacccggaccacagaaccaaggcacagagaggaacagcagagcgcc

SEQ ID NO: 105655 - RNA, 83 nt, Homo sapiens
aaggacccccagagcaagagcgcacaagccccgggcgagagaccgaagaagcggaaaggagaggagaaaagaagaaaccaaaa

SEQ ID NO: 105656 - RNA, 74 nt, Homo sapiens
gccaaagcagcgaagaagaggcccaacccccaccccgcccaaggaggcccagcgacagccagcagcccccccaa

SEQ ID NO: 105657 - RNA, 89 nt, Homo sapiens
ccaagagcagcaggcggaggaaacagccagaccgagagcagccgccggggcggagccggcaagagcgggaaggagggcgcacagcgcaa

SEQ ID NO: 105658 - RNA, 81 nt, Homo sapiens
gaaggagccagcagggacaaggaccagaagaaacgcaccggaaaggccaccagggccagaacgaagcacaacaggcagcgg

SEQ ID NO: 105659 - RNA, 86 nt, Homo sapiens
gagcccgccagcaagccggagccgccagagccaaggccaagccccaagcagcaccccaagcagggggagggcagggcgaggaaagg

SEQ ID NO: 105660 - RNA, 41 nt, Homo sapiens
caagaagcaagggacagaaggccccaaaggcagaagaaaca

SEQ ID NO: 105661 - RNA, 79 nt, Homo sapiens
ggcgcggcagcaggggacagcggagagaccacaaagcccggagaagccaagaaaccagccacggccaagagaagaccga

SEQ ID NO: 105662 - RNA, 61 nt, Homo sapiens
ccccaggccaaagagcaagccaaccaagccaggcacacagccgccgccgcgccgccgcgcc

SEQ ID NO: 105663 - RNA, 61 nt, Homo sapiens
ggcaagacagaaagcggaaggaaagcaggcaggagaagggcaccggggaggaccgcgcgac

SEQ ID NO: 105664 - RNA, 35 nt, Homo sapiens
ccccccacagaaaaggaaagaaccaagccgccaca

SEQ ID NO: 105665 - RNA, 69 nt, Homo sapiens
gaggaggagccggagggccgagccaagcacaaggggaacagaccagagaggacaaccaaaagcaccgaa

SEQ ID NO: 105666 - RNA, 94 nt, Homo sapiens
cgccgcgccaccaccgggcgccgaggggcgacgaaacaacagccaaacagaggaaagagcggagcccgccagaaacagacaccacggggcggac

SEQ ID NO: 105667 - RNA, 71 nt, Homo sapiens
aaaccaagggaacaacgacggcccaacggaaggcagacacaaggaacagccagccaggagaaaaacgaacc

SEQ ID NO: 105668 - RNA, 58 nt, Homo sapiens
ggcgccggccgagaaggcagaggcggcggacgggccccgaagcccaaggggagaccag

SEQ ID NO: 105669 - RNA, 72 nt, Homo sapiens
ggcaaaagaggggggccggacacccgggcaaagcagagcaaggaaaagcgagaggaggagagaaagaaccca

SEQ ID NO: 105670 - RNA, 76 nt, Homo sapiens
ggcgacaccgcgacaccccaacaaacaccagcgcgggccccgagccccggccccaaagacccaaaacagagacacc

SEQ ID NO: 105671 - RNA, 93 nt, Homo sapiens
aggagggccacgggccccagcagcccaggcagggaccaagaaaggcccagggaccaaagcccggacaaggcccgagcaccaggaccgcagaag

SEQ ID NO: 105672 - RNA, 77 nt, Homo sapiens
cggcgcgccgcgaccccagccggcgccgagggcggaaccgagcgggaaaaggaacagcacccgcgagaaccagccaa

SEQ ID NO: 105673 - RNA, 69 nt, Homo sapiens
caggggaacacaccagaaggagaacccaaagaagggcgacacaacgcccccaggagagaagaggggccc

SEQ ID NO: 105674 - RNA, 81 nt, Homo sapiens
gggggacagggagccgggggacagggccggcagagacgcaacggcggggaccgagccacagcagaggcagaggaagccccg

SEQ ID NO: 105675 - RNA, 59 nt, Homo sapiens
ggcagaggaccacaccgggcaccccccccacgcaaaagaagccggaggagccaccaaca

SEQ ID NO: 105676 - RNA, 77 nt, Homo sapiens
gggggggcaaacccgagagaacggggacaggagccagcggcccaggggcgggggaggaaacagagacacagcagggg

SEQ ID NO: 105677 - RNA, 79 nt, Homo sapiens
gaggaagaagggcaggaccgggcggaggccgccaagacggaaagcagcgagcagccacagaaccccccagaggaaacca

SEQ ID NO: 105678 - RNA, 77 nt, Homo sapiens
caacacccaaggcgcccagaaaccggccccaggacaaagcagacccacaggagacaaggaggagaacgaaggaaagg

SEQ ID NO: 105679 - RNA, 79 nt, Homo sapiens
gcagagacacaaaaccggacccggaacaggccaaaagcaagagcacaggcggaggcagcggaggccccgccgcgccgca

SEQ ID NO: 105680 - RNA, 79 nt, Homo sapiens
gcaagcgccaggaagacccacccccgccccaacaagaggccaacggccaagaccgcccggcagcgggggaccacacccc

SEQ ID NO: 105681 - RNA, 53 nt, Homo sapiens
caagaccccaacaacaaggcccccacgacaagggggcagcagaggacagaaaa

SEQ ID NO: 105682 - RNA, 74 nt, Homo sapiens
gagagcccacaccgggaaaggaccaaagacggcaccaaacggcaaggaggaaaaaaccagaaaccagacggcgg

SEQ ID NO: 105683 - RNA, 77 nt, Homo sapiens
aagacagaccccgaggagacggaagccgaacgagcggggacgggaacggacagcggaacagagaaggagaaaaggag

SEQ ID NO: 105684 - RNA, 81 nt, Homo sapiens
agaggccggccaacacaaagccccagcccaacaggaccgccgggggaccggaacgagaaccccagaggcgaagacgacgag

SEQ ID NO: 105685 - RNA, 75 nt, Homo sapiens
ccgacgcgagggcagccccgccagggcagcgggagagaggagagcagagagcagaaacaccgaccacccaacccc

SEQ ID NO: 105686 - RNA, 72 nt, Homo sapiens
gccgggggcacacagggcggaggacccggggccccgcccccaagcggggaccgaaaacaaggacacgaggca

SEQ ID NO: 105687 - RNA, 82 nt, Homo sapiens
ggagaacacaagagggcgccaccaacagaaaaaaaaaagaccaaaaggagcagaaaacacaggaagaacagcagcagcgcca

SEQ ID NO: 105688 - RNA, 57 nt, Homo sapiens
acaggaggccacccccaaagaaaagacgcagagagaccgccccagagaccgacagcc

SEQ ID NO: 105689 - RNA, 55 nt, Homo sapiens
aaaaggcgggcacaggccgaccgcgcggggaacaggacgcaagagacgcgccaca

SEQ ID NO: 105690 - RNA, 51 nt, Homo sapiens
aagacagcaggaccgggaacgccagagacggaggggggaggagcaggcccc

SEQ ID NO: 105691 - RNA, 57 nt, Homo sapiens
aagaagaaaggccccggaagcaacccagaaacccagaaaaccagacgagagacagaa

SEQ ID NO: 105692 - RNA, 72 nt, Homo sapiens
cgagaagagcacacaacaacagacccacagagacagcggagcgaacacaaaaagcggggagcacaaaaccgc

SEQ ID NO: 105693 - RNA, 72 nt, Homo sapiens
aaaaccagcagcagcacgagagaacaaaaaaacaacaccgcgaaagcaggcccgaccacgaagaagaggaca

SEQ ID NO: 105694 - RNA, 49 nt, Homo sapiens
cgaccaggccacgagagagaagcgcaggagcgaaagcaaggcgaggaag

SEQ ID NO: 105695 - RNA, 62 nt, Homo sapiens
aaaacggagaaaaaacgaggacgccgccagccaccggcgcgaagccagaccagaccagcagg

SEQ ID NO: 105696 - RNA, 86 nt, Homo sapiens
ggaagcgcaacccgacccggaggcgcgaggggcccgggggcaggcgcaagggccccggaaaacccggggagggcaccgacaaccag

SEQ ID NO: 105697 - RNA, 79 nt, Homo sapiens
cagaagcgcggcagggagcgcgggggcccgcgcagcagcgaccacgacaggaagggaaggggcggagacgggcggaacg

SEQ ID NO: 105698 - RNA, 76 nt, Homo sapiens
ggcaacaggagccccacgccacggacacggaaccagaggcagcagcccaaccccgaggacagcccaggccacgcac

SEQ ID NO: 105699 - RNA, 75 nt, Homo sapiens
ggaacaagggggggaaacccaccgggaaaaggcacgaagggcaggcgacaacgcaacaggggcagaaaggggcca

SEQ ID NO: 105700 - RNA, 75 nt, Homo sapiens
cccggaggccggccccacggccccccccacggcgggacccccgggccggggcgcagcaaaagacgaccaggagac

SEQ ID NO: 105701 - RNA, 84 nt, Homo sapiens
gcgggacgacacccccgcaagcccaccacgccaggagaagaggaagagggacaagaggagaaggcagagcccccccaggcagaa

SEQ ID NO: 105702 - RNA, 73 nt, Homo sapiens
cgcgaagcgggaccacgcggaggacgggcaacaggagccccacgccacgggggccgcaaggccaggcgcgcag

SEQ ID NO: 105703 - RNA, 64 nt, Homo sapiens
cgaggagaaacagcagaaacgcaccaggccaaagaaagagaagaccaggcccggagacgcgacg

SEQ ID NO: 105704 - RNA, 71 nt, Homo sapiens
cgaccaagcaccgcagacccaaccccagccaccccaagcccggaggcacaggacgagagaaccgacccagc

SEQ ID NO: 105705 - RNA, 72 nt, Homo sapiens
cgcccgagaccggcgccacccgcaggcaggaaagggaagccccgcgccacgccaggccgccgacgccacgag

SEQ ID NO: 105706 - RNA, 57 nt, Homo sapiens
ccacaggagaacagcaccaacggccagaccgccccccggagcgggcccgccccagcc

SEQ ID NO: 105707 - RNA, 76 nt, Homo sapiens
aagacaagcgcaacagagaggcaacaaaggcacaagaacaaggaccacgagaggggagcaccccggggagacaccc

SEQ ID NO: 105708 - RNA, 70 nt, Homo sapiens
agacgacaacgccgccagcggccaggcacgacagaccgcaccagcaacaagcagggaacaggcccaaacc

SEQ ID NO: 105709 - RNA, 71 nt, Homo sapiens
ggagcaggggaccccaagcaagaaaccgaaagggaaacaaagaaagacaccacgagaggagaaaaagaaaa

SEQ ID NO: 105710 - RNA, 73 nt, Homo sapiens
agcgcacgaaggaccgggcgccaaaggagccacccgggggacccaggaggggcgcggaaaaggagacaagaag

SEQ ID NO: 105711 - RNA, 76 nt, Homo sapiens
cgccgcgccccggccccccggccgcacaggccacgaaagcgccaacaaggaaaccggaacacaaccacagacaagc

SEQ ID NO: 105712 - RNA, 69 nt, Homo sapiens
gacaaggaaacagcagaaaccggaaccacacacaccacaggaagccagagcacagcaagcgggagcagg

SEQ ID NO: 105713 - RNA, 79 nt, Homo sapiens
aaggagagggaaagccccagcagagggggagccagaaggcagggaggggaagaaaagccaggaagccaacagaaaacca

SEQ ID NO: 105714 - RNA, 65 nt, Homo sapiens
caagccgcagcgcaccaagggggcaaccgacccagccaaacccacggacggacgacccacggaca

SEQ ID NO: 105715 - RNA, 78 nt, Homo sapiens
gccgacacaagaacagaacaggcccaggggcaaccaggcagacccgaccccagcgaaaaaacggaaagccgcagaagc

SEQ ID NO: 105716 - RNA, 82 nt, Homo sapiens
gcgaccaagacaccaacaccaggaagagaggaagcgggggccgagaccacacaggcgggggagcgggaggagccagagcaca

SEQ ID NO: 105717 - RNA, 79 nt, Homo sapiens
caccaggagccaaggagaaaacgccacggaggcagaggaaggaagggaacacggacgacgagacacgaccaacacaggc

SEQ ID NO: 105718 - RNA, 80 nt, Homo sapiens
cgggacaagaaaacagcgggagcaagacgggaagggagcagaggagagggcgggacaggcggccagcaggaagggcaccc

SEQ ID NO: 105719 - RNA, 74 nt, Homo sapiens
cggaagcgagggcggccgcgccggcccagaaccgccggaaggggagggcggacacgaccccagacacacaccaa

SEQ ID NO: 105720 - RNA, 45 nt, Homo sapiens
ggcagagcgggccgacccgaaagcgcaaggaagaagagacgccgc

SEQ ID NO: 105721 - RNA, 80 nt, Homo sapiens
cccgccagcagccgccggagccagccaacgagcgagaaaaaaagaggcgaccagcccgggggaaaagaagagaacggccg

SEQ ID NO: 105722 - RNA, 58 nt, Homo sapiens
gacgagggccggaaggggccgagaacgacagaggaggacggaagaaagaccccaaaaa

SEQ ID NO: 105723 - RNA, 82 nt, Homo sapiens
gccggccggccaggaggcgaggggccggcgagcagagagaccgcaccacccgggaacgagcaggggagaagaaccaacaacg

SEQ ID NO: 105724 - RNA, 81 nt, Homo sapiens
gagaacggcgggaagagaagacacgagcacaaacgggcgccggccgagcccgggaaaacgacagcagcagcagggccggaa

SEQ ID NO: 105725 - RNA, 76 nt, Homo sapiens
caggcacaaagaaggaggaaggagggcccgagggaccgccaacaagcggcccgcaccgggccagacaacaccaccc

SEQ ID NO: 105726 - RNA, 83 nt, Homo sapiens
ggacagcgcgagccaggacccggcccccccagccacgccgcgcccagccagcccaaaacgaagcaccacaagcaagcccagcc

SEQ ID NO: 105727 - RNA, 116 nt, Homo sapiens
caggcgccgcagccacgagccagcgaggagaacagccgaaaggcggggacgggccggcccgcggaagacagcccacaccggcaggccaacaaccaagacgaacgaacgcccagaca

SEQ ID NO: 105728 - RNA, 69 nt, Homo sapiens
cccacgccacgcccccagggccccgggccccggaggaacggcgcgaagacccggggacagaggcccccc

SEQ ID NO: 105729 - RNA, 90 nt, Homo sapiens
cgagccgagcccccgccgcgccagggccagaacgaccgagggcacggccgaggaccgccgaccagagaggacgagacgcagggcacgggc

SEQ ID NO: 105730 - RNA, 77 nt, Homo sapiens
aaaaacgggaaagccggcaagagggagaaggacaccaggcagaggcaagcggccgcgcggggcgcaggcgccccgcg

SEQ ID NO: 105731 - RNA, 57 nt, Homo sapiens
gggcccgccggcccggaagacccagagagaagacagacgccacaaagagagggcaaa

SEQ ID NO: 105732 - RNA, 83 nt, Homo sapiens
acgaacccccgaacaaggagccgacgggccagcacaacggccgcgagcagccaacgaggacgaggggaaccaacgcagagccc

SEQ ID NO: 105733 - RNA, 72 nt, Homo sapiens
acacgcaggaggggaagagaacgagacaaacagcacagcgacgaacacacacaccagaccggagaagcacag

SEQ ID NO: 105734 - RNA, 83 nt, Homo sapiens
gcagcagggcgagacagcgaaagcacgaacaggaaacaggaagccgggagagaaacacagagccaggccgggccaccggaaga

SEQ ID NO: 105735 - RNA, 72 nt, Homo sapiens
aaggagcaacaaggcacggcaacaagcagggacggaagaagcaagggcgggagcccaggagcacaaggagcc

SEQ ID NO: 105736 - RNA, 74 nt, Homo sapiens
gcaacaggcagaaaaagaaccaggccagcaacagaagaaagcaagcaccggggaaagcggcccgaaacaagcag

SEQ ID NO: 105737 - RNA, 72 nt, Homo sapiens
cggaccgagaagcaaaaaagaaagaaaaaaacagcagcagaacacaccgggcccgagggcaggacagcaggc

SEQ ID NO: 105738 - RNA, 66 nt, Homo sapiens
cccaggagacgacaaagccccgccaagggcgacacaacagggccagggagaaaccacacgggccac

SEQ ID NO: 105739 - RNA, 74 nt, Homo sapiens
aagagaggaacggagcaagaagcgacacaaggagaaaagaccaaagcagggaaaagcggaaaccaacagcaaaa

SEQ ID NO: 105740 - RNA, 74 nt, Homo sapiens
gcgccggcccgaccaggccccgcagacccaacgccggaaaaccaaaaaggaggggcaacaaaggggacggcgcg

SEQ ID NO: 105741 - RNA, 81 nt, Homo sapiens
gccgccacagaacaccgccccagcagcccacggccagagaacaccgaaggagaagccaagccaggcccaggaaggagccga

SEQ ID NO: 105742 - RNA, 78 nt, Homo sapiens
gcggagcgggcagccgccgccaccccgcggccgcacccccgccccagggccgagaacaacgagcgacccccagggaag

SEQ ID NO: 105743 - RNA, 97 nt, Homo sapiens
gaaacggaaccgggaggcgacgcacacgagcggaggcgaaggaagagagcgagcggaaaacggccgaaggcaaagcgaccagaccggacccgggacc

SEQ ID NO: 105744 - RNA, 76 nt, Homo sapiens
cacaaagaagggaaaaccagcgagggccgaaagaccagagaagccggaacaaaccgggacagaccggagcggggag

SEQ ID NO: 105745 - RNA, 68 nt, Homo sapiens
aaggaagacagcagcaaaacaaaggaagagccccgaggagaccagcaaagccgcagcgcaaaaccagc

SEQ ID NO: 105746 - RNA, 73 nt, Homo sapiens
acagaggacaggagaaaggcgaaggcaggagggggagagaggcagaacagaacaaacggagaaacaccggaga

SEQ ID NO: 105747 - RNA, 56 nt, Homo sapiens
cggcaacggcgagaccccgagggagacacaggcgggagacgggagggagaccggag

SEQ ID NO: 105748 - RNA, 71 nt, Homo sapiens
cgcaggaacgcgcacgggaaccgaagagagccgggcagaacgccggaagaccacgagccacgaccgacacg

SEQ ID NO: 105749 - RNA, 113 nt, Homo sapiens
cgcgggccggggaccgcaggggcgcgcgaaggagcggaagaaggcaggccaaaccaccgaccagggccaaggagacggaagaagccaagaagaagcaagaaaacagaagcaga

SEQ ID NO: 105750 - RNA, 72 nt, Homo sapiens
agagccggcaggggcgcccccaggaccgagcaggaaccggagcagaggcccacgcggaccggcagcgccacc

SEQ ID NO: 105751 - RNA, 76 nt, Homo sapiens
caaagccaccagcccagacagggggccacagggcaacggggcccgcaggcccccaccgcccagaggagagcgagca

SEQ ID NO: 105752 - RNA, 78 nt, Homo sapiens
gaaaacccaccgggagcacgaaggcaaggggcgcaccgggaaaggaacaggagcgccacgggacaaccccaacgggag

SEQ ID NO: 105753 - RNA, 66 nt, Homo sapiens
accagcccgaacagcgacaacacaaccggacccccgcaagggaccgcgcaggagggaggaagagag

SEQ ID NO: 105754 - RNA, 87 nt, Homo sapiens
agcggcagcagcagcggcgggaggagccccggggacaaaagagaggacagagaagcaaggcgcagaacagaagaaaacagaaagcca

SEQ ID NO: 105755 - RNA, 80 nt, Homo sapiens
cagcagcacaacaacgcaaccacagaaacaagggacaggagaagaacaagcgggacgaaggcacccggagacgcagcgac

SEQ ID NO: 105756 - RNA, 79 nt, Homo sapiens
acccaggagcacagcagcgaagcagcaggaggcaaaacccaacgaggacgggggaaagaaggaagggaaaaaaaccaaa

SEQ ID NO: 105757 - RNA, 82 nt, Homo sapiens
gaaccggagaccccgaaaacggaagcgcagggagaaggaagaggggaaaaggagcgggccccaagaaccaaaaaagaaaagc

SEQ ID NO: 105758 - RNA, 80 nt, Homo sapiens
gggcagcgcgcacccgggccagcgcacagagaggcagaccgaggagggagagcgcagcccagaagaggaaaacgcgcaaa

SEQ ID NO: 105759 - RNA, 43 nt, Homo sapiens
agacgggaaggacaaagggcccacggcagacacagcaggccaa

SEQ ID NO: 105760 - RNA, 64 nt, Homo sapiens
agagcaacaccccaccccaaggacaccaggggggaaaaaccacacaggcaaagaacgcgcaaaa

SEQ ID NO: 105761 - RNA, 100 nt, Homo sapiens
agagcaccaaaacacacggaaacaaacagacacggaaaaaccacagaaagcagaccagagagagcaacagcaggccaggacaggaacgaccgggagggaa

SEQ ID NO: 105762 - RNA, 66 nt, Homo sapiens
ggggccgcaacgaacacaagacaggcaaccgacagaaaccggagacaaagagacagcgaacccacc

SEQ ID NO: 105763 - RNA, 81 nt, Homo sapiens
acaaacagccggcaccagccggaacagcagagacacagagggcagcagagacccgcagcacgagccaccagcacagaagaa

SEQ ID NO: 105764 - RNA, 112 nt, Homo sapiens
gagaggaacgggcagaagccagggcaggcccgccagaaacacaaggcaagcaacacagggagaagacacacggggcagcaaaggcagccgcaaaagcaacccacggggaaag

SEQ ID NO: 105765 - RNA, 78 nt, Homo sapiens
aacaagggaggagaagacaagcaaaaagacgggaaacggcaaagaggccgggaagaaggagggacacagcagcgcgga

SEQ ID NO: 105766 - RNA, 36 nt, Homo sapiens
agaccgggcccaaaagcgcaccaagacgcgcaacga

SEQ ID NO: 105767 - RNA, 77 nt, Homo sapiens
cgcgccggggcagggacggacccggagccgggccagcaacagagcgggccggggacgccagacagacacagcacagc

SEQ ID NO: 105768 - RNA, 78 nt, Homo sapiens
cagcgaagcgggcacggggcggcgaagccgacgagcccgaacagacgcaccagcgggaggaagagggacggcccagga

SEQ ID NO: 105769 - RNA, 95 nt, Homo sapiens
cgagaaagccaggacaaaacagacgcgcccagagcgcagcacgggcgcaggcacggggccaaaaaggcacgagggaacgggaaagaacagagaag

SEQ ID NO: 105770 - RNA, 81 nt, Homo sapiens
agaaacaagagaaggaaaaggaagagcacgacagaacgaacgaaacaccaaagccaaagaacgccaaccgaaagaaagaca

SEQ ID NO: 105771 - RNA, 76 nt, Homo sapiens
gcaacaccgaggcagagcagggccgggaaaagggcccaaaccgggagaaggagagacgaaggagaggacaggggaa

SEQ ID NO: 105772 - RNA, 83 nt, Homo sapiens
gaaaaaaagagaaaccggggaaccacggacaacccagaggacaacgaaggcgaggagagacaaagggaaagaccgggacggcc

SEQ ID NO: 105773 - RNA, 71 nt, Homo sapiens
caagaagcgaagcggaaggagcccagccccgaccaagcagcaacggaacagaccagaaggagcaaggggaa

SEQ ID NO: 105774 - RNA, 75 nt, Homo sapiens
ggaaggcacggagccggacaacaaaacgggcggagaacggaaaagcaccaggaagcagagaggaccgcagaaggg

SEQ ID NO: 105775 - RNA, 78 nt, Homo sapiens
agacagcacaccaggagagggccagggggagcccaaacgaaaagagaagacacgcagggcagaaacgaagcacaggaa

SEQ ID NO: 105776 - RNA, 73 nt, Homo sapiens
ggagcaagcccggcgagacaagccagcgccagggagcacaaccacaagcccaggagagcccaggacggagaag

SEQ ID NO: 105777 - RNA, 86 nt, Homo sapiens
ccgggcgcgcgcgcgggcgcgccaccgacagagacacggaagccggagcagggaagagagcagcgacagacgaagaaaaggcggac

SEQ ID NO: 105778 - RNA, 79 nt, Homo sapiens
ggaagaccaccaaaacaaagccacaagacacgcgaaaggaggccaaacacacaggaacgccagaccccagccgagggag

SEQ ID NO: 105779 - RNA, 41 nt, Homo sapiens
ccgcaccgccaccggcccgacccagccccgagagcagggac

SEQ ID NO: 105780 - RNA, 80 nt, Homo sapiens
aggagcccggagcccgcggccggccgaggacaccggagccagccaggccggccgcgggccgaccggccccccagccccac

SEQ ID NO: 105781 - RNA, 38 nt, Homo sapiens
agccggacaccagaccaacacggggaagagaccaccgg

SEQ ID NO: 105782 - RNA, 73 nt, Homo sapiens
gccacccagcggggagcacggcgagcagccaggccaggagagggggggccacacaccgcgccggccccgggcg

SEQ ID NO: 105783 - RNA, 122 nt, Homo sapiens
ccgggcaccgaccggccgagcgcccagcgagacccggggccccagaggccgcggacaccgaccggaggacccggcccaacgagcccacgaagaacacaccagaaagcagccaccaaccaaaa

SEQ ID NO: 105784 - RNA, 41 nt, Homo sapiens
cacaagagagcagggaggagggacgaacagcggggacgccc

SEQ ID NO: 105785 - RNA, 70 nt, Homo sapiens
gccacgggacgacacacccacagcggaggccagaccgagccggcaaccaccgaacacgaaagaacccgaa

SEQ ID NO: 105786 - RNA, 62 nt, Homo sapiens
gggacaaggcaccgcccagacaaagacaccaccagccgggacgaggggaggaaaaaaaccag

SEQ ID NO: 105787 - RNA, 78 nt, Homo sapiens
gaccacaggcccagacgagcggaggaggcacagggcgcggaccgcacgagcgcgaccacaggagcagcaacccagccc

SEQ ID NO: 105788 - RNA, 49 nt, Homo sapiens
aagaggaccggcagaaaagccacacacagagggagagaaccccacccaa

SEQ ID NO: 105789 - RNA, 72 nt, Homo sapiens
cggaggagccagagcgcagaaagcagagggcacagggaagacgggcgcaaccacagagacccacagggcaac

SEQ ID NO: 105790 - RNA, 84 nt, Homo sapiens
agagaccaaagagcaagcggaagccccaggagaaaacgccggagcagggagagggaccacggggagcccagccagccccacgcg

SEQ ID NO: 105791 - RNA, 65 nt, Homo sapiens
agaggcacccagcggccacacccgccacccacaggaccagcagggagcgaggaagaaaacggaac

SEQ ID NO: 105792 - RNA, 78 nt, Homo sapiens
cgaccaagaggcagaagacgggggagaaaaaaagaggcgaccagcccgggggaaaagaagagaacggccgaagacaca

SEQ ID NO: 105793 - RNA, 80 nt, Homo sapiens
ggagaggaccgcaggcccgacgaaccagcggaggaggcgagcgacagaaggcggacggacccgccgccagccacgcgccc

SEQ ID NO: 105794 - RNA, 74 nt, Homo sapiens
gaacaaccaacaagcagggcgagaagggggcacaacagaaaagcagagaccggggagcgacgccccaccacagg

SEQ ID NO: 105795 - RNA, 78 nt, Homo sapiens
gggccagaggacagaggacagaaggggcagaccaacaccacccagcaaaaaccccgacgaacgcgccagggagcgcca

SEQ ID NO: 105796 - RNA, 75 nt, Homo sapiens
cacccccggcgggcccgaggcggcgagagaggcaggcggagccgaccgggccagaggccgccaaccgagcacaaa

SEQ ID NO: 105797 - RNA, 57 nt, Homo sapiens
ggacagccgcacggaggcgaaacacaaaggggagcagcgacaagagcagcacggcag

SEQ ID NO: 105798 - RNA, 79 nt, Homo sapiens
aaaccgccaacccgcgccgccgccaccagcccaaaacgcagcagcaaaaacaaccagcacgggagccccccgggaagca

SEQ ID NO: 105799 - RNA, 71 nt, Homo sapiens
aaaaagcgcaggagcgcaacccagcaacacaagcacagccacaagacaagcaacaggacccagcaggacga

SEQ ID NO: 105800 - RNA, 57 nt, Homo sapiens
cccgagaggaggcggagaccacccaaaccccccaagaaggcaccacagagggagacc

SEQ ID NO: 105801 - RNA, 72 nt, Homo sapiens
ccaaagcagacccagagcaacagccagcaaagacaagagcagaccagcagccgcagcgcgacagccaaaaac

SEQ ID NO: 105802 - RNA, 56 nt, Homo sapiens
acacagccgacagacgccaccaaaagcaccaggaggaacgccgggacccgggcacg

SEQ ID NO: 105803 - RNA, 76 nt, Homo sapiens
aacgccccgcagggagaaagcagaagagagaaacacccgggaaaacaaacaccgacaaaagaaaaaccgcaaagaa

SEQ ID NO: 105804 - RNA, 72 nt, Homo sapiens
accgcacgcggaggcggcgcccgcgaaccaccagaggggggggaaagaaccaccaaagaccaaaaaaggagg

SEQ ID NO: 105805 - RNA, 75 nt, Homo sapiens
ccgcgccgcaggcgcggccccagcacaagagccggggaagacagggaagccagacagccaccagccaaggacaga

SEQ ID NO: 105806 - RNA, 75 nt, Homo sapiens
gagcaggccgcggcgacccagcgaggggacaccaaaaggagcacgcaaccccaccaccggagggcaggccccacc

SEQ ID NO: 105807 - RNA, 66 nt, Homo sapiens
aaccccagacaacggaacgcgcccagcaacacgaccagaaaagggacgggagaaagaacagacaag

SEQ ID NO: 105808 - RNA, 72 nt, Homo sapiens
agagagaaagagaccaaaggagcccgagaaaggaggagaaacaagcagcaccgcaggaggcagcagcaagca

SEQ ID NO: 105809 - RNA, 90 nt, Homo sapiens
gcccgcaccccggggcccaggaagggcggcccagggcacagacccacaagaggagaacgggcagagcacagccgccaagcggggcgcccc

SEQ ID NO: 105810 - RNA, 74 nt, Homo sapiens
cccccgaggcgcagaagggagaggcagccgcagggaagcggacgccggccagacagggccacgccggcagagag

SEQ ID NO: 105811 - RNA, 92 nt, Homo sapiens
aaggaaaacagcggcaacaccaggcgggagcgagggggcgcacggggaggagagcgaggacgccgcccgcagcagcacaggaacacccccgc

SEQ ID NO: 105812 - RNA, 78 nt, Homo sapiens
cgggagccgggcggcgagccgggggagcgccgaaaagcaccggagccgccgcgcagcccagaaggggaagacccccag

SEQ ID NO: 105813 - RNA, 78 nt, Homo sapiens
gcgaacaaggagaaagccacaacagggcggcaacaggggcgagaaaggcaacccgacgaagacgccaaacaaggaaaa

SEQ ID NO: 105814 - RNA, 63 nt, Homo sapiens
caggagaagggccggcgccgagcgcccaccaagcccacacccaggcccggccaacgcaacagg

SEQ ID NO: 105815 - RNA, 88 nt, Homo sapiens
cgagagcgacagcgcggggagagccgggcaggacggcgggccgaggagcccggggagggacccggagcccagcccgccgacacagcca

SEQ ID NO: 105816 - RNA, 108 nt, Homo sapiens
gccgaagcgagaaaacagccaagacaaagccaaagaggaggaggcacccccgccgagccggggaggcgcggcagaggaagaagaaggcgcaaagcgccgaagggagaa

SEQ ID NO: 105817 - RNA, 80 nt, Homo sapiens
cacaaaaacagcggagccagcccaccgccccgacagcgcggagcagaaggccaagagaggccaacagaggaacaaggccc

SEQ ID NO: 105818 - RNA, 85 nt, Homo sapiens
gcccggagcgccaccggagagcgaggacgacgggaggcggagggcgcccggcgaggagcgccaggcgagggcacacggacaagca

SEQ ID NO: 105819 - RNA, 81 nt, Homo sapiens
caggcggcgcggagagggggcgcgagcgggggacccagcagccagcgaagccccaaggaagccgggacgcccacagaccca

SEQ ID NO: 105820 - RNA, 87 nt, Homo sapiens
gaaagggccagaagaagacacaaggagcgggcgagccccccagcccgggccgccacgcggaaggccccagcgccgaaggagcagcgg

SEQ ID NO: 105821 - RNA, 84 nt, Homo sapiens
aaccgcggcgaggacggggcgccggcgccgccgcccccgggccgcggccgcagagcacagcaaggaggaaacagcaagggaaca

SEQ ID NO: 105822 - RNA, 71 nt, Homo sapiens
aagaggaccaggagcaaacagaagagccccaagccaaggacccacacagcggaacgcgaacaaaaaaagca

SEQ ID NO: 105823 - RNA, 80 nt, Homo sapiens
ccgccgggcccgcccgcacgaaaccggccggcagaaggcaaaagcagaccggaaaacccaccggcaagaccacacccgag

SEQ ID NO: 105824 - RNA, 73 nt, Homo sapiens
gagaccaacgggagccccaaggcaacaccaccgagaacggggaaaaagacggccgacacaagccgggggccgg

SEQ ID NO: 105825 - RNA, 75 nt, Homo sapiens
gcaaccaacaggcacgacaagcggacaccccgagagggaaggggcccgagacacccccgcgcaacagagcgggcc

SEQ ID NO: 105826 - RNA, 69 nt, Homo sapiens
gcaagcaccacaaaggaacgccacacgcgaaaaacggacaacgaggaaaaccaaaaacggaacagaaca

SEQ ID NO: 105827 - RNA, 74 nt, Homo sapiens
agagcggaaccagggagccgggaccagcggagaacaccaccaaacaaacacaaggaacccgagggacaaagcac

SEQ ID NO: 105828 - RNA, 81 nt, Homo sapiens
cgccgaggacagagcgacgggcgcaagccccaggacagggaacaaaggcagagaaacgcaccccagagcaggacacaagac

SEQ ID NO: 105829 - RNA, 75 nt, Homo sapiens
cccgaccccggcgcggaccggcaccaacaaaacaccgagcggcggagaaaccaccacaaacacgaggccagcaac

SEQ ID NO: 105830 - RNA, 68 nt, Homo sapiens
gcaaacagcgaccgccaagagacacacagggcaccagaccgaaagagcacaggcacagagccaagaaa

SEQ ID NO: 105831 - RNA, 67 nt, Homo sapiens
gaaggaccaagaaccaggcacgcagaagccagcggacgcccgcaacggggaccggccagagaccgcc

SEQ ID NO: 105832 - RNA, 60 nt, Homo sapiens
gcggcacagagggccgccaggcaaaagcagaccggaaaacccaccggcaagaccacaccc

SEQ ID NO: 105833 - RNA, 59 nt, Homo sapiens
gaaggcggcccagcaaaacggccaagggacagcgaaacagcaaccgagcagcacggccc

SEQ ID NO: 105834 - RNA, 50 nt, Homo sapiens
ccgagccaaaccccccaacagcagcgagaagcaaaggccagggaaggaca

SEQ ID NO: 105835 - RNA, 38 nt, Homo sapiens
cacacccccccggggggggcgagaaccacgccgacaac

SEQ ID NO: 105836 - RNA, 74 nt, Homo sapiens
cgacgggcagccccggaccgaaagcaccccaaccaagcagcccagcccagacggacaaagagacagagcgagcg

SEQ ID NO: 105837 - RNA, 83 nt, Homo sapiens
gaccgaagccgcaaaagcaggacgaggagcggaggcggcagcagcagagaagagagcgcaagcgggaagcggaagaccgagcg

SEQ ID NO: 105838 - RNA, 75 nt, Homo sapiens
gacaaaaccccgaaaaaggccaaaccaagccaggcccgaagagcacccagacagggaccccgcccgccagaccca

SEQ ID NO: 105839 - RNA, 102 nt, Homo sapiens
ccggcagggggcacccgcggccggcccggggccccgggaccggcgcccccccggcccgagagagaaagggaaagaaggagcggagcagaacaaggaccccca

SEQ ID NO: 105840 - RNA, 64 nt, Homo sapiens
gccccgagagcgggacacagcaccacaagccaacaaaccgaaaaaagagacgaagacggaccag

SEQ ID NO: 105841 - RNA, 65 nt, Homo sapiens
cacgcaggcacgacaccaccgggagagcaccgaccaaaccagccagcacgggggcccagccagcc

SEQ ID NO: 105842 - RNA, 39 nt, Homo sapiens
gccacacggcagaaaaagagggaagaaggaccgggaaaa

SEQ ID NO: 105843 - RNA, 75 nt, Homo sapiens
gaaacccaaaaagagggggggcaagacgagaccaccagaccacagcccacccccgaagggaagaaccccgccagc

SEQ ID NO: 105844 - RNA, 58 nt, Homo sapiens
gccaccacaaagaaggcccggcacaacaaaaccaagaggaccgggagaagccgcggca

SEQ ID NO: 105845 - RNA, 51 nt, Homo sapiens
gaggggcggacgcggccggggcggaaagaaacaagaaagacgcaccgaggc

SEQ ID NO: 105846 - RNA, 82 nt, Homo sapiens
cccagacgcaggacacgaggcaggagccaaagcgaccgccggagcgaggaccagggcgaacaccgagcggggcccggcgcac

SEQ ID NO: 105847 - RNA, 54 nt, Homo sapiens
gaaggaccaagaaccagggcgccaacccccaacccacgcgggcagccagaaccc

SEQ ID NO: 105848 - RNA, 63 nt, Homo sapiens
cggcaaacccccagagcccgggcaaaagagaaagggggacagaagcagaagacagcgacagca

SEQ ID NO: 105849 - RNA, 55 nt, Homo sapiens
aagaccagaggaagcgacagagagaggcagggaacccacccaccacccagggcac

SEQ ID NO: 105850 - RNA, 80 nt, Homo sapiens
agcgcacgaggaggcgcgcagaaccagaccgggagcacgcacccacgaggggacggaacggagagggggaccaacacagc

SEQ ID NO: 105851 - RNA, 50 nt, Homo sapiens
gcgcgacccacagggaaaacagaccgccagaagccagcgaagagaggggg

SEQ ID NO: 105852 - RNA, 69 nt, Homo sapiens
agccgaggacacccgcgcacagaggagcacccgaagaagacaagacaggggaaagacagcccagcagaa

SEQ ID NO: 105853 - RNA, 77 nt, Homo sapiens
cccgcacagccccagcagaggacggacacagaggacgaccgcccagcgggaagaggagaagagaagaggcaacgggg

SEQ ID NO: 105854 - RNA, 75 nt, Homo sapiens
aacagcaagaaagaccacaagaccaacaccacggcaaggacaccaaaaggcaggcgacacggcagacccaaaaaa

SEQ ID NO: 105855 - RNA, 84 nt, Homo sapiens
ccagaggacagagcaaggagcaggagcggcagagcacacgaccgaaaggaaagccagaagcagccgccggccgcgaccggagaa

SEQ ID NO: 105856 - RNA, 73 nt, Homo sapiens
agccggggcaccacagagagcggagagagccaacgcagaaaaggaaagaacggaaacaaaccaagaaggaaac

SEQ ID NO: 105857 - RNA, 76 nt, Homo sapiens
agcaaaggaagacgaggaacgcaaggcggggaaaaaaaggcagcacacagacgcagcaacgggcacgcaaccaaga

SEQ ID NO: 105858 - RNA, 77 nt, Homo sapiens
gggaccaaggggcaggaccaacagaaaaaaccaacagacaacaagagcccaaacaagaggccccagcagaacaccca

SEQ ID NO: 105859 - RNA, 81 nt, Homo sapiens
ggcccagccggaagaagaacggaaaagacgacggagaagaaaaaaaagaaaaaagaagaaaaaagaaaaagcagaagagca

SEQ ID NO: 105860 - RNA, 75 nt, Homo sapiens
ccagccagcgacgggaccagcagcggcggccagaggaaacagagacccagacagaaacggacacgaccaccaggc

SEQ ID NO: 105861 - RNA, 72 nt, Homo sapiens
cggcgccaccggcgacccccccccagcaccgggcagaacagcgaacaaccaccccccaaccacgggagcgga

SEQ ID NO: 105862 - RNA, 71 nt, Homo sapiens
cacaccccggaccgagggacgcggagcagaaaaccaaggagcaggccccgcgccaccgccagggaagagcc

SEQ ID NO: 105863 - RNA, 71 nt, Homo sapiens
agacaaccgggcacagggagcgcacccgaacacccacaaagggacaggacaagcccggggggccagacggg

SEQ ID NO: 105864 - RNA, 85 nt, Homo sapiens
ccggggcgcgcgaccaggcggacaaggaggccggcggcagcgacgggccccgagggagcaggaagaagagagccaagcgaacgcc

SEQ ID NO: 105865 - RNA, 51 nt, Homo sapiens
cggcacacgaaaccacgacccacagaaaggcaagcggcagccacacccgga

SEQ ID NO: 105866 - RNA, 70 nt, Homo sapiens
gaccacagcggaccgccccccacggcggagaacggaaaagcaccaggaagcagagaggaccgcagaaggg

SEQ ID NO: 105867 - RNA, 76 nt, Homo sapiens
ggaaggcaggccgggcggccaccgggaggcaaggaggcgcggagagcgcaaacgggccaccagggcggaccacaag

SEQ ID NO: 105868 - RNA, 73 nt, Homo sapiens
caagaacacaaggacacagacaaagaaccaccaaccacagccgaggaacaaaacacgaggggccgacgaaccg

SEQ ID NO: 105869 - RNA, 79 nt, Homo sapiens
gagagccacacaacccacccacagcaccaagcagcaagaaaaacggggcacacagcaaaaaagcggacacagcccagca

SEQ ID NO: 105870 - RNA, 74 nt, Homo sapiens
ccacggacaagaaagcgccaaaaacaacaccaaaaagccgcagggaccacccaagaagaccaaggcccaaaagg

SEQ ID NO: 105871 - RNA, 87 nt, Homo sapiens
acaacagcaacagcaagaagaagagcccagcagcacccgccccccagccaggaccgcagaagaagagcaacaagagaaaggcggcgg

SEQ ID NO: 105872 - RNA, 73 nt, Homo sapiens
ggcacagcggaggcgacacccagagagcccagaaacacgccaaaaagaccagggggaagaagaccccagacga

SEQ ID NO: 105873 - RNA, 69 nt, Homo sapiens
ggagcgaaggccggaggacaaggccccgggggcgccgagggcacaagggcaacgacagaagggcgaagc

SEQ ID NO: 105874 - RNA, 77 nt, Homo sapiens
gccgcgaaacacaccagaagggaagaggagcggaaaaacaagcaaaagaaaaacagggaaagaggagaaagaaagga

SEQ ID NO: 105875 - RNA, 93 nt, Homo sapiens
cagggaggagaccggcacccagacaggggcgaaggcagaggagcaaaagcagaccggaaaacccaccggcaagaccacacccgaggggagccc

SEQ ID NO: 105876 - RNA, 81 nt, Homo sapiens
ggacagcgagcaaccaagcgcagccaagaagcgaaaggccaggccaccacggacggcagggaagagggcaaggcagccgga

SEQ ID NO: 105877 - RNA, 76 nt, Homo sapiens
gagcaagagggcggaggccacgaacacgccggagccgccagcagaaagcgaagcagaagccgagaacagcggcgag

SEQ ID NO: 105878 - RNA, 38 nt, Homo sapiens
cccacgcggggaaaccgagagaccgcaacagaacagag

SEQ ID NO: 105879 - RNA, 75 nt, Homo sapiens
acaggagcccacagccgaacgagggaagaaaaggcaaggcgccacaggcaaggggaagagcgagcaaaggaaaac

SEQ ID NO: 105880 - RNA, 76 nt, Homo sapiens
aggagaaaacccagacagaacaccacgagaaagcgcgggggagcaaaaacagacaagccagaagcgaaccgggaag

SEQ ID NO: 105881 - RNA, 83 nt, Homo sapiens
agcgcagagaaggacaccgcaggagcgcccagaaggcgcccagagaaggcagaaccagcgagcaacagaagcgagacagcagg

SEQ ID NO: 105882 - RNA, 58 nt, Homo sapiens
agagaccccaacgggaaggccgccccggacgggcccccacgacccgccccagccccca

SEQ ID NO: 105883 - RNA, 73 nt, Homo sapiens
cggcaccagacagaagacacggcccaggaacaagcagaaagcacgaacaacgagaacaagacacgagcaaacc

SEQ ID NO: 105884 - RNA, 72 nt, Homo sapiens
ggaacagaaccaaacaagacaacgagcgaaagcgaaaaacagcgaccagaaaggaggaagcaccggagcaaa

SEQ ID NO: 105885 - RNA, 78 nt, Homo sapiens
acaccccgcacgagagagcagcacgcagcaggccagagagccccgacgccgcaggaacaggcagaggagacaccgcgc

SEQ ID NO: 105886 - RNA, 83 nt, Homo sapiens
cccccaggcccaaagcggcggagagaagcagagcaaagcggcagccccggacagggagggccgaccaggaggacagcaagccc

SEQ ID NO: 105887 - RNA, 119 nt, Homo sapiens
gaggaggcgcacgaaagcccgacggggaaggcgcgggccggagccggagacgccgagcggggccggagcccaaaaggcagagcgaggagagaagaaggagggaaagccaaacaacggac

SEQ ID NO: 105888 - RNA, 78 nt, Homo sapiens
ggcgggaggccaccgccagaccgaggaagccgacaggaccgggggcacggaggggaagcacccagaacccccggagac

SEQ ID NO: 105889 - RNA, 84 nt, Homo sapiens
cgaacagccgacggggcgaccgccggcccaggggcccgaagagccaaccacaggagggaaaccacgcaggcaaacgagaaaaag

SEQ ID NO: 105890 - RNA, 72 nt, Homo sapiens
cccagggccggaaaagccaacgccggcgaaggacggccggcgaggcccgcagcgcaggcaagcaggaggccc

SEQ ID NO: 105891 - RNA, 72 nt, Homo sapiens
cgcgggccgcggcgcccggggaaagccgggccccgagggcggaccgagggaagaagacgccgaacaacagcc

SEQ ID NO: 105892 - RNA, 81 nt, Homo sapiens
ccggacacgaaagccgggaaagccaggagacgacaaggcgggcagggggagcggcgcggcagagcgggcaggagaggccgg

SEQ ID NO: 105893 - RNA, 76 nt, Homo sapiens
aaagaaaggccaaagcagcagggaaaggaggacaaaaggaaaaaaaaaaagggaagacagagaggcggggaaaggc

SEQ ID NO: 105894 - RNA, 63 nt, Homo sapiens
aaggagagagcacaacaccacacaaaaaaggccagagaaacagcaaaaagacaagccgcaaag

SEQ ID NO: 105895 - RNA, 115 nt, Homo sapiens
cagaggcgcggggggagcccgcgggcgcgcagagcgggccgggggaggccgggaggagccccgcggagccgacaaccccggaacgcgggcaaaaggccccaggggaccgggggag

SEQ ID NO: 105896 - RNA, 74 nt, Homo sapiens
caagaagccgcaggaacaaagaaaggaaaggcgcccgaaggggcagaccaacaccacccagcaaaaaccccgac

SEQ ID NO: 105897 - RNA, 78 nt, Homo sapiens
caggcccagaggccggcggcagcagcccagagcgcaaagaggccgcggacacgcgggcccgccgagcgcgagccccgg

SEQ ID NO: 105898 - RNA, 76 nt, Homo sapiens
gcagccggagcggaggagacgggccgcacccgccccccgcgcccgccaccggccgccgcccgacaggagaacggcg

SEQ ID NO: 105899 - RNA, 83 nt, Homo sapiens
aagggcccgcggccaccggcaagacccacccgccacggcaccagacccaccaagacaggggagcgcccaggcagcccaccacc

SEQ ID NO: 105900 - RNA, 83 nt, Homo sapiens
cggacgccggagaggcaccggaccgcccccaggcccgccgccagagggacaggagccaggccagaaaaggacggggcgggccc

SEQ ID NO: 105901 - RNA, 76 nt, Homo sapiens
caacccaaccacgacggggccgacgagacccagaaaagacaagcggagaaaggaccgagggcagcagacgaagaag

SEQ ID NO: 105902 - RNA, 76 nt, Homo sapiens
gccacagagacaagagagagaacaccaccgaagccacaccgaagagccccagcggcccggacaaaaaagcgcgacc

SEQ ID NO: 105903 - RNA, 77 nt, Homo sapiens
acaaggccaccaaacgagagcagccaacgcgggaagcaaggagacaagccgagagcccccaaacacgcagcgcagac

SEQ ID NO: 105904 - RNA, 68 nt, Homo sapiens
agcgagggggggcgcgccggaaaccggagcgcgcagcagacgcccagaagagcacaaagaaccaacgc

SEQ ID NO: 105905 - RNA, 75 nt, Homo sapiens
aggcgccggggggggacaaggccaggcccccaccgcaccaagaggggccccaggcccgccggcagggacaagcag

SEQ ID NO: 105906 - RNA, 82 nt, Homo sapiens
acccggaaccgcgacggcggcagggcacgagggaacacaagacccgcaagcgagcagggcccggacccccaccggccgcacc

SEQ ID NO: 105907 - RNA, 81 nt, Homo sapiens
ggggaccgcccggacacaagaaaaagagcgaaaaagacacgccgggcacaaccccaagagggaaaacacccagaaccacca

SEQ ID NO: 105908 - RNA, 73 nt, Homo sapiens
gcgacagccacaggagacacgcgcgcacgaagcccagaaaggggaggcaagcacggaccaggagaacaaaacc

SEQ ID NO: 105909 - RNA, 73 nt, Homo sapiens
gaaagccaaagaaggagccagaaaggaggacacagccacggagagaccacggggggaaggaagcgagacccgg

SEQ ID NO: 105910 - RNA, 74 nt, Homo sapiens
cgagggcacgggcggcagcccgagaccgcagcaggggcggggggaaaagaacgcaggcaaacagacacaaacca

SEQ ID NO: 105911 - RNA, 67 nt, Homo sapiens
cggagccagcgcgcagaccagcggcgagacacagccagcgcgccagaaaccggggaacgagaagaga

SEQ ID NO: 105912 - RNA, 77 nt, Homo sapiens
cgggccagaccccagcaggcggcccaggacgaacaaagccagccagggccacaggcccggggcacaaagcgagcgcc

SEQ ID NO: 105913 - RNA, 43 nt, Homo sapiens
gcccggccgacccgcggcccgggaagagcggaagccggcgaag

SEQ ID NO: 105914 - RNA, 62 nt, Homo sapiens
gcagcgcaaaaacagccggaaggcaacgggacgcagccacagagggacgcacccggggacgg

SEQ ID NO: 105915 - RNA, 73 nt, Homo sapiens
aacaaccagaaccaaacggcacaccagcaggggaagaacaaaacaggggaacaaaggggaaaaaagcagcgga

SEQ ID NO: 105916 - RNA, 84 nt, Homo sapiens
gccaagccacccaggaaggaaaaggcgcccgagagccgcggggaggggcgaccccggggcccggccagcacgaccgaggagggg

SEQ ID NO: 105917 - RNA, 80 nt, Homo sapiens
agcgacagagacaagcgagcgccgcacaaaaagcagagagggggggggcggaggcgaaggccagaccgcagaaaaacagc

SEQ ID NO: 105918 - RNA, 75 nt, Homo sapiens
gaccgcgcccgcgccggcgcacggcggccgcggcgcggcgccacgcaccgaggagcaacacccccagggagccca

SEQ ID NO: 105919 - RNA, 57 nt, Homo sapiens
ccgagcccgacaaccgaggacagcccaaggcggaaaagcgaaggaagccacaagcac

SEQ ID NO: 105920 - RNA, 79 nt, Homo sapiens
caaggaaaccggagaggcggagccacaagcacgcggaagagccagcaacggcagagacaccagagcaaccagaccaggc

SEQ ID NO: 105921 - RNA, 71 nt, Homo sapiens
cagaggcaacgcccaaaagaagaccaacaagaacacacgaggacccaaggccagccagccccaggcaccag

SEQ ID NO: 105922 - RNA, 81 nt, Homo sapiens
gcgaccacccggggccgcggaccgcacgcagcagcacacacgagcgcgaccccaaggccggggggggcacagagccccgga

SEQ ID NO: 105923 - RNA, 73 nt, Homo sapiens
ccgggccggaggagggaggaggagggagagaagaagggggagagagccggagcagccccgaaaaaggcacgca

SEQ ID NO: 105924 - RNA, 70 nt, Homo sapiens
accgaacagcaacacgggaaaaaccgagaaaaaacgcaccagcaaacagagaaacacccagcccagccga

SEQ ID NO: 105925 - RNA, 69 nt, Homo sapiens
agccgacggacggccggcgagggcacgggcaaagaaccacgaccaaggcagaaaaacggaccagagaca

SEQ ID NO: 105926 - RNA, 61 nt, Homo sapiens
cgaggagaaccaacggcccgaaagaggaaccaggagcccaggacagcaccagcacgaccag

SEQ ID NO: 105927 - RNA, 71 nt, Homo sapiens
aggcagaaggagcaggacgaaagcgaaagagaagcggagaagggcagaagaacagagaacgaggaagaaaa

SEQ ID NO: 105928 - RNA, 45 nt, Homo sapiens
cgaacccccacccacccccaaaggaccgaaggagaagaaggagaa

SEQ ID NO: 105929 - RNA, 105 nt, Homo sapiens
gaagaaggcgcagcagaggggccacgcgggcccgaggcgcaccaagggcgaaggagccggcccaagggacacaacccgccacgcggagcacgccaaaggagccga

SEQ ID NO: 105930 - RNA, 76 nt, Homo sapiens
cggcgcaacacaccacaagcccccgccacgcgggcccaaacacgacggacaacggcccgccaagcgcccccgggca

SEQ ID NO: 105931 - RNA, 79 nt, Homo sapiens
ccgcaggagaccagacccacgacccaccgaagaagaacaccagcaggaaaaaagagcggcagaaggccaaacggccgag

SEQ ID NO: 105932 - RNA, 60 nt, Homo sapiens
cgcgcccacggccccgccagcaaggcggcgcgcccaggaggcagccccaggagcgacagc

SEQ ID NO: 105933 - RNA, 81 nt, Homo sapiens
gcgcccggccaagaggcaaaggggaggacgcagcaaaccaccagaagaagacaccaacccaggcgcaggaccgacgggcac

SEQ ID NO: 105934 - RNA, 72 nt, Homo sapiens
gagcgggggcgggaccccgccgcggcgggaggacgcaaaacaaaaggggccaaggacgcacacaccagagaa

SEQ ID NO: 105935 - RNA, 77 nt, Homo sapiens
aaaagcagcccagccgcaggccagcccagcccagagaaaggaacgaagacacacacgaaaggccaaaaggagaagga

SEQ ID NO: 105936 - RNA, 74 nt, Homo sapiens
ccgaccaccccaagaacccagcccacaccacaacacagaacgaagagaagaagcgagagccccaacaaccgcgg

SEQ ID NO: 105937 - RNA, 71 nt, Homo sapiens
cgcgcgcggacgaagagccccccccccaacaccgcgacacgcaggacaaaccggcgaccacacacggggac

SEQ ID NO: 105938 - RNA, 85 nt, Homo sapiens
cccgcgccaggaggaccgcaggaggacgcagacggagccgccagacccacccggacccccagaaaaggaaacaaggaacaacaaa

SEQ ID NO: 105939 - RNA, 70 nt, Homo sapiens
gaagaagagaacccacagagaggaaaaacagggaaaaacaagagcagggaagaacgagagagaaaagaga

SEQ ID NO: 105940 - RNA, 45 nt, Homo sapiens
gaaggaccaagaaccaggaggaaaagcgggcgcagcgcgcggaca

SEQ ID NO: 105941 - RNA, 82 nt, Homo sapiens
gcaggaagcccagacaccaggaaaccccagaggaggcgggcccggagcaggcaagggggccgacgacgagccccgcgaggag

SEQ ID NO: 105942 - RNA, 37 nt, Homo sapiens
ggacgaagaagagaaggaaggaaaggaagggacgaag

SEQ ID NO: 105943 - RNA, 82 nt, Homo sapiens
cgcaaacacggacacccgccgaaggagcccaggaagagcaaagccgagcgcaggcgggcggcagcggcggcggaaccggggc

SEQ ID NO: 105944 - RNA, 52 nt, Homo sapiens
aacgccacgcgggccggcgaaagcggggccggaaacgcaggggccagggagc

SEQ ID NO: 105945 - RNA, 69 nt, Homo sapiens
acacgacgcacggggccaaaacagacccacaacagccaaggccaccgagccacaagaccacagcaccga

SEQ ID NO: 105946 - RNA, 77 nt, Homo sapiens
aaagcagccacacaacagccagaccgaaaagggcggaaaaggaccaaggcccgcaaaagggcgcgaacaacaacaac

SEQ ID NO: 105947 - RNA, 72 nt, Homo sapiens
gggcgaggaggaaggaccgcgagaaaacacaaaccgaaaggaaagacgagccacagaccacccaaggccccc

SEQ ID NO: 105948 - RNA, 72 nt, Homo sapiens
agagggcaaaaacagccccaaccgcgaacggacaaaagacagggggagcagcagaaacacacaaagcggaaa

SEQ ID NO: 105949 - RNA, 77 nt, Homo sapiens
gagcaccacgggcaggaaggcagcgcacgacagcaaaagccgcaaacgcggagaggggccacagccaaggacgcaag

SEQ ID NO: 105950 - RNA, 79 nt, Homo sapiens
aggaaacccagcaaaacaaaccgaggcgagacaaccagcaacacccccaaccccgcccaccaaagcaaggcaagaaaga

SEQ ID NO: 105951 - RNA, 63 nt, Homo sapiens
gggagcacagcgcggaagccccgaggcagccccgcggaggagcagaagaccaggccgaaagac

SEQ ID NO: 105952 - RNA, 73 nt, Homo sapiens
cggggacggagcccgacaaaaaccgcagccaccaccaaggggccgaccaacaacagcggagaccagaagacga

SEQ ID NO: 105953 - RNA, 78 nt, Homo sapiens
acgccccgcgggaccccccgccggaccccacagcaacaagggcggagaacggaaaagcaccaggaagcagagaggacc

SEQ ID NO: 105954 - RNA, 73 nt, Homo sapiens
aagaggcgcggccggaggaaaccaagacagcccaaacgccccacgaccaggacaccaacacgcggaagcccca

SEQ ID NO: 105955 - RNA, 76 nt, Homo sapiens
gggaacgggagggggaaggagaagaagcaccaacaggaaaaacggccaaagaagggccaagccgggaaaaagagaa

SEQ ID NO: 105956 - RNA, 75 nt, Homo sapiens
cgcccgcgcggcgcggggaccgcggcccgggacaggagagagggcaagagacgacaagcagagagaacaccaggg

SEQ ID NO: 105957 - RNA, 78 nt, Homo sapiens
cagccccacgcggccacggccagggaacaaggcgccggaccgaaggcgcgaccacgacgagaagcgggggccgcagcg

SEQ ID NO: 105958 - RNA, 77 nt, Homo sapiens
aacggcaggggagcagaagaggaagaagcagaacgggcaggcgcggagcaaccacacagcaggcccccaagcgcagg

SEQ ID NO: 105959 - RNA, 82 nt, Homo sapiens
aacccacgggagggacccgcgccggaacagggaaggaaaagcaacaggggaagcaacacaggaaaggggaaaaggaaaaccg

SEQ ID NO: 105960 - RNA, 77 nt, Homo sapiens
cgcgcgcgcgcgccgggccagggaggcgcaggagcgggcagccaggcagccgcccgacgacaaggccacggaagaag

SEQ ID NO: 105961 - RNA, 70 nt, Homo sapiens
gagcggccaaccaaagcggaacacggcagaaccgacggaagaacgccggagaggaaaacccaccaagcgg

SEQ ID NO: 105962 - RNA, 74 nt, Homo sapiens
ccaaaggccaacacaagacaagccagcagccgccagacaagaggggaaggaaggaggagaacacacacagaggg

SEQ ID NO: 105963 - RNA, 76 nt, Homo sapiens
ccgaaaacaccaggaaagacaggagaccaaaaagcggagccggagcgaggcgggggaggcagcagaagcccgcccc

SEQ ID NO: 105964 - RNA, 40 nt, Homo sapiens
acaaagaagacccaggaacgcgaagagacccccaggccaa

SEQ ID NO: 105965 - RNA, 76 nt, Homo sapiens
acggcaggaacccgcgaagcgggaaggggcccgaaaaccgaaggaaaacgaacgagggaaagacaggcgagcccag

SEQ ID NO: 105966 - RNA, 85 nt, Homo sapiens
aagaaaccgagccaccagcaggccagaagcggacccagaagaggggagcagcaaggaggaagacagccggggccggaggggagcc

SEQ ID NO: 105967 - RNA, 70 nt, Homo sapiens
agaggaagcgcgaagacagcagagcccggccccaccgcgcccgcagagagaggcaccagagccggacccc

SEQ ID NO: 105968 - RNA, 81 nt, Homo sapiens
ccaggggcccgcaggccaagccagcaagacccaacaaaaaagaaacagcaaacaagaggaagccagaaagacacacaggag

SEQ ID NO: 105969 - RNA, 71 nt, Homo sapiens
caccgcccccccacccagcacccgggggaaagccgggaaacggccgagccgagaaccagcccacgcgggcc

SEQ ID NO: 105970 - RNA, 76 nt, Homo sapiens
ccggccaccggcgggcccgaggagagcgcggagccgcgcccccgggcggcagagaggccccgagacccagaacgca

SEQ ID NO: 105971 - RNA, 68 nt, Homo sapiens
cgcgccccgagagaacgaggaggagccccacccgcgcaggggaaccagaagaggccaaccagcacgaa

SEQ ID NO: 105972 - RNA, 78 nt, Homo sapiens
acaaacagcacgcggacgacccccacagagcccagaccgaagggaaccagcagcgagaggaacgaaggcaacgagcag

SEQ ID NO: 105973 - RNA, 76 nt, Homo sapiens
cgccgccgcgcccacggccccgccagcaaggcggcgcgcccaggagggcccgccccgaagaacaaggcccagaccc

SEQ ID NO: 105974 - RNA, 66 nt, Homo sapiens
cgcagggcgcccccgcaccagaagaaaggagagagccgaaagagaaaagcgcgcgcaaaagaggag

SEQ ID NO: 105975 - RNA, 78 nt, Homo sapiens
cacaaaagagcagaggaggaacaccaggcacaaggaaccgaccgacccccaagagaaaaccagaaagaacaaaaagcc

SEQ ID NO: 105976 - RNA, 78 nt, Homo sapiens
ggaaccagcaacaagccagcagaaagaggaagaagcaagccggacccacgacggcaggaaaggaggccaggacggaga

SEQ ID NO: 105977 - RNA, 76 nt, Homo sapiens
gaccgagaggcgccggcgacaagagccggagacgaaaagacggaaccagcaggagcgcagagccggcagcccccaa

SEQ ID NO: 105978 - RNA, 79 nt, Homo sapiens
gccaaaaaagcccaggaagaagacgaggaggacagggcagaaaagaccgggaaaaaaacgccacacagcagggaaggag

SEQ ID NO: 105979 - RNA, 44 nt, Homo sapiens
ggagcacaacaggcagacagacaaggcggaagagcgcgggaggg

SEQ ID NO: 105980 - RNA, 62 nt, Homo sapiens
gcgacgagagagaccggagaggggagagaagacgaccccgacgcaggccaggagccgcggac

SEQ ID NO: 105981 - RNA, 58 nt, Homo sapiens
cagacccacaaccgagcaaagaagagacgaaaaacccccacgacgccaccacacaacc

SEQ ID NO: 105982 - RNA, 51 nt, Homo sapiens
aacacgagcaggggcccaaaagacgaacaaaggagccggcagacagcaaca

SEQ ID NO: 105983 - RNA, 44 nt, Homo sapiens
cgacgccaggcagcgcccccaaacggccccggacgggcaggcag

SEQ ID NO: 105984 - RNA, 79 nt, Homo sapiens
aagaaaaaaaagcaaggccacaggaagagaaagaggggagaaaaagggaggagagaagaccacaaaaagaggaggacac

SEQ ID NO: 105985 - RNA, 33 nt, Homo sapiens
ggcgccagacagcagcggggagccaacccagcc

SEQ ID NO: 105986 - RNA, 70 nt, Homo sapiens
gaacaaccgagagccgagagaggacgccaccagcacagagggcagcgaaccagaccggaacaagaccgaa

SEQ ID NO: 105987 - RNA, 57 nt, Homo sapiens
ccccaaaccccaacaagcaccaccccagacgacaggcagaccggaagaccaggcccc

SEQ ID NO: 105988 - RNA, 77 nt, Homo sapiens
ggagaagacggcaaaaaacgcgaacaccagggagggagagccacgaggaacagaggggcgaccaaaggacgaaaggg

SEQ ID NO: 105989 - RNA, 78 nt, Homo sapiens
caaaccgcagccgggaaagacgggcggggcaccggcccacggggggccagcggccgggcccagcggggaggacgaggg

SEQ ID NO: 105990 - RNA, 79 nt, Homo sapiens
cggaagagacgaggcggaacaccgcacagagcagccggacgccccgaccaagccgaccgagaagcccggccccaaagaa

SEQ ID NO: 105991 - RNA, 74 nt, Homo sapiens
gaggaggaggacaaggagggggccgggcgcgccccgcaaggacaaggcacgaggcgcggcgaccaccacagcag

SEQ ID NO: 105992 - RNA, 61 nt, Homo sapiens
gcccaacgaaaaccgccaggaacagacgccccaccaggccagcggggcgcagagagaaccc

SEQ ID NO: 105993 - RNA, 51 nt, Homo sapiens
aggcaacaggaggcaacgggggcaccaaagcggggggagggcgaaaaaaag

SEQ ID NO: 105994 - RNA, 82 nt, Homo sapiens
gagagccgcgcgcggacagcgcgacggcgcgcgggcggcgcggccggcagaccagccagccccaagcagccgcacgacaaag

SEQ ID NO: 105995 - RNA, 90 nt, Homo sapiens
acacacacaaccccacaggcacgccgaaaccgcaaaccccaaagaggcgacaggaagaagggaacagccgccggaagccgagaggcgcag

SEQ ID NO: 105996 - RNA, 52 nt, Homo sapiens
accacagagacccacaagcgggaaggcagccgacggaggagaaagacgccgc

SEQ ID NO: 105997 - RNA, 74 nt, Homo sapiens
cccaagaaagagagagacagaagccacagaaaagaaaaggagcgcccagacacaccgcccaccaacgcgggacc

SEQ ID NO: 105998 - RNA, 73 nt, Homo sapiens
cgaaacgcggacaacccgacacccacaccacaaccggccggccggcaacaccgagcaggcaaccccggccaaa

SEQ ID NO: 105999 - RNA, 70 nt, Homo sapiens
ggcggcccccgcccgacgcccggcgcacggggcgcacaccacggcccgggcccacacagcgagccgcaaa

SEQ ID NO: 106000 - RNA, 76 nt, Homo sapiens
acaagaaaaacaggaggacccaacaggacgagcacaaaacgcgacacagaaacaaaaaccaagccccgacaaaaga

SEQ ID NO: 106001 - RNA, 76 nt, Homo sapiens
cggaggagcacccaaccccgcgagcggggcccggcgcacccaccaccgccgcccacggcagcccagggacccgagc

SEQ ID NO: 106002 - RNA, 76 nt, Homo sapiens
aggaacaaagacagcccaccaggaagagcgaaaaaccccaccaggaccagaaaacgccaacccagacaggacccaa

SEQ ID NO: 106003 - RNA, 80 nt, Homo sapiens
agagaccggaagcacagccccgaggggcgaagccaccaaaggaccacagggcacggggaaacggcacccagaagaacaac

SEQ ID NO: 106004 - RNA, 74 nt, Homo sapiens
acccaccgagacggccacagacaacggaggaacaagcgggaaacggagccaccaacaagcgggagaaagacagc

SEQ ID NO: 106005 - RNA, 51 nt, Homo sapiens
cgcagggcgcccccggaaccgcggggggagaaaccagcccgggggccgcac

SEQ ID NO: 106006 - RNA, 67 nt, Homo sapiens
ccaaacgagagcagccaacggcaccccagaaagaagaaaggccccgaacggaagcagaagagcgaaa

SEQ ID NO: 106007 - RNA, 53 nt, Homo sapiens
gagcacagaacgaacacgcacagaaaggacgaacgagagccaacagaagcaac

SEQ ID NO: 106008 - RNA, 79 nt, Homo sapiens
ccgcccgggagacggagcgaaggccggaggacaagcgcaaagccgaaaaacagcagcagaggaaagaaaagaccagagc

SEQ ID NO: 106009 - RNA, 78 nt, Homo sapiens
agcagaagccaggagaggggcggaacagggcgagacgaacaacgcgcgcaggagaccaccaagccacaggcacccagg

SEQ ID NO: 106010 - RNA, 74 nt, Homo sapiens
acgccagaccaaaagagcacaaaaccaacgggaacagcggacaagaacgagcgggaacgacacgcaggccgcac

SEQ ID NO: 106011 - RNA, 52 nt, Homo sapiens
aaaccggaaagcaccagccggaggcagagggcaccacagacaagaaagcccc

SEQ ID NO: 106012 - RNA, 77 nt, Homo sapiens
gggagcaccagcgcgccacgacccgcagacaagaaaggcccccacagagagcacacaaacaaagcgaaaccacggaa

SEQ ID NO: 106013 - RNA, 89 nt, Homo sapiens
gaaggagagcccgccaaggcacagcagagcagggagaagagcaaccggcccacagccgcaggggcccagcagcaggccaaggagcgcgg

SEQ ID NO: 106014 - RNA, 94 nt, Homo sapiens
gccaaaaacagaggagaaaaggcggacagcagcgcaggcaaaaaacagagagcagcagaggccgcacccacacaagcaacagaggaaggagcag

SEQ ID NO: 106015 - RNA, 65 nt, Homo sapiens
cccaacccacgagaggacagcccaggagaaagacagcaaagaaaaggagaagaaaggaaaaaaac

SEQ ID NO: 106016 - RNA, 78 nt, Homo sapiens
aaacacaccaggaggggcaacaaaccaccccaacacccaggaaccagagacaaagcacccagaagggaagaagacggc

SEQ ID NO: 106017 - RNA, 61 nt, Homo sapiens
ccacccgcccccaagaaggaagcacagggccggccggaacagcgccacccgacagagaaaa

SEQ ID NO: 106018 - RNA, 71 nt, Homo sapiens
acccacgcgcccgggagcacgagagccaacggcacgggaagccaagggcacggccgccggggaagaccggg

SEQ ID NO: 106019 - RNA, 81 nt, Homo sapiens
agaagcccagagcacgccgaagccaccagacggccacagagcaaccaaaaaccggccgcaggcacaaaagaagacgggaaa

SEQ ID NO: 106020 - RNA, 67 nt, Homo sapiens
ccagccaggaggcgcccacagaagcccgagggaggcaaagaagcagcaccgagcccaaaagaagaaa

SEQ ID NO: 106021 - RNA, 82 nt, Homo sapiens
cgagacggagcagagccgcgggcgccggagccgaggcgagcgccgcgcgcaccacggaggcggacacaaggagggcgggccc

SEQ ID NO: 106022 - RNA, 91 nt, Homo sapiens
gaccgccagcgcagcccacaaaggacaacgaacggagcagaggccaacagccacaacacagcagcccccaggagagcaggaaaagccggag

SEQ ID NO: 106023 - RNA, 58 nt, Homo sapiens
cagagcaagacccacgacacccggaagccgaaaaagccaggacccgaaaagccagcaa

SEQ ID NO: 106024 - RNA, 70 nt, Homo sapiens
gggacgcgcggcgggcagcaaaccaccggaccagagggccccaaaacagacagcccagcggaaaccggga

SEQ ID NO: 106025 - RNA, 78 nt, Homo sapiens
agaaccaccagcaaccaaggacccccaaaaccacaaacgccacgcagaacagccaccaagacggcaaacaaaggaaca

SEQ ID NO: 106026 - RNA, 75 nt, Homo sapiens
ccgcggcgccacccacaaacagggcgccaccccggcccagcccgagggagggacgagaaaaccggaacgggggag

SEQ ID NO: 106027 - RNA, 77 nt, Homo sapiens
ccgagccgcaggaccggaggacagggaaagacaaggagccgggccgagaaaccgaaccagagaccagagaagaaacg

SEQ ID NO: 106028 - RNA, 73 nt, Homo sapiens
aggcgaggcaaacggggggcgcggagggaccagcgagcgggaggcaaggccaacgagcgcacccccaccaagg

SEQ ID NO: 106029 - RNA, 65 nt, Homo sapiens
gaaggaccaagaaccagcccacaggccacgacccaccagccagggcaggacccggcaggagccca

SEQ ID NO: 106030 - RNA, 56 nt, Homo sapiens
accacccagaggagcaacgccggggggggcacagagccccggaagacagcccccag

SEQ ID NO: 106031 - RNA, 99 nt, Homo sapiens
gagccgcgaggacacgggcgcaaccgcagcacacagcgaccgggagaacaagacgaacccggacgcacaaggagcaaagaccgcaggagggcagccacc

SEQ ID NO: 106032 - RNA, 72 nt, Homo sapiens
aaaacgcagcggacagcagcgagcaccagcagcgccgagcaaaccccaccggccaaagggcgggccaccacc

SEQ ID NO: 106033 - RNA, 54 nt, Homo sapiens
agcccgcagcacgaccagcaggaacggcaagcagcgccaaggaaaaagcaggag

SEQ ID NO: 106034 - RNA, 68 nt, Homo sapiens
acaacaaacggaagaacagaacaacaacagaagaagaacaggccagaagaggccgcccaggccccgcg

SEQ ID NO: 106035 - RNA, 63 nt, Homo sapiens
agacaaagaagaggcgccacagcccaaggaaaggcccaggcacagcagacgcacggaggcggg

SEQ ID NO: 106036 - RNA, 68 nt, Homo sapiens
caggccagaggaccacccccaaccccacgccaccgaagagccaagcccagggaccccaccacgccggg

SEQ ID NO: 106037 - RNA, 57 nt, Homo sapiens
agaggcgacggccgccaagggccagcccccgcccgaccggaccgcacgcggcgagca

SEQ ID NO: 106038 - RNA, 71 nt, Homo sapiens
gaagagcaccgggagcggcgaagaggcaccggaggaggcgaagaagaaccgcgaaggacgcgggcagggcg

SEQ ID NO: 106039 - RNA, 115 nt, Homo sapiens
gcccaacaacgaaaaccggaggggaacggcgcggagcggagcggcaggacacacaggaagcgaacgaacaggccaaaggacccagaaaaacccacgaagaaagaagggagcgacg

SEQ ID NO: 106040 - RNA, 78 nt, Homo sapiens
ccccgccgcggggcgcgcggcgccggcggcgcgcgacccccgcgcaggggaagcgacgaggaagccaagcaggccgga

SEQ ID NO: 106041 - RNA, 59 nt, Homo sapiens
gggagacagagccagggaaaccaagaagcggaggaccagacaaagggagcaccagccag

SEQ ID NO: 106042 - RNA, 79 nt, Homo sapiens
aagcgcggcggcgcggcggagaagagacaacgggaaacacacaaagcccagaaggaacaacaagggagaagacgaaaac

SEQ ID NO: 106043 - RNA, 34 nt, Homo sapiens
aggaccacccaccccgggaagaacccaagacaca

SEQ ID NO: 106044 - RNA, 57 nt, Homo sapiens
ccgggaccaggcccgggggcggcggccacgccaaggacggggacacaaaagcaaccg

SEQ ID NO: 106045 - RNA, 72 nt, Homo sapiens
agaccggggcacggacgcacgccacccgcgaccagcaccagcccgaagaagccgggcagaccaggcagcagc

SEQ ID NO: 106046 - RNA, 69 nt, Homo sapiens
gaacgggccgggagcagcagagcagggagacggaggaggaggagaagaagagagagccaaaaggagaag

SEQ ID NO: 106047 - RNA, 73 nt, Homo sapiens
gagaaccggcccggcacagaggcgcccagagaggccgcccgggagggagggaaccgaccgacagcccgacagc

SEQ ID NO: 106048 - RNA, 75 nt, Homo sapiens
agggacgaaaaggaaaaggagagagccagagcaagagcggaccgccgggaggcaagcaggggggcaaaggaaaga

SEQ ID NO: 106049 - RNA, 88 nt, Homo sapiens
acaaagagagcacccaagaagagcaggagcagacagcccagcgagcaaggcgcgcgccaccaagagcaaacagaaccacagaaaaccc

SEQ ID NO: 106050 - RNA, 68 nt, Homo sapiens
ggggaaaagaacgaggcaaagagcacacgccggagccgggaagaaaacgagcacaacagacgagaccc

SEQ ID NO: 106051 - RNA, 80 nt, Homo sapiens
ggccgccaggccggcccgccccaggccgcccccacgggggagcacccagcccacccagaccagaggacaagacaaaggga

SEQ ID NO: 106052 - RNA, 76 nt, Homo sapiens
gagcccccgccggcccggcggccgaggagaagaggggggcggaagaagaaaaaagcgggcacgggcagcacaaagc

SEQ ID NO: 106053 - RNA, 65 nt, Homo sapiens
acagcagcacagagcccaagcgacaggccgaacacgccggccccgagcgaggcaccggacccgac

SEQ ID NO: 106054 - RNA, 89 nt, Homo sapiens
ccgagcggggcgccagagggcgcccgcgccggcagaggaggcgagcacccgccagggagaggaacccccgcgcacccagcgcagaaggc

SEQ ID NO: 106055 - RNA, 77 nt, Homo sapiens
aagcaccagaaaacaggcggaagaagcgagacagagggccaaggcaacacccgacggccgggcccgggaggagcagg

SEQ ID NO: 106056 - RNA, 66 nt, Homo sapiens
gagccacgaaaaagccagaacgagcaagccacacgcaacacacagcgaaggacaggacaacaacac

SEQ ID NO: 106057 - RNA, 82 nt, Homo sapiens
gcagcaccacacccaggaaagcccagaaaaacaaccaccagcgagcaaaaaggcaaagaccaagaccaccaagaagcgcccc

SEQ ID NO: 106058 - RNA, 35 nt, Homo sapiens
ccaaacgggaccaggagcgagaaaagccgacgcaa

SEQ ID NO: 106059 - RNA, 72 nt, Homo sapiens
cggcgcggcaaccggggagcccgccagaaaaggggaagaaggccaaccgggggccaagggggaagggaggca

SEQ ID NO: 106060 - RNA, 75 nt, Homo sapiens
gcacaccgggcagggccgagaggacgccagcggcgcgcaggaggaggcagacgcagacaacaaacagaggaagcc

SEQ ID NO: 106061 - RNA, 79 nt, Homo sapiens
acaacacacaaaaacgcgccgcccaaccggacaagagagaagcgagggacaccgcgccccgggcaccagcagcgcaaca

SEQ ID NO: 106062 - RNA, 61 nt, Homo sapiens
gaagcgacggagaagaaaggagaagagaccagcgaaaagcccaccacaaaccaaacgagca

SEQ ID NO: 106063 - RNA, 83 nt, Homo sapiens
cgagggcgcggcgcgggccgagaaggaagggaggcggacaacaggagccccccagcacagggacgagagacccgaaaggacaa

SEQ ID NO: 106064 - RNA, 81 nt, Homo sapiens
ggccagggcccagcaaagcaacagccaagccagagccgggccccaacaacccggagggcggagaaggaacagggagagaaa

SEQ ID NO: 106065 - RNA, 74 nt, Homo sapiens
aggggccgaggcccaaccgaaagggcacaggccgaaaacagaagagcggagaagcaggcaaaacagcgggggaa

SEQ ID NO: 106066 - RNA, 68 nt, Homo sapiens
ggggaggggcaacacacaacgccgcgcccccacaaggacagggaagcgagaaacagagagacaggcca

SEQ ID NO: 106067 - RNA, 74 nt, Homo sapiens
gcccccaagagcgggacacaggcccaggcagaagacccccccaggcccaaccagacccccaccggagacacgac

SEQ ID NO: 106068 - RNA, 54 nt, Homo sapiens
aaagggccaaagaagggagagagcaaagggcccgagagaccaaacacaccaagc

SEQ ID NO: 106069 - RNA, 70 nt, Homo sapiens
aaccggccccacccgggaggggggagcggcgggaggccaccgccagggagaaagaagagagaccagaaac

SEQ ID NO: 106070 - RNA, 79 nt, Homo sapiens
cacaaccaccgcccccgacaagaccaagagcgagccagagcaaagcaccccaaacaggaggcagagagccgccagaggg

SEQ ID NO: 106071 - RNA, 71 nt, Homo sapiens
agcaacggcaaacaaaaccacaggcacaaagaggcagaaaacacaggaaccaggaacacaagccgacggca

SEQ ID NO: 106072 - RNA, 75 nt, Homo sapiens
gggacacgcgccggaaggggcccgaagcccccgcaggaaccacaacccaaccaggacagggacaagcgcacagcg

SEQ ID NO: 106073 - RNA, 75 nt, Homo sapiens
cggagggaagcgagagcgacaggaagccgccaggaaacccgaccgccccaggggcacagcaggaccagcagggcc

SEQ ID NO: 106074 - RNA, 81 nt, Homo sapiens
gagcgccgaggaggcccgcggggcaaccgccacgagacaccaagaagcgaagcggacggagggggcacaaaacccagagac

SEQ ID NO: 106075 - RNA, 62 nt, Homo sapiens
cgcccggaggcgcacggagagcgggcccgcgcagcccagagacaccaagccgaagagggaca

SEQ ID NO: 106076 - RNA, 64 nt, Homo sapiens
ccggaacacccggaagccgagaaaggcaccaaccagcggacacacggaaaagggacgggaaaag

SEQ ID NO: 106077 - RNA, 82 nt, Homo sapiens
gaaaaaacccagaacacgggagaaaaaggaaaacgcggaaaaccgacacaacagaaaaagcggggaaaacaaaaaaaagaag

SEQ ID NO: 106078 - RNA, 76 nt, Homo sapiens
aacccaaacaccacaccaaaagagggggaacaagaaaaccaagccaggagggaacgcaacacaacccgcacacgcc

SEQ ID NO: 106079 - RNA, 84 nt, Homo sapiens
ggaaaacaacaggggacggcccggcgccgccgcaacagagccccgacgaagggaaaagaggcaaacggaaagcacccaagcgca

SEQ ID NO: 106080 - RNA, 78 nt, Homo sapiens
gaagcagaacgcaggaggagaacgacagaagagaccgacccaaacccacccaagggcaggacgggaagcaggcggcgg

SEQ ID NO: 106081 - RNA, 79 nt, Homo sapiens
aaagagaccggaccagaaaccaggagccacggacaagaccaaaaggcagaggaaagggcgcaggcagaggagcagccgc

SEQ ID NO: 106082 - RNA, 77 nt, Homo sapiens
cagcaccgcagaggcaaggggccaccaggaggccagggggcgccagaccaccgccagcccccaccacaccacaccca

SEQ ID NO: 106083 - RNA, 70 nt, Homo sapiens
aggacagacgaaagggaaacagggcacaggaacgaaacccccagccgcacaggggagacaagacgggaga

SEQ ID NO: 106084 - RNA, 72 nt, Homo sapiens
gaaaacccagacaaagaaccaaacccagccagccacgaacgacgcacggaggccacaacaccacaccacaca

SEQ ID NO: 106085 - RNA, 77 nt, Homo sapiens
gccagggccacaaggggcgggacccagcaacccagaccaggcagaggagaagcgcagcaagcgagggaaagcgaggc

SEQ ID NO: 106086 - RNA, 75 nt, Homo sapiens
ccagagcccaagagaacaacgggaacgcaagcacaggaccagaaacgaaaggcagcagaagaggaaagccagaaa

SEQ ID NO: 106087 - RNA, 51 nt, Homo sapiens
ccggggccagaaggagcgaacaacggaaaggaggcccaagaggcgaaacgc

SEQ ID NO: 106088 - RNA, 82 nt, Homo sapiens
cggaggcgcccggcggagcagaggaaccacacgcgacaggaggaccgcgccaacaggacgaggagaccgaccaggagacccc

SEQ ID NO: 106089 - RNA, 76 nt, Homo sapiens
aaaaccagaaggagagcacagcggcaacagccacaagaacggaagcagaagcacgcaagcagagacagagaggaag

SEQ ID NO: 106090 - RNA, 77 nt, Homo sapiens
cgagaaaaagccgagaaggccagacgggaagaaaacgccagagaagcagagcagcccggagcgaggggagaccgggg

SEQ ID NO: 106091 - RNA, 74 nt, Homo sapiens
aacggaaacaagcgcagagaaagcgacagcaacaaaagaccaacaacagaagcagagccagagagaaaacaaaa

SEQ ID NO: 106092 - RNA, 80 nt, Homo sapiens
cccccacggcggcggggcggaggggcagggcggaccagaagcgagacaaccagccggagccaacagagcgacggagcaga

SEQ ID NO: 106093 - RNA, 75 nt, Homo sapiens
aaggaccaagaaccaggcagcagcgggacaagaaaagaggacccggaaggccagacaggcccaggcgcccgggac

SEQ ID NO: 106094 - RNA, 62 nt, Homo sapiens
gacccccagcagagaggaaaaccagccaaacccagcagacgcgcgggcaaacagacagggaa

SEQ ID NO: 106095 - RNA, 52 nt, Homo sapiens
accccaccagcaccgaaaggggggcgcacacgcagaaagaacagcgaaaaag

SEQ ID NO: 106096 - RNA, 56 nt, Homo sapiens
acagagaagaggacgcggagacaagagacgcaccaaaaacagcgcgggaaccacac

SEQ ID NO: 106097 - RNA, 78 nt, Homo sapiens
aaagggccaaagaagggagagagacgccagaagcagcgaaaaagaacacaaaacggcagaaccagcaaaagacagagg

SEQ ID NO: 106098 - RNA, 69 nt, Homo sapiens
agacgcagggcgcccccgcgggaaggcagccaaagggaaaggaagacgagccagaaagcgcaaggcaac

SEQ ID NO: 106099 - RNA, 119 nt, Homo sapiens
cagcaaggagcccagagagggagggacagcccaagaggggacgagaacaaaggagagccagggccagcccgcaacccccggcgaccacgggcccggcaacagcgcagcggggacaccgg

SEQ ID NO: 106100 - RNA, 64 nt, Homo sapiens
cgcaggcagacaaaagggccaaagaagggagagagacgaccgacacggagcacaaagaccagaa

SEQ ID NO: 106101 - RNA, 73 nt, Homo sapiens
cggggacgcgcccagacgcagcgcagcccggccaagcccgccgcgcccggcacacagagaaaaaaagggaaca

SEQ ID NO: 106102 - RNA, 61 nt, Homo sapiens
acaggacaggagagaaagacggcgggggagcgggaggagccagagcacaccgcaccacggc

SEQ ID NO: 106103 - RNA, 83 nt, Homo sapiens
cccgcgcccagcccgggccccgcgcacagccccagcgcagaaggccgggacagcagaaaacagccagcagaaaaagccaaaaa

SEQ ID NO: 106104 - RNA, 77 nt, Homo sapiens
caccagggaagcaggagaacaaaagggaccaagaaaagagagaggagccggaggccaaggcagaagcgaggaagagc

SEQ ID NO: 106105 - RNA, 79 nt, Homo sapiens
gcccacgcgaagccgaggccccgcaacggcaagaggccggacggagacagagacagagaggcaaacggaaaaaagaaaa

SEQ ID NO: 106106 - RNA, 83 nt, Homo sapiens
ccgcgggggaccgccccgcccggagcgaggacccgcgcccgggcgcgccaggcacagccaagagcggaccggcagcggccagc

SEQ ID NO: 106107 - RNA, 62 nt, Homo sapiens
gcacacccacggaagccaggggagcaacagagggagacccaaagcaggcggaggacgggcaa

SEQ ID NO: 106108 - RNA, 63 nt, Homo sapiens
agaaggacaagggcggggggcacgggaaacacaccggaagacgaaggaagcaagccccaaggc

SEQ ID NO: 106109 - RNA, 77 nt, Homo sapiens
aaaccccagacaaagccgacagaggcaagggacggcgggccacaagcagagaaagaggcgagacccggcgaagcaga

SEQ ID NO: 106110 - RNA, 73 nt, Homo sapiens
ggccgcccccaccggacgaggccccccaaccaggcaagaggagagaccgccgggcgcaggcacaggaacaagc

SEQ ID NO: 106111 - RNA, 78 nt, Homo sapiens
gcggcgccgccacccccccccagcagcaagcagcaagcggaaaaccacggagcgccccgcacggagcagaagaaaaga

SEQ ID NO: 106112 - RNA, 66 nt, Homo sapiens
aaaaacggagggagaaaaagcaagaggaaagcagaaggacacagacaaaagaccaggagagagcag

SEQ ID NO: 106113 - RNA, 78 nt, Homo sapiens
acaagacaccagaaagacagaagcagcgaggcccacagagacgagaaacgccggggggagcccacggggcacccagac

SEQ ID NO: 106114 - RNA, 74 nt, Homo sapiens
agacgcgaaggaacggcaaaggcaagaaaggcaaccacagaggagccaggccgcagggaaacacaaccacacca

SEQ ID NO: 106115 - RNA, 67 nt, Homo sapiens
ggaaaccgacgcagacgaggggacgagccaaaaccgggacagagagagaggcaacaggcgcggagca

SEQ ID NO: 106116 - RNA, 86 nt, Homo sapiens
gccaacacagaccagcaccgccaggcaggaggaagagcgcaggcgccggaagaagagagcggcggcagcaagaagaaagagcggcg

SEQ ID NO: 106117 - RNA, 89 nt, Homo sapiens
gccaccaggagccccagcccaagaggaaccagcagaccagcacgggacggacgagacgacggagaggggaagaggagcagaaggggccc

SEQ ID NO: 106118 - RNA, 85 nt, Homo sapiens
agcgggaggcagccgggccgagccacccgccacccgggcacccagccccacgccagggaaccccacgccacccagaccccaagca

SEQ ID NO: 106119 - RNA, 64 nt, Homo sapiens
aaaaacagaagacgcagcccagggacggggacaagcggcggagcccgaggcacaccgcggcagc

SEQ ID NO: 106120 - RNA, 59 nt, Homo sapiens
gcacaagagcgccccaagcaaggaagcgacagaaggcacaaagagcacacggaacgcca

SEQ ID NO: 106121 - RNA, 79 nt, Homo sapiens
acgccgcgccaccgagccggaccggagacggggccaacagaaggaacaccacgcccagcacgccacaacaggaacacca

SEQ ID NO: 106122 - RNA, 80 nt, Homo sapiens
gccccgacgcgagggcagccccgccagggagagcgcgggcgacggggcgagagagccggggggacagcagacgagcgagg

SEQ ID NO: 106123 - RNA, 71 nt, Homo sapiens
accgccagcgaggcagacacacggggaaaaagaaaagggcgaagacccgaagcagcgcaggaacagaagag

SEQ ID NO: 106124 - RNA, 86 nt, Homo sapiens
cccaaaagccacggccacgggcagcagggaggacccagggaacaagaccgaaggcgacacgcaggcccgcggaggggggcccggag

SEQ ID NO: 106125 - RNA, 74 nt, Homo sapiens
gacgacaggcaaagccgggagaacccaacccaaagccagcaaacagccaggcgccagcgaccaggagaacaaac

SEQ ID NO: 106126 - RNA, 76 nt, Homo sapiens
gccccgacccgagcggcgcgagagaggcagaggacggaagcaaagggcagccaccgaagacagcgaccagacaaca

SEQ ID NO: 106127 - RNA, 72 nt, Homo sapiens
cagcaccagaacacaaaaggaacacccccagagaaaaacgcaccagaagcacaacagaaaaaaggaacggga

SEQ ID NO: 106128 - RNA, 65 nt, Homo sapiens
ggaaaagggcaagggagggacacgacacaagggagagcccagagacaagcaaagaggcaggacag

SEQ ID NO: 106129 - RNA, 49 nt, Homo sapiens
caggcgccccaggagaaggaccgaagggaagaaccccaccaacacacag

SEQ ID NO: 106130 - RNA, 83 nt, Homo sapiens
cccacccccccgcaaaacagcacggaagcgcggacggcgcacgacgagacggcagcgcacgggacaagcgcaagccccggggc

SEQ ID NO: 106131 - RNA, 77 nt, Homo sapiens
aagaaggccacagaggagaggccgggccgcaggaaacgcaagcccggaagcagaagagcacgcgccaagggcacacg

SEQ ID NO: 106132 - RNA, 75 nt, Homo sapiens
gcagcagaacaaagcagccggaaaggagccaagaggggagcacgccggaaagcacagcaagggaaagaacaggaa

SEQ ID NO: 106133 - RNA, 55 nt, Homo sapiens
ggaaccagcagcgcaagcaccaggaagcagcagcggagcagaaacgggagaaagg

SEQ ID NO: 106134 - RNA, 60 nt, Homo sapiens
ggccgggcgccaccccaaaccaggaaagacagcgccggaggaagagcggaaaaggcggag

SEQ ID NO: 106135 - RNA, 56 nt, Homo sapiens
gagccgcagagcgggcaccaggcagagcccccgccaggcccccaaaccaaccgcgg

SEQ ID NO: 106136 - RNA, 85 nt, Homo sapiens
ggagcaaaaccaacgccggccggagcagcagcccgagggcggagaacggaaaagcaccaggaagcagagaggaccgcagaaggga

SEQ ID NO: 106137 - RNA, 66 nt, Homo sapiens
cagaaccacagagccccacacaggagacaaggagcaagccccaccgaacaagagcgaggcgaacac

SEQ ID NO: 106138 - RNA, 88 nt, Homo sapiens
acaaaaaagggcagaagagaagcaggaaggaggcagaggcacaccgaaagggggcagacccaaaggaaacgcacgaaagaaacaggag

SEQ ID NO: 106139 - RNA, 43 nt, Homo sapiens
ccccagccgcaggcccggcggcggcaaaggaggagggagccgg

SEQ ID NO: 106140 - RNA, 86 nt, Homo sapiens
ggaaacccgcgccgaccggggcccaggcccgacgacggcagaaggccaagagaggccaacagaggaacaaggcccgcagaacccaa

SEQ ID NO: 106141 - RNA, 75 nt, Homo sapiens
gaggcccaagacccacaacaaaagagacggggcccgggcccaggcggccgaacccgggcgaagcaacccgccggc

SEQ ID NO: 106142 - RNA, 87 nt, Homo sapiens
gcggccaccccggggacggcgggggccgagcccagagagggaggagaaacagaagcggaacaccccaccagaccacccagcaagccc

SEQ ID NO: 106143 - RNA, 62 nt, Homo sapiens
acgcgacgcgccaaaacccgcccggaaaggggacaccggccaggaggaccagaaaacagcag

SEQ ID NO: 106144 - RNA, 80 nt, Homo sapiens
aaacacaaaaaggggccagagcaagcagcggaagcagacaagaccaacaggggaagcagcagcaaacccagcagacacac

SEQ ID NO: 106145 - RNA, 72 nt, Homo sapiens
ccgcccccggcaccccaaacgcgcaacaaccagagcccagcccagacccccagcgaggcaggagaagccacc

SEQ ID NO: 106146 - RNA, 113 nt, Homo sapiens
agcggcgagcagagggggcgcagccagcggaacacagcagggcagccgaaggagcagagagcgacgcaggggaggacagggaacggcgaggagccaccgggacggccggcccc

SEQ ID NO: 106147 - RNA, 81 nt, Homo sapiens
gggaccacggcaccgccccaggaggagcgagcgacagaaaccaacccaagagcgcccagcggaaaggcaaagaaaaggagc

SEQ ID NO: 106148 - RNA, 77 nt, Homo sapiens
cacccaagagcgaggagccgaggaacccaaccggcaggcacgaaagaagagacagaaagagacaccgaaacaacaag

SEQ ID NO: 106149 - RNA, 72 nt, Homo sapiens
gacggagaggaaccaggagccggcggcacaccggcccccccagccagaacgcccaccacaccaggcccgagc

SEQ ID NO: 106150 - RNA, 82 nt, Homo sapiens
cgcgcccgccgcgggagagagggcggaaaacaccccaaaagccaaaagggaaaggaaaagaccaacaacagcgcaggacacg

SEQ ID NO: 106151 - RNA, 75 nt, Homo sapiens
ggcccagccgggaacccccacgcggccagcgaaaacgcccagacccggccagcgggagggacaacggcccgagga

SEQ ID NO: 106152 - RNA, 61 nt, Homo sapiens
aaaggaggaagggaaagcagcaacacaaccagggcgagaaacagggagaagaaggacagaa

SEQ ID NO: 106153 - RNA, 71 nt, Homo sapiens
gcgagcggaaggggaaccccggccgcgagacgcggcgcgcgcggcaccaggccggaaaaaaaggaacggaa

SEQ ID NO: 106154 - RNA, 70 nt, Homo sapiens
gcaggagggggaagggaaggaaagacagacagaagcacccgcggaccgcaccaggcgcagaacccacgcg

SEQ ID NO: 106155 - RNA, 74 nt, Homo sapiens
agagacacgaaaacggacaaaacaaaagcagggccccccccagggagacaacgaaacgaaaccggccaacgacc

SEQ ID NO: 106156 - RNA, 70 nt, Homo sapiens
agggaggaaggagcaacccgaaaaccagccagacacaaacagaggcaggggaagcacaaaagcgcacccg

SEQ ID NO: 106157 - RNA, 107 nt, Homo sapiens
caagaacaaaaacgaaagaacacacacaggaagcccaggaggcaaaaggcagaaaaaaacgccaagaagccaaaaggcagccggaaggaaagacagcgacaaacagc

SEQ ID NO: 106158 - RNA, 83 nt, Homo sapiens
cacccccggcgccggggccaccccgggccaccacggggagaaggacaagccaccaagaggagaaggcagagcccccccaggca

SEQ ID NO: 106159 - RNA, 71 nt, Homo sapiens
gacaggaaccgaaaagcccaagcgcccccagaccacaaccacagaaacgcgaaaacacaaaaaacaaaggc

SEQ ID NO: 106160 - RNA, 77 nt, Homo sapiens
cccgcgaccccgccggccgagcccaccgagccgcagccagcggggacgagaggcccacgcggaccggcagcgccacc

SEQ ID NO: 106161 - RNA, 96 nt, Homo sapiens
caaagcgaacgaagagcaccgggagcggcgaagaggcaccggaggaggccagcgcagaagacgagaagccaggaggagaagcggcccggcaagaac

SEQ ID NO: 106162 - RNA, 59 nt, Homo sapiens
ccaacgccaggcgccgcccacaggccgacgcccgccgcggccggggaacaggccacagc

SEQ ID NO: 106163 - RNA, 65 nt, Homo sapiens
cggaacagcagagagcacacgagggaccaagaaaggcccagggaccaaagcccggacaaggcccg

SEQ ID NO: 106164 - RNA, 87 nt, Homo sapiens
ccgcgcgcgcccgggaggaaggaacgaggcaaggagcaaagcagcggcgcagcccgggggcgaaccgaccaagaacaacacccagag

SEQ ID NO: 106165 - RNA, 94 nt, Homo sapiens
gaaaaagcagcgcaggacccagggcacgaaaagacgagaacggcagcaggcacgcccgacccccaccagagaccgacacggaacggcaccaggg

SEQ ID NO: 106166 - RNA, 78 nt, Homo sapiens
gcagcagcggcccacgcagaacccgggagaggagaccagaacgaacccccccccccgacccacagcggggccgggccc

SEQ ID NO: 106167 - RNA, 46 nt, Homo sapiens
gacagcacgagcagacagacaggaacagagcagaggcagcagaaac

SEQ ID NO: 106168 - RNA, 79 nt, Homo sapiens
gccacgagcccccaggggacggcgaacgcaggcaggccaaaccagccgaaggggcagacaggagaggagagacgccacg

SEQ ID NO: 106169 - RNA, 75 nt, Homo sapiens
gacagcgagccccacgggaccaagacacccgcgagagagccaagcggaacgggcacaaagaaggcgcaggcaaga

SEQ ID NO: 106170 - RNA, 73 nt, Homo sapiens
ggggcgccaaaaaggaaaaccgccaaggaccgaccccaaacgcgccccgagccccagaggggcacgcccagaa

SEQ ID NO: 106171 - RNA, 74 nt, Homo sapiens
aaccgaggagaagccaggagggaaaagcaggagaaacaagggccaaaggaggaacgcaggagacagagagaaag

SEQ ID NO: 106172 - RNA, 78 nt, Homo sapiens
gccagagagcaaaacgcgacgacaaaacccggcgaagccaggcgagccaccacagcacagaacaaccgccagggaaca

SEQ ID NO: 106173 - RNA, 82 nt, Homo sapiens
caccaagcgacagaagcagaagaaggccaccacaaaaaccaagggacgaggaaaagaagcaaaaccgaagaacaaagaaaaa

SEQ ID NO: 106174 - RNA, 79 nt, Homo sapiens
gccgaacccaaccacgccccagcagcaggaagggaccggagccccgccggacaggagacagaggaagaacccggagcgg

SEQ ID NO: 106175 - RNA, 87 nt, Homo sapiens
cccaggcgcacagggcccggcagccgccagcagaaggaaagggggccagaaagcacgggcagccgggacccggccaagcaacccagc

SEQ ID NO: 106176 - RNA, 79 nt, Homo sapiens
aacggaggccagcggaaccgaaggaagaaggagagacgaccacgcaacagaaaaagagcgcacccaagggaagagcgaa

SEQ ID NO: 106177 - RNA, 79 nt, Homo sapiens
agggcaaacgccggacagccacaaagacccccagacacacacacccaacccaaaccaaggacaggaggccagggcacgg

SEQ ID NO: 106178 - RNA, 71 nt, Homo sapiens
aaaccgggagaagaccgacgaaaagacacggaaccaagggaagcgggccgaggagcccaagagaagaaaag

SEQ ID NO: 106179 - RNA, 81 nt, Homo sapiens
ggagcgccgcggcagacgccgaggagagccccagcgcagcaaagagccggacagacgcgaagcaaagcgccacccagaaga

SEQ ID NO: 106180 - RNA, 58 nt, Homo sapiens
aacacaacccacaaggaaagcaacgaaaaggcaaaggccgaagaggaccaaaacaaag

SEQ ID NO: 106181 - RNA, 55 nt, Homo sapiens
ccaccgggccccgcaggaccccaccaccagcggggcagccggcgcacaaccacac

SEQ ID NO: 106182 - RNA, 80 nt, Homo sapiens
aggaggccacacagaaggacggcccgacggaaggagaaaagaaagccagaaggaaggaagcaacgaaccaagaaaaaacg

SEQ ID NO: 106183 - RNA, 77 nt, Homo sapiens
gcacacagcaaaagagacagacggacaacagcccaacaacacccagaagagcccaggaaggagccaacccggccaag

SEQ ID NO: 106184 - RNA, 58 nt, Homo sapiens
gggaacgacgcgagcagaagagggccaaagagcgcaggcgagaaaggagagacagggc

SEQ ID NO: 106185 - RNA, 52 nt, Homo sapiens
aaagaaggaaaggaaaaaagggccagccaggacccgaaaagccagcaagcga

SEQ ID NO: 106186 - RNA, 82 nt, Homo sapiens
cgggccgcgcccggacggggcccgacacggccacccacgccggaggccggggagccgacgccggcggcgagcaaagaagcca

SEQ ID NO: 106187 - RNA, 77 nt, Homo sapiens
ggcaggaaccaccaggacagaagccacacaggagaacagcgggacccgccaccacaaccaggagccggggcaacacg

SEQ ID NO: 106188 - RNA, 79 nt, Homo sapiens
accagcaggcgggacccgcaccggaaggccacgccaaggaacgagcagagcgacagcgaagcgcagcaacacaagcccc

SEQ ID NO: 106189 - RNA, 68 nt, Homo sapiens
aacagcaagagaaggaacgccgcaccaggcagcaacagaaaagcccgacccaggcccggccagaccgg

SEQ ID NO: 106190 - RNA, 67 nt, Homo sapiens
aagacgaaggcgaacaggaacaaagagagagaaggccagccaaccccagcaccccagggcagcagag

SEQ ID NO: 106191 - RNA, 54 nt, Homo sapiens
ccccagaggcaggaacagagacggccagcccaacagaaaaggacaggaccggaa

SEQ ID NO: 106192 - RNA, 56 nt, Homo sapiens
acccgccaagcagccaaaaacacccaaaagagggaagcccaagagagggagaaaag

SEQ ID NO: 106193 - RNA, 66 nt, Homo sapiens
ggagaacccccagcccaggcaaccgagcggggaaaacgagggacaaaggacaagagaacggagaca

SEQ ID NO: 106194 - RNA, 52 nt, Homo sapiens
ggacaccggaagcgggaaagggcacagccggggaggagaggggaagcaaggg

SEQ ID NO: 106195 - RNA, 74 nt, Homo sapiens
caaaggcgccaaaacgagacggaaagagacccagggcgccaaaaacaggcaagaacgccccggcaaggacggag

SEQ ID NO: 106196 - RNA, 73 nt, Homo sapiens
gaagagaacacggcaaaccccaaaaacagaaggggaaaagcaccaagcgacacagccaggaagcagccgagcg

SEQ ID NO: 106197 - RNA, 80 nt, Homo sapiens
ggaacagaggagaagcacagcgcccccaagacgaccgggacccggaccgccgcagaagccagccggccgccccagacgag

SEQ ID NO: 106198 - RNA, 85 nt, Homo sapiens
acccggcggcgggggagagggagcgggccccgcgcccacgcagcagaagaaggcagacagggaaggccagaacacccgaccccac

SEQ ID NO: 106199 - RNA, 80 nt, Homo sapiens
aacagcacggagacgcaaagagaggaaagccccgaaacaacagaggacaccaggggggaaaaaccacacaggcaaagaac

SEQ ID NO: 106200 - RNA, 77 nt, Homo sapiens
ccaagcaccagaggaccggcagacggagggaacgaagaaggaaaacgaaggggagaagccaccccaagaggaggccc

SEQ ID NO: 106201 - RNA, 61 nt, Homo sapiens
aagaagaggaaaagaagaccagaaccgaagagacccaaccaccagagcgggcgcggacggc

SEQ ID NO: 106202 - RNA, 73 nt, Homo sapiens
ggaaaccgcagaaccgaccacaagaacaccgagcaccgacagccccggaacgccgaaaccccgcagggacagc

SEQ ID NO: 106203 - RNA, 78 nt, Homo sapiens
ccgagccgccacccggcggggaaagcaggggagaaaagaaaagaaagacgggaaagaagcgcaaagcagagaaaaaga

SEQ ID NO: 106204 - RNA, 70 nt, Homo sapiens
agagacaaaccagaaggacaaagcaaaccacccagccccgaaccgagacgcaggaagcagcgcaggaaaa

SEQ ID NO: 106205 - RNA, 71 nt, Homo sapiens
accagacaacgagaaagagagaagaaagacagcgggaagaggggggggcgcaagccagcgcccagggaggg

SEQ ID NO: 106206 - RNA, 55 nt, Homo sapiens
agagcgggcaggagaaccaagcaaacagacagccggaacggaccaggcccggaga

SEQ ID NO: 106207 - RNA, 80 nt, Homo sapiens
cggacggaaacccagaggaacaccggagaccacgcccaaacaggaagcagagagacaacgcgcacaggcggaacccggcg

SEQ ID NO: 106208 - RNA, 73 nt, Homo sapiens
acagcgccgcccccggccaaaggaaccagggccaccgcagaaaggccgagaaggccagcggcaggccacgcag

SEQ ID NO: 106209 - RNA, 67 nt, Homo sapiens
caccgcggcagacgggaccacgaggcaacgccccaggggcccccgccccccccacggaaaacagcga

SEQ ID NO: 106210 - RNA, 61 nt, Homo sapiens
agcaccagaaagggaaaccagccacgaagcgaaccaggacaagaacgagcccggacagaag

SEQ ID NO: 106211 - RNA, 36 nt, Homo sapiens
acgcagcaaggcgcacacaggaagcacagcacagca

SEQ ID NO: 106212 - RNA, 57 nt, Homo sapiens
ccagaggcaacaaggcggacaagagaagccgccaggaagaaaacaccggagcccaag

SEQ ID NO: 106213 - RNA, 85 nt, Homo sapiens
aaaacaaccagcaagggacgcgaaaaagacaaggccaggaggggaggagggagggccacggcaagggaagcacaaaaagagccgc

SEQ ID NO: 106214 - RNA, 59 nt, Homo sapiens
cagacggcgccccaagaccaaacacgcgccggaagaagaggaagccaagccaggaaaaa

SEQ ID NO: 106215 - RNA, 82 nt, Homo sapiens
ccggccggccgcacgagcacacgccggaccgcaggcccagacgacgcgcgcgcagggggcaagagcagacggcggcagacaa

SEQ ID NO: 106216 - RNA, 80 nt, Homo sapiens
ggccgagcaggcgagcgaacgacggaaacaggaacacgaaagaggaaaaacgcacaagaaaccgaagccaaggaggagag

SEQ ID NO: 106217 - RNA, 81 nt, Homo sapiens
cgcgagagccaggaagccaggagcaggacgcagaagacgcagggccaaggggagagccaaaaacacaaccagaccggagaa

SEQ ID NO: 106218 - RNA, 71 nt, Homo sapiens
caaagcagcgaagaagaggcccaacccccaccccgcccaaggaggcccagcgcaccgaggagcaacacccc

SEQ ID NO: 106219 - RNA, 80 nt, Homo sapiens
agcagcaggggcccagacccggacacgcgggggagaggcccgagaggcaggcacaggcccaccagaagagccgacaagcc

SEQ ID NO: 106220 - RNA, 72 nt, Homo sapiens
cacacgaacgcagacgaaggccacagaagacgacggacagagagacacaggcagaagaagaagagcggagaa

SEQ ID NO: 106221 - RNA, 78 nt, Homo sapiens
ccggccaggaacacagacgggggcgagcggacccgcagccccaaaggcccggccaggccccaccgccacaagcagggg

SEQ ID NO: 106222 - RNA, 70 nt, Homo sapiens
aaggaccaagaaccagcagacaggcagcaaagaaaggaggagaagcccagccgcgcgagggcgggaggga

SEQ ID NO: 106223 - RNA, 64 nt, Homo sapiens
ccacgagaacgcgccaagcagccagggagagaagaccggcaggaggcacagcgaacgaggaaga

SEQ ID NO: 106224 - RNA, 71 nt, Homo sapiens
cgggcaggaagcaaggagggaaaaggcagaaggagaaaaggcagccaaacaaaaccagaaggcaccgacag

SEQ ID NO: 106225 - RNA, 40 nt, Homo sapiens
gaagagagcggcggaaggggcgaggccagaggacaggccg

SEQ ID NO: 106226 - RNA, 57 nt, Homo sapiens
agaacagcgggaaagaaggcaaaacacggcgacaggaagaagacggccaccagaaaa

SEQ ID NO: 106227 - RNA, 77 nt, Homo sapiens
ccccggccgcaccgccagggcgcaggcacagcccgagaaaccgcagcacacacggcggaccgaggagggcggacaca

SEQ ID NO: 106228 - RNA, 83 nt, Homo sapiens
aaaccaaggagccgggggaggcgcgacccccaccccaggagcaacccagccccaaggccaaccggacccaacggggaagaaag

SEQ ID NO: 106229 - RNA, 51 nt, Homo sapiens
ccacgcccggcaggagagaaggacagggcgaaccccgcgccccgcagcgga

SEQ ID NO: 106230 - RNA, 84 nt, Homo sapiens
cgcccgcgccggcgcacggcggccgcggcgcggcgccacgggggagcgggccggagagaagagaggggcgcgaggagaaggaaa

SEQ ID NO: 106231 - RNA, 75 nt, Homo sapiens
gcacagggccgcagaagagcggccggagcgaggggcggaccgcgggcgcccacgaccaggccggagcccacccag

SEQ ID NO: 106232 - RNA, 66 nt, Homo sapiens
gccacaaaccggcccaacaaccacaaggagcaggggagcagcaagccgggaaacagcgcgcccaga

SEQ ID NO: 106233 - RNA, 50 nt, Homo sapiens
caacccagaagagcgaaggacccagcgaggagggaacgggacccgaacaa

SEQ ID NO: 106234 - RNA, 58 nt, Homo sapiens
gaaacaccacgaagcagccaagggagcgggaaacgcacaacagagaacagaaaagacc

SEQ ID NO: 106235 - RNA, 80 nt, Homo sapiens
cgggcaggcggaggccagcggggccggaagcggcggcgcagaaccaaaggcaagaaccggagcaggagaaaagccggaaa

SEQ ID NO: 106236 - RNA, 70 nt, Homo sapiens
aaggcacaacgaacaggcagagaggaaggacccccagcgccagcaaggccgcccgcccagagaaaagcag

SEQ ID NO: 106237 - RNA, 48 nt, Homo sapiens
gccgaagaccggaagccaccacgacagaagacgaaaaagagccacgcc

SEQ ID NO: 106238 - RNA, 73 nt, Homo sapiens
gagacaaaagaagagaaagccccaagcgacaggggagggacccaggacaaaaggcaacgccagccgcgcacca

SEQ ID NO: 106239 - RNA, 62 nt, Homo sapiens
gcaaaaggaggagaggaggacagacaaaaggaggcaaggccgagggggagacacgcccaggg

SEQ ID NO: 106240 - RNA, 81 nt, Homo sapiens
agaccaggagcacagacagaagcaagaaccaggaaagccaagcggaaacaagccccccccacaagagcggaaaagaacaaa

SEQ ID NO: 106241 - RNA, 79 nt, Homo sapiens
gccagcaccaccccacggccagggccaccaaccccaacccggagagcggcgagaaacggcagacccaccgaccaacaaa

SEQ ID NO: 106242 - RNA, 80 nt, Homo sapiens
caagaccgccgaagggagaaccgagggcccgcgccacccgcccacgccacaaagcacgagacacgagacaggagagaaag

SEQ ID NO: 106243 - RNA, 75 nt, Homo sapiens
ggggagcccgcgcccgccgcgggagagaggacccccccccccccccaaggccacgccaggccaggggacccgcag

SEQ ID NO: 106244 - RNA, 73 nt, Homo sapiens
aaaggcggaggcaaacggcaaagggagagcaggcggggcaagcaggcgaggggaagccagagccagggccaac

SEQ ID NO: 106245 - RNA, 76 nt, Homo sapiens
ggaaaaaccagccgcacgccaaggaaacaggaggagacgacggggaccgaggagcggaagggcaccccaaccgcga

SEQ ID NO: 106246 - RNA, 78 nt, Homo sapiens
ccacaaagggacaacgggcccggagagcccgaacggggcaaaaaggcggaaagccacaccaagcgggccccagcaccg

SEQ ID NO: 106247 - RNA, 88 nt, Homo sapiens
caggggcacagcacgacaaacacgacggacagagcgaagcgaccaagcagaaggaaacagaagacagccgaaccaagggcgacaacca

SEQ ID NO: 106248 - RNA, 77 nt, Homo sapiens
agggcaagcggcgacacacgacggaagacagcgacagcgggcgcacgcaaacgcggcaaggccacaagggaacgggc

SEQ ID NO: 106249 - RNA, 49 nt, Homo sapiens
acgacgcaagaggacaagacaggacgccagagcgcaaaagacaacccac

SEQ ID NO: 106250 - RNA, 68 nt, Homo sapiens
acgcccccagccaccagggcaaggaaacgcgaagcgaaaaccagccagacagaaggaccccggcccaa

SEQ ID NO: 106251 - RNA, 97 nt, Homo sapiens
gcagaagaagaaaacaaggcggcagccacacggaagagcaccccaaggcccgggggaacccgcgcgaaggaaagccaagaaccccaaaggacacgaa

SEQ ID NO: 106252 - RNA, 69 nt, Homo sapiens
gcagccggcggcggcagagggcagaggggaggagacacgaagcgacgcagagccagaagggaggcaggg

SEQ ID NO: 106253 - RNA, 52 nt, Homo sapiens
cacccggggaaccagcaaacaagacaggagggcgaaaggaaccagagcagac

SEQ ID NO: 106254 - RNA, 78 nt, Homo sapiens
ggggcgcaccgcgccacgaaggaagacccggagcgacaggaagaagacggccaccagaaaaaagaaaagaaggcagga

SEQ ID NO: 106255 - RNA, 60 nt, Homo sapiens
gggaggcgcggcggccgcagcgccacaaaccagggaggggacaccaaacgggaaaacacc

SEQ ID NO: 106256 - RNA, 80 nt, Homo sapiens
ggaagggaagcggccaaggcacggaggccgcgggaccggagggccggaagcgggccgggacaacgggcaggagccggaag

SEQ ID NO: 106257 - RNA, 74 nt, Homo sapiens
agaaggggcagggcaagcagaggaaacaaacaaggaccaagcgggcagggaggcaccagaacacaacaaacgaa

SEQ ID NO: 106258 - RNA, 53 nt, Homo sapiens
gaagaagacaccggggacagacaggcacgccaggaaagagagaagaaaaccga

SEQ ID NO: 106259 - RNA, 54 nt, Homo sapiens
gccgccaccagccaccaccaagccagccagcaggcaacaggcccagaccaggcc

SEQ ID NO: 106260 - RNA, 74 nt, Homo sapiens
gcccagcaagccacaacccgggcaagggagcacacagccgcggcagggaaagccgcagaaagccgcaacaccga

SEQ ID NO: 106261 - RNA, 61 nt, Homo sapiens
cggcgcggggacacccgacaaccagggccgaaaacccagaagaacggccacccagagacac

SEQ ID NO: 106262 - RNA, 64 nt, Homo sapiens
gggagacgccagcgagcgggaggagcccgcggagcccgggaacacagagcaccaagacagccgc

SEQ ID NO: 106263 - RNA, 81 nt, Homo sapiens
cgccacgcagccagccgggcggaggcaaagaggcagagacccgggaaacagagcaaagcagcgacaacaaagacagaggaa

SEQ ID NO: 106264 - RNA, 78 nt, Homo sapiens
ccgccaaaaaagcaacacaaagaagaggaaaacgcaaaagcaccacgaccagagcaggaagcgccgcaagagaggagg

SEQ ID NO: 106265 - RNA, 82 nt, Homo sapiens
ccacgccggggaggaggagccacggccggggacagagcaccaagaaagcaaggacagacaagaccaaagaccggaaacgcaa

SEQ ID NO: 106266 - RNA, 78 nt, Homo sapiens
ggaccgcggagcggagccggccgacgcgggcgcgagggcagaaccgggagggcccagccccagacgggggagccacgc

SEQ ID NO: 106267 - RNA, 82 nt, Homo sapiens
ccgccccgagcacgagcggacgcaggagacgagagcaccgacaccgccggggggcccacccccgaggcagcaggcagaccaa

SEQ ID NO: 106268 - RNA, 83 nt, Homo sapiens
cgcaggaggagccgaggcgagccaacagcacgaccccggaggaaaagcggaagcggcagcggcgaacgccggaacggaccaac

SEQ ID NO: 106269 - RNA, 65 nt, Homo sapiens
agcaggcacaacaagacacacgaaggggggagacacagccagagcgaggaaaacccagcccggac

SEQ ID NO: 106270 - RNA, 77 nt, Homo sapiens
agggcgagccgcgaacccaggcaaacagcccggaaaacaagaggcgccaggaggagggagcaacaacaaggagcaag

SEQ ID NO: 106271 - RNA, 58 nt, Homo sapiens
agcgcccaggggaaccacaaagaagacaaagcacgcggcaaaagcagaccggaaaacc

SEQ ID NO: 106272 - RNA, 68 nt, Homo sapiens
accacagaaaggcccgcgagacgacgggaccgaaggaccccgccagagacaaccgagcgccaggagag

SEQ ID NO: 106273 - RNA, 75 nt, Homo sapiens
cgccagaaaggcgcaggcggcaggccggagaggacaagaagggcagagaagccagaacggagaaacaacgaagac

SEQ ID NO: 106274 - RNA, 49 nt, Homo sapiens
gggccaaagaagggagagaggcggagcacccaaaagcgaagacaaaacg

SEQ ID NO: 106275 - RNA, 88 nt, Homo sapiens
aagaggagaaagaaaccgcaaaaccaaaaccagacccaaagcacgccaggaaagagagaagaaaaccgaacaacaaaccagaacaaga

SEQ ID NO: 106276 - RNA, 87 nt, Homo sapiens
cgcgagagaaacccagacagaggggagcacagagaaagagaagagaagagaaaggcccggagacgcagccagggaccgagcaacagg

SEQ ID NO: 106277 - RNA, 75 nt, Homo sapiens
cggaaacaaagagagccagacccaggccgggacagggcagaccgccagcagcacagcaagccacagagagggccg

SEQ ID NO: 106278 - RNA, 98 nt, Homo sapiens
ccagcagacgcagccgagacaccagcccgaaacaccaccaagcaagacagaaaggagaacccgggagcgagacagggaagaaccggcaaggaacagaa

SEQ ID NO: 106279 - RNA, 81 nt, Homo sapiens
gggggaaagacacggagccccgaggacggaccccgccccccgaggcgcagcccgaacccagcagccacacgccaacaacga

SEQ ID NO: 106280 - RNA, 81 nt, Homo sapiens
gcgcccaaggcccgcccgggagggccggggccgcgccagaggaggaaaaccaggaaggacaggaccagaagagaaaaacag

SEQ ID NO: 106281 - RNA, 80 nt, Homo sapiens
cagccgcccaggcgcagagcgggcccgcggaccagccagggcacggccgggacggcagacagaagacgcggaagaaacac

SEQ ID NO: 106282 - RNA, 80 nt, Homo sapiens
gccgggcaccaaccagaccaccggacaggcggagggcgaacgaacgcccgccagaagccccgaggggccgggcaagccgg

SEQ ID NO: 106283 - RNA, 82 nt, Homo sapiens
gaaaaaccgcgaagcaggggccgcgggaagcagacggaacagaggcacaccaggagaacaagaagggcaaaaagaaaaggca

SEQ ID NO: 106284 - RNA, 68 nt, Homo sapiens
gcccacacgggaggagacagccgaaggcccggcacagaagcccaacccgcagaggaacggccacaaac

SEQ ID NO: 106285 - RNA, 69 nt, Homo sapiens
cagcgggcaaaccagaagacagaagaccaagaggggggagaccggaggacccccaaacaacccggagag

SEQ ID NO: 106286 - RNA, 62 nt, Homo sapiens
gacgaagaccacgccggccgcgaccaaggaagcaggcggcaaccggaaacaagaccgcgcac

SEQ ID NO: 106287 - RNA, 45 nt, Homo sapiens
caagaaaagagaaccaaacaccccaaaggagccgcaggccaggac

SEQ ID NO: 106288 - RNA, 60 nt, Homo sapiens
caacgacccgccggggccgcaggggcgagcgagcgacgcgcccacggaggaggcgggggc

SEQ ID NO: 106289 - RNA, 46 nt, Homo sapiens
acccagcgaggggggccaggagaagagacgccaacagaccggggag

SEQ ID NO: 106290 - RNA, 78 nt, Homo sapiens
accaggcagcgcgccgcagcaacaccaggcaggcccacccaacgcaggacagaacaaaacgaggaacaaaacagaaga

SEQ ID NO: 106291 - RNA, 74 nt, Homo sapiens
gaacgacaggggagccgaagaggcaagcacgcccgggcccgacaacaagccagcaccgggccgacgcccaccac

SEQ ID NO: 106292 - RNA, 47 nt, Homo sapiens
ggccgccgaaaacagaaacacgaacacaaggcgagcgccgcacagaa

SEQ ID NO: 106293 - RNA, 74 nt, Homo sapiens
cggagaagggcggcagaccgggcggcggacacaagcaggacgccccacacacgacccagagcaggacggacacc

SEQ ID NO: 106294 - RNA, 53 nt, Homo sapiens
gggacagcgcaggcagcagagaaagccgcacaccccaccagagaaagggaacc

SEQ ID NO: 106295 - RNA, 61 nt, Homo sapiens
gagcagagcggacaggggcaaagcgagggggccaagacccggcaccaacagaaagaaggag

SEQ ID NO: 106296 - RNA, 68 nt, Homo sapiens
aaaaccacacacacagggcgagagccggacgcccacaaaagcacggaagggaccacccgacacaggaa

SEQ ID NO: 106297 - RNA, 72 nt, Homo sapiens
gggagggccccgggccccagccccacgccacaggcacacggacacccacggcccgcaagcaaaaaagaaaaa

SEQ ID NO: 106298 - RNA, 56 nt, Homo sapiens
aaagaaaaggagaaaagaagccaaagggacacgggcagagggaaagccaccccacc

SEQ ID NO: 106299 - RNA, 89 nt, Homo sapiens
cgggggggagggggcccggcaggacgaggacgaaggccgagagcccaaaaggcagagcgaggagagaagaaggagggaaagccaaacaa

SEQ ID NO: 106300 - RNA, 71 nt, Homo sapiens
aaaacaacaaaaccgcccaggaagaccggaaggaaacaaagagccccgggaaaagaaaaaaaacgccccaa

SEQ ID NO: 106301 - RNA, 68 nt, Homo sapiens
cgaaaccaggaagggacgaccacagagaagcaggcgaccaggcgcgcgggcaagaaagcagacgcgac

SEQ ID NO: 106302 - RNA, 82 nt, Homo sapiens
gccggaggagccaggacgcagcccggcggacgccggcacagaacgccggcaaagcaccaggcacagcaagcgccgaaagacc

SEQ ID NO: 106303 - RNA, 83 nt, Homo sapiens
gacagagcggcaagaggggcgagcaggcggggaggaaagcgccggagagggggagccagagagggaagggcaggagaaaaaaa

SEQ ID NO: 106304 - RNA, 71 nt, Homo sapiens
gggaagccagcgaacgcagggcaaggcagcgcgcaaagagagggacaggcagaagggcggcaagcggaagg

SEQ ID NO: 106305 - RNA, 84 nt, Homo sapiens
ccgcgaggacgaggcggcgccgccgggcgggagacaagcagaccggaagaccgacggaagaccacaccccgagggagcccagga

SEQ ID NO: 106306 - RNA, 87 nt, Homo sapiens
acagggccaggaacgacggccacggcccgcagaagcggaggaggcagaaaaagcgcagagagaggagaggaagccaggagggaagcc

SEQ ID NO: 106307 - RNA, 75 nt, Homo sapiens
acaggagcccggaaggcccagaagggaggggcaaagacagaggagcgccaggccccaaaggcagaagaaacaggc

SEQ ID NO: 106308 - RNA, 101 nt, Homo sapiens
caggaggccccgacgaggaaaggaaacacgggcaaaccccaggaaggcagggagggggaaagaacgggaggaacaagacaagaggacacccgacgcacacg

SEQ ID NO: 106309 - RNA, 74 nt, Homo sapiens
agcacaggggaaaaacgagagaaaccgagaccaacccagccggccgggaaagcccagcacaagcagagaagcca

SEQ ID NO: 106310 - RNA, 82 nt, Homo sapiens
ccggaagaaccgcagccgagcggggccggccacagcccgagaggaagggcggggggggggggccgagccggcccggcggaga

SEQ ID NO: 106311 - RNA, 110 nt, Homo sapiens
agaaccacccgggacccggcgcaggcaggcggaggaagaagccacccgagcggaccccgagagcccaaaaggcagagcgaggagagaagaaggagggaaagccaaacaac

SEQ ID NO: 106312 - RNA, 84 nt, Homo sapiens
agaaaaaggacaaaagccaagaggaggacagcgcacacagcaagcacgagaacgaaaacaaacggaagagagggcagcaagaaa

SEQ ID NO: 106313 - RNA, 70 nt, Homo sapiens
gccagaggaaagccagaaggcaccagagagaggccgaacggagcagacaaaggaaggaagggaacacgga

SEQ ID NO: 106314 - RNA, 84 nt, Homo sapiens
caccgccccccgccaaggcgacccccaccgagacgaagcgggcggcgaaggcgggcgcaaagacaccgccagaagaccagagga

SEQ ID NO: 106315 - RNA, 55 nt, Homo sapiens
aggcacaacggggagaaagaaggcaaagggcgcgaaacaaaaaccaggccccaga

SEQ ID NO: 106316 - RNA, 72 nt, Homo sapiens
aggaagacaacacgcaacaacaggaggcagcacggcaggagacgaggagaggacagcaggacacccggaccc

SEQ ID NO: 106317 - RNA, 79 nt, Homo sapiens
gagcagggcggggcgagaaagccggcaccaccaccacaccgggaagggggacaaggccacagacccgggccacaaacac

SEQ ID NO: 106318 - RNA, 51 nt, Homo sapiens
gagagccgaacccccgaggccagcacgaggaagacgggaagccaagcagga

SEQ ID NO: 106319 - RNA, 68 nt, Homo sapiens
gaaggggagaaggcaggcaccacaaaaaggacagggagaggaaaaggacgcagcaccaaaccgaaaag

SEQ ID NO: 106320 - RNA, 83 nt, Homo sapiens
ccgggccagggggaaggcggaggaccgggagcggcggggccacggcaggccagcaggcagcgcacgggcccacggaacagcag

SEQ ID NO: 106321 - RNA, 81 nt, Homo sapiens
gcggcgcggaaacgcaagacgggccgagaagcagcgcgaggccccccagccagcgcagggcagaaggcccccccgagagag

SEQ ID NO: 106322 - RNA, 81 nt, Homo sapiens
ggccgcccagaagcggcgcgcacggacgcggagaggggagccgcagagccgggggggcgagcccgccgagagcgccaagga

SEQ ID NO: 106323 - RNA, 94 nt, Homo sapiens
agcacggggcacggaccaacgggaacaaaacacacacccgcagacaagaacggagaggccacgagcggcacaggacagaaccgcaaacaacgga

SEQ ID NO: 106324 - RNA, 74 nt, Homo sapiens
ccccagaagcgcgagccaggaacgaggaaccccgaaaacaaccccggcagaggcgaggagaaaaacaccgacag

SEQ ID NO: 106325 - RNA, 74 nt, Homo sapiens
gggcgccgagcgaacgcgcaacagggccgcacgcaagaacgagagcggaggagggccaagaaagcgcagcgaca

SEQ ID NO: 106326 - RNA, 78 nt, Homo sapiens
caggaaaccacacacgagagccagaggcaggccccccgcagagggcaaggggcgagcggggccggacagaagacgcca

SEQ ID NO: 106327 - RNA, 69 nt, Homo sapiens
aggaagcaaacgcggaaaggaccacccggccaggaccaaaggccagcacggccagggaacacaggccac

SEQ ID NO: 106328 - RNA, 79 nt, Homo sapiens
gcgccgcccgcgcgcgcgcgcgccgcgcgcgccgcccggcgcagcaccggggggaagaagaagggaacaagcggaggga

SEQ ID NO: 106329 - RNA, 83 nt, Homo sapiens
ccacgcacagcacggcaccgccagggaggagagcggggcacgcgcccaacgcgcaagaagcccaccacggaggggcaccacga

SEQ ID NO: 106330 - RNA, 44 nt, Homo sapiens
gagccacccggccaaccaccccaccagagggcacccgaaagagc

SEQ ID NO: 106331 - RNA, 38 nt, Homo sapiens
ccagcaacccccaagacggcaacagggacgagaaccac

SEQ ID NO: 106332 - RNA, 61 nt, Homo sapiens
ccggcccacaggggggggcaaacccgagagaacggagaaagcaaaacagagaaacaggaac

SEQ ID NO: 106333 - RNA, 58 nt, Homo sapiens
aggacgacggggcgagaccccgcccggaccgcagacaagggaggcgaggacggacaaa

SEQ ID NO: 106334 - RNA, 79 nt, Homo sapiens
aacaccaggaaagacaggagaccaaaaaggcaggcggaggaccccagagcaccaccaccgagccaagacacgacagcag

SEQ ID NO: 106335 - RNA, 36 nt, Homo sapiens
aggaacgggggccgaacacaggagaccagcacggag

SEQ ID NO: 106336 - RNA, 83 nt, Homo sapiens
gggggggcaggagcggcggcagaggcacggggccggggcgacggggagcggcaggcggcagccaccaagaccccaggaccaga

SEQ ID NO: 106337 - RNA, 76 nt, Homo sapiens
accagggggaaacacagaacgcagggaagacggaaggccagcagcaacgagaaacagaacaaaggcacacaaggga

SEQ ID NO: 106338 - RNA, 82 nt, Homo sapiens
gggcgcaccgcggcccccaggacacgcgcaaaagacccgcaaccgcgcccgggccgccggacaaaacacgggggaccgcccc

SEQ ID NO: 106339 - RNA, 80 nt, Homo sapiens
cccgacggaccagcccaacaagcgacgagagaacagcccccaggagaggcaggcgcaaaggaggcaacggaggagcagcg

SEQ ID NO: 106340 - RNA, 78 nt, Homo sapiens
gcggccccaggcgcgcggagagcagaagcccacccagagagagaagaacaaggcggccaaaccaagaccaacaaccac

SEQ ID NO: 106341 - RNA, 85 nt, Homo sapiens
ggaggccggcggcgggcggcagcagcggggcggggcgaagaagcagcacaaggcgagccaggagccaaaaaccgaacacccggaa

SEQ ID NO: 106342 - RNA, 69 nt, Homo sapiens
cagggagaacacagcaacggcaccggagacagccccaaggcggagaaaagcagagcgaagaaaagacga

SEQ ID NO: 106343 - RNA, 59 nt, Homo sapiens
acaccgccagcagcccaagccccgcaccggaaaagagaagcagccagccaccaagggag

SEQ ID NO: 106344 - RNA, 81 nt, Homo sapiens
cagaaagaaggaaaaagcagaaagccagaggaaggccgacagcaggaagcaccagacaccaaccacagcgcagcaggcccg

SEQ ID NO: 106345 - RNA, 58 nt, Homo sapiens
accaagaaagaacgagggcagagggaggcaagcaggggggcaaaggaaagaaggcaga

SEQ ID NO: 106346 - RNA, 73 nt, Homo sapiens
gggccacaacacaaccagcggaaggcagacaagcagcgcaaggacccaggccaagccaccaagcgacagaagg

SEQ ID NO: 106347 - RNA, 85 nt, Homo sapiens
gaccgggagaacgagaagacaaggccccagggaagagcgagaacccgagcagcgccagagcaacacaccgcgccccagcacgcag

SEQ ID NO: 106348 - RNA, 67 nt, Homo sapiens
caaagaagaaacccccaaaccacgcacgaggaagacaccgggagaagccgcaacaggacgagaccag

SEQ ID NO: 106349 - RNA, 74 nt, Homo sapiens
acaccagagaggcacggagaagccccccaccgcaggggcgaccgcacagacccagccgaggcaacggcggcaac

SEQ ID NO: 106350 - RNA, 80 nt, Homo sapiens
ggccagcgcgcggcgggcgaggagaaacaaagccaccggaacacacccgccgagacggaccggggcagagacaaggggac

SEQ ID NO: 106351 - RNA, 74 nt, Homo sapiens
ccagaagaggagagagagcaagagaggaagaagaacgacccgcccggggcagcagaaacccaaggaaacggagc

SEQ ID NO: 106352 - RNA, 83 nt, Homo sapiens
gcccgcgcgcccggccaagaggcaaaggggaggacgcagcaaaccaccagaagccgagagcggcccaggaggaacaaccagcc

SEQ ID NO: 106353 - RNA, 82 nt, Homo sapiens
cgcaccagacaacaccagaaaaaagcgagacggaaggagcaggcagcggccaacagggcaacgggaacagcccgggccgccg

SEQ ID NO: 106354 - RNA, 84 nt, Homo sapiens
cggccagggaaccaaacagcagagcagacacagcgagaagaggccaccagaaaacggccacgacacgagaaacggaacggccga

SEQ ID NO: 106355 - RNA, 78 nt, Homo sapiens
ggagaccgccaccccccgcgggggggagaggccccagaacccaggagcccccgcagggccccggagcccacacggagc

SEQ ID NO: 106356 - RNA, 76 nt, Homo sapiens
aagcgacggcgccggcggcccgccagggcacccccgagaggacaacaggcacggaaggccccgccaccggggcacg

SEQ ID NO: 106357 - RNA, 39 nt, Homo sapiens
caaccacaggaggacaagacaaaagcaaacagacccccc

SEQ ID NO: 106358 - RNA, 57 nt, Homo sapiens
aaaagacggcaaggacagccgagcaacagaaccggaagaccggaaggcgcgagaaag

SEQ ID NO: 106359 - RNA, 65 nt, Homo sapiens
caaggcagcaaagaagaggcaacgaagcaagagccccacacaccaagaacccgaaaaggaaagaa

SEQ ID NO: 106360 - RNA, 77 nt, Homo sapiens
caagcagccaccagcagcccccagagcgggaccacagcaggaagaagcagaagggaaagcaaaaggcagagagcagg

SEQ ID NO: 106361 - RNA, 71 nt, Homo sapiens
caccaacccggcccaccaaaccccaagcccgggaggagcacagagggcacgaaaaacccaaagccgccccc

SEQ ID NO: 106362 - RNA, 38 nt, Homo sapiens
agcccccagccagccgcagcccaaaaggcagagcgagg

SEQ ID NO: 106363 - RNA, 77 nt, Homo sapiens
acggagcagccgaaagccagaggacaggagcagaaaaggcgacggcggagacagaagagaggagagcccacaaacgg

SEQ ID NO: 106364 - RNA, 76 nt, Homo sapiens
ccgcgcggcacccggccgcgggcggccgccgcgccgcccaggcccggaccaggggaagcaaaaggccagggaaggc

SEQ ID NO: 106365 - RNA, 39 nt, Homo sapiens
gaccgcccagcggcgggaggaagagggaacggaagagcc

SEQ ID NO: 106366 - RNA, 38 nt, Homo sapiens
accgcgggcgcccacgaccaggccaaaacagaagaggc

SEQ ID NO: 106367 - RNA, 79 nt, Homo sapiens
agagcccgcccggcccggagaagaaaagagccagaaaagccagcaagcgcagaaggaagcgcccaaggccaagacacaa

SEQ ID NO: 106368 - RNA, 65 nt, Homo sapiens
gcagaaagacacaaggccgcccacccgcaaagcgccacggaacagggccggccagagcacaccag

SEQ ID NO: 106369 - RNA, 105 nt, Homo sapiens
gcgaaggccgggacccggccccggcccacaggggggggcaaacccgagagaacgggccgaacaggagcgagaagaagggacccaaacagcagcggaggggaagag

SEQ ID NO: 106370 - RNA, 77 nt, Homo sapiens
aggcggaggcccgcccccagacaacaccaccggccgggcaagcgcggagagggagacaaggcggcacccacccgcga

SEQ ID NO: 106371 - RNA, 89 nt, Homo sapiens
gaaggcaaaaccaaacaccccagcccacagagagcaaaacacaagagagcagggaggagcgggcgacgcacgaggcacacaggaaggag

SEQ ID NO: 106372 - RNA, 71 nt, Homo sapiens
ggcccagacagccagaacgagccaagcaagacaagagcagccgagcggacaccgaaaaggccccgacacaa

SEQ ID NO: 106373 - RNA, 81 nt, Homo sapiens
gcgagggcggcacaccgcgaggccgaggaccacgaccagaagcagcaaggcagcaaccaaaacaccaccacgcgggcgggc

SEQ ID NO: 106374 - RNA, 80 nt, Homo sapiens
ggcaggaagaagaacgaagaagaacaagaaacacaacaaaaaagagagggaagcaaagagggcggagaacggaaaagcac

SEQ ID NO: 106375 - RNA, 75 nt, Homo sapiens
gcaacagccagggagacggaacacaaccaagccgcgagccaaaagacccaaggaccagacgaagagaaagccggc

SEQ ID NO: 106376 - RNA, 77 nt, Homo sapiens
cccgggcgcaaggacccgcccagccccgaggagggggaacaggcacggccaccacgccagcaagaacaacaggacag

SEQ ID NO: 106377 - RNA, 55 nt, Homo sapiens
gagagcggaccgagagcgcgaaacgcacgagaaggaaaaacagggagggaagccg

SEQ ID NO: 106378 - RNA, 69 nt, Homo sapiens
agagcagcacccaaaagaccaggagccacaaaggaggaaacagaacgacagcccgcaccgacgccggcg

SEQ ID NO: 106379 - RNA, 33 nt, Homo sapiens
cagcacgccccgccgcggcggaggcagggcgac

SEQ ID NO: 106380 - RNA, 87 nt, Homo sapiens
gccaaggacgcgagagacaaacgaaagaccacacggaggagaaaacccgcagcccaaagggcagaagaagaagaagacgcaagacgg

SEQ ID NO: 106381 - RNA, 70 nt, Homo sapiens
cgggaccaacgcaccagagccgagaaacgcgaaaaggaagcggaaggggaaggcggcagcacgcggccaa

SEQ ID NO: 106382 - RNA, 73 nt, Homo sapiens
cgaacgcaacagaacagagcgagcgcagcagcagcccagacgaagaaaacccgcggaagaaacagcagcgcag

SEQ ID NO: 106383 - RNA, 77 nt, Homo sapiens
ggggaggaggccggcaaggaaaaacaaccaccagcgagcaaaaaggcaaagaccaagaccaccaagaagcgccccag

SEQ ID NO: 106384 - RNA, 78 nt, Homo sapiens
agccggcacccaccaggcccaggagaagaaagcagaggagcggagaggaaacgaaaacacaggacgagcccagccccc

SEQ ID NO: 106385 - RNA, 77 nt, Homo sapiens
ccagagccaaagagacgcagcacaccaggcagagcggcgggaaaccaccaacaacacccccaaaccaaaacagccgg

SEQ ID NO: 106386 - RNA, 87 nt, Homo sapiens
gcgcgagagcgggaagaggcggcagacagcgggggaaagggagcagcaccggccacacccacagcacgaccggaacccagcgaccga

SEQ ID NO: 106387 - RNA, 71 nt, Homo sapiens
gaacaaaccaaaggggacaagaaacacgagccccaccaaagcaaaggccggaccaggagagagcacccaca

SEQ ID NO: 106388 - RNA, 73 nt, Homo sapiens
aagccaagaagcagccgccaggggacaaaggagccaggacaaggccggaaaggaaaaacaccagaacggaaac

SEQ ID NO: 106389 - RNA, 66 nt, Homo sapiens
ggaccaagaaccagcagcaggcgcaaaaacgaacccacaaccgaacgacggacgggaacaaagaag

SEQ ID NO: 106390 - RNA, 83 nt, Homo sapiens
gcgaaggccgggacccggccccggcccacaggggggggcaaacccgagagaacggggcgcgcgggggcacagcccaggcgcag

SEQ ID NO: 106391 - RNA, 39 nt, Homo sapiens
acgccccacgaccgccagagcagccagcggcggacaacc

SEQ ID NO: 106392 - RNA, 82 nt, Homo sapiens
ggcaagccgccgccgcacgacagaagccgccagcgagccccacacaggagaaagacagcaaagaaaaggagaagaaaggaaa

SEQ ID NO: 106393 - RNA, 74 nt, Homo sapiens
agcaacaggggagaaagagaccagcgcaaagggaccaaagccacgaagccgagcgccaccgccagccagaggag

SEQ ID NO: 106394 - RNA, 79 nt, Homo sapiens
cgcggagcagcccccccgcgcccccgcccgcccgggacccgcggccccgccgcgaggggagccagggcaagaacgcgcg

SEQ ID NO: 106395 - RNA, 77 nt, Homo sapiens
ggcagcccgcacgaccagcgaaccgcccaagaaaagaagggcacagaaaccggcccagaccacaaagagaagcgcca

SEQ ID NO: 106396 - RNA, 75 nt, Homo sapiens
cccggcgcagccacgccccacccaccaacccaggagcaacgaacccgggcagcaccagcagaaggccgagggagc

SEQ ID NO: 106397 - RNA, 84 nt, Homo sapiens
cggggcccaaagggaccaaaagaacccagcgggaggaagaagaggccgccagcagcagagcagccaaggggcccaaccccacac

SEQ ID NO: 106398 - RNA, 56 nt, Homo sapiens
cccggccgccaggccagcgggggggccccagcccggccgaacgggcgcacgacaca

SEQ ID NO: 106399 - RNA, 80 nt, Homo sapiens
acaaccgaagaccagaagcaaggccaggcagacagaccgagaccaggaaaaggaaccaggaccaagaaagaagaaaaaca

SEQ ID NO: 106400 - RNA, 77 nt, Homo sapiens
agagccagagcacacgaggcggaccgcagcgcgcccggcacagccgacgaggagcgaaccaggggccgcggagcgga

SEQ ID NO: 106401 - RNA, 57 nt, Homo sapiens
cgcccacgggccacggccaggcccaggagccaaacggcaagacgcagcaagaacggg

SEQ ID NO: 106402 - RNA, 66 nt, Homo sapiens
ccgggcagccgcgcgagcgcgggcgcgcgagcagccgccggcaggcacaccgagggcccacacacc

SEQ ID NO: 106403 - RNA, 77 nt, Homo sapiens
aagggcaaagagcggagaccgggccagagacggcaagggcaagccagagcgggacgagggcggaaaggggacgaggg

SEQ ID NO: 106404 - RNA, 87 nt, Homo sapiens
aagcggggacccagacccggagcccagggaagcagccgaccagccgcggagccgggggcagaaacaagcaccaagccccagaacagc

SEQ ID NO: 106405 - RNA, 80 nt, Homo sapiens
cagaggaccgcacacagagcacccgaggcaccggcagggcacaaggaaaacggagcagagaagccaaagacagcaaaggg

SEQ ID NO: 106406 - RNA, 86 nt, Homo sapiens
ggggagcaccaaccgccgaaacagcaggcggaagaagccgcaagaaagcccacccagacaggcgcccaacgagaagaagacccgag

SEQ ID NO: 106407 - RNA, 39 nt, Homo sapiens
acacaggagccaggcgagaagcggaacagagggacaaaa

SEQ ID NO: 106408 - RNA, 95 nt, Homo sapiens
aaacacaaaaaaggaccaggagacggagccggagcaagccaccaggaacagaggaaacagaacgacagcccgcaccgacgccggcggccagccag

SEQ ID NO: 106409 - RNA, 88 nt, Homo sapiens
cgcggggcagcggcggcggcggcgcggggaccgaggccaaaacagaagaggcaaagcccagccacagcagcagcccagcagcaaacaa

SEQ ID NO: 106410 - RNA, 70 nt, Homo sapiens
gaccgcgccgcgccggcgagggaagcggaaccaaccgggaaagcccggggcaggccaagggaagaagcag

SEQ ID NO: 106411 - RNA, 50 nt, Homo sapiens
aggccaagcggaaaagacgagaagcacgacgggaggagggacacacgaca

SEQ ID NO: 106412 - RNA, 66 nt, Homo sapiens
gagcccgcacccagccacaccggaaccgcgggagccgaaggggcgggcacaagggaagacagcgcc

SEQ ID NO: 106413 - RNA, 65 nt, Homo sapiens
gaacaccccaacagaagcccagccgacggcccacaagggcaaggggagcccacaccggaggagag

SEQ ID NO: 106414 - RNA, 72 nt, Homo sapiens
gcccaaccgaagaaaacaaggagacgggacgaacaacacccaggcggccagccccgcaccgggaacaccgca

SEQ ID NO: 106415 - RNA, 75 nt, Homo sapiens
agccgaaggcagagacccaaaggaagagccagggaggaaagcaagaacagagcaacagggaaggcagaagcggga

SEQ ID NO: 106416 - RNA, 89 nt, Homo sapiens
gcggcgcaggggaacccggcggcggagagagaacaacaaccagacgaccgaacggacagaccggaaccaagccggaccaggaggccgag

SEQ ID NO: 106417 - RNA, 81 nt, Homo sapiens
aaaagccaagagccggccaacagcacggaaaagcaaggagagccaacagacggcaaaacacagaccagcaacgcaccaaaa

SEQ ID NO: 106418 - RNA, 69 nt, Homo sapiens
ccaaggcccaggacccgggcccaccaagccggggcccccaaagacaaacagaccccagaaagaagaaga

SEQ ID NO: 106419 - RNA, 67 nt, Homo sapiens
gaccaccagaaagcaccccacagagaaaaaccggaagggaaacccgcgacaccgcgagggacaaaga

SEQ ID NO: 106420 - RNA, 79 nt, Homo sapiens
ggagagaccaacacaaggagaacccagagaagaagaggcccgaaggggcagaccaacaccacccagcaaaaaccccgac

SEQ ID NO: 106421 - RNA, 75 nt, Homo sapiens
gcggcaggagacacgcaagaacccacaggagggccagaggacaaagcacggcggaagagaagccagccgccggcg

SEQ ID NO: 106422 - RNA, 84 nt, Homo sapiens
cggagcaccgagccgcggcacggaggagggcagagcggcgggaaaccaccaacaacacccccaaaccaaaacagccggaagcgg

SEQ ID NO: 106423 - RNA, 55 nt, Homo sapiens
aggcggaaaaagcgcaaggccagcaacagaagaaagcaagcaccggggaaagcgg

SEQ ID NO: 106424 - RNA, 79 nt, Homo sapiens
gcccaggcagaccgcagcaaacggagcccacggggaggcaaggaggccgacgcagagggacgaccgagacgaagggacg

SEQ ID NO: 106425 - RNA, 87 nt, Homo sapiens
ggcagaggaagaggcggcggcgaaaggaacggcgaaggcccacgggagaaaaccgggcgcaaggaacaagacgccaaggagacgccg

SEQ ID NO: 106426 - RNA, 81 nt, Homo sapiens
cgcagcagcgcggacccggagcgacaagcgccccgacggagcgccaggacgggggacagccaaagagacggccggcagcgc

SEQ ID NO: 106427 - RNA, 76 nt, Homo sapiens
gaaggcaggagacagccaggaaggaagacccacaagagaccacgcagagacagcacccaaccggcagcagcaggga

SEQ ID NO: 106428 - RNA, 118 nt, Homo sapiens
gaaaaccaaaccggcccaaagaccggaagcaaggcagaaagaacaagagaggaggaggagagaagcagacagggaagacacaggcgcggagaaagaggcaaaccacagcgcgccagga

SEQ ID NO: 106429 - RNA, 76 nt, Homo sapiens
aaagcaagaccccgagggaagacaaacccagaaagagaaagaaaagcagcagaccaacggaggcagcacaagaaaa

SEQ ID NO: 106430 - RNA, 69 nt, Homo sapiens
acccaagcacaccagaaagcacaaaaagaccggggaggagagaaaacaagcacggcggacaggacacgc

SEQ ID NO: 106431 - RNA, 85 nt, Homo sapiens
cacccgcgcgcgcccgggaggaaggaacgaggcaaggagcaaagcagcggcgcagcccggggaagaaaacaccggagcccaagac

SEQ ID NO: 106432 - RNA, 79 nt, Homo sapiens
ccgcccagccaagcggccaaacccacccggcccccggcgccgccagcgaggcacagagggaaaagaggacgaggcgcga

SEQ ID NO: 106433 - RNA, 71 nt, Homo sapiens
cggcagcccacgggacaacggaggggagcggccccaaccaagagaggaaaacccaagacaaggaagggcaa

SEQ ID NO: 106434 - RNA, 79 nt, Homo sapiens
cagagcagacacaccacccaacaggccaagacaaggccgagaccgcgggaagaagaaggaggagcgcgaaacagcggac

SEQ ID NO: 106435 - RNA, 71 nt, Homo sapiens
cgaaggggagaaaagggaaggccccaagccaaggcgcgcccccacccggggccgagaaccacaccgcggga

SEQ ID NO: 106436 - RNA, 84 nt, Homo sapiens
gaaaaggagcacgccaggcgaccacgagcccccaggccgagagcagcaggccaagcggcgagccaaaggggggaaaacacagag

SEQ ID NO: 106437 - RNA, 83 nt, Homo sapiens
ggagagcaccggccacggaaaagcaaagcccgggaccgggagcccgggaccgggagccggggggccaccccgaccggaggagc

SEQ ID NO: 106438 - RNA, 77 nt, Homo sapiens
cagccagagcccggcaccacccacgagacgggccagcgagacagaccgaaacccaaagaaaaggagcgcgcccaacg

SEQ ID NO: 106439 - RNA, 60 nt, Homo sapiens
acggcgaagcgcgcgccgcgcccggaccccagacgacgcagccagagcagcaagaggcca

SEQ ID NO: 106440 - RNA, 81 nt, Homo sapiens
gccggcacaccgaggccggccgccccgccgcgagggcggagaacggaaaagcaccaggaagcagagaggaccgcagaaggg

SEQ ID NO: 106441 - RNA, 68 nt, Homo sapiens
ggccccaggcagagaaaacacccgagagcaccgccgagcggaccccaagggccggcaaccgccagaca

SEQ ID NO: 106442 - RNA, 44 nt, Homo sapiens
acgcgggagagccgcccccaggcggaccaggagagaagacgaaa

SEQ ID NO: 106443 - RNA, 69 nt, Homo sapiens
agcagaggccccagaccgccaagaggcacaggacaaggcacgaggcgcggcgaccaccacagcagagcc

SEQ ID NO: 106444 - RNA, 75 nt, Homo sapiens
gcgccacggcgggccgcgggaggacaccacccacagccggacaggacaaaaggacacaacccacacaagaggaga

SEQ ID NO: 106445 - RNA, 65 nt, Homo sapiens
agaccgaaagggcacgaaccaaaggagaacaagacccagaagggcagagccggaggagagggcac

SEQ ID NO: 106446 - RNA, 83 nt, Homo sapiens
gaagaagggaagggaaaagagccgggaacaaggcagcgagagcccagagaagggaagaaagcggaaaagaaaagaagagaacc

SEQ ID NO: 106447 - RNA, 72 nt, Homo sapiens
ccgggagcaagaagaacacccagagcgaacaccacaccccagcccagccaccacagaacccccagcagcgca

SEQ ID NO: 106448 - RNA, 77 nt, Homo sapiens
gcggcacccgggacaaggcagacgggagcgcaaggcgccccaaggccagacaaaacgacggcgagaagcaaccgggc

SEQ ID NO: 106449 - RNA, 67 nt, Homo sapiens
cgggcgccgccgggagcaggccggggccacaagggaagcaacagaagagagcgaaaacaaaggagca

SEQ ID NO: 106450 - RNA, 80 nt, Homo sapiens
agacagacaaacaccaacggagcggagaaaacgagcaggccgcaccgagacaaccgacccgccagcaacaaggaccgaag

SEQ ID NO: 106451 - RNA, 80 nt, Homo sapiens
cggaccagccagagcgagcggcgcgggcccagaccgccgggcaagcaccagagaggggcaggacggggaggggaaacagc

SEQ ID NO: 106452 - RNA, 69 nt, Homo sapiens
caaggacaggacaccaggaaaaacacagagagccgacggcaccggacacaagagggcaagaaaggcgcg

SEQ ID NO: 106453 - RNA, 59 nt, Homo sapiens
cagcaaacaggaaagcaccagcgggaaaccagagacagccaccacgccgagggcacccg

SEQ ID NO: 106454 - RNA, 83 nt, Homo sapiens
ggagaccagcaaaacacggggacgagaggaaagccaacaaggaccccggcagaaagagcgcgaacaggagcccggacgacagg

SEQ ID NO: 106455 - RNA, 86 nt, Homo sapiens
cgcgaggaggaaaggaggacgagaaggaggggaaagccagcgcagcgcgagaagcgacagcgaagaagaagcgccgacccccaaca

SEQ ID NO: 106456 - RNA, 81 nt, Homo sapiens
ccaaaccaggcgcgacgaagagccccccaagcccgaagaggaaggagcgggcccaagaaaaggaggagagaaagaacccac

SEQ ID NO: 106457 - RNA, 40 nt, Homo sapiens
ggcccccaaaggggcaacaggcggagggcaggagccaaga

SEQ ID NO: 106458 - RNA, 53 nt, Homo sapiens
gcgagcagcgcgggcggcagcccgggggaagcggacaaaccaagagcaggagg

SEQ ID NO: 106459 - RNA, 77 nt, Homo sapiens
aggagcacccggcggagcagagccagggacagagcgaagaaccccccaagaagacgaaacccccgggccacaagaag

SEQ ID NO: 106460 - RNA, 75 nt, Homo sapiens
cgagcgagggggggcgcgccggaaaccggagcgcgcagcagcagggccgggccagcgccaccgcccggaccggcc

SEQ ID NO: 106461 - RNA, 61 nt, Homo sapiens
caacgagaccgagcgccaagccaccggagcgggagcaacccccagccacaacgcgaaccgg

SEQ ID NO: 106462 - RNA, 72 nt, Homo sapiens
cccccaaggacagaacacaccgcaagaggagccaccaaagccccaggaaccaaagaaccccaaaacgaaaca

SEQ ID NO: 106463 - RNA, 72 nt, Homo sapiens
gcgagaccaaagcaaaaccaggaagaagccaacagagacaccgaaagaggaccaaacaggagcgccgagccc

SEQ ID NO: 106464 - RNA, 53 nt, Homo sapiens
ggaggcagaggggaggcgcgaaagaggcccacgcggaccggcagcgccaccgg

SEQ ID NO: 106465 - RNA, 69 nt, Homo sapiens
gccggccggcgcggcgcagaagaaacccgcggcgaccacagccaaagcgggcaaccacggaaacaacag

SEQ ID NO: 106466 - RNA, 77 nt, Homo sapiens
gaccccgcgccgacggcgccaaacacaggggaacaacgagagcgccccaagggagccagcgcagccacacaagcaca

SEQ ID NO: 106467 - RNA, 59 nt, Homo sapiens
gcaagaacaacagcaggccaagcccgccggaggaggagagaagagaaagcgaaagggag

SEQ ID NO: 106468 - RNA, 101 nt, Homo sapiens
caggagacacaaaacccagacaccgacgggccgcgaggggaagaggaagcaaagccaaggcacaagaagacgggcgaacagaccgagcgggcgcgggccag

SEQ ID NO: 106469 - RNA, 70 nt, Homo sapiens
cccgaaaaagagacgaacagagcgggagagccccccacgacccagaaccagggaagagggcccggccccc

SEQ ID NO: 106470 - RNA, 73 nt, Homo sapiens
aaacagcaagaacccaaaagggaacaagcgcgagaaggaacaaaccaggagaaaccgaacagaagaggcacca

SEQ ID NO: 106471 - RNA, 73 nt, Homo sapiens
aggcagagggggcccagagccgggcgccacccgaggacaagaaccagcccaaacagccagagaggaaccacac

SEQ ID NO: 106472 - RNA, 86 nt, Homo sapiens
gcggcgcgggcggcggggcccacggacggccggagcagcagaacaagagcggagaccaagggagccccgcagcagcagaagacggc

SEQ ID NO: 106473 - RNA, 76 nt, Homo sapiens
gacggcgaaaacggaggcgacggcggcgcggcggcggcgggaccccaaggaccagaaggacccaaggacgaaggca

SEQ ID NO: 106474 - RNA, 75 nt, Homo sapiens
acacgagcagaaacaggacacagggaggaaggaggaagaaccgggaaacagcaagcccaaaggaaaacacaggag

SEQ ID NO: 106475 - RNA, 72 nt, Homo sapiens
cacaaaggaagacgaaccggagaagagaaccgccgcgcccgggaaaggaggaaagaaagagaagaagagcaa

SEQ ID NO: 106476 - RNA, 82 nt, Homo sapiens
agggcgcaggagcgggacgagagcgccggaggccgagcggaggaaagacagaaccagcacagcaaaaaaggcagcgcaccga

SEQ ID NO: 106477 - RNA, 79 nt, Homo sapiens
cgcgccacccgcaggagccggggccccagcgccccagccgacggagggccgagaagaagcggggacggcaaaacagcca

SEQ ID NO: 106478 - RNA, 78 nt, Homo sapiens
ggaagaggcggagggggacgggggcggcccagaagaggcggaggcgggggcaggagaccacccacaaacaaaggcacc

SEQ ID NO: 106479 - RNA, 64 nt, Homo sapiens
gaccaccccacaggccagcaaggacagcagcaggaacacagcacccacccacacccacacccgc

SEQ ID NO: 106480 - RNA, 60 nt, Homo sapiens
gacccggggcgaggacccccgagccaggaacaaaccagccccaggaaagaagggaggagg

SEQ ID NO: 106481 - RNA, 40 nt, Homo sapiens
cggggacacacaaagcaaccgggcggaggcaaggcgcaac

SEQ ID NO: 106482 - RNA, 75 nt, Homo sapiens
ggaccagcaagacaccccgaggaaacgaaaacaccacgacgaagacgggagaacacagcgccggcagaagcaaga

SEQ ID NO: 106483 - RNA, 73 nt, Homo sapiens
gaggaccaggaagcaacagcaaggacagagcagggaaccggggagagcacagaaggggacaacacccggcaag

SEQ ID NO: 106484 - RNA, 92 nt, Homo sapiens
gaagaagcaaaccaaagaagaccagagaaaagggaaccagacgcaggagggaacaagggaccaagcaaggaagcagcaagagaaccggaaga

SEQ ID NO: 106485 - RNA, 79 nt, Homo sapiens
ggacgacacaagaccaccaccaccgcggacggccggcgcggaagcggagccggcgggcccgccgcacaccgagagcccc

SEQ ID NO: 106486 - RNA, 80 nt, Homo sapiens
aacaagggcgacgcccgggcgcgcagaacaggcgcgcggcgacacccacccgggagggagccacaccaaagccggacccc

SEQ ID NO: 106487 - RNA, 102 nt, Homo sapiens
ccggccgcgcccgcgcccagcccgggccccgcgcacagccccagcgcagagacgagagccgaggcgccggaaacaacagccaacaaaaccaagccgggaccc

SEQ ID NO: 106488 - RNA, 71 nt, Homo sapiens
caccagacccgagaggaacagcgcaaagggaccagaccagggagaaccaaggccccccagagaagcccgag

SEQ ID NO: 106489 - RNA, 57 nt, Homo sapiens
caagacccggagggcgagccggcaccagggcccagggacacaaagcgcgggaaagaa

SEQ ID NO: 106490 - RNA, 79 nt, Homo sapiens
cccagaaagccgggacaaagaggcacagggccaggcacacaacgagaccacggcccaaacaacagggcaaagagccagc

SEQ ID NO: 106491 - RNA, 76 nt, Homo sapiens
ggcgcgaggggacgcgcacggcgggccggccaggagccgggggcaaggagagccaagcggaccaagaaggcaagag

SEQ ID NO: 106492 - RNA, 78 nt, Homo sapiens
ggccgagcagccgggcggccgcgcgagccggcggcccggagggggcggcgggggaacggcgagggaacccaggaagga

SEQ ID NO: 106493 - RNA, 65 nt, Homo sapiens
acacgaggagaaacagcagaaacgcaccaggccaaagaaagagaaagcgcaggagaacaccaacc

SEQ ID NO: 106494 - RNA, 53 nt, Homo sapiens
aggaagcggagaaccacaaacacacacggaagaggcaaagcgcaggaagagca

SEQ ID NO: 106495 - RNA, 83 nt, Homo sapiens
aaacagacagagcagaagaaaccaagacggcagagaagaccggcccggggaacaaacgcccggggccgaagacaaagaaccag

SEQ ID NO: 106496 - RNA, 70 nt, Homo sapiens
gaacagaagacacaccaacaagggagcgcagcgcccgaacaacaccagacaaacgaaagccaaaagccac

SEQ ID NO: 106497 - RNA, 81 nt, Homo sapiens
aaagaaggcaagaccgcccccccggaaagggggacaccccgcaggacaagaacccaaccagcagcaaaacaccaaggaaag

SEQ ID NO: 106498 - RNA, 65 nt, Homo sapiens
gagccccggcacaaacggaccaccagaaagcaccccacaggggaggaggacagccgcccaggcag

SEQ ID NO: 106499 - RNA, 72 nt, Homo sapiens
gacacaacaaggagagcaaaggggaaagcagaaagccggccaaggaacagagcggcgaagagagggagcgaa

SEQ ID NO: 106500 - RNA, 61 nt, Homo sapiens
gagggcgaaccacccacagaccagccggaacaagagacccggaagaagaggaggagagacg

SEQ ID NO: 106501 - RNA, 44 nt, Homo sapiens
gcccaggaagaagacgaggaggcaggcagagacaccaagcgccc

SEQ ID NO: 106502 - RNA, 67 nt, Homo sapiens
gaacaaccaacccagaacaccaagagggagaacggcagaaccaagggaccaaagcgggacggcaggc

SEQ ID NO: 106503 - RNA, 75 nt, Homo sapiens
cgaggccacagaaccagccacagcggggcggagaggaagaaggcgccgagccggacgacgaagccccccccacga

SEQ ID NO: 106504 - RNA, 53 nt, Homo sapiens
cagggcccgcggagccgcgccgaggggaaggaaagcgccacacggagagccag

SEQ ID NO: 106505 - RNA, 49 nt, Homo sapiens
cggaagcaacagacacaagggcaaagagagcacaaaaaaaaaggcaaag

SEQ ID NO: 106506 - RNA, 68 nt, Homo sapiens
ccaggaagcagacacaagagaacccagggggagagcagcccaccggcgcaaacgcgggaacgagcgca

SEQ ID NO: 106507 - RNA, 71 nt, Homo sapiens
ggcagacaaaagggccaaagaagggagagaggaaagaaggagagagagaaggcgaccaaacagccaccaac

SEQ ID NO: 106508 - RNA, 65 nt, Homo sapiens
caaaagcgggggaagaagagaggacgaacgcggcagaacggaggcaggcagcacgagacacacca

SEQ ID NO: 106509 - RNA, 66 nt, Homo sapiens
ccacacgcgccgagccgcacagcccagagagggccacagacacaaggacccgcagcccagagaggg

SEQ ID NO: 106510 - RNA, 81 nt, Homo sapiens
ggcggccagacccagcgagcagcgccgagacgggggcggcaagggagggaagccgggcgccaagagccagcccagccaggg

SEQ ID NO: 106511 - RNA, 74 nt, Homo sapiens
ccgggagaccggggaacgagccaaagaagagcgaagcagggcacacacacccccgggggggggggaaaagggca

SEQ ID NO: 106512 - RNA, 68 nt, Homo sapiens
gggggcgagacggggcccgacagcccgaagacagaaaaaagggacccaacaaacagcgaaaaagaaga

SEQ ID NO: 106513 - RNA, 73 nt, Homo sapiens
gccgggcaagcaccagagagggcaaagcagaagcgcagcagccagcgggggcggccgcccccagcaggagaag

SEQ ID NO: 106514 - RNA, 65 nt, Homo sapiens
acccgcggccccaggccaaagccagcccaccaccaccgcagggccgaagagagggagggaccggg

SEQ ID NO: 106515 - RNA, 76 nt, Homo sapiens
acccgacaagcgcaccgaccgaggccgccggagccccagacaccccccacacaccaccgacgcgcaccacgagacc

SEQ ID NO: 106516 - RNA, 82 nt, Homo sapiens
agcacccaccacagacaaggaaaaggcggagcaccccacaggccaacaggaccgaagaccgcaggcagcggaagagaaagac

SEQ ID NO: 106517 - RNA, 58 nt, Homo sapiens
ccaaggaggcacccgcggcaaggggaaacccacaacgcgagacgacgggaccgaagga

SEQ ID NO: 106518 - RNA, 53 nt, Homo sapiens
ccagcccacgggacaagcgcaacggaacacgggcaacgggggaagacggccag

SEQ ID NO: 106519 - RNA, 77 nt, Homo sapiens
ccgcagcccccgccggccgcccaacaccgaacaccacacgagaggcgagggacgacagagcaagcggcagagggcaa

SEQ ID NO: 106520 - RNA, 75 nt, Homo sapiens
ggaggaagacccaaaaggagaaagacagcaaagaaaaggagaagaaaggaaaaaaacaaccccgggcaccccgcc

SEQ ID NO: 106521 - RNA, 82 nt, Homo sapiens
ggcagaagcgccagaggaggagccagaaacagaccagccccgggccccagcgcccacccaagagagcagcaccagcagaaga

SEQ ID NO: 106522 - RNA, 46 nt, Homo sapiens
cggcccaaccccgagccgcgggcacagggaacaaagagcagaagac

SEQ ID NO: 106523 - RNA, 88 nt, Homo sapiens
ggcggacgcgcccgggacgcgcggcggcaccgggaggccgggccgagcggaacaggaggcccggacccccagcacaagcgcaggccag

SEQ ID NO: 106524 - RNA, 64 nt, Homo sapiens
agaggggggaccccggacggaccggcagggaggacaggccaggaccccaaaaaagaacagcaaa

SEQ ID NO: 106525 - RNA, 68 nt, Homo sapiens
caacgggcaacgggcggcagccgccgcccgccagcggacccgcggcaccgccccgcgcgcgcccggcc

SEQ ID NO: 106526 - RNA, 79 nt, Homo sapiens
cgcgcggcgagcggcccgcacaaggccggcagagagaacggacgagaccaacgcggaaaccagcaagaaaaccagcggc

SEQ ID NO: 106527 - RNA, 59 nt, Homo sapiens
aacccggcaccgccccagggccaaccgccccccagcagcaggcacgggcgaaccccgag

SEQ ID NO: 106528 - RNA, 79 nt, Homo sapiens
gggcgcgcagacggagggccgcgccacaagcagcaggccaaggcgaagggagggccgccccaaccgacgcaccagccgg

SEQ ID NO: 106529 - RNA, 97 nt, Homo sapiens
gcgcccccgcggcccccgcggccgggccgccgcgccccgacgcccccgcgggagagccacaggacccggagcacaaagcaaagccaggccccagccg

SEQ ID NO: 106530 - RNA, 79 nt, Homo sapiens
gcacggcagaccgggcgagcagagaagaagcaggccggggggggcacagagccccggaagacagcccccagcgaccaga

SEQ ID NO: 106531 - RNA, 75 nt, Homo sapiens
gagagagagcccggccccccaccacaccccgcccaggcagcggcccagcgcaagccaaagcaggaggcagaaaaa

SEQ ID NO: 106532 - RNA, 74 nt, Homo sapiens
aaccaacagggagaagacaccgaaacagcagacaaaggagcggaggaagcaccagggcagcgcagccccaggac

SEQ ID NO: 106533 - RNA, 77 nt, Homo sapiens
aaacgagagcaagaggaaagaaaaagaacagacggcaagaacggaagcacgggcggaggaaagcacaagcagagccc

SEQ ID NO: 106534 - RNA, 70 nt, Homo sapiens
cccgagcaggaggacgagaccgaccaggccgccagcaagcagagcggaaaagacacagagcgggacaaaa

SEQ ID NO: 106535 - RNA, 55 nt, Homo sapiens
agcaggcagcagagccaagcccagcccaaagagaagagaagcaaggaaagaagac

SEQ ID NO: 106536 - RNA, 73 nt, Homo sapiens
aaagaagagcccgaacaaacaaacacccagaaacaagaggacgcggcgcagcaacaaacagcggcgacaaacc

SEQ ID NO: 106537 - RNA, 82 nt, Homo sapiens
gcgagccggcgacggacgcggcgcgcgaccgacacgaaggccaagaagccaccaccagcacccaccccccagccaccgaccc

SEQ ID NO: 106538 - RNA, 95 nt, Homo sapiens
gccggcgcgggcgcgggaccgaggcgaaccggggcggagccaaacccgcggcagcagcaccagggccgagaacacggggcgggccagaacacacg

SEQ ID NO: 106539 - RNA, 79 nt, Homo sapiens
cggaccccagaccaggcgggggcccgaccgaccccgacgggcacgcaggcaggacccccacaaacgcacacccaggagc

SEQ ID NO: 106540 - RNA, 69 nt, Homo sapiens
aggcacgagcaacaacggagaaaagaagacgacacaggcagggcgacgccaggagcacaccgaaaagaa

SEQ ID NO: 106541 - RNA, 61 nt, Homo sapiens
gggaaacacagcagaacacagggcggcgacggcggcgcgaggaccgaccgggcccgcggac

SEQ ID NO: 106542 - RNA, 59 nt, Homo sapiens
gaaacacagaacgcagggacaaccaaacccaccacaagaggaaaaaagaggcccccgca

SEQ ID NO: 106543 - RNA, 70 nt, Homo sapiens
gcgaacccgccacgcggccgggaccgagcagagaaccaacggagaacagcccaccgagaaacacaaagca

SEQ ID NO: 106544 - RNA, 88 nt, Homo sapiens
gccacccacgacgaggcgggcaggcggaagcgcgcgggcaaggaaggcgcggaagaaaaaggaagcccaccacccaccccaggacagc

SEQ ID NO: 106545 - RNA, 69 nt, Homo sapiens
agcacgagagccaacggcacggggccaccaacaccggaaagggccaggaaagcggcccacaaaacagca

SEQ ID NO: 106546 - RNA, 82 nt, Homo sapiens
agaacagcgggaaagaaggcaaaacacgggcggaacccaggcaggcccgccgcaacgccccaagagccccccaggcgagcgc

SEQ ID NO: 106547 - RNA, 77 nt, Homo sapiens
gcgcaccagacaaagcagagcacaaccgaacaacgaaggagcccacaccccagccacaccagaacagagagaagggc

SEQ ID NO: 106548 - RNA, 54 nt, Homo sapiens
agcccgcccagaagccacggagcaggcccagaaagaacagacaaagaccgaaaa

SEQ ID NO: 106549 - RNA, 81 nt, Homo sapiens
aaaccggcgggaagaagaccagcgggggacagaggcgacacgcggcgcacccacgacgcgcacaccaccggcagaccggcg

SEQ ID NO: 106550 - RNA, 72 nt, Homo sapiens
ccgcacagaaggccccacgaggcggagacgccacggccagcggcgcagcaaaaagcagcccacccgggaacg

SEQ ID NO: 106551 - RNA, 70 nt, Homo sapiens
accaacaaggcccggacaaagccgaaaccagggaggccaacagacccaacccagaaggcaccaaacggag

SEQ ID NO: 106552 - RNA, 79 nt, Homo sapiens
cgcggcggcgccggccccggggagaaacgcgccgaacaaagcaagaagcgccgggggagaccaagggaaaaagcaagac

SEQ ID NO: 106553 - RNA, 76 nt, Homo sapiens
cacgaccagcacgggccagcccgacacagaccaccaaaagccagaaagacacgacaccgacacgcgaggcagagga

SEQ ID NO: 106554 - RNA, 56 nt, Homo sapiens
cgcgcccgcgcggcgcggggaccgcggcccgagaagcccacaccagcaaggcaagc

SEQ ID NO: 106555 - RNA, 83 nt, Homo sapiens
gaagcaagcagcagaagagccaaggaaaaacagcaagaacccaaaaggggagccgaagggaaccccgaggaagcagcgcgcgg

SEQ ID NO: 106556 - RNA, 80 nt, Homo sapiens
acccggagaagcaggagcccaccggcagaccccgcgccggcagccccccgggcccgccaccccgcgggcaacgccggcac

SEQ ID NO: 106557 - RNA, 73 nt, Homo sapiens
aacaccaggagcagcagggcaggggccagcaacagcgcagcaagaacaacaagaagcggaggacaagagggcc

SEQ ID NO: 106558 - RNA, 63 nt, Homo sapiens
aagacccggcaacggaggcaaggcgaaaaacaacgccgcagggcaaacgaggaccaagagcca

SEQ ID NO: 106559 - RNA, 75 nt, Homo sapiens
cgaccgaaaacagggaggacagaggaaaagccccagcgcgcgcccggacagacaagggcccgagggcaggacagc

SEQ ID NO: 106560 - RNA, 71 nt, Homo sapiens
ccccggcgccgcgccggcggcggcacccgggaacagaaaggagagggagcacagccaccgccagaccgggc

SEQ ID NO: 106561 - RNA, 70 nt, Homo sapiens
gaccccacgggccccagacaggagagagggcaagaagaccggaaggagagaaagccagaccggaaaagaa

SEQ ID NO: 106562 - RNA, 74 nt, Homo sapiens
cagcccaggacacccccagagaaggcccagcaagggggacccaagaagaggcagacacccgcaagaagagagac

SEQ ID NO: 106563 - RNA, 92 nt, Homo sapiens
cgcaagagaaacaggcacacaagggaggaggcaaagccagaagcgccccgagaaggcaaaggagacaggaagccaaacaacagggacacgac

SEQ ID NO: 106564 - RNA, 77 nt, Homo sapiens
acgggagcgagggcgagggcgacggaaaccaagccaggacagcccagagcaagcacacggaggcccgggagccagac

SEQ ID NO: 106565 - RNA, 80 nt, Homo sapiens
cacgcgaagcaaggagagaagacggaaggagccgagacaggaagcccagcagcgagaagaagcccaaggagaggcagaga

SEQ ID NO: 106566 - RNA, 76 nt, Homo sapiens
ggacagaaagccagacaaagcccccccaaaccagacccgaccacagcccacgacccccaggccaccgcccccccag

SEQ ID NO: 106567 - RNA, 77 nt, Homo sapiens
gccccggccaggaacacagacgggggcgagcggacccgcagccccaaacccccgacggggcccccaggaggagcacc

SEQ ID NO: 106568 - RNA, 59 nt, Homo sapiens
aggaccaggagagacagggccacgaacccgggaaagcaacgagggccagacaaggggaa

SEQ ID NO: 106569 - RNA, 51 nt, Homo sapiens
aaacaaagcggccacgaggcaggaaggacgcaacacagcaaccaaccccag

SEQ ID NO: 106570 - RNA, 78 nt, Homo sapiens
agagaaacaacaggccgagcaaggagagaacgcgagggaagggaaccgccgacccaccccagcccaaccacagcacca

SEQ ID NO: 106571 - RNA, 73 nt, Homo sapiens
gacagagagcaagcgccaggcagaccagacggccaaaacaacccgcagccagaggaacacaacagccccggcc

SEQ ID NO: 106572 - RNA, 76 nt, Homo sapiens
cagcagagagcccgcacggaacagagcggaaaagaccgagcaggccggaacgccgcgggggaaaagagaagacccg

SEQ ID NO: 106573 - RNA, 54 nt, Homo sapiens
aaacagaaaaggaagaaagggacaaagagaggagcaggcggccgccacccccgc

SEQ ID NO: 106574 - RNA, 84 nt, Homo sapiens
ggagacgcgacggacgcggagcccgccgcaaacgagagcgccagggacggaagcgacagcgcaggaggcggggcaagggccggc

SEQ ID NO: 106575 - RNA, 75 nt, Homo sapiens
acgccacaaaccccagggaagaggaccaaagcgaacaccaggggcccgcaaagaacccgggagaaagagaacgcg

SEQ ID NO: 106576 - RNA, 78 nt, Homo sapiens
ggacagcaggagcgggccagccaggagacggcggaggggcggacgccacgccaaaggccaccaacaggggcccccgcc

SEQ ID NO: 106577 - RNA, 78 nt, Homo sapiens
acagcgccaccgcccacacggccacagcggggaagccaagaagaggaaaccagaacacggcaagagcagccaccacca

SEQ ID NO: 106578 - RNA, 76 nt, Homo sapiens
aagaccacaacaagcaagcagcagcacgcgaaaggcacacgacaaggcaaagaagagcaagaggggaaaccaaagg

SEQ ID NO: 106579 - RNA, 81 nt, Homo sapiens
gcagaggcgcgcggcgccggccggcggcgcgcggcgcgagccgcagccggcccgccgagagaaaaggaacagccgaagcca

SEQ ID NO: 106580 - RNA, 61 nt, Homo sapiens
cgcgccgaggagaacccagcgggaaaggagcagcaagaaagcgaaccaaccagaggccgag

SEQ ID NO: 106581 - RNA, 77 nt, Homo sapiens
gcgcaaccgaaggcacggggcaggaaacagaagaggcccagcacgacagagacccggaaagcgagcagcaaagaccc

SEQ ID NO: 106582 - RNA, 80 nt, Homo sapiens
accgcggggagcgaagcgcgcggaaccagccccaagcacgggaagacccccagccgagcacccgccgggcgaccagcgaa

SEQ ID NO: 106583 - RNA, 86 nt, Homo sapiens
gaaacacgagacaggaccaacacagcacaaagccacacccagcagcagagagcggacaaacggacaggagacagagacacaacaaa

SEQ ID NO: 106584 - RNA, 59 nt, Homo sapiens
aacagcaacccgagcccagagacccaggcgagcgggaaagccgaagaaaggagggcgag

SEQ ID NO: 106585 - RNA, 82 nt, Homo sapiens
ccggcacaccgcggggccgaaaacaacgacaacgagcacaggaaaagcagggaaccagggagaccaggacaaggaacagaaa

SEQ ID NO: 106586 - RNA, 75 nt, Homo sapiens
cggcggaacccggggccgggacgcagcccggcggcagcagacccagcgccaccccccaccagaagcgaggacaaa

SEQ ID NO: 106587 - RNA, 65 nt, Homo sapiens
aaaagcaccaagggcaccaaacacccagaacaacaaagagaaaacaaagccacggaaaaacgccc

SEQ ID NO: 106588 - RNA, 77 nt, Homo sapiens
ccacaggcggagaagagggcccgccccccaaagcgaagccaaagcgaaggcaaaggccaagaaggcagggaaagggc

SEQ ID NO: 106589 - RNA, 71 nt, Homo sapiens
gcgaaaccaagggccagagacacaccccaccagaggggggaaaaccaagcaccgacggaaacaggcgaaaa

SEQ ID NO: 106590 - RNA, 72 nt, Homo sapiens
cacgcagaagcccgcccgcgcacacacccagaggcccagcgcgcaggccgggcccgggaggagcaggggcag

SEQ ID NO: 106591 - RNA, 66 nt, Homo sapiens
agcgcgccgaaggagaaaggggccacagaggccacgagacggaacagccaaccaagaaaggggcac

SEQ ID NO: 106592 - RNA, 108 nt, Homo sapiens
gggagccgcaccaggggccccagggaagagacccgcaaagaccgggagaccaaggaccaaagacagagacaagcggggaagaacggcggagcacaccgaccaaaaaag

SEQ ID NO: 106593 - RNA, 74 nt, Homo sapiens
aacagaaacacaagaagcagccagaaccacaccgcaggccaccgacgacacagaaaaaccagccagcaggcaac

SEQ ID NO: 106594 - RNA, 74 nt, Homo sapiens
cagggccgccaggggcccccccagccagggccccgaggacccagaaaggccagcagcagcgaggccccgccagc

SEQ ID NO: 106595 - RNA, 76 nt, Homo sapiens
agaaaggaacccaacagagacccgcccacgcaggggacccagaaagaagcacaaaacaaacgacagcagcagagaa

SEQ ID NO: 106596 - RNA, 73 nt, Homo sapiens
aagcaccaaagcagcggcgccggccgccccaccggcggaacccagcaagggggcaggcaaaccgggaaagcaa

SEQ ID NO: 106597 - RNA, 78 nt, Homo sapiens
acaccagaacaaccagaaagaacgcaaaggacacagcaagcacacagagaaaggaacccacagacaaaaaacaaccac

SEQ ID NO: 106598 - RNA, 80 nt, Homo sapiens
gcagagcggagggagccccagacacgggcacgagcaaaaaaaagccccgagcaacaaaccagggaacgacgcagcaaaga

SEQ ID NO: 106599 - RNA, 76 nt, Homo sapiens
caagagcaccaagaaagccgacggccgaagcagccagaaacacaggaagggcgacccgggccaggcgaaccgagcg

SEQ ID NO: 106600 - RNA, 79 nt, Homo sapiens
ccggccgacagccgcgacggcgagcccgggccgcgcccgagggggggccgcccgcccaaggcaggaagaggggccgcaa

SEQ ID NO: 106601 - RNA, 39 nt, Homo sapiens
gggaggaaaaccaacaagacggaaacgcaaggggaaagc

SEQ ID NO: 106602 - RNA, 74 nt, Homo sapiens
cgcaccagaagaagaaggccagaaaaaccacaaaggacaagaagcgagaaaaagcaaccaggacaggcccggga

SEQ ID NO: 106603 - RNA, 79 nt, Homo sapiens
cacaccgggacaggggagaggaacagcgagaagagcaaggggacggaaggcaaggagcgaaaaccccagaacacacgcc

SEQ ID NO: 106604 - RNA, 63 nt, Homo sapiens
caagccaggcgagcagcgaggcccccagaagcgaaggcaaagcggagcggagacccaaacggc

SEQ ID NO: 106605 - RNA, 75 nt, Homo sapiens
acaaacgaagagggcaaagagaaacgggaaagaggcaaaaccgagaaaaggaccaaagagagcgagaaagcccaa

SEQ ID NO: 106606 - RNA, 94 nt, Homo sapiens
gaggaggagaggagagaaggcagaaggaggagacaggaagaacgcacgacagggaagcaacccaggaagaagaccggaagaaagacggcagaac

SEQ ID NO: 106607 - RNA, 72 nt, Homo sapiens
gcggcgcccgcaacccccggcgcgcgccgcgaagaagacaagagcagacgagggagaagcgggcaaaacaga

SEQ ID NO: 106608 - RNA, 80 nt, Homo sapiens
aacaccccacgaaggcggcaccaagacaagcagaccggaagaccgacggaagaccacaccccgagggagcccaggacacc

SEQ ID NO: 106609 - RNA, 73 nt, Homo sapiens
gagaccgcagcccccaggaaggcgggaccgagcgcacaccaaggggccacacgcagggaacgagcgcagagga

SEQ ID NO: 106610 - RNA, 74 nt, Homo sapiens
caggcggccagccaaagcccccccccgagaaaacaggaacccagagagcaagaccagagcgccggccccggcgg

SEQ ID NO: 106611 - RNA, 87 nt, Homo sapiens
cgggagaaggagggccaagaggcggaagcggaggagcccaggagacccggggacagcacgcccaggccccggcggggcaaggcggac

SEQ ID NO: 106612 - RNA, 69 nt, Homo sapiens
cgagaccagcacccaagagccaacaggccgacaggagggaagaaaccagacaagaaaggaggaaacgca

SEQ ID NO: 106613 - RNA, 66 nt, Homo sapiens
ccaacaaaacacgaccccaaaacgaagccaagacagccggcgccgcacgaccacagaggcgaaaaa

SEQ ID NO: 106614 - RNA, 55 nt, Homo sapiens
cggcagggggacgggggccgaccgaaggagaagaaggagaaggggaggagaaggc

SEQ ID NO: 106615 - RNA, 79 nt, Homo sapiens
ggggacccgcccgcccccggcgcgcccagcagcgaaggagcgccgggcgggagacgcagcacaggaaggagcgccgagg

SEQ ID NO: 106616 - RNA, 86 nt, Homo sapiens
aggcggaggagacggcggcccgaggaggcagaaggaccgagccgacgcgggccgcgcggggggcccgaaggcaccgcagaacgggg

SEQ ID NO: 106617 - RNA, 76 nt, Homo sapiens
cagcagcgcgcggagaagaacggggagccaggcccagcggcacccgcgagaaaaaggaagagcccacgaaaaaaca

SEQ ID NO: 106618 - RNA, 69 nt, Homo sapiens
caccccacaggggaggccaggaggggaggagggagggccacggcaagggaagcacaaaaagagccgcag

SEQ ID NO: 106619 - RNA, 86 nt, Homo sapiens
gaaggccaggagacccgaccccaagagaagcagggcccgagcggaagaggaaagaaggagccgcacccggaaggccgggcgcgggc

SEQ ID NO: 106620 - RNA, 71 nt, Homo sapiens
aaaccgacgcccgggggaaacagagaaagaaggcggccaggccaaccgaagaacagccagcaaagacaaga

SEQ ID NO: 106621 - RNA, 68 nt, Homo sapiens
ccaacccacgcgccccaagacacgcagaaccacagcaaggcacagcaaaggaagaaacaacaagcaaa

SEQ ID NO: 106622 - RNA, 68 nt, Homo sapiens
accccaccggagaaccaaaaggacacggaccaagagcaaacagggagaaaaagaaccccaggaacaaa

SEQ ID NO: 106623 - RNA, 46 nt, Homo sapiens
aggaccacaaagagagaaacaagagggacaaggaccgcagagagag

SEQ ID NO: 106624 - RNA, 71 nt, Homo sapiens
gagcccccgacggggggaaaagagcggccaccaaacagaaaagaggaggcgagcgggaacaagcaaaaaag

SEQ ID NO: 106625 - RNA, 86 nt, Homo sapiens
cgccaacccggccacgcggccggcaccgaccgggcgccccagaacaaaccagaagcagaagggaggaaaaaagaaaacgagaccaa

SEQ ID NO: 106626 - RNA, 89 nt, Homo sapiens
cccagcgccaccaccacgccagccgcaccagccgcccaagccgcacagccgcggcggcagcagcaggagaggcgcggggaggcccagcc

SEQ ID NO: 106627 - RNA, 81 nt, Homo sapiens
cccgcccacgagagaaggaggcagccagggccgccaccccggcagagcaggcgagaggacacagaagagacagcccagaaa

SEQ ID NO: 106628 - RNA, 71 nt, Homo sapiens
aaggaggaaggcaaagggaagccggaacccccccggagggaaaacaccaagcaccagacagccacgccacg

SEQ ID NO: 106629 - RNA, 76 nt, Homo sapiens
cggaagaaacgcacacgaagaacaagaaaaagcacaagagcaccaacgagggagagacagagagaggagaaagcgg

SEQ ID NO: 106630 - RNA, 67 nt, Homo sapiens
ccagagaaaaagcgggacaaaccagacagaacaagcgcgaccgcgggagcacaggggaggcagaggc

SEQ ID NO: 106631 - RNA, 78 nt, Homo sapiens
ggcgccaaccgacggagcccagcagccgggaacagcgaaacaacgaacgagcaaggaagggccaaggcagaccccaca

SEQ ID NO: 106632 - RNA, 36 nt, Homo sapiens
acacgggccgcgcgaaaaagaccgcaagacaggaaa

SEQ ID NO: 106633 - RNA, 68 nt, Homo sapiens
cgaagaaaagaagacaaaccaccaaggaaggaagaaaggcgaagggaaaaagcaaaaaccagcaacga

SEQ ID NO: 106634 - RNA, 41 nt, Homo sapiens
ggacaagaccacgagccagagacaggcagagcccccgggga

SEQ ID NO: 106635 - RNA, 49 nt, Homo sapiens
gccacagcgcagaaggagaaaagaaagccggacccacagccgccagaga

SEQ ID NO: 106636 - RNA, 74 nt, Homo sapiens
gaagccccacgccggcagacccaagccggccgcaacggccaaagaagagacccggaaacacgggaaaaccccag

SEQ ID NO: 106637 - RNA, 109 nt, Homo sapiens
ccaggcccagcccgggagcacacacgccccccgcccgcccgccccgcacgcgcgaggagaacaacgccaacaagacaaccaagcacaggccggaaccccccaaagggca

SEQ ID NO: 106638 - RNA, 69 nt, Homo sapiens
gcccgcgccccccgcccccccaccgacacagcccagccgcgcagcaggggccacaaagacaggcaaaag

SEQ ID NO: 106639 - RNA, 60 nt, Homo sapiens
cgggggccacaaagccccccggagacgcaaccaaggcgggggagcgggaggagccagagc

SEQ ID NO: 106640 - RNA, 80 nt, Homo sapiens
ggagacccgggacgcagaagaaagcggccggggccgggccgagcacggggaaacggagagaaaggccgggaaaacaacgg

SEQ ID NO: 106641 - RNA, 53 nt, Homo sapiens
ccgcacagcagagagcaacccgaaaagggcacagaacgaacagagcagcgaag

SEQ ID NO: 106642 - RNA, 47 nt, Homo sapiens
gggggagcaaagcgcagggaaccagaccagggaacagccgaacccag

SEQ ID NO: 106643 - RNA, 77 nt, Homo sapiens
ggcaggaaccaccaggacagagagcggagcgcaagaagaaggccgggggcacgccgcacgcaagaagaggacagccg

SEQ ID NO: 106644 - RNA, 88 nt, Homo sapiens
gagcccgacccgggcgccccgccggcaccccgcgcggacaccaggagaacacgagacccgcacaaaaccccgccccccaggccacaca

SEQ ID NO: 106645 - RNA, 80 nt, Homo sapiens
gggggaaaacagagcgaagggggaggccgggacccaggcaggcaggccacccagacggagccaccgagggcccagggcgg

SEQ ID NO: 106646 - RNA, 67 nt, Homo sapiens
acccggcgggaacacaggcagaaaacacggcaccgggggcggaaaagcagaaaggaaagggaagagc

SEQ ID NO: 106647 - RNA, 71 nt, Homo sapiens
acaccgaacaccaaaagacccacacgaccgggcacaaaagaccaaagcagacgacccaagacacaaccaaa

SEQ ID NO: 106648 - RNA, 114 nt, Homo sapiens
caaaccagcgccgacggaggaggagaaggaaaaggagcacagccaaccggagccccaaggaacccaaaacccgaaagaggaaggagagccacgccaagaaagagggccgaagga

SEQ ID NO: 106649 - RNA, 88 nt, Homo sapiens
gcgggcgagcggggggacgccggcggagacgcgggcgaggcagaacagaccaagagaggaaagagagagcgccaaaaagagcccaacg

SEQ ID NO: 106650 - RNA, 53 nt, Homo sapiens
gagacagacaacaccacagcacaaagaaacgcaccgacacacaagcacaacgg

SEQ ID NO: 106651 - RNA, 66 nt, Homo sapiens
cccggccgccccggagggagacgcgcgccgaggagaacccagcggggaccaagaaaggcccaggga

SEQ ID NO: 106652 - RNA, 91 nt, Homo sapiens
ccccgccaggagacccagcaccaagcagcaggagcagcccgcggcgaccaagacaggaaccgcccggaaaagcaacaggcagcagcaagga

SEQ ID NO: 106653 - RNA, 62 nt, Homo sapiens
ggggacgcgccggaggaaagaggaagacaccaggcgcggaggagggaagaaggcccaggggg

SEQ ID NO: 106654 - RNA, 83 nt, Homo sapiens
cggcgcgggacgcgcgcgggcacccacggagccccggggcggcgccgcgaggccgcggccaggccgagcccgccaccaggcca

SEQ ID NO: 106655 - RNA, 103 nt, Homo sapiens
gaaaaaaacagaaaaccgaaaacccagggaccaccagaacagccacagaacaggaaaagcccggaaaagcagccaagcggaagacagagccgcaaagagacac

SEQ ID NO: 106656 - RNA, 66 nt, Homo sapiens
gagaccagacaagcaaacggagccgaagaccaaagagaaagagagcgcgcagagcgagaacgagag

SEQ ID NO: 106657 - RNA, 75 nt, Homo sapiens
caaaccgaagaacagcgggaaagaaggcaaaacacgggccaaagccacccccaaaggcagaggaagaacgagcag

SEQ ID NO: 106658 - RNA, 77 nt, Homo sapiens
ggcaagaaacaagcaagcaaacgccagccggcacagaggaggcgagcggcaccagaaggaaaaccagaacccagcaa

SEQ ID NO: 106659 - RNA, 34 nt, Homo sapiens
acaaacagcgcacaggccacaacagcagccagac

SEQ ID NO: 106660 - RNA, 73 nt, Homo sapiens
aaggagaacagacggccacgggaggcacacaaaaggcaacgaaagcaaaccgagagcaggcgaaggccgggac

SEQ ID NO: 106661 - RNA, 69 nt, Homo sapiens
gaggggcaccgcgccagacgcccgagaagccaggcagcaaacacacaggcgagggcaagccgcccgcga

SEQ ID NO: 106662 - RNA, 78 nt, Homo sapiens
gacccaaagcacggcaccggacaggaagcgcagccggaaaggggcccgcggagcaccggcccgcgcggagggcgaggg

SEQ ID NO: 106663 - RNA, 67 nt, Homo sapiens
gacccggccagcgacgcaccgagaaaggaaggaaaaccgacgagaggaaggcagagaaaaaaggagg

SEQ ID NO: 106664 - RNA, 72 nt, Homo sapiens
gagacaagagagaggccggagcgcgaagacgcagggaaagcggcacacgaaaggggcacggcaggacgagcg

SEQ ID NO: 106665 - RNA, 70 nt, Homo sapiens
acagaaagaagccaccccacagagcggggaacaagcacccacgcggaaacacggcccccaccagaaggac

SEQ ID NO: 106666 - RNA, 59 nt, Homo sapiens
ggcgcccgcacccaccgagaaccagccaccgacccgacaggagagacaacggaggcaag

SEQ ID NO: 106667 - RNA, 75 nt, Homo sapiens
gaaacgacgccaccgcccgccacgcacgccagaaccgaggagagaaggcagccagggcaccacccacacaaggac

SEQ ID NO: 106668 - RNA, 79 nt, Homo sapiens
cgcgaccagacaggcggcgccaccgaacagacccggaaggacggcgaggccaagaacccggccaaagcaagggcggacc

SEQ ID NO: 106669 - RNA, 79 nt, Homo sapiens
ggccacacggcggccgcagggcgccggagccccccaggaaccacacggcggaggcaccgacaaaccagcgaaggagcac

SEQ ID NO: 106670 - RNA, 76 nt, Homo sapiens
ggacccgcgccccagacagccgcccaccagggccaccagcgccccgggaaaaagacacccaaaggacggcgggaag

SEQ ID NO: 106671 - RNA, 71 nt, Homo sapiens
ggcaaaagccgccggcaacaaacaagaggccgcccacacgagcaaccgagaaagggagcggccccaccaaa

SEQ ID NO: 106672 - RNA, 115 nt, Homo sapiens
gcccacaccagcgaccccgccggcccgcgcgccccgcccagccggcgcggcggcacgacgagaaccgaccacaccgggacgagccacaccgcggcacgaaacagcggcaaaaaaa

SEQ ID NO: 106673 - RNA, 71 nt, Homo sapiens
cacgcagaagcacggaggacaaggccacaagcccgcgccagaccaacaagcggcagacccacaccggacac

SEQ ID NO: 106674 - RNA, 89 nt, Homo sapiens
aggagggcagagcgagcagcagaagaaagaacccgagagcccacgacacgaccaaagaggcagaaacggggacacaagcgaaaggcaac

SEQ ID NO: 106675 - RNA, 52 nt, Homo sapiens
gcagagaggagaaagcagggcccgacacccgcggacgcaggcgagacaggga

SEQ ID NO: 106676 - RNA, 63 nt, Homo sapiens
gcccagccccggagcgggaacaggggcccgcaaaacggaggcgggggcacaggccccaagagg

SEQ ID NO: 106677 - RNA, 78 nt, Homo sapiens
cccgcccccgcagcagcgccaggacccccgaccggcgggggcccacaaccggggccgaaccaacccacagcgggcggc

SEQ ID NO: 106678 - RNA, 75 nt, Homo sapiens
caaagcaaccagaccacgcacagaaagcccccgcaaaagggcccagcagcacaaacgcccagaagcaagcccccg

SEQ ID NO: 106679 - RNA, 72 nt, Homo sapiens
cccccgagcgggcccgcgggcaggcaagggggcaacagaggcggcggagaaggcgaacaagaggcgccagcg

SEQ ID NO: 106680 - RNA, 72 nt, Homo sapiens
gacacaagacgaaggagagcgaagcaagggaccgaagaagccaaagcggagcagggagagcaggaccacaca

SEQ ID NO: 106681 - RNA, 72 nt, Homo sapiens
aaggggggagggggaggagccgaacgagccccagccagggaggggaagcacggaaacgacggacaaagacac

SEQ ID NO: 106682 - RNA, 78 nt, Homo sapiens
cgcaagaggccacggcgggggcaccgagaagccccgaccgacggcacagagcagagcgcccaggcaccgcgagggcag

SEQ ID NO: 106683 - RNA, 66 nt, Homo sapiens
gcgaccaggggcgagagcgggcaccccccaaacgacgcagccacggagagaccggacaccccagga

SEQ ID NO: 106684 - RNA, 53 nt, Homo sapiens
gagagcaaaaggcagcgaaacagggcggcagggggaccagccagcaacccgcc

SEQ ID NO: 106685 - RNA, 79 nt, Homo sapiens
caacaacgggcaccggggccacccgccgcggggcacgcaagccagagggcccaaagcggagaggcacgagcacagggac

SEQ ID NO: 106686 - RNA, 69 nt, Homo sapiens
gacgcggaaaaaaagacccaggaggagcaacacgggaccgaccaagccagaccacggagccacagggag

SEQ ID NO: 106687 - RNA, 71 nt, Homo sapiens
caagggccgaagcagggcacaaaaccaaggccaagcaaggagagggcagaaggcaggaccaagcagggggc

SEQ ID NO: 106688 - RNA, 81 nt, Homo sapiens
cgggcagcgggcgcaggaccccgccccacgcccagggaagaagcccagcggaggcgaacggcccccgccaacacgaggacc

SEQ ID NO: 106689 - RNA, 81 nt, Homo sapiens
ccagcccgcagcagcagcccaccgaaggccagccgcaggcaccaagaagaccaacaagcagaagagccaagacaaaaagga

SEQ ID NO: 106690 - RNA, 60 nt, Homo sapiens
gccgccgcgcaccgcagcgccggggcacgacacaaaaacaggcccacccggcccgccccg

SEQ ID NO: 106691 - RNA, 64 nt, Homo sapiens
gagacgccgggaccgagggccggggacaaggccgccgaggaacagggaggccaggacgagccag

SEQ ID NO: 106692 - RNA, 57 nt, Homo sapiens
ggaccaagaaccagggaggccaagggaggacaccaggcccagcacgagagagcgacg

SEQ ID NO: 106693 - RNA, 83 nt, Homo sapiens
cgccagacggggagagccaccggccccagcagggccgaagcagaagacggccggcacccgagcccagagagcgaggaaggccc

SEQ ID NO: 106694 - RNA, 56 nt, Homo sapiens
cgcgaccccacacggcaagcggggcgcaggcaacaccaagacacggccacggcaag

SEQ ID NO: 106695 - RNA, 50 nt, Homo sapiens
cgccggcagggaacgcagggaagaaaacgccagagaagcagagcagcccg

SEQ ID NO: 106696 - RNA, 78 nt, Homo sapiens
gggacccacgagaccacaaccacccccagacggaaacaggccacacaaaggcagcggaaaaaagaaccccccaaacaa

SEQ ID NO: 106697 - RNA, 75 nt, Homo sapiens
agagcgagcgagggggggcgcgccggaaaccggagcgcgcagcaggccggcaagaagccaacggagaaccaaggc

SEQ ID NO: 106698 - RNA, 73 nt, Homo sapiens
cagccgaccgcacaaagcaagaagcccaacaagcacacccacagaggcagaccgaaaacacccagcaagaagg

SEQ ID NO: 106699 - RNA, 82 nt, Homo sapiens
caagcggcgcgccagagcggcacgagagcaccacaagcaaggaacaaaagaaagcaaggaaccaaaaaaacaaagaaggcag

SEQ ID NO: 106700 - RNA, 85 nt, Homo sapiens
ccggggcgcggcggagggcgaggcggcgcggccaggccaccccggggagccaaccagagccggaagaagaggaaagcaaagaagc

SEQ ID NO: 106701 - RNA, 71 nt, Homo sapiens
accggaacaacggagggagaaagccacgcagcgcaaagcggaaaaacagaaggcaaaggcaaaccaaacgc

SEQ ID NO: 106702 - RNA, 73 nt, Homo sapiens
gggacggcaaacggagccaggcacaagaaaaggcaggacccgaggcgccagcagcagcaagaccgggggacca

SEQ ID NO: 106703 - RNA, 56 nt, Homo sapiens
gccgccggacggccgcacccccgcccgagacccggcagcaagaaacggagcggaaa

SEQ ID NO: 106704 - RNA, 67 nt, Homo sapiens
gaggcccccagccagggaacaaaacaccgggaaaggcccaaaccggcgaaaacccccgggacagcaa

SEQ ID NO: 106705 - RNA, 87 nt, Homo sapiens
aggagggggcgcgcggagcaggagcggggccggaacggagccgaggcgcaggggcgcgggcagcaagcaaagacggaggagcagacg

SEQ ID NO: 106706 - RNA, 62 nt, Homo sapiens
aagaacccgaccaagcacgagagaaaaagcggaaagcgccgcaaggcagagacccgcaccgc

SEQ ID NO: 106707 - RNA, 96 nt, Homo sapiens
gaagagacccaccaggaagggccgaagaacaacgaagaagcaagaacaggcggccagcccggaaaaacagacaaggcgggcaacaaacgggagaag

SEQ ID NO: 106708 - RNA, 98 nt, Homo sapiens
aaccacggaaacaggcacggccacagaagcaacaaaggaccgcccccagagagacaccaggagacaaagccacaaaaacaccagaaaaaccaagcaga

SEQ ID NO: 106709 - RNA, 60 nt, Homo sapiens
ccaccagcagaagagcgagccaagggagggagagccgccacccggagcgaacagaaccag

SEQ ID NO: 106710 - RNA, 58 nt, Homo sapiens
cacaggccagccggcaaaaacgaccgaaggccccagcagcagaagagacgggagagcc

SEQ ID NO: 106711 - RNA, 74 nt, Homo sapiens
agaaacaagaagaacaaccagaagagaagacaggaaaaaaacccggagaggaggaacccaacacggaggagggc

SEQ ID NO: 106712 - RNA, 104 nt, Homo sapiens
aggggaggacagcagagaacggccaagaaagacagccaaagcacgcagaagaaggccaaagccgacagaaaaggaagagacccagcgaacaagaggaagacgag

SEQ ID NO: 106713 - RNA, 45 nt, Homo sapiens
agaccgcggccgggaccgagggggagcaaaacgcccaccacggag

SEQ ID NO: 106714 - RNA, 55 nt, Homo sapiens
gcgggccacaccgcaacccagcacggggaggagcagcagccgcaccgggaggagc

SEQ ID NO: 106715 - RNA, 74 nt, Homo sapiens
cgaaacccccccccccacccaccaaaccggagggggaaaaaacccaaggcgcaaaggagcccaagggccaagcg

SEQ ID NO: 106716 - RNA, 76 nt, Homo sapiens
cagggaccggcaggagagaagcgaagcaggccggggccgaccgccacacagccagcccaaaaagcaccggggccga

SEQ ID NO: 106717 - RNA, 41 nt, Homo sapiens
gcacagcgccccgccagcaaaaagggagacggagcgggccg

SEQ ID NO: 106718 - RNA, 37 nt, Homo sapiens
agaaagcaggacagccccaaaaaccagaaggcaccga

SEQ ID NO: 106719 - RNA, 55 nt, Homo sapiens
ggagcagcagaggggcgagcaggagcgaccgcgccaaacaggggccacccacgcc

SEQ ID NO: 106720 - RNA, 84 nt, Homo sapiens
ccgggagcgccacgccgagaccggagcagccaccgccgcaacaggggcacaagaacgaacagggcaacaacggaaagaaaccag

SEQ ID NO: 106721 - RNA, 42 nt, Homo sapiens
cgcagggccagcgggaccagagcagaccagccagccccaagc

SEQ ID NO: 106722 - RNA, 65 nt, Homo sapiens
ggaacacaacaagaagccagacccagaaaaaggacaaagaccagggggcgcccccgaaccgagaa

SEQ ID NO: 106723 - RNA, 80 nt, Homo sapiens
gcgaggaggggccccagcagcccccgaaggcccacaggacaggagagaaagacgagcaccagaggcagcaaaggaaccac

SEQ ID NO: 106724 - RNA, 75 nt, Homo sapiens
gcgccggcgaggaccagggggacgcagacggcgcacgcggggccaaccagaagacggagcaggcaaaggagaaaa

SEQ ID NO: 106725 - RNA, 77 nt, Homo sapiens
ggccaggaaacccgccaacaagaaacacgcggaaaaagggaccgcgaagagaccgagggaagggccgacggccgcgc

SEQ ID NO: 106726 - RNA, 71 nt, Homo sapiens
acaacggacaggaaggaagaaccacagcagcagagagaagcagccaagggacaggaagcaagggagagaaa

SEQ ID NO: 106727 - RNA, 69 nt, Homo sapiens
ggaaaccccgaaaggggggcagggagagaagacgcagaaaacagacacacagcggagacaagcagggcc

SEQ ID NO: 106728 - RNA, 77 nt, Homo sapiens
caggagagaagaagaagaaaccggagaaggaacagaccccggaggaggcgggcgccacggaaaggagggcggccaga

SEQ ID NO: 106729 - RNA, 63 nt, Homo sapiens
accccggcccaggcggcccgagaaaagcaggagaagcggcgcacggaagaggcacaaggaaag

SEQ ID NO: 106730 - RNA, 83 nt, Homo sapiens
gcgaccgcggcgcagcgacccccgccaggcaaaaggaagaaagccgggggcggcagaccagggcccagccggccaacgggcca

SEQ ID NO: 106731 - RNA, 79 nt, Homo sapiens
aacaacaccacaaaaccacagccaaggagaaggcacaacccgggaaccaggacaggccacggggaggcacggccgggga

SEQ ID NO: 106732 - RNA, 82 nt, Homo sapiens
gcagcaggcgaccagcgccacggcaggagacagagagaaagcaacagcaggccagccccagagcccggggagcacgagaaga

SEQ ID NO: 106733 - RNA, 80 nt, Homo sapiens
ccagagcgaagcgagcccgagccccgggggaggaagagcccaagagggcgaacagaaaagggcacggagcagcagcaggc

SEQ ID NO: 106734 - RNA, 77 nt, Homo sapiens
cggggaggagcggaccgaccgcccaaggagggaggaagaggcgcggcaagggcgcggcaagaaaaccggggccgccc

SEQ ID NO: 106735 - RNA, 85 nt, Homo sapiens
cccgaggaaggccagaaagggccgcacgcaggagggaccaagaaccaagagcaagacagaaggaagccaagggagcaggcaagga

SEQ ID NO: 106736 - RNA, 83 nt, Homo sapiens
gggcggagggcaagagcgccgaccgggcggcgaggaaggcgccccggggagagcgggacggccccaaggccacagaaaaggag

SEQ ID NO: 106737 - RNA, 72 nt, Homo sapiens
accacacccacaggcgacagagggcgggaggacaaagggagaaggcagagacgaagggcaagaagaccggaa

SEQ ID NO: 106738 - RNA, 48 nt, Homo sapiens
ccgacaccccaccaacacggccgaacccccgccaacaaacaaaggcaa

SEQ ID NO: 106739 - RNA, 77 nt, Homo sapiens
aaaaagcgcggagacaaggaagcagccaacagagggccaaacaagaaggcccgaagagaccccagcggaggagaccc

SEQ ID NO: 106740 - RNA, 71 nt, Homo sapiens
caacgacggcccaacggaagagacagacccagcacggaccccccccccagccgggcgaggccccgaaacgc

SEQ ID NO: 106741 - RNA, 66 nt, Homo sapiens
caagacccccccccggaggcggcgggcggaggcggcggggagaggggaaggcgaggagcggaaggc

SEQ ID NO: 106742 - RNA, 84 nt, Homo sapiens
cagagcggggagcggggacgcacggagagggcagcggaggcgcccccaccccggccaagggccgcacccagaccgaaggccacc

SEQ ID NO: 106743 - RNA, 72 nt, Homo sapiens
aagggccagaggagaagccaaagggaccgaaaacaaggacacgaggcacaagcacaaaacgagcggcgacca

SEQ ID NO: 106744 - RNA, 73 nt, Homo sapiens
ccagcgcgacagaagaccaggagacagggccccagcccggagagagagaagagagaacaaaccggggcgccaa

SEQ ID NO: 106745 - RNA, 70 nt, Homo sapiens
gagacgggcagacgaaggaagagaccgagaccaggaaccaggcaggggaacggagcgaaccagggagcgg

SEQ ID NO: 106746 - RNA, 50 nt, Homo sapiens
caaaaagaggccagaccgcaggccacaccagacagcccacaccggcaggc

SEQ ID NO: 106747 - RNA, 73 nt, Homo sapiens
ccgggcagcaggcggggaggggcagaagggagaagaaggaaggagagacgggggaaacccaaaagaggccggc

SEQ ID NO: 106748 - RNA, 71 nt, Homo sapiens
acaccagaaacagcgcaccacccgcagagcaaccaaaacaggacaagaaacaccaaacaagcaacagccaa

SEQ ID NO: 106749 - RNA, 77 nt, Homo sapiens
aagcagaggaagagccacaaccggaggggaacgcacgcagagccgggggcggcagcgccacgacaggaccaggcccc

SEQ ID NO: 106750 - RNA, 74 nt, Homo sapiens
gggcagcgcaggagagcggacaggccgaacgcaggagagagacacaccgacacacgaggcggccagacaacacc

SEQ ID NO: 106751 - RNA, 72 nt, Homo sapiens
cacggaagacagaagcagcaaagcaaccggggcaggcaggaaccacccggagaaaagagaaccccaaaggcc

SEQ ID NO: 106752 - RNA, 79 nt, Homo sapiens
aagccccagcaggaagggggggggaagaacaggagcacacaacgcagggaggaccacaggggcaagaggggaagccaag

SEQ ID NO: 106753 - RNA, 84 nt, Homo sapiens
cggccgccgaccaagacagagcaaggccacgacccacgagacaggggcccaagaaaaagcaccggaccggagcagaccaccgcc

SEQ ID NO: 106754 - RNA, 80 nt, Homo sapiens
gcccccgagggcgggaacagaccccgggccacgcccaaccaggacggcggcggcggaaggagagagcaacgggagaccgc

SEQ ID NO: 106755 - RNA, 60 nt, Homo sapiens
gccggagacaccagcagagccccccaagagaacccagggggagccacgccggagcgggca

SEQ ID NO: 106756 - RNA, 78 nt, Homo sapiens
ccccgccccgcagaggccaggaggacgaggagagacagaagaagcggaggccggcaaagccaagggagcacggcccag

SEQ ID NO: 106757 - RNA, 72 nt, Homo sapiens
aaacacaaagaggcagcaaaggcgaacaagaggcgccagcgggcgcgccggaagaacagcgccacgccacac

SEQ ID NO: 106758 - RNA, 85 nt, Homo sapiens
agcccgaggcccagaggaggagaagagcaaagcagcgccgggaagagaacaccaggcacggaggccgacccaaggggcccggcca

SEQ ID NO: 106759 - RNA, 80 nt, Homo sapiens
cgcaccagcaagcgcggggagaaagacagcaaagaaaaggagaagaaaggaaaaaaacaaccccgggcaccccgccagcc

SEQ ID NO: 106760 - RNA, 61 nt, Homo sapiens
aggaaaaacagaacagcgcccgcgaaaggccacacacggccccccgagagcggaagagacc

SEQ ID NO: 106761 - RNA, 85 nt, Homo sapiens
agccacgaggcgagccagagccgcagcccacacgcggagccccgggcccagcaggaggcggcccccgcggaccgcccgcccagcc

SEQ ID NO: 106762 - RNA, 53 nt, Homo sapiens
cagagcgagaaaccagggcacagagacggccggcaacaagcgaggggggaggc

SEQ ID NO: 106763 - RNA, 59 nt, Homo sapiens
gggcgaagcgacgagccgcgaggagacaaagggggaggaagaaaggaaaggcacccaaa

SEQ ID NO: 106764 - RNA, 72 nt, Homo sapiens
aaggaccaagaaccagaccaaacaccgggaaaaaagacaaaccagagggaggcgaacaaaaggacccagccc

SEQ ID NO: 106765 - RNA, 69 nt, Homo sapiens
cacaaccacccgggcccaaccagcccagcgcgcggccccaccgagccagcagaggccaaggcagcagcg

SEQ ID NO: 106766 - RNA, 70 nt, Homo sapiens
aagagaagcgaagagacgaaccacaagagaaaggagggcccagaaccgggacaacccagcaaacaggcca

SEQ ID NO: 106767 - RNA, 62 nt, Homo sapiens
agccgagaacccggcacaccagggccggaagcccaagcgggaaacagaccagacgaaaggcg

SEQ ID NO: 106768 - RNA, 63 nt, Homo sapiens
ggcgggggcgccggcagaggaccaggcaccaccggccccggaaggcgagagccacagaaggag

SEQ ID NO: 106769 - RNA, 77 nt, Homo sapiens
cgcgagcgaggcaggaaagggggcagggcaccacagaacagccgaagcaggccaccagccgagaacgaggaacacga

SEQ ID NO: 106770 - RNA, 70 nt, Homo sapiens
ggagagccgcgggccacagggcagagaaagagcagcgcccgaagggacgcaccaaagaagacagacacgc

SEQ ID NO: 106771 - RNA, 71 nt, Homo sapiens
ccgcgcgcgaggagaggagcgcaacagcagcaccagggggcagcccgaggccccggggggaaagccaagac

SEQ ID NO: 106772 - RNA, 67 nt, Homo sapiens
ggggcacgcaaagaggaccgccaacaacagcacagggccaacgaaaacgcggcgacagacgaagaac

SEQ ID NO: 106773 - RNA, 86 nt, Homo sapiens
aagcaagcagcagaagagccaaggaaaaacagcaagaacccaaaagggagcgaaaacgccacaacagagggggccagggcggggaa

SEQ ID NO: 106774 - RNA, 79 nt, Homo sapiens
gaaggccggagagccgcccagcagcacaacacagggaagcggggagggcccggcaggaaccggaacaacccacagggca

SEQ ID NO: 106775 - RNA, 74 nt, Homo sapiens
acgccaacccaaggaaggaccaaacggagaaccagcccaaaggcaggcccggcaccgaggccgaaacccaaggg

SEQ ID NO: 106776 - RNA, 54 nt, Homo sapiens
gcgcgggagacgagcacgcgcacgggaaagaagaaagcaccccgcaaaagaagg

SEQ ID NO: 106777 - RNA, 56 nt, Homo sapiens
ggcggagcggagacgggagaagaaaagacggagaagagcccaacaccaaagcccag

SEQ ID NO: 106778 - RNA, 82 nt, Homo sapiens
cgggccgggcggggccccagcgcccgggcgcggggcggaaaaggccggcagaagggaggcacgagagcagcagagccccagg

SEQ ID NO: 106779 - RNA, 69 nt, Homo sapiens
cgaccccccaagcagacaaccagaagacgacagcacagccgccaaagcgacgaaaacacaagcgaaccg

SEQ ID NO: 106780 - RNA, 73 nt, Homo sapiens
agaaacagcgcccacagggcaggagccaacccagcaacacgacaccagggagggccagaggacagcgacagaa

SEQ ID NO: 106781 - RNA, 81 nt, Homo sapiens
cggcacccccggccccggagcgccggaggcggccgcaccggcccgacacgacaaccaccagcaccagaaaaacgaggcgga

SEQ ID NO: 106782 - RNA, 67 nt, Homo sapiens
gacggaaacgacagaagcagaggaccggggccagggaggccacgcaagagccacacggggagagcca

SEQ ID NO: 106783 - RNA, 76 nt, Homo sapiens
cagagacgccgggcccagggcaggacaggccgaaaacccccaggccacgccgggccagaaaaggggaagaaagaca

SEQ ID NO: 106784 - RNA, 71 nt, Homo sapiens
cacgcacccgcaccaaggccaaggagggagggggggaacggaacccaggcgcaaagcggggcgaagaaggc

SEQ ID NO: 106785 - RNA, 75 nt, Homo sapiens
gaccgggaaaaggccccagaagaggacgcgcccaaagcgaccacaacgagaaagcccaccgggacaccgacccaa

SEQ ID NO: 106786 - RNA, 56 nt, Homo sapiens
aaacccgacccccaggcggcgcccagacccacacccagcaaaaaagacgaccacca

SEQ ID NO: 106787 - RNA, 61 nt, Homo sapiens
gacaacaaagcgcgggaacaaagcagcccaggcagaccccaggggggcacggaccaggccc

SEQ ID NO: 106788 - RNA, 74 nt, Homo sapiens
cgaacgcagcaggaggcgcagcagcacaagcagagcgcggcccccccccgaggcacccagggcggaagcccgca

SEQ ID NO: 106789 - RNA, 63 nt, Homo sapiens
aaaaggagcgcaggccgaggagaagaccccaaacggcaccaaaaacgaccgaaacaaggaccc

SEQ ID NO: 106790 - RNA, 64 nt, Homo sapiens
gagaagccaagaaagacagcaggccgggggagcccaccaggaacagcagcccagcagaccaggc

SEQ ID NO: 106791 - RNA, 67 nt, Homo sapiens
ggaagggaggaacaggccaggaaccgggaacaagcgcgagaaggaacaaaccaggagaaaccgaaca

SEQ ID NO: 106792 - RNA, 73 nt, Homo sapiens
gagccgccaagaggcggcgcagccaccccgcgggaacgcccagcgcggccccggggcagaagagcggcgccga

SEQ ID NO: 106793 - RNA, 73 nt, Homo sapiens
cagcacagaccgcccaagccgaggaccaaaccaaaaggcaggaggggcggcaaagggaggcaaagcaagaaag

SEQ ID NO: 106794 - RNA, 68 nt, Homo sapiens
acaaacagaaaaggaagaaagggacaaagagaggagcaggcggacaaaaaaaaaagagaaagcgagcc

SEQ ID NO: 106795 - RNA, 76 nt, Homo sapiens
ccgggcccagcacagccagcaccgcacgcccgcaagggagccaggaacgcaagaaaaccccagaaacccccagcgg

SEQ ID NO: 106796 - RNA, 69 nt, Homo sapiens
cgacagaacggagcacgaaaacaagccgacaggagaagagcagcccgacggccaggaggcgaagagacg

SEQ ID NO: 106797 - RNA, 78 nt, Homo sapiens
gggcccccgagaaacaccggggccagaaagagccgcagacgcacagcaaccaccggacccgaaggccaccacccagag

SEQ ID NO: 106798 - RNA, 44 nt, Homo sapiens
ccgcacccgacagagacgacgcggcccccaggcacgaagcgaag

SEQ ID NO: 106799 - RNA, 73 nt, Homo sapiens
cagccgaccgagcccaggagcgccacgcgcggaaggcagcgcccagcagcgcagaaaagggacggacccaggg

SEQ ID NO: 106800 - RNA, 72 nt, Homo sapiens
aaccgccaacgcaaggcacccgagaaccaggcagccaacgaaggggagaaaagccgggccaggcgccggcag

SEQ ID NO: 106801 - RNA, 84 nt, Homo sapiens
aaaggggcccgggaggggaaaaaccagagacccccgaagacggagagccggagaggaggaaggagaagcccgggagcgcgcggg

SEQ ID NO: 106802 - RNA, 77 nt, Homo sapiens
gacagagggagccaggcagaggaacgggggacaggcagggcgggcccgacccggggaagaaaacccacgaccggggg

SEQ ID NO: 106803 - RNA, 68 nt, Homo sapiens
gcgagaacgggccaggcaggaagggagacaggcaagggacgcggagacccccccgcagccggaacaga

SEQ ID NO: 106804 - RNA, 51 nt, Homo sapiens
cgacaccagcaccccggccccggcccgcccggcccagaagagaacaaagca

SEQ ID NO: 106805 - RNA, 81 nt, Homo sapiens
agcagccccgcgcgcgcgagagcccacgagcgaggccgcaggggagcccggcagccgcccggaacagacaagagaacccac

SEQ ID NO: 106806 - RNA, 86 nt, Homo sapiens
cgcaagcggaacccggcggacggacccgcagacggagacggggccggagacccaaacagaggagaggaaagcgcgagccagagaaa

SEQ ID NO: 106807 - RNA, 73 nt, Homo sapiens
caaaaacggcccggagaggagacgacccacaggagcaaaccccgaaaaaccacgggcgccaagacaggccagc

SEQ ID NO: 106808 - RNA, 69 nt, Homo sapiens
agaaggcgaggagaaaccaaagaacaggggaccgccaaccaaaggacggcacaacacaaggagcaaaga

SEQ ID NO: 106809 - RNA, 77 nt, Homo sapiens
aggaaccagacacgcaaacaggaaggaggcagaaagggagccccaagagagagggccaagccaaccggccaaaacaa

SEQ ID NO: 106810 - RNA, 69 nt, Homo sapiens
gaaagagaaggcgcaccggaggacgacaggcaaaggaagaagcgcaaccacaccacaaaccagaccagc

SEQ ID NO: 106811 - RNA, 55 nt, Homo sapiens
cagcgcacgaggagaagaaaaccagacgagagacagaagacgaaagggcaagaaa

SEQ ID NO: 106812 - RNA, 83 nt, Homo sapiens
cacgcaccgacagcgccgccaccgagccgggcccaccccccaccaaggaagagagcgggacgggcagaagaaaacccaccaag

SEQ ID NO: 106813 - RNA, 54 nt, Homo sapiens
caaagacaacgccaggaaaagcgcaggaaaaacccgaggacccaccgcaaggcg

SEQ ID NO: 106814 - RNA, 86 nt, Homo sapiens
ggagcccggccggagcgggcggagacgccgggcagccgaacggagggcgacggagggagcaacgcagccagccagacgaagaacgg

SEQ ID NO: 106815 - RNA, 74 nt, Homo sapiens
ccgcgaacagcagaggacgcgaggcaggggggccggggccgggcgcgcgcaggcagaagaaaccagacaagagc

SEQ ID NO: 106816 - RNA, 89 nt, Homo sapiens
ggggcacgcagccggggaccgcccggccgcgagccggcgcagacgggacccaaagaacaagccacacgcccacaaggaagaaggaaaca

SEQ ID NO: 106817 - RNA, 73 nt, Homo sapiens
gaaagccagccaaccaaagacgggaacaagggagggggacagaccaaagaggaaacgacaaagccccagagaa

SEQ ID NO: 106818 - RNA, 70 nt, Homo sapiens
gggcccccggccggcccggacacaggcccgcgcgccgcggcaccaggcgcaggacaagacgacagaaacc

SEQ ID NO: 106819 - RNA, 74 nt, Homo sapiens
gcagcccgggcgccgaggaggaaggaccccacacacaaaaacggaggaggagagaaagaacccacgcaggacga

SEQ ID NO: 106820 - RNA, 78 nt, Homo sapiens
gcgggacaaccgcaccaggccacaaggcgaacaaccagccccaaccacagaccgacgcagagcgcgggggccaaagaa

SEQ ID NO: 106821 - RNA, 76 nt, Homo sapiens
cggagcggccaacggcaggaggagaaagacagcaaagaaaaggagaagaaaggaaaaaaacaaccccgggcacccc

SEQ ID NO: 106822 - RNA, 69 nt, Homo sapiens
cagacggaccgggaaacaccccaggccacagcgcggagaaccagccagagagccaaggcacggcaacca

SEQ ID NO: 106823 - RNA, 69 nt, Homo sapiens
agaccacaaaggaaaaggaagagaccagaagagcaggaggaaacaaaggaagaccaccaagaagagcgg

SEQ ID NO: 106824 - RNA, 64 nt, Homo sapiens
gcggaaccgaaaaacaagaaggaaaaacgccacgcaccggagagagcacaggaccacgacgcga

SEQ ID NO: 106825 - RNA, 84 nt, Homo sapiens
gccagccgggcgcgcgaagcggcgcggggaggcagcggaaggcggcaggggaagcagggaaaggccggagagaggaagcggccc

SEQ ID NO: 106826 - RNA, 72 nt, Homo sapiens
acacacccaacccaaaccaagaaaaacaccagcaaccgacggcagcaacaaggacaggcacagccccgccac

SEQ ID NO: 106827 - RNA, 74 nt, Homo sapiens
ggcagcggaagacaaaccacaacaacacagcagaggacaccagaggacgcccggcagaagggagcgagcagcac

SEQ ID NO: 106828 - RNA, 84 nt, Homo sapiens
gaggcaacagaacaggaggacgcgcgaggaccccagagccacgccgccaggagcccgaacacagccacgcaaccccaccggcca

SEQ ID NO: 106829 - RNA, 76 nt, Homo sapiens
gggccgagccagccgcggccggaggagcccccaggccccgccaagaaagggaagcaggcaagagacaggaaggcca

SEQ ID NO: 106830 - RNA, 80 nt, Homo sapiens
gaccaacaagacgagggcgcagcacaggcaaaagcagaccggaaaacccaccggcaagaccacacccgaggggagcccag

SEQ ID NO: 106831 - RNA, 39 nt, Homo sapiens
ggacaccacaagaagggcgccagacgaagggagggaagg

SEQ ID NO: 106832 - RNA, 82 nt, Homo sapiens
cacacccccacggccgccgccagaaagaaggggacaaccgaaagagccaaccaacgcacacaccgaccaccgaccgacaccg

SEQ ID NO: 106833 - RNA, 71 nt, Homo sapiens
acgaaggcagggagcccgaggcccaacaacaacagaagaagagcagaacccaggacaacgccgagacaaga

SEQ ID NO: 106834 - RNA, 83 nt, Homo sapiens
cggagcgcacggaggagacccaggccacgccagaagggcacgggagaagaggagccggacggcacaccgcccgggcaccaaca

SEQ ID NO: 106835 - RNA, 79 nt, Homo sapiens
gaagaccggcggccacaaggccgcccagccgcacgcgacgacagccccggcacaaagcagaccgccccacgggcgcgcc

SEQ ID NO: 106836 - RNA, 62 nt, Homo sapiens
cgccgcggacagccagccaccagcagaaggccccggagccagcccaccccaagccccaggca

SEQ ID NO: 106837 - RNA, 75 nt, Homo sapiens
ccccggagagcgggaacagcaggagccgggcaggaaccaacagagcacaacaccgaacaggccacaaaaccccag

SEQ ID NO: 106838 - RNA, 74 nt, Homo sapiens
ccagcggaggacgacggcgagcacagacggcccgagaacacaaacagccgggaagcaccgccagcaagcaagag

SEQ ID NO: 106839 - RNA, 41 nt, Homo sapiens
gggcacggccgcggaacaccggggcaaccgcggagggacca

SEQ ID NO: 106840 - RNA, 66 nt, Homo sapiens
aaaaacagcacagaaaagaaaaggaaccaggaacgcgggacccccaggaccaccgacacccaccac

SEQ ID NO: 106841 - RNA, 86 nt, Homo sapiens
cccgacccaggacggaccggaaggcccagaaccaagggggaaaaagaagcccggcggccgggagggggcgacgcggcgagggaagc

SEQ ID NO: 106842 - RNA, 85 nt, Homo sapiens
acgaggaccgagaccgcggccgggaccgaggaaccccgggggcccccccaggcagcaagccaggagccggccacccccccaccag

SEQ ID NO: 106843 - RNA, 73 nt, Homo sapiens
gaaaccacaaacaggaagcagaaacaaggagggaacagaccagacaaagggagcaccagccagaccgggaaga

SEQ ID NO: 106844 - RNA, 71 nt, Homo sapiens
gaaacaagaggaggagggggaggaagagccacaggaagccaacaacgggaaccgagagccaggaaagacac

SEQ ID NO: 106845 - RNA, 74 nt, Homo sapiens
agaaggggaggggagggaaaggcccaggaaaaaggcggaccggacaaagggggggggagcggagggcggaacaa

SEQ ID NO: 106846 - RNA, 40 nt, Homo sapiens
gcggaacaggacgccccgagagagaccggagcagcgagga

SEQ ID NO: 106847 - RNA, 79 nt, Homo sapiens
cggggcggccacgggcaccaccggcaggcacggccaagacagccgaaaacacaagggcaaaggaggaagaacggggagg

SEQ ID NO: 106848 - RNA, 41 nt, Homo sapiens
agaggaagaggaacgcagcgcaggcaacagacgacaaaaaa

SEQ ID NO: 106849 - RNA, 81 nt, Homo sapiens
gggggaccagaggaggagcgaaaagaccaacaacgaaacccggaggcccaggcggacaagacgaaaaggaggacaaaagaa

SEQ ID NO: 106850 - RNA, 42 nt, Homo sapiens
cgagaccagccggccaaaagggaccacccacccggcccccaa

SEQ ID NO: 106851 - RNA, 72 nt, Homo sapiens
ccggcaaggaaaccgcaggcgcccgggcaagagcaaagagaggcaccgggaagcccaacgcaaccagaagga

SEQ ID NO: 106852 - RNA, 76 nt, Homo sapiens
ggagaaaaggaccagggaggacggagggaagcagagccccgggccgggaaggggaaacggccacgcaggaaccaca

SEQ ID NO: 106853 - RNA, 75 nt, Homo sapiens
gcccgggccgcgcccgagcaaacccggaccggcggggggaaaaaaggagccgcccccggacgcaagggggaaaaa

SEQ ID NO: 106854 - RNA, 87 nt, Homo sapiens
ccgcgcgccgcgcacccgcgccagcaccacgcccgcgccgcgccgccgccaccagcccaagagaaagagaaggagggggcagagcac

SEQ ID NO: 106855 - RNA, 75 nt, Homo sapiens
gacgccggagaggcaggcgcggcccgcggggcgccaggcacgcgaggcccccagaggcccacgcggaccggcagc

SEQ ID NO: 106856 - RNA, 81 nt, Homo sapiens
gcagcaaacccgcggcccgcaagcccggccggcccggcccgccgcgcccggaggagccgcccaggaagggcaggaagaaga

SEQ ID NO: 106857 - RNA, 67 nt, Homo sapiens
cagaagacagagggcgagggggacagaggagccaaaggccaaaccaccagcagacagcgagcccgaa

SEQ ID NO: 106858 - RNA, 70 nt, Homo sapiens
caaggcaccgccagacgccgccgccaagcgaggccaggagagacgcccggaggggcacaaagggccacag

SEQ ID NO: 106859 - RNA, 36 nt, Homo sapiens
caaaagaggagaaagggaggaggccgagcaggccga

SEQ ID NO: 106860 - RNA, 53 nt, Homo sapiens
ggaacaagcccgggagagggccaccagggcggagcgcgaggcaagaacgccag

SEQ ID NO: 106861 - RNA, 85 nt, Homo sapiens
aggcaggagagaagaggcagcagaagccagggcagcgaaagacagagacccagggaacaagaaagcggcaacaagaaaccaaaag

SEQ ID NO: 106862 - RNA, 59 nt, Homo sapiens
gcaaacccagaccggccagaaaagaaaccaagcaaggacaaggagaaacagggagaaaa

SEQ ID NO: 106863 - RNA, 55 nt, Homo sapiens
aaagaagccgcccaggaacagacccgagcaaaggggagcgacagaacaagaaaga

SEQ ID NO: 106864 - RNA, 60 nt, Homo sapiens
ccagggagcgggcaccaggggggagggggccccgaagcgcgccccagaccaccggcaggg

SEQ ID NO: 106865 - RNA, 89 nt, Homo sapiens
ggaagcaccgaccagagccgaggggagggggagaagaggaggaggacgaagaggaggagagaagagaggaagcgagcagcacgggcaag

SEQ ID NO: 106866 - RNA, 72 nt, Homo sapiens
caaaaggacgggacaaagacaacaccagcccgaaacacccaggaccgagagcagaacaagacgcccaggaga

SEQ ID NO: 106867 - RNA, 85 nt, Homo sapiens
gcacggggaccagccggcaaagcaggccggaggcaacacaggacagggaagccaaagagacgaagggcccgggaccgggacaaac

SEQ ID NO: 106868 - RNA, 76 nt, Homo sapiens
aggcagggagagaggggcggaaaggaagggacggggagcaccagccaaggccccggcccacagggagcggggacgg

SEQ ID NO: 106869 - RNA, 69 nt, Homo sapiens
gcagggcgcccccgaaccccacggacaacgaggacaggggagccccgccagggcggcggcccagcgccc

SEQ ID NO: 106870 - RNA, 58 nt, Homo sapiens
cgccaggcccaagcagcagcagccgagccagcccaaggagaggcacacaggacaggac

SEQ ID NO: 106871 - RNA, 83 nt, Homo sapiens
aggagaaggggaggccggcgagcgcacccccagcccgacggagcagcagcgccgggaaggaaagcacacaggacagaagcaga

SEQ ID NO: 106872 - RNA, 71 nt, Homo sapiens
gaaagaaacaaaagcacccgcgaaggacaccccgcagacacccccgcgcgacgcgacgcggccccgcgccc

SEQ ID NO: 106873 - RNA, 79 nt, Homo sapiens
gcacagaacaacagaagaggagagaggaacccgaagaagaaaggacgacagccagagaggcagaagcccccggggagag

SEQ ID NO: 106874 - RNA, 107 nt, Homo sapiens
ccgggaggaagaaaagacaagcggcaacgggccaacccaaagaagacagccaaagaaggaaccagagcaggccaagacagcagcacgagggacagcggagagagggg

SEQ ID NO: 106875 - RNA, 69 nt, Homo sapiens
gggaaacgcaaacgggcgcgccggcgccggaccccagcaaaggggacaaagccgcgaaaaggaacccac

SEQ ID NO: 106876 - RNA, 80 nt, Homo sapiens
cccgcgccggcacccagcggcgggggccaaggcgcgcaggcgccgcacaaggcacgagcaagcggccggaaaggggcggg

SEQ ID NO: 106877 - RNA, 79 nt, Homo sapiens
agcaaacaagaacagaaaacaaaggagaacggcaaaaggcgaggacgggcagaagccggaaaacaaggaagaaaaagaa

SEQ ID NO: 106878 - RNA, 79 nt, Homo sapiens
ggaacccgcccccagggagggaacaaagcccacagcaccggcaacagagcccagaggggggaaacaggccgagcagcac

SEQ ID NO: 106879 - RNA, 85 nt, Homo sapiens
ccaccagagggaaagcggggcgggaccaagaaaggcccagggaccaaagcccggacaaggcccgagcaccaggaccgcagaaggc

SEQ ID NO: 106880 - RNA, 66 nt, Homo sapiens
aaggaccaagaaccagcagaccacgagagaaccgaccccccacccgggaacgcgccccagccccag

SEQ ID NO: 106881 - RNA, 118 nt, Homo sapiens
ggcagcggaccagccagcggacccgaccaggagggagcggaaaacggggcccgggccgggaggaagacaagggggacacggacacgccgccagaaagagaggggagaacaagagaaaa

SEQ ID NO: 106882 - RNA, 36 nt, Homo sapiens
aagcgagacccgggggcaaccacacgacggcgccca

SEQ ID NO: 106883 - RNA, 75 nt, Homo sapiens
gccaccggggagcgaaggccaagagggcaaggaaggaggggcagcagcaggacagggaacccgggagacagcaac

SEQ ID NO: 106884 - RNA, 79 nt, Homo sapiens
aaaccacagacaaggaaccacgcggcccagagcgcgaccggcacggggcagcgcggcacgacaacacaggccacgcccc

SEQ ID NO: 106885 - RNA, 82 nt, Homo sapiens
cgcagaccgcagaaggccggagacaccagcagcccgccaggagcccggaaggggccgcacgagacagaaagacacaccaaac

SEQ ID NO: 106886 - RNA, 83 nt, Homo sapiens
cacagacgaacacgaaggaacacagcaggcagagaacagaggaggaggagcagaaagcaagaggaaaggagaagagacgaaga

SEQ ID NO: 106887 - RNA, 61 nt, Homo sapiens
cggaacgcccgccccgcagagagggaccaagaaaggcccagggaccaaagcccggacaagg

SEQ ID NO: 106888 - RNA, 69 nt, Homo sapiens
caccaggccaaagaaagagaaccagccacagaccagccggggggcagcagccgccaccaggagcccaac

SEQ ID NO: 106889 - RNA, 89 nt, Homo sapiens
cgacaagacaccacggacgagagacaaacgccgaagggcagcgcaagaccccgcacggaagcagcaagcacaggcagcgcagagccaga

SEQ ID NO: 106890 - RNA, 76 nt, Homo sapiens
gccagcgggggcgagccacagccagcacgccgaaaggggacgagacaccaaaacgaagacaggggaacaacaggcc

SEQ ID NO: 106891 - RNA, 77 nt, Homo sapiens
caggacgaggaaaagaggacaagggacgccccaagccacgcacccagaggggagcaacacgaagaaacgaagccgga

SEQ ID NO: 106892 - RNA, 77 nt, Homo sapiens
acggaagagaggccagaccggagcgagcccagggcggggcgaaaggccacaaaccaagagcaggagagagcaggcgg

SEQ ID NO: 106893 - RNA, 82 nt, Homo sapiens
gacagcagagcggggcggccacaagcaaagaggcagaggaggggacacggggacgcccggcggcccgcagagggcggcaaca

SEQ ID NO: 106894 - RNA, 81 nt, Homo sapiens
ccaccgaagacgaccagacgagccagcggagggcgcagagggccggagcgagggagagcaggaacacagagaggagggaga

SEQ ID NO: 106895 - RNA, 74 nt, Homo sapiens
aggaggggaaagaaagaccagaggaaacagcccaaccggacacacacagaggcggacccccaccgcgaccaccg

SEQ ID NO: 106896 - RNA, 72 nt, Homo sapiens
gagcggccggccgagcacggcgcgccgggcccgccggcccccccaggacacagcacccaaagcaccacccca

SEQ ID NO: 106897 - RNA, 79 nt, Homo sapiens
gcgaagacacagagccacaaccaaaagcgcaggggagccgccaccaaaagcagacggaaaacccacggggaagaccaca

SEQ ID NO: 106898 - RNA, 33 nt, Homo sapiens
gggcaagggaagaaaaggcaccggagagcgaag

SEQ ID NO: 106899 - RNA, 65 nt, Homo sapiens
agcgccccaggagaaacaagggccacggaccacaagggacaacaccacagagagcgcaggagggc

SEQ ID NO: 106900 - RNA, 70 nt, Homo sapiens
cccgcgcaccaggcgcagagggggcggcgaccgagaggcgcggagccggggacgcgaaggagacccagga

SEQ ID NO: 106901 - RNA, 77 nt, Homo sapiens
gccgcgggcagcgcgcggcccgggcagcaggaagccaagaggggcaacaagacaccaggagcaggagaaagaagcag

SEQ ID NO: 106902 - RNA, 52 nt, Homo sapiens
cgccgcgcgaggggcgaacagaaggagcggcggacacacagacccccaccaa

SEQ ID NO: 106903 - RNA, 74 nt, Homo sapiens
ggacccgcgggagaggcgcagcggaggcggaagcaggaccggggcacggagcaagggagaacaagcagccaaca

SEQ ID NO: 106904 - RNA, 81 nt, Homo sapiens
ggaagcgaccccccgcccccccgcaacgggccacaacccacgaggacaaaagcaacgaccgaggcagaaccggacgagaca

SEQ ID NO: 106905 - RNA, 78 nt, Homo sapiens
gaagaacagagagcccaggagccaaaggaagcaaaccaggagccacagcggcagggaaaaaaccagcaaccgcgggaa

SEQ ID NO: 106906 - RNA, 86 nt, Homo sapiens
cagagacaggccagagggggccgccgcggcagcaagaacagagagagaggggacagacgagagaacgagcccgcaccagggcggca

SEQ ID NO: 106907 - RNA, 79 nt, Homo sapiens
gaagacaaagagggacagcaagaaaaccacccacacagaaagccagggccggagggagaacagagcggccccccccacc

SEQ ID NO: 106908 - RNA, 70 nt, Homo sapiens
caagacgggaagcccccaagcccaaaaggcagagcgaggagagaagaaggagggaaagccaaacaacgga

SEQ ID NO: 106909 - RNA, 101 nt, Homo sapiens
cggacaggcggacaaaacggagggacagaccaccgaaggaccggaagaggggccagccaccaggcccagccggagcgcaccacccaagcaaggcaggagaa

SEQ ID NO: 106910 - RNA, 63 nt, Homo sapiens
gaccacaccaagcgggagacacaccacgccaagggacacggaggcagaggaagcagaccagag

SEQ ID NO: 106911 - RNA, 84 nt, Homo sapiens
ccgaggaggagaagaggaaccccgcgcgagccagcaacggcggcgagcaggccgaggcgcacccacgacgcgcacaccaccggc

SEQ ID NO: 106912 - RNA, 72 nt, Homo sapiens
gccacccacggaccagcagcgccgagggaaacccggagaccaaaccgaaaccagcagacggcagaggagcgc

SEQ ID NO: 106913 - RNA, 74 nt, Homo sapiens
cagccgccaggcagacagggccgaacaaggcccacgcggaccggcagcgccaccggaccaccagacaaggacac

SEQ ID NO: 106914 - RNA, 81 nt, Homo sapiens
ccggggaagccgcacaccagaggccagcaagcggagggcgggagcgagggcggagcacagaccagcgcgcgaccggagccc

SEQ ID NO: 106915 - RNA, 81 nt, Homo sapiens
cgccaggcaacacgggaggcggagcgcagccagaccgcacccacccagggccaagcagggggcagggaagacggagcacgg

SEQ ID NO: 106916 - RNA, 63 nt, Homo sapiens
caagccgggggacgaccgggacagcaccggcgcaccaggccagcacccagaaaaagcaccccg

SEQ ID NO: 106917 - RNA, 61 nt, Homo sapiens
gcccgagacgggagccccggccccgggcccaccggcagaaagggagaaacacaaagggaag

SEQ ID NO: 106918 - RNA, 82 nt, Homo sapiens
cacaaaccggaaaacggaaagaaaaggagagcaccacgaggaccaagaaaggcccagggaccaaagcccggacaaggcccga

SEQ ID NO: 106919 - RNA, 85 nt, Homo sapiens
cagcccaggcgagcccgcccagcgacccccagacacccacccaacccgaggagacgccccagaggcgaagccacaggcagaccag

SEQ ID NO: 106920 - RNA, 81 nt, Homo sapiens
ggcagcggggcgaggaggagccaagacgagaaaggaggaacgaaacacccaagccggggccaaggggaaacgcaggaagaa

SEQ ID NO: 106921 - RNA, 68 nt, Homo sapiens
cagaaagcaaagcaaccgaggagaacaaaaagaaagaagcggaaagcggacccgaccacgacccgcgg

SEQ ID NO: 106922 - RNA, 86 nt, Homo sapiens
aacggcgcgcccagaagaagggaaggcgcgaggaggaaaggaggacgaggcacagggaacacccaacagaagaaaaggagaaaaag

SEQ ID NO: 106923 - RNA, 76 nt, Homo sapiens
caccaccaagcgccccgagaccgccggcgcgagcgcaagacacgaaacaccgagagagggacacagagccacaaaa

SEQ ID NO: 106924 - RNA, 74 nt, Homo sapiens
gagcgcgaaacgcacgagaaggaaggacgagcccccgcggagacagcccgaagaacccgaacgcaagcggcaac

SEQ ID NO: 106925 - RNA, 55 nt, Homo sapiens
gagggaagcggcaaaccaaaagagcaacggcaggaagaggagaggcggacgcagg

SEQ ID NO: 106926 - RNA, 68 nt, Homo sapiens
agagggcagccgccgacccccccacaaggcgaccggcccgaggaccgccgcacgaccaaacgcagaac

SEQ ID NO: 106927 - RNA, 70 nt, Homo sapiens
cccggcgccgcgccggcggcggggaggcaagcaggggggcaaaggaaagaaggcagaaagggaggccagg

SEQ ID NO: 106928 - RNA, 79 nt, Homo sapiens
agcgccacggcgggccgcgggaggacaccacccacaggaaaccccccaggcaagaggcgcaggaccgggaagaccaaca

SEQ ID NO: 106929 - RNA, 67 nt, Homo sapiens
gcggcgccgccaacgcgcccccgaggaacaaacccacgacaacaggaaaggccagcccccggcgcgg

SEQ ID NO: 106930 - RNA, 76 nt, Homo sapiens
acgaccccggacgccggagaaaaaaacacaaccccacagggccagcgccccccaggccacccaggaccagcggcac

SEQ ID NO: 106931 - RNA, 84 nt, Homo sapiens
gagaggacgggaccaggcgaagcggccgagcaggcgagcgaacgacgggcagggacagagaagaccggccaggcagaggcccgg

SEQ ID NO: 106932 - RNA, 80 nt, Homo sapiens
agcggccagcgcaggaggacgaccggggggcaggaggcacccggggcagaaaaagcggggaaggggggcaaaaaaaagaa

SEQ ID NO: 106933 - RNA, 40 nt, Homo sapiens
ccccgagagcgggacgcagggagccggggcaccgccagcc

SEQ ID NO: 106934 - RNA, 58 nt, Homo sapiens
aaggccccgcaaaaagggcagaaacgaccccccagaaccggagaaccccagccagagc

SEQ ID NO: 106935 - RNA, 81 nt, Homo sapiens
ccccagcccacagggcagcacggccccagacagcccagccaggggggagaccacagagaaaagaagaaggcgaagagacga

SEQ ID NO: 106936 - RNA, 79 nt, Homo sapiens
gcagaggccaggcaggacagacagcagcaggaggaagaaggcaccacgacaaaccggagccgaggggagggaggccagc

SEQ ID NO: 106937 - RNA, 75 nt, Homo sapiens
acggagagggcagaagaggaggaggagaagcacaaccacggacggcccagaaacccaaaacaccaggcgacaaac

SEQ ID NO: 106938 - RNA, 73 nt, Homo sapiens
gcgcagcccggccaaccacggagcgaaggagaccaggcaaaaaggaaagcaggaaaacggcgcaaacggagag

SEQ ID NO: 106939 - RNA, 81 nt, Homo sapiens
gcccacgacccaaggacacaacccggccgcagagcccagcgcgccgggggcccggaaagggacgcgcgcccagggagcgag

SEQ ID NO: 106940 - RNA, 74 nt, Homo sapiens
ggccaccggacggggcgccacgaagggaaagcaccccaaccaagcagcccagcccagacggacaaagagacaga

SEQ ID NO: 106941 - RNA, 60 nt, Homo sapiens
gagcggagcggcgcggggcgggcggcggccccggcaggcggcgcccagcggccacacgcc

SEQ ID NO: 106942 - RNA, 71 nt, Homo sapiens
ccagggcgggaagaaagccccaccgagcacagggccagcgggaccgacacaagaagcagccagaacagacg

SEQ ID NO: 106943 - RNA, 72 nt, Homo sapiens
cgcaacacgccgccgagcagccgccagccccacggacggacgccagccccacaacaaccccacaaacaaacg

SEQ ID NO: 106944 - RNA, 84 nt, Homo sapiens
agaagaaagcgaaccacagaagagagaagggcacagaccaagacaacgaaccccggccaggacaggcccccacggaaccaccag

SEQ ID NO: 106945 - RNA, 77 nt, Homo sapiens
gaccagggcgaccaccaggaagagggaaagccagcaggccacgcggccacgcccaggagacgcgggggccgagacgg

SEQ ID NO: 106946 - RNA, 110 nt, Homo sapiens
ccaggagagaaaggagacccgacgcaacgcggagcgcaaggcgagggacgagaacgagaagagagaagaagcaaaccgggaccggaagcaccaaggagaaaaaggaccag

SEQ ID NO: 106947 - RNA, 55 nt, Homo sapiens
agccaagacaccgcgaaaggaggcaaggaggccacggggccgaagacaccaaccg

SEQ ID NO: 106948 - RNA, 63 nt, Homo sapiens
ggaagagaaaaagaggccggacaaagagagcggaaccgcaggggaagccccagaagccgacag

SEQ ID NO: 106949 - RNA, 77 nt, Homo sapiens
ccgcccacccacgaaaggcacgcccaagcaggagaacagcaggccaccaaaggaacagaggagagaaagacaagacc

SEQ ID NO: 106950 - RNA, 60 nt, Homo sapiens
ccgcgcggcggcgcgcgccgcgcccccagcccccgcgcccggagccacggcgcccaggcg

SEQ ID NO: 106951 - RNA, 73 nt, Homo sapiens
aggagggaccggcagaaacaccagaaaagacaaggcacgaaaagacagcagggggagcagcaaagaaaggagc

SEQ ID NO: 106952 - RNA, 80 nt, Homo sapiens
gcccggcccccgcggcggccggcccccccccagggccaggcgccgccagaacgccccaaaagcacgcacgaaaccggcaa

SEQ ID NO: 106953 - RNA, 75 nt, Homo sapiens
gggagcgggggcgacagcgcccggcacaagcccagcacaaaacacacacagcaaaaaagacgcagacgcaacccg

SEQ ID NO: 106954 - RNA, 86 nt, Homo sapiens
ggagagggcagacggacaagagcgcggaacaggacgccccgagagcggcggcaggaggcccaccaccagcggggccggggcgcgag

SEQ ID NO: 106955 - RNA, 40 nt, Homo sapiens
ggccagccggaggagccagggcgcagcgcggggaggagga

SEQ ID NO: 106956 - RNA, 43 nt, Homo sapiens
ccacacgccagaccagaaggccagaacacaaagcggaaccgga

SEQ ID NO: 106957 - RNA, 73 nt, Homo sapiens
ccacccggaacgcgcgcacccaccgggcccgcgggccgccccaccccacaggagcaggcccagaaagaacaga

SEQ ID NO: 106958 - RNA, 54 nt, Homo sapiens
cgccgggcaggaaaccggagcgaagaaaaaggcagaggaaagggcgcaggcaga

SEQ ID NO: 106959 - RNA, 54 nt, Homo sapiens
agggccaccgcgcaagggggggccccagcccggccgaacgggcgcacgacacaa

SEQ ID NO: 106960 - RNA, 78 nt, Homo sapiens
ccccgagccaaacaccgggcgggacccggcaaagagagaggcacacgccgccgaaggccaggagcagaggccaacgcc

SEQ ID NO: 106961 - RNA, 72 nt, Homo sapiens
caggacggcccaaaaccagccgacaaagagggggcccaagaagcaacccaagacccagcaagaaagccgcca

SEQ ID NO: 106962 - RNA, 80 nt, Homo sapiens
cccaaaggcgcgaacagacaggcagggaggaaagacaggaaagaagccaccacagaaaccgaagagccagggcggcaaaa

SEQ ID NO: 106963 - RNA, 81 nt, Homo sapiens
aggaccaacagaggagcaaaagaagaggggccagacgcaaagcccagaaagcgcgggggagcaaaaacagacaagccagaa

SEQ ID NO: 106964 - RNA, 80 nt, Homo sapiens
acgacccgggcacccagaccgaagacccgcacgcacacgaggagccgagccggggcgcaggcgcccgggcccaggagggc

SEQ ID NO: 106965 - RNA, 59 nt, Homo sapiens
gccgggcagaggccagacgaccagcgagggagcagcaggaggagggaggaagcgcggag

SEQ ID NO: 106966 - RNA, 78 nt, Homo sapiens
gggaggagcgccacacccacacacaagagaggaaacgaggccagagaggaaaacaacccacaggaaggggaccagccc

SEQ ID NO: 106967 - RNA, 82 nt, Homo sapiens
caggggagcagaagaggaagaagcagaacgggcagggagcacgagacagcgccggccccaacgagggagacaccaagcggag

SEQ ID NO: 106968 - RNA, 39 nt, Homo sapiens
gagaaacagacggccccgaggccgccgcgcccaggcgga

SEQ ID NO: 106969 - RNA, 42 nt, Homo sapiens
ccggagagaggccgcgccgggcagagagagggccgaggcaga

SEQ ID NO: 106970 - RNA, 78 nt, Homo sapiens
acacacagaacggcgaccagaacgcagaaagcaacaaccaggagcccgcacgcagaacggagaaacccgcgacgaacc

SEQ ID NO: 106971 - RNA, 87 nt, Homo sapiens
aacccggccgagggcacggccagcccgacgccaggggcaaaggaaaggggcaggcacccccaacaagaaggaagagaaagaaaaaaa

SEQ ID NO: 106972 - RNA, 76 nt, Homo sapiens
gacagccccggcccgccgaaaacagcggagccggagcgcgcgcggaccaggcccaaggcagccagagaacccaccc

SEQ ID NO: 106973 - RNA, 79 nt, Homo sapiens
cgcaggagaagaggcggcccacaggccagaacgaccgacggaacacaaggacgagcaaagaaagggcaacaagaccgaa

SEQ ID NO: 106974 - RNA, 67 nt, Homo sapiens
ccgcccgggccagcggccgcgcacccccggccggaggcaccagccaaaaggagcccgaaggacgaca

SEQ ID NO: 106975 - RNA, 79 nt, Homo sapiens
cacagcaagcccaggcacggcccggcaagggcgggggagggacccccggacagccaacaccaaagccgcgggcacagcg

SEQ ID NO: 106976 - RNA, 72 nt, Homo sapiens
agaacagcgggaaagaaggcaaaacacgggcgcgaacggcggaggcaaaaaaggagaaagaacaccaagcag

SEQ ID NO: 106977 - RNA, 67 nt, Homo sapiens
ggcgcgggagacgcggccacgggccgccgcccgccagcggacccgcggcaccgccccgcgcgcgccc

SEQ ID NO: 106978 - RNA, 76 nt, Homo sapiens
ggagcggcgcgccgggagaccgcggaggccgacaggacgggcgccgccccgcgcggcaggaaaggggaccagccaa

SEQ ID NO: 106979 - RNA, 71 nt, Homo sapiens
ccgacccgcccccccaggggacaagaccccccccagggaagaccaaagcaagggaggagaagccagccccg

SEQ ID NO: 106980 - RNA, 74 nt, Homo sapiens
ccaagcggagaggccgggcgccgagagcaggagaagagaaaagggaaggcacggaggaagcccgagaccacgag

SEQ ID NO: 106981 - RNA, 63 nt, Homo sapiens
gcaacaaccaccagcccaacaaagacccggaggcaccagaaaaaaaaagacagagaaaagaaa

SEQ ID NO: 106982 - RNA, 76 nt, Homo sapiens
aaagaaaagaaggggagaaccagacacgagccccaagaaagggagagaaaagcggaggcaaaagaggagaagagca

SEQ ID NO: 106983 - RNA, 79 nt, Homo sapiens
cagccgcacgcgcgggacggagccagcgggaaggagcggagcgggcacggacacaagaacgagagccaaaggccagcca

SEQ ID NO: 106984 - RNA, 71 nt, Homo sapiens
cgaggccgcggagccgcggaggcaaggccgaggaaaggaggggaaccggaaaacagacagggaaaggcagc

SEQ ID NO: 106985 - RNA, 67 nt, Homo sapiens
gcagcacacccagccccaagagcaacaggagcggagcagagaggacggccgggcaagagaggaggaa

SEQ ID NO: 106986 - RNA, 70 nt, Homo sapiens
agcaaccaaaagagccaaggacccaaaaaccagggcgggaaaacggcacaaggcgacgagggagggcaga

SEQ ID NO: 106987 - RNA, 63 nt, Homo sapiens
aagaaaacaagcagccgcacgacgcacggcccaggaccgcacaagagcagagagcaaaaacaa

SEQ ID NO: 106988 - RNA, 75 nt, Homo sapiens
acagccgccgacagccagccccagcagccaggaacaggaggcccggacccccagcacaagcgcaggccaggggga

SEQ ID NO: 106989 - RNA, 61 nt, Homo sapiens
ccggacagagcccgggcgcgcagaaagcaccgcagacaccgggaagagggccggagccgca

SEQ ID NO: 106990 - RNA, 66 nt, Homo sapiens
ccaggcaagcacaaaaggggccagccagccacggagaccgcagggaaaacagccagcagaacgaac

SEQ ID NO: 106991 - RNA, 41 nt, Homo sapiens
gaggagcgggcgagcccagaagggggacaaacgacaggcgg

SEQ ID NO: 106992 - RNA, 82 nt, Homo sapiens
gaggaggcagcgcgaccccgcacgacgccgcggcccgacaggagccagacggagaaaagaaaggaaagaaaggaagaaggaa

SEQ ID NO: 106993 - RNA, 57 nt, Homo sapiens
gcagcagcagaacaaagcagccggaaaggagccaagagggcgaccacacaagccgcc

SEQ ID NO: 106994 - RNA, 73 nt, Homo sapiens
gaaagagcgcagcgggagaaggacccggacaggaccacccaaagcaagaaagcggaagccgggccaaaggagg

SEQ ID NO: 106995 - RNA, 68 nt, Homo sapiens
ccgcacagcagagagcaacccgaaaagccggacacaagagggcaagaaaggcgcgacgggccgaaaag

SEQ ID NO: 106996 - RNA, 72 nt, Homo sapiens
acgcaaaccaaggacggggaccgcacacccaagccaaggccgacaaaaccggccgggaagcaagaaaccgac

SEQ ID NO: 106997 - RNA, 37 nt, Homo sapiens
cagcaaagaaggcacggaaagagagaggagcaccgcc

SEQ ID NO: 106998 - RNA, 66 nt, Homo sapiens
aaaccagagccgcggaagaagagggagacaccgaaggaccagaaagcacacaccgccccagaaagg

SEQ ID NO: 106999 - RNA, 80 nt, Homo sapiens
caggcggcggccggcgggagagccgccagggccacaaggggcgggacccagcaacccaggaagagcaaccgccgcaagcc

SEQ ID NO: 107000 - RNA, 75 nt, Homo sapiens
agagcacaagaggcgggacacaggaagaacaagacacaaagaaccgaggacaaaaagcggaacaccgaggcccgg

SEQ ID NO: 107001 - RNA, 76 nt, Homo sapiens
ccccgcccggcggggaaggacgagcagccccagccagacgacacaggggcacgacgggcgccgccgcaccccagac

SEQ ID NO: 107002 - RNA, 78 nt, Homo sapiens
gaccgcacccaggggagagaagcgagggcagccggcgcagggcagccgaccaaggggacagcgcacaaaaggagcgga

SEQ ID NO: 107003 - RNA, 77 nt, Homo sapiens
agagaggaggcgcgagagcgggaagaggcggcagacagcgggggggcacccgaggaggaagagggcagggcccacgg

SEQ ID NO: 107004 - RNA, 72 nt, Homo sapiens
agaagagaccaccaaccagggcgccaagccggcaagagaaagagaggccagaacagccggcaagagcacagg

SEQ ID NO: 107005 - RNA, 62 nt, Homo sapiens
cccgagcgcggagcagcgaccagagagcgcggccggaggacagacgccgcggcccgacagga

SEQ ID NO: 107006 - RNA, 82 nt, Homo sapiens
agggccaaagaagggagagagaggacccaaacacgcccagcagaagccaggaaggaagcccgccagccagaagggggccagg

SEQ ID NO: 107007 - RNA, 80 nt, Homo sapiens
gagagaggcaggcggagccgaccgggccaggaccagaagaacccaggagaagcgagcaccaaggagaaggcgcgccagga

SEQ ID NO: 107008 - RNA, 74 nt, Homo sapiens
gagcaaccgccgagagagaggaaggccaaacaaggaccaacaccaaggaccagccaccgaaccacacaccaaag

SEQ ID NO: 107009 - RNA, 78 nt, Homo sapiens
cggacccagggccaggcgcaccgagagcaggagcccggagagacagagagaggagaaagcggccaaccccagaagaga

SEQ ID NO: 107010 - RNA, 72 nt, Homo sapiens
agaaaaggagagcaccacgaggggcagagccaaagacaaagaaaaagggagccgaggccagcacgaacccaa

SEQ ID NO: 107011 - RNA, 55 nt, Homo sapiens
gaaacaaaagcaacaaagaggggagagggcaaggggacccacgcaagaggcaaca

SEQ ID NO: 107012 - RNA, 74 nt, Homo sapiens
ccgacagccgcggggcgggcggcggcaaggagcgagggaacagacacccccgaggggggggcccagggggacga

SEQ ID NO: 107013 - RNA, 79 nt, Homo sapiens
ccgagcgcggaggggcgggaaacccggggcaaggacaacaggccgagacaagcagaccggaagaccgacggaagaccac

SEQ ID NO: 107014 - RNA, 72 nt, Homo sapiens
aagggagcccccccaccacccccgagacaccaagcagaagccagcccccaggagcagacaggaccacgccac

SEQ ID NO: 107015 - RNA, 59 nt, Homo sapiens
aaacaagcgcgaagcccgggaaccaggaaaagagcggaaaaagccagaggacaacagag

SEQ ID NO: 107016 - RNA, 62 nt, Homo sapiens
aacaaagccagacgaagagagaagaagcaaaccgggaccggaagcaccaaggagaaaaagga

SEQ ID NO: 107017 - RNA, 56 nt, Homo sapiens
gccgggccccgcccgccccacgcaaagagagggaagcagagagcccgagaccgccc

SEQ ID NO: 107018 - RNA, 76 nt, Homo sapiens
acagcaaagcccaagagaggcaggcagcgacagccacacaacggacaggccgcaccagccagaggagacgggcacg

SEQ ID NO: 107019 - RNA, 74 nt, Homo sapiens
gaccgggcccggaccaggcacgcacaaaaagaaccgaggaacaaaacagccagagcaggcacgaaaagcagaaa

SEQ ID NO: 107020 - RNA, 80 nt, Homo sapiens
ccgaccccccggcgccgcgccggcggcgcgagggcggcacgccacaggacggcacccaccgcaaggccacaccaccaacg

SEQ ID NO: 107021 - RNA, 39 nt, Homo sapiens
acgcagagccacgccggcacagccagagaacaacacaca

SEQ ID NO: 107022 - RNA, 78 nt, Homo sapiens
gcagaacggcacagccccagcaacaccccgcagccgcgcaaaaaaaggaggaaaaagcggccaacagggggacgggaa

SEQ ID NO: 107023 - RNA, 71 nt, Homo sapiens
cagcagcaaaaagaacacaaaggacagacagagagaggaaaacccccggaacacagaaccacggaggggcc

SEQ ID NO: 107024 - RNA, 52 nt, Homo sapiens
acccccgaaggaggccaggcacaacaaccaacaagacaccaagaaaaacaaa

SEQ ID NO: 107025 - RNA, 73 nt, Homo sapiens
ggaaaaacagaacagcgcccgcgaaaggaacagagacagacccgggggcccccaaggagagggaagaagccag

SEQ ID NO: 107026 - RNA, 50 nt, Homo sapiens
gcggcagacacgaggaaaagccagaccagggcaggagagaaaagacacag

SEQ ID NO: 107027 - RNA, 79 nt, Homo sapiens
aggggaagacgagccaccgaggcacagggaccagaagcagcagccccagaagccccgaagccggggcaccccaccaccc

SEQ ID NO: 107028 - RNA, 60 nt, Homo sapiens
aaccaaacccaccgcaagacagggaagcgcagcggaaaagagaagaagaagcggaaaggc

SEQ ID NO: 107029 - RNA, 83 nt, Homo sapiens
gccgcccaccggaaggccaccccgcaggcccggagcgaggcagccgagaccccgggaaccggggccccacccgcgccgggacc

SEQ ID NO: 107030 - RNA, 78 nt, Homo sapiens
agggcgagaccgaccccggcccaagcggcggagaaaccaccacaaacacgaggccagcaacgaccaacaagacagacc

SEQ ID NO: 107031 - RNA, 59 nt, Homo sapiens
aacagcagcaacccacacgcccgggcgggacaagcggcaagagccacagacgagagggc

SEQ ID NO: 107032 - RNA, 72 nt, Homo sapiens
caaggagccgagaagaccgacggggagaggcaggaaaagccggaaggagaggggccaaggcccgcacccccc

SEQ ID NO: 107033 - RNA, 80 nt, Homo sapiens
agcccacccaggcccccgcagcacgggcccgcaggagccaggaccccgcggaagacggaagacgagcgacacacaaaagg

SEQ ID NO: 107034 - RNA, 76 nt, Homo sapiens
gggagaaacagccgaccaacaggccacgaaacgcccacggagaacgccgcaggccgcccccagcccagggccagag

SEQ ID NO: 107035 - RNA, 105 nt, Homo sapiens
cggcccggcgcagaagagagggaagcgagggcagagggacgaggcaacaagagcacaccgcggggcgggagcagcgccaccaccagcccgcaccacaacgagggg

SEQ ID NO: 107036 - RNA, 55 nt, Homo sapiens
aggcggagggagaaacgcagcaccaaccgcggcaaagaaccgaagacagcccccg

SEQ ID NO: 107037 - RNA, 88 nt, Homo sapiens
cgcagagccagcccccgaccccgggccaccgggcccccgggccgccggcacccgccaccaccgcggggaaagagaagggagggcgacg

SEQ ID NO: 107038 - RNA, 88 nt, Homo sapiens
gcgcagcggcagcgcgccccgccgccgcgccaccgaaggaagcacccagacaccgggaaggccccccaaagaggcggacaaggggccc

SEQ ID NO: 107039 - RNA, 50 nt, Homo sapiens
aaaacgccggccgaacagcccacgccaaggaacgggaaccagggaacaag

SEQ ID NO: 107040 - RNA, 85 nt, Homo sapiens
gcgcgggccagcgcccacggacaggccggcgaggagagacacgacaagacaccgaggaggagcaccccggcgccggagcggggcc

SEQ ID NO: 107041 - RNA, 77 nt, Homo sapiens
aagagaaagccagcagacccccgagggccgagcaacaggagggcgaccacaagcaaacagaaacggaagaagacgcc

SEQ ID NO: 107042 - RNA, 82 nt, Homo sapiens
agacaggacacaaagcacgcgacaggaaccaggacaccaggcagaaagagcccacaagacaaaaaagcagacggaaacaggc

SEQ ID NO: 107043 - RNA, 72 nt, Homo sapiens
ggccaagacgcagaagagacgggagcacccaaaaaccaagaacccagaagacccggagccagcgacgacggg

SEQ ID NO: 107044 - RNA, 66 nt, Homo sapiens
gagcagcccgggcaccacagaaaagccacagaccccgccggggaagaacaggaggggagcgaccag

SEQ ID NO: 107045 - RNA, 69 nt, Homo sapiens
gcaccgcgcgggacaagccggaagccgcggggcggggcggcggagcgagcagagggaaggaacacccca

SEQ ID NO: 107046 - RNA, 58 nt, Homo sapiens
ccacccaccgaagacaagcgcgcggcggcccgggcaggagcacagggagaaacccagc

SEQ ID NO: 107047 - RNA, 86 nt, Homo sapiens
agggcgggaggacaaagggagaaggcagagacgaaggagcagcgacagacgaagaaaaggcggacaggaagggagaacgacgccaa

SEQ ID NO: 107048 - RNA, 80 nt, Homo sapiens
cagaaacagggagggacccccgcagcgacgcggcggcaagacggggcgggggccggaccaagagggcgggaccggagaaa

SEQ ID NO: 107049 - RNA, 68 nt, Homo sapiens
cggaagaggagaaaggacacacgaaaacagacgggggaacaagaggcagagacagaggaagaggcaga

SEQ ID NO: 107050 - RNA, 68 nt, Homo sapiens
ggacggcagcaaaggaccgggagaagagaggaaaaccacacagcaagaagagacggaggaaagaaaga

SEQ ID NO: 107051 - RNA, 51 nt, Homo sapiens
gacggaaccgccgagccagaggaggagcgaccaggccccgcgcagaaagcc

SEQ ID NO: 107052 - RNA, 92 nt, Homo sapiens
ccagagaaaaagaaaagacaccgcacgaaaggaaaacacagaccgggccgaacagaggacagggcaggccgaaggagaaagggaaggagggg

SEQ ID NO: 107053 - RNA, 70 nt, Homo sapiens
cccgcgcacagagcaacaaccgggccacaagagaaagagcacggacgccagaggggaagccgcacgaggg

SEQ ID NO: 107054 - RNA, 76 nt, Homo sapiens
aggacgaaagaagacagagaagcaaagaagcaggccaccgggagggcagaggccagcacaaccacgagaagggcag

SEQ ID NO: 107055 - RNA, 60 nt, Homo sapiens
gccacacagcccaaggcaggcaaagagagagcacagaggcccgaaagcagaacagagaag

SEQ ID NO: 107056 - RNA, 76 nt, Homo sapiens
cagaaacacagccagacacgggcaaaggcaaaccaaacgcaagaccagggcggagaaaagcaaggaccagcccgac

SEQ ID NO: 107057 - RNA, 43 nt, Homo sapiens
cggagcccccagcgcagcggccgcgcgcgccacggaggacagc

SEQ ID NO: 107058 - RNA, 43 nt, Homo sapiens
gcccaccggaagaccgcaagcccagggccccggccaggcccag

SEQ ID NO: 107059 - RNA, 78 nt, Homo sapiens
gcggaagcgggcgaggacggggcaggccgccaggcacagagaaggcaaacgggagggcgaggacaccaagagcagcgc

SEQ ID NO: 107060 - RNA, 58 nt, Homo sapiens
agggcagcaggcccaaacccccacagagggaggcaggaacagaagaccaggcccaaga

SEQ ID NO: 107061 - RNA, 80 nt, Homo sapiens
caagagggcaagcgaaaaagagccggaggagccaccaacagaagcaggagccaggaaaccaaaacccacagagagggaac

SEQ ID NO: 107062 - RNA, 69 nt, Homo sapiens
ccaagccacaacacgccaggacagagagagcaaaacgacgaaggagccaagaggaccgggacccaaaca

SEQ ID NO: 107063 - RNA, 80 nt, Homo sapiens
ggacaagacccaaaggacccgagacggaaaacacccccgccaccagaccaagaaggcaagaaagacacccacagcagcag

SEQ ID NO: 107064 - RNA, 69 nt, Homo sapiens
gcagccacagaaacaccccacagaaaaggccacacgccaagcggcgggcagggaggcggagaggcgcaa

SEQ ID NO: 107065 - RNA, 91 nt, Homo sapiens
ccgggcggagcggccaacaggcggaacgcaggagacacaagaagcggaccaggagcaaagaaggacgcagagccagccacacagccccaca

SEQ ID NO: 107066 - RNA, 55 nt, Homo sapiens
aaaaagcacaggcgcccgagcaacaccgacggggaacaccacaaacagcggcaag

SEQ ID NO: 107067 - RNA, 74 nt, Homo sapiens
cgggcagccacggccgggggcgccagagcaacgggaagcaaggaccagaagcgccaacgcaagcagaaagaagg

SEQ ID NO: 107068 - RNA, 78 nt, Homo sapiens
cagcgccgccaccccacccaaagagaggaggagacaaggagcacccaggcgacacgaccagcggaggcagagaaggca

SEQ ID NO: 107069 - RNA, 110 nt, Homo sapiens
ggaccccaccagaaccaggcccaagccgaaccgggagaagaccccggcgcgggaacggagagcaacaggggccagagaagaagcagaggcgaagcccacaaggccccagg

SEQ ID NO: 107070 - RNA, 78 nt, Homo sapiens
cccccccgacagagacggcggagaccccgaaggcgcaaacgacaccacccgaccggaacgggaagggcacaggaagaa

SEQ ID NO: 107071 - RNA, 82 nt, Homo sapiens
cacccccccgacgccgcgcggggacgcaagggaaaagccaacaaggaccgggaaggcgcgacggaggcgcgcgacggagagc

SEQ ID NO: 107072 - RNA, 57 nt, Homo sapiens
cgcgcgccccaggagcaaggaggagaggcggcgaccggcccgaggaccgccgcacga

SEQ ID NO: 107073 - RNA, 71 nt, Homo sapiens
gagggggcagggaaggggggaccacagcgcggccgccagggaaaagagcaaacgaggaggccagagaggag

SEQ ID NO: 107074 - RNA, 74 nt, Homo sapiens
aaagaagaagaagagcaaagggcccgcagggccaaccgggggcacagagcagagccagacggagcccaaccaca

SEQ ID NO: 107075 - RNA, 78 nt, Homo sapiens
gaacccgcaagaggacgcagggaggaagacggccaggcaccacaggccagagcgaccgaacaaaagaggccaggacac

SEQ ID NO: 107076 - RNA, 55 nt, Homo sapiens
gcagaccagaccgccgaccggcgcccgccgagagacgggcaccagggcgggcggc

SEQ ID NO: 107077 - RNA, 60 nt, Homo sapiens
gccacggcagacacacaacccgacccgacgaagaagaagagcgcgccacagacccggagg

SEQ ID NO: 107078 - RNA, 67 nt, Homo sapiens
cacccaggacagacagccccaggaggcaggaaggaacggcaccgaggcacgggggcccggcaaacca

SEQ ID NO: 107079 - RNA, 88 nt, Homo sapiens
cgaaaggccaggcggagcacgcccccgccgcgcgccgggcgggaccagcacgcagcaggcccagagaaggacgcagcgcgagcggaga

SEQ ID NO: 107080 - RNA, 37 nt, Homo sapiens
gccacagggaccaaaacagaacaagcagaggaaagac

SEQ ID NO: 107081 - RNA, 37 nt, Homo sapiens
aggagaggagacaacaggcgggacacagaaaagagac

SEQ ID NO: 107082 - RNA, 76 nt, Homo sapiens
cgagaccggaccgagagcggaccgagagcgcgaaacgcacgagaaggaagcgacccggaaccgggaaaccaggcaa

SEQ ID NO: 107083 - RNA, 82 nt, Homo sapiens
gcgaaaaaggggggccgagcgcaccccccggaggcggccgagcccacgcgacgaagaacaggagagggacgaaccgccggaa

SEQ ID NO: 107084 - RNA, 79 nt, Homo sapiens
ccagccgccgccccgcagccccccgcagcacccagccggccacgggggcgacgccagagacgacaacccgggcgagggg

SEQ ID NO: 107085 - RNA, 41 nt, Homo sapiens
gcaccgaggaccagccaagacagaaaaaagacagggccagg

SEQ ID NO: 107086 - RNA, 70 nt, Homo sapiens
cagagacacgccaagcagccagcccaggagagggcacgcaaaaaaaccaagggaaaagagacaagaccga

SEQ ID NO: 107087 - RNA, 66 nt, Homo sapiens
gcgagcacagaagcacagccacagagcagaccgacagaacaagcgcaaaaaaagaagagcagaaac

SEQ ID NO: 107088 - RNA, 76 nt, Homo sapiens
acggcacggagccagacacaaaacggcacccgggggagcgcccaggacacacccccagcgaagaagaagagaggga

SEQ ID NO: 107089 - RNA, 72 nt, Homo sapiens
gcagaaccggggagccaccgaggacacaggggaagaaggaggacaacaggaagaagagagggcgaaggaggc

SEQ ID NO: 107090 - RNA, 39 nt, Homo sapiens
agcacgggggcaacagagcaagaagacagcggggggcac

SEQ ID NO: 107091 - RNA, 62 nt, Homo sapiens
acacggcaagagagcccaaggccgcaacagaaaaaagcggcaccaagccaaggagggacgaa

SEQ ID NO: 107092 - RNA, 70 nt, Homo sapiens
cacggaagccgacagacaaccaggcgcagcagaacaagcccgagcaccccaccaaaaacagaggaagcag

SEQ ID NO: 107093 - RNA, 71 nt, Homo sapiens
cggaccgcgggacaagaaaacagcgggaggcaaggagcacagaggggcgcaacaggaaggagaacaccaga

SEQ ID NO: 107094 - RNA, 78 nt, Homo sapiens
cgggcgaggcacccagccgccgcccaggaccccgccccgaggacagaacaagcgagggaggcggcgggcgcaggaccg

SEQ ID NO: 107095 - RNA, 77 nt, Homo sapiens
agacgcagagaagggcacaggggggccggaacagcccgccagcggcaacacccacccaccggcacccgacggagagg

SEQ ID NO: 107096 - RNA, 84 nt, Homo sapiens
caaaaagcagcggccagccgacaggcggaggcaggagaaaccggccagaggggacgcgggacaagagacggaaagcggcgccag

SEQ ID NO: 107097 - RNA, 72 nt, Homo sapiens
ggcggcgcccgcgccacagccaccagagccggcagcaaagagggaacagggagaagcccaccacgcaacggg

SEQ ID NO: 107098 - RNA, 62 nt, Homo sapiens
gcaacggccccaacgacaggaggaacagaagggaaaaaagagaacggaaaaacagaggaaga

SEQ ID NO: 107099 - RNA, 83 nt, Homo sapiens
cgcggccaggcggcgacacgccaaccccgggaagaggaacaaacgcgcaaaggacccaaacaggcacaaaccgggggcaacag

SEQ ID NO: 107100 - RNA, 86 nt, Homo sapiens
cagcgcagcgcgccggaagaacggacgccaaacgccggagcccggagggacaggcaagaaggaagaaggcagaggcgcagccaggg

SEQ ID NO: 107101 - RNA, 76 nt, Homo sapiens
ccacggaggcaccagaagaagcaccaggggcgacaagcaggccaacgcgcgcgcacgggccggggcgcccaacagg

SEQ ID NO: 107102 - RNA, 71 nt, Homo sapiens
gccccaggaccaggaaaaaacccgcacacgggcccgacaagagaggcggagccacccccacaacggaccag

SEQ ID NO: 107103 - RNA, 61 nt, Homo sapiens
ccaggccaaaaacaacaacaagccacgagaaagaggcaaagaaaccccaaagccagcaaga

SEQ ID NO: 107104 - RNA, 76 nt, Homo sapiens
gcagacccacccgccagaagccccccgcaggaggccaccacgaaaaccgaccgcacaccgaggggggcgcaccgcg

SEQ ID NO: 107105 - RNA, 79 nt, Homo sapiens
ccaccggccgccccgagggggaccccacaccacaaaccgaggaaagaagggacagcagaaaacgcagagggagcaacca

SEQ ID NO: 107106 - RNA, 53 nt, Homo sapiens
acgcgcggaaggcagcgcccagcagcgcaggagagacgagcacggcagccacc

SEQ ID NO: 107107 - RNA, 72 nt, Homo sapiens
agacaggccgcccagagcgaccggccacgcaccaggaggaaggcagcggcaaggagcgaagcagggaaccgg

SEQ ID NO: 107108 - RNA, 71 nt, Homo sapiens
aaaggaaaacgcggaaaaccgacacaacaggagaccggaaaccgagagaaacgaagacgaagaaacagccg

SEQ ID NO: 107109 - RNA, 73 nt, Homo sapiens
agccgcccaagccgcgccccagagagcgcccgagagaacagggggccgcggccaggggcacgaaggcaaagac

SEQ ID NO: 107110 - RNA, 85 nt, Homo sapiens
caagacagcaagcagacccgagaggaagacgcgacaggagcacaggacgaagaggaaggaaaaaacaggcgagcaaccaaaaagc

SEQ ID NO: 107111 - RNA, 56 nt, Homo sapiens
ggaggagggcaaggacaccccgccaggcaaaaggaagaagaaggacgagaagaaga

SEQ ID NO: 107112 - RNA, 72 nt, Homo sapiens
cacgcggaacacaggcaaaagggaaagcagaccgaaaagggcggaaaaggaccaaggcccgcaaaagggcgc

SEQ ID NO: 107113 - RNA, 81 nt, Homo sapiens
gaaaggccggccagcgggacaggagggcaggaagagcgcagcggggacaagagcgggaacagcccacggcgaccagggcca

SEQ ID NO: 107114 - RNA, 71 nt, Homo sapiens
ccgccaggcagcaggacggagaccccagggagccggggggaacgggggcacgccggcacgggaggcagaag

SEQ ID NO: 107115 - RNA, 83 nt, Homo sapiens
cccggaccggccgagaggaagacgagccgggaggaacggcccggaaacaggaggacgaagaagcggacggcagcgcggcagca

SEQ ID NO: 107116 - RNA, 71 nt, Homo sapiens
caggaaggaggaggaagcgagcagacaaggagcccacagacaaggcgggcaaaaccaggaaacagaaaaac

SEQ ID NO: 107117 - RNA, 75 nt, Homo sapiens
ggaacggggccaaagcccccgcccccagcacccacccgggggcagggggcccgggacagggggcccccaaaggga

SEQ ID NO: 107118 - RNA, 82 nt, Homo sapiens
agaagaccccaggccaccgcaccaaggcgcccaagaaggccgaggagcgagcgacaggcagaggaggcgagccccaccggac

SEQ ID NO: 107119 - RNA, 83 nt, Homo sapiens
ggagaccaggagcacaagacccgccccccaaagcgaagccaaagcgaaggcaaaggccaagaaggcagggaaagggccacagc

SEQ ID NO: 107120 - RNA, 57 nt, Homo sapiens
ggacaacaaaacaacccggaacaggacccagacaaggaaagaagcggagggggcacc

SEQ ID NO: 107121 - RNA, 62 nt, Homo sapiens
cgacgggcggggggggcgaacgaaacaagaacaggaaaaagcaaggaacggacggaaggagc

SEQ ID NO: 107122 - RNA, 80 nt, Homo sapiens
ggcagcccgggaaaggaccacaagaccccaggcggaggcgcagggcccagagccgggccgagggcaagaggcagcaaacc

SEQ ID NO: 107123 - RNA, 87 nt, Homo sapiens
cagcaggcaccgccgcacccgccggagagccggccggggcaacgcgaaaccaagaaaccccagacagccagcagcaggccgggacca

SEQ ID NO: 107124 - RNA, 80 nt, Homo sapiens
cagcggcggccagggaccaagacacggaagccggcccaagggggagcacaaagagcccggcccgccaccaccgcggccgc

SEQ ID NO: 107125 - RNA, 74 nt, Homo sapiens
aacagcagaggaagcaaagacaaagaaaaaaacccccacaacacagacccaaaccagcaagcacccaaagccag

SEQ ID NO: 107126 - RNA, 71 nt, Homo sapiens
gaacaggacgaagaccagcgccagggaaagaaggaccgcgcagacgcgcaggacggagcggggccaggcgg

SEQ ID NO: 107127 - RNA, 79 nt, Homo sapiens
gcccgaggcgaccgcggaccggcgccccggcgcgaagaggcggaccggacggccgagagagccaagcgaacgaaaccag

SEQ ID NO: 107128 - RNA, 78 nt, Homo sapiens
gcgccgggcgaccccgcccgggcccggaacgcaaggagggacaggacggaaggagcggaggaagacacaagagcgagc

SEQ ID NO: 107129 - RNA, 84 nt, Homo sapiens
aggaggaggaggaggaggaagaggcagaggacagaaggaacagagaccgccaggggaaagccccgcgaaggccccgagggcgaa

SEQ ID NO: 107130 - RNA, 102 nt, Homo sapiens
gggcggggccacgcgcgggcccgggccaggccgccgccgagccgaggagaagacagaggagccagaccaagagacagcacaggcgagcgagcagagacacca

SEQ ID NO: 107131 - RNA, 77 nt, Homo sapiens
ggcgcggcgcgcccccgccgcccgccgcgccccggggccggcccgcagaaagaaggacgcgcgggccaggacgaaca

SEQ ID NO: 107132 - RNA, 69 nt, Homo sapiens
gagcgacaagcgccccgacggagcgccaggacggcagcggacggagcaggaacgacagcaggagagcca

SEQ ID NO: 107133 - RNA, 74 nt, Homo sapiens
cagcagccgggccagggccagagcaaagaaagggacgagagaaccaaaacaacgcaaaaaaccggaaaaggggg

SEQ ID NO: 107134 - RNA, 77 nt, Homo sapiens
ggccaagaaggcagcccgaaggcgggaccagacagcgccgggggggcgggaggcgccacgaaccacccacagacacc

SEQ ID NO: 107135 - RNA, 49 nt, Homo sapiens
cgcggcccagaacagcgaaaccacggccaaaacgaagcgcccccacgca

SEQ ID NO: 107136 - RNA, 76 nt, Homo sapiens
gcccagccaaagaaacaagccgggaaagggacaagaagggcaaagccgaaccacacgaaaacgacggcacccgggg

SEQ ID NO: 107137 - RNA, 70 nt, Homo sapiens
ccccggcccgcagcccccgccggccgcccaacaccgaacaccggggacacccacggccaaccaaaaaccg

SEQ ID NO: 107138 - RNA, 80 nt, Homo sapiens
cccaccacggcggagagcagcgcagcaggcacagggcccgagagccagagaagcggccaaaacagaagaggcaaagccca

SEQ ID NO: 107139 - RNA, 56 nt, Homo sapiens
gacccccgagaagacaaaaaaacaggaacgcacaggcgaggggaaaaggaaggaaa

SEQ ID NO: 107140 - RNA, 84 nt, Homo sapiens
ccgggcgccccgcagccccccaacaccgcccgccaggacgaccgggaagcacaggagagcaggcacgaccccagcggcaacacg

SEQ ID NO: 107141 - RNA, 55 nt, Homo sapiens
cccggggagccccgcgggccgcccagggcaagcgggagggcgggcgcaggcggag

SEQ ID NO: 107142 - RNA, 56 nt, Homo sapiens
cgccagcccggagggaccgacagcgaacccacccaacacggcaaaacaaagacacc

SEQ ID NO: 107143 - RNA, 78 nt, Homo sapiens
ggaagggcaagcgcccagagggaggcaggaggcgcacacgggccggcagagacccaggccgaagcgacaccggaaacc

SEQ ID NO: 107144 - RNA, 77 nt, Homo sapiens
gcggacagagcaaccggaaaaggccggaacccgcgaaacccacaggaccaagaaaacggggaaaaacacagagaagg

SEQ ID NO: 107145 - RNA, 60 nt, Homo sapiens
ggaggaggaggaggggcccggcggcggggagagggccgggccgcgcggggcgacgcaagc

SEQ ID NO: 107146 - RNA, 72 nt, Homo sapiens
gcggcgcgcccgccccaagccgcagacgcgggcccggagacaaggggccccgcagagaggcagcccgcagca

SEQ ID NO: 107147 - RNA, 66 nt, Homo sapiens
ggcgaacacagaggaaaccgcaccgcccggaggacgggccaacgcacggcccggcagagccagcac

SEQ ID NO: 107148 - RNA, 81 nt, Homo sapiens
cgcgcccgcgcccagcccgggccccgcgcacagccccagcgcaggacaaccgagggagcaagaaaggaaaaaaagaagcaa

SEQ ID NO: 107149 - RNA, 77 nt, Homo sapiens
ccagcacaccccagcagaaagacaaagcaccaggacaaacacaaggcgccgcaaaaaaaaacgacaaagaagaggag

SEQ ID NO: 107150 - RNA, 78 nt, Homo sapiens
ggaacccaggccccgccgaggcggccaggcgaccggcccgaggaccgccgcacgaccaaacgcagaacccacacccca

SEQ ID NO: 107151 - RNA, 79 nt, Homo sapiens
cgccgccccggggacaagaaacagagcaaaaaccggaaagagccgggggggcgagcccgccgagagcgccaaggaggag

SEQ ID NO: 107152 - RNA, 79 nt, Homo sapiens
cgccagcagccgccggagccagccaacgagcgcggcggagaaaccaccacaaacacgaggccagcaacgaccaacaaga

SEQ ID NO: 107153 - RNA, 71 nt, Homo sapiens
gaagccgcccgacccaagcacgcgccacgcacacacaggccagacagcaacagagaagagaaccccagaaa

SEQ ID NO: 107154 - RNA, 79 nt, Homo sapiens
aggaacgacgcggaccagaagccagagcgaggacgccggcagagaaggagggggcagagcacggcaggcagaaggggcc

SEQ ID NO: 107155 - RNA, 71 nt, Homo sapiens
caagaagaagccgcggaccccgcgaaagccccacgaagagagaagcgcggaccaaagcagaaagggagaac

SEQ ID NO: 107156 - RNA, 108 nt, Homo sapiens
caagaggaagcggaaaccagggccacagcacgcagccccaggcagggaccaagaaaggcccagggaccaaagcccggacaaggcccgagcaccaggaccgcagaaggc

SEQ ID NO: 107157 - RNA, 64 nt, Homo sapiens
gccggagaccaaggagaggggacaacgaccaagcaaaaggcaaaccgacaccagcgacacaagc

SEQ ID NO: 107158 - RNA, 82 nt, Homo sapiens
cggacccccacgcaagcgccaccagggccaggagggcagagcagggaccagcgcagcccgaggaccagcagcaggggcgggg

SEQ ID NO: 107159 - RNA, 68 nt, Homo sapiens
cgagcaggcacgccgagggggacggcgcgaagaagagaagacaggaacggcaaagcaaccagaaaggg

SEQ ID NO: 107160 - RNA, 73 nt, Homo sapiens
cccagcgacccgagagagcccgcggccaccccgagaacagccaccgcggggccgcagagccgcccccagcagc

SEQ ID NO: 107161 - RNA, 87 nt, Homo sapiens
caggcacgaggaggccgagagagaggccggagcccaccaagcgggaagcaagagcgaaggagaaaggcaacaaggcccgagcgggga

SEQ ID NO: 107162 - RNA, 74 nt, Homo sapiens
aaagcccagaacagcacgagccccgaaccgcaaagaagccaaaaacaacacagacgacgacaaaaaagagccca

SEQ ID NO: 107163 - RNA, 75 nt, Homo sapiens
aaggaccaagaaccaggggcacgcacaccccccggccccgaagaccaagcagcaaacgaagagccccccacgaaa

SEQ ID NO: 107164 - RNA, 81 nt, Homo sapiens
agaagagggcagaagaaaccagccgaaccagggccaccgcgcaagggcgcaagaggcagacagacaggcgacgggcagcca

SEQ ID NO: 107165 - RNA, 76 nt, Homo sapiens
ccacggcaggcagcaccccaacaacaccgcgagacgagagaggaacgccccaaaggaggagcaaaaagaacagaaa

SEQ ID NO: 107166 - RNA, 34 nt, Homo sapiens
gagacgccgaaagaaacccagaaccgcggagaag

SEQ ID NO: 107167 - RNA, 69 nt, Homo sapiens
caaggggaacccaacacacacgaaggaggagagaaagaacccacgcaggacgacagaagaggccggaca

SEQ ID NO: 107168 - RNA, 75 nt, Homo sapiens
ggacagaaccgggacagcaacacccacaggacacgaaggcggcccgccggcagagcgaggaaacacagcgcgaac

SEQ ID NO: 107169 - RNA, 89 nt, Homo sapiens
gccaagaaggacgagcccaagagcggcgaggaggcgccacacccccccgacgccgcgcggggacgcaaggcacccccagcaggacagca

SEQ ID NO: 107170 - RNA, 75 nt, Homo sapiens
cgaccgccgagccgcagccgccccgcggccaacagagccgggggcacccgaggaggaagagggcagggcccacgg

SEQ ID NO: 107171 - RNA, 61 nt, Homo sapiens
gaaacagaacccaagccaggcacccaaaaaaacgagcccagggaacccagccagcacagca

SEQ ID NO: 107172 - RNA, 75 nt, Homo sapiens
ggaggcagaccccagacaaagagggacccagagagagagaacccgagcgccgcagcggagaaagaaggaacgagc

SEQ ID NO: 107173 - RNA, 36 nt, Homo sapiens
gcgccggggcccgccgcaggacagaacaccagaaac

SEQ ID NO: 107174 - RNA, 83 nt, Homo sapiens
cgaccagaaaggaaccccaagcgacgcaggcagaagcgagacggcaaggcacacggaagacaaagggcaaagaggggaccgcg

SEQ ID NO: 107175 - RNA, 71 nt, Homo sapiens
gcgaccgagccacaaggacccaagcccacgccaaaaagggaaaaaagagagccacgacgaaagcaaacacc

SEQ ID NO: 107176 - RNA, 72 nt, Homo sapiens
gagcacagagaccgccaggcgccgaagaaagccgagcccacccgaccagggcccggcacccagcagaaggac

SEQ ID NO: 107177 - RNA, 71 nt, Homo sapiens
agacccgcgcgcccgcgccgccagcgccgcccccgccaacaggcagaaccaaaggcaagaaggaaaaaaca

SEQ ID NO: 107178 - RNA, 79 nt, Homo sapiens
gagccggaccgagcacaaggagcgggggacaacgcaggaccgcaagcgcaggaccgagcccaccgcacgggcagcagaa

SEQ ID NO: 107179 - RNA, 77 nt, Homo sapiens
cggcggcggggaagccgggccggccgcgcgacgggggacagaacggcaccgacgagacggaggaaagaacagaacag

SEQ ID NO: 107180 - RNA, 54 nt, Homo sapiens
cgcagccgagcggggccggccacaggaaccaccagcgcgcacccaggccagggg

SEQ ID NO: 107181 - RNA, 74 nt, Homo sapiens
aaagaaaaggccccgaggagcagggagggccgaacaggggggaacgacaaacaaggccccagaagcaggggcga

SEQ ID NO: 107182 - RNA, 81 nt, Homo sapiens
gccacacggggagccgaagcccgccacaaagccagccaggccaagagaagacaccccaggagaggcaaggagagcagcgcc

SEQ ID NO: 107183 - RNA, 79 nt, Homo sapiens
cgcggagcggcgaagagcaaccagagagcgaccaaacccccacaacaaggacaaagggacccaaggaccagcagcacgc

SEQ ID NO: 107184 - RNA, 58 nt, Homo sapiens
aagagaaaggccaacgagaacaagcacaggaccagagggaaaaggcacccagcggacg

SEQ ID NO: 107185 - RNA, 75 nt, Homo sapiens
cgcgcgcaggcagaagaaggagccagcagagcgccaggacaggcgagaggcgagaaacaccccgaaaacccccga

SEQ ID NO: 107186 - RNA, 70 nt, Homo sapiens
ggagaacaagcaacggcggaaacccggacacaaaacaagacccaagcaacaaaaacagcggcacaccaaa

SEQ ID NO: 107187 - RNA, 36 nt, Homo sapiens
acaaaaaacaaccaggccacaaacaacccccaccac

SEQ ID NO: 107188 - RNA, 77 nt, Homo sapiens
ggacgccaggaaggcaggaagcacgaagggggaccagccccacgggcagcgcaggggccggcgacggacgggggaaa

SEQ ID NO: 107189 - RNA, 74 nt, Homo sapiens
ccaaccaggacacccgaccacaacaagcaagcaccaccgagcaccagcgcagggagaagaaacgaacggaacga

SEQ ID NO: 107190 - RNA, 82 nt, Homo sapiens
aaaacgaaggaggacccccccacaacaccagacacaaaagccaggaagacaagagcagaagaaacagaccgaaagacaacaa

SEQ ID NO: 107191 - RNA, 81 nt, Homo sapiens
agcaagaggaacgagaacccgggacagcccgagggcccacggacagaccaagggaggagagagggcagcgcaagccccggg

SEQ ID NO: 107192 - RNA, 91 nt, Homo sapiens
gggggagacagcgccgggagaggccggcagccccgggacacccccgcaagcgagcaggaagacacccagacccagggacacccaacacgaa

SEQ ID NO: 107193 - RNA, 66 nt, Homo sapiens
gaagacgacgcaccgcaggcagacaaaagggccaaagaagggagagaggcacaggccgcgagacga

SEQ ID NO: 107194 - RNA, 81 nt, Homo sapiens
cgggaagcaggacgcgccgcgccccaaggacgagcagggggaggaacaaagcgaggaagggaagggaaggcgacaggcagc

SEQ ID NO: 107195 - RNA, 94 nt, Homo sapiens
ggggccgggcgaccgggcaccagcaggacccgaggccaggagccaggggcccagaagggagcagcagccccgagaaggaagaggaggaagcgag

SEQ ID NO: 107196 - RNA, 75 nt, Homo sapiens
gaggaggagggagcagcagccagccggggggacggaaaaacaaaggaacagccaggacaaccggggcggacacgg

SEQ ID NO: 107197 - RNA, 67 nt, Homo sapiens
ccacaggaaagcagcgaggaacacagagagcccagaggaccggcggcccgaccaaagaagaaccaca

SEQ ID NO: 107198 - RNA, 60 nt, Homo sapiens
gcaccagacagccgcgaagccagaggacggaagagaaggcgccacggccggaacgcacag

SEQ ID NO: 107199 - RNA, 77 nt, Homo sapiens
agcaagagcggaccgccggcaagaaggaacagacaaaaacggccggaaggaaacacaggacaccagggacagcgaag

SEQ ID NO: 107200 - RNA, 74 nt, Homo sapiens
cggacacgaggagaaacagcagaaacgcaccaggccaaagaaagagaagccagaaccgcccaaacgagcagaag

SEQ ID NO: 107201 - RNA, 75 nt, Homo sapiens
aaaagacaagcccagagaagcagagaaagacgggagcggggcgcgcagacccaagaggaacagggagggcccccg

SEQ ID NO: 107202 - RNA, 81 nt, Homo sapiens
cggcgacagggcggcggcgccaggcagggcgcaggggacaccagcagcgccgccggaccaccgggcagcagaacggagcac

SEQ ID NO: 107203 - RNA, 70 nt, Homo sapiens
caggcaccacaaaaaggacagggagaaaccgaaacgaacccagccagaaacacaaaacgaagaggccagc

SEQ ID NO: 107204 - RNA, 78 nt, Homo sapiens
cacgcccggccggggagcaaggggagaaacaaggcgaggaggaagggccccaccagaagcagcaccccagcaggggca

SEQ ID NO: 107205 - RNA, 57 nt, Homo sapiens
acggaaacaaggcaacagaaagagcaacagcagggcaacaggaaaagaaggaggcca

SEQ ID NO: 107206 - RNA, 68 nt, Homo sapiens
caccagagagaagccccagaacgaacagcccagcacgaagcaacaagagaccggcgaaaggagagagg

SEQ ID NO: 107207 - RNA, 111 nt, Homo sapiens
caggccgcagccagaaaacaccagcagcgcgcaggacccagagaaggacaaccccagcaagggagaagccggggcgcccggcccgccccccacgggaggaacagagagcca

SEQ ID NO: 107208 - RNA, 43 nt, Homo sapiens
cacgacccaccgcacgcagaagcggacaaacaaggggggaaga

SEQ ID NO: 107209 - RNA, 75 nt, Homo sapiens
acacagacgagaaaacacacaggacgggaggcaacaacccccaagcagcaagaagaaaggggagcaagaagaaag

SEQ ID NO: 107210 - RNA, 76 nt, Homo sapiens
gcccgaaacccccacccggcggagagaccgccgaggaagcgccacgaggcacacgaaaacaggggaaggggccagg

SEQ ID NO: 107211 - RNA, 105 nt, Homo sapiens
ccaaagggcccccgaaccagcgaaaacaaacccggccgaaggcacgagcgccgggagggagaggagcaaccggaagggacaaaagaacaaaaaaggagaccgcca

SEQ ID NO: 107212 - RNA, 79 nt, Homo sapiens
gagagagaagacacgagacgaccacggccgaaaggagagaggcagcgaaaggaagacaagaaggccaaacagccacaag

SEQ ID NO: 107213 - RNA, 69 nt, Homo sapiens
ccagcacccgggggaaagccgcgggcgcggacggcaggggcgccggggaacccgcgggaagaagcaaca

SEQ ID NO: 107214 - RNA, 77 nt, Homo sapiens
accaagcggacgcgccggaggaacaagcgagacaaagagagaagcggggaagaaagcaaaagcagagccggagccag

SEQ ID NO: 107215 - RNA, 74 nt, Homo sapiens
aagcaaccgagcaaacacgacggggagaaggagcaaagacagggcgggcgccgccagccggccacagacagccc

SEQ ID NO: 107216 - RNA, 61 nt, Homo sapiens
aaaagagacccacagccagcaacaccggggcggaggaccccagcaggacccagaagacacc

SEQ ID NO: 107217 - RNA, 35 nt, Homo sapiens
gaggaggagccggacgggccaggaacaagccgcaa

SEQ ID NO: 107218 - RNA, 75 nt, Homo sapiens
gggagaaggcgcaacgcggcgcgggaggcaagcaggggggcaaaggaaagaaggcagaaagggaggccaggagcg

SEQ ID NO: 107219 - RNA, 56 nt, Homo sapiens
ggaccgcccacaaaggcgaagcccccaggaagcaagccagaaagccagggacgcag

SEQ ID NO: 107220 - RNA, 81 nt, Homo sapiens
gcgcccgcgcggcgcggggaccgcggcccgccgcggcgagccgcacagggcaacacacgcaccgcacggcccccgcccaca

SEQ ID NO: 107221 - RNA, 79 nt, Homo sapiens
cagagaaagcaaacagaaaacacccacacagaagggcacgacgcgcaagaagaacagccagacggcagcaagaaaaagc

SEQ ID NO: 107222 - RNA, 49 nt, Homo sapiens
acgagccaaccccaccaaggacgccgccagccaccggcgcgaagccaga

SEQ ID NO: 107223 - RNA, 75 nt, Homo sapiens
cgacagaccacgacaagagcacaaccccggaaaccgccaggcagggacagaccacgcagacacgaaaaccccggc

SEQ ID NO: 107224 - RNA, 71 nt, Homo sapiens
cagaccccgccagaccaacaagcggagaggcagcagaacggcgcagagacaccgagcgaccacgagcccaa

SEQ ID NO: 107225 - RNA, 75 nt, Homo sapiens
ggagcacaacaggcagacagacaaggggaggcgaagaaacccgaaacgccaccaaagggagaagaacgcccgagc

SEQ ID NO: 107226 - RNA, 70 nt, Homo sapiens
ggcgcagggcggaaggacaacagcccgacaaccaggaacaggaggcccggacccccagcacaagcgcagg

SEQ ID NO: 107227 - RNA, 83 nt, Homo sapiens
gaccagacgaaggaaagcagagaaagggaccccagcgaaccccccagggagccacggccgcggggaaacaggaccggaaggag

SEQ ID NO: 107228 - RNA, 119 nt, Homo sapiens
ccacacgacccccggggggacggggcagcggggacgcggggccgcggcgccggcagcagagaccaccagaaggcaagccagacaacaggccaaagccagggagggccagccccacaaga

SEQ ID NO: 107229 - RNA, 68 nt, Homo sapiens
gagagccggagggcaccgcgacgcggaggcccaccgagccagacggcaaacagaagggcgcaggaaaa

SEQ ID NO: 107230 - RNA, 67 nt, Homo sapiens
ggagcagcggacccaggcagcccggcccggccaccccggagcggcaacagggaccggccgccaagga

SEQ ID NO: 107231 - RNA, 81 nt, Homo sapiens
acagcggccgaacccaagcggaccagccggggaacaccaaagggggccagcacagacacagccagccaaacacaccaacaa

SEQ ID NO: 107232 - RNA, 79 nt, Homo sapiens
aggggagggaagaagggaagacggccgcccgggcacaaagcccaaaacagaaaccgacagacgcaacacggcgaaagcg

SEQ ID NO: 107233 - RNA, 51 nt, Homo sapiens
cggaagggaggcacggaagagaggaaggacacgggcaaggagaagcagagg

SEQ ID NO: 107234 - RNA, 78 nt, Homo sapiens
gagaaaacaaaggaaaaaccagaaagaagggccccaaacgggaacggaaaacagccccaaagcagcagaccgaagaaa

SEQ ID NO: 107235 - RNA, 74 nt, Homo sapiens
ggcagggcaagcggcgacacacgacggagccggccagccgcagagggaccgcccccggacaaggcgaagacggc

SEQ ID NO: 107236 - RNA, 80 nt, Homo sapiens
ccgagggagggccgagccagccgcggccggaggagcccccaggccggacgcagaagccccgggaggcagggccaccgggc

SEQ ID NO: 107237 - RNA, 86 nt, Homo sapiens
ggcggcggagcagaacggagcaggagagaacgagggccaaagccaacgaagaaaagaggagcgccagagcgaaaagagaaggcaaa

SEQ ID NO: 107238 - RNA, 81 nt, Homo sapiens
ccagggaagcagcaccacggggagacaagcaaccgccaggagcaaggcagcgacccagggcacagcggggcacagccccca

SEQ ID NO: 107239 - RNA, 81 nt, Homo sapiens
agacccggagcccagggaagcagccgaccagccgcggagccgggggcaggaaagaacagcaggcaggaacacaccagaaga

SEQ ID NO: 107240 - RNA, 69 nt, Homo sapiens
cagaaacaccagacagcgacagggcacagaaaagaaacagaaaagaaacaaagaaccagacggccaacg

SEQ ID NO: 107241 - RNA, 82 nt, Homo sapiens
acaagagaggagaaaccaagccaagggagcaacagcgagcaacaggcaacgaaaacagacaaaacaacggaaaagcagggca

SEQ ID NO: 107242 - RNA, 50 nt, Homo sapiens
gcgaaacagcaacaaaaggacgaagggggaagagaacaagcgggaaacgg

SEQ ID NO: 107243 - RNA, 59 nt, Homo sapiens
gacgcgggagccacggcgccaccaccaggagaaggcggggccgccgccgccgaaacggg

SEQ ID NO: 107244 - RNA, 89 nt, Homo sapiens
ggaaggaagaagacccaggagacaagacagagcaccagccccaggaaggccaggaggacgggccggcaggaggagagcgaacgaagccc

SEQ ID NO: 107245 - RNA, 83 nt, Homo sapiens
gccgggcggcgcggccgcccgggccgggccccaccggacggacccaaagacaggaccacgcaccagcagagaaggaaagcaaa

SEQ ID NO: 107246 - RNA, 78 nt, Homo sapiens
cagccgcccaagccgcacagccgcggcggcagcagcaggagagggcccggggacacgagcggccccagcgcccgcaca

SEQ ID NO: 107247 - RNA, 126 nt, Homo sapiens
caaggagcggaaggacaggaaccagaacccaggcccacggaggaagagccgggcagcccggagcgggccaggaagaccggaagcgccaagcccaccagacaccgagccaagaggaccagacgggaa

SEQ ID NO: 107248 - RNA, 81 nt, Homo sapiens
aacgcagagagaaagagagaggaagccagcagccgacgaagagggagaacaagaccaagaggaaagccagccagaggaggg

SEQ ID NO: 107249 - RNA, 70 nt, Homo sapiens
caacaaagcaaggcaaagcagaaaagccccagccggccccgagcgaggcaccggacccgacacccccggc

SEQ ID NO: 107250 - RNA, 85 nt, Homo sapiens
ggccccagacacagacgagcaggggaagcaaacagccggcaccaggagcagcaccagagcgaacgagcccccggggagcggcgga

SEQ ID NO: 107251 - RNA, 55 nt, Homo sapiens
accaccaccgcagggccccccacggacccagggcgcgcaaacgaaggaaaaggaa

SEQ ID NO: 107252 - RNA, 80 nt, Homo sapiens
gacgccccagagcacggagaccacaccaaggggcagccgccgaaggcgagagcagcacaccggaggcgggccacacggca

SEQ ID NO: 107253 - RNA, 74 nt, Homo sapiens
agaagggcccaaaaggcagaaaaagggcaaagacacggaccaagaagccaacagaacaccagaagcagccgaaa

SEQ ID NO: 107254 - RNA, 63 nt, Homo sapiens
gaagggagacgacgccagaagcaaacaaaagcaagcggccgggaaaaaaaggacccacaggca

SEQ ID NO: 107255 - RNA, 71 nt, Homo sapiens
cgggaacacgaagacagcaacggcaggccgccgaacccgggaagcaaccccggcacccagagagcagagaa

SEQ ID NO: 107256 - RNA, 77 nt, Homo sapiens
ggcaccccgggccaggcggagcggaggagcaaaccacacacccaaaaaggccgacagaagagacaaccaaacccaag

SEQ ID NO: 107257 - RNA, 69 nt, Homo sapiens
gagacgcgaggggcgagccagcccccgcacggaagacgaacacccccgacaccccccaggcacagccac

SEQ ID NO: 107258 - RNA, 87 nt, Homo sapiens
cacccccacgacccaaccgaaaacccgggcgaaccgcccacccgagagccggagcggcggaggcagagaccgaggcgcaccggcaga

SEQ ID NO: 107259 - RNA, 73 nt, Homo sapiens
cgcgccgcaggccacggcccaggccccggccagggcccagcagcagcccacggggccagcggaggaaaagggg

SEQ ID NO: 107260 - RNA, 76 nt, Homo sapiens
gacaagagaaggaggaaaggccgaggaggcaaacaaagccccgcagcggcagagcacgaggcgggaaagccgggcc

SEQ ID NO: 107261 - RNA, 58 nt, Homo sapiens
cgacgcaaggcgacgggcgggaaagggagcagcaccggccacacccacagcacgaccg

SEQ ID NO: 107262 - RNA, 73 nt, Homo sapiens
agggaacgaaccccacaggggcaaaggagcagagaacgacaagccacacgaggacagcccgcaacaccaccga

SEQ ID NO: 107263 - RNA, 51 nt, Homo sapiens
ggcccacgacgggacacgccccggagggagagggaagcggcagggcccccc

SEQ ID NO: 107264 - RNA, 84 nt, Homo sapiens
cgacgagaagccccaacagcacggcgggccccagcccgggggcagggcccagaggccggagcgagcccagaagagaggcgaggc

SEQ ID NO: 107265 - RNA, 66 nt, Homo sapiens
gcggcgcgccgcccggcgagcgggccggaggaaaagaaaggcggagcccggcacgggcaaacagag

SEQ ID NO: 107266 - RNA, 76 nt, Homo sapiens
agcagaacacaacccagggaagaccagaaagccccggagagaaaaggccaggcacgacgcccccaaaggcaaacca

SEQ ID NO: 107267 - RNA, 84 nt, Homo sapiens
caggcccacagagcaggacacccaagagaaacacaacaccccaacaagagacaccagaagcagggagaaccagagagcaagcga

SEQ ID NO: 107268 - RNA, 64 nt, Homo sapiens
gaggggcccccacaccaagaacggcggggaggggcgaccccggggcccggccagcacgaccgag

SEQ ID NO: 107269 - RNA, 63 nt, Homo sapiens
gaacaccgcaggggccagaggacccaacccaggccagggaacagcgaaggcagccggaggaag

SEQ ID NO: 107270 - RNA, 69 nt, Homo sapiens
cccagccccgagagccgggaacagaagcaacggggcaacagaggggcacaaacgggaaaaaaagagaac

SEQ ID NO: 107271 - RNA, 78 nt, Homo sapiens
gaccaccaacccacaacgcccccagcacagcgccccaccccagcccccaacccccagaaacgaaggaggcccaaccac

SEQ ID NO: 107272 - RNA, 67 nt, Homo sapiens
aaaccaaccaaggccccagcacaccagagacaggggcacagaagaacaaacgaagaccacgggacac

SEQ ID NO: 107273 - RNA, 69 nt, Homo sapiens
ggcgcgagaacggccgcccgccgcagcggaggcaagggcaaaggaaaaacaggaagccccgcacgcgga

SEQ ID NO: 107274 - RNA, 54 nt, Homo sapiens
aagggaaccggagaagagagagaaagaccaagaagcagaagaaggacaccccac

SEQ ID NO: 107275 - RNA, 61 nt, Homo sapiens
acagagcgccaccgcacaacagccagaacaagagccacagcgcgcgaaccccgggacgacg

SEQ ID NO: 107276 - RNA, 88 nt, Homo sapiens
ccccagccgaccgagcccaggagcgccacgcgcggaaggcagcgcccagcagcgcaggcgggggagcgggaggagccagagcacaccg

SEQ ID NO: 107277 - RNA, 55 nt, Homo sapiens
aggagaggcgagcgcccaggacggggccccccgggccgggcacgggcgccagcgg

SEQ ID NO: 107278 - RNA, 70 nt, Homo sapiens
accgaacaggaaggccccggaaccacagagcggcagcgggaacacggaaggaaaggccccccgggcaagc

SEQ ID NO: 107279 - RNA, 66 nt, Homo sapiens
ggaaggcggcgcggggagccagggcaagaaggagagacacagcgccggaaccggagagaccgcagg

SEQ ID NO: 107280 - RNA, 56 nt, Homo sapiens
agccaagcagaaaaaccaaagcacccgaaagaaaggcaccagcccagccacagcca

SEQ ID NO: 107281 - RNA, 72 nt, Homo sapiens
cagccagcgaacagaggaccagcaacaaacgaccagaggacgcaccagaagacagggcaaccagaagcccca

SEQ ID NO: 107282 - RNA, 74 nt, Homo sapiens
agggagcacaggcgccggggagcagagccggaagcggcaggccacaaagccacaggcacaagcagaggaaccag

SEQ ID NO: 107283 - RNA, 80 nt, Homo sapiens
cgagagagcgcggccccaggagcaaggcgagaacacagcacggggaagacacgacgaaaacaggcaggagagaacacagc

SEQ ID NO: 107284 - RNA, 70 nt, Homo sapiens
cgcccgagggagccgcgcggccccagaggcgcggggagccgaaacgccccgccagcaccgcgcaagcagg

SEQ ID NO: 107285 - RNA, 74 nt, Homo sapiens
agaggagaaggagagcagacgcaaacaacggagcaggaagacacccacgaggacaaccccacagagcaagagac

SEQ ID NO: 107286 - RNA, 79 nt, Homo sapiens
ggcgacaccacgggaggcagaccacgagaagccagacaagggaggcgaggacggacaaaaggaaacggacgggaggcca

SEQ ID NO: 107287 - RNA, 80 nt, Homo sapiens
accagaccgaccaccaaaacaccacgaaaagaccgagacagccagcgccggaggaacccggcaacacgagaccccggcgg

SEQ ID NO: 107288 - RNA, 75 nt, Homo sapiens
aggcaaaagcgaggcagaaccccacagccacaccagccaaaggagagggaggcccacagccagccagaacaacca

SEQ ID NO: 107289 - RNA, 62 nt, Homo sapiens
agccgaagcggccaggagaacaacacacaaaaacgcgcccacagaggaacacaaaaaacagg

SEQ ID NO: 107290 - RNA, 81 nt, Homo sapiens
cccgccgggcaacgccgaacccagcgcgcagcgcgcaggaaccccccaaacgcaaaagccgccccaagacgagcacgaagc

SEQ ID NO: 107291 - RNA, 62 nt, Homo sapiens
ggcccccacgcgaagcaccgagccagagcgagagaacgcaccgggggcagacaccaccaagg

SEQ ID NO: 107292 - RNA, 74 nt, Homo sapiens
caccgaagagggagaacaaaacagcagaacgcgggaccgaaggacgaacagagaaacccccagaacagaaacaa

SEQ ID NO: 107293 - RNA, 57 nt, Homo sapiens
agagcagcaaaaacaaggacaggagaagaggggaagaagaaagccagaagagcagag

SEQ ID NO: 107294 - RNA, 71 nt, Homo sapiens
aaagaaacaagccgggaaagggacaagaagggcaaagccgaaaacaagccccgcagagcgagacgcaagaa

SEQ ID NO: 107295 - RNA, 79 nt, Homo sapiens
ccgacgaaaggagccaaaggggagggccacagcaggccacgggggagggcgcagaccacagcaccgccacagcggcggc

SEQ ID NO: 107296 - RNA, 70 nt, Homo sapiens
ggagccgccccagaaagagacaacacaggaacaagcaccacagaggggggaccgcggggccaaaaagggg

SEQ ID NO: 107297 - RNA, 83 nt, Homo sapiens
cccggccccgcaccaggaggaggacgacagcacgcaggaggcaaagggaccccaagaaaccaaagggcaagagccgcagcccg

SEQ ID NO: 107298 - RNA, 76 nt, Homo sapiens
ccacccaagaaaagaggcccaaacgcgacgccaagcagccgggacaagcgggcacggggacggccagccgggggcc

SEQ ID NO: 107299 - RNA, 72 nt, Homo sapiens
aaggcccaagcccagccaaggaacaaaagcccagcccggcagcccacagaaaaaaggccccacgcaagccag

SEQ ID NO: 107300 - RNA, 73 nt, Homo sapiens
gccgccccggagggagacgcgcgccgaggagaacccagcggccagaacggaagaccaaccagaagacacacaa

SEQ ID NO: 107301 - RNA, 84 nt, Homo sapiens
gacacacacccagcagcggccgaagaaaccaaaaggaagaccgaggagcagggagcaaccacaaggaaaggaaaccaccgaacc

SEQ ID NO: 107302 - RNA, 89 nt, Homo sapiens
gcggcgacaggaaggagccggcacagggcagacacggggccccccaggaggcgacccggggccaacaagggacgaaggccggacacggg

SEQ ID NO: 107303 - RNA, 87 nt, Homo sapiens
gacggcggcagccaggccgcgacgagcccagggaggcagcacaccccccgggacaagagcagcgcggagaacacgaccgagaaaacc

SEQ ID NO: 107304 - RNA, 86 nt, Homo sapiens
aaacgccgaggaacccggcgaggcggcagaccaaagagaacccgacagaagaaaagggggacccacagaacaccagcagcaaacac

SEQ ID NO: 107305 - RNA, 81 nt, Homo sapiens
ccagcgcgccggaggagaacaagagcccgagagcggcgggaggggaaggagcagccacccgggcagaaaggccgggcgaag

SEQ ID NO: 107306 - RNA, 71 nt, Homo sapiens
aaacaaggacccgccacagcccgacgaaaggagccaaagggccggcacagcagcaagaccggaacccagaa

SEQ ID NO: 107307 - RNA, 72 nt, Homo sapiens
gccgacaaccacaacagggaagacaacgaggggcacgcgcccacccaggcgcagacgaccgcgaggaaaaca

SEQ ID NO: 107308 - RNA, 57 nt, Homo sapiens
gcggagccggaagagccccgagcccagagaaaaccgcggaccccgagacggccggga

SEQ ID NO: 107309 - RNA, 69 nt, Homo sapiens
cagaaaacccgcgagcaggaaccccaggaaacggccagacgcggagcgaagaagaacaagaggacagag

SEQ ID NO: 107310 - RNA, 78 nt, Homo sapiens
ccaccccaacccaaagggagcgcaagcagccgccaaagcgggcaaggcgcagcgcccggcccaaggccaagaggggcc

SEQ ID NO: 107311 - RNA, 63 nt, Homo sapiens
ccgggaggaagccacacaaagaacaaagcagggagggagaaaacgggccggaggaaaagggcg

SEQ ID NO: 107312 - RNA, 99 nt, Homo sapiens
aagccggacccgcccagcagaagaagagaggagggagaacacagaaaccggccccagggcagcacgagcagcgccgcacgcacgagcaccagcacgaca

SEQ ID NO: 107313 - RNA, 61 nt, Homo sapiens
accccagccaaggagacacacacaggggcgcaagacaggggggcggcacgcagccaccgag

SEQ ID NO: 107314 - RNA, 87 nt, Homo sapiens
cgcaggcagacaaaagggccaaagaagggagagaggacggaccacagagacacgggacgcgcagcggcccaacgaccgagaccgagg

SEQ ID NO: 107315 - RNA, 82 nt, Homo sapiens
gcggcagccacggggacagccgcaagccgcgcgggagcccgggagcagcagaagcaggcaagggaaacgaggaaagaaacag

SEQ ID NO: 107316 - RNA, 79 nt, Homo sapiens
cgggaaacgcggaagcggccagcgcggaggccagcagcccagggcaacagccgaagagagaacggaacaccgacaagcc

SEQ ID NO: 107317 - RNA, 76 nt, Homo sapiens
gaccaaaccgcggcgaggacggggcgccggcgccgccgcccccgggccgcggccgcaggccaaagagcacagggac

SEQ ID NO: 107318 - RNA, 80 nt, Homo sapiens
cacaaagcaagccaaggaaggacaaggggggaaaagaaacagagaaaaccaaggacaggcaaaaagacagccgaaaaagg

SEQ ID NO: 107319 - RNA, 81 nt, Homo sapiens
ggcccggagcccccagcgcagcggccgcggggaaggaacaaagcagagaaaccaaaaggccagacgaacacgagagggagc

SEQ ID NO: 107320 - RNA, 65 nt, Homo sapiens
gcacgcgcagagccccagaagcgcaaaccacacaacaaacggcaccaacgagccaggcagcgagc

SEQ ID NO: 107321 - RNA, 113 nt, Homo sapiens
gggcggcacgaggggcccgccaccacgcacgggcgcacggaggacgggaaaaccagcagcaggagggacgaggaagacccacaggcagaacggccacacaggcagaggcaacg

SEQ ID NO: 107322 - RNA, 69 nt, Homo sapiens
acagccagcccagggggcagacacaagaaccaggggagaaagcaagggcagaggaccgcccaaggaaag

SEQ ID NO: 107323 - RNA, 84 nt, Homo sapiens
caacaaggcgcagggggaacagaggcagcggccgcgggcgaacgcggaaggggacaggaacaagacgaaaaggaccgacaggcg

SEQ ID NO: 107324 - RNA, 77 nt, Homo sapiens
gaccgcaagcagaccaaaggaaggggaaccacaaagaagagaaggcgggccaagaccgacaacgccaacaaagccac

SEQ ID NO: 107325 - RNA, 69 nt, Homo sapiens
aaagaagaaagaagaaggcaaagagagacccgacgaagggaggggaagcggcggagaaaccaccacaaa

SEQ ID NO: 107326 - RNA, 43 nt, Homo sapiens
caggacaccgaccggaccgggaaccaagaccaggacaaagaag

SEQ ID NO: 107327 - RNA, 40 nt, Homo sapiens
caccaccgccaggccaggaaacgaaacggaggagcccagg

SEQ ID NO: 107328 - RNA, 89 nt, Homo sapiens
ccgcgggccaggagagcgccggcgggagggggaagacagagaagaccacacaaccgaaggggccgggcaggacggcccggggcagcaag

SEQ ID NO: 107329 - RNA, 80 nt, Homo sapiens
aaagccccccggagacgcaaccaaggagccaaaaaccgaacacccggaaggggacaagggacggcgaacagaccccgcgc

SEQ ID NO: 107330 - RNA, 79 nt, Homo sapiens
gggggccgcgcccggccccgcgcgggcggacggcggaggcgcccccaggagaaaggaccgggagcgaggagcccgcacc

SEQ ID NO: 107331 - RNA, 32 nt, Homo sapiens
ggggggcgcccacccggcccgcgacccaaaag

SEQ ID NO: 107332 - RNA, 78 nt, Homo sapiens
gcccccggcccgcagcccccgccggccgcccaacaccgaacaccgagagccaggaaccccaagacggaggacacacac

SEQ ID NO: 107333 - RNA, 83 nt, Homo sapiens
cggcggcgcggggcgaggacggcggcggaccggggcagccccgcgcccggccagcccgaaccggggggagccagcacgagggg

SEQ ID NO: 107334 - RNA, 74 nt, Homo sapiens
caggcgacaacgagccgggggaggagggggggccgcgccgccagacccagcaggcgaagaagcagcagcccaag

SEQ ID NO: 107335 - RNA, 73 nt, Homo sapiens
cgagaaacggagagggaagagaaaggacccagcagaccgccggagaagcccggaccagcaccaagcgggagcc

SEQ ID NO: 107336 - RNA, 83 nt, Homo sapiens
gagggaaacccaaacccagcaacacgaaacagacaggccgggaacccaacaagggagcaaacagagaaagaacccaaacacac

SEQ ID NO: 107337 - RNA, 60 nt, Homo sapiens
gcggagggagccccagacacgaagggaaacgaaagaccgaaacagcaagcagcggagcag

SEQ ID NO: 107338 - RNA, 75 nt, Homo sapiens
ggggagaggccggaggacaccaacaggagcacccacgggaacagcccagaaacgagggaaaaacgaagccgaccg

SEQ ID NO: 107339 - RNA, 80 nt, Homo sapiens
gacaaagaggcggcagggaccagcagacgggaaggccagaaccgcccaaacgagcagaagcgggaagaaacaggagaccc

SEQ ID NO: 107340 - RNA, 64 nt, Homo sapiens
gcagagcggagggggaccaccccaggaagaagacaacaggaccccaaagagaccaaggaaacca

SEQ ID NO: 107341 - RNA, 77 nt, Homo sapiens
gagggccgacaggggcaagagccgccgaaagaggcggggcaccaggcccagacggcgaacccgagcaagcaaccacc

SEQ ID NO: 107342 - RNA, 75 nt, Homo sapiens
aaaaaaccaacaagcgggagcccaacacccacacaacacggcaaggccagccagccggaccacggaggcaggagg

SEQ ID NO: 107343 - RNA, 72 nt, Homo sapiens
aaacgaagaggcaaagagaaaaacacacccagacggagaaccgcaggaaagacgaagacaaccccaaacagc

SEQ ID NO: 107344 - RNA, 55 nt, Homo sapiens
caacaccagaagaagggacaaaaggagcaagaggaagagaggaacaaaagagggg

SEQ ID NO: 107345 - RNA, 79 nt, Homo sapiens
ccccggcagcgagcagagcggcagaccggagacagggacggagcaacagacaacccagcaacagacggaacagcgcgag

SEQ ID NO: 107346 - RNA, 76 nt, Homo sapiens
gcagggaagacgccgcgccaccgagccggaccggagacggggccaacagccacagaagaccgggagggaacaaaaa

SEQ ID NO: 107347 - RNA, 74 nt, Homo sapiens
ggagaaagaagcccagcccaccggagacacaggaacaaacgagcacgcaagggcccgacgggggcacagaaaaa

SEQ ID NO: 107348 - RNA, 78 nt, Homo sapiens
ccagacggccaccggcgggaggaacaaaagcccccgcccagccgcgagccagacccaggcccgccgccggagcacaac

SEQ ID NO: 107349 - RNA, 74 nt, Homo sapiens
aaagaccaaccaagaggccagagagcaacaccccccaggcgaagagccaccagcggcgacgcaggccaaaacca

SEQ ID NO: 107350 - RNA, 69 nt, Homo sapiens
gccccccgccgacccagaccacgcccacccacccaagagagccaggggcgccgacagcgagagcgcacc

SEQ ID NO: 107351 - RNA, 78 nt, Homo sapiens
gacagcccacacccggcgcggagggaacacgaggacccaaagaacaaacccggagagaagaaaaccccagcagggcgc

SEQ ID NO: 107352 - RNA, 83 nt, Homo sapiens
agacccccccggacccagaggaggagccagaaagaagggcggggcccacagggagcagccccagggacgccgagggcaacccg

SEQ ID NO: 107353 - RNA, 82 nt, Homo sapiens
gccaggcgccccgggcgcggcaaggacgagccggggcgcgaaggcaggacgaggagcggaggcggcagcagcagagaagaga

SEQ ID NO: 107354 - RNA, 81 nt, Homo sapiens
cgccagccccagccccggcagcgggacccggcgaagacgcgaccgcggcgcgagcaccaggggccaaggcgacagcaaaac

SEQ ID NO: 107355 - RNA, 35 nt, Homo sapiens
ggccccagccaggaagccaagcaagagcgagagaa

SEQ ID NO: 107356 - RNA, 59 nt, Homo sapiens
aggccgaggcgggcagacacgaggcaagagcaacgaaccaaagcaaaggaggccggggg

SEQ ID NO: 107357 - RNA, 76 nt, Homo sapiens
ggaggagcggggacggcgacccaggagaggcccgacagcaacgggagaacagacagcagagggaagcggaccacac

SEQ ID NO: 107358 - RNA, 59 nt, Homo sapiens
cccaagcgaagaacccaccgcagccgcgaacgcggccgggaggcagagcgaggcaccgg

SEQ ID NO: 107359 - RNA, 59 nt, Homo sapiens
aggacacaggcaccagacgggacagaaaaccagaggccggacacaagagggcaagaaag

SEQ ID NO: 107360 - RNA, 72 nt, Homo sapiens
gaagcaggcccaggagaaagcacaggacagacaacgacgaaagacccacagaagcgcgccgggcgcagagga

SEQ ID NO: 107361 - RNA, 76 nt, Homo sapiens
agaaaacagggccagcccgaacagaacaccccacaggaacacaccgagaaaccgggagccgaaggcgccagggaaa

SEQ ID NO: 107362 - RNA, 77 nt, Homo sapiens
gcggccgcggcaccgcaggaaacaagcccacccagaaaaaggcccgggacccaggaaccagagggacggggcaccag

SEQ ID NO: 107363 - RNA, 79 nt, Homo sapiens
ccggccagcggaagaccccagacacagcaacaggacacaggagacaaacggcggaggcggggaaaaaggagaagccaga

SEQ ID NO: 107364 - RNA, 54 nt, Homo sapiens
gagggagagccaaagaaggaggggagaagacgcccaagcccggagcccgacccc

SEQ ID NO: 107365 - RNA, 56 nt, Homo sapiens
caccgcggggccgaaaacaacgacaacgagcacagccccggccccccccccgcaac

SEQ ID NO: 107366 - RNA, 88 nt, Homo sapiens
cgacggccgcgagggcagcacacacacgccccacgcccggcgagcccgcgaggaggacccccgcggaaaggcaaagggccaccgagag

SEQ ID NO: 107367 - RNA, 80 nt, Homo sapiens
gcgcgggagcaagagacagggaaggccagcaagacgcaggccacggggccaggggcaagaggccccggaaggccaggggc

SEQ ID NO: 107368 - RNA, 82 nt, Homo sapiens
ccagcccacagcaagaccccagggacaggaaagcaaggcccagcgagccggacccccagcggagggaagacgcagccccggc

SEQ ID NO: 107369 - RNA, 86 nt, Homo sapiens
aaccagcccccgggggggcggcggcagcggcggggacgcccggcggcaaaggcaagagcacaacgccagacggcccgccacgggcc

SEQ ID NO: 107370 - RNA, 60 nt, Homo sapiens
cccagagagcgggacacagggcgggaagaaacggggagccgccacccaccggaagacgcc

SEQ ID NO: 107371 - RNA, 72 nt, Homo sapiens
gaaccaaagaaaacaaaaggggacagggggaaacagcagcacagacagacaagaggcagccaggcagaccac

SEQ ID NO: 107372 - RNA, 72 nt, Homo sapiens
ccagagcgagagcgaaacagagcgggccacacccaaaaccggacaggcagggcaagaagacaccacaaacaa

SEQ ID NO: 107373 - RNA, 85 nt, Homo sapiens
ggaagagggcacgaacgcaggcgcggggccccagcagaaccaccgcacgacgagacgccccccggagccccaggccggaagcgcg

SEQ ID NO: 107374 - RNA, 40 nt, Homo sapiens
cggggccagcggccaaaacgaacccgggcacccccccccc

SEQ ID NO: 107375 - RNA, 78 nt, Homo sapiens
agacaggagcagccaaaagccaccccagagaggagcaagagacagaaacagccgccagccgcagggaggagaagaaga

SEQ ID NO: 107376 - RNA, 76 nt, Homo sapiens
ccaaacagcgccggaacaccagcacaagaacgcacccaagcgcagccaaggaaaagaacccaggacgcgaggacaa

SEQ ID NO: 107377 - RNA, 73 nt, Homo sapiens
aagaacacgagaaaacaccacacaacagaagaaggacaaaccggcgaccacacacggggacgacggggaagcc

SEQ ID NO: 107378 - RNA, 66 nt, Homo sapiens
gaaccgcgcaggacgccaaaccaagccgcagggggaaggccccaccgaggcaccaccaaccaaagc

SEQ ID NO: 107379 - RNA, 81 nt, Homo sapiens
cgcgccgccagaacccccacgcacccaggaccgcgcccacaggacaggcacaacagggaaacgaaacgggcaacccgcgga

SEQ ID NO: 107380 - RNA, 75 nt, Homo sapiens
acgcaagaacgagcgggcagccgcccaaggcggcgggccagagaagcagacgcccagcgaacaagcaggaggaga

SEQ ID NO: 107381 - RNA, 51 nt, Homo sapiens
cccagcagggaaagaggccagaccccagccgcgcacacacggcgacgcgcc

SEQ ID NO: 107382 - RNA, 69 nt, Homo sapiens
accaagaaccagaccggaacacgaaagaggcagagcgggaaaagaggaagaagggaaaaacggacggcg

SEQ ID NO: 107383 - RNA, 76 nt, Homo sapiens
aacgaagggacaccgggcccacagaggaaggagaaccacagaaacacacggaacgagaagcagaacaagaaagcgg

SEQ ID NO: 107384 - RNA, 53 nt, Homo sapiens
cccgccagggacgggcacgggaaggcacacaagacaaaggcgccgcagcaccc

SEQ ID NO: 107385 - RNA, 81 nt, Homo sapiens
ccaaggaacagaggccgaaggagcccacaaacgcggagaaaccgggagaagccggccaggcaggcacaccccaccacaacg

SEQ ID NO: 107386 - RNA, 64 nt, Homo sapiens
gaggcaaaggcaagggcggaaacagcccccccagaaccaggccggcggcaggccccccgggccg

SEQ ID NO: 107387 - RNA, 68 nt, Homo sapiens
gcagagcaggccaagccagaaaggagccacacgaccccgccagcgcaggcaaagaggagacggacgcg

SEQ ID NO: 107388 - RNA, 81 nt, Homo sapiens
gacaagacaagaccggcggggaagcgacggagaaagaagggccaaggcggacagcccagaccccgagcggacgaccgaggc

SEQ ID NO: 107389 - RNA, 58 nt, Homo sapiens
gagaaaggacacacgaaaacagacgggggaacaagagggcaaggccagagaaggcggg

SEQ ID NO: 107390 - RNA, 68 nt, Homo sapiens
ggaccgaccgcaacagaacggacccgacgacaggaggcacgagacgacaaggagaggccagcggaagc

SEQ ID NO: 107391 - RNA, 58 nt, Homo sapiens
gacaaaggacgggagggggggggagccgcacgacccgaacgccagagacaaaaccagc

SEQ ID NO: 107392 - RNA, 80 nt, Homo sapiens
gagacacccaccagaagagggagaagcggagacagacggagccaccagcggagcacacgagaccacaaagcccggagacg

SEQ ID NO: 107393 - RNA, 75 nt, Homo sapiens
cggggaccagcagcggagggggccggcgccgacggcggcacggcgggcgccaaccagaggaggcaccaaaacccc

SEQ ID NO: 107394 - RNA, 74 nt, Homo sapiens
aacaggcaaagccaaaaaagcacaggcgacacagccccaacgcggaccgagaaacggacaccacaccggaaggc

SEQ ID NO: 107395 - RNA, 67 nt, Homo sapiens
aagccggccacagagcgcgagacaacccagagaccggcgccaggacaaacgagcgcaacccccgaaa

SEQ ID NO: 107396 - RNA, 81 nt, Homo sapiens
aagaaaccagccggggggggcgcggcaaggaccaggcgccccgacccggccaaccaccacggccgagcgcacaccaccgcg

SEQ ID NO: 107397 - RNA, 71 nt, Homo sapiens
cagcaagccacacgagaacaaacaggaccagcagccagcagcacgagcggagaccaagagagggaagacaa

SEQ ID NO: 107398 - RNA, 74 nt, Homo sapiens
gccacgggccgagacacgcagcggcggccagggaccagcggcggccggggcagcgccgcgagccagcaacgggg

SEQ ID NO: 107399 - RNA, 72 nt, Homo sapiens
aggaagaaagcagcccaggaggaaaaggcccaggcgagaaagaaaccggaagaaagagacgccaaaggagac

SEQ ID NO: 107400 - RNA, 65 nt, Homo sapiens
aaacggaaaagacccccagacgaacaagggaccaagaaaggcccagggaccaaagcccggacaag

SEQ ID NO: 107401 - RNA, 73 nt, Homo sapiens
cccagacacaagccgggaagggagcaccgagaggcagacaagacacccgcaggaaaaccaacagagacaacaa

SEQ ID NO: 107402 - RNA, 79 nt, Homo sapiens
ggcaccccccgccgacaaggagggacggccgccgccccgggccccccgcgggcgcccggccccccccacggcacaaccg

SEQ ID NO: 107403 - RNA, 77 nt, Homo sapiens
gaggaggcagaagcgcgcgagcccgggaggggcaaaagcagggcaacggcccggccaaaggaagaggcggccccagc

SEQ ID NO: 107404 - RNA, 72 nt, Homo sapiens
cgagcagacacgcaaagaagcccgaggcgcaagagacaaagacagccccaaggcggagaaaagcagagcgaa

SEQ ID NO: 107405 - RNA, 110 nt, Homo sapiens
agaaggaagaaggggggagaagaagaaagccgaagccgaaaccaaggagacgcacagaccaggcgagcagacagagcaccagccggggacccggaccacacaggagacga

SEQ ID NO: 107406 - RNA, 74 nt, Homo sapiens
gggcaaggcccacccccacaaggagggcaaggcccaagaggccccaggggagcaagggcaaacaggcccccccc

SEQ ID NO: 107407 - RNA, 81 nt, Homo sapiens
ccggccggggccggccgggcgggcagaagccaaggcgcgagaaggcaccggggcaaacggcacacgaagcacggaacaccc

SEQ ID NO: 107408 - RNA, 67 nt, Homo sapiens
ccccgcacacacacccaagagccacaagaagaaaccaggcccagcgccaccaaccggcagaccacca

SEQ ID NO: 107409 - RNA, 52 nt, Homo sapiens
cgacgagacgagaaacaaccaggccgacggccagaaggagaaaaaagagccc

SEQ ID NO: 107410 - RNA, 89 nt, Homo sapiens
cggggcgggcagcaaccgaaccagaaggagcccagcgaaggccaacaccaagagacccggggccgaccaaagggaagcaaaaacaaggg

SEQ ID NO: 107411 - RNA, 41 nt, Homo sapiens
ggcagaccaagcagggggggaagaaacgcaggccaacaaaa

SEQ ID NO: 107412 - RNA, 86 nt, Homo sapiens
aacagggcgcccgagacccccagcgcgccggaggagaacaagagcccgagagcccacgcaggagacgggaggagcgacaacggagc

SEQ ID NO: 107413 - RNA, 77 nt, Homo sapiens
gaggaaggacagacggccagccagcacaaacgcaacaaaagaagcccacaagaagaaaagccccccagagcagagcc

SEQ ID NO: 107414 - RNA, 78 nt, Homo sapiens
gcgcagggcgcgggacacaaccgcagaaaggaagagaggggggcggaagcgaggaaggaggaacgagagaagcgggca

SEQ ID NO: 107415 - RNA, 73 nt, Homo sapiens
acccagccgggcacgcaaacaggcgagcagaacgaggacagcagcggacggccggaccaagaggcgccgcccc

SEQ ID NO: 107416 - RNA, 85 nt, Homo sapiens
cgcccggagagcgaccaaacacaaggaccagccgacagcgaccaaggccagagcgaaaggccacggccagccgccggcacgcagc

SEQ ID NO: 107417 - RNA, 57 nt, Homo sapiens
gacccgagggcaggccgcgcacgcccaccaccagccggaaaagggccgggcacggac

SEQ ID NO: 107418 - RNA, 86 nt, Homo sapiens
ggggaccaagcggagacaaacgcagcccaaggccaaccccacgcaccgcccgccccccgaggagcccaagccaacaaggccacaca

SEQ ID NO: 107419 - RNA, 77 nt, Homo sapiens
gacggagccgccacccagagcgcacggcgacgccccaggggaaaacccccgggaccagaacccaccagacaacaagc

SEQ ID NO: 107420 - RNA, 59 nt, Homo sapiens
cgagagcaagccaaagaccaaggggggggcacccccacaacgaaggcacaagggacaag

SEQ ID NO: 107421 - RNA, 72 nt, Homo sapiens
gcagaccagcagccaaggacgagaaacccaagaccgggaagccaccagcaggaaaaaaccacacacgaacag

SEQ ID NO: 107422 - RNA, 64 nt, Homo sapiens
gacgccgcagcaaacaaaaggaagccaaaagcgaggccgaccccgacaccaagacaaccgaagg

SEQ ID NO: 107423 - RNA, 74 nt, Homo sapiens
gccagagccagggaacggaggagcgagccacggcgagccggaagagcgcagaagccggaagagagccaagccag

SEQ ID NO: 107424 - RNA, 74 nt, Homo sapiens
caagagcaaggaagagaccaagcaccaagaaaacgccaaggaacgaacacgcccaggacgggacagaagccacg

SEQ ID NO: 107425 - RNA, 50 nt, Homo sapiens
gggaccggaagcacacacagacagcgcagagccagaaggccacgcccaaa

SEQ ID NO: 107426 - RNA, 68 nt, Homo sapiens
aggaaaggcgcaccggaacgaacagcgacgcgcagagagaaaaagaagggaacggagagacaaaaccc

SEQ ID NO: 107427 - RNA, 68 nt, Homo sapiens
aggcagccaagccgagccgccacccggcgaaaccccaaagagaggagaaacagcgacgacccaaaggg

SEQ ID NO: 107428 - RNA, 44 nt, Homo sapiens
agccggggccgggcgacaggagcagcacacaggacaggcccccc

SEQ ID NO: 107429 - RNA, 74 nt, Homo sapiens
ggaagcagaagcaggagggcccgagggaggggggccaagggggagagccaaaacgagaaacgaagccacgggca

SEQ ID NO: 107430 - RNA, 87 nt, Homo sapiens
gaaaaacaggcgggcagacagcagagccacaaaggggagggagacgcggagcggggccaggaaggcccggacggagcaggcggacca

SEQ ID NO: 107431 - RNA, 82 nt, Homo sapiens
aggagcgccacgggagccaggccgcagaggcgcacaggggcaaacagaacgccaaaagacgaacacaaagggaaagaggaga

SEQ ID NO: 107432 - RNA, 81 nt, Homo sapiens
aagaccgcgccacgcccgaggaagaggagaaaggccgggagcaagcaccaacgaagaggccgggccgaggccacgggcaag

SEQ ID NO: 107433 - RNA, 75 nt, Homo sapiens
ggccggcagggcagccgggggacagcgaggaagggcacacacgaccaaccagcagcaaggggacggaaagaaaaa

SEQ ID NO: 107434 - RNA, 73 nt, Homo sapiens
ggccagggcggccaggcgggggccaagaccaagggaacggaagccccagcccgcgcgagccaggcgcccacag

SEQ ID NO: 107435 - RNA, 79 nt, Homo sapiens
ccaacccgggcccaacagcaacaggccaagccggcgccagcgccagcgaggaaccgaacccagccaaaaggccccgcgc

SEQ ID NO: 107436 - RNA, 73 nt, Homo sapiens
cagacgagcagccgagaacccggcacaccagggccggaagcccaagcggggaagagagcaaggacacaggcag

SEQ ID NO: 107437 - RNA, 77 nt, Homo sapiens
gacaagagagccgaggcgcccccaccacccacaagggcggagaacggaaaagcaccaggaagcagagaggaccgcag

SEQ ID NO: 107438 - RNA, 82 nt, Homo sapiens
ccaggacaacacacacaagaaaccaggccgccggaggcagccggccaacgacccaaggccagccagccccaggcaccagcgg

SEQ ID NO: 107439 - RNA, 75 nt, Homo sapiens
gaagggggaaaggcaccaggacaagcaaaggcaaaagcagaccggaaaacccaccggcaagaccacacccgaggg

SEQ ID NO: 107440 - RNA, 69 nt, Homo sapiens
gcaggcgaagcaagcacagccaacagcccacaaggaagaagaaccgcagagaggaaaggcgccacacac

SEQ ID NO: 107441 - RNA, 73 nt, Homo sapiens
caaggggaggagcagcagcgcggcagagcaggggacagagcgcgaagcgggccccgaacaggaaaggggaaga

SEQ ID NO: 107442 - RNA, 74 nt, Homo sapiens
acgcgccggaaagcagccaagacagagacccgacgccgcccggacacggacgacaccgagcccaaccgaccaac

SEQ ID NO: 107443 - RNA, 64 nt, Homo sapiens
ccaccgcagcggcaggacgaaggagggggaaaagccagccagaacacagaacagaacacacgga

SEQ ID NO: 107444 - RNA, 79 nt, Homo sapiens
cacaggccgaagcacccccagcaggccccgggcccagggcaacaaagaaacaagaacgagaagaagggggcacggcccc

SEQ ID NO: 107445 - RNA, 37 nt, Homo sapiens
ccacccaccgccgccgcccccaggcagacgacccgaa

SEQ ID NO: 107446 - RNA, 72 nt, Homo sapiens
aaagcgcagacggggaacgggacagggcagcgcaacaccgggaagggcacgacaggaaaagacgacgaagag

SEQ ID NO: 107447 - RNA, 82 nt, Homo sapiens
ggacgcccagaaagggcgacaggccaccaacacacggggagagagaaggcccaaaagccaggggccgacggacaagaggaag

SEQ ID NO: 107448 - RNA, 70 nt, Homo sapiens
ggaaggaccaaacacgaagagacaaaagagggacacgcaggaaagcggcagcccagaaccggaagcgacc

SEQ ID NO: 107449 - RNA, 81 nt, Homo sapiens
ccgcgggaagcaggacgcgccgcgccccaaggaggcaacacggaaaccgaggagcaccacaaccccagggacagaagaagg

SEQ ID NO: 107450 - RNA, 80 nt, Homo sapiens
caacaagaagcgaagaccgaagcaagagcggcagcaaaccaagaaggaggggaccgaagcgccaggccggcgaaggaccg

SEQ ID NO: 107451 - RNA, 74 nt, Homo sapiens
caaaacggccgggaaagaaccacaagcccacgggacacgcggcaggaacggacggaaaagaaggagagaggggc

SEQ ID NO: 107452 - RNA, 48 nt, Homo sapiens
gcagcggagaagcggagcgaggacgaaggaacggacagagagggccaa

SEQ ID NO: 107453 - RNA, 82 nt, Homo sapiens
gcacgaaagcgccgcgaagcgccgccggccccgccgccaagaggagcgagcggacccgcgaggggcagcagcccagccaaag

SEQ ID NO: 107454 - RNA, 101 nt, Homo sapiens
ggagaggggaacagacgcagggcagggccccgcccggcggggaagcggccacgaccgggcacgggacccaggacgagcgaccagacccggaggagcaaagc

SEQ ID NO: 107455 - RNA, 83 nt, Homo sapiens
cagagcccgggccggcagaggcgaccccgcacacacacccaccagccacggcagcccagcggggacccagccgccccgcccgc

SEQ ID NO: 107456 - RNA, 58 nt, Homo sapiens
gaccacgacacccgaagccgggaaagggcggagaacggaaaagcaccaggaagcagag

SEQ ID NO: 107457 - RNA, 71 nt, Homo sapiens
gaaggggacgggcccagaggcccagggaggcaggggcagaaacagagaaggaacagcgacggggcgccaag

SEQ ID NO: 107458 - RNA, 79 nt, Homo sapiens
caacccggccacgcggccggcaccgacccccaggccaggcacaccacagcccgaaacgacggcccaccccacccagaag

SEQ ID NO: 107459 - RNA, 66 nt, Homo sapiens
gcccggaggggccggagcggcgcgcaggcggccgcgaccaagcccagggcgaaagcggcaccagga

SEQ ID NO: 107460 - RNA, 56 nt, Homo sapiens
cgcagggcgcccccgggggccaggaagaaccgcggcaggaacagcgcacccgggcc

SEQ ID NO: 107461 - RNA, 36 nt, Homo sapiens
aaggacgcgaggacaggcgaagcaaaaacaccggag

SEQ ID NO: 107462 - RNA, 88 nt, Homo sapiens
ccgcacacacggggcccgaggaagagcagaagaccgaagaagcagccgaacacggagcagaaacgagcgcgaacgggacccaacagag

SEQ ID NO: 107463 - RNA, 76 nt, Homo sapiens
accgccccaccaaaaccaaagaagacgaaagcaggcaccagcaagagaacgcaaaaacagcgcaaggaaaagaagc

SEQ ID NO: 107464 - RNA, 77 nt, Homo sapiens
caaccaggggaggaacaagagcgaaggacaaacacggcaggccaggaagagcggggagaagggcgggaaagcaggca

SEQ ID NO: 107465 - RNA, 78 nt, Homo sapiens
ggccaagcagccccgcccagccccaaaggcggaaacagggggacgcagcaaacgccaagacacggggcaggaagagca

SEQ ID NO: 107466 - RNA, 86 nt, Homo sapiens
aggaaagggagagacaagagaggagacccaacagacggcccaaaaacccagaacagaagacaaagagaggagccgaaggagaagca

SEQ ID NO: 107467 - RNA, 68 nt, Homo sapiens
gggaaggcggagcaacgggcggcgcacaggagcagcggaagcagcagcagcagcagcagcaaggccac

SEQ ID NO: 107468 - RNA, 74 nt, Homo sapiens
gcggggggcggcggcgcgagccagcggggccggcgcgagaccgcacagcaaggaaagcacccagagaaggaccg

SEQ ID NO: 107469 - RNA, 78 nt, Homo sapiens
ccacgccggacacggaaagggacagagcagaagggcgaaagaccgggccgcagaagaggccccaacccgggccagaca

SEQ ID NO: 107470 - RNA, 76 nt, Homo sapiens
cgcggggaggccccaaccaggggcgagccgcgcgggagaagccagggaaggccaggaaaacagagcgcaaaaggca

SEQ ID NO: 107471 - RNA, 38 nt, Homo sapiens
gcacgacacggaaaagagcaacacgggagaaggaaagc

SEQ ID NO: 107472 - RNA, 76 nt, Homo sapiens
caagagagagcaagaggaagcagggggaaagagaggcaacgagacgaagcagggagccggagccggaagagaaagg

SEQ ID NO: 107473 - RNA, 34 nt, Homo sapiens
gcccccaagagcgggacgcagcggagccccggcc

SEQ ID NO: 107474 - RNA, 59 nt, Homo sapiens
aggagaagaaccgcacggcgcaagggacgacgacacaggcaggaagaggcagaggaaga

SEQ ID NO: 107475 - RNA, 73 nt, Homo sapiens
caaacccagcgccggagaggaacaagcgcccgaccagaagggaccggaaaaggagaaagaaacaacgagccca

SEQ ID NO: 107476 - RNA, 81 nt, Homo sapiens
ggccagggaggaagagcgaagagcggcgacgccggaccgcgaagagacgagaggggcacggaaggggagagggacggggaa

SEQ ID NO: 107477 - RNA, 80 nt, Homo sapiens
aaaaaccgaccaaggaggaggcccaagaaaggccacgcacaggagaagcaggacaagggggcccagcagaggggccagcc

SEQ ID NO: 107478 - RNA, 77 nt, Homo sapiens
ccaggcccgagccaagaagaggcaagagcacccacagcgcgagccgccgcacgcaggggcgaaacgaccggagaacg

SEQ ID NO: 107479 - RNA, 67 nt, Homo sapiens
ccccgagagcgggacgcaggggaggaacaggaagagaagaggggccccagaaacagcacggagaaag

SEQ ID NO: 107480 - RNA, 68 nt, Homo sapiens
agagaacccacgccaaagaggaagcccaccacaaaaacgaaggcggcggggcccgccccaccgggggc

SEQ ID NO: 107481 - RNA, 67 nt, Homo sapiens
gcaaacgggagagccacccagcagacccgggagagggcccaaggcgaagacacagcaacccaaaaca

SEQ ID NO: 107482 - RNA, 72 nt, Homo sapiens
aaggcaagagaagaccgacaaggaagccccacagccaacagaaagcacaagcaaccccacccaacggacaac

SEQ ID NO: 107483 - RNA, 66 nt, Homo sapiens
caaagcgaaacaaaacgcacggaaagacccagaaagccaagacaaagccagcaacagaagaaagca

SEQ ID NO: 107484 - RNA, 82 nt, Homo sapiens
aggacccagggagcacggccagaggaccaggcgaccagcaccagcccgaccaggccagaaacagcgaggagccaaggaccga

SEQ ID NO: 107485 - RNA, 71 nt, Homo sapiens
ggacaagaggcggcaagacacggccggcaagccccagcagcccgcacagcggacgcaaagaaaaagacggc

SEQ ID NO: 107486 - RNA, 80 nt, Homo sapiens
gcggcggccgaacgaggcgagaacgcgcagaccggggagggaaagaaaacccaacagaggaagccgcaagaaacgggacg

SEQ ID NO: 107487 - RNA, 36 nt, Homo sapiens
aggggccaacggacgacagagaccgacagaaaggac

SEQ ID NO: 107488 - RNA, 55 nt, Homo sapiens
ggcgggagagggaggagcccagaccgggcgacccgccccgccccaagagggaaca

SEQ ID NO: 107489 - RNA, 77 nt, Homo sapiens
acagcacccaccccggagggggaccacaagacccacgacaggaaaacccaaccccaagaaacagaagcaaaaaaggc

SEQ ID NO: 107490 - RNA, 73 nt, Homo sapiens
ccagacgccaccacaacccccagacgcaagccaaggacccccccagcggagccacgaacccagccgaaagcga

SEQ ID NO: 107491 - RNA, 70 nt, Homo sapiens
cgcccgaaacccacagaggcagaagagacaacacagaaaccagggcggaggcaggaacagcagcaaaaca

SEQ ID NO: 107492 - RNA, 75 nt, Homo sapiens
ccacggacacaggaagccacgcgagaaagcccccaccaaaagggagaaacgacgaggacaaagaagacaagggca

SEQ ID NO: 107493 - RNA, 73 nt, Homo sapiens
gcccgaaccagccacaaagcaaagggagcccgcgcgagccccggcagggcccgggcccgcccccggccgccgg

SEQ ID NO: 107494 - RNA, 78 nt, Homo sapiens
cgggagagcgcggcacgcgggccagaggcgcccacgcggcaaggcaagaagaacagccaaggagagcagagaacaccc

SEQ ID NO: 107495 - RNA, 88 nt, Homo sapiens
gccggaacccgggccgacagcggaagaccaaagaggagagaaggacgacaagcccaccgaggaggcccaggggacaaacggaaaagag

SEQ ID NO: 107496 - RNA, 82 nt, Homo sapiens
aacagaaacaagagacccccacccagcgagaaggacccgcccagagcacccaggggagacgcacagcggaccagcggcccca

SEQ ID NO: 107497 - RNA, 58 nt, Homo sapiens
cccggacagcccgcggagccagagggccgggaacagcgcgagcagaggcaagacaccg

SEQ ID NO: 107498 - RNA, 89 nt, Homo sapiens
ggaaccagcagaccaccggagccacccaggaaagaggagagacccgcagcaaaccggacacacggacccgaacaaagacaaagacaaac

SEQ ID NO: 107499 - RNA, 77 nt, Homo sapiens
cagcccagaaccaccgaagaaagcaagcgcagaaccaggcccaggccagagcccgggcagcacagccaggccgcaga

SEQ ID NO: 107500 - RNA, 75 nt, Homo sapiens
cgcacaaaaaagggcagaagagaagcaggaaggaggcagaggcacaccgaaagagggaaggggaacaggaccggc

SEQ ID NO: 107501 - RNA, 64 nt, Homo sapiens
aaaggcaaagaaaccacgagccccacaccaggagaagcacagcaccggaacgcgagaaagcagg

SEQ ID NO: 107502 - RNA, 61 nt, Homo sapiens
ggagggggcagcaaacccagcggacgacaacaggcacaagcagaggaaccagggaaccgcc

SEQ ID NO: 107503 - RNA, 68 nt, Homo sapiens
cagcgggcagaccacaagacgaagaagcgagggaaaagggaaggcaaaaaccccccacgaaagaaacg

SEQ ID NO: 107504 - RNA, 82 nt, Homo sapiens
cgaagcaaaagacagcgaggagcagcagcagcccagcaggcgcggcccgccagaaaaaagcacgcagaggaaacgagcgcgc

SEQ ID NO: 107505 - RNA, 65 nt, Homo sapiens
aaagaaccacaccaagagacccaagaggacgaaacagcggacccggggaagcaagccaccagaga

SEQ ID NO: 107506 - RNA, 120 nt, Homo sapiens
ccacggcaccgcaaccagggcaagccccaacccacccgaagaaggccccggccgcagaggcaaacgcgcggaaacacccggaacagcaacagaggaaaccccacccacccccgaagaggg

SEQ ID NO: 107507 - RNA, 64 nt, Homo sapiens
cgcaccacaaccagcggacacggccgccgggccgcgcccacgggcagcgaggcaaaggaacaga

SEQ ID NO: 107508 - RNA, 33 nt, Homo sapiens
cgcgggcgcagccacgcaggccaccggccaggc

SEQ ID NO: 107509 - RNA, 76 nt, Homo sapiens
aacccacgcgcccgggagcacgagagccaacggcacgggaccccgcaaaacccgcgccgacagggaggcgggcagg

SEQ ID NO: 107510 - RNA, 72 nt, Homo sapiens
caaagacacagcacaagcgccacgagaaggacgccgccagccaccggcgcgaagccagaccagaccagcagg

SEQ ID NO: 107511 - RNA, 78 nt, Homo sapiens
cccgaaaacggaagcgcagggagaaggaagaggggaaaagggcaaaaggcacaaaaaacaagcaaaacccggcccaaa

SEQ ID NO: 107512 - RNA, 79 nt, Homo sapiens
cgaagcacgccaccagccacggaaagcagagcaagaggaagccagcccgagcaggcccaggggaggaggggcaaccaca

SEQ ID NO: 107513 - RNA, 58 nt, Homo sapiens
gggcggggccggcagcaccgcggccgcagacccgggaggcccccgggagaagaagacg

SEQ ID NO: 107514 - RNA, 75 nt, Homo sapiens
gagcaaagcagcggcgcagcccgggcacaacaacagcaacggaggcgggaccggaacaggcacaccccacacaag

SEQ ID NO: 107515 - RNA, 54 nt, Homo sapiens
acgcggccagcgaaaacgcccagcagcccccacacccaccagagaagaggcccc

SEQ ID NO: 107516 - RNA, 84 nt, Homo sapiens
gcccagggggagccggagggcaaagcggggcgagcagggaccgccagaccgggacccccgccacaacacgcggcacgagcacag

SEQ ID NO: 107517 - RNA, 85 nt, Homo sapiens
gaacaggccccggcagccagcgcagaagaagccaaggagccaggggaaagcaggccggagccgcagagagggcccaccccaggga

SEQ ID NO: 107518 - RNA, 81 nt, Homo sapiens
gaagagccaaggaaaaacagcaagaacccaaaagggagcaagcagagccgaacaaagaacgaaggcgaagaacccgcaggg

SEQ ID NO: 107519 - RNA, 71 nt, Homo sapiens
ccgggacggccaacgccaagaggggagcgcccccagcgcaggcccgacccccaggaaccacccgccacaac

SEQ ID NO: 107520 - RNA, 58 nt, Homo sapiens
caggccaccacagcagaccccaccacggcgacggcacagaaaacgaacgagaaacgag

SEQ ID NO: 107521 - RNA, 74 nt, Homo sapiens
ggcgccccaggagcccccggcccagaagccccaagggagacagaaacagaggcacagcaggccggcagggggcc

SEQ ID NO: 107522 - RNA, 83 nt, Homo sapiens
agaagagccagccgaaagcagaacaggccaagcagcccgcaggagagggcacagacccgagggaagagcgaaggggaaggaaa

SEQ ID NO: 107523 - RNA, 74 nt, Homo sapiens
agacaagcagaggccgagagcagagaagcaggagagagccaaaacgacaggccagggaagaaaacaagaaggcc

SEQ ID NO: 107524 - RNA, 86 nt, Homo sapiens
ccgggggcggcggccacgccaaggacgggggggaccaagcgccgcaagaacgccgggcccgcacccccccgccccgcaccaccgcc

SEQ ID NO: 107525 - RNA, 71 nt, Homo sapiens
ccgaaccacccgcacccgcggaaagggcacacggcccgaacaagggaacaccagcacagcggcagaagcaa

SEQ ID NO: 107526 - RNA, 75 nt, Homo sapiens
cccaaggagaagcgcccaagcggacgcacgggcccagacgcagacaaacgagaagagagaagagggacagaaaga

SEQ ID NO: 107527 - RNA, 72 nt, Homo sapiens
agcccacgcgcccgcagcaagacgggacgaccacaccaaagaagggggccaccaagcaagcgagaagaagac

SEQ ID NO: 107528 - RNA, 80 nt, Homo sapiens
ggaggagaccggagcggggggcggagcagacacagacagcagagggagggcccgaagccagcagagagcggaggcgcaaa

SEQ ID NO: 107529 - RNA, 86 nt, Homo sapiens
aggggacagcacccggccaacaccacgccacccaaggccgccagagcaaagacagcggaaaagagcccaaggcagaggcagcggag

SEQ ID NO: 107530 - RNA, 63 nt, Homo sapiens
cgccagacgcagcggggcagcgagagccccaacgagagagaaggcccaagacccgcagaacag

SEQ ID NO: 107531 - RNA, 72 nt, Homo sapiens
cgggcccgggggcgagcagcgcacccgggcacacggcacggacagggcgggacgcagaaccagggcgcgaca

SEQ ID NO: 107532 - RNA, 81 nt, Homo sapiens
ggcggcgccgcgcggcgccgcccgcgcgggccgggggagccagacgagggcgccgggccgagacgcaccagagccggaccg

SEQ ID NO: 107533 - RNA, 78 nt, Homo sapiens
aaacagggaaaaggaggccaccaaacccggacagggaaagaccaaagggaggcccaggaacacaccaccaggaaaagc

SEQ ID NO: 107534 - RNA, 71 nt, Homo sapiens
ggagggagaacacaggaaccgccccgagaggaaacacccccagaagagaaaacgaaggaaggaggacccga

SEQ ID NO: 107535 - RNA, 74 nt, Homo sapiens
ggaagcaggaaacaccaagaaaaagccaaagcaagagcaggcgacacgcaggagggggcgaggaagagacaggc

SEQ ID NO: 107536 - RNA, 36 nt, Homo sapiens
ccccccgccggagccccgagagacggggcacggagc

SEQ ID NO: 107537 - RNA, 82 nt, Homo sapiens
aaaaggccaacaagaaacaggagaacgggaagccccgccgagaaaagccaccacgcggaccagagggacccaccacaaaccc

SEQ ID NO: 107538 - RNA, 102 nt, Homo sapiens
aggaggggggcccgcaggcgcggagcgccgcccccgggaccacgagaaacaacggggcaaaccccgaagcaacgccgagagagcaaacgcacaaccagccaa

SEQ ID NO: 107539 - RNA, 69 nt, Homo sapiens
gacgccgggaccgggaccgccgccgccgccgccaccaggagcaggagcaggaccaccgagaacacccag

SEQ ID NO: 107540 - RNA, 69 nt, Homo sapiens
agagcgagaagagcacagaaaagagaaaacggaaaacaaaggccgagaccgggaggaagcggagaaaag

SEQ ID NO: 107541 - RNA, 71 nt, Homo sapiens
gccaagagagccgaacccaccgagccagggaggaaggcaaacagggggcaccgacccgcacgcaagaaccc

SEQ ID NO: 107542 - RNA, 56 nt, Homo sapiens
aacccaacacaccaaagagggacggaaccagacgcgccaggacccacaaccccagc

SEQ ID NO: 107543 - RNA, 62 nt, Homo sapiens
ccccggaggcagagcggcgccagccacaagggcgcagaagccggcagagcccaagagacaac

SEQ ID NO: 107544 - RNA, 72 nt, Homo sapiens
aaacgggaagaaccggccgaaaggggagccccccaaacccggggacaggcgcaggggcaggcaaaccgagca

SEQ ID NO: 107545 - RNA, 73 nt, Homo sapiens
caagccacaaaagacacgccacaaccggcaggcgaagaagaaggaaaccaaaaccaaggcgcgaagacaggga

SEQ ID NO: 107546 - RNA, 49 nt, Homo sapiens
cgagcagaccccccacgacgccagccccagcgcggccacgaaacagcga

SEQ ID NO: 107547 - RNA, 96 nt, Homo sapiens
gcaccgagaacagaccacgccggcaccaggacccacaggaacaaacacagaagcgagaacagacacaaccaaggcgggaaacagaccacaagcacc

SEQ ID NO: 107548 - RNA, 69 nt, Homo sapiens
cggggcagaagaaagaggcaacaccacagaaacaagaaagccaggaacgacagaggcggccccaggggg

SEQ ID NO: 107549 - RNA, 61 nt, Homo sapiens
acaggaacaccaaggaagcaaaagccccagaacaaccagacgccgggcccccagcaggcag

SEQ ID NO: 107550 - RNA, 75 nt, Homo sapiens
caccgcaacacaagggagccggggcccccagcaagaacgggaacaaaaccggacggcaacaaggggaaagggagc

SEQ ID NO: 107551 - RNA, 77 nt, Homo sapiens
ggggcccaagcaaggccggaagaagagcgcagagacccagaacgcggacaaacaccgcggcaagaccaaagcgacac

SEQ ID NO: 107552 - RNA, 69 nt, Homo sapiens
agagacggcaaccaaacaccccaggacagaacagggacacaaggacgagcaaaggaggacgaaaagacc

SEQ ID NO: 107553 - RNA, 67 nt, Homo sapiens
aagagagaggaacccgaccaacagagaaagcgcaacccagccaggggcagacgcggagggcgaacga

SEQ ID NO: 107554 - RNA, 83 nt, Homo sapiens
gcggcgcagcacgaacgggaccggaggaagcagcgggaggaggggggcagcagaggagaggaggagggaggggaaaaggagga

SEQ ID NO: 107555 - RNA, 60 nt, Homo sapiens
accgcgccaggacagacgcacagacaccgcagccccgcaagcccaagaggagggagggaa

SEQ ID NO: 107556 - RNA, 75 nt, Homo sapiens
cgcccccggccgagcgacggacacggaaacggagaaaccaagggaaagaaacgaaggaaacagaaagaagaagag

SEQ ID NO: 107557 - RNA, 63 nt, Homo sapiens
aggaccaagaaccagaaccgcagccccggaagccgagcaaccacgacgccggcgccgagcccc

SEQ ID NO: 107558 - RNA, 51 nt, Homo sapiens
aaaagcaaaacacaacccagcacggccaaaaagaagggacccagaccagaa

SEQ ID NO: 107559 - RNA, 65 nt, Homo sapiens
agggcgcccccggcaccagaaacgccacacgggcgggagcccacccacggaaaaaaacacgggac

SEQ ID NO: 107560 - RNA, 80 nt, Homo sapiens
gcagaggcagacccagcaccagaccaggcggcacccgccccgaggaggggaccagacacaaaaccccaccacgcggcagg

SEQ ID NO: 107561 - RNA, 64 nt, Homo sapiens
ggggaaccgacgaccggcgccaaacagaacacaggaggggcagcaagacagaagcgaaggggac

SEQ ID NO: 107562 - RNA, 76 nt, Homo sapiens
gaggaccgccgagcggcagcaggacacccgaccggaaaaagacgggccaccagagaacccaggagccgcagacgac

SEQ ID NO: 107563 - RNA, 75 nt, Homo sapiens
gagccagccaaaggaaagcgcaccccagcacgcaggcaaaccggggcggcaaaggagcccaggagaaacgccaag

SEQ ID NO: 107564 - RNA, 75 nt, Homo sapiens
ggacagagcgaccaggggcgagagcgggcaccccccaaacgacgcagccacggagaggaaagaccacagcaagac

SEQ ID NO: 107565 - RNA, 52 nt, Homo sapiens
aaaaacaccgaagccagaagacggaaaaaacaggcagcacccaccgggggac

SEQ ID NO: 107566 - RNA, 83 nt, Homo sapiens
gccagacgcacggaaagcagcgcaggagccaagaccacagcagcacccaggaccccaggcccggccgccccagaaggcacccc

SEQ ID NO: 107567 - RNA, 75 nt, Homo sapiens
gcagcgcgagcgacaacgggacgggaaacgaaaaccgccagaacagcccaagcccaagagagccccaaaacagaa

SEQ ID NO: 107568 - RNA, 79 nt, Homo sapiens
cgggccagcgacaaaaagagggcagcagaccgcgcgccagacgccaaggacgcccacagagcacgccccgcgcaggagc

SEQ ID NO: 107569 - RNA, 81 nt, Homo sapiens
gcaaggggccaccaggaggccagggggcgccagggccccccgggccggccgccggacgacacagcccgccgccaggcacgg

SEQ ID NO: 107570 - RNA, 38 nt, Homo sapiens
cacaaaaccgcgaggagaacaggagagcaagaggcaaa

SEQ ID NO: 107571 - RNA, 77 nt, Homo sapiens
aggacagaccgagcccccggaaaccccagcgccggcccaggcggaggcaggggccacagccaacccgaccccggaca

SEQ ID NO: 107572 - RNA, 112 nt, Homo sapiens
cgaaccgccacgccagcacgccaacccggacggacaacaccggggagcgcggacgacgaagcaagggaaccacggcagagaacgaacaacagcaaaggagaacaaagacgca

SEQ ID NO: 107573 - RNA, 50 nt, Homo sapiens
gcagccccaacacccggcccacgccgcagcggacaagcggaagcacacca

SEQ ID NO: 107574 - RNA, 76 nt, Homo sapiens
cccggggagggcaagaccaaagccgaacagacgggcgacacgaagggaaaaaggggaggcaagcaggggggcaaag

SEQ ID NO: 107575 - RNA, 74 nt, Homo sapiens
ggcggcgacggcggagggcccggagccagagaccaggagccccagagagcagagccccccacagaagagcccca

SEQ ID NO: 107576 - RNA, 79 nt, Homo sapiens
acggggagcggacccgcccgggcagggcccgccccgcgccggaaaggcaagagggcagaagaaagaaaggaaagagagg

SEQ ID NO: 107577 - RNA, 73 nt, Homo sapiens
gccagaccgaccgagaggcggcaccgacgaccagagagggccaccaggagcaaaggcagggcccaaaagaaaa

SEQ ID NO: 107578 - RNA, 48 nt, Homo sapiens
agacgcagggcgcccccggcacagagcacaggaaggagcccggcagcg

SEQ ID NO: 107579 - RNA, 62 nt, Homo sapiens
aagaaggacggaaagagaagcgggggaggaaaacacaccgaagcggaagggaagagaagaag

SEQ ID NO: 107580 - RNA, 78 nt, Homo sapiens
ggaccccgagaaaaggaaagaccacagcaagaccacgcccccagccgggggaccaggccgaacgacccggacacaaag

SEQ ID NO: 107581 - RNA, 60 nt, Homo sapiens
cgcaagacccgggaacaaagggagaacaagaccaagaggaaagccagccagaggagggaa

SEQ ID NO: 107582 - RNA, 66 nt, Homo sapiens
cgaggagcagccacagaccaccaagcgaagggcaaaagcagagcagcaaaccagccggcgggcgcc

SEQ ID NO: 107583 - RNA, 74 nt, Homo sapiens
cagcccggcccccacggagcccccgcagggcgagagcgccccagggggaaagacaaggagccgggccgagaaac

SEQ ID NO: 107584 - RNA, 76 nt, Homo sapiens
caagacaggcgacgacgccaccgaccgacagagcaggagacacagggaacccccaaaacaaaccagaagacagccg

SEQ ID NO: 107585 - RNA, 75 nt, Homo sapiens
ggacggaggagcaggcgagaagagaagccgaggccgccggagccccagacaccccccacacaccaccgacgcgca

SEQ ID NO: 107586 - RNA, 57 nt, Homo sapiens
accggaggccaaaagcgcacagacaccgcgcggaccagaccccccaacccggaaaca

SEQ ID NO: 107587 - RNA, 76 nt, Homo sapiens
aaagacgccccacaaggaagaaaaaggaagccccaaagccgcacccacggcacgaaaggcgcacaaacgggaaggc

SEQ ID NO: 107588 - RNA, 86 nt, Homo sapiens
cgcgggaccacaaagcacgacggcacccgggggccacacgcaggccccgcgccaggggaggagagagcgaggccacccagaaggcc

SEQ ID NO: 107589 - RNA, 86 nt, Homo sapiens
caagaggcggaagcggaggagcccaggagacccggggacagcacgcccaggccccgggcgaccccagccagcgcagcaaagccaaa

SEQ ID NO: 107590 - RNA, 72 nt, Homo sapiens
ccacgaaccagaccaagcgggggacgggcacggagccgcagccaaaacagcagcaaacagagggcccagggg

SEQ ID NO: 107591 - RNA, 60 nt, Homo sapiens
cagccccaagagcgggacacaggagggagccacaccaaagccggacccccccagccggac

SEQ ID NO: 107592 - RNA, 77 nt, Homo sapiens
ggcacaccacgaggggaagccccgacaccaggggacacccagaagcggcgccgccggcagacaagcagaccggaaga

SEQ ID NO: 107593 - RNA, 75 nt, Homo sapiens
ggcgagcagcgcaaacccccgaaaaaggcacgggacccgccggagccagagaaccgcagggccacaggaaacggg

SEQ ID NO: 107594 - RNA, 77 nt, Homo sapiens
cgccagaccgcaggagacccgagagggcaacagccagagaaagccaccgagcgaagacccgagaacaagacgccggg

SEQ ID NO: 107595 - RNA, 101 nt, Homo sapiens
agggggcacccgcggccggcccggggccccgggaccggcgcccccccgggcacagagccaggaagaggagcaagaaagaaaaaggaacaggaaagcaaaag

SEQ ID NO: 107596 - RNA, 56 nt, Homo sapiens
gcaggcggggaagagaaaggaggaaaggcaagggcagaaaagaggggaaaaggcca

SEQ ID NO: 107597 - RNA, 82 nt, Homo sapiens
ccagccagccagcgcaccaggacaccggccccccggcaaaagcgacaacccagcggccgcgcccacagcggccccagaccga

SEQ ID NO: 107598 - RNA, 58 nt, Homo sapiens
ccagaagggccacagaaggcagaaacccccaaaccgaaggcggcaccccacgccgagc

SEQ ID NO: 107599 - RNA, 76 nt, Homo sapiens
gaaacggcaacagccggacccaacagaggcaggcccccagagcaggagcaggaaaaaaacagacgggaaaaacaag

SEQ ID NO: 107600 - RNA, 74 nt, Homo sapiens
cggcaaggggaagcaaaagaaaaggcaagacaaccacaggcagagagcgagggcaacaacaacagaacaccgag

SEQ ID NO: 107601 - RNA, 62 nt, Homo sapiens
acaaaggaggaggaggaggacgacgacgaggggaacgaaacgcgcacaagaacaaccaccag

SEQ ID NO: 107602 - RNA, 63 nt, Homo sapiens
gaaacgcgcgcccccgaaggcggccaacggccagggaccaggaggagaagcaaccagagagga

SEQ ID NO: 107603 - RNA, 78 nt, Homo sapiens
agaaccccacagcaagaggacgggcccaaaacacaccaggacaaaacaggccacaccagcgccacgcacagcaacaac

SEQ ID NO: 107604 - RNA, 71 nt, Homo sapiens
gagaaagcggaccacccgagggaggagcagcaggcagggacacacggcgggacacaagggagcggcgagcg

SEQ ID NO: 107605 - RNA, 69 nt, Homo sapiens
gagggaacgagaagacgagagaacgacagggagccacaggaagaaggccacagaccaaaggggcacgaa

SEQ ID NO: 107606 - RNA, 63 nt, Homo sapiens
ggcacacgcagcagaagcccggagaacccaaccacagagcggacacaaggcccgggcacacca

SEQ ID NO: 107607 - RNA, 75 nt, Homo sapiens
gaaaacgcaccccgagcacgaggaggacaggcaaagaaaaagccagccgaggacgggaaccagaccccgaccagg

SEQ ID NO: 107608 - RNA, 90 nt, Homo sapiens
cagacgcgggcgagcgcggccggacgccagcggacacgcgggcgagacagccaccgcacggccgacacgacagcaacgccacgccggaca

SEQ ID NO: 107609 - RNA, 75 nt, Homo sapiens
ccgaggacggcgacgaacaagggaagaaggcaagcagaagaggaacagaagaagcagagcagagacggagcagca

SEQ ID NO: 107610 - RNA, 77 nt, Homo sapiens
ccaggcggagggagcaagccccccgaaccaagcccaaccaccccccgccacggcccagccggcgccaccagcccagc

SEQ ID NO: 107611 - RNA, 38 nt, Homo sapiens
agaaagagaacagagacggcagaaagaaagcaggacca

SEQ ID NO: 107612 - RNA, 67 nt, Homo sapiens
cacaaagcaaggcacagaagagcggagccgcggagcccgggccagaccacaggaaagcgcaggaccc

SEQ ID NO: 107613 - RNA, 78 nt, Homo sapiens
ccgcaggacggacggcccagagaggaaccgggacgcccgaagccgcgagagggcggggaacagaccagggaaggggag

SEQ ID NO: 107614 - RNA, 80 nt, Homo sapiens
cggggccgccaggggaaaggaagggccaaggcgacagagccgagagaccagggcgaccgcggaccgaaaagacgcggccc

SEQ ID NO: 107615 - RNA, 77 nt, Homo sapiens
cgagaacccgaggaaagcagcaacaaagggggagcccgcgccaggggcaggcccagacccacgcaccgagacgcccg

SEQ ID NO: 107616 - RNA, 77 nt, Homo sapiens
ggcgggagacgcacagcaagagccaggacaccggaagcgggaaaagaaagccccagacccccagcggccaggggagc

SEQ ID NO: 107617 - RNA, 73 nt, Homo sapiens
accaaacaccacacgccaaaaaaggggaaaccacaccacccgccacagacagggaggaggacagccgaaaaca

SEQ ID NO: 107618 - RNA, 80 nt, Homo sapiens
cccaaccgagaccgggggacgcagccagcgcggaacccagggcggccggagaagcccgcgaggaccgcgggggggaggac

SEQ ID NO: 107619 - RNA, 81 nt, Homo sapiens
cccgaggacccaccccccgggccgcaggagcacaggccaccacaggaacaaaccagccaggcaaagcccagcccgcagcac

SEQ ID NO: 107620 - RNA, 74 nt, Homo sapiens
ggccgacaaggccaggaagcaaccaccagagaccagcccaggcccacaggggcccccccacgaaaaagacacaa

SEQ ID NO: 107621 - RNA, 60 nt, Homo sapiens
aagaaggaccagaaaaccgacaacccccagaaagccaagccggaccacgcaccagggccc

SEQ ID NO: 107622 - RNA, 81 nt, Homo sapiens
cccagccccggagagcgggaacagaccgaagaagaagcaggagacacaccagccaaaggaaagaaagcgcaaaaggccgga

SEQ ID NO: 107623 - RNA, 71 nt, Homo sapiens
caaagagcgaccgagaaaaaccgaaagagccagccagcaacagaagaaagcaagcaccggggaaagcggcc

SEQ ID NO: 107624 - RNA, 86 nt, Homo sapiens
ggagagagggaccacacgcgccaacacagaaaacggcccccaggcacgaagcgaagaagaggagagaagcagcggcgcagacgacg

SEQ ID NO: 107625 - RNA, 65 nt, Homo sapiens
acccacacaagcgaaggcgcgcaccggaagcaccagcgaggaagagcccgaaaacgggaccagga

SEQ ID NO: 107626 - RNA, 81 nt, Homo sapiens
cggggaagaggcggcagccgaggccgcgaacgcacaggagagagcccccaggacgaccgcagccggacccacacaccaccc

SEQ ID NO: 107627 - RNA, 62 nt, Homo sapiens
acaagcccacaagaaagaagaacgagacagacacaggccaaaacagaagaggcaaagcccag

SEQ ID NO: 107628 - RNA, 78 nt, Homo sapiens
gaaacagaaggacaacgcccaagcacaaggaaagaggacgggaaaacccaggggagaggaacccgagcagcccagaca

SEQ ID NO: 107629 - RNA, 61 nt, Homo sapiens
gccccaccccccaacggacgcccgcccaccgcccgaaccgaacacagcagcccaacacaga

SEQ ID NO: 107630 - RNA, 75 nt, Homo sapiens
gggcccggaggagcgaacaaggcgacaacacaggcccggccaacgcaacagggagcccacgcaagaggggccggg

SEQ ID NO: 107631 - RNA, 42 nt, Homo sapiens
agaccagaagagaaccgcgccgggccgcaagacagcccggga

SEQ ID NO: 107632 - RNA, 71 nt, Homo sapiens
gggaaaccacaacagaaggacggaaagggcaaaaaggcagccggcacccgcacaacccagggggccgaacc

SEQ ID NO: 107633 - RNA, 84 nt, Homo sapiens
aaggagggaacgagggaagagcgcacgacgcacaaaagacgacgaagccgcgccaagccggcgcggaagaggccggcggcggga

SEQ ID NO: 107634 - RNA, 79 nt, Homo sapiens
ggaagcggcgcgagcgccccgccacgcccgagcccccgcccacagcagggcaagcgggcgaagacagggcgcggcgagc

SEQ ID NO: 107635 - RNA, 78 nt, Homo sapiens
acaaaacccgaagaagcaaacaaaaagagaggaacagcaacaggccagagaaagggcggagagaccaggccaggggcg

SEQ ID NO: 107636 - RNA, 78 nt, Homo sapiens
gcgacccgagggccgagggggaaccgcagagggccaaccgccccccagcagcaggcacgggcgaaccccgagccccgc

SEQ ID NO: 107637 - RNA, 76 nt, Homo sapiens
gcaccaggacaagcaaagaaaacgaaggaaggaggacccgaggagagagaagacggaaaggaaacacggaagcacc

SEQ ID NO: 107638 - RNA, 77 nt, Homo sapiens
cacaacagaagaggagcacggaggagccgaccgcagcgagggaccagcccccaccaaagccaccaagccaagaccag

SEQ ID NO: 107639 - RNA, 74 nt, Homo sapiens
ggcaaggacccgccgggaccaggccagcaaggacgcacaaacagcgcgacagagcaggggcccggagcccaaaa

SEQ ID NO: 107640 - RNA, 89 nt, Homo sapiens
gaccgagaccgcggccgggaccgaggaaacgaaggaggcccaaccacaaaaggagccgacggaacccagacggagaacaaaaggaagaa

SEQ ID NO: 107641 - RNA, 87 nt, Homo sapiens
gccgcgcccgcacccgcgccgcgcgccgaggacccagccgggaggcccgggaccgggagcccgggaccgggagccggggggccaccc

SEQ ID NO: 107642 - RNA, 73 nt, Homo sapiens
agcgagcccgggaacggcgggggcacggggagaggaccccacagggaccgcgcggccccccaggacagcaccc

SEQ ID NO: 107643 - RNA, 75 nt, Homo sapiens
gcgccacgcgcggaaggcagcgcccagcagcgcaggccacagaaacacacagaaggggagcaagaggaaccacac

SEQ ID NO: 107644 - RNA, 80 nt, Homo sapiens
ggcggaggaggaagagggggcacccagcacacccaagacgcggcaacagcacagacccaagcaaccgcagaacaagaacc

SEQ ID NO: 107645 - RNA, 70 nt, Homo sapiens
ggcgcgggagacccaggaaggcaagagcacgacgggaagcccagacagcgcagcaacgcgcgagccaggc

SEQ ID NO: 107646 - RNA, 78 nt, Homo sapiens
cagcggacgagggcaaggcgcacaccgagggagcccaagacgaaggggccacggaagaagagcgcaggagccgcagac

SEQ ID NO: 107647 - RNA, 66 nt, Homo sapiens
agacgagccgggaggaacggcccggaaacaggaggaccccgggcgcgccaggcacagccaagagcg

SEQ ID NO: 107648 - RNA, 67 nt, Homo sapiens
agcaagccgagggaagagccacgaacgacgcacggaggccacaacaccacaccacacaagacaaaga

SEQ ID NO: 107649 - RNA, 90 nt, Homo sapiens
cagcggaccagccagcggacccgaccaggagggagcggaaaacggggcccggaccgggagcggacccgaggagggcggacaacccaggag

SEQ ID NO: 107650 - RNA, 81 nt, Homo sapiens
ggcagaccgcacccgcagagaacccccagacccgcagggacacaacgccacaagccggacacgagggcagaagaggaagag

SEQ ID NO: 107651 - RNA, 55 nt, Homo sapiens
agaaagaacacgcggccaaacccggaggaggaggaagaccgcaggaaagcaggaa

SEQ ID NO: 107652 - RNA, 45 nt, Homo sapiens
aggagaggcaccaaacgaaccagccgaaggagccaggaggaggaa

SEQ ID NO: 107653 - RNA, 59 nt, Homo sapiens
aaccacagccaacacaacgccaacagaaaccgcgggcggagcggcaggaagccaaggac

SEQ ID NO: 107654 - RNA, 73 nt, Homo sapiens
aggaaggcggaaaaagcgcaaggaagggcgcgcaggaacaagaagaagggcaaccacagagccaagaaaaaga

SEQ ID NO: 107655 - RNA, 81 nt, Homo sapiens
ggccgagaacgaagaggccgccgccgggcccaggcccgcgaccgccgccagcgcccgaggacagcggccgaagccagagcc

SEQ ID NO: 107656 - RNA, 73 nt, Homo sapiens
gacacgcccagcaagaggagagagaccgccagaaaaaggcagggcagcagcccaaaggcaggcccggcaccga

SEQ ID NO: 107657 - RNA, 79 nt, Homo sapiens
ccgaaaaaaaaagaaaaggaaggagagaagagaggggagccgccaccaaaagcagacggaaaacccacggggaagacca

SEQ ID NO: 107658 - RNA, 72 nt, Homo sapiens
cgaagaaagcggaagaaccgaacaaaaggaaaagagcagcagaaccgcagccagaagcaaagcagacagacg

SEQ ID NO: 107659 - RNA, 70 nt, Homo sapiens
cccagcggggagcacggcgagcagccaggccaggagagcggggacgagagccccggcacaaacggaccac

SEQ ID NO: 107660 - RNA, 68 nt, Homo sapiens
acgcagggcgcccccggcacccggaccgaacagcgccgacgccgaaaggggagggagaccggcggagc

SEQ ID NO: 107661 - RNA, 79 nt, Homo sapiens
cgggacgcgggaagaacgccgggagaggcggcggcagggggaagaggagccggagggcaaagcaagggagagcaaaaga

SEQ ID NO: 107662 - RNA, 87 nt, Homo sapiens
ccaggggcgcggacgcggcgccccggggggccggacccgcccccgaccgccgagccaggacccaaggccagccagccccaggcacca

SEQ ID NO: 107663 - RNA, 77 nt, Homo sapiens
caccgccccacacggcggagaagcagcggggggccacgcgacaagacagagacgccaaaggagggagccaaggggca

SEQ ID NO: 107664 - RNA, 76 nt, Homo sapiens
gaccggcacccagccccggacagaaaaaaacgggccaaacacacaggaacgccagaccccagccgagggaggcaac

SEQ ID NO: 107665 - RNA, 75 nt, Homo sapiens
agaagacaggacacaaagcacgcgacaggaaccagacaggaagggaaggggcggagacgggcggaacgcaggagg

SEQ ID NO: 107666 - RNA, 61 nt, Homo sapiens
gggagaccacagcaagacgccaggacccacggaagccagaaaggcacccaagaaaccaaag

SEQ ID NO: 107667 - RNA, 78 nt, Homo sapiens
gcggccggccagccgaagaggggcggcacccccggagcagcaccgaggccccccccaccccccgcccgcggcgccacc

SEQ ID NO: 107668 - RNA, 76 nt, Homo sapiens
aggaaacccagaaaaaagagagacagccgccaggaagcaacgcagcgcggaaaggcacaaccaaggacacgcagca

SEQ ID NO: 107669 - RNA, 75 nt, Homo sapiens
ccacgaagcaaaaagacccccaagggagcaccaggagggggcccgcgggaagaacccccgcgaagcgccaaccgc

SEQ ID NO: 107670 - RNA, 54 nt, Homo sapiens
aaagggagaacgccagaggccagcaccgcagacccccccccccacgcggcgcca

SEQ ID NO: 107671 - RNA, 54 nt, Homo sapiens
accgcaccgagggcgagcccaggaagaagagagggcgaaggaggccacacagaa

SEQ ID NO: 107672 - RNA, 58 nt, Homo sapiens
aggaggcgagcaacaggaaaacggagaagaacgagacgggggagcgacgacgaggagg

SEQ ID NO: 107673 - RNA, 80 nt, Homo sapiens
ggaagagggagcaccacggaccccaaggaagccacggcagacacacaacccgacccgacgagcgaggaaaaccaccacac

SEQ ID NO: 107674 - RNA, 84 nt, Homo sapiens
cgcggacccacggggccaagccgcgccggagcggagcgcgggcgccggggagccaggcggacgaaagaaagaaggagcaccaac

SEQ ID NO: 107675 - RNA, 75 nt, Homo sapiens
cgaggggggacagacagcagcgagaggaagaaaggacacaaagcagaagaaaagccacaaacagaagcaacgaac

SEQ ID NO: 107676 - RNA, 78 nt, Homo sapiens
ggagccgccacccagagcgcacggcgacgccccaggggaaaacccccgggaccagggcagcggaacgcgccgacgccg

SEQ ID NO: 107677 - RNA, 75 nt, Homo sapiens
gggcggggcgagcagaggacccggcgggcggcccgcgggcagcggagcggaggcagacacacacggggggagagg

SEQ ID NO: 107678 - RNA, 76 nt, Homo sapiens
gcacagaaaaccgcagaacggaaacgcaaagcacgaaggaagcaaaccacccaaacacagcaaggaccgaacccaa

SEQ ID NO: 107679 - RNA, 75 nt, Homo sapiens
caaccagcaggccaaaacccccgcgaaaaagggacaaacggaagcaaggaaaacaaggagcaaacagcaagaggg

SEQ ID NO: 107680 - RNA, 77 nt, Homo sapiens
ccgagacacagcgcgacaggaggggggggccgcggaggaccgcccaaccgcggcgccaagacgggaccacggaagga

SEQ ID NO: 107681 - RNA, 68 nt, Homo sapiens
cacgaggccgaagcccagccccagaacggaagaccaaccagaagacacacaaagcaggggaagagaca

SEQ ID NO: 107682 - RNA, 69 nt, Homo sapiens
gaggcaacagaaaaaggaaacaaagcagaacaggcacaagcaggacaagcaaaccagccagcacggggg

SEQ ID NO: 107683 - RNA, 76 nt, Homo sapiens
cagccaggcccggagacacacgccagggggggcgccaggggcaaggccgcagccagagccgggggaggacagccgg

SEQ ID NO: 107684 - RNA, 50 nt, Homo sapiens
ggagaaaaggccaagaaggcaggcaaaacacgcagaaccaaccagcaacg

SEQ ID NO: 107685 - RNA, 73 nt, Homo sapiens
gagcaacacagccaggccgcagaagccaccccccgcaggaggggagacccaaacagcccaccaaggaacagcc

SEQ ID NO: 107686 - RNA, 57 nt, Homo sapiens
gcagcagccccgcgggcggggggcccccaaagggaagccaaacacaaaggaagaagc

SEQ ID NO: 107687 - RNA, 79 nt, Homo sapiens
aacacccgagaacggcgggaagagaagacacgagcacaaacggcaggaagagacgaagagaaaaaaagggaacggagca

SEQ ID NO: 107688 - RNA, 107 nt, Homo sapiens
gcaacaagacgcccgagggcggacgggccccgcggccgcccgagcaggaggacgaacaggggagaagcagaccgcaccaggcgggaccccgaaaaagcccaaacaga

SEQ ID NO: 107689 - RNA, 80 nt, Homo sapiens
cgcacaaggaaacacgacacaaaaagcaagcgggccaccacagaaaaggcgacagagaagagagggacggcgcaaaccag

SEQ ID NO: 107690 - RNA, 70 nt, Homo sapiens
cggagagacaacgacccggggaccgaaccccggcgaacagcaaggcacaagcaccacacccgaggggaag

SEQ ID NO: 107691 - RNA, 79 nt, Homo sapiens
gacagcagcacaacaacgcaaccacagaaacaagggacagggaaacgagcgaaagaagccaacaagcgcgcagcgcaga

SEQ ID NO: 107692 - RNA, 61 nt, Homo sapiens
ggccgggggacgagccggagcagcagccaggcgccacaggagccgcagaagcaaaggcacc

SEQ ID NO: 107693 - RNA, 74 nt, Homo sapiens
cagagaaacgggcagcaagaccgcccacccgcgcgacacggagaccacgaggcgaggcagagggacacgcacca

SEQ ID NO: 107694 - RNA, 67 nt, Homo sapiens
ggggaaccggaaccgaaaggagagcacacagcgggcaggcgagagagacagccggccaccaggggag

SEQ ID NO: 107695 - RNA, 77 nt, Homo sapiens
acagcggggcggcggcggcggcggcgcggcccaaaaggggaaaaagaaaagggcgaagacccgaagcagcgcaggaa

SEQ ID NO: 107696 - RNA, 77 nt, Homo sapiens
acccgggggaggccggggggccacggaagcaccagcgcacacaacggccgaccccaccgacccgggcgacccaagaa

SEQ ID NO: 107697 - RNA, 76 nt, Homo sapiens
caaagagaaccaccgccaccaaaacggaaaggaccagaagaggggcagccaggccggcccaacagaccccaacagg

SEQ ID NO: 107698 - RNA, 61 nt, Homo sapiens
ccgggggccgccgggacccggccaccagcaagccgcgccgcgccaggacggcagccagacg

SEQ ID NO: 107699 - RNA, 62 nt, Homo sapiens
cggggaaccaaggagacgcccggcacgcaggggcacgcacaccccccggccccgaagaccaa

SEQ ID NO: 107700 - RNA, 66 nt, Homo sapiens
ggcgcccacgaacgccaagcccggccccaggaccccaagcagggagccaaaacacaccggaagacc

SEQ ID NO: 107701 - RNA, 78 nt, Homo sapiens
cagcgggacgaggaccgagaccgcggccgggaccgagggcagagccagagcccaagcccccgcagggagcccaccgcg

SEQ ID NO: 107702 - RNA, 77 nt, Homo sapiens
aagaccaagacggcaggcacgaccccaacggcaccccgccggggagaccggagacaaaaagaggccaagaccaagag

SEQ ID NO: 107703 - RNA, 74 nt, Homo sapiens
gccggcccgcgcgcgcaccccgcggacgccacagcgcagccaagaaagggagggggaaacagccaaggccgagg

SEQ ID NO: 107704 - RNA, 57 nt, Homo sapiens
gagcacgcccagcccagcggcaggcgggcagagaaacgcggggcacaccacgagacg

SEQ ID NO: 107705 - RNA, 63 nt, Homo sapiens
cgacgaggcaagaacacgacacgcagacacaacccaagaagacagcaacacccccagacaaaa

SEQ ID NO: 107706 - RNA, 65 nt, Homo sapiens
gccaccacaacgggcagcggcagcggaccccagagccagagcacacgggaaacccagacgacaag

SEQ ID NO: 107707 - RNA, 51 nt, Homo sapiens
aggggaccggacaagccagcaccgccgcaggacacccagaagacagacgcc

SEQ ID NO: 107708 - RNA, 56 nt, Homo sapiens
gaacaagaaccaagaccaggaaacccgaacccggaaagaaaacaagccacccagac

SEQ ID NO: 107709 - RNA, 77 nt, Homo sapiens
aacacgcggaaaaacccaacagccaaggacagaggaccaaagcggaccagagacagggcccagcgggaggcggccga

SEQ ID NO: 107710 - RNA, 74 nt, Homo sapiens
acgcacgggaccagagacacaggcacgacagaagcagcagaagcagcagagaacggagccacgacaccccagca

SEQ ID NO: 107711 - RNA, 76 nt, Homo sapiens
ccgggaccggagcaccggcagacccggggaccgggaaggggcggcaccaggaaaaagaaagacggcacagaacaag

SEQ ID NO: 107712 - RNA, 63 nt, Homo sapiens
gccacccggaagcgcgagcaaggccgccagaggcaggccggggggggcacagagccccggaag

SEQ ID NO: 107713 - RNA, 68 nt, Homo sapiens
aaacaaacggggcccgacggagagagaacaaaccaggggagggaaacgagaaaaacgacgccagcggc

SEQ ID NO: 107714 - RNA, 37 nt, Homo sapiens
ccccagcaccaccaaggcgaagaaagcaacaagggag

SEQ ID NO: 107715 - RNA, 83 nt, Homo sapiens
gcgcaacagcagcaccaggaaacgcggagcgaacccggccaggcgagagaaccagagaaaaaggcgagaggcccacagcagcc

SEQ ID NO: 107716 - RNA, 68 nt, Homo sapiens
aagcagcagcggagaaacaacggaccaacggaaaaacgagccagagccaaggagcaagaggccgccga

SEQ ID NO: 107717 - RNA, 80 nt, Homo sapiens
ccaagaggccgaccgagacgggcggagaggagaagggggggccgcccgcccaaggcaggaagaggggccgcaaagaagac

SEQ ID NO: 107718 - RNA, 75 nt, Homo sapiens
caagcgaccccgcccagccccgagagcaaacaggcccggcgaccggcagggagcagccgcccgccacgcgaggcc

SEQ ID NO: 107719 - RNA, 82 nt, Homo sapiens
gcgaacaccgcccgggccgcccacaaagacccggcgcaagcacaggggaaggaagccagcgaagcaccgggacacgagacgg

SEQ ID NO: 107720 - RNA, 68 nt, Homo sapiens
aagcccaacagccagggccaggcgcagacccccaagaggaggagggccgaggcaggcaggaggagcag

SEQ ID NO: 107721 - RNA, 74 nt, Homo sapiens
cgccccggggaacccgcagaggacagaagaggccaccaaacccgagggggaagaaacgagcgagcccgggacag

SEQ ID NO: 107722 - RNA, 102 nt, Homo sapiens
cccagccggagccccagacaacccggacggccggccaaagaaaggcccaaaagggccccccccccaggagcccccagagcacccccagggaggcccgaccac

SEQ ID NO: 107723 - RNA, 87 nt, Homo sapiens
agcggggagcggggacgcacggagagggcagcggcgcggaaacgcgcgccaggcgcacagcgcaccgcagcccagagcaagcacgac

SEQ ID NO: 107724 - RNA, 63 nt, Homo sapiens
agaggaagaccacggagcagcgcaggagaaaaagggaaaagagacgcaaaccacgaggacaga

SEQ ID NO: 107725 - RNA, 80 nt, Homo sapiens
cgaccccaacggcagcccccagcggagaccggagggaagcaaacccgcaaagcggaccgacaagacggaaaccgggaggg

SEQ ID NO: 107726 - RNA, 104 nt, Homo sapiens
cagcagcggaagaagccacccgcaacaccaccccagcccagaaaaagggaacgcaccccacaaccagcgcaaccagcccggccaccagccccacacgagcgaaa

SEQ ID NO: 107727 - RNA, 68 nt, Homo sapiens
caacagagaaaaggccccgaaacacagaaagggaccaaggcccaacaccaccaccgccaagaggaacc

SEQ ID NO: 107728 - RNA, 60 nt, Homo sapiens
ccaacgccccggggagaagcgaggccaaagagaaagagaaaggagagcaagagaaccggg

SEQ ID NO: 107729 - RNA, 75 nt, Homo sapiens
cccagcccgggccccgcgcacagccccagcgcagaggaggccaacacgccaccacccggggccaggaacggacag

SEQ ID NO: 107730 - RNA, 69 nt, Homo sapiens
ccacgcaaggccaagggggggagaagagaaggcaaaggagccaagaagccaagaaagcaaggcaaacca

SEQ ID NO: 107731 - RNA, 69 nt, Homo sapiens
ccaacaaggaacaccacagaccaacgagggggaaccaagggcggacagcccaacgacaacaaagaagcc

SEQ ID NO: 107732 - RNA, 76 nt, Homo sapiens
acgccaacgaacgaggggggaccagagcaagaacccccaagaagaaaacagaaacgacaggccggcgaccaaacaa

SEQ ID NO: 107733 - RNA, 67 nt, Homo sapiens
agccgacacagccgaaacaaggcgagaaaagcagggggcgcccaaaggagaaacggcgccggcagcc

SEQ ID NO: 107734 - RNA, 50 nt, Homo sapiens
cagcccccccacccgccggacgcccagccaaaaacgagcacaacgagaac

SEQ ID NO: 107735 - RNA, 57 nt, Homo sapiens
cccagggagagcagggcagggaaaagcgccgggcggaccagcagaacgcaaggaggg

SEQ ID NO: 107736 - RNA, 57 nt, Homo sapiens
ggcagaaagcacagccgagcccacagacgcgggaccccgcgaaccccacaagaaaga

SEQ ID NO: 107737 - RNA, 77 nt, Homo sapiens
gaaccggccagccagggccgggccgcgaccggccccggagcacaaggaggcgaggaccgccgcaccccaccgggcag

SEQ ID NO: 107738 - RNA, 75 nt, Homo sapiens
gaaaaaaacccgacagcagagacagagaggagccaacccccagacgcccaaggggcaagaaggacacccagaaaa

SEQ ID NO: 107739 - RNA, 97 nt, Homo sapiens
caaaggcgagcaacacaggggcagaaccaggccaaacagcgaagacaagacccaaaaggagaccgagagcaaaagaaagacgagaacaggcacagcg

SEQ ID NO: 107740 - RNA, 43 nt, Homo sapiens
acaggggggccggccgcgcagccgcgaccggagaaacaaaacc

SEQ ID NO: 107741 - RNA, 69 nt, Homo sapiens
cacgggagaaaaaggaaaacgcggaaaaccgacacaacagcggaagccgcagaaggaccggccagaagc

SEQ ID NO: 107742 - RNA, 86 nt, Homo sapiens
cggcggcggcggcggcggaggaggaagaggcacgcgagggggcgcgaggggaacggaggccagagcgcgagagaggccagaggagc

SEQ ID NO: 107743 - RNA, 75 nt, Homo sapiens
acgggacaccggggccgcggcgcgcgccagcgcgcccacaggccccgagccccggccccaaagacccaaaacaga

SEQ ID NO: 107744 - RNA, 75 nt, Homo sapiens
agacgaacaccacggcgaacacgaaacagagaaagagccacagagggcagaacggaaaagcgaggagcaaaaaac

SEQ ID NO: 107745 - RNA, 82 nt, Homo sapiens
agcagccaggccccagacgcgcacggagcagaaaacaaggaggaggcgaggcacacaagcccaagagccacaacaaaagcgg

SEQ ID NO: 107746 - RNA, 77 nt, Homo sapiens
ggccacgagcgacccccggagcaccggggccaccaggagggaggggaggggcgaccccggggcccggccagcacgac

SEQ ID NO: 107747 - RNA, 72 nt, Homo sapiens
ccccgcaggagaagcgaaaagaaacccaagaaggagcaagaaacgcagacacagcaagaagaaggcggaaag

SEQ ID NO: 107748 - RNA, 102 nt, Homo sapiens
ccacacgccagagccggagcgcgaaggccgggacccggccccggcccacaggggggggcaaacccgagagaacgggcacgagaagagaagcccagagcaaaa

SEQ ID NO: 107749 - RNA, 82 nt, Homo sapiens
gcgagggagcggaagccggcgcagcagccccggcagccaaggaccaagcgagcgagggccggagcgccacccgacgagcgaa

SEQ ID NO: 107750 - RNA, 45 nt, Homo sapiens
ggggaaagggaagcaagagccagacccaaaggacagacagcagcc

SEQ ID NO: 107751 - RNA, 64 nt, Homo sapiens
ccagaccgaccagcccaagaaacaccaccaacaaaccggagagccgccgggacacagacccccc

SEQ ID NO: 107752 - RNA, 83 nt, Homo sapiens
gcgcaacagcacgccacacaaggggagccgaaggccccaaagcgggaaagcgcaaagcgcaagacgcgagcaaaaagagaaaa

SEQ ID NO: 107753 - RNA, 76 nt, Homo sapiens
cacgcccgcccgcccagggaaccaccagcaccaagggccggcggccccgggagcgagacaagaggagccccaccac

SEQ ID NO: 107754 - RNA, 77 nt, Homo sapiens
accaagaaccagaacaccgaagaagcaggcacaccccccacaccagaaaaaaccaacaacggagggagacccagaaa

SEQ ID NO: 107755 - RNA, 82 nt, Homo sapiens
caaaccagcggcaaaaaaaggaaaagaacagaggccagaacaagagaaccagaaaccgagagcagggggcagaaacagacaa

SEQ ID NO: 107756 - RNA, 116 nt, Homo sapiens
ccgcgccggcccggccgaccccggaagcgagcgcggacgccacccgggggcacagcaaggaagccaggagagcagagacccacacgcacgccaccgaaccgaggaggcagagagcc

SEQ ID NO: 107757 - RNA, 66 nt, Homo sapiens
ggaaggggccagcgccacacccgggaaacacacccaagcacggcgcggaagcaggaaaggcagacc

SEQ ID NO: 107758 - RNA, 78 nt, Homo sapiens
cacggggaaggaagcgaaaccacagacagacgagccccagaagaagggaacaggcacgccccacccgccagccgagcc

SEQ ID NO: 107759 - RNA, 80 nt, Homo sapiens
gacagagacaacgacagagcacggggccaaccacccagcagcacagcccaccagcacgacagagccccacgaggaggcgg

SEQ ID NO: 107760 - RNA, 71 nt, Homo sapiens
accacacagcagcagcccgggaacgaagcagagacgccagaaagagggcaacggccgacgaacaccgccca

SEQ ID NO: 107761 - RNA, 91 nt, Homo sapiens
acacagaccggcgccgggacccggcccaggcggggagaccgggagccgcccccgccggcgcagcgcaccagacgggcggcggccgccggcc

SEQ ID NO: 107762 - RNA, 75 nt, Homo sapiens
aaagacagaggaggacgagggagcgcagggggagggcgccagagacgagaggcaagcagaggaaaggaagacccg

SEQ ID NO: 107763 - RNA, 61 nt, Homo sapiens
cggccacaggagaacgccggggccgcaaggccaggcgcgcagaggcacccaacggcacaga

SEQ ID NO: 107764 - RNA, 71 nt, Homo sapiens
gggggcggcccggccccgcagggcacacaccacacagcagcacaccgcacaaaccaagcaaggacagcaag

SEQ ID NO: 107765 - RNA, 72 nt, Homo sapiens
gagaagacggggcgaggaagacaccacccagacaacggcaagcggagaagagcaaggccgaaccgagaggaa

SEQ ID NO: 107766 - RNA, 73 nt, Homo sapiens
gggaagccaggaacagcggggcacagacccaccaggaggcacaagccccaaagggacggcaagcaacagcaac

SEQ ID NO: 107767 - RNA, 60 nt, Homo sapiens
caccggacccggaagcagagcccagaaaaccagagagcagaaagaaaggcccagcagacc

SEQ ID NO: 107768 - RNA, 61 nt, Homo sapiens
cgaaaacagaccgcgagcccagagacccaacagaggaagccgcaagaaacgggacgacagg

SEQ ID NO: 107769 - RNA, 75 nt, Homo sapiens
gcccacacccgcagagcgaggaccggaagaggcccaaagaccccaaggagcacaagcagagcgcaacgaccccag

SEQ ID NO: 107770 - RNA, 59 nt, Homo sapiens
cgggccacaccaaagagcagagccaaacgacagggaaaggacccggccaaggcgcaaca

SEQ ID NO: 107771 - RNA, 73 nt, Homo sapiens
ccaacagcggcgccagcaagaaagacagagcaccaggagaaagcccacgccaggaggcaggcgccaccgggcg

SEQ ID NO: 107772 - RNA, 70 nt, Homo sapiens
ggagagggcgacacaacgaaaccaggggaaaagccacagaacgagaccgcaaggggccacagagagaaaa

SEQ ID NO: 107773 - RNA, 67 nt, Homo sapiens
cgggcacgaaacgcgcgcccccgaaggcggccaacggccagaacaagccgagcaagaacaaaacagc

SEQ ID NO: 107774 - RNA, 67 nt, Homo sapiens
cggggcagcagcccagaccagcaggccgaccgcgggccgcgcacccaccgccaaggacaaaaggagc

SEQ ID NO: 107775 - RNA, 78 nt, Homo sapiens
gggggaccgaacccccgccgcagccaggagccgaggccgaaaggcagacggcagaaaacagacgaagcaacagcgaac

SEQ ID NO: 107776 - RNA, 73 nt, Homo sapiens
cgagggcacgggcggcagcccgagaccgcagcaggacacaccggaacaaagaaaaccaaaacgcaacagaaac

SEQ ID NO: 107777 - RNA, 76 nt, Homo sapiens
ggccgagccgcaagaaggaaacccgacccggagccaagagacccgacggaaggaggaggaagaaaaaacgaagaag

SEQ ID NO: 107778 - RNA, 67 nt, Homo sapiens
caagccggcggggcggacaccgaaaacgagaaacgaaagagacacgggggcacaaccgagcccgggg

SEQ ID NO: 107779 - RNA, 72 nt, Homo sapiens
agcagcagcaccggcgggaccccggcagggaaaagaaggacggcgccagagaaggaacagggacgaaaggga

SEQ ID NO: 107780 - RNA, 71 nt, Homo sapiens
accagccgcggagccgggggcagcaaaacaaacggagagaggagggagaaacaaaggccaaagacgcagga

SEQ ID NO: 107781 - RNA, 69 nt, Homo sapiens
cgaccagcacccccagcagccaccggcagaaggggaccaacagggcggaacagccacagcgcaagccgg

SEQ ID NO: 107782 - RNA, 67 nt, Homo sapiens
aagcgcacggacgcaccccacgggaacccacgaccaaagcggaaggccggggcgaggaagagacagg

SEQ ID NO: 107783 - RNA, 60 nt, Homo sapiens
cagcacaacaacccccaccgagccgggagacgccacgagacccgcacgggaaggagaacg

SEQ ID NO: 107784 - RNA, 79 nt, Homo sapiens
gccaaggaaaccaaggaacaaaaggcagcaagcgcagagaccccgcagaggccagagaggacaggccagaccccagcac

SEQ ID NO: 107785 - RNA, 77 nt, Homo sapiens
caaccaacaaaaaggagcggaagcccagcgggccccggcaaacccccaccaaggcgaggagggcgaggcagggcaag

SEQ ID NO: 107786 - RNA, 71 nt, Homo sapiens
cggcacagggaggccagccggagaagcgagcagcggaggacccaaagcagccaaaacaagaagcaaagaac

SEQ ID NO: 107787 - RNA, 77 nt, Homo sapiens
accccggaagagccaggccagcccaggggcaaaagggggccgggcccccgcccagacagcccagaggagggcgggcg

SEQ ID NO: 107788 - RNA, 71 nt, Homo sapiens
aagcaggagaaagaagagcccgcgaaggagaaagaaaagcccaaggacaagcgcaacaccagcagcagagc

SEQ ID NO: 107789 - RNA, 72 nt, Homo sapiens
agcccaaacaccaccaccaaggcacgggagccgaacaaggcccggcacgaagccgcccgagcacgcggaggc

SEQ ID NO: 107790 - RNA, 76 nt, Homo sapiens
gacggccacacacggggacacgcgggggcggcacccggcaaaggaaggggaagaaaacgccagagaagcagagcag

SEQ ID NO: 107791 - RNA, 81 nt, Homo sapiens
ccaaaaggaaaagccaaagacacacagcaaaagagaggcccccccacaccaacgacacccccaaagcaggacagccaaggg

SEQ ID NO: 107792 - RNA, 61 nt, Homo sapiens
gagacccaagaagagaaaccgagaagcaaagcagacagcgacaagagaagagcgacaccca

SEQ ID NO: 107793 - RNA, 78 nt, Homo sapiens
gccggcccggggccccgggaccggcgcccccccgagaagaaacgaggcagagaggaagagacccacgaggcacacagc

SEQ ID NO: 107794 - RNA, 84 nt, Homo sapiens
ggcggccggcgcggccaggaggcacacccgcccgcagaagagagcgaccggagcggggaacacggcggacgaaagaaagaagga

SEQ ID NO: 107795 - RNA, 75 nt, Homo sapiens
acaggaaaagaaaaccggagaccagggcaacccagacgaggagacacacagccccagacgggaggaaaaaaggaa

SEQ ID NO: 107796 - RNA, 75 nt, Homo sapiens
acaggagacaacagcacaccccaggcacaaacaagaggcccggacacaggagccagccgaaggacggaaccagaa

SEQ ID NO: 107797 - RNA, 78 nt, Homo sapiens
ggggaacagccggaagggcggggggcgggccggaggggagacgggaggcagacggcccgccacgggccccgcagccgc

SEQ ID NO: 107798 - RNA, 103 nt, Homo sapiens
cccgcccgcagagaggccggccgcgcggagcacgcggagccgcccaggcagggcaccagagggcaggaccagcggcgccgacacccaccacagagcgcaacac

SEQ ID NO: 107799 - RNA, 78 nt, Homo sapiens
cggaaagccaagagcgcacgggggaaacaagcgaaaaacaggcaaggaggaaacggaacgaaacggcagcagcaagag

SEQ ID NO: 107800 - RNA, 76 nt, Homo sapiens
cagacgcagggcgcccccggggaggggaaacacagagaacggaacagaagcgagcccgacggaggccagggagcag

SEQ ID NO: 107801 - RNA, 78 nt, Homo sapiens
aagacagacacacaagaggacagggagaaagggccccaagaacggagcacaggcacggaagcagccgaccagaaaggc

SEQ ID NO: 107802 - RNA, 81 nt, Homo sapiens
gagaccagaaccggaggccagacaaggaggaccgcacgacagcggcccgcggggaaagcaacggcgcaagcggcggcggcg

SEQ ID NO: 107803 - RNA, 76 nt, Homo sapiens
cgcagacaggagccgaaagccaccacaccagacccaaggaacacagcaagccgaaacgccgaagggaccaggcaga

SEQ ID NO: 107804 - RNA, 70 nt, Homo sapiens
gaaaccagagaccagaagaggagaacccacgcgaggcccggcccacaacaggcacgggacccgccggagc

SEQ ID NO: 107805 - RNA, 51 nt, Homo sapiens
aaggaccaagaaccaggaggcggcggggaaagacacaaaaacagcccacaa

SEQ ID NO: 107806 - RNA, 79 nt, Homo sapiens
gacagacgccccacacgcgcccggggcgaggagcccacgaccaccaggcggagacagggcgcaaccggccacgcaaccc

SEQ ID NO: 107807 - RNA, 82 nt, Homo sapiens
ggggcgcgccggaaaccggagcgcgcagcaggaccaaggagcggcgcggggaccaaacccggagccagccaccccgacccaa

SEQ ID NO: 107808 - RNA, 55 nt, Homo sapiens
ccacccagcacaccccgcgaaaggaggaggcacagacgccgcaggcgccaaaagg

SEQ ID NO: 107809 - RNA, 72 nt, Homo sapiens
accagcacaacaaggcgcaaaaccagcgaaagaaagccccggccgccgggaagacacccccccaggcccgac

SEQ ID NO: 107810 - RNA, 75 nt, Homo sapiens
cgggaacccgccgcgcgccgcgaccccaagcaggggcccgggcagagggaaagcagaggacggaacaacccgggg

SEQ ID NO: 107811 - RNA, 82 nt, Homo sapiens
cccggcaccccacagcccagggaaggcaccaaaagggggggcaggaaaggagcacaggacgaagaggaaggaaaaaacaggc

SEQ ID NO: 107812 - RNA, 83 nt, Homo sapiens
cgacccggggaccgaccggggaccccgccgaagaggaacaaaccgaaggcaacggcacaaaacagaagcaggccagcccccca

SEQ ID NO: 107813 - RNA, 68 nt, Homo sapiens
ggaccaggaaagacaggacaccgggaagcggaccacggacaaagcgggccagcaaaaccaggaaccag

SEQ ID NO: 107814 - RNA, 74 nt, Homo sapiens
aaggcagggacgggaggggaggcaaagggaggaggaggaccggaggccgaagggcaagagggcacagaagacgg

SEQ ID NO: 107815 - RNA, 74 nt, Homo sapiens
ggagcggcgggaggccaccgccaggagaaaacgaaggcaaagcgagcaagaaaaaggacccgacgggcggagcg

SEQ ID NO: 107816 - RNA, 83 nt, Homo sapiens
gccccccccaccccacgagagaagaaaccaacagagaaaggcagcagccaagaaaaaggacaagagcgcccaagcggacagcc

SEQ ID NO: 107817 - RNA, 77 nt, Homo sapiens
ggcgacgcaacagcacgaggccccgacaggcggcgcacggaaacagccacagcagccaccagcgaacaggccaaagc

SEQ ID NO: 107818 - RNA, 75 nt, Homo sapiens
cccccccccccccaagcccgccccccccgccacggagcagcggggcagagcaacaaaacaagacaagaaagccag

SEQ ID NO: 107819 - RNA, 74 nt, Homo sapiens
gcaaccgccccgcgagaagcaagaacgccccggcaaggacggaggcaggcaccaccaacagcggggaaaaccca

SEQ ID NO: 107820 - RNA, 82 nt, Homo sapiens
cacgcagggcgagggaacagagagaaacccggcaagaaaggcgacccagcaacgcggccggccaggggcaagcgagcacgga

SEQ ID NO: 107821 - RNA, 80 nt, Homo sapiens
caccgcccaaagacagaaagagagcccaagaagagccaagccgccccaggagcaggaggaggccagcagaacaaacaaga

SEQ ID NO: 107822 - RNA, 53 nt, Homo sapiens
ggaaagaacaagcgcacgacaagccaagaacgggagagaaggcgcgcaggaga

SEQ ID NO: 107823 - RNA, 73 nt, Homo sapiens
gaccgaagagcggcggagcgaagcgggcaggccccggaagccccccgcgcgggcaggaccagccccgcgggcc

SEQ ID NO: 107824 - RNA, 76 nt, Homo sapiens
cggagagcccgaacggggcaaaaaggcgagcagacgaagaaagagaagcagaacgaagaaggaaaaagcaacacaa

SEQ ID NO: 107825 - RNA, 43 nt, Homo sapiens
cgcccgcaccgcgcccgcaaagcaagcggacgggcgcaaacca

SEQ ID NO: 107826 - RNA, 83 nt, Homo sapiens
cgcgcacgggcgccacgcgcggcgcacacgggcgcgggccgggggcggggcggccgggcgccgggggagcacgcaccacacgc

SEQ ID NO: 107827 - RNA, 34 nt, Homo sapiens
gaagccgcgacccaaagccagaagacgaacaagg

SEQ ID NO: 107828 - RNA, 68 nt, Homo sapiens
gcagccccgcaggagaagcgaaaagaaacccaagaagggacacaaaagcaaccgagagggaaacaacc

SEQ ID NO: 107829 - RNA, 89 nt, Homo sapiens
cagcaagcccggagagacgcggccggcaagaacggacgggcgccacaagccacacggaggcaccgacgagagggcgcaccgcgccggag

SEQ ID NO: 107830 - RNA, 84 nt, Homo sapiens
cacggagcagaagacagagcggggacggaggggcccccagaggcggcagaagcacacaagaagacaccgcagcggcagccacgc

SEQ ID NO: 107831 - RNA, 74 nt, Homo sapiens
gacaccagggccgcagaggcaccggcacggaccaccccaacaccgggggagaaccgggcccaccagggacacgg

SEQ ID NO: 107832 - RNA, 72 nt, Homo sapiens
gagcggaccggggcagaccaaacggcaagaaccagacccaaaagagcaaacaaccgacggagaaggaaaaaa

SEQ ID NO: 107833 - RNA, 66 nt, Homo sapiens
accaggcaggagcgagcccaggggagccacaaggaccaccggacgaaaaggagaccaaagggagca

SEQ ID NO: 107834 - RNA, 76 nt, Homo sapiens
gacgagagacaccaaggcagcgcaaagagcagacgagccaccgagcccgggagccggcgaaggaggacggggcagg

SEQ ID NO: 107835 - RNA, 57 nt, Homo sapiens
acagaaccagggccgggggccagaacaggcggccagcccggaaaaacagacaaggcg

SEQ ID NO: 107836 - RNA, 66 nt, Homo sapiens
cgggaggagacacccgggggagcagacgcaagcgggaaggaccccccacagcgggagggaccaccc

SEQ ID NO: 107837 - RNA, 58 nt, Homo sapiens
gaccggccccggagcacagacagcccagagcaagcacacggaggcccgggagccagac

SEQ ID NO: 107838 - RNA, 81 nt, Homo sapiens
ccgccggagccgccggaagggcgcccgcagccccccacggcgcagacggggaagcggagccaacagccagggcccggagcg

SEQ ID NO: 107839 - RNA, 75 nt, Homo sapiens
gccccccacggacccaaaccagaagaaaaccgaaccgagggccgggggcagccccccacccagcaccgcgcacgg

SEQ ID NO: 107840 - RNA, 81 nt, Homo sapiens
gccagcccccgccggacgagagcccgacagaacccgcaagggccacacggggagcgcgcaagaacggacaggcgcgagcac

SEQ ID NO: 107841 - RNA, 54 nt, Homo sapiens
agaaacaggagacaggagagagagaagaagagaccacaaagcaagccagaagaa

SEQ ID NO: 107842 - RNA, 75 nt, Homo sapiens
gaagcgaagaaaaacagccgacggggccagaaccaggggcagaccaagacaaggcaaagagagggggagccggcg

SEQ ID NO: 107843 - RNA, 37 nt, Homo sapiens
aggcgagcggccgaggcagaggccgggagagagcgcg

SEQ ID NO: 107844 - RNA, 79 nt, Homo sapiens
gccgcacagaccaacagacggaaccccaccaagaagcggagaccgggcccccgggggacagggacgaaggacaaaaacg

SEQ ID NO: 107845 - RNA, 58 nt, Homo sapiens
accaaccccccgccagaaaagcgccaagcagagcacaggagcacgggagcaggggcag

SEQ ID NO: 107846 - RNA, 81 nt, Homo sapiens
agggcggaaaagcggggaaaggaaccggagggacggagggcaaccaggaagaaggggacaccaacagagagaggcacccgg

SEQ ID NO: 107847 - RNA, 122 nt, Homo sapiens
gcagcgaggagagcgcccacaagacggagccggccgcaccacacgggcacagcagcccggcccagggagccagaagggccggggaggaaacaccaggccccccggggcagcaggggcaagac

SEQ ID NO: 107848 - RNA, 74 nt, Homo sapiens
aagcacacaacaggaaaacaaaagaggagaaagacagaagaagggggacacaaaaggccgggggaagcccagac

SEQ ID NO: 107849 - RNA, 70 nt, Homo sapiens
acagagcgggagagccggagagaaaccacggccaacaggaagaaagcaaggggaggaagcacaagacccg

SEQ ID NO: 107850 - RNA, 75 nt, Homo sapiens
ggccgaccgagacgggcggagaggagaagccaggcccagacagccgccgaagaaaagcccagggagccccccaac

SEQ ID NO: 107851 - RNA, 38 nt, Homo sapiens
acgggccgcgcgaaaaagcgccgagagcacgccacacc

SEQ ID NO: 107852 - RNA, 107 nt, Homo sapiens
agcaggcggggagacccacggacaccaaggagaagcaagacaccacccaccaggaaggaagccacagggaggaggaccagcgggagggccacggaacgccacaccgg

SEQ ID NO: 107853 - RNA, 69 nt, Homo sapiens
aaagaagaaagaaaaggcggcgagccagaccaagcgaagagcgcggagaacacaccaccagcaaggagg

SEQ ID NO: 107854 - RNA, 78 nt, Homo sapiens
acgcgccacggaccgcgggacaagaaaacagcgggggaaacacaaagggccaacacaagccacacaacccaaacacac

SEQ ID NO: 107855 - RNA, 60 nt, Homo sapiens
cacccgcgccgggcaccgaggaccagccaagacaggcgagaacgcggacaagcaaacaaa

SEQ ID NO: 107856 - RNA, 77 nt, Homo sapiens
gagccccagcgaccggagcaccgcgccacaccaggcaagacaaagcagagcccacagacaaggccaaaggcaaagcg

SEQ ID NO: 107857 - RNA, 51 nt, Homo sapiens
aaacagggcggcacccaggcgaagacagaggcacagaaccaggacaacgcg

SEQ ID NO: 107858 - RNA, 63 nt, Homo sapiens
gcccacgccagacacgacgcggcaggaacccggcccagagagaccggcaacgagcaagcgaac

SEQ ID NO: 107859 - RNA, 88 nt, Homo sapiens
cgcgcggcggccacggcagcgcccacggccaccccgccgcgcaggagcgggcaccacccaaagaagcggacaggagagacaacggagg

SEQ ID NO: 107860 - RNA, 65 nt, Homo sapiens
acgcaccgcaggcagacaaaagggccaaagaagggagagagcccccccaggccagcgagcccgcc

SEQ ID NO: 107861 - RNA, 57 nt, Homo sapiens
agacagacgcgcccagccccgcgcagggggacgcggaagagacagcagaacaagagc

SEQ ID NO: 107862 - RNA, 52 nt, Homo sapiens
caacacagggacaaaggaacagccgaaaggggagccagccgcaggggccgag

SEQ ID NO: 107863 - RNA, 76 nt, Homo sapiens
agccaaagacgcgcccagaggggagcagaacccaacaacacaggcaccacagaaaagcaaggcgaaggaggacagg

SEQ ID NO: 107864 - RNA, 66 nt, Homo sapiens
gcacgcacaccgggcagggccgagaggacgccagcggcgcgcaggaaggggaggagcacagaacgc

SEQ ID NO: 107865 - RNA, 80 nt, Homo sapiens
ccggcggggaagaccagggcaaaggcggggcacacacacaacagacggcccgccacgggccccgcagccgcgcccgagcg

SEQ ID NO: 107866 - RNA, 76 nt, Homo sapiens
agaaacaaccagggcaaaaggaaaggacccaccaaggacgcacagccaagagacaaggaaacaagcaccaaaacga

SEQ ID NO: 107867 - RNA, 74 nt, Homo sapiens
ccagccaaaacaacggaaaacagcgacaggacgggaacagcgacccaggaggaaaaaaccgagaaaagagggaa

SEQ ID NO: 107868 - RNA, 61 nt, Homo sapiens
cacgacccagcggacggaaccagcagggaaggagggaccaagaaaggcccagggaccaaag

SEQ ID NO: 107869 - RNA, 79 nt, Homo sapiens
gaccaggagcacacgaaagccggcgagcgcaggagcccgggcacacaaggcggcgcccagcggccacacgccccaagcg

SEQ ID NO: 107870 - RNA, 74 nt, Homo sapiens
ggccaggagcccacccgccgagcagcaggcggagccaggggcaaccggccccgcaacccgccccgggcaagcga

SEQ ID NO: 107871 - RNA, 70 nt, Homo sapiens
gcaaagcagcagaagggccagcagacgaaaaggcccaggccggcggaaaacccaccgccaaaagagccca

SEQ ID NO: 107872 - RNA, 59 nt, Homo sapiens
gcagaggggaggcgcgaaaggccagcagaagaggaccagacgcccgggggggcggcggc

SEQ ID NO: 107873 - RNA, 40 nt, Homo sapiens
acaagaacacggaaaggggaagccccgcccacggccccca

SEQ ID NO: 107874 - RNA, 77 nt, Homo sapiens
gccagccaaaagaaacacacagggacaagcagagcgccaccaggccaaaacagaagaggcaaagcccagccacagca

SEQ ID NO: 107875 - RNA, 58 nt, Homo sapiens
acagccagcaaaggcaggggaggaagccacccgaggggggaggccaacgccgaggggc

SEQ ID NO: 107876 - RNA, 90 nt, Homo sapiens
ccgaaaggccaagcgaagaaaacggagacgcaggagaagaacacccgccgaccaaagagaccacgaagaccgggcgccagggccgccgcc

SEQ ID NO: 107877 - RNA, 56 nt, Homo sapiens
agcagaggagcgcagaaaccaaaaaagcaggcagcaagcaaagacggaggagcaga

SEQ ID NO: 107878 - RNA, 74 nt, Homo sapiens
ccagaggaagaaccagaggaacgggacaaagcggccagggagcacagaaaagcgacccaggaggcccaccagca

SEQ ID NO: 107879 - RNA, 89 nt, Homo sapiens
ccagggcggcacgcgcagggggcaccgaaacagacggccgaagcccgcagcccacgcacagccggagagcagccgagcacggggccacc

SEQ ID NO: 107880 - RNA, 72 nt, Homo sapiens
ccagcgccgcgcgcgccagccgcagcgccacggcgccgaggaccgccgacggaggagacgcaccgggggaga

SEQ ID NO: 107881 - RNA, 68 nt, Homo sapiens
gcggggacaaagacagcaagaggaagagaaacaccaaggaaccacacaagaaaagaaagcaaaaggac

SEQ ID NO: 107882 - RNA, 64 nt, Homo sapiens
agccggccaaacccccccccccccccagcgcaggcggacggccagggcccggagaacaacagag

SEQ ID NO: 107883 - RNA, 85 nt, Homo sapiens
gggccgcccgcaagaaaacaagcagccgcacgacgcacggcccaggaccgcacaaggagaaagacagcaaagaaaaggagaagaa

SEQ ID NO: 107884 - RNA, 78 nt, Homo sapiens
aaagaaacacgagcacgccggacaggaggaacccaagaagcccaggacccaggaaggagacacaggaaaacaaagccc

SEQ ID NO: 107885 - RNA, 80 nt, Homo sapiens
gcacaaagacccgcagcaacccgagaacaacggggccacacacggcaagaaccgggagcagaaacagaaaaaaccaagga

SEQ ID NO: 107886 - RNA, 46 nt, Homo sapiens
cgaacaccaagcgccgcacaagcggccgcgagaaccgggcagagca

SEQ ID NO: 107887 - RNA, 85 nt, Homo sapiens
cagccccacccaccgccaggagcccccccaggggacgcggacgcaacagggaaaggagaccccaacaagccgcggggcaaaagcc

SEQ ID NO: 107888 - RNA, 78 nt, Homo sapiens
gccgcccccaccccacgggacggccagccaagaaccgcacgacacgaacaaccaggagacagggcgggaccaccagga

SEQ ID NO: 107889 - RNA, 70 nt, Homo sapiens
caacaacggaggcgagaacaaccagaagaccgccgacagaagggccaaaggaacacacagagcccagcaa

SEQ ID NO: 107890 - RNA, 51 nt, Homo sapiens
gcaacaagcaccgacacaggagaacaagcaggggcccagaggccagaagga

SEQ ID NO: 107891 - RNA, 86 nt, Homo sapiens
agagggaaccgcgggagcgcgcgaggaccacccgccgccaggagcccagccgcaggaaggcggaggcagggcgcgaccggccacgc

SEQ ID NO: 107892 - RNA, 53 nt, Homo sapiens
ggagcgcggcccgaggcccgcccagagcagacaacagggagaccccacgggac

SEQ ID NO: 107893 - RNA, 77 nt, Homo sapiens
acggacaccaacgagcgaagcagagccccccccagcgccgaaggcccgacccagcagcccggcccggcaccgcagcg

SEQ ID NO: 107894 - RNA, 77 nt, Homo sapiens
gcaaaaggacacgggaagcccagggcagaacacagggggaggacagcccaagaacaccggcaggaccggaaggaaca

SEQ ID NO: 107895 - RNA, 78 nt, Homo sapiens
ccgggagcgcgagggagcgccaagggcacgggaagaccggaggggacgaagaacggaccggcacacaaagacagcgcc

SEQ ID NO: 107896 - RNA, 52 nt, Homo sapiens
cccaccgccaagacggaaaccagaagagcacaacacagaagaaacggcaagc

SEQ ID NO: 107897 - RNA, 63 nt, Homo sapiens
gggacaacgacgcagggacggcgagaagccaacgaccgccacagggccagacaaccacgccgg

SEQ ID NO: 107898 - RNA, 85 nt, Homo sapiens
cagaaggcaacaccacaccgcaagcaagcagcagacggacccaacaacccagcagccagggaaggccagcaaccaaccccaggca

SEQ ID NO: 107899 - RNA, 70 nt, Homo sapiens
gaaagggaaaacccccacacggaggggacgaagacaaaaaccagggccacagggaaagacagaagggaaa

SEQ ID NO: 107900 - RNA, 80 nt, Homo sapiens
cccagacccccgccaaacaggacacaaaaggacacagcacaccgaccacgccccacaccacaacaggcgcgccccacaag

SEQ ID NO: 107901 - RNA, 79 nt, Homo sapiens
aaggccggaagagcagcaccggaccagcggagcggccggacagagcgggagccaccagcgccaaagggaagccaggagc

SEQ ID NO: 107902 - RNA, 63 nt, Homo sapiens
agaaggggcaaggggcagagaaggaaggaggcccggacaccgagggcccaaaacagaaaccga

SEQ ID NO: 107903 - RNA, 82 nt, Homo sapiens
cgggcagaagggccaagagggccacagcccggcccccacgacacaccgaagaggcccacggagaggacaagagggcaagcag

SEQ ID NO: 107904 - RNA, 82 nt, Homo sapiens
gagacaccagcggcaccggagaccaccggagcaccccgacacagggagacggggcacgcccagagcaggccgccagcccgcg

SEQ ID NO: 107905 - RNA, 71 nt, Homo sapiens
gggacgagcagagaacagcaaaagagcacaaggcaggagcacggagaagagaacgacgaacagaaaaagcc

SEQ ID NO: 107906 - RNA, 78 nt, Homo sapiens
agaacacaggagaaagcgaagccaagcccgaagccaaggggccaagaggagaagaagggggaaagcaggggagaaaag

SEQ ID NO: 107907 - RNA, 69 nt, Homo sapiens
gcccggcgggggcgcagagagaggaccagggcgcgggcgccgagccgggccaagggccccacccagccc

SEQ ID NO: 107908 - RNA, 71 nt, Homo sapiens
gcagacccaagccggccgcaacggccaaagaagagacccacgaggcgacagggccaggccaccaagccaga

SEQ ID NO: 107909 - RNA, 82 nt, Homo sapiens
gccagccgagaagaggcacacaggcaggaaagccaccgagggcccagccggcgcacgagaaccgcgcaagacacacacgcag

SEQ ID NO: 107910 - RNA, 59 nt, Homo sapiens
aaaacaaaacgaaccaggacggcaaaaagccaacaggcagaccagagacagcgccacgc

SEQ ID NO: 107911 - RNA, 79 nt, Homo sapiens
cagagcggcccgcagagccacagacgcaggagggccacaaggggaccgggccccgaaggagggacaggcacacacccag

SEQ ID NO: 107912 - RNA, 88 nt, Homo sapiens
gcagaaagcgggcgagcagcaggagcgagcccgaggacaggagaggaaggaagggaaaaggccgaggcacagcgggaagaccgcaaag

SEQ ID NO: 107913 - RNA, 72 nt, Homo sapiens
accgcacccagagaaagcgcggacaacaccaggaaaagacagagggggggaagaaagaaggagaaggcggag

SEQ ID NO: 107914 - RNA, 50 nt, Homo sapiens
gaaagcagaacaggccaccgggccaacgaaagcgccggcgaaagcaacga

SEQ ID NO: 107915 - RNA, 77 nt, Homo sapiens
cagccaggagcgcgcgcacgaccggcgcccggacacccgagggggggaggaagcaaaggacaaagaccagccagaac

SEQ ID NO: 107916 - RNA, 90 nt, Homo sapiens
cacggcccgagacacaccaggccggcaggcgagaaaagcgagaccgcggcgaggaccggcgggagcagcggaagacaccaaggccaggga

SEQ ID NO: 107917 - RNA, 58 nt, Homo sapiens
aggacccccgcccgaaccgagggaacagcagcaggcgagaggcagaacccggaaagaa

SEQ ID NO: 107918 - RNA, 78 nt, Homo sapiens
aaaagacaggcgccaggagcacagaagagcgaggagcaaaccacgcccgggcaacaccagcagccccaaccacccaag

SEQ ID NO: 107919 - RNA, 92 nt, Homo sapiens
aaaaggaccagaacggagggaaggacaagagcgaggaagggaggacaacagaagccagagaggaagaggagagcgagggggaggagagcgag

SEQ ID NO: 107920 - RNA, 76 nt, Homo sapiens
ggggggccacgcacggcacgcgcccacggcgggcccggcggggaggcgaggaccaaacaagggaagaggcggggcg

SEQ ID NO: 107921 - RNA, 82 nt, Homo sapiens
gcagcggagccaagcgacccggcgagcggagccggggcggagagcggcgaccacgcggaccggagaaaaccccgggaaacag

SEQ ID NO: 107922 - RNA, 54 nt, Homo sapiens
aaccagaagcggaaacaagcggaaaggacacaggccgagacgcaccagagccgg

SEQ ID NO: 107923 - RNA, 57 nt, Homo sapiens
cacaagagcgacgccagggaaagcccaggaacggaacagcaagccaaagagcggcgg

SEQ ID NO: 107924 - RNA, 77 nt, Homo sapiens
ggccaggaacagggacagcacccaccccggagggggaccacaagacccacgacagggcgaagagagaacacgcacgg

SEQ ID NO: 107925 - RNA, 73 nt, Homo sapiens
agaggaaccaaggacgagggcaggaaagggaaacagcggaaagcccagaacaaagcggacgcaacccaaaacg

SEQ ID NO: 107926 - RNA, 57 nt, Homo sapiens
cagcccgcggaggcagcgccaggcccagacagccgccgaagaaaagcccagggagcc

SEQ ID NO: 107927 - RNA, 71 nt, Homo sapiens
acaggaccgagcgaaggcaccacggcgagacacagggaccaagaaaaaaaaggacagcccgaaaacgacag

SEQ ID NO: 107928 - RNA, 68 nt, Homo sapiens
ggagcgacagaagacaaacagcaaggggcaaagcaagaccagacgaacagacagaacgaacagagaga

SEQ ID NO: 107929 - RNA, 83 nt, Homo sapiens
gcacgcgaccaaggagggcaaagcgccgcgaacaccagcaggaaaaaagagcggcagaaggccaaacggccgagcaggcgagc

SEQ ID NO: 107930 - RNA, 34 nt, Homo sapiens
ccgcgaagcgggaaggaaaccacacggagaccag

SEQ ID NO: 107931 - RNA, 83 nt, Homo sapiens
aagcaggcgaagacacggacccgcacaggggaggacagagaagcgcaaagaacaagagaaaagagcaccacgagacaaaagga

SEQ ID NO: 107932 - RNA, 78 nt, Homo sapiens
aggaaccaaggagaaaccaaaaacaggcaaagcagagaaacagaaaacagccaaaaggacagggacagcaaaaaggag

SEQ ID NO: 107933 - RNA, 78 nt, Homo sapiens
ccgggacgggccgagaggcagacgcgggccaggaggagcgaggcgcagacccagcagagacgcgcgaggacccacccc

SEQ ID NO: 107934 - RNA, 73 nt, Homo sapiens
ccacaaaccggccaaggcacaaaaggcccgaaaagaaagcgaacacacaaaacaagaaaaggcacgcaaaccc

SEQ ID NO: 107935 - RNA, 55 nt, Homo sapiens
ggaccgaaacagaaacggaacaccaaggcaagcagaagaggaacagaagaagcag

SEQ ID NO: 107936 - RNA, 71 nt, Homo sapiens
cagcagcaagaagaaacgaaagaaacaggcaaggagcgcccagcaagcgcccccccccaacacacgcgaca

SEQ ID NO: 107937 - RNA, 74 nt, Homo sapiens
acagaagcacggaagaagcgcaaaaaacgaaggcacaagcagaggaaccagggaaccgccgccagcaaccaaca

SEQ ID NO: 107938 - RNA, 83 nt, Homo sapiens
ggccgggcgccaccccaaaccaggaaagacagggcccccaccaccggagccagagaaggggcacacgccacccccggcccgca

SEQ ID NO: 107939 - RNA, 73 nt, Homo sapiens
cgcaggcgaggacccaccgcccccggcccgaccagggcggccaccgagaggggaagagggaacagaaacgccc

SEQ ID NO: 107940 - RNA, 40 nt, Homo sapiens
cagaaggggaaaagcaccaagggcgaagcggccaggcccg

SEQ ID NO: 107941 - RNA, 83 nt, Homo sapiens
ggacgaagagagggagaaagaagcccaagacaagaccaaaaggcagggagccacccagaagacccgccacaccaaccacacag

SEQ ID NO: 107942 - RNA, 76 nt, Homo sapiens
gaaaacccccgggaccagaaaaccagacgagagacagaagacgaaagggcaagaaagagagcacggacaagaggag

SEQ ID NO: 107943 - RNA, 65 nt, Homo sapiens
gaagagacagacagggcccagcaccaggaccggaaagacggggaaagagacccgcggacaacgac

SEQ ID NO: 107944 - RNA, 88 nt, Homo sapiens
cgccgcgggccgcaggccgcgagcagcggacgccggccgccgcaggaggggaccaaaagaacccagccaacccgcagagggaggggag

SEQ ID NO: 107945 - RNA, 86 nt, Homo sapiens
cgcgacgacggcccgggaggcacgaaggcaccgggcccagcacagccagcaccgcacgcccgcaagggaggccggcacggaaaaga

SEQ ID NO: 107946 - RNA, 68 nt, Homo sapiens
ccgccgccgcacgacagaagccgccagcgagccccacacagcaagccccagccaagacccaccaggca

SEQ ID NO: 107947 - RNA, 75 nt, Homo sapiens
gcagaaaggccacacccacccggagagcgacaagagaaccaccgaccacgacccgcgggagaacaacgaccgaac

SEQ ID NO: 107948 - RNA, 72 nt, Homo sapiens
gggggagggggaagcgggaaacccacaggaggcaaccacacagagggccagagaacggccggggagcgcagc

SEQ ID NO: 107949 - RNA, 74 nt, Homo sapiens
aaccacaaggccgggcggacgcagggcaccccgaagagaagagcagcagcggcccaagaaaagcccaaagaacg

SEQ ID NO: 107950 - RNA, 56 nt, Homo sapiens
caaagagcagccgagaagaaggccgcgagcagaagcgcacagaaagaggagaaaaa

SEQ ID NO: 107951 - RNA, 83 nt, Homo sapiens
gcggagcccagccagggacaccgaggacacgcaggagccgggacagcccccaccgggggacggcacggcaggcggacgcccgg

SEQ ID NO: 107952 - RNA, 68 nt, Homo sapiens
cgaccgagaggcgcggagccggggacgcacaacggcaagcggagaagagcaaggccgaaccgagagga

SEQ ID NO: 107953 - RNA, 40 nt, Homo sapiens
cacaaccgcccaaagacacgggaaacggggacagaagaac

SEQ ID NO: 107954 - RNA, 69 nt, Homo sapiens
agagcgagcgagggggggcgcgccggaaaccggagcgcgcagcaggacaaggcacgaggcgcggcgacc

SEQ ID NO: 107955 - RNA, 81 nt, Homo sapiens
agcaggaagaggaaccacaagaaaacaaaagaaacgcccacagaacaccgagaaacggccacaaggcaaaccacacaccaa

SEQ ID NO: 107956 - RNA, 79 nt, Homo sapiens
gggccacaccgcaaacaggcaaccacacccccggaaacacaagaccccggacagaccacccagcgccccggggcgacgg

SEQ ID NO: 107957 - RNA, 80 nt, Homo sapiens
caggcgccgacgcgcgcgaaaaaccagccaggagacgccaaggaaagagggacccccggcccagcgggaaaggcccaacc

SEQ ID NO: 107958 - RNA, 48 nt, Homo sapiens
ccagggcaggagcagcgcacaggcgaaaaggggaagccaacagcggga

SEQ ID NO: 107959 - RNA, 77 nt, Homo sapiens
gaggccaaagccagagacagagcacaaagaccaacgggagccgcaaggacaacagccgcggccagacagcggccgga

SEQ ID NO: 107960 - RNA, 92 nt, Homo sapiens
cgcgaagcacccagcaagggaaagacaccaccggcgggccacccaccggggacaagaaaaccagaaacgggggcccgacaagacacaaaaag

SEQ ID NO: 107961 - RNA, 52 nt, Homo sapiens
aggaccccggagagcaaggaagaaagcagcccaggagaaagaggagcacgcc

SEQ ID NO: 107962 - RNA, 75 nt, Homo sapiens
cacgggacggacaaggcaacacccgaagaaacaagcacaggacacagcaaccaagaggagaagaaccagaggcaa

SEQ ID NO: 107963 - RNA, 67 nt, Homo sapiens
agcacccaaaccgcacagcagccgcaaacgcaaaggaaagagcaagagggggaaacccgaaaaagaa

SEQ ID NO: 107964 - RNA, 71 nt, Homo sapiens
cgcccggaccgcgcagaaccagggcggcggccagcgccacgcgcccagaggagcacccccaagccacccca

SEQ ID NO: 107965 - RNA, 86 nt, Homo sapiens
aggaccaagaccaaccaggccaagaagaaaacaggggcacagacgacagaagccaagagggcgcaaagaggaaaagaagagaaaag

SEQ ID NO: 107966 - RNA, 70 nt, Homo sapiens
ccccgcacacgaagagacgccgggcaccccaacacggcaccgccgaggcagacccgaagccagaaacgca

SEQ ID NO: 107967 - RNA, 75 nt, Homo sapiens
ggcaaagacgggaccaaaggcgacacggcacaagcggacacccaaggcgacagcgaaaaacagagcaagaaaacg

SEQ ID NO: 107968 - RNA, 70 nt, Homo sapiens
gaaaaccaacaaaggaacgagcgaaacaaaacgacagaagcacgacaacaacgggcagcaagccacaacg

SEQ ID NO: 107969 - RNA, 74 nt, Homo sapiens
cccgagcgaggaacagaaaccagccacaaggcagccagcagcagcaggacaccggcaccagaagaaaggagaga

SEQ ID NO: 107970 - RNA, 83 nt, Homo sapiens
gcacggcggcgcagaaagaggcagaagcggaaaggaaacaggacaaaggagggcggaccacccaggaggaggggagcaaagaa

SEQ ID NO: 107971 - RNA, 61 nt, Homo sapiens
gaaggaccaagaaccaggccggcagagcaagacggcaaggagaaaacggaacgagccaaaa

SEQ ID NO: 107972 - RNA, 76 nt, Homo sapiens
gagcaaaacacaccaagccgggccaacagacaaaaggggggggacacagagaccagagagacggcgagcagaggca

SEQ ID NO: 107973 - RNA, 76 nt, Homo sapiens
gccgcccgggaccggcgagaaggccacaaccaagagaaacaaccacccccgaaaaagcaggaggacccaaccagaa

SEQ ID NO: 107974 - RNA, 62 nt, Homo sapiens
ggcgcccggggaaagccgggccccgagggcggaccgagaaaacaacaggggcaggaagccca

SEQ ID NO: 107975 - RNA, 63 nt, Homo sapiens
ggaagggggaaggggacacagaagccgcaggacggcagcacacggccgggcaggccggacaac

SEQ ID NO: 107976 - RNA, 78 nt, Homo sapiens
agagcggaccgagagcgcgaaacgcacgagaagggcaccacacaccacaaaccgagggaagaaaggacaacagaagac

SEQ ID NO: 107977 - RNA, 70 nt, Homo sapiens
gacacaagcaaaaacaaagagaagaaacaaccccaggaccagaagcggcagcaacaaccggccccggggc

SEQ ID NO: 107978 - RNA, 96 nt, Homo sapiens
gggaaagaggccgcggcccccagggccaccggcaggggcccagaggccccgaaggaccagggccagaaggggagccggccagcggcccaaaggaga

SEQ ID NO: 107979 - RNA, 77 nt, Homo sapiens
cggcggggcggcggcaccaaggcccccaagccccccggcgacgacgcccgagagggaaacccccggaaacagggccg

SEQ ID NO: 107980 - RNA, 85 nt, Homo sapiens
aaggagcggagaagcggacaaggagcaggaggaggagcagcccgcagggaccccaaaggagccagaaacccacaaaaagcaaagc

SEQ ID NO: 107981 - RNA, 72 nt, Homo sapiens
cagaggcaccgacagcaacccccccacgccacacagggaaggcacacagcaggcgaacgcaagcagacggaa

SEQ ID NO: 107982 - RNA, 38 nt, Homo sapiens
gcgggacacggagcaaaaagagaagcgcagcgaaaaga

SEQ ID NO: 107983 - RNA, 81 nt, Homo sapiens
caccagccacggaaagcagagcaacggcagaagcacagaccgcagaacagccgggaaaggccaagcaggaccaggaagagg

SEQ ID NO: 107984 - RNA, 76 nt, Homo sapiens
ggcggaacaaaggaaaagcaccgacacgggacggagaagccgcgggagcggaagacaggcccggagcccgacggac

SEQ ID NO: 107985 - RNA, 81 nt, Homo sapiens
accaagaacgcccagcccgcgggcaccggcagaaaggaggaggaaaacacccccaaccagggaccaaaggccgaaccaggg

SEQ ID NO: 107986 - RNA, 39 nt, Homo sapiens
ccagcagagcccgcgaccagacaaagcgcccgaggcgac

SEQ ID NO: 107987 - RNA, 67 nt, Homo sapiens
gcgagcgggcggcacgcacgcaggcggcggcggcggcgcccgggagccggagcccgcggcgccacgc

SEQ ID NO: 107988 - RNA, 40 nt, Homo sapiens
gccgggacaaaggcaagacggagacgggcgaaggccaggc

SEQ ID NO: 107989 - RNA, 60 nt, Homo sapiens
acaaacggggcggggccggggaacacacagaggaacagaaaagcagccagcaacaggaag

SEQ ID NO: 107990 - RNA, 83 nt, Homo sapiens
aagaaagccgaaccacaggagaacagcaccaacgcacaggccaaagagcaccaagagaccaccaagaagagagaagaagcgaa

SEQ ID NO: 107991 - RNA, 68 nt, Homo sapiens
gggagaaggagagcgagcggggacaggacgaaaagacgagcaacaccgggcgcgcacagaagggacaa

SEQ ID NO: 107992 - RNA, 85 nt, Homo sapiens
aaagaaagaagaaaaagcagaggagaacacgaccaagcaagcccacaagaagaaggaaaccacgagacggaagccgccgaaccca

SEQ ID NO: 107993 - RNA, 70 nt, Homo sapiens
ggagggacggcacagggaggccagccggagaagcgagcagcgccagcaccagagccggagagacggagca

SEQ ID NO: 107994 - RNA, 74 nt, Homo sapiens
cacaaacgagggagcaaggacaccaccagggagccaggagagaacacgcacagggacgcgacccaagcaaacgg

SEQ ID NO: 107995 - RNA, 124 nt, Homo sapiens
aaaaagagccagaacacgagaaaagaagaagaacaagcacagagacacaacccagagggcccgcacaagagccaacgaaacccgcgaggacaaccgagccgccgaaaggagggaggaacgaccc

SEQ ID NO: 107996 - RNA, 53 nt, Homo sapiens
gcccccaccaccgcaaacaggagccccgagaccggcacgcagaggaaaggggg

SEQ ID NO: 107997 - RNA, 75 nt, Homo sapiens
aacacaagagaacaagagaagcaggcagaagagcacacacgaacaaggccgcgcaccaggcgcagaacccaagca

SEQ ID NO: 107998 - RNA, 68 nt, Homo sapiens
ggagagacgcagaggggcggcgggggcagaaacggaaggcagagacaggccagaaccccaagggaccg

SEQ ID NO: 107999 - RNA, 77 nt, Homo sapiens
cgggcccgaaacccccacccggcggagagaccgccgaggaagcgccacgaggcacacgaaaacagcaaggcaacggg

SEQ ID NO: 108000 - RNA, 85 nt, Homo sapiens
acgggaccaagacacccgcgagagagccaagagccaggccccggggccccagcggcaccagcggagaccacgggagccgcgccgg

SEQ ID NO: 108001 - RNA, 84 nt, Homo sapiens
aggcaccacgcaccgacagcgccgccaccgagccgggcccaccccccaccaaggaagagacaccaagccaagagaggaggaacg

SEQ ID NO: 108002 - RNA, 58 nt, Homo sapiens
ccccccccagcacgcgaggcgcccagcggggcacagagcaccaagacgggggagcgga

SEQ ID NO: 108003 - RNA, 76 nt, Homo sapiens
aaaccacagggcgacacccagggcaaaggaaacgaaaagcagcaagcaaacaaccggagggaagagagcaaagggc

SEQ ID NO: 108004 - RNA, 74 nt, Homo sapiens
gcagaaggggacagaacagggcccagacagacgagagcggcacgaggaccaaggggagcagacccagcagcgga

SEQ ID NO: 108005 - RNA, 114 nt, Homo sapiens
gcgcgcggggcggcgagacagcggcggcgacggcgcggaggccccgggcgcggcgcagaggaggcggggggggcggacccagaggccaccccgccgccgggcccagccacacgc

SEQ ID NO: 108006 - RNA, 81 nt, Homo sapiens
ccgccagaaccgaggggcccccaggaccaacccgagaaacagacgagaccggaaaggcacgcccgccacaaggagcaccac

SEQ ID NO: 108007 - RNA, 82 nt, Homo sapiens
ccagcccccccacaccgaccaacgggaacccccaaagaaggaggagacgagcaacagcaaggcagaaccgaagggaagaccg

SEQ ID NO: 108008 - RNA, 78 nt, Homo sapiens
ggaaagcacaccaccccagccaaagacagggcgaaaccccaggggagagaggcgcacgaaaggccaacaagcccggca

SEQ ID NO: 108009 - RNA, 72 nt, Homo sapiens
gaagagcaggaaagaacaacaaaggaggaaaggaagagaaagaacacaaaaggacggagcgccgcacccagg

SEQ ID NO: 108010 - RNA, 40 nt, Homo sapiens
ggccagggggcaaggcgggcaacaaaccgggagacaggca

SEQ ID NO: 108011 - RNA, 85 nt, Homo sapiens
agcgagcgcaaccggagggccgggacccgcagccacggaccgcccaaccgcgacgccgaggcggaaggacagagggagggaaccc

SEQ ID NO: 108012 - RNA, 41 nt, Homo sapiens
agccgcggaagacgggacaggacaaccagggaagcagaagg

SEQ ID NO: 108013 - RNA, 119 nt, Homo sapiens
gcggagccaaccggagcgcaaggcgccaaccccgaacggggggagacgccacggaacgcagggaccgggagaggggacgaaggcgaaccagcaagacaaagcaacaaaagaccaccgag

SEQ ID NO: 108014 - RNA, 76 nt, Homo sapiens
cagcggccgcgcacccccggccggaggcaccagcggggcaggcccaaaggaaagccacaaagaacacgagagacag

SEQ ID NO: 108015 - RNA, 70 nt, Homo sapiens
cgccagccacaggacggaaagaaagccaggaaagggcaccaggcacgcagggcggaagagcaaaggacag

SEQ ID NO: 108016 - RNA, 58 nt, Homo sapiens
ccaccgagacaccagccaggacgaacgccaggaagaacgagcacggaggggacaccca

SEQ ID NO: 108017 - RNA, 72 nt, Homo sapiens
gcacaagcgaaggagaagagaagaggcaaaaaccaacaaggcgagaccaccagaaggaggccggggagaacc

SEQ ID NO: 108018 - RNA, 60 nt, Homo sapiens
agccaagggacaggggggccgggggaacgaggaagcgcccaaggaacacgaaaaggacgg

SEQ ID NO: 108019 - RNA, 83 nt, Homo sapiens
acgcccgagcaccgccagccaccggcaccaagaccggccacacccagcacgcccacccggagcaacacgggagaaggaaagca

SEQ ID NO: 108020 - RNA, 78 nt, Homo sapiens
gagaaacaggcacacaagggaggaggcaaagccagccaaaagaagcaagggaaagaccaggagccagaaaccaaccaa

SEQ ID NO: 108021 - RNA, 42 nt, Homo sapiens
cagcccagagcagagcagggcgagacaaaggaaaacccaccc

SEQ ID NO: 108022 - RNA, 70 nt, Homo sapiens
gccacagcccaacccccggcaccccaagaagaaggacgccaccgacaagaaccacgggggacccggcggc

SEQ ID NO: 108023 - RNA, 75 nt, Homo sapiens
cgcgcgagcagacaaggaccggccaggggccggaggacgcggggaaccagaccgggccagaccccacgggacaga

SEQ ID NO: 108024 - RNA, 67 nt, Homo sapiens
aagaacagaaggaagaagccaggaacaagccaaaagaagcgagggagaaccaccaacaaaggagcgg

SEQ ID NO: 108025 - RNA, 33 nt, Homo sapiens
agcggggcggcaggggcgggagacacaacaacg

SEQ ID NO: 108026 - RNA, 86 nt, Homo sapiens
ccaacggcccagccgaggagcggcgggcggcggcgcgcggacccaggcgcggaggcgaggccagcaggcaaagccccggaacaaga

SEQ ID NO: 108027 - RNA, 60 nt, Homo sapiens
gaaagagccccgaggagccaagaaccagggcaaccgggccagcagaagaggaccagacgc

SEQ ID NO: 108028 - RNA, 77 nt, Homo sapiens
ggaggcggcagcgaagaagacgaaaaaaacccaggaggcagacccagaaaaggaccaccccccgacgaaccggggag

SEQ ID NO: 108029 - RNA, 63 nt, Homo sapiens
aacacccgacaaagggggaaaacgacccccaggaaaaagaaaaggaccagaaacacaaaaagg

SEQ ID NO: 108030 - RNA, 74 nt, Homo sapiens
agccccggcaaagcccagggaccgacgaggacacagaaaaaagacacaggccaacagagggcaaggcaacaaaa

SEQ ID NO: 108031 - RNA, 66 nt, Homo sapiens
gcagaggaccaggacgcggcgccaacggccgacaagcccgacgaagaccggcggccacagcagcaa

SEQ ID NO: 108032 - RNA, 66 nt, Homo sapiens
acgcaccgcaggcagacaaaagggccaaagaagggagagaggagaacaggagggagcccaaagcgg

SEQ ID NO: 108033 - RNA, 75 nt, Homo sapiens
aggaagacgaacgaaacacgaaagggcagggggggcgcggggggcgagggccggagacaagggacagaagccggc

SEQ ID NO: 108034 - RNA, 70 nt, Homo sapiens
gcccccggcaccaggccgaaaacgaagcagaggaacaacaagggagaaaccagaagaagacacacagggg

SEQ ID NO: 108035 - RNA, 63 nt, Homo sapiens
agagacagcgacggcaaaagcgcaaccagggagggaggaaaaggaccaagaagccgccaagcc

SEQ ID NO: 108036 - RNA, 79 nt, Homo sapiens
gaccgaaaacagggaggacagaggaaaagccccagcgcgcgcccggacagacaagaaggggcagaccaacaccacccag

SEQ ID NO: 108037 - RNA, 72 nt, Homo sapiens
aacaacacgcgagcacagcgaaaaaaaccccgaagaagagccaccaacaacaccagggacacaacagcaagg

SEQ ID NO: 108038 - RNA, 98 nt, Homo sapiens
aaaccgaaggggacccagcccggggacacaagcccccaagaccacccaaccgccgcacagggccagccagaaggcccagcaagaagcgcgggccccaa

SEQ ID NO: 108039 - RNA, 68 nt, Homo sapiens
caacaacagcagacagcgcaagcgaaaaggccgcaagccaagaaaagaggccccaaagccggggaaga

SEQ ID NO: 108040 - RNA, 66 nt, Homo sapiens
cggaagcagaccccagcagcagggaaagaagaaagcaccccgcaaaagaagggaaagaaccagcac

SEQ ID NO: 108041 - RNA, 70 nt, Homo sapiens
acagagcacaagcaacacaagcagaggaagggcagcagaacaacgcagccaccagccagaaccagaagag

SEQ ID NO: 108042 - RNA, 73 nt, Homo sapiens
ggaccggcgcagagacaggcgcgaggagacaccgcagggccgcgagggcccggaacaggggcacgcacgaggc

SEQ ID NO: 108043 - RNA, 64 nt, Homo sapiens
cagcgagaacaaaggagagaggaccacccagaggagcaacggaaacacaaagaagacaccagaa

SEQ ID NO: 108044 - RNA, 73 nt, Homo sapiens
agcgagccccagggcgaaaaacacacaaaccgggccaccaagagccaccgaggccaaagaagcgagccaaaca

SEQ ID NO: 108045 - RNA, 79 nt, Homo sapiens
gccaggccgagccccggggcccccgcggggcccgcaggcccggccgaggacgggcccgggacacccagacagagagagc

SEQ ID NO: 108046 - RNA, 74 nt, Homo sapiens
ccagccaaccaaagacgggaacaagggagggggacagaccaaagagggcaaaagacggggagaggaagacacag

SEQ ID NO: 108047 - RNA, 70 nt, Homo sapiens
cacacaaggagacacgccaaccagcaaagcggcgaacacaacaagaccgcaagcagaccgacagacagaa

SEQ ID NO: 108048 - RNA, 70 nt, Homo sapiens
gacaaaaacccagaagaaagacgcaacgccgcccaccgggagccgggacaggaaaaaccagaagagaaaa

SEQ ID NO: 108049 - RNA, 79 nt, Homo sapiens
gagcagggaacggggggcagccgaaagggaagacggcaggaggacgggcggcagcccggcagcgcacagccccagagga

SEQ ID NO: 108050 - RNA, 86 nt, Homo sapiens
agaaccgccaggagcggcagacggcaggccagcgcgcgcaaaaaccagacaccccacaccaccacccagacgaccaaaagggcacc

SEQ ID NO: 108051 - RNA, 72 nt, Homo sapiens
aagcaccgcccgcgacgagaaagacaccaccacgccgggggaggagaccccaaaaaagaggaaaaagaagca

SEQ ID NO: 108052 - RNA, 80 nt, Homo sapiens
gcgccccgcgcgcccggcggcgcgggccaagcagggagggagcaacgcgagccaagcagcaggccccaaaaaggagaaag

SEQ ID NO: 108053 - RNA, 104 nt, Homo sapiens
ccaaacggacgggagagccaaggaggaagaggggagggaagaacggccaccaaacgagggaaagagggaacggcggccaaagcgccagacaagggccgagcccc

SEQ ID NO: 108054 - RNA, 43 nt, Homo sapiens
gagccgcgacggcagcggcaagaagcgccccagagcacacagc

SEQ ID NO: 108055 - RNA, 74 nt, Homo sapiens
agcaggcaggagaggaaaagcgaaaagagacaagaggcaacgacgccacaccagcaagcaagagacacacaacg

SEQ ID NO: 108056 - RNA, 72 nt, Homo sapiens
aaccagagaccacagaaggacgggagaacaccccacagggaagaggccacaaacggagagagagacaccagg

SEQ ID NO: 108057 - RNA, 77 nt, Homo sapiens
caaaggcgcccgcccgaaagcaacagagcgggcccaaccacaggaccacggccaccgcgcggaagaggcgagaggga

SEQ ID NO: 108058 - RNA, 51 nt, Homo sapiens
acagccaagcaacgcacacaacagcagcagcgagaaccagccaaaacacac

SEQ ID NO: 108059 - RNA, 74 nt, Homo sapiens
agaaccacggaaaggcagcaggcggaggccacagccagaagaaaagaaaaggccccacccagagacccagcacg

SEQ ID NO: 108060 - RNA, 77 nt, Homo sapiens
agagcaaaccaaccagagaagagcggagaggaacagaaggcggaggaaacgcagacagggaggccgcacagaggagg

SEQ ID NO: 108061 - RNA, 76 nt, Homo sapiens
agccacggcgggaagaagcaaacgaagggcaagaacaaaaagggagagaccacaacacaggaccgccagacaggcc

SEQ ID NO: 108062 - RNA, 59 nt, Homo sapiens
ccgcacggagaaggcaaagcaggcgagaaccaaccccggaacccagaaaaacgcaagaa

SEQ ID NO: 108063 - RNA, 86 nt, Homo sapiens
cccgcccccggacacgcccccgccgccgccggagccgcagcacgcaggaggcaaagggaccccaagaaaccaaagggcaagagccg

SEQ ID NO: 108064 - RNA, 75 nt, Homo sapiens
agaaggcaacgccgcaggcacagaaaacaggccaggaacaagacagcagcagggcggccggacgcaccagacacc

SEQ ID NO: 108065 - RNA, 63 nt, Homo sapiens
ggacgcacagagaccggaagaccaagcaggagaaccgaccgggccaaaaaggggggacgcggg

SEQ ID NO: 108066 - RNA, 70 nt, Homo sapiens
ggacgggaagggcgacagcgcaaggagacgaagaaacagaccaagcacgaagcccgagcaaagaaaaggg

SEQ ID NO: 108067 - RNA, 42 nt, Homo sapiens
gaaggacacacccagccgcggcccagcccagaaacccagacc

SEQ ID NO: 108068 - RNA, 75 nt, Homo sapiens
gcagaacgggcggacgggcgcccagccagcggcacagccagggaccagacacagaggggggccagcgggagaaga

SEQ ID NO: 108069 - RNA, 81 nt, Homo sapiens
gggagcgcccgaggaacacgccgcaggccgcgggagagcgggggcgggaggcgggccccgggggcagcacccccagccagc

SEQ ID NO: 108070 - RNA, 94 nt, Homo sapiens
aagaccccgaccccgggaagcacgagcacgccaccggcgccagcgggcgagcagcccccgcgacgagcccccaacgagccaccaacaggaacag

SEQ ID NO: 108071 - RNA, 84 nt, Homo sapiens
gacggcgcggcagagccccgacgccacagaacggcacgcaaagaacgcccacaaggcccagaagaagagaaaaaagggaagaaa

SEQ ID NO: 108072 - RNA, 70 nt, Homo sapiens
ggaccagggggcggcgccaggacagcaccaacagggacgcagcaacgggcaggaaggaaggaaggcaaag

SEQ ID NO: 108073 - RNA, 78 nt, Homo sapiens
accaagaaccagggccgaccacacggagagaacagaggccggacccgcacagagaccagcgcagccggggaggggcgg

SEQ ID NO: 108074 - RNA, 72 nt, Homo sapiens
gcgaggccgccgcgcaagaaaaagcagggcgcaggcgaaaccgggccccaacagaggagagccagcaacggc

SEQ ID NO: 108075 - RNA, 65 nt, Homo sapiens
aggggcgaacccaagagaacgccgaccaggacagcgcccaacccaagaggcaacacaaacaccca

SEQ ID NO: 108076 - RNA, 61 nt, Homo sapiens
cggccacaacgcaaggagcggaaggcgcgaggcaacaagaggagagcaaaagacaacaccc

SEQ ID NO: 108077 - RNA, 76 nt, Homo sapiens
caggacaagcgccccaaaccagagggaaagaagacacaggggcccaagcccaccgacgccacgcggacacggcaca

SEQ ID NO: 108078 - RNA, 78 nt, Homo sapiens
agcgagcgagggggggcgcgccggaaaccggagcgcgcagcagaggcagaaacggggacacaagcgaaaggcaacggc

SEQ ID NO: 108079 - RNA, 73 nt, Homo sapiens
caacacaaagcagggaggcagcgccgacaacaccgacacagaccaacaacaaaacaaacggagagaggaggga

SEQ ID NO: 108080 - RNA, 66 nt, Homo sapiens
aagaagaccagacggcaaagcccaagaaccgggcagagaaaccggcagcggagcagcaggccagcc

SEQ ID NO: 108081 - RNA, 88 nt, Homo sapiens
aaggcccggaagaaagaggagcggcagagccgcggggcggcgacggcggcgcgaggaccgaccgggcccgcggacgaagaaggcaccc

SEQ ID NO: 108082 - RNA, 98 nt, Homo sapiens
caaagcggaccggagaagagcacaggaggggaaaggaaagggagaagcagaggccgggaacaggcagaacagcagggacaaggaaacaggccaggggg

SEQ ID NO: 108083 - RNA, 75 nt, Homo sapiens
cacagagaggccaaagccagagacagagcacaaaggaaacagaacgacagcccgcaccgacgccggcggccagcc

SEQ ID NO: 108084 - RNA, 77 nt, Homo sapiens
agggaacagagaccaagacgggaggggagggcgacaccggaggcagcacaccaagaggaacagaccggagacgagca

SEQ ID NO: 108085 - RNA, 81 nt, Homo sapiens
cagaagccgagcaacaccccggccaccgacccacaaggaaagaggagaaaccaaagaagcccggggcagcccaccgaacca

SEQ ID NO: 108086 - RNA, 78 nt, Homo sapiens
cccgcaaaacaacgagaaggcggaaacagcccgcaaaggggggccggaggccaagcagagggcagcgcagcagaagca

SEQ ID NO: 108087 - RNA, 75 nt, Homo sapiens
ccgacacaaagaacgaaccaagggggaaaggagaccccaggcaacacacgcgaaggggaagacccaaacaaagac

SEQ ID NO: 108088 - RNA, 74 nt, Homo sapiens
ccgggaaacaagagacgacgggaagccacaaggagaagagaaggagcgcgggcgcgccacgcccgccacacaca

SEQ ID NO: 108089 - RNA, 71 nt, Homo sapiens
cacaaagacaccacagcaggccgggggaaaagccagaaagccaaaggcaccaaagcaagggaagcgaaggg

SEQ ID NO: 108090 - RNA, 80 nt, Homo sapiens
cgccccccggccgggccagggccgcggcgccagccggcaacacagcacccggcggcaaaccaaacaaaaccagagcacgg

SEQ ID NO: 108091 - RNA, 77 nt, Homo sapiens
caacaacccaaacacacaccgagcacggggaaaagaaacacagcacacaaggcggagaggagccgccgcacccaggc

SEQ ID NO: 108092 - RNA, 81 nt, Homo sapiens
accggcgggaaccgaccggcgccaccgcccagcacggaggagcaagaagaacccacagggagcaggcccgagcccaagcaa

SEQ ID NO: 108093 - RNA, 83 nt, Homo sapiens
gccgcccggccgcgcgcagcgccaccgcgccgggagcccggcgcgcgcccggcagccgcggccgcgagcccacacaagacccg

SEQ ID NO: 108094 - RNA, 81 nt, Homo sapiens
cggggccagcgaccgacgcgcgggcgcgcgcgcgccggagccgccgccgccgccgcggccccgccagaaaccccaccacgc

SEQ ID NO: 108095 - RNA, 73 nt, Homo sapiens
cggcgccgggccaggggaccacgcgcgcccgccgccccgccccagaagcagccggaccggccaaacacacagg

SEQ ID NO: 108096 - RNA, 77 nt, Homo sapiens
acagagggccggggcaaccccaccgacggccagcgccccggagaagcaacagacccacgagacaagaaaggaccaag

SEQ ID NO: 108097 - RNA, 48 nt, Homo sapiens
cccaccgcgagagagcgaccagccacggacagcaaacccgaagaaacg

SEQ ID NO: 108098 - RNA, 70 nt, Homo sapiens
cgcccggccgggcgcgccgcaccccagcagcacccaagcaggaggaggcggcaggagaagcagagaagac

SEQ ID NO: 108099 - RNA, 89 nt, Homo sapiens
cgcccaggccccaaggagccacaccggaccagaccccaggaaagggagaccccacgcagggcagagcgcggcggcagcagagggccgag

SEQ ID NO: 108100 - RNA, 77 nt, Homo sapiens
acccggaaaaccggcccccaacgacaaaagagcacagcaagagagagagcaaacaccaggcgacacaccaagacacc

SEQ ID NO: 108101 - RNA, 83 nt, Homo sapiens
caccacccaagggagcgaccccaacagcaggaaagccccgaagacgaccccgacgcaggccaggagccgcggacagaagccga

SEQ ID NO: 108102 - RNA, 76 nt, Homo sapiens
acaggaccggaggcgccagccaaccgggacaagaagacgaggcgagaggacacccacagggaagagccagccacgg

SEQ ID NO: 108103 - RNA, 78 nt, Homo sapiens
gaggaggagggggcaaccagaggggccaacggacgacaggagacgagcgccaaagacagaagcaagcagaaaagagca

SEQ ID NO: 108104 - RNA, 59 nt, Homo sapiens
gggacgcggcgccgagagccgccgcaggagcccaagaggggaaggcgcgcacaaggcag

SEQ ID NO: 108105 - RNA, 58 nt, Homo sapiens
agaaggcagagaggggccccagaggagaaacaaggggaaacgaggcccaaggaaagag

SEQ ID NO: 108106 - RNA, 71 nt, Homo sapiens
ggagcggacggaaagggccggcccagggagaacgcaaaaccaccacccccacaaaaaacgcagggagaaaa

SEQ ID NO: 108107 - RNA, 79 nt, Homo sapiens
acagaccgagaccgaggagcgcccaccagaagcaggcgcccacccagagcaggagaaacgaccaagacagccccccggg

SEQ ID NO: 108108 - RNA, 82 nt, Homo sapiens
caggacggaccccaagcaagccgaaccaccgggaggaacgggccacaacacccggcaccagcggccacccgcccccagaccc

SEQ ID NO: 108109 - RNA, 75 nt, Homo sapiens
aacaaaggaaaaccgagcccaaagaagagcacgaaacgagcagggggagccagccaccgagacgccgacagcccg

SEQ ID NO: 108110 - RNA, 76 nt, Homo sapiens
cccaaagcagcaaccaagaaaacgggaggcaccacagaaaagcaaggcgaaggaggacaggagacgaccgagcaga

SEQ ID NO: 108111 - RNA, 66 nt, Homo sapiens
cgcagagacgcacgggcagaccaacaacggagaacaaacggagccaccaccaccccgagagacgga

SEQ ID NO: 108112 - RNA, 71 nt, Homo sapiens
cggacgagcgagagggggccaccccgacaccacacggaggccggaccgggcagcccggccccccaggggga

SEQ ID NO: 108113 - RNA, 90 nt, Homo sapiens
gcccgcagaggccaagagaaagcccgaagcagaagggcacaccggaagcagaagagggaagagaaggaacggggaccggccaagacgagc

SEQ ID NO: 108114 - RNA, 91 nt, Homo sapiens
agcgccaccaccacgccagccgcaccagccgcccaagccgcacagccgcggcggcagcagcaggagagggacccggcaaagagagaggcac

SEQ ID NO: 108115 - RNA, 84 nt, Homo sapiens
ccgaggaacacgacccgaccgaagcgcccagccgagggaagaggaggaaacaaaacaaaagaccgggcccgagggaccgccaac

SEQ ID NO: 108116 - RNA, 58 nt, Homo sapiens
gcgcgggagccggggcaccacagagagcgggcgggaccaggacggaccaacacaagca

SEQ ID NO: 108117 - RNA, 80 nt, Homo sapiens
ggaacaggcggcgcgcgcggcgcgggacgcgcgcgggcacccacggagccccggggcggcacccgccggcgccccccggc

SEQ ID NO: 108118 - RNA, 74 nt, Homo sapiens
gcgcgagccgaccagccagcccacaagaaccgcgaggacagagagagggaaagggcgggggcaagacccagaga

SEQ ID NO: 108119 - RNA, 78 nt, Homo sapiens
gacgcaagacccaaacaaaaagacacgaagaggaggaagcccagggcgggaggaacggcaggaggaagacaacgcgag

SEQ ID NO: 108120 - RNA, 86 nt, Homo sapiens
caggcggcacccgccccgaggaggggaccagacacagacgggacccggaggacgacgcgcggccgggcgccccccgcgagccaggc

SEQ ID NO: 108121 - RNA, 80 nt, Homo sapiens
cacggcacggaaggggggcggccgggaggaagcgcaagcaccccccgaccgcccccacgacgagcaacgagccaacaaac

SEQ ID NO: 108122 - RNA, 84 nt, Homo sapiens
ggaacccggaaagcgcaggcggcaggaggaggcagcgaagacagcccgcaggaaccaggcacggcaagggggccgccagacggg

SEQ ID NO: 108123 - RNA, 74 nt, Homo sapiens
ggaacaacgcacccaccagcaaagaaagggaagcagcgggagaggagggaagacagaggaagaggaagacaaac

SEQ ID NO: 108124 - RNA, 71 nt, Homo sapiens
cacagaccccgaccgaaggagcccaggggagcccagccggcgggggccgagagaagcaacgcacgcggaag

SEQ ID NO: 108125 - RNA, 57 nt, Homo sapiens
ccacgcggaggaggacgaggacacggccgcggacagaacacaagccagcaggaggca

SEQ ID NO: 108126 - RNA, 76 nt, Homo sapiens
cccaggaagcgcgagaccaggacggcgcgggaaccacgccaacggggcggggagagaggagagaaagaccccaacc

SEQ ID NO: 108127 - RNA, 88 nt, Homo sapiens
ccgaagagccaaccacaggagggaaaccacgcaggcaaacgagaaaaagccgagaaggccagacgggacacccggacgcaggcccggc

SEQ ID NO: 108128 - RNA, 41 nt, Homo sapiens
ccccacccgcgaccaaaaaggaagcgacacagaacggggag

SEQ ID NO: 108129 - RNA, 77 nt, Homo sapiens
gagacagccaaggggagaccacaccaagcgggagacacaccacgccaagggacacaggaacgccacaagaaacaaca

SEQ ID NO: 108130 - RNA, 74 nt, Homo sapiens
gagcaggaccgcacgcggaggcggcgcccgccccaccaagaaaacacagggagcgcaacagagacagacccacc

SEQ ID NO: 108131 - RNA, 74 nt, Homo sapiens
agccaaccagccacagcccaccgaggcaccacaggaccacgccgcgaggcaaacgcaagggaaaaaagggcagg

SEQ ID NO: 108132 - RNA, 58 nt, Homo sapiens
agaagggaaggcgcgaggaggaaaggaggacgagcgccacagaccgggccaaacaacc

SEQ ID NO: 108133 - RNA, 74 nt, Homo sapiens
aaaaacagacgggggaaaaaaaggagcgcccgagcgaccaaagaccgggaaaagggcggcaccaggaaaaagaa

SEQ ID NO: 108134 - RNA, 62 nt, Homo sapiens
agccacagaaggacacccaacgcacccgcccccaaagagagaagcggaccacaaggggcggg

SEQ ID NO: 108135 - RNA, 87 nt, Homo sapiens
caaagaacagcgcagaagccagagaaagcgaaaaaggaacagaggcaccaagcagaggaacaccccagagagaccggaccaaacaac

SEQ ID NO: 108136 - RNA, 99 nt, Homo sapiens
accgaggacggcggccggagggcccacaagaacacaaaccaggcccagggcccgacaagagaggcggagccacccccacaacggaccaggagaagggcc

SEQ ID NO: 108137 - RNA, 76 nt, Homo sapiens
gaaaagccaaaagaaaccgaaggaggaaaaagggccacaacagcagagggaacggaaaaagcaacaaaacacacca

SEQ ID NO: 108138 - RNA, 77 nt, Homo sapiens
acagaagcagggaggggaggagaagccaagcacggccagaggcaccggcgcgcggagacgcgccggagccaccccgc

SEQ ID NO: 108139 - RNA, 77 nt, Homo sapiens
ccagcgccgccagacgaccgcgccacccgcaggggaggaggaggcggcccggaccggaggaagcagaggcaggaagg

SEQ ID NO: 108140 - RNA, 60 nt, Homo sapiens
gaacccggacccggcgagcgaaccaccgggaggcgaaaagagacagggcaaacggcccag

SEQ ID NO: 108141 - RNA, 52 nt, Homo sapiens
agacgcagggcgcccccggaacagaagaggggccacaaagaaaccacacacg

SEQ ID NO: 108142 - RNA, 63 nt, Homo sapiens
aagggacggacaaaggaacaggaccagaggaagcggcgcgaggcagccgaggagcacaccgca

SEQ ID NO: 108143 - RNA, 75 nt, Homo sapiens
gaacagccgacaaaacagggcccacccgaagcggccagccgcaggaaccggaaacagcagaggcacacaggacaa

SEQ ID NO: 108144 - RNA, 57 nt, Homo sapiens
gaggaggcagccaagccgagccgccacccggcgggagacaaccagagccggcaggac

SEQ ID NO: 108145 - RNA, 72 nt, Homo sapiens
ccggacacggggaccaaaaacggacaccagaagaaaaaagcacagcaacgcggcgaggaagagggcagacgc

SEQ ID NO: 108146 - RNA, 86 nt, Homo sapiens
gcggcgaccacggacaaaccgcccaggcaagcggacccgggaacgagggagaaccgaagaacaggaggccagcagaggggaacaag

SEQ ID NO: 108147 - RNA, 85 nt, Homo sapiens
ggaagaacaacagaacgcagagaagggcccccgagcaacagacagaaaccgcacaggaacggggaaaaaggcagcgccggccgag

SEQ ID NO: 108148 - RNA, 79 nt, Homo sapiens
gcggggcggaggcaccgcgcggggggaacggggcgggcgggccgcgcagcccccggggacccagagacagggcggccgc

SEQ ID NO: 108149 - RNA, 83 nt, Homo sapiens
aagcccaggaaagcagaagggaagaaagcggaggcggcggcgcgaaaagagaaaaaagaaaagagaagagaaggaagaaaaag

SEQ ID NO: 108150 - RNA, 76 nt, Homo sapiens
gaaagagcgaaccacagcgcgggaggaaaaagcagcgaaacagacaaccccccacacaaccggaaaaagacgagag

SEQ ID NO: 108151 - RNA, 75 nt, Homo sapiens
agaaaggagaccacaggcacaagagagccgggaaaaagacaccccacagcaccagaaaagaaagcacaaaacaga

SEQ ID NO: 108152 - RNA, 77 nt, Homo sapiens
gcaccaggccaccacagaaacaaaagcaacaaagagggagagaaaggccgggaaaacaacgggaagaagagaaaagg

SEQ ID NO: 108153 - RNA, 81 nt, Homo sapiens
cgacacgacgccgccggcaggcccgcgcaccagacaaccgaacgagagcagcagggggagcaggcggggggacgggccagg

SEQ ID NO: 108154 - RNA, 75 nt, Homo sapiens
acgagggaggagccagacacaacagcagggaacacaggacagggagcagaaggccccagaaacagcagggagaag

SEQ ID NO: 108155 - RNA, 87 nt, Homo sapiens
caagaccgcagaccgaccccgagagaggacggggcccgcgaccggaccacacccacaaaaagagagagaccggacaagaagacgagg

SEQ ID NO: 108156 - RNA, 77 nt, Homo sapiens
gacaggagaaacaaagacagagaggcgacaagacgccccagaggcaaaaaccgagagagaaagacaagcaaaggaac

SEQ ID NO: 108157 - RNA, 71 nt, Homo sapiens
aaacacaagaagagagcgagaacaccgcaaggcaggacgccccggacgacaccaggaccgaaacccgaaaa

SEQ ID NO: 108158 - RNA, 43 nt, Homo sapiens
cccagaccaccccagagcaacaggagagagggccaccaaaagg

SEQ ID NO: 108159 - RNA, 67 nt, Homo sapiens
caccccagaacaccgaccagggaacgcaacaaagaacccggacgcacaaggagcaaagaccgcagga

SEQ ID NO: 108160 - RNA, 78 nt, Homo sapiens
gccgacacgacagggcggcccagggcggagaacggaaaagcaccaggaagcagagaggaccgcagaagggaaggagag

SEQ ID NO: 108161 - RNA, 74 nt, Homo sapiens
cagcccgccccgccacgccgcccgcgccgaggacgcggagcccagcaagggcacgagcgcccaaacgaaagaac

SEQ ID NO: 108162 - RNA, 66 nt, Homo sapiens
gacccccagcaggccggcgcacaaaaaacaacgagaaagagagaaacaacggacacccccgggaac

SEQ ID NO: 108163 - RNA, 80 nt, Homo sapiens
agcccccaggaacagggcaaaggagagcacaaccacgcagggaagcccaggggcagagaaggcggagaaaagaacagagc

SEQ ID NO: 108164 - RNA, 73 nt, Homo sapiens
accaacaagacccccgcgaggacgaccccgcccgaacgcaaacagagacaggaagggagagcaaagaaaacca

SEQ ID NO: 108165 - RNA, 77 nt, Homo sapiens
acgaacggggccgcgaggaggccggaggccgccgacgaccgcacccccccaggcagcagcagcagcaccggagacaa

SEQ ID NO: 108166 - RNA, 55 nt, Homo sapiens
gcagcggcagacccaaggagccggcaccgcgcgccgcgcccccccaccagccccg

SEQ ID NO: 108167 - RNA, 46 nt, Homo sapiens
gccccggaggcggcgaggagcggcgggcaaacaccagcaacacccg

SEQ ID NO: 108168 - RNA, 54 nt, Homo sapiens
gagcgcgggggcggcccgccccggacccgagcagaggacgggagaagcgccacc

SEQ ID NO: 108169 - RNA, 70 nt, Homo sapiens
gcagcaccggggggaagccaggcacacccgagggccccgagaagggcccgaagacaccccgccaaaagga

SEQ ID NO: 108170 - RNA, 77 nt, Homo sapiens
ggggccgcccagaccccagaagagacggaaagccaagaggcccaagagagaaccagaccccgaggaacagcacagcc

SEQ ID NO: 108171 - RNA, 114 nt, Homo sapiens
ccggcaccgcggagcaaaaaaagagcccgcaagaagaacagagacagcagccaaacccccaggaaaggaggcccaagaggcgaaacgcaacacggagccgccaccgcccaccaa

SEQ ID NO: 108172 - RNA, 81 nt, Homo sapiens
agcaaagcccaagagacagcagacggagcagaaccaggcaagaggagacaagcgcaagcagccagagcccgggcgcaaaga

SEQ ID NO: 108173 - RNA, 110 nt, Homo sapiens
aaaaccgagcagcccccaggaacagggcaaaggagagcacaaccacgcagggaagcccaggggcagacgggagcgggccgagaaaaaccacagagacacacgcaagccga

SEQ ID NO: 108174 - RNA, 77 nt, Homo sapiens
cccgccgacccgggcgccgcgccgcacgagcaccagccagagccaggacgggccaacgcacggcccggcagagccag

SEQ ID NO: 108175 - RNA, 69 nt, Homo sapiens
ggacacgggaagagaaccaacagaacaaccagcgggaccagccgcagcaagccagaagaacaaaaaacg

SEQ ID NO: 108176 - RNA, 87 nt, Homo sapiens
gccggcaaaaggaccagcaccagaccaaccaggaacagccgaagaccaagaccagcggaggcccgcagccccaaggacagccagcgg

SEQ ID NO: 108177 - RNA, 40 nt, Homo sapiens
aacaggccgggcaccaaggcgcagaagagcagaagggccg

SEQ ID NO: 108178 - RNA, 83 nt, Homo sapiens
gggggaggcggcagcgcaaccacgagacggccccaagggcagagcggcgggaaaccaccaacaacacccccaaaccaaaacag

SEQ ID NO: 108179 - RNA, 81 nt, Homo sapiens
gggcccacgccgcgggggagaagccccggcccccgggaccgggccgccgcccacagaccagcccggggcgccgaccccagc

SEQ ID NO: 108180 - RNA, 73 nt, Homo sapiens
gggcggagcggcgacagaccccaaaacacgagacgcgcagaacgcgggcagggacgggggccggaggccagga

SEQ ID NO: 108181 - RNA, 72 nt, Homo sapiens
gagggagggccgagccagccgcggccggaggagcccccaggccaaaacgcagaacaaagcgggacagacccg

SEQ ID NO: 108182 - RNA, 83 nt, Homo sapiens
gaaccagacgagagacagaggcgaccgcgcggcagaaagcccacgccaggaggcaggcgccaccgggcgcacaacaaaggcgc

SEQ ID NO: 108183 - RNA, 74 nt, Homo sapiens
gaagcagagggcagggggcaaacaagccgaccggaaaaagccccggcgcaggaacacaggacggccgaacacga

SEQ ID NO: 108184 - RNA, 41 nt, Homo sapiens
accagagaggagggagccgggggaaggcagccaggccacac

SEQ ID NO: 108185 - RNA, 71 nt, Homo sapiens
agaagcggggcccccaacaggagaaagcgaacagagaagcagaccaaaggagccagggaacccgacgacca

SEQ ID NO: 108186 - RNA, 86 nt, Homo sapiens
cggagaggcggagacggccaccgccggccgggccagacaacaagcccggcccggaagagaaggcgccgaccccgacagaacgggcc

SEQ ID NO: 108187 - RNA, 88 nt, Homo sapiens
cgggccgcgaagcgcagcgccagacccaaggcccccgaggagcgcgggcgccgaggaaggagggaagacggccggagacaaggcgcac

SEQ ID NO: 108188 - RNA, 94 nt, Homo sapiens
aagaagagaaaacgaggacccaagaagcagaaggagaacaagccaggaaaaccccgaaaacgcaagaagcgagaaccaggagccgccaaagggc

SEQ ID NO: 108189 - RNA, 61 nt, Homo sapiens
ccgcccgagggaggcacgacaggcgggagccggagacaccagacagcaaagagcaaaagaa

SEQ ID NO: 108190 - RNA, 60 nt, Homo sapiens
ccacccaccaaaccggagggggaaaaaacccaaggcgcaaaggagggagccacaccaaag

SEQ ID NO: 108191 - RNA, 40 nt, Homo sapiens
aagggggccgcccgaccaaggaacaaagcaaagcagcggc

SEQ ID NO: 108192 - RNA, 79 nt, Homo sapiens
ccagaagaaccgggaggagaagaaaccgcagaagcaaaagaagaacagcaacccgccaggaccacgcagacccaccggg

SEQ ID NO: 108193 - RNA, 79 nt, Homo sapiens
cccaggagccgccccgcccggggacgaagagcgcagcccccggcggggccccccccccgcaaccagccccacaacggcg

SEQ ID NO: 108194 - RNA, 76 nt, Homo sapiens
gaggagaagacggcaaaaaacgcgggggagaaaacggagggagacacacaggcggggaaagcccagcaacagccag

SEQ ID NO: 108195 - RNA, 71 nt, Homo sapiens
gggcacgcgaagcgaagcacaggccaccaacagggaacgccggaaaaagggaaagaacaaaacacacagcg

SEQ ID NO: 108196 - RNA, 74 nt, Homo sapiens
cgaaaagaaagaccaagacaaaaaggcaaacccaacacggcagggccccgccggaccccgacggcagcaggacc

SEQ ID NO: 108197 - RNA, 53 nt, Homo sapiens
ggacaccccgccaggcaaaagacaaaagagaacgaacgcagaccgggaaaacc

SEQ ID NO: 108198 - RNA, 58 nt, Homo sapiens
gcgggaaccgccagcaaaccacacagaccggaacaggggcgggcggaagcacccagcc

SEQ ID NO: 108199 - RNA, 73 nt, Homo sapiens
aagcagagcaagaaccaagaaggaaggaagccgaaagccaaacaagagaagggggaaacaaacggagaacaca

SEQ ID NO: 108200 - RNA, 71 nt, Homo sapiens
ggcggcgcgccgcggccggccacgcggccgagggagcaacaagagcagaaaggaagaaccacccgcccagg

SEQ ID NO: 108201 - RNA, 71 nt, Homo sapiens
aaaggacgcccacaagagaaacggacaggaaggaaccaagacaggcgcccagggcacaaaggggcgcgaag

SEQ ID NO: 108202 - RNA, 83 nt, Homo sapiens
agcaaccccaagcaccacaaaaaccacgagagcccgcccaacaaacagaggacaggagggggacagacaacagagcaacgcaa

SEQ ID NO: 108203 - RNA, 72 nt, Homo sapiens
aagcacacccccaggaggcagccagcaagcccaaagacaaaccaagaaccagaaacacaaacccagcccggc

SEQ ID NO: 108204 - RNA, 69 nt, Homo sapiens
gccagggcaagaaacaggaaaagccggcagagaacggccccgaaggcacaaacgcagaaagggaggggg

SEQ ID NO: 108205 - RNA, 77 nt, Homo sapiens
gcccccggagagagcacgaaggacccagcagggcaccagcccggggccgccaagcaagagaccacgcgagcggggaa

SEQ ID NO: 108206 - RNA, 70 nt, Homo sapiens
gcgagagagcagcgcaacaggaagacccaaggaagaacaaggggccccgcggggcaagaagaggccagcc

SEQ ID NO: 108207 - RNA, 84 nt, Homo sapiens
ggagcggacgggacaagacagaccgcaggaccacgggcggggacagagagcaccagcacccacggcaccgcccccccacgcagc

SEQ ID NO: 108208 - RNA, 73 nt, Homo sapiens
cacagaggacaaacaccacgggagaacagagaagggccacacagcgaggaagccacgcgaaccccaccaggac

SEQ ID NO: 108209 - RNA, 76 nt, Homo sapiens
agagcgacggaaccggagcaggccggcgccacccgggcccggggcccgcccaccacaacaccgacacacaagcaca

SEQ ID NO: 108210 - RNA, 82 nt, Homo sapiens
ggacgaccacaaagaaagagagacacacaacagcgaagccggggagcagacacaaagagccaggagcaggccacaaacaagc

SEQ ID NO: 108211 - RNA, 77 nt, Homo sapiens
ccggcgcaccgaaagagggcaggacacacaggcagaaggcggcagggagcacgcaccaggagcccacggcccaccca

SEQ ID NO: 108212 - RNA, 87 nt, Homo sapiens
ggggggaggcgaggaggcccgagggcccagacaagcccaaggaggagcggagaaggaccaccccagggggaagaagggaagccagca

SEQ ID NO: 108213 - RNA, 83 nt, Homo sapiens
aaggagagagcccgcaggagcagaagaagccaaaaacacgggcgggcacgaaaggaaagccgagaaggcacgacaagccggac

SEQ ID NO: 108214 - RNA, 76 nt, Homo sapiens
agcaagaaaggcaaggaaccgaaaggaacggcagacaaaaagcagagaaaacgagcaccaaggagacagacgagcc

SEQ ID NO: 108215 - RNA, 83 nt, Homo sapiens
ggaccagcaaggcggcagagcaaggggcacgcagaaggaccggccacgcgccccgcagaggaggacacccagagacagagacc

SEQ ID NO: 108216 - RNA, 75 nt, Homo sapiens
caggggagcagagcagggacggcggggaacggccgaaaggacgaccgcacggccaaagagccgagcagggaagag

SEQ ID NO: 108217 - RNA, 60 nt, Homo sapiens
accgccccgagacgagacccagccagagagcaaaaaggaccccgccgaagaccaaccaag

SEQ ID NO: 108218 - RNA, 78 nt, Homo sapiens
ggaacagcgcaaccgaaggcacggggcaggaaacagaagagcagcacggcccagccccaaccgacccagagagaagcc

SEQ ID NO: 108219 - RNA, 61 nt, Homo sapiens
gccagaaagccccgacgagccccggagaagccggccaagcacccacggcgaaggacaagac

SEQ ID NO: 108220 - RNA, 82 nt, Homo sapiens
gccgaagacacgcgacccggagacagcccaaaacccggaagagcgccccaggagaaacaaggaggaggaccgggaagaagaa

SEQ ID NO: 108221 - RNA, 69 nt, Homo sapiens
ccacaggacaggaaggaggcgcggaagcagagcagacgggggcggaagaaacgggcagaacaccacgga

SEQ ID NO: 108222 - RNA, 72 nt, Homo sapiens
cccgccgacgaggaacggcggagcagggagcccaaagaccccggagacagggccaagaccgccagcagagag

SEQ ID NO: 108223 - RNA, 58 nt, Homo sapiens
cgcgcgcccgaggcgaggaggagcgcggcgagccgaaagaagcagaggaagaagcccc

SEQ ID NO: 108224 - RNA, 74 nt, Homo sapiens
cagcaacaaaaaggacgcagcagaccgacaccagaaagaagccgggcggacagagaagggaaacaaccagaagc

SEQ ID NO: 108225 - RNA, 77 nt, Homo sapiens
ccagcgggggaaccggcgcgccggcgcgcggcgcggacaggcccaaacgaacccaggagaaacgagagggacagcaa

SEQ ID NO: 108226 - RNA, 68 nt, Homo sapiens
cagacgcagggcgcccccgacagaaaagagagacaaaaagcaaacgagcaacacgagcaaaagggcga

SEQ ID NO: 108227 - RNA, 76 nt, Homo sapiens
acagaaccaggccaagaaagcccagcgggaaagacaacccgaagcgaggggccaggaagacaaccagcggagcgac

SEQ ID NO: 108228 - RNA, 92 nt, Homo sapiens
cgacggcacagcgcacaagaaacccaagcgcgagaaccggcccccggacaccggcccggcggcgcccgcaacgcaaccccgcacgccccacg

SEQ ID NO: 108229 - RNA, 83 nt, Homo sapiens
gcccggacgagcacgggcgagaaggccacgaaaccccgaggcggggacggacagccaggaccgcgaggcgggcggccgccagg

SEQ ID NO: 108230 - RNA, 76 nt, Homo sapiens
ccagcgggccggacggggcggggggaacggcggcagagaagagacagcgggggcaaggaggccccccacaggacgg

SEQ ID NO: 108231 - RNA, 85 nt, Homo sapiens
gcacccgaggggcgaacaagcaggaggacgcccaagaaaaggggcacggagcaccagaccggaggagagcgacacagacaagggg

SEQ ID NO: 108232 - RNA, 73 nt, Homo sapiens
cacagggcagaaaagggagcaaagagaggggaaggacaaacacgaaaaacaacacggaaccacaccacgacaa

SEQ ID NO: 108233 - RNA, 66 nt, Homo sapiens
ggggcaaggggcgacacacacgcgggccccggaaggaaagccgagcaggggcgggccaagaagagc

SEQ ID NO: 108234 - RNA, 70 nt, Homo sapiens
gagaaacccccacccgggcccgcgcggcggcgacccaagccccgcaccgacggggacacagagccacaaa

SEQ ID NO: 108235 - RNA, 70 nt, Homo sapiens
cggagggccacgggcacccggaaacaagccacgaaggagagaaaaccagcagcagcgcagcagagaccag

SEQ ID NO: 108236 - RNA, 65 nt, Homo sapiens
cggccggaaaaccgcaagaccacagcaggacccggaaaaaagaggagcggaggagcggaccgcac

SEQ ID NO: 108237 - RNA, 41 nt, Homo sapiens
ccaggacagacgcacagacaccgcagcgggaacaagccaag

SEQ ID NO: 108238 - RNA, 67 nt, Homo sapiens
cggaggggaccccaggcagcaggccaacgcagccgcccgggccccagaaccagcgccggggacaccg

SEQ ID NO: 108239 - RNA, 65 nt, Homo sapiens
gacgggggggcggcccggccccgcagaacgaagcgcgcggcaggcgcgcgccgccccaggccgca

SEQ ID NO: 108240 - RNA, 57 nt, Homo sapiens
aagaggccaagagggagggaggaaagcacccacccccagagaaagacgaccgccaac

SEQ ID NO: 108241 - RNA, 80 nt, Homo sapiens
agcgcgggccagcgacccgcgccagcgcccagggggggaaaccaccgcacccggaggagaagaggcgcggaacaagcggg

SEQ ID NO: 108242 - RNA, 57 nt, Homo sapiens
aaagaggaagaccaaagggcacacaaggagcccaggaagaccagcaaagagagcgag

SEQ ID NO: 108243 - RNA, 79 nt, Homo sapiens
aaaaaaccaacagccccccaggcaaacaagcagcaaggaccagcacgggagaacaaacggagaagaaaagcgcaccgcc

SEQ ID NO: 108244 - RNA, 77 nt, Homo sapiens
gaagaagacaggccgggagaggagcaagaggggggggcccccccgaagaaaggaaccggggagcggcgaaaaaaaag

SEQ ID NO: 108245 - RNA, 71 nt, Homo sapiens
gggcgaccaccaaaaaaacggcaccaagcaaagcgccaaggagccaggccacaaaaacgaagaaaaaaaag

SEQ ID NO: 108246 - RNA, 84 nt, Homo sapiens
aggacacgaggcggcgggcggagacaggaccgcggcgagcaaggcaccgcacgggaggcacacggggacgcacggagggaagaa

SEQ ID NO: 108247 - RNA, 83 nt, Homo sapiens
cccgccgaagccgcgccagaacgaccccgagaggcgcccgccccgagagcaaggccaaggggaagggacgccgccagagagac

SEQ ID NO: 108248 - RNA, 68 nt, Homo sapiens
gaaggaccaagaaccaggaaacaaaaagccaacggaaaaagaaacggcagagcacaggaccgaagaag

SEQ ID NO: 108249 - RNA, 58 nt, Homo sapiens
aggaccccgagcggcaggagccggaccgggagggcccacaacaccaccaccccccaga

SEQ ID NO: 108250 - RNA, 79 nt, Homo sapiens
cgcggcggggcccccccgcgaccccacgagaaggacaagcgcggacgaggagagcagcaaccagagaaagcccgaggcg

SEQ ID NO: 108251 - RNA, 85 nt, Homo sapiens
gccgcccagcagccggcgcaggccagagagggcccgggaagagagcgaggagacaagggaaagacaaggagccgggccgagaaac

SEQ ID NO: 108252 - RNA, 65 nt, Homo sapiens
ggaagaccgcgcccgcggagagcccaaacaccaccaccaaggggacacaggaccagcgccggaga

SEQ ID NO: 108253 - RNA, 76 nt, Homo sapiens
aggggggcgacgagcccgcagcaccaacccacgggaggggaacagcagggcagcagagaagaaaggggaaaaacac

SEQ ID NO: 108254 - RNA, 37 nt, Homo sapiens
ccaaaacgggacagaagggaacaaccaagacaaacgc

SEQ ID NO: 108255 - RNA, 103 nt, Homo sapiens
ggggccgggaacccgccggggagaggcacccgagacccacggagaccgcgaagcggggaaagccagggagaagacaagagaaccgaggaaggccgcaacaaac

SEQ ID NO: 108256 - RNA, 67 nt, Homo sapiens
gaaaaaggaagagagcacgcagccaggaaaccacgagacccaccccggggaagcacaccccagcgcg

SEQ ID NO: 108257 - RNA, 82 nt, Homo sapiens
cgcagaaccaggcaccagagcaagacagcggaagaagacccagggaaacccccaggcacccaggaaaggaacacaaagcgaa

SEQ ID NO: 108258 - RNA, 62 nt, Homo sapiens
aacgaggaaggagaaacgggagcagaccccacacagcggagaaagaagggacggggcaccgg

SEQ ID NO: 108259 - RNA, 75 nt, Homo sapiens
gcccccgagggcgggacacaggaaggacaacagaccgcggcgccagcaaggaggccaaggagcagcccgaccgac

SEQ ID NO: 108260 - RNA, 83 nt, Homo sapiens
cgcgcccaacacccagaggagcagcgaacagaggccagccggggcacccgaggccgagacgaccacgccggccgcgaggaccc

SEQ ID NO: 108261 - RNA, 79 nt, Homo sapiens
aagaaacgagaaaaccagcaagaccaagaacaagcagaagcacccaaaagagagaagaacgccaggcacaaaacaggac

SEQ ID NO: 108262 - RNA, 52 nt, Homo sapiens
cgcggaggcccaaccgaagaaaacaaggcacagggaaggacccagaacagag

SEQ ID NO: 108263 - RNA, 90 nt, Homo sapiens
ccccgggagaccagcacggcccaagaagaccaacacagaccgcagcccccggcgccaccagcagccaaagcggggaagcgaggggcagcc

SEQ ID NO: 108264 - RNA, 73 nt, Homo sapiens
agacccgacagagcgacccgaagcgccggagaacaacaagaagaaacccaccaagagaaaacgggcacaccaa

SEQ ID NO: 108265 - RNA, 77 nt, Homo sapiens
acaagcaacgaaagcccagccagccaaggacgcgacaaaggaccagccagaaaagacacgcggcacaggagaaggaa

SEQ ID NO: 108266 - RNA, 78 nt, Homo sapiens
agaggaggccccccagccacgggaacgcgccacggcccaggcaagcccagagaagcccggcccaaacacgacccaacg

SEQ ID NO: 108267 - RNA, 61 nt, Homo sapiens
cgacgccccaggggaaaacccccgggaccagcggagaagcggaggagaccaaggaggccac

SEQ ID NO: 108268 - RNA, 76 nt, Homo sapiens
gaggagagaagagaagaaaggaggaagggaaagcagcaacacaaccaggggaggaggaggcgagggcaagaaacca

SEQ ID NO: 108269 - RNA, 67 nt, Homo sapiens
ccagcccccccgaagacgccgcgagcacaccgcagaaccaggggggagaagcagaccgcaccaggcg

SEQ ID NO: 108270 - RNA, 51 nt, Homo sapiens
ggcaagacccaccccacggacccaccgcgcagacgagcgggagcaagaccc

SEQ ID NO: 108271 - RNA, 81 nt, Homo sapiens
cggggggccacggcgccgccggcgcggccggcacacgagaacaggagggccaaccggggaaggggagcagagagcacacac

SEQ ID NO: 108272 - RNA, 75 nt, Homo sapiens
cggaggccagaaaaggaaacgaccccggccgagcgaggaggaacgaagcagagcccaacaggggagccgagaagc

SEQ ID NO: 108273 - RNA, 77 nt, Homo sapiens
aaacagcggaaaacacgcgggcgcaggaaccgaccagacgggaaaagaaacccggccccgggggcgccgagggcaca

SEQ ID NO: 108274 - RNA, 80 nt, Homo sapiens
cagacggcgggggcacgacagcgcaaggaggccgcacccaaggccgcagacaagccggccagaaggaggacaggaaaaag

SEQ ID NO: 108275 - RNA, 83 nt, Homo sapiens
cgcgagccgggaggaggccccgggaaggagccaccaaacaagcagacagacgcgaagcaaagcgccacccagaagacgacagc

SEQ ID NO: 108276 - RNA, 81 nt, Homo sapiens
ggagcaaagcagcggcgcagcccgggagcagagggaaggcaacacgagcggaagaacacacaccgggaccgcgagcagcaa

SEQ ID NO: 108277 - RNA, 74 nt, Homo sapiens
cggccagcccagcccccgccgcgagaaggagggggcagagcacggcaggcagaaggggccaacccgggggaacg

SEQ ID NO: 108278 - RNA, 86 nt, Homo sapiens
cggggaggcagcgcgggacccagcccaggcggcgcggacggggcggcgaacaacccagccgccagcccagcccagcccagcccagc

SEQ ID NO: 108279 - RNA, 55 nt, Homo sapiens
aacaagcaggaaaagagagaccagcggagaagcgaaacccgagagagccaggcca

SEQ ID NO: 108280 - RNA, 61 nt, Homo sapiens
ggcggcgcgcgacccccgcgcagggcggagaacggaaaagcaccaggaagcagagaggacc

SEQ ID NO: 108281 - RNA, 75 nt, Homo sapiens
gaaggccggaagagaaggggaaaagacgcacgcaagagaggaccgagcgaaaaaaaacgaaagagaaaaaaacag

SEQ ID NO: 108282 - RNA, 94 nt, Homo sapiens
gacgcacaggcgcaagacacaccggaggcgacggccaggccacagacaagcagaccggaagaccgacggaagaccacaccccgagggagcccag

SEQ ID NO: 108283 - RNA, 81 nt, Homo sapiens
aagaacaccggagggcggcggaggacgcaaaacaccgagaggaacagcagccggaagcgagggccgggcagaagaagcacc

SEQ ID NO: 108284 - RNA, 101 nt, Homo sapiens
gaaagggaagcagggaaaacaggaaggaaccagccaaaaagcaaggaggaccccccccagaaaaccaagcgaaaccccaaagggaagagacgcgaaagcac

SEQ ID NO: 108285 - RNA, 84 nt, Homo sapiens
agagcacgaaggacccagcagggcaccagccgcccgacacacggccaaaacggaggagaacaagaagaagggcaggagccacag

SEQ ID NO: 108286 - RNA, 80 nt, Homo sapiens
caaccggacccgcaagcagcccaccacgccacaaacgccgcaccaggcgagcagcgcccccgcggccgcgcggggcgcag

SEQ ID NO: 108287 - RNA, 107 nt, Homo sapiens
ggagcgagagccgggaacagcccaagaggaacaaagacggagagcccagagacacgaggaagacaaggccaaagcccggaaagaaaaggaaacgagcgcacccagac

SEQ ID NO: 108288 - RNA, 79 nt, Homo sapiens
agacgcacagagccacgcgagcgaccgccccgaggagagagcggcgcgcggagcggggagcgcgcaggcagcagacgag

SEQ ID NO: 108289 - RNA, 74 nt, Homo sapiens
ggccaccccaccccagagagcggaccaacgagcaagagaaccacccaaaagaccgaagcagaagacaccacgga

SEQ ID NO: 108290 - RNA, 81 nt, Homo sapiens
cggccaccggcgggaggaacaaaaggagcccccaacaagcccaagaggagagaccccagaggagcgcagaagcgagaggag

SEQ ID NO: 108291 - RNA, 57 nt, Homo sapiens
cagggcgccaaagcgagagagggaagcgcccggccggggggccgaagaagccagggg

SEQ ID NO: 108292 - RNA, 87 nt, Homo sapiens
cgccgccaccgagccgggcccaccccccaccaaggaagcgccggccgcccgcaggacaccgagggcccagccgcgcaccagcgaccg

SEQ ID NO: 108293 - RNA, 77 nt, Homo sapiens
cgacaccaccgcgcgcacaccggaccccggcgccggcccccaaggggcacaacaggggcgacgcgccggcccgggag

SEQ ID NO: 108294 - RNA, 80 nt, Homo sapiens
cggcaacgacggagcggagaaccacaggacagcagggaagaacggaaaccagagaaagaaacgcccccacacaaaagcga

SEQ ID NO: 108295 - RNA, 71 nt, Homo sapiens
cgcgcgcacgcggcgcgccggcggggccccgggccgcaccccccaccgcaacccgccgggaagcagccgcc

SEQ ID NO: 108296 - RNA, 82 nt, Homo sapiens
agagacaggcagcggacagaagcggcgacccacaaacaagccaagagacggcaagcaggaaacggaggacggggaaaaagga

SEQ ID NO: 108297 - RNA, 85 nt, Homo sapiens
ccagggccagcggcccagaaggagcaggagcagccagagccaaagaagccgcaggaagccaccaggccaacagaaggcaaccgaa

SEQ ID NO: 108298 - RNA, 76 nt, Homo sapiens
ggcgagcagagacgccgggcccagggcaggacaggccgaaaacccccagacgaaaccacaaaacgcccaccagcac

SEQ ID NO: 108299 - RNA, 40 nt, Homo sapiens
gagcggaacggagaaagcgaggaccaaaaacgacagaaga

SEQ ID NO: 108300 - RNA, 82 nt, Homo sapiens
cgagagccgcccgggccagcggccgcgcacccccggccggaggcaccagcgcgaccccgcacacacacccaccagccacggc

SEQ ID NO: 108301 - RNA, 70 nt, Homo sapiens
ggaagcgcagggaacagggggaccaacaagaaaacgcaaaaccagaagcgcgccgacacggcccgggcag

SEQ ID NO: 108302 - RNA, 83 nt, Homo sapiens
cagcacacagcgaccgggagaacaagacgagacaaagcaggaggacacaagaagggaggaaaggcggacccaggaaccaccac

SEQ ID NO: 108303 - RNA, 70 nt, Homo sapiens
ggaaacgaccggcagggagggaaggcaagagccaacccaaaaccaaggaaagggagcagcaccggccaca

SEQ ID NO: 108304 - RNA, 74 nt, Homo sapiens
gggaacaaggcaagggggggcacaaaagcaacacggacaccaaaggaaccacgcaagagcccaacaccccccca

SEQ ID NO: 108305 - RNA, 72 nt, Homo sapiens
aaaaaagaacacaagacaagcgccagaaacaggcacggacacaagcgacccaagagcccacgggccgagcaa

SEQ ID NO: 108306 - RNA, 81 nt, Homo sapiens
cgccaccggcccgacccagaggggcgcgggagccgcgggccagacggaaggagcggcaaaggagacgaggccgggaaggca

SEQ ID NO: 108307 - RNA, 73 nt, Homo sapiens
gagaccgcgacacccacacccacaccacaaccaccccagggaccaggaaacagcgaagcgaaggagccaccgg

SEQ ID NO: 108308 - RNA, 76 nt, Homo sapiens
ggaagcgggaaacccacaggaggcaaccacacagaggcggcgaaggcgggcaggcccagggccccccaccgcgccc

SEQ ID NO: 108309 - RNA, 71 nt, Homo sapiens
gacacagcacaccggagagacgaggggggccgccccgggggcccagacaacgaccgaagaaagaagagaac

SEQ ID NO: 108310 - RNA, 78 nt, Homo sapiens
agccaggccgagaggcccggaaaaggccggcagaccagcccccagcagcgcccaagacgcccagacacccgcgacgcc

SEQ ID NO: 108311 - RNA, 69 nt, Homo sapiens
gaggaaaagaaagcaggcaaagaacaaacgagcagaccgcagccaagaaggagagagcacgaccaccgc

SEQ ID NO: 108312 - RNA, 73 nt, Homo sapiens
cgcccccgggcaggacccggacccggaagagaagagggggcaagaaagaccgaaagagcgaaaaccaggacag

SEQ ID NO: 108313 - RNA, 108 nt, Homo sapiens
gggaaggcggggcgacccggggggcgcgcccagagccccgcgcagcccagggaagaggccggaaaaccccagagaggagcacgcccggagcccacgagcccaccccca

SEQ ID NO: 108314 - RNA, 55 nt, Homo sapiens
cgcagcgggcacggaggccggggccagaacggcgcaaagaagaccagaaggaacg

SEQ ID NO: 108315 - RNA, 77 nt, Homo sapiens
gggcccagaaacccaggaaacgagaccagaccccagagaggaggcacagaaggccaaacacacaggaacgccagacc

SEQ ID NO: 108316 - RNA, 80 nt, Homo sapiens
cgaaacacagggcggcggcagcgagccagcagcgccccccagaagcgaggaacagcgcccgagaggcggagcaccccgga

SEQ ID NO: 108317 - RNA, 73 nt, Homo sapiens
agagaccgccacagaacacagcaaggaacacagaaaccagggaacaagaaccaaccgacacgagccaaaaacc

SEQ ID NO: 108318 - RNA, 69 nt, Homo sapiens
cgcgcggggacccgacgcccgcacggagacaagcggaggacaacgcagaagccaagggggagaggggaa

SEQ ID NO: 108319 - RNA, 63 nt, Homo sapiens
cgcgcccagaagaagggaaggcgcgaggaggaaaggaggacgagagacccacgcaaggagaga

SEQ ID NO: 108320 - RNA, 71 nt, Homo sapiens
agccaccagcgacaaacaggaaagggcggagaacggaaaagcaccaggaagcagagaggaccgcagaaggg

SEQ ID NO: 108321 - RNA, 63 nt, Homo sapiens
ggagacccggggacccccgacgccaggcagcgcccccaaacggagaccgcaggggggaggaag

SEQ ID NO: 108322 - RNA, 47 nt, Homo sapiens
gccacagcagggagaaaaggaccagcagcagaggagaagcggacaac

SEQ ID NO: 108323 - RNA, 73 nt, Homo sapiens
ggcaccgccggagccgccggaagggcgcccgcagccccccacgggaggaacaacaaagagaagcaacagacgg

SEQ ID NO: 108324 - RNA, 71 nt, Homo sapiens
caagaaacagaccgaggcaaagaagagcagggaaggcacggcaacaaccaggacagaacgacacaaaaggg

SEQ ID NO: 108325 - RNA, 69 nt, Homo sapiens
gggggccggcccgggcagcaaggcgcgcggcaccccggccaccggcagggcgccccacccggccacacc

SEQ ID NO: 108326 - RNA, 59 nt, Homo sapiens
cggaaacccaaccaagaaggcccagcaccccgccacggaacagaacacaagcggagcgc

SEQ ID NO: 108327 - RNA, 56 nt, Homo sapiens
accaacaagaaaaagaccgggcaaagaaggggacaccaacggagcagaagcaaggg

SEQ ID NO: 108328 - RNA, 59 nt, Homo sapiens
cggaggagcgcgcccgccgagaaggagcccccgcagcgcaagcccgcccccgagcaacc

SEQ ID NO: 108329 - RNA, 83 nt, Homo sapiens
caggcagaaggacgagacagaggcccggagacggcagcaccggaacgggcaggaaagaaaaagcagaaagaaaaaaaaccaca

SEQ ID NO: 108330 - RNA, 59 nt, Homo sapiens
gcagcgcagccaaccagcgaaggagcaagcaacaaaggccaggggcagcaccccaccag

SEQ ID NO: 108331 - RNA, 74 nt, Homo sapiens
ggaggacccggcacgggagacacacccgcacacgccagcgaagcagcacggcagaagaagaaggcccaacgaaa

SEQ ID NO: 108332 - RNA, 82 nt, Homo sapiens
ccaagaggcggacggcccggagagacgaaccgaagcgggcgggcccccccacccagagggaagacccgaaacaagaagaaga

SEQ ID NO: 108333 - RNA, 80 nt, Homo sapiens
gggacaccagggacagggaggcccgcacaccccccgagagaacacagaagcagacacaacaaccaaaaggacgaaaaagc

SEQ ID NO: 108334 - RNA, 78 nt, Homo sapiens
cccccccccccacccaccaaaccggagggggaaaaaacccaaggcgcaaagagaggaaacgaggcgggaagacgaaac

SEQ ID NO: 108335 - RNA, 96 nt, Homo sapiens
gcaggcccccgagggcagcccgagacccaccagagggcgccacaaacgggcgagagccacagaaggaggaggggacagcagcaggagcccagcaaa

SEQ ID NO: 108336 - RNA, 78 nt, Homo sapiens
gcccgcgcccgccaggcgacaggggaacagacagaaggagcaggaaccaaaggcagaagacgcgcccacagagaagaa

SEQ ID NO: 108337 - RNA, 80 nt, Homo sapiens
gaaagaaaaagagaacagcaaacacaggcacgaaaaagccaggagggcccaggcaaagaagcgcgcgggacagcgacgga

SEQ ID NO: 108338 - RNA, 58 nt, Homo sapiens
ccacaggagcgcccgcggaggagcgcccgggcaaaagcagaccggaaaacccaccggc

SEQ ID NO: 108339 - RNA, 64 nt, Homo sapiens
caccaagcccacacccaggccaacagagcacaggcaaggcaccgagggggggcaacaccaaaac

SEQ ID NO: 108340 - RNA, 36 nt, Homo sapiens
acacagaaacccgccccggagacccacggcaggggg

SEQ ID NO: 108341 - RNA, 76 nt, Homo sapiens
cagcgcaagcggcgcggccgggcggcagaggagaccgaaaagggaggaggaggcgagcacagggccgggacaacac

SEQ ID NO: 108342 - RNA, 72 nt, Homo sapiens
aaacagaaccagccgggagccgcggcgcagcagaaaacaagagccgagcccggaagccggcaagacaagcga

SEQ ID NO: 108343 - RNA, 62 nt, Homo sapiens
gaccgagagcggaccgagagcgcgaaacgcacgagaagaacagaaccagaggacagagacgg

SEQ ID NO: 108344 - RNA, 52 nt, Homo sapiens
accagcagcccccagagcggaacacagggggaaccgggcaaccaagcaccga

SEQ ID NO: 108345 - RNA, 54 nt, Homo sapiens
gcgacacggaggcgcccggaacaggaggagaagagagggagggcgggggcggca

SEQ ID NO: 108346 - RNA, 74 nt, Homo sapiens
ggagaagaaagagccaaacaacgccacagcgcgcaagggcaggcaggcgacacccgcgaaggccgggagaccgg

SEQ ID NO: 108347 - RNA, 90 nt, Homo sapiens
acggcgcccggcgccgcacacaggaacacagcgccaagcccgaagcggaggacccggcccagccgggcaggccgacccccaccagccgag

SEQ ID NO: 108348 - RNA, 67 nt, Homo sapiens
aagggacaaaagcagaaaaccagaacgaggccagcagccagacaacaccaacagcgccgaggacacc

SEQ ID NO: 108349 - RNA, 72 nt, Homo sapiens
ggccccggagggcccgcaccccagcccccccacccgcgccgcgggcgaaaacgcaccgagaaaagaagaacc

SEQ ID NO: 108350 - RNA, 41 nt, Homo sapiens
gccgggcacaacgcacggaagaaacgcaccgccaacgcagc

SEQ ID NO: 108351 - RNA, 97 nt, Homo sapiens
cgggaccaggcgaagcggccgagcaggcgagcgaacgacggagccaaaaaccgaacacccggaaggggacaagggacggcgaacagaccccgcgcgg

SEQ ID NO: 108352 - RNA, 73 nt, Homo sapiens
cggcaggaaggaggagacgaagaaaggaggcccgagcccaagcgcacgacaccagaggccgaagaacgaagac

SEQ ID NO: 108353 - RNA, 76 nt, Homo sapiens
cagcagcaaaaggggcaaggggaaaagacaggcacagggcagagcccgccagagggcgaccggccaccgggaaggg

SEQ ID NO: 108354 - RNA, 79 nt, Homo sapiens
gcccccaaaggcggaacaggaaacggagaggcgggcggaccaagaccccccccaggagcaggccccccccccaacaacc

SEQ ID NO: 108355 - RNA, 59 nt, Homo sapiens
ggggcccggcggccccagaacaaaggacagaggagaagagcaaccaggccaccaagcac

SEQ ID NO: 108356 - RNA, 77 nt, Homo sapiens
caaggaaagggcgacagcaacagccgccggcggaagagcccagcaagaccacgacacgagagcgccgccagccggaa

SEQ ID NO: 108357 - RNA, 70 nt, Homo sapiens
ggagaaggaccaagaaccagagcggggcccggcgcacccaccaccgccgcccacggcagcccagggaccc

SEQ ID NO: 108358 - RNA, 80 nt, Homo sapiens
gaaggcaggccaaaccaccgaccaggaagcgaagagggaacaccccaccgacaaaaacgagagaaaaccgacgggacaga

SEQ ID NO: 108359 - RNA, 66 nt, Homo sapiens
acccgagaaagggcaaccgccaagggaggaaaaacgcgccaggaaaccaggaggccaaccgagaaa

SEQ ID NO: 108360 - RNA, 60 nt, Homo sapiens
gcaggagcccggccaccacacccagcgggaaagagaggcgacgagcgacagaagaaaaag

SEQ ID NO: 108361 - RNA, 84 nt, Homo sapiens
ggggaaccgacgaccggcgccaaacagaacacaggaggggcagcaagaaacaccaaccggccaaagaaaggaagaagaagaaaa

SEQ ID NO: 108362 - RNA, 71 nt, Homo sapiens
gccgccaccacccacccggacacagacacaagcgggacggaagaggcccggcgaccggacagaaaccaagc

SEQ ID NO: 108363 - RNA, 66 nt, Homo sapiens
ccacgagagcaaccgacacagaagcacggagcccaaggacgcccccgggccaaacggcagcaaaaa

SEQ ID NO: 108364 - RNA, 72 nt, Homo sapiens
aaaagacgggcgccgcgggcagcgcgcggcccgggcagcaggcacacagagaaaaaaagggaacaaaacaca

SEQ ID NO: 108365 - RNA, 77 nt, Homo sapiens
gggggaccaggagaccacccaacccgaccagggacagagagccgaaagccgggcaaggggaaagaaggccgaagaac

SEQ ID NO: 108366 - RNA, 81 nt, Homo sapiens
aagaaaaagagcgaaaaagacacgccgggagcacgcagccgggggaggccacagcgagccaccagcccgccacacagagag

SEQ ID NO: 108367 - RNA, 72 nt, Homo sapiens
agcggaccagccaaacaaacaggaccggacgccacacaggggggggcagcaaagcggcgcccccagagcccc

SEQ ID NO: 108368 - RNA, 52 nt, Homo sapiens
aggccgcgggaaaaaagaccaggaccggacgcaggaacaagacggggcgaaa

SEQ ID NO: 108369 - RNA, 52 nt, Homo sapiens
ggaagccgccacagcacaaacccggaccgccgcgccccccaacgaccaggcc

SEQ ID NO: 108370 - RNA, 58 nt, Homo sapiens
ccacgaggcggcgccgcgaaaggacacgcccaccaagaaagaaccggaaaggggaccg

SEQ ID NO: 108371 - RNA, 79 nt, Homo sapiens
agaaaggccagaagagggcacgcacagagaaaaaagggacccaagaaagccccgaacaacaacagaggcaaccagaagg

SEQ ID NO: 108372 - RNA, 82 nt, Homo sapiens
gcaacacgccggggaacaaacgcgccccagggagacagacaggcgacaggaggaccgcaggaagaaggcaagaagccacaac

SEQ ID NO: 108373 - RNA, 71 nt, Homo sapiens
caggccggggacgaaaaaggagaaaacgaaggcaaagcgagcaagaaaaaggacccgacgggcggagcgac

SEQ ID NO: 108374 - RNA, 77 nt, Homo sapiens
cgacggacagagagacacagggaacgccgcagaaagaagaaggggcaagaacagccacagcagagacaaaaaaccag

SEQ ID NO: 108375 - RNA, 74 nt, Homo sapiens
aaaggcccaccgcccaaaaggagaggcgacacaaaagagcgcagcaaggagaaacagcaccaaggacaagaagg

SEQ ID NO: 108376 - RNA, 72 nt, Homo sapiens
gcaaccgacaacgcggcccggggcaggaggcacaacaggaggaaggaggaaaaaaccccaggggggacgggg

SEQ ID NO: 108377 - RNA, 84 nt, Homo sapiens
gggcgcccgcccccccggccccgggggcaccccgcaaggaagccaaggcagccgagagaacccccccaccgagacccaagaagg

SEQ ID NO: 108378 - RNA, 69 nt, Homo sapiens
gaccagaaaaacaaggaaaagaggacaagaagaggaaggccaaagaaagacaagagcgagcacaccccc

SEQ ID NO: 108379 - RNA, 72 nt, Homo sapiens
gggggcccaagcaggcagcgcacgacgagaccacgcagagagaaaggaaaggacggaaacagaacccacgca

SEQ ID NO: 108380 - RNA, 67 nt, Homo sapiens
ggggcacagacaccagaaacaacagacagcgggcagaacaggagacagcggagaaagagcccgggaa

SEQ ID NO: 108381 - RNA, 81 nt, Homo sapiens
ggacaagcggggcaaccggacgagcggggcaaccgaccggcgcggagggggcccaagaaaggagccagcaccgccgaccgc

SEQ ID NO: 108382 - RNA, 68 nt, Homo sapiens
ccggagccagcgacccacgaggagaacacaaagaacccaaacgaaaggaaaaggggacccaaacaaaa

SEQ ID NO: 108383 - RNA, 78 nt, Homo sapiens
aagaagaggcgccagaaaacccaagccaaaggagcggagcccgaaagagccaggaagacggaagaagaggaaaaccgc

SEQ ID NO: 108384 - RNA, 56 nt, Homo sapiens
acgcggagaagaaggcccagagaggggcaacaagcagaagaaggaagcaagagaag

SEQ ID NO: 108385 - RNA, 70 nt, Homo sapiens
gagagacaacgggggcgaaaagccaacggggcaaaaggaagcgcgccggaagaggagagaggccgccacc

SEQ ID NO: 108386 - RNA, 41 nt, Homo sapiens
aacccccagacgcaagccaagagccccccaagagaacccag

SEQ ID NO: 108387 - RNA, 72 nt, Homo sapiens
accaaagacaaggcggggccggaaggaaaagggggagaggaggaaaggaaggcgccagcaccagacccgacg

SEQ ID NO: 108388 - RNA, 75 nt, Homo sapiens
gcacacaaagcaacggaacacccagcagacacagagcacaacagccaccccccacggaaggcccagaagcagccc

SEQ ID NO: 108389 - RNA, 79 nt, Homo sapiens
ccggcccaggcgaagcaacccgaagagagaggagggaacaaaccggcagaaaaagcagagccggaagcacccagacaag

SEQ ID NO: 108390 - RNA, 83 nt, Homo sapiens
ggagccgcgccgccgcccccagccccccgcccggggagggcaccagacccaacagaggaagccgcaagaaacgggacgacagg

SEQ ID NO: 108391 - RNA, 104 nt, Homo sapiens
gcgaccggggcggaacccggcgaccacgccccggggcagcaggcgaccagcgccacgggcaaaaaaacagcacagcagagaacggagcagccgacaaagagccc

SEQ ID NO: 108392 - RNA, 75 nt, Homo sapiens
ggcgcaggggacagcaggcggagaaagggaccaaaggggaggccaagaaaccgaagagacaacggaagcaggaaa

SEQ ID NO: 108393 - RNA, 81 nt, Homo sapiens
gccgcaaaagccaagggaaaagacgggcaggcgagcccgacggacaacagacaggaacccggaagagagcgaagaggaaag

SEQ ID NO: 108394 - RNA, 78 nt, Homo sapiens
ggggcaggggcggaggcggaggcagaggggaggcgcgaaaggagggaggaagaggcgcggcaagggcgcggcaagaaa

SEQ ID NO: 108395 - RNA, 61 nt, Homo sapiens
aggaaagagagcacaccgcagcccaggagacccacagaggaagcccaagaggaacagggca

SEQ ID NO: 108396 - RNA, 74 nt, Homo sapiens
gcaccaacacacgggaacccaagaaacaaacccagacgggcagaagagagagaaaggcggaggcagggcgcgac

SEQ ID NO: 108397 - RNA, 69 nt, Homo sapiens
ggccggccggaacccccacaaccgcagggcggagaacggaaaagcaccaggaagcagagaggaccgcag

SEQ ID NO: 108398 - RNA, 75 nt, Homo sapiens
caacccgaacgcaaaagaaggccacaccaacaagacaagaaccaaacagaacccacgaagggagaccagacagcc

SEQ ID NO: 108399 - RNA, 73 nt, Homo sapiens
cggagagaaccagcgaggacgagagcaggacagcggagcacacagagaacagcccgcagcaaagaagaacaca

SEQ ID NO: 108400 - RNA, 65 nt, Homo sapiens
gaacaaccagaaggaacgacagcgggacgccgaagggggaagaagaccccgagagaccccgcgcc

SEQ ID NO: 108401 - RNA, 72 nt, Homo sapiens
ggacccccccgacaagcaccaccccggccggaaagcacggaaagaaagcgggaaccccacggagcagagaca

SEQ ID NO: 108402 - RNA, 80 nt, Homo sapiens
gagccaaaggacggcccgccaggggcggaggaaacacagacagaggccagcaaggacagcagcagcagccagcacagagg

SEQ ID NO: 108403 - RNA, 78 nt, Homo sapiens
aaccagaccagaagacggacgagcccaaaaaaggaaacacaaagaagacaccagaagggccagcaccacgacaacacg

SEQ ID NO: 108404 - RNA, 68 nt, Homo sapiens
aggagagaccagaggaggaagagcaagcgggggaccgaacaaggcaaaaggggcagagggaaccaaaa

SEQ ID NO: 108405 - RNA, 84 nt, Homo sapiens
ccgcgccgccgccaccagcccaagagaaagaccccaggcacccccccagcgcggggcccacagcgccggggccagccgggccac

SEQ ID NO: 108406 - RNA, 71 nt, Homo sapiens
accggaaggcgcccacaacaccaaccacaccggagcaggacaagcgaacagcaggacgcaacggaaaggac

SEQ ID NO: 108407 - RNA, 81 nt, Homo sapiens
aaccaggacgcaggcgacaagaggaccgcgccaacaggacgaggagaccgaccaggagaccccagcggagacgaccgcgac

SEQ ID NO: 108408 - RNA, 64 nt, Homo sapiens
gcggcagcagcccagagcgcaaagaaggcaccccggcggcccccccagcagcagccccccgggc

SEQ ID NO: 108409 - RNA, 59 nt, Homo sapiens
cgcccggggccagaaggccgggcgccagaaggagacaccgccacgcagacaacgagacg

SEQ ID NO: 108410 - RNA, 75 nt, Homo sapiens
aagaccgggacccaggaacccaagggggcacgaacaacaagacaagcaaccaagaaagcgacaaggaccagacaa

SEQ ID NO: 108411 - RNA, 80 nt, Homo sapiens
gcacaacgcacgccgaggaacccagcagggcacgggaggggagagagaaccggcacaccggagcaacccagaacacagcg

SEQ ID NO: 108412 - RNA, 54 nt, Homo sapiens
gagccccacgccacgggaccacacaaagcaaacacaccacgacggccgcgagcg

SEQ ID NO: 108413 - RNA, 82 nt, Homo sapiens
aaaaagcccgcaggggcgagggagaggcgcagcagccccagccaggcaggaaacacccccaggagaggcagccagaggccga

SEQ ID NO: 108414 - RNA, 75 nt, Homo sapiens
aagagaaagaaagacccacaaaaggcaaaggagacagaggacaaaagcagccccccggggcaggggagcagcaac

SEQ ID NO: 108415 - RNA, 80 nt, Homo sapiens
caagggccaggggagcccagcggcgcgccggcagcagggggagaaaggcaggaggaggcggcgagaaaccccccccggaa

SEQ ID NO: 108416 - RNA, 49 nt, Homo sapiens
gacaaggagggcggaacggcggaagaccagagggggacaccaagagcga

SEQ ID NO: 108417 - RNA, 85 nt, Homo sapiens
gggcgagcggccggcggcgcgggcccggcggcggcggcagcggggccgggccggagcgccacagaaacccaccagagaaggcgcg

SEQ ID NO: 108418 - RNA, 83 nt, Homo sapiens
ggcacgcccacccagaagagcaggaaaggagggcaccaaccacaaagcgccacgcagagccccgccaggaagacacgccgggg

SEQ ID NO: 108419 - RNA, 73 nt, Homo sapiens
gggaacggagcgaggaaaagagcccggagagagggaagaaacacagcacagggacaaaacacggggagggcca

SEQ ID NO: 108420 - RNA, 41 nt, Homo sapiens
cggcacagccacgccaaggagcgcaagcagccgccaaagcg

SEQ ID NO: 108421 - RNA, 74 nt, Homo sapiens
acggggcgacgccacagagaaaggaagagaagcccagacacgaagaagagagccagagcacaagaaagacaccc

SEQ ID NO: 108422 - RNA, 75 nt, Homo sapiens
ccggccccaacgacaccaagcccacaaggagaaaccagaggcaagcgacgggaaggaccaccaaacccagccagc

SEQ ID NO: 108423 - RNA, 48 nt, Homo sapiens
ccgcggcccggcagggggaacgggagggggacaggcgggaaccaacca

SEQ ID NO: 108424 - RNA, 77 nt, Homo sapiens
gccccaacagaccaggaagcagcgaccacgccacaccacagcagcagaagaaagaaaggagaagggccaagccacac

SEQ ID NO: 108425 - RNA, 51 nt, Homo sapiens
agagagcaaggggaaacacaccagcacacaaaggcccacccagcacgagaa

SEQ ID NO: 108426 - RNA, 64 nt, Homo sapiens
gggccgaagcaaccagggaccacaaaaacggaagacgggccgaagaccagacacaggaccggcc

SEQ ID NO: 108427 - RNA, 54 nt, Homo sapiens
caggaaccagaagaaggcagcccaggaagaaaacgaaggaaggaggacccgagg

SEQ ID NO: 108428 - RNA, 67 nt, Homo sapiens
aaagccccccggagacgcaaccaaggcgggcgcggacggcaggggcgccggggaacccgcgggaaga

SEQ ID NO: 108429 - RNA, 81 nt, Homo sapiens
cccgccgcggggcgcgcggcgccggcggcgcgcgacccccgcgcagcaccggccacgcaggaacccaccaaaccacgggac

SEQ ID NO: 108430 - RNA, 83 nt, Homo sapiens
ggagaacaaaggaagaaggaagaacgggaagcgagaaaggccaaagagagggcgaacccaggaaacccccaagaaaggaaagg

SEQ ID NO: 108431 - RNA, 91 nt, Homo sapiens
gacccagcgccggcccccaggcgaagaagcgcagccgcaccggccaagggggacccaagggagagagggaacggcgaaagggcagcccgga

SEQ ID NO: 108432 - RNA, 66 nt, Homo sapiens
ccgccgcagccgcagggaacggagggaaagcgacaaacaaccaacccacagagacccagagaccag

SEQ ID NO: 108433 - RNA, 74 nt, Homo sapiens
ggaacaccaaacggaggagccagacccggggaggcgcacacacaccaaagcgccgcccaagagagagaagagag

SEQ ID NO: 108434 - RNA, 105 nt, Homo sapiens
gggagaaccaggacccgcaaggaacgaaagcgggaagacggaagaaacagggcagcaggagcggagggcccccgcccaggggaaggacgaggacccgacagagcc

SEQ ID NO: 108435 - RNA, 85 nt, Homo sapiens
gaggcggaagaccgcgcgcagggccgcagcgggagcggacggcgagcgcgagcggcgcgagaaagaagcccggggcggcgacgga

SEQ ID NO: 108436 - RNA, 72 nt, Homo sapiens
aaaacccaccggacgaacaaaacgaagaaacgaaaaaggcagaagaacgcagacagaagaaggaaacaagag

SEQ ID NO: 108437 - RNA, 75 nt, Homo sapiens
acgcacaggagaccaccaccccggcgccaccaccgacgagcgaagagcaagacgagacgcccacccgcaacgcga

SEQ ID NO: 108438 - RNA, 74 nt, Homo sapiens
gccgcacagcacacggagcgcgccggccccacgggaaacaaaacccagacagacaagccccgagggagaggacc

SEQ ID NO: 108439 - RNA, 75 nt, Homo sapiens
gaccagcgcaacccaccaaagaggggaacaggccaggggaagaaggaagaagaacaggaagaaggaaagacgggg

SEQ ID NO: 108440 - RNA, 73 nt, Homo sapiens
gagcaccggacaagcaccagagcccagagcagaaaccgagccaaggcagccagggcagagacagcgagaccac

SEQ ID NO: 108441 - RNA, 58 nt, Homo sapiens
gccacacaggccagaacgaggggaaggcacaaggggccccggaggccgggaagccagc

SEQ ID NO: 108442 - RNA, 86 nt, Homo sapiens
ccgacggccgcagaacgaggaacacccgcccgacagaggcggggagaaggaggaagagacagccggccccggaaaagagggagggg

SEQ ID NO: 108443 - RNA, 84 nt, Homo sapiens
gggcagcagaccaacagaggggcaaacagaggaagaggaagccagaagagggagagacagaagggagccagcacacaaacaaaa

SEQ ID NO: 108444 - RNA, 76 nt, Homo sapiens
ggccccacgggccacgacaaagagcagcacacagagcccgagggagcgaagcagaccccaaggacccccggccaca

SEQ ID NO: 108445 - RNA, 53 nt, Homo sapiens
ggacaaggccacacgggcagaggcgggaggccgaaggcaccaaccaaaaccgg

SEQ ID NO: 108446 - RNA, 71 nt, Homo sapiens
aaaacacacagaaggccggaagagaaggggaaaagacgcacgcaagagcacccgaaagagcgaaagcccag

SEQ ID NO: 108447 - RNA, 47 nt, Homo sapiens
acccgagcagaggagagacacgagccacagaggagcacgaggcagcc

SEQ ID NO: 108448 - RNA, 81 nt, Homo sapiens
gggggggaccgagacgcagccaagacggggccggccaggacggggccgaagcgcaccggcccagcgggcaagaagcagcgg

SEQ ID NO: 108449 - RNA, 74 nt, Homo sapiens
aaaaagcccagcaaagagccacagggcccgagggcaggacagcaggcaccggcgaagcacagagaggcgcgagg

SEQ ID NO: 108450 - RNA, 51 nt, Homo sapiens
cccagccagcaaggggaaccccaaggccagaagagacgccaaaccgccaag

SEQ ID NO: 108451 - RNA, 79 nt, Homo sapiens
agagcggacaagacgaagcgaaggagcccaggagaagcggaacggcagagaagaaggcgcgacagacgaggaagagaac

SEQ ID NO: 108452 - RNA, 80 nt, Homo sapiens
gcaacacccgaggccaggaacgcccgcggaacggcgcaggcgccccgcacaccaagccaggccgagacaacaccacaacc

SEQ ID NO: 108453 - RNA, 77 nt, Homo sapiens
gcgacagaggagggaggaaaacaaccgagggcagagccaagacaacgacaagagaacaaaggaggggaccccggcaa

SEQ ID NO: 108454 - RNA, 70 nt, Homo sapiens
agacccaggcccgcgacgggagaaagagcacaggacaaaacgaaggaaacacaaagaagacaccagaagg

SEQ ID NO: 108455 - RNA, 70 nt, Homo sapiens
ggcagaaccagggaaaccacaaacaggaagcagaaacaaggagggaacagaagccaaagaaacgccaacc

SEQ ID NO: 108456 - RNA, 50 nt, Homo sapiens
gggcaccagggccgaccgccgcaggccccccacccggcgccccgggccag

SEQ ID NO: 108457 - RNA, 77 nt, Homo sapiens
agcagaggagacaaaccggagaaggagccaagaaagagaaggaaacaacgaagcagcgaccaacgggaaggccggga

SEQ ID NO: 108458 - RNA, 32 nt, Homo sapiens
cagaaggggacagaacagaagagagaagaggg

SEQ ID NO: 108459 - RNA, 81 nt, Homo sapiens
agacaacacggggcaagcaagaacagaccgccacaccagaaagagaagcaacagcgaagaagaggcagcaaaccccgagcc

SEQ ID NO: 108460 - RNA, 77 nt, Homo sapiens
caaggaaaggaccgaccccaaagacaggggcaaggccgaggggaacagcacacagagaggaggcggaagcacgccag

SEQ ID NO: 108461 - RNA, 80 nt, Homo sapiens
ggagcgcggaccggcagcgagcccaggcacaagggaggcgacagagacagcagcagggaccccaacgagggaccacgcca

SEQ ID NO: 108462 - RNA, 64 nt, Homo sapiens
ggcaggggagacaccaggcggcaaaaaagaacagccagaagaaccaggccagaacacgaacaca

SEQ ID NO: 108463 - RNA, 34 nt, Homo sapiens
aggagccgaagaaagagcccaggcaccccgaagc

SEQ ID NO: 108464 - RNA, 71 nt, Homo sapiens
acaccccccagcacacgaaaccgagaacaacaccagggaggagaagagccaaagaaaagcacaccagccac

SEQ ID NO: 108465 - RNA, 81 nt, Homo sapiens
cgcagcgcgaggccgggccgggggagaccgccggacaggaggaacaaagaaaagaagcacagacgggacagaaccagaagg

SEQ ID NO: 108466 - RNA, 71 nt, Homo sapiens
cacgccggaaaaggccgaagggcacgaaagaggcaagagagaggaagaggcaaagcagacacccggaccag

SEQ ID NO: 108467 - RNA, 75 nt, Homo sapiens
ggccacgaaagccccacaccagaccacggagggagcggaaaccgacgcagacggcacaaaggacaggaacaaaga

SEQ ID NO: 108468 - RNA, 70 nt, Homo sapiens
ggcacgggaaagaaacaacggcgaaggagagggaagagccacgcccagcccacagccaaggaaacgaagg

SEQ ID NO: 108469 - RNA, 64 nt, Homo sapiens
acggcccgggacgagggcccaagccagagccaggacaaaaccaggcagaaccaacacgaaccca

SEQ ID NO: 108470 - RNA, 68 nt, Homo sapiens
caagcagggcgaagggaacgcaaggcccccgaccacacgcccgcgcgagagacacacagcccaccaaa

SEQ ID NO: 108471 - RNA, 80 nt, Homo sapiens
gagcacagaagagcgaggaggaggaaaacaagggcaaaccagaaagagaaacgagaaaaagacagaaagaacaggaacgg

SEQ ID NO: 108472 - RNA, 79 nt, Homo sapiens
ccccgccggccgcccaacaccgaacaccgagaagacagaggagccagaccaagagacagcacaggcgagcgagcagaga

SEQ ID NO: 108473 - RNA, 75 nt, Homo sapiens
cacacgcaaaggagaaaggaaccgacaggaagagggaccaggggagacggccaagcaagcagcaaccgcacaaac

SEQ ID NO: 108474 - RNA, 110 nt, Homo sapiens
ccgcaagacgacaaggaggcagggacccggagccacccacaggacccgccaccaaaggcaaaagcagaccggaaaacccaccggcaagaccacacccgaggggagcccag

SEQ ID NO: 108475 - RNA, 69 nt, Homo sapiens
gccccaggagccggggccgcagccaccaggacgcaaaggaccgaaggagaagaaggagaaggggaggag

SEQ ID NO: 108476 - RNA, 73 nt, Homo sapiens
ggaagacgggccacggacaggggggcacgacccccccagaggcgggcagagggccagacccccaacaaagcca

SEQ ID NO: 108477 - RNA, 79 nt, Homo sapiens
aaccaggcgccccaggagaaggaccgaagaaggaacccagccagccggcggaagcaagcagcagaggaagcggaggcgg

SEQ ID NO: 108478 - RNA, 84 nt, Homo sapiens
acggcccacccaggcagcgggggacgcgagcgaagggcgcagggacccccagggagccccagcacgccggacgaggaaggcgag

SEQ ID NO: 108479 - RNA, 79 nt, Homo sapiens
cgggacggcccaaggccagcccgcagcgcagaaggccagacacagaaccaggaaagcaccaccacaaagaggagaagcc

SEQ ID NO: 108480 - RNA, 79 nt, Homo sapiens
cccggagggaaaggccgcaaggagaacgcagcgcgccccagaccaccggcagggaacagccgagcagaccgaggaggcc

SEQ ID NO: 108481 - RNA, 67 nt, Homo sapiens
ccccagcagccaaaaaaaggcgaaaggcaagagggaaagaggcaggggcaccagccagcgaccaggg

SEQ ID NO: 108482 - RNA, 64 nt, Homo sapiens
ccgaccacacgcgcgcgccccaccagcggggccgcgaagggacgcaggccggccacgcggaaga

SEQ ID NO: 108483 - RNA, 84 nt, Homo sapiens
aagcccgccacagcggcccggccccccggacagacgccgacgcccagagcccaaaaggcagagcgaggagagaagaaggaggga

SEQ ID NO: 108484 - RNA, 80 nt, Homo sapiens
agagcggccgggccccgccaccgcaaggaggggacacagcgaccacgacggagaagcagggccaagagagaggcagcagg

SEQ ID NO: 108485 - RNA, 103 nt, Homo sapiens
acaccaaaacgcaccaggaccgcggcgaggggacaaacagaggagaaaacgcagccgggaggccagcggccccccaaagcgcgcagcggcgggccgagccccg

SEQ ID NO: 108486 - RNA, 83 nt, Homo sapiens
ccagcccaccccaaccaagggaacacaacagagagagaagagagaccaggcgcaaggagaccacagcccaacaacaggaagaa

SEQ ID NO: 108487 - RNA, 82 nt, Homo sapiens
ccaacggccaccgaagccagaaggcacgcaaaggaagagggagacgcgcacggaccggaaccagaacaagacgaaagacaac

SEQ ID NO: 108488 - RNA, 80 nt, Homo sapiens
gccgaagcaaaggccgggcacaagggggaaagcagcaggggccagaagacaaaaccgaaccacagaaaacaaaggacaag

SEQ ID NO: 108489 - RNA, 76 nt, Homo sapiens
gaccacaggcccagacgagcggaggaggcacagggcgcggaccgcacgagcgcggcgccggaccgaaggcgcgacc

SEQ ID NO: 108490 - RNA, 51 nt, Homo sapiens
agcaagcgagcaggcagcagcaaagagagagggccacgaccggcgcgcgcg

SEQ ID NO: 108491 - RNA, 79 nt, Homo sapiens
cgagaagcgccgccgaacgacaggacgggggcggccggcccccaggcccagagaacaccaggccagaccgggccagggc

SEQ ID NO: 108492 - RNA, 59 nt, Homo sapiens
aaagagaaagcgagggaagcggcacgaacaccaaggggaaccaacaggagacgacccca

SEQ ID NO: 108493 - RNA, 75 nt, Homo sapiens
agacaaccacacaaccacaacgcagcagagcgaacgaagagcgcgccggagcaaagggagacggcgcaggaccga

SEQ ID NO: 108494 - RNA, 84 nt, Homo sapiens
gaaacggcccacaagacccagccccacacgaagagcagagggacaaacccaggaaggaggacagaaggaccccaagcagcggac

SEQ ID NO: 108495 - RNA, 85 nt, Homo sapiens
gaaggacagcggcaccgccagacggccagaaagccgccagagcggggcacggagcgggccaaaagcaaacgaccaaagacaggaa

SEQ ID NO: 108496 - RNA, 73 nt, Homo sapiens
cccaggcgcgaaggaggcggaccagaacagggacaggacccggaaagcaacggaaccagcgagaaaacaagga

SEQ ID NO: 108497 - RNA, 74 nt, Homo sapiens
aagaaagaggaaaaagcacagcgaaaaaacccaaacacccggagacgaaccgaagcgaaaccccacgaggcgaa

SEQ ID NO: 108498 - RNA, 82 nt, Homo sapiens
ccagacccgcacgcaaaggggggcgcaagacaaccagggagggagcagcggacaagcagccggcgaccacgagcagccgagc

SEQ ID NO: 108499 - RNA, 76 nt, Homo sapiens
acagaaaagccagaagcacaggccagggcagaggaccaacagggcagagagcaagggggacggaagcggcagcggg

SEQ ID NO: 108500 - RNA, 86 nt, Homo sapiens
aagagcgcggaacaggacgccccgaagaccgaaggagcagacgaggcacgagcgccagcgcgagacagacggggcgcagaagcggc

SEQ ID NO: 108501 - RNA, 85 nt, Homo sapiens
ccgggccggaacgaaagcaggacggaggagcgaccaccggaggaagcagcaaagcagcgcgcagcgcagccaagaacaaaacagg

SEQ ID NO: 108502 - RNA, 72 nt, Homo sapiens
ggccacaggcgcaagcagagccagcgggccggcaccggcacgaggagcgcacacccgcccagccaagaccgc

SEQ ID NO: 108503 - RNA, 69 nt, Homo sapiens
aggaccaagaaccaggagaaggaaagagcagcgaaacaaagagaacagcaacacacagaggcccacagg

SEQ ID NO: 108504 - RNA, 69 nt, Homo sapiens
cgagcaacgcgcgggagcgaggacgacaggacgcggaagaagaagaggcaccacaacgcaagagaaaac

SEQ ID NO: 108505 - RNA, 65 nt, Homo sapiens
cgaaccccccccccaagcgagagcagccacacagaggagggagccccaggcaaggaaggggacgg

SEQ ID NO: 108506 - RNA, 107 nt, Homo sapiens
cagaagcgcggcagggagcgcgggggcccgcgcagcagcgaccacgggcggaaaacaccccaaaagccaaaagggaaaggaaaagaccaacaacagcgcaggacacg

SEQ ID NO: 108507 - RNA, 79 nt, Homo sapiens
aggccaggagggagagaccggccacaggcagacggcagggccggcaaaagggaaagcaaggggaagggcccaagaagac

SEQ ID NO: 108508 - RNA, 61 nt, Homo sapiens
aggccccgaggaacagagaaaagaaaccagcagacagaagcaggacacggccgagacgcgc

SEQ ID NO: 108509 - RNA, 76 nt, Homo sapiens
gcggagcgcgggacagccgcgacacacagagcagcgaaagcggaccgagcgagcgagaagagcaacccagggcaga

SEQ ID NO: 108510 - RNA, 78 nt, Homo sapiens
cgacacgcacgcggacggacacggagaccgggcggagccggacgagcgcgggaagaagaagcgcacaaggagcacaac

SEQ ID NO: 108511 - RNA, 34 nt, Homo sapiens
gaggaaagaagggggcgaggcaaccagggaccag

SEQ ID NO: 108512 - RNA, 66 nt, Homo sapiens
ccacccccagggaggacccaaagaggggaacaacagaggagggcgggggagaaccggaagaaaaaa

SEQ ID NO: 108513 - RNA, 74 nt, Homo sapiens
gcggccgcggccccaaggagcggccgcgggagcggcccaaagggcgaggccccggcaaagaggcgccgggcgac

SEQ ID NO: 108514 - RNA, 81 nt, Homo sapiens
gagaccaaacagagggaacacaacagaggggaagcccaacagagggaacacaaccagcagcaagggacagccggagaaaga

SEQ ID NO: 108515 - RNA, 76 nt, Homo sapiens
acggggggacccaaagaaggacaggcgcgcaacagaaagaaaaagggccaaccacggggaacgccacagagccggg

SEQ ID NO: 108516 - RNA, 114 nt, Homo sapiens
gcgcggcggggccgcagcagcagagccgcgcagccaggccccaacaaggggacacggggccgcggagcaccacccggaagcgcccggggccgaggccaccgggaagggaagcaa

SEQ ID NO: 108517 - RNA, 72 nt, Homo sapiens
accccaccggccgcagcacccaccggccgcaccccaagcccagaggagaagcgcacacgaggcccgaaccaa

SEQ ID NO: 108518 - RNA, 68 nt, Homo sapiens
ccgcccgcagagaggccggccgcgcggagcacgcggagccgcccaggcagcgcaaccccaccggaacc

SEQ ID NO: 108519 - RNA, 35 nt, Homo sapiens
gcgcccgccgacggacgccgaaggaccgaacagcc

SEQ ID NO: 108520 - RNA, 81 nt, Homo sapiens
gagggccacaggaggcggcgggccccgcccgccgaagggacgaaagagggccccacgcccaaaccaaacgaacaaagagac

SEQ ID NO: 108521 - RNA, 74 nt, Homo sapiens
gcgggaaccggaagcgcccgaggcccgggcccgcgggggcaaccgggcgcagacgaggcaagcaccgacgaagc

SEQ ID NO: 108522 - RNA, 76 nt, Homo sapiens
cgccagcggccacgcggcgcggggaaacaggcaccgaccccggggaagccccaacagaagagagaggccaaagggc

SEQ ID NO: 108523 - RNA, 81 nt, Homo sapiens
ggaacagagcgccaaaaggggaccggggggccgggcgcagaaggacaggggaaaaagaaaagggcgaagacccgaagcagc

SEQ ID NO: 108524 - RNA, 73 nt, Homo sapiens
gagaagccccggccgggccggccagcgccggaaaccaacaaagggaccacgagagagaaaggggggaaacaaa

SEQ ID NO: 108525 - RNA, 56 nt, Homo sapiens
aggaaagagggggaaaagcacaaccaagcagacaaagggagcacagaaaggggagg

SEQ ID NO: 108526 - RNA, 74 nt, Homo sapiens
agagccaccccaagggaccccagaggcgcgagcgaaacgaagaaagaagcggcagaagaaagaccaacagacaa

SEQ ID NO: 108527 - RNA, 79 nt, Homo sapiens
gggggggccaaacccgcaggaaaccaggaaccagggaaggcagggcggagaacggaaaagcaccaggaagcagagagga

SEQ ID NO: 108528 - RNA, 59 nt, Homo sapiens
cgggacgaggcgaaaagaaggccaaacagcaaggagcagacaagggcccacaccaaagc

SEQ ID NO: 108529 - RNA, 80 nt, Homo sapiens
cgcgccaccaccccacaacacggaaggcggcacacccagacccagggaaaagagcggacggacaagagaaagaaagagaa

SEQ ID NO: 108530 - RNA, 74 nt, Homo sapiens
cagagcaagacagcggaagaagacccagggaaacccccaggcagagccagagcccaagcccccgcagggagccc

SEQ ID NO: 108531 - RNA, 66 nt, Homo sapiens
caaaccggggaagcagggcccacggacgaacccacaccagcagacgccacaaaggaaaagcagcac

SEQ ID NO: 108532 - RNA, 76 nt, Homo sapiens
ccgggaccacaggccccggcccagagaggaaggcagagaaaaaaggagggccaaagacaagcagcaacagaaaaca

SEQ ID NO: 108533 - RNA, 68 nt, Homo sapiens
cgggaccggcacaccgggaaggccagaaaacaggaaggagaacagaagcggagaacacaaagccacaa

SEQ ID NO: 108534 - RNA, 57 nt, Homo sapiens
caaagcgcgcagaaagggcgaccaccaaaaaaacgcaagggcgaaaacagaaaaaaa

SEQ ID NO: 108535 - RNA, 68 nt, Homo sapiens
gcgccaaaagcgacagcaccaagacgacccaacagaggaagccgcaagaaacgggacgacaggaaggc

SEQ ID NO: 108536 - RNA, 80 nt, Homo sapiens
gggcagcccagcccaggcacgggcacaagcggggggcagcccccgccggcaccagggggagagccacccagcagggaggg

SEQ ID NO: 108537 - RNA, 60 nt, Homo sapiens
cgaggcggaggagcgcgcccgccgagaaggagcccccgcaggcgcgccccaaccgaagac

SEQ ID NO: 108538 - RNA, 54 nt, Homo sapiens
acacaaaggacggaggcacggaaaacaccaagagaccaccgcagaaaaaggacg

SEQ ID NO: 108539 - RNA, 87 nt, Homo sapiens
ggccacacccacacagagagggcacacgggccacagaggaccagcaaggagaagaaaggagcagcacagacgggggcagcgcggacc

SEQ ID NO: 108540 - RNA, 71 nt, Homo sapiens
acggagcaaaaaggagggcaaaggagaggagccacgccgggaacccaggcagcggcaacgcggaaaaaagc

SEQ ID NO: 108541 - RNA, 69 nt, Homo sapiens
aggcccggccaagcccaggcggcaccaggagcggagaagccaggggaaaaccagaaccgaaaacccaga

SEQ ID NO: 108542 - RNA, 54 nt, Homo sapiens
gagaaagggaaccaaccaaacaagagcacgaccgcacaggcaaaggaaggcgaa

SEQ ID NO: 108543 - RNA, 97 nt, Homo sapiens
gaggcaaaagacagaaaaccgaggcaccaagccggccagcaagacccgagcccaggcagcagaccgcgcgccagacgccaaggacgcccacagagca

SEQ ID NO: 108544 - RNA, 74 nt, Homo sapiens
aacccggaaagcggaaacaagccgggaccaacaaggaagaaaaaggcgaaaaggaaaacaaaacaaaaagggag

SEQ ID NO: 108545 - RNA, 63 nt, Homo sapiens
ccagggcgaggcaggaccggcgcccaaggagaggccaaaggagagacaaagcgaaagaaaccc

SEQ ID NO: 108546 - RNA, 49 nt, Homo sapiens
cgaggcgccccaacgcgccccgcgcaacgacaaggagccgcgcacccag

SEQ ID NO: 108547 - RNA, 74 nt, Homo sapiens
acagccaaaggggacacccggaggcggcgcagcagcaccggacccaccaggagcaaaacgcgcgggagcgaggc

SEQ ID NO: 108548 - RNA, 84 nt, Homo sapiens
gcggccggaggacagcgggagagagaagagccagagggacacgcgggcacggccggaggggaacggaaacacaaagcggaagaa

SEQ ID NO: 108549 - RNA, 38 nt, Homo sapiens
ggaggaccagaagaagggcaaagaaaaaggagagaaaa

SEQ ID NO: 108550 - RNA, 77 nt, Homo sapiens
gaggggaccgacgccggcagaacacgcgcgggaccccgggcacggcgcgcgggaggcgcaagcacaaggcggccagc

SEQ ID NO: 108551 - RNA, 70 nt, Homo sapiens
cccagcaaggcacacaacaggcaaccccaagacgccaacaaggcaaaccgaagaaaggacggcgcagaag

SEQ ID NO: 108552 - RNA, 75 nt, Homo sapiens
ggaggggcaagagaccggcggcacggcagagacagagacaagagacaggagccagcaccgccgaccgccagcgcc

SEQ ID NO: 108553 - RNA, 80 nt, Homo sapiens
ccgggcgccgcccggcaagagccgagccgagcccggagcggaggaaaggcgcccgggcgagggagacgcgcacggaccgg

SEQ ID NO: 108554 - RNA, 76 nt, Homo sapiens
gcggaggacaaagaaaaaaggaaaggcagcagcaccaaggaccgacgaggagggccaagaacccggaggagagcag

SEQ ID NO: 108555 - RNA, 64 nt, Homo sapiens
gacgccgcggccagagaacccaagccagaccgcccgagaaagacaggaagaccgaggcaccccc

SEQ ID NO: 108556 - RNA, 54 nt, Homo sapiens
agccagccagagcaacagcagcagacaaaccggcgaccacacacggggacgacg

SEQ ID NO: 108557 - RNA, 77 nt, Homo sapiens
cgaccggccaaaaagacacagcggaagaagaagaagagcagacggcagccaccaaggcccaaacccccggacaaacg

SEQ ID NO: 108558 - RNA, 78 nt, Homo sapiens
ggaggaggaagccgagggcgaggaggacccaccaacagacgggacagggagaaaacgaagcggagccaacccggagaa

SEQ ID NO: 108559 - RNA, 65 nt, Homo sapiens
aggaagagggggcacccagcacacccaagacgcggcaacagaggacaaggacccaccggggccag

SEQ ID NO: 108560 - RNA, 36 nt, Homo sapiens
cgaggagacaccgcagcaaaagaacagaagggagaa

SEQ ID NO: 108561 - RNA, 61 nt, Homo sapiens
cggacgggggcaagcggaagggagcccaagaggaccaggacccaaagacaggaccacgcac

SEQ ID NO: 108562 - RNA, 76 nt, Homo sapiens
gggagaaggcgcaacgcggcgcaacccccaaagacaacaaggagcaccaaaagagaagagcagacagaagcagacc

SEQ ID NO: 108563 - RNA, 79 nt, Homo sapiens
caaccccagagacagccaccgaagagccccccaccgaacggagcagggacgaggcaaagcaaaagcaaaacgggcaaag

SEQ ID NO: 108564 - RNA, 76 nt, Homo sapiens
aagagggaaacagggaaggcaggcagaagggcaaagacgagaggcgaagcaaggacggaaaaccagacaaggaaaa

SEQ ID NO: 108565 - RNA, 35 nt, Homo sapiens
gaaacgggccagaaggcagccagcaacaaagaaga

SEQ ID NO: 108566 - RNA, 66 nt, Homo sapiens
aagacgcgagaagccacacgaccacagagaagcaggcgaccaggcgcgcgggcaagaaagcagacg

SEQ ID NO: 108567 - RNA, 63 nt, Homo sapiens
aaaacaccaggaccccggcacaacccgacgacacacacagggcccaggaaagagggcacaacg

SEQ ID NO: 108568 - RNA, 75 nt, Homo sapiens
agcaagagagacccaacagaagaaagaaacccgaggacagcaccaaacaacaccaaaggaccgccaggagcaagg

SEQ ID NO: 108569 - RNA, 70 nt, Homo sapiens
cgacccgccccacccgcagcagaacaagcgagacgacgggaccgaaggaccccgccagagacaaccgagc

SEQ ID NO: 108570 - RNA, 67 nt, Homo sapiens
gaaagaagccgggagcggaggggagacaagcaaagacgggcagcaaacagcagacgaagaaagagga

SEQ ID NO: 108571 - RNA, 79 nt, Homo sapiens
gccccacgccggaggaaccgagaagagcagagcggagggagccccagacacggaacgcgaggccggcgcgccacacagc

SEQ ID NO: 108572 - RNA, 74 nt, Homo sapiens
aaaaagagggcccaaggagcagcagccgcccaaaacacaaaccaaagaagaaacccgaaggaccacagagaacc

SEQ ID NO: 108573 - RNA, 86 nt, Homo sapiens
cagagccaaggagcgcgcccgccgcagcggagcgagcaaaggcggaggagaaggagcgaaagcgcgaagaacggagaccagaacag

SEQ ID NO: 108574 - RNA, 71 nt, Homo sapiens
cgagaggaccaacaccgcagacgaaggcaccggacgaagaaagaaccacagaaaacaacagagacaaacgc

SEQ ID NO: 108575 - RNA, 68 nt, Homo sapiens
gagaaggaccaagaaccagcccaccaaagccccccagcgggcggccggggccaggagagaagggcggg

SEQ ID NO: 108576 - RNA, 75 nt, Homo sapiens
cgggacaaggcagaagagcaacaagcaggacgacagcagccaacaagcccaaaggaaaagcgaccaagaaaagcg

SEQ ID NO: 108577 - RNA, 73 nt, Homo sapiens
ccgaccggccgcgacagcgaacagcgcggccgcagggccacacgaccggacaaggaccagggagaagaggaag

SEQ ID NO: 108578 - RNA, 80 nt, Homo sapiens
caaggaaagggcgacagcaacagccgccggcggaaggacaccagaggaccagaacccacgagaaacagacgagccaacca

SEQ ID NO: 108579 - RNA, 75 nt, Homo sapiens
cggaggaaaacagggggcccaagggaggaaaacagcccgacggccaggaggcgaagagacgaggaagcccaggag

SEQ ID NO: 108580 - RNA, 52 nt, Homo sapiens
gacaaaagggccaaagaagggagagagacagaaccgcaaggccacaaaccag

SEQ ID NO: 108581 - RNA, 73 nt, Homo sapiens
cagcgggagaaaagcagccacgcagggccaccaaacagacccccagggcagccagagagacacagcccacgag

SEQ ID NO: 108582 - RNA, 82 nt, Homo sapiens
cagcagggacgcgggcacgggaccggcgaggacgcggacaaggcaaaaccagcaagcggacccagacaaaaggcgaaccccc

SEQ ID NO: 108583 - RNA, 73 nt, Homo sapiens
gcaggccaggaagaaagagaggaaagaagaaaaccaagaaagccccacggggggaaccacaaagaacggagac

SEQ ID NO: 108584 - RNA, 75 nt, Homo sapiens
gagccgggaagaaacaccagacaaggcgcccgcgaagagcccgcggccccaggcccccccccgccgcccccccgc

SEQ ID NO: 108585 - RNA, 75 nt, Homo sapiens
cggcccaacagggagcgcgagcgaccgaggggagcggagcgggacgggaccgcgcaagaaacgccggagggaaaa

SEQ ID NO: 108586 - RNA, 88 nt, Homo sapiens
cgaagaccggacgccgggaagcccaccgaaggcgccccccaggaagggaaaaggccgaggcacagcgggaagaccgcaaagacgaccc

SEQ ID NO: 108587 - RNA, 74 nt, Homo sapiens
cacgcggagcggaagacggcaacccagggcggagaacggaaaagcaccaggaagcagagaggaccgcagaaggg

SEQ ID NO: 108588 - RNA, 73 nt, Homo sapiens
aaccacagccgggaccggggggagcaaagcgcagggaagagaccgggagccggcaagagccgacggaaacacg

SEQ ID NO: 108589 - RNA, 60 nt, Homo sapiens
gcacacccgcccggcgcgacaagggccagccccgagaaggaaaacacccggcagggaagg

SEQ ID NO: 108590 - RNA, 70 nt, Homo sapiens
ccgaacaaacaaacacccagaaacaagaggaggagggagacaggggcaaaaaacggcagggaagaggcga

SEQ ID NO: 108591 - RNA, 74 nt, Homo sapiens
agaaggaccaagaaccagccccacgacggcaggcgcacggaacagcgaggccagcaggagacggagccacggag

SEQ ID NO: 108592 - RNA, 88 nt, Homo sapiens
cagcggacccgacggcgagaggccaaggagcgggagcggaacgaagaacaccggcagagaacaagccagccgccgcagacccaagcca

SEQ ID NO: 108593 - RNA, 54 nt, Homo sapiens
agaaccggagagcacccaacaaaagcaccaggccggaggacgagacaacgcagc

SEQ ID NO: 108594 - RNA, 84 nt, Homo sapiens
gaggcaggcggagccgaccgggccagaccgcagagaaaggcccccccgagccccccagcgccacagcaaggacacgaggcacca

SEQ ID NO: 108595 - RNA, 74 nt, Homo sapiens
gacgaggccagccgggcaaccaaaaccagcagccggggcgccaccagcaaaaccagagaaacaggcagagaaag

SEQ ID NO: 108596 - RNA, 83 nt, Homo sapiens
agcccggccgaggcaaaacggccccccccagcccgccccaggggaagggcggagacggagggggagcacgaggaaacgaccgg

SEQ ID NO: 108597 - RNA, 68 nt, Homo sapiens
aggcgcggccgccccgagcagcccacccggcaccaccgcagacccggccagaccccaacagacacggg

SEQ ID NO: 108598 - RNA, 77 nt, Homo sapiens
cagccccaagagcgggacacagacagcgagcagaagaaaacagaaaaacccagacacccgcgacagagacagccgac

SEQ ID NO: 108599 - RNA, 86 nt, Homo sapiens
caacccaccgaacgaacacacgggacaaccagcgacgccggagcagcccaacccagcgccggccgcccgcaggacaccgagggccc

SEQ ID NO: 108600 - RNA, 57 nt, Homo sapiens
gacaacagccaccggaggacaaaaggaagcacgcgcgcggacaagaccagaaagaaa

SEQ ID NO: 108601 - RNA, 59 nt, Homo sapiens
ccaagggccaggaccccgcacaacaggacccggcaccgccagagcgcaagaccggggga

SEQ ID NO: 108602 - RNA, 81 nt, Homo sapiens
gcgccgccgcgagcgccacgccaaggaggggcagcacgagccagggagccgccgggaccggcccgggagacgacaacccaa

SEQ ID NO: 108603 - RNA, 80 nt, Homo sapiens
cgagaccccgcggaacgcccaccgcggagagcagcacgaccccagcacagcccgccgccgccagccccccaacagccaca

SEQ ID NO: 108604 - RNA, 55 nt, Homo sapiens
caaacgcgagcgaagaggagcaaaggaggccaccaaacccacggcaccggggcac

SEQ ID NO: 108605 - RNA, 110 nt, Homo sapiens
ccgaccacaacggaaaaagcaccagccggcaggaccacagagacgaaggcacacagccaagcaccgaacaggacaacacaaacaaaaaagagagggagaaaaacaagaga

SEQ ID NO: 108606 - RNA, 76 nt, Homo sapiens
cgaggggaggggcgagacggaaaaggaaggggcaggaccggaaggaacaaaggagaaggggacagggagagagaca

SEQ ID NO: 108607 - RNA, 75 nt, Homo sapiens
gaaggcagcggggggaaggcagagcgagaccccaacaggcccgaccaacaaagaaacccaacagacggaaaccac

SEQ ID NO: 108608 - RNA, 77 nt, Homo sapiens
ccgccacgcggcccgccaccgaggccgacaaccagcgggagaacgacaggagggggccagcgagggaaaggcccaga

SEQ ID NO: 108609 - RNA, 79 nt, Homo sapiens
cggaggccacagcaggacaccccgggcacgccacgccccaagccaaaacagcagccggacagacgagagcacaaggaga

SEQ ID NO: 108610 - RNA, 71 nt, Homo sapiens
gcccaaacccggaaacccagcggcccagccggcaacggggcggcacacaaggagcgaagggcagggagaac

SEQ ID NO: 108611 - RNA, 82 nt, Homo sapiens
cacacacagacagggcccagcggcgaggagcacccccaccaccccggcccacccggcgaagcccagcgcccccggccagcga

SEQ ID NO: 108612 - RNA, 81 nt, Homo sapiens
gccgcgggcgccagaaggaagaggcggacggaggagcaggcgagaagagaaggcaaggacggggacacaagaccagccagc

SEQ ID NO: 108613 - RNA, 82 nt, Homo sapiens
aaccacagacacgagggaggacagcaaaaaccagggcccacagaggaggcggacccggacgacaccaaagagacccccacga

SEQ ID NO: 108614 - RNA, 82 nt, Homo sapiens
ggccaggccggcgccggccggcgccccggggcccaagggggcagaggccgcggagccagagggcacccgaagcgggcgcggg

SEQ ID NO: 108615 - RNA, 49 nt, Homo sapiens
acagcacgcagcagccaaccacgacacagagggcccccgacagggagac

SEQ ID NO: 108616 - RNA, 106 nt, Homo sapiens
ccggaacaagagcggaggcagccgcgcccaggaggcgccccgccacgcaggcgcgggggacgacggcgggggcacacggggagggagcacaagacaccggacacac

SEQ ID NO: 108617 - RNA, 87 nt, Homo sapiens
cgaggacagcgcggcccgcgaggagccgccgcgcgcccgcgcccccgcgcgacgccaggaaaaagaacgcacgggaaacccaagaag

SEQ ID NO: 108618 - RNA, 64 nt, Homo sapiens
ccacaagggccccacagaaggagggcaccaggacagaaggcgggagaaagggaacagagcgcag

SEQ ID NO: 108619 - RNA, 59 nt, Homo sapiens
aacgcccaccgcaggggggcggagaccgcggcaaaagcagcccagcgagaccgcaagag

SEQ ID NO: 108620 - RNA, 81 nt, Homo sapiens
ccccgaggagacagaggccgcggcagcaacggcaagccacggccgccagccgcgagggaacggaggggagggacccgccag

SEQ ID NO: 108621 - RNA, 81 nt, Homo sapiens
aaaaggacggggaccaaaaaggcgggacacagaaaagagacgacaaaacggcagaaaggaagcagggaagaagagcaaacc

SEQ ID NO: 108622 - RNA, 52 nt, Homo sapiens
gaagcgaagaaacgggaagcaaggaacaagggcaagaccgcagcaggaacag

SEQ ID NO: 108623 - RNA, 92 nt, Homo sapiens
gaaaagcgaaccacaccagcaagacgacgaagaacagcaggccagagaacccaaaagcaaacccaagaccgaaagaaacccgggaaagggac

SEQ ID NO: 108624 - RNA, 71 nt, Homo sapiens
caagaaaagacacacacgacacacggccaagcccaaacaagcacccgaaagagcgaaagcccagacaggaa

SEQ ID NO: 108625 - RNA, 85 nt, Homo sapiens
ccacgaggagcacagccgggccgcgcgaagccaacgggccgaagagcgaaagcgaaaaaggcagcagcccaaaagaaggaacacc

SEQ ID NO: 108626 - RNA, 66 nt, Homo sapiens
gcaaacgaagggcaagaacaaaaagggggcgagcccggcccggcccggaaggaaaaccaccagccc

SEQ ID NO: 108627 - RNA, 54 nt, Homo sapiens
aacccggcagcagaagacaagaagaggaggcgccccagcggccggagcacaggg

SEQ ID NO: 108628 - RNA, 62 nt, Homo sapiens
ggggacgcggacgcacggacaggagagacaacggaggcaagaaagacggagaagcgagaaga

SEQ ID NO: 108629 - RNA, 60 nt, Homo sapiens
ccggagcggggggcggagcagacacagacagcagagggagggaaagaaaacaagccaccc

SEQ ID NO: 108630 - RNA, 77 nt, Homo sapiens
gcacgccgaccaacacgcaaagaacaaaccaaaccacgaaggccaagagaggagagaaaaggacccgagccccaaag

SEQ ID NO: 108631 - RNA, 69 nt, Homo sapiens
ggcagcagcagagaacgcagagacgcacgggcagaccaacaacggagaacaagaaagccgcaaacaggg

SEQ ID NO: 108632 - RNA, 78 nt, Homo sapiens
gccgcacacaggggaccgcaaaacagagaccggaaaagccggacgcccagccgacacacagcagccgggaaaagcaaa

SEQ ID NO: 108633 - RNA, 85 nt, Homo sapiens
cggcgaccgagccggagcgccgacgaccaagaggcgaagaggagcgggaccgcaaaccgcccgcagaccagcacgcgagagcgag

SEQ ID NO: 108634 - RNA, 77 nt, Homo sapiens
ccgggccggggcgagccacaagggaccaaggcccaagccaggaccacgcaccgggaggggaagcgcagggcgcacag

SEQ ID NO: 108635 - RNA, 66 nt, Homo sapiens
acggacacccacagcggggcggcggcggcggcggcgcggcccaaaaggaacgggaagggcacagga

SEQ ID NO: 108636 - RNA, 68 nt, Homo sapiens
gggagacagcaagcccaggcccaggggacacagggagggggccccaagcgagaccccaggagcgcaca

SEQ ID NO: 108637 - RNA, 76 nt, Homo sapiens
cgagagagaggacacgaaacagagaggggaaggagcccagcgaccgagggagaccacaaaaggccccagccaccag

SEQ ID NO: 108638 - RNA, 74 nt, Homo sapiens
aaaagacaggcccaccgaagaaaagcaccaaagcagcaacaaagcacacagcgcgccaaagcaagagcgccgac

SEQ ID NO: 108639 - RNA, 80 nt, Homo sapiens
gacaacagcccaacaacacccaggaagaggacacagccagggaacccacccacaaagcccagggcgaagcaccgaacaag

SEQ ID NO: 108640 - RNA, 76 nt, Homo sapiens
cagcgccggacagagaagcccccaaggagcgcagccgcagaacaagaacggcaggcgaaagaccgacagcaagacc

SEQ ID NO: 108641 - RNA, 114 nt, Homo sapiens
gaggagagcgcccacaagacggagccggccgcaccacacgggcacagcagcccggcccaggccaggaaagaaaaccagagacagagaagaaaggggcccccggcagcagcccaa

SEQ ID NO: 108642 - RNA, 73 nt, Homo sapiens
aggcccacccccacaaggagggcaaggcccaaggcccgaccccacccgaccggcgcgccgcccagccagaagg

SEQ ID NO: 108643 - RNA, 28 nt, Homo sapiens
aggacgcggaacgcaggccacacccaag

SEQ ID NO: 108644 - RNA, 42 nt, Homo sapiens
cgggccgagcacgagcggcagggccccacggcacgacaggag

SEQ ID NO: 108645 - RNA, 67 nt, Homo sapiens
aacagccaggggaaaggccacagaagagggcacagagcagaggacaccacaggaaggaggcgcagag

SEQ ID NO: 108646 - RNA, 51 nt, Homo sapiens
aagcccagcggccaaacaaccacaagcggagggaccccgggagggcccagc

SEQ ID NO: 108647 - RNA, 82 nt, Homo sapiens
ccagccgccgcgcccacagccagcagcgggaccgacgaggaaaaaggagcagacaccagggcgggcgcacagccagccagcc

SEQ ID NO: 108648 - RNA, 79 nt, Homo sapiens
ccccacgcaacgcggaagagaaggcacaaaggccggggcccggaaggggcgaccggaccgggagaagaaggcgccgagg

SEQ ID NO: 108649 - RNA, 78 nt, Homo sapiens
acaggcggcacgacgggcaaagaggccacagaggcagccaaggaaccgcggcagaaaagaagggcgcccccccggcac

SEQ ID NO: 108650 - RNA, 75 nt, Homo sapiens
ccggggcgcacgaaggccagcgcaggcgcacgccgaagaagacggcgccagcccaccgcaacaagcccagagaac

SEQ ID NO: 108651 - RNA, 75 nt, Homo sapiens
agaggcgggacgcgaacacagagggaagagaaagcaaacgagcagggcaagcgcgagccggcccggccgaccaga

SEQ ID NO: 108652 - RNA, 98 nt, Homo sapiens
gcacagaccgcccacacaccaaccacggaggcccccccgccccaggaacgccgggaaagaaagacagaaccagcacagcaaaaaaggcagcgcaccga

SEQ ID NO: 108653 - RNA, 81 nt, Homo sapiens
gcgcgccggaccgcaggacgacagaccgagggaggacaccggaccccggacgcgggaaagaggcacaagaaaaggaagcaa

SEQ ID NO: 108654 - RNA, 88 nt, Homo sapiens
cgcaggccgcgcgaggaggccaccgaagccggggacgcgaggagccggcgggcccggccccggcgaagcgggcgccccagcccagaga

SEQ ID NO: 108655 - RNA, 87 nt, Homo sapiens
cgacggcggaacccggggccgggacgcagcccggcggcagcaggagcgcccaaggggaccccaaggaggggccccgggaggaccagg

SEQ ID NO: 108656 - RNA, 40 nt, Homo sapiens
gccaggcggagcagaccaccggccccccagcgggaccggg

SEQ ID NO: 108657 - RNA, 48 nt, Homo sapiens
ccgacgccaggcagcgcccccaaacgggacagacagccagagggaaac

SEQ ID NO: 108658 - RNA, 78 nt, Homo sapiens
cggcgccccggcgcgaagaggcggaccggacggccgagggcccgggaggaggcggacaaggggacggcacccggcacc

SEQ ID NO: 108659 - RNA, 71 nt, Homo sapiens
gaaaacgcaagaccgaaaaaaaacggcagaaaccagagggaaggccccgaagacgcgcgcacaaagagaac

SEQ ID NO: 108660 - RNA, 106 nt, Homo sapiens
gggccccggggacaggaggccccgcaggaccgcacccgcggagacggacgcccggaggaagacagcgaacccccccaccacaggagcccagacccgggcacggcac

SEQ ID NO: 108661 - RNA, 92 nt, Homo sapiens
gccgcacgggcacggaggccaaagagacaacaagaaggaccgaggcagccccgccgcccagcccagagaaaggaaccggggccagggagacc

SEQ ID NO: 108662 - RNA, 90 nt, Homo sapiens
cgggccggcggggcacggggggcgacggccaagcggagcacagaaggcccaaaagaagaaaaacaagaagaagccgcgaaggaggagaac

SEQ ID NO: 108663 - RNA, 57 nt, Homo sapiens
cccacagaggaaacaccgggaaggcaaagaagaagcgcccacagaaggaagcgcggg

SEQ ID NO: 108664 - RNA, 83 nt, Homo sapiens
acagcgggacgccggacgagcgcaccagcgaccacaagacgccaaagaccgagacaggggcccggcaccgcgcccgagcccac

SEQ ID NO: 108665 - RNA, 72 nt, Homo sapiens
cagggacaggaccgaagggccggaaagaaagcacaccaaaagaaacaacccaagagacaacaggagacacgg

SEQ ID NO: 108666 - RNA, 54 nt, Homo sapiens
accggcccagacaacggcaaggcgccaaaaggaaacacggaagaccacaacaca

SEQ ID NO: 108667 - RNA, 79 nt, Homo sapiens
caaacaagagaacgggcccacacaacccaggcaaccaacagaaccacacgacgcgggaaccaccagagggcccgggaag

SEQ ID NO: 108668 - RNA, 82 nt, Homo sapiens
ggacagccaagcacccgccgccggcagccgcggaaggcggccacacacccggagcaccgcacacagcggcaagccaccggac

SEQ ID NO: 108669 - RNA, 82 nt, Homo sapiens
ccgccgagccgccccgagcccgccgccacacccgagcgagggcggcacgccacaggacggcacccaccgcaaggccacacca

SEQ ID NO: 108670 - RNA, 69 nt, Homo sapiens
gccgacggccggcgggcgggggccccgcgccgcggccgagcagcgggaggagacaggaagagagagcgg

SEQ ID NO: 108671 - RNA, 71 nt, Homo sapiens
aggggggcgggccgccggggaccccagcggaagccccccacaggcggaggaggaaccaaaggaaagacaga

SEQ ID NO: 108672 - RNA, 62 nt, Homo sapiens
cagaaggagggcagcccacggcggagccgagaagcgggaacagaggaagccacaacggagcc

SEQ ID NO: 108673 - RNA, 79 nt, Homo sapiens
cgggggcaggcgcccgcccccaggcgcgcccagccccgcagccagggcgaacccccgcagccgccacaggaccaggcac

SEQ ID NO: 108674 - RNA, 85 nt, Homo sapiens
gggcaacgacggacacgagcgcacgccgaaaacaggccgcaagagagggaccaagaaaggcccagggaccaaagcccggacaagg

SEQ ID NO: 108675 - RNA, 78 nt, Homo sapiens
acccagcacgccccgcgcccgcacgccccccacggcagagaggcgagacacggaacggcgaagaagcgcacgggcccg

SEQ ID NO: 108676 - RNA, 42 nt, Homo sapiens
agggaaccagcgaccaccgacagagcggaaggaacgaggaac

SEQ ID NO: 108677 - RNA, 61 nt, Homo sapiens
cgggacaagaaaacagcggaaaaagaagagcccgggaaagccaagggaaccagggccacac

SEQ ID NO: 108678 - RNA, 98 nt, Homo sapiens
gcacacgcacacaccgagaccaaaggacccgggagaccacaccgggagaggagaacacgagacccgcacaaaaccccgccccccaggccacacagggg

SEQ ID NO: 108679 - RNA, 86 nt, Homo sapiens
ccggccccgcccgcgccggaagagccacgccgaacagccgcaagaggccgcggcgcgccaagccggccccacagggccccgccacg

SEQ ID NO: 108680 - RNA, 71 nt, Homo sapiens
agaaccaacaaccaaagaaaacagaacagaaaagggcagcgcaagccacaggaacgagccacgagaagccc

SEQ ID NO: 108681 - RNA, 79 nt, Homo sapiens
caggcacaccaaccccagccaccgaaagggaccaagcgaacagcccaaagagcaaaaagaaccaagaaggagcgaggga

SEQ ID NO: 108682 - RNA, 79 nt, Homo sapiens
cgaggggccggggaccgcacgcccgaagccgggcggaggagagccaagcaagaacccggacgcacaaggagcaaagacc

SEQ ID NO: 108683 - RNA, 85 nt, Homo sapiens
ggcgcggaaagcgacaccgaggaacagagccccgaagaggcaccagggggcggcaccccggggacccgggaagaggaagaccaac

SEQ ID NO: 108684 - RNA, 81 nt, Homo sapiens
gaagaacagccgaagaagggcccccggaagaaccgaaggacacacagagaacaggaacaacccagacacccgggccagcac

SEQ ID NO: 108685 - RNA, 82 nt, Homo sapiens
aaggagacaaggcacagccggggaaaacccaagaaacacagagggggcggggggcaccaacaaccacggacacacagcagag

SEQ ID NO: 108686 - RNA, 78 nt, Homo sapiens
gaaagccaacaagagcaaagaaaacaggcccaggagagcagcaacaggaacgacccacgggagacagaagggaaggac

SEQ ID NO: 108687 - RNA, 84 nt, Homo sapiens
caaagaggccaccgacaggaaaaggaccagccgcagaagccaggagaaggagccgcacacagagcaggcgacccggcaacaaga

SEQ ID NO: 108688 - RNA, 81 nt, Homo sapiens
ccccgggccaggaaaccaggcccccggcccccggagccaaaagcgccgaggaggaggcgagcgacccaggagagccccaga

SEQ ID NO: 108689 - RNA, 85 nt, Homo sapiens
gccggccccagaggagggacggaacggaggaccaagagcagggaggccccagaacccggccgaagccacccccccggcagccgag

SEQ ID NO: 108690 - RNA, 71 nt, Homo sapiens
aaaaacgaaaaaacacacgcgaacaccaaaggacggcggagaacggaaaagcaccaggaagcagagaggac

SEQ ID NO: 108691 - RNA, 82 nt, Homo sapiens
gacggaggacgggaggagaacgaccggagaacgcaggcccgaagggccgggaggggcaacaaggccacacggaacagccccc

SEQ ID NO: 108692 - RNA, 68 nt, Homo sapiens
gaacagccgacagcagaacggaaagaaaggcggcgaggaagagccagaagagcccaaaagcaaagcag

SEQ ID NO: 108693 - RNA, 82 nt, Homo sapiens
gacgccaaacggggagcacggcgccaccgaggcaacgcagcagccaacaggacggcaagacgcacccccagacgccgaccca

SEQ ID NO: 108694 - RNA, 82 nt, Homo sapiens
cggaagggaaaacgaagacggcgacagcagcgcggggagagccaggacaaaggcgcagaggacacgccgacacagagcccgc

SEQ ID NO: 108695 - RNA, 70 nt, Homo sapiens
ggacgcggagaaaccaaccacagggcgcaaagccaagcaagaaaagagacacagaaggaaaaagaagaga

SEQ ID NO: 108696 - RNA, 80 nt, Homo sapiens
gcagaacaacagcgaggaagaagaggacgacgacgacgaggaagaggaggcgagagccgaaaaccagccccgcccacaca

SEQ ID NO: 108697 - RNA, 78 nt, Homo sapiens
ggcccccgggcagcggaagcggcgcggcggcggagaagggccaaaaccggcgggggcagcgcaagccacaggaacgag

SEQ ID NO: 108698 - RNA, 66 nt, Homo sapiens
aaaagagaacacccccgagcggagacagcagagcaacacaccaggaagcagagcggcaacaaaaac

SEQ ID NO: 108699 - RNA, 76 nt, Homo sapiens
agagccgcacccccagggcggcacgcgcagggggcaccgaaacagcccgcagccgccccaggcgccccccgcccgg

SEQ ID NO: 108700 - RNA, 71 nt, Homo sapiens
cggccccgggagggagcccggacggacccgccacaagcagaaagaggaccaaacaggagcgccgagcccac

SEQ ID NO: 108701 - RNA, 80 nt, Homo sapiens
ggaaaccgccaacaggcaaggaagccggcagcaggggcccaaggggagagccacgggcccaggcgaagcagcccaaaccc

SEQ ID NO: 108702 - RNA, 73 nt, Homo sapiens
ccaggaacccgcacggaaaccagcacccaaaagcaagacccaagagggggggccccagcccggccgaacgggc

SEQ ID NO: 108703 - RNA, 36 nt, Homo sapiens
cagcccaagggaccgggcgaccgcagcaagcaaagg

SEQ ID NO: 108704 - RNA, 87 nt, Homo sapiens
gcggaacagggcggcacggcccgccacagcgacgccggcgccgagggacaccgcagagaggcagaggcccgaaggacgaaaccaaga

SEQ ID NO: 108705 - RNA, 71 nt, Homo sapiens
cccccagccagggaacgggcaaagcaaccaggagacaaggcagagaaagaacagaggagaagcagggacgc

SEQ ID NO: 108706 - RNA, 63 nt, Homo sapiens
aacagcagacccaagagcagcggaaaagaccagcacagccaaaagaagcaagggaaagaccag

SEQ ID NO: 108707 - RNA, 68 nt, Homo sapiens
ggaaaggcgcaacaacacaaaaaaagcagcaagggcaacaaaaacccaaccaccaccagcagcccaca

SEQ ID NO: 108708 - RNA, 75 nt, Homo sapiens
gagggggaaccaggacaagaaggagggcgcgcggagaggaaaagaccggccagccgcagcgagaccaggagccgc

SEQ ID NO: 108709 - RNA, 65 nt, Homo sapiens
gagggcggccaacgaaaggagggcaaaacagacgagaaccgccagggggggacgccaccagagga

SEQ ID NO: 108710 - RNA, 67 nt, Homo sapiens
aacgaccagccaacaacgggaccagaaaccgaaaccagcccccaaggggaaccagccagacccacgg

SEQ ID NO: 108711 - RNA, 70 nt, Homo sapiens
ccaaaaagcaaacggaccagaccgaccaccaaaaggggcccacgagaagagcaggcgacgggggagaggg

SEQ ID NO: 108712 - RNA, 92 nt, Homo sapiens
gccaagaggcgccagccggagaccaggacgagcagcaggcgcgagcgaaaacaaacagcggggcgcgagcgcccccgccccggccccgagag

SEQ ID NO: 108713 - RNA, 45 nt, Homo sapiens
cgaggcgaagaaagaccacgagccaccaacagagccaggagccag

SEQ ID NO: 108714 - RNA, 61 nt, Homo sapiens
cccaggaccccaagcagggggcaacaggaaaacaacccagagaacccaaacccccagacaa

SEQ ID NO: 108715 - RNA, 72 nt, Homo sapiens
cgcgcccaagggcggggacacgggccgcgcgaaaaagaagcaacacacacgcgggaccggaacgaggccgga

SEQ ID NO: 108716 - RNA, 72 nt, Homo sapiens
aacacccgaacagcgaaggaaccagagaaggagaaacagcagggccaaaggcaagaacccgggaaaggcgcg

SEQ ID NO: 108717 - RNA, 75 nt, Homo sapiens
ccgaacaagcagagaggagaacaagagagagaggaaagaaagacaacaggcacaaagagagaaggaacacccaca

SEQ ID NO: 108718 - RNA, 80 nt, Homo sapiens
cagcgaagaagagacaggcgagcgacccccggccgaagccggagaaaagacccggccgaggaaaagacagaggcgagacc

SEQ ID NO: 108719 - RNA, 73 nt, Homo sapiens
cgggcgacgccacggccgcacacacgggaccggacaacaacaggaccgacgcgcaggcggccccggagaaggc

SEQ ID NO: 108720 - RNA, 73 nt, Homo sapiens
gacggcgggcgagggaggggaccgccgcgggaccaggaaggcacacggaccgcaaaaacaaaggaaagaaagc

SEQ ID NO: 108721 - RNA, 76 nt, Homo sapiens
caacgccaagagggaaggggacccgccgggaggacgcggagccagcaccgccgaccgccagcgccagaagccagag

SEQ ID NO: 108722 - RNA, 66 nt, Homo sapiens
acaagaacacccgagaggggggcaaaaggaagagagcaaccccgggaacccaaaggaggaggagaa

SEQ ID NO: 108723 - RNA, 70 nt, Homo sapiens
cccgacgccacgaagaacagcagcaagaccccccgggaaccacccgcgcccccagaggagccgccgcgcc

SEQ ID NO: 108724 - RNA, 65 nt, Homo sapiens
caggagcaccacgagagcacccagaggcgagggaggcggccggagccaaaccgaagagcggaaga

SEQ ID NO: 108725 - RNA, 59 nt, Homo sapiens
gggagcaggaaagccagggggacccagcacagagaggcccacgcggaccggcagcgcca

SEQ ID NO: 108726 - RNA, 78 nt, Homo sapiens
agcaccacaaggaagcagcccagaacaaaagcagacccagagagagcagggagcgcaggaagacaggaacaagaaaaa

SEQ ID NO: 108727 - RNA, 76 nt, Homo sapiens
accccgcccagcccagaaggcggaaacagacaaggaaaggacaggcggagcgcgcagaggaaagccgggaacagaa

SEQ ID NO: 108728 - RNA, 67 nt, Homo sapiens
ggagaacgcggcaaaggaccaagcaaagaccccgagagggcaggcccggacccaggggcgcaaaccc

SEQ ID NO: 108729 - RNA, 76 nt, Homo sapiens
aagagccggcacgcacaacaccgagaaggggagagacgcagagcgggcagaccgccaggccagcgaaacagcccca

SEQ ID NO: 108730 - RNA, 74 nt, Homo sapiens
gcgaaccaaaccgaaagccgacagaaccacaccggacggaggaagacaggaagaagacggcaggggcagccccc

SEQ ID NO: 108731 - RNA, 64 nt, Homo sapiens
cgacagcaagcaccggagggagaagacagcccgccaaggaacccgcggggcagaccacaccagc

SEQ ID NO: 108732 - RNA, 72 nt, Homo sapiens
gcccagcagaagccaccaagaggcaacagacagaggaccaggagcaccgcccaggagaaggaccaagaacca

SEQ ID NO: 108733 - RNA, 70 nt, Homo sapiens
cagacagccgcacgaaccggaccaggaggacggacaagccacacaagaaggagaaaaaaaagagaaggca

SEQ ID NO: 108734 - RNA, 82 nt, Homo sapiens
gccaaaggcagcgcccagcaacaagacagagcggccggagccgcggcggccgcggagagagacagggcccagggcaagcggc

SEQ ID NO: 108735 - RNA, 81 nt, Homo sapiens
agggacgcagccccacggcgcgacgcgaggcggacgcacgggcccggaaaggagaacggaagaacaccagaaacgagggga

SEQ ID NO: 108736 - RNA, 76 nt, Homo sapiens
ggcaagcgaccagccccccacacggacggagaaaccacgacaacccaaaagacccgcaaggcagcggcacaaagcc

SEQ ID NO: 108737 - RNA, 75 nt, Homo sapiens
ggcccgcaggagaggaaaaggagcgagcagacgacaagccgggagcgggcggccaaccaggaagaagaacgcaag

SEQ ID NO: 108738 - RNA, 52 nt, Homo sapiens
aggcggcgaaaacagaggggccggacccagaagaaccacgcgcaggccagag

SEQ ID NO: 108739 - RNA, 71 nt, Homo sapiens
acgggacacgggccaagggagcgaaaagaacccccaaaaggcggccaaccagagaggaaagccgaggacag

SEQ ID NO: 108740 - RNA, 76 nt, Homo sapiens
aacacgagcaggcgcgagacgggggaacggacccccaggaacggaaaacagccccaaagcagcagaccgaagaaag

SEQ ID NO: 108741 - RNA, 64 nt, Homo sapiens
agcgagagcaaggaaagcaccacccagcacagaagaggagaccgagcagagacgggacgccagg

SEQ ID NO: 108742 - RNA, 79 nt, Homo sapiens
agaaacggaggagcccgccgaagcagggccggcgagagagaacgcaagaccacccccgacacacaaaaaccaacagaaa

SEQ ID NO: 108743 - RNA, 71 nt, Homo sapiens
ggaccccgcggcgggaggagccgccccgagccccaacaacgaccggggacgcccaagccagaacagaccgc

SEQ ID NO: 108744 - RNA, 82 nt, Homo sapiens
ccagcacggagggaccgcagagagaggcgcagaaggaccgggagcacagccgccgaggggggccgaagccgacagggacccg

SEQ ID NO: 108745 - RNA, 75 nt, Homo sapiens
aggccagaggcagaaccccaaaaccagcagaccacagacccacagcgaaagcaacagacacaagcgagaccacac

SEQ ID NO: 108746 - RNA, 59 nt, Homo sapiens
gagacccggacagggcaggaaacagagacggggcgacggggagaggcaggcgaggggac

SEQ ID NO: 108747 - RNA, 74 nt, Homo sapiens
gccgagagccaaagcacaggccggagagacacagggccgccagaagcgacagccccgacgagagggcaccagga

SEQ ID NO: 108748 - RNA, 75 nt, Homo sapiens
aggagcgcccgggcggcgcacgccgcggacagcaccgcgcgcgccaccgccgagaaccaccacccgccaggcgcg

SEQ ID NO: 108749 - RNA, 73 nt, Homo sapiens
ccccgcgccgccgcagagccgcccacagccagaacgcaaagcagagcaaacgagcaggacagcagggcgagaa

SEQ ID NO: 108750 - RNA, 80 nt, Homo sapiens
gcgcagacggcccagacgccaacaagccgccgacacgagggaccacgcaaacgaagcacgccaacccagcagaccaaggg

SEQ ID NO: 108751 - RNA, 47 nt, Homo sapiens
ggccacacagacacgcggaggggccgcagaagcgagacaaacagcgg

SEQ ID NO: 108752 - RNA, 85 nt, Homo sapiens
aaaggcagggcaaggaaacggccacaagcaaaagcagaccggaaaacccaccggcaagaccacacccgaggggagcccaggacac

SEQ ID NO: 108753 - RNA, 74 nt, Homo sapiens
cgagggcgcaacccagcaccgagggcaggggaagggaaccggcagcgaacgaggaaggggaaggaaaagcgcag

SEQ ID NO: 108754 - RNA, 68 nt, Homo sapiens
ccgacccggcccggcccgcggcagcaaacacgggaaagaacaagggacagaggcacaaaaggagaaag

SEQ ID NO: 108755 - RNA, 98 nt, Homo sapiens
ggcgaccgggcaccagcaggacccgaggccaggagccaggggcccagaagggcggagaacggaaaagcaccaggaagcagagaggaccgcagaaggga

SEQ ID NO: 108756 - RNA, 60 nt, Homo sapiens
ccacagcagccagcggcggaaaagggaagggggggcaggcccgaagaagcggagcccacc

SEQ ID NO: 108757 - RNA, 80 nt, Homo sapiens
aacgcacgcacaccacccccaccccaaagagaaacaggacccagagacaggggacaaagaacggggacgagggaacgagc

SEQ ID NO: 108758 - RNA, 56 nt, Homo sapiens
acccccacaggccccaggaaccacaggagcaaagccggaaacgagcagaacgcacg

SEQ ID NO: 108759 - RNA, 72 nt, Homo sapiens
gcgagccacgcgggagaaacaaggagacagccaggaacaagagcaaacggcgaaaccggcacagaagcacgg

SEQ ID NO: 108760 - RNA, 68 nt, Homo sapiens
gagcgccgagccgcacggcggagacaacggaccgcggggagggcccgaagaggcacaggagcgaaccg

SEQ ID NO: 108761 - RNA, 49 nt, Homo sapiens
ccgccaggagcaaagacgccaagccagcacaaaggggaccaccaggaaa

SEQ ID NO: 108762 - RNA, 82 nt, Homo sapiens
acccgacacaaaaaggagacccaaagccaaggagaagccccagcggcagaagccagaggacacaggaacgccacaagaaaca

SEQ ID NO: 108763 - RNA, 57 nt, Homo sapiens
ggacgagcaaaagagcaccgaaccggagaccgaggagagggcgaagacaggacggcc

SEQ ID NO: 108764 - RNA, 110 nt, Homo sapiens
ccggcccgggcccgagagcggcggcccggccccggcgcagcccggaaagccggcaagacgagaaagcaggaaggagagaaaaggcgaaccgaaagagaaaaccaaacaga

SEQ ID NO: 108765 - RNA, 55 nt, Homo sapiens
cccaccccgaaacgccccgaaaagacgggcaacaggcacagagcacaggaaggag

SEQ ID NO: 108766 - RNA, 74 nt, Homo sapiens
ccaggccagacggacgcaggcggcgcgcgcgcgccgcggaggacaaacagaacaccccccaacggaaagcaaag

SEQ ID NO: 108767 - RNA, 58 nt, Homo sapiens
ccgcccacaccccaagcacccaggaaccggcaacaggaagaaagagggccacggacag

SEQ ID NO: 108768 - RNA, 81 nt, Homo sapiens
caaggaaacacagggcgacggggcaacagccgcaccagggggacaaagcgggaacccccgaaaagaaggagaaaggaaccc

SEQ ID NO: 108769 - RNA, 76 nt, Homo sapiens
gaaccccacggagaaccagagggcgggggggggcacccccaaaggaagggccccgggcaaggagaagcccagcgcc

SEQ ID NO: 108770 - RNA, 79 nt, Homo sapiens
acaaggcccgagagcagcgcgccggccaggcccggccgcccaaagaacaaccccccggccccgggcacgcacacgggcc

SEQ ID NO: 108771 - RNA, 41 nt, Homo sapiens
cgacaacagcgcacgagcgggaccagaacagagaagaaagc

SEQ ID NO: 108772 - RNA, 73 nt, Homo sapiens
agccaagaagcgaaaggccaggccaccacggcccaaaaccaacgccccaagccccagaagagagagagcggcg

SEQ ID NO: 108773 - RNA, 73 nt, Homo sapiens
ggaaaggacgggaagggcgacagcgcaaggagacgaagcgcacagaagagggaccaccaaagggaacagcagc

SEQ ID NO: 108774 - RNA, 79 nt, Homo sapiens
agcacaagagccggggaagacagggaagccagacagaagcggcgcagccccgacacgacccccagccaacaagaaaccc

SEQ ID NO: 108775 - RNA, 73 nt, Homo sapiens
gggcccagccccagcagcggagggggaggacgcaggacgcacaggagagcaaaaaaccccaaccagagagaaa

SEQ ID NO: 108776 - RNA, 74 nt, Homo sapiens
cccaagacaggaggccaaacccccgggcaggaaaaaaaagcgaaaccagcccagaagaacaggcggcgggcaga

SEQ ID NO: 108777 - RNA, 66 nt, Homo sapiens
caagcaacagaacacagaggaaacacgcgaagccacccaaccacagccaccacagccaaaaaacaa

SEQ ID NO: 108778 - RNA, 57 nt, Homo sapiens
caccccaccagcaaacgaggcaaaagcagaccggaaaacccaccggcaagaccacac

SEQ ID NO: 108779 - RNA, 76 nt, Homo sapiens
acaaaacccagacaccgacgggccgcgaggggaagaggaagcaaagccaagagcagcccgacggccaggaggcgaa

SEQ ID NO: 108780 - RNA, 72 nt, Homo sapiens
aaaacaaggcaaccgcaggcaaagagagccgacaacaagaacgggcggaaacagggagggccacagcccccg

SEQ ID NO: 108781 - RNA, 64 nt, Homo sapiens
agagagacacggacaagagagccaggacgcaacaccgaaaaaagaagacagggaaaggaagaaa

SEQ ID NO: 108782 - RNA, 80 nt, Homo sapiens
acaccgagcgcgcacgggcccagcgcagggagaacaaagacacgccaacgcgcccaacagagaccgaccacagcacgggg

SEQ ID NO: 108783 - RNA, 76 nt, Homo sapiens
gcggagaagcccaccagaaccagcccaaggcagcaagaaagacgcaaaagggaaaaccgcaagaggaaaggccgcc

SEQ ID NO: 108784 - RNA, 72 nt, Homo sapiens
gaaaaagcgaaaaaccggagccaacgaaacaaaaagcaggccgagggagcaacaagagcagaaaggaagaac

SEQ ID NO: 108785 - RNA, 55 nt, Homo sapiens
cgggcacccgcaacaggcggcaagcagagaggcccggcgagcgaccgccggggga

SEQ ID NO: 108786 - RNA, 74 nt, Homo sapiens
gaggcaaagaaagacggaaaaggcgggaaagaagccgcagcaccgaacgaggggagcaacaggacaaggggaaa

SEQ ID NO: 108787 - RNA, 75 nt, Homo sapiens
cgcagaacgggaaacccgggcgagaaaacacagcacgaggaggacagacaagcgcacgaggggcccggaaacgaa

SEQ ID NO: 108788 - RNA, 76 nt, Homo sapiens
cagcagccagcaccagagcggaaaaccacagcaacgcagcggaagaggccacggaggcagcccaagggggccaggc

SEQ ID NO: 108789 - RNA, 77 nt, Homo sapiens
cggccccccgcgggcccccgggaccacccggccggagccagcagaaccccgccggagacaccacggcaaggccaacc

SEQ ID NO: 108790 - RNA, 71 nt, Homo sapiens
ggcggcagcgccccccgagagcaagccgaaggcaacccaccaaagaagaaaagacaaggagccaccacaaa

SEQ ID NO: 108791 - RNA, 56 nt, Homo sapiens
gacacaccacccaacaggagcacccacgggaacagcccagaaacgagggaaaaacg

SEQ ID NO: 108792 - RNA, 78 nt, Homo sapiens
aggagcagaaccaccggcagaaaagagacggacgcggaggggagcagagagggaccagcacgggcgagacagagacag

SEQ ID NO: 108793 - RNA, 79 nt, Homo sapiens
ccggggagcacacagagagccgcggaggaccgggcaagcggaaagccggaagacgccacacgcggggagagagaccccc

SEQ ID NO: 108794 - RNA, 47 nt, Homo sapiens
caaccacgaaagcacaagaccgaaacaggggaaaaaaccggccacag

SEQ ID NO: 108795 - RNA, 89 nt, Homo sapiens
ccgcggcggcagcagcaggagagagaggacgagacgcagggcacgggccaccaggggaacaggacaaacgagagcaggcgagccgccaa

SEQ ID NO: 108796 - RNA, 62 nt, Homo sapiens
gcaagagcgcaggacgaggggaacaggaaaaacgagaggagagagaacgcccggaaagagcc

SEQ ID NO: 108797 - RNA, 58 nt, Homo sapiens
cacagcacagccgggaaggggagccaccagccccccgggaaagggagcagcaccggcc

SEQ ID NO: 108798 - RNA, 86 nt, Homo sapiens
gagagcggcaacaccgggagaaacagaaggggagaaacgaggaccagggcggcaacccgggcagggagaccacagacacagagcag

SEQ ID NO: 108799 - RNA, 70 nt, Homo sapiens
caagccgcagggggaagagagagagaacccgagcgccgcagcggagaaagaaggaacgagcaagcaaccc

SEQ ID NO: 108800 - RNA, 72 nt, Homo sapiens
agagaaacgcgaggacggggcccaggaacggaaaagggcagccgcacgggacacaaaaggcgaagaagggag

SEQ ID NO: 108801 - RNA, 75 nt, Homo sapiens
ccagggcaggaaagggcacagcgaacgccaccccaccccagagaacgagggcagacccaagcgagaggcaccaag

SEQ ID NO: 108802 - RNA, 74 nt, Homo sapiens
cacggccccaggagaaagcgcgggcgaccggccggccccgacgggaggccacgcgcagccccggaagagccacc

SEQ ID NO: 108803 - RNA, 80 nt, Homo sapiens
gccacagccaaacggaaacacccacagacgccaaggggacaaccggcgaaaggcccccagcagaagaggcggccacccac

SEQ ID NO: 108804 - RNA, 72 nt, Homo sapiens
aaagagccagccgggacggggcccagacccccagacggaaggagggacaccggacgccggaagcaaagccca

SEQ ID NO: 108805 - RNA, 83 nt, Homo sapiens
cgcaggcggcgcggagagggggcgcgagcgggggcaaacaccagcaacacccgggacaaaaacgggggccaccacccccaccg

SEQ ID NO: 108806 - RNA, 74 nt, Homo sapiens
acgcacagaagagagccaaaggagggagagggcccaggaagaggcaagcggggccacaacgggaagaaggaaac

SEQ ID NO: 108807 - RNA, 103 nt, Homo sapiens
acagccaaccagcggaaaaggacaacggaggcagagaccaagcaggggcgaaacagccaagaacgagccaacgccccagcagcagagcagcgagccgagggaa

SEQ ID NO: 108808 - RNA, 81 nt, Homo sapiens
ggaccacccaggcccacagcccgggacaggggagacccgccccaagggaaagcacaaccccaggcacggaggggcaaagaa

SEQ ID NO: 108809 - RNA, 70 nt, Homo sapiens
ccaggggcaccgcagcgaccacccacacaaacccgggacgggccgagagaacaaaccaggggagggaaac

SEQ ID NO: 108810 - RNA, 74 nt, Homo sapiens
cgcccgccccgccggcccaccccggggagcaacagggcgggacccagagagccagcgacagggagacaacgccg

SEQ ID NO: 108811 - RNA, 76 nt, Homo sapiens
gaccaggcgccggccaaccgcgcggaggaggaaacaagggcagagccagcaaagaccagcaaagcaagcaacaaga

SEQ ID NO: 108812 - RNA, 85 nt, Homo sapiens
aaacgggggggcggccggggccgccaccacacgaaacagggcaaggcacgagaagagaagcccagagcaaaacaccccaaaccag

SEQ ID NO: 108813 - RNA, 69 nt, Homo sapiens
ccaaagaacccaagaggaacaccaacccacaggacagagacggaacagaagacagaaaagaacccaaaa

SEQ ID NO: 108814 - RNA, 79 nt, Homo sapiens
acgaccggggggcaggaggcacccggggcagggccccccgggccggccgccggacgacacagcccgccgccaggcacgg

SEQ ID NO: 108815 - RNA, 73 nt, Homo sapiens
aaaaggaagcgaaaacggcggaaaacccgaagcagaagcccgacacaggcacaagaccgagcaggcacagagc

SEQ ID NO: 108816 - RNA, 84 nt, Homo sapiens
aaccgcgcggccgaacccccgagggcggacggcagacaggcagcaaccggccccgcccaccagccccagcccagggggcaggcg

SEQ ID NO: 108817 - RNA, 67 nt, Homo sapiens
cggcggcggcggaacgccaggcagcccgacacgggagcgcgaggccaggccaacgccgggaagaccg

SEQ ID NO: 108818 - RNA, 58 nt, Homo sapiens
caagagagccccggagccacagaggacgccagggaaggcgccaacaacacgaacagcg

SEQ ID NO: 108819 - RNA, 85 nt, Homo sapiens
gggcgcggaacagggcggcacggcccgccacagcgacgccggcgccgagggacaccgcagagaggcagaggggcaacagaaagcc

SEQ ID NO: 108820 - RNA, 55 nt, Homo sapiens
gggggaaaggcaccaggacaagcaaagagcgagaagccaacggggccaaacaaga

SEQ ID NO: 108821 - RNA, 81 nt, Homo sapiens
gcggccgggccgcgccccccggcgggccggacggacaaacaacagaccaaggggcggaaaacccgaagccaggaacagcgg

SEQ ID NO: 108822 - RNA, 73 nt, Homo sapiens
cacaaaaacaccgacacagaggccccagcaaaggaaagggacaggaagcaccaaccccgcgaaacccaggaca

SEQ ID NO: 108823 - RNA, 87 nt, Homo sapiens
ggcgccgagaggccggcgggacgcgggcgccaggaccggccgaacgcagagaggacagcagcggacggccggaccaagaggcgccgc

SEQ ID NO: 108824 - RNA, 76 nt, Homo sapiens
aggggcccaggaaagcgaccccggggccaccgagccaaaaggacggcaaggccaccccaagccccccaccccccgc

SEQ ID NO: 108825 - RNA, 72 nt, Homo sapiens
gagggaagagaaaaggaacaaggcccccgcccccccgggcaggaagacaaaaacagacaaagagagaagcgg

SEQ ID NO: 108826 - RNA, 75 nt, Homo sapiens
ccgggaccaacgcaacagagaacagagcccggcgaagcagaccagagaccagcccgagggccagaaccacagaga

SEQ ID NO: 108827 - RNA, 75 nt, Homo sapiens
aagaagcgaaaggccaggccaccacgggacaagagacacgcaaaccaaggcgacggaaggcagccaaaaaaacag

SEQ ID NO: 108828 - RNA, 72 nt, Homo sapiens
ccgggacaagccaaaggagccagccggacgaccagacagcgcacaacgggaaagcacaaggaagaagcggac

SEQ ID NO: 108829 - RNA, 39 nt, Homo sapiens
ggaaaaaagagggaaaaaggcgaaggcagcaaccacaga

SEQ ID NO: 108830 - RNA, 67 nt, Homo sapiens
gccagacccgggagccgcggggccggaagaaacgaggaaagaagaaagcaccccgcaaaagaaggga

SEQ ID NO: 108831 - RNA, 73 nt, Homo sapiens
gccagagaaggacccaagaccggacagagagacagcacccagccaaacccaggcccgagaagaagaggaaaac

SEQ ID NO: 108832 - RNA, 64 nt, Homo sapiens
cggaagagggagcgcggccagcagaggaaccacgaccgcggccgcagggagagaaacagacaca

SEQ ID NO: 108833 - RNA, 81 nt, Homo sapiens
gcacgccgggcagcccaagcaccgcgccgggaccccgagggcgggccggcgcggcacccacaaagcacgggagaccgcggc

SEQ ID NO: 108834 - RNA, 77 nt, Homo sapiens
ccgcagcagggggcagaacccagaggcgggaggggccgggaggcagaggggcagggaagagcccagccccccccggc

SEQ ID NO: 108835 - RNA, 92 nt, Homo sapiens
gagcacagaagaaagagagagacagacccggacgagagaggagacaaagcagagcccacagacaaggccaaaggcaaagcgcacagaggggc

SEQ ID NO: 108836 - RNA, 67 nt, Homo sapiens
aaggacaccagaaagagaggagaagggaacaaccgaaaacccccgaaaacacaagaaaagcacgcac

SEQ ID NO: 108837 - RNA, 67 nt, Homo sapiens
ccgcggaccgcagagcaccccaggaaccgaggcaggaaccaccggacaaacaccggaaaccacaagc

SEQ ID NO: 108838 - RNA, 72 nt, Homo sapiens
caagaacagaaggcaggcgaggaacagacgggccggccagaaggaggacaggaaaaagccgagcgaacgaaa

SEQ ID NO: 108839 - RNA, 77 nt, Homo sapiens
gcaaaagaccaagagcacagcagaagaagggagggcaagcagaaagcagaggaaaacgaacaacacccaaagccaaa

SEQ ID NO: 108840 - RNA, 78 nt, Homo sapiens
ccggaccgcccccgagcccggaggggggagaaaagagaagaagaagggagggaaccgagaaaggagaggagaagaaga

SEQ ID NO: 108841 - RNA, 71 nt, Homo sapiens
aaagagaaccgaaagaagagaaaagaggaagaaaaggcagaagcacaggcagaaccggcgacgcggcgcgc

SEQ ID NO: 108842 - RNA, 38 nt, Homo sapiens
cccaaaggcgggagcaggggagagaacccgaggggcga

SEQ ID NO: 108843 - RNA, 48 nt, Homo sapiens
gggaagggagccaagacacacaagcagcccggacgaggggcaggaccg

SEQ ID NO: 108844 - RNA, 62 nt, Homo sapiens
agagccagaagcaaagaggcacgaaaacacaagcgaaaaccagaggccccacagacaaaacc

SEQ ID NO: 108845 - RNA, 72 nt, Homo sapiens
gaagaggagaagacaccaaaaagcaaacggaccagaccgaccaccaaaagaagacccagaccagccgggaac

SEQ ID NO: 108846 - RNA, 79 nt, Homo sapiens
agaacacgccaagcagcaacagcggcagcacacccccggacagcaagggacaagagaaaaaaagggcgggcgaacaaaa

SEQ ID NO: 108847 - RNA, 70 nt, Homo sapiens
gaggggcagagaggcagaagggaggcagaaacacagcgaccgagagggccaaccagaagacggagcaggc

SEQ ID NO: 108848 - RNA, 58 nt, Homo sapiens
gaggaggaggaagcgaggaggaggaggagcggccgagggggcgaggaagagacaggcg

SEQ ID NO: 108849 - RNA, 75 nt, Homo sapiens
agcgagggccagcccgccgggaccgcagagcggccacggagacggcggccccagaccggcaccaggacccgacac

SEQ ID NO: 108850 - RNA, 79 nt, Homo sapiens
cggggcaagccgacggaacagggcaggccggagagcgacccgacaaggcccacgcccaccaccaccacgggggacagga

SEQ ID NO: 108851 - RNA, 75 nt, Homo sapiens
caacagcagcaacagagccggaagggcagccggcacccgcacaacccagggggccgaacccagaccaacaaaagg

SEQ ID NO: 108852 - RNA, 68 nt, Homo sapiens
cagaggaagcgacagagagaggcagggagacgaaaagagagcaagaaaagcaaagccagaagcagaaa

SEQ ID NO: 108853 - RNA, 77 nt, Homo sapiens
ggggcagcaagagggccccgcgaccaggggcgcaggaaaaaccggacaaccagccacccgcacaaacaagccgcaga

SEQ ID NO: 108854 - RNA, 73 nt, Homo sapiens
ggagcacagccgaggcccgcgagggcgaggccgggagaggggccgagagaggggcccaggccggggaacggga

SEQ ID NO: 108855 - RNA, 78 nt, Homo sapiens
cacagacccccaccaagcagggagaggcgccaccccagcggcaccaagcgccggaacggagcagggacggaaagagga

SEQ ID NO: 108856 - RNA, 57 nt, Homo sapiens
aaaagaccgcagaaaaggaagcggggaaaaagagaaaggggaccaggcggagccccg

SEQ ID NO: 108857 - RNA, 85 nt, Homo sapiens
aaacaaggcccaggccaaggcacccggacacgaccaaaacccccaaagccaccagaaagccgcgagcccacagaggacagcagaa

SEQ ID NO: 108858 - RNA, 47 nt, Homo sapiens
gagaagccagggcgacaacaaggcaaccacgagaaaacggaaccgaa

SEQ ID NO: 108859 - RNA, 79 nt, Homo sapiens
agccagaaaggggagagcgcgaagcaaaggagcaagcggccgagccgagcccaaacgccacaacacccgaaggaagccg

SEQ ID NO: 108860 - RNA, 68 nt, Homo sapiens
cacagggcagcacacggaagggagaaaacagaagacaccccggaagacgaaagaagacggagcggacc

SEQ ID NO: 108861 - RNA, 80 nt, Homo sapiens
gaaaggaacagaaacaagagaggaacggagcaagaagcgacacaaggagaaaaggcccggacgggccccaagaagagcag

SEQ ID NO: 108862 - RNA, 54 nt, Homo sapiens
aggaagcacaaagggaagaggggcagcccaggaagccgaggaggcgcgggaccc

SEQ ID NO: 108863 - RNA, 77 nt, Homo sapiens
ccgccccgagaccacccaaggggaccccggacccagcgaccaacgccccgcagggcggccggcggaacaacccccca

SEQ ID NO: 108864 - RNA, 58 nt, Homo sapiens
ccgcaacccggaccagcagaaaccagagggggcaacagaaagccacaaccggacaaga

SEQ ID NO: 108865 - RNA, 85 nt, Homo sapiens
ggcgccacgcaccggacgacgcccggcgccagcacacgcagaaacgaaggaggcccaaccacaaaaggagccgacggaacccaga

SEQ ID NO: 108866 - RNA, 59 nt, Homo sapiens
gcaggggcagacagcacaaccagcggaaaccccccaggcaagaggcgcaggaccgggaa

SEQ ID NO: 108867 - RNA, 60 nt, Homo sapiens
accagcaagaagagcgccagcccccacggagaaccacggggaccaagaagcgagcagccc

SEQ ID NO: 108868 - RNA, 56 nt, Homo sapiens
cagacccgaaaaacggaccaaaagacagagagagaaagagcagaaacgaaccagaa

SEQ ID NO: 108869 - RNA, 71 nt, Homo sapiens
ggagacccaagagggcacaaaagaggacgaggacccagagacgaccgaagggaaagcacaaggaagaagcg

SEQ ID NO: 108870 - RNA, 76 nt, Homo sapiens
cgaagagaacagggggaaaacaggaagagaacgaggagcaacccaaaggcgaaacccggaagacagcacacgcggg

SEQ ID NO: 108871 - RNA, 79 nt, Homo sapiens
agcagacgagaaaaggacgcgacacaagcacaaaagcggaggaaaagggaaagccaccaggggggggcgagccgggaca

SEQ ID NO: 108872 - RNA, 111 nt, Homo sapiens
cgggaacccgaagaagaccaccgggagagagggaaaaaacaaccccgccgaaacaacgaacgagcaaggaagggccaaggcagaccccacaccggagaacgcaaccagaag

SEQ ID NO: 108873 - RNA, 63 nt, Homo sapiens
caggagaaaccaggacggggcgcagaggcacggaaacaggccgagaagaacgggagaagaaaa

SEQ ID NO: 108874 - RNA, 74 nt, Homo sapiens
cccaccggcggaacccagcaagaaaaccgggacgggcgaaagagaagaaagaaacgcacaggcaccagagcaca

SEQ ID NO: 108875 - RNA, 75 nt, Homo sapiens
acacgcgcgcccgcagagagccacacaccgcgaggccagagcccacggagggcagccccggaagacaagcggccc

SEQ ID NO: 108876 - RNA, 81 nt, Homo sapiens
ccgggcgcagccggagccgggccgcagcgcgaggccgggccgggggagaccgcgcacacagagaaaaaaagggaacaaaac

SEQ ID NO: 108877 - RNA, 83 nt, Homo sapiens
gggaaagacaccacacagcgcagcgggaccacgccggagccgaggacacccgcgcacagaggaaacccagaagcggaacaagc

SEQ ID NO: 108878 - RNA, 76 nt, Homo sapiens
gcgagacgccgcacaaggaaacagaacaagaggccaggaaggagacaggagccaaaaaccgaacacccggaagggg

SEQ ID NO: 108879 - RNA, 78 nt, Homo sapiens
gggagccaacaagaacagacaggcccggacaggcaccggccccccggacccacagaccagccccaggagggagcccgg

SEQ ID NO: 108880 - RNA, 39 nt, Homo sapiens
ggaccaccggaagccagaaaggcgaacaaacggaggaca

SEQ ID NO: 108881 - RNA, 77 nt, Homo sapiens
gcagagcaaagggggcccccagggaggccgcacggcccacgcgaaaagcaccgggaggaaagagagccacacgaaga

SEQ ID NO: 108882 - RNA, 53 nt, Homo sapiens
cgcagggcgcccccgcagggaaccccacagacggccagagggggccacgccaa

SEQ ID NO: 108883 - RNA, 90 nt, Homo sapiens
cacacccagccagaaccccggaacaagaaccacgcccgcaccagccacagccggacgagcgggagaggacaccacacaaaaaacaggaaa

SEQ ID NO: 108884 - RNA, 71 nt, Homo sapiens
gaggaacccgcccaccaccaagaagaaaccagccggggggggcgcggcaaggaaacgagggaaagagcacg

SEQ ID NO: 108885 - RNA, 71 nt, Homo sapiens
ggacagagcagacacaccacccaacaggaaagcgaagcagacaacagaacagaaacagaacaggaaagcca

SEQ ID NO: 108886 - RNA, 64 nt, Homo sapiens
ccgagcggagcgccgcggcgcagccaggaacgcacaccagcaccagcccaccaaaccagcacga

SEQ ID NO: 108887 - RNA, 54 nt, Homo sapiens
caaagagccgcgggggcgggacacaaggacaccaggaggagagaaagaacccac

SEQ ID NO: 108888 - RNA, 77 nt, Homo sapiens
aagacggcaaaaagccaacagagccgcagaaacgaggaaagaaccaaggaagacacccgccgacacaccaaacaaaa

SEQ ID NO: 108889 - RNA, 70 nt, Homo sapiens
caaaaaacaacaaccggacacagagggagagaacagcacacagaggcgcaaggggaagagaaaagacaga

SEQ ID NO: 108890 - RNA, 77 nt, Homo sapiens
cagaacacagcgggaacgagggcagagacaggcaacagacggcaacgaaaggcacaaaaacgcaacacaaagaggca

SEQ ID NO: 108891 - RNA, 82 nt, Homo sapiens
agccagccggcccgaggacaccgacaccagcaggcgggagcaggcgaaccacgggcccgccggcaagcgggggaagaaaaaa

SEQ ID NO: 108892 - RNA, 76 nt, Homo sapiens
accaggagaacggcggcgggggccgaaaagaaggacccaacaccgccccaagcaccagccgcagaagaacagaacg

SEQ ID NO: 108893 - RNA, 77 nt, Homo sapiens
gggaggaggggcaggcccggcggaccaaggaaaggcagagcccccgggccggggcacaggccccagcacggcgggac

SEQ ID NO: 108894 - RNA, 82 nt, Homo sapiens
gcaagcagggaccaaaggaaaacgggcaaacaacacgaaagcgcgcgcgcagggagcagcacccccaccgcaggggcagaag

SEQ ID NO: 108895 - RNA, 70 nt, Homo sapiens
aaggccaagaccagaaccagcccgggaaagagaaccccgcgacaaccaaacgggcggaaggggggaggag

SEQ ID NO: 108896 - RNA, 100 nt, Homo sapiens
agaaccgaaacggaaagaagcaccggagagacagcacagcacccacaaagcaacgaagggcacggagaaaaggacgaacagcaaagaccgcgcccagcga

SEQ ID NO: 108897 - RNA, 66 nt, Homo sapiens
cgcacacagcaagcacgaggcgcaagagagcaaagcgggaggggcgaggggggaacggagagacca

SEQ ID NO: 108898 - RNA, 52 nt, Homo sapiens
ggccggcggcgcaggagaggcaggaggcaacccacacacgaccacgaggacg

SEQ ID NO: 108899 - RNA, 49 nt, Homo sapiens
gcccaaacgggcagcgaaggggcagaaagaaagcaggaccagggggagg

SEQ ID NO: 108900 - RNA, 62 nt, Homo sapiens
gcgcagcccacgccagacgaccccacccgcgccgcgacccgggcggagaacggaaaagcacc

SEQ ID NO: 108901 - RNA, 76 nt, Homo sapiens
acaacaacaagccacagggccggagaggggaaccagcagaagccgaaaagagagcacaccacagcaacccggaaca

SEQ ID NO: 108902 - RNA, 75 nt, Homo sapiens
acgaagcaccaacgggagacacaggaaaccagcgcgagggggccaagaccgccaccccagaccgccagccgggca

SEQ ID NO: 108903 - RNA, 72 nt, Homo sapiens
cacaaagaccagccaccaagagacaagcgaagaaaaccgaaaccagcaagacacggcagaaagcaaagcaca

SEQ ID NO: 108904 - RNA, 68 nt, Homo sapiens
cccggagagcaaggaagaaagcagcccaggaacgcgcacgaccaaacacaccaccgcgcccaagggcc

SEQ ID NO: 108905 - RNA, 82 nt, Homo sapiens
cccacgggcagcacacacgaaagagaagccccggagagaagaaacgaggcagagaggaagagacccacgaggcacacagccg

SEQ ID NO: 108906 - RNA, 81 nt, Homo sapiens
acccgcccgccccagccacccaggccccgccgcccgggggcgccgcccaccgcgcccgccgcacccaggccacagaggagg

SEQ ID NO: 108907 - RNA, 82 nt, Homo sapiens
cgcgacaccagggccgccccggcacgcagccgcgcaagccaacgaccgggaagagggcccggcgggcgaagaggggcgcggg

SEQ ID NO: 108908 - RNA, 65 nt, Homo sapiens
accagggggcgggacaaccagccccgagacacggacgcagcccacgccgaagcaccacaagcgac

SEQ ID NO: 108909 - RNA, 79 nt, Homo sapiens
agcgcagaaggaaccggcaaagcgcaggaacgggaacgcaggagcgaccaggcacccagcgagaaccagggagagaccc

SEQ ID NO: 108910 - RNA, 44 nt, Homo sapiens
acgcggcggccccagcccaaggaggcccagcgaagagaaagaaa

SEQ ID NO: 108911 - RNA, 72 nt, Homo sapiens
cggagcgagcggaggcggccaagaagaacaagcgaggcccgggggacaacggaaacagggaaggacccccca

SEQ ID NO: 108912 - RNA, 39 nt, Homo sapiens
ccgcgaccgaagaacacaggaagacggagccaccggccc

SEQ ID NO: 108913 - RNA, 78 nt, Homo sapiens
agcaggaagaaccacaacagacccccgaacacagggcgccggaagagggaacgcgaagggaaaaaagaagagaaacgg

SEQ ID NO: 108914 - RNA, 77 nt, Homo sapiens
gcaacaaggagcagcaccagcaccaacaggaccaagaaaagaagcacagcagcagaccgaagcagcagcaaagcagg

SEQ ID NO: 108915 - RNA, 82 nt, Homo sapiens
ggccaggcaggacccaacgacaggcgccccggcccaacggaaggggacccaggcagccgagacccccagcaacagaacacga

SEQ ID NO: 108916 - RNA, 67 nt, Homo sapiens
acgcccggccccgacacgaacgggaagaagaagaaggcgaagaagcacaacaccaccaaacaacacc

SEQ ID NO: 108917 - RNA, 68 nt, Homo sapiens
gcagacacccaacggggaaccccagcggcggagggcgaaggggcacccccacaggcagaccgggaaga

SEQ ID NO: 108918 - RNA, 65 nt, Homo sapiens
aaacccggagcgcggcaagaaggaggccagggcacgcggaccacccacccaaagagcaccgacac

SEQ ID NO: 108919 - RNA, 74 nt, Homo sapiens
gcccccacacggaagaggaaaccggaagaacaccaacacagcaaaaccaaaagacaaccgagagcagaggcccc

SEQ ID NO: 108920 - RNA, 107 nt, Homo sapiens
cgcgacacgacccaagaacgccgcgggggaccgccccgcccggagcgaggacccgcgggggcacccgaggaggaagagggcagggcccacggaaagaagggaaaccc

SEQ ID NO: 108921 - RNA, 63 nt, Homo sapiens
ggagggcggcgggcggaccacggaccggggggggacgcacaccgcgccaagaggaagcgggag

SEQ ID NO: 108922 - RNA, 81 nt, Homo sapiens
caaggggggccacagagccgcagaaagggggcccagaagacaccgcgaggggccgccaccgagcccacgaacccgaagccc

SEQ ID NO: 108923 - RNA, 74 nt, Homo sapiens
agaaggaaagaagaccagacggaagacggaggggagcgagcgccaaccagggcggaggccgagaagcagcagcg

SEQ ID NO: 108924 - RNA, 74 nt, Homo sapiens
caggagaggagagacgccacgaacagccacaaccaggcgaaaagggccaaggacaggcggggccgcaccgagcc

SEQ ID NO: 108925 - RNA, 49 nt, Homo sapiens
cccgggccaccggggggagcaccagcggaggaccgagcgaaaaaaaacg

SEQ ID NO: 108926 - RNA, 83 nt, Homo sapiens
cccaggggaagaagaagaaacgggccgcgaaccgcagacagcggccaagaagacacaaaggacggaggcacgcaacggggcgg

SEQ ID NO: 108927 - RNA, 66 nt, Homo sapiens
aaaccaaagcggcgcaagcaggcgaccggcccgaggaccgccgcacgaccaaacgcagaacccaca

SEQ ID NO: 108928 - RNA, 54 nt, Homo sapiens
gcacgccggccacggagagaagcagggcaacagaagacacacaaagaccacaag

SEQ ID NO: 108929 - RNA, 77 nt, Homo sapiens
agacgcgcgagacccaaggaaccaaggcggcccggcgggggaaccacagacacacaaagggcgacggaggggcaaag

SEQ ID NO: 108930 - RNA, 79 nt, Homo sapiens
aagaaccaccgagaagagaaaaaacaaaaggacggggaccaaaaaggggcaaagagaaccaggagaccccaccaccaca

SEQ ID NO: 108931 - RNA, 77 nt, Homo sapiens
acaggcgaccgagggaagaccacaaccacgaccacaaaccggcggagccacagcgggaccagcgacgacgcagaaga

SEQ ID NO: 108932 - RNA, 59 nt, Homo sapiens
caggcgggccaccagcccaggaagagaccgagaccaggaaccaggcaggggaacggagc

SEQ ID NO: 108933 - RNA, 78 nt, Homo sapiens
gagcgcgccgccgccgccgccagaacaaccgggcgccgacgagacgggacccagacagacggcacgcccacagaggag

SEQ ID NO: 108934 - RNA, 66 nt, Homo sapiens
agagaaaagcaaccgaaggggaaaaaacaagggaagaaggagaaagggccaaccccgaagaagcaa

SEQ ID NO: 108935 - RNA, 90 nt, Homo sapiens
cgcagcagccgcgccgccgccgcgggagccgcgcccgaaccccggcccgaacccaggcgccacgggacacggaaccaggaggagcggagc

SEQ ID NO: 108936 - RNA, 82 nt, Homo sapiens
gcaccaaaccaagaggcggccagcaggaggcgagaagccgcagaaagcaacaaagcgagagcacaagaaaacagccccgagc

SEQ ID NO: 108937 - RNA, 73 nt, Homo sapiens
gaccacccccacagccgcagacagcaagcggcgcacgccgaagaagacggcgccagcccaccgcaacaagccc

SEQ ID NO: 108938 - RNA, 81 nt, Homo sapiens
ggaaacggaaccgggaggcgacgcacacgagcggaggcgaagggcagaggccaagaccggcccaagaaggagaaaagaagc

SEQ ID NO: 108939 - RNA, 92 nt, Homo sapiens
ccggaaccacgcacaggggcccgccagcagccgccagcacgaaggccacgcgacccgccgcaccacaaacacagcccgcagaccccaagaag

SEQ ID NO: 108940 - RNA, 97 nt, Homo sapiens
ccacgaccggcggggcgcgccaaggacacggcacaccgaccgacgaacgggccagcggggcgagcagagcgcgcgaagggcgcacacacaccgagca

SEQ ID NO: 108941 - RNA, 61 nt, Homo sapiens
aagggcagccccaacaaggacagggcccaagggagggacaaaccagcaccgcggaaggcca

SEQ ID NO: 108942 - RNA, 77 nt, Homo sapiens
ggcaaccacagaagagccaaaaccaaaaccaccccaaacagggcgcgagagagaaggggaggaaaagcagcaaagac

SEQ ID NO: 108943 - RNA, 60 nt, Homo sapiens
cccaaacaacggcagaagcaggggagagggccagcagaaggaaacaggcgccaaagggag

SEQ ID NO: 108944 - RNA, 81 nt, Homo sapiens
ggcacccgggacaaggcagacgggagcgcaaggcgccccaaggccagacaaaacgcagcggccggccagcaaccaaccaga

SEQ ID NO: 108945 - RNA, 73 nt, Homo sapiens
ggaccccggccacccagcacgcgcagccggggccagccccgggcagccccgcccggacagaccagacaggcac

SEQ ID NO: 108946 - RNA, 75 nt, Homo sapiens
ccgcagcggccgggcgcgcggcccccacccaggcgccaaagggggaacaaacgacggggaaaagagaggagacca

SEQ ID NO: 108947 - RNA, 85 nt, Homo sapiens
cagaacaagcaggaaaggaaaaggcggagcacccgagagccaccaaaggaaacggaacgccaagcgaagaagaacgaaacggaag

SEQ ID NO: 108948 - RNA, 59 nt, Homo sapiens
ccaacacccagagacgaaccagagaggaggcgaggccgggaggacaggaagaaggaacc

SEQ ID NO: 108949 - RNA, 85 nt, Homo sapiens
cgcagcgccgggcgaccccgcccgggcccggagcggaaacaggccgagagcggcccaagggaacagagcggcgcaccgacccgca

SEQ ID NO: 108950 - RNA, 74 nt, Homo sapiens
aaccgagacacccccgacacaccgggaggcgccagccagcaccgggaacaggacgcaagagacgcgccacagcc

SEQ ID NO: 108951 - RNA, 101 nt, Homo sapiens
cgccaggcgggcccccgcggcccgggcgagcccggagaagaggaaggaacgcacaccagcaccagcccaccaaaccagcacgaccccggagcagaagaagg

SEQ ID NO: 108952 - RNA, 102 nt, Homo sapiens
gagagaggcaccgggacggaccgagaccggaccgagagcggaccgagagcgcgaaacgcacgagaagagagggagagaccagaggcgcccccacgcgcggaa

SEQ ID NO: 108953 - RNA, 75 nt, Homo sapiens
aaccagaaagaagcccgagcgacggaccccacacacccgacgaaccgagcacgaaacacccgagaccgaacgcag

SEQ ID NO: 108954 - RNA, 69 nt, Homo sapiens
acgcggacacaaaccccggggccaccgagaaccccacagcgaaggaaaagggaaggaaggaacagagaa

SEQ ID NO: 108955 - RNA, 77 nt, Homo sapiens
cgaggaaaaaagaggcggcgggccggacgcggacgaggcccaacagcgaggggacgagaaagggccgcaggagggaa

SEQ ID NO: 108956 - RNA, 82 nt, Homo sapiens
agcggaggccaacaccagaccccaggacaacgagacaagagggcacccacccccgaccacacaacaggacgcaccaggcacc

SEQ ID NO: 108957 - RNA, 78 nt, Homo sapiens
gcgacccagcggagggagagcccacgacacacaagccaaccacccagaaccaggaccccgggagggcgggacacccag

SEQ ID NO: 108958 - RNA, 77 nt, Homo sapiens
cagccaaagcgagcacacaggaggcggaagaagcgacagaggcagacagccaaggaccaaagagacacacacaaaca

SEQ ID NO: 108959 - RNA, 86 nt, Homo sapiens
aggccgaagaaccgagcgacagagacaagcgagcgccgcacaaaaagcagagagacacaacagccgcaacaaggacagcggccagg

SEQ ID NO: 108960 - RNA, 63 nt, Homo sapiens
ggagacagcaagcccaggcccaggggagaaccaacgaccgcccggacgcagccagaccaccca

SEQ ID NO: 108961 - RNA, 59 nt, Homo sapiens
caaggggggggcacccccacaacggaagaagacggcacgggacccccagcacaggcagc

SEQ ID NO: 108962 - RNA, 55 nt, Homo sapiens
aacacagagggcgcccaaccaaccccgacaaaaggaacaagccgcaagaccgaaa

SEQ ID NO: 108963 - RNA, 79 nt, Homo sapiens
cgggaacccacgggcaccggagacccagacgaccaaagcaaaaaaaaggccagaggacaggccgagaggaaagaggagc

SEQ ID NO: 108964 - RNA, 85 nt, Homo sapiens
gccgcccgccggggcgagacccccaggcgaccccgcacacacacccaccagccacggcagcccagcggggacccagccgccccgc

SEQ ID NO: 108965 - RNA, 57 nt, Homo sapiens
gaggaggcggagaccacccaaaccccccaagaagcccccacgcacacaacccaacag

SEQ ID NO: 108966 - RNA, 77 nt, Homo sapiens
cgaggcacccgaagaagagaccaccaaccaggacccaaagacaggaccacgcaccagcagagaaggaaagcaaaccg

SEQ ID NO: 108967 - RNA, 56 nt, Homo sapiens
cgggagcacaccacaggcaagcgaaagagcgcaaagcccagcggcaaaacaaaaca

SEQ ID NO: 108968 - RNA, 61 nt, Homo sapiens
acaccgcccgaacacacaccgacagcagaggccaggaggggcccagcccggccaggaggcg

SEQ ID NO: 108969 - RNA, 82 nt, Homo sapiens
aggagggccgcgcggccggagcccggaagcagcagccaccgaggacggggaccgcagaacggaagaagaggcaccagaggac

SEQ ID NO: 108970 - RNA, 62 nt, Homo sapiens
gggagaagaggaggagcggccgggggaggcaggggcgcggcagcgcgccccagaccaccggc

SEQ ID NO: 108971 - RNA, 64 nt, Homo sapiens
cgcagccgcgcgcccgcacaaaggaaagcaggcaggagggagagcgccgaagaaccaccccccg

SEQ ID NO: 108972 - RNA, 70 nt, Homo sapiens
aaaagcaccccgcaccaacgagaagaggcaccaaggaggccccggccgaaggaccaggcaccacacggcc

SEQ ID NO: 108973 - RNA, 89 nt, Homo sapiens
caaagagcccaggggaccggccaagaaggaagcccgggccagccagccccgaaagaccaagcccgcgccaccggcccccagggacgccg

SEQ ID NO: 108974 - RNA, 73 nt, Homo sapiens
cccacaccccacccaggggggaacgagaggggggcggcgcggcgccacgggggacagccgagaccgcggggga

SEQ ID NO: 108975 - RNA, 84 nt, Homo sapiens
cagccaccagaacaaccaaacaggaaggcggaaccgagaagggggcccacaggaggagcaagaagagaaacagccggaccagca

SEQ ID NO: 108976 - RNA, 56 nt, Homo sapiens
ggcccggggaaagcggcacgcgccccagaggcaacagagggaaaagacaaacggag

SEQ ID NO: 108977 - RNA, 76 nt, Homo sapiens
caggcggacggcacgcagcccggcgggaggaaaagaccaccacgaaacagcaccgagaggcacggcggcaaagggg

SEQ ID NO: 108978 - RNA, 65 nt, Homo sapiens
agaacggagcaaggggcaagcaccacagagaagcagccaagggacaggaagcaagggagagaaaa

SEQ ID NO: 108979 - RNA, 66 nt, Homo sapiens
ccacagacgccaaggggacaaccggcgaaaggcccccagcccagagccaggagaagcagaacggga

SEQ ID NO: 108980 - RNA, 65 nt, Homo sapiens
caaggaagcagcccagaacaaaagcagacccagagagagcagggagaaggagcgggaggacccag

SEQ ID NO: 108981 - RNA, 43 nt, Homo sapiens
ggagcggaaaacccgaaacaggggcaaggccgaggggaacagc

SEQ ID NO: 108982 - RNA, 60 nt, Homo sapiens
cccgcggaggcccgcgaggaacgacgccgaggaagagcccgggggcgcaccaggcacagg

SEQ ID NO: 108983 - RNA, 89 nt, Homo sapiens
cgcgccggccgcgaggccacggagagccgccggagagcccaggagcaggggagacagggaggagcggagggaagcaagcagaaaacaag

SEQ ID NO: 108984 - RNA, 53 nt, Homo sapiens
gccgggccagggccagagcaaaggaacccaaccgaagaagaacagacccagac

SEQ ID NO: 108985 - RNA, 75 nt, Homo sapiens
ggcgcgccggggccccagcaaaggcaagaaaggcacaaaaggcaggaaagggacgacgggaggagggccgcaacg

SEQ ID NO: 108986 - RNA, 74 nt, Homo sapiens
ggcgaggccacaaagacagagacgggaggccaaacggccgagcgaccaggagaggagcccccgcccgaagaccg

SEQ ID NO: 108987 - RNA, 80 nt, Homo sapiens
ccacccgcacagccgaggccagaagaaggaagggagaggcaagaacgccaccgaaaacaaacacgggaaaggcccaagcc

SEQ ID NO: 108988 - RNA, 79 nt, Homo sapiens
aagcagcggacccgcgggagaggcgcagcggaggcggaagcaggaccggggcacggagggcccagaggagacaggggaa

SEQ ID NO: 108989 - RNA, 72 nt, Homo sapiens
ccgggcagggccgagaggacgccagcggcgcgcagagcgcaaaagacaacccacgaaaaccacacccaggga

SEQ ID NO: 108990 - RNA, 78 nt, Homo sapiens
aaagaacaggaaagaacccaggagcccccgcagggccccggagcccacacggagcagcccgagagccggacagcccaa

SEQ ID NO: 108991 - RNA, 82 nt, Homo sapiens
gcgccggagccgacgccgggaacccgccgcgcgccgcgaccccaagcaggcacgcacgggaccgaccccgggcggcgacaaa

SEQ ID NO: 108992 - RNA, 77 nt, Homo sapiens
agcgcggaagaagcaggaggcaagaaaggggaaccccggagaaaaggccaagaaggcagggcagccaagcaggacca

SEQ ID NO: 108993 - RNA, 63 nt, Homo sapiens
gcggcaagccggggcagaacaagaacacgggggggagcgcaccggaccccaagagggccggag

SEQ ID NO: 108994 - RNA, 66 nt, Homo sapiens
aggaccccagccgcgcccgggagagcaaggagaacggagaaacgaggccggagaaagggcagagaa

SEQ ID NO: 108995 - RNA, 75 nt, Homo sapiens
accaaaacagaggaaaaacccaaaacacaacaggggcagacagggaaaaaagagggcaagcagaaccagcaaacg

SEQ ID NO: 108996 - RNA, 96 nt, Homo sapiens
aggccgccagcagaggcggagcccgcagaccgcagaaggccggagacaccagcagaccaagacacccaggagaaagacagcggggaaaagaaaaag

SEQ ID NO: 108997 - RNA, 41 nt, Homo sapiens
caacaaaggagagagagaaaacggaggagaagcaacgaaaa

SEQ ID NO: 108998 - RNA, 69 nt, Homo sapiens
aaacgagaccacaagcgagggagcaaggaaaaagagaagcagacccagaaccaaacgggcgcaggagga

SEQ ID NO: 108999 - RNA, 58 nt, Homo sapiens
cccaaaagccgacaaccccagaaacaggggaaagagggaccagcgcagcagaagcagg

SEQ ID NO: 109000 - RNA, 81 nt, Homo sapiens
gcccaagagaaccgccagaagaaaagcaaaaaaacaaggaaagccgcaacagaagggagcagcgaaccagaggcacgagcc

SEQ ID NO: 109001 - RNA, 77 nt, Homo sapiens
aagacacacgaggccgacagaggagagcagagacagacacaagcgggccaacaaaagcagcaggcgcaaaaacgaac

SEQ ID NO: 109002 - RNA, 83 nt, Homo sapiens
gcagccgcacaagcggcccgacgagacagccagacgcacggaggggagaagggggagaaagccaccacacaacccaaacaaga

SEQ ID NO: 109003 - RNA, 79 nt, Homo sapiens
cccggccccggcccaaccgcccgcgaccccccgcgccgcgccgccgccgcagcgccaaaaagcacagagaccgaaggga

SEQ ID NO: 109004 - RNA, 60 nt, Homo sapiens
cagaagaggacaagcggcccaggacaacagaaaccgggaaggaccagaagagccaggagc

SEQ ID NO: 109005 - RNA, 80 nt, Homo sapiens
cgggacccgaccagcgcggacagccaggcacacgaaaagcagcagccagagcaaaccgcgaagaagccaagcgaaccaga

SEQ ID NO: 109006 - RNA, 87 nt, Homo sapiens
gacccggcagccgacaggagcagaaggagacacgcccggcacccagcacaagaagacaaggccagccacaggcagggagagcaggag

SEQ ID NO: 109007 - RNA, 43 nt, Homo sapiens
gcgggcaggcccacacaggcccagcaggagaagacagacacgg

SEQ ID NO: 109008 - RNA, 78 nt, Homo sapiens
ccaagcaacccaagggaaccgggcccaggccgagcgcaggaggagggaagaacgccacaaccgcccccagcccaaccc

SEQ ID NO: 109009 - RNA, 53 nt, Homo sapiens
aagaaaggggaaccccggagaaaaggccaagaaggcagcccccgcaaccagcg

SEQ ID NO: 109010 - RNA, 85 nt, Homo sapiens
caccgaggcagaaccgcaagggaaggagccgggagaggccaggccccccggacgcagccgcccggggcccggagccggaggaaga

SEQ ID NO: 109011 - RNA, 90 nt, Homo sapiens
ccgacgagaaaaacaaggagcggacacgagccgagggaggggaaaggcgcaggaccagagacaaggccccgagggaggagcccgaaggcg

SEQ ID NO: 109012 - RNA, 71 nt, Homo sapiens
gcaggaccggcgcccaaggagaggccaaaggaggagagcggcgacacacggggagcaagaaagaagcaaag

SEQ ID NO: 109013 - RNA, 77 nt, Homo sapiens
gcacaacccggggccgggccgcaagcacgccagccaggaaagcgggagcgcgggagcaaaggaaagaagagaagcgc

SEQ ID NO: 109014 - RNA, 70 nt, Homo sapiens
caccccggcccggggccagcccacccacaggcggcggcacacacaagggcaaggcacagaagcaacaaag

SEQ ID NO: 109015 - RNA, 66 nt, Homo sapiens
acccaggcagccacggcccgccggaccccgcccgcgccgcacaagagcgaaagccagggggcgaaa

SEQ ID NO: 109016 - RNA, 83 nt, Homo sapiens
aaaaaaaaaacaccgaggcacacagcggcaggaaaagagcacagggagggagagaccaagaacaagaacgaagcacaaagaac

SEQ ID NO: 109017 - RNA, 65 nt, Homo sapiens
cccacccaaggcaaaggcagagccagggaaagggagcagcaccggccacacccacagcacgaccg

SEQ ID NO: 109018 - RNA, 70 nt, Homo sapiens
gagagcgaacaaccccagaagagagagcccccaccgaccagaagaggcgggggagcccgcagagcaagca

SEQ ID NO: 109019 - RNA, 68 nt, Homo sapiens
cgagggagcgaaaaccgggccaggagcgcagaggacaccacgggccccgccagcagagcgcacccaac

SEQ ID NO: 109020 - RNA, 86 nt, Homo sapiens
gcagcagcgccggagcccgagggacggggacggagagaacacgagcccacagggcaaggggaaggccaaggacgagaaagaccccg

SEQ ID NO: 109021 - RNA, 42 nt, Homo sapiens
cgggcaagcaccagagaggcaacaagacccaggagagcacaa

SEQ ID NO: 109022 - RNA, 71 nt, Homo sapiens
accaccccaggaagaagacaacagagagccacccgaaaacggaacaagacaggggcggggcagccaggcac

SEQ ID NO: 109023 - RNA, 77 nt, Homo sapiens
gaaaagaaaggccaagaccaggaaaggaaggggccccaggacgcggagaaaggcccgaagcaaacaacgccagcggg

SEQ ID NO: 109024 - RNA, 80 nt, Homo sapiens
ggggaccccaagaagaccacagagggacccggacaaccagaggcagccagcagggggaggagaacgccgaaccggagggg

SEQ ID NO: 109025 - RNA, 82 nt, Homo sapiens
aaaggacgacagccagagagagccagccccaggccgcgagccggacaacacaccacaagaaccgcagcacagacacagcacg

SEQ ID NO: 109026 - RNA, 73 nt, Homo sapiens
gaaggcagccagagcacggccaaaggagcaacccaaacacagaaccaaaacagaaacgaaggaggcccaacca

SEQ ID NO: 109027 - RNA, 76 nt, Homo sapiens
ccgccagcagaggcggagcccgcagaccgcagaaggccggagacaccagcagaaaagaccggaagggaaggcccca

SEQ ID NO: 109028 - RNA, 81 nt, Homo sapiens
cccggccgggcaccaacgcaagagaacaacaagaccggcccagacggagcggacagacggaagaagaagagcacagcgccg

SEQ ID NO: 109029 - RNA, 94 nt, Homo sapiens
gcaaacaaagaggccgcggaggagaagccggaggaggacaacgacaccaccgcagcgacgagcagaaagccaacaggcagaccagagacagcgc

SEQ ID NO: 109030 - RNA, 78 nt, Homo sapiens
gccaggcggaccccaccccgggcaagagcagcggaggcagcgaaggagcaggcgcggggcgcgggggcccaggccgga

SEQ ID NO: 109031 - RNA, 72 nt, Homo sapiens
caccccacagcaggcagagacaaccaacaccacggagagaagaaccaaagacaaaagaagagaaaacgaaga

SEQ ID NO: 109032 - RNA, 90 nt, Homo sapiens
cagcaagaccgccgcaggggcacccccaacgagaaccgaacacacaaaagccccaagcaagaacacagcagcaagaccacaggccagcgg

SEQ ID NO: 109033 - RNA, 101 nt, Homo sapiens
ggagagagcgggaccaggcggcggaggcagcaccgaggaagcaagacccacaggagcgcagaaagcggacgagcggcaaagcccgcagcgccgggaagaag

SEQ ID NO: 109034 - RNA, 72 nt, Homo sapiens
ggacaaaaaccgggaccggaaggccggcgaaggagaaccggaggaccagccaaagacagccagcgggacgaa

SEQ ID NO: 109035 - RNA, 80 nt, Homo sapiens
gacggccggcggcccacacggagcgcagccccgcagggggacgaggagccacggaaaggcagagacccaaggagcagacc

SEQ ID NO: 109036 - RNA, 68 nt, Homo sapiens
gaaacacccgaacagcgacacccagccaaacccaggcccgagaagaagaggaaaacccaccaccgaac

SEQ ID NO: 109037 - RNA, 75 nt, Homo sapiens
gcaccaaagaaaccgaaggacgagaaggaagaccagagaggaaagcagaaagcaaaagagggaagaaccaagcga

SEQ ID NO: 109038 - RNA, 111 nt, Homo sapiens
cggggaggaggagcccccgagaggaggcagacccccacaagacgacacccgacgccccgagaaccaagaacggaagaccagcccggacccaacgacaggggccagggaagg

SEQ ID NO: 109039 - RNA, 77 nt, Homo sapiens
gaaacaaagagcgcagagacagagggagagagccgaggggcagaaccagagagcggccaggcggaaggagcgagagc

SEQ ID NO: 109040 - RNA, 64 nt, Homo sapiens
ccgcccgcagaggaccacggcgccggcacccaacacggacacagagagacccagagaccaacgg

SEQ ID NO: 109041 - RNA, 78 nt, Homo sapiens
aaagagcccaaagagcaggaagcgcaaagcaggcgccaaggggccgagggaagcacgaggggcgacaggacaacacac

SEQ ID NO: 109042 - RNA, 79 nt, Homo sapiens
ggaacgaacagccgacggggcgaccgccggcccaggggccagaacggaagaccaaccagaagacacacaaagcagggga

SEQ ID NO: 109043 - RNA, 38 nt, Homo sapiens
cggagggaggacgacgacaggcagaaaagaaccaggaa

SEQ ID NO: 109044 - RNA, 81 nt, Homo sapiens
gaacgcgcagccccgagcgccgcggacgcgcacgagggacggggaaaggaacccccggcgaaggaaagccgcacagcagca

SEQ ID NO: 109045 - RNA, 77 nt, Homo sapiens
ggcagagacacgcgccaaagggccggagaggagccgaaacacacaagaggagggaagcaccaaacaaaccgaaaaag

SEQ ID NO: 109046 - RNA, 63 nt, Homo sapiens
ggcccccaggcgaagaagcgcagccgcaccggccaaggaaacgaaaaaggcagaagaacgcag

SEQ ID NO: 109047 - RNA, 76 nt, Homo sapiens
gagaccggaccgagagcggaccgagagcgcgaaacgcacgagaaggaaaacagaggccacaggaacaacgaaacga

SEQ ID NO: 109048 - RNA, 108 nt, Homo sapiens
gcgccgcaccccaccaacacccgggaccgcaacgacggcagccccgccggggccccggggcggcggccgcgggcggagcgcgcggccgcaggagcggagccgcgggcc

SEQ ID NO: 109049 - RNA, 64 nt, Homo sapiens
aaaggaaaaacccaaggacaacgacgggccccagaccaccagacagacgaagaacccaggagcc

SEQ ID NO: 109050 - RNA, 85 nt, Homo sapiens
cgagaggacaggcggaggccccagggaagcgcagaaagcaggcgaacccgcggcgcaaaacgagaaagggaaaaccgccgcaaac

SEQ ID NO: 109051 - RNA, 73 nt, Homo sapiens
aaggcaggccgcgagcagccgggagccgccccgcgccgccgcagagccgcccacagcccgaccgagggggagg

SEQ ID NO: 109052 - RNA, 80 nt, Homo sapiens
cgagggcggaccgcggccgagcagccgggcggccgcgcgagccggcggcccggagggggcggcgggaccgcggcaagcgg

SEQ ID NO: 109053 - RNA, 80 nt, Homo sapiens
gccggcgaaaggagcgggccggcaagggagaccaagacacccaggagaaagacagcggggaaaagaaaaaggagggggca

SEQ ID NO: 109054 - RNA, 69 nt, Homo sapiens
gggaccccaccccgccgcagaggagcccgcgggggagaagcagaccgcaccaggcgggaccccgaaaaa

SEQ ID NO: 109055 - RNA, 79 nt, Homo sapiens
agcaaaaccagcgggcggccgcgcccccaggacacaagaccccgccccccgaggcgcagcccgaacccagcagccacac

SEQ ID NO: 109056 - RNA, 75 nt, Homo sapiens
cgagaggcagagcccgaggaggcagggcgaggggagcagcgagaagagccagagaagaaaggagaggagaaaaga

SEQ ID NO: 109057 - RNA, 42 nt, Homo sapiens
agcgaacgagacagaacaggaaaaagggaggagggagacagg

SEQ ID NO: 109058 - RNA, 60 nt, Homo sapiens
cgagccgggacgaagaaaaaccggaggacagagacggagaagggaacgccccacacaagg

SEQ ID NO: 109059 - RNA, 71 nt, Homo sapiens
cggcagaaaagaagagggaaggggaagaggggcccgaagggcgacagaaaacgggcagggcagccacaaag

SEQ ID NO: 109060 - RNA, 69 nt, Homo sapiens
gaaagcagaaaaacaaaaggagcagcagaagccgaccagaaggcacagaagagcaaaaggagcccgggc

SEQ ID NO: 109061 - RNA, 81 nt, Homo sapiens
caacggcggccccaggcccaggccccccaccaccagaggcaagacagccggcaggcagaaggaacgagggagcacggaggg

SEQ ID NO: 109062 - RNA, 78 nt, Homo sapiens
gagaagaggcagcagaagccagggcagcgaaagacagagacccagggaagaacagacacagcaccgacacgcgcaaaa

SEQ ID NO: 109063 - RNA, 76 nt, Homo sapiens
gcgggacgcgggccagaccgggcacggaggggggggggagagggcaagaaccaaccacaggcaacggagaggaagc

SEQ ID NO: 109064 - RNA, 69 nt, Homo sapiens
agcccagcgcacaaccaagccgggggcacaggaaaagacacgggcaggaggagcacggcgaaccgcaaa

SEQ ID NO: 109065 - RNA, 72 nt, Homo sapiens
gaccaagagccgacaaccacaacaggggcaacacacgaaggaccagaaacagccagggagcagagcacacac

SEQ ID NO: 109066 - RNA, 79 nt, Homo sapiens
gcccagggaagcagccgaccagccgcggagccgggggcaggcagcaccgggaccggaggcccagagcgacggacggaga

SEQ ID NO: 109067 - RNA, 72 nt, Homo sapiens
gagcgaacgcgcaacagggccgcacgcaaggaacaaaacaggaagcggaaaacagaaccacagacacccccg

SEQ ID NO: 109068 - RNA, 73 nt, Homo sapiens
ggcccgcaggcaggccacgccacgggggagccacccggcgggaaacacgagccccaccaaagcaaaggccgga

SEQ ID NO: 109069 - RNA, 71 nt, Homo sapiens
aaaggaagagagaccgacacccaagacaagacagcgcaaggcagggaggggggaagacagggcccagcacc

SEQ ID NO: 109070 - RNA, 79 nt, Homo sapiens
cgcagcagccgagcgacggcgccggcgcgcccggccgcccgcgggagagaccgacacaaggacagagcaccaagaccga

SEQ ID NO: 109071 - RNA, 75 nt, Homo sapiens
aagaggaggaggaagaagaagggaggggcaacaggcggggccggaagagagagggggcaggggggggaccaggaa

SEQ ID NO: 109072 - RNA, 75 nt, Homo sapiens
cggaccagaccgaccaccaaaagggagccgccaccaaaagcagacggaaaacccacggggaagaccacaccccga

SEQ ID NO: 109073 - RNA, 55 nt, Homo sapiens
gagcgccgcaagggaggcgcaggagccggcagagggcaacaccaacagcagaaga

SEQ ID NO: 109074 - RNA, 59 nt, Homo sapiens
gaccacagacccacagcgaaagcaacagagaaaaggaggaggaagagaaacgcaagaga

SEQ ID NO: 109075 - RNA, 82 nt, Homo sapiens
gcaagcccagaagagcggagcccaagcagggcaccacaagccgaacagccagccagcaaaagaacagcagcaccagaagcag

SEQ ID NO: 109076 - RNA, 102 nt, Homo sapiens
ggacggacgcagaagaggaaccgcacacccaggccaccagacaacgaaaaccaaggagggagggggggaacggaacccaggcgcaaagcggggcgaagaagg

SEQ ID NO: 109077 - RNA, 70 nt, Homo sapiens
gacaccaggaaaaacacagagagccgacggcagcagaagcgcgaagagcagcagaaacggaagaaggcac

SEQ ID NO: 109078 - RNA, 80 nt, Homo sapiens
agagccacgcgaggacagaaaacgcaagacaacaggagaggaaagcggaaagccaaggccacacacggccccccgagagc

SEQ ID NO: 109079 - RNA, 72 nt, Homo sapiens
cacgaccagcaggagacccggacaccaggcacgcaaccccgggcagaagaaagacacaagggcgcgaaggga

SEQ ID NO: 109080 - RNA, 71 nt, Homo sapiens
accagagccgcgcaggagacggagcgcgcgcgggaagaggcccggcgcacggggggcgccacaccggggcc

SEQ ID NO: 109081 - RNA, 75 nt, Homo sapiens
gacgcaaccccaccccccggccggccccaccggcccggcagcccaccagcgcgacccagaaggaccccacccccc

SEQ ID NO: 109082 - RNA, 71 nt, Homo sapiens
cacaccaaccacaaaaagggcagcccaaggaccaagggagaagagacccaggaggcagggcagaaccccac

SEQ ID NO: 109083 - RNA, 77 nt, Homo sapiens
gccgcacagccgcggcggcagcagcaggagagggggcacccgaggaggaagagggcagggcccacggaaagaaggga

SEQ ID NO: 109084 - RNA, 75 nt, Homo sapiens
gggaaacgggagggaaccagcaacaagccgagggagcggacgccaagcgcagcgcagggaaaccgcccggaccaa

SEQ ID NO: 109085 - RNA, 91 nt, Homo sapiens
cgcgagcgcacgccaacgacgaggaccgacgcagggacagcaggaagccagaggagaaaaaagggccccgagagcacaggaccgggaaaaa

SEQ ID NO: 109086 - RNA, 72 nt, Homo sapiens
ggacacacgaaaacagacgggggaacaagagcgcagaacaaaaaaggaaacaaaaaagggccaagacagcaa

SEQ ID NO: 109087 - RNA, 78 nt, Homo sapiens
agcccagcgagaccgaggaaggagaccggaaaccgagagaaacgaagacgaagaaacagccgcacacagaagaaaacg

SEQ ID NO: 109088 - RNA, 72 nt, Homo sapiens
gcacgaaagggcgccgaccagaccaggcggccaaaagaaggcggaccgcgggacgacgaagagaggaggggc

SEQ ID NO: 109089 - RNA, 77 nt, Homo sapiens
gccgcaagccggagggaagaaggaggaaaaacccggacgagaggccaaacgaccaagaaagcgggacgcggaaaacg

SEQ ID NO: 109090 - RNA, 54 nt, Homo sapiens
aacacgcaggagcgccgggaggccggggggggcacagagccccggaagacagcc

SEQ ID NO: 109091 - RNA, 81 nt, Homo sapiens
ccgccccgccgggggagacgacccccgccagggacgcggcgcacggcgcggaggggccgagggcaggggggccgccacggc

SEQ ID NO: 109092 - RNA, 81 nt, Homo sapiens
gggaggccgacagagggcgggcggccagggacccggcagcaaccccaacaaacgccagaggcagccccccccgggagacac

SEQ ID NO: 109093 - RNA, 74 nt, Homo sapiens
aaccaacggagcggggcaggggcgacgagagcgcgcggaaagaaacagccagcagacgggaagaaccggaaaag

SEQ ID NO: 109094 - RNA, 74 nt, Homo sapiens
gggagaagcaccaagaagcaaacagaggggcagacagacagcggaacgggagcaaggcaaccagcagcaaccag

SEQ ID NO: 109095 - RNA, 68 nt, Homo sapiens
gagcacaccaccagggcgagcgacggagaacacgccaaggaaaaggaacagagagagcagaaccgaaa

SEQ ID NO: 109096 - RNA, 78 nt, Homo sapiens
cagcagcagagagaaggagacaaggaagcccgcggggaggccccccgcggggagacggaggcgcacaagagaggagga

SEQ ID NO: 109097 - RNA, 77 nt, Homo sapiens
cggaagagaaggggagaggcgacagggacaacagaacaaaggaagggaacccaccaggcccccgagccccggccggc

SEQ ID NO: 109098 - RNA, 65 nt, Homo sapiens
gcgcgggggaccaagccgagccaaccgcgaaaggagaagacggaccagaacagaacacgagcgag

SEQ ID NO: 109099 - RNA, 63 nt, Homo sapiens
gccacacacacgaccaccaggaccgcgggacaagcagacgaggaagagaacccacaaagaaga

SEQ ID NO: 109100 - RNA, 68 nt, Homo sapiens
agacaccgccccgagacgagggagaacggcagaaccaagggaccaaagcgggacggcaggccacgacc

SEQ ID NO: 109101 - RNA, 60 nt, Homo sapiens
gcgcaggggcaccggccaggaagaccccaagaagcaggcagacacaggcccaccaggacg

SEQ ID NO: 109102 - RNA, 79 nt, Homo sapiens
gaggcgccaaagagaggaaagacagccgaagggcacaggaccagagaagacacccgggcgggaaaaaggagcaaagaaa

SEQ ID NO: 109103 - RNA, 72 nt, Homo sapiens
agccggcacccggccaccccggcggcgcacggcagggcccccgagcccacggacaggagggcccagcaccgc

SEQ ID NO: 109104 - RNA, 68 nt, Homo sapiens
caacggcaggagagggcccgacaacgaagaaaaagccgcaacaacgggaacgacaagacaagcaaaga

SEQ ID NO: 109105 - RNA, 40 nt, Homo sapiens
cgacaggacagggaaggcaaaacccgcgccagagagccaa

SEQ ID NO: 109106 - RNA, 80 nt, Homo sapiens
gacacggggccagggaacccggcaccgccccaggcaggcccccagcccccagcagagcccccggacgaaccggggacccg

SEQ ID NO: 109107 - RNA, 61 nt, Homo sapiens
agaacagaacccaaaagccgacaaccccagaaacaggaacagggcggaaccgaccaaccgg

SEQ ID NO: 109108 - RNA, 70 nt, Homo sapiens
ggagcacccaccacggagggaaagaccaggcaggcccgcccaccaagggacaaagaaggaggaagaagac

SEQ ID NO: 109109 - RNA, 70 nt, Homo sapiens
cagcccaccggagacacaggaacaaacgagcacgcaacgaccaacgaggacaggcgccaaaacaaaacag

SEQ ID NO: 109110 - RNA, 86 nt, Homo sapiens
ccgccccaagccccaccacccgcagccggggaggcaacggagcgaaaccagcgacagaccagcgaaaccagacacgacggggggaa

SEQ ID NO: 109111 - RNA, 76 nt, Homo sapiens
agagacgaagacacccgggaaagacaaggagccgggccgagaaaccgaaccagagaccagagaagaaacgcaaagc

SEQ ID NO: 109112 - RNA, 81 nt, Homo sapiens
gacgggcagccaagaagagagaccgggggaggcgacgcaaggcgacgggcgaacccaaccagaaccccggacgcgccaaac

SEQ ID NO: 109113 - RNA, 83 nt, Homo sapiens
gcaggccggccgccacgcgcacggggcccgggcggcgggaccggccggggagcgcgcagcagagccgccgcacccaggcggag

SEQ ID NO: 109114 - RNA, 77 nt, Homo sapiens
gaagagagcgcaggcgacgcacaagaagcacaaaggcaggccagggccgcagaagacgccagggcccgaaacacacc

SEQ ID NO: 109115 - RNA, 70 nt, Homo sapiens
acgcccaggcagagccggggcacgggaggagcagcagaccaaaaggaggcccagaggaaaaagacacgcg

SEQ ID NO: 109116 - RNA, 84 nt, Homo sapiens
agcgccgcccgccgacagccaggcccgggagaagacgacaggccagcccacagggccaccggggcccgggaaggaggcagccag

SEQ ID NO: 109117 - RNA, 83 nt, Homo sapiens
gcaccgaccccggagacaagcagccggagacaacacccagcaaggcccaccacaagaagagcccagggaagaacagaaaagag

SEQ ID NO: 109118 - RNA, 55 nt, Homo sapiens
aaagggccaaagaagggagaagcaagcgaagaagagggaaaagcccaaggaacac

SEQ ID NO: 109119 - RNA, 75 nt, Homo sapiens
gcagaaggccccccgaacagcaggcgccaccagcccggaggggccagggccggagaccacagcaacccgcagaga

SEQ ID NO: 109120 - RNA, 54 nt, Homo sapiens
gcgccgccacgccgcaggaggcggaggagccaaacaaaggaacgccaagcccgg

SEQ ID NO: 109121 - RNA, 79 nt, Homo sapiens
ccaggcggccccagagccggcagggcgcgcgggggcggccgcgagacccaagaacggccgagcgaccaggagaggagcc

SEQ ID NO: 109122 - RNA, 52 nt, Homo sapiens
agagcaagcgggggaccgaacaaggcaaaagggaaggaaaggaacagggcga

SEQ ID NO: 109123 - RNA, 89 nt, Homo sapiens
agccccacgcgcggggccagcagggcgggagaggaggcagagcggaggacgagaggaagcagcgccgaggcagggccgcccggaagaag

SEQ ID NO: 109124 - RNA, 84 nt, Homo sapiens
cggacccgcccgggcagggcccgccccgcgccggaaaggacagacaagcagacggggccgccacacgcccaaccagggcaccgc

SEQ ID NO: 109125 - RNA, 81 nt, Homo sapiens
ccggcaccccgcacccgggcacacaaaaaacgggcgcccgcgaccagggagacgccccagaagagcacaacacagaagaaa

SEQ ID NO: 109126 - RNA, 65 nt, Homo sapiens
gagcgaacgagacagaacaggaaaaagggaggaacaaggcaaggccgaggccgcagagagacaag

SEQ ID NO: 109127 - RNA, 74 nt, Homo sapiens
gcgcggccaacggggccacaagaaacagaggacaggacagcagggcggagggagggaccagccaccgcaccagg

SEQ ID NO: 109128 - RNA, 81 nt, Homo sapiens
cacggacacccgagcacagagacgaagaggaccaggagcaaacagaagaaacgagaagaacgaaagagaaacccaaaaaaa

SEQ ID NO: 109129 - RNA, 50 nt, Homo sapiens
ggaaacagacaacgggcaagaggaaaagaggacacagaaccagggggggc

SEQ ID NO: 109130 - RNA, 60 nt, Homo sapiens
aggagaaggcagcgggacggacaggcagggaagcaacgcagaggggagcgaacgaagaaa

SEQ ID NO: 109131 - RNA, 73 nt, Homo sapiens
gagcgggggcgcgcaagacgagggccggaggggcccacgaggagccaacacaccagcagggcaacgcggggcg

SEQ ID NO: 109132 - RNA, 69 nt, Homo sapiens
gccagcgacaacagaaccaacaagggccaagcccacagaaaaagcacaagccccgcgcaaaacgcccgc

SEQ ID NO: 109133 - RNA, 71 nt, Homo sapiens
gcccaccaagcaaagaggcgcccagaaagcagaacaggccaccgggccaacgaaaggaccagcgggacaag

SEQ ID NO: 109134 - RNA, 77 nt, Homo sapiens
ccagaccaggcccggaccccaagaccaagcgcgccacgcgcggcgcgccgagccaggacaaaaccaggcagaaccaa

SEQ ID NO: 109135 - RNA, 46 nt, Homo sapiens
gcgaaggacaaggaagcggagcgcgaccgcccagggagacggaacc

SEQ ID NO: 109136 - RNA, 74 nt, Homo sapiens
ggaaacacaagcccagacaacaggaaaaacgacgagaaccagaaggaggaaggggagaagaaaaagcagcaaaa

SEQ ID NO: 109137 - RNA, 34 nt, Homo sapiens
gcaaagaccaagagaagagaaccaccacgaacgg

SEQ ID NO: 109138 - RNA, 76 nt, Homo sapiens
agcaagaagcaggaaaggccggacaccagggggaacgaggccagagacagagcagaagacagaaccggccgacccg

SEQ ID NO: 109139 - RNA, 38 nt, Homo sapiens
gcccaaacgacaccccaaggcaccacaggcaacacaca

SEQ ID NO: 109140 - RNA, 60 nt, Homo sapiens
ccggacaaaaaggcggccccaaggacacaggaacgccacaagaaacaacagcaaggcgag

SEQ ID NO: 109141 - RNA, 72 nt, Homo sapiens
caggacccaccacggagcccggaaaagagcaccggccgcaggcaaagcaacaggccacaagccggaggaagc

SEQ ID NO: 109142 - RNA, 76 nt, Homo sapiens
gccaggccaacgccgggaagaccgaagggcgcacggagggaccccagaggaagacagaaaggagacgaccagaagg

SEQ ID NO: 109143 - RNA, 84 nt, Homo sapiens
agcagcccccagcccggacgccgggcccgggagagaggaccgaaagaaccgcacagagcaggcccaccggcaacacaaagcacg

SEQ ID NO: 109144 - RNA, 75 nt, Homo sapiens
aaaagccccagaccagagacagaagcagaggacgccaggacgccaagaagcggaacaaaccagcaagaagcggca

SEQ ID NO: 109145 - RNA, 60 nt, Homo sapiens
cccccccagaaaccccgcgccgccacggcccaggacccaaagacaggaccacgcaccagc

SEQ ID NO: 109146 - RNA, 55 nt, Homo sapiens
cgcagggcgcccccgccgcacagaggaagacacagagagggcgggccccagcggc

SEQ ID NO: 109147 - RNA, 83 nt, Homo sapiens
gacgcgccagccccagccccggcagcgggacccggcgaagacgcgaccgcggcgcgagcaccagacaaacaacgcgagagaag

SEQ ID NO: 109148 - RNA, 62 nt, Homo sapiens
cagacagcggaacgggagcaagaagcgaccaagcagcggaagacagcagaaggccccgcaag

SEQ ID NO: 109149 - RNA, 76 nt, Homo sapiens
ggcggaagaaaaacaaacacacgcaaaggagaaaggaaccgacagggacaagagaaaaaaagggcgggcgaacaaa

SEQ ID NO: 109150 - RNA, 73 nt, Homo sapiens
gagaaagaaggaagcggcgccgaaaaaaaggcgagagcagagcaacggcagaacaagaacagcagcacgggaa

SEQ ID NO: 109151 - RNA, 97 nt, Homo sapiens
ggaaaggcgcgaccgagacaccaccagagaagcccccaccggccgggcggcaccaggacgccgaaaagcgaccggacgcaggcacagggacacgcga

SEQ ID NO: 109152 - RNA, 85 nt, Homo sapiens
gccgccgcgcaccgcagcgccggggcacgacacaaaaacagagcagcagagggagaaccagaagagaaaacagcggcacacacca

SEQ ID NO: 109153 - RNA, 99 nt, Homo sapiens
aaaaaacaaagcgaaacagcggggccacccagaacaaaaagggccaggggaagcacacccgccggagagggaagagcaaagcggaggccacaagggggc

SEQ ID NO: 109154 - RNA, 75 nt, Homo sapiens
cccgcgcgggccgcgccgcggcgacggcgacgccgcagccaggaagggaaccccggaacgaagaaaagaaaggcc

SEQ ID NO: 109155 - RNA, 62 nt, Homo sapiens
gggggcgcggccagaggaggcccaggaggaggaagcgcaggagcgaaagcaaggcgaggaag

SEQ ID NO: 109156 - RNA, 61 nt, Homo sapiens
ggagacaagagcaaccagaaagagagggacaaggcaagcggaacacagacgggccacgggg

SEQ ID NO: 109157 - RNA, 70 nt, Homo sapiens
gagaacgcccgagagagcgcccgagacgccaaaaggaagagagcagaggaggggggaccccgcccagggc

SEQ ID NO: 109158 - RNA, 83 nt, Homo sapiens
agagcaggagagggagccggggccggcggggggcgcgcccggcagcccgccacagccacggcggaggcagggcgcgaccggcc

SEQ ID NO: 109159 - RNA, 65 nt, Homo sapiens
aacaggcacacaagggaggaggcaaagccagacccccgagcccccagccggacccccccgcaagc

SEQ ID NO: 109160 - RNA, 73 nt, Homo sapiens
cagcccccaagacgggacacagccccccccccgcaccccacaagcggcccagccccgcggaccggaaggcgca

SEQ ID NO: 109161 - RNA, 81 nt, Homo sapiens
agaaaaacaaggaaagaggggaaaggagggaaaagccaagaaagacccaaaagaccccagaccagaaagaggcgccaagcg

SEQ ID NO: 109162 - RNA, 78 nt, Homo sapiens
gccgagaggagcgagcgagcgcggaagcagaagggaacacccgcacagaaagaccagggaaccacagggaacccaaga

SEQ ID NO: 109163 - RNA, 77 nt, Homo sapiens
gcaagggcagaagggaagaacaggaggcagccggcacccgcacaacccagggggccgaacccagaccaacaaaagga

SEQ ID NO: 109164 - RNA, 63 nt, Homo sapiens
gcccggccgggcgcccggggcggcggagagccggaagaagaggaaagcaaagaagccaagaag

SEQ ID NO: 109165 - RNA, 67 nt, Homo sapiens
gaggaggagccaccccaagccacagggccgccgacagcagagacagcgagagggagaaccagacacc

SEQ ID NO: 109166 - RNA, 78 nt, Homo sapiens
acgcgcccagagaggggcgaggagccaggaccaccggaagagaacaccaggaccaaggaggcccacccgacgcggagc

SEQ ID NO: 109167 - RNA, 75 nt, Homo sapiens
ggacagcggcaaaagcccgccgccccggggacaagaaacagagcaaaaaccggaaacgcagcacggcgaggcaca

SEQ ID NO: 109168 - RNA, 75 nt, Homo sapiens
gcgcgggaacggcgcggaaggcagggaagcaaagagcacccgagcccagcaggcaagcagccggcaccaagacag

SEQ ID NO: 109169 - RNA, 70 nt, Homo sapiens
cagcggcggcgggccgggcagcccggccgacaaccacgagcaaccaaaacaggacaagaaacaccaaaca

SEQ ID NO: 109170 - RNA, 95 nt, Homo sapiens
ccccgggaacgccggcagcacggccgaaggagacagcccagaagaacgaggacgaaaagaaacaccccgcagaggaacaacaagaaacaagcaca

SEQ ID NO: 109171 - RNA, 95 nt, Homo sapiens
acgcggcggggcgcaaaccgagacaagcaccccgaagcgccgggcggagaacggaaaagcaccaggaagcagagaggaccgcagaagggaaggag

SEQ ID NO: 109172 - RNA, 76 nt, Homo sapiens
gaggacggcaggacgggccggggggacacgcgggagaacagcgaggagcgagaaagaaaaacagggccgagcaccg

SEQ ID NO: 109173 - RNA, 83 nt, Homo sapiens
caccgcgggcggacccagcacgccgggccgggggcgcagcagacaagcagaccggaagaccgacggaagaccacaccccgagg

SEQ ID NO: 109174 - RNA, 58 nt, Homo sapiens
ggaaaggacgcgacgagcccggcaaggaggagaaagaagaaacaaagagggacccagc

SEQ ID NO: 109175 - RNA, 81 nt, Homo sapiens
gcaggcaggaaaacgggagaacacgacaccggcgaggaacggcagggaaaaagaacgaagacgaagaggacaggacaagca

SEQ ID NO: 109176 - RNA, 79 nt, Homo sapiens
cccggagaacaagacgcccaccccacaagggcccggccccaccaaaccgggccaaagacaccggcacgaggagaaggac

SEQ ID NO: 109177 - RNA, 65 nt, Homo sapiens
cggcgaacgcggagagcacgccagaaggcccgggcacgccgcgccaggcccagacacgcagagga

SEQ ID NO: 109178 - RNA, 74 nt, Homo sapiens
cccgaccgccccgaaggcgcacgcggcagcaaagcagacgcccacagagccccggaagggagggcaaacacggg

SEQ ID NO: 109179 - RNA, 75 nt, Homo sapiens
cagcggaaaaagcagagcggagcgggacgcccggccaagacacgccagcggagggacggacaacagaagccagag

SEQ ID NO: 109180 - RNA, 75 nt, Homo sapiens
gaagcgaccaccaaccaccgcccaggccgcacggcagccagccgcccgacagggcgggaccaccaggagcagagc

SEQ ID NO: 109181 - RNA, 58 nt, Homo sapiens
ggcagaccaccaccgcagggccccccacggacccaggagacagagcacggaccagccg

SEQ ID NO: 109182 - RNA, 64 nt, Homo sapiens
gaccagcaccgccgcccaccacccgacccagagcccccgcccggcgaccggcccgaggaccgcc

SEQ ID NO: 109183 - RNA, 43 nt, Homo sapiens
gcaccgagcccccgggccagcagcaggagagaaaccaagagaa

SEQ ID NO: 109184 - RNA, 66 nt, Homo sapiens
accgcccgaaaacggagaagcagggagagaacggagcagaccgcaggcccgaggagcagcccaaca

SEQ ID NO: 109185 - RNA, 70 nt, Homo sapiens
aaccagcacgagcaaaaaaaccgggcgggacgacaaaggacccaacagagcaagcgcccgcggcggggga

SEQ ID NO: 109186 - RNA, 58 nt, Homo sapiens
ggggaagaccagagcagaagacagacaaaaaccaagaaacaagagagaggggcgccgg

SEQ ID NO: 109187 - RNA, 81 nt, Homo sapiens
ccgcggacgggaggaaagaaggaaaccagcaggccagcacccgggagggcgaccggcaagaccccgccacccccccccacc

SEQ ID NO: 109188 - RNA, 82 nt, Homo sapiens
aaccgacccacgagccggagagccgcagggaggcggagggcagggccaggaggaacagagaagggccccgcccagagcacca

SEQ ID NO: 109189 - RNA, 61 nt, Homo sapiens
gacacggccgccgggccgcgcccacgggcagcgagcaacggggcggcacacaaggagcgaa

SEQ ID NO: 109190 - RNA, 52 nt, Homo sapiens
cgagccacggaaaaaccgcagccagaaggccgagagcagcccgcccggccgc

SEQ ID NO: 109191 - RNA, 70 nt, Homo sapiens
gcccacgccacagcacaccggagaggagaccaagagagaccaagaagacagaaaagacaagaaaaaaacc

SEQ ID NO: 109192 - RNA, 74 nt, Homo sapiens
ccccaagggcgggaacagaccgcacccaccagaaccgggcaggcaagacgcgccggccaagggacagcaggaga

SEQ ID NO: 109193 - RNA, 99 nt, Homo sapiens
ccgacccaccacacaagacggaaaaagcgacggagcccccccccggggccggggcagagagccgaaagaccagacgccaacaagaaccagcacacccac

SEQ ID NO: 109194 - RNA, 77 nt, Homo sapiens
gcgaggcacaccccggagccaggaggaaacaaccacccgggcacacgccgcagaacagcgaagggggcaaggagcag

SEQ ID NO: 109195 - RNA, 50 nt, Homo sapiens
cggggagaaagcacccggagcagaaggcccccagaccagcagccgaaccc

SEQ ID NO: 109196 - RNA, 71 nt, Homo sapiens
aacgcgggggcagccgccgcacgcccccgggagcgcgggcaaaagcgaccccccagaaaaggacagcaaag

SEQ ID NO: 109197 - RNA, 75 nt, Homo sapiens
gccgaagaaggaagaaccacgaagaaacaccacaaaccggaaggggggcggcgcaggacgagagcccccgcagga

SEQ ID NO: 109198 - RNA, 73 nt, Homo sapiens
gccacgggggcagcgccgaaccaggaccggacccggacccaaaggccagcaaaggagaacagaagcggagaac

SEQ ID NO: 109199 - RNA, 75 nt, Homo sapiens
agacccaacacacgcagcggggggacacacgcgaccggcgaggcccaccaagccagggcgccggggagcgcacgc

SEQ ID NO: 109200 - RNA, 73 nt, Homo sapiens
cgcagcacggagcgcagaaccggccgcgcccgggcgaacgggccaggcccaggacaggccacacgggacagag

SEQ ID NO: 109201 - RNA, 58 nt, Homo sapiens
gaggcccacaaccaagccacaaaagacacgccacaaccggaagcgaaaccccacgagg

SEQ ID NO: 109202 - RNA, 72 nt, Homo sapiens
gaggcgagggccgccgccgccgacagaagccgggagagagcgcgaaccggaaaaagaacgacggaagaagga

SEQ ID NO: 109203 - RNA, 78 nt, Homo sapiens
ggacagcaccccgaagaagcaagaaagagaaacggacaggggccaagagcaggggagagaagacagaagaggggagag

SEQ ID NO: 109204 - RNA, 82 nt, Homo sapiens
ggcaaaggccgagacccgccggaagggacaaaggaccaagaaaggcccagggaccaaagcccggacaaggcccgagcaccag

SEQ ID NO: 109205 - RNA, 89 nt, Homo sapiens
gcagagcgcagcagcccgccccgcccggcagcgagcggcgccccaacccggagaacgggaccgggcagaagaaaacgcaccaaggggca

SEQ ID NO: 109206 - RNA, 65 nt, Homo sapiens
gcacggggcgcgccgggcggagcagagaggaaaagaggcccaaagaaggagccacggaaggccca

SEQ ID NO: 109207 - RNA, 67 nt, Homo sapiens
aggagacagggcccgggcacaaaaaccgacgagccaggggggagaaaaggccaagggcaggagacac

SEQ ID NO: 109208 - RNA, 55 nt, Homo sapiens
agcgcagcagccaaggagacaccccagaagaagagccaaagcccaggacggggaa

SEQ ID NO: 109209 - RNA, 62 nt, Homo sapiens
acccggcgcaaacccacacggaggcgaccagcaggacaaagcccccagcgggccggcgagcc

SEQ ID NO: 109210 - RNA, 73 nt, Homo sapiens
ggaaagcaacgaaaagagaacaggggagccgccaccaaaagcagacggaaaacccacggggaagaccacaccc

SEQ ID NO: 109211 - RNA, 78 nt, Homo sapiens
gggggaccgaaccaggcggcgcgacaccaagaccaaagacacaggccaaacaggagcgcgaggcgcacgaccaccaag

SEQ ID NO: 109212 - RNA, 76 nt, Homo sapiens
cgaccggaggccacacagcaccggcaaaggccagccagggcaccaggagcgggccaagccgcccgccaaccggcag

SEQ ID NO: 109213 - RNA, 84 nt, Homo sapiens
cggccccagacccaagagcggagcgccaagaaacaggcacacacagcccaaaagcaagacagcagagcaccaaacaggggggaa

SEQ ID NO: 109214 - RNA, 112 nt, Homo sapiens
cgcacacaacgcccagggccggagacgaaggaaagaaaaagcggaaaggaacagcacagcccagaaaccggaagaaagcacgaccaagagggaaggaaaaaccaagccaagg

SEQ ID NO: 109215 - RNA, 80 nt, Homo sapiens
aggggaaggaaagcaggaacccggcagcaaggggagccgccacggagggagccgggggaccggccaggaagaaacaggcc

SEQ ID NO: 109216 - RNA, 72 nt, Homo sapiens
ccgccagcagcacagcaagccacagagagggccggcagggcgggcagaaacgccgaccagaagaagaagaac

SEQ ID NO: 109217 - RNA, 82 nt, Homo sapiens
agcacgccacccggaagggcagcgaggcacaggccccaccgcgaggcgagccaccccagggaacccggccccgaggacgagg

SEQ ID NO: 109218 - RNA, 87 nt, Homo sapiens
acccgggggcccagacacaggcgaggcggaggccgaggacccggggccgaggagcgggaagaggcgggcccgaagaggaaggagaag

SEQ ID NO: 109219 - RNA, 86 nt, Homo sapiens
gagaggcggaaaggcaccggagacagaggcggaaccaaaagcagggaaaccgccacgacgagacaagccccaggagcaccaccaac

SEQ ID NO: 109220 - RNA, 49 nt, Homo sapiens
ccaccacaccacgggcggccccagaagaacggccgagcgaccaggagag

SEQ ID NO: 109221 - RNA, 68 nt, Homo sapiens
accccaagccgcgggcgcgcaaggggccaaagcacccaagccagggagcggcaaaagcaaaagggcca

SEQ ID NO: 109222 - RNA, 46 nt, Homo sapiens
ggcgaaccacacaagacagagaaacggggggagacaaagacacaaa

SEQ ID NO: 109223 - RNA, 63 nt, Homo sapiens
aggaacgcggaacagaaccaaaggcaggacagccagcagggacacgggggacaaggaaaaagg

SEQ ID NO: 109224 - RNA, 78 nt, Homo sapiens
ggcgagcccgaaacgaggcgggagcagcacagggggcaggggcgggaggggaggccgcccgccacggagcccacagag

SEQ ID NO: 109225 - RNA, 72 nt, Homo sapiens
aagaagggccgagcacagcaagcaaagacaagggcagagccaagcgccgcccgggcccaagcacccgcccag

SEQ ID NO: 109226 - RNA, 65 nt, Homo sapiens
ggcggcgccaggagcgcggccccgccggcccgggcgcaccaggagacaaagccacaaaaacacca

SEQ ID NO: 109227 - RNA, 54 nt, Homo sapiens
cggaccacaaagcaggcagaaacacagccccaagggaggaagaaaccgaagagg

SEQ ID NO: 109228 - RNA, 59 nt, Homo sapiens
ccaacagaaaccaccgccgacaggcgccagaggagcccagcccagggacaaggaagagc

SEQ ID NO: 109229 - RNA, 75 nt, Homo sapiens
acggacccagcacgaggaggcgcgaggagagggccacaaagcccagacaagcgcagaagcaacagaacccgaacc

SEQ ID NO: 109230 - RNA, 75 nt, Homo sapiens
agcaacccccccacgccacacagggaaggcacacagcagcgagacccacacaagacgacgacccagccaggaggc

SEQ ID NO: 109231 - RNA, 40 nt, Homo sapiens
aaccagcccaagcacaaaagggggaccaccgcacccaggc

SEQ ID NO: 109232 - RNA, 65 nt, Homo sapiens
cccacggagagagacggcccaaagaggcaaaggaaacgccggacacagcgcaaaaagcaacagaa

SEQ ID NO: 109233 - RNA, 87 nt, Homo sapiens
gcgcccggccgcggccagcggagcccgggcggggcaggagccgggcagggcggaggcgcacggaggccgagagaggaggaggcccga

SEQ ID NO: 109234 - RNA, 58 nt, Homo sapiens
gcgaagaaacgcgcaaagcaagcaaggcgccaccggaagaaacgggaggggaggagcc

SEQ ID NO: 109235 - RNA, 82 nt, Homo sapiens
aggacaaacccacccacaaaggggagcagaagacgcgcgcagcacggggaccggccacgcaggcgccgccgccgccgcgaca

SEQ ID NO: 109236 - RNA, 102 nt, Homo sapiens
gcgccacgcagagccgccgcagcccaggaccgcacgccagggggaagagacccccgacgacagagaagagccgcagggacagagcggacacagcaaccggag

SEQ ID NO: 109237 - RNA, 70 nt, Homo sapiens
ccagggaccaaggaccaaaacccaaagaaaacccacacagcaggccgccgcgcccagcagacccgacccc

SEQ ID NO: 109238 - RNA, 57 nt, Homo sapiens
gagaaggacaccaggcagaggcaagaacccagaccacccaggcaccccacaccagcc

SEQ ID NO: 109239 - RNA, 58 nt, Homo sapiens
gggacaagcgggcaagacaaagaggacaacaaaaagaaacaggaagaaggaaaagaac

SEQ ID NO: 109240 - RNA, 78 nt, Homo sapiens
cgggccggaccaacacaggagaggagcgagcagaccgaaaccgagcagcaaaacagcagcagaaccacagcaaacggg

SEQ ID NO: 109241 - RNA, 77 nt, Homo sapiens
ccgcgccgcaggcggggccggccccagcccgagccaccagacagcacgggaggcccaagcgggcgccggacacagaa

SEQ ID NO: 109242 - RNA, 56 nt, Homo sapiens
gaaacaccaccgacaaagccagggccaggcgaaccgggagaaagaacaaacgccaa

SEQ ID NO: 109243 - RNA, 72 nt, Homo sapiens
aaaacgccggccgaacagcccacgccaagaccagaacacacaagaaccgggagaacgaacaaaccaagccaa

SEQ ID NO: 109244 - RNA, 82 nt, Homo sapiens
ggaagcccagcacacacccccagcacccagaaccgggacaacccagcaaacaggccagacccgacaggagcgacaaacacgc

SEQ ID NO: 109245 - RNA, 74 nt, Homo sapiens
agcggaaccaggcacccagcacgaaggaggaaccaacaacaacacaagaacaagcagaaagcacgaacaacgag

SEQ ID NO: 109246 - RNA, 119 nt, Homo sapiens
ccgcgcccgccaggcgacaggggaacagacagaaggagcaggaaccaaaggagcacagaccagcagacaggacagaaaaccagaagcaccgcagggacgccccggacccccaaacagca

SEQ ID NO: 109247 - RNA, 74 nt, Homo sapiens
agaggaaccgcccggacccgaaggaaagaacggcaaggagaagcacgacaggagcgacaaggcggaacagaaac

SEQ ID NO: 109248 - RNA, 84 nt, Homo sapiens
gagccgggcagaggcgaccccccgcgccagcgcacagggacagggacccaacagaggaagccgcaagaaacgggacgacaggaa

SEQ ID NO: 109249 - RNA, 95 nt, Homo sapiens
ggcagcgcacaaacagcccccacccgggagccagccgggcccaggcccccaaccaccgaggccacgaggacaagcagaaaccaagcggaccgaga

SEQ ID NO: 109250 - RNA, 78 nt, Homo sapiens
ggaagcaggggaccgggagaagcacccacaaaacagcaccccggaggagccgggcgaccggcccgaggaccgccgcac

SEQ ID NO: 109251 - RNA, 80 nt, Homo sapiens
caccccggacagccagggcgcggccgcccgaagaggagagagcgcgggcccaggaaggccgcaggagggaagcgcacgga

SEQ ID NO: 109252 - RNA, 59 nt, Homo sapiens
caacccccgcgccgaccgggcccgggcggaagggagcgcgagggacaggcaagaaggaa

SEQ ID NO: 109253 - RNA, 82 nt, Homo sapiens
ggggagaggccgagggcggcgacaagaaccggccacagaacaccgccggccacaccggccacagcaacccgcacccagaggc

SEQ ID NO: 109254 - RNA, 58 nt, Homo sapiens
aaaaacgaacagagacgaggcggaacagagaaaagaaagacaaccagaaacacaccaa

SEQ ID NO: 109255 - RNA, 82 nt, Homo sapiens
gcggaacagcgccgaggcgacccgcccagcaccacccgaaggcccaaaccccgccagagccgacgggcaaggcaggaagaag

SEQ ID NO: 109256 - RNA, 57 nt, Homo sapiens
gaggcgaaaaggagcagaaaaacacgacagccagacagaggcgaacagaaaccggac

SEQ ID NO: 109257 - RNA, 80 nt, Homo sapiens
cacgagcaacagacgagcgcgccaggccgacagccgcggccgggcccgagcaaggcaggaacggaccaaacagcagcggg

SEQ ID NO: 109258 - RNA, 79 nt, Homo sapiens
ggaagcaggcccaggcggcaggaagagacgaagagaaaaaaagggaacggagcaaagcgaagagaccagggaaaagaga

SEQ ID NO: 109259 - RNA, 56 nt, Homo sapiens
gacagcccaaacgccccacgaccagccacagaaagcccgccccagacagggccccg

SEQ ID NO: 109260 - RNA, 73 nt, Homo sapiens
gcggaaggccggcggaggccaggcgcccgcgagaggagaggagaagacagagagcagcagcgccaccacagca

SEQ ID NO: 109261 - RNA, 77 nt, Homo sapiens
cacaagcacgcaagagaaagccgcaaaaggccccaggagcaaggcacaacgagccaggcaccagacccgcgaccgac

SEQ ID NO: 109262 - RNA, 74 nt, Homo sapiens
cccaacccacgagaggacagcccaggcgcaaaaaccagacaccccacaccaccacccagacgaccaaaagggca

SEQ ID NO: 109263 - RNA, 82 nt, Homo sapiens
cacacagccacacagacaccgccacaggagagagcaaggggccggagggccccagcacccaaccgagggacgccagggggcc

SEQ ID NO: 109264 - RNA, 75 nt, Homo sapiens
aacgacggagagaaaccacaaggggcccaagaggcgccagagaccacacagcacgcaccggaggggcacagcagg

SEQ ID NO: 109265 - RNA, 69 nt, Homo sapiens
gggcggcggagcggcggaagaagggacagccacgccccagagaagggccaggggcacgaacgaggaaaa

SEQ ID NO: 109266 - RNA, 71 nt, Homo sapiens
gccacggagaacaacagacgggagacgaacgaggggcgcgaaccaggaaaaaccggagcaacgggaaagga

SEQ ID NO: 109267 - RNA, 64 nt, Homo sapiens
gaaaggaagggaggaacccagaagggcaagacgaaaaagagccacgcccccacgagcgcccccc

SEQ ID NO: 109268 - RNA, 77 nt, Homo sapiens
aaccacccgcggagaacaaccgaacggaaagcggcagcgcagcaagggagagacaagcccagcgcgcacgggcccgg

SEQ ID NO: 109269 - RNA, 56 nt, Homo sapiens
gccgccggaccacagcaacacaccgagaccgagcaacaacagacgcgagagcaccc

SEQ ID NO: 109270 - RNA, 86 nt, Homo sapiens
gaggccccgacgccccacaccgcagcaacagagaaacgaaacaggaagagcgagacagcaagacgcaagaaaggaagaagcacgag

SEQ ID NO: 109271 - RNA, 72 nt, Homo sapiens
gcacagcgcgcgagaagggcggcacgagaccacgccaagagacagcgacagggaccccagcggcacgagggg

SEQ ID NO: 109272 - RNA, 77 nt, Homo sapiens
acacaacgcaaggaaagagggccccacccaggaccggccggcagcggagaggggcccaccgccgcaaccagaacggg

SEQ ID NO: 109273 - RNA, 41 nt, Homo sapiens
ggaccgagaccgcggccgggaccgaggggcacccgaccgac

SEQ ID NO: 109274 - RNA, 63 nt, Homo sapiens
cggaaagcaccccggccacagcggaaaccgaagaaccagccccggggacgaaagagacggcag

SEQ ID NO: 109275 - RNA, 88 nt, Homo sapiens
cagccggaggacgcggagcccaagaaacgggcagccaggcccccacagcccgcagacgaaagcgaaaagaaacagaaagagacaggac

SEQ ID NO: 109276 - RNA, 82 nt, Homo sapiens
ggcccgcggcccggccccgcggcccgcgcggagcggacgcgcgggcgcgcccgaacaccgaaaagcggaggacaccgaaaac

SEQ ID NO: 109277 - RNA, 70 nt, Homo sapiens
caaaagaagacacagcaagggagacggacggaacgcggcgcgaccagaaaaccgagaaagccgagaaaag

SEQ ID NO: 109278 - RNA, 75 nt, Homo sapiens
acaacagaagcagcggcagcagaaggaggcaacagacgcggagccacccaaccaaggccacgaagacggcaagga

SEQ ID NO: 109279 - RNA, 72 nt, Homo sapiens
gcgcagagcggggcccgaggccccgaccagacggcccgccacgggccccgcagccgcgcccgagcgcccgag

SEQ ID NO: 109280 - RNA, 57 nt, Homo sapiens
agagagacacggacaagaaacaagggacgaacaaaacaccgaggaaggacacacaca

SEQ ID NO: 109281 - RNA, 74 nt, Homo sapiens
gaccagaaagccgagacccagaccagcaggaaagaagggcgcaaaagaaaaggaagagaacgaagccagaacac

SEQ ID NO: 109282 - RNA, 81 nt, Homo sapiens
cgggcgcgggcgcgaagaagaggcccacccccggcagcccccaggcccagaaccccagcagcccacagaccaagccagacc

SEQ ID NO: 109283 - RNA, 95 nt, Homo sapiens
cggaaacggcaaggccacaaaccaaacagacagaggagccaggcgggaaagaggagagccggaggcaaggaggccacggggccgaagacaccaac

SEQ ID NO: 109284 - RNA, 86 nt, Homo sapiens
ccaggaccggccgaacgcagaggccagcagaagaggaccagacgcccgggggggcggcggcccacagaccgccaccagccgcagca

SEQ ID NO: 109285 - RNA, 74 nt, Homo sapiens
ggggaggccggggcacccacaagcgcacgaccaccaagggaggaaggaacggcccgggcccggaggcagcagac

SEQ ID NO: 109286 - RNA, 76 nt, Homo sapiens
ggcggcccgaccggccgcgacagcgaacagcgcggccgcagaggcgagagcagcaaggaaaaccaggaccagaggc

SEQ ID NO: 109287 - RNA, 102 nt, Homo sapiens
gagacaaggagacccaagaaggagacaagagcggcgcacgccgacagacaagcaaagggacagcaaaggcgcagcaccagcacccaaccaagaacgacccaa

SEQ ID NO: 109288 - RNA, 55 nt, Homo sapiens
cagaaaaaggggccgcgcgagcagaccaaacgggccccgggcgcgggagccagcc

SEQ ID NO: 109289 - RNA, 77 nt, Homo sapiens
caggccgggcagccgccgacgagcaggccgaacggccacagggacaggaacccacaggggaagagacaccgagagaa

SEQ ID NO: 109290 - RNA, 80 nt, Homo sapiens
ggggggggggcggcccaccgggaccgccgggggggccccgaagccacgaggaagccacacaccggggcacggaccagaac

SEQ ID NO: 109291 - RNA, 77 nt, Homo sapiens
caggccaagaccacgcgacgcagagcggaaggaggcccggcgagcgaccgccgggggaacgcccgagcggagcagca

SEQ ID NO: 109292 - RNA, 72 nt, Homo sapiens
ccgcccagccccgagagcggaaacagacagcgcgagcaaagaagcagaccgagaaccagccgacacagcagc

SEQ ID NO: 109293 - RNA, 80 nt, Homo sapiens
cgccagggcgcggggccgcggccgcgcgagcagcgccgcgggagccgcccagcaaaacccaacgggaacccgccggaaaa

SEQ ID NO: 109294 - RNA, 52 nt, Homo sapiens
cacgcccgccacccaagcagaagaacagccaggagggaggggacgccacccc

SEQ ID NO: 109295 - RNA, 55 nt, Homo sapiens
cgacggcacaggggggcaaagggaccccagcaacaaccggaagaggggaccacac

SEQ ID NO: 109296 - RNA, 79 nt, Homo sapiens
agccaagcggagacacaggcaaacgcagaaaagagagccgggcgcggaaacgagcccaccgggggacggcacggcaggc

SEQ ID NO: 109297 - RNA, 76 nt, Homo sapiens
agacacgaagaggagcaggaacagcacgacccagccgccccggccgcaggccagacccagcagggcgggcggagag

SEQ ID NO: 109298 - RNA, 65 nt, Homo sapiens
caaccagaggcagccagcagggggaggagcgcagaggcggagacagaggggccaacccgcgagcg

SEQ ID NO: 109299 - RNA, 78 nt, Homo sapiens
cccaggccccaccgccagagagaccgacagagccacaagaaacaaaggcacggcacggccggcacacccggggcggca

SEQ ID NO: 109300 - RNA, 76 nt, Homo sapiens
ccagcgcgagaggcggggccacgcggggggagaagagcgcaggggacccaccggaaccgaggaagggaaacaggcg

SEQ ID NO: 109301 - RNA, 51 nt, Homo sapiens
gcgccaggagcccagcagcaaggcgaacccaggcacccagagacggagcgg

SEQ ID NO: 109302 - RNA, 87 nt, Homo sapiens
cccagagacgcgagcccgccgccgccgccaccacccacccggacacagaaaccaagaagcacgaagagaggagagacagcaaagcag

SEQ ID NO: 109303 - RNA, 31 nt, Homo sapiens
caccgaaacccacggaagaaaacaccggagc

SEQ ID NO: 109304 - RNA, 68 nt, Homo sapiens
cccgagggcgggacacaggaacggcccgccccaacaagaacgaagcgagcacccaaggcagaagccac

SEQ ID NO: 109305 - RNA, 74 nt, Homo sapiens
ggccgccacaaccgccagacaaccggagccacgccccacgaccgccaggacagccagacaagaccccaacgaag

SEQ ID NO: 109306 - RNA, 72 nt, Homo sapiens
gagggccgacccccgagcgcagccagaacggaggaggagccgcagccaaaaggccaagcaggcaccaagcag

SEQ ID NO: 109307 - RNA, 78 nt, Homo sapiens
gaaaccagcagcggagacccagaccgccggcaaaggaaacaaagagcgcccggaaagaggcagaggaaacgagccccc

SEQ ID NO: 109308 - RNA, 73 nt, Homo sapiens
cagggaccccccaccaccgggaagccagggacacacggagcaagagcccccaggaacaggggaaaccggggca

SEQ ID NO: 109309 - RNA, 109 nt, Homo sapiens
ggcgacaccccacgcgcaccagagagcggagaagcccaagcccaccccaaaggcaggccccccgcagggccagcgcaggggggcacaggacgggcagcaccccgggggg

SEQ ID NO: 109310 - RNA, 64 nt, Homo sapiens
gaccggcagcaacgagccaagaacggcacagccaacaagagaacggagcggacaccagaccaac

SEQ ID NO: 109311 - RNA, 76 nt, Homo sapiens
aacgcggagagcacgccagaaggcccgggcacggaaagcaaaaccagaggcccagaagagaaccaaagccgaaaaa

SEQ ID NO: 109312 - RNA, 43 nt, Homo sapiens
cgccgcggagacaaggagcaggcagcgcaagaccccgcacgga

SEQ ID NO: 109313 - RNA, 71 nt, Homo sapiens
gaccccccggcgccgcgccggcggcggaaagaccacagcaagaccacgcccccagccgggggaccaggccg

SEQ ID NO: 109314 - RNA, 67 nt, Homo sapiens
cacaggggccaagcaaccgcggaacagaaccagcagagaagaaacccaaaccaaacgcggaagaacc

SEQ ID NO: 109315 - RNA, 72 nt, Homo sapiens
cggaaaagaaaaggcaaaccgcccgcccccacaacacacagcagccagagaccaagcagaagaaccgcgaaa

SEQ ID NO: 109316 - RNA, 66 nt, Homo sapiens
aacagcgaaggaacagccggcacaccgaccggccgcaagagacaccacaaaaggacacccgagcgc

SEQ ID NO: 109317 - RNA, 74 nt, Homo sapiens
gcccgaaggagcaccagggcaccacccccgcgaggagcagaagacagagggaggagggccacggacaaacacgg

SEQ ID NO: 109318 - RNA, 69 nt, Homo sapiens
gaaacggccacgcaggaaccacaaggacgcagacgggagcgggccgagaaaaaccacagagacacacgc

SEQ ID NO: 109319 - RNA, 79 nt, Homo sapiens
gcggcgcgccgcccggcgagcgggccggaggaaaagaaaggagcagaaggcaagaaagggagaagccagaaaagcagaa

SEQ ID NO: 109320 - RNA, 76 nt, Homo sapiens
ccggaccggagaacaccgcgcgggaagaaggcccaggcagcgcagacgaaacagcgcgcagaagccaacagacccc

SEQ ID NO: 109321 - RNA, 55 nt, Homo sapiens
gggcagaccaaacggcaaggggagagcggccagcaggcaacaggacaagcccccg

SEQ ID NO: 109322 - RNA, 80 nt, Homo sapiens
agcgcggaggacgagggccagcgacggagagggcagaagaggaggaggacggcgaggcccaaggaaaggaccaacgaggc

SEQ ID NO: 109323 - RNA, 76 nt, Homo sapiens
caagggcacgaagcggagggcacaaaacaccaggacaaagaagggacacaccaagcaaaggagggacaaggcacac

SEQ ID NO: 109324 - RNA, 75 nt, Homo sapiens
cccagcaccaggagccacgcccagacgcgggcgcggaaaccgccgcggagagccggggccggacgagaaagccga

SEQ ID NO: 109325 - RNA, 74 nt, Homo sapiens
ggagaaaacggcacaggcacaaaacgccagcaagaacacgcacagggacgcgacccaagcaaacggaaaggaaa

SEQ ID NO: 109326 - RNA, 82 nt, Homo sapiens
cccggcggccgccgcccccgccagccacggagccaaggcggcagcgcgcgagggaccggccaggcggggcgcggaggacgca

SEQ ID NO: 109327 - RNA, 69 nt, Homo sapiens
aagggggaagagagagaaacaaaagcgccagagccaagaacgccggccaagaacgcccaaacacaacac

SEQ ID NO: 109328 - RNA, 70 nt, Homo sapiens
aggagacagccacggagcacaccaggaaaagcgcgccgggagacgcggggcagacaccagcagcccccag

SEQ ID NO: 109329 - RNA, 76 nt, Homo sapiens
agagagggaaaacaccagcagcaaggagcaaggcacggccacgaagaggggcacacgcccaagcacaaaaaacagg

SEQ ID NO: 109330 - RNA, 49 nt, Homo sapiens
gaaggaccaagaaccagacccaaggccggacaaagcaaaccaaaggaca

SEQ ID NO: 109331 - RNA, 82 nt, Homo sapiens
ccgccgcggggggagccgggcagccaaaagaaacccccaaaaccggaagaaagagaaggaacagaggacacgcacaccacag

SEQ ID NO: 109332 - RNA, 84 nt, Homo sapiens
ccccgcagaagcgcccgacggccacacggagggagacacgacgccacagcaacaagcagggcgagcggagaaacggccgacggc

SEQ ID NO: 109333 - RNA, 63 nt, Homo sapiens
gacgggaagaacccacgcgcgacgaaaaacaagggaggcgaggacggacaaaaggaaacggac

SEQ ID NO: 109334 - RNA, 83 nt, Homo sapiens
gcagaaaccacaaaggcaggaggaacggagaggaagaggagggaggaaagaaaggcgcacagaaaaaccagagggagaagcca

SEQ ID NO: 109335 - RNA, 76 nt, Homo sapiens
agaccacagcagcacccagacgccggggagggccgacagcaaccccagcagacgaccccgaccccgaggccagaac

SEQ ID NO: 109336 - RNA, 70 nt, Homo sapiens
accacccggcgaagcacgcagaaacagcagacggaggccgggagcaggcaaagaggggcgcacccaacgc

SEQ ID NO: 109337 - RNA, 79 nt, Homo sapiens
gggagagcaagaccacagcgcgcggcccccacaccacacagagagcgaccaagaaaaccaggcccgacagcaagaaaaa

SEQ ID NO: 109338 - RNA, 78 nt, Homo sapiens
cggccgggaacgcgggcccgccaggggcgaagggagaggagaaggcagagcccccccaggcagaagcccgagcgggaa

SEQ ID NO: 109339 - RNA, 83 nt, Homo sapiens
ggacaacgagaaacggacaaccaacggccaagaacaagaacaaaggccgcgacggaggggaacggcgagggaacccaggaagg

SEQ ID NO: 109340 - RNA, 59 nt, Homo sapiens
gcacaccagccccggcccaggacccccaaaaccaagacaagcaaacccaggaacacccg

SEQ ID NO: 109341 - RNA, 72 nt, Homo sapiens
gacaaggagggagggagaaaagcaacgggcacgcgaaggaggaccagcagagggcgcccgaggcgggaggag

SEQ ID NO: 109342 - RNA, 77 nt, Homo sapiens
ggaaaacgccggccgaacagcccacgccaaggggagaaacgacggaaggaaaacccccggggcaaagacaagccgag

SEQ ID NO: 109343 - RNA, 61 nt, Homo sapiens
ggggcccgaaggcacaggagggacggcgggcaaaaaaaggaaaaagcgcgacacaggcgag

SEQ ID NO: 109344 - RNA, 71 nt, Homo sapiens
gaaaggaaaaagcagacggacacaaagacagaaagaacaacggcgcgaaggagacacaaacaacaccaccc

SEQ ID NO: 109345 - RNA, 59 nt, Homo sapiens
cggaaccgcccggccaccgcccagggaccaggcagcgcgaccccggccaacgcgcaaaa

SEQ ID NO: 109346 - RNA, 81 nt, Homo sapiens
gagcacacgaaggcagaggaaacgaggagccggccgaaccgggcagggaggaagccagagcccaccgcaaggagcggccga

SEQ ID NO: 109347 - RNA, 68 nt, Homo sapiens
caggacccaggcacacacagaacaaaagcaggcccgagcaggaaagagaaggcggagcaggacagccg

SEQ ID NO: 109348 - RNA, 77 nt, Homo sapiens
ggagcgaggcacacaagcgcaccagccaaccgagcagcaggaggagccagagcagggcagaagacaagcaacgcaga

SEQ ID NO: 109349 - RNA, 79 nt, Homo sapiens
cgaccgccgccgagcaaggccggggaaggcccaggagacagcggagaaggagcagaagcccgcggcaagacaagcacaa

SEQ ID NO: 109350 - RNA, 67 nt, Homo sapiens
aagcacggcacaagcaccccgcccaagaggccgccaggcacagagaaggcaaacgggagggcgagga

SEQ ID NO: 109351 - RNA, 56 nt, Homo sapiens
gcaaagccagaggccccccaagcgcagcaggagccgcaaagggcaagacaaaacgg

SEQ ID NO: 109352 - RNA, 71 nt, Homo sapiens
ccaccaaagacaacagccaccggaggacaaacggccaaccagggaaaggaaggagaacaagggaagaagga

SEQ ID NO: 109353 - RNA, 78 nt, Homo sapiens
gagcgaccagaaggcacaggacggaaaaaggaccagacaaagaaacaaagaaaaaacgcgaaggagaacaacaagaag

SEQ ID NO: 109354 - RNA, 74 nt, Homo sapiens
gcgacgacaagcaggagcgagcaggccaaaagggaccggcaacggagaaccgagaaagcgcagaacagacgcag

SEQ ID NO: 109355 - RNA, 78 nt, Homo sapiens
gaagcgccacagaagaagcaaaaccaacagggcagagcaggggaacaaggacagccggaagggaaacagcaggcgaag

SEQ ID NO: 109356 - RNA, 71 nt, Homo sapiens
gcgaagccacacagagggcaaggacgaaccgaagcgagcagcccaaggggaagccagggaaagaacacagc

SEQ ID NO: 109357 - RNA, 73 nt, Homo sapiens
agagcccggaaagaagcaacagagaggggagaacccacaggaaccagcaggaaggcgcgacaccaagccagga

SEQ ID NO: 109358 - RNA, 69 nt, Homo sapiens
acgggggagagccacggaagccgacagacaaccaggcggaacccacacagggacccgcagggaaaagaa

SEQ ID NO: 109359 - RNA, 77 nt, Homo sapiens
ccgacccaggaagagccgcagagagcccccagggagggccaccaagggacaaggcgcaaacagaagagagagaccca

SEQ ID NO: 109360 - RNA, 85 nt, Homo sapiens
ggaccaagcgggccacagcacccccgagaggcgccggccgagcccgggaaaacgacagcagcagcagggccggaagacgccaccg

SEQ ID NO: 109361 - RNA, 67 nt, Homo sapiens
aaacaccaagaaccaaccacaggcagagggaaacgggagcgaacacagaagacggaccgcaggaacc

SEQ ID NO: 109362 - RNA, 80 nt, Homo sapiens
gacggccggcaggccgccgccgagcgaggaccacccgcacccaggggacgcacggcccaaccccgagcaaggacgcccac

SEQ ID NO: 109363 - RNA, 59 nt, Homo sapiens
agcgcgagcgaccgaggggagcggagcgggacgacccaacagaggaagccgcaagaaac

SEQ ID NO: 109364 - RNA, 82 nt, Homo sapiens
gggccaggaacaaaagcaaccaccccccagagaaaaacagagcggggaaagaccaacaaagcaccgagaaagccaaaagaag

SEQ ID NO: 109365 - RNA, 70 nt, Homo sapiens
gaagcgggccccaagacccaccggagagaagaagagaccagagggacaggaggggcgggcgcggacggca

SEQ ID NO: 109366 - RNA, 73 nt, Homo sapiens
gcgcacaccggcggcgggacgacgcggacagcgggcggagccgacgagcggcggagccgggccagaagaaacc

SEQ ID NO: 109367 - RNA, 73 nt, Homo sapiens
ggcagaccgggcggcggacacaagcaggacgccccacacacgaggcagcaaagcagcaaaagaacagcacgca

SEQ ID NO: 109368 - RNA, 48 nt, Homo sapiens
aaacagagcacaacaaaccgacggcaggcaaggcgcagagcggcaaca

SEQ ID NO: 109369 - RNA, 86 nt, Homo sapiens
ggagcgaaagaagagcgcggcggcagcggagacgcgagcgcccagcacggagcggaggaagcggaccgaccgagcccgggaaagag

SEQ ID NO: 109370 - RNA, 72 nt, Homo sapiens
gagaggcagaagcaagaagaaggcgcaggacagaacggagggcggagaacggaaaagcaccaggaagcagag

SEQ ID NO: 109371 - RNA, 82 nt, Homo sapiens
aacagggccaccacaggcagagaagcagggggaaccaggggccccacggggaaaaaggggaggcagggagcccagaaagaag

SEQ ID NO: 109372 - RNA, 74 nt, Homo sapiens
gaagaaggaaaagaaggcagcacgcgagagcacagcaccggaccagaagccaggggaccagaacgcagccagcc

SEQ ID NO: 109373 - RNA, 67 nt, Homo sapiens
ggaccagggagacgcagcaacaaaagaaggaagcacaggacaccaaacaaacgaccgacggaacgaa

SEQ ID NO: 109374 - RNA, 75 nt, Homo sapiens
ggaaccacccgcggcagagggggccgcagccggccaggggacccgaagggggcgagacgacacagaaaagacaac

SEQ ID NO: 109375 - RNA, 80 nt, Homo sapiens
gaacaccaaggaccaaaagaacacagcacgggcgcggccaggaacaacagaagagaaaaagaaaagacccagaccccacc

SEQ ID NO: 109376 - RNA, 68 nt, Homo sapiens
ggaaggagaccacagggagccgaaaacaggcgaccggcccgaggaccgccgcacgaccaaacgcagaa

SEQ ID NO: 109377 - RNA, 75 nt, Homo sapiens
aaggagcggaaaacacgggccaacacggcgcgaaagccagggaagacggagcggaaccgccagaccacaagaaaa

SEQ ID NO: 109378 - RNA, 70 nt, Homo sapiens
gccacacgcgacccggggaggcccagggcacacgccagggacaacagcgcgcaaagcccgagagagacgc

SEQ ID NO: 109379 - RNA, 72 nt, Homo sapiens
caacgcccggaacggaaaaccgaggaaacgaccaaaagccagaaaaagacaacaagaaccggcccaggacca

SEQ ID NO: 109380 - RNA, 136 nt, Homo sapiens
cggacccagggcagacggagcaaagcccccacgcccagccaggagcaccgccgaggacccagcacaccgagggagggggaagacagagaagaccacacaaccgaaggggccgggcaggacggcccggggcagcaag

SEQ ID NO: 109381 - RNA, 66 nt, Homo sapiens
gcggacaaaaccagaacaagaaaaacaccaagcacgagggaaaggccaaagaccagacagcaacca

SEQ ID NO: 109382 - RNA, 43 nt, Homo sapiens
gccagaagggggaagcccaagagcagcccgacggccaggaggc

SEQ ID NO: 109383 - RNA, 73 nt, Homo sapiens
ccaggcgacgagagcaagccaaagaccaaggggggggcacccccacaacggcagcggcaagagcgggcaggcg

SEQ ID NO: 109384 - RNA, 63 nt, Homo sapiens
aagagagcaaggaaacagcgacagaagccagcacaccaccacaacagggacaaaggaaaaaga

SEQ ID NO: 109385 - RNA, 74 nt, Homo sapiens
acacccgcggaaccggaggaggggagcggggaagagccaccaaaaccggcaaaggccgcgaggaaccacgaaga

SEQ ID NO: 109386 - RNA, 70 nt, Homo sapiens
agacaggaggggcacaccgccgccgccgaggggcgggaacgaaacggcgcggggaggcccagcccgccgc

SEQ ID NO: 109387 - RNA, 79 nt, Homo sapiens
ggaagaagcaggagcgacaaacgggaaaaagaccaggccccccccaccgccagcagcagaaagcagcagaggccgaccg

SEQ ID NO: 109388 - RNA, 75 nt, Homo sapiens
cccagccgccgaggagccacagccagcccagcccgccccggcgccccaaccccggcagccccagaccagcggggc

SEQ ID NO: 109389 - RNA, 81 nt, Homo sapiens
gagccggccgaccgaccaacgggcggcgcagggaccggggagaggagaggagacgccggagcgggacgaccagagaccgag

SEQ ID NO: 109390 - RNA, 74 nt, Homo sapiens
gaggaagacccaaaagaaaaaagacagggccaggcccagcccaggacccccacaaacccgaagagccacaccag

SEQ ID NO: 109391 - RNA, 72 nt, Homo sapiens
ggcgccaagcgggggccccgaggacggcgacggagggggacagaccaaaaagaagcaaaaccacgccagaac

SEQ ID NO: 109392 - RNA, 76 nt, Homo sapiens
ggagaagagggcagggcccccggccgcgggagaagggccccggagaggcggacgccccccaggggccggagacaac

SEQ ID NO: 109393 - RNA, 51 nt, Homo sapiens
cagcacaaccaaaccccgcgccaggggccccccaggagcagacaagggccc

SEQ ID NO: 109394 - RNA, 46 nt, Homo sapiens
gagcgcagccacgcaccacaacgggcaaaccgacaccagcgacaca

SEQ ID NO: 109395 - RNA, 63 nt, Homo sapiens
aggagacagcccagaagaacgagggagggagaggcgcacacaggaaagacaaccaggcgaaga

SEQ ID NO: 109396 - RNA, 42 nt, Homo sapiens
agcgcaccccggacaccggaagggaggaacaggcaccacaag

SEQ ID NO: 109397 - RNA, 68 nt, Homo sapiens
aaaccgagagggaagccccggaaccagcgagagacaccaaaggcccacgcggaccggcagcgccaccg

SEQ ID NO: 109398 - RNA, 78 nt, Homo sapiens
cacagacagacgcaaggggcaggcacagcgacccgaacgcagcggggcccacacgagggagagcacacgccgaccgca

SEQ ID NO: 109399 - RNA, 81 nt, Homo sapiens
agaaagcggagcacccaaggcaaaggcggcaggcacagaggcaagcagcagcagaggaaaaaagagaccgagagaaagcag

SEQ ID NO: 109400 - RNA, 80 nt, Homo sapiens
gcacaacaggcgccgggacccagccaaccagccaagaaagcagcgggaggaggagcgccgggccagcaggcgcccggacc

SEQ ID NO: 109401 - RNA, 54 nt, Homo sapiens
agccacggccacacgggagagaagaggagagaagagaaagcgaaagggagaacc

SEQ ID NO: 109402 - RNA, 75 nt, Homo sapiens
agggaagcaagagaaaaagaacaacgcgacggggagacaagcaccacccaccgccaacaaagccagcaacccgcg

SEQ ID NO: 109403 - RNA, 58 nt, Homo sapiens
caaggacgccaggaaaccaagacaagaccgacgaagaaaacagggagaaaggcacgga

SEQ ID NO: 109404 - RNA, 76 nt, Homo sapiens
gcacaacaagaggccggcggggcgacagaccgcaggcgggacaagaaaagaaaaagcaacagaaaaacaaccggaa

SEQ ID NO: 109405 - RNA, 71 nt, Homo sapiens
agaggccaaaacaccaacaagagagaggggaaaaaccgaagaaagagccgcagacgcacagcaaccaccgg

SEQ ID NO: 109406 - RNA, 52 nt, Homo sapiens
gaacaacagagagccaagaccggacgccgcaaaagggggagcaaggcaaccg

SEQ ID NO: 109407 - RNA, 65 nt, Homo sapiens
gacaacccgccccccgagcacggagcggaggcagacacacacggggggagagggagggggggaca

SEQ ID NO: 109408 - RNA, 100 nt, Homo sapiens
cgccaaccgcaaccagacgccagcgggacgaggaccgagaccgcggccgggaccgaggcgggcgacgcacgaggcacacaggaaggaggggagcagggac

SEQ ID NO: 109409 - RNA, 90 nt, Homo sapiens
cccagggaagcgcagaaagcaggcgaacccgcggcgcaaaacggcgcaagagccggaccgggcacgggggagcgagccggacaccagccc

SEQ ID NO: 109410 - RNA, 74 nt, Homo sapiens
cggcgccccaggacaagaacccccgccggcgccggcagccccaggccaaggcgggacggccagcagaagcaggc

SEQ ID NO: 109411 - RNA, 39 nt, Homo sapiens
ggacaagcacagccggaaggaagaaagacccaccagcac

SEQ ID NO: 109412 - RNA, 76 nt, Homo sapiens
gccgccggaagcagaaggagcgaaaaaggaaaaccagagacccagacacgcgaaggaacgaaaggccaaaaggcaa

SEQ ID NO: 109413 - RNA, 80 nt, Homo sapiens
ggcgccagcgagagcccaacaagggaagagacagcaggaaaacggagaaggagcggaagagcaagaacgcagggaggaaa

SEQ ID NO: 109414 - RNA, 63 nt, Homo sapiens
accgagacccgcagcgagccaacggcgaccaagcgggggagaagcagaccgcaccaggcggga

SEQ ID NO: 109415 - RNA, 81 nt, Homo sapiens
cacgacaccccacccagacgaagacagcccggacaccgacagcacagacagaacccgcaccagggaacacaagcccaaacc

SEQ ID NO: 109416 - RNA, 76 nt, Homo sapiens
cccgcgccagcgacagcaagagggaaagggccccaagagccgggcggaaaacgaaagcgagcggaacgggacacca

SEQ ID NO: 109417 - RNA, 62 nt, Homo sapiens
acacccacaccagaagggaaaaggaaaccagaagagggacgaagaaaacagcgcagcgccca

SEQ ID NO: 109418 - RNA, 77 nt, Homo sapiens
gaaaaaagacagaggaggacgaggaaaggggaagagcgaagaccgccccagcaaggacggcggaccaccccgccgga

SEQ ID NO: 109419 - RNA, 70 nt, Homo sapiens
agagagaacgcccggaaagagcccaggacaacacaggcaaaggggaaaccgagcaggacagaggaaaaga

SEQ ID NO: 109420 - RNA, 82 nt, Homo sapiens
agaagccgaaaacagaaaagacaagccacaaaacgcccagaagcaaaagagggccccgcggaagggcagcgaaggacccaga

SEQ ID NO: 109421 - RNA, 76 nt, Homo sapiens
ggacagacgagaacggacaccgccccccagccagccagccggaccacggaggcaggaggacaggaagaacgaaagg

SEQ ID NO: 109422 - RNA, 71 nt, Homo sapiens
aagaccgcgcagccgcggcgaggagggcccagccagggcaacgagggcacagaaaaggcgcagccagaaac

SEQ ID NO: 109423 - RNA, 72 nt, Homo sapiens
aagcagccagggaagaaaccgaggacggacaggaaacaggcgggggcacagaagccaaggcgcgagaaggca

SEQ ID NO: 109424 - RNA, 85 nt, Homo sapiens
acggccccagagagccaccggaggagcagccaccgagagacggagccccggccgcccgggcagagaagacgaccccgacgcaggc

SEQ ID NO: 109425 - RNA, 77 nt, Homo sapiens
ggcaaaaaccacagggggaagacgagagagagagaagagacaaccgggacgcaaccagaacgaggaaacgcagcagg

SEQ ID NO: 109426 - RNA, 66 nt, Homo sapiens
acggccccccaaggaaaacagcagccccgcaaagggaacaggaagcagccacggaggggacgccca

SEQ ID NO: 109427 - RNA, 73 nt, Homo sapiens
acggaccccgcaccaggccggaaggggccagagcagaggcggagaggggcagacccagggaccgaaacgagaa

SEQ ID NO: 109428 - RNA, 79 nt, Homo sapiens
accccaccacaagccgaagccggcccgcccggagggaaaggccgcaaggagaacgcagccggccaggggcaaaggagag

SEQ ID NO: 109429 - RNA, 78 nt, Homo sapiens
gcggccgggggccagagaccaaggcgcgcccggcgggccggaccaagcggagcggcggacaccagaagagaaaagggc

SEQ ID NO: 109430 - RNA, 81 nt, Homo sapiens
ccacgcccggggcagcgaacgagcgaggccacgccgcccaggagacccccgcgcaccaccagcaccggacgcgaggaggag

SEQ ID NO: 109431 - RNA, 62 nt, Homo sapiens
cccaggcaggaacgaagaggggggaagccagccaggacaaagagcaaccgaaggaaggaaaa

SEQ ID NO: 109432 - RNA, 82 nt, Homo sapiens
cagcccagccccgaaggcccgcggagacgagaccaaaacacgagcgaagggaagggagagcgaaacgagaacccaggacaag

SEQ ID NO: 109433 - RNA, 72 nt, Homo sapiens
cgccgaacccgaggggaagaaaggcgcccagacgagcccaccacggaccacccgcagccagcgagccgccgc

SEQ ID NO: 109434 - RNA, 78 nt, Homo sapiens
gaagcgcagccgcaccggccaaggggcagacacaaggaacagccagccaggagaaaaacgaacccaacagaccacccc

SEQ ID NO: 109435 - RNA, 58 nt, Homo sapiens
aagcggaggaggccccgcagaaacaccccggcgcaggaacacaggacggccgaacacg

SEQ ID NO: 109436 - RNA, 83 nt, Homo sapiens
agaggagaacgcccaagcggcccggaagcccagggagggaggccaacccagacaaccaaggggagcaccaaaccagccccacc

SEQ ID NO: 109437 - RNA, 74 nt, Homo sapiens
caaacggagccaggcacaagaaaaagggggaaaagagaaaagagaagaagggaagaagaagaggaggaagagga

SEQ ID NO: 109438 - RNA, 84 nt, Homo sapiens
gacacccaggaggcagaagccagacggccggagcagcagaacaagagcggagaccaagggagccccgcagcagcagaagacggc

SEQ ID NO: 109439 - RNA, 82 nt, Homo sapiens
cgaaaccccgaccaacccaccacggagcggacgggcgagggaggaagggggcgcacgcggaggacacccacgagcacagcag

SEQ ID NO: 109440 - RNA, 73 nt, Homo sapiens
gaagcacccgcgacccagaaggggccgggagcaggccgcgcacagcgagcccaccgcaggaccgccagaccgg

SEQ ID NO: 109441 - RNA, 36 nt, Homo sapiens
aacagacaaagcaggccacgaccaaaaggaggggag

SEQ ID NO: 109442 - RNA, 71 nt, Homo sapiens
ggaaccaaagaaaaacagaaagaggaaaaccagagaaacaagaggaggaggggccaaccaaaacagacgca

SEQ ID NO: 109443 - RNA, 96 nt, Homo sapiens
caccaccgcgaggggcgggcgaggcaccggagacccgagcaccccaacgggcagaaaaagcggggaaaacaaaaaaaagaaggagggaagaggggg

SEQ ID NO: 109444 - RNA, 71 nt, Homo sapiens
agcagagcccaaccccccagcagcacaagaccagagaggccaccgcacacaagggaggcagggagaccggc

SEQ ID NO: 109445 - RNA, 59 nt, Homo sapiens
aaaggagagagagacagaaccacagacaagcggacaagccaggcagcgcgagaggaaca

SEQ ID NO: 109446 - RNA, 63 nt, Homo sapiens
agggacgaggagcgccgccgccccgagcccgacaccaagggaacccaaggggaagcgagcggg

SEQ ID NO: 109447 - RNA, 74 nt, Homo sapiens
gggagccacagagaagaaggagcagcaaaacccgaacggggagacaaagacaacgggggaaaccgacaagacac

SEQ ID NO: 109448 - RNA, 75 nt, Homo sapiens
cgaacacaaaaggcgccgaagcaggacccgaagccaaaccaggaggggcagacacaaggaacagccagccaggag

SEQ ID NO: 109449 - RNA, 77 nt, Homo sapiens
cagacgcagggcagggccccgcccggcggggaagagccgggcccagacccggccggccgcgcgccgggagagagcac

SEQ ID NO: 109450 - RNA, 70 nt, Homo sapiens
cgagaaaggaaggaaaaccgacgaggaaagcccgaaaaggaccagcgaagcaagcacagggaggaaacag

SEQ ID NO: 109451 - RNA, 74 nt, Homo sapiens
acacagacgggggcgagcggacccgcagccccaaaggcccagcaccagagggccggacccccgccggccgggag

SEQ ID NO: 109452 - RNA, 71 nt, Homo sapiens
cgaccacacaccagaaccggaggaggaccgcggagggaacaccggggggccagaggggaaaaggggcgcgg

SEQ ID NO: 109453 - RNA, 77 nt, Homo sapiens
aggaggacacagcaggccggacacgagccccgcagagaagagagaacaagagaaacaggcaacaacgccccaccaac

SEQ ID NO: 109454 - RNA, 50 nt, Homo sapiens
acccccccccccccccaaggccaagcagaagaaccagcacaggcgaagcc

SEQ ID NO: 109455 - RNA, 74 nt, Homo sapiens
gaaccaccgccaccgccaccagggcagagacaggcaacagacggcaacgaaaggcacaaaaacgcaacacaaag

SEQ ID NO: 109456 - RNA, 57 nt, Homo sapiens
cacgagcccccaggccgagagagggacaggcaagaaggaagaaggcagaggcgcagc

SEQ ID NO: 109457 - RNA, 78 nt, Homo sapiens
acaagacagcaagcagacccgagaggaagacgcgacaggaaggaacccaccggagccgagacagccgcgccacgacaa

SEQ ID NO: 109458 - RNA, 73 nt, Homo sapiens
aaaagcaaaaaaacaaggaaagccgcaacagaagggcagaagacaagaccccaagagagaagaagagcaacaa

SEQ ID NO: 109459 - RNA, 79 nt, Homo sapiens
gcaacgaggaagaggaagacggcgacgaaccagacgccaaggccccaaaggacaaagcacagacagcagaagcaagagg

SEQ ID NO: 109460 - RNA, 60 nt, Homo sapiens
aacgacccaacacgagcagagacacgggagcaaaaccagaacagcaccagcccggcggga

SEQ ID NO: 109461 - RNA, 55 nt, Homo sapiens
ccacgcccagccgccacaagggaggccaacagacccaacccagaaggcaccaaac

SEQ ID NO: 109462 - RNA, 76 nt, Homo sapiens
aagcaagcgggaaccggaaagaaagagacgagaacccgagaaagcgaagccggccaccaggccacgaagggagagg

SEQ ID NO: 109463 - RNA, 78 nt, Homo sapiens
ccgccggcggggggaggccacaggcgcaagcagcaaaagacgagaggaccgacaccagagcagaaggcagagcggaga

SEQ ID NO: 109464 - RNA, 77 nt, Homo sapiens
cggaaacccaaccaagaaggcccagggggaggaagagcccaagagggcgaacagaaaagggcacggagcagcagcag

SEQ ID NO: 109465 - RNA, 109 nt, Homo sapiens
aaacagcaacacgagaccaacgcgccaccgaccggcaccagcaagcaagaaagacggcaaacaaaggaacagaggcacgcggacacggccacagggacgcgccagggaa

SEQ ID NO: 109466 - RNA, 83 nt, Homo sapiens
gggccaccggaagaaaaccagggggcggagggacaccgcccggcgcaacgggaccggaggcccccggcgccagaaggacggag

SEQ ID NO: 109467 - RNA, 86 nt, Homo sapiens
ccccgcggcgaagggaagaggcccagccggcccgcgggggagccccgggagccgcacgggacccagaacgggggaacggcaccccc

SEQ ID NO: 109468 - RNA, 75 nt, Homo sapiens
acagaggaagggagacagaagagacaggaagcacgcccagaagaacaggcacaaccgaagcggcagccaaaaccg

SEQ ID NO: 109469 - RNA, 70 nt, Homo sapiens
gcaaccgacacgagaagaagagacacaggcacgcggccaaagggacgcaagaggcgaagaaaccaggaga

SEQ ID NO: 109470 - RNA, 80 nt, Homo sapiens
cccggccccaggacgcccggcggccggggagccggcccaagcggccaggagacgacaaggcgggcagggggagcggcgcg

SEQ ID NO: 109471 - RNA, 72 nt, Homo sapiens
acgcaaaggaaaaggacagagagcacaaaaggacaggaaagaggagagaaacgccaaagaaaaaacaaaaca

SEQ ID NO: 109472 - RNA, 69 nt, Homo sapiens
caacagaccccaacgagagccagaggaccaggccaagccgccacaacagggagaaaaacgacaaacaga

SEQ ID NO: 109473 - RNA, 73 nt, Homo sapiens
cacaccccaggaaaaagacagcccgcagcacgaccagcaggaacgggaagagacagcaggaaaacggagaagg

SEQ ID NO: 109474 - RNA, 78 nt, Homo sapiens
cccccccacccccggagggaacaggcacgccccacccgccagccgagcccccgacgcagcacaaagcccccacggagg

SEQ ID NO: 109475 - RNA, 52 nt, Homo sapiens
accaacagccacacacgacccaacggggcaggcacaggccacccaccagccc

SEQ ID NO: 109476 - RNA, 80 nt, Homo sapiens
gaaggcgggaagccgaaggcagccacaggacccgagccccaaagacagaaaagccccgagacggaagagaagagaagaga

SEQ ID NO: 109477 - RNA, 80 nt, Homo sapiens
caagaccgcggcgcccccacgagagggcaaacgcgcgcaggaaacccggcaaagaagaaagacagcgggaaggacgagca

SEQ ID NO: 109478 - RNA, 81 nt, Homo sapiens
ccgccggcacaccgaggacaggaccgacagcacaacaccgcacggggagccaagccggaggggagggggggccagcggcgg

SEQ ID NO: 109479 - RNA, 72 nt, Homo sapiens
agggccacgcagaagggcaggagcagggccggaggccaagcccgcagggggcggagcagaaaccagagacag

SEQ ID NO: 109480 - RNA, 53 nt, Homo sapiens
agagggacgggagcccccccgcccgcaggcacgaagacagccccaacagacga

SEQ ID NO: 109481 - RNA, 79 nt, Homo sapiens
ggcccgagcgcccagacacgacagagccgcaaagaaaaaaaggaccacaaaaacacacgacagcccagagcacccggga

SEQ ID NO: 109482 - RNA, 78 nt, Homo sapiens
ccgcccgaggacagagaggcgagcgcccggaggggagagagcggaggacagccgagaggagaccggggaccccaaacc

SEQ ID NO: 109483 - RNA, 70 nt, Homo sapiens
aaggaccaagaaccagagcagccggcacgggaaaggcaagaagaagcgacagaagccagagaaggagcaa

SEQ ID NO: 109484 - RNA, 56 nt, Homo sapiens
cgagaaggcggcgcgcgaggcaagcgcgcgccgccaaaagaccaagggacagggaa

SEQ ID NO: 109485 - RNA, 76 nt, Homo sapiens
ccaaagaggcgcaagagagaggagggggcaccgagcaacgagggcaggggacacaaagccacgccgaaacaacaaa

SEQ ID NO: 109486 - RNA, 57 nt, Homo sapiens
gacgggcagaggaaggcggacggaagcacgggaaaccagcaaccccgaccaccaagg

SEQ ID NO: 109487 - RNA, 59 nt, Homo sapiens
ggaagggcccaaagccagaaggaccacagggacaagcagaggcgagccagggcgagaaa

SEQ ID NO: 109488 - RNA, 69 nt, Homo sapiens
cgcaaacaagcagcgaaacgagcagaaaggaaagcagaacaccagagaggaccaaaacaaccacaccga

SEQ ID NO: 109489 - RNA, 36 nt, Homo sapiens
gaacagccaggggcccacggagagacggggcacagg

SEQ ID NO: 109490 - RNA, 78 nt, Homo sapiens
cgggaggcaacgaggcaccagaccagcggagaccacaagaaggcgcacagccacggaaagcgccgaccccacccaccg

SEQ ID NO: 109491 - RNA, 57 nt, Homo sapiens
ggagaggagccagagccccacgggaaggagagcagccagcagcaccgagacaaccaa

SEQ ID NO: 109492 - RNA, 63 nt, Homo sapiens
gcgggggaccgaggcaccaaaacgggacagaaggaaaaaggcacggcagaacagcaagaagaa

SEQ ID NO: 109493 - RNA, 82 nt, Homo sapiens
gacccaacccagagaacgaacaagaaaacagaagggcaacaaagagccacagccgcggggcaagaaggaacagacaaaaacg

SEQ ID NO: 109494 - RNA, 109 nt, Homo sapiens
accgggccaagacgagcgacaggagcacacccggagaagcaggagcccaccggcagccgacaaccccggaacgcgggcaaaaggccccaggggaccgggggaggcccca

SEQ ID NO: 109495 - RNA, 76 nt, Homo sapiens
gccgcacgccgggaggagagggcgagagagcgaggagccgcaggggggcccacgcggaggacgcagaacacggcgg

SEQ ID NO: 109496 - RNA, 67 nt, Homo sapiens
cccaagagcagcggaaaagaccagcacagacagggcagcaggagcagagagaccaagggaaaccgag

SEQ ID NO: 109497 - RNA, 58 nt, Homo sapiens
acggagccagagcggccggcccccagacagagccgacagagaacagaaacgggaccac

SEQ ID NO: 109498 - RNA, 57 nt, Homo sapiens
gggaccccgccgcggcgggaggagggaaggagagaaggagagagacccagcccacca

SEQ ID NO: 109499 - RNA, 78 nt, Homo sapiens
gaacacaaggagacaccggcgaaggaaccccggaaaaacgacaagccaaaaccgagaaagggaacgacaagccgagag

SEQ ID NO: 109500 - RNA, 77 nt, Homo sapiens
aaccagaacagaggacaacaccggggaacccgaccgcgacagagaaagaaaaggccgaaaaccgccgcaagccacca

SEQ ID NO: 109501 - RNA, 80 nt, Homo sapiens
gcagaggaacaccagccccagcagcgcagcagcccaccaccagggcacaaggccaagacggccaagggagccacagggcc

SEQ ID NO: 109502 - RNA, 84 nt, Homo sapiens
cgcacgcaccacgacggcgccacaccgagcgcgaggcgcggagagcaacgccgggacagcgcaagaccggcccaaacccacgag

SEQ ID NO: 109503 - RNA, 80 nt, Homo sapiens
accgcccggcgccccggcccgcccccaaagcgaccgacccggacgagaaacgcaagccccgcaaagggaacaggaagcag

SEQ ID NO: 109504 - RNA, 78 nt, Homo sapiens
gggaaagccccggcccggcggcgcgccccgcggcgcccgcgccagggccaaccgccccccagcagcaggcacgggcga

SEQ ID NO: 109505 - RNA, 74 nt, Homo sapiens
ccgagcagagagaaacagaacgcgaacagacagaggggcgaagaagggcagaagccaaaccgaccacagacaca

SEQ ID NO: 109506 - RNA, 74 nt, Homo sapiens
ggggcgccaacgccccagcccggccccgcgccgcaccagccgccagaggagcgcgaaccaccgcggcagaacgg

SEQ ID NO: 109507 - RNA, 74 nt, Homo sapiens
gcagaccgcagaaggccggagacaccagcagggaagacagacggagaaggaacccggccgggcggagcagcggg

SEQ ID NO: 109508 - RNA, 77 nt, Homo sapiens
ggccccaggcccgacggccggccggcgggagaccagggccagcccggccacaccccaggcggcacccgccgaagacc

SEQ ID NO: 109509 - RNA, 82 nt, Homo sapiens
ggaaacagcagagccaccagccaagaccaagcgcgaaagcgccaaaaggacagcagggaacaagcaccccgagcagcacgga

SEQ ID NO: 109510 - RNA, 85 nt, Homo sapiens
ggagaggaacgcgcagccagccgggaagcccagccccaggagagcagcagaggcggccaacaccgccagccccacacagcacagc

SEQ ID NO: 109511 - RNA, 83 nt, Homo sapiens
aagggcgaccaccacaacgccgcggacgaccgcacgggcagagaggacgagacgcagggcacgggccaccaggggaacaggac

SEQ ID NO: 109512 - RNA, 75 nt, Homo sapiens
ggagggggacacccgggcggggcagagcagcccccagccagccgcgaggcagaagaagacgaagagaaaagaacc

SEQ ID NO: 109513 - RNA, 127 nt, Homo sapiens
agagggagaagagggggaagaaaggagagggccggggaaggaggggaggaagaaaacgccggaaaacacagaccgggccgaacagaggacagggcaggccgaaggagaaagggaaggaggggagccc

SEQ ID NO: 109514 - RNA, 76 nt, Homo sapiens
ccgccagcagaggcggagcccgcagaccgcagaaggccggagacaccagcagaaaaaaggacaccagccaggcgcg

SEQ ID NO: 109515 - RNA, 83 nt, Homo sapiens
gcaaaaccggccccggagagacaagaccggaggacgcccagagcggagaaggccggcgccagaacagaccggccccccaaaca

SEQ ID NO: 109516 - RNA, 89 nt, Homo sapiens
aaacggagccagcggcgaggaggggccccagcagcccccgaaggcccacaggacaggagagaaagacggcgccaggaacggaggggcag

SEQ ID NO: 109517 - RNA, 71 nt, Homo sapiens
ccaggagcccggacgcgggagagccaacaccgggcagcagaccgcacacaaaccaaagagacaaggacaca

SEQ ID NO: 109518 - RNA, 77 nt, Homo sapiens
aagacaaacaaaaaccaacgaagcagcgacagagaaacagacaggggcaagcgggagcgccaagcacagagacgagc

SEQ ID NO: 109519 - RNA, 56 nt, Homo sapiens
gggaaagcacaaagcaagagacagcgaggacagaaggaagaaggagcacaacaggc

SEQ ID NO: 109520 - RNA, 74 nt, Homo sapiens
gagagacgacaacccaagagagcaagaggagagaaaagcaggggaaagcgcgagcgagcacccggagcagcaga

SEQ ID NO: 109521 - RNA, 74 nt, Homo sapiens
caaaacagacccgggcagcaccagaacacaaaagggaagcccaggggcggagacccgccggccagaggcggccc

SEQ ID NO: 109522 - RNA, 78 nt, Homo sapiens
cacccagcacaccccgcgaaaggaggaggcacagaaccagccgacagcgaccaaggccagagcgaaaggccacggcca

SEQ ID NO: 109523 - RNA, 76 nt, Homo sapiens
ggcacagggaagaaggcagacacaacaagcacgcggacgccagagcacggagacgaaaggagaacccagcacccag

SEQ ID NO: 109524 - RNA, 77 nt, Homo sapiens
ggcgggcccccgcggcccgggcgagcccggagaagaggaagacccagacacgaagcgagaggcgagaagaagcagga

SEQ ID NO: 109525 - RNA, 44 nt, Homo sapiens
cccgcccggcagccaccccacgggaaagaacagcccaccaccac

SEQ ID NO: 109526 - RNA, 78 nt, Homo sapiens
gcggccgggacggaggacgcgcagggcacccacagaggcaacgaaagcacaaaagaaagggccacccccacagcacga

SEQ ID NO: 109527 - RNA, 71 nt, Homo sapiens
gacagccgggacccgcaagaaaccacagagacaaagcgccagccaaggacacacagcaacgaagcagggga

SEQ ID NO: 109528 - RNA, 80 nt, Homo sapiens
ggacggccggcgggggcggcggcggccagcgccaggccgaagcacacgccaacgccgggggagaacgcgccgcacacgca

SEQ ID NO: 109529 - RNA, 45 nt, Homo sapiens
agcagcgcgagcgacaacgggacgggaaacgaagcagcaaaagac

SEQ ID NO: 109530 - RNA, 82 nt, Homo sapiens
aggaaggagaagagacaaggcacccacagaaggccacagaaggaagagaaggagacacacaagggaaagaggaagaacccgg

SEQ ID NO: 109531 - RNA, 75 nt, Homo sapiens
agcccagccagccgccaagaacgcagcagcagccgccaagacggggagcccggacgacccaaccaaagaccagac

SEQ ID NO: 109532 - RNA, 83 nt, Homo sapiens
ccacgggccaaccaggcgcccagggcagacaaaggcaaacaaggacccgaaagccgcccgacacacggccaaaacggaggaga

SEQ ID NO: 109533 - RNA, 59 nt, Homo sapiens
aggccccagaggagaaggagcaagggcgcggcaggaaacaaaagaaggccagagagaaa

SEQ ID NO: 109534 - RNA, 55 nt, Homo sapiens
ccgaaggccgcggaaagggagggcccccaggcgagccacgccaccgggcacggag

SEQ ID NO: 109535 - RNA, 57 nt, Homo sapiens
cggagggcagggggcagggcggcagaggacggaagcacgggaaaccagcaaccccga

SEQ ID NO: 109536 - RNA, 64 nt, Homo sapiens
gggcagggagcagaacagcaggaagggccccaggaacaggaaaaacgaagagccgaagaacacc

SEQ ID NO: 109537 - RNA, 74 nt, Homo sapiens
gcccccaacgacaaaagggggcagcccgagacgaggcaaaaccaaacccacagaggaggcccgcggacccggcc

SEQ ID NO: 109538 - RNA, 97 nt, Homo sapiens
ccagaccccacgaggccccgggcagcgggccggccacggcgggagagcggcaagacagacccgagaaaccggacagcagaggaaacgagggacaaca

SEQ ID NO: 109539 - RNA, 76 nt, Homo sapiens
cgccgcccccccggcccccgggacggcccaaggccagcccgcagcacacgacagacaacaacaggcaggaccccag

SEQ ID NO: 109540 - RNA, 60 nt, Homo sapiens
ccggccccggcccacaggggggggcaaacccgagagaacggggccaaaggaaccgcgcca

SEQ ID NO: 109541 - RNA, 65 nt, Homo sapiens
cacacccccccccccgacaggcaagaagcagagcgcagaggaggaaaggcaagggcagaaaagag

SEQ ID NO: 109542 - RNA, 76 nt, Homo sapiens
aagaaagcgacaaggaacaagagagcgggccggcagaacccgggccccaggcagaagccgaggaaaaccgagggca

SEQ ID NO: 109543 - RNA, 76 nt, Homo sapiens
gaaggagccaagaaagagaaggagcagaacggggagcaaaacaacaaccagccaaacagaacaaaggaagaggaac

SEQ ID NO: 109544 - RNA, 84 nt, Homo sapiens
gccacccacaaacagagagaaggaaccacccacgcaggcagcccgcaggccagcggagagaagcgcccagcccacagcgcgaag

SEQ ID NO: 109545 - RNA, 93 nt, Homo sapiens
aagaccgacccgagagcccacccccaacgcgacggaaaggcacgaaagccagccagaagaggaccacagcaaaaaaaaagacgagcaaggggg

SEQ ID NO: 109546 - RNA, 78 nt, Homo sapiens
accgggcgccgacgagacgggcacccgggaacagaaaggagagggagcacagccaccgccagaccgggcaccaaacga

SEQ ID NO: 109547 - RNA, 74 nt, Homo sapiens
cgcgccacaaacaggcgggaagaaacggggagccgccacccaccggaagacgccgcgaagagcaaggagcaggc

SEQ ID NO: 109548 - RNA, 114 nt, Homo sapiens
cgggggagaaccaagaccgaaaacagaaggaaagaaggaacggagaaggcaaagaagcaacagccagacgccgcacgccagcccagcccaccacccccccccgccagcagggca

SEQ ID NO: 109549 - RNA, 77 nt, Homo sapiens
gcccagccccgagggagccggggcgccgggcccgggccgggcaggacgacaggcagcgcgggagcaccggaagagcc

SEQ ID NO: 109550 - RNA, 74 nt, Homo sapiens
aagagcgcagacggccagccgaaaccacgacagaaacccgaccgcccaggggcgaaagaaacacacgggaaaag

SEQ ID NO: 109551 - RNA, 73 nt, Homo sapiens
ccaggcccggcggcgacaccacgggaggcagaccacgagaagccagagcccaaaaggcagagcgaggagagaa

SEQ ID NO: 109552 - RNA, 70 nt, Homo sapiens
aaggcaagcgacggcccgaacgagcggaggccaacaaagagcccgcaaccccgcaggcggccgggggcac

SEQ ID NO: 109553 - RNA, 77 nt, Homo sapiens
cagggacccacagaacagaccagacacccaccggaacacaaccacgcccggcgagggggaagaccggcagggcccag

SEQ ID NO: 109554 - RNA, 61 nt, Homo sapiens
aaggaaggcacaacaggccaggagggggccacaccgaacccagccgggaggccaaggccag

SEQ ID NO: 109555 - RNA, 77 nt, Homo sapiens
agcagaaccagggcgaaacccaaagaaccgcaaggcgcccagaccgacgccggcagccccgcgacccgacccaccca

SEQ ID NO: 109556 - RNA, 68 nt, Homo sapiens
acagaaaaagaggaacccgcgacccgggcacccagagcagggaggggggcaaccgacccagccaaacc

SEQ ID NO: 109557 - RNA, 54 nt, Homo sapiens
gaggcacgaccccacccccgaggcccgaccggggagaaaaacaggaaaagaaag

SEQ ID NO: 109558 - RNA, 59 nt, Homo sapiens
caggagagacccggaaggccaaaggcgcgcaaggaggaagcaagggcccgcccacggcc

SEQ ID NO: 109559 - RNA, 85 nt, Homo sapiens
acgaccaaccggcagacagggagcggcacagacaacgggcgaagaggggccagaccgcaaaccaagagacacacggaagaaagag

SEQ ID NO: 109560 - RNA, 77 nt, Homo sapiens
gagcggccgcggccaggcgacgccacccaagacacaaacggcgacacaggcggagcaggagcaaaggagcaagaaac

SEQ ID NO: 109561 - RNA, 71 nt, Homo sapiens
gcaaagccagaaacagcaagcaagaaggaaaggaacaagccaaccacaggggcagcaaccccaccgcggcc

SEQ ID NO: 109562 - RNA, 77 nt, Homo sapiens
agggagagccagggggagaaggacggacccccaggcgccacccgacagcgaagggccaagggccaacaacccagaag

SEQ ID NO: 109563 - RNA, 69 nt, Homo sapiens
ccgagcaacgaagcagccgagacgaggagaaaacccagaaaaaagggcagaaagcccgggaacgagagc

SEQ ID NO: 109564 - RNA, 62 nt, Homo sapiens
aacagcaaccgagggagcgaagcaacaaggcggcgagccagaggccaacgcagaggaacgga

SEQ ID NO: 109565 - RNA, 64 nt, Homo sapiens
gcagcgcgccgcggcgcgggagggccaggagcaagagagacccacgcggccaggcgcacacaag

SEQ ID NO: 109566 - RNA, 56 nt, Homo sapiens
cggcacccaaggacaggagcgcgaaagagacaacgagcaagcagaaacacgacaaa

SEQ ID NO: 109567 - RNA, 72 nt, Homo sapiens
ggagacaccgccaccgccagacgacgcaccaaacccccacggacagccccagaacaacacccccagcacccc

SEQ ID NO: 109568 - RNA, 80 nt, Homo sapiens
ccgcccacgcccaccacccgcgcgcacgggcccgcggcagcgaaaggcccagcagcccagacccacgagaaacgcaccgc

SEQ ID NO: 109569 - RNA, 80 nt, Homo sapiens
aaacaccccaacggggaggccgaaacagaaaccacccgccacccgcccagcaaagaacagggcacgcacacacaacacgg

SEQ ID NO: 109570 - RNA, 77 nt, Homo sapiens
aagaaacccacgaaccaaaagggacggacaaaggaacaggaccagagagaaggccaagagaagcagggacagacagc

SEQ ID NO: 109571 - RNA, 76 nt, Homo sapiens
cgagggaagcggaaccaaccgggaaagcccggggcaggagcaaagaccaggggacgaaggccgcagacgaagggga

SEQ ID NO: 109572 - RNA, 72 nt, Homo sapiens
gcccccagcaacgccgccacacccggagaccccaagccaagcagcagaagccaaagcaggcaggggagaacg

SEQ ID NO: 109573 - RNA, 76 nt, Homo sapiens
gaaggaaagcgaaggggaaggcgccgaagaggacgaaggcccaggggaaagagaaagcggagagcgccccacggca

SEQ ID NO: 109574 - RNA, 74 nt, Homo sapiens
aaaccgcgaagacgagacaaaacgaaaggccccccaccccacagaaaaaagcacggaggggagaagggggagaa

SEQ ID NO: 109575 - RNA, 45 nt, Homo sapiens
gccgcgacgcccggcccgcagggcagcacgaagaaagcagacgag

SEQ ID NO: 109576 - RNA, 65 nt, Homo sapiens
cgacgcaccgcaggcagacaaaagggccaaagaagggagagagggcgggcagcagcggcgcacaa

SEQ ID NO: 109577 - RNA, 79 nt, Homo sapiens
gggggaggggccgggcccaggagcccagccccgccggcagcccaagggcaaggagagaagaagagcccccaagcaccac

SEQ ID NO: 109578 - RNA, 78 nt, Homo sapiens
ccgcaggccacccgggaacggaggaggggcccgagagagaaagggaaagaaggagcggagcagaacaaggacccccag

SEQ ID NO: 109579 - RNA, 80 nt, Homo sapiens
gacgagagaaacccacgaagacgcgcggagaaagagaccaccgagaggaacaaccgcaccagaccaacagccaccgagga

SEQ ID NO: 109580 - RNA, 84 nt, Homo sapiens
gggcccacgacacaaacggaacgccgcgcgaggacgcgggagagagaagccggagggacaggaaagcacagagaaacaagcgag

SEQ ID NO: 109581 - RNA, 80 nt, Homo sapiens
ccgcacgagcaacagacgagcgcgccaggccgacagccgcggccgggcccgagacacgcacagaacccaaagcccaagag

SEQ ID NO: 109582 - RNA, 79 nt, Homo sapiens
aaccaacgaaggaagaacgacagccgcaccaggagggccaaagaagacagcaaaacaaccaaccgaagaagaggaggag

SEQ ID NO: 109583 - RNA, 59 nt, Homo sapiens
cccccaagcgcgccaaccagcggggggaagacaccaagcccaggaccgacagcagagga

SEQ ID NO: 109584 - RNA, 50 nt, Homo sapiens
gaaccgcacaagggaaaacagggaggccagccacggcgccgaaaaaccag

SEQ ID NO: 109585 - RNA, 68 nt, Homo sapiens
cgacaggccgggaggcaacacaacaccaagcaccaggccaaagccggaaggagccccacacccgaaga

SEQ ID NO: 109586 - RNA, 55 nt, Homo sapiens
gcggagccccgggcagcgcgaccgcagcgcaagccccggggcagagacacaggac

SEQ ID NO: 109587 - RNA, 76 nt, Homo sapiens
ccgcccagccccaaagagcgagacacagaccaccggggaaccggcccggaagcagccaccccagagcaaccccccg

SEQ ID NO: 109588 - RNA, 83 nt, Homo sapiens
ccgcgcgcgaggagaggagcgcaacagcagcaccagggaaacaaacagaagcgcacgagaacccaggccgcaaggaacgaaac

SEQ ID NO: 109589 - RNA, 64 nt, Homo sapiens
gcacgcacgccagacaccaaggggagcgaacgcggcgcggaaagacaaaaccggaaaagaggag

SEQ ID NO: 109590 - RNA, 73 nt, Homo sapiens
gaggggccgcgagggacagagaaagaagacagggggaacacaccgaaacagaggaacagcagggcagaggaca

SEQ ID NO: 109591 - RNA, 33 nt, Homo sapiens
gcaacagaagagagaagcaacccccagccacaa

SEQ ID NO: 109592 - RNA, 82 nt, Homo sapiens
gggggcgagggcgaagacgagaccagccgcgaacgcagcggcaagagcgggcaggcgggaaagagccgaaacagaaggaaac

SEQ ID NO: 109593 - RNA, 80 nt, Homo sapiens
aaggacaccaaggacccaagccgacaccacaacaaagaagaccacacacgggaaacacaaaacgaggagcgacgaggacg

SEQ ID NO: 109594 - RNA, 78 nt, Homo sapiens
ccgcccaacccagggacggaaagagagccgcagcgcagaacaagggaaaaaagggcaaaaagggcaaaaaagacaggg

SEQ ID NO: 109595 - RNA, 73 nt, Homo sapiens
gacagaaacaagaggcaacccacacaacggacaacaagcagggcacgagacgcaccgggagaggcgggaagaa

SEQ ID NO: 109596 - RNA, 67 nt, Homo sapiens
ccgcgcagcgagaagagaagcggcacgccccgaaccaccagccaaaagaccaagggacagggaaaaa

SEQ ID NO: 109597 - RNA, 79 nt, Homo sapiens
cagaagcagccacgccgcgcaggcccaggggcacaggccaggccaaggacaccggggaagcagggcacacgagaacgaa

SEQ ID NO: 109598 - RNA, 81 nt, Homo sapiens
ggaacaggcggacggccacgcagccaggacgcggaacggaggaagacccccaagagcagagcccacaaaagaagagaggaa

SEQ ID NO: 109599 - RNA, 63 nt, Homo sapiens
aacgaacagacgcacaccacggacagggaggaaaaccagagagaaggagagccccgaagaagc

SEQ ID NO: 109600 - RNA, 60 nt, Homo sapiens
acaccaccaaggaacgggcgcagcgagaggccccagcacccagcccccacaacacccgcc

SEQ ID NO: 109601 - RNA, 82 nt, Homo sapiens
acagacccgagcggaacggaagcgccagaaagggcggagaagaagggggcggacaggggggaagagacgaaggagcaagggc

SEQ ID NO: 109602 - RNA, 57 nt, Homo sapiens
ccccaagagcgagacacagagaggagccagccacacggaaagaagaaaagaaaagag

SEQ ID NO: 109603 - RNA, 55 nt, Homo sapiens
gcagaacccagccagcaggcaaaagaagcggaagcagaagaggcgccaaggaggc

SEQ ID NO: 109604 - RNA, 66 nt, Homo sapiens
gcgaaagaccccggagaacacaaggggcaaccagaacgcgagccggcgcgcacgccaaggaaccgc

SEQ ID NO: 109605 - RNA, 53 nt, Homo sapiens
gcggggcggaacaagaggacggcaaaccagcgggcggagacacaagcgcccag

SEQ ID NO: 109606 - RNA, 78 nt, Homo sapiens
cccggcccagccacggaggggcggcgcgcgcccagccccgacaagggaccgggcgggccccgcaggaaacccccaccg

SEQ ID NO: 109607 - RNA, 117 nt, Homo sapiens
caaacgcagaagcacaacggcgaaaaggaacgggacaccaagcgcggacccgaaggcagggccgcggccggcaagaagacagcgacagagaacgagaccgcggcggccgaaacccgg

SEQ ID NO: 109608 - RNA, 69 nt, Homo sapiens
acaaaaggagcagcgcaggagacagggcccgggcacaaaaaccgacgagccaggaagcgacccggaacc

SEQ ID NO: 109609 - RNA, 65 nt, Homo sapiens
aggggccagcaacacccacccgaagagacaacaacaaacaaacgcgacggcgggcacacaagaag

SEQ ID NO: 109610 - RNA, 75 nt, Homo sapiens
cgggaccccagcaaggaaggacagcgagaaagccaagcaaccgacaaaggaaacacagggggaagccagacagcc

SEQ ID NO: 109611 - RNA, 61 nt, Homo sapiens
acagccaccagcaccagaagaacacagacacgacagccagcagcaagagaagagcgacgcg

SEQ ID NO: 109612 - RNA, 77 nt, Homo sapiens
aaccccgagcgacccacggagaaccgcgaggagacaaaacgggagacaaggggaccgcggcacaaagacgccaccga

SEQ ID NO: 109613 - RNA, 76 nt, Homo sapiens
agaggcgccgccgcccgaggccgggcgagggaagagcaaagcaccgggaggaaagagagccacacgaagaacacgg

SEQ ID NO: 109614 - RNA, 63 nt, Homo sapiens
ccagcgcgaacccaggagcgcaaagagaaagaacaagaacacgcagcacgacagggaaaaacc

SEQ ID NO: 109615 - RNA, 70 nt, Homo sapiens
gaaaggcacacacaccagcaggcacacagagaaaaaaagggaacaaaacacagcaagcagacaaaagggg

SEQ ID NO: 109616 - RNA, 88 nt, Homo sapiens
ggagaggagggccgacccccccgccggggagggcccagcgcaccgacagggggccacggacggggccgagcacaaccacccaccggac

SEQ ID NO: 109617 - RNA, 72 nt, Homo sapiens
aggcgcagggagaaagccacaagaaaggaggaagagagaagacagcagcgaacaagaaggggcagcccaccg

SEQ ID NO: 109618 - RNA, 86 nt, Homo sapiens
ccggagggcggggcccgcgccggaggaggaggaccaggcccgcgggccagcccgccgccagcgggccgcagagaggcaagcaaccc

SEQ ID NO: 109619 - RNA, 71 nt, Homo sapiens
agcaaaagaagagaaagaaaaaaacccaccacagaaccaggggacggaaagagagccgcagcgcagaacaa

SEQ ID NO: 109620 - RNA, 49 nt, Homo sapiens
agcgcaacaaccgggcaaccacaacaggcgggcgcggacggcaggggcg

SEQ ID NO: 109621 - RNA, 58 nt, Homo sapiens
gggcagggccgagaggacgccagcggcgcgcaggagggaagcggacacacaggacgag

SEQ ID NO: 109622 - RNA, 61 nt, Homo sapiens
ggagacccggggacccccgacgccaggcagcgcccccaaacgagacggacgcacgcgacaa

SEQ ID NO: 109623 - RNA, 78 nt, Homo sapiens
gggacgcgggccggggcgcgcgggcggcgcgggccacaccagaggagccggaaggcgccgagcgagggggcaagccca

SEQ ID NO: 109624 - RNA, 103 nt, Homo sapiens
acaaagacagccagaggggacaaaaggagacgaaaacaccggaacaaaaggacggcaacaagagcagcacccagagggagcaggagaagaacagccgagcgga

SEQ ID NO: 109625 - RNA, 76 nt, Homo sapiens
acagcacacccaaccacgcccgccccccagcaccacagaccggcccaaaaagagagaggaagccaccacgcaacca

SEQ ID NO: 109626 - RNA, 66 nt, Homo sapiens
cagagccaaccacccaaaaaggcgacggcgccgaaacggaacccgcaccaagaggagcaccggccc

SEQ ID NO: 109627 - RNA, 77 nt, Homo sapiens
aagaaggaacccccacggcgaagccagcggacgggcagggcccagacccagcgggaggaagaagaggccgccagcag

SEQ ID NO: 109628 - RNA, 75 nt, Homo sapiens
gaagaggcgcccaggagcacagcggcacggccagcggcccagcgaagaagaaccagagaggcgaaaccgccaaga

SEQ ID NO: 109629 - RNA, 99 nt, Homo sapiens
gggaaagcccaaaaacacgagcaggcgcgagacgggggaacggacccccaggaaccccgcccagcgccgcaacacacgacccccccggccccgggaagg

SEQ ID NO: 109630 - RNA, 69 nt, Homo sapiens
gaggcgggggaccggagaaaccgcaagagggaagggaaacaggcaaggcagaccaagaggcaaaaacca

SEQ ID NO: 109631 - RNA, 87 nt, Homo sapiens
agccaggcccaagagccgaaccagcacggccagcaaccaccgggagcggccaagccggccacaccccccgacagcccggcagccccc

SEQ ID NO: 109632 - RNA, 68 nt, Homo sapiens
caccggccgacagccgcgacggcgagcccgggccgcgcccgagaacagagaagcacaccgacaaaagg

SEQ ID NO: 109633 - RNA, 67 nt, Homo sapiens
cacgcagagaaccgagaaagcaacggaaacgaagaaggcccagcccaccagaaggccgagcccacag

SEQ ID NO: 109634 - RNA, 88 nt, Homo sapiens
ggagcgaagagaggagccgaggagaaaacagcaggcacccaagcgggcggcaggagaaaccaaggcagacagagcaggaagaaacacc

SEQ ID NO: 109635 - RNA, 76 nt, Homo sapiens
caagaggcggccaaggggacgagcaaaggaagcgcgaacagcagcgcaggcgccgcgaggccgcggccaggccgag

SEQ ID NO: 109636 - RNA, 81 nt, Homo sapiens
cagggccggcccccccaggacaacccagaggcaacaaaggcgagccagagacgcgcacgaaacgacgaagaggcccgagga

SEQ ID NO: 109637 - RNA, 79 nt, Homo sapiens
gggacagagagcccggacaggaagggcaggcccgaagcagcagccgcccaaaacacaaaccaaagaagaaacccgaagg

SEQ ID NO: 109638 - RNA, 77 nt, Homo sapiens
ggacccggcgcgcagcccgaagcacgcgagggaagagcaaacccaccaacccggcaagggccgggcacaggaacacc

SEQ ID NO: 109639 - RNA, 72 nt, Homo sapiens
cgaagggagaccaagggagcaaggaacaccgacaaaccgaccgaccaggagccacagggaagcgcgagaacc

SEQ ID NO: 109640 - RNA, 74 nt, Homo sapiens
ccgggccggcgcaggcggcgcggagagggggcgcgagcgggggggagagaccacaacacaggaccgccagacag

SEQ ID NO: 109641 - RNA, 78 nt, Homo sapiens
agcagacaaccacgaggggaagggacggcacgaccaccccacgggcggacaggacggagaccggaaaccgagagaaac

SEQ ID NO: 109642 - RNA, 68 nt, Homo sapiens
gaagcggcccacaaacgacgagccacagacaaggaaaaacgggaaagagcgcagagggaccaaccgaa

SEQ ID NO: 109643 - RNA, 83 nt, Homo sapiens
ggacgcagcacagggaccccaaggggcaggaccgacaccaccaaccaaggacgaacacgcagaaccccccccagaaagcacaa

SEQ ID NO: 109644 - RNA, 76 nt, Homo sapiens
gaagaagggaaggcgcgaggaggaaaggaggacgaggacagcagaccacagcccggcaggcccaaaaacccaaagg

SEQ ID NO: 109645 - RNA, 73 nt, Homo sapiens
ggggggagggagcaggcccggggagggggaccgcgaggagcgcagccgcaagggcgcgaccagccacagaagc

SEQ ID NO: 109646 - RNA, 74 nt, Homo sapiens
gggccgcaacgacgcagcacgcagcacggggaacgaggacagggaagaagccaaaacagaaggggcaagagaac

SEQ ID NO: 109647 - RNA, 75 nt, Homo sapiens
cggaccccacgcggggggggccaagagacagggcacaccaaacccacgggaaacacaaagaagacaccagaaggg

SEQ ID NO: 109648 - RNA, 35 nt, Homo sapiens
cacaacacggcaaggaacggccgcagagaaaaccg

SEQ ID NO: 109649 - RNA, 73 nt, Homo sapiens
ccggaggagcccggcagagcgcggagagagcgaagcaccgcgcagaccgaaaggcacacggagcgaaacccaa

SEQ ID NO: 109650 - RNA, 70 nt, Homo sapiens
cacacggggagacacagcggaagagaggaaggagacagagagagcaaagaaaccagaggagccaccggcc

SEQ ID NO: 109651 - RNA, 80 nt, Homo sapiens
gacgccgagcacccaggcgacgcccaccaaggcgagaagaaagccaaggcagcaggaagaagcgggaagaaaaccagggg

SEQ ID NO: 109652 - RNA, 82 nt, Homo sapiens
ggggccggccgcccacgccagccacagaccagcacacggaagacaggagaacgagacgacgagcgcgcaggagcgaggagaa

SEQ ID NO: 109653 - RNA, 74 nt, Homo sapiens
gaaacggaccaggaccaggaagaacagaggaggacgaaagacgccagagagcacaagaagaaacaagccgacaa

SEQ ID NO: 109654 - RNA, 71 nt, Homo sapiens
cggaccagagacacgccaagcagccagcccaggagagggcacccacagaaggagaacaagcagagcaccgg

SEQ ID NO: 109655 - RNA, 74 nt, Homo sapiens
caggagcggaagccgccgggaaacggaggaaaaaaagaggcgggaggcgcggcaaaacggggacaacagagccg

SEQ ID NO: 109656 - RNA, 47 nt, Homo sapiens
acgggccaagcccacaaagcaccaagaggagggcacagcgcagggac

SEQ ID NO: 109657 - RNA, 79 nt, Homo sapiens
gcggcggggagccccgccgagggcccaaacacacagaccgaaaaagcgagcccacccccacaccaacccccggaagaga

SEQ ID NO: 109658 - RNA, 97 nt, Homo sapiens
ccaagccgacagcggaagaacaaaagaaaaggacagaccgaaagcaaaggcgcagaggaaaggccaaacgaccaagaaagcgggacgcggaaaacgg

SEQ ID NO: 109659 - RNA, 76 nt, Homo sapiens
cgacaacccgggggagccaggaccagccaaggaagcaacacagcagcgagagaagcagaaaaagcagaagaaaaaa

SEQ ID NO: 109660 - RNA, 72 nt, Homo sapiens
cgcccgccacggcaggggccggaaaaagggaaagaacaaaacacacagcgaagcccagaagaaggacccaac

SEQ ID NO: 109661 - RNA, 72 nt, Homo sapiens
gacacgagaaagaggccaaaaaaaaacgaacagacgagcgaagagacccagaacagagagcagaggagcaag

SEQ ID NO: 109662 - RNA, 71 nt, Homo sapiens
cacccccccagcggccgcagggccgacaagcggaccaagccagacccaagcaacccccagccacaacgcga

SEQ ID NO: 109663 - RNA, 82 nt, Homo sapiens
gggaccaacgcaccagagccgagaaacgcgaaaaggaagcggaaggaagggaaaacagaacggcacaggcaaggaccacaaa

SEQ ID NO: 109664 - RNA, 68 nt, Homo sapiens
acaagacaggcacaagaacccggaagaaagaaaacagaagcggcgcaagaaagcgaagagccacgaaa

SEQ ID NO: 109665 - RNA, 75 nt, Homo sapiens
acgaccggcgaggcccgcccgcccgggcagccggggcacgcggacgggccaaggggcaggccggaaggaccaggc

SEQ ID NO: 109666 - RNA, 59 nt, Homo sapiens
ggcccgggaggaccgacgcagccagagcggggcccggcgcacccaccaccgccgcccac

SEQ ID NO: 109667 - RNA, 98 nt, Homo sapiens
cgcggccggagccgcgaagcgagagggcgggcgcggcggcggccacgcaggaaacggccgggggacgaaagaagagaaggagcaggaaaagcagacaa

SEQ ID NO: 109668 - RNA, 70 nt, Homo sapiens
aagcgggaaacggagccaccaacaagcgggagaaagacagcaagggccgcggacacgcgggcccgccgag

SEQ ID NO: 109669 - RNA, 66 nt, Homo sapiens
gccccccccggcgggcgccaggcagcagacaccagagacaccaccccagcaagacaccaggaaaac

SEQ ID NO: 109670 - RNA, 70 nt, Homo sapiens
ccgaaccacaagagccccccaaacgaaacagggggacagcagaaggaacacagacaaccagggacacacc

SEQ ID NO: 109671 - RNA, 56 nt, Homo sapiens
gagggaacacaccaccaggacagcacccaacagacagcagaccacagcccggcagg

SEQ ID NO: 109672 - RNA, 85 nt, Homo sapiens
gggaagacccagaaggacacacacagcaaggggcgagcaccaaagccaaggaagcccagaagaaagagcaccccccggaagcagc

SEQ ID NO: 109673 - RNA, 79 nt, Homo sapiens
ggacagagcccgggcgcgcagggaacccagcaacacacagcaaaaaagccggcgagggggaacccgcccggagagagag

SEQ ID NO: 109674 - RNA, 73 nt, Homo sapiens
aggaaagaaaccacaccaagaagggacacacccgacagcaaggcaggcgaccaaaaggaaagacgggaagaga

SEQ ID NO: 109675 - RNA, 62 nt, Homo sapiens
acgagggggcgcgaggaggaagaccggaagacagacgcgaaacaaacaaacggcggacaaaa

SEQ ID NO: 109676 - RNA, 86 nt, Homo sapiens
agcgccaggccagccgaagaaggcgagcaggggcgggagagccccgcagaagacgccgacgagcaaagcagacaaaggagagacag

SEQ ID NO: 109677 - RNA, 65 nt, Homo sapiens
cagcgccaccgccgaccgaagccgcaaaaaaaagcgcccaggaagcggaaaaacaaaagagccgc

SEQ ID NO: 109678 - RNA, 70 nt, Homo sapiens
agagagacggaagacgacgaagccagccaaaagagaaacgcaaccaaaccccgcgaggcaagacaagacc

SEQ ID NO: 109679 - RNA, 72 nt, Homo sapiens
gggggaaccggcgcgccggcgcgcggcgcggacaggcccaaacggaaaccacaagaacggggaaccggggag

SEQ ID NO: 109680 - RNA, 74 nt, Homo sapiens
agacccgccggagaagaacaaaccaccaccccacgcagcgcagcgccgcagagacaggcgcccccacaccagcg

SEQ ID NO: 109681 - RNA, 68 nt, Homo sapiens
gacgcggcacacaaaagacaaccccagggaaggggcagcacagcagagggagcagggcaacgaagcag

SEQ ID NO: 109682 - RNA, 81 nt, Homo sapiens
agaagaagaaacgggccgcgaaccgcagacagcggccaagaagacacaaaggacggaggcacgacggcaaacagaagggcg

SEQ ID NO: 109683 - RNA, 64 nt, Homo sapiens
ggggaggccgggaggagccccgcggagggaacggcgggacagaccaggcacacacgaccaggcc

SEQ ID NO: 109684 - RNA, 66 nt, Homo sapiens
ggcacgacggcacaaggggacaaagggcaacaaacgcgcagccgaagcgagcgaacaaccaagaaa

SEQ ID NO: 109685 - RNA, 77 nt, Homo sapiens
gcggccaagggaagcgcgagcgcgacgagaaagcggagcggagcggaggcagacacacacggggggagagggagggg

SEQ ID NO: 109686 - RNA, 79 nt, Homo sapiens
cagaccaagccaaagcaccgcaacagaaacaggccagagcggaggccaggccagaccaagcagaggcaagaaagcccgg

SEQ ID NO: 109687 - RNA, 61 nt, Homo sapiens
gaccaagaaccaggaaacaacgggaagacacggagaaaaacggccagagacaccaaaagaa

SEQ ID NO: 109688 - RNA, 77 nt, Homo sapiens
cgggcgagcaggggcgccggcccgaggccgcgcgcggcgcccgcggggggggcagcacagcggcaggcaccgcagga

SEQ ID NO: 109689 - RNA, 83 nt, Homo sapiens
agaggcaccgggacggaccgagaccggaccgagagcggaccgagagcgcgaaacgcacgagaaggaggggccacggggccggg

SEQ ID NO: 109690 - RNA, 84 nt, Homo sapiens
ggagcacagagaaagagaagagaagagaaaggcccggagaccggcagaggcccagagaaggacaggagcccagccggcagcgca

SEQ ID NO: 109691 - RNA, 72 nt, Homo sapiens
agacgcgaagagcacagggcacggacagagccacagacagacagggcaccacggaggaaagccccaccacaa

SEQ ID NO: 109692 - RNA, 86 nt, Homo sapiens
aggagcccgacacggccaaaggcccaaacaaaaagcaggggacaagcgcacccaagccaggcaagaaggagaaggaacgcggcgag

SEQ ID NO: 109693 - RNA, 60 nt, Homo sapiens
gcaagcgcgggccgcggaggaggccaggggacagcacacggaggacgggacacccaggag

SEQ ID NO: 109694 - RNA, 77 nt, Homo sapiens
gggagagccacggaagccgacagacaaccagggcaggagaaacccagcgggcccagagacgcagcgggaaaaccaag

SEQ ID NO: 109695 - RNA, 92 nt, Homo sapiens
ccgcaccccgcaggggaagccccaccgggccagccgacaccgggcccagaggagccacacaaccaccaccagccggcacgcgcccagacgaa

SEQ ID NO: 109696 - RNA, 53 nt, Homo sapiens
ccggcgggccccgccaccggaaggaacaaagaagaagcgaaggaccgaaaaaa

SEQ ID NO: 109697 - RNA, 78 nt, Homo sapiens
gccagccccgggcacgggcaggaacgggcgccggcgcacagcagaggagaaaagccaggaaagaaaagacaaccagcc

SEQ ID NO: 109698 - RNA, 78 nt, Homo sapiens
gaaggaaagcggcgacggcgcccaggagcgggggccccgcagaaggggggaccggcggggcgggaagcggagaaaacc

SEQ ID NO: 109699 - RNA, 82 nt, Homo sapiens
gagaaggagcgcccgccggcgggacccgccccgcccggagccccggcccccacagcgggggcacggaggagcccgcagcagc

SEQ ID NO: 109700 - RNA, 62 nt, Homo sapiens
aggaagagaggcagaaaccacgcccagggcggacgggccgaaagcagcaagaagagcgaggc

SEQ ID NO: 109701 - RNA, 77 nt, Homo sapiens
aagacgacgcaccgcaggcagacaaaagggccaaagaagggagagaggcccagcgcacccggacgaccggcgagccc

SEQ ID NO: 109702 - RNA, 76 nt, Homo sapiens
gaccggggcagaccaaacggcaaggacagagaaaccgaggcgcgaaacaggaaggccacagcagaagagaaggaga

SEQ ID NO: 109703 - RNA, 71 nt, Homo sapiens
cagcgaaccagcgggcgcgcaggcgcgaggcaccaaagcgaacgaagagcaccgggagcggcgaagaggca

SEQ ID NO: 109704 - RNA, 73 nt, Homo sapiens
agcgacaacccccagaagagaccaacgccaccaaccaaccgcagaaaagcacacgaggccgggcagcggcaga

SEQ ID NO: 109705 - RNA, 56 nt, Homo sapiens
gagacagagccaccggcccaggcgggcggaggaccacaacacgcgcccgcggggac

SEQ ID NO: 109706 - RNA, 82 nt, Homo sapiens
gaagcaggggcacgagcgggccgagggaacagcgacaagggacagagacgggacccccgcacacccaacagcccccacagac

SEQ ID NO: 109707 - RNA, 73 nt, Homo sapiens
agagggagagccaaagaaggcggaccggaagcgagcaggagcagagcggaagacccaccagaaagagcaaaca

SEQ ID NO: 109708 - RNA, 84 nt, Homo sapiens
ggcggaagaggaggcgcggcgggagaaaaagcagaaacccccagaacggaccagagccccagagggccgaaccaccggacccca

SEQ ID NO: 109709 - RNA, 81 nt, Homo sapiens
cccccccaaggccccagaaaggggagcgccgccgccgcagcgggaccgcgcgaccggcgcccgcccgcgaaccagcaggcg

SEQ ID NO: 109710 - RNA, 81 nt, Homo sapiens
acccaagagcagccaaaaacaccaagccggcaccaccaagaagcgaagaaaaagagaaaccgagaaaacccaaacacgggg

SEQ ID NO: 109711 - RNA, 80 nt, Homo sapiens
aagcagaggccgaccccccaggggccgggcgggacaggaccagccccaggaggaggagggggccaggggggagcagccac

SEQ ID NO: 109712 - RNA, 77 nt, Homo sapiens
cgagccccggagcaggcgacagcaaaacaagcacgacagggaagacccagaaaagaaacacaaaacaagcgggaaag

SEQ ID NO: 109713 - RNA, 63 nt, Homo sapiens
gacacccaaccgggcaggcgagacgcagaggaaacggcgaggaaagagaggagccccggaaag

SEQ ID NO: 109714 - RNA, 82 nt, Homo sapiens
ggaagggagccccgccgagcgcagacaacgccccgggaggggaaagaagcagagacgggcaaagcaaagaaggacagagcgc

SEQ ID NO: 109715 - RNA, 72 nt, Homo sapiens
caaaagaaacaagaaggagaacaaaagcaaagccccagacggacgggcagagagagagacacccaagcccac

SEQ ID NO: 109716 - RNA, 70 nt, Homo sapiens
aggcagagcgacccaggcacaggaaagaaaggcaaagcgagcaagagggagaccaaccaggcgggaaacg

SEQ ID NO: 109717 - RNA, 68 nt, Homo sapiens
ccaaggaccgcacaaccagggaagaaggagaaagggccaaccccgaagaagcaaacagaaacgaagga

SEQ ID NO: 109718 - RNA, 66 nt, Homo sapiens
cggcaacgggcgccaagccgcggagccccagacgggaggaccgcaggaagaaggcaagaagccaca

SEQ ID NO: 109719 - RNA, 85 nt, Homo sapiens
ccagaaagcggcacgaacagagccgggagcaagaagaacacccagagcgcaaagccgaaaaacagcagcagaggaaagaaaagac

SEQ ID NO: 109720 - RNA, 69 nt, Homo sapiens
gaaggaccaagaaccaggcagcaaccagggccccggaagaggaggggacaccccgggaaagaagaggag

SEQ ID NO: 109721 - RNA, 76 nt, Homo sapiens
gaaagacgaaggcgaacaggaacaaagagagagaaggggaagcaacgaagcagggaaggcggaaccaaggacgcga

SEQ ID NO: 109722 - RNA, 81 nt, Homo sapiens
ccgcggcagccgcggaccaccgccgccaggaccccagacccgcagagaccgcgcgcaaacgaaggaccgcgcccccaaggg

SEQ ID NO: 109723 - RNA, 51 nt, Homo sapiens
gaagcagagccgggcagaaaaaccggaacaggcgccacggcccaggcaagc

SEQ ID NO: 109724 - RNA, 77 nt, Homo sapiens
aaccggccacaaaaccagagcggagacacccaggaggcagaagccaaggcccaaaaagagaagaggaagccagagga

SEQ ID NO: 109725 - RNA, 89 nt, Homo sapiens
gagaaacggggcccgcgccgcgcgccggcggcaccagaagcagcggaggaagggggagcagaggacagggaagcaggaaaaagcccaga

SEQ ID NO: 109726 - RNA, 83 nt, Homo sapiens
acagagaccggaaaagcaccccccaaaaggcacgcaccggagaggccggccgacccgagaacagaccgaagaacggcaaagag

SEQ ID NO: 109727 - RNA, 73 nt, Homo sapiens
ccaggccccgccgaggcggccagcacccaggggcaggacacggggaacgcggaaagggacgagccgaaggaaa

SEQ ID NO: 109728 - RNA, 78 nt, Homo sapiens
aagacagcgaagagaaggaaggaagcgcaccacgggagccgccaccaaaagcagacggaaaacccacggggaagacca

SEQ ID NO: 109729 - RNA, 70 nt, Homo sapiens
accacacacacagggcgagagccggacgcccacaaaacggcacagggccccaggagggggagaagcgaag

SEQ ID NO: 109730 - RNA, 56 nt, Homo sapiens
agaccagagagccgcggggaaaggagacaccgggaagggcacgacaggaaaagacg

SEQ ID NO: 109731 - RNA, 84 nt, Homo sapiens
agcgcaaaagcaaagaccaggaaggcgccaaacgggcagggccaggaaacaagacgaagccgcccgaagaggaaaggaggagac

SEQ ID NO: 109732 - RNA, 78 nt, Homo sapiens
aagacagcccaaacgccccacgaccagagagaagaagaaggaggccgcggccagaaacccaagaaaaagcgaaggaac

SEQ ID NO: 109733 - RNA, 63 nt, Homo sapiens
ggagaccagaagagaaccgggaaggaaaggaagacgacacgagaggaaacaaaacgaccggga

SEQ ID NO: 109734 - RNA, 70 nt, Homo sapiens
ccaagccaggaccaggaccgggacaaggcacgaggcgcggcgaccaccacagcagagcccggcgaaggag

SEQ ID NO: 109735 - RNA, 79 nt, Homo sapiens
ccgccggcgcgcgagccacacaacccgcgccggccgcgggaaggagagggaagagggaggaagggaagcgagaaaacag

SEQ ID NO: 109736 - RNA, 84 nt, Homo sapiens
ggccagagggggaggagagagcaagcagggaaagagagcgccagggcagcaggacgaaaacaagcccggagagcacgggaaacc

SEQ ID NO: 109737 - RNA, 78 nt, Homo sapiens
ggaagacgggccgggcgcaggacaaggacggcaaggaaaaagaaggacaagaacggaacgcggagccgcccggggacc

SEQ ID NO: 109738 - RNA, 61 nt, Homo sapiens
gaaaaaggagagaaaacgagcagggcaacaccggaggaccaacggagcgaagagccccggg

SEQ ID NO: 109739 - RNA, 69 nt, Homo sapiens
acccaccggcacaagcggaccaggcaagagggaaagacaacaaggagaacagaagaacgaccaagaggc

SEQ ID NO: 109740 - RNA, 81 nt, Homo sapiens
cgaggagaggcagggcgcgagggcgggggcagcggcaggacaaaaacgcggaggggaccagagaccaaaaaaaaaacgcga

SEQ ID NO: 109741 - RNA, 79 nt, Homo sapiens
ggcgaacggccgggagaggggaagaggggacaaagccgcccacccccagcggcacaggaaccacgccaacggaagcagg

SEQ ID NO: 109742 - RNA, 63 nt, Homo sapiens
cgggacggacaggcagggaagcaacgcagaggggacccaagggagagagggaacggcgaaagg

SEQ ID NO: 109743 - RNA, 61 nt, Homo sapiens
gagcgacccaggaggagaaggagcacggaagcacgggaaagaacaagcacaagcccggcgg

SEQ ID NO: 109744 - RNA, 82 nt, Homo sapiens
cgcggcccgaggcaacggccacagacgaagcaaagcgagaggagaaggagcgagcgagcggccagcaacagccaccccgccc

SEQ ID NO: 109745 - RNA, 52 nt, Homo sapiens
cgaaaccgagggaagaggcagggagccgcggaccggccccccgccaccgacg

SEQ ID NO: 109746 - RNA, 79 nt, Homo sapiens
acggacagcggggacgaggcggacgacgaccggccaacaaggggacccaagggagagagggaacggcgaaagggcagcc

SEQ ID NO: 109747 - RNA, 73 nt, Homo sapiens
ggaccgccacaaccacacccgagggcggccaccaagagcggagcacacagaagccgcgcagacacaccacggc

SEQ ID NO: 109748 - RNA, 96 nt, Homo sapiens
gaagacccaagcccacgggaggcacggagggggcgaggcaggaggaagagggaacggaagagccgaccaccgcgcggaaaacaaccaccaggaaag

SEQ ID NO: 109749 - RNA, 80 nt, Homo sapiens
ggagcagcgcaccgccaggagggacacggcccccgcgacaggacacaagacggaccccaaggggaacaggaggagcagcg

SEQ ID NO: 109750 - RNA, 77 nt, Homo sapiens
gcggacgggggccggaggggaggggaagagcacagccaagaagagcgaaagacaggccaggagggacgaaagagaac

SEQ ID NO: 109751 - RNA, 75 nt, Homo sapiens
ggcgaggcgccgcggaccagaggcgccgggagcgggaaacgcacaacagagaacagaaaagacccgcagacaacg

SEQ ID NO: 109752 - RNA, 69 nt, Homo sapiens
ccaccgccgggggcgggaaaaagagccgggaccagcaaaccaagcggaagagaacagcgaccaccacga

SEQ ID NO: 109753 - RNA, 80 nt, Homo sapiens
acgcacccaaaccaggacccaaaaaaggcaccgcgcaagaccccagcgaacacgaagagaaaagagacaaaagcagcaga

SEQ ID NO: 109754 - RNA, 74 nt, Homo sapiens
gggacccgcagggcaaaggggggaagaacaaggaggcaagacgcgaagccaggcccaagacaccagcgagcccg

SEQ ID NO: 109755 - RNA, 80 nt, Homo sapiens
gacagcccgcagagagaaccgacaggaaccagacacgcaaacagacacagccggagaggagagagggaagaagcaaaacg

SEQ ID NO: 109756 - RNA, 57 nt, Homo sapiens
cgagagaaggacccacggcgcgcgaagcccacacggaacaagcaccgaacaagcgaa

SEQ ID NO: 109757 - RNA, 93 nt, Homo sapiens
ccgacacgggggcagccgcgagccccgcaccccgagagcggagaagcccacccaagcgggacacgaaagcacggcccggaggaaaaccaccgg

SEQ ID NO: 109758 - RNA, 88 nt, Homo sapiens
acggcccgaggcccgagggccggggaggcaccgcggggccgccccacaggaaccccacccagaccgggaaacaggggagaggcccagc

SEQ ID NO: 109759 - RNA, 74 nt, Homo sapiens
cggagaaccagagaagccggggggaacacccaggcaggccgaagccggcagcaaggcgcggcgaggcggggcca

SEQ ID NO: 109760 - RNA, 71 nt, Homo sapiens
aggcaccaaaggccaccggaggccccaaagaacccgcgagacacaaccacagaccagaacagagaagaaag

SEQ ID NO: 109761 - RNA, 76 nt, Homo sapiens
cgaaccgggagaggaaccggcccagagcacagaaggccgggcagaaagggaagaaagaaggggacaaagcgaacca

SEQ ID NO: 109762 - RNA, 70 nt, Homo sapiens
ggcaagaagggcgcgcgacaggggcaggcggcacaggagagagcaccggacaagagcagagaaagagacg

SEQ ID NO: 109763 - RNA, 71 nt, Homo sapiens
ccccaaagacggaaacaggggaaccacggcccagcccaagagagacccgccccgcgcacgagccggaacgc

SEQ ID NO: 109764 - RNA, 61 nt, Homo sapiens
gggaaggacaggcagagcaaacaagggccagcggagcgaagccacagaacaaaaacgaccg

SEQ ID NO: 109765 - RNA, 42 nt, Homo sapiens
cccgcgccgaggaaccggcggacagcacgcggaggagccggg

SEQ ID NO: 109766 - RNA, 87 nt, Homo sapiens
cagcgcacgaaacggagcaacacacagccgcacgaagacacagccgccagcccaaacagcagcggcagggcagcgccagcccgggcg

SEQ ID NO: 109767 - RNA, 33 nt, Homo sapiens
gaagaccaaaagcgggaccccgagccacgacca

SEQ ID NO: 109768 - RNA, 75 nt, Homo sapiens
ccacgggcccacagaggaacggacacaacgagagcagcgaagcaccacgaaaggagagcaaaggcagacaagacc

SEQ ID NO: 109769 - RNA, 72 nt, Homo sapiens
gcaggagacagaggacagagcgcgacagagggagagcacccgccacaggccacaaaggaggcaggcccggga

SEQ ID NO: 109770 - RNA, 57 nt, Homo sapiens
gacacaaggaaagcgaagcgggaaacaaaggacccacgcaaagccagcgacccaaag

SEQ ID NO: 109771 - RNA, 80 nt, Homo sapiens
cgaggaacagacaggaggggaggcaccggcagcggacccgcccagcaaagaacagcgaacgacaagaggagaggaagaag

SEQ ID NO: 109772 - RNA, 81 nt, Homo sapiens
gggaaccggcgcgccggcgcgcggcgcggacaggcccaaacggacacgaggaggggacggcccgccacaggcacagacgag

SEQ ID NO: 109773 - RNA, 90 nt, Homo sapiens
cgggcacagggaagcgccggaaaaaccaaaggcaggcaggggcagaaggcgacccagcgcagagcaaacagaaccacccagacagaggga

SEQ ID NO: 109774 - RNA, 65 nt, Homo sapiens
cagcgcggccgggagcgcgggccccgacaacggcaagcggagaagagcaaggccgaaccgagagg

SEQ ID NO: 109775 - RNA, 62 nt, Homo sapiens
cccaaggaagaagggcacgcaggaagggaccaagaaaggcccagggaccaaagcccggacaa

SEQ ID NO: 109776 - RNA, 56 nt, Homo sapiens
gcgaggcgcgggacagaacgaaaacaaacggaagagagggcagcaagaaagaacaa

SEQ ID NO: 109777 - RNA, 76 nt, Homo sapiens
aaggagagcgccaaaccaacgagagggaggaacagcaccgagcccacagaaccaaagcagccaagggaggaggagg

SEQ ID NO: 109778 - RNA, 82 nt, Homo sapiens
ggggacccgacacccccccccaccgaaccgcggaccgccaaacacccaaggaccagcgggggcacgaggggggcggcgcggg

SEQ ID NO: 109779 - RNA, 61 nt, Homo sapiens
ccgcaccccaggaggacccccagaggacacgaagcaaagaagagaaaggaggagccaagaa

SEQ ID NO: 109780 - RNA, 79 nt, Homo sapiens
ggaaacaccaaaaccaacaaggcggacccccgcccggccaacgcaacagggagcccacgcaagaggggccggggaccgc

SEQ ID NO: 109781 - RNA, 82 nt, Homo sapiens
gaaccagcaccgggacgcacagagaccggaagaccaagcaggagaaccgaccgaaggcaacggcagcaccagccacaaggcc

SEQ ID NO: 109782 - RNA, 75 nt, Homo sapiens
ggcggccggcgaaaggagcgggccggcaagggagaagagaagagggacccaagagaaacaccgaggagaaagacc

SEQ ID NO: 109783 - RNA, 89 nt, Homo sapiens
cgacagagacgaaaaaccgaggcgagacccaaagggaacgaagaaggacagaacggacaaggcagagcaaggaaaagacggccacccaa

SEQ ID NO: 109784 - RNA, 83 nt, Homo sapiens
cggacgccgcagagcgccgaggaggcccgcggggcaaccgccacgagacaccaaggaagaaagccgaaaaagaagcgaagcaa

SEQ ID NO: 109785 - RNA, 75 nt, Homo sapiens
ccacgggagcccccgccgcagcgcgccaccagcccggggcgcggcgacacggcggcccccacacacggccacaac

SEQ ID NO: 109786 - RNA, 76 nt, Homo sapiens
gccccgcgccagaagaaggcccaccgaggagaccaggccagagcaggggcggggcacacgggggaacaggaagcgg

SEQ ID NO: 109787 - RNA, 76 nt, Homo sapiens
aagaggaggaaaaagaggggccaggacgaacggagaaggaaggccgcaagcaagaggcagaccgacacaggagacg

SEQ ID NO: 109788 - RNA, 82 nt, Homo sapiens
ccgcccgccccgcgcgcggccggcggcccaggcgcacaccgcgggacccagacaggagcgcgggaagaagccggcccggggc

SEQ ID NO: 109789 - RNA, 68 nt, Homo sapiens
aaagaagaagaccagcagcgaaaacggaaacacaagagaccagaggccaccaacaccggaaagggcca

SEQ ID NO: 109790 - RNA, 104 nt, Homo sapiens
aagagaaagcaaaaagcaagaaagcagaggaaacaacccggcgaggagagcaagaaaaaagccgccccacaggggagaaaaagacagcacccaaagcagaaccg

SEQ ID NO: 109791 - RNA, 72 nt, Homo sapiens
aaacaccaacaggaacagaaaggaggagagaaagaacccacgcaggacgacagaagaggccggacaagagaa

SEQ ID NO: 109792 - RNA, 62 nt, Homo sapiens
ccggccccgcaccaggaggaggacgacagcacgacaagcagaccggaagaccgacggaagac

SEQ ID NO: 109793 - RNA, 78 nt, Homo sapiens
gccgggcccggggaccgaggcagaaggaacgagggagcacggagggaaaagaagccgccgacccccgccccagagagc

SEQ ID NO: 109794 - RNA, 85 nt, Homo sapiens
cagagccccgcgaaaagaagggacgcgcgcagaaccccgccgcaggacaaggggcgggcggccaaggcgagaaccacgccgacaa

SEQ ID NO: 109795 - RNA, 77 nt, Homo sapiens
cccagcggcccggcggaaccgggaaggggagccaggccgcccggcgggaaaaaccagaagagaaaaaacaaagggga

SEQ ID NO: 109796 - RNA, 99 nt, Homo sapiens
caccacgcgcgacaggccgggacaagcagacccgaccacagcggcaaccggccagcaaggggacagccaccaccgacccagaaccagccccaggcgggc

SEQ ID NO: 109797 - RNA, 98 nt, Homo sapiens
caagaaacccggaacgaggaaaacacggaggacaggcaggaggagagggacacgcaggagacagccagcaggggcagaagcagcagacggaacgaggg

SEQ ID NO: 109798 - RNA, 78 nt, Homo sapiens
cacgaaggaggcagaaggacagcccccaagccacccacacagaaagccagggccggagggagaacagagcggcccccc

SEQ ID NO: 109799 - RNA, 74 nt, Homo sapiens
gccccccaggccagccaagcacagaagccaaaagcggcgccgacaccggaacagcgcccggaacagaaagaaag

SEQ ID NO: 109800 - RNA, 74 nt, Homo sapiens
aggggaacacccccagagagaggggccggaggacgcggggaaccagaccgggccagaccccacgggacagaccc

SEQ ID NO: 109801 - RNA, 73 nt, Homo sapiens
aagacaacagacacacacgagggcgcagccgaaagcaaaaaacccagcaggaggggcaggaggaacacaacag

SEQ ID NO: 109802 - RNA, 48 nt, Homo sapiens
gcacacgggccaaagcccccggcaacaaggagaggagcgccgcaccag

SEQ ID NO: 109803 - RNA, 50 nt, Homo sapiens
cagagggcagccgggaaagccgcaaagcccgaaaccgggccgaagacgca

SEQ ID NO: 109804 - RNA, 54 nt, Homo sapiens
gcagcccaacgaaaaccgcgaacaagcagaaagcacgaacaacgagaacaagac

SEQ ID NO: 109805 - RNA, 57 nt, Homo sapiens
gcggagcccgcagaccgcagaaggccggagacaccagcagagacacggaagccggcc

SEQ ID NO: 109806 - RNA, 67 nt, Homo sapiens
cacggagcgaacgccgcagcagaaagccaagaaccagcggaccagaggagggccggcgcgacagcag

SEQ ID NO: 109807 - RNA, 82 nt, Homo sapiens
acggacccaggacccccgcgggcgacgcgagcccaggggaaaggaaaccaaaccaggaaagaaggacaaggagcgaggagaa

SEQ ID NO: 109808 - RNA, 77 nt, Homo sapiens
gggacagcaccgcagcagagcgaaagcacacgcggagggaggcacccgagcagagcacagaagaagcggcgggagac

SEQ ID NO: 109809 - RNA, 83 nt, Homo sapiens
agaagaggaagaggccggccaacacaaagccccagcccaacaggaccgccgggggaccggaaccgagccggggaaaaccccag

SEQ ID NO: 109810 - RNA, 76 nt, Homo sapiens
ccggggacgaggagaggaccaggaggaggaggcagaggaggaacgcacccagggaagcccgccacgggaagaagga

SEQ ID NO: 109811 - RNA, 72 nt, Homo sapiens
gggagacccaggcacaggcaagaaaaagcccacaaaacagggacaaggcaccgagcccagcagacccgagga

SEQ ID NO: 109812 - RNA, 75 nt, Homo sapiens
cgggaccacaacagccgcaccacacgggaacgacccgcgcggccccgagggccccaagaagcggaacgcagagcc

SEQ ID NO: 109813 - RNA, 81 nt, Homo sapiens
ccgcccacaggcagcagcacggcacagcacgccgaccagccggcgccaaaggcccccgaggagggaacaagccagaccagg

SEQ ID NO: 109814 - RNA, 67 nt, Homo sapiens
agaagaaacgaaccccaacaccgcgaagggagcagagaaacagagagaacacagggcacgggaggcc

SEQ ID NO: 109815 - RNA, 74 nt, Homo sapiens
ccgcaccagcagagccgaggggaaaaggcccgagggcaggacagcaggcaccggcgaagcacagagaggcgcga

SEQ ID NO: 109816 - RNA, 92 nt, Homo sapiens
gggggccgagacaacaagaaggggaggaacaaaagcgcaaaccggagccagaaacaaccgcaaccacccaacaaggaacaagggacaaacca

SEQ ID NO: 109817 - RNA, 76 nt, Homo sapiens
caagcaccaggaaaggcaaaagcagcacggccagagggcaggaacagagcaacaggaccaggaacccaaaggggca

SEQ ID NO: 109818 - RNA, 68 nt, Homo sapiens
gacccacaccagccaggccccaaaaggccagcgggaagaagcacagacagaccaggacacaggcacca

SEQ ID NO: 109819 - RNA, 79 nt, Homo sapiens
gcagaaggggacagaacagcagagccagagcccaagcccccgcagggagcccaccgcgaccaggaccaccgccaccgca

SEQ ID NO: 109820 - RNA, 83 nt, Homo sapiens
caaaggagagcacaaccacgcagggaagcccaggggcagagcgacaaggaaggcgccggaggagaagaccacgacggcccgga

SEQ ID NO: 109821 - RNA, 68 nt, Homo sapiens
aggaacagagcgagggaggagagagggagagccaaagaagaggaaacagagcagaaacgaaaggagaa

SEQ ID NO: 109822 - RNA, 78 nt, Homo sapiens
aagaagaccacacacgggaaacacaaaacgcacccggaaaggcagcggacagaaaggaagaacagaagaccgaaacaa

SEQ ID NO: 109823 - RNA, 81 nt, Homo sapiens
gcggggcggcaccggaggaggagaaccgagaacgaagcgcgcggcaggcgcgcgccgccccaggccgcaagacccagcgcc

SEQ ID NO: 109824 - RNA, 79 nt, Homo sapiens
acccccagcgcggcacaaacgaaggaggcccaaccacaaaaggagccgacggaacccagacggagaacaaaaggaagaa

SEQ ID NO: 109825 - RNA, 42 nt, Homo sapiens
aggaggcccagaagccaaaccggaagacgaaaaggggaaagg

SEQ ID NO: 109826 - RNA, 80 nt, Homo sapiens
ccgccgagcaccaacccagccggaagaccacaacaggaaacgagccaccccagaagaaacaggacgagaagaggcccccc

SEQ ID NO: 109827 - RNA, 71 nt, Homo sapiens
cgcagcacgaccagcaggaacggaaccgcggcgccaagggaaaaaaacaaacacacaaacacgaacggcac

SEQ ID NO: 109828 - RNA, 78 nt, Homo sapiens
cgagcccgacccaggacaggacccagcgcgggacagccagggggacaaggagaagaaaccgccgaccagaggggagca

SEQ ID NO: 109829 - RNA, 68 nt, Homo sapiens
ggagaaacgcccacaccaagaaaaacggggagacggacggaacgcggcgcgaccagaaaaccgagaaa

SEQ ID NO: 109830 - RNA, 78 nt, Homo sapiens
gagcgaccccggaggagccacgggaagcagagcaacgccaggagggagaagcaggccaggaggaagcccggggcggcg

SEQ ID NO: 109831 - RNA, 85 nt, Homo sapiens
cacgcccagcccggaccgcgaggcccgcagccgggacaagggaagaggaagaacgcgagaaaaaaacgagcgacagagaaggccg

SEQ ID NO: 109832 - RNA, 75 nt, Homo sapiens
cgccagccaggaggaccggcaggaccgacgagcccgggaggggcaagaaaggaccccgcaaaagaacaagaagcc

SEQ ID NO: 109833 - RNA, 57 nt, Homo sapiens
aaagaggaagccaagcgacgggcggagccaagagaagaggccaccgcgaccgcggag

SEQ ID NO: 109834 - RNA, 107 nt, Homo sapiens
ggaaagaggccggagagaagagacagagacaggggccaaacccacagggaccaagaaaggcccagggaccaaagcccggacaaggcccgagcaccaggaccgcagaa

SEQ ID NO: 109835 - RNA, 77 nt, Homo sapiens
gggcccccccgcgggccccggcagcgcggaggcccccggaagacagccacccaccaggaacaaagggaaagccggga

SEQ ID NO: 109836 - RNA, 80 nt, Homo sapiens
acccagacccggagcccagggaagcagccgaccagccgcggagccgggggcagacccaacagaggaagccgcaagaaacg

SEQ ID NO: 109837 - RNA, 69 nt, Homo sapiens
cccgcgcccgccgcgggagagaggacccccccccccccccaaggggcccgggcagagggaaagcagagg

SEQ ID NO: 109838 - RNA, 76 nt, Homo sapiens
cccccgcgggcaccgaggacccgcccgcccaggaacgaagggccacccaagcgggcccagaccgcaggacggcgac

SEQ ID NO: 109839 - RNA, 58 nt, Homo sapiens
caaccccaagaacaggcgaccccaaaaggcaagcagaagaggaacagaagaagcagag

SEQ ID NO: 109840 - RNA, 60 nt, Homo sapiens
acacggaaaaagagcgacaggcggacaccgaccgcaggaaggaggaggaggagggagcca

SEQ ID NO: 109841 - RNA, 74 nt, Homo sapiens
gcgacgccccagcccgcccaaagaaagaaggaggcgaagccaggaaaaaacaggggaagcgacagagggacacg

SEQ ID NO: 109842 - RNA, 87 nt, Homo sapiens
aaaaccggaaaaagaagccaagaagcaaaaaagggacgcaagaagaaccaccagagagggcacagacccaggccagcagaacgggcc

SEQ ID NO: 109843 - RNA, 46 nt, Homo sapiens
gaggaaacgggccccaaggcgaccggggggagaggcaccagcaaca

SEQ ID NO: 109844 - RNA, 75 nt, Homo sapiens
caaagaggagccagaccagaccaccaggcaagcaccgacgaagcagaggagacaagaggcaaaggcggcgggccc

SEQ ID NO: 109845 - RNA, 72 nt, Homo sapiens
cgcgcgaaaccaacccagaggggccaaaagcgccaaagcgacaggagcgaccccaaaagcaccccagacgcg

SEQ ID NO: 109846 - RNA, 62 nt, Homo sapiens
ccagaaccgaggggcccccaggaccaacccgagggcggagaagagaaacgagggcacacgca

SEQ ID NO: 109847 - RNA, 65 nt, Homo sapiens
agcccgcgcgaccgccccccggccagggcaggccacgcacgcgcagcacacaccaccgagaccag

SEQ ID NO: 109848 - RNA, 124 nt, Homo sapiens
gcgggagcagcaccggagcggagcgcagcagcgccgccggcgcggccgcggagcccccgagagaggagcgggaaggccccgcacccggagaccgggggaagacaagcacaagagaggaggccga

SEQ ID NO: 109849 - RNA, 79 nt, Homo sapiens
gggcgaagaagcagcacaaggcgagccagggcaccggagcagagcgccaccagacagaggagcccggaggaggcaggag

SEQ ID NO: 109850 - RNA, 65 nt, Homo sapiens
ggggggagacgggaccagcaagccgagaaagggaggcggaacaggcccgccacggacagccgacg

SEQ ID NO: 109851 - RNA, 70 nt, Homo sapiens
ggagagagcgacaacaaaaagcggagagccgcccagaggaacaacagaacccccagcaacggcacaacga

SEQ ID NO: 109852 - RNA, 75 nt, Homo sapiens
aggcaaccacagagagagagagggaggggcagccagaagagaaggccaagcagggcccgaaaagccccccgacgg

SEQ ID NO: 109853 - RNA, 124 nt, Homo sapiens
cccgccccccccagagaggaggagggggccgagacggaccgggcgccgacccagagggcgggacgaccccacaacccgagcgcccaagccccccgcgcagagggagaaggcacccgggccgggg

SEQ ID NO: 109854 - RNA, 82 nt, Homo sapiens
ggccacaccacgcagaacgcaacaccaaggcacaccaccccaggaaaaaaggccgacaacgagggagaagcacaagacagca

SEQ ID NO: 109855 - RNA, 70 nt, Homo sapiens
gaaccccgcacacgaggaagaacacaaggaacacaacaggaaacgaacgagaaagcgagaagaacaaaaa

SEQ ID NO: 109856 - RNA, 79 nt, Homo sapiens
aaggcaacgacaagagaaagaaaaacaagaacgaggaacacgaacaggaacccgcaggcccaagaacggacaaagggga

SEQ ID NO: 109857 - RNA, 71 nt, Homo sapiens
ccaggcggaggaggcgggcaccaaagcggccggccaccagcccaaaaaaaccgagaacagggggggcaaaa

SEQ ID NO: 109858 - RNA, 103 nt, Homo sapiens
aaacaaaaagcagagaaaccgacgggaggcagaaaagaccacgaacagaaagagagagaaaaggaacagccgaagccaggggcaagcgaaaccacagaagaaa

SEQ ID NO: 109859 - RNA, 74 nt, Homo sapiens
aagcccggaggaacgcgagggagcgcgggaaggagcccccgcaaggggccggcacgggaaaacacccacaagac

SEQ ID NO: 109860 - RNA, 41 nt, Homo sapiens
ggcaggagaggcagcaggacgaggagagaagaggaaagacc

SEQ ID NO: 109861 - RNA, 76 nt, Homo sapiens
gagcaaaaaccggaaagccaccccagcagacaggccaaggcccgggcaagccaacacggccacaaggggcggacag

SEQ ID NO: 109862 - RNA, 75 nt, Homo sapiens
gacaacccgcagccacgcgaacgaagcgcgcggcaggcgcgcgccgccccaggccgcaagacccagcgcccaacc

SEQ ID NO: 109863 - RNA, 48 nt, Homo sapiens
cacgaggaagagcaacacacgcagaacaggcagggcccaaaagaaaaa

SEQ ID NO: 109864 - RNA, 80 nt, Homo sapiens
gacccgagccgcaagcagcgcggccaagccacgccaacggcaaaagcagaccggaaaacccaccggcaagaccacacccg

SEQ ID NO: 109865 - RNA, 61 nt, Homo sapiens
gcagcggcaggccagggcagccgcgcgacgagagaacagcccccaggagaggcaggcgcaa

SEQ ID NO: 109866 - RNA, 38 nt, Homo sapiens
gagagccgaccaagcgcaagcaagagaaaggacagaga

SEQ ID NO: 109867 - RNA, 62 nt, Homo sapiens
accagccagccaagaagccaagaaccacaccagggcgaaggaggaagaacagaaaccccaga

SEQ ID NO: 109868 - RNA, 70 nt, Homo sapiens
caggaccagacccacagaagcccacacgggcacaggggccccgccagcaagggccgacagaacagaaagg

SEQ ID NO: 109869 - RNA, 75 nt, Homo sapiens
cgcagcggggcagccgccgcccccccagaccgccaggagggagccaggagcgcgggagcgaaggccagccacacg

SEQ ID NO: 109870 - RNA, 75 nt, Homo sapiens
gaagcaagaaaacagcccaggcgccacacaccgagagcagcaccgggaaggaaaacagggcgcagaaccccagga

SEQ ID NO: 109871 - RNA, 77 nt, Homo sapiens
ccggccgaagccggagaaaagacccggccgaggccaccaggcaggcaaccagcgggaccagaggagaccggagccac

SEQ ID NO: 109872 - RNA, 65 nt, Homo sapiens
gagacagaacaggaaaaaggagcagagcgccaaaagagcaaaccacaccgggacaaggaaggaca

SEQ ID NO: 109873 - RNA, 84 nt, Homo sapiens
aggcgagggggcggggcggccggcaccagcgaggcaggcgaaccgggcaccgagagcaagaaaagagacaaggccacaggccca

SEQ ID NO: 109874 - RNA, 74 nt, Homo sapiens
gcccagacagcggaaacccaccgccggcccacaccacggggcacggaccagcacccccgcccccaggacccccg

SEQ ID NO: 109875 - RNA, 84 nt, Homo sapiens
caggagaacccagcgacgacagaagcagccgaagggagaaggacggcagaaaacgagacgccggcggcgaaaaaaggggacaag

SEQ ID NO: 109876 - RNA, 33 nt, Homo sapiens
ccacgaggcaacgccccagccgaggccaccaag

SEQ ID NO: 109877 - RNA, 57 nt, Homo sapiens
aaaagcaacaacgccaccgagacgaccgcccggaccggggcgggcggccccacgggg

SEQ ID NO: 109878 - RNA, 76 nt, Homo sapiens
gagcccgcggaaccgcagccaggagagccaggcacaaaaaggggaagacaaaagcagacccaaccaaggaaaggca

SEQ ID NO: 109879 - RNA, 80 nt, Homo sapiens
gcggcgccgaggagcccaccggagcagccgagcccaaccgccagccgccggaacgcagccacgccggccacagacgccgc

SEQ ID NO: 109880 - RNA, 80 nt, Homo sapiens
aggcgggaaaccggcccagcggcggagcagaaacgggagaaaggaaagaagaaggcaacaagcaaggaagacgaccagag

SEQ ID NO: 109881 - RNA, 77 nt, Homo sapiens
cgagcccgcccacggcgggcagcagcccggacgaaacaaggagagaaccacagggggggagagagagacccagagga

SEQ ID NO: 109882 - RNA, 83 nt, Homo sapiens
aggggcgagaacgccacgcgggccggcgaaagcgcagcacaaggaaaacgagagaaacgaaggcgagagaaacagcaaggccc

SEQ ID NO: 109883 - RNA, 77 nt, Homo sapiens
cgccccggggcgcggagccgcgcgcgcgggcgccccccgggacagcccgaagccgagcaggacgaaaggggcaaacc

SEQ ID NO: 109884 - RNA, 70 nt, Homo sapiens
gaccaaggagggaacaggggccgcccaaggacgacgcagggccaaccaaggaagaccagagcgacaacgg

SEQ ID NO: 109885 - RNA, 85 nt, Homo sapiens
aaggacaagaagcgaagcaagacacccaagcgaaagcacaaacacagccagcggaagcggacacaggaaaacgagaagaggcagg

SEQ ID NO: 109886 - RNA, 76 nt, Homo sapiens
cgcccgccagcccaacaggcccaacagaaagcccacaaacagagaaagaaaaaagggaagacccgacagggaacag

SEQ ID NO: 109887 - RNA, 80 nt, Homo sapiens
gaaaaaagacaccagcgacaaggacaggaggagccgaggaaggcgccaccacgaccgccgaaccggaaggcaacccgccc

SEQ ID NO: 109888 - RNA, 85 nt, Homo sapiens
gaaaggggccgggggacggaggagccccggcggagaccacgcaaggccacaggacccaaggccagccagccccaggcaccagcgg

SEQ ID NO: 109889 - RNA, 76 nt, Homo sapiens
aaagcacggcccacacgggccgagacagaaggaggggacaaccagccaagccggccagaaggaggacaggaaaaag

SEQ ID NO: 109890 - RNA, 69 nt, Homo sapiens
ggagaagacaaaacgaccagaacacaacggaaagaacaccaaaagggccaagggcccagggagggaggg

SEQ ID NO: 109891 - RNA, 91 nt, Homo sapiens
ccccgccggagggggaacacggagcacaggcgaggggcacaggacagaagacgaggaaggaagcaagaaaagagacaaaaaacccggcacg

SEQ ID NO: 109892 - RNA, 62 nt, Homo sapiens
acagcagggcaaagcaacagccaaaaaacagcgcgggggcgcggagggccccccaagcccac

SEQ ID NO: 109893 - RNA, 81 nt, Homo sapiens
cgacacgagacaaccgggagccggccccccgggaagacacaaacgcaccaccagaaagccaagcggaaaaggaaacccaac

SEQ ID NO: 109894 - RNA, 77 nt, Homo sapiens
ccagagacacgacaaaagacagacaaaacaacgagggcagaaccagagaggggagaggcccgcaaaccagccacagg

SEQ ID NO: 109895 - RNA, 74 nt, Homo sapiens
ggacaaacgccagagaggcaccgggccgaaccagaggggcagagaaaacgccagaaggacagagcaccaaagcg

SEQ ID NO: 109896 - RNA, 79 nt, Homo sapiens
ggcaggcggacgaggggaagcgacagcggccgcaggagggaagcgcacggaaaccgccccgggaggcacagagcaggag

SEQ ID NO: 109897 - RNA, 38 nt, Homo sapiens
ccccaccccacccacacacggaaaccgccccgagaaaa

SEQ ID NO: 109898 - RNA, 93 nt, Homo sapiens
gccgccgccgccgcccagagacgcgagcccgccgccgccgccaccacccacccggacacaggcgcagacggggaagcggagccaacagccagg

SEQ ID NO: 109899 - RNA, 91 nt, Homo sapiens
gggccgcaaggccggagaaggccgccgggcccgggcaggggcggggcaacgcggaagggagcccacaggaccacccccaccaggacagagg

SEQ ID NO: 109900 - RNA, 83 nt, Homo sapiens
cccgcggggcggcggcgacggcggcccggcagggaggaccggccgcgacgccacccgccgcccaacggacggagcacaaccgg

SEQ ID NO: 109901 - RNA, 82 nt, Homo sapiens
aacagccgccccagccccgccccagccgcccgcaccacccccagccccacaccaaggcccagcgcccccccagacccgacac

SEQ ID NO: 109902 - RNA, 76 nt, Homo sapiens
gagcgcaaggcgaaagggaaaagccaacaaggaccgggaaggcgcgacggaggcgcgcgacggagagcgacccgcc

SEQ ID NO: 109903 - RNA, 81 nt, Homo sapiens
ccggagaaggaacagaccccggaggagaagacgaccccgacgcaggccaggagccgcggacagaagccgagcacggccgag

SEQ ID NO: 109904 - RNA, 56 nt, Homo sapiens
ggccgagagccaggggaaaggccagcgcagaaacgcagggggcccccaaagggaag

SEQ ID NO: 109905 - RNA, 75 nt, Homo sapiens
agcccagcgaagccacaaccgggaccgggccggccaccgcgaacggccggggggcgagcgaccgaaagacagaaa

SEQ ID NO: 109906 - RNA, 77 nt, Homo sapiens
cacacgaggccacccagcccaccaaacacgccggaaaccccgcccacagcacgagaagagcgacgagagccacaagg

SEQ ID NO: 109907 - RNA, 82 nt, Homo sapiens
ggcggggagaccgccccggacgggaggaccgcggacgacggccgcagaacacgagaggcgagggacgacagagcaagcggca

SEQ ID NO: 109908 - RNA, 68 nt, Homo sapiens
cggagacaggaccgcggcgagcaaggagcgagaacccgagcagcgccagagcaacacaccgcgcccca

SEQ ID NO: 109909 - RNA, 80 nt, Homo sapiens
agaagacacgaccgagccacacccgcgcgggccaacgggggagacaaccggagcagggaccaggccccagggcaggggcc

SEQ ID NO: 109910 - RNA, 60 nt, Homo sapiens
cgggccagcgacccgcgccagcgcccagggggggaaaccaccggggcgcggagcccgcag

SEQ ID NO: 109911 - RNA, 82 nt, Homo sapiens
ccaaacgcccgaaagaagcggacggagggcggcacccaccccccgagcccgcccgccggccccagcccccaccagcagcccc

SEQ ID NO: 109912 - RNA, 77 nt, Homo sapiens
ggagcagggcgccaaccccaaggaggcacgaaacacacaccgggccccaacacgccagaacacccagccacccacca

SEQ ID NO: 109913 - RNA, 80 nt, Homo sapiens
cacccaggaggggagaaccaaagaaaaccgagaaaacgggacaaagagccagcccgagcagcacccggcccaagcagagc

SEQ ID NO: 109914 - RNA, 60 nt, Homo sapiens
cccgccgccccgcaaccggcagccgccgccgggaagccagagcaagacccacgaagggca

SEQ ID NO: 109915 - RNA, 81 nt, Homo sapiens
ggaccgcaggggcgcgcgaaggagcggaagaaggcaggccaaaccaccgaccagagggacggaaacagacgacgacacgga

SEQ ID NO: 109916 - RNA, 64 nt, Homo sapiens
ccgcagcacggggaaacgaccgccccaaaacgcgggagggacaggagaacaggcacgaccccac

SEQ ID NO: 109917 - RNA, 73 nt, Homo sapiens
cggcgagacaggaagcagagggcagggggcaaacaagccgaccggaaaaagggcaaccgcccgccagcccccc

SEQ ID NO: 109918 - RNA, 78 nt, Homo sapiens
gcgcagagggggcggcgaccgagaggcgcggagccggggacgcgaaaaccagagacccagacacgcgaaggaacgaaa

SEQ ID NO: 109919 - RNA, 82 nt, Homo sapiens
gcgccccaccaagagccgcgcgcccagccgcggacgagaacccccgcgaaccagaggaacccagcgagcgagagcggaccag

SEQ ID NO: 109920 - RNA, 76 nt, Homo sapiens
cgacgggacaagagaacagccgcgcggcgagcggcccgcacaaggccggcagggcgaaaagccaggagcaaaagac

SEQ ID NO: 109921 - RNA, 90 nt, Homo sapiens
cggagcacggaggacggggccgggcgaccgggcaccagcaggacccgaggccaggagccaggggcccagaaggcaaaccagccaccagac

SEQ ID NO: 109922 - RNA, 79 nt, Homo sapiens
acgcgcaacgggaagagaaagcgaagccagaccagcgcaccacccccgccaacgagccaggacaaaaccaggcagaacc

SEQ ID NO: 109923 - RNA, 53 nt, Homo sapiens
ccacacccaggccgaagaacggcacaggcccgggggaacgcaggagcagccag

SEQ ID NO: 109924 - RNA, 66 nt, Homo sapiens
caacaaggcgagccggaccgggcagcgggccacaccaggcccccacagaccgccccggccggaccc

SEQ ID NO: 109925 - RNA, 76 nt, Homo sapiens
gacacgaaggaggaagaagagacgaagagacagcggagaaccacagcaagcgcaaaaagcacggagcaaaaccagc

SEQ ID NO: 109926 - RNA, 76 nt, Homo sapiens
gaagacaggccacccagcggggagcacggcgagcagccaggccaggagagagaaaccaggcggggaacaagccagc

SEQ ID NO: 109927 - RNA, 77 nt, Homo sapiens
cagcccagaggcgaagccggaagaagaggcaaacgacagacaaaagagggaagaaagacccggggaggagacacagg

SEQ ID NO: 109928 - RNA, 76 nt, Homo sapiens
gaccagaagagaaagagagaagccaaaccccagagagccgcaacaggccagcccgacagaaccaaaggggaggggg

SEQ ID NO: 109929 - RNA, 60 nt, Homo sapiens
ggagcggcacgccagcccgcgacgagccagaagcgaccgcgcgaacaaacccgacccagg

SEQ ID NO: 109930 - RNA, 73 nt, Homo sapiens
gaggccccgcagcgacgacggacagcaaggaaccccgaacaacaagccaccccccgccagcgcagcagagacg

SEQ ID NO: 109931 - RNA, 60 nt, Homo sapiens
gaaaaacgaccggcccaccagacggccagaacaacgcaagacggacaacacgaagaagca

SEQ ID NO: 109932 - RNA, 74 nt, Homo sapiens
ggaaggaaaagcgagcgagcccaggccgcgcgccaaaacgaggcaaggcaggagccaaggcgagcgcaacagca

SEQ ID NO: 109933 - RNA, 74 nt, Homo sapiens
gacagacacaaccgacccgccaagcgcacacaaaagaggagaaaaccgggcgcagccgaaagcgaacgcgaaaa

SEQ ID NO: 109934 - RNA, 86 nt, Homo sapiens
aagagccgcagcccgagcccagaaggcggcgaccgggcgcgggcaaggcgggaacccagaaccgcggaccacagcaaaccaagcag

SEQ ID NO: 109935 - RNA, 83 nt, Homo sapiens
aggggaccccacggagccccagcgcccacgcaccccaccggcgcgcgcggcggcccgcgcacagcgaccaggaagaaacacca

SEQ ID NO: 109936 - RNA, 63 nt, Homo sapiens
cccgcagaagcccaacccggaggcggaggacaggacaggagacaaggggcccggaagagaacc

SEQ ID NO: 109937 - RNA, 80 nt, Homo sapiens
gccgcagcgcgaggccgggccgggggagaccgcagagccgaagcgacagaaccccaaggccacaaccacacaccaaggaa

SEQ ID NO: 109938 - RNA, 82 nt, Homo sapiens
gagcaccggcagacgaggcccaggagaagccaagggaccacaaagcaaagagcgcccaagggaggaaaacgggagccaagga

SEQ ID NO: 109939 - RNA, 76 nt, Homo sapiens
gcccaccccagagcaccggcaggacgcaccaaagaagacagacacgcagaaaaggagccggaccccagggcccaga

SEQ ID NO: 109940 - RNA, 77 nt, Homo sapiens
ggagaggacggagcggcgagcccccgcggcgacagaaacaacgaagcaagcccaagggcgcaggggcaacacaaagg

SEQ ID NO: 109941 - RNA, 74 nt, Homo sapiens
gagcccccacaacggggagaacagcccaaaaaagacaagcaggcagaacaagaagaggaccacaaaagacaaca

SEQ ID NO: 109942 - RNA, 78 nt, Homo sapiens
aggcccgcgaacacacgccgccaccgggaggcccagggaaggcagaggcagaaaagcagagacagacacaagaggccc

SEQ ID NO: 109943 - RNA, 59 nt, Homo sapiens
gccaaagccagacgagcagccagggacccgggagaggaagcagaggggaaaagcaggga

SEQ ID NO: 109944 - RNA, 80 nt, Homo sapiens
aaaagcgagcgacgagcgagcgcgcgcgcgaaaacccgggcaggaaaaacgaggcaaagaggaacgggaaaacagcggca

SEQ ID NO: 109945 - RNA, 83 nt, Homo sapiens
cacggagaaccagaccggcgacccgcgacgccgagcacccaggcgacgcccaccaaggagaaagagcccggaaaagcaagaag

SEQ ID NO: 109946 - RNA, 84 nt, Homo sapiens
agcaaagaggcgcccagaaagcagaacaggccaccgggccaacgaaaacagcgcgcgaagaaacacacggaggacacagcagcg

SEQ ID NO: 109947 - RNA, 82 nt, Homo sapiens
cgagaacgaagaggccgccgccgggcccaggcccgcgaccgccgccagcgcccgaggagaacgaaccgggcagcaaagacac

SEQ ID NO: 109948 - RNA, 88 nt, Homo sapiens
gggagcccgcgcccgccgcgggagagaggacccccccccccccccaagggcacacaggccccgagaaccaagagaacccccaccaacc

SEQ ID NO: 109949 - RNA, 48 nt, Homo sapiens
agaaagaggagcagagacgccggacagaaagccggaagcagaaaccag

SEQ ID NO: 109950 - RNA, 54 nt, Homo sapiens
gcaccccacccgggccgcccgaaggccaaagcaacccccaggacaaacgagggg

SEQ ID NO: 109951 - RNA, 39 nt, Homo sapiens
cccaggaccgcaacagaaaggcaggaggggaggagcccc

SEQ ID NO: 109952 - RNA, 57 nt, Homo sapiens
gcgaggaggaaaggcaccccaccagggcgcacgacggcccaggggaagcagggcgga

SEQ ID NO: 109953 - RNA, 57 nt, Homo sapiens
gacgggccagacggagccaaggaaggcgccacacaaggaaaagaaggaggccagcgg

SEQ ID NO: 109954 - RNA, 80 nt, Homo sapiens
cagaagagaccaacacagagcagcggaaccagacaggcaggaaaagacaggagacaccaggggagaagcgacgggccggc

SEQ ID NO: 109955 - RNA, 73 nt, Homo sapiens
ggaagggccacccaggacaggggcacccagggcggagcgcgaggcaagaacgccagggcgaagggagccggaa

SEQ ID NO: 109956 - RNA, 74 nt, Homo sapiens
aggaaggggagaacaccgaagcccccacaagggaagaaccacagacggacggacaaagccaagcaaaccagagg

SEQ ID NO: 109957 - RNA, 72 nt, Homo sapiens
agccagagcggaggagaaggacggaggaagaccagcacaggacgcccgaaaccggggcaacgcggaggaagg

SEQ ID NO: 109958 - RNA, 86 nt, Homo sapiens
cggggcccgggagagggggaggcgcggcggccgcagcgccacaaaccagagagcagcaacagagaaagaccagaccgacaccaccc

SEQ ID NO: 109959 - RNA, 79 nt, Homo sapiens
gaagagaaaaggaggaagcagaaaccagaaacaaacgagaaaagaagagcacagaaggagcaagcaagcagcagacgga

SEQ ID NO: 109960 - RNA, 69 nt, Homo sapiens
ggcgacaaacggcgcaaagccaggaagggagcagcggaggaagccacaggacgccggggaccgacaggc

SEQ ID NO: 109961 - RNA, 69 nt, Homo sapiens
ggcgagaaccaggagccgaggcgccaaacaagggaaccgacccagagaggaaagaaacaaggcagaaag

SEQ ID NO: 109962 - RNA, 79 nt, Homo sapiens
caagcaacaagccccgcccccccgcacccggggcccgaaaccacaggacagagcgggagccaccagcgccaaagggaag

SEQ ID NO: 109963 - RNA, 69 nt, Homo sapiens
gaggaggagggggcaaccagaggggccaacggacgacagggccccaccccacccgccccaccgggcacc

SEQ ID NO: 109964 - RNA, 74 nt, Homo sapiens
acacacccgagacccagacagaggagagacagcgcggagaccacccagccggcgaaacacaaagccgacagcgc

SEQ ID NO: 109965 - RNA, 78 nt, Homo sapiens
gacaagagaacagccgcgcggcgagcggcccgcacaaggccggcaggccggacacggcagcggcccccgggacaaaac

SEQ ID NO: 109966 - RNA, 73 nt, Homo sapiens
agaagggcaacacacccacagaggcgacaggccgagaaaagagacagggcaccaggaaagggggggcagggcc

SEQ ID NO: 109967 - RNA, 66 nt, Homo sapiens
gcgacagggcggcggcgccaggcagggcgcagaggcgcggccagcgaagaagacgcagccagaccc

SEQ ID NO: 109968 - RNA, 80 nt, Homo sapiens
caccccgaagccgagaaagccgggacaccacagcaagaggaacgggcacgccagaaaagaccaggagaagcagacgaagc

SEQ ID NO: 109969 - RNA, 74 nt, Homo sapiens
cacccggcacccgcagcgcaggagcgggcaggcaacgcccgcggaaaacaaccacccaccaccagaccggaacg

SEQ ID NO: 109970 - RNA, 80 nt, Homo sapiens
cacccgcgcgcgcccgggaggaaggaacgaggcaaggagcaaagcagcggcgcagcccgggagagaagaaaggagaggca

SEQ ID NO: 109971 - RNA, 76 nt, Homo sapiens
acaggcagcacgaaggaggcagaaggacagcccccaaggagaggcgagaagggcgcgggaaaagacacgcgacacc

SEQ ID NO: 109972 - RNA, 75 nt, Homo sapiens
ggcccggcaccccaggcgggagcggaaccgcccggcagcaggccagacgcagacagggccagcagaagggaagca

SEQ ID NO: 109973 - RNA, 55 nt, Homo sapiens
gggacaagaagggcaaagccgaagccacgaacgacgcacggaggccacaacacca

SEQ ID NO: 109974 - RNA, 52 nt, Homo sapiens
gaggagggggcaccgagcaacgagggcagccagccggcagggggaaagaccc

SEQ ID NO: 109975 - RNA, 75 nt, Homo sapiens
aagaaagaggagaaacgacgggaagcaaggaccagaagcgccaacgcaagcagaaagaaggaggcacagaccgcg

SEQ ID NO: 109976 - RNA, 34 nt, Homo sapiens
gaagaaccagaccggaccagaccacacgaagggg

SEQ ID NO: 109977 - RNA, 81 nt, Homo sapiens
gccgaggccaagaggcgggcgcagaggggggcgggccgagcacccgcaggccccgcagaggcgcccacagcggacggcagg

SEQ ID NO: 109978 - RNA, 72 nt, Homo sapiens
cgggccccccagcagacgcgagagaacaaggccccccaacagccccgccgaggcccccgccgcccagcaccg

SEQ ID NO: 109979 - RNA, 80 nt, Homo sapiens
gcggaggccggggacgacaaggaggacggaccaagaacgcccagcccgcgggcaccggcagaaaggaggaggaaaacacc

SEQ ID NO: 109980 - RNA, 66 nt, Homo sapiens
caccccaaagagccacaaaacagagggcgggcgccagcacaacaggcgaccacaacagaagagacg

SEQ ID NO: 109981 - RNA, 75 nt, Homo sapiens
aaaaaagcaaagacgaacaagaaaggagcaaccaaccacaggaggacaagagagcagacaagggcccacaccaaa

SEQ ID NO: 109982 - RNA, 80 nt, Homo sapiens
gcagcaggaccgcggcggcgaacacaggaggaagaagaccggcggcaggggggccgcagccgagccagccgcccacccca

SEQ ID NO: 109983 - RNA, 77 nt, Homo sapiens
aaacaaccccggggccacaaagcgagcacagcagaaacacacaaaccaagggagacaaagcaaccaaaaaacccagc

SEQ ID NO: 109984 - RNA, 72 nt, Homo sapiens
aagaccccgcacacagcgccccaagaccaccgggcgggacagacaccccaaacaaagcaggcccagcggggc

SEQ ID NO: 109985 - RNA, 60 nt, Homo sapiens
ggagagaggccgaagacaacagaagaccagcaacaggggacaaaaagaaggggagagacc

SEQ ID NO: 109986 - RNA, 68 nt, Homo sapiens
cccccaccccgcccaaggaggcccagcggcagaggacccgcggccccgcaggggcccgggacgagaag

SEQ ID NO: 109987 - RNA, 81 nt, Homo sapiens
acccggccgaaaagcgcgccgacgggcacaaggccaagcaaggacagcacggcagcgcaacacgacaaaaacaggcacaaa

SEQ ID NO: 109988 - RNA, 72 nt, Homo sapiens
aaagacaccagacgggaagccagagggaccaacggaaccccaagaggaccgagaacacaccagccgagggaa

SEQ ID NO: 109989 - RNA, 66 nt, Homo sapiens
agacaacaccagagggccccaggcgcgggcccaggcggcgaaccgaaccgagccaaggaccccccc

SEQ ID NO: 109990 - RNA, 81 nt, Homo sapiens
gcccaggagacgaggaccaccagcgacagcagccaggcgagcggcagggagacagcgcacccgcggagcgggcacacagca

SEQ ID NO: 109991 - RNA, 72 nt, Homo sapiens
gcacagaaaaagcaggacacgaaggaagaagacaccaaggaaacagcggagaacaaccggagaaaaaagcgg

SEQ ID NO: 109992 - RNA, 69 nt, Homo sapiens
gcacacccagcccgagcaaacaacaggaaggaagccaccgcacgaggagaagaagccaaaaaagaaggg

SEQ ID NO: 109993 - RNA, 82 nt, Homo sapiens
gccccggggcgcggagccgcgcgcgcgggcgccccccgggacagcccgaagccgagcagacaacccagaaaagaaaaggcca

SEQ ID NO: 109994 - RNA, 78 nt, Homo sapiens
cacggacgaaaccagaaaacgggcggcacagcagacccacccaggaagaagacggcacgggacccccagcacaggcag

SEQ ID NO: 109995 - RNA, 71 nt, Homo sapiens
aggcaccccacaaacagggcagaagcgaagagacgaaagaggagaagaggagagaagggagagggaagcac

SEQ ID NO: 109996 - RNA, 76 nt, Homo sapiens
aaggcccccaagccccccggcgacgacgcccgagggagacaggaaccaaaaagcaacagaagaaagacgggaacga

SEQ ID NO: 109997 - RNA, 54 nt, Homo sapiens
ggaaacaccggagaagaggccagacagagcaggggcaaggaggagccccggagg

SEQ ID NO: 109998 - RNA, 75 nt, Homo sapiens
ccacacagaccacgcaccacgccaagagacagccacagccacgacaggcggaagcaaagcgggcggccacgcaac

SEQ ID NO: 109999 - RNA, 87 nt, Homo sapiens
ccgggaccacacagacaggcgaggacgacagaccaagagcgaacaagaccagagacaaggccccgagggaggagcccgaaggcgcac

SEQ ID NO: 110000 - RNA, 73 nt, Homo sapiens
cgaagcacagcagaaggggccacaagacagcacaaaaagaccgcagagccaagcccccgccaccaaaaagggg

SEQ ID NO: 110001 - RNA, 79 nt, Homo sapiens
gaggggggggccgggccgggcaagacggcgaagcgcgcgccgcgcccggaccccaggccgcgggagagcgggggcggga

SEQ ID NO: 110002 - RNA, 56 nt, Homo sapiens
ggagcgccagcgggagagcgccagggaacggaaaaggggagcggacgggcccagga

SEQ ID NO: 110003 - RNA, 86 nt, Homo sapiens
ccacgccgcgggggagaagccccggcggcccccaggcacgaagcgaagaagaggagagaagcagcggcgcagacgacggcacaaca

SEQ ID NO: 110004 - RNA, 58 nt, Homo sapiens
cacgccggaaaccccgcccacagcacgaggacaggacagccaggagggggcgcacacc

SEQ ID NO: 110005 - RNA, 70 nt, Homo sapiens
acaccagcgccagggcaggccgcccccgaagagacccaaaaaggggacaaggcccaggaggccaccagca

SEQ ID NO: 110006 - RNA, 61 nt, Homo sapiens
aaaggacaagcagagagccgccaccaaacgcaggaaagaacgcggcagaacggaggcaggc

SEQ ID NO: 110007 - RNA, 84 nt, Homo sapiens
cagcaagcgcgccgcgccgcagcggcgccgcggacaagcacgagggcgcgccgagacgcccgaggccgagggcaccgaaacccg

SEQ ID NO: 110008 - RNA, 68 nt, Homo sapiens
ccgcggcgccgggaccgcgcgcccacgccgcgccagacaggggcaacaggaaaacaacccagagaacc

SEQ ID NO: 110009 - RNA, 76 nt, Homo sapiens
caacgaacgaggggggaccaggaagaccgcaggaaagcaggaaggcaagaaagccaaggacgaaacccacacggag

SEQ ID NO: 110010 - RNA, 74 nt, Homo sapiens
cggagccaccaacaagcgggagaaagacagcaagcaggaaaagcccaggcggggcaggcccagcacgagcccag

SEQ ID NO: 110011 - RNA, 101 nt, Homo sapiens
ccagccgaccgagcccaggagcgccacgcgcggaaggcagcgcccagcagcgcaggcccaaaaggagaagccagaacaacagcagacaacccaacgacggc

SEQ ID NO: 110012 - RNA, 56 nt, Homo sapiens
ggaggcagcacacggggagaggaggcgccagacacccacgaaggaccgggaaccgg

SEQ ID NO: 110013 - RNA, 71 nt, Homo sapiens
cggcgccggccgagaaggcagaggcggaaagccacccggccggcagggccgaccaccaacaaagccccaaa

SEQ ID NO: 110014 - RNA, 83 nt, Homo sapiens
ccaggcgccgaccaccccagcaccagcccagagggaaagcacaccaccccagccaaaaaccgggcacaggaccaaagcaaaca

SEQ ID NO: 110015 - RNA, 57 nt, Homo sapiens
ggcccccagaagcacggaaaagcccccggccaaagagagccgccggcgggaccaccc

SEQ ID NO: 110016 - RNA, 66 nt, Homo sapiens
acgcggagggggaccgccgccaccggcgggaagagcaccaaagcagaacaccccaccagcacaagg

SEQ ID NO: 110017 - RNA, 63 nt, Homo sapiens
aaggaacggcaagacaacaaacgcccggccacccaacacccggcacgcgggacccgacccgca

SEQ ID NO: 110018 - RNA, 71 nt, Homo sapiens
aaccacccacacccaccaacagaaacagacccaaacacgaggcagacaagcggagccaacacaagcggccg

SEQ ID NO: 110019 - RNA, 85 nt, Homo sapiens
cacaggcccagacgagcggaggaggcacagggcgcggaccgcacgagcgcgagcccacgcaggagacgggaggagcgacaacgga

SEQ ID NO: 110020 - RNA, 78 nt, Homo sapiens
agcccgaccgggagaggacaagaccacgagccagaaagaaggcgacgcacaacacaaggcgaccagacccggcaagac

SEQ ID NO: 110021 - RNA, 81 nt, Homo sapiens
gagcgacaaaaaaccgggcagaggcccggggaagacaggggcaggaaaaggccaaagggccaaacaacagacccacagaac

SEQ ID NO: 110022 - RNA, 76 nt, Homo sapiens
ggaaacccgagcaacccaggccagccagacgcccagcacacagaccaggagagagagaaacaccgaaaaacaacag

SEQ ID NO: 110023 - RNA, 76 nt, Homo sapiens
cgggagggcggaggaggagaacacagaaccaccaggagagcaaggcgacagagaagagagggacggcgcaaaccag

SEQ ID NO: 110024 - RNA, 109 nt, Homo sapiens
ccgggcccgcccgaccacaagcgacccagacgccaagcgggccggcagagaccacggccggccacaaagcgcccggaaggaagcggcgccgaacgcgggccaggcagcg

SEQ ID NO: 110025 - RNA, 72 nt, Homo sapiens
agagggccaagccagaaaacagaaacgaaacagaacagagagaagcccacacgacagccgaaggagaggagg

SEQ ID NO: 110026 - RNA, 59 nt, Homo sapiens
aaaacagggagaaacacagccagaaggagaaaccagcggcgcaccgcccaacaaggacc

SEQ ID NO: 110027 - RNA, 70 nt, Homo sapiens
ggagccgccggcaccgccggaaccggcgcaggacaggacaacaacaccccacacaaagcggcaagagcaa

SEQ ID NO: 110028 - RNA, 79 nt, Homo sapiens
cagcggccaacaagaagggaggggcgccgcccgcgcacgacgggacccccccgaggaagggcgggcacccgcaccccgg

SEQ ID NO: 110029 - RNA, 76 nt, Homo sapiens
gggaaccccggagaaaaggccaagaaggcagggcccgccccaccgggggccaccccagggaggagaagagggaccc

SEQ ID NO: 110030 - RNA, 79 nt, Homo sapiens
cgagcccccgaaccgcaaagccccagaggacaaccaccccaggacaggagcagagacaccaaaaaggcaaggacagaac

SEQ ID NO: 110031 - RNA, 77 nt, Homo sapiens
gggacggaccgagaccggaccgagagcggaccgagagcgcgaaacgcacgagaaggagagaagccgccacagcgaaa

SEQ ID NO: 110032 - RNA, 72 nt, Homo sapiens
gcagaaagaagagaaaagcagcaaaaagaagaaagcaaggcacacggacgagagaaagaagaagcaagggaa

SEQ ID NO: 110033 - RNA, 82 nt, Homo sapiens
aaagagcccgcaagaagaacagagacagcagccaaacccccaggagcgaaaacgccacaacagagggggccagggcggggaa

SEQ ID NO: 110034 - RNA, 78 nt, Homo sapiens
cgagggcgccccaaacgggaccagccaacgcccgggagcgccccagagacgcggggagcggcgcggaggagcggagaa

SEQ ID NO: 110035 - RNA, 77 nt, Homo sapiens
gagacccgggcagcgcccaccgcggagcggcaccaaccagcggacacacggaaaagggacgggaaaagccgagaaag

SEQ ID NO: 110036 - RNA, 88 nt, Homo sapiens
cacgccagccgcaccagccgcccaagccgcacagccgcggcggcagcagcaggagagggcagacgccgagaaggccgcgcggacccac

SEQ ID NO: 110037 - RNA, 57 nt, Homo sapiens
gacgaacgcgccccccgccggaggcaacagaccagcacagcaagaagacagagagcc

SEQ ID NO: 110038 - RNA, 65 nt, Homo sapiens
gagaagcaagaaggcccggacacagcaaaccgggccacaggccgcccaaagaccaacagggcagc

SEQ ID NO: 110039 - RNA, 75 nt, Homo sapiens
gcgagcagcaggagcaccggcccaagaaacagagaaaaggccaagcagaagcaacggggaggaaacggccggccg

SEQ ID NO: 110040 - RNA, 53 nt, Homo sapiens
gacgaaaacgccagagaacaagacgcaaaaacacggacccagggaaacgaaga

SEQ ID NO: 110041 - RNA, 84 nt, Homo sapiens
gggaaggcgcgaggaggaaaggaggacgagacaaagaagggcacaccaccacagggaaccagcccccaaagaaggcagggagcc

SEQ ID NO: 110042 - RNA, 107 nt, Homo sapiens
ccacgcccccccccaccggcccgccaggaccacagcacggcccacgacaccagaccagcaagcgccgcggccgggcaaaagccagaaaaaaaagaaaaaagggaaga

SEQ ID NO: 110043 - RNA, 66 nt, Homo sapiens
caccacaagacccaggccacgccgagccgccaggcagcaggacggagaggagaaaggcaggccagc

SEQ ID NO: 110044 - RNA, 75 nt, Homo sapiens
cagcacgggacaccggggccgcggcgcgcgccagcgcgcccacaggcagcagaccgccaaagacgcagccaccgc

SEQ ID NO: 110045 - RNA, 78 nt, Homo sapiens
ggaaaaggccgaagggcacgaaagaggcaagagagcacacccacagaggcagaccgaaaacacccagcaagaagggcg

SEQ ID NO: 110046 - RNA, 80 nt, Homo sapiens
cggggacaccacgcagacacaacacgggggggagagccacaggcagcggcgagaagaacaggacaccaggccgagcacga

SEQ ID NO: 110047 - RNA, 80 nt, Homo sapiens
ccggaaccggcccagggcggcaccggccacaccaggacccccacaccgcggacaggggcaaagagaaccaggagacccca

SEQ ID NO: 110048 - RNA, 75 nt, Homo sapiens
acaaggagaccgaggaaaacagcgaacagagcaagaaaagagcccgaagacaaggggaacacccaaaaaggacca

SEQ ID NO: 110049 - RNA, 61 nt, Homo sapiens
cggggccgggcccccggccgcaagcaggaagggccgggccggggcacgggcccacggcccc

SEQ ID NO: 110050 - RNA, 79 nt, Homo sapiens
ccaaccaggcgcccagggcagacaaaggcaaacaaggacccgaaaggggaccaaaacaaaacgagagcaagaggaaaga

SEQ ID NO: 110051 - RNA, 49 nt, Homo sapiens
aagcaaacagaagcgcggccaaggagaaccagcgcccgacccgcaacaa

SEQ ID NO: 110052 - RNA, 54 nt, Homo sapiens
agagccgcggcaaaccaacaccacagcagcaagaaaagggcacagaaagccagg

SEQ ID NO: 110053 - RNA, 68 nt, Homo sapiens
gcacccgccagggcagagggaaggaagcgaacgcaaccaaggagcaaccggagaacaccgggccccac

SEQ ID NO: 110054 - RNA, 76 nt, Homo sapiens
gacagagaagaacagacgccgcacccccgcgacacaggacacaaccagagggaagcacgcccgggcacagcggaag

SEQ ID NO: 110055 - RNA, 82 nt, Homo sapiens
ccacagcagcagagcgagaaggcacgacccccagcagaaccgaacgaccgagcgccaggacgggggcaaccggacagagaag

SEQ ID NO: 110056 - RNA, 75 nt, Homo sapiens
aaaccagccccagaaacggccagaacggagaaacaggggggcggcgaacaagcggaaaaagaagcggagagaaac

SEQ ID NO: 110057 - RNA, 81 nt, Homo sapiens
cacgccgcgcagcccggccgccggcccccaacagcgccggaaagcgcaggcaggagaaggacagcagagccacaagggacg

SEQ ID NO: 110058 - RNA, 58 nt, Homo sapiens
aaaggcagagcggaccgcaccaggcaccagagagcgaccgcagccgaagcacccgaga

SEQ ID NO: 110059 - RNA, 73 nt, Homo sapiens
gacagggaggcgccagcccgaaggaggcaacaaaccaagagaaaaggccaaagagaacacaacgcccagcaag

SEQ ID NO: 110060 - RNA, 72 nt, Homo sapiens
gagcaaaaacagccacccaagcccagcaaggacaaaggagcagacaagggcccacaccaaagccaccagagc

SEQ ID NO: 110061 - RNA, 59 nt, Homo sapiens
ccggggagaccccgacgggaggccgagggggagaggcaccagcaacagaccaaccgcag

SEQ ID NO: 110062 - RNA, 76 nt, Homo sapiens
gaagccgcaaggcgaaaagggaaagaaaagaggcgcccggaggccaaaacgcacaaagaggcgacgcaccagaaac

SEQ ID NO: 110063 - RNA, 76 nt, Homo sapiens
aagaggacaagagacgacacgcaagcaggcaaccgaaacaggaggagagaaagaacccacgcaggacgacagaaga

SEQ ID NO: 110064 - RNA, 77 nt, Homo sapiens
accccccggacccagagggcggaaccgacacggcagacaggccgaagcaggacacaaagaaaagacgaaggaagcaa

SEQ ID NO: 110065 - RNA, 81 nt, Homo sapiens
gaccgccaaaaaggacacggagccaggccaagggaaccccgggagagacaggacaccacccgaccccacaggaacccgcgg

SEQ ID NO: 110066 - RNA, 89 nt, Homo sapiens
cgcagcccggcgggacagcggggcggcggcgccgggggccggggagcgccagaaagaccagggacacagagagccacggcccaccaacg

SEQ ID NO: 110067 - RNA, 84 nt, Homo sapiens
aggaaaagacacaaggaggcaccaggagcagcaaaaaagggcaggagaaagacagcaaagaaaaggagaagaaaggaaaaaaac

SEQ ID NO: 110068 - RNA, 42 nt, Homo sapiens
gcggccaaggcacggaggccgcgggggggccccagcccggcc

SEQ ID NO: 110069 - RNA, 76 nt, Homo sapiens
cagccccgagagcgggaacaggcccaaccaggaaggagacgccaggaggccagggcagcaccgggcagcgagacga

SEQ ID NO: 110070 - RNA, 54 nt, Homo sapiens
ccccgccggagacgagagggcagcggggaagaagaaaaggaaccgaggcccccc

SEQ ID NO: 110071 - RNA, 80 nt, Homo sapiens
cccaccccaggcgcagacgccgcccagcccagcagaggaccagccgcagcagacaacgaagagaggaaagaagcggaaag

SEQ ID NO: 110072 - RNA, 82 nt, Homo sapiens
ccggggggccaggagaaggggaagaagagagggggacgccaaggagagggcacgaccaacagagaaaagccagaggagaaga

SEQ ID NO: 110073 - RNA, 74 nt, Homo sapiens
ggccgaccgagacgggcggagaggagaaggcagcagcaagaagaagcagaaagacaccagccagcccgccaagc

SEQ ID NO: 110074 - RNA, 73 nt, Homo sapiens
aaggccagccgcggcaacgaccgcaaccgcacggcgcccagcgccggccgcgagacgacgggaccgaaggacc

SEQ ID NO: 110075 - RNA, 78 nt, Homo sapiens
aaagaacacaagaagacagagacccgacacaagcaacagcaggcgacgagcaaagaccaacaccagaagaacagaaca

SEQ ID NO: 110076 - RNA, 78 nt, Homo sapiens
accacaggacagagcacaccaggaaaggccagccaccagcaggagcacgggaggacagggcaggaggacgcaacagag

SEQ ID NO: 110077 - RNA, 78 nt, Homo sapiens
agagcagcgacaaacgcgagccgccaagcaacagccacggaagaaagcagggggaaacaccgacaagaaggcgaagcg

SEQ ID NO: 110078 - RNA, 75 nt, Homo sapiens
gggggggaccaccgccggccaggggcggaaacgaccacaagccagccacagccagaagggcaagaaaacaagaaa

SEQ ID NO: 110079 - RNA, 74 nt, Homo sapiens
gcacccagaccaaaaaaaaaaaacaaccgaggggccgacccaagcacaccagaaaggacgacaccccgagcccc

SEQ ID NO: 110080 - RNA, 61 nt, Homo sapiens
gccgcagcagcgaaggcagaaggcacagaccagcacaggggaggcaagcaggggggcaaag

SEQ ID NO: 110081 - RNA, 76 nt, Homo sapiens
gcagggggccacaagagaaaaggcccgccccagcaaccccggccggggggggcacagagccccggaagacagcccc

SEQ ID NO: 110082 - RNA, 84 nt, Homo sapiens
acaagagacgacacgcaagcaggcaaccgaaacagacaggaagcaccaaccccgcgaaacccaggacacacagggccacagcag

SEQ ID NO: 110083 - RNA, 87 nt, Homo sapiens
cggcccgggggcaggcgggcacgaggaccagcgggccggagccccgagaagacagagccagaggaccccggacaaacacagcggaac

SEQ ID NO: 110084 - RNA, 84 nt, Homo sapiens
gagccggaccacaccggaggcaggaccggggccaaaagccaaggggaaaggaaaccaaaccaggaaagaaggacaaggagcgag

SEQ ID NO: 110085 - RNA, 85 nt, Homo sapiens
ccaggaccccggaagccagaaagagccaggacaaaaccaggcagaaccaacacgaacccaagcacaaacaagaaaacgagcaggc

SEQ ID NO: 110086 - RNA, 63 nt, Homo sapiens
gaaagacagaaccgaaaacagcaggggcacgagaggagcagcgggacggggcaccgagcagga

SEQ ID NO: 110087 - RNA, 86 nt, Homo sapiens
ccaggacagagcacacagacgacacaccacaggggggcccaggccccagaggacgggagccgccccggaaaaggggggagaggggg

SEQ ID NO: 110088 - RNA, 71 nt, Homo sapiens
gcgcggcccggccacccagccgcccggaaggccaagaaaacaggaacgagaacagccagcaaagacaagag

SEQ ID NO: 110089 - RNA, 60 nt, Homo sapiens
cggcccgcgcgcgcaccccgcggacgccacagcgccgccgggggaagacagcgcgacagc

SEQ ID NO: 110090 - RNA, 72 nt, Homo sapiens
ccggggaaagcggcgcgcgggaccgccaccgggcggggccgcggcggcggagcgcacaacacacaagggaag

SEQ ID NO: 110091 - RNA, 95 nt, Homo sapiens
aaaccaagaagaggccagaaaccgcccggagcacgaccgaggcggacacagaagaacgcagcccggggagcagcaccccacaggcacgccaaccc

SEQ ID NO: 110092 - RNA, 60 nt, Homo sapiens
gaaaaggaagacacagacagaacaacaggagaagagaacggggcagggaccccacacaaa

SEQ ID NO: 110093 - RNA, 89 nt, Homo sapiens
cggccagaaagcgacagcgaccaacagcccaggcggagcggaggggcccagggcaccaggagacgaggagagaggccacgcccccgcga

SEQ ID NO: 110094 - RNA, 91 nt, Homo sapiens
ccgcgcgccgcgcacccgcgccagcaccacgcccgcgccgcgccgccgccaccagcccaagagaaagggacccagacaggagcgcgggaag

SEQ ID NO: 110095 - RNA, 87 nt, Homo sapiens
gagcgggagcgggccgccgaagcagcgcgcccgggccacccccggaccccggagaagcagaggaaaagagcagaaaaaccccccacc

SEQ ID NO: 110096 - RNA, 93 nt, Homo sapiens
cagcagcccaagagaaccaaggaaggagaagaccgaagaccgaccacgaggcgggggcggaagaggcgagggggccgggacgggaagggccga

SEQ ID NO: 110097 - RNA, 38 nt, Homo sapiens
aggcgaggcgggcggacacgaggaggccacccgaccgg

SEQ ID NO: 110098 - RNA, 86 nt, Homo sapiens
ccaaagggaagaaacagagcccagcgaaagagcagcgacccccaggaaagcacggcggcgagcagcacacagcgggcaacaggggg

SEQ ID NO: 110099 - RNA, 78 nt, Homo sapiens
aagaaaacagaaacgacggagagaaaccacaagggacccaccaagcggccacgccccagcccccagcccagaacgagg

SEQ ID NO: 110100 - RNA, 79 nt, Homo sapiens
aacgcggcaggaccaagcaacaagcacgaaagaaagcagggaacccacacaggaagaaggggcgagaaagaaaggaagc

SEQ ID NO: 110101 - RNA, 77 nt, Homo sapiens
acaccgggcagggccgagaggacgccagcggcgcgcaggcaagcagaagaggaacagaagaagcagagcagagacgg

SEQ ID NO: 110102 - RNA, 66 nt, Homo sapiens
cacaccacgccggcggaggccgacggggcacaaacagagaagggcacagggccggcggccgaaccc

SEQ ID NO: 110103 - RNA, 83 nt, Homo sapiens
cagaaagagaccgcagagacagccaacacggcacccacagggcaacgccaaagaaaggaaaaccaaagagaagaaacaaagac

SEQ ID NO: 110104 - RNA, 76 nt, Homo sapiens
aaacagaacgaaacaacggaaacgggagacgaccccgaggaggccgggaaccccgcagaagaagaggggggcaaaa

SEQ ID NO: 110105 - RNA, 64 nt, Homo sapiens
accaagcgcgccacgcgcggcgcgccgggaaacacaaagaagacaccagaagggccagcaccac

SEQ ID NO: 110106 - RNA, 76 nt, Homo sapiens
gcgccccagaggacgagaagacaggagggagccagcccaagaagccaacgagcaacgaaggccccaggacacccag

SEQ ID NO: 110107 - RNA, 65 nt, Homo sapiens
cgcggaaggaagaacagaaacacgaccaagagcgacaacaaaggagagggacgccaaaagaaggc

SEQ ID NO: 110108 - RNA, 68 nt, Homo sapiens
gaacccgaagcccccaaagagagaaccggagagcacccaacaacaagaggacgaaaccggcaggccag

SEQ ID NO: 110109 - RNA, 65 nt, Homo sapiens
caagaaaacgcgcgggagaggccggggacagacccaagcccgccgacaagaacaaggggaagacg

SEQ ID NO: 110110 - RNA, 71 nt, Homo sapiens
aggacagaagcaaggacggcaacaccagagagagccggagggcaggaagccgccaccaggaaccccaaaga

SEQ ID NO: 110111 - RNA, 77 nt, Homo sapiens
gaccaccccgaagaaagcacagcaggcagcaggggaaccgcgcgaaggacacaccaccggacacaaggagagaacac

SEQ ID NO: 110112 - RNA, 75 nt, Homo sapiens
cggccagggcaccggggcccggcgcccgggcccgccccggaggaccaaaaagggcagccgcagaagccaaaggaa

SEQ ID NO: 110113 - RNA, 78 nt, Homo sapiens
gacagaccaggcccaagcgaaaaagcgggaacgcaggacccaaagcggggcgggggaggcgacccacgagacgagagc

SEQ ID NO: 110114 - RNA, 77 nt, Homo sapiens
aaagacagaacaacacccaaaaaaggaaggcaacaggaagacagacccaaaaaacgcccaaggaccccacaaaggca

SEQ ID NO: 110115 - RNA, 70 nt, Homo sapiens
aacggaaagaagagcaaaaaggaaggaaaaccaacagagacaacaaagagaagaaacaggccgcgccgca

SEQ ID NO: 110116 - RNA, 74 nt, Homo sapiens
ccagccaccccagggcacaacaggggaaaaaagcagcggaggagaaaaaaaagaagaccgcagcaaggaagagg

SEQ ID NO: 110117 - RNA, 84 nt, Homo sapiens
cggacggcggggccgggcccccggccgcaagcagagcggggcccggcgcacccaccaccgccgcccacggcagcccagggaccc

SEQ ID NO: 110118 - RNA, 72 nt, Homo sapiens
acacacccggcacagcacgcaccacgagaccagagaaagccaaagcaaaccacacgcaaagcagaagcccgg

SEQ ID NO: 110119 - RNA, 76 nt, Homo sapiens
cagacaacacagaagggccaacgcgaccgcacgcccccgcccccgaggccaggaacggaccgggagacaacaaaaa

SEQ ID NO: 110120 - RNA, 73 nt, Homo sapiens
gaaacgcccgaggcccgaaccgcgggagaggggaagagacaagaccaggagcgggcagagcaaaaaaagaaac

SEQ ID NO: 110121 - RNA, 105 nt, Homo sapiens
caaagaacacggacgacgggggacaggcgacaggagccagaagggaacaacacccgaggaacgcacagcacgaagcagccacggccaccggagacgggagggcca

SEQ ID NO: 110122 - RNA, 66 nt, Homo sapiens
aacaccagaggcgaagcaaagccagggaaggaaccaggacaagacaggaggacacccgaaacaagg

SEQ ID NO: 110123 - RNA, 78 nt, Homo sapiens
gcgaccacgcccggcgccccaccccaggcgggaagcaaacaggaggaggcgcaccaggaagggcagaagacagcagcc

SEQ ID NO: 110124 - RNA, 81 nt, Homo sapiens
ccgcccggccacaccaggcgaggagccagaggaaagcgggggcacacagaaaccagcaaggaaggagagccagccgaaggc

SEQ ID NO: 110125 - RNA, 76 nt, Homo sapiens
gaggcgcgcagagggcgcagacggcccgccacgggccccgcagccgcgcccgagcgcccgagcagggacagcgacc

SEQ ID NO: 110126 - RNA, 69 nt, Homo sapiens
cagagccaagacggagaaacaacagggcacccaccacagaagaacaccaagaacaggagccgcgcgaga

SEQ ID NO: 110127 - RNA, 72 nt, Homo sapiens
cgcccggccgacaagcacgcaagagcaacgcacgaaaacgcacgaggagcacagaaacgcacagacccacgg

SEQ ID NO: 110128 - RNA, 57 nt, Homo sapiens
ccggaagcacacaggcgcggggagcgccacaggcgaaacagaccccgaaaagcccgg

SEQ ID NO: 110129 - RNA, 78 nt, Homo sapiens
gaaggacccggaagccacaaagcaaaacggcacgggagagaagaagagcaaagagggcagcccggaagggacaaacag

SEQ ID NO: 110130 - RNA, 67 nt, Homo sapiens
cacgagaccaacgcgccaccgaccggcaccagcaagcaagaaagggaagaccgcccaaaacccccac

SEQ ID NO: 110131 - RNA, 77 nt, Homo sapiens
acaaaagcaaaaaaggaggccaaagacgccgaagcaaccagaagaaagaaaccaagcacacaaagagccgaaaacac

SEQ ID NO: 110132 - RNA, 71 nt, Homo sapiens
aggaggaccgcggagggaacaccgaggcagcacggcaggagacgaggagaggacagcaggacacccggacc

SEQ ID NO: 110133 - RNA, 72 nt, Homo sapiens
gcaaaggcacaaggaaccacgcccgcgggacacaagacgggcaaggaggagggagaggaaaacgggaaaccg

SEQ ID NO: 110134 - RNA, 105 nt, Homo sapiens
caccgacgccgccgcccggccaccggcgggcccgaggagagcgcggagccgcgcccccggaggaccgaagagcccagaaagggggaccagaggggccacacccgg

SEQ ID NO: 110135 - RNA, 72 nt, Homo sapiens
gcacgccaacaagacggaagcaggggagacaaggaacgcccaagccacaaaccgacccaagacaacagcacc

SEQ ID NO: 110136 - RNA, 73 nt, Homo sapiens
agggagccagaagaagaagaaacccagcaaaaggaaaaaagagaggcccaaagaaggcacaaagagcacacgg

SEQ ID NO: 110137 - RNA, 83 nt, Homo sapiens
ggaccggagaagccccagaacaacagggaagcgaggcacgaaaccccccaagaaaagcagacacagggagggccggaacgacg

SEQ ID NO: 110138 - RNA, 73 nt, Homo sapiens
cagcccccaagagcgagacacagacccagagaaacacaccaggcaacccggggccagagaaaccaaaaagaag

SEQ ID NO: 110139 - RNA, 40 nt, Homo sapiens
aagagacggggagggggaggccaaccacccgaacgcgccc

SEQ ID NO: 110140 - RNA, 75 nt, Homo sapiens
gggaagacagcccaggcaagaggagaccaacccgaaagagagaacggacgagaccaacgcggaaaccagcaagaa

SEQ ID NO: 110141 - RNA, 89 nt, Homo sapiens
ccgccgagcagcggcccggcgggcccggggcgcgcagcgcccgccggggcgggaggggaagagaggaagagcggccacggaggagcaga

SEQ ID NO: 110142 - RNA, 64 nt, Homo sapiens
gcgacggaggcggcggacaggcgacagcgaccgcggcaggaaaaccaacggcccggaggaccac

SEQ ID NO: 110143 - RNA, 77 nt, Homo sapiens
cggaggcagcaacagaacacgggagcggcagcccacaagcaggaagaccagccccaggagggaaacagagcacccac

SEQ ID NO: 110144 - RNA, 83 nt, Homo sapiens
gaacaccagagaaacggccaaggcccgaaggcccacaggacagagcccacagcacccccagcccgcagccaccacacgaaggc

SEQ ID NO: 110145 - RNA, 80 nt, Homo sapiens
ccaccagacagacgcgcaaaacccaggaaagagcggccccccggaaaacggcagaacgaggggcgagccgggccaggcgg

SEQ ID NO: 110146 - RNA, 66 nt, Homo sapiens
aagacaccagccagcccgccaagcccgaagggccgaccaagcagaacccgagaagagccgagaaac

SEQ ID NO: 110147 - RNA, 80 nt, Homo sapiens
ggccccaaaaagcagacccaaggccggaacggaggggaggacagagcaccaagcagaaggacgcaagagaagcgaaggag

SEQ ID NO: 110148 - RNA, 79 nt, Homo sapiens
ggaacaccgaccacgccagcggccgccccggacccagggaaggcgggcacagagccacccaacggacggggaggcagca

SEQ ID NO: 110149 - RNA, 71 nt, Homo sapiens
agccaaggcgggagccacgcccccggaaagagccgcccgagagacaaacccccaccccgaaaaccgaaccc

SEQ ID NO: 110150 - RNA, 74 nt, Homo sapiens
gagggaaggagagcagcaaaaacaaggaaaagcggccaggaccaccaggcggccacgggcccccagcaccaccg

SEQ ID NO: 110151 - RNA, 72 nt, Homo sapiens
gggaagcccgggaagggaccggcccaggccccccgccccgcgcagcagggggcagcggcaagcaggggagcc

SEQ ID NO: 110152 - RNA, 75 nt, Homo sapiens
gagaagccgcagcgcgaggccgccgcgcgcccggggccggaccggagagaacagaaaaaaagcggcccgggacca

SEQ ID NO: 110153 - RNA, 66 nt, Homo sapiens
cgcccggcagcagccggggcagaacacccgacacggggcgcggggggccaccaacacccccggaac

SEQ ID NO: 110154 - RNA, 78 nt, Homo sapiens
cccagccaagcagaggccacacgaacggcgcacggggcaggcgggcagcgagccaaggccggacagcgcaaagacccc

SEQ ID NO: 110155 - RNA, 83 nt, Homo sapiens
ggaccccgaccagcgcgccaacagcccggcgaaggccaccgaggaggagacagggaccaagaaaggcccagggaccaaagccc

SEQ ID NO: 110156 - RNA, 62 nt, Homo sapiens
cccgaggcgaggaggagcgcggcgagccgagagcgccggaggaccacacccggccacagccg

SEQ ID NO: 110157 - RNA, 71 nt, Homo sapiens
gcccgcggaggcggcgggcagcgcccggaggaaagacccagcgcacgaccggggacacaaaccacgagccc

SEQ ID NO: 110158 - RNA, 71 nt, Homo sapiens
ccagcgacaagaaggaccagagaaaaggcacagaacagcacaagaccggcagggaggaagccaagaaaaag

SEQ ID NO: 110159 - RNA, 69 nt, Homo sapiens
aaaaaaccaaggagccgggggaggcgcggacaaggcacgaggcgcggcgaccaccacagcagagcccgg

SEQ ID NO: 110160 - RNA, 61 nt, Homo sapiens
aaaaccaagaggaaaagaggaggggcagcagcaggacagggaacccgggagacagcaacag

SEQ ID NO: 110161 - RNA, 83 nt, Homo sapiens
cgagcgccaggaaagaaggaaccccgaccgcagcccccgggcacgaccccggacacgggcaggcagcgccgaaaagcgaaaag

SEQ ID NO: 110162 - RNA, 76 nt, Homo sapiens
aagccaaacagggagaagaacaagcagggccaaagggggggcacaaacagaagcacgaacaggcagaaaacccaac

SEQ ID NO: 110163 - RNA, 73 nt, Homo sapiens
acagcaaggccaaacggagaccaaacacagccagacccggcgcgagagaggaccagagaaggacgaagcggca

SEQ ID NO: 110164 - RNA, 70 nt, Homo sapiens
aacgccacggacagaccaacggaagaacacagcagcagaaagaggaaacggacagaaaaaaggagccaga

SEQ ID NO: 110165 - RNA, 75 nt, Homo sapiens
gacacccggacaccggaagcgggaaaggcacacagagaaaaaaagggaacaaaacacagcaagcagacaaaaggg

SEQ ID NO: 110166 - RNA, 78 nt, Homo sapiens
ccgccgccaccagcccaagagaaaggccgcccacgcagcgggaacccagcccgaacggcgacagggcccagccggccg

SEQ ID NO: 110167 - RNA, 78 nt, Homo sapiens
gaggcgaagcgagaggacagggccaagaccccggccgcgacccagcagcaggagagcggaacaacaccagggaaggca

SEQ ID NO: 110168 - RNA, 69 nt, Homo sapiens
gggacgcagggggcagggcagaggacaggaaagccagaccaacgagcgagcacgcgccaaggaacaagg

SEQ ID NO: 110169 - RNA, 63 nt, Homo sapiens
caggacggcaggggaccgcacagggggccggaggccaagcagagggcagcgcagcagaagcac

SEQ ID NO: 110170 - RNA, 58 nt, Homo sapiens
agaaaacgcaagacaacaggagaggaaagcggaaagccaagacaggccggacacaacc

SEQ ID NO: 110171 - RNA, 93 nt, Homo sapiens
accaagaggggggagacggggaggacaggccagcgcggccaagacccgccgcaagggccccgcaccaccccagcaaccaaacaccacccggac

SEQ ID NO: 110172 - RNA, 75 nt, Homo sapiens
gaaaccaaagacccggcaggccccaaggacgccccccaaggacacggaagcacgggcccagggacgagcggaggc

SEQ ID NO: 110173 - RNA, 79 nt, Homo sapiens
aaggaacgccaaagaagagaaaacaggacaccaaccgaaagagcccaaaacgagcaagacagaaaagaaaaagccagag

SEQ ID NO: 110174 - RNA, 78 nt, Homo sapiens
cgggccggaacgaaagcaggacggaggagcgaccaccgaacgagacgaaggaagggcgagacagagcacgagggcagc

SEQ ID NO: 110175 - RNA, 81 nt, Homo sapiens
aacagaacgcaaacacggacacccgccgaaggagcccaggaagagcaaagccgagcgcaggaaaccccccaggcaagaggc

SEQ ID NO: 110176 - RNA, 104 nt, Homo sapiens
gccgcggggaaggaggcgcggcccgggcagcagggcggcagcgcccgagagaggccgcccggaccgggggaggaggaccgaaggcccaccaccgcggacaccag

SEQ ID NO: 110177 - RNA, 71 nt, Homo sapiens
gccgaaacacagagcaaggacccaaagacaggaccacgcaccagcagagaaggaaagcaaaccgaagcagg

SEQ ID NO: 110178 - RNA, 35 nt, Homo sapiens
cgcccggacaacccggagccgggaaaccgaagaag

SEQ ID NO: 110179 - RNA, 88 nt, Homo sapiens
gccacccggagccccgacagaacccaagccgagcaccccgccagcgccaccagacagcgggggccagcaaggaccacacaggagagca

SEQ ID NO: 110180 - RNA, 77 nt, Homo sapiens
aaagcaaacaagcaggaaaaaaccgccagggggagaccaggaggagaacagggaaagccaaaacaggaaacacggaa

SEQ ID NO: 110181 - RNA, 72 nt, Homo sapiens
aagggacaacacgaccacccaaaacaggaggagagaaagaacccacgcaggacgacagaagaggccggacaa

SEQ ID NO: 110182 - RNA, 54 nt, Homo sapiens
gagcagacagaacagacaaggggacacgacgcaggagagagagacgccggaaga

SEQ ID NO: 110183 - RNA, 68 nt, Homo sapiens
cagacaccgccccgagacgaggaagcagcaggacgaagcacgcagagaagccgagacaaaaaggcaaa

SEQ ID NO: 110184 - RNA, 67 nt, Homo sapiens
ccgacgcgcaggcacaacacagcagagaccgagggaacccacccccacccaaaagcgagaccccacg

SEQ ID NO: 110185 - RNA, 63 nt, Homo sapiens
gaagagagacgacgggcaacagacagacggcccacacgcgaagggacagggccgagacgggca

SEQ ID NO: 110186 - RNA, 85 nt, Homo sapiens
aacaaggacgaagccagagggcgcccaggagccaggagccccccaagagaacccagggggagccacgccggagcgggcaccggcg

SEQ ID NO: 110187 - RNA, 82 nt, Homo sapiens
ggcgaggggcagcgcgagagggaggccagcgaggagaacgcagacagaaaccaagccgccccgaacaacgccgaggggggca

SEQ ID NO: 110188 - RNA, 74 nt, Homo sapiens
ccggacccgggagccgaccagcacgccaacgaaaaggaacgagaaaaagaacagccaagaaagacaacaagaaa

SEQ ID NO: 110189 - RNA, 78 nt, Homo sapiens
cggcaaagacacacaacaggagcaccgggccgaaccagaggggcagagaaaacgccagaaggacagagcaccaaagcg

SEQ ID NO: 110190 - RNA, 61 nt, Homo sapiens
gccgcggacccccgcgaccgcgcggaccagggcgacaaagggacccgaccagcagggaaag

SEQ ID NO: 110191 - RNA, 54 nt, Homo sapiens
cggggcagacaacggagcccggggagagcgcgcgccgcgcgcccgcacaaacgc

SEQ ID NO: 110192 - RNA, 74 nt, Homo sapiens
cgcagcaacaggcgacagcaaaaaggggacgaacggagaccgaaacacagaaaagcggaaacaaaggagaaaca

SEQ ID NO: 110193 - RNA, 80 nt, Homo sapiens
cggcggggcaggcgacaggaccacaaaggacccggggagaggcaccagcaacagaccaaccgcagcaagcacagagacag

SEQ ID NO: 110194 - RNA, 85 nt, Homo sapiens
agagagggaagagacagccagcacaccccgcgagcaaggccagcgggagcccccgaccccaggagggcaagaccaagccacagcg

SEQ ID NO: 110195 - RNA, 84 nt, Homo sapiens
gagaagaggccggcagaagaaccgcgaggagggaggaagaagaccggcggcagccacccgccgcacggaccaaccggaacacgg

SEQ ID NO: 110196 - RNA, 84 nt, Homo sapiens
cacagccaccacagcaccgaagccgggagagggccgagggggaggggaaagacaccaagcaaaaagaagaaagcaaaaaaaaaa

SEQ ID NO: 110197 - RNA, 81 nt, Homo sapiens
caacgcacagccagggagccaagcgccgcccggccgccgccaggcacagagaaggcaaacgggagggcgaggacaccaaga

SEQ ID NO: 110198 - RNA, 51 nt, Homo sapiens
agcaggcaaggacaggaacaacagcagggaaaggcaaaggcaggcagagaa

SEQ ID NO: 110199 - RNA, 103 nt, Homo sapiens
aaaaagacgcacacagcaagacgacaggaagccaacaagcgacagagccaacgccggcggaccccagcgacacagcagaaccagcagcaccaagaaaagagaa

SEQ ID NO: 110200 - RNA, 76 nt, Homo sapiens
gaggcgcccccgggggcccgacgcacacgggggcggacaccacaagaagggcgccagggaaaaggaaaccagaaga

SEQ ID NO: 110201 - RNA, 72 nt, Homo sapiens
cccggaacaaccggaccgaacgacacggcggaaacgacgcaggagcaagggcagagaagaaggaacaaccgg

SEQ ID NO: 110202 - RNA, 59 nt, Homo sapiens
aaaagacgacgaagccgcgccaaggcagagcagagaccaaggagccaggaaggagaaga

SEQ ID NO: 110203 - RNA, 71 nt, Homo sapiens
acggggaaacacagcagaacacagccaaagaacacggcagaagcccccaagggaaaaaggaaggagcagac

SEQ ID NO: 110204 - RNA, 75 nt, Homo sapiens
aagagagccggccggcaaagggaagaagaaccgcagagaggaaaggcgccacacacccccagcggggggcaggga

SEQ ID NO: 110205 - RNA, 80 nt, Homo sapiens
gggcagagcagaagagacgacaaaggaaaaaacaggagaagcagaacccagcgaaggacgagaacgagaacaagaaaaga

SEQ ID NO: 110206 - RNA, 79 nt, Homo sapiens
agaaaaaaagcacgccccagccacgaccacgccacccccgaaggaaccgcgaccacaggagcacagcaagcgggagcag

SEQ ID NO: 110207 - RNA, 76 nt, Homo sapiens
cggagccacccaccgagggcagagaaccagaggcagcagacccgagagaggaggccggcgcggcaacccccaacac

SEQ ID NO: 110208 - RNA, 72 nt, Homo sapiens
agcccggcgcagaaagaggagcgaggggcaaaaggagcgagcagggccgggacacgacgagagcccaccgcc

SEQ ID NO: 110209 - RNA, 57 nt, Homo sapiens
gacgcacaggaggacccagagaaggagggagccccagggaacccgagaaggccaaca

SEQ ID NO: 110210 - RNA, 72 nt, Homo sapiens
ggagccacgcaccggcacagggggggaggagggacaacacacaacgcaggcgcacagccgccccaacaacac

SEQ ID NO: 110211 - RNA, 75 nt, Homo sapiens
caacgaccacccaagcaggcaaaacaagggagaggggacaacagagccgacacagccaagaagcagagcaaaaca

SEQ ID NO: 110212 - RNA, 74 nt, Homo sapiens
aacaaaccccgaaagaggacagccgcaggacagaagacaaacggagagagagacggggcaccggagccaggagg

SEQ ID NO: 110213 - RNA, 84 nt, Homo sapiens
ggaccgcggggccaagcagagaggagccgcgacgcgcgcacggccacgccaacggcccagaggcaccagcggggacagagcaag

SEQ ID NO: 110214 - RNA, 70 nt, Homo sapiens
ggaacccacgcgcccgggagcacgagagccaacggcacggggagggccgaggcaaggacggacagaaagc

SEQ ID NO: 110215 - RNA, 82 nt, Homo sapiens
aacagacaaggacacgaaaaaccgccgagcgaggagaaccacacaagcccgggggaaaggcagcgcgcagcagcggcacaca

SEQ ID NO: 110216 - RNA, 60 nt, Homo sapiens
ggagacaccaccgaagcacgaacacaaccccgaaggggacaggaccgccaaaagggacag

SEQ ID NO: 110217 - RNA, 72 nt, Homo sapiens
cacaacaaggagcaaaaggaggagaggaggacagacaaaaggaggcaagacccaccccggggaagcacaccc

SEQ ID NO: 110218 - RNA, 78 nt, Homo sapiens
agaggaggaggcggccggccgagcacaggagggccgaggaacgcagccgccgccgcagccagcccagggagagcagcg

SEQ ID NO: 110219 - RNA, 84 nt, Homo sapiens
ggccaccaaaaccagcacaagaccggaggcggcagagacgcccaagccgcccggaggagaccccaggggcaagacggaagcaag

SEQ ID NO: 110220 - RNA, 78 nt, Homo sapiens
ggcccgccggaaaacacacggacgagccaggagcgacacgggggaagcacaggggacgcccgccacggcccgccagaa

SEQ ID NO: 110221 - RNA, 87 nt, Homo sapiens
agccagcggcccagccacagggaaccaacccagccgaccccccagcggaaaggaccagaagaggggcagccaggccggcccaacaga

SEQ ID NO: 110222 - RNA, 76 nt, Homo sapiens
aaagccaccgaaaacaggccgggggagcacccagaacagcagcaaggcaagaaaggcaagggaaaaaggggggcgg

SEQ ID NO: 110223 - RNA, 72 nt, Homo sapiens
ccccaaacgcgggaaagccccgaagacaggcccacgacaagccagcagggacaggagcaaggcgcgaagaca

SEQ ID NO: 110224 - RNA, 43 nt, Homo sapiens
ccgaggagccacgcagcaggcacgcagccagaggggccagaag

SEQ ID NO: 110225 - RNA, 75 nt, Homo sapiens
aagggagggcgcacgaaaagccgccagggagaaaagacgaggaagcccaaaaaccgcaagaaaggcacagaagaa

SEQ ID NO: 110226 - RNA, 32 nt, Homo sapiens
caggagaaagagagaacaaaacgacagaagca

SEQ ID NO: 110227 - RNA, 81 nt, Homo sapiens
gcggagaccacgacgggggggaggcggcagcgcaaccacgagacggccccaagggcgccggaggaggggccccccccccag

SEQ ID NO: 110228 - RNA, 82 nt, Homo sapiens
aaaggaggaggaaccggagaccccgaaaacggaagcgcagggagaaggaagaggggaaaagcggaagaaagggaaaagacac

SEQ ID NO: 110229 - RNA, 86 nt, Homo sapiens
gagaagcccagaagaggaagaagaggaaagaaaaggagcagggaggccacacaggcagccccggcgggaccgggacgccagcccag

SEQ ID NO: 110230 - RNA, 79 nt, Homo sapiens
acccagaggccggccaccgccccagcgacacgggagcaaaaagcggaaccacaagaagaaagcaacgacaagaacccac

SEQ ID NO: 110231 - RNA, 65 nt, Homo sapiens
cgccgccgccgccgcgccgcgccgcgccgcaccccgagcgaccggcgccgaccccgacagaacgg

SEQ ID NO: 110232 - RNA, 69 nt, Homo sapiens
aaaaacacaagagaaaagacggggacggacgaggccgccagcgcggagaaggagacgcaagcacaccaa

SEQ ID NO: 110233 - RNA, 74 nt, Homo sapiens
aaccaggagaaggagcccaggagcacggcacaagcaccagggggccacaagcgcagaggcaccgacagcaaccc

SEQ ID NO: 110234 - RNA, 72 nt, Homo sapiens
agaagagcagagggaccaccccagaacccggggacgcacgacgagcgcgaagggggaaaggacgagcaggga

SEQ ID NO: 110235 - RNA, 89 nt, Homo sapiens
ccggaggagcccccaggccaagggagaggaagaaagaccaaacgagagacaaaagagaacaacagaacgcaaggagaggccccaaagaa

SEQ ID NO: 110236 - RNA, 97 nt, Homo sapiens
ggaagacgagccgggaggaacggcccggaaacaggaggaccgccaaggggccaagggagagcggggccccccccaaggcaccccccggcggaacgaa

SEQ ID NO: 110237 - RNA, 72 nt, Homo sapiens
ccggagggcacacacaacacagcaacagacagaaacaccagacagcgacaggaccaagaaccgggaacgcac

SEQ ID NO: 110238 - RNA, 75 nt, Homo sapiens
ggccccgccgccccagcccgccccccgggccggcacagggaggggacccagaaaggcaaaccagccacaaacgca

SEQ ID NO: 110239 - RNA, 64 nt, Homo sapiens
ggagacgcagccgcccgggcgcaagaaagaagggcggagaacggaaaagcaccaggaagcagag

SEQ ID NO: 110240 - RNA, 56 nt, Homo sapiens
cccccgagagcgagaacagccagcaaccgcaaccaaaacgagacagcacgcgaccg

SEQ ID NO: 110241 - RNA, 82 nt, Homo sapiens
cagcagagaagaaccggccaggagcgagggccacagagaaggcccagcgagccagccaaacgagcaaacgccgggacgagcg

SEQ ID NO: 110242 - RNA, 43 nt, Homo sapiens
agaagaaagacagcgggaagagccagagaagaaacgacagccc

SEQ ID NO: 110243 - RNA, 80 nt, Homo sapiens
ggggcagggcaaccagcgcgccagcaacccagcccagggccagaggggcacgcccgagagaacacaaacagcgaggcgca

SEQ ID NO: 110244 - RNA, 85 nt, Homo sapiens
gcaagccgggcccggcaaccggccgccggggcccccaggccccccaccgcaggacagagccacgaaccccaggacagcagacgca

SEQ ID NO: 110245 - RNA, 68 nt, Homo sapiens
ggcaaacagagcacggacggcaaaaggacagagaaaggcaaaagaaacagcgcccgccacgaagaagg

SEQ ID NO: 110246 - RNA, 84 nt, Homo sapiens
ccggcggcggcgagccgcgcgcgcagccgacgcgggaagaagcgggcgcgggcagggaggccaacagacccaacccagaaggca

SEQ ID NO: 110247 - RNA, 50 nt, Homo sapiens
aaccagaaagcaggggaccacagacaacccagaaaagaaaaggccagggg

SEQ ID NO: 110248 - RNA, 106 nt, Homo sapiens
cgagagccgcccgggccagcggccgcgcacccccggccggaggcaccagcccaccggggaccgcaaggccgcggggcccaacaaggcaagacacagcggggaggga

SEQ ID NO: 110249 - RNA, 77 nt, Homo sapiens
gcggaagcagacacaggagccaggaagaggaaaacgcaaaaagcaaacggacaggcaccaaaaaaagcgaaggaaga

SEQ ID NO: 110250 - RNA, 113 nt, Homo sapiens
ggggcgaaagacaaagaagcaacacagaaacggaaaaggaaccacccaagagaaagaagaagacgaaagcaggcaccagcaagagaacgcaaaaacagcgcaaggaaaagaag

SEQ ID NO: 110251 - RNA, 82 nt, Homo sapiens
cggcagcggggaggccgcccggcgcagcggggaccggcggcggcgcccaggcacccggcccgggaccaggaccgaagagggc

SEQ ID NO: 110252 - RNA, 71 nt, Homo sapiens
agcggaggagggaagaacaggggccagggaaaggagcagagagagagagcagaagcccaagaaaagaggag

SEQ ID NO: 110253 - RNA, 61 nt, Homo sapiens
ccaagccaaccaaaaaacaagacgacaacaagagacagggccaggagggggagagaagcaa

SEQ ID NO: 110254 - RNA, 79 nt, Homo sapiens
cacaacagaccagagggacagacagaagagcacggggggggggagccccccaaaagaaacagcgccaaccaaacggggg

SEQ ID NO: 110255 - RNA, 67 nt, Homo sapiens
cgagcacgcagccaaccccagcaagacaccgagagaaaaggaaaggaaaaccaagaaagagacaggg

SEQ ID NO: 110256 - RNA, 75 nt, Homo sapiens
cagccccgagagcaaacagggcgcacaagacccggcaaaagggaagagcagaacagaaccagagaacaagcccac

SEQ ID NO: 110257 - RNA, 77 nt, Homo sapiens
agaagcccaaggcgaagaaagaacgaaggcaacgcaagggaacggagacaagaaaacgcagagaggaaaacccaaga

SEQ ID NO: 110258 - RNA, 51 nt, Homo sapiens
gccaaaggacaagcgaacggcagaaagacagcgcgggagccaggaaacgca

SEQ ID NO: 110259 - RNA, 67 nt, Homo sapiens
cgggacccgcgggccccggcccagcaaccgacaacgcggcccggcgacaggagcgcgcagcgaggca

SEQ ID NO: 110260 - RNA, 76 nt, Homo sapiens
ccaagaccaccacgaggggggacgagacacaagaaacccagaaagccagaagcgcacagcggaaaaaaagcgaaga

SEQ ID NO: 110261 - RNA, 82 nt, Homo sapiens
gcggagggagcggacgcgcgcgcagggcgcaggaggcagcgccaaagagacaaccaaccgggcaagcgcccaccggacccag

SEQ ID NO: 110262 - RNA, 75 nt, Homo sapiens
gcccgcaagacgcgagcaacaagagccaagaacccaaagcaaggcgagacaaggggccaaccagccagggccaac

SEQ ID NO: 110263 - RNA, 76 nt, Homo sapiens
ccacaggacaacccgaggagccaccagcgccacagaccgggccaaacaacccaggaggaagagacacgcggaggga

SEQ ID NO: 110264 - RNA, 83 nt, Homo sapiens
cgcggccgggacggggccggggccgaggccgcggagccgcggaggcaaggccgaggaaaggaggccgggcgggggcgcgcccc

SEQ ID NO: 110265 - RNA, 53 nt, Homo sapiens
caccgccggagacagccaagggaaacaaaaagccaacggaaaaagaaacggca

SEQ ID NO: 110266 - RNA, 51 nt, Homo sapiens
gcacccgcagcgcagcaccaggacaagccacacaagaaggagaaaaaaaag

SEQ ID NO: 110267 - RNA, 69 nt, Homo sapiens
ccccaacgagaagaccaccagcaggcagcgaaaaacaaggccggaaaacaaggaaaggacaacaccaca

SEQ ID NO: 110268 - RNA, 69 nt, Homo sapiens
cagacacacccacaacgcccaggaacaaaagaagcgaggggaaggaccacagcgcacccaccccaacac

SEQ ID NO: 110269 - RNA, 71 nt, Homo sapiens
caaagacgcccccccaggaaccccacagcaccgaaagagcaccgcaggacgaccgaaaacccagccagaca

SEQ ID NO: 110270 - RNA, 42 nt, Homo sapiens
aaaaagaagagaagcgacacgaacacacagcaggacgaaaga

SEQ ID NO: 110271 - RNA, 71 nt, Homo sapiens
gacagaggaccaaagcggaccagagacagggcccgagggcaggacagcaggcaccggcgaagcacagagag

SEQ ID NO: 110272 - RNA, 78 nt, Homo sapiens
ggggaccgcggagaccgccaccaggcccgggcagaagaagaagagcggagaaccgaacaggcgcagggagcccccacc

SEQ ID NO: 110273 - RNA, 82 nt, Homo sapiens
gaccgcccggacgggaagcgggaaagggcacccccggagcaacagaacgccggccggggagaacggcagaacacgacagagc

SEQ ID NO: 110274 - RNA, 85 nt, Homo sapiens
ccccgccgcgcccgcgccagccccgccccgggcaaagcccacggccgccgagcaggagaagacagcacggggagcccacaggcca

SEQ ID NO: 110275 - RNA, 80 nt, Homo sapiens
gaccacccccaaacggaaagggcaggaagaccaggacaaaacggggaggacgggagcccagaagaagagcagggccggca

SEQ ID NO: 110276 - RNA, 80 nt, Homo sapiens
cgggacagagggagccaggcagagagcgagccaaggcagcaaggagacgacagccggagagcgggcccggagcccagggc

SEQ ID NO: 110277 - RNA, 37 nt, Homo sapiens
gcaccgccagccaagggaaggaggaccgaggaaggaa

SEQ ID NO: 110278 - RNA, 71 nt, Homo sapiens
ggcagacaacacacacgcaggggaaaagaaacaaacaacaagaagaaggacaaggaacgaaggcaaggagg

SEQ ID NO: 110279 - RNA, 71 nt, Homo sapiens
gcagcagacccaccaagaacgaggccaggcgaggagagcgaacaaccccagaagaggaaggccgcggaccc

SEQ ID NO: 110280 - RNA, 77 nt, Homo sapiens
caagaccggaggcggcagagacgcccaagccgcccggaggagaccccaggaaaccgaagaaccagccccggggacga

SEQ ID NO: 110281 - RNA, 59 nt, Homo sapiens
ggaggaagcacgggagaagccagggggaagaagccagagccaagccggagaccgagaga

SEQ ID NO: 110282 - RNA, 47 nt, Homo sapiens
ccccccggaacccaggacagcagaccacagcccggcaggcccaaaaa

SEQ ID NO: 110283 - RNA, 83 nt, Homo sapiens
cggagcgcccgcgccagccgcgcacaacggggcaccgagccgaccgggaagccggaagcaggacgccgcccgaagcgggaacg

SEQ ID NO: 110284 - RNA, 66 nt, Homo sapiens
aaaccgccacaaagaaacagcgaagaccaagaaagaagaggcccagcacaagcggaagccccaggg

SEQ ID NO: 110285 - RNA, 76 nt, Homo sapiens
ccggccgcaggcgggacccggcggggcgcaccacagagaccggccaaaccacccagcaggaaaagagggccggaca

SEQ ID NO: 110286 - RNA, 73 nt, Homo sapiens
gcagcgagggcccggcgaggagaaccaacggcccgaaagagcgagacgacgggaccgaaggaccccgccagag

SEQ ID NO: 110287 - RNA, 79 nt, Homo sapiens
aaaaaaggaaagcgggggcccacagaaagacacacggagacaaaccgcgccaagagacgagcaaaacacacaaaggccc

SEQ ID NO: 110288 - RNA, 84 nt, Homo sapiens
gcgggcggcgagccacgggggccgccgcagcaccaggcgaccaccgcagcaccagcgcgggccgaacccacaaacaaagcacca

SEQ ID NO: 110289 - RNA, 101 nt, Homo sapiens
gaccccgcgacaaggacggacgcagaagaggcgagaaggaggccgggaaccgagaggacacacacaaacgcagaacagaaacaggagcggagaccccccag

SEQ ID NO: 110290 - RNA, 71 nt, Homo sapiens
gagaggggcagagaggcagaagggaggcagaaacacagcgaccgagagcacacccacagaggcagaccgaa

SEQ ID NO: 110291 - RNA, 74 nt, Homo sapiens
cgggaacggaacagaaccagaacaggaacccgaagacacaaagaggaaccagaccacagaaggaggggaaaaac

SEQ ID NO: 110292 - RNA, 50 nt, Homo sapiens
ccacccaagacacaaacggcgacacaggcgggcgcggacggcaggggcgc

SEQ ID NO: 110293 - RNA, 74 nt, Homo sapiens
ggcggggagcggcgaagccgcgggcgagggcagcggggaagaagaaaaggaaccgaggccccccggcgacacgg

SEQ ID NO: 110294 - RNA, 72 nt, Homo sapiens
cggcaggcgcaacagagcgccggcgggaaacgagcacggagcgcccacggagccacggaaggaaacgagcca

SEQ ID NO: 110295 - RNA, 67 nt, Homo sapiens
gcgcgccccggcccgcaccggcacgagaagaagaacagagacacgcaaaaaacgaagaacagagggg

SEQ ID NO: 110296 - RNA, 80 nt, Homo sapiens
gagagaaggacgacaagcccaccgaggagggaagacaaagaggaaccagacaaaaccgcaccggcagaaaaaaggacgcc

SEQ ID NO: 110297 - RNA, 75 nt, Homo sapiens
ggagaaagggaagcacgcgaagggggacacgccagcggcgcagccgacggaagaccgggagacaaaacaacagca

SEQ ID NO: 110298 - RNA, 84 nt, Homo sapiens
cgcccgccgcggcgcccgggaccaccacaaagaaaaagaaagaaaaggccggaggccgcccagaaggacacaacagccaaagac

SEQ ID NO: 110299 - RNA, 69 nt, Homo sapiens
accggagaagcaaggcggcccgcagcccagcacaccgccacagagcaacccagggccgcagagaggaga

SEQ ID NO: 110300 - RNA, 37 nt, Homo sapiens
gccagaaccgaccgcgcacagggggacacccacggcc

SEQ ID NO: 110301 - RNA, 92 nt, Homo sapiens
cggcggcgcagccccaaagcgagcgaagcagggcgccgccacgccgcaggaggcggagggcccggcaggaagagggccccgggacagggacc

SEQ ID NO: 110302 - RNA, 78 nt, Homo sapiens
ggcgaggacagggcccagaccgacgagcccggacgaggggcaggaccggggacacacgacgcgggacgagcccgccgc

SEQ ID NO: 110303 - RNA, 80 nt, Homo sapiens
gagcggacaagaagggacacacgcgccggcgcgcacacaccacgggcgaggcaacgagaacagcagcagcgaccagaggc

SEQ ID NO: 110304 - RNA, 82 nt, Homo sapiens
gccacgcaccggagagagcacaggccgaggcagcggggcggccgggcggggcagacacggccgagaagcccccccgggccgg

SEQ ID NO: 110305 - RNA, 75 nt, Homo sapiens
aaagaaccagaagcgagagaaaagcccccaaaagcagcacagaaggcgcagcgccaggccaccagaccgcgacac

SEQ ID NO: 110306 - RNA, 75 nt, Homo sapiens
gaagaaaagagaaaacgcagaagaaagaggcacaaagaagaacgggagcgccgcaaggggggcaaaccgagggac

SEQ ID NO: 110307 - RNA, 74 nt, Homo sapiens
gacaaaagaaggacggacaagaccccacacaggacgcccgcacccaggcggaggcagggggacacagccacgca

SEQ ID NO: 110308 - RNA, 78 nt, Homo sapiens
aggaccggcacgccagcccacacccccggccagccggcgccggagcgaaacacgacggaaggaagggccccacaccaa

SEQ ID NO: 110309 - RNA, 61 nt, Homo sapiens
acagcgccacagacagaaaaggagaggcaaaaaccaagggaaagaggagaggggccccgag

SEQ ID NO: 110310 - RNA, 99 nt, Homo sapiens
accccagccgaccgagcccaggagcgccacgcgcggaaggcagcgcccagcagcgcaggggagaagcagaccgcaccaggcgggaccccgaaaaagccc

SEQ ID NO: 110311 - RNA, 66 nt, Homo sapiens
cggcgcagaaaggggaggccgggaggacgaaggcggcgcaggccagccgcgcgggggaaacagaga

SEQ ID NO: 110312 - RNA, 74 nt, Homo sapiens
ggcaccggacgaggaaggaaggcgaccgagcgagaagacacgacgaagacagcgaacgcaaggaagaagagagc

SEQ ID NO: 110313 - RNA, 81 nt, Homo sapiens
aggcccggccacccgagaagggagacgacgcgcgggccgcgagcggggcgacccgaggggagaagcagaccgcaccaggcg

SEQ ID NO: 110314 - RNA, 58 nt, Homo sapiens
acaaacggccaagaagggccaccccacagacggagacaggggagggcccacaaagggg

SEQ ID NO: 110315 - RNA, 48 nt, Homo sapiens
aggacggaaagaaagccaggaaagggaaggcaggggaacccgggcaga

SEQ ID NO: 110316 - RNA, 86 nt, Homo sapiens
agcaagggcaacggggcacgcaaagaggaccgccaacaacagaacgcaagcaagccaagagagcagaaaaccgacccagcacaaaa

SEQ ID NO: 110317 - RNA, 80 nt, Homo sapiens
gccagagggcaagccaggccacggaccgcggagacccccagcccagagcgcaaacgaaaacaggcaaaagcacggagaag

SEQ ID NO: 110318 - RNA, 81 nt, Homo sapiens
cgggacaccaagaaagaaccagccgcgaacgcggccgggaggcagagcgaggcaccggcgccacaaggcaacacgcccacc

SEQ ID NO: 110319 - RNA, 67 nt, Homo sapiens
ggggagcgggagccccgaggccgaggccgcggagacgggggcacggaggcggaacaacaggaacccc

SEQ ID NO: 110320 - RNA, 63 nt, Homo sapiens
gcagaaacccaccagacgaaaacaacccgcgcacagaagggagcggcaccggagggccaaaag

SEQ ID NO: 110321 - RNA, 82 nt, Homo sapiens
ccaaccccagaaccccaaacccaggacacggccaaaagaagacccagacaagaaagaggaagacgaagccagaaaccaaagg

SEQ ID NO: 110322 - RNA, 75 nt, Homo sapiens
gcggaggcggggggaccggcgggcgggaggaccccccccagaaaaccaagcgaaaccccaaagggaagagacgcg

SEQ ID NO: 110323 - RNA, 72 nt, Homo sapiens
ccgcgagggaccagaaagcccccaagccagcagaagaccgagacaccaagccagaaaacaggaacagaagag

SEQ ID NO: 110324 - RNA, 62 nt, Homo sapiens
agaaacagcccaaagaccggacacgccaccacaccgacccacgacaagaacggagagacgag

SEQ ID NO: 110325 - RNA, 62 nt, Homo sapiens
ggcggccggccaaagccagaccccgcgaggcaagacaagaccaggcacacgaccaagaagca

SEQ ID NO: 110326 - RNA, 40 nt, Homo sapiens
aacaagaggcccggacacaggaaaggaaaagccacggcga

SEQ ID NO: 110327 - RNA, 85 nt, Homo sapiens
ggcagcgaagaagacgaaaaaaacccagggaccacgccagcaaggcgccaacaaccggaacacgacgagagacacagcagaggca

SEQ ID NO: 110328 - RNA, 72 nt, Homo sapiens
acggaaccccccgaagcgagggaagggcggacacaccgaacacagcagcccaacacagacaggaacccaagg

SEQ ID NO: 110329 - RNA, 77 nt, Homo sapiens
aacacacaacagaagacaagagcggggcccggcgcacccaccaccgccgcccacggcagcccagggacccgagcacc

SEQ ID NO: 110330 - RNA, 74 nt, Homo sapiens
ggccccacccccacaccggccccagcagccgagcggaacaacaagcccggaaggaaagaaaacaaagacacagc

SEQ ID NO: 110331 - RNA, 85 nt, Homo sapiens
ccgaggggagcgcggggcccggcagaaaggagacgacccaggcgcgccccaagccgggccaggcccggggcgccccaacaagacg

SEQ ID NO: 110332 - RNA, 66 nt, Homo sapiens
gcgagagaaacgcgaggacggggcccaggaacggaaaagggcagccgcacggggaaagagagggac

SEQ ID NO: 110333 - RNA, 73 nt, Homo sapiens
ccagaacagccgggcccaaagaaagggaaggacagaagcccccagcaacgcggaaccccaaaccagggaagcg

SEQ ID NO: 110334 - RNA, 74 nt, Homo sapiens
gacccgaacccacgacacggccggacgaacgacaccgggccccccccggcgaggacccacgcgcagcccaagaa

SEQ ID NO: 110335 - RNA, 65 nt, Homo sapiens
ggaaagcaagcgacccaggagccccagaaagcggcacagagaaagagagcgcccccagagcggac

SEQ ID NO: 110336 - RNA, 95 nt, Homo sapiens
ccgagaggaagacgagccgggaggaacggcccggaaacaggaggaccgggaggcgggcggcggggcggcacggcggccgccacacaggggagccg

SEQ ID NO: 110337 - RNA, 82 nt, Homo sapiens
gcagcccaaaccgcgggacacgaccagacagaagcggacccacaaaccgggagaccaagaacggcacacggacggagagaga

SEQ ID NO: 110338 - RNA, 79 nt, Homo sapiens
gccagcagcgccagcccggcccacccggcgggagccacgaagggcccaaggagagcgaggccacgggccgacggagaca

SEQ ID NO: 110339 - RNA, 71 nt, Homo sapiens
cgcagcacgaccagcaggaacgaccggagagaacagaaaaaaagcggcccgggaccaggaaagacaggaca

SEQ ID NO: 110340 - RNA, 79 nt, Homo sapiens
ggaggaccaggggggccggcgggcacccgacccccgccgggggggcagccagcacagaaaacccacggaaccaagaccg

SEQ ID NO: 110341 - RNA, 50 nt, Homo sapiens
gcgaggagacgggcgcacggagcgggaaagcaagcggagacccacgacgg

SEQ ID NO: 110342 - RNA, 67 nt, Homo sapiens
gggcgggcgacccaccgccggccacagcgcagaaggagaaaaggaacccaccaaacagaggagaggg

SEQ ID NO: 110343 - RNA, 85 nt, Homo sapiens
gcgggcccgggcgcggcgggcgcgcccgccagcgcccggagaacggaacgccccgagcgggagccgccaagcaccaagcaccccc

SEQ ID NO: 110344 - RNA, 39 nt, Homo sapiens
caagcagaaacagacaggaccacgcaacggcgccaaaca

SEQ ID NO: 110345 - RNA, 62 nt, Homo sapiens
gcgcccccgacccggacggaaaaccaggccgggagaggagaacaaccccgagacagaaaggc

SEQ ID NO: 110346 - RNA, 35 nt, Homo sapiens
cagccgagagccaggagggcagacagggacagaaa

SEQ ID NO: 110347 - RNA, 37 nt, Homo sapiens
aagacaaacgcagaggccaagggacgaccacgaaaaa

SEQ ID NO: 110348 - RNA, 83 nt, Homo sapiens
ggcgcccggcggagaccccgcgccggacccgaggcagcgagccgggcccggaagcaggggagggagcacagaaccaggcgccc

SEQ ID NO: 110349 - RNA, 50 nt, Homo sapiens
cggaaaaagacaccaccaacggaaaacaacacagggcaagaaaaacggag

SEQ ID NO: 110350 - RNA, 79 nt, Homo sapiens
aggggacccaaacaacagaccggcagaagaggccgaaagcgcgaacggggaggacgcgagcggaagagaagcaaaaaga

SEQ ID NO: 110351 - RNA, 76 nt, Homo sapiens
agcccagggagcggcggcagcaggggaggcaagcaggggggcaaaggaaagaaggcagaaagggaggccaggagcg

SEQ ID NO: 110352 - RNA, 61 nt, Homo sapiens
gaacagacagaaggagcaggaaccaaagggcagccccaggagcgacagcaggacccagggc

SEQ ID NO: 110353 - RNA, 84 nt, Homo sapiens
aacggcggaaagggcgggaaccaccccacaagccccccgggacgagaagaggaagacggagcagcaaccagccccaggcagaga

SEQ ID NO: 110354 - RNA, 76 nt, Homo sapiens
accaggccgaagggggccgggccccaagcagcaaccagaagcaggaacgcacagcaccgcccagcagcccggagcc

SEQ ID NO: 110355 - RNA, 69 nt, Homo sapiens
accaagaaccaaacgaccgacaccgcaagaccccgaagcccagaagaaaggcaacaaccgagaagaagg

SEQ ID NO: 110356 - RNA, 73 nt, Homo sapiens
ggaggagaaggaggaggaacggcacaaggaagaagcagaaaacacagagaaccaaccgcaacaccggacagag

SEQ ID NO: 110357 - RNA, 60 nt, Homo sapiens
cgaagagacgccaagaaagaaacggcgaggaaagagaggagccccggaaagaaaaggaca

SEQ ID NO: 110358 - RNA, 37 nt, Homo sapiens
agacagcacaaccagcgggcccccgcacccaggcgga

SEQ ID NO: 110359 - RNA, 78 nt, Homo sapiens
gcccgccagccccgccggacagccgaagcaggccacacccccagaaagagggacccaacacacaaggagcaaaccgac

SEQ ID NO: 110360 - RNA, 64 nt, Homo sapiens
gacgcaccgcaggcagacaaaagggccaaagaagggagagaggcaaagaaaccccaaagccagc

SEQ ID NO: 110361 - RNA, 73 nt, Homo sapiens
cggcccccggacagcagaaaccaagcagacaacgcagagggcgacgccaacaaggaagaaggagaaagacaaa

SEQ ID NO: 110362 - RNA, 76 nt, Homo sapiens
accggaaagcgccagaagaacgccgcccggggcaaacaaaaccagccaagcagaggagaaaaagacagcaccccag

SEQ ID NO: 110363 - RNA, 58 nt, Homo sapiens
agccagacccccaggcagaggcggaggcagggcgagaccgaccacgcaggcccgaccc

SEQ ID NO: 110364 - RNA, 82 nt, Homo sapiens
caaagcgcgccgccccgggcaaaagcacgcaccccgcgccgccgccccccaccaaggaagcccaagccccaccagacccgac

SEQ ID NO: 110365 - RNA, 77 nt, Homo sapiens
caaaacgcagccaccgccgcaccaaccacaaagggagcgggaaacgcacaacagagaacagaaaagacccgcagaca

SEQ ID NO: 110366 - RNA, 84 nt, Homo sapiens
ggacagccagggcgccagaagaaaacggcgagaggggcgagaacgccacgcgggccggcgaaagcgacagcgcgcgaagaaaca

SEQ ID NO: 110367 - RNA, 89 nt, Homo sapiens
ccgacgaggagagcacgacggaccaagacgagcccagcgcaaccccaagcgcccaaaggccagaccagaaggagcacaggcggaggccg

SEQ ID NO: 110368 - RNA, 80 nt, Homo sapiens
cagcccccccacaccgaccaacgggaacccccaaagaaggaggagacgagcaaggagagaacagcacacagaggcgcaag

SEQ ID NO: 110369 - RNA, 81 nt, Homo sapiens
ggaacgcagcagacggaaacggaggaaagaaccaaaggcaagaaccggagcaggagaaaagccggaaagaaaacgcagaaa

SEQ ID NO: 110370 - RNA, 87 nt, Homo sapiens
ggcccggcggcgggccgaggagccgggcgcaaggagcggaagaggcgaggaccggcccagccaggcccggggcagcggcgaccagag

SEQ ID NO: 110371 - RNA, 76 nt, Homo sapiens
gacacgcgggacagccaggcgcaacacacagaaccggcgcaggcaggcagccgaaacaggacccaggaagagccac

SEQ ID NO: 110372 - RNA, 82 nt, Homo sapiens
gccggcaggcggccgcagcaacccgccggcacgagccagggagccgccgggaccggcccgggagacgacaacccaaaccgaa

SEQ ID NO: 110373 - RNA, 78 nt, Homo sapiens
caccagcagaccacaagaagaccgccagcgaccgcccacacagggggaggaagaaaccccagaaaagaggcgcaccaa

SEQ ID NO: 110374 - RNA, 73 nt, Homo sapiens
cggcaaaaccaaggaagggaagccaaagcccaaaaagggaaaccagggaggcaacgccgcacaaccggcaaac

SEQ ID NO: 110375 - RNA, 70 nt, Homo sapiens
acgggcaggagccgaaagggaagcacacggaccagcagaacagaaacaaggagggagcaacaacaaggag

SEQ ID NO: 110376 - RNA, 37 nt, Homo sapiens
cacgaccccccggccagacaacagggccacccagccc

SEQ ID NO: 110377 - RNA, 52 nt, Homo sapiens
ccaggcaggcggggcacagcaggccgcccgcagcagccaacggaaggagaaa

SEQ ID NO: 110378 - RNA, 61 nt, Homo sapiens
ggcggcggagacggagccgcagcaggcgggagaccagggccagcccggccacaccccaggc

SEQ ID NO: 110379 - RNA, 58 nt, Homo sapiens
agcacaccaccaaggaacgggcgcagcgagaggaaaagagaaccgccagcaagagcgc

SEQ ID NO: 110380 - RNA, 75 nt, Homo sapiens
acagggagaaagggccccaagagacagcaagagcagccccggaacggaggaagggagccggagagaaaaagggcg

SEQ ID NO: 110381 - RNA, 45 nt, Homo sapiens
ggggacgcggacgcacggggaaccagaagaggccaaccagcacga

SEQ ID NO: 110382 - RNA, 85 nt, Homo sapiens
ccaggcccgagcgccaggaggaggaagaccgaccgccgccgcgcaccgcgcagagagacgaagagagaagcagggcagaaagagc

SEQ ID NO: 110383 - RNA, 73 nt, Homo sapiens
aaaaggaaaaacacgacggagaaaaacggagggagaaaaagcaagaggaaagcaggccaccagaggaccaagc

SEQ ID NO: 110384 - RNA, 77 nt, Homo sapiens
aaaccaaaacgcaacagaaacaacaggggcgagaaccagcgacggagcacgcgacggaaggacaaaaaagacggggg

SEQ ID NO: 110385 - RNA, 54 nt, Homo sapiens
aaccagaaaaccaaaggaggacaagagagaacggaaacgagaggagaaaccccg

SEQ ID NO: 110386 - RNA, 77 nt, Homo sapiens
gccagcaggcacccaccacggcgggcgcggccaggcccccgaaggggcgagccccgcccccggagagggaacagaag

SEQ ID NO: 110387 - RNA, 83 nt, Homo sapiens
acaccaaaaacaaaacgaaccaggacggcaaggacagggagcaaaaaaaaagaagaaaggaaaagccagaaaaaagagaagaa

SEQ ID NO: 110388 - RNA, 83 nt, Homo sapiens
caaggccaccgagcccgcaaaaccagccaaaccaggaaaggacagggacaagacggacagaaacgaacagcgggcgagccagg

SEQ ID NO: 110389 - RNA, 66 nt, Homo sapiens
gacacaagagccaacaaaaggcagaaggcgagccccaacagaccgggaggaacggggggcgggcac

SEQ ID NO: 110390 - RNA, 85 nt, Homo sapiens
gcacgcggcacgcaacagaacgaggaccggaccgccaaacgcccagcaaccaagcccgccaagaaagaccaagaccccgccacag

SEQ ID NO: 110391 - RNA, 40 nt, Homo sapiens
aagcgcaccgcggacgcacacagacacagggccacggggc

SEQ ID NO: 110392 - RNA, 60 nt, Homo sapiens
gagaggagcaggcgaacccacgccagaggcgagccaaaggagggagaaagaagagagacc

SEQ ID NO: 110393 - RNA, 76 nt, Homo sapiens
accagcaccgcagcaaccacccagaaacccccccagccaacacacggagcacagagagacccaagagaagggccag

SEQ ID NO: 110394 - RNA, 83 nt, Homo sapiens
gggaacccgccgcgcgccgcgaccccaagcagggcggaaaacaccccaaaagccaaaagggaaaggaaaagaccaacaacagc

SEQ ID NO: 110395 - RNA, 65 nt, Homo sapiens
ggacggcacagcccgccgaacccgaaaggagaggagaacagaagcggagaacacaaagccacaag

SEQ ID NO: 110396 - RNA, 80 nt, Homo sapiens
cccgaacggagagcgccacccgggacacagcgccaccccgagcagcggggaagcggccggaggaggcggaggccagccga

SEQ ID NO: 110397 - RNA, 71 nt, Homo sapiens
aacacacccccccggcagaaccgccgccacaagaaccaccaaaggcaagaacaacagccagacgaaagcac

SEQ ID NO: 110398 - RNA, 76 nt, Homo sapiens
cacccccggccggaggcaccagccgggaggccaccgccccaccagcaggcaacgccacagaccgccagcgccagga

SEQ ID NO: 110399 - RNA, 71 nt, Homo sapiens
gcgggacaggaggaacacagcaccagaaggaagggaggagacggaaagaaggagagcggccagagagaacg

SEQ ID NO: 110400 - RNA, 36 nt, Homo sapiens
agagaccagcgccacgaggaaaccgagaacaacgga

SEQ ID NO: 110401 - RNA, 76 nt, Homo sapiens
ggcggcgcaggcggccaacgagaggaacggccacgcgccaggaaaacaccgggaaaggcccaaaccggcgaaaacc

SEQ ID NO: 110402 - RNA, 61 nt, Homo sapiens
gacgacgggacacaaaaagcgggacaaaaaccgggaaagaccagcacacccacagagagca

SEQ ID NO: 110403 - RNA, 76 nt, Homo sapiens
cagaggccaggcagacccagccaaaccggaaaagaaggaggccagcgggacacacaaagaaagacgaaggacaccc

SEQ ID NO: 110404 - RNA, 117 nt, Homo sapiens
cggccaccaccccggggacgggcccccagcacacccagcggcggaccaggaagacagggacacagcagaggcacacgagcgaaggacagaccgggcaagcccccccaccggagcaca

SEQ ID NO: 110405 - RNA, 76 nt, Homo sapiens
caggcgccaacgccccggggagaagcgagacggcgcggacggacagaaggaacccccaccccgcgaccgcacaaga

SEQ ID NO: 110406 - RNA, 66 nt, Homo sapiens
aggcagcgcccccaaacggccggacaccacaaggaggggacacagcaccaacccgaccagccccag

SEQ ID NO: 110407 - RNA, 80 nt, Homo sapiens
caagaaaaacaaagccaaggaaaccccaacacagagccaagcgccaagaacagaggagcggaaacgcaggaggagagaga

SEQ ID NO: 110408 - RNA, 80 nt, Homo sapiens
cagccgcgaaggggcggcgcgcgccgggcgccggagagagaaccgagccaccgcaacggaggcgaaccggcaggagaaag

SEQ ID NO: 110409 - RNA, 75 nt, Homo sapiens
acaaacaggggccgaagcagagcccgcggcacaaacagaggaaacaccagaaaggaagccccaggaaaggacgcc

SEQ ID NO: 110410 - RNA, 55 nt, Homo sapiens
ccaagaagggacacacccgacaggcaaggcacacaaggaacaaaaaacaacagag

SEQ ID NO: 110411 - RNA, 58 nt, Homo sapiens
agcgcagcggcggagccccaccgcaggacccccgcgccagaggccgaacagacccaag

SEQ ID NO: 110412 - RNA, 54 nt, Homo sapiens
cccggaccaacagagagaaagccagaaaggagcagcagcgagacgacgggaccg

SEQ ID NO: 110413 - RNA, 77 nt, Homo sapiens
gacaaaaccaagccaaacacaagcagaaggagcgaagaagagaaggacacggaaacagagccccccacagagcacaa

SEQ ID NO: 110414 - RNA, 58 nt, Homo sapiens
ggcagccgaggccgggaaccagcgagggggggagaaggaacaagccgcccaaacagcg

SEQ ID NO: 110415 - RNA, 53 nt, Homo sapiens
gggccgcacgaaacaaccaagcacggcggcaaagaccacacagcgcaaaaaca

SEQ ID NO: 110416 - RNA, 116 nt, Homo sapiens
agaaacagcccaacaagaacgcgaaagcggagagaagaggagacaccaagcacaaaaaggacagcgcagaaaggccagacagggaccgaacgacacaacacaccaaaaagagaaca

SEQ ID NO: 110417 - RNA, 82 nt, Homo sapiens
gaggaccagacggacaacgaccacgcccaaaagagcgcaccaacccccacgggaggcaaccaaaaggacccaacaaagacca

SEQ ID NO: 110418 - RNA, 96 nt, Homo sapiens
agcacgccagacaaggaggaacggcaaagagaggaagaacaagagagggaaagcagagcccacagaagacccagcgcgcacccacagcaagaacgg

SEQ ID NO: 110419 - RNA, 74 nt, Homo sapiens
ccggggacaagcgcgggaacggcgcggaaggggccagcacgaaagcagccaggagaagagcacaagaaacaaga

SEQ ID NO: 110420 - RNA, 64 nt, Homo sapiens
gggacacgagggcgcccaagccagaaccgcgcgcaccgcggggccaccacagagcccgcaggga

SEQ ID NO: 110421 - RNA, 80 nt, Homo sapiens
ggaagcgcccgggccggaacccacgcgcccgggagcacgagagccaacggcacgggggcgaaaagccaggagcaaaagac

SEQ ID NO: 110422 - RNA, 76 nt, Homo sapiens
gcgcccccaagacacccaccacggccggagacccgccgcgagccgacaagcaccgccaaagaagccgccagggaac

SEQ ID NO: 110423 - RNA, 85 nt, Homo sapiens
acgcacagccaggacaccggaaccgggaaagggcgcaggccaaccaccaccgggaagagccaaccccagccccgacagcgaggac

SEQ ID NO: 110424 - RNA, 65 nt, Homo sapiens
aagagagaaggggaggcacacccgaccgagcagcagaaaaagggggcgagcaccagcacaacaag

SEQ ID NO: 110425 - RNA, 81 nt, Homo sapiens
cgccccagcccgcgaacgacaagcagaccggaagaccgacggaagaccacaccccgagggagcccaggacaccacgagaag

SEQ ID NO: 110426 - RNA, 58 nt, Homo sapiens
cccgcagcaacggagcaacgagggcaacgacaggggaaccccagggaccagcggacag

SEQ ID NO: 110427 - RNA, 81 nt, Homo sapiens
cccgcgcgccgagggcgaggcggacgcgcggcgcgcagcgaacgcccaagcaaaaacagggacagacaaaaccgccccacc

SEQ ID NO: 110428 - RNA, 51 nt, Homo sapiens
cgaccgccgcagaaacggaggagcaagggagcgagacgacgggaccgaagg

SEQ ID NO: 110429 - RNA, 41 nt, Homo sapiens
cccagcaacaagcggcaacaagggaagaagaggagaacgaa

SEQ ID NO: 110430 - RNA, 84 nt, Homo sapiens
aggcccggccgacggccacacggcggccgcagggcgccggagccccccagagacaccaggcgccgagaaggccagcagagaaac

SEQ ID NO: 110431 - RNA, 71 nt, Homo sapiens
ggaccccaaaccagagaacagagacagcccccaagagagggcaaggccaggccacacaagccccagccaaa

SEQ ID NO: 110432 - RNA, 50 nt, Homo sapiens
acgccgggacgaaccagaaagccagggaggcgccgcggagagaacggacc

SEQ ID NO: 110433 - RNA, 75 nt, Homo sapiens
gagcaaccgccaaccagaccaacaccggggggcgccagagaccagggggagccaaggggaaaggagaaaacacag

SEQ ID NO: 110434 - RNA, 87 nt, Homo sapiens
gcggcagccgcgaggaggcgcgggagggcgagaacgaccccgagacgagcgccacgaaggccgcgcccgccagcgaccgaagcccgc

SEQ ID NO: 110435 - RNA, 78 nt, Homo sapiens
ggccccgaggacgagcggacggaacagaccacagggaccaccggggccccccggacagaccacccagcccgacaggga

SEQ ID NO: 110436 - RNA, 73 nt, Homo sapiens
gggaaggagaaggaagacggcgaggcaaaccgacaccagcgacacaagcgcgagggaaccacagaggacaggc

SEQ ID NO: 110437 - RNA, 85 nt, Homo sapiens
aggaagcagacaaggacaggagaagagcaagcaccaggaggaagaagaggaggagaggaggcgcccaaggacagcccagcacgag

SEQ ID NO: 110438 - RNA, 56 nt, Homo sapiens
cacgaacgcccaccccccgaacccagccgcaccgaacaccagaaccgcaccgccgc

SEQ ID NO: 110439 - RNA, 81 nt, Homo sapiens
aaggagcagagagagagagcagaaggcaaaagggaaagcaaggggaagggcccaagaagacaccccaccagaaaccgaacg

SEQ ID NO: 110440 - RNA, 71 nt, Homo sapiens
gcgggagccaggacaaggacaagcaggagcgggagccccagcccgaaccgacagccacaagggcgcccgaa

SEQ ID NO: 110441 - RNA, 63 nt, Homo sapiens
agcccaacaaaagcaaaggacacgacgccagcaggaagaagagagggcgaaggaggccacaca

SEQ ID NO: 110442 - RNA, 66 nt, Homo sapiens
gaagaaaggacacagggcaggaagcgaaagggggcagacagaagagagacgagcaacccacgcaaa

SEQ ID NO: 110443 - RNA, 86 nt, Homo sapiens
accagacccccagcgacgagccgagaagcccacagaagcccggcgagagaacccaagcggaggccgcggggcccagcgagcagcag

SEQ ID NO: 110444 - RNA, 74 nt, Homo sapiens
ccgagagccgcccgggccagcggccgcgcacccccggccggaggcaccagcgcaacagcacccacccggagccg

SEQ ID NO: 110445 - RNA, 76 nt, Homo sapiens
cggacccagcgggccgacagagaaggccaccaaggacagggcagcaaggacaaccaccaccagcgagcaaaagaac

SEQ ID NO: 110446 - RNA, 82 nt, Homo sapiens
agaaaccgccaaagacggaaccgccacagcaccaaaggagccccggccaaccaccaacccaccgcccccagggcaccggccc

SEQ ID NO: 110447 - RNA, 77 nt, Homo sapiens
aacccgggacccaaccggagagggcccaggaccaagcaaaagacgaccaggagacacaacaggccaaagccaagaga

SEQ ID NO: 110448 - RNA, 79 nt, Homo sapiens
cgagccacccgcccgcccaaggcccgcgggcgggagaacggaaaaccccaacccggcccggggaaaaacagagaaaaca

SEQ ID NO: 110449 - RNA, 60 nt, Homo sapiens
cacaaggagaagagccgcaaaggccaagaaggaggcagagggcaccacagacaagaaagc

SEQ ID NO: 110450 - RNA, 73 nt, Homo sapiens
ccaaccgaagaaaacaagagagggaagggcaggagaaaaaaaggcaaaagaagaggcggaaccagggcagagg

SEQ ID NO: 110451 - RNA, 74 nt, Homo sapiens
agaccaaaacggccgggaaagaaccacaagcccacgggacacgcggcaggaacgggacaaaccggcgaccacac

SEQ ID NO: 110452 - RNA, 79 nt, Homo sapiens
aagcgagggggagaagcgaaacgccagaaaagacggggacccagaccccaccaccgacccggggcaagaggagcgagag

SEQ ID NO: 110453 - RNA, 80 nt, Homo sapiens
cagcccaaacaggcggcacaggaacggacgggagacacaggaagagcgggccaaccggggacgagccagacggggcaaag

SEQ ID NO: 110454 - RNA, 117 nt, Homo sapiens
aaccccggggcagggcaagcacgggaagaagcagcggacccgccaccacacggcaccggggggaagcgcgcgcggacggagggaacccgcagcagagcaacaggaaaggcgagacgc

SEQ ID NO: 110455 - RNA, 75 nt, Homo sapiens
ccgcaacaggagcagacggagaaagagaccacgagcccgaacaggggaggagcagcagccgcaccgggaggagcg

SEQ ID NO: 110456 - RNA, 60 nt, Homo sapiens
gcaggcaaaaggcggccagccacggaggccgaagaaggagcacgcccccgcccccggagc

SEQ ID NO: 110457 - RNA, 71 nt, Homo sapiens
ggaaccgaccagaaccaaaggcgcaccaagggcccaccaacaggacccagggaaaggggaggcaagcccga

SEQ ID NO: 110458 - RNA, 123 nt, Homo sapiens
ccagccaagcccagccaagcccagccaagccccgccgacgcgggcaccggagccagccccgcagcggcagccggcaccaggagaggacggacgcaagaagcgcagcgagcgggaagcaggcaa

SEQ ID NO: 110459 - RNA, 58 nt, Homo sapiens
ccagagcagaagggcgagagaagcagccggcacccgggccggccacagagaaccgagg

SEQ ID NO: 110460 - RNA, 74 nt, Homo sapiens
cccccacggacgcgcgagacaagaggaggccgggaacgggaaacgcgcgccgagaagccacccgccgagaggga

SEQ ID NO: 110461 - RNA, 85 nt, Homo sapiens
agaaaacggcgagaggggcgagaacgccacgcgggccggcgaaagcgggccaaccgccccccagcagcaggcacgggcgaacccc

SEQ ID NO: 110462 - RNA, 98 nt, Homo sapiens
cgcagggggaccggccgcggcacaccggagagcgacgggacccccccgcagaagcccagccccaaaaggcaaaaaggaccacggaccccgcccacgac

SEQ ID NO: 110463 - RNA, 73 nt, Homo sapiens
cacaagaccagccggggcccacaccggcaaaggcggacaaggacaccgcgaaaggcagcaccacagcaccaca

SEQ ID NO: 110464 - RNA, 81 nt, Homo sapiens
gggaagagacaccgagagaaggggcaccaccacgaggcgaggggccaaccaaggaggcgaggggccccccgacaaccggca

SEQ ID NO: 110465 - RNA, 69 nt, Homo sapiens
acccccggccggaggcaccagcagagggccgaggcagacaagggaaaggccgcgcaggggaccacccca

SEQ ID NO: 110466 - RNA, 80 nt, Homo sapiens
ccggcccagaccacccccccaccgcgcccccacgcaaaaaggccgggcggggcggcaccaccgagcccacgggcacggca

SEQ ID NO: 110467 - RNA, 60 nt, Homo sapiens
gcggaaggcgcgaggcaacaagcccgggaggagcggggacacgaggaccccccaaaggcc

SEQ ID NO: 110468 - RNA, 79 nt, Homo sapiens
gcacgccgggggcgggccggcgggccacgaccccacaccacggcgggggagagggcccagaagaagggacccgcccgcg

SEQ ID NO: 110469 - RNA, 72 nt, Homo sapiens
ggcggggaggaggccggcaagggggaccccacaccacaaaccgaggaaagaagggacagcagaaaacgcaga

SEQ ID NO: 110470 - RNA, 84 nt, Homo sapiens
agggcaccgcgcgaagcggccaaagccgcccagacggccaccggcgggaggaacaaaagaggaccagcgccccggcccccaaca

SEQ ID NO: 110471 - RNA, 56 nt, Homo sapiens
cccagccccgagacgggacagggcagaccgccagcagcacagcaagccacagagag

SEQ ID NO: 110472 - RNA, 75 nt, Homo sapiens
aaacgggaccacaccccggaagcacacaggcgcggggagcgccacagaaccgcggaaggaggaacaagcaacagg

SEQ ID NO: 110473 - RNA, 72 nt, Homo sapiens
gaggaagaaagaggacaaaaccgaacaccgagggccagaacagccaggaagcggcgagcagaagaagcagcg

SEQ ID NO: 110474 - RNA, 79 nt, Homo sapiens
caccccagcaccagcccagagggaaagcacaccaccccagccaacaggcgaagaaccccgccgccccggagggggaggc

SEQ ID NO: 110475 - RNA, 83 nt, Homo sapiens
gaggagggaaagaacgaccaaacaggccgaaaaaaaacacaggacacggaggggagaaacagaagaaaccgaagaaagacaag

SEQ ID NO: 110476 - RNA, 82 nt, Homo sapiens
aagaccagaagcgacagaggagagaccgccgggcgcaggcacaggaacaagccaccacccagggcaagcccaacagcgaaag

SEQ ID NO: 110477 - RNA, 56 nt, Homo sapiens
agcaaaaaacacagggacgagccaccagaggaaccagaaagagacaagaagggacc

SEQ ID NO: 110478 - RNA, 76 nt, Homo sapiens
gggagagagaccaaagacgagaggccagaccagaaggagcacaggcggaggccggcagacccaaaaaggccaggca

SEQ ID NO: 110479 - RNA, 52 nt, Homo sapiens
cgcagggcgcccccgcgggcggcaaagaaggggcgaccacagaggcccccca

SEQ ID NO: 110480 - RNA, 72 nt, Homo sapiens
aaccaccgagcaagacaacaccacgggaacccagcagaagccagccgccacgccgagccagccagcaccaac

SEQ ID NO: 110481 - RNA, 69 nt, Homo sapiens
cagacaacgacaagaaaacagaaacgacggagagaaaccacaaggggagcccagaagacggaagagaca

SEQ ID NO: 110482 - RNA, 82 nt, Homo sapiens
aaaccaagaggcggccagcaggaggcgagaagcgcgcaaacccgccccccagcccccggggagcggggccagggacaagggg

SEQ ID NO: 110483 - RNA, 58 nt, Homo sapiens
ggcacacccccgacccacgcacccgcagccaggaacaggagaacgagggacggcgaca

SEQ ID NO: 110484 - RNA, 61 nt, Homo sapiens
ccagcgggacgaggaccgagaccgcggccgggaccgaggggaaagggagcagcaccggcca

SEQ ID NO: 110485 - RNA, 67 nt, Homo sapiens
cagagaaaaacgcacccaaacaagagagaagcagggaaagagagggacgaaaccccagacacaagaa

SEQ ID NO: 110486 - RNA, 72 nt, Homo sapiens
cggcacgcaggcagcaagcacaccaacaggcaggccccggcgccacagggcggaggccggcgaagggagccc

SEQ ID NO: 110487 - RNA, 76 nt, Homo sapiens
aacacccccgaagaacacgagagcacgagaagaggccgaggcccggcacaaggggccaggagaagaagaagaccgg

SEQ ID NO: 110488 - RNA, 62 nt, Homo sapiens
gagcgagcagccggggcagcggggagcagagcggcgagacgaggacgcgcacaggaaaggac

SEQ ID NO: 110489 - RNA, 77 nt, Homo sapiens
aaagaaagagcaggacacaacccacggcaaaccgcaggaacagacaggaaaagcacgaagagaccacaccaggccgc

SEQ ID NO: 110490 - RNA, 78 nt, Homo sapiens
cgggcgggacgggggggcggcccggccccgcagaaccggaggaaccggaagaaccgcccccacgccccgcagaggacg

SEQ ID NO: 110491 - RNA, 76 nt, Homo sapiens
cagaagccgaacggccgaagaaagaagcagacaaggcgcccgcgaagagcccgcggccccaggcccccccccgccg

SEQ ID NO: 110492 - RNA, 74 nt, Homo sapiens
agcacaaacggggcggggccggggaacacacaggccaaaacagaagaggcaaagcccagccacagcagcagccc

SEQ ID NO: 110493 - RNA, 77 nt, Homo sapiens
ccggacaccaggacaagggggcacgcagccggggaccgcccggccgcgagccggcgcagacggacgcgggaaggggg

SEQ ID NO: 110494 - RNA, 60 nt, Homo sapiens
acaggcgccgccacgccgccgacaggaagaagacggcacgggacccccagcacaggcagc

SEQ ID NO: 110495 - RNA, 81 nt, Homo sapiens
aaccaaccggaaggaggacacgaagccagaagagagcaggccccaagacccaaacgaaccaggccaaaggggcccggaccc

SEQ ID NO: 110496 - RNA, 76 nt, Homo sapiens
agccccccgcccggcagcgccccgcgagaaaaaccgagggcacaagccaaagcaacgccagaagcaccagaacgag

SEQ ID NO: 110497 - RNA, 74 nt, Homo sapiens
gccggaaaccaaaccaacaaaaagaaggaaccaaggaaaagcaacggcgcaagaggcggggcgggcagaggaca

SEQ ID NO: 110498 - RNA, 61 nt, Homo sapiens
ccaggaccccggaagccagaaagaaggagagaggcgccgggggagacccaaccagaccagc

SEQ ID NO: 110499 - RNA, 72 nt, Homo sapiens
ccagcgggggacagaggcgacacgcaagaggcggccacccacgagccgacggcaaacgccagggagccacca

SEQ ID NO: 110500 - RNA, 65 nt, Homo sapiens
caaaagcacgcacgaaaccggcaagccagcggaggggagaggcgcggaacccccacaacccgaga

SEQ ID NO: 110501 - RNA, 76 nt, Homo sapiens
ccggaccgcggcagaagaaagcaagacccaggacaccccgaagccgagaaagcagggccccgagaaaggcagagcc

SEQ ID NO: 110502 - RNA, 54 nt, Homo sapiens
gaggagaagaaggaaagagaagacgaagagaccgaaggaagacaagggaaaagg

SEQ ID NO: 110503 - RNA, 61 nt, Homo sapiens
ggccgagccccgacggccacccggcgggccagcccggaacccggacaaacaacaccagcca

SEQ ID NO: 110504 - RNA, 71 nt, Homo sapiens
cgggcgcggggagggaacgggagaaagagcggccaccgcccacacgcacggcaacggaacgcaacaccagc

SEQ ID NO: 110505 - RNA, 83 nt, Homo sapiens
acacagaacaccgcgaaaacaggacaccaaacaggaagaccaagaaacagaccaccccaggaaaagagaaccgccgaaaagac

SEQ ID NO: 110506 - RNA, 69 nt, Homo sapiens
gaaaccgaacagaagggggcaaaggcacaaacaaggacccaggccacacggcgaccgcggggacgaggg

SEQ ID NO: 110507 - RNA, 74 nt, Homo sapiens
acagacgcaccacccccgcagcaggccgacggggccaggcaagacaccacccgaggggaaaggacggcggccac

SEQ ID NO: 110508 - RNA, 86 nt, Homo sapiens
cacagccccccaaaagacgggggacgccggagacccccccccacagaacgccaccagaggaagacgagagaagaggaggcagcccg

SEQ ID NO: 110509 - RNA, 44 nt, Homo sapiens
aagaaagagaacaaaaccccagaaggacagaaaacgggccccag

SEQ ID NO: 110510 - RNA, 83 nt, Homo sapiens
gggagggggaagcgggaaacccacaggaggcaaccacacagaggccccgacaagcccaccaggcccccgcgagaggcggaccc

SEQ ID NO: 110511 - RNA, 72 nt, Homo sapiens
gcagggcagggcacgcacacgggcagcaacggaaaagcagcaaccgaccaggcacggggcacgacccccaga

SEQ ID NO: 110512 - RNA, 84 nt, Homo sapiens
agaagccaccagggagcccgcgaaccggaaaggaccggcagaaaacccaccagggggagaacaagggcgcaacagaccgggaca

SEQ ID NO: 110513 - RNA, 70 nt, Homo sapiens
cagacacggcgagcaacgaccaaggggcaaagaaacaggaaagcagaagaaaccaaaggacgagagcaac

SEQ ID NO: 110514 - RNA, 74 nt, Homo sapiens
ccgggcaagagaccgacggcggagcaccgccccggcagaagcggcagcaaagaagaagagagggcgaaggaggc

SEQ ID NO: 110515 - RNA, 73 nt, Homo sapiens
cgacaacggcggagagaccccgcggcgggcgcacaccacgccgcaccccgccggagcgagcacccacgaagac

SEQ ID NO: 110516 - RNA, 51 nt, Homo sapiens
gccgcgcccgcccgacccgccaccgccaggccagcccccaaaacacaagag

SEQ ID NO: 110517 - RNA, 79 nt, Homo sapiens
cccggccgcccggcgccccggggacgccgccccccggagccggagcccacggagaggcccggagagaaggaaaacagag

SEQ ID NO: 110518 - RNA, 44 nt, Homo sapiens
cgccacagcaagaggaccccacccgcggaaaaggaacagaagag

SEQ ID NO: 110519 - RNA, 74 nt, Homo sapiens
aagaaggcaggccaaaccaccgaccaggaaggccgaaagaaggaaaacaccagcagggacagaaaaggaaaaga

SEQ ID NO: 110520 - RNA, 69 nt, Homo sapiens
gacaaggggcggaggaagggaggagacccgaccccagaaggcagagaagaacgaaacccacagaaacag

SEQ ID NO: 110521 - RNA, 70 nt, Homo sapiens
agcacggaacccaaaggcagcggagcaggaaggacagggaaaaacaggagaagcaagggcccacagagaa

SEQ ID NO: 110522 - RNA, 64 nt, Homo sapiens
aaagagcccggcgccgacccgcccgggggagagaccagacaaggccgacgcgcacgaacacggg

SEQ ID NO: 110523 - RNA, 83 nt, Homo sapiens
gggagacgagaccgaaccggcaccgcacaccggaccaggaaacggaggcgggagggcaaaaaaggagaaagccacaaggacaa

SEQ ID NO: 110524 - RNA, 56 nt, Homo sapiens
cgaaaaacagacaagggcaaaaacggacccaaagggggacagggaccgccaagcag

SEQ ID NO: 110525 - RNA, 76 nt, Homo sapiens
agaagcaacaaagcgaagaaccacaggggcccgggcgcgccaggcacagccaagagcggaccggcagcggccagcg

SEQ ID NO: 110526 - RNA, 84 nt, Homo sapiens
ggacagcaccagcgacgcagcacagccagagggaagccaaaaagggagagaagcaaaacaagcaggcaacagcagaaaaacagc

SEQ ID NO: 110527 - RNA, 95 nt, Homo sapiens
gcagccggcaaggccagaaaacccgcgagcaggaaccccaggaaacggccagagggaagaggaagcgcccagaagaacaggccccaagaagaccg

SEQ ID NO: 110528 - RNA, 66 nt, Homo sapiens
aaacaccgagcagaccagaagcgagcagcccaaacccccagcagagcaaaggcccgagaagcgggc

SEQ ID NO: 110529 - RNA, 77 nt, Homo sapiens
cgcggacgaccggagacccgccacaccagaagccgacaagccccggagaagcccaaagcagccgaaggcggaggaag

SEQ ID NO: 110530 - RNA, 79 nt, Homo sapiens
gcgcaccaccacgggaggggcccgcaggaaggacggaccaggggcagcccagaaacgccaccgaacgccaacccaggcg

SEQ ID NO: 110531 - RNA, 72 nt, Homo sapiens
cgaggagcaaccaaggccaaaacacgggcggggaggacccggggcccggccccgccaccgcaaaagcgaccc

SEQ ID NO: 110532 - RNA, 78 nt, Homo sapiens
gccaacagggaagagccagccccccaggcccacacaccagccagaggaaaaacagaacccaacaaaccaaaaacaaca

SEQ ID NO: 110533 - RNA, 77 nt, Homo sapiens
gaaaaccaagaaccagaacggccacagaacacaacaagggaggcgaggacggacaaaaggaaacggacgggaggcca

SEQ ID NO: 110534 - RNA, 79 nt, Homo sapiens
gcaaaaaagccaaaacaaagagccggcccaagacaaggcgaagacaagacccaaaaggagaccgagagcaaaagaaaga

SEQ ID NO: 110535 - RNA, 59 nt, Homo sapiens
accagacgggacagaaaaccagaggggacaagcagcagcaggagaggcgcggacaggca

SEQ ID NO: 110536 - RNA, 66 nt, Homo sapiens
gggaagagaaagcggagaccgcaggggggaggaagaaaccgaaacccaggcccacggcccagagga

SEQ ID NO: 110537 - RNA, 53 nt, Homo sapiens
ccagcgcacacaccaccacacacgaacggccgagcgaccaggagaggagcccc

SEQ ID NO: 110538 - RNA, 80 nt, Homo sapiens
acagagaggggaaaccccgaaaggggggcagggagagaaggaagggaccacagaccagcacgccggcgccacgaaccgag

SEQ ID NO: 110539 - RNA, 77 nt, Homo sapiens
aagaacccagggagagggaagaaaagcggagaaggagccaaacccaaagaggaagcacagagaggggccgcaggccc

SEQ ID NO: 110540 - RNA, 86 nt, Homo sapiens
cggcgccggccccggggagaaacggagacgcgggcgggaggccacgaccgaggagcgaagcgagaggagaagcgggggccccccag

SEQ ID NO: 110541 - RNA, 62 nt, Homo sapiens
gcccaaccaaacaagacaccccgaacgccgaagaaacccaagcgagggcgcgccgggcacca

SEQ ID NO: 110542 - RNA, 75 nt, Homo sapiens
gcgggcacaggaccgacacccagcccacacaccccagggacagcaacagagcgaacaggaggcagcacggcagga

SEQ ID NO: 110543 - RNA, 76 nt, Homo sapiens
acagcgaccacgcagagcacaccggccaacagacgagccacccaagcaaagaggccagacacacgcggccccacaa

SEQ ID NO: 110544 - RNA, 58 nt, Homo sapiens
caaaggagaacgcaacaagggcgaccccggcggagggcgagccccacccaagccagca

SEQ ID NO: 110545 - RNA, 72 nt, Homo sapiens
ccaccgccacgaagcaggagaccaagaacccaccaaccggacacaagacagagaggccgaaaggcgccagcc

SEQ ID NO: 110546 - RNA, 77 nt, Homo sapiens
ccaaacggcacaggaggacaaggggacgcagcaagaaagaaccagacaaccacacgcacagacgccgggaccggaaa

SEQ ID NO: 110547 - RNA, 74 nt, Homo sapiens
ggagaaaaaccccggaggaaaagccaggcaagaagagaagaacggggaggagcagaccgggggcgcacacggcc

SEQ ID NO: 110548 - RNA, 73 nt, Homo sapiens
caggccgagcccgggacccggaagaacgggggggcacccgaggaggaagagggcagggcccacggaaagaagg

SEQ ID NO: 110549 - RNA, 71 nt, Homo sapiens
caaccaaagaaaacaggagggcagcagagcaggcaggcaaaccacacccagcgggaacagagcaaggaaac

SEQ ID NO: 110550 - RNA, 38 nt, Homo sapiens
ccaaggaagccgccacccaggaagggcaagaagaaacc

SEQ ID NO: 110551 - RNA, 77 nt, Homo sapiens
cccgcccccgcgggcgccgggccaggacggaacgaagcgcgcggcaggcgcgcgccgccccaggccgcaagacccag

SEQ ID NO: 110552 - RNA, 78 nt, Homo sapiens
aaacagcaaggggccgaaccaaaagaacccagacccaacaagagcacaagagacgcaaccccaccgaagggacaacgg

SEQ ID NO: 110553 - RNA, 70 nt, Homo sapiens
agaaagagaagagcagcaagagcaccacaaccacacagccaaaaaaacaaagggcaaaggacacaccgca

SEQ ID NO: 110554 - RNA, 82 nt, Homo sapiens
ccagggcaaaggggaaacagcagagaccccagacgccaccacaacccccagacgcaagccaagaggacaccccaaggcaccg

SEQ ID NO: 110555 - RNA, 75 nt, Homo sapiens
cggacggacacccagcggcgacacgcgacgcgccaaaacccgcccggaaaggggacaccgacgaccaggcccgcc

SEQ ID NO: 110556 - RNA, 61 nt, Homo sapiens
gccaaagccgcccagacggccaccggcgggaggaacaaaaggcgcaaaaaccagacacccc

SEQ ID NO: 110557 - RNA, 81 nt, Homo sapiens
ggaaaggccaagaagggcggggagaccagaacaacccccacgccagcacagcgccccccgccaggagcaaagaagaccagc

SEQ ID NO: 110558 - RNA, 75 nt, Homo sapiens
cggcccgcggcggagcgggggcgggcgcacccccagggaagaaaaggacccccagagagcaaaaacaaacaaacc

SEQ ID NO: 110559 - RNA, 91 nt, Homo sapiens
gagcagccagagcggaccggggcagaccaaacggcaaggcacggagggaaggaagacacaagcccggaacagagaccaaagggagaacagg

SEQ ID NO: 110560 - RNA, 68 nt, Homo sapiens
cgccaggccgggccgcgggagccgaggcgccgaaggaccgacgcccgggaaccggaacaacaggaaga

SEQ ID NO: 110561 - RNA, 74 nt, Homo sapiens
gacgcaccgcaggcagacaaaagggccaaagaagggagagagggcccggcgagcagccaaggaggccaaggagg

SEQ ID NO: 110562 - RNA, 55 nt, Homo sapiens
gccacggcagacacacaacccgacccgacgagcggaggagggcgcaacggacacc

SEQ ID NO: 110563 - RNA, 80 nt, Homo sapiens
caaggccacaaaccaaacagacagaggagccaggcgggaaagaggagagccggagagaagggcagcccgggaaacagcaa

SEQ ID NO: 110564 - RNA, 76 nt, Homo sapiens
aggcggaaacccaaccaagaaggcccagaaaaaggcacaaacccagcacagagaagacggcgacaagcaaaagacg

SEQ ID NO: 110565 - RNA, 82 nt, Homo sapiens
aagacgcaagggcgaggcacaccagcaggaggcgccagaaagaacaacccgaacgcaaaagaagaaacggcgaggaaagaga

SEQ ID NO: 110566 - RNA, 82 nt, Homo sapiens
ggaacgacgcagagccgaggcagaagacggggcccgggaccacaggccccggcccagaaacaccagcaggaaaaaagagcgg

SEQ ID NO: 110567 - RNA, 79 nt, Homo sapiens
gcgcagccggagggggccggagccccaggcccccccaggggccgaggagaaggccgcccacacgcagccagaacccagc

SEQ ID NO: 110568 - RNA, 82 nt, Homo sapiens
caacacccagcacaccgcgccccggcaggacccggacggccagaaagaccggggaagaggaggcgaggaggcggagggcgag

SEQ ID NO: 110569 - RNA, 74 nt, Homo sapiens
cgcccccgcaagaggacggcgccggcagccgacagcacagacagccaaccccagaagagagagcaaccaccgga

SEQ ID NO: 110570 - RNA, 77 nt, Homo sapiens
ccccgcaacggcaggggcaggccaggaccgacagcccccacaaggcacaccgacaaacgaagcggggccaggggagg

SEQ ID NO: 110571 - RNA, 71 nt, Homo sapiens
gacagcccacccgaggaaaaaaaggccagaaacggaaacaagccaaccaagcagaaacagacaccgcacag

SEQ ID NO: 110572 - RNA, 72 nt, Homo sapiens
agcagaagacagacaaaaaccaagaaacaagccagacggaaccagaggcagccacccccccccaccaagccg

SEQ ID NO: 110573 - RNA, 60 nt, Homo sapiens
gggagggaaggcaagagccaacccaaaaccaaaggcacagaggagaacccgggagggccc

SEQ ID NO: 110574 - RNA, 63 nt, Homo sapiens
aaccgagaagacacaggaagagaaggccagggcacccaaaaacaaacgcggcgagaagaggaa

SEQ ID NO: 110575 - RNA, 72 nt, Homo sapiens
cacaggaacacccacgcagccaagcacgccaccaagcagccagcacaacccagccacagcgcaggcgggagg

SEQ ID NO: 110576 - RNA, 80 nt, Homo sapiens
cggcggcagacgcaggcgggaccagagcggaccaagacagaaaacggagccgaacccggcacagaggggggaacaccagc

SEQ ID NO: 110577 - RNA, 82 nt, Homo sapiens
ggaccaaacagcagaaacaagaaagcacaaccccaagggggccaaacgaaagcagaaggccagaacgaggcagccgacacga

SEQ ID NO: 110578 - RNA, 79 nt, Homo sapiens
gcccagcgagcgccccacacagagagcccggcagggaaccaacccagccacaaccaccccagggcgaccacagagcgcc

SEQ ID NO: 110579 - RNA, 43 nt, Homo sapiens
ccaaacagacgacaaagagcacgggaaagaggccagaagacag

SEQ ID NO: 110580 - RNA, 76 nt, Homo sapiens
cagggaagaagcaccaaagaggcaggaggggcggcaaagggaggcaaagcaagaaaggaaggagcccagcagcaga

SEQ ID NO: 110581 - RNA, 82 nt, Homo sapiens
cggagcagccagggcacagccacggccccgggggaacacaaagagcgacgacaggaaaagggaaaaaaagaggcaaggccca

SEQ ID NO: 110582 - RNA, 85 nt, Homo sapiens
caaggcaacaaggacaacaagagacgggacaagacagggcaaaggacagaccagcgccggccgcccgcaggacaccgagggccca

SEQ ID NO: 110583 - RNA, 58 nt, Homo sapiens
gaaaccagaacgaaaacccgcccaacaggggagccacagaaagcccgccccagacagg

SEQ ID NO: 110584 - RNA, 72 nt, Homo sapiens
acagcagaaacgcaccaggccaaagaaagagaagagcgaaaacgccacaacagagggggccagggcggggaa

SEQ ID NO: 110585 - RNA, 59 nt, Homo sapiens
ccagagaggcgagcgcggaggaccgcccaaagcccagagacacaagacaaggcgcccac

SEQ ID NO: 110586 - RNA, 64 nt, Homo sapiens
acagacagagccgggccagcccagagacaggagaggcacaacccaaaagaccacacagggaaac

SEQ ID NO: 110587 - RNA, 64 nt, Homo sapiens
cggcacagcagagaaggagcagagaacgaccaagaggaggcgcacggaagaccaggagagagag

SEQ ID NO: 110588 - RNA, 84 nt, Homo sapiens
ggccacccaggggcccccaccccgcgggcgcccggacggcgaaggagcaggggcgcgcagagaacggccggcaaaccgaggcaa

SEQ ID NO: 110589 - RNA, 76 nt, Homo sapiens
gaaaaacccagacacccgcgacagagacagccgacgaaaaggaagaaggggagacaagcggagcccggcagggaaa

SEQ ID NO: 110590 - RNA, 74 nt, Homo sapiens
cgacagcggcggcgagaggagaacaacaagcgacgcccacccgaagggaagaacgaggcaagggaagaaaccac

SEQ ID NO: 110591 - RNA, 79 nt, Homo sapiens
aacaagggagcgaggccgacccagccgccaggcagacagggccgaacagccccacaggcagacaaaaagaagcggcaca

SEQ ID NO: 110592 - RNA, 78 nt, Homo sapiens
aaagcaagagacagcgaggacagaaggaagggagcagcacgagaagacccagagcacccaccgacggcagacgagagc

SEQ ID NO: 110593 - RNA, 84 nt, Homo sapiens
cgcccgccacgacagcccggcggacagggggcccagggggccggagggccagggccccggagcaacaggccaacgcccggccag

SEQ ID NO: 110594 - RNA, 85 nt, Homo sapiens
cccagcccaggcggcgcggacggggcgggggggccccgaagccacgaggaagccacacaccggggcacggaccagaaccccgccg

SEQ ID NO: 110595 - RNA, 60 nt, Homo sapiens
gccaccgggccaccgcaacccagggggccagggacgagagacggggcgccggagccagga

SEQ ID NO: 110596 - RNA, 68 nt, Homo sapiens
gggggacgcagggaggagcgggacaccccggaagcgggaaaggcccaggaagacacgagaagcccgag

SEQ ID NO: 110597 - RNA, 80 nt, Homo sapiens
gaaggggagcaagaagcaggaaaggccggacaccagagaacacaaggaacgaaaggaagggaagaagcagaaccaagaca

SEQ ID NO: 110598 - RNA, 80 nt, Homo sapiens
gggggaggccgcaccgcagcgaggccaggaacccggggagaccccgacgggaggccgagacaacaggcacaaagagagaa

SEQ ID NO: 110599 - RNA, 83 nt, Homo sapiens
cccgcgcaagagacagacacagaccgagggcaaacgaacaaaaggaagcccagcgggcacaggagagaaagaccccggggcac

SEQ ID NO: 110600 - RNA, 80 nt, Homo sapiens
gcaggaaagcccgagcagaaagggacacagcaggccaggaaagacgaacaacaccccagaacagaggagcccaggcacaa

SEQ ID NO: 110601 - RNA, 62 nt, Homo sapiens
gaggagaagaagggaggcagagaagaccgggaccccacccgcgccagccgcgggacggggcg

SEQ ID NO: 110602 - RNA, 68 nt, Homo sapiens
agacaggagcacaacaaaagcaaaaggacagaccagaaggggcacaagaaggccaaccccaaaagaga

SEQ ID NO: 110603 - RNA, 77 nt, Homo sapiens
accccgaggcaacacagcagcagcaccacccggcgggcccacacaaggaggggaaaggggccagcgcccggaagccg

SEQ ID NO: 110604 - RNA, 41 nt, Homo sapiens
gaaacgccaagccaacccccccagcgacaagcgcccccccc

SEQ ID NO: 110605 - RNA, 52 nt, Homo sapiens
gcagcccggcggcccgcgccgccaggagaccaacaagagacgagaaaacaac

SEQ ID NO: 110606 - RNA, 81 nt, Homo sapiens
caccggcccgggccacggcagcgcggccacacgggagaaccgccagcgacgggaaggcaggacccacgcacgagcaacgag

SEQ ID NO: 110607 - RNA, 60 nt, Homo sapiens
aggaagaaaggcaaagcagccagcacagaagccaggcccagcggggggacggcccaccag

SEQ ID NO: 110608 - RNA, 73 nt, Homo sapiens
acacaaccggagcccagagccacgcaaagaaaacgggccacaacacaacccccacaccagaggaccgccacca

SEQ ID NO: 110609 - RNA, 81 nt, Homo sapiens
agagaagcgccgagcaaacaaccagagggaagaaaagcaaacgaaaccgggaaacaggcagcacaccgaggagcgacaggg

SEQ ID NO: 110610 - RNA, 67 nt, Homo sapiens
gggcggaggagcgcccggggccgggccagccaaccccagcaccccagggcagcagagacccccacgc

SEQ ID NO: 110611 - RNA, 87 nt, Homo sapiens
cggaccccagcacggccggcggccggagcacaaaccgcgcggacgacgaagcagcagacccagagagggaccagggccaaagaagag

SEQ ID NO: 110612 - RNA, 80 nt, Homo sapiens
accaacccagcaagccaccggaagaagggcagacaagcaccacgcagggcgaaccccggcccagccccaccgaagaccag

SEQ ID NO: 110613 - RNA, 72 nt, Homo sapiens
aaagaggaacaacacggagaaagagggcgaagacccagaagagacaagcaagacggccaaaggcgaagaagg

SEQ ID NO: 110614 - RNA, 81 nt, Homo sapiens
ggagcggccccccccagggaaggagggccccggagcagccacaccaccgaggccccacccagcacgagcacagccccacca

SEQ ID NO: 110615 - RNA, 34 nt, Homo sapiens
cccgggagcgggacacaggagacccagggccggg

SEQ ID NO: 110616 - RNA, 75 nt, Homo sapiens
cagcgaagcaccgagagaccaaacgagaaccagaagaacgaaaaggcagacgacgagagaagagaaacccaaaga

SEQ ID NO: 110617 - RNA, 58 nt, Homo sapiens
ccagccgcggcacaagggcacagcacccacgaggaggaaacaccaaggaagccccgcc

SEQ ID NO: 110618 - RNA, 64 nt, Homo sapiens
aagggcagaaggaaaggcagaaaaggagcgggaaagcaagcggagacccacgacggcggcagaa

SEQ ID NO: 110619 - RNA, 83 nt, Homo sapiens
gggcgaagccaagcacacgaagcagcgggccagcccacaacagccacggcccgggagggaagagagcagcaagccgggacaga

SEQ ID NO: 110620 - RNA, 74 nt, Homo sapiens
agcgcgggcaccccacgcggggaaaccgagccaacgaggaacggacaaaccaggagcacagcagagaaacaaac

SEQ ID NO: 110621 - RNA, 74 nt, Homo sapiens
ggacgaacagcaaagaccgcgcccagcgaaggagacaagcgcaagcagccagagcccgggcgcaaagaaccagg

SEQ ID NO: 110622 - RNA, 82 nt, Homo sapiens
gcacaaggaccgcggacagagacaacaccgagagagaacgccaaagggcacaccacacggaacaacaagaccggaacaaagc

SEQ ID NO: 110623 - RNA, 59 nt, Homo sapiens
cggccaagaacagaggaagggaaaacaggacaggagaagaacacccccaagagcaaccc

SEQ ID NO: 110624 - RNA, 84 nt, Homo sapiens
cccgcgccaggcggacggcacccgaaaggccggccccaggggcaaaggagcagagaacgacaagccacacgaggacagcccgca

SEQ ID NO: 110625 - RNA, 82 nt, Homo sapiens
agaaccgcccaaagcgcacagagcggggcaacaacccagacgggccgacgccaccgccgagcccagaccggaacagacgggg

SEQ ID NO: 110626 - RNA, 49 nt, Homo sapiens
cagaagcaaagcgaagcaaagcggagagcacacgagggacgagccggga

SEQ ID NO: 110627 - RNA, 80 nt, Homo sapiens
cacaaaacccagacaccgacgggccgcgaggggaagaggaagcaaagccaaggcgggagcaggcgaaccacgggcccgcc

SEQ ID NO: 110628 - RNA, 78 nt, Homo sapiens
acccgcagccgcacccccggcggcagcacgaaagaccagaagcggagacaacagccagcgcggaggaacccccgcaca

SEQ ID NO: 110629 - RNA, 76 nt, Homo sapiens
agccagccggggccaggcacgccagcggggacaagacgccgaaaaccacagccgcaaagccagagagagcccagag

SEQ ID NO: 110630 - RNA, 55 nt, Homo sapiens
aaacgggcgaagcgacgagccgcgaggaggaccgcggcaagcgggagcggaccca

SEQ ID NO: 110631 - RNA, 77 nt, Homo sapiens
agcgaaaggaggagcgcaacgcgagaacagcacagaagaggggacccacgagcagccaaaaaaagaagcaaaagacg

SEQ ID NO: 110632 - RNA, 48 nt, Homo sapiens
gcacagaagcccgcaagacgcgagcaacaagaggagcaggcgaagcga

SEQ ID NO: 110633 - RNA, 79 nt, Homo sapiens
gaaaccagagagggaagagcgcaagacagcagccacacccagcacggaacagcaaacgagaaggaagacacagaaagaa

SEQ ID NO: 110634 - RNA, 74 nt, Homo sapiens
aaagagcaaacaaccggggcagacaacagagaaaagaaagccgagggaaaaaccggagaagagaaacaaaagga

SEQ ID NO: 110635 - RNA, 61 nt, Homo sapiens
ggaacaccaaggaccaaaagaacacagcacggggccaaaaagagagaaaaaccagaaagaa

SEQ ID NO: 110636 - RNA, 53 nt, Homo sapiens
cagcacccaaaagaccaggagccacaaaggagggagccaaaagggaacgcgga

SEQ ID NO: 110637 - RNA, 82 nt, Homo sapiens
caaagccgagcaagaacacagcagagggcggaaaaggacgcagcagcgcccgcccggaggacccccgggacaagcccaggaa

SEQ ID NO: 110638 - RNA, 79 nt, Homo sapiens
ggacacgccaaaccgagcacagaaagagaccgcccgcccaacgaaaaaaccgggaagaccgacggagccccagcagaag

SEQ ID NO: 110639 - RNA, 95 nt, Homo sapiens
ggccgagggcaggacccgcaggccagaccccgggagcccagccaccacagacagccacaggcgacccaacaagagcacgacaacggcggagacac

SEQ ID NO: 110640 - RNA, 80 nt, Homo sapiens
gcaacgaacaccacgcaccgcagccgcgagagaggcaagccgggggaacaaaggagaacagggaaacgagcaggaaaaac

SEQ ID NO: 110641 - RNA, 62 nt, Homo sapiens
agagccgaacccaccgagccagggagaaaaggcacagagagaaggacagacgcgggaccccg

SEQ ID NO: 110642 - RNA, 77 nt, Homo sapiens
aagccaaaagaaggcccgggaaagcacaaagcaagagacagcgaggacagaaggaagcagggcagaaaagaacagac

SEQ ID NO: 110643 - RNA, 86 nt, Homo sapiens
ccgaacaccgcgcccggaagcccgcggccggaggagccgcaggggcccggacaaggaggaagaaaacaccggagcccaagacacca

SEQ ID NO: 110644 - RNA, 49 nt, Homo sapiens
gaaaggcccggagaaaccgccaccccccgcagaaacgcaggccaacaaa

SEQ ID NO: 110645 - RNA, 56 nt, Homo sapiens
cccagccccgcccgcccccagcccgggccaaccgccccccagcagcaggcacgggc

SEQ ID NO: 110646 - RNA, 70 nt, Homo sapiens
agagaaaacaagagaagcgaaacgcaacgaccggggcagacagaaacagggagcaagcaggggagagaaa

SEQ ID NO: 110647 - RNA, 80 nt, Homo sapiens
ggcgaagcgcgcgccgcgcccggaccccaggcaaaaacaaccaggcagagagacaagcaggagcgaagcaggacaacaag

SEQ ID NO: 110648 - RNA, 70 nt, Homo sapiens
caacaaaacccaaaggagggaaaccgcaaggcgaaggccagaacacagaagccacgagcaagggggagca

SEQ ID NO: 110649 - RNA, 59 nt, Homo sapiens
gggaagaggaccaaagcgaacacaccgacccccgaagagcagaagaaacagagcgcaag

SEQ ID NO: 110650 - RNA, 71 nt, Homo sapiens
cagaacgccaggaccaaaacagggagaaacacagccagaagaggagaccacggagagaaaagagaccagag

SEQ ID NO: 110651 - RNA, 70 nt, Homo sapiens
aaaaggaagcaacaagagcgcaacaagagccagaagaggcggccacccacgagccgacggcaaacgccag

SEQ ID NO: 110652 - RNA, 79 nt, Homo sapiens
agcgaagcgcacggaaggaagcagggccgagaaagacaacaggcacaaagagagaaggaacacccacagggcagacaga

SEQ ID NO: 110653 - RNA, 80 nt, Homo sapiens
agcgccgggcggaccagcaggaaaccgaggaaggcagggaccggaaagaacaaaggcccaccggaagagcggcgaaaaag

SEQ ID NO: 110654 - RNA, 70 nt, Homo sapiens
acagggacgagggggcggaagggaccccgacggagagacaaagaagacggagggggggccagccaccgcg

SEQ ID NO: 110655 - RNA, 79 nt, Homo sapiens
gcaccagcggaacaagaagagccagagggagggagaccccagcagagccgccagaggaacagaaaaagggccaaaaacg

SEQ ID NO: 110656 - RNA, 105 nt, Homo sapiens
cgagacggaggcgaggcaaacggggggcgcggagggaccagcgagcggcagccgcccaaaacacaaaccaaagaagaaacccgaaggaccacagagaaccaaaac

SEQ ID NO: 110657 - RNA, 83 nt, Homo sapiens
accccccaacggacgcccgcccaccgcccgaaccggaagaaaacgccagagaagcagagcagcccggagcgaggggagaccgg

SEQ ID NO: 110658 - RNA, 71 nt, Homo sapiens
ccgacgcgaggggacaaaggcgcaagcgagaggaaacgggccccaaggcgaccgggaagcagcaaaagacc

SEQ ID NO: 110659 - RNA, 86 nt, Homo sapiens
cgcgaccgccgccagcgcccgagcccgggcgcgccaggcacagccaagagcggaccggcagcggccagcgcagcggccggagcaga

SEQ ID NO: 110660 - RNA, 58 nt, Homo sapiens
gagagcagaagaggagccaggaaggcccggccaacgcaacagggagcccacgcaagag

SEQ ID NO: 110661 - RNA, 77 nt, Homo sapiens
ccggagcccagaagacagagggcgagaaagggcagcaagacacgaagccgagaaagagcagcgacaacaaggaggcc

SEQ ID NO: 110662 - RNA, 68 nt, Homo sapiens
gaccgcccagcagcccaggccgagacgaaaggcagaggccgagaaacaagcagcaagaaaagaacaag

SEQ ID NO: 110663 - RNA, 71 nt, Homo sapiens
aagggcccggggcaaagcacagacaggagaaagaagacagccacagaaagcccaagacgcagaagacagaa

SEQ ID NO: 110664 - RNA, 69 nt, Homo sapiens
acaaagacgacagcagcgcgcaggaaaccgcagaaaggaagagagaccaaacaccaagcgcccaggggc

SEQ ID NO: 110665 - RNA, 75 nt, Homo sapiens
caggaaagcaaaacgcccccaccacgccaccaaagacagaagcacaaccgaaaagaaaagaccaaaggaagcaac

SEQ ID NO: 110666 - RNA, 83 nt, Homo sapiens
cagaccagagcacgaaaacccggccaaggacgagggaccggaaccccccggacgacagagacagggcaggccggccaagggca

SEQ ID NO: 110667 - RNA, 70 nt, Homo sapiens
ggcaaccccaccggccgacagccgcgacggcgagcccgggccgcgcccgaggcagccaaggccgaaacaa

SEQ ID NO: 110668 - RNA, 73 nt, Homo sapiens
gccgcccgcgcggaggcgcggccgacggacaaggcacgaggcgcggcgaccaccacagcagagcccggcgaag

SEQ ID NO: 110669 - RNA, 59 nt, Homo sapiens
gcaaaccccccccacacaacgccagcccgacaacaaaccagccggcgggcgccacaacg

SEQ ID NO: 110670 - RNA, 96 nt, Homo sapiens
agaagccaaagaggagcggccaagaaagcagcacacaggcacagggcggagaacggaaaagcaccaggaagcagagaggaccgcagaagggaagga

SEQ ID NO: 110671 - RNA, 86 nt, Homo sapiens
aagagcaaccacaaaaaagccaggcccccacccaccccacaaccaaaggagaagaccacggagacgaaaagcacaggggaacaaag

SEQ ID NO: 110672 - RNA, 66 nt, Homo sapiens
cagcgcgagccaccgagacaggggcgaaggagaaagaaacacccaaaacagcgccggggaaacaga

SEQ ID NO: 110673 - RNA, 77 nt, Homo sapiens
ccgaccccagagcggcgcggacaggaccggcagacagagagggccgagagcacgaagggggggacaggaagcagccc

SEQ ID NO: 110674 - RNA, 68 nt, Homo sapiens
agggcagacccggcgggagaggccaagcgggaccgccagaacaagcgcaacaggagacgaacccagac

SEQ ID NO: 110675 - RNA, 79 nt, Homo sapiens
gaacagacacggggaagcgcaaaaacaagacggggcgccccacagaggggcgacggggggcggggcggcccgcgacgag

SEQ ID NO: 110676 - RNA, 61 nt, Homo sapiens
cgacggcgagaagcaggaacggaagaaacggacacgggccaaaccgcaccgcaagacaagg

SEQ ID NO: 110677 - RNA, 83 nt, Homo sapiens
ggaaaaagccaaggcagaggcgaccggcgcccacagggcaacaggaagaagagacacgaagagcacggagcggaagaggagac

SEQ ID NO: 110678 - RNA, 71 nt, Homo sapiens
cgaggacggaggacggagaggaccgcaccagcacgcccacccagaggggcccgggcagagggaaagcagag

SEQ ID NO: 110679 - RNA, 75 nt, Homo sapiens
cagaacgaacccccccccccggggagaagggccggagagcagagaccaaaacgggacaccaagcagaaacagcga

SEQ ID NO: 110680 - RNA, 68 nt, Homo sapiens
gcacgcacgaaacagaaacaggcacccaaaggaagcacgcgcgcggacaagaccagaaagaaaagaac

SEQ ID NO: 110681 - RNA, 58 nt, Homo sapiens
gcgcaggccccccacggagaggagaagcacagggaacaccagaggcgggaccacgggc

SEQ ID NO: 110682 - RNA, 86 nt, Homo sapiens
ggaccggccgagaggaagacgagccgggaggaacggcccggaaacaggaggacaaggaggcccgaccaacccagagaagagcagca

SEQ ID NO: 110683 - RNA, 82 nt, Homo sapiens
caggaacggaaaaaacaggcacagggcgggcagccccaggcccagagacggcgccgcgggggcccacacacacggccacgca

SEQ ID NO: 110684 - RNA, 80 nt, Homo sapiens
cgcagagggaaaagaacgggagaaacagggagaggcgaagaagcagaagaaagaaggcaagccaccaacccacgaaaaag

SEQ ID NO: 110685 - RNA, 76 nt, Homo sapiens
cacggggagcacgccgcgacgggaggcgacgccgcagcggaaacagaccaagagaggcgcgcaccacgcagccacc

SEQ ID NO: 110686 - RNA, 68 nt, Homo sapiens
cagacacaacacccaaggccgccccccccacacaccagcccgcgcagaccacagaagcgccaaccagc

SEQ ID NO: 110687 - RNA, 84 nt, Homo sapiens
ggagcgcgaaggccgggacccggccccggcccacaggggggggcaaacccgagagaacgggagaaggaagccaacaccggagcc

SEQ ID NO: 110688 - RNA, 77 nt, Homo sapiens
accagaaccagcccgggaaagacgaccgacacggagcacaaagaccagaagaagaaggacgggagagaaaaccaagc

SEQ ID NO: 110689 - RNA, 56 nt, Homo sapiens
caccgcaccggcccccacccaaggagaggccaagggaccgacacaagaagcagcca

SEQ ID NO: 110690 - RNA, 74 nt, Homo sapiens
aacagaagcagagaaaaaaggacaccaaagccagagaccacaggagccaacccgcggccaccagcggaagaaag

SEQ ID NO: 110691 - RNA, 78 nt, Homo sapiens
cggacccacagcagcagcaccgcccagaccagagggagaaaaaaaaaacccagaggcaaggcgacaacgaagcagacg

SEQ ID NO: 110692 - RNA, 82 nt, Homo sapiens
aagggcgcgccaacgcaggaccgaaggcccgccacgcccgggaggaagaaccaacagagaaaaaaaccagaaacaacccaaa

SEQ ID NO: 110693 - RNA, 75 nt, Homo sapiens
cgccccgccagcgccagacggacgaggcggcggagaacaagcggcagaccgggaagccggaagcaggacgccgcc

SEQ ID NO: 110694 - RNA, 68 nt, Homo sapiens
ggacccggaaaaccggcccccaacgacaaaaggagaccgagaagcaaagcgccgggcaccagcaagca

SEQ ID NO: 110695 - RNA, 74 nt, Homo sapiens
cacccaaaagaccaggagccacaaaggagggcagggggccagggcagccagggccaggaaacacagagggcgag

SEQ ID NO: 110696 - RNA, 71 nt, Homo sapiens
aagcccgcaacaagaggaggcccagcaagacaagacaagagcgagcaagccgccgcagcaagccagagacc

SEQ ID NO: 110697 - RNA, 80 nt, Homo sapiens
ccaaggccacaccaggcagcccccaaacccggcccaggacccaaagacaggaccacgcaccagcagagaaggaaagcaaa

SEQ ID NO: 110698 - RNA, 75 nt, Homo sapiens
agcaccacacaacagaagaaacagggaaccacgcgcggacgaacaccaacaaggaggagagaaagaacccacgca

SEQ ID NO: 110699 - RNA, 80 nt, Homo sapiens
ggacacggggcagacacaacacgaggggcgccgcgggacgcagaggagagccccggacccccgggagacgacaccggggc

SEQ ID NO: 110700 - RNA, 75 nt, Homo sapiens
cagacgcagggcgcccccggggggagcaagcacaaaaaagccgacgcccacagcccagcggaggcacccaacaac

SEQ ID NO: 110701 - RNA, 70 nt, Homo sapiens
gaaacacaaggaaagcgacgacggaaccggcgcgggcccgccaagcaagagaaaggagaagggcagggca

SEQ ID NO: 110702 - RNA, 68 nt, Homo sapiens
gccccggccgaggggcggcggccccaggacagaaagcgggacacaagcaggagcacagaccccgaaaa

SEQ ID NO: 110703 - RNA, 81 nt, Homo sapiens
aagaggcccgggacagccccccacccaagcgaaaaacccacaaggagaccggaaacgagagaaacgaagacgaagaaacag

SEQ ID NO: 110704 - RNA, 69 nt, Homo sapiens
cagcaccaacggaaccccaccggaaagacaggaagagaggacaccgagaaaaagggccggccgcagacc

SEQ ID NO: 110705 - RNA, 52 nt, Homo sapiens
aagacccacaggaccgaagcgaggggaaccccgccggagaagaacacgaaaa

SEQ ID NO: 110706 - RNA, 83 nt, Homo sapiens
caagagaccgaagagccgaggcgaggagcagcggggcaagaacacggaagggcaggagggaacaacagcaaagcagcaccgaa

SEQ ID NO: 110707 - RNA, 71 nt, Homo sapiens
aacacgacagaaagaaaggccaaagcagcaggaggaaacaccaaggaagccccgccaacgaagaaaacacc

SEQ ID NO: 110708 - RNA, 67 nt, Homo sapiens
acgagaccgcgaaacacgacggcggggagagaaaacccagcgccaaaggaacaaagagagaagcggg

SEQ ID NO: 110709 - RNA, 55 nt, Homo sapiens
cacccgcagaagcgcaaaagggaagacgagggcagaggccgagagacccgcgaac

SEQ ID NO: 110710 - RNA, 76 nt, Homo sapiens
gccggagcagcggacccaggcaggaaaccagagaaacccaggccagcaaagacacacccacaagccacagaaaaca

SEQ ID NO: 110711 - RNA, 83 nt, Homo sapiens
caccaaccggaagcgcaacagcgaacagaaaacaaaggccaaacaaacagacgccagcagggaggcccagcgagagaccagag

SEQ ID NO: 110712 - RNA, 79 nt, Homo sapiens
gcaccgcccccgcggccgcccccggggaccagcgagcgcgggggccgagacaacaagaaggggaggaacaaaagcgcaa

SEQ ID NO: 110713 - RNA, 78 nt, Homo sapiens
gcgagcccgcggaaccgcagccagggggaaacaccccgagccgaggccgacaagagaacccccaccggaggcgacagc

SEQ ID NO: 110714 - RNA, 74 nt, Homo sapiens
gcacgcgaggaggaaaggcaccccaccagaggcaaaagccaagaaggcggaaggaggaaggccacagacccaca

SEQ ID NO: 110715 - RNA, 84 nt, Homo sapiens
acaccccacaggaccccagagcgacagcccgggacaccaagaaagaaccagagcaccggccagaacaagccaaggagccaagac

SEQ ID NO: 110716 - RNA, 87 nt, Homo sapiens
agagaggcaccgggacggaccgagaccggaccgagagcggaccgagagcgcgaaacgcacgagaaggagaagacccgggaaggcgac

SEQ ID NO: 110717 - RNA, 73 nt, Homo sapiens
gaacagaccagggaaaagagcgagagaccaacgggcaagcaaccgaggagaaaagagcgggccaccgcgacag

SEQ ID NO: 110718 - RNA, 71 nt, Homo sapiens
ccagccccgcgcgacgagccgccgcagggcgaaggcgaggacccccagcccccagagccggcccccgggaa

SEQ ID NO: 110719 - RNA, 55 nt, Homo sapiens
gagaggagggggcaccgagcaacgagggcagacacgggcgcagccccgagcccac

SEQ ID NO: 110720 - RNA, 75 nt, Homo sapiens
ccccgcaagaagggccgggggcgagccggagcgaccccggcaggaccagccgcccggagaagacaggggaaaaag

SEQ ID NO: 110721 - RNA, 77 nt, Homo sapiens
agagggggaaagccaaggaaaaacggagagccacaaaaaaggaagcgaaaagcgccccacacaaggaaaagacggag

SEQ ID NO: 110722 - RNA, 72 nt, Homo sapiens
agggcagaggaagcgccgccaggcccgcaggaccgccggagacagggcaagcacaggaagagggcggcacgc

SEQ ID NO: 110723 - RNA, 75 nt, Homo sapiens
ccgaagcagcgccaggaaaaacaacgaacgagcaaggaagggccaaggcagaccccacaccggagaacgcaacca

SEQ ID NO: 110724 - RNA, 73 nt, Homo sapiens
agcagaagaagcgaggagaagaagaggcggaccacaaggagccacaacaaaacagaagcgcagaaaacagcga

SEQ ID NO: 110725 - RNA, 87 nt, Homo sapiens
caggccccaccccccagaaagaagaggaaagacgagcccaggagacgcagggcccgcgcgcggaggccggcccggagggagaacacc

SEQ ID NO: 110726 - RNA, 79 nt, Homo sapiens
aaaaagcgggaacgcaggacccaaagcccccacacaaggagagcaagcagggagggcccacgaaggacagagaagaaag

SEQ ID NO: 110727 - RNA, 86 nt, Homo sapiens
acagcccaccaggccaccacgcggcgggccggcacccacaacacaagacagaccccaagcgcgcaggccacgccacagaggcaacc

SEQ ID NO: 110728 - RNA, 53 nt, Homo sapiens
ggagagaagcgcggagccccaaggcaaagagcacacgccggagccgggaagaa

SEQ ID NO: 110729 - RNA, 66 nt, Homo sapiens
gggccccggggcggagcaaaagcagaggccgccacccaaaccgacggaggagaaggggaaagcaca

SEQ ID NO: 110730 - RNA, 79 nt, Homo sapiens
gaaggagggcagcccccccacgcaccaaaacggggcagccgaagaggaagcagacccggacaaaagggcccccaacgcc

SEQ ID NO: 110731 - RNA, 72 nt, Homo sapiens
ccccagagagccggaacaccagccgggcccgcacaccaccggggccagaccaccgccccaaggagacccgcg

SEQ ID NO: 110732 - RNA, 78 nt, Homo sapiens
gagaagcaaaggcccgaaaaaagacagagaaacagggacacagaaggaaggggcgggacaggccagggacagcccaac

SEQ ID NO: 110733 - RNA, 79 nt, Homo sapiens
aggaagaaagcacagggacgagacagaacaacgagagagagcaaaaacaccagacaagaacaaggcgcccgcgaagagc

SEQ ID NO: 110734 - RNA, 73 nt, Homo sapiens
aacacccgccaccagcgacaagaaggaccagagaaaaggcacagaacaaggaacgagggccaccgagaacccc

SEQ ID NO: 110735 - RNA, 73 nt, Homo sapiens
cgagcaggcaccccgaaacccgacagggcggaggaagacgaacagaacgaggagcccacgccaaggagagacc

SEQ ID NO: 110736 - RNA, 72 nt, Homo sapiens
aggaccgagacaacacggggcaagcaagaacagaccgccacaccagaaagagaaggaagaccgacaagcagg

SEQ ID NO: 110737 - RNA, 73 nt, Homo sapiens
ggcaccacaaaaaggacaggcgagagccaaccaaacccagccccgaggacaggaaggacgcagacggcacggg

SEQ ID NO: 110738 - RNA, 53 nt, Homo sapiens
cggcggggagcgcagcgcgccccccagggcagggacgaggccggaaggggcca

SEQ ID NO: 110739 - RNA, 83 nt, Homo sapiens
cccgccgggaaggaggaagcgcaggcgcggcccgcgcccgccgcgccgggagcagcaccgcggggccagcgagaaacagggaa

SEQ ID NO: 110740 - RNA, 73 nt, Homo sapiens
ggaggcccccgcgacaggggaccggagcggcggcaaagaccacgaaccccgaacccccaaagaacccggacaa

SEQ ID NO: 110741 - RNA, 74 nt, Homo sapiens
acagggagggcagaccgggaccagccccgggcacccccaggggaccaacccaggacgagacaagggcaacgaga

SEQ ID NO: 110742 - RNA, 89 nt, Homo sapiens
agccaaaaggcgaccggcaacacggacacccacagcggggcggcggcggcggcggcgcggcccaaaagaacacaccacagccacagcac

SEQ ID NO: 110743 - RNA, 67 nt, Homo sapiens
agaaagagagcacccacagcagaaaagccgagacgagacggcaaggccagcagagcccaagggcgcc

SEQ ID NO: 110744 - RNA, 73 nt, Homo sapiens
gaagggagcccagccacaccgcaaaagagcggaccaggcccaagcaaaaagaagacggaacaagaaaggacca

SEQ ID NO: 110745 - RNA, 97 nt, Homo sapiens
cacaaccaccagaagaacgacagagaggagggagaacaagcaacggcgggcggacccagaacgccggaggacccggccaaaccacaggcacaaccac

SEQ ID NO: 110746 - RNA, 79 nt, Homo sapiens
ggagagacgcgaagaagaagagggaaggacggagcagggacaagacggacagaaacgaacagcgggcgagccaggggag

SEQ ID NO: 110747 - RNA, 68 nt, Homo sapiens
agggcccgcaaggccacagcacgggggaaagacaaggagccgggccgagaaaccgaaccagagaccag

SEQ ID NO: 110748 - RNA, 80 nt, Homo sapiens
gcaggcgcggcccgcggggcgccaggcacgcgaggcccccagaaacgaaggaggcccaaccacaaaaggagccgacggaa

SEQ ID NO: 110749 - RNA, 68 nt, Homo sapiens
aacaaaagacgccagaagagaaccacaagcaaagaaggcaccgaaggggcaagacaaaggcccaggga

SEQ ID NO: 110750 - RNA, 73 nt, Homo sapiens
accaggacagaaaagacaggcgccaggagcacagaagagcgaggagggcagagcagaggacagcagcacacgg

SEQ ID NO: 110751 - RNA, 54 nt, Homo sapiens
aagcagcccgccgagccccggaacagcacagacaacagcagcgccgagaaaccg

SEQ ID NO: 110752 - RNA, 79 nt, Homo sapiens
ggaccacccagaggagcaacagggaggcccacagccagccagaacaaccacaacccacaaccaaccaaccacaaaccaa

SEQ ID NO: 110753 - RNA, 74 nt, Homo sapiens
gcgacccggagacagcccaaaacccggaagagcgccccaggagaaacaaccaaaaacagacggagaagagcaaa

SEQ ID NO: 110754 - RNA, 82 nt, Homo sapiens
caccaggcccaaccaaggccgggaaggcaagaagaagaacaggaggaagaaaagaaaaagaaaaaagacgacaagaaaaaga

SEQ ID NO: 110755 - RNA, 56 nt, Homo sapiens
ggagcccggcagagcacaccgcaagggggacggaagcggcagcgggcagccggccc

SEQ ID NO: 110756 - RNA, 73 nt, Homo sapiens
cgcaacagagcgccggcgggcgcccgagaggaggcgcccggccgccgggcacccgaccggggcggaggaacag

SEQ ID NO: 110757 - RNA, 71 nt, Homo sapiens
ggaggaagaccgggaggaagagggcgcaagggggaaggaagcaggcccaggcgagccaaagcagaccccca

SEQ ID NO: 110758 - RNA, 49 nt, Homo sapiens
acggggagaaaggacggaaccagccagacaggccagcggggaacgcggg

SEQ ID NO: 110759 - RNA, 75 nt, Homo sapiens
aaagggcgcaaggcccgagcagcaaacacaaacaaccccggcagccgccgcaaagggacgacgaagggacagcca

SEQ ID NO: 110760 - RNA, 80 nt, Homo sapiens
gccggaggagcagccagcgggaggcggcggcgagcggccagcgcagaagacgagaagccaggaggagaagcggcccggca

SEQ ID NO: 110761 - RNA, 82 nt, Homo sapiens
agccggagcgcgaaggccgggacccggccccggcccacaggggggggcaaacccgagagaacgggagaaagcgccacaagaa

SEQ ID NO: 110762 - RNA, 64 nt, Homo sapiens
gaaacaccaccaacaaaccgggcgcccgcgccggcagaggaggcgagcacccgccagggagagg

SEQ ID NO: 110763 - RNA, 73 nt, Homo sapiens
gacaaaccggagaaggagccaagaaagagaaggcagcggaagagcgcaacagaggaaccgcacggaaaaggac

SEQ ID NO: 110764 - RNA, 74 nt, Homo sapiens
gcccaggaaggacaaagagaaacacagcccaaagaaacacacccccccacaacaaggcccaaagaaaagggacc

SEQ ID NO: 110765 - RNA, 73 nt, Homo sapiens
gggacaagggccaaggccaacagacgaaaacaggcccagaacagaaagaggaacaaaagaagacaccagaaga

SEQ ID NO: 110766 - RNA, 35 nt, Homo sapiens
ccgaccccccaagcagaggaagcacccgcgagaaa

SEQ ID NO: 110767 - RNA, 72 nt, Homo sapiens
cccgcccccgccccacgaagccagaaagaagccacccagagagaaccaggccaaggaagcgacagccaggac

SEQ ID NO: 110768 - RNA, 51 nt, Homo sapiens
gccggccggcggcaaagggggagagacaaccagagcggaaagggagaaaag

SEQ ID NO: 110769 - RNA, 57 nt, Homo sapiens
gacaccggggacagacagggagagacgaggcgaaagaaacgggccccaaagccccga

SEQ ID NO: 110770 - RNA, 80 nt, Homo sapiens
gaggaggccccccagccacgggaaccaaggagcagggacaagacaggaagcccaagcagcaaccaaaagagccaaggacc

SEQ ID NO: 110771 - RNA, 66 nt, Homo sapiens
gacacccaagccgcacagggcgggcaggaaccggcaggagccagaaccgaggagggcggaccaccc

SEQ ID NO: 110772 - RNA, 78 nt, Homo sapiens
ggaaggccgggaggccgccaaaagcggaggcaagcacaaacggcccagggaaagacgaccaggcaaaagaacgggagc

SEQ ID NO: 110773 - RNA, 67 nt, Homo sapiens
acagaggcacagaagagaagaagagaacgagccaaaaggacaaaccagacgaagaaagccaacgaac

SEQ ID NO: 110774 - RNA, 64 nt, Homo sapiens
cgccggcgaccgaggggagagggaacgcagcgaaagcggaacggagggagagcacggcgcacca

SEQ ID NO: 110775 - RNA, 53 nt, Homo sapiens
cagaaacagaagaaacccagggggggcaaaccgagggacacccagcgagcaca

SEQ ID NO: 110776 - RNA, 77 nt, Homo sapiens
ccgccgccccccggccgaaaaggcgaccgccccaaggaaccacggaacaagcagaaagcacgaacaacgagaacaag

SEQ ID NO: 110777 - RNA, 66 nt, Homo sapiens
ccagcaaagcaaacgcccaaagggccgacaaccaagccacgaagggaccagggccaacaggaggca

SEQ ID NO: 110778 - RNA, 78 nt, Homo sapiens
gcgcgcccgcgcggcggaggagagggaccagaccccacaagaaaacacacaaccacaggcccaagcaaacacaccaac

SEQ ID NO: 110779 - RNA, 80 nt, Homo sapiens
gcagccgccgcgcggcgccaccacccggcccgcgccgccacccgcccccgggcaggcccggccgaaaacgagccgaagcc

SEQ ID NO: 110780 - RNA, 70 nt, Homo sapiens
gcggcggaaaaccccaaaaggacaaaggaaggccgcggacccccccccccccaccccacaggagaagaga

SEQ ID NO: 110781 - RNA, 102 nt, Homo sapiens
agccgcccggcccgcaggagaggaaaaggagcgagcagacgacaagccgggagcgggcggccaaccaggaagagacaggcacaaagaaacaacggggaacac

SEQ ID NO: 110782 - RNA, 91 nt, Homo sapiens
caaacccagagggcccacaccaccggacacaggcagaacggaagaagaggcaccagaggaccgccgccccgggcggcgcgacgggacaccc

SEQ ID NO: 110783 - RNA, 83 nt, Homo sapiens
aaaagagcaggggaaaaggaaagggaagggcggacccagagaaaacggaccaaggaaggaagagaaaccagaagaacaggacc

SEQ ID NO: 110784 - RNA, 72 nt, Homo sapiens
acaccacgcaaaacaaaagacccaaaagagcaaacagaacgggaggcccacaggaaggaaccaaaacccggc

SEQ ID NO: 110785 - RNA, 83 nt, Homo sapiens
agcccgcgcccccggcacggccggggcgggccggggaacccgagcaaccccgagaagagaagaaccccaaggccggaacagcc

SEQ ID NO: 110786 - RNA, 70 nt, Homo sapiens
ggccgcagagagacaagaacaaacggacaccacaaaggccacgaacgacgcacggaggccacaacaccac

SEQ ID NO: 110787 - RNA, 76 nt, Homo sapiens
gcgcgccgggacaaagcaggagagacccgccaggggaccgggggaccccgccagcgggaggcggagggcggaccca

SEQ ID NO: 110788 - RNA, 69 nt, Homo sapiens
aggccgccaggccgcagacgcgaaggaacggcaaagccgcgcagacaaggcaggaaccgacgcccaggg

SEQ ID NO: 110789 - RNA, 78 nt, Homo sapiens
caggaccccacccccaggacaggccggcgaggagagacacgacaagacaccgaggaggagcaccccggcgccggagcg

SEQ ID NO: 110790 - RNA, 51 nt, Homo sapiens
caagaaaaagagccaaacggagaacgagacgacgggaccgaaggaccccgc

SEQ ID NO: 110791 - RNA, 81 nt, Homo sapiens
gcggaagccgccgggaaacggaggaaaaaaagaggcgggaggcgcggcaaaacgcagcggaaccaaaagacgaaaccagcc

SEQ ID NO: 110792 - RNA, 65 nt, Homo sapiens
agcggcgcggaagcgggagaagcgcgagacggcacgaggccggcagaaggacccacggcagagac

SEQ ID NO: 110793 - RNA, 74 nt, Homo sapiens
caccaccaccccaggggggggagaaggcaaaggaccgcggcaagcgggagcggacccacccaagccaccgaacc

SEQ ID NO: 110794 - RNA, 81 nt, Homo sapiens
aaccgcacgggcaaccccgaagacgacaagggccgaacaccaacagaggaagaaaggagagccgcagaagcaagagaaagc

SEQ ID NO: 110795 - RNA, 77 nt, Homo sapiens
gacccgcagcgcagcagaccacaaaggcagacacaaccccagcgaaagggcagccaagcaggaccacccaccagcca

SEQ ID NO: 110796 - RNA, 75 nt, Homo sapiens
caccaaggaaagcagaagacaaaggagaaggagaaacggaggacgcccccacacaagccaacacgggcgccggag

SEQ ID NO: 110797 - RNA, 60 nt, Homo sapiens
ggcacaagccagaggcagccccgagagcgcgggccagagccaccggacgagacaaccgcc

SEQ ID NO: 110798 - RNA, 82 nt, Homo sapiens
agagaggagggagaacacagaaacccgccccgggcagaagagacaacacagaaaccagggcggaggcaggaacagcagcaaa

SEQ ID NO: 110799 - RNA, 91 nt, Homo sapiens
gagcgaacaccagccgccggcaaaccgggcacccgaaccaccccacagcaggacaaggcacgaggcgcggcgaccaccacagcagagcccg

SEQ ID NO: 110800 - RNA, 81 nt, Homo sapiens
aacagcgaaggcaaagaacggagcaaagaaggacgcagagccagccacacagccccacaggcccagccacagggaaccccc

SEQ ID NO: 110801 - RNA, 79 nt, Homo sapiens
cgcagcagcgcccccacaagagcccagcgccgaagcgaggcccccccacaagcggaagaggagaaccggaaccgggagc

SEQ ID NO: 110802 - RNA, 80 nt, Homo sapiens
gggaaaggagaggacccggagccggccgaccggaccccagcggggacaccaccagaaggaaagcagagcaaaaccagaaa

SEQ ID NO: 110803 - RNA, 67 nt, Homo sapiens
cgcaccaaacagagcagcagcagcagagagaaacagcagggacacacaggaagacgaacacggaacg

SEQ ID NO: 110804 - RNA, 70 nt, Homo sapiens
agaggaggggcagaaagggagcgcgacgacaggaagagagcgacaggacagaaggacacgagaagaggag

SEQ ID NO: 110805 - RNA, 69 nt, Homo sapiens
gaaggcgaggacagaaacgggagaaacacaggaacaaacgacagagaaaccaggcggggaacaagccag

SEQ ID NO: 110806 - RNA, 68 nt, Homo sapiens
agcccgcaagaggccagcgaaaaccgaagacagaagaaagggagcccccaagaacagcgagcacagga

SEQ ID NO: 110807 - RNA, 61 nt, Homo sapiens
gcggcggcagcgagccgggcccaccaggccgcgaaggggggacccaggaggccgagagccc

SEQ ID NO: 110808 - RNA, 82 nt, Homo sapiens
acagaaacaaaagcaacaaagagggaaacagaacgacagcccgcaccgacgccggcggccagccagagagcacgccggccgc

SEQ ID NO: 110809 - RNA, 84 nt, Homo sapiens
agcggaaagacgacagcaacccgaagacagggaaaagcaggagaagaaaggaagagacgacagccagcaggcaggagcccgccc

SEQ ID NO: 110810 - RNA, 80 nt, Homo sapiens
aaggaaaaacagaacggcaaaccggaaaaaaacgggcggccacagggaccaacgcacaaaagcaacacaagcagaaacaa

SEQ ID NO: 110811 - RNA, 47 nt, Homo sapiens
aacgcccgcgggacacgcagccacccacgcacccgcggccaaaacac

SEQ ID NO: 110812 - RNA, 71 nt, Homo sapiens
aagacccacggggcagaacacaccgagccaaagggacgagaagaccacagggaaagcccgccagcggcgcc

SEQ ID NO: 110813 - RNA, 66 nt, Homo sapiens
gaacggcacaaccccccaagcggcacgccccaaccacggagccaggggaaccgcccaccaccacca

SEQ ID NO: 110814 - RNA, 79 nt, Homo sapiens
ccggccaaaaagacacagcggaagaagaagaagagcagacggcagccaccaaggcaggcaggacagaagaccagcgccc

SEQ ID NO: 110815 - RNA, 76 nt, Homo sapiens
cgcgcacccccggggagagcgacgaggacgagacgcagaccacagcgacgaggacgacgccggaggagcgcacagc

SEQ ID NO: 110816 - RNA, 78 nt, Homo sapiens
cggcccccccccagcccgccccaaaaggggaggaagcagccaggggaagacgcccccaccacagaacggaggaggggc

SEQ ID NO: 110817 - RNA, 81 nt, Homo sapiens
aaccaagaggagaccacaccaaaggaaagggagcagcaccggccacacccacagcacgaccggaacccagcgaccgacgcc

SEQ ID NO: 110818 - RNA, 74 nt, Homo sapiens
caggccgcagacagcaccggaggggaagacgcggcggagaaaccaccacaaacacgaggccagcaacgaccaac

SEQ ID NO: 110819 - RNA, 63 nt, Homo sapiens
agagagcagagaccacccaaacagaaaagcacaagggcaaggaaagcagcccgagcgagggag

SEQ ID NO: 110820 - RNA, 58 nt, Homo sapiens
gaccagaagccagagcgaggacgccggcaggggcagggcaagaccccggcagccggag

SEQ ID NO: 110821 - RNA, 80 nt, Homo sapiens
gcgcgcacagaaaaagcgaacagacagacgagggcaacgccaaagaaaggaaaaccaaagagaagaaacaaagacgaaca

SEQ ID NO: 110822 - RNA, 78 nt, Homo sapiens
ggggaggcgcaacacgaggcgccgcagcacccgcgagcagaaggagggggcagagcacggcaggcagaaggggccaac

SEQ ID NO: 110823 - RNA, 75 nt, Homo sapiens
ggccggcacggaagcagacaaagcacagacaacagcagcgccgagaaaccggcagccgacaccacaacaaggcag

SEQ ID NO: 110824 - RNA, 43 nt, Homo sapiens
aagccgaccaaagcagcaaggcggggaccaagagaagagcaga

SEQ ID NO: 110825 - RNA, 65 nt, Homo sapiens
ggggagaaggccgagggccgggagcccgcaccgggccggcaggaaaccccccaggcaagaggcgc

SEQ ID NO: 110826 - RNA, 76 nt, Homo sapiens
agagagcccaacgccgggccaagaccccgaggagacagacccagcacggaccccccccccagccgggcgaggcccc

SEQ ID NO: 110827 - RNA, 81 nt, Homo sapiens
cgagacgggagaaagaagaaaaacccaacacgaacggacaggcacgacggcaaagagagggaggcgaagcggcccaggggc

SEQ ID NO: 110828 - RNA, 80 nt, Homo sapiens
aaagaagaagggaacggcgaagaagcaacgagagcgccagacagcagccgaaccccaaccgcggccggggacagagagca

SEQ ID NO: 110829 - RNA, 77 nt, Homo sapiens
cgcccccccccgcgagagccggggccggacgagaaagccgaaggagacgacggaggagaccggcagagggcacgagg

SEQ ID NO: 110830 - RNA, 56 nt, Homo sapiens
gcgaaggaagggacaaccggaagcaaaaccgagagggaaccaagaccaggacaaag

SEQ ID NO: 110831 - RNA, 77 nt, Homo sapiens
cgcggagacgagaccaaaaaacccaaagacagcgccgaacgcaggaagcagccggaaagacagcaaagaacggaccc

SEQ ID NO: 110832 - RNA, 71 nt, Homo sapiens
agcaacgagagccagagaagaagggccgcgaggaaaagggggacacagccagggcgcaggcagcgcccaac

SEQ ID NO: 110833 - RNA, 71 nt, Homo sapiens
aaggagaacggggaaaacgccaagaagacaacgaggcaagagagcaaagcgaacaaccagaaacccaccgc

SEQ ID NO: 110834 - RNA, 75 nt, Homo sapiens
acggccggccggccccggaacggaaggcgcgagccggcacgaaacaaaggagcgagacagaagagaaccggaagg

SEQ ID NO: 110835 - RNA, 62 nt, Homo sapiens
gccaggagaggcgggccagcggagccgggacggagcagaagaggcggccacccacgagccga

SEQ ID NO: 110836 - RNA, 76 nt, Homo sapiens
gaagaagcaggaggcaagaaaggggaaccccggagaaaaggccaagaaggcagagagccaggaacaaaaggggaaa

SEQ ID NO: 110837 - RNA, 73 nt, Homo sapiens
gagacaaagaggaggcggccggaaggaagagagaccgaagaaacaagccacccaaaccaggggacagggaaag

SEQ ID NO: 110838 - RNA, 74 nt, Homo sapiens
cccaaggccaggaggcccagcgccccaggaagacaagagggggagagggccacacgaagaaaacacacgagacc

SEQ ID NO: 110839 - RNA, 74 nt, Homo sapiens
gcaaggccaacagagggaaggaacaaaggcacagccaacgggacacagaagcaccaaggaagaagggccccaaa

SEQ ID NO: 110840 - RNA, 47 nt, Homo sapiens
gcgcgcagcaacggcggggcggagacagaaaacccgaccaacgcccc

SEQ ID NO: 110841 - RNA, 35 nt, Homo sapiens
gaccagccgcacggagcgagagggcagccccaaga

SEQ ID NO: 110842 - RNA, 77 nt, Homo sapiens
ccagagacaaagccagcacccaaaggagcaacagacagcccccagaacagcaccaggcgcgcgcggaagagacagac

SEQ ID NO: 110843 - RNA, 76 nt, Homo sapiens
gagcggccgggcgcaggccggcggggcccgcagacggcaccagagagagccccagaagacccaaaaagggaaagaa

SEQ ID NO: 110844 - RNA, 88 nt, Homo sapiens
cggacggagccggcggcgcggccggcagccggcagcgcagcgggaaaccccaaagagaggagaaacagcgacgacccaaaggggaaac

SEQ ID NO: 110845 - RNA, 85 nt, Homo sapiens
caagaacgggcacccgcagcgcagaaggaaccggcaaagcgcaggaacgggaacgcaggagcgaccagcccgccaaggaacccgc

SEQ ID NO: 110846 - RNA, 75 nt, Homo sapiens
agcgagagcgaggccgagcaacaccgcgagccgcgcggcgcggggccccgcggcggagaaaaccagggcacaagg

SEQ ID NO: 110847 - RNA, 83 nt, Homo sapiens
gaggaagcgggaccccgggagcaggacccgcggggcccagccccaccagggcccagaagaccggcaggcaccagggcaaaccc

SEQ ID NO: 110848 - RNA, 79 nt, Homo sapiens
caccagcaccaggagcaggccacagagaccaacccacccccccaacagggaggaggcggacggcaaacagaagggcgca

SEQ ID NO: 110849 - RNA, 73 nt, Homo sapiens
ggcggaacacccgcccagacgacaagcgacagaagcgaaggggacagggggagaaccgccagggaaacccggg

SEQ ID NO: 110850 - RNA, 65 nt, Homo sapiens
gacccggggacccccgacgccaggcagcgcccccaaacgagaggaaacagcggaggaggccacag

SEQ ID NO: 110851 - RNA, 53 nt, Homo sapiens
gacaaccagaggcagccagcagggggagacgcaaaaggcacgacaggccgccc

SEQ ID NO: 110852 - RNA, 71 nt, Homo sapiens
gaaagcgaaaacacacggaagagcgcggccagcaccccaacgggccaaaggcggagagaccaaccaaagcg

SEQ ID NO: 110853 - RNA, 78 nt, Homo sapiens
cccaacggagaagggcacacacggacggagcacccacgggagaccggggggcaagaaaaggaagaagaagcacaccac

SEQ ID NO: 110854 - RNA, 80 nt, Homo sapiens
caacacagaagaagccaccggcggaagcagccgggcgacaggagacacgagcccacccgagaccacgccggacccgcccc

SEQ ID NO: 110855 - RNA, 71 nt, Homo sapiens
aagccaaagaccaaggggggggcacccccacaacggacagcggaacagccgggaaaccaggcggacacaaa

SEQ ID NO: 110856 - RNA, 100 nt, Homo sapiens
aaaggcgaaaaagcgaacaaaacaccagaagaggagcaaagaggccaccagccagcccaccccagacggggggcgacggcggcgcacagagagaagacca

SEQ ID NO: 110857 - RNA, 74 nt, Homo sapiens
ggaggggcaaacaggcaggaagagacaggccacccaggcacgggaaagggagaagcaaccacaaagaggaacca

SEQ ID NO: 110858 - RNA, 41 nt, Homo sapiens
cgagggaggaacaaagccccaccaaagaaaaccgggacggg

SEQ ID NO: 110859 - RNA, 58 nt, Homo sapiens
cagaccacgagaccggcaggaccacggggaacacagaacagaagacgaaaaccagccc

SEQ ID NO: 110860 - RNA, 69 nt, Homo sapiens
ggaccagacgcgacggaggacaggagaagaagcaacaggcggagaagggcagacaagacacgcagccca

SEQ ID NO: 110861 - RNA, 84 nt, Homo sapiens
cgaggggcggcggccccagacagcaagaaagcaccagccaagcagaagggagccagcggacgagggcgccaggccagggcagcg

SEQ ID NO: 110862 - RNA, 81 nt, Homo sapiens
ggaggcccaacaaagagacaacgcaaaaaacgaaagagaaaggcagccacggaccaggaggacgggcagagggagaggggc

SEQ ID NO: 110863 - RNA, 62 nt, Homo sapiens
caaagaacaggcccaaaaacaagacccaggaaacacaacagcaacccaaagaggaccagggg

SEQ ID NO: 110864 - RNA, 82 nt, Homo sapiens
aggcagcggcaggccagggcagccgcgcgacgcagccccagacgcagacacaggagccgccaagcaaaaggacggcagaacc

SEQ ID NO: 110865 - RNA, 67 nt, Homo sapiens
aaacagaggacgcagccaggccacgaacacgaaagaacccgaacacccggaggcggccggcagggag

SEQ ID NO: 110866 - RNA, 88 nt, Homo sapiens
cgcgcgggacccggggcgccacgggggccagaagcaggagagcaagcccacccgcgagaagcggaagagaagaacagccgagacccag

SEQ ID NO: 110867 - RNA, 62 nt, Homo sapiens
caaacgggcgcacggcaaaggaacacgcaaacacacaagaggggacaagaccagaaccagga

SEQ ID NO: 110868 - RNA, 74 nt, Homo sapiens
gacagacgagagaacgaggcaccaccagcacgcagcagggcaggacgccccgcgacccgggagcgcacacccgg

SEQ ID NO: 110869 - RNA, 83 nt, Homo sapiens
cgcgaacgagcgacggcggaacccggggccgggacgcagcccggcggcagcagaccccgcgagcaagaaggggagaccgcccg

SEQ ID NO: 110870 - RNA, 74 nt, Homo sapiens
gccgcagcccccggacaccagaagagcccagcagaacaaagcggcaaggccgcccagacacggggcaacgagaa

SEQ ID NO: 110871 - RNA, 76 nt, Homo sapiens
aaggaagcaccgcgggaacagggagcacaaccgaagggcagaaaagcaccgacgaccggggcgcgccagcccgacg

SEQ ID NO: 110872 - RNA, 81 nt, Homo sapiens
ccgagcaaagagaccccggaacaaagagccgcagacgcacagcaaccaccggacccgaaggccaccacccagaggggccgc

SEQ ID NO: 110873 - RNA, 75 nt, Homo sapiens
gaagagggaaacggggagcaggaacaggggggaccaaggggagggggaaacggccaaagggaaacagacgaggac

SEQ ID NO: 110874 - RNA, 86 nt, Homo sapiens
agccacaaaccaggagacccaagaaccaggggagaagaagagacagaagaagcacaagcgcaacggaacgcaaaacgagaacgcac

SEQ ID NO: 110875 - RNA, 71 nt, Homo sapiens
gacccggacaaaacaacggaccggcacggcaacagccccaagcgagaacaaacaacaaaacccagccacca

SEQ ID NO: 110876 - RNA, 80 nt, Homo sapiens
ccgggacgaggcgcccgggccccgcaccaccccgcgcccccgcgccgccccgaagcccaggacccaaagacaggaccacg

SEQ ID NO: 110877 - RNA, 84 nt, Homo sapiens
ccggagcgcgaaggccgggacccggccccggcccacaggggggggcaaacccgagagaacgggagccgcaccgcgggccagagg

SEQ ID NO: 110878 - RNA, 61 nt, Homo sapiens
aagaaagggaaggggaaaaagaagcagacagcccacgcaggcgacacgagccaggcccaga

SEQ ID NO: 110879 - RNA, 69 nt, Homo sapiens
gaagaccacgccggccgcgaccaaggaagcaaggagagaagggaacaggaaaaacccaagcgccagaca

SEQ ID NO: 110880 - RNA, 72 nt, Homo sapiens
ggcgcacaccaacaaagcaccacacgacggacagcaagaagcaggccccaggaccggaaccgaggaagaaga

SEQ ID NO: 110881 - RNA, 80 nt, Homo sapiens
ccgccgcgcccgcccgacccgccaccgccaggccagaagcacagagggaaggagaaggagacacagaaggagcagcagga

SEQ ID NO: 110882 - RNA, 54 nt, Homo sapiens
aggcagcgggcggcgccagcggagaacagcccgaccacggggccaggaaaacca

SEQ ID NO: 110883 - RNA, 63 nt, Homo sapiens
ggggcaaacccgagagaacggaaaaagcggggaaggggggcaaaaaaaagaagcaagcgaagc

SEQ ID NO: 110884 - RNA, 73 nt, Homo sapiens
gaccacgggcacccacaagcagcggaaaagaagcccagccagagaggaaacgcggaaaaacaaggaaaacacc

SEQ ID NO: 110885 - RNA, 51 nt, Homo sapiens
agaagcgaaggacgacagcagccagaacgcaggagaagaggaggacaaaca

SEQ ID NO: 110886 - RNA, 76 nt, Homo sapiens
gagaccacccgggagaagaaggagaagggggccacagcgaaaaacccaagaaggaaggcagagcccacaaacccaa

SEQ ID NO: 110887 - RNA, 55 nt, Homo sapiens
caaccgcgaggaggacgccgcgcccaagacccagcgaggcgacaaccgaaagggg

SEQ ID NO: 110888 - RNA, 59 nt, Homo sapiens
cgcacgacgacagaggcccagagcccccccggcccccccagagcgcaagcgaaaaaccc

SEQ ID NO: 110889 - RNA, 79 nt, Homo sapiens
gaaaaacccagcgaccgacgaccgaaccagaggaccggcaacaacccgaggacgaaccaccccgcgccagcagcacagc

SEQ ID NO: 110890 - RNA, 72 nt, Homo sapiens
gacgacaggccgggagcagaaaacacggaggaacacgagggagcaccgcagggcaggccccacgcccacagc

SEQ ID NO: 110891 - RNA, 56 nt, Homo sapiens
cacgcccgaggaagccaaacaggaggagacacggccagcccggagaccacaggagc

SEQ ID NO: 110892 - RNA, 75 nt, Homo sapiens
aggaggcgaccgcggcgcagcgacccccgccaggcaaaaggaaggggcaacgagggagaccaaagggaagggagg

SEQ ID NO: 110893 - RNA, 74 nt, Homo sapiens
gggcgccccagggacagcaacagcggccgggaacgaccgaaacaccaggaaagaaagcccaacagcacagcagg

SEQ ID NO: 110894 - RNA, 65 nt, Homo sapiens
aaaagaaagaaccagacaaagacaaggaacaaggaggcgcagcccccaagacgggcccccccacg

SEQ ID NO: 110895 - RNA, 84 nt, Homo sapiens
acgcgaccccggccgcggggccaggaagcggaggagccccggaggcagagcggcgccagagccgggaaaccagaacagacaacc

SEQ ID NO: 110896 - RNA, 59 nt, Homo sapiens
ccaaacggcaaagcacgccagacggagaccgggcaaaagcagaccggaaaacccaccgg

SEQ ID NO: 110897 - RNA, 82 nt, Homo sapiens
ccgccgcagcgccccggaccggagcgagcaagccgcgacaagcagaaagaagaccccccgagggccgcccccagccgaacac

SEQ ID NO: 110898 - RNA, 51 nt, Homo sapiens
gcccgcagcgcccgccacaggaggagaaagaccacagggaaccggaacgaa

SEQ ID NO: 110899 - RNA, 83 nt, Homo sapiens
aaacgcccccaacccagcgcaaaggaagaggaaggggcccagacagacgagagcggcacgaggaccaaggggagcagacccag

SEQ ID NO: 110900 - RNA, 86 nt, Homo sapiens
caaggacaagaccaccggacgcgcagcagcgaacagaggaacccagaccagcaaagcaaaacgaaagcagagaaagaaccccagaa

SEQ ID NO: 110901 - RNA, 75 nt, Homo sapiens
ggaagaccaagagcacagacccggaagcgccgaacaaaaccggaggcccgggccacacgaaggaaacaggaaccc

SEQ ID NO: 110902 - RNA, 77 nt, Homo sapiens
gggcacgcccaccggcccgcgccgcccaggccccgcagacgcacccccccccccggcggagccccgaaggagcgcag

SEQ ID NO: 110903 - RNA, 78 nt, Homo sapiens
agccacgcaacccagccccacagcagcaggaggaccaggacacaccccagaagaagcccacagaaagcgcaaggcgac

SEQ ID NO: 110904 - RNA, 81 nt, Homo sapiens
gcccgaaccaccagacccaccaacaagggcccccagggcccggccgaagcaagaacaaggaaaccccccaggcaagaggcg

SEQ ID NO: 110905 - RNA, 86 nt, Homo sapiens
cgccggacgcccaggacgcccgaggagccgcgccgccgggacacaccaggagaacaagcccacgcaccacggaacagccccaagcc

SEQ ID NO: 110906 - RNA, 70 nt, Homo sapiens
aagagcgcgaggaggaagacgaacgaacagccagaagaaaagggcagcaaagcagggacaaagaagagca

SEQ ID NO: 110907 - RNA, 37 nt, Homo sapiens
caggcaaacgaggaccgacagccagcaacaaccgcac

SEQ ID NO: 110908 - RNA, 73 nt, Homo sapiens
cccaaaagcagcaaagaacaccaagacggcgaccacaggaaggacacaggcagggacgccagaggggaagccg

SEQ ID NO: 110909 - RNA, 66 nt, Homo sapiens
accccaggcagaggagccccaggcgggaaggcaccagccaggccagcaccagacaggggaggccgg

SEQ ID NO: 110910 - RNA, 89 nt, Homo sapiens
gacaaaggagcaaccgaccccaccggccggagcgcgccgccaaggcggcgcgcgagcggagcaccgcgcggaggcaaggcgcaaccggc

SEQ ID NO: 110911 - RNA, 56 nt, Homo sapiens
gcgcgggcggaccgacggagacggaaagccgggacaggagccgcagaaagcaacaa

SEQ ID NO: 110912 - RNA, 82 nt, Homo sapiens
gcccggaacccgcaccaagccgcccacacgccaaccggccagaggacgaggggcaaggccccgagcgcccaaccaacagaac

SEQ ID NO: 110913 - RNA, 74 nt, Homo sapiens
ggaacggcagcgacggaggcccggagcacacgcgcgccaggcgcaagacgcacagacacggggccagccagaac

SEQ ID NO: 110914 - RNA, 68 nt, Homo sapiens
ccgcaggacaagagcacgcgagacgacgggaccgaaggaccccgccagagacaaccgagcgccaggag

SEQ ID NO: 110915 - RNA, 80 nt, Homo sapiens
gaggagaacagccgaaaggcggggacgggccggcccgcggaagccggagcagacagcgaagaccccgggaacgggacaca

SEQ ID NO: 110916 - RNA, 67 nt, Homo sapiens
acgcaagagacaagcaggacagccaaaccacacaaaaagaccggggaggagagaaaacaagcacggc

SEQ ID NO: 110917 - RNA, 83 nt, Homo sapiens
ggacgggagagcgccggcggagaaaaagaagaaaaccggggcgacaccacagcgaaagacacagaggaccaaggcccgcacac

SEQ ID NO: 110918 - RNA, 82 nt, Homo sapiens
gcccaaggaggaaaagaaaccaaaggaaaaccacgaagccaagagcacccaccaaacaaccccaggccgccgcggccccgca

SEQ ID NO: 110919 - RNA, 53 nt, Homo sapiens
gaaggaccaagaaccaggcgcaaaccagcgaaggccgaagaaaaagaaacagc

SEQ ID NO: 110920 - RNA, 66 nt, Homo sapiens
aggaaccagcagaagggcaaggagcacacggcacaggggcgggcagaaggggcgccccgcgaccag

SEQ ID NO: 110921 - RNA, 76 nt, Homo sapiens
accgggagagggaaacaaggcagcgggagagaagacagaagagccagggccgggggaaggaggacaccaagcccgc

SEQ ID NO: 110922 - RNA, 71 nt, Homo sapiens
cccagacggggagcggcccagagcggacacccccggaccgcgggcccccaagccggcaggggaacgaggag

SEQ ID NO: 110923 - RNA, 80 nt, Homo sapiens
acagggaggaaggagcaacccgaaaaccagccagacacaaacagacaccaggggggaaaaaccacacaggcaaagaacgc

SEQ ID NO: 110924 - RNA, 87 nt, Homo sapiens
cgggccgagagccgcccgggccagcggccgcgcacccccggccggaggcaccagcacccccccagcgcccgccccagcacccgaaga

SEQ ID NO: 110925 - RNA, 74 nt, Homo sapiens
gccgacccgagggaacacggacgccgcaggagggccaagaggccggggggggcacagagccccggaagacagcc

SEQ ID NO: 110926 - RNA, 78 nt, Homo sapiens
aaaccggcccgggcgggggccgccagaccaggcgcggagaaggacgaagaggaagccggcgacacgggcggaccacaa

SEQ ID NO: 110927 - RNA, 61 nt, Homo sapiens
gagcggccagggccgggccagccggccggcgcggggccggccacaccacgccccgagccac

SEQ ID NO: 110928 - RNA, 88 nt, Homo sapiens
ccgggcacgcgaggccgaaacgcagcgcgcccccaggaggcgagcccgcggaaccgcagccaggaaagccaggccagaagaaggaagg

SEQ ID NO: 110929 - RNA, 80 nt, Homo sapiens
cacggccagcggcaccacccccagcaccaccccagccccgcgcccggcaaaagagccgggaacaacccaggggaaccagg

SEQ ID NO: 110930 - RNA, 82 nt, Homo sapiens
aggacccccaagccgccgcggacgcaggaaaccgaagaagaacccgagccaaagggaggaaaacagacaaaccaaagcaaaa

SEQ ID NO: 110931 - RNA, 70 nt, Homo sapiens
caaaagcccgcacagcgccgccaggaaacccagggaagcacggggacagggacccaaagcagaagccgaa

SEQ ID NO: 110932 - RNA, 102 nt, Homo sapiens
gcgcggggcgcaaggcgccaggaggaccggggcgggagagcgacccgggccggcagacggaaaagcaaaggcagcagggaggagcgaggaggccaaaaaggc

SEQ ID NO: 110933 - RNA, 56 nt, Homo sapiens
aacggccggggaggcggagcagaagccgccgccccagcgaggcgcggaacgagacg

SEQ ID NO: 110934 - RNA, 58 nt, Homo sapiens
ggccccggcccacaggggggggcaaacccgagagaacgggaaaaccaagcaccgacgg

SEQ ID NO: 110935 - RNA, 55 nt, Homo sapiens
cggagggcgacggagggagaccacaggcaaacgagagaccggaacacaggaaaga

SEQ ID NO: 110936 - RNA, 77 nt, Homo sapiens
ggcgcgcggaagacgaggagcgcgcggcgccggggggcgcgccgcgaccgcccgccggaccaaaacaagaaggcaga

SEQ ID NO: 110937 - RNA, 75 nt, Homo sapiens
cggcgaccgaccacagggggacaaagaggaggacaagaacccacccgcgcccaaccggccagaacacaacccaaa

SEQ ID NO: 110938 - RNA, 81 nt, Homo sapiens
caggacggcgcggcagagccccgacgccacagaacgacccgacgggccccacaccgggcgccacgccgagcgccgggaacc

SEQ ID NO: 110939 - RNA, 80 nt, Homo sapiens
ggcacaaccagcaggaggacccagcgaggcacagaggacagaggccacgaagccagagcgcaaccagacgagaagggaag

SEQ ID NO: 110940 - RNA, 73 nt, Homo sapiens
cggacacaacgagggaccgggcacgaaacgcgcgcccccgaaggcggccaacggccagaacagcagaccagag

SEQ ID NO: 110941 - RNA, 76 nt, Homo sapiens
cggccaagaaaagacaagaaacaggaaaagaaaccgaaagaacgcgagcgaagacccacaacagagggggcacggg

SEQ ID NO: 110942 - RNA, 83 nt, Homo sapiens
gaagcgaagggagagcgccagagaaggacaagcagaccggaagaccgacggaagaccacaccccgagggagcccaggacacca

SEQ ID NO: 110943 - RNA, 84 nt, Homo sapiens
acagacgccgagagaagcgaaaggaagccgaaaagacgaggcgaggaggcgagacacccaacccaccccaccccggagggccag

SEQ ID NO: 110944 - RNA, 73 nt, Homo sapiens
cagcgagaccgagccgcacccgagcagcaagcagagacagagaacgcagaacagaagggaagaccaaaacgag

SEQ ID NO: 110945 - RNA, 72 nt, Homo sapiens
agacaccacggccacacagagaagaacccagccagggccaagaacaaaagcgagagcgggacaccagccacg

SEQ ID NO: 110946 - RNA, 76 nt, Homo sapiens
ggaagccggggaacacagagaaaagcagcagggacagcacacaccaagcccgaaggcacgaacggagcagccccaa

SEQ ID NO: 110947 - RNA, 35 nt, Homo sapiens
ccggaggcgcccgagcggacccgacaaacggacag

SEQ ID NO: 110948 - RNA, 73 nt, Homo sapiens
aaaccaaccccccccaaaaggagaaaagaaagccagaaggaaggaagcaacgaaccaagaaaaaacggaacag

SEQ ID NO: 110949 - RNA, 55 nt, Homo sapiens
gacgggacgcccccacgaacccaggcagcagggggaacgccccccaaccgagaga

SEQ ID NO: 110950 - RNA, 50 nt, Homo sapiens
agaccggaacgcccaagccccaccgcgagggaagggagcccaaaacagga

SEQ ID NO: 110951 - RNA, 39 nt, Homo sapiens
cacgcagaaggaccggccacggggggacgacacccggaa

SEQ ID NO: 110952 - RNA, 79 nt, Homo sapiens
gcgaggcacaggagcgaaaaacgaccaggccagaaacgaaggaggcccaaccacaaaaggagccgacggaacccagacg

SEQ ID NO: 110953 - RNA, 74 nt, Homo sapiens
acaggcgaccgagggaagaccacaaccacgaccacaaaccggcggagccacagaaaagaaagccgagggaaaaa

SEQ ID NO: 110954 - RNA, 71 nt, Homo sapiens
agggaagcgcagaaagcaggcgaacccgcggcgcaaaacgcaacgcacccgcccccaaagagagaagcgga

SEQ ID NO: 110955 - RNA, 61 nt, Homo sapiens
aagaagaaagacaagcgcccacccacccagaacggggagccgccagaccagcaggccagaa

SEQ ID NO: 110956 - RNA, 80 nt, Homo sapiens
gcgcgcgcaggaccggcccgcacgacgcaccccgcaccaggcgcaggaaaccagccaagcaaccggaaagaggcagaaca

SEQ ID NO: 110957 - RNA, 76 nt, Homo sapiens
aaggacgcccgccaacgaggaccgcaggggaaggagaagcgggggagagcagcggcgccagcccgggccacaccgg

SEQ ID NO: 110958 - RNA, 79 nt, Homo sapiens
gacagcaaccccggaggccggaggaacgggcccgcaagcgcgccgacagggagagaaggcgcgcaggagagcgcagaga

SEQ ID NO: 110959 - RNA, 62 nt, Homo sapiens
aaaaaaccaaacaagcaggaaaaggaaagaacacacgcgccaccaacacgcagggggaaaaa

SEQ ID NO: 110960 - RNA, 78 nt, Homo sapiens
aggcccacaacgcaacgggacaggggaaaggcagcgcaaaaagcggcagggagacccgaccaccggaagccacggccc

SEQ ID NO: 110961 - RNA, 79 nt, Homo sapiens
cggaagggagcgccagcaggccgggcgcagcaaaagagccaacacccaggccaggccgcccggaaggaggccgccacgc

SEQ ID NO: 110962 - RNA, 97 nt, Homo sapiens
cagacccgcccgccagaaccgcgcgccacccacaaccagccagcaggccccggaacgcgcgcacggaaagccagccccgaccaaggccacagcgggg

SEQ ID NO: 110963 - RNA, 79 nt, Homo sapiens
cacgggccgccgggcccgccgcgccgcgcgccacggcggccggacggggagaacagagggaggaagcccgaaggagcag

SEQ ID NO: 110964 - RNA, 73 nt, Homo sapiens
ggccgaccagagaacagcccagggccgaaaagaaaacaggagaaccacccgccaacagcaagcgacccaaggc

SEQ ID NO: 110965 - RNA, 76 nt, Homo sapiens
cgagcaggcgagcgaacgacgggaagacccacaaaaaaaaaaggaagagaggccgggcaaggaaaagaacacgcca

SEQ ID NO: 110966 - RNA, 76 nt, Homo sapiens
agcaacaagaaaaaaaaagcaccaacacaaaaagacacagacccagcaccacgaaaaaagaacagcagggaacaca

SEQ ID NO: 110967 - RNA, 81 nt, Homo sapiens
aggaaagcgaaggggaaggcgccgaagaggacgaagaaggcgaagaaaacccgcgggagagacaagccacgcagaagagga

SEQ ID NO: 110968 - RNA, 58 nt, Homo sapiens
accaccaccgccaacaccggccgcaagaaggagagcccggacccacccaccggccaac

SEQ ID NO: 110969 - RNA, 73 nt, Homo sapiens
gcggaacagcacaccaggagagaagcgacagccgcagcgaccaacgaggacaggcgccaaaacaaaacagaga

SEQ ID NO: 110970 - RNA, 80 nt, Homo sapiens
cgcgggcaggccggagagagaaggaagaacacccccaccggccaggcgagaaaggcaggacccccccgcggcggcgaggc

SEQ ID NO: 110971 - RNA, 86 nt, Homo sapiens
aaagaacgcccacacggcagcaccagcaggcaaaacgaggcgcagcggggaagacggacgccgggcaggcaggccacgggacagca

SEQ ID NO: 110972 - RNA, 84 nt, Homo sapiens
ggagacgcacagccaggacaccggaaccgggaaaggacacgagaggcgagggacgacagagcaagcggcagagggcaagcggga

SEQ ID NO: 110973 - RNA, 61 nt, Homo sapiens
gccgcccgacggccagcccacaagccaagccacaaagcagaggggcagccgaccaggcgcg

SEQ ID NO: 110974 - RNA, 77 nt, Homo sapiens
cgccccgccaaggagacgccccacgaggcccaaaccgccaaggaaaagcggccaggaccaccaggcggccacgggcc

SEQ ID NO: 110975 - RNA, 69 nt, Homo sapiens
agcccggcgaagcaagacagcagacaggggcacgcccacggaagccccccaaagcgagggacacaagac

SEQ ID NO: 110976 - RNA, 66 nt, Homo sapiens
ggacccccccccccccccaagaccggagagaacagaaaaaaagcggcccgggaccaggaaagacag

SEQ ID NO: 110977 - RNA, 81 nt, Homo sapiens
aggaggagggaccacagggaccaccaagaaggcccggagagacagagggaagaaacagacgcggagagaagagagacccgg

SEQ ID NO: 110978 - RNA, 64 nt, Homo sapiens
agagggcaggacacacagcacagggaacaccagaggcgggaccacgggcagcgcccagggagca

SEQ ID NO: 110979 - RNA, 83 nt, Homo sapiens
ggaaacaccaggcgcggcggcccagccccgacacagagccaggggcgcagaaggacgcggagcaggagcacagagagagcgga

SEQ ID NO: 110980 - RNA, 83 nt, Homo sapiens
gacagggggaggaagaagccggcacagcccaggagacccggaggaaagcccagagggaagcgcaagaagcaggccagaaacag

SEQ ID NO: 110981 - RNA, 69 nt, Homo sapiens
aggacccagaaaaaggaaagacccagaggccacagaaccacaaagaagcgccaaccagccgcaaggagg

SEQ ID NO: 110982 - RNA, 99 nt, Homo sapiens
gggcaggagccgaaagggaagcacacggaccagcagaacagaaacaaggaggcaggggaagcacaaaagcgcacccgcgccagcgaggaccggaacggg

SEQ ID NO: 110983 - RNA, 79 nt, Homo sapiens
acgcggagcgacccgccacgcgggcgggagcagcggaagacaccaaggccagggagggccaccgcacggaagagaccgg

SEQ ID NO: 110984 - RNA, 80 nt, Homo sapiens
gaaaccgaagcgaaaagggccgggccaagcaggacaacgcacaaccaccgcgaacgacgagagaggagcgcgggccgaga

SEQ ID NO: 110985 - RNA, 56 nt, Homo sapiens
gcaggcggcgcggagagggggcgcgagcgggggacccaaagacaggaccacgcacc

SEQ ID NO: 110986 - RNA, 75 nt, Homo sapiens
gcaccacgaaaacaacacagcagggaagcagaaggggccacccccaaccaggaccaaagacgaccaccaaagcca

SEQ ID NO: 110987 - RNA, 75 nt, Homo sapiens
gggggcaccgagggcaccacgcgcggaacagagagaagggcgggagaaaccaaggaaagagaaaagcgggaggcg

SEQ ID NO: 110988 - RNA, 72 nt, Homo sapiens
gagaccaacgggagccccaagccggaaacgaaacagcgcagccaggaacaggacgaagaccagcgccaggga

SEQ ID NO: 110989 - RNA, 77 nt, Homo sapiens
acagaaaccaagcagaccgaagagaaagcgccaggcacacgccacaggccaacaaagcccgcacagggcacaacagg

SEQ ID NO: 110990 - RNA, 55 nt, Homo sapiens
ggagaccgaccccagcgccgggcccgcagcagcaggccacacccaagaccaggcc

SEQ ID NO: 110991 - RNA, 79 nt, Homo sapiens
agcaaagaaaagaccacacagaaccagaagggaccagagcaaagaaaaagagccgcgggggagcaaaggaggagaaaag

SEQ ID NO: 110992 - RNA, 84 nt, Homo sapiens
accgcagcccacgcagcaagacccgcgccgccgggacccccaggacgacggaccggacacaccggcacgcagcacgggggcagg

SEQ ID NO: 110993 - RNA, 58 nt, Homo sapiens
gaagccagaggccaaaggcaggagacgacgcagccagagcagcaagaggccaagggga

SEQ ID NO: 110994 - RNA, 80 nt, Homo sapiens
gcgagaccccggggccaagaagcggggcggagagaaggaaaaagcaaaagggcccaaggcccgaccaggaacaaagagag

SEQ ID NO: 110995 - RNA, 75 nt, Homo sapiens
gccccgggccacgggcgcgaaagaggagacggcccgccacgggccccgcagccgcgcccgagcgcccgagcaggg

SEQ ID NO: 110996 - RNA, 76 nt, Homo sapiens
ggaaaggccggaggaaaccaggagagacccaaaggagcccaagaggacagagaacgaagcacagaaaagcagccgc

SEQ ID NO: 110997 - RNA, 138 nt, Homo sapiens
ggcgcgggagaggcgggcggcgcgcggcggcggcgccggcgaggaggcgcccggagcggccgccccagccggcccccaggcacgaagcgaagaagaggagagaagcagcggcgcagacgacggcacaacaaccacgag

SEQ ID NO: 110998 - RNA, 79 nt, Homo sapiens
aggaagagaacagaagaaggaccacgggcgccaaccagggagaggaggagaacggaacgaagggccacccaagcgggcc

SEQ ID NO: 110999 - RNA, 70 nt, Homo sapiens
acaccaaaggcgaaaagaccaaggacgaaccagagagcaagaggccagggaaggacacaccgcggaaaga

SEQ ID NO: 111000 - RNA, 68 nt, Homo sapiens
gacagaacgaccccccagacgcacgcgggggccaaacgcacagaaaagcgcgcaagacgcaacacaaa

SEQ ID NO: 111001 - RNA, 70 nt, Homo sapiens
cagaggggccaacggcggcgggagggccaaaaccaggcgagaaccaggagaagcggggggaagagaaaaa

SEQ ID NO: 111002 - RNA, 79 nt, Homo sapiens
cccgggaaacccccagcagcccccccagcccagagcccagaaacccaccgcgcacaggaggacgggcagagggagaggg

SEQ ID NO: 111003 - RNA, 57 nt, Homo sapiens
caccagcagccaccaggagcccgagagagaaggggccgagcaaccagagccaccagg

SEQ ID NO: 111004 - RNA, 69 nt, Homo sapiens
aggccaacaccccgcaggaagcccacggaacacaggagcacagaccaacagaaaacagacgacgggcac

SEQ ID NO: 111005 - RNA, 75 nt, Homo sapiens
cccaccgagacaccaagggcggggcgaggaagaggcacaggaagagggcggcacgcggccagagagcacaacggg

SEQ ID NO: 111006 - RNA, 75 nt, Homo sapiens
agaagaacaggacgagcaacaacagcacagaccgacacacaagggagaacaggggaagcagccaaggagaaacac

SEQ ID NO: 111007 - RNA, 68 nt, Homo sapiens
aggccgaagaagacacagacaacaaagaggagaacggaagaggacaagagacgacacgcaagcaggca

SEQ ID NO: 111008 - RNA, 57 nt, Homo sapiens
gaaaaagcacaggggaccagcagcagccgcgagcccgagaacacgaaacaaggaaga

SEQ ID NO: 111009 - RNA, 56 nt, Homo sapiens
gcccagcacgcaccacccagcggacacagagcaggacacgcccaggggaaccaaca

SEQ ID NO: 111010 - RNA, 82 nt, Homo sapiens
cggcgccgcgccccccacggagcggcccccagggcggagcagccagccaggccagggagagggaacccagaagccggcagcg

SEQ ID NO: 111011 - RNA, 83 nt, Homo sapiens
gccaaagaggaagcccaccacaaaaacgaaggcggcgggcaagaagagaaaggaaggaggggaaaagacaaacaccaaaagaa

SEQ ID NO: 111012 - RNA, 82 nt, Homo sapiens
gcaacacgcaaggccgccaccagaaagagccgcagacgcacagcaaccaccggacccgaaggccaccacccagaggggccgc

SEQ ID NO: 111013 - RNA, 43 nt, Homo sapiens
aggcggaaccccacgccgagcgagcggcgccgacaccggaaca

SEQ ID NO: 111014 - RNA, 37 nt, Homo sapiens
gacaggagaccaaaaaggcgcgaccagaagaagaaca

SEQ ID NO: 111015 - RNA, 73 nt, Homo sapiens
cggaaaaggcgacccgagcgccggagggagacaaccggcagaaaaacaccaggggcaacagaaagccacaacc

SEQ ID NO: 111016 - RNA, 71 nt, Homo sapiens
ggagacggaggaggaggagaagaagagagagaaggacggagaagcgaaagccagaccggcaagagcggaag

SEQ ID NO: 111017 - RNA, 72 nt, Homo sapiens
cgcagcgagaaggcgcggccgccgacgagccaccaagagaaaaaggaaagaacacagagaaggaaacgacgg

SEQ ID NO: 111018 - RNA, 79 nt, Homo sapiens
cggacacgccaagcccagacacgacccccaaaacaaggcaaaagggaaagcaaggggaagggcccaagaagacacccca

SEQ ID NO: 111019 - RNA, 73 nt, Homo sapiens
cgccggggaggcagcgcgggacccagcccaggcggcgcggacggggcggagcagaaaaccaaggagcaggccc

SEQ ID NO: 111020 - RNA, 75 nt, Homo sapiens
gggggacccaccccagcccagaaagcccggaaagccacagcccccacccggacgcagcacgcaagcagcgccccc

SEQ ID NO: 111021 - RNA, 79 nt, Homo sapiens
cgagagcggaccgagagcgcgaaacgcacgagaagaagcccaggaaaaccagggcggcggcccaccccccggccagaga

SEQ ID NO: 111022 - RNA, 82 nt, Homo sapiens
aagaaaaacaaacacacgcaaaggagaaaggaaccgacagaaagccaaggacacgcaggacgaagaaggaggagagcccaga

SEQ ID NO: 111023 - RNA, 80 nt, Homo sapiens
aggccaagaccgccagcaaaggaagacgaggccgaggacagaagggcagcccggggacgaaggcagaccccagaccggag

SEQ ID NO: 111024 - RNA, 60 nt, Homo sapiens
cagcacccgccaaccccggaagggaaagagcggaggacccggaccggacaacgcaacaca

SEQ ID NO: 111025 - RNA, 57 nt, Homo sapiens
gcagaaggccggagacaccagcagacacgaagagcgccagcggggcaccccagaaca

SEQ ID NO: 111026 - RNA, 71 nt, Homo sapiens
acgaggagacgggcccccaaaaagcggcaaaagcaagagaacaggagcaccagaccgcaacaggagcagac

SEQ ID NO: 111027 - RNA, 70 nt, Homo sapiens
accacccaaccacccggagcgcgccgcaaaggccaaaggaaagggcaaagcgaaagcaaagcaaggggga

SEQ ID NO: 111028 - RNA, 74 nt, Homo sapiens
caggaggaagcccagggaacggcggcaaccacaggagcggcgagaacacagcaaccccaaccagagaaacacgc

SEQ ID NO: 111029 - RNA, 76 nt, Homo sapiens
aagcggaagggagcccaagaggaccaggagccagcaccgccgaccgccagcgccagaagccagagagggcggacag

SEQ ID NO: 111030 - RNA, 67 nt, Homo sapiens
cccagcaggggacccagccggaacggcagcacaccgcgcccacaggacgaaaccgggcggggaaggg

SEQ ID NO: 111031 - RNA, 84 nt, Homo sapiens
gagcgcggagggcgacgacgacgaagcgcagaagacgaccccgacgcaggccaggagccgcggacagaagccgagcacggccga

SEQ ID NO: 111032 - RNA, 81 nt, Homo sapiens
gcgcgaggggcgacggggagaaggaaacccaaccgggccaaaacagaagaggcaaagcccagccacagcagcagcccagca

SEQ ID NO: 111033 - RNA, 83 nt, Homo sapiens
gcccagcccccaaaagcgggacacaggaaaagaggaaagcacgcaaaaagacaagaggaagaaagaagccgcaggacaaaacc

SEQ ID NO: 111034 - RNA, 80 nt, Homo sapiens
cgggcgggacgggggggcggcccggccccgcagggcggagaacggaaaagcaccaggaagcagagaggaccgcagaaggg

SEQ ID NO: 111035 - RNA, 73 nt, Homo sapiens
aaagcaaagaagaaaggagaagaggacggaagagaaagaaaacagcacaggaaacacagaagaagagaaaaag

SEQ ID NO: 111036 - RNA, 70 nt, Homo sapiens
agcgcagaggacaggcagccgaagcccacgcggagaagaccgacagcaccaagcagcaaagcaggcccag

SEQ ID NO: 111037 - RNA, 70 nt, Homo sapiens
gcacgagccaaaagacgcccagcacgcacacagaaaaagaccaaggcaaggaccgcagcaccaggaagca

SEQ ID NO: 111038 - RNA, 75 nt, Homo sapiens
cccaccaggccaccacgcggcgggccggagcgacacgcgcgacggaggccgcagggccagaacaacgaacagaag

SEQ ID NO: 111039 - RNA, 88 nt, Homo sapiens
gcggagcggcgaagagcaaccaggaaccccagggccgcacaggacgcggggcgcgggagcccagcgccggacccaaccacacgcgacc

SEQ ID NO: 111040 - RNA, 79 nt, Homo sapiens
ccgacagcagagagaagggaaaaccaaacaggcccccagaagagcggagagacgaaagagcggcagcggagagccgccc

SEQ ID NO: 111041 - RNA, 59 nt, Homo sapiens
acggaaaaaaacaggcgacggaacgaggagggccaccacggcaagagccaaaaccaccc

SEQ ID NO: 111042 - RNA, 55 nt, Homo sapiens
cggcccgcgcgcgcgggaagggaacacccagccacccaccagcgacaaggcaggg

SEQ ID NO: 111043 - RNA, 109 nt, Homo sapiens
agccgaagccggagcgcgcggccgggagcacgggcgccggcaagacaagaggcagccagcggacgggaagccacagggaggaggaccagcgggagggccacggaacgcc

SEQ ID NO: 111044 - RNA, 74 nt, Homo sapiens
gaacccacacgggaagcgaaccgcgcagaagggaagaaagagccccagccggagcaggaagcgcacacgccaaa

SEQ ID NO: 111045 - RNA, 80 nt, Homo sapiens
ggagcagcagggagaaaggcgcgacggaggaaggagggccaccggaaccgagcagagacccggagggagaccgagagaag

SEQ ID NO: 111046 - RNA, 82 nt, Homo sapiens
cagaagcagcagaagccgcaacaggaaagcagcccgaaaaagacgcgagaagccacacggcacagaagaggacacaaagaag

SEQ ID NO: 111047 - RNA, 62 nt, Homo sapiens
agccacacggcagaaaaagagaggacccgaaaaccccgagaggcaaccaaaaaaacggagga

SEQ ID NO: 111048 - RNA, 88 nt, Homo sapiens
aaaaacgcagacaagaacaaccagagggagaggcccacaccaaacagcaccagcacccaaagcacagagcacagcacggagaacgaac

SEQ ID NO: 111049 - RNA, 68 nt, Homo sapiens
aaacccaagaaacacacacccaacgacagcacaccgggacgagaagagagagggacaagaaggcaaca

SEQ ID NO: 111050 - RNA, 76 nt, Homo sapiens
cccgccgaggcggcgagccggcgccggggacgaggagaggaccaggaggaggaggcagagcgggaccccacaccag

SEQ ID NO: 111051 - RNA, 76 nt, Homo sapiens
gggaggcgcggccaacggggccacaaggagcgagagaccaacgggcaagcaaccgaggagaaaagagcgggccacc

SEQ ID NO: 111052 - RNA, 116 nt, Homo sapiens
ccagccgccggccacccaaggaaacacaaacgccgaaaggacgaggaacgggccggaaaagccgaccgagagggcgcaacgccaagaacgcaagaagaaccacggaacgaccgccg

SEQ ID NO: 111053 - RNA, 66 nt, Homo sapiens
agcagccccacgaagcagccagagcccggcaccacccacgagacggaccgcgcagacgcgcaggac

SEQ ID NO: 111054 - RNA, 79 nt, Homo sapiens
gacccccccccgagggaggggggggaccccaggcaacgcccgcgcggcggcggccgcagggggcggagagggcaagaga

SEQ ID NO: 111055 - RNA, 82 nt, Homo sapiens
caaaaaaggaagcgaaagaggcaacaccaacaggacagccagagaccgaacagagagaacaagagacgcagccgcacagagg

SEQ ID NO: 111056 - RNA, 81 nt, Homo sapiens
gacagcacccggcacgccacggcgccccgcaagacgcgagggccacaagacaagaccggacaaccagcacaccagaggccc

SEQ ID NO: 111057 - RNA, 72 nt, Homo sapiens
aagcgagagaaaagcccccaaaagcagcacagcacggagcaaaaacagaaagggggagaaacacgagaacag

SEQ ID NO: 111058 - RNA, 86 nt, Homo sapiens
gcggccgagcagccgggcggccgcgcgagccggcggcccggagggggcggcgggccccggagccgcagaaccaggcgaggccagca

SEQ ID NO: 111059 - RNA, 61 nt, Homo sapiens
accaggagggaggcagcagcccgggcgccacgggggaccgcagcgaagcacagcagaaggg

SEQ ID NO: 111060 - RNA, 74 nt, Homo sapiens
cgggaccgcgggcaccagaccgcagcagacgggaagaaagcacgggaaaaggccgggcccacaggggagagccc

SEQ ID NO: 111061 - RNA, 77 nt, Homo sapiens
aggaagagaccagaggacagaccgaagcaaagcagaagaggcggccacccacgagccgacggcaaacgccagggagc

SEQ ID NO: 111062 - RNA, 71 nt, Homo sapiens
acgcagccccggcccggcaggccggcagagcggggggaccagcaaaccagccggcgggcgccacaacggac

SEQ ID NO: 111063 - RNA, 82 nt, Homo sapiens
gcaaaacgcgaacaacccacagaagcccaacaggcccaggcgcaagcacaaaggaaggccagccagccgaaagcccagcaca

SEQ ID NO: 111064 - RNA, 58 nt, Homo sapiens
cccaggcgcagagcccaagccacccagggaaggcaacagacaggcccaaaaacgcgac

SEQ ID NO: 111065 - RNA, 59 nt, Homo sapiens
gacgacgaggagcagggccgacgcgcaggcggagagcaccgggagcggggccaaaccac

SEQ ID NO: 111066 - RNA, 67 nt, Homo sapiens
gcgacgcagagccgagcgaagcgggaccaaaagaacccagccaacccgcagagggaggggaggggcg

SEQ ID NO: 111067 - RNA, 82 nt, Homo sapiens
ccagcggacaggacgccacgcggaggagcgcgggcagcaggagacggaggaccagaacacggcagagaagccgcgggagcgg

SEQ ID NO: 111068 - RNA, 66 nt, Homo sapiens
gggcacccagagcagggagggaacagaggaaccagagccggcagcccaggggcgaaggcgagcagc

SEQ ID NO: 111069 - RNA, 81 nt, Homo sapiens
ggacgaaggcacaacaggggagaaaacggggacggccccaccgacccaagggaaaggaggacaaaaggaaaaaaaaaaagg

SEQ ID NO: 111070 - RNA, 85 nt, Homo sapiens
cgacccgggagcccggggcaggagaccgaggggagacagcagcaccagcggggcagagaccccagacacaagccgggaagggagc

SEQ ID NO: 111071 - RNA, 76 nt, Homo sapiens
gcccaaggacagccaaaaccagcaacaagcagagaccgaggaacggaggccgaacaacagggacccaggcaggcca

SEQ ID NO: 111072 - RNA, 70 nt, Homo sapiens
gggccaaagaagaaccgaacccgaacaccagcccagcggcaggggcgggcagaccacccggggagaggaa

SEQ ID NO: 111073 - RNA, 57 nt, Homo sapiens
cggggccccggcagacggaccccacaaggcagagagcagacccaaccgcgagcaccg

SEQ ID NO: 111074 - RNA, 66 nt, Homo sapiens
gaacgacgccaaagagcacgcagagagcccggcagaccgagacaggggcccggcaccgcgcccgag

SEQ ID NO: 111075 - RNA, 62 nt, Homo sapiens
gccaccgaaggaagcacccagacaccgggaagagcgaggggaggggaaagggccgcagggcc

SEQ ID NO: 111076 - RNA, 72 nt, Homo sapiens
aagcgaacgaagagcaccgggagcggcgaagaggcaccggaggaggaaccggccacgcccggccggcaagac

SEQ ID NO: 111077 - RNA, 82 nt, Homo sapiens
ccgcccggcgcagcggggaccggcggcggcgcccaggcacccggcccgggacccaaagacaggaccacgcaccagcagagaa

SEQ ID NO: 111078 - RNA, 68 nt, Homo sapiens
caacagaaccggaacggcaacggagaagaagacaaccagcaggagacgcccagccacgaagggaagac

SEQ ID NO: 111079 - RNA, 71 nt, Homo sapiens
cacggcggaaggaccgggggagaggcgcaagccgcagcgggccccgcggaccggaagcccaagaccaccca

SEQ ID NO: 111080 - RNA, 83 nt, Homo sapiens
gccgagggggggagcggggcgcccgcgcagcagcccaggagcggcagccaggaggcaggagcagcgggcgacaggcgggcccg

SEQ ID NO: 111081 - RNA, 70 nt, Homo sapiens
acgaaaggggagaccaacaacaacaaccggaaacacgaaggaacccaaagcaacaccgggcgcgcacaga

SEQ ID NO: 111082 - RNA, 69 nt, Homo sapiens
agaacggaagcgcgccaaggacccagccggagacgggaaagaccacagcaagaccacgcccccagccgg

SEQ ID NO: 111083 - RNA, 73 nt, Homo sapiens
gcgggcagacagccgacagcagcgaccaggcaagaggaaccagccagagcagagcaggacagcgccaggacca

SEQ ID NO: 111084 - RNA, 75 nt, Homo sapiens
aaccacacggggagcacccaaaccaaggcgccaaggccagcagagcccaagggcgccagccaccacccagacgac

SEQ ID NO: 111085 - RNA, 42 nt, Homo sapiens
gagacggcagcagaggcgaaccagggagaagcccgaggaagc

SEQ ID NO: 111086 - RNA, 78 nt, Homo sapiens
cccagaagcagcgccccgggagcgaagaagaaacggcacaaaggggacagccgaagcccagggcgaaaacagagacag

SEQ ID NO: 111087 - RNA, 77 nt, Homo sapiens
ggacagccaggcaccagggccacccccagaagcgcacccccaccgccaacaccgaagagaacgggccggagggggcg

SEQ ID NO: 111088 - RNA, 36 nt, Homo sapiens
ccgcccccagcccgggcagcaggaggggggaagcag

SEQ ID NO: 111089 - RNA, 58 nt, Homo sapiens
gcagagggacgaaagaagcgcagcggaggaaggcgaggaggccggcacgaagaccgcc

SEQ ID NO: 111090 - RNA, 71 nt, Homo sapiens
gagcgcaccacgaggaagggaaggaaggaacacgcaaaaaacccccaaggacacaggacggaaaccaggag

SEQ ID NO: 111091 - RNA, 63 nt, Homo sapiens
cccagccagaacgagcggcccaaaagacggcggcaaacagcgaccgcccggggggacgagagc

SEQ ID NO: 111092 - RNA, 69 nt, Homo sapiens
ggcagaagccgaacacgacagaaagaaaggccaaagcagcagaccgcaaaacgggacaagcccgcacgc

SEQ ID NO: 111093 - RNA, 52 nt, Homo sapiens
agcaaacagaaaggccaaaacccccaagggaccccaccacgccgggacacca

SEQ ID NO: 111094 - RNA, 70 nt, Homo sapiens
aagagccagaaggacacacacccccaggcaacgaggagacggaagacaacccaggaacaacacaagccga

SEQ ID NO: 111095 - RNA, 69 nt, Homo sapiens
ccgaaacaggcagcgagagacccgccgaaaaggaaggaaaggaaacagaaggaaggcacacaggaaaag

SEQ ID NO: 111096 - RNA, 70 nt, Homo sapiens
aaaagggaagccaagaacagcaacgacccaaaggagaggaaggaacaaggacgcagaccggaaaaagcca

SEQ ID NO: 111097 - RNA, 115 nt, Homo sapiens
ccgaagaccagcccagaaaaccaaccccaaagggccagagagcaacgacccaggaaaagaaagcgcaggaaaaggagcgagaagaacggaagcgaagcgaaagaaaacaacagga

SEQ ID NO: 111098 - RNA, 73 nt, Homo sapiens
gcacggcggggccgcccagcgcaagagaaaggccccggggcagaagagcggcgccgaggagaaggaaaaagac

SEQ ID NO: 111099 - RNA, 76 nt, Homo sapiens
gagcaacaaagaagggcggaggccacgccgccaagagacagccgaccgacgaggaacaggagacagcggagaaaga

SEQ ID NO: 111100 - RNA, 67 nt, Homo sapiens
aagagaaagccgcaaaaggccccaggagcaaggcacaacgagccagcccaggaacacagaccaccag

SEQ ID NO: 111101 - RNA, 42 nt, Homo sapiens
accagccggcgcaagcgggcgaaggcggcaggagggaaagca

SEQ ID NO: 111102 - RNA, 69 nt, Homo sapiens
aaaacagaaccgcacagccgggaccagcagcgcagcgcccgcagccacgcaacacaagccaacccaaca

SEQ ID NO: 111103 - RNA, 60 nt, Homo sapiens
gaagcccgcaaccaggagacaaaaggcagaaaagaaaggaagcaagagcaggcagcaaac

SEQ ID NO: 111104 - RNA, 38 nt, Homo sapiens
caggaccaggcacccgggaagacggcgccaaggggcca

SEQ ID NO: 111105 - RNA, 86 nt, Homo sapiens
gggggcggcaggagagggacgcgcggcggcagcgagcgcaggccaagcagaagaaccagcacaggcgaagccaaccaggcgcaaag

SEQ ID NO: 111106 - RNA, 56 nt, Homo sapiens
aaagggcagggacagcgcaggcagcagcacaacagaagggcaaagacagcccaaga

SEQ ID NO: 111107 - RNA, 80 nt, Homo sapiens
cccgccagaagaggagacgacggacggcgggcaccggccgacggaccagcaacaaggcagagcgaacccaagcagaaggg

SEQ ID NO: 111108 - RNA, 85 nt, Homo sapiens
cagagagagagcgcgagagaggagagggcagacggacaagagcgcggaacaggacgccccgaggcggaaaacaccccaaaagcca

SEQ ID NO: 111109 - RNA, 75 nt, Homo sapiens
acaagagccgggggaaccgagccgcacgggcaacaagggaaaaggcggaggcccacgacaaaagcaaccccgaaa

SEQ ID NO: 111110 - RNA, 80 nt, Homo sapiens
ggaccacaagacccacgacaggcacacgggcagaccgggcgagccccccagccccaccaccacaccaaacgggcgggaca

SEQ ID NO: 111111 - RNA, 73 nt, Homo sapiens
cacgggaagagccgccggggcggcggagacaaagaggggccgaagccccggcccgaagcacagggcagaacac

SEQ ID NO: 111112 - RNA, 69 nt, Homo sapiens
gaaaaaacaagaaggacacaggagaagaaaggagaaacagagggagaacaagaaggacgcgaaagaaga

SEQ ID NO: 111113 - RNA, 78 nt, Homo sapiens
gggcccccgccccgcggggccccagccgcgcgccgcgaggacacgccgcgcggaggccacggaaggcagcagccaaga

SEQ ID NO: 111114 - RNA, 73 nt, Homo sapiens
agaaggaccaagaaccagagcggaccgcgaagagagacacgcaggaaagccccagccacccacaaacagagag

SEQ ID NO: 111115 - RNA, 74 nt, Homo sapiens
agccgcgccgcagggcgcccggccgccaggccagcgcaagccaggcggcagacaaacggaaccaaccaaagcaa

SEQ ID NO: 111116 - RNA, 77 nt, Homo sapiens
cgcccccccaccgacacagcccagccggcaagaaagcgcaaggggaacgcacaacacagcaaaggaaccagggacca

SEQ ID NO: 111117 - RNA, 80 nt, Homo sapiens
ccagggcgcgggggaaaacccggcccgagaagacacacagcccaaggaggagccaggaagcgccgccccggccgaggaag

SEQ ID NO: 111118 - RNA, 87 nt, Homo sapiens
agaagccccgggagcaccgagaagcggagaagggcgaagcggccaggcccgggcggacgcagagccagagcgccccagaggagcaga

SEQ ID NO: 111119 - RNA, 40 nt, Homo sapiens
gagaggagccaccgcgcccaggagaacgcgaaccgggagg

SEQ ID NO: 111120 - RNA, 74 nt, Homo sapiens
gcggaaagcacgcgcacagaggggacacaccggaagacgcaacacaggccgcgagggggcaccgaagagcggcc

SEQ ID NO: 111121 - RNA, 70 nt, Homo sapiens
caccccgaagaacagacacccgcaaacgccacggcagagaacgggaaccggccggcacggaacaggccca

SEQ ID NO: 111122 - RNA, 82 nt, Homo sapiens
caagaccggcaagagaagaaaaacaccgggaggaaggaaagcacggggaggcaacaggccaggaagaagcaaaggaagacag

SEQ ID NO: 111123 - RNA, 81 nt, Homo sapiens
gaggcagagggggcccagagccgggcgccacccgaggacaaggaccccaaaccagacagaggcggccgacgaacagacccc

SEQ ID NO: 111124 - RNA, 51 nt, Homo sapiens
aagagaagaggagcaccgccagcgcaagcgaaccgccacacaaaaagaacc

SEQ ID NO: 111125 - RNA, 71 nt, Homo sapiens
gaacccggcccccagggccacggcagcgggcgcgaaagcaaggcaaaccagggggccacacagagcgcaga

SEQ ID NO: 111126 - RNA, 85 nt, Homo sapiens
gcggcggcgccccggggcccggcggcggcaaacggggacagcgccgaccggaacagggaccacggaagcccaggaccagccccga

SEQ ID NO: 111127 - RNA, 67 nt, Homo sapiens
aggaagccacaaagcagcgacagccggcccccaggaacccagagaagacgaagccgggaacggagag

SEQ ID NO: 111128 - RNA, 42 nt, Homo sapiens
gccaagggcacagagggagagcgccaaggggccaagggagag

SEQ ID NO: 111129 - RNA, 78 nt, Homo sapiens
ccggcccccgccaaccgaccggccaacgacgccccaaggcgccaaggaggggacccccaggaggggagcccaaaagca

SEQ ID NO: 111130 - RNA, 78 nt, Homo sapiens
gcgggccagggaggaaccggccccagccaacagacacaccagggaccgacacaagaagcagccagaacagacgggaaa

SEQ ID NO: 111131 - RNA, 67 nt, Homo sapiens
ggaacgaaggaacagaaaaggcaggaaggagcccggggaggagcggaaacagaacccaaggaaagac

SEQ ID NO: 111132 - RNA, 84 nt, Homo sapiens
acacgcaggaaagccccagccacccacaaacagagagaaggaaccacccacgcaggcagggcccgaggcaccaacgcaaggacc

SEQ ID NO: 111133 - RNA, 75 nt, Homo sapiens
caccggaaaaaaccaaaaaaccaagaacggagaacgaaaaacccaccagcaggcagaaccggccacacccaggac

SEQ ID NO: 111134 - RNA, 71 nt, Homo sapiens
aacaaaaggaagaaaaggaagaaaggacaaggagaaaaccacagagacaaaaccaaaggaggaaggccagc

SEQ ID NO: 111135 - RNA, 79 nt, Homo sapiens
ccacgcaacagcaccggggacagcgagcggcacagaagaccacgcccaggacacaaggcacgaggacgaagaggaaagg

SEQ ID NO: 111136 - RNA, 68 nt, Homo sapiens
ggaggacccaagcagggcacaggaacagggcacacaaaggaacagaaaacaacacgaggaggagaaag

SEQ ID NO: 111137 - RNA, 69 nt, Homo sapiens
caagaagggaagagaacccaacagcccaagcccaaagcccagccaaggacccgaaaaacgagccacacc

SEQ ID NO: 111138 - RNA, 71 nt, Homo sapiens
gcgaagcaagacagcagacagagcaaagccggccagacaaggagagcaacacaaggaagcaagggccaccg

SEQ ID NO: 111139 - RNA, 75 nt, Homo sapiens
acggcgccgaccagcaccaggggaagcgggacaacggggaaacgaggaaagaaccaaggaagacacccgccgaca

SEQ ID NO: 111140 - RNA, 80 nt, Homo sapiens
caaaagaaaagaagcaggaggagaggacagcccagagcaagcacacggaggcccgggagccagaccgggagcccgcccca

SEQ ID NO: 111141 - RNA, 70 nt, Homo sapiens
gagcgagggggggcgcgccggaaaccggagcgcgcagcagagagaacggacgagaccaacgcggaaacca

SEQ ID NO: 111142 - RNA, 104 nt, Homo sapiens
gccgccccgccccacagaagccgcccgacccaagcacgcgccacgcacacacaggaggaacgcgcgggggacaggcgcccaggaggacaacagcaaacagcacc

SEQ ID NO: 111143 - RNA, 35 nt, Homo sapiens
ggacccagggagcagccccaacgaggccccgagcg

SEQ ID NO: 111144 - RNA, 83 nt, Homo sapiens
cggacccggccaggccaggcccggagccgccccagccacaggaaacgccaagagcgagcggacgaggagcccggaagagacca

SEQ ID NO: 111145 - RNA, 76 nt, Homo sapiens
aaggcaacgcacacagcccagaaggagcggcgcaccgcccccagggaacgagacacgcgagcggaagaccgcgggc

SEQ ID NO: 111146 - RNA, 59 nt, Homo sapiens
agagccccacgggaaggagagcagccagcaggccagcgcagaagacgagaagccaggag

SEQ ID NO: 111147 - RNA, 54 nt, Homo sapiens
ccggaagcaccagcgaggaaggcgaccggcccgaggaccgccgcacgaccaaac

SEQ ID NO: 111148 - RNA, 63 nt, Homo sapiens
cccagcgcgggaggccgagaaaacacccgccggacgacccacaaagaccccaaaccaagcccc

SEQ ID NO: 111149 - RNA, 87 nt, Homo sapiens
gacacggacgaccgcgcgcccgcccggcccgcacgccaagcacggggggcaggccaccggacagagcgggagccaccagcgccaaag

SEQ ID NO: 111150 - RNA, 63 nt, Homo sapiens
aaggaccaagaaccagaggcggaaagaaagacggcgccaaggagaggagcaaccaacgcaagc

SEQ ID NO: 111151 - RNA, 79 nt, Homo sapiens
caagaagccaacggagaaccaaggccaagaccagaaccagcccgggaaagccaaaacggacaagccaaggcacgagcca

SEQ ID NO: 111152 - RNA, 87 nt, Homo sapiens
agaaaggaagacgagggaacgagagggcacggggcccccaccacagccagcagcgagacagaccccaccagccccagcaggacaacc

SEQ ID NO: 111153 - RNA, 81 nt, Homo sapiens
caaaaccaagccagaagaacaccgaggccgagcaaaccagccagcacgggggcccagccagccagcagcgaggggggacgg

SEQ ID NO: 111154 - RNA, 92 nt, Homo sapiens
gcgagcccacgaagaggacgaccggagaacgcgaggcagagcgggagcgcgcagccagcaaaagcggcaggcgacagaggcggcccaggacg

SEQ ID NO: 111155 - RNA, 80 nt, Homo sapiens
cggggcggccggccaggaaccacccgaaggggacggaaagagagccgcagcgcagaacaagggaaaaaagggcaaaaagg

SEQ ID NO: 111156 - RNA, 75 nt, Homo sapiens
agggccaaagaagggagagagcaggacagcgaagagacacagaacggaaggagagcagcagagggggcagagcgg

SEQ ID NO: 111157 - RNA, 60 nt, Homo sapiens
ccaacccaagaagcagaggacagcgaccgaagaagcacgacaaggaagacagcaacccca

SEQ ID NO: 111158 - RNA, 77 nt, Homo sapiens
aggccgccagcagaggcggagcccgcagaccgcagaaggccggagacaccagcaggaaacgggcccccgcccaacag

SEQ ID NO: 111159 - RNA, 60 nt, Homo sapiens
ccaccgcgaccgaccgcagcgcggccgggagcgcgggccccgaaaggggcggaaaaacca

SEQ ID NO: 111160 - RNA, 55 nt, Homo sapiens
ggaggaacagagggggaaaagaccccgggcacagaaaaggggaacgaggagaggc

SEQ ID NO: 111161 - RNA, 99 nt, Homo sapiens
cggaagaagcaggaggcaagaaaggggaaccccggagaaaaggccaagaaggcaggggagccgccaccaaaagcagacggaaaacccacggggaagacc

SEQ ID NO: 111162 - RNA, 80 nt, Homo sapiens
acagagagggcaccggaagaaggccggcgccagcgccagcgaggaaccgaacccagccaaaaggccccgcgccaccacgc

SEQ ID NO: 111163 - RNA, 77 nt, Homo sapiens
ggagacccaggcgggacagagggagccaggcagagacagcaggcggcaccacgcggggccaaggccggggcgagcgg

SEQ ID NO: 111164 - RNA, 89 nt, Homo sapiens
caccagcacagcaaacccgccgggacaaaggaccagcggcagcagggggcagccacagcagcccagggacccagcaacaggccccgccc

SEQ ID NO: 111165 - RNA, 75 nt, Homo sapiens
cggaacccacgcgcccgggagcacgagagccaacggcacggggggccggaggacgcggggaaccagaccgggcca

SEQ ID NO: 111166 - RNA, 76 nt, Homo sapiens
ccacccgggcccaccaaaaccagcccccgggcgcacagggggaaagcagcaggggccagaagacaaaaccgaacca

SEQ ID NO: 111167 - RNA, 74 nt, Homo sapiens
cgaaggcagcacaggaccggaaaaaacaaggaacagaaaaagggccaaaaacgaccaagagaacgaagaaaacg

SEQ ID NO: 111168 - RNA, 79 nt, Homo sapiens
gaagcccagagagcaccccagcgaggcccacagaaaagccacaacccagcaccggccacacacaggacaagagcgaagc

SEQ ID NO: 111169 - RNA, 54 nt, Homo sapiens
aaagaggaaaggacacaaggcccagaaacacccgggaaacccagacgacaagga

SEQ ID NO: 111170 - RNA, 61 nt, Homo sapiens
ccgaccggagccgcccaggacggcaggggaccgcacaagcaaaggcagacaagaccagcca

SEQ ID NO: 111171 - RNA, 68 nt, Homo sapiens
aggcccggaccaacagagagaaagccagaaaggagcagcagagcgaaaccaaggagaaaacccaacga

SEQ ID NO: 111172 - RNA, 84 nt, Homo sapiens
ggcgcggcaggagggagcaggagcggaccggcccggaaggcgaaacgacgccaggcggagcacgcggagaggccacccgcccgg

SEQ ID NO: 111173 - RNA, 78 nt, Homo sapiens
acacgcaccagagccagggcgcaggagcagcagcacaggcacagccagggcgaaagaagaccccgccaccggccccca

SEQ ID NO: 111174 - RNA, 82 nt, Homo sapiens
cagcacccgagcaaaccccagcaagagcggaggcgcccggcggagcagaggaaccacacgcgacagggggagcgacacccaa

SEQ ID NO: 111175 - RNA, 70 nt, Homo sapiens
agccgcggggcggggcggcggagcgagcagccgcaggacgcggcacggacaccgggaagaccggcgacgg

SEQ ID NO: 111176 - RNA, 67 nt, Homo sapiens
gcggcggccagcgccacgcagggacagggcgagccaagaggaggcccccagcacggggaccagaggc

SEQ ID NO: 111177 - RNA, 81 nt, Homo sapiens
aagaacaacggcggagcgccaggacagacaccaccagaaagcccgaccagaggaagagccagggacggagagaaaaacaga

SEQ ID NO: 111178 - RNA, 85 nt, Homo sapiens
aagaaaccagcagacagaagcagggaccaagaaaggcccagggaccaaagcccggacaaggcccgagcaccaggaccgcagaagg

SEQ ID NO: 111179 - RNA, 74 nt, Homo sapiens
cccgaacccggaggaggcgaccgcggcgcagcgacccccgccaggcaaaaggaagaggggaacaacagaggagg

SEQ ID NO: 111180 - RNA, 85 nt, Homo sapiens
gcgcggagccgcgcagccccggagcacggcgccagcagaaccggcggggagccgcagaacccagcggcagcaaggccgccgccgc

SEQ ID NO: 111181 - RNA, 89 nt, Homo sapiens
ggagacagcggaaaacacaggggccgcaaggccaggcgcgcagaggcacccaacggcacagaccccacacacaacgggacaaacgagcc

SEQ ID NO: 111182 - RNA, 78 nt, Homo sapiens
gcagacgggggacgcagggaggagcgggacaccccggaagcgggaaagggcggagaacggaaaagcaccaggaagcag

SEQ ID NO: 111183 - RNA, 82 nt, Homo sapiens
aacgggaaacacacacacaaaaaacccacacaggacgcggacaagggcggcagggggcccgaaggcaccgcagaacggggcg

SEQ ID NO: 111184 - RNA, 74 nt, Homo sapiens
cccagaagaagggcaccagcgaaggccgcagacccaggagagaacaccgaccgcagaacgggcggaagcaaaaa

SEQ ID NO: 111185 - RNA, 58 nt, Homo sapiens
gagaccaaggcgcgcccggcgggccggaccaaggacccaggagcgacaccgaacccac

SEQ ID NO: 111186 - RNA, 98 nt, Homo sapiens
gggcagaggcgggccgccgagcggacccggaccgggggggcaccagcgggcacaccaagaagcgccccgcaagacccaccgaggccgcgcaaggggcc

SEQ ID NO: 111187 - RNA, 73 nt, Homo sapiens
gcgggacacacccccaggaggcccggcagagcaggcccggcagaagagaaccccccgccccgaggacggcccc

SEQ ID NO: 111188 - RNA, 52 nt, Homo sapiens
cagacaccaagagagcccacagacccagccacgaagcggaagaacaacggcg

SEQ ID NO: 111189 - RNA, 70 nt, Homo sapiens
cagccgaccgagcccaggagcgccacgcgcggaaggcagcgcccagcagcgcagggaaggacaacaagac

SEQ ID NO: 111190 - RNA, 83 nt, Homo sapiens
gccccgcccccgccacccgagcgcggagcagcgaccagagagcgcggccggaggacagacgaaaaggggaaaggagaaagaag

SEQ ID NO: 111191 - RNA, 71 nt, Homo sapiens
gcgcgcgcgcgcccggaaaccggcgacagaaaggcaggaaggacaccgcaccgccccccgggccccgcgac

SEQ ID NO: 111192 - RNA, 60 nt, Homo sapiens
ggggcggggggaacgggaaagcaacggcgcaagcggcggcggcgggcagaggacacacag

SEQ ID NO: 111193 - RNA, 71 nt, Homo sapiens
ccaaaacacacccgcccggacggccggagccaggcccaagagacagacccagcacggaccccccccccagc

SEQ ID NO: 111194 - RNA, 64 nt, Homo sapiens
ccccggcgccgcgccggcggcggggaaccagaagaggccaaccagcacgaacgccagcagcacg

SEQ ID NO: 111195 - RNA, 40 nt, Homo sapiens
gggagagggaccgcgccaccggcccagccacccacgcacc

SEQ ID NO: 111196 - RNA, 64 nt, Homo sapiens
ccgccggcaggcggccgcagcaacccgccggccggccgacccccagggcacaacggggacccag

SEQ ID NO: 111197 - RNA, 73 nt, Homo sapiens
gaccagcacacagaccagcaagagggaaagaagggaaaggcagaacgcaaaccgaaaggcagaagcacaagca

SEQ ID NO: 111198 - RNA, 82 nt, Homo sapiens
gaagcacgaaagcgggagagggaccggaacggcggcgacaaggggcccgaacagaggggagccaaaaaccgaacacccggaa

SEQ ID NO: 111199 - RNA, 75 nt, Homo sapiens
acaggcggcgccaccgaacagacccggaaggacggcgaggccaagagaaaccaccaagagccaggaaggcaaagg

SEQ ID NO: 111200 - RNA, 78 nt, Homo sapiens
agagggggaggcaggagaccaagggggaacacaccgaaacagaggaacagcagggcagaggacacgagccaagaagca

SEQ ID NO: 111201 - RNA, 84 nt, Homo sapiens
cagaacgaagcgagcaaaggcgcggccaggggagcgcggagcaagagggacacgcccaaacccaaaagaggagagaagaccaag

SEQ ID NO: 111202 - RNA, 66 nt, Homo sapiens
gagcagccacaggacccgaagagcaggaagaccgcaggaaccacccacaccgcagaaggaaaccga

SEQ ID NO: 111203 - RNA, 68 nt, Homo sapiens
agccagggaagagaaggccagcgcaaacgagaacagcacgcacccaagacgccgagacaaggaagcaa

SEQ ID NO: 111204 - RNA, 72 nt, Homo sapiens
ccagagagcgggacacaggccaaagagcacagggacagaaaaacagcgcagacgagccgcaaggacaagacg

SEQ ID NO: 111205 - RNA, 82 nt, Homo sapiens
gggaagaggagaaggcacccgcggaaccgacggccagggccggacgcggcggaggcgagcgagagacggccggcgaagagcc

SEQ ID NO: 111206 - RNA, 79 nt, Homo sapiens
ccccggacaccgcggcgggggcccgcgagcggaaccggcggcgccggacccaggcaaaagcgcacacaacagaagagaa

SEQ ID NO: 111207 - RNA, 51 nt, Homo sapiens
gacgagcaaaggaagcgcgaacagcagcgcagagacccgcgaacacaaaag

SEQ ID NO: 111208 - RNA, 74 nt, Homo sapiens
ccagcacgaggccgggggaggcggaaccagcgcaagccagaagcgcggccacccaccccaccagagccggacac

SEQ ID NO: 111209 - RNA, 65 nt, Homo sapiens
gaacggagaccgaccagaacagagagaaggaaagcgcaaagccgacgaggagagaccccgcagcg

SEQ ID NO: 111210 - RNA, 59 nt, Homo sapiens
ggggggagcagcggagccggcccggaggacagcaggaagcggcggcccgaggacaaggc

SEQ ID NO: 111211 - RNA, 86 nt, Homo sapiens
aggaacacggggaacaaggaggagaagaaggaggggcgcggccccgggccaccgggcgcggacccggcgcaaggaagccggagaaa

SEQ ID NO: 111212 - RNA, 58 nt, Homo sapiens
ccgggccggcacccaagggccaaccgggggcagcgcacagcccagcggaggacacgcc

SEQ ID NO: 111213 - RNA, 58 nt, Homo sapiens
gaacgccaagcgggccagaaaaagaggaacgaggaagaacagcaaagaccaacagagc

SEQ ID NO: 111214 - RNA, 74 nt, Homo sapiens
acaagagacgggcagacgaaggcacgccccaccggaggaagcaaaaaaagcaggaaaggagaagggagacccag

SEQ ID NO: 111215 - RNA, 72 nt, Homo sapiens
gaacccggaagaaagaaaacagaagcggccagcaacagaagaaagcaagcaccggggaaagcggcccgaaac

SEQ ID NO: 111216 - RNA, 60 nt, Homo sapiens
gccagccgcagaggaagacccgagggcgaagacaggacggcccaggcagacacggaggag

SEQ ID NO: 111217 - RNA, 78 nt, Homo sapiens
aagcccaagccccgcccccgcagccgccaagagcaggacccaggcccaaaaggaaaagccagacacaccccagagacc

SEQ ID NO: 111218 - RNA, 67 nt, Homo sapiens
aaaggacgcgccgccgccaccagcacacgacagcacagccagaaacaggaccgcccgcaccaggagg

SEQ ID NO: 111219 - RNA, 74 nt, Homo sapiens
agagcagaaaagaagaaacgggcaacaaaacccaaggaaaacagcaccaacagaaagcccaagcgcaaaaaaaa

SEQ ID NO: 111220 - RNA, 38 nt, Homo sapiens
ggagccaaggaagccaagagagacggggcaccggagcc

SEQ ID NO: 111221 - RNA, 83 nt, Homo sapiens
cggcggggccgcccagcgcaagagaaagcaaacaagagccagagaagagaaaggaagagaaccgaccaaggggcagaccggga

SEQ ID NO: 111222 - RNA, 84 nt, Homo sapiens
acaaaagccacccaggccggccagcacccaccgagaaggccagcagagggggccggaggagaggggaggagccaacagcgggaa

SEQ ID NO: 111223 - RNA, 52 nt, Homo sapiens
cccccgaccgcccagacggaagccggaacgccccaccccaccccgaagcgac

SEQ ID NO: 111224 - RNA, 70 nt, Homo sapiens
ccggcaggcaaggggcggaagaggccagcccagccgggggccggaggcagggcggagcgagccaaagccg

SEQ ID NO: 111225 - RNA, 74 nt, Homo sapiens
gagcaacccaggccagccaggagcacagacacgacggaaacagcacggaaaaccgcgacggaaaagaaaacaaa

SEQ ID NO: 111226 - RNA, 74 nt, Homo sapiens
acacaaccgcccagccggcgagggacgccgcaggggcccgggcagagggaaagcagaggacggaacaacccggg

SEQ ID NO: 111227 - RNA, 72 nt, Homo sapiens
cgaccaaagggcgcaaggcccgagcagcaaacacaaacaaccccggacgcggcgcagcaacaaacagcggcg

SEQ ID NO: 111228 - RNA, 56 nt, Homo sapiens
ggaagccgcgaacccccgaccgggagcccacgggagcaagacagcacccgggccag

SEQ ID NO: 111229 - RNA, 74 nt, Homo sapiens
gaaggaacgggccgaaccgggagcgaggaaccagaacgaaaagcgccagaaagaccggccccagaaaccggaga

SEQ ID NO: 111230 - RNA, 98 nt, Homo sapiens
aaaagaaaacaaggcgaccgcagccccccgcccggaggccgggaaggaccgcccaaccgcggcgccaagacgggaccacggaaggagccggaaaaagg

SEQ ID NO: 111231 - RNA, 36 nt, Homo sapiens
cccagagccggggaagggcgcacagggacgaagaac

SEQ ID NO: 111232 - RNA, 53 nt, Homo sapiens
agagaggaagaagaacgacccgcccggggcagcaggacagaaaaccagagacg

SEQ ID NO: 111233 - RNA, 76 nt, Homo sapiens
cagggagcagggaccagcgacgcacccgcggggccacgcaggggccggcggggcgcgaagaagcagggaacggagc

SEQ ID NO: 111234 - RNA, 113 nt, Homo sapiens
ggaaagcaccagacgccaccacgggcacccgcgccgggcaccgaggaccagccaagacaggagcacccacgggaacagcccagaaacgagggaaaaacgaagccgaccggaac

SEQ ID NO: 111235 - RNA, 40 nt, Homo sapiens
ccccgagggcgggacacagaaccacccaagaacagaccaa

SEQ ID NO: 111236 - RNA, 88 nt, Homo sapiens
cgggagcgcggaacagcaggcccgagcccaccgcgccgggccccggacgccgcgcggaaaaggaaaggcaaaagggagagccaaggaa

SEQ ID NO: 111237 - RNA, 83 nt, Homo sapiens
cgcagagagagagcgcgagagaggagagggcagacggacaagagcgcggaacaggacgccccgaaagacgaccccgacgcagg

SEQ ID NO: 111238 - RNA, 79 nt, Homo sapiens
gcccggagaccaacgaaacccccgcaccggggggccgccgggcgcggcaaggcgacacaaggccaacggacacacgggc

SEQ ID NO: 111239 - RNA, 81 nt, Homo sapiens
ggggaagggcaggaggaggaggaggggcccggcggcggggaggaaaccggagcacgcccgaagagcgcgcgaacggaacga

SEQ ID NO: 111240 - RNA, 75 nt, Homo sapiens
gagacaagagaccgacgacgaccggggacggggagcggaccgggaccagcccccgaggacacgcaggagacccca

SEQ ID NO: 111241 - RNA, 73 nt, Homo sapiens
caaaacggagacagagaggagccggaaagccagggaaaagcagagacagaagcacaaccagaacagcagacca

SEQ ID NO: 111242 - RNA, 52 nt, Homo sapiens
ccacagcacgcgcaacaacagaagggaaaaaccaacaaggcaaagcaacagc

SEQ ID NO: 111243 - RNA, 74 nt, Homo sapiens
gaccgcgcgcgagcgccggcccacgggcggcccgaagacccaaggaacacacggaccgaaggaccgccacgccg

SEQ ID NO: 111244 - RNA, 82 nt, Homo sapiens
gggaaccgggccacagggcaagggaagcgggggccgaggcgggaccacagcacggcccacgacaccagaccagcaagcgccg

SEQ ID NO: 111245 - RNA, 75 nt, Homo sapiens
ccacagggccaacaagcagcgagggcggagaacggaaaagcaccaggaagcagagaggaccgcagaagggaagga

SEQ ID NO: 111246 - RNA, 123 nt, Homo sapiens
gacggccgcgcgggcggcggcggcggccggagcggcgagcaggcccgcgcggcgccgggcgcgacgagaaagggggagagagagcggagccggaacagcaaaacaccagaaagaagaggcacc

SEQ ID NO: 111247 - RNA, 74 nt, Homo sapiens
acggcaacaagcgggacacccgggggaggcacgcagaggggcgggcacgcacgacagcgggcagagcgcacaaa

SEQ ID NO: 111248 - RNA, 62 nt, Homo sapiens
gaccaggaccgaaaccaggcggcggggaggaggccggcaagggccccagcgcagggaagaag

SEQ ID NO: 111249 - RNA, 79 nt, Homo sapiens
aacgaccggcccaggaccaaaaaagggggacacgccagcggcgcagccgacggaagaccgggagacaaaacaacagcag

SEQ ID NO: 111250 - RNA, 29 nt, Homo sapiens
gggggggacaaagggacgcagagcgcaac

SEQ ID NO: 111251 - RNA, 70 nt, Homo sapiens
caagcccacccaccagggaagcccgcacgcggaagcgccaggaaaagaagagaggcgaaagggcccacgg

SEQ ID NO: 111252 - RNA, 66 nt, Homo sapiens
acacaggagcacaacaaagaacggacacggcacgccacacccggacagacgccacgccgccccggc

SEQ ID NO: 111253 - RNA, 75 nt, Homo sapiens
aagaggagcagagcacaacaaggagagaacaggagagaaaaccggaagagagccggacaccaagcaacgagaaga

SEQ ID NO: 111254 - RNA, 80 nt, Homo sapiens
gcagcgaccgcgggcggcgacgagaggaggacgcccacagccacccaaaggcagcaggagaaacgagaagaaacagacgc

SEQ ID NO: 111255 - RNA, 83 nt, Homo sapiens
aggacagcggaaggcgcaaggcacaaaccaggggcccaaaacagaccaacgggacccacccccaccacggcacagcgagcgag

SEQ ID NO: 111256 - RNA, 62 nt, Homo sapiens
gcaccaaccggaggcacagaacgaaaccgagaaagcacagggaacaccagaggcgggaccac

SEQ ID NO: 111257 - RNA, 74 nt, Homo sapiens
aggagacaagagcggcgcacgccgacaggcaacccgacccacccgacacaaacaagcacggcagcaacaaagcc

SEQ ID NO: 111258 - RNA, 86 nt, Homo sapiens
gggagacaggcgacaccgccaaggagaaggacgcgccagaccaaggacccagaccccagccaccccccggggccccggaagaccac

SEQ ID NO: 111259 - RNA, 80 nt, Homo sapiens
ggagaggcccaggcgagggaaggagcacccaggagcgaaggccacgaacgacgcacggaggccacaacaccacaccacac

SEQ ID NO: 111260 - RNA, 72 nt, Homo sapiens
gcaacggcagggacggaagcaagaaaacgcacacggggaaaaaagcagcggaggagaaaaaaaagaagaccg

SEQ ID NO: 111261 - RNA, 62 nt, Homo sapiens
caaacagcacaagagcggacaaacccacaaaggcgccggaaacaccaacacaccgcaaaagc

SEQ ID NO: 111262 - RNA, 79 nt, Homo sapiens
caaaggcgggaacaaggggccgcacaggagacagcaccagccaagcgaggacacagcgccggcccaagacacagcgccg

SEQ ID NO: 111263 - RNA, 83 nt, Homo sapiens
ccgagaagccgacggacaagagaagcggaagcaaaaacagggaagagaacccaccccagaaggaggcaccgggagaaagggca

SEQ ID NO: 111264 - RNA, 71 nt, Homo sapiens
aaaggaggaaaagaagccagaccgagaaccggaacagaagacagggaaggacccaagagcggagaacccgg

SEQ ID NO: 111265 - RNA, 73 nt, Homo sapiens
gaaccccaggaaacggccaggcacccaccaacaggcacagaaggacacacgagaagaccaacccaggacccag

SEQ ID NO: 111266 - RNA, 66 nt, Homo sapiens
agccaaagggccggagcaaaacaaacggagagaggagggagaaacaaaggccaaagacgcaggagg

SEQ ID NO: 111267 - RNA, 74 nt, Homo sapiens
ggggccgaacgcaccggacgaaggacggggacgggggaaggagcagagccagggaggaagaaaagacagaagag

SEQ ID NO: 111268 - RNA, 62 nt, Homo sapiens
cagacggcacacgcagcagaagcccggaaacgcggcagaacggaggcaggcagcacgagaca

SEQ ID NO: 111269 - RNA, 74 nt, Homo sapiens
aaaacgacccagagaaaaaagggaccacaccagcagggacggagcgcacaggaaaggggagggcccggcaccca

SEQ ID NO: 111270 - RNA, 80 nt, Homo sapiens
accccacgagccgcgcccaggggcaggagccggggcggacagagccagggcccccgagaagcgcgcccaggcccaggcag

SEQ ID NO: 111271 - RNA, 85 nt, Homo sapiens
gccgccgccagcccgcaccgcgccccccaacacgccgcgcaggaacgggccgacgacaccaggcccacgccagggagcgggagga

SEQ ID NO: 111272 - RNA, 86 nt, Homo sapiens
acgcccgcggccgccggacggccgggcgcggagggccacaaagggagacaggaaaccccgaagaagccggagagggccaaggccgg

SEQ ID NO: 111273 - RNA, 81 nt, Homo sapiens
cgagggccagcaccaccccacggccagggccaccaaccccaacccggagagcggcgaggcaggaaagggcaaaggaaggag

SEQ ID NO: 111274 - RNA, 61 nt, Homo sapiens
gcagacgaacgaaaagagaaagacagcaaagaaaaggagaagaaaggaaaaaaacaacccc

SEQ ID NO: 111275 - RNA, 89 nt, Homo sapiens
cacagccagagcggaccgggccaagcaggggccgagccggaaccaaaaagaagccccagagccggggccaggagccccaagcgccccag

SEQ ID NO: 111276 - RNA, 74 nt, Homo sapiens
caggcggagaaagggcagaggcccccacgccgggagccccacgaccaggcagccacgacgacggggagcacgga

SEQ ID NO: 111277 - RNA, 79 nt, Homo sapiens
ccacggccacagccgccgcagacccagcagccaagagggaagcagacgagagcaagggccacacaccacagcaaccaag

SEQ ID NO: 111278 - RNA, 96 nt, Homo sapiens
acgggccgagagccgcccgggccagcggccgcgcacccccggccggaggcaccagcaccccgccccccgaggcgcagcccgaacccagcagccaca

SEQ ID NO: 111279 - RNA, 58 nt, Homo sapiens
gggacccgcaccggaaggccacgccaaggaaaggagcagaacccgggccaaacagcac

SEQ ID NO: 111280 - RNA, 101 nt, Homo sapiens
gcgggccgaccgggcgcaccgaccaggccccaaagccccaaggcgacaagaccggaccggaacgcacaccagcaccagcccaccaaaccagcacgaccccg

SEQ ID NO: 111281 - RNA, 72 nt, Homo sapiens
aaggccagaaccaggagaaaggcaccaaaggaggacgaagacggggggagagagggaccaccaccgccccac

SEQ ID NO: 111282 - RNA, 68 nt, Homo sapiens
ggcggagccaagcagcgggggaaacggcggagaaagaagccaaaaagaggcccggaacgcaccggaaa

SEQ ID NO: 111283 - RNA, 78 nt, Homo sapiens
gagaaggcagccgagcaccgagccagcccaggaaaaggagaggcgaggagggcgaggcagggcaaggcaacgaacaga

SEQ ID NO: 111284 - RNA, 71 nt, Homo sapiens
caagaaaaccaccagaccaaggaaaacgaacccaaaacaaaaccgggagggagcgagagaaacaacccggc

SEQ ID NO: 111285 - RNA, 68 nt, Homo sapiens
gagaaagagggaccaaagcacagaggcgggccaaaggggaggcaccacaagaagcaccagcaccaaga

SEQ ID NO: 111286 - RNA, 67 nt, Homo sapiens
acgcgcaagaccggcaacgaccggcacccagccccggacagaaaaaaacggaaggccggcccacagc

SEQ ID NO: 111287 - RNA, 67 nt, Homo sapiens
ggggagacgagccgcagaaagccagcaacaggaaaaacaggggcggggacccaacacaccaagaccc

SEQ ID NO: 111288 - RNA, 77 nt, Homo sapiens
agagagcagccacggaaaccggacaacgccagcacaagaaaaaccgccagcaacagaaaaaacacaacgcccagacg

SEQ ID NO: 111289 - RNA, 80 nt, Homo sapiens
gagcgaagggaagcagggggcggagaacagaccagaccacagcaaggcagcaccaagcccgcccgccgcgccggcccgcg

SEQ ID NO: 111290 - RNA, 66 nt, Homo sapiens
ggccgcagcgggccgcggccgaggaggcagcgcgaccccgcacgcccacagaggaacacaaaaaac

SEQ ID NO: 111291 - RNA, 61 nt, Homo sapiens
acgggggaagggcgcggaccggcagcagcggcaccgagcccagcagacccgaggaaggcca

SEQ ID NO: 111292 - RNA, 108 nt, Homo sapiens
cccgggggccacggacccggcgacaacacccggccccgagacagaagccggagccaaaaaccgaacacccggaaggggacaagggacggcgaacagaccccgcgcggg

SEQ ID NO: 111293 - RNA, 79 nt, Homo sapiens
ggccgacagcccacagcccaccaaagggaacgggaagaagcagccaccccaacaacccagaaggcggagcccaccccgc

SEQ ID NO: 111294 - RNA, 77 nt, Homo sapiens
cccccagcgaaccccaccagaacggcagcagcacaggagccagagcggaagcacgaccagcagagaaaagaaaaccg

SEQ ID NO: 111295 - RNA, 76 nt, Homo sapiens
acacaaagccgggggcccccacggacgcgcgagacaagaggagggaccccgacggagagacaaagaagacggaggg

SEQ ID NO: 111296 - RNA, 67 nt, Homo sapiens
gcagcggcaacaccagcggacagccaagccaaaaaccggcgcagagccaaaaggaaccgaggaaaag

SEQ ID NO: 111297 - RNA, 83 nt, Homo sapiens
gaggacccaggagacccgcgggacccgccgcggcgagcgccaccgcaggacgagccaacggaggcagccggcggaaacgaaga

SEQ ID NO: 111298 - RNA, 52 nt, Homo sapiens
aggagcaagcccaaggcaaagaggagggcggggccacgagacgagacgaagg

SEQ ID NO: 111299 - RNA, 72 nt, Homo sapiens
gcaggcaagagccacacccagcaccgaacagaccccgccccagcagaagaggagaagcgccacccaaggaac

SEQ ID NO: 111300 - RNA, 53 nt, Homo sapiens
caggacaccggcccgccaggaacagccaaaccaggaaaggaaccagaggaaag

SEQ ID NO: 111301 - RNA, 85 nt, Homo sapiens
gcagccccgagcacgggccgaggcccaccgcgacacaccgccagcaaacggggacagcgccgaccggaacagggaccacggaagc

SEQ ID NO: 111302 - RNA, 74 nt, Homo sapiens
aagagagagagggccgcaaaggaacagagacagacccgggggcccccaaggagagggaagaagccaggcagaag

SEQ ID NO: 111303 - RNA, 77 nt, Homo sapiens
gaaaggaacacggaaaaagcgcggggacgagacaagggcaacgagacacccagcggcccggccccgccgggagacca

SEQ ID NO: 111304 - RNA, 79 nt, Homo sapiens
cccggcccgggggccgccccggcgagccgcgacggcgccgcccacggcgaggaaaaagaagagcccgggaaagccaagg

SEQ ID NO: 111305 - RNA, 65 nt, Homo sapiens
agacgccgcgcacacccgagaacgcaaaccagccagcacgggggcccagccagccagcagcgagg

SEQ ID NO: 111306 - RNA, 74 nt, Homo sapiens
gggcgcccaggccgcccgacccaaagggaaaacagaaacaggccagcccggaacccggacaaacaacaccagcc

SEQ ID NO: 111307 - RNA, 61 nt, Homo sapiens
cagaaaccccgggaaggcccccagacccaaagaggcagagggcaggagcgagagcgacaca

SEQ ID NO: 111308 - RNA, 84 nt, Homo sapiens
gacgagaagaagggacagaaagagcccagaacacccccagacgacgcagccagagcagcaagaggccaaggggacgacggccac

SEQ ID NO: 111309 - RNA, 75 nt, Homo sapiens
gcgcggccacaaagaaccccaccgcgacacacgagcacaggagccggacacaagagggcaagaaaggcgcgacgg

SEQ ID NO: 111310 - RNA, 69 nt, Homo sapiens
ccagggccacggcccaccacccgggacacgccggaaaaaagcgagcacccgcaagaagagaacccaggg

SEQ ID NO: 111311 - RNA, 110 nt, Homo sapiens
ccgacccgggccaagagacccccaccacacgaggcaggagacgagaccacggcaagaagggaggagcacaaacgcccaccacacagcagaaacggcagggcacgcaccag

SEQ ID NO: 111312 - RNA, 77 nt, Homo sapiens
acccaaccggcccacccgccagccagccagcgcccaccggggcgcgagaacgaggaaccccagagaggacagaagcc

SEQ ID NO: 111313 - RNA, 78 nt, Homo sapiens
accagagcgcccggcccacgacacaggaagaagacaggggcggaggaggaggaaagacggggcacaacacaagaacag

SEQ ID NO: 111314 - RNA, 77 nt, Homo sapiens
cggcagccccacccaccggcccacccacaagcgcacaggaccggagccaggacaaaaccaggcagaaccaacacgaa

SEQ ID NO: 111315 - RNA, 81 nt, Homo sapiens
gggccccgggcgcccccgggggcggcgacccccccggagcccccccaaccccccggaaggaggcaaccacagcagaggcca

SEQ ID NO: 111316 - RNA, 51 nt, Homo sapiens
ccaaacaaaaaggcacaaccagggggcgaaacacaggacccgcaaaacccc

SEQ ID NO: 111317 - RNA, 75 nt, Homo sapiens
acaacaacaaaaaggacgcagcaggaagagagacagagagcccagcgagaaagggcaaaagaaaggcagccaacg

SEQ ID NO: 111318 - RNA, 34 nt, Homo sapiens
ccccgggggaaaagaacgagcggggacgagagcc

SEQ ID NO: 111319 - RNA, 75 nt, Homo sapiens
ggcagacgggcggaaaacaacaagagggaaacaagaagaaagccaggcggcacaccacagaaaccccaacaaggc

SEQ ID NO: 111320 - RNA, 82 nt, Homo sapiens
agaccgggcgccagggccgccgccccgcccgggcgcaggggacagcgcggaccgacagaccgccaacagccagcgcagccaa

SEQ ID NO: 111321 - RNA, 82 nt, Homo sapiens
ggcaggcgagagccgacccaggccgccggccccacagggacagcggccgaagccagagccggggcggcgccaggccccacac

SEQ ID NO: 111322 - RNA, 80 nt, Homo sapiens
aaagaagcaccgcgggcacccgcagccacgcggggccaggaggaccaagcacagccagccaggggggggggggggacagc

SEQ ID NO: 111323 - RNA, 75 nt, Homo sapiens
cagaggagacaaaccggagaaggagccaagaaagagaagagacaagcgggcgacacgagagggaagccccagagc

SEQ ID NO: 111324 - RNA, 84 nt, Homo sapiens
aacacaaagccggcacgcgcgcgaggcgaccgggagacccagccagaccgcccagacggaccggaggggaggggaccccaagaa

SEQ ID NO: 111325 - RNA, 80 nt, Homo sapiens
ccgcgccaagcacggaaccaaagaagcaggaacggaaaacacaccgggacccaggccagcggaccccaccgcaccacacc

SEQ ID NO: 111326 - RNA, 72 nt, Homo sapiens
gaccgagagcggaccgagagcgcgaaacgcacgagaagccagaccagacccaggggccaccgagcggaaagg

SEQ ID NO: 111327 - RNA, 78 nt, Homo sapiens
ccgagggcagcccgagacccaccagagggcgccacaaacgggccacccacaaaccgagagagacaaaacagcggcaca

SEQ ID NO: 111328 - RNA, 88 nt, Homo sapiens
ggccacgccagccacggcagccgcagcccgagggcaccgaggcgcagggcagaggggcagggaggcccgaagccagaaagccaaacgc

SEQ ID NO: 111329 - RNA, 81 nt, Homo sapiens
aacaaagaacccgcaaccagcagaagaaaggacggagaccgcccaagccccaaggaaagaacacaggcccaaagaaaaaca

SEQ ID NO: 111330 - RNA, 80 nt, Homo sapiens
ccgcggcgcccgccccagaaaaaaccagaggaggagaagagccgcagggcccagcgggggcgagggcaggagccagagcg

SEQ ID NO: 111331 - RNA, 80 nt, Homo sapiens
gcggggaggacagaaaccagggagcccaggcaggggaccaaaggaccccacaaagaagacagacagagaccagaagagag

SEQ ID NO: 111332 - RNA, 76 nt, Homo sapiens
ccccgcgacccggaccaccgggcgcggcgccccagccgggcccaaagcacaagcgaccgccgaaggagcccccgaa

SEQ ID NO: 111333 - RNA, 52 nt, Homo sapiens
gacgggcaggcaaaggcggaaaaaggcaccagaggacgaaacacacaaagca

SEQ ID NO: 111334 - RNA, 74 nt, Homo sapiens
cgcaacccgccgggccaggcagccgcacggacagccgccggggggggaaaaagggaccagggcgcgagccagaa

SEQ ID NO: 111335 - RNA, 74 nt, Homo sapiens
ggaaccgaagagcaaggaagacagcaaagcaagccaagagggcccagccaagaagcacggcaagagcagaaacg

SEQ ID NO: 111336 - RNA, 80 nt, Homo sapiens
ccagacggggagcgcagcagagggagcgccgaaggacaagaacagcgccgcaccagcaggggccccagacacgacgcccc

SEQ ID NO: 111337 - RNA, 130 nt, Homo sapiens
cggacacccccacgccccagcacccggacaccaaggagaacggaggggacacgaggagacgcccaaggacagagcgggagccaccagcgccaaagggaagccaggagcccgggggcacggggagaagacg

SEQ ID NO: 111338 - RNA, 70 nt, Homo sapiens
aaagggaaccaccaaaccagcaaacccacaagaacgccggagcacagaaaacgaaggaaagcaccaagcc

SEQ ID NO: 111339 - RNA, 77 nt, Homo sapiens
caccgacggccggggagggcgggccgagacagcaaccaccgaaacgggcgaaaaagaagaacagcaaaacacgaaag

SEQ ID NO: 111340 - RNA, 74 nt, Homo sapiens
ccggacggcgcggaccccgacggcgccggaggaaaacgcgagagagacgcaaccagcacaaagaaaaaagaaaa

SEQ ID NO: 111341 - RNA, 84 nt, Homo sapiens
acgacgcaccgcaggcagacaaaagggccaaagaagggagagagggaaagaacggaagccacagaaacgaccgcaccgaaaccc

SEQ ID NO: 111342 - RNA, 80 nt, Homo sapiens
ggaggcggggggaccggcgggcgggccagcccgcgggagcgccacacagagcggaagaaccgaccgggacgagggcacca

SEQ ID NO: 111343 - RNA, 74 nt, Homo sapiens
cggccggggaggcgggcaaaccccacgaggcggaacgcgacaaacagcgaggcgcgcgaccacaaagccccaag

SEQ ID NO: 111344 - RNA, 75 nt, Homo sapiens
aggagacgagaagaagacaagagaggaggcaggaccgggcaaaaaggcagcaccccagagacacagggaagaaac

SEQ ID NO: 111345 - RNA, 62 nt, Homo sapiens
ccagacaagaggacaccgcggaggaaggacccacgaggaagcggccgcggcgaaccccagag

SEQ ID NO: 111346 - RNA, 75 nt, Homo sapiens
gacaccacaagcaagccaaaagagggcagcccagccagcgaggggggccggggcaaagaccggcaagacggaagg

SEQ ID NO: 111347 - RNA, 70 nt, Homo sapiens
agggcgggaaggcagggagagggcggggacacagcgggcaggaagaagacgccgaggcccccccacccag

SEQ ID NO: 111348 - RNA, 81 nt, Homo sapiens
cgcaaagagccccggagaccaccgccaccgggacaagaagcgacgcaagagacacgagaagagaagacagaggagccagac

SEQ ID NO: 111349 - RNA, 79 nt, Homo sapiens
ccagccggcccgcgggggagccccgggagccgcacggaagggcaggcgaaaaaaacgagacaagacaaaaagaaaagga

SEQ ID NO: 111350 - RNA, 54 nt, Homo sapiens
caacacacggggacgagaagaaggaccaagaagcaagagccagccagagaacca

SEQ ID NO: 111351 - RNA, 81 nt, Homo sapiens
ccgcccccgcgggcgccgggccaggacgggacaccggaacacgggggcaacggcccggagggacgagaccccccacggggc

SEQ ID NO: 111352 - RNA, 75 nt, Homo sapiens
ccggggcccggcgcccgggcccgccccggaggaacaagaagggggacgaaaagggagacacgcccgcccaaggca

SEQ ID NO: 111353 - RNA, 62 nt, Homo sapiens
ccacgccaagcaaaccgggaaaggagaggacccggagccggaagggccgcccagcggcaccc

SEQ ID NO: 111354 - RNA, 71 nt, Homo sapiens
gaacgcaaaaccgcaggaagcgaaaacgaaagaaacgagaagcgcaaagccagaggcccacccgacgcgga

SEQ ID NO: 111355 - RNA, 45 nt, Homo sapiens
gaccgggcggaggccgccaagacggacgagacaagggcaacgaga

SEQ ID NO: 111356 - RNA, 70 nt, Homo sapiens
gaaaggggagaccaacaacaacaaccggaaacacgaaggaacccaaagccaagcagaagaaccagcacag

SEQ ID NO: 111357 - RNA, 90 nt, Homo sapiens
gacagaggggagcacagagaaagagaagagaagagaaaggcccggagacgacgagacaagggcaacgagacacccagcggcccggccccg

SEQ ID NO: 111358 - RNA, 74 nt, Homo sapiens
aggagcaggaaaaaagcagaagcccgaagcgaagagaaacaagccaaggaacagagaaggcagagggggcgagg

SEQ ID NO: 111359 - RNA, 39 nt, Homo sapiens
gagaagaagaccagacggcagaggcggagcacagagagc

SEQ ID NO: 111360 - RNA, 53 nt, Homo sapiens
gcggagagaacccccgaagagagccacaagcgaaaagagcgaggaagggcgaa

SEQ ID NO: 111361 - RNA, 83 nt, Homo sapiens
gcggcacggcccgccacagcgacgccggcgccgagggacaccgcagagaggcagagaaaagcaagaggccagaacaagaagcc

SEQ ID NO: 111362 - RNA, 61 nt, Homo sapiens
accgcgcggaccagggcgacaaagggacccgacagaagcgaaggggacagggggagaaccg

SEQ ID NO: 111363 - RNA, 72 nt, Homo sapiens
ggccgagacgaaaggcaggaaaacgacgcccgccaaaagcaggaaggaaaaaaagagcagcggagaaccggc

SEQ ID NO: 111364 - RNA, 73 nt, Homo sapiens
cgcagggagcagaggaagaaggggaagaaagagacagccgcggaaccaccagggaccaaaccaaaacggaaga

SEQ ID NO: 111365 - RNA, 70 nt, Homo sapiens
ccaagggagccacaagggccgggaacaaaagaaagggcgggccggccccagcgagccagcgcaaggacac

SEQ ID NO: 111366 - RNA, 80 nt, Homo sapiens
gagcgcaacagcagcaccaggaaagagacaaccaaccgggcaagcgcccaccggacccaggacccgcgagcccacgcaga

SEQ ID NO: 111367 - RNA, 77 nt, Homo sapiens
ccacggcacgggaaggacgccagggcgaggcggacagagcacagaccggagagaacagaaaaaaagcggcccgggac

SEQ ID NO: 111368 - RNA, 66 nt, Homo sapiens
gccgccgccgcgccgcagcgccaccgagcgaccagaaagaaacacggcgcaaacggccgacccgcg

SEQ ID NO: 111369 - RNA, 72 nt, Homo sapiens
acacggagaaggagaggacggcacaaacaagcaacgagacaagggcaaaaaaagacccagaagcccaaccaa

SEQ ID NO: 111370 - RNA, 70 nt, Homo sapiens
gaaagcaacccaagcaagaccagcagagaggaaaaacacaacccaagaaacggccaaagaacacggcaga

SEQ ID NO: 111371 - RNA, 74 nt, Homo sapiens
caaaggaccagcggcagcaggaacccaaccagaaccccggacgcgccaaacaggacgacgggcaggcaggggca

SEQ ID NO: 111372 - RNA, 88 nt, Homo sapiens
gcggaacggcaaagcagcacacaaagagggcacccagaccgcagcccgcacggcaaagcaaagaagagccgcgcagaacagaaggaca

SEQ ID NO: 111373 - RNA, 77 nt, Homo sapiens
gcaaaacacgcaaggagaggcaagggcggagcccacgccccaggacacgcagaggagcacacaaggggcgagagcgc

SEQ ID NO: 111374 - RNA, 81 nt, Homo sapiens
agaagaagaaaagcacgaacacccaaagccaagacaggaaagaggagagaaacgccaaagaaaaaacaaaacaaacaggag

SEQ ID NO: 111375 - RNA, 70 nt, Homo sapiens
gcggaaaaccccaaaaggacaaaggcagaaccgcgcaccagccgaacacgcagggagaggagcaggccaa

SEQ ID NO: 111376 - RNA, 65 nt, Homo sapiens
agcgacgaaaaaagaccaaggaaacgaccggaaacaaggaagacagccggccaaagcgcgacccg

SEQ ID NO: 111377 - RNA, 80 nt, Homo sapiens
gggaacgaggcgccgaccccacaggaagggaagcacagcgacccaacaccccaccagaccacccagcaagcccacaaaaa

SEQ ID NO: 111378 - RNA, 70 nt, Homo sapiens
gaggcaggggccaacaccaacaaacgaagaagccggggacgagccggaagagggacaggaagcgaaaaga

SEQ ID NO: 111379 - RNA, 82 nt, Homo sapiens
ggccccagacgcgcacggagcagaaaacaaggaggaggcgagcgccgaaaagcgaaaagaaacaagccgcggcaacagcgac

SEQ ID NO: 111380 - RNA, 80 nt, Homo sapiens
gcaaacacaacccaaggggagaagggcagcagcagacgggagcccggggggcccggccgggcgggacggcgggaccgccg

SEQ ID NO: 111381 - RNA, 82 nt, Homo sapiens
ccggggaggggaccgcgcccgcccagcgccgcagcacgcggaccaggggaccaaaacaaaacgagagcaagaggaaagaaaa

SEQ ID NO: 111382 - RNA, 37 nt, Homo sapiens
ccacagagaccgccgagagagaaggacggagaagcga

SEQ ID NO: 111383 - RNA, 60 nt, Homo sapiens
cagcagacacccaacggggaaccccagcggcggcgggaaaacggcacaaggcgacgaggg

SEQ ID NO: 111384 - RNA, 111 nt, Homo sapiens
aaccccacccgccggaggcgccggcggggccaacggacgccagaaggaggcgcgggcaggaaaccaacagcgacaaaaggacaaaagcgagcagagcgcaaaaagcagcgc

SEQ ID NO: 111385 - RNA, 74 nt, Homo sapiens
ggccagaagcggccccgggcggaagacgcaggagcaaagagaggaacaggcccaaagacgcacccacagagaaa

SEQ ID NO: 111386 - RNA, 85 nt, Homo sapiens
cgaagccggagcgcgcggccgggagcacgggcgccggcaagacaagaggcagccagcggacggggcaccgccgaccgaaaccgca

SEQ ID NO: 111387 - RNA, 67 nt, Homo sapiens
aagaaaggacagcaccggacccgccaccaccaaaaaaccaccccccagcaccgggccacagaaaggc

SEQ ID NO: 111388 - RNA, 68 nt, Homo sapiens
aaagaagcaacacaggaaagaagacgacacaaggaacagccagccaggagaaaaacgaacccaacaga

SEQ ID NO: 111389 - RNA, 68 nt, Homo sapiens
agccacgacccggaggcggcgcacaaggcacgcagaaggagcagaagccagaaggaaagaaaaaagac

SEQ ID NO: 111390 - RNA, 69 nt, Homo sapiens
caggaccgggcagaacaacgaacagaagcacaaccagagccggccccggggccgcaaggccaggcgcgc

SEQ ID NO: 111391 - RNA, 68 nt, Homo sapiens
cccgacgccaaccaagacagcagaggcacacaaacggaaccgcacaaagcagacaacaaaaagcagcc

SEQ ID NO: 111392 - RNA, 68 nt, Homo sapiens
ggacacaaaagaaagcgacaaggaacaaggacagagaggcgcaggcaagacccggaaggcccagaaga

SEQ ID NO: 111393 - RNA, 70 nt, Homo sapiens
ccacagcacagcaggcaaagagcccgggaagggcgcggagcaggcaaccacccaacccgggaagggacag

SEQ ID NO: 111394 - RNA, 80 nt, Homo sapiens
cccaccccaggcccccccgcccacccgcaccgcaggacacccaacaccgggcaacaggagcgaagaaaccgcaaagggga

SEQ ID NO: 111395 - RNA, 69 nt, Homo sapiens
gccgacgccggggcgaggaccgacggagggaacggagggaaagcgacaaacaaccaacccacagagacc

SEQ ID NO: 111396 - RNA, 59 nt, Homo sapiens
gaagaggcggggaggacacgacgcgcaaagggagaggaagacgaggaagcagaagaaca

SEQ ID NO: 111397 - RNA, 81 nt, Homo sapiens
gaaaaagcacaccccaacaaagaacagaagaaacaacaaaccggaccaaacacgacaagcaagaaagaggagacagcacga

SEQ ID NO: 111398 - RNA, 81 nt, Homo sapiens
cgcgaaaacccggcaggaaacagaagaaggccagcgaggaaggcacaggccgccccagaccccggaagcccaagacgcaaa

SEQ ID NO: 111399 - RNA, 83 nt, Homo sapiens
gagcgagccagcaagcggaagcgccccaccgcgggcgccaaggggagcagaaggaccggacacagacaggaagggaaggggcg

SEQ ID NO: 111400 - RNA, 75 nt, Homo sapiens
aggcaaaggccgagacccgccggaagggacaaagcagaagagacaacacagaaaccagggcggaggcaggaacag

SEQ ID NO: 111401 - RNA, 77 nt, Homo sapiens
gaccacagaggcaccgccacaggacccaaggccgaacaggacgcaggccgagccccccacaaagcgccaaaaacaaa

SEQ ID NO: 111402 - RNA, 107 nt, Homo sapiens
aggcagaacaaaacacacaacagaagggaaggggaaggagaccacaaaggagcagccccccacaccaaacacccagagaggcagcagaagacagacgaacaaccagg

SEQ ID NO: 111403 - RNA, 35 nt, Homo sapiens
ggcgacggcggagggcccggcacagaaccccgaaa

SEQ ID NO: 111404 - RNA, 78 nt, Homo sapiens
gacagcaacaaagcaaccccggagacggaagccgccacaaacacccagaagccgcaggccagaaggccccgaacgaag

SEQ ID NO: 111405 - RNA, 84 nt, Homo sapiens
gggccagcgaagcggaggcggccgcgccgaggagaacggaagccagagaaaaggaagagagagcaagagaggccacgcccacga

SEQ ID NO: 111406 - RNA, 67 nt, Homo sapiens
ggccacagagaagcagagggaaccgagcccgagaaacagggagaaggccaagaccagaagaggaaga

SEQ ID NO: 111407 - RNA, 81 nt, Homo sapiens
cggcggcagagggcggaagacgcacgggccaggaccaagacggacacaccgagaagccgaaacagccacaaccagagacac

SEQ ID NO: 111408 - RNA, 57 nt, Homo sapiens
ccagaagggggccacgaccaagaagaagccgcggacccccggcgcaggggggaagaa

SEQ ID NO: 111409 - RNA, 75 nt, Homo sapiens
gaaaaaaacagcggagaagagaaacagaaagacccaaagggaccagaggccaacggaagccccaagaaggaagac

SEQ ID NO: 111410 - RNA, 84 nt, Homo sapiens
cgaacccccaacaggcagcacagggccaggagggcggccagccaacccagccagaggccgacgaaggcagcagacccacagaag

SEQ ID NO: 111411 - RNA, 73 nt, Homo sapiens
caggccgccgccggcgcccgcgagcagcgggaaagcgagggacggggacccgaccccggacccgacgcggaga

SEQ ID NO: 111412 - RNA, 48 nt, Homo sapiens
cgacacccaagccgcacaggcaaggaggaaaacaagacggaaggagcg

SEQ ID NO: 111413 - RNA, 60 nt, Homo sapiens
gacgccgccagcgcgaaggcgcagcccggaggccgcgcgggggccgcaaggccaggcgcg

SEQ ID NO: 111414 - RNA, 59 nt, Homo sapiens
cccgcccggagagcagagcaacacggagacgcaggcacgacaagcagagcccaggccca

SEQ ID NO: 111415 - RNA, 74 nt, Homo sapiens
gggggagcagaaaccgggggaggcaagaagagaggccggccacacaacagccaagcaacgcggcaagaaaaaca

SEQ ID NO: 111416 - RNA, 85 nt, Homo sapiens
cgggaacccgggcagccccggcaccggcgcccccacggcagacagagcggcagcagcgcaccaaccaagacaggcgcccagggca

SEQ ID NO: 111417 - RNA, 70 nt, Homo sapiens
gaacggcgcaacagggacaaagcacaccgacagagaacccaggccaacacacagacagaggcagccaccc

SEQ ID NO: 111418 - RNA, 76 nt, Homo sapiens
cacgacacaggaaaggacaaaaccagaagcagggcagcccgcccgacgagagagaagcccggacagaagcgagcag

SEQ ID NO: 111419 - RNA, 66 nt, Homo sapiens
cacaagaaggcgccggaaacgagcgccgccaaacacacagaacacaagagccaccccaacagcagc

SEQ ID NO: 111420 - RNA, 80 nt, Homo sapiens
cggacacggaagaccagcaaggaggaagagagcggcccaagagagagcgaagaggagccggcagggacggcaggccaagg

SEQ ID NO: 111421 - RNA, 69 nt, Homo sapiens
ggccggagacaccagcagggccaagcgaacacccgggcggcaaaaggacgacaacaagcgacggacccg

SEQ ID NO: 111422 - RNA, 66 nt, Homo sapiens
cccagaggagcaacagccccagcgaggaagaggcgaccaacagaagcaagagacggccaggaggcc

SEQ ID NO: 111423 - RNA, 63 nt, Homo sapiens
ggcccgggccagaggcagaaaacggacggaagaaaaggcggccgacgcagaaaacagacacac

SEQ ID NO: 111424 - RNA, 51 nt, Homo sapiens
gcccaggaacggccggaggacaggcacaacggaaacggagaagaccgaaaa

SEQ ID NO: 111425 - RNA, 89 nt, Homo sapiens
ccggcccgccgcccggccaaggcccgcggaacagcggaggacgaagagcgggacccgagcccggaaagcgccagcagcgaaccccagac

SEQ ID NO: 111426 - RNA, 78 nt, Homo sapiens
agaggaaagaaaaggagcaggaagcccaggagaccagagacagacgaggaagacaccaagaaggcaaagaaaaggagc

SEQ ID NO: 111427 - RNA, 69 nt, Homo sapiens
cggccacaggaacaagaaccagggagaagccgcccgaacaccaggccgacgcccgccgcggccggggaa

SEQ ID NO: 111428 - RNA, 79 nt, Homo sapiens
caggcgaggcggacgcgcccaggcgaggggaagacacccccggacccccacagaccaaagagcagaagacgcaggaaac

SEQ ID NO: 111429 - RNA, 77 nt, Homo sapiens
ccacgcagcaaaccacaggagaggagccccaccaaagccaccaagccaagaccagcagccaaaggaagaaggacagc

SEQ ID NO: 111430 - RNA, 79 nt, Homo sapiens
gcgccaccgccgagggcgggggacgaaagagaaacccggagggcgccggggcggcggccggggcagcgccgcgagccag

SEQ ID NO: 111431 - RNA, 70 nt, Homo sapiens
gcagacgcgaaggagaaaaagcaggggaagcagcgcacgccagaaagagcacgaggagcagcacggacga

SEQ ID NO: 111432 - RNA, 82 nt, Homo sapiens
cgaagagaaggagccgcgccaagggggacaccgcagggcgaggagaccagaaacgagaacgaccacgccaccgggcaagaga

SEQ ID NO: 111433 - RNA, 55 nt, Homo sapiens
ggccaggggccagggcaaaggcggacagggaaaggggcggccacacagccaccgg

SEQ ID NO: 111434 - RNA, 62 nt, Homo sapiens
gccaaccagcaccagaccagcaagagacggagaaagacaaacagaccaggccgggcacacaa

SEQ ID NO: 111435 - RNA, 62 nt, Homo sapiens
accaggcacaaaaccgggggggaacaaagcagccgaagggcgaagaagaagcacaaaaccac

SEQ ID NO: 111436 - RNA, 114 nt, Homo sapiens
acaaagaaaagagcggagaaggagcggcgaccagggcgcccgcccccccaccgaggaaggccgaagcaaagagaggagagagaaacaccccggagggcaagaagcagcggagaa

SEQ ID NO: 111437 - RNA, 73 nt, Homo sapiens
cccacacccccggcacccccacaggccggcccgccagacaagcaccagagccgggcaacgaggagcgacaagg

SEQ ID NO: 111438 - RNA, 74 nt, Homo sapiens
aaccagccaaacaacagagaaagggacagaacacaggcaaagagaaagaaaagaaagacagaagcccagaggac

SEQ ID NO: 111439 - RNA, 77 nt, Homo sapiens
ggcaggcggcggggcggcggccggcccccagcggccccggcccccggcgccccagcgaggaaggaacagagacagac

SEQ ID NO: 111440 - RNA, 81 nt, Homo sapiens
caggaaggacggagccacagaagaagacagagggacgggaagccgcgggggggaaccccacccgaggcgcggggaagggag

SEQ ID NO: 111441 - RNA, 69 nt, Homo sapiens
agccagccgaacagaccaacacagagaacaagacgacaacaccaacaagcccacagcaaggaagggcga

SEQ ID NO: 111442 - RNA, 78 nt, Homo sapiens
ggagaggcaccccgacccacacagggagcccccaagagccagcgggccggcaccggcacgaggagcgcacacccgccc

SEQ ID NO: 111443 - RNA, 75 nt, Homo sapiens
ccacacgcgaaggcaagaagacaggaacgggacacacaaaccccaaccagggacaagcccgaccccacgcacccg

SEQ ID NO: 111444 - RNA, 67 nt, Homo sapiens
gcacgccggaccgagaaaggagacggaagcggaagcacacgccagacgccagcaggccggagcacgg

SEQ ID NO: 111445 - RNA, 82 nt, Homo sapiens
gacccccggaggaacacgaaaggacacgacggaacccccgaaaacgaaggcgaagagacgcgcagcaaagacagcaaagcca

SEQ ID NO: 111446 - RNA, 75 nt, Homo sapiens
gacagcgcacggcagcggcaccacggcgacgcacaaggaggcacaaagagagacggaacgcagaaagaccacaag

SEQ ID NO: 111447 - RNA, 70 nt, Homo sapiens
ggcagggacagcgcaggcagcaggaagccccagcaagacccggccagagcagggcaggaagaccaaaaag

SEQ ID NO: 111448 - RNA, 77 nt, Homo sapiens
ggggaccggaagaagaaccaagaagacaacaacgaaaccggaggcgcacgaaaagaacggccggggggcgagcgacc

SEQ ID NO: 111449 - RNA, 80 nt, Homo sapiens
gcaaaaaggcagcgaggagaagcgcagcgacggcgcgggagagcgcgccagccggccgcgaagggaaggagagaaggaga

SEQ ID NO: 111450 - RNA, 76 nt, Homo sapiens
caggcgcgaaacacaacaacaggaccccccgacaaagggcaaccaacacgacagggcagagaccgggcaaaagcaa

SEQ ID NO: 111451 - RNA, 45 nt, Homo sapiens
acaggcccaagggaacccagccagaaagcggagagaagccccggc

SEQ ID NO: 111452 - RNA, 85 nt, Homo sapiens
acgggcccgggcgccgcggaccagcagcgcgggagagcggaccccccgccaccgcccgagcccagccgggagaagaggcacaagg

SEQ ID NO: 111453 - RNA, 82 nt, Homo sapiens
aggacgcaggccgcggcccgcccccagaaaggaggcaagaccaaccgagagaagacccagaagcaggaccacagaagggggc

SEQ ID NO: 111454 - RNA, 39 nt, Homo sapiens
gccaagacaaggcaacagagaacaccagaaaggcccaga

SEQ ID NO: 111455 - RNA, 106 nt, Homo sapiens
acaaagcgaaggcacgaagcggccaccaccaaaggaggaccgcagaccgagggaggggggaagacagggcccagcaccacaggacgggccgggaagccgccagcag

SEQ ID NO: 111456 - RNA, 71 nt, Homo sapiens
acccagaggcagagccgccccagcagcaggggcgccaggaagaagagagggcgaaggaggccacacagaag

SEQ ID NO: 111457 - RNA, 79 nt, Homo sapiens
acagcggaacaaccacagccacccaggacccaggaggaagggaaacgcaccccaagagcgcgaaagacgcagaggaggc

SEQ ID NO: 111458 - RNA, 48 nt, Homo sapiens
ccccaagacgcaggaggcggaaaggggacggcgcaaggggacggaaac

SEQ ID NO: 111459 - RNA, 36 nt, Homo sapiens
gcacgacacccgcagagcacggcggcaaagaccaca

SEQ ID NO: 111460 - RNA, 81 nt, Homo sapiens
cagcggacgagggagggccgccgcgcccaggagggcgggaagaagcgagagccaagcccagcgagagccagccggaggacc

SEQ ID NO: 111461 - RNA, 78 nt, Homo sapiens
gcaaaaccgagaaaagagagcaggagcgaaccagaaaccagcacagacggacgggaggagccaagagggcccgaggaa

SEQ ID NO: 111462 - RNA, 65 nt, Homo sapiens
gcaccccacgggggccccaacgcccacaacaaggcggcggggacgggaggcaccgccccaacccc

SEQ ID NO: 111463 - RNA, 74 nt, Homo sapiens
cgaggccggccccccacgcgcacacaagggagcccccccaccacccccgaaaaagcggacagaagagagagaca

SEQ ID NO: 111464 - RNA, 86 nt, Homo sapiens
cggcaaaccacgcggcggcagcaggccagcggccggcgggagacgcagcgcgacccagcagcggaggagcaccggaacacagaagc

SEQ ID NO: 111465 - RNA, 77 nt, Homo sapiens
agaaggccggagacaccagcagggggagagcagccgcggcacggcgccgccagacacggagcccccagagcacaaca

SEQ ID NO: 111466 - RNA, 58 nt, Homo sapiens
aggagaagaaggcgggacggaccccagcagacgcaacaccgcagggcccagacacgca

SEQ ID NO: 111467 - RNA, 56 nt, Homo sapiens
agcggagacacggaaaagaccacacagggaaacgaccagggagagaccaacaggaa

SEQ ID NO: 111468 - RNA, 82 nt, Homo sapiens
ggaagaccaggccgggggcgcgggagccgccaggacgcggaccaaaaccaaagacggccagaaggagacggcaaagagcaga

SEQ ID NO: 111469 - RNA, 80 nt, Homo sapiens
ggccaggccgccgccgagccgaggggagcgacagaaaagcagcacaacccccggagaaccgaagggacacagcagcggcc

SEQ ID NO: 111470 - RNA, 60 nt, Homo sapiens
cgcggcgcgggcagccgggaggagacaacaacaagagcgccagccccccaggacccacca

SEQ ID NO: 111471 - RNA, 62 nt, Homo sapiens
gaagagaggaggcgcgagagcgggaagaggcggcagacagcgggaccacacgaaggggcaga

SEQ ID NO: 111472 - RNA, 74 nt, Homo sapiens
agcgggaaagaaggcaaaacacgggccaaagccgacagaaaaggaagagacccagcgaacaagaggaagacgag

SEQ ID NO: 111473 - RNA, 71 nt, Homo sapiens
gcccccagggggagcgcaaaccaccacggagccagaccggaaggccaaaacaagggaagcaaaggaaacgg

SEQ ID NO: 111474 - RNA, 74 nt, Homo sapiens
gcgcggggcccagggccgccccgcccgcagggcagcggggccccgccagcgggaagaacaacgcaccccgaaag

SEQ ID NO: 111475 - RNA, 76 nt, Homo sapiens
acaaagccgaagaccccggagccccagccagggaaccacggagcacgagaaaacggcggggggagagaaagacggc

SEQ ID NO: 111476 - RNA, 85 nt, Homo sapiens
cagcaggaaggcgcggagaccacgacgggggggaggcggcagcgcaaccacgagacggccccaagcaacgcggaccagcagcgga

SEQ ID NO: 111477 - RNA, 50 nt, Homo sapiens
ggggcgggcacggcccgcgagggcgaaggcgccaccggcgagaagacgcg

SEQ ID NO: 111478 - RNA, 74 nt, Homo sapiens
cgaagccaccagaaggaaacagagagcagggagaacacaggaacggagaaaaggggaggagagcacagaaaaac

SEQ ID NO: 111479 - RNA, 67 nt, Homo sapiens
gaacccgaaaaggcagacccaaaacgcaccacaggcacagaacaaccgccagggaacagcaaaaaac

SEQ ID NO: 111480 - RNA, 73 nt, Homo sapiens
caggcccccaagagccgaggcgcggcgcgccgaggcgcccaccagcgggccaaaagcagagaaccaaagaaca

SEQ ID NO: 111481 - RNA, 80 nt, Homo sapiens
aaaaagagagcaggaaggcacaaaggaggaggaggaggacgacgacgaggggaacgcccgccgacacagccaccaagaag

SEQ ID NO: 111482 - RNA, 76 nt, Homo sapiens
gcggaggcacccaccgacagaaagagaaccggccaacaggcaccagacacgaaagagcagaaggcaaaaaggaaga

SEQ ID NO: 111483 - RNA, 66 nt, Homo sapiens
ggccaagaaaaggagcaaccgaggagaaccccaacccaaacgaccccagcggccggcacagaccac

SEQ ID NO: 111484 - RNA, 69 nt, Homo sapiens
aggcgagacgcagaaaggaccacacgccaagcgaaagacagaggcccagccgaaagaggggaggcacga

SEQ ID NO: 111485 - RNA, 78 nt, Homo sapiens
gggcaggccaacgagagacgcagaggcgggccagagcccaggagcgcgacaacgacaagacccaggggaagagccaca

SEQ ID NO: 111486 - RNA, 83 nt, Homo sapiens
gccagcaacccagacgcccacaggacaaacaagggaggcgaggacggacaaaaggaaacggacgggaggccagccagcagaag

SEQ ID NO: 111487 - RNA, 73 nt, Homo sapiens
agaacaccagcacggcgaagggcggaaaccgccaggggaagaagccagagacacggcaagaaaaacaaaccgg

SEQ ID NO: 111488 - RNA, 76 nt, Homo sapiens
cgaaaggagcgcaaaagaagaggaggcgaagaagcaacgagagggagaaccagacaccccaacacaggcccaccac

SEQ ID NO: 111489 - RNA, 51 nt, Homo sapiens
cacccacacagcagcggacgaggggacaacgaaggaggcaagcaacaaagg

SEQ ID NO: 111490 - RNA, 78 nt, Homo sapiens
aacccacacgaagcgaagaaacgcaaaagggggagagccacccagcagggaggggaaggggagccagggaacaaggga

SEQ ID NO: 111491 - RNA, 74 nt, Homo sapiens
cgggggaagaagccgcgggggaaagccgccgaaggcagcagcgcaaggagcgagagccgcggcagcccaagcga

SEQ ID NO: 111492 - RNA, 83 nt, Homo sapiens
aaacgagggcccgggaggaccgacgcagccaggacacaaagcgagaagacccagcaaccagcagcaagaccaagagaggcccg

SEQ ID NO: 111493 - RNA, 66 nt, Homo sapiens
agagaagaaccaaagaagcaaaacacgaggagggggccaggccgagggaacaccaccgcacagcac

SEQ ID NO: 111494 - RNA, 69 nt, Homo sapiens
acaagccagagcagccacacaagacacgcaagcgaggagcgacgaggccggaggggaacagcaaggacc

SEQ ID NO: 111495 - RNA, 72 nt, Homo sapiens
agggcagaggaagccaccccgaggaagcccgccacgccggagaaacaggaagaggcgaaaaaaaagggaagc

SEQ ID NO: 111496 - RNA, 80 nt, Homo sapiens
aaccccagcggcgggcgacgcgccacagagcgggcgggcgggccacgcggcgggacaggaacccaaccccagccgaccga

SEQ ID NO: 111497 - RNA, 76 nt, Homo sapiens
cccacgaagggaggaaaagggcagggacagcgcaggcagcagggggcccaaaacaccccaacagcgggcccggaac

SEQ ID NO: 111498 - RNA, 62 nt, Homo sapiens
cacaccacccagggacagggccagacagaaaagggagccaggaccccagagaggagacccag

SEQ ID NO: 111499 - RNA, 71 nt, Homo sapiens
agaagggccccagccgggaccgaagaacagacaaggcgaaagaggaaccaggaagacacagagccgcagag

SEQ ID NO: 111500 - RNA, 70 nt, Homo sapiens
cccaaccacccaacgggcccgggcaagcacaacggacacgccgggggcccagcacggcaccagggggccg

SEQ ID NO: 111501 - RNA, 71 nt, Homo sapiens
aagcggcagacaaaaaggaaaccaacaaggaggcacaaacagcagacaaaaggaaaaaggcgagggaacga

SEQ ID NO: 111502 - RNA, 75 nt, Homo sapiens
gaaccggccccacccgggaggggggagcggcgggaggccaccgccagacagaacaagcgcgaccgcgggagcaca

SEQ ID NO: 111503 - RNA, 66 nt, Homo sapiens
ccggccaacaccccaaaggcgcgaaaaagacccccacagccacaagggagacggcagagagaccac

SEQ ID NO: 111504 - RNA, 70 nt, Homo sapiens
caggaacaagacggacacaagggcaaagaacagagccccccaggaggccacagaccccgccggggaagaa

SEQ ID NO: 111505 - RNA, 85 nt, Homo sapiens
gacccagcgccggcccccaggcgaagaagcgcagccgcaccggccaaggaagaccccggcgggccgggcccccggaagacacccc

SEQ ID NO: 111506 - RNA, 73 nt, Homo sapiens
gaacaagcgcccgacccccccggggaagacggcggaaaacccgaagcagaagcccgacacaggcacaagaccg

SEQ ID NO: 111507 - RNA, 77 nt, Homo sapiens
ggaggacaacccgggaggagagacacccccaaggacagaaaccgggaagacgccaaagcaggcgcggggccagccga

SEQ ID NO: 111508 - RNA, 101 nt, Homo sapiens
cgagagcgacagcaaggggggccacgaggaacaaagacagcccaccaggaagagcgaaaagcagcccaaagaaaggacagacaggcaaacacgccaaggaa

SEQ ID NO: 111509 - RNA, 76 nt, Homo sapiens
cgacgcacaaacgcccccggaaaagccgggagaagaggcacaaggacaggcacagagaacagaacaaaaaaaaacc

SEQ ID NO: 111510 - RNA, 74 nt, Homo sapiens
aagaaaagaaagccaaaagagcgccagcccagacaaaaggacagcgacagacagcaaacacagccagaacagag

SEQ ID NO: 111511 - RNA, 68 nt, Homo sapiens
aaagggagggggcagcccgcaggagcaagcgcagcaccaccaacagaggaacaggagcgggagggagg

SEQ ID NO: 111512 - RNA, 74 nt, Homo sapiens
agagcaggcgggcaacagacagagccagggaccacgcagcacccaccaaaaaaaagaacagcccaaccacggca

SEQ ID NO: 111513 - RNA, 60 nt, Homo sapiens
gacaggaggccccggaagacggagccagcgggccggcaccggcacgaggagcgcacaccc

SEQ ID NO: 111514 - RNA, 74 nt, Homo sapiens
cagcgcaggaacaggacaggaggagaaccagaggacaaaaagcccagggaacaacaagcgcaagaggaagaaaa

SEQ ID NO: 111515 - RNA, 86 nt, Homo sapiens
ccaaaaaggcaaagaaaccacgagaggagaaggcagagcccccccaggcagaagcccgagcgggaaccagcgaagccagggcgcag

SEQ ID NO: 111516 - RNA, 58 nt, Homo sapiens
gcggaggccacgaacacgccggagccgccagaaccacgaggccgaaagcacagcagca

SEQ ID NO: 111517 - RNA, 80 nt, Homo sapiens
cgagggacgggagaaaagagccaagaaggaacagcagcagagcccggagagaccgaaaaggcaaggcgagccaaggcaga

SEQ ID NO: 111518 - RNA, 94 nt, Homo sapiens
gagaagagacagagacaggggccaaacccacaggccaggagggggccacaccgaacccagccgggaggccaaggccagggagcgagcccaggag

SEQ ID NO: 111519 - RNA, 68 nt, Homo sapiens
gcaagaaaaccgaaaaaaagccaaaaagaaacgaccaaagggaccagcgccggcagggaacgcgagga

SEQ ID NO: 111520 - RNA, 40 nt, Homo sapiens
ggaggagaaggaggaggaacggggcgggaagaagcccgcc

SEQ ID NO: 111521 - RNA, 84 nt, Homo sapiens
gaagacagggagcgagagcggagaagcgggaggagaccacccaaacgcggcacgggaggcgaccaacgacgaagagcagagcag

SEQ ID NO: 111522 - RNA, 68 nt, Homo sapiens
accccagaaggcaacgcgccgcaaaacagaacgcgaaccaaaggacgcagacacaccaaggaaagcaa

SEQ ID NO: 111523 - RNA, 79 nt, Homo sapiens
ggacacacgggcagccacccggcggcggggccgcagcccaaggaaggccggagccccagaccaggaccgccgcccccag

SEQ ID NO: 111524 - RNA, 69 nt, Homo sapiens
ccccgaccggcgagccagccgcgcgggaccaggaggagaagcaaccagagaggaagcgagacccaaaag

SEQ ID NO: 111525 - RNA, 53 nt, Homo sapiens
caggcccacagccgggagaccgagagcccagagccagcgggccggcaccggca

SEQ ID NO: 111526 - RNA, 57 nt, Homo sapiens
ccacccggcaaggcagacgaccaggcacaccggaccgccgcgccccccaacgaccag

SEQ ID NO: 111527 - RNA, 57 nt, Homo sapiens
ccgagaggaaaggcgagggaagcgccggacaccaaccacaacaaccgcaaacgaaga

SEQ ID NO: 111528 - RNA, 79 nt, Homo sapiens
agcaaacagaaagaaacgacaaggagcaggcgaacaaggcgcacgaaaaagaaacacaagcgagaggaggaggaggaga

SEQ ID NO: 111529 - RNA, 71 nt, Homo sapiens
gccccgaagagaaacacacggacaacaaacgggaaacccagacgacaaggaaggccaagggacccacgacc

SEQ ID NO: 111530 - RNA, 82 nt, Homo sapiens
cggagaccccgcgccgacggcgccaaacacaggaaagcgcaccaaaggggacgaggccccccggccagaagcggccccgggc

SEQ ID NO: 111531 - RNA, 86 nt, Homo sapiens
ccggcgcaggccaagcaaaagcacaggccggccagaaacgacgaaggggaggaccaggcggcgagaagagaagagagaagggagac

SEQ ID NO: 111532 - RNA, 69 nt, Homo sapiens
acaacggggcaccagggcccggccggggcggaaggggacgcagccagaaacgcggaaaaggaacagaag

SEQ ID NO: 111533 - RNA, 61 nt, Homo sapiens
aagacagaccagggagcagcaacaaacaaggcagcacagccagcccacaggagcccagcag

SEQ ID NO: 111534 - RNA, 70 nt, Homo sapiens
aaggaccagaagaaacgcaccggaaaggccaccaggacaagggagagacagagcgacagagagaaaacac

SEQ ID NO: 111535 - RNA, 59 nt, Homo sapiens
aaagggccaaagaagggagagagacgcaggaggcgcagggcgaagcagcggcggagcgg

SEQ ID NO: 111536 - RNA, 90 nt, Homo sapiens
ggaaccgcggggcagaggcggcggccgcagcggcgcagcgaagcaggaacagcgaagagagagaaacgaaaaagaggaaggagcgaggga

SEQ ID NO: 111537 - RNA, 78 nt, Homo sapiens
ggacagcgcacacagcaagcacgagcaacgcaaaacagcgccggccgggggaagcggcaagaaggggggaaaacagca

SEQ ID NO: 111538 - RNA, 60 nt, Homo sapiens
cggaaacagagagggcagagaccagaggcgcccggcccgccccccggaagcagaggacgg

SEQ ID NO: 111539 - RNA, 52 nt, Homo sapiens
accagcacaccgcggaggcgcccagaaggccacgagaacgcacacggaggca

SEQ ID NO: 111540 - RNA, 76 nt, Homo sapiens
cccacccccacagcaaggcgaaccaggaacccacacagaacgggaccccaaagaaaccaggaccggcaaaagcgcc

SEQ ID NO: 111541 - RNA, 75 nt, Homo sapiens
gagaaccaagacacagcccggggggacgggccaaggagaccaaggggggagcaaggaggaggggcagggggagga

SEQ ID NO: 111542 - RNA, 58 nt, Homo sapiens
aacccgcggccccggcgccaagccgccgcaccccggccaggcagggcaagaacccgcc

SEQ ID NO: 111543 - RNA, 55 nt, Homo sapiens
gccagcacacgagacacagagagaagaagccaagaggagaaagaagcgacaccca

SEQ ID NO: 111544 - RNA, 47 nt, Homo sapiens
cgccggccgagaaggcagaggcgcggaagccgcagaaggaccggcca

SEQ ID NO: 111545 - RNA, 73 nt, Homo sapiens
caaccagccaagggccacagccaacaggcaacacccgacacccccaaggaaaccagagaccagaagaggagaa

SEQ ID NO: 111546 - RNA, 70 nt, Homo sapiens
gacccgaccagcacggcgaccgaggcagccccccaaagcccggccccacagcggccaagaagaaaaagcg

SEQ ID NO: 111547 - RNA, 60 nt, Homo sapiens
ccagccacccaaggccccggacgccggagaggcaccggaccgaggcagagacagggcgag

SEQ ID NO: 111548 - RNA, 69 nt, Homo sapiens
aaaagagaagaaccaaaacggccccgccgccccagacaacaggcacaaagagagaaggaacacccacag

SEQ ID NO: 111549 - RNA, 70 nt, Homo sapiens
acggaccagaacgcagcaacaaagcccccaccaaaagggagaaacgacgaggacaaagaagacaagggca

SEQ ID NO: 111550 - RNA, 77 nt, Homo sapiens
gaacaaggagaaagccacaacagggcggcaacaggggcgagaaagggaaaaaagaggcaagggacagcaaagcggga

SEQ ID NO: 111551 - RNA, 84 nt, Homo sapiens
aagaaagggacaaagagaggagcaggaccgaaaagacgcggccccaaaggaaacacccgaagaacacagcgccagcccaacgga

SEQ ID NO: 111552 - RNA, 67 nt, Homo sapiens
ccggcgggagaaacccgggccggcccaagagagagacacggagcccgggcaacccagggggcaggac

SEQ ID NO: 111553 - RNA, 59 nt, Homo sapiens
agacggaggagccaggcagccacggaggagaccagcggcacggagcaccagaagaaggg

SEQ ID NO: 111554 - RNA, 60 nt, Homo sapiens
agacaaaacaaaagaagacaaaaagaagccaacaaagcagcagagggaacgaggaagccc

SEQ ID NO: 111555 - RNA, 68 nt, Homo sapiens
gagagagggaagcgcccggccgcaggcagagacaccaagcgcccccacgacacgaagaccacccaaac

SEQ ID NO: 111556 - RNA, 75 nt, Homo sapiens
gaggaccagcaggggcccggccggccaggccgaaaacaacacaccacgaaagccccacacaagggcagcaaaccc

SEQ ID NO: 111557 - RNA, 62 nt, Homo sapiens
aagcgcccgaaggcccgagagaggaggcaggcgaggagcgagccgaggggggccggggcagg

SEQ ID NO: 111558 - RNA, 54 nt, Homo sapiens
gggagcacggcgagcagccaggccaggagagacagaagaaagggagcccccaag

SEQ ID NO: 111559 - RNA, 80 nt, Homo sapiens
cccagccgcggggagcacagaggcgaccggcagggagaggaggcggcgagagagccgggcagacgcccgaaccggcagaa

SEQ ID NO: 111560 - RNA, 83 nt, Homo sapiens
ggcaaaaacacaagaagagagcgagaacaccgcaaggacaaacccaagaagccaagcagagaaagggaaaagggcggggggca

SEQ ID NO: 111561 - RNA, 71 nt, Homo sapiens
ccccggccgggccggccagcgccggaaaccaacaacagggcagaaaagaacagacccagaagaagcgaaag

SEQ ID NO: 111562 - RNA, 88 nt, Homo sapiens
gccagacggccagcggcagcaagaacccggccaaggcagaggccccaggagaccacccacgacacagagagaaggaggagcagaagag

SEQ ID NO: 111563 - RNA, 76 nt, Homo sapiens
ggccgggcgagcagcaggagcaccggcccaagaaacagcccacagaagaaggcagcgccaccacaaggcgagcgag

SEQ ID NO: 111564 - RNA, 78 nt, Homo sapiens
agagagaggaaacccaagcagcgccgccagaaggaagcaacagacgggaccgaaagacaccgggagcacccagacaaa

SEQ ID NO: 111565 - RNA, 53 nt, Homo sapiens
ggggcgagccggaggagcacccaaccccgcgagggagacggggggcggccccg

SEQ ID NO: 111566 - RNA, 74 nt, Homo sapiens
accaccgccaggccaggaagcaagagcaacgaaccaaagcaaaggaggccgggggaagacggaaaagagagacg

SEQ ID NO: 111567 - RNA, 65 nt, Homo sapiens
agacagcgaccccaagaccacaaaggagcagagcaagagaaaagaacaagaagaaagcagacgag

SEQ ID NO: 111568 - RNA, 78 nt, Homo sapiens
cgacacgcaagcaggcaaccgaaacagccaggagacgacaaggcgggcagggggagcggcgcggcagagcgggcagga

SEQ ID NO: 111569 - RNA, 82 nt, Homo sapiens
ccgggaaggggcgacggccggcccgaggggccagcgcccacccaagcgcgaggaaggcgaacaaggaccgcgacaccaacag

SEQ ID NO: 111570 - RNA, 73 nt, Homo sapiens
cacccccggcgggcccgaggcggcgagagaggcaggcggagccgaccgggccaggggacccacagcccggcga

SEQ ID NO: 111571 - RNA, 43 nt, Homo sapiens
accccacaggcccggccggcgcgcgccagccgcagccggcgga

SEQ ID NO: 111572 - RNA, 69 nt, Homo sapiens
gaaggggagccaccagccccccgacaaggccgacgcgcacgaacacgggggcaaagacagggagagagg

SEQ ID NO: 111573 - RNA, 73 nt, Homo sapiens
cacagacggacaagagaacaacaaacggcacggcacgaaggccgccacccggaaaaaaacacaagaaagaacc

SEQ ID NO: 111574 - RNA, 68 nt, Homo sapiens
gaaccaacaaagccaacggagcgaagagaggcgcagggaaagccgccccagagggaagccaggaccca

SEQ ID NO: 111575 - RNA, 76 nt, Homo sapiens
cacaaaaccagagcggagacacccaggaggcagaagccacgcagcagagccacgaaagaaaggcaacaagaagcaa

SEQ ID NO: 111576 - RNA, 83 nt, Homo sapiens
cacacgggcgagaagcccacgaggcaacacgcaaggccgccaccagcgagggcggcacgccacaggacggcacccaccgcaag

SEQ ID NO: 111577 - RNA, 78 nt, Homo sapiens
ccgggacgccgggggagcggcgcaagacccggcaaccggcgcggagacgcggcggagggagaggaaccgcacccaagg

SEQ ID NO: 111578 - RNA, 60 nt, Homo sapiens
ccgacccacacccaaggagagccaacgggacccaggggagcgacagccaaagcaacaagc

SEQ ID NO: 111579 - RNA, 46 nt, Homo sapiens
gcacaggggccaacacggaaaggcccagaaagcgggcaccagcgca

SEQ ID NO: 111580 - RNA, 58 nt, Homo sapiens
acagcagagaccgagggaacccacccccacccaagaagaagaagggagggaaccgaga

SEQ ID NO: 111581 - RNA, 76 nt, Homo sapiens
cacccgaccggcacccacaaaaaccccccggacgcccccgccagacacagcgagaagaggccaccagaaaacggcc

SEQ ID NO: 111582 - RNA, 64 nt, Homo sapiens
gggaccggagcgacgccagaacacaagggcaagacagccgggaaccccaccccaccccacagca

SEQ ID NO: 111583 - RNA, 40 nt, Homo sapiens
cccagaacagcacgagccccgggaaggcgaggagcggaag

SEQ ID NO: 111584 - RNA, 35 nt, Homo sapiens
gcaggacagccagcaagcagcccgccgcaggaaaa

SEQ ID NO: 111585 - RNA, 68 nt, Homo sapiens
cagaccccacgaaacgaagcagaagaaaagagccggaaagagaacagaaagcgaggaggccgggcgca

SEQ ID NO: 111586 - RNA, 77 nt, Homo sapiens
cccaagccacccagggaaggcaacagacggagaaagaagaacaaacacaaaacacacaccgagcagaacagagaaga

SEQ ID NO: 111587 - RNA, 79 nt, Homo sapiens
gcagggagcgcgggggcccgcgcagcagcgaccacggcaaaagcagaccggaaaacccaccggcaagaccacacccgag

SEQ ID NO: 111588 - RNA, 78 nt, Homo sapiens
cgggagcagagaaagcagccaaaacaggggccagacagaaaagggagccaggaccccagagaggagacccagcgcccg

SEQ ID NO: 111589 - RNA, 39 nt, Homo sapiens
ccccacgggcggcgcagggggagggcgggaaaccagacc

SEQ ID NO: 111590 - RNA, 53 nt, Homo sapiens
gagaacggcccaaccgccggacgcagcgaaggccaagcagccgcgaacgcggc

SEQ ID NO: 111591 - RNA, 61 nt, Homo sapiens
cggcggaggacgagcccgggagcgacccgcgcaaacaaacagcccggcccccgagggccgg

SEQ ID NO: 111592 - RNA, 35 nt, Homo sapiens
ccggacagagaaggaggggcagccggccaagaaca

SEQ ID NO: 111593 - RNA, 58 nt, Homo sapiens
gagcccgcagaccgcagaaggccggagacaccagcagccaccggggaccgcaaggccg

SEQ ID NO: 111594 - RNA, 74 nt, Homo sapiens
cagggagaaagacggcccacgccccccgaggaaaaagaagaaggggcagaccaacaccacccagcaaaaacccc

SEQ ID NO: 111595 - RNA, 52 nt, Homo sapiens
aaagagaccgcccgcccaacggaacagagacagacccgggggcccccaagga

SEQ ID NO: 111596 - RNA, 88 nt, Homo sapiens
cacagagcgagaccaggaaagaagggggcagaagagggaggcaaagacccaggacccccaagaagccccggacggaagaaccacacca

SEQ ID NO: 111597 - RNA, 48 nt, Homo sapiens
cccagaccggcccagggcagggcggagccgagcgaggccccagaagga

SEQ ID NO: 111598 - RNA, 79 nt, Homo sapiens
agaagcaaggcgacgccagaggaggaaaggaagacaagaagaacggaaagaagaagcagaagacggcaaaaaaagaaag

SEQ ID NO: 111599 - RNA, 81 nt, Homo sapiens
cggcacgcgcccacggcgggcccggcggggaggcgagagcaagcgaagaagagggaaaagcccaaggaacaccggaacacc

SEQ ID NO: 111600 - RNA, 57 nt, Homo sapiens
gcagccaaggcagcagaagagggaggagcgcacagcacagccaaaaacagaaaccac

SEQ ID NO: 111601 - RNA, 81 nt, Homo sapiens
ccgccagggccgccacgacgccacgcggggcaggaaggccaggcccagcacgacagagacccggaaagcgagcagcaaaga

SEQ ID NO: 111602 - RNA, 65 nt, Homo sapiens
ccaggaagccaggagcaggacgcagaagacgcagggccaagacaacccagaaaagaaaaggccag

SEQ ID NO: 111603 - RNA, 58 nt, Homo sapiens
cagagcgacccgccagcacgaacccacaggccaaggacacccagcggcgcaaaggagc

SEQ ID NO: 111604 - RNA, 72 nt, Homo sapiens
aaagacagggaagcagaagagggaggcaagaaacagaagagggaaggcaggaacagggccacagacacaacg

SEQ ID NO: 111605 - RNA, 75 nt, Homo sapiens
gaagaagggaaggcgcgaggaggaaaggaggacgagggccgaggcaaacaagggccacgcgcccagggagcccga

SEQ ID NO: 111606 - RNA, 78 nt, Homo sapiens
gcaggaagaagaagggacacccacagcacagggaaggccaagaacccaaagcaaggcgagacaaggggccaaccagcc

SEQ ID NO: 111607 - RNA, 78 nt, Homo sapiens
gccgggccccaacaacccgggagaaaagccacagagccagggaagggggagggcggcaagaaggagagaaccaggcac

SEQ ID NO: 111608 - RNA, 82 nt, Homo sapiens
agaaggaggcaggcacgggagccgaagaacaacccccccagcagagacccgcagaaacaccacggcacagaacgcccggggg

SEQ ID NO: 111609 - RNA, 91 nt, Homo sapiens
cgacccagaaagagcaaggaccgcaagcagagacaagggagagcgggacggccccaaggccacagaaaaggagaccagccccacgcaggag

SEQ ID NO: 111610 - RNA, 84 nt, Homo sapiens
ccagacgcacggaaagcagcgcaggagccaagaccacagcagcacccagaaaaagaggcggccagacgaagaagccagagcggc

SEQ ID NO: 111611 - RNA, 63 nt, Homo sapiens
ccaaaggacacagcaacacccgaaaggaagagaacccacaacagccacgacccgaagaacccc

SEQ ID NO: 111612 - RNA, 100 nt, Homo sapiens
gccggcgggcgcccggggcaggcccccaggccaggggcccggaacagacaaaagcaggcacacagagaaaaaaagggaacaaaacacagcaagcagacaa

SEQ ID NO: 111613 - RNA, 69 nt, Homo sapiens
aaggcaccaggacaagcaaaggaacaagccaggcagcagccagagcaaacacgcaaaaaaaagagggga

SEQ ID NO: 111614 - RNA, 56 nt, Homo sapiens
gaaagcaagcacaaaacggaacagaacaggggaggagagcacccagcacggaggga

SEQ ID NO: 111615 - RNA, 79 nt, Homo sapiens
gccggcggcagcagcccagagcgcaaagaggacagcagccacgccgcaacaaccgcgagacagggaagaaaaaacgcag

SEQ ID NO: 111616 - RNA, 35 nt, Homo sapiens
aggcgaaaccaccccagcggagaaaccaagacacc

SEQ ID NO: 111617 - RNA, 83 nt, Homo sapiens
gggagggacgagggcggggaagaaaacagccgacggggccggaagaccgaagacaagaaccacggcgggaaacgccagaagga

SEQ ID NO: 111618 - RNA, 75 nt, Homo sapiens
ggcgccaacgccccagcccggccccgcgccgcaccagccgccagagcccgaggaccaagcaaaaccaaccaacac

SEQ ID NO: 111619 - RNA, 39 nt, Homo sapiens
agaaacgggcaaccaacagaacaggagggccaaccgggg

SEQ ID NO: 111620 - RNA, 78 nt, Homo sapiens
gcggggccgaaccgggaccggcgaagcggacgacacacacggggcaaagagaaccaggagaccccaccaccacagaaa

SEQ ID NO: 111621 - RNA, 69 nt, Homo sapiens
ggaccgagagcgcgaaacgcacgagaagggggcgccacagggaaggaccaagacgcagcgaaaggcggg

SEQ ID NO: 111622 - RNA, 74 nt, Homo sapiens
ggagaaggagacaccggaggacgaagagggggagagccggaggagccaccaacagaagcaggagccaggaaacc

SEQ ID NO: 111623 - RNA, 94 nt, Homo sapiens
cgaaggacagcaagacaagaaaacaacaggccagccgaggcaacaggaaagagagcagaaaacgggcccccacacaagaagaaacaccgaaaaa

SEQ ID NO: 111624 - RNA, 74 nt, Homo sapiens
cggccaccgcgacccggccgcgccggcgccgaccccgcgcgccagggaaagggcaagcagaaaccgggaagggg

SEQ ID NO: 111625 - RNA, 77 nt, Homo sapiens
caaggacaacccgacacaccgacggcaccgggccaccgccgccaggcggacaaaaggccccccagccccagcgcgcg

SEQ ID NO: 111626 - RNA, 54 nt, Homo sapiens
agggaacccggcaccgccccaggacagaaaagcaaaaggaagggcaaaaaccag

SEQ ID NO: 111627 - RNA, 50 nt, Homo sapiens
aacggaccagaccgaccaccaaaagaaaagacgagggaagaagaccgaca

SEQ ID NO: 111628 - RNA, 99 nt, Homo sapiens
cccagacccaccccccaagggggacaaacacccacagccagcagccagccgaaacaaaaaaacgagcaaaggcagaaaaaggaacggaacagcggaagg

SEQ ID NO: 111629 - RNA, 74 nt, Homo sapiens
gaaaagggcaaagccccacggccaagaaggcgacgaagcgaccaacagccaaagcggggaacggggagggaggc

SEQ ID NO: 111630 - RNA, 82 nt, Homo sapiens
ggagcaccaaaaaggcccgcacacagggacagaccgcaaaccaagggccaaaaaaagaccgcggcacagaacaggcacaagc

SEQ ID NO: 111631 - RNA, 60 nt, Homo sapiens
agaaaaacaaacacacgcaaaggagaaaggaaccgacagaggcgcaggaagggcaacacc

SEQ ID NO: 111632 - RNA, 69 nt, Homo sapiens
acagaggcaaccccaaggacccgggcgacggaccaagcaccaggggcgcaagagacgggcacacccaag

SEQ ID NO: 111633 - RNA, 81 nt, Homo sapiens
cgacacggcgagggcgccacggcaggggacaagcagaccggaagaccgacggaagaccacaccccgagggagcccaggaca

SEQ ID NO: 111634 - RNA, 84 nt, Homo sapiens
gcaacccgcaaacgggggggcggccggggccgccaccacacgaaacagggcaagaccccaaacgacacaagaccacagagaaaa

SEQ ID NO: 111635 - RNA, 72 nt, Homo sapiens
ccagaaggcaaacagaacacagaggaggaggagcggccgcagaagggcgcggcccgcccgcccggacgagcc

SEQ ID NO: 111636 - RNA, 74 nt, Homo sapiens
ccagccaggagaaagccacagaccggggcaaccggacgcaagggcgccgagccccgcggaacaacacgagagac

SEQ ID NO: 111637 - RNA, 56 nt, Homo sapiens
gccccagcgaccagaccagaccaggagcaaagaggcgagacccggcgaagcagaga

SEQ ID NO: 111638 - RNA, 76 nt, Homo sapiens
caagaggggaagaggacgggcaggcggaagcgccagaggagccaccagcagacaacagggagaccccacgggacac

SEQ ID NO: 111639 - RNA, 73 nt, Homo sapiens
gaacaaaagaaggcgaccgacaccccacccacaagacgaaaaggcacagggcccggagcggggggaaaacccc

SEQ ID NO: 111640 - RNA, 74 nt, Homo sapiens
gcggagcacgcgagagacaggagaagaggggaagaagaaagccagaagagcagagaaggccggaggaagaaccc

SEQ ID NO: 111641 - RNA, 81 nt, Homo sapiens
gcgccggaccgacaggcgcgggagcgagggaggacgccgggacaccggaagccgagaaagcaccaacaagacgcaaaacca

SEQ ID NO: 111642 - RNA, 77 nt, Homo sapiens
cgagcagaacccgaggcgcggcggcgagcccgggcaaacgaaaagccaaaaacacaaagagggacagcagagacgaa

SEQ ID NO: 111643 - RNA, 71 nt, Homo sapiens
caaacaaacaaccgccgaggaccgcccgccgaggacgaaagaaaggccacccaggaggagacaagaacgcc

SEQ ID NO: 111644 - RNA, 80 nt, Homo sapiens
gaacggcagcggagaaaacaaccagccaaccagacagaagccaggacaagcagcgggacaacagggcccaaacccgcggg

SEQ ID NO: 111645 - RNA, 75 nt, Homo sapiens
gggcggaggacagagaagccccggccgggccggccagcgccggaaaccaacaaggaggcacagcgagaagggaag

SEQ ID NO: 111646 - RNA, 76 nt, Homo sapiens
agagcaaccagacagacagaacaaagcgggcaaagagaccccagaaccggcaccagaaccgaggccacaaagccag

SEQ ID NO: 111647 - RNA, 75 nt, Homo sapiens
agaggaggccccccagccacggaaacgagacagggaaagagaaggcacagggcagagcaacagagacacaggaga

SEQ ID NO: 111648 - RNA, 69 nt, Homo sapiens
ccgagcaacgaagcagccgagacgaggagaaaacccagaaaaaagggcaggcgcaaagggaaaaccccc

SEQ ID NO: 111649 - RNA, 70 nt, Homo sapiens
gaagaaaaggaccaaaaacacaacaaaagaaaccaacaccgcaaaaaaaaacagggcgaccagcggaaga

SEQ ID NO: 111650 - RNA, 69 nt, Homo sapiens
gaagagccagcgccaaggcggaaaagcccaagaaacaaacaccccaccaaagccaccaagccaagacca

SEQ ID NO: 111651 - RNA, 63 nt, Homo sapiens
ccaggaaagccggggagcacggaccaaaaagacccgggaggagggaaggacaccgacccacga

SEQ ID NO: 111652 - RNA, 71 nt, Homo sapiens
ccacccgccaggcgggcccaggaggagcagcgacgagaaagagcaagagcccagggaaaagaagaaggagc

SEQ ID NO: 111653 - RNA, 77 nt, Homo sapiens
ggaggaagccaaagaagaacaagaacacaaccgacaagagcaacaaagcaggacagagcgggagccaccagcgccaa

SEQ ID NO: 111654 - RNA, 82 nt, Homo sapiens
agcggaaaaacgacaccggcagccgagaaggagcgcagggccagagcaccacggccaccaggccagcacggaagccccaacc

SEQ ID NO: 111655 - RNA, 75 nt, Homo sapiens
cagcgcgcagcccggaccagccaagccccaacggcccccgcgccgggcgcagcgggcaaagagcagacccagaaa

SEQ ID NO: 111656 - RNA, 71 nt, Homo sapiens
gcgagggaggagagagggagagccaaagaagggaaagggagcagcaccggccacacccacagcacgaccgg

SEQ ID NO: 111657 - RNA, 77 nt, Homo sapiens
ggcagacagccaaccggaccccggcacgcgaggaggagagaaagaacccacgcaggacgacagaagaggccggacaa

SEQ ID NO: 111658 - RNA, 78 nt, Homo sapiens
cgacccacaagcggaaagccacagcagaggcagccgcaaagccagaacaagcaaagaccaaaacacaaaaacggcgaa

SEQ ID NO: 111659 - RNA, 62 nt, Homo sapiens
gaagcaccggccacaagggggaaacccgcccagggcgggagaccgccaagaaacaccacaag

SEQ ID NO: 111660 - RNA, 68 nt, Homo sapiens
gaaacaagaggaggaggggcgcggcagaggaagaagaaggcgcaaagcgccgaagggagaaccgcaaa

SEQ ID NO: 111661 - RNA, 75 nt, Homo sapiens
gccgagcgaaggggaggcacccccaagagaacgcaccgcggcgcggagccccaccagaccggcccccacagcccg

SEQ ID NO: 111662 - RNA, 36 nt, Homo sapiens
gagccacaggagagcgcccagcggagcggaggcaga

SEQ ID NO: 111663 - RNA, 84 nt, Homo sapiens
agcagcacaaaagcaggacaggcccagcaagaccaaaggaagcagaccagccagccccaagcagccgcacgacaaagaacgaag

SEQ ID NO: 111664 - RNA, 77 nt, Homo sapiens
ccaccaccgagccacaagggaccgggacggaccccgggagcccagacacagcgaacccacccaacacggcaaaacaa

SEQ ID NO: 111665 - RNA, 68 nt, Homo sapiens
acaccccagcacacccacaggcgaacaagaggcgccagcgggcgcgccggaagaacagcgccacgcca

SEQ ID NO: 111666 - RNA, 61 nt, Homo sapiens
gcgcggaaacggagggggaagaagaaaagaggaggaagcgcccagaaccagggaccgacag

SEQ ID NO: 111667 - RNA, 63 nt, Homo sapiens
aacgagagaagcccaggggacagaggaagaaacaagcgagaggaagcacagcagaggagggag

SEQ ID NO: 111668 - RNA, 79 nt, Homo sapiens
agcgccgggaagaagccggcccaagccacgagaaggcggaccgaggacgaaggaaaggccaaagaagagacgaagcaaa

SEQ ID NO: 111669 - RNA, 67 nt, Homo sapiens
gggacggagggccgagaagcggggcaccacgaaggaccgaagaggcaccgcgcgccgcgccccccca

SEQ ID NO: 111670 - RNA, 34 nt, Homo sapiens
caagccccccccggcagaggggacaacagagccg

SEQ ID NO: 111671 - RNA, 70 nt, Homo sapiens
cgaaaccaaggagcgccaaagagaaagagcaagaggaagaccgcaaagggaagggacgcaaaaaggaagc

SEQ ID NO: 111672 - RNA, 77 nt, Homo sapiens
gccgagggcagccgcggacgggaccagcgcgccggacaggcacacagagaaaaaaagggaacaaaacacagcaagca

SEQ ID NO: 111673 - RNA, 59 nt, Homo sapiens
caggaagagggagcccgccgacagcccacacgcacccacaccaaggaggagcaccccgg

SEQ ID NO: 111674 - RNA, 85 nt, Homo sapiens
cgcgggcgagaggagcgcaggccgggcaaacagaccaagaggccggagaaccagcggagcgacagacagaacgccggaggcgagg

SEQ ID NO: 111675 - RNA, 78 nt, Homo sapiens
gccgcacagagccccagaccacgggggaacagcggagacaggaaaccgaccccggagagcgggcgggacagggacacc

SEQ ID NO: 111676 - RNA, 75 nt, Homo sapiens
cccagaccccccgccagcgagacgcggaagaacaagggaggcgaggacggacaaaaggaaacggacgggaggcca

SEQ ID NO: 111677 - RNA, 71 nt, Homo sapiens
caggccccgccccggcccccgccaccgggaggaaaaccgagccaaacccccccagaccgaaccgcagcacc

SEQ ID NO: 111678 - RNA, 87 nt, Homo sapiens
ggcaaccgccccgcgagaagaaacagaccccgacaaaaagcagaagacagcgaaacggaaaagaaaagcgaaccaagaaacagccaa

SEQ ID NO: 111679 - RNA, 71 nt, Homo sapiens
cgccccccggaagggcaccgcgacgacaccccggggaggcgaggagagaggggacagccagagccgccccc

SEQ ID NO: 111680 - RNA, 61 nt, Homo sapiens
gaggagcaggagaacacaccaaccagcgcggggagaggaggacacccagagcaacaaaccc

SEQ ID NO: 111681 - RNA, 69 nt, Homo sapiens
gggggaggaagagaagacaacgcacaacaggggaggcaagcaggggggcaaaggaaagaaggcagaaag

SEQ ID NO: 111682 - RNA, 63 nt, Homo sapiens
caccgaccagggaacgcaacaaagcccaaggagccagaaacacacgccaacgaaaccccaagc

SEQ ID NO: 111683 - RNA, 77 nt, Homo sapiens
cccccacacccccgggggcacgaagacagagagacgccacggggcccagacggcaggcaggagacaaagagggagaa

SEQ ID NO: 111684 - RNA, 61 nt, Homo sapiens
agcggccccccaggaacggagccagagcggccggcccccagacagccccaaaagcacgcac

SEQ ID NO: 111685 - RNA, 82 nt, Homo sapiens
cacaacagggaagcagccccaaggccagcggagccagcacccccacaagcagcaggagcagggacggggggaaaagcgcacc

SEQ ID NO: 111686 - RNA, 67 nt, Homo sapiens
gggaacacccccagagagaggaagagagcagccaaccaggggcaccagcgagaaacaaacagaccca

SEQ ID NO: 111687 - RNA, 50 nt, Homo sapiens
ggcagacaaaagggccaaagaagggagagagaaagccacacacgaggagg

SEQ ID NO: 111688 - RNA, 80 nt, Homo sapiens
ggcgccaaccccgaacggggggagacgccacggaacgcagggagccaacagcaaagcgcacacggaggccaacccagacc

SEQ ID NO: 111689 - RNA, 84 nt, Homo sapiens
agaagcacgaaagcgggagagggaccggaacggcggcgacaaggggcccgaacagagggaggagaaggcagagcccccccaggc

SEQ ID NO: 111690 - RNA, 57 nt, Homo sapiens
gcgacagaggagggaggaaaacaaccgagggcagagggaacgacaggccgggagcca

SEQ ID NO: 111691 - RNA, 77 nt, Homo sapiens
aaaagcccagacgggagggaccacagcccagcaccgaagcggaaacacgaagacccaaaacggaagaagccagagcg

SEQ ID NO: 111692 - RNA, 71 nt, Homo sapiens
gaccccccaccgcacacaacggcgaggacaccacccgcgcgggggccgacgcgccgcgagaaccgccggcg

SEQ ID NO: 111693 - RNA, 63 nt, Homo sapiens
agaaggagcagcggaccaaggcgcggggaggggagaagaaggaacggaaagagagaggggaga

SEQ ID NO: 111694 - RNA, 80 nt, Homo sapiens
ggacaacgggacccagaagagagccaaaaccaggccaaccgcacgcaacgccagaaaaaaccgagaagacccaaaacgcg

SEQ ID NO: 111695 - RNA, 97 nt, Homo sapiens
gaaggggcgagggccaagggaacggggggaagaggcaggggggacacagcaggcaggaacgccgcaaaagcaggcgagcaacaccgcaacgacagcc

SEQ ID NO: 111696 - RNA, 56 nt, Homo sapiens
ccgccccgagaccacccaagggggcgccagaacaaagaagagaaacgcagcgcaac

SEQ ID NO: 111697 - RNA, 76 nt, Homo sapiens
aggagaggcccgagaaggaacccgaaagccacgaagaacgcccgccacccgcgcacacccccccagggcgcgagcc

SEQ ID NO: 111698 - RNA, 69 nt, Homo sapiens
gacagagcaacgcaccccacagcaagagaccccgcggaagacaccagaaggggcagcgcccccacaccc

SEQ ID NO: 111699 - RNA, 80 nt, Homo sapiens
accccgcccacagcacgagcgcgggccaggcacgacaccgcaacgacacagcagcgaagcgccggagaacgcacgggacg

SEQ ID NO: 111700 - RNA, 93 nt, Homo sapiens
cacacgggggagcccagaggagacagcaacccacaggcgcaccgaggagaccacaaaccaggaaccacaccgcagaacaccaaagggcggaca

SEQ ID NO: 111701 - RNA, 56 nt, Homo sapiens
agaagccaggggacaccgccagcccaaacaacggcccaggaggaaaccaaacagag

SEQ ID NO: 111702 - RNA, 73 nt, Homo sapiens
aacaaagccccacagcagccagaaggaaaggagaacccccggagagaaaagcagggacagcgcggggaaaacc

SEQ ID NO: 111703 - RNA, 71 nt, Homo sapiens
aagcaccgccagcagcgacgcgccagggccagccgagggaagagcaagggacaacagacaccaaacagcca

SEQ ID NO: 111704 - RNA, 72 nt, Homo sapiens
ggaagccgagaagcgcagaacgaaggagaaggcccgcagcaccaaaaaagacaaaacacaaaaaaacacagc

SEQ ID NO: 111705 - RNA, 79 nt, Homo sapiens
ggagcgacagaggagggaaacgcggagccaggccgagaggacaacggccaagagaaacaaagccccacacagagggaac

SEQ ID NO: 111706 - RNA, 85 nt, Homo sapiens
cccagaagaagggaaggcgcgaggaggaaaggaggacgagacaggaaaagcagaggggcgaaaccaagaggaaccacccagacga

SEQ ID NO: 111707 - RNA, 71 nt, Homo sapiens
cacaaagggaagcacaacagaggcaggagaggcccagaccaagaggagaacacaccccaaagaagggaccg

SEQ ID NO: 111708 - RNA, 76 nt, Homo sapiens
ccgacgggaccaccgggaaccgagggggcagccggaccgcacgcgggggaccaaagagacacacacaaacagacaa

SEQ ID NO: 111709 - RNA, 80 nt, Homo sapiens
cagcccccagccgcgcgcgcgcacccccggacagggagaagcagcccagccaggaccgacaagagagcaggaccagacac

SEQ ID NO: 111710 - RNA, 40 nt, Homo sapiens
gcaggcgcgcgccccccgagcaggaggcgaaccggcagag

SEQ ID NO: 111711 - RNA, 59 nt, Homo sapiens
cgcccccccgcaaccccgggaaaccccagggaagaggaggaggagaaaaagcagcccac

SEQ ID NO: 111712 - RNA, 51 nt, Homo sapiens
aagccaccagcaggggcgacaacagcacagggcggacagaggaagagagac

SEQ ID NO: 111713 - RNA, 40 nt, Homo sapiens
cggcaaagccaaccggccaagagaaggaaaacccagcacc

SEQ ID NO: 111714 - RNA, 81 nt, Homo sapiens
acaagccaacccaggaggaaaaacggaacaccaagaaggaccaagaaggaaagaagcccgaagcgcggggaaaacagcgac

SEQ ID NO: 111715 - RNA, 72 nt, Homo sapiens
ggacagagaagcccccaaggagcgcagaccagagaggacaaccaaaagcaccgaaccggaacaaagcccaca

SEQ ID NO: 111716 - RNA, 63 nt, Homo sapiens
acagaaaccaaaggcgcgagaggccgggaaacgcaagcaagacggaccgaagagacaggcagc

SEQ ID NO: 111717 - RNA, 71 nt, Homo sapiens
cccgccgaccgccgccagaccaacgacggcgcacggacggacagaagaggacgcaccaagagaaagcagga

SEQ ID NO: 111718 - RNA, 72 nt, Homo sapiens
acccccgcggcgcgcagcccagcagagcgaaaagcaaaccggagcgcgaacgcggccgagaccacgccgcca

SEQ ID NO: 111719 - RNA, 80 nt, Homo sapiens
gggagagagacgcgggaaccgccagcaaaccacacagcgggcgacgcacgaggcacacaggaaggaggggagcagggacg

SEQ ID NO: 111720 - RNA, 72 nt, Homo sapiens
cagaagcccgaagaaaacagcgggaagagacagccaagaggacacagagaccaaaggcagaacaaacagcag

SEQ ID NO: 111721 - RNA, 42 nt, Homo sapiens
aagacgacacaggcaggcaagcgggcccgcgcagggggcccc

SEQ ID NO: 111722 - RNA, 77 nt, Homo sapiens
cagaaaaaaggaagcaagcaagaggaaaaagaagaaaaacaaaccgcgggaaaccagggcaccgccgaccgaaaccg

SEQ ID NO: 111723 - RNA, 101 nt, Homo sapiens
ccgggcgcgcaccgccgcccccccagacaagaggacaccgcggaggaagagcccaaaaggcagagcgaggagagaagaaggagggaaagccaaacaacgga

SEQ ID NO: 111724 - RNA, 86 nt, Homo sapiens
agggcccagagagacagcagaacggggagcgggaaagcaaagaagggcagagacacggagcaacaagccccgacacggggaagaaa

SEQ ID NO: 111725 - RNA, 71 nt, Homo sapiens
aggacggccggcacgcgcccaaagaacaagggccgagggaacagggagggaccaacagaaaacacaacgag

SEQ ID NO: 111726 - RNA, 55 nt, Homo sapiens
ccccccgagacggaggagagggccgacaacagagcaccaacaaaaagcaagccgg

SEQ ID NO: 111727 - RNA, 78 nt, Homo sapiens
cgcagcacgagccaggaacgcgcagccccgagcgccgcggacgcgcacgagggacggggaaaggacaagggagagaca

SEQ ID NO: 111728 - RNA, 38 nt, Homo sapiens
gagcacaagccaaggacgcagagggccaaagaagacag

SEQ ID NO: 111729 - RNA, 65 nt, Homo sapiens
aaagagaaagaagacgaagaccagagggagaagggaaagaacgccggacaacagcggcgaagaag

SEQ ID NO: 111730 - RNA, 75 nt, Homo sapiens
cccgggcagccgcgccccagggcgcccgagagccgaagcacagggaaagcaacgaagggagaccaagggagcaag

SEQ ID NO: 111731 - RNA, 78 nt, Homo sapiens
agagcgagcgagggggggcgcgccggaaaccggagcgcgcagcagggggcgaggaagagacaggcgggggagaagaag

SEQ ID NO: 111732 - RNA, 77 nt, Homo sapiens
cagggagaccccgacagcaagaacagggccaggccgggccgaggccacgggcaagcccgggagggaaagccagaccg

SEQ ID NO: 111733 - RNA, 79 nt, Homo sapiens
ggagagccgacgcacgcgaggagcggcaggacgcgaggagcgggcaagccgcaggcaccaagaagaccaacaagcagaa

SEQ ID NO: 111734 - RNA, 114 nt, Homo sapiens
gacgggggcgcggccagaggccgggcggagcgcccagacgcggggagccgccggagcgagaagcaccagagacacgacgcaaaggccaccaggcagccgcgagacacagcaaac

SEQ ID NO: 111735 - RNA, 36 nt, Homo sapiens
cgaagacaccgacgggagcaggcccgggggccaggg

SEQ ID NO: 111736 - RNA, 69 nt, Homo sapiens
gggcaggcgggacagcacagaggcagcgccacccgcggagggccccaagcggcaagaggggggcccacc

SEQ ID NO: 111737 - RNA, 66 nt, Homo sapiens
gaccgagcggagaggagagcacacggcaccgagggagggcgcccgcgccggcagaggaggcgagca

SEQ ID NO: 111738 - RNA, 85 nt, Homo sapiens
acccagacagacgccggggaggcagcgcgggacccagcccaggcggcgcggacggggcggaggggccgaacaagccgagacgggg

SEQ ID NO: 111739 - RNA, 84 nt, Homo sapiens
ccgagaggagcccgggggcacggcggcaaggaaacacgccgcaccagggaggagagaaacgacaccccccacccgaaggacccg

SEQ ID NO: 111740 - RNA, 82 nt, Homo sapiens
gaggcagcgagcggaagcggaaggaagaaacgcgccggacaaggagaacaccggaagggagaaggcggaggaagggcacgac

SEQ ID NO: 111741 - RNA, 33 nt, Homo sapiens
ggcagcaagaaagggaaggggggagagcccaac

SEQ ID NO: 111742 - RNA, 80 nt, Homo sapiens
aggacgggacggggcaaaccgccgccgcccccaccagacagacgcgcaaaacccagaaaaaaggcagcggaaagaagaaa

SEQ ID NO: 111743 - RNA, 51 nt, Homo sapiens
caggggggcggcggccgagccaaggaccagcccagcgaagacaggggccaa

SEQ ID NO: 111744 - RNA, 83 nt, Homo sapiens
gagcgcagagcccggggacggcgaggccccagaccacacgaaggagaagaagcaccagccgacgcgaacggaacacccgggaa

SEQ ID NO: 111745 - RNA, 66 nt, Homo sapiens
aggagaagacaccaaaaagcaaacggaccagaccgaccaccaaaagaccgggggcccgcgcacaga

SEQ ID NO: 111746 - RNA, 66 nt, Homo sapiens
aaggaaggaaaagacccaccaaagggaggcaaggacacacgagagccaccaccaaaaaaccagcca

SEQ ID NO: 111747 - RNA, 110 nt, Homo sapiens
gaagagcaaagcgccaggccaaccagagacaccagcaggacaggaaaaaaagaggaagagagaccaaacaccaagcgcccaggggcggggcacaagccacgggaggaggg

SEQ ID NO: 111748 - RNA, 65 nt, Homo sapiens
cagaaaccgaaaagacaccgcaaggaagcaggggaacgaggaaaaggggaccagaagccaggaga

SEQ ID NO: 111749 - RNA, 53 nt, Homo sapiens
gacagggaagggcaagccgcaggcaccaaaagacccaacagggcgaccagaaa

SEQ ID NO: 111750 - RNA, 64 nt, Homo sapiens
aggaaccccaccccgacccagagcaggaaacagccggaaggccccaaacacaaggcacgcaccg

SEQ ID NO: 111751 - RNA, 89 nt, Homo sapiens
aagagggcagccgccgaaggaacgcgacggcggcgcccgcaggcccagaaggggaagacccccagcgaacagagacccaaaaagaagaa

SEQ ID NO: 111752 - RNA, 73 nt, Homo sapiens
gagggaaaagcgaggcaaggcaggcgggacaaaccggcgaccacacacggggacgacggggaagccggacagc

SEQ ID NO: 111753 - RNA, 74 nt, Homo sapiens
agaaaacggagaagaagcaaccaagagaggcccaaacgaaaaagcggagggaagcacccggccgaaagaccagc

SEQ ID NO: 111754 - RNA, 58 nt, Homo sapiens
ccaaaagccgacaaccccagaaacagggcggggccaccccggaaggagacggaaagac

SEQ ID NO: 111755 - RNA, 85 nt, Homo sapiens
cgacaacagcgggcggagacaccggagcggcgggccccaggcaaacgcacgacgccgccagggcggagggggcagggcagaagga

SEQ ID NO: 111756 - RNA, 73 nt, Homo sapiens
caaggagccaggacacacaaacgcaaagggaaaaaggaagaccaacggcgggaaaagcagcaaacagcgcaca

SEQ ID NO: 111757 - RNA, 73 nt, Homo sapiens
ggaggggacgaacaagaacagaaagggaacacagcagagggggaaaaaaacaggagcaggaggagaagaaacc

SEQ ID NO: 111758 - RNA, 75 nt, Homo sapiens
aaggaagaaagggacaaagagaggagcagaagaaaaagcagcacgaaggcgaggaaccagcagacaaaaaagaag

SEQ ID NO: 111759 - RNA, 83 nt, Homo sapiens
cgggcgcccgaagccgggagccgccgccagggggccgccgggagccgccccgccagcgcaaaggaggcaaacgaccaaacacg

SEQ ID NO: 111760 - RNA, 78 nt, Homo sapiens
agcggcggagccgggagggagacggcccggagagcggcgcgcagaaccagacgccgggcccccagcaggcagccccac

SEQ ID NO: 111761 - RNA, 77 nt, Homo sapiens
caagccggaggagaagcaagaaggcccggacacagcaaaccgggccacagcagccgcgaacgcggccgggaggcaga

SEQ ID NO: 111762 - RNA, 60 nt, Homo sapiens
cagcagcagaagaagacgccaagcaccggcagcccacacccagcgccaccaccagccacg

SEQ ID NO: 111763 - RNA, 62 nt, Homo sapiens
ggcacacagcacgggcgggggacgggcagaaaaacagagagggacggaccccgggccccccc

SEQ ID NO: 111764 - RNA, 69 nt, Homo sapiens
ggccgacggccggcgggcgggggccccgcgccgcggccgagcagcggggacagagcgaagaacccccca

SEQ ID NO: 111765 - RNA, 85 nt, Homo sapiens
ggcggaaggagaaaagggaagaaggagaaagggccaaccccgaagaagcaaacagaaacgaaggagacagagaagaacgacaaga

SEQ ID NO: 111766 - RNA, 74 nt, Homo sapiens
aggccagaaggccaaaccacaagccaaaacccgaaaaaggccccccgagaagacaggagaacccagcgacgaca

SEQ ID NO: 111767 - RNA, 70 nt, Homo sapiens
agcagcgggaaagaagagcgggaagggacaaaacagaggcaacaaggggagaagcagaccgcaccaggcg

SEQ ID NO: 111768 - RNA, 78 nt, Homo sapiens
gaagcgggagcgcgcggacccgcgccgcgcggcggcccgccaggcgcgaccgcccagggagacggaacccacacagac

SEQ ID NO: 111769 - RNA, 62 nt, Homo sapiens
ccggcaccgccaccggacaaacggacaccggggcgcgagacaggacagaggccaagcaagaa

SEQ ID NO: 111770 - RNA, 36 nt, Homo sapiens
acaagagagacaaaaggcagcccaccacaaaccaaa

SEQ ID NO: 111771 - RNA, 77 nt, Homo sapiens
ccaagacagccgggaagccaccaagccagacaacccaaaagaccacacacagccgacacaacaagacagacgccagg

SEQ ID NO: 111772 - RNA, 72 nt, Homo sapiens
cagggcgggcgaacaggaacgagcggaagacgccgagaaaggaaaccggagcaaagaaaccccccacaaaca

SEQ ID NO: 111773 - RNA, 80 nt, Homo sapiens
aacccagcacgagaggccgagcagagcacgccagagcccccagggacaaagcaagcgcaaaggaggggaaggacagacgg

SEQ ID NO: 111774 - RNA, 80 nt, Homo sapiens
ggaagaacaggcacagggcgcacacgggaggagcaggcagagggggccacggacggggccgagcacaaccacccaccgga

SEQ ID NO: 111775 - RNA, 58 nt, Homo sapiens
gccgaagagaacgcgaagaagggccaaccccggaaaagcagaccaaagccaaaaggaa

SEQ ID NO: 111776 - RNA, 90 nt, Homo sapiens
caagagcaccacgggcaggaaggcagcgcacgacagcaaaagacaacgaagagaggaaagaagcggaaaggagggagcacacaacaagga

SEQ ID NO: 111777 - RNA, 62 nt, Homo sapiens
ggacggcggccagaggcgcggggcgccgccgcgcagcgccgcgcgcaaggccagcagagccc

SEQ ID NO: 111778 - RNA, 77 nt, Homo sapiens
caaaaacaggcgagcccacgaccccccagggcaccacaacagaaccaggcacagagggggaggggagggccgcacgg

SEQ ID NO: 111779 - RNA, 65 nt, Homo sapiens
cccgcggggacagaaaaacaaggcgaggccgccaaagggagcgaggagacacgaagcagaagcag

SEQ ID NO: 111780 - RNA, 93 nt, Homo sapiens
cggccggaacccaagccaggcgccaagacgggaagcccccagccaagacaagcgcgcacgcggccacacggccacggccaccaccggcggccc

SEQ ID NO: 111781 - RNA, 82 nt, Homo sapiens
aacccaacaaggaggccagggcggccagacacacggcagggaaccccaccccggaaggcggggacacagacgagaacacgaa

SEQ ID NO: 111782 - RNA, 78 nt, Homo sapiens
cacgagacacccccgaccgcagcgcgcgcggcccacggcgggcgcgcccagagggcggaggaaggagagcccggaccc

SEQ ID NO: 111783 - RNA, 87 nt, Homo sapiens
cgccgccgcagcgggaccgcgcgaccggcgcccgcccgcgccagaaccgaggacgcagccaggagcggcggcccaggagcggagcgg

SEQ ID NO: 111784 - RNA, 93 nt, Homo sapiens
cccgcagcaagccgggcacaaagaacggaagcgaaagagcagcagaaacgcacccagaaccagcaagaagagggacccaaaaaaacgcaaccg

SEQ ID NO: 111785 - RNA, 77 nt, Homo sapiens
aagaaggcaggccaaaccaccgaccagccagacaggaaaaagcaagccagggggaggaaaccggaacgcgcccaccg

SEQ ID NO: 111786 - RNA, 74 nt, Homo sapiens
acaaacccccgcagcgcgacggcacacacaccgcagaacagcggggaaacacaggcaagaggagcccaccggcc

SEQ ID NO: 111787 - RNA, 74 nt, Homo sapiens
cgcaaagaacaggcgccggagggaaacccgcaaagggaaaagcaaccgagggaaagagagagcgccgggaagag

SEQ ID NO: 111788 - RNA, 75 nt, Homo sapiens
cccacccacgaagggaggaaaagggcagggacagcgcaggcagcagccgaaaaggaagagcagccgaggagagga

SEQ ID NO: 111789 - RNA, 77 nt, Homo sapiens
gacccgagcccgaggccgagcggagagagaggagagagacgacagggagaggagaagagaggacgaggcggccccag

SEQ ID NO: 111790 - RNA, 70 nt, Homo sapiens
agcacacgggacgcaccaaaagggggagaagagggagacccgaacgaagacgcagcccagacaggaaaag

SEQ ID NO: 111791 - RNA, 81 nt, Homo sapiens
cggagacgaggggggagaaccagccgacggagcaggcagcagcccagagaaagacagccaagcagagagaagaaaagaggg

SEQ ID NO: 111792 - RNA, 60 nt, Homo sapiens
gcgcggagcgggcggagcggcgagagcccccacggagccagcagaggccaaggcagcagc

SEQ ID NO: 111793 - RNA, 80 nt, Homo sapiens
gcgccgcgccgcacgagcaccagccagagccaggacagggcagaccgccagcagcacagcaagccacagagagggccggc

SEQ ID NO: 111794 - RNA, 57 nt, Homo sapiens
accaggaggaagacaaaagagaaaaaggagcccaagccccaccaccagcacaccccc

SEQ ID NO: 111795 - RNA, 77 nt, Homo sapiens
aagagggagaaggacaccaggcagaggcaaggggacccaccggaaccgaggaagggaaacaggcgagcagggacgac

SEQ ID NO: 111796 - RNA, 81 nt, Homo sapiens
caaggagggcgaagagcgaggaggaaggacgagacgagaccgggacggaagacggcaaagacgagaccgagaacggaagag

SEQ ID NO: 111797 - RNA, 86 nt, Homo sapiens
ggagacgacgacaccgcacgcgcacggacggcacagcccgccgaacccgaaaggagagagaagaagaaggaggccgcggccagaaa

SEQ ID NO: 111798 - RNA, 80 nt, Homo sapiens
cccccagccagcggaacgccggagcgggagccaggggggcaggcaccgcggccacagccgggccgagggcgcggaggcac

SEQ ID NO: 111799 - RNA, 73 nt, Homo sapiens
aggagccagaaaggggacgcgggaaagcgcagacggggaacgggacagggcagcgcagagaagagaaaaggga

SEQ ID NO: 111800 - RNA, 76 nt, Homo sapiens
cggaagacgaggagcgcgcggcgccggggggcgcgccgcgaccgcccgccggagcaaacgagacggaagaaaaaac

SEQ ID NO: 111801 - RNA, 56 nt, Homo sapiens
cagggagccaacgcgaacagaaacagcgggaaggaagaaagaggaaagcgggcagc

SEQ ID NO: 111802 - RNA, 83 nt, Homo sapiens
gcggaccgggcgccgaagcccgaggcagaggaaccggccccagagcagagaaagggggaggcggacccggcaacacgaaccgg

SEQ ID NO: 111803 - RNA, 87 nt, Homo sapiens
aaagacggaccaacccaggacccccccacagaaagccagaggaccaagaaaggcccagggaccaaagcccggacaaggcccgagcac

SEQ ID NO: 111804 - RNA, 84 nt, Homo sapiens
gaaaaccccaaaaggacaaaggcccacccccccacgagcacaaaaaaccccacaccagccagaccaacaccacaggacaaccgc

SEQ ID NO: 111805 - RNA, 64 nt, Homo sapiens
acaaaagggccaaagaagggagagagagggacagaaaggcagacagagggcgacagccagcacc

SEQ ID NO: 111806 - RNA, 54 nt, Homo sapiens
aaagggccaaagaagggagagaaagggagaagaggacagaaaaagaccagacgc

SEQ ID NO: 111807 - RNA, 35 nt, Homo sapiens
gcacggaaacagacgagcaagagaaccacccaaaa

SEQ ID NO: 111808 - RNA, 91 nt, Homo sapiens
ggaggcggcggaggccagggaggaagagcgaagagcgggcgaaaaacgggggagcgaagacggggaaaccgggcgcccccggaacccggag

SEQ ID NO: 111809 - RNA, 84 nt, Homo sapiens
gagaggccacgcagagcgcccaggacagagcgggagccaccagcgccaaagggaagccaggagcccgggggcacggggagaaga

SEQ ID NO: 111810 - RNA, 82 nt, Homo sapiens
ccggcgggcggggcgcagagccaggcagcgcagggccaaccgccccccagcagcaggcacgggcgaaccccgagccccgccc

SEQ ID NO: 111811 - RNA, 91 nt, Homo sapiens
cgagcccgagccaggcgccgagcggccccaacaggcccgccgcgccgggccagcggcgccgccgaaggaagacggaagaaaggccgggaag

SEQ ID NO: 111812 - RNA, 77 nt, Homo sapiens
acaccaggggaagcaaagccaagcagacaccacgcaaaacaaaagacccaaaagcagacaggcagcaaagaaaggag

SEQ ID NO: 111813 - RNA, 63 nt, Homo sapiens
gcccaaaagaagaggcacaggcccaggcagaccgcagcaaagaggcaaggaggccacggggcc

SEQ ID NO: 111814 - RNA, 68 nt, Homo sapiens
acccagaacacgggagaaaaaggaaaacgcggaaaaccgacacaacaggcacacagagaaaaaaaggg

SEQ ID NO: 111815 - RNA, 82 nt, Homo sapiens
aaaaagaagcgggagaacgggcgcgccagagacggggagcaggccggggagggagaccaagagcaaaaggagacaggagcac

SEQ ID NO: 111816 - RNA, 113 nt, Homo sapiens
cgccaacccgccgcgcaccgacccgacgcgccggcccacgcgcggccaagggcacccccggagcaacagaacgccggccggggagaacggcagaacacgacagagcagcggcg

SEQ ID NO: 111817 - RNA, 76 nt, Homo sapiens
cggaccgaaaccggccgagaacaccccgggcccacccaagacaaagaaaacaaaggcagacggacagagggcagcg

SEQ ID NO: 111818 - RNA, 83 nt, Homo sapiens
ggacccggagaagagccgcggacgggcggccccgggcaacgacggaaccggacacggcgccccgggagacgcggcccagggag

SEQ ID NO: 111819 - RNA, 33 nt, Homo sapiens
ccaggggccaagcaaggggagcccaaaagaaac

SEQ ID NO: 111820 - RNA, 58 nt, Homo sapiens
gcccaaccgcaacccgcgccgcgccgcgccgcgccggggccagaaacagagaggcaga

SEQ ID NO: 111821 - RNA, 81 nt, Homo sapiens
cggagcgggcagccgccgccaccccgcggccgcacccccgccccagacccaacagaggaagccgcaagaaacgggacgaca

SEQ ID NO: 111822 - RNA, 58 nt, Homo sapiens
ccccacccgccgcagcaagcagaggaaaccccccaggcaagaggcgcaggaccgggaa

SEQ ID NO: 111823 - RNA, 52 nt, Homo sapiens
cgacggccaagaaaaccagaaccggcgcaacaccccagccaaagccaacaag

SEQ ID NO: 111824 - RNA, 74 nt, Homo sapiens
aacaggcagcaggaagcacggcgggcgaaacagaggcacacccccgcagagcgcccacaaacgggaaccagaag

SEQ ID NO: 111825 - RNA, 79 nt, Homo sapiens
caacaagagagagggcgcggcagaccggggcacggcagggaaaaaaggggccagggacacggagcgaggaaagagaagg

SEQ ID NO: 111826 - RNA, 84 nt, Homo sapiens
ccaaacggaccacagccaagcccaagcaaaagccaacagagcagcagcacgggcagcagagcaagggaccgcggagcagaggag

SEQ ID NO: 111827 - RNA, 68 nt, Homo sapiens
cggcaccacacgcagaacgggcggacgggcgcccagccaggggagaagcgcaccaagcgccaggcagc

SEQ ID NO: 111828 - RNA, 74 nt, Homo sapiens
gaagccacagaccccagaaacgggcaagcgcgcaaacccagaacgccagaggaagaaaaaagcccaccgcccag

SEQ ID NO: 111829 - RNA, 87 nt, Homo sapiens
gcgggcccgcgcgccgagggcgaggcggacgcgcggcgcgcagggcaggacccgaggcgccagcagcagcaagaccgggggaccagg

SEQ ID NO: 111830 - RNA, 73 nt, Homo sapiens
aaagaagagacagcccgcagagagaaccgacaggaaccagacacgcaaacaggacagggaagaagccaaaaca

SEQ ID NO: 111831 - RNA, 80 nt, Homo sapiens
ccgaggggccgacccaagcacaccagaaagagcagacagacagcgaacacggaagccacgaaaagcaaaagcacaggaag

SEQ ID NO: 111832 - RNA, 71 nt, Homo sapiens
gcacgccagaaagcccgggagcaagcaaaccccgaaaccacaccaccagggcaagaaaccgccccaggggc

SEQ ID NO: 111833 - RNA, 81 nt, Homo sapiens
cacccccgcgcacacaccccgagggaggaagcaaacaccagagagggaagcagagagcaaccaagcaccaccaagcccaca

SEQ ID NO: 111834 - RNA, 69 nt, Homo sapiens
aacccgcccagaagccagaccccagagccaaacggggacgcaagagaaagaagcaacggggaaaccacc

SEQ ID NO: 111835 - RNA, 53 nt, Homo sapiens
agcagcgaaccacgagagcacaggcccgaagggaaacaaagcgaagagacaag

SEQ ID NO: 111836 - RNA, 80 nt, Homo sapiens
gcggggcgaacccgagaggaggggaccagaacggaacaggccggcggccccaccccccagagacgacgcaaccaaagggg

SEQ ID NO: 111837 - RNA, 77 nt, Homo sapiens
acaggaggagaaggaagggcaggcaagacccaccccgggaagaaagcaaacagccggggggggcacagagccccgga

SEQ ID NO: 111838 - RNA, 73 nt, Homo sapiens
aggccagagaggaccgagaggaaacaaccacggaacaacagacagccacgacggggcacgaaccagaaaccac

SEQ ID NO: 111839 - RNA, 73 nt, Homo sapiens
ggagccagcggacggcccgagaagagcgaccagaccaggacgacaaagaggcagacagaccgagaccaggaaa

SEQ ID NO: 111840 - RNA, 64 nt, Homo sapiens
gaagggcgacgaaaagcgggcgccaacaaggacagcagaccacagcccggcaggcccaaaaacc

SEQ ID NO: 111841 - RNA, 82 nt, Homo sapiens
ccgcggccacgcccgcgccgcccagacagcaaagccgcgcaagaaggaacaccacgcccagcacgccacaacaggaacacca

SEQ ID NO: 111842 - RNA, 62 nt, Homo sapiens
accggagccaccacagacaccccacgggagggcagaggccggaagagcgggagcgggagcca

SEQ ID NO: 111843 - RNA, 49 nt, Homo sapiens
cagagaccggggccggagcaggcaagacgggggcggccagccaggaaga

SEQ ID NO: 111844 - RNA, 82 nt, Homo sapiens
caggaggaagcccagggaacggcgggaccaagaaaggcccagggaccaaagcccggacaaggcccgagcaccaggaccgcag

SEQ ID NO: 111845 - RNA, 75 nt, Homo sapiens
gcagaacgaggcgaccggagcccagccgcgccccagcgggggaaccccgagcgcgccagaacacaaacaaaaccg

SEQ ID NO: 111846 - RNA, 39 nt, Homo sapiens
gccagaaaaacggcgaaggccccgggaccaaggacacgc

SEQ ID NO: 111847 - RNA, 63 nt, Homo sapiens
gaccagaccgaccaccaaaagcccagggggaggcggcgcaacgcggggaaagcaaccaggggg

SEQ ID NO: 111848 - RNA, 83 nt, Homo sapiens
gccgcccgccgcaggccacccgggaacggaggagggagccagccccgggcaacaaagggaaaggagaggagcagggaaaaaaa

SEQ ID NO: 111849 - RNA, 66 nt, Homo sapiens
aagagaagcggagacaccaaagaaccccaggacaggagccagggcaagggcgcagcacgcagaccc

SEQ ID NO: 111850 - RNA, 80 nt, Homo sapiens
gccacggacaccacaaccccagggggccgggccagcacagaaggaagagaagacaagaagcccaaaaaaagaaggcgcgg

SEQ ID NO: 111851 - RNA, 56 nt, Homo sapiens
cacagaccgcggcaagggaggagagaaacagaggaacgcaaggaagaaaagggaac

SEQ ID NO: 111852 - RNA, 77 nt, Homo sapiens
aaaggcacccgcgagcgcaacccaaggcaagggcagacgggggaggaggacgcaaagacaagccacagacaggaagc

SEQ ID NO: 111853 - RNA, 87 nt, Homo sapiens
gacccgagccgcccagaaaccaaagggcaggcacggcagcaaacgccgaggacaccaggggggaaaaaccacacaggcaaagaacgc

SEQ ID NO: 111854 - RNA, 58 nt, Homo sapiens
gcccaagaaggcgccgaagagggcccggaaccgccacgaacacacccagggcccacag

SEQ ID NO: 111855 - RNA, 50 nt, Homo sapiens
cggcgaagcccaccagacggagcgaaccaccgaagagcgcaaacgagaac

SEQ ID NO: 111856 - RNA, 80 nt, Homo sapiens
aaacaccaggggggaaaggacagagcgggagccaccagcgccaaagggaagccaggagcccgggggcacggggagaagac

SEQ ID NO: 111857 - RNA, 76 nt, Homo sapiens
cgccccagcagcccacggccagaaagaccacagcaagaccacgcccccagccgggggaccaggccgaacgacccgg

SEQ ID NO: 111858 - RNA, 70 nt, Homo sapiens
caagcaaaggaaggagccggaagaaacaacccgaacaccagaccccagccaagggaaggaccaggaagca

SEQ ID NO: 111859 - RNA, 67 nt, Homo sapiens
gcggccccgagggccccaagggcggcgacggcggcgcgaggaccgaccgggcccgcggacgaagaag

SEQ ID NO: 111860 - RNA, 71 nt, Homo sapiens
accccaggaaaaagacagcccgcagcacgaccagcaggaacggaagggaccacagaccagcacgccggcgc

SEQ ID NO: 111861 - RNA, 55 nt, Homo sapiens
aaagaaacgaggaccaaagcccaggaaaaacgcccagaacccgccagcagacagc

SEQ ID NO: 111862 - RNA, 64 nt, Homo sapiens
gcgcggccgcggagcccccgagacgggagcggacggcaggacgagggagggacgccacccggga

SEQ ID NO: 111863 - RNA, 70 nt, Homo sapiens
cacgaaggaacccaaagaagagaaagacagagggcgcagagggacaacggagcagcccaacccacacagg

SEQ ID NO: 111864 - RNA, 74 nt, Homo sapiens
gacagccgccaggcgccacacggcaagcccgggagagcagccagacagacagagacaacgcgaacccgccaccc

SEQ ID NO: 111865 - RNA, 66 nt, Homo sapiens
gggccacgagacgagacgaaggaaagccacggagcgagacacaggcgaagagccaccagcggcgac

SEQ ID NO: 111866 - RNA, 62 nt, Homo sapiens
agccgagcacgaaggcagaggaagccgagcccagcagcagggaccgggcggaccaagggggc

SEQ ID NO: 111867 - RNA, 55 nt, Homo sapiens
gcaacaggagcgggaaacgacggaaggaaaaggacaggaggacccagacccagca

SEQ ID NO: 111868 - RNA, 61 nt, Homo sapiens
ggccagcgggcggagagggagccccggaagcgcacccaggccacagaggaggaaagagagg

SEQ ID NO: 111869 - RNA, 73 nt, Homo sapiens
gggaaccaaagaccgggaccgggccaacagagaccaggaaaagccagaacagcacagacaacacacgagacag

SEQ ID NO: 111870 - RNA, 81 nt, Homo sapiens
agacgcccaacagaggaaggacaccaggggggaaaaaccacacaggcaaagaacgcgcaaaacaggacgaaaacaaagggg

SEQ ID NO: 111871 - RNA, 81 nt, Homo sapiens
gccccggccggcccgcgcccgcggcgccagcaccagaacacgaagagagggccggcacccgccggaaccgagcaacgcgag

SEQ ID NO: 111872 - RNA, 69 nt, Homo sapiens
gggcgggcgacaagagaggagccgagaaccgggcaaagacgacgcggagaggacagagccgccggccca

SEQ ID NO: 111873 - RNA, 73 nt, Homo sapiens
gcggaggaggggagcagcgcgcaaggacggacagcgcaggagaagagggccacaagcgaaggcaaaaccaaac

SEQ ID NO: 111874 - RNA, 86 nt, Homo sapiens
gcgcggacccgcccggagagagccagagacgcgcacgaaacgacgaagaggcccgaggacagaggagcaaaggagggacggaaaac

SEQ ID NO: 111875 - RNA, 77 nt, Homo sapiens
gcaggcggagccgaccgggccagacaacaggcacaaagagagaaggaacacccacagggcagacagagaaagaacac

SEQ ID NO: 111876 - RNA, 72 nt, Homo sapiens
accagagaaaacgggaggacgcacccggggaaccagcaaacaagagcacaaagacaggggcggaaagcaggg

SEQ ID NO: 111877 - RNA, 83 nt, Homo sapiens
agcggaagcgcagccacaaggccgcaggggagccgagagccacagacaaggagaacacagcgcccccagcccacaaggaccgc

SEQ ID NO: 111878 - RNA, 71 nt, Homo sapiens
agcccggggcggcagcgcggacccgcccggagagagaggagggccagaggcagggagcacacaagcaaaga

SEQ ID NO: 111879 - RNA, 69 nt, Homo sapiens
accggaggagggcgaaaccgcagacgaagacgcacggggcgcgggagaagaaccaacaacggaaaacca

SEQ ID NO: 111880 - RNA, 84 nt, Homo sapiens
ccagccacccgacaggagccccgccgccgcgcaccgcccgccccgcaccgaacgagagcccagacagagaaagcagacacgaac

SEQ ID NO: 111881 - RNA, 54 nt, Homo sapiens
aggccgaagggggccgggaggaagaggagaaaggcccaaaggggcgaaaagcca

SEQ ID NO: 111882 - RNA, 82 nt, Homo sapiens
cagccgggagccggagcgggcgcggacgccgaggcaccgaggcaccagaggagcagggacacgcaggcacagaacgccaaca

SEQ ID NO: 111883 - RNA, 49 nt, Homo sapiens
gaacggagcggaccagacgagcggagcaggacagaagaaacccccagaa

SEQ ID NO: 111884 - RNA, 77 nt, Homo sapiens
ggaggaacagcaccggcgcgcaaacgaaggaaaaggaaaaccaacagcgccacaaagaccggacacagacagaccgg

SEQ ID NO: 111885 - RNA, 64 nt, Homo sapiens
cgagaggaagacgagccgggaggaacggcccggaaacaggaggacgcgaccccgcacacacacc

SEQ ID NO: 111886 - RNA, 65 nt, Homo sapiens
cacccgccagacgcagcggggcaacagaagaaagggagcccccaagaacagcgagcacaggaagg

SEQ ID NO: 111887 - RNA, 60 nt, Homo sapiens
cacgaccagcaggaacggaggacagcaagacgacccgcaagcaggcgacagacccaagcg

SEQ ID NO: 111888 - RNA, 79 nt, Homo sapiens
aaccaccgcagaagaaggaggcaacagcggggcagagcccgaacacgaagcgggacacaagagaacggaacgggagcgg

SEQ ID NO: 111889 - RNA, 80 nt, Homo sapiens
agagaccacgggacgcgacgcgccccgcccccccgccggcccccccacggaaggggccgagggagcaacaagagcagaaa

SEQ ID NO: 111890 - RNA, 66 nt, Homo sapiens
aagagaaggcagccgagcaccgagccagcccaggaaaaggagagccaagacaagcaaacccaggaa

SEQ ID NO: 111891 - RNA, 65 nt, Homo sapiens
gagaggcggaagaggaggccgagggcaaagcccagacaagccagggaacgaagggcccaccccag

SEQ ID NO: 111892 - RNA, 61 nt, Homo sapiens
ggacggccgggaccaccagagggaaagcggggcggcacaaacagcagacaaaaggaaaaag

SEQ ID NO: 111893 - RNA, 76 nt, Homo sapiens
ggagcacggagccaagcaaggagaaaagcggaaaccgaacgccagcagacgaaggaagcggagaagaaaggggaaa

SEQ ID NO: 111894 - RNA, 68 nt, Homo sapiens
gccagggcccacgcaagagcaggaaggaacagaagggaggggaccgaccaacacacagaggaaaaagc

SEQ ID NO: 111895 - RNA, 85 nt, Homo sapiens
gagcccacacacaggaccgccccggacaggaggagaaggccgccaagacagcggccagagagccaacgggccggcaagccacggg

SEQ ID NO: 111896 - RNA, 80 nt, Homo sapiens
aacccaaggggaaaaagacaccaagccaggcgcaaggggacagagaaagaccagggcagaggaagaacgcagggaaaaga

SEQ ID NO: 111897 - RNA, 85 nt, Homo sapiens
ggggcggcggcgggcgggaaccgagcggcccagggcccccgggcccggcagcgcgcggagcgggccagagccagcgagggaccca

SEQ ID NO: 111898 - RNA, 78 nt, Homo sapiens
gggagggcgcagcggggacgcggacgcacgggcggagaacggaaaagcaccaggaagcagagaggaccgcagaaggga

SEQ ID NO: 111899 - RNA, 69 nt, Homo sapiens
acacagacgggggcgagcggacccgcagccccaaaagcccaaaaggcagagcgaggagagaagaaggag

SEQ ID NO: 111900 - RNA, 75 nt, Homo sapiens
gaacgcccaagccccaccgcgaggccaggcgaaccagccgaaaaaggagaaaccaaaaggaaaagcgaaccagac

SEQ ID NO: 111901 - RNA, 73 nt, Homo sapiens
cgaggcaggcagcacagcaacagccccgccaaggaaaacacaaaggcacgacgagaagaggggcaaggccagg

SEQ ID NO: 111902 - RNA, 85 nt, Homo sapiens
ggaaggccagaacagcacagaaccagaggcagaggcgccccgaggaagaaccccagaagcagcaggagggcggaagggaggaccg

SEQ ID NO: 111903 - RNA, 72 nt, Homo sapiens
gccaagcccagagcggaaccaggaccaagaacgcccagcccgcgggcaccggcagaaaggaggaggaaaaca

SEQ ID NO: 111904 - RNA, 62 nt, Homo sapiens
ccgagcccaggagcgccacgcgcggaaggcagcgcccagcagcgcagaggaagaggccgaag

SEQ ID NO: 111905 - RNA, 55 nt, Homo sapiens
aggccccaggagcaaggcacaacgagccaggacaaacagcaagacaagacagcca

SEQ ID NO: 111906 - RNA, 57 nt, Homo sapiens
cgcgccgccgggcgggcccgcagagggagcgagaacgcggagcacagccacgggacc

SEQ ID NO: 111907 - RNA, 68 nt, Homo sapiens
caaaaacaaagcgcgcagaaagggcgaccaccaaaaaaacgagacacaccaaggcccagacgacgaac

SEQ ID NO: 111908 - RNA, 52 nt, Homo sapiens
ggcgcagcgcgcccagccaccaggggaagggagaacaaggaagcacgagcag

SEQ ID NO: 111909 - RNA, 71 nt, Homo sapiens
aaagccacagagagacacccagcagaaaacgaacagaggagaaagaaggaagaagaaagggaacaggaggg

SEQ ID NO: 111910 - RNA, 51 nt, Homo sapiens
gccaacccaccaacgccaccgcgagacggcaccggggaggaagacggccgc

SEQ ID NO: 111911 - RNA, 80 nt, Homo sapiens
gccccagcgagaggccaaccaggccccgccccccgcccgggcccgcgcccacagacagcgggcgcggaaccaaggacgcc

SEQ ID NO: 111912 - RNA, 80 nt, Homo sapiens
ccgccccgagccgaccgcgccgcacgggagccagcgggggggggacaaggaaaggagagggcagcggccgagaggcaccc

SEQ ID NO: 111913 - RNA, 73 nt, Homo sapiens
gacagacaagcaacggaagccccgggcccacccagggaagagagaagacagcagcgaacaagaaggggcagcc

SEQ ID NO: 111914 - RNA, 74 nt, Homo sapiens
aggaacacaagagagcagccccccaagcgaggaggggaacaggaggcccggacccccagcacaagcgcaggcca

SEQ ID NO: 111915 - RNA, 73 nt, Homo sapiens
acaaggcccgcaagccggcaccaaggggaaggcaggcagggaggggaaccgagagacacaggggcacaagacg

SEQ ID NO: 111916 - RNA, 96 nt, Homo sapiens
acgcaggaaagccccagccacccacaaacagagagaaggaaccacccacgcaggcagcccagggagggaaggagcagcgaacggcgacagggccgg

SEQ ID NO: 111917 - RNA, 78 nt, Homo sapiens
gagggcggggaagaggcggcagccgaggccgcgaacgcacaggaggccacgccaggagaaacgcggaccggcgaggac

SEQ ID NO: 111918 - RNA, 74 nt, Homo sapiens
ccccccggagaaaaaggaagcgagaggcacaaagagagacggaacgcagaaagaccacaagggagagaaggaaa

SEQ ID NO: 111919 - RNA, 82 nt, Homo sapiens
ggagcagagaagcgaaagacaaggcaaacggggaccccaggagagcgccggcagcaaaaaggacgcacaaaacagaaacaag

SEQ ID NO: 111920 - RNA, 81 nt, Homo sapiens
cccagagcagagagaggcgcgcagacggggcacgccaccccccgcacaggggcgggaccaagggggccgacgacgagcccc

SEQ ID NO: 111921 - RNA, 78 nt, Homo sapiens
gcgagcgcggcgaggggagcggcggcggaagaggaacgcaaaacgagaaaccaaaggaagaacaagacgggggcgcca

SEQ ID NO: 111922 - RNA, 91 nt, Homo sapiens
gcgcagcccgcaggccaagcgcagccccaccagaggcgggaggcggcagaagcagccagaggagggcacaggcggcgcggagcgcgccgag

SEQ ID NO: 111923 - RNA, 92 nt, Homo sapiens
cccaagaggccccagggggcgagaaaagcccgcgggagaagcagcccagagagccaggcaggcgggggacaaacaagaaggaaaaccgagac

SEQ ID NO: 111924 - RNA, 65 nt, Homo sapiens
cgaaaccaggcccgccgcagagaggagaaagcagacacggccagccagaccgaaacccaggcagg

SEQ ID NO: 111925 - RNA, 53 nt, Homo sapiens
gcccggagggaacagcagcccagagggaccacagaaaggaggcaaggcaaagg

SEQ ID NO: 111926 - RNA, 79 nt, Homo sapiens
gcggggccggggccgcgcgcccacccaacccgagacaggacccagaccagccaaagagaagaagaaaggaagcaaaaca

SEQ ID NO: 111927 - RNA, 71 nt, Homo sapiens
gggcccggggaaggcccgccgcccgccccagaggaccgcagagagagaggcagcgaaaaaagagcagaggg

SEQ ID NO: 111928 - RNA, 85 nt, Homo sapiens
ggagccggcgcccccagagagaccgacgagggggccgaaaccgagaggaccacagcacggcccacgacaccagaccagcaagcgc

SEQ ID NO: 111929 - RNA, 65 nt, Homo sapiens
gaaaggcagaaaagggcccaaaacgacagacgcgaaaggggacgacgaagaggaacagagaggga

SEQ ID NO: 111930 - RNA, 74 nt, Homo sapiens
gcgacgagagcaagccaaagaccaaggggggggcacccccacaacgagccagaacacggggcacagccgagaag

SEQ ID NO: 111931 - RNA, 58 nt, Homo sapiens
ccaacacagcgagcgcaggaccaaccaggcgcggacgcgaacccccccaccccgcgca

SEQ ID NO: 111932 - RNA, 93 nt, Homo sapiens
ccagcgcgcagcccggaccagccaagccccaacggcccccgcgccgggcgcagcgccagacgcggcaacgcgcagacggggcagagaggcgga

SEQ ID NO: 111933 - RNA, 67 nt, Homo sapiens
gcggggcccgaggccccgaccagaccacgaaaagaccccaagcaaggaagcagcccaagccaacaga

SEQ ID NO: 111934 - RNA, 74 nt, Homo sapiens
caaccgccggcaaccccgggcggccgcaccgccagcggggacgagagccccggcacaaacggaccaccagaaag

SEQ ID NO: 111935 - RNA, 70 nt, Homo sapiens
aggggccccgcgccggcgcggcgccccccgcagcgcacgcgggcgggggcacacagggaccaagaagccc

SEQ ID NO: 111936 - RNA, 73 nt, Homo sapiens
aacagaccgacggaaaccccgacacggaaagaaagaggagacagcacgagcaggacagaagcgggccagcaac

SEQ ID NO: 111937 - RNA, 69 nt, Homo sapiens
accacagcagcagcggaagagccggaagaccaggaaggagccggggcgggagggcagaggccaggcccc

SEQ ID NO: 111938 - RNA, 73 nt, Homo sapiens
ccccaggcacccggcgcaaagaaagcccggacgaggggcaggaccggggacacacgacgcgggacgagcccgc

SEQ ID NO: 111939 - RNA, 79 nt, Homo sapiens
aacgcgggggacgcccgacggcagcgcgggaaacgcaaaccgagaacaaaggcaagcagggaccgagccaagaaaaaga

SEQ ID NO: 111940 - RNA, 76 nt, Homo sapiens
agccccgcccgcccggaaggccagcaggacgcgggcagaccccagaaggaggaaaaaaggcagcaagcccacggag

SEQ ID NO: 111941 - RNA, 93 nt, Homo sapiens
gaaagccgccggagggaaaaaagggagaagacacaaccaaaacaaaaacaccgggggacccgaagcccgcgagaaggaggcgcaaaaaagacc

SEQ ID NO: 111942 - RNA, 71 nt, Homo sapiens
cacggcgacacaaggcagccgagaacaaggccgccagccaaaggaaagaccacaacagaagggcaaagaca

SEQ ID NO: 111943 - RNA, 59 nt, Homo sapiens
ccagccgacccagccccgacacgggacagacgagaacccccgcgaaccagaggaaccca

SEQ ID NO: 111944 - RNA, 56 nt, Homo sapiens
agcaccaaaccaagaggcggccagcaggaggcgagaaggccgcaggggaggaggcc

SEQ ID NO: 111945 - RNA, 82 nt, Homo sapiens
ccgccggccagaaggaggccaccagcccagccccgaaggcccgcggagacgagaccaagcaacccagaggaagagcaaagaa

SEQ ID NO: 111946 - RNA, 56 nt, Homo sapiens
accggaagaggcgaggcagcagaggacgggcaccaaagaacagagaaaaggaggcc

SEQ ID NO: 111947 - RNA, 70 nt, Homo sapiens
gaccagcgccggagggccaagggggaacaagcgcggaagccggacgcgcaacagaaacagacaagccgga

SEQ ID NO: 111948 - RNA, 76 nt, Homo sapiens
cagcccgccgcacggccggcaagcacccgggacccacccacagggacccagccagccagagaccaaaaaaccgaag

SEQ ID NO: 111949 - RNA, 51 nt, Homo sapiens
ggccagcacccgagccgagccccagcgcaggggggaccgcggggccaaaaa

SEQ ID NO: 111950 - RNA, 78 nt, Homo sapiens
aaaaccgaggaaggacagacggccagccagcacaaacgagcccaaagggcacgcaaaaagaacagaggaacccaagga

SEQ ID NO: 111951 - RNA, 86 nt, Homo sapiens
gaagagaacccacgccaaagaggaagcccaccacaaaaacgaaggcggcgggccccaggccagccagagagcgggaggcggaccca

SEQ ID NO: 111952 - RNA, 69 nt, Homo sapiens
gccgggccaggaagagcggagacggaggaggggccggcgggggacgagcagcgcagaaccggccgaaaa

SEQ ID NO: 111953 - RNA, 82 nt, Homo sapiens
caacccgaggacgaaccaccccgcgccagcagcacagcacggacacaaccagagggaagcacgcccgggcacagcggaagag

SEQ ID NO: 111954 - RNA, 67 nt, Homo sapiens
gagaaagaccgggcaccccgggaggcaccgaagaggaacagcggaagcgaagaacggggacggaaac

SEQ ID NO: 111955 - RNA, 81 nt, Homo sapiens
gggagcaggggccaaggagcacggacggacccagcacgaggaggcgcgaggagagcgcggcgacagagcagagagccaagc

SEQ ID NO: 111956 - RNA, 53 nt, Homo sapiens
caaccacgcagggaagcccaggggcagccagcaccagagccggagagacggag

SEQ ID NO: 111957 - RNA, 73 nt, Homo sapiens
cccccacagaaagccagaaacgggcagaccccaccacacaccacccggaccgggaagggacacgcgccgaaac

SEQ ID NO: 111958 - RNA, 53 nt, Homo sapiens
gacgggaaaaggaggaaagcaagcgaagcacggaagaagagagggcgaaggag

SEQ ID NO: 111959 - RNA, 74 nt, Homo sapiens
gaaggcaaggagagaagagaagaacagcacaggacagacccgacagaagcaaggggagacaggcgcccgccgcc

SEQ ID NO: 111960 - RNA, 54 nt, Homo sapiens
aaaacggaaagggaaggaacagaaagcaccagagagggaaacagacaaaaaggc

SEQ ID NO: 111961 - RNA, 95 nt, Homo sapiens
agacaggacccccgcgagccaccagaacgagacagcccccaaaggaaggagggccccggagcagccacaccaccgaggccccacccagcacgagc

SEQ ID NO: 111962 - RNA, 72 nt, Homo sapiens
gcagaaagaaacgccccaaagcagaacggacgcaaaccagaaggagaaaaaggaacgggggccccgaaaaaa

SEQ ID NO: 111963 - RNA, 87 nt, Homo sapiens
cagcgacacgcggccgcggagaccaccgcggcgcggcagcgcgcccgaggaccggcacggagagggcgcccggcacgcggcgacggc

SEQ ID NO: 111964 - RNA, 62 nt, Homo sapiens
gagaagccaagcacgcgacgaggcggagagcaccagcaggagaagagacagcagcagaccag

SEQ ID NO: 111965 - RNA, 75 nt, Homo sapiens
acaggccgcagccgccggggcagcccccaaaacacaagaggacggagaagcgacgaaagaagccgggacaaggac

SEQ ID NO: 111966 - RNA, 71 nt, Homo sapiens
cgccgggccagaaggcaccaaggagagggacacgcgaagccagcgaccgcgcccggccacacccaggccgc

SEQ ID NO: 111967 - RNA, 73 nt, Homo sapiens
ggaccacacaggccccacagacgccaccaaggccgccagacgcaacaaggaggaggaaaggggcaaggcgggg

SEQ ID NO: 111968 - RNA, 81 nt, Homo sapiens
gccggagccccagggccgaggcgaccccgcacacacacccaccagccacggcagcccagcggggacccagccgccccgccc

SEQ ID NO: 111969 - RNA, 80 nt, Homo sapiens
gcagccccacccaggcacgagcaagggccagagaaggaggagaaggagacaggcggcaagcagggcgaagggaggaccag

SEQ ID NO: 111970 - RNA, 38 nt, Homo sapiens
cggcccaggcgcacacggaaggagagaagccccaggcc

SEQ ID NO: 111971 - RNA, 39 nt, Homo sapiens
ggcagcaacccaacccagagacaggggccgagggcagga

SEQ ID NO: 111972 - RNA, 73 nt, Homo sapiens
cccgcgcccgccgcgggagagagaaaagacaagcggagaaaggaccgagggcagcagacgaagaagccaaccc

SEQ ID NO: 111973 - RNA, 75 nt, Homo sapiens
gacaacagccggaacgccccaaaaaagcgggacagcaagggaggcagcagacgggaagaagagagaaaacaaaag

SEQ ID NO: 111974 - RNA, 104 nt, Homo sapiens
aagccggaggagaagcaagaaggcccggacacagcaaaccgggccacagcacgccagcacgcaggcaggaggaagcgggcaaaggagacccagcaaaggagaga

SEQ ID NO: 111975 - RNA, 86 nt, Homo sapiens
cgcgaacgagcgacggcggaacccggggccgggacgcagcccggcggcagcagggaagacgccccccggggccaggcccgcgcaca

SEQ ID NO: 111976 - RNA, 86 nt, Homo sapiens
gagaaggggggaagacaaaaaggaaagaaacgaaggagagaccaggcccagcagcaaagaaaccggaaacacgcgcaacaacccag

SEQ ID NO: 111977 - RNA, 76 nt, Homo sapiens
acaccgagggggagcagcgcggggccgggagcaccggggcccgcacgcggaggccccgagccccggccccaaagac

SEQ ID NO: 111978 - RNA, 85 nt, Homo sapiens
acaccaggcgccaccaagcagcccgccgacgcggggcgcgcgggcggccaccaccacggagggaccccacaccccggacacccgc

SEQ ID NO: 111979 - RNA, 67 nt, Homo sapiens
agggcggggggcggcggcccccagcggaggcggaggagaggcaagccaccgagaaagggaggaccac

SEQ ID NO: 111980 - RNA, 77 nt, Homo sapiens
ggaaaggcccagagaaccacaggcagagacacagagagcaagacagagcccaacacaaggagcaagaccaaaagaaa

SEQ ID NO: 111981 - RNA, 71 nt, Homo sapiens
gacaccagaaggcagaggaggcgcaagacgcgaccaaagccgacggggcaagggcggaagacccggggcgc

SEQ ID NO: 111982 - RNA, 67 nt, Homo sapiens
ccgccgacccgcgcccgccccccagcaccgggcggacgcacgcgcagacggaaaagaagcagaagag

SEQ ID NO: 111983 - RNA, 75 nt, Homo sapiens
ggaccggacccggacccaaaggccagcaacgggcccccgcccggagagccagcaccccaaggggggccccccaga

SEQ ID NO: 111984 - RNA, 72 nt, Homo sapiens
cggaggccgcgccgggcccgcgcgaaccccggcgcgcgccccgccggaccggacaccgaaaacgagaaacga

SEQ ID NO: 111985 - RNA, 79 nt, Homo sapiens
cagccggcgacgaggacgaacggcccgccacgggccccgcagccgcgcccgagcgcccgagcagggacagcgaccacgc

SEQ ID NO: 111986 - RNA, 53 nt, Homo sapiens
agagacacgggagcaaaaccagaacagaggcaagaaacaaaaccccaggccag

SEQ ID NO: 111987 - RNA, 77 nt, Homo sapiens
ggcagaacaaagcaaaagaacgagacgacgccaagaaacccgggccggggcagacgccagaaggagacagcagcagc

SEQ ID NO: 111988 - RNA, 61 nt, Homo sapiens
aaagcggccaaagaaggaagcgcgcaccgaggccggggggcgggggccccccgcgcagcgc

SEQ ID NO: 111989 - RNA, 82 nt, Homo sapiens
ccaggacaccaacgggaccagaagggaccaagaaaggcccagggaccaaagcccggacaaggcccgagcaccaggaccgcag

SEQ ID NO: 111990 - RNA, 56 nt, Homo sapiens
gcaggcggggggcccgccgggagggaagcccagcaaggagcgaaagagacgaaggg

SEQ ID NO: 111991 - RNA, 62 nt, Homo sapiens
gccccggaggggagcaaggccacagaaacagacacccaggccccagaaccgaacccaagaag

SEQ ID NO: 111992 - RNA, 76 nt, Homo sapiens
ggaaaaaacgacgaaaaacggaaaggccgggcgaacggcaggaaagacagcacgaagaacagcccaagcacaaaac

SEQ ID NO: 111993 - RNA, 77 nt, Homo sapiens
acccagaacagagcgacagaggcgacgcaaccgcgggagaggcgcgccaaagaaaagggccagaaaggaggcccaca

SEQ ID NO: 111994 - RNA, 72 nt, Homo sapiens
ggccaggaacaccccgggaagcgccggggaagcagaagcacagggcacgccaacccagcgaggcagaagcac

SEQ ID NO: 111995 - RNA, 75 nt, Homo sapiens
gacccgcgagcgcccaggacccgccaccaaaccgcccgagggaccaggccaaaacagaagaggcaaagcccagcc

SEQ ID NO: 111996 - RNA, 60 nt, Homo sapiens
cagacacgggcggaggaagccacagcgcccagacgagcccaccacggaccacccgcagcc

SEQ ID NO: 111997 - RNA, 83 nt, Homo sapiens
aagggccgggcccaggagcgccggccccagacccaggcgcgacggccggggccggcaacagcacagccaggaccgagcaccaa

SEQ ID NO: 111998 - RNA, 69 nt, Homo sapiens
cgaaccgcagcaacccgagccaagcaggaaggcccagcaaagagaagaaggggaagagcgagcaaagga

SEQ ID NO: 111999 - RNA, 62 nt, Homo sapiens
cgggcagccagcaagcccaaacccaaaggggaggcaaaagaagacgcagcgacaacaagaaa

SEQ ID NO: 112000 - RNA, 74 nt, Homo sapiens
ccagcacaacaaggccaaaccaggccgaagggcgaagagaaaaaaggacaagaagaaaggaagagacggaaggg

SEQ ID NO: 112001 - RNA, 80 nt, Homo sapiens
gagagggaccgggagaggaggccaggacaccggaagccgggaaaggcccagacaagaagagagaaagcaacacaagaagg

SEQ ID NO: 112002 - RNA, 57 nt, Homo sapiens
agaccgcagaacccaaaggcggcacagaacagaggccccagaagaaacgacccccca

SEQ ID NO: 112003 - RNA, 82 nt, Homo sapiens
gggacacagagccaaaccaacaccagcgccaggaagacaggcaccagacgaaggaggcagccagaaagcggggggaggaccc

SEQ ID NO: 112004 - RNA, 80 nt, Homo sapiens
ggaagaagagacgaacggaggagagaaaccaagaagaaaccacagaagcggcagaggacaacagcaaccaagaagacgag

SEQ ID NO: 112005 - RNA, 76 nt, Homo sapiens
cacagcgcagcaaagaacacagaggaaccacgacaaaagagcgccaagaacccggaggagggcaagccggaacgca

SEQ ID NO: 112006 - RNA, 75 nt, Homo sapiens
cagaggcccgaggaccacgaggaggagaacgacggagcaggaccccgagcccagaggccagagaacccccagggg

SEQ ID NO: 112007 - RNA, 72 nt, Homo sapiens
gaccccaggcaaacgaggagcccaccaaaggaaaggcaagaacggaagcacgggcggaggaaagcacaagca

SEQ ID NO: 112008 - RNA, 81 nt, Homo sapiens
aagcgagcgccgcacaaaaagcagagagggagaccccacgcagggcagagcgcggcggcagcagagggccgaggcccggga

SEQ ID NO: 112009 - RNA, 54 nt, Homo sapiens
agaagcaaagaaggggaggcgcccgggcgagacaaacaggagccaccggcccag

SEQ ID NO: 112010 - RNA, 73 nt, Homo sapiens
aggcgggacgcgaacacagagggaagagaaagcaaacgagcagggcaagaagccagaggacaacagagcaacc

SEQ ID NO: 112011 - RNA, 40 nt, Homo sapiens
agaggagagaaggaggccggcggagaacggaaaagcacca

SEQ ID NO: 112012 - RNA, 52 nt, Homo sapiens
acagaaggcgcaggccaacgagccagcgggccggcaccggcacgaggagcgc

SEQ ID NO: 112013 - RNA, 71 nt, Homo sapiens
caacccccacagaagggagacagggagaccaccaaaaagcgcgagaggccgggaaacgcaagcaagacgga

SEQ ID NO: 112014 - RNA, 66 nt, Homo sapiens
agaacggccaggaaaagcgccaacagcagaaaacacggaaggcccagcgagcgcgcaagcacagag

SEQ ID NO: 112015 - RNA, 89 nt, Homo sapiens
cgcagaaagcaggcgaacccgcggcgcaaaacggcagcaccgggaccggaggcccagagcgacggacggagaaccaggcccgcagcagc

SEQ ID NO: 112016 - RNA, 69 nt, Homo sapiens
gggacccagaagaaggaggggcaaagaagaaagaacgaaggagagacggcagcaaaaccaacaaggaag

SEQ ID NO: 112017 - RNA, 76 nt, Homo sapiens
caaaagaaaaaagaagggcaaccaagaacgcaaacacccaacgagagagcaaaagaggcagacacgaaccaaagcc

SEQ ID NO: 112018 - RNA, 75 nt, Homo sapiens
gcgcgccaaagggcgacggcacacagagagaccgaaggccccaccgacccaagagaccgggcagggccaaaccag

SEQ ID NO: 112019 - RNA, 75 nt, Homo sapiens
cccgccccaagaaagccaacgagggcagaggcgagagacgggcaccacaagccgaacagccagccagcaaaagaa

SEQ ID NO: 112020 - RNA, 81 nt, Homo sapiens
agagacagccagcccagaccagaggagccgaggaaggcgccaccacgaccgccgaaccggaaggcaacccgcccggaacca

SEQ ID NO: 112021 - RNA, 56 nt, Homo sapiens
gacacggcgggggggggacaagcccaggagacacgacgcaccgagccggcaggcag

SEQ ID NO: 112022 - RNA, 68 nt, Homo sapiens
acgcagggcgcccccgacggagcccaaaagaaaggaagccgcacgaggagcagaagcaccaagaccgg

SEQ ID NO: 112023 - RNA, 82 nt, Homo sapiens
ggccaggagaacaaggcacacagagacagacaaagcagccacaccgcaccacaaaccggaagagagaaggaaaaggccaacc

SEQ ID NO: 112024 - RNA, 69 nt, Homo sapiens
aggagcgagagcacaggaaaagaaaaccggagaccagggcaacccagacagggcgaaccaaagaaggaa

SEQ ID NO: 112025 - RNA, 88 nt, Homo sapiens
agaggcggcggcgaaaggaacggcgaaggcccacgggagaaaaccgggcgcaaggcagaggggaggagacacgaagcgacgcagagcc

SEQ ID NO: 112026 - RNA, 77 nt, Homo sapiens
aaacaagaggaggaggggccaaggaaaaggaacagagagagcagaaccgaaacggggaaagaccgaagaaagaaaag

SEQ ID NO: 112027 - RNA, 71 nt, Homo sapiens
acgaaaaacaagcagcccaacaacacagggaaagaaaggcaaagcgagcaagagggagaccaaccaggcgg

SEQ ID NO: 112028 - RNA, 59 nt, Homo sapiens
ccccccgcaaggggagagcgaagggggcccacgagaagagcaggcgacgggggagaggg

SEQ ID NO: 112029 - RNA, 78 nt, Homo sapiens
caggagagagagcacaggggaagaaaaaaccacgcacacgaacaaaaccagccaagcagaggagaaaaagacagcacc

SEQ ID NO: 112030 - RNA, 96 nt, Homo sapiens
cagcccggacggacaggcagccaacggaacagaaacaccccagcccacaggcacgagagggggcagagagccaaacgacaacccagaagccagggc

SEQ ID NO: 112031 - RNA, 78 nt, Homo sapiens
cgaggcacaccgccccgcagaggcccacgggcggaggaccaagacagggcaaggcacacggccgcaagagcagcagcg

SEQ ID NO: 112032 - RNA, 50 nt, Homo sapiens
accggcgacagccgagcaagagagggcagcaaacaacccccgaaccgaga

SEQ ID NO: 112033 - RNA, 60 nt, Homo sapiens
ccggacgggggagaaggacagcgcaaggggacggggcaacaccccccccggcccgcccgg

SEQ ID NO: 112034 - RNA, 41 nt, Homo sapiens
accagaccaggacgacaaagagacggaggacaccgcggagc

SEQ ID NO: 112035 - RNA, 79 nt, Homo sapiens
cacaaagggaccacagaagcccagaaggacaaaaccaagccagaagaacaccgaggccgagccggggaccccgggagga

SEQ ID NO: 112036 - RNA, 73 nt, Homo sapiens
caaagaaaacaagagggccagaggaggacagcacgccaagaacaacaacaacagaaaaaacgaggcaggggcg

SEQ ID NO: 112037 - RNA, 76 nt, Homo sapiens
ccccccaggcccggcgcgcaggacagcgggcgaccgcagaccagacacacccgaaacacggacacccccgccagcc

SEQ ID NO: 112038 - RNA, 61 nt, Homo sapiens
agggagaacacaggaaccggccccggcaccgcagaggaagcaagcccaccagagaagcgac

SEQ ID NO: 112039 - RNA, 69 nt, Homo sapiens
gggccacacaacccaccccagcgccggaaaaggggccggaaaaggaaagcacacaaagagaagcacaaa

SEQ ID NO: 112040 - RNA, 80 nt, Homo sapiens
ggcaccccgagcgcaaggacagcgcgaggccgcgcagcccagcgcagccagacgaacgacaccgggccccccccggcgag

SEQ ID NO: 112041 - RNA, 77 nt, Homo sapiens
cagaggaggaccccaggaaaggcagacaagggaggcgaggacggacaaaaggaaacggacgggaggccagccagcag

SEQ ID NO: 112042 - RNA, 78 nt, Homo sapiens
gaagacagggaaaccaagggagcaggggagacccaaagcaaaccagccagcacgggggcccagccagccagcagcgag

SEQ ID NO: 112043 - RNA, 71 nt, Homo sapiens
gagaaaacagaagccagaaagagaaagggcacaaggaaagccaaaaagccagggggacaggagaagcagcg

SEQ ID NO: 112044 - RNA, 78 nt, Homo sapiens
cggcgaagggaagaggcccagccggcccgcgggggagccccgggagccgcacgggacaagagaaaaaaagggcgggcg

SEQ ID NO: 112045 - RNA, 66 nt, Homo sapiens
agggaccgagaaaggaagacggggaaagccaggccagaagaaggaaggccggggaggggacaggaa

SEQ ID NO: 112046 - RNA, 76 nt, Homo sapiens
cagacagaaggagaaaggaggaaaaacagccaggcaacacccagcccaaccccaggggcaccggccgaacaccaca

SEQ ID NO: 112047 - RNA, 73 nt, Homo sapiens
ggacaccgagaccaacggaacgacccccgcaggcagcggcaggaccgaaggacacagcgagaagcggggagcg

SEQ ID NO: 112048 - RNA, 74 nt, Homo sapiens
aaacgggaagagagggaacacgcaggagggaaaaagcgcggagcgacaaccaggcccaaccgagaaaaggggaa

SEQ ID NO: 112049 - RNA, 85 nt, Homo sapiens
ggccagaaaaggacggggcgggcccccggcccaggcgaggcccgcaggcaagaccaaggaagcacgcaagcgccggaagagcgcc

SEQ ID NO: 112050 - RNA, 80 nt, Homo sapiens
cccccgcagcacccagccggccacggggaggggcgaccccggggcccggccagcacgaccgaggaggggcggacagcgga

SEQ ID NO: 112051 - RNA, 81 nt, Homo sapiens
gcgcaagaacggcagagcgaaacaccaaaaccagcggagcgacacagccaaccagaagaggaccacagcaaaaaaaaagac

SEQ ID NO: 112052 - RNA, 81 nt, Homo sapiens
caaaaagacccaccaaggaagcagcggccacgccagaaaaagcggggaaggggggcaaaaaaaagaagcaagcgaagcacc

SEQ ID NO: 112053 - RNA, 84 nt, Homo sapiens
gaaaagagaagagaggaagaagaacaacagcaagaaacagagaagagaggacaggaaggaacgaagggccacccaagcgggccc

SEQ ID NO: 112054 - RNA, 92 nt, Homo sapiens
gcggaagcgccccaccgcgggcgccaaggggagcagaaggaccggacacagaccccaagaagaagcggaagaggagccgcggaaccaagaca

SEQ ID NO: 112055 - RNA, 84 nt, Homo sapiens
acaaccggggagccgcacaggacacacaaacaacacagacccacaagcaagcacagaagaagccgagaagagagcacagaagag

SEQ ID NO: 112056 - RNA, 89 nt, Homo sapiens
acacggcccaggggcccccacaacacaccaggacaccagcgaggacccgcccaagccgagagaaaaggggacgccacggacaccgggac

SEQ ID NO: 112057 - RNA, 82 nt, Homo sapiens
agccacggagagcggaccacgggggccggccgcaagcacagcaagcggggaagaagaaccccaagcgaaagaacggacacac

SEQ ID NO: 112058 - RNA, 75 nt, Homo sapiens
agagccaaaacaaagaaacagcagcagggccaggggccagggcaaaggcggacagcaccgacacaaaggaagaac

SEQ ID NO: 112059 - RNA, 71 nt, Homo sapiens
agagaggcccaccaaaggacgaagaagagccgaggaaggggacaagaaaaaggcccaggaagacaaaggga

SEQ ID NO: 112060 - RNA, 81 nt, Homo sapiens
agaaacaagagaggaacggagcaagaagcgacacaaggagaaaagggaacgccgcagaaagaagaaggggcaagaacagcc

SEQ ID NO: 112061 - RNA, 70 nt, Homo sapiens
aagaaagaagcaccgaaggaacgcaggagcgaagaggaggaagcccccaggagccgggagaaggacgacc

SEQ ID NO: 112062 - RNA, 74 nt, Homo sapiens
gccgcgggccacagggcagagaaagagcagcgcccgaagggcggagaacggaaaagcaccaggaagcagagagg

SEQ ID NO: 112063 - RNA, 89 nt, Homo sapiens
gccggccaaggcgggcgcgggggccggggcgcgcgcaggaccggcacggagagggcgcccggcacgcggcgacggcgccggcggaccca

SEQ ID NO: 112064 - RNA, 77 nt, Homo sapiens
cgaaagacaaacaccccagcgccaggcagcggagaggacgcgaccgcacgccccgaaaggcaggcagacggagggaa

SEQ ID NO: 112065 - RNA, 92 nt, Homo sapiens
ggcggcggcggcccggcgaagaaagaagggggagcggagagcgcaggcggaaaccgcccccaaagccagagcccaagccaaaaaggccccgc

SEQ ID NO: 112066 - RNA, 75 nt, Homo sapiens
cggaggggaacccgccaacggggaccgcgacgagaggaggaacaggcaggcgaggaggcagagggcgagcccacc

SEQ ID NO: 112067 - RNA, 81 nt, Homo sapiens
agagagccagaggaccacaagaccgaggccaaaagaaaggaagaaaacccccaaaaagccaaaaggccaagacaagaagaa

SEQ ID NO: 112068 - RNA, 65 nt, Homo sapiens
cgcaaccgcccagaaacgcgggagagagagcaccgcagaggagaagcagcgccgaaaagggagga

SEQ ID NO: 112069 - RNA, 76 nt, Homo sapiens
gccacgccacgggggagccacccggcggggcggggccaaagggaacgaacgcccgcagcccgggggccgagcagga

SEQ ID NO: 112070 - RNA, 69 nt, Homo sapiens
accaggcccgaacaccgccaccgacagcccacagaaaagacggcaggccagagcaaggggcaagacaca

SEQ ID NO: 112071 - RNA, 76 nt, Homo sapiens
accaagaaccagggaacacaacagagagagaagagagaccaggcgcaaggagaccacagcccaacaacaggaagaa

SEQ ID NO: 112072 - RNA, 82 nt, Homo sapiens
gcgggcagccaccccgcccccgccccccccgccgcaccagccagcaagggcaaacccggaagaagaaaaaaaaacagaaaaa

SEQ ID NO: 112073 - RNA, 76 nt, Homo sapiens
cacccccaggggagaggaagacggggacccacccgacgcccaccgccgaggccccagacggcgcccaccgcgggga

SEQ ID NO: 112074 - RNA, 83 nt, Homo sapiens
agcgggaagccaagaaagaagagggaaacaccaggggaagaggagagagaaaggcgggaagagaagacgaccccgacgcaggc

SEQ ID NO: 112075 - RNA, 82 nt, Homo sapiens
accaccagcccagccccccccaaacaagcgcaggcagggagggaagcggagagacaggaaccaggggggaccaaaacaacca

SEQ ID NO: 112076 - RNA, 74 nt, Homo sapiens
agcagccccacagaccaggcagccaggggagaagcagaccgcaccaggcgggaccccgaaaaagcccaaacaga

SEQ ID NO: 112077 - RNA, 63 nt, Homo sapiens
cagcgccaggaacgagggagcagcccaaagaaaaacccggaccaccaagcaggccaagcagcc

SEQ ID NO: 112078 - RNA, 76 nt, Homo sapiens
gcggaagcaggagaaagaagagcccgcgaaggagaaagaaaagcccaaggacaaggacagggggagaggcaaggaa

SEQ ID NO: 112079 - RNA, 78 nt, Homo sapiens
ggcgggaccacggcagaaggagcggaaggcggagcgaagagccggaccaagcgccagggcgaagcgggaagcggcacc

SEQ ID NO: 112080 - RNA, 78 nt, Homo sapiens
cggcgcagcagagcgagaccgccaacaggacaccgaagccaaccggaggacagcgaaccagagcccacaaaccacggg

SEQ ID NO: 112081 - RNA, 74 nt, Homo sapiens
gaagagcagcagcgaaagaaacccccgagcgggcacgcacgagcgccccggcaaggccaccgcagaagccacag

SEQ ID NO: 112082 - RNA, 77 nt, Homo sapiens
agacaaccaggcaagcggaagaaccgaacacacaaagggcaaccaaagacaagagacaggaggagaaaaccaacaga

SEQ ID NO: 112083 - RNA, 76 nt, Homo sapiens
gcccacaggacgaaacagcgagagcgggggcaagcagcccggccagggacagcgcacagcagggaaccacgaacgc

SEQ ID NO: 112084 - RNA, 80 nt, Homo sapiens
aggaggaggaggcggaggggcgcggaggcgaccgccaggcgcccaaacccggaccagggcaaggaccacgcaggccaaag

SEQ ID NO: 112085 - RNA, 68 nt, Homo sapiens
ccccggggccaccgagaaccccacagcgaaggaaaagggcggagaacggaaaagcaccaggaagcaga

SEQ ID NO: 112086 - RNA, 63 nt, Homo sapiens
aggccgccggacagcgcagagccaagacggagaaacaagggaaccagaagaggccaaccagca

SEQ ID NO: 112087 - RNA, 100 nt, Homo sapiens
ccgccggccgggcagccacgacagcaccggcggcgagcccaaaaagggcaccagccagacgccaggacccaccccgcaaaagaccaggccgggaagccag

SEQ ID NO: 112088 - RNA, 60 nt, Homo sapiens
cccaaaagccgacaaccccagaaacagccgggaccagcggagaacaccaccaaacaaaca

SEQ ID NO: 112089 - RNA, 77 nt, Homo sapiens
ggacggcccagccccagcgcggcccaggggaaagaaccagggaaagggggaccgaaccagcacgcaaaacaaggggc

SEQ ID NO: 112090 - RNA, 67 nt, Homo sapiens
cccgacagagccccaacgcaacgccacaaagcggcgcggcaccccagaacaaacgaacggcgacagg

SEQ ID NO: 112091 - RNA, 55 nt, Homo sapiens
cgcaaagcagcagcagcaaacccacaaagggagagaacagcacacagaggcgcaa

SEQ ID NO: 112092 - RNA, 41 nt, Homo sapiens
cgagcaggacgaaaggaacccggcagagaccaacagaccag

SEQ ID NO: 112093 - RNA, 40 nt, Homo sapiens
cacggacagcagagaggccaaacagagaagcgaaaagaaa

SEQ ID NO: 112094 - RNA, 64 nt, Homo sapiens
aggaacaagaaccagggagaagccgcccgaacaccagccgccgcccgccagcggacccgcggca

SEQ ID NO: 112095 - RNA, 88 nt, Homo sapiens
ccaccgccccgagaagacggcccgccggaaccaaaaagaagccccagagccggggccaggagccccaagcgccccagcagcaaacaca

SEQ ID NO: 112096 - RNA, 79 nt, Homo sapiens
agaagcaccgcacgggacgggagaccgcacacagccaagagcgaggggcccaccggccagcaaaggacgcccgaacggc

SEQ ID NO: 112097 - RNA, 76 nt, Homo sapiens
gaggccgcagcccgcgcccgagagccacgagccaagggggcacgagcggacccaacaagcggcagaggcacaaggg

SEQ ID NO: 112098 - RNA, 85 nt, Homo sapiens
aggcagagcgggacagccaggaggaagggcagcggcagagcccaggaacccaaggaccgcaaagaaaacccagagaacaccaccc

SEQ ID NO: 112099 - RNA, 84 nt, Homo sapiens
caccacgggcaggaaggcagcgcacgacagcaaaaggggacaccagcagcgccgccggaccaccgggcagcagaacggagcaca

SEQ ID NO: 112100 - RNA, 61 nt, Homo sapiens
cgagacccggacagggcaggaaacagaagcggaaagaaacacccaccacaggaagccagac

SEQ ID NO: 112101 - RNA, 87 nt, Homo sapiens
cggcgccggcaaggggacccaggcgcccgcacgcgaggaagacaagagcaagaggagacaaaaaacacagccagcacaggagcgaaa

SEQ ID NO: 112102 - RNA, 67 nt, Homo sapiens
acagcgacaagagacgggcagacgaagggcgcgaccagccacagaagccagccaacacagcaggcgg

SEQ ID NO: 112103 - RNA, 74 nt, Homo sapiens
cagcccagcacacaacccccgccaccaggagcgaaaaacacagagaagaggaggaccagccaaacaaaaaaagg

SEQ ID NO: 112104 - RNA, 72 nt, Homo sapiens
aaccccgagcgggcggccaagacaagagcagcgagcgccaacagcaggcagccaggcccaacagaagaacag

SEQ ID NO: 112105 - RNA, 101 nt, Homo sapiens
ggacaaacagaacccccgccagaaggcagacgagagccaagcaacgggaacgaccaacacggagaagaccacaggagacggaagaagcaaaagaagaacca

SEQ ID NO: 112106 - RNA, 76 nt, Homo sapiens
gcacgaccaacaagaaccgaacgaggacacgaccccgccccacgcccaggagcagggagaccggcgacggccggcg

SEQ ID NO: 112107 - RNA, 76 nt, Homo sapiens
gaagcaaacgggccaaaggacagagaagacagagcccaaaggaacaaagacagcaagacacacaaagagacaaagg

SEQ ID NO: 112108 - RNA, 55 nt, Homo sapiens
aaagaaaaacaccaaaacgacaagaccaaggcgaccggcccgaggaccgccgcac

SEQ ID NO: 112109 - RNA, 73 nt, Homo sapiens
agcccaccggacacgagacggcggaacaacccgacacgagaaaaccaaaggagaaaggaagacagcaggaaga

SEQ ID NO: 112110 - RNA, 79 nt, Homo sapiens
cgcgcgcgacgcgcgcgcccggcccggggaagaaggaggccgaccaggccgacaaagcagacgcccgcaaacgaccggg

SEQ ID NO: 112111 - RNA, 53 nt, Homo sapiens
cgaacagaagcacaaccagagccggccccggccaaagagcacagggacagaaa

SEQ ID NO: 112112 - RNA, 73 nt, Homo sapiens
aaccgacgggagccagagcgggacaaagcgagcagcgggccgccaccgggaaggcccgaaaggaaggacacgc

SEQ ID NO: 112113 - RNA, 71 nt, Homo sapiens
ggagcagcacaacaacagagaagaagcaaagcacgagaaccaccccacgggaaggaggcacaacacaggca

SEQ ID NO: 112114 - RNA, 70 nt, Homo sapiens
gaccagaagacaacaaacccccacaaagcaggaagccgaaaaggaaacgaaggaggcccaaccacaaaag

SEQ ID NO: 112115 - RNA, 70 nt, Homo sapiens
cacgccgcggcgcaggacacacgaagccgagaggccggacgagagagagcacaaggagagaacagggggg

SEQ ID NO: 112116 - RNA, 72 nt, Homo sapiens
acaagccgacaaggggcggaggaagggaggagacccgaccccagaaggacaagccaaaaccgagaaagggaa

SEQ ID NO: 112117 - RNA, 45 nt, Homo sapiens
ggggaaagaacgaagggcgccggacaggggggccagagcagagcg

SEQ ID NO: 112118 - RNA, 68 nt, Homo sapiens
gcagaagccgaacacgacagaaagaaaggccaaagcagcagggaaggcaccggagaacccgacgccca

SEQ ID NO: 112119 - RNA, 85 nt, Homo sapiens
aaggggggcgcagcccgaggagagcacccggagcccaagacaggggcagaaggaacgagggagcacggagggaaaagaagccgcc

SEQ ID NO: 112120 - RNA, 62 nt, Homo sapiens
cccccagcggccccggcccccggcgccccagcgaggaagggaccgacacaagaagcagccag

SEQ ID NO: 112121 - RNA, 60 nt, Homo sapiens
ccaccggcggaccgcacaagcaggggaagaggaccacacgcccagaggaccgagaagaac

SEQ ID NO: 112122 - RNA, 76 nt, Homo sapiens
aaagggaccccagcgaaccccccagcagcagcaaaaacaaccagcacgggagccccccgggaagcaaggcaacaaa

SEQ ID NO: 112123 - RNA, 38 nt, Homo sapiens
caggaggggaaacacaagagcgcacgagagccacgcga

SEQ ID NO: 112124 - RNA, 77 nt, Homo sapiens
caaccgccaggagagcacaaagaagccaggggagagcgcaccagaaaagaggacagccaacccccaacaagagaaga

SEQ ID NO: 112125 - RNA, 84 nt, Homo sapiens
ccaagcagaaggaggcgcacaacccaccacaaagagagagaaagcccgggggagcgggccggagagaagagaggggcgcgagga

SEQ ID NO: 112126 - RNA, 67 nt, Homo sapiens
cagaaggccggaagagaaggggaaaagacgcacgcaagagggggcggagacacgcacacaaagaagc

SEQ ID NO: 112127 - RNA, 56 nt, Homo sapiens
ggacaggcaggagcgaagcagcagaaccccaggcgggacgcgcggcaaagccgccg

SEQ ID NO: 112128 - RNA, 104 nt, Homo sapiens
ggcaggaacagacacggggaagcgcaaaaacaagacggggcgccccacagaggggcgacggggagccgccaccaaaagcagacggaaaacccacggggaagacc

SEQ ID NO: 112129 - RNA, 80 nt, Homo sapiens
ggagggaacgccgcggacccggagccgcacaaaccagggccgccagaagccaggagaaaaaaggagcccgaaagccccaa

SEQ ID NO: 112130 - RNA, 69 nt, Homo sapiens
aagaaaggggaaccccggagaaaaggccaagaaggcagggcagagacaggcaacagacggcaacgaaag

SEQ ID NO: 112131 - RNA, 71 nt, Homo sapiens
aagaggaaacggccaaccgaacccagggaggaagaaccacgacaaagggacgaggaaacaccaacaccaaa

SEQ ID NO: 112132 - RNA, 41 nt, Homo sapiens
gagccacacacaccacaggccgggcacacagggaccaagaa

SEQ ID NO: 112133 - RNA, 80 nt, Homo sapiens
agaaggaccaagaaccaggcccagcgagagccagccggaggacccagcagcaggccacccaggccgaaggccagcacaga

SEQ ID NO: 112134 - RNA, 87 nt, Homo sapiens
gaaagacaggccgacagcggggaaaggcgcagaggaccggaaggggaagggaacaagaagcagggaaggaacgaaagcggagagcga

SEQ ID NO: 112135 - RNA, 78 nt, Homo sapiens
cgccccgccggagcagcacacaagcaaagcagcccgaggaggcacgcaaaacaacagggggcaaacaagaccagggga

SEQ ID NO: 112136 - RNA, 74 nt, Homo sapiens
aggggaggaggggcgcccgagaaggggacggcgggcgagggaggggaccgccgcgccgagccgcgccgccagga

SEQ ID NO: 112137 - RNA, 69 nt, Homo sapiens
cgagcaacgaagcagccgagacgaggagaaaacccagaaaaaagggcaggagaccggggcgaagagaca

SEQ ID NO: 112138 - RNA, 35 nt, Homo sapiens
gggacccggacaccaaacgaggcgaggaaccaaag

SEQ ID NO: 112139 - RNA, 76 nt, Homo sapiens
agcggagcggagcccggagggggaaaaccggacagacaagccccgagggacacggaaagcagcagacgaaccccgg

SEQ ID NO: 112140 - RNA, 66 nt, Homo sapiens
aggaaacggaaagagacagacaccaacagacaacagcggcccagaggccacggccagcaagaaaag

SEQ ID NO: 112141 - RNA, 76 nt, Homo sapiens
ggccagcaggaccaggagacaagagcaaccagaaagagagggacaagacaccacaaaggggaaaaagagaagcaga

SEQ ID NO: 112142 - RNA, 70 nt, Homo sapiens
cccgcaaccgccgcgcgcggcccggcgcgcgcggccggagcccagccgcagcacccgaccagcggaccgg

SEQ ID NO: 112143 - RNA, 76 nt, Homo sapiens
gaaaaacaagaaaaagaggaaaaagaaacccgaagagcagaggcagaaacgcggaaccgaggagaccggacagggc

SEQ ID NO: 112144 - RNA, 106 nt, Homo sapiens
acagagaccagcacacaaggaccaacgaacggccaacagaccaggggccagacaccgaggcgggagagccagggaacgagcccacgggagccggccccgaaccccg

SEQ ID NO: 112145 - RNA, 70 nt, Homo sapiens
acccgcgcaccggacaaagaccacagaacgacagaagcaacccaggcacccccaacaggcacccaccccc

SEQ ID NO: 112146 - RNA, 42 nt, Homo sapiens
agcggcaggaggcacagcggcggaggcaaggcacgaccggcc

SEQ ID NO: 112147 - RNA, 77 nt, Homo sapiens
cagaagacggggcccgggaccacaggccccggcccagaggggggccccagcccggccgaacgggcgcacgacacaaa

SEQ ID NO: 112148 - RNA, 86 nt, Homo sapiens
ccgcagagcaaagggggcccccagggaggccgcacggcccacgcgagccaagcacaaggcagggacaggggggcaccagaagaaag

SEQ ID NO: 112149 - RNA, 80 nt, Homo sapiens
aagaaagacggccacagcggagccggaagccgagacaaggagcgcacgcagggccgcggagggcgcacgggcccagagac

SEQ ID NO: 112150 - RNA, 74 nt, Homo sapiens
ggaaaagagcgcccgcgagcagaggcgaaaccccccccggcggcggagcagaagacagcggcccacgccaggcc

SEQ ID NO: 112151 - RNA, 66 nt, Homo sapiens
caacacaagagaaacaccaaacaagagggcaacagcaccgacccggaagcgagacaagccgcggag

SEQ ID NO: 112152 - RNA, 66 nt, Homo sapiens
cgggcacccccaggggaccaacccagggagggcgggacgagcagggggacccacacgagccacaga

SEQ ID NO: 112153 - RNA, 85 nt, Homo sapiens
gggacacccgggagcaggaaaggcaccaccaggaccagcgacaccagcccacagcaaggagccacagaccccccacaggaccgag

SEQ ID NO: 112154 - RNA, 61 nt, Homo sapiens
ccggagacgacccgacgaagcccacgccgggacccagcgcagcggcagaagcacagaccgc

SEQ ID NO: 112155 - RNA, 79 nt, Homo sapiens
gggacacccacggagcgcagaggccacgcgaccagacccaggacgagacgggcaagaaccgggcaccccagcgccggaa

SEQ ID NO: 112156 - RNA, 132 nt, Homo sapiens
acgccccgaccggacgcgggcagcgcaccaccagcgcaggcgagcgcgcgcagggcccgccgacggaggagcggggcggagggcgccccgagccccagacagagccgcgacagcgcgcgagcgggcgccgcc

SEQ ID NO: 112157 - RNA, 69 nt, Homo sapiens
aggccggaggaaggaaagcccccaggcacagagagcaaccagaacgaaacagacggaggcagcagaggc

SEQ ID NO: 112158 - RNA, 85 nt, Homo sapiens
accgagccacaacagccaaggaaaaaaagcagagaggagcggggagcaagcagagcaagggagagaccggaaagagaagaggagc

SEQ ID NO: 112159 - RNA, 70 nt, Homo sapiens
gaaggcaaaaccaagaggaaaagaggcacggccacgaagaggggcacacgcccaagcacaaaaaacagga

SEQ ID NO: 112160 - RNA, 78 nt, Homo sapiens
ccgggacggaccgagaccggaccgagagcggaccgagagcgcgaaacgcacgagaagacccgcccagaaaccaacaga

SEQ ID NO: 112161 - RNA, 75 nt, Homo sapiens
gcagcgggggaacaaaagacaaagagcccaccagaccacagcgagaaacccggagccacccccgaggcaccccca

SEQ ID NO: 112162 - RNA, 70 nt, Homo sapiens
agcgcgaaacgcacgagaaggccgcaagcgcaagagaaaaagaacggacgcacaaggcaaagcaaaacag

SEQ ID NO: 112163 - RNA, 61 nt, Homo sapiens
ccagagccaggggccgggagggcgccagaaaacggggacggacccaggccaggaaagaaag

SEQ ID NO: 112164 - RNA, 66 nt, Homo sapiens
ggcccgagagaggccagcgagaagccggccagccaccagggagaagaggagaccaccccacaggac

SEQ ID NO: 112165 - RNA, 77 nt, Homo sapiens
aagagcgccgggacagggggaggaaagcaccgaggcacaacagggcggagaacggaaaagcaccaggaagcagagag

SEQ ID NO: 112166 - RNA, 66 nt, Homo sapiens
gcggcgcggggaccgcggcccgggcagcgggcccgcagaggagcccaccagccacggggagggggc

SEQ ID NO: 112167 - RNA, 76 nt, Homo sapiens
cggggaggagcggggcgcggcaggcgaggcgacgaggagagagggccaccaaaaggagaccccccgagcgccacaa

SEQ ID NO: 112168 - RNA, 79 nt, Homo sapiens
aggggccaaccaaaggaaagcagaagccaaggggcgagcgaccagggaagacaagcggcgcgcccagggcagggagcgg

SEQ ID NO: 112169 - RNA, 86 nt, Homo sapiens
ccaccaagaagccagcaagcggccaggcccaggcccaggcccaaggccaaggagagagcccaggccacaggacagcgccacgccaa

SEQ ID NO: 112170 - RNA, 82 nt, Homo sapiens
gccggggccggccagaagcgggcggcgcgggggagagaagccgggcggaagcccacgcacaggcgccggggcggcagaacgg

SEQ ID NO: 112171 - RNA, 75 nt, Homo sapiens
cccaggagcgccacgcgcggaaggcagcgcccagcagcgcagaagaacggaccgaagccaaagaacaagagcgca

SEQ ID NO: 112172 - RNA, 61 nt, Homo sapiens
gggagacacgccaaagccccaaggcgacccgggacccacagccaccacgcccccagaggac

SEQ ID NO: 112173 - RNA, 78 nt, Homo sapiens
gagggggaaaaagcagggaggagaggcaaaaagaagagacgaagaggagcagaaccagaagggacacacaggacggca

SEQ ID NO: 112174 - RNA, 68 nt, Homo sapiens
gcaggccaggaccgacagcccccacaagggggcggaccggccaaacagccaaagccacccgggaggcg

SEQ ID NO: 112175 - RNA, 66 nt, Homo sapiens
ggcagccgccagggcgaagacaccaaaccaccagaacagcggagaggagaaaaagaaacccaaagg

SEQ ID NO: 112176 - RNA, 79 nt, Homo sapiens
accccggggcagggcaagcacgggaagaagcagcggacccgccaccacacggcaccggcgcggccaacgcagcacccgg

SEQ ID NO: 112177 - RNA, 66 nt, Homo sapiens
gaacgaacccccccccccgggagcccacaggacaggcagaaggcgccaggaaggaaacacagggga

SEQ ID NO: 112178 - RNA, 84 nt, Homo sapiens
ccggaggcgcgaggggcccgggggcagccagacagacacagcacagcagccacgaagagcaaagcaagccgaaaaaccgaaaca

SEQ ID NO: 112179 - RNA, 78 nt, Homo sapiens
gaaaaaagaagcaaaacaagaaagaggagaaacgacgggccaccacagaagcaagaggcgaaccaaaccaggaagcaa

SEQ ID NO: 112180 - RNA, 50 nt, Homo sapiens
gaagaacggaagaccgaaagagggaaagagggggaaccaggaaagaaaca

SEQ ID NO: 112181 - RNA, 42 nt, Homo sapiens
gccaggggcgaggaccacaaggaccacaaagagcagagccag

SEQ ID NO: 112182 - RNA, 72 nt, Homo sapiens
cggccgcccaacaccgaacaccgcacacagagaaaaaaagggaacaaaacacagcaagcagacaaaaggggg

SEQ ID NO: 112183 - RNA, 80 nt, Homo sapiens
ccaggacggagagggagaaggccaaacgaccaagaaagcgggacgcggaaaacgggacccgcaggggcccccccggaaaa

SEQ ID NO: 112184 - RNA, 70 nt, Homo sapiens
aggaagagagagagagaaagagagagaacaacgacggaacaaaacaagcggaaagcaccaggaaggcaag

SEQ ID NO: 112185 - RNA, 82 nt, Homo sapiens
gagacgccgggcagccgaacggagggcgacggagggaggcgccacgggacacggaaccaggaggagcggagcgccgcgcgcc

SEQ ID NO: 112186 - RNA, 81 nt, Homo sapiens
gggccacggggagacagcacacaacacaaagaaggagcggccaagaacaccacgcaggacccgagagcgggaggaaaagcc

SEQ ID NO: 112187 - RNA, 54 nt, Homo sapiens
gacggggcaccgccacagcgcgcgcgccccccagagccacgcgcccaggcgcag

SEQ ID NO: 112188 - RNA, 76 nt, Homo sapiens
gaaagcacgggccagcacagagcgcacaacccagaggaaccaggaagaggacaaagacaccaaagcggaagaaaaa

SEQ ID NO: 112189 - RNA, 52 nt, Homo sapiens
aaacagaacgcaaaggggccaaaaacagagccaagagaaaacccccagaaga

SEQ ID NO: 112190 - RNA, 64 nt, Homo sapiens
cagacagagacacacggcacgcagcgaagccgcgccccgcacaggaaaagcaacggcgcaagag

SEQ ID NO: 112191 - RNA, 80 nt, Homo sapiens
cagacgcagggagacgcacagccaggacaccggaaccgggaaagggagccaaaaaccgaacacccggaaggggacaaggg

SEQ ID NO: 112192 - RNA, 55 nt, Homo sapiens
aaaaacggagagccacaaaaaaggaagcgaaagagaaccggggcaagagacggca

SEQ ID NO: 112193 - RNA, 36 nt, Homo sapiens
gccaacacggcacccacaggaggagccaggaggaga

SEQ ID NO: 112194 - RNA, 66 nt, Homo sapiens
ccaaagcagcggcgccggccgccccaccggcggaacccagcaagaaaaaaacagaggcgggaaaca

SEQ ID NO: 112195 - RNA, 73 nt, Homo sapiens
aaagcgccacaccccccaccaagcccaaaaccagaagcggcaggaccacaccccaagccaagcgggcaccaac

SEQ ID NO: 112196 - RNA, 97 nt, Homo sapiens
aagaggaagaggaaagcaaaggagcagggaggcccccagaaaaccaaagaccagacagagaaagccaccaagaagaccaaagaaaaggagacaagga

SEQ ID NO: 112197 - RNA, 83 nt, Homo sapiens
accaccagaaggagagcacaagcccgaagacgggagaggaagaggcagaaggagaagacagccgaagaagagcagcgaggagc

SEQ ID NO: 112198 - RNA, 71 nt, Homo sapiens
gagaccgaagaaggcaaacggcaaagaaacgaccagaagagagaggcacaggagggcagaccaaaagcaca

SEQ ID NO: 112199 - RNA, 70 nt, Homo sapiens
gacccagcgggggccggcgagccagaccaccaacggacccacgacaacaaaaggcggaggcagggcgcaa

SEQ ID NO: 112200 - RNA, 72 nt, Homo sapiens
gacgcgaaggccaaggacgccggcgccaccagcaaaaccagagaaacaggcagagaaagacacccggcaccg

SEQ ID NO: 112201 - RNA, 84 nt, Homo sapiens
accagagccaccacccaccaccccagccaggccccagaggaagaagccaagccgcgccaagacggcaccaaaaagcaaaagcag

SEQ ID NO: 112202 - RNA, 75 nt, Homo sapiens
gaagaggccacaagcaagaacaaaacgggaacagcggagaagaaggaacaaagccaaggaccgaagagaaggggc

SEQ ID NO: 112203 - RNA, 70 nt, Homo sapiens
cacgcagcagaaagccagcagaaaaaaaggccagcgaaaggcaaagaggccaagagcgaggaacaaacag

SEQ ID NO: 112204 - RNA, 75 nt, Homo sapiens
ccaagccaaacacaagcagaaggagcgaagaagagcgaaaccacagaaacaaccgaaccagagacagcgaaagcc

SEQ ID NO: 112205 - RNA, 70 nt, Homo sapiens
cgggcccccagcggcaaaggaccagacagcaggaaaagacaagaaaaggcgccaacaacccccagagccg

SEQ ID NO: 112206 - RNA, 70 nt, Homo sapiens
cagccagcgggccagcgagcccggaccgagacacggaggagccaagaggacaccagaaaccagaagggac

SEQ ID NO: 112207 - RNA, 69 nt, Homo sapiens
agcgaccccgcggggcgcgaacgaaaacaaacggaagagagggcagcaagaaagaacaagaaagcgaac

SEQ ID NO: 112208 - RNA, 75 nt, Homo sapiens
acacgggaacaccccgaacagaaggagcagggccgccccgaggagagcgacgcccgggcgcgccccggcagagcg

SEQ ID NO: 112209 - RNA, 58 nt, Homo sapiens
agcaagaggcgcggcaagacacacgacggaagcccggggcggcgacggagcacgaccc

SEQ ID NO: 112210 - RNA, 84 nt, Homo sapiens
gcgagcggcacaccacgggacggaagagaaagagacaacaagggaccgggccgggggccgagccccggacccggcaacccccag

SEQ ID NO: 112211 - RNA, 79 nt, Homo sapiens
caacaccccggccaccgacccacaaggcggagcccggcacgggcaaacagagcaggcagggaaccgccaaggcagagga

SEQ ID NO: 112212 - RNA, 52 nt, Homo sapiens
ggacagaggaagaaaaagaagacgccagcaccagccgcgcgcccggcccggc

SEQ ID NO: 112213 - RNA, 77 nt, Homo sapiens
cggcgccgcccggccgcccgcgcggaccacccccacgaacgaggggagacgagaagcggaaagaaacacccaccaca

SEQ ID NO: 112214 - RNA, 79 nt, Homo sapiens
cgccggacacgcggccgggcagggcaccgcgcagcccccacggcacacaccagagggggacccccaaaagacaagggca

SEQ ID NO: 112215 - RNA, 84 nt, Homo sapiens
caccagacgaggaagacccggaaacaggggccacggagccacggccacggccgcaagagccaaggggcgagcgaccagggaaga

SEQ ID NO: 112216 - RNA, 86 nt, Homo sapiens
cgaggcgaagaaggccaaggcgcagaagccaaagccacggcaacgcgacacacggacaccaccccaacgaaggggaaggggaagaa

SEQ ID NO: 112217 - RNA, 75 nt, Homo sapiens
gaagaaccaaagaggaagacaaaagcaaaacgcagcacaggaaagcccggcaacgcccggaacccagagcaacgg

SEQ ID NO: 112218 - RNA, 59 nt, Homo sapiens
gcagaagaagcaaggaaccagcaccacagagggccgccagcacaagaccggaggaagaa

SEQ ID NO: 112219 - RNA, 32 nt, Homo sapiens
cgccacagacagaaaagacagggccacgcacc

SEQ ID NO: 112220 - RNA, 57 nt, Homo sapiens
gacgccggcggagacgcgggcgagagaggagcccggaagaaagacaggggacagagc

SEQ ID NO: 112221 - RNA, 75 nt, Homo sapiens
gcacaaagccgaggccacacaacgggcacccccgacgccccacccgcccaggcccaccgaaaagcgagaaaggcc

SEQ ID NO: 112222 - RNA, 89 nt, Homo sapiens
gaaaaacaacaccaacagacgccggaaggggcgaccggaccgggagaagaaggcgccgaggcaaggggacagcacgggagcggccgcgc

SEQ ID NO: 112223 - RNA, 67 nt, Homo sapiens
aaacccgcgacaccgcgagggacaaagaccgaaagggaaaagagacgcaaaccacgaggacagagaa

SEQ ID NO: 112224 - RNA, 79 nt, Homo sapiens
ggcagacggacaagagcgcggaacaggacgccccgagacccaaggccagccagccccaggcaccagcggacaggacagg

SEQ ID NO: 112225 - RNA, 71 nt, Homo sapiens
gggacagcggagcgcggaggcgcggcccccaggagaagcacaaccacggacggcccagaaacccaaaacac

SEQ ID NO: 112226 - RNA, 84 nt, Homo sapiens
ccccggccgcggccccgaggggccaacgggccccggcaacgagggcaagggcaacaagggcggccggccagccgggcgagggag

SEQ ID NO: 112227 - RNA, 73 nt, Homo sapiens
gcagacgcagcgccagccgcaccccagcgccaaggacaaaccggcgaccacacacggggacgacggggaagcc

SEQ ID NO: 112228 - RNA, 76 nt, Homo sapiens
aagacccaggaagcagaagaagcgaggagaagaagaggggaggcaagcaggggggcaaaggaaagaaggcagaaag

SEQ ID NO: 112229 - RNA, 73 nt, Homo sapiens
gccacgcccgcgaagcacgcaaagacggacaacacaagaggaagggagcgggcccccacccccgccggcagaa

SEQ ID NO: 112230 - RNA, 86 nt, Homo sapiens
gacccgaagaccagcaggaaagcaggagcccacaggcgaccaggccgcgggaagcgcggacgccccaccaacggcgcggacccgac

SEQ ID NO: 112231 - RNA, 73 nt, Homo sapiens
gggggcagcagccacgccaggggacaagggggagccgaaaggaggggcagcccgggacagcccgggaaaagga

SEQ ID NO: 112232 - RNA, 66 nt, Homo sapiens
agaggccaggcgggagcaccccagcagcagcccggaacaagcagcacaacgcaaagaagggaagaa

SEQ ID NO: 112233 - RNA, 110 nt, Homo sapiens
cggaccagccgcaaagagccagaggggagacacgccaaagccccaaggaaagaccacagcaagaccacgcccccagccgggggaccaggccgaacgacccggacacaaag

SEQ ID NO: 112234 - RNA, 79 nt, Homo sapiens
gggagccgcggcgcagagcaccgggcagaccaggcaaagcgacccgcgaacgagcaagggcagcgagaagaaaaaccca

SEQ ID NO: 112235 - RNA, 56 nt, Homo sapiens
cggccaagaagggccaccccacagacgcccgaagaaagcgaggagagggagcacca

SEQ ID NO: 112236 - RNA, 76 nt, Homo sapiens
aggcaccggggggcaacacccgagaacggcgggaagagaagacacgagcacaaacgaggacagcagcggacggccg

SEQ ID NO: 112237 - RNA, 80 nt, Homo sapiens
cggaaaagccagagagagacggagacagccgccagaagaaacacgcaaggcagagaccgaagaagaaggacaaggacaaa

SEQ ID NO: 112238 - RNA, 76 nt, Homo sapiens
agcgaaggggacaaggggggaagacaaaaggaaacaaaacagaagacaacaagcaagcggaccgaccagaccgcag

SEQ ID NO: 112239 - RNA, 71 nt, Homo sapiens
ccgaccagcggagggggagccaaccagaaaagggcggggcggaacaagaggacggagcccccggcccaggc

SEQ ID NO: 112240 - RNA, 78 nt, Homo sapiens
gacacgcacggagggcccaacccacagcgccccagggggaacgccaggaaaaaaggcgaaccaagagccagaaaacag

SEQ ID NO: 112241 - RNA, 67 nt, Homo sapiens
acaacagagacaggcgccaacgaacaaggacagagggcacagaacggaacaagagggacagaaggag

SEQ ID NO: 112242 - RNA, 59 nt, Homo sapiens
aagagaccaaccccagccccgaaagcgacaaccggaaagagggagaggggaagccaaac

SEQ ID NO: 112243 - RNA, 86 nt, Homo sapiens
ggacccaagccggaccaagaggccgaggccgagccccccaccaggaaccacgccccgagcgcccggagacccaggagaccccaggc

SEQ ID NO: 112244 - RNA, 73 nt, Homo sapiens
accccccgaaccgaagcagaacacacgcaggacgaaagagacaaaagccacacgagaacaggaacagaaaacg

SEQ ID NO: 112245 - RNA, 79 nt, Homo sapiens
ccagaacgggcaagcggggccgcaagcaggcaagacccaccccacggacccaccgcgcagggcggagaacggaaaagca

SEQ ID NO: 112246 - RNA, 79 nt, Homo sapiens
acacgcgaccgccagggaggcaccggaggcccgggcccgggccaccaccgccagcccggaccaagagacgaggaaaacc

SEQ ID NO: 112247 - RNA, 66 nt, Homo sapiens
cagagaccaacccaagcgaagaagagcggaaaacaagggagacagacgcagccgaggaaggggcac

SEQ ID NO: 112248 - RNA, 70 nt, Homo sapiens
caagggccaagaacacgcgcagaagaaccgacaagaaaaggccagagacccacccgagaggaaacaaacg

SEQ ID NO: 112249 - RNA, 85 nt, Homo sapiens
ccccccccaccaccccgggccgcgacgcgcagggcggggccggccgaaccagggccgcggcccccgggaaaccgaagccgaccag

SEQ ID NO: 112250 - RNA, 72 nt, Homo sapiens
agaagcacacacgaagccagaaaaacggcgaaggcgaagccgacgagcccgaacagacgcaccagcgggagg

SEQ ID NO: 112251 - RNA, 87 nt, Homo sapiens
cccgcccagccgcaccagccgccacgcgcacccccaagggcaccccaccgcaggggagccccccgggacaaggaccgaaggcgacgg

SEQ ID NO: 112252 - RNA, 77 nt, Homo sapiens
acgggccacgccagggagcgggggcgggaccaagccagggcagcggcggacaaagggcacaaccgcccaggggagag

SEQ ID NO: 112253 - RNA, 86 nt, Homo sapiens
agacggcgcacgaccgcgcggcagcaaagaggccaagggcagaggcgcgagagaagaagagcacaggcgccaggaacggaggggca

SEQ ID NO: 112254 - RNA, 73 nt, Homo sapiens
cccgcgcacgcaccggcccccaccacaccacccacccggcgcggccaggaacaacagaagagaaaaagaaaag

SEQ ID NO: 112255 - RNA, 77 nt, Homo sapiens
gcccagcgacccagccacaggaacagagacagcgccgcgggcaaggaaacggcaaaacagacaggaagggaaggggc

SEQ ID NO: 112256 - RNA, 70 nt, Homo sapiens
ccaccagaaccagccacgcggagcaacacagcaagagaacaccagccaaaccaaggaagggcaaaaagac

SEQ ID NO: 112257 - RNA, 74 nt, Homo sapiens
aaacaggacgaaaaaagggcaagaagccagaagggcggagaacggaaaagcaccaggaagcagagaggaccgca

SEQ ID NO: 112258 - RNA, 76 nt, Homo sapiens
cagcccgggcgggggcagagccagaacacgcccaggacgggacagaagccacgagaccgccaaacacccgcacgcc

SEQ ID NO: 112259 - RNA, 56 nt, Homo sapiens
gaaacgaccgaaggcaaacccacacggaaggacaggagaaacaggggccaaaaaac

SEQ ID NO: 112260 - RNA, 62 nt, Homo sapiens
ggggcaagacaagccagaacgagaagcgcaccacaggcaagagcacccacagcgcgagccgc

SEQ ID NO: 112261 - RNA, 77 nt, Homo sapiens
ggcgggcagaagaaaacagggagcaccagcccggcagaaacgaaaaacagcagaaacggaaggaagccaagaacgca

SEQ ID NO: 112262 - RNA, 75 nt, Homo sapiens
cggcaacaaacaccggcccaggaggagggcccgggaaaacaccccgaggggcccacaggaagagagaaaacacag

SEQ ID NO: 112263 - RNA, 85 nt, Homo sapiens
gaacgcgcaacagggccgcacgcaagacaggacccagaccagccaaagagaagaagaaaggaagcaaaacaaagaaaaaaaaaaa

SEQ ID NO: 112264 - RNA, 63 nt, Homo sapiens
acagcagaaaccggaaccacacacaccacaggaagccaacaagaagggaagaccggcgaagcg

SEQ ID NO: 112265 - RNA, 87 nt, Homo sapiens
gagaccccacggagcgggcgacgagcgacccgggagacacgacgaccgggaaaaccggaggccagcccacccagagaggccgaaaac

SEQ ID NO: 112266 - RNA, 76 nt, Homo sapiens
ggaccggcgcaaccccggcccccacggccgagaagaagacaacagccccaacagagcagacagaacggagcagcag

SEQ ID NO: 112267 - RNA, 76 nt, Homo sapiens
ggaacaaaccgaagaacagcgggaaagaaggcaaaacacggggaacagggaaaagacgcgaagaagagaaagaagg

SEQ ID NO: 112268 - RNA, 85 nt, Homo sapiens
ggcagagagaacgaagcagcaaagaaggggcagaccaacaccacccagcaaaaaccccgacgaacgcgccagggagcgccagaca

SEQ ID NO: 112269 - RNA, 78 nt, Homo sapiens
ggggagacgccggacaaccgccccgagggaagggaggcggcggccccaaaagaagagaacgcgcgcaagccaccaccg

SEQ ID NO: 112270 - RNA, 59 nt, Homo sapiens
ggaccacccaccagccaccagagcgaccgaccgaccagacggcgggggggacaggggga

SEQ ID NO: 112271 - RNA, 63 nt, Homo sapiens
cggacaccacacacacacagcgaaaccagcaaaaccagaagggagaaggccgagagggggaga

SEQ ID NO: 112272 - RNA, 63 nt, Homo sapiens
ggacggccgccaggaaaccaggacagcagcaacggagaagagggaaaacagcccccggccggg

SEQ ID NO: 112273 - RNA, 66 nt, Homo sapiens
ccaagcgcagaagccgggagggacccccccgccagacggggaacgggggcaccgcgaccacacggg

SEQ ID NO: 112274 - RNA, 59 nt, Homo sapiens
gaagcgagagaaaacacccaagcaacgggaccagaaagaccacacagggaaacgaccag

SEQ ID NO: 112275 - RNA, 70 nt, Homo sapiens
aacaagagggggacccaaggacacccggagaagggcaagaagcgaaagaagagaagccaggcagggaaaa

SEQ ID NO: 112276 - RNA, 83 nt, Homo sapiens
gaccgcacgggcggcagacacgcccggagcaggaggggcccaccagggaggaagaggcaggcgcagcagagagagcagagcca

SEQ ID NO: 112277 - RNA, 56 nt, Homo sapiens
cgaggcggcgggacccccaagggaaagccaacggggcagcaacacggggcaaggac

SEQ ID NO: 112278 - RNA, 81 nt, Homo sapiens
ggacccggggcgccacgggggccagaagcagacaaacaaggggggaagagaagagccaagaaaccggcgcaaagccaggga

SEQ ID NO: 112279 - RNA, 39 nt, Homo sapiens
gaagagaagccgccgagaaagggacggaaagagagccgc

SEQ ID NO: 112280 - RNA, 62 nt, Homo sapiens
aggggggaaagcgccccagggcaggaaggggaagcaggccaacccagaacacaccccagcgg

SEQ ID NO: 112281 - RNA, 79 nt, Homo sapiens
accaggaccgccgcccgccgcggccgcgcccgcaaaagcagaccggaaaacccaccggcaagaccacacccgaggggag

SEQ ID NO: 112282 - RNA, 75 nt, Homo sapiens
ggagcgaggaccagagagcaacggaaacgacgcccagaaaaaggaggaccggacagcccgaaaccgggccgaaga

SEQ ID NO: 112283 - RNA, 81 nt, Homo sapiens
gccggcccagcagcgcagccgcagccgggcggcagggccccgagccggcccgggcgaggagaagagggccaggagcaacag

SEQ ID NO: 112284 - RNA, 76 nt, Homo sapiens
cagaggaaaaaccacaggaggagacacgagggaacaacaacgggacacccccgaaggaggccagcaccccagggcc

SEQ ID NO: 112285 - RNA, 38 nt, Homo sapiens
agaagccagcccaacaagacgagaagggacaagagacg

SEQ ID NO: 112286 - RNA, 62 nt, Homo sapiens
aaaggaacagagccaaaccagaagaggagggcccagaagaaaaagcacccacaaaagcgaaa

SEQ ID NO: 112287 - RNA, 67 nt, Homo sapiens
aaaggggagaaagaagaaagcaagacggagccaagagacaaaagccaaacacacaggaacgccagac

SEQ ID NO: 112288 - RNA, 104 nt, Homo sapiens
aaccagaccaggcccggaccccaagaccaagcgcgccacgcgcggcgcgccggaaacgagaagaacgaaagagaaacccaaaaaaaggagcaaaagagcgaaag

SEQ ID NO: 112289 - RNA, 62 nt, Homo sapiens
cacacgagccacgaaaacaggaacaggacggacgagaagccaggacaggccaacaagaaggg

SEQ ID NO: 112290 - RNA, 59 nt, Homo sapiens
aaacgaagccgggccacaccaaagagcagagccaaacggaacgcaagcacaggaccaga

SEQ ID NO: 112291 - RNA, 70 nt, Homo sapiens
aagagggggaagcgagaccgggccaagagggaaggggaacaggaccggccacagacagccccccaggggc

SEQ ID NO: 112292 - RNA, 71 nt, Homo sapiens
ccgcagcagccagagcgcccaagaaagccgcacaccccaccagagaaagggaaccaacggcgccacaaagc

SEQ ID NO: 112293 - RNA, 63 nt, Homo sapiens
ccgaagccgcagggaggggaaacgaagcgcacgaaacaccaagggacaacaacgcagggcacc

SEQ ID NO: 112294 - RNA, 79 nt, Homo sapiens
cggcgcgggcaagaagcgcgaaggaaaaaggccgccaggcacagagaaggcaaacgggagggcgaggacaccaagagca

SEQ ID NO: 112295 - RNA, 76 nt, Homo sapiens
agaagagccaaggggaagcagacccagagcccccacagccagaaaaaagacagaccgagcggggaggcaaggacgg

SEQ ID NO: 112296 - RNA, 71 nt, Homo sapiens
caacaggacagagccacagcagaggaaacagccacaagcccagccagccgggagccaagcagcgcgcacaa

SEQ ID NO: 112297 - RNA, 65 nt, Homo sapiens
gggcccgcccgccgccggaagcggggggaccgcacggggaagcacggacaagccacaacgggagg

SEQ ID NO: 112298 - RNA, 58 nt, Homo sapiens
gcaaaccaccccaaaccaccagcgaagaagaccaccccacacagaccgcgccccaggc

SEQ ID NO: 112299 - RNA, 63 nt, Homo sapiens
gccagaaaaaaaggggggacacagcccagaccaagaagcgggccgaaaaccggggcaagcagc

SEQ ID NO: 112300 - RNA, 59 nt, Homo sapiens
caccagcggccaccacacggccaagggaagaagcagaagcaagcccagggcaaggaccg

SEQ ID NO: 112301 - RNA, 77 nt, Homo sapiens
cgcaccgcggcagaaggccccaagcgccgcgcccccaacggcacgcccaccaccggccgacgacgccacggccgccc

SEQ ID NO: 112302 - RNA, 67 nt, Homo sapiens
ggaagaggcacgcgagggggcgcgaggggaacggaggccagagcgcgacaacgggcggagaaggaag

SEQ ID NO: 112303 - RNA, 75 nt, Homo sapiens
gcagaggagacaaaccggagaaggagccaagaaagagaagaacagcaacaaggggaaggagacgggacggaggcc

SEQ ID NO: 112304 - RNA, 61 nt, Homo sapiens
ggagacagccagagaaggcgcggccagacaggggaggccacccgacagagcaccgcgacgg

SEQ ID NO: 112305 - RNA, 69 nt, Homo sapiens
aggaccaaaccaagaccagaagaccgacaggaggccccggaagacggccagagaaaaccgcggaccccg

SEQ ID NO: 112306 - RNA, 85 nt, Homo sapiens
ggagggagaccgagcggcggcggcaagcggcgcgagcggcgagggcgaagcggccaggcccgggcggacgcagagccagagcgcc

SEQ ID NO: 112307 - RNA, 75 nt, Homo sapiens
aggggcaaccgagacagaaaggacccggccccccacgacagagcagagagacccagcacgaggaacagcagagag

SEQ ID NO: 112308 - RNA, 82 nt, Homo sapiens
gccgaggggaggaggcggaagaccacccgagcacgaagagaccagaaaagcgcagagcagaccacgggcggacaaaaacgca

SEQ ID NO: 112309 - RNA, 79 nt, Homo sapiens
aggccggcgcagccccaagacagagcgcacccggcaggcgcaacagagcgccggcggggaccccagcccaacgccaaac

SEQ ID NO: 112310 - RNA, 77 nt, Homo sapiens
ccaccccagcgcccccgagagaagaaagaggcaaaccgacaccagcgacacaagcgcgagggaaccacagaggacag

SEQ ID NO: 112311 - RNA, 80 nt, Homo sapiens
cccggggcagaccggaccaagaaaaacacaccgacagcagaacacacgcgaaaggaaaccaagcggaagggaagcaacac

SEQ ID NO: 112312 - RNA, 76 nt, Homo sapiens
agcggagagagcagcccggcagacgcagaaccaggcacaacacagaagaaggcggggcaaaggaaaaaacagaagg

SEQ ID NO: 112313 - RNA, 40 nt, Homo sapiens
ccacaagacgaccaaaggaggaaggaacagaggggaagac

SEQ ID NO: 112314 - RNA, 76 nt, Homo sapiens
gggcgagggggggaaccggccgcgaagacaggccggggcacaaagaaggacccgcaaaacgggggacaagcgcggg

SEQ ID NO: 112315 - RNA, 90 nt, Homo sapiens
ccgaccggccgagcgcccagcgagacccggggccccagaggccgcggacaccgaccggagacgccccgccggcaagagcagaagggagcg

SEQ ID NO: 112316 - RNA, 56 nt, Homo sapiens
gcaagggcccccaggcggccccgggaccaaaggcgaccaggagagaaaaccaaaca

SEQ ID NO: 112317 - RNA, 60 nt, Homo sapiens
ggaaagaagagacacagaggagccacacccccaggggaaagagggaccagcgcagcagaa

SEQ ID NO: 112318 - RNA, 72 nt, Homo sapiens
ccgcccagccccggagagcgggaacagaacggaggggaaaggaggaccaggcaaagaggccgcaaagggcag

SEQ ID NO: 112319 - RNA, 54 nt, Homo sapiens
gcgggcccggccgagcgccccgggagaggagggcgcccccagccggaacgcgcc

SEQ ID NO: 112320 - RNA, 85 nt, Homo sapiens
caagggcgggccagacagaagagggcaccgagcaggcacaacaccgggaaaagccgcccccagacagcgcccgaaagcaccgaag

SEQ ID NO: 112321 - RNA, 72 nt, Homo sapiens
aagagaacaaagaacgcacaagccccagaggacgacacaaaggggggagagagagaagcaccagaagcacag

SEQ ID NO: 112322 - RNA, 83 nt, Homo sapiens
aaagcccagaaacccaagaggaaagcccaggaaaaagggaacaggcgaaaggcaggagagcgaaagagagcggaaaaacgacc

SEQ ID NO: 112323 - RNA, 77 nt, Homo sapiens
cgaccgccgaaggccccgcccgccacggcgccggccagcaggccagagacagcgggaagagaacggagaggccaccg

SEQ ID NO: 112324 - RNA, 75 nt, Homo sapiens
cgaaacacggggaacaaacggcaagagccagaagcccggcggaagacaaaacagaggagaccagaccagaagccc

SEQ ID NO: 112325 - RNA, 69 nt, Homo sapiens
aagaacacccaaaggacacacacccagaccaccaaacccagaacagcacacaaaaaacaaggcacagga

SEQ ID NO: 112326 - RNA, 70 nt, Homo sapiens
ggccgaggagagaagaaggcaagcgacggcccgaacgagcggaggccaacaaaagcagagaaagggggag

SEQ ID NO: 112327 - RNA, 83 nt, Homo sapiens
gcccgaggccggaggaacccggacccggcgagcggggagccgccaccaaaagcagacggaaaacccacggggaagaccacacc

SEQ ID NO: 112328 - RNA, 80 nt, Homo sapiens
gcagcagcagcgggaacgggggaaagagccacacgaggaacaaacgggcaagaaagaggaaacagacgagggcaaccgag

SEQ ID NO: 112329 - RNA, 62 nt, Homo sapiens
gcgagcgggaagagaacaggacagagggcacaacggcaaagcccagaagccgaaaagcaagg

SEQ ID NO: 112330 - RNA, 81 nt, Homo sapiens
ccgaccacaaggggaggacaaccgcccgggaccagggaaagggagcagcaccggccacacccacagcacgaccggaaccca

SEQ ID NO: 112331 - RNA, 72 nt, Homo sapiens
gggccaccgccccagcgccaccaaagaccgcgacgccaggggacgaagggaacccgccgggcggcccggcac

SEQ ID NO: 112332 - RNA, 73 nt, Homo sapiens
agccgccaagggccgacggcccggccaggggacccaccggaggcgcgcaccacccggagcaagggagcgccca

SEQ ID NO: 112333 - RNA, 79 nt, Homo sapiens
ggagaccacaagaccccgcgccaccaaagggagggcggccaaccgcacagacgaccaacggagccgccgcccccaggcg

SEQ ID NO: 112334 - RNA, 65 nt, Homo sapiens
agccaccccgggagccccgcccacgggaggaaaaagcggccaacagggggacgggaaagacacca

SEQ ID NO: 112335 - RNA, 74 nt, Homo sapiens
caaaagcagcggccggacagcgccacggcgggccgcgggaggacaccacccacagggaccagaagaaaagccag

SEQ ID NO: 112336 - RNA, 69 nt, Homo sapiens
gcagccggggggccccgaggagccaggccacaccccagagaaaaacggcagcagccaagcacgcaacca

SEQ ID NO: 112337 - RNA, 60 nt, Homo sapiens
cgggcacccgcgccgggcaccgaggaccagccaagacagaggagcaagaggggggggccc

SEQ ID NO: 112338 - RNA, 98 nt, Homo sapiens
caaccgcgcccgccggcccccccccgcgcccgcgaccgccgcggcgaagaggaaaaaccaccacggcaaggggcgacaccacaaccgacgccggaggg

SEQ ID NO: 112339 - RNA, 76 nt, Homo sapiens
aggccgaaccgggcgacaagaggccgggcgccccgcaggacacaaggccagggcccagcagcagcccacggggcca

SEQ ID NO: 112340 - RNA, 54 nt, Homo sapiens
ggccgccaagagaagggcacccgcacggccggcccgggccgaagagaacccagc

SEQ ID NO: 112341 - RNA, 90 nt, Homo sapiens
aacagcagcacccgagcaaaccccagcaagagcggaggcgcccggcggagcagaggaaccacacgcgacaggcgcagggcccagcggaag

SEQ ID NO: 112342 - RNA, 70 nt, Homo sapiens
ccgcccagcccccaacagggaagaacgggcagcggggaaaaaagacaaccgacaaccccacaggacagac

SEQ ID NO: 112343 - RNA, 80 nt, Homo sapiens
gccggggaacaggcccgcaccgcaggcccagaggacagagcaggaggaggcccggggaccagaagaggaggggcgaggaa

SEQ ID NO: 112344 - RNA, 85 nt, Homo sapiens
cgagacgaagacggaaccggagccgggcgggcagggacgcggcgccgagagccgacaagcagaccggaagaccgacggaagacca

SEQ ID NO: 112345 - RNA, 71 nt, Homo sapiens
gaagcgcggcagggagcgcgggggcccgcgcagcagcgaccacggaaccgcacgagcggaggaccagccgc

SEQ ID NO: 112346 - RNA, 64 nt, Homo sapiens
accacccccaacaaccagggcaaacccaaagcggaaaacccgcaagggccagcaaaaccgcaag

SEQ ID NO: 112347 - RNA, 79 nt, Homo sapiens
ggcagcagccaggcggagaacaacaaacaggggcaaagaaaaaggagagaaaaagaggcaaaacaacaagaagaaaaga

SEQ ID NO: 112348 - RNA, 71 nt, Homo sapiens
acgcagaaacacaggaccccccccaacgaggacaagaaaggaaacagcagagagaggagggagaaccaaac

SEQ ID NO: 112349 - RNA, 86 nt, Homo sapiens
aagaaccaacaggaagccaccagcacaagaaaagagcaagaggaaaggggggagagacaagcaagcagaagggacggacagcgaag

SEQ ID NO: 112350 - RNA, 79 nt, Homo sapiens
cagcacggagaaaacaaggaggcaaggcaacacgacgacccgcaaggggagacggacgcaaagacaagggagaagcggc

SEQ ID NO: 112351 - RNA, 61 nt, Homo sapiens
cgccaggaaagaaaggaggccagcagcgagaaggaggcaagacagccccaaggcggagaaa

SEQ ID NO: 112352 - RNA, 78 nt, Homo sapiens
caggacccaacaagaagcaagaagagcaggacgggaaaccggggaggggaacccccaccaaggcgcgaacaagcagcc

SEQ ID NO: 112353 - RNA, 121 nt, Homo sapiens
agaacaaaaggcgaagggcgggaccccacgagagcaccaccagaaggcccgaggaagaaagggcagcaagacacgaagccgagaaagagcagcgacaacaaggaggccccggcaagagcca

SEQ ID NO: 112354 - RNA, 71 nt, Homo sapiens
cgccccagcggacacaaaccagaccagagagagcaacagcaggccaggacaggaacgaccgggagggaaaa

SEQ ID NO: 112355 - RNA, 36 nt, Homo sapiens
agagccgacccccaccgcaagggcaggcgcgaaaac

SEQ ID NO: 112356 - RNA, 64 nt, Homo sapiens
cgcggaggccccgggcgcggcgcagggcgccgaggggcggagcgggaaccgagacgcggcgcaa

SEQ ID NO: 112357 - RNA, 81 nt, Homo sapiens
gccgaaagcgcagagcgaagcagaagacgaggacacgcagccggccgaggaccccccagaaaacccgccaggccaagcaac

SEQ ID NO: 112358 - RNA, 68 nt, Homo sapiens
cagagggaaccggcagggcaagcggcgacacacgacgggccacgccgggcagagcgacggcgaccccc

SEQ ID NO: 112359 - RNA, 54 nt, Homo sapiens
cccgcccgcgcgcagcccccggggacgaccaccagccaggccggggacaaacag

SEQ ID NO: 112360 - RNA, 80 nt, Homo sapiens
caacggggaaggcccacaacacaagacaccaagaggggaccagggaggagaaggaggaaggaccaggacacaaggaaaac

SEQ ID NO: 112361 - RNA, 78 nt, Homo sapiens
aagaagcccacgggggaggaaagcccagaacaccaggaaggccagagacgacaaaggaagcgacaggagagacggccc

SEQ ID NO: 112362 - RNA, 80 nt, Homo sapiens
caccggcggcgggcacacagacacgcacggagggcccaacccacagcgccccagaacccaggacgagaaaaaacagagcg

SEQ ID NO: 112363 - RNA, 77 nt, Homo sapiens
gggacaagcgcgacgcccggcgcgagccaagcgcgcgccgcggagccggagcgaggcgggggaggcagcagaagccc

SEQ ID NO: 112364 - RNA, 73 nt, Homo sapiens
cggcccccgcccgacgcccggcgcacggggcgcacaccacggcccggggagcgacagcacaacaagcaaccaa

SEQ ID NO: 112365 - RNA, 69 nt, Homo sapiens
gaagagggagagaacaaggaagacggcagacaacacagcgcagcaacgcaaccagaggacacagacagc

SEQ ID NO: 112366 - RNA, 69 nt, Homo sapiens
gcagggcgcccccgccacgccccaaccacacgccaaggaacccggcggccccaacaccaccacgccaca

SEQ ID NO: 112367 - RNA, 79 nt, Homo sapiens
gccgaagccgcgcggcgccgcgagagacacaccaacccagcgcagggcgccagggagaagaaaacgagaggaagccgag

SEQ ID NO: 112368 - RNA, 77 nt, Homo sapiens
ggggggccggccaagagcacaagagcagcgcacagacagaacggcagagaagaaggcaggcccacaccacggggcag

SEQ ID NO: 112369 - RNA, 67 nt, Homo sapiens
aacacaagaaagggacagccaacgggccacgcagccagaccacacgggcggccccaagcaaaagccc

SEQ ID NO: 112370 - RNA, 72 nt, Homo sapiens
ggggcgcgaacacagcaacagagcaagagcgggagcaccccgggccgacaggaaaaagacccgagaagcgca

SEQ ID NO: 112371 - RNA, 71 nt, Homo sapiens
caggcccagaacacgcaaacgcagaagacaagccaaagccgcggagacagggcagaaaaagccacagcaac

SEQ ID NO: 112372 - RNA, 54 nt, Homo sapiens
aggaccaagaaccagagcagaaacgaggcccagcagagagagaacagcgaggca

SEQ ID NO: 112373 - RNA, 76 nt, Homo sapiens
gaagaagagaggaagagaccggaacagaagcgaaacaggcaagaaaccaggaacgagacaaaagaagcgcacgaga

SEQ ID NO: 112374 - RNA, 85 nt, Homo sapiens
agcacgggcaaggcggagaggacggagcggcgagcccccgcggcgacagcagacggagccgcccagaagccgcccacagcaagcc

SEQ ID NO: 112375 - RNA, 66 nt, Homo sapiens
gccagccgggaaccacacaggacagcaccaggcggaagacaggagaccaaaacaagaacacaagac

SEQ ID NO: 112376 - RNA, 64 nt, Homo sapiens
ccccagaacacaacagggcaaaggccccgacagaagacccgaggaccgggaacgaaggggcccc

SEQ ID NO: 112377 - RNA, 67 nt, Homo sapiens
cggcgaaacacggggaacaaacggcaagagccagaagcccggcggaagcaaaagggcagaaaagcag

SEQ ID NO: 112378 - RNA, 74 nt, Homo sapiens
ggaaccccggccgcgagacgcggcgcgcgcggcaccaggccggaaacaggaacacgaaagaggaaaaacgcaca

SEQ ID NO: 112379 - RNA, 99 nt, Homo sapiens
cggagccgccacccagagcgcacggcgacgccccaggggaaaacccccgggaccagcaaacggggacagcgccgaccggaacagggaccacggaagccc

SEQ ID NO: 112380 - RNA, 86 nt, Homo sapiens
aaggcccagaccaaggaaaaaccaaggaggagcagcacagaaggcgaggagaagcagagggggggagcgcccgggaccggaggaga

SEQ ID NO: 112381 - RNA, 69 nt, Homo sapiens
cagaaccgcggaaacaacgccgcaaggaaaagacagagccaaacagcaaagaagccaagccaccaacag

SEQ ID NO: 112382 - RNA, 70 nt, Homo sapiens
cgccggaaaccaacaaaaacacaggggaaacacgagagagcaacagccgacagagcggcaccgaccagcc

SEQ ID NO: 112383 - RNA, 72 nt, Homo sapiens
ggagaaagcgcccacgcacgaaagcccaggccaaaaagagcacgggcgaagggagggacgcgccccagagcc

SEQ ID NO: 112384 - RNA, 73 nt, Homo sapiens
agaggcgaccgagacggggagcccaaagcaaagggccagcagaacgcgacccagagaggaaacgaccaggcgc

SEQ ID NO: 112385 - RNA, 61 nt, Homo sapiens
agcacaggagacgacgagaaaggcacgaaccccggaaccaccgggggccacgggccccgac

SEQ ID NO: 112386 - RNA, 70 nt, Homo sapiens
ggcaccggccagcccagcccccgccgcgacccacaggaccgcgaacaaggaggccacaaaacacccggac

SEQ ID NO: 112387 - RNA, 61 nt, Homo sapiens
ggcagaggccaaggccaaaagccaaagcggaaccaaccgggacggcacggaagaaagcaaa

SEQ ID NO: 112388 - RNA, 75 nt, Homo sapiens
cgcagggaagaacccgagcgaagcgggaagaggcgcagacaagccgcagaacaaaccaggggagggaaacgagaa

SEQ ID NO: 112389 - RNA, 94 nt, Homo sapiens
aggggcaccagagggcggagccgggggcaggccgggagggggcaggagaggccgggcccggccccgcgacagggcggccgggggacagagggcc

SEQ ID NO: 112390 - RNA, 76 nt, Homo sapiens
gcaaaccgacgcgaagacccgagagagcagaaccaacagaaccaacccgcccgagaccaaaggacgagagcaccag

SEQ ID NO: 112391 - RNA, 61 nt, Homo sapiens
ccgcagaccccccagcagggccgccgcaacgcgcaggccaaagagcaagccaaccaagcca

SEQ ID NO: 112392 - RNA, 58 nt, Homo sapiens
aacgggcgaagcgacgagccgcgaggagccagcgggaccagccgcagcaagccagaag

SEQ ID NO: 112393 - RNA, 68 nt, Homo sapiens
agcggcggcagcggagagcgagagaggggagcaggccagccgagaggaagaggcaagcgaggagcacc

SEQ ID NO: 112394 - RNA, 70 nt, Homo sapiens
ccacacagcagcagcccgggaacgaagcagaaccggcgcgagaaccgggagccacgcacccaaggcagac

SEQ ID NO: 112395 - RNA, 74 nt, Homo sapiens
aggcgagcagaggaagggagaagcccaaccgacaaaaagggcagacggcgacgaagcgcagaaccggccgaaaa

SEQ ID NO: 112396 - RNA, 71 nt, Homo sapiens
ggagggggggggagaacgacagggcagccaccgccaaagagagggcggaagaccagagcggggccagggga

SEQ ID NO: 112397 - RNA, 65 nt, Homo sapiens
cgacccaaccagccaaggacccacgggaggagggagaaaacacagcaccggaacagcagccgcca

SEQ ID NO: 112398 - RNA, 74 nt, Homo sapiens
agccagcagaagaccaacacaccagcgcgggaggcagaccggacgcaagagccagagcacagagcaccacgaac

SEQ ID NO: 112399 - RNA, 77 nt, Homo sapiens
gcaccaacacaccaggggcgcgcaagccccggagcccacaggcggggagcgcccccaggagcagcggagcgggagcg

SEQ ID NO: 112400 - RNA, 48 nt, Homo sapiens
cgcggccccacgaggcaggagcgcgggggggcccacgcggaggacgca

SEQ ID NO: 112401 - RNA, 69 nt, Homo sapiens
agcccaaacagcaagagaaaacacaacaaagaacaggaaaggcgaggaagccggcccaggaggcccaaa

SEQ ID NO: 112402 - RNA, 36 nt, Homo sapiens
acgaggggccccacggaggaagcccggacccaagaa

SEQ ID NO: 112403 - RNA, 86 nt, Homo sapiens
ggcagcgccaccggacaggagggaggaggaccgagccccgaggaggcagagcacaaggagaggagcagagggcccaccccggagag

SEQ ID NO: 112404 - RNA, 78 nt, Homo sapiens
gcgaacgagacagaacaggaaaaagggacccggcccaacgagcccacgaagaacacaccagaaagcagccaccaacca

SEQ ID NO: 112405 - RNA, 92 nt, Homo sapiens
ccacgcgggcagaccgacagaagggcaggagaaacccagcgggcccagagacgcagcgggaaaaccaaggcaagccaggcgagggaggccag

SEQ ID NO: 112406 - RNA, 83 nt, Homo sapiens
ggaagccaggcccccccgaaagaggcccgaagcggcaagccgcacgagcgggcgccagaggcagaggcccaaaacagaggcac

SEQ ID NO: 112407 - RNA, 83 nt, Homo sapiens
ggaaacagacccacaacgaagaagaacagccacgcagaccagcaccagacagcgaaaaagaggacccaaaaaagagagaaaag

SEQ ID NO: 112408 - RNA, 73 nt, Homo sapiens
gaggagcgccgcggcagacgccgaggagagccccagcgcagcaaagagccggggacaagagaaaaaaagggcg

SEQ ID NO: 112409 - RNA, 72 nt, Homo sapiens
acgaagcgcacgaaacaccaagcggagagccagagcaaccaaaagaccgcacagcaaaaggaccggccgaaa

SEQ ID NO: 112410 - RNA, 71 nt, Homo sapiens
accaaagggaaaacagccccgaaaagcaaagaaagggagacaggcagaaccagacccggagcagacgagga

SEQ ID NO: 112411 - RNA, 78 nt, Homo sapiens
cccggcagaccccaggcgccgcacgcggggcagcccgaggcgcaccagggaccgaggaacccgggagccaggaaggaa

SEQ ID NO: 112412 - RNA, 64 nt, Homo sapiens
cgcgccgggcaccgaggaccagccaagacaggcagacgcggccagccaccagacacaccgcaag

SEQ ID NO: 112413 - RNA, 63 nt, Homo sapiens
cggggaagacagagccccagaaaaaagaaggcacacccagaagccacaggagaagcaagaggc

SEQ ID NO: 112414 - RNA, 78 nt, Homo sapiens
aaggaaccgcgagacaaagggcacacgccacgggcgccaacacaggggagggaagagagcccaagggagcagggcacc

SEQ ID NO: 112415 - RNA, 89 nt, Homo sapiens
gaaaggaacacaaaagcaccacagggagcagggaggagcgcgacagagggagagcacccgccacaggccacaaaggaggcaggcccggg

SEQ ID NO: 112416 - RNA, 87 nt, Homo sapiens
cgcgggagagggccaccgcccgccacccgcgcgccgccgccgaggagaaaggacaacggccaccccgggaagccacgcgccggcggg

SEQ ID NO: 112417 - RNA, 69 nt, Homo sapiens
ccccagccacccgacagccaggacggcaaggagggagccgccagaagacagaagaaagggagcccccaa

SEQ ID NO: 112418 - RNA, 74 nt, Homo sapiens
agcgcgccgggaaaccaagaaaagagcccaccaccaccaagcaagcagggagaacagaggcgagagcggcagca

SEQ ID NO: 112419 - RNA, 75 nt, Homo sapiens
agaccaggaaccagcagagaaacgggcacggagcgcggacgcccaggagcgggcgccggcggagcgccgccccca

SEQ ID NO: 112420 - RNA, 73 nt, Homo sapiens
gcggcagaagacccggaagcaaagaaaaagaacccaaacaagacgcaagacgcaaaagcaggcagagaggcag

SEQ ID NO: 112421 - RNA, 82 nt, Homo sapiens
acagcagaaaaacagggccgccaacggccccagcacacagccagagagccaggaagcaaggagaccgaggaggagaaggggc

SEQ ID NO: 112422 - RNA, 78 nt, Homo sapiens
ggaggacacacacgcacgcacgcccaaagaacaggcaagacaagaaaaaagaagaaacaaggaaaagaaaagaaagcg

SEQ ID NO: 112423 - RNA, 40 nt, Homo sapiens
aacacccggaagccgagaaagggcggagaacggaaaagca

SEQ ID NO: 112424 - RNA, 80 nt, Homo sapiens
aaaaagaagaacagcaaaacacgaaaggcaaagagacacgcgagggaaaccaggggaacgaaaggagccgagacgccaaa

SEQ ID NO: 112425 - RNA, 80 nt, Homo sapiens
gagggcgcaacccagcaccgagggcaggagagagcacaaggagagaacaggggggcccacacgcccccagcgcgagaccg

SEQ ID NO: 112426 - RNA, 85 nt, Homo sapiens
agaaacccgacgagaagggagcgacccccagggagggcggaccgcccaaaccgccaagagcagaaaacgggcccccacacaagaa

SEQ ID NO: 112427 - RNA, 81 nt, Homo sapiens
cggacgcaaccggcgacagccccaaggcaacaagcccacccgaaaccacaaggccgagggagccaagaagaaagggccccg

SEQ ID NO: 112428 - RNA, 82 nt, Homo sapiens
gcacggcgcacccccgccccacccggcacccccaccggaggacacaaggcacaagagagagggcacaggacagagagcccag

SEQ ID NO: 112429 - RNA, 75 nt, Homo sapiens
gacagagaggggaaaccccgaaaggggggcagggagagaaggagcacagaggggaagcaacgcggcagcagccag

SEQ ID NO: 112430 - RNA, 71 nt, Homo sapiens
acgcaggccaaggaaaagccagacggaagccaaccggcgccgaagcgaaccacccaacgggaaagacaacc

SEQ ID NO: 112431 - RNA, 77 nt, Homo sapiens
accagcaaagagagcagagcagaaaaaaaagcacaaagcaggcgcagacacacagcgccaaggaaagaaaacccaga

SEQ ID NO: 112432 - RNA, 78 nt, Homo sapiens
aacagagcgagcgcagcagcagcccagacgaacggggaagaagcagccgcccaaacaccaggcagggccccagaccga

SEQ ID NO: 112433 - RNA, 73 nt, Homo sapiens
cgaaggggcagaggccaagagcccaacaccacccgagagccccaagacggagcacaggcacggaagcagccga

SEQ ID NO: 112434 - RNA, 81 nt, Homo sapiens
gagaagcgcagagcagcgaagcaagcgaggagccagacaccagcccccggacaacccaagggaaaggagcgcgggcaagcg

SEQ ID NO: 112435 - RNA, 75 nt, Homo sapiens
cgacacgcgggcgcggcacccggcaaaggaagaacgcgggagcgaaggaaaggaggcagaaaaaaggacggggca

SEQ ID NO: 112436 - RNA, 76 nt, Homo sapiens
gaaaacgaggggcggaacacccgccaaagcagagaaaacaacggggcggcacacaaggagcgaagggcagggagaa

SEQ ID NO: 112437 - RNA, 75 nt, Homo sapiens
gacggcgacgcgggaggccagggcaggccggagagcgacccgacaaggcccacgcccaccaccaccacgggggac

SEQ ID NO: 112438 - RNA, 68 nt, Homo sapiens
caggaggaagcgaggccagacagcaagagcacccgacccacaggccagagagacacaagacacccaag

SEQ ID NO: 112439 - RNA, 79 nt, Homo sapiens
cccgcgccgccagaaccagagcggcgcggaagcgcgccggcagacccgaccaggaccagggaagacacgggagcgccgc

SEQ ID NO: 112440 - RNA, 75 nt, Homo sapiens
gccgccgcggggccaagggacacacgccacggaccgccagccccaggcccgccgccccggggcacgccaggcaac

SEQ ID NO: 112441 - RNA, 76 nt, Homo sapiens
gcacaacaggccggcgcgggccagcgccacagaagaaccaccaagaaaacgcacacacagcagggcggcagcagaa

SEQ ID NO: 112442 - RNA, 79 nt, Homo sapiens
ccagaaggcagaggaggcgcaagacgcgaccaaagccgacggggcaagcgcggagccagcgcccggcaaggagcgagcg

SEQ ID NO: 112443 - RNA, 71 nt, Homo sapiens
agaggcggacggcgggaccacaagacaacgcggagcggcgaagagcaaccaggacagagaggcgcaggcaa

SEQ ID NO: 112444 - RNA, 77 nt, Homo sapiens
agaggggaaggagcccagcgacgccaagggaggaaaaagcggcacagaggaagaggcccaccccaggagaacaaaaa

SEQ ID NO: 112445 - RNA, 68 nt, Homo sapiens
cacacagccaggcccacgggaaaagggccagcccgcaacccccggcgaccacgggcccggcaacagcg

SEQ ID NO: 112446 - RNA, 74 nt, Homo sapiens
caggagggacggacccagccaaagaagcagaacggaaaaagcaaaagcgagaagaagagaaaaggaagaaccac

SEQ ID NO: 112447 - RNA, 50 nt, Homo sapiens
cagcaagcgcagaaggacggaagaaagggaagagaagagaacgagcggaa

SEQ ID NO: 112448 - RNA, 87 nt, Homo sapiens
cagaaagccaagcagaacaggggccagccccagcccccacaccggcgagaggaagaggaggcgcggaccgacgggcccacacccaag

SEQ ID NO: 112449 - RNA, 49 nt, Homo sapiens
gacagcaagcaccggagggagaagacaggaagaacaagcgggggaacgg

SEQ ID NO: 112450 - RNA, 71 nt, Homo sapiens
cggccgagacggcggcagcagcggcacaggaggaccccccccagaaaaccaagcgaaaccccaaagggaag

SEQ ID NO: 112451 - RNA, 81 nt, Homo sapiens
cgaccaagaggagacgccgagcagccgagccgcgcccggcagcaacaagggcgggcaccgcccgagagacacaaaaaaaac

SEQ ID NO: 112452 - RNA, 120 nt, Homo sapiens
cgcagcgggccaggagacgacaagcaaaaccagaaacgagaaccaccgccagcgcgaccgggcgagcaggagcgccccccgcagccccggagagcggaggagcggagcccgcaccccgga

SEQ ID NO: 112453 - RNA, 82 nt, Homo sapiens
ggccgcgcgcaccggccagggagcgccccgcccccgcccggcgcgagccccaggccggcagcaggccgccaggcacagagaa

SEQ ID NO: 112454 - RNA, 65 nt, Homo sapiens
gccgcagccccgaggacgggaacagggcaaagagagccagcaagacggcagccacgaaagacgac

SEQ ID NO: 112455 - RNA, 62 nt, Homo sapiens
cggccggacgccgcccgaacaggacccgccggccaaggagggaagcggacacacaggacgag

SEQ ID NO: 112456 - RNA, 86 nt, Homo sapiens
cgacaagccgcggcagccgcggaccaccgccgccaggggacacaggacaaggagccaccggagaggaagcggcagacagcgaaagg

SEQ ID NO: 112457 - RNA, 87 nt, Homo sapiens
cgcacccaggaccagcgcagagcagggaagggaggaagaggggaggagagagaaagaaaaagccagagaggagagcggggccacccg

SEQ ID NO: 112458 - RNA, 74 nt, Homo sapiens
acccacagaaggagagcaaaggagacagcagacagccagagacagagagcacaaagccacgcgccgcgggagcg

SEQ ID NO: 112459 - RNA, 106 nt, Homo sapiens
cgagaccggagagccgcaggacggcgcggcagagccccgacgccacagaacggccaagcagcgagagcggccacagaagaacaggccacggagcgggcacacccac

SEQ ID NO: 112460 - RNA, 61 nt, Homo sapiens
ggaacaggacgaagaccagcgccagggaaagaaggcggaggcaaagcggaaaggacagggg

SEQ ID NO: 112461 - RNA, 55 nt, Homo sapiens
ggcaaccgggaccagcgagcgacagaggggcgcacccaacgcgcaccgagaagaa

SEQ ID NO: 112462 - RNA, 60 nt, Homo sapiens
gagcaacccgcagcagcgaggaaggaaacagcgaaccacacccggccccccccaggagcc

SEQ ID NO: 112463 - RNA, 81 nt, Homo sapiens
agggcgccgccacgccgcaggaggcggaggccagccgagaggaagaggcaagcgaggagcacccaacccggccgaggagcc

SEQ ID NO: 112464 - RNA, 84 nt, Homo sapiens
aagcggaggcccggcgaacggcggagaagagccgccggccaccgggccacggccccacagacccagggggggccgaagaagcca

SEQ ID NO: 112465 - RNA, 54 nt, Homo sapiens
cccggccacagggcccaggggaaacgggagcggcgaaagaaaaacaggaccgcg

SEQ ID NO: 112466 - RNA, 70 nt, Homo sapiens
ggcgaacacgccgacagggacgaagaaaaggggagggagcagccaaggcccagcgagcagcgggggagca

SEQ ID NO: 112467 - RNA, 72 nt, Homo sapiens
gagaagagaagagggaaacccaaacccagcaacacgaaacagacagaaccaggacaaccggagagaaaagac

SEQ ID NO: 112468 - RNA, 74 nt, Homo sapiens
caacccggccgggaggaagccgcaggaccggaccaggagccaacagagagcacccccacgcccagagccgcgag

SEQ ID NO: 112469 - RNA, 74 nt, Homo sapiens
aggaacaaggggagaagggaaaaggccagggacggacgccacgccacccccgaggaccacggggaaaggggacc

SEQ ID NO: 112470 - RNA, 86 nt, Homo sapiens
ggcgcaggcacagcccgagaaaccgcagcacacacgacgagacaagggcaacgagacacccagcggcccggccccgccgggagacc

SEQ ID NO: 112471 - RNA, 73 nt, Homo sapiens
ccggccgccgaggagcccgggcgcacgaccgcggcccggcagcacccgaggaggagcgaaaccgaaagcaagg

SEQ ID NO: 112472 - RNA, 75 nt, Homo sapiens
acaacacccccccaggaggagacgaccccaggcccccccgcggagcagagagcaccgagaaaagcccagaaagac

SEQ ID NO: 112473 - RNA, 80 nt, Homo sapiens
cgcacgccggcgcacgggaaacccaagcgcggcgaaaccaagaggagggaagcaggcagacgcgaggccggccaacaaga

SEQ ID NO: 112474 - RNA, 57 nt, Homo sapiens
gcccgcgccgggcccggaaagcgccgcccagcagccgcagcaccaggaagaagaggc

SEQ ID NO: 112475 - RNA, 41 nt, Homo sapiens
acgccaggccccacgcgagggaggaggacaggagaacgggc

SEQ ID NO: 112476 - RNA, 73 nt, Homo sapiens
ggagcccaggccggggggaggcaccgcgccgcacgcgcagggacaagagaaaaaaagggcgggcgaacaaaaa

SEQ ID NO: 112477 - RNA, 81 nt, Homo sapiens
cggcagaaggaaggcggaaggagaagaccgaagagccaaaaaggaaaacccgaggcaagagaaacccgcgccagagagcca

SEQ ID NO: 112478 - RNA, 74 nt, Homo sapiens
cgaaagggagaaaggaagggacagagagccggacgagcgggagaggacaccacacaaaaaacaggaaaagagaa

SEQ ID NO: 112479 - RNA, 85 nt, Homo sapiens
ccagagcacaagacgcccacgcagccagaaccagcaggggcccaggacggcaccagaaaagaggacccgaggagcccgaaggcag

SEQ ID NO: 112480 - RNA, 40 nt, Homo sapiens
gaaggaggagggaaaggcaaaccagggcccagcgaggacc

SEQ ID NO: 112481 - RNA, 75 nt, Homo sapiens
ccgggcaaaggacagaaggaccgaaacacgcaagaaaacgaagccagagcggaagaaccgaagacaacccaagac

SEQ ID NO: 112482 - RNA, 57 nt, Homo sapiens
gcaggagccaagacgccaggaggaggagcaaagggaagaacagccggaagggccaaa

SEQ ID NO: 112483 - RNA, 74 nt, Homo sapiens
gcaaaccccggaaccaggaaaaacaggcggaccagaacgacacgacacgccaaaagaacacaacgaaaagcccc

SEQ ID NO: 112484 - RNA, 72 nt, Homo sapiens
cggccagcgacgcaccgagaaaggaaggaaaaccgacgagaagcgcaagaaagaagggagcccagcccagac

SEQ ID NO: 112485 - RNA, 76 nt, Homo sapiens
agcgagaccacagaaaagcaaacaaggcgggaagaagagagcgcagggagaagaaacgaacggaacgaggagagca

SEQ ID NO: 112486 - RNA, 71 nt, Homo sapiens
cccagagcccccccgcagaagaagacgaaacggaaagaacgaggacagggagaaccagcggacagcagcgc

SEQ ID NO: 112487 - RNA, 78 nt, Homo sapiens
aaccagcccagcagcagcaagcaggcgcaaggcaagcacaaaccacagcaccgagagcggcccgcagaacgccagcag

SEQ ID NO: 112488 - RNA, 81 nt, Homo sapiens
aggggcggggcaacgcggaagcacaacaaagagagcagggagagaagggggagaaaaggaacagaaaaggaagcgacacag

SEQ ID NO: 112489 - RNA, 80 nt, Homo sapiens
ccccaaagcacggggacaggggaaaggaaaccaaaccaggaaagaaggacaaggagcgaggagaaagagggacaccagag

SEQ ID NO: 112490 - RNA, 76 nt, Homo sapiens
cgcgggacccggagcaccgggccggcggacaggagggcgcgccccccgcgccccaccagccgggacacgacgaaag

SEQ ID NO: 112491 - RNA, 78 nt, Homo sapiens
ccaacgggaagcaccgagaccagaagaaagcccccgggcacaggaaaggagcagaggaccacgagcgaccggaagccg

SEQ ID NO: 112492 - RNA, 70 nt, Homo sapiens
aaagccagagaagccgccgaagaccacaagggcagaagacagcagggcagaccgggccaaagcccaccca

SEQ ID NO: 112493 - RNA, 72 nt, Homo sapiens
gcagacggggagccagacaggggccaaaaaggagcagcccaccccccaaaggcgcaagaaagcgaagagcca

SEQ ID NO: 112494 - RNA, 84 nt, Homo sapiens
ggcgcagcaaggagaggcggcggcggcccggcgaagaaagaaggaaggaccccaaggagcggcaggaccaccgggagacgggag

SEQ ID NO: 112495 - RNA, 74 nt, Homo sapiens
gggagaacaagcaacggacacagggaaagacaaggagccgggccgagaaaccgaaccagagaccagagaagaaa

SEQ ID NO: 112496 - RNA, 118 nt, Homo sapiens
caggagagcgcagagcacagagacaccacgacggccgagagcccacccaagggccagggagagagcggaagaaggccccagacgaaggagcggacggaaaggcggagacccaaagacg

SEQ ID NO: 112497 - RNA, 74 nt, Homo sapiens
aaagccgaagcaggacggagccacggagcgcacggcgagggagaaaagaccagacgcacgcaggcccggacgca

SEQ ID NO: 112498 - RNA, 82 nt, Homo sapiens
caggacaagagaagcacaaaacagcagacccaagagcagcggaaaagaccagcacagccaaggcaggaaaggaaagagacaa

SEQ ID NO: 112499 - RNA, 85 nt, Homo sapiens
ccggaagaagggacacagaggagacggcccgggcgcggacggacggcccccaggaccccgaagaaacacgaaacggccaaccagc

SEQ ID NO: 112500 - RNA, 69 nt, Homo sapiens
cggcaaagaacaaacagaacaccgagcagcaaaacaaacggagagaggagggagaaacaaaggccaaag

SEQ ID NO: 112501 - RNA, 82 nt, Homo sapiens
acaggccaagaccaaagccacccaaaaagagcaaacaaccggggcagacaacagaggaacagaggagcggaaacgcaggagg

SEQ ID NO: 112502 - RNA, 67 nt, Homo sapiens
ggaggacacagccggacccggaagaagagaacgagccaaaaggacaaaccagacgaagaaagccaac

SEQ ID NO: 112503 - RNA, 94 nt, Homo sapiens
agcgggagcgcggaacagcaggcccgagcccaccgcgccgggccccggacgccgcgcggaaaaggacaagccaaaaccgagaaagggaacgaca

SEQ ID NO: 112504 - RNA, 79 nt, Homo sapiens
gccaagagggcgcccagagacaacgagagaacagcagaaagaacaagggaccccagagaaagcagcagggaaggacggc

SEQ ID NO: 112505 - RNA, 72 nt, Homo sapiens
ccggacggcccaagaagcgggccgccaaggacagaacgaggagcagagaaagacgccccccaaaagaaaacg

SEQ ID NO: 112506 - RNA, 72 nt, Homo sapiens
aaaaggaagaaccaccgagaagagaaaaaacaaaaggacggggaccaaaaagcccagaagagaacaaagcac

SEQ ID NO: 112507 - RNA, 74 nt, Homo sapiens
cgccaggccgacagccgcggccgggcccgagggggacgaccaccagccaggccggggacaaacaggcaaccgac

SEQ ID NO: 112508 - RNA, 55 nt, Homo sapiens
caccgacaagcaagccgaagagaaaggcgggccccaaggggaagcgaaaagagca

SEQ ID NO: 112509 - RNA, 56 nt, Homo sapiens
gagcccgccgcgcggagcgggcaggcgccgggaggggccgggggccagcccggacc

SEQ ID NO: 112510 - RNA, 68 nt, Homo sapiens
aagggcaaaagaaccaaagaaacgcaacgggcgcgggaccggaaaaaccaagagagccagccaaccca

SEQ ID NO: 112511 - RNA, 79 nt, Homo sapiens
agcgccccccccaaccacaaaacaggcggagggcggcgaggaacagaacgaaggggaagaacaccgagaaagcgcaaga

SEQ ID NO: 112512 - RNA, 72 nt, Homo sapiens
ccgacgccaggcagcgcccccaaacgacgaaggagcaaggagcgagggcgcacaacagcaagaaaaagcaac

SEQ ID NO: 112513 - RNA, 77 nt, Homo sapiens
cggccaaaacaaaaggaacagacaaaaggacgaaacccacggcgacaggagacagacccagcacggacccccccccc

SEQ ID NO: 112514 - RNA, 73 nt, Homo sapiens
ggaaagccaaggaaaaacggagagccacaaaaaaggaagcgaaacaaagcagcccgaggaggcacgcaaaaca

SEQ ID NO: 112515 - RNA, 79 nt, Homo sapiens
gcggcagggaccagcagacgggaagacaagggaggcgaggacggacaaaaggaaacggacgggaggccagccagcagaa

SEQ ID NO: 112516 - RNA, 80 nt, Homo sapiens
cagcccacagaggcgcggaaagcacggaaggccgccaggagcaaggcagcgacccagggcacagcggggcacagccccca

SEQ ID NO: 112517 - RNA, 58 nt, Homo sapiens
accagagggccagagggaaggacaggcaccaagaagagcccggagagcgagaaaaccg

SEQ ID NO: 112518 - RNA, 66 nt, Homo sapiens
caaggacggcagcaccagcgaggccggacagcagacaggacaaagagggaagacagggaaaccaga

SEQ ID NO: 112519 - RNA, 74 nt, Homo sapiens
aaacacagcagcaggcaaaaacaagccagagcgacgaccgaacaggaggccggggcccccaccagggacagccc

SEQ ID NO: 112520 - RNA, 87 nt, Homo sapiens
gcagaagccaggggacaccgccagcccaaacaacggcccaggggaagcaagcaggaccaccgacagaccaagcaacgcgcagaacgc

SEQ ID NO: 112521 - RNA, 65 nt, Homo sapiens
gaaaacaccacagcaagagccccaggagaacagaggacgagacgaagaaaagcaaagaccaaagg

SEQ ID NO: 112522 - RNA, 78 nt, Homo sapiens
gccagccgaggggagaagagcccagagacggcgaaggagaggcaggaccagaaacaaggccgcaccaacccaacaaaa

SEQ ID NO: 112523 - RNA, 77 nt, Homo sapiens
gagcccggccgccagaccacagcacagccgggaaggggagccaccagccccccggagcgaagcccacagcagagcac

SEQ ID NO: 112524 - RNA, 41 nt, Homo sapiens
aggcggggcacgcaccagccccgagcccaggggacaagaag

SEQ ID NO: 112525 - RNA, 86 nt, Homo sapiens
cccaggacacacgagaacgcaaagcaaagaccaagacaaggaaggcaccccgaccagcagaggagggcaagagaacaaggagcaac

SEQ ID NO: 112526 - RNA, 71 nt, Homo sapiens
aagcacccggagaggaggaaaaaaaggaccaccccaacaggaaacaaggggagagacagaggacaagggag

SEQ ID NO: 112527 - RNA, 68 nt, Homo sapiens
aaggacccaaagcacaggaaccaccgaaagcggcgcaacgagcgcacacagacccgggcccaacggac

SEQ ID NO: 112528 - RNA, 77 nt, Homo sapiens
gcccaaggagaaaaaaggacgacagagaaaggaacaagcgacggaaggcaggacaggaccaacgaaggaagccgaac

SEQ ID NO: 112529 - RNA, 75 nt, Homo sapiens
aacagggagggcagcccagggacccgaaggaagagggaggaacagcagcggaaacaagcacggacggcgggaggg

SEQ ID NO: 112530 - RNA, 84 nt, Homo sapiens
cgagaagcacaggacacggccaccgccccgggaggaccgggccaaggggggggaagaagcggaaaggaggggccccggcacgcg

SEQ ID NO: 112531 - RNA, 60 nt, Homo sapiens
cgcagcccgggcgcgcccgcacgcgccagaaccagagaacagcagaggcccaggaaacag

SEQ ID NO: 112532 - RNA, 54 nt, Homo sapiens
aaagaacagaagaaggagcgaaaagagcaggaagacacccacgaggacaacccc

SEQ ID NO: 112533 - RNA, 81 nt, Homo sapiens
ccacccaagccagaaccgcacaagcggaagcaagaagaagacagggagacacagaacaaccggcaccaggggggcgcgaga

SEQ ID NO: 112534 - RNA, 38 nt, Homo sapiens
cgccggaccccgccacggcagagaacaaagaaggcccc

SEQ ID NO: 112535 - RNA, 81 nt, Homo sapiens
ccgacgccaggcccgaccgaggggcggagccgcgccgagcgcgcggagaaccagagaagccggggagcagcagaacggaga

SEQ ID NO: 112536 - RNA, 58 nt, Homo sapiens
gcagcgcgccagcagaagaagagaacacgcagcagcagaggaaaaaagagaccgagag

SEQ ID NO: 112537 - RNA, 80 nt, Homo sapiens
ccagcggacgagcagccaaagcgacagagcaaggccagcaggcaacacgggagaaggaaccgcaaaaacacaaaagcaaa

SEQ ID NO: 112538 - RNA, 78 nt, Homo sapiens
ggagaagaagaaccagaagcaagaggagcaagaggggggggcccccccgaagaaaggaaccggggagcggcgaaaaaa

SEQ ID NO: 112539 - RNA, 37 nt, Homo sapiens
aggcagaaacccaacacaagggacccaaaaaccgaag

SEQ ID NO: 112540 - RNA, 68 nt, Homo sapiens
agaaaacggacggaagaaaaggcggccggagaaagacagcaaagaaaaggagaagaaaggaaaaaaac

SEQ ID NO: 112541 - RNA, 74 nt, Homo sapiens
ggcgaagggacagaggaagaagagaccaaaaccacacccacacagcccaggccaaggagccagacggaaggacg

SEQ ID NO: 112542 - RNA, 80 nt, Homo sapiens
cgcccgaagccgggagccgccgccagggggccgccgggagccgccccgccagcgcggccagcaggcgaaagagaagcaaa

SEQ ID NO: 112543 - RNA, 80 nt, Homo sapiens
cccccccccacccaccaaaccggagggggaaaaaacccaaggcgcaaagacccacggcagggcaaccccaccgcggaagg

SEQ ID NO: 112544 - RNA, 76 nt, Homo sapiens
gggcggacgccgaggcccacgagagccggagcgggcagggcacacaaccgggcagcggacacggagcagggccgcc

SEQ ID NO: 112545 - RNA, 60 nt, Homo sapiens
caggcaggaccaccaggacgagggcacagaaaacgaacgagaaacgagggagaagaagca

SEQ ID NO: 112546 - RNA, 74 nt, Homo sapiens
accgaaggccgcgccggggccagccagaagaagggcaggccagaagggccaggagggggccacaccgaacccag

SEQ ID NO: 112547 - RNA, 77 nt, Homo sapiens
gcgagcgggacgcgggcagcagcaggccggggcccaggagaacgagccgagcccgaggaaaccagaagacagaccgc

SEQ ID NO: 112548 - RNA, 77 nt, Homo sapiens
aaacgggagccggggaagaagagacgccccccgcggacccggggcaggggcgagcaccaaagccaaggaagcccaga

SEQ ID NO: 112549 - RNA, 76 nt, Homo sapiens
aaccagcaacgcagggaccgcggcggaacgggcagggaaaccggagcggcagagcagcgagacgacgggaccgaag

SEQ ID NO: 112550 - RNA, 80 nt, Homo sapiens
acgcggagcagagggagccgcccccgcggggcgcccggagccggccagcgcaccaaccagacagcagaacaccgaacagg

SEQ ID NO: 112551 - RNA, 59 nt, Homo sapiens
agggagccgcgcgccggcgcgcgccgagggggcacccgaggaggaagagggcagggccc

SEQ ID NO: 112552 - RNA, 74 nt, Homo sapiens
gcgacacacagacgggggagaaaagagcggcaaggccccagcggcgcacagggagcaggcgggagggacgaaag

SEQ ID NO: 112553 - RNA, 66 nt, Homo sapiens
agccgagcgaccacccaggggagaaggaccagaagaacccaggagaagcgagcaccaaggagaagg

SEQ ID NO: 112554 - RNA, 77 nt, Homo sapiens
gacagaccaagagggaagccaaggacgcgaacggcgaacaagagcaacgaggaggacccccccggaagccagaccga

SEQ ID NO: 112555 - RNA, 87 nt, Homo sapiens
ccggggcaggggaagagggggagacgggaggcagagcagagggggcggggaggaggacgcggggaagggaacgaaccaaaccaaaac

SEQ ID NO: 112556 - RNA, 81 nt, Homo sapiens
cgccagcagcccccagcccgccgccgccccgccgcggcgcacccgccccgcgccgcagaacaccagcaggaaaaaagagcg

SEQ ID NO: 112557 - RNA, 66 nt, Homo sapiens
acgcacagaaccgagaaacgggaccacaaaggagacacgaggaaggcacgggaagacacacaggac

SEQ ID NO: 112558 - RNA, 64 nt, Homo sapiens
gaccgcaggaagaagaccggaggccggaaccggacaagagaaacaggcccagcacaaaaaaaga

SEQ ID NO: 112559 - RNA, 73 nt, Homo sapiens
cggggcccgcgccgcgcgccggcggcaccagaagcagcggaggaaggccaacagacccacacccagaaaaaac

SEQ ID NO: 112560 - RNA, 74 nt, Homo sapiens
cccccgacacggccaagagcaccggcaagacaacagacacacaaagagaacaagaaagagacacgcacaagcgg

SEQ ID NO: 112561 - RNA, 72 nt, Homo sapiens
caccaggcccagaggccaggcagacccagccaaaccgccgccaccgcaagagaaaagcgggcccgagaacca

SEQ ID NO: 112562 - RNA, 80 nt, Homo sapiens
gacgagcgcgccaggccgacagccgcggccgggcccgaggcccgccagccacacggagcagcccaagagggagcaggcac

SEQ ID NO: 112563 - RNA, 78 nt, Homo sapiens
gaagaggaggagggagcgagcccgccaacaacacccccaagccacgcaggggaaagcgcgagcgagcacccggagcag

SEQ ID NO: 112564 - RNA, 74 nt, Homo sapiens
gccgcgcgcggcaggaggggccgcaggcggggaacagccggaaggcaacaccgggcgcgcacagaagggacaac

SEQ ID NO: 112565 - RNA, 67 nt, Homo sapiens
aacggcccaaggacacagcccgacagggcgaccgggacggcgagagcaggcgggacgagcccacaag

SEQ ID NO: 112566 - RNA, 59 nt, Homo sapiens
accgggagcggcgaagaggcaccggaggagacccaacagaggaagccgcaagaaacggg

SEQ ID NO: 112567 - RNA, 60 nt, Homo sapiens
cccaggggcagagcccccagcaccagaagaaaccaacagaagggccgaaacggagcagga

SEQ ID NO: 112568 - RNA, 84 nt, Homo sapiens
acaaaacacgggggacggggcgcacccccccacgagcgaggcaacgggccacccacgcagaccagcacaggaggggcgggccag

SEQ ID NO: 112569 - RNA, 80 nt, Homo sapiens
gaaggaacccaagcagggcgaagggaacgcaaggcccccgaccacacgcccgcgcgaggcccgcaggagcaaaacaaaac

SEQ ID NO: 112570 - RNA, 82 nt, Homo sapiens
gaggcgaggagaggggagcggggggcgccgcgccaaggaagagacaacagccacaagggacaaaaggaagacaagggagaag

SEQ ID NO: 112571 - RNA, 81 nt, Homo sapiens
gggagcagccacgcagagcggcagccacccgagaagaagggaccacgaagaaagaccgaagcaaaggaagaaggagcaagc

SEQ ID NO: 112572 - RNA, 77 nt, Homo sapiens
gagacagaaggccagacccggaaaccccgaaacagaagccaacagagggagcacagcgcggaagccccgaggcagcc

SEQ ID NO: 112573 - RNA, 70 nt, Homo sapiens
aagggcacagagagcagccacacccgggaaacacacccaagcacggcgcggaagcaggaaaggcagacca

SEQ ID NO: 112574 - RNA, 77 nt, Homo sapiens
gcaccagcccgacggccccacgggccccgcaaacaccaccacggcccccggaaaggcccgaagcccgcccagaaacc

SEQ ID NO: 112575 - RNA, 77 nt, Homo sapiens
ccccaggaccagcccacagaggccaaccaggaaggagaagcagaaaacaccacaggagagagagccggaagagccgg

SEQ ID NO: 112576 - RNA, 67 nt, Homo sapiens
acccaaaagccccccacagaagaaggacaaccaggcaaaaaaaagaaggaaaaggggagaacaaagg

SEQ ID NO: 112577 - RNA, 70 nt, Homo sapiens
gagcacagccgcgaagaccagaggcgcccggcgcaggccaaagggcccccgaaccagcgaaaacaaaccc

SEQ ID NO: 112578 - RNA, 74 nt, Homo sapiens
agaccaccaccgaagagcagcagacaacaccaggaacgagccccgccgggagaggacaaagaagcggaggacgg

SEQ ID NO: 112579 - RNA, 57 nt, Homo sapiens
cgcccacaccagaagcagagccgcaaagccagacccagaagaagaaaggccacccaa

SEQ ID NO: 112580 - RNA, 76 nt, Homo sapiens
gccaccagggaccaccgaacaaaaccaagccgacccaagggacaagaacaacacacgaagccgccgcgcccaggcg

SEQ ID NO: 112581 - RNA, 78 nt, Homo sapiens
cgacaagaaggcagcgaaaggacacgggagaaagggagccgagcgagaccacgcaccacgggcgagccaagcaagggc

SEQ ID NO: 112582 - RNA, 75 nt, Homo sapiens
cccagagagaaaccccagcaggaaccggaaaaggcccgagcccccaacgcaggcaacaccggacaggagagacga

SEQ ID NO: 112583 - RNA, 75 nt, Homo sapiens
gacaccggggaccggacagcagcagggaaaaggccagccagcacacccaccaccccaacccggagagagggaaga

SEQ ID NO: 112584 - RNA, 82 nt, Homo sapiens
ggggggcgcgcggccgggccccgggcgggaccccaacgggacagagaggagccacaaaaccgacaggagggccgccgaaggc

SEQ ID NO: 112585 - RNA, 64 nt, Homo sapiens
gacacggggaagaagcccgcaaaaacccaaggacaggcaggacaccaaggcgccccacccgcac

SEQ ID NO: 112586 - RNA, 84 nt, Homo sapiens
cccaaccaccgacaacgccccccaaaggaggggggacacagcgagccacgcgccaggaagcccggccaaggagccaaccgcgcg

SEQ ID NO: 112587 - RNA, 68 nt, Homo sapiens
ggaagaggcgccccacagacggcacaagaagaggcaagcagggagcaaaagagacaggacacaacgcg

SEQ ID NO: 112588 - RNA, 74 nt, Homo sapiens
gaccgggaccgccgccgccgccgccaccagacaacggcaagcggagaagagcaaggccgaaccgagaggaaggg

SEQ ID NO: 112589 - RNA, 69 nt, Homo sapiens
agggccagggggccggcagcaagggcacgaaccagacgcgggaaagcacggaaggaggccgaaggagag

SEQ ID NO: 112590 - RNA, 85 nt, Homo sapiens
aggaccacaagaagaaaagggaaagcagcagggccaggaaaggacaaaccggcgaccacacacggggacgacggggaagccggac

SEQ ID NO: 112591 - RNA, 73 nt, Homo sapiens
caccccccagagaaaggagagcggccgcaagcccacgggcgggccccggcgagcacacgcacacgccaccacg

SEQ ID NO: 112592 - RNA, 73 nt, Homo sapiens
gcccagcaaagagaagaaggaggaagcccgacagaaaagggaaggagccgagacggaagcacgcaacaggacc

SEQ ID NO: 112593 - RNA, 35 nt, Homo sapiens
acagcgcaccacccgcagaagagaccgacccaaac

SEQ ID NO: 112594 - RNA, 78 nt, Homo sapiens
ggggagccaaggaaacaggagcgaagcccagcgggccggacggggcggggggaacgaggggaaagaaccagacgacag

SEQ ID NO: 112595 - RNA, 48 nt, Homo sapiens
cgacagaggcacaaaaagcggggaccacaccacacagcacccgaaaga

SEQ ID NO: 112596 - RNA, 64 nt, Homo sapiens
agccaccggagcaaccacaacccgcacacaggaacagagccagaaggagaagaaaaggccggaa

SEQ ID NO: 112597 - RNA, 77 nt, Homo sapiens
cggggcgcgcggcgccggcggcgcgcgacccccgcgcagacaacaggcacaaagagagaaggaacacccacagggca

SEQ ID NO: 112598 - RNA, 56 nt, Homo sapiens
caaagagcgccccacgagagaacggcacacgcgagcggggccgcaaggccaggcgc

SEQ ID NO: 112599 - RNA, 71 nt, Homo sapiens
ggccgaggccgccccgagcgccagccgggggggcccggggccaggccggaagacacaaggcagcaaaggca

SEQ ID NO: 112600 - RNA, 81 nt, Homo sapiens
gcgcggagggagccgcgggaggaccgcaggcacacccggggaggacacggacgcagccccgaccaggccgccgcacccccg

SEQ ID NO: 112601 - RNA, 78 nt, Homo sapiens
accgcaccagaggacccacgggccagggagagccaaagcaagccaccagggaaaaggagaaggaagaacagcaccaga

SEQ ID NO: 112602 - RNA, 88 nt, Homo sapiens
gcggcgagcgggggcggagaccaggagaccccacggagcgggcgacgagcgacccgggagacacgacgccggaggacggaggagagaa

SEQ ID NO: 112603 - RNA, 65 nt, Homo sapiens
cacacacaccaccggcggaaggccgagcccacagagaggaagaacccacaaaagccaagaaagaa

SEQ ID NO: 112604 - RNA, 67 nt, Homo sapiens
gccgcagaagccgcccacaacccccgacgggcgaacagcgacacgaaaggaagcagacgagaaggca

SEQ ID NO: 112605 - RNA, 90 nt, Homo sapiens
gaagaagggcagcccagccagcggagcccgaggacgcagccgggccaggcaggggcggaggcccgccccccacagcccacagcaccggcc

SEQ ID NO: 112606 - RNA, 76 nt, Homo sapiens
gggcccaggcccgcgaccgccgccagcgcccgagagcgacgccgacaaaggaggaaaagaagagaccagcgcagca

SEQ ID NO: 112607 - RNA, 58 nt, Homo sapiens
ccgacacaacccaggcaccaggacacacgaccgaaagccgcggaggcaagaaccaccc

SEQ ID NO: 112608 - RNA, 69 nt, Homo sapiens
ccgagcccccgaaacaaccaaccagggaggaaggaacggcccgggcccggaggcagcagacggcagaag

SEQ ID NO: 112609 - RNA, 58 nt, Homo sapiens
cacaggccagaggagcacacacaaagaggacccgacaggccaggagggggccacaccg

SEQ ID NO: 112610 - RNA, 65 nt, Homo sapiens
agcacggcggcgagggccaggaaacggagcggggaaggacagaccaaacacccccgcaaccagcg

SEQ ID NO: 112611 - RNA, 60 nt, Homo sapiens
cagagaaaagaaagaccccgaagaagaagacgaagggccaagagggaaaggagagagagg

SEQ ID NO: 112612 - RNA, 74 nt, Homo sapiens
cagccaaagaaaccagacccaccgagcgggaaggcacgaaccagcacgggcagagacagccacaaaccagaggg

SEQ ID NO: 112613 - RNA, 127 nt, Homo sapiens
caaggcacaagcccccggggagagccccaggaggaccacgcaccggaaccccaccaagcggggaaggaaccagaaagagacaagaagggaccggcgcgggggacccaccacccccgaccacagcccc

SEQ ID NO: 112614 - RNA, 70 nt, Homo sapiens
ccggaggcggggagaccccgcaccaggacagcgcagaccacaccaggaccgcagaggaagagaggccgcc

SEQ ID NO: 112615 - RNA, 89 nt, Homo sapiens
cgccccgcgagcacagagcccgccgccgaccgccgcccgccacacccgccgccaggggacgcggacgcaacagggaaaggagaccccaa

SEQ ID NO: 112616 - RNA, 69 nt, Homo sapiens
gggcgcaaaggcaaaagcggagaacaagaaggaagggccaggagagagagcaacaaaaacacacagggc

SEQ ID NO: 112617 - RNA, 72 nt, Homo sapiens
aggaaccaaggaagagaaaccagagggacgaaaaggagcagcgaggaaggacaacaaaagaccgaaaagaag

SEQ ID NO: 112618 - RNA, 102 nt, Homo sapiens
ggcagggaggaaggggggagggggaggagccgaacgagccccagccagggggcgggacgagcaggccccggggcggcgccagagacccagaggccgcacagc

SEQ ID NO: 112619 - RNA, 69 nt, Homo sapiens
gaagacaccgccagagacgccgagcaaaagcccagaagggaggaacgagagaccgaaccgaaaagggcc

SEQ ID NO: 112620 - RNA, 80 nt, Homo sapiens
ccagcaggaccccgaggacgaaggggagcgggaggagcgggggccgccggcggcccggccagggccccccccccccgggg

SEQ ID NO: 112621 - RNA, 88 nt, Homo sapiens
agccacaccaccaaagaggaggcccgccccaggacccccacaccaccccaggacacgcccaagcaagggagccaccaccagaagagga

SEQ ID NO: 112622 - RNA, 80 nt, Homo sapiens
cgacccgggacgcccccgccagccgagcccccgggccgacggaacaagaagacgcagaaccgcaacgggagaaggaaaca

SEQ ID NO: 112623 - RNA, 69 nt, Homo sapiens
gaaggcagaccgcccagcggcgggacacaagagaggaaacccccggaagcccccacagagagcaaacac

SEQ ID NO: 112624 - RNA, 79 nt, Homo sapiens
gcgccgcacgcccaaccgcgaggccagggccccccacgcgagaacccgggccggggcccgggggcccgagcccccaccc

SEQ ID NO: 112625 - RNA, 76 nt, Homo sapiens
ggaacaacacaccagaggggacggaaagagagccgcagcgcagaacaagggaaaaaagggcaaaaagggcaaaaaa

SEQ ID NO: 112626 - RNA, 72 nt, Homo sapiens
ggaccaagaaccaggcaggagaggaggagggcccgccccggcggccacaggcaagccccccacgcggggaag

SEQ ID NO: 112627 - RNA, 84 nt, Homo sapiens
gcggagccgcgggccggcgagcgcgcgccaccagacaagcagaccggaagaccgacggaagaccacaccccgagggagcccagg

SEQ ID NO: 112628 - RNA, 109 nt, Homo sapiens
caagggaacgaacggcagagaagggacggcaagaaacaacacaaagaacaggagcggacaagagaaaaaggccaggagaagagaagaagcagccacaagagccaaacca

SEQ ID NO: 112629 - RNA, 35 nt, Homo sapiens
gcagaccccgcaaaaaacgccagagagacaggacg

SEQ ID NO: 112630 - RNA, 48 nt, Homo sapiens
caaccaagcaccggagaaaacccacggggcaggcccggacccaggggc

SEQ ID NO: 112631 - RNA, 65 nt, Homo sapiens
ccccaggagaagagccagagcgggaggacgacgagagagcgccagaggaagaaaaaagcccaccg

SEQ ID NO: 112632 - RNA, 71 nt, Homo sapiens
ggacgcggaacacccagaggccagcacaacaggccacacgccccacccaccaccccgccaccacccgaaca

SEQ ID NO: 112633 - RNA, 114 nt, Homo sapiens
cacagcgaccgggccaccgaaagcccgaagaccaacccaggccgcgccaaccaggcaccacagagggagaccgcccccggggcgagagaccccaaccccccaagcgaagcgcag

SEQ ID NO: 112634 - RNA, 54 nt, Homo sapiens
gacgccacaaacacccaccacagcagaggcgcccagaaagagcgccggaagcag

SEQ ID NO: 112635 - RNA, 80 nt, Homo sapiens
cggccgcaggccaccgacacgagacaaccgggagccgggcaagccaacgaaaaagggaaaaccaggaacagcaaaaaaac

SEQ ID NO: 112636 - RNA, 62 nt, Homo sapiens
cgggacgcgcgcgggcacccacggagccccggggcgggggcccacgagaagagcaggcgacg

SEQ ID NO: 112637 - RNA, 69 nt, Homo sapiens
ccgaggggggggcacagccacaagaacagaagcaaagcacaccagaaaaaaggccccaggggcgccaca

SEQ ID NO: 112638 - RNA, 85 nt, Homo sapiens
cggagacaggaccgcggcgagcaagcacccaggccacagaggaggaaagagaggggaaagaagcagccaagccccaaggaaccac

SEQ ID NO: 112639 - RNA, 66 nt, Homo sapiens
cgcgcagggggaacagacacaaggcccaggaaaaagggccgcccccgccagaaaagccgaggcccc

SEQ ID NO: 112640 - RNA, 78 nt, Homo sapiens
aaaggcagcaaaggcgagcaaaacaagagaacacacggaccaaaggaggaagcaggccaggggaagccaggaagggac

SEQ ID NO: 112641 - RNA, 53 nt, Homo sapiens
cgccaggacaacccaccaaggcaccccacacagggcacagaccccacgcaccc

SEQ ID NO: 112642 - RNA, 65 nt, Homo sapiens
cgcaggcagacaaaagggccaaagaagggagagagccaagaccaagaccccaggagagggaaccc

SEQ ID NO: 112643 - RNA, 77 nt, Homo sapiens
gaaaggaacagaacgcggccccagccacaccaagcagaaagagcacgaggcgagcggggagacccgagagaccaagg

SEQ ID NO: 112644 - RNA, 60 nt, Homo sapiens
ggaacccccacggcgaagccagcggacgggcagggcccagcacaccccgcaacccgcgca

SEQ ID NO: 112645 - RNA, 70 nt, Homo sapiens
gccgccgaccccccggcgccgcgccggcggcgcagccaagggaacgcggccgaccgagacccagcggcag

SEQ ID NO: 112646 - RNA, 69 nt, Homo sapiens
gagcgcacacacgacaggagaaaggaggccaccggagagaagacagggacgcaagggcagccgcgcgaa

SEQ ID NO: 112647 - RNA, 104 nt, Homo sapiens
ggaagagcccagggcgagccccacagcggaacacacaacacacaggggcacgaaacgaaggaggcccaaccacaaaaggagccgacggaacccagacggagaac

SEQ ID NO: 112648 - RNA, 74 nt, Homo sapiens
gcccggcccgggcgagaaaacggaaaaacgggagcccaagaaaccacacccgacggggacgcaccagagacggc

SEQ ID NO: 112649 - RNA, 70 nt, Homo sapiens
caagacggggcgccccacagaggggcgacggaagcagaagacagcgacagcacaaacgcccagacaaggc

SEQ ID NO: 112650 - RNA, 74 nt, Homo sapiens
ggcacagacaccagaaacaacagacagcgggcagaaacccgaacccagcggagagccaaagggagcggacaaag

SEQ ID NO: 112651 - RNA, 84 nt, Homo sapiens
gagcgggcaccaggaagcgaaggcggaccgggcaaggagggacagcccgaccaagcccggaggagaaggcggggccgacaagcg

SEQ ID NO: 112652 - RNA, 86 nt, Homo sapiens
cgccgcggccaggcagggaggagaccggcacccagacaggggcgaaggcagaggaggagaccgaaggaccaccggcagcgggaaaa

SEQ ID NO: 112653 - RNA, 71 nt, Homo sapiens
aacgacaagcaagcagggcacggaaaaccgcagcaggaagcgggccgccccaagagggaacaggggcgggg

SEQ ID NO: 112654 - RNA, 76 nt, Homo sapiens
gggcgcgccaccgcaaaggcccgcgcaccgccagggaagaaacggacaaacggaaggagcacacagacaagccagc

SEQ ID NO: 112655 - RNA, 113 nt, Homo sapiens
aggacggcgccaagacccagagccagaccagcaggaccaaccggaggcccgccaggacccaggggcgagagaggggaaacaccacgagaagcaaggcccgcagccagggggcc

SEQ ID NO: 112656 - RNA, 55 nt, Homo sapiens
cccaagaagggaggagaagacagccagggaggcagccgccacaggcgagggggaa

SEQ ID NO: 112657 - RNA, 71 nt, Homo sapiens
aggagcggcacacccgaaggaagcgcgcccaggggggccgggaggcaagcagggcagcaagcaggagcgga

SEQ ID NO: 112658 - RNA, 64 nt, Homo sapiens
ggaaaagccaacgccggcgaagcggccaagggaggccgccagccgaggcgaggagcgggggagc

SEQ ID NO: 112659 - RNA, 79 nt, Homo sapiens
gcgccccggccgaggggcggcggccccagaagacgaccccgacgcaggccaggagccgcggacagaagccgagcacggc

SEQ ID NO: 112660 - RNA, 72 nt, Homo sapiens
caccgcgggagaggacgccccacggagaaagagagcccacggaaaaagaagccaacaaggagcagcccaaag

SEQ ID NO: 112661 - RNA, 63 nt, Homo sapiens
ccgaagccagacagcaaggaacgagcaccacaagagcaccggacaaggcacgaggcgcggcga

SEQ ID NO: 112662 - RNA, 73 nt, Homo sapiens
aaaagaggcaaaagaaagggagagcacagaggggaacagacaggccccagccgcagccaacaagccaaaggaa

SEQ ID NO: 112663 - RNA, 76 nt, Homo sapiens
aggaaagagaagacagcaagcaaacaccaggcgacaaggaaaagaaaccaacaccaacacgcagagaagcaaacaa

SEQ ID NO: 112664 - RNA, 50 nt, Homo sapiens
agacgcgaaacgccaccaacaccccacgagcgagcggagcggcaagccac

SEQ ID NO: 112665 - RNA, 89 nt, Homo sapiens
ggggggcggaggaggggggggaccacacaacaccccagcaaaccccgggcccccaggcaggcagccggaggccgagcccgaaacaaccc

SEQ ID NO: 112666 - RNA, 69 nt, Homo sapiens
cgcaaaaaggaaagagaggcaggaggagagaccagcagcaaacccacgcggcgcaccgcacaccagcgc

SEQ ID NO: 112667 - RNA, 77 nt, Homo sapiens
gccgcacgaagccggcccgaagccgacccccgcaaggaagcgcaggcgagaaaccagacggagacgggagagcgggc

SEQ ID NO: 112668 - RNA, 68 nt, Homo sapiens
gagcgccgggaacaaaaccagcacccaaggcagccggaaacgaggggcaggaccaagcggaaacggaa

SEQ ID NO: 112669 - RNA, 74 nt, Homo sapiens
acaaacagcaagcacgacaagcagcacaccaagagcacacaggacagacccgagaaaccggacagcagaggaaa

SEQ ID NO: 112670 - RNA, 83 nt, Homo sapiens
gcacacacccgcgcgcgcccgggaggaaggaacgaggcaaggagcaaagcagcggcgcagcccggggcgggcacgaaaggaaa

SEQ ID NO: 112671 - RNA, 77 nt, Homo sapiens
gccggccccggggagaaacgccaagaaaaccaggcccgacagcaagaaaaaaggagacggcggccgcacagacacca

SEQ ID NO: 112672 - RNA, 79 nt, Homo sapiens
aaacgagcgcaacaaccgggcaaccacaacaggccgaggacgaagacgacggggagacagcggaggagcgggaccaggg

SEQ ID NO: 112673 - RNA, 68 nt, Homo sapiens
aagggaacgggggagagaagccacaaagcaagcaggcccaaaggggcaggacaagacagaaggccaag

SEQ ID NO: 112674 - RNA, 56 nt, Homo sapiens
caaaaggaggaggagagacacaacaggaccagggaaggaaaaccaaaagagaaaga

SEQ ID NO: 112675 - RNA, 75 nt, Homo sapiens
gaggggacgccgcccgccgcccgccgcaggccacccgggaacggaggagggggaaagaggcaagaccggaaaggc

SEQ ID NO: 112676 - RNA, 76 nt, Homo sapiens
aaaagggagccggcggagaacagacaaaccaccaggacccacacaggagcaaggaaacgaccaacaccaaccacag

SEQ ID NO: 112677 - RNA, 74 nt, Homo sapiens
gccagagcggaccggggcagaccaaacggcaaggagcagaagacagagggaggagggccacggacaaacacggg

SEQ ID NO: 112678 - RNA, 82 nt, Homo sapiens
aggccggccgcggaacgaaaggaacaggagccgccaggcgacacaccggaagcaggaaccagcaagacgcaacccagcgaca

SEQ ID NO: 112679 - RNA, 80 nt, Homo sapiens
caaggcggcagcgccgagcgaacagagaacagcgccggaaaaccaccaccccagacagccacaaccaaagcccggagacc

SEQ ID NO: 112680 - RNA, 60 nt, Homo sapiens
cagacccaacggaaacaagcaggaccaggaccagcaaggacaaaacacggcaagcgccac

SEQ ID NO: 112681 - RNA, 73 nt, Homo sapiens
aaaaagggcaggaaccacgaaggacagaagacaccacagagaaccagaccaggaagaacgcgccacgccaaaa

SEQ ID NO: 112682 - RNA, 55 nt, Homo sapiens
gggccccaacacccagagacgaaaggacaggacaaagcccccagaacaccgggga

SEQ ID NO: 112683 - RNA, 69 nt, Homo sapiens
cggacgggcaaaaggaggaccggccaaaccaccaagaaaggagaagagcaaccggacacagaaggggaa

SEQ ID NO: 112684 - RNA, 63 nt, Homo sapiens
gggaccaggcccgggggcggcggccacgccaaggacggacggccagcccccaggaaagagaaa

SEQ ID NO: 112685 - RNA, 78 nt, Homo sapiens
ggacgaccggagacccgccacaccaggacccggcgggggcaaggaagcacggaggcccgggaacaaggacaacgccac

SEQ ID NO: 112686 - RNA, 81 nt, Homo sapiens
gcgcgcgggaccgccaccgggcggggccgcggcggcggagcgggcacgagggaacacaagacccgcaagcgagcagggccc

SEQ ID NO: 112687 - RNA, 82 nt, Homo sapiens
ccgcccggccgagaccccgcgggagcggaagaagagcaccaaaaagaacagaaaagaaacccacagccacggagaaaaagaa

SEQ ID NO: 112688 - RNA, 73 nt, Homo sapiens
gaggcagcgaagcccgcacagcgaccagggcaaccgggaccagcgagcgacaggccagcgaagacgccagagg

SEQ ID NO: 112689 - RNA, 78 nt, Homo sapiens
gcgaggggagcaccaggaccgggccggaacgagacgcacgaggcgcgaacagggcccacccgccacgacacaggggaa

SEQ ID NO: 112690 - RNA, 59 nt, Homo sapiens
acggccggcgccacacgggaagggacgccgagcaccggcgccagagacgaggacgcgca

SEQ ID NO: 112691 - RNA, 81 nt, Homo sapiens
acaagggaagcgagggagcaaacaaggggaaaggaaaccaaaccaggaaagaaggacaaggagcgaggagaaagagggaca

SEQ ID NO: 112692 - RNA, 56 nt, Homo sapiens
acacgaggcaggagacgagaccaccggcaacacgaagaagagccgccccacacgca

SEQ ID NO: 112693 - RNA, 78 nt, Homo sapiens
gaagcggccccagcccgaaagcaaccgggcgcaggccacaggaaaagaaggaggccagcgggacacacaaagaaagac

SEQ ID NO: 112694 - RNA, 84 nt, Homo sapiens
ccgcccaggggccaggcgaagcacgagcagaccggcccgaccgcccacagacccaaacaaagaccccgcgccaggaggaccgca

SEQ ID NO: 112695 - RNA, 81 nt, Homo sapiens
aggcccccagacccaagaagagccggaagcaaacccaccccgaacgcagaaacaggcaaagggggaacaagcggaagcgag

SEQ ID NO: 112696 - RNA, 67 nt, Homo sapiens
gcggccaggaggcgggaaagcgcgaaacacaaccgagcgggaaggcagagccacccaagcgaagccc

SEQ ID NO: 112697 - RNA, 69 nt, Homo sapiens
gcaacaaggcggaaaaagacaccaccaacggaaaacaacacagacaacaggcacaaagagagaaggaac

SEQ ID NO: 112698 - RNA, 78 nt, Homo sapiens
gggaagaagcagggcagaggaccaggacgcggcggcgagccaaggggaaaggagcaagaagacacccacaggaagaga

SEQ ID NO: 112699 - RNA, 81 nt, Homo sapiens
aagagggagaaggacaccaggcagaggcaagagacaccagacaccaacgaaaggaaaaaagcaaagaagagccacccaaga

SEQ ID NO: 112700 - RNA, 112 nt, Homo sapiens
gggggaggaagcccccccggcacgacaccgccccaacccacgagaggacagcccaggcgccggaggggagaggagcaaacaacaccccgagccaccaccacgggacagcacg

SEQ ID NO: 112701 - RNA, 57 nt, Homo sapiens
gacgccaccgggaggggaccggagccgccagcgcggccagagaccggcagcaaagca

SEQ ID NO: 112702 - RNA, 78 nt, Homo sapiens
gaaaagagaggagcaaacggggagcacaacgggggcggagccgaagcgggcaaccccaggccgggggagagagacgcg

SEQ ID NO: 112703 - RNA, 53 nt, Homo sapiens
cggcccccaacgacaaaagcagggcgacagccaggaagccacagacccaagga

SEQ ID NO: 112704 - RNA, 77 nt, Homo sapiens
agccagccagaaaaaacacagccgacagacgccaccaaaagcaccaggcccggagcacacaaggcgaaagaaaaggc

SEQ ID NO: 112705 - RNA, 78 nt, Homo sapiens
caaagggacgaaggggcaccggacaggcaaagaacggacacgcccaccaagaaagaaccggaaaggggaccgggccag

SEQ ID NO: 112706 - RNA, 80 nt, Homo sapiens
caccaaagcagagcaagaaccaagaaggaaggaagccgaaagccaaacaagagaaggccaaggaaaaggaacagagagag

SEQ ID NO: 112707 - RNA, 70 nt, Homo sapiens
agagaagaagaggaccaacagaaacgggaggaggcacgagaccaggacgaggagaaaagaagaaacgaag

SEQ ID NO: 112708 - RNA, 78 nt, Homo sapiens
cgcagacaggacaccaaacaccgccgccggcgagaacgcggacaagcaaacaaagaggaaaaagagggcaacagcgaa

SEQ ID NO: 112709 - RNA, 71 nt, Homo sapiens
gagaagaacaaaagaacagaaaggccgcaccacaacccgcacagagacaacggcaagcggagaagagcaag

SEQ ID NO: 112710 - RNA, 55 nt, Homo sapiens
aagaaccgcagaaagggaaacacacacagcgggggccccccaagcaccagacagc

SEQ ID NO: 112711 - RNA, 94 nt, Homo sapiens
acgaggacccagagagccacggggacaggagaaccaaaggagccgccgcgccaggcggaggcagcgacacgacggccacgcaaaccgccccgag

SEQ ID NO: 112712 - RNA, 40 nt, Homo sapiens
ggaaagccaagcggaaacaaggaacaaggcacaaggagag

SEQ ID NO: 112713 - RNA, 76 nt, Homo sapiens
gccaacgcccggaagaaaggcccagaggaggaagccgcagccaagcaaaaaaacccagggaccaggaaacgccgga

SEQ ID NO: 112714 - RNA, 117 nt, Homo sapiens
gcaagcagaaaccgggaagggggcgccggcggacgcacccggacgcaaagcgcacggaagaggaccccgcagccccgccacagacagccaaagagaagccaggcggggcagaagagg

SEQ ID NO: 112715 - RNA, 81 nt, Homo sapiens
cccccagggagggaacaaagcccacagcaccggccggcaaagcaccaggcacagcaagcgccgaaagaccagggaaaaaac

SEQ ID NO: 112716 - RNA, 72 nt, Homo sapiens
ccaaagaacccacacaaggacaaggggaagagcgaaagagagaagcgacaagggaccaggaaagcgaagggg

SEQ ID NO: 112717 - RNA, 59 nt, Homo sapiens
cagaaaacaagagaccacagaaggaggggcagcagcaggacagggaacccgggagacag

SEQ ID NO: 112718 - RNA, 101 nt, Homo sapiens
cgcccgggccagcggccgcgcacccccggccggaggcaccagcgcgagaaccacgccgacaacggcggaagaggaacgggaacggggaagaagagcggcgc

SEQ ID NO: 112719 - RNA, 72 nt, Homo sapiens
aaaccagcaacaaaaagaaagcgcgaaggcaaagcagaggaagaacagaggggggggaagagaaggcagaac

SEQ ID NO: 112720 - RNA, 78 nt, Homo sapiens
cgagagaaaaagcagcaagagacaggcagaagaaagagaagaccaaaccagggggagacgccgcaacaaagccacaag

SEQ ID NO: 112721 - RNA, 60 nt, Homo sapiens
gaacagagccaaaccagaagaggagggcccagaagaaaaagcggcacagccagggaccag

SEQ ID NO: 112722 - RNA, 67 nt, Homo sapiens
gacacaggaaacaagagaggacgcgggccgcgcgcacaagaggaacccccccaccaccggaaggccc

SEQ ID NO: 112723 - RNA, 86 nt, Homo sapiens
cggccggccaggaggcgaggggccggcgagcagagagaccgcaccacccggaaaacgacagaagcacgacaacaacgggcagcaag

SEQ ID NO: 112724 - RNA, 73 nt, Homo sapiens
aggaagggcggaccaaccacggcaaaccaacaaggcgagcagacaccgcaggaaagggcaaaggacgcggccc

SEQ ID NO: 112725 - RNA, 57 nt, Homo sapiens
cccccgcccgaaccgagggaacagggccacccccaaccaggaccaaagacgaccacc

SEQ ID NO: 112726 - RNA, 77 nt, Homo sapiens
cggcggggaggagcggaccgagggcaacaggggacaggcacccgcggccggaaaccaaccagaaaggacgggcaagg

SEQ ID NO: 112727 - RNA, 82 nt, Homo sapiens
agccaggagcagagcgacagcggcgagcagaacacggcgagcgggggggaccaaggcaacgaacacaagcagcgggcaacaa

SEQ ID NO: 112728 - RNA, 72 nt, Homo sapiens
caagaaagaacgagggcagaggaaccgaccaacggaaagccgaaccaaagacaggaggaccaacaggcgcca

SEQ ID NO: 112729 - RNA, 78 nt, Homo sapiens
caaacaggcccccagaagagcggagagacgaaagaggggcgcccgagagccgaagcacagggaaagcaacgaagggag

SEQ ID NO: 112730 - RNA, 41 nt, Homo sapiens
aggacccccaggcaccagcgagcaaaagcagaccggaaaac

SEQ ID NO: 112731 - RNA, 79 nt, Homo sapiens
cacccacccacgaagggaggaaaagggcagggacagcgcaggcagcaggacggaaaaaaccgcacagagaagaacagac

SEQ ID NO: 112732 - RNA, 79 nt, Homo sapiens
acgagcagggagcaggacaagccacccccaggaccaggagagaagcacagccagggcaacgaagaggccccgagaaagg

SEQ ID NO: 112733 - RNA, 78 nt, Homo sapiens
agacacggccgaaggcgaacgccgcggccaaggagccgccaaagccagacggcgagcacacagagaggggaagggcag

SEQ ID NO: 112734 - RNA, 79 nt, Homo sapiens
gaccgagcacaccagaaggagacacaccagcaggcaggcagggccaacgggggcgacccgccaggaaccaaggcacgcg

SEQ ID NO: 112735 - RNA, 78 nt, Homo sapiens
gaggaagagggggcacccagcacacccaagacgcggcaacagggcaccagccgaccacccaacagcgggagacaaccg

SEQ ID NO: 112736 - RNA, 77 nt, Homo sapiens
cgaagaggacaggccagacgcagcaaggagaacccgaagacacgaggccacgcgagggaccagaggcagaaaaaggc

SEQ ID NO: 112737 - RNA, 56 nt, Homo sapiens
aggccacgcaggcgcaacgcaaagaccagccacgaggaacaaaaaccggagacaga

SEQ ID NO: 112738 - RNA, 75 nt, Homo sapiens
gccagaaagaagccacccagagagaaccagcccagaagaacaggcggcgggcagagcgaggcagaaagaggagaa

SEQ ID NO: 112739 - RNA, 68 nt, Homo sapiens
agcagaggggcgagcaggagcgaccgcgccaaacaggaccgaggaccggaagaagcagaggagccaga

SEQ ID NO: 112740 - RNA, 67 nt, Homo sapiens
ggcgccgcgggcccgcgcccggccggacccgggcccgaggaacgcacaccagcaccagcccaccaaa

SEQ ID NO: 112741 - RNA, 74 nt, Homo sapiens
cagggcaggacaccgacaggaacagggaccacggggaagagagaagaagcaaaccgggaccggaagcaccaagg

SEQ ID NO: 112742 - RNA, 80 nt, Homo sapiens
gcggcggccgggcccccacccccagaccccaagacagcgggcgcgaccaaggaaacaaaggacaccagaggcaccagccc

SEQ ID NO: 112743 - RNA, 79 nt, Homo sapiens
gcagcccgaaggcggccaaaaagaggggagacacccagggaggcagaacaagaagggcaaccaggggggaaggagggag

SEQ ID NO: 112744 - RNA, 80 nt, Homo sapiens
aaagacacccagacagagagcccgggcaccgaccaagacgacgcccaggcggacacaaccccaaggcgggacagcaagac

SEQ ID NO: 112745 - RNA, 66 nt, Homo sapiens
agcgaacgaagagcaccgggagcggcgaagaggcaccggaggagaaaaccagaaggcaccgacagg

SEQ ID NO: 112746 - RNA, 78 nt, Homo sapiens
gaagaggaacgcccgggaaacaaacacgaggggacgacccaccggagcccggacgcgaacaagagaggcagccccggg

SEQ ID NO: 112747 - RNA, 62 nt, Homo sapiens
ggaggcgcccacccccaccaccgaccgcgcacaaaggggcggaggaagcggagacaacacgc

SEQ ID NO: 112748 - RNA, 35 nt, Homo sapiens
gcgccacacccacacacaagaccgggcagacaaga

SEQ ID NO: 112749 - RNA, 58 nt, Homo sapiens
gacccggggacggcacccagaggaccaggcggcgcagcaggcgagaggcagaacccgg

SEQ ID NO: 112750 - RNA, 58 nt, Homo sapiens
gggcgcggccccaagcccccgcccggggccgaacagcaggagggacggggggaacaac

SEQ ID NO: 112751 - RNA, 114 nt, Homo sapiens
gacccgcccggaggggggccgccccagccacccacgcggcccgcaggaggacaagagcaaaccgcagaagccaccgagcgccggggggcggcgcggcacgcgcaagagccagcc

SEQ ID NO: 112752 - RNA, 79 nt, Homo sapiens
cgcaggagacccgccaacaagcgggaccgagcaggaaccgacgggaacagggggacggcgcgaagaagagaagacagga

SEQ ID NO: 112753 - RNA, 57 nt, Homo sapiens
ccaccacggaacaagcacaaggggaaggagaaaaaagcagcacacccaccggccaga

SEQ ID NO: 112754 - RNA, 85 nt, Homo sapiens
ccgacggcacccgaacgcagggagcgccgcggagaggggccggcgcccggcggggacgcaggacccaaagacaggaccacgcacc

SEQ ID NO: 112755 - RNA, 65 nt, Homo sapiens
ggccccgcgcacaggcggggagcgcacgcccggccccagaggaagaagccaagccgcgccaagac

SEQ ID NO: 112756 - RNA, 75 nt, Homo sapiens
ccagaccccaccggagaagagcagaagggggcgcggggaggagcgaagagccaggaggaaaaggagaaccacccc

SEQ ID NO: 112757 - RNA, 66 nt, Homo sapiens
cacaagagaacaagagaagcaggcagaagagcacacacggccggaagaggacgaaccagaagaagc

SEQ ID NO: 112758 - RNA, 82 nt, Homo sapiens
ggcggagcacccaccacggagggaaagaccaggcaggccagcgcgcaggcccggaggagcgggaggccagaaacaaagagca

SEQ ID NO: 112759 - RNA, 74 nt, Homo sapiens
caccggcccgccgaaaacagaacgcccgaggagaggcccccccagcgcccggaaacggacaaagaaaagggaga

SEQ ID NO: 112760 - RNA, 53 nt, Homo sapiens
ggaggcacccgggaccagccgggggggaaggagaacgacggagccagaggggg

SEQ ID NO: 112761 - RNA, 67 nt, Homo sapiens
cacccgcgcaggaaaagagacagagggcaaagccgaagagacgccaagaaagaaccgggaccaggga

SEQ ID NO: 112762 - RNA, 73 nt, Homo sapiens
caaagaaagaaacaagcggcaagagaggcaccccgaagaggcgaggagcaacccaaaaaaccacagaccagga

SEQ ID NO: 112763 - RNA, 44 nt, Homo sapiens
cagcggggacgcggacgcacgggcgccacacggaccccccgaaa

SEQ ID NO: 112764 - RNA, 77 nt, Homo sapiens
ggggggccgggaagcaggccggggacgaaaaaggcggggagacaaccccccccaagaagcgagggacaagcacgacc

SEQ ID NO: 112765 - RNA, 78 nt, Homo sapiens
gcagaaccagggcggcggccagcgccacgcgaaacaaacagaagcgcacgagaacccaggccgcaaggaacgaaaccc

SEQ ID NO: 112766 - RNA, 56 nt, Homo sapiens
agggggggaggaggaagacggagccaagaccacagaaccaaggagagacacacgga

SEQ ID NO: 112767 - RNA, 89 nt, Homo sapiens
gcgccaccaccacgccagccgcaccagccgcccaagccgcacagccgcggcggcagcagcaggagagaggggggcgggccgagcacccg

SEQ ID NO: 112768 - RNA, 71 nt, Homo sapiens
gcagaagccagcgggccggaggcgcaacccccagagcgggccaacagacgggccacaggacagcggcacga

SEQ ID NO: 112769 - RNA, 70 nt, Homo sapiens
agcccaaggagcggaagcgagaaacgacgccgccacccgggaccacacgcacagacccgccaagcacaga

SEQ ID NO: 112770 - RNA, 38 nt, Homo sapiens
caaccgaccccagaccgcagaagaagccagaagcagaa

SEQ ID NO: 112771 - RNA, 72 nt, Homo sapiens
ccgaacacgacagaaagaaaggccaaagcagcagaaggggggcagaaagaagaggaggacaacaagccaaca

SEQ ID NO: 112772 - RNA, 63 nt, Homo sapiens
caagcacagcggggagaaacccacagggagaccgggagcgggcaagaaggaacagacaaaaac

SEQ ID NO: 112773 - RNA, 43 nt, Homo sapiens
cagcagcggccccaacacccccgaaggccaaacccaagcgaaa

SEQ ID NO: 112774 - RNA, 81 nt, Homo sapiens
gaccagcccgaaaaagacaggacgacaaaacaccagagagacccgagcaaggaaaacgagggccggggcagaacaaagccg

SEQ ID NO: 112775 - RNA, 75 nt, Homo sapiens
cacagcgccccaacggggccacccggaggaaccagccccgggcaaggggagcagacaacaaaacgagcaagcagg

SEQ ID NO: 112776 - RNA, 77 nt, Homo sapiens
acccggggggagaccggccggagccccagggccgaggagagaaaccgacccacgggaagccacaagaaggggaacgg

SEQ ID NO: 112777 - RNA, 70 nt, Homo sapiens
gaaaagcaaagaacaggaagaccacgggccaccggaccaaaaaccaccgaagaccacccaagaagaccaa

SEQ ID NO: 112778 - RNA, 114 nt, Homo sapiens
gagggggccccaacccgcgcggcaagaagacggcgcggcaaccggggagcccgccagaggaccacccgcacccaggggacgcacggcccaaccccgagcaaggacgcccaccca

SEQ ID NO: 112779 - RNA, 75 nt, Homo sapiens
gcaaccgaccgagccccacacggcacccaaggacaggagcgcgaaagaggcgagacgcaaaaggcgaacgggagg

SEQ ID NO: 112780 - RNA, 69 nt, Homo sapiens
gagaacgggaagacgccggacaaacaggaaaggccccacccccacaccgaacagcgagaaggcaaagcc

SEQ ID NO: 112781 - RNA, 75 nt, Homo sapiens
ggacgccggagaggcaccggaccgagggaagaaagagccaaacaggcgagaggaagaagcaaagacaaagcaaga

SEQ ID NO: 112782 - RNA, 65 nt, Homo sapiens
aaggagacccggaacaagcaaaggacaacggcaagcggagaagagcaaggccgaaccgagaggaa

SEQ ID NO: 112783 - RNA, 75 nt, Homo sapiens
gcgcacacagcaagcacgagaggcggagaagaacccaaccaaaaccaggcggcaaccccggggcgacaaaaaggg

SEQ ID NO: 112784 - RNA, 78 nt, Homo sapiens
caccccgcccgagcggggaagcgaggggcagccgcgcacgggagaagaaaaagacaagcccgggagcgcaagagcagc

SEQ ID NO: 112785 - RNA, 78 nt, Homo sapiens
gggcagcgggccggcgccggcgcgcggcggagaaaccaccacaaacacgaggccagcaacgaccaacaagacagaccc

SEQ ID NO: 112786 - RNA, 83 nt, Homo sapiens
ccggagcgcggagcccggccccgcaccaggaggaggacgacagcacgagggaccacagagcaccagccgcaggaaccccccac

SEQ ID NO: 112787 - RNA, 36 nt, Homo sapiens
ccggagagcacaagccggccacgccccgccgcacgg

SEQ ID NO: 112788 - RNA, 80 nt, Homo sapiens
gggggcccgaggggagacgccggacaaccgccccgagggaagggaggcggcggccccaaaagaaacagagcaaagcagcg

SEQ ID NO: 112789 - RNA, 57 nt, Homo sapiens
accagcccgggccagcgcaacgcccccccaggcagccccgcccacccaagccacggc

SEQ ID NO: 112790 - RNA, 67 nt, Homo sapiens
agggacgaaaaaggacaggccagagaacccaaaagcaaacccaagaccgaaagaaacccgggaaagg

SEQ ID NO: 112791 - RNA, 79 nt, Homo sapiens
agcaaacaaccaggggcagggaggcacaaaggggaacgcaggcgaacacgaaagacaccccaaacgcccaggaaaggga

SEQ ID NO: 112792 - RNA, 80 nt, Homo sapiens
aaaagacaaaggaagccaggagccaggcaagaaaaagcaggaccaggccaaccggagcgcacccacgccacaagccggac

SEQ ID NO: 112793 - RNA, 57 nt, Homo sapiens
ccgcagacagaggggcgacgaccgcacaacagaacgaagaaccagagcagggcagga

SEQ ID NO: 112794 - RNA, 71 nt, Homo sapiens
aggcaccaggccaccacagaaacaaaagcaacaaagagggcacagagccagccgaaaaacccaacacgaga

SEQ ID NO: 112795 - RNA, 91 nt, Homo sapiens
ccggcgcgagacgcggccgaagcgggggcgcgcggcggaggaccaggcgcggcgcggcgcggcgagcgaggaagaaaggacccggcaggag

SEQ ID NO: 112796 - RNA, 61 nt, Homo sapiens
aacgacaagccaaacagaggagagcaaaagagcagggacaggaagaggggcgacggaccgg

SEQ ID NO: 112797 - RNA, 57 nt, Homo sapiens
ccggcaagcggacggggcagagagaagagcacacagaaggccaggagcgacagagcg

SEQ ID NO: 112798 - RNA, 94 nt, Homo sapiens
gaagggcacgacccagggaggaaggcgcaggagcccggccaccacacccagccggccaagaggggaaggaccccaaccggcccccgccgcgcgg

SEQ ID NO: 112799 - RNA, 99 nt, Homo sapiens
cgcacccacagaagagcccccacaacggggagaacagcccaaaaaaggacccaagagaagccacgcaagcggggagccaaagagaaccagaccaacagg

SEQ ID NO: 112800 - RNA, 64 nt, Homo sapiens
ggagaaggaggaaaggcccggcagcgcgaaggacagggcgaaccccgcgccccgcagcggagag

SEQ ID NO: 112801 - RNA, 60 nt, Homo sapiens
agacaaacaggaacccagcaaccgggacagacaccacaacgcggaaggaagggaacacgg

SEQ ID NO: 112802 - RNA, 79 nt, Homo sapiens
agcgggagcaccccgcccgccggccgggccgagccagggcccccagaggagagaaggagggaccgccgggccaccagaa

SEQ ID NO: 112803 - RNA, 69 nt, Homo sapiens
cggacgacacggacgaaaaccgaaccggccagggaaagcggaaaaaggcaaaaccgaaggcgagacgcg

SEQ ID NO: 112804 - RNA, 72 nt, Homo sapiens
gcgaaagaggcggcggcgcgccgcggccggccacgcggagcgcacaggaaacaaccgcaaccagccaaggca

SEQ ID NO: 112805 - RNA, 75 nt, Homo sapiens
cgccgccgcccgcagcccagcgcagggcggacaggaccaccaggaacaaagagaaagcagccaagcacagcccag

SEQ ID NO: 112806 - RNA, 74 nt, Homo sapiens
gacgaaccaccccgcgccagcagcacagcacgggggccgaagacaccaggacaacagaaggaaaaggcccacgg

SEQ ID NO: 112807 - RNA, 51 nt, Homo sapiens
cagaaaccgcgaacagcggcccagcagggagacaccaaagacaacgacagg

SEQ ID NO: 112808 - RNA, 69 nt, Homo sapiens
gccccaccggaaaagacacaacagcaacccccggccccagccaggagggagcaaaggacggcacgggaa

SEQ ID NO: 112809 - RNA, 75 nt, Homo sapiens
acgcacacgggggcggacaccacaagaagggcgccaggaggcagcacggcaggagacgaggagaggacagcagga

SEQ ID NO: 112810 - RNA, 74 nt, Homo sapiens
gcgggggaccacgagagcagaaggagggggcagagcacggcaggcagaaggggccaacccgggggaacgcaccg

SEQ ID NO: 112811 - RNA, 67 nt, Homo sapiens
gccaagggcacgggaagaccggaggggacgaagaacgggaacacggagaacggccacagaaccagaa

SEQ ID NO: 112812 - RNA, 73 nt, Homo sapiens
gaaccaggcccccaaccagccacgcggaggcaagaacaggagccagggaacacacacccgagaacagccgcca

SEQ ID NO: 112813 - RNA, 68 nt, Homo sapiens
cggcacccccccgcgcgcggggaggcacggacaaaacgcagggccagcaaacccgggcccaagacgca

SEQ ID NO: 112814 - RNA, 59 nt, Homo sapiens
cagcggagaacaaaagggaacgaaagcggcacggagaagaaggaaaagaacggcccaga

SEQ ID NO: 112815 - RNA, 81 nt, Homo sapiens
ggaaacaggggccacggagccacggccacggccgcaaggacagcagccgccgaggagcgggggagggaaaagaaggggacg

SEQ ID NO: 112816 - RNA, 70 nt, Homo sapiens
ggaggagcacaacggagacaaagaacgaggggcaaaaagcagccgccggagcagagagaaaagaaaaaac

SEQ ID NO: 112817 - RNA, 82 nt, Homo sapiens
ccgcgggcgggagaggcggcggacgggccggagggaggagaaagccccgcggcaccaagacaacggcaaaaacaccaacacc

SEQ ID NO: 112818 - RNA, 85 nt, Homo sapiens
gaagggcaggaggaggaggaggggcccggcggcggggagcccagcagaagccaccaagaggcaacagacagaggaccaggagcac

SEQ ID NO: 112819 - RNA, 79 nt, Homo sapiens
gggccgggagcgcggcggagacgagccgagacagagcacgcccgggcggcaggcgcgggggcgcaagaaaaccgccagc

SEQ ID NO: 112820 - RNA, 44 nt, Homo sapiens
cccccgacaccccccccgcaggcaaagcccgcccacccggaagc

SEQ ID NO: 112821 - RNA, 37 nt, Homo sapiens
aaccggaccccaaaaaccgacgacgccgcaccacggg

SEQ ID NO: 112822 - RNA, 82 nt, Homo sapiens
aggcgaagcggccgagcaggcgagcgaacgacggagacggcgaagaacagaggaacaacgccaacgacaagacgaggaccaa

SEQ ID NO: 112823 - RNA, 74 nt, Homo sapiens
agagacgagcagacacgcggaaccagcagcaggaggcggcaggagacagacacagggcaagccgggcaggcaaa

SEQ ID NO: 112824 - RNA, 78 nt, Homo sapiens
gaaacgacagcagcgagcagcaaaaggcgcgaacggaaggcgaacaccacacacgccgcagcagagcccccgccgcag

SEQ ID NO: 112825 - RNA, 70 nt, Homo sapiens
gacacaggacaacgaacgaaacgggcggagccgagcgaggccccagaaggacaagcacaagaaaaagccg

SEQ ID NO: 112826 - RNA, 76 nt, Homo sapiens
cagggaggagcgggacaccccggaagcgggaaagggcgacaacccggaaaccacaaaaggaaggaccaaagaaaga

SEQ ID NO: 112827 - RNA, 67 nt, Homo sapiens
agcggccgggagcgcgccccccaccccgagacagacagagaacaccgccccaaaacaggaccagcag

SEQ ID NO: 112828 - RNA, 55 nt, Homo sapiens
cccacagcaaagccagcgacagaagccagggggcagcagcaggaaggaaaagaag

SEQ ID NO: 112829 - RNA, 67 nt, Homo sapiens
gcaggccaccgacgacacagaaaaaggccaaaaaggggaacgaccaggaacggcaggcacccggaag

SEQ ID NO: 112830 - RNA, 74 nt, Homo sapiens
gggaacggacgggaggaggaaaacacagcagcagcagcaaacaaagcaaagccagggagggaaccgaagccacg

SEQ ID NO: 112831 - RNA, 78 nt, Homo sapiens
gagcgcggaagcaaaaggcagacgaacagagccggaagcaacacgcagccacaccacgccccgagccacacaagaccc

SEQ ID NO: 112832 - RNA, 80 nt, Homo sapiens
cacccccacggaccggcacggccgcagggaccccagcccagcccaggggcgggggcaggaggcaggggaagcacaaaagc

SEQ ID NO: 112833 - RNA, 74 nt, Homo sapiens
acagcgaacaaaaaagggacagggcgccagggcagaaccgcggcagcgagaggggaagccggaaagaggcaagc

SEQ ID NO: 112834 - RNA, 82 nt, Homo sapiens
gcacgaaggccagaaagcaaggagcagggagccagcgaggaaacggcccggggagagaccgacgccgcgcacaccccgcaga

SEQ ID NO: 112835 - RNA, 61 nt, Homo sapiens
gcgaggcggcgcggcagcggagggacggcagccgcgcgaaggaagaaaccaaacgaaacac

SEQ ID NO: 112836 - RNA, 80 nt, Homo sapiens
gccacagcagcagagcgagaaggcacgacccccagcagaaccgaacgaccgagcgccagaaccccagaacccagcccgca

SEQ ID NO: 112837 - RNA, 55 nt, Homo sapiens
gggacgaacaaaacagcggaaaagggcacagaccaggaaccgcaaaggcgaacaa

SEQ ID NO: 112838 - RNA, 72 nt, Homo sapiens
gaaacaccgccgagaccagcccaacaggaccaggagcgggagagggccaggagagacaaagcgaaagaaacc

SEQ ID NO: 112839 - RNA, 121 nt, Homo sapiens
caccagcagcagcagccgccacgaccgggagccccgcacccgcccggccccacgggccgagacgcacccgcgagcccacgggcggagccccgggaccaacacagcgccacagcacgaaggg

SEQ ID NO: 112840 - RNA, 50 nt, Homo sapiens
gaaaccaacgagagacacacaaaaaaacagacgcacgccgaaaaaaaacg

SEQ ID NO: 112841 - RNA, 83 nt, Homo sapiens
cagggacgacggcaggaacggaccgcacgacgggacacgccagcaagacaagagcgcccaaggggaccccaaggaggggcccc

SEQ ID NO: 112842 - RNA, 74 nt, Homo sapiens
aggaccgcccccacaaccacagcgccagaggagcaagaggggggggcccccccgaagaaaggaaccggggagcg

SEQ ID NO: 112843 - RNA, 69 nt, Homo sapiens
cccagacccgcccgccagaaccgcgcgccacccacaaccaggcacccgccggcgccccccggcacaacc

SEQ ID NO: 112844 - RNA, 75 nt, Homo sapiens
aagacggacaggagaaaaggaacccccgcgagaaaagcgacacaccaggcgccaagccacaccagccgcccggag

SEQ ID NO: 112845 - RNA, 76 nt, Homo sapiens
ggcccggccagccgacgcaggcccaccggcggccagaaaaccaggagaaaaggaacgagaccccggggaaagagga

SEQ ID NO: 112846 - RNA, 75 nt, Homo sapiens
aggcgacccaccagggagagagaggaggcacaaagaaccccaggccgcaaggcagggggcagcggcggcacggcg

SEQ ID NO: 112847 - RNA, 87 nt, Homo sapiens
cgaaccgcccgcggaaccacagcccagcacggacgagccaaaccaggcgaccgagcagccaagcaacgggccccgggccccgacagc

SEQ ID NO: 112848 - RNA, 74 nt, Homo sapiens
cagccccaccccagccccgccacaggagagaccacgcccgccacccaacgaagcggcaaagacgagacagcccc

SEQ ID NO: 112849 - RNA, 76 nt, Homo sapiens
ccaccacccaaaagagcccagggaagaaagagaacagcaagaagaaggaaagaggccgaagaaggagcacgccccc

SEQ ID NO: 112850 - RNA, 72 nt, Homo sapiens
cacgggaggagaggaacgagagcagccgcacccacacacacgcgcggccaagacgcaggggggcacggacag

SEQ ID NO: 112851 - RNA, 85 nt, Homo sapiens
agccacacgccgggcaggagccacggagaacacgagacccgcacaaaaccccgccccccaggccacacaggggccgagacggggg

SEQ ID NO: 112852 - RNA, 93 nt, Homo sapiens
cccagccccgcgcgccggaggaggagaagcggcggcgccgggaagcagcaacggggcggcacacaaggagcgaagggcagggagaacgccagg

SEQ ID NO: 112853 - RNA, 50 nt, Homo sapiens
agggccaaagaagggagagaggcaccacacccagaccaccaaaacaaagg

SEQ ID NO: 112854 - RNA, 79 nt, Homo sapiens
cggacaaacagaaccagagcaaaaggacccaagaacacgggagacacacacaaacggcacaagacacgaagagcacccc

SEQ ID NO: 112855 - RNA, 73 nt, Homo sapiens
gcaggggaagaccagaagcggccaggagaccgaagagacgggaaagcgcggcgaggcccccggagcagggaag

SEQ ID NO: 112856 - RNA, 78 nt, Homo sapiens
cggcgggggcggaccgaagcaggagcccaagccacgggacagagcccggccccagagaagacccggaaccccaacgcc

SEQ ID NO: 112857 - RNA, 103 nt, Homo sapiens
gaagaccagcccagaaaaccaaccccaaagggccagagagcaacgacccagccaaaacagggcagaagaagcgcccaagaagacaagaagaggaggaagcaac

SEQ ID NO: 112858 - RNA, 76 nt, Homo sapiens
aagcagaaaccggacggaagcacaaaccagaacacccaggagagccgcacacgagaggcaggcccagcagggcagg

SEQ ID NO: 112859 - RNA, 95 nt, Homo sapiens
aacaggcaacacaacggcacacagcagccgaagcaccagaccaacacagcagacacagggcgcgcacagacggccacagaagcccagccaaggaa

SEQ ID NO: 112860 - RNA, 79 nt, Homo sapiens
gggcgggccggcagagcagcaccccacaggacaacccgaggagccaccaggggaggagcggcgagcaggaccgggcacg

SEQ ID NO: 112861 - RNA, 71 nt, Homo sapiens
ccaggagcccgagagagaaagcacccgaggaggccgcgaggcacagaagaccgggagacgcaggaaagaaa

SEQ ID NO: 112862 - RNA, 75 nt, Homo sapiens
agagaaggcaccagaacccgagagaaagcaagcacacagggcccagcaccagagggccggacccccgccggccgg

SEQ ID NO: 112863 - RNA, 51 nt, Homo sapiens
ccaggaaacccgaacccaacaccgaagccaaaccagacacggagcgcgaaa

SEQ ID NO: 112864 - RNA, 79 nt, Homo sapiens
ggggagcccgcgcccgccgcgggagagagagccaaaccccagccaccggaagaagaagagaacaccgagacacaggggc

SEQ ID NO: 112865 - RNA, 79 nt, Homo sapiens
caggagcaaggaaaagagccaggagaggagggaagaaacaagaggagaggacaggcagagaccgggcacaaccagccag

SEQ ID NO: 112866 - RNA, 70 nt, Homo sapiens
ccagaaacccacacggcaagggcggagaacggaaaagcaccaggaagcagagaggaccgcagaagggaag

SEQ ID NO: 112867 - RNA, 57 nt, Homo sapiens
cccaacaggcagccccagaacaccaaagagccggcaaagggccggagcgagggagag

SEQ ID NO: 112868 - RNA, 72 nt, Homo sapiens
gaaagcaagcgaagcacgcaaagcgggccagacacgaagaggccggcgaaggaagaaggaccagccagagga

SEQ ID NO: 112869 - RNA, 74 nt, Homo sapiens
acaagaggcaccaaagcagccgcccccgcagccccgacaaggccgggacaaccagaggcgaagagcccacccgc

SEQ ID NO: 112870 - RNA, 93 nt, Homo sapiens
aggacggggccgggcgaccgggcaccagcaggacccgaggccaggagccaggggcccagaagccaccccgaagccaaagggcacaacgcagcg

SEQ ID NO: 112871 - RNA, 72 nt, Homo sapiens
cgaacggccgaagaaagaagcaggccgggagagagcgcgaaccggaaaaagaacgacggaagaaggagaaac

SEQ ID NO: 112872 - RNA, 77 nt, Homo sapiens
gcgccagggcccgaagagggaagacacgcggaaacaggaacagagacagacccgggggcccccaaggagagggaaga

SEQ ID NO: 112873 - RNA, 75 nt, Homo sapiens
acaccccgaagccgagaaaggcccggcgagcgaccgccgggggaacgcccgagcggagcagcaggagcggcggag

SEQ ID NO: 112874 - RNA, 82 nt, Homo sapiens
ggcgacccgcgacgccgagcacccaggcgacgcccaccaagcaaacggggacagcgccgaccggaacagggaccacggaagc

SEQ ID NO: 112875 - RNA, 76 nt, Homo sapiens
ccacgagagacgaagacacacgacagacaacaacaggcaggaccccaggaaggccagcgcccagagaacgcacagc

SEQ ID NO: 112876 - RNA, 83 nt, Homo sapiens
cccaccgccggcgcgggaaacgggcgaagcgacgagccgcgaggagagccccccaagagaacccagggggagccacgccggag

SEQ ID NO: 112877 - RNA, 81 nt, Homo sapiens
ggagcgcgccccggccccccgcgcccccgcgccccagccggccgcccgagaggacccggaggagagggcccagaggagaca

SEQ ID NO: 112878 - RNA, 111 nt, Homo sapiens
gacgaaccgagaaagacggcgacaagaacaacgacggccgcagaccgacgggaggaaaagagagcccagggacggaaacaaccggaaaagggcacacgagagacagccagg

SEQ ID NO: 112879 - RNA, 73 nt, Homo sapiens
cagggaccagaccgcgccacaacacgaagaacccaggaacggagggcagcgaagagcgggaaacagaaaacaa

SEQ ID NO: 112880 - RNA, 71 nt, Homo sapiens
gacggacacaacggcagaccgcagaacacccagccaggagcgcgagggcggaccagggaccacacggccga

SEQ ID NO: 112881 - RNA, 114 nt, Homo sapiens
cccagggcgggcaacgccgagaccagccagggccccccccccagcccacgccacaacacagacccaaggcggcccacccccgcaagagcgcccccccaacccagcccacccacg

SEQ ID NO: 112882 - RNA, 77 nt, Homo sapiens
cgcggacgccaaccagcccgcgagcgcccgagcaccgagacaaccaagcaagggccagcagaaaccgacagaaaagc

SEQ ID NO: 112883 - RNA, 74 nt, Homo sapiens
gccccaggggaaaacccccgggaccagggcgacccagcaacgcggccggccaggggcaagcgagcacggaggga

SEQ ID NO: 112884 - RNA, 70 nt, Homo sapiens
gccagcccagagcgcgaacaaaagcgagagcgggacaccagccacggagacaaagcagaagacgagagcc

SEQ ID NO: 112885 - RNA, 72 nt, Homo sapiens
cccagaacaaaggacagagggaggaggagcagcgcggaggaggaagccccccggccagaacaccggacgcac

SEQ ID NO: 112886 - RNA, 75 nt, Homo sapiens
acgaaacaaacgcaagagcaaacgaaggaagaaaacaggcgaaacaaggcacccccagcgccgaacacaggacgc

SEQ ID NO: 112887 - RNA, 67 nt, Homo sapiens
gaaggcacacagagacagggcagaagacaagaccccaagagagaagaagagcaacaacaagaaacga

SEQ ID NO: 112888 - RNA, 76 nt, Homo sapiens
gcaccgggaaaccaccaagcaggggcgcggagccccagccaggacccaagcacagcgaggcaagccggcaggggaa

SEQ ID NO: 112889 - RNA, 76 nt, Homo sapiens
ggaagagaggccggcccccaggaaagggaaccgcacaagaaaaggaccgacagaaaggggaacaacggacggaccg

SEQ ID NO: 112890 - RNA, 86 nt, Homo sapiens
gaccaccaggcagaggcaacagaggagcaacaaggaggaacacaacagcgagcaacagcacagcaaggagagaaaaaaaagagaga

SEQ ID NO: 112891 - RNA, 76 nt, Homo sapiens
acccgcagaagccagcagcaaccccagaaggcgccaggagaacagcccaccaccacccgagcgcagcccagagacc

SEQ ID NO: 112892 - RNA, 60 nt, Homo sapiens
gccgacccaagcacaccagaaaggaagcacccccgggcgcagggcccgaagaaccccgcc

SEQ ID NO: 112893 - RNA, 44 nt, Homo sapiens
gcggcggcggcaggacgcgccgggccgacgcagacacagccacc

SEQ ID NO: 112894 - RNA, 112 nt, Homo sapiens
aaagacgaacgaccagccccagccggagaacccaggagagaagccgaccacggagaccggggggacccagagacccaggcagcaggggacacagagcacgggccagagcccc

SEQ ID NO: 112895 - RNA, 70 nt, Homo sapiens
cacggggagaagcgcgagggcaccacaacacagaggagaagaccggcaagcaagggagaacagagcaacc

SEQ ID NO: 112896 - RNA, 83 nt, Homo sapiens
ccgcagcggagcccacgagaggcagcgccaggcggagcagaccaccgggacccccgcaggcagcggcaggaccgaaggacaca

SEQ ID NO: 112897 - RNA, 75 nt, Homo sapiens
aaccaacacaagaccagaaggacaccagaggaccagaacccacgagaaacagacgagccaaccagaccccaggag

SEQ ID NO: 112898 - RNA, 80 nt, Homo sapiens
cccacgaggcccgccccagaagaggagccagcacagcaccagcagaacaacaagaaccagccaccaggaccaccagggcg

SEQ ID NO: 112899 - RNA, 85 nt, Homo sapiens
gcgagacagggcagcgcggccccgaccccaaggcggggaccccggcgaaaaaggggaccaaggaggaggagcaaaacaaggggcc

SEQ ID NO: 112900 - RNA, 82 nt, Homo sapiens
gggaagccgcacaccagaggccagcaagcggagggcgggagcgagggcggaaaaggagcgaacaggggccacagcggaagaa

SEQ ID NO: 112901 - RNA, 97 nt, Homo sapiens
ccagaaaaacccacagccagcaaccagagggaaagcaaacgccgaaggaaacaaaaagccaacggaaaaagaaacggcagagcacaggaccgaagaa

SEQ ID NO: 112902 - RNA, 73 nt, Homo sapiens
ggaaccaggaaaaagaggaacagcccagaaccaccgaagaaagcaagccaaacgccagagaaccaaagcagaa

SEQ ID NO: 112903 - RNA, 79 nt, Homo sapiens
aaacagaccgggaggagcgccaaagccaccagagccggaggcgagccgcgcgggaggagaaagacagcaaagaaaagga

SEQ ID NO: 112904 - RNA, 78 nt, Homo sapiens
ccccgcagggacaagaacgcgccaagagccccggaacagcgcaggaggaggcccggccagcagccccgccacgacagc

SEQ ID NO: 112905 - RNA, 68 nt, Homo sapiens
aaggcgcgggggagaggcaggacaaccagccacacaccagccacccggcggagggcgaacgaacgccc

SEQ ID NO: 112906 - RNA, 75 nt, Homo sapiens
agacccagcagccccccccacgggccccgcacgcccccgccccagcccaccccaaccaagggacggagcaaaacc

SEQ ID NO: 112907 - RNA, 76 nt, Homo sapiens
agccacagcccacccggaaaccagagacccggaacagaccagccagccccaagcagccgcacgacaaagaacgaag

SEQ ID NO: 112908 - RNA, 77 nt, Homo sapiens
aggagacggggcgggaagcaagacaaggagcgaccccacaccaaagagcccagcaccagacgaggacagccggcgcg

SEQ ID NO: 112909 - RNA, 71 nt, Homo sapiens
caggccgcggacagagaagaggacgcggagacaagagaagacaaacagaccccagaaagaagaagaggaaa

SEQ ID NO: 112910 - RNA, 85 nt, Homo sapiens
ggaggagccaaccagaggacgaggcccccaagccgagggcaagcagcccggccagggacagcgcacagcagggaaccacgaacgc

SEQ ID NO: 112911 - RNA, 75 nt, Homo sapiens
accaccggaagcacccaaagagggggggagagaacggccaagggagccgccaccgagacccaagaggcgccgaca

SEQ ID NO: 112912 - RNA, 83 nt, Homo sapiens
ccagcccaaggcaggacgcaggcacacaccaccagacccagcaagaagaagaacggcacagcaccgggccgggaccggcagga

SEQ ID NO: 112913 - RNA, 59 nt, Homo sapiens
cagaaacagagaaggaacagaccccaaaaaggaacccgacaaaacacggcagcgagccc

SEQ ID NO: 112914 - RNA, 55 nt, Homo sapiens
gcacaaagaagccgagacaaacggcaccaagaggcggaggcaaggcgccaccggc

SEQ ID NO: 112915 - RNA, 64 nt, Homo sapiens
cgggaggaacgggggaagccagaagcagaggacaacagaacgccagcgccgaacaaagcaagaa

SEQ ID NO: 112916 - RNA, 54 nt, Homo sapiens
aacaaacagaacggcaaaagagcacagccccaggcacaacacaagaaaagcggg

SEQ ID NO: 112917 - RNA, 73 nt, Homo sapiens
cgagggaaagaacaaaccgcacgacacaggaaaggacaaaaccagaagcagggggggggcgaccgaggaaaaa

SEQ ID NO: 112918 - RNA, 54 nt, Homo sapiens
acggccaagaaagcccgaaaaccaacgagaaccagccaaaacacacgaacaggg

SEQ ID NO: 112919 - RNA, 70 nt, Homo sapiens
aagaagacacccccaccggcaaaccgacaccagcgacacaagcgcgagggaaccacagaggacaggcgag

SEQ ID NO: 112920 - RNA, 68 nt, Homo sapiens
cacgcgaggacgccgagacgccgaagcacgaaaaagcaaccaaggacccacgaacagaaaagacacac

SEQ ID NO: 112921 - RNA, 79 nt, Homo sapiens
agggggggaccacgaaaggagcaagagcaagacaccggacaccgagggcccccaaaagggcccaccgcaccggacgacg

SEQ ID NO: 112922 - RNA, 78 nt, Homo sapiens
accgccagccacccacgccagcagagagagaggaccaagcagagaccagacagggaccccagagaccccccgaaggac

SEQ ID NO: 112923 - RNA, 85 nt, Homo sapiens
caacccaaggaaggaccaaacggagaaccagcaggagcccaaagagaaggaaaagccaaaacccaggccgaagaaaccccgaacg

SEQ ID NO: 112924 - RNA, 63 nt, Homo sapiens
ggggggggaaacaaggcccaggccaaggaaaccccagacagccagcagcaggccgggaccagc

SEQ ID NO: 112925 - RNA, 70 nt, Homo sapiens
ccagacggaagggggcccacggacagaaggggacggagaggcaacagagaacccaagaggacacccaggc

SEQ ID NO: 112926 - RNA, 58 nt, Homo sapiens
ggaaaaaccccagaagcagaacaggagaaaagagcgcgccaaggacggaaaaggcgca

SEQ ID NO: 112927 - RNA, 70 nt, Homo sapiens
aaagcacccagccgcagcgccagcagcggacaggcacagacaaccagacagccaagaacgagccaacgcc

SEQ ID NO: 112928 - RNA, 70 nt, Homo sapiens
ccccagccgcgggaacagcaagggcggccaaaggagaacaacagcgaagaagaaggaggaacaccccccg

SEQ ID NO: 112929 - RNA, 84 nt, Homo sapiens
accagccgggcccgcgcgcccggccaagaggcaaaggggaggacgcagcaaaccaccagaagggcgcacccacgacgcgcacac

SEQ ID NO: 112930 - RNA, 84 nt, Homo sapiens
ccagagcacgcaaaagcccccaccagacgagcaccaagaagcgagaagcgcccagaggagaaggcagagcccccccaggcagaa

SEQ ID NO: 112931 - RNA, 74 nt, Homo sapiens
gcgcgagccaggacccggcgacgaggcggagacacggggagaggccggggagagaggaagccggaggccagacc

SEQ ID NO: 112932 - RNA, 66 nt, Homo sapiens
cccaaaacaccgagcagaacaccggcccacaaaacagagccccgcgagacccggaagcacggcagc

SEQ ID NO: 112933 - RNA, 79 nt, Homo sapiens
ggggcagcacaaaaagaggccgggaaagcgggcgcgcgccgacccgccgacagaccgggaccggggccaacacggcagc

SEQ ID NO: 112934 - RNA, 69 nt, Homo sapiens
gaacgggcagaaggcaagaggagaaaagaggcaccccacggagagaccccaaaggaaacgagagagaga

SEQ ID NO: 112935 - RNA, 67 nt, Homo sapiens
agagaaacaggagacaggagagagagaagaagagacaccaggggggcacgccgaagacacgagaaag

SEQ ID NO: 112936 - RNA, 79 nt, Homo sapiens
cggccgcagggcgccggagccccccagggagcggagcgcccggccggcagcgggaagacgcagcgaaagaaaaccgacc

SEQ ID NO: 112937 - RNA, 76 nt, Homo sapiens
gccgccccgcccggcgggagggcgcggggggcgcggaggagcaagccaggaccaacggcacaaaccccgaagagac

SEQ ID NO: 112938 - RNA, 56 nt, Homo sapiens
cgcccgcgcggcgcggggaccgcggcccgacccgccggacgggagcccaggaccag

SEQ ID NO: 112939 - RNA, 77 nt, Homo sapiens
cagcaccaaaacgcagcgcacagggccaccccgcccagagcccagggcgaccgcacgccaggagggaggacaggcgg

SEQ ID NO: 112940 - RNA, 76 nt, Homo sapiens
aacgccccaggagagagaaccgccaacggaccccgaggacaggaaaaacagaaacaagggacgaacaaaacaccga

SEQ ID NO: 112941 - RNA, 77 nt, Homo sapiens
accccccagcaaggaacaagacccagggacaaagaagccacaggggagggccccgggacagaggccccccaccaagc

SEQ ID NO: 112942 - RNA, 77 nt, Homo sapiens
aagcagcccaccgacaggcccggaggcagcagaaggaaaccggagaagacacaccacagagcacccagagcgacgcc

SEQ ID NO: 112943 - RNA, 70 nt, Homo sapiens
cgcagggagaccgcagaaaagccccggcgaagcgcacgcccaggggaggaaccccaggcacaaagaggca

SEQ ID NO: 112944 - RNA, 83 nt, Homo sapiens
ggccgagggagggccgagccagccgcggccggaggagcccccaggccgggaacgaaacgcacacccggccccagcagccacag

SEQ ID NO: 112945 - RNA, 72 nt, Homo sapiens
gagacaagagggcaccaaccagagagaccggaaagaaagaaggggcaagggaagaaacccagccagaccaga

SEQ ID NO: 112946 - RNA, 72 nt, Homo sapiens
cagaggggcaaacagacaggaagggcgcgcaggaacaagaagaagggcaaccacagagccaagaaaaagaaa

SEQ ID NO: 112947 - RNA, 77 nt, Homo sapiens
cagcaacggcggccccaggcccaggccccccaccaccagaggcaagacagccggcagagaccaggaggcaacaacca

SEQ ID NO: 112948 - RNA, 79 nt, Homo sapiens
agaccaccaccagggcggagcgacagcagggggagaccaagagaccccaaggcgagcccggaacagcagcaaaacggga

SEQ ID NO: 112949 - RNA, 76 nt, Homo sapiens
aaagagacaaaaaaaccaagaagcggaaagccagacaaccagagaagaccaggcacagacaccacgaacagggagg

SEQ ID NO: 112950 - RNA, 53 nt, Homo sapiens
gaagagagagcagaagcaaggacaaggcagagagagaggaccgcgcagacgcg

SEQ ID NO: 112951 - RNA, 62 nt, Homo sapiens
gccaggaccacgagaccgcagcccaacccagaaccgagggcaccggagggaagcgggccacc

SEQ ID NO: 112952 - RNA, 73 nt, Homo sapiens
gggcccacacccagacaagaccacgcaacacaccacaggaagaggcacggaggccggagaacgaccaggccag

SEQ ID NO: 112953 - RNA, 59 nt, Homo sapiens
accccaggcccaggagacggagaggcagagaaaaccgaaggagcaagagcggcggccac

SEQ ID NO: 112954 - RNA, 78 nt, Homo sapiens
gggacgcgcgcgggcacccacggagccccggggcggagccgaccccacggcacaggccggacgccccacaaggggaga

SEQ ID NO: 112955 - RNA, 73 nt, Homo sapiens
agaagcaaggcagcaagcgcggcgagaagagaagaccgggaggacagcgagcggagacaaagaagaaaagcag

SEQ ID NO: 112956 - RNA, 60 nt, Homo sapiens
ggaaagagaaaccccaagccaaagggacagagagagggacgggcagcaggccccccagag

SEQ ID NO: 112957 - RNA, 58 nt, Homo sapiens
agagcggaccgagagcgcgaaacgcacgagaagcaaacgaacacaagagacagggaac

SEQ ID NO: 112958 - RNA, 71 nt, Homo sapiens
gagaaaagcgagccccgaaaccaggaacgaaagaaaggagaccaaccaccagggggacgggacaggagggc

SEQ ID NO: 112959 - RNA, 54 nt, Homo sapiens
gcgagcggccagcacaagggggacggaagcggcagcgggcagccggcccagcac

SEQ ID NO: 112960 - RNA, 51 nt, Homo sapiens
caacgcgccgcaaaacagaacgcggacgggagcggaccgccaagcaggcag

SEQ ID NO: 112961 - RNA, 75 nt, Homo sapiens
ccaaacaaggcccacacggcaccacagacccaagcggaggagaccgagaaaggcccaaaaaccaccagcaggacc

SEQ ID NO: 112962 - RNA, 82 nt, Homo sapiens
gacaggacgcgggaccggcagccgacagggacaggagcgccaaaccgagaccacagcaccgcccccggcgccgccagccccc

SEQ ID NO: 112963 - RNA, 50 nt, Homo sapiens
cggaccgccccccacgggaggaggagacccacaaagaaaaccagcaaaaa

SEQ ID NO: 112964 - RNA, 79 nt, Homo sapiens
cccacggccggaagggaccaaggcgccagcggaaaccacgccaagaaggcgaggcccagaagcacgggcacagagaccc

SEQ ID NO: 112965 - RNA, 76 nt, Homo sapiens
ggcacaaagcagacgacccagaggccagagggaacagcgccaaacaccagaccaggcacagggccacgccgaaccc

SEQ ID NO: 112966 - RNA, 55 nt, Homo sapiens
cgcggcaggccacaaagaccacgccgacccgaggaaccggagcaagagacgacgg

SEQ ID NO: 112967 - RNA, 83 nt, Homo sapiens
aacgaaaagcgccagaaagcaaaccagccagcacgggggcccagccagccagcagcgaggggggacggaggcggcacggggcc

SEQ ID NO: 112968 - RNA, 52 nt, Homo sapiens
ggaaacccagagccaagaggaacccagaagcagaacaaaccaggggagggaa

SEQ ID NO: 112969 - RNA, 70 nt, Homo sapiens
agagccacgaccccagccaaagagacgaagagaaggagccaaaaaggggagaggaagaaagaagagagga

SEQ ID NO: 112970 - RNA, 55 nt, Homo sapiens
gcccaaaccgaaaaagaccccagcagacaggcacaagcagaggaaccagggaacc

SEQ ID NO: 112971 - RNA, 84 nt, Homo sapiens
ggagggcggcgcgccgagcgacacaccccaagcagcccaccaggggcggacaccccggaaaacccgcccaagcaacagaggagc

SEQ ID NO: 112972 - RNA, 81 nt, Homo sapiens
ccagcgccccgaggagaggcagacaggcaacaggcacccacgcggaccagagcaccacagacagcgccgacaacacaagac

SEQ ID NO: 112973 - RNA, 92 nt, Homo sapiens
caaacacgcagaggaaggagcagcgcaagcagaagaccgaagaagcagccgaacacggagcagaaacgagcgcgaacgggacccaacagagg

SEQ ID NO: 112974 - RNA, 78 nt, Homo sapiens
aaacaccacccagaaccagcaaccccccacgagaacccggccccaaagacgggaaagcacgccaccaaagccacggca

SEQ ID NO: 112975 - RNA, 52 nt, Homo sapiens
gccccgggcccgcccgcccgcaccagggggagagagacgcgggaaccgccag

SEQ ID NO: 112976 - RNA, 77 nt, Homo sapiens
caagaaccagggagaagccgcccgaacaccagcaggagcgagaacccgagcagcgccagagcaacacaccgcgcccc

SEQ ID NO: 112977 - RNA, 67 nt, Homo sapiens
aaggaaaagggagaacagaagggaagagggggagaaaacacagagggacggaaacagacgacgacac

SEQ ID NO: 112978 - RNA, 75 nt, Homo sapiens
ccgggggcggcggccacgccaaggacgggagagagacccccggaagaagacccagcccgcaggcagaaccccaag

SEQ ID NO: 112979 - RNA, 131 nt, Homo sapiens
cggcgcgcggggccgagcaggcgcccagcacggggacccccgggccggcccacgccgcagagccgcgcaggagggcccccggacccgggagcggacccggggcgggaagcccgaggcggcaacggcggccg

SEQ ID NO: 112980 - RNA, 56 nt, Homo sapiens
agcgcgggcaccccacgcggggaaaccgagcgggaagaacaacgcaccccgaaagc

SEQ ID NO: 112981 - RNA, 61 nt, Homo sapiens
ccaccaacccgccgagccagggggaacagccccggccgacaggaccggaaaacaaaaaaac

SEQ ID NO: 112982 - RNA, 83 nt, Homo sapiens
gacaccaggcgggaaggaaaaacagaacagcgcccgcgaaagcagcaagagaagagcgacgcggcagcgagagagagagccgc

SEQ ID NO: 112983 - RNA, 76 nt, Homo sapiens
acagccccgacgaacacggggacaccaacaggacccggcaacccgcgggacagacaaccaccagaggccagaggac

SEQ ID NO: 112984 - RNA, 68 nt, Homo sapiens
ccaagagggcacaacaccaaggaaccaccccaggggcgcacgaaagggcaggaagggaaacaaggcca

SEQ ID NO: 112985 - RNA, 107 nt, Homo sapiens
gggggcaaagaccacccagaacgacccaacacgagcagagacacgggagcaaaaccagaacagcaaccaccgaaacgggcgaaaaagaagaacagcaaaacacgaaa

SEQ ID NO: 112986 - RNA, 62 nt, Homo sapiens
caacccaacaagaggggcacaaaaacaccacgccgagaacccagaacccgcccagagccagc

SEQ ID NO: 112987 - RNA, 79 nt, Homo sapiens
gaaaggcgcgagacccagaggccgcggccgcgacaaagagagaagcggggaagaaagcaaaagcagagccggagccagc

SEQ ID NO: 112988 - RNA, 69 nt, Homo sapiens
aagaccggaccgcgaagcaagcaagagaaagaaggacccaaaacgggcgaaggcaagaagcacggagcg

SEQ ID NO: 112989 - RNA, 81 nt, Homo sapiens
cccccgacagagacggcggagaccccgaaggcgcaaacgacaccacccgaccgcggaggaaaagagaggaggagacgagag

SEQ ID NO: 112990 - RNA, 66 nt, Homo sapiens
cgcagggagcccaccgggcgggccggccaaggaaacacgagccccaccaaagcaaaggccggacca

SEQ ID NO: 112991 - RNA, 65 nt, Homo sapiens
aaagcggaagagcgccagcacgggcagcggaggaccgaagagacgccgaagaccaggacggacag

SEQ ID NO: 112992 - RNA, 65 nt, Homo sapiens
ggggcagaaacagagaaggaacagaagagagaagaagcaaaccgggaccggaagcaccaaggaga

SEQ ID NO: 112993 - RNA, 63 nt, Homo sapiens
cgggggccgagcccagagagggaggagaaacagaagcggggaacggagggaaagcgacaaaca

SEQ ID NO: 112994 - RNA, 57 nt, Homo sapiens
gaagacggaagaacaggagccagccagaacagagacgaacgcaacagagaggcaaca

SEQ ID NO: 112995 - RNA, 82 nt, Homo sapiens
gaaggcgaggagacggagcacggcccccgaggacggaggcacagcgcagcgacgagagggggaagccaaaaaccccccaccc

SEQ ID NO: 112996 - RNA, 83 nt, Homo sapiens
gagagaggaacccgaagaagaaaggacgacagccagagaggcccacggccgagcacccgccccagcgagccccggaaagagcc

SEQ ID NO: 112997 - RNA, 77 nt, Homo sapiens
ggacccaggggaaaaaagaccaaaaaggagccaaggaaaagacaagggccgaacaccaacagaggaagaaaggagag

SEQ ID NO: 112998 - RNA, 40 nt, Homo sapiens
gcggagcagccccagcgccacgccaccggggaccgcaagg

SEQ ID NO: 112999 - RNA, 81 nt, Homo sapiens
cggacgaggcggcggagaacaagcggcagggcgccggccgagcccgggaaaacgacagcagcagcagggccggaagacgcc

SEQ ID NO: 113000 - RNA, 60 nt, Homo sapiens
cgagaaggcgggaagccgaaggcagccacagcgaacaccagcagaaagaggcacagacgc

SEQ ID NO: 113001 - RNA, 82 nt, Homo sapiens
gcccagcccccgagggcgggaacaggggcgccacaccaacaaggcggccaggcaaaaggggcaagacaaggaggcagagccc

SEQ ID NO: 113002 - RNA, 74 nt, Homo sapiens
gagccccaccgcgccgggcccccgccccgggcccggggagaagacgcggcggcggcccaggaggcaagagcgag

SEQ ID NO: 113003 - RNA, 46 nt, Homo sapiens
cgccagaagaacgaggaggagaagggacaccgcgaccagcaccacc

SEQ ID NO: 113004 - RNA, 67 nt, Homo sapiens
aacaccagaaagggggaaaacccacaaggaagaggacagcagaggacccaacaaaccacacaaggcc

SEQ ID NO: 113005 - RNA, 85 nt, Homo sapiens
gcagcagcagacgaccgcagggccagcccacggcaaccgccgcgggccgagcccgcccgccaggaccaggacagagcggcgccgc

SEQ ID NO: 113006 - RNA, 41 nt, Homo sapiens
cccgggaaacgagaccagccggaggccaaaaggaacagccc

SEQ ID NO: 113007 - RNA, 78 nt, Homo sapiens
gcgaccgggagccggcgcgcgggcggggaggcgaggccggacgcacccggggggcccagagaaccgcagccagaagca

SEQ ID NO: 113008 - RNA, 83 nt, Homo sapiens
gcaacaccagccgaagacagaggagcaacaacggaggacgcaagagaggaaccacgccaacggaagcagggcgcaggagagac

SEQ ID NO: 113009 - RNA, 38 nt, Homo sapiens
aggagcagggagcacgagggcaaagaaaggcagaagag

SEQ ID NO: 113010 - RNA, 67 nt, Homo sapiens
gcagggaaagcagacgacgacagagcacccgacccaggcggaggacaagaggaccgggcaccacaac

SEQ ID NO: 113011 - RNA, 82 nt, Homo sapiens
aaagaccaggagagacgagcagcccagggagcgggagacagcaccaggagacaaagccacaaaaacaccagaaaaaccaagc

SEQ ID NO: 113012 - RNA, 75 nt, Homo sapiens
gagaggagacacgaaaacaggcaaccgcacggacgcggagaaaggagagaaggcgaggaagcccaagcacaaagg

SEQ ID NO: 113013 - RNA, 69 nt, Homo sapiens
gaacgaacccagcccgcgcacagacacagaccaggaagacacgagcagaaggaagaggcgaagaagaaa

SEQ ID NO: 113014 - RNA, 85 nt, Homo sapiens
caaggcccacccgcccacagcaggacagccgaacggaacggagagcagccaagcagccaagaccgaggaagggggccaggcgacc

SEQ ID NO: 113015 - RNA, 65 nt, Homo sapiens
acgcagccccaggcaggggagggcaggaaaaagaaaccggcagccaaacaacaagagcccgggag

SEQ ID NO: 113016 - RNA, 75 nt, Homo sapiens
acagagaccggcgcaagagcacccggacgcgcccccagacaccggcgggacggggaaaaagaaaagggcgaagac

SEQ ID NO: 113017 - RNA, 65 nt, Homo sapiens
cagaggcaacacagcgagcgaagccccacccaggggggacagaaacaaggacggcgggagagagc

SEQ ID NO: 113018 - RNA, 70 nt, Homo sapiens
ccggcggcacccccggccagacagacaggagggaaacacgaaagccaaggaggagagacgagccacggcc

SEQ ID NO: 113019 - RNA, 90 nt, Homo sapiens
cgcccgcgccgggcccggaaagcgccgcccagcagccgcagacaagcagaccggaagaccgacggaagaccacaccccgagggagcccag

SEQ ID NO: 113020 - RNA, 77 nt, Homo sapiens
cgcagcgcccgccgcggcccgggcccccccgccggaaacagggcgaagagagccccggaccggggagcccgaagggg

SEQ ID NO: 113021 - RNA, 84 nt, Homo sapiens
gccgacgccacaggccaacgaggaaccaaagggagaggaaacaaacggggacagcgccgaccggaacagggaccacggaagccc

SEQ ID NO: 113022 - RNA, 73 nt, Homo sapiens
aagggagcgaccaggagagacgacaagaaggaaaaagggaaacgaagaaggggcccccacaccggccaaaaca

SEQ ID NO: 113023 - RNA, 51 nt, Homo sapiens
aaaaaccacaaaggggagcccaggcgagaaacaggacacaacaggaggaaa

SEQ ID NO: 113024 - RNA, 49 nt, Homo sapiens
cggcaggaaagcagaacggggcacgacacgcgggggagagggagccgag

SEQ ID NO: 113025 - RNA, 74 nt, Homo sapiens
gcgggacaccgggcgcaaaacaaacagagaaaagcagggaccagaccccacaagaaaacacacaaccacaggcc

SEQ ID NO: 113026 - RNA, 38 nt, Homo sapiens
aacaaggagagagcaccaacggcaagcgggggcaagga

SEQ ID NO: 113027 - RNA, 58 nt, Homo sapiens
accgcggacacggagaggaaggggcacccgccagcagccagcaacaccgccagcggca

SEQ ID NO: 113028 - RNA, 66 nt, Homo sapiens
aaggaccaagaaccagcggggagagaggaagaacaacaagcagaccgagaaagcaccgaccacaac

SEQ ID NO: 113029 - RNA, 67 nt, Homo sapiens
acaacgagcacaaaaaggaagaagcaggaaaaaaaacagacaaaacagaaaagagagaaagaagcga

SEQ ID NO: 113030 - RNA, 81 nt, Homo sapiens
accaagaaagccagcccagaggcgccagcaccccagggacccagacggaccgggaccgaggaacccgggagccaggaagga

SEQ ID NO: 113031 - RNA, 76 nt, Homo sapiens
gggaagccgcgaagagaacaaagcgccccaaaggacagagcgggagccaccagcgccaaagggaagccaggagccc

SEQ ID NO: 113032 - RNA, 68 nt, Homo sapiens
gaagacgacgcaccgcaggcagacaaaagggccaaagaagggagagagcgaaagccaacacaccccga

SEQ ID NO: 113033 - RNA, 80 nt, Homo sapiens
aagaaggaaagcaccggggacaggcacagccccagcgccacagaaagaccacacagggaaacgaccagggagagaccaac

SEQ ID NO: 113034 - RNA, 68 nt, Homo sapiens
ccaggagggcgccccagggacagcaacagcggccgggaacgaccgaaacaccagcacaaggcagagga

SEQ ID NO: 113035 - RNA, 87 nt, Homo sapiens
gaacggacccgccaggccgccaaaagaaaagaggacagacacggacccagcaccagggaccagacaaggagggccaagaaccgggag

SEQ ID NO: 113036 - RNA, 79 nt, Homo sapiens
gaaagggaggaaggagagcaggcagccgcaggacccgcgccgggccacgcccgcacccccggcacccacgacaagccca

SEQ ID NO: 113037 - RNA, 79 nt, Homo sapiens
cccaaaccccaggccaagcaaccaccagcagcccccagagcggaacacaggccaggaagaagcaaaggaagacagaaaa

SEQ ID NO: 113038 - RNA, 78 nt, Homo sapiens
gccgacccccaagagcgaccgggggaacaacaacgagacccaggggaagaaaaggacccccagagagcaaaaacaaac

SEQ ID NO: 113039 - RNA, 109 nt, Homo sapiens
cgaaggcaaagccaaagccccaccaagacacggaccacgaggacggaagagcgcagaaggaacgagggagcacggagggaaaagaagccgccgacccccgccccagaga

SEQ ID NO: 113040 - RNA, 84 nt, Homo sapiens
ggaggaccggaaggcaaccaggggggggcacggaggggagacaacaggaggagggccagaccaaaggaaccagagcaggagaaa

SEQ ID NO: 113041 - RNA, 35 nt, Homo sapiens
cccggcgcggcacggcacagaccccgggcacagaa

SEQ ID NO: 113042 - RNA, 67 nt, Homo sapiens
ccccccagacgcgggcacccgcaagagacagcacacaaacaaagggaaccaagagaaggcagagaag

SEQ ID NO: 113043 - RNA, 77 nt, Homo sapiens
gcccacagccggcaccagccggacaaaggagagaagggacccagacggaacagccccaagccggaaacccaggaacg

SEQ ID NO: 113044 - RNA, 77 nt, Homo sapiens
caccggagcaaaacagacgacgcagggaaaagacagagaagaagaccccgagagaaggcagcaggaagaaacagcga

SEQ ID NO: 113045 - RNA, 62 nt, Homo sapiens
gcgagcgacaacgggacgggaaacgcagacaaccaacagggcaaaaccgccaacaagacccg

SEQ ID NO: 113046 - RNA, 70 nt, Homo sapiens
gcggacacggggaagaaaaggcaaaggcccaagaacgggggcgagaaagagcaggggaaaagcgcagagc

SEQ ID NO: 113047 - RNA, 90 nt, Homo sapiens
caacaaagagagcgcgggccgcaccgccgcgccccgcaccccccgagcagcccggggaccagcacgcaggcgacagcgaccgaagaacag

SEQ ID NO: 113048 - RNA, 67 nt, Homo sapiens
cccggacccgcgcagcgagcccgagcggcagcgccggaggagcgaggagcaagagaacccagaacga

SEQ ID NO: 113049 - RNA, 75 nt, Homo sapiens
agaagaaaacacagggcaagccaaagagggagacgcgcacggaccggaaccagaacaagacgaaagacaacgagc

SEQ ID NO: 113050 - RNA, 67 nt, Homo sapiens
aaaccggcccccaacgacaaaaggaaggaagggaacacggacgacgagacacgaccaacacaggcga

SEQ ID NO: 113051 - RNA, 66 nt, Homo sapiens
agccagaccaagcgaagagcgcggaggagaaggaagccaacaccggagccagaaagccgaacccac

SEQ ID NO: 113052 - RNA, 88 nt, Homo sapiens
acggcgccgaccagcggcggcgacgcgcaaggagggggaagacagagaagaccacacaaccgaaggggccgggcaggacggcccgggg

SEQ ID NO: 113053 - RNA, 69 nt, Homo sapiens
aaaaccaagaaggagagaagagcagaacccagcgcggcaaagccgccggcacagcccaccggaagaggc

SEQ ID NO: 113054 - RNA, 89 nt, Homo sapiens
caacaaaaggaacaggaaggaggggagagagagggaagccaagaggcccagaagcaaaccggagggagacccaaagaaagcggaaccag

SEQ ID NO: 113055 - RNA, 69 nt, Homo sapiens
aacaccaaaaacaaaacgaaccaggacggcaaaaccccacaaggacaacgaggcaacgcagacccagcc

SEQ ID NO: 113056 - RNA, 85 nt, Homo sapiens
gaggggacggcaggcgaggcggaacaggccgggcaccaaggcgcagacagcacagagggccaagccagaacaggggaaagccaag

SEQ ID NO: 113057 - RNA, 67 nt, Homo sapiens
cagggcgcccccgaccccgagagaaacggcgagaaaaccaaacaggagccgacagccggagaagggc

SEQ ID NO: 113058 - RNA, 86 nt, Homo sapiens
gaccgggagcaacgagcagaaaacccaagagcagaaagaagaggcaggacgggccccagaccagcgacaaggaaccagcggccaag

SEQ ID NO: 113059 - RNA, 72 nt, Homo sapiens
gacgaagaaggcacccccccgccggcccaggaccacggagcgaacaagcggccacgcccccgcagccccgca

SEQ ID NO: 113060 - RNA, 86 nt, Homo sapiens
gcgaacaacggagcacggagcgcagccgggggccgggaccccgaaaaacaaccaccagcgagcaaaaaggcaaagaccaagaccac

SEQ ID NO: 113061 - RNA, 76 nt, Homo sapiens
gcgcggaacacaacccaacgcagaggagcaggaccgcagagaaacgccccgagcacaaggaacaaaaagcgccgac

SEQ ID NO: 113062 - RNA, 82 nt, Homo sapiens
gggccgccggcggccacgggcaaacagggggagcagaccggaagacccgacggaagaccacacccgaagggagccgaggaca

SEQ ID NO: 113063 - RNA, 67 nt, Homo sapiens
cgcagggcgcccccgagaacaagcagaggaaagacacgccagagaagaacaggacacaacaggagac

SEQ ID NO: 113064 - RNA, 77 nt, Homo sapiens
gaggccggcagcgggcgcgcccgagaacacgaaacaaggaagaaagaagcaagaaaaacagaccgggggaaaaagcc

SEQ ID NO: 113065 - RNA, 72 nt, Homo sapiens
gaggcgcagaaggggacagaacaaagcaccagcaccaagaccagccagggagacgacccgcgggaacccacg

SEQ ID NO: 113066 - RNA, 78 nt, Homo sapiens
gggagaaaaccaaaaagccccagcaggaccaaccaggccaaaaccagaccccagaccagcagaagaggagcggggcaa

SEQ ID NO: 113067 - RNA, 80 nt, Homo sapiens
gaagagaagagcacaagaaacagcccaaacaaaagaacagcgaacccagacaggcggcaggagggaaagcaaggaaacgc

SEQ ID NO: 113068 - RNA, 76 nt, Homo sapiens
cccgcacaccgcaggacacccgaaccggcgcccaaccgggaggggccgccggcaacaagacgaaaaacgcgaagaa

SEQ ID NO: 113069 - RNA, 78 nt, Homo sapiens
agccccgagagcacgacacaggagccgccaggccggccgggagaaggcaagcccgcgaaggaggcagcggcggggccc

SEQ ID NO: 113070 - RNA, 72 nt, Homo sapiens
gcacaaaagccgcacagcgcccggcgcaggccaaagggcccccgaaccagcgaaaacaaacccggccgaagg

SEQ ID NO: 113071 - RNA, 76 nt, Homo sapiens
aaagcacccggagaggaggaaaaaaaggaccaccccaacaggaaacaaggaggacccgagcagccagcaaagaacc

SEQ ID NO: 113072 - RNA, 84 nt, Homo sapiens
cgcgaccgaggggacgccgcccgccgcccgccgcaggccacccgggaacggaggagggaacaccccaccagaccacccagcaag

SEQ ID NO: 113073 - RNA, 72 nt, Homo sapiens
acagcacacagcaacaacccagcccgacaccggcgaacgcagcagacaaagacaagcgggcgacacgagagg

SEQ ID NO: 113074 - RNA, 76 nt, Homo sapiens
ggagacacaagggcacgaaggagccaagcagagaacgcggacggggggcaggccgaggcgccacaagcgagccgca

SEQ ID NO: 113075 - RNA, 91 nt, Homo sapiens
ccagagcaaaccacagggacccagacaccgggcagagcaggaaggaaccgcggaaacacgaagaggggacaggagagcggcccaaaaagag

SEQ ID NO: 113076 - RNA, 62 nt, Homo sapiens
gcgaggaggaacgcgcaaggcaaagcaccgggaaaagccgggccacagaagcaccaccacaa

SEQ ID NO: 113077 - RNA, 63 nt, Homo sapiens
gcggccccagccaccacgacccaggaaaccgcgcagagacaggacaggcgccccgcgggaagc

SEQ ID NO: 113078 - RNA, 81 nt, Homo sapiens
agcaccgaaccgcacagcaagcccaggccaacaggagacaaggacggcagcaagggacaacagggggcaacccgggcaggg

SEQ ID NO: 113079 - RNA, 76 nt, Homo sapiens
gacccgacgcccgcacgggaagagacccccgacgacagagaagagccgcagggacagagcggacacagcaaccgga

SEQ ID NO: 113080 - RNA, 80 nt, Homo sapiens
ccaggagcacccaaacaacaacggcaaggaacgagggggaaaagcaccacggagggacgcagaaaccgagccgaggaagg

SEQ ID NO: 113081 - RNA, 78 nt, Homo sapiens
acaggagccagagcggagacagcgaaccggcggggcggccgacagagagagcaaaacgacgaaggagccaagaggacc

SEQ ID NO: 113082 - RNA, 73 nt, Homo sapiens
gaggccggagcgacgcgcggagcgagagaacccgccggaggggggaaccacaccagagcaggagccaggggca

SEQ ID NO: 113083 - RNA, 82 nt, Homo sapiens
aaaaagcaggaggagcacaagaagaacaacgaggggaccaaaagaacccagccaacccgcagagggaggggaggggcgagcg

SEQ ID NO: 113084 - RNA, 39 nt, Homo sapiens
gggacggcgcggccacccgcagacgaagcaggccaagga

SEQ ID NO: 113085 - RNA, 72 nt, Homo sapiens
ggcgcccaagcgggaccagcggccaacacagcggcgaggagaaaggacacgcaaacagacaagcagaaggag

SEQ ID NO: 113086 - RNA, 73 nt, Homo sapiens
cccacacagacgccggacaaccacagcccggagagccgaccgggagaacacggggaaggaaccgcgaacgcgc

SEQ ID NO: 113087 - RNA, 83 nt, Homo sapiens
gggggaaccgcaagcggccaagcacaaagagcgccccacgagagaacggcacacgcgagcgcgcaagccccagagaagcagga

SEQ ID NO: 113088 - RNA, 60 nt, Homo sapiens
agccccgcgcgggccgccgaacggcggaacccaggagagaagagacgaggaggaggggag

SEQ ID NO: 113089 - RNA, 68 nt, Homo sapiens
cagaagaaggccggaacacacaccccggagagcaaccccagggggcagagcggaaggacagccggaaa

SEQ ID NO: 113090 - RNA, 72 nt, Homo sapiens
agagaaggaacagaggaaggaggaggaaccaggcaggggcgccaaaagaccaacacggaggaagaaacaacc

SEQ ID NO: 113091 - RNA, 80 nt, Homo sapiens
agaagaggaaggaaaaggagcaggaggcaccaggaaaccccccaggcaagaggcgcaggaccgggaagaccaacaaacgc

SEQ ID NO: 113092 - RNA, 80 nt, Homo sapiens
caagacagcccaaacgccccacgaccagcggacaaagccagcaaagaaccagggagcaagaaagagagaccccaccccaa

SEQ ID NO: 113093 - RNA, 59 nt, Homo sapiens
agcccacgccaaaccagaccccaggccgccagcccagcgcccccagagacaccagggag

SEQ ID NO: 113094 - RNA, 65 nt, Homo sapiens
cgacacaaacggaacgccgcgcgaggacgcgggccagacacaacaggccggggccccaggagggg

SEQ ID NO: 113095 - RNA, 91 nt, Homo sapiens
aaagccaacgaagaaaagaggagcgccagagcgaaaagagaaggcaaacagcgaaggcggagggcggcggccccaccccgggcgggacagg

SEQ ID NO: 113096 - RNA, 83 nt, Homo sapiens
cggacaagcccaggagccgaccagagagcagaagccaccgggccaagcacaacaccagagggcagcaggagcgcagggaggac

SEQ ID NO: 113097 - RNA, 78 nt, Homo sapiens
ggcggcggccgcggggaggaggagggggcaaccagaggggccaacggacgacaggaaaagaccaggcacggacacgga

SEQ ID NO: 113098 - RNA, 75 nt, Homo sapiens
gggcccggaggagcgaacaaggcgacaacacagagagcccagaggaccggcggcccgaccaaagaagaaccacag

SEQ ID NO: 113099 - RNA, 78 nt, Homo sapiens
gcgccgcgccaggccgggcggcaggaaccaggaaaaaggcgcaaagcgcagagaaaagccaccccaagaccaccaacc

SEQ ID NO: 113100 - RNA, 83 nt, Homo sapiens
cgaggcggggccgccggggccgccaggagcccgaccgggagaggacaagaccacgagccaggccgaggaggaggagacaaaga

SEQ ID NO: 113101 - RNA, 75 nt, Homo sapiens
caagaccacacaccagccggacggcggggccgggcccccggccgcaagcagcgggaggccaccgccccaccagca

SEQ ID NO: 113102 - RNA, 76 nt, Homo sapiens
ggaaaaagagagaaagcaggagaggcaaccggaaagaacgcaagagcagggcaagcaagaaaaacccaacacggca

SEQ ID NO: 113103 - RNA, 70 nt, Homo sapiens
aagcacggaaccaagcgacggacgacagcagacgacccgaagggcccggggcaaagcacagacaggagaa

SEQ ID NO: 113104 - RNA, 77 nt, Homo sapiens
cacccccacaccaagccaccggacccagagggacaaaaagaacgcaagaagcaagagaccagagccgaggccaggaa

SEQ ID NO: 113105 - RNA, 74 nt, Homo sapiens
acgcagggcgcccccggcgagcacacagagaggggaagggcagcagcagcagagaaccaaacccaaagcgaaca

SEQ ID NO: 113106 - RNA, 81 nt, Homo sapiens
cagcacaaaagaccagagggccgggagccccccgagggcggcgccacccaccgccgccaggcacagagaaggcaaacggga

SEQ ID NO: 113107 - RNA, 75 nt, Homo sapiens
cagcacgggacgcgaccggaaggcagagaaagagcgcgcacgaaagcacacgaaaaggaaggaaaaacgcagcgg

SEQ ID NO: 113108 - RNA, 74 nt, Homo sapiens
cccacgaccacaccagcccaggggcaccagccacgccaccaaggggaggcaagcaggggggcaaaggaaagaag

SEQ ID NO: 113109 - RNA, 75 nt, Homo sapiens
ccagaagcggaggagggaacacgaacccccggggaacgaggaccgggcgaggccaccccgaggcaaggccccaga

SEQ ID NO: 113110 - RNA, 76 nt, Homo sapiens
ggagaaggcgcaacgcggcgcaggagggagagaagccgaagaaaccacgcccccagaagaacacgagacaagccac

SEQ ID NO: 113111 - RNA, 58 nt, Homo sapiens
ccgagcaggaggcgccacaggccagcggacgcgcaccggcaaaccaggcgccccgagg

SEQ ID NO: 113112 - RNA, 74 nt, Homo sapiens
accgcagaagcccaagacagaacgagagaagaggaacccccgccagcaacggccaccagcccccccccgcgacg

SEQ ID NO: 113113 - RNA, 76 nt, Homo sapiens
aagagaaagggccaacggcacacgcagccagaagcaacaagagaagcagaaaaacagacacgcaagagaaacaggc

SEQ ID NO: 113114 - RNA, 73 nt, Homo sapiens
gaagaggcccaacccccaccccgcccaaggaggcccagcgggggcagcacgccgaaggagagaccagacaaca

SEQ ID NO: 113115 - RNA, 80 nt, Homo sapiens
cggccccgacgacagcgggccgggaaaagggcacgaggccggaaccgcccagccccggccccgggaaaggcccaccagac

SEQ ID NO: 113116 - RNA, 88 nt, Homo sapiens
gcagaaggacggccgacgcaggcggacaaggacgcgcggaggccccccagcaggggaagcagggaaaggccggagagaggaagcggcc

SEQ ID NO: 113117 - RNA, 74 nt, Homo sapiens
aaggaccaagaaccagcccacagggcgccccacggaggccaagaaagccgcagagaggccaagagagagcccac

SEQ ID NO: 113118 - RNA, 76 nt, Homo sapiens
agcagaaggccgggcagaaaccgggaaacaacaggagcccagccagagacgcgcacgaaacgacgaagaggcccga

SEQ ID NO: 113119 - RNA, 58 nt, Homo sapiens
gcagggcgcccccggaggcccaaggaacagcacagcagcgacacacggaccggagcag

SEQ ID NO: 113120 - RNA, 71 nt, Homo sapiens
cgagcgagcccgaggacggcgcggggccacgaacgacggcacgaagcagaagagccaggacaaacgcggcg

SEQ ID NO: 113121 - RNA, 38 nt, Homo sapiens
gcggcgagcgagggcggggcgggaaaagccaagaaaga

SEQ ID NO: 113122 - RNA, 77 nt, Homo sapiens
gaggcacaaaacgcccagcaaaccaagagggagaagacggaagaaagcagccaagaccacccggagaaaaaccaggg

SEQ ID NO: 113123 - RNA, 80 nt, Homo sapiens
acagccggcagaggcaagcaggggggcaaagcagagggcagcccagggaacgacacagcccagagagaagcagaacgggg

SEQ ID NO: 113124 - RNA, 76 nt, Homo sapiens
gagcgcccaggacagaaaaaaagacagcgggagaagcgcagacacaagcccgccgccaaacagagccaccccaccc

SEQ ID NO: 113125 - RNA, 67 nt, Homo sapiens
ccaagaagaggagagaaaggcgccccagccgcgagacccacaggaagagagaagaagagaacgggaa

SEQ ID NO: 113126 - RNA, 87 nt, Homo sapiens
ggaaaagggcagggacagcgcaggcagcaggcacagcagcggccaagggaggaacccgacacgggcacggagcaaagaagggaaccg

SEQ ID NO: 113127 - RNA, 80 nt, Homo sapiens
ggaaggcagaagaaagaagaggagaaggagcagccggccaagcgggagagagaacggaaaggagccaaggaaaacaaaag

SEQ ID NO: 113128 - RNA, 76 nt, Homo sapiens
cgcgaggccaacgaccggagaggggaacagacgcagggcagggccccgcccggcggggaaggcgggcaacacaaca

SEQ ID NO: 113129 - RNA, 84 nt, Homo sapiens
gcacccgggcgcgggcgcaccccgggcggggacgccgccgggcacgggagggggccaagagccgacaacgaagagaggaaagaa

SEQ ID NO: 113130 - RNA, 77 nt, Homo sapiens
aaagcgcacgaggccgggccggcgcggggcagcgaacggagaggcgccagggcggagaaagaccacagcaagaccac

SEQ ID NO: 113131 - RNA, 81 nt, Homo sapiens
gaccgcaccggggacacccccgagcgagagacgacacacagcgggagcagacccagccagaagaggaggagggccgagggg

SEQ ID NO: 113132 - RNA, 38 nt, Homo sapiens
ggcggagccggacgagcgcgggcacgcggccaaaacaa

SEQ ID NO: 113133 - RNA, 65 nt, Homo sapiens
agcaagccaaaccaagccaaaggccaacaccgcacgcaaggaacaacgccagaacacaaacaaag

SEQ ID NO: 113134 - RNA, 81 nt, Homo sapiens
aaacccaaagaccccgccggagacgagagaggcagcagcgccccgagccccggcggcaacaccccccaacgagggagccgg

SEQ ID NO: 113135 - RNA, 75 nt, Homo sapiens
gcagcgaacaaggagaaagccacaacagggcggcaacaggggcgagaaaggaaaagggagaggacaaaacgcacc

SEQ ID NO: 113136 - RNA, 54 nt, Homo sapiens
gacaacggcgaccagcccaccgaaaggagagaagcaggagcccaaaagaaacag

SEQ ID NO: 113137 - RNA, 73 nt, Homo sapiens
acccacgagccccagacacaggcggcagacgcagacaaacaaaacaagaagccgaagaagaccggggaggcga

SEQ ID NO: 113138 - RNA, 77 nt, Homo sapiens
cccaggaaaaagacagcccgcagcacgaccagcaggaacgaccgccccgcccagcaagacgccagccacccgcaccg

SEQ ID NO: 113139 - RNA, 78 nt, Homo sapiens
cgccacgcggccaaccggcggcagcggagacaggagcaacacacgggccagcacacaacagcagaggagcgggaagca

SEQ ID NO: 113140 - RNA, 76 nt, Homo sapiens
gggagagccgaaccagaagagaaagaaacgaaggaggcccaaccacaaaaggagccgacggaacccagacggagaa

SEQ ID NO: 113141 - RNA, 67 nt, Homo sapiens
gcacaacaccagcaaaacagaaccccaaaccccaacaagacgccgaggaacgagaggaaggacccgg

SEQ ID NO: 113142 - RNA, 76 nt, Homo sapiens
gaaaacaagagaccacagaagcggaccggaaaaagacaaggccgaacgcacacaaccaagaaaaaccaagaaacag

SEQ ID NO: 113143 - RNA, 84 nt, Homo sapiens
aggaacagagggggcaaagccaacaaccccccgagccccccgaggacacgggccccggagccccccaggcaagagccagaaggc

SEQ ID NO: 113144 - RNA, 78 nt, Homo sapiens
caagccgaagcccaggggaccccccagcagaacaccagccaaaacagcagggcaggagagggagacgacgaagggaga

SEQ ID NO: 113145 - RNA, 127 nt, Homo sapiens
gccaggagccgcggggcggagggaccagccggaagacggcggcacaggagcgcacgagcgggggcgaggaagcgccccgaaacccccagaagacacgccgcagaggcccaccacgcgaggccgcggg

SEQ ID NO: 113146 - RNA, 76 nt, Homo sapiens
gccaaagcagcgaagaagaggcccaacccccaccccgcccaaggaggcccagcgaggaggaagcgacgcgcaacaa

SEQ ID NO: 113147 - RNA, 49 nt, Homo sapiens
ccgggcagcgagacgaaaaacaagcagcggacggcacagagagacccgc

SEQ ID NO: 113148 - RNA, 73 nt, Homo sapiens
ggcgggagccgccgcccgggcggacgcgagccaaacgagcaagagaagacagagagagggaggaaggacaaga

SEQ ID NO: 113149 - RNA, 64 nt, Homo sapiens
aaaccaagaggaaaagaggggaaccagaagaggccaaccagcacgaacgccagcagcacggcac

SEQ ID NO: 113150 - RNA, 75 nt, Homo sapiens
aagcggacccagaaagacaaggggccaggcaccgcaagggccagcaagagaggaccggcagggcgggggcagggc

SEQ ID NO: 113151 - RNA, 57 nt, Homo sapiens
aagcccaacccgcgcaggacgcgaacccgccacgcggccggaaacaccacaaagaac

SEQ ID NO: 113152 - RNA, 71 nt, Homo sapiens
aaccacaaggacccagggccagaccaagaagaacagccccagaaaggaagaagcgaaaagcaaaaaacggc

SEQ ID NO: 113153 - RNA, 73 nt, Homo sapiens
agggaaggcaccagcacacaggagagccacagaaacagggcaccaacacccgaaaagggagcagcacccagca

SEQ ID NO: 113154 - RNA, 86 nt, Homo sapiens
caccggcggccccaccagcagacgcagccgagacaccagcccgaaacaccaccaagccaccaggagagaacgccgcgccgcgcgac

SEQ ID NO: 113155 - RNA, 74 nt, Homo sapiens
ggagggagccgcgggaggaccgcaggaccggccgcccgcccccggggccgccccccggaacagacacggggggc

SEQ ID NO: 113156 - RNA, 83 nt, Homo sapiens
gggccgggaccggcgcagggacacgggggcgcgcgcgccgacggcccaccacaagacaagcagaccggaagaccgacggaaga

SEQ ID NO: 113157 - RNA, 102 nt, Homo sapiens
gagggacgagaccgaacaggggggggcacagcgccccagggagagacgagaacaggaacaacccagacacccgggccagcacaaacccagaaaccagacgga

SEQ ID NO: 113158 - RNA, 77 nt, Homo sapiens
gaaagggaaagagaaggggcaccggggcaagaacccaaagaggaggaagagcaggcccaggcccgggacaaggcagc

SEQ ID NO: 113159 - RNA, 33 nt, Homo sapiens
aggggcccaaaagacggaagaagcaggagcgac

SEQ ID NO: 113160 - RNA, 67 nt, Homo sapiens
cccgcgccgccgaccccccggcgccgcgccggcggcggcgaaagggcgggggcgccgaggaagaacc

SEQ ID NO: 113161 - RNA, 74 nt, Homo sapiens
agcagaaaaagcagccaggaaccaagaaaacgacgaaaaagagccacgcccccacgagcgccccccggaccacg

SEQ ID NO: 113162 - RNA, 67 nt, Homo sapiens
ccgagggaaccagaggggcgacagagaagagagggacggcgcaaaccagggcgaggcgggacagcgc

SEQ ID NO: 113163 - RNA, 58 nt, Homo sapiens
ccggccggagcgcagcggagcagggcgggaggagaccgaccagccccgaacaaccgaa

SEQ ID NO: 113164 - RNA, 81 nt, Homo sapiens
cgcagcagagagcaaaagaagacgcggagaggagggcacacagacagagcggaaccaaccccgccacggcaacaagcccac

SEQ ID NO: 113165 - RNA, 82 nt, Homo sapiens
cgggaacaaaacacacacccgcagacaagaacggagaggaaggaaggagaaagacaaacccaagaaaacaagaagagaaaag

SEQ ID NO: 113166 - RNA, 62 nt, Homo sapiens
gagcaggccgcggcgacccagcgagagccccccaagagaacccagggggagccacgccggag

SEQ ID NO: 113167 - RNA, 76 nt, Homo sapiens
agggcagaacgaacaggaacaaagccagacgaaccagagaaccccaaagacaaaagagcgaaaacaggcaagacgg

SEQ ID NO: 113168 - RNA, 54 nt, Homo sapiens
acaaacacaccgaaccagagagaagaaagggggcccagggcagaagcggaagcg

SEQ ID NO: 113169 - RNA, 57 nt, Homo sapiens
caccaccggcccaggaccccacccccaggcgaaggggagcaagggagaaaagcaaag

SEQ ID NO: 113170 - RNA, 81 nt, Homo sapiens
agcgcggaccggcagcgagcccaggcacaagggaggcgacagagacagcagcaggagagaaaggccagcacgggggaacaa

SEQ ID NO: 113171 - RNA, 82 nt, Homo sapiens
gccaagacgggcagggcccgggcaccaggagcaacaagggacaacagagccgacacagccaagaagcagagcaaaacaggaa

SEQ ID NO: 113172 - RNA, 75 nt, Homo sapiens
gcaaagaacaaggcaagaaccccaccaacacaggcaacaaagacggagaacaaagacaaggacaagaagaacagc

SEQ ID NO: 113173 - RNA, 75 nt, Homo sapiens
ggccgccaagagccgcagccaagcccggaagacgcgaccgggcaccggcgggggccgggcccgggccaaggcccg

SEQ ID NO: 113174 - RNA, 76 nt, Homo sapiens
agcccgcccgccgacgcccgcgccggcgccccggcccaccgggggacggcacggcaggcggacgcccggggccccc

SEQ ID NO: 113175 - RNA, 58 nt, Homo sapiens
ccgcccggagcacgaccgaggcgacgaaagcgaaaagaaacagaaagagacaggacaa

SEQ ID NO: 113176 - RNA, 72 nt, Homo sapiens
cgcaaggggaacagcaccaggacaaaagaagggcagcacaaaggaaagccccaaaccccggaacgggaagcc

SEQ ID NO: 113177 - RNA, 74 nt, Homo sapiens
agagcgaggaccggaagacagggaaagcggaaccaccaaaaggaggagacaacgaccagaaaacggagcagcca

SEQ ID NO: 113178 - RNA, 77 nt, Homo sapiens
gcgcaagacccggcccagccgcaaaaggcaggagagggcgaggagccagacaggcgggaacaaccaggacacgagaa

SEQ ID NO: 113179 - RNA, 68 nt, Homo sapiens
gccaggcaaggccacagaggcaaaggcaggacaaagcggaggcgccagcacacggggcgcacaagaaa

SEQ ID NO: 113180 - RNA, 74 nt, Homo sapiens
gcacagccggagaaacccaacaacaacgagagacacgccgaccccgacagagcggcagagggagggagaacacc

SEQ ID NO: 113181 - RNA, 83 nt, Homo sapiens
caggaggggccaacaggagggacccccccagagccggggacacagagcgagaggaaaggcagacgggcaggcggcggcagcca

SEQ ID NO: 113182 - RNA, 91 nt, Homo sapiens
cgggggcgcccccccccccagacggacggggggaccaggccgaagagaggagaccggcaggcagggcacggccgacgggggcagaggacag

SEQ ID NO: 113183 - RNA, 71 nt, Homo sapiens
agcgacaacccccagaagagaccaacgccaccaaccaaccgagcacggcccaggcggaggaagggcgcgac

SEQ ID NO: 113184 - RNA, 60 nt, Homo sapiens
agcgacgagggcaacccgaggaccaggacacagaccggaaaccgaggaggcggaaccacc

SEQ ID NO: 113185 - RNA, 68 nt, Homo sapiens
cagagacgacaccgaaagaccacacccgagaaaggaacccagagggcagagaaggcgcagccaagaaa

SEQ ID NO: 113186 - RNA, 75 nt, Homo sapiens
cagaccccacccccacccgagcagccagagcggaccggggcagaccaaacggcaagcggagcagggagagcagga

SEQ ID NO: 113187 - RNA, 70 nt, Homo sapiens
agaagagaggacgcggccgccccaggaagcagcagcaaggcagcgggggcagagacggggaacagggcca

SEQ ID NO: 113188 - RNA, 65 nt, Homo sapiens
aagagccgccggagcagcaggccaaaggcaggccagcaagaggccacaagacccagaacagcacg

SEQ ID NO: 113189 - RNA, 92 nt, Homo sapiens
gggaaagggccggaaaacacacgccccgaaaccgggcaagccgagagcgaaggaagagccaggaaagcaaaagggcacccgcccccaaccaa

SEQ ID NO: 113190 - RNA, 71 nt, Homo sapiens
aaccagggaacggagcagcaagaagcaacgcacccgcccccaaagagagaagcggaccacaaggggcgggc

SEQ ID NO: 113191 - RNA, 72 nt, Homo sapiens
aagaaagcgggcacggcgcaggaagacccagggagaacccaccacgagaggcaaaagccaggaagcgcagaa

SEQ ID NO: 113192 - RNA, 75 nt, Homo sapiens
aaccacaagacgaccaaaggaggaaggaaggacggaaaacaaggaaaaaggaaagcaaccaagaggaagaacccc

SEQ ID NO: 113193 - RNA, 68 nt, Homo sapiens
aacccgagccaaagaacacaaggagcaaaaaggaccgagaaaaacccagaaaagaagaaaaaaaccca

SEQ ID NO: 113194 - RNA, 76 nt, Homo sapiens
aaagcccgccaagaggcggaaggccaaggcaccggcccccacgggcggcgcagggggaggcgggaggagaaaagga

SEQ ID NO: 113195 - RNA, 79 nt, Homo sapiens
ccaacaggcgcgcccgcagggaggggagcgggagagggccaagccggaagaagccagccaggagaagaaacagaggacg

SEQ ID NO: 113196 - RNA, 71 nt, Homo sapiens
cggcacaaacaagcaacgagaccagaaggaaaacacaccaggcacagaaaggccccccgccaagccaaggc

SEQ ID NO: 113197 - RNA, 77 nt, Homo sapiens
ggacaggaagggaagccgaagagagccgacaccaccgacaccgccccgcaggggggagcgcaggcgccgaccgcgac

SEQ ID NO: 113198 - RNA, 76 nt, Homo sapiens
cgaggagcaggaagagaaaccaggaggggcagcagcaggacagggaacccgggagacagcaacagacggaggaacg

SEQ ID NO: 113199 - RNA, 36 nt, Homo sapiens
cccagaacgaggaagaaagagggccgggcaaccaca

SEQ ID NO: 113200 - RNA, 74 nt, Homo sapiens
acgcgcaaacccaacccgcggcagacagagcaagagagaggaggaaaaaaaggagcgacagaagaagaaaggaa

SEQ ID NO: 113201 - RNA, 80 nt, Homo sapiens
caacccacggaggaaggagcacgggaagccacagggccagacaaccacgccgggcgcccaggcgggaagaaagaaaagag

SEQ ID NO: 113202 - RNA, 85 nt, Homo sapiens
ccgggccagggccagagcaaagagaagggaagcaaggagaaggagaagcagagacggcacagcagccacgaggagagaaccgcgc

SEQ ID NO: 113203 - RNA, 84 nt, Homo sapiens
ggagcagagcgaaaagagcgcccaaaccagcacaaccggaggaagagaaggccagcaagaagagcgcagaggaggagccagaag

SEQ ID NO: 113204 - RNA, 78 nt, Homo sapiens
cggagagagcacgaaggacccagcagggcaccagggcaaggagagccaagcggaccaagaaggcaagagaggaagcag

SEQ ID NO: 113205 - RNA, 82 nt, Homo sapiens
gaaggaaagaagaacaacagacgagaagagaagggagcaccaggagacgccagggcccggccaggccccaccgccacaagca

SEQ ID NO: 113206 - RNA, 71 nt, Homo sapiens
agccgcggccggcgggccagcccgggcccccagcggcaaagcggccgcgcggggcgcaggcgccccgcgga

SEQ ID NO: 113207 - RNA, 76 nt, Homo sapiens
acgcgacacccccaccaggacagccgacagcccgcccaggaagggacccgagcacggggaacagacccgggaaggc

SEQ ID NO: 113208 - RNA, 48 nt, Homo sapiens
cacaggacggagggggcacagacaggcagccggacacaagagggcaag

SEQ ID NO: 113209 - RNA, 64 nt, Homo sapiens
ggcgcccagcaaaacaagggaccgcaacaggaagaagcacagaaagccagacagagaacacaga

SEQ ID NO: 113210 - RNA, 84 nt, Homo sapiens
cggcggcccggggcgcgagcccaggccgcgccgccacgaggaggagacacacagccccagacgggaggaaaaaaggaaggaccg

SEQ ID NO: 113211 - RNA, 52 nt, Homo sapiens
ccggccccccgggcccccagcagcacggacaacgggggaaaacaccgaaccg

SEQ ID NO: 113212 - RNA, 75 nt, Homo sapiens
ggccgcaggaacaggcaagggcgaggaagcaggcacgcaagaagaagggaacccgccccaggcgcaggcagaacc

SEQ ID NO: 113213 - RNA, 60 nt, Homo sapiens
gaagagcaagggaggagccggaccggaaccagaggcagaggaggggacacggggacgccc

SEQ ID NO: 113214 - RNA, 76 nt, Homo sapiens
gacgaaaagaaagaacaagcgcaaagaacagagaacacaaaccacacccccccgagcaaggagcggcgaagccaca

SEQ ID NO: 113215 - RNA, 78 nt, Homo sapiens
cagcagcggagccgcccagaaggaccgacagggagcagcggagaacacaggaaccggccacggcggcagcggagagcc

SEQ ID NO: 113216 - RNA, 78 nt, Homo sapiens
caacgaggacagaccggggcgacagcacagccgacagggaaggggcagaccaacaccacccagcaaaaaccccgacga

SEQ ID NO: 113217 - RNA, 54 nt, Homo sapiens
cacggaggagccgaccgcagcgagggaccagcggggggccgcgcggacagagcg

SEQ ID NO: 113218 - RNA, 63 nt, Homo sapiens
gccgccggccccgccgccaagaggagcgagcggacccgcgaggggcgacccagcaacgcggcc

SEQ ID NO: 113219 - RNA, 71 nt, Homo sapiens
cgccagagccggggacgaaagggaaggacaggcagagcaaacaagagccacacgaaggcaaaaaacacgag

SEQ ID NO: 113220 - RNA, 62 nt, Homo sapiens
cggaaagaagagcaaaaaggaagccggaggacaaggaaaaagaggaaagcagaaagaaaccc

SEQ ID NO: 113221 - RNA, 81 nt, Homo sapiens
gccacaggccgaccccgagcccaaggaagggcccacccacgcagggcccagaagggaaacagagcggaggcggcagaagcc

SEQ ID NO: 113222 - RNA, 49 nt, Homo sapiens
gcaggagacgagaccaccggcaacacgagagacagcaaagccccaccca

SEQ ID NO: 113223 - RNA, 48 nt, Homo sapiens
ggagaaggaccaagaaccaggggaagaggagccgaaggagacgcgcag

SEQ ID NO: 113224 - RNA, 84 nt, Homo sapiens
ccacgaggggcggcgccgggcccgggcgccggggcgcacaggcacagaaaacgaacgagaaacgagggagaagaagcagaaaaa

SEQ ID NO: 113225 - RNA, 70 nt, Homo sapiens
acagcacggacacaggaccaggaacacggaaaagaagacagaccccaaacgcaggaggaacagggagaca

SEQ ID NO: 113226 - RNA, 76 nt, Homo sapiens
aggcgggcccaccgccgcccccggcgaaggggcgccgaaccgagcccgaagggaagggccggcgggccaacacaag

SEQ ID NO: 113227 - RNA, 63 nt, Homo sapiens
ccccggcaagaccgaaggcgccggccaaaagagggcaacaaggacccagacaaggcggggccc

SEQ ID NO: 113228 - RNA, 64 nt, Homo sapiens
aggcgccgaagagcaacagagcgccaaaaagaggaccccagcacagcacagagcagggagagaa

SEQ ID NO: 113229 - RNA, 76 nt, Homo sapiens
acaggaacccaacagagccacgaagggggagagaagcgccagcaacccccagccacaacgcgaaccgggcggacga

SEQ ID NO: 113230 - RNA, 78 nt, Homo sapiens
gggcgcccgccagcagcgggccgcgccgcgcccagccggccagccaggaaagcgggagcgcgggagcaaaggaaagaa

SEQ ID NO: 113231 - RNA, 78 nt, Homo sapiens
acacgcagggggaaggcaccaagcagccagacaacagacgcaaggcaaaagaggaagcacccgcgagaaagaagggca

SEQ ID NO: 113232 - RNA, 66 nt, Homo sapiens
ggaagcaagaaaagagagcccgggaccgagccaaaaccacaggaacaagcacaaggaagagcccac

SEQ ID NO: 113233 - RNA, 75 nt, Homo sapiens
acaaaagggccaaagaagggagacagcgcggaggaaaaggccgaaacagcacacccgaggccgggaccaaacacc

SEQ ID NO: 113234 - RNA, 86 nt, Homo sapiens
gcccacggacaaggcaccgacgcggcacccaggccacagaggaggaaagagaggggaaagaagcagccaagccccaaggaaccaca

SEQ ID NO: 113235 - RNA, 56 nt, Homo sapiens
ggagaggcagggcgcgagggcgggggcagcggcagggaagggaggacccaaaaagg

SEQ ID NO: 113236 - RNA, 71 nt, Homo sapiens
gagccacgcaggagggggacacacagcaacgaagcaggggaggagggaagaccggacagcgagccaagaga

SEQ ID NO: 113237 - RNA, 92 nt, Homo sapiens
gcaagacccgacagagggaaaagggacgaggaagaagggcaggaccgggcggaggccgccaagacgggaacagcaggccaggagcgacacac

SEQ ID NO: 113238 - RNA, 79 nt, Homo sapiens
ggcagagcacgcgcgcagcgaagcccagggaggccaccagcccgggcgcgccaggcacagccaagagcggaccggcagc

SEQ ID NO: 113239 - RNA, 87 nt, Homo sapiens
cagcggccccggaaaagacagagcaggccagggagcggagagcagagaggcagagcaagacgccggacacccacaaggagcagcgga

SEQ ID NO: 113240 - RNA, 72 nt, Homo sapiens
cgccgcagaggcaccaccaggagcagaagaacggcgccacaagacccggcaagcagaaggaccaaaacaggc

SEQ ID NO: 113241 - RNA, 78 nt, Homo sapiens
caaacagaaaccccaccagaaagaggaaacaaaacaggaacccaagacgaagaaacaagaagaaacccaaggagacac

SEQ ID NO: 113242 - RNA, 74 nt, Homo sapiens
gcgcagccagaaacgcaaagggagcacagcaaccaagagcaaaacaaggaagacacagccagaccccaagacag

SEQ ID NO: 113243 - RNA, 64 nt, Homo sapiens
acccgacccaggccagcacaggcacagagacgggggcagaggcagaccgagaccacgccaccga

SEQ ID NO: 113244 - RNA, 73 nt, Homo sapiens
ccgcaggccaccgacacgagacaaccgggagccggagcaaagagaaaggaccacagcggaaccgagagccaca

SEQ ID NO: 113245 - RNA, 84 nt, Homo sapiens
gccaaacggccggcccccagacaaacacaaagacacaaccggagaaccagagagcacagagaaagcgggaaacggccaaacaga

SEQ ID NO: 113246 - RNA, 76 nt, Homo sapiens
caccgggcgcggacgcccccggaagcgcccccccaggccggagacggaaaagccagcggccagccgggggccacgg

SEQ ID NO: 113247 - RNA, 90 nt, Homo sapiens
ccggcccggagcaccgagccgcggcacggaggaggcacacaggaccccgcgagccagcggcgacgggaacaagccccaaagagcgccgca

SEQ ID NO: 113248 - RNA, 79 nt, Homo sapiens
cgaggaccggccccagcagcacaagaccaggcagcgggccccaggccggggcgagcgggcccgggagcgggaagagcac

SEQ ID NO: 113249 - RNA, 80 nt, Homo sapiens
cagcggcaacaagacaccagcagacgaagcccccacccggagcgcaccacaacccaagcgggcaacagagagagccagaa

SEQ ID NO: 113250 - RNA, 75 nt, Homo sapiens
cgggagccgggggagaggcagagcgccccaggggggcgcccgccgcgcagcacagagaagaagaaaaaaagagca

SEQ ID NO: 113251 - RNA, 70 nt, Homo sapiens
ccagacaaagacaaggaacaaggaaaggagccccgggaacacccagagaacgagaccgggaagggaggac

SEQ ID NO: 113252 - RNA, 74 nt, Homo sapiens
acggcacaaggcaagaagggcgcgcgacaggggcaggcggcacaggagagaggaaaccaggaacaacggaacgc

SEQ ID NO: 113253 - RNA, 67 nt, Homo sapiens
ccggggacgacagcagcccacccgcagcgggaacagagcccccaaaccggaggaaaggccacccaga

SEQ ID NO: 113254 - RNA, 34 nt, Homo sapiens
aagaaaggcagaagaccggaagagagaagaagag

SEQ ID NO: 113255 - RNA, 68 nt, Homo sapiens
agcaacgagagccagagaagaagggccgcgaggaaaaggacaaagggaggaaaaaggccgggacagaa

SEQ ID NO: 113256 - RNA, 66 nt, Homo sapiens
agagacaaaggcgcacaaggacggcgaaacgaagcagcagccagacaggaagggaaggggcggaga

SEQ ID NO: 113257 - RNA, 66 nt, Homo sapiens
aaaccagggaaaaagcaaaaccgaacacgaccagcccaggcacccaaagggcgagaaaaagcggag

SEQ ID NO: 113258 - RNA, 78 nt, Homo sapiens
agccggccggcaaaggaaaccccagaggcccacagaagcggcacgaacggaagacagacaagagaaaagaaagagggg

SEQ ID NO: 113259 - RNA, 74 nt, Homo sapiens
gggggggcaaagcggagagaaaggagaaacacagggcagccagaaacagcaaacaaacaggccaaggacaccag

SEQ ID NO: 113260 - RNA, 90 nt, Homo sapiens
ggagcgccaagagcccagcaccacggcacggaaggggggcggccgggaggaagcgcaagcaccccccgaaaccgggagaagccggccagg

SEQ ID NO: 113261 - RNA, 79 nt, Homo sapiens
acccagggccggaaaagccaacgccggcgaagcaccagcacaacgaggccacccggaaaggaacaacagcacaacaacc

SEQ ID NO: 113262 - RNA, 74 nt, Homo sapiens
ggagcccgagagagaaggggcgacaggagccaagggaaaacacaccaaacggaacccggggaccaccagacagg

SEQ ID NO: 113263 - RNA, 76 nt, Homo sapiens
gggaaaaagcaagaaaaccaagaacgccggaaggcaaaggcgggcacagggcccaacgcgcaggccacgggccggc

SEQ ID NO: 113264 - RNA, 33 nt, Homo sapiens
gaaacccagcgaaggagacaagccagagaccca

SEQ ID NO: 113265 - RNA, 70 nt, Homo sapiens
aaaaaccacagggggaagacgagagagagagagagccaacggaccacaacagagaaccaaggacgggaag

SEQ ID NO: 113266 - RNA, 71 nt, Homo sapiens
gccgaacgaccacgcaagagacaagcaggacagccaaaccaggccggcccagggagaacgcaaaaccacca

SEQ ID NO: 113267 - RNA, 79 nt, Homo sapiens
agaaaccaaacccacacccccagcccaagggaacgccaggagcgccgggagacacacgcaaaaagaaaaggaagaaaag

SEQ ID NO: 113268 - RNA, 82 nt, Homo sapiens
aagggcacgggaagaccggaggggacgaagaacgggggccagcagcccccccgagggcgcagcaacgaggggcccaggagga

SEQ ID NO: 113269 - RNA, 53 nt, Homo sapiens
aaggaacagcacagggcgcaacaagagcgacaaacgcagggcggcagggcaca

SEQ ID NO: 113270 - RNA, 76 nt, Homo sapiens
gcgcgaggaggaaaggaggacgagggcacaacaggagagggaaccaaccacgaaaagagcgcaacaggccagagag

SEQ ID NO: 113271 - RNA, 81 nt, Homo sapiens
ggcgggcgcggggcaggggccgagcggagaggggcacacgacaagaaacagacagggggcaggcaccaaagggcaagagcc

SEQ ID NO: 113272 - RNA, 81 nt, Homo sapiens
acccagaggcgggaggggccgggaggcagaggggcagggcccggcccagcccacccaggaaccgacacggcaccagggggg

SEQ ID NO: 113273 - RNA, 80 nt, Homo sapiens
cccacgaagggaggaaaagggcagggacagcgcaggcagcagaaaaacaaccaccagcgagcaaaaaggcaaagaccaag

SEQ ID NO: 113274 - RNA, 57 nt, Homo sapiens
ccggggccggcggccaggggcgcgaccccccggcaccagccggcaaacaccaggcgc

SEQ ID NO: 113275 - RNA, 76 nt, Homo sapiens
gggggacaagacaacgggccggggagggccacagcaggaagccggagccagaggacggggcgaggccagcaccggc

SEQ ID NO: 113276 - RNA, 78 nt, Homo sapiens
gcacagggccgacccagggagcccgagacgagcgccgagggcagggcgggcccaccgccccagccacccagcacaggg

SEQ ID NO: 113277 - RNA, 81 nt, Homo sapiens
acccagcacgaggaggcgcgaggagagccagacaacacagggacacaacaaacacaaccgccacagaagcacaggcaaccc

SEQ ID NO: 113278 - RNA, 125 nt, Homo sapiens
ggagaagagccaagagccgaccagaaagaaaacgacgagaaccagagaggagacgacccccaagaaaccaccacagggcgggcccaagaccccaaagaacccaagggccggacagcccaaccgag

SEQ ID NO: 113279 - RNA, 60 nt, Homo sapiens
gacagaggaccaggagcaccgcccaggggccgggagaggaaggccccaagcagccagcag

SEQ ID NO: 113280 - RNA, 108 nt, Homo sapiens
gagagaaaaccgggaaccagagcaaagaagaaaccggccagaaacagccagagaaggcagaaccaggcccaggccagagcccgggcagcacagccaggccgcagaccc

SEQ ID NO: 113281 - RNA, 69 nt, Homo sapiens
ggacgcagcccggcggcagcagacacaagcgggacggaagaggcccggcgaccggacagaaaccaagcg

SEQ ID NO: 113282 - RNA, 79 nt, Homo sapiens
ggggaaagaaggccgaaggacccccacaacgagcgcccggaggacgccagcagcccggacgccaccaagccgagccacg

SEQ ID NO: 113283 - RNA, 76 nt, Homo sapiens
gcggaaagcccacagcagcagggccaagcgaccacgcaaaacaaacacgccagaggaaaggccagaccaagagaac

SEQ ID NO: 113284 - RNA, 91 nt, Homo sapiens
aaccaaggaaaaagccagcgcagccaagcagagagacggagcaccacccaaaggccacaagaacaagcccccagaccggaaagccgaccag

SEQ ID NO: 113285 - RNA, 75 nt, Homo sapiens
cgaaacacaaggcagccccagcagcacggacaggggcaacagaaagccacaaccggacaagaaaaaaaagaaaac

SEQ ID NO: 113286 - RNA, 72 nt, Homo sapiens
cggaccagaagccagagcgaggacgccggcagggagacaggcaagggacgcggagacccccccgcagccgga

SEQ ID NO: 113287 - RNA, 50 nt, Homo sapiens
gcaggccgcccccggcaagacagacagaaagcgcccaggacaggaccagg

SEQ ID NO: 113288 - RNA, 85 nt, Homo sapiens
gggccccgaggccgcagggacccaggacccccggccgaggggcaagagccagggaccgacccagccccccagcagacgccagaag

SEQ ID NO: 113289 - RNA, 81 nt, Homo sapiens
aaaacggagccagccgccaggaagaccagaagcgaaggaacgagcggccagcgccaggcaggagcccagccagccaaaccc

SEQ ID NO: 113290 - RNA, 71 nt, Homo sapiens
acacaacaccacgcagagggacgagcagagaacagcaaaagagcacaagagagaaccaggggaagggcagc

SEQ ID NO: 113291 - RNA, 73 nt, Homo sapiens
ggggcgagagcgggcaccccccaaacgacgcagccacggagagggagaagagaagaccagagaaagaacaacc

SEQ ID NO: 113292 - RNA, 42 nt, Homo sapiens
ggcaacgcgcacagcgcagagaaacggcggaaaacccgaagc

SEQ ID NO: 113293 - RNA, 57 nt, Homo sapiens
cccacagcccagaggacggaagacagagaaaagggccagggacgaagccccgggccc

SEQ ID NO: 113294 - RNA, 74 nt, Homo sapiens
cccgagcgcccagacacgacagagagccggaggaaaccacagagcagccagcagaagggagaaccaaaaggaaa

SEQ ID NO: 113295 - RNA, 78 nt, Homo sapiens
gggaccacggcacaaacccagaggagaagcagcaagcacacggaaaaaaggaagccccagggacaggaaagcaaggcc

SEQ ID NO: 113296 - RNA, 65 nt, Homo sapiens
agggccacaagagcgaggagaagcgagaaaagagaaacggacccaaagccgacgaccagaggcag

SEQ ID NO: 113297 - RNA, 40 nt, Homo sapiens
ggccaaggggcggcaaaaaggagcgaagaaagcaggggag

SEQ ID NO: 113298 - RNA, 69 nt, Homo sapiens
gaaagggaaacggaaagagcacacagaaaacaaaaacaacacccaggcaaagaaaccccaaagccagca

SEQ ID NO: 113299 - RNA, 73 nt, Homo sapiens
cgccgcaacaagcggcagcaaggagcacagagcgggaagaggcccgaaagaaacccgaaaacccaagggcccc

SEQ ID NO: 113300 - RNA, 84 nt, Homo sapiens
aaacggccggcaccagaacccggaggcagccaccagacagcgggggcaggccgggcccacggcaacgagagcggcaagacgggc

SEQ ID NO: 113301 - RNA, 87 nt, Homo sapiens
ggagccgcgcccgccccagcggcccgcccaacgcccgaccagccagaccaggaccaggcggggcgaaccagcgcggaccagggagcg

SEQ ID NO: 113302 - RNA, 55 nt, Homo sapiens
gaaggcagagcgacccaggcacagacaaggacagggcagcccagagggggagaga

SEQ ID NO: 113303 - RNA, 73 nt, Homo sapiens
cccgaggggaccgccgggccagagcaagccgaccccccagacagcaaaggggaaaccgaaacaaccaagggga

SEQ ID NO: 113304 - RNA, 53 nt, Homo sapiens
aacaccagaagacacacaggagcgacaaggaaggcgagcggcggcaaagggac

SEQ ID NO: 113305 - RNA, 64 nt, Homo sapiens
aaaagacaagggggcaaagcaacccccaggaccgggcagacggcggggcaaggaagacccaaaa

SEQ ID NO: 113306 - RNA, 58 nt, Homo sapiens
ccgcaagggggaccagacggggagggcgggaggccaggcagcacgcagacaagaagcg

SEQ ID NO: 113307 - RNA, 66 nt, Homo sapiens
gcccgggcggaggcggcagagaccgggcgagcgacccaggaaggagagagcaggcccgaccacgaa

SEQ ID NO: 113308 - RNA, 81 nt, Homo sapiens
agaggacacagcggaccagggaagaacgaagaacgaaacggaggagcccaggaggaagaagaagcagccaaagaagagaaa

SEQ ID NO: 113309 - RNA, 54 nt, Homo sapiens
ggaccacccagaggagcaacagccggaagcagccaaagcacggagacaagaacg

SEQ ID NO: 113310 - RNA, 63 nt, Homo sapiens
ggagcacaacaggcagacagacaagaaagcgaagccaacaaagaaaggaccggggcaaaacgg

SEQ ID NO: 113311 - RNA, 83 nt, Homo sapiens
cggccgcccggcgccccggggacgccgccccccggcaggaggcaaagggaccccaagaaaccaaagggcaagagccgcagccc

SEQ ID NO: 113312 - RNA, 87 nt, Homo sapiens
ccaagaagacacaagcgcaagcacacccaccgaaacaagacaggcagggacaaacaaccaccccagcggcacgagcagcagagcaac

SEQ ID NO: 113313 - RNA, 82 nt, Homo sapiens
aaaacaaccaacagagcccgcagagcaccaggcccaccggaaaggaaagaacagaacaggggagaagacaagaacacccaga

SEQ ID NO: 113314 - RNA, 84 nt, Homo sapiens
gcgacagcgaacagcgcggccgcaggcgccggcgaaagcaacgaagggacgccagaacaagagaaggagagcagaaaggaggcc

SEQ ID NO: 113315 - RNA, 88 nt, Homo sapiens
ggcggcggcggcggaacgccaggcaggaaaaagccccaacgaagagaaagggaccgagagagaaaccaaggaaaggagaaagacgaca

SEQ ID NO: 113316 - RNA, 84 nt, Homo sapiens
cagacgccagcgggacgaggaccgagaccgcggccgggaccgaggcgcagacccaggggagcccaccagccagcaacaggcccg

SEQ ID NO: 113317 - RNA, 73 nt, Homo sapiens
gagcccaaccaggagccagccaggagagaaaagaaccacgcgggaacagagcgacacccagcgggggcagcgg

SEQ ID NO: 113318 - RNA, 83 nt, Homo sapiens
ccaaggaaggaggccccgaccggcggcgcaaaggcgcccggagggacccggggaggccagaagcaagaagaagagaaagggcc

SEQ ID NO: 113319 - RNA, 82 nt, Homo sapiens
ccaccggaagccagaaagacccgaggaagaagagaaaacaaaaaacgacaaaaaaacagaagaaaagagaaaggaaaaagaa

SEQ ID NO: 113320 - RNA, 78 nt, Homo sapiens
aaaagcagcgccagaaagagagagcagagaccggacaacagcgccaaggaaagaaaacccagaagacacgagaaaaac

SEQ ID NO: 113321 - RNA, 81 nt, Homo sapiens
ccacgcgaggacagaaaacgcaagacaacaggagaggaaagcggaaagccaagggacacccggaaccgagaaagaccccaa

SEQ ID NO: 113322 - RNA, 75 nt, Homo sapiens
gcgagaacgcgcagaccggggagggaaagaaacacccagccacaccccaccgcccagagaagggaagagaggagc

SEQ ID NO: 113323 - RNA, 73 nt, Homo sapiens
cgagacgggcggagaggagaagaggggaaagaaaaagagcccaccaaaaggaacagacggccccaggcggaca

SEQ ID NO: 113324 - RNA, 73 nt, Homo sapiens
accaaccagacgaaagaaagaccggcaaaacaaacggagagaggagggagaaacaaaggccaaagacgcagga

SEQ ID NO: 113325 - RNA, 68 nt, Homo sapiens
ccacacgccagcgcacaccggggccaccccaaaggcaacaacacggcaccacacaagcgaagaagccg

SEQ ID NO: 113326 - RNA, 109 nt, Homo sapiens
aagcaagaggcgggaacagagccacaccgagaaccgccgcggagccccacccaacgggaaagccgcgggccgcagaggcaacagcccacggaagaagacccagcagggg

SEQ ID NO: 113327 - RNA, 57 nt, Homo sapiens
gcccaggcccccggacggcgcggaccccgacggcgccggcggagcagaccaccgccc

SEQ ID NO: 113328 - RNA, 67 nt, Homo sapiens
aaaacgaggcacaaaaagcagagcacgagacaagggcagagccaagcgccgcccgggcccaagcacc

SEQ ID NO: 113329 - RNA, 71 nt, Homo sapiens
gaaaagacccccagcgcgcgcagacgacacgccgcgagcgccccggccaagggcgaccagaaggcacagca

SEQ ID NO: 113330 - RNA, 88 nt, Homo sapiens
gggagggaaggaccggaccggagaacaccgcgcgggaagaagggccccagcaaggagaccaaacacagggggcagccgcccacgcagc

SEQ ID NO: 113331 - RNA, 38 nt, Homo sapiens
ccacccggaaacagcgggcggagacagcagccaacgca

SEQ ID NO: 113332 - RNA, 72 nt, Homo sapiens
ggcacgcacagaaccgagaaacgggaccacaaaggagacacgaggaagggaagagagaagggcacagaccaa

SEQ ID NO: 113333 - RNA, 37 nt, Homo sapiens
agaggaacaagccaagcagcggagaagagagcggaaa

SEQ ID NO: 113334 - RNA, 78 nt, Homo sapiens
ccggaccgcgcaggaagcgcgcccaagagcccagccgagccggccgaggaacagcacaccgagcaagaaacagaagga

SEQ ID NO: 113335 - RNA, 70 nt, Homo sapiens
cgacaccccaacaaacaccagcgcgggagaacaaggagcggcccagagcaaaacagaggaacggacacca

SEQ ID NO: 113336 - RNA, 74 nt, Homo sapiens
aaagggaagccaagaacagcaacgacccaaaggagaggaaggaacaaggacgagaacccccgcgaaccagagga

SEQ ID NO: 113337 - RNA, 77 nt, Homo sapiens
cccccccaggagggacccacagggcgaaggaagcgccgacccacaccccgccaggacgagacccaggcacaccaaag

SEQ ID NO: 113338 - RNA, 79 nt, Homo sapiens
cgaggacaaaaccgaaggaggaacagagaacgaggaagaaaaggaaacccaaaaagacaaggccaagcagcaaaaccac

SEQ ID NO: 113339 - RNA, 47 nt, Homo sapiens
caccgggcaccgcagggagacaaacgagggcacaggaaaagacccca

SEQ ID NO: 113340 - RNA, 65 nt, Homo sapiens
caaacgagacacaaagcacgaagcgacacaaacccgccgggcgggcaaccaagaacacaacccga

SEQ ID NO: 113341 - RNA, 78 nt, Homo sapiens
aagaacagcaggaccggcccagaacccggaccggggcaccccaacggccaaccgccggcaccccgccagaggcggacc

SEQ ID NO: 113342 - RNA, 77 nt, Homo sapiens
gacagacaccgccccgagacgaggggagccgccaccaaaagcagacggaaaacccacggggaagaccacaccccgag

SEQ ID NO: 113343 - RNA, 89 nt, Homo sapiens
ccagcccaaccgggccccggccccgcgcgccccggcccggccccgcgagggaaccacggagaccagaccgcgccacaggacaagaaggc

SEQ ID NO: 113344 - RNA, 53 nt, Homo sapiens
aggccgacagcccagagaaccggaaggcaaaggagagagccaacaacagcaag

SEQ ID NO: 113345 - RNA, 65 nt, Homo sapiens
cagcagcgcgacccgagccggcgcccgggccggccaggacgacccgcggaaggagagacaggaag

SEQ ID NO: 113346 - RNA, 57 nt, Homo sapiens
cccccgccagaaaagcgccaagcaggaggaaggaccgagcgcaggaaccaggccagc

SEQ ID NO: 113347 - RNA, 83 nt, Homo sapiens
cgcggcgccggagaggcgccggcgcgcgggccccgcagcgcacccggcggcggacaggcaaacggccaagggagagccaacca

SEQ ID NO: 113348 - RNA, 86 nt, Homo sapiens
cagcagcagacccaagaagacagaccccgaggagacgcgcaaacgccaaggcgccggggagcaggagaagaaggcacccagcgaga

SEQ ID NO: 113349 - RNA, 53 nt, Homo sapiens
ccccagccagggaaccacggagcacgagaaaacggcgggggccgcaagagaca

SEQ ID NO: 113350 - RNA, 74 nt, Homo sapiens
ggccacacgcacacagggggacaacagcaggagcaaggagagacccagcaagcgcacaagagccgaaagaaagg

SEQ ID NO: 113351 - RNA, 84 nt, Homo sapiens
ccgacagccaggcccgcgagaacggagggcagaaggcgcaaaggcaaagaccagcagggcgcccccgccccggccaacaggacc

SEQ ID NO: 113352 - RNA, 91 nt, Homo sapiens
gggcagacggacaagagcgcggaacaggacgccccgacccaacagcaggggggaacaccccgagcccaaggcagggaaggagccggccgca

SEQ ID NO: 113353 - RNA, 76 nt, Homo sapiens
ggaaaggaaccgggacacaacagagaggggacccaaggcaaagcgaaaaagaccgcagggaaggccgccacgagac

SEQ ID NO: 113354 - RNA, 78 nt, Homo sapiens
cgccgacgcaccacacgacggcgcagggcaggggagccgccaccaaaagcagacggaaaacccacggggaagaccaca

SEQ ID NO: 113355 - RNA, 104 nt, Homo sapiens
aaggaccagagcgacgagaagagagagaagggagagagaccaaagacgagagcagagaagcagaggagagggcaaggaagaaaccaccaaggccaaagcgagca

SEQ ID NO: 113356 - RNA, 71 nt, Homo sapiens
cacacagccagggcacaagcgagaaaagagcaccgaagcaaaacaaacggagagaggagggagaaacaaag

SEQ ID NO: 113357 - RNA, 85 nt, Homo sapiens
cagcaagcgcgccgcgccgcagcggcgccgcggacaagcacgagggcgcgccgagacgcccgagggaccagacaggcaaaacacc

SEQ ID NO: 113358 - RNA, 67 nt, Homo sapiens
ggcccacgggaaaagaaaacaaaccggcgaggagaagaaaggaagcccccagcgaacgggacgcaaa

SEQ ID NO: 113359 - RNA, 75 nt, Homo sapiens
gggggcggagcggacgcggccgcggacgggcagcgaagagagcccgcgccaggaccgggaacggggccccaaaca

SEQ ID NO: 113360 - RNA, 73 nt, Homo sapiens
cgcgggcccgagcagccagaccgacccacccgcgcgggcacaggcaaaagaaggggagcaggggcggaacgac

SEQ ID NO: 113361 - RNA, 76 nt, Homo sapiens
aagggaccaccaagaccaaggaaagcaagaaggcaaaaggggcagacacagcggcaagcccaggcacaacagagga

SEQ ID NO: 113362 - RNA, 63 nt, Homo sapiens
agcagaaacagacaggaccacgcaaggaaacacaaagaagacaccagaagggccagcaccacg

SEQ ID NO: 113363 - RNA, 71 nt, Homo sapiens
ggggacaaagcgagcggcacacgggacaaccaagagcaacagaccacgggagaaaggaaacagcagaagcg

SEQ ID NO: 113364 - RNA, 55 nt, Homo sapiens
acgccccagaggaccccggccggaggcaaggccgccaggcacagagaaggcaaac

SEQ ID NO: 113365 - RNA, 76 nt, Homo sapiens
acaacaagaaggacagcaaaggagcaggaccagaaaagacgagaaagcacaggggaggagagagaggaccaccagg

SEQ ID NO: 113366 - RNA, 76 nt, Homo sapiens
cggagcagcggcacagaaacaacgaacgagcaaggaagggccaaggcagaccccacaccggagaacgcaaccagaa

SEQ ID NO: 113367 - RNA, 83 nt, Homo sapiens
gcgagaacgcacaggccgcgcagagcgggaccacccgggcacagcaggcacggaggaagaaggaccggggagacaggaacacg

SEQ ID NO: 113368 - RNA, 85 nt, Homo sapiens
ggcggcgcgaaggagaacggagaggaagaacgagccgcacaggaacccaagacagaccaggagaggagcagccggaaagcaacga

SEQ ID NO: 113369 - RNA, 63 nt, Homo sapiens
gccgaaagcaagaccaaaagagaggcaccgcggaacacaagagggcgacaggacaacggacag

SEQ ID NO: 113370 - RNA, 67 nt, Homo sapiens
gcaaagcagcacacaaagagggcacccagaccgcaggcggggcacagcgcagccaaaggaaaaggca

SEQ ID NO: 113371 - RNA, 78 nt, Homo sapiens
caccccgcggagagcgcaagccgggcagcagcccagcggcagcagaaagagcaagaagacggaacaagaaaggaccag

SEQ ID NO: 113372 - RNA, 53 nt, Homo sapiens
agacccaaacacgaggcaaagaaaaagccagccgaggacgggaaccagacccc

SEQ ID NO: 113373 - RNA, 62 nt, Homo sapiens
caaccccgccgcagccccggacgcaggaccgaaaagacgcggccccaaaggaaacacccgaa

SEQ ID NO: 113374 - RNA, 85 nt, Homo sapiens
cgacgcagagcccaggacaccggggcggaaggcagaggcgaggacaccggcaaggaccccgaggacgaaaaaaggcagcggaaag

SEQ ID NO: 113375 - RNA, 70 nt, Homo sapiens
agaaagcaccccacaggggagacgaggggacaacgaaggaggcaagcaacaaagggacaaaaacgacaag

SEQ ID NO: 113376 - RNA, 86 nt, Homo sapiens
cccaagaagcagcccacgaaaggcagccgcggacgccgcgccagcgacaaacaaaccgaacaggaaggccccggaaccacagagcg

SEQ ID NO: 113377 - RNA, 78 nt, Homo sapiens
ggcaagcaccacagccaagccaacccagccaccaggggacaggacgcagggccacagcgacccacggccgacgggggc

SEQ ID NO: 113378 - RNA, 76 nt, Homo sapiens
gacggccagaggacgcgcaaacccaacccggaccaaggagcggcgcggggaccaaacccggagccagccaccccga

SEQ ID NO: 113379 - RNA, 65 nt, Homo sapiens
agcccaggcaggaaccaccaccacagacccagacaggggggcgaagacagcaagaaccgcaaggc

SEQ ID NO: 113380 - RNA, 91 nt, Homo sapiens
cgcgccgccgaccccccggcgccgcgccggcggcgggagagcagaaagacgagccgccggggaaaaagcgcagcaaagagacaagccaaag

SEQ ID NO: 113381 - RNA, 76 nt, Homo sapiens
gaacaaggaccacggcaaggaggacgacccacgccgcgcccgaggccccgcaccccaccccacccccggccccgcc

SEQ ID NO: 113382 - RNA, 84 nt, Homo sapiens
ccagagccacgggggcagcgccgaaccaggaccggacccggacccaaaggccagcaaggcgggaggcccccggcaggaggacac

SEQ ID NO: 113383 - RNA, 73 nt, Homo sapiens
aggaaagaaggcaggggacgaacagacgcggaacacaaaacgagagcacgaagggagaagcccgacgccaaaa

SEQ ID NO: 113384 - RNA, 70 nt, Homo sapiens
gaaccgcagccgagcggggccggccacagaaccaaagaaaaggcgacagagagccgcaccagaacaccaa

SEQ ID NO: 113385 - RNA, 78 nt, Homo sapiens
agccggaagccgaacagggggcgaaaggagaaccaacaagcagggaaagcgcggaaaaggaacagaagaggaaccgaa

SEQ ID NO: 113386 - RNA, 57 nt, Homo sapiens
ggccgcggacagagaagaggacgcggagacaagagaaaacccgcagcccaaagggca

SEQ ID NO: 113387 - RNA, 75 nt, Homo sapiens
gcggaggagaccgggaaaccgccgaagacgaaggaaacccgaagaggggagaaaaggaacaagaaaacaacggag

SEQ ID NO: 113388 - RNA, 81 nt, Homo sapiens
accagaagagaggagcagagaggcagcaggaggggggaagcaggaggcacggaggggaccccagaaccccagccggaggag

SEQ ID NO: 113389 - RNA, 63 nt, Homo sapiens
ggaaaccccaacacagagccaagcgccaaggcaagaaggaacagacaaaaacggccggaagga

SEQ ID NO: 113390 - RNA, 79 nt, Homo sapiens
ggccaagcaaccccacccagccggcggaggagaagaacggaccacggagacacagggcgggcacgcacagaagaagcgc

SEQ ID NO: 113391 - RNA, 77 nt, Homo sapiens
accagccgaaaacagccagacgcccaccaagaaggggagcgggacgggcggcgagcggaccgcgaggcccccaaccc

SEQ ID NO: 113392 - RNA, 80 nt, Homo sapiens
cgcgggcgccgggccaggacggagcggggcccggcgcacccaccaccgccgcccacggcagcccagggacccgagcaccg

SEQ ID NO: 113393 - RNA, 57 nt, Homo sapiens
gaaaggacaagcaggccacgagaaccgaagagccggggagcccgggaccagggccag

SEQ ID NO: 113394 - RNA, 80 nt, Homo sapiens
cgagagaaggacccacggcgcgcgaagggcggcgacggcggcgcgaggaccgaccgggcccgcggacgaagaaggcaccc

SEQ ID NO: 113395 - RNA, 52 nt, Homo sapiens
agaccaacggagacaaaacagccaggggcagcacgccgaaggagagaccaga

SEQ ID NO: 113396 - RNA, 54 nt, Homo sapiens
gggacaaaaaccagaccaggaagaccgggagcacagaagaaaagaacaaggcca

SEQ ID NO: 113397 - RNA, 86 nt, Homo sapiens
ccggaggacagggcacaacaaccgcggggaagaacacccacccgcaaagccccgagggcggacccacgagccgcccgccggggggc

SEQ ID NO: 113398 - RNA, 77 nt, Homo sapiens
caagacgagcccaccacggacagcaaacagaaacgcagaagaggaagcgagcaacggagcccgagaggccggaagag

SEQ ID NO: 113399 - RNA, 78 nt, Homo sapiens
gcagagggcaggaccggcacccggcgccggaccccgagaaacagcccaagaccgagccacaaggaggagagcggccag

SEQ ID NO: 113400 - RNA, 69 nt, Homo sapiens
gagagcaaagaccgcccgcccgggcgcgcggaccccgcggagagaaaccgaaaacaaagggcaaaggac

SEQ ID NO: 113401 - RNA, 73 nt, Homo sapiens
ggcgaaacaacaagagccaaaccagagcaacaggcaaagaagacgacccggacgaagaggacgccaaagaagg

SEQ ID NO: 113402 - RNA, 71 nt, Homo sapiens
cccgacgccccgaggcccagggggcggcgggggacaacaggcccaacccaagccagggggcccaggaacag

SEQ ID NO: 113403 - RNA, 70 nt, Homo sapiens
cacgacagaacgaacgaaacaccaaaggcacaacacagaagaaggcggggcaaaggaaaaaacagaagga

SEQ ID NO: 113404 - RNA, 84 nt, Homo sapiens
ccgggccccagaaaccccccgaagaagaccccccacacggggacgccgcgcaccccagaggagcgccaccgccaagagcagcag

SEQ ID NO: 113405 - RNA, 82 nt, Homo sapiens
caacagcgcagcgccccaggggggcggggaccaaaggccacaagcccgaggaaagccagccaaacacccaagccaaaagcgg

SEQ ID NO: 113406 - RNA, 84 nt, Homo sapiens
gcaaggagcgcggaacggggagcgccggagcagcggacccaggcaggcaccgccagggaggagagcggggcacgcgcccaacgc

SEQ ID NO: 113407 - RNA, 66 nt, Homo sapiens
ggagcgcgaggcgggcgcggagaagcgcggagggggggccccagcccggccgaacgggcgcacgac

SEQ ID NO: 113408 - RNA, 54 nt, Homo sapiens
ggacgccccaccgccgacgcccccagccaccagcaaaccagccggcgggcgcca

SEQ ID NO: 113409 - RNA, 72 nt, Homo sapiens
caagccgcaaggccagagcagccagaaggaaacacaggaaacaggggaaccagaagaggccaaccagcacga

SEQ ID NO: 113410 - RNA, 72 nt, Homo sapiens
cgcggggagagagggcggacacgcaaacggcaagccggggacaagcacaacagaagggcaaagacagcccaa

SEQ ID NO: 113411 - RNA, 78 nt, Homo sapiens
cagggaccagcaacaacgaaagaagcgggaaggacgagcagaagacacacaaggaaagccaagacaaacgggcaagcg

SEQ ID NO: 113412 - RNA, 70 nt, Homo sapiens
cagaggagaccgccacacaagagaagacccaccgaggaggaggcaccagaagcccccagcgggaaaagag

SEQ ID NO: 113413 - RNA, 77 nt, Homo sapiens
cgcgggcaacccggagcaaccccccaggacgggcggaggcggggggaccggcgggcgggacaccccgggccaagagg

SEQ ID NO: 113414 - RNA, 78 nt, Homo sapiens
cagagagagaaacccgaagcgcggaaaacccagggggcgaacacggaaggacggacggacaaagccaagcaaaccaga

SEQ ID NO: 113415 - RNA, 68 nt, Homo sapiens
acacgagcacaagaccaaacggccccaaaggcgagccacacggaaaagaaagcagacaccaggagaag

SEQ ID NO: 113416 - RNA, 51 nt, Homo sapiens
ggcaccacgcccgccccagcggagaggacgcagggaaggagagcgaagaac

SEQ ID NO: 113417 - RNA, 80 nt, Homo sapiens
gcaggcgagcgaaggcacaggcccacaaccgcaccaagaagcacgaccgcgaggagcgagacccgggcgcccgagaaaga

SEQ ID NO: 113418 - RNA, 64 nt, Homo sapiens
gagccgcagagagcccccagggagggccaccaagggacaaggcccgacacccgcggacgcaggc

SEQ ID NO: 113419 - RNA, 66 nt, Homo sapiens
acaagccgaaagaccccaaaccagcgaagggcaggcaggccacgacacagccgaccagccccaaga

SEQ ID NO: 113420 - RNA, 78 nt, Homo sapiens
aaagaccccagaggagggaggggaaagaagccaaggaaaaagcacccagaccaaaaaaaaaaaacaaccgaggggccg

SEQ ID NO: 113421 - RNA, 72 nt, Homo sapiens
accgagagcggaccgagagcgcgaaacgcacgagaaggaagcagggaagacaccgagggaagagagagaaaa

SEQ ID NO: 113422 - RNA, 82 nt, Homo sapiens
cagaagaaaagccgacaccccaggcacccggcgcaaagaaaggaccgaaggagaagaaggagaaggggaggagaaggcaagc

SEQ ID NO: 113423 - RNA, 65 nt, Homo sapiens
ggacgcagcgaaggccaagagcgaccaggcggagagcggcagagccggagcaggagcgggaccgg

SEQ ID NO: 113424 - RNA, 78 nt, Homo sapiens
ccccgagaaccgcaggagccagaggccgggcccgggaggagcaggggcagaggggagaacccagccgggaccaagcac

SEQ ID NO: 113425 - RNA, 56 nt, Homo sapiens
acaaagcccccgccacggaccggaggaggccagagggaagcaaagcagccaacacc

SEQ ID NO: 113426 - RNA, 93 nt, Homo sapiens
caacccaaccacggggaaaaggcaaaaacccacaccgcaacccagcgagagaaagggaaagggagcagcaccggccacacccacagcacgacc

SEQ ID NO: 113427 - RNA, 40 nt, Homo sapiens
gcagccccgccacccggcagcccccgcgacgagcccccaa

SEQ ID NO: 113428 - RNA, 73 nt, Homo sapiens
cgcgacgacgcggcaccggccgacgccccgcccgcccagaagcaggaacaagacaacacacacgcaccagggc

SEQ ID NO: 113429 - RNA, 81 nt, Homo sapiens
ccaggaggagcaggggggcccgcggcgcaggacgcccaggaaggcagcgcgcccaggagaagaaaagcaacggcgcaagag

SEQ ID NO: 113430 - RNA, 43 nt, Homo sapiens
aaccacaaaaggggaagagaaaggaacacagaggaacaaccgc

SEQ ID NO: 113431 - RNA, 95 nt, Homo sapiens
acacaagcaggacggagagcagggacaaaggagaaacagagacaccccagaaacaaaagcaccgggaggaaagagagccacacgaagaacacggc

SEQ ID NO: 113432 - RNA, 68 nt, Homo sapiens
cccgaagagacaacaacaaacaaacgaggccccaaagccggggaagaccagccgaaacccggggagcc

SEQ ID NO: 113433 - RNA, 51 nt, Homo sapiens
gcacgagcgccacaaccccagggacgaacagcggggacgccccagcagacc

SEQ ID NO: 113434 - RNA, 79 nt, Homo sapiens
gcgcgcccgaggcgaggaggagcgcggcggcggaggccccagggacacaaaccagaaacgcaagaccggcaagggcagg

SEQ ID NO: 113435 - RNA, 86 nt, Homo sapiens
accacccaacaagagcaacgcccagcgggccggcgcccggggccccggagaggaccaagaccccggaccggggcccagcggcccca

SEQ ID NO: 113436 - RNA, 85 nt, Homo sapiens
acaggggccaaagggagagggaagccacaacaagccaaagaagaagggaagggacgaggcagaagagaggagcagagggggccga

SEQ ID NO: 113437 - RNA, 79 nt, Homo sapiens
caacacaaggccggccccacagcggcagacgacgcagccagagcagcaagaggccaaggggacgacggccacgggcccg

SEQ ID NO: 113438 - RNA, 66 nt, Homo sapiens
gcaacggggaccccggagcccagaagacagagggcgagacggggacaggcaggcgaccgggaaacg

SEQ ID NO: 113439 - RNA, 76 nt, Homo sapiens
agaacgaacaccggaccgccaggaaagaccacagcaagaccacgcccccagccgggggaccaggccgaacgacccg

SEQ ID NO: 113440 - RNA, 76 nt, Homo sapiens
gccacacccagcaaccgcccggcccacacgagcaagcaggcgaagcccacagagcacaaagccaaaacgcccacaa

SEQ ID NO: 113441 - RNA, 78 nt, Homo sapiens
gagcagccggaacggcggaccgggacgcacgccagcgaggaggacccccaaaggagaggggcaacggacacaggagac

SEQ ID NO: 113442 - RNA, 85 nt, Homo sapiens
aaagagccccgaagcaagagccccccagcgcagcccaccagagcggaagaggcgccgcgacgggaagaggacagagcgccgcgcc

SEQ ID NO: 113443 - RNA, 73 nt, Homo sapiens
agccgcaggggggcgcgcgccgggcggacaaggcacgaggcgcggcgaccaccacagcagagcccggcgaagg

SEQ ID NO: 113444 - RNA, 74 nt, Homo sapiens
cgaaacgcagaagcgaggagaacagaagaaaaggagcccaggacagacgccaggaagccggacgcgcagggaaa

SEQ ID NO: 113445 - RNA, 78 nt, Homo sapiens
gagcccaggaacggccggaggacagggcgccgcgggagccggcccggcacagcggggcgcgcgggcggagcggcggcc

SEQ ID NO: 113446 - RNA, 38 nt, Homo sapiens
agcaaaacagagagagcagaaggcccaggaccgcagcc

SEQ ID NO: 113447 - RNA, 78 nt, Homo sapiens
cacggaaggggcaagggacccacaaaaccgcccaacagaacccggacgaaagccaacaccagcccagcccaaacagca

SEQ ID NO: 113448 - RNA, 76 nt, Homo sapiens
caaaagcagcgcaggggggggccaggggagagagaaagcccagaaagaaagcacccagggccaggaacagagaaga

SEQ ID NO: 113449 - RNA, 100 nt, Homo sapiens
agaaaccagccacgcagaagagacaaggaccacagccgagcgagagcaggaagacggccgcgcgacaggccccggccaccagccaccgcagaggacagac

SEQ ID NO: 113450 - RNA, 54 nt, Homo sapiens
agccaaagcagccacacaacagcgaaccgcaagcccacaaccccagcgcccacg

SEQ ID NO: 113451 - RNA, 72 nt, Homo sapiens
gaagaaacgcgaaggcccggagaaccaagaacccaccacccagcagcagggcacaaggcgccggaccgaagg

SEQ ID NO: 113452 - RNA, 67 nt, Homo sapiens
gccgcaagacagccccccgcccccccccccacgcaaccccagaccaacacacagcagcgcaacacgg

SEQ ID NO: 113453 - RNA, 70 nt, Homo sapiens
gggggagccgaaaacaccagccggcccaagcgggcccccgccccgcagaggccgggcggaggagaagagg

SEQ ID NO: 113454 - RNA, 33 nt, Homo sapiens
aggagacccaacagacggcgggaccaggacgga

SEQ ID NO: 113455 - RNA, 81 nt, Homo sapiens
gcgcgggggcgggcccgggacgcgacgcacccccccccccggcggagccccgaaggagcgcaggcagcaggaggccgccgg

SEQ ID NO: 113456 - RNA, 36 nt, Homo sapiens
ccgagagcggaacgcaggagggccaaagaagacagc

SEQ ID NO: 113457 - RNA, 82 nt, Homo sapiens
gaggccaagaagaggaagaagaagaagaacagaaaaggaaaaggcacaaccaggacagggcagaccgccagcagcacagcaa

SEQ ID NO: 113458 - RNA, 51 nt, Homo sapiens
cgccgcgccgcgcgggggggaggggacagagcagaaaaccaaggagcaggc

SEQ ID NO: 113459 - RNA, 88 nt, Homo sapiens
accgaccggaccgcgaggccgcgggcggcggcggcccgcgccccggccgagaccccgcgcaccggccaggaaagaccacagcaagacc

SEQ ID NO: 113460 - RNA, 74 nt, Homo sapiens
aagcagagaccgaggcccagaacaggagcccagccgaggagggagaaaagacaaggaaagcaccaagcaaccag

SEQ ID NO: 113461 - RNA, 72 nt, Homo sapiens
agccaaagggccaccaaggcaaaggcagacaacccgcagcggcgaccgaagggcagaagcgcaccgagaagc

SEQ ID NO: 113462 - RNA, 80 nt, Homo sapiens
ccccccccaggcgggaggggggggggcgcacgcccccgaggacgcagagggaacagcgagagcgcccaacggacggcaag

SEQ ID NO: 113463 - RNA, 79 nt, Homo sapiens
ccgcggacggccggcgcggaagcggagccggaggaccggcgggagccagcaaccccaagcaagccggcagcccggcccc

SEQ ID NO: 113464 - RNA, 89 nt, Homo sapiens
ccagacgccagcgggacgaggaccgagaccgcggccgggaccgaggcggcccagcaggagggcggggccgcggcagccacccccacagc

SEQ ID NO: 113465 - RNA, 88 nt, Homo sapiens
cacccgcgcgagccccaaagaagggaccagggagcaacaagagcaagcccaaggagccagccagcggcgccgcagccggagcccgccg

SEQ ID NO: 113466 - RNA, 76 nt, Homo sapiens
cgccccgcgccgccgcgcccacggccccgccagcaaggcggcgcgcccaggaggagcaaaaggagggaggacagag

SEQ ID NO: 113467 - RNA, 82 nt, Homo sapiens
aagaagagcccagcagcacccgccccccagccaggaccggacaggcggccgacaggaagggaaacaaggcagcagccccgcc

SEQ ID NO: 113468 - RNA, 84 nt, Homo sapiens
gaccgacggagacggaaagccgggacaggaggccagcggaagccagaaagccacgcaggacccagagggccacagagggcccgg

SEQ ID NO: 113469 - RNA, 83 nt, Homo sapiens
ggcacagcacagccagaagaggaaagcccccgacaaaagaacccaagccaggaccgaaaagacgcggccccaaaggaaacacc

SEQ ID NO: 113470 - RNA, 77 nt, Homo sapiens
agaaggcacagaaaggaagaccagcagaagagagggaaagggcgggggcaagacccagagaagacaaaacaacaggc

SEQ ID NO: 113471 - RNA, 85 nt, Homo sapiens
gcggcggaggagcggacgggccccgcggggcccgagggcaaggagcagagcggggacgggaaagagggcagaagcagcaagaaaa

SEQ ID NO: 113472 - RNA, 67 nt, Homo sapiens
gcaggaggacggagcccaaccgcaacccgcgccgcgccgcgccgcgccgacaccacgccacccaaga

SEQ ID NO: 113473 - RNA, 63 nt, Homo sapiens
cggagcgcggcccgaggaccgaccggcaggcccaggaaggacggccccacagagcagcaccac

SEQ ID NO: 113474 - RNA, 51 nt, Homo sapiens
agacaccgccccgagacgaggcaagaacggaagcacgggcggaggaaagca

SEQ ID NO: 113475 - RNA, 71 nt, Homo sapiens
caaagccacgaaagcagagcggagaggggcagggaaggcccaaaaccacacacccccgacaccgcgaggaa

SEQ ID NO: 113476 - RNA, 65 nt, Homo sapiens
ggaccaacaccacgcaaagagcaacgaagacaggacaggacggcccgcgacaccaagggaaaaag

SEQ ID NO: 113477 - RNA, 105 nt, Homo sapiens
ccggacgggcggccggcggccagggggagaggcggaggccaggcagcgaggacacgcgccaaaccgacgaaaggcgaggggagaagccgggacagggggaggaag

SEQ ID NO: 113478 - RNA, 74 nt, Homo sapiens
gaagcgagcaggagacagcaggaccacaggccgggacccccgagacaaccacaaaacccaagaaacagagacag

SEQ ID NO: 113479 - RNA, 74 nt, Homo sapiens
gaagagcgccaccggcggcccgcaagaagaccgagaagacaagagacaaggcacaaagcggaccgggggcgagc

SEQ ID NO: 113480 - RNA, 82 nt, Homo sapiens
cagaagcggggacccgagacgcaagccccagcgaccccaagcaaaccggaacaagccagccagcaccacccaacaccagcca

SEQ ID NO: 113481 - RNA, 67 nt, Homo sapiens
cgggaccagcaaacacaggcaagccgcggaagcaggagcagggcgcacccccgagagagccacggaa

SEQ ID NO: 113482 - RNA, 44 nt, Homo sapiens
agcgccggagacaaccagggagacaagaaggggcagaccaacac

SEQ ID NO: 113483 - RNA, 77 nt, Homo sapiens
caagccaaggaaggccgagaagaagcaaagggcaaccagggaaacaggagaggggcacacccgaccaggccaaccga

SEQ ID NO: 113484 - RNA, 59 nt, Homo sapiens
agaagggaggcaaagaaaaggagaaaagaagccaaagggacacgacccacaaagaacca

SEQ ID NO: 113485 - RNA, 63 nt, Homo sapiens
ggcagacgggacaagcggcgagcaggcacaagagagagggcacaggacagagagcccagaggg

SEQ ID NO: 113486 - RNA, 76 nt, Homo sapiens
gagaaccccccccaccgccccagaaagccccagacggaaagagcacgcgagggcgacagcaagaaggagccagcac

SEQ ID NO: 113487 - RNA, 87 nt, Homo sapiens
gagacacaaggacagcagcgacggggcccgcaccccaggagaagacgggaggaacgcagcaggaggcaaacccccagacagaccgga

SEQ ID NO: 113488 - RNA, 76 nt, Homo sapiens
agccacaccccaaaacggagcgaaggaagacaaaaacccccaaggcaggaaacaacggcagaccacacgggaggag

SEQ ID NO: 113489 - RNA, 82 nt, Homo sapiens
gaacggcccggaaacaggaggacaaacgaaggaggcccaaccacaaaaggagccgacggaacccagacggagaacaaaagga

SEQ ID NO: 113490 - RNA, 73 nt, Homo sapiens
cgaagccaccgcagaaggggagacacaagggcacgaagggaagccacagagaggacaaacaacaaccccccag

SEQ ID NO: 113491 - RNA, 78 nt, Homo sapiens
cggaacagcagccgccaccagacacaaaagccaggaagacaagagcagaagaaacagaccgaaagacaacaagaaacc

SEQ ID NO: 113492 - RNA, 58 nt, Homo sapiens
ggcccaagaggagaagacggcggcggcgagggggggcggaaggagggccccggagcag

SEQ ID NO: 113493 - RNA, 38 nt, Homo sapiens
ccaccggcgggaggaacaaaagacggagccaccggccc

SEQ ID NO: 113494 - RNA, 36 nt, Homo sapiens
gcggaccaaagccgcagaggagccgccgcacccagg

SEQ ID NO: 113495 - RNA, 71 nt, Homo sapiens
aacggcaggacacacgcggcgcgggaagacggaccgcagaaaaaggagaccggaaagagccacaaagggaa

SEQ ID NO: 113496 - RNA, 73 nt, Homo sapiens
ggagaggggggcagaagaaaagaaacaggcaaggaacagaaggcgacccaaccggaaaaagaacacacggcca

SEQ ID NO: 113497 - RNA, 74 nt, Homo sapiens
agcgcacaggaccgggcgagagccacagaaggaggaggggacagcagcaggagcccagcaaagccacagcgcgg

SEQ ID NO: 113498 - RNA, 38 nt, Homo sapiens
ccgcgggagcacacaacgaagccccagcggccagagca

SEQ ID NO: 113499 - RNA, 75 nt, Homo sapiens
acgcgagacgccgccgccaccagacgccgggaagaaaaggacccccagagagcaaaaacaaacaaaccaagcgga

SEQ ID NO: 113500 - RNA, 73 nt, Homo sapiens
cgacgccccaggggaaaacccccgggaccagggcacaaaaacaaaggacgaagaaaaagagaaaagagaaggc

SEQ ID NO: 113501 - RNA, 106 nt, Homo sapiens
cgaacgcccggcagccccaccaccggggccagcaccaacccgcggcaggccgacacgcaccacccgaaggcccaaaccccgccagagccgacgggcaaggcaggaa

SEQ ID NO: 113502 - RNA, 71 nt, Homo sapiens
gagggccccgccggcagccacccggccaccaggaagcggccccggagagggaaaggcggagcaacaagaaa

SEQ ID NO: 113503 - RNA, 75 nt, Homo sapiens
aggaacagaaaagaaaagaaaacgaaacaaccgaaaagccacaaagggaaccaggaaaagaaccaggccccgccg

SEQ ID NO: 113504 - RNA, 69 nt, Homo sapiens
agacaccggacggcggaagggcgaggagcaccgacgaggaagcaagacgcgaagagaaaaaagaacaag

SEQ ID NO: 113505 - RNA, 74 nt, Homo sapiens
cggaacaccgcagagaaaaagggacggcagcgcgagaaaagccgacgcaagagggaaagcggagcacagcccca

SEQ ID NO: 113506 - RNA, 74 nt, Homo sapiens
ccccagcagcacggggaaggaccggacccggcccgggagcaaaggaagggggagcaacagacaagcccgaaagg

SEQ ID NO: 113507 - RNA, 77 nt, Homo sapiens
cccgggcgagagacaccagcccaccgagggacccgcagccagcggaaggcaaaaagcgcagacggaaagagaccccc

SEQ ID NO: 113508 - RNA, 86 nt, Homo sapiens
ggccgcgaagggcccgagaccccgcgcgcggaggcaaggaggaagaaggcaccacgacaaaccggagccgaggggagggaggccag

SEQ ID NO: 113509 - RNA, 67 nt, Homo sapiens
agcccaacagcaaagggaggcagcaaggagaagagacagaagagggcccaaaagaagcggcgggggc

SEQ ID NO: 113510 - RNA, 85 nt, Homo sapiens
agaagaaaggccggagagcggcggacagcagggagcggccgagccacccaaaaacaggcgaccggcccgaggaccgccgcacgac

SEQ ID NO: 113511 - RNA, 75 nt, Homo sapiens
gccagcccccggagcgccacacacgcccgcccgcccagggaaccaccagcaccaagggacagccacccggaggac

SEQ ID NO: 113512 - RNA, 81 nt, Homo sapiens
cgaagccccagcgccacacgaaaccagagccgaaaaggccggccaagcaaaagagagacaggaaacagacacacccaagga

SEQ ID NO: 113513 - RNA, 63 nt, Homo sapiens
cgccggccgagaaggcagaggcgggcgccacaaaggggggagggggccaccccgaagcgagac

SEQ ID NO: 113514 - RNA, 77 nt, Homo sapiens
cacaaaacccaggcgcggaagcaagaaggagccgccgcgccaggcggaggcagcgacacgacggccacgcaaaccgc

SEQ ID NO: 113515 - RNA, 50 nt, Homo sapiens
agcaacaagggaccccaagggccagaagacaagcaaccaccgaaacgggc

SEQ ID NO: 113516 - RNA, 57 nt, Homo sapiens
ggccggcgcagcccgaccagccaagagccggcggcagacgaagacaggcgggcagaa

SEQ ID NO: 113517 - RNA, 77 nt, Homo sapiens
acagcgcggccaaacagacgggaggagggcacccgggcaccgccgggcgggcacagcgacggcaacaccggagggaa

SEQ ID NO: 113518 - RNA, 73 nt, Homo sapiens
gcaggacccgaagacgagaacgcggaaaacaagaagaagacacccggagccacggcacgaacccggagccaca

SEQ ID NO: 113519 - RNA, 55 nt, Homo sapiens
cccgacccgccaagaagccgcgagcaccacaggaaccggagcaagagacgacggc

SEQ ID NO: 113520 - RNA, 68 nt, Homo sapiens
ccccacgcggaaaagggacccccgggaagaagacacagaaaacagaggcgcaggaagggcaacaccaa

SEQ ID NO: 113521 - RNA, 89 nt, Homo sapiens
agagagccgggggggcgcgggagccggggcggcccggccgcacccgcccgcccgcagcggcgcgcggagccagaggacccagaaggaaa

SEQ ID NO: 113522 - RNA, 48 nt, Homo sapiens
acgaccgggagaggccaccaaggagcccacccagaggcagggggcgac

SEQ ID NO: 113523 - RNA, 79 nt, Homo sapiens
ggcccggggggcaaaagaccgcaggaggggaaagcaggaccgaccaagagcaccggggggcccccacccaagcacgcac

SEQ ID NO: 113524 - RNA, 54 nt, Homo sapiens
ccaggaggaccgcaggaggacgcagacggacccagagaggaccaggaaaaaccc

SEQ ID NO: 113525 - RNA, 68 nt, Homo sapiens
aaggcagcaaacccaggacaaggaccagcccaacggggacccagcaggaccaagccagcccacccccc

SEQ ID NO: 113526 - RNA, 78 nt, Homo sapiens
gcacagcccaggcaggccgaaggcgagacaggggaccaaaacagcaggaaggcccgacagaccaagaccaaggccaag

SEQ ID NO: 113527 - RNA, 60 nt, Homo sapiens
aaaaagagacagggaccaggcgcagccaggcccgaaggcggcccagcggggcgcacacgc

SEQ ID NO: 113528 - RNA, 84 nt, Homo sapiens
aagagcaaaacaagcccccgcgcgccccaggaacagcgcccccaaggcccaggcccaggcccaaggccaaggagagagcccagg

SEQ ID NO: 113529 - RNA, 38 nt, Homo sapiens
cgggcgcggggacgcaggacaaggacaccaggaggagc

SEQ ID NO: 113530 - RNA, 38 nt, Homo sapiens
ccgacagccgcagaacaaacggcgaggaaagagaggag

SEQ ID NO: 113531 - RNA, 77 nt, Homo sapiens
acaccggagaaagcacaagaagaagcagaggaggcccacaggcccgcccggacaccgagggacagaaggggaagggg

SEQ ID NO: 113532 - RNA, 73 nt, Homo sapiens
gcaggcaagcggaacagcgaggaagggagaaaccaaaacaccacccgcaaccaacccgaagcacaaggaacga

SEQ ID NO: 113533 - RNA, 78 nt, Homo sapiens
agcagacacaccggacaagaccgacgaacacacgagaccggaggcaaggaggccacggggccgaagacaccaaccggg

SEQ ID NO: 113534 - RNA, 79 nt, Homo sapiens
cccacccgggccgcccgaaggacgaccgaaaacccagccagacaaaagagaagcagaggagcgaagaaagagagaggaa

SEQ ID NO: 113535 - RNA, 82 nt, Homo sapiens
cgaggagccagaggcgccagccgcgaaggggcggcgcgcgccgggcgccggagccggaagaaaacccgagcgcacgcaagaa

SEQ ID NO: 113536 - RNA, 54 nt, Homo sapiens
cgagccacggaggcggagagagaacccaaaggcggcggcaaaacggacgacaag

SEQ ID NO: 113537 - RNA, 40 nt, Homo sapiens
cccccgagggcgggacacagcaacaggaggaacggaagca

SEQ ID NO: 113538 - RNA, 89 nt, Homo sapiens
cagacagccaggaaggaacaagccaagaggacccgaagccacagccccaagaaggaaggcagagcccacaaacccaagcagcaaagaaa

SEQ ID NO: 113539 - RNA, 83 nt, Homo sapiens
caagccgcacgcaaccaccgcccggccacaccaggaccgcgaccgcacaagcagccgccagcggaaccaagcggcgcggcaca

SEQ ID NO: 113540 - RNA, 85 nt, Homo sapiens
gcgggaccacccgggcacagcaggcacggagcccgggcgcgccaggcacagccaagagcggaccggcagcggccagcgcagcggc

SEQ ID NO: 113541 - RNA, 74 nt, Homo sapiens
gagagcgacccgggccggcaggccggcacaggaccaacgcggggggggaacggcggccgaacaggaagcccaga

SEQ ID NO: 113542 - RNA, 83 nt, Homo sapiens
cgcgcgagccacccagcgagggaagcccgcggcgggaagccccggggagcagggcacaggcggcggacacgcgcagcgcgcgg

SEQ ID NO: 113543 - RNA, 76 nt, Homo sapiens
ccgggccaccgccgccaggcggacaaaagccccccaggcccaaaccaaagcaccacccgccaaaaaacggagagga

SEQ ID NO: 113544 - RNA, 77 nt, Homo sapiens
gaagccaggacaccgccacaggagggaccagcaccggaggaaccgcaccaaaagaccacagcgccaaagagaagaga

SEQ ID NO: 113545 - RNA, 54 nt, Homo sapiens
aaggggggagccccccagggccaaggaaagaccacccaagaaaggagacagaac

SEQ ID NO: 113546 - RNA, 73 nt, Homo sapiens
cgacgaggcgcgggcgcgcacccgagccgcaagggggccgggcgggaaggcgagccaaggaccaggacacgga

SEQ ID NO: 113547 - RNA, 74 nt, Homo sapiens
cacaagcaggcgagcacacaaaaaaaccaaagaggagccagaccagaccaccagggaaacacaaagaagacacc

SEQ ID NO: 113548 - RNA, 81 nt, Homo sapiens
gggacccagcccaggcggcgcggacggggcggagagaggagcgagaggaagcggaagaaaaccaacaaaggacagcgggag

SEQ ID NO: 113549 - RNA, 71 nt, Homo sapiens
gaagaagcgaagggcgaaccccaaaaaggaagagggacaaaaagaccaagggaaaaaagagaacgcaaagc

SEQ ID NO: 113550 - RNA, 62 nt, Homo sapiens
cagcccgccgagacagccccaccagaccccaaagcgacccgcccagcggcccacgaggggag

SEQ ID NO: 113551 - RNA, 74 nt, Homo sapiens
agcgaggaggagaacaggccaagggcaaaccaaagcgacagacagacaaaggaggaacggccacaaacgcccac

SEQ ID NO: 113552 - RNA, 79 nt, Homo sapiens
agaaaggcaaggcgaccgaagagcagccaaaaggcagcaccaaccaaagagacaggcaacaagaagaggagggcagccg

SEQ ID NO: 113553 - RNA, 108 nt, Homo sapiens
cccccccaggcgaccgcccagccgccgcggagagccggaccagcggagccagggaccaagaggagcggaagaaagggaggaagcgaggggcagggaccagaggaagcc

SEQ ID NO: 113554 - RNA, 77 nt, Homo sapiens
ggcacgcagaaggggaaaggagccccaagcaggaaacacagaagccgacggcaaccagcagcaagacagccagggga

SEQ ID NO: 113555 - RNA, 81 nt, Homo sapiens
agcgacagggccgggcgccggcgagagccgcaccgccaacccccgagcaagacggggaaaccacgagcggggagaaacagc

SEQ ID NO: 113556 - RNA, 62 nt, Homo sapiens
ccagccagaaccccggaacaagaaccacgcccgcaccagccacacagaagccaaaacaggaa

SEQ ID NO: 113557 - RNA, 71 nt, Homo sapiens
gggagaccggaagagccagcgccaaggcggaaaagcccaagaaacaaacagagggaggaagaggcgcggca

SEQ ID NO: 113558 - RNA, 66 nt, Homo sapiens
cagcggacgggcagggcccagacaagagagggcggcagaaggaacaccgagaaaccgcacaccgga

SEQ ID NO: 113559 - RNA, 79 nt, Homo sapiens
cccaccccgccggcccagccgcgccccgccagggccggaggacgggcaaaacggaaagagcggcgccaccccgggagaa

SEQ ID NO: 113560 - RNA, 78 nt, Homo sapiens
gaacccaagacacacacagcggagcaacaaggagggaagccacaagcagacgacaacgcaggacagagggaacagaaa

SEQ ID NO: 113561 - RNA, 88 nt, Homo sapiens
cagagaaaagagaaaagagaaaaggagaaggaaaagggaaggacaaggaaacaaacacaaacggggcaggcaggggcagaaggcgacc

SEQ ID NO: 113562 - RNA, 71 nt, Homo sapiens
cggccacgcgggaccaccggcaccaccaaagcaaaagcagaccggaaaacccaccggcaagaccacacccg

SEQ ID NO: 113563 - RNA, 70 nt, Homo sapiens
agaagcaggcccccagccgcagccacaacaccggcaggaaccaccaggacagaggcggcagggcacaaga

SEQ ID NO: 113564 - RNA, 86 nt, Homo sapiens
cgcgggcgagcggccggcggcgcgggcccggcggcggcggcagcggggccgggccggagcgccacagccgcaggagcccgacccag

SEQ ID NO: 113565 - RNA, 46 nt, Homo sapiens
gcagggcgcccccgacaggaagggaaggggcggagacgggcggaac

SEQ ID NO: 113566 - RNA, 79 nt, Homo sapiens
ggccagccacggccacggcaacgagcggggcaaccacgcgagacgccaccagggcacgcagacgcagcaggagggaagc

SEQ ID NO: 113567 - RNA, 80 nt, Homo sapiens
agggggcaagggcgcggggcggggcgggaaaccgcgcaggcagaacgaagagccccacggccacacagcagccagcccaa

SEQ ID NO: 113568 - RNA, 80 nt, Homo sapiens
gccgccgcagccaggaggccaacggaccgcgccgccagggcggagaacggaaaagcaccaggaagcagagaggaccgcag

SEQ ID NO: 113569 - RNA, 91 nt, Homo sapiens
accccaacgaagagggagaacggcaacccaccagacaccagccgggcgagccagcccccacccagaggagaacgaaaccacgacaaccagc

SEQ ID NO: 113570 - RNA, 71 nt, Homo sapiens
ggcaaggagaaggccagggacgacagcaaccggcccacgagagcacccccacggcaaccggcacgcaccag

SEQ ID NO: 113571 - RNA, 93 nt, Homo sapiens
gcaccgcggagcaaaaaaagagcccgcaagaagaacagagacagcagccaaacccccaggcacaagcagaggaaccagggaaccgccgccagc

SEQ ID NO: 113572 - RNA, 71 nt, Homo sapiens
gggggaccgaccgcaacagaacggacccgggacgcagagcgcaacccagcaccccccacagaggagacaca

SEQ ID NO: 113573 - RNA, 115 nt, Homo sapiens
gaccaagcagacggggaaaggccacaggaagaaggaccacacgggcaacaggaaccaggcggacggaggaagccccaagaccacaaagacaaaaccagcccgagcacacaaccca

SEQ ID NO: 113574 - RNA, 81 nt, Homo sapiens
gggagcggccgagccacccaaaaacaggcccacgaagaggacgccagggccggggcagaccaccaggacggcccgaccacg

SEQ ID NO: 113575 - RNA, 101 nt, Homo sapiens
gcggagccccgagggccaccgcccaccggcggcagcgcccgcgcgcccgccggcgcggagagagcgagacacgggcgcagccccgagcccacagccccagc

SEQ ID NO: 113576 - RNA, 73 nt, Homo sapiens
aggaaagggagaaccgagaccaaagggccggggagacccaccggagaggcaccagaagcccccagcgggaaaa

SEQ ID NO: 113577 - RNA, 76 nt, Homo sapiens
aaacacggacagcggagagcgaaagagaggacgaacaccagaaggcagcagccagaagaacgagcggacgacaacg

SEQ ID NO: 113578 - RNA, 56 nt, Homo sapiens
ggcccaccccggcagaacgaggggggaagcacaagagggaaacaacaacagccaaa

SEQ ID NO: 113579 - RNA, 66 nt, Homo sapiens
ggagcggaggcaccaagagaccaccccggaaccaagcgcagaacagcgggaaaaggcagcaagaaa

SEQ ID NO: 113580 - RNA, 84 nt, Homo sapiens
ggcaccagggcggaccccggggccaggccggaagcagaccccagcagcagagaaacaggcaggccagaaaggagcgcaaaccag

SEQ ID NO: 113581 - RNA, 68 nt, Homo sapiens
ccaccgggagaagcagacgaaggacagggagaccggcggcacacggacaaccgggcgaggggcaggga

SEQ ID NO: 113582 - RNA, 84 nt, Homo sapiens
gaggcaggaccaaaagggaaaagcaccggacggagaggagcaggaggagccgcgggcaaggaggagcgccaagagcccagcacc

SEQ ID NO: 113583 - RNA, 72 nt, Homo sapiens
ggccaggcgacgggaagcgaccgcaggcgggcccccgaccggagggagccacaccaaagccggaccccccca

SEQ ID NO: 113584 - RNA, 78 nt, Homo sapiens
caaaaagacggccaagggccacaaaagcccccacagaaccaggaaggcgaggaggacagaaaaagagacagaacccaa

SEQ ID NO: 113585 - RNA, 67 nt, Homo sapiens
gcggcggggcgaggcggccgcggggcccgagcgcagacgggccccgggaaagagagccacaccccaa

SEQ ID NO: 113586 - RNA, 72 nt, Homo sapiens
ggcccaagacccacaacaaaaggacagggcagaccgccagcagcacagcaagccacagagagggccggcagg

SEQ ID NO: 113587 - RNA, 58 nt, Homo sapiens
cgagaccccagagagggagcagagggggagccgccaccaaaagcagacggaaaaccca

SEQ ID NO: 113588 - RNA, 77 nt, Homo sapiens
cccccaagagcggacacaggagccgggggggcgagcccgccgagagcgccaaggaggagacaacgggggaagaagaa

SEQ ID NO: 113589 - RNA, 39 nt, Homo sapiens
ccaagacagggagaagagaaacaacgaagcaagcccaag

SEQ ID NO: 113590 - RNA, 76 nt, Homo sapiens
gaaaggcacaagcaggggcggaagccacacaggccagaacgagggaccggaagagggggcacacagacaccacccg

SEQ ID NO: 113591 - RNA, 74 nt, Homo sapiens
cgaaaacacccagcgggaaagcggccaggaaccaggaaggcgacagaagggcgcagaaacggacaggcagggga

SEQ ID NO: 113592 - RNA, 80 nt, Homo sapiens
aagacccacgccacaccaccccccagaacacacgcaggacgaaagagacaaaagccacacgagaacaggaacagaaaacg

SEQ ID NO: 113593 - RNA, 79 nt, Homo sapiens
gcgcggaggcgggagcgcggaaacggaaccgggaggcgacgcacacgagcggaggcgaagcccgggaagacaagaaaca

SEQ ID NO: 113594 - RNA, 55 nt, Homo sapiens
ccaaaccgagagccagaacgaacaagccaacagaaacaaaggagagagcagggag

SEQ ID NO: 113595 - RNA, 76 nt, Homo sapiens
cgcgggagcacaagaacgggccaagaagggcggagcaagaaccccacacggccaaacgaccaagaaagcgggacgc

SEQ ID NO: 113596 - RNA, 64 nt, Homo sapiens
cccccagaagcaagaaagaacgcacagccacgcacacaggaacaggaaaagggaggcaaagaca

SEQ ID NO: 113597 - RNA, 74 nt, Homo sapiens
gggacggcacaccgccaccggagcgcgcgcggccagcgccaggggcagcccgcgagccccagcccgggagaccg

SEQ ID NO: 113598 - RNA, 83 nt, Homo sapiens
cccaccaaggaacccacagacggcggcagggggacccaggagccccaaaaccacagggggaccacaggcagcagcacaaacca

SEQ ID NO: 113599 - RNA, 82 nt, Homo sapiens
ccaaccccaccacgccgcggccggggcccgaccgcggggacccgggacgccaggggaccgcggaccggacccacgaagaggc

SEQ ID NO: 113600 - RNA, 77 nt, Homo sapiens
caccaaacacaaggaggggagccacgggagaagagcaaacaacccagaaggaggcagggggagcgggccggagagaa

SEQ ID NO: 113601 - RNA, 77 nt, Homo sapiens
gcacccgcgacagcgcaaggcggggcggggcggcggcggagcgcgcggcaggaaacccaccagagaaggcgcggcca

SEQ ID NO: 113602 - RNA, 75 nt, Homo sapiens
ccgaagccggcgcccagcccccaagcggcccgcgagcaaacgccgcggccccagcaggcacaacaccgggaaaag

SEQ ID NO: 113603 - RNA, 72 nt, Homo sapiens
gcgcgcgcggggccccgcagagcaaacgagacggaagaaaaaaccgacggcccgaaccacagccaacaagca

SEQ ID NO: 113604 - RNA, 80 nt, Homo sapiens
caagaaccccacccccacgccgcgccgcgccgccagcaaggggaggacgccagaacccaaaaggccacaaacgagacgag

SEQ ID NO: 113605 - RNA, 74 nt, Homo sapiens
ccccccacagccgcaggacccacggagccgccccccagcagggccagggcccaacgcgcaggccacgggccggc

SEQ ID NO: 113606 - RNA, 76 nt, Homo sapiens
gagcggcggcgcaggaaccgcggcccaaccacggacgaccacccccgcggcggcacaggccggccggcgaggaggg

SEQ ID NO: 113607 - RNA, 88 nt, Homo sapiens
ccagcgcgccgcagccccccaagcggccgcgagaagcagcgggggggcaggcgacgaagacacacgccaagcaacaccacagagaccc

SEQ ID NO: 113608 - RNA, 61 nt, Homo sapiens
caacccccagaccgggaccgacgccggaagaccagagaggaccacaggcaaacaaagaacc

SEQ ID NO: 113609 - RNA, 79 nt, Homo sapiens
gacaaaaacaacgcagccaacccgagggcacagaccaaccgaaaggagacaaaggaggaggaaagacaagccccaaaag

SEQ ID NO: 113610 - RNA, 70 nt, Homo sapiens
gagacaaaccccagacgcgccggagggccaggacaggagagacaacggaggcaagaaagacggagaagcg

SEQ ID NO: 113611 - RNA, 82 nt, Homo sapiens
gaggcagggaacacgcggaacacagaaggcccccgcagccaccaggccaccggaggcgcccaaggaggaaaacaaggaaaaa

SEQ ID NO: 113612 - RNA, 82 nt, Homo sapiens
agaaaggggaagaacaggcaaggaagcgcagaagaaagacagcaacggagccaaaaaaagaccagcccaaaaaagcgcggag

SEQ ID NO: 113613 - RNA, 71 nt, Homo sapiens
aacgcggccccagccgcggagacacaacaacagaggcagcaacggccgaggacacacggggcccgagaacg

SEQ ID NO: 113614 - RNA, 63 nt, Homo sapiens
gagggagcggagaacacaggaacgggccccggcgccacgcagagccccgccaggaagacacgc

SEQ ID NO: 113615 - RNA, 56 nt, Homo sapiens
aggcaccaccacgaccgggacaggaacgaggaacgagacccagcccggccaaggga

SEQ ID NO: 113616 - RNA, 80 nt, Homo sapiens
agcagcaaacacgggacaaaaaccagaccagggaagcagccgagaggcgagaaagaagaaagaaaggaaagagaaaacag

SEQ ID NO: 113617 - RNA, 89 nt, Homo sapiens
aacgaccaagacgaagccgccaccaagaaaagacggagacagaaagcacaaaaccggccaagccaaaggcaaccaaaggacagcgaaaa

SEQ ID NO: 113618 - RNA, 55 nt, Homo sapiens
ccgagacgaagcgggcggcgaagggccacaaccaaagcgggccacagacacagcc

SEQ ID NO: 113619 - RNA, 58 nt, Homo sapiens
caccggggaacagcgcccccaggggaaacaggcaaaagcagaccggaaaacccaccgg

SEQ ID NO: 113620 - RNA, 73 nt, Homo sapiens
agagaacgcgagggaaggccaaagagcacagggacagaaaaacagcgcagacgagccgcaaggacaagacgga

SEQ ID NO: 113621 - RNA, 79 nt, Homo sapiens
gcccggaagcaaggcccggaaaaccgcggccccgaggcaaacaaagcagacccaggaacaggacaccaggagggcggga

SEQ ID NO: 113622 - RNA, 57 nt, Homo sapiens
cacccaggaggcagaagccaagaaccggcccaagagaaacccagacgcacaaaagag

SEQ ID NO: 113623 - RNA, 81 nt, Homo sapiens
ccagggccacccaagagagaggccggggcggcgagccgcgggcgaccagcagaagccaccccaggcaagacaggccaacac

SEQ ID NO: 113624 - RNA, 75 nt, Homo sapiens
gcggggagcgcccgcgacagaggagggaggaaaacaaccgagggcagagggcgagcaccagcacaacaaggagac

SEQ ID NO: 113625 - RNA, 70 nt, Homo sapiens
cggcaccaggaccaccgcggcagcacgcggcgccagcaggaaacgacggggcggcgcccagcaaaacaag

SEQ ID NO: 113626 - RNA, 80 nt, Homo sapiens
agagggccgggggcgcggccgcgcgccgccggcgaaggaggaggcggccgggaggggcacgcccggaagaccagacccgc

SEQ ID NO: 113627 - RNA, 73 nt, Homo sapiens
gggggaagccaggcaccccccacagaaagggcggccccgagccccggccccaaagacccaaaacagagacacc

SEQ ID NO: 113628 - RNA, 105 nt, Homo sapiens
aaaaaaacaaacaacagcaacagaaaaccacaagaaaacacaaacaaccccacccagacaaaaacgcaccccaaaaagaagacaaacagggcaaccagccaagag

SEQ ID NO: 113629 - RNA, 85 nt, Homo sapiens
acgggaccccaaggcacaggcgaccaccccaaaagcaccggccccgcacagcaaaccaggagcacagaccagcgcgcgaccggag

SEQ ID NO: 113630 - RNA, 77 nt, Homo sapiens
gaagagagaacaagagaagagcaagccccaggaacgccgaaacgagcaggcaagagacagggcaagcacagagaaag

SEQ ID NO: 113631 - RNA, 81 nt, Homo sapiens
aagaagagaagcacgaaagcgggagagggaccggaacggcggcgacaaggggcccgaacagagggacgccccgagccggac

SEQ ID NO: 113632 - RNA, 79 nt, Homo sapiens
aggagagaaaggagacccgacgcaacgcggagcgcaaggcgagggacgagaacgaggccaaagaagaacaacagaggag

SEQ ID NO: 113633 - RNA, 79 nt, Homo sapiens
caaggaaaagacccggaaagaagagacacagaggagccacacccccagacccacaggagaaacaccagcgagcagaggg

SEQ ID NO: 113634 - RNA, 76 nt, Homo sapiens
accaggcagaagggagagcagacgcaaagaagacaagggaggcgaggacggacaaaaggaaacggacgggaggcca

SEQ ID NO: 113635 - RNA, 84 nt, Homo sapiens
cgccaagaggccaaggcgacagccacaggagacacgcgcgcacgaagcccagcgcggaaaaggaacagaagaggaaccgaaacc

SEQ ID NO: 113636 - RNA, 66 nt, Homo sapiens
aacggcaaacaaaaccacaggcacaaagaggaccccgacgggacagaaggaagcgaagcaacagag

SEQ ID NO: 113637 - RNA, 79 nt, Homo sapiens
gaccagacgcagggagacgcacagccaggacaccggaaccgggaaagggggcgagacaaaaaaccacggaaagcaaagg

SEQ ID NO: 113638 - RNA, 78 nt, Homo sapiens
accggcacaccagcaagagcgagggccccaggccgcagggcgggaggaaccagcaccgccacccccccaagccaccca

SEQ ID NO: 113639 - RNA, 73 nt, Homo sapiens
cagcagcgggggccaaggaaccaacgcagagccccagaacaaaagaacacagaggaaccagaacagaccggac

SEQ ID NO: 113640 - RNA, 55 nt, Homo sapiens
gaaaaagacaccaccaacggaaaacaacacagccccagcagagaccagagaagcc

SEQ ID NO: 113641 - RNA, 78 nt, Homo sapiens
gcgcgcaccgccgacccggaagaccgccgccggcgcaagaaagcgaagagccacgaaaagcccaggggaaaaagggag

SEQ ID NO: 113642 - RNA, 80 nt, Homo sapiens
cgcgagacgagccaaccggcagacccgacgaaggcagccccagcgaagagagcggcaaaggcaaaagagaaaccgcgccg

SEQ ID NO: 113643 - RNA, 60 nt, Homo sapiens
ccagaaaacgggcggcacagcagacccacccagagaccggccaccaaaccacaaccgaag

SEQ ID NO: 113644 - RNA, 68 nt, Homo sapiens
gccggccgcccaacaccgaacaccagccccgcgacaagagaagcaccagaagacgcagggcgcccgac

SEQ ID NO: 113645 - RNA, 74 nt, Homo sapiens
ggccccccagcagacgcgcaacggggcggcacacaaggagcgaagggcagggagaacgccaggcacagcacgac

SEQ ID NO: 113646 - RNA, 81 nt, Homo sapiens
aaagcgagagagggaagcgcccggccggaggcaggggaaagcggcccccaggcacgaagcgaagaagaggagagaagcagc

SEQ ID NO: 113647 - RNA, 72 nt, Homo sapiens
cagaaggagggggagaacggagcaacggggcgggagaccgaccgcacggaaaccccccgagagcggccggca

SEQ ID NO: 113648 - RNA, 66 nt, Homo sapiens
ccacaaagccgacaaggcacggccgacaaccccgaaaccaaagagaagcagcgaagacagaagagc

SEQ ID NO: 113649 - RNA, 65 nt, Homo sapiens
cccccccaggcgaagcccaaggagccgcccgcagccacagccggccccgcgacgccggagggaag

SEQ ID NO: 113650 - RNA, 84 nt, Homo sapiens
gaacggcagcgaggaaccggagcacagagaagccccagcgaaggcgcggggaagacagagagcaagaccccagcccaaccgagg

SEQ ID NO: 113651 - RNA, 84 nt, Homo sapiens
agcccaccagcaggcgggacccgcaccggaaggccacgccaagacaacagcagcgagagagaaaagaaggaaggcaggacgggc

SEQ ID NO: 113652 - RNA, 74 nt, Homo sapiens
aggcacaagcaacaaaaagaaacagaacacggcacgagcaaaaggcggaaacaaacaaacacaggagaagacac

SEQ ID NO: 113653 - RNA, 72 nt, Homo sapiens
agcggacccgcagccccaaaagagacggcagaacacccagaacacagacaccaaaacagcacacggccaaga

SEQ ID NO: 113654 - RNA, 84 nt, Homo sapiens
ggaaacagcccggaccggcagacccagcaaaagcgccacagccgcaggcaccaagaagaccaacaagcagaagagccaagacaa

SEQ ID NO: 113655 - RNA, 74 nt, Homo sapiens
ccccggccgccccaacgggggcacgaagggggacacaggcgagaggagagcagaaagacgagccgccggggaaa

SEQ ID NO: 113656 - RNA, 77 nt, Homo sapiens
gccccgagccagagccccggagaaggaagcggagaagggaagaggccccagaccaccggccggggccggcccaaagc

SEQ ID NO: 113657 - RNA, 74 nt, Homo sapiens
caacacacaaccaaccaagcgaccaaacaaaaagaggcaccgcaagggcggcgacacaaaaaggcacagaaagg

SEQ ID NO: 113658 - RNA, 80 nt, Homo sapiens
gagacacggccgaaggggcgcgcggccccgccgccccagcccgccccccgggccgggcaggaaccacagagaacagcccg

SEQ ID NO: 113659 - RNA, 66 nt, Homo sapiens
aacgcccaccccccgaacccagccgcaccgacccacaggagaaacaccagcgagcagagggaaagc

SEQ ID NO: 113660 - RNA, 77 nt, Homo sapiens
gccagggcaccaacagacagggccaacgcgggacggaagacgacgcaccggagaggagaaacgaaaaggacaagaga

SEQ ID NO: 113661 - RNA, 68 nt, Homo sapiens
ggcggaagaacagaacagcccggaaaaaagaggcagaaagaagcaggacagagacaccagcaagaccc

SEQ ID NO: 113662 - RNA, 78 nt, Homo sapiens
gccgaaaacaccgcccaccccacaaaagaaacgaaggcagccaggcaagggggacagcagcaaggaacagcgaagcag

SEQ ID NO: 113663 - RNA, 54 nt, Homo sapiens
cagccgggaaagccgcaaagggacaccgaaaagcaaagggagaggacacacgag

SEQ ID NO: 113664 - RNA, 64 nt, Homo sapiens
caggcacagcccccgaggcgacagcggccccgccgcaccagagcagggcagaggacaacagcaa

SEQ ID NO: 113665 - RNA, 55 nt, Homo sapiens
aaaaaccaacaagaaacaacgccaagcaagaaagaacaagcagaagggaccaaag

SEQ ID NO: 113666 - RNA, 46 nt, Homo sapiens
gccaaacgaccaagcagaaaagaggacccaagaagaccagccgaag

SEQ ID NO: 113667 - RNA, 74 nt, Homo sapiens
caggaagagaccgcagaaagaaaaaggaaaggagaccaacagacggacaagggaggggagcaggaaagggccaa

SEQ ID NO: 113668 - RNA, 72 nt, Homo sapiens
gaacaacaagcagaggaccaaagaaccaggggagaagcacgacagcagcaaggcgacagcaacgggaagaga

SEQ ID NO: 113669 - RNA, 42 nt, Homo sapiens
ggagccgaggcgagccaacagcacgccgaggagcgccaggcc

SEQ ID NO: 113670 - RNA, 66 nt, Homo sapiens
agccgacagcacccgccaccacggaggaagcaagagcaaggaaggaaaaggccagggggaccggaa

SEQ ID NO: 113671 - RNA, 78 nt, Homo sapiens
gcgacaggggaacagacagaaggagcaggaaccaaagggggaggcaagcaggggggcaaaggaaagaaggcagaaagg

SEQ ID NO: 113672 - RNA, 71 nt, Homo sapiens
cgccgccccagagaacaccaagacggcgcgcgagaccaaggaagaagaagaagagacaggaagaaggcggc

SEQ ID NO: 113673 - RNA, 68 nt, Homo sapiens
cagaagaaggccaacgaacagacaaacagcaaggagcacaaagggccaacaaacacgacacccgaagc

SEQ ID NO: 113674 - RNA, 72 nt, Homo sapiens
cggagaacggcggaaccacggccggaccgggacaacaaaggcgagcaacacaggggcagaaccaggccaaac

SEQ ID NO: 113675 - RNA, 63 nt, Homo sapiens
ccgacgccaggcagcgcccccaaacgggacagaggacgcgccgggccagagagggaagacacc

SEQ ID NO: 113676 - RNA, 77 nt, Homo sapiens
caggagaccccggcaccccccagggggaggagccgaccaggaggcagccaacaagaaaccaggcaacgacccaaaac

SEQ ID NO: 113677 - RNA, 79 nt, Homo sapiens
cgcccagaccccagaagagacggaaagccaagaggcccaaggcccgcggcaggcggggccaggcccgagccagaaggag

SEQ ID NO: 113678 - RNA, 54 nt, Homo sapiens
gacggccgcccccccaggacccacgcccccgagagccgccaacacccggccgag

SEQ ID NO: 113679 - RNA, 76 nt, Homo sapiens
cgacgccaccagccaggcccgagcgccaggaggaggaagaccgaccgccgccgcgcaccgcgaaaaggaaaccacc

SEQ ID NO: 113680 - RNA, 84 nt, Homo sapiens
gggcgggagcgcgcccgccgagcgcaacagcggcgggcggggcaccccagcacagaagaaaagcggccaggcgagaagacagaa

SEQ ID NO: 113681 - RNA, 67 nt, Homo sapiens
gacaaacacaagcaacaacagcagagggcagcaagaggaaaaacgcaggaggagaagaaacaggaga

SEQ ID NO: 113682 - RNA, 77 nt, Homo sapiens
accacgagccacacaaaccagacaggccgagcgaacagagcaggaggcagcaggagaaacgagaagaaacagacgcg

SEQ ID NO: 113683 - RNA, 83 nt, Homo sapiens
ccggacggcggggccgggcccccggccgcaagcagagcaagaacgaggccaaggaggagggacacagagacagcgaagaaaga

SEQ ID NO: 113684 - RNA, 71 nt, Homo sapiens
caagagcaaggaagagaccaagcaccaagaaaacgccaaggaacgggccgaaggccaggacaaaacggggg

SEQ ID NO: 113685 - RNA, 75 nt, Homo sapiens
cgcgggccgcaggccgcgagcagcggacgccggccgccgcaggagggcgcgcgggggcacagcccaggcgcagca

SEQ ID NO: 113686 - RNA, 75 nt, Homo sapiens
cacgaccaagaagaagccgcggaccccgcgggaaggaaggagagaaggcaaaggggcgggaaacacgcaacgaag

SEQ ID NO: 113687 - RNA, 55 nt, Homo sapiens
agcggcgccagcaagaaagacagagcaccaggagacccagggaagagccgacgca

SEQ ID NO: 113688 - RNA, 71 nt, Homo sapiens
agaagagaagaacagcacaggacagagccaaagcagacccccaagcgagcggagcggaaggagcgcgcccc

SEQ ID NO: 113689 - RNA, 79 nt, Homo sapiens
ccagcccaccagccgcaccaaggagacaggacgaagcccaaaccacaagccacaaaagccacaaacccccccacgacac

SEQ ID NO: 113690 - RNA, 76 nt, Homo sapiens
acaagcaaagccagcccagggaagagaagagcgcgccgacgaaaagccacaggcggacgaaagaaagaaggagcac

SEQ ID NO: 113691 - RNA, 74 nt, Homo sapiens
acaagagaaggaaaagccgaggaagaacgaccgaagagagggacaacccccagcagcaaagaggaagacagagg

SEQ ID NO: 113692 - RNA, 78 nt, Homo sapiens
gggcccaggagacggagaagacgaccccgacgcaggccaggagccgcggacagaagccgagcacggccgagacaaaag

SEQ ID NO: 113693 - RNA, 78 nt, Homo sapiens
gacgaaacgaccccaccagccccaaaaggcggcaacaggggccacggaccacaagggacaacaccacagagagcgcag

SEQ ID NO: 113694 - RNA, 80 nt, Homo sapiens
gcaagccaaggggccacagccgggagcagcaagcccaagccaccagggaaccaagagcccaggacaaagagaaagagcgc

SEQ ID NO: 113695 - RNA, 78 nt, Homo sapiens
accgcgccccagcggccacggaggggcgaacagcgcggagaacacaaggaagaaaagaaagcaagacaggcaaggaag

SEQ ID NO: 113696 - RNA, 81 nt, Homo sapiens
gaacagggaaccacacacaaaagcacacaaagaccccccccacaggggagacagagacacgggcgcagccccgagcccaca

SEQ ID NO: 113697 - RNA, 73 nt, Homo sapiens
acaaggcggggggggaaccccaagcgccacagaggacccgggccgacaggcgccccacagagcgcgggcggag

SEQ ID NO: 113698 - RNA, 75 nt, Homo sapiens
ggaaagaagccaaagaaagagaggaagaaagaacagaacagcgaaacaagaggccagaaaaacggaaccgggaga

SEQ ID NO: 113699 - RNA, 74 nt, Homo sapiens
gacaaccccaccagcaccacaggaaagaaagccaaaaacccgaagcccagaaaaacgcagagacaaaagaagga

SEQ ID NO: 113700 - RNA, 74 nt, Homo sapiens
acggccccgaggcagccgggcagggcccccggccaaaggaaagagggcccgggcgagggccccggccgcggagc

SEQ ID NO: 113701 - RNA, 74 nt, Homo sapiens
gcaagaccagccaggggaaacccggagggaaccaagaaggcgaagcagcaaaacacacagccccccggagaaaa

SEQ ID NO: 113702 - RNA, 61 nt, Homo sapiens
caaaaacagacggaggacgaacaagaccagagcacagacacaaaggaggaggcaaaccagc

SEQ ID NO: 113703 - RNA, 82 nt, Homo sapiens
agcaagaaagaaaaccgggaccacagaggaaagcaacgaacccgaagaagagggacagagaccgagaacacacacacaggaa

SEQ ID NO: 113704 - RNA, 83 nt, Homo sapiens
agacgagaaaagaccgcaaccgccagcaccgggaagagaaagaaaagccgaaggcaccagacagcgcccgcacaccaaggaag

SEQ ID NO: 113705 - RNA, 62 nt, Homo sapiens
cggacgggggaggaggcaacgccgcgacccacggcagggcaaccccaccgcggaaggcaggc

SEQ ID NO: 113706 - RNA, 77 nt, Homo sapiens
gccacagcaggcagagcagacccagccaaacaggacaagcagaacaaagaacgagcggcaaggcaaagacaacaggg

SEQ ID NO: 113707 - RNA, 54 nt, Homo sapiens
cccgacaccaacgagcccaagcccaagagaacgaaagcacagaaaacaacgccc

SEQ ID NO: 113708 - RNA, 77 nt, Homo sapiens
cgccgccccgcgggcccgcggacccagcgcaggcaaggcacacagagaaaaaaagggaacaaaacacagcaagcaga

SEQ ID NO: 113709 - RNA, 77 nt, Homo sapiens
acagacccagggccaaaacgccgcaacggccggcggggccaaagccgggacaggccaccggcacacggaaacgcaca

SEQ ID NO: 113710 - RNA, 86 nt, Homo sapiens
gacagcaacaagaaagaaacgggcacaccaacgaggaacagggccggaccacaccaaggagaagaagacccgggcagagacgggga

SEQ ID NO: 113711 - RNA, 54 nt, Homo sapiens
aggaacacccaccagcccacgcccacgcaaaggcgaccaggcaggcccacaacc

SEQ ID NO: 113712 - RNA, 75 nt, Homo sapiens
agccaacccagaagagccaaggcaccacggacaaccaggacaagcacccgacgcaagagccaggaaagaagaacc

SEQ ID NO: 113713 - RNA, 87 nt, Homo sapiens
aacaggcggagagcaaggaccaacacagaagaagcgcagccagaaaccagggggagaccgcaccaggaggaaaacagagacaaagac

SEQ ID NO: 113714 - RNA, 78 nt, Homo sapiens
aaccgggaggagaagaaaccgcagaagcaaaagaagacggcgaggcggaacgagcccgccgaagaaagccgagaggca

SEQ ID NO: 113715 - RNA, 78 nt, Homo sapiens
gccagaaaacagaaggccacgcggaaacaaggcgaccccagaaaggggggcgcacacgcagaaagaacagcgaaaaag

SEQ ID NO: 113716 - RNA, 68 nt, Homo sapiens
aggcccaagacccacaacaaaagaccacaaggccccacgagcggagaaacaggcaaggacaggcaagc

SEQ ID NO: 113717 - RNA, 80 nt, Homo sapiens
cgccaggcgccacacggcaagcccgggagagcagccagacaggggaaaaagaaaagggcgaagacccgaagcagcgcagg

SEQ ID NO: 113718 - RNA, 74 nt, Homo sapiens
gccgacaggcagacaaggggcacacaaggcaagcagaagaggaacagaagaagcagagcagagacggagcagca

SEQ ID NO: 113719 - RNA, 59 nt, Homo sapiens
acggggaaagcagagaaaagaagacaggacaaccagggaagcagaaggcaaggaccccg

SEQ ID NO: 113720 - RNA, 72 nt, Homo sapiens
aggaaggcagagagacccgaggaggggagcagaggacggcaggaacggccccggccccagagccagcacgca

SEQ ID NO: 113721 - RNA, 74 nt, Homo sapiens
cacccaaaaccacaggacaggcagaagaggaacggggaaggggcaaccagagcgcaaagcgagccgcacgcaaa

SEQ ID NO: 113722 - RNA, 79 nt, Homo sapiens
aacaccgcgagccgcgcggcgcggggccccgcggcggagagaaagagcgcgcacgaaagcacacgaaaaggaaggaaaa

SEQ ID NO: 113723 - RNA, 81 nt, Homo sapiens
gcccgcaagaagaacagagacagcagccaaacccccagccaccaacaacaccagggacacaacagcaaggagcagaaaccg

SEQ ID NO: 113724 - RNA, 62 nt, Homo sapiens
gacgagcggaggaggcacagggcgcggaccgcacgagcgcggcgcaaggaagaagagacgcc

SEQ ID NO: 113725 - RNA, 71 nt, Homo sapiens
aggcaagccggaggagaagcaagaaggcccggacacagcaaaccgggccacagcccccacaaaggaggcga

SEQ ID NO: 113726 - RNA, 67 nt, Homo sapiens
cccggagacgggccgagccggaccaagaacggaaaggaagaagaccagaaagaagagaaggcaaaga

SEQ ID NO: 113727 - RNA, 73 nt, Homo sapiens
ggacagaagaaagggaccaggccagagagcacgcagacacgaccgcccagcacggaacgcaagaggagaaccg

SEQ ID NO: 113728 - RNA, 60 nt, Homo sapiens
cacccgggaccgcggcgagaagccccagcgcacacgcggcacaaccaaccaccgccagga

SEQ ID NO: 113729 - RNA, 74 nt, Homo sapiens
gccacaggaggcggcgggccccgcccgccgaaggccggaaggccacaggaagaaaaacgggccacagaggaaca

SEQ ID NO: 113730 - RNA, 78 nt, Homo sapiens
cggggccagcgcagccgcggcggagacgcacaggcccgacgaaccagagaacaggagaccgccagccggcacgggcaa

SEQ ID NO: 113731 - RNA, 70 nt, Homo sapiens
ccggcaaggaaacccaaccccaggggaacggcgagggaacccaggaaggagggcgacaaacaccagccgg

SEQ ID NO: 113732 - RNA, 80 nt, Homo sapiens
ccgacgaaggggagccacaggagagcgcccagggccagggggacagagcaaaagcgccagcgacagcagcgggccggagg

SEQ ID NO: 113733 - RNA, 80 nt, Homo sapiens
accaccagcacccgccgggcacccgaggcggacgagaagagaacacaccggggaagggcaccggcccccggaaagagccg

SEQ ID NO: 113734 - RNA, 65 nt, Homo sapiens
ggacacggaagggagcggcggacaagaaggaagacaacagaagccggccaaagacgagccaacga

SEQ ID NO: 113735 - RNA, 48 nt, Homo sapiens
cgagcaggaaagcgccccgagaacagaagaacggagaccagaacagag

SEQ ID NO: 113736 - RNA, 80 nt, Homo sapiens
agcccgcccccggcggccccccgcgcacagaacggagaccaagacacaccaccccagggggggcccaaccaccaggacga

SEQ ID NO: 113737 - RNA, 69 nt, Homo sapiens
agcacacaagcaccgggacccaggacgaagagacacaaaaggccccagaggcaacagggaagaagcaca

SEQ ID NO: 113738 - RNA, 54 nt, Homo sapiens
acacagccagccagccacacggcagaaaaagacacgcaaacaagagaacgggcc

SEQ ID NO: 113739 - RNA, 74 nt, Homo sapiens
cggccagcccaggcagggacccaaggaagcggaggaggaagaagcaaagggggccgcgcccacccgaagaagca

SEQ ID NO: 113740 - RNA, 76 nt, Homo sapiens
accagcaaagcagaacagcccagcaggaagggaaccaagccccaacaacagagacagagagaaccccacccaagag

SEQ ID NO: 113741 - RNA, 68 nt, Homo sapiens
cgcagcagcccccaggagacgaagacaaacaggaccgcgacagcaggccgcccggcacagccgccgag

SEQ ID NO: 113742 - RNA, 69 nt, Homo sapiens
cagacgcagggcgcccccggaggagcagccggggaaagaggcaagagaacgccacgaaagaaaagacca

SEQ ID NO: 113743 - RNA, 70 nt, Homo sapiens
gcccgggacacaaaacacccggaaacagcccacagaggccaagaaggaaagccagcaccagacagagccc

SEQ ID NO: 113744 - RNA, 70 nt, Homo sapiens
aaggaacaaaggcacagccagccgcgaccccccaaggccgcggcggccacccaaaccagaggaaaaagac

SEQ ID NO: 113745 - RNA, 73 nt, Homo sapiens
aaccgcacacaccaaaaacccaccggggcgggcacaagggaagacagcgcccgggacccaacggaagaggccc

SEQ ID NO: 113746 - RNA, 80 nt, Homo sapiens
ccagagcggggcaccgagccggcggggggggaagaggaggaggcgcccgacacgacaaaccacgcccaaacggagaaaac

SEQ ID NO: 113747 - RNA, 76 nt, Homo sapiens
gggccccagcacgggacccccagcaccggcggaaccccacacccaagaaagcccgagggaccccgaacaaaacaag

SEQ ID NO: 113748 - RNA, 82 nt, Homo sapiens
gcggcggcgccccggacggccgcgccccggccgcgccggggccgcgcggccccgcggagccaggcagaacgcgcgccgggcg

SEQ ID NO: 113749 - RNA, 115 nt, Homo sapiens
cccagcgccaccaccacgccagccgcaccagccgcccaagccgcacagccgcggcggcagcagcaggagaggaacccaagacagaccaggagaggagcagccggaaagcaacgag

SEQ ID NO: 113750 - RNA, 56 nt, Homo sapiens
cccccgagccaacggcaagaacaagccaagacccagagagggcagaacaccagcac

SEQ ID NO: 113751 - RNA, 87 nt, Homo sapiens
cgagccgcagcagccacccacgagcccggcaaaagcgcacaaacgcccaaggcgcgccccagaccccagagcacgccggcaccacca

SEQ ID NO: 113752 - RNA, 79 nt, Homo sapiens
agaccggcggaaaccgcagggggacacaaggcccccagacaggccaacaagggccccaggcagagccgcgaaggcagcc

SEQ ID NO: 113753 - RNA, 52 nt, Homo sapiens
gaggaggcccagaagccaaaccggaaggcggagcaagaaggcggggaagcag

SEQ ID NO: 113754 - RNA, 86 nt, Homo sapiens
caagggggggcacccggggccacccaaggggggcggaacacggagccgccacaggcaaggccgccgaggaggaacgaagacgaaga

SEQ ID NO: 113755 - RNA, 75 nt, Homo sapiens
accccaaccgcccaggaaacagcccaaaaccgccgcgcgcgaccaaaggaaaaggagcgaacaggggccacagcg

SEQ ID NO: 113756 - RNA, 40 nt, Homo sapiens
cacagagccacgaaaagcggcgcgcgggccccgacagccg

SEQ ID NO: 113757 - RNA, 86 nt, Homo sapiens
acgcgccgagccggaggcgcaggaggccagggagaccagggggcaggggaggagcgcccaggcgaccggcgaacaggcccccccag

SEQ ID NO: 113758 - RNA, 78 nt, Homo sapiens
caggagcagccacggagccagcagaccgcgccacccaggcacgggccgaggcccagagaacagcggggagcgcccgca

SEQ ID NO: 113759 - RNA, 83 nt, Homo sapiens
ccaccagcccagggaagccggcacccacgcccaacagcccacaggcggggagcgcccccaggagcagcggagcgggagcgcac

SEQ ID NO: 113760 - RNA, 70 nt, Homo sapiens
acggcaagacaaagcgaggcccacagaacaggaagaacagaagagaagaaaaaaagaagaagggaagcgc

SEQ ID NO: 113761 - RNA, 68 nt, Homo sapiens
ggaaaaaaagggaaagaccccagaaaaccacacccgaagggacagcacgccagcccgaaccggaaaga

SEQ ID NO: 113762 - RNA, 36 nt, Homo sapiens
gggacccgaccagaaacaagagagggcgccaggagc

SEQ ID NO: 113763 - RNA, 76 nt, Homo sapiens
cgaaacagaaaccacccgccacccgcccagcaaagaacagggccagacccagccacagagaagcccccagaggccg

SEQ ID NO: 113764 - RNA, 75 nt, Homo sapiens
ggcaccgccccccgccaaggcgacccccaccgagacgaagcgggcggcgaagagaggcgacaaagacgcggggag

SEQ ID NO: 113765 - RNA, 83 nt, Homo sapiens
ggaaccaggagagagcagccagaggaccagaggacaagacaaagggagcaagacaagccaaagaggaaaagcaaagcccaggg

SEQ ID NO: 113766 - RNA, 80 nt, Homo sapiens
acgccaagagcgaggagccgcacgcaggccagcggggcgccagcagaaaacgagcccggcacagagaacggcagacgacc

SEQ ID NO: 113767 - RNA, 58 nt, Homo sapiens
gacaaggccgccaagacaacaccgagcagcgccgagaagccggcggaagaggaccaag

SEQ ID NO: 113768 - RNA, 73 nt, Homo sapiens
ccaagaacacgacccccgagaaaagaaagggggccagagcagcaagaacagccccaagacgcaggaggcggaa

SEQ ID NO: 113769 - RNA, 70 nt, Homo sapiens
acggagccggagaaacagaagcgggacaccggaccgacaagacggaaaccgggagggggaaaagcgagaa

SEQ ID NO: 113770 - RNA, 80 nt, Homo sapiens
agcgggccacgaggagggcgcagagcccaggagacggaggaccgggggaaagcaaaaaaaccaccccaaggagcagacag

SEQ ID NO: 113771 - RNA, 72 nt, Homo sapiens
agcacgagcacccgcacgacgggccagacaggcacgcaggggcagcgagacgacgggaccgaaggaccccgc

SEQ ID NO: 113772 - RNA, 74 nt, Homo sapiens
cagccgaaaaaccggaaaggaggaaaagcgcacaggccgcagaaaagagaggagccgcccagcaaaacccaacg

SEQ ID NO: 113773 - RNA, 57 nt, Homo sapiens
caaagagacgggcgggcccagagcacgccccgaggcacagggaacagcgagagcccc

SEQ ID NO: 113774 - RNA, 73 nt, Homo sapiens
ccaccccccacacaccccacagaaaggaacaggaaaaaggcacaacagagcagggaaaagccaccccaagacc

SEQ ID NO: 113775 - RNA, 76 nt, Homo sapiens
ggaccgcggacagagacaacaccgagagagaagcaggaaacagaaccccgcagccccggccacacaaaagaaaagc

SEQ ID NO: 113776 - RNA, 78 nt, Homo sapiens
agacagaagagagaaagaagaaaagcggaaaagaccgaaagaggaaagggaacacggagcaggccaagagggcgaccc

SEQ ID NO: 113777 - RNA, 68 nt, Homo sapiens
aacaaagcccgaacagcagcagcgcgagcgacaacgggacgggaaaccgcaggacaagcgagcacaaa

SEQ ID NO: 113778 - RNA, 39 nt, Homo sapiens
aaagaaccggaagacagaggcggagcgacgagaaaaagg

SEQ ID NO: 113779 - RNA, 70 nt, Homo sapiens
caggccaaacaaaacgggccagaagagcaacgacacaacacagaacagccgcaaaacgagacaaaaacga

SEQ ID NO: 113780 - RNA, 101 nt, Homo sapiens
ggaagcggcagcgaggagacccggcgccgccaggccgacgaaaagcccaaggcgaccccgcacacacacccaccagccacggcagcccagcggggacccag

SEQ ID NO: 113781 - RNA, 72 nt, Homo sapiens
gcagcaagaggacaaggagaaggacggggggcagacaggagcccaagggcccgccccaccgggggccacccc

SEQ ID NO: 113782 - RNA, 74 nt, Homo sapiens
ggaacgcgcgcacccaccgggcccgcgggccgccccaccccacaggcgaagccgacgagcccgaacagacgcac

SEQ ID NO: 113783 - RNA, 69 nt, Homo sapiens
aaggcggcccaccccagagcaccggcacagaagaccgaggaggcgaaaacaggaaagcacaggccggag

SEQ ID NO: 113784 - RNA, 85 nt, Homo sapiens
cggccacggcccgcagaagcggaggaggcagaaaaagcgcagagagaggagaggagacagaagggggagacgggagcgggcagca

SEQ ID NO: 113785 - RNA, 62 nt, Homo sapiens
cagaagcagccaggaagagggcaacccacggggcggagccgagcgaggccccagaaggacaa

SEQ ID NO: 113786 - RNA, 83 nt, Homo sapiens
gccaggaggaggaggaagaggaggaaggagggcgagcgaggaggaggcggagcggggcccgacgcaagagccaacaagcaaga

SEQ ID NO: 113787 - RNA, 86 nt, Homo sapiens
cagagcgggaccacccgggcacagcaggcacggaggggggcaacaacgccggccacacggggggggagggaaagagacgacccacc

SEQ ID NO: 113788 - RNA, 60 nt, Homo sapiens
caggagccccgcgggccaggggcacagaagggaccacaaacgagggccaagaggacacag

SEQ ID NO: 113789 - RNA, 71 nt, Homo sapiens
gcggagagggcaggacaaaacaccagacgaggaagcggaggaggaagaagcaaagggggccgcgcccaccc

SEQ ID NO: 113790 - RNA, 79 nt, Homo sapiens
cccacaaggaaagcaacgaaaaggacaaagcaagagacccacagacagaaacccgcgcccccccagaaaaaagcgaagc

SEQ ID NO: 113791 - RNA, 74 nt, Homo sapiens
cagcgcagggggcgcgggcccgacacacacccaacaggagaacgcgccgccggccggggcgcagggacacgggg

SEQ ID NO: 113792 - RNA, 63 nt, Homo sapiens
ccgccaacgcgcccccgaggcaggaaggaggcggcggaacagagaaccgagcgacccccagac

SEQ ID NO: 113793 - RNA, 65 nt, Homo sapiens
agcgcggggcagcgcgagccgggaagcaacaaaggagagagcgggaagcagaaggcagcaggaac

SEQ ID NO: 113794 - RNA, 62 nt, Homo sapiens
ggagggagggaaaccgccccaggaggaaccagggcacccccgagaggacaacaggcacggaa

SEQ ID NO: 113795 - RNA, 40 nt, Homo sapiens
cgcccgcccaacacacaacaggaacaggccgagagcagcc

SEQ ID NO: 113796 - RNA, 73 nt, Homo sapiens
aaaccacgaagaagaaaccggcggccaaaaaaaaaaaaggaagcacaccaaggaaccacccgaggcggaaacc

SEQ ID NO: 113797 - RNA, 86 nt, Homo sapiens
gccggagcagccgcagcccgcagaccggagacgcgacaggacgagaggagcggaggacaccccggagaggacgggaggacggcagc

SEQ ID NO: 113798 - RNA, 71 nt, Homo sapiens
gcccgggcgcgaacaaaggcaaccgcaacccaccaaggagcacaggacgaagaggaaggaaaaaacaggcg

SEQ ID NO: 113799 - RNA, 70 nt, Homo sapiens
caaccggcaggaccgggcagaacaacgaacagaagcacaaccagagccggccccgcgcaagagcccccag

SEQ ID NO: 113800 - RNA, 80 nt, Homo sapiens
caggacagagcagaaggaaggggagcaccaagcccaagaagccgccaggcaggccaggcaccagccgaagcgacccacag

SEQ ID NO: 113801 - RNA, 82 nt, Homo sapiens
cgccgcccgcagccccgagaccgcagaaaggagacacggcgcgccgcagcagggggaagaagagaaaacgaggacccaagaa

SEQ ID NO: 113802 - RNA, 74 nt, Homo sapiens
ccggcccaacccggaccggggacgcacggaccaaaaacccgcaacagcccccgcccaagggagaagcagaccgc

SEQ ID NO: 113803 - RNA, 32 nt, Homo sapiens
gggcagcacagacacgaagaggaaaggcaagg

SEQ ID NO: 113804 - RNA, 97 nt, Homo sapiens
cgagaccggaccgagagcggaccgagagcgcgaaacgcacgagaagagccaggagaagcaagcgggcacaggagaacaccccaagaccacacccgga

SEQ ID NO: 113805 - RNA, 78 nt, Homo sapiens
ggcgggaccacggcagaaggagcggaaggcggagcgaagagccggaccaagcgccaggacagagagagggaagagcac

SEQ ID NO: 113806 - RNA, 113 nt, Homo sapiens
gccaaggccggaaaaggagcaggagccaaggagccaccacccgaggaagacgacaggcacaacgagacccggaggagacagaccccaggcccggacgagccccggggggcgaa

SEQ ID NO: 113807 - RNA, 74 nt, Homo sapiens
agcaacccccccccggcgccacaagcgagccaggccagcagccgaaccagggaaagaccccgacaaaagacaac

SEQ ID NO: 113808 - RNA, 74 nt, Homo sapiens
cgcccgcggggccacagcggcaggggaccaaggaggaggagcaaaacaaggggccccaaggggagagaagacac

SEQ ID NO: 113809 - RNA, 54 nt, Homo sapiens
aggcgccggcgggaaaacaacagccggaacagagacaaaggacccagaaggaaa

SEQ ID NO: 113810 - RNA, 83 nt, Homo sapiens
gcgcgggacccagcccaggcggcgcggacggggcgggagcacagagcgggaagaggcccgaaagaaacccgaaaacccaaggg

SEQ ID NO: 113811 - RNA, 74 nt, Homo sapiens
aggcgcgaaacggaaaaagaaagaggcccaggagggaacggaaaagagcacagaggcagccaaagccagggggc

SEQ ID NO: 113812 - RNA, 74 nt, Homo sapiens
ggaaacaaagagccgacaagccgagaccaccaggagcagagcggaggcaaccagccaaaacaacggaaaacagc

SEQ ID NO: 113813 - RNA, 62 nt, Homo sapiens
caccacaccgagcccaagcggaaagcacgcgcacagagagcagagaagaggcaaagaaagga

SEQ ID NO: 113814 - RNA, 85 nt, Homo sapiens
ggcggggcgcccgcgggaccgcgaagcaaaccagccccagaaaagaaaagaagcaggcccgcgagagacgcaaaaacaaaaacaa

SEQ ID NO: 113815 - RNA, 74 nt, Homo sapiens
ggccccgcccggcggggaaggccaagcaaggggcggacacaaggcggggcccaaaaagaggcgaagcgcacagc

SEQ ID NO: 113816 - RNA, 50 nt, Homo sapiens
aagaccggaaaacagccgccaacgcaaaagccgggccccgccccgcaaca

SEQ ID NO: 113817 - RNA, 67 nt, Homo sapiens
aagcaaggagaaaaggaaaccgaacagagcaacagcaaaagaaaggaaacacggcgggccggaaaga

SEQ ID NO: 113818 - RNA, 75 nt, Homo sapiens
ccacgagcccgaaacgggccgaaagaccgccgcccagccccaaagagcgagacacaggagggaggaccgcacgca

SEQ ID NO: 113819 - RNA, 66 nt, Homo sapiens
cgaccacacgacagcagcagaacgcggcagaacggaggcaggcagcacgagacacaccacaagagg

SEQ ID NO: 113820 - RNA, 56 nt, Homo sapiens
gcggggcggggacgagcgcggcgcggggaaaaccacaagaaagcgggagacgggac

SEQ ID NO: 113821 - RNA, 73 nt, Homo sapiens
acgacagaaagagggcccccagacccgaggagagaaagaacccacgcaggacgacagaagaggccggacaaga

SEQ ID NO: 113822 - RNA, 78 nt, Homo sapiens
cacgggggcacaggcaggggccccccgcccgacggccgagaagaagagcccggacccccggcgggcgaacaaagaccc

SEQ ID NO: 113823 - RNA, 82 nt, Homo sapiens
cagcgcagcgcgccaggagcccagcagcaaggcagccagcaacaaagaagagggagacggagcagcaagacagacagaagag

SEQ ID NO: 113824 - RNA, 79 nt, Homo sapiens
cccggacgaccgacaggcaaagagaccccgggcgacacaaggccccgagccccggccccaaagacccaaaacagagaca

SEQ ID NO: 113825 - RNA, 62 nt, Homo sapiens
gacggaaaagcacagaaaccccacagggcggagcaggagcggccaaccggagaagggaagga

SEQ ID NO: 113826 - RNA, 86 nt, Homo sapiens
gggccagccgcacccacacagggacgaacagcggggacgccccagcagaccgcccaggagaggaaagcaggaggaaagaccaccca

SEQ ID NO: 113827 - RNA, 81 nt, Homo sapiens
ggccacacgcacagcaaggaagaaggggcgaagaaaagagaaacaaggaggacaggacagcacaggcagcgacaggcgagc

SEQ ID NO: 113828 - RNA, 63 nt, Homo sapiens
ggcggcggggaggaggccggcaagggacaggacacgccagccagacgcgcggggggcagaccc

SEQ ID NO: 113829 - RNA, 72 nt, Homo sapiens
gcagccgagcggggccggccacagacaacacggggaagagacgagaccacaaaggacaagaacaagcaggcg

SEQ ID NO: 113830 - RNA, 79 nt, Homo sapiens
ccacggccacagccgccgcagacccagcagccaagagggaagcagacgagagcaagagaagagcgccgcgcacagaaag

SEQ ID NO: 113831 - RNA, 75 nt, Homo sapiens
gcacgcggaccccagggccggcccggaggcgggacccagggcccagggcagaagcaggcacggcagacccacaac

SEQ ID NO: 113832 - RNA, 66 nt, Homo sapiens
gaaggaacacgaggcagggggccacacgcaaggggaacaggcagaccagcaggacagcacggccaa

SEQ ID NO: 113833 - RNA, 69 nt, Homo sapiens
cccggggcgagcaccgcgaaggagcaagcagacaggcaaccaaaggggagcacagcgacggagacgccg

SEQ ID NO: 113834 - RNA, 66 nt, Homo sapiens
aagggaacgcaacgaccaaggagaacaccaaaccagccaaagaagaagagcgagcagaagaaaagc

SEQ ID NO: 113835 - RNA, 72 nt, Homo sapiens
gggaagcaagcggggccacgacgcccgcggcgggccaaaagcagagaaccaaagaacacggccaggacaaga

SEQ ID NO: 113836 - RNA, 62 nt, Homo sapiens
cgacaggaacgacgaagcaccaggacacaacaggcaggccaggcagagcagcccaccaggga

SEQ ID NO: 113837 - RNA, 78 nt, Homo sapiens
aggacccaaggcggagcaggccaaaggaagaagaggccgagacaaccacaccgcagccgcacaagccggcagaagagc

SEQ ID NO: 113838 - RNA, 74 nt, Homo sapiens
ccaacacacagcacaacagagaggccgagggcacagcggagcagccaggacccgaaaagccagcaagcgagacc

SEQ ID NO: 113839 - RNA, 83 nt, Homo sapiens
aacacccgagcagagagacaaggagaggaaggccccagaaaaccaggaggaagaggaggagcggcagaacgaacagcggagga

SEQ ID NO: 113840 - RNA, 70 nt, Homo sapiens
cgagcggcggagaccggaaagagccaagccgaagacagaagcgggcaccaacagacaaccagggcaagca

SEQ ID NO: 113841 - RNA, 82 nt, Homo sapiens
gccacggagacccacccagcgagagcaagaccgcgaccccaagggaacccaaccgcgggcgggagcgcgagggagccacacc

SEQ ID NO: 113842 - RNA, 72 nt, Homo sapiens
gcagccacaggaggcgcggaggacgccccaccgccgacgcccccagccaccagaaaaacaaccaccagcgag

SEQ ID NO: 113843 - RNA, 75 nt, Homo sapiens
ggaccccccagcagaacaccacaaagcagcccgaggaggcacgcaaaacaacagggggcaaacaagaccagggga

SEQ ID NO: 113844 - RNA, 76 nt, Homo sapiens
cggaacacgccccgacacaggccaaaacagaagaggcaaagcccagccacagcagcagcccagcagcaaacaacca

SEQ ID NO: 113845 - RNA, 107 nt, Homo sapiens
ccgcagccccggcgcccccggccgcaccgccagggcgcaggcacagcccgagaaaccgcagcacacacaacaccccaccagaccacccagcaagcccacaaaaaagg

SEQ ID NO: 113846 - RNA, 83 nt, Homo sapiens
cccggagcaccgggccggcggacaggagggcgcgaaaaggaagaagcacaagagcaccaggagagaaccgggaagaagcagca

SEQ ID NO: 113847 - RNA, 84 nt, Homo sapiens
gcagcaccaaaccaagaggcggccagcaggaggcgagaagggccacagagccgaacacagcagagggggacaagcccacggaga

SEQ ID NO: 113848 - RNA, 83 nt, Homo sapiens
cagaagcgggcggcggcgcgccgccccgggcggccgcgggcggcaccacgcgcgcccgagcggacaagagcagcgggagcgga

SEQ ID NO: 113849 - RNA, 78 nt, Homo sapiens
cgcccgaagaaggggccccacgcacaaacggacaagacgcacggggaaccaacagccccaccagggagacacgagaaa

SEQ ID NO: 113850 - RNA, 82 nt, Homo sapiens
gagcggccgcggccaggcgacgccacccaagacacaaacggcgacacagggccagaagcccccaggaggagaacgagcaacg

SEQ ID NO: 113851 - RNA, 70 nt, Homo sapiens
gcccgcaggcccggcccgcccggacagagcccgggcgcgcagcacgacagccgaaggagaggaggcgaca

SEQ ID NO: 113852 - RNA, 36 nt, Homo sapiens
aaaaaaaacgcgaggaaaggcaacaaggcaccagga

SEQ ID NO: 113853 - RNA, 70 nt, Homo sapiens
cccggcgcagccgggccccacgagcacccacgggaacagcccagaaacgagggaaaaacgaagccgaccg

SEQ ID NO: 113854 - RNA, 82 nt, Homo sapiens
gagcagccccccaagcgaggagggaaagggaaaaagcgggaggcagacccaggaagagagagagcagagggaagaacacaca

SEQ ID NO: 113855 - RNA, 80 nt, Homo sapiens
ccgagcaggccgcggcggagggaccggcccgcgaagggcgggccggagaaggggcgacgcgggcaccccccgaaggacaa

SEQ ID NO: 113856 - RNA, 80 nt, Homo sapiens
acggagccagggagggacagcgcccgagaccagcgccggacacgcggcccaaaggcgaaacacagaaggagacaaccaca

SEQ ID NO: 113857 - RNA, 73 nt, Homo sapiens
acgccgggaccccggaaaccagaaaggagaaaccagaggcaagcgacgggaaggaccaccaaacccagccagc

SEQ ID NO: 113858 - RNA, 78 nt, Homo sapiens
cgggagcaacgggaggccggacccagcgagcgggcggcacgcacgcagagaacaagcagaggaaagacacgccagaga

SEQ ID NO: 113859 - RNA, 71 nt, Homo sapiens
gcgcggagcacgcggagccgcccaggcagggaaaagccacgggaaagccagacacacagcggaacagaaac

SEQ ID NO: 113860 - RNA, 72 nt, Homo sapiens
aacccgacccagcccaaagcgaagaccaccccgacgaaaggagagaacaaggagcaggccaacggccagaag

SEQ ID NO: 113861 - RNA, 87 nt, Homo sapiens
cgcgagcgcgccaagcgcagacgagcgggcaaggcaaggcggaacacgaccagcgccccaaggaagagcgagacaagagccaaggac

SEQ ID NO: 113862 - RNA, 68 nt, Homo sapiens
ggaccaagaaccagggaaagcaaaaccagcaaacgagaagaaagaaggaaagagagggcggagaagac

SEQ ID NO: 113863 - RNA, 69 nt, Homo sapiens
gggcccagccgcgcgcccgaccccgccccgcccgcccccccccgcgcagaaccggccgaaaagcacaaa

SEQ ID NO: 113864 - RNA, 81 nt, Homo sapiens
gaaaggaggcagcgcaaggagggcggcgggacgcaccgaggccagaccgccgaggaaaagcccggaaaagcagccaagcgg

SEQ ID NO: 113865 - RNA, 94 nt, Homo sapiens
cgccgcagcgccccggaccggagcgagcaagccgcgacaagcaggacaaccaaacaacaggcaggagacggcccggcggggagagccacaccac

SEQ ID NO: 113866 - RNA, 74 nt, Homo sapiens
aacaagcaccaaagcgaaggagggccgcaagacgaacaggaggcagaaccaacagaacgacggggcccccagag

SEQ ID NO: 113867 - RNA, 74 nt, Homo sapiens
cgggggaggggagcccgcgcccgccgcgggagagaggacccccccccccccccaaggccccggggcagaagagc

SEQ ID NO: 113868 - RNA, 77 nt, Homo sapiens
cagacggggcacgccaccccccgcacaggggcgggaccaaggacccaaagacaggaccacgcaccagcagagaagga

SEQ ID NO: 113869 - RNA, 76 nt, Homo sapiens
gggaccgcgaggacgagagagaaggggacaccagccaggagagaaccagaccgggcggagacaagccagccggacg

SEQ ID NO: 113870 - RNA, 78 nt, Homo sapiens
gaaggacaagaacagcgccgcaccagcaggcacgaacgagacacgccgggcgcgacccaccggccggcgggcccggcc

SEQ ID NO: 113871 - RNA, 60 nt, Homo sapiens
cgcagggcgcccccggagaaacggacagcaccacagaagggacggggagacaccaggagg

SEQ ID NO: 113872 - RNA, 81 nt, Homo sapiens
ccgagaccagccagggagcgcgaaccgcccgcggaaccacagcccagcacggaacacagagccagagaaaaaaaacacaga

SEQ ID NO: 113873 - RNA, 80 nt, Homo sapiens
gggcaacaagacccaacaaccacaaagcggaagagacccccccagcgacccaggaagcgagcagcgcaaagcacaaagaa

SEQ ID NO: 113874 - RNA, 78 nt, Homo sapiens
aagcacccccgaggcaaagaccacgccgagaggacgggggaggggcaggccaagcagaagaaccagcacaggcgaagc

SEQ ID NO: 113875 - RNA, 73 nt, Homo sapiens
cgggcgccgagcgaacgcgcaacagggccgcacgcaaggccagcaacagaagaaagcaagcaccggggaaagc

SEQ ID NO: 113876 - RNA, 93 nt, Homo sapiens
ccagcccccgaaagcgggacacagggagcaggaagaagagagccaagcgaacgccgaggaacagggacaacggacccggcaagaaaggaggga

SEQ ID NO: 113877 - RNA, 48 nt, Homo sapiens
aacccaccgcccggcaagccccgccagagcccagaagcgaggcgaagc

SEQ ID NO: 113878 - RNA, 49 nt, Homo sapiens
gaccaagaaccagccaggcagaaaggagagagccaacggcaacaagcaa

SEQ ID NO: 113879 - RNA, 115 nt, Homo sapiens
agacgcagggcgggaaagccggaggaacccgaacccaaaccgagccaaacaccaagagaacaggaaacaggacagggcagggaagggcaacaaaggggggaaaggaacacgcaag

SEQ ID NO: 113880 - RNA, 84 nt, Homo sapiens
caggacagcacaggcacagaaggccaaaaaggcaaccacagagagagagagggagggacccccggagacagaaaaaaccgccgc

SEQ ID NO: 113881 - RNA, 82 nt, Homo sapiens
ccacccagacccccggcagaaggcccgaccgccggcgccacagccacagcccggagcagcagagcgggagcgacagggagaa

SEQ ID NO: 113882 - RNA, 80 nt, Homo sapiens
gccgagagccgcccgggccagcggccgcgcacccccggccggaggcaccagcgaagaccgaggagcagggagcaaccaca

SEQ ID NO: 113883 - RNA, 64 nt, Homo sapiens
ggacgggcgcggagacaagggaggcaagagcaagcggaaaaggaaaccagaaaaacggagccga

SEQ ID NO: 113884 - RNA, 82 nt, Homo sapiens
gccacgcgggcgagcggcggggagcggcgaagccgcgggcgaggacccaaagacaggaccacgcaccagcagagaaggaaag

SEQ ID NO: 113885 - RNA, 77 nt, Homo sapiens
agagacgaaacaaagaagcaaggaccgggaaacaaaccacacgcacagacgccgggaccggaaagcagcaagcccga

SEQ ID NO: 113886 - RNA, 58 nt, Homo sapiens
gacgcacgcgaagggagcggggaggaaggggaccagagacacccgacccgaccacagc

SEQ ID NO: 113887 - RNA, 73 nt, Homo sapiens
gaaaccacacccaagccgcagccagagaaccaagaaaggagagccacagcgaaacaacacaaacaaaaagaga

SEQ ID NO: 113888 - RNA, 39 nt, Homo sapiens
ggggagcggagcgcgggccgcggccgccgccgacaccac

SEQ ID NO: 113889 - RNA, 56 nt, Homo sapiens
gcagggggcagggcggcagaggaacaggaggcccggacccccagcacaagcgcagg

SEQ ID NO: 113890 - RNA, 82 nt, Homo sapiens
cccccccccccccaccaccaccacccacacccaccaacaacaccacaaaaccacagccaaggcaaagccgcagcgcaaaacc

SEQ ID NO: 113891 - RNA, 80 nt, Homo sapiens
accccgccccgggcaaggacccgcccagcccccaagagcggaacagaggaggagccaccacagcgcccggccagcgggcc

SEQ ID NO: 113892 - RNA, 77 nt, Homo sapiens
agcccagacgcccaccagcaaccggggaccccccagaggaaccccggccgggcgaagcggggaccaagcaagcagga

SEQ ID NO: 113893 - RNA, 72 nt, Homo sapiens
agcggagcgaagcgaacaaaaagcagcaaaccggaccaccccgaagaaagcacagaggagcgccgcgcccag

SEQ ID NO: 113894 - RNA, 73 nt, Homo sapiens
cgcccgggccagcggccgcgcacccccggccggaggcaccagcacacccagacagcccgaacacggaaaccga

SEQ ID NO: 113895 - RNA, 73 nt, Homo sapiens
ggaaccggaggagaagcccagggagcgcaccccaggaaaccaacccccagggcagccagagagacacagccca

SEQ ID NO: 113896 - RNA, 72 nt, Homo sapiens
gagcagcgccggggccgccgaccaacacccgaggcggacgcagagacagccaccgaaccaaaagggagcgag

SEQ ID NO: 113897 - RNA, 55 nt, Homo sapiens
gccagagcgcacacggacccggacccaccccgcacccgagacggggcgccagggc

SEQ ID NO: 113898 - RNA, 61 nt, Homo sapiens
acaagaacccgaggacagacaggacagggccaaagcggcaggagaaggaagggaccggaaa

SEQ ID NO: 113899 - RNA, 73 nt, Homo sapiens
gagggcaccgccaccacacccgcaggaacaggccccagccaggacacagggagggagggggggaacggaaccc

SEQ ID NO: 113900 - RNA, 68 nt, Homo sapiens
ccaccgggaaagacccaggacccagaacacaacacgagaggaagaagagagggcgaaggaggccacac

SEQ ID NO: 113901 - RNA, 72 nt, Homo sapiens
caggcccgggggcacaaggggcagcgccaggagccgagccggccaccaaagcgcgcagcagcgcgcagcgcg

SEQ ID NO: 113902 - RNA, 82 nt, Homo sapiens
ggaagagacaggaggcagagccaaacacccagggggcagggcccagggaccggaaagcaggacgaaccccaacaccagaagg

SEQ ID NO: 113903 - RNA, 79 nt, Homo sapiens
cgcgggccagcaccaggaggacggaagcggagccccccccacaggcaaggaagacgccgaggccgagaaacagacaacc

SEQ ID NO: 113904 - RNA, 80 nt, Homo sapiens
aaggaagcacgggacagcgaagaggcccccggcagagggcagagagaggccggcccaaggcccggggcgcgaccagcgcg

SEQ ID NO: 113905 - RNA, 74 nt, Homo sapiens
ggacgccaacacgggggcgccgacacaccagcgcccaaacgcgaggggaacgcaggagcacgcacacgagagcg

SEQ ID NO: 113906 - RNA, 74 nt, Homo sapiens
gagcgggccagagccagccacacggccggggacggagggacaggggcggaccagaggccggaccacggaaagac

SEQ ID NO: 113907 - RNA, 73 nt, Homo sapiens
gagggccacagaaggcacagaaaaggacggcccacacccacagaaagccaacccagcgaaggaacaagcaaac

SEQ ID NO: 113908 - RNA, 50 nt, Homo sapiens
cgcagggcgcccccggcgacaaccaccagaagcggagaccggggaggcag

SEQ ID NO: 113909 - RNA, 79 nt, Homo sapiens
caccacagcgccgccaccagccccagaccagaaagcagcagcccccagcagggggggcaaaagcagggcaacggcccgg

SEQ ID NO: 113910 - RNA, 70 nt, Homo sapiens
ggaagccgcaggggaacacaggggaaagaccgaggcggacaggaggagacgcagaaagaccacagcccac

SEQ ID NO: 113911 - RNA, 76 nt, Homo sapiens
caggacggacaagcacagccggaaggccgcaaagaagagagacaaggccccacccagcccgcagaaggaaaaacaa

SEQ ID NO: 113912 - RNA, 66 nt, Homo sapiens
gggggcgcgcgggggcgggcccgggacgcggccgccaacggaagcagacggaagggaaacccccaa

SEQ ID NO: 113913 - RNA, 83 nt, Homo sapiens
cgcggcggcggcggagcgcaggcccggccgacggccacacggcggccgcagggcgccggagccccccagagaggggccacggg

SEQ ID NO: 113914 - RNA, 68 nt, Homo sapiens
gcaggaagcggaggaccaaacagaaccacaaagaagcgccaaccagccgcaaggaggaaaggcaaacg

SEQ ID NO: 113915 - RNA, 119 nt, Homo sapiens
cgaggcgaaggaagaggcggacggcgggaccacaagacaacgcggagcggcgaagagcaaccagggcgaaccgaccaagaacaacacccagagggccaggagaaggcgaagagagcagc

SEQ ID NO: 113916 - RNA, 76 nt, Homo sapiens
ggaaccaaagaaaaacagaaagaggaaaaccagagaaacaagaggaggagggcaccaaagccacccagaaggcgca

SEQ ID NO: 113917 - RNA, 66 nt, Homo sapiens
caacggcaggcaggccaggaaccacagggacagcagagaccagcccaggcccacaggggccccccc

SEQ ID NO: 113918 - RNA, 100 nt, Homo sapiens
agacagccaaaacaagagcgcccgcccaaaaagcacccccaaccgaggaccagaagcaacacggggggcaaaggacaaaccgagaagaggccaagacaac

SEQ ID NO: 113919 - RNA, 75 nt, Homo sapiens
ggcagcagaagccgcagccgcgggcaccaggacacaggcaagggacaaacaaacaacccaagccccacccaccac

SEQ ID NO: 113920 - RNA, 77 nt, Homo sapiens
aacccgcgaggaaaagcccagcggcccgccaggcccggagaagacagaggagccagaccaagagacagcacaggcga

SEQ ID NO: 113921 - RNA, 35 nt, Homo sapiens
ggaagacgagcaaaacaagaacaacaggacaggga

SEQ ID NO: 113922 - RNA, 62 nt, Homo sapiens
cggggccgcgcggccccgcggagccaggcacagcgcacccgccccccggagcgcacgggccg

SEQ ID NO: 113923 - RNA, 75 nt, Homo sapiens
gggcgaacggacacacacgggagcggcccccggggccccgggagccccccaggcaggaagagagaagacagcagc

SEQ ID NO: 113924 - RNA, 71 nt, Homo sapiens
gagagccaagcacacaagccagggaagacagaagggaaacagaagaccggcgccagcagaaagagcacaga

SEQ ID NO: 113925 - RNA, 50 nt, Homo sapiens
aggccaggggaccggcccaggggacacccagcaggccagggaagaggcag

SEQ ID NO: 113926 - RNA, 72 nt, Homo sapiens
gcccagccggagacccagcaaccagacggggccagagcagacgcagcgagagaagggacaagcgaacaggag

SEQ ID NO: 113927 - RNA, 75 nt, Homo sapiens
gaaaccgcgagaggagaagcacaagacagcgaaggaggagagaaggcgcccaagcgcaaggaaaaggcaccagac

SEQ ID NO: 113928 - RNA, 77 nt, Homo sapiens
gcacaacggggcaccgagccgcccgcagccgcccggcgaccgaaaccaagacgaggcaccacacacaagcccgggaa

SEQ ID NO: 113929 - RNA, 80 nt, Homo sapiens
ggcccccagcaccacagcccgcagccccgccagccacccccaggacagagcgggagccaccagcgccaaagggaagccag

SEQ ID NO: 113930 - RNA, 81 nt, Homo sapiens
aacccgggcccaacagcaacaggccaacccgagggaagaaaacaaggcagagaaggaggaacaggaaaggaagaggcgacc

SEQ ID NO: 113931 - RNA, 72 nt, Homo sapiens
gcagccggcagaaaacgggaaagcagcacggcaaccggacaaagagaccaaacagaaagggacccaaaggaa

SEQ ID NO: 113932 - RNA, 71 nt, Homo sapiens
aaaccccggcggggacagagcaacaagccaaggcaccgcccaggcgggcagggcggacaccccgcagcagg

SEQ ID NO: 113933 - RNA, 80 nt, Homo sapiens
gaaggccagggaggaccccagacaccggagacgggaaagagaggaaaacccaagacaaggaagggcaaagcccacagcac

SEQ ID NO: 113934 - RNA, 65 nt, Homo sapiens
agcacaccccgcgaaaggaggaggcacagaacaagagagaccaggcaagggagccacaccaaccg

SEQ ID NO: 113935 - RNA, 43 nt, Homo sapiens
cacaagacgaccaaaggaggaagcaggacccaggcccaaaagg

SEQ ID NO: 113936 - RNA, 84 nt, Homo sapiens
caccgaaggcacggacagggacagaccagggacacaacgggaaaccggaccggccggcgcggaagaggccggcggcgggacggc

SEQ ID NO: 113937 - RNA, 79 nt, Homo sapiens
ccacacgacgggaaccgcggaagcgggagggacgaggcgcgccaccgcgagcccggggaagggacacgcgcggaacccc

SEQ ID NO: 113938 - RNA, 80 nt, Homo sapiens
cgccaccggcaacacgaacaagggacaagccacaggcgacgaagcgagcagaaggggaaaggagagagaaccgaaagagc

SEQ ID NO: 113939 - RNA, 86 nt, Homo sapiens
cgacggggcggcccggagccggcgcgaaccggcccccgcagcgggacccgggacccaaagacaggaccacgcaccagcagagaagg

SEQ ID NO: 113940 - RNA, 80 nt, Homo sapiens
gaagaaacgggccgcgaaccgcagacagcggccaagaagacacaaaggacggaggcacgaggacagcagcggacggccgg

SEQ ID NO: 113941 - RNA, 68 nt, Homo sapiens
gaaaacagccaaagccaaccccagcagagggacaaaaaaaacaaaacacgaagcgcaacaaaccaccc

SEQ ID NO: 113942 - RNA, 80 nt, Homo sapiens
gcaacagaccccgcagacccccaggaagccagagccacacacaccacaggccgcagaagcggccagcccgaagccaacgg

SEQ ID NO: 113943 - RNA, 70 nt, Homo sapiens
cacgaaaaggcccgacgacgagacccaaacacagaagaaagccacgggagcaccggacgcgaggaggagg

SEQ ID NO: 113944 - RNA, 71 nt, Homo sapiens
ccgagagccgcccgggccagcggccgcgcacccccggccggaggcaccagcacagagcaccacccagaaaa

SEQ ID NO: 113945 - RNA, 88 nt, Homo sapiens
cccgccacaccacgcgagccccgaagcgggccaagggcacacaaggaggaaaaggaaaaagaggcaggaggcgaccgaaacaccgccc

SEQ ID NO: 113946 - RNA, 85 nt, Homo sapiens
gagaaagcgcccacgcacgaaagcccaggccaaaaagagaggcaggaaagggacacagccggcgcgagcgggaggccccagggag

SEQ ID NO: 113947 - RNA, 69 nt, Homo sapiens
cccaacagaaaaaaggcaagagcaacgaaccaaagcaaaggaggccgggggaagacggaaaagagagac

SEQ ID NO: 113948 - RNA, 79 nt, Homo sapiens
gccaggaccaggacagagcggcgccgccgccagacgcaccagaagagaacacgagccacgcccaggcgagcacgagggc

SEQ ID NO: 113949 - RNA, 79 nt, Homo sapiens
cagagaggacgcacaagaacgagcgacaggagaacgaacacacgcacccaagcccgaaaagaaagcgaacacacaaaac

SEQ ID NO: 113950 - RNA, 59 nt, Homo sapiens
cgggcgaggcagaccgccacgggaaggagcgggcggcgagccaacgccggcaccacccc

SEQ ID NO: 113951 - RNA, 82 nt, Homo sapiens
cccgagagccgggacacagagcaaccacgggccacgagccgccaaaccacagggaaaaacgggagaggagaagagagcagga

SEQ ID NO: 113952 - RNA, 71 nt, Homo sapiens
ccgccgcccccgcgcgcgacaccacccccagaggggagaggagagcaccaccgacaccgagaagcagagag

SEQ ID NO: 113953 - RNA, 86 nt, Homo sapiens
agccagccggagcacagaaccgcagggccaagacccaacagggccaccacggaacaagcacaagaacccaacaaagcaggacccga

SEQ ID NO: 113954 - RNA, 90 nt, Homo sapiens
cagaaccacagccccgaggagccccaaacgaaggcccgccgaaggagaagggcaggaagacccagcaggccggcccagagcaggcgcagg

SEQ ID NO: 113955 - RNA, 88 nt, Homo sapiens
cgcgccaccacggcccgagacacaccaggccggcaggcgagaaaagcgagaccgcggcgaggaccggcggcgcccagcggccacacgc

SEQ ID NO: 113956 - RNA, 73 nt, Homo sapiens
ggcgggccgggcgacgccggggggggcggcccgcagcgaaggaccggacagcccagagcaagcacacggaggc

SEQ ID NO: 113957 - RNA, 42 nt, Homo sapiens
agaagcgcccacgcagcagccgaagcggccagagcagcaggg

SEQ ID NO: 113958 - RNA, 81 nt, Homo sapiens
cagaggagcccggaggaggcaggagcccgaggaggagccaaggggcagcagcggaagcggaggagagcaaaagagggggaa

SEQ ID NO: 113959 - RNA, 71 nt, Homo sapiens
acagcaacccccccacgccacacagggaaggcacacagcaggccaaggacaaaaggaagcaccgacaagac

SEQ ID NO: 113960 - RNA, 73 nt, Homo sapiens
gcccccggcccgggcacgggacaggccccgggggcgccgagggcacaagggcaacgacagaagggcgaagcca

SEQ ID NO: 113961 - RNA, 35 nt, Homo sapiens
aggcagcggggccagcaaccacaagaaggagagac

SEQ ID NO: 113962 - RNA, 73 nt, Homo sapiens
ggaccaacagcccaggaggccgagcgcgggaaagcagcgacccagcgccaccccccaccagaagcgaggacaa

SEQ ID NO: 113963 - RNA, 61 nt, Homo sapiens
ccgagcgggcccgccgccggagcgaggaccagacccggagacgcccgccaggcacacgcgg

SEQ ID NO: 113964 - RNA, 83 nt, Homo sapiens
acggaccgagaccggaccgagagcggaccgagagcgcgaaacgcacgagaaggcagaagagacaacacagaaaccagggcgga

SEQ ID NO: 113965 - RNA, 122 nt, Homo sapiens
agcggcggcagcgcgaggccggagaaacaggcgccgcgggcccgcgcccggccggacccgggcccgaggcggaggcagggcgagaccgaccacgcaggcccgacccccagcaagcgacccgc

SEQ ID NO: 113966 - RNA, 76 nt, Homo sapiens
aggagcagagacaaaaccaagccaaacacaagcagaaggagcgaagaagagacagcccgaaaccaaaagaaaaagg

SEQ ID NO: 113967 - RNA, 77 nt, Homo sapiens
ggaagcccagcgacggagcacgccacgggccacgcccaccggacacgacgcaccaaaaacagcgcgggaaccacacc

SEQ ID NO: 113968 - RNA, 76 nt, Homo sapiens
ccggcgaccgccgacgcaaggagcggaaaacacgggccaacacggcgcgaaagccagggaagaacagaggagggcg

SEQ ID NO: 113969 - RNA, 86 nt, Homo sapiens
ccccaacgggagacaagaagacgccaacgagcggcgcggacggcgcgcggacaccagcccgggcgcgccaggcacagccaagagcg

SEQ ID NO: 113970 - RNA, 48 nt, Homo sapiens
aaacagggacagggcgaagcacagaaccagcacggcaagggcaagggg

SEQ ID NO: 113971 - RNA, 103 nt, Homo sapiens
ccgccccaaaaacagacagcaaaacaaagaccagccagcaacccacagaagcaccaccgagccggggccggcccgccacgacgagaccaggaaagagacgcca

SEQ ID NO: 113972 - RNA, 70 nt, Homo sapiens
cccccagaagcagaaagacggaaaacacaaacggagccggaagaaaggaacacaacaggaccgcagccag

SEQ ID NO: 113973 - RNA, 81 nt, Homo sapiens
agaagacgcagcccaggcgccacgcagagccccgccaggaagacacgccggggaacgaagcagaagacggaggggggcggg

SEQ ID NO: 113974 - RNA, 57 nt, Homo sapiens
ggacggaaaccagaacgaaaacccgcccaacaggggaggaggagagaaagaacccac

SEQ ID NO: 113975 - RNA, 77 nt, Homo sapiens
gggcaccagggggaggaccccagggcagcagcggaggacaacaccccaacagagcagaaaccaccagccagccagaa

SEQ ID NO: 113976 - RNA, 73 nt, Homo sapiens
gggcccgggaagccgcggagcagcgccaagcagacgacccagacaccaaggcaacacggacagggagaagaag

SEQ ID NO: 113977 - RNA, 56 nt, Homo sapiens
acacccggccccgagacagaagccgcgcaaaacccaaaaagacccccaagaagcaa

SEQ ID NO: 113978 - RNA, 77 nt, Homo sapiens
caaaaagacggacagcccacgggaacaagaggggacagaaagagggaacaggcacgccccacccgccagccgagccc

SEQ ID NO: 113979 - RNA, 82 nt, Homo sapiens
aagcgagaaaggccaaagaagccaaagacgcacagaagcacaaaacggggacagagaaagaccagggcagaggaagaacgca

SEQ ID NO: 113980 - RNA, 84 nt, Homo sapiens
cacaccaaccgagccagggcgggggagcacgaggaggacgaggagagccggcggcgggaggccaaggaagaacagaaccagaga

SEQ ID NO: 113981 - RNA, 63 nt, Homo sapiens
ccgacagccacagaaaaagacccacaggcgcaagcacacgaagaagccacacaccgaaaaccc

SEQ ID NO: 113982 - RNA, 92 nt, Homo sapiens
ggacccagggcagacggagcaaagcccccacgcccagccaggagcaccgccgaggacccagcacaccgagggagcagcaccgaggccccccc

SEQ ID NO: 113983 - RNA, 36 nt, Homo sapiens
acaagagcgccagacgaggaagcccggggcggcgac

SEQ ID NO: 113984 - RNA, 99 nt, Homo sapiens
aaagaagcgcgaaaacagaagcaccgcacacgcccaacacaagaagaaccggaagcagcccagcagggaagaagaggacagcacgccgggggacaaggc

SEQ ID NO: 113985 - RNA, 75 nt, Homo sapiens
ggagaaaggaaaagccagaacagccggaagaagcagagcagcaagaacggaagcacgggcggaggaaagcacaag

SEQ ID NO: 113986 - RNA, 85 nt, Homo sapiens
ccaggcgccggcgggaaggcggggcgacccggggggcgcgcccagagccccgcgcagcccagggaagaacagaaggagcggcgga

SEQ ID NO: 113987 - RNA, 70 nt, Homo sapiens
agacggacccacccacagcacacccaggacaacgaaaggccagcaccaggccgccagggcaccagggaaa

SEQ ID NO: 113988 - RNA, 81 nt, Homo sapiens
gggacccaggaccagccgccgccagaggagagcaccggccacggaaaagcaaagcaccacgccacgggaaggcaggcaaga

SEQ ID NO: 113989 - RNA, 89 nt, Homo sapiens
gccaacccaggaggaaaaacggagaaacgaggaggaagagaaggaccgaacacagaagaaggaacgcagagaaaccaagaaacgaggac

SEQ ID NO: 113990 - RNA, 84 nt, Homo sapiens
gacagagcgccgcgaccccagcgggcccggggaggcaccgacgaggagcccgaccccacgcacccggagccaccgagacgaacc

SEQ ID NO: 113991 - RNA, 76 nt, Homo sapiens
cgcacgggcgcgccaagggcacagagggagagggaaagggagcagcaccggccacacccacagcacgaccggaacc

SEQ ID NO: 113992 - RNA, 74 nt, Homo sapiens
ccaagcaggggagcagcaagagcggcacgccacagagcccacaggaggaaaaacaggggccgaaagaagagcca

SEQ ID NO: 113993 - RNA, 78 nt, Homo sapiens
gcacggcaaaacaagaggaaagacgcaaggaggaacgaagcgcggcccgcccggagcggcagcaaacagcgaccccca

SEQ ID NO: 113994 - RNA, 65 nt, Homo sapiens
cagcgcagcggggccgcgccagaacaggacggaccacgcaaccagcgcccaaaccccgcaaaacg

SEQ ID NO: 113995 - RNA, 79 nt, Homo sapiens
gagcaacgaagcagccgagacgaggagaaaacccagaaaaaagggcaggaggagacgcaagcacgggagcccaggcccc

SEQ ID NO: 113996 - RNA, 62 nt, Homo sapiens
gccaaacagaaaagaagaggagaagcaagcagagaagcggaaggccaagaaccgagaccgaa

SEQ ID NO: 113997 - RNA, 59 nt, Homo sapiens
ggggccaggcaggacccaacgacaggcgccccggcccaacgggcccaaaggaagacaag

SEQ ID NO: 113998 - RNA, 88 nt, Homo sapiens
gagcggccgacgcccgcccggcgcgcacacccgcggggcccggccgggggcgcccgcccggccggcaccaggacagcgaggcaccaga

SEQ ID NO: 113999 - RNA, 68 nt, Homo sapiens
acgcgcaccccggacaccccgggcacacagagaaaaaaagggaacaaaacacagcaagcagacaaaag

SEQ ID NO: 114000 - RNA, 77 nt, Homo sapiens
caaacccacccacaaaggggaagagaaaaacgacagaggcacaacaacagagaagcaacagagaggaaaaaagacag

SEQ ID NO: 114001 - RNA, 78 nt, Homo sapiens
cccgcaggacggaaacccacaggcacacccaaagagcaagcgagacacgcccgacggccagccaacggggccagcccg

SEQ ID NO: 114002 - RNA, 81 nt, Homo sapiens
cgccccggagacagagcagacggaagcggccaagaccaggcaagaacggcgcacgacaagggacccagacaggagcgcggg

SEQ ID NO: 114003 - RNA, 64 nt, Homo sapiens
agacggggaagcggagccgcgccacagacaacggcaagcggagaagagcaaggccgaaccgaga

SEQ ID NO: 114004 - RNA, 83 nt, Homo sapiens
ggaagaaacgcacacgaagaacaagaaaaagcacaagagcaccaacgagggagaggaaaaacgagacgcaggacaaagagaaa

SEQ ID NO: 114005 - RNA, 79 nt, Homo sapiens
ggaagagcaagcgaggaaaaacaccaacaggcacagagggaagggcacaaggccaaaggaagcacaagggggcccgcac

SEQ ID NO: 114006 - RNA, 82 nt, Homo sapiens
gaggaggccacacagaaggacggcccgacggaagaccaccgcccacgaagcccgacgaggcccgagagaagagcagaaacgg

SEQ ID NO: 114007 - RNA, 77 nt, Homo sapiens
cgcgcacccccgccgcaaggcccagggccgcaccgcagccagaaagaaacggaagaaccgagagaaggccgcaggag

SEQ ID NO: 114008 - RNA, 76 nt, Homo sapiens
acacgcgacccggagacagcccaaaacccggaagagcgccccaggagaaacaaggaagacgccacgcccagaccag

SEQ ID NO: 114009 - RNA, 83 nt, Homo sapiens
gacagagaggcaagcgcagggggacggggaccagcagcgcgccgccgcccagcccgccgacacagccaccaagaaggcacaag

SEQ ID NO: 114010 - RNA, 81 nt, Homo sapiens
gcgcgcggcgccgcaacaaagcagacaccagccagagacccagagcagcagcgaagagaaggcccagcccccccgccaccc

SEQ ID NO: 114011 - RNA, 77 nt, Homo sapiens
cggcggaacccggggccgggacgcagcccggcggcagcagggaccaggaggcggggccccccggagcgggcgcagac

SEQ ID NO: 114012 - RNA, 72 nt, Homo sapiens
caaaccccgaggaccgaggccaaagccgagaaaggggggaggaaggaaggggccacccagagcagagccggg

SEQ ID NO: 114013 - RNA, 76 nt, Homo sapiens
gagaaggcagcaaccgaacaacaggaacggcagccaggagaggcggaaaaaagccaagaaaaaaaaacagaagaag

SEQ ID NO: 114014 - RNA, 67 nt, Homo sapiens
gagacagagacgaacgagacagagaaggccaaagagccccaggacgagacaaggacacacccagaaa

SEQ ID NO: 114015 - RNA, 71 nt, Homo sapiens
cgacagaaccaccaccaaaaagccgggaacgacaaggaagaacgccgaacagccaaaaggaaaaaagacca

SEQ ID NO: 114016 - RNA, 61 nt, Homo sapiens
cggccacgagccggaggagcgaccggacggaagaggcccaaaggccaccgcccgcggccag

SEQ ID NO: 114017 - RNA, 64 nt, Homo sapiens
cagcccccaaggagcgcaaggcgacgaggaaaccccgaagcaacggccaagccagcaccaaagg

SEQ ID NO: 114018 - RNA, 57 nt, Homo sapiens
ggaccagggccacgcaggcagggcagggacggaaaaggcgcacacgacccggagaac

SEQ ID NO: 114019 - RNA, 62 nt, Homo sapiens
cggaaagagcaccgggacccaaaggcagcaaaagacgaccaggagacacaacaggccaaagc

SEQ ID NO: 114020 - RNA, 77 nt, Homo sapiens
agacccggaaagaagagacacagaggagccacacccccagcggaagccgcagaaggaccggccagaagcaagccgga

SEQ ID NO: 114021 - RNA, 62 nt, Homo sapiens
cggaggaaggcagcccagaaaccaacgagagacacacaaaagccacaggcgccaagaagccg

SEQ ID NO: 114022 - RNA, 80 nt, Homo sapiens
gggcgagcgaggaggaggcggagcggggcccgacggacggaagcacgggaaaccagcaaccccgaccaccaaggccagaa

SEQ ID NO: 114023 - RNA, 63 nt, Homo sapiens
aaggagagccggcgccagccagggccaagggagcagagaggaacagcacggaggagagagcag

SEQ ID NO: 114024 - RNA, 68 nt, Homo sapiens
ccaagcagcagcgcacaccagaaaaaggaggaaccgcccccggcagcagcggggcccggaggcgaaga

SEQ ID NO: 114025 - RNA, 54 nt, Homo sapiens
cgcaagaaggcacaagaaaacgacagagcgaccaggaaagaccacagcaagacc

SEQ ID NO: 114026 - RNA, 74 nt, Homo sapiens
cgcacggacaagcgcagggaccgagaaccaagggcagcgcaagaccccgcacggaagcagcaagcacaggcagc

SEQ ID NO: 114027 - RNA, 72 nt, Homo sapiens
gaacgcggacgccggcgcgcagggcgaaagggcggaaacagcccccccacgggagcaaccaaacagacggac

SEQ ID NO: 114028 - RNA, 72 nt, Homo sapiens
ggcccccggccggccccgcccccggccgagcgacgagaaaaaccgccgcgcagggaccacgggagaaaaagg

SEQ ID NO: 114029 - RNA, 74 nt, Homo sapiens
ggggacgaagagcgcagcccccggcggaggccggaagagcgggagcgggagccaggcagaaggccaaccaaccc

SEQ ID NO: 114030 - RNA, 52 nt, Homo sapiens
cacccaaggcagccggaaacgaggagaaagggcggagagagcaggggacagg

SEQ ID NO: 114031 - RNA, 78 nt, Homo sapiens
ccggaccaagcgagcaggaggccagagccccacccccacacagggaggagagagccaccaggagcagggacgcccggc

SEQ ID NO: 114032 - RNA, 71 nt, Homo sapiens
agaccaagacggcaggcacgaccccaacggcaccccgccggggcaccgggaaccccaagaggaacagcagg

SEQ ID NO: 114033 - RNA, 75 nt, Homo sapiens
ccgcgcccgggaaagggaaggccaagagaggccaacagaggaacaaggcccgcagaacccaagagcaaaagcagc

SEQ ID NO: 114034 - RNA, 75 nt, Homo sapiens
gggaaggcgccaccgcggccaccgcaggcacaggccgaacaggacacggaggcaaggagagaagacgaggcgggc

SEQ ID NO: 114035 - RNA, 61 nt, Homo sapiens
caagccgggcggccgccccgccggagcagcacacaaggccaggcaagacccgcccgccaag

SEQ ID NO: 114036 - RNA, 49 nt, Homo sapiens
agaccgcacgcgcccaagggagaacggaaaaaacaaagcgaaacagcgg

SEQ ID NO: 114037 - RNA, 66 nt, Homo sapiens
agggccagcaaacccacagaacagcaccaaccaagagagaaagagggggagaagcaacccaacgaa

SEQ ID NO: 114038 - RNA, 75 nt, Homo sapiens
cgcagggcgcccccggaacgcaaaaacaaggccagcagaagaacgagaagaaaacgaaacaagaagagaggagac

SEQ ID NO: 114039 - RNA, 84 nt, Homo sapiens
gaccgcgcggcagcaaagaggccaagggcagaggcgcgagagaagaagagcacaggccagagggaaaggagaaaacaaggggga

SEQ ID NO: 114040 - RNA, 79 nt, Homo sapiens
ccaggcaccgccgcagcagccaagcaaggcagggagccaccaacagagagcagcaagaaggcccaccagaggggcacaa

SEQ ID NO: 114041 - RNA, 72 nt, Homo sapiens
aaagggccaaagaagggagagaggaaccgggagaacccaaggaggagaaggaaaaaggaaggcagccccagg

SEQ ID NO: 114042 - RNA, 80 nt, Homo sapiens
aacgaaggaccacaaccccgagccggaaggagaagaaaggaagagacgacagccagcaggcaggagcccgcccagaacac

SEQ ID NO: 114043 - RNA, 66 nt, Homo sapiens
gcccggcagccaacaacagccagggaaaagaaggacggcgccagagaaggaacagggacgaaaggg

SEQ ID NO: 114044 - RNA, 66 nt, Homo sapiens
aaacaccagcaggcaagcaaggacgaagagagaaaggcagggcaccccaccacagcgacaaagacc

SEQ ID NO: 114045 - RNA, 55 nt, Homo sapiens
ccccaagggcgggaacaggggggaaggagacgcacacccacaccgggcaacaggc

SEQ ID NO: 114046 - RNA, 76 nt, Homo sapiens
ggcagcaccaccgcccgggcaagccccccgccccccccgcagcgcgcagagcccggccaagaacaagcagcagccg

SEQ ID NO: 114047 - RNA, 85 nt, Homo sapiens
cacaagggacgcagaagcgggcccccgccccagcaggacaaacgcacccggcgaagaaggccgggacagcagaaaacagccagca

SEQ ID NO: 114048 - RNA, 56 nt, Homo sapiens
gaaagaaaagaaccaaacggcgagaagacaccggcagacacgggcgcagccccgag

SEQ ID NO: 114049 - RNA, 55 nt, Homo sapiens
aaaacggagacggagagggaaagacagggccaaggaccgcacaggacgagcgaag

SEQ ID NO: 114050 - RNA, 85 nt, Homo sapiens
acacaccacggagaaccagaccggcgacccgcgacgccgagcacccaggcgacgcccaccaaggaccacaggaagcggacccccc

SEQ ID NO: 114051 - RNA, 83 nt, Homo sapiens
cagaaggacgccagcggagaacgcggcaaagcgaggagcgggacggagcgggccaccggggccacgacagcgagcgaccccgg

SEQ ID NO: 114052 - RNA, 73 nt, Homo sapiens
ccgcccggaaggcgcgggaggggcacaaaggaaccccagaacagacagaggggacagcaaaaccacgacgcag

SEQ ID NO: 114053 - RNA, 77 nt, Homo sapiens
cccgcagccgccccccccccggaaaaggcccacgccgggcgaggaggaagaagagaggagacacaggggggagaaag

SEQ ID NO: 114054 - RNA, 73 nt, Homo sapiens
agccagccagccccacagaaacccagagagaaacaccgaggaggacgcagcacacggccaggacgggccaaag

SEQ ID NO: 114055 - RNA, 71 nt, Homo sapiens
gcgccgccgaggagggcccgcggagcgccgaggccgggaacggcaccagacacgaaagagcagaaggcaaa

SEQ ID NO: 114056 - RNA, 72 nt, Homo sapiens
aagaagggacacgaggaacccagggaggaaacacggggcaaaaagaaagaaagggcgggcaagaaggaaaag

SEQ ID NO: 114057 - RNA, 68 nt, Homo sapiens
cgcggacccaacaggacgccccaggcgcaggagcacggagccgccgccggacccgcgccgaacgccaa

SEQ ID NO: 114058 - RNA, 57 nt, Homo sapiens
cgaaagaacgccagacaaacagaggccgccagacagcgcagacaagaaggagagcaa

SEQ ID NO: 114059 - RNA, 82 nt, Homo sapiens
cacccgaccacacacaccaggaaaaaggacgagcagcagccacaggcagccggccagaaccacagcacaaaggaagaacgaa

SEQ ID NO: 114060 - RNA, 97 nt, Homo sapiens
aaagaaaacgaagaggcaaagagaaaaacacacccagacggagaaccgcaggaaaggagggccgccaagggcggacaaagggggaaacagaggagaa

SEQ ID NO: 114061 - RNA, 31 nt, Homo sapiens
cggaacaagcaaaggggaaaagcacagggcc

SEQ ID NO: 114062 - RNA, 73 nt, Homo sapiens
gcaaggggccaccaggaggccagggggcgccagggccagaacgaacagagccaaggagacgcgggacaaggag

SEQ ID NO: 114063 - RNA, 73 nt, Homo sapiens
ccacggagacggggggaggagagaaagggcaacccacgagagaacagaggaaacagagcaaagcagcgacaac

SEQ ID NO: 114064 - RNA, 75 nt, Homo sapiens
gaaaggaagggcgggaccaacagggagccagcccacagaaggacggagcgacgggcaggagcggggccaacaggg

SEQ ID NO: 114065 - RNA, 78 nt, Homo sapiens
cagagcgaccaagaaggagagcgacagcccaagcaccagcagcgagacacccgacagacaggggccacgcgcaaaacg

SEQ ID NO: 114066 - RNA, 69 nt, Homo sapiens
aaacaaaaggagagcgccaaaccaacgagagggaggaacagcaccgggggcgggaaccagggaagcggc

SEQ ID NO: 114067 - RNA, 84 nt, Homo sapiens
cagcaagccccgcaccaccaacgcagcaccccggccaaggcacaagagaacagcaacccgaaagaagaagacaaaggcaaaaca

SEQ ID NO: 114068 - RNA, 81 nt, Homo sapiens
aaacagagagaacagccaaaacggaaaacggcacccggcagcaacggcgaagcagagggccgacagccaagaaacagaccg

SEQ ID NO: 114069 - RNA, 72 nt, Homo sapiens
ggggccggccagccacccaaggccccggacgccggagaggcaccggaccgacgacggacaagaggagacgac

SEQ ID NO: 114070 - RNA, 79 nt, Homo sapiens
gacagcaagaaccagaccggcacccagagcacccgcccacgcggagaggggggcagaaggcaaacgaagcacggcaggc

SEQ ID NO: 114071 - RNA, 76 nt, Homo sapiens
gaagccagccgacaagggcagaacgaacaggaacaaagccagacggggaggcaaagaagggagacgaacaaaaccg

SEQ ID NO: 114072 - RNA, 62 nt, Homo sapiens
agaagccaccgcaaaaacgcacaagaacgaagaagaaacaaagcccaaagaaccccgaccaa

SEQ ID NO: 114073 - RNA, 74 nt, Homo sapiens
ccgggagcagccaacagcagaaggcgcccaagaacaaaccaccgggagaaccaccaaaagaaacggccagaaaa

SEQ ID NO: 114074 - RNA, 88 nt, Homo sapiens
cgcggaaccccaagcaggcccccagcgcggaagaggcggcgcccggcgccggcagccggaaccaaaaagaagccccagagccggggcc

SEQ ID NO: 114075 - RNA, 37 nt, Homo sapiens
gaacagagagaagcccacaccgagacaaccaagcaag

SEQ ID NO: 114076 - RNA, 71 nt, Homo sapiens
acacaaaaacgaccacgagagaaaagagccaaacaaggaaacagaagacggaaaggcgcgagaggccggga

SEQ ID NO: 114077 - RNA, 73 nt, Homo sapiens
cgggccggagaggggagaccggaaaggcgacacacaccgaaagcggcggggagggcaggacgagggaaagacg

SEQ ID NO: 114078 - RNA, 72 nt, Homo sapiens
cgggcggcgcagcagaagaaccacgcagagcgagcggaaacccccacgggcgcaaaggaaggaccgaccgac

SEQ ID NO: 114079 - RNA, 78 nt, Homo sapiens
gaagacccaaaaaaaagaggagcagcaggcacagcacgggcagagccaggcgcggccgaacccagcgagaaaccagga

SEQ ID NO: 114080 - RNA, 72 nt, Homo sapiens
gaagccaagcccccccgggcaagcaagaaaaacccaacacggcagcaaaaagcaggcacgaggcaccagagc

SEQ ID NO: 114081 - RNA, 35 nt, Homo sapiens
cggcaggccccgggccgacaaacccacaagcgaaa

SEQ ID NO: 114082 - RNA, 76 nt, Homo sapiens
ccggaccgagagcggaccgagagcgcgaaacgcacgagaagggcggccacccaggcggaggcagaaaaacggccac

SEQ ID NO: 114083 - RNA, 53 nt, Homo sapiens
gcggacgccggacagcgccaccagcaaaaccagagaaacaggcagagaaagac

SEQ ID NO: 114084 - RNA, 79 nt, Homo sapiens
cggagcccaggcccggccacaggcccgcccaggaacacgagcccaaagagggaacggcgccaccgagcacagaagagcg

SEQ ID NO: 114085 - RNA, 80 nt, Homo sapiens
agggccaacagggccggccggccggcccccaaacgcgcccgcccccaggccggcacagccacaccgagaagaccggccca

SEQ ID NO: 114086 - RNA, 83 nt, Homo sapiens
cgagaggaggaaggcggcaaaaggcggaccgcccccgccaacgaagaccgagaccaggcgaagcacacagcagaggcggacca

SEQ ID NO: 114087 - RNA, 63 nt, Homo sapiens
caccaggccgaccggacggccgggccagccacagcaccccgaaggagaggcagaaagaccaaa

SEQ ID NO: 114088 - RNA, 66 nt, Homo sapiens
cccccccccccaagcgcagaaaggccagacagggaccgaacgacacaacacaccaaaaagagaaca

SEQ ID NO: 114089 - RNA, 71 nt, Homo sapiens
aaagaaacaagccgggaaagggacaagaagggcaaagccgaagaagggagaaaggagaaaacaccagaaaa

SEQ ID NO: 114090 - RNA, 79 nt, Homo sapiens
ggaggcaagaccgccccgccgcccagaggacgcccaacaccacccacccaccacggagaaaccaaggcagacagagcag

SEQ ID NO: 114091 - RNA, 68 nt, Homo sapiens
ggaggcagagcgggcgcgccacggccacacgcccagcgagcgccccacacagggcgacgccaggagca

SEQ ID NO: 114092 - RNA, 72 nt, Homo sapiens
agaagcgcagggacgaggagcaccaacaaaaaccaggcgagccacacggggaaggaaaaacaaccaccagcg

SEQ ID NO: 114093 - RNA, 78 nt, Homo sapiens
gcgggcgggagcgcccaagggggcggagagcggggggggcgggaggccaccgccccaccagcaggcaacgccacagac

SEQ ID NO: 114094 - RNA, 66 nt, Homo sapiens
gaagccggggcggaacagggcgcacacccgcacggcacccccaggggcacaaaagcgaagcaagag

SEQ ID NO: 114095 - RNA, 79 nt, Homo sapiens
gggcagcaacggagccaggcagaggaccacaccgggcaccccccccacgcaaaagaagagcagccacaggaaaggggac

SEQ ID NO: 114096 - RNA, 80 nt, Homo sapiens
gaaagaggccgggagcgcccccacccgcccgagccgggagcacagcagaaggacccagaagaccccagacggggagcgca

SEQ ID NO: 114097 - RNA, 80 nt, Homo sapiens
cacaaaccaaggggcaaaaaggcagaaagagaaccggggcaagagacggcagacaaacacagccgagagaaggcaggcga

SEQ ID NO: 114098 - RNA, 54 nt, Homo sapiens
gcgcagggcggaaggacaacagcccgacaaccaggaaaccaccccacccaaccc

SEQ ID NO: 114099 - RNA, 73 nt, Homo sapiens
cacgagcccggcgccggcaggccccgggccgagcccagcgaaagacaaccgcccccagcgaagaccggagaga

SEQ ID NO: 114100 - RNA, 79 nt, Homo sapiens
agaaacgaaaaggaagaaaaaaccagaaaggcagagcagcaaagcaaaaagcacacagcgagaagggaccggcccggac

SEQ ID NO: 114101 - RNA, 69 nt, Homo sapiens
aaaacagcccagagcaagacgaaagggggagaacaaggaggaggacaggcgcccccgccgccagacccc

SEQ ID NO: 114102 - RNA, 73 nt, Homo sapiens
gggggaggcgagcgcgccgcccggagccgcgcacacggacaagaaaggaccagcagaagagcaagggagaaac

SEQ ID NO: 114103 - RNA, 78 nt, Homo sapiens
cagaccgggcagccggaggcccccaagccggacacaccgcacgagagccaggcacccacaagagcaccaggacaaccc

SEQ ID NO: 114104 - RNA, 89 nt, Homo sapiens
aagaagcacgcgggacacaggggacaaccagaacacaacagacgaaaaaaccaccggacacgacagagcgacccagagagggaccaggg

SEQ ID NO: 114105 - RNA, 77 nt, Homo sapiens
acccaagcgaacccggaaggcgggaccagccaccaccaagacgcagggcacaaggccaagacggccaagggagccac

SEQ ID NO: 114106 - RNA, 72 nt, Homo sapiens
gaggaaaggggaaaaaggaacagacccaacaaaggcagaacaagaagggcaaccaggggggaaggagggagc

SEQ ID NO: 114107 - RNA, 74 nt, Homo sapiens
agacaaagaaaggcaaacaccgagcaagaaaaaagggaagaaaggggcacacagaaagccacggggaaaaggaa

SEQ ID NO: 114108 - RNA, 78 nt, Homo sapiens
cgaaaagcgccaaggaaaaggacgagaacgccgcgacagaaaccaccaccgcccagcgcgcccccccaggaggcccca

SEQ ID NO: 114109 - RNA, 99 nt, Homo sapiens
agaaaaaaagcacgccccagccacgaccacgccacccccgaaggaaccgcgaccacagagaccgagcagagaagggagggaaaggagggccagaaaccg

SEQ ID NO: 114110 - RNA, 77 nt, Homo sapiens
cggcgcccgcagagaaccccccccaccgccccagaaagccccagacggaaagagcacgcgaccggacaggacacgag

SEQ ID NO: 114111 - RNA, 73 nt, Homo sapiens
agcggagacacaggcaaacgcagaaaagagagccgggcgcggaaacgagaagccaaagaaacgccaaccgccc

SEQ ID NO: 114112 - RNA, 69 nt, Homo sapiens
gggcacagaaaccggcgaaaagaagaggaagcaaagcgggcacgaagaacacaaagcaaaaaggaaaag

SEQ ID NO: 114113 - RNA, 75 nt, Homo sapiens
gacgccagcacaggaaggagaccacgagccgaggacaaccaacaaaggccaacggcacagaaggcgggaaaacgg

SEQ ID NO: 114114 - RNA, 85 nt, Homo sapiens
agggaacaaagcccacagcaccgggcgaaccgaccaagaacaacacccagagggccaggagaaggcgaagagagcagcgaccaac

SEQ ID NO: 114115 - RNA, 74 nt, Homo sapiens
ggggagacaacggcacagacacaggagagagacgacagggagaggagaagagaggacgaggcggccccagggac

SEQ ID NO: 114116 - RNA, 82 nt, Homo sapiens
ggaaccagcgcccaagagagggcgggaccggccccacacaaagccaggcgcgggggggagaagggaagcgccaagaagcaac

SEQ ID NO: 114117 - RNA, 62 nt, Homo sapiens
agacaagcaacgaagccggggaccagaaaggaacggcaagacaacaagcggacaggagagcg

SEQ ID NO: 114118 - RNA, 78 nt, Homo sapiens
aagaagcgcagccgcaccggccaagggcaggcagccgcccgacggggcccccaggggcagccagaaaggcagccgggc

SEQ ID NO: 114119 - RNA, 77 nt, Homo sapiens
cgacagcgccaggcccagacgccaacgcaggagcacccaggggcaaaaagcagagaaaaaacaacggagaagcaaaa

SEQ ID NO: 114120 - RNA, 93 nt, Homo sapiens
cgggcaaccaacaagaaacagacacaccgcacagggccaagcagggggcagggaagacggagcacggacgcagagaaggaaccccgaagcaag

SEQ ID NO: 114121 - RNA, 67 nt, Homo sapiens
cacgcaagaacagcacgacacagacagcccacacagcccggaaaccaggacccgaaaagccagcaag

SEQ ID NO: 114122 - RNA, 67 nt, Homo sapiens
gcaagcagaaggacccggggcgaaaagagggccaagaggcgcgcacgaaaggcagagaaacagccca

SEQ ID NO: 114123 - RNA, 70 nt, Homo sapiens
ccgaggggcggacgcggccggggacgaagggaacccgccgggcggcccggcacccagccccccggcaccc

SEQ ID NO: 114124 - RNA, 81 nt, Homo sapiens
gaagacgaggcggcgggggacaagcggcgccccagagcggacgaggcgcggggaaagacgagacaaacggggggggagcag

SEQ ID NO: 114125 - RNA, 81 nt, Homo sapiens
cggacggggcccgacacggccacccacgccggaggccggggagccgacgccggcccgacaagcaccgaggaaggcgcccga

SEQ ID NO: 114126 - RNA, 82 nt, Homo sapiens
agaagacccaaaaaaaagaggagcagcaggcacagcacgggcagagccaggacagagcgggagccaccagcgccaaagggaa

SEQ ID NO: 114127 - RNA, 83 nt, Homo sapiens
gccccgggcggcgccggccgcgaccgcgacccgacacccccgcggaacccccgcaccccaggcggagcgcaagcccacagacc

SEQ ID NO: 114128 - RNA, 84 nt, Homo sapiens
ggggccccgcggcgcaggaggcggggagcgcagagcgggcgagcgcggaaaccgaggaaggcagggaccggaaagaacaaaggc

SEQ ID NO: 114129 - RNA, 91 nt, Homo sapiens
cgacgacgggaaaacaaggcacggcaacacaagcaagcggggcgaccagagcagaccggagagcaaggggacccgcacacgcaacccgccc

SEQ ID NO: 114130 - RNA, 66 nt, Homo sapiens
ggcgagcgcgagcggcgcgagaaacacccaggccacagaggaggaaagagaggggaaagaagcagc

SEQ ID NO: 114131 - RNA, 51 nt, Homo sapiens
ccaagggcagcaagaaagggaaggcgaccaaccccggagccccccgagggc

SEQ ID NO: 114132 - RNA, 71 nt, Homo sapiens
cacggaccagagcacagacccgccggcggcccgccgccccacccgcccaccagccacaggggacccagaag

SEQ ID NO: 114133 - RNA, 34 nt, Homo sapiens
agcaggacagccgagaaagagaggagcacaggcc

SEQ ID NO: 114134 - RNA, 68 nt, Homo sapiens
ggaggcgcgaagaaacaagcagaccccccggacaaaccggcgaccacacacggggacgacggggaagc

SEQ ID NO: 114135 - RNA, 59 nt, Homo sapiens
ggaagacgcacgggccaggaccaagacgagggcgcaggcgagagggccaggggggggaa

SEQ ID NO: 114136 - RNA, 72 nt, Homo sapiens
gcaccaggacccaaggaaccagaaacagaagacagccgaaccaagggcgacaaccagagacaagcaggcgca

SEQ ID NO: 114137 - RNA, 71 nt, Homo sapiens
gccagaagaccaagaccgcagaccgaccccgagagaggacgacgcacacagcaaccccgggagaaaacaca

SEQ ID NO: 114138 - RNA, 74 nt, Homo sapiens
aaggagaccccgcagcgagaacgaggaaagggaacccccgagcacaacgcaacggacagagcgccgcgcccagg

SEQ ID NO: 114139 - RNA, 80 nt, Homo sapiens
cgaaaccagggcgcgccgagagccccagggcaaagccccagagcagagaacccaaagcccgcaggaggcaaagcgcaaca

SEQ ID NO: 114140 - RNA, 60 nt, Homo sapiens
caacagaagaagaacagaccaaaccagacggcggaaaacggggacaccggaccggacccg

SEQ ID NO: 114141 - RNA, 80 nt, Homo sapiens
gcgggccgccacggaggagccaggcccgcgagccaacagaaggcgcgggagaaaagccacccccacagaccgcaaccacc

SEQ ID NO: 114142 - RNA, 73 nt, Homo sapiens
gcccccccgacacggccaagaggaaaggaaaggagcggaggcaggccaaagggaaagacagaaggaaaccagg

SEQ ID NO: 114143 - RNA, 73 nt, Homo sapiens
gccccaggccaagagggacccacccggcgcaccacgcgcgcccgagcggacaagagcagcgggagcggagaga

SEQ ID NO: 114144 - RNA, 66 nt, Homo sapiens
gcgcgaaccgagcgcaagggaagaaaagaagacagccaggacagcccaccaccaccgggcgggcca

SEQ ID NO: 114145 - RNA, 77 nt, Homo sapiens
cgggcgagcggcgagccgaaaagcgagcgcgaggaaaaggcggcgggagaggaccacccgcacccaggggacgcacg

SEQ ID NO: 114146 - RNA, 56 nt, Homo sapiens
agccagcgagcccccccgacacggccaagcccaggccagcccgcagccggaggggc

SEQ ID NO: 114147 - RNA, 84 nt, Homo sapiens
gagaaaacacagcaaaggggaggagaaggagcacaacaagcaagaggaacccaacccgaaaacagaacacggaccaggaaagga

SEQ ID NO: 114148 - RNA, 56 nt, Homo sapiens
ggagggggcccccggaaggagggcccgggcccaaggaggagacggccagacaggca

SEQ ID NO: 114149 - RNA, 71 nt, Homo sapiens
ggcagcagaccacagaggaaggaccacccagagggaaacacacgcacagaaccgagggcggaagggccgca

SEQ ID NO: 114150 - RNA, 78 nt, Homo sapiens
gacccaaccggcagaacccagagaaacagaggacagcagggaagaacggaaaccagagaaagaaacgcccccacacaa

SEQ ID NO: 114151 - RNA, 94 nt, Homo sapiens
agaaaagcacaggccggaaacacgagagagcccgaccaagcccaaagggacaccagcaccgagccgggaccccggaccaccggcaagcgacccc

SEQ ID NO: 114152 - RNA, 77 nt, Homo sapiens
agagaggaacccgaagaagaaaggacgacagccagagaggccccgggggcgccgagggcacaagggcaacgacagaa

SEQ ID NO: 114153 - RNA, 72 nt, Homo sapiens
acaagaggaccccgcgcaaccggcacaacaggcagagaacaaaccaggggagggaaacgagaaaaacgacgc

SEQ ID NO: 114154 - RNA, 75 nt, Homo sapiens
cagggccacccgaggccggggggggcccagggggacgacaaagagaggccacaaggacaccagcaacgaagaggc

SEQ ID NO: 114155 - RNA, 81 nt, Homo sapiens
ccagcgacaaaagagaaacccggcaggccagaaaccgcagggagaggcccaccagaagaagccaaaaagaagcgagaaaaa

SEQ ID NO: 114156 - RNA, 68 nt, Homo sapiens
caggagaaggaccaagaaccagcaaagaaagggagacaggcagaaccagacccggagcagacgaggag

SEQ ID NO: 114157 - RNA, 87 nt, Homo sapiens
cgcggggcgaggaggaggaggcagccgcaaagcaaaccgagaagaagaggcgcagcagcacaacagacaacccacagccgaaagggc

SEQ ID NO: 114158 - RNA, 84 nt, Homo sapiens
cccccaagcggccgcgagaagcagcgggggggcaggcgacgaaggccacaaggcgaacaaccagccccaaccacagaccgacgc

SEQ ID NO: 114159 - RNA, 38 nt, Homo sapiens
cgaggccggccgaagccgcgcgaccagaacaaaaacca

SEQ ID NO: 114160 - RNA, 73 nt, Homo sapiens
gggggaagcagaggggcgaccaacccgcggaggcaaccacgggagggagaagggggccagaggggcaagcgag

SEQ ID NO: 114161 - RNA, 52 nt, Homo sapiens
gcagaaacaacaggggagaagcgcaggcggagcaggagcaaaggagcaagaa

SEQ ID NO: 114162 - RNA, 74 nt, Homo sapiens
gcggggaccccaaacaagcgcgcaaaagcgaggagggccgcggcagaaaccagagacgaccacaagaacccaca

SEQ ID NO: 114163 - RNA, 56 nt, Homo sapiens
cggaggagcaggcgagaagagaaggaagacccgcggaaggcacacaagacacagcc

SEQ ID NO: 114164 - RNA, 81 nt, Homo sapiens
gaggaagaggcgggacggcgccggccggggggacgggcacgggacaaaacaacgagggcagaaccagagaggggagaggcc

SEQ ID NO: 114165 - RNA, 41 nt, Homo sapiens
ggcccacgcagcccccaagcagggggggccccagcccggcc

SEQ ID NO: 114166 - RNA, 65 nt, Homo sapiens
agaagaaagaaccacagaaggccacaaggcacagccagaggacaacacacacacacaagaaacag

SEQ ID NO: 114167 - RNA, 81 nt, Homo sapiens
gggcaacagcgcagaagggacaggaggagacagcgggccaagcagagagaacagacagcaaggccacgggacgggaaccga

SEQ ID NO: 114168 - RNA, 78 nt, Homo sapiens
gaacaaaaaaaagaaagagaagcacacaaacaagcagcgacaaaacaggaagcgagacagcgagggcaaagacagcca

SEQ ID NO: 114169 - RNA, 53 nt, Homo sapiens
gcccagcccccaagacgggaacagcccccaaccccagaaccccaccaggacgg

SEQ ID NO: 114170 - RNA, 102 nt, Homo sapiens
aagaagagaagcacgaaagcgggagagggaccggaacggcggcgacaaggggcccgaacagaggggcgggaagcggagaaaaccaggacccaagacagcagc

SEQ ID NO: 114171 - RNA, 77 nt, Homo sapiens
gcgaaaaaaaggaagacacaagaaacagcccaagcggagcaggccggagggcgggcccaagcaccagcgaggacggg

SEQ ID NO: 114172 - RNA, 72 nt, Homo sapiens
cgaggggcgaaaacagacccggagaaagacggccagcaaggggaaccacaggaacggcacacaaacagcgaa

SEQ ID NO: 114173 - RNA, 64 nt, Homo sapiens
agggaagcgggaggcaggcagccagcacccaccccgagggggaacgagccgagccgagaaaaca

SEQ ID NO: 114174 - RNA, 85 nt, Homo sapiens
cccagaaggcggcgaccgggcgcgggcaaggcggaaaacaacggagcacgcaaagcaagccggcaacgggacaagcaggacggga

SEQ ID NO: 114175 - RNA, 64 nt, Homo sapiens
gaccggaaaacagaagaaaacgaagcaggcaggggcggcgaagccaaccacagcccggagagag

SEQ ID NO: 114176 - RNA, 77 nt, Homo sapiens
aaagagcgccgggacagggggaggaaagcaccgaggcacaacagaaaagcacggcgccgagaggaaggacacaaggc

SEQ ID NO: 114177 - RNA, 58 nt, Homo sapiens
ccagcccccgacagcgggaacaggccagaaccacaagaccgcaagccagccccaaccg

SEQ ID NO: 114178 - RNA, 73 nt, Homo sapiens
cagggaggccagagaggaagggacacaccaccaggagcgcagaaaaaggggcccccccaccagacaaggagac

SEQ ID NO: 114179 - RNA, 74 nt, Homo sapiens
aaggacccccacaacgagcgcccggagggaacaagcagaaagcacgaacaacgagaacaagacacgagcaaacc

SEQ ID NO: 114180 - RNA, 68 nt, Homo sapiens
acaagaaggagagacgcagagccagacaagaccagcgccgccagcgaggaacaacgcaggaagcgaag

SEQ ID NO: 114181 - RNA, 74 nt, Homo sapiens
cagaacaagcacaaccccaaaaaacaccaccaaccaaggaaaggacggagcagcgagccgccaccagagggaac

SEQ ID NO: 114182 - RNA, 82 nt, Homo sapiens
caacagcaaggcggaaggagaagaggccgccgcgccaacgcgagcggcgacggcggagcaagaacgcggcaaaaagcaaaga

SEQ ID NO: 114183 - RNA, 57 nt, Homo sapiens
aaaaagaacaacgcggacccaaagacaggaccacgcaccagcagagaaggaaagcaa

SEQ ID NO: 114184 - RNA, 80 nt, Homo sapiens
ccgccgccgccccccgcccggaacaggaccgaccgcgccgccgccccacccggaggccgcagccgcccggagcgcgaagg

SEQ ID NO: 114185 - RNA, 70 nt, Homo sapiens
caaggggcccgcaacaccggaaccggaagcacggccacagggaagcccgggggggcacaacggggggaac

SEQ ID NO: 114186 - RNA, 71 nt, Homo sapiens
accccaccggccgacagccgcgacggcgagcccgggccgcgcccgagaaggaaggcccccgaagcgacacg

SEQ ID NO: 114187 - RNA, 85 nt, Homo sapiens
ggcaccagcggagaaaagcgggaggcagcggccgaggagcgccaagggccgaaagaagaaggggaaagaaacaaaaacaaaacca

SEQ ID NO: 114188 - RNA, 79 nt, Homo sapiens
acccgaacccacgacacggccgacacgagaggcgagggacgacagagcaagcggcagagggcaagcgggaaaaagacca

SEQ ID NO: 114189 - RNA, 75 nt, Homo sapiens
gagcaacaccgacggcgcccagacaccagcacaacccccagaacgacgggcaggaagagagacggccggccccca

SEQ ID NO: 114190 - RNA, 57 nt, Homo sapiens
cggacaccacagagacacaaaccagacaacccggacagcaagaacaggccaacaccg

SEQ ID NO: 114191 - RNA, 81 nt, Homo sapiens
cagaagccgcaacaggaaagcagcccgaaaaagacgcgagaagccacacgcgcgccccagaccaccggcagggaacagccg

SEQ ID NO: 114192 - RNA, 86 nt, Homo sapiens
gcggaggcaacaggacacaagcggcagggaaggaagccagcgaagcaccgggacacgagacggccacacacggacacaaagcccca

SEQ ID NO: 114193 - RNA, 77 nt, Homo sapiens
acgaaaccccaggggacaagccccgggggcccgggaaggccaccgcccccacccccagaccacccacagccccaccc

SEQ ID NO: 114194 - RNA, 82 nt, Homo sapiens
cgcagagagaccacagcccacaagacagaaggggagcggcgacaaggagcccacacagacaaaagaggccgcaccgggcagg

SEQ ID NO: 114195 - RNA, 85 nt, Homo sapiens
cagaagagaagcgagaacagccagagagacagaaaccacacagaaacagagagaaacaaacagagagccgcaccacaccccaccg

SEQ ID NO: 114196 - RNA, 71 nt, Homo sapiens
cgcccgcaccacggggacccagcagaggacaggagagacaacggaggcaagaaagacggagaagcgagaag

SEQ ID NO: 114197 - RNA, 77 nt, Homo sapiens
gggaaaaggccagaccaaggccgcaagagagaggggaaaggagggaaaggcgggaacaaagaccggaagacagcaca

SEQ ID NO: 114198 - RNA, 79 nt, Homo sapiens
gcccaaaacccggaagagcgccccaggagaaacaagagccccagcgagccagagggacagcacagcccgcccgcgcaag

SEQ ID NO: 114199 - RNA, 76 nt, Homo sapiens
ggcccagcagacagccgaggggagcgcggggcccggcagaaagcacgagccagggagccgccgggaccggcccggg

SEQ ID NO: 114200 - RNA, 37 nt, Homo sapiens
cgccacacccacacacaagagcccagccaaaggcacg

SEQ ID NO: 114201 - RNA, 80 nt, Homo sapiens
cccggggcaccacccccaaggagacgggcgcacccagagagaacgggacccggaggaccagcgagccaccgaagcagaga

SEQ ID NO: 114202 - RNA, 59 nt, Homo sapiens
gcgaaagagggaagcggcaaaccaaaagagcaacgcaggcgaggacaacaccgcgcccc

SEQ ID NO: 114203 - RNA, 79 nt, Homo sapiens
cacaaagccgcgaaaggccgggaagagggagagcaaacggccagcccaaggaaaccgagaagggaagccaagcagagaa

SEQ ID NO: 114204 - RNA, 55 nt, Homo sapiens
agaagaggaaacagaacagaacaacacggaggaaaccaccgagcccgagcagcca

SEQ ID NO: 114205 - RNA, 76 nt, Homo sapiens
gagaggcgccagcccggagcagggcagggcggagaacggaaaagcaccaggaagcagagaggaccgcagaagggaa

SEQ ID NO: 114206 - RNA, 77 nt, Homo sapiens
aggcggcggagaacaagcggcaggccagccaggaaagcgggagcgcgggagcaaaggaaagaagagaagcgcggcgc

SEQ ID NO: 114207 - RNA, 62 nt, Homo sapiens
ccaggcgaagcggccgagcaggcgagcgaacgacgggacagaggaaacgagaaaggacgcag

SEQ ID NO: 114208 - RNA, 63 nt, Homo sapiens
cagaccccacgaccggacgcccacgaccccagcaggggaaggaaggaagacccacaagagacc

SEQ ID NO: 114209 - RNA, 41 nt, Homo sapiens
aaagagaaccgggggaccacagacagggagcccaccgagcc

SEQ ID NO: 114210 - RNA, 80 nt, Homo sapiens
ggcagggccagcaaagagcgggcaaagaaaccccaaagccagcaagaccacagcagcacgcaccagccagcgaaccggcc

SEQ ID NO: 114211 - RNA, 79 nt, Homo sapiens
gaagagaagagcccggaaaaggagaagaaaaaagacaccaggggaaagaagaaggagaaacacagaagaggaagaaaaa

SEQ ID NO: 114212 - RNA, 72 nt, Homo sapiens
gaccaagcggacaaccacggagaaaccgaagaagacacgacaggacagagggacaccccccagaccccacga

SEQ ID NO: 114213 - RNA, 81 nt, Homo sapiens
aagggaggaaaggagcagggaccccagagaaacaacgcacgcggaaaaggaacagaagaggaaccgaaacccaagaaaaac

SEQ ID NO: 114214 - RNA, 75 nt, Homo sapiens
ggacggcaccacccgcaacaagccgccagcaccaaggggagcgcaaccccagaagacgcagagccagaagacgca

SEQ ID NO: 114215 - RNA, 59 nt, Homo sapiens
cgcggcaacgcccccgggacagcacgccccggaccccaaacagaagagacggagaagaa

SEQ ID NO: 114216 - RNA, 63 nt, Homo sapiens
aaggcccggagccacaggccagccacccaggcccaggaccgagcccgacgcccacagacaggc

SEQ ID NO: 114217 - RNA, 58 nt, Homo sapiens
gaggaggggcggccaagcgcggaaggaaaggacggaaacagaacccacgcacccagcg

SEQ ID NO: 114218 - RNA, 62 nt, Homo sapiens
gccggggaaggaggggaggaagaaaacgccggggcaaagaaaaaggagagaaaaagaggcaa

SEQ ID NO: 114219 - RNA, 78 nt, Homo sapiens
caaggcccgcccgggagggccggggccgcgccaggggacccagagacagggcggccgcgccccggagaaccccaaccg

SEQ ID NO: 114220 - RNA, 72 nt, Homo sapiens
ccacccggaggagacggggcagacaacggagcccggggaccccagaagggccccgagggaggagaaagaccc

SEQ ID NO: 114221 - RNA, 84 nt, Homo sapiens
cgcgacccccaacgccaagcagcccaccgacaggcccggaggcagcagaaggccagaaacgccggacgccgaaaagcgccaaca

SEQ ID NO: 114222 - RNA, 67 nt, Homo sapiens
ggcggccaaggggacgagcaaaggaagcgcgaacagcagcgcagaccggggaaccagcaccccagaa

SEQ ID NO: 114223 - RNA, 58 nt, Homo sapiens
cccaagacgggacacaggggcgccacgcaccggcggacaaagaggacagaacacaacg

SEQ ID NO: 114224 - RNA, 113 nt, Homo sapiens
gacagagccaccacccggaagcgcccccagagcgccaggaaaaaccgaagaaggggggcacaaggaccagcgccgaggagccacaagggcaccccagagcggcagagcacaga

SEQ ID NO: 114225 - RNA, 56 nt, Homo sapiens
cagcaggaaggacacaccgggccagcaggagggggcccagaaaagagggcccacga

SEQ ID NO: 114226 - RNA, 67 nt, Homo sapiens
accaggaccacccgaccggcccagcgccgaggcggcggacggggaggcaccgccccaaccccccccc

SEQ ID NO: 114227 - RNA, 78 nt, Homo sapiens
gaaggggccagcggagacagcaagggaaagaggcaaaaccgagaaaaggaccaaagagagcgagaaagcccaagaaaa

SEQ ID NO: 114228 - RNA, 78 nt, Homo sapiens
aaaacagacgggggaaaaaaaggagcgcccgagcgaccaaagaccgggaaaagggaaagccaaaacccagaacccgaa

SEQ ID NO: 114229 - RNA, 78 nt, Homo sapiens
gcagccccgacacaccaaccgacgggagacgacggcgagaaacacggggacccggacaagcaagggggaaaaagcgca

SEQ ID NO: 114230 - RNA, 55 nt, Homo sapiens
ggagcacacaaaaaacagcgccgcccggagcaagacaaaccgcccggccgcagag

SEQ ID NO: 114231 - RNA, 69 nt, Homo sapiens
aggaaaaaacagaagcagagaggagggagagccgggaagagagcacaaggcagcaagaaaacacggcag

SEQ ID NO: 114232 - RNA, 79 nt, Homo sapiens
gagaagcccgccccaccaaccagagacgccggagagaaggaggcagagaccggcggcagagggcggaagacgcacgggc

SEQ ID NO: 114233 - RNA, 73 nt, Homo sapiens
ccgccgggcgcccccggacagaccaacgaacagcgggacccacccagcaaacagaacggccgagagaggccaa

SEQ ID NO: 114234 - RNA, 71 nt, Homo sapiens
agaccagaccaggacaaagagcccaaaaggcagagcgaggagagaagaaggagggaaagccaaacaacgga

SEQ ID NO: 114235 - RNA, 76 nt, Homo sapiens
cggcgacaccgggagagcgaccagggacaaaaggaagccaggagggaagcccagaagacgcacaagagagaccgac

SEQ ID NO: 114236 - RNA, 55 nt, Homo sapiens
cgcggccaaggagccgccaaagccagacggcaaaaggcagaccgaaaaaacagac

SEQ ID NO: 114237 - RNA, 81 nt, Homo sapiens
cgaacagacccggaaggacggcgaggccccccagggcagggacgaggccggaaggggccagacgcgggaccgccacacgac

SEQ ID NO: 114238 - RNA, 46 nt, Homo sapiens
cccagccgcccgccgcccgccgggggcccgaaccgccaggcagcgg

SEQ ID NO: 114239 - RNA, 59 nt, Homo sapiens
ccccaaaggcggaacaggagaacgcagacagaaaccaagccgccccgaacaacgccgag

SEQ ID NO: 114240 - RNA, 72 nt, Homo sapiens
gagggcggacacaagaagcaaacacagcgagccaagcaagacaagagcagccgagcggacaccgaaaaggcc

SEQ ID NO: 114241 - RNA, 108 nt, Homo sapiens
gacaaccagaaggggaacgaaagacagaagcagagcgaacagagggagaagcccacaaggccaggggcggcaaggcacagccagagcccaacccacacccacagccgc

SEQ ID NO: 114242 - RNA, 72 nt, Homo sapiens
agggggaaacacagaacgcagggcgaaacaggccccaacccaggaagccggaaggcaaccaaacccagcagg

SEQ ID NO: 114243 - RNA, 109 nt, Homo sapiens
ccaggagcgagagcacaggaaaagaaaaccggagaccagggcaacccagacaaagaagaccggagccacaggaacagccccccaccccaccgccccgcccagggagcgc

SEQ ID NO: 114244 - RNA, 71 nt, Homo sapiens
cgaggagcccaagggccagcagccggccgagccccagccgaccggccgggcccgggaggagcaggggcaga

SEQ ID NO: 114245 - RNA, 77 nt, Homo sapiens
ggccgaaaggggagacaggcggccacaggcacaggaccgcaccagcaggaccgagacagccacccaagaagagggac

SEQ ID NO: 114246 - RNA, 61 nt, Homo sapiens
cggagcccagaagacagagggcgagaacgccaaaagacgaacacaaagggaaagaggagag

SEQ ID NO: 114247 - RNA, 78 nt, Homo sapiens
gacgaagaacccacagagagagaagaagaaggaggccgcggccagaaacccaagaaaaagcgaaggaacgcagagcga

SEQ ID NO: 114248 - RNA, 75 nt, Homo sapiens
aaaaaagggaaaggaaaacggaagccgcaaagaccacgccccacaaccaggaaaggaccaacagacgcaccaaag

SEQ ID NO: 114249 - RNA, 32 nt, Homo sapiens
aaggaccgacgcccgggggaagggggccagac

SEQ ID NO: 114250 - RNA, 72 nt, Homo sapiens
caccggcagagacgggaaaggcgagacaggacgaaagaaaacaggcagccaggcggacacagagcagaagag

SEQ ID NO: 114251 - RNA, 80 nt, Homo sapiens
ggcccgaggcgcaccaagggcgaaggagccggcccaagcgcagggcccccagacccgcacgggaacagcgaccagaaggc

SEQ ID NO: 114252 - RNA, 69 nt, Homo sapiens
cagggaccccggccaacagcggcggagaaagaccaacgagcagcccagcgaccaaggcagcaccgaaca

SEQ ID NO: 114253 - RNA, 69 nt, Homo sapiens
acgcgaacagagcacggaaaacccagaaggcaccggaagggacgccagaggggaagccgcacgagggag

SEQ ID NO: 114254 - RNA, 60 nt, Homo sapiens
gagaccggggcacggacgcacgccacccgcgaccaggcacccgcgggcaccggaggagcg

SEQ ID NO: 114255 - RNA, 84 nt, Homo sapiens
ccaagagcagaaccagagccacccgggagaggaagagcgaggaggaacgcgcaaggcaaagcaccggacccagagagggaccag

SEQ ID NO: 114256 - RNA, 68 nt, Homo sapiens
aaacccaaaaagagcagagaaaaccagaaaaaggccaagacccaaaagggccaggacaagcacggagc

SEQ ID NO: 114257 - RNA, 83 nt, Homo sapiens
gaaaggccaccaagccacgcacaacccagccaaaccaaacagaagccaaagagaccgagaaggcgaggggacggcggggagcg

SEQ ID NO: 114258 - RNA, 96 nt, Homo sapiens
gggccccgaaaaaagagagggggggaccgaccgcaacagaacggacccgaacggcggccaaagcgccagacaagggccgagccccggagagccccc

SEQ ID NO: 114259 - RNA, 68 nt, Homo sapiens
caaagagcacgcagagagcccggcagacagcaagaaagcaccagccaagcagaagggagccagcggac

SEQ ID NO: 114260 - RNA, 72 nt, Homo sapiens
acccacaggagggccgggaggggaccccgacaccgagagccaagacaggacgagggccggaacacccagaga

SEQ ID NO: 114261 - RNA, 51 nt, Homo sapiens
gccacagggacagaggagcacaggagggagcaggaaaaaggcggagaggaa

SEQ ID NO: 114262 - RNA, 55 nt, Homo sapiens
gaagccccgagcaccccacagaacgggaagaagaagaaggcgaagaagcacaaca

SEQ ID NO: 114263 - RNA, 77 nt, Homo sapiens
gccggccagcgggacaggagggcaggaagagcgcagcggggacaagcccccaaaacacaagaggacggagaagcgac

SEQ ID NO: 114264 - RNA, 72 nt, Homo sapiens
gaaaagagccaacgcagaaaagaagaaaaggacggacagaaaaagcagacagagcaaagacagaagaaaggc

SEQ ID NO: 114265 - RNA, 75 nt, Homo sapiens
gaaagaacaaacaagggaacagcagagcggcgaccaccagaagacaagcaacggaacagaccagaaggagcaagg

SEQ ID NO: 114266 - RNA, 53 nt, Homo sapiens
ggcccaaccgaagaaaacaagcggaacacagacgcgccaggcaggagacccac

SEQ ID NO: 114267 - RNA, 76 nt, Homo sapiens
caggaccaaagcgggccaccccacccggcagaaggaaaacagaagaaccagcgagaagcagacccgaaagcagggc

SEQ ID NO: 114268 - RNA, 51 nt, Homo sapiens
ggacaagcgcgggaacggcgcggaagggggccccccgacggagaaaaagcc

SEQ ID NO: 114269 - RNA, 82 nt, Homo sapiens
gcacacaaaacagggcagccacacccggccccagcacccagcccccacaacacccgccagccgagccgccaccagcagggga

SEQ ID NO: 114270 - RNA, 78 nt, Homo sapiens
aggggagcggaggccaaggggagcccgaagagagacaaccccaggaccccaagagacgagagcccgaccaagcccaaa

SEQ ID NO: 114271 - RNA, 74 nt, Homo sapiens
gaggaggagggaggggaaaaggaggagggagggaggaagaggaggagagaagagaggaagcgagcagcacgggc

SEQ ID NO: 114272 - RNA, 80 nt, Homo sapiens
cccaagaacgggaacaggccaccagaaggggacccgggcgacgaaacgccagcggaagagaaggaaaaacgcggccacag

SEQ ID NO: 114273 - RNA, 76 nt, Homo sapiens
ccggacaaccgccccgagggaagggaggcggcggccccaaaacacgccgaaaggggacgagacaccaaaacgaaga

SEQ ID NO: 114274 - RNA, 80 nt, Homo sapiens
gccacaacccggacgcaccgcggacacgcccgcagcaggggccaaaacggcacgccagacgggggagccaggagagacgg

SEQ ID NO: 114275 - RNA, 61 nt, Homo sapiens
cgggagaacgggcgcgccagagacgcgaccggaaaggagagagagacagaaccacagacaa

SEQ ID NO: 114276 - RNA, 60 nt, Homo sapiens
acccccaacacaccggggccaaggcggaggcaagaaaccagacacaaaaacggggaagca

SEQ ID NO: 114277 - RNA, 79 nt, Homo sapiens
gcgcggccagcagaggaaccacgaccgcgccagggcacccccgagaggacaacaggcacggaaggccccgccaccgggg

SEQ ID NO: 114278 - RNA, 56 nt, Homo sapiens
aggaccaagaaccagacagggaggccgcacagaggaggagcaccaaaccgagggag

SEQ ID NO: 114279 - RNA, 73 nt, Homo sapiens
cacagcacaggcggcccagccggaagaagaacggccacaacagagcagacgagcagaccgaagcgcaggcaaa

SEQ ID NO: 114280 - RNA, 54 nt, Homo sapiens
cgcaaggagagaagcagacccccagcccagggaggagcgcacagcacagccaaa

SEQ ID NO: 114281 - RNA, 93 nt, Homo sapiens
gaagaggcggcggcgccgaagaggcgacgaggccggacggggcggacggcgacgcagcccgcggcagaaggccccccgaaaaagccgaggagg

SEQ ID NO: 114282 - RNA, 59 nt, Homo sapiens
acgcagcaagaagaagaagcagcgccagagaaaaaagccaggaccagaaaaaaagcgcc

SEQ ID NO: 114283 - RNA, 39 nt, Homo sapiens
ccccagcccaagccgcgcccgggggaacggcaggagaac

SEQ ID NO: 114284 - RNA, 67 nt, Homo sapiens
gaagacaccaaaaagcaaacggaccagaccgaccaccaaaacaaggcgccaccggaagaaacgggag

SEQ ID NO: 114285 - RNA, 82 nt, Homo sapiens
gacaggggcgacgccggggcgccggcgaggagaaccagggcacagcgcagcggagcgaggaaagcaggcgggcccagaggcg

SEQ ID NO: 114286 - RNA, 70 nt, Homo sapiens
cgaggcacccgccccgggaaagaaccaaagaggaccccagaaggaggaagaacaggggagaccagccgcc

SEQ ID NO: 114287 - RNA, 80 nt, Homo sapiens
ccaagcaccacccgcacccaccaagcagaggcccaggggcgggaaccgacgaggaccccagagacacgcccagaaccaac

SEQ ID NO: 114288 - RNA, 76 nt, Homo sapiens
ggaggagcagcacacgagaaggagacacgagacaagaaccagagaaacaggcgagcaaggcaaccagcaagaacag

SEQ ID NO: 114289 - RNA, 76 nt, Homo sapiens
cggcaagaggagaaggcgaggccacagaaccagccacagcggggcggagaggcgagcgaagaccaaccgaggacaa

SEQ ID NO: 114290 - RNA, 86 nt, Homo sapiens
agagcgaggcggggccgccggggccgccaggagcccgaccgggagaggacaagaccacgagccaggagcaaagaaggacgcagagc

SEQ ID NO: 114291 - RNA, 60 nt, Homo sapiens
cagacgaccgcgccacccgcaggggccggaaacccacgccccgggaagagcccagcagcc

SEQ ID NO: 114292 - RNA, 85 nt, Homo sapiens
gggccccccgcggccagggccgacccacagagcaccccagccacgcgagccgggcgccaaagccaggagaagccgcccacccgca

SEQ ID NO: 114293 - RNA, 69 nt, Homo sapiens
acgaagaccaggcagcaaggccagcacaagagggacaccccgaagccaggacagcaccgcggaaacaca

SEQ ID NO: 114294 - RNA, 74 nt, Homo sapiens
cacagacccagacaaaaaccacccaaaggcagagaggcgccacaaccaggcaaggagcaagagaggacaaagga

SEQ ID NO: 114295 - RNA, 90 nt, Homo sapiens
acaaggaccagaagaaacgcaccggaaaggccaccagcggcccccaggcacgaagcgaagaagaggagagaagcagcggcgcagacgacg

SEQ ID NO: 114296 - RNA, 72 nt, Homo sapiens
aacacaaaagggcgcaggggacaacagagccgacacagccaagaagcagagcaaaacaggaaaaacagccaa

SEQ ID NO: 114297 - RNA, 66 nt, Homo sapiens
caccccaggagagaagcagaagaggggaggagagagcgaggccacccagaaggccagccccagcgg

SEQ ID NO: 114298 - RNA, 74 nt, Homo sapiens
aagagagaacacagagaacccagaggaaaggacagggacagaaagacggcccggagcaaggagacaacagaaaa

SEQ ID NO: 114299 - RNA, 73 nt, Homo sapiens
agaacgcacaaagccgaggccacacaacgggcacccccgacgccccacccgcccacagccagggagagaagac

SEQ ID NO: 114300 - RNA, 77 nt, Homo sapiens
accagaaaacccagacaccaagcccccggccaggcaaaagaaggaaacggaggagagacggagggagacggcagacg

SEQ ID NO: 114301 - RNA, 81 nt, Homo sapiens
gaaggcggcccgccggcagagcgaggccacccagaggagaaggccaccccgccggaggcacaggccagaggggcccaggag

SEQ ID NO: 114302 - RNA, 70 nt, Homo sapiens
agagaggagcgggaggagcacgcaaacacggacacggagcagagcccccgaaggagaacacacagcagag

SEQ ID NO: 114303 - RNA, 71 nt, Homo sapiens
cgcgccacggaccgcgggacaagaaaacagcgaagagcacaacacagaagaaacggcaagcaaggacgaac

SEQ ID NO: 114304 - RNA, 82 nt, Homo sapiens
agaggggacggcgccgcaggagaagccggaggcaggagagggcgaggagccagacaggcgggaacaaccaggacacgagaaa

SEQ ID NO: 114305 - RNA, 83 nt, Homo sapiens
gacacgaagaggaggaagcccagccccacgacggcaggcgcacggaacagcgaggccagcaggagacggagccacggagcagg

SEQ ID NO: 114306 - RNA, 68 nt, Homo sapiens
aaagggcccaagaaagcccagcaaggaaacaaagggaggcggaaccagaacacaaacggcaacacagc

SEQ ID NO: 114307 - RNA, 77 nt, Homo sapiens
aaaaaaaaccacgaggagggaaggcggagaagcaacaaaaggcaccgggaaaacgcagaggaacgagggggagccac

SEQ ID NO: 114308 - RNA, 48 nt, Homo sapiens
ggagcgcagcgaccacaccgaagacagaaccagacccaccacaccagg

SEQ ID NO: 114309 - RNA, 67 nt, Homo sapiens
ccaaaaacagagggaaggggcagccaccagggaccaaccaccccggacccaccacagagcaaaaaaa

SEQ ID NO: 114310 - RNA, 71 nt, Homo sapiens
gaagcagccaaagcaggggcaacccagaacccccagacgagccagccgccgagggcccgcgaggagcccaa

SEQ ID NO: 114311 - RNA, 65 nt, Homo sapiens
gagcaagaccccaagcagcgagaaagacagcaaagaaaaggagaagaaaggaaaaaaacaacccc

SEQ ID NO: 114312 - RNA, 74 nt, Homo sapiens
cggagcagcggacccaggcaggacaaccacaccgaaggccaccccaagaagaggggacagaaagacagacagaa

SEQ ID NO: 114313 - RNA, 76 nt, Homo sapiens
agcaaccgcacccccggagcaaggcgccaccggaagaaacgggaggggaggagccgggaaagacagcgccaagcca

SEQ ID NO: 114314 - RNA, 77 nt, Homo sapiens
aagaaggaggcaggcacgggagccgaaggccaggaagaagcaaaggaagacagaaaagacgccaccccagcccgaca

SEQ ID NO: 114315 - RNA, 76 nt, Homo sapiens
cgggacggaccgagaccggaccgagagcggaccgagagcgcgaaacgcacgagaaggggagaagcagaccgcacca

SEQ ID NO: 114316 - RNA, 80 nt, Homo sapiens
gcccacagacgcagccacgcggcccagagaaaccaggcggggaacaagccagcagcccaaggagaagccccacagagcaa

SEQ ID NO: 114317 - RNA, 74 nt, Homo sapiens
cacgagcggaagcacaacgggaagaaaggacgaaccaagaaacaaaagggaagaccggaacggagacgcacaac

SEQ ID NO: 114318 - RNA, 82 nt, Homo sapiens
ggccagcagaagaaacacccaaaaccgcccaaacaggaaaggcacaggccaacgcgccacggcagaacgaagaccagcagac

SEQ ID NO: 114319 - RNA, 40 nt, Homo sapiens
gcaacagggccgcacgcaagagagaacaaggccccccaac

SEQ ID NO: 114320 - RNA, 58 nt, Homo sapiens
cccacgacacaaacggaacgccgcgcgaggacgcggggcgcgcccccagcaaggggag

SEQ ID NO: 114321 - RNA, 74 nt, Homo sapiens
ggagagaaagagaaacgcaccaccacccccggagaaaaagaaggaaagacaaaacaggggaggcgggggagcgc

SEQ ID NO: 114322 - RNA, 69 nt, Homo sapiens
gggccccaacaccccggcagggaagcacaaaacgacgggaagccaaaacaaggagagcgaaaggggacc

SEQ ID NO: 114323 - RNA, 77 nt, Homo sapiens
aaaagaaacacacaacaggaagagaaaagaggaagaccaaagggacccaagggagagagggaacggcgaaagggcag

SEQ ID NO: 114324 - RNA, 75 nt, Homo sapiens
ggggacacaggaaaacgcccgccccccccaaggggccaaggaaaggacgcagacccgaaagcaaacggccaccag

SEQ ID NO: 114325 - RNA, 80 nt, Homo sapiens
ggcggagagggccgcagaaaacaggagacaagaccaggacaccgaaaccagaccgccagagcggaacgaccccagagcga

SEQ ID NO: 114326 - RNA, 68 nt, Homo sapiens
gcagggcggcagagggaaccaagaccaggacaaagaagacccggagagacaagccggaggacgcaaac

SEQ ID NO: 114327 - RNA, 55 nt, Homo sapiens
cccaggaaggagccaaagcacaagaagaagacgaggaagaggagaccgacaacga

SEQ ID NO: 114328 - RNA, 79 nt, Homo sapiens
cagaggggaagacacacgaagccggcaggaagaaccagaagaggagagccaaaggaggcacgacagcagaggaagagaa

SEQ ID NO: 114329 - RNA, 52 nt, Homo sapiens
gggggaagaagcgggagaaagcacgccaagggaagagaaaaagacccacggc

SEQ ID NO: 114330 - RNA, 81 nt, Homo sapiens
ccaaacaggacacagccccaggaggcagggacccccagaaggcaccagaaaaaagaaaaggaccaagaggcacggaaaagc

SEQ ID NO: 114331 - RNA, 74 nt, Homo sapiens
ccggacaaccagaggcagccagcagggggagaacaaaaccagccaagcagaggagaaaaagacagcaccccaga

SEQ ID NO: 114332 - RNA, 77 nt, Homo sapiens
cgggcacccaccggcagccaggaaagagccaacaggaccggccccacggaaccgggacaacacgccgcgacccaccc

SEQ ID NO: 114333 - RNA, 71 nt, Homo sapiens
cggaagccacaaagcaaaacggcacgggagagaccgcacagcagacccgggagcggcaccacccgccccac

SEQ ID NO: 114334 - RNA, 73 nt, Homo sapiens
gaggaaaagaagccagaccgagcgcccgagcggcgccgacacgggaagagacgcggcgccggcgacgaggcga

SEQ ID NO: 114335 - RNA, 58 nt, Homo sapiens
cggccaagacaaccagccccagggaggcaccgccccaacccccccccgcccggagaac

SEQ ID NO: 114336 - RNA, 81 nt, Homo sapiens
cgccccccgggacccccccggaccgagccgacgccgcggggcagcgggccggcgccggcgcgaaagagcggcgccaccccg

SEQ ID NO: 114337 - RNA, 85 nt, Homo sapiens
agacacggaccgagccgcgaggacacgggcgcaaccgcagcacacagcgaccgggagaacaagacggggccacccagaggagaga

SEQ ID NO: 114338 - RNA, 77 nt, Homo sapiens
cgcggcgcagccccagcccacaggaaaggcgacagcgagggcaacaccaacagcagaagaggaccagcacaagcaac

SEQ ID NO: 114339 - RNA, 71 nt, Homo sapiens
acacgaccgaagaacaccaaggaggagagacggggcgacggggagaggcaggcgaggggacgaccggcacc

SEQ ID NO: 114340 - RNA, 58 nt, Homo sapiens
gccagaagggggaagcccaagccagacagacacagcacagcagccacgaagagcaaag

SEQ ID NO: 114341 - RNA, 62 nt, Homo sapiens
acaagacggggcgccccacagaggggcgacggagaaagaaggggcaagaggaagaagcagaa

SEQ ID NO: 114342 - RNA, 74 nt, Homo sapiens
ccccccccccccaagaaagccacacacgaggaggggcacggaagcaaaagccacgcccagaacccaggcggaga

SEQ ID NO: 114343 - RNA, 40 nt, Homo sapiens
cccaaggcgccccccggcacggcccaccagcccggccggg

SEQ ID NO: 114344 - RNA, 77 nt, Homo sapiens
ggaaacaggaaccaggcagaaacgaggagaagcaagagcaccccgagggcagcccgcagaccgggacccaggagcca

SEQ ID NO: 114345 - RNA, 74 nt, Homo sapiens
agccccgcgccgccgaccccccggcgccgcgccggcggcgcggcccagcaggagggcggggccgcggcagccac

SEQ ID NO: 114346 - RNA, 64 nt, Homo sapiens
agacggagagcccagagacaccccgagaagggaccgcggaaccccggccggcacaaggaaccag

SEQ ID NO: 114347 - RNA, 84 nt, Homo sapiens
gcggacccggaccggggaccgagacaggggcccggcaccgcgcccgagcccacccacagacagaaggggaggagacgcggccag

SEQ ID NO: 114348 - RNA, 87 nt, Homo sapiens
cacgacgcccaggcgcccgcgaccacccggaggagcccggcagagcgcggcggaggacccacaggagaggcacaggaccagaccaag

SEQ ID NO: 114349 - RNA, 62 nt, Homo sapiens
ccagggacacccaaagcgggccccagaaggaacaccacaaagaaacaagagagcaggcgcag

SEQ ID NO: 114350 - RNA, 74 nt, Homo sapiens
aacaagacgcccaccccacaagggcccggccccaccaaaccgggaccccgcggccccgcccgcgggcgaggaaa

SEQ ID NO: 114351 - RNA, 79 nt, Homo sapiens
gaacgagcggaggccaacaaaccaaccagaagacccagcagaaaaccacccccaggaagagcgcaaaggaaaagaagag

SEQ ID NO: 114352 - RNA, 77 nt, Homo sapiens
caggaagaaaccaacaacccagacagcacacaagcaggaaaaaccagaagagaaaaaacaaaggggagaggcacccc

SEQ ID NO: 114353 - RNA, 60 nt, Homo sapiens
cagaacggagaaaagcacaaggagagggaaaggccaaccggccggaaagcccgacgcgag

SEQ ID NO: 114354 - RNA, 68 nt, Homo sapiens
gccgccccccgccgcccgaaaacccggaggccccgcacagggccgaagcacgaggacaaacgggagga

SEQ ID NO: 114355 - RNA, 78 nt, Homo sapiens
gccgccgcgcacaccggcggcgggacgacgcggacagcgggcggagccgacgagcggcggccaaccaggaaaccgcca

SEQ ID NO: 114356 - RNA, 81 nt, Homo sapiens
ggaaagccaacgcaagcgggcgggggacgaggacgacaccgaccccgccgagcggcggacaccaaaaaggcaaggacagaa

SEQ ID NO: 114357 - RNA, 73 nt, Homo sapiens
gcccaccaggaagagcgaaaaggaccgacacaagaagcagccagaacagacgggaaaagaaacccaccacaaa

SEQ ID NO: 114358 - RNA, 79 nt, Homo sapiens
ggaagcggcagcgaggggccggagagggccggaccgagcggccgggcccgagagagaaagggaaagaaggagcggagca

SEQ ID NO: 114359 - RNA, 84 nt, Homo sapiens
cagacgaaggcagcaaagccggcccggggacgccgacggcgacggcaccgggagaaaggcgggcacgaaaggaaagccgagaag

SEQ ID NO: 114360 - RNA, 34 nt, Homo sapiens
ccaaaggcagcggaggaagccgccacagcacaaa

SEQ ID NO: 114361 - RNA, 65 nt, Homo sapiens
ccacacaaggacggccccccagcgagaagcggagaagccgagagaaggagcgaagaaggaagcca

SEQ ID NO: 114362 - RNA, 65 nt, Homo sapiens
ggacggacaaggcaacacccgaagaaacaagcacagggaggagagcaccaagaagcgccagggcg

SEQ ID NO: 114363 - RNA, 67 nt, Homo sapiens
caagccggccaaacaacaagcagaacgcggcagaacggaggcaggcagcacgagacacaccacaaga

SEQ ID NO: 114364 - RNA, 72 nt, Homo sapiens
agcagccagaccaagaacaaccgcggacacggagaggaagggccaaccgaaagaaaccaaaaaacagaagaa

SEQ ID NO: 114365 - RNA, 76 nt, Homo sapiens
agccaggagagcaagcaaaaggcaaagccgcagcgcaaaaccagcacagcacacaaggcggaccccaaacaacggc

SEQ ID NO: 114366 - RNA, 68 nt, Homo sapiens
cggccgagacggcggcagcagcggcacagggggcgggcgcaccgcggcaggcaggacagggacagccg

SEQ ID NO: 114367 - RNA, 78 nt, Homo sapiens
ccacccagcaggggggcacgccccacaacaagccaaaccagccaagagccaccggaacaagggccagcagaacgaagg

SEQ ID NO: 114368 - RNA, 83 nt, Homo sapiens
gagccagcaccaaggggccaccagacacgaggccaccaacaccggaaagggccaggaaagcggcccacaaaacagcaccaagg

SEQ ID NO: 114369 - RNA, 111 nt, Homo sapiens
gccccaccgaaaaccaaaaagaagggagaaaaaaggaccagagccagacacgaagcaacccccgggcacaacccaaaggaaagaaacaccacgaaagaacgcaccccagca

SEQ ID NO: 114370 - RNA, 74 nt, Homo sapiens
gcacccccgccgagccggggagcgccggccacaggcacacggcgaacgacggggaccaccagcggcaaagaaga

SEQ ID NO: 114371 - RNA, 78 nt, Homo sapiens
cgccgcgcagcccgcgagcacaggagcgagagaggaccccggacacgaaagccgggaaagggccgaacaaacgcaaga

SEQ ID NO: 114372 - RNA, 78 nt, Homo sapiens
ccgaaacccccggcggcgccggggcccgccgcagcaccagaaagaaagcacacccgccaaggccccgggacaggcaag

SEQ ID NO: 114373 - RNA, 36 nt, Homo sapiens
aacgaggccgcgaaaggaaagcgccgagaggaggac

SEQ ID NO: 114374 - RNA, 80 nt, Homo sapiens
gaggacgacagagaagggcaagacccaggaggacccgaccaacaaggaccagaaaggaggggaccagagacacaaccgaa

SEQ ID NO: 114375 - RNA, 89 nt, Homo sapiens
gccggcaggggggagacgggccggaacacccggcgaaccagaggagaaagagcggagccaccggaagagaaggcacgggggcgggaagg

SEQ ID NO: 114376 - RNA, 44 nt, Homo sapiens
ggcagaaacggaccgagaaagaagccggaagacgggaaaggaaa

SEQ ID NO: 114377 - RNA, 79 nt, Homo sapiens
aaaagacagcccgcagcacgaccagcaggaacgaaacgccggaccgaacacgcccccgacgaccagagagacccggccc

SEQ ID NO: 114378 - RNA, 85 nt, Homo sapiens
gcgcaccggcccccagcggcagccgagcccgcccgcgcgccggccagcgcgggccgccagcggcggccaccacagcgccgcagcc

SEQ ID NO: 114379 - RNA, 73 nt, Homo sapiens
gaggggaccggagccgccagcgcggccagcacggaccagaaggacacaccggacgggggcggggaggaagggg

SEQ ID NO: 114380 - RNA, 77 nt, Homo sapiens
caggccgacaaaggaagcaaggagggaagggaagaaagacccgcgacggggcagggcacagcagccgggaagaagca

SEQ ID NO: 114381 - RNA, 73 nt, Homo sapiens
aaagacaccggcagagaaccaaagacacggcaaaagcggcagaaaacgaaagacgggagaagaccgagagaac

SEQ ID NO: 114382 - RNA, 74 nt, Homo sapiens
aagcgacggcgccaccacagaagcccccaacagccaaacaccagcaggaaaaaagagcggcagaaggccaaacg

SEQ ID NO: 114383 - RNA, 89 nt, Homo sapiens
agacgggggagaccaagaccggccggagaccaagcaagccaggggaagaagagcccgaagaagaaccgaagagacagcagaagacacaa

SEQ ID NO: 114384 - RNA, 87 nt, Homo sapiens
ccggaacgcaggcgaggcggagcgcgcgggcggggcgggagcggcgcgcagccgggccaggggcgccccaggaacagacagcgacga

SEQ ID NO: 114385 - RNA, 71 nt, Homo sapiens
gaggaagcaaagccaaggcacgcagaagccagcggacgcccgcaacggggaccggccagagaccgccggcg

SEQ ID NO: 114386 - RNA, 73 nt, Homo sapiens
gccggagcgcaccaccgagacaagcaggagaaaagaaagccagaaggaaggaagcaacgaaccaagaaaaaac

SEQ ID NO: 114387 - RNA, 43 nt, Homo sapiens
gggcaaggcaacgaagagaggaaagaccacagcaagaccacgc

SEQ ID NO: 114388 - RNA, 74 nt, Homo sapiens
aggacgcacagaaagaccgccgcaggcccaaagcccgaaaaagaaaagaaggaaaacgacccaagggaaacgca

SEQ ID NO: 114389 - RNA, 75 nt, Homo sapiens
gcaccggcccaagaaacagagcaaaacccagaagcccggcaaaccagccccaagccacagaagccaccgggaccc

SEQ ID NO: 114390 - RNA, 70 nt, Homo sapiens
ccacccggcccccggcaccaggccgaaaacgaagcagaggaacaacaagcaacgcacccgcccccaaaga

SEQ ID NO: 114391 - RNA, 78 nt, Homo sapiens
ggaagcggaacagccagaaggacccgaaaccagcccacgccaggcaaggcaacgcggaaaaaagccggggggacgcgg

SEQ ID NO: 114392 - RNA, 69 nt, Homo sapiens
ggccgagcaggaggcgccacagcagggaggcccccaggggagacgcgcccaaagcagcgccacagacca

SEQ ID NO: 114393 - RNA, 64 nt, Homo sapiens
caacggaaacgaagaaggcccagcccaccagggcccgacccgaaaagcgcagccaaccagacgc

SEQ ID NO: 114394 - RNA, 81 nt, Homo sapiens
aggccaacaacccaagggagcgcacgacccacgcggaacggcgcaaggaagaaccaacaccaaagaaacagcccgcacagg

SEQ ID NO: 114395 - RNA, 75 nt, Homo sapiens
ccgggagagaccggcggacagccacggcgaaccccagcaggcaccaggaagcagaaaagaagaaagaaagcagcc

SEQ ID NO: 114396 - RNA, 63 nt, Homo sapiens
cggacgcggcgcgcgaccgacacgaagaccccgccccccgaggcgcagcccgaacccagcagc

SEQ ID NO: 114397 - RNA, 72 nt, Homo sapiens
ccccgacccacgcccggccccgacacgggaagagacaaaggggaaagacggccagcagaaagcagccagagc

SEQ ID NO: 114398 - RNA, 52 nt, Homo sapiens
cgcagggcgcccccgacccccggcggcccaaggcgccacccgggcaacaccg

SEQ ID NO: 114399 - RNA, 81 nt, Homo sapiens
cgcggaacacagaccccgcgcagggacagccacccagcaacaacaagggaccccggaacagaccgcaccgacgaaccaaca

SEQ ID NO: 114400 - RNA, 121 nt, Homo sapiens
ccagcccgccacggagccagcacaccccaggggcgcgacgcgcggggccaagaccaaggcccccaggggacaagaaaaccagaaacgggggcccgacaagacacaaaaagggaacggacgg

SEQ ID NO: 114401 - RNA, 72 nt, Homo sapiens
aggacaagaagagaagcaggagccgcccaccagaagaagaagcgccagcaacgagggggcaggacaggcgga

SEQ ID NO: 114402 - RNA, 66 nt, Homo sapiens
agacgcagggcgcccccggggccgcagaagcgagacaaacagcggggcacgcgaggaagccccaga

SEQ ID NO: 114403 - RNA, 65 nt, Homo sapiens
gcaccgcaggcagacaaaagggccaaagaagggagagagacgaagaggccaaagggaccgaacag

SEQ ID NO: 114404 - RNA, 75 nt, Homo sapiens
gcggcggaaaaccccaaaaggacaaaggccagacgagagaagggagaagacaaccgaaaggagcaagccgcagcg

SEQ ID NO: 114405 - RNA, 40 nt, Homo sapiens
ggggagcgggagcgcggaaagggggaaacacaaagggcca

SEQ ID NO: 114406 - RNA, 76 nt, Homo sapiens
gcgcgggcccggggacacgcgcgggcgggagcggcccacgacgggacacgccccggaggagggcggagaaggaaca

SEQ ID NO: 114407 - RNA, 72 nt, Homo sapiens
gcaagaggaggagacgcgcgagagccgggaggacgaggcgaaacccccggcggcccccgacccccgaccccc

SEQ ID NO: 114408 - RNA, 60 nt, Homo sapiens
agacgcgcggaggggaaggaacggggaccaaaagaacccagccaacccgcagagggaggg

SEQ ID NO: 114409 - RNA, 80 nt, Homo sapiens
acaagagaggagacccaacagacgggacacccggacgcaggcccggccaggagagcgcgcacgaggcggaaagagcccac

SEQ ID NO: 114410 - RNA, 59 nt, Homo sapiens
accgaggcaagacgagagcagcacaaagcaagagcgccggcagcagaacaagccacgga

SEQ ID NO: 114411 - RNA, 85 nt, Homo sapiens
ccaggccaaagaaagagaagaaagccaggccagaagaaggaaggccggggaggggacaggaaagacacaccaccccaccgaacaa

SEQ ID NO: 114412 - RNA, 72 nt, Homo sapiens
accgcagcccaggagggaacgaacacaaaccccaggccccaggacacaggaagccagaaaagaaacgaccgg

SEQ ID NO: 114413 - RNA, 77 nt, Homo sapiens
gagacaccaaaggaaaagacaacacaccaagaaaccaaagaacaacgcaaagacagccagggaaaacaagacaaagc

SEQ ID NO: 114414 - RNA, 74 nt, Homo sapiens
caggcagaaggggggccacccccgggcgccaggggggacacaaccgagggagcacacagcgaaaaaaggcaaac

SEQ ID NO: 114415 - RNA, 63 nt, Homo sapiens
gccaacaaccccacaacaaaaggccacccaggagaagccaggcagggaggggaaccaggggcc

SEQ ID NO: 114416 - RNA, 76 nt, Homo sapiens
aaggaaaaacgggagggaggaccggccagcccccccaaaaaggaaagacaccggcggaagggacaaggagaacagc

SEQ ID NO: 114417 - RNA, 53 nt, Homo sapiens
aacgccccccgggcggcggggagggaggccagaggcacggacgaccccggaga

SEQ ID NO: 114418 - RNA, 75 nt, Homo sapiens
ggaaaaggcaaccaaagaccaagagaggagccaggagcggcagcccacaagcaggaagaccagccccaggaggga

SEQ ID NO: 114419 - RNA, 110 nt, Homo sapiens
gcgccaccaccacgccagccgcaccagccgcccaagccgcacagccgcggcggcagcagcaggagaggaacaagcagaaagcacgaacaacgagaacaagacacgagcaa

SEQ ID NO: 114420 - RNA, 85 nt, Homo sapiens
aacagcgagcggagccggcaggaaggggaccgggcggcggagcggcggaagaaggggagccgccaccaaaagcagacggaaaacc

SEQ ID NO: 114421 - RNA, 42 nt, Homo sapiens
gcgcggccaccccccggaagggagccaggaccccagcgagga

SEQ ID NO: 114422 - RNA, 56 nt, Homo sapiens
agagcagccccagcgcccacaccgccagccacacaaaggaagcagagcagaggaag

SEQ ID NO: 114423 - RNA, 90 nt, Homo sapiens
aagaaggcacgaaaaccgggccagaaggagaggagaagaggaacgcaggagagcagcgaaggaggcagagaaggacaagaccgaagcgag

SEQ ID NO: 114424 - RNA, 74 nt, Homo sapiens
accccaacacagagccaagcgccaaggaaaaggggaccgggaaacaaccagaaaccaacaaaagaggcccacag

SEQ ID NO: 114425 - RNA, 78 nt, Homo sapiens
acaaggcaccaagacgcaggggggaaccacagcgacaagagggcaaggaagcagcggagaagcgaaggaacggaacga

SEQ ID NO: 114426 - RNA, 58 nt, Homo sapiens
ccccagcacacagaggagagcgacgagaaggaaacaaagagccccgggaaaagaaaaa

SEQ ID NO: 114427 - RNA, 78 nt, Homo sapiens
cggagacggagaccaaagaaaggaggaaacagccggcagccagacagcaagggccggggaaacagaagccccaaacgc

SEQ ID NO: 114428 - RNA, 70 nt, Homo sapiens
agaggacgccagcggcgcgcaggacagaaagaccaccgaagagcagagaagggaagaaaagcaggcaagg

SEQ ID NO: 114429 - RNA, 79 nt, Homo sapiens
caaacagagaagccaagccaacggaaagagggagccccagaaaggcacccaggaagacaaacccacgaggcacaaagaa

SEQ ID NO: 114430 - RNA, 69 nt, Homo sapiens
ggaaaaagggaggggcgacagaccacagcccgagcaagcagagccgaacaaagaacgaaggcgaagaac

SEQ ID NO: 114431 - RNA, 86 nt, Homo sapiens
cgaagaggcaccaaaaagaaccgcagacaggcagaagcaggagcgcagaaccgcgcgagagacaaacagcggggagggagaccgcc

SEQ ID NO: 114432 - RNA, 80 nt, Homo sapiens
gaccagagaaggaggagggaccacgcgcgaggcagacgcagccgccggagggcgcggagcggggaccgcacaccgcccga

SEQ ID NO: 114433 - RNA, 70 nt, Homo sapiens
cgcgggagagaggacccccccccccccccaagcggacaggcaagacaggccaccacgggcacgcggaagc

SEQ ID NO: 114434 - RNA, 78 nt, Homo sapiens
gcgaggcgaggggcccgacgcaagagggagccagggacgagcgggggacagcaagcaggagacaggccgcgggcagaa

SEQ ID NO: 114435 - RNA, 76 nt, Homo sapiens
cggcgggcacccaccccgagaacgggacccaacaggcggagaacagagcgacagagaagacgaaccgcgaaagcca

SEQ ID NO: 114436 - RNA, 75 nt, Homo sapiens
aaagagagcgccagggcagcagccagcacagggggcggggccggccccaacccgggagggcgaaccgcagagaac

SEQ ID NO: 114437 - RNA, 82 nt, Homo sapiens
ggacgagcaacaagggcaagcgaggagcagaggcagggagagagaggggaacacgccagaccgagcacggcgggagagacgg

SEQ ID NO: 114438 - RNA, 79 nt, Homo sapiens
gaggcccgccagaccagcaagaggaggggcccggagagggggaagggcccaaagccagaaggagcaagcagagccgaac

SEQ ID NO: 114439 - RNA, 72 nt, Homo sapiens
accacacaggccaaacgcagaggagccaaacagagaagagagcaaacagaggagccaagagaaaaagaaacg

SEQ ID NO: 114440 - RNA, 67 nt, Homo sapiens
acagagcacccaccacaggaggccccgcgaccagccgagccaccgccaccacgccagaaacacagag

SEQ ID NO: 114441 - RNA, 84 nt, Homo sapiens
aagaacggccagcaaccggcccggcacgccacaaaccaagccaggaccaggaccgggaacgcacaccagcaccagcccaccaaa

SEQ ID NO: 114442 - RNA, 92 nt, Homo sapiens
cggaaagcagcgcaggagccaagaccacagcagcacccaggggacgacccaccggagcccggacgcgaacaagagaggcagccccgggccac

SEQ ID NO: 114443 - RNA, 81 nt, Homo sapiens
cggacgccagcgccggccccccggcggagaagaagcgcggccgcaccggccaagcggaggagcggacaacccagagagaaa

SEQ ID NO: 114444 - RNA, 83 nt, Homo sapiens
acaccaaaacaacgcccagaaaaaaggccacagcagcgaagaaaaccgcagacccaagcagagaccaaccccccccccagcaa

SEQ ID NO: 114445 - RNA, 53 nt, Homo sapiens
gcagccggcccgaacacaacagaccacgggacagagagccgaaagccgggcaa

SEQ ID NO: 114446 - RNA, 56 nt, Homo sapiens
gagcaaggaacaggcccaagggagcgaccaggagagacgaagaagacggcacggga

SEQ ID NO: 114447 - RNA, 53 nt, Homo sapiens
ccggcgacggccggacgcaacgcggcgggcgagacgccaggccaggcgcgggc

SEQ ID NO: 114448 - RNA, 79 nt, Homo sapiens
ggagacaaagcagcgcccgcgccgggcccggaaagcgccgcccagcagccgcagccggagcgggcagggcacacaaccg

SEQ ID NO: 114449 - RNA, 56 nt, Homo sapiens
ccgcacgcagggaccagccggcacagccacaccgagaagaccggcccaagaacccc

SEQ ID NO: 114450 - RNA, 51 nt, Homo sapiens
cccgggacccagagcgggcagcaggcaggagcgcggagacaaagaacagga

SEQ ID NO: 114451 - RNA, 81 nt, Homo sapiens
agacgacacaacccgggcgcggaagggaaaaggccgaggcacagcgggaagaccgcaaagacgacccgagacagggaacag

SEQ ID NO: 114452 - RNA, 75 nt, Homo sapiens
ggggcccccaccgacggcaggcagccggcaaaagagaccaccacaggaagcagaaccaggcggacgaaagacccc

SEQ ID NO: 114453 - RNA, 85 nt, Homo sapiens
caccgacagcgccgccaccgagccgggcccaccccccaccaaggaagggagccgcccgcggagagcacagcccccccagccgccc

SEQ ID NO: 114454 - RNA, 54 nt, Homo sapiens
gaaccggaaacaggacaccaggggagaacaaaacgcggagccgagggcagacca

SEQ ID NO: 114455 - RNA, 68 nt, Homo sapiens
ccggcagagacacaaccaccagccaaacaagacaacaaccgacagcccccccacaaaggcaagacaga

SEQ ID NO: 114456 - RNA, 78 nt, Homo sapiens
ggaagggggaaaggcaccaggacaagcaaagaagcccaccagaggcgaggggaggaggaagcgagcgaaaagaggcgg

SEQ ID NO: 114457 - RNA, 56 nt, Homo sapiens
gccacaagaaggcagcaaaccaagcaaccaggaaacaacagacgggaagagagggg

SEQ ID NO: 114458 - RNA, 77 nt, Homo sapiens
ccagcaaaagcgccacagacgccgcggcccgacaggagccagacggagaaaagaaaggaaagaaaggaagaaggaac

SEQ ID NO: 114459 - RNA, 50 nt, Homo sapiens
cccagcccgagagagcgacgggaggaggggcagccccaggggcaggacag

SEQ ID NO: 114460 - RNA, 80 nt, Homo sapiens
ggacgaaagaagcgcagcggaggaaggcgagcaaacaacacccaacagcccaaagcaaaggagcaacagcccaggagaaa

SEQ ID NO: 114461 - RNA, 50 nt, Homo sapiens
gaaggaccaagaaccagagaggcaagcaaccccggggaagaggccaggca

SEQ ID NO: 114462 - RNA, 47 nt, Homo sapiens
cgacagagagaggcagcgaaccagacccagggggcagaaggcaggca

SEQ ID NO: 114463 - RNA, 73 nt, Homo sapiens
aaaaagacggacagcccacgggaacaagaggggacagaaagaggcggagaagaacccaaccaaaaccaggcgg

SEQ ID NO: 114464 - RNA, 75 nt, Homo sapiens
aggagggcggcgcgccgagcgaaaccccaccacgcggcaggggccgccgaggaaaaagcaacaagaagaaaacca

SEQ ID NO: 114465 - RNA, 83 nt, Homo sapiens
acacacggagccagggaggcagcagggcagccacgaggggaccaaaccccacacccaggggcagagacgcgcaaagcggggag

SEQ ID NO: 114466 - RNA, 54 nt, Homo sapiens
ccaacccaacggacacggaacaccaggaaacagaacgggaagggaagaagaccg

SEQ ID NO: 114467 - RNA, 86 nt, Homo sapiens
ccggcgccagccacggacgccacagagggaagaccccaaggaaggcacggcgcaaacggcgccgggccaggaggaggaggaagccc

SEQ ID NO: 114468 - RNA, 66 nt, Homo sapiens
agaagagacaacaagacaggaggagcacggcgaaccgcaaacagaagagggagccagaagaacaag

SEQ ID NO: 114469 - RNA, 74 nt, Homo sapiens
cccggccagccccagccgcccacccagcgacccggccgcgcccgagcccgagcccacccacagcgcaaccgaac

SEQ ID NO: 114470 - RNA, 82 nt, Homo sapiens
gaagagaccgacacaaggaaagcgaagcggaaagacacagccagggggcaggcagagacgcagcacgggagaggaggacacg

SEQ ID NO: 114471 - RNA, 74 nt, Homo sapiens
ggacgcagaaaacaaccacccccaggaccaaccgggcaaggagaggggcaaaggaaagcccgccccacaagaga

SEQ ID NO: 114472 - RNA, 89 nt, Homo sapiens
gaaaaagaagaaggcgaaaggagacagaggagcggaggaggagaagcaggccgcagaaggagagcgagcgcagaaggagaaggagaagc

SEQ ID NO: 114473 - RNA, 68 nt, Homo sapiens
acccaaaaagacggacagcccacgggaacaagaggggacagaaagggcagaacccgacaacgacaacc

SEQ ID NO: 114474 - RNA, 75 nt, Homo sapiens
ggaccagccaaggcaaagggggaacaggcacacggaacagggcagaagcaacagggaaaaccaagggcgaggcaa

SEQ ID NO: 114475 - RNA, 62 nt, Homo sapiens
cgcgcccggccgcccgcgggagagaggccaagagaaggacggagccacaacgcgacggccca

SEQ ID NO: 114476 - RNA, 82 nt, Homo sapiens
gaacgcagccccaacacccggcccacgccgcagcgcacgagcccacaggcaacagggaagaagcgggcagagcacgggagac

SEQ ID NO: 114477 - RNA, 80 nt, Homo sapiens
cagaaaagaccaggcagcaacaggcaagacgggggggccaaacacgggacagaagagcccggaacgccagagcggaaagg

SEQ ID NO: 114478 - RNA, 104 nt, Homo sapiens
cggcagcggcggcgagcgccgcgagcggcgcgggacgcgaggccgggggcccaccacagccacccacggccgaggccgcaccaggcccggcgcggcccccggca

SEQ ID NO: 114479 - RNA, 42 nt, Homo sapiens
gaccagacacgcgggcaccacggcaacacccccagacaaaag

SEQ ID NO: 114480 - RNA, 59 nt, Homo sapiens
gcccaagcaccgggcgccccaacgggcgcagggccccgaagacaccggccgaaaggaca

SEQ ID NO: 114481 - RNA, 85 nt, Homo sapiens
gcgcaccagacgaaggcagcaaagccggcccggggacgccgacggcgacggcaccgggagaaaggacgggcaccaggcacggcca

SEQ ID NO: 114482 - RNA, 85 nt, Homo sapiens
cagcccccgagggcgggacacagagacaccaaggaacccagcaggaggagacgggagacagaacgccgccccagcgcagacccag

SEQ ID NO: 114483 - RNA, 79 nt, Homo sapiens
ggcgcgcggaggggcccgccaccagagcacacaggagcagcgaacgcccggcgccaccccacgcgccggcggcgccagc

SEQ ID NO: 114484 - RNA, 84 nt, Homo sapiens
aaccccgaaggaggcaccccgaccagcgagccggggaaaaccccagggcaaaacgccagaaaggaccgcacgaagcacagacga

SEQ ID NO: 114485 - RNA, 73 nt, Homo sapiens
agagaaacagagaggcgcagaggaccacgcagcaaggcgcacacacgggccaaaagcagagaaccaaagaaca

SEQ ID NO: 114486 - RNA, 80 nt, Homo sapiens
ccgccgcgcccagcccgccccgccgcccgcaccgccgcccgcgccccaccagccaaacggaggaaaaggacgccgaaaag

SEQ ID NO: 114487 - RNA, 80 nt, Homo sapiens
ccaaacgaagcgacgcacaacaacacaagacccgaaaggaggcaacccccaagggaaaaacggcagacccaccgaccaac

SEQ ID NO: 114488 - RNA, 64 nt, Homo sapiens
gagccaaccgaaacgaccagaccacaccagaaagaggaacaaaccaagagagggaaaaggaaga

SEQ ID NO: 114489 - RNA, 47 nt, Homo sapiens
gaggacaccgcaggggcgagcgccgcagggaccaggaggagaagcaa

SEQ ID NO: 114490 - RNA, 61 nt, Homo sapiens
ggagcacaacgagaacggcagcagaggggagcaggcaggagaagggcaccggggaggaccg

SEQ ID NO: 114491 - RNA, 52 nt, Homo sapiens
gggcgagcagaggacgacaggccgggagggccaaacgaccaggagcaaaggg

SEQ ID NO: 114492 - RNA, 86 nt, Homo sapiens
ggcggccgggacggaggacgcgcagaaaggagacacggcgcgccgcagcagggggaagaagagaaaacgaggacccaagaagcaga

SEQ ID NO: 114493 - RNA, 72 nt, Homo sapiens
aaggcagacagcagccagaaacgaccgagaaggacacaaacggcagaacgaagcccccggcaccaagaggaa

SEQ ID NO: 114494 - RNA, 86 nt, Homo sapiens
cgagcccggagcccggagcccgggcaagagcgggccccgagccccggccccaaagacccaaaacagagacaccccccagcccccgc

SEQ ID NO: 114495 - RNA, 64 nt, Homo sapiens
ggagacaccccgcagcacagccgcgaccaagacaaagccacagacccaagcagcggaacaggag

SEQ ID NO: 114496 - RNA, 74 nt, Homo sapiens
gcaacacaggaaaacagagaaagaaggaaggagggccgagacccacaggaccgcgaacaaggaggccacaaaac

SEQ ID NO: 114497 - RNA, 75 nt, Homo sapiens
ccaaacacaacgcccgggaaggagaacagacacaagggcagaaggaaggcagcgcagagaaagcggacaaacagc

SEQ ID NO: 114498 - RNA, 39 nt, Homo sapiens
cgcccacgccggaccgggcagggcacgcgagccagccag

SEQ ID NO: 114499 - RNA, 72 nt, Homo sapiens
gagccggaccggaaccagaggcggacaacacgaaaacagaggacagcagcagacccccaggagcaggacccg

SEQ ID NO: 114500 - RNA, 72 nt, Homo sapiens
cggagcccaggcggcagcgccaggaagcgaggaggaaagagagcccaccaaggcaccagaagccgagaagag

SEQ ID NO: 114501 - RNA, 56 nt, Homo sapiens
agaggccaaacacaccagcacaagaagaccggagagaaggcagaaacaaaaaaggg

SEQ ID NO: 114502 - RNA, 59 nt, Homo sapiens
ggacaagagcgcaaggagaacaaaacagccccacagccaagcccaggaggaaaaggcca

SEQ ID NO: 114503 - RNA, 79 nt, Homo sapiens
gagcaacgccagagcccagggcccagaggaccccagccgcgcccgggagagcaagaaagacgagaaccaggacgaacga

SEQ ID NO: 114504 - RNA, 90 nt, Homo sapiens
cgccgccgccgcagcaacaccaggagaggccgggggcagccgccacggcagcgccagagccgcggcccgcggcccaccggacaaaccccc

SEQ ID NO: 114505 - RNA, 83 nt, Homo sapiens
gcccagccaggagcacgagagcaccgcgggcgagcaaggaaagacccagccaggggaaccgcaggcgggacaagaaaagaaaa

SEQ ID NO: 114506 - RNA, 75 nt, Homo sapiens
gggggggaccagccagccccccaggaccacagccccgaccgagagaaccagcgccagcgcaaccgaacgcacacg

SEQ ID NO: 114507 - RNA, 82 nt, Homo sapiens
gcaggcaggcgcgagaaggacgcgcagccaccccagcaaaagaggcggcaaggcagcccaggcaaagaagaaaggcgagggc

SEQ ID NO: 114508 - RNA, 63 nt, Homo sapiens
gcgcgcaaaggaccgacggcggggggggccccagcccggccgaacgggcgcacgacacaaaca

SEQ ID NO: 114509 - RNA, 72 nt, Homo sapiens
aggacccaacccaagaaaccagcaggcggggcagggggccgggaggaccaccccacagaagggagacacaca

SEQ ID NO: 114510 - RNA, 68 nt, Homo sapiens
cgccgacgaaaagccacagcagaagaggcggccacccacgagccgacggcaaacgccagggagccacc

SEQ ID NO: 114511 - RNA, 82 nt, Homo sapiens
gcgacgggcggacggaggagggcgaaccgaccaagaacaacacccagagggccaggagaaggcgaagagagcagcgaccaac

SEQ ID NO: 114512 - RNA, 62 nt, Homo sapiens
ggaccggcggcgcggaggagcgaggcagcgacaggacgggaacggagcccaaaaggcagagc

SEQ ID NO: 114513 - RNA, 82 nt, Homo sapiens
gggcggccgggacggaggacgcgcagagcgagaagaggcgacaccagggcccaaagaacaaccgaaaggaagaaggaaacac

SEQ ID NO: 114514 - RNA, 77 nt, Homo sapiens
gagaacccagcccccgcggacccagagacccgagcggggaccgagaaagacccccgaggaaccacgcagaggacaga

SEQ ID NO: 114515 - RNA, 80 nt, Homo sapiens
ggaggaccaccggagcgaggaaccggaccccggcagcaagccgggcggaagcccacgcacaggcgccggggcggcagaac

SEQ ID NO: 114516 - RNA, 77 nt, Homo sapiens
cgagagcgccagagagagaagacggggggcgaaaccaccaccaccgcccgcccacaacaagggagggcacagccaag

SEQ ID NO: 114517 - RNA, 78 nt, Homo sapiens
acagggaaaggacgaacgagaaaggaaggacccgggggaccaggcccgaggccccaggaggaggagccaccaacgcgg

SEQ ID NO: 114518 - RNA, 58 nt, Homo sapiens
gaggaaagaaacaacagcggacagcagcagcacagcaaagaacccaggcccaaagaaa

SEQ ID NO: 114519 - RNA, 61 nt, Homo sapiens
gcccgcagaccgcagaaggccggagacaccagcagaaagcaccgggaggaaagagagccac

SEQ ID NO: 114520 - RNA, 85 nt, Homo sapiens
cggcggaaggacagcacgagcaccccccagagccgaggccggcacggacccagcccgaccccagcaacacaggaccgggagcgag

SEQ ID NO: 114521 - RNA, 83 nt, Homo sapiens
gggccgcgggagcggagcccccgggaccaggaaaaagagcaccgagcaccaagacacgccaaagagagcggaaagcacaagcc

SEQ ID NO: 114522 - RNA, 77 nt, Homo sapiens
agacggccaagccacgggccggcaaccgcggcggagaacagcggcagcgaaacagaacagaaggcccagcagcagac

SEQ ID NO: 114523 - RNA, 69 nt, Homo sapiens
cggacacgaggagaaacagcagaaacgcaccaggccaaagaaagagaagcagcgaaaccaccccagagc

SEQ ID NO: 114524 - RNA, 85 nt, Homo sapiens
aggagaagagaagaggaagaaaggcggaagcaggaagaagacgcaaacagacacagacgcggccaaccacccaaagaggagcaac

SEQ ID NO: 114525 - RNA, 74 nt, Homo sapiens
aaacacaaggagccacaaggacgggaagcaccaaagcgcgccaagagaggaccgggggaaagcaaaaaaaccac

SEQ ID NO: 114526 - RNA, 49 nt, Homo sapiens
agaagccgaaggaagccaagggcacgcgaaaaaagcccaggacccaccc

SEQ ID NO: 114527 - RNA, 84 nt, Homo sapiens
ggcgcgacccacacagacaacagccggggcagcgaggccaacacggcccagccagccaagccgcgaggagccaaacgagcgcca

SEQ ID NO: 114528 - RNA, 70 nt, Homo sapiens
cccagcacaggacaccagcagcaaaaccgggccagagacggagcaaacgggccaacacacagaagacccc

SEQ ID NO: 114529 - RNA, 74 nt, Homo sapiens
aggaagaacaagacacaaagaaccgaggacaaaaaggcgccccaagacgggaggaggagccccccaccgccccc

SEQ ID NO: 114530 - RNA, 54 nt, Homo sapiens
caacagcgaggacgcagcagcacccgccacggaagcaagaggcggggcaccagg

SEQ ID NO: 114531 - RNA, 70 nt, Homo sapiens
gggaggacacacagccacaggaacccaaacccagaagagccaggcccggcggaccccccgcgcgggccca

SEQ ID NO: 114532 - RNA, 77 nt, Homo sapiens
gcggacggcgggaccacaagacaacgcggagcggcgaagagcaaccaggaagagaagcccagacacgaagaagagag

SEQ ID NO: 114533 - RNA, 60 nt, Homo sapiens
cggacggaggagcaggcgagaagagaagggcggaccagggacgagcgcccccggagaggg

SEQ ID NO: 114534 - RNA, 75 nt, Homo sapiens
ccaccaaacagccgcacgcagcgacggcgcagccacccacgacgcggccacgccgcacagagccgacgcaggaga

SEQ ID NO: 114535 - RNA, 79 nt, Homo sapiens
gggggccccgagcaaaccagggaacgcaccgcccagcagacggcccccgcccgccgccaccccagacccccaggccccg

SEQ ID NO: 114536 - RNA, 83 nt, Homo sapiens
aagcacacccaaggacagcagcccaccaagcacagacaagcagaccaccagggccaggggccggaggcagcggcaggcacggc

SEQ ID NO: 114537 - RNA, 70 nt, Homo sapiens
aagaggaagcaggaaaaacaaagaagacccaggccaaagagaagaggaagcccggaggaggagagagaga

SEQ ID NO: 114538 - RNA, 75 nt, Homo sapiens
ccgggcaaccagcaagcccagagaacccacagaaaccaagcaccacacccccaaggcaagggcgcaaagccaaca

SEQ ID NO: 114539 - RNA, 69 nt, Homo sapiens
ccgaggagccccggccgcagccgggcccgagagggacccaaaaaccgaagcccgcaaccacaacgcacc

SEQ ID NO: 114540 - RNA, 86 nt, Homo sapiens
ccggcggcgcggccggcagccggcagcgcagcgggagccgcccggcaaagcgaaagcgcaggaccgaggagaaggagccgccggag

SEQ ID NO: 114541 - RNA, 73 nt, Homo sapiens
caggaaacaccaagaaaaagccaaagcaagagcaggcgacacgcaggagaacccaggacgagaaaaaacagag

SEQ ID NO: 114542 - RNA, 64 nt, Homo sapiens
cggcggccaagcccccgaccggggcgcagcgcagaaagaagaagaaggcagaaggaacccaggc

SEQ ID NO: 114543 - RNA, 55 nt, Homo sapiens
aacaccgcacaggccagccggcaaaaacaacaggggcaaccgcgcaacggcgccg

SEQ ID NO: 114544 - RNA, 100 nt, Homo sapiens
cccccccccgacagagacggcggagaccccgaaggcgcaaacgacaccacccgaccggcaccacagagggagaccgcccccggggcgagagaccccaacc

SEQ ID NO: 114545 - RNA, 61 nt, Homo sapiens
agcgaggcagcgacaggacgggaacggggccagcaccccaagccaggccagcccaggggaa

SEQ ID NO: 114546 - RNA, 61 nt, Homo sapiens
gcagaaggccggagacaccagcaggcccgcggcaaggagacaagaagaagaaggcacccgc

SEQ ID NO: 114547 - RNA, 48 nt, Homo sapiens
cagacgcagggcgcccccgagaccccgcggaagacaccagaaggggca

SEQ ID NO: 114548 - RNA, 35 nt, Homo sapiens
ggccaaccgcacagacgaccagcgcggacgcagac

SEQ ID NO: 114549 - RNA, 76 nt, Homo sapiens
cccccgcccgccggagcagcgagggcccccagccagcccgacagccgcaaaacgcgacaagaagcagggccagcac

SEQ ID NO: 114550 - RNA, 62 nt, Homo sapiens
agacagaggacgcgccggagaacaccgggccccacaggcccccccgaggcacccaggggaaa

SEQ ID NO: 114551 - RNA, 73 nt, Homo sapiens
gcgccggggccgccgaccaacacccgaggcggacgcagagacagaacacacaagaagggacgggcagaaggga

SEQ ID NO: 114552 - RNA, 81 nt, Homo sapiens
acggccagaggaccaggcgaccagcaccagcccgaccagggcgcgcgggggcacagcccaggcgcagcagcggaccccccc

SEQ ID NO: 114553 - RNA, 72 nt, Homo sapiens
gggaacaggcccgggggaagagccgcgacacgcggagggaagacagaggaagaggaagacaaaccggcacga

SEQ ID NO: 114554 - RNA, 59 nt, Homo sapiens
agggagccgcgcaaaggccccggcaagaagcggaaggagagacaggaagggcacagaaa

SEQ ID NO: 114555 - RNA, 62 nt, Homo sapiens
cagcaaaaaggagggggccacccccccaccgcacaggacacagcaggggccagacaaccaga

SEQ ID NO: 114556 - RNA, 80 nt, Homo sapiens
gggcaccggagcggcaacgcgcggcgaaaacaggccaaaagaaagccgagaaggaacgacagaaggaagggacaagaaga

SEQ ID NO: 114557 - RNA, 69 nt, Homo sapiens
caaagcgaaacaaaacgcacggaaagacccagaaagccaagacaaaccagaagagcggagagaagccgg

SEQ ID NO: 114558 - RNA, 75 nt, Homo sapiens
ggccccgggaccccgcccggcagccccgccaagaaagggaagcaggcaagagacaggaaggccaccagcgaggac

SEQ ID NO: 114559 - RNA, 71 nt, Homo sapiens
gaaaaacacagcgaaggagccggccaggggccacggagaaagccgcaggccaggagagacagcccaaagag

SEQ ID NO: 114560 - RNA, 73 nt, Homo sapiens
gaaagcagaagaaggagcggaacacacagcaagccgccgggacagccacgacgcggaagccgcagaaggaccg

SEQ ID NO: 114561 - RNA, 54 nt, Homo sapiens
ggacagcggagcacgagagaagccgggccccgaggaccgagacaggagcacccg

SEQ ID NO: 114562 - RNA, 80 nt, Homo sapiens
cggcgcggccgggccgcgccccccggcgggccggacggcggagaaaagagggaaaaacaacaggaaagaagagggagaac

SEQ ID NO: 114563 - RNA, 74 nt, Homo sapiens
gccccgagagcgcgaacaggaaggcagcaacaaccacccagggagaaaaacaagaggacagacaccagaacaca

SEQ ID NO: 114564 - RNA, 84 nt, Homo sapiens
agagcacccaccacaggaggggacggcacccagagcagcacagcccccagacaaacgcgagcagaggcagaccgggagaccaca

SEQ ID NO: 114565 - RNA, 69 nt, Homo sapiens
gagcaccgcgccggcccagcaccccgagaaccgcaggagccagagaacaacgcaaacgcccacacagca

SEQ ID NO: 114566 - RNA, 66 nt, Homo sapiens
gcgccaaaacccgcccggaaaggggacaccgggcccaggcgcacccaggcagaaggaggagggcag

SEQ ID NO: 114567 - RNA, 78 nt, Homo sapiens
ggacacagcggaaaacacggaggagaagaagacgaccccgacgcaggccaggagccgcggacagaagccgagcacggc

SEQ ID NO: 114568 - RNA, 74 nt, Homo sapiens
ggccgcacgagaagagagccagaggggggacgaacccacagggcaacaacacggcaccacacaagcgaagaagc

SEQ ID NO: 114569 - RNA, 83 nt, Homo sapiens
cggcaggcccaggcgcgaagccggccggaggagggggcgcgcgaaggccagagcaggcggggaagaacacaccaccagcaagg

SEQ ID NO: 114570 - RNA, 77 nt, Homo sapiens
cgggagcggcggcgaacagcgcgacacaggagggaccacaacagacaaagaacagaaaaagaaagccagagaacaga

SEQ ID NO: 114571 - RNA, 79 nt, Homo sapiens
agcccacaacccagcaccgacccccaggacggcacccaaaagcagaccggagaacagcagaaagagccgccgggcgcac

SEQ ID NO: 114572 - RNA, 40 nt, Homo sapiens
gccacgcaaccccacccccggccaggaggccgacccgacc

SEQ ID NO: 114573 - RNA, 78 nt, Homo sapiens
gcgcgcgggaccacccgacacgggaggggaggacccgggacaccgcacagccgggaaagggggcagcacgccgaagga

SEQ ID NO: 114574 - RNA, 83 nt, Homo sapiens
cgcgggccagcccagcaccgacagccgacgcgcagaagcagagccaccgggggaaaggaagacaggacgcgccaacgagacag

SEQ ID NO: 114575 - RNA, 83 nt, Homo sapiens
gcacggcccgcgggcggcgcgcggccgaagcgaagggcgacgccaagccggaggcccacagaacccagcccgggggggacgga

SEQ ID NO: 114576 - RNA, 69 nt, Homo sapiens
cgaacacggggccacccagagcccgacacggggcagacaaacacaggcccccacagagagcacacaaac

SEQ ID NO: 114577 - RNA, 70 nt, Homo sapiens
ccgaccgggcacgaggagaagggagaaaccgaaacgaacccagccagaaacacaaaacgaagaggccagc

SEQ ID NO: 114578 - RNA, 73 nt, Homo sapiens
cgggaaggacggaccccgcggccaaggacagaccagagggaagcgcgcagacagaacggcggagagaagagac

SEQ ID NO: 114579 - RNA, 87 nt, Homo sapiens
cggaggccccagagaaggggggggcgaccgggagccggagcggaacgaggagggcgcccaaagcagccagcagccacccccgcccag

SEQ ID NO: 114580 - RNA, 77 nt, Homo sapiens
gaagcagccaaagcaggggcaacccagaacccccagccgcagaacaagaacggcaggcgaaagaccgacagcaagac

SEQ ID NO: 114581 - RNA, 55 nt, Homo sapiens
agccagacgccggggaaggcggcaggaggaaggccaggaacgcagaagaccgcag

SEQ ID NO: 114582 - RNA, 87 nt, Homo sapiens
ccgccaaagcacgcacagagaagacgacccagacagagaagagaagaagaagaaggaaaaacaggaaggcacaagacaggaccgaaa

SEQ ID NO: 114583 - RNA, 73 nt, Homo sapiens
gcccaaccgccggacgcagcgaaggccaagggggaacgaggaagaacggacgacccagagacgacaaacgagg

SEQ ID NO: 114584 - RNA, 72 nt, Homo sapiens
agggcgcgagcgcaagaaaccccaccaggcggggaagagccaagacccaaacacaaccagcaaaagaaacca

SEQ ID NO: 114585 - RNA, 61 nt, Homo sapiens
ccagcccgaagagaaacgcaccacacccggaaccgcaggggagggaaaacaaggacaaggc

SEQ ID NO: 114586 - RNA, 81 nt, Homo sapiens
gcgaagggcggggagcgcggcgggcgcgcgccagggcacagacccacaagaggagaacgggcagagcacagccgccaagcg

SEQ ID NO: 114587 - RNA, 70 nt, Homo sapiens
ggaaagggccacgggagccgccgccggagcgagaacacggggaaaagccgggccacagaagcaccaccac

SEQ ID NO: 114588 - RNA, 66 nt, Homo sapiens
gaggaagagagaaaagagagaaccccaaccggggaggaaaaccgacgaaggcagaaaaaaccagca

SEQ ID NO: 114589 - RNA, 55 nt, Homo sapiens
caacaacaacacaaggaaaaaggcacacgggacagcaggaaaacagagcagccga

SEQ ID NO: 114590 - RNA, 108 nt, Homo sapiens
gaagagggagagaggccaagacaggagaacggaacagaagggccaaaaaaggggaaagaggcccccggggacaagggcagggccggaagcaaggaccgaggggccaca

SEQ ID NO: 114591 - RNA, 77 nt, Homo sapiens
agagcagaggccgcgagagacgccagagaaaaaccgccccaggggagaaaacaagaggagggaaggaacacaaacga

SEQ ID NO: 114592 - RNA, 74 nt, Homo sapiens
cgcgggacacacccccaggaggcccggcagagcaggggaggcaagcaggggggcaaaggaaagaaggcagaaag

SEQ ID NO: 114593 - RNA, 76 nt, Homo sapiens
ccagggcggacgcacccccacgcacaggggccaagaagaaccagcgggacaggacaggacgacgaaggacagaagg

SEQ ID NO: 114594 - RNA, 81 nt, Homo sapiens
accaggaggagaagggggcagaggagacgaacaaacaaggccggaaaaacagcacgaaggaagaggcccggaaaggaaggg

SEQ ID NO: 114595 - RNA, 80 nt, Homo sapiens
cgggcgcccggcccgcaggcccccccgcgccgaccgcgccaggacagacgcacagacaccgcaggaacgggacccgaaca

SEQ ID NO: 114596 - RNA, 62 nt, Homo sapiens
cccagagaagaagggcaacgaacaagggcaagaggaggaaccaggcgaccccggagcacaca

SEQ ID NO: 114597 - RNA, 87 nt, Homo sapiens
cacaggcacacaccccccgacaggcacgcacacccaccccacaggcccggccggcgcggagaaacgaggaggaagagaaggaccgaa

SEQ ID NO: 114598 - RNA, 83 nt, Homo sapiens
aacaggcagccacagccgcccaacaaggagcccgccaacggcgaagccaagaacccggggacaagggcagcaccggcccagag

SEQ ID NO: 114599 - RNA, 77 nt, Homo sapiens
gcagagccgggcaccgcacaacacagcagcaaaacccagggaccaggcggacgaccagaaccggcgcaacaccccag

SEQ ID NO: 114600 - RNA, 60 nt, Homo sapiens
cccggagcccaagcaggcacagcccaggacccagaccagccaaagaaacaaaaaaacggg

SEQ ID NO: 114601 - RNA, 57 nt, Homo sapiens
cggccgccccccagaccgggacagaaggcaagcgaagcgccccgggaggcaaggggc

SEQ ID NO: 114602 - RNA, 79 nt, Homo sapiens
ggcggcgacgggggcaccggcggcgaggaaacgcccccgagaagaaggaggcgcagacccgaacacggaagaaagacac

SEQ ID NO: 114603 - RNA, 71 nt, Homo sapiens
gggacgcagcccggcggcagcaggacacagccccagcagaccgacgacagcaaacaagaaaagccccgagc

SEQ ID NO: 114604 - RNA, 70 nt, Homo sapiens
cagccacagccgccccaagcacaagaacccgagcgaccaggcgggacgacagaggagcgccccgcccagg

SEQ ID NO: 114605 - RNA, 80 nt, Homo sapiens
cgcccccgcaagcgagaccgggaagggccaccagaacacaagaccgggcgggaagcccgggcccggcgccgccaccgccc

SEQ ID NO: 114606 - RNA, 35 nt, Homo sapiens
aaagacccacccccagaagggacgaacagcgggga

SEQ ID NO: 114607 - RNA, 67 nt, Homo sapiens
ggccccccgggaaaagggggacgcggggaagagggacgggacccaaagaacagcggcagcgaaacag

SEQ ID NO: 114608 - RNA, 79 nt, Homo sapiens
ccgccggcaccccgccaccccgagccgcccggcgggaagggcccgccgcacccgagcaggaggccggggggcagcagga

SEQ ID NO: 114609 - RNA, 71 nt, Homo sapiens
cgggaacaaaagccaggcacaagaaagcgaaaccaaaagaagcaagggaaagaccaggagccagaaaccaa

SEQ ID NO: 114610 - RNA, 55 nt, Homo sapiens
ggccccaccggccaagcgcaagagcgaagacacgcaaccaaaggcgacggcggga

SEQ ID NO: 114611 - RNA, 78 nt, Homo sapiens
ggggacggccgccccgcgggacgacgagaacggcaggagcccagcggacggaggccgcccacagagacccaagaccca

SEQ ID NO: 114612 - RNA, 74 nt, Homo sapiens
gaggaaccgaggagccaccaaaggcacagccaggggcgggccgcgacaggccacacgccaagcgaccagcagag

SEQ ID NO: 114613 - RNA, 82 nt, Homo sapiens
cagacgcgcgccggacaacggaaacgaaagagcccagacacccaagagggccaagccagaaaacagaaacgaaacagaacag

SEQ ID NO: 114614 - RNA, 47 nt, Homo sapiens
agaggaaacaaggaaagggaacgggaaaccaaccaacaccacaacca

SEQ ID NO: 114615 - RNA, 82 nt, Homo sapiens
cgccggccgagccaggcccggcaaccagccgcggaaagacggcgcacacgcacccggagagcgccgagaacggacagacacg

SEQ ID NO: 114616 - RNA, 77 nt, Homo sapiens
caaagcagcgaagaagaggcccaacccccaccccgcccaaggaggcccagcgacgccgacaccccaggccacgagcc

SEQ ID NO: 114617 - RNA, 77 nt, Homo sapiens
aaaaacaccagcggccaaaagagcagccacagaagaccaaacgcagaccagcccaggaagccccgcgcaggggaaac

SEQ ID NO: 114618 - RNA, 76 nt, Homo sapiens
cagaagcaaaacaggacgacccgaggaacagagcaggaacagcccgcgcaaaagaaaaaaaaccagcacagaaacg

SEQ ID NO: 114619 - RNA, 86 nt, Homo sapiens
ggcggcagcagcccacgggaggcgcgcgccacacgcgcacaagaggccgcagacaaggacgaggcccaaggaaacggcggcgccag

SEQ ID NO: 114620 - RNA, 79 nt, Homo sapiens
caagggcaggaaaggaagaaaggaaacacaaaacgggaagaaggagaaagggccaaccccgaagaagcaaacagaaacg

SEQ ID NO: 114621 - RNA, 62 nt, Homo sapiens
gaagagaagaagcgagaggcgcagccgagccaaagaaaaagccggccagggcggaaaaaggg

SEQ ID NO: 114622 - RNA, 80 nt, Homo sapiens
gcgcaaccagcccagggcggcggaggcggcagagaggccccgagacccagaacgcaaaaccaaggcccggcagccaccca

SEQ ID NO: 114623 - RNA, 78 nt, Homo sapiens
gggacaaagcgggagacagccagcgggccagcgagcccggaccgagacacggaggggacccccaaaagacaagggcaa

SEQ ID NO: 114624 - RNA, 81 nt, Homo sapiens
acgggcaacaggagccccacgccacgggggaggacgcgagcggaagagaagcaaaaagacaaggaggaaagcgacaccacg

SEQ ID NO: 114625 - RNA, 71 nt, Homo sapiens
cggaccgaaggccacaaaaccacgacacggcaggaaggaaacaaccacggaacaacagacagccacgacgg

SEQ ID NO: 114626 - RNA, 73 nt, Homo sapiens
agggacacggaaagcagcagacgaaccccggaggggcagacaccccacaggcaccagcagcaacgaacaggag

SEQ ID NO: 114627 - RNA, 63 nt, Homo sapiens
agaagaccgaacggccccacagccgggcggggggaaagagacaggggccaggccaggggcagg

SEQ ID NO: 114628 - RNA, 38 nt, Homo sapiens
aagggacacaccaagcaaagggcgggagagaaagagag

SEQ ID NO: 114629 - RNA, 83 nt, Homo sapiens
gccgcccgaacaccagggggcagacccaaaggaaacgcacgaaagaaacaggagagcgcagcgaagcccggggaagcacacaa

SEQ ID NO: 114630 - RNA, 79 nt, Homo sapiens
ggccgcacagaaggaagaaaagccaggcaaggggagaaccagcggcgggcaaaaaacagaaaaacgaccggacagcgga

SEQ ID NO: 114631 - RNA, 84 nt, Homo sapiens
ggaaaggagaggacccggagccggaagcacaaggaacggcagcggagcagccggagacacaggaggaggggacagcggaaggcc

SEQ ID NO: 114632 - RNA, 68 nt, Homo sapiens
ccgagagccgagagcgggacaaagcaagggaacaggccaggggccgcacagacacagccgccacaagg

SEQ ID NO: 114633 - RNA, 72 nt, Homo sapiens
cgcagacaccagccgcgccaggacgcgagagcggaaagggcaccgacccacacgacggaggcacccgggacc

SEQ ID NO: 114634 - RNA, 83 nt, Homo sapiens
gcacgcaagcgagcaccagcagggccagcaggcgaaagagaagcaaaggaagaagcgaagcaacggagagcccccgcaggagg

SEQ ID NO: 114635 - RNA, 75 nt, Homo sapiens
aaaacgccggccgaacagcccacgccaagacccagagacacagggcacgcccgagacagaccaagcaaggaaaag

SEQ ID NO: 114636 - RNA, 77 nt, Homo sapiens
cccagcccccaagagcgggagacagagcacagccccacaagaggcccaccgacacgaagggccacgcccccgacacg

SEQ ID NO: 114637 - RNA, 71 nt, Homo sapiens
caaaagaggagaaagacaaacccacaagcgaaagaacacgagaagaagaacaggacgaaggcgcgaaggaa

SEQ ID NO: 114638 - RNA, 85 nt, Homo sapiens
accggccccagccaaagcagcccgcagagaaaccaggcaccagagaaggaggaaccggccggcagcagacggaaggaagaaaagc

SEQ ID NO: 114639 - RNA, 81 nt, Homo sapiens
acacagggaaagccggagggcggcgcggcagccggcgcccgacaggaaggggaaccgccaggggaacggagccacagcagg

SEQ ID NO: 114640 - RNA, 54 nt, Homo sapiens
agcccgccccccgggccggcgcggcagaggaagaagaaggcgcaaagcgccgaa

SEQ ID NO: 114641 - RNA, 71 nt, Homo sapiens
ggagaagggaagacacacaacccaacagagcgcgaggagggaaacgcaagggcaccagagaggggcgcggg

SEQ ID NO: 114642 - RNA, 100 nt, Homo sapiens
acgacgcccccagcaacgcaggcggccagccagcagcgcgcggacgacaaggagaagaaaaggcagacaaaccagacagggggaaacgccagccgaaagg

SEQ ID NO: 114643 - RNA, 73 nt, Homo sapiens
ccggagagagccagcacaggaaaaacaagggaggaaggccggcccggagaaccaggagaaaagaagacaagag

SEQ ID NO: 114644 - RNA, 81 nt, Homo sapiens
gccaaaccaagccgcagggggaaggagaagcgccacccaaggaacgcaccaacccagacaggcagccgcacgggaagaagg

SEQ ID NO: 114645 - RNA, 40 nt, Homo sapiens
agacggccagccgaaaccacgaggcgacccgcggcgagag

SEQ ID NO: 114646 - RNA, 80 nt, Homo sapiens
gagagcggaccgagagcgcgaaacgcacgagaaggacaacccccaagaaagggagcccagaacgaaacaacccagcagag

SEQ ID NO: 114647 - RNA, 66 nt, Homo sapiens
accaggccacacaacccaagcgggaacacgacggcgaagaggcagaagcagagacagacagggaga

SEQ ID NO: 114648 - RNA, 41 nt, Homo sapiens
ccagaacgcggaagcgagaaagcaggagcccggaaaggaga

SEQ ID NO: 114649 - RNA, 69 nt, Homo sapiens
ggcggagcccgcagaccgcagaaggccggagacaccagcagggcaacagggcagcggccaaccgggcgg

SEQ ID NO: 114650 - RNA, 75 nt, Homo sapiens
cgaaccaagaaaaccacagcacagaaacaccacggcggcgccgaggccccaaggaccccggaggaaaagcggaag

SEQ ID NO: 114651 - RNA, 76 nt, Homo sapiens
gggcaggcgaaagaggcggcggcgcgccgcggccggccacgcgggaaccaaagaaagcggagaaaacaaagaaaag

SEQ ID NO: 114652 - RNA, 83 nt, Homo sapiens
gccggggggcccaggcagcccgacggggccaccgcggcggcgcccgcaccgcgcccgcaaacccgggcgcgccaggcacagcc

SEQ ID NO: 114653 - RNA, 66 nt, Homo sapiens
gggcacaggggccccgccagcaagggccagggacgcggacgcagaagacgaccaaaagccgccagc

SEQ ID NO: 114654 - RNA, 82 nt, Homo sapiens
caggaccggcgccgaaggcccgccagaagacaccgagggccagggaccaccgagcccaccacaagaccagagacggagcgac

SEQ ID NO: 114655 - RNA, 37 nt, Homo sapiens
gaacaggagggcgagccccaggaaacccaaagcaccc

SEQ ID NO: 114656 - RNA, 84 nt, Homo sapiens
cgccagcagccgccggagccagccaacgagcgaaaggacccaggagcgaaacagaaacaaaaagaagcggggaacccacaaggg

SEQ ID NO: 114657 - RNA, 73 nt, Homo sapiens
ccccgagagcggaacagacccccagcaacggaaccggccacagaagcgccagcaacgagggggcaggacaggc

SEQ ID NO: 114658 - RNA, 77 nt, Homo sapiens
cacgacgaccacggcggaggaaggaccccgccaaagaccaacaccaaagaagcgcaaaagagaaaccacaagaagga

SEQ ID NO: 114659 - RNA, 58 nt, Homo sapiens
gaacaaacagcaagaaagaccacaagaccagaccaagcacgcacagcagcaacggcag

SEQ ID NO: 114660 - RNA, 77 nt, Homo sapiens
caaggaggggaaaaaccgcgaagcaggggccgcgggaaggccacaggagaaagccgagcaggccagcccggcggccg

SEQ ID NO: 114661 - RNA, 71 nt, Homo sapiens
aaaccaacaaggcaccaagacgcaggggggaaccacagcgacaagggaaagaaccccgggagcgaagaagc

SEQ ID NO: 114662 - RNA, 75 nt, Homo sapiens
caaacgcggcgagaaagagagcaaacaaggagcagacggccgcagcaaaggcaaaagcagaccggaaaacccacc

SEQ ID NO: 114663 - RNA, 56 nt, Homo sapiens
accgcccaaaaaggcaaagaaaccacgagcccaggaccaaccagcccacgcagagc

SEQ ID NO: 114664 - RNA, 77 nt, Homo sapiens
cagcggcggcggcgcccgcgcacgcgcaagaccgcgaggcgagacccgaagcccggggcggcgacggagcacgaccc

SEQ ID NO: 114665 - RNA, 79 nt, Homo sapiens
cgaaaaaccgcccccagagcgaccagagggggagcaggggaaagcagaaaggcggaggcagggcggaccggccacgcaa

SEQ ID NO: 114666 - RNA, 70 nt, Homo sapiens
agaagagcacagaaggaggaccacgcccccagccacccaccccaggcgcaggaaaacagccagcccccac

SEQ ID NO: 114667 - RNA, 79 nt, Homo sapiens
ggcagagcagcgcagcggagaaggccgggcgaggggagcaggagcaccggaccaccggaggcacggcagacacaccgac

SEQ ID NO: 114668 - RNA, 64 nt, Homo sapiens
aggccacaggcgcaagcagcaacagacacagccagagacgggcgagccggaagcaccaacagag

SEQ ID NO: 114669 - RNA, 82 nt, Homo sapiens
ggacccagccaccacaggcacagaagaacgcagcccaggcaggaggacaggaaaacaggaggcagaggaacaaaaaaagaca

SEQ ID NO: 114670 - RNA, 72 nt, Homo sapiens
gaacgcccaccccccgaacccagccgcaccgaaacaacgaacgagcaaggaagggccaaggcagaccccaca

SEQ ID NO: 114671 - RNA, 78 nt, Homo sapiens
gccgcccacccagccaggagacaggaggccgcggggagacgcgggggacggggcaggaccacagagcgccgcaggcca

SEQ ID NO: 114672 - RNA, 79 nt, Homo sapiens
gcgcccgccagccaggccaccccgggaacgaagcgcaggcgcagcaacgccaaaaagaaaccgaagaagagaagaacac

SEQ ID NO: 114673 - RNA, 80 nt, Homo sapiens
accggggagcacacagagagccgcggagacagaggcaagggggaggacgcccgaggccggcccgcaccccgaggaggaag

SEQ ID NO: 114674 - RNA, 64 nt, Homo sapiens
gacagcagccagaacggggacgagagccccggcacaaacggaccaccagaaagcaccccacagg

SEQ ID NO: 114675 - RNA, 109 nt, Homo sapiens
cagccgggcagcggagcggcgagcgcgaaggcacgagcggagggagaacaagaacgcaggcaagcacagcagaagccagaaccacgagggcgcaagcagagaacccgac

SEQ ID NO: 114676 - RNA, 72 nt, Homo sapiens
gagcccacaagcgcggccagaacaggagacaggggagggcccacaaagggggaaaaacgagaccacccagag

SEQ ID NO: 114677 - RNA, 74 nt, Homo sapiens
cacgccagagcccagccgcggggcccggggagaggaggggccggggcgggccgcaggcgggcaaccagaaccaa

SEQ ID NO: 114678 - RNA, 72 nt, Homo sapiens
gcgaaccccgcgagggaggaacccagaacggagggcacgagcgggccgagaccagacgagccacagaccacc

SEQ ID NO: 114679 - RNA, 93 nt, Homo sapiens
cacgggcaccgagcccgcccacgacggagaggagaacaaggcccgccaagggaggcgcccacagagggcacagcgaagaaccgggaaaacaaa

SEQ ID NO: 114680 - RNA, 82 nt, Homo sapiens
cgcgcacaccgaggaaagcgcccgagggaggggggagagcaggagaagaaaggaagagacgacagccagcaggcaggagccc

SEQ ID NO: 114681 - RNA, 73 nt, Homo sapiens
gggagcccgcgcccgccgcgggagagaggacccccccccccccccaaggaggcagcacggcaggagacgagga

SEQ ID NO: 114682 - RNA, 69 nt, Homo sapiens
cccacccccaccgccaggcaaagaagaagaggaaagagccccgccaacagaagcggcgccggggagaaa

SEQ ID NO: 114683 - RNA, 72 nt, Homo sapiens
cagggcccgaacgccgagcagagagagaggagcgagaggaagcggaagaaaaccaacaaaggacagcgggag

SEQ ID NO: 114684 - RNA, 75 nt, Homo sapiens
aggaagcgcacccgacaggaaggaaagcgaaagagggggcaaaaaggaaggggaagaggaaaggcagggcaaagc

SEQ ID NO: 114685 - RNA, 73 nt, Homo sapiens
cggcgccgcgccggcggcggagagcccggcaaagagcggcaggcgaagaaggagcagacccagaacagcagga

SEQ ID NO: 114686 - RNA, 67 nt, Homo sapiens
caccaaggaagcaaaagccccagaacgagcagccgcaacagcgcaccgacacaagcccagaagcccc

SEQ ID NO: 114687 - RNA, 88 nt, Homo sapiens
gggaacccagagagacccagccccagccccaagggcagagcagacagggcaacggccacccaaccagcgcgccaggcacgggccaggg

SEQ ID NO: 114688 - RNA, 81 nt, Homo sapiens
gcagccgagcaccgagccagcccaggaaaaggagaggggcggaggaggaggaaagacggggcacaacacaagaacagagaa

SEQ ID NO: 114689 - RNA, 71 nt, Homo sapiens
acgccgacgagcgaagaagcggaggcgcgacccaacagcacgcccccaagaagagaggacggggacgggcc

SEQ ID NO: 114690 - RNA, 72 nt, Homo sapiens
gcaccagccgccgaccacacaaggcaggggggaggaaaccagcaagaaccggccagaaacagggcgcaggac

SEQ ID NO: 114691 - RNA, 73 nt, Homo sapiens
gcagccgccagagccggcggagcagggcagcaccacgagccagaagcagagccgcgcaggcacggagaagagc

SEQ ID NO: 114692 - RNA, 52 nt, Homo sapiens
acaacccggaagaggaccccggcaggaccccccccagagggggacaccaggc

SEQ ID NO: 114693 - RNA, 80 nt, Homo sapiens
ggcggcgcggcccgggggcaggggaggagacgaggcccgaagcgccagagccggggcccccaacagcacggcccagggga

SEQ ID NO: 114694 - RNA, 72 nt, Homo sapiens
cgggcgggccgcgcagcccccggagacagacccagcacggaccccccccccagccgggcgaggccccgaaac

SEQ ID NO: 114695 - RNA, 52 nt, Homo sapiens
aacccgagaaagggcaaccgcagaagaaacacacaggagaacccccgagaac

SEQ ID NO: 114696 - RNA, 62 nt, Homo sapiens
cagcaacgcgggcagaggagcggagcggagaagccaagccggaaagccagcacgcagcaccg

SEQ ID NO: 114697 - RNA, 82 nt, Homo sapiens
acacagcgccagaagcaccacggaaaccaggccgggggaccccacgccggagacagggcgcagccagaaaacccacagaggg

SEQ ID NO: 114698 - RNA, 53 nt, Homo sapiens
agagagggagagaacaaccagcggaaggaagggcccagaaaccagggccaccg

SEQ ID NO: 114699 - RNA, 96 nt, Homo sapiens
gcggaacaccaaacggaggagccagacccggggaggcgcacacacaccaaagcgcagacccaggggagcccaccagccagcaacaggcccggaaga

SEQ ID NO: 114700 - RNA, 82 nt, Homo sapiens
gcgagggggcggcggcgacagccaggcccggaagcgagggcggccgcgccggcccaggcagacgcagccgccggagggcgcg

SEQ ID NO: 114701 - RNA, 75 nt, Homo sapiens
aacaacggggccacgaacaagcgggaacaccaagccagcacacagagcggggcggaggaagacgaaacggaaaca

SEQ ID NO: 114702 - RNA, 57 nt, Homo sapiens
gcggaggaccacgccggccgggggcgcggggggccaccaacacccccggaacaccag

SEQ ID NO: 114703 - RNA, 77 nt, Homo sapiens
cagagccaagggcgaaccaaccagaagcagccacacaaggacacaggaacgccacaagaaacaacagcaaggcgagg

SEQ ID NO: 114704 - RNA, 57 nt, Homo sapiens
gcgacgcgagagaaggacccacggcgcgcgaagggggagaggcaccagcaacagacc

SEQ ID NO: 114705 - RNA, 67 nt, Homo sapiens
ggggaccagagaccaaaaaaaaaacgcgaacaccgacggagccaggccagaacacgaacacaggagc

SEQ ID NO: 114706 - RNA, 55 nt, Homo sapiens
ccacggcgccccgcaagaaacaacgaacgagcaaggaagggccaaggcagacccc

SEQ ID NO: 114707 - RNA, 73 nt, Homo sapiens
gccggacccccagaagaagagaagaggccccccacccggcgccccgggccagcgggacaccagcaagcagggg

SEQ ID NO: 114708 - RNA, 69 nt, Homo sapiens
cccaaggcaggaaccagaggaagagaggacaccgacagagcaccagaaggagagaaccaggagaccgaa

SEQ ID NO: 114709 - RNA, 83 nt, Homo sapiens
ccagcccgcccggcggaccaaaggaccgggccaggagcagaccgaagcaagaccaagaggaggggggagagccaacaaccacg

SEQ ID NO: 114710 - RNA, 78 nt, Homo sapiens
cgagggcgagaggcccacaggcacacagcaggcgaagacaagacccaaaaggagaccgagagcaaaagaaagacgaga

SEQ ID NO: 114711 - RNA, 50 nt, Homo sapiens
gggccggccacaacccggcggagccgccgcagacacaagcgggacggaag

SEQ ID NO: 114712 - RNA, 78 nt, Homo sapiens
caaacacaccaaccaagcaaaacccaagcaaaaccagagcaagaagcaagcaagggaagaaagagaaaccccccacca

SEQ ID NO: 114713 - RNA, 79 nt, Homo sapiens
gcacccacccagagacgacagggggcacacccccccagggcgcgcggcccgggcgcgccaggcacagccaagagcggac

SEQ ID NO: 114714 - RNA, 60 nt, Homo sapiens
cacggcagacacacaacccgacccgacgaggaaaaccagagagcggagcgcaggaacgga

SEQ ID NO: 114715 - RNA, 73 nt, Homo sapiens
caacgccggacgcccacgcaagcagacacaacagcaggcagcccgcccagcggcacgccaccccgagaaacaa

SEQ ID NO: 114716 - RNA, 57 nt, Homo sapiens
caaagagcaggaaagcacccgggcagaaggaaaccgaggcgggaaaaagaaaagagg

SEQ ID NO: 114717 - RNA, 85 nt, Homo sapiens
cggcagggcaccgcgcgaagcggccaaagccgcccagacggccaccggcgggaggaacaaaagcgcacagggggaccaaaccaag

SEQ ID NO: 114718 - RNA, 106 nt, Homo sapiens
ggcgccgagccgcaggagagacacgcgggccgaccccagagaggcgcggacagagaggggagaagagcgagacgagaaagaagaggaagaagagagagaagagaag

SEQ ID NO: 114719 - RNA, 74 nt, Homo sapiens
cgagaaggcccaaagaacaaggagggggccagacaacggcaagcggagaagagcaaggccgaaccgagaggaag

SEQ ID NO: 114720 - RNA, 71 nt, Homo sapiens
caagacgacggaaccaacacacaaagccgcagaaagcagcaccacaagaaggagagacgcagagccagaca

SEQ ID NO: 114721 - RNA, 113 nt, Homo sapiens
cgaccaagacagagcaaggccacgacccacgagacaggggcccaagaaaaagcaccggaccggaaaagccagggcggaaaccggcaagaggaagagaaagaaaaaaaacccag

SEQ ID NO: 114722 - RNA, 72 nt, Homo sapiens
gagacacaagacacccccccagaggggaacagaggaccggaaggaacagcagggagacaccgggggcccgca

SEQ ID NO: 114723 - RNA, 83 nt, Homo sapiens
acccgcacggcgcaggccggaacacgggcggccacgaggagagcgcagaaacggagggcagcagggaccggcggacgccccac

SEQ ID NO: 114724 - RNA, 60 nt, Homo sapiens
acagaccaagaccagacgaggaaccggaaacagggagacgccagaccgggaggaggcagg

SEQ ID NO: 114725 - RNA, 71 nt, Homo sapiens
ggcggaggaacagcggggaacaacgcaaacgcccacacagcaagcacgggcagaagaaggaacggaaaaag

SEQ ID NO: 114726 - RNA, 86 nt, Homo sapiens
gaccggaggaaggaaggcggagccagccgaggggagaagagcccagagaagagcagcaccagcagaagagggcccgaccacggcaa

SEQ ID NO: 114727 - RNA, 72 nt, Homo sapiens
cggcgaagagcagcagcgaaagaaacccccgagcgggcacgcacgagcgcacacacaaaggggagccaggaa

SEQ ID NO: 114728 - RNA, 74 nt, Homo sapiens
ggaccccagccccagaacgaaacggagcacccaccaacgagagagccgcagggcaggaccagaagaagcggcgc

SEQ ID NO: 114729 - RNA, 79 nt, Homo sapiens
gagggacgcccaccacgggaagcccgggcgcgccaggcacagccaagagcggaccggcagcggccagcgcagcggccgg

SEQ ID NO: 114730 - RNA, 76 nt, Homo sapiens
aaaaacgggaaagccggcaagagggagaaggacaccaggcagaggcaaggccacaagaccccggagagggggaaac

SEQ ID NO: 114731 - RNA, 72 nt, Homo sapiens
aggcaggcgccagacaaccaggcaagcggaagaaccgaacacacaaaggggggcacaaggcgggagccggcg

SEQ ID NO: 114732 - RNA, 78 nt, Homo sapiens
ggcggagcaggagacgccaccacagccgcgcagagggaggacgccaaaggcggaaaggacgaggcagccacgggggag

SEQ ID NO: 114733 - RNA, 41 nt, Homo sapiens
agaaaaccacagacaaggaaccacaaacgaacacaagagac

SEQ ID NO: 114734 - RNA, 76 nt, Homo sapiens
ccaggagcccagccacagccaccggacccccagacaacaggcacaaagagagaaggaacacccacagggcagacag

SEQ ID NO: 114735 - RNA, 67 nt, Homo sapiens
caggcgcaacgcaaagaccagccacgagaccgaaacaaggaccccccgggagaagaaaagcgggacg

SEQ ID NO: 114736 - RNA, 67 nt, Homo sapiens
aagagaagaagaggaagacacgccgaggacaggacccgaacccgagcgaccaggcgggcacaaaacg

SEQ ID NO: 114737 - RNA, 78 nt, Homo sapiens
aagggcaaccaagagagccccaaagccacggagcaccacacgcaacagacgaaaccagagagcaccacaccagagcaa

SEQ ID NO: 114738 - RNA, 77 nt, Homo sapiens
aaaaaggcaagcaagcacaaaaagacgcaaggcgcgcaagaaaaaaggagccagaagaacaggaagacgccagaaac

SEQ ID NO: 114739 - RNA, 65 nt, Homo sapiens
acagcagcggggaaaaacaagaggacagacccaaggacacccgacggaagaacccacagcagggc

SEQ ID NO: 114740 - RNA, 70 nt, Homo sapiens
caggaaaaccggccacaaaaccagagcggagacacccaggaggcagaagccaggaaaagcacagggccag

SEQ ID NO: 114741 - RNA, 80 nt, Homo sapiens
cgaaccgggcaccgacaccagccgccccaccagccgccgaagcgaccccaacgagacaaagcgccgccccggggccccga

SEQ ID NO: 114742 - RNA, 87 nt, Homo sapiens
cggaggcggacagagaggcaagcgcagggggacggggaccagcagcgcgccgccgcccagaacaagaaacccacgagaagagaaggg

SEQ ID NO: 114743 - RNA, 53 nt, Homo sapiens
cgacaagggcagcccaaggacacaaggaaagacacagaccgacagagcgccag

SEQ ID NO: 114744 - RNA, 69 nt, Homo sapiens
gaaccaaagaagagacaaaagagagagcggaaacgagggaaagaggccgaaaggcgccagccaagaaca

SEQ ID NO: 114745 - RNA, 79 nt, Homo sapiens
aaggacacgcccacgaccgggcagaaagaagacccagagaaaaacgggagagaaagggaaggaaaagaccaagacccac

SEQ ID NO: 114746 - RNA, 76 nt, Homo sapiens
gccccagcgccaccgccgaccgaagccgcaaaaagaccggccagccacagagcagagaaagccggaccagcaggga

SEQ ID NO: 114747 - RNA, 80 nt, Homo sapiens
aaaccacgagaaccaccagcaaaagaagcggaagcagaagaggcgccaaggaggcagagaccccaggccaagaagaaaag

SEQ ID NO: 114748 - RNA, 41 nt, Homo sapiens
aaaccacaggagaggagggaccaagaaaggcccagggacca

SEQ ID NO: 114749 - RNA, 76 nt, Homo sapiens
acgaggcagcagcacgcacgaccaaaagcaggaccaaaagcggaaaaaagcgaacgcaaggggccaagaagagcag

SEQ ID NO: 114750 - RNA, 52 nt, Homo sapiens
ccccgccaccggcacaccgaaggacaaacccagaaaggaggaacccaagagg

SEQ ID NO: 114751 - RNA, 56 nt, Homo sapiens
gaagggaaaaacggagcaacgcaaggcaggcaacaagagggagcgggaaagcagcg

SEQ ID NO: 114752 - RNA, 79 nt, Homo sapiens
aaagaaggaacccaaagaaccaccccaaacaggaggcagggaagcaaagagcacccgagcccagcaggcaagcagccgg

SEQ ID NO: 114753 - RNA, 79 nt, Homo sapiens
caagaccccgggaaagcaaggccggccccgaccggacggacgcaaacaaggcgggaagcacaggagagcaggcacgacc

SEQ ID NO: 114754 - RNA, 76 nt, Homo sapiens
acgcgggcgcggcacgcgggcccgagcgcagccgcgcagggagaagaggcacccaggcagaaaacagaccgcaaaa

SEQ ID NO: 114755 - RNA, 73 nt, Homo sapiens
cagaccggcgaggacaccgcccagcccgagcaggccaacccaggccagagcggaggacccgaagagacgaccc

SEQ ID NO: 114756 - RNA, 75 nt, Homo sapiens
gccaacagaacgaccagagaagcagaacgcaggaggagaacgacagcagcgaggagggggggaagccccgcggag

SEQ ID NO: 114757 - RNA, 74 nt, Homo sapiens
ggcgaaaccggaccgggcccggaggagcgaacaaggcgacaacacaggagagacccaaaagacacgcaagacag

SEQ ID NO: 114758 - RNA, 88 nt, Homo sapiens
cgccgagcgcgccgccgccgccgccagaacaaccgggcgccgacgagacgggccgccaggcacagagaaggcaaacgggagggcgagg

SEQ ID NO: 114759 - RNA, 95 nt, Homo sapiens
cgggggggacagagccgggcgggggccccaaaccacgcaggaagcccaggacgccgcgggaggggggagagaaccgccggaacggagggaaaaga

SEQ ID NO: 114760 - RNA, 83 nt, Homo sapiens
aaaacaagccggaaaggaggaaaaagaagaccagcgacaaaagagaaacccggcaggagaagcggaggaaaaaaaaagacaag

SEQ ID NO: 114761 - RNA, 58 nt, Homo sapiens
gagccccagaaaagagcaggaagagaacgcgcgcaagccaccaccgacccgaagccgg

SEQ ID NO: 114762 - RNA, 77 nt, Homo sapiens
ggcacgaacgcacgagaaaagggcgccgcagagaaagggagaaggccggccccacagggaaccagggcacgaggcgc

SEQ ID NO: 114763 - RNA, 74 nt, Homo sapiens
aaaaagagagggggggaccgaccgcaacagaacggacccggagggccggcacgaagaacgccaaaggcggaccc

SEQ ID NO: 114764 - RNA, 75 nt, Homo sapiens
cgggcgccagaaggaagaggcggacggaggagcaggcgagaagagaaggaacagagacagacccgggggccccca

SEQ ID NO: 114765 - RNA, 69 nt, Homo sapiens
agcagcccgcccaccgcccgaaacaaaagggacccccagcccccaacccagggagaccgagagagcgac

SEQ ID NO: 114766 - RNA, 68 nt, Homo sapiens
caccgccacgggccgagacacgcagcggcggccagggaccaggaaacggccagcaaggacaaaaaaga

SEQ ID NO: 114767 - RNA, 74 nt, Homo sapiens
cggacccggcgcggcacagaacacacgcacggagaccacgggaccggaggcaggagccaagaggccgaaaggaa

SEQ ID NO: 114768 - RNA, 73 nt, Homo sapiens
ggagagccacggaagccgacagacaaccagaaaaaggcacaaacccagcacagagaagacggcgacaagcaaa

SEQ ID NO: 114769 - RNA, 72 nt, Homo sapiens
caagcaaagcagcaagagaagcagacagagagcaccaacacccacggggcgagcacagcgcagcccagcgaa

SEQ ID NO: 114770 - RNA, 61 nt, Homo sapiens
cccaagaggaaggagcgggcgcccaggggccggcacacaagaaggggcccggaccacggca

SEQ ID NO: 114771 - RNA, 85 nt, Homo sapiens
gcccgaggacagagaggcgagcgcccggaggggagagagcggaggacagccgagaggagcaggacagcggccgaagccagagccg

SEQ ID NO: 114772 - RNA, 78 nt, Homo sapiens
caacaccagcaccgcagaggcaaggggccaccaggaggccagggggcgccaggagacgaagccgaggagcgaaagcca

SEQ ID NO: 114773 - RNA, 57 nt, Homo sapiens
caggagcccaggaaccgaccagccaccaccagaaccccacaaggacaacgaggcaac

SEQ ID NO: 114774 - RNA, 80 nt, Homo sapiens
cacggagcaaacaggacagggggggacaagcagaccaggagcaaggccaagacaggggacagccggccgaacggcagccc

SEQ ID NO: 114775 - RNA, 63 nt, Homo sapiens
ccacgcacccagcgagcccaagcgcccccgcaccaggacccaaggccagccagccccaggcac

SEQ ID NO: 114776 - RNA, 76 nt, Homo sapiens
ggcgaagccaggcgagccaccacagcacagcaggagccaagccagcagaagagacagaaagagaccagaaacgaca

SEQ ID NO: 114777 - RNA, 73 nt, Homo sapiens
gacaacaccgcgcggaccacaaaccgcgccagaaaaggacaagagaaaaaaagggcgggcgaacaaaaagagc

SEQ ID NO: 114778 - RNA, 35 nt, Homo sapiens
caccgccagcggccggaacggaaacacaaagcgga

SEQ ID NO: 114779 - RNA, 72 nt, Homo sapiens
aaaagaaacgaccaaagggaccaggaaggcgccgaaaaccgaccgacccgggaggccaccacgccgggacgc

SEQ ID NO: 114780 - RNA, 80 nt, Homo sapiens
gggcacgcgcgccccgggggcgaggcaccaagccccccgcggagaaccccgcccccccaggaccggagccgaaccccagc

SEQ ID NO: 114781 - RNA, 81 nt, Homo sapiens
cgcggaccgcggcccgacgaggaagcacgaaagcaccaacgagacccgccacacgaggcggagggggcagggcagaaggac

SEQ ID NO: 114782 - RNA, 50 nt, Homo sapiens
aaaacagcacaccaggaagcaagggaaaagccaggaagaaagaaccggaa

SEQ ID NO: 114783 - RNA, 72 nt, Homo sapiens
cagccccggagcaaccgcaggaaacaacgggaagacacggagaaaaacggccagagacaccaaaagaaagaa

SEQ ID NO: 114784 - RNA, 76 nt, Homo sapiens
ccgcaacgccacgacagaaggcgccaggcgggaaaccggcccagcggcgaaccggcggaccgaggcggcagcgagg

SEQ ID NO: 114785 - RNA, 91 nt, Homo sapiens
ggaaggaggcagaggaaagcgagaagaaggccaaacacagcacgacggcaccgagcgagcgaggaaaaccagcaagaagcgacaaaaaagg

SEQ ID NO: 114786 - RNA, 74 nt, Homo sapiens
aaagcaaaagacgcaaaggagaggaccaggcgcggacccaaaaagacccacaggaccgcgaacaaggaggccac

SEQ ID NO: 114787 - RNA, 52 nt, Homo sapiens
gaacagggagaagacagggcagacagaagccgaaccccgagaagcaaagaca

SEQ ID NO: 114788 - RNA, 79 nt, Homo sapiens
gagagaaggacgcggagaagaaggcccagagaggggcaacaagccgcaaaggaccccaccccccagaagaggagaagag

SEQ ID NO: 114789 - RNA, 62 nt, Homo sapiens
cagggcgccaccccggcccagcccggccgacgcagcagggcccagggcaaagagggcgcacg

SEQ ID NO: 114790 - RNA, 72 nt, Homo sapiens
gccccgccagaaccgcccggcccccgccacgaaaaccacccgcgccgaagaaaacaggagccccaagaaccc

SEQ ID NO: 114791 - RNA, 59 nt, Homo sapiens
cgcccgcacccgggcccgcaggccaggcaagcggcagccacacccggagaaggagccgc

SEQ ID NO: 114792 - RNA, 74 nt, Homo sapiens
cccacaccgagacgcggaacaccacaagaccaaggccgaagaagcaagaccagggaaaggccgacagaaacgca

SEQ ID NO: 114793 - RNA, 81 nt, Homo sapiens
cgccgggcaccgaggaccagccaagacaggaacgggaagggcacaggaagaaaggaccaaggaaacaggaacccgcaacca

SEQ ID NO: 114794 - RNA, 80 nt, Homo sapiens
aaggcaaaaagggagagcagagaaaggcgagccagaaaggagaacagcagaaaagggacaaggagaaagaagagaagaag

SEQ ID NO: 114795 - RNA, 68 nt, Homo sapiens
aaccagggaggccgaccgagcaacccacagcaccggggagaaaaacaggaaaagaaagacgcacaggg

SEQ ID NO: 114796 - RNA, 83 nt, Homo sapiens
cccgcgacgcgcagccacgcaggagaccagagaagaaggacagaaaccgaagggagaagagccacaaccaggagaaccccgac

SEQ ID NO: 114797 - RNA, 59 nt, Homo sapiens
gacgcacacgggggcggacaccacaagaagggcgccaggcgggagggacaagaagaaag

SEQ ID NO: 114798 - RNA, 92 nt, Homo sapiens
ccccgcacacgccggaggcaggggacaacacgacacaagcggccggggaagacagcaagaaagcaccagccaagcagaagggagccagcgga

SEQ ID NO: 114799 - RNA, 59 nt, Homo sapiens
gacaaacacgcagaggaaggagcagcgcaaggggccgggagaggaaggccccaagcagc

SEQ ID NO: 114800 - RNA, 76 nt, Homo sapiens
gaaacagcaagcgaagccgaaaaagcgcccgagacgggcccgccgaaaggagagcacgcgcaagggaccaccaccg

SEQ ID NO: 114801 - RNA, 51 nt, Homo sapiens
aacagagcaaggagaaaacggggacggacccaggccaggaaagaaagaacc

SEQ ID NO: 114802 - RNA, 66 nt, Homo sapiens
cagagccgcgcagccaggccccaacaaggccaccgggagggcagaggccagcacaaccacgagaag

SEQ ID NO: 114803 - RNA, 79 nt, Homo sapiens
aaggagcaaggaaaagagcccggagggaagaaggagggaacaagaggcccagcccgaggaaccgcagcaccaggcggag

SEQ ID NO: 114804 - RNA, 74 nt, Homo sapiens
aaacaaaagagaaggcaacaaggcacacaagcggggaggaccccagaccacggccgccaggccaagagccccaa

SEQ ID NO: 114805 - RNA, 60 nt, Homo sapiens
aacggaccccgggaaagagaccaaaaacagcacagaaaaggagcacccacgggagaccgg

SEQ ID NO: 114806 - RNA, 77 nt, Homo sapiens
gggagaggccaagcgggaccgccagaacaagggaagagaaccgggcaacacgaaaaaacacgggaccagccggacgg

SEQ ID NO: 114807 - RNA, 72 nt, Homo sapiens
gaaccacggacaacccagaggacaacgaaggcgaggcacagaaccaggacaacgcgaaccaagagcacgagc

SEQ ID NO: 114808 - RNA, 75 nt, Homo sapiens
agcccaacaaagccccacagcagccagaaggaaagggagaaaaccccaccccgggcaaagcaggaaagaaccaaa

SEQ ID NO: 114809 - RNA, 81 nt, Homo sapiens
ggggaggcggcacacgccccggcggggaggacgagaacgggggccgggcccgggaggagcaggggcagaggggagaaccca

SEQ ID NO: 114810 - RNA, 56 nt, Homo sapiens
ggcgacagcgaccgacgccacacgcacaagagaggggacaggcaaaaggcccgaac

SEQ ID NO: 114811 - RNA, 69 nt, Homo sapiens
aaagcaggcacagaggaaggggacacagaaagacaacaaccaaaccaggacacagcaaacacaaacgac

SEQ ID NO: 114812 - RNA, 76 nt, Homo sapiens
cgcgcccgccgacccgcgcccgccccccagcaccgggcggacgagcgggccaacagacgggccacaggacagcggc

SEQ ID NO: 114813 - RNA, 87 nt, Homo sapiens
gggacggcggccccgcgcagcccccggccgcagcgcaggcagcccagcaggccgacggagaccgccccagggccaaccgggcaggcc

SEQ ID NO: 114814 - RNA, 82 nt, Homo sapiens
gcggcggcggcgcggcccaaaagggaaagggagcagcaccggccacacccacagcacgaccggaacccagcgaccgacgccg

SEQ ID NO: 114815 - RNA, 79 nt, Homo sapiens
acagccgccccgggcacacaccccgacccgcccccccaggaaggcggccccgcagcagaggcgagccgccaggggaagg

SEQ ID NO: 114816 - RNA, 80 nt, Homo sapiens
gccgcaaacagggcaacccgcagcacgcccagagggagccacacccccggacgggaagcaaaggccccccgcccccccac

SEQ ID NO: 114817 - RNA, 79 nt, Homo sapiens
gcacacaaccacaaacacggacaccacaccgagccgccgaggaggggaagcggagaaccacggacaccgcaacaagacc

SEQ ID NO: 114818 - RNA, 70 nt, Homo sapiens
ccccaccggccgacagccgcgacggcgagcccgggccgcgcccgagcggcaaaagcagcccagcgagacc

SEQ ID NO: 114819 - RNA, 70 nt, Homo sapiens
ggacaggagggcaaggggagcgaggagcaggacacgagcacgggaaggagcccggacacaaacggcaaag

SEQ ID NO: 114820 - RNA, 64 nt, Homo sapiens
ccagggagaaaagcccaaccgcgcaaacaagcagaagggcagacaggcagcaaagaaaggagga

SEQ ID NO: 114821 - RNA, 48 nt, Homo sapiens
gaggaccccagccgcgcccgggagagcaagagccagcgccacaaggga

SEQ ID NO: 114822 - RNA, 84 nt, Homo sapiens
gaggacgagagggacaccagcgacagcagcgccggaggcgaacgaagagcgaggagccccggagcagggagcgggcacggacag

SEQ ID NO: 114823 - RNA, 78 nt, Homo sapiens
gaggagagcaagaaaccggagcggagaaggacccgaaagaaagcagagcagcacaagagaacaacacggaggaaacca

SEQ ID NO: 114824 - RNA, 69 nt, Homo sapiens
gaggaggaggaggcgggggcgcccccccgaggcgcgccacccccggcacccccgaaaagcaaaggccca

SEQ ID NO: 114825 - RNA, 78 nt, Homo sapiens
aacaaagggagacaagcaccagaggacacaagaaaggaacacaccagcgggcacagcacagcagggaggcgagaagag

SEQ ID NO: 114826 - RNA, 76 nt, Homo sapiens
gaaagaaccggaagacagaggcggagggcagcaggaaccgcacaagaggagaccccaacaaacgaggaagacccaa

SEQ ID NO: 114827 - RNA, 69 nt, Homo sapiens
gcgggcaccagcagggccgcaccaccgaggagccccaggcgggaagcaagggcgaccgaccacgcaacc

SEQ ID NO: 114828 - RNA, 72 nt, Homo sapiens
ccaccgcagcggcaggacgaaggagacagaggcgggcgagcggacgaaacagacggccacagagggggaccg

SEQ ID NO: 114829 - RNA, 68 nt, Homo sapiens
gacagagggagccaggcagagaacaaagggcaaaggacacaccgcacaaacggccgcgcaccacacaa

SEQ ID NO: 114830 - RNA, 80 nt, Homo sapiens
cacgcacgagaacccccagcaacccaaccgaccggagaacgaggagccaacaaggaaagagagccccagcacagcacaac

SEQ ID NO: 114831 - RNA, 75 nt, Homo sapiens
gcccgaggcaccccagccccccggccgagaggggaccccgggcaaggacggcacggcccgccgaaggcgagaaag

SEQ ID NO: 114832 - RNA, 71 nt, Homo sapiens
cgccgaagaagcacgaaagccccacccgccgcagcaagcagaggcccgacagagcagccgaggaacccagc

SEQ ID NO: 114833 - RNA, 78 nt, Homo sapiens
caacgggagacaagaagacgccaacgagcggcgcggacggcgcgcggacaccagggggagagagacgcgggaaccgcc

SEQ ID NO: 114834 - RNA, 74 nt, Homo sapiens
accccaaacaccgcggcccagcaccaggaccaagagccagcccagaccccagccagggcaggcacaagagagag

SEQ ID NO: 114835 - RNA, 36 nt, Homo sapiens
gcgacggaacagcgaaacgagaaaaggggaggagag

SEQ ID NO: 114836 - RNA, 72 nt, Homo sapiens
ggaggcccaaagacagaaacagagcacgagcacaaacagcaggaacccacagaaaggaccaagacagcagga

SEQ ID NO: 114837 - RNA, 92 nt, Homo sapiens
ccagagacgcgagcccgccgccgccgccaccacccacccggacacagcaacggggcggcacacaaggagcgaagggcagggagaacgccagg

SEQ ID NO: 114838 - RNA, 74 nt, Homo sapiens
gccggccagggcccagggcagcgcgccgaaccgaaagcgcaaacagccaagcggggggccgcaaggccaggcgc

SEQ ID NO: 114839 - RNA, 79 nt, Homo sapiens
ggaggagcagacagacgccgagaagcagaggccccgaggaaggacgagcccccgcggagacagcccgaagaacccgaac

SEQ ID NO: 114840 - RNA, 86 nt, Homo sapiens
agaaaggggaaccacgagaaggaacagaagaacaagcgggagccggcaggaaagcagcagagcagagcgccagagccgaacgcggc

SEQ ID NO: 114841 - RNA, 84 nt, Homo sapiens
acggcgagcgcggcgggacggcgcggggccgcgcccggagcgccccgccgcgcacaggcaagggcgcagcacgcagacccgcaa

SEQ ID NO: 114842 - RNA, 78 nt, Homo sapiens
acgacccaaaaaagcaaaacacaacccagcacggccaaaaagaagggcggagacagggcgcaaccggccacgcaaccc

SEQ ID NO: 114843 - RNA, 73 nt, Homo sapiens
cagccgccgccaccccgcggccgcacccccgccccaggccaaacgcagaagagcagcacaggaagaacaacac

SEQ ID NO: 114844 - RNA, 88 nt, Homo sapiens
ggcagaagaacaaggaagcggagaggcaagaggaaaccaaggcaccccggagcccggaaagggccacaccagaggcagcaagagaccg

SEQ ID NO: 114845 - RNA, 74 nt, Homo sapiens
ggaccacacagccagaacagcggacgccacacccaagagaagcccggaagggagcggggaaggaagcacagggc

SEQ ID NO: 114846 - RNA, 79 nt, Homo sapiens
agaaccggaccggaggcaggccgcaggagggaagcgcacggaaaccgccccgggaggcacagagcaggagacgccaccc

SEQ ID NO: 114847 - RNA, 72 nt, Homo sapiens
acagaacagaacccaaaagccgacaaccccagaaacagggcggagggggccagggcggaacgaaagcagggg

SEQ ID NO: 114848 - RNA, 53 nt, Homo sapiens
cgcgggcccgggacagacacaggaccggaaaaaacaaaagggagaaggcaaga

SEQ ID NO: 114849 - RNA, 80 nt, Homo sapiens
ggaagagccagaagacaccagaccgcgggggagcccgagaaggaagacacaacagaaggggaagccacagccggccggaa

SEQ ID NO: 114850 - RNA, 73 nt, Homo sapiens
ggaggcccgaggaagagcggggcggcgaaggcgcgccacggagccacccaagcggccgccacccggaacccac

SEQ ID NO: 114851 - RNA, 79 nt, Homo sapiens
acacaacccaggacacaagaaaccccacacggaagaacgaaggggcgagcaccaaagccaaggaagcccagaagaaaga

SEQ ID NO: 114852 - RNA, 48 nt, Homo sapiens
accaaaaggcggcgccaggacaagcccgcacggaccgagaccgggcac

SEQ ID NO: 114853 - RNA, 77 nt, Homo sapiens
acaacccagagcggcgccgagggacagacgcagggcggagaacggaaaagcaccaggaagcagagaggaccgcagaa

SEQ ID NO: 114854 - RNA, 84 nt, Homo sapiens
cggccacccgagaagggagacgacgcgcgggccgcgagcggggcgacccgagcggacaggcaagacaggccaccacgggcacgc

SEQ ID NO: 114855 - RNA, 76 nt, Homo sapiens
ggcaggcaggcgcgagaaggacgcgcagccaccccagccccgcacaagcagcaccgccaagcaacaggcacaaaac

SEQ ID NO: 114856 - RNA, 73 nt, Homo sapiens
aaaccacccgcgcgggcaccacacaagaggcagacaccacccaccaaccaagcacagaaaaaagcccccgcga

SEQ ID NO: 114857 - RNA, 81 nt, Homo sapiens
gaaggggaggacacagaagcccgacggccaggaggcgaagagacgaggaagcccaggagcccgaacacaaaaagacccgac

SEQ ID NO: 114858 - RNA, 53 nt, Homo sapiens
gaagaagcacgaaagccccacccgccgcagcaagcagagcccaaaggggcagg

SEQ ID NO: 114859 - RNA, 80 nt, Homo sapiens
cgcgaccagcgcggccccaccacgaacagacggcggccccgggaccccgcccggcagccaaccaccgggaggcgaaaaga

SEQ ID NO: 114860 - RNA, 47 nt, Homo sapiens
aggccaaaaaggaggagaaccggacgaaggaagaccaaggaagaaca

SEQ ID NO: 114861 - RNA, 69 nt, Homo sapiens
accacacccagaagacgacggcacagcgcacaagaaacccaagcgcgagcgcaccgaaaagaccggagg

SEQ ID NO: 114862 - RNA, 70 nt, Homo sapiens
acccgaaaagcgccaaggaaaaggacgagaacgccgcgacagaaaaggaaaggcaagggcagaaaagagg

SEQ ID NO: 114863 - RNA, 62 nt, Homo sapiens
agaccacaaaacagaagagacagacagcaagggaggccaaaaaacaaaaaggggcgagggag

SEQ ID NO: 114864 - RNA, 77 nt, Homo sapiens
cgcgaccggaccgccccggggaaacccgggcgccgccaagagccgggcagagcggcgggaaaccaccaacaacaccc

SEQ ID NO: 114865 - RNA, 50 nt, Homo sapiens
acagcgcccccgcccgcccccacccgcggcagcggaaagggaacggagcc

SEQ ID NO: 114866 - RNA, 68 nt, Homo sapiens
aaaacccagaacacgggagaaaaaggaaaacgcggaaaaccgacacaacagaagaaggagccccccga

SEQ ID NO: 114867 - RNA, 69 nt, Homo sapiens
ggcgacgaaggacacgcaacccccagcacagacccgggccagccgccggaacccgaacgggcgggcggc

SEQ ID NO: 114868 - RNA, 79 nt, Homo sapiens
cagccgcggccggaggagcccccaggccgagcagggccgccccgaggagagcgacgcccgggcgcgccccggcagagcg

SEQ ID NO: 114869 - RNA, 79 nt, Homo sapiens
aacccaccgcgccgaaagaagaaagccgaacacaaccccagagccggcagcgggccccccgccgcggcccaccaccgga

SEQ ID NO: 114870 - RNA, 74 nt, Homo sapiens
cacgagggagacccacccccaccacccaccgccaagagggagaaaccaaggagccggcacaggcaccaccaagg

SEQ ID NO: 114871 - RNA, 78 nt, Homo sapiens
ccgaggcgcccgagcggcgcagggcacgggggcgccaccgccgaaaagacgaggcgaggaggcgagacacccaaccca

SEQ ID NO: 114872 - RNA, 69 nt, Homo sapiens
aggcgcggagggagcgagccgccccgagaggcacacccagaagccacaggagaagcaagaggcggcccc

SEQ ID NO: 114873 - RNA, 78 nt, Homo sapiens
agggagagaagggagggagacaaggaggcgagcgggaaagccgaagaaaggagggcgagagcacggagcaggggccgg

SEQ ID NO: 114874 - RNA, 59 nt, Homo sapiens
aaaagaacgacagagcaaccaggaaagaagaggacgagagaaacgacaccaagaacgag

SEQ ID NO: 114875 - RNA, 41 nt, Homo sapiens
ggggaacggaacaccaaggcaggagcccagaggaggaggca

SEQ ID NO: 114876 - RNA, 83 nt, Homo sapiens
gcgccgcacccggacggaccgccacgcgcccgggagacgcccgcgccgccggaagcccggggcggcgacggagcacgacccaa

SEQ ID NO: 114877 - RNA, 55 nt, Homo sapiens
ccccccaacaccgcgacacgcagacgaggcgaggaaccaaaggccaccccgccga

SEQ ID NO: 114878 - RNA, 116 nt, Homo sapiens
cagcggcggcgggcgggggggaaggacgggcgggccggcgccggagacgagccggaaaagcccggaaaagcagccaagcggaagacagagccgcaaagagacacgcagaacaagca

SEQ ID NO: 114879 - RNA, 57 nt, Homo sapiens
cgccagcgcaggagagcagcagacaagcggacggggaagacccgccgcgggagacca

SEQ ID NO: 114880 - RNA, 75 nt, Homo sapiens
ggccaaggccaaaagccaaagcggaaccaacaccgagaacaggaagaacggaagaagcagaagggaacgacagga

SEQ ID NO: 114881 - RNA, 82 nt, Homo sapiens
cgcgagcgcagcgcccgggcgacggcggggccgcgcggccagacccgacacgaccgaaaacggagggcccaaggcccacgcg

SEQ ID NO: 114882 - RNA, 73 nt, Homo sapiens
gcgcagccgaaagagacaggcgcacacggaggaaaaccgcaaacgaggaagaaaagggcagacaccgaagccg

SEQ ID NO: 114883 - RNA, 79 nt, Homo sapiens
ggaaagcacaccaccccagccaggagaagagacaggggagacagggggagcgggaggcaccgggaagaggccaaggagg

SEQ ID NO: 114884 - RNA, 88 nt, Homo sapiens
gccggcggggggaggccacaggcgcaagcagaggagaggagaaaaccaggggcggaaggaccgagccagagcaaagaacacgaggcca

SEQ ID NO: 114885 - RNA, 65 nt, Homo sapiens
gaaggacggcgcccacccgccggagcagcccgaggccccagccagcgaaccgagccagcagcacc

SEQ ID NO: 114886 - RNA, 78 nt, Homo sapiens
gggggcggagaccaggagaccccacggagcgggcgacgagcgacccgggagacacgacggggaggggcgaccccgggg

SEQ ID NO: 114887 - RNA, 60 nt, Homo sapiens
gggagaggccgcccaacacgccaccacggcaaggaaagagaaagcgaagccaacaaagaa

SEQ ID NO: 114888 - RNA, 76 nt, Homo sapiens
gagagacaaaaaagcagcccccagccaagcacccccccaccgcccccggcgcccgcaccccgggccccgcggcgaa

SEQ ID NO: 114889 - RNA, 75 nt, Homo sapiens
gaggaaacacccaggacacggccacaacaccaagaggacaaggcacgaggcgcggcgaccaccacagcagagccc

SEQ ID NO: 114890 - RNA, 66 nt, Homo sapiens
gggacgccagcgcgggaggcgcccggaccaccaagcaggcgaaccccaggagcgaccgaaaaaggg

SEQ ID NO: 114891 - RNA, 90 nt, Homo sapiens
cggcgacagccccaaggcaacaagcccacccgaaaccacaaggccgacagcaacagaagcgagcagccccgaacacgaaccaaccaggca

SEQ ID NO: 114892 - RNA, 55 nt, Homo sapiens
aagaagagacagagaggagcaaacaagagaccacaccgcgccagaccccccagga

SEQ ID NO: 114893 - RNA, 73 nt, Homo sapiens
cgaacggggggagggagcaggcccggggagggggaccgcgaggagcgcagccgcaagcgacacagcaaacaaa

SEQ ID NO: 114894 - RNA, 77 nt, Homo sapiens
gcccagccagagacagccacaaagggaagcaagagaaaaagaacaacgcggcagacccgcagaccaacgaaaaccac

SEQ ID NO: 114895 - RNA, 73 nt, Homo sapiens
cgccggcccgcggaaaggccaaagcccagccccaggcacagaccccagcgaggcggaacgcgacaaacagcga

SEQ ID NO: 114896 - RNA, 56 nt, Homo sapiens
aagacggagagcccagagacacgaaaaccaaggagaggacacgccagcagggggaa

SEQ ID NO: 114897 - RNA, 50 nt, Homo sapiens
gggcccccagcgagaccgagccgcacccgggagaaggacggcagaaaacg

SEQ ID NO: 114898 - RNA, 52 nt, Homo sapiens
ccgaccccacaggaagggaagcacagcgacccggcggagaacggaaaagcac

SEQ ID NO: 114899 - RNA, 94 nt, Homo sapiens
cgacccaaggaaacgcggcgacccgaggaggaaggcccgcgggcccaaggaccgcgagagggaaaagaggacgaggcgcgaaaaggcaaaggca

SEQ ID NO: 114900 - RNA, 72 nt, Homo sapiens
aaagaagaagcaacgacaaaccagcagagaggcggaccccgcgggcgcgcggcccgaacccagcgagagggg

SEQ ID NO: 114901 - RNA, 84 nt, Homo sapiens
ggagcagacgccacgcggaggagggcaccccagccgccagacaccgccccgagggccagaacacaaagcggaaccggaagaaaa

SEQ ID NO: 114902 - RNA, 75 nt, Homo sapiens
cgagccacaagcggaccgggaggggaaacgccgacacgggagggaaacaggcacagaggacagagacacaacgag

SEQ ID NO: 114903 - RNA, 56 nt, Homo sapiens
cgggagaacaccccacagggaagagggcacaccgaaccacccggggcagaagcgcc

SEQ ID NO: 114904 - RNA, 116 nt, Homo sapiens
ccaccgagcgacacaacacaaagaaccaccaaagggcaagggagcagagcccagaacagcacacaccaagagaagaaaaagcaggaagaacgcacgaagacaaaagaagccagcac

SEQ ID NO: 114905 - RNA, 77 nt, Homo sapiens
caaagcgcccggaccgaagaaaccaaaacgggccaggaaggacaacagcaggaaaagcccggaaaagcagccaagcg

SEQ ID NO: 114906 - RNA, 70 nt, Homo sapiens
accagagcgcaggaaaacagaagaacagcacaagcagaaggagacgcacgaagcagaacaaaaaaaaaag

SEQ ID NO: 114907 - RNA, 42 nt, Homo sapiens
gcccccaaaagcgggacacagaggagacccaccaaaaaaaaa

SEQ ID NO: 114908 - RNA, 76 nt, Homo sapiens
gagcgaaggcgagagagcacggaccaagcgggccacagcacccccgagagggagaaaacgcaggccacaaagacag

SEQ ID NO: 114909 - RNA, 78 nt, Homo sapiens
aaagaagagaagcagaaaaccagaagcacaaggacagagcacccaccacaggaggaaaccaccccacccaacccccga

SEQ ID NO: 114910 - RNA, 73 nt, Homo sapiens
gcaccaaagggaggcccagaccacaacacaaaaccaccaccggggacgggacgagacccacagcagacagagg

SEQ ID NO: 114911 - RNA, 41 nt, Homo sapiens
agccaccaggagaagcaaaagagaaccacgaggccgaaagc

SEQ ID NO: 114912 - RNA, 76 nt, Homo sapiens
gcccaacaaccaacacacaccggaaaaggcgacccacagggagaagacagggacgaaggggagaaggcacagagaa

SEQ ID NO: 114913 - RNA, 83 nt, Homo sapiens
accccaccggcgcgcgcggcggcccgcgcacaggcgaggaaaaccaccacacaggggaaacacccagacaacacacacaacag

SEQ ID NO: 114914 - RNA, 75 nt, Homo sapiens
ccaggccagacccgaaggccaggagacccgaccccaagggagaacggcagaaccaagggaccaaagcgggacggc

SEQ ID NO: 114915 - RNA, 45 nt, Homo sapiens
gcccccggccgcggcgggacccgagcacaaacggcagaacgaagc

SEQ ID NO: 114916 - RNA, 75 nt, Homo sapiens
gacgcagaaagggcagacacaggcacaccaagggaccgggaaacaggggagaggcccagcaagaggaaacagcgc

SEQ ID NO: 114917 - RNA, 75 nt, Homo sapiens
caccaaaggcccaacccaaacgagcagcggacgccgggcgagcagaccaagcaaggaaccagcgagcaaacgcaa

SEQ ID NO: 114918 - RNA, 81 nt, Homo sapiens
agccccccggaggaggagcccgaaaccaccccgacgcccagcccaaggacgaccccaaaccaggccggccaacaaaagacc

SEQ ID NO: 114919 - RNA, 71 nt, Homo sapiens
gaacaagaacagaaagggaacacagcagagggggaaaaaaacagggcggagaacggaaaagcaccaggaag

SEQ ID NO: 114920 - RNA, 76 nt, Homo sapiens
aggcccaagacccacaacaaaagaacggccgagcgaccaggagaggagcccccgcccgaagaccggggagggcccc

SEQ ID NO: 114921 - RNA, 79 nt, Homo sapiens
cggcaggcgcaacagagcgccggcgggaggcaccgccccaacccccccccgcccggagaaccccgcggaacgagcagcg

SEQ ID NO: 114922 - RNA, 70 nt, Homo sapiens
cgcagaagaccgcaggggaaaaccaaagaccgacaagaccccggggacgagagccccggcacaaacggac

SEQ ID NO: 114923 - RNA, 37 nt, Homo sapiens
cccggaagaccgccgccggcaggcaggggcagaaggc

SEQ ID NO: 114924 - RNA, 68 nt, Homo sapiens
agaaccaggcacggcaggaggacacggaaaaagagcggacaggaaggaaaccgaggcggcagccaaac

SEQ ID NO: 114925 - RNA, 77 nt, Homo sapiens
gccacccgcccacgagcggaagaaccagcagaagaaggcggaggggggggggacacggagacgggaaggcgcggaac

SEQ ID NO: 114926 - RNA, 84 nt, Homo sapiens
cagagcagcaggacgaccgaacgccacgaacgggaagcgggcagcacaaaacaaggccggacgaaaagcgccggcccaggcgga

SEQ ID NO: 114927 - RNA, 75 nt, Homo sapiens
ccacgggaacaagaggggacagaaagggcccccagagccgacggcccccaccccccacaagacgcggcccacggg

SEQ ID NO: 114928 - RNA, 84 nt, Homo sapiens
gggcgccgcacggcagggccggggcccgacccggaggccaggcacgcgcagaggaggcccggggccccaggagcacagcaacgc

SEQ ID NO: 114929 - RNA, 41 nt, Homo sapiens
cggaaggaaacccagacacggacgaaagaggagagaacgac

SEQ ID NO: 114930 - RNA, 77 nt, Homo sapiens
aacagcaacggaggcgggaccggaacaggcacaccccacacaagcacgccaagaaccgcagcaaagccggcggagcg

SEQ ID NO: 114931 - RNA, 85 nt, Homo sapiens
gacagccgaacggaacggagagcagccaagcagcacgagagacaaggaggggcgcgccgcccacccccaaagccacacgccgccc

SEQ ID NO: 114932 - RNA, 84 nt, Homo sapiens
gcgcgcacccccggacagaaaaacaaccaccagcgagcaaaaaggcaaagaccaagaccaccaagaagcgccccagcggcaaca

SEQ ID NO: 114933 - RNA, 77 nt, Homo sapiens
ccgagggcacacaccaggcaaggagacagacccggggaccgaacgcaagcgcacccccccaccgcccccggcgcccg

SEQ ID NO: 114934 - RNA, 80 nt, Homo sapiens
ggcaccaacacgcggagcggaagacggcaacccagggcgaccggcgcccaggagcgcaggccggggcccgggaggacccc

SEQ ID NO: 114935 - RNA, 73 nt, Homo sapiens
caagacagggcacaagggcaacggagaaaccggcaccgccaagccaaggaagaacggaccccacaccaacccg

SEQ ID NO: 114936 - RNA, 55 nt, Homo sapiens
gaacaacacccaaaaagccagaacccagggacgcgagagcccacgaagagcgacg

SEQ ID NO: 114937 - RNA, 81 nt, Homo sapiens
ggggaaagaccacaggcggagcaccccagagcggcacgcagaggggagcgaagaagggagccacccaaaacacgcggaaac

SEQ ID NO: 114938 - RNA, 108 nt, Homo sapiens
cagaagccccacgccggcagacccaagccggccgcaacggccaaagaagagaccggagagaaccagcagagaaaagaaggagaaggaaaagcccaacgccaagaaacc

SEQ ID NO: 114939 - RNA, 83 nt, Homo sapiens
agcgaagcgagggcgaagcacgacacagaaggggaggggagggaaaggcccaggaaaaaggccaagaggcaaaggagaaccag

SEQ ID NO: 114940 - RNA, 54 nt, Homo sapiens
agaaagggagggcacaaaaccagagaaagaccaccaaacgcacaagggaaacgg

SEQ ID NO: 114941 - RNA, 66 nt, Homo sapiens
aggaacaagccccagcgcagcgggcccgggccagccgcagaaccaacagagaaagaggacgggggc

SEQ ID NO: 114942 - RNA, 73 nt, Homo sapiens
aaacaccaaagggcgagacacaccgcacccaaccaccaccaagggaaccaaacacggaaccagaaaagcagga

SEQ ID NO: 114943 - RNA, 79 nt, Homo sapiens
ccaaaggggaggcaccacaagaacggcgacacaacaagccgaccccgcccagacggagcaccgaaccacggggagcagc

SEQ ID NO: 114944 - RNA, 76 nt, Homo sapiens
acaaaagcaccgggaaagccaaagcaaggggaaggaacaaagcagagaaaccaaaaggccagacgaacacgagagg

SEQ ID NO: 114945 - RNA, 76 nt, Homo sapiens
ccagaggacaccccggaggccgcggcacgagaagagaagcccagagcaaaacaccccaaaccagaccaccgacgcc

SEQ ID NO: 114946 - RNA, 82 nt, Homo sapiens
caaaagggaacaagggcaccaccaacaagcgcagagaaacagaagagcgccaaccggggaaagcaggggagagaaggcacag

SEQ ID NO: 114947 - RNA, 78 nt, Homo sapiens
ccagggacgcagggggcagggcagaggacagggggaaacggccgggaagacaaccagaccccagaccgagaaggaggg

SEQ ID NO: 114948 - RNA, 74 nt, Homo sapiens
cagagaggaaccccaagccaagcccaagacaaaaacgcacgaaacaacccaggcaaaagagagcaagaaaaacc

SEQ ID NO: 114949 - RNA, 81 nt, Homo sapiens
gacgaggccacagcccaggcacaggaaaggcggggagccaggaacgggggacaaggagaggcacacacacagaaccacacc

SEQ ID NO: 114950 - RNA, 56 nt, Homo sapiens
gacaggaggagacaggcgagagaggaggacacgaccgacccaagcaaaggcaccaa

SEQ ID NO: 114951 - RNA, 66 nt, Homo sapiens
gacaaacaaccaacccgaccgcccccagaggccgggccgcacccccgagaagaaacgaggccggaa

SEQ ID NO: 114952 - RNA, 55 nt, Homo sapiens
gacgcagggcgcccccgaaccacggaaacaacaggcgagaccggagaggaccgga

SEQ ID NO: 114953 - RNA, 78 nt, Homo sapiens
cggaagagagccccaggccagaagagagacccgacgacggaccgcacacggagaaggaagcagacgggcaccggagcc

SEQ ID NO: 114954 - RNA, 78 nt, Homo sapiens
gagacacccgcaaacaggagccagagaaggaaagaccacagcaagaccacgcccccagccgggggaccaggccgaacg

SEQ ID NO: 114955 - RNA, 83 nt, Homo sapiens
aaggggacagcaaccgacaagcaaggagggagcaaaggacggcacgggaaaaacgccaaaaggggacccagcagaaccaagcg

SEQ ID NO: 114956 - RNA, 68 nt, Homo sapiens
aagaagcagccaagaaaagaccaaaaaccagagaccgcgccagcgccacgacggagcgccgcgcccag

SEQ ID NO: 114957 - RNA, 73 nt, Homo sapiens
cagaccgcaggcgcaaggccaggcgacccgacgggccaccgggcagaagacccgagcggcccgagacaagggg

SEQ ID NO: 114958 - RNA, 68 nt, Homo sapiens
gccagccgagccggccaggaccagggggaacccgcagcagcacagacccagacaagcaaccaagggca

SEQ ID NO: 114959 - RNA, 71 nt, Homo sapiens
ggaccaagaaccaggccaaagccacccccaaaggcagaggaagaacgagcagggaaccaagacaaaagcga

SEQ ID NO: 114960 - RNA, 77 nt, Homo sapiens
aagcgaaaccaaccagaagccgagaaggggaagaggaccacacgcccagaggaccgagaagaacgagaggcacaaga

SEQ ID NO: 114961 - RNA, 68 nt, Homo sapiens
cacagaaaaaaggaggagaaaaacgggacaggcgggagcgaccccggcaggaaggcgacccaggagag

SEQ ID NO: 114962 - RNA, 78 nt, Homo sapiens
cagcaaggggggccacgaggaacaaagacagcccaccaggaagagcgaaaaacagccaaaggccgagacacagggcag

SEQ ID NO: 114963 - RNA, 72 nt, Homo sapiens
caggaccacaggaagaaagaggggacaacggaaaagcaggagaagcacccaccagcggggacgcggcaaggg

SEQ ID NO: 114964 - RNA, 90 nt, Homo sapiens
gcagaacgggcagagaccgcaggaagaagcgaagaggcaaaaacaaccaggcagagagacaagcaggagcgaagcaggacaacaagcggg

SEQ ID NO: 114965 - RNA, 79 nt, Homo sapiens
aagacaccgaagggccacccaggaaggaagaagaaagaagaaaccgcacagcagcggcggaggcggaccggggggcccg

SEQ ID NO: 114966 - RNA, 74 nt, Homo sapiens
ccacacagcaggcacaggggagaagcacaccccaaagcgagacaaaagacgcacccaccaacgaccagacccca

SEQ ID NO: 114967 - RNA, 73 nt, Homo sapiens
accccaaagaaggggagaaaagaaaaaaccagaacagagagaagcggccccaccagaacagagccagagagcg

SEQ ID NO: 114968 - RNA, 91 nt, Homo sapiens
ccggggccgagaagccgcgccgggaaccgaaaagacgcaagagccagagccccacagccagaggggagaaaagcaagcacagacgaagccc

SEQ ID NO: 114969 - RNA, 82 nt, Homo sapiens
ggaaaacacacagaaaagacgggggaaaagaagcaacggaccggcagcaggacggcagggcgggggaaggagcacacgcagg

SEQ ID NO: 114970 - RNA, 82 nt, Homo sapiens
ccgccgggacaagcccgcagaggaggcggcaggacagcccccagacacgagaggcgagggacgacagagcaagcggcagagg

SEQ ID NO: 114971 - RNA, 84 nt, Homo sapiens
cagaccagaaacggaggagcccgccgaagcagacacggagaccagaaagccgacaaaggaagaagaacagacaaaaggcagcac

SEQ ID NO: 114972 - RNA, 40 nt, Homo sapiens
gcaagaaagggaagggcagaagcccccggggagagacaga

SEQ ID NO: 114973 - RNA, 81 nt, Homo sapiens
ccccacggcacaacacacccgcaaggccagacagaaaagggagccaggaccccagagaggagacccagcgcccgccgcacc

SEQ ID NO: 114974 - RNA, 61 nt, Homo sapiens
cgcgcgccggccaggagcacaccagggacaagcaaggggccaaggagccaaggaggaaacc

SEQ ID NO: 114975 - RNA, 86 nt, Homo sapiens
aaaagcagcccaacgaaaaccgcgcgcagaacagccgggcacacagaaaaagcccaaagaggggagaaaggaaaaggagagacaaa

SEQ ID NO: 114976 - RNA, 70 nt, Homo sapiens
ggacaggcacgggggacggcagcgcgcaggcaagcaggccggcgcacccaccagggccgcccccgagcgg

SEQ ID NO: 114977 - RNA, 73 nt, Homo sapiens
gaaacggaaccgggaggcgacgcacacgagcggaggcgaaggacgaaaaggcccaggccggcggaaaacccac

SEQ ID NO: 114978 - RNA, 79 nt, Homo sapiens
cgccaagccgccgcaccccggccaggcagggacagcagggacagccgggagagcaggagagacccgcgagggaagccgg

SEQ ID NO: 114979 - RNA, 66 nt, Homo sapiens
cagagaggggagccggcgaggacaaaaccgaaggaggaggaggaaggaccgagcgcaggaaccagg

SEQ ID NO: 114980 - RNA, 72 nt, Homo sapiens
agacaaagcacaaccagaaaaaccaggagagacaccagaacagggagaagagaagaccagagaaagaacaac

SEQ ID NO: 114981 - RNA, 71 nt, Homo sapiens
ccaaaagagcagggaaggccaaggaagcacgggaagaacagaaaagagaagcaccacggaaaccaccgcga

SEQ ID NO: 114982 - RNA, 81 nt, Homo sapiens
agaacgccacgcgggccggcgaaagcggaaagaccacagcaagaccacgcccccagccgggggaccaggccgaacgacccg

SEQ ID NO: 114983 - RNA, 72 nt, Homo sapiens
cagcgaaacgcagcagagcgaagcgagggagacaacagccacacaaagcagcaacaggagcagggaagaaaa

SEQ ID NO: 114984 - RNA, 71 nt, Homo sapiens
ccaggaagcagaagaagcgaggagaagaagaggaaaggcccgagccaaaagacccagagaaaggagcacga

SEQ ID NO: 114985 - RNA, 55 nt, Homo sapiens
gaaaaagcacaagcgaagaccgaagcccaaagcagggacagaaggagaaagggca

SEQ ID NO: 114986 - RNA, 92 nt, Homo sapiens
ccccaccgccggcgcgggaaacgggcgaagcgacgagccgcgaggagggaaagcaggcaggagggagagcgccgaagaaccaccccccgccc

SEQ ID NO: 114987 - RNA, 82 nt, Homo sapiens
agcccaaaccccaggccaagcaaccaccagcagcccccagagcggaacacaggagaggcacacaaacgcagccgagaccgcg

SEQ ID NO: 114988 - RNA, 74 nt, Homo sapiens
ccaacggaacaggaaagcgaagacggaaaaagaaaccaccggaacgcaagcacaggaccagaaacgaaaggcag

SEQ ID NO: 114989 - RNA, 80 nt, Homo sapiens
ccgacagcgcggaacggggcagccgcagaccccaccacgacagcacgcgccaggcgcagcagcaccccccgacggcacac

SEQ ID NO: 114990 - RNA, 63 nt, Homo sapiens
agcaggagaagcgagcccggacagaccaaccgcaggcgcaaaggagacgaagcccaccacaaa

SEQ ID NO: 114991 - RNA, 76 nt, Homo sapiens
gaagcggcagaagaacaccgaacaccagccgaaagggcccaccgcaaggacggagaagggaagaagcaaagcacac

SEQ ID NO: 114992 - RNA, 71 nt, Homo sapiens
gacggaaacgagcgccggcacgcaggcccggcgcggaaagaggaggcgacggggacgaccagcgggagccg

SEQ ID NO: 114993 - RNA, 54 nt, Homo sapiens
gaacacacggaacggcagggaaaaggggcgaggccggccgaccgacaagaagac

SEQ ID NO: 114994 - RNA, 67 nt, Homo sapiens
cacaccagcgcgcagacccggccgccccagagacgaagacaggggaccccggagaagagcacggcga

SEQ ID NO: 114995 - RNA, 56 nt, Homo sapiens
ccgaccccaggccccccacagaaaaggaaagagccaacacacagcacaacagagag

SEQ ID NO: 114996 - RNA, 74 nt, Homo sapiens
agccacagccgcacggacccccagaggcgagaggcccgggggccaagccgaccacaaagacccccggcgaaaga

SEQ ID NO: 114997 - RNA, 76 nt, Homo sapiens
ccgccggagccccgcagacagggcaggccagaagggagcgcggacggagcaaagggaaccaggggacaggcggaga

SEQ ID NO: 114998 - RNA, 60 nt, Homo sapiens
ccaccacccaggccccgacgccccgagcagggccaggccgagggcccgcccggccccagg

SEQ ID NO: 114999 - RNA, 79 nt, Homo sapiens
gggcgccaggacggggaggacgacgaggagaggaggagagaccgcccacaccaccacgcaaggccccgagcgcccaacc

SEQ ID NO: 115000 - RNA, 74 nt, Homo sapiens
cggcggcggcagcggggccgggccggagcgccacagggaaaaacaaggggggaaaaccagcgccaaaggacaag

SEQ ID NO: 115001 - RNA, 56 nt, Homo sapiens
ggcagcccagaaaccaacgagagacacacaaaaggaacaaagagcagaggccagca

SEQ ID NO: 115002 - RNA, 72 nt, Homo sapiens
gaggaggagagaccaagaacaacacgacacgccgccggaagcaacggaaaggcagagggggcgagggaggaa

SEQ ID NO: 115003 - RNA, 97 nt, Homo sapiens
cccgccgcgcaccgacccgacgcgccggcccacgcgcggccaaggcaaaggagaaagccgagagagacgacaggagggagccagagccagaaaaaag

SEQ ID NO: 115004 - RNA, 73 nt, Homo sapiens
cccaccgcaagaccgagccgccgagcgacaacccgcgccccgagggccaagccgacgccagcgggcgccaccc

SEQ ID NO: 115005 - RNA, 69 nt, Homo sapiens
ggcacccgacgcaacgcggccacgggaagagagcgccccaaaccccgaggacaccaaccaacaaacggc

SEQ ID NO: 115006 - RNA, 68 nt, Homo sapiens
ggaacgcgcgccgcacagacgcggagacaaacagcggggcccgagccccaggagagccgaggacccac

SEQ ID NO: 115007 - RNA, 82 nt, Homo sapiens
cgaggagccgccgcgccccgcgcgcgggaagcagcaccaagcacggccaacgccggcacaggacagaaccaaggagagacac

SEQ ID NO: 115008 - RNA, 87 nt, Homo sapiens
aagagccacagcagaaggagaggcgcaaaagaaggaggaagaggagcgaaggcggcggaagaggaagaaagagaacgcgcaaaagga

SEQ ID NO: 115009 - RNA, 68 nt, Homo sapiens
gacgcagggcgcccccggccacgccgggccagaaaaggggaagaaagacaacacaccccgcaaagaca

SEQ ID NO: 115010 - RNA, 77 nt, Homo sapiens
cggcagcaaggcgagaagaaagaggccagacaggaggggaccagaagaagaccgacagccaacagcgggcgccaaca

SEQ ID NO: 115011 - RNA, 73 nt, Homo sapiens
gaaaaaagggacccacccagggcaaaacaaccgaaccccgcacagaacagccacgggcaacagagcaggacca

SEQ ID NO: 115012 - RNA, 84 nt, Homo sapiens
gggcccgagggcggggaccggcggcgcggaggagcgaggcagcgacaggacgggaacggcaacacagagacacacggggcacac

SEQ ID NO: 115013 - RNA, 65 nt, Homo sapiens
ccccgagggcgggacacagcggacgcccgggacgggaggagccaaggcccgagagacacgcgggg

SEQ ID NO: 115014 - RNA, 35 nt, Homo sapiens
gcaaagaggccgagaacggcagccaggcagcccag

SEQ ID NO: 115015 - RNA, 67 nt, Homo sapiens
aggccacgacccaccccgaagagcaacggaaccagcgccgaggcggcccagagcacccgaccagcaa

SEQ ID NO: 115016 - RNA, 74 nt, Homo sapiens
cacaggacagcagccccccccagacccccaaccagcaccagacagcgaaaaagaggacccaaaaaagagagaaa

SEQ ID NO: 115017 - RNA, 55 nt, Homo sapiens
cggcgaccgagagcccggaccagcagagggccgacgacacggccgagaccccgac

SEQ ID NO: 115018 - RNA, 80 nt, Homo sapiens
cgaagaaggccagcgggccaggaagcgcaccaggagacaagagagggcggcagaaggaacaccgagaaaccgcacaccgg

SEQ ID NO: 115019 - RNA, 76 nt, Homo sapiens
gggaccgcccgggacaacagcgcggggcacaggaaagggagagaggagaaccaggcagcccgggccagccgcggag

SEQ ID NO: 115020 - RNA, 83 nt, Homo sapiens
acgcccacgcgcacagcgcccccagccgccgccccccgcagcagcagcagcgagaagcggacaccagaaagacggaaccagga

SEQ ID NO: 115021 - RNA, 85 nt, Homo sapiens
gaccacgagcgccccccccggcggagaccgaggggagacagcagcaccagcggggcagagaccccagacacaagccgggaaggga

SEQ ID NO: 115022 - RNA, 71 nt, Homo sapiens
cccagcaaaccgcgggagccccagcaaccgggcgaaaccgagcaaccaaaaaggggaaaacagcaaccaaa

SEQ ID NO: 115023 - RNA, 74 nt, Homo sapiens
aagcggacggcccaccgccaggggcgcgcgggcgcggacccaacgggagcggcgccggcgcggagcggcacgcc

SEQ ID NO: 115024 - RNA, 81 nt, Homo sapiens
gaacgcgcgcagaaccggcgcaggaccgggcaggagcgaagccagccagccggaccacggaggcaggaggacaggaagaac

SEQ ID NO: 115025 - RNA, 63 nt, Homo sapiens
gccacgcccccgcaaaggcgcaagacaaggcccgcgggccaagacaaacaccacacaagaccc

SEQ ID NO: 115026 - RNA, 75 nt, Homo sapiens
cagcagggggcgaccggagcaaggagcggcacaggcccccaaccgcgggcccgaagagggcggcaaggaggacga

SEQ ID NO: 115027 - RNA, 82 nt, Homo sapiens
  misc_feature (41)..(82): n is a, c, g, or u
gcaaaggagcgcccccccaggagacgcgggccccccaaggnnnnnnnnnnnnnnnnnnnnnnnnnnnnnnnnnnnnnnnnnn

SEQ ID NO: 115028 - RNA, 71 nt, Homo sapiens
ggcaaaaccccaggagcagaagccgcaaccgcaggaccaaacgcagcggaaacccagacagcgcacacacc

SEQ ID NO: 115029 - RNA, 72 nt, Homo sapiens
gagcgagggggggcgcgccggaaaccggagcgcgcagcaggccgccaggcacagagaaggcaaacgggaggg

SEQ ID NO: 115030 - RNA, 75 nt, Homo sapiens
gaggacggagccagccagcacccccccagcggagacccccgagccagagacagaagaagcacaagcgcaacggaa

SEQ ID NO: 115031 - RNA, 88 nt, Homo sapiens
cacaacacaccaaaaagagaacaaaagaagacggagcgcgacggcggaggaaggaaagggagagaaaagaggccggagggagccagcg

SEQ ID NO: 115032 - RNA, 56 nt, Homo sapiens
gcggacagacgggcagcgggagggggaagacagagaagaccacacaaccgaagggg

SEQ ID NO: 115033 - RNA, 66 nt, Homo sapiens
cggacaggcacagcggaaaaagggaggagagagaacacagaaaccggccggggaggcaagcagggg

SEQ ID NO: 115034 - RNA, 73 nt, Homo sapiens
acaccgacaaaccgaccgaccaggagccacagcaacaaggacgacggacacccaccaaaaccagaaccgaaca

SEQ ID NO: 115035 - RNA, 76 nt, Homo sapiens
gaacaaccggccggacccgcaaggcacggcagacacaccgaccagaggaaggcgaacccgccacgcagcaggagca

SEQ ID NO: 115036 - RNA, 86 nt, Homo sapiens
cggcgaggccaccgaggcgaggagaggagagccagacccacggcagggcaaccccaccgcggaaggcaggcacacagacgagaaca

SEQ ID NO: 115037 - RNA, 45 nt, Homo sapiens
agccagccagacggcggggagacacagaggaacagaagacaccac

SEQ ID NO: 115038 - RNA, 75 nt, Homo sapiens
caccacagagcaaaaaagaaagaacagaggcccggaaacacaagaggaagaggaaggggcgagaagagcaaaagc

SEQ ID NO: 115039 - RNA, 81 nt, Homo sapiens
gaggacacccacccggaccggcccggcgagagacacccacagaaggaggaacagcacgaaaccccgcaacccgcagacaca

SEQ ID NO: 115040 - RNA, 76 nt, Homo sapiens
cgacacaggcaaaagacagccgacacggagcagagcgaacacaccaccagccaagcacggccaaagagcacggcca

SEQ ID NO: 115041 - RNA, 77 nt, Homo sapiens
cagccgaccacggagggcgaaagagcaaggccggcggccccgggagcgagacaagaggagccccaccaccgacgaaa

SEQ ID NO: 115042 - RNA, 76 nt, Homo sapiens
aaaacaggaccagagggagacaggagggccggaacgagaagaaccaagagaggcacaagaacaacaaagaaacaga

SEQ ID NO: 115043 - RNA, 76 nt, Homo sapiens
ccccccaccccgacgaccggaccgaggaggcagcgcggggcagcgcgagccgggaagagagggccgaggcagacaa

SEQ ID NO: 115044 - RNA, 50 nt, Homo sapiens
gaggggcagccacccccgggggacccagaacaagaagaacaagaggacag

SEQ ID NO: 115045 - RNA, 78 nt, Homo sapiens
ccccgcgccgggagcgaggggggccgggccccaacaacacacaggccagccagcagcagaagccggaagacaccacca

SEQ ID NO: 115046 - RNA, 64 nt, Homo sapiens
cagaagaggcgccaggacgaaggcccacgggcaaggccaagagcccagggcaaaaacagaccag

SEQ ID NO: 115047 - RNA, 78 nt, Homo sapiens
aaaaaaaccgcagggcggagagaccaggcacgggaggggagagagaaccggcacaccggagcaacccagaacacagcg

SEQ ID NO: 115048 - RNA, 78 nt, Homo sapiens
gaccagacccgacgaaggaggcggcagaaggaccgcagaccagaacgagcacgcccagaccgcagagcacaggaaggg

SEQ ID NO: 115049 - RNA, 83 nt, Homo sapiens
gcggcccacccgaagcgggcgacgcagggcccacagcaggaggcaaagggaccccaagaaaccaaagggcaagagccgcagcc

SEQ ID NO: 115050 - RNA, 77 nt, Homo sapiens
cacgggacggcccaaccggagacagcaccaggcaggacccgggccgcgcgagccggaagcccccaccacggccgaag

SEQ ID NO: 115051 - RNA, 69 nt, Homo sapiens
ccgcaccacgaaccagaccaagcggggcgaaacaggacagcaagaacgcggacggaacaaagaaaaccc

SEQ ID NO: 115052 - RNA, 79 nt, Homo sapiens
cggacccgagccgcaagcagcgcggccaagccacgccaacggaggagcggccgcagaagggcgcggcccgcccgcccgg

SEQ ID NO: 115053 - RNA, 81 nt, Homo sapiens
ccaggaggcggccgccgcagcccaggcgcgggggcgacgacagggagaacacaaaacaggccaaaagggcagaaaacaaaa

SEQ ID NO: 115054 - RNA, 68 nt, Homo sapiens
gagaaacagccagcaaaagaagagcagcgggcagcaaccagcgggcgcaagaagaacggacagaccac

SEQ ID NO: 115055 - RNA, 74 nt, Homo sapiens
gccggcgaggaccgggggggagggggcccggcaggacgaggacgaaggccgagggccaacggccgccaccaaaa

SEQ ID NO: 115056 - RNA, 76 nt, Homo sapiens
ggcccggcgcccgggcccgccccggaggagacgaccaccggaaacaggcgaacagaacaagaaccaaagaaaacaa

SEQ ID NO: 115057 - RNA, 72 nt, Homo sapiens
acaacagaagaggagcacggaggagccgaccgcagcgagggaccagcggggaggaggaagaccagaggaagc

SEQ ID NO: 115058 - RNA, 69 nt, Homo sapiens
gaccccggaacgggcgggcggcccccgcagggaaaacagaaccagaggcagggccaggacaccggagga

SEQ ID NO: 115059 - RNA, 75 nt, Homo sapiens
ggcggaggacaagcaggcaaagcgaggagaaaagagccggaagcaaaccccaggaccaaagcaaacacggacgac

SEQ ID NO: 115060 - RNA, 120 nt, Homo sapiens
gacagcgcacgggcaagaagaaccaaacacaccaggcacaggagagagcaggacggcaggcggcagcaggaacgaacaaacaccccagagagcccaggccgagacgccccgacgccacca

SEQ ID NO: 115061 - RNA, 54 nt, Homo sapiens
ccccagcgaagaccggagagaggaaggacgcgagaaggaagaagaacacaacag

SEQ ID NO: 115062 - RNA, 72 nt, Homo sapiens
ccagaggaagaagagagacaccacgagacaaaagcaacaagagacgaaagcgcgcgcgcagggagcagcacc

SEQ ID NO: 115063 - RNA, 67 nt, Homo sapiens
aggagcggcaggagcaagccaagaaagaaccgaagacagaaacgccaaaggagccgaacccaaaaag

SEQ ID NO: 115064 - RNA, 83 nt, Homo sapiens
ccaggaccagaggccgccacaaccgccagacaaccggagccacgccccacgaccgccagacggcaagaagaagcgaaaaccgc

SEQ ID NO: 115065 - RNA, 76 nt, Homo sapiens
acaaacgccaagggacggaccacgcccgcaccaggcaaaagcagaccggaaaacccaccggcaagaccacacccga

SEQ ID NO: 115066 - RNA, 70 nt, Homo sapiens
gccaagaggcggccaaggggacgagcaaaggaagcgcgaacagcagcgcagggacagacagccagaggga

SEQ ID NO: 115067 - RNA, 85 nt, Homo sapiens
gggaaaagcgaggcaaggcaggcggcgagaagaagaaaagaagagagcgaggagcggcaggagcaagccaagaaagaaccgaaga

SEQ ID NO: 115068 - RNA, 81 nt, Homo sapiens
caaaggggaaacagcagagaccccagacgccaccacaacccccagacgcaagccaagcaaaacagagagaacccaccaacc

SEQ ID NO: 115069 - RNA, 72 nt, Homo sapiens
gagggaaccggcagggcaagcggcgacacacgacggacagacgacaccaccccaggcaaggagcaaaaggcc

SEQ ID NO: 115070 - RNA, 85 nt, Homo sapiens
ggaggagaagggcagagacggagaagccgaagagggacacagggacaagagaagagagagagggaccaaaggaagaggaacagcg

SEQ ID NO: 115071 - RNA, 57 nt, Homo sapiens
gaccgagagcggaccgagagcgcgaaacgcacgagaaggccacgggagacagccagc

SEQ ID NO: 115072 - RNA, 74 nt, Homo sapiens
ccgcccccgcgccccgcaccgcggcaaagagaggacgcagcgagaaaggacacccccggcaccgaggaaaacaa

SEQ ID NO: 115073 - RNA, 82 nt, Homo sapiens
aaccccgcccgcagcgacacaccaagcggaggggacgccacgcaacgccgcagccgcgaacgcggccgggaggcagagcgag

SEQ ID NO: 115074 - RNA, 74 nt, Homo sapiens
gacggccaacgccaagaggggagcgcccccagcgcagggagacgagcaaagaacgggacacggagacggacaaa

SEQ ID NO: 115075 - RNA, 77 nt, Homo sapiens
agggcgggaggaacagacacgcggaggagcacagacacacagacgacaccggcagcaacagcaaccgggagacccca

SEQ ID NO: 115076 - RNA, 77 nt, Homo sapiens
ggacaccggaagcgggaaaggagggagagcacggcgcaccaacggcagagaagcacagcacaagcgaggagccacca

SEQ ID NO: 115077 - RNA, 71 nt, Homo sapiens
gacacgaggagaaacagcagaaacgcaccaggccaaagaaagagaagaacacaaaggagcaacaagagagc

SEQ ID NO: 115078 - RNA, 78 nt, Homo sapiens
ggagacgaccgaagaaagagaagaaaagcagaaagacggaggacaccgagagggacgcgagagcccacgaagagcgac

SEQ ID NO: 115079 - RNA, 79 nt, Homo sapiens
ccgcccccaggcaccacagcccacccaaggccaagcaaggcgcaggccaaagggacccaggcggggagccaggaacggg

SEQ ID NO: 115080 - RNA, 62 nt, Homo sapiens
ccaaacaacgcccaggacccccggagaaacacacgcgcgaaggagaaggacggaaaagaacc

SEQ ID NO: 115081 - RNA, 72 nt, Homo sapiens
ccggcccccccgcagacccccggccgagcggccccgagccgggacacccggcggcggccccggagaaagggg

SEQ ID NO: 115082 - RNA, 74 nt, Homo sapiens
accgaaaaaacgaagaacgaaacggagaaggaacgagccagcagcggacagggcaaagaaaaaggagagaaaaa

SEQ ID NO: 115083 - RNA, 66 nt, Homo sapiens
agacaaggcaaagcgaaaggcaccgcaacaacgcccagcgagggagagaggcagaacagaacaaac

SEQ ID NO: 115084 - RNA, 59 nt, Homo sapiens
ccgaaccagggccaccgcgcaaggaagccgacggccacgcggacggaggacgccggagc

SEQ ID NO: 115085 - RNA, 60 nt, Homo sapiens
ccaccggaaggcgaaaaacacacaagccacgaggaggcaccgaccgcagaaagagggcga

SEQ ID NO: 115086 - RNA, 76 nt, Homo sapiens
acgccgggccagggggaacacaggacgaaccccgagagccccgcccacaaaagccgaggacggggcgcccacaccg

SEQ ID NO: 115087 - RNA, 53 nt, Homo sapiens
ggcggcagcacgaaagaccaccgcacacgacggggagggaagagaccacacag

SEQ ID NO: 115088 - RNA, 95 nt, Homo sapiens
aaaaggcaacagcagccgcaaaaacaaggcggaaacaacgggcaaggccccaagagacgacagaaaggcagagaaggaaaaaaggaccagagacg

SEQ ID NO: 115089 - RNA, 79 nt, Homo sapiens
gagcggaggaaaagggccagagagcaagaccaccaggagcaagagaacggggggaggaagagaggcggcgcagaaggag

SEQ ID NO: 115090 - RNA, 64 nt, Homo sapiens
gggacggaacggaggaccaagagcagggagaaggaccggggagggcgcccacagggaaggaggc

SEQ ID NO: 115091 - RNA, 78 nt, Homo sapiens
cacagacccgcccgccccgccggcccaccccggggagcaacaggaggagaacaagcggagaaaacgaagaccagaaca

SEQ ID NO: 115092 - RNA, 71 nt, Homo sapiens
gccaagcaggaccacccaccagccaccagcaaagaggaaaagagagaagacgacagcggaggccgcgcgga

SEQ ID NO: 115093 - RNA, 73 nt, Homo sapiens
gcgagcgaccccggacgcacggaggccacgaagggggcggagccgcgcgcagagaggggaaagaaaaagagcc

SEQ ID NO: 115094 - RNA, 71 nt, Homo sapiens
gaaaagaaaggggcaaaggaacgggaaagggccccaaaagccccccgaaaacgggaacaaaagcccagccc

SEQ ID NO: 115095 - RNA, 67 nt, Homo sapiens
cgacaggcccgacagccggaagaacaaaggcacagcgaagaacaccacaaagaaaacagcaagccgc

SEQ ID NO: 115096 - RNA, 76 nt, Homo sapiens
cagccccaagagcgggacacaggagaccgaggacaggccggacaccgcagcccaaaggagagagggcccggacagc

SEQ ID NO: 115097 - RNA, 75 nt, Homo sapiens
gagacacaggccaggcacgaggcgaaccggccaccaagcacgggagcacgcggagggcgaggagagcccgggagg

SEQ ID NO: 115098 - RNA, 83 nt, Homo sapiens
gagggagcggcgccgccaaggacaacagaccaagcacacaagcacccaggcccggagcaagcagcaaagaggacaagccccgg

SEQ ID NO: 115099 - RNA, 73 nt, Homo sapiens
ccccgcaacaacccacaagacgaaccccgggcgaagcagagaaagcgaaagccaaaggccccaaaaccaagag

SEQ ID NO: 115100 - RNA, 95 nt, Homo sapiens
gacgcaccggaaaaccaccaggccagaccaacacccccagggcccccgacccaaaaggggcgacaagcaggccaacgcgcgcgcacgggccgggg

SEQ ID NO: 115101 - RNA, 63 nt, Homo sapiens
gaagaggacacagccagcggcgagacacacaagagaacagaacacaccgacacggaaagaaag

SEQ ID NO: 115102 - RNA, 76 nt, Homo sapiens
gcgccagcgcgcccacagaagacgaccccgacgcaggccaggagccgcggacagaagccgagcacggccgagacaa

SEQ ID NO: 115103 - RNA, 72 nt, Homo sapiens
acccaccgcaagacagggaagcacgcgaaggaccagccgaggaacgaccaggagggccgagaggaacagaca

SEQ ID NO: 115104 - RNA, 52 nt, Homo sapiens
accacccagggccggccacgagcaaaagccaaggacaaaacgacgcgaaaaa

SEQ ID NO: 115105 - RNA, 81 nt, Homo sapiens
ggggccgacgggagcagaggaagccgaggaccaccacagaaggaagaagggggggcgcggggggcgagggccggagacaag

SEQ ID NO: 115106 - RNA, 74 nt, Homo sapiens
ccaccagccgccaacagcccaagcgcgggacccggcccggggaccgcccgcccgcgccgggggcaaaaggaccg

SEQ ID NO: 115107 - RNA, 79 nt, Homo sapiens
cgcgggccggcgagcgcgcgccaccagaaaccccaccacgcggcaggggccgccgaggaaaaagcaacaagaagaaaac

SEQ ID NO: 115108 - RNA, 54 nt, Homo sapiens
ccgcccacgcaaacccaaagaccccgccggagacgagagggaaaagcacagggc

SEQ ID NO: 115109 - RNA, 54 nt, Homo sapiens
gcaaagagagaaaggccaagggcaaagaccaaaggaggacgagccaagaggaac

SEQ ID NO: 115110 - RNA, 73 nt, Homo sapiens
caacagaacgaacagccagcgaagcaagaaacaagagacaccagcggcgaaaaaggccgaggaaaacaggaag

SEQ ID NO: 115111 - RNA, 73 nt, Homo sapiens
ggggcggaggaagggaggagacccgaccccagaaggaagagagaaggccacgcccgaccccaagcaacaacgg

SEQ ID NO: 115112 - RNA, 56 nt, Homo sapiens
cggaaggcacaaggacaaacccacccacaaaggggccggccagcagagccaacacc

SEQ ID NO: 115113 - RNA, 79 nt, Homo sapiens
aacccgcgcccaggccagcgccccaggccaagagggacccacccggcggagggagcccagccggagacggggccgggga

SEQ ID NO: 115114 - RNA, 76 nt, Homo sapiens
aaacgaggaaccagcacaagacaaaccgggagaagagccagagcccgaggcgagcgcggcggggccgggcggagca

SEQ ID NO: 115115 - RNA, 76 nt, Homo sapiens
aacagcgggcgggcccggcccgggggccgccccggcgagccgcgacggcgccgcccacggcgagacgacccggaga

SEQ ID NO: 115116 - RNA, 84 nt, Homo sapiens
gcccccgccggccggcccaacaggcaccgccgaccgaaaccgcaaacacacgacagaggcaaggcaaacacgaagaggccaaga

SEQ ID NO: 115117 - RNA, 76 nt, Homo sapiens
aaagcacaggcacacaaagcacacagcacggacacaggaagacacggagcacagaggagaaaggaacaaaaaaaaa

SEQ ID NO: 115118 - RNA, 78 nt, Homo sapiens
gcaggacaccgggaccgggggcgcagcaccggcggcgccgggaggagacccaaaacaaagaagaacacaaacagcccg

SEQ ID NO: 115119 - RNA, 77 nt, Homo sapiens
aaagcaagaacaagaaagcagaaaaaagacacaagcaaccggagggagcaaaagacgccggcagccagaaaggggac

SEQ ID NO: 115120 - RNA, 88 nt, Homo sapiens
gagcgagcgagggggggcgcgccggaaaccggagcgcgcagcaggggcaagaaccgaagcaaaagagcaaaacaggaagcgaaaccac

SEQ ID NO: 115121 - RNA, 82 nt, Homo sapiens
gcgacaccgccgccacaccgccgccacaccgccgcgcccagcagccggacccgaaccacaaagacacacagaggacaagaaa

SEQ ID NO: 115122 - RNA, 79 nt, Homo sapiens
gaagcaacgccggggaaggggggcacagaaaggccaagcagggcagagccgaggccggacagagacgagagcagcgcga

SEQ ID NO: 115123 - RNA, 81 nt, Homo sapiens
aggagaaccaaaaaagagaagcaagagccgagaagcggagaaacggcaagaagaggagagagcagcccccaggcaggagag

SEQ ID NO: 115124 - RNA, 76 nt, Homo sapiens
gggaagcagcagcggccaggagaacccagggccggagcggagggaaaggaaaggcaagggcagaaaagaggggaaa

SEQ ID NO: 115125 - RNA, 79 nt, Homo sapiens
aaaggacaaaagccagacacacaacagagggacccacgacagagccggaccccgccccccccaccagaccagggcacag

SEQ ID NO: 115126 - RNA, 100 nt, Homo sapiens
agacaaaagccacccaggccggccagcacccaccgagaaggccagcaggcagccgcagaccaggagcagagcaggaccgcgcgcgggagcagcgagcggc

SEQ ID NO: 115127 - RNA, 103 nt, Homo sapiens
gggaggagcacagaacgccaggaccaaaacagggagaaacacagccagaagggaaacgaaaggcgacacgaaaccacggaagcccggggccagagacacacag

SEQ ID NO: 115128 - RNA, 102 nt, Homo sapiens
ggagcagagccgcgggcgccggagccgaggcgagcgccgcgcgcaccacggagcgcaacaacccaaacaccccgccagagccgccccgcgagaaaaacgcac

SEQ ID NO: 115129 - RNA, 78 nt, Homo sapiens
ccagcggagacggcagcagcccgcaggagggacggcaaggagcggaggaagacgagaggacgacagcacccacaaaac

SEQ ID NO: 115130 - RNA, 57 nt, Homo sapiens
gaaagcagaggcagaggagccgaagaccaggcacccagagcaaaaagcaggacccaa

SEQ ID NO: 115131 - RNA, 83 nt, Homo sapiens
aaggacccaacccaggagaaaaagaaaacaagcacgggggccaaggagacaccgaccaaacgaaaaacgaccaccaggaagga

SEQ ID NO: 115132 - RNA, 52 nt, Homo sapiens
gcgcggcgcggggaccgcggcccgaggagaacagaagcggagaacacaaagc

SEQ ID NO: 115133 - RNA, 50 nt, Homo sapiens
caggaagagccgacaggcaggcaggaagaggcgagaaggagcacgccaag

SEQ ID NO: 115134 - RNA, 81 nt, Homo sapiens
agaagcaagaccaaaaccaagaggcagacccaaaaggaaaacagcccgcccagagaggacaaaaccagagacgaccacaag

SEQ ID NO: 115135 - RNA, 64 nt, Homo sapiens
gggcagaggcagaaggcgccccacccagcacgagaaaaaaacaggaacggccgaacacagaggg

SEQ ID NO: 115136 - RNA, 80 nt, Homo sapiens
ccagggcgccccggcaaccacgagcccagccaacagcgccccggacgcaccagagccaggcggcggggagcaggcacccc

SEQ ID NO: 115137 - RNA, 51 nt, Homo sapiens
gcccaaggaagaggaggggaggcaacacgcaccgccggccaggaggagagc

SEQ ID NO: 115138 - RNA, 82 nt, Homo sapiens
agccccgccgccggccccgggcgcccggccgccgcacccccagacaccgaacaggagcagcgagggggggcaagggagaaaa

SEQ ID NO: 115139 - RNA, 52 nt, Homo sapiens
gcagccgccagcccacaacaacagacagggccacccagggaaacaccacaga

SEQ ID NO: 115140 - RNA, 74 nt, Homo sapiens
caccccgcgcgcaaggagcccgggacggagaggccgcaggagcacgcgacaacagaagaaagcccaaggcgaag

SEQ ID NO: 115141 - RNA, 72 nt, Homo sapiens
cgaaggagccggcggaacaccaccgagcacccggggccaaagcgaccaaccccccaccgcacgcagggggcc

SEQ ID NO: 115142 - RNA, 75 nt, Homo sapiens
aaggagggccccacaccgccgcaagccaggagcacggcccaggcagccaagaaggcagagagacacacaagaaac

SEQ ID NO: 115143 - RNA, 73 nt, Homo sapiens
gaaagcaaccgggcgcaggccacaggaacacagacggcagagcagaccagacagcgccagccccaccccaacg

SEQ ID NO: 115144 - RNA, 38 nt, Homo sapiens
acaaaggacggaggcacgacaccacaaaaccgaaaaca

SEQ ID NO: 115145 - RNA, 76 nt, Homo sapiens
aagaggcggaaaagagggggaaaaagcagggaggagaggcaaaaagaagaacaccaaaacggcgggagcgccccgc

SEQ ID NO: 115146 - RNA, 99 nt, Homo sapiens
ccaccggaccgccccaggagggcgcgggacacccccggcggagcgacagcggcaaagagcgcagcacacaaagaaccaagagcagggaacagcccgaaa

SEQ ID NO: 115147 - RNA, 82 nt, Homo sapiens
cgcagcaacaacagcaacaacagaccaccccacaggccagcaaggacagcagcaggaccgcaggacaacggccacacagcca

SEQ ID NO: 115148 - RNA, 74 nt, Homo sapiens
gccaccgcccgccacccgcgcgccgccgccgaggagaaagcacccccgcaaacggaagcaccaaacagaaaccc

SEQ ID NO: 115149 - RNA, 55 nt, Homo sapiens
ggcacagagcgcaaacaaggcaagacggagagaaacagcaaagcagaaacaagca

SEQ ID NO: 115150 - RNA, 84 nt, Homo sapiens
aagaggaggggaggaggaggaggacagggaaaggagcggggagccccgcgccacagacggacgcagggacaccagcaaacaacg

SEQ ID NO: 115151 - RNA, 84 nt, Homo sapiens
caggccccccgaggggcgcggcaccgacaacacggaagacagaccgaaaaaaacagaagacaagccaggaaaaagaagaaaccc

SEQ ID NO: 115152 - RNA, 76 nt, Homo sapiens
ccggaaggaggagccaagcggagagggaccaccggagggaggacaaacgaccgaagggccaacggagaaaaagcgg

SEQ ID NO: 115153 - RNA, 85 nt, Homo sapiens
acccagagaggcgggcaggcccaagaagacaggcaaggagggggcggaggaaggagagagccaacaacagcaaggcaagagacgg

SEQ ID NO: 115154 - RNA, 80 nt, Homo sapiens
caccaccacggaacgccaaccggcggaccgcgagacagccagccgaccgaggaaacgaggggaggacaaacccagaccag

SEQ ID NO: 115155 - RNA, 81 nt, Homo sapiens
acagacccgcgggaagcggcgccacccgcacgagccaaaacagagggagacgagaaaagggccgagcacaagccaagaagg

SEQ ID NO: 115156 - RNA, 78 nt, Homo sapiens
gcgaggacaaaaccgaaggagggcaagagagagaagaagccggcagcccggcccaggccgagaaaaaagagacagacg

SEQ ID NO: 115157 - RNA, 71 nt, Homo sapiens
gggaaaaggcgggcacaggccgaccgcgcgccgaaacagacagaggacaagcaacagcagccgccgggcgg

SEQ ID NO: 115158 - RNA, 55 nt, Homo sapiens
cggaaccagggaaaagaaccccagaggccaggccagagggaccaacgaaggcaaa

SEQ ID NO: 115159 - RNA, 71 nt, Homo sapiens
gggcaaggagccaggaaggaggaggaaaaaaggagcaaaaggaacacaggaacacgagccaagcgaggaga

SEQ ID NO: 115160 - RNA, 75 nt, Homo sapiens
gccagggcaccggggcccggcgcccgggcccgccccggaggcacgagagaaacagaggacgaccgggaggacaag

SEQ ID NO: 115161 - RNA, 56 nt, Homo sapiens
gggaccaaagggcaaccaaaaaccccccccaaaaaccaggccccaagcgaggaagc

SEQ ID NO: 115162 - RNA, 117 nt, Homo sapiens
gagagaggcaccgggacggaccgagaccggaccgagagcggaccgagagcgcgaaacgcacgagaaggacacgcccaccaagaaagaaccggaaaggggaccgggccaggaaagcag

SEQ ID NO: 115163 - RNA, 54 nt, Homo sapiens
ccagcgagcgacggcaggaaccacacaggaaagagcagcggagcccaagagaga

SEQ ID NO: 115164 - RNA, 82 nt, Homo sapiens
ggagaagcagagggaaagcgccgccaccgaggcgcagaagaagcaagaggcggagccgcgagcaggccaccagcaccacgcc

SEQ ID NO: 115165 - RNA, 82 nt, Homo sapiens
ccagcaccgcggagcaagaaaaagagcccggaaagaagagacagagaggggagaacccccaggaaaaaagcagagagaacac

SEQ ID NO: 115166 - RNA, 62 nt, Homo sapiens
cagccgagacaccagcccgaaacaccaccaaggccgacgcccgccgcggccggggaacaggc

SEQ ID NO: 115167 - RNA, 67 nt, Homo sapiens
agccgccccggaggagaaggcgggcgcggacggcaggggcgccggggaacccgcgggaagaagcaac

SEQ ID NO: 115168 - RNA, 79 nt, Homo sapiens
gaggcagccaccaccgagcccgagccggaaggacacgacacaggccagcaggaaccagcagaggaccggccccaagccc

SEQ ID NO: 115169 - RNA, 50 nt, Homo sapiens
gggggcgggcaggccggccacagacaagaagacccagcagggcgggcgga

SEQ ID NO: 115170 - RNA, 79 nt, Homo sapiens
accaacccggcccaccaaaccccgacgccccaggacacgacagcaccacggagagcaccagacaaagagagcgaaaaga

SEQ ID NO: 115171 - RNA, 68 nt, Homo sapiens
cgacagggcggagccacccccagggagagcgcgcagggggagccgccagaccagcaggccagaagaca

SEQ ID NO: 115172 - RNA, 69 nt, Homo sapiens
cgaacggagaagagccaacaggaagacacaacaccgaacagccggaaacaaggccgaagagcggccacc

SEQ ID NO: 115173 - RNA, 72 nt, Homo sapiens
acccagaggcagagccgccccagcagcaggggcgccaggagccgggcagagaaaagaacgcgaggagaaccc

SEQ ID NO: 115174 - RNA, 56 nt, Homo sapiens
ggaccaagaaccaggggcaccaccccaaaaccacgagcacagagaagaagaagggg

SEQ ID NO: 115175 - RNA, 58 nt, Homo sapiens
ccggcggacccgcacggcggggagcaccgaaaggcaagaaagaagaaagcgaccgcac

SEQ ID NO: 115176 - RNA, 79 nt, Homo sapiens
ccgagcaagacgcagccagcccgaacaggaaaagaaaaccaaaggaagacgcaagcagagaaccagaccgcagagggaa

SEQ ID NO: 115177 - RNA, 59 nt, Homo sapiens
ggcggcgaggcgggcgggaaacgcggaagcgggcaagaacggaagcacgggcggaggaa

SEQ ID NO: 115178 - RNA, 73 nt, Homo sapiens
ggagccacccaaagccagcaggacccaaagacaggaccacgcaccagcagagaaggaaagcaaaccgaagcag

SEQ ID NO: 115179 - RNA, 73 nt, Homo sapiens
aagggcgcgacgcggcagcgccccgaggaaccccggccggaggacccgcgggacgagcgggaggggcggcaag

SEQ ID NO: 115180 - RNA, 105 nt, Homo sapiens
ccggccggggcgcagggacacggggggccaagggaccacacgagaccgccagagcggaacgaccccagagcgagcccgcagcagcccagaaacaaagacagccag

SEQ ID NO: 115181 - RNA, 82 nt, Homo sapiens
ggaggagcgcagcaacagaagagaggccagccgggaggacacacaagcggggacaccaagcagagggccccacccagaaggg

SEQ ID NO: 115182 - RNA, 79 nt, Homo sapiens
gcgcggcgcgggacgcgcgcgggcacccacggagccccggggcggaaccggagaggacacagcagaagagaacacgccc

SEQ ID NO: 115183 - RNA, 75 nt, Homo sapiens
acaggccagacaacggccggaaccagagcccgccgcggcgcggccgcgggacaagaaaagcgggcaaccgaaaga

SEQ ID NO: 115184 - RNA, 64 nt, Homo sapiens
agaagaaccacacgcaggacagccagcaagcagggaaacacaaagaagacaccagaagggccag

SEQ ID NO: 115185 - RNA, 57 nt, Homo sapiens
gcccccgcgggggacgggcaccggggaaaaaacggccaccccaagagacagaaagcg

SEQ ID NO: 115186 - RNA, 57 nt, Homo sapiens
cgaagagacacgaaaacggacaaaacaaagaaccgcagaaacgcggacgggagaagc

SEQ ID NO: 115187 - RNA, 76 nt, Homo sapiens
aacggaccagaacccagaggggcccgagagaagagaagagcggaggaacaggaccggagccaagcaagagacggag

SEQ ID NO: 115188 - RNA, 70 nt, Homo sapiens
gaggaaaagggcagggacagcgcaggcagcagagagccgaagaaagcaaagggagccacgaaagaaccag

SEQ ID NO: 115189 - RNA, 79 nt, Homo sapiens
gccaagccgccccccagcgcccgggcccgaggaggcagccaagccaggccgccacgcggcgaccgcagcgaagcacagc

SEQ ID NO: 115190 - RNA, 67 nt, Homo sapiens
gagccaaccgggaagggaaccggaaaagacaagggggcaaagaggaggaacccgcacagacaagaca

SEQ ID NO: 115191 - RNA, 72 nt, Homo sapiens
cggaagagagaggagaagaccagagaccaccacaaaaagaggggcagcagcaggacagggaacccgggagac

SEQ ID NO: 115192 - RNA, 34 nt, Homo sapiens
ccgacagccgcaaaacaggaggccgcacccaggc

SEQ ID NO: 115193 - RNA, 82 nt, Homo sapiens
cgccggagaacccccccagggggaacgacacaacaagccggaagggaagcagggcaggacccgaggcgccagcagcagcaag

SEQ ID NO: 115194 - RNA, 63 nt, Homo sapiens
agaccggcaccgaagaccacgcaccagcgcgcagaggcggggggacgggcccggcgggacacc

SEQ ID NO: 115195 - RNA, 86 nt, Homo sapiens
gagaggggagccggaggaggagcccgcccccagagaggggagccggcgaggacaaaaccgaaggaggacagaagcgaaggggacag

SEQ ID NO: 115196 - RNA, 85 nt, Homo sapiens
agcgcgccggccgcgaggccacggagagccgccggagagcccaggagcaggggagacaggggagacggacgcaaagacaagggag

SEQ ID NO: 115197 - RNA, 79 nt, Homo sapiens
gagggaaaagaaaagaccaaagcaagagagagaaagccagaggggccacaagcagaaacagagcgccaaaggaccagaa

SEQ ID NO: 115198 - RNA, 75 nt, Homo sapiens
acagaaggggaaaagcaccaagggcggccccagggaggagagggagaagggaaggaccccgggaaaccagcaaca

SEQ ID NO: 115199 - RNA, 57 nt, Homo sapiens
cacaccaaagaaaggaccacagaaaaacagggcccggaggagaaacgagcagaggag

SEQ ID NO: 115200 - RNA, 70 nt, Homo sapiens
cgggccgcggcccacgcccgcggagcagccgagcccaaaagcaaagcagggcagcaaagaacacaaaggc

SEQ ID NO: 115201 - RNA, 77 nt, Homo sapiens
gcccagggacgagaggggcgccgacaggggagaagcgcagcgccaacccgaaaagaagcagaacaaaaaagcgccca

SEQ ID NO: 115202 - RNA, 72 nt, Homo sapiens
gacgggcgggcgccccgcgcggagggaagggggcccgaccgagcaaccagccaagggaccgcagggagacgg

SEQ ID NO: 115203 - RNA, 75 nt, Homo sapiens
cggacaaggacgcgcggaggccccccagcaggaagggcacccagagacgcggcaacccacgccgcccagcaccgg

SEQ ID NO: 115204 - RNA, 82 nt, Homo sapiens
cagggaacaggcggagcggaagggacgggggaaggagcagagccagggaggaagaaaagacagaagagcaaagaaaaaagag

SEQ ID NO: 115205 - RNA, 80 nt, Homo sapiens
caaagcacggaagagagggagcagagaaaggggacaagagaaagagagcacaagcccaggaacggggagaaacgccagac

SEQ ID NO: 115206 - RNA, 81 nt, Homo sapiens
aacacagaaaccggccccaggccagcgcgggccgccagcggcggccaccacagcgccgcagcccagcgaggcccagggcac

SEQ ID NO: 115207 - RNA, 77 nt, Homo sapiens
aggcccgagaagaagacaagagacacagcaagacaaggcagacgcacacaggcccgaacaagcgacaaaaacgagaa

SEQ ID NO: 115208 - RNA, 89 nt, Homo sapiens
gaagagaacaaaaaacaccacagacacgcacaggagaagggcccggagaaacccacaggagggccagaggacaaagcacggcggaagag

SEQ ID NO: 115209 - RNA, 81 nt, Homo sapiens
cgcggaggcgggagcgcggaaacggaaccgggaggcgacgcacacgagcggaggcgaagacggcccgccacgggccccgca

SEQ ID NO: 115210 - RNA, 111 nt, Homo sapiens
ccccaccgccagcggaacccggggacacgacgccccaaaccgccaggagaaaaaaggccccgcgaggcggcagcagagacagccgggcgcccacggcccgagcgcccacgg

SEQ ID NO: 115211 - RNA, 63 nt, Homo sapiens
gcaacgagcaacaagcagacacaaagggagagagcacgcacaagccgaagagccaaagcgacg

SEQ ID NO: 115212 - RNA, 73 nt, Homo sapiens
cgaaccggccgcaccgggggaagagacaaccgcgacacaaaaacacgcaggcgcacaccgcaccaagagaaga

SEQ ID NO: 115213 - RNA, 81 nt, Homo sapiens
gcccggcggccaagcccccgaccgggagacacaccccaccgcgagcgggcggacgggcccaacaccggggcgaggcagggc

SEQ ID NO: 115214 - RNA, 58 nt, Homo sapiens
aagcggccgagcaggcgagcgaacgacgagcgagccacccccggcgcccgcgggcccg

SEQ ID NO: 115215 - RNA, 55 nt, Homo sapiens
gccggggcgcaggggccggggggcgaggaagagacaggcgggggagaagaagcag

SEQ ID NO: 115216 - RNA, 78 nt, Homo sapiens
cagacgagacacgcgaaggaaagaccacagcaagaccacgcccccagccgggggaccaggccgaacgacccggacaca

SEQ ID NO: 115217 - RNA, 68 nt, Homo sapiens
gcgcccagccacagcaaaagggccgaccaagcagaacccgagaagagccgagaaacacccgacaaagc

SEQ ID NO: 115218 - RNA, 78 nt, Homo sapiens
ccaaacggaagaagaggaagccaaagcacagagccaaaagggacaggaaaaaaggaaggggaaccacagcaggaacga

SEQ ID NO: 115219 - RNA, 66 nt, Homo sapiens
ggaacgcacgcccaggacaacgccgaaggaaaagcacgcccaggccaaagaaggcagagggggcga

SEQ ID NO: 115220 - RNA, 77 nt, Homo sapiens
aacgaaggccaggcacccacccaggccaagaaagagggaggggaaagagggcacacaaagcaggaaagagagcacga

SEQ ID NO: 115221 - RNA, 82 nt, Homo sapiens
agaggacaagaccacgagccagggcccagaagggaaacagagcggaggcggcagaagccacgcccgccacaccccagccgcc

SEQ ID NO: 115222 - RNA, 80 nt, Homo sapiens
gggaaccggcgcgccggcgcgcggcgcggacaggcccaaacgggcggaaaacaccccaaaagccaaaagggaaaggaaaa

SEQ ID NO: 115223 - RNA, 77 nt, Homo sapiens
cagggcccaccaccgcaaacccagcccccagcagcagaccaggccgcacccaaagcaaaagagcaaagggccgcgag

SEQ ID NO: 115224 - RNA, 78 nt, Homo sapiens
caaggcaaaaaagcaaaacgaagagcccaaggaacaggaagagaacaacgcagaacaaagacgaaggcacgaaggcaa

SEQ ID NO: 115225 - RNA, 86 nt, Homo sapiens
cgggacaccaggcagcccggggcgaggagagagacagcccccgagccgggcaccacacagagaggagagaaaacggagacccccaa

SEQ ID NO: 115226 - RNA, 81 nt, Homo sapiens
gcggcgaagaggcaccggaggaggcagaagccccagaggagcccgaaacccccaggcgggcaggaaggagagccccagcga

SEQ ID NO: 115227 - RNA, 107 nt, Homo sapiens
agaaccagccccagccgaaacaccagagaccacccgaacacccaagcaacaacaccacaggacgggcagcggaacgggccccgggggcggaccgggcaaggaagacc

SEQ ID NO: 115228 - RNA, 91 nt, Homo sapiens
ggcaaagaacccgagaagacccacaagagaagcaggaacagagacgcacccagggacacccaggacaacggcagggaggcacaagcgggga

SEQ ID NO: 115229 - RNA, 83 nt, Homo sapiens
cgggaccccgagcaccgggccccgcgaccggggcccggggaaggcccgccgcccgccccaggaggcaggggaagcacaaaagc

SEQ ID NO: 115230 - RNA, 80 nt, Homo sapiens
ggaagaaaaagggccaggccccagcgcaaagaagaccagaaggaacggagaaagacagacggaagaagacaaagaaacga

SEQ ID NO: 115231 - RNA, 69 nt, Homo sapiens
gccgcgaagccaccagaccccagaaccccgaggagacggaaggaacaggcccaaagacgcacccacaga

SEQ ID NO: 115232 - RNA, 81 nt, Homo sapiens
caaaagaccaaggacgaccgaacaaacaaaggagggagacacaacaaaagaaggggaaagagccgacagcaggcccaccaa

SEQ ID NO: 115233 - RNA, 83 nt, Homo sapiens
ccaccgcccccgacgcacggccaagaggaaggccaagcgagggccaagacgaagacagagacgccgcacccaggcggaggcag

SEQ ID NO: 115234 - RNA, 58 nt, Homo sapiens
aagaaaaaccagcgaagcacaggcacaggcggagaacaaagggggacagagaagaaaa

SEQ ID NO: 115235 - RNA, 74 nt, Homo sapiens
aaagaccagagacaaaagagcaaagagacaccgcacccaaggaagcgggcaccaacagacaaccagggcaagca

SEQ ID NO: 115236 - RNA, 73 nt, Homo sapiens
ccagcgagcgaaccagaccaaaaacgcaacaacagacggcaaccagccagagggcaccggcaacccacaggcc

SEQ ID NO: 115237 - RNA, 79 nt, Homo sapiens
caccgcgcgcgccccgcacccagggcacgcgcgcccgcgcagccaggcgcgagaaacccaggccgcgcacaagaaccgg

SEQ ID NO: 115238 - RNA, 55 nt, Homo sapiens
gaggccccccagacagggaacaacagcgaaaaagagagcagcgaggaaggagcca

SEQ ID NO: 115239 - RNA, 80 nt, Homo sapiens
aacgcggcgaccgccaagaaaggcagcgaggggagagcgaaacggagccccaaggagaccgcccccagcccacagaggcg

SEQ ID NO: 115240 - RNA, 77 nt, Homo sapiens
gagggaaagggaagacacgaaaaaagagaaagggccaacggagaaggggaacgcgggccgagagccgcgcagccagg

SEQ ID NO: 115241 - RNA, 76 nt, Homo sapiens
cacgccacccaacacgaggcacggcagggaacagggcaaccggagaaacgcgaagaagaagaacagaggaagaagc

SEQ ID NO: 115242 - RNA, 57 nt, Homo sapiens
cgaaacgcaagaggcaagaagaaaaacagagcccgacgaaacagacaaaggaggcac

SEQ ID NO: 115243 - RNA, 76 nt, Homo sapiens
acaacaggaggccccccgggacccccacccagaggccaaaacagaagaggcaaagcccagccacagcagcagccca

SEQ ID NO: 115244 - RNA, 73 nt, Homo sapiens
gagaaaaggcacagaacaggcagacacaaggaacagccagccaggagaaaaacgaacccaacagaccacccca

SEQ ID NO: 115245 - RNA, 72 nt, Homo sapiens
cgaggaacggccgcccagaacccagagggaagaggcagaggaaaaggagcaggcgcaaagcagagggccgcg

SEQ ID NO: 115246 - RNA, 76 nt, Homo sapiens
acgcgaccccggggccacccaaggacccgacaaacggacagcaggaccagaacaaggagaagcaccgggcaggaca

SEQ ID NO: 115247 - RNA, 84 nt, Homo sapiens
gcggggcgcaacgccgaccagcgacacgcggccgcggagaccaccgcggcgcggcagcgcgcccgaggagaccgaggagcccag

SEQ ID NO: 115248 - RNA, 71 nt, Homo sapiens
agcgcccaccacgacggaggacccgacaaacggacagcaggaccagaacaaggagaagcaccgggcaggac

SEQ ID NO: 115249 - RNA, 74 nt, Homo sapiens
ggcacccccacagagccgaggcagccgaggggcacaccagaacaacacagccgggcaaaagacaggagaagaag

SEQ ID NO: 115250 - RNA, 71 nt, Homo sapiens
aagccgagaagagggaggagcgaaccagggggacacaaaggggcgcggggggccaccaacacccccggaac

SEQ ID NO: 115251 - RNA, 50 nt, Homo sapiens
agaaggaaagcaaggacaggcacgccacacacagagccaaagcagacccc

SEQ ID NO: 115252 - RNA, 66 nt, Homo sapiens
caggacgcgccgcgccccaagcccaaggaaaggcccaggcacagcagacgcacggaggcggggaca

SEQ ID NO: 115253 - RNA, 74 nt, Homo sapiens
ggggcgcgcccgaagcaggaagaccggagggagcgcagcacagcggggggaggagggggacggaaagacacccc

SEQ ID NO: 115254 - RNA, 57 nt, Homo sapiens
ccgcagggacgaggccccaaggagggagacagagggggcacccagaggccggggacc

SEQ ID NO: 115255 - RNA, 81 nt, Homo sapiens
gggaacgaaagagaagccacccccccaggagcccagcagaaccccccacaagcggggaccaaagaagagcagcagcagaac

SEQ ID NO: 115256 - RNA, 78 nt, Homo sapiens
gcgaggccacagcaagggcgacaacccaaaccgcgaaagcaaaacagaggggaagcgcaaaacagagcaaagggggac

SEQ ID NO: 115257 - RNA, 76 nt, Homo sapiens
aacaaagaagcgaaagaaagggccgcccccccacaccagaacagcacgcacagacaggaggaggacccagaagccg

SEQ ID NO: 115258 - RNA, 36 nt, Homo sapiens
cgcaggggaccccgcccgagaaccgccagcagagag

SEQ ID NO: 115259 - RNA, 55 nt, Homo sapiens
acaaaaaaggaagcgaaagagaagccccggggaaagaggaggaaaacaaaggcag

SEQ ID NO: 115260 - RNA, 84 nt, Homo sapiens
cggaagaaacgggacaggagccacgacccagggacaccggccacaaaaggaccagagggaggagggaggaggagccccgccaga

SEQ ID NO: 115261 - RNA, 74 nt, Homo sapiens
caccccagcgcgacgcggcgagcccaaaaagcccgcaggggcgagggaggccacgcggcaggcaacagacacag

SEQ ID NO: 115262 - RNA, 41 nt, Homo sapiens
accacaaccccagagaagggccagaggaagacccaaggaag

SEQ ID NO: 115263 - RNA, 81 nt, Homo sapiens
gaccgcgccgcagcagcgccagggagccgccgccccagggcaggggcccggagagcgcgccccccaggacccagaccgagc

SEQ ID NO: 115264 - RNA, 73 nt, Homo sapiens
ccaacaaggcccggacaaagccgaaaccaggcaacgaaaggcgggagggggggggcgcgaaggcccagcccag

SEQ ID NO: 115265 - RNA, 67 nt, Homo sapiens
caccaggacagagcgccacacgaagggaacgcccagaaggcgcagcgcgccagggcaccacacccgg

SEQ ID NO: 115266 - RNA, 78 nt, Homo sapiens
aacacacccagcacaaccaggagccgccggccaacacgaggacacgcgagagcagaggagcaaggaagaaaggagaag

SEQ ID NO: 115267 - RNA, 81 nt, Homo sapiens
gcgccgcggcgaccaacaagcggcgccccggggcgcggcccgggcacagacaaccgagagagacgccgcgcgcaccccaca

SEQ ID NO: 115268 - RNA, 74 nt, Homo sapiens
ggagcaccggaaagaggacgaagcagaaagcaaggaaacgagcagaaggcgagagccacagaaggaggagggga

SEQ ID NO: 115269 - RNA, 76 nt, Homo sapiens
ggcagaagggaacaggggcagcaggaagacgagcgacaggcgacgaggaagcgggccagcggaagaacgagagaga

SEQ ID NO: 115270 - RNA, 86 nt, Homo sapiens
gcgggcgaggcggcccagcggcggcaggccccgagccccggccccaaagacccaaaacagagacaccccccagcccccgcgccccg

SEQ ID NO: 115271 - RNA, 83 nt, Homo sapiens
caaggggaaagagggggacccaaggacgcgaaaggcgagccagcccccacccagaggagaacgaaaccacgacaaccagcgcc

SEQ ID NO: 115272 - RNA, 76 nt, Homo sapiens
aaccgcagcagggggcagaacccagaggcgggaggggccgggaggcagaggggcagggcaacggggcggcacacaa

SEQ ID NO: 115273 - RNA, 78 nt, Homo sapiens
aggcaaagcaaaagaagaacacaaacggaggcccaaagagagcggcagcaacagccggcagggaaaacgcggcgcaaa

SEQ ID NO: 115274 - RNA, 60 nt, Homo sapiens
gcgcgggcccagaccgccgggcaagcaccagagaggacagcaggcaaggagacaaacagg

SEQ ID NO: 115275 - RNA, 75 nt, Homo sapiens
aggccgacagggaacaaaagcagaagaccacaggaggcagcccagaaaagagccgacaagcaccgccaaagaagc

SEQ ID NO: 115276 - RNA, 79 nt, Homo sapiens
cgcgggccgggaggggacggccgccggagccgcgaggccaagcgcaaaaaccagacaccccacaccaccacccagacga

SEQ ID NO: 115277 - RNA, 67 nt, Homo sapiens
gcaggaacacgaacaccaagccccgaagcacacagaaagacaacggcaagcggagaagagcaaggcc

SEQ ID NO: 115278 - RNA, 59 nt, Homo sapiens
cgaggcggaggcgacgaggaggcggacccccggcgcagagcccaaaaggcagagcgagg

SEQ ID NO: 115279 - RNA, 74 nt, Homo sapiens
cagaggacagagcagagcacccccaaagacagagaagaaagcagagacagagcgaaaagcggcaagaacagcca

SEQ ID NO: 115280 - RNA, 59 nt, Homo sapiens
ccacgcaaacccaaagaccccgccggagacgagagccacccaggcccaggaccgagccc

SEQ ID NO: 115281 - RNA, 71 nt, Homo sapiens
agcagcgccggcaacagggagcgagggcgcacaacgaagcacaacgacacagacagcagccagcgaagaag

SEQ ID NO: 115282 - RNA, 76 nt, Homo sapiens
gaagcgcccgcgcggagaaaccagggcgaaggacgaggaccgaaaaagggcagaggacgaccagagcggggaaaac

SEQ ID NO: 115283 - RNA, 69 nt, Homo sapiens
ccgggaaaacagcacaagcagacaagaagaagagcgccgagaaaaggacccggcaaaccaaaagaccag

SEQ ID NO: 115284 - RNA, 68 nt, Homo sapiens
ccccagggggcgagaaaagcccgcgggagaagcaggcacaggcaaggacgcacggacagcaaaacgga

SEQ ID NO: 115285 - RNA, 77 nt, Homo sapiens
cgccgcccccccagacaagaggacaccgcggaggaagccccaaaagcacgcacgaaaccggcaagccagcggagggg

SEQ ID NO: 115286 - RNA, 77 nt, Homo sapiens
gccagaccacagcacagccgggaaggggagccaccagcccccgaaagaagcggcacggaaggaaacggcccagcaga

SEQ ID NO: 115287 - RNA, 80 nt, Homo sapiens
aaggccgcagacgaaggggaaagggaagcaagagccagacccaaaggagacacacccacggagaagaaaggaggaaccaa

SEQ ID NO: 115288 - RNA, 84 nt, Homo sapiens
agcgcagagagaaagaacgacgaaacggagacggacccgcgaaacccccggggaggaacaagccaagcagaagccaaccccagc

SEQ ID NO: 115289 - RNA, 66 nt, Homo sapiens
caaaaacaccgagcagaccagaagcgagcagcccaaaccaaagaggcgggacacccaccccaacag

SEQ ID NO: 115290 - RNA, 79 nt, Homo sapiens
cacgcccccggccccgacggggcgggggccccagccccacagaccagcccagcacagagcaggcaggaggcagacgaag

SEQ ID NO: 115291 - RNA, 73 nt, Homo sapiens
aagccgggaagacaaagaggggagcccaaaagcacgaagcgccagaggacaccgcggcccgaggacgccaccg

SEQ ID NO: 115292 - RNA, 70 nt, Homo sapiens
accccccccgcccaccaggcaaccagcggcagacagagcaagagagaggaggaaaaaaaggagcgacaga

SEQ ID NO: 115293 - RNA, 72 nt, Homo sapiens
gcggggcccaggagacggaggcaccaacaaggcggaggggccagaacagacagaccagaacggacagagaag

SEQ ID NO: 115294 - RNA, 59 nt, Homo sapiens
gcgaccccagacgacgagaccggcgacccagaaaccaggacggcgggccaaggcaacca

SEQ ID NO: 115295 - RNA, 77 nt, Homo sapiens
gggaaaagggacacagcgaaagccacgaacgaaggaggccagaaaggcaaaccaagcggagaccaagaaaaagcaag

SEQ ID NO: 115296 - RNA, 70 nt, Homo sapiens
gagagaaacaagcgacaaagcggcagacagaaccccagacacaggccccacgggcccagagggggagcag

SEQ ID NO: 115297 - RNA, 39 nt, Homo sapiens
ccgacagccgcagaacagaagagacgccaacagaccggg

SEQ ID NO: 115298 - RNA, 76 nt, Homo sapiens
ggagcgagaccaacgggagccccaaggggagaagcccgacagagaaaggagaaaaggccgacggagagaaccagaa

SEQ ID NO: 115299 - RNA, 81 nt, Homo sapiens
ggcgcgcgaccgacacgaaggggccacaacaacaaacggacaggcaccagccccacgggaacagaacgccaagagagaggc

SEQ ID NO: 115300 - RNA, 76 nt, Homo sapiens
cccaaaggcggaacagggaggcgaggacaacgggcagcccccacaccaaaggaaccggcccgcagaagccagacac

SEQ ID NO: 115301 - RNA, 74 nt, Homo sapiens
agcagaaaacgcggcaaagaaaacaggaagagcagacccgaaagcaaaggaaacgagcaacgcgagccgcagga

SEQ ID NO: 115302 - RNA, 69 nt, Homo sapiens
agcgcacaagaagaacaaccaacccagaacaccaagaggggacaacagagccgacacagccaagaagca

SEQ ID NO: 115303 - RNA, 38 nt, Homo sapiens
cccccggccgcaaccccaagccgaacgccaagagcacg

SEQ ID NO: 115304 - RNA, 67 nt, Homo sapiens
cccagagcaacacaccaacggaagaaaaggccccccagagaagcccgagaccaggacaggaaaaacg

SEQ ID NO: 115305 - RNA, 62 nt, Homo sapiens
gcaggagccaccccgcccggacccagcaccaacacagggaagaaccacgccgggagcgggac

SEQ ID NO: 115306 - RNA, 43 nt, Homo sapiens
ggcggcccaggccagcacccgcagcaccgccggccgccacaac

SEQ ID NO: 115307 - RNA, 73 nt, Homo sapiens
gccccaaggcgaacaaagaagaaggagaaagacaaagccccgagaaagaccagcaccgccgaaaagcaaaaaa

SEQ ID NO: 115308 - RNA, 83 nt, Homo sapiens
gcagagacgccggacaggacaggaaaacaggaggcagaggaacaaaaaaagacaccacgagaaacagacacaccagaacggga

SEQ ID NO: 115309 - RNA, 72 nt, Homo sapiens
aggacgccagggcgaggcggacagagcacaggggcgaacagaacggacaggaccaggaggagacagaccacg

SEQ ID NO: 115310 - RNA, 68 nt, Homo sapiens
aacagaaacagacggacagggcccgccgagcgaggcaaagagagcagaggagcaaggaagaaaggaga

SEQ ID NO: 115311 - RNA, 73 nt, Homo sapiens
cgagggaggacaagagcaagaccccggaacccgaagcgggaaagcccgacggagaagacacggaaacccggag

SEQ ID NO: 115312 - RNA, 61 nt, Homo sapiens
cgaagaacagacgaagcagagaagcggcggagaaaccaccacaaacacgaggccagcaacg

SEQ ID NO: 115313 - RNA, 83 nt, Homo sapiens
ccgggccgccggggaggacggggaagacggaggcagaagaacccagccgagcagcaagacccaggaacgggcagaagggcacc

SEQ ID NO: 115314 - RNA, 95 nt, Homo sapiens
caagcgaagcacggaacggggccgagccacgaaagccaacgggacgcagaaagccccaagaagaagggcacaacagggagcacgagaagcaaaga

SEQ ID NO: 115315 - RNA, 84 nt, Homo sapiens
gggaccgcccgggacaacagcgcggggcacaggccggcgcggaagaggccggcggcgggacggccccacgggacccgccccgac

SEQ ID NO: 115316 - RNA, 83 nt, Homo sapiens
cccccaggagcgggaacagagaggagacgagaaccagaagaggagaccaggaaaaaaagaaagaccgcccaggggcagacggc

SEQ ID NO: 115317 - RNA, 78 nt, Homo sapiens
cgggcaccgcccccaagcccagcagcggggcgcacccacgacgcgcacaccaccggcagaccggcgccacagcaccac

SEQ ID NO: 115318 - RNA, 47 nt, Homo sapiens
ggggagccccgggagccgcacggcagccggcgaggggggagcccagc

SEQ ID NO: 115319 - RNA, 70 nt, Homo sapiens
agaggagcaccagaacacaaggggaaggggaaagcaacgaaaagagaacagaaacccgcgccagagagcc

SEQ ID NO: 115320 - RNA, 59 nt, Homo sapiens
caaagcgcgcagaaagggcgaccaccaaaaaaacgacaggacacagaacagagaagaag

SEQ ID NO: 115321 - RNA, 68 nt, Homo sapiens
gacagaaggaaagaccgcaaccaagcaaacggaaccaaccagaacaaccgaacaagcgccgcccaggc

SEQ ID NO: 115322 - RNA, 70 nt, Homo sapiens
cacagcacccgggaggagaacagcacggcggagaaaccaccacaaacacgaggccagcaacgaccaacaa

SEQ ID NO: 115323 - RNA, 87 nt, Homo sapiens
cggggccggcgggagcgcgaacgagcgacggcggaacccggggccgggacgcagcccggcggcagcaggacgggcaggacgagggcc

SEQ ID NO: 115324 - RNA, 79 nt, Homo sapiens
cggcggcggcgcccaggcacccggcccggaagacgaccccgacgcaggccaggagccgcggacagaagccgagcacggc

SEQ ID NO: 115325 - RNA, 64 nt, Homo sapiens
acagagagaaaccaaaagggccaggaaccgcgggagcgacggaggccacaccggaggaaaggaa

SEQ ID NO: 115326 - RNA, 81 nt, Homo sapiens
cccacccaccaaaccggagggggaaaaaacccaaggcgcaaagggcggagaacggaaaagcaccaggaagcagagaggacc

SEQ ID NO: 115327 - RNA, 75 nt, Homo sapiens
ggaaggggacagggaccacaacaagaacaacaggcggaagaggccgaaagcacaccgaaggacacgcgaaaagaa

SEQ ID NO: 115328 - RNA, 49 nt, Homo sapiens
agaggccccgaagacagcaaagggaaggccagcccccacggaagccaac

SEQ ID NO: 115329 - RNA, 61 nt, Homo sapiens
ccccgaggacgccgagacaacgcagaccggggaagaagcagacccgaccgcagcgcaggac

SEQ ID NO: 115330 - RNA, 84 nt, Homo sapiens
ccaggccagacccgaaggccaggagacccgaccccaaggcagcggaggaggagaaagagaggacccccggaccggcccgagggc

SEQ ID NO: 115331 - RNA, 72 nt, Homo sapiens
aaaacagaaccggcgggagaaacccgggccggcccaagagagagacacggaggcacacgcagccagaagcaa

SEQ ID NO: 115332 - RNA, 75 nt, Homo sapiens
cagggaaaaaggagcagcccgggcaccacagaaaagcacgcaaggacccacggagaggaggaacacggcaacagg

SEQ ID NO: 115333 - RNA, 59 nt, Homo sapiens
ggaagagcaagcgaggaaaaacaccaacaggcacagaggaccagcgaagcgcggcaaac

SEQ ID NO: 115334 - RNA, 68 nt, Homo sapiens
gaccaaaggcacaggaagaagcgcaggagccaggcagaaaagaaaagaagaaaagaaagagaaacggg

SEQ ID NO: 115335 - RNA, 76 nt, Homo sapiens
gcaggcagcgggggggcgagcccgaaacgaggcgggagcagcacagccgcaggggaagcccagccagggggagaca

SEQ ID NO: 115336 - RNA, 71 nt, Homo sapiens
agggagacaggccacgcaggcgcaacgcaaagaccagccacgagagccacaaggaagaaacggacgaaaac

SEQ ID NO: 115337 - RNA, 36 nt, Homo sapiens
caaggacgcgcgcacgaggcccacggccccacgggg

SEQ ID NO: 115338 - RNA, 70 nt, Homo sapiens
gggaccgggacgccacagccaggacgaccgcaggcccaaaggggacgcagcaccggccgggaagcagcgg

SEQ ID NO: 115339 - RNA, 73 nt, Homo sapiens
gacgcccggcaagagagccgcacaagcgccggccaaggacacaaggcacgaggacgaagaggaaaggggccac

SEQ ID NO: 115340 - RNA, 77 nt, Homo sapiens
agcgacaacccccagaagagaccaacgccaccaaccaaccgccggacgcacaaaccagcgagagaaagagcgcggaa

SEQ ID NO: 115341 - RNA, 74 nt, Homo sapiens
caagaccgcgcgggccaccccggcggaccacaccggacagcagccaaaggcccacacgggacaggaagggaacc

SEQ ID NO: 115342 - RNA, 61 nt, Homo sapiens
gcaggccggggaggaggaggaagaggaagaggaggagacccacggccaggaaaacccgaag

SEQ ID NO: 115343 - RNA, 74 nt, Homo sapiens
ggcacaggcagagcaaggacggacaaagcgagaaccccaacagagagcaggagaggccagaaagaagaagaagg

SEQ ID NO: 115344 - RNA, 66 nt, Homo sapiens
gcagggcgcggaggggccggcccccggagcgacagaaacaaggggaagcccagaggcacggggcag

SEQ ID NO: 115345 - RNA, 75 nt, Homo sapiens
gcaacagggacggcaaaggcgcaacggccccaacgcagacaagaagacagcaacacaaagccccggacaaggaca

SEQ ID NO: 115346 - RNA, 81 nt, Homo sapiens
cgcgagcggcgcgggacgcgaggccggagccaggacaaaaccaggcagaaccaacacgaacccaagcacaaacaagaaaac

SEQ ID NO: 115347 - RNA, 94 nt, Homo sapiens
gacaggagcgccggcgcgaggacagcgcggcccgcgaggagccgccgcgcgcccgcgcccccgcgcgacgccaggagcgggacggagcgggcca

SEQ ID NO: 115348 - RNA, 67 nt, Homo sapiens
acaacacaaccagaagcggaaacaagcggaaaggacacaggcgagagacaaaaggggaaaaaaagga

SEQ ID NO: 115349 - RNA, 74 nt, Homo sapiens
gcgcgcagaggaggcggcgaggcgccgcggggcggccgccagcacaagcgcacccgcacaggaaccgcgggagc

SEQ ID NO: 115350 - RNA, 80 nt, Homo sapiens
cggacgccggccccgcgggagcaccaaaacaggcaagagcgaaggagaaaggcaacaaggcccgagcggggaacacgaga

SEQ ID NO: 115351 - RNA, 85 nt, Homo sapiens
ggaaagcaacgaggaagaacacagacagacaacgaagagaggaaagaagcggaaaggagggagcacacaacaaggagcaaaagga

SEQ ID NO: 115352 - RNA, 93 nt, Homo sapiens
cccccagcggacacacgaacccgagagggaaaaacggagggaagacaccaagcagaaagagaaggcagaacagaggaagaccagaaacccaga

SEQ ID NO: 115353 - RNA, 80 nt, Homo sapiens
gcaaagcgggagagacggaccagaccagggccgagcacagaacggccgagcgaccaggagaggagcccccgcccgaagac

SEQ ID NO: 115354 - RNA, 74 nt, Homo sapiens
acaaacaaacacccagaaacaagagggaccagaccccacaagaaaacacacaaccacaggcccaagcaaacaca

SEQ ID NO: 115355 - RNA, 68 nt, Homo sapiens
accagagccccgagggcggcgacggggccccaggacgcggagaaaggcccgaagcaaacaacgccagc

SEQ ID NO: 115356 - RNA, 60 nt, Homo sapiens
cgcagaacgcaacaccaaggcacaccaccccagggccagacagccaccgaaggggcccag

SEQ ID NO: 115357 - RNA, 76 nt, Homo sapiens
ccggcccccgacggcgcgggagacaaggaagaacgccgaacagccaaaaggaaaaaagaccaggggcccagaaaaa

SEQ ID NO: 115358 - RNA, 59 nt, Homo sapiens
gcagaacccccgcagagaaaggaacggagaaacccacacaaaaacacacaagggaacgg

SEQ ID NO: 115359 - RNA, 80 nt, Homo sapiens
ccggaaggcaagcgcagcaacaacagagagcacgggagcaacgcacgaaaacgcacgaggagcacagaaacgcacagacc

SEQ ID NO: 115360 - RNA, 40 nt, Homo sapiens
gaccagaggaacacagccgagcgcggcgagagacccagga

SEQ ID NO: 115361 - RNA, 75 nt, Homo sapiens
ccacgaggcaacgccccaggaggaagaagacagaagagcccgcgaacggaagcggagcggacccagcagagagcg

SEQ ID NO: 115362 - RNA, 42 nt, Homo sapiens
ggccgcgcagcccagcgcagccagagcagggccgccccgagg

SEQ ID NO: 115363 - RNA, 114 nt, Homo sapiens
gccggccccccaaggagaccggacagacggcccgaaacaggcgaacggcgcgcagacccagcaggcgaagaagcagcagcccaagagcagacaggcaggggaggaggcccaagg

SEQ ID NO: 115364 - RNA, 57 nt, Homo sapiens
cccgggcacccccaggggaccaacccaggaagcccggggcggcgacggagcacgacc

SEQ ID NO: 115365 - RNA, 74 nt, Homo sapiens
cagggagcaggaggcggcgcaagagagcaccacgagaggaaaagaggcccaaagaaggagccacggaaggccca

SEQ ID NO: 115366 - RNA, 56 nt, Homo sapiens
ggaggaggccagcgggacaagcgaggagaggagacacaggacagacaggcccaaga

SEQ ID NO: 115367 - RNA, 54 nt, Homo sapiens
gagaacgggcccacacaacccaggcaaccaacaggacacagcaagaaaacccac

SEQ ID NO: 115368 - RNA, 78 nt, Homo sapiens
acgcagggcgcccccggggcaaagaaaaaggagagaaaaagaggcaaaacaacaagaagaaaagagaaaaaagagagc

SEQ ID NO: 115369 - RNA, 77 nt, Homo sapiens
agagagacaaaaacgcaggcagcggccccagcccagacgcagaggaaggagacccaacaccccggccagacgggcca

SEQ ID NO: 115370 - RNA, 74 nt, Homo sapiens
cccagacaagccccagggaagccacagcaccccagcacccaggacaaaccggcgaccacacacggggacgacgg

SEQ ID NO: 115371 - RNA, 53 nt, Homo sapiens
caacggaaagaacaccaaaagggccaagcagaaaagcacacgaggccgggcag

SEQ ID NO: 115372 - RNA, 61 nt, Homo sapiens
gagacgggccgcgccgcccgcaagcagaggccgaggagagaagaaggcaagcgacggcccg

SEQ ID NO: 115373 - RNA, 55 nt, Homo sapiens
ggagcggccaaggacacagaaggaacaggcagcaagaaaacacggcaggggaaac

SEQ ID NO: 115374 - RNA, 81 nt, Homo sapiens
ggaaccacgaaagacaacaggaagaccccacaccccaaccccccaagccccacagaaacggagccgcagcgcagccccgcc

SEQ ID NO: 115375 - RNA, 81 nt, Homo sapiens
gaaggaacgaggcaaggagcaaagcagcggcgcagcccgggcacgagagaaacagaggacgaccgggaggacaagaagagg

SEQ ID NO: 115376 - RNA, 84 nt, Homo sapiens
cgcgaagcgggaccacgcggaggacgggcaacaggagccccacgccacgggccgagaaacagacaacccacagaacaaagcgga

SEQ ID NO: 115377 - RNA, 78 nt, Homo sapiens
ccagcgcagcagagcgccaagacggcccagcggagaacagaagcaagagcagaggccaggccgcccccgcgccgggca

SEQ ID NO: 115378 - RNA, 69 nt, Homo sapiens
acccccacgagggagccgagggcggagcggagacgaccgaggaaacccagcggcggcagaaccagccgg

SEQ ID NO: 115379 - RNA, 50 nt, Homo sapiens
agaaggagaccgagaagggaaacagagccccccccggggccgcaggagag

SEQ ID NO: 115380 - RNA, 85 nt, Homo sapiens
aaaaggcggcgcccgaagaaggcaagagcagaggccccagaccgccaagaggcacagggggagaacaccaggaaacaacaccggg

SEQ ID NO: 115381 - RNA, 87 nt, Homo sapiens
acaagcggcgccccagagcggacgaggcgacagggggaccgcggcgcgagggacgcaccgccccaggacggggagaaagagccccac

SEQ ID NO: 115382 - RNA, 70 nt, Homo sapiens
gccccaccgcgaccgcagccccaggccccagagccacgcaaacaaccacagggaacaaagagcaccccag

SEQ ID NO: 115383 - RNA, 66 nt, Homo sapiens
ccgagccccccaccggccggaaaaccagccagaagcagaaagggccgccaaaacagggagagagac

SEQ ID NO: 115384 - RNA, 63 nt, Homo sapiens
caacgcgacaagcgcacgcgcaggacacacaagcacaacaacaaagggaaacccagacgacaa

SEQ ID NO: 115385 - RNA, 78 nt, Homo sapiens
cggacagggacggaagagaggacgcggcgagagggacaacccaaagacggccaccgcgcaggaccagcaccacggcgg

SEQ ID NO: 115386 - RNA, 74 nt, Homo sapiens
gaaagccacgccacaaccggacaggcagcaagagccacccgccgggggaacgagaacaccagggagaacgaaca

SEQ ID NO: 115387 - RNA, 94 nt, Homo sapiens
caaggacgagggcacgaaacaggaggggccaacaaagccgagaaagcggagcccaaacacgcgccgcaccagagcggcgggaccagggacagac

SEQ ID NO: 115388 - RNA, 61 nt, Homo sapiens
cgcaaagggggacccacgcggggccagcaggggggagccaaaagggcacaccgccccccgc

SEQ ID NO: 115389 - RNA, 82 nt, Homo sapiens
cggggcccacccaccgcaggacccgcggcccccaggccccgggaccccagaggggagacacccgcggaccaccaggagggag

SEQ ID NO: 115390 - RNA, 55 nt, Homo sapiens
cggccgcgccaccgcaccgccaccggcccgacccaagccagccggcggccggcaa

SEQ ID NO: 115391 - RNA, 52 nt, Homo sapiens
cgccagagcggagcccaacgcagccgccagagcggcagcccacaagcaggaa

SEQ ID NO: 115392 - RNA, 81 nt, Homo sapiens
gccggagcgcggcaggacggcggaggaccgcagggcgacgcaccaaagcgaaacagaagcgaacggaagccccgggcgccg

SEQ ID NO: 115393 - RNA, 74 nt, Homo sapiens
caccgagcagaacagagaagagaagaaaagagcagacagacccaaggccgggcgaggcgaggccacccgggccg

SEQ ID NO: 115394 - RNA, 78 nt, Homo sapiens
gggcccgaagcccccgcaggaaccacaacccaaccagagcaaacgagacggaagaaaaaaccgacggcccgaaccaca

SEQ ID NO: 115395 - RNA, 99 nt, Homo sapiens
ccggacagagaacaccaaggccaaaaacacagcaacccagcacgaacaagggaagcagagccccgggccgggaaggggaaacggccacgcaggaaccac

SEQ ID NO: 115396 - RNA, 77 nt, Homo sapiens
ccagcccccaagagcggggacaggaaaaagaaccagagaacggaagccagaaagcggcaagcaccaccaagcgagaa

SEQ ID NO: 115397 - RNA, 58 nt, Homo sapiens
gagaagaagacaagaggaaagagaagggagggcgacgagagccgaagcagaggccaag

SEQ ID NO: 115398 - RNA, 71 nt, Homo sapiens
gcccacccagccagcacacacgaaagacaggaggcaggggaagcacaaaagcgcacccgcgccagcgagga

SEQ ID NO: 115399 - RNA, 73 nt, Homo sapiens
gaacaaagccccaggaggcgcaggaggacgcggcacaccaagagacacccacgccacccggggggcgcacccc

SEQ ID NO: 115400 - RNA, 68 nt, Homo sapiens
ggcgccaaagcgagagagggaagcgcccggcccagggaagacacacccaggaccaaccgaaaacaaac

SEQ ID NO: 115401 - RNA, 73 nt, Homo sapiens
gcaggaaaaaggagaaggacgaaggaagggcaagcagcacaagaaggaccgggacggcagaaacggaagaagg

SEQ ID NO: 115402 - RNA, 77 nt, Homo sapiens
gggaacccgcggggagcgggacacgaacggcggaggcacccaccacgggccaggcgggccagaggcaagccgcggga

SEQ ID NO: 115403 - RNA, 78 nt, Homo sapiens
ggacaccgcaacacaagggagccggggcccccagcaagaacgggaacaaaaccgcgcagaaccggccgaaaagcacaa

SEQ ID NO: 115404 - RNA, 81 nt, Homo sapiens
accaacgaaaacacgaaagagcaaaggagcacagaggaagcgaaaagaaagaagaaggagacaagaagaaagaagcaggag

SEQ ID NO: 115405 - RNA, 76 nt, Homo sapiens
cgcaagggggcaagggaacccggggcgagaggaaccggagaccagaaaaggaccgcacggaccggccgcccaggcc

SEQ ID NO: 115406 - RNA, 74 nt, Homo sapiens
gaaagaagccacccagagagaaccaggacagcggagacagccggaagaaacgccaaaagaaaccgggcaaagga

SEQ ID NO: 115407 - RNA, 86 nt, Homo sapiens
ccccaccacccgcccaggccagccccagcagcaacagcagcacaggggcgagaggcaagacaaaagaaaaccccagacggaaagag

SEQ ID NO: 115408 - RNA, 71 nt, Homo sapiens
ccaacagcggcgccagcaagaaagacagagcaccaggaggggaaacaagaaccccgccaaccgagggccaa

SEQ ID NO: 115409 - RNA, 72 nt, Homo sapiens
gcaccagagacccaccggggagaggaaacaaaagggcgacagcccagaggaccgaggcgcgagaagagagag

SEQ ID NO: 115410 - RNA, 76 nt, Homo sapiens
cacaaccaaacggaaccacgcgcaaaagagggcgccagcccccaggaggaccgacgaacccccaaggcacggggcg

SEQ ID NO: 115411 - RNA, 71 nt, Homo sapiens
cgccaacccgcccccagcgacagccgacacgggaagaagacacagaggaacccgcagacccaaccccagga

SEQ ID NO: 115412 - RNA, 83 nt, Homo sapiens
agcgacaccagcggaaccgcacggagcgcccccgacccggacggaaaaccaggccggagacgaggacgcgcacaggaaaggac

SEQ ID NO: 115413 - RNA, 80 nt, Homo sapiens
cgaggcgcccccaccacccacaagaaccccggagaaggagagggagaccccagcccacgaccccaaggggaagggaggaa

SEQ ID NO: 115414 - RNA, 84 nt, Homo sapiens
cggaaccgagagccccgaggggggcgagcagacccaggcagccgcgcaaggcagagaccaacagaccagcaacaggccggcagg

SEQ ID NO: 115415 - RNA, 82 nt, Homo sapiens
cgcggcgggaggagggccacggaggagggcgccagcaccacgacaaacgaacacaagagacagggaacaccagaccggagca

SEQ ID NO: 115416 - RNA, 87 nt, Homo sapiens
gccgggcaccaggaaggggacgggacggacgggaggggcgccgcggcggcgggcgcccccagggcacagagcaggcacccaaacagg

SEQ ID NO: 115417 - RNA, 70 nt, Homo sapiens
acacggcacgccgacaccaaaagggcagaccgcagaaagacacaaggcgacggggcaagcaagggccaaa

SEQ ID NO: 115418 - RNA, 61 nt, Homo sapiens
cagccccaaaagaaaggcagagagaagaagaaggaggccgcggccagaaacccaagaaaaa

SEQ ID NO: 115419 - RNA, 68 nt, Homo sapiens
gccggacgcccgccggcgggccgcccaggggccggcgccagaggagaccgccagaggacaggagacac

SEQ ID NO: 115420 - RNA, 84 nt, Homo sapiens
cgcccgaggaccgcaagacgggcccgagggggacaagacgaggcacgcagggacgcacaacgagagcagaccaagggcacaaac

SEQ ID NO: 115421 - RNA, 80 nt, Homo sapiens
acgcggccagcgaaaggaggggccgggaggggccacgccccgcacagacaaccagggacagagcgggagccaccagcgcc

SEQ ID NO: 115422 - RNA, 72 nt, Homo sapiens
agaaacaagcgcagggaaaaaacggcggcccacgcaacacgcaccgagagggggcacaggcccagacaaaca

SEQ ID NO: 115423 - RNA, 79 nt, Homo sapiens
gcgagaggaccggcgccgcgccccggcgcggaacccgcccagcggccgagggcagcgggggcagagacggggaacaggg

SEQ ID NO: 115424 - RNA, 83 nt, Homo sapiens
gacgaaaaggggcggaagaaaaacaaacacacgcaaaggagaaaggaaccgacaggagcagagacacgaaaagaaagcacagc

SEQ ID NO: 115425 - RNA, 74 nt, Homo sapiens
cgccagaccacagcacagccgggaaggggagccaccagccccccgagacagaagagcagcacaggggaagagac

SEQ ID NO: 115426 - RNA, 71 nt, Homo sapiens
ccgccagagcggggcacggagcgggggaaacccagacgacaaggaaggccaagggacccacgaccaaccaa

SEQ ID NO: 115427 - RNA, 113 nt, Homo sapiens
agaaaccgaaggcggcgagaaaagaaacagcgaaggagaaggagccagggcgaaaaaaaagcggagaaaaagaaagcggcgcgccaacagacccgggggaagcacaggcaagg

SEQ ID NO: 115428 - RNA, 80 nt, Homo sapiens
ggcggcaaaaggcggcgccgaggagcgggacaacccaggagcagacagagaagcgcgcagcaggcaaaagcagaccggaa

SEQ ID NO: 115429 - RNA, 79 nt, Homo sapiens
ccggaggaggccgaggggaccagccgggaggcgcccacccccaccaccgaccgcgcacaaaggcggaggaaggcagacc

SEQ ID NO: 115430 - RNA, 81 nt, Homo sapiens
cccaagagcgggaacagaaagaaccaagagggagacaagggaaaaggaagacaaaaaacacaaggaaagaacccagaaagg

SEQ ID NO: 115431 - RNA, 70 nt, Homo sapiens
ccccgaacagcaggcgccaccagcccggaggcaccggcacggaccaccccaacaccgggggagaaccggg

SEQ ID NO: 115432 - RNA, 76 nt, Homo sapiens
ggaaaggcgcgagacccagaggccgcggccgcgggcggagaacggaaaagcaccaggaagcagagaggaccgcaga

SEQ ID NO: 115433 - RNA, 71 nt, Homo sapiens
aaggaggaaccccgagccggagaccagcaagacacacgccaaacggaacaaaaccgaaccaacaccacaca

SEQ ID NO: 115434 - RNA, 53 nt, Homo sapiens
gcgccgcggcccggagcgcggcccgaggcccgcccagagcaacggggcggcac

SEQ ID NO: 115435 - RNA, 76 nt, Homo sapiens
cgccgagagagagaccgagaggcagggagcggcgaggccgaagaaggccgcccagacacccccaagcaccaacaca

SEQ ID NO: 115436 - RNA, 84 nt, Homo sapiens
acgcaaacaacagccaaccgcgcaagaggagaagagaaggaaagggccgagaaagaagagaggaagaagaggaggaggaggaag

SEQ ID NO: 115437 - RNA, 76 nt, Homo sapiens
aagccggaggagaagcaagaaggcccggacacagcaaaccgggccacagggacggccgagcaaacccagagaaaac

SEQ ID NO: 115438 - RNA, 81 nt, Homo sapiens
ggaagagccacgccccgcccagaccggaagaacgggaacccccgcagggcgcaagaagaacggacagaccacgggccggca

SEQ ID NO: 115439 - RNA, 71 nt, Homo sapiens
gaggaagacgagaggacgacagcacccacaaaacggacagaaaaccccaccaggaggagcgccgcggccag

SEQ ID NO: 115440 - RNA, 39 nt, Homo sapiens
gcccagcaccgcgggaagaagacagcccaacaaggcggg

SEQ ID NO: 115441 - RNA, 69 nt, Homo sapiens
aacaccaaaaacaaaacgaaccaggacggcaagggaagagacggacacacagaaagggagaaccgaacg

SEQ ID NO: 115442 - RNA, 69 nt, Homo sapiens
cagaagaaccagcagcggaccggcaaaaaagcaaagaaagaagcaccgaagaaacaggaacaggggacg

SEQ ID NO: 115443 - RNA, 79 nt, Homo sapiens
gcaaccacgggggagcggcggaggaaaggacaaaacccggggccggcgcggcacccacaaagcacgggagaccgcggca

SEQ ID NO: 115444 - RNA, 85 nt, Homo sapiens
ccagaaacggacaagacaaggccaccggcccggcgcaccagcgcacacgccgccacggcgcgagaggacaggagcgcgggcaagc

SEQ ID NO: 115445 - RNA, 69 nt, Homo sapiens
aaaaaggaagaggggaagccaccgagcaacaacagccacagaagcgaaggacggaaaagagaaaagcga

SEQ ID NO: 115446 - RNA, 84 nt, Homo sapiens
cgaagccgagcgaagcggcggaacagacacaccggagcaagaccggccaccccgaccaagcaggcagcgaagagcacagagaag

SEQ ID NO: 115447 - RNA, 84 nt, Homo sapiens
cggaagaagaaagagcaacccaagcaaaagcgagaagcagaaagccaaagaaagaaagaggaagaagcaaagagaagaaaggag

SEQ ID NO: 115448 - RNA, 78 nt, Homo sapiens
gcaacaagaccaccgccaaacagaacacgcaagcacagcgacacacagggcgaaccccacacacccaacccgcccagc

SEQ ID NO: 115449 - RNA, 75 nt, Homo sapiens
agagccgccccgaacgggggcccccccgccggacagccacaaaagaagacccaaagcaccaacaaaaagcaacga

SEQ ID NO: 115450 - RNA, 75 nt, Homo sapiens
gaaaaccaacgcccccccagcacacagaggagagcgacgagaaggagggcaaaaaaggagaaagccacaaggaca

SEQ ID NO: 115451 - RNA, 77 nt, Homo sapiens
acaagacacggagcaaggaggaaaacacacgaaacagacacgccaccaagaaagcacggacaacgcccaagaacaga

SEQ ID NO: 115452 - RNA, 76 nt, Homo sapiens
aagaagcggaaaaagcccaagaaaaacgcaagaagcggaagaaagaagagccaagaagggaagaaaacaagaaaaa

SEQ ID NO: 115453 - RNA, 95 nt, Homo sapiens
cgcgccgagcgggccggggcaggggcggaggcggaggcagaggggaggcgcgaaaggccggagaacaccgccacccacgccccagaagagaaaag

SEQ ID NO: 115454 - RNA, 85 nt, Homo sapiens
gcccacacgagacccgggcggcgcgcgcccgaggggagcaaggacaggaagaggagaaacgggcgagccacgagcaggccgagca

SEQ ID NO: 115455 - RNA, 80 nt, Homo sapiens
gaggcgagcagcacagagacggcgaaagcgagcaggaacccggaagaggaaccgagaggagggaggacaggcaggacgcc

SEQ ID NO: 115456 - RNA, 83 nt, Homo sapiens
gccgcgcaccgcgcgcggacgcgggagacgccagcgagcgggaggagcccgcggagacgaacggcgcgcccaaaggaaacccc

SEQ ID NO: 115457 - RNA, 76 nt, Homo sapiens
gggccacgccgggggcggagcggagcacacggaggccggagaagaggcagcgagaagaaaaagaagagagagacac

SEQ ID NO: 115458 - RNA, 67 nt, Homo sapiens
ggaccacccgcaccccacagagagaaagagcccagcgagccagaggagccacagagagcagcaaagg

SEQ ID NO: 115459 - RNA, 53 nt, Homo sapiens
gcacgagacacgcaagagaagcgaccgcgcacgccagcccaaaaggcagagcg

SEQ ID NO: 115460 - RNA, 72 nt, Homo sapiens
acgaccacgagagaaaagagccaaacaaggaaacagaagacggaaaggacacaggaacgccacaagaaacaa

SEQ ID NO: 115461 - RNA, 76 nt, Homo sapiens
cccggcccacgacacaggaagaagacaggacaaaaccaaagacacccagcgaagcagaccggaacagagaacagga

SEQ ID NO: 115462 - RNA, 59 nt, Homo sapiens
gaaaaaacccaaggcgcaaagacaacaggcacaaagagagaaggaacacccacagggca

SEQ ID NO: 115463 - RNA, 79 nt, Homo sapiens
cagggagagagaggaggcacaaagaaccccaggagagcgacgcaggggaggacagggaacggcgaggagccaccgggac

SEQ ID NO: 115464 - RNA, 75 nt, Homo sapiens
acagccccgagaccggacgcccagacaggcgcccagaccccagcgggccgagaccacagccacacgcaagagcaa

SEQ ID NO: 115465 - RNA, 66 nt, Homo sapiens
ggagacccggggacccccgacgccaggcagcgcccccaaacgaaggcgaccaagccacgggacaag

SEQ ID NO: 115466 - RNA, 82 nt, Homo sapiens
gaccacagagggacccggacaaccagaggcagccagcagggggaggaacagcgacaccaccagaaaagacagcgcaagcaag

SEQ ID NO: 115467 - RNA, 77 nt, Homo sapiens
gcagggggacccaacgcggcacaccaaagcagccgggaggacagggcaccggggcagagcaccaagcagacaaacga

SEQ ID NO: 115468 - RNA, 77 nt, Homo sapiens
gaccccaggacggacgacacccagagggcaggcccaccgaagacagaaaaaacggggggaccacagaaccccaaaac

SEQ ID NO: 115469 - RNA, 79 nt, Homo sapiens
agaggacacggcccacccgggggagaaccgccagcgacgggaaggcaggacccacgcacgagcaacgagaagagagaag

SEQ ID NO: 115470 - RNA, 76 nt, Homo sapiens
cagcggggccacacgcacacagggggacaacagcaggagcaagcgacaaacaggacagggggagaggcaaggaaac

SEQ ID NO: 115471 - RNA, 56 nt, Homo sapiens
ggagaacacagaaacccgccccgggcggccacgaaccaagcaccgcgggggaaagc

SEQ ID NO: 115472 - RNA, 75 nt, Homo sapiens
agcgacccgcgcaaacaaacagcggagcaggggcagagacgggagcgagcacaaccgagccaacacggcaaagcg

SEQ ID NO: 115473 - RNA, 78 nt, Homo sapiens
agaaagcaccaaaaccgaaccagaacgaagacgccccgcaaacaccaggagagaacccggacccagaggaaagcagaa

SEQ ID NO: 115474 - RNA, 85 nt, Homo sapiens
cgccaggggacgccaggccggaaacgggcgggagagacaacagcagcaagaacaggccaacaccgcgccacaaacaggacaaaaa

SEQ ID NO: 115475 - RNA, 69 nt, Homo sapiens
agaagcggcgcggaggggacaaccccagagaaagagacccacggccagaagccaagaccagagaagaac

SEQ ID NO: 115476 - RNA, 76 nt, Homo sapiens
caccaccagccaccccacaggacggaggcaaaacacccaagggagcaaggaccacagaaacgcagaaaaaggggaa

SEQ ID NO: 115477 - RNA, 76 nt, Homo sapiens
cagagcgagcgccccgcccaggaccacggccgagccgggacaagccgccgcgccgaccagggagggaagggccgac

SEQ ID NO: 115478 - RNA, 82 nt, Homo sapiens
agaccccacagaaaccagggcacacagggaccaagaagccccggggacacgcgagaaaagacgccgaagggaagaccagcgg

SEQ ID NO: 115479 - RNA, 76 nt, Homo sapiens
accaagccgcccacacgccaaccggccagaggacgaggggccccccagccccagcgcgcgcgccaggaggcagacg

SEQ ID NO: 115480 - RNA, 77 nt, Homo sapiens
aaagcaacccgaccgaagaaagacagaccggcacccggcaaccagaaacacaggccaaggcaaaagcagaccggaaa

SEQ ID NO: 115481 - RNA, 100 nt, Homo sapiens
agcagaagaggaacaagggggggaaacccaccgggaaaaggcacgaaggggcggagaacggaaaagcaccaggaagcagagaggaccgcagaagggaagg

SEQ ID NO: 115482 - RNA, 68 nt, Homo sapiens
gcggccaagacagaaaaagagccaacgcgcgcagcacggcagacaaaaaggcgagaacgggaagcgca

SEQ ID NO: 115483 - RNA, 71 nt, Homo sapiens
gagaaagaaggcaagggacacgacaacagaaagcaagaacacaaaggggaaaaagcgcccagcccgcaaag

SEQ ID NO: 115484 - RNA, 79 nt, Homo sapiens
gaccgagagcggaccgagagcgcgaaacgcacgagaagggaaaaggggaggcaaggcaagagcgaacagaaggaacgac

SEQ ID NO: 115485 - RNA, 58 nt, Homo sapiens
cgcggagaggaagccagccaccagccagggagaacgggaaagagagacgcggagagca

SEQ ID NO: 115486 - RNA, 41 nt, Homo sapiens
gccccccaaccaggcaaccaacagccccgccggaggcgggg

SEQ ID NO: 115487 - RNA, 79 nt, Homo sapiens
agcaccggcgcgggggcaggcgcgcgccgcaacgccgagcgcaccgacacgccgccaaagacaagcagaccggaagacc

SEQ ID NO: 115488 - RNA, 71 nt, Homo sapiens
gcgggaggaacgggggagcccacaggagccaggaacgcacaccagcaccagcccaccaaaccagcacgacc

SEQ ID NO: 115489 - RNA, 94 nt, Homo sapiens
gggcgaccgggcaccagcaggacccgaggccaggagccaggggcccagaagcaggaggcaaagggaccccaagaaaccaaagggcaagagccgc

SEQ ID NO: 115490 - RNA, 74 nt, Homo sapiens
ccggaccgggagacacggccagacgcccccagaggaaggccaggaacgcagaagaccgcaggggaaaaccaaag

SEQ ID NO: 115491 - RNA, 78 nt, Homo sapiens
cgccgccgcccgcggggccggccgggagggcccgggggacgacggagcacgaaagaaagaaacagccaacccagagca

SEQ ID NO: 115492 - RNA, 88 nt, Homo sapiens
aaagaaaaggaaaaacgaagaacggcgcaaaaccagaggagggcggcgaagacagagcaacgaggccgggccggaaaagagagaaacc

SEQ ID NO: 115493 - RNA, 69 nt, Homo sapiens
gagccagggaggaaggcgcaggagcccggccaccacacccagcgggacccggccagaccccaacagaca

SEQ ID NO: 115494 - RNA, 88 nt, Homo sapiens
gacgccgggagacaagaagaacgcgcggcgcccagaaccgcaaacaagaggccggcaggaagggagaagaaaggggaccggggacaca

SEQ ID NO: 115495 - RNA, 75 nt, Homo sapiens
aacacaaggagggaccaaaagcagaggacagcaacccagcaaacggcaaaggacaaaccggcgaccacacacggg

SEQ ID NO: 115496 - RNA, 77 nt, Homo sapiens
cggagaaccagaccggcgacccgcgacgccgagcacccaggcgacgcccaccaagggccacccccaaccaggaccaa

SEQ ID NO: 115497 - RNA, 73 nt, Homo sapiens
ccgggggaagagccgcgacacgcggaggagcccccaggacaggcacacccgggaaaaccgaacacccagccca

SEQ ID NO: 115498 - RNA, 67 nt, Homo sapiens
ggcaccccgcggcccgcacgccacgggccagcacgcgagagcccgggaagcgcagagggaacacggc

SEQ ID NO: 115499 - RNA, 78 nt, Homo sapiens
gagaccggaccgagagcggaccgagagcgcgaaacgcacgagaagcccagggcgggacaaagagacagcagaaggagg

SEQ ID NO: 115500 - RNA, 75 nt, Homo sapiens
gaacccgagaccgagcagaacccgaggcgcggcggcgaggggaaaggacaagggacagcagccgcagaagacgac

SEQ ID NO: 115501 - RNA, 38 nt, Homo sapiens
ccagaggggcacccccagggaggggggaacgccgcgag

SEQ ID NO: 115502 - RNA, 66 nt, Homo sapiens
aacagaaaaggaagaaagggacaaagagaggagcagccaggacccgaaaagccagcaagcgagacc

SEQ ID NO: 115503 - RNA, 52 nt, Homo sapiens
cagaaaaagcacacaccacgcaacggccagggcggagaacggaaaagcacca

SEQ ID NO: 115504 - RNA, 90 nt, Homo sapiens
cagacacggaccgagccgcgaggacacgggcgcaaccgcagcacacagcgaccgggagaacaagacgagaggcgacaaagacgcggggag

SEQ ID NO: 115505 - RNA, 40 nt, Homo sapiens
gcgggaaagaaggcaaaacacggccaaagcacagaaccca

SEQ ID NO: 115506 - RNA, 81 nt, Homo sapiens
cggccgcgccaacccagccccgccaacgccccgagagggaccagcaccaccggaggccaagaagagaccaccgagaccaaa

SEQ ID NO: 115507 - RNA, 51 nt, Homo sapiens
ggggcacgaccaacccgcgagaaggaacagagacgccaagcccgggcccgg

SEQ ID NO: 115508 - RNA, 48 nt, Homo sapiens
caccagcagccccacccgggcgcgggaacaggacgacacgagccgacc

SEQ ID NO: 115509 - RNA, 76 nt, Homo sapiens
gaagggacaggcgcaggaagaagaagggacacccacagcacagggaagaggagaaaacgaagagcaccccacagaa

SEQ ID NO: 115510 - RNA, 56 nt, Homo sapiens
acggagaaaccaccggcggaccgcacaagcaggacaaagaccaagaaaaagaccaa

SEQ ID NO: 115511 - RNA, 77 nt, Homo sapiens
agggcagaggaaaagcaagaagacgaggagcaggcgcaaaaaagcagaaccaaaggcaagaaggaaaaaacacgaca

SEQ ID NO: 115512 - RNA, 78 nt, Homo sapiens
ggagcgaaggaggaaggcaggagaagaacccaggaccgcgcagacgcgcaggacggagcggggccaggcggccaggac

SEQ ID NO: 115513 - RNA, 82 nt, Homo sapiens
gaccacggcacggacccgcccgcacaggacacgaggcgcgacgccacagaccacggcccagagaacacggaccaggacacgg

SEQ ID NO: 115514 - RNA, 73 nt, Homo sapiens
gcgccgccaacgcgcccccgaggaaaagaaccaggcaacacaaaaggccgccacagaagaccgaacagagagg

SEQ ID NO: 115515 - RNA, 87 nt, Homo sapiens
gcgcggacgcccccggaagcgcccccccagggcaagaggcgaccacaaccgacccgggccccccgaaccggaacggaccacccaggc

SEQ ID NO: 115516 - RNA, 72 nt, Homo sapiens
cacagccacaccagccaaaggagagagaaaagacacagacggcaaaacccaaaaaaccagaagagggacaag

SEQ ID NO: 115517 - RNA, 72 nt, Homo sapiens
gccggcccgcggaaaggccaaagcccagccccaggcacagaccccagcgagcaacacagcacccggcggcaa

SEQ ID NO: 115518 - RNA, 78 nt, Homo sapiens
ccacggcacaacacacccgcaagggccagaagcccccaggaggagaacgagcaacggaagccagaagaagcaccccca

SEQ ID NO: 115519 - RNA, 109 nt, Homo sapiens
aagagaccccagacgccgaggccccagaacaagcggagccaccggcaccacgccgaaggagagcgccagcgaggagcccccacgccggggcggaccggcccagagcccg

SEQ ID NO: 115520 - RNA, 75 nt, Homo sapiens
gaaaagcaggcagcaagcccccacaacgcaaagaacacagggggaaacaggaagagaacagaacggaagaaagca

SEQ ID NO: 115521 - RNA, 84 nt, Homo sapiens
gacagcccgccccccaaggaagcggcaaagccagaaagaggaggccagagcgggacaaaccggcgaccacacacggggacgacg

SEQ ID NO: 115522 - RNA, 81 nt, Homo sapiens
acccgcccgggcaggcgcaaaacaccgcggacgagggcaagagagagggagcacagcgcggaagccccgaggcagccccgc

SEQ ID NO: 115523 - RNA, 83 nt, Homo sapiens
ggcccagagacgcggggacgggccggggcccccggaacgaggcacaggcacaaggacggacaagaacacccaggaggagggca

SEQ ID NO: 115524 - RNA, 79 nt, Homo sapiens
gagccaccagggaagcgcggagaccaggagcacaagaggcgagagaaacgacgaagagagaagacaaggcgaagaccgc

SEQ ID NO: 115525 - RNA, 63 nt, Homo sapiens
ggacggcacgcagcccggcgggaggaaaagaccaccacggcaaaagcagaccggaaaacccac

SEQ ID NO: 115526 - RNA, 81 nt, Homo sapiens
cggaagagaccagagaagacacaaggccccacacaggaaggaggaggaccacaaaccccgcccagcagcagggcagccaaa

SEQ ID NO: 115527 - RNA, 76 nt, Homo sapiens
aggcagagaaccggaaacacaaaggaggagacagcaaggaagaagaaaagagagccaaggcggcaaaacccaaaac

SEQ ID NO: 115528 - RNA, 71 nt, Homo sapiens
ccacggccggaaggcagcaagccaggcgcgggacaaccaacacaaccaaagagaagaaaacgcaaagaaca

SEQ ID NO: 115529 - RNA, 80 nt, Homo sapiens
ggagaagaaaacaccggagcggacaggcgagaccaggagaaagcaaaccgcacccggagagacgagaacagacagcaacc

SEQ ID NO: 115530 - RNA, 78 nt, Homo sapiens
ccaaaaggaaccgagacagaaagaggaccagaaaccaagacgcaacccacaaagaaaccgcagaacagaaacaacaga

SEQ ID NO: 115531 - RNA, 94 nt, Homo sapiens
cagggcccaggagcagccaggcaaggacaccaggagagagccaaagggagcagggcaggacggcacagacacgacaccagagaccgcaagaaaa

SEQ ID NO: 115532 - RNA, 72 nt, Homo sapiens
cccaacagacccccagcgggccaaacaggaccagcaagccagccaagaggccagaccaaaacggacggagca

SEQ ID NO: 115533 - RNA, 87 nt, Homo sapiens
caaccgaggcaacgcgaaaaacaaccaccagcgagcaaaaaggcaaagaccaagaccaccaagaagcgccccagcggcaacaccaag

SEQ ID NO: 115534 - RNA, 81 nt, Homo sapiens
caggccccgagaggaacccagccgacacgacgccgccggcaggcccgcgcaccagggcggaaaacaccccaaaagccaaaa

SEQ ID NO: 115535 - RNA, 70 nt, Homo sapiens
gcagaggcaacagacagaggagccccgccacaccagcaggcgccaaacaccgggccagggcaacaagaca

SEQ ID NO: 115536 - RNA, 31 nt, Homo sapiens
acaaaggagcacaggagcgaaggagcacgca

SEQ ID NO: 115537 - RNA, 74 nt, Homo sapiens
agagcgagaagcacgagaaagggcagacaccccacaggcaccagcagcaacgaacaggaggaaaagagaaccag

SEQ ID NO: 115538 - RNA, 69 nt, Homo sapiens
gcacgacaaaagaagcagccaggaggcgaaacgcaaccagcagcaaaacgaaagcggacaggaaagaaa

SEQ ID NO: 115539 - RNA, 78 nt, Homo sapiens
agggagaggaaaccccaaaaaagacaggggagaaaagggccggggacgccaaacgcaagggagaccagacaaacgcac

SEQ ID NO: 115540 - RNA, 70 nt, Homo sapiens
gcaagccagagagcagaacaaaacgacccagcaacagagaagaggagcagaggagagaaagaacccacgc

SEQ ID NO: 115541 - RNA, 83 nt, Homo sapiens
ggaggcgggagaaggcgcaacgcggcgcaaaaccaaagaccagacagagaaagccaccaagaagaccaaagaaaaggagacaa

SEQ ID NO: 115542 - RNA, 79 nt, Homo sapiens
ccccagcagacaggcacagagccaacccgacagggcgggaagaaacggggagccgccacccaccggaagacgccgcgaa

SEQ ID NO: 115543 - RNA, 82 nt, Homo sapiens
cgggaacggcgcggaagagggacgaggccacagcagaaaaaaccgggaggaaaaacgaaaacgcacaaacccagggagcacg

SEQ ID NO: 115544 - RNA, 62 nt, Homo sapiens
cggagcggacagagaaggccgagccggaagcgaggagaagcggcgccgcggacagcgacccg

SEQ ID NO: 115545 - RNA, 74 nt, Homo sapiens
aggcaaagaaaccacgagcaccgcgccgagccacgcggccacgcaacgcccgcggcggaaccccgcaccacagc

SEQ ID NO: 115546 - RNA, 76 nt, Homo sapiens
caccccacgggacagcccaacccccgcaccacacaccccgaagacagagaggacagcaaaggaaaccggaagagga

SEQ ID NO: 115547 - RNA, 70 nt, Homo sapiens
caaggacacaaggaaagacacaggggcggcgaaaacacccacgccgcagagagaaaggcgagcgaagacc

SEQ ID NO: 115548 - RNA, 68 nt, Homo sapiens
gaggaggaaaaggccacgggaggaagacccaaaagggaccaaacaaacaacaccgaaacgagaacgca

SEQ ID NO: 115549 - RNA, 82 nt, Homo sapiens
ggggccacgaacccaagaaaagacaccagaggggacgaagggggcaagcgccacgcagagccccgccaggaagacacgccgg

SEQ ID NO: 115550 - RNA, 76 nt, Homo sapiens
cggaggagaaacaaagcaaagcacagccgccaggaccagcggacgaggcagcaacacaaagacacgcaacaggccg

SEQ ID NO: 115551 - RNA, 101 nt, Homo sapiens
cgaggaaccacacgggggcacggggccacccgaccaccacacccaccagggcagaaccccagagagggaggagaaggaccgagaggacccagaggaacagc

SEQ ID NO: 115552 - RNA, 62 nt, Homo sapiens
cagaaaacccagaagccggaaaaagagagacaagagagacaccccaaccgacaaagagcacc

SEQ ID NO: 115553 - RNA, 80 nt, Homo sapiens
ccggcgggacgcgagccgccccgaacaagcagggcggcgggggaagaacgaagcgcgcagaaaacacagaaggcaaaagc

SEQ ID NO: 115554 - RNA, 77 nt, Homo sapiens
ccaggcagccaaccagagcgccacccaggaggcggagcggcaaaaaccgggaccccaagccgaggaacagcgcgcca

SEQ ID NO: 115555 - RNA, 72 nt, Homo sapiens
gggccaggaaaaggggggaaggcacacaacgacccggacagcgaccgcaagaaggcgccccacgaaacacca

SEQ ID NO: 115556 - RNA, 73 nt, Homo sapiens
caaaaagacccgacgcgaggcaagaacggaagcacgggcggaggaaagcacaagcagagcccccgcagaggga

SEQ ID NO: 115557 - RNA, 58 nt, Homo sapiens
ggcacggagaccacccagaaaaagagggcggaaacagcagaagagcgcggcaagcggc

SEQ ID NO: 115558 - RNA, 53 nt, Homo sapiens
agcgcccagcagcgcagagccgcgaagcagccacggaccccagcacgaaaaga

SEQ ID NO: 115559 - RNA, 83 nt, Homo sapiens
gaaacggaagaaaaaagaaaagaaacgacaaaaacacgagagagaggagcgagaggaagcggaagaaaaccaacaaaggacag

SEQ ID NO: 115560 - RNA, 79 nt, Homo sapiens
gccgcccccccaggcgaccgcccagccgccgcggagagccggaccagcggagccagaaagggcagcaagacacgaagcc

SEQ ID NO: 115561 - RNA, 85 nt, Homo sapiens
ggggagcggggcaccacggaaaccagaacccacgacccggcgaggaccccaggaccgccgaagccacgccggccggggcgccgac

SEQ ID NO: 115562 - RNA, 81 nt, Homo sapiens
ggggcccgaagcccccgcaggaaccacaacccaaccaggggagccgccaccaaaagcagacggaaaacccacggggaagac

SEQ ID NO: 115563 - RNA, 36 nt, Homo sapiens
gcgcaggggagaaccggaaggaggaaggccgagcag

SEQ ID NO: 115564 - RNA, 78 nt, Homo sapiens
gacaggcggacggcagcggcggcagcccaaaaccggaaaaccagcaacaggacagcacacgaccaggaacgacaagca

SEQ ID NO: 115565 - RNA, 37 nt, Homo sapiens
ggacgcccgcaacccgacacgaggagaagcaagggac

SEQ ID NO: 115566 - RNA, 89 nt, Homo sapiens
cgcagacgccaaggccccccggccagggccgggagccgggccggccagccaggcgaagccgacgagcccgaacagacgcaccagcggga

SEQ ID NO: 115567 - RNA, 83 nt, Homo sapiens
ggcacaaaaaaccacaccccccaccgaggaagagcgggagaaagggaaagcagacgaaggacaagccgagggaagacaggaag

SEQ ID NO: 115568 - RNA, 76 nt, Homo sapiens
gcaggagccaaagccgcaggcccccccccacacggggacccgaacccccgggccggaggacccagccggccggcaa

SEQ ID NO: 115569 - RNA, 64 nt, Homo sapiens
gccggagcggcccgcgccgggcgccggcaccgcggcaggaccaagaacgcccagcccgcgggca

SEQ ID NO: 115570 - RNA, 72 nt, Homo sapiens
ggccccacgcagccagccccggaagacgggaagccaagcaggacaaccacaaaagcagcaaacagaagccag

SEQ ID NO: 115571 - RNA, 60 nt, Homo sapiens
gagacacccagagacggaggaaacccgacagcaaagccccgagcgaacccgacaaaaaaa

SEQ ID NO: 115572 - RNA, 85 nt, Homo sapiens
accagagggccaggccagaagagccgaccacaaggggaggacaaccgcccgggaccagaacgccaccagaggaagacgagagaag

SEQ ID NO: 115573 - RNA, 71 nt, Homo sapiens
caggaagaagaaagagggcgccagggcggagaacggaaaagcaccaggaagcagagaggaccgcagaaggg

SEQ ID NO: 115574 - RNA, 83 nt, Homo sapiens
aaaaccagggaacacgaagaaaagacacgcgacacagaaaccaccccacccaacccccgacacagaagaggagaaaacggaac

SEQ ID NO: 115575 - RNA, 72 nt, Homo sapiens
cagagcaaggaggccccagcggaccgaacaggcaacgcgcccaagaggacagcgccagaaagcaaaacccgc

SEQ ID NO: 115576 - RNA, 81 nt, Homo sapiens
gggaggcagcgcgggacccagcccaggcggcgcggacggggcggggacagagcgcgagcagcagaagcgccggaaacccca

SEQ ID NO: 115577 - RNA, 75 nt, Homo sapiens
cccgccacagcacacgaaaacggcgcacaaagcgcggagccagcgcccggcaaggagcgagcgggagacaccggc

SEQ ID NO: 115578 - RNA, 118 nt, Homo sapiens
ggaggggaaggacaacccccgcaggcggcggggcagggcagacaacaccgacgagccgcggagaaccgaaccaacagccagccaaagccaggcagcacagcacaggaaaacaaacgag

SEQ ID NO: 115579 - RNA, 69 nt, Homo sapiens
aaaaacaccgacacagaggccccagcaaaggaaaggggaggaaggggagaagaaaaagcagcaaaagag

SEQ ID NO: 115580 - RNA, 97 nt, Homo sapiens
cccccaccacccggaggagcagcccgccccgccgggggagacgacccccgccagcccccgggcgcgccggacaggccgccgcggcgggacagcggcc

SEQ ID NO: 115581 - RNA, 66 nt, Homo sapiens
aaccaaccagaaacacagaccgaagggcacagcacacgaaggcccagagcgcggcccaggggccaa

SEQ ID NO: 115582 - RNA, 82 nt, Homo sapiens
caaccagacgccagcgggacgaggaccgagaccgcggccgggaccgaggccagggccccccacgcgagaacccgggccgggg

SEQ ID NO: 115583 - RNA, 86 nt, Homo sapiens
cggcgaccgaggggagagggaacgcagcgaaagcggaacggcagggagaccccaaggcaaaaccaccacacgacaaaaaccggaac

SEQ ID NO: 115584 - RNA, 74 nt, Homo sapiens
ccaccaccagagaagcacagcagcaaccaaacccaagaacaaaaaggacgcgccacggagagacacggcggggg

SEQ ID NO: 115585 - RNA, 50 nt, Homo sapiens
gaggcgccgggacaggcaacggggcggcacacaaggagcgaagggcaggg

SEQ ID NO: 115586 - RNA, 105 nt, Homo sapiens
aaaccagaccagacgggaggggaggagaaacagaaagaacccccgcagagagcgagacacaggagaacgacgagaagaacaaagacagacgaacgcaagcgaaga

SEQ ID NO: 115587 - RNA, 80 nt, Homo sapiens
cgcccccccccagcccgccgcgcagccagaggcaccggagcaccggagcgagagaagcccaaggcaaccccaaaccacag

SEQ ID NO: 115588 - RNA, 57 nt, Homo sapiens
caagcgacggccccacaagagagggcggcagaccagaaggcaaaaggggacagcccg

SEQ ID NO: 115589 - RNA, 71 nt, Homo sapiens
ggaggcgcgcagaaccagaccgggagcacgcacccacgagggggaaccagaagaggccaaccagcacgaac

SEQ ID NO: 115590 - RNA, 69 nt, Homo sapiens
gccccccccaggcccgccgcccccgccaagcaacggggcggcacacaaggagcgaagggcagggagaac

SEQ ID NO: 115591 - RNA, 83 nt, Homo sapiens
gcaggcagcaagaagacgagcgagcggcaggcgcagcgcagccgccagcgcaaggcagacagaacaagaaagggacaccaagg

SEQ ID NO: 115592 - RNA, 61 nt, Homo sapiens
accgacccaccccccggaccagcccacaagaaagaggaagaaggaagggagcaccaccgca

SEQ ID NO: 115593 - RNA, 80 nt, Homo sapiens
cccaccacccggaggagcagcccgccccgccgggggagacgacccccgccaggaaacagcccgaacgcacagaagaaacc

SEQ ID NO: 115594 - RNA, 67 nt, Homo sapiens
accgagcaacaacagccacagacaggagcggggcaacaagacggaggaagaagcagcacagcgaaac

SEQ ID NO: 115595 - RNA, 75 nt, Homo sapiens
ccggcgcgcgccccaccaagggcgagacaccccgccagagcagccggcggggcccgcaggagccagaggccgcgg

SEQ ID NO: 115596 - RNA, 85 nt, Homo sapiens
agcaggaagacagggacagggcggaggcacgcacaggaccacaggagggacgaaaaaaagaccggcaagaaaggccacggacaag

SEQ ID NO: 115597 - RNA, 80 nt, Homo sapiens
caggaagcacgccgaccaacacgcaaagaacaaaccaaaccacgaaggccaagagagacagaggcacaaaaggagaaagc

SEQ ID NO: 115598 - RNA, 70 nt, Homo sapiens
cccagccacaggaacagagacagcgccgcgggcaaggaaacggcaaaacaggcgaccaaaacgaggaggc

SEQ ID NO: 115599 - RNA, 71 nt, Homo sapiens
aagcggaggcacccaaccgcgggacagcaggagcgaccgcccacacgccggcccgagcaaaggacagcggg

SEQ ID NO: 115600 - RNA, 78 nt, Homo sapiens
cgcaaccacgaaaagaggacacgaggaggggacggcccgccacaggcacagacgaggagggaagcgaagcgggagacg

SEQ ID NO: 115601 - RNA, 78 nt, Homo sapiens
aggaggaagggagcgggccccagaaaaacaaggaaagaggggaaaggaggaggcccaagccaccacagccacccagca

SEQ ID NO: 115602 - RNA, 75 nt, Homo sapiens
gcaaagagccagaggggagacacgccaaagccccaagaaccgcaaggcgcccagaccgacgccggcagccccgcg

SEQ ID NO: 115603 - RNA, 79 nt, Homo sapiens
ccgccacaaccgccagacaaccggagccacgccccacgaccgccaggacgagcaagaagaagaagagagcgggaacaga

SEQ ID NO: 115604 - RNA, 72 nt, Homo sapiens
gggaagcgaggccagggggagggccacccacagggaaaccacagaggcaagaaagaaacccgaagacaacac

SEQ ID NO: 115605 - RNA, 69 nt, Homo sapiens
gcacacaaaaaaaccaaagaggagccagaccagaccaccagaagacagcaaagccacagagagagcccg

SEQ ID NO: 115606 - RNA, 73 nt, Homo sapiens
aacggaaagcgaaggaaagagccaaagagggaagcccaacccagaaagaggaaccagaggaaagccccagaag

SEQ ID NO: 115607 - RNA, 85 nt, Homo sapiens
aggaggacgaggaggaggaccccccggcgcgcagcgccggcagcggggggaagaggacaggagagacaacggaggcaagaaagac

SEQ ID NO: 115608 - RNA, 73 nt, Homo sapiens
gggacgaacccccggccccgaggacccagggaagcacccgagacagcccaggggccacccacaaacacaccgc

SEQ ID NO: 115609 - RNA, 68 nt, Homo sapiens
accgccgagcagagagaaacagaacgcgaacagacagaggggcgaagaaggaacaagcgggaaacgga

SEQ ID NO: 115610 - RNA, 75 nt, Homo sapiens
ccgccgcccggccgggccgccgcgcccgcgaggcccgagaaagacagaaccagcacagcaaaaaaggcagcgcac

SEQ ID NO: 115611 - RNA, 90 nt, Homo sapiens
caaagcaccaaggagccgggcccggcgaggcgacgacgaagggcaagaggcacccgacgcgcacacagccgcccaccgcagcgccacggc

SEQ ID NO: 115612 - RNA, 74 nt, Homo sapiens
cagcagaggacgcggccaggcgacgggaagcgaccgcaggcgggcccccgaccgaacggccgagcgaccaggag

SEQ ID NO: 115613 - RNA, 80 nt, Homo sapiens
cggcacgccagcccacacccccggccagccggcgccggagcgaaacacgacggaagcacgggcccagacgcagacaaacg

SEQ ID NO: 115614 - RNA, 48 nt, Homo sapiens
ccaccaaaacgggaaagagacagcacaggagaaggaccaagaaccagg

SEQ ID NO: 115615 - RNA, 79 nt, Homo sapiens
cccacacaggacagcgccggccacccaaagcacgggggcaacagaggacgcaggaccccccccaccccaggagaccagg

SEQ ID NO: 115616 - RNA, 75 nt, Homo sapiens
ccccggccggcccgcgcgagcagggcggcggccgaacccagcgaccgccaggaggaggaaaaccaggaaggacag

SEQ ID NO: 115617 - RNA, 79 nt, Homo sapiens
gccggggccccgggcccccgccgcagccgagcggaaggacgaaggaagaagacggcacgggacccccagcacaggcagc

SEQ ID NO: 115618 - RNA, 76 nt, Homo sapiens
gccaacgccgcccaagagagcaagaccgggcccacgaggacaagagcgcccaagcggacagccccacccgacacca

SEQ ID NO: 115619 - RNA, 58 nt, Homo sapiens
gcggaaaaagcgcaaggaaggcacggcgcaaacggcgccgggccaggaggaggaggaa

SEQ ID NO: 115620 - RNA, 84 nt, Homo sapiens
agagaggaagcgagcagcacgggcaagcgggcagcgaagagagagggcagagagaagaagaagggcagaaaggcccccaccccc

SEQ ID NO: 115621 - RNA, 70 nt, Homo sapiens
gccggccgccccaccggcggaacccagcaagaggaaccagagaaggagaaacagcagggccaaaggcaag

SEQ ID NO: 115622 - RNA, 74 nt, Homo sapiens
cagaaggaagcaacagacgggaccgaaagacgggaacacccaggcaggccgaagccggcagcaaggcgcggcga

SEQ ID NO: 115623 - RNA, 67 nt, Homo sapiens
aaaacaaggcgaaagcgcccgcaaacgcagggggggaacgagagaaaaaacaccagggcggccgaaa

SEQ ID NO: 115624 - RNA, 83 nt, Homo sapiens
agcgcccgcgccagccgcgcacaacggggcaccgagccggaaggaaaccagaggaggaaggcaagagaaccaccacagacgac

SEQ ID NO: 115625 - RNA, 79 nt, Homo sapiens
cgccacgagccaggagaccaaggaccagccaccacggagaacacaccgccagcagagccggaacccgaaggaagcaaga

SEQ ID NO: 115626 - RNA, 79 nt, Homo sapiens
gcggcgaagaaggggacgccgacaaggaccacacaggccccggccggcgcgccaccggccaggcagacaccgggaaccg

SEQ ID NO: 115627 - RNA, 49 nt, Homo sapiens
caaaggaagagccccgaggagaccaaggaagacggggcccaaagaggaa

SEQ ID NO: 115628 - RNA, 80 nt, Homo sapiens
cgccgcgccgcgcccgcggcaaggcagccgcgcacggaagaaaagacgaccccgacgcaggccaggagccgcggacagaa

SEQ ID NO: 115629 - RNA, 68 nt, Homo sapiens
caaacaaaaaaaggccaaggagagagaagaagaccagacgggggaccaaaacaaaacgagagcaagag

SEQ ID NO: 115630 - RNA, 39 nt, Homo sapiens
aagcagagcgcagaggagaagcgacgcgaagggcacaac

SEQ ID NO: 115631 - RNA, 49 nt, Homo sapiens
cgcagccgagcggggccggccacagccacgccaaaaaaagggccgcgga

SEQ ID NO: 115632 - RNA, 51 nt, Homo sapiens
ggaggcgcggccgccccgcgggggacggaaagaggagaaaccaaagaagcc

SEQ ID NO: 115633 - RNA, 65 nt, Homo sapiens
aggcaacgcccccggaaggacaacccccagacaacggcaagcggagaagagcaaggccgaaccga

SEQ ID NO: 115634 - RNA, 81 nt, Homo sapiens
cgaggccacggagagccgccggagagcccaggagcaggggagacagggagggagcggcgggaccgggcgcagacggcgaga

SEQ ID NO: 115635 - RNA, 72 nt, Homo sapiens
ggagcgcagcgggggggagcggaaacaaggaggcgggcagcgacaagacgcggccacagaggccacgaagaa

SEQ ID NO: 115636 - RNA, 79 nt, Homo sapiens
gggaaacacccgaaacagcgcggaaaggaaacccggaagggaagaagaacgggaccaggggacagcagcaccacccagc

SEQ ID NO: 115637 - RNA, 82 nt, Homo sapiens
cgagagcggaccgagagcgcgaaacgcacgagaagccacgagagaagaaagaaaaagaaaccgccagcccagagacacgaaa

SEQ ID NO: 115638 - RNA, 115 nt, Homo sapiens
gcgccgaggcgagaacgcacaggccgcgcagagcgggaccacccgggcacagcaggcacggaggccacagcacagcaaagccacaacacccaggaggcccccggaaggagaagca

SEQ ID NO: 115639 - RNA, 83 nt, Homo sapiens
gaacaccacccaaggcacaaccggcccgggggagaagcgcagaaccggcccggggagccaagcagcccggaggagacgacggc

SEQ ID NO: 115640 - RNA, 78 nt, Homo sapiens
gcccggaccggccgagaggaagacgagccgggaggaacggcccggaaacaggaggacggacgggagcagcggaaggcc

SEQ ID NO: 115641 - RNA, 60 nt, Homo sapiens
gcggccgccacaacagcacagccggcgacggcgcgggaacagggcacaaccaaggagggc

SEQ ID NO: 115642 - RNA, 66 nt, Homo sapiens
caagagagagaacaaggacaggccaaacggccggaggagggcaaggggccgccgcaacaaaaagca

SEQ ID NO: 115643 - RNA, 40 nt, Homo sapiens
gaaaaccaagaaagccccacgaaacgaagggaggaagcag

SEQ ID NO: 115644 - RNA, 60 nt, Homo sapiens
gacaaaggcaagcgacacacagggagacaaacccaaggcgaccaccaagaaaagggaaaa

SEQ ID NO: 115645 - RNA, 84 nt, Homo sapiens
cgcaccccacccagagcagaaaccccaggccagccagcagagagaggagaagcagcggacaggagacagaggacaagagagaag

SEQ ID NO: 115646 - RNA, 76 nt, Homo sapiens
cgggcacagcagaggccgcgcagcagcaaaggagagcggaaccggaaaaggcaacaaggcagacacaaaaacagac

SEQ ID NO: 115647 - RNA, 93 nt, Homo sapiens
ccgcgaggcgagagggggcaccggagggacaacaaaacaagacgcccggacaagagaaaacgaaggaaggaggacccgaggagagagaagacg

SEQ ID NO: 115648 - RNA, 76 nt, Homo sapiens
acaaggaccagacagacaaccaaaagccaacagcaacacccaggagcagaaaagcgaagacaaaaaagacaccaca

SEQ ID NO: 115649 - RNA, 72 nt, Homo sapiens
aagaccacccaacgaacaaccagacacaaccggaaaagccgccagaaggagacgggaccagcccgcacacag

SEQ ID NO: 115650 - RNA, 79 nt, Homo sapiens
gcgggaaaggcggagccaccggccggcgaaggaagagagaagggcacagaccaagacaacgaaccccggccaggacagg

SEQ ID NO: 115651 - RNA, 70 nt, Homo sapiens
gcggcagcggaccccagagccagagcacacgccgaaacaaaggccacgcccacgcccagcagagaacaca

SEQ ID NO: 115652 - RNA, 69 nt, Homo sapiens
ggccccacagcaggaccagcagagccagcggaggccacgcccagaccaccgcgccccgagggcagccca

SEQ ID NO: 115653 - RNA, 91 nt, Homo sapiens
gagaaaggagacccgacgcaacgcggagcgcaaggcgagggacgagaacgaggaacaggaggcccggacccccagcacaagcgcaggccag

SEQ ID NO: 115654 - RNA, 65 nt, Homo sapiens
gggcaggaccgggcggaggccgccaagacgagggggacagacaacagagcaacgcaacagggcac

SEQ ID NO: 115655 - RNA, 78 nt, Homo sapiens
acaaacaggaaaacaaagaggccaagaagacagagaagacccagccaggacgcacaaaggacggacccaaagaacccc

SEQ ID NO: 115656 - RNA, 72 nt, Homo sapiens
ccaccaaccaaaggccggcaaccgccagacaggaggaacgaagccgcggaggaccccagagggcagcgacag

SEQ ID NO: 115657 - RNA, 76 nt, Homo sapiens
caaccgcagagcgcccgcagaccagccagccccaagcagccgcacgacaaagaacgaagacaagagccaggagaaa

SEQ ID NO: 115658 - RNA, 71 nt, Homo sapiens
caacccagaggaacgacccagagggggacggaaagcaagccgcagaaccaacagcaccccaggggagcgac

SEQ ID NO: 115659 - RNA, 39 nt, Homo sapiens
cccagcgagcgccccacacagccggccaaaccagccagc

SEQ ID NO: 115660 - RNA, 72 nt, Homo sapiens
ccggccagaccacccccagcgagcacagccaggacgccgaaaacaccgggaggaggaagaacacccagaaaa

SEQ ID NO: 115661 - RNA, 74 nt, Homo sapiens
aagggccaaagaagggagagagaggccaagaggaacccgcacaacagaaagcaggaagaacaacagcccggaca

SEQ ID NO: 115662 - RNA, 57 nt, Homo sapiens
ggcacgccggcgaccagacaccaaggaaagcacaccgacagagaacccaggccaaca

SEQ ID NO: 115663 - RNA, 40 nt, Homo sapiens
acgcgcgcagcaccgcagaccaccgggagacaccaacggc

SEQ ID NO: 115664 - RNA, 81 nt, Homo sapiens
ggaccaccggagaagcacaagcagcacacaagaggccgaagacaagccccggcacaggaggagagaaaccagccgaggcag

SEQ ID NO: 115665 - RNA, 88 nt, Homo sapiens
gaccccggaccgagcgcgagggcgccgccgccgcccgccggacccccggaccccccgaccggaccgggcggccacaaggggcaggacc

SEQ ID NO: 115666 - RNA, 78 nt, Homo sapiens
gcaaaccggagccagaaacaaccgcaaccacccaacaagcaccaagacgcgcaacgagcagacaggaaacaccaacaa

SEQ ID NO: 115667 - RNA, 43 nt, Homo sapiens
gagccaggccagcgccgaccggaggaaccgaccgacccccaag

SEQ ID NO: 115668 - RNA, 84 nt, Homo sapiens
cgggcggcggcgcgcggacccaggcgcggaggcgaggccagcagggggagccagacgaccagggaaggcggcagacccggaccg

SEQ ID NO: 115669 - RNA, 73 nt, Homo sapiens
gacgacgaaccaggcgcacgacgagacgcacaggaggaggacagaggcgagaggacagagacgaggcgggccc

SEQ ID NO: 115670 - RNA, 83 nt, Homo sapiens
gggggagcggggccccacacccccccggggggggcgaagggagggccgccccaaccgacgcaccagccggaggaggagggaca

SEQ ID NO: 115671 - RNA, 62 nt, Homo sapiens
gcaccgcaggcagacaaaagggccaaagaagggagagaggagcccgggaccccgcgagacgc

SEQ ID NO: 115672 - RNA, 78 nt, Homo sapiens
gaccaccccgcacaccacccaaggacggccagcagaagcaggcgagccccccgagaaaaagaagaaacgcgggaccac

SEQ ID NO: 115673 - RNA, 38 nt, Homo sapiens
cgcggggaggggagaagaagcccacagaggccccagga

SEQ ID NO: 115674 - RNA, 74 nt, Homo sapiens
gccgagacacgcagcggcggccagggaccacggagcagggagagcaggaccacacacggagggaggcaccaggc

SEQ ID NO: 115675 - RNA, 81 nt, Homo sapiens
cggaagaagcaggaggcaagaaaggggaaccccggagaaaaggccaagaaggcaggaagccaaaggcccgggccccccaag

SEQ ID NO: 115676 - RNA, 67 nt, Homo sapiens
agggagcgacaagggaagagaaaggggcaacaagaaagggcgcaggaaacaaccgagaggaggacgg

SEQ ID NO: 115677 - RNA, 73 nt, Homo sapiens
aggaggaaaaggcacagagaagcagcccacagcaacgggacacaggaagaagccaagaggagaaagaagcgac

SEQ ID NO: 115678 - RNA, 66 nt, Homo sapiens
ccgaggccgcaggaggagggagcaggcaaggccagcaaggaggggggccgagccggcggcggcggc

SEQ ID NO: 115679 - RNA, 88 nt, Homo sapiens
cgaggcgcccagaggcgccccccacaccccccgccgcagcagcaccggcgacagaacccaggagaaacgagagggacagcaaggaaga

SEQ ID NO: 115680 - RNA, 76 nt, Homo sapiens
acacacacgcgcagcgccagcgccggcacgaaacccgcaagcggagaaaggaaagaagaccgccaaagagaaaaaa

SEQ ID NO: 115681 - RNA, 99 nt, Homo sapiens
ggcccacccccgcaccccaacaagaggaaagacacaccaccaagaagccagcaagcggccaggcaccggggacaccagggccccgaccgcagcgccgcg

SEQ ID NO: 115682 - RNA, 89 nt, Homo sapiens
aaagggcccacagaaggaaacgacgaagaaccaggagcacgcaagacagcagccgggcgagaacagagagacaggaaggaccgggcaca

SEQ ID NO: 115683 - RNA, 74 nt, Homo sapiens
aggaacaggcagaagaaggacagagaccaggcgcagcaggagccgcaaagggcaagacaaaacggcaggaaaaa

SEQ ID NO: 115684 - RNA, 73 nt, Homo sapiens
gacccagggacacaccaccccccagggggaccgcggagaaaaagaaagcggcgcgccaacagacccgggggaa

SEQ ID NO: 115685 - RNA, 80 nt, Homo sapiens
aaacgcaagacgggccgagaagcagcgcgagagaagaaggaagagacgggccccccacaagaaaacgacacccccgagaa

SEQ ID NO: 115686 - RNA, 84 nt, Homo sapiens
ggccaggaggacgaggagagacagaagaagcggaggccggcaaagccaagaaaagccccaacacccccaaccaccgggcagcca

SEQ ID NO: 115687 - RNA, 71 nt, Homo sapiens
gccgcagaggcaccgggcggcaacagggaaccgggcagaaaagaagaacacgcaaaaaggaagacagacag

SEQ ID NO: 115688 - RNA, 78 nt, Homo sapiens
agaggacaagaaggaggaaaggcggggacagcgcagcacaaggcaaagagaaagggaagaacgaacccagaagggaag

SEQ ID NO: 115689 - RNA, 78 nt, Homo sapiens
agggcggacgcgggaggagggcagcacaacaacagcaacggaggcgggaccggaacaggcacaccccacacaagcacg

SEQ ID NO: 115690 - RNA, 76 nt, Homo sapiens
cacaaccggccacccgcgcggcccgcgggaggacacacccccgcaaccggggaaggacggacaaccccaaaagcac

SEQ ID NO: 115691 - RNA, 73 nt, Homo sapiens
cccagggaaacgagcacgggcgaccaccgaagcaacaaggggaaggggcaaaagagcagagcccaaaagcaaa

SEQ ID NO: 115692 - RNA, 56 nt, Homo sapiens
ggaggcgcggccaacggggccacaaggccccaggggcgccacagccgaggcagccc

SEQ ID NO: 115693 - RNA, 78 nt, Homo sapiens
agagagaaagacacacgcagcagacaagccagcgccagggagcacaaccacaagcccaggagagcccaggacggagaa

SEQ ID NO: 115694 - RNA, 75 nt, Homo sapiens
ggagcggcaggaaggccaccacagggccaacaagcagcgagacccccgcacggcacaaaacgggccacgagaacc

SEQ ID NO: 115695 - RNA, 75 nt, Homo sapiens
aaggcaggagagagaacacagaaaccggcgggaacgcaagcacaggaccagaaacgaaaggcagcagaagaggaa

SEQ ID NO: 115696 - RNA, 78 nt, Homo sapiens
gcccgaaagggcaacaaggggcaggaacgggaaaaggagcaagggcgcagagagaaaagggagaacaagccgacggag

SEQ ID NO: 115697 - RNA, 69 nt, Homo sapiens
gaccgaagggaagacccagagcccaaggaggaagaagcaccccgcccagaggcagcgaggagcccccaa

SEQ ID NO: 115698 - RNA, 84 nt, Homo sapiens
gcgaaacccgaaacgaaggcacagcgggccgagaaagcaaacagaaaggccaaaacccccaagagcagaggccaggaggggccc

SEQ ID NO: 115699 - RNA, 64 nt, Homo sapiens
cacacaccacaggaagccagagaagagacagaagagggcccaaaagaagcggcgggggcaaggg

SEQ ID NO: 115700 - RNA, 69 nt, Homo sapiens
cccagacccacacccagcaaggcgacaggccggccgcaaacggccgcaaaaccaccggagaagccggac

SEQ ID NO: 115701 - RNA, 79 nt, Homo sapiens
acccgcgcaaaaaggaacaagccagcacaaggggccggcagccaccccccccagggagaccaccgccaggaccacccaa

SEQ ID NO: 115702 - RNA, 78 nt, Homo sapiens
cacagggcccagcaggcagggccggccaaagcaagacaggacgagccgggaggggagacaccgaccccaagcgagaga

SEQ ID NO: 115703 - RNA, 73 nt, Homo sapiens
gcaacaaagaacacacggaagaaagaggccacggggccccgaacagccggacccccgccaaagacgggcccca

SEQ ID NO: 115704 - RNA, 77 nt, Homo sapiens
ggaacccggcaggaccagaagcgagagccagcacgcgaagcgcccccagacagcgccccccggcggaaccccaagag

SEQ ID NO: 115705 - RNA, 75 nt, Homo sapiens
ggcgaagagcccccccccaagggggcccaggaccacaacgcacgggccgaggaggagggagccgaggcacaggag

SEQ ID NO: 115706 - RNA, 63 nt, Homo sapiens
cccggaggcgcgaggggcccgggggcagggcaaagacacagcggaacgacaacaagaggggga

SEQ ID NO: 115707 - RNA, 65 nt, Homo sapiens
aggaccagaagacgagaccaaaaagagccgcgccagcccgaggagcccggcaaccgccagacaac

SEQ ID NO: 115708 - RNA, 72 nt, Homo sapiens
cgccgccaggcccgcggacccgaccaagaggcagaagacggggggcgggaaaacggcacaaggcgacgaggg

SEQ ID NO: 115709 - RNA, 63 nt, Homo sapiens
cccgagcccggaggggggagaaaagccaaagggaaaggacagcccaaaccagaggaaaaagcg

SEQ ID NO: 115710 - RNA, 66 nt, Homo sapiens
agagcagcaggaaaccgacgaacaacacaggaccagggcgcacaaaagagcacaaaagcaccaagg

SEQ ID NO: 115711 - RNA, 74 nt, Homo sapiens
cggaaccagcaccgagacaaccaacagaaaggagagcaaaaaaccggcacagggagaaggaacacagcgacagc

SEQ ID NO: 115712 - RNA, 60 nt, Homo sapiens
accggggggcaggaggcacccggggcaggagggagccaggagcgcgggagcgaaggccag

SEQ ID NO: 115713 - RNA, 76 nt, Homo sapiens
gcagcaacggaggagcagacgggaaaccacgaagcagcgacagagagaaaagggggccgcagccggccaggggacc

SEQ ID NO: 115714 - RNA, 53 nt, Homo sapiens
acacccgagacccagacagaggaacaggaaaagggaggcaaagacaaccagaa

SEQ ID NO: 115715 - RNA, 57 nt, Homo sapiens
gcagagagaaagaaaaaccgacaagacaacagaaaaggaacccgcccacgccagcga

SEQ ID NO: 115716 - RNA, 76 nt, Homo sapiens
aaggggaggaggggcgcccgagaaggggacggcgggcgagggaggggaccgccgcggcgccggaccgaaggcgcga

SEQ ID NO: 115717 - RNA, 77 nt, Homo sapiens
ggagaaccccgcccaggaggcaaaaaggaccagccaaggaagcaacacagcagcgagagaagcagaaaaagcagaag

SEQ ID NO: 115718 - RNA, 79 nt, Homo sapiens
gccccgggccggcggcgcggggaacggagcgaaagccagaagcgcagcagccgcgggcacgcgcaaacccagacaccca

SEQ ID NO: 115719 - RNA, 89 nt, Homo sapiens
gagcaagaggaggacaggagagaagaagaagaaaccggagaaggaacagaccccggaggaggcgccgcgaggccgcggccaggccgagc

SEQ ID NO: 115720 - RNA, 67 nt, Homo sapiens
gaccaagaaccaggaaaagcaggagaagacacaaaggaaccagcagagaggacaaaacgcggaagcg

SEQ ID NO: 115721 - RNA, 75 nt, Homo sapiens
cgcccccccgggcaggaagacaaaaacagcacaacagcgaaagcaagagacccaacagaaagaacgagcaacaga

SEQ ID NO: 115722 - RNA, 58 nt, Homo sapiens
aagagagggcacagaccaggaggacggcccccaagacagaacaccgcagaccacaccc

SEQ ID NO: 115723 - RNA, 80 nt, Homo sapiens
caacacggcgcacgaagagaacagcaaagagaaacgcacaggaagaccaaggccggacgagaagaaccgaggcgcggccg

SEQ ID NO: 115724 - RNA, 77 nt, Homo sapiens
aggaaaggacaaagagagagagcaaaagacaagaaaacgcgcgggagaggccggggacagccagcagcgcagcgccc

SEQ ID NO: 115725 - RNA, 76 nt, Homo sapiens
caggcacgcgcacaggaggagccccgggaggcaccagagagcgcccgaggacccggaggaacacagacccagcacc

SEQ ID NO: 115726 - RNA, 86 nt, Homo sapiens
agcacggcgggccccagcccggaagggaaaaggccgaggcacagcgggaagaccgcaaagacgacccgagacagggaacagcagcg

SEQ ID NO: 115727 - RNA, 76 nt, Homo sapiens
ggggagggccaacgcggagcagacagcaggggccaagcgacagagaagcgacggaacagaaggagggagaagaaaa

SEQ ID NO: 115728 - RNA, 76 nt, Homo sapiens
cggcaacggccacagcaccggggaacgcaagcacaggaccagaaacgaaaggcagcagaagaggaaagccagaaag

SEQ ID NO: 115729 - RNA, 81 nt, Homo sapiens
gacgggacgacaaagaggcggcagggaccagcagacgggaagaagccaaagaaacgccaaccgcccaaaaacccagagcag

SEQ ID NO: 115730 - RNA, 75 nt, Homo sapiens
ggccgagcaggcgagcgaacgacgccaaaccagaaaggggacagcggcgggcagggagcacggaaggaaccacaa

SEQ ID NO: 115731 - RNA, 50 nt, Homo sapiens
caccagcagccaccaggagcccgagagagaaggagaacaaccccgaggga

SEQ ID NO: 115732 - RNA, 56 nt, Homo sapiens
ccgacacgcggcgggacagcaggaaagcaccggggaagaaaacagccgccggaaca

SEQ ID NO: 115733 - RNA, 76 nt, Homo sapiens
gccccgccggccaaacccccagccccggcgcccaccgcagcaaggacgccgcagcaggaagacgggacagacagag

SEQ ID NO: 115734 - RNA, 64 nt, Homo sapiens
ccggcgcgcgggccccgcagcgcacccggcggcggacagacggcgccaaggggccaagccaccc

SEQ ID NO: 115735 - RNA, 78 nt, Homo sapiens
gaacaggcccggagcggccgccggcccaaagggcagagaacacacagaagagaaaaaccgaacacaggacacacgacg

SEQ ID NO: 115736 - RNA, 79 nt, Homo sapiens
caccaccggaccccgacccgccgccggcccggccgcgcccgggaaagggggaagagaccgggagccggcaagagccgac

SEQ ID NO: 115737 - RNA, 81 nt, Homo sapiens
gacccgaaaaaacaaaacaaaagaacagaaagcgagcagagcccgcgaacaagacaaggggaagaaggaccgggaaaaggc

SEQ ID NO: 115738 - RNA, 64 nt, Homo sapiens
gagaagcccagggagcgcaccccaggaaaccagcaaaccgacaccagcgacacaagcgcgaggg

SEQ ID NO: 115739 - RNA, 72 nt, Homo sapiens
gacccagaggggcgcaaggggagccccgagccccggccccaaagacccaaaacagagacaccccccagcccc

SEQ ID NO: 115740 - RNA, 51 nt, Homo sapiens
ccgacggcccacgccagggagggggagaaaccagccccaagcacgggaaga

SEQ ID NO: 115741 - RNA, 77 nt, Homo sapiens
cgcgccgcacagagcaacgcgccccagcacagaaaaacacaccgacagcagaacacacgcgaaaggaaaccaagcgg

SEQ ID NO: 115742 - RNA, 78 nt, Homo sapiens
gagccaaagcacaagaagaagacgagggggccgacgacgagccccgcgaggagcgcagcggagaggccagaacgcccg

SEQ ID NO: 115743 - RNA, 76 nt, Homo sapiens
gcgggaccccgccgcggcgggagggacccgaacacggaagaaagacacgcaggaggccgcggccgagcagcgccac

SEQ ID NO: 115744 - RNA, 81 nt, Homo sapiens
aaaaagcgcaggaccggaacgcgcgcggagggggcggcgcggcaggagcgcggagggacgccggcccggccacccccgggc

SEQ ID NO: 115745 - RNA, 57 nt, Homo sapiens
cacgcccacccacccaagagagccagagcccagccaaaggcacgcaccaaacgcgcc

SEQ ID NO: 115746 - RNA, 89 nt, Homo sapiens
gaccagcgcccgggggacccgccgccgccacagcggccaccacccaggggaacacaccagccagcacaaccaaacccagaagaaaagag

SEQ ID NO: 115747 - RNA, 81 nt, Homo sapiens
cgcgcagccaagaaggccaggggagcggcaggaaggccaccacagggccaacaagcagcgaggggaggacgcgagcggaag

SEQ ID NO: 115748 - RNA, 60 nt, Homo sapiens
cggcgccgccgccgccagcgcgagccggaggagccaccaacagaagcaggagccaggaaa

SEQ ID NO: 115749 - RNA, 81 nt, Homo sapiens
gaagcccgcggccggaggagccgcaggggcccggacaaggaggcagaaagcaacagaagcagaagaaaggcggaccacaag

SEQ ID NO: 115750 - RNA, 72 nt, Homo sapiens
gagcgggcccggagaacaccggggggcacccgaggaggaagagggcagggcccacggaaagaagggaaaccc

SEQ ID NO: 115751 - RNA, 85 nt, Homo sapiens
aaaacaaggcaaaggcccagggaaaggaaaaccccagcgcaagggaaaccaccaagaagcaagaggaaaaggagaagaagggaaa

SEQ ID NO: 115752 - RNA, 66 nt, Homo sapiens
gccgagcaggaggcgccacaggccgaccccgggacacacccagcccgggacccagacaccgggagg

SEQ ID NO: 115753 - RNA, 77 nt, Homo sapiens
ggcacacgacgccacggcgccgcagaaggagaccggggcagcaaaccgcgcgggaacaggggccgagccggacaggg

SEQ ID NO: 115754 - RNA, 89 nt, Homo sapiens
cgcaaacaggagaggccgcccggcgagccccggaaccgccgcccagggaggacggaccagaggagcgagagcagcaagaaccacaccca

SEQ ID NO: 115755 - RNA, 93 nt, Homo sapiens
gggaaccagcggacgcggaggcccaaccgaagaaaacaagggagcgcaaccgccagaccgcccagagcggacacacggcccagccccgcaggc

SEQ ID NO: 115756 - RNA, 82 nt, Homo sapiens
caggaccggagcggagcccccagaaaaagcggggaaggggggcaaaaaaaagaagcaagcgaagcaccgagcacccacccga

SEQ ID NO: 115757 - RNA, 88 nt, Homo sapiens
gcaggcggggggcgcagaggacacgaggcggcgggcggagacaggaccgcggcgagcaagagaacacaaggaacgaaaggaagggaag

SEQ ID NO: 115758 - RNA, 77 nt, Homo sapiens
aagcggggagcgcccgcgacagaggagggaggaaaacaaccgagggcagaagcccaagagacacaggcagaagaaga

SEQ ID NO: 115759 - RNA, 76 nt, Homo sapiens
gagcggagaacacaggaaccggcccggggccccagccccagccaaaccccccacacgaaccagcaagggaggggcg

SEQ ID NO: 115760 - RNA, 66 nt, Homo sapiens
gaaagggcacacaccagaccacagaagaaagggccggaacgaaacaagcagcacaaaagcaaacaa

SEQ ID NO: 115761 - RNA, 81 nt, Homo sapiens
cgcgacagaccacaagcaccacccaggagcggcaggagccaaggagcccggggccgcgcaagcaggcagaagccgaaggcg

SEQ ID NO: 115762 - RNA, 80 nt, Homo sapiens
gggcgcccgcacggacccccagacagagcgggagccaccagcgccaaagggaagccaggagcccgggggcacggggagaa

SEQ ID NO: 115763 - RNA, 35 nt, Homo sapiens
gccccagggagaacacaaggagcccaaaagaaaca

SEQ ID NO: 115764 - RNA, 55 nt, Homo sapiens
aaaagacacgaagggaggcgagaagaaaagccagaagcagggcccaaggcaggcc

SEQ ID NO: 115765 - RNA, 68 nt, Homo sapiens
ccagggaccgcgaccgccgacccgcggcggggggagccggccacccaccgacggagggacgcacggcc

SEQ ID NO: 115766 - RNA, 81 nt, Homo sapiens
cacgcaaaggagaaaggaaccgacagacagcgagcagaagaaaacagaaaaacccagacacccgcgacagagacagccgac

SEQ ID NO: 115767 - RNA, 85 nt, Homo sapiens
ccccaagcgcgggcccggccagcggaagccccgcgcccgcgccagaaggaaaaccgcaccgaagcagccaaggccaagaagagca

SEQ ID NO: 115768 - RNA, 61 nt, Homo sapiens
agcaaagcaagaccgccagaacaaccagccacgggccaacagcagccaagaagagggaaag

SEQ ID NO: 115769 - RNA, 82 nt, Homo sapiens
gcgcgcgggagcgcacggccccaacggacccaaggccagccagccccaggcaccagcggacaggacagggaggacgaaggcc

SEQ ID NO: 115770 - RNA, 79 nt, Homo sapiens
gcccgacaggccaaaccacccccacccagcccccaagagcgggacaaggagacgcgggcgggaggccacgaccgaggag

SEQ ID NO: 115771 - RNA, 70 nt, Homo sapiens
ggggaaggacagcagagcggaacggacacaagcgcaacgaacgaagaacacaacagcaggcagcccgccc

SEQ ID NO: 115772 - RNA, 76 nt, Homo sapiens
gggcaccgcgcgaagcggccaaagccgcccagacggccaccggcgggaggaacaaaagggacagccacccggagga

SEQ ID NO: 115773 - RNA, 73 nt, Homo sapiens
aggcagcaaccgaacaacaggaacggcagccaggagaaaccaaggcagacagagcaggaagaaacaccgagag

SEQ ID NO: 115774 - RNA, 60 nt, Homo sapiens
gcgcacaagaagaacaaccaacccagaacaccaagaggacagcccagagcaagcacacgg

SEQ ID NO: 115775 - RNA, 69 nt, Homo sapiens
gggccgagacggaagcaccaagaggacaaccacaggaccgaagcaaaacagagccagcgggccggcacc

SEQ ID NO: 115776 - RNA, 80 nt, Homo sapiens
cagaggcagccagcagggggaggcagaagaagagcaacaagagaaaggcggcggcaaacccaaagacaaagaaggaaaag

SEQ ID NO: 115777 - RNA, 84 nt, Homo sapiens
gcgcaacagcagcaccaggacaggacccagaccagccaaagagaagaagaaaggaagcaaaacaaagaaaaaaaaaaacccaaa

SEQ ID NO: 115778 - RNA, 51 nt, Homo sapiens
aggccagaccggagcagcggggacaggagagcgggagcggaagggacacaa

SEQ ID NO: 115779 - RNA, 83 nt, Homo sapiens
cgcgaacggggccagcgccgcgcccggggccggcgcccgggccaccggccgcagggagcccacccagaggcagggggcgaccc

SEQ ID NO: 115780 - RNA, 79 nt, Homo sapiens
agcgaggcgccgacaagaccgccgcccggacgcacgaaccaagccacaacccgagggagaaaaacgacaaacagagcga

SEQ ID NO: 115781 - RNA, 73 nt, Homo sapiens
acggccagacgcccccagaaaggaagccgaagacagaagaggagaacaccacgaccgggaaacacgagaaccc

SEQ ID NO: 115782 - RNA, 82 nt, Homo sapiens
cgcgaagcagccccaaagaacaagccaggccagaagaggccgcccaggccccgcgggcaagaagaaggcggagaccccaaga

SEQ ID NO: 115783 - RNA, 80 nt, Homo sapiens
agagcggcccaccaaggaaaggggacagcaacagccggcgggcggaagaagagccccgagccgagggggcagcgcacgcg

SEQ ID NO: 115784 - RNA, 89 nt, Homo sapiens
ggaaccccgggcaaaaaagaaaagaagagagagagaagcaacggaccccaagcagagacgcggagggaaaaaccaaaaaccagaccggc

SEQ ID NO: 115785 - RNA, 82 nt, Homo sapiens
gcgggcgcgcgaggacgggccaagagccaggacaaggaaacagaccaaacaaaggagacagagaccacaagaagaggaagaa

SEQ ID NO: 115786 - RNA, 86 nt, Homo sapiens
gcccggcacagccggcggcgaaggcagcgccgacggcagccggcaccgacggcggaccgacccgagccgcggaaagagaggaagaa

SEQ ID NO: 115787 - RNA, 75 nt, Homo sapiens
cacaaggagcagagacaaaaccaagccaaacacaagcagaaggagcgaagaagagcgcaccacgacaaagaagag

SEQ ID NO: 115788 - RNA, 77 nt, Homo sapiens
gaagcccaccacccggaaggaaggcccgccgcacccccagaccgaggcgagcgcaggagggcccccggcccccgccc

SEQ ID NO: 115789 - RNA, 77 nt, Homo sapiens
cgcgggaggacggagagaaggcggcgcgggagggaaggcgcgggccgggcccagcaaccggcgcagacaacacaccc

SEQ ID NO: 115790 - RNA, 80 nt, Homo sapiens
gaaccggaggaggaccgcggagggaacacccaagaggagccaggagcacggggggaacaagaccgccgggacggaagacg

SEQ ID NO: 115791 - RNA, 81 nt, Homo sapiens
agcgcagcacggacaaacaagcagaacaggagcggaagagaagacgagaacaaggggagaacaggcccccgcgagagcaag

SEQ ID NO: 115792 - RNA, 79 nt, Homo sapiens
ccgggaccgcgccaagcggccaacaacacgcaccagagagcgaccaaacccccacaacaaggacaaagggacccaagga

SEQ ID NO: 115793 - RNA, 75 nt, Homo sapiens
cgaagcggcggcaggggccgcggcccggagcagaggagcagggacaccgaccggggacagcccgaagggccgcag

SEQ ID NO: 115794 - RNA, 62 nt, Homo sapiens
gcccgggcccagacgaaggggcgacagcaagaaggagccagcacagaggcaaaagaaccaac

SEQ ID NO: 115795 - RNA, 55 nt, Homo sapiens
caaaccaccaggagacaaaaccggaagaaaacgccagagaagcagagcagcccgg

SEQ ID NO: 115796 - RNA, 74 nt, Homo sapiens
gggaaaaaggaagaagacccgaaggaacaaacagaaaaggagagagaggaaccgggcaaccagcagagaccgcc

SEQ ID NO: 115797 - RNA, 75 nt, Homo sapiens
agcggccgcacaccaagggcgcccccccggaacggcaccacaagaaaccgagaccaagaacccgcggaaagcaga

SEQ ID NO: 115798 - RNA, 60 nt, Homo sapiens
aagagaaaagaaggcccgaagagagcgccgccgacacgaagaggaggaacaaaccgggaa

SEQ ID NO: 115799 - RNA, 77 nt, Homo sapiens
gggaaaacccaccgggagcacgaaggaaaggcagcaacaggggaagcggagggaggcaaagaagccaaaaaaaccaa

SEQ ID NO: 115800 - RNA, 55 nt, Homo sapiens
cgaccccgaggcgagacggaaaggggagccgccaccaaaagcagacggaaaaccc

SEQ ID NO: 115801 - RNA, 73 nt, Homo sapiens
gagacgagagaagggcacagagagcaggaaaaaccagaagagaaaaaacaaaggggagaggcaccccgcggga

SEQ ID NO: 115802 - RNA, 82 nt, Homo sapiens
ggacaacagcccgacaaccagagagccaccggcagaagagccaacgagcggacacggagacccgcggaggcgaagcgggagg

SEQ ID NO: 115803 - RNA, 64 nt, Homo sapiens
cggggccccaccgggcacagcaccacaacaaacaggccccacaccccaccaaacccgaccagcg

SEQ ID NO: 115804 - RNA, 89 nt, Homo sapiens
gggaggagcacagaacgccaggaccaaaacagggagaaacacagccagaagggcggagaacggaaaagcaccaggaagcagagaggacc

SEQ ID NO: 115805 - RNA, 70 nt, Homo sapiens
cggacccgcggagagaagagaagccgaagacggagaaaaaggaacagggaggggaggagaaaagagccgg

SEQ ID NO: 115806 - RNA, 78 nt, Homo sapiens
cccgccggcccccccccgcgcccgcgaccgccgcggcgaagagaaagaagcccggcgaggccggagggccacccccgg

SEQ ID NO: 115807 - RNA, 34 nt, Homo sapiens
gggcaagcgaacaaaaagagacgggggccagggc

SEQ ID NO: 115808 - RNA, 78 nt, Homo sapiens
ccgaagccggaaacgaggcaccagggaagagccagcaagagagaggagcgagaggaagcggaagaaaaccaacaaagg

SEQ ID NO: 115809 - RNA, 73 nt, Homo sapiens
gcccccagccacgggaccaagaaccgcaaaacaagaccgagagaagggccggggaaggacaccagaacgcgag

SEQ ID NO: 115810 - RNA, 84 nt, Homo sapiens
ccggacgacgcccggcgccagcacacgcagggcacggaagaagcaaacaggagcacaagcaccgaaaaggcccaagggaacaag

SEQ ID NO: 115811 - RNA, 77 nt, Homo sapiens
cagcagaccacaaaggcagacacaaccccagcgaaaggggaagcagggaaaggccggagagaggaagcggcccgggg

SEQ ID NO: 115812 - RNA, 61 nt, Homo sapiens
gcagggagaggcggacacagacaagcaaggcagccgcggagcccgacacaggcccaccggg

SEQ ID NO: 115813 - RNA, 64 nt, Homo sapiens
gaaggggcaggaggagaaggcaaagagccagcccggcaacaccggaggaccaacggagcgaaga

SEQ ID NO: 115814 - RNA, 78 nt, Homo sapiens
gccaacggagaaccaaggccaagaccagaaccagcccgggaaaggcgggcgccacggaaaggagggcggccagaacac

SEQ ID NO: 115815 - RNA, 49 nt, Homo sapiens
aagcaaccccagcaccacaaaagccggaaaaacagggagagccacagag

SEQ ID NO: 115816 - RNA, 75 nt, Homo sapiens
aaaagcagacgaaagaaaaaaaaaaccggagaggaagagaagaggcccacacaccagccagaggaaaaacagaac

SEQ ID NO: 115817 - RNA, 63 nt, Homo sapiens
ccaagaggagggagccccaagccggcggccaagacggagccgagaggacagcaagacgacccg

SEQ ID NO: 115818 - RNA, 56 nt, Homo sapiens
ccggagcagcgcccccggacagggccccagggagagccccgagggggccacccgaa

SEQ ID NO: 115819 - RNA, 86 nt, Homo sapiens
gagaagagggggacgcggaagaggagagggagcgagaaccagacagcagccgagaccgacccgcccgcccgcggccccgcagcagc

SEQ ID NO: 115820 - RNA, 97 nt, Homo sapiens
gcgggagcccggaaaagcgcgacacagcgaaacaaacaagccagcgccagggagcacaaccacaagcccaggagagcccaggacggagaagagcaag

SEQ ID NO: 115821 - RNA, 72 nt, Homo sapiens
gaaccgagaaagcaacggaaacgaagaaggcccagcccaccagccgaggccgccggagccccagacaccccc

SEQ ID NO: 115822 - RNA, 67 nt, Homo sapiens
acacagagggaacgaaggcgggaacaagggccgaggcagcacgcaagggccaggaccggagcgagac

SEQ ID NO: 115823 - RNA, 78 nt, Homo sapiens
caccaccgccccggcccgcggggcgcgggccgccagcccggcaccgcccccccccgcgaggcaaaagcagaccggaaa

SEQ ID NO: 115824 - RNA, 69 nt, Homo sapiens
gaagggaaggggcaagcgcccaggagcagcaccggacacaagagggcaagaaaggcgcgacgggccgaa

SEQ ID NO: 115825 - RNA, 83 nt, Homo sapiens
gaaaggccaagaccaggaaaggaagccgaagcaggacacaaagaaaagacgaaggaagcaacacaaggaagcggagggaacca

SEQ ID NO: 115826 - RNA, 71 nt, Homo sapiens
agaccacaacaggacacaaaaaggagagaagaccacaggagaggcaaaaaccaagggaaagaggagagggg

SEQ ID NO: 115827 - RNA, 67 nt, Homo sapiens
gcagcgagaaaccagaaaacacggaacaaaggggagaagcagaccgcaccaggcgggaccccgaaaa

SEQ ID NO: 115828 - RNA, 77 nt, Homo sapiens
ggaggcggcaacgagccacgacacaccaaaacaggaagcgagacagcgagggcaaagacagccaagaacgcaacgag

SEQ ID NO: 115829 - RNA, 78 nt, Homo sapiens
cggagcgaggaaccggaccccggcagcgccccgggggcgccgagggcacaagggcaacgacagaagggcgaagccaac

SEQ ID NO: 115830 - RNA, 75 nt, Homo sapiens
aagaggccgggcgccccgcaggacacaagcacgagagaaacagaggacgaccgggaggacaagaagaggaagagg

SEQ ID NO: 115831 - RNA, 88 nt, Homo sapiens
caagagaggcgcagcacacgagaggaacagcagaaagaggccggaaacaaaccaggaagagagggccgacgagaggaggaggagaaca

SEQ ID NO: 115832 - RNA, 69 nt, Homo sapiens
gcgaccaggaaaagaccaagaaggggaacggaaagaaacagccagaggccacacagagccaagcaccca

SEQ ID NO: 115833 - RNA, 79 nt, Homo sapiens
cccgcacagaacaagaaagggaggggcacacaggagccaaagaagaccagaaagaacacacaaaggcacgagaaagcgc

SEQ ID NO: 115834 - RNA, 75 nt, Homo sapiens
gaaacggcaaacgcccaagaaggagaaagaaaggacaacaaggggaagagcccgcgcgagaagcggagaagcagc

SEQ ID NO: 115835 - RNA, 73 nt, Homo sapiens
gcgaccaccaggggaccgacagagaccaggaaacccggaccgccgcccaggagaacccgaagacccgaagagg

SEQ ID NO: 115836 - RNA, 67 nt, Homo sapiens
ccagcggaaagccaagagcgcacgggggaaacaagcgaaaaacaggcaaggaccggaggagagaagg

SEQ ID NO: 115837 - RNA, 64 nt, Homo sapiens
accgacgaagagaaaccaacaaaagacagccacgcccacacaacaggcccaccaagccgagaac

SEQ ID NO: 115838 - RNA, 80 nt, Homo sapiens
acaccaagacaaaaacaaaggccgggccgagaacgaacaggcgagaacaggcgaaagccgggcagcagggaggggacagg

SEQ ID NO: 115839 - RNA, 59 nt, Homo sapiens
aagcgagccgcccccgcaacagaaaagggcacagcagaaggggagcacacagacgcagc

SEQ ID NO: 115840 - RNA, 75 nt, Homo sapiens
cccaaagagagaaccggagagcacccaacaagcaaagaggcccaggaccggaccccgacggagagagaagacacc

SEQ ID NO: 115841 - RNA, 76 nt, Homo sapiens
gggacaaacaggaaaacgacacaacaagaccagcagcaccagaagaacagagccccaaagcagagacacaagagaa

SEQ ID NO: 115842 - RNA, 54 nt, Homo sapiens
ggagaggaagaggccccacaggaacaagacaggggagaacagccgacaccaacc

SEQ ID NO: 115843 - RNA, 78 nt, Homo sapiens
caccccaaacgaaagccaaacgaccaaagaaaacgcaggagcaacaagaggcccaggagcgcaaacccggggaaggca

SEQ ID NO: 115844 - RNA, 69 nt, Homo sapiens
gcggagcagaggaaaagagggaaaccgcaggaggaccaacggacccagacggaaaggcaagaacgagac

SEQ ID NO: 115845 - RNA, 77 nt, Homo sapiens
cagacaacgagaaagagagaagaaagacagcgggaagaggaccacaggaagcaagagaagaggagaaaccgccggaa

SEQ ID NO: 115846 - RNA, 76 nt, Homo sapiens
ccccggcggacacgcggcagcggcgcacagcgaggcaccgcccagcagcagaacagagcaggacacggcggacagg

SEQ ID NO: 115847 - RNA, 56 nt, Homo sapiens
aagaaaggggaaccccggagaaaaggccaagaaggcagaggacccacaggcagaaa

SEQ ID NO: 115848 - RNA, 61 nt, Homo sapiens
ccggggccgacccggcccgaggggaagcagccagcaaccaccgaaacgggcgaaaaagaag

SEQ ID NO: 115849 - RNA, 81 nt, Homo sapiens
cggaggcggcccgcccggaaggcaagcgcagcaacaacagagagcacggagcgccacagcagccaaacggggacgcccaga

SEQ ID NO: 115850 - RNA, 69 nt, Homo sapiens
aacccacacccaccaagacgagaggccgcagcgacaaaagggaaggaggaccagaaaccgaccggacgg

SEQ ID NO: 115851 - RNA, 35 nt, Homo sapiens
cagaggagcccaccggcgaaagggcgggggcgccg

SEQ ID NO: 115852 - RNA, 75 nt, Homo sapiens
ggccgcagacagcaccggaggggaagacggccagagaaggacaagaagccaagccgaaaggacagccagccaccc

SEQ ID NO: 115853 - RNA, 77 nt, Homo sapiens
gcggcagccagccgcccgcagaaagcggcagcccagaaccggaagcgaccacggacacaaacgccagagaagaaaaa

SEQ ID NO: 115854 - RNA, 75 nt, Homo sapiens
caaacagagaacgacgggggaagcagcagccaggaagcagcagcggagaaacaccggccaagagccacgcacaag

SEQ ID NO: 115855 - RNA, 79 nt, Homo sapiens
cgagaagccccagcgcacacgcgacccacgcaaccgaacaggcggggccgaagcgggcccacaacagaacaaccggaca

SEQ ID NO: 115856 - RNA, 67 nt, Homo sapiens
gccgcggccaggaggacgagcggaaaaacggagccacgggggagccagccaccgagacgccgacagc

SEQ ID NO: 115857 - RNA, 57 nt, Homo sapiens
cacaaggagggcaaggcccaagggcacgcgcccaagggaggccaagcgaaggaagcg

SEQ ID NO: 115858 - RNA, 75 nt, Homo sapiens
gaggacgaagggacacaccgcagcagccagagcgcccaaaaacccagggaccagcggagcccagccgcaacaccc

SEQ ID NO: 115859 - RNA, 67 nt, Homo sapiens
ccacaggaggcgcggaggacgccccaccgccgacgcccccagccaccagagaagcaggacaagagga

SEQ ID NO: 115860 - RNA, 74 nt, Homo sapiens
accaaagacgggaacaagggagggggacagaccaaagaggcccacggaggggccacacaaaacaaacgaagaga

SEQ ID NO: 115861 - RNA, 75 nt, Homo sapiens
aagggccaaagaagggagagagagggcggcccccacggccaggcggggcagaggacaccaaaggcgggagagcgc

SEQ ID NO: 115862 - RNA, 81 nt, Homo sapiens
ccccggacccagcccggggaaacaaccccgccccggaggcggcgaggagcggcggcacgagccagggagccgccgggaccg

SEQ ID NO: 115863 - RNA, 80 nt, Homo sapiens
gacaaggaaggaagaaggcgcacaccccagcgcgcaaagcgcgaggggcgagccacaagaacggaagcagaagcacgcaa

SEQ ID NO: 115864 - RNA, 89 nt, Homo sapiens
ccgaaggggcaggaggagaaggcaaagagccagcccgggcggagaacggaaaagcaccaggaagcagagaggaccgcagaagggaagga

SEQ ID NO: 115865 - RNA, 60 nt, Homo sapiens
ccggggggcaggaggcacccggggcagaccagccgacagcgaccaaggccagagcgaaag

SEQ ID NO: 115866 - RNA, 74 nt, Homo sapiens
gggcacccagagaaaccgcaaacaacccgaaagggggaaggggaaaacacacaggcaagccgaccaggaacggc

SEQ ID NO: 115867 - RNA, 71 nt, Homo sapiens
gcccaccccccaggcaggaaagagcggacgggagaaagacacagcccacacccaggcaagaaggaaggacc

SEQ ID NO: 115868 - RNA, 81 nt, Homo sapiens
ccagagagaaggggaaccccccgcgggcgcaggcaaacaacggaggacacgcaccaccgagggagaggagaaggaagaggc

SEQ ID NO: 115869 - RNA, 70 nt, Homo sapiens
ggccggccgcgccccccaggacccgccggcgcgagaaaggagaacgaaaacccaccaggaaggagcacag

SEQ ID NO: 115870 - RNA, 55 nt, Homo sapiens
accgggagcagcagaggaaggggaaaaggacccgaggagagaaaggagaaagagg

SEQ ID NO: 115871 - RNA, 83 nt, Homo sapiens
ccgccccacgcgggccgcggcccggcaggccgggacaaagaagcagaccgaaacaccgcccgacaaacaacgcgagagaagga

SEQ ID NO: 115872 - RNA, 62 nt, Homo sapiens
gggaaggaaaaacagaacagcgcccgcgaaagaacggccgagcgaccaggagaggagccccc

SEQ ID NO: 115873 - RNA, 123 nt, Homo sapiens
acaaggccaagaacccgggaccgcgaccgacgagcccccccggcaggacacacacccccagaaccagccccaagcacgggaagacccccagccgagcacccgccgggcgaccagcgaagaaac

SEQ ID NO: 115874 - RNA, 67 nt, Homo sapiens
aggcccgcaccaccacaaaccggccaaggcacaaaagggccagcccaaggcaagaaaaaaagaccag

SEQ ID NO: 115875 - RNA, 59 nt, Homo sapiens
agcagggaggagggaaagaacgaccaaacagcacaaagagccaccaggagcaccggcgc

SEQ ID NO: 115876 - RNA, 69 nt, Homo sapiens
ccgccgcggggcgcgcggcgccggcggcgcgcgacccccgcgcaggaaaccgaggggaaaagcaggaaa

SEQ ID NO: 115877 - RNA, 37 nt, Homo sapiens
gcacggaacagcagcaaccccaggaacccagaaccgc

SEQ ID NO: 115878 - RNA, 78 nt, Homo sapiens
acggagccgagaaccaagaaacggagaggagaagcaaagggcgaggcacccagcagagagccagaagcaaaaacgcag

SEQ ID NO: 115879 - RNA, 91 nt, Homo sapiens
cgcgaccgcacgcccccgcccccgaggccaggaacgcccaggaccaaagagggcgccaaaagggaagcacccaaaccccgagcgggcgcac

SEQ ID NO: 115880 - RNA, 80 nt, Homo sapiens
gaaaaccagacaggggcgcagaacaaacaagcacaccgcaacaaaaacaccagaggcggggaaaaaggagaagccagaac

SEQ ID NO: 115881 - RNA, 40 nt, Homo sapiens
cccgcaggacccgccagcagagagaaggagcaaccccaaa

SEQ ID NO: 115882 - RNA, 82 nt, Homo sapiens
aggcagccccgcgcagcccaagaagacgggccccacgggcccaaacaagcggagcggacccagagacgacaacccccccggc

SEQ ID NO: 115883 - RNA, 61 nt, Homo sapiens
aggcccgagaacacgcagacagccgaaggcccaccacggagaagcaacagccgacaaacaa

SEQ ID NO: 115884 - RNA, 79 nt, Homo sapiens
agggcaccacaacaacaagccacagggccggagaggggaaccagcagaagcaccagccacaacgggaccacgcccagcc

SEQ ID NO: 115885 - RNA, 85 nt, Homo sapiens
gagcaggcacgagcgcggcgcgccggggccaaagcgaccaaccccccaccgcacgcagggggccccccgcccggggcaagaccac

SEQ ID NO: 115886 - RNA, 74 nt, Homo sapiens
caggcccgcagagcccacggggaagggacaaggagggacgaagaggcggacccccggaggacaagccccgcaca

SEQ ID NO: 115887 - RNA, 77 nt, Homo sapiens
gccggcgcccagcgcccagggcccaggccgagcagagagaacacagggcacgggaggccgcgcagggagaagagcgg

SEQ ID NO: 115888 - RNA, 81 nt, Homo sapiens
cacagcagagaaaaggggggcggcgggaaggaagcccgcgcccgccggcgagccagcaaagcagcaagggaagccaccccg

SEQ ID NO: 115889 - RNA, 57 nt, Homo sapiens
agcacaccgaggaggcaggaccgcacgagggaaagggagcagcaccggccacaccca

SEQ ID NO: 115890 - RNA, 70 nt, Homo sapiens
gggaagaaccccagagcccaccaacagcaccagcaagcaagaagaaacaaaacggcgaacccggcgcaca

SEQ ID NO: 115891 - RNA, 76 nt, Homo sapiens
ccacgagccccagacacaggggcgagcaccaaagccaaggaagcccagaagaaagagcaccccccggaagcagcag

SEQ ID NO: 115892 - RNA, 70 nt, Homo sapiens
cgagaggccaggccgacggaccggcacgccagacccccacgcgcaggagccgcgagaaaggggacgcagc

SEQ ID NO: 115893 - RNA, 74 nt, Homo sapiens
cccggaccccggcggagggcgccgggagcagcagcagcacccacccacaggcagggaaaaccgggaaacgcgaa

SEQ ID NO: 115894 - RNA, 78 nt, Homo sapiens
aaggagcggggagccccgcgccacaggaccccgccgacggaacggaacaacaacgcaagagagagcaagacaagcccc

SEQ ID NO: 115895 - RNA, 74 nt, Homo sapiens
accgcacgcggaggcggcgcccgcgaaaagagagacaggcaagcacagcccaggagaacaagaaggggcagaaa

SEQ ID NO: 115896 - RNA, 67 nt, Homo sapiens
caggaggcgcggaggacgccccaccgccgacgcccccagccaccagcgacacagccaggaagcagcc

SEQ ID NO: 115897 - RNA, 83 nt, Homo sapiens
gagcgaaaagaaacacccaagaggaaaaggccaaggagcgggagcggaacgaagaacaccggcagagaacaagccagccgccg

SEQ ID NO: 115898 - RNA, 70 nt, Homo sapiens
aaacgaggccccccaaagccacagaggaaggaaaccaaggcaggcaaaacacgaagcacgccaggacgga

SEQ ID NO: 115899 - RNA, 61 nt, Homo sapiens
cggggacggagagaacacgagcccacaggagccaaaaaccgaacacccggaaggggacaag

SEQ ID NO: 115900 - RNA, 75 nt, Homo sapiens
acccagagcgcacggcgacgccccaggggaaaacccccgggaccagagaacaagcagaggaaagacacgccagag

SEQ ID NO: 115901 - RNA, 94 nt, Homo sapiens
gacacaacaagcgaaacaagcacagcgcaacagacaaagcagcaacccaggaaacaggaaaggagagaacaaggagcaggccaacggccagaag

SEQ ID NO: 115902 - RNA, 76 nt, Homo sapiens
cagccagaacggaggaggagccgcagccaaaagggaggagggacagccaagagcaaacaccagaacacgggacacg

SEQ ID NO: 115903 - RNA, 72 nt, Homo sapiens
caaaccaaaagagcaacgggaagcaaggaccagaagcgccaacgcaagcagaaagaaggaggcacagaccgc

SEQ ID NO: 115904 - RNA, 84 nt, Homo sapiens
ccaaggacccgggccccccggccacacaggccgaagcacccccagcaggccccgggcccaggcggagaaccccccccagggcaa

SEQ ID NO: 115905 - RNA, 72 nt, Homo sapiens
ccacccaaaacaccgagcagaacaccggcccacaaaacagcgaacagcgaaaggacacagacagaggagcgg

SEQ ID NO: 115906 - RNA, 78 nt, Homo sapiens
gaccgcacccagcaacagcccagcaggaccggcaaggcggcgcgacgagagcagagacccccacccgggaagacacgg

SEQ ID NO: 115907 - RNA, 81 nt, Homo sapiens
gccggaagcacagagagacggaccgaagaggcagcaggcgagcccccacaggaggcagcccagggcaggcacccaaaaggc

SEQ ID NO: 115908 - RNA, 67 nt, Homo sapiens
aaaaagcggcagcgagaccgcaggggaaagggaccaaccacccaccccagagcccagagccaccagg

SEQ ID NO: 115909 - RNA, 77 nt, Homo sapiens
aagaccaggggacgaaggccgcagacgaaggggaaagggaagcaagagccagacccaaaaccaagaagacccagcca

SEQ ID NO: 115910 - RNA, 85 nt, Homo sapiens
ggcgcagaggacacgaggcggcgggcggagacaggaccgcggcgagcaaggccagcaacagaagaaagcaagcaccggggaaagc

SEQ ID NO: 115911 - RNA, 60 nt, Homo sapiens
gcgcagcgaccccaaaggcacgcccccggggcaaagaggcggcagaagcacacaagaaga

SEQ ID NO: 115912 - RNA, 64 nt, Homo sapiens
cccaagaaacaaacaacaacggcaagcggagaagagcaaggccgaaccgagaggaagggcaaca

SEQ ID NO: 115913 - RNA, 79 nt, Homo sapiens
gcacccaagggccaaccggggaaacacagaagccgcccgcacaagagggaaaaaagggcaacacgaagaggcagaggca

SEQ ID NO: 115914 - RNA, 68 nt, Homo sapiens
cacccccccggagcccggagcaaggaagcagaaccaaccaggcggaggacacgcgagaagagaccaaa

SEQ ID NO: 115915 - RNA, 108 nt, Homo sapiens
cagcccgccgggacacaccccaggaaaaagacagcccgcagcacgaccagcaggaacggaacaagcgcgagaaggaacaaaccaggagaaaccgaacagaagaggcac

SEQ ID NO: 115916 - RNA, 78 nt, Homo sapiens
ggcgccgcggcggggcgacggccgcggggaccggagcgagaggagcgcgccggaccagcgcggaaaaaagcggcacca

SEQ ID NO: 115917 - RNA, 73 nt, Homo sapiens
aaggcgcccagaaggcaaagccaggcacgcccaccggacccaggacgaaccaagaaacaaaagggaagaccgg

SEQ ID NO: 115918 - RNA, 55 nt, Homo sapiens
ccccaaagaccccggcccccacagaggcccgaagcgggaaggcgagagccaacca

SEQ ID NO: 115919 - RNA, 72 nt, Homo sapiens
aaaaagaagagaggaaaggaagacgcagaaaacgcaggacccccgcggacgcgaaggcgaaaaaaggaacgg

SEQ ID NO: 115920 - RNA, 61 nt, Homo sapiens
gggcgcgcccgccagcgcccggagaacggaccgccagcagcagccgaaaacgcacaagacc

SEQ ID NO: 115921 - RNA, 80 nt, Homo sapiens
gccagcagagcaggaaaacgaagaaggcaaaaccaagaggaaaagagggaaagggagcagcaccggccacacccacagca

SEQ ID NO: 115922 - RNA, 101 nt, Homo sapiens
aggagccggggcggcgcaggaggagccgaggcgagccaacagcacgagaagacagaggagccagaccaagagacagcacaggcgagcgagcagagacacca

SEQ ID NO: 115923 - RNA, 68 nt, Homo sapiens
aaacacaggaagcggggaaaagggcaaagcccacacaaaacaaccggagggcacgccacgcacagcgg

SEQ ID NO: 115924 - RNA, 83 nt, Homo sapiens
gcgagccacgggggccgccgcagcaccaggcgaccaccgcagcaccagcgcgggccgccaccgccggcaccggccggaggggc

SEQ ID NO: 115925 - RNA, 40 nt, Homo sapiens
aagggccaaagcccaagaacgagaggaaacaggaaacaaa

SEQ ID NO: 115926 - RNA, 70 nt, Homo sapiens
gaaccgcgagccgacaacgcccagcgccacgcaggggcgggccaagaagagcggagaagcagcccagcgg

SEQ ID NO: 115927 - RNA, 79 nt, Homo sapiens
cgagccgcgcgaaaggaggaagcaaacaccagcaaggggagagcgagcgcaaagaacaagagcgaggaagacagcacaa

SEQ ID NO: 115928 - RNA, 56 nt, Homo sapiens
ggcgccgcgggacgcagaggagagcgcaagagaaaaccacgagacccgccgacagc

SEQ ID NO: 115929 - RNA, 79 nt, Homo sapiens
gacagccagcgaaccccacagcagaagagcagcggacagcccgggcagaaagcagacacgggagcaaagacacgaggaa

SEQ ID NO: 115930 - RNA, 85 nt, Homo sapiens
cgcgaaggccgggacccggccccggcccacaggggggggcaaacccgagagaacggcaggccgagagaagaaaaagacccaagaa

SEQ ID NO: 115931 - RNA, 69 nt, Homo sapiens
aacccggcacacgcccccggcccgcccgacaagcagaccggaagaccgacggaagaccacaccccgagg

SEQ ID NO: 115932 - RNA, 56 nt, Homo sapiens
aacaaaggagacaagaaggagagaccgcgccgcagaggggagaagaggggagccgg

SEQ ID NO: 115933 - RNA, 71 nt, Homo sapiens
ggacgaggcggacgacgaccggccaacaaggaacagagacagacccgggggcccccaaggagagggaagaa

SEQ ID NO: 115934 - RNA, 71 nt, Homo sapiens
caggcgcgaaacggaaaaaggaggaaaagcgggcgcagcgcgcggacagcgaccgcgaggaaccgcagagg

SEQ ID NO: 115935 - RNA, 72 nt, Homo sapiens
ccaggaaagggcaacccaagcggccccccaccacaagagaccacaccacggagccaggaggaagccaggaca

SEQ ID NO: 115936 - RNA, 83 nt, Homo sapiens
ggaccgggaccgccgccgccgccgccaccaggcagagcagcgcaggaggagagacccgccaccggaaccagacaaggccacag

SEQ ID NO: 115937 - RNA, 80 nt, Homo sapiens
caacaggaagccaccagcacaagaaaagagcaagaggaaaggggggagagacaagcaagcagggggagggcagagaaaga

SEQ ID NO: 115938 - RNA, 67 nt, Homo sapiens
agaaaagcaggccaccagaagccacgaagaaaagaacggaggaggcgcagcccccaagacgggcccc

SEQ ID NO: 115939 - RNA, 69 nt, Homo sapiens
cgagaccagaagggaagaaacaccaggacacaagcacacaccaagagaagaaaaagcaggaagaacgca

SEQ ID NO: 115940 - RNA, 86 nt, Homo sapiens
ccaagagccgaccagaaagaaaacgacgagaaccagagaggagacgacccccaagaacccccagaggacagacacgaaggcggcgg

SEQ ID NO: 115941 - RNA, 85 nt, Homo sapiens
ccagacacccccaccaacagccccgcgagagcagaagcgcaagcgcgcggcaggacccagaccggaagggaggcaggagagcaga

SEQ ID NO: 115942 - RNA, 69 nt, Homo sapiens
aagcgcaagaggggaacaagaacggcgacagacaagaggcgaaggccccgggaccaaggacacgcagac

SEQ ID NO: 115943 - RNA, 62 nt, Homo sapiens
gggaaggagcagacggcaaccgggaaaaacgaagcaaagaagagaacggagcacaagaccag

SEQ ID NO: 115944 - RNA, 75 nt, Homo sapiens
gacgagcaagaagcagcccaaagcgaagacagacgcaagccagaacgcaaagcagagcaaacgagcaggacagca

SEQ ID NO: 115945 - RNA, 94 nt, Homo sapiens
caaaggaagaaccaaagaaaacaagagggccagaggaggacagcacgcccagaggcagagcacacaaccaggaaccaaaaaccgcggcgacggg

SEQ ID NO: 115946 - RNA, 66 nt, Homo sapiens
gacaaaacagaggcaacaagagcgggccgcacgggggaaagggagacaggagagcaaaacacacag

SEQ ID NO: 115947 - RNA, 78 nt, Homo sapiens
agacaaaggcaccaggccaccacagaaacaaaagcaacaaagagggagaccagcaaaacacggggacgagaggaaagc

SEQ ID NO: 115948 - RNA, 74 nt, Homo sapiens
gacccgcaccggaaggccacgccaagacaagcagagacgaagcgaagggagcacaccaggccagaggaaggaca

SEQ ID NO: 115949 - RNA, 63 nt, Homo sapiens
agacagaaggggacaagaagcgcgacgggacacaacggaggcaagaccccagaggcgaggggg

SEQ ID NO: 115950 - RNA, 80 nt, Homo sapiens
gcgcagaacccccagaccacacacgagccagggagccgccgggaccggcccgggagacgacaacccaaaccgaaaaggca

SEQ ID NO: 115951 - RNA, 79 nt, Homo sapiens
caagccggaggagaagcaagaaggcccggacacagcaaaccgggccacaggaaaagcaacggcgcaagaggcggggcgg

SEQ ID NO: 115952 - RNA, 76 nt, Homo sapiens
gcggcagcagcggaggaggacgcacgccacggccacacaacacaacgccaggcaagcacgcccgggcccgacaaca

SEQ ID NO: 115953 - RNA, 82 nt, Homo sapiens
cggcggacggacacccagcggcgacacgcgacgcgccaaaacccgcccggaaaggggacaccgggacacacaaaaaaacaac

SEQ ID NO: 115954 - RNA, 80 nt, Homo sapiens
ccgaccagaaggaagaagcgagcgggaagggaagacccaggccacacagaaaggcagcaacaggggaagcggagggaggc

SEQ ID NO: 115955 - RNA, 110 nt, Homo sapiens
ccggcggccccaccagcagacgcagccgagacaccagcccgaaacaccaccaagggcggaaaacaccccaaaagccaaaagggaaaggaaaagaccaacaacagcgcagg

SEQ ID NO: 115956 - RNA, 68 nt, Homo sapiens
gcggccgaaccgaagcacaacaccaaaagggaaggcccacaagaaaacaaaaacacaaaaaagaaaac

SEQ ID NO: 115957 - RNA, 73 nt, Homo sapiens
ccgagcccgcggcggagccacccgcacacgcacccaggggcagccgcaaggaccggagagaacagaaaaaaag

SEQ ID NO: 115958 - RNA, 38 nt, Homo sapiens
caggacggacccacggggacgaaagagggccccacgcc

SEQ ID NO: 115959 - RNA, 79 nt, Homo sapiens
cccaccccgagccccggcacccagcaagggaacacagcccacggaggaacgaagaagccagaacaggcagacccgaaaa

SEQ ID NO: 115960 - RNA, 75 nt, Homo sapiens
gaaaccggcccggcccggccccacccaaggacgcgccgacagaagagcccgcccaaaagcgcaacaaggccaaag

SEQ ID NO: 115961 - RNA, 84 nt, Homo sapiens
cgagggggacggccggcggcacccgcacccggggacaagcgcgggaacggcgcggaagggacccagacaggagcgcgggaagaa

SEQ ID NO: 115962 - RNA, 109 nt, Homo sapiens
cagaccggaggaggcgggggcgccggcagaggaccaggcaccaccggccccggaaggggcacgggccccaccccaccgccagacaggccccccgggggccccccaccag

SEQ ID NO: 115963 - RNA, 86 nt, Homo sapiens
ggacgcacagagaccggaagaccaagcaggagaaccgaccggacaccaggggggaaaaaccacacaggcaaagaacgcgcaaaaca

SEQ ID NO: 115964 - RNA, 81 nt, Homo sapiens
agggaaggaaacagcaagcgaagccgaaaaagcgcccgagacgggcccgccgaaagaagccgagaaacaagccacccccga

SEQ ID NO: 115965 - RNA, 69 nt, Homo sapiens
ggaagccacacaaagaacaaagcagggaggaagaacaagcgggggaacggagggaaacgacccgaccac

SEQ ID NO: 115966 - RNA, 123 nt, Homo sapiens
ggcggggaaaaggcggacgggaaggcgggagacgagaagccgaaaagcgcagcgagcggagccgccggagagacaaagcaggaggacacaagaagggaggaaaggcggacccaggaaccacca

SEQ ID NO: 115967 - RNA, 58 nt, Homo sapiens
agacccccacgccaaggagagagccgagcagaagaaaaaaggaagccagacagggagg

SEQ ID NO: 115968 - RNA, 69 nt, Homo sapiens
acgggacacgggccaagggagcgaaaagaacccccaaaagggcacagaaaagacgcaggagcaccgaag

SEQ ID NO: 115969 - RNA, 85 nt, Homo sapiens
ggggcgggcccggccggaagcggcggcggcggccgcgcgccacccagcggacaaggcaaaaccagcaagcggacccagacaaaag

SEQ ID NO: 115970 - RNA, 54 nt, Homo sapiens
aaaaagccagaagggcaaaaaggacgcccccgggccaaacggcagcaaaaacag

SEQ ID NO: 115971 - RNA, 67 nt, Homo sapiens
ggaggaggccccaaagggcgaggcagcgcaggcaccccccgacagcggagacagacaggggccaagc

SEQ ID NO: 115972 - RNA, 83 nt, Homo sapiens
aggaggcaacaccaacaggacagccagagaccgaacagagagaacaagagacgcagccgcacagaggcaggagggaagacccc

SEQ ID NO: 115973 - RNA, 76 nt, Homo sapiens
cgacagaagggcgcagacccgaggcgaacaagaaccacgacgcagaacggaaaacagaagcgcaagcgaccacccg

SEQ ID NO: 115974 - RNA, 82 nt, Homo sapiens
ggagacggccaaaagcggacagcaaaaggcagagcagcgcgccccagaccaccggcagggaacagccgagcagaccgaggag

SEQ ID NO: 115975 - RNA, 39 nt, Homo sapiens
aggacagcaccaaaaaccgcacacagcgaaccgaagaaa

SEQ ID NO: 115976 - RNA, 85 nt, Homo sapiens
gaggccccccagccagggaacgggaccaaccagggcgggaccgaaccgaacaagaggcaagcaaggacgggaaaagcccaccccc

SEQ ID NO: 115977 - RNA, 70 nt, Homo sapiens
ggccgggccggaaaggaagggccaggacaccagaagaaaggaccaggcgggcccgagacaagcggccgca

SEQ ID NO: 115978 - RNA, 51 nt, Homo sapiens
gcaggagggagaacggaaacagcaccgagaggcacggcggcaaaggggaca

SEQ ID NO: 115979 - RNA, 77 nt, Homo sapiens
gaggggccgcgccgccaccgcgaacaggagcccgacagaaggccgcagaaggaacggcagccacacagcccggcaac

SEQ ID NO: 115980 - RNA, 88 nt, Homo sapiens
agaagaggccaagaagagaaagccccccagcacaagggagcgagaacccgagcagcgccagagcaacacaccgcgccccagcacgcag

SEQ ID NO: 115981 - RNA, 85 nt, Homo sapiens
cgcaaccagacgccagcgggacgaggaccgagaccgcggccgggaccgaggagaacacaaggaacgaaaggaagggaagaagcag

SEQ ID NO: 115982 - RNA, 78 nt, Homo sapiens
gggaaggcggggcccaaggcgccacaagcccaaaaagcaaaaagaacgaaacgaagccgggaaagaagagaagaaaca

SEQ ID NO: 115983 - RNA, 74 nt, Homo sapiens
gagaaacggagcccgcggaccccaacccgaggagcccggccaccccgccacaaacgcagcaggggacgccgacc

SEQ ID NO: 115984 - RNA, 84 nt, Homo sapiens
gccgcgccccggccgcacggggaaagacggggccagacaaccaggaagcagggagggacgaggccgcccgggcaggacccacgc

SEQ ID NO: 115985 - RNA, 68 nt, Homo sapiens
gggaagaggaccaaagcgaacaaggaggcagggcccaaaccccacccggcgagggggcagcaccacag

SEQ ID NO: 115986 - RNA, 74 nt, Homo sapiens
ggccggagaaacgaggagccaggcagggagcaagccgaggggaaagaaggaccacgaacaaagagagagcagca

SEQ ID NO: 115987 - RNA, 74 nt, Homo sapiens
gcacgcaaccaagagggaaggagacagggaagcaaagcgcaacagaaacagagagagccgaaaaggaaaaggag

SEQ ID NO: 115988 - RNA, 71 nt, Homo sapiens
gagcaagaagaacacccagaggaaagggcagcggaggcagagccgaagaaagcaacgcagagacacacagc

SEQ ID NO: 115989 - RNA, 45 nt, Homo sapiens
caaaaccgcccaaacaggaaagaggagaggagacgccggagcggg

SEQ ID NO: 115990 - RNA, 80 nt, Homo sapiens
gcaggagcagcagagacaggaccggccaggcagacaggcgcaggaggacgcggcacaccaagagacacccacgccacccg

SEQ ID NO: 115991 - RNA, 79 nt, Homo sapiens
gagaaaaggaaagcagaagcaaagaaggcacaggaaaccagcggcgagagagagcagcggaggcagggcggaccggcca

SEQ ID NO: 115992 - RNA, 61 nt, Homo sapiens
gccagcgcgggggacgaccaggaccccaacaacaggagagagcaagcgagcagggagaaag

SEQ ID NO: 115993 - RNA, 78 nt, Homo sapiens
cggcagcggagacgcgagcgcccagcacggagcggaggaagaacagagacagacccgggggcccccaaggagagggaa

SEQ ID NO: 115994 - RNA, 78 nt, Homo sapiens
gccgccccccaccgcccgggcccgaggaggcagccaagccgggccgcccgcggcgaagaccggaagcgccaagcccac

SEQ ID NO: 115995 - RNA, 77 nt, Homo sapiens
gaacccaccccgaaaacggaccaccaaccacaaaaaaaaagaggggaaccaccagaacaggaaggccgcgcggcacc

SEQ ID NO: 115996 - RNA, 76 nt, Homo sapiens
ccagcagccgccaccgaacacaccacggaacgaaaaccaacagaaccgacagaaggaagaaaaaagacgggaacag

SEQ ID NO: 115997 - RNA, 75 nt, Homo sapiens
gacacaggagcacaaacagcagacaaacggccagcaacagaagaaagcaagcaccggggaaagcggcccgaaaca

SEQ ID NO: 115998 - RNA, 81 nt, Homo sapiens
agcgagccaacccagcccagcggacacccgcggaaccggaggaggggagcggggaagaaaaccggaggacaacgaagccgg

SEQ ID NO: 115999 - RNA, 57 nt, Homo sapiens
agcgagccaagaaaaagagaagagcaccacaggaagaaaggaggagaaggggaggag

SEQ ID NO: 116000 - RNA, 75 nt, Homo sapiens
ccgagcgagagcaggaagacggacggaccaacggaaaaacgagccagagccaaggagcaagaggccgccgaagag

SEQ ID NO: 116001 - RNA, 77 nt, Homo sapiens
caggaaacggacacagggcgcaacgagacacggagcagcccagcaagcccagaggaaggaaaacagagaaggaagac

SEQ ID NO: 116002 - RNA, 80 nt, Homo sapiens
aacaaccaccagcccaacaaagacccggcagggccgggaccgaagcggccggggacccgcggagggcaggagcgcgcggg

SEQ ID NO: 116003 - RNA, 76 nt, Homo sapiens
ccggggccgggcagcccgcgcgaccggaagagagaaggcgaaggcacaaaacagagaggcacagagagaaaacggc

SEQ ID NO: 116004 - RNA, 77 nt, Homo sapiens
gggcaaacaacgaaaccagaaaaccagacgcgaggcacaggcagagcaagcccgaagagccaaccacaggagggaaa

SEQ ID NO: 116005 - RNA, 55 nt, Homo sapiens
caggccaccacagaaacaaaagcaacaaagagggcggcagaagcaaagagacagc

SEQ ID NO: 116006 - RNA, 79 nt, Homo sapiens
cacccgagaacggcgggaagagaagacacgagcacaaacgacaacaggcacaaagagagaaggaacacccacagggcag

SEQ ID NO: 116007 - RNA, 76 nt, Homo sapiens
caacacggcgccacacgcgaaaaccaaacgaggacgccaagcccagccccagagaaggagggccccggagcagcca

SEQ ID NO: 116008 - RNA, 48 nt, Homo sapiens
gggcagcacaacgcaaggacagagaagcagaaccagaagaaagcaacg

SEQ ID NO: 116009 - RNA, 85 nt, Homo sapiens
aagggacagcccggagacacaccaccagaccgggccagaacggaagacgccaaagggagaagagaagaaaaaacagccaaccaag

SEQ ID NO: 116010 - RNA, 72 nt, Homo sapiens
gaggcgagagcggcagcagcaccagcccaagagaaggaagcagaaagagacgccaaaacacaagagagacga

SEQ ID NO: 116011 - RNA, 70 nt, Homo sapiens
ggaccaagacgggacagaacgaagagaggaaagaggagagaacagaacagaaaggagggaagcggaaaaa

SEQ ID NO: 116012 - RNA, 82 nt, Homo sapiens
gcaagggcccggaccaaggcacagcaccgcggcagagccccggcagcagggacgagagaccacgcgagggccccccgggggc

SEQ ID NO: 116013 - RNA, 53 nt, Homo sapiens
agaaaaacaaagaggaggccaagaacgagaggaacaccgggccaggcggcgga

SEQ ID NO: 116014 - RNA, 79 nt, Homo sapiens
agagcgggccggggacccgaaggagacccaacaccccggccagacgggccaccaggccggcgccccacgcccgggcgca

SEQ ID NO: 116015 - RNA, 55 nt, Homo sapiens
cggccgcgccgcgccacccaagcacccagaaccggagagcccagaacgcgggcag

SEQ ID NO: 116016 - RNA, 53 nt, Homo sapiens
acggacagacccacaacaccaggcgccagaagcccggagaccagccccaaagc

SEQ ID NO: 116017 - RNA, 76 nt, Homo sapiens
ggcgcccgcccgcacgggcgcgccaagggcacagagggagagggccacagccgccaaggggcaaccgcccaccacc

SEQ ID NO: 116018 - RNA, 72 nt, Homo sapiens
aaaaccaggagaaagagagggagcaaaaggacaacaacaaaaaggacgcagcaggccagggcagggccacgc

SEQ ID NO: 116019 - RNA, 59 nt, Homo sapiens
aaggaggaagagggggagagaagacagccgccaggaagcaacgcagcgcggaaaggcac

SEQ ID NO: 116020 - RNA, 82 nt, Homo sapiens
gccgggcgagcggcacagccacgccaagagccagcaacacgggaaacaaggggcaggcggcaagccagagcacgagaaccga

SEQ ID NO: 116021 - RNA, 61 nt, Homo sapiens
agacaaccaaccccaccgaggaggacagagacgcaaggccggcccagggagaacgcaaaac

SEQ ID NO: 116022 - RNA, 87 nt, Homo sapiens
gcgcagcaacagaagagaggccagccgggaggacacacaagcgggaagggacgcgagagaaaagacaccgacgagagacaacacagc

SEQ ID NO: 116023 - RNA, 79 nt, Homo sapiens
agccccaggagcaggccccgcggagaaccgaaccaacagccagccaaagccaggcagcacagcacaggaaaacaaacga

SEQ ID NO: 116024 - RNA, 72 nt, Homo sapiens
ggaaaacgcggaaaaccgacacaacaggagaacacaaagaacccaaacgaaaggaaaaggggacccaaacaa

SEQ ID NO: 116025 - RNA, 65 nt, Homo sapiens
agacgaaggccacagaagacgacggacagagagacacaggacaggacaacgcacaacagggcagg

SEQ ID NO: 116026 - RNA, 71 nt, Homo sapiens
ggccggccgaggaagacgcacccagcccggaggcaccccaaccgcacagcaagaagcgcacgcgggccgcc

SEQ ID NO: 116027 - RNA, 69 nt, Homo sapiens
gaaaaacaggagaagaaggccgacacggagggggccagggacagaaaagccaaccacgaacccggaaag

SEQ ID NO: 116028 - RNA, 80 nt, Homo sapiens
cggaacaagcacagcaggagaagccggaaagaacaagagaagaagaccaaaggacaaaaaagacggagagagaacaggcc

SEQ ID NO: 116029 - RNA, 78 nt, Homo sapiens
acccgagacgcaagccccagcgaccccaagcaaaccggaggcaagcgccaggaccgcggggggcgagccgccgcgccc

SEQ ID NO: 116030 - RNA, 74 nt, Homo sapiens
aacacagcgacagaacagcaggaacagcaacacagaccaaaggaaaggaaagaagcacgcaccccagacacacc

SEQ ID NO: 116031 - RNA, 66 nt, Homo sapiens
cgcacgagggaggcgccagcccggacccagagagggaccagggccaaagaagagccggggggcagg

SEQ ID NO: 116032 - RNA, 76 nt, Homo sapiens
accccagcaccagcccagagggaaagcacaccaccccagccaaccagacaaagacggagccaggcggagaaacacg

SEQ ID NO: 116033 - RNA, 71 nt, Homo sapiens
gaggagaagaaagacgggagaggagaaaacaggggcaaaacagcacccccagaggccaagcaccagaaggc

SEQ ID NO: 116034 - RNA, 39 nt, Homo sapiens
gccggagggcagggaacagcaaacggggacagcgccgac

SEQ ID NO: 116035 - RNA, 83 nt, Homo sapiens
ccaacccgcgcggcaagaagacggcgcggcaaccggggagcccgccagccaccaggagagaacgccgcgccgcgcgacaacgg

SEQ ID NO: 116036 - RNA, 67 nt, Homo sapiens
aagcagggccgcccaacgacacgaggccggagaaggacggaggggggaggagcaggcccccaccgcg

SEQ ID NO: 116037 - RNA, 75 nt, Homo sapiens
agacgcccggcaagagagccgcacaagcgccggccaagagccggagacacaggccccacccccaaggggacacca

SEQ ID NO: 116038 - RNA, 66 nt, Homo sapiens
cgagcaggagcaacagccggcaaggagaaaaggccacaagaccccggagagggggaaacagaaagc

SEQ ID NO: 116039 - RNA, 69 nt, Homo sapiens
ccaaacagcaccagcaccaagaggcgcagcagcagcgagaaccagaagccacaggccaaccaagcaaag

SEQ ID NO: 116040 - RNA, 79 nt, Homo sapiens
cgcgggagaacacaaggccagcaccgggcccacccagacaggagcccagcagggggaggccgacaggaaaaggagggca

SEQ ID NO: 116041 - RNA, 82 nt, Homo sapiens
ggaaggcggcccagcagcgagacacagccacggacggagccagggaaggggacgcgcgccccgagcacgcacgcgggacagg

SEQ ID NO: 116042 - RNA, 73 nt, Homo sapiens
aacacagaacaccccacaacgaaaaccacccaagaagaccaaggcccaaaaggacccaagagagaagcgacag

SEQ ID NO: 116043 - RNA, 77 nt, Homo sapiens
ccgacaaggcgcaagcgaaaacagaccgcgagcccagagggaaggcagccaaagcaccgacacaagaggacacggac

SEQ ID NO: 116044 - RNA, 33 nt, Homo sapiens
gcgccccgaaggcacacagcaccgcgcgcacag

SEQ ID NO: 116045 - RNA, 60 nt, Homo sapiens
cgcccgcgcggcgcggggaccgcggcccgcgcgaagccaggggcaaaacggggaaccggg

SEQ ID NO: 116046 - RNA, 74 nt, Homo sapiens
caaaagacaaagaacaaaaaccgagggaagcaaagggcaccagaccacggcaaagccacaagcaagcacagggg

SEQ ID NO: 116047 - RNA, 75 nt, Homo sapiens
ccgagagcgggaacagagcaccagccgcgaaacgcaccagcgccagcccaggccagcagacgagcccaggcagac

SEQ ID NO: 116048 - RNA, 77 nt, Homo sapiens
ccgacacagggacgcagccgaagcgaggggaagacgaaagggaagagaaaaaaacaagagcgcaagagagcgagaaa

SEQ ID NO: 116049 - RNA, 74 nt, Homo sapiens
gggcagaaaaacaggaggaagacccgcagcgggacaagcgggcaagacaaaggccagcagagagcacaccgaaa

SEQ ID NO: 116050 - RNA, 72 nt, Homo sapiens
gccaggagaagaaccagcaggccgggcaggaccccgacgacacgaagcaagcagggaaacagcacaacggaa

SEQ ID NO: 116051 - RNA, 74 nt, Homo sapiens
cagagccccacgggaaggagagcagccagcagggcgaccaaggaaagagccaaaagagccaggaagggccgccc

SEQ ID NO: 116052 - RNA, 76 nt, Homo sapiens
cacgcaccgacagagcccagaagaggggggccgcagcgagccccggcagaaagcaccgggaggaaagagagccaca

SEQ ID NO: 116053 - RNA, 67 nt, Homo sapiens
cccggccaacagcggggcgagcgccccggggcacaacacaacaacaaaacacaacccagccgggaag

SEQ ID NO: 116054 - RNA, 50 nt, Homo sapiens
gggcccaacccaacggacacggaacaccaggaacccaaccgaagaagaac

SEQ ID NO: 116055 - RNA, 34 nt, Homo sapiens
ggggcgcagagcgggcaagcacgggcccagacgc

SEQ ID NO: 116056 - RNA, 85 nt, Homo sapiens
cgacgcacagaggaacacgccggggcccaaccacaagacgaccaaaggaggaaggcagcaggaggagccagagcagggcagaaga

SEQ ID NO: 116057 - RNA, 71 nt, Homo sapiens
acccgacccacaggccagagagggaagaaaacgccagagaagcagagcagcccggagcgaggggagaccgg

SEQ ID NO: 116058 - RNA, 77 nt, Homo sapiens
ccgcacagcgaccagggcaaccgggaccagcgagcgacagggacccagagacccaggcagcaggggacacagagcac

SEQ ID NO: 116059 - RNA, 84 nt, Homo sapiens
gcaagggccaacggaagccagagaaaggaccgaaaagacgcggccccaaaggaaacacccgaagaacacagcgccagcccaacg

SEQ ID NO: 116060 - RNA, 84 nt, Homo sapiens
gagcgaacgccgcagcagaaagccaagaaccagcggaccagagccaacacacagcacaacagagaggccgagggcacagcggag

SEQ ID NO: 116061 - RNA, 81 nt, Homo sapiens
gacgcacacgagcggaggcgaagaaacggcgaggaaagagaggagccccggaaagaaaaggacagacccggccagaaagga

SEQ ID NO: 116062 - RNA, 81 nt, Homo sapiens
gaggagaaaacagagcagcacagagcagcaggagggaaaagaagaaggaacgaccgaagaaggacaagcagcggagcccac

SEQ ID NO: 116063 - RNA, 71 nt, Homo sapiens
gggggcggcccaccgggaccgccggagacacaccaaggcccagacgacgaaccggaccaagcaaccccgcc

SEQ ID NO: 116064 - RNA, 82 nt, Homo sapiens
gcgcaacgcggccccggcacgcaccacggccacccggccggccgaggccagcagaaagaaaagaaggggagaaccagacacg

SEQ ID NO: 116065 - RNA, 68 nt, Homo sapiens
aaagcggagcacgcgggcacgcgcggaaacggagggggaagaagaaaagggaagcgccaaagaagcga

SEQ ID NO: 116066 - RNA, 97 nt, Homo sapiens
gcggcaaacagaagcaggcccggaccccgcgcgcaaaagaacaggggagacgagcagcaggaaaggaacacccgaaacccgaccagggaaagcaagg

SEQ ID NO: 116067 - RNA, 76 nt, Homo sapiens
ccgcagaagaaaaggcggcgcaggagcccggacagccagcacgacgaaggaggcccccacagagagcacacaaaca

SEQ ID NO: 116068 - RNA, 78 nt, Homo sapiens
ggaaagagaaaaagcagaaacagagagaagcgagacggaaggaacccagaggagcagcccaaggaccagagcgccaca

SEQ ID NO: 116069 - RNA, 76 nt, Homo sapiens
gaagagacgaaaaagacgaaccccccacggaaaggacgaaagaaagaagcagccccagaaagaaggacgccgcggc

SEQ ID NO: 116070 - RNA, 70 nt, Homo sapiens
caggcacgcaggccgggcaggggagggcagccaaccacagaccaccaacaaacgaacacaagagacaggg

SEQ ID NO: 116071 - RNA, 83 nt, Homo sapiens
cccgaagccaccagccccgggacccgccagcgagagaacgaaccgggcagcaaagacaccacagagcccgaacaaagccggaa

SEQ ID NO: 116072 - RNA, 62 nt, Homo sapiens
gccggcaccggggcgaggagccacgccgcgacaagggcagaaaggcgccccggcagacggcc

SEQ ID NO: 116073 - RNA, 30 nt, Homo sapiens
accaagaaccagaacacgaagcaaagggga

SEQ ID NO: 116074 - RNA, 83 nt, Homo sapiens
aacccagcgcaacggcggagccgcgcgcggcgcgagggaggcacacggcgcgccgcccgcgccaccggccccgggggcgccga

SEQ ID NO: 116075 - RNA, 79 nt, Homo sapiens
ccgccgacaaggcgcacaacaggacaaggcacgaggcgcggcgaccaccacagcagagcccggcgaaggaggagcaggc

SEQ ID NO: 116076 - RNA, 43 nt, Homo sapiens
cacgccgagccgccaggcagcaggacggagcgggcgcggacgg

SEQ ID NO: 116077 - RNA, 76 nt, Homo sapiens
gcagacggaaggagggaaaagggccgcagagggaacgcagccgcggaagggcccgggacagagccggggacgaggg

SEQ ID NO: 116078 - RNA, 60 nt, Homo sapiens
gccaagcaaacgcagaaggacgcccacgagcaaccaagagcgccggcgaaagcaacgaag

SEQ ID NO: 116079 - RNA, 70 nt, Homo sapiens
ccccccagaagccgcgcagagaaggagacgccgagagcagaaacccggacgacggagaacccgcgacggg

SEQ ID NO: 116080 - RNA, 77 nt, Homo sapiens
gccggaaagggccagagacagcggaaacgaaggaccaaaccacagaccagcgggaaggaggaagaagaggagaagac

SEQ ID NO: 116081 - RNA, 74 nt, Homo sapiens
cccagagcaggagcccgaccgaagccggaaacgaggcaccagggaagagccagcaagcggggggggaagaggag

SEQ ID NO: 116082 - RNA, 85 nt, Homo sapiens
caacgcggagcgcaaggcgagggacgagaacgagcacgaaagcaagagaacaaagcacgaacaacgacgaagcacaacaagggga

SEQ ID NO: 116083 - RNA, 82 nt, Homo sapiens
caccaggaaaccaggcagccaaggcaggacaagcacacaaggccgcccccaaagccaaccaaggagaggagaggaagagcag

SEQ ID NO: 116084 - RNA, 98 nt, Homo sapiens
ccagcggcgcgagaggaccaccggggcggcccggcggaggacccgggcgcagccagcccgcccaagcccgcgagaacaccgaaccggcaggaccagga

SEQ ID NO: 116085 - RNA, 81 nt, Homo sapiens
ccggcggcggcgcgggcgagcggcgagccgaaaagcgagcgcgaggaaaaggcggcgggagggccggcggcagagaccacg

SEQ ID NO: 116086 - RNA, 78 nt, Homo sapiens
gccagacacccccgaagaggggcccgccgcgcccccggcgcagagaccccaccagcgccccaaaaggagaaccgacgg

SEQ ID NO: 116087 - RNA, 75 nt, Homo sapiens
ccgcgccggcaggccggcccggggcgagccccagggccacagccgccaaggggcaaccgcccaccaccagacccc

SEQ ID NO: 116088 - RNA, 61 nt, Homo sapiens
cggcacggcacacaagggcacgcaagggagagcggggacaaagaagagcacacccaccagc

SEQ ID NO: 116089 - RNA, 77 nt, Homo sapiens
aacgaggaaaaacagccaagacggcaaagccccccagaagaccaggacccacgaggaagcggccgcggcgaacccca

SEQ ID NO: 116090 - RNA, 68 nt, Homo sapiens
aaagaaggcaacaagaagaagaagagcggaaccgcccagaggcagacaagaacgagaagcagcaacca

SEQ ID NO: 116091 - RNA, 81 nt, Homo sapiens
cgcgacgccaagggcacagccaggagcagagcaggagccgggcgcccaaccaccgacaagacgcgagagcgggaggaagcg

SEQ ID NO: 116092 - RNA, 52 nt, Homo sapiens
gcggggaggaggccccaaagggcgagggaggcaggcgacaacagaggagaag

SEQ ID NO: 116093 - RNA, 70 nt, Homo sapiens
ccacccagacaagagcaccacgggcaggaaggcagcgcacgacagcaaaaggccaccccaggccaccagc

SEQ ID NO: 116094 - RNA, 70 nt, Homo sapiens
gcagccagcacggagcaagaccgacgggaagacacaaggccccgaagggcaaaagcagaccggaaaaccc

SEQ ID NO: 116095 - RNA, 78 nt, Homo sapiens
aggaacccgaagaagaaaggacgacagccagagaggacaaaaccgaccacaggcccgcaggagagagaagagaaggca

SEQ ID NO: 116096 - RNA, 79 nt, Homo sapiens
agcagccaaacaaaagcaaaagaaaagccgggcgcgagaccgccagccgccacaggagcacccggaaccgcacggacac

SEQ ID NO: 116097 - RNA, 87 nt, Homo sapiens
gggaccgccgacaccggagagagaaaacccggacaaccagcggggcacaacaagggcacaacagagccaccccaccacccccaaaaa

SEQ ID NO: 116098 - RNA, 72 nt, Homo sapiens
aagcacaaggccccagcccgggccggacacagcccaagccccggggaccgggcaacccccagccacaacgcg

SEQ ID NO: 116099 - RNA, 74 nt, Homo sapiens
ccacacagaggaaagcacaaaggaagacgaaccggagaagaggcagaggaggaaaacgagagggcaacggcaac

SEQ ID NO: 116100 - RNA, 80 nt, Homo sapiens
gagaccgaaaaccggaggagggcgaaaccgcagacgaagacgcacggggcgcggcgggggagcgggaggagccagagcac

SEQ ID NO: 116101 - RNA, 52 nt, Homo sapiens
ggaccaagaaccagagggaagagcaagggacaacagacaccaaacagccaga

SEQ ID NO: 116102 - RNA, 55 nt, Homo sapiens
cgggccaccaccacagcacaccaagcagccagcgggacgggagaaaggggagaag

SEQ ID NO: 116103 - RNA, 49 nt, Homo sapiens
aggaacagaaaacgcgaccaccaggcaacagagcaggagaaggaaaaaa

SEQ ID NO: 116104 - RNA, 56 nt, Homo sapiens
gggacccccaggagggacccgcagaccaaaggaggcgccgcccgcaaggagaaaag

SEQ ID NO: 116105 - RNA, 63 nt, Homo sapiens
gacaaggagccgagggagcggggcaggggaccggggacggcgggaacagagaacaacaaccag

SEQ ID NO: 116106 - RNA, 57 nt, Homo sapiens
gaaagggccccaagaagagaagggagaccgagccaggccaggagagaagaaccgcag

SEQ ID NO: 116107 - RNA, 70 nt, Homo sapiens
gaaagaaacacccgaacagcgagaagcaaggagcgcgaagcagggcccgggagaaggaccaacacaaccc

SEQ ID NO: 116108 - RNA, 78 nt, Homo sapiens
gcgaggagcgcccgcgggacaggaagaaacgaggccagacaagggggacagaggagccaaaggccaaaccaccagcag

SEQ ID NO: 116109 - RNA, 72 nt, Homo sapiens
gcagggcgaaccggcaaccaccaccaggagccagcacgagcccccaccagcacaacagacgggacaagggag

SEQ ID NO: 116110 - RNA, 69 nt, Homo sapiens
gggacgacgagacgacaccacaaaggacccccagaggaccccaacacccacccccgccgggaccccgcg

SEQ ID NO: 116111 - RNA, 70 nt, Homo sapiens
accagccgacccaccaccggcccaggaccccacccccagggcccaacaggaacccgaagcgcccaccaca

SEQ ID NO: 116112 - RNA, 76 nt, Homo sapiens
aggggcgaaccacggaaaggaggaagaagacaccggggacagacagggggagaagcagaccgcaccaggcgggacc

SEQ ID NO: 116113 - RNA, 85 nt, Homo sapiens
gccccagggaggagacgaacccaaccgggcccggcccgcaggaaccacaggaaagccagcgcaggacgggcaccagcccgaagcc

SEQ ID NO: 116114 - RNA, 70 nt, Homo sapiens
gccggaaccaacagagggccagcaccccgcgcagaagacgaccaaggcgaaggggcacagggaggcgagg

SEQ ID NO: 116115 - RNA, 67 nt, Homo sapiens
acaggaagccccacagacaagaaagaagccaacaggacagcgaaaaacagccggagaaaagcacagc

SEQ ID NO: 116116 - RNA, 76 nt, Homo sapiens
agaggagccgggggaacagaggaaggacccgaggcggccagcagcgcgccccagaccaccggcagggaacagccga

SEQ ID NO: 116117 - RNA, 84 nt, Homo sapiens
acgccgagagccagagagagcggacgacagaacccggccgacccggaccaacaaccccaagaacccgaaacaagagagacccaa

SEQ ID NO: 116118 - RNA, 67 nt, Homo sapiens
gccaagagacacgaccagcaccagacaacggcaagcggagaagagcaaggccgaaccgagaggaagg

SEQ ID NO: 116119 - RNA, 90 nt, Homo sapiens
acagcaccggaggaccagcagaccagcgcgcacacaagggaccggcccagcccaccgaagcccggggaagcccgacgggggggcagaggc

SEQ ID NO: 116120 - RNA, 60 nt, Homo sapiens
cggagaagagggggcccggggggaggaggggcaggcccggcggggaaaaaaggccagaga

SEQ ID NO: 116121 - RNA, 80 nt, Homo sapiens
aaccgagccaaaagcggcaaggcaacaggagggagaacggagaagaaacagccacggagaacaacagacgggagacgaac

SEQ ID NO: 116122 - RNA, 79 nt, Homo sapiens
ggaaggcccgacccaggccgcggaggaggccagagagcggaaccgcgggcgccgccccgaggcacagcgcgcaccacca

SEQ ID NO: 116123 - RNA, 113 nt, Homo sapiens
ccaaagaggagccggccgcgcgggccgggaggggacggccgccggagccgcgaggccaacgggaagaacaacgcaccccgaaagcgccacgaaaaggaaaggaacagcgagcg

SEQ ID NO: 116124 - RNA, 102 nt, Homo sapiens
ccagacggcgccgccgcccgcggcgccccggggggcggcgcccacccgggaggacagacaacggaccgggggacagaggaccggaaaaaaaacaaaacgaag

SEQ ID NO: 116125 - RNA, 71 nt, Homo sapiens
aaaccgcgggagaagaggacggagacagagcgagggagagggccccgagaccaggccacccaggccagggc

SEQ ID NO: 116126 - RNA, 79 nt, Homo sapiens
aaaaagaagcacaaaagccagcccgaggagcaaggggcaggaaggagggccccggagcagccacaccaccgaggcccca

SEQ ID NO: 116127 - RNA, 81 nt, Homo sapiens
ccaaaaccacagggccagaaaaaccacaaagggaggcccaccacagcggcgccaagaggggcaaagacccagccaccccac

SEQ ID NO: 116128 - RNA, 80 nt, Homo sapiens
ggccagggggacggcgccacgcaccggacgacgcccggcgccagcacacgcaggacagggacaagcgcacagcggagaaa

SEQ ID NO: 116129 - RNA, 62 nt, Homo sapiens
caaaaaccacgagagcccgcccaacaaacagaggacagggaaacacagaggccaacagcaag

SEQ ID NO: 116130 - RNA, 79 nt, Homo sapiens
cagcgggggaaccggcgcgccggcgcgcggcgcggacaggcccaaacgggggcacccgaggaggaagagggcagggccc

SEQ ID NO: 116131 - RNA, 71 nt, Homo sapiens
aaggaagggcaggcaagacccaccccgggaagaaagcaaacagacggagggaggggcaggaagaacacgcg

SEQ ID NO: 116132 - RNA, 76 nt, Homo sapiens
aggcggagcagggagcaacagaaagacaaggccgaagcaggacacaaagaaaagacgaaggaagcaacacaaggaa

SEQ ID NO: 116133 - RNA, 77 nt, Homo sapiens
gccaaccagccggagaaaggagaagcggaaagaaacacccaccacaggaagccagacggaaagagccaaagagaaaa

SEQ ID NO: 116134 - RNA, 70 nt, Homo sapiens
acggcagccgcacacagaacgagagagaaagacagcaaagaaaaggagaagaaaggaaaaaaacaacccc

SEQ ID NO: 116135 - RNA, 76 nt, Homo sapiens
aaaagacagcccgcagcacgaccagcaggaacgagccgaagagagaaacccccaaagaagagccccccaaagcaca

SEQ ID NO: 116136 - RNA, 74 nt, Homo sapiens
cggacgcaagccgggagacgcacagcaagagcccggacaccggaagcgggaaagccgcagaaggacgccccgaa

SEQ ID NO: 116137 - RNA, 54 nt, Homo sapiens
cggcggccaggccccagacacagacgagcaggggaaggacggaccacaaaaccc

SEQ ID NO: 116138 - RNA, 59 nt, Homo sapiens
cacacggcagaaaaagagggaccaaaacaaaacgagagcaagaggaaagaaaaagaaca

SEQ ID NO: 116139 - RNA, 83 nt, Homo sapiens
cccgcgcccccgcgcgacgccaggacccagaagaccccagacggggagcgcagcagagggagcgccgaaggacaagaacagcg

SEQ ID NO: 116140 - RNA, 92 nt, Homo sapiens
aaggccgggacccggccccggcccacaggggggggcaaacccgagagaacggcgccacgcagagccccgccaggaagacacgccggggaacg

SEQ ID NO: 116141 - RNA, 77 nt, Homo sapiens
aagaccgggaccacacaggaagagagacagaaacacagcaacggcaagcagaaaaaaggccaggagacaaccagacc

SEQ ID NO: 116142 - RNA, 62 nt, Homo sapiens
ccacacccaccaacaacaccacaaaaccacagccaagggaggaacacagccaagggaccgga

SEQ ID NO: 116143 - RNA, 85 nt, Homo sapiens
aaccagagccacccgggagaggaagagcgaggaggaacgcgcaaggcaaagcaccgggaaaggaggacaaaaggaaaaaaaaaaa

SEQ ID NO: 116144 - RNA, 77 nt, Homo sapiens
ggcgggggacgaccggagaacacggagcgcccaccggcggagaggccaagagacgaacccgagccaaggcaccagca

SEQ ID NO: 116145 - RNA, 77 nt, Homo sapiens
aggggcaccgcagcgaccacccacacaaacccgggacgggccgagaggccagacacaacaggccggggccccaggag

SEQ ID NO: 116146 - RNA, 76 nt, Homo sapiens
aagaaaagaaagagaaaaagcagaaagagagaagagagacagaagagcacaagcccaagccacagaccaaaaagag

SEQ ID NO: 116147 - RNA, 59 nt, Homo sapiens
aagggcggcggagcgccagagcgccgaaggacggccaccagcgcacagacggcgcacca

SEQ ID NO: 116148 - RNA, 74 nt, Homo sapiens
gcccagggccgaggcccacagcgaaaagaccagcggacccaaaaacaaggaacacccggcagcgaggcggcgga

SEQ ID NO: 116149 - RNA, 85 nt, Homo sapiens
ccgcccagacggccaccggcgggaggaacaaaagggggagcgggccggagagaagagaggggcgcgaggagaaggaaacaggccc

SEQ ID NO: 116150 - RNA, 69 nt, Homo sapiens
caaaaaacacagaccaggaggagaaaaggaaccaaagaaggcacaccagaccagaaagagccaggacag

SEQ ID NO: 116151 - RNA, 81 nt, Homo sapiens
gaagccacgccggccccggcccggaccgccgccgggagcggaaacagcggcagccagaggaggcagacgggcaaaaggaag

SEQ ID NO: 116152 - RNA, 79 nt, Homo sapiens
cagcccgggacagccccacaggccgacggcgcaaggccacggcaagcaccgggagcagcagcgaagccagccaccggga

SEQ ID NO: 116153 - RNA, 79 nt, Homo sapiens
ccagacaaggaccagcgacaaggagcgcagcagcagaaagcaggacagccccagagcgaaaacgccacaacagaggggg

SEQ ID NO: 116154 - RNA, 57 nt, Homo sapiens
agcagcccccaacgaagaggcacaaagcaagcaccgacagaaaacaaacagggacac

SEQ ID NO: 116155 - RNA, 78 nt, Homo sapiens
cacgcagaagcgaccgcaggcaagaccgacgaccggggcggcaaaaccacccaaaggaaaggaagccagaaccgaaaa

SEQ ID NO: 116156 - RNA, 76 nt, Homo sapiens
caccccgcccaaggaggcccagcggcaaaagcagaccggaaaacccaccggcaagaccacacccgaggggagccca

SEQ ID NO: 116157 - RNA, 34 nt, Homo sapiens
gcccaggaccaaaaaagcacggaacggaaacaga

SEQ ID NO: 116158 - RNA, 73 nt, Homo sapiens
ggaagacgcaagacgccaggcgacagaagacgcggaaggagcacgaggaagcagcgaaaagaagaggcgggaa

SEQ ID NO: 116159 - RNA, 70 nt, Homo sapiens
aacgccaccagaggaaggaaaaaaggcagcaaacgcagaaaacagacaccaagaggggaaccacccaaag

SEQ ID NO: 116160 - RNA, 81 nt, Homo sapiens
accaccagaacgggcaagcggggccgcaagcaggcaagacccaccccacggacccaccgcgcagggggacacaaacggcag

SEQ ID NO: 116161 - RNA, 81 nt, Homo sapiens
gcacccggccagcccccccccagaccacaccggggcccgccgggaggaggaggaagagcagccgcaggcagcacagccccc

SEQ ID NO: 116162 - RNA, 78 nt, Homo sapiens
ccgcggcgacgcccgccgcccacgcagcccagcacgccacccccacacccccaggaagcaggcgccacaaaacaacca

SEQ ID NO: 116163 - RNA, 103 nt, Homo sapiens
aaagcgaaggaacgcagagcgaagacaagcgccgagaaagaaggcccaaaagagcggcgagaacaggcaccgaaagggggaaaggcagagccagaaaagcaag

SEQ ID NO: 116164 - RNA, 71 nt, Homo sapiens
agcagaacagaggggggaaagaggacacgggagcgccgggagaagcaacagacacgaagaagaaaggaagc

SEQ ID NO: 116165 - RNA, 73 nt, Homo sapiens
ggcggacgggcgcccagccagccgcccccccaccgcggaagagcaagggaagcacaacacccagccggggggg

SEQ ID NO: 116166 - RNA, 79 nt, Homo sapiens
aaagggaccacggcaccgccccagcgcggcgagagacccaggaggcagagccaggccccggcagcagccaacaggagcg

SEQ ID NO: 116167 - RNA, 63 nt, Homo sapiens
gccggggggcccggaaagagagagcaggccaaacaaacagcgacacgaccgacagggaccagc

SEQ ID NO: 116168 - RNA, 77 nt, Homo sapiens
ccaacgacgaggaccgacgcaggcagaccgcgagacccggcgcgggcacgggacccccggacccagcgggcgccgca

SEQ ID NO: 116169 - RNA, 73 nt, Homo sapiens
gccgacagccgcggccgggcccgaggcagcggcggccgcgcccaccggcagggaagacacgccacaccacaag

SEQ ID NO: 116170 - RNA, 82 nt, Homo sapiens
caaaggcaccggacaggccaaggcaggggccagaagacaaagcaaccagaccgaaaagacgcggccccaaaggaaacacccg

SEQ ID NO: 116171 - RNA, 80 nt, Homo sapiens
ggacggcggcggcgcagccggaacccgccagggccagggccaggccagcgcccggcggcccaggaccaggagaacacagc

SEQ ID NO: 116172 - RNA, 67 nt, Homo sapiens
ccccccggagcgcccggcaaacaaaccgccaggagagaacagcacacagaggcgcaaggggaagaga

SEQ ID NO: 116173 - RNA, 78 nt, Homo sapiens
gagcaaaaccagcccagagaacaagaggacaggagaaggcggggaaaaaaccagagaccacagaaggacgggagaaca

SEQ ID NO: 116174 - RNA, 78 nt, Homo sapiens
ggagggaccaaccagaaggccagacacgagcgaccgagcggacgagagaaaaaggccaggagaagagggcgaaacaac

SEQ ID NO: 116175 - RNA, 84 nt, Homo sapiens
gcggggggcgaggcgcgcggggcccgccaggcgcgcggagccacacaaagacaacccagaaaagaaaaggccaggggcgccgaa

SEQ ID NO: 116176 - RNA, 56 nt, Homo sapiens
ggaaacaaaccgaaaaggaaaggcagaagagacaacacagaaaccagggcggaggc

SEQ ID NO: 116177 - RNA, 69 nt, Homo sapiens
caaccagcggacacggccgccgggccgcgcccacgggcagcgagggaggcaggcgacaacagaggagaa

SEQ ID NO: 116178 - RNA, 82 nt, Homo sapiens
gggccccgccggcgccgcccgccccgcgccccgccccacggaccaggaaagaaaaggagcagacgaaacccggaaccagaac

SEQ ID NO: 116179 - RNA, 74 nt, Homo sapiens
agcaagcagcagccagcagccacaaagcggaagccgcagaaggaccggccagaagcaagccggagaacagaaag

SEQ ID NO: 116180 - RNA, 81 nt, Homo sapiens
gaggaaaacagcacaaggccaacacgaggaaaggacggaaacagaacccacgcacccagcgggcagggagaaccaagggcg

SEQ ID NO: 116181 - RNA, 55 nt, Homo sapiens
ccaagcaacacagaagaaacgacaccagagagcaggacccaggcccaaaaggaaa

SEQ ID NO: 116182 - RNA, 119 nt, Homo sapiens
cggagaggcagcaccaccagcccgcccccgccccaggacagagcccggcgcaggggggacaggagaccaaggaccggacagaggaagaaacccggaaggggaagaggaaagcaaaggcg

SEQ ID NO: 116183 - RNA, 37 nt, Homo sapiens
gcagcacgaaaagaacaggcagagagccacaagagcc

SEQ ID NO: 116184 - RNA, 76 nt, Homo sapiens
caagacggggcgccccacagaggggcgacgggccggcccagggagaacgcaaaaccaccacccccacaaaaaacgc

SEQ ID NO: 116185 - RNA, 88 nt, Homo sapiens
caaagcagccaagcgggagcaggagaagaaaccaagaaggaagcaaacaggccccgaggggcagggcccagaggccggagcgagccca

SEQ ID NO: 116186 - RNA, 84 nt, Homo sapiens
aaaaaggcccccaagccgagagaggaccagaaccagaccggaaagcaccaggcaaagaaaaaaacaggagccaagaaggccaga

SEQ ID NO: 116187 - RNA, 80 nt, Homo sapiens
ggaccaagaaccagacccagagagcaagagagacgggccaaagggaaacaaggggagaagaagacaccagaggaaaccac

SEQ ID NO: 116188 - RNA, 76 nt, Homo sapiens
aaaaaaaaccaacagccccccagacaagccagcgccagggagcacaaccacaagcccaggagagcccaggacggag

SEQ ID NO: 116189 - RNA, 74 nt, Homo sapiens
accccacgacccaccccaaagaacacagaccaccaaggagagcgaagacagccccagggaaagccgccagcagc

SEQ ID NO: 116190 - RNA, 75 nt, Homo sapiens
ccgaagagggggggccgggacagagcgaagaaccccccaagaagacgaaacccccgggccacaagaaggggggcc

SEQ ID NO: 116191 - RNA, 86 nt, Homo sapiens
aaccccgagggaaacaagaaaacacaaagaggcagcaaagcgcggagccagcgcccggcaaggagcgagcgggagacaccggccgg

SEQ ID NO: 116192 - RNA, 81 nt, Homo sapiens
gggaggccggccgggccagcacccggccgagacggcggcagcagcggcacagcggaaaaggaggcgagagcgggcgggggg

SEQ ID NO: 116193 - RNA, 71 nt, Homo sapiens
ggcaacaggagccccacgccacggggcagcaaggcgaaccccacccaccacggagccagcgaaaccccccc

SEQ ID NO: 116194 - RNA, 37 nt, Homo sapiens
cacagccccccaaagccaaggcagaacgccaaccagg

SEQ ID NO: 116195 - RNA, 75 nt, Homo sapiens
ccacaccgaaaaccaacggccccgcccccccacccaaccggagagagacaggaaggagcgaagaaaccgcaaagg

SEQ ID NO: 116196 - RNA, 74 nt, Homo sapiens
caacaacaagcacggacaaacccagcccaacggggggagaacccaaaggccggggcagcagaagaggacaagca

SEQ ID NO: 116197 - RNA, 74 nt, Homo sapiens
gcgggacagccaggcagacgacggcgaagacaaacacccacagagggccacacaggaccaggcggacaagacgg

SEQ ID NO: 116198 - RNA, 70 nt, Homo sapiens
ggccgcacgccacacggacccccggaggacccagggccagaagaaaaagcagcacgaaggcgaggaacca

SEQ ID NO: 116199 - RNA, 86 nt, Homo sapiens
gcgccgccgccaccagcccaagagaaagggcgggcccggcgggcccgcgacacccagaaggaccgagcggaggcccccaacccgag

SEQ ID NO: 116200 - RNA, 76 nt, Homo sapiens
cgcccgcgccaccaccggcgaagacagaagcgaaggggacagggggagaaccgccagggaaacccgggggacagac

SEQ ID NO: 116201 - RNA, 79 nt, Homo sapiens
aagcagaagaagcgaggagaagaagaggaagggaaggagaagaacaagcacagggcacccgaacgccccagaagaaaca

SEQ ID NO: 116202 - RNA, 54 nt, Homo sapiens
gcaaaacgcagaggggagcaggcaacacaggcagccaggccacaggaaacagga

SEQ ID NO: 116203 - RNA, 60 nt, Homo sapiens
cggacgaggccgccccaggcgcccgacgcggaccccagaccaagagggaggcggagcggg

SEQ ID NO: 116204 - RNA, 37 nt, Homo sapiens
accacaaacaggcccaaggacggccggggagcagccg

SEQ ID NO: 116205 - RNA, 87 nt, Homo sapiens
cgggacggaccgagaccggaccgagagcggaccgagagcgcgaaacgcacgagaaggccccgcgagcggccaccgcccaccaacagc

SEQ ID NO: 116206 - RNA, 50 nt, Homo sapiens
cccgagagagaaggcccagacaggcgacaaccggagcaccagcagaagaa

SEQ ID NO: 116207 - RNA, 36 nt, Homo sapiens
gaaagcagaagacaagaaaacagccacaggaagaag

SEQ ID NO: 116208 - RNA, 71 nt, Homo sapiens
ccacacacgaagagagggcacagaccaggagacaagaacgagccagcaaacccgaggagccagagaccaaa

SEQ ID NO: 116209 - RNA, 58 nt, Homo sapiens
gcacgccagagaaccgcccgcaacacaacagaaagcacagcgagacaagcaacggaga

SEQ ID NO: 116210 - RNA, 81 nt, Homo sapiens
gagccccggagggaagcgcccggggccggccgccgcgggaccgaggaaaagccgcaccaggcgcaaggaagaagagacgcc

SEQ ID NO: 116211 - RNA, 77 nt, Homo sapiens
gccgcacacacgggccaacggcagaaaaaggacagaagaacacgaaaagaggccgagcggaccagcaccaccacagc

SEQ ID NO: 116212 - RNA, 76 nt, Homo sapiens
aaggagcccggagccggcggggccagaaggagacccaacaccccggccagacgggccaccaggccggcgccccacg

SEQ ID NO: 116213 - RNA, 83 nt, Homo sapiens
gaaaaagagcaaagagaaaacaagagacgcgaccaggacagagaggcagggaggcacagaccccacaggccccggacacgggc

SEQ ID NO: 116214 - RNA, 68 nt, Homo sapiens
aaaaagaagaaaccgagacaaggcaggagaaggcagaccgaccaaacagggagcagcggacaggagac

SEQ ID NO: 116215 - RNA, 80 nt, Homo sapiens
gaaccgaccagacgggaaaagaaacccgggccaggccgagggcccgcccggccccaggagaagaaccagccgcagaggag

SEQ ID NO: 116216 - RNA, 81 nt, Homo sapiens
cccaccgacagggccccgcaggaaagccgcacaaacacgcagaggcaagaagagaggcaggagggccgggacgggagaggg

SEQ ID NO: 116217 - RNA, 87 nt, Homo sapiens
cacgcaccgacagcgccgccaccgagccgggcccaccccccaccaaggaagacggcaagaagaagcgaaaaccgcccacaacaccag

SEQ ID NO: 116218 - RNA, 73 nt, Homo sapiens
caagcccagaaaaagcaacaagaagagacaagcggccaaaaggcacacaaaccaaggcggaccagaagcagcc

SEQ ID NO: 116219 - RNA, 64 nt, Homo sapiens
gggaaacaaaaggcgaaccggggagaggcggacacgagcgaaccgaaaagagacacggagggga

SEQ ID NO: 116220 - RNA, 79 nt, Homo sapiens
cagcaaccgacaacgcggcccgacgcgaccacgcaaggccccaaggggaagcgaagaaacagaaaaagacgcaagaagg

SEQ ID NO: 116221 - RNA, 81 nt, Homo sapiens
ggcggcagaacagccaagagcgcggaacgcggccacgaggagggcacgcggaggagacgaagaggaggccggcagaagaaa

SEQ ID NO: 116222 - RNA, 113 nt, Homo sapiens
gggccgggaccggcgcagggacacgggggcgcgcgcgccgacggcccaccacaagcggagaagaagcaggcgccccccaccagccacagacacagacgacacggcggacaacg

SEQ ID NO: 116223 - RNA, 93 nt, Homo sapiens
cgagcacccaggcgacgcccaccaagacgccgacaccccaggccacgagccccaggccacggcagcaggcccagcccccagcgaagcagagcc

SEQ ID NO: 116224 - RNA, 68 nt, Homo sapiens
gagaaccggggaaggcaagggcccagggggcgaaagcccaccacaccagcacgggggcggaagcacac

SEQ ID NO: 116225 - RNA, 68 nt, Homo sapiens
acaaagaagacccaggcggaggcccacgacaaaagcaaccccgaaacaccgcgggagagccgagcaaa

SEQ ID NO: 116226 - RNA, 80 nt, Homo sapiens
aggggagccaccagccccccggaagccaggagggaagcccagaagacgcacaagagagaccgaccaaaccccggaacgcc

SEQ ID NO: 116227 - RNA, 63 nt, Homo sapiens
ggagagagggaagagagaagccccgggcggagagcgaagcgaacaacccagccgccagcccag

SEQ ID NO: 116228 - RNA, 63 nt, Homo sapiens
cgcacgccgcagacgccgccaccgccagggcccgaggaccggccgggccgcagcacacaccgg

SEQ ID NO: 116229 - RNA, 87 nt, Homo sapiens
caagaccaaggcaacaaggacaacaagagacgggacaagacagggcaaaggacagaccagcgaaacagaggaccgcggggccccgag

SEQ ID NO: 116230 - RNA, 77 nt, Homo sapiens
aagaagaaaaacccaacacgaacggacagggaggaaaaagcagcgaaacagacaaccccccacacaaccggaaaaag

SEQ ID NO: 116231 - RNA, 82 nt, Homo sapiens
cgcagccgcgcagccccacgcaacgggcccgcgcgcagaacacagaagcgggagaagggccggcggacgggaacgacgcgag

SEQ ID NO: 116232 - RNA, 49 nt, Homo sapiens
ccccaccaaaaaagcaggaccaaaggaaaccaccagaaaaaaggaaaag

SEQ ID NO: 116233 - RNA, 71 nt, Homo sapiens
cggccgagacaaaggcaccaggccaccacagaaacaaaagcaacaaagaggaaaggaacaggaagcagaag

SEQ ID NO: 116234 - RNA, 64 nt, Homo sapiens
gcaccaagcaaagcgaagagcgggaccccgaagcacgaaaagcgcaaggaacgagaagaacggg

SEQ ID NO: 116235 - RNA, 73 nt, Homo sapiens
ggcccccccggacacacaggagaccccaagaaacgcacagccgaggaaaacgggacgggggccaggcgccgga

SEQ ID NO: 116236 - RNA, 70 nt, Homo sapiens
cccacaggaaaggagggaagccagaggccaaaggcaggaggaccaggagcgcaacacagacaaacgaaga

SEQ ID NO: 116237 - RNA, 61 nt, Homo sapiens
aagacgagagggaccgagaccaagggcgggggcacaacacaggaacgccggcaccgggccg

SEQ ID NO: 116238 - RNA, 74 nt, Homo sapiens
cacccaggacaggggaagagggcggaggaacagcgggggccaaaagcacagcaagggcaaagcccggaagaggg

SEQ ID NO: 116239 - RNA, 81 nt, Homo sapiens
agcaggagggaagcccccccaaaccgggaaagagacaagagcacccaaaggcagcagcccaaggagcagccaggccccaga

SEQ ID NO: 116240 - RNA, 83 nt, Homo sapiens
gcggggagcgcggaccagaagagaacacgccaggaaagcgacccggaggagagagaaaaagccccgaaagggcaaacaaaaaa

SEQ ID NO: 116241 - RNA, 36 nt, Homo sapiens
cccagagagcggaacacaggcccgaccggccgaagg

SEQ ID NO: 116242 - RNA, 77 nt, Homo sapiens
acaacccgacccgacgaaccaaggagaacagaagcgcgccaggcgccagcaagaaggcagggaggaacgccacaaag

SEQ ID NO: 116243 - RNA, 74 nt, Homo sapiens
gagacgacacaaagccagcaaccacagagggcgagcagaggagggagaaaacgcaggacacaaggaagaagaag

SEQ ID NO: 116244 - RNA, 88 nt, Homo sapiens
cgccgcgagcgccacgccaaggaggggcaggcagccagagcagccccccagcgcccgccgcaccgggccagcagggcagaccccgcag

SEQ ID NO: 116245 - RNA, 70 nt, Homo sapiens
cgccgaaagcacccacaagcagagcggcgaagacggccacacacaaacgaggaccagaacagggggccaa

SEQ ID NO: 116246 - RNA, 80 nt, Homo sapiens
ccggaaagacgaggagaaccgggagccagagaggaaacggggacagccagacagaagagaagcaaggaggggcagaaaaa

SEQ ID NO: 116247 - RNA, 73 nt, Homo sapiens
caagaggcggcgcccgaggcggagggacggagaaccacagaagggagaccaaggagggaagaagaccgggaag

SEQ ID NO: 116248 - RNA, 79 nt, Homo sapiens
cggaggccgcgagaaccgacgaggaccacaaaccagcgccgacggaggaggagaaggaaaaggagcacagccaaccgga

SEQ ID NO: 116249 - RNA, 86 nt, Homo sapiens
ggcccggcgaggcaggaaggccccgaggccccgaccgccgcgccccagaagagagcaaaaaccgaccaggaccccaaggccgcaga

SEQ ID NO: 116250 - RNA, 78 nt, Homo sapiens
cacccacacagccgcgaagaagcagcacgaaagagagaggccgcaagaagaacaggagacagacccagcacggacccc

SEQ ID NO: 116251 - RNA, 72 nt, Homo sapiens
gagacagcagagccaacccacggaggaaggggcccggcacaaggaaaggcaggacaccaggaaaacgaagga

SEQ ID NO: 116252 - RNA, 70 nt, Homo sapiens
cacaggcggagagcgcaggcccacccacagaacagaaaagggacagcgagcaacagcagaaaagagaaga

SEQ ID NO: 116253 - RNA, 68 nt, Homo sapiens
gaccagaaagggaaagagggcaggaaacggaacgcgccaccaaaacccgcagggccgaaccacagcag

SEQ ID NO: 116254 - RNA, 70 nt, Homo sapiens
aaggaagcaaagcaccaaagacgagaaagaaacagcaggggaggaaggagcccccgccgacaaggcaaac

SEQ ID NO: 116255 - RNA, 80 nt, Homo sapiens
cggccaaaggagagaaagcaccgacagcacaaccgccggaaacaggaggagcagcgcaacgagacacagcggccccagca

SEQ ID NO: 116256 - RNA, 60 nt, Homo sapiens
acccagaggcagagccgccccagcagcaggggcgccagggcggagaacggaaaagcacca

SEQ ID NO: 116257 - RNA, 74 nt, Homo sapiens
agagggaacgcagcaaaccggaggagcgcagaggaacaggccccggggagcgggagcagcgaggaaggaggggg

SEQ ID NO: 116258 - RNA, 87 nt, Homo sapiens
acaagaagcagccgacaggcggaggcccccgggcaagaggcgcaaacaagccaacccaggaggaaaaacggggcgcagagacaccac

SEQ ID NO: 116259 - RNA, 53 nt, Homo sapiens
accccggagaaaaggccaagaaggcagcggaaggccaaagacagacgggccca

SEQ ID NO: 116260 - RNA, 55 nt, Homo sapiens
gcagaggccaggaccagcacaaggccaagacagaaaccaggagaggcccgaggcc

SEQ ID NO: 116261 - RNA, 69 nt, Homo sapiens
gccgaggccgcggcgccaaaccgaggaagggcaacaacccagacaaacaaaaacccggggcagacagag

SEQ ID NO: 116262 - RNA, 77 nt, Homo sapiens
ccgcgaagcgcgcagagccggaggggcgcgggacacacccccaggaggcccggcagagcaggggggacagaaccgac

SEQ ID NO: 116263 - RNA, 78 nt, Homo sapiens
cagaggcagcgaaagacgcaaagacaggaaccagcaagacgcaacccagcgacacaggaccgcgcacgccaccggccg

SEQ ID NO: 116264 - RNA, 78 nt, Homo sapiens
gcccaccacaacaagaagagaaaaaaggcgccagcaaacagcccgcaggaaggagaggaaaagcgcccaggaagcgga

SEQ ID NO: 116265 - RNA, 53 nt, Homo sapiens
cggaacgcccgccccgcagagagagcaagcagggaggggcccagggggaagcc

SEQ ID NO: 116266 - RNA, 78 nt, Homo sapiens
caagaacaaccgcggacacggagaggaaggggaaagaaaggcaaagcgagcaagagggagaccaaccaggcgggaaac

SEQ ID NO: 116267 - RNA, 49 nt, Homo sapiens
gggacgcaccgcaccgagggcgagcccaggaagaaagggcaggcgagag

SEQ ID NO: 116268 - RNA, 73 nt, Homo sapiens
ggaaggcaagaagcagaaagagacgccaggcgagcggaggagaaaagcagacgaaagaaaaaaaaaaccggag

SEQ ID NO: 116269 - RNA, 80 nt, Homo sapiens
gccaggcgcacgcgaagccgcgagccgacaagagcgcgcccagacaaggagagggaaggcgcacccagcccggaaagcag

SEQ ID NO: 116270 - RNA, 70 nt, Homo sapiens
gagaaggagcccacaacaaccacagggcaagggcgcagcacgcagacccgcaagccccaagcagaggacg

SEQ ID NO: 116271 - RNA, 65 nt, Homo sapiens
acacccccgggaacgagagagcaagccccgcagggagccggagcaggggccggaagcacagagag

SEQ ID NO: 116272 - RNA, 77 nt, Homo sapiens
cgcgccaggacagacgcacagacaccgcagcgacaagcccagagaacaggaaagcaaaacccaaccccaaagcgaag

SEQ ID NO: 116273 - RNA, 70 nt, Homo sapiens
aaggagccggggcgaacacagaagaccggccgcccccacgagccgccaccaagcaggcaggggacggccc

SEQ ID NO: 116274 - RNA, 59 nt, Homo sapiens
gcccgcaaggcggcccggggcgagcgcgcaggcagccaaacagaggaaagagcggagcc

SEQ ID NO: 116275 - RNA, 78 nt, Homo sapiens
gaagcaggaaacaccaagaaaaagccaaagcaagagcaggcgacacgcaggaggaggccagagaggagcccaccccca

SEQ ID NO: 116276 - RNA, 74 nt, Homo sapiens
gggaggaaggaaacacaggggcaaggagccacaagccacgacccagaaggcagcggggaccaaacaacagcggc

SEQ ID NO: 116277 - RNA, 56 nt, Homo sapiens
agaaagcccacagccaaagccgggcggacgcggcccacacagcccagaggaggggg

SEQ ID NO: 116278 - RNA, 52 nt, Homo sapiens
aacgcaccaggccaaagaaagagaagaccccagaggcggcaagcgcacggag

SEQ ID NO: 116279 - RNA, 55 nt, Homo sapiens
cagacggggaccccgaacaaagaggccagggaaggacacaccgcggaaagaacaa

SEQ ID NO: 116280 - RNA, 75 nt, Homo sapiens
gcgggcaccagcccgcgcggggcgcgggcgcggccggaccgcagccgcaagggaccgaaagacaacaacgcagag

SEQ ID NO: 116281 - RNA, 80 nt, Homo sapiens
aggaaccgggcaccccgggccaggacgccgaggaggcgacaaagagcgaaagggcccaaggaacagaccaagcaggaaaa

SEQ ID NO: 116282 - RNA, 61 nt, Homo sapiens
ggacaaccgggacgggagcccaccccagagcaaggcggccgaagggcggcgcgcacaaggc

SEQ ID NO: 116283 - RNA, 39 nt, Homo sapiens
agcccccgcgccccgacccaggagacgagcgccaaagac

SEQ ID NO: 116284 - RNA, 70 nt, Homo sapiens
ggccagcaccgcaagcgagaccgaagacaaaagaagcaaggaaagaaggaagacacagagaaaacaagcc

SEQ ID NO: 116285 - RNA, 76 nt, Homo sapiens
gcagagggaacggcaaacaggaaggggcccaagaccaccaaaccccagaaccggaagaccccgccaggaacaacag

SEQ ID NO: 116286 - RNA, 71 nt, Homo sapiens
caaccagccgacccaccaccggcccaggaccccacccccaggacccaaagacaggaccacgcaccagcaga

SEQ ID NO: 116287 - RNA, 76 nt, Homo sapiens
ggagggagcccaagacgccgccgccccggcacgagacggccccggagccaaggcgggcacgaacccaacgagccgc

SEQ ID NO: 116288 - RNA, 76 nt, Homo sapiens
ggagggaaagagaaggcgaggaaccagcaaccagcagcaccgagagcagacaaaaccaagaagaaacaaccagcca

SEQ ID NO: 116289 - RNA, 61 nt, Homo sapiens
ggaggggagccagcggccggaggaggacgaggcgggcgaggccaggcagagcagcccacca

SEQ ID NO: 116290 - RNA, 81 nt, Homo sapiens
agaagggaaggaaacagcaagcgaagccgaaaaagcgcccgagacgggcccgccgaaaggacgacgcagcacagagaggaa

SEQ ID NO: 116291 - RNA, 79 nt, Homo sapiens
gggaaggagcacaagacaggggggagacggacgaccccagcggcagcccccgacccaagaacccagaaagagcccaaga

SEQ ID NO: 116292 - RNA, 76 nt, Homo sapiens
ccagaggccaccaaccaccagcgccacccaggcgccaggggagaggaggcagaaggagaccgcgggacagaaccgc

SEQ ID NO: 116293 - RNA, 56 nt, Homo sapiens
ggggaaacgaccgccccaaaacggcagaagaaaacagagagcccgccagggagcaa

SEQ ID NO: 116294 - RNA, 73 nt, Homo sapiens
agcaacagccgaaagaagccaggccgcagcagacacagcacagaaaccaggacccagcccaaaacgggaaaag

SEQ ID NO: 116295 - RNA, 79 nt, Homo sapiens
acagcagcggaaaaacacagagggcacacggcacagaccagaggccaccaggcaccggacagggaggaaccggccagcg

SEQ ID NO: 116296 - RNA, 92 nt, Homo sapiens
cagcgcacccacccacccccgcacccgggaccgaccgccagagcggaacgaccccagagcgagcccgcagcagcccagaaacaaagacagcc

SEQ ID NO: 116297 - RNA, 48 nt, Homo sapiens
cagacccaggaaacaagagaggcgggacccaaccaggaagcggagcac

SEQ ID NO: 116298 - RNA, 79 nt, Homo sapiens
ggcacccccaagacaaccaaagggcagaaagcaccgacaagcgccgcgcccggggagacagaaacgaggcgcccccagc

SEQ ID NO: 116299 - RNA, 76 nt, Homo sapiens
caaaggagccgaaacccgaccccagggaggagaagcacggccacacagagcagagggaaggcaacacgagcggaag

SEQ ID NO: 116300 - RNA, 68 nt, Homo sapiens
aggagaaaagggagcagcaggagccccgcgggggagcagaagaggggaagaaagagacccgcgggccc

SEQ ID NO: 116301 - RNA, 79 nt, Homo sapiens
agaaaacaaagacaaaaggagacgagaagaagacaagagcccaccccccaaggcagaggggcggcggaaccagccagcc

SEQ ID NO: 116302 - RNA, 81 nt, Homo sapiens
gagggcgcagaggggcgcgagccgcgccgcgccaagaagagacaacagccacaagggacaaaaggaagacaagggagaagc

SEQ ID NO: 116303 - RNA, 81 nt, Homo sapiens
ccgccccggcgccccaaccccggcagccccagccccagggaacccgagaaggccaacaaaagagcgaggaaccaagaagag

SEQ ID NO: 116304 - RNA, 84 nt, Homo sapiens
acaaggcggaggacagccccggccgccgaagaggccgccgccaagaacaaggaaacacgcagaaggaaaagcgcagagaccaca

SEQ ID NO: 116305 - RNA, 79 nt, Homo sapiens
agcccgccgcgcgggcccgcccgacgcggaaggaacccagcagaagccagccgccacgccgagccagccagcaccaacc

SEQ ID NO: 116306 - RNA, 66 nt, Homo sapiens
cggaaaaagcggaaaaagggagggacaagagcagcaccaagcgcaggcaagaggcagcacagcagg

SEQ ID NO: 116307 - RNA, 75 nt, Homo sapiens
ccgcgagcccgaggccaggcgccggccggcgcgaagacgcgggggccgccccccggccacacacccccacggcga

SEQ ID NO: 116308 - RNA, 72 nt, Homo sapiens
agcaacaggaacccaaaaggaacgccaggcgccgagcggaagaaccccagccacaaagaggaaaaacgcccc

SEQ ID NO: 116309 - RNA, 112 nt, Homo sapiens
ggcggcgggccgagggggcgggccggcggggcacggggggcgacggccaagcgcacagaagaaaagcggccaggcgagaagacagaaggagccacagagaaccccagcaaag

SEQ ID NO: 116310 - RNA, 58 nt, Homo sapiens
agggaggcccaagacccacaacaaaaggaaaaccagcaggaacagcgacaggagccag

SEQ ID NO: 116311 - RNA, 77 nt, Homo sapiens
gagacaggaaccgcaggccacacaaaaaagacccacgccaagaccggaaaaccaagacccagaagcgggcacagggg

SEQ ID NO: 116312 - RNA, 87 nt, Homo sapiens
aaaccaccaaccgggaccagggcgccaaaacaggcaggggcaccgagcacaccaggaacagcggagaaaggcgagccggccaaggag

SEQ ID NO: 116313 - RNA, 64 nt, Homo sapiens
gcagacaaaagggccaaagaagggagagagggcgaagcgcgaagggccaaggaaaacacaaccc

SEQ ID NO: 116314 - RNA, 60 nt, Homo sapiens
aaacacgggccagaagcagaacgggaggaaaggcgacacaggaggagaaccgggagcgag

SEQ ID NO: 116315 - RNA, 67 nt, Homo sapiens
acaaccggcagaaacagaggacaaggcagcaaagaagagggaaagcgacgcagacacggagaaccgg

SEQ ID NO: 116316 - RNA, 53 nt, Homo sapiens
cgcgcagaggcaagggagaccaccccagggaccaggaaacagcgaagcgaagg

SEQ ID NO: 116317 - RNA, 78 nt, Homo sapiens
ccaggaggaggaagaccgaccgccgccgcgcaccgcggcagaaggcaggacagcgcacgggcaagaagaaccaaacac

SEQ ID NO: 116318 - RNA, 56 nt, Homo sapiens
gcaccgaaccagcacccccgaccaccgcgcaggcaagaggacgaagcaccggccca

SEQ ID NO: 116319 - RNA, 66 nt, Homo sapiens
cagcccgccgaacccgaaaggagggggggaaagcccgacacaaagccaacgaaagaggggaaagag

SEQ ID NO: 116320 - RNA, 118 nt, Homo sapiens
aaagagccgccaggcacccgagagccaccagaaagaaaaagaacacaagcagaaaagaaccgaaaaaagcgaaaaaaggcgaagacaacaggcaggcgcaaagcgcgccacggccccg

SEQ ID NO: 116321 - RNA, 79 nt, Homo sapiens
gaggccaaagacagagaagcgccgcagaaggccaagagaggccaacagaggaacaaggcccgcagaacccaagagcaaa

SEQ ID NO: 116322 - RNA, 73 nt, Homo sapiens
cagcccgccgggacacaccccaggaaaaagacagcccgcagcacgaccagcaggaacgcccgccgccggcaga

SEQ ID NO: 116323 - RNA, 78 nt, Homo sapiens
ggagcgacgcgagggccgagacggcgcggcaaggcagaggggcgggcaaaggagaggcacaggaagcagaggcaagaa

SEQ ID NO: 116324 - RNA, 81 nt, Homo sapiens
gccgcgccgccgccgcggggcagcagcagccggcagcagcagcggggcgagaagagacaaacagaaaacaacccaaacgca

SEQ ID NO: 116325 - RNA, 85 nt, Homo sapiens
agcaacgaagaaacccgaaggcaggcgagcgcgagagacagccgcccagcagaacagaaaagaaggcagcccacgcaacagaaag

SEQ ID NO: 116326 - RNA, 54 nt, Homo sapiens
cgaacccaacccgcaggaagcgaaccaacaacgcaaagaaccaccaggaccgac

SEQ ID NO: 116327 - RNA, 74 nt, Homo sapiens
cgcgcagcccggccgccggcccccaacagcgccgcccaggcacaggaaaacaagcccgggaccagaccagggac

SEQ ID NO: 116328 - RNA, 70 nt, Homo sapiens
ggcaaaggaaccacccaggaaacagcgcaaggggaggcaagcaggggggcaaaggaaagaaggcagaaag

SEQ ID NO: 116329 - RNA, 90 nt, Homo sapiens
agaaacaaaaagaggagcagaagaaaccgaggagcaaaagcgaaggccgcggggaaggggcccgggcaggagacgcaaaacacgggagga

SEQ ID NO: 116330 - RNA, 76 nt, Homo sapiens
ccaggcccccacccccgagggaaaaagaccgagaagcgcagacccaccagggaaagccaaggcagggccaagaagg

SEQ ID NO: 116331 - RNA, 67 nt, Homo sapiens
cacaaagagaaaaagaaagaacccacacgaaaacgcccgacccggagacaacgaaggcacagcaaca

SEQ ID NO: 116332 - RNA, 87 nt, Homo sapiens
gaagcgggcggcgcgggggagagcccgggaccgggagcccgggaccgggagccggggggccaccccgaccggaggagcggcgcaggc

SEQ ID NO: 116333 - RNA, 77 nt, Homo sapiens
gacaagcagagaaagcaggaaagaagaacaggaaaagcggcaagaccagagaggccgcacccagaggaagagggccc

SEQ ID NO: 116334 - RNA, 81 nt, Homo sapiens
cagaagagagaaagaagaaaagcggaaaagaccgaaagaggaaagggaacacgggcccccagagccgacggcccccacccc

SEQ ID NO: 116335 - RNA, 85 nt, Homo sapiens
cccagagaccgccagcaggcaggcccgagcacgcgcgggagcagcaggacgagacaagggcaacgagacacccagcggcccggcc

SEQ ID NO: 116336 - RNA, 53 nt, Homo sapiens
gagacacggggcgagaaggcggcgcacaagcggacaccagaaagacggaacca

SEQ ID NO: 116337 - RNA, 39 nt, Homo sapiens
cgacgggcaacagacaggcgagaaccgaagggaggagac

SEQ ID NO: 116338 - RNA, 91 nt, Homo sapiens
gaagaaagcaaagaaagagaacagaagagcaagcgcaccaggaaaagccccgcagggaggagggaaccaaccggggggaaacaaacacgaa

SEQ ID NO: 116339 - RNA, 80 nt, Homo sapiens
gaggaggggaggaggaggaggacagggaaaggagcggggagccccgcgccacaggaaggcggccgggaggcgacacggac

SEQ ID NO: 116340 - RNA, 74 nt, Homo sapiens
gagcccggagcaggaaaaacacagagacagacggcggcagaacacgacgggccaaccacaccagcaaaacaggc

SEQ ID NO: 116341 - RNA, 73 nt, Homo sapiens
cccgcacgcaagacaccaagggacgcagcggaagaaaagaaaggccccaccgaggcaccaccaaccaaagcgg

SEQ ID NO: 116342 - RNA, 82 nt, Homo sapiens
cgcccggcccgccagcgccagcggcacggcccgccgcccaagacgagacccacccaccagcacacaccaaccaaggaaaaaa

SEQ ID NO: 116343 - RNA, 56 nt, Homo sapiens
agagcacaacaggagcgaaacggaacgcaggaacgggacggagaggacccccagca

SEQ ID NO: 116344 - RNA, 50 nt, Homo sapiens
ccagacacgagagccgccacaaggccccccacccggcgccccgggccagc

SEQ ID NO: 116345 - RNA, 69 nt, Homo sapiens
cgcagccaggcgcggaaggaggaaacaggaacacgagccgcgggaccacaacaacagagggaccaaacg

SEQ ID NO: 116346 - RNA, 96 nt, Homo sapiens
cccagcgccaccaccacgccagccgcaccagccgcccaagccgcacagccgcggcggcagcagcaggagaggaagcccggggcggcgacggagcac

SEQ ID NO: 116347 - RNA, 82 nt, Homo sapiens
agaaaaacccagcgaccgacgaccggagcaggcaagaaaggacaaaggaacggaaaagcgggaaccggggagggggggacca

SEQ ID NO: 116348 - RNA, 76 nt, Homo sapiens
aacaccagccgaaagggcccaccgcaaggacggagaagggaccccgcaagcaggcaaccgaccgaacggcgccccg

SEQ ID NO: 116349 - RNA, 57 nt, Homo sapiens
ccacccacccaccacgaagcaagcgcagcgaggggagccaaccccagaagaagagcc

SEQ ID NO: 116350 - RNA, 67 nt, Homo sapiens
cgcgggagagaggacccccccccccccccaagagcacgaccgcacaggcaaaggaaggcgaacacaa

SEQ ID NO: 116351 - RNA, 66 nt, Homo sapiens
ccagggcacccccacagagccgaggcagccgaggggcacaccagaacaacacagccgcaggaagcc

SEQ ID NO: 116352 - RNA, 69 nt, Homo sapiens
accagcaacaagccaggcagaagcaacacggaaagacaccgagcagacaaaccacccacaacgaacaag

SEQ ID NO: 116353 - RNA, 56 nt, Homo sapiens
ggcgcgcgaccaacccgagaccaaggcggcacaagcaggcccggaaggcagggcag

SEQ ID NO: 116354 - RNA, 54 nt, Homo sapiens
gccgagccggcccaagaaggaggacagcgggccgcccgccagccggagcagcag

SEQ ID NO: 116355 - RNA, 83 nt, Homo sapiens
cgaccgggcgcaccgaccaggccccaaagccccaaggcgacaagaccggaccgagagcagcaacagagaaagaccagaccgac

SEQ ID NO: 116356 - RNA, 85 nt, Homo sapiens
acggacgggaaggcgccccaggaaggcgcacacaaagcccgagaccgaggacgagaagaagcgcgaggaaggcaaagggcggacc

SEQ ID NO: 116357 - RNA, 78 nt, Homo sapiens
agaggacccggccacaccaccgcagggggggggccgaagaagccagggggaggaaagcagacagacccaccaagaggg

SEQ ID NO: 116358 - RNA, 79 nt, Homo sapiens
aacggaagcgcggacggccaccaagagccaggaggccgggacgaggccaagccggacccaaagaacaagccacacgccc

SEQ ID NO: 116359 - RNA, 80 nt, Homo sapiens
ccaggaccgggccggaacgagacgcacgcaaggcgccaccggaagaaacgggaggggaggagccgggaaagacagcgcca

SEQ ID NO: 116360 - RNA, 51 nt, Homo sapiens
aaccacaacggccacagcggccggcagacccacagcgcaacaacagagccg

SEQ ID NO: 116361 - RNA, 81 nt, Homo sapiens
gcgggcggggggagaagccgcgcacagccggcacggcggccgcgccaacggccccgggcacacgagagccggggacggcca

SEQ ID NO: 116362 - RNA, 77 nt, Homo sapiens
ccagccggcagcccggagcgcccgcgccagccgcgcacaacggggcaccgagccggaccgcagcaccaggaagcaac

SEQ ID NO: 116363 - RNA, 80 nt, Homo sapiens
gggcgacagcaacagccgccggcggaagggcggaaaaccagccagccagcacaagaaaaaaaacaaggaccgaccccaaa

SEQ ID NO: 116364 - RNA, 89 nt, Homo sapiens
cccagaagaagagaagaggagaaagcacggaagcaaaaacccccagaaaaccagagagaaggagaaaacaggaacaaagagaaacagaa

SEQ ID NO: 116365 - RNA, 71 nt, Homo sapiens
gagagaaggcagggcaaaccagaaagacgaaaaggggaaggaacaaaccaaagagcagaccccccggaaaa

SEQ ID NO: 116366 - RNA, 36 nt, Homo sapiens
gcggacggccgccaccgaggaaaagcaacggcgcaa

SEQ ID NO: 116367 - RNA, 94 nt, Homo sapiens
caccggggcccggcgcccgggcccgccccggaggggacaaaacagcacaacacaccgaaagacccaccaaaacgcacagaaggggcaggggccg

SEQ ID NO: 116368 - RNA, 73 nt, Homo sapiens
gccacagcaccccagcacccagcagcaggcgcaaaaacgaacccacaaccgaacgacggacgggaacaaagaa

SEQ ID NO: 116369 - RNA, 75 nt, Homo sapiens
gaggagcgggaaacgggagggaaccagcaacaagccgccaaagaccacgggggccaaacaccaggagaagggcga

SEQ ID NO: 116370 - RNA, 98 nt, Homo sapiens
gacccagaacaagagaccaagacaaccaggcagaagaaaagaagccaggcgagacaggcgacaggcgcaaaggggaacaggacccgaccaacaagcaa

SEQ ID NO: 116371 - RNA, 72 nt, Homo sapiens
caacgaaaaaccaaaaggacaaaggacgggaggggaacgccgagggcagaagcaggcccgagcccaagcaag

SEQ ID NO: 116372 - RNA, 62 nt, Homo sapiens
cagaaaagaccaagaccaccaaggcaaagacagaagacaggagccagagggacgggcagcaa

SEQ ID NO: 116373 - RNA, 76 nt, Homo sapiens
cggacgggggaggaggcaacgccgcgggaagaccacgcccaggcgaccggcaccaacaacacccacacgggcggag

SEQ ID NO: 116374 - RNA, 40 nt, Homo sapiens
cgagcggcgcgccaccgccaggagaccaaaacaacggcgc

SEQ ID NO: 116375 - RNA, 71 nt, Homo sapiens
accgggagagaccggcggacagcaacagagcgccaaaaagaggaccccagcacagcacagagcagggagag

SEQ ID NO: 116376 - RNA, 71 nt, Homo sapiens
cacagaggccaaggcaagccagagaacacccgccgcgcaaaaggccaaggaagcacgggaagaacagaaaa

SEQ ID NO: 116377 - RNA, 66 nt, Homo sapiens
gccaaaacagcacaacccccagaggaaaagaccgcaacccaccaaggagcacaggacgaagaggaa

SEQ ID NO: 116378 - RNA, 76 nt, Homo sapiens
gaaggggagggaaaaaccgcccggcccggcgaggaccccaaggcgccacagaaccggccagaaacgccaaaacacg

SEQ ID NO: 116379 - RNA, 75 nt, Homo sapiens
acccagagcgcacggcgacgccccaggggaaaacccccgggaccagcaagggcgaaaacagaaaaaaagagagaa

SEQ ID NO: 116380 - RNA, 78 nt, Homo sapiens
ggagggagagaacacacagcgggcgcagcggagaacgcaaaccgcgcggaggaggccgagaccccaagacgagggcca

SEQ ID NO: 116381 - RNA, 77 nt, Homo sapiens
cgccccggagccgcccccgggacgcagccggaggaggcgagggcccaacaaggcgggggcggcggagaagaaaagaa

SEQ ID NO: 116382 - RNA, 88 nt, Homo sapiens
ggagaaggaccccggacccccccacgcacgcccgcgccgggaaccaaggcaaacaccagcaacacccgggacaaaaacgggggccacc

SEQ ID NO: 116383 - RNA, 81 nt, Homo sapiens
cggaggacacgacaagaacggggaggggggacaggagagaagaaacggcgaggaaagagaggagccccggaaagaaaagga

SEQ ID NO: 116384 - RNA, 81 nt, Homo sapiens
caggcccgggggcggcggccacgccaaggacgggcacagcgacccgaagaaaccgcagcaaaagaaaggacaaagacaacc

SEQ ID NO: 116385 - RNA, 36 nt, Homo sapiens
ggacggagagggagaaggagcggacgggcgagggag

SEQ ID NO: 116386 - RNA, 75 nt, Homo sapiens
cgggaggggcggagggcaagagcgccgaccgggcggcgaggaaggcgccccggagaaaggcaaaacggccgagag

SEQ ID NO: 116387 - RNA, 75 nt, Homo sapiens
cccagcgccgccagacgaccgcgccacccgcaggcacacccgaaacgccacccagcagccggggggccggcccgg

SEQ ID NO: 116388 - RNA, 78 nt, Homo sapiens
ccgcccagccgcgagccccagggcccacccaacacagacacagagagacggaaggccacaggccgaggagaaggcgca

SEQ ID NO: 116389 - RNA, 75 nt, Homo sapiens
gcacagaacaacagcacgggagaaagcgcccacgcacgaaagcccaggccaaaaagagaacccagaaagcggacc

SEQ ID NO: 116390 - RNA, 71 nt, Homo sapiens
gccaaggggccagcgacaacccccagaagagaccaacgccaccaaccaaccggggccagaagagaccaaga

SEQ ID NO: 116391 - RNA, 67 nt, Homo sapiens
gaccaagaaacagccaaagaaccagaacccaaaaacaccagaccaggaagcccaggggcggcgccaa

SEQ ID NO: 116392 - RNA, 79 nt, Homo sapiens
cacgaggaagaggagcagcaagcaggaagagagaagacgggccaacgcgagaaaggagcgaggaacgcggggagcagcc

SEQ ID NO: 116393 - RNA, 80 nt, Homo sapiens
cgcagacggcagcgccagggacaggagcgagggaaggaagcaaaagaggcccccggccccaaggcacaagggagcgccgg

SEQ ID NO: 116394 - RNA, 66 nt, Homo sapiens
cgcaggcggggaccagaggaaccccaggcacacgacgaagagcccaaggaggagcgagcagcaccc

SEQ ID NO: 116395 - RNA, 71 nt, Homo sapiens
aggagaagaaggaaagagaagacgaagagaccgaagggcggaagagcgcgggaggggaggccaccaagaag

SEQ ID NO: 116396 - RNA, 36 nt, Homo sapiens
ccagcccacaggggcaagagcccgggccgaccccca

SEQ ID NO: 116397 - RNA, 56 nt, Homo sapiens
ggcgcgcaggagccaaggaaacaggaacacgaaagaggaaaaacgcacaagaaacc

SEQ ID NO: 116398 - RNA, 82 nt, Homo sapiens
gaggccaacggcagaagccaccacaaaagcgaaagggcacaccacagcccaaaggggcaggacaagacagaaggccaaggga

SEQ ID NO: 116399 - RNA, 71 nt, Homo sapiens
caccagaggcaagacagccggcagcccacgcgaccaaagacggacaccagggccgaggcacgccgggggac

SEQ ID NO: 116400 - RNA, 46 nt, Homo sapiens
ccaggcagcccccaaacccggcccagccagcccgagggagaggagg

SEQ ID NO: 116401 - RNA, 81 nt, Homo sapiens
ccgagagcgcgaaacgcacgagaaggccacagaccggaggagagcggcggcggccccggccaacagccacacggagcccgc

SEQ ID NO: 116402 - RNA, 75 nt, Homo sapiens
caagccgcgccggagcggagcgcgggcgccggggagccagaacccggagcaggaaaggacagggaagcaggagcg

SEQ ID NO: 116403 - RNA, 80 nt, Homo sapiens
cgccccaggacaccaccagccggaggaccaagaaaagagaggaacagcacggaagaaccgaagaaagcaagaacaaccgg

SEQ ID NO: 116404 - RNA, 76 nt, Homo sapiens
ccgggccagacccgacggaaaggcccgggccgcgcgggaagggggaaaggggagacgggaaccgcggagcagcgcg

SEQ ID NO: 116405 - RNA, 56 nt, Homo sapiens
cggaagcgaaagagcagcagaaacgcacccaggacaaacaaacgcgggccgaggcc

SEQ ID NO: 116406 - RNA, 77 nt, Homo sapiens
gcgcgagcggccggcgcggcgcggagcgacaggggccgggaccgccggccaaaagaagcaaagacccaccaggggag

SEQ ID NO: 116407 - RNA, 61 nt, Homo sapiens
gaacaggcagggcacagaaacacggcgaaacgccgccaaccggacgaagggcggcgcaacc

SEQ ID NO: 116408 - RNA, 72 nt, Homo sapiens
ccgagccagccgcggccggaggagcccccaggcccagaaaagagacacacaaaggaagcaaagccggaacca

SEQ ID NO: 116409 - RNA, 60 nt, Homo sapiens
cgcagggaacggcgcccagcgggaggcgcagcaaacgccacagaaacggacgacacgaga

SEQ ID NO: 116410 - RNA, 72 nt, Homo sapiens
ccaacccacggccagaaacgagcaagagacaaagggcgcagagcacagacaacggcccaggaagacccaaaa

SEQ ID NO: 116411 - RNA, 75 nt, Homo sapiens
ccaacggcagaaaaaggacagaagaacacgaaaagaggccgagacaaacccacaagcgaaagaacacgagaagaa

SEQ ID NO: 116412 - RNA, 44 nt, Homo sapiens
aagccgggagcgagcccaggcggcaggcaaaccgcagaaaagag

SEQ ID NO: 116413 - RNA, 71 nt, Homo sapiens
ggccggcagcaccgcggccgcagaccgaagcgccggccagaccaggcgagccgagagagaggacaccgagc

SEQ ID NO: 116414 - RNA, 81 nt, Homo sapiens
aaaaaaaagcccaggaagggaaagcaagggaagcacggagccgacaggacacaggaagcccaggggccaccgaaggagcga

SEQ ID NO: 116415 - RNA, 87 nt, Homo sapiens
gggacgccagcaccagcaggagcagccaaccagcagcagccacaggagggcaaggaccccccaagcagagcccggggagccacgaag

SEQ ID NO: 116416 - RNA, 40 nt, Homo sapiens
ccccaagaccaggcgccagggcgaggaccaccgggaggcc

SEQ ID NO: 116417 - RNA, 68 nt, Homo sapiens
ggccacgccgggccggagccggccaccgcagaacaagagaccaaccaggaccaccaacagcgcacgga

SEQ ID NO: 116418 - RNA, 103 nt, Homo sapiens
gacaacacacccaaaccaaacggagaggcacccagagccgaagagcacgaaaggggagaaaacgcaaaacggcagaggcgggcggcacgcagggaccaggacc

SEQ ID NO: 116419 - RNA, 77 nt, Homo sapiens
gcgccgcaaccaagccgacgagacggagaggaggcacacaccaacgcccacacagcccacggcacccaggcaccacc

SEQ ID NO: 116420 - RNA, 73 nt, Homo sapiens
aaaggagggacgaagacaccgacggcccggagcgagagcgagagaagggaccagccagaagaaacaaccgaca

SEQ ID NO: 116421 - RNA, 84 nt, Homo sapiens
gcaccagagcgggaagacacaaaagaggcacggcggcagcgggcacagagagacccagcgacgagcaaaaggccaaggaagcag

SEQ ID NO: 116422 - RNA, 82 nt, Homo sapiens
gcgaagcccagagcacccaaggaccacccccacaggccccaggaaccacagagacgaggaagcgaggggaggcgggccccac

SEQ ID NO: 116423 - RNA, 52 nt, Homo sapiens
cagaggcagaaagaacagccgcgacacaaaggagacaggcacaaaagacccg

SEQ ID NO: 116424 - RNA, 77 nt, Homo sapiens
cggcccgcgcaaggagggacccccggaacaacacccagcagaccccccggggcccgggcccgccggccacaccacac

SEQ ID NO: 116425 - RNA, 71 nt, Homo sapiens
ggccgccaagaagaccgagagcaccacaaggccaagggcaaggagacaggaaggggaggagcacagaacgc

SEQ ID NO: 116426 - RNA, 87 nt, Homo sapiens
gcgggaggcgcgcgccccgcacagcacagaggggcagccggagagccgggaaaggcccagcgcgagaagcggaggccaaggccgggc

SEQ ID NO: 116427 - RNA, 72 nt, Homo sapiens
gacaaaacaggcggaaaacagaccgcgcgaaacgcccagaaaccaagaagcagcacgccggaaaaccaacga

SEQ ID NO: 116428 - RNA, 61 nt, Homo sapiens
cgggaagcaagaggcaaagagaacgggggccgcaacgggagcgcccgccaagaggagggca

SEQ ID NO: 116429 - RNA, 82 nt, Homo sapiens
gcggcaaccgaaagccagcagcgggagcccaagcgaccagcccccgaggggaagcagaggagaggagccagggacaagcaga

SEQ ID NO: 116430 - RNA, 55 nt, Homo sapiens
ccgcgcaacaacaccaaacgccggacaaccgggcacacgaaaagcagcagccaga

SEQ ID NO: 116431 - RNA, 70 nt, Homo sapiens
gaagaaagcagcggccagaaaacaggggagaagcagaccgcaccaggcgggaccccgaaaaagcccaaac

SEQ ID NO: 116432 - RNA, 62 nt, Homo sapiens
cggacgccggaccgccacgccaccggggaagaacacggaaaccggacagggacaggaaagaa

SEQ ID NO: 116433 - RNA, 70 nt, Homo sapiens
caccggagggacggcacagggaggccagccggagaagcgagcagcgacaaacaggaagaagagagcagga

SEQ ID NO: 116434 - RNA, 119 nt, Homo sapiens
gggggaggaaccagggggccgggcagccgcggacccgccaagaagcgcccacgcagcagccgcccccaggccacacaacgaggaggcacggggaccacgaccggacggaaccgacccag

SEQ ID NO: 116435 - RNA, 77 nt, Homo sapiens
cagcaccagggaggacgccccgggcaacgggaggaccaggccaccagccagccaagcgccccaacccaagccaccag

SEQ ID NO: 116436 - RNA, 77 nt, Homo sapiens
aaccggagaaggaacagcacaccaagcaggagcggcaccagacagccgggcgaaccagacacgcaagaaaacaggaa

SEQ ID NO: 116437 - RNA, 84 nt, Homo sapiens
ccgccgcccgagcgccgagaaagccccgggagaagcagcgccgcccggggcagaccaggcaggcccgaaggagcccagcaagcc

SEQ ID NO: 116438 - RNA, 73 nt, Homo sapiens
cagacacagcggcgaagcgcggccaggagacaagcccaagcacagccgagaagaccgaagaacaagcaaagca

SEQ ID NO: 116439 - RNA, 75 nt, Homo sapiens
gggcagccaaaagagaaggaagggaacaagaggggcagcaagggccaaagaaacagaagcggagagacagggaca

SEQ ID NO: 116440 - RNA, 82 nt, Homo sapiens
acgggccggggcccccggaacgagcacaacaacagcaacggaggcgggaccggaacaggcacaccccacacaagcacgccaa

SEQ ID NO: 116441 - RNA, 84 nt, Homo sapiens
gaaagcacgaggcacccccggaccagaacggcacggccacgggcgggcaggcaaggagcgacagacagcaccaagaagaagcaa

SEQ ID NO: 116442 - RNA, 86 nt, Homo sapiens
ccaggccagccgaagaaggcgagcaggggcgggagagccccgcagaagacgccgacgagggaagcaaagcgaagcaaacccccgaa

SEQ ID NO: 116443 - RNA, 53 nt, Homo sapiens
gaccccacggccgaaggacccggggaggaagaaagaggaacggcacggccgag

SEQ ID NO: 116444 - RNA, 56 nt, Homo sapiens
gccacccccacacgcccccagccaaacaggaaaacgcaaaaccagaagcgcgccga

SEQ ID NO: 116445 - RNA, 70 nt, Homo sapiens
ccaccagagacaaagaaggcacggaagcaacccacggaaggaagaacggcagcagggccagcccagaaga

SEQ ID NO: 116446 - RNA, 85 nt, Homo sapiens
ccgacgcagacgggccggcacaccaccaacaagaggccccagcgccgcaagcccgacggccaggaggcgaagagacgaggaagcc

SEQ ID NO: 116447 - RNA, 80 nt, Homo sapiens
ggcaggcggggggggaggaacgccacaagcgcacccgcggaggaacgaagcgcggcccgcccggagcggcagcaaacagc

SEQ ID NO: 116448 - RNA, 77 nt, Homo sapiens
cgggcggagcgcccagacgcggggagccgccggagcgagaagcgccccaacccagcggaaacagggacggaagggca

SEQ ID NO: 116449 - RNA, 77 nt, Homo sapiens
aaggaaggcggagggaaccagcgaggcgagaagcggcgagggcgcccgagagacggcgagcgagacgacgggaccga

SEQ ID NO: 116450 - RNA, 85 nt, Homo sapiens
ccggcccggccaagaagaaacgcaagcacggacggcacggcggcgggcgagggcgccggcagcccagagcaagaagcagagaaac

SEQ ID NO: 116451 - RNA, 68 nt, Homo sapiens
cgagaaaccaaagggaacgggggagagaagccacaaagcaagcaggaacagagagaggcaagccacga

SEQ ID NO: 116452 - RNA, 40 nt, Homo sapiens
aacgaggaaccagcacaagacaaacaggaacaaaagagaa

SEQ ID NO: 116453 - RNA, 84 nt, Homo sapiens
ggcccccaaagggacagggacgcgcaaccacgggggacgggaacgagggggaagcggcccagggaggcccaaagagagcaacac

SEQ ID NO: 116454 - RNA, 40 nt, Homo sapiens
cagcccgagggcagaccaaaagaccgcgcagcacagagaa

SEQ ID NO: 116455 - RNA, 70 nt, Homo sapiens
gcagagcgcacaaagggaaaggcagagaacaaagaaggcccccacaacccaagcacgcgacggggcacac

SEQ ID NO: 116456 - RNA, 83 nt, Homo sapiens
gccccagagccacgaaggcaccgacgcacagcgaccaccaacagaccgaagagcgcgggggaagggagcagccccacaccagc

SEQ ID NO: 116457 - RNA, 68 nt, Homo sapiens
gaaaaagcccaaacagacaggcacggaggaagcaggaaggaccacccaaggcagcccaacagcccaca

SEQ ID NO: 116458 - RNA, 77 nt, Homo sapiens
cccacagaggggcgacggccgggaagcaacggacgggggccacgcggagaagaagccccaccccgccccgacacggc

SEQ ID NO: 116459 - RNA, 68 nt, Homo sapiens
acaggcggcacggaaacggaacgccccagaagccaagccccagagaaagaaagcccaagaggagaagg

SEQ ID NO: 116460 - RNA, 59 nt, Homo sapiens
cgaagcggggaggcggaagagacgcagcaaaccagccggcgggcgccacaacggacgac

SEQ ID NO: 116461 - RNA, 53 nt, Homo sapiens
agaccaaaagaaaaaagggacccacccagagggaagagcaagggacaacagac

SEQ ID NO: 116462 - RNA, 54 nt, Homo sapiens
cagagccagaagaagcaggaaagcgaccaccacgagaaaccagaggcaagcgac

SEQ ID NO: 116463 - RNA, 79 nt, Homo sapiens
cagcgaacagcgcggccgcaggggggaccagaccggaaagccagaggaaaacaggagcagcggcggaaagaacaacaga

SEQ ID NO: 116464 - RNA, 66 nt, Homo sapiens
caggaaagaacccgcagcacgaaagaaagaagaaaaaaagaaagcccagaagagcaagagcacgaa

SEQ ID NO: 116465 - RNA, 74 nt, Homo sapiens
ggacacccaagagggcgagcaggacgaagcgcccgccaccaagaagggaagaacccaagaggacagcggggacc

SEQ ID NO: 116466 - RNA, 78 nt, Homo sapiens
ccgcgcacagagcaacaaccgggccacaagagaaagagcaccgcacaaagaaaaagggcggcacccaccacggcccca

SEQ ID NO: 116467 - RNA, 101 nt, Homo sapiens
cggcgcagggccggccgggcacagcagaggccgcgcagcagcaaaggagagcggaaccggaaaaggagggccaaaaccaggcgagaaccaggagaagcggg

SEQ ID NO: 116468 - RNA, 78 nt, Homo sapiens
gcagcagcacagaccaccgccaggaagggaacggacacgagaagagcacgaaacaggacagacagagaccaaaccaag

SEQ ID NO: 116469 - RNA, 78 nt, Homo sapiens
cgggaacggaagcaggccacccacacgcgaaaggagaacccgggagcgagacagggaagaaccggcaaggaacagaag

SEQ ID NO: 116470 - RNA, 92 nt, Homo sapiens
ggggggggcgagcgaggagccgcacaggcagcccggcgcggggcaaccacagcgccagggaaacagacgggagaccagccagcaccagccca

SEQ ID NO: 116471 - RNA, 68 nt, Homo sapiens
cggcgagaacaaagcacaccggccggagccaggaggagaacagccaccaacagaacacacgcaaaaag

SEQ ID NO: 116472 - RNA, 70 nt, Homo sapiens
caagaacagcgacaaggagagaagcgcggagccccaagagggaagaaagagccaaacaggcgagaggaag

SEQ ID NO: 116473 - RNA, 76 nt, Homo sapiens
gcaaaccacgggcgaggcggggggccacgcgaggcccgccaggcaagaagaagaaagcaaagaacagccaacaaaa

SEQ ID NO: 116474 - RNA, 79 nt, Homo sapiens
aggccaaagaagccaaagacgcacagaagcacaaaacgaaaacgaaggaaggaggacccgaggagagagaagacggaaa

SEQ ID NO: 116475 - RNA, 61 nt, Homo sapiens
ggacaaagccgcccacccccagcggcacagggggaagggggcgggaagacccccccacagc

SEQ ID NO: 116476 - RNA, 71 nt, Homo sapiens
ccgggagagagaaaaaccggacgagcgagcaagggaacagagcgcgggccagagcacggaacgacgaagag

SEQ ID NO: 116477 - RNA, 72 nt, Homo sapiens
agcccgggccaagcgggaggcgccacaaaaccacggagcgggggaaaaccagcccccggaacggcggcagag

SEQ ID NO: 116478 - RNA, 90 nt, Homo sapiens
ccaccaggggggacaaggagaggagaaggagaggaacgcgcggaggaagaagaagaaagcgccggcggcggccagcgaggaggcgcaccc

SEQ ID NO: 116479 - RNA, 75 nt, Homo sapiens
cccgaaggcgcaaacgacaccacccgaccgaacaagggccgagggaacagggagggaccaacagaaaacacaacg

SEQ ID NO: 116480 - RNA, 86 nt, Homo sapiens
acgccgagcagcagaaggcaaagaacagaagaccccggcgccagcagaaccggcggggagccgcagaacccagcggcagcaaggcc

SEQ ID NO: 116481 - RNA, 78 nt, Homo sapiens
gcgggcggacacgcggaaacgagagcagagaggagcccaggggaagagaggggccgaggggggcacacgaggaaacga

SEQ ID NO: 116482 - RNA, 74 nt, Homo sapiens
ccgccgggacacaccccaggaaaaagacagcccgcagcacgaccagcaggaacgagagagggggaaccggggaa

SEQ ID NO: 116483 - RNA, 75 nt, Homo sapiens
agacgcggcgggcgcagccacgacgggccgagccgccacgaaacagcaaacgacacagaagaacagagccagccc

SEQ ID NO: 116484 - RNA, 59 nt, Homo sapiens
aggcaagggcagcccgccggaagcaggacagagcgaagaaccccccaagaagacgaaac

SEQ ID NO: 116485 - RNA, 77 nt, Homo sapiens
gggcggcagcgcgacggggagcggcggagaccgcccgccccgccgggagccccgcgacaagagaagcaccagaagac

SEQ ID NO: 116486 - RNA, 55 nt, Homo sapiens
caaggagaggcacagcacgcagggccggggccaggcgaaccagccgaaaaaggag

SEQ ID NO: 116487 - RNA, 79 nt, Homo sapiens
agccccggccggggagcgcgggcgaccaacaccgggcccggcggaggagcgaagacagaagggcagaggaagccaagga

SEQ ID NO: 116488 - RNA, 70 nt, Homo sapiens
cggcaagagccagaagcccggcggaagggaaagaaaggcaaagcgagcaagagggagaccaaccaggcgg

SEQ ID NO: 116489 - RNA, 75 nt, Homo sapiens
caccgagccgacggcagcgaaaacccagacagaacaagaaagacccaggcgaagccagaaaaacaccgaaccaaa

SEQ ID NO: 116490 - RNA, 73 nt, Homo sapiens
cccagaccgccaagaggcacagggaacaaacaccccggaacaaacagagaggaaagggcagaaaagagcagag

SEQ ID NO: 116491 - RNA, 84 nt, Homo sapiens
caggaccagaggcgagagggccccagccgggccagaagcaggacgcagcccaaaccggacccaggaggcggacggggggcagca

SEQ ID NO: 116492 - RNA, 73 nt, Homo sapiens
aaacgcccaaaccaacgcgaccccaaccccaaacccaggagggacacaccgccaggcagggcggggggggaga

SEQ ID NO: 116493 - RNA, 68 nt, Homo sapiens
gaccagcaaaacccaaaccccaaaacggggacggacccaggccaggaaagaaagaaccgccacgggcg

SEQ ID NO: 116494 - RNA, 68 nt, Homo sapiens
caaagaccaaggggggggcacccccacaacgggaccggccagggacaggcggaaggaacacacggggg

SEQ ID NO: 116495 - RNA, 77 nt, Homo sapiens
ccaggcaaagccggggcgcaaaccaaggggccaaagggagaagccacacgggcaagcaaaacggagaccgagaagcg

SEQ ID NO: 116496 - RNA, 67 nt, Homo sapiens
gccgaacagcgccagaagccacagacgcgggggaaccggggccacacggcgacggaaggaagccaac

SEQ ID NO: 116497 - RNA, 71 nt, Homo sapiens
ggcaagggggggcacaaaagcaacacgcccgaaccggggggagccagcacgaggggcgaaccacggaaagg

SEQ ID NO: 116498 - RNA, 74 nt, Homo sapiens
agagggacgagagggaaaaaggaggagaacccgccgcccgagggcgaaaccaccacccgggacggggaccgggc

SEQ ID NO: 116499 - RNA, 76 nt, Homo sapiens
ggacaccccccaaggaaaagacgaaaagaaacaagacagacaagcagcaggagaaacgagaagaaacagacgcgcg

SEQ ID NO: 116500 - RNA, 80 nt, Homo sapiens
acgacacggcgaaccagggcaggggacaggcaaaacgcgaacaacccacagaagcccaacagaaggacacgagaccacaa

SEQ ID NO: 116501 - RNA, 68 nt, Homo sapiens
cacccccgcccgaccgcccagcccccccacaggggaaacgaccaccggagccaagacagagggagccg

SEQ ID NO: 116502 - RNA, 79 nt, Homo sapiens
caggggaaccagacccccgggagacgggacaggcaaaggagaaacaagaccccagggacgacaccccccagagacacac

SEQ ID NO: 116503 - RNA, 75 nt, Homo sapiens
cggacgcaacgcggcgggcgagacgccaggagccaagaggccacgacagaagaacagcaacagaacacaccaaga

SEQ ID NO: 116504 - RNA, 77 nt, Homo sapiens
ggaggaacaggcaaccaacccgaggcgaaaccccccaccagaggaagaagcgcaaccaagccgggaacccgcaggcc

SEQ ID NO: 116505 - RNA, 83 nt, Homo sapiens
cgcgaggcggcgaagagaccacgaagccaccccccacgcaacgaagaaggagggggcagagcacggcaggcagaaggggccaa

SEQ ID NO: 116506 - RNA, 74 nt, Homo sapiens
gggcccgaagcccccgcaggaaccacaacccaaccaggggggcgagcccggcccggcccggaaggaaaaccacc

SEQ ID NO: 116507 - RNA, 71 nt, Homo sapiens
ggccagaacaaccacgcagcgggcagagccgaggaacgacaagcacggaggacccagcaggacgaccagcc

SEQ ID NO: 116508 - RNA, 71 nt, Homo sapiens
gcccagacggccaccggcgggaggaacaaaaggaaaaaagcagagagaacacaagccaagccgagacacag

SEQ ID NO: 116509 - RNA, 82 nt, Homo sapiens
ggcgggaacccccgaaccggagacaagcacaagacaacggaggcccgaaggggccgggcccacaaagcaccccggcggggcc

SEQ ID NO: 116510 - RNA, 74 nt, Homo sapiens
aaggagcaaaaggcagaagggacgaagaaagaccaacaccaaagaagcgcaaaagagaaaccacaagaaggaag

SEQ ID NO: 116511 - RNA, 39 nt, Homo sapiens
gggggcacgcccgcccgggccgcgacgaagaaccgggac

SEQ ID NO: 116512 - RNA, 78 nt, Homo sapiens
ccgggacgcgcgacgcccgcgccccgggaagaaaacgccagagaagcagagcagcccggagcgaggggagaccgggga

SEQ ID NO: 116513 - RNA, 55 nt, Homo sapiens
acacaaccgacagggaggaacacaagcggagaacaaccggccaaaagagggcgca

SEQ ID NO: 116514 - RNA, 73 nt, Homo sapiens
gcaggagggaccagacagcgcagcccgaggagcggggaaagaacccaacgcggagagccacaacaacgaacac

SEQ ID NO: 116515 - RNA, 84 nt, Homo sapiens
cgggagacgagaagccgaaaagcgcagcgagcggagccgccggaggagaggagccaagcccaacgggacgggaaaacggccaca

SEQ ID NO: 116516 - RNA, 46 nt, Homo sapiens
ggggagcgacggagcgaggggcaggccggagggaaggggaacagga

SEQ ID NO: 116517 - RNA, 80 nt, Homo sapiens
cccgcaagcgccaccacgacgggaccaccggggcccaaccagcgaaacaccacagaacagcccgggcccccacagcccag

SEQ ID NO: 116518 - RNA, 74 nt, Homo sapiens
cccacaaccagagcacagagaagaaccagcaaaagggaaggggggggagaccgagacgggcccccagcccagcc

SEQ ID NO: 116519 - RNA, 81 nt, Homo sapiens
aaaaccagaggggacgaacggacgccgcacccacccgaacagcaaccgccgaagaaaagacgaaggccaaggaagaggagg

SEQ ID NO: 116520 - RNA, 64 nt, Homo sapiens
gacagcacgcaagccacgcggaacaccgaacaaaagggcggaagagcgcgggaggggaggccac

SEQ ID NO: 116521 - RNA, 52 nt, Homo sapiens
gggaacgccagcaagggggaacccaagagagcaaagaaaccccaaagccagc

SEQ ID NO: 116522 - RNA, 81 nt, Homo sapiens
ggaaagccaccccgagccgacaagaaggacaaagagacaagccgagagaaagcaagcaaagaacgcgcaaaaaaaaagaga

SEQ ID NO: 116523 - RNA, 69 nt, Homo sapiens
gcagcccacggaaaaaaagacggcaggcggcacccgcacaagaaaacggagagcccggacgagaaccca

SEQ ID NO: 116524 - RNA, 69 nt, Homo sapiens
gagcacaccccccccccagcaccaagccagaagagaaggaaccgggggaaaaaaaccacccgcgccgaa

SEQ ID NO: 116525 - RNA, 76 nt, Homo sapiens
aacacaggaccccccccaacgagcagcccgcacagcggacgcaaagaaaaagacggcaaaagaaaagcagccggga

SEQ ID NO: 116526 - RNA, 79 nt, Homo sapiens
caggcagcagcgggccccgccaccggcacaccgaaggcggacaggcaagacaggccaccacgggcacgcggaagccggg

SEQ ID NO: 116527 - RNA, 70 nt, Homo sapiens
acacgccgagagacccaagaaacaggaacagcccaagccgagccaggaaaggaagcaaagcgagagcagc

SEQ ID NO: 116528 - RNA, 83 nt, Homo sapiens
caagagcagaggccccagaccgccaagaggcacagggagcgcggagcccgggccgaagcgcacgcgccgccggagcgcggccc

SEQ ID NO: 116529 - RNA, 63 nt, Homo sapiens
gcggggagcgccggagccgggccgacggcaccaagggccaaccgccccccagcagcaggcacg

SEQ ID NO: 116530 - RNA, 84 nt, Homo sapiens
caccccagcgaaccgacacccacagaccaccaacaaggaggcggaaaaggaggcaacgagccggcagcagagccgaccgagcac

SEQ ID NO: 116531 - RNA, 78 nt, Homo sapiens
acaagaaacgaaccacgggggcagaccaggaccacccgaggaaggcgccggaccgaaggcgcgaccacgacgagaagc

SEQ ID NO: 116532 - RNA, 81 nt, Homo sapiens
ggccgccgcgcaggagcccccggagcgggcagaggccaagaccggcccaagaaggagaaaagaagcgaggcggagcaaggg

SEQ ID NO: 116533 - RNA, 72 nt, Homo sapiens
cgcagccagcaaaacggcaaaggcgaccggaccaaaggcaaaagaccaaaaacgacagaagacgaggcgcca

SEQ ID NO: 116534 - RNA, 55 nt, Homo sapiens
gaaggcccggacacagcaaaccgggccacaggaaggcacggcgcaaacggcgccg

SEQ ID NO: 116535 - RNA, 79 nt, Homo sapiens
ggaagaggagcgcaagcgccggggaggaccaggcaagcgcgccaagagacgcagcaaagcacaggagggaccacccaag

SEQ ID NO: 116536 - RNA, 38 nt, Homo sapiens
aaagagcaacgacgcccggccggcggaagaggaccaag

SEQ ID NO: 116537 - RNA, 110 nt, Homo sapiens
cggacgcgccgcgcccggcggccagggaccccccccgcgccgcacagccccgcgcccgaggacagacgggcagagggggagacgcccggacgagcaggggggaggacgac

SEQ ID NO: 116538 - RNA, 81 nt, Homo sapiens
cgacgcgacgcgccagcagcgcagcaccgaccccgggccgggcgcgccgaggaaccaaccgggagccccccaagagaccca

SEQ ID NO: 116539 - RNA, 68 nt, Homo sapiens
ccgaaacaggcgggcaggaaccgccacagcggaaaaaagagccggaacgccccacggaaaacggcgaa

SEQ ID NO: 116540 - RNA, 78 nt, Homo sapiens
gggaacagcaagggcggccaaagaaacaagcaccaagccccagaacagcccaaaggcccggaggaagcccaaaacagg

SEQ ID NO: 116541 - RNA, 85 nt, Homo sapiens
acacggccccccaaggaaaacagggagcgcagccaggcgaccaggagcagggcaccagccgccacaagaagaccaccggacaagg

SEQ ID NO: 116542 - RNA, 72 nt, Homo sapiens
ccacacgcgacaagaaaaccaaaacccaacaccaccgacggcaacacacaggaagaaacgccaggaacacaa

SEQ ID NO: 116543 - RNA, 67 nt, Homo sapiens
gccaacccaccccagaggacagagcagagggagccccaaccaacagccagcgaaaacaaagaagggg

SEQ ID NO: 116544 - RNA, 70 nt, Homo sapiens
ggagcccgaagacagccccgacgagaccccaacaggcccgaccaacaaagaaacccaacagacggaaacc

SEQ ID NO: 116545 - RNA, 71 nt, Homo sapiens
gacccgagcccagcagccgcccacccagccagcacacacgaaagacagagcccggaagcaggaagaggagg

SEQ ID NO: 116546 - RNA, 80 nt, Homo sapiens
cacggcgcagcgcagacgcagaacggccgagcgaccaggagaggagcccccgcccgaagaccggggagggccccccagcg

SEQ ID NO: 116547 - RNA, 78 nt, Homo sapiens
ggcgccgaaaacagacagaacagaacccaaaagccgacaaccccagaaacaggcacggcagacacaccgaccagagga

SEQ ID NO: 116548 - RNA, 62 nt, Homo sapiens
gccgaagcagcgccaggagaaagagacccccccagcagccgggcgggggaggagcccagaga

SEQ ID NO: 116549 - RNA, 71 nt, Homo sapiens
acagagaaagagaaccgaaagaagagaaaagaggaagaaaaggaagcgcaggcgcagcaacgccaaaaaga

SEQ ID NO: 116550 - RNA, 74 nt, Homo sapiens
cacacgaaggccgcacaccgcagcccaccaaaacgggcgaaaaacgaagaaggaagacgcgaccgaacaaacag

SEQ ID NO: 116551 - RNA, 75 nt, Homo sapiens
gggcgaccaccaaaaaaacggaccaggagaacacagcgaaaaagggcggggaaaaaagaagaggaacagaagaaa

SEQ ID NO: 116552 - RNA, 70 nt, Homo sapiens
gcaaaccacgcgagccgggaacccaacccaaacggagaaaaagcggggaaaacaaaaaaaagaaggaggg

SEQ ID NO: 116553 - RNA, 62 nt, Homo sapiens
cggcccaagcaagagcgacgcaagaggcagccaccacgggccggagaacccagcgcgaaaaa

SEQ ID NO: 116554 - RNA, 77 nt, Homo sapiens
gcaaaggcggagcccagggaagccaccacagagaagacggcagacaagccagggaagcacagacggaccacagccag

SEQ ID NO: 116555 - RNA, 77 nt, Homo sapiens
cgacgaacaaccggcaggcggacggcacgcagcccggcgggaggaaaagaccaccacgagggaacaggcacgcccca

SEQ ID NO: 116556 - RNA, 72 nt, Homo sapiens
agacgacgcaccgcaggcagacaaaagggccaaagaagggagagagagcacgcgccaagggcacacgcagag

SEQ ID NO: 116557 - RNA, 73 nt, Homo sapiens
cgccgccccagcccgcgaacgcggagcggaagaaaccgacaacagacgaaggcgaagggcggaggaacacagc

SEQ ID NO: 116558 - RNA, 58 nt, Homo sapiens
gcggggggccaaggcgggggccaggaaggcgcggacaagcaagaggaaggggaggagg

SEQ ID NO: 116559 - RNA, 82 nt, Homo sapiens
agcgcggccacgaaggcggcgggcagcgcgaggcccgcgcccacacgagaaggagggggcagagcacggcaggcagaagggg

SEQ ID NO: 116560 - RNA, 88 nt, Homo sapiens
cgagaacacgagcgaacacgggcaccaaggcccgggaaggggaccacgggagaggaggaagagacccacagaagaagcagagcggagg

SEQ ID NO: 116561 - RNA, 70 nt, Homo sapiens
agaaaccaagcagacaacgcagagggcgacgccaacaaggggagcaaacaggagccaacgacgaacccaa

SEQ ID NO: 116562 - RNA, 72 nt, Homo sapiens
gaagaggaagaagaacaagaacacccgccagcaggcaaagaacccgaaacaggcgcgcacccggcaaagcaa

SEQ ID NO: 116563 - RNA, 66 nt, Homo sapiens
agcgaaggggaggggaaagaacagcgcaaaagagaacggcgagagagaaagagcaacaccagagga

SEQ ID NO: 116564 - RNA, 80 nt, Homo sapiens
gcagcagcggcaggccagggaaacaggcacgcccgccgcagggaaccaccacaggggaccaccgacggaagagagagaaa

SEQ ID NO: 116565 - RNA, 74 nt, Homo sapiens
acacgcccaaaagagaaaagcgagacggaagggcgaaggacaaaccagccaccgcggagcgcggccacagggag

SEQ ID NO: 116566 - RNA, 118 nt, Homo sapiens
gcaccaccaaccacggccgcaggaccccaaggacggggaggaacagcgaaacaacgagacaaaaagaagccaccggaggcaaccccacccacgacaagccaccagcccagccgccgga

SEQ ID NO: 116567 - RNA, 53 nt, Homo sapiens
agacagaaacgagccccaggcaaaggccgacagacagagaacccagggggaga

SEQ ID NO: 116568 - RNA, 80 nt, Homo sapiens
agagagcagcacagaaccaggccccgaggaacagagaaaagaaaccagcagacagaagcaggagcggccagccaacagga

SEQ ID NO: 116569 - RNA, 60 nt, Homo sapiens
caaaggggaaaaaaaagggagaaacagaccaagggacagcaccaggcccgaagcagaaaa

SEQ ID NO: 116570 - RNA, 65 nt, Homo sapiens
caggacgagaaaaaccaccggacagaacaggagacaacaaggacaaagccaaagccgagaaacga

SEQ ID NO: 116571 - RNA, 55 nt, Homo sapiens
agaagggaagagggggagaaaacacaggaggagagcaaaagacaacacccagaaa

SEQ ID NO: 116572 - RNA, 71 nt, Homo sapiens
ggcagcccgaagccggaccagcaggcggcggccggggaaaacgcaaaaccagaagcgcgccgacacggccc

SEQ ID NO: 116573 - RNA, 85 nt, Homo sapiens
cgagaagcgccgccgaacgacaggacgggggcggccggcccccaggcgaagccgacgagcccgaacagacgcaccagcgggagga

SEQ ID NO: 116574 - RNA, 80 nt, Homo sapiens
gacgcggaaagggaggagaagagcgccaggaagcccagccccagcaagacggggcagaggaccaaaagaccacgaaaaag

SEQ ID NO: 116575 - RNA, 75 nt, Homo sapiens
ccagcaggccaacccgggcccaacagcaacaggccaacgcacaggagcgagagacccaccccacccgcgcggccc

SEQ ID NO: 116576 - RNA, 78 nt, Homo sapiens
cgggccggagacccggcccaccgcccacgggagggggcccgaggcaccaacgcaaggacccccccccgcgggcgcccc

SEQ ID NO: 116577 - RNA, 108 nt, Homo sapiens
gaaacggcgcgcccagaagaagggaaggcgcgaggaggaaaggaggacgagcccagaaccgggacaacccagcaaacaggccagacccgacaggagcgacaaacacgc

SEQ ID NO: 116578 - RNA, 77 nt, Homo sapiens
agaccgagcgcaagggcggcaagcgaaagcacacagaggagaacaggggagccagaaaaacacagcgggaccggcaa

SEQ ID NO: 116579 - RNA, 76 nt, Homo sapiens
acagaagaagaagaagcaccgcacagcacccagcagagaacacaggaacagccccgagaaccaagaacggaagacc

SEQ ID NO: 116580 - RNA, 78 nt, Homo sapiens
agcgccaggagccgggggagggaaggaccggaccggagaacaccgcgcgggaagaagcccaaccggcccggagcccaa

SEQ ID NO: 116581 - RNA, 80 nt, Homo sapiens
ggggagacgccacggaacgcagggaccaaagaacccaccgccccgaggaaacgagaagcccagcaccacagcagcaccaa

SEQ ID NO: 116582 - RNA, 73 nt, Homo sapiens
cgggcggaggaggcgccgccaagacaggcaaaagaaggcggggcggacgcagcccccaacccgaccggcaacc

SEQ ID NO: 116583 - RNA, 73 nt, Homo sapiens
aaggaccaggcagaaaacaagccgcggacggagcaggcccagaaagaacagacaaagaccgaaaaacacgagg

SEQ ID NO: 116584 - RNA, 58 nt, Homo sapiens
gccgccccgccgcggcggggacgcagggcagagacaggcaacagacggcaacgaaagg

SEQ ID NO: 116585 - RNA, 54 nt, Homo sapiens
ggcgcaaagaggggaaagcgaaaagcggcaagaacagccagaggaacagaggag

SEQ ID NO: 116586 - RNA, 76 nt, Homo sapiens
agcgaggaggagcgagcgcgagagggcggcaccccaccgcccagccacagccccccccacaggagcaccggccgaa

SEQ ID NO: 116587 - RNA, 88 nt, Homo sapiens
ggcgggaggcaacggagcaccagccgggagaagagccaaggagaccaaacccagcagcaccgcagcagcagaagaacaaggagagacc

SEQ ID NO: 116588 - RNA, 79 nt, Homo sapiens
accccacggggaccgaccaagccagccccagcaggcaacaagggcagggccgagaacgaggcaacgcgaacaccacacg

SEQ ID NO: 116589 - RNA, 58 nt, Homo sapiens
gagccaaggaaagaagccgcagggagggggaggccagcggaccgcaccggggcagacg

SEQ ID NO: 116590 - RNA, 72 nt, Homo sapiens
agccgccggagcagcggggacaggaaggggcagacaagcacgccgcccagacaaccgcaaaggagccagcgc

SEQ ID NO: 116591 - RNA, 74 nt, Homo sapiens
cggcgagaacgagcgcaggaaacggggacagaagaacgaagaacaaggacaaggaaaacaggagagaagaaaac

SEQ ID NO: 116592 - RNA, 61 nt, Homo sapiens
aagcggcggcggcggcgccgggcccggggggggacagcaggcgaggcgggcgggcggaccc

SEQ ID NO: 116593 - RNA, 77 nt, Homo sapiens
accaaccaaagcaaaacagggaaccagaagagacaacgaacacccaggaggaaaccgacaagcccaaacggaagaag

SEQ ID NO: 116594 - RNA, 35 nt, Homo sapiens
accacaacaacacacagagcgagccaagcaagaca

SEQ ID NO: 116595 - RNA, 41 nt, Homo sapiens
aagaaaccacagcaacagaacaggggggcaaaccgagggac

SEQ ID NO: 116596 - RNA, 63 nt, Homo sapiens
cgacgcgccccgcccccccgccggcccccccacgcccgccgcacccagggaaaaaacagccgg

SEQ ID NO: 116597 - RNA, 38 nt, Homo sapiens
cgaacggccagagaaggaccgaacccagacccaacaga

SEQ ID NO: 116598 - RNA, 60 nt, Homo sapiens
aagaaaaagaaaagggcaccagggacacgagcgcacaaggggagaagcagcgcccgccgg

SEQ ID NO: 116599 - RNA, 65 nt, Homo sapiens
ccaacccccaggaccagagaaaggagacccaccaagccaggaaacgaaaccagaagagacaccag

SEQ ID NO: 116600 - RNA, 70 nt, Homo sapiens
gcccccgacccgagcccaacgggcccgccagccccagcggcgccgagaaagaggggagaggaacggcggc

SEQ ID NO: 116601 - RNA, 78 nt, Homo sapiens
cgaaaggaggaggcacagacccgccgcagcaagagagagcaaggagcaggcgcagagcagagcagagcagggcgggga

SEQ ID NO: 116602 - RNA, 80 nt, Homo sapiens
acagagccggaagcaggagcagggcccgagcagccgaccccagcacacgggggggcccacgaccgagcggccacaagggc

SEQ ID NO: 116603 - RNA, 76 nt, Homo sapiens
gagacagaagacaacggcgaccagcccaccgaaaggagagaagcaggccgacgggaaaggaaaacacagagacgac

SEQ ID NO: 116604 - RNA, 76 nt, Homo sapiens
ggaaggaaccaaggaagagaagaaggaacggaaacaaagagccgaagaggaccaagccaaagaacaaaccagcagc

SEQ ID NO: 116605 - RNA, 54 nt, Homo sapiens
agcgaagaccacagaaaccaaaagccggggggggcacagagccccggaagacag

SEQ ID NO: 116606 - RNA, 71 nt, Homo sapiens
caaccaggaaaggagccaccgaagcgaggggaccagaagaaggagaacccacgacgaaagcaacaaccaaa

SEQ ID NO: 116607 - RNA, 73 nt, Homo sapiens
gagagaaaagagggacgccaaacacccaaagccagccagccggaccacggaggcaggaggacaggaagaacga

SEQ ID NO: 116608 - RNA, 58 nt, Homo sapiens
cgcgccagcgcccggcgccgcgcgccacccccgaccagacgccgcggaacacagccag

SEQ ID NO: 116609 - RNA, 76 nt, Homo sapiens
cgcacaggaaacgagagcgcagaacccgagcaagagaaaggagagagagcgcaggagaacaccaaccaccagggaa

SEQ ID NO: 116610 - RNA, 73 nt, Homo sapiens
agcgaaaccggcaggacaaagaggaccagcccagcgaagacaggggccaaagaaagacagcaaacaccaaacg

SEQ ID NO: 116611 - RNA, 85 nt, Homo sapiens
ccgccgcgcaccgacccgacgcgccggcccacgcgcggccaagaccagagacaaggccccgagggaggagcccgaaggcgcacga

SEQ ID NO: 116612 - RNA, 75 nt, Homo sapiens
ggccgaccagggagaagggcccacggaggagaagcaagcaaaccagcggcgcgacgagggcggacggagggaagc

SEQ ID NO: 116613 - RNA, 74 nt, Homo sapiens
cgcggccgagcggccccggcccccggacggcccccggcccccggccgcgggaaagaagggccgggcccggggac

SEQ ID NO: 116614 - RNA, 77 nt, Homo sapiens
gcaccacaaagaaagcgggaagacagccaaaccaccaccagccaccacaccgcccacccaccaggcgagacgaagga

SEQ ID NO: 116615 - RNA, 66 nt, Homo sapiens
aaggaaggaaacggaccccaccaccaggcagagaagccgcgccacacaccgaggcgggggaaggga

SEQ ID NO: 116616 - RNA, 77 nt, Homo sapiens
caaagaacacgacgagcaagaaaccaggacaaggccggacgaccagagacccagagaaaacagcagaacgccagcgc

SEQ ID NO: 116617 - RNA, 75 nt, Homo sapiens
ccaggacaagggggcacgcagccggggaccgcccggccgcgagccggcgcagacgcggaaaagccagggcggaaa

SEQ ID NO: 116618 - RNA, 80 nt, Homo sapiens
cggccccgaaaccggaagacccaccggacgaaaaggaagggaaccacaacacagcagcccccaggagagcaggaaaagcc

SEQ ID NO: 116619 - RNA, 81 nt, Homo sapiens
ggaaagccaccccgagccgacaagaaggacaaagagacaagccgagagaaagcaagcaaaggcacggggccaaaaaggcac

SEQ ID NO: 116620 - RNA, 76 nt, Homo sapiens
acgaaggccaaagaagaggggaaagaaccagacgacaggaaggcacagaacgaagccgcagaagccaaacaagcag

SEQ ID NO: 116621 - RNA, 47 nt, Homo sapiens
aagaaagaaagacgagccacagcccggcagccagcacgagccccccc

SEQ ID NO: 116622 - RNA, 80 nt, Homo sapiens
ccccaccccggcccaggggcaccggcgcccccgggcggccacagaagaaccgccccgggcggcgcgggggggcagcgcgg

SEQ ID NO: 116623 - RNA, 49 nt, Homo sapiens
ccgagcgacggcgagacccagaaggaaccacagggagacacccgcccag

SEQ ID NO: 116624 - RNA, 82 nt, Homo sapiens
gacaggaggcagagccaaacacccagccagagagagacacgggggaaacccaaacagagaagcccaagaagagcagcgcgcg

SEQ ID NO: 116625 - RNA, 52 nt, Homo sapiens
cgcccgggacccgcggccccgccgcgaaggagcgacagaaaagcagaaaggc

SEQ ID NO: 116626 - RNA, 80 nt, Homo sapiens
aaggcgccagcccagcacgccgcgacggccccgggaaggagcaccacgccacgggaaggcaggcaagagcggggagacca

SEQ ID NO: 116627 - RNA, 70 nt, Homo sapiens
gccagaacggaggaggagccgcagccaaaaggacccacacagcgacaggaagaacagaccaaggagaaac

SEQ ID NO: 116628 - RNA, 82 nt, Homo sapiens
ccgccgcggacccagcgccgcggcgcccgagcggcgggccgcagagaacgaaaagcagcagcacaaggaagaggcaaaccca

SEQ ID NO: 116629 - RNA, 78 nt, Homo sapiens
gacagagcacggaccagccgcaaagagccagaggggagacacgccaaagccccaagacagaagacagaccacaaacag

SEQ ID NO: 116630 - RNA, 75 nt, Homo sapiens
cgcccaggccagagccagacaaagagaagacagaggagccagaccaagagacagcacaggcgagcgagcagagac

SEQ ID NO: 116631 - RNA, 81 nt, Homo sapiens
agaaaaacaaggcggaacaaggaaaggcggcggggagagagcggcgagcggggacaagccgacccgccagcccacacaccg

SEQ ID NO: 116632 - RNA, 56 nt, Homo sapiens
aaagaaacacaacgaaaacaagaggggaggcaagcaggggggcaaaggaaagaagg

SEQ ID NO: 116633 - RNA, 104 nt, Homo sapiens
cagcagccccgagcacgggccgaggcccaccgcgacacaccgccagggacccggcaaagagagaggcacacgccgccgaaggccaggagcagaggccaacgccc

SEQ ID NO: 116634 - RNA, 85 nt, Homo sapiens
aagacccgggaaaagagacacaaaccaggaaagaaaacaggggcacagacgacagaagccaagagggcgcaaagaggaaaagaag

SEQ ID NO: 116635 - RNA, 38 nt, Homo sapiens
accgcggcgcgagcaccaggccgcaggagggaagcgca

SEQ ID NO: 116636 - RNA, 74 nt, Homo sapiens
acgaggggaccccacgaggcgagcggcagcaaggaaacaggagggggcgcggcagaacgcggaaccccagagag

SEQ ID NO: 116637 - RNA, 63 nt, Homo sapiens
aagagacagcgagaacaaaggagagaggaccacccagaggagcaacccagcagcgcagcgccc

SEQ ID NO: 116638 - RNA, 69 nt, Homo sapiens
acccacaacaccaggcgccagggcgacagccggccaagaagcaaggaaaggcaagcagaggaccaacca

SEQ ID NO: 116639 - RNA, 87 nt, Homo sapiens
ccagcggcgaggaggggccccagcagcccccgaaggcccacaggacaggagagaaagacgggcggcaccccaccgcccagccacagc

SEQ ID NO: 116640 - RNA, 66 nt, Homo sapiens
gcgcacgcaggggaaaccagagcaccagaccagggcaaagcaccccagagcaaaaaacggggagaa

SEQ ID NO: 116641 - RNA, 78 nt, Homo sapiens
gggcggaccacgcgcgggggcccaaggagcacggacggaaccgcccggaacgccagcgccggagaccaccgaaccggg

SEQ ID NO: 116642 - RNA, 70 nt, Homo sapiens
accccggggcgcagcggacggcggcacacagggagagagaccaaggacaggacacgccagccagacgcgc

SEQ ID NO: 116643 - RNA, 61 nt, Homo sapiens
aagcgagaacaaaaccagcgagaaaagggacacagacgccaggcagccggggcagaggaag

SEQ ID NO: 116644 - RNA, 90 nt, Homo sapiens
gagcaggcggccagacacccagaccccaagcggaccaaggaaaaaagaggaccaaccaccccaagccaagaaggcaaaaggaagaccaga

SEQ ID NO: 116645 - RNA, 74 nt, Homo sapiens
gaaacgaggaggaagaggggccaaccggaccgcccccaacaaccagccggacccagcagggcccccggaacaaa

SEQ ID NO: 116646 - RNA, 59 nt, Homo sapiens
gagggccaggccggacggagccgcaccggccggggcgccgcacggaccagcgcagacga

SEQ ID NO: 116647 - RNA, 80 nt, Homo sapiens
gggcagccgcagaccccaccacgacagggaaccaagcccaccggaggcccccccaccccacaccacaggcagcagcagcc

SEQ ID NO: 116648 - RNA, 78 nt, Homo sapiens
cgccaggccgacgaaaagcccaagacccaacccggagccggggacggcacacgggcgggggcaacgggaggagaagac

SEQ ID NO: 116649 - RNA, 55 nt, Homo sapiens
ccacgggaggggccaggccacggacgaagcccagaggaaagggccagggaaaaca

SEQ ID NO: 116650 - RNA, 72 nt, Homo sapiens
gaacacagaaacccgccccggggacgcgcacaaaggcggcagaccgaagcaggcgccaaagcagcagccagc

SEQ ID NO: 116651 - RNA, 70 nt, Homo sapiens
ggccacaaaccaaggggcaaaaaggcagaaacagagggacaaaaaaaacaaaacacgaagcgcaacaaac

SEQ ID NO: 116652 - RNA, 73 nt, Homo sapiens
aaccagagcggagacacccaggaggcagaagccaggggaagaaggaggccggggaggaagagagcaggggggc

SEQ ID NO: 116653 - RNA, 108 nt, Homo sapiens
gaaaacaggaacagagcgagggaggagagagggagagccaaagaagaaagccaaggacacgcaggacgaagaaggaggagagcccagaagaaaccaaaggggaaccag

SEQ ID NO: 116654 - RNA, 37 nt, Homo sapiens
gcaggccggccggcgccacggaacgaggcgcgacaca

SEQ ID NO: 116655 - RNA, 57 nt, Homo sapiens
aaagccaacgccggcgaagggagaagaaaaagcagaaaggaacagaaaacaaaagaa

SEQ ID NO: 116656 - RNA, 78 nt, Homo sapiens
gaggggaggcaggcgcggcagacggcgacagggcggcggcgccaggcagggcgcagcccgagaacacgaaacaaggaa

SEQ ID NO: 116657 - RNA, 37 nt, Homo sapiens
ggcggcacccagccccagccgcgggccacacccaaaa

SEQ ID NO: 116658 - RNA, 77 nt, Homo sapiens
gggaccaccggcgacagcagaaaggcgaaccgaccaagaacaacacccagagggccaggagaaggcgaagagagcag

SEQ ID NO: 116659 - RNA, 73 nt, Homo sapiens
ccacgagagacgagcaacccccgggaagccaagccgcaggggccgccgcgccaccccagaccagaccagacac

SEQ ID NO: 116660 - RNA, 52 nt, Homo sapiens
cgaacgcaccccagagccgacccccaccgcaagaccaccacaacccgcaacg

SEQ ID NO: 116661 - RNA, 60 nt, Homo sapiens
cgacccggaaaggccggaagcggccgggcggacaggagaggcagcaagaaaacacggcag

SEQ ID NO: 116662 - RNA, 80 nt, Homo sapiens
gcgaggacgaggcggcggccgcggggaggaggagggggcaaccagaggggccaacggacgacagaaaacaacaggggcag

SEQ ID NO: 116663 - RNA, 86 nt, Homo sapiens
gcagcagcagcccaaaggaagggccgggcaaaacccccgagccaccagaaaagggaagcaggaagaccaagaaggacgaagaggca

SEQ ID NO: 116664 - RNA, 56 nt, Homo sapiens
gaggggaaaacgaccgacccgcggacccagaacgccggaggacccggccaaaccac

SEQ ID NO: 116665 - RNA, 71 nt, Homo sapiens
cgaagccaccaccaacagacagcggcccccagaagcacggaaaagcccccggccaaagaggaggcccggcc

SEQ ID NO: 116666 - RNA, 77 nt, Homo sapiens
ggccggcaagaacggacgggcgccacaagccacacggagggaccagaccccacaagaaaacacacaaccacaggccc

SEQ ID NO: 116667 - RNA, 57 nt, Homo sapiens
cgaaaagggccgacaaagaaagggcgcaagcgagaaggagggccagacaaaggaaca

SEQ ID NO: 116668 - RNA, 78 nt, Homo sapiens
agcacggacgggaccaagacaccggccaacgaagggcacagaagacgagcacgaggagaggaaccaacgaagaaagaa

SEQ ID NO: 116669 - RNA, 83 nt, Homo sapiens
gaaccgcggagcaaggaaaagagcccggaaagaagagacagagaggagcaaacaagacggaggccgcgcccaggcggaggaag

SEQ ID NO: 116670 - RNA, 78 nt, Homo sapiens
gaagaacaaccaacccagaacaccaagaggcaaagcgaaggcggagcaggagaaagcggcacagaccccagaggaaaa

SEQ ID NO: 116671 - RNA, 63 nt, Homo sapiens
agcacccacaaggcacacaccagagggcacaggaaaagaccccacaagcaaggacaaagaccc

SEQ ID NO: 116672 - RNA, 78 nt, Homo sapiens
cgcagagcagaccagcagagcagcaggaggcagaacaagaaaggagcagcacaggcgcggggacgaaccgaacgaagc

SEQ ID NO: 116673 - RNA, 78 nt, Homo sapiens
gcgagggccagcaccaccccacggccagggccaccaaccccaacccggagagcggcgagacccgccgccaggaaggga

SEQ ID NO: 116674 - RNA, 59 nt, Homo sapiens
ccaccggcaccgagaaagacaaaaggggaaacgaggcccaaggaaagagaccgcaaagc

SEQ ID NO: 116675 - RNA, 77 nt, Homo sapiens
gcccacacccccggcacccccacagcgagcgacgcgcccacggaggaggcgggggccccacaagaagaccaacagga

SEQ ID NO: 116676 - RNA, 71 nt, Homo sapiens
gggagggcgccagccgcgacacgaacagagggaggagacagagagcaagaaggcacacaagcaaaggagac

SEQ ID NO: 116677 - RNA, 59 nt, Homo sapiens
cggacaggcacagacaaccaggcaacgaaggacggggaacagcgggcagcagaccccca

SEQ ID NO: 116678 - RNA, 76 nt, Homo sapiens
cggcgcgccggcgcgcggcgcggacaggcccaaacgggacacaggacaaggagccaccggagaggaagcggcagac

SEQ ID NO: 116679 - RNA, 57 nt, Homo sapiens
aaaacacgagaaccggcccagaggccggcagaggccgcccagacagagcacagggag

SEQ ID NO: 116680 - RNA, 82 nt, Homo sapiens
acacagcccgcagagggggggaggaggagacccggagagggcccacagcccaaggccaagaagacgcggagggaggcgagga

SEQ ID NO: 116681 - RNA, 57 nt, Homo sapiens
ggcggcaggcagaccccacgaacacaaagggagcccagaacacgacagagagcaagc

SEQ ID NO: 116682 - RNA, 76 nt, Homo sapiens
gacgcccgcgcgacgagcaggggcggcggcgcagaggaaccagagaaggagaaacagcagggccaaaggcaagaac

SEQ ID NO: 116683 - RNA, 43 nt, Homo sapiens
cccgacccacggccaccaaaaaggggccagcacagacacagcc

SEQ ID NO: 116684 - RNA, 73 nt, Homo sapiens
gccgggacccgcagccacggaccgcccaaccgcgacgccgaggacggagaggccgcccacggagcgcagagcc

SEQ ID NO: 116685 - RNA, 62 nt, Homo sapiens
cgccacgcgcgaaagcgcaggccccgaggacccgccgcacgacagacggcagccgggaccac

SEQ ID NO: 116686 - RNA, 55 nt, Homo sapiens
cagcaccaccgaacaccaacaaacgaggagaggcggagcggaggagaaaacgaaa

SEQ ID NO: 116687 - RNA, 81 nt, Homo sapiens
gagccgggaggaacggcccggaaacaggaggacgaacgcggcaaaagagagcaggagaaggcagcgggacgcagaagacgc

SEQ ID NO: 116688 - RNA, 78 nt, Homo sapiens
ccgggggccccgagcaaaccaggccagggggcgcagaggggccgcaggggcgacgcagaccacaacaccaggagcaca

SEQ ID NO: 116689 - RNA, 59 nt, Homo sapiens
ggggagacagcggacccagggccccgggagaaccacgagcaacccaaaaggcggggaga

SEQ ID NO: 116690 - RNA, 58 nt, Homo sapiens
gccccagggcccccaaacaggggcgccggccgaaaggacccggagcagggcaaggggc

SEQ ID NO: 116691 - RNA, 75 nt, Homo sapiens
gcccgccggcacgccgccagccccgggggccacgagcggaaagcgggaacccacaacgaaggaaggaacagaggc

SEQ ID NO: 116692 - RNA, 74 nt, Homo sapiens
aaacaaggaccgggaaagaggagacaaaccccagacgcgccggagggccaggcgacgagaagagcaccccccag

SEQ ID NO: 116693 - RNA, 84 nt, Homo sapiens
gaggagacccccagcgcgcgccccgcccccccccagagcaagcccgaagagccaaccacaggagggaaaccacgcaggcaaacg

SEQ ID NO: 116694 - RNA, 56 nt, Homo sapiens
cagcacggaccaggaggcgagcaacagggccagcccaaggcaagaaaaaaagacca

SEQ ID NO: 116695 - RNA, 69 nt, Homo sapiens
ggccccggaggacgagaggggacgccaacggccagcccccaggaaagagaaaacagcaggaggaagaac

SEQ ID NO: 116696 - RNA, 81 nt, Homo sapiens
gacagaggaagaggacagcgggaagcgaaagaacgcagaggcccacagcaagaggaagcccaaaaggaaagaaccagagac

SEQ ID NO: 116697 - RNA, 69 nt, Homo sapiens
cggcgcggccccgaaaagcgcaacccgagagcgaaagaacgaaaaccgggaggccaaacaggggggcaa

SEQ ID NO: 116698 - RNA, 68 nt, Homo sapiens
agaaggaccaagaaccagggaacgaagaaggacagaacggacaaggcagagcaaggaaaagacggcca

SEQ ID NO: 116699 - RNA, 71 nt, Homo sapiens
caggccaccggggaaaggacgaaccaagaaacaaaagggaagaccggaacggagacgcacaacaaggggcc

SEQ ID NO: 116700 - RNA, 80 nt, Homo sapiens
aacaagcagccaagcccagacaagccccagggaagccacagcaccccagcacccagaacccaggaacaacaaaaaacaca

SEQ ID NO: 116701 - RNA, 72 nt, Homo sapiens
accggccccccgcacgagcagccccgccggggcggagaacggaaaagcaccaggaagcagagaggaccgcag

SEQ ID NO: 116702 - RNA, 82 nt, Homo sapiens
ggccacacggcggccgcagggcgccggagccccccaggaccgcagggcgacgcaccaaagcgaaacagaagcgaacggaagc

SEQ ID NO: 116703 - RNA, 74 nt, Homo sapiens
ccgggaaacgaagaaaggagaacgggggccggacaagggagggcaagaacccaggaggagggcaagccggacac

SEQ ID NO: 116704 - RNA, 71 nt, Homo sapiens
ccggaagacaacgcagacgccagcaccaagccaacagaaaaccacccagccaccaacggacgcgaggcgga

SEQ ID NO: 116705 - RNA, 89 nt, Homo sapiens
cgagaacgagcacaaccccagggccgcacgggggcgaccaggccgccagccggggcaagaagaagagcgaaagccagggggcgaaacaa

SEQ ID NO: 116706 - RNA, 79 nt, Homo sapiens
ggagaccccgcgcagcggcccggcggggcccggcaccaggaccaccgcggcagcacgcggcgaaacccgagaggagcag

SEQ ID NO: 116707 - RNA, 89 nt, Homo sapiens
gcggccggcgccgggaccggaggggacgcggggccgaagcagcaggacaccgaccagcaagaagccacagggaaagccacagcgacaac

SEQ ID NO: 116708 - RNA, 77 nt, Homo sapiens
gggaaggcacacaacgacccggacagcgaccgcaagaaccgaggccaaaagaaaggaagaaaacccccaaaaagcca

SEQ ID NO: 116709 - RNA, 34 nt, Homo sapiens
caaaaaacacaacccagaaagaggagccaccggc

SEQ ID NO: 116710 - RNA, 80 nt, Homo sapiens
ccgggagaagcagcgccgcccggggcagaccaggcagacaagcagaccggaagaccgacggaagaccacaccccgaggga

SEQ ID NO: 116711 - RNA, 71 nt, Homo sapiens
ccccagcagcaggaaggacagaacaggcaaaagaaaggagcggaccaagcagcaaaagcaaaaaccggcca

SEQ ID NO: 116712 - RNA, 83 nt, Homo sapiens
ggccgaggaccgcagcgccacacacaacacgcgccacgaggacacggcaccgccgccgagggcacgagccagccggcgaaaag

SEQ ID NO: 116713 - RNA, 82 nt, Homo sapiens
gagcgcgcggcgggagagccgggggagcgcccggagggagcgcgccggagcggcgaaacccggaacgaccccgccaacaccg

SEQ ID NO: 116714 - RNA, 58 nt, Homo sapiens
caaaccaaaccacagacgaaaggcaacacaagggcaaagggacgaggaggggaaaagg

SEQ ID NO: 116715 - RNA, 82 nt, Homo sapiens
gcaagacccaaacaaaaagacacgaagaggaggaagcccaggggagccgccaccaaaagcagacggaaaacccacggggaag

SEQ ID NO: 116716 - RNA, 94 nt, Homo sapiens
agggagaaggggccggcacaggcaacaccccaacgcagggcgggacgggagaccggcacgaaaacgcccgggcaaggaaaggacaggagaccgg

SEQ ID NO: 116717 - RNA, 80 nt, Homo sapiens
aggagacacaccccgacggcagccagacgggaagaagggagaggcgagcccacaccaaccggcccacccaccgacgcggc

SEQ ID NO: 116718 - RNA, 74 nt, Homo sapiens
ggcaacagaaaagagcgcaaagggcaggaaacaaacaggcggaggaagcagaacaagcaccgagccaagaggga

SEQ ID NO: 116719 - RNA, 81 nt, Homo sapiens
gcccaacaaacccaaccaagccagcaaaacccagcagccagaccgccaggcagcgggagagaaagaaccgacagcaacgcc

SEQ ID NO: 116720 - RNA, 74 nt, Homo sapiens
ggagagccaaagggacaaacagacccggacagaaccggcagccgagcagcagccgccccgaggcgaagccaggg

SEQ ID NO: 116721 - RNA, 70 nt, Homo sapiens
aagagcaccacaaaccaagaacgaggagcccagggacacacgcccagggccagggcagaaaagagacaca

SEQ ID NO: 116722 - RNA, 76 nt, Homo sapiens
gaaaggggacgagcacaaagaaaggaaaaccaccacaaagggcccccagagccgacggcccccaccccccacaaga

SEQ ID NO: 116723 - RNA, 71 nt, Homo sapiens
cgcgccgccgaccccccggcgccgcgccggcggcgaacccacaggagggccagaggacaaagcacggcgga

SEQ ID NO: 116724 - RNA, 76 nt, Homo sapiens
gccccccaccaggcggcgaaaacagaggggccggaccagaggacgcaccagaagacagggcaaccagaagccccac

SEQ ID NO: 116725 - RNA, 39 nt, Homo sapiens
aaacccaagagcagcggcaggagaagggcccagacggcc

SEQ ID NO: 116726 - RNA, 78 nt, Homo sapiens
ccacccccgacccgcggacggagagcccagcaaggagaagacgcagccgcagcagaacccaggaaggggagagggcca

SEQ ID NO: 116727 - RNA, 65 nt, Homo sapiens
ccggacgaacaaaacgaagacccagaaaaacaagcacaaaagggcagagaagacccagagacgca

SEQ ID NO: 116728 - RNA, 79 nt, Homo sapiens
cgggagcgaggggcgccggcgggggggcccgggaagaaaacgccagagaagcagagcagcccggagcgaggggagaccg

SEQ ID NO: 116729 - RNA, 72 nt, Homo sapiens
caagcggaagacacaaacagcagggagaagagacaacaagacaggaggcaggggaagcacaaaagcgcaccc

SEQ ID NO: 116730 - RNA, 63 nt, Homo sapiens
gacagaccaaaaagggggcaaaaaaggcacagagaaccagccaagacgaaaggcccaaggaca

SEQ ID NO: 116731 - RNA, 87 nt, Homo sapiens
agcggccagcaacgggacccccagggggacccagccccaacacgccccgcccagccagagcagcccaagggagaccggaagagacac

SEQ ID NO: 116732 - RNA, 81 nt, Homo sapiens
gagaggcgcgcgaggaaaaggagagaaggacagaagagcagaagacagagaaggaaaagaaaggaacagaaacaaacaaaa

SEQ ID NO: 116733 - RNA, 75 nt, Homo sapiens
ccccgcggcagccgcgccggggccaagggggacggaagcggcagcgggcagccggcccagcacagggagcagaac

SEQ ID NO: 116734 - RNA, 53 nt, Homo sapiens
aaaaaaaaccaacacaagagcgagaacaagccaaagacagaccgccagcgcag

SEQ ID NO: 116735 - RNA, 74 nt, Homo sapiens
ccacccgacccggcaccacacgcagaacgggcggacgggcgcccagccagaaaccccgcaaaagggaagcgaag

SEQ ID NO: 116736 - RNA, 82 nt, Homo sapiens
cagcgagcgcccgagcggcgcgcaccaggcggagccccagccggggcccagcgaacgccagacagcccacaccggcaggcca

SEQ ID NO: 116737 - RNA, 77 nt, Homo sapiens
ggccagcaggagcgccggggccggggcgaacgcggccgaccccgcagggacagcggggaaagaacaggggggaaaag

SEQ ID NO: 116738 - RNA, 78 nt, Homo sapiens
ggaacagcaaaaagggaggagaggagcacacccaagcagaacggccacagaagagcagagaccccgacaggagacacc

SEQ ID NO: 116739 - RNA, 73 nt, Homo sapiens
cgacgaaggcccaaacaggagaaaacccagacagaacaccacggacacaggaacgccacaagaaacaacagca

SEQ ID NO: 116740 - RNA, 59 nt, Homo sapiens
aagggacaagaagggcaaagccgaagccaaaacagaagaggcaaagcccagccacagca

SEQ ID NO: 116741 - RNA, 48 nt, Homo sapiens
ccacagcaacccggacagcggcagccgaaggcagaccacagagcagac

SEQ ID NO: 116742 - RNA, 74 nt, Homo sapiens
gagaaaaagcagccggagacaggcgagaggaagacgacgaggaagagcccgccgaaggaagcaaggaagaggaa

SEQ ID NO: 116743 - RNA, 45 nt, Homo sapiens
gccgaggcccagcgaaagcacaggagaagaggggagccccgagga

SEQ ID NO: 116744 - RNA, 62 nt, Homo sapiens
aggcccagagagaccccagaagggcagcgggggcagagacggggaacagggccacccacacg

SEQ ID NO: 116745 - RNA, 89 nt, Homo sapiens
gcgggagcgcgaacgagcgacggcggaacccggggccgggacgcagcccggcggcagcaggcacgcagcacgggggcaggggccgaccc

SEQ ID NO: 116746 - RNA, 73 nt, Homo sapiens
ggcaggacagcaagagcgcaccccgcggagcaccaggcagaaaaagcaggcaccaagcccacagaagggggaa

SEQ ID NO: 116747 - RNA, 91 nt, Homo sapiens
ggaaccagcgcaagccagaagcgcggcccacgccagggagcgggaggacgaggaggaggccgccacgagcaagccagcagagagagacagg

SEQ ID NO: 116748 - RNA, 83 nt, Homo sapiens
caacgcgcgccgggcgacaggacccccagaagaggcagaacgcgcacagaaccgcaaagagaggcccagagacgcggggccag

SEQ ID NO: 116749 - RNA, 82 nt, Homo sapiens
acgaagagcagcaaaaaagacgcaggcgacaaaagaaaacgacggaccagaggcccacgaaagaagacggaaggccagcagc

SEQ ID NO: 116750 - RNA, 82 nt, Homo sapiens
ggggacccagggcgcccccagcaaagcagggccgcccgggcggcgggaccacgccggcagagacaaagaaacagccggaaaa

SEQ ID NO: 116751 - RNA, 72 nt, Homo sapiens
aaaaaacaggcgcgccaggccgacgccgagaagaaaaaggcccgcggagccaacgggccgagcagcgccacg

SEQ ID NO: 116752 - RNA, 49 nt, Homo sapiens
ccagaccaacaagcggaggcaagcggcagccacacccggagaaggagcc

SEQ ID NO: 116753 - RNA, 60 nt, Homo sapiens
agacggaaggagcaggcagcggccaacagggcaacgcgggccaggcacgacaccgcaacg

SEQ ID NO: 116754 - RNA, 76 nt, Homo sapiens
agagcggagaccagagcaagacccacgacacccggaagccgaaaaagacggacgagaccgaaggagcgcaagagag

SEQ ID NO: 116755 - RNA, 76 nt, Homo sapiens
gaaacgaggacaaggcccgccgccagcaaagacaaccagacggcacccggccagagaacggggagccgggagcgga

SEQ ID NO: 116756 - RNA, 74 nt, Homo sapiens
ggagcccgcgcccgccgcgggagagaggggaagaggacgaaggaggaagcggcaagaacaagacaggaaccaga

SEQ ID NO: 116757 - RNA, 73 nt, Homo sapiens
acacgccggacaaccacaagcgagagacggacgcccccccggcccgacacagccagacggaaggcacgagggc

SEQ ID NO: 116758 - RNA, 62 nt, Homo sapiens
cagcaccggcccaggggccgcaaagccaaagcaagagccaccgacagaaaagcacgccagaa

SEQ ID NO: 116759 - RNA, 89 nt, Homo sapiens
acggggaaccaagcgcaacaggaacgacgaaccaaaaaccagcccaaaaggcagagcgaggagagaagaaggagggaaagccaaacaac

SEQ ID NO: 116760 - RNA, 103 nt, Homo sapiens
cgccccgccacaccgggcgccccaggcgcaaaacccgagaaagggcaacccaaacaacacccaacagcccaaagcaaaggagcaacagcccaggagaaaacgg

SEQ ID NO: 116761 - RNA, 80 nt, Homo sapiens
gggcgggaacccgcggggagcgggacacgaacggagcccacgcaggagacgggaggagcgacaacggagcacacccaccc

SEQ ID NO: 116762 - RNA, 79 nt, Homo sapiens
gcacccccacagggcagaagacagcacccacagaggcaaagacgaagagagcaccagcgagagaggagaacacaggcac

SEQ ID NO: 116763 - RNA, 94 nt, Homo sapiens
aggcggcgagaggcggcgagaggcgggcgaggcggcccagcggcggcagagaggagcgggaaggccccgcacccggagaccgggggaagacaag

SEQ ID NO: 116764 - RNA, 83 nt, Homo sapiens
ggccggcccgcgcccagcagaggaggaaggaggaagagcaagcaggcccgagggacaaagaaggcagaccagcggagaacgga

SEQ ID NO: 116765 - RNA, 69 nt, Homo sapiens
cggggcgaggcccgcggggccaggagggaaacccagacgacaaggaaggccaagggacccacgaccaac

SEQ ID NO: 116766 - RNA, 76 nt, Homo sapiens
accgaaaacaccaggaaagacaggagaccaaaaagggacaggacacagggagggccagaccccaggaggaggggag

SEQ ID NO: 116767 - RNA, 82 nt, Homo sapiens
cgcacacacagagcggcggaggcacacggaggacggcaggacgggccggggggacacgcggggccagccagaccaaggacag

SEQ ID NO: 116768 - RNA, 73 nt, Homo sapiens
gcgaccgcagaggccaggagggcacggaaagggaagaggcccagccagagaggacgccgccagccaccggcgc

SEQ ID NO: 116769 - RNA, 84 nt, Homo sapiens
cgagaggccggcgggacgcgggcgccaggaccggccgaacgcagagagcccaagagacacaggcagaagaagaccgcaaggaag

SEQ ID NO: 116770 - RNA, 82 nt, Homo sapiens
gcggccgggcgcccgcccgcccccgccgccgcccggacaccgcccgcgggggcggagaacggaaaagcaccaggaagcagag

SEQ ID NO: 116771 - RNA, 81 nt, Homo sapiens
ggacacaagccggaaaggccccgagagcaaccggacggaaggcgaccacaccaccccagacacggccgaccgccaagcaca

SEQ ID NO: 116772 - RNA, 55 nt, Homo sapiens
gggcagcaacggcgacaccagcaagacaacacgcggggccgggagacagagaaac

SEQ ID NO: 116773 - RNA, 80 nt, Homo sapiens
aaggaccaagaaccagaccaaaaagagccaagcgagaagagagaaccacaaagggcagagcaaagacccagaacaccaag

SEQ ID NO: 116774 - RNA, 80 nt, Homo sapiens
gaacgggccaaggacggaacaaagcgccccggcaaggccaccgcagaagccacaggagaccggaggccaacggcagaagc

SEQ ID NO: 116775 - RNA, 49 nt, Homo sapiens
gggagaacgacagggcagccaccgccaaagacagccagcaggggcagaa

SEQ ID NO: 116776 - RNA, 55 nt, Homo sapiens
ccgagaaccgcaggagccagagggcccgacccgaaaagcgcagccaaccagacgc

SEQ ID NO: 116777 - RNA, 41 nt, Homo sapiens
cggaaggggaaggaacgggagcagcgaagggccaccaggcc

SEQ ID NO: 116778 - RNA, 84 nt, Homo sapiens
agccggagcgggcgcggacgccgaggcaccgaggcaccagaggaggaaaacaaagagggaaaacggagaaaagcccccccaggc

SEQ ID NO: 116779 - RNA, 77 nt, Homo sapiens
cccggagagacgaaccgaagcgggcgggcccccccacccagaggggaacggcgagggaacccaggaaggagggcgac

SEQ ID NO: 116780 - RNA, 89 nt, Homo sapiens
gcaaggaccggcacaaggacgccaagggggcgagagacgacaagcccgacacccagcggcaccggacagagcggagggcacggagaaac

SEQ ID NO: 116781 - RNA, 76 nt, Homo sapiens
cggagcgcccccagcccggggggggcgccggcacccacccccgcgcgcggcgcgacagaccggcgggggcccaggg

SEQ ID NO: 116782 - RNA, 88 nt, Homo sapiens
ggagagccgggccggcggacgcggcgccacgcagcagaccgcgaccgcacaagcagccgccagcggaaccaagcggcgcggcacacga

SEQ ID NO: 116783 - RNA, 66 nt, Homo sapiens
gaccgcagcagccacaggaacgcaagagaggaacgaagaccgaccgggcagccaacggccgacccc

SEQ ID NO: 116784 - RNA, 57 nt, Homo sapiens
acaacggcggagagaccccgcggcgggcgcacaccacgccgacggggacagaagacc

SEQ ID NO: 116785 - RNA, 66 nt, Homo sapiens
cggacagccccccaccacaacacgaagagagacacaagaacccgaagagcgggaggcccacacccc

SEQ ID NO: 116786 - RNA, 69 nt, Homo sapiens
ccaggagcccgagagagaaggagaagagcaagagaccgaccaaaacacaaccgggagccaagaaacagc

SEQ ID NO: 116787 - RNA, 72 nt, Homo sapiens
ggaaagaaaacaaaagaggaagaagacaacaagacagaaagcgggacacaagcaggagcacagaccccgaaa

SEQ ID NO: 116788 - RNA, 79 nt, Homo sapiens
gaaaccgaacgaaaggagaaacggaaaagacccccagacgaacaagaggcagaggcaacccgccacccagaggacagcc

SEQ ID NO: 116789 - RNA, 54 nt, Homo sapiens
gcaaagaccagccacgaggaaggaagggaacacggacgacgagacacgaccaac

SEQ ID NO: 116790 - RNA, 61 nt, Homo sapiens
cccgggcgaaggggccacgcgacgagcccacagcccgggccccccgagcggacggaccgga

SEQ ID NO: 116791 - RNA, 80 nt, Homo sapiens
gagaaagcaaagagaaaggaagcaggcccgggaaggggaaaaccagaaggcaccgacaggaaaggaaaaggagaaccagg

SEQ ID NO: 116792 - RNA, 75 nt, Homo sapiens
ccgagagccgcccgggccagcggccgcgcacccccggccggaggcaccagcgagaaagaaggggcaagaggaaga

SEQ ID NO: 116793 - RNA, 87 nt, Homo sapiens
ccagcacgcacggacacccgagcacagagacgaagaggaccaggagcaaacagaaagcagagccgggcaggccacgcagaacaagac

SEQ ID NO: 116794 - RNA, 85 nt, Homo sapiens
cggaccccacaccacccacacaccagcggcagcccccgggaaacgaagccagaccggagcaacgcaccggcgcgcaggggcacgg

SEQ ID NO: 116795 - RNA, 63 nt, Homo sapiens
cggccaagcgacagcgccccaaacaaaccaggccggcgcggaagaggccggcggcgggacggc

SEQ ID NO: 116796 - RNA, 58 nt, Homo sapiens
gccacgggagcgcggaggggggggccccagcccggccgaacgggcgcacgacacaaac

SEQ ID NO: 116797 - RNA, 55 nt, Homo sapiens
ggaagaaggcgaggcaccggaacagacgcaggaagaagcagcccccccacaacca

SEQ ID NO: 116798 - RNA, 72 nt, Homo sapiens
cacccaaaggcgacgagagaaagaaggcgcgcggcccgcgaaggaagggcagccgggccggcaccgcgaccc

SEQ ID NO: 116799 - RNA, 75 nt, Homo sapiens
gcgacacaaggagaaaaggacaaccaagaaggccacagcccgcgagcagaagaagcaaacaccaacaaccaacag

SEQ ID NO: 116800 - RNA, 84 nt, Homo sapiens
ggagcgccgccgccgcagcgggaccgcgcgaccggcgcccgcccgcgggacccccggacagccaacaccaaagccgcgggcaca

SEQ ID NO: 116801 - RNA, 78 nt, Homo sapiens
ccccacgagagaacggcacacgcgagcggagcgccggaccagcgcgagcgccacggcacggccccacccgggcacacc

SEQ ID NO: 116802 - RNA, 55 nt, Homo sapiens
cacacagggagggaaaggaccagaggcaaccaacacaaggacagagacggaaagg

SEQ ID NO: 116803 - RNA, 113 nt, Homo sapiens
agagccggagcgcgaaggccgggacccggccccggcccacaggggggggcaaacccgagagaacgggccggaaggggggcgacgcggaaggcacaacacggcaacacagaaac

SEQ ID NO: 116804 - RNA, 73 nt, Homo sapiens
gaaggcagagaggggaagaccaagagcacagacgccggggagggccgacagcaaccccagcagacgaccccga

SEQ ID NO: 116805 - RNA, 78 nt, Homo sapiens
ccggcaccgcggagcaaaaaaagagcccgcaagaagaacagagacagcagccaaacccccagggcaacgcagagggga

SEQ ID NO: 116806 - RNA, 76 nt, Homo sapiens
gcccaacagaagaaaggcaggagcagccggagaaaacacggagaagagagaggagccggcccagacaacccaaccc

SEQ ID NO: 116807 - RNA, 43 nt, Homo sapiens
cggccacgcaagccgcccccgggcaaaggccggcgggcagccc

SEQ ID NO: 116808 - RNA, 86 nt, Homo sapiens
agacaaaaggaggaagagagcggcgcgcccggcggccgagcggcaacggggcccgggcccaaggggcgcgaacggcggaggcaaaa

SEQ ID NO: 116809 - RNA, 79 nt, Homo sapiens
gcggacccgcagccccaaaacacacggcagggaaccccaccccggaaggcggggacacagacgagaacacgaagaggac

SEQ ID NO: 116810 - RNA, 66 nt, Homo sapiens
ggcaaacaaggcgggggacccagcaggcaggagcacgacaccgccggaacccagggggggagaagg

SEQ ID NO: 116811 - RNA, 74 nt, Homo sapiens
aacaagagacgggacaagacagggcaaaggacagaccaggacccgaacacggaagaaagacacgcaggaggccg

SEQ ID NO: 116812 - RNA, 64 nt, Homo sapiens
agaaacggaacaaagagccgaccaccgggaaccagaagaggccaaccagcacgaacgccagcag

SEQ ID NO: 116813 - RNA, 55 nt, Homo sapiens
agcgccaaccagcccacggccccaaccacccccaggaaagcgacggcaacccaag

SEQ ID NO: 116814 - RNA, 70 nt, Homo sapiens
acccgagcaacccaggccagccagaaccggccgaaccagaccggagcaggggcagcgaaccagggccaga

SEQ ID NO: 116815 - RNA, 72 nt, Homo sapiens
cagcggccggggaacgcgcgcgcgcggacgcggcgccccggcaaaccagccggcgggcgccacaacggacga

SEQ ID NO: 116816 - RNA, 77 nt, Homo sapiens
agagcaggggcggccgccggcccgagcgcggaagaaaccgccgagagaccggcaagcgggagcgagagaagcgagga

SEQ ID NO: 116817 - RNA, 82 nt, Homo sapiens
gcagaagcagcggcaaccagaccggggcaggaaggacgagacgagaccgggacggaagacggcaaagacgagaccgagaacg

SEQ ID NO: 116818 - RNA, 82 nt, Homo sapiens
gccaccgccgagacccagcacacgccgaccaggcaggaagagaacacagaagaagaggagaggaaccagcaagggcgacgca

SEQ ID NO: 116819 - RNA, 76 nt, Homo sapiens
caagcgcccacgaggagacgcggaggacagcccgcagaaacaaccagacaagaagggccagcccagacgagaaaac

SEQ ID NO: 116820 - RNA, 83 nt, Homo sapiens
ccagccgagaggacgcggcggaaacgaagcccaggggcacgggcacagcccagaagaccagcgagaggcgccaacaagagaag

SEQ ID NO: 116821 - RNA, 82 nt, Homo sapiens
gagccaggcgcccccgcgcgcggcagccggggccggggacggcagacgcgggagaccagggccagcccggccacaccccagg

SEQ ID NO: 116822 - RNA, 68 nt, Homo sapiens
gcgcaggagcaggcagacgggcacagcgagagcccgccacgccacaccgagcacagcagccgcacgga

SEQ ID NO: 116823 - RNA, 74 nt, Homo sapiens
cgggagccccccccagcccagcccgcccggagccgggggacaccagaaagacgggaaggagggccccggagcag

SEQ ID NO: 116824 - RNA, 79 nt, Homo sapiens
cagcagcggaaggaagaggcgccggggacagcaaaggcgagaaacagaaggagcagggcaccgccgaccgaaaccgcaa

SEQ ID NO: 116825 - RNA, 72 nt, Homo sapiens
gaacacgacaccggcgaggaacggcaggagacggaagcggaagcacacgccagacgccagcaggccggagca

SEQ ID NO: 116826 - RNA, 80 nt, Homo sapiens
gcgcgccggcgcgcgccgagaggaccacccgcacccaggggacgcacggcccaaccccgagcaaggacgcccacccagcc

SEQ ID NO: 116827 - RNA, 67 nt, Homo sapiens
ggccagaaaagaaaagcccgagcagcccgccgcgcgagggcagcgacacccagacccaccggaccag

SEQ ID NO: 116828 - RNA, 75 nt, Homo sapiens
cccggaagcgcgagcaaggccgccagaggcaggccgcagccaagccggaacaggagcggcgagcccaaacgcaag

SEQ ID NO: 116829 - RNA, 74 nt, Homo sapiens
aggacaagaaaagcaagagaagccgaggagagccaagggagaacgggaccaggcagcccggccggacagggccc

SEQ ID NO: 116830 - RNA, 77 nt, Homo sapiens
ggaggagccaggacgcagcccggcggacgccggcacagaacgacggaaaccagaacgaaaacccgcccaacagggga

SEQ ID NO: 116831 - RNA, 63 nt, Homo sapiens
ggcagagacacaaccaccagccaaacaacgaacaacaccccaaaggacaagccaagacagaag

SEQ ID NO: 116832 - RNA, 53 nt, Homo sapiens
agagcacagcggacaggcgcagacacaaacgcccaccgcaagagcaaacagcg

SEQ ID NO: 116833 - RNA, 56 nt, Homo sapiens
caagcaggaccacccaccagccaccagggggagagaaagagcaagcgcccccgaag

SEQ ID NO: 116834 - RNA, 60 nt, Homo sapiens
gggacccgaaagccaccccagaagaggaccccaagaagggggcgcgcgagaagagaaaca

SEQ ID NO: 116835 - RNA, 109 nt, Homo sapiens
gcagaaaccaccaaacaaccaaaagaaacagaaaaccgaaggacagccaggaaggcaaagcagcccgaggaggcacgcaaaacaacagggggcaaacaagaccagggga

SEQ ID NO: 116836 - RNA, 78 nt, Homo sapiens
cgagccgcgcggcgggaagcggcgaccgccaccgggagggggaagagccggacgagaagaggcgaacggaagcaacac

SEQ ID NO: 116837 - RNA, 73 nt, Homo sapiens
cgacacccagaacacagaaacagaggccaggaaacggcaagcagaagaaagcaaaagagccggaaaccccgga

SEQ ID NO: 116838 - RNA, 71 nt, Homo sapiens
gggacaccgaacaaccccgcagacccccccaagcagagaggcagaggagacggagccaccaccaccccgag

SEQ ID NO: 116839 - RNA, 59 nt, Homo sapiens
gcaccccagagcccacacccgcagagcgaggaccggaagggagggcaaccacagaccag

SEQ ID NO: 116840 - RNA, 81 nt, Homo sapiens
caggaggagccgaggcgagccaacagcaccgggacgacccgggacagcccacggggcagaccagcgaccaccggcacagcc

SEQ ID NO: 116841 - RNA, 72 nt, Homo sapiens
gaaaaaaccaacaccccggcagccgggaaagaacacaagacgacagaagaaaaccaccaaaggaaaagccga

SEQ ID NO: 116842 - RNA, 40 nt, Homo sapiens
aggcgccggggaccccagaagccgcggagaaccgaaccaa

SEQ ID NO: 116843 - RNA, 75 nt, Homo sapiens
caagaggcaccaacagaacaacacaaaggcagaaaagaagcccagaagcggcacaccaaagggaaccaagaaggg

SEQ ID NO: 116844 - RNA, 66 nt, Homo sapiens
aaccacgggagacaccaaaagaggagaagccgcaggggaagagaccgagaccaggaaccaggcagg

SEQ ID NO: 116845 - RNA, 58 nt, Homo sapiens
gcaagcgaagccgaaaaagcgcccgagacgggcccgccgaaagcagaaacgggggggg

SEQ ID NO: 116846 - RNA, 76 nt, Homo sapiens
gaaaaaccaaagccccgcgcaaagaccgcagagcccaccagcagagaacaaaagggccaagaaaaacagccagcag

SEQ ID NO: 116847 - RNA, 53 nt, Homo sapiens
gagcacgcaccccgcggcggggaaaggccgcaaccaagagagggccaccggag

SEQ ID NO: 116848 - RNA, 61 nt, Homo sapiens
cagccccacacggaaccaaccggggcagagagccccagcgggacagacaccagaggagacg

SEQ ID NO: 116849 - RNA, 72 nt, Homo sapiens
gaaagccagagaaaaagcggagaaaaggcacggagaagacgacaccggggaaggggaaaagacgacccaagg

SEQ ID NO: 116850 - RNA, 74 nt, Homo sapiens
ccgccgccgcgcgccaaagcgcgccgccccgggcaaaaggcgccggcgaaagcaacgaagggacgccagaacaa

SEQ ID NO: 116851 - RNA, 57 nt, Homo sapiens
ggggcaccaaccgccggacaggcgcagcggaggcacaaaggagaaaaccccccacaa

SEQ ID NO: 116852 - RNA, 78 nt, Homo sapiens
aacccaaggaaggaccaaacggagaaccagcaagccagacaacaggccaaagccagggagggccagccccacaagacg

SEQ ID NO: 116853 - RNA, 76 nt, Homo sapiens
cggccacgaggacccaggcacggaggagggaaagcgcaggcgccgcaacgggccaagccgcagagacaccggaccg

SEQ ID NO: 116854 - RNA, 61 nt, Homo sapiens
aggggaagcagacccagagagaccagggagagggcagccgggaccgcggcgggcggagaag

SEQ ID NO: 116855 - RNA, 58 nt, Homo sapiens
acccgacgaagcccacgccgggacccagcgcagacccacaggaccgcgaacaaggagg

SEQ ID NO: 116856 - RNA, 77 nt, Homo sapiens
aaaagcaacgaaccaccaaaggggaagcgagagaagcagcaacgcggagcaagagaaagaaacccggaaagaccaca

SEQ ID NO: 116857 - RNA, 74 nt, Homo sapiens
cggccgacccgccagaggaggccccccagccacggaaacggaaagggagcagcaccggccacacccacagcacg

SEQ ID NO: 116858 - RNA, 77 nt, Homo sapiens
cggagaccccgaaaacggaagcgcagggagaaggaagaggggaaaagagcaaaggcccccgcccacaacggaaggag

SEQ ID NO: 116859 - RNA, 64 nt, Homo sapiens
acagaaacacaaagcgccaaaaggaacgcggcagaacggaggcaggcagcacgagacacaccac

SEQ ID NO: 116860 - RNA, 82 nt, Homo sapiens
cccccaccacaccgggaggcggccgccgccagacggaacggcagcggaaagacaccggggccagccccaccagccccacggg

SEQ ID NO: 116861 - RNA, 54 nt, Homo sapiens
ccaccgcagggccacacagacacgcggaggcaagcgcaagggcaagcagagggc

SEQ ID NO: 116862 - RNA, 77 nt, Homo sapiens
cgaaccagggcacccagcaggagaggccaaagagaagccaccgaaacgagggagagggaggccgcacgcaacacggg

SEQ ID NO: 116863 - RNA, 47 nt, Homo sapiens
gagagccggcggcgggaggccaagcgccagaagccgcagcccggagc

SEQ ID NO: 116864 - RNA, 84 nt, Homo sapiens
ccaggagagcgccccagggcaagccccgcccggccaacaagccagaaagacacacaggagagcggcgcagaaaaacaaaaggag

SEQ ID NO: 116865 - RNA, 83 nt, Homo sapiens
cggcgaagacgcgaccgcggcgcgagcaccagggggagaggcaccagcaacagaccaaccgcagcaagcacagagacaggaag

SEQ ID NO: 116866 - RNA, 58 nt, Homo sapiens
cgcggacaagcacgagggcgcgccgagacgcccgagaaccaaaggcaagaaccggagc

SEQ ID NO: 116867 - RNA, 41 nt, Homo sapiens
cggccaaacaaccaggagacgggcggaccccggcaaaacgc

SEQ ID NO: 116868 - RNA, 82 nt, Homo sapiens
cccggcgcggcccagcgccccaggacaccagaggaccagaacccacgagaaacagacgagccaaccagaccccaggagccaa

SEQ ID NO: 116869 - RNA, 74 nt, Homo sapiens
gagaagcaagcccggcacagagacaagcgacagagaagaagagaaccgcacgcacaggaacccggaacagcacc

SEQ ID NO: 116870 - RNA, 82 nt, Homo sapiens
cagaagcagggcagacaagacccggagggcgagccggcaccagggcccagaccgccagagcggaacgaccccagagcgagcc

SEQ ID NO: 116871 - RNA, 69 nt, Homo sapiens
ggacccccgcggacgcgaaggcggacaacacacacgcacaagcgaaaccaagagagagagagaaacagg

SEQ ID NO: 116872 - RNA, 72 nt, Homo sapiens
gacgcgcgaggggcgccgaagcgagggacacacggacaaccggaagagaccgcggagggggccgcaggacgg

SEQ ID NO: 116873 - RNA, 65 nt, Homo sapiens
gcaccaaacccccagcaagggacggaacaacgacagaggaaaggaagcgacggcgcacaggaacc

SEQ ID NO: 116874 - RNA, 63 nt, Homo sapiens
gaaaagaacgaccccacccaaagaaagccgagacacgcccgcaagcagccgagacaggcacag

SEQ ID NO: 116875 - RNA, 82 nt, Homo sapiens
ccacccaaacgcggcacgggagaaaccgggagaagccggccaggcaggcacaccccaccacaacgccacacgaccagccagg

SEQ ID NO: 116876 - RNA, 74 nt, Homo sapiens
ccacaacccaaaacagggaccagaggacggggggacaggcgcaggggcaggcaaaccgagcaagcgacaagaac

SEQ ID NO: 116877 - RNA, 76 nt, Homo sapiens
aagcccgaggccaccccagagcagaagccgcagcccggacagcgcagaaccaaggaaagaggcagaaggccagaag

SEQ ID NO: 116878 - RNA, 73 nt, Homo sapiens
aggagaccgccacacaagagaagacccaccgaggaggagagcgccgccccgcgccagaagaaggcccaccgag

SEQ ID NO: 116879 - RNA, 73 nt, Homo sapiens
gaaaaagaggcaaaagaaagggagagcacagaggggaacagacaggccccagccgcagacacgggaaaagaac

SEQ ID NO: 116880 - RNA, 59 nt, Homo sapiens
cgaacgcgagggcggcgcccggggacggagcgcgcgcaaaggaagacgacaggacgagg

SEQ ID NO: 116881 - RNA, 81 nt, Homo sapiens
ggggcccaggggcagcgagcaagacagcaagcagaggccgaagaaggagcacgcccccgcccccggagcgcccagggcgcc

SEQ ID NO: 116882 - RNA, 116 nt, Homo sapiens
gcccgagcagcaagaagaacagccccaagacgcaggaggcggaaaggggacgcaacaggccaacgcccggccagcgccacgcgagcgcgcaagggcggcgcgcccgcgagaagacg

SEQ ID NO: 116883 - RNA, 81 nt, Homo sapiens
cagcccagagggaaagcacaccaccccagccagacccaaggccagccagccccaggcaccagcggacaggacagggaggac

SEQ ID NO: 116884 - RNA, 73 nt, Homo sapiens
agaaagccagcagaggaaaaaagaacacagggagcgagaacgggccaggcaggaagagcaaacacaggaagga

SEQ ID NO: 116885 - RNA, 37 nt, Homo sapiens
ggagccggacaagacaaggacagagaggggcgccagg

SEQ ID NO: 116886 - RNA, 84 nt, Homo sapiens
gccaccccaccccacacaacgcagacgggcgccggcagccccccaggggagacacggcagaccgggaaggaagaaagaggaaag

SEQ ID NO: 116887 - RNA, 79 nt, Homo sapiens
accaggcccgccacaccccggcgccggaaaggcagccaaagccaacccgccgaaaaagcgacaaggagagggacaaggg

SEQ ID NO: 116888 - RNA, 51 nt, Homo sapiens
cccaccccgcccaaggaggcccagcggcgccgcgcccggggagacagaaac

SEQ ID NO: 116889 - RNA, 67 nt, Homo sapiens
cacgcagagaaccgagaaagcaacggaaacgaagaaggcccagcccaccagacaagaacgagccagc

SEQ ID NO: 116890 - RNA, 81 nt, Homo sapiens
cccgcgacccccgcgggaaggccggggcgccaccccgcccccgaggggccgcaggggaagaagacggacagaagcaacaaa

SEQ ID NO: 116891 - RNA, 83 nt, Homo sapiens
gacaggccagagcccaggccccaggacaggcagcgaagaaaagcagaaaaaagccacggagcagaagcccaacggcgggggag

SEQ ID NO: 116892 - RNA, 79 nt, Homo sapiens
ccagacgacggaagacgaaaagcagaaggaagcagaaagaccaagcaggcgaagccaacccaccgccaccaccccacca

SEQ ID NO: 116893 - RNA, 83 nt, Homo sapiens
cgccgccgccacggcgcccacccaacgcgaagacggaacccgggacgacgggccgaagacaccaggaagcaacagcagagaag

SEQ ID NO: 116894 - RNA, 74 nt, Homo sapiens
gaccaggaaagaagggggcagaagagggggaaccaggagccgacaacaacccgacgcaaggcagccacaccacc

SEQ ID NO: 116895 - RNA, 62 nt, Homo sapiens
ccagcagcacggacaacgggggcgggcgcggacggcaggggcgccggggaacccgcgggaag

SEQ ID NO: 116896 - RNA, 56 nt, Homo sapiens
aacaaaaagaagaagagaagcgaagaagggaaagacgcgcagaagaagcccaccca

SEQ ID NO: 116897 - RNA, 77 nt, Homo sapiens
gcgccgagaggaggaaggcggcaaaaggcggaccgcccccgccaacgaagaccgagaccagacggcccgccacgggc

SEQ ID NO: 116898 - RNA, 61 nt, Homo sapiens
acgcggacagcgggcggagccgacgagcggcggcggaccggacgcagaagcgagaccccca

SEQ ID NO: 116899 - RNA, 66 nt, Homo sapiens
ggagaaggaccaagaaccaggaaaccaaagacaagccagaccggacagaagcgcccgacaacagca

SEQ ID NO: 116900 - RNA, 55 nt, Homo sapiens
aaaagcaacgaagcaaaccagacagggcccagaaggcagaccaacaagaaaccgc

SEQ ID NO: 116901 - RNA, 75 nt, Homo sapiens
cccaaaggcgggagcaggaacagagacaaaggacccagaaggaaagaaacccacacagagagcaccaaaccggaa

SEQ ID NO: 116902 - RNA, 73 nt, Homo sapiens
gcaaggggccaccaggaggccagggggcgccaggggccgcaaggccaggcgcgcagaggcacccaacggcaca

SEQ ID NO: 116903 - RNA, 70 nt, Homo sapiens
caagacacaagccgacgcgcgaaccgggggaaaaggacaccgaaccggaacaggcaagaacgccccggca

SEQ ID NO: 116904 - RNA, 53 nt, Homo sapiens
gaaggcgcaccaccacccacagcagaccaaagacggccggcaacaagcgaggg

SEQ ID NO: 116905 - RNA, 58 nt, Homo sapiens
gaaaccccgagcaacagaagagagcaaaaggacagaaacggaagccagcaagcgcaac

SEQ ID NO: 116906 - RNA, 65 nt, Homo sapiens
cgcccaaaacgcagagggaccgagaggacaaaccgaagacaacgaccggaagaaggaaaacacag

SEQ ID NO: 116907 - RNA, 77 nt, Homo sapiens
aaaacaacagagaaagaagaaccacgggaccaggaaagcaccagcgaaaacccgccaggccaagcaacccccaagag

SEQ ID NO: 116908 - RNA, 78 nt, Homo sapiens
ccgcggagcaaggaaaagacccggaaagaagagacacagaggagccacacccccagcgaccacggcacagaacgagac

SEQ ID NO: 116909 - RNA, 56 nt, Homo sapiens
cgcagggcgcccccgcaaagccgagaagaagaaacaagccggggacgagaacaaga

SEQ ID NO: 116910 - RNA, 71 nt, Homo sapiens
gaaaagcggggcacaaaaagacacaacagaaagagaggagccacgcgccaagcgaagggcaggccggacga

SEQ ID NO: 116911 - RNA, 73 nt, Homo sapiens
agacagaccaacaggaagccgccagacaaaagggacggggcaaggcagcaccccgacgacaagacaccccgag

SEQ ID NO: 116912 - RNA, 81 nt, Homo sapiens
ccaaggccaggacccccggagcccgaagacagcaccgccagccaagggaaggagagcagaagcaagaaaagcccggagaac

SEQ ID NO: 116913 - RNA, 76 nt, Homo sapiens
aaacaagaaaagggaagcgccgacccaggaacgcccccccacagaggagcgaaggagaggacagaagaacgcaaac

SEQ ID NO: 116914 - RNA, 68 nt, Homo sapiens
gaggaggggcagaaagggagcgcgacgacagcccaccaagaaaacacagggagcgcaacagagacaga

SEQ ID NO: 116915 - RNA, 53 nt, Homo sapiens
gaggacgcaaccgcgggcaccggggcagagcccccacgcaaccaggcaagcgc

SEQ ID NO: 116916 - RNA, 76 nt, Homo sapiens
agcagagacgcagcagagaaggaaagaggcagaaggccagaagggcgaagaagaaggaaaaaaggccacgccacag

SEQ ID NO: 116917 - RNA, 59 nt, Homo sapiens
gaaaggaacggcgaaggcccacgggagaaaaccgggcgcaagagcccaaaaggcagagc

SEQ ID NO: 116918 - RNA, 77 nt, Homo sapiens
ccgccaggcccgcaggaccgccggagacagggcaaagacaaaaccgacaagccggacggaaggcaaccgccggcgac

SEQ ID NO: 116919 - RNA, 59 nt, Homo sapiens
gagaaaaggcccggggcccgggacgagggaagggaccacggccccgacacacccgcgcg

SEQ ID NO: 116920 - RNA, 76 nt, Homo sapiens
gaccagcaccagcaccggcccaggggccgaaagcgccagcagcgaaccccagacggaaagcccacccacacaagac

SEQ ID NO: 116921 - RNA, 75 nt, Homo sapiens
ccagcccagacacagcccaaacccagaagaaaacaaggaaaggaaacaaaaacaggacacaacacccacgaagaa

SEQ ID NO: 116922 - RNA, 74 nt, Homo sapiens
cccggagcaccgaaacgccgaaaacgagccggagcccccaggacaggcacacccgggaaaaccgaacacccagc

SEQ ID NO: 116923 - RNA, 83 nt, Homo sapiens
ggagacagagaggaccgagcgcgggcaggcgggaggcaacggagcaccagccgcaggcagcggcaccaacggacagggacaag

SEQ ID NO: 116924 - RNA, 54 nt, Homo sapiens
ccggggcccggcagccgcgcgccaaggccggacccgggcgggagcagcggaaga

SEQ ID NO: 116925 - RNA, 77 nt, Homo sapiens
gcagagaaaaggggcgggcggcgacggcggagggcccgagccacacccagcaggaggcccaggcacccagggggaca

SEQ ID NO: 116926 - RNA, 81 nt, Homo sapiens
acgagggggcagaccgaggcccccaaaggaggaagacaaggccaaagcccggaaagaaaaggaaacgagcgcacccagacc

SEQ ID NO: 116927 - RNA, 82 nt, Homo sapiens
gggcgcggaggcgaccgccaggcgcccaaacccggaccagaaaaggccacagccgggacaaaccgaagcacgccagaccgag

SEQ ID NO: 116928 - RNA, 83 nt, Homo sapiens
cggaggaccacaggcccagacgagcggaggaggcacagggcgcggaccgcacgagcgcggagcacagaccagcgcgcgaccgg

SEQ ID NO: 116929 - RNA, 75 nt, Homo sapiens
ggaacaccagaaaacaggaaggaaacccggggccaaaaaacccaaaacagaaaaggagcagaaaccaaaccacgc

SEQ ID NO: 116930 - RNA, 77 nt, Homo sapiens
aaacgaaaagcaagaacaggaaaaagcacagcgaggagaccaggaaagacagagcagagaagaaaagaaaaaggaaa

SEQ ID NO: 116931 - RNA, 73 nt, Homo sapiens
cccgggaccgaaaaaacgaggagcaagaggggggggcccccccgaagaaaggaaccggggagcggcgaaaaaa

SEQ ID NO: 116932 - RNA, 77 nt, Homo sapiens
cggaaaaaaacgccaccaaccccgcagagaaacaggacagaggaacaaaggagaccagaacagcaaggaggcacaaa

SEQ ID NO: 116933 - RNA, 62 nt, Homo sapiens
ggccccgggcggggagccggagcaacgggcccgggaagcggcggagccgcaggcaggcaggc

SEQ ID NO: 116934 - RNA, 84 nt, Homo sapiens
gggaggccggccgggccagcacccggccgagacggcggcagcagcggcacagggcggggccccgagcagacagcaggaaagaag

SEQ ID NO: 116935 - RNA, 65 nt, Homo sapiens
cagggccaccggggaaacaaacacacgcaggcagacaacggcaagcggagaagagcaaggccgaa

SEQ ID NO: 116936 - RNA, 66 nt, Homo sapiens
caccagcagcccccagagcgggaccacagaggcagagcaacagggacacaagcaagaagaaaggga

SEQ ID NO: 116937 - RNA, 61 nt, Homo sapiens
gccgcgccccgccagccgccacccgcaacaggccaacccaagcgccagcacaagaaaagga

SEQ ID NO: 116938 - RNA, 70 nt, Homo sapiens
cacggcaaagagggaaaacgcggaaagggaacaccagcagacggggaacacagaaaaagaaccaaaaaac

SEQ ID NO: 116939 - RNA, 78 nt, Homo sapiens
caagccaggcagaccggggacaacaaagcgcgggaacaaagcagcccaggcagaccccaggacaaccaggggccacac

SEQ ID NO: 116940 - RNA, 64 nt, Homo sapiens
agcccggcccggcgccgcgcgaggccagacagaaaagggagccaggaccccagagaggagaccc

SEQ ID NO: 116941 - RNA, 69 nt, Homo sapiens
ccgcccccggccaaaccgccaacgcaccacagggcgccaacggggagaaggaggcacaagaaggacccc

SEQ ID NO: 116942 - RNA, 74 nt, Homo sapiens
gccaaagcccaaaccccaggccaagcaaccaccagcagcccccagagcggaacacagggcagacccacaggaga

SEQ ID NO: 116943 - RNA, 78 nt, Homo sapiens
cgcgccgaggaggccggaaagcccaaagacaacaggcccccccgccccccgcggagccccgcccagcaccaccccgca

SEQ ID NO: 116944 - RNA, 81 nt, Homo sapiens
acagagggccgccgcggaccagccacccccgagaggggaacgaggaagaagaaaacggagccagccaaaggcgggacccaa

SEQ ID NO: 116945 - RNA, 77 nt, Homo sapiens
gacccggccgggcccacgcaccgggagcggcaagaacgccgccaggagcaaggcagcgacccagggcacagcggggc

SEQ ID NO: 116946 - RNA, 57 nt, Homo sapiens
cccgagagcaaccagacagaccagggcaacagcgcagcccggaaagagggaaaggaa

SEQ ID NO: 116947 - RNA, 69 nt, Homo sapiens
aagaggcccaacccccaccccgcccaaggaggcccagcggcacaaggcacaaagcaggaggcaggaggc

SEQ ID NO: 116948 - RNA, 68 nt, Homo sapiens
gagaaccccaaccggggaggaaaaccgacgaaggccgacagaacagaaaggcaaaaagagacacacag

SEQ ID NO: 116949 - RNA, 74 nt, Homo sapiens
gagaggagacgacccccaagaacccaggacgagaaaaaacagagcggaacaagcggcccaagagaaagcagcca

SEQ ID NO: 116950 - RNA, 69 nt, Homo sapiens
agcaagaaaacccgacaaaaagaagcgggcgggcaacacaacaaggcgcggacacccagacaagcgcgc

SEQ ID NO: 116951 - RNA, 84 nt, Homo sapiens
agaagagaggagcaacagaggggacagagaaagaccagggcagaggaagaacgcagggaaaagaaaaaaaaaaagcaagccaag

SEQ ID NO: 116952 - RNA, 107 nt, Homo sapiens
caagcaaaggacagggaccaacaaccaacaacgcaggggacaccaaaaggggcggccggcgagcccaggagagcggaggggccagaggagggggccgagaaacaaag

SEQ ID NO: 116953 - RNA, 73 nt, Homo sapiens
aaagcccgaacccgcaggaggggggcgaggcaagccagaagaggagcagaacaagaacggaaagccggagagg

SEQ ID NO: 116954 - RNA, 88 nt, Homo sapiens
ggcggcggcgacagccaggcccggaagcgagggcggccgcgccggcccaggcccaacaaggcacgcagaagaacccccgacgaagcaa

SEQ ID NO: 116955 - RNA, 83 nt, Homo sapiens
ggggggacgagcggagcccgggacaggagccacaagggcgcagaagccggcagagcccaagagacaacaagccgaaaagagag

SEQ ID NO: 116956 - RNA, 78 nt, Homo sapiens
accaggccaaagaaagagaaaaaacagggccagacgggaagaaacgagaagggaccaggggcggaagcggaaaacaga

SEQ ID NO: 116957 - RNA, 57 nt, Homo sapiens
caaaaagcgcgaagggaaccaggaccggggccaggagacgacaaggcgggcaggggg

SEQ ID NO: 116958 - RNA, 81 nt, Homo sapiens
cgcaacgcccccggcccgcagcccccgccggccgcccaacaccgaacaccggaagaccaaagcaagggaggagaagccagc

SEQ ID NO: 116959 - RNA, 83 nt, Homo sapiens
cgcgcccccagccacccgacaggagccccgccgccgcgcaccgcccgccccgcaccgagaaaccggaacagagccccagcccg

SEQ ID NO: 116960 - RNA, 60 nt, Homo sapiens
ccacggcagacacacaacccgacccgacgagcagccaggcccaccaccagccggacaccc

SEQ ID NO: 116961 - RNA, 45 nt, Homo sapiens
cgcccagagcaacccacaagaagaaaagcaaggggcaccaaagga

SEQ ID NO: 116962 - RNA, 81 nt, Homo sapiens
gagcccgcagaccgcagaaggccggagacaccagcagagccccagcccccagcagccgacaggaggcccgcaagagcaggc

SEQ ID NO: 116963 - RNA, 80 nt, Homo sapiens
agaagagcgaaaacaccgggaacgcccaagccaggaccaggagcgcccaaaagcagaagagggaaggcaccaggagaagg

SEQ ID NO: 116964 - RNA, 65 nt, Homo sapiens
gaaagagggcaagagaagaacagaagaaacaaaaggccaccgaagagccagacacgcaacgaaag

SEQ ID NO: 116965 - RNA, 59 nt, Homo sapiens
gagaccaccgaacccaaccacaggggagcccccggagcgagacaggagccgccagaggg

SEQ ID NO: 116966 - RNA, 83 nt, Homo sapiens
gcaacggccaaccggcaagaccagacgggaacgggagacaagcgcagcgagagcgcgcccaaagggagcaaggaggaacagcg

SEQ ID NO: 116967 - RNA, 78 nt, Homo sapiens
agacggccagcaggagggaaagagcgaaggccaaacgaagaagaagacggcccagcagagcacccaaccagcgggaac

SEQ ID NO: 116968 - RNA, 68 nt, Homo sapiens
ggacgagaggaagaccgaaggacaagggcacgaccccaggcggaaaagggagacaggccacgcaaccg

SEQ ID NO: 116969 - RNA, 80 nt, Homo sapiens
gaaaagaggccaggcgcaagaccacaaccaagggcgagaagcacaacgcaaaacccaagacagccggccccagcgagacc

SEQ ID NO: 116970 - RNA, 91 nt, Homo sapiens
ggccgggggcgaaggacacccgcaggaaccggcagaggagaaacagacggccccgagggagacgacagaagagcaggcgaggacgccgggc

SEQ ID NO: 116971 - RNA, 63 nt, Homo sapiens
ccacccccggaccggcagagcgcggaggccgaaccccgaaggaaagacgaagcaaggcgggac

SEQ ID NO: 116972 - RNA, 90 nt, Homo sapiens
caggcccggacccaaccagagaaagacaaccaaccccaccgaggaggacagagacgcaagggcaaacacgaaaagagacaagagagaaaa

SEQ ID NO: 116973 - RNA, 71 nt, Homo sapiens
acaaccgcccgggaccaggcccccacagagagcacacaaacaaagcgaaaccacggaagaaaagggcaaag

SEQ ID NO: 116974 - RNA, 41 nt, Homo sapiens
ggaacagggccgccccaagcagacaagacaacagccaggaa

SEQ ID NO: 116975 - RNA, 76 nt, Homo sapiens
cgacccgccgggcccagggccccagggacggccaagaagaggcgagcgcgggcgaagacaaagcaccgcgcccaag

SEQ ID NO: 116976 - RNA, 81 nt, Homo sapiens
cgcacgcggacggacacggagaccgggcggagccggacgagcgcgggacggccagcagaagcaggcgagccccccgagaaa

SEQ ID NO: 116977 - RNA, 73 nt, Homo sapiens
gggagccgggggaaccagcggaaagcacccgggaacaacccaagcgaagaacccaccggcgccacaggagccg

SEQ ID NO: 116978 - RNA, 68 nt, Homo sapiens
acgcaaagcagagaaagaagccgagaaacaagccacccccgaaagagggagacaacgaagaaccagca

SEQ ID NO: 116979 - RNA, 81 nt, Homo sapiens
agaggaggcaccgcccagccgaccgaggcgccgccgcgagcgccacgccaaggaggggcaggccccagaggccacaaccaa

SEQ ID NO: 116980 - RNA, 92 nt, Homo sapiens
acaccccgaagagcgcgaggaggagcggcacggacagacgcacgggacccaagggacgccgcggaccgacaagagcgggacggagcgggcca

SEQ ID NO: 116981 - RNA, 71 nt, Homo sapiens
accagcaagcggaacccgggaaaagcaacgggaaaggcaccccccacaagaacaaaccaggggagggaaac

SEQ ID NO: 116982 - RNA, 75 nt, Homo sapiens
ccggccgagacggcggcagcagcggcacagacagggaacaagccgccaaaggaagagcaacagagggaacagcag

SEQ ID NO: 116983 - RNA, 76 nt, Homo sapiens
gcgccggaccccccacccacgcgaacgagagggacacggagcaggcacgacgacggagagaggaagaagacggggc

SEQ ID NO: 116984 - RNA, 83 nt, Homo sapiens
ggaggggacgaccggacaagcacaggaggccagcgggccgaggagagcccaaggggggcaaggagcagcggcacgcaggaagc

SEQ ID NO: 116985 - RNA, 77 nt, Homo sapiens
cgcggaccgcggcccgacgaggaagcacgaaagcaccaacgagacccgccacacgaccgaggagaagggaggcacag

SEQ ID NO: 116986 - RNA, 74 nt, Homo sapiens
ccagggaaaagagcaaacgaggcagaccaggggaccccacgggaaagcccaggagagagccagccgagcagaag

SEQ ID NO: 116987 - RNA, 76 nt, Homo sapiens
gaaagacggcgcacacgcacccggaggacagaagcaacgagacaacaaggccgggaacgcagcagaaaccccggca

SEQ ID NO: 116988 - RNA, 80 nt, Homo sapiens
cgccgcggagaccccaccgccggcgcgggaaacgggcgaagcgacgagccgcgaggagcaaccacgacggcagagacagg

SEQ ID NO: 116989 - RNA, 71 nt, Homo sapiens
agagaaaagaacagcaaagcaggaaaaaaaaccgaaagggggcagcgaccagggaggcaaggagcacagag

SEQ ID NO: 116990 - RNA, 78 nt, Homo sapiens
aagaagaggcagaccccgccagaccaacaagcggaggaaaagcccggaaaagcagccaagcggaagacagagccgcaa

SEQ ID NO: 116991 - RNA, 77 nt, Homo sapiens
agaccccggagccccagccagggaaccacggagcacgagaaaacggcgggggcaaggagagccaagcggaccaagaa

SEQ ID NO: 116992 - RNA, 71 nt, Homo sapiens
agccaacaccacaaaccggaaaacggaaagaaaaggagagcaccacgagagagaacaaggagcaggccaac

SEQ ID NO: 116993 - RNA, 84 nt, Homo sapiens
ccccggcaagaccgaaggcgccggccaaaagaggcgccgagggaccgagcgagaggcaccaggccgaccggggcccacaagaca

SEQ ID NO: 116994 - RNA, 72 nt, Homo sapiens
cgggcggggcagagcagcccccagccagccgcgaggccgggacagaaacaccacgcaaggggggaagaaaga

SEQ ID NO: 116995 - RNA, 73 nt, Homo sapiens
ccgagcgcgggggccccagccccgcccgcccccagcccgggaaacacgagcgaggggaggccaacggcgagcg

SEQ ID NO: 116996 - RNA, 83 nt, Homo sapiens
accggacagaaagccaaaaaggagaaagcccacggcagacacagcaggccaacccagaaccaccgaagaagaaaagacaaacg

SEQ ID NO: 116997 - RNA, 73 nt, Homo sapiens
acagcagcgacaaaccgagacagcaagccagccagcccacacaagacacaaaacgcgagcggccggaagaaga

SEQ ID NO: 116998 - RNA, 73 nt, Homo sapiens
aggggcccacccccgccagggcgcccccccaccagccgacgaaggaccgcgcggaaccccgcaggagaccacc

SEQ ID NO: 116999 - RNA, 81 nt, Homo sapiens
ccggaacagcgccgaggcccaaggcagaggcgaggcggaagggcaccccacccggggaaaaccggacagacaagccccgag

SEQ ID NO: 117000 - RNA, 75 nt, Homo sapiens
gagacgaaaagacggaaccagcaggagcgcagagccggcagcccccaaaaaggaggccgcagcaccccggcgggg

SEQ ID NO: 117001 - RNA, 83 nt, Homo sapiens
cccgcgagacacacgggaccaccagggccagggccgaggaaacagagcaccacggaaggggaaagcccggaggaccggccagg

SEQ ID NO: 117002 - RNA, 81 nt, Homo sapiens
gaaagcaaggaccagggaaccggcagacacaagcagggaagcccagaggcacggggcagaacaccaacagagggccgaccg

SEQ ID NO: 117003 - RNA, 71 nt, Homo sapiens
gcgcagcggaggcaccagaggacgccagggaaaaagcgcaagaagcgagcagacccaccacgccccaacgg

SEQ ID NO: 117004 - RNA, 79 nt, Homo sapiens
gaacagaaccgagccagacagggacggaggacgagcaaaagagcaccgaaccggagaccgaggagcaagggggaagacg

SEQ ID NO: 117005 - RNA, 71 nt, Homo sapiens
cgagcgcgccgcccggagccgcgcacacggggccaaaaagcagagcaggcaggaccaagaagaacaacccg

SEQ ID NO: 117006 - RNA, 106 nt, Homo sapiens
aaagagaaaaggaaagcagaagcaaagaaggcacaggaaaccagcggcgagagagagcaaccggggaacaagaggcgagcaaaccaagaacaaccggacaccaggc

SEQ ID NO: 117007 - RNA, 88 nt, Homo sapiens
gcacacacgacagggagcccagaagggaccaagaaaggcccagggaccaaagcccggacaaggcccgagcaccaggaccgcagaaggc

SEQ ID NO: 117008 - RNA, 71 nt, Homo sapiens
gaagccccacagaagagcgaaggaagccgagaccagggggaaggggaaccgagcggagaagacacaagcag

SEQ ID NO: 117009 - RNA, 80 nt, Homo sapiens
cagccccggacagggagggccgaccaggaggacagcaagcccacacgcggccgccgggaccgaaccgagagccccgacgc

SEQ ID NO: 117010 - RNA, 73 nt, Homo sapiens
cagcagcgcagcaagaagggccggagagcgcaggacagcgaccaagccagaagaacaaccagaaacaaacaac

SEQ ID NO: 117011 - RNA, 75 nt, Homo sapiens
aacgcagccaccagaggaaggaaggagaaagacaaacccaagaaaacaagaagagaaaagccgaagaacacgaca

SEQ ID NO: 117012 - RNA, 52 nt, Homo sapiens
ggaacaccaccaaaaacagcacagcagaaacacacaaaccaagggagacaaa

SEQ ID NO: 117013 - RNA, 80 nt, Homo sapiens
agacagacgccggggaggcagcgcgggacccagcccaggcggcgcggacggggcggggcgggaaaccaacccgcaaggca

SEQ ID NO: 117014 - RNA, 119 nt, Homo sapiens
ccccggccaaaggcgagggacacagggaggccaagcaaaacaccccggggaccgaaggcaaggaggaccagcaagacggcaggggcacaccaggcaaaagaagagaagagagacgaaga

SEQ ID NO: 117015 - RNA, 72 nt, Homo sapiens
gcgcgaacagaggcacccgaagccaaagggaaaagaccaaaggggcacgaacacacggcagggcagccccgc

SEQ ID NO: 117016 - RNA, 75 nt, Homo sapiens
cgcaggggcgggaaagacccaggagaagccgcccaaagaacggccaaaagaagcgagggagaaccaccaacaaag

SEQ ID NO: 117017 - RNA, 75 nt, Homo sapiens
gcgcaggaaccagacgggggcgagcgagcaccgagcaacacacgcagaaccgggaccgccgggaagcgcggcgaa

SEQ ID NO: 117018 - RNA, 72 nt, Homo sapiens
cagcgcaaagcgcccgcgcgaccacgggcccggcgccggcccccgccgcccggaagaagagagggcgaagga

SEQ ID NO: 117019 - RNA, 72 nt, Homo sapiens
ggcaacggcaacaaacagaagaagaagcaaccaaggaccgcaagccagaggacaagaaagggacacagaacg

SEQ ID NO: 117020 - RNA, 58 nt, Homo sapiens
ggccggcgcccgcacccaccgagaaccagccaccgacccggagcaacagcgagcaaca

SEQ ID NO: 117021 - RNA, 85 nt, Homo sapiens
ccgggaccagcccggaacccgcaccaagccgcccacacgccaaccggccagaggacgagggagagggaaccgcgggaagcgacac

SEQ ID NO: 117022 - RNA, 77 nt, Homo sapiens
aaacaaacacccagaaacaagagccccagggaacccgagaaggccaacaaaagagcgaggaaccaagaagaggagac

SEQ ID NO: 117023 - RNA, 63 nt, Homo sapiens
cccgggcaagaggcgcaaacaagccaacccaggaggaaaaacgcgaacaccaagaagcaaaac

SEQ ID NO: 117024 - RNA, 78 nt, Homo sapiens
cccaacccccgcccagagacggcacacagggaccaagaagccccggggacacgcgagaaaagacgccgaagggaagac

SEQ ID NO: 117025 - RNA, 61 nt, Homo sapiens
cgaaggcgcaaacgacaccacccgaccgcaaagagcccgggaagggcgcggagcaggcaac

SEQ ID NO: 117026 - RNA, 64 nt, Homo sapiens
accgagggcacggccgaggaccgccgaccagggaaagggagcagcaccggccacacccacagca

SEQ ID NO: 117027 - RNA, 117 nt, Homo sapiens
cccaggcacccacccgccccaccgcagcccaccccagagaaagaccagggagacaacagccacacaaagcagcaacaggagcagggaagaaaaggggagaccgaagagaaaagcgcg

SEQ ID NO: 117028 - RNA, 72 nt, Homo sapiens
agccagagaagaggacggcaaggacggagcagcagcaaggaggaagcgggaaggcgaggcgcgcggaacgca

SEQ ID NO: 117029 - RNA, 65 nt, Homo sapiens
aaagagaacagcaaacacaggcacgaaaaagccaggagggcccagggcggcgacggcggcgcgag

SEQ ID NO: 117030 - RNA, 64 nt, Homo sapiens
gaaccccaaagcaccgccaccgccgcccgagcaaacgaacacaagagacagggaacaccagacc

SEQ ID NO: 117031 - RNA, 71 nt, Homo sapiens
aaagagccgagggcaggggaacccaggcaggaacgcaggcgacacaacccaagacacgacagaaggccaac

SEQ ID NO: 117032 - RNA, 104 nt, Homo sapiens
caccgcggagcaaaaaaagagcccgcaagaagaacagagacagcagccaaacccccagggacacagagccacaaaagaggaaacaaacaggaacgacaaccgca

SEQ ID NO: 117033 - RNA, 75 nt, Homo sapiens
aagaaacaacagaaggacagagacggagcgccgcacccaggcggaggcaggggcgacgcagcccgaacccgcccc

SEQ ID NO: 117034 - RNA, 80 nt, Homo sapiens
cgggcacgcaaccccccaagcgggccaagagacccccacccagccccgagcagcgggacacaggcgagagcgagacaaaa

SEQ ID NO: 117035 - RNA, 77 nt, Homo sapiens
ccagacagcggagaaaacccaaaccgaagggaggagaggcaggccgcggggcccagcgcgggaacgcaccaacagca

SEQ ID NO: 117036 - RNA, 83 nt, Homo sapiens
acccgcccggccccgcagccggaaccacgccagaagacacagggagggaggccgaagcggcgggaacagcacggccaggcggg

SEQ ID NO: 117037 - RNA, 59 nt, Homo sapiens
gcaaaggggaaaaaaaagggagaaacagaccaagggggcccggcaggaaccggaacaac

SEQ ID NO: 117038 - RNA, 68 nt, Homo sapiens
ggagggccagcaaaacacccaggaaaaagagcgagacaggcggaaggaggagagagaggaaacgcccg

SEQ ID NO: 117039 - RNA, 53 nt, Homo sapiens
cggacgcacaggaaggaaaaagggcagcgacacccagacccaccggaccaggc

SEQ ID NO: 117040 - RNA, 84 nt, Homo sapiens
cacccgccccgggcaccaacccacccacacagaaagccagggccggagggagaacagagcggccccccccaccccacgcccaca

SEQ ID NO: 117041 - RNA, 52 nt, Homo sapiens
agaagacgcacccgaccgggccgaccacaagcagaagaaggacaccccacac

SEQ ID NO: 117042 - RNA, 107 nt, Homo sapiens
cagcgaaccagagcgcccggccgcggccagcggagcccgggcggggcaggagccgggcacacacgaccaaccagcagcaaggggacggaaagaaaaaaaagcccggc

SEQ ID NO: 117043 - RNA, 79 nt, Homo sapiens
caaagaaagaagagaaaaagagaagagaagaaacccagcgaaggggcacaagacccgagaagcaaacggccgcggcgga

SEQ ID NO: 117044 - RNA, 76 nt, Homo sapiens
gcaaccagaaccacggagaagaaaagcgacccaccaaccggaaacgaaacagcgcagccaggaacaggacgaagac

SEQ ID NO: 117045 - RNA, 63 nt, Homo sapiens
caaagaaaggaaaagagaagaaccggagccggagaggagacggcccaccgaaggaaacaccga

SEQ ID NO: 117046 - RNA, 72 nt, Homo sapiens
gccccgcaaggacggaccagcaagccgacgccacaacacggaagaaggcgccgagccggacgacgaagcccc

SEQ ID NO: 117047 - RNA, 62 nt, Homo sapiens
ccagcccaacggaccgcaggacgcagagggagggaaggagcgcgaagggacaccgccccccg

SEQ ID NO: 117048 - RNA, 79 nt, Homo sapiens
gcccggggcgcaggcaggggcccggaagaccccaggagccaaggagcgcaccggaaccaggacgcgagacggcgcgcca

SEQ ID NO: 117049 - RNA, 76 nt, Homo sapiens
aacagggagcagaagggagaaggggcgggcaggaagaccagccagggccagccaccagcggcaccggccagaacgg

SEQ ID NO: 117050 - RNA, 87 nt, Homo sapiens
ggcggcgcacgggacccaacgggccaggaaggacgagacgagaccgggacggaagacggcaaagacgagaccgagaacggaagagga

SEQ ID NO: 117051 - RNA, 82 nt, Homo sapiens
gacgccagcgggacgaggaccgagaccgcggccgggaccgagggaccccaggagcaagcacaagcaaaaccacacacggaag

SEQ ID NO: 117052 - RNA, 89 nt, Homo sapiens
ggaaggggcagaaggacagcaaaggaagccaagggaccgcgaggacgagagagaagaacgggaggcggacgccacccaaccaaagcgac

SEQ ID NO: 117053 - RNA, 79 nt, Homo sapiens
gaggagacgacggacggcgggcaccggccgacgcccacgaaggaacagagcaaggaaacaggccgagagaacagcacag

SEQ ID NO: 117054 - RNA, 86 nt, Homo sapiens
cgcagcgcccgcaaccggggcgaacaggcggccgccaagggagacacagaaccgggaaccgcacggaaagcgaagacgaagaaaga

SEQ ID NO: 117055 - RNA, 40 nt, Homo sapiens
ggcaggaacccgcgaagcgggaagagaagagagaccacgg

SEQ ID NO: 117056 - RNA, 83 nt, Homo sapiens
gagaacggaggcgagacgacagcccaaacaggagcggagcagccaaagaggacacaggaacgccacaagaaacaacagcaagg

SEQ ID NO: 117057 - RNA, 62 nt, Homo sapiens
gaagcgacacaaggagaaaaggccagaaggagagaaaaagagaaggaagccaaacagaggaa

SEQ ID NO: 117058 - RNA, 85 nt, Homo sapiens
cagcccggacggcgggagcgcgagggaggcacgagaagcccggcgacggaggaacgcaggcgcgccagagacacgagaccagaag

SEQ ID NO: 117059 - RNA, 58 nt, Homo sapiens
aaagaagccaagaaagaagcgagagagagacccacccagccgggcccccagaccacgg

SEQ ID NO: 117060 - RNA, 72 nt, Homo sapiens
gcgaggacgagaaaggaagagaccccaagcccaccacccaaagcggccgccaccgcgccaccgccagaggaa

SEQ ID NO: 117061 - RNA, 81 nt, Homo sapiens
cggcgggcgagccgcaccaaccggcccgcagaccccaaggcaaagcagacccacggggggagcgcggccgggagcggcagg

SEQ ID NO: 117062 - RNA, 75 nt, Homo sapiens
acaagcaggggcggaagccacacaggccagaacgagggaaaaccgccgccggggccagcaagaacaaaaagcacc

SEQ ID NO: 117063 - RNA, 80 nt, Homo sapiens
cacccacccgggcaaggagcaaagaaggacacagcacacacaccggacaaacaaaagcagagaccgacgcgacaggcccg

SEQ ID NO: 117064 - RNA, 83 nt, Homo sapiens
gaaaaccaagaaagcggagaaggagcgcacaggaaacaaccgcaaccagccaaggcacacaagcccagacacccagagacccc

SEQ ID NO: 117065 - RNA, 67 nt, Homo sapiens
gaccgaaggcaacgcgaagaggacaggcaggagggcccagagaagaccagccacgaaaacacaccgc

SEQ ID NO: 117066 - RNA, 72 nt, Homo sapiens
ggccaagccagccggccccaggcgaagccggccacagccacccaggccggaccaggacgacagccacaccaa

SEQ ID NO: 117067 - RNA, 76 nt, Homo sapiens
ccaaaaaaagggcaggaaccacgaaggacagaagacaccacagagagaggcgacaaagacgcggggaggggacgcc

SEQ ID NO: 117068 - RNA, 69 nt, Homo sapiens
aaccagcagcaaagaaggcacggaaagagagcccacaacaagggaccggaacgaacaaaaaggacagag

SEQ ID NO: 117069 - RNA, 54 nt, Homo sapiens
gagcgagagaaaaggggaagaagacagaggagagagcacgaaccgcaaacaagc

SEQ ID NO: 117070 - RNA, 78 nt, Homo sapiens
cagcagcggaggcggacgcgcaggcgcgagggagcaccagccggaagaagggcgaggggggcacccaaggccgaggcc

SEQ ID NO: 117071 - RNA, 77 nt, Homo sapiens
ggaggccccccagccacggaaacaccaccccacacagaccgcgccccaggcgaccacacaccacgccaccagagagg

SEQ ID NO: 117072 - RNA, 65 nt, Homo sapiens
gccagggcgcaggcacagcccgagaaaccgcagcacacacaccgaggacgcgcccagggccaggg

SEQ ID NO: 117073 - RNA, 71 nt, Homo sapiens
ggcaccgggaggaagccacacaaagaacaaagcagggagcgccaacccaaacgagcgagacacacagaaag

SEQ ID NO: 117074 - RNA, 79 nt, Homo sapiens
ggaggaaagaaggaaaccagcaggcaacgcggaaaaaagccggggggacgcggacagcgcccaagggcgcgaacgggaa

SEQ ID NO: 117075 - RNA, 41 nt, Homo sapiens
ggggggcaaacccgagagaacggaccccgagccccccaggc

SEQ ID NO: 117076 - RNA, 76 nt, Homo sapiens
ggaggcacccccgggacacgggccccacaggaggcggggcaggcccaaccgacacacacgccacacccaaaagcca

SEQ ID NO: 117077 - RNA, 74 nt, Homo sapiens
cagccaagagaccccagcccagcccccgcacagaacaagcgccagccaggggaaaacgaggggacccgcaccag

SEQ ID NO: 117078 - RNA, 76 nt, Homo sapiens
agaagcaaaaccaacagggcagagcaggggaacaaggacagccggaagaaaagaaggaggccagcgggacacacaa

SEQ ID NO: 117079 - RNA, 79 nt, Homo sapiens
ccgcggaacgaaaggaacaggagccgccaggcgacacaccggaagcaggcacacagagaaaaaaagggaacaaaacaca

SEQ ID NO: 117080 - RNA, 81 nt, Homo sapiens
gccgaaggacgccgccgggagcgcggagggaggcccgcccccccccacccccggagcggaagaaagggagggccgcaaccg

SEQ ID NO: 117081 - RNA, 39 nt, Homo sapiens
ggaccccagcggggcacacgaaggaaccaccggcccagg

SEQ ID NO: 117082 - RNA, 78 nt, Homo sapiens
acgcacaagccagacccggcacgccccagcacacgaggagcaaagacacagcaacgagggaagaaccaggcaggaggc

SEQ ID NO: 117083 - RNA, 94 nt, Homo sapiens
cagcgaggaagcacaccaccaaggaacgggcgcagcgagagaaaaagcggggaaggggggcaaaaaaaagaagcaagcgaagcaccgagcaccc

SEQ ID NO: 117084 - RNA, 82 nt, Homo sapiens
ggggcgagaaggcgggaagccgaaggcagccacagaacagccaggcgagcccgaagagcggcacgaaagagaaaggaaaccc

SEQ ID NO: 117085 - RNA, 70 nt, Homo sapiens
aaagaagcgacccagggaagagaagagggaaaagcgagagcgaccagcaggacagcagggagggcagccg

SEQ ID NO: 117086 - RNA, 36 nt, Homo sapiens
aagacgccgaagggcgggaggggcccgccacgggag

SEQ ID NO: 117087 - RNA, 76 nt, Homo sapiens
gcaagccggaggagaagcaagaaggcccggacacagcaaaccgggccacagaaagccagccgccaccgcagccagc

SEQ ID NO: 117088 - RNA, 76 nt, Homo sapiens
gaaccgccggagacagagagcaacgagcaccagagaggaccaccccaacaacacagcacccaaaccaaacaggcgc

SEQ ID NO: 117089 - RNA, 61 nt, Homo sapiens
gccaggccggcagcggaccagaaaacagagggccaaacaggggcaacccgaagaacgacaa

SEQ ID NO: 117090 - RNA, 77 nt, Homo sapiens
ccaagcaccgcagacccaaccccagggggaggcccggaacacggggaggagacgacacccgccaggccacgcccggc

SEQ ID NO: 117091 - RNA, 61 nt, Homo sapiens
cgagcgaagggggcggggcagcgcacggcgaccagaccgacagccagcgaggggggccggg

SEQ ID NO: 117092 - RNA, 66 nt, Homo sapiens
cccaggaggcccggcagagcagcacggaggggagaagggggagaaagccaccacacaacccaaaca

SEQ ID NO: 117093 - RNA, 82 nt, Homo sapiens
cgaacccaagcccggcaaccacaacaagacagggacgaacgcgccaccacacggacgaaggacaggcgggcgggacccccag

SEQ ID NO: 117094 - RNA, 77 nt, Homo sapiens
cccgggcagcgggccggccacggcgggagagcggcaaaccacagccgcgcccagaacgggagccggggagcacgggg

SEQ ID NO: 117095 - RNA, 70 nt, Homo sapiens
gagacgcaaagcagcagcagcaaacccacaaagcagggcaaacccgcggggagcacaaacgggcaggcgc

SEQ ID NO: 117096 - RNA, 82 nt, Homo sapiens
cggaacgggaaccagagagccgaagacgggcaggcgcacccaccaagacgcccaaagccaaggggacaccaaacgccccccc

SEQ ID NO: 117097 - RNA, 81 nt, Homo sapiens
caggaacccaaacccagaagagccaggcgacgccccgaaagcccgccccagaagcccacacggggcacggagacaccaccc

SEQ ID NO: 117098 - RNA, 75 nt, Homo sapiens
gcggggacccgcgggacccgcagccccgcgcgggcaccagagcgccgcccggcgggcgccgggagccgccaggaa

SEQ ID NO: 117099 - RNA, 81 nt, Homo sapiens
cagggcagggggccagccggaccagcaccccaccacgacacgggaggacgaaagggcaccgaagagggaaccaaaacacag

SEQ ID NO: 117100 - RNA, 74 nt, Homo sapiens
gcgagaacaaaaccagcgaggagaagagagggaaaaacaaagaagaccgggaagcccgccagaagaagagacac

SEQ ID NO: 117101 - RNA, 75 nt, Homo sapiens
agcaaagccacacgccccccaaagcaggccaccggacagcagcggcccgccaaggacaggcgaggcgagccaggg

SEQ ID NO: 117102 - RNA, 78 nt, Homo sapiens
ccgggcagccccagcagggaccggacaggacccgaacacggaagaaagacacgcaggaggccgcggccgagcagcgcc

SEQ ID NO: 117103 - RNA, 43 nt, Homo sapiens
gggggaggcgaacagcagacccggcacaggagacccggggaac

SEQ ID NO: 117104 - RNA, 53 nt, Homo sapiens
agcaaccgcgcccaaacgcaagcaaggggaaggccaccgagaacaggagacag

SEQ ID NO: 117105 - RNA, 76 nt, Homo sapiens
accccaaaagacggaagggaccgggaaggagggcggagaaagacgccagaagaagagcccaaggaaaggcccaggc

SEQ ID NO: 117106 - RNA, 80 nt, Homo sapiens
ccccgaggacacacaccgcacacccgaggccaacgaaggccgacggaccgcgagggccgggaaacgcagaagagaaccag

SEQ ID NO: 117107 - RNA, 71 nt, Homo sapiens
gaagcaaagccaagcaaggaagacagccgcgcaacaaacccagcgacaacaaaggagaggacaagcgggcc

SEQ ID NO: 117108 - RNA, 67 nt, Homo sapiens
aaggcaggagagcgaccgccaccaccgcgcaacacccacaaggcacaagaccggcagggaggaagcc

SEQ ID NO: 117109 - RNA, 66 nt, Homo sapiens
ggggaacgcaagacaggaagagaggccggcccccaggaagaagacggcacgggacccccagcacag

SEQ ID NO: 117110 - RNA, 78 nt, Homo sapiens
acacaaccacccgggcccaggaaacaccagcagcgacaacaaccaggcaggggggacacagcaggcaggaacgccgca

SEQ ID NO: 117111 - RNA, 71 nt, Homo sapiens
ggaccgggaagcagaggcggaggaaccgagcgggccgaccaccgacaggaccacaagaacgaacgacaaga

SEQ ID NO: 117112 - RNA, 84 nt, Homo sapiens
aacagagacacccagggagaggaaacgggaacagaaagaaaagccgaaagagcggagcagggacggggggaaaagcgcacccgg

SEQ ID NO: 117113 - RNA, 73 nt, Homo sapiens
cacaccgcggggccgaaaacaacgacaacgagcacagcgcaagccaaaccagaagagcacaaaacaaacgaaa

SEQ ID NO: 117114 - RNA, 74 nt, Homo sapiens
ccagcccagaagcagggaagccccgcggagccgccaccacgacccaccagaagaacagaagaagaagaaaaagg

SEQ ID NO: 117115 - RNA, 70 nt, Homo sapiens
ggcacgacaccgccagcgcaacagaaaaagcacagaaacgcggaacagagaggaagcaaggcaaagcggg

SEQ ID NO: 117116 - RNA, 79 nt, Homo sapiens
ggacagcagcagaagcgcgcccaccaggcacggccacccacaaaagagagacaaggggccccgggaacacagcccgggg

SEQ ID NO: 117117 - RNA, 83 nt, Homo sapiens
agaaggacggcccgacggaagggagcgacacaacccaggccacaaaggcaggccccggggcaggggagacacccaacaggcca

SEQ ID NO: 117118 - RNA, 82 nt, Homo sapiens
gccacagacccaggccagcacccacccaccgggacagcccagaaggaccgggacgaggcacggcgccacaagcaggccgcca

SEQ ID NO: 117119 - RNA, 71 nt, Homo sapiens
cccagcagcaaccagcagcagagaccagcggcggaagggaaaccacaggcgcaagacgggaacacgagacc

SEQ ID NO: 117120 - RNA, 66 nt, Homo sapiens
gcagcgcgagcgacaacgggacgggaaacaagcacagcggaggaaaccaggcacagagaggaaggc

SEQ ID NO: 117121 - RNA, 57 nt, Homo sapiens
gagacgggcaccaaccacgggccccgggaacagacaaggaacccacccacgcaccac

SEQ ID NO: 117122 - RNA, 75 nt, Homo sapiens
caggcaccaccggccccggaaggacacggcccccgcacggcaagccgggaccgggccagagagcagccacaggcc

SEQ ID NO: 117123 - RNA, 97 nt, Homo sapiens
gagggcaagggacccggccagcgacgcaccgagaaaggaaggaaaaccgacgagcccggagaggaagccgccagccaccaaggagaccaggcaaaac

SEQ ID NO: 117124 - RNA, 67 nt, Homo sapiens
ggggagaggacggaaacccagagcccgcaaccagccagggaggggggaagacagggcccagcaccac

SEQ ID NO: 117125 - RNA, 80 nt, Homo sapiens
gccagaagaacggcccaacgggccgggcaccaccaacgaggagggaacgcgcgggccccagggacgccgagggcaacccg

SEQ ID NO: 117126 - RNA, 76 nt, Homo sapiens
ccaggagccccccccaccccggggaagcccggcggagcgagccgaccgaaggaaaagaagccccaggcaggcgggg

SEQ ID NO: 117127 - RNA, 72 nt, Homo sapiens
gcgaggcagggaggacccacccccgggggaaaagaacgagggaaccacccgccccgaccaggagaggacaga

SEQ ID NO: 117128 - RNA, 64 nt, Homo sapiens
cccagaagagcgaaggacccagcgaggaggagcccaaaaggcagagcgaggagagaagaaggag

SEQ ID NO: 117129 - RNA, 70 nt, Homo sapiens
gcggagggcggcgcaggccggggcgagcggcgggcccgcgggccaggccgggagagccagagaaagcaag

SEQ ID NO: 117130 - RNA, 76 nt, Homo sapiens
gcaaagggcaggaaacaaacagccggaaggccgaccagacagaaggacagaccaagacaaacccgggcacaaagga

SEQ ID NO: 117131 - RNA, 79 nt, Homo sapiens
ggcaacaccgaacgaacacccaacaagccgcaacgaaaaccggaaaaggacaacaggcacaaagagagaaggaacaccc

SEQ ID NO: 117132 - RNA, 67 nt, Homo sapiens
caccgcaggaagagccccgcgcggcgacaagacccaaagcggccaggaaggggggcggcgcaggacg

SEQ ID NO: 117133 - RNA, 87 nt, Homo sapiens
ggcagggggcaaacaagccgaccggaaaaaggcccagcagcagggaacaggaagcaaggagcaagaacagggggaagccagccggcg

SEQ ID NO: 117134 - RNA, 72 nt, Homo sapiens
agaaagagcagcggaaagacgacagcaacccgaagacagggaaaaggccacgccgggccagaaaaggggaag

SEQ ID NO: 117135 - RNA, 84 nt, Homo sapiens
ggcgccacgagccaggagaccaaggaccagccaccacggagaacacaccgacccagcagggaggccacagacccagcaggggcc

SEQ ID NO: 117136 - RNA, 68 nt, Homo sapiens
gccaacaccggacggaggaacaagacaccacagccacagaaggcggcaaccggaaacaagaccgcgca

SEQ ID NO: 117137 - RNA, 69 nt, Homo sapiens
cgcacgagggcagggcggaagaaacggaacaccgggcagagagaacagagagacaaacagagacgaaag

SEQ ID NO: 117138 - RNA, 74 nt, Homo sapiens
gggaaaagccccaagggggcaccaggccaccggcacaggacggacggggagcagcccagaagaaccagcgacag

SEQ ID NO: 117139 - RNA, 91 nt, Homo sapiens
ccgccgccggagcggcgccggagccggagccggaacccagccgcgccagggcggagggggcagggcagaaggaccaggggcgacgaggccc

SEQ ID NO: 117140 - RNA, 71 nt, Homo sapiens
ggaaacgccaaaacaccagaaccaaccgggaacaagggacgaaagcaagcccgaaggaacaacaccaacga

SEQ ID NO: 117141 - RNA, 80 nt, Homo sapiens
ccccagggaggaccaccccagcaagcaccgagaagaacaccaaacaagaagccacaagacagacgccggggaagggcagc

SEQ ID NO: 117142 - RNA, 56 nt, Homo sapiens
aacgaggccggggaaaggccagaacaggagacggagcggcacgcagaggggagcga

SEQ ID NO: 117143 - RNA, 68 nt, Homo sapiens
ccccgggggccggaccggaaagagaaggaggagggagccagaggaagcaagaaccgccccgcaccagc

SEQ ID NO: 117144 - RNA, 69 nt, Homo sapiens
gagcagcggcccccaggaaaggagcagcaccaggaggcaccaacagaggaaaagaaagagaagcgggag

SEQ ID NO: 117145 - RNA, 83 nt, Homo sapiens
gaagaaacgggccgcgaaccgcagacagcggccaagaagacacaaaggacggaggcacggcagaagaaaccagacaagagcgg

SEQ ID NO: 117146 - RNA, 76 nt, Homo sapiens
gcagccgagaggagcggagcgccagggggccacaggcaagccgacaggaacacccgacgggaccaagcgcaacgga

SEQ ID NO: 117147 - RNA, 68 nt, Homo sapiens
caaacaaaaggaccccgaacaaagacggcaagaaaggcagccaccagaggagcgccgcccccaggcgg

SEQ ID NO: 117148 - RNA, 81 nt, Homo sapiens
gcgaggagaggccggagcggcggcaggaccgcccgcgccacgcgccaagccgcgagccgcaggagcggcccccacagccca

SEQ ID NO: 117149 - RNA, 80 nt, Homo sapiens
accgggcccgggcaccaccaggacaggacacccagcaacagaccgagaagacagcggcaaaaccagccggaaaggaccaa

SEQ ID NO: 117150 - RNA, 51 nt, Homo sapiens
gacaaccgcccagaaacggccaggacacggcaaaccagaaccagggccaca

SEQ ID NO: 117151 - RNA, 85 nt, Homo sapiens
aggggagcaccaggaccgggccggaacgagacgcacgcaagaggagccaggagcacggggggaacaagaccgccgggacggaaga

SEQ ID NO: 117152 - RNA, 71 nt, Homo sapiens
cacgagcgggagcgaagagggaaccagcgcgcggcagccgcgacggggaagagcaagcgaggaaaaacacc

SEQ ID NO: 117153 - RNA, 83 nt, Homo sapiens
gccccgcgcgggcccaccggcccacggcgcgccccacggcggaccacacgaagggcgcgccggaccaggccaaccggagcgca

SEQ ID NO: 117154 - RNA, 88 nt, Homo sapiens
ggagaagagccagggcccgaccgcagggagcagaggggacagaggcaccaaggaccccaagacaggacaccccccaggcacagccaca

SEQ ID NO: 117155 - RNA, 74 nt, Homo sapiens
gaaagagggcacccacccacgaagggaggaaaagggcagggacagcgcaggcagcagacaccacgccacccaag

SEQ ID NO: 117156 - RNA, 39 nt, Homo sapiens
aagaagcgcggaccccgcggacgcaagaggagaagacgg

SEQ ID NO: 117157 - RNA, 73 nt, Homo sapiens
cccagcaagagcccggccgcagccgccacccaggggagcacgacacccgccacaacggccggggggcgagcga

SEQ ID NO: 117158 - RNA, 64 nt, Homo sapiens
cgcgcggcgcggggaccgcggcccggcccagggccccggccaggcccagccccgcgggagaccc

SEQ ID NO: 117159 - RNA, 66 nt, Homo sapiens
acagaccggggaccgcccagcagcccaggccgagacgaaaggcaggagcccaccccggacgacaac

SEQ ID NO: 117160 - RNA, 86 nt, Homo sapiens
cgcgcgcgcggccgcggggcgggcggcggggacagcggggacggcacggcgcgcgcaggaaaaaagaggcaagggacagcaaagcg

SEQ ID NO: 117161 - RNA, 70 nt, Homo sapiens
ccagacgccgaggccccagaacaagcggagccaccggcaccacgggaacggcgccaccgagcacagaaga

SEQ ID NO: 117162 - RNA, 83 nt, Homo sapiens
accgccacggccaggggacaggcacaccaacaggcaccaacccccccaggcaggcaccgcgggaccccaagcggccacagccc

SEQ ID NO: 117163 - RNA, 82 nt, Homo sapiens
gagggccgcccaggacggggaccccaggccccagggccgccggagaaacaccagccccgggaaaagggcgccggagccccgg

SEQ ID NO: 117164 - RNA, 74 nt, Homo sapiens
cacaacaggaggccccccgggacccccacccagagggaggagcacaaacgcccaccacacagcagaaacggcag

SEQ ID NO: 117165 - RNA, 65 nt, Homo sapiens
acacgaacaggaacccgcaggcccaggagacaagcacaccagcaaccaacgaccacacagacaca

SEQ ID NO: 117166 - RNA, 99 nt, Homo sapiens
cccagggaagcgcagaaagcaggcgaacccgcggcgcaaaacgaacaccagcaggaaaaaagagcggcagaaggccaaacggccgagcaggcgagcgaa

SEQ ID NO: 117167 - RNA, 74 nt, Homo sapiens
ccggcagcggagaagcggagcgaggacgaagaggggcgaggaggcgggccaggaaaggagggaaaaccagccaa

SEQ ID NO: 117168 - RNA, 80 nt, Homo sapiens
ggcgcgcagcacgcgcggaggccggcccgccgggcgccgcagaccccaccgcgggggagccaagggagagggaagaaaac

SEQ ID NO: 117169 - RNA, 76 nt, Homo sapiens
aagcacgaaggacaggaaaaggcccaaaaagcaccaggacaaaagaagggcagcacaaaggaaagccccaaacccc

SEQ ID NO: 117170 - RNA, 72 nt, Homo sapiens
aagcaggaccaagcagcacccagggaacagggacagcaccagacaccgcgggcacgcaaggaaccgcagaca

SEQ ID NO: 117171 - RNA, 75 nt, Homo sapiens
gggagcggcgggaggccaccgccagggagcacaaaagaacaaaagggaaaaaaggacggcagcacacaacaaaac

SEQ ID NO: 117172 - RNA, 73 nt, Homo sapiens
aaagaaaagaaaaagagaagaagagaagaaacccagcgaaggacgcgcagaagaagcccacccagaacgcccc

SEQ ID NO: 117173 - RNA, 56 nt, Homo sapiens
aggcacgcacaggaccacaggaggacaggaagcacaagaagaaaagacacaggaaa

SEQ ID NO: 117174 - RNA, 57 nt, Homo sapiens
cgcgagggcgggggcagcggcaggcaagccacagccaggaaacaccagccccccggc

SEQ ID NO: 117175 - RNA, 72 nt, Homo sapiens
gcgcagcgaggaagaaccgccggggacgaaacaaaaagaccggaagcgagaccccaaaccacaccaaggaac

SEQ ID NO: 117176 - RNA, 58 nt, Homo sapiens
gccgaagacggagaaaaaggaacagggaggggagagagagcaggagacggagggcaga

SEQ ID NO: 117177 - RNA, 78 nt, Homo sapiens
cacaggggcccaaaccaagaagcagagaggggccagcacacaggccagcgcagaagacgagaagccaggaggagaagc

SEQ ID NO: 117178 - RNA, 105 nt, Homo sapiens
aacgcggggacggcgcgcgggacggccgaggaaggaacggcccccccccagcccgccccaaaagcccgagagagacgcagcgcaaggccgggggaggccacaaaa

SEQ ID NO: 117179 - RNA, 73 nt, Homo sapiens
acaagccagcaaaaccacggccccagggggaagagaccgaaaccaagggggaaaggcacgagggcaacccgcc

SEQ ID NO: 117180 - RNA, 80 nt, Homo sapiens
acacagcgggacacaaggaagaagacagcaagaaagcaccagccaagcagaagggagccagcggacgagggcgccaggcc

SEQ ID NO: 117181 - RNA, 82 nt, Homo sapiens
ccacgacagcagagcggggcggccacaagcaaagggaaggcaagaagaagaacaggaggaagaaaagaaaaagaaaaaagac

SEQ ID NO: 117182 - RNA, 86 nt, Homo sapiens
gcaagcccagacaagccggggaggaagggcggcggaccgagagaaaagacacagacggcaaaacccaaaaaaccagaagagggaca

SEQ ID NO: 117183 - RNA, 78 nt, Homo sapiens
gacagcggcgaggagaacgcccgcggacgacccgagacaagagagggcggcagaaggaacaccgagaaaccgcacacc

SEQ ID NO: 117184 - RNA, 75 nt, Homo sapiens
gcagcccccggaagaggcaggagcggagcgaggacaccggacgagaggggggagaggaagaagcggagccgccag

SEQ ID NO: 117185 - RNA, 76 nt, Homo sapiens
acggagaagagcacgcggccaagccgcgagcagaagcgcacagaaagaggagaaaaacagagaaaagcaaaggcga

SEQ ID NO: 117186 - RNA, 81 nt, Homo sapiens
gggacccccccaagggacccggaggaagcagcaccagaccaaggcaacagggcagcggccaaccgggcgggccaggccccg

SEQ ID NO: 117187 - RNA, 83 nt, Homo sapiens
cggggccggggagaggcggaccggaccacggcgcggagcgccgccagaggagaagaagcaaaacggaccaaggggccaggcga

SEQ ID NO: 117188 - RNA, 110 nt, Homo sapiens
gcgcgaaggccgggacccggccccggcccacaggggggggcaaacccgagagaacgggaagaagaccaaaggacaaaaaagacggagagagaacaggccaacgggagcag

SEQ ID NO: 117189 - RNA, 73 nt, Homo sapiens
ggaacgacgcgagcagaagaggggcccagagggcaggagagaccgcgaacaaccacacgaagcagcagggcga

SEQ ID NO: 117190 - RNA, 69 nt, Homo sapiens
ccaggcggcacaccccccaagaccggcggcccaacccaccgggacagaaaagacccacggaaaagaaac

SEQ ID NO: 117191 - RNA, 82 nt, Homo sapiens
accggggagggggggaccacgaaaggagcaagagcaagacaccggacaccgagggcccccaaaaggaccacccaccaccgag

SEQ ID NO: 117192 - RNA, 82 nt, Homo sapiens
caacgagcgcggaggacgagggccagcgacggagagggcagaagaggaggagaaggagcacggaagggacggcagggaaacg

SEQ ID NO: 117193 - RNA, 71 nt, Homo sapiens
ggagcaaggcgaaagagaaaaaacaacacggagaaaaggcgagaaccaggccaggccacacaagccccagc

SEQ ID NO: 117194 - RNA, 94 nt, Homo sapiens
gaacagccacgggccacacccaccgcgagagagcgaccagccacggacaggagaagcacgggaggacccacggagggcggaaccaacggaggac

SEQ ID NO: 117195 - RNA, 75 nt, Homo sapiens
cagagcaacgcccgcacgggcacagacagcacagcagaaacacacaaaccaagggagacaaagcaaccaaaaaac

SEQ ID NO: 117196 - RNA, 77 nt, Homo sapiens
cggcaccaccgcgcgaccggcgggcccccgcccgggcccccgaagaggcggcgccagacagaaggcggcacccccac

SEQ ID NO: 117197 - RNA, 87 nt, Homo sapiens
aggggaagaagaagaaacgggccgcgaaccgcagacagcggccaagaagacacaaaggacggaggcacgccaaacagaggaaagagc

SEQ ID NO: 117198 - RNA, 86 nt, Homo sapiens
cacgaggagggcgggaccggaggaggggccaagggggccccgaagaccgcacgaaaagcggacgccggaagcggagaagaagggca

SEQ ID NO: 117199 - RNA, 59 nt, Homo sapiens
agagaagacccgagaccaaaaccacaacgccaccaccaccacagacagagggaagagcg

SEQ ID NO: 117200 - RNA, 78 nt, Homo sapiens
agccccacagcgggacacggagcgagcgccggaccagcgcgagcgccacggcacggccccacccgggcacaccgagcc

SEQ ID NO: 117201 - RNA, 77 nt, Homo sapiens
ggagaagcaagacgaagaacagaggagcagccaaaaggcagcaccaaccaaagagacaggcaacaagaagaggaggg

SEQ ID NO: 117202 - RNA, 68 nt, Homo sapiens
caaaccggagccagaaacaaccgcaaccacccaacaagagggaaggggaacaggaccggccacagaca

SEQ ID NO: 117203 - RNA, 73 nt, Homo sapiens
agccccaggaaggacgggaaccgcgcagcacaggcccagacggaaccgcgggagcgacggaggccacaccgga

SEQ ID NO: 117204 - RNA, 76 nt, Homo sapiens
gccgggcggcagcgacccgagaaggcccacccaggaggggacacaaccgcaaggggaagaccgacccaccccccgc

SEQ ID NO: 117205 - RNA, 76 nt, Homo sapiens
aaggaccaagagaacaagggaaccagccaaaagagaaaccccagaggaacccacgagaaaaacagacaaaggaggc

SEQ ID NO: 117206 - RNA, 54 nt, Homo sapiens
ccagggcagagccacgccgccaccaggcacggccacgaagaggggcacacgccc

SEQ ID NO: 117207 - RNA, 73 nt, Homo sapiens
ggaagcgcaccacagcacaaaaggcaccagcagcgcgcacccagggcacaggagacagagaggaggagccgcg

SEQ ID NO: 117208 - RNA, 66 nt, Homo sapiens
ccagcgagacggccaggaagagcgagaacaccaggcccgcagcccgcacgcaagcccaagagccgg

SEQ ID NO: 117209 - RNA, 82 nt, Homo sapiens
caccccaggccggggagggcgcgccgaaagcggaaggccgagcccgccgcaggaaaaacagaagagccgagggagcaacggc

SEQ ID NO: 117210 - RNA, 44 nt, Homo sapiens
cccaagcggaccggcccgcgggcgggaacgcagcccggagaaag

SEQ ID NO: 117211 - RNA, 83 nt, Homo sapiens
caaccccagaaccagcggggaacagcccggccaccaaggcacgagaagagaagcccagagcaaaacaccccaaaccagaccac

SEQ ID NO: 117212 - RNA, 70 nt, Homo sapiens
gggagaaaaggaccagggaggacggaggggaaaggcagggccccgaagagacagaacagagcaacgaaag

SEQ ID NO: 117213 - RNA, 42 nt, Homo sapiens
cacagcgaccgggagaacaagacgaaccggaagcagcccagc

SEQ ID NO: 117214 - RNA, 85 nt, Homo sapiens
ggcgcccgaagacaaggcccggcgccgggaccgaggcgcagcaggccggcgcggaagaggccggcggcgggacggccccacggga

SEQ ID NO: 117215 - RNA, 56 nt, Homo sapiens
cagggagccaagcgccgcccggccgaggaccgggggaaagcaaaaaaaccacccca

SEQ ID NO: 117216 - RNA, 70 nt, Homo sapiens
gcccgcccccccgcccaccacgaggcggggccaggccagcagcagaacgcggcgcaaccaccgacccggc

SEQ ID NO: 117217 - RNA, 72 nt, Homo sapiens
cgaaccaagcagccgccgaggccgcggcccaaaggccaggagccccggccccacaagaccaaggcgcaagcc

SEQ ID NO: 117218 - RNA, 56 nt, Homo sapiens
aagacgcccaagagaagagagaagaggaacggacaacccagggaccgcgcacgacc

SEQ ID NO: 117219 - RNA, 72 nt, Homo sapiens
ggggccccccggccgagggagaaggggacaagggcagcggcggacgcagacacgccaaaggaaggcagcacc

SEQ ID NO: 117220 - RNA, 76 nt, Homo sapiens
acggaccccaggaccggaggacggaagaaagggcagccaggccgaaccggggcagcgcgcaaggaggagcagcgag

SEQ ID NO: 117221 - RNA, 100 nt, Homo sapiens
ccgacacagccccgggacccccaagagcacaggcagaaggcacaaggccaaaccagaaaggggacagcggcgggcagggagcacggaaggaaccacaagg

SEQ ID NO: 117222 - RNA, 67 nt, Homo sapiens
gaggaagcaggaaaaaggccaagaggaagggaaggggaaaaaaaaccgaaacagaaggacggaaaga

SEQ ID NO: 117223 - RNA, 76 nt, Homo sapiens
gggagagcgccacgcgccagcaccccgcacgcagcagcgaccagaagcaagccccaagcccccagcccacgacaca

SEQ ID NO: 117224 - RNA, 74 nt, Homo sapiens
ccagcaaccagacggggccagagcagacgcagcgagagacaacgaagagaggaaagaagcggaaaggagggagc

SEQ ID NO: 117225 - RNA, 71 nt, Homo sapiens
caccgcgagccgcgcggcgcggggccccgcggcggagacacaagcgggacggaagaggcccggcgaccgga

SEQ ID NO: 117226 - RNA, 72 nt, Homo sapiens
ggccacacgggcaagaccaacacagcgagacggaagcggaagcacacgccagacgccagcaggccggagcac

SEQ ID NO: 117227 - RNA, 79 nt, Homo sapiens
gccgccagaagccgcacgccggagccaaaaaccgaacacccggaaggggacaagggacggcgaacagaccccgcgcggg

SEQ ID NO: 117228 - RNA, 67 nt, Homo sapiens
accagagacacgacaaaagacaggggcagcccggaacccgaggagggaccgggagcggcgagaacac

SEQ ID NO: 117229 - RNA, 79 nt, Homo sapiens
cgcggagaccccgagaaaccgccgaccaagagcgaagcgacgaaacaacgaacgagcaaggaagggccaaggcagaccc

SEQ ID NO: 117230 - RNA, 75 nt, Homo sapiens
ggcggcagcgggccagacccaggaccgcgacacgcacggagcgcggacgcccaggagcgggcgccggcggagcgc

SEQ ID NO: 117231 - RNA, 54 nt, Homo sapiens
gagcgaccaacacaagggggccgcaagggacaccagcacacacacaccgacggc

SEQ ID NO: 117232 - RNA, 71 nt, Homo sapiens
agccgcgggggcggggagcgcggaccccggccgggacgcgcagcggcggagaaaccaccacaaacacgagg

SEQ ID NO: 117233 - RNA, 49 nt, Homo sapiens
caagcggcgacacacgacggggacagaagagcgcgaaaggaacaagaaa

SEQ ID NO: 117234 - RNA, 76 nt, Homo sapiens
aaaagccaacccaaacgggaaaggaccgaaagagccggcccaaaaggaaaaccgccagaaccacaggaacccaacg

SEQ ID NO: 117235 - RNA, 80 nt, Homo sapiens
ccagaagcacaaggacagagcacccaccacaggagccacccgaagggccccccaagcccagggaccgcagaggacgggga

SEQ ID NO: 117236 - RNA, 72 nt, Homo sapiens
agccccaagacagaggaccagagcggacccgccagcgaaggggaaagagcacagggaagaacccccacagcc

SEQ ID NO: 117237 - RNA, 67 nt, Homo sapiens
ggcagaaccagggaaaccacaaacaggaagcagaaacaaggagggaacaggaaacaaccggaagaaa

SEQ ID NO: 117238 - RNA, 59 nt, Homo sapiens
cgccccgagagaacgaggaggagccccacccgcgcaggagcagggacggggggaaaagc

SEQ ID NO: 117239 - RNA, 82 nt, Homo sapiens
aaacccacgacaagaaggcaccgagccgcccggcaaagcgaaagcgcaggaccgaggagaaggagccgccggagcagccgca

SEQ ID NO: 117240 - RNA, 78 nt, Homo sapiens
agaaaggcgggcccgggaacagagcgggggggcacgaccgggagaaaggacgccagccggaagaggggagagacgcac

SEQ ID NO: 117241 - RNA, 54 nt, Homo sapiens
caaacaaccacagaaacacaaacccggaagggcggaaaaggcaaaacagcgcaa

SEQ ID NO: 117242 - RNA, 72 nt, Homo sapiens
ggagaaaaggcggacagcagcgcaggcaaaaaacaggacacccgcaggagcaaacagccaagggacaaccaa

SEQ ID NO: 117243 - RNA, 64 nt, Homo sapiens
gcgcacgagggacggggaaagcaggacagcggccgaagccagagccggggcggcgccaggcccc

SEQ ID NO: 117244 - RNA, 52 nt, Homo sapiens
ggcgcccggcgccggccgagaaggcagaggcggaacgcgcacgggaaccgaa

SEQ ID NO: 117245 - RNA, 82 nt, Homo sapiens
ccggggagcgcaggaaccagacgggggcgagcgagcaccgagcaacacacgcagaccgaggaagccgacaggaccgggggca

SEQ ID NO: 117246 - RNA, 70 nt, Homo sapiens
aaagggcagggacagcgcaggcagcagaggccaagaagaccaagggaagaacgcacacgcgcaaaaggca

SEQ ID NO: 117247 - RNA, 75 nt, Homo sapiens
ggggaacaaaggacagcacgcaagccacgcggaacaccgaacaaaaggggaagcgaagggaagcacgaaccccag

SEQ ID NO: 117248 - RNA, 53 nt, Homo sapiens
ggcgcgggcccaggccagcgcgcagaagaaagccgcggaaccgcgacaccaag

SEQ ID NO: 117249 - RNA, 72 nt, Homo sapiens
ccagccgcgccggcccgggcacgcagcccacgcccagagggcagcggcagcggaagagaaagggcagggcag

SEQ ID NO: 117250 - RNA, 74 nt, Homo sapiens
agcccggagcgagagcgagagaagggaccagccagaagaaacaaccgacaaccccagccaagaggagcgccgcg

SEQ ID NO: 117251 - RNA, 59 nt, Homo sapiens
ggcgcgccggaaaccggagcgcgcagcaggcagaggggaggagacacgaagcgacgcag

SEQ ID NO: 117252 - RNA, 76 nt, Homo sapiens
gaggcccgcagcgcagggggacgacacgggcaggggggagggagggcaccacaaagaaggccgcgggaaaggcaaa

SEQ ID NO: 117253 - RNA, 71 nt, Homo sapiens
cacaccaccagaaagcaagcgcgaagaggcgagggcgaaaaagagaccgaaacaaacccgaaaaaccccga

SEQ ID NO: 117254 - RNA, 70 nt, Homo sapiens
ccagagaggggcaccccggggacaagccgcaccacgccaaggaaagaccagccgacagcgaccaaggcca

SEQ ID NO: 117255 - RNA, 94 nt, Homo sapiens
ccgccacccccgggcaaggcgaggccccgggggcgggccggggcaccacgccgccccagggaaccgcacaggaggaggaagccaagaacgggag

SEQ ID NO: 117256 - RNA, 113 nt, Homo sapiens
gcccgggccgcggaccccaagcccgccacgccgcccagcccggccccgcccgcgccggaagagccacgccgggggagccccccagacccgaaaggagacaagaggacagccgc

SEQ ID NO: 117257 - RNA, 88 nt, Homo sapiens
cccagcccacaacccacgcgcaccggcacgggcgagggccgacccgcaccggagccacccgcaggagaccaggagggcacagcacgca

SEQ ID NO: 117258 - RNA, 71 nt, Homo sapiens
agcgccggcccgggagccgacagccggaccgcaacaccgcaacccacgcaggcaagacgaaaaccggggaa

SEQ ID NO: 117259 - RNA, 70 nt, Homo sapiens
gaaacaccgccgagaccagcccaacaggaccaggagcgggagagggccagacccagcagccacaacgagc

SEQ ID NO: 117260 - RNA, 69 nt, Homo sapiens
ggacaccggaagccgagaaaggcgaacaagaggcgccagcgggcgcgccggaagaacagcgccacgcca

SEQ ID NO: 117261 - RNA, 68 nt, Homo sapiens
gccgccagcggccgggaccgaacaggcgggcgcgcacagacggccacagaagcccagccaaggaaacg

SEQ ID NO: 117262 - RNA, 68 nt, Homo sapiens
ccacgccggagccagcgacccacgagggaaagcaaaccaccagagacccacagcaccccgcggaagac

SEQ ID NO: 117263 - RNA, 61 nt, Homo sapiens
cgcgggaaacgggcgaagcgacgagccgcgaggagggcggagaacggaaaagcaccaggaa

SEQ ID NO: 117264 - RNA, 80 nt, Homo sapiens
cgaggcgcagggagcccccgccggcccggcggccgaggagaagaggggggcggaagagaccaggcaccggagagagaagc

SEQ ID NO: 117265 - RNA, 83 nt, Homo sapiens
gcagcccggccagagaggaggccgagacaacagaacgcgggcgaacgagcaccaacgcacccaccaggagcgaaacgcaggag

SEQ ID NO: 117266 - RNA, 80 nt, Homo sapiens
caggcccgcgacccgggcagagaagcagcagccgcccaaaacacaaaccaaagaagaaacccgaaggaccacagagaacc

SEQ ID NO: 117267 - RNA, 61 nt, Homo sapiens
aggcagcagcgaccagaaagaggagcaacaggcccaaaagaggcccccaacccaaggcagg

SEQ ID NO: 117268 - RNA, 79 nt, Homo sapiens
ggaggcaggccgccccccagcgggcgcgggagaacagcagcgacccgaaccgcagacggagaacaaaggcagcggccag

SEQ ID NO: 117269 - RNA, 74 nt, Homo sapiens
gaaagggacaagaagggcaaagccgaagaagggcgcgcaggaacaagaagaagggcaaccacagagccaagaaa

SEQ ID NO: 117270 - RNA, 77 nt, Homo sapiens
ccggaggcgcagcgccaagagaaggagccccgagcagcggagcaggagacccaagcgagagccgggccagcgaaccc

SEQ ID NO: 117271 - RNA, 81 nt, Homo sapiens
caacagccaaggaaaaaaagcagagaggagcggggagcaagcagggaagaaagcacgggaaaaggccgggcccacagggga

SEQ ID NO: 117272 - RNA, 72 nt, Homo sapiens
aggagcggagaaccggagcggccaacggcaggaggccacgagggccccccacccagggggccgcccaccggg

SEQ ID NO: 117273 - RNA, 60 nt, Homo sapiens
gcggaacaccaggcggcgggacaagcagaccggaagaccgacggaagaccacaccccgag

SEQ ID NO: 117274 - RNA, 53 nt, Homo sapiens
agaaacgcgaggaccgagcgacgggcaccacaaggcaggcagcccgaggccca

SEQ ID NO: 117275 - RNA, 76 nt, Homo sapiens
acggacaccacacacacacagcgggcggagaacggaaaagcaccaggaagcagagaggaccgcagaagggaaggag

SEQ ID NO: 117276 - RNA, 73 nt, Homo sapiens
gcccagaagacagagggcgaggccacagagcaggcccacgggccggccacgggccagacggaggccggacggc

SEQ ID NO: 117277 - RNA, 84 nt, Homo sapiens
ggcaaccggacccgggacaacaggacgaacagaccaccaacggcgacaaagagagaggcgccgagggagcagaggccgagggcg

SEQ ID NO: 117278 - RNA, 75 nt, Homo sapiens
agaagcaagacccaaggaagaagcgcggggagacccaaaagaggagaggagcaggaagaagaccacgcccccaga

SEQ ID NO: 117279 - RNA, 90 nt, Homo sapiens
gggcgcaccgcgggcggacccagcacgccgggccgggggcgcagcagcaggaggcaaagggaccccaagaaaccaaagggcaagagccgc

SEQ ID NO: 117280 - RNA, 81 nt, Homo sapiens
agggccaccaccgcccagagccccaccgagccgccgacgacagggggggggacgcccacacgggcgcagagcacaagcaca

SEQ ID NO: 117281 - RNA, 83 nt, Homo sapiens
cagaccagcgcccgaaggccgacacgcggcccgaggcaacggccacagagaccagggagagggcagccgggaccgcggcgggc

SEQ ID NO: 117282 - RNA, 67 nt, Homo sapiens
aaagaaaacacccacccagagaagaacgaggacacccgcaccacacacagcgagggagaccacaaaa

SEQ ID NO: 117283 - RNA, 31 nt, Homo sapiens
cccacgcgcccccacggcaaccaagggcaga

SEQ ID NO: 117284 - RNA, 70 nt, Homo sapiens
gccgccgccagaggagagcaccggccacggaaaagcaaagccccggcacaaagcagaccgccccacgggc

SEQ ID NO: 117285 - RNA, 71 nt, Homo sapiens
gcggccaagacccaccgcaagaaagcgcggggcaaggagcgcgaggggaaaaacaacacaccgaaaggccg

SEQ ID NO: 117286 - RNA, 96 nt, Homo sapiens
gcgggcaggagcccgaacccccccgcgccgggagccgggcccgaccagaccgggcagagccccacagccgacaacccagggcgcccaggaggacgg

SEQ ID NO: 117287 - RNA, 79 nt, Homo sapiens
accgaggcgcccgcggggcggggaccgccgcccggggaggggaaagcgcgaaaaagggcgcaaggccaagccagagaca

SEQ ID NO: 117288 - RNA, 47 nt, Homo sapiens
gacgggggggaaaggaacaaacgcgaaggcagaacaagacagacgcg

SEQ ID NO: 117289 - RNA, 56 nt, Homo sapiens
aggaggaagagcaagcgggggaccgaacaaggcaaaagggcaggcaacaggaagaa

SEQ ID NO: 117290 - RNA, 84 nt, Homo sapiens
gagcccgccgccgccgccaccacccacccggacacagacagcgcacgaaacacacaaagaaccaccaccgggaggaagccagac

SEQ ID NO: 117291 - RNA, 59 nt, Homo sapiens
ccaaccccgacacggcgagggcgccacggcagggggaaaccacaagaacggggaaccgg

SEQ ID NO: 117292 - RNA, 76 nt, Homo sapiens
ggagaacccagcccgacgggaccagagacaagaagccccagaggagacaagcaggccagaggaaccccagaccagg

SEQ ID NO: 117293 - RNA, 95 nt, Homo sapiens
cccaaggccacagcaagggccgccacaagagcacgcggaaccaaggccaggcagcgaacaaagcacaaaagagaccggccagaggcaaagcaagc

SEQ ID NO: 117294 - RNA, 80 nt, Homo sapiens
gccgacggcgaagaaaggggagcgaggaaaggggcggccgaggccagcccgccaaggagcacccccggggcacccccgcc

SEQ ID NO: 117295 - RNA, 72 nt, Homo sapiens
gcaaaagcaagaccaaagaagcgccagcagcaagcaccaacaagagcagacagcagaggaaaaccgggacga

SEQ ID NO: 117296 - RNA, 57 nt, Homo sapiens
gaggaaggaaggagcgcagcgaacgcagacccccaaaggagacagaccccacagaga

SEQ ID NO: 117297 - RNA, 96 nt, Homo sapiens
acacagcgggagaaccaccccaccacgcaacccgcagaggagacaggcgggcaaaacgccgagcccgagaacgaccccagaaggaaggagcgaggc

SEQ ID NO: 117298 - RNA, 35 nt, Homo sapiens
ccaaaggcagcggagggcagccccgggcaaccagc

SEQ ID NO: 117299 - RNA, 72 nt, Homo sapiens
gaagagcagagcgaagaaaaaacccagcagcaaggcagaacacgaccggaaggagcagaagcaaccgagcca

SEQ ID NO: 117300 - RNA, 77 nt, Homo sapiens
ccagagggaagcaaagcagccaacaccagaagaagggacaaaagcccagaaaccccgaaggccaccgccaccacccc

SEQ ID NO: 117301 - RNA, 79 nt, Homo sapiens
gagacacagacgcacccaaggggccgcccaaagcgagcgacgccaccagagcagggcaggagccaggaccaggaaggaa

SEQ ID NO: 117302 - RNA, 77 nt, Homo sapiens
cagcaaagaacgcaggaacagaaaaccaaacaccacaggccagaaggggagcgaacggagagcgcaaccaacccacg

SEQ ID NO: 117303 - RNA, 74 nt, Homo sapiens
agcgccgccaggcccgcaggaccgccggagacagggcaagacgccagaaagagggcaacggccgacgaacaccg

SEQ ID NO: 117304 - RNA, 75 nt, Homo sapiens
cgacaccacagcgacaaccggcgaaccacaggagaaagcaccaggggcgggaaagaaaggaagaaaacaggggga

SEQ ID NO: 117305 - RNA, 84 nt, Homo sapiens
gccgggagggcccgccagccgcgcccggcgccacgggacacggaaccaggaggagcggagcgccgcgcgcccaggccaggacgg

SEQ ID NO: 117306 - RNA, 69 nt, Homo sapiens
aaagcaagcacagagcacaccaaagcccccaaaccggaggaaaggccacccagacaccggcggcgggag

SEQ ID NO: 117307 - RNA, 35 nt, Homo sapiens
gaagaacccacagaggaaacggcgacggccagcgc

SEQ ID NO: 117308 - RNA, 67 nt, Homo sapiens
aaaggaagagcaaccccagaaggcaacgcgccgcaaaacagaacgcggccaccccgccaggcaagaa

SEQ ID NO: 117309 - RNA, 58 nt, Homo sapiens
accgccacccaggcccaagaagcggccgcgagaaccgggcagagcagcccggcgcacc

SEQ ID NO: 117310 - RNA, 69 nt, Homo sapiens
ccgagaacagccaaggcggcccgacaccgccacccccagcaggaaagaagaagacaagagcagacgagg

SEQ ID NO: 117311 - RNA, 68 nt, Homo sapiens
aggagcacacaacaaaccggagggaggaccagccgcaagccgccaccagccagcaggaggccagaaac

SEQ ID NO: 117312 - RNA, 83 nt, Homo sapiens
cgcggcgcccggggaaagccgggccccgagggcggaccgaggcagacccaggaaaagcgcaagcaacacagaggaaaaaccca

SEQ ID NO: 117313 - RNA, 81 nt, Homo sapiens
cccacccggagaaccccacggagaaccagaggacacggcaaagagaccccccaggggacagaaggagccgagccggaggag

SEQ ID NO: 117314 - RNA, 38 nt, Homo sapiens
gggcggcgagacaaaggcgacgggaagaaaacgccaga

SEQ ID NO: 117315 - RNA, 70 nt, Homo sapiens
cggccgagaccgaacagcggaggagcggacaacccagagagaaacgccagaccacagcggagagaggaca

SEQ ID NO: 117316 - RNA, 83 nt, Homo sapiens
accagcccgcgggccagcaccaggaggacggaagcggagccccccccacaggcaaggaagacgccgagacaggaaggccaggc

SEQ ID NO: 117317 - RNA, 53 nt, Homo sapiens
caggaccccaggcgagacaacaaagccccaacaaaccagaacacacaagaacc

SEQ ID NO: 117318 - RNA, 80 nt, Homo sapiens
cgaggaggccggaggccgccgacgaccggaagggaccacagaccagcacgccggcgccacgaaccgagcgacaggacggg

SEQ ID NO: 117319 - RNA, 61 nt, Homo sapiens
gaacgagagcaacacggagaagaacacaaaacagacaaaaagcaaagaagcgggagaagcc

SEQ ID NO: 117320 - RNA, 75 nt, Homo sapiens
aaggccccggaagcaacccagaaacccagggaaagcaacggcgcaagcggcggcggcgggcagaggacacacaga

SEQ ID NO: 117321 - RNA, 81 nt, Homo sapiens
ggaagagaggagcgaccagacggcaggaggccgagcaacaagaaccagacgagcacaggcaccaggacggacgggaacagc

SEQ ID NO: 117322 - RNA, 73 nt, Homo sapiens
ggccggcgagaggaccaacggagcgcgaggcgggcgcggagaagcgcggagggcggagaacggaaaagcacca

SEQ ID NO: 117323 - RNA, 78 nt, Homo sapiens
cagccggggacaagacccaaggaggaccggagaaagaaaacagccaacagcgaggaagaacagaaaaagaacaagacg

SEQ ID NO: 117324 - RNA, 77 nt, Homo sapiens
agagcgcggacacaccgccaagagagcccaggccgagccccaccgcgagcgcgcccacaacgaggagcgccaggggg

SEQ ID NO: 117325 - RNA, 65 nt, Homo sapiens
aggaggaaaaaaggagcaaaaggaacacagggacgccgagggaaaggggaccaccgaccgacaag

SEQ ID NO: 117326 - RNA, 55 nt, Homo sapiens
aagagcaacagcagggcaacagacccccaggcaaaccgccccgcagcaccacccg

SEQ ID NO: 117327 - RNA, 68 nt, Homo sapiens
gaagggcacagcacacgaaggcgccaaagggggaacaaacgacggggaaaagagaggagaccacccca

SEQ ID NO: 117328 - RNA, 50 nt, Homo sapiens
ggggaaccgcccgaagcacggccgccagaaccagagcccccacagggagc

SEQ ID NO: 117329 - RNA, 95 nt, Homo sapiens
gccaaaagaagacgcaaaacgaggaaaagagagccgacagaagagccccaaagcgcgcaagacgcaacacaaacgagaaagacagcccgaacgga

SEQ ID NO: 117330 - RNA, 77 nt, Homo sapiens
cccagaaaaggagaaaaagaagccggccggacaggagagagaacccaccgcaagagaccaaaggccaagagcaccgc

SEQ ID NO: 117331 - RNA, 64 nt, Homo sapiens
cccgcccgcccccggcacaggacagcagaccacagcccggcaggcccaaaaacccaaagggaca

SEQ ID NO: 117332 - RNA, 73 nt, Homo sapiens
cagagccggggaaggcaagagcgaaggagaaaggcaacaaggcccgagcggggaacacgagagccacaggcac

SEQ ID NO: 117333 - RNA, 78 nt, Homo sapiens
agcaggaggcgacggcggagcggaggaggcgccagcagcccggagaaaaggcgacggcggagacagaagagaggagag

SEQ ID NO: 117334 - RNA, 85 nt, Homo sapiens
ggcaagcaccggaagcaccccggcggccgcggaagcggggcgcacaccaccggacaaccgacaaaagggagagagacggacaggc

SEQ ID NO: 117335 - RNA, 76 nt, Homo sapiens
cggaagacaggccacccagcggggagcacggcgagcagccaggccaggagagccaaagaccacgggggccaaacac

SEQ ID NO: 117336 - RNA, 61 nt, Homo sapiens
aacgcccaccagcaggcccgaacccccaggccacagaggcagaaggagaaggaagcgcaca

SEQ ID NO: 117337 - RNA, 70 nt, Homo sapiens
gagcgacggggaggcgcggccaacggggccacaagggaaccggggacccaggaaggggaaaaagagagaa

SEQ ID NO: 117338 - RNA, 85 nt, Homo sapiens
accgggggaaccgccgccccggccggacccgacccgagccaccaggacacggcagaaccaggcccaggccagagcccgggcagca

SEQ ID NO: 117339 - RNA, 58 nt, Homo sapiens
gcgcggaccagaccggaacgcccaagccccaccgcgaggcacaggaagagggcggcac

SEQ ID NO: 117340 - RNA, 78 nt, Homo sapiens
agaacaaccgggcgccgacgagacggcggagccggagcgaggcgggggaggcagcagaagcccgcccccgagagcgac

SEQ ID NO: 117341 - RNA, 67 nt, Homo sapiens
ccaacccgcgaaagcaggaaagggcaaaagcggcaaagggaaaaaggcggaaaccgaagaaccagcc

SEQ ID NO: 117342 - RNA, 81 nt, Homo sapiens
aaaaccaacacccacagcggagccaccagagggaaacagcaggaagggccaagaagcaaaggaaccagagagggacccccc

SEQ ID NO: 117343 - RNA, 67 nt, Homo sapiens
accgggcacgggccaccgggaaacgaccggaccgcccaacccagcagccaccccccccacgcgcacc

SEQ ID NO: 117344 - RNA, 70 nt, Homo sapiens
cagcgccgagccacgcgcagcagaacacaaagcacgcggcagggaggaggcaaccggagagcgacccgcc

SEQ ID NO: 117345 - RNA, 61 nt, Homo sapiens
cgcagaagacgccgacgagggcagacagcaaaggaaacagaagccgcggcagccaggagcc

SEQ ID NO: 117346 - RNA, 72 nt, Homo sapiens
gaggaagaccagaggaagcgacagagagaggcaggcccagcacgacagagacccggaaagcgagcagcaaag

SEQ ID NO: 117347 - RNA, 76 nt, Homo sapiens
gcgccggggacgccaccggggacaaagcgggaacccccgaaaagaaggagaaaggaacccaaaggcccaagagaac

SEQ ID NO: 117348 - RNA, 96 nt, Homo sapiens
gcacaggcaagcaacaccacacaccaaaaaaggcagagagacgaagagagaagcagggcagaaagagcggaaacgagaagagcaaacacaacagaa

SEQ ID NO: 117349 - RNA, 77 nt, Homo sapiens
ggaagagaagaacagacaaggaaaaacaccaaggaggagcaggacaagccgagaagggaaacgaggggagccggaag

SEQ ID NO: 117350 - RNA, 72 nt, Homo sapiens
agaccccggccgccgaccgcggccccgccggccgccggccgcgcggggggaacccggcaccagccgggcaaa

SEQ ID NO: 117351 - RNA, 76 nt, Homo sapiens
agagaagaaacaagaagcggcaacacagcacaagcaacgaccagaccaagaagaagcagggaacccaggggcggaa

SEQ ID NO: 117352 - RNA, 75 nt, Homo sapiens
gcccgagggggcaggccggacccaaagccggagcggaaaagacccagagccggaccccggaggggcccccccgcc

SEQ ID NO: 117353 - RNA, 73 nt, Homo sapiens
cgccgccgaagaagcacgaaagccccacccgccgcagcaagcagaggaccgcacagacgggggccgggcggcg

SEQ ID NO: 117354 - RNA, 81 nt, Homo sapiens
acagagagaacaggggcagaacagaaacagagccgacaaaaccgagggacggcaaaacagaacagaaaggcggagaaaaaa

SEQ ID NO: 117355 - RNA, 77 nt, Homo sapiens
gcggaggacacgggggccacaaagccccccggagacgcaaccaaggcacagcccagccaccggaagcgcgacagcac

SEQ ID NO: 117356 - RNA, 71 nt, Homo sapiens
gaccccagcgcgaccccggcaaacagaagacgggcaaaagagcggaagaaccaacgacagaagacggagcc

SEQ ID NO: 117357 - RNA, 80 nt, Homo sapiens
cacggaagggacacgaagcagcagaagcccagggcggcccccacccagggagagggacccaaccgagcggaagcgggagc

SEQ ID NO: 117358 - RNA, 79 nt, Homo sapiens
aggagagcacaaccacgcagggaagcccaggggcagccccaaggccccaaccggacccggagccccaggagaccaggga

SEQ ID NO: 117359 - RNA, 37 nt, Homo sapiens
caaaagaaagcgggaaaagggaaaccgccggggaaag

SEQ ID NO: 117360 - RNA, 87 nt, Homo sapiens
cgagcgcggggcgggcaggcgagcgcggcggcggcggcgagcgggggcaaagaaaaaggagagaaaaagaggcaaaacaacaagaag

SEQ ID NO: 117361 - RNA, 64 nt, Homo sapiens
aaacagaggcagcaaaagagcaaggcaacaacagagggaaaaaccaccaaacccgaaaagagag

SEQ ID NO: 117362 - RNA, 76 nt, Homo sapiens
aaccaagccgaaggaaaggcagaacgccgaacaggagcaacaggaaaacccaagcagacacaacaaaccagaaacg

SEQ ID NO: 117363 - RNA, 71 nt, Homo sapiens
accacgaaggaccgaagaggcaaccagacacacaaccaccagaaggagagaagaacagaagccagagcaga

SEQ ID NO: 117364 - RNA, 56 nt, Homo sapiens
aggaggcggcgggccccgcccgccgaaggaggaaaggcaagggcagaaaagagggg

SEQ ID NO: 117365 - RNA, 76 nt, Homo sapiens
gaccccgcgcagcggcccggcggggcccggcaccaggaccaccgcggcagcacgcggcgaaaggggccagaagagg

SEQ ID NO: 117366 - RNA, 83 nt, Homo sapiens
cgagagagcaaaagaggaccaagaaaggcccagggaccaaagcccggacaaggcccgagcaccaggaccgcagaaggccccag

SEQ ID NO: 117367 - RNA, 80 nt, Homo sapiens
acgcacaacccagcgggaaaaacagagcgccgaggggaagaagagcgcaccgaaggcacaagggaaaccagaacaaaagg

SEQ ID NO: 117368 - RNA, 77 nt, Homo sapiens
caaggcacgcgcgaagggcaggcgagccggcccaccagacccaagcagcgggaccccacaccagccagggaacaacg

SEQ ID NO: 117369 - RNA, 56 nt, Homo sapiens
cgggcaggcaggggagcaaagagaccggaaacgagagaaacgaagacgaagaaaca

SEQ ID NO: 117370 - RNA, 79 nt, Homo sapiens
caaacggcaaagggagagcaggcggggcaagcaggcagaacggcagaaggaacaacaggcccagccaaggacccagagc

SEQ ID NO: 117371 - RNA, 72 nt, Homo sapiens
cagcccaaagaaaaaagggacagccaacggcgacaagacaagccaggcagcccagacagcagggccccgagc

SEQ ID NO: 117372 - RNA, 31 nt, Homo sapiens
cagacgcagggcgcccccggcacaacgaagc

SEQ ID NO: 117373 - RNA, 76 nt, Homo sapiens
cgcgcggcgcggccccgacccccgcccggcgccggcccgggccgccagggcaggccgcagccaagccggaacagga

SEQ ID NO: 117374 - RNA, 82 nt, Homo sapiens
cgaaaacaccaggaaagacaggagaccaaaaaggaaaagcaacggcgcaagaggcggggcgggcagaggacaccacaaagca

SEQ ID NO: 117375 - RNA, 66 nt, Homo sapiens
cacgcggggcaccccggaaccgggccaaaaaccacaggagaaaagaggagaaggcagaagagaaag

SEQ ID NO: 117376 - RNA, 81 nt, Homo sapiens
gcgccggaggaccagacccaggagggggacacaggcaaaacggacaaagaccgcaaaaagacccgaacggaaagccaaacc

SEQ ID NO: 117377 - RNA, 70 nt, Homo sapiens
aacaagcacggaggagggaacccacggagacggcacacaacaaagaagaaaagggggaaaagagaaaccg

SEQ ID NO: 117378 - RNA, 79 nt, Homo sapiens
aagccccaaagccgcacccacggcacgaaagccaccacaagcggggcgggcgccccggccgcacggcaggggacaaagg

SEQ ID NO: 117379 - RNA, 79 nt, Homo sapiens
gggaaggccggaagaagaaaagagaggccacgaaagcgagaagcaaagaacgcaaaaacgcaaccagccaggaaaaccg

SEQ ID NO: 117380 - RNA, 54 nt, Homo sapiens
gacgggggaccaggcccgggcgggggaggcagaggcgaaccggaaaggaccggc

SEQ ID NO: 117381 - RNA, 69 nt, Homo sapiens
gacaacaggcaacacaaaaagaccaaagacaccccagcaagcagaaggaacaagagcaaagaccaagag

SEQ ID NO: 117382 - RNA, 74 nt, Homo sapiens
ggcagggcggcaacaagaggagaaaaggaacccaaacagagccacccccacccaagagaccacccaagaagacc

SEQ ID NO: 117383 - RNA, 76 nt, Homo sapiens
gacccgccggaggaacccccccagcaaacggaccccgccagcccggcgcggggcgcacacacagagccgccagcca

SEQ ID NO: 117384 - RNA, 78 nt, Homo sapiens
cgaacagcgcagccccagaacccggaaggccaggaaacacgaggagcaaacccgcaagaaaggaaacgaaaagagaca

SEQ ID NO: 117385 - RNA, 78 nt, Homo sapiens
aaaaaaaggaacaaccagacagaagagagcaccaaaaccaggagaaaccaagcaggcacagaagaaagacagaaccaa

SEQ ID NO: 117386 - RNA, 84 nt, Homo sapiens
gcagggaacgagggagacgcgcacaagcccaggagaaacaacaagaggaacacggagacaaccgacaccggagcccgcagccaa

SEQ ID NO: 117387 - RNA, 79 nt, Homo sapiens
aacgccaacacagaaacacgaagaagagagacaaccaaaagacacaagggcacgaaagagaacaccccaccagaccacc

SEQ ID NO: 117388 - RNA, 69 nt, Homo sapiens
cgcggggcgggcccaggcccaacaacccccaaggacgccccgaggccagcgcgaaaccaagaagcgcca

SEQ ID NO: 117389 - RNA, 73 nt, Homo sapiens
ggacaagccagccgcaagacgcacggcaagaagccaaacccggcaccgaggcacgaggacagggccacaggcc

SEQ ID NO: 117390 - RNA, 36 nt, Homo sapiens
ccgccgccgagggcccggaccgacaggagcggaccc

SEQ ID NO: 117391 - RNA, 79 nt, Homo sapiens
cgaggggacggacaacccgacgaggaacgaagggacaagacccgccagaacaggagagcccccccagcaggaaaagacg

SEQ ID NO: 117392 - RNA, 70 nt, Homo sapiens
gcgaagcaccaccaaagggaagcaaaaaaacgcacgcccagagcaacgccagaaaaaggagaccaagcag

SEQ ID NO: 117393 - RNA, 52 nt, Homo sapiens
cgaaaacaccagccggcccaagcgggcccccgacaacggcaagcggagaaga

SEQ ID NO: 117394 - RNA, 89 nt, Homo sapiens
cacggcacgggaggacccagggaggaacccacaggacaaaacagcaagggccgggaggggcccagcacgggcgccaacacgcgaacagg

SEQ ID NO: 117395 - RNA, 83 nt, Homo sapiens
cgaccccgacaggcaccggaagcaccaagccgaaaggagagaaaggccagcacgggggaacaaagggaccggaaaggagagag

SEQ ID NO: 117396 - RNA, 86 nt, Homo sapiens
gggaagggggagcgagaagagcccacagaacgggagaaagggagcggcagccgaggcgccgggaaacacaccacgcaaccaagccg

SEQ ID NO: 117397 - RNA, 75 nt, Homo sapiens
ggcgcaggagcacggagccgccgccgaaccgccaagacccagccccccagccggggggccacaagcgaccaacaa

SEQ ID NO: 117398 - RNA, 76 nt, Homo sapiens
gcgcccgcgccggcgggcccgccgcgcgccgcgcgggacgacaggccagcccacagggccaccggggcccgggaag

SEQ ID NO: 117399 - RNA, 76 nt, Homo sapiens
gagagcgaaccccgggacacgcaggaacggcccagcacaagaccgcgacagaaccagcaggcgaagacgcaggaga

SEQ ID NO: 117400 - RNA, 57 nt, Homo sapiens
caaggaaagcagaagacaagagagacacagcccgcacggagaaggcaaagcaggcga

SEQ ID NO: 117401 - RNA, 76 nt, Homo sapiens
cgcccggacaacccgggcaggagaaacccagcgggcccagagacgcagcgggaaaaccaaggcaagccaggcgagg

SEQ ID NO: 117402 - RNA, 42 nt, Homo sapiens
agcagaggacaacagaacgccaggagcaccccgaacgagacc

SEQ ID NO: 117403 - RNA, 76 nt, Homo sapiens
accgcggggggaacccgaggaaaaacgaaagaagccacaccagcaaaaaacaaacagagagcaccacccagaagaa

SEQ ID NO: 117404 - RNA, 67 nt, Homo sapiens
gcgggaccaccggcaccaccaaagaggcacccagcgaccgggcagccagaacagcacacagcaccgg

SEQ ID NO: 117405 - RNA, 73 nt, Homo sapiens
ccaaaaggcacaaagcaccacccgaaggcccaaaccccgccagagccgacgggcaaggcaggaagaagagaaa

SEQ ID NO: 117406 - RNA, 56 nt, Homo sapiens
cacaaggacgagcgacaagaagacgaagaagagcaggacaggcgcggggaccccag

SEQ ID NO: 117407 - RNA, 84 nt, Homo sapiens
gcccggaccagccaagccccaacggcccccgcgccgggcgcagcggaaggacaagccccgcggaaaacaaacgccaccagggag

SEQ ID NO: 117408 - RNA, 83 nt, Homo sapiens
gggcggcacggggcgggggcaagggcgcccgcggggaagaaggagaaagggccaaccccgaagaagcaaacagaaacgaagga

SEQ ID NO: 117409 - RNA, 39 nt, Homo sapiens
aacccggacaagagaccaggagaccaagacacaccaccc

SEQ ID NO: 117410 - RNA, 73 nt, Homo sapiens
gaagacccaacacgcagacgcccaacagaggaaggcagcaggagaaacgagaagaaacagacgcgcgagggga

SEQ ID NO: 117411 - RNA, 78 nt, Homo sapiens
gggcgggcgacccgcgggggagccaagaccgccggaccgaaaaaaagcggacagagggcgagagccagaagcagacgg

SEQ ID NO: 117412 - RNA, 61 nt, Homo sapiens
ggcagccagcagggggaggcccaccagcccggccgggcgaggacaagcagccagcgccgca

SEQ ID NO: 117413 - RNA, 91 nt, Homo sapiens
caggagggacccagagcgaacgcaacagaacagagcgagcgcagcagcagcccaggaacaggacaccaggagggcgggacacgcagaggag

SEQ ID NO: 117414 - RNA, 59 nt, Homo sapiens
gccaggccgcccggagcggcgacgaggggcgccacacgcgcaggggccgcaaggccagg

SEQ ID NO: 117415 - RNA, 80 nt, Homo sapiens
gaggaaggggaaacgggcggagccagcaggaccgggagacagggacccggagagaggacccagggcggcagggagcagcc

SEQ ID NO: 117416 - RNA, 71 nt, Homo sapiens
cagggcgcgaaagaagacagaggccccgcccgcccggcagccaggagccaccgggcgcacagagggaagcc

SEQ ID NO: 117417 - RNA, 84 nt, Homo sapiens
gagcagaaccgcgcagcagaagagaacagaaaggccccggagcagcgcgacccccaggaaacacgaggcagacggcggccacca

SEQ ID NO: 117418 - RNA, 65 nt, Homo sapiens
cccaggagccggagcagcggcacgccgaaacaaagacagagggagaggaacaaaagaagagaggc

SEQ ID NO: 117419 - RNA, 55 nt, Homo sapiens
gcgcggcgccgggcgcgacgagacaggaagggaaggggcggagacgggcggaacg

SEQ ID NO: 117420 - RNA, 79 nt, Homo sapiens
gcaggaccaggcagccagaccaggcccgggagaagaccaccacagcggcagaaaccagcaggagccaccggaacgacgg

SEQ ID NO: 117421 - RNA, 84 nt, Homo sapiens
cacggccaaccgccacgacagcccaccaggccaccacgcggcgggccgggcaaaagcagaccggaaaacccaccggcaagacca

SEQ ID NO: 117422 - RNA, 52 nt, Homo sapiens
cggcgagcagcaccagggcccaggcaaccaaacgggcgaacaaaaccagcca

SEQ ID NO: 117423 - RNA, 74 nt, Homo sapiens
accagaccggggggaaaggcgcggggagcgcaaggccaagaaagaagcaggagaggcaccacacagagcacagc

SEQ ID NO: 117424 - RNA, 75 nt, Homo sapiens
aaggggaggaggggcgcccgagaaggggacggcgggcgagggaggggaccgccgcggccggcaagaagccaacgg

SEQ ID NO: 117425 - RNA, 77 nt, Homo sapiens
ggcaggcaaaccccgccagggccaccagaaacgagggaaagggagcagcaccggccacacccacagcacgaccggaa

SEQ ID NO: 117426 - RNA, 33 nt, Homo sapiens
cagacacaacgccggcgccccggcaaggccacc

SEQ ID NO: 117427 - RNA, 67 nt, Homo sapiens
caagcacacacaccaccggcgggaaccgaacaagacagaaagcgggacgcgcaaccccaggccagac

SEQ ID NO: 117428 - RNA, 70 nt, Homo sapiens
gcggccaggcgacgggaagcgaccgcaggcgggcccccgaccggcagccgcgaacccccagaaccgaaac

SEQ ID NO: 117429 - RNA, 72 nt, Homo sapiens
ccagaggcagccagcagggggaggaagacggcaccaggcggccaggggaccgccaggcaaaggacgccaccc

SEQ ID NO: 117430 - RNA, 73 nt, Homo sapiens
aagaccacagagggacccggacaaccagaggcagccagcagggggagccgcagaccaggcaagcccaggagca

SEQ ID NO: 117431 - RNA, 69 nt, Homo sapiens
ggcaacagcagccgcaaaaacaaggcggaaacaacgggcaagggcaggacgcaccaacccaaaaacccg

SEQ ID NO: 117432 - RNA, 52 nt, Homo sapiens
ggagcgccacgcgcggaaggcagcgcccagcagcgcagcaggcccgcgcggg

SEQ ID NO: 117433 - RNA, 82 nt, Homo sapiens
cgacgcacgggggaccaagggcaaaggcacaaaggccggccgagcaccccgcgccgcgccagcgcggcaccaccggcggaca

SEQ ID NO: 117434 - RNA, 69 nt, Homo sapiens
acgcccgccccaggaaaggccgagggcaagaagaccggaaggagagaaagccagaccggaaaagaagaa

SEQ ID NO: 117435 - RNA, 79 nt, Homo sapiens
cccgcggcaacggcgccggcaggcacaacaaccaagaaaaacgggggccgccgccaagacaggaagggaaggggcggag

SEQ ID NO: 117436 - RNA, 82 nt, Homo sapiens
ggacagcgccagaagcagaggcgcaaagaagcgaaacacccaggaacagcggaggaggacagaagcacccaacaggacgcca

SEQ ID NO: 117437 - RNA, 77 nt, Homo sapiens
ccgcaggcggcggcagccgagggcgacggcgacccggaggagagcccgcccgaggggcgaacagggcaaaaccccac

SEQ ID NO: 117438 - RNA, 60 nt, Homo sapiens
ggaaccagacagagaagcccgagggacccgcagccacaaccaggaggagagaagagaaag

SEQ ID NO: 117439 - RNA, 72 nt, Homo sapiens
aaacggagaagacaccacaagcaacacaagaacaggggcgcggggcggacacggaaaaagggcagcccaggg

SEQ ID NO: 117440 - RNA, 103 nt, Homo sapiens
gaaaggaagaaggaaaacagccagcaagaccgccgaagaggccagaaagcggcaaccggccagcaaggggacagccaccaccgacccagaaccagccccaggc

SEQ ID NO: 117441 - RNA, 62 nt, Homo sapiens
acagcaggaaccggccacagcccaaagacgccgccagccaccggcgcgaagccagaccagac

SEQ ID NO: 117442 - RNA, 88 nt, Homo sapiens
caccgagaaagaaaccagaggaagaggaaagaaagaagaggagggaaggccccaggagaacccggaagaagaggaagaggaaggcaaa

SEQ ID NO: 117443 - RNA, 92 nt, Homo sapiens
gggcggggccgagcacgcgcggcgcagaaaggccggcgcggcaggcgaggagaaagcggcgcgcggaggaggccaacgcaaaaaccacagag

SEQ ID NO: 117444 - RNA, 56 nt, Homo sapiens
ccagcaacaagccggacgcccagcacacagaccaggagagagagaaacaccgaaaa

SEQ ID NO: 117445 - RNA, 68 nt, Homo sapiens
cacagcgcagagaacgaagaagcaggaaaaaaaacagacaaaacagaaaagagagaaagaagcgaaaa

SEQ ID NO: 117446 - RNA, 77 nt, Homo sapiens
acaaacggaacagccgacaaaacgaagagggaaacagccacaagggaagagaaagccaaacccacccccgggcaggc

SEQ ID NO: 117447 - RNA, 75 nt, Homo sapiens
cggagcgcgcgcggccagcgccaggggcaggagagagacagcggacgggagaccgagccacaccacgcgcaggcc

SEQ ID NO: 117448 - RNA, 71 nt, Homo sapiens
gcgaagccaaagcagcacgcgaggaggaaaggcaccccaccaggaagaccgcgggaggccgaagacacagg

SEQ ID NO: 117449 - RNA, 59 nt, Homo sapiens
ccgaccgagacgggcggagaggagaaggggagaagggccggagagcagagaccaaaacg

SEQ ID NO: 117450 - RNA, 68 nt, Homo sapiens
aagagcaggcgacacgcaggaggagaaacacaacggaacaagcagaaaaagacagcacaaagacgaag

SEQ ID NO: 117451 - RNA, 68 nt, Homo sapiens
gaaggaccaagaaccagccagaaaaccagggaaaaagagggaggggccccaaacacgcaaagaaaccg

SEQ ID NO: 117452 - RNA, 74 nt, Homo sapiens
agccaaggacgcgacaaaggaccagccagaaaaggcagacagagacggagaccgccggccaggccaacccacca

SEQ ID NO: 117453 - RNA, 77 nt, Homo sapiens
gcagaccggggcacggcaggggcgggccaacacgcgggggacagacagcagagcccaacgacagggcacacgcagcc

SEQ ID NO: 117454 - RNA, 81 nt, Homo sapiens
ccccgagagcacccccgcagggggcagaggcgcagggggagggggccgaggcagcgacggaaagagagacgggggcaccag

SEQ ID NO: 117455 - RNA, 92 nt, Homo sapiens
cacaagcaggccggcacagccgcggagcggacccagcaagacgaaacagacgcacgccgaaaaaaaacgaaccaggggagaaaaccagagca

SEQ ID NO: 117456 - RNA, 79 nt, Homo sapiens
cgcaagaacagaagaagaaagcagggggacgcaaaggccaaggggcggcaaaaagaagcgcgaaggcccggccagagga

SEQ ID NO: 117457 - RNA, 71 nt, Homo sapiens
gaagagcgcagaagccggaagagagccaagccaggcccagcagccgccaccgggaaaaagaccgagaagcg

SEQ ID NO: 117458 - RNA, 57 nt, Homo sapiens
agaacggacacagccaaggagcccaaaaagggaaacacaaagaagacaccagaaggg

SEQ ID NO: 117459 - RNA, 72 nt, Homo sapiens
gggcaaaaaacagaaaaacgaccggacagcggagagagaaaccaagaagccgccagaggcgggaggccaagg

SEQ ID NO: 117460 - RNA, 75 nt, Homo sapiens
ccggcaacaggcgggcacggcccacggccggcgcacccgcacaggggaacggcagcgagcagacaggggccccac

SEQ ID NO: 117461 - RNA, 66 nt, Homo sapiens
cgacggcaggggaaaaacgaggccccccaaaggcacaagaaaccaagaagaaggagaagaggaaag

SEQ ID NO: 117462 - RNA, 79 nt, Homo sapiens
agaaagcaccggaagaccccgaaggaaaaggaggaacgccggcccgagaaagcccgccagcaggccaaacacacaggaa

SEQ ID NO: 117463 - RNA, 69 nt, Homo sapiens
aacaaccaaggacaccgaacgaagacccccaggggacaagaaccagcagaacagaaaccccaagagccc

SEQ ID NO: 117464 - RNA, 88 nt, Homo sapiens
cagacacaagccagacccaggagagcaaggcccagaaagagggcggcgacggcggcgcgaggaccgaccgggcccgcggacgaagaag

SEQ ID NO: 117465 - RNA, 55 nt, Homo sapiens
aaccaaaccacccagacaagccacccaccgagcagggacagaggacgcagaaaac

SEQ ID NO: 117466 - RNA, 38 nt, Homo sapiens
aaaaccgcccaaacaggaaaggcaggaagggccacggg

SEQ ID NO: 117467 - RNA, 69 nt, Homo sapiens
cagcgcagagggaaccagcggacgcggaggcccaaccgaagaaaacaaggagaacaaccgcaacgaaca

SEQ ID NO: 117468 - RNA, 39 nt, Homo sapiens
caggcccacgggaaaagccaaagaagccaaagccccaga

SEQ ID NO: 117469 - RNA, 81 nt, Homo sapiens
ggcccccccccagggccaggcgccgccagaacgagggagaccaaccgaaggacaagggaaggagcagaggcaaagagcgac

SEQ ID NO: 117470 - RNA, 80 nt, Homo sapiens
cggcaggggcaggccaggaccgacagcccccacaaggcacaggcgcgagaggagccccaagagggggacccgcaggggcc

SEQ ID NO: 117471 - RNA, 78 nt, Homo sapiens
caggcacaccccacacaagcacgccaagggggaggcccggaacacggggaggagacgacacccgccaggccacgcccg

SEQ ID NO: 117472 - RNA, 75 nt, Homo sapiens
gggggaaacaagcagaagaacgcagaaagagacacaccgacgaaaaaggaagaaaaggacccccagagagcaaaa

SEQ ID NO: 117473 - RNA, 62 nt, Homo sapiens
gcgcggcgcggcggccgggccccgagacggggacgggcaggcgccccaacccaagccagagg

SEQ ID NO: 117474 - RNA, 118 nt, Homo sapiens
gggaggcaggacacaccacagcaggcgcaaacaccaagagagacgcccggagcggaacccgcccaggacccgccaagcccgccaccgcacacgggaggcccacccccgcgcagcccac

SEQ ID NO: 117475 - RNA, 66 nt, Homo sapiens
ggaaccacgccagcggaacgaaacacacaagacaaggaaaagcaagaacggaaaagaaaccaccgc

SEQ ID NO: 117476 - RNA, 72 nt, Homo sapiens
acggagacagacacagaccaggccagcaccggggggaagaagaagggaacaagcggagggacgcacgagaac

SEQ ID NO: 117477 - RNA, 97 nt, Homo sapiens
gcgcacagagaacggcacccaggccaggcaccggccgccaccagggcacgaaagcaaggagaggccaccaaggagaagcgcaggcgaaagaccacaa

SEQ ID NO: 117478 - RNA, 56 nt, Homo sapiens
ccgcgcaccgcagcgccggggcacgacacaaaaacagacccggacccccacaccgg

SEQ ID NO: 117479 - RNA, 74 nt, Homo sapiens
ggaaaagaaaccaaccgaaaagcccggcgaaaaacagccaagagaaaggagggcaaacagcaacgaagccccga

SEQ ID NO: 117480 - RNA, 71 nt, Homo sapiens
agagccccgcgggccccagcaaaggggggagcgcagcaggggccggagggcccacggggccgccaccaggc

SEQ ID NO: 117481 - RNA, 70 nt, Homo sapiens
gggacaggaaggggcagacaagcacgccgcccagacaaccagccagaggacagaaagcagagcaccccac

SEQ ID NO: 117482 - RNA, 71 nt, Homo sapiens
ccccccagcggcacgcagccccgcggcacaaccagaccaccaaagaaggcagacgcggcaccgcacagccg

SEQ ID NO: 117483 - RNA, 67 nt, Homo sapiens
ggccccgcgaccggggcccggggaaggcccgcgcccgccccaggcggaagacccgagacggcgcgag

SEQ ID NO: 117484 - RNA, 71 nt, Homo sapiens
ggggagaagacgcggcggcgggcggagaacggaaaagcaccaggaagcagagaggaccgcagaagggaagg

SEQ ID NO: 117485 - RNA, 87 nt, Homo sapiens
gagcgcgaaacgcacgagaagcacaacagcgaaagcaagagacccaacagaaagaacgagcaacagagagcagccccaagcagaaga

SEQ ID NO: 117486 - RNA, 71 nt, Homo sapiens
acaagagcagccccagcgcccacaccgccagccacacaaaggcggcgagaccaggcgcaagagggaacacc

SEQ ID NO: 117487 - RNA, 71 nt, Homo sapiens
ggacgcgggcacgggaccggcgaggacggggaagagagaaaagaaggaagagaacgagagaccgaaaacgc

SEQ ID NO: 117488 - RNA, 68 nt, Homo sapiens
ccccgggcacagcacgggagaagccccgcacagcagagagcaacccgaaaagaagccgaggccgccag

SEQ ID NO: 117489 - RNA, 72 nt, Homo sapiens
acggaccagaggaaggcagcaccaggaagacaggggaacacccccagagagagcgcgcagaagaaagccgcg

SEQ ID NO: 117490 - RNA, 70 nt, Homo sapiens
acaaggcagcaaaggcacagcgcgggaccagaacccgagaagaccgcaggaaagcaggaaggcaagaaag

SEQ ID NO: 117491 - RNA, 64 nt, Homo sapiens
gcccacgggagcacaccaacaaggcccggacaaagccgaaaccaggcaacagcacgaaaaaaca

SEQ ID NO: 117492 - RNA, 63 nt, Homo sapiens
gccaggaaaagccggccacgcaggagcaaggccgggccgcagggaagcccggaagcagaagcc

SEQ ID NO: 117493 - RNA, 82 nt, Homo sapiens
gaccggacccagagaagaggaaaaccaccgggcaggaccccggaggaaaagcggaagcggcagcggcgaacgccggaacgga

SEQ ID NO: 117494 - RNA, 76 nt, Homo sapiens
gccggggcagggacggacccggagccgggccagcaacagagcgggccggggacggcaaagccagacacaggcaaag

SEQ ID NO: 117495 - RNA, 81 nt, Homo sapiens
acaacaccaagcccacaaggcaccacagacagaccgaaaaaacgagaagacaaacggccccggagcagcaagcagagaccg

SEQ ID NO: 117496 - RNA, 83 nt, Homo sapiens
ccggggcgcggagcgagcagaggcaaggccagcggggcgcccaggaggcaccacagaaccagaagagggaagcacagagaagc

SEQ ID NO: 117497 - RNA, 49 nt, Homo sapiens
ggcccggcccgccgggcccgcaggggcgccggaccgaaggcgcgaccac

SEQ ID NO: 117498 - RNA, 78 nt, Homo sapiens
agagaggcaaacaaaaaacaccagggaacgcaaggcggggaaaaaaaggcagcacacagacgcagcaacgggcacgca

SEQ ID NO: 117499 - RNA, 72 nt, Homo sapiens
aacgggggagagccacggaagccgacagacaaccagagccaaagggaccgggacaggggaagaaaagaagaa

SEQ ID NO: 117500 - RNA, 76 nt, Homo sapiens
gaaagcccaaggcagaaggaaagggacagaggggcgcggcaggggagaagccccccgcggggaagaaccgggacgg

SEQ ID NO: 117501 - RNA, 55 nt, Homo sapiens
cggaaagcaggagcacagcgggccaaggaaagcggagggagccccagaggacggc

SEQ ID NO: 117502 - RNA, 47 nt, Homo sapiens
gcaccgagaacaggcacagagcagaggccaaacggaagagccgaagc

SEQ ID NO: 117503 - RNA, 37 nt, Homo sapiens
gcgaaaaacagcgaccagagcgagagcgagacaaaac

SEQ ID NO: 117504 - RNA, 75 nt, Homo sapiens
acaaaaggagacgaaaacaccggaacaaaaggacggcaacaagaacaaaacacccaacaggggaggcagccgaac

SEQ ID NO: 117505 - RNA, 53 nt, Homo sapiens
gacagcgaaaacagaaaaacgggcgcacgggaggcagagcacgcgccaagggc

SEQ ID NO: 117506 - RNA, 50 nt, Homo sapiens
ggaaccaccgaaagcggcgcaacgagacaggaagggaaggggcggagacg

SEQ ID NO: 117507 - RNA, 73 nt, Homo sapiens
ccaccgccacaaacgcaggccacaaaggggggggaagacaacccggagaacacccaggggacgcccagaccaa

SEQ ID NO: 117508 - RNA, 73 nt, Homo sapiens
aagaagacgagaaaagaacacagaagcaaggcagcaagcgcggcgagaaggaaaaggacaccgcacccagaaa

SEQ ID NO: 117509 - RNA, 51 nt, Homo sapiens
gacggaaagcgaaaccacagcgcaggggggaaaccaaagacagcgacagag

SEQ ID NO: 117510 - RNA, 78 nt, Homo sapiens
cccggacaccacccagaaagaaaaagcggggaaaacaaaaaaaagaaggagggaagagggggccaggaccaggcccca

SEQ ID NO: 117511 - RNA, 81 nt, Homo sapiens
gcggcgcagccccagcccacaggaaaggcgacagcgagggaacaagaggcagaaacaacagcaagaaagaggcccgaaaaa

SEQ ID NO: 117512 - RNA, 77 nt, Homo sapiens
cggccgccggagccgcgaggccaagcaaaagcagaccggaaaacccaccggcaagaccacacccgaggggagcccag

SEQ ID NO: 117513 - RNA, 98 nt, Homo sapiens
cggacccagacccagaggcagagccgccccagcagcaggggcgccaggaaggccgcggacccccccccccccaccccacaggagaagagacgaaagaa

SEQ ID NO: 117514 - RNA, 78 nt, Homo sapiens
aaggacacggacacagcaagagcggcacagggagaacacagggccccaccgcgccccacagaaaacgagcaaagacaa

SEQ ID NO: 117515 - RNA, 78 nt, Homo sapiens
accgcagcaaaggaagcaggcagaaagcaaaaagcacaggggagccagaaagggagcagcaggaccgcagcaacaagg

SEQ ID NO: 117516 - RNA, 72 nt, Homo sapiens
aagacaaagaaaagagagcacaaaggagagccagagcgaacccaagacggggcacgccgggagaaacaagca

SEQ ID NO: 117517 - RNA, 88 nt, Homo sapiens
gaccccggcgccgcggcgacccggaggaaccggcccgcgcccgcccccgggagcccgcacggaggaaccagagaaggagaaacagcag

SEQ ID NO: 117518 - RNA, 74 nt, Homo sapiens
gcggaaggcagcgcccagcagcgcagcaaaggccgcacggaggagagccccgagggcccgggcagagaaagccg

SEQ ID NO: 117519 - RNA, 81 nt, Homo sapiens
cgcgagcccgaggccaggcgccggccggcgcgaagacgcgggggccgccccccgagggccagagcaggaaaaaaaaggcgg

SEQ ID NO: 117520 - RNA, 81 nt, Homo sapiens
cgaccaccgcacacccgacacagcggagcgcccagaggcgagcccggggaggaagagcaaccgcggcagacccagcccgcc

SEQ ID NO: 117521 - RNA, 72 nt, Homo sapiens
cagccagaaaaaacacagccgacagacgccaccaaaagcaccagaggagaacgaaaacccaccaggaaggag

SEQ ID NO: 117522 - RNA, 59 nt, Homo sapiens
ccggccaagggaaagggcccaagcggcacggagcgcccgaacacaagcgcgaaccacaa

SEQ ID NO: 117523 - RNA, 64 nt, Homo sapiens
cgcgcacaaagacaccaaacgcgggcgcgccagaggacaccagacccaaggcgcaagaaaagga

SEQ ID NO: 117524 - RNA, 53 nt, Homo sapiens
gagggacaaacccagccgcgacggagaggcacccggggggaggagggcagagg

SEQ ID NO: 117525 - RNA, 82 nt, Homo sapiens
gaacaacagccagccgagaacacgcaggcgccgcccacagcaggcgcccgccagggaacagccggcagaccgggccagaggg

SEQ ID NO: 117526 - RNA, 57 nt, Homo sapiens
acgacccccccagaggcgggcacacaggcccgagcacaaacacaagaaacgcacgcc

SEQ ID NO: 117527 - RNA, 84 nt, Homo sapiens
gcgagcccggcacgaccaacaagaaccgaacgaggacacgaccccgccccacgcccaggagcagacggccgaagcccgcagccc

SEQ ID NO: 117528 - RNA, 81 nt, Homo sapiens
ggggcgacccccagaagcgccccagggaacccgagaaggccaacaaaagagcgaggaaccaagaagaggagacaagaccag

SEQ ID NO: 117529 - RNA, 60 nt, Homo sapiens
agaacgcagaggcccacagcaaggcggcacagggagaacacagggccccaccgcgcccca

SEQ ID NO: 117530 - RNA, 59 nt, Homo sapiens
cggacgcaggagcccccccggcagcaacccccacacccagcaccagaacacaggaagca

SEQ ID NO: 117531 - RNA, 85 nt, Homo sapiens
agccgcggcggcagcagcaggagagcgccgacaccagggaccaggcggaccaggacgggaggcagacccacacggggaccgcgcc

SEQ ID NO: 117532 - RNA, 73 nt, Homo sapiens
caccacacagaccaacagcccgcggaaaagaagaagagagccaaccaaagaagggagaggaggaggcccgcag

SEQ ID NO: 117533 - RNA, 71 nt, Homo sapiens
ccaccagccaggcccgagcgccaggaggaggaagaccgaccgccgccgcgcaccgcggggagccggagaac

SEQ ID NO: 117534 - RNA, 95 nt, Homo sapiens
ggcccacgcgacaaggggacgggaggaaagccgcgccaaagccgaagccccaagccggaagaaaaaaggacacagaaagaaaggagagcaaacgc

SEQ ID NO: 117535 - RNA, 71 nt, Homo sapiens
caggcaggaaagaagacggaacgaacccgaggcccacgacagcccgaaaggaagcacacacacccgcacga

SEQ ID NO: 117536 - RNA, 111 nt, Homo sapiens
ccaaaccagccagagcagccagggcaccggcggagcgacagcacacgcagggagcaccgggccgaaccagaggggcagagaaaacgccagaaggacagagcaccaaagcgc

SEQ ID NO: 117537 - RNA, 80 nt, Homo sapiens
gccgcgcgcaggaaaaaggcaaacccaccgaggaaacacagcgaagaagcaacaggacaaggaacagacagaacagaccc

SEQ ID NO: 117538 - RNA, 80 nt, Homo sapiens
cgaggccggcggggcccggggcgacaaacaaagggagcacgccaaccgagccagaacacgcggaaacagagaaagaagaa

SEQ ID NO: 117539 - RNA, 77 nt, Homo sapiens
gcagcgccgacacccgacggccacgaacccgagggccgacgcagcgaaaggagaccggagcaccccacgggaagcga

SEQ ID NO: 117540 - RNA, 47 nt, Homo sapiens
aaacccggaccgggcagaagggccccagccaaagaaagggaagggca

SEQ ID NO: 117541 - RNA, 78 nt, Homo sapiens
cgcagcgaccggggaccggagcgacgccaccaaacagaggaaagagcggagcccgccagaaacagacaccacggggcg

SEQ ID NO: 117542 - RNA, 70 nt, Homo sapiens
acccagggcaaacaggcacacgcggcccgacaaacaaagcgaggaggagagaagagaggaagcgagcagc

SEQ ID NO: 117543 - RNA, 68 nt, Homo sapiens
agaaacacacaacaggaaccaggggcaccaccaacagcccaacaggaagcgcgggcaaacaacaagca

SEQ ID NO: 117544 - RNA, 41 nt, Homo sapiens
cggcgggcaccggccgacggcccggggcgggaagcgaccca

SEQ ID NO: 117545 - RNA, 78 nt, Homo sapiens
aaccccaccacaagggaccgcagggccggggccagcagaacagagaagaccccggaaagaagaacgaagaaaacagaa

SEQ ID NO: 117546 - RNA, 78 nt, Homo sapiens
gcggcggaggacgaggaagaggggcgaggcagaccgccccgggccgcggccgccgagaacccacaggagggccagagg

SEQ ID NO: 117547 - RNA, 68 nt, Homo sapiens
aggcaccgagcaaagagaccgccagcgccgcaagcagcaagaaggagcgcagcgcccaagcggagagg

SEQ ID NO: 117548 - RNA, 60 nt, Homo sapiens
gcaaggaccggcaaagccgaagagacccgcaaagaccagccaagaagagaagaaaagcaa

SEQ ID NO: 117549 - RNA, 78 nt, Homo sapiens
agggccacggccgagcagacacaacacaggggaagaccgggaggcaacgaggcaccagggaccccgaaacaacaagag

SEQ ID NO: 117550 - RNA, 81 nt, Homo sapiens
ggccaggaccagacaagacagcaaggaagagccagaacagcacaagggcgcgcaagaaagcccagaacacaccgaacgaaa

SEQ ID NO: 117551 - RNA, 71 nt, Homo sapiens
ggaaaaaagaagccggagaggacacccaaaacaggaggagaacagagaaaccccacaaggccaggaagaga

SEQ ID NO: 117552 - RNA, 32 nt, Homo sapiens
ggggccaccccaaacaaacagaagagagaagc

SEQ ID NO: 117553 - RNA, 79 nt, Homo sapiens
acgcggcccccgcccgccccgccgcccgagccggcgccaagccggcacagccacaccgagaagaccggcccaagaaccc

SEQ ID NO: 117554 - RNA, 84 nt, Homo sapiens
gccgagacaccagcccgaaacaccaccaaggaaacccaccagagaaggcgcggccacccaggacccgggggaggcagcgaagaa

SEQ ID NO: 117555 - RNA, 82 nt, Homo sapiens
gaaagccgggccccgagggcggaccgaggaaaccaaccgaacaaaggacacaagggcaaaagaaacagcggaaaaacaggcc

SEQ ID NO: 117556 - RNA, 85 nt, Homo sapiens
cggcagccgcggaccaccgccgccagggagaacacgagacccgcacaaaaccccgccccccaggccacacaggggccgagacggg

SEQ ID NO: 117557 - RNA, 72 nt, Homo sapiens
agagacgaaaccgcccaagcagagcgcaggaaggcaagcccaaagagcacagaaaacaggagaagagacccg

SEQ ID NO: 117558 - RNA, 56 nt, Homo sapiens
ccgcgggcccgccgccccgccgggggccggccgccaagacacccccggcccggcac

SEQ ID NO: 117559 - RNA, 50 nt, Homo sapiens
cgcggacacgcaaaccacacaagggaggccacgggcgacgaacccgaccc

SEQ ID NO: 117560 - RNA, 83 nt, Homo sapiens
cagacaaaccccacaagcacgcaacggacacggacaggccaggcccacggcccggcgacgaaggcacaagaaaccccccacag

SEQ ID NO: 117561 - RNA, 83 nt, Homo sapiens
caaggggaggccccagaggcacgagacccaggaggaggccacaccccccgggcacaccacaggaccgaagcacgcccaggccg

SEQ ID NO: 117562 - RNA, 73 nt, Homo sapiens
agaggagaagaagggcaagcgccgcggaaggaggagggagaaagcgaagaggaccggaaaaaccccccgcccg

SEQ ID NO: 117563 - RNA, 57 nt, Homo sapiens
cagaaaccgggcccccaacacagacaaagccaagcagaaaacgccggagcagggaga

SEQ ID NO: 117564 - RNA, 38 nt, Homo sapiens
ccccaacccccggcaccagggccacagacggccagcgg

SEQ ID NO: 117565 - RNA, 65 nt, Homo sapiens
cgagccgaagaagccaaagagaaggggaggaacagagaccgcccaagacgacagacagaagaacg

SEQ ID NO: 117566 - RNA, 74 nt, Homo sapiens
cgcccacgaggcgcgaccagaagaggaggcccccgaggacgcgcaggcaccaacagcacaccgacagagaaccc

SEQ ID NO: 117567 - RNA, 35 nt, Homo sapiens
cgacccgaggacacgcggaaggaagggaacacgga

SEQ ID NO: 117568 - RNA, 59 nt, Homo sapiens
ggacaaagagcccccacgagcccgcaagggcaggagaacagcagagaaccacaaacaaa

SEQ ID NO: 117569 - RNA, 82 nt, Homo sapiens
agagccgcccgggccagcggccgcgcacccccggccggaggcaccagcgggaaggcgcgagccccgcgcgggcagagcgcca

SEQ ID NO: 117570 - RNA, 73 nt, Homo sapiens
cccccgcaagcgagaccgggaagggccaccagaacacaagcaaggccagcagagcccaagggcgccagccacc

SEQ ID NO: 117571 - RNA, 74 nt, Homo sapiens
gaggaccgaacccaacccgcaggaagcggccccgagccccggccccaaagacccaaaacagagacaccccccag

SEQ ID NO: 117572 - RNA, 71 nt, Homo sapiens
gaccacggaaccagccaagaccaagccagacagagcacagagaccgaagggagagcgcgacccccggccaa

SEQ ID NO: 117573 - RNA, 69 nt, Homo sapiens
agaaggaccaagaaccaggcggacggcgccccccacagaacaccagacaaggacggggggaaagacaga

SEQ ID NO: 117574 - RNA, 79 nt, Homo sapiens
gggcaggaaggagagccccagcgaggaagcacaccaccaaggaacgggcgcagcgagagaacagcgagaaggcaaagcc

SEQ ID NO: 117575 - RNA, 84 nt, Homo sapiens
acccgggcgaagcgggcgagcggggggacgccggcggagacgcgggcgagagcgagaagcccagcgcgaaccaccggccggacg

SEQ ID NO: 117576 - RNA, 77 nt, Homo sapiens
agccagcccccaggcggaacgcccgccccgcagagaggggccgggagaggaaagcggccgagaggaaaacagaagaa

SEQ ID NO: 117577 - RNA, 80 nt, Homo sapiens
cagcaaccaacaaccagaaaaacaacaccacagacaagcaggagccggggaaacgcaggagaggagcccccgcgcccagg

SEQ ID NO: 117578 - RNA, 54 nt, Homo sapiens
gccagaacacgccaaggcaagaacacgaaagaacccgaacacccggaggcggcc

SEQ ID NO: 117579 - RNA, 83 nt, Homo sapiens
ccagccaggagacaggaggccgcggggagacgcgggggacggggcaggaccacagggaaaggcagcagaagcaacgcagcaag

SEQ ID NO: 117580 - RNA, 80 nt, Homo sapiens
caccagggaagagacacacccagggaagaggaagaacgcgagaaaaaaacgagcgacagagaaggccggaagaagcaaaa

SEQ ID NO: 117581 - RNA, 70 nt, Homo sapiens
cgcggaggggcccgccaccagagcacacagaaaccggcccacaacacagccacggaccaggagcgaacga

SEQ ID NO: 117582 - RNA, 67 nt, Homo sapiens
ggacccccgacaggaggcacccagcaggagcggaccaaagaaaccaaagcagaagcggcaacacacc

SEQ ID NO: 117583 - RNA, 81 nt, Homo sapiens
gggcccaggggcagcgagcaagacagcaagcagacccggggaaggaggcgaaacacggagccaaagagaaccaccgccacc

SEQ ID NO: 117584 - RNA, 52 nt, Homo sapiens
cccaggaaggagccaaagcacaagaagaagacgaggcacacacaacgaccaa

SEQ ID NO: 117585 - RNA, 81 nt, Homo sapiens
cggccgggccagcacccggccgagacggcggcagcagcggcacaggagaaccagaggacaaaaagcccagggaacaacaag

SEQ ID NO: 117586 - RNA, 64 nt, Homo sapiens
gagagggagagggggcaggccgccagacagagggccaaaagggcggggaacggaccaccagccc

SEQ ID NO: 117587 - RNA, 35 nt, Homo sapiens
aaacagcacccccagagcccgaaacagacgagaca

SEQ ID NO: 117588 - RNA, 36 nt, Homo sapiens
cgcacagcccagcaaaagagcaaggaggccccagcg

SEQ ID NO: 117589 - RNA, 81 nt, Homo sapiens
ggaaagacaggccacaaaccgaaagaaacggaccagcacacagaccaggccacgaaggcggcggcagcgcccagcgacacc

SEQ ID NO: 117590 - RNA, 40 nt, Homo sapiens
gacccgccgcgccagaagggcacacgcagaaggggagacc

SEQ ID NO: 117591 - RNA, 54 nt, Homo sapiens
ccggaagcacacaacaggaaaacaaaagaggagaaagggaggacagggagcagg

SEQ ID NO: 117592 - RNA, 83 nt, Homo sapiens
ggggcgggccagagcggacgaaagcagggacccagcaacccgacggacccgaagacggggacggcaaaacagaacagaaaggc

SEQ ID NO: 117593 - RNA, 75 nt, Homo sapiens
acagccggcgcacgccgcgagaggcgcccagcgaccagaaggcgcaaggaagaaccaacaccaaagaaacagccc

SEQ ID NO: 117594 - RNA, 87 nt, Homo sapiens
cccggggaggccggccacgccccgcacgagccccccaagagaacccagggggagccacgccggagcgggcaccggcgcggacccacc

SEQ ID NO: 117595 - RNA, 76 nt, Homo sapiens
ggcaggaaaggaggccaggacggagagggagaagacagagagagcaaaacgacgaaggagccaagaggaccgggac

SEQ ID NO: 117596 - RNA, 74 nt, Homo sapiens
acccccaacaccagcaccgcagaggcaaggggccaccaggaggccagggggcgccagccacgacagacagaacc

SEQ ID NO: 117597 - RNA, 64 nt, Homo sapiens
ggcaaaccagaaagacgaggcacggccggagaagagggcagggacgggcgaggccaccgcccag

SEQ ID NO: 117598 - RNA, 69 nt, Homo sapiens
cgacgcaccgcaggcagacaaaagggccaaagaagggagagagccgggacaccacagcaagaggaacgg

SEQ ID NO: 117599 - RNA, 56 nt, Homo sapiens
caggagcagaagaaaaccggaaagaagacccagcaagccccaagggaggaagaaac

SEQ ID NO: 117600 - RNA, 74 nt, Homo sapiens
agagcaggggccggaagcaccaggacagggaggcccaggaacacaccaccaggaaaagccgaaggaagcgacag

SEQ ID NO: 117601 - RNA, 90 nt, Homo sapiens
cgccaccgcaccagaggacacacgacaggcaaaaacacgaaagagaaaacgaaaggccgagcgccaaagcgaaacaacgagagaaacaca

SEQ ID NO: 117602 - RNA, 80 nt, Homo sapiens
ccccagaaccccacacagacagaacgacaccagaggaccagaacccacgagaaacagacgagccaaccagaccccaggag

SEQ ID NO: 117603 - RNA, 66 nt, Homo sapiens
gccacagccgggaagcagagggagaaagagacagagaagacggaagaggcaaaccaccagagagcg

SEQ ID NO: 117604 - RNA, 75 nt, Homo sapiens
agaacaaaagaaaaccaaagcagaccagaaaaaacagcacaccaggaagcaaggagaacacaaggaacgaaagga

SEQ ID NO: 117605 - RNA, 82 nt, Homo sapiens
agacacggagcagcccagcaagcccagaggaaacgcacgagaccgaacccaaggagaggaagagcgaaacgaagaaaccaaa

SEQ ID NO: 117606 - RNA, 68 nt, Homo sapiens
gcacacaggacggggacaggccaaccacccgaggacacggcgcagcaacaaacagcggcgacaaaccg

SEQ ID NO: 117607 - RNA, 85 nt, Homo sapiens
aagagcaaggccacgccggccgcgcgcgccagcaagaagaccgcgcccgagcccagaaaccacgggcgccgaggaggaagaggcc

SEQ ID NO: 117608 - RNA, 78 nt, Homo sapiens
cgagacccccagcgcgccggaggagaacaagagcccgaggcacacagagaaaaaaagggaacaaaacacagcaagcag

SEQ ID NO: 117609 - RNA, 81 nt, Homo sapiens
ggccccgaaccaggcgagacgcggggagacaagcaccccaccaaggggacgacagcgcgagggcacagcagagacaaccag

SEQ ID NO: 117610 - RNA, 63 nt, Homo sapiens
cacggacaacccagaggacaacgaaggcgaggcggcagcagccaccacgaccccaggccccca

SEQ ID NO: 117611 - RNA, 72 nt, Homo sapiens
gccacagacccagcacagagggggacgccccaggaagcacaacaggcacaaagagagaaggaacacccacag

SEQ ID NO: 117612 - RNA, 73 nt, Homo sapiens
caaccggccccagcagacgacacaaagggcaggacccggcagccagaggcccaagaccaccagggagagccag

SEQ ID NO: 117613 - RNA, 80 nt, Homo sapiens
gcccgaggcccagaggaggagggcgacagaagcccccagaaggaggaggaggaagaagagagacaccagcagaaaccggg

SEQ ID NO: 117614 - RNA, 72 nt, Homo sapiens
cagcggccgaagcaaaagcaccggacaaagaaaaaaacccagaaggcaacaggaaaaggagaggggcaacag

SEQ ID NO: 117615 - RNA, 78 nt, Homo sapiens
agagggggccgccgcggcagcaagaacagagagagaggggacagacgagagaacgaggggcccccggagggccacaag

SEQ ID NO: 117616 - RNA, 70 nt, Homo sapiens
aacgggcgcccgcgaccagggagacgccccagcaacggggcggcacacaaggagcgaagggcagggagaa

SEQ ID NO: 117617 - RNA, 76 nt, Homo sapiens
acagcacacgaaggaggccagcaaagaccgcaaaaaaaggaagaagacggcacgggacccccagcacaggcagcag

SEQ ID NO: 117618 - RNA, 78 nt, Homo sapiens
caaaaccacccaaggagggaggggcagaggagaaccgacgaaccgcgccagaccaaaacgaagaagacgagccaaacc

SEQ ID NO: 117619 - RNA, 80 nt, Homo sapiens
cggaaggcaagcgccagggggggggggcgcgcaggcggagacagcgggccgcgcgccgggaaggaagcagccaccccgcc

SEQ ID NO: 117620 - RNA, 75 nt, Homo sapiens
cggaccgagagcggaccgagagcgcgaaacgcacgagaaggaccagagggaaaaggcacccagcggacggggccg

SEQ ID NO: 117621 - RNA, 88 nt, Homo sapiens
cggaacgcccggggacccagcgcaacaaccaagcagcagcgcacaccagcgacaaaagaagcgaagccaggaacaagaggcggaagac

SEQ ID NO: 117622 - RNA, 68 nt, Homo sapiens
accagggcagaagccgaacacgacagaaagaaaggccaaagcagcagaacgaagaggggcacaaggcc

SEQ ID NO: 117623 - RNA, 66 nt, Homo sapiens
gcaggcggaagggcacagaggacacagggccgcaaggccaggcgcgcagaggcacccaacggcaca

SEQ ID NO: 117624 - RNA, 73 nt, Homo sapiens
ccgcacgcaaaggggggcgcaagacaaccaggccggaaaggaaaaacaccagaacggaaacagaaggacacac

SEQ ID NO: 117625 - RNA, 39 nt, Homo sapiens
gaaaggaaacaagaaggcacagacaagggaggcgaggac

SEQ ID NO: 117626 - RNA, 38 nt, Homo sapiens
caaaaacaaagaggagagaagaagaccgcgacggggcg

SEQ ID NO: 117627 - RNA, 73 nt, Homo sapiens
gagaaggaccaagaaccagaaagagagcacaacagagaaaccgggaaagccaaaagcgaaacgaacaggacgc

SEQ ID NO: 117628 - RNA, 67 nt, Homo sapiens
cagagggaaccagcggacgcggaggcccaaccgaagaaaacaagacccacaggaccgcgaacaagga

SEQ ID NO: 117629 - RNA, 77 nt, Homo sapiens
gccggccccacgggaaacaaaccagggaaaaaagccagaaaaaacgaaaaagagaagcgaaagggagcggcaagcgg

SEQ ID NO: 117630 - RNA, 67 nt, Homo sapiens
gggcacaggggccgcgaccggggcaccagcgggcacaccaagaagcgccccgcaagacccaccgagg

SEQ ID NO: 117631 - RNA, 66 nt, Homo sapiens
cagaacacccaggcgacaggcaaagaaccgaagacagcccccgaccacggagacaagacgcacccc

SEQ ID NO: 117632 - RNA, 75 nt, Homo sapiens
acgcaccgcacaacaagaggccggcggggcgacaggccagaccgcgccaccaggagcagagcagaacaaccccga

SEQ ID NO: 117633 - RNA, 46 nt, Homo sapiens
ccaaagggccggacccaaccggaggaagagcaagcaggcccgaggg

SEQ ID NO: 117634 - RNA, 90 nt, Homo sapiens
acgagccgggaggaacggcccggaaacaggaggacgaaaccccagacagccagcagcaggccgggaccagcaggggccgcgcagcagcag

SEQ ID NO: 117635 - RNA, 82 nt, Homo sapiens
aaagggaacacagcagagggggaaaaaaacagaggggggccagcagcaagaacagagagagcagagagagccagaaggccga

SEQ ID NO: 117636 - RNA, 69 nt, Homo sapiens
ccaaaccaagacggaccagagacccgcgagcaagaggcacacccagaagccacaggagaagcaagaggc

SEQ ID NO: 117637 - RNA, 76 nt, Homo sapiens
cgccgccgcgccgcgccgcgccgcaccccgagcgaccgacggccacaggcgggacccaccgcgccggcaccggacc

SEQ ID NO: 117638 - RNA, 73 nt, Homo sapiens
aagaccacgcagggcaggaagcaaaacaaacggagagaggagggagaaacaaaggccaaagacgcaggaggga

SEQ ID NO: 117639 - RNA, 57 nt, Homo sapiens
cggacaaccagaggcagccagcagggggagcgaggaacgaaaagaaggaaacacaag

SEQ ID NO: 117640 - RNA, 82 nt, Homo sapiens
ccggcccgcgcgaaaccaacccagaggggccaaaagcgccaaagcgacaggagcacacagaaaagcccacgaggaaaaacgg

SEQ ID NO: 117641 - RNA, 77 nt, Homo sapiens
gccccccaacggcacggaccccaccacccgaagccgaaaaggacacgcccaccaagaaagaaccggaaaggggaccg

SEQ ID NO: 117642 - RNA, 58 nt, Homo sapiens
agaagaagagaaaaggagggaacacagacccagccgccaaggggagccacggaccagg

SEQ ID NO: 117643 - RNA, 58 nt, Homo sapiens
gcaggcaagggcggggccccacccacacccacaagggcagggccgagaacgaggcaac

SEQ ID NO: 117644 - RNA, 88 nt, Homo sapiens
ccggcccaggagcccgaggcaccgcaaacaaacaagggaaaagaaaggcggcgaagaagagccgagagggaggaaagggaggcaagaa

SEQ ID NO: 117645 - RNA, 82 nt, Homo sapiens
acagacacggggaagcgcaaaaacaagacggggcgccccacagaggggcgacggaacacaagggcaagacagccgggaaccc

SEQ ID NO: 117646 - RNA, 76 nt, Homo sapiens
gcacgcggggcagcgggccgagggcaccagcacacgccacagggccacaggagcaaggcagcccgggacccgcaca

SEQ ID NO: 117647 - RNA, 47 nt, Homo sapiens
ggccaaaggcgccaggaaggagaggcgaccagagaaagccaaagcac

SEQ ID NO: 117648 - RNA, 60 nt, Homo sapiens
agagcacgaccgccagaagcaaaagcgagaagcagaaagccaaagaaagaaagaggaaga

SEQ ID NO: 117649 - RNA, 72 nt, Homo sapiens
ccagcagcccaccaagagaacaaacagagccagcaagaacagccaaacagaaagaccacacagggaaacgac

SEQ ID NO: 117650 - RNA, 75 nt, Homo sapiens
cagaggagagcaagcaagccggagggagagcacggcgcaccaacggcagagaagcacagcacaagcgaggagcca

SEQ ID NO: 117651 - RNA, 84 nt, Homo sapiens
gccgcgccacccgagaaggagcgcccgccggcgggacccgccccgcccggagccccggcccccacagcggcacagcgaagacag

SEQ ID NO: 117652 - RNA, 80 nt, Homo sapiens
accgaaggaggcaaccggaccccaaaaaccgacccaccccccaaggcagaggggcggcggaaccagccagcccacaccca

SEQ ID NO: 117653 - RNA, 61 nt, Homo sapiens
cacagaacaacaacgacagaggcagacaacacaaaagggccccgggaccaaggacacgcag

SEQ ID NO: 117654 - RNA, 79 nt, Homo sapiens
aaaaggaagaaaagcaggcagagagcgaacccaaggacgcagcaaagccaaaaagcggggaaacaacaaaggcgggcag

SEQ ID NO: 117655 - RNA, 82 nt, Homo sapiens
cagcccgcccagcggcgggccacaccagagggcgaagacaggacggcccaggcagacacggaggaggaggaagaggaggagg

SEQ ID NO: 117656 - RNA, 62 nt, Homo sapiens
gggagcccgcggccggggaccggacaaccccccaagaagccgggcggaggcggggggaccgg

SEQ ID NO: 117657 - RNA, 78 nt, Homo sapiens
ccgcaccggggggccgccgggcgcggcaagaaagcaccgcagacaccgggaagagggccggagccgcaccaggccacg

SEQ ID NO: 117658 - RNA, 73 nt, Homo sapiens
gcggggccgaaggacgagcaacggggaagggagaggaagaccacaaggaaccagggccaccagagaagcgaca

SEQ ID NO: 117659 - RNA, 58 nt, Homo sapiens
agagccacccgcaggacaaagcaaaacaggacaccagagaaaaggggacccaggaacc

SEQ ID NO: 117660 - RNA, 65 nt, Homo sapiens
gggagaaccaggacccgcaaggaacgaaagcgggaagacggaagaaacaggcccaggaccgcagc

SEQ ID NO: 117661 - RNA, 56 nt, Homo sapiens
gcaggaacacaccaagccgaccgcagaaaggaaccaggagccagcggaggaaaaga

SEQ ID NO: 117662 - RNA, 47 nt, Homo sapiens
ccgcaggagggagaacgggcggagcaggagcaaaggagcaagaaacc

SEQ ID NO: 117663 - RNA, 81 nt, Homo sapiens
ccaagcccgggcgccaccgcgccaccccgcgaggcgaaccacgggaacaaaggcgaggacaaggagggcaggggacgggac

SEQ ID NO: 117664 - RNA, 81 nt, Homo sapiens
ggaaggagggcgagcgaggaggaggcggagcggggcccgacgggacagagcagagcaacaagcccgcagaaccggccgccc

SEQ ID NO: 117665 - RNA, 34 nt, Homo sapiens
accagacagagaccagaaacacacccgcagaaac

SEQ ID NO: 117666 - RNA, 71 nt, Homo sapiens
gacgccccggcaacccaggggcggccacgaccaccaggcgccagggcaagcggcccgccaggccagaaaac

SEQ ID NO: 117667 - RNA, 50 nt, Homo sapiens
aaaaaagcggagacaaccaaggcgcagagaaggaagcagcccggcagcaa

SEQ ID NO: 117668 - RNA, 72 nt, Homo sapiens
aaccacggaaaggaggaagaagacaccggggacagacagggaccaaaaacgggaagagaggaaaccgccacc

SEQ ID NO: 117669 - RNA, 73 nt, Homo sapiens
ccggcagaccccaggcgccgcacgcggggcagcccgaggcgcaccagaccagcccaaccaccaccaccaccaa

SEQ ID NO: 117670 - RNA, 54 nt, Homo sapiens
acacgcagacacacccaaagggcagagacaggcaacagacggcaacgaaaggca

SEQ ID NO: 117671 - RNA, 78 nt, Homo sapiens
gcaagaggcgaccccagcacggcaaagcccggagacaagcaggccaagccccggcggacgcgagaagaacaggagcgc

SEQ ID NO: 117672 - RNA, 55 nt, Homo sapiens
ccacccgagcaagcggccaaccaccagaaaccggaggcagccgccacaggcgagg

SEQ ID NO: 117673 - RNA, 75 nt, Homo sapiens
ggacagaaaagacaggcgccaggagcacagaagagcgaggaggacaggagacagagcgaaccccccaggacaaaa

SEQ ID NO: 117674 - RNA, 75 nt, Homo sapiens
cagaaggcagggagggaggggaaagacccacaccaagaggacgagagaggagcgcgggccgagagcggagagcgg

SEQ ID NO: 117675 - RNA, 80 nt, Homo sapiens
gagaaggccgccgggcccgggcaggggcggggcaacgcggaagggaaaaacagacagacacggcaaagccaagaaacacc

SEQ ID NO: 117676 - RNA, 72 nt, Homo sapiens
cggacggggagaggggagcgccggggcggcccaggcgagcggagagaaacagcggaaaaaaaaggagccggg

SEQ ID NO: 117677 - RNA, 86 nt, Homo sapiens
caggagcgcacacacgacaggagaaaggaggccaaggagcgggagcggaacgaagaacaccggcagagaacaagccagccgccgca

SEQ ID NO: 117678 - RNA, 87 nt, Homo sapiens
acaaagcggccgaaacagaaaacaagagaccacagaaggcacgagaagagaagcccagagcaaaacaccccaaaccagaccaccgac

SEQ ID NO: 117679 - RNA, 70 nt, Homo sapiens
agccgcagcagcagggaaggaacgcaaaacacgggaaaagagcagaacccaggacgagaaaaaacagagc

SEQ ID NO: 117680 - RNA, 49 nt, Homo sapiens
ccagcgagccaccccccgcacacagcaagcacaacagccggaagaaaag

SEQ ID NO: 117681 - RNA, 52 nt, Homo sapiens
cgccaacccccaaagcagaacaggggaacacccacccggagaccggaccgaa

SEQ ID NO: 117682 - RNA, 53 nt, Homo sapiens
ggcaggccagaagagccaagcaagcacggccaacacagcaggaacgagcaagg

SEQ ID NO: 117683 - RNA, 41 nt, Homo sapiens
aaaaaccacggccagagcaagaaggaagaaaccaaacgaaa

SEQ ID NO: 117684 - RNA, 49 nt, Homo sapiens
agcaaacagaagcgcggccaagagccaaggcacgaggaacggaaaccaa

SEQ ID NO: 117685 - RNA, 66 nt, Homo sapiens
gaaaagagcccggagggaagaaggagggaacaagaggcccagcccgcccagaaccgggacaaccca

SEQ ID NO: 117686 - RNA, 68 nt, Homo sapiens
agacagggcaacgggagaagagcacagcagcccacaagcagggaggcggcggacgacgggggacagaa

SEQ ID NO: 117687 - RNA, 69 nt, Homo sapiens
cgcagccacaacaccggcaggaaccaccaggacagaggaacacacacaacgacggagccaacggacacc

SEQ ID NO: 117688 - RNA, 74 nt, Homo sapiens
agcaggggaacaggcggaaacccaaccaagaaggcccaggaacgagccccgccgggagaggacaaagaagcgga

SEQ ID NO: 117689 - RNA, 75 nt, Homo sapiens
gccgggccgcccaagggcgcgccccccaccagacggagccccgaggagcaggaaaccacccccagggaacccgag

SEQ ID NO: 117690 - RNA, 79 nt, Homo sapiens
ccggccaccccgcgcgcaaggagcccgggacggagaggccgcaggagcacgagacaaaggacaggcagaaaccagaaca

SEQ ID NO: 117691 - RNA, 55 nt, Homo sapiens
ccagggcagccagaggggggagaaaggcgcgcaaaccgaacaagcacagacaaga

SEQ ID NO: 117692 - RNA, 79 nt, Homo sapiens
ggagaccccagcaagacgccaggccccggaagccagaaaggggaagagggaaaggaagggagggcaggaaggccaggcg

SEQ ID NO: 117693 - RNA, 56 nt, Homo sapiens
agggacgcgacaccgcacgagcggcccaggagccagggagaacaaggaacgaccaa

SEQ ID NO: 117694 - RNA, 79 nt, Homo sapiens
ccgcggcgccaagcggccccagcggccgcgaccgagcaggcgagaccacggggagcgaacgaagaaaggccaagaggga

SEQ ID NO: 117695 - RNA, 58 nt, Homo sapiens
gcaccgccaaagacaagaacagaggggccgagaagccaacaagaccagaacagagaag

SEQ ID NO: 117696 - RNA, 73 nt, Homo sapiens
cacagacagcaaaaggcggaagagcccggcagacaggaccgaaacaaggaccccccgggagaagaaaagcggg

SEQ ID NO: 117697 - RNA, 39 nt, Homo sapiens
cacgcagcggcggccagggaccaaccggaagaggacgaa

SEQ ID NO: 117698 - RNA, 38 nt, Homo sapiens
agagcaacagcagggcaacaggcgaacaagaggcgcca

SEQ ID NO: 117699 - RNA, 80 nt, Homo sapiens
ggagaacacccagggggcccagccccagccaccccaagacggaaccagccaggcccagagggaggcacaacagcgaggac

SEQ ID NO: 117700 - RNA, 74 nt, Homo sapiens
cgccacagccacagcccggagagccgggcgagaggcccggcgcgccgcgggagccgcgggggcggcgggggccg

SEQ ID NO: 117701 - RNA, 108 nt, Homo sapiens
agcgagcgaccacacgacgagccagacacaagcacagcgagaccgcggcgcaggaggaggaggaggaaggagggccccggagcagccacaccaccgaggccccaccca

SEQ ID NO: 117702 - RNA, 72 nt, Homo sapiens
accaacggcccgggaccaccggcgacagcagaaacgaggaagaaagagccaaaaccccggaggcgcaggcac

SEQ ID NO: 117703 - RNA, 84 nt, Homo sapiens
agcaggaggaggggcggcggcgggaagaggggagaggcagacagggcaggaaaccccagaaagggggcggaggaagccaccgcc

SEQ ID NO: 117704 - RNA, 78 nt, Homo sapiens
ggccaccgggaccggcggggagcgacgccagcgcccaacaggaggacaacgggcagcccacagcgagggaaacagaag

SEQ ID NO: 117705 - RNA, 68 nt, Homo sapiens
gcgaagagacagaacgaggggaacacaggccgagacaaagccagaaaacagcggcaccggaggcccgc

SEQ ID NO: 117706 - RNA, 83 nt, Homo sapiens
ggaggagcacagaacgccaggaccaaaacagggagaaacacagccagaagagagcgcaagcagaacaaggggagagcccgacg

SEQ ID NO: 117707 - RNA, 80 nt, Homo sapiens
caacaccgcgaggagggggaagcccacggcggacgcaagggggaccagagacacccgacccgaccacagcggaggagaga

SEQ ID NO: 117708 - RNA, 84 nt, Homo sapiens
gaacggcccacaccagaagccacagcagcaagaacccgagagccaagcaaagaacaaaggaaggaaggaggaagaggcggaacg

SEQ ID NO: 117709 - RNA, 73 nt, Homo sapiens
gccggccagcgggacaggagggcaggaagagcgcagcggggacaagaggaaccgggccgggcagagcgagaga

SEQ ID NO: 117710 - RNA, 71 nt, Homo sapiens
ccagcacaccccagcagaaagacaaagcaccagggccaagggcggagcacgagaaagcggcaccggcagac

SEQ ID NO: 117711 - RNA, 76 nt, Homo sapiens
ccccagagacccagcaacgggcagcgggcgcaggaccccgccccacgcccaggagaaggcaggcgccgaggcgggc

SEQ ID NO: 117712 - RNA, 81 nt, Homo sapiens
cgagacaccagcccgaaacaccaccaaggaccaagaacgcccagcccgcgggcaccggcagaaaggaggaggaaaacaccc

SEQ ID NO: 117713 - RNA, 79 nt, Homo sapiens
cccagagagcgcccgagagaacagggggccgcggccagagacagagggaccggcagaacacacaaaagcgaaggaagga

SEQ ID NO: 117714 - RNA, 57 nt, Homo sapiens
cggcaggaacccaagccccacaggagcggaagaagcccggagggaccaccagagagc

SEQ ID NO: 117715 - RNA, 53 nt, Homo sapiens
cgcggggccgagcccgcaggagccgcagccgaacgcggaggcagggcgcgacc

SEQ ID NO: 117716 - RNA, 67 nt, Homo sapiens
caagagaaaagacggggacggacgacagacgaacgcaaccccaagaggggagacgagaaggaaaacc

SEQ ID NO: 117717 - RNA, 74 nt, Homo sapiens
acaaccagaggcagccagcagggggaggcgcgaacggcggaggcaaaaaaggagaaagaacaccaagcagaggg

SEQ ID NO: 117718 - RNA, 61 nt, Homo sapiens
gcggacgccccggggacaccaccgaccagagacccagcaccgacccgccggacgggagccc

SEQ ID NO: 117719 - RNA, 78 nt, Homo sapiens
aggcacaacccagacggcaaggaaaggcgaagaaagacgagaagacgaggaacacgacgcgcaccaggagacacaaac

SEQ ID NO: 117720 - RNA, 81 nt, Homo sapiens
cagcgcgggagcagcgccccgcacccagggggagacgcagcggcaccacaaggggagagaaggaagagagaaagaaaggaa

SEQ ID NO: 117721 - RNA, 57 nt, Homo sapiens
gacggcacagcgcacaagaaacccaagcgcgagggagcaacagcgagcaacaggcaa

SEQ ID NO: 117722 - RNA, 88 nt, Homo sapiens
gacagcaacaacaggccgccgccccacgcacccccgaggagagacaagcaggacacagcgcaccgcgccacggcccccccgcgccccg

SEQ ID NO: 117723 - RNA, 64 nt, Homo sapiens
cgaagcagcagaacagaacaggagaagaaaggaagagacgacagccagcaggcaggagcccgcc

SEQ ID NO: 117724 - RNA, 54 nt, Homo sapiens
gacaaggcaacagcggggaaagcacccaaaggacgccggaaggcgaagcccagc

SEQ ID NO: 117725 - RNA, 69 nt, Homo sapiens
ccagcccagagaggcccacaaccaagccacaaaagacacgccacaaccgcacggcccaaagaagagcag

SEQ ID NO: 117726 - RNA, 79 nt, Homo sapiens
agggaaaggaaggcaccaagccacaccagcagcgaaggaagccgggaagaaaggagaagacagaggagccagaccaaga

SEQ ID NO: 117727 - RNA, 71 nt, Homo sapiens
acccagagcgcacggcgacgccccaggggaaaacccccgggaccagacgcagacagaaggaaaaacggaaa

SEQ ID NO: 117728 - RNA, 79 nt, Homo sapiens
caggcgaagaagcgcagccgcaccggccaagggcacgggagccacggacccgcgccgcgaagccagagggccggaaagc

SEQ ID NO: 117729 - RNA, 71 nt, Homo sapiens
gggaagcagccaagcgaaagcacccggccaagaagaggaaacaaagaagaaaggaagcaaaacccagcccc

SEQ ID NO: 117730 - RNA, 81 nt, Homo sapiens
aaccccgggaagaaggaggacccaccgaagccaaccagaggacaaagaacggcaccagggcaggagggcgaggccagcagg

SEQ ID NO: 117731 - RNA, 39 nt, Homo sapiens
ccagaggaacacagccgagcccaagaaaagaggaggagg

SEQ ID NO: 117732 - RNA, 60 nt, Homo sapiens
gaccaggagacgcgggcgaaagagaggacacaggcagagaacacagccgagaagagacac

SEQ ID NO: 117733 - RNA, 91 nt, Homo sapiens
cgcagcagccgcaccagaaccaggcgaagcggggggcgcgagccgcaccaccgcacggacagcagggaagaacggaaaccagagaaagaaa

SEQ ID NO: 117734 - RNA, 87 nt, Homo sapiens
gggccgacagcggcaccagcagcgcgccccgaagaaccgagcggccagaacggggcagccgaagaggaagcagacccggacaaaagg

SEQ ID NO: 117735 - RNA, 81 nt, Homo sapiens
ccgggaaaccaggcaccggggggcaacacccgagaacggcgggaagagaagacacgagcacaaacgggggcacccgaggag

SEQ ID NO: 117736 - RNA, 78 nt, Homo sapiens
gccgcaaaccgcagcccaggagcccggaagacccgcaccggagcaaagaaacaagcccacaagagggagccagcgcag

SEQ ID NO: 117737 - RNA, 81 nt, Homo sapiens
cgcagaaggacgcccacgagcaaccaagaaaaccccaaacacggcacaaagaacagccagcaaagcagcagagacgaacaa

SEQ ID NO: 117738 - RNA, 76 nt, Homo sapiens
aaggagagaccagaggaggaagagcaagcgggggaccgaacaaggcaaaagggaggcagggcagcaccagagcaaa

SEQ ID NO: 117739 - RNA, 81 nt, Homo sapiens
aaacacagagaagccagaacgggcaggaaaacaaaggaggggaaaagaagggggacaacagagccgacacagccaagaagc

SEQ ID NO: 117740 - RNA, 85 nt, Homo sapiens
aggcccccgggcaagaggcgcaaacaagccaacccaggaggaaaaacgaaagcaccgggaggaaagagagccacacgaagaacac

SEQ ID NO: 117741 - RNA, 71 nt, Homo sapiens
ggccagaccggcagaagacagcgccaccgcccacacggccacagcggggaaggcgaacgcaagcagacgga

SEQ ID NO: 117742 - RNA, 70 nt, Homo sapiens
gacacaaggacaagaaaaggcccgccgagaaaaacagaaaaggagagggcccgggcaagaagacagaaca

SEQ ID NO: 117743 - RNA, 78 nt, Homo sapiens
agcgaccagcaccccaaaagagccagacaacaggcgccaaaaaggagcaagaggcagggggcagccacacacagcacc

SEQ ID NO: 117744 - RNA, 86 nt, Homo sapiens
agacgggaccgggagacagaaaccaggcagaccacagcagccaggcaagacaggccaacaccgccaccagagaaccacacaaagga

SEQ ID NO: 117745 - RNA, 85 nt, Homo sapiens
agcggagaaggaggccgcgcgggccaggccacaggagaaagccgagcaggccagcccggcggccgccacacccagcaccacaggc

SEQ ID NO: 117746 - RNA, 72 nt, Homo sapiens
ggaagaaccagaagacaacaaagagaaaaagggaggcaaggaagcggagacgacaaagcggacggggaagag

SEQ ID NO: 117747 - RNA, 58 nt, Homo sapiens
accgaggcccccaagcagggaaaccggaagaaaacccgagcgcacgcaagaacaaggc

SEQ ID NO: 117748 - RNA, 73 nt, Homo sapiens
cgcgcccgcgcgggcccggaccccccacaggaagcggaagaaagaagagccaagaagggaagaaaacaagaaa

SEQ ID NO: 117749 - RNA, 85 nt, Homo sapiens
ccacggccccagccaccacccgcacggcgcaggccggaacacgggcggccacgaggaggagcgagagaccaacgggcaagcaacc

SEQ ID NO: 117750 - RNA, 79 nt, Homo sapiens
ccccggcaagcgggccccaggaagagaaccccccgcagaagcgggagcgccccagagagcgggagagaagacagaggcc

SEQ ID NO: 117751 - RNA, 54 nt, Homo sapiens
ccagagcgacccacggccccccgggaggggggcaaaccagccggcgggcgccac

SEQ ID NO: 117752 - RNA, 71 nt, Homo sapiens
cccgggcggggcagagcagcccccagccagccgcgaggcccagaaggggaagacccccagcgaacagagac

SEQ ID NO: 117753 - RNA, 80 nt, Homo sapiens
cacccgcgcgcgcccgggaggaaggaacgaggcaaggagcaaagcagcggcgcagcccggggacgacgcagcacagagag

SEQ ID NO: 117754 - RNA, 71 nt, Homo sapiens
agaccgccccgggccgcggccgccgagccgccgcccgccagcggacccgcggcaccgccccgcgcgcgccc

SEQ ID NO: 117755 - RNA, 36 nt, Homo sapiens
gacgaaggagaccgcgcagagcgaggaaaacgccac

SEQ ID NO: 117756 - RNA, 54 nt, Homo sapiens
agggcagggggcagggcggcagaggaaagggcagaaacacagaaaaagaaaagc

SEQ ID NO: 117757 - RNA, 75 nt, Homo sapiens
ggacgaagagccccccccccaacaccgcgacacgcagaggcagaggacagaaggaacagagaccgccaggggaaa

SEQ ID NO: 117758 - RNA, 79 nt, Homo sapiens
ggcgggcacgaggaccagcgggccggagccccgagaagcggagacgccagcgacgaaccgaagacaagagccacagccc

SEQ ID NO: 117759 - RNA, 76 nt, Homo sapiens
agaccccaccagaagacccaccgaaacaacggagagacaacaagggccacggacgaccggagagaacagaaaaaaa

SEQ ID NO: 117760 - RNA, 95 nt, Homo sapiens
gggacgcgcgcgggcacccacggagccccggggcggccaagacaaggggcgcagagcggggggacaggcgcaagaccggagaagcaggagcggaa

SEQ ID NO: 117761 - RNA, 82 nt, Homo sapiens
cggcccgagcccgcagacaagagaacagccgggcacaggaagagcgaaggagaagcgcgggaggaggggaccggcacaaggg

SEQ ID NO: 117762 - RNA, 68 nt, Homo sapiens
ccaaagaagacagcggaagaacgacccaaacaggggcgacaccacggcaaaagaaagaagacagggcc

SEQ ID NO: 117763 - RNA, 54 nt, Homo sapiens
aaaagcgccagcagaagccgaagcgggaggaagagcagagcagaagagaagagg

SEQ ID NO: 117764 - RNA, 64 nt, Homo sapiens
cgaccccaggagcaccaaggccccagccgccacagcgcccggagacaagagagaacagacagca

SEQ ID NO: 117765 - RNA, 74 nt, Homo sapiens
ccacccaaaggaagaaaagggagaggagacagcaacccaaagagaagggaaaggaaggggagacagcccgaagg

SEQ ID NO: 117766 - RNA, 78 nt, Homo sapiens
gcaccacggaccccaaggaagccacggcagacacacaacccgacccgacgagaaccaacccgccaccaagaaagcccc

SEQ ID NO: 117767 - RNA, 82 nt, Homo sapiens
cgcagaggacacgaggcggcgggcggagacaggaccgcggcgagcaagaaagaagccaaggaagcggaggcacgggcaacgg

SEQ ID NO: 117768 - RNA, 54 nt, Homo sapiens
aaagagcaagcggaacgaacaaggaacaaacacagggcgggaccaccaggagca

SEQ ID NO: 117769 - RNA, 85 nt, Homo sapiens
agggacacgcaggacgagcggccgaagcagcgcgggaaagggagcagcaccggccacacccacagcacgaccggaacccagcgac

SEQ ID NO: 117770 - RNA, 76 nt, Homo sapiens
ccacgaaccaaaagggacggacaaaggaacaggaccagggccccaccaccaaggcacaacccgacaccagacgaga

SEQ ID NO: 117771 - RNA, 91 nt, Homo sapiens
aaaaaacccaggcggcccagggcccaccgaggacaccgcgccagcggggcgaggaggacacagaggacgaggagcggaagccgcggccagc

SEQ ID NO: 117772 - RNA, 74 nt, Homo sapiens
caggcccagcacagaaacacaccagaggagaacgaacccccaacaggcagcacaggcaaccagcagcaaccaga

SEQ ID NO: 117773 - RNA, 38 nt, Homo sapiens
aagaaccacaaagaaaagaccacagcgccaaagagaag

SEQ ID NO: 117774 - RNA, 56 nt, Homo sapiens
cgcagaccgcagaaggccggagacaccagcagcaggaggccacgcgcagccccgga

SEQ ID NO: 117775 - RNA, 78 nt, Homo sapiens
acgccaagcacagccagccccaggggaaccaccccaagggcgccggggaggcagaaggggccgggagcggcccggccc

SEQ ID NO: 117776 - RNA, 69 nt, Homo sapiens
aacacgcggccagacgggccccaagagaaagcagcagcgcgcagacaggacaaccagcggaggcacgac

SEQ ID NO: 117777 - RNA, 73 nt, Homo sapiens
gacgccccacgagaagagaagaggagaggaacacagccgcagaccagagaggacaaccaaaagcaccgaaccg

SEQ ID NO: 117778 - RNA, 73 nt, Homo sapiens
aagccaaagcaaaacagaggcgcagccccaaacgggaccaggagagcagcccgacccgggaacaccacaaacc

SEQ ID NO: 117779 - RNA, 68 nt, Homo sapiens
gggagaccaagagacagacaccgccccgagacgaggcgggacaagggcgcaccggggcgcagcgaggg

SEQ ID NO: 117780 - RNA, 77 nt, Homo sapiens
cagagacagaaagaacccaaggaccaagcccaggacccagcagcccccaagaaacaaacagggaccccgagccagcg

SEQ ID NO: 117781 - RNA, 71 nt, Homo sapiens
agcgcgccgcaacacacaggccaagccccaccgacacgaaggccaaagaaggcccgaagaggcacaggagc

SEQ ID NO: 117782 - RNA, 50 nt, Homo sapiens
gcgggccggcgcccagaaagggggggagccgcacgacccgaacgccagag

SEQ ID NO: 117783 - RNA, 56 nt, Homo sapiens
accacgacaaccagccggggcacaggagaacggacccacagacaaacacagagaag

SEQ ID NO: 117784 - RNA, 79 nt, Homo sapiens
aggggccacgcgggcccgaggcgcaccaagggcgaaggagccggcccaaggggacggcaagcagagaaagggaaacccg

SEQ ID NO: 117785 - RNA, 88 nt, Homo sapiens
gcgccagagagagaagacggggggcgaaaccaccaccaccgcccgcccccgcagggccgaggcagccaggcgcccagccggaaggcag

SEQ ID NO: 117786 - RNA, 85 nt, Homo sapiens
cgcgcgaagcggccaaagccgcccagacggccaccggcgggaggaacaaaaggaggaggaagccaagaacgggagcgaagccacg

SEQ ID NO: 117787 - RNA, 77 nt, Homo sapiens
ccccggcggcacggcgccgaccagcaccaggggaagcgggacaacgggggacaggacaacagaaaaacacacacagg

SEQ ID NO: 117788 - RNA, 91 nt, Homo sapiens
ccgacgaggagcgcggcgagacacggccagggcgcacccacgacgcgcacaccaccggcagaccggcgccacagcaccacccgacggcagc

SEQ ID NO: 117789 - RNA, 76 nt, Homo sapiens
cggccaccggcgggaggaacaaaagggcagggaggccaccagggcggaggcacccgccaaaggacccccgaaagcc

SEQ ID NO: 117790 - RNA, 74 nt, Homo sapiens
cgggccaagagcaggacagcacgagcagacagacaccaacaggcagaccacagaaacgaagccgggagaacgcc

SEQ ID NO: 117791 - RNA, 78 nt, Homo sapiens
agccgcccagacggccaccggcgggaggaacaaaaggaggcaacaggaagaagaaaccgcgaacagcgcaccacagaa

SEQ ID NO: 117792 - RNA, 75 nt, Homo sapiens
gaggccacacagaaggacggcccgacggaagagagaagagggggaaaaaggaaggccgccggacagcgcagagcc

SEQ ID NO: 117793 - RNA, 65 nt, Homo sapiens
acgggaaagaagggagcgacaccacagagagacagcaaagccccacccagacggcaggggaagac

SEQ ID NO: 117794 - RNA, 74 nt, Homo sapiens
caggcacaaagaagagccagcccgcccggcggaccaaagggggacccccaaaagacaagggcaaaacggaccag

SEQ ID NO: 117795 - RNA, 67 nt, Homo sapiens
caacaagagcgcaacaagagcgaacagagccgacaggcacgaagaaaaggaaaacccacgcgggggc

SEQ ID NO: 117796 - RNA, 71 nt, Homo sapiens
gagagggccggcaggcccgggaaggaaaaaaggagccagaagaacaggaagacgccagaaacccgcaaccc

SEQ ID NO: 117797 - RNA, 77 nt, Homo sapiens
gaggccgccacaaccgccagacaaccggagccacgccccacgaccgccaggaacaacccgccaccggacgaggagcc

SEQ ID NO: 117798 - RNA, 85 nt, Homo sapiens
cacgagcaggggggagcggcgcggaaacgcaagacgggccgagaagcagcgcgaggacaccaggggggaaaaaccacacaggcaa

SEQ ID NO: 117799 - RNA, 58 nt, Homo sapiens
gcccaaggccagcccgcagaagcagaagaaggacaccccacaccgaaacagaccccag

SEQ ID NO: 117800 - RNA, 57 nt, Homo sapiens
ccaccaagcacagacaagcagagcaaagacacagcaacgagggaagaaccaggcagg

SEQ ID NO: 117801 - RNA, 74 nt, Homo sapiens
gagcacgcgcgcagcgaagcccagggaggccaccaggacagaagacaaggagacgcagagaaacggcagaggcc

SEQ ID NO: 117802 - RNA, 89 nt, Homo sapiens
ggacccagaggacccagcagaccaagagcgaaggaagaggcaaagacgggacaacaaaacagaggagaccagaccagaagccccgaaaa

SEQ ID NO: 117803 - RNA, 67 nt, Homo sapiens
gaccagggaacgcaacaaagggaacggccagcaccaagggcaccaggagaaaggggcggacggcaca

SEQ ID NO: 117804 - RNA, 72 nt, Homo sapiens
acacccccaccaggacagccgacagcccgcccaggaagggacccgagcacgggcagcgggcggaggacgggg

SEQ ID NO: 117805 - RNA, 70 nt, Homo sapiens
gggagagcccggaaaggcccgcggcgaggagcgagcagagacggaagaaggcccaccagcagagagaacg

SEQ ID NO: 117806 - RNA, 82 nt, Homo sapiens
aagccgggcgaaagacaacagcggacacacacgaccacgggagggaacggaagaagccaggccaagagggagcccgcagaaa

SEQ ID NO: 117807 - RNA, 58 nt, Homo sapiens
caagagggaaaaaacaaggggagcaccccgggcgccccaggagacaccgcgccaggag

SEQ ID NO: 117808 - RNA, 82 nt, Homo sapiens
cgggggccaaccgaggagccacgcagcagcagagagcgcagaagacaggacaaaaagcccacacaacaccaggaggaccgaa

SEQ ID NO: 117809 - RNA, 64 nt, Homo sapiens
cccaggagcaggggcgcgcgggggccgcgcgcggaggcccaggggggcgcagacaagcaaaaga

SEQ ID NO: 117810 - RNA, 73 nt, Homo sapiens
ggcagcagaaagagcacagagagcgcagaagacaggacaaaaagcccacacaacaccaggaggaccgaaagac

SEQ ID NO: 117811 - RNA, 78 nt, Homo sapiens
ccgagcgaggaggccgaggccgggaggccggcccggaggagcccagaccgagaaccgggggaacgcgggcgccggaac

SEQ ID NO: 117812 - RNA, 58 nt, Homo sapiens
gagcagaacacggcgagcggcgaaggagaggaaaagaggacaaggcaagggaagcaca

SEQ ID NO: 117813 - RNA, 66 nt, Homo sapiens
cagaagcgaagcgggacagaacagccaccaaaacagaagacccagaggcaaagaaagcagaaggag

SEQ ID NO: 117814 - RNA, 81 nt, Homo sapiens
acccccccaagccggaagaaaaagaagcaccgcgggcacccggcggccggaggaggccaacgccgaccggaaggaagaccg

SEQ ID NO: 117815 - RNA, 82 nt, Homo sapiens
gagcacgcagccaggaaaccacgaggaaaaaacccaggaccaaaacagagaaaggagaccaagcgaagaacaccgcagagac

SEQ ID NO: 117816 - RNA, 77 nt, Homo sapiens
ggagcgcgaaggccgggacccggccccggcccacaggggggggcaaacccgagagaacggcagcccggcacagccac

SEQ ID NO: 117817 - RNA, 71 nt, Homo sapiens
acaaagcgcagggcggaagggaggcgggacccacgaggcgaacaagcacgcgccgggacaggaacgccgag

SEQ ID NO: 117818 - RNA, 74 nt, Homo sapiens
gggccggcacccaagaggagaagcagcccaccagaccacagccaggggcccaccagaagagccgacaagccggc

SEQ ID NO: 117819 - RNA, 39 nt, Homo sapiens
cccacagcaggggacagcacagaaagacgccacggaaaa

SEQ ID NO: 117820 - RNA, 73 nt, Homo sapiens
ggccccacgagagcggaggagagcgacaggacaaagccacaagaaagaccacacgagccggaccgcccgggac

SEQ ID NO: 117821 - RNA, 67 nt, Homo sapiens
gagcccccgggccagcaggaaccagaggaggggaggaaccaccacagaaagcaggagaacacacaga

SEQ ID NO: 117822 - RNA, 72 nt, Homo sapiens
gaaaaagaaaggggaagaacaggcaaggaagagccgcccggacaagagccgggaagcgggaaggcacggagc

SEQ ID NO: 117823 - RNA, 75 nt, Homo sapiens
acccacagagggagcgcaggggaaggaacgcgcagaaaacaaaggcaaggcgacaaacacaagacgggaggaaga

SEQ ID NO: 117824 - RNA, 83 nt, Homo sapiens
gcgggcagaagcgagagcaggggaaggagcacggccaggcaaggccccagcccaagcgggccgacgagaggaaagcacaaagg

SEQ ID NO: 117825 - RNA, 60 nt, Homo sapiens
ccggacccccccccggcgcccaagcggaagccgggacaaccagaggcgaagagcccaccc

SEQ ID NO: 117826 - RNA, 71 nt, Homo sapiens
ggagccaaagcaggccacaggaaagacagaaaacagggccagcccgaacagaacaggggaacgcccacaaa

SEQ ID NO: 117827 - RNA, 77 nt, Homo sapiens
cgaaacggaaaagaaacagaagaaacccacaagcaaccaacgcagccgcaaacgagcgacaaggcggaacagaaacc

SEQ ID NO: 117828 - RNA, 84 nt, Homo sapiens
acagcgaagccacccagcgccgagggaaggcgccgcgccaggccgggcgggcgaacccaccgcaggaccaggacaagggccagc

SEQ ID NO: 117829 - RNA, 80 nt, Homo sapiens
cagccaccgagaaggcacggcaccagacagaagacacggcccaggagaggagccaagcccaacgggacgggaaaacggcc

SEQ ID NO: 117830 - RNA, 76 nt, Homo sapiens
gggcgccaaagcgagagagggaagcgcccggccggaagcgagaaccaggaacgaagaacaaaggggaaaggcaaca

SEQ ID NO: 117831 - RNA, 70 nt, Homo sapiens
gaggcccgcacgaacgggagagccccaacggaaacgacgaccgagccaacgcccccccacgggagcacca

SEQ ID NO: 117832 - RNA, 76 nt, Homo sapiens
ccaaaaacaaaacgaaccaggacggcaaagccagccgagcgcccaggccacacacccagccaacccagacgcccag

SEQ ID NO: 117833 - RNA, 50 nt, Homo sapiens
agaggggcgccaggcccaggccggcaccgaggaggcacggagggagaccg

SEQ ID NO: 117834 - RNA, 69 nt, Homo sapiens
gacgacgcaccgcaggcagacaaaagggccaaagaagggagagagaaaggacgagaccgaagagaagga

SEQ ID NO: 117835 - RNA, 79 nt, Homo sapiens
gaccgaaccggaaaagaacagagggggacccggacaagcaagggggaaaaagcgcaagggcaaaaaacgacacagagag

SEQ ID NO: 117836 - RNA, 71 nt, Homo sapiens
gcaagccggcaacgcaaggagcacacaccagaaaccagaccgacagaaccccgggaagcgacccgcgggcc

SEQ ID NO: 117837 - RNA, 79 nt, Homo sapiens
aaggagcccagggagagaacacaggcccaccgcgcccccgcagaacggcagacggaagccggaacccaccaccacagcc

SEQ ID NO: 117838 - RNA, 81 nt, Homo sapiens
aagagccagacaacaggcgccaaaaaggagcaagaggcagggcaacggaacagaccagaaggagcaaggggaagaggaaaa

SEQ ID NO: 117839 - RNA, 81 nt, Homo sapiens
ccgaagcagccgggagccggagcgggcgcggacgccgaggcaccgaggcaccagaggaggccgggcgggggaggcgagaca

SEQ ID NO: 117840 - RNA, 68 nt, Homo sapiens
aggcgcagaggaccacgcagcaaggcgcacacaagcgggaggaagaaggaggaccaccggaccccgcc

SEQ ID NO: 117841 - RNA, 84 nt, Homo sapiens
gggggcccaggggggccaggcgacgaaggccagaacgaagcacaacaggcagcgggaaaaccgacacggagaaaacgcaggaag

SEQ ID NO: 117842 - RNA, 76 nt, Homo sapiens
ggaaagacacaccaccaagaagccagcaagcggccagcaagcgaggaccccagggggccgaaaagccaccgcggac

SEQ ID NO: 117843 - RNA, 73 nt, Homo sapiens
gagcacccagggaaaggagacaaggaccgaaacagaaacggaacaccaaggcaagaagcaccggagcacgacg

SEQ ID NO: 117844 - RNA, 84 nt, Homo sapiens
ggcgccagccagcgacgaccaaggcacgaggagaacaacagaacagagagaaacaccaccagagggagcacccagggaagaccc

SEQ ID NO: 117845 - RNA, 95 nt, Homo sapiens
caaccccaagcccgggccacccgcgcgggggcgaggcggagcaggccggcgcggacggaagcacaggcgcaccagcgagcccgcgccgcccgcag

SEQ ID NO: 117846 - RNA, 79 nt, Homo sapiens
ccgcccgccgcagacacgggacccgccgaggccgcggcgccaaaccgagaagacgcgcgcccagcaagggaccacaccc

SEQ ID NO: 117847 - RNA, 77 nt, Homo sapiens
gggaccgaaaacagaaaggaaggccacgaccggaagggcaaaacaagccaaccgaaagaaaagaaaaggcgcggaca

SEQ ID NO: 117848 - RNA, 68 nt, Homo sapiens
agaaaaccccccaggggaaaaagcagcaagggcaacaaagagcgcgcccaggagaagggagcaggaga

SEQ ID NO: 117849 - RNA, 83 nt, Homo sapiens
ggggccaccagggccaccaaccccacccagacgaagccgaagaaaagaggcgggcagcagcggcgcacaaaagcaggaaaggc

SEQ ID NO: 117850 - RNA, 76 nt, Homo sapiens
gagggccgagggagggccgagccagccgcggccggaggagcccccaggccgcacacccccaaaaggacgaccaaaa

SEQ ID NO: 117851 - RNA, 67 nt, Homo sapiens
gaaggcggagagagagaacgccgcacagagaacaacggaaggacaacagaccgcggcgccagcaagg

SEQ ID NO: 117852 - RNA, 58 nt, Homo sapiens
ggccaggaaagaagaaaggggcaaggggaggagaagcccaggaggagagggaggagca

SEQ ID NO: 117853 - RNA, 80 nt, Homo sapiens
aagcccccggggcaaaaggaagcaccgcgggaacagggagcacaaccgaagggccagcgcgggccgccagcggcggccac

SEQ ID NO: 117854 - RNA, 81 nt, Homo sapiens
gcgagcaggacgagaacagcaaccagaccccggagacgagaagaaaaggagggccgcccgaagaacacccacacaaagccc

SEQ ID NO: 117855 - RNA, 76 nt, Homo sapiens
ccaggacggaaaaaaacagagccgagaaaggaagggcgggaccaacagggagccaggggagaggccaaaggaacgg

SEQ ID NO: 117856 - RNA, 72 nt, Homo sapiens
ccgaccggaacccgagaccacaagcccaggagaaaccaggacggggcgcagaggcgccgcaccaagcggagg

SEQ ID NO: 117857 - RNA, 39 nt, Homo sapiens
ccacgaacgaggggagacgagacagccagcaaaggggga

SEQ ID NO: 117858 - RNA, 81 nt, Homo sapiens
accccaaggagcacgcagggcgagggaacagagagaaacccggcaagaaagcaaaagggaaagcaaggggaagggcccaag

SEQ ID NO: 117859 - RNA, 75 nt, Homo sapiens
aaaacagccaagcaccagaaggagagaaggaccgggcgaggccaccccgaggcaaggccccagaggaggaccaag

SEQ ID NO: 117860 - RNA, 86 nt, Homo sapiens
cgcgcgagaagcggggccgccgagccgcgcggcgggaagcggcgaccgccaccgggagggggaagagccggaaagccacacacgag

SEQ ID NO: 117861 - RNA, 77 nt, Homo sapiens
gcagcccagacggcggaccgaaggaggccgggaccacccagccagcggaagaagggggcacccgaggaggaagaggg

SEQ ID NO: 117862 - RNA, 79 nt, Homo sapiens
aaaagaggagagaaggaaaagaaaagcgggaacgaccggggggaagaaggacagaacaagaggagccgccgcacccagg

SEQ ID NO: 117863 - RNA, 77 nt, Homo sapiens
gaaagccgggccccgagggcggaccgagacaagagagggcggcagaaggaacaccgagaaaccgcacaccggagacg

SEQ ID NO: 117864 - RNA, 77 nt, Homo sapiens
gcgccgccccaccccggaacccgcggggcggaccggagaagccccgagcaccccacaggccaaaacaaaggggaggg

SEQ ID NO: 117865 - RNA, 117 nt, Homo sapiens
agggcccggaaggaagccccgggagaaacaccaaccggccagcaggcgaagaggagacaaaaggaaacaggagaagggcacccaagaagaccgaaggggagcaagcaggccaggggc

SEQ ID NO: 117866 - RNA, 93 nt, Homo sapiens
gcccagagcgccacggagaagccgccgaagagaccagccgacagcgaccaaggccagagcgaaaggccacggccagccgccggcacgcagcgc

SEQ ID NO: 117867 - RNA, 77 nt, Homo sapiens
ggacccgccagaggaccaacagggacggagcggagaaaaggaaccggccccggagccgccgaggaggagcagcagcg

SEQ ID NO: 117868 - RNA, 63 nt, Homo sapiens
aaaaacccgaacaccagggagaagcaaagacggcaagggcagccgccaggaccgaaaggcggc

SEQ ID NO: 117869 - RNA, 71 nt, Homo sapiens
gggaagaaaacccaaagaagagaggaagaagaccccaagcaaggagaaaccagaggcaagcgacgggaagg

SEQ ID NO: 117870 - RNA, 54 nt, Homo sapiens
cgagagccaacggcacgggggcaacaacacggcaccacacaagcgaagaagccg

SEQ ID NO: 117871 - RNA, 77 nt, Homo sapiens
agcccggaaaaccagaccagaaacggaggagcccgccgaagcagagccagcagaggccaaggcagcagcgaagaaga

SEQ ID NO: 117872 - RNA, 75 nt, Homo sapiens
agcggcgagcgcgaaggcacgagcggagggagaacaagaacgcaggcaaccccaagcccagacagccgggggcgg

SEQ ID NO: 117873 - RNA, 71 nt, Homo sapiens
aaaagggcaagaagccagaaggaccggggcgacaggcacggcaagagaacagcccgaacaccacagaggag

SEQ ID NO: 117874 - RNA, 83 nt, Homo sapiens
agagcaccagagacaaggagagccaggaggagcgggccccaacccaccaaaagcacaggggagccgacccggggccaaccagc

SEQ ID NO: 117875 - RNA, 53 nt, Homo sapiens
aaggccacggacaaacgcgggggacaggcgcgcaggaaaccagggaggaaaca

SEQ ID NO: 117876 - RNA, 75 nt, Homo sapiens
ccgcccggacagagcccgggcgcgcagggcacccgaaaagaccagcaacaggacagcaggagcccaaccggagca

SEQ ID NO: 117877 - RNA, 73 nt, Homo sapiens
gccaccaggcgcaaaggcaaccacacaggaaccaacaaccaggacccagaggaacccgaaagcacgaaccagc

SEQ ID NO: 117878 - RNA, 40 nt, Homo sapiens
acagagacagagcaaaaccagaaagccaaggacacgcagg

SEQ ID NO: 117879 - RNA, 66 nt, Homo sapiens
gccgccgccgccgccagaacaaccgggcgccgacgagacggggccaaccgccccccagcagcaggc

SEQ ID NO: 117880 - RNA, 69 nt, Homo sapiens
acaccgccaaacccaggccagagcacagccccgggaacagagagaccagcgccccacaagaaacccaaa

SEQ ID NO: 117881 - RNA, 79 nt, Homo sapiens
acgggaaccgaagagagccgggcacagcaagagaagagcgacgcggcagcgagagagagagccgcagcaaagcagaagc

SEQ ID NO: 117882 - RNA, 57 nt, Homo sapiens
acgggaaagcgcaacaggacccaaacaggcgagagcccacgggcccgagggaaaacc

SEQ ID NO: 117883 - RNA, 57 nt, Homo sapiens
ccgcaggagggccaagaggaaacgggggcgcacaggaaacagaaaaaacagcaaagg

SEQ ID NO: 117884 - RNA, 76 nt, Homo sapiens
accaacgccaagcaccgaggaagcaacagggaaagcaggagcaaaggagagaagagaccccgaaggggaaaagaca

SEQ ID NO: 117885 - RNA, 55 nt, Homo sapiens
cgcagggcgcccccggagcgcaagacacagggcacagaagggaaaccaaaccaga

SEQ ID NO: 117886 - RNA, 64 nt, Homo sapiens
agcggccgcgcacccccggccggaggcaccagcgacccacccaggaggcagaaacacgccgcgc

SEQ ID NO: 117887 - RNA, 46 nt, Homo sapiens
cgggaaggagacgcgcagcgcgcggagcccccaaagacacacggac

SEQ ID NO: 117888 - RNA, 74 nt, Homo sapiens
ccaccaccccacccacgccccgccccagaagccgggcggcccgggacaggccaaggaagcacgggaagaacaga

SEQ ID NO: 117889 - RNA, 100 nt, Homo sapiens
gcgcgccgcccgggcgcggcccgcccgcccagaggcagaagcccggcagagcccgaggcgcgccaggaacccgagcagcacggcgcgcagaaggcagcgc

SEQ ID NO: 117890 - RNA, 73 nt, Homo sapiens
gcaagggaaagcgcgagacaggagagaccgacagagccacaagaaacaaaggcacggcacggccggcacaccc

SEQ ID NO: 117891 - RNA, 69 nt, Homo sapiens
aacgacacccccaagcaggggacagagaagaagggaaagcggcagaacggaagcagcggaaccgcaaag

SEQ ID NO: 117892 - RNA, 86 nt, Homo sapiens
ggcccgcgccgcaggaggccggcgaggagcgccgcgcccgcccgccacccaggcccaggaccgagcccgacgcccacagacaggcg

SEQ ID NO: 117893 - RNA, 68 nt, Homo sapiens
agcaacaaggcgcagggggaacagaggcagcggaagcggaagaaagaagagccaagaagggaagaaaa

SEQ ID NO: 117894 - RNA, 66 nt, Homo sapiens
gggaccgggcggcacgcacgcgggcagggaacaggcggagcggaaggagaccaggcccaggaagga

SEQ ID NO: 117895 - RNA, 67 nt, Homo sapiens
acccgggaggagaacagcagccgcaccaagagcaaaaggaaaaccacaccacacaggccgagaaaaa

SEQ ID NO: 117896 - RNA, 53 nt, Homo sapiens
gaagaggcgggaaagcgagagagaaggaagccaacaccggagccagaaagccg

SEQ ID NO: 117897 - RNA, 71 nt, Homo sapiens
acgcagccgagaccccgaaaaaggccgaaggaaccagcaaagaggcacacccaccagaagggagcgcgcgg

SEQ ID NO: 117898 - RNA, 75 nt, Homo sapiens
gcgaggccaggcaaaggaaccacccaggaaacagcgcaaggagggagccggaaacaaagaagaggagaaaaagcc

SEQ ID NO: 117899 - RNA, 64 nt, Homo sapiens
cgaagggaagaacacaccagggcagacacgaaaaaaaaggggaagcacagcaacccccacaccc
